United States Patent Application Publication US 2011/0177960 A1 - sequence listing, part 22

SEQ ID NO: 389796 - DNA, 25 bp, Artificial
  probe
  misc_feature (1)..(25): SEQ ID NO: 4744; WAN024AH5; Start 59; Stop 83
attttctcaagttggaggaagggga

SEQ ID NO: 389797 - DNA, 25 bp, Artificial
  probe
  misc_feature (1)..(25): SEQ ID NO: 4744; WAN024AH5; Start 39; Stop 63
tattttatcacgttccaaggatttt

SEQ ID NO: 389798 - DNA, 25 bp, Artificial
  probe
  misc_feature (1)..(25): SEQ ID NO: 4744; WAN024AH5; Start 38; Stop 62
ttattttatcacgttccaaggattt

SEQ ID NO: 389799 - DNA, 25 bp, Artificial
  probe
  misc_feature (1)..(25): SEQ ID NO: 4744; WAN024AH5; Start 37; Stop 61
tttattttatcacgttccaaggatt

SEQ ID NO: 389800 - DNA, 25 bp, Artificial
  probe
  misc_feature (1)..(25): SEQ ID NO: 4744; WAN024AH5; Start 32; Stop 56
tatcctttattttatcacgttccaa

SEQ ID NO: 389801 - DNA, 25 bp, Artificial
  probe
  misc_feature (1)..(25): SEQ ID NO: 4744; WAN024AH5; Start 31; Stop 55
ttatcctttattttatcacgttcca

SEQ ID NO: 389802 - DNA, 25 bp, Artificial
  probe
  misc_feature (1)..(25): SEQ ID NO: 4744; WAN024AH5; Start 28; Stop 52
tccttatcctttattttatcacgtt

SEQ ID NO: 389803 - DNA, 25 bp, Artificial
  probe
  misc_feature (1)..(25): SEQ ID NO: 4744; WAN024AH5; Start 60; Stop 84
ttttctcaagttggaggaaggggac

SEQ ID NO: 389804 - DNA, 25 bp, Artificial
  probe
  misc_feature (1)..(25): SEQ ID NO: 4744; WAN024AH5; Start 30; Stop 54
cttatcctttattttatcacgttcc

SEQ ID NO: 389805 - DNA, 25 bp, Artificial
  probe
  misc_feature (1)..(25): SEQ ID NO: 4744; WAN024AH5; Start 29; Stop 53
ccttatcctttattttatcacgttc

SEQ ID NO: 389806 - DNA, 25 bp, Artificial
  probe
  misc_feature (1)..(25): SEQ ID NO: 4744; WAN024AH5; Start 27; Stop 51
atccttatcctttattttatcacgt

SEQ ID NO: 389807 - DNA, 25 bp, Artificial
  probe
  misc_feature (1)..(25): SEQ ID NO: 4744; WAN024AH5; Start 26; Stop 50
aatccttatcctttattttatcacg

SEQ ID NO: 389808 - DNA, 25 bp, Artificial
  probe
  misc_feature (1)..(25): SEQ ID NO: 4744; WAN024AH5; Start 35; Stop 59
cctttattttatcacgttccaagga

SEQ ID NO: 389809 - DNA, 25 bp, Artificial
  probe
  misc_feature (1)..(25): SEQ ID NO: 4744; WAN024AH5; Start 34; Stop 58
tcctttattttatcacgttccaagg

SEQ ID NO: 389810 - DNA, 25 bp, Artificial
  probe
  misc_feature (1)..(25): SEQ ID NO: 4744; WAN024AH5; Start 49; Stop 73
cgttccaaggattttctcaagttgg

SEQ ID NO: 389811 - DNA, 25 bp, Artificial
  probe
  misc_feature (1)..(25): SEQ ID NO: 4744; WAN024AH5; Start 53; Stop 77
ccaaggattttctcaagttggagga

SEQ ID NO: 389812 - DNA, 25 bp, Artificial
  probe
  misc_feature (1)..(25): SEQ ID NO: 4745; WAN0249EC; Start 47; Stop 71
ccataaaagagtaaattagttcgga

SEQ ID NO: 389813 - DNA, 25 bp, Artificial
  probe
  misc_feature (1)..(25): SEQ ID NO: 4745; WAN0249EC; Start 46; Stop 70
tccataaaagagtaaattagttcgg

SEQ ID NO: 389814 - DNA, 25 bp, Artificial
  probe
  misc_feature (1)..(25): SEQ ID NO: 4745; WAN0249EC; Start 27; Stop 51
agctatttactatcatctttccata

SEQ ID NO: 389815 - DNA, 25 bp, Artificial
  probe
  misc_feature (1)..(25): SEQ ID NO: 4745; WAN0249EC; Start 25; Stop 49
ctagctatttactatcatctttcca

SEQ ID NO: 389816 - DNA, 25 bp, Artificial
  probe
  misc_feature (1)..(25): SEQ ID NO: 4745; WAN0249EC; Start 24; Stop 48
actagctatttactatcatctttcc

SEQ ID NO: 389817 - DNA, 25 bp, Artificial
  probe
  misc_feature (1)..(25): SEQ ID NO: 4745; WAN0249EC; Start 48; Stop 72
cataaaagagtaaattagttcggaa

SEQ ID NO: 389818 - DNA, 25 bp, Artificial
  probe
  misc_feature (1)..(25): SEQ ID NO: 4745; WAN0249EC; Start 45; Stop 69
ttccataaaagagtaaattagttcg

SEQ ID NO: 389819 - DNA, 25 bp, Artificial
  probe
  misc_feature (1)..(25): SEQ ID NO: 4745; WAN0249EC; Start 51; Stop 75
aaaagagtaaattagttcggaaatt

SEQ ID NO: 389820 - DNA, 25 bp, Artificial
  probe
  misc_feature (1)..(25): SEQ ID NO: 4745; WAN0249EC; Start 26; Stop 50
tagctatttactatcatctttccat

SEQ ID NO: 389821 - DNA, 25 bp, Artificial
  probe
  misc_feature (1)..(25): SEQ ID NO: 4745; WAN0249EC; Start 52; Stop 76
aaagagtaaattagttcggaaattt

SEQ ID NO: 389822 - DNA, 25 bp, Artificial
  probe
  misc_feature (1)..(25): SEQ ID NO: 4745; WAN0249EC; Start 64; Stop 88
agttcggaaatttactaaaattacc

SEQ ID NO: 389823 - DNA, 25 bp, Artificial
  probe
  misc_feature (1)..(25): SEQ ID NO: 4745; WAN0249EC; Start 35; Stop 59
actatcatctttccataaaagagta

SEQ ID NO: 389824 - DNA, 25 bp, Artificial
  probe
  misc_feature (1)..(25): SEQ ID NO: 4745; WAN0249EC; Start 34; Stop 58
tactatcatctttccataaaagagt

SEQ ID NO: 389825 - DNA, 25 bp, Artificial
  probe
  misc_feature (1)..(25): SEQ ID NO: 4746; WAN024AK3; Start 75; Stop 99
tatcttctatttaggacaagagttt

SEQ ID NO: 389826 - DNA, 25 bp, Artificial
  probe
  misc_feature (1)..(25): SEQ ID NO: 4746; WAN024AK3; Start 74; Stop 98
ttatcttctatttaggacaagagtt

SEQ ID NO: 389827 - DNA, 25 bp, Artificial
  probe
  misc_feature (1)..(25): SEQ ID NO: 4746; WAN024AK3; Start 73; Stop 97
tttatcttctatttaggacaagagt

SEQ ID NO: 389828 - DNA, 25 bp, Artificial
  probe
  misc_feature (1)..(25): SEQ ID NO: 4746; WAN024AK3; Start 17; Stop 41
ccacaattggaaatatctagctttt

SEQ ID NO: 389829 - DNA, 25 bp, Artificial
  probe
  misc_feature (1)..(25): SEQ ID NO: 4746; WAN024AK3; Start 16; Stop 40
tccacaattggaaatatctagcttt

SEQ ID NO: 389830 - DNA, 25 bp, Artificial
  probe
  misc_feature (1)..(25): SEQ ID NO: 4746; WAN024AK3; Start 76; Stop 100
atcttctatttaggacaagagtttt

SEQ ID NO: 389831 - DNA, 25 bp, Artificial
  probe
  misc_feature (1)..(25): SEQ ID NO: 4747; WAN0249XX; Start 247; Stop 271
gcagaagtggtttacaaatgaagat

SEQ ID NO: 389832 - DNA, 25 bp, Artificial
  probe
  misc_feature (1)..(25): SEQ ID NO: 4747; WAN0249XX; Start 12; Stop 36
atgacaataacccactccgaaataa

SEQ ID NO: 389833 - DNA, 25 bp, Artificial
  probe
  misc_feature (1)..(25): SEQ ID NO: 4747; WAN0249XX; Start 11; Stop 35
aatgacaataacccactccgaaata

SEQ ID NO: 389834 - DNA, 25 bp, Artificial
  probe
  misc_feature (1)..(25): SEQ ID NO: 4747; WAN0249XX; Start 13; Stop 37
tgacaataacccactccgaaataag

SEQ ID NO: 389835 - DNA, 25 bp, Artificial
  probe
  misc_feature (1)..(25): SEQ ID NO: 4747; WAN0249XX; Start 29; Stop 53
cgaaataagtaggagtatcagttgg

SEQ ID NO: 389836 - DNA, 25 bp, Artificial
  probe
  misc_feature (1)..(25): SEQ ID NO: 4747; WAN0249XX; Start 28; Stop 52
ccgaaataagtaggagtatcagttg

SEQ ID NO: 389837 - DNA, 25 bp, Artificial
  probe
  misc_feature (1)..(25): SEQ ID NO: 4747; WAN0249XX; Start 10; Stop 34
gaatgacaataacccactccgaaat

SEQ ID NO: 389838 - DNA, 25 bp, Artificial
  probe
  misc_feature (1)..(25): SEQ ID NO: 4747; WAN0249XX; Start 214; Stop 238
tacttgtaaagcacttgaagcaaat

SEQ ID NO: 389839 - DNA, 25 bp, Artificial
  probe
  misc_feature (1)..(25): SEQ ID NO: 4747; WAN0249XX; Start 32; Stop 56
aataagtaggagtatcagttggatt

SEQ ID NO: 389840 - DNA, 25 bp, Artificial
  probe
  misc_feature (1)..(25): SEQ ID NO: 4747; WAN0249XX; Start 17; Stop 41
aataacccactccgaaataagtagg

SEQ ID NO: 389841 - DNA, 25 bp, Artificial
  probe
  misc_feature (1)..(25): SEQ ID NO: 4747; WAN0249XX; Start 15; Stop 39
acaataacccactccgaaataagta

SEQ ID NO: 389842 - DNA, 25 bp, Artificial
  probe
  misc_feature (1)..(25): SEQ ID NO: 4747; WAN0249XX; Start 215; Stop 239
acttgtaaagcacttgaagcaaatc

SEQ ID NO: 389843 - DNA, 25 bp, Artificial
  probe
  misc_feature (1)..(25): SEQ ID NO: 4747; WAN0249XX; Start 218; Stop 242
tgtaaagcacttgaagcaaatccta

SEQ ID NO: 389844 - DNA, 25 bp, Artificial
  probe
  misc_feature (1)..(25): SEQ ID NO: 4747; WAN0249XX; Start 16; Stop 40
caataacccactccgaaataagtag

SEQ ID NO: 389845 - DNA, 25 bp, Artificial
  probe
  misc_feature (1)..(25): SEQ ID NO: 4747; WAN0249XX; Start 14; Stop 38
gacaataacccactccgaaataagt

SEQ ID NO: 389846 - DNA, 25 bp, Artificial
  probe
  misc_feature (1)..(25): SEQ ID NO: 4747; WAN0249XX; Start 219; Stop 243
gtaaagcacttgaagcaaatcctag

SEQ ID NO: 389847 - DNA, 25 bp, Artificial
  probe
  misc_feature (1)..(25): SEQ ID NO: 4747; WAN0249XX; Start 216; Stop 240
cttgtaaagcacttgaagcaaatcc

SEQ ID NO: 389848 - DNA, 25 bp, Artificial
  probe
  misc_feature (1)..(25): SEQ ID NO: 4747; WAN0249XX; Start 202; Stop 226
cgtgttatactgtacttgtaaagca

SEQ ID NO: 389849 - DNA, 25 bp, Artificial
  probe
  misc_feature (1)..(25): SEQ ID NO: 4747; WAN0249XX; Start 246; Stop 270
cgcagaagtggtttacaaatgaaga

SEQ ID NO: 389850 - DNA, 25 bp, Artificial
  probe
  misc_feature (1)..(25): SEQ ID NO: 4747; WAN0249XX; Start 245; Stop 269
tcgcagaagtggtttacaaatgaag

SEQ ID NO: 389851 - DNA, 25 bp, Artificial
  probe
  misc_feature (1)..(25): SEQ ID NO: 4747; WAN0249XX; Start 213; Stop 237
gtacttgtaaagcacttgaagcaaa

SEQ ID NO: 389852 - DNA, 25 bp, Artificial
  probe
  misc_feature (1)..(25): SEQ ID NO: 4747; WAN0249XX; Start 209; Stop 233
tactgtacttgtaaagcacttgaag

SEQ ID NO: 389853 - DNA, 25 bp, Artificial
  probe
  misc_feature (1)..(25): SEQ ID NO: 4747; WAN0249XX; Start 201; Stop 225
tcgtgttatactgtacttgtaaagc

SEQ ID NO: 389854 - DNA, 25 bp, Artificial
  probe
  misc_feature (1)..(25): SEQ ID NO: 4747; WAN0249XX; Start 217; Stop 241
ttgtaaagcacttgaagcaaatcct

SEQ ID NO: 389855 - DNA, 25 bp, Artificial
  probe
  misc_feature (1)..(25): SEQ ID NO: 4747; WAN0249XX; Start 244; Stop 268
gtcgcagaagtggtttacaaatgaa

SEQ ID NO: 389856 - DNA, 25 bp, Artificial
  probe
  misc_feature (1)..(25): SEQ ID NO: 4747; WAN0249XX; Start 212; Stop 236
tgtacttgtaaagcacttgaagcaa

SEQ ID NO: 389857 - DNA, 25 bp, Artificial
  probe
  misc_feature (1)..(25): SEQ ID NO: 4747; WAN0249XX; Start 241; Stop 265
taggtcgcagaagtggtttacaaat

SEQ ID NO: 389858 - DNA, 25 bp, Artificial
  probe
  misc_feature (1)..(25): SEQ ID NO: 4747; WAN0249XX; Start 208; Stop 232
atactgtacttgtaaagcacttgaa

SEQ ID NO: 389859 - DNA, 25 bp, Artificial
  probe
  misc_feature (1)..(25): SEQ ID NO: 4747; WAN0249XX; Start 30; Stop 54
gaaataagtaggagtatcagttgga

SEQ ID NO: 389860 - DNA, 25 bp, Artificial
  probe
  misc_feature (1)..(25): SEQ ID NO: 4747; WAN0249XX; Start 211; Stop 235
ctgtacttgtaaagcacttgaagca

SEQ ID NO: 389861 - DNA, 25 bp, Artificial
  probe
  misc_feature (1)..(25): SEQ ID NO: 4747; WAN0249XX; Start 210; Stop 234
actgtacttgtaaagcacttgaagc

SEQ ID NO: 389862 - DNA, 25 bp, Artificial
  probe
  misc_feature (1)..(25): SEQ ID NO: 4747; WAN0249XX; Start 18; Stop 42
ataacccactccgaaataagtagga

SEQ ID NO: 389863 - DNA, 25 bp, Artificial
  probe
  misc_feature (1)..(25): SEQ ID NO: 4747; WAN0249XX; Start 204; Stop 228
tgttatactgtacttgtaaagcact

SEQ ID NO: 389864 - DNA, 25 bp, Artificial
  probe
  misc_feature (1)..(25): SEQ ID NO: 4748; WAN0249MV; Start 21; Stop 45
tgagaactcactcgatataagcaat

SEQ ID NO: 389865 - DNA, 25 bp, Artificial
  probe
  misc_feature (1)..(25): SEQ ID NO: 4748; WAN0249MV; Start 20; Stop 44
atgagaactcactcgatataagcaa

SEQ ID NO: 389866 - DNA, 25 bp, Artificial
  probe
  misc_feature (1)..(25): SEQ ID NO: 4748; WAN0249MV; Start 19; Stop 43
tatgagaactcactcgatataagca

SEQ ID NO: 389867 - DNA, 25 bp, Artificial
  probe
  misc_feature (1)..(25): SEQ ID NO: 4748; WAN0249MV; Start 12; Stop 36
tcactaatatgagaactcactcgat

SEQ ID NO: 389868 - DNA, 25 bp, Artificial
  probe
  misc_feature (1)..(25): SEQ ID NO: 4748; WAN0249MV; Start 22; Stop 46
gagaactcactcgatataagcaatt

SEQ ID NO: 389869 - DNA, 25 bp, Artificial
  probe
  misc_feature (1)..(25): SEQ ID NO: 4748; WAN0249MV; Start 23; Stop 47
agaactcactcgatataagcaatta

SEQ ID NO: 389870 - DNA, 25 bp, Artificial
  probe
  misc_feature (1)..(25): SEQ ID NO: 4748; WAN0249MV; Start 18; Stop 42
atatgagaactcactcgatataagc

SEQ ID NO: 389871 - DNA, 25 bp, Artificial
  probe
  misc_feature (1)..(25): SEQ ID NO: 4748; WAN0249MV; Start 13; Stop 37
cactaatatgagaactcactcgata

SEQ ID NO: 389872 - DNA, 25 bp, Artificial
  probe
  misc_feature (1)..(25): SEQ ID NO: 4748; WAN0249MV; Start 24; Stop 48
gaactcactcgatataagcaattaa

SEQ ID NO: 389873 - DNA, 25 bp, Artificial
  probe
  misc_feature (1)..(25): SEQ ID NO: 4748; WAN0249MV; Start 88; Stop 112
acatttgtatttcatcactctcttt

SEQ ID NO: 389874 - DNA, 25 bp, Artificial
  probe
  misc_feature (1)..(25): SEQ ID NO: 4748; WAN0249MV; Start 10; Stop 34
cctcactaatatgagaactcactcg

SEQ ID NO: 389875 - DNA, 25 bp, Artificial
  probe
  misc_feature (1)..(25): SEQ ID NO: 4748; WAN0249MV; Start 9; Stop 33
tcctcactaatatgagaactcactc

SEQ ID NO: 389876 - DNA, 25 bp, Artificial
  probe
  misc_feature (1)..(25): SEQ ID NO: 4748; WAN0249MV; Start 14; Stop 38
actaatatgagaactcactcgatat

SEQ ID NO: 389877 - DNA, 25 bp, Artificial
  probe
  misc_feature (1)..(25): SEQ ID NO: 4748; WAN0249MV; Start 8; Stop 32
ttcctcactaatatgagaactcact

SEQ ID NO: 389878 - DNA, 25 bp, Artificial
  probe
  misc_feature (1)..(25): SEQ ID NO: 4748; WAN0249MV; Start 11; Stop 35
ctcactaatatgagaactcactcga

SEQ ID NO: 389879 - DNA, 25 bp, Artificial
  probe
  misc_feature (1)..(25): SEQ ID NO: 4748; WAN0249MV; Start 7; Stop 31
attcctcactaatatgagaactcac

SEQ ID NO: 389880 - DNA, 25 bp, Artificial
  probe
  misc_feature (1)..(25): SEQ ID NO: 4748; WAN0249MV; Start 87; Stop 111
tacatttgtatttcatcactctctt

SEQ ID NO: 389881 - DNA, 25 bp, Artificial
  probe
  misc_feature (1)..(25): SEQ ID NO: 4748; WAN0249MV; Start 86; Stop 110
ttacatttgtatttcatcactctct

SEQ ID NO: 389882 - DNA, 25 bp, Artificial
  probe
  misc_feature (1)..(25): SEQ ID NO: 4748; WAN0249MV; Start 25; Stop 49
aactcactcgatataagcaattaaa

SEQ ID NO: 389883 - DNA, 25 bp, Artificial
  probe
  misc_feature (1)..(25): SEQ ID NO: 4748; WAN0249MV; Start 17; Stop 41
aatatgagaactcactcgatataag

SEQ ID NO: 389884 - DNA, 25 bp, Artificial
  probe
  misc_feature (1)..(25): SEQ ID NO: 4748; WAN0249MV; Start 6; Stop 30
aattcctcactaatatgagaactca

SEQ ID NO: 389885 - DNA, 25 bp, Artificial
  probe
  misc_feature (1)..(25): SEQ ID NO: 4748; WAN0249MV; Start 85; Stop 109
attacatttgtatttcatcactctc

SEQ ID NO: 389886 - DNA, 25 bp, Artificial
  probe
  misc_feature (1)..(25): SEQ ID NO: 4748; WAN0249MV; Start 81; Stop 105
acctattacatttgtatttcatcac

SEQ ID NO: 389887 - DNA, 25 bp, Artificial
  probe
  misc_feature (1)..(25): SEQ ID NO: 4748; WAN0249MV; Start 15; Stop 39
ctaatatgagaactcactcgatata

SEQ ID NO: 389888 - DNA, 25 bp, Artificial
  probe
  misc_feature (1)..(25): SEQ ID NO: 4748; WAN0249MV; Start 82; Stop 106
cctattacatttgtatttcatcact

SEQ ID NO: 389889 - DNA, 25 bp, Artificial
  probe
  misc_feature (1)..(25): SEQ ID NO: 4748; WAN0249MV; Start 89; Stop 113
catttgtatttcatcactctctttt

SEQ ID NO: 389890 - DNA, 25 bp, Artificial
  probe
  misc_feature (1)..(25): SEQ ID NO: 4748; WAN0249MV; Start 26; Stop 50
actcactcgatataagcaattaaaa

SEQ ID NO: 389891 - DNA, 25 bp, Artificial
  probe
  misc_feature (1)..(25): SEQ ID NO: 4748; WAN0249MV; Start 99; Stop 123
tcatcactctcttttatatttcctt

SEQ ID NO: 389892 - DNA, 25 bp, Artificial
  probe
  misc_feature (1)..(25): SEQ ID NO: 4748; WAN0249MV; Start 98; Stop 122
ttcatcactctcttttatatttcct

SEQ ID NO: 389893 - DNA, 25 bp, Artificial
  probe
  misc_feature (1)..(25): SEQ ID NO: 4748; WAN0249MV; Start 100; Stop 124
catcactctcttttatatttccttc

SEQ ID NO: 389894 - DNA, 25 bp, Artificial
  probe
  misc_feature (1)..(25): SEQ ID NO: 4748; WAN0249MV; Start 5; Stop 29
aaattcctcactaatatgagaactc

SEQ ID NO: 389895 - DNA, 25 bp, Artificial
  probe
  misc_feature (1)..(25): SEQ ID NO: 4748; WAN0249MV; Start 101; Stop 125
atcactctcttttatatttccttct

SEQ ID NO: 389896 - DNA, 25 bp, Artificial
  probe
  misc_feature (1)..(25): SEQ ID NO: 4748; WAN0249MV; Start 97; Stop 121
tttcatcactctcttttatatttcc

SEQ ID NO: 389897 - DNA, 25 bp, Artificial
  probe
  misc_feature (1)..(25): SEQ ID NO: 4749; WAN024A66; Start 5; Stop 29
aacagtagttatttgccttgataaa

SEQ ID NO: 389898 - DNA, 25 bp, Artificial
  probe
  misc_feature (1)..(25): SEQ ID NO: 4749; WAN024A66; Start 4; Stop 28
aaacagtagttatttgccttgataa

SEQ ID NO: 389899 - DNA, 25 bp, Artificial
  probe
  misc_feature (1)..(25): SEQ ID NO: 4749; WAN024A66; Start 1; Stop 25
ttaaaacagtagttatttgccttga

SEQ ID NO: 389900 - DNA, 25 bp, Artificial
  probe
  misc_feature (1)..(25): SEQ ID NO: 4749; WAN024A66; Start 19; Stop 43
gccttgataaaattgaaagcatatt

SEQ ID NO: 389901 - DNA, 25 bp, Artificial
  probe
  misc_feature (1)..(25): SEQ ID NO: 4749; WAN024A66; Start 6; Stop 30
acagtagttatttgccttgataaaa

SEQ ID NO: 389902 - DNA, 25 bp, Artificial
  probe
  misc_feature (1)..(25): SEQ ID NO: 4749; WAN024A66; Start 3; Stop 27
aaaacagtagttatttgccttgata

SEQ ID NO: 389903 - DNA, 25 bp, Artificial
  probe
  misc_feature (1)..(25): SEQ ID NO: 4749; WAN024A66; Start 2; Stop 26
taaaacagtagttatttgccttgat

SEQ ID NO: 389904 - DNA, 25 bp, Artificial
  probe
  misc_feature (1)..(25): SEQ ID NO: 4749; WAN024A66; Start 14; Stop 38
tatttgccttgataaaattgaaagc

SEQ ID NO: 389905 - DNA, 25 bp, Artificial
  probe
  misc_feature (1)..(25): SEQ ID NO: 4749; WAN024A66; Start 68; Stop 92
tgaagtaatattcaaggagaatcaa

SEQ ID NO: 389906 - DNA, 25 bp, Artificial
  probe
  misc_feature (1)..(25): SEQ ID NO: 4749; WAN024A66; Start 16; Stop 40
tttgccttgataaaattgaaagcat

SEQ ID NO: 389907 - DNA, 25 bp, Artificial
  probe
  misc_feature (1)..(25): SEQ ID NO: 4749; WAN024A66; Start 15; Stop 39
atttgccttgataaaattgaaagca

SEQ ID NO: 389908 - DNA, 25 bp, Artificial
  probe
  misc_feature (1)..(25): SEQ ID NO: 4749; WAN024A66; Start 17; Stop 41
ttgccttgataaaattgaaagcata

SEQ ID NO: 389909 - DNA, 25 bp, Artificial
  probe
  misc_feature (1)..(25): SEQ ID NO: 4749; WAN024A66; Start 18; Stop 42
tgccttgataaaattgaaagcatat

SEQ ID NO: 389910 - DNA, 25 bp, Artificial
  probe
  misc_feature (1)..(25): SEQ ID NO: 4749; WAN024A66; Start 11; Stop 35
agttatttgccttgataaaattgaa

SEQ ID NO: 389911 - DNA, 25 bp, Artificial
  probe
  misc_feature (1)..(25): SEQ ID NO: 4749; WAN024A66; Start 7; Stop 31
cagtagttatttgccttgataaaat

SEQ ID NO: 389912 - DNA, 25 bp, Artificial
  probe
  misc_feature (1)..(25): SEQ ID NO: 4749; WAN024A66; Start 20; Stop 44
ccttgataaaattgaaagcatattc

SEQ ID NO: 389913 - DNA, 25 bp, Artificial
  probe
  misc_feature (1)..(25): SEQ ID NO: 4749; WAN024A66; Start 12; Stop 36
gttatttgccttgataaaattgaaa

SEQ ID NO: 389914 - DNA, 25 bp, Artificial
  probe
  misc_feature (1)..(25): SEQ ID NO: 4749; WAN024A66; Start 9; Stop 33
gtagttatttgccttgataaaattg

SEQ ID NO: 389915 - DNA, 25 bp, Artificial
  probe
  misc_feature (1)..(25): SEQ ID NO: 4749; WAN024A66; Start 10; Stop 34
tagttatttgccttgataaaattga

SEQ ID NO: 389916 - DNA, 25 bp, Artificial
  probe
  misc_feature (1)..(25): SEQ ID NO: 4749; WAN024A66; Start 8; Stop 32
agtagttatttgccttgataaaatt

SEQ ID NO: 389917 - DNA, 25 bp, Artificial
  probe
  misc_feature (1)..(25): SEQ ID NO: 4749; WAN024A66; Start 13; Stop 37
ttatttgccttgataaaattgaaag

SEQ ID NO: 389918 - DNA, 25 bp, Artificial
  probe
  misc_feature (1)..(25): SEQ ID NO: 4749; WAN024A66; Start 67; Stop 91
ttgaagtaatattcaaggagaatca

SEQ ID NO: 389919 - DNA, 25 bp, Artificial
  probe
  misc_feature (1)..(25): SEQ ID NO: 4750; WAN0249QX; Start 45; Stop 69
aatttctatcaccagcacctcacca

SEQ ID NO: 389920 - DNA, 25 bp, Artificial
  probe
  misc_feature (1)..(25): SEQ ID NO: 4750; WAN0249QX; Start 44; Stop 68
aaatttctatcaccagcacctcacc

SEQ ID NO: 389921 - DNA, 25 bp, Artificial
  probe
  misc_feature (1)..(25): SEQ ID NO: 4750; WAN0249QX; Start 165; Stop 189
tgactatataatactagaccatcct

SEQ ID NO: 389922 - DNA, 25 bp, Artificial
  probe
  misc_feature (1)..(25): SEQ ID NO: 4750; WAN0249QX; Start 145; Stop 169
gttaggaggtctttatttaatgact

SEQ ID NO: 389923 - DNA, 25 bp, Artificial
  probe
  misc_feature (1)..(25): SEQ ID NO: 4750; WAN0249QX; Start 144; Stop 168
agttaggaggtctttatttaatgac

SEQ ID NO: 389924 - DNA, 25 bp, Artificial
  probe
  misc_feature (1)..(25): SEQ ID NO: 4750; WAN0249QX; Start 177; Stop 201
actagaccatccttaaattttgctt

SEQ ID NO: 389925 - DNA, 25 bp, Artificial
  probe
  misc_feature (1)..(25): SEQ ID NO: 4750; WAN0249QX; Start 46; Stop 70
atttctatcaccagcacctcaccac

SEQ ID NO: 389926 - DNA, 25 bp, Artificial
  probe
  misc_feature (1)..(25): SEQ ID NO: 4750; WAN0249QX; Start 143; Stop 167
aagttaggaggtctttatttaatga

SEQ ID NO: 389927 - DNA, 25 bp, Artificial
  probe
  misc_feature (1)..(25): SEQ ID NO: 4750; WAN0249QX; Start 43; Stop 67
aaaatttctatcaccagcacctcac

SEQ ID NO: 389928 - DNA, 25 bp, Artificial
  probe
  misc_feature (1)..(25): SEQ ID NO: 4750; WAN0249QX; Start 176; Stop 200
tactagaccatccttaaattttgct

SEQ ID NO: 389929 - DNA, 25 bp, Artificial
  probe
  misc_feature (1)..(25): SEQ ID NO: 4750; WAN0249QX; Start 178; Stop 202
ctagaccatccttaaattttgctta

SEQ ID NO: 389930 - DNA, 25 bp, Artificial
  probe
  misc_feature (1)..(25): SEQ ID NO: 4750; WAN0249QX; Start 175; Stop 199
atactagaccatccttaaattttgc

SEQ ID NO: 389931 - DNA, 25 bp, Artificial
  probe
  misc_feature (1)..(25): SEQ ID NO: 4750; WAN0249QX; Start 95; Stop 119
gcttcattaggagattgtgatgaaa

SEQ ID NO: 389932 - DNA, 25 bp, Artificial
  probe
  misc_feature (1)..(25): SEQ ID NO: 4750; WAN0249QX; Start 179; Stop 203
tagaccatccttaaattttgcttaa

SEQ ID NO: 389933 - DNA, 25 bp, Artificial
  probe
  misc_feature (1)..(25): SEQ ID NO: 4750; WAN0249QX; Start 142; Stop 166
aaagttaggaggtctttatttaatg

SEQ ID NO: 389934 - DNA, 25 bp, Artificial
  probe
  misc_feature (1)..(25): SEQ ID NO: 4750; WAN0249QX; Start 181; Stop 205
gaccatccttaaattttgcttaaga

SEQ ID NO: 389935 - DNA, 25 bp, Artificial
  probe
  misc_feature (1)..(25): SEQ ID NO: 4750; WAN0249QX; Start 180; Stop 204
agaccatccttaaattttgcttaag

SEQ ID NO: 389936 - DNA, 25 bp, Artificial
  probe
  misc_feature (1)..(25): SEQ ID NO: 4750; WAN0249QX; Start 182; Stop 206
accatccttaaattttgcttaagaa

SEQ ID NO: 389937 - DNA, 25 bp, Artificial
  probe
  misc_feature (1)..(25): SEQ ID NO: 4750; WAN0249QX; Start 174; Stop 198
aatactagaccatccttaaattttg

SEQ ID NO: 389938 - DNA, 25 bp, Artificial
  probe
  misc_feature (1)..(25): SEQ ID NO: 4750; WAN0249QX; Start 183; Stop 207
ccatccttaaattttgcttaagaaa

SEQ ID NO: 389939 - DNA, 25 bp, Artificial
  probe
  misc_feature (1)..(25): SEQ ID NO: 4750; WAN0249QX; Start 96; Stop 120
cttcattaggagattgtgatgaaaa

SEQ ID NO: 389940 - DNA, 25 bp, Artificial
  probe
  misc_feature (1)..(25): SEQ ID NO: 4750; WAN0249QX; Start 184; Stop 208
catccttaaattttgcttaagaaaa

SEQ ID NO: 389941 - DNA, 25 bp, Artificial
  probe
  misc_feature (1)..(25): SEQ ID NO: 4751; WAN024AAT; Start 115; Stop 139
attatgagcggctactctaatactt

SEQ ID NO: 389942 - DNA, 25 bp, Artificial
  probe
  misc_feature (1)..(25): SEQ ID NO: 4751; WAN024AAT; Start 114; Stop 138
aattatgagcggctactctaatact

SEQ ID NO: 389943 - DNA, 25 bp, Artificial
  probe
  misc_feature (1)..(25): SEQ ID NO: 4751; WAN024AAT; Start 123; Stop 147
cggctactctaatactttccctcta

SEQ ID NO: 389944 - DNA, 25 bp, Artificial
  probe
  misc_feature (1)..(25): SEQ ID NO: 4751; WAN024AAT; Start 124; Stop 148
ggctactctaatactttccctctaa

SEQ ID NO: 389945 - DNA, 25 bp, Artificial
  probe
  misc_feature (1)..(25): SEQ ID NO: 4751; WAN024AAT; Start 117; Stop 141
tatgagcggctactctaatactttc

SEQ ID NO: 389946 - DNA, 25 bp, Artificial
  probe
  misc_feature (1)..(25): SEQ ID NO: 4751; WAN024AAT; Start 116; Stop 140
ttatgagcggctactctaatacttt

SEQ ID NO: 389947 - DNA, 25 bp, Artificial
  probe
  misc_feature (1)..(25): SEQ ID NO: 4751; WAN024AAT; Start 113; Stop 137
aaattatgagcggctactctaatac

SEQ ID NO: 389948 - DNA, 25 bp, Artificial
  probe
  misc_feature (1)..(25): SEQ ID NO: 4751; WAN024AAT; Start 105; Stop 129
tctagtataaattatgagcggctac

SEQ ID NO: 389949 - DNA, 25 bp, Artificial
  probe
  misc_feature (1)..(25): SEQ ID NO: 4751; WAN024AAT; Start 125; Stop 149
gctactctaatactttccctctaaa

SEQ ID NO: 389950 - DNA, 25 bp, Artificial
  probe
  misc_feature (1)..(25): SEQ ID NO: 4751; WAN024AAT; Start 103; Stop 127
aatctagtataaattatgagcggct

SEQ ID NO: 389951 - DNA, 25 bp, Artificial
  probe
  misc_feature (1)..(25): SEQ ID NO: 4751; WAN024AAT; Start 108; Stop 132
agtataaattatgagcggctactct

SEQ ID NO: 389952 - DNA, 25 bp, Artificial
  probe
  misc_feature (1)..(25): SEQ ID NO: 4751; WAN024AAT; Start 118; Stop 142
atgagcggctactctaatactttcc

SEQ ID NO: 389953 - DNA, 25 bp, Artificial
  probe
  misc_feature (1)..(25): SEQ ID NO: 4751; WAN024AAT; Start 128; Stop 152
actctaatactttccctctaaacaa

SEQ ID NO: 389954 - DNA, 25 bp, Artificial
  probe
  misc_feature (1)..(25): SEQ ID NO: 4751; WAN024AAT; Start 109; Stop 133
gtataaattatgagcggctactcta

SEQ ID NO: 389955 - DNA, 25 bp, Artificial
  probe
  misc_feature (1)..(25): SEQ ID NO: 4751; WAN024AAT; Start 102; Stop 126
aaatctagtataaattatgagcggc

SEQ ID NO: 389956 - DNA, 25 bp, Artificial
  probe
  misc_feature (1)..(25): SEQ ID NO: 4751; WAN024AAT; Start 111; Stop 135
ataaattatgagcggctactctaat

SEQ ID NO: 389957 - DNA, 25 bp, Artificial
  probe
  misc_feature (1)..(25): SEQ ID NO: 4751; WAN024AAT; Start 104; Stop 128
atctagtataaattatgagcggcta

SEQ ID NO: 389958 - DNA, 25 bp, Artificial
  probe
  misc_feature (1)..(25): SEQ ID NO: 4751; WAN024AAT; Start 130; Stop 154
tctaatactttccctctaaacaaga

SEQ ID NO: 389959 - DNA, 25 bp, Artificial
  probe
  misc_feature (1)..(25): SEQ ID NO: 4751; WAN024AAT; Start 122; Stop 146
gcggctactctaatactttccctct

SEQ ID NO: 389960 - DNA, 25 bp, Artificial
  probe
  misc_feature (1)..(25): SEQ ID NO: 4751; WAN024AAT; Start 129; Stop 153
ctctaatactttccctctaaacaag

SEQ ID NO: 389961 - DNA, 25 bp, Artificial
  probe
  misc_feature (1)..(25): SEQ ID NO: 4751; WAN024AAT; Start 107; Stop 131
tagtataaattatgagcggctactc

SEQ ID NO: 389962 - DNA, 25 bp, Artificial
  probe
  misc_feature (1)..(25): SEQ ID NO: 4751; WAN024AAT; Start 106; Stop 130
ctagtataaattatgagcggctact

SEQ ID NO: 389963 - DNA, 25 bp, Artificial
  probe
  misc_feature (1)..(25): SEQ ID NO: 4751; WAN024AAT; Start 112; Stop 136
taaattatgagcggctactctaata

SEQ ID NO: 389964 - DNA, 25 bp, Artificial
  probe
  misc_feature (1)..(25): SEQ ID NO: 4751; WAN024AAT; Start 110; Stop 134
tataaattatgagcggctactctaa

SEQ ID NO: 389965 - DNA, 25 bp, Artificial
  probe
  misc_feature (1)..(25): SEQ ID NO: 4751; WAN024AAT; Start 156; Stop 180
aaagacttacactcaagggttttct

SEQ ID NO: 389966 - DNA, 25 bp, Artificial
  probe
  misc_feature (1)..(25): SEQ ID NO: 4751; WAN024AAT; Start 83; Stop 107
ctgtctcaaatcagttatcaaatct

SEQ ID NO: 389967 - DNA, 25 bp, Artificial
  probe
  misc_feature (1)..(25): SEQ ID NO: 4751; WAN024AAT; Start 82; Stop 106
tctgtctcaaatcagttatcaaatc

SEQ ID NO: 389968 - DNA, 25 bp, Artificial
  probe
  misc_feature (1)..(25): SEQ ID NO: 4751; WAN024AAT; Start 127; Stop 151
tactctaatactttccctctaaaca

SEQ ID NO: 389969 - DNA, 25 bp, Artificial
  probe
  misc_feature (1)..(25): SEQ ID NO: 4751; WAN024AAT; Start 121; Stop 145
agcggctactctaatactttccctc

SEQ ID NO: 389970 - DNA, 25 bp, Artificial
  probe
  misc_feature (1)..(25): SEQ ID NO: 4751; WAN024AAT; Start 80; Stop 104
aatctgtctcaaatcagttatcaaa

SEQ ID NO: 389971 - DNA, 25 bp, Artificial
  probe
  misc_feature (1)..(25): SEQ ID NO: 4751; WAN024AAT; Start 79; Stop 103
aaatctgtctcaaatcagttatcaa

SEQ ID NO: 389972 - DNA, 25 bp, Artificial
  probe
  misc_feature (1)..(25): SEQ ID NO: 4751; WAN024AAT; Start 131; Stop 155
ctaatactttccctctaaacaagaa

SEQ ID NO: 389973 - DNA, 25 bp, Artificial
  probe
  misc_feature (1)..(25): SEQ ID NO: 4751; WAN024AAT; Start 120; Stop 144
gagcggctactctaatactttccct

SEQ ID NO: 389974 - DNA, 25 bp, Artificial
  probe
  misc_feature (1)..(25): SEQ ID NO: 4752; WAN024A7O; Start 7; Stop 31
tctctttctgtgtttagtattgcga

SEQ ID NO: 389975 - DNA, 25 bp, Artificial
  probe
  misc_feature (1)..(25): SEQ ID NO: 4752; WAN024A7O; Start 6; Stop 30
atctctttctgtgtttagtattgcg

SEQ ID NO: 389976 - DNA, 25 bp, Artificial
  probe
  misc_feature (1)..(25): SEQ ID NO: 4752; WAN024A7O; Start 53; Stop 77
accataattctataggagtatcgca

SEQ ID NO: 389977 - DNA, 25 bp, Artificial
  probe
  misc_feature (1)..(25): SEQ ID NO: 4752; WAN024A7O; Start 8; Stop 32
ctctttctgtgtttagtattgcgaa

SEQ ID NO: 389978 - DNA, 25 bp, Artificial
  probe
  misc_feature (1)..(25): SEQ ID NO: 4752; WAN024A7O; Start 9; Stop 33
tctttctgtgtttagtattgcgaac

SEQ ID NO: 389979 - DNA, 25 bp, Artificial
  probe
  misc_feature (1)..(25): SEQ ID NO: 4752; WAN024A7O; Start 54; Stop 78
ccataattctataggagtatcgcac

SEQ ID NO: 389980 - DNA, 25 bp, Artificial
  probe
  misc_feature (1)..(25): SEQ ID NO: 4752; WAN024A7O; Start 11; Stop 35
tttctgtgtttagtattgcgaactc

SEQ ID NO: 389981 - DNA, 25 bp, Artificial
  probe
  misc_feature (1)..(25): SEQ ID NO: 4752; WAN024A7O; Start 10; Stop 34
ctttctgtgtttagtattgcgaact

SEQ ID NO: 389982 - DNA, 25 bp, Artificial
  probe
  misc_feature (1)..(25): SEQ ID NO: 4752; WAN024A7O; Start 27; Stop 51
tgcgaactcacaattatttctactt

SEQ ID NO: 389983 - DNA, 25 bp, Artificial
  probe
  misc_feature (1)..(25): SEQ ID NO: 4752; WAN024A7O; Start 12; Stop 36
ttctgtgtttagtattgcgaactca

SEQ ID NO: 389984 - DNA, 25 bp, Artificial
  probe
  misc_feature (1)..(25): SEQ ID NO: 4752; WAN024A7O; Start 26; Stop 50
ttgcgaactcacaattatttctact

SEQ ID NO: 389985 - DNA, 25 bp, Artificial
  probe
  misc_feature (1)..(25): SEQ ID NO: 4752; WAN024A7O; Start 55; Stop 79
cataattctataggagtatcgcaca

SEQ ID NO: 389986 - DNA, 25 bp, Artificial
  probe
  misc_feature (1)..(25): SEQ ID NO: 4752; WAN024A7O; Start 28; Stop 52
gcgaactcacaattatttctacttt

SEQ ID NO: 389987 - DNA, 25 bp, Artificial
  probe
  misc_feature (1)..(25): SEQ ID NO: 4752; WAN024A7O; Start 5; Stop 29
aatctctttctgtgtttagtattgc

SEQ ID NO: 389988 - DNA, 25 bp, Artificial
  probe
  misc_feature (1)..(25): SEQ ID NO: 4752; WAN024A7O; Start 13; Stop 37
tctgtgtttagtattgcgaactcac

SEQ ID NO: 389989 - DNA, 25 bp, Artificial
  probe
  misc_feature (1)..(25): SEQ ID NO: 4752; WAN024A7O; Start 56; Stop 80
ataattctataggagtatcgcacaa

SEQ ID NO: 389990 - DNA, 25 bp, Artificial
  probe
  misc_feature (1)..(25): SEQ ID NO: 4752; WAN024A7O; Start 52; Stop 76
taccataattctataggagtatcgc

SEQ ID NO: 389991 - DNA, 25 bp, Artificial
  probe
  misc_feature (1)..(25): SEQ ID NO: 4752; WAN024A7O; Start 16; Stop 40
gtgtttagtattgcgaactcacaat

SEQ ID NO: 389992 - DNA, 25 bp, Artificial
  probe
  misc_feature (1)..(25): SEQ ID NO: 4752; WAN024A7O; Start 17; Stop 41
tgtttagtattgcgaactcacaatt

SEQ ID NO: 389993 - DNA, 25 bp, Artificial
  probe
  misc_feature (1)..(25): SEQ ID NO: 4752; WAN024A7O; Start 20; Stop 44
ttagtattgcgaactcacaattatt

SEQ ID NO: 389994 - DNA, 25 bp, Artificial
  probe
  misc_feature (1)..(25): SEQ ID NO: 4752; WAN024A7O; Start 25; Stop 49
attgcgaactcacaattatttctac

SEQ ID NO: 389995 - DNA, 25 bp, Artificial
  probe
  misc_feature (1)..(25): SEQ ID NO: 4752; WAN024A7O; Start 23; Stop 47
gtattgcgaactcacaattatttct

SEQ ID NO: 389996 - DNA, 25 bp, Artificial
  probe
  misc_feature (1)..(25): SEQ ID NO: 4752; WAN024A7O; Start 22; Stop 46
agtattgcgaactcacaattatttc

SEQ ID NO: 389997 - DNA, 25 bp, Artificial
  probe
  misc_feature (1)..(25): SEQ ID NO: 4752; WAN024A7O; Start 141; Stop 165
attttatcagtgctgcttagggaaa

SEQ ID NO: 389998 - DNA, 25 bp, Artificial
  probe
  misc_feature (1)..(25): SEQ ID NO: 4752; WAN024A7O; Start 18; Stop 42
gtttagtattgcgaactcacaatta

SEQ ID NO: 389999 - DNA, 25 bp, Artificial
  probe
  misc_feature (1)..(25): SEQ ID NO: 4752; WAN024A7O; Start 140; Stop 164
gattttatcagtgctgcttagggaa

SEQ ID NO: 390000 - DNA, 25 bp, Artificial
  probe
  misc_feature (1)..(25): SEQ ID NO: 4752; WAN024A7O; Start 57; Stop 81
taattctataggagtatcgcacaaa

SEQ ID NO: 390001 - DNA, 25 bp, Artificial
  probe
  misc_feature (1)..(25): SEQ ID NO: 4752; WAN024A7O; Start 32; Stop 56
actcacaattatttctactttacca

SEQ ID NO: 390002 - DNA, 25 bp, Artificial
  probe
  misc_feature (1)..(25): SEQ ID NO: 4752; WAN024A7O; Start 142; Stop 166
ttttatcagtgctgcttagggaaaa

SEQ ID NO: 390003 - DNA, 25 bp, Artificial
  probe
  misc_feature (1)..(25): SEQ ID NO: 4752; WAN024A7O; Start 21; Stop 45
tagtattgcgaactcacaattattt

SEQ ID NO: 390004 - DNA, 25 bp, Artificial
  probe
  misc_feature (1)..(25): SEQ ID NO: 4752; WAN024A7O; Start 19; Stop 43
tttagtattgcgaactcacaattat

SEQ ID NO: 390005 - DNA, 25 bp, Artificial
  probe
  misc_feature (1)..(25): SEQ ID NO: 4752; WAN024A7O; Start 24; Stop 48
tattgcgaactcacaattatttcta

SEQ ID NO: 390006 - DNA, 25 bp, Artificial
  probe
  misc_feature (1)..(25): SEQ ID NO: 4752; WAN024A7O; Start 4; Stop 28
aaatctctttctgtgtttagtattg

SEQ ID NO: 390007 - DNA, 25 bp, Artificial
  probe
  misc_feature (1)..(25): SEQ ID NO: 4753; WAN024AB5; Start 5; Stop 29
attctgtgctgtatttgccattaaa

SEQ ID NO: 390008 - DNA, 25 bp, Artificial
  probe
  misc_feature (1)..(25): SEQ ID NO: 4753; WAN024AB5; Start 4; Stop 28
aattctgtgctgtatttgccattaa

SEQ ID NO: 390009 - DNA, 25 bp, Artificial
  probe
  misc_feature (1)..(25): SEQ ID NO: 4753; WAN024AB5; Start 3; Stop 27
aaattctgtgctgtatttgccatta

SEQ ID NO: 390010 - DNA, 25 bp, Artificial
  probe
  misc_feature (1)..(25): SEQ ID NO: 4753; WAN024AB5; Start 2; Stop 26
taaattctgtgctgtatttgccatt

SEQ ID NO: 390011 - DNA, 25 bp, Artificial
  probe
  misc_feature (1)..(25): SEQ ID NO: 4753; WAN024AB5; Start 1; Stop 25
ttaaattctgtgctgtatttgccat

SEQ ID NO: 390012 - DNA, 25 bp, Artificial
  probe
  misc_feature (1)..(25): SEQ ID NO: 4753; WAN024AB5; Start 6; Stop 30
ttctgtgctgtatttgccattaaaa

SEQ ID NO: 390013 - DNA, 25 bp, Artificial
  probe
  misc_feature (1)..(25): SEQ ID NO: 4753; WAN024AB5; Start 86; Stop 110
ttgcgacttttaaatgaattccaat

SEQ ID NO: 390014 - DNA, 25 bp, Artificial
  probe
  misc_feature (1)..(25): SEQ ID NO: 4753; WAN024AB5; Start 87; Stop 111
tgcgacttttaaatgaattccaata

SEQ ID NO: 390015 - DNA, 25 bp, Artificial
  probe
  misc_feature (1)..(25): SEQ ID NO: 4753; WAN024AB5; Start 88; Stop 112
gcgacttttaaatgaattccaatat

SEQ ID NO: 390016 - DNA, 25 bp, Artificial
  probe
  misc_feature (1)..(25): SEQ ID NO: 4753; WAN024AB5; Start 58; Stop 82
gcctaacttttgagggtcagttcaa

SEQ ID NO: 390017 - DNA, 25 bp, Artificial
  probe
  misc_feature (1)..(25): SEQ ID NO: 4753; WAN024AB5; Start 53; Stop 77
ttttggcctaacttttgagggtcag

SEQ ID NO: 390018 - DNA, 25 bp, Artificial
  probe
  misc_feature (1)..(25): SEQ ID NO: 4753; WAN024AB5; Start 59; Stop 83
cctaacttttgagggtcagttcaaa

SEQ ID NO: 390019 - DNA, 25 bp, Artificial
  probe
  misc_feature (1)..(25): SEQ ID NO: 4753; WAN024AB5; Start 54; Stop 78
tttggcctaacttttgagggtcagt

SEQ ID NO: 390020 - DNA, 25 bp, Artificial
  probe
  misc_feature (1)..(25): SEQ ID NO: 4753; WAN024AB5; Start 30; Stop 54
aaactgacctcctttagttagtttt

SEQ ID NO: 390021 - DNA, 25 bp, Artificial
  probe
  misc_feature (1)..(25): SEQ ID NO: 4753; WAN024AB5; Start 29; Stop 53
aaaactgacctcctttagttagttt

SEQ ID NO: 390022 - DNA, 25 bp, Artificial
  probe
  misc_feature (1)..(25): SEQ ID NO: 4753; WAN024AB5; Start 55; Stop 79
ttggcctaacttttgagggtcagtt

SEQ ID NO: 390023 - DNA, 25 bp, Artificial
  probe
  misc_feature (1)..(25): SEQ ID NO: 4753; WAN024AB5; Start 57; Stop 81
ggcctaacttttgagggtcagttca

SEQ ID NO: 390024 - DNA, 25 bp, Artificial
  probe
  misc_feature (1)..(25): SEQ ID NO: 4753; WAN024AB5; Start 56; Stop 80
tggcctaacttttgagggtcagttc

SEQ ID NO: 390025 - DNA, 25 bp, Artificial
  probe
  misc_feature (1)..(25): SEQ ID NO: 4754; WAN0249G9; Start 118; Stop 142
attgtcatctctccataaacacagt

SEQ ID NO: 390026 - DNA, 25 bp, Artificial
  probe
  misc_feature (1)..(25): SEQ ID NO: 4754; WAN0249G9; Start 119; Stop 143
ttgtcatctctccataaacacagta

SEQ ID NO: 390027 - DNA, 25 bp, Artificial
  probe
  misc_feature (1)..(25): SEQ ID NO: 4754; WAN0249G9; Start 120; Stop 144
tgtcatctctccataaacacagtat

SEQ ID NO: 390028 - DNA, 25 bp, Artificial
  probe
  misc_feature (1)..(25): SEQ ID NO: 4754; WAN0249G9; Start 117; Stop 141
aattgtcatctctccataaacacag

SEQ ID NO: 390029 - DNA, 25 bp, Artificial
  probe
  misc_feature (1)..(25): SEQ ID NO: 4754; WAN0249G9; Start 116; Stop 140
aaattgtcatctctccataaacaca

SEQ ID NO: 390030 - DNA, 25 bp, Artificial
  probe
  misc_feature (1)..(25): SEQ ID NO: 4754; WAN0249G9; Start 121; Stop 145
gtcatctctccataaacacagtata

SEQ ID NO: 390031 - DNA, 25 bp, Artificial
  probe
  misc_feature (1)..(25): SEQ ID NO: 4754; WAN0249G9; Start 125; Stop 149
tctctccataaacacagtatatcat

SEQ ID NO: 390032 - DNA, 25 bp, Artificial
  probe
  misc_feature (1)..(25): SEQ ID NO: 4754; WAN0249G9; Start 124; Stop 148
atctctccataaacacagtatatca

SEQ ID NO: 390033 - DNA, 25 bp, Artificial
  probe
  misc_feature (1)..(25): SEQ ID NO: 4754; WAN0249G9; Start 122; Stop 146
tcatctctccataaacacagtatat

SEQ ID NO: 390034 - DNA, 25 bp, Artificial
  probe
  misc_feature (1)..(25): SEQ ID NO: 4754; WAN0249G9; Start 123; Stop 147
catctctccataaacacagtatatc

SEQ ID NO: 390035 - DNA, 25 bp, Artificial
  probe
  misc_feature (1)..(25): SEQ ID NO: 4754; WAN0249G9; Start 115; Stop 139
taaattgtcatctctccataaacac

SEQ ID NO: 390036 - DNA, 25 bp, Artificial
  probe
  misc_feature (1)..(25): SEQ ID NO: 4754; WAN0249G9; Start 126; Stop 150
ctctccataaacacagtatatcatt

SEQ ID NO: 390037 - DNA, 25 bp, Artificial
  probe
  misc_feature (1)..(25): SEQ ID NO: 4754; WAN0249G9; Start 127; Stop 151
tctccataaacacagtatatcattt

SEQ ID NO: 390038 - DNA, 25 bp, Artificial
  probe
  misc_feature (1)..(25): SEQ ID NO: 4754; WAN0249G9; Start 114; Stop 138
ataaattgtcatctctccataaaca

SEQ ID NO: 390039 - DNA, 25 bp, Artificial
  probe
  misc_feature (1)..(25): SEQ ID NO: 4754; WAN0249G9; Start 128; Stop 152
ctccataaacacagtatatcatttt

SEQ ID NO: 390040 - DNA, 25 bp, Artificial
  probe
  misc_feature (1)..(25): SEQ ID NO: 4754; WAN0249G9; Start 108; Stop 132
cattttataaattgtcatctctcca

SEQ ID NO: 390041 - DNA, 25 bp, Artificial
  probe
  misc_feature (1)..(25): SEQ ID NO: 4754; WAN0249G9; Start 107; Stop 131
acattttataaattgtcatctctcc

SEQ ID NO: 390042 - DNA, 25 bp, Artificial
  probe
  misc_feature (1)..(25): SEQ ID NO: 4755; WAN024AFD; Start 3; Stop 27
aacagatgaattattaaagcaagaa

SEQ ID NO: 390043 - DNA, 25 bp, Artificial
  probe
  misc_feature (1)..(25): SEQ ID NO: 4755; WAN024AFD; Start 4; Stop 28
acagatgaattattaaagcaagaat

SEQ ID NO: 390044 - DNA, 25 bp, Artificial
  probe
  misc_feature (1)..(25): SEQ ID NO: 4756; WAN024A3L; Start 102; Stop 126
aagtgaacaagcctagtcttctgta

SEQ ID NO: 390045 - DNA, 25 bp, Artificial
  probe
  misc_feature (1)..(25): SEQ ID NO: 4756; WAN024A3L; Start 103; Stop 127
agtgaacaagcctagtcttctgtac

SEQ ID NO: 390046 - DNA, 25 bp, Artificial
  probe
  misc_feature (1)..(25): SEQ ID NO: 4756; WAN024A3L; Start 101; Stop 125
aaagtgaacaagcctagtcttctgt

SEQ ID NO: 390047 - DNA, 25 bp, Artificial
  probe
  misc_feature (1)..(25): SEQ ID NO: 4756; WAN024A3L; Start 109; Stop 133
caagcctagtcttctgtacattaga

SEQ ID NO: 390048 - DNA, 25 bp, Artificial
  probe
  misc_feature (1)..(25): SEQ ID NO: 4756; WAN024A3L; Start 108; Stop 132
acaagcctagtcttctgtacattag

SEQ ID NO: 390049 - DNA, 25 bp, Artificial
  probe
  misc_feature (1)..(25): SEQ ID NO: 4756; WAN024A3L; Start 106; Stop 130
gaacaagcctagtcttctgtacatt

SEQ ID NO: 390050 - DNA, 25 bp, Artificial
  probe
  misc_feature (1)..(25): SEQ ID NO: 4756; WAN024A3L; Start 107; Stop 131
aacaagcctagtcttctgtacatta

SEQ ID NO: 390051 - DNA, 25 bp, Artificial
  probe
  misc_feature (1)..(25): SEQ ID NO: 4756; WAN024A3L; Start 72; Stop 96
agataaggtcatcttatagcgacta

SEQ ID NO: 390052 - DNA, 25 bp, Artificial
  probe
  misc_feature (1)..(25): SEQ ID NO: 4756; WAN024A3L; Start 71; Stop 95
tagataaggtcatcttatagcgact

SEQ ID NO: 390053 - DNA, 25 bp, Artificial
  probe
  misc_feature (1)..(25): SEQ ID NO: 4756; WAN024A3L; Start 12; Stop 36
ctccctgcgacaaaattgataatag

SEQ ID NO: 390054 - DNA, 25 bp, Artificial
  probe
  misc_feature (1)..(25): SEQ ID NO: 4756; WAN024A3L; Start 13; Stop 37
tccctgcgacaaaattgataatagt

SEQ ID NO: 390055 - DNA, 25 bp, Artificial
  probe
  misc_feature (1)..(25): SEQ ID NO: 4756; WAN024A3L; Start 105; Stop 129
tgaacaagcctagtcttctgtacat

SEQ ID NO: 390056 - DNA, 25 bp, Artificial
  probe
  misc_feature (1)..(25): SEQ ID NO: 4756; WAN024A3L; Start 14; Stop 38
ccctgcgacaaaattgataatagta

SEQ ID NO: 390057 - DNA, 25 bp, Artificial
  probe
  misc_feature (1)..(25): SEQ ID NO: 4756; WAN024A3L; Start 11; Stop 35
cctccctgcgacaaaattgataata

SEQ ID NO: 390058 - DNA, 25 bp, Artificial
  probe
  misc_feature (1)..(25): SEQ ID NO: 4756; WAN024A3L; Start 73; Stop 97
gataaggtcatcttatagcgactat

SEQ ID NO: 390059 - DNA, 25 bp, Artificial
  probe
  misc_feature (1)..(25): SEQ ID NO: 4756; WAN024A3L; Start 70; Stop 94
atagataaggtcatcttatagcgac

SEQ ID NO: 390060 - DNA, 25 bp, Artificial
  probe
  misc_feature (1)..(25): SEQ ID NO: 4756; WAN024A3L; Start 100; Stop 124
aaaagtgaacaagcctagtcttctg

SEQ ID NO: 390061 - DNA, 25 bp, Artificial
  probe
  misc_feature (1)..(25): SEQ ID NO: 4756; WAN024A3L; Start 104; Stop 128
gtgaacaagcctagtcttctgtaca

SEQ ID NO: 390062 - DNA, 25 bp, Artificial
  probe
  misc_feature (1)..(25): SEQ ID NO: 4756; WAN024A3L; Start 110; Stop 134
aagcctagtcttctgtacattagaa

SEQ ID NO: 390063 - DNA, 25 bp, Artificial
  probe
  misc_feature (1)..(25): SEQ ID NO: 4756; WAN024A3L; Start 111; Stop 135
agcctagtcttctgtacattagaat

SEQ ID NO: 390064 - DNA, 25 bp, Artificial
  probe
  misc_feature (1)..(25): SEQ ID NO: 4756; WAN024A3L; Start 15; Stop 39
cctgcgacaaaattgataatagtat

SEQ ID NO: 390065 - DNA, 25 bp, Artificial
  probe
  misc_feature (1)..(25): SEQ ID NO: 4756; WAN024A3L; Start 10; Stop 34
tcctccctgcgacaaaattgataat

SEQ ID NO: 390066 - DNA, 25 bp, Artificial
  probe
  misc_feature (1)..(25): SEQ ID NO: 4756; WAN024A3L; Start 8; Stop 32
attcctccctgcgacaaaattgata

SEQ ID NO: 390067 - DNA, 25 bp, Artificial
  probe
  misc_feature (1)..(25): SEQ ID NO: 4756; WAN024A3L; Start 9; Stop 33
ttcctccctgcgacaaaattgataa

SEQ ID NO: 390068 - DNA, 25 bp, Artificial
  probe
  misc_feature (1)..(25): SEQ ID NO: 4756; WAN024A3L; Start 112; Stop 136
gcctagtcttctgtacattagaatt

SEQ ID NO: 390069 - DNA, 25 bp, Artificial
  probe
  misc_feature (1)..(25): SEQ ID NO: 4756; WAN024A3L; Start 1; Stop 25
ttaacagattcctccctgcgacaaa

SEQ ID NO: 390070 - DNA, 25 bp, Artificial
  probe
  misc_feature (1)..(25): SEQ ID NO: 4756; WAN024A3L; Start 74; Stop 98
ataaggtcatcttatagcgactata

SEQ ID NO: 390071 - DNA, 25 bp, Artificial
  probe
  misc_feature (1)..(25): SEQ ID NO: 4756; WAN024A3L; Start 16; Stop 40
ctgcgacaaaattgataatagtatg

SEQ ID NO: 390072 - DNA, 25 bp, Artificial
  probe
  misc_feature (1)..(25): SEQ ID NO: 4756; WAN024A3L; Start 17; Stop 41
tgcgacaaaattgataatagtatgt

SEQ ID NO: 390073 - DNA, 25 bp, Artificial
  probe
  misc_feature (1)..(25): SEQ ID NO: 4756; WAN024A3L; Start 69; Stop 93
tatagataaggtcatcttatagcga

SEQ ID NO: 390074 - DNA, 25 bp, Artificial
  probe
  misc_feature (1)..(25): SEQ ID NO: 4756; WAN024A3L; Start 7; Stop 31
gattcctccctgcgacaaaattgat

SEQ ID NO: 390075 - DNA, 25 bp, Artificial
  probe
  misc_feature (1)..(25): SEQ ID NO: 4756; WAN024A3L; Start 113; Stop 137
cctagtcttctgtacattagaattc

SEQ ID NO: 390076 - DNA, 25 bp, Artificial
  probe
  misc_feature (1)..(25): SEQ ID NO: 4756; WAN024A3L; Start 68; Stop 92
ctatagataaggtcatcttatagcg

SEQ ID NO: 390077 - DNA, 25 bp, Artificial
  probe
  misc_feature (1)..(25): SEQ ID NO: 4757; WAN0249PS; Start 83; Stop 107
aagatatgaacagctctatcaggaa

SEQ ID NO: 390078 - DNA, 25 bp, Artificial
  probe
  misc_feature (1)..(25): SEQ ID NO: 4757; WAN0249PS; Start 82; Stop 106
taagatatgaacagctctatcagga

SEQ ID NO: 390079 - DNA, 25 bp, Artificial
  probe
  misc_feature (1)..(25): SEQ ID NO: 4757; WAN0249PS; Start 145; Stop 169
gcctactgttatagattcaatacac

SEQ ID NO: 390080 - DNA, 25 bp, Artificial
  probe
  misc_feature (1)..(25): SEQ ID NO: 4757; WAN0249PS; Start 81; Stop 105
ataagatatgaacagctctatcagg

SEQ ID NO: 390081 - DNA, 25 bp, Artificial
  probe
  misc_feature (1)..(25): SEQ ID NO: 4757; WAN0249PS; Start 89; Stop 113
tgaacagctctatcaggaaagttaa

SEQ ID NO: 390082 - DNA, 25 bp, Artificial
  probe
  misc_feature (1)..(25): SEQ ID NO: 4757; WAN0249PS; Start 88; Stop 112
atgaacagctctatcaggaaagtta

SEQ ID NO: 390083 - DNA, 25 bp, Artificial
  probe
  misc_feature (1)..(25): SEQ ID NO: 4757; WAN0249PS; Start 87; Stop 111
tatgaacagctctatcaggaaagtt

SEQ ID NO: 390084 - DNA, 25 bp, Artificial
  probe
  misc_feature (1)..(25): SEQ ID NO: 4757; WAN0249PS; Start 86; Stop 110
atatgaacagctctatcaggaaagt

SEQ ID NO: 390085 - DNA, 25 bp, Artificial
  probe
  misc_feature (1)..(25): SEQ ID NO: 4757; WAN0249PS; Start 90; Stop 114
gaacagctctatcaggaaagttaaa

SEQ ID NO: 390086 - DNA, 25 bp, Artificial
  probe
  misc_feature (1)..(25): SEQ ID NO: 4757; WAN0249PS; Start 92; Stop 116
acagctctatcaggaaagttaaatt

SEQ ID NO: 390087 - DNA, 25 bp, Artificial
  probe
  misc_feature (1)..(25): SEQ ID NO: 4757; WAN0249PS; Start 84; Stop 108
agatatgaacagctctatcaggaaa

SEQ ID NO: 390088 - DNA, 25 bp, Artificial
  probe
  misc_feature (1)..(25): SEQ ID NO: 4757; WAN0249PS; Start 91; Stop 115
aacagctctatcaggaaagttaaat

SEQ ID NO: 390089 - DNA, 25 bp, Artificial
  probe
  misc_feature (1)..(25): SEQ ID NO: 4757; WAN0249PS; Start 85; Stop 109
gatatgaacagctctatcaggaaag

SEQ ID NO: 390090 - DNA, 25 bp, Artificial
  probe
  misc_feature (1)..(25): SEQ ID NO: 4757; WAN0249PS; Start 144; Stop 168
ggcctactgttatagattcaataca

SEQ ID NO: 390091 - DNA, 25 bp, Artificial
  probe
  misc_feature (1)..(25): SEQ ID NO: 4757; WAN0249PS; Start 146; Stop 170
cctactgttatagattcaatacact

SEQ ID NO: 390092 - DNA, 25 bp, Artificial
  probe
  misc_feature (1)..(25): SEQ ID NO: 4757; WAN0249PS; Start 80; Stop 104
aataagatatgaacagctctatcag

SEQ ID NO: 390093 - DNA, 25 bp, Artificial
  probe
  misc_feature (1)..(25): SEQ ID NO: 4757; WAN0249PS; Start 93; Stop 117
cagctctatcaggaaagttaaatta

SEQ ID NO: 390094 - DNA, 25 bp, Artificial
  probe
  misc_feature (1)..(25): SEQ ID NO: 4757; WAN0249PS; Start 72; Stop 96
agaattgaaataagatatgaacagc

SEQ ID NO: 390095 - DNA, 25 bp, Artificial
  probe
  misc_feature (1)..(25): SEQ ID NO: 4757; WAN0249PS; Start 75; Stop 99
attgaaataagatatgaacagctct

SEQ ID NO: 390096 - DNA, 25 bp, Artificial
  probe
  misc_feature (1)..(25): SEQ ID NO: 4757; WAN0249PS; Start 43; Stop 67
agaagggttttgttcaacgtataat

SEQ ID NO: 390097 - DNA, 25 bp, Artificial
  probe
  misc_feature (1)..(25): SEQ ID NO: 4757; WAN0249PS; Start 40; Stop 64
aatagaagggttttgttcaacgtat

SEQ ID NO: 390098 - DNA, 25 bp, Artificial
  probe
  misc_feature (1)..(25): SEQ ID NO: 4757; WAN0249PS; Start 42; Stop 66
tagaagggttttgttcaacgtataa

SEQ ID NO: 390099 - DNA, 25 bp, Artificial
  probe
  misc_feature (1)..(25): SEQ ID NO: 4757; WAN0249PS; Start 94; Stop 118
agctctatcaggaaagttaaattaa

SEQ ID NO: 390100 - DNA, 25 bp, Artificial
  probe
  misc_feature (1)..(25): SEQ ID NO: 4757; WAN0249PS; Start 41; Stop 65
atagaagggttttgttcaacgtata

SEQ ID NO: 390101 - DNA, 25 bp, Artificial
  probe
  misc_feature (1)..(25): SEQ ID NO: 4757; WAN0249PS; Start 74; Stop 98
aattgaaataagatatgaacagctc

SEQ ID NO: 390102 - DNA, 25 bp, Artificial
  probe
  misc_feature (1)..(25): SEQ ID NO: 4757; WAN0249PS; Start 73; Stop 97
gaattgaaataagatatgaacagct

SEQ ID NO: 390103 - DNA, 25 bp, Artificial
  probe
  misc_feature (1)..(25): SEQ ID NO: 4757; WAN0249PS; Start 76; Stop 100
ttgaaataagatatgaacagctcta

SEQ ID NO: 390104 - DNA, 25 bp, Artificial
  probe
  misc_feature (1)..(25): SEQ ID NO: 4757; WAN0249PS; Start 77; Stop 101
tgaaataagatatgaacagctctat

SEQ ID NO: 390105 - DNA, 25 bp, Artificial
  probe
  misc_feature (1)..(25): SEQ ID NO: 4757; WAN0249PS; Start 95; Stop 119
gctctatcaggaaagttaaattaat

SEQ ID NO: 390106 - DNA, 25 bp, Artificial
  probe
  misc_feature (1)..(25): SEQ ID NO: 4757; WAN0249PS; Start 79; Stop 103
aaataagatatgaacagctctatca

SEQ ID NO: 390107 - DNA, 25 bp, Artificial
  probe
  misc_feature (1)..(25): SEQ ID NO: 4757; WAN0249PS; Start 78; Stop 102
gaaataagatatgaacagctctatc

SEQ ID NO: 390108 - DNA, 25 bp, Artificial
  probe
  misc_feature (1)..(25): SEQ ID NO: 4757; WAN0249PS; Start 166; Stop 190
acactatatatgtgtttgtctgata

SEQ ID NO: 390109 - DNA, 25 bp, Artificial
  probe
  misc_feature (1)..(25): SEQ ID NO: 4757; WAN0249PS; Start 165; Stop 189
tacactatatatgtgtttgtctgat

SEQ ID NO: 390110 - DNA, 25 bp, Artificial
  probe
  misc_feature (1)..(25): SEQ ID NO: 4757; WAN0249PS; Start 164; Stop 188
atacactatatatgtgtttgtctga

SEQ ID NO: 390111 - DNA, 25 bp, Artificial
  probe
  misc_feature (1)..(25): SEQ ID NO: 4758; WAN0249K8; Start 284; Stop 308
gcatttgtaacagaggcttaaagat

SEQ ID NO: 390112 - DNA, 25 bp, Artificial
  probe
  misc_feature (1)..(25): SEQ ID NO: 4758; WAN0249K8; Start 162; Stop 186
tatgggtaatcatttgtcgtaggtt

SEQ ID NO: 390113 - DNA, 25 bp, Artificial
  probe
  misc_feature (1)..(25): SEQ ID NO: 4758; WAN0249K8; Start 161; Stop 185
atatgggtaatcatttgtcgtaggt

SEQ ID NO: 390114 - DNA, 25 bp, Artificial
  probe
  misc_feature (1)..(25): SEQ ID NO: 4758; WAN0249K8; Start 163; Stop 187
atgggtaatcatttgtcgtaggttt

SEQ ID NO: 390115 - DNA, 25 bp, Artificial
  probe
  misc_feature (1)..(25): SEQ ID NO: 4758; WAN0249K8; Start 160; Stop 184
aatatgggtaatcatttgtcgtagg

SEQ ID NO: 390116 - DNA, 25 bp, Artificial
  probe
  misc_feature (1)..(25): SEQ ID NO: 4758; WAN0249K8; Start 287; Stop 311
tttgtaacagaggcttaaagattct

SEQ ID NO: 390117 - DNA, 25 bp, Artificial
  probe
  misc_feature (1)..(25): SEQ ID NO: 4758; WAN0249K8; Start 213; Stop 237
ctcacagcagttaaatcttctgaaa

SEQ ID NO: 390118 - DNA, 25 bp, Artificial
  probe
  misc_feature (1)..(25): SEQ ID NO: 4758; WAN0249K8; Start 285; Stop 309
catttgtaacagaggcttaaagatt

SEQ ID NO: 390119 - DNA, 25 bp, Artificial
  probe
  misc_feature (1)..(25): SEQ ID NO: 4758; WAN0249K8; Start 286; Stop 310
atttgtaacagaggcttaaagattc

SEQ ID NO: 390120 - DNA, 25 bp, Artificial
  probe
  misc_feature (1)..(25): SEQ ID NO: 4758; WAN0249K8; Start 282; Stop 306
gagcatttgtaacagaggcttaaag

SEQ ID NO: 390121 - DNA, 25 bp, Artificial
  probe
  misc_feature (1)..(25): SEQ ID NO: 4758; WAN0249K8; Start 283; Stop 307
agcatttgtaacagaggcttaaaga

SEQ ID NO: 390122 - DNA, 25 bp, Artificial
  probe
  misc_feature (1)..(25): SEQ ID NO: 4758; WAN0249K8; Start 281; Stop 305
tgagcatttgtaacagaggcttaaa

SEQ ID NO: 390123 - DNA, 25 bp, Artificial
  probe
  misc_feature (1)..(25): SEQ ID NO: 4758; WAN0249K8; Start 172; Stop 196
catttgtcgtaggttttgtctgaaa

SEQ ID NO: 390124 - DNA, 25 bp, Artificial
  probe
  misc_feature (1)..(25): SEQ ID NO: 4758; WAN0249K8; Start 169; Stop 193
aatcatttgtcgtaggttttgtctg

SEQ ID NO: 390125 - DNA, 25 bp, Artificial
  probe
  misc_feature (1)..(25): SEQ ID NO: 4758; WAN0249K8; Start 166; Stop 190
ggtaatcatttgtcgtaggttttgt

SEQ ID NO: 390126 - DNA, 25 bp, Artificial
  probe
  misc_feature (1)..(25): SEQ ID NO: 4758; WAN0249K8; Start 165; Stop 189
gggtaatcatttgtcgtaggttttg

SEQ ID NO: 390127 - DNA, 25 bp, Artificial
  probe
  misc_feature (1)..(25): SEQ ID NO: 4758; WAN0249K8; Start 164; Stop 188
tgggtaatcatttgtcgtaggtttt

SEQ ID NO: 390128 - DNA, 25 bp, Artificial
  probe
  misc_feature (1)..(25): SEQ ID NO: 4758; WAN0249K8; Start 116; Stop 140
aaaacctactgaaaccccttgaaaa

SEQ ID NO: 390129 - DNA, 25 bp, Artificial
  probe
  misc_feature (1)..(25): SEQ ID NO: 4758; WAN0249K8; Start 174; Stop 198
tttgtcgtaggttttgtctgaaata

SEQ ID NO: 390130 - DNA, 25 bp, Artificial
  probe
  misc_feature (1)..(25): SEQ ID NO: 4758; WAN0249K8; Start 297; Stop 321
aggcttaaagattctgaaaattcgt

SEQ ID NO: 390131 - DNA, 25 bp, Artificial
  probe
  misc_feature (1)..(25): SEQ ID NO: 4758; WAN0249K8; Start 212; Stop 236
gctcacagcagttaaatcttctgaa

SEQ ID NO: 390132 - DNA, 25 bp, Artificial
  probe
  misc_feature (1)..(25): SEQ ID NO: 4758; WAN0249K8; Start 167; Stop 191
gtaatcatttgtcgtaggttttgtc

SEQ ID NO: 390133 - DNA, 25 bp, Artificial
  probe
  misc_feature (1)..(25): SEQ ID NO: 4758; WAN0249K8; Start 298; Stop 322
ggcttaaagattctgaaaattcgtc

SEQ ID NO: 390134 - DNA, 25 bp, Artificial
  probe
  misc_feature (1)..(25): SEQ ID NO: 4758; WAN0249K8; Start 168; Stop 192
taatcatttgtcgtaggttttgtct

SEQ ID NO: 390135 - DNA, 25 bp, Artificial
  probe
  misc_feature (1)..(25): SEQ ID NO: 4758; WAN0249K8; Start 175; Stop 199
ttgtcgtaggttttgtctgaaatat

SEQ ID NO: 390136 - DNA, 25 bp, Artificial
  probe
  misc_feature (1)..(25): SEQ ID NO: 4758; WAN0249K8; Start 76; Stop 100
cgaatgtgatgccaagttttctatg

SEQ ID NO: 390137 - DNA, 25 bp, Artificial
  probe
  misc_feature (1)..(25): SEQ ID NO: 4758; WAN0249K8; Start 296; Stop 320
gaggcttaaagattctgaaaattcg

SEQ ID NO: 390138 - DNA, 25 bp, Artificial
  probe
  misc_feature (1)..(25): SEQ ID NO: 4758; WAN0249K8; Start 159; Stop 183
taatatgggtaatcatttgtcgtag

SEQ ID NO: 390139 - DNA, 25 bp, Artificial
  probe
  misc_feature (1)..(25): SEQ ID NO: 4758; WAN0249K8; Start 305; Stop 329
agattctgaaaattcgtcaagagga

SEQ ID NO: 390140 - DNA, 25 bp, Artificial
  probe
  misc_feature (1)..(25): SEQ ID NO: 4758; WAN0249K8; Start 304; Stop 328
aagattctgaaaattcgtcaagagg

SEQ ID NO: 390141 - DNA, 25 bp, Artificial
  probe
  misc_feature (1)..(25): SEQ ID NO: 4758; WAN0249K8; Start 170; Stop 194
atcatttgtcgtaggttttgtctga

SEQ ID NO: 390142 - DNA, 25 bp, Artificial
  probe
  misc_feature (1)..(25): SEQ ID NO: 4758; WAN0249K8; Start 154; Stop 178
gggtataatatgggtaatcatttgt

SEQ ID NO: 390143 - DNA, 25 bp, Artificial
  probe
  misc_feature (1)..(25): SEQ ID NO: 4758; WAN0249K8; Start 171; Stop 195
tcatttgtcgtaggttttgtctgaa

SEQ ID NO: 390144 - DNA, 25 bp, Artificial
  probe
  misc_feature (1)..(25): SEQ ID NO: 4759; WAN0249F6; Start 62; Stop 86
cgatcctgggaacttttcagatatt

SEQ ID NO: 390145 - DNA, 25 bp, Artificial
  probe
  misc_feature (1)..(25): SEQ ID NO: 4759; WAN0249F6; Start 63; Stop 87
gatcctgggaacttttcagatattt

SEQ ID NO: 390146 - DNA, 25 bp, Artificial
  probe
  misc_feature (1)..(25): SEQ ID NO: 4759; WAN0249F6; Start 64; Stop 88
atcctgggaacttttcagatatttt

SEQ ID NO: 390147 - DNA, 25 bp, Artificial
  probe
  misc_feature (1)..(25): SEQ ID NO: 4759; WAN0249F6; Start 61; Stop 85
acgatcctgggaacttttcagatat

SEQ ID NO: 390148 - DNA, 25 bp, Artificial
  probe
  misc_feature (1)..(25): SEQ ID NO: 4759; WAN0249F6; Start 60; Stop 84
gacgatcctgggaacttttcagata

SEQ ID NO: 390149 - DNA, 25 bp, Artificial
  probe
  misc_feature (1)..(25): SEQ ID NO: 4759; WAN0249F6; Start 59; Stop 83
cgacgatcctgggaacttttcagat

SEQ ID NO: 390150 - DNA, 25 bp, Artificial
  probe
  misc_feature (1)..(25): SEQ ID NO: 4759; WAN0249F6; Start 7; Stop 31
cccctgaaatttattttaattatgc

SEQ ID NO: 390151 - DNA, 25 bp, Artificial
  probe
  misc_feature (1)..(25): SEQ ID NO: 4759; WAN0249F6; Start 3; Stop 27
aactcccctgaaatttattttaatt

SEQ ID NO: 390152 - DNA, 25 bp, Artificial
  probe
  misc_feature (1)..(25): SEQ ID NO: 4760; WAN0249FM; Start 77; Stop 101
agggaataactagaaagatttgtga

SEQ ID NO: 390153 - DNA, 25 bp, Artificial
  probe
  misc_feature (1)..(25): SEQ ID NO: 4760; WAN0249FM; Start 78; Stop 102
gggaataactagaaagatttgtgaa

SEQ ID NO: 390154 - DNA, 25 bp, Artificial
  probe
  misc_feature (1)..(25): SEQ ID NO: 4760; WAN0249FM; Start 76; Stop 100
aagggaataactagaaagatttgtg

SEQ ID NO: 390155 - DNA, 25 bp, Artificial
  probe
  misc_feature (1)..(25): SEQ ID NO: 4760; WAN0249FM; Start 67; Stop 91
aggaatgataagggaataactagaa

SEQ ID NO: 390156 - DNA, 25 bp, Artificial
  probe
  misc_feature (1)..(25): SEQ ID NO: 4760; WAN0249FM; Start 68; Stop 92
ggaatgataagggaataactagaaa

SEQ ID NO: 390157 - DNA, 25 bp, Artificial
  probe
  misc_feature (1)..(25): SEQ ID NO: 4760; WAN0249FM; Start 50; Stop 74
tgttatctcccttaattaggaatga

SEQ ID NO: 390158 - DNA, 25 bp, Artificial
  probe
  misc_feature (1)..(25): SEQ ID NO: 4760; WAN0249FM; Start 66; Stop 90
taggaatgataagggaataactaga

SEQ ID NO: 390159 - DNA, 25 bp, Artificial
  probe
  misc_feature (1)..(25): SEQ ID NO: 4760; WAN0249FM; Start 75; Stop 99
taagggaataactagaaagatttgt

SEQ ID NO: 390160 - DNA, 25 bp, Artificial
  probe
  misc_feature (1)..(25): SEQ ID NO: 4760; WAN0249FM; Start 46; Stop 70
tgtatgttatctcccttaattagga

SEQ ID NO: 390161 - DNA, 25 bp, Artificial
  probe
  misc_feature (1)..(25): SEQ ID NO: 4760; WAN0249FM; Start 63; Stop 87
aattaggaatgataagggaataact

SEQ ID NO: 390162 - DNA, 25 bp, Artificial
  probe
  misc_feature (1)..(25): SEQ ID NO: 4760; WAN0249FM; Start 79; Stop 103
ggaataactagaaagatttgtgaat

SEQ ID NO: 390163 - DNA, 25 bp, Artificial
  probe
  misc_feature (1)..(25): SEQ ID NO: 4760; WAN0249FM; Start 65; Stop 89
ttaggaatgataagggaataactag

SEQ ID NO: 390164 - DNA, 25 bp, Artificial
  probe
  misc_feature (1)..(25): SEQ ID NO: 4760; WAN0249FM; Start 49; Stop 73
atgttatctcccttaattaggaatg

SEQ ID NO: 390165 - DNA, 25 bp, Artificial
  probe
  misc_feature (1)..(25): SEQ ID NO: 4760; WAN0249FM; Start 51; Stop 75
gttatctcccttaattaggaatgat

SEQ ID NO: 390166 - DNA, 25 bp, Artificial
  probe
  misc_feature (1)..(25): SEQ ID NO: 4760; WAN0249FM; Start 72; Stop 96
tgataagggaataactagaaagatt

SEQ ID NO: 390167 - DNA, 25 bp, Artificial
  probe
  misc_feature (1)..(25): SEQ ID NO: 4760; WAN0249FM; Start 70; Stop 94
aatgataagggaataactagaaaga

SEQ ID NO: 390168 - DNA, 25 bp, Artificial
  probe
  misc_feature (1)..(25): SEQ ID NO: 4760; WAN0249FM; Start 45; Stop 69
ttgtatgttatctcccttaattagg

SEQ ID NO: 390169 - DNA, 25 bp, Artificial
  probe
  misc_feature (1)..(25): SEQ ID NO: 4760; WAN0249FM; Start 69; Stop 93
gaatgataagggaataactagaaag

SEQ ID NO: 390170 - DNA, 25 bp, Artificial
  probe
  misc_feature (1)..(25): SEQ ID NO: 4760; WAN0249FM; Start 54; Stop 78
atctcccttaattaggaatgataag

SEQ ID NO: 390171 - DNA, 25 bp, Artificial
  probe
  misc_feature (1)..(25): SEQ ID NO: 4760; WAN0249FM; Start 47; Stop 71
gtatgttatctcccttaattaggaa

SEQ ID NO: 390172 - DNA, 25 bp, Artificial
  probe
  misc_feature (1)..(25): SEQ ID NO: 4760; WAN0249FM; Start 55; Stop 79
tctcccttaattaggaatgataagg

SEQ ID NO: 390173 - DNA, 25 bp, Artificial
  probe
  misc_feature (1)..(25): SEQ ID NO: 4760; WAN0249FM; Start 59; Stop 83
ccttaattaggaatgataagggaat

SEQ ID NO: 390174 - DNA, 25 bp, Artificial
  probe
  misc_feature (1)..(25): SEQ ID NO: 4761; WAN0249IW; Start 259; Stop 283
ggttagaatagtagactgtgacttc

SEQ ID NO: 390175 - DNA, 25 bp, Artificial
  probe
  misc_feature (1)..(25): SEQ ID NO: 4761; WAN0249IW; Start 145; Stop 169
aattgttcacctgatctacttctta

SEQ ID NO: 390176 - DNA, 25 bp, Artificial
  probe
  misc_feature (1)..(25): SEQ ID NO: 4761; WAN0249IW; Start 146; Stop 170
attgttcacctgatctacttcttat

SEQ ID NO: 390177 - DNA, 25 bp, Artificial
  probe
  misc_feature (1)..(25): SEQ ID NO: 4761; WAN0249IW; Start 25; Stop 49
agaaggtcccatctatgcttaaatg

SEQ ID NO: 390178 - DNA, 25 bp, Artificial
  probe
  misc_feature (1)..(25): SEQ ID NO: 4761; WAN0249IW; Start 24; Stop 48
aagaaggtcccatctatgcttaaat

SEQ ID NO: 390179 - DNA, 25 bp, Artificial
  probe
  misc_feature (1)..(25): SEQ ID NO: 4761; WAN0249IW; Start 148; Stop 172
tgttcacctgatctacttcttatag

SEQ ID NO: 390180 - DNA, 25 bp, Artificial
  probe
  misc_feature (1)..(25): SEQ ID NO: 4761; WAN0249IW; Start 23; Stop 47
caagaaggtcccatctatgcttaaa

SEQ ID NO: 390181 - DNA, 25 bp, Artificial
  probe
  misc_feature (1)..(25): SEQ ID NO: 4761; WAN0249IW; Start 149; Stop 173
gttcacctgatctacttcttatagt

SEQ ID NO: 390182 - DNA, 25 bp, Artificial
  probe
  misc_feature (1)..(25): SEQ ID NO: 4761; WAN0249IW; Start 264; Stop 288
gaatagtagactgtgacttctaaca

SEQ ID NO: 390183 - DNA, 25 bp, Artificial
  probe
  misc_feature (1)..(25): SEQ ID NO: 4761; WAN0249IW; Start 271; Stop 295
agactgtgacttctaacaaattgct

SEQ ID NO: 390184 - DNA, 25 bp, Artificial
  probe
  misc_feature (1)..(25): SEQ ID NO: 4761; WAN0249IW; Start 272; Stop 296
gactgtgacttctaacaaattgcta

SEQ ID NO: 390185 - DNA, 25 bp, Artificial
  probe
  misc_feature (1)..(25): SEQ ID NO: 4761; WAN0249IW; Start 147; Stop 171
ttgttcacctgatctacttcttata

SEQ ID NO: 390186 - DNA, 25 bp, Artificial
  probe
  misc_feature (1)..(25): SEQ ID NO: 4761; WAN0249IW; Start 115; Stop 139
tcttcgtatagcttatagagtaggt

SEQ ID NO: 390187 - DNA, 25 bp, Artificial
  probe
  misc_feature (1)..(25): SEQ ID NO: 4761; WAN0249IW; Start 143; Stop 167
gaaattgttcacctgatctacttct

SEQ ID NO: 390188 - DNA, 25 bp, Artificial
  probe
  misc_feature (1)..(25): SEQ ID NO: 4761; WAN0249IW; Start 273; Stop 297
actgtgacttctaacaaattgctag

SEQ ID NO: 390189 - DNA, 25 bp, Artificial
  probe
  misc_feature (1)..(25): SEQ ID NO: 4761; WAN0249IW; Start 144; Stop 168
aaattgttcacctgatctacttctt

SEQ ID NO: 390190 - DNA, 25 bp, Artificial
  probe
  misc_feature (1)..(25): SEQ ID NO: 4761; WAN0249IW; Start 265; Stop 289
aatagtagactgtgacttctaacaa

SEQ ID NO: 390191 - DNA, 25 bp, Artificial
  probe
  misc_feature (1)..(25): SEQ ID NO: 4761; WAN0249IW; Start 270; Stop 294
tagactgtgacttctaacaaattgc

SEQ ID NO: 390192 - DNA, 25 bp, Artificial
  probe
  misc_feature (1)..(25): SEQ ID NO: 4761; WAN0249IW; Start 274; Stop 298
ctgtgacttctaacaaattgctaga

SEQ ID NO: 390193 - DNA, 25 bp, Artificial
  probe
  misc_feature (1)..(25): SEQ ID NO: 4761; WAN0249IW; Start 119; Stop 143
cgtatagcttatagagtaggtactg

SEQ ID NO: 390194 - DNA, 25 bp, Artificial
  probe
  misc_feature (1)..(25): SEQ ID NO: 4761; WAN0249IW; Start 150; Stop 174
ttcacctgatctacttcttatagtt

SEQ ID NO: 390195 - DNA, 25 bp, Artificial
  probe
  misc_feature (1)..(25): SEQ ID NO: 4761; WAN0249IW; Start 118; Stop 142
tcgtatagcttatagagtaggtact

SEQ ID NO: 390196 - DNA, 25 bp, Artificial
  probe
  misc_feature (1)..(25): SEQ ID NO: 4761; WAN0249IW; Start 34; Stop 58
catctatgcttaaatggtttctctt

SEQ ID NO: 390197 - DNA, 25 bp, Artificial
  probe
  misc_feature (1)..(25): SEQ ID NO: 4761; WAN0249IW; Start 306; Stop 330
ttcaatctcccaatttatttgttca

SEQ ID NO: 390198 - DNA, 25 bp, Artificial
  probe
  misc_feature (1)..(25): SEQ ID NO: 4761; WAN0249IW; Start 263; Stop 287
agaatagtagactgtgacttctaac

SEQ ID NO: 390199 - DNA, 25 bp, Artificial
  probe
  misc_feature (1)..(25): SEQ ID NO: 4761; WAN0249IW; Start 260; Stop 284
gttagaatagtagactgtgacttct

SEQ ID NO: 390200 - DNA, 25 bp, Artificial
  probe
  misc_feature (1)..(25): SEQ ID NO: 4761; WAN0249IW; Start 117; Stop 141
ttcgtatagcttatagagtaggtac

SEQ ID NO: 390201 - DNA, 25 bp, Artificial
  probe
  misc_feature (1)..(25): SEQ ID NO: 4761; WAN0249IW; Start 269; Stop 293
gtagactgtgacttctaacaaattg

SEQ ID NO: 390202 - DNA, 25 bp, Artificial
  probe
  misc_feature (1)..(25): SEQ ID NO: 4761; WAN0249IW; Start 268; Stop 292
agtagactgtgacttctaacaaatt

SEQ ID NO: 390203 - DNA, 25 bp, Artificial
  probe
  misc_feature (1)..(25): SEQ ID NO: 4761; WAN0249IW; Start 114; Stop 138
atcttcgtatagcttatagagtagg

SEQ ID NO: 390204 - DNA, 25 bp, Artificial
  probe
  misc_feature (1)..(25): SEQ ID NO: 4761; WAN0249IW; Start 116; Stop 140
cttcgtatagcttatagagtaggta

SEQ ID NO: 390205 - DNA, 25 bp, Artificial
  probe
  misc_feature (1)..(25): SEQ ID NO: 4761; WAN0249IW; Start 35; Stop 59
atctatgcttaaatggtttctcttt

SEQ ID NO: 390206 - DNA, 25 bp, Artificial
  probe
  misc_feature (1)..(25): SEQ ID NO: 4761; WAN0249IW; Start 293; Stop 317
gctagaaatgaatttcaatctccca

SEQ ID NO: 390207 - DNA, 25 bp, Artificial
  probe
  misc_feature (1)..(25): SEQ ID NO: 4762; WAN0249ZA; Start 15; Stop 39
tatacaatcaaaccattcaccgtgt

SEQ ID NO: 390208 - DNA, 25 bp, Artificial
  probe
  misc_feature (1)..(25): SEQ ID NO: 4762; WAN0249ZA; Start 1; Stop 25
ttaagagaagacggtatacaatcaa

SEQ ID NO: 390209 - DNA, 25 bp, Artificial
  probe
  misc_feature (1)..(25): SEQ ID NO: 4762; WAN0249ZA; Start 14; Stop 38
gtatacaatcaaaccattcaccgtg

SEQ ID NO: 390210 - DNA, 25 bp, Artificial
  probe
  misc_feature (1)..(25): SEQ ID NO: 4762; WAN0249ZA; Start 16; Stop 40
atacaatcaaaccattcaccgtgta

SEQ ID NO: 390211 - DNA, 25 bp, Artificial
  probe
  misc_feature (1)..(25): SEQ ID NO: 4762; WAN0249ZA; Start 3; Stop 27
aagagaagacggtatacaatcaaac

SEQ ID NO: 390212 - DNA, 25 bp, Artificial
  probe
  misc_feature (1)..(25): SEQ ID NO: 4762; WAN0249ZA; Start 17; Stop 41
tacaatcaaaccattcaccgtgtag

SEQ ID NO: 390213 - DNA, 25 bp, Artificial
  probe
  misc_feature (1)..(25): SEQ ID NO: 4762; WAN0249ZA; Start 6; Stop 30
agaagacggtatacaatcaaaccat

SEQ ID NO: 390214 - DNA, 25 bp, Artificial
  probe
  misc_feature (1)..(25): SEQ ID NO: 4762; WAN0249ZA; Start 10; Stop 34
gacggtatacaatcaaaccattcac

SEQ ID NO: 390215 - DNA, 25 bp, Artificial
  probe
  misc_feature (1)..(25): SEQ ID NO: 4762; WAN0249ZA; Start 9; Stop 33
agacggtatacaatcaaaccattca

SEQ ID NO: 390216 - DNA, 25 bp, Artificial
  probe
  misc_feature (1)..(25): SEQ ID NO: 4762; WAN0249ZA; Start 4; Stop 28
agagaagacggtatacaatcaaacc

SEQ ID NO: 390217 - DNA, 25 bp, Artificial
  probe
  misc_feature (1)..(25): SEQ ID NO: 4762; WAN0249ZA; Start 8; Stop 32
aagacggtatacaatcaaaccattc

SEQ ID NO: 390218 - DNA, 25 bp, Artificial
  probe
  misc_feature (1)..(25): SEQ ID NO: 4762; WAN0249ZA; Start 7; Stop 31
gaagacggtatacaatcaaaccatt

SEQ ID NO: 390219 - DNA, 25 bp, Artificial
  probe
  misc_feature (1)..(25): SEQ ID NO: 4762; WAN0249ZA; Start 5; Stop 29
gagaagacggtatacaatcaaacca

SEQ ID NO: 390220 - DNA, 25 bp, Artificial
  probe
  misc_feature (1)..(25): SEQ ID NO: 4762; WAN0249ZA; Start 2; Stop 26
taagagaagacggtatacaatcaaa

SEQ ID NO: 390221 - DNA, 25 bp, Artificial
  probe
  misc_feature (1)..(25): SEQ ID NO: 4762; WAN0249ZA; Start 36; Stop 60
gtgtagccgaaatcgttcagaatga

SEQ ID NO: 390222 - DNA, 25 bp, Artificial
  probe
  misc_feature (1)..(25): SEQ ID NO: 4762; WAN0249ZA; Start 13; Stop 37
ggtatacaatcaaaccattcaccgt

SEQ ID NO: 390223 - DNA, 25 bp, Artificial
  probe
  misc_feature (1)..(25): SEQ ID NO: 4762; WAN0249ZA; Start 11; Stop 35
acggtatacaatcaaaccattcacc

SEQ ID NO: 390224 - DNA, 25 bp, Artificial
  probe
  misc_feature (1)..(25): SEQ ID NO: 4762; WAN0249ZA; Start 39; Stop 63
tagccgaaatcgttcagaatgaaga

SEQ ID NO: 390225 - DNA, 25 bp, Artificial
  probe
  misc_feature (1)..(25): SEQ ID NO: 4762; WAN0249ZA; Start 38; Stop 62
gtagccgaaatcgttcagaatgaag

SEQ ID NO: 390226 - DNA, 25 bp, Artificial
  probe
  misc_feature (1)..(25): SEQ ID NO: 4762; WAN0249ZA; Start 18; Stop 42
acaatcaaaccattcaccgtgtagc

SEQ ID NO: 390227 - DNA, 25 bp, Artificial
  probe
  misc_feature (1)..(25): SEQ ID NO: 4762; WAN0249ZA; Start 37; Stop 61
tgtagccgaaatcgttcagaatgaa

SEQ ID NO: 390228 - DNA, 25 bp, Artificial
  probe
  misc_feature (1)..(25): SEQ ID NO: 4762; WAN0249ZA; Start 19; Stop 43
caatcaaaccattcaccgtgtagcc

SEQ ID NO: 390229 - DNA, 25 bp, Artificial
  probe
  misc_feature (1)..(25): SEQ ID NO: 4762; WAN0249ZA; Start 35; Stop 59
cgtgtagccgaaatcgttcagaatg

SEQ ID NO: 390230 - DNA, 25 bp, Artificial
  probe
  misc_feature (1)..(25): SEQ ID NO: 4762; WAN0249ZA; Start 40; Stop 64
agccgaaatcgttcagaatgaagac

SEQ ID NO: 390231 - DNA, 25 bp, Artificial
  probe
  misc_feature (1)..(25): SEQ ID NO: 4763; WAN024AAN; Start 58; Stop 82
atgtaccataatcttcatcaactag

SEQ ID NO: 390232 - DNA, 25 bp, Artificial
  probe
  misc_feature (1)..(25): SEQ ID NO: 4763; WAN024AAN; Start 59; Stop 83
tgtaccataatcttcatcaactagt

SEQ ID NO: 390233 - DNA, 25 bp, Artificial
  probe
  misc_feature (1)..(25): SEQ ID NO: 4763; WAN024AAN; Start 57; Stop 81
aatgtaccataatcttcatcaacta

SEQ ID NO: 390234 - DNA, 25 bp, Artificial
  probe
  misc_feature (1)..(25): SEQ ID NO: 4763; WAN024AAN; Start 9; Stop 33
tcctttacaagtttagtaactagcc

SEQ ID NO: 390235 - DNA, 25 bp, Artificial
  probe
  misc_feature (1)..(25): SEQ ID NO: 4763; WAN024AAN; Start 56; Stop 80
aaatgtaccataatcttcatcaact

SEQ ID NO: 390236 - DNA, 25 bp, Artificial
  probe
  misc_feature (1)..(25): SEQ ID NO: 4763; WAN024AAN; Start 10; Stop 34
cctttacaagtttagtaactagcct

SEQ ID NO: 390237 - DNA, 25 bp, Artificial
  probe
  misc_feature (1)..(25): SEQ ID NO: 4763; WAN024AAN; Start 55; Stop 79
gaaatgtaccataatcttcatcaac

SEQ ID NO: 390238 - DNA, 25 bp, Artificial
  probe
  misc_feature (1)..(25): SEQ ID NO: 4763; WAN024AAN; Start 4; Stop 28
agttctcctttacaagtttagtaac

SEQ ID NO: 390239 - DNA, 25 bp, Artificial
  probe
  misc_feature (1)..(25): SEQ ID NO: 4763; WAN024AAN; Start 1; Stop 25
ttaagttctcctttacaagtttagt

SEQ ID NO: 390240 - DNA, 25 bp, Artificial
  probe
  misc_feature (1)..(25): SEQ ID NO: 4763; WAN024AAN; Start 8; Stop 32
ctcctttacaagtttagtaactagc

SEQ ID NO: 390241 - DNA, 25 bp, Artificial
  probe
  misc_feature (1)..(25): SEQ ID NO: 4763; WAN024AAN; Start 3; Stop 27
aagttctcctttacaagtttagtaa

SEQ ID NO: 390242 - DNA, 25 bp, Artificial
  probe
  misc_feature (1)..(25): SEQ ID NO: 4763; WAN024AAN; Start 11; Stop 35
ctttacaagtttagtaactagcctt

SEQ ID NO: 390243 - DNA, 25 bp, Artificial
  probe
  misc_feature (1)..(25): SEQ ID NO: 4763; WAN024AAN; Start 2; Stop 26
taagttctcctttacaagtttagta

SEQ ID NO: 390244 - DNA, 25 bp, Artificial
  probe
  misc_feature (1)..(25): SEQ ID NO: 4763; WAN024AAN; Start 5; Stop 29
gttctcctttacaagtttagtaact

SEQ ID NO: 390245 - DNA, 25 bp, Artificial
  probe
  misc_feature (1)..(25): SEQ ID NO: 4763; WAN024AAN; Start 54; Stop 78
tgaaatgtaccataatcttcatcaa

SEQ ID NO: 390246 - DNA, 25 bp, Artificial
  probe
  misc_feature (1)..(25): SEQ ID NO: 4763; WAN024AAN; Start 50; Stop 74
ggtatgaaatgtaccataatcttca

SEQ ID NO: 390247 - DNA, 25 bp, Artificial
  probe
  misc_feature (1)..(25): SEQ ID NO: 4763; WAN024AAN; Start 49; Stop 73
aggtatgaaatgtaccataatcttc

SEQ ID NO: 390248 - DNA, 25 bp, Artificial
  probe
  misc_feature (1)..(25): SEQ ID NO: 4763; WAN024AAN; Start 7; Stop 31
tctcctttacaagtttagtaactag

SEQ ID NO: 390249 - DNA, 25 bp, Artificial
  probe
  misc_feature (1)..(25): SEQ ID NO: 4763; WAN024AAN; Start 12; Stop 36
tttacaagtttagtaactagcctta

SEQ ID NO: 390250 - DNA, 25 bp, Artificial
  probe
  misc_feature (1)..(25): SEQ ID NO: 4763; WAN024AAN; Start 48; Stop 72
aaggtatgaaatgtaccataatctt

SEQ ID NO: 390251 - DNA, 25 bp, Artificial
  probe
  misc_feature (1)..(25): SEQ ID NO: 4763; WAN024AAN; Start 15; Stop 39
acaagtttagtaactagccttatta

SEQ ID NO: 390252 - DNA, 25 bp, Artificial
  probe
  misc_feature (1)..(25): SEQ ID NO: 4763; WAN024AAN; Start 14; Stop 38
tacaagtttagtaactagccttatt

SEQ ID NO: 390253 - DNA, 25 bp, Artificial
  probe
  misc_feature (1)..(25): SEQ ID NO: 4763; WAN024AAN; Start 13; Stop 37
ttacaagtttagtaactagccttat

SEQ ID NO: 390254 - DNA, 25 bp, Artificial
  probe
  misc_feature (1)..(25): SEQ ID NO: 4763; WAN024AAN; Start 6; Stop 30
ttctcctttacaagtttagtaacta

SEQ ID NO: 390255 - DNA, 25 bp, Artificial
  probe
  misc_feature (1)..(25): SEQ ID NO: 4763; WAN024AAN; Start 47; Stop 71
taaggtatgaaatgtaccataatct

SEQ ID NO: 390256 - DNA, 25 bp, Artificial
  probe
  misc_feature (1)..(25): SEQ ID NO: 4763; WAN024AAN; Start 53; Stop 77
atgaaatgtaccataatcttcatca

SEQ ID NO: 390257 - DNA, 25 bp, Artificial
  probe
  misc_feature (1)..(25): SEQ ID NO: 4763; WAN024AAN; Start 51; Stop 75
gtatgaaatgtaccataatcttcat

SEQ ID NO: 390258 - DNA, 25 bp, Artificial
  probe
  misc_feature (1)..(25): SEQ ID NO: 4764; WAN0249SD; Start 205; Stop 229
ttaagagacaggaggaatacaagtt

SEQ ID NO: 390259 - DNA, 25 bp, Artificial
  probe
  misc_feature (1)..(25): SEQ ID NO: 4764; WAN0249SD; Start 204; Stop 228
attaagagacaggaggaatacaagt

SEQ ID NO: 390260 - DNA, 25 bp, Artificial
  probe
  misc_feature (1)..(25): SEQ ID NO: 4764; WAN0249SD; Start 206; Stop 230
taagagacaggaggaatacaagttt

SEQ ID NO: 390261 - DNA, 25 bp, Artificial
  probe
  misc_feature (1)..(25): SEQ ID NO: 4764; WAN0249SD; Start 203; Stop 227
tattaagagacaggaggaatacaag

SEQ ID NO: 390262 - DNA, 25 bp, Artificial
  probe
  misc_feature (1)..(25): SEQ ID NO: 4764; WAN0249SD; Start 202; Stop 226
atattaagagacaggaggaatacaa

SEQ ID NO: 390263 - DNA, 25 bp, Artificial
  probe
  misc_feature (1)..(25): SEQ ID NO: 4764; WAN0249SD; Start 197; Stop 221
aatgtatattaagagacaggaggaa

SEQ ID NO: 390264 - DNA, 25 bp, Artificial
  probe
  misc_feature (1)..(25): SEQ ID NO: 4764; WAN0249SD; Start 198; Stop 222
atgtatattaagagacaggaggaat

SEQ ID NO: 390265 - DNA, 25 bp, Artificial
  probe
  misc_feature (1)..(25): SEQ ID NO: 4764; WAN0249SD; Start 201; Stop 225
tatattaagagacaggaggaataca

SEQ ID NO: 390266 - DNA, 25 bp, Artificial
  probe
  misc_feature (1)..(25): SEQ ID NO: 4764; WAN0249SD; Start 199; Stop 223
tgtatattaagagacaggaggaata

SEQ ID NO: 390267 - DNA, 25 bp, Artificial
  probe
  misc_feature (1)..(25): SEQ ID NO: 4764; WAN0249SD; Start 196; Stop 220
taatgtatattaagagacaggagga

SEQ ID NO: 390268 - DNA, 25 bp, Artificial
  probe
  misc_feature (1)..(25): SEQ ID NO: 4764; WAN0249SD; Start 200; Stop 224
gtatattaagagacaggaggaatac

SEQ ID NO: 390269 - DNA, 25 bp, Artificial
  probe
  misc_feature (1)..(25): SEQ ID NO: 4764; WAN0249SD; Start 47; Stop 71
tccatgataaaacgcataattccaa

SEQ ID NO: 390270 - DNA, 25 bp, Artificial
  probe
  misc_feature (1)..(25): SEQ ID NO: 4764; WAN0249SD; Start 46; Stop 70
ttccatgataaaacgcataattcca

SEQ ID NO: 390271 - DNA, 25 bp, Artificial
  probe
  misc_feature (1)..(25): SEQ ID NO: 4764; WAN0249SD; Start 48; Stop 72
ccatgataaaacgcataattccaag

SEQ ID NO: 390272 - DNA, 25 bp, Artificial
  probe
  misc_feature (1)..(25): SEQ ID NO: 4764; WAN0249SD; Start 75; Stop 99
ttttacacttgatactatgcgtttt

SEQ ID NO: 390273 - DNA, 25 bp, Artificial
  probe
  misc_feature (1)..(25): SEQ ID NO: 4764; WAN0249SD; Start 50; Stop 74
atgataaaacgcataattccaagtt

SEQ ID NO: 390274 - DNA, 25 bp, Artificial
  probe
  misc_feature (1)..(25): SEQ ID NO: 4764; WAN0249SD; Start 49; Stop 73
catgataaaacgcataattccaagt

SEQ ID NO: 390275 - DNA, 25 bp, Artificial
  probe
  misc_feature (1)..(25): SEQ ID NO: 4764; WAN0249SD; Start 45; Stop 69
tttccatgataaaacgcataattcc

SEQ ID NO: 390276 - DNA, 25 bp, Artificial
  probe
  misc_feature (1)..(25): SEQ ID NO: 4764; WAN0249SD; Start 39; Stop 63
aaaatctttccatgataaaacgcat

SEQ ID NO: 390277 - DNA, 25 bp, Artificial
  probe
  misc_feature (1)..(25): SEQ ID NO: 4764; WAN0249SD; Start 76; Stop 100
tttacacttgatactatgcgtttta

SEQ ID NO: 390278 - DNA, 25 bp, Artificial
  probe
  misc_feature (1)..(25): SEQ ID NO: 4764; WAN0249SD; Start 43; Stop 67
tctttccatgataaaacgcataatt

SEQ ID NO: 390279 - DNA, 25 bp, Artificial
  probe
  misc_feature (1)..(25): SEQ ID NO: 4764; WAN0249SD; Start 41; Stop 65
aatctttccatgataaaacgcataa

SEQ ID NO: 390280 - DNA, 25 bp, Artificial
  probe
  misc_feature (1)..(25): SEQ ID NO: 4764; WAN0249SD; Start 40; Stop 64
aaatctttccatgataaaacgcata

SEQ ID NO: 390281 - DNA, 25 bp, Artificial
  probe
  misc_feature (1)..(25): SEQ ID NO: 4764; WAN0249SD; Start 44; Stop 68
ctttccatgataaaacgcataattc

SEQ ID NO: 390282 - DNA, 25 bp, Artificial
  probe
  misc_feature (1)..(25): SEQ ID NO: 4764; WAN0249SD; Start 77; Stop 101
ttacacttgatactatgcgttttat

SEQ ID NO: 390283 - DNA, 25 bp, Artificial
  probe
  misc_feature (1)..(25): SEQ ID NO: 4764; WAN0249SD; Start 42; Stop 66
atctttccatgataaaacgcataat

SEQ ID NO: 390284 - DNA, 25 bp, Artificial
  probe
  misc_feature (1)..(25): SEQ ID NO: 4764; WAN0249SD; Start 195; Stop 219
ttaatgtatattaagagacaggagg

SEQ ID NO: 390285 - DNA, 25 bp, Artificial
  probe
  misc_feature (1)..(25): SEQ ID NO: 4764; WAN0249SD; Start 51; Stop 75
tgataaaacgcataattccaagttt

SEQ ID NO: 390286 - DNA, 25 bp, Artificial
  probe
  misc_feature (1)..(25): SEQ ID NO: 4764; WAN0249SD; Start 79; Stop 103
acacttgatactatgcgttttataa

SEQ ID NO: 390287 - DNA, 25 bp, Artificial
  probe
  misc_feature (1)..(25): SEQ ID NO: 4764; WAN0249SD; Start 78; Stop 102
tacacttgatactatgcgttttata

SEQ ID NO: 390288 - DNA, 25 bp, Artificial
  probe
  misc_feature (1)..(25): SEQ ID NO: 4764; WAN0249SD; Start 115; Stop 139
atcctgaaagttatctttagaatct

SEQ ID NO: 390289 - DNA, 25 bp, Artificial
  probe
  misc_feature (1)..(25): SEQ ID NO: 4764; WAN0249SD; Start 80; Stop 104
cacttgatactatgcgttttataat

SEQ ID NO: 390290 - DNA, 25 bp, Artificial
  probe
  misc_feature (1)..(25): SEQ ID NO: 4764; WAN0249SD; Start 81; Stop 105
acttgatactatgcgttttataatt

SEQ ID NO: 390291 - DNA, 25 bp, Artificial
  probe
  misc_feature (1)..(25): SEQ ID NO: 4764; WAN0249SD; Start 52; Stop 76
gataaaacgcataattccaagtttt

SEQ ID NO: 390292 - DNA, 25 bp, Artificial
  probe
  misc_feature (1)..(25): SEQ ID NO: 4765; WAN0249RS; Start 165; Stop 189
aaactctctaattcccttaaagtgg

SEQ ID NO: 390293 - DNA, 25 bp, Artificial
  probe
  misc_feature (1)..(25): SEQ ID NO: 4765; WAN0249RS; Start 127; Stop 151
aagctgacgtagtttgaagagattt

SEQ ID NO: 390294 - DNA, 25 bp, Artificial
  probe
  misc_feature (1)..(25): SEQ ID NO: 4765; WAN0249RS; Start 126; Stop 150
gaagctgacgtagtttgaagagatt

SEQ ID NO: 390295 - DNA, 25 bp, Artificial
  probe
  misc_feature (1)..(25): SEQ ID NO: 4765; WAN0249RS; Start 67; Stop 91
tgaggttttagataagactgacgaa

SEQ ID NO: 390296 - DNA, 25 bp, Artificial
  probe
  misc_feature (1)..(25): SEQ ID NO: 4765; WAN0249RS; Start 66; Stop 90
ttgaggttttagataagactgacga

SEQ ID NO: 390297 - DNA, 25 bp, Artificial
  probe
  misc_feature (1)..(25): SEQ ID NO: 4765; WAN0249RS; Start 68; Stop 92
gaggttttagataagactgacgaag

SEQ ID NO: 390298 - DNA, 25 bp, Artificial
  probe
  misc_feature (1)..(25): SEQ ID NO: 4765; WAN0249RS; Start 65; Stop 89
cttgaggttttagataagactgacg

SEQ ID NO: 390299 - DNA, 25 bp, Artificial
  probe
  misc_feature (1)..(25): SEQ ID NO: 4765; WAN0249RS; Start 179; Stop 203
ccttaaagtgggaactagagagttt

SEQ ID NO: 390300 - DNA, 25 bp, Artificial
  probe
  misc_feature (1)..(25): SEQ ID NO: 4765; WAN0249RS; Start 166; Stop 190
aactctctaattcccttaaagtggg

SEQ ID NO: 390301 - DNA, 25 bp, Artificial
  probe
  misc_feature (1)..(25): SEQ ID NO: 4765; WAN0249RS; Start 63; Stop 87
gccttgaggttttagataagactga

SEQ ID NO: 390302 - DNA, 25 bp, Artificial
  probe
  misc_feature (1)..(25): SEQ ID NO: 4765; WAN0249RS; Start 61; Stop 85
ctgccttgaggttttagataagact

SEQ ID NO: 390303 - DNA, 25 bp, Artificial
  probe
  misc_feature (1)..(25): SEQ ID NO: 4765; WAN0249RS; Start 62; Stop 86
tgccttgaggttttagataagactg

SEQ ID NO: 390304 - DNA, 25 bp, Artificial
  probe
  misc_feature (1)..(25): SEQ ID NO: 4765; WAN0249RS; Start 60; Stop 84
actgccttgaggttttagataagac

SEQ ID NO: 390305 - DNA, 25 bp, Artificial
  probe
  misc_feature (1)..(25): SEQ ID NO: 4765; WAN0249RS; Start 59; Stop 83
tactgccttgaggttttagataaga

SEQ ID NO: 390306 - DNA, 25 bp, Artificial
  probe
  misc_feature (1)..(25): SEQ ID NO: 4765; WAN0249RS; Start 69; Stop 93
aggttttagataagactgacgaagt

SEQ ID NO: 390307 - DNA, 25 bp, Artificial
  probe
  misc_feature (1)..(25): SEQ ID NO: 4765; WAN0249RS; Start 64; Stop 88
ccttgaggttttagataagactgac

SEQ ID NO: 390308 - DNA, 25 bp, Artificial
  probe
  misc_feature (1)..(25): SEQ ID NO: 4765; WAN0249RS; Start 125; Stop 149
ggaagctgacgtagtttgaagagat

SEQ ID NO: 390309 - DNA, 25 bp, Artificial
  probe
  misc_feature (1)..(25): SEQ ID NO: 4765; WAN0249RS; Start 178; Stop 202
cccttaaagtgggaactagagagtt

SEQ ID NO: 390310 - DNA, 25 bp, Artificial
  probe
  misc_feature (1)..(25): SEQ ID NO: 4765; WAN0249RS; Start 58; Stop 82
gtactgccttgaggttttagataag

SEQ ID NO: 390311 - DNA, 25 bp, Artificial
  probe
  misc_feature (1)..(25): SEQ ID NO: 4765; WAN0249RS; Start 123; Stop 147
atggaagctgacgtagtttgaagag

SEQ ID NO: 390312 - DNA, 25 bp, Artificial
  probe
  misc_feature (1)..(25): SEQ ID NO: 4765; WAN0249RS; Start 122; Stop 146
gatggaagctgacgtagtttgaaga

SEQ ID NO: 390313 - DNA, 25 bp, Artificial
  probe
  misc_feature (1)..(25): SEQ ID NO: 4765; WAN0249RS; Start 121; Stop 145
agatggaagctgacgtagtttgaag

SEQ ID NO: 390314 - DNA, 25 bp, Artificial
  probe
  misc_feature (1)..(25): SEQ ID NO: 4765; WAN0249RS; Start 15; Stop 39
aaatcaaagagtaaactagaaagct

SEQ ID NO: 390315 - DNA, 25 bp, Artificial
  probe
  misc_feature (1)..(25): SEQ ID NO: 4765; WAN0249RS; Start 128; Stop 152
agctgacgtagtttgaagagatttt

SEQ ID NO: 390316 - DNA, 25 bp, Artificial
  probe
  misc_feature (1)..(25): SEQ ID NO: 4765; WAN0249RS; Start 130; Stop 154
ctgacgtagtttgaagagattttcg

SEQ ID NO: 390317 - DNA, 25 bp, Artificial
  probe
  misc_feature (1)..(25): SEQ ID NO: 4765; WAN0249RS; Start 129; Stop 153
gctgacgtagtttgaagagattttc

SEQ ID NO: 390318 - DNA, 25 bp, Artificial
  probe
  misc_feature (1)..(25): SEQ ID NO: 4765; WAN0249RS; Start 120; Stop 144
cagatggaagctgacgtagtttgaa

SEQ ID NO: 390319 - DNA, 25 bp, Artificial
  probe
  misc_feature (1)..(25): SEQ ID NO: 4765; WAN0249RS; Start 124; Stop 148
tggaagctgacgtagtttgaagaga

SEQ ID NO: 390320 - DNA, 25 bp, Artificial
  probe
  misc_feature (1)..(25): SEQ ID NO: 4765; WAN0249RS; Start 16; Stop 40
aatcaaagagtaaactagaaagcta

SEQ ID NO: 390321 - DNA, 25 bp, Artificial
  probe
  misc_feature (1)..(25): SEQ ID NO: 4765; WAN0249RS; Start 164; Stop 188
aaaactctctaattcccttaaagtg

SEQ ID NO: 390322 - DNA, 25 bp, Artificial
  probe
  misc_feature (1)..(25): SEQ ID NO: 4765; WAN0249RS; Start 57; Stop 81
agtactgccttgaggttttagataa

SEQ ID NO: 390323 - DNA, 25 bp, Artificial
  probe
  misc_feature (1)..(25): SEQ ID NO: 4765; WAN0249RS; Start 55; Stop 79
aaagtactgccttgaggttttagat

SEQ ID NO: 390324 - DNA, 25 bp, Artificial
  probe
  misc_feature (1)..(25): SEQ ID NO: 4765; WAN0249RS; Start 56; Stop 80
aagtactgccttgaggttttagata

SEQ ID NO: 390325 - DNA, 25 bp, Artificial
  probe
  misc_feature (1)..(25): SEQ ID NO: 4766; WAN0249RN; Start 44; Stop 68
ttaccgtatgtatgtgactgacttc

SEQ ID NO: 390326 - DNA, 25 bp, Artificial
  probe
  misc_feature (1)..(25): SEQ ID NO: 4766; WAN0249RN; Start 43; Stop 67
cttaccgtatgtatgtgactgactt

SEQ ID NO: 390327 - DNA, 25 bp, Artificial
  probe
  misc_feature (1)..(25): SEQ ID NO: 4766; WAN0249RN; Start 42; Stop 66
ccttaccgtatgtatgtgactgact

SEQ ID NO: 390328 - DNA, 25 bp, Artificial
  probe
  misc_feature (1)..(25): SEQ ID NO: 4766; WAN0249RN; Start 45; Stop 69
taccgtatgtatgtgactgacttcg

SEQ ID NO: 390329 - DNA, 25 bp, Artificial
  probe
  misc_feature (1)..(25): SEQ ID NO: 4766; WAN0249RN; Start 41; Stop 65
gccttaccgtatgtatgtgactgac

SEQ ID NO: 390330 - DNA, 25 bp, Artificial
  probe
  misc_feature (1)..(25): SEQ ID NO: 4766; WAN0249RN; Start 46; Stop 70
accgtatgtatgtgactgacttcgt

SEQ ID NO: 390331 - DNA, 25 bp, Artificial
  probe
  misc_feature (1)..(25): SEQ ID NO: 4766; WAN0249RN; Start 47; Stop 71
ccgtatgtatgtgactgacttcgtc

SEQ ID NO: 390332 - DNA, 25 bp, Artificial
  probe
  misc_feature (1)..(25): SEQ ID NO: 4766; WAN0249RN; Start 40; Stop 64
cgccttaccgtatgtatgtgactga

SEQ ID NO: 390333 - DNA, 25 bp, Artificial
  probe
  misc_feature (1)..(25): SEQ ID NO: 4766; WAN0249RN; Start 39; Stop 63
tcgccttaccgtatgtatgtgactg

SEQ ID NO: 390334 - DNA, 25 bp, Artificial
  probe
  misc_feature (1)..(25): SEQ ID NO: 4766; WAN0249RN; Start 38; Stop 62
gtcgccttaccgtatgtatgtgact

SEQ ID NO: 390335 - DNA, 25 bp, Artificial
  probe
  misc_feature (1)..(25): SEQ ID NO: 4766; WAN0249RN; Start 212; Stop 236
tcgtataaagtgaaaaggaaggatt

SEQ ID NO: 390336 - DNA, 25 bp, Artificial
  probe
  misc_feature (1)..(25): SEQ ID NO: 4766; WAN0249RN; Start 211; Stop 235
atcgtataaagtgaaaaggaaggat

SEQ ID NO: 390337 - DNA, 25 bp, Artificial
  probe
  misc_feature (1)..(25): SEQ ID NO: 4766; WAN0249RN; Start 210; Stop 234
gatcgtataaagtgaaaaggaagga

SEQ ID NO: 390338 - DNA, 25 bp, Artificial
  probe
  misc_feature (1)..(25): SEQ ID NO: 4766; WAN0249RN; Start 209; Stop 233
agatcgtataaagtgaaaaggaagg

SEQ ID NO: 390339 - DNA, 25 bp, Artificial
  probe
  misc_feature (1)..(25): SEQ ID NO: 4766; WAN0249RN; Start 213; Stop 237
cgtataaagtgaaaaggaaggattt

SEQ ID NO: 390340 - DNA, 25 bp, Artificial
  probe
  misc_feature (1)..(25): SEQ ID NO: 4766; WAN0249RN; Start 48; Stop 72
cgtatgtatgtgactgacttcgtca

SEQ ID NO: 390341 - DNA, 25 bp, Artificial
  probe
  misc_feature (1)..(25): SEQ ID NO: 4766; WAN0249RN; Start 206; Stop 230
agtagatcgtataaagtgaaaagga

SEQ ID NO: 390342 - DNA, 25 bp, Artificial
  probe
  misc_feature (1)..(25): SEQ ID NO: 4766; WAN0249RN; Start 207; Stop 231
gtagatcgtataaagtgaaaaggaa

SEQ ID NO: 390343 - DNA, 25 bp, Artificial
  probe
  misc_feature (1)..(25): SEQ ID NO: 4766; WAN0249RN; Start 208; Stop 232
tagatcgtataaagtgaaaaggaag

SEQ ID NO: 390344 - DNA, 25 bp, Artificial
  probe
  misc_feature (1)..(25): SEQ ID NO: 4766; WAN0249RN; Start 205; Stop 229
tagtagatcgtataaagtgaaaagg

SEQ ID NO: 390345 - DNA, 25 bp, Artificial
  probe
  misc_feature (1)..(25): SEQ ID NO: 4766; WAN0249RN; Start 199; Stop 223
cgaaattagtagatcgtataaagtg

SEQ ID NO: 390346 - DNA, 25 bp, Artificial
  probe
  misc_feature (1)..(25): SEQ ID NO: 4766; WAN0249RN; Start 191; Stop 215
agataaatcgaaattagtagatcgt

SEQ ID NO: 390347 - DNA, 25 bp, Artificial
  probe
  misc_feature (1)..(25): SEQ ID NO: 4766; WAN0249RN; Start 214; Stop 238
gtataaagtgaaaaggaaggatttc

SEQ ID NO: 390348 - DNA, 25 bp, Artificial
  probe
  misc_feature (1)..(25): SEQ ID NO: 4766; WAN0249RN; Start 198; Stop 222
tcgaaattagtagatcgtataaagt

SEQ ID NO: 390349 - DNA, 25 bp, Artificial
  probe
  misc_feature (1)..(25): SEQ ID NO: 4766; WAN0249RN; Start 190; Stop 214
aagataaatcgaaattagtagatcg

SEQ ID NO: 390350 - DNA, 25 bp, Artificial
  probe
  misc_feature (1)..(25): SEQ ID NO: 4766; WAN0249RN; Start 217; Stop 241
taaagtgaaaaggaaggatttcaat

SEQ ID NO: 390351 - DNA, 25 bp, Artificial
  probe
  misc_feature (1)..(25): SEQ ID NO: 4766; WAN0249RN; Start 216; Stop 240
ataaagtgaaaaggaaggatttcaa

SEQ ID NO: 390352 - DNA, 25 bp, Artificial
  probe
  misc_feature (1)..(25): SEQ ID NO: 4766; WAN0249RN; Start 215; Stop 239
tataaagtgaaaaggaaggatttca

SEQ ID NO: 390353 - DNA, 25 bp, Artificial
  probe
  misc_feature (1)..(25): SEQ ID NO: 4767; WAN0249IV; Start 48; Stop 72
caagaaatgaggcaaacacaagata

SEQ ID NO: 390354 - DNA, 25 bp, Artificial
  probe
  misc_feature (1)..(25): SEQ ID NO: 4767; WAN0249IV; Start 50; Stop 74
agaaatgaggcaaacacaagatatg

SEQ ID NO: 390355 - DNA, 25 bp, Artificial
  probe
  misc_feature (1)..(25): SEQ ID NO: 4767; WAN0249IV; Start 49; Stop 73
aagaaatgaggcaaacacaagatat

SEQ ID NO: 390356 - DNA, 25 bp, Artificial
  probe
  misc_feature (1)..(25): SEQ ID NO: 4767; WAN0249IV; Start 39; Stop 63
aacaaagttcaagaaatgaggcaaa

SEQ ID NO: 390357 - DNA, 25 bp, Artificial
  probe
  misc_feature (1)..(25): SEQ ID NO: 4767; WAN0249IV; Start 38; Stop 62
taacaaagttcaagaaatgaggcaa

SEQ ID NO: 390358 - DNA, 25 bp, Artificial
  probe
  misc_feature (1)..(25): SEQ ID NO: 4767; WAN0249IV; Start 37; Stop 61
ataacaaagttcaagaaatgaggca

SEQ ID NO: 390359 - DNA, 25 bp, Artificial
  probe
  misc_feature (1)..(25): SEQ ID NO: 4767; WAN0249IV; Start 42; Stop 66
aaagttcaagaaatgaggcaaacac

SEQ ID NO: 390360 - DNA, 25 bp, Artificial
  probe
  misc_feature (1)..(25): SEQ ID NO: 4767; WAN0249IV; Start 41; Stop 65
caaagttcaagaaatgaggcaaaca

SEQ ID NO: 390361 - DNA, 25 bp, Artificial
  probe
  misc_feature (1)..(25): SEQ ID NO: 4767; WAN0249IV; Start 40; Stop 64
acaaagttcaagaaatgaggcaaac

SEQ ID NO: 390362 - DNA, 25 bp, Artificial
  probe
  misc_feature (1)..(25): SEQ ID NO: 4767; WAN0249IV; Start 58; Stop 82
ggcaaacacaagatatgtatcaaca

SEQ ID NO: 390363 - DNA, 25 bp, Artificial
  probe
  misc_feature (1)..(25): SEQ ID NO: 4767; WAN0249IV; Start 51; Stop 75
gaaatgaggcaaacacaagatatgt

SEQ ID NO: 390364 - DNA, 25 bp, Artificial
  probe
  misc_feature (1)..(25): SEQ ID NO: 4767; WAN0249IV; Start 55; Stop 79
tgaggcaaacacaagatatgtatca

SEQ ID NO: 390365 - DNA, 25 bp, Artificial
  probe
  misc_feature (1)..(25): SEQ ID NO: 4767; WAN0249IV; Start 57; Stop 81
aggcaaacacaagatatgtatcaac

SEQ ID NO: 390366 - DNA, 25 bp, Artificial
  probe
  misc_feature (1)..(25): SEQ ID NO: 4767; WAN0249IV; Start 56; Stop 80
gaggcaaacacaagatatgtatcaa

SEQ ID NO: 390367 - DNA, 25 bp, Artificial
  probe
  misc_feature (1)..(25): SEQ ID NO: 4767; WAN0249IV; Start 54; Stop 78
atgaggcaaacacaagatatgtatc

SEQ ID NO: 390368 - DNA, 25 bp, Artificial
  probe
  misc_feature (1)..(25): SEQ ID NO: 4767; WAN0249IV; Start 47; Stop 71
tcaagaaatgaggcaaacacaagat

SEQ ID NO: 390369 - DNA, 25 bp, Artificial
  probe
  misc_feature (1)..(25): SEQ ID NO: 4767; WAN0249IV; Start 52; Stop 76
aaatgaggcaaacacaagatatgta

SEQ ID NO: 390370 - DNA, 25 bp, Artificial
  probe
  misc_feature (1)..(25): SEQ ID NO: 4767; WAN0249IV; Start 46; Stop 70
ttcaagaaatgaggcaaacacaaga

SEQ ID NO: 390371 - DNA, 25 bp, Artificial
  probe
  misc_feature (1)..(25): SEQ ID NO: 4767; WAN0249IV; Start 45; Stop 69
gttcaagaaatgaggcaaacacaag

SEQ ID NO: 390372 - DNA, 25 bp, Artificial
  probe
  misc_feature (1)..(25): SEQ ID NO: 4767; WAN0249IV; Start 53; Stop 77
aatgaggcaaacacaagatatgtat

SEQ ID NO: 390373 - DNA, 25 bp, Artificial
  probe
  misc_feature (1)..(25): SEQ ID NO: 4767; WAN0249IV; Start 44; Stop 68
agttcaagaaatgaggcaaacacaa

SEQ ID NO: 390374 - DNA, 25 bp, Artificial
  probe
  misc_feature (1)..(25): SEQ ID NO: 4767; WAN0249IV; Start 43; Stop 67
aagttcaagaaatgaggcaaacaca

SEQ ID NO: 390375 - DNA, 25 bp, Artificial
  probe
  misc_feature (1)..(25): SEQ ID NO: 4767; WAN0249IV; Start 59; Stop 83
gcaaacacaagatatgtatcaacaa

SEQ ID NO: 390376 - DNA, 25 bp, Artificial
  probe
  misc_feature (1)..(25): SEQ ID NO: 4767; WAN0249IV; Start 36; Stop 60
tataacaaagttcaagaaatgaggc

SEQ ID NO: 390377 - DNA, 25 bp, Artificial
  probe
  misc_feature (1)..(25): SEQ ID NO: 4767; WAN0249IV; Start 35; Stop 59
gtataacaaagttcaagaaatgagg

SEQ ID NO: 390378 - DNA, 25 bp, Artificial
  probe
  misc_feature (1)..(25): SEQ ID NO: 4767; WAN0249IV; Start 60; Stop 84
caaacacaagatatgtatcaacaat

SEQ ID NO: 390379 - DNA, 25 bp, Artificial
  probe
  misc_feature (1)..(25): SEQ ID NO: 4767; WAN0249IV; Start 34; Stop 58
agtataacaaagttcaagaaatgag

SEQ ID NO: 390380 - DNA, 25 bp, Artificial
  probe
  misc_feature (1)..(25): SEQ ID NO: 4767; WAN0249IV; Start 62; Stop 86
aacacaagatatgtatcaacaattt

SEQ ID NO: 390381 - DNA, 25 bp, Artificial
  probe
  misc_feature (1)..(25): SEQ ID NO: 4767; WAN0249IV; Start 61; Stop 85
aaacacaagatatgtatcaacaatt

SEQ ID NO: 390382 - DNA, 25 bp, Artificial
  probe
  misc_feature (1)..(25): SEQ ID NO: 4767; WAN0249IV; Start 63; Stop 87
acacaagatatgtatcaacaatttt

SEQ ID NO: 390383 - DNA, 25 bp, Artificial
  probe
  misc_feature (1)..(25): SEQ ID NO: 4768; WAN0249KS; Start 38; Stop 62
aacctgtaaggctgatagttagatt

SEQ ID NO: 390384 - DNA, 25 bp, Artificial
  probe
  misc_feature (1)..(25): SEQ ID NO: 4768; WAN0249KS; Start 39; Stop 63
acctgtaaggctgatagttagatta

SEQ ID NO: 390385 - DNA, 25 bp, Artificial
  probe
  misc_feature (1)..(25): SEQ ID NO: 4768; WAN0249KS; Start 37; Stop 61
taacctgtaaggctgatagttagat

SEQ ID NO: 390386 - DNA, 25 bp, Artificial
  probe
  misc_feature (1)..(25): SEQ ID NO: 4768; WAN0249KS; Start 36; Stop 60
ataacctgtaaggctgatagttaga

SEQ ID NO: 390387 - DNA, 25 bp, Artificial
  probe
  misc_feature (1)..(25): SEQ ID NO: 4768; WAN0249KS; Start 35; Stop 59
aataacctgtaaggctgatagttag

SEQ ID NO: 390388 - DNA, 25 bp, Artificial
  probe
  misc_feature (1)..(25): SEQ ID NO: 4768; WAN0249KS; Start 40; Stop 64
cctgtaaggctgatagttagattaa

SEQ ID NO: 390389 - DNA, 25 bp, Artificial
  probe
  misc_feature (1)..(25): SEQ ID NO: 4768; WAN0249KS; Start 30; Stop 54
cgttaaataacctgtaaggctgata

SEQ ID NO: 390390 - DNA, 25 bp, Artificial
  probe
  misc_feature (1)..(25): SEQ ID NO: 4768; WAN0249KS; Start 29; Stop 53
acgttaaataacctgtaaggctgat

SEQ ID NO: 390391 - DNA, 25 bp, Artificial
  probe
  misc_feature (1)..(25): SEQ ID NO: 4768; WAN0249KS; Start 33; Stop 57
taaataacctgtaaggctgatagtt

SEQ ID NO: 390392 - DNA, 25 bp, Artificial
  probe
  misc_feature (1)..(25): SEQ ID NO: 4768; WAN0249KS; Start 32; Stop 56
ttaaataacctgtaaggctgatagt

SEQ ID NO: 390393 - DNA, 25 bp, Artificial
  probe
  misc_feature (1)..(25): SEQ ID NO: 4768; WAN0249KS; Start 31; Stop 55
gttaaataacctgtaaggctgatag

SEQ ID NO: 390394 - DNA, 25 bp, Artificial
  probe
  misc_feature (1)..(25): SEQ ID NO: 4768; WAN0249KS; Start 34; Stop 58
aaataacctgtaaggctgatagtta

SEQ ID NO: 390395 - DNA, 25 bp, Artificial
  probe
  misc_feature (1)..(25): SEQ ID NO: 4768; WAN0249KS; Start 41; Stop 65
ctgtaaggctgatagttagattaat

SEQ ID NO: 390396 - DNA, 25 bp, Artificial
  probe
  misc_feature (1)..(25): SEQ ID NO: 4768; WAN0249KS; Start 27; Stop 51
aaacgttaaataacctgtaaggctg

SEQ ID NO: 390397 - DNA, 25 bp, Artificial
  probe
  misc_feature (1)..(25): SEQ ID NO: 4768; WAN0249KS; Start 25; Stop 49
tgaaacgttaaataacctgtaaggc

SEQ ID NO: 390398 - DNA, 25 bp, Artificial
  probe
  misc_feature (1)..(25): SEQ ID NO: 4768; WAN0249KS; Start 28; Stop 52
aacgttaaataacctgtaaggctga

SEQ ID NO: 390399 - DNA, 25 bp, Artificial
  probe
  misc_feature (1)..(25): SEQ ID NO: 4768; WAN0249KS; Start 26; Stop 50
gaaacgttaaataacctgtaaggct

SEQ ID NO: 390400 - DNA, 25 bp, Artificial
  probe
  misc_feature (1)..(25): SEQ ID NO: 4768; WAN0249KS; Start 24; Stop 48
ctgaaacgttaaataacctgtaagg

SEQ ID NO: 390401 - DNA, 25 bp, Artificial
  probe
  misc_feature (1)..(25): SEQ ID NO: 4768; WAN0249KS; Start 23; Stop 47
tctgaaacgttaaataacctgtaag

SEQ ID NO: 390402 - DNA, 25 bp, Artificial
  probe
  misc_feature (1)..(25): SEQ ID NO: 4768; WAN0249KS; Start 22; Stop 46
ttctgaaacgttaaataacctgtaa

SEQ ID NO: 390403 - DNA, 25 bp, Artificial
  probe
  misc_feature (1)..(25): SEQ ID NO: 4768; WAN0249KS; Start 21; Stop 45
tttctgaaacgttaaataacctgta

SEQ ID NO: 390404 - DNA, 25 bp, Artificial
  probe
  misc_feature (1)..(25): SEQ ID NO: 4768; WAN0249KS; Start 20; Stop 44
ttttctgaaacgttaaataacctgt

SEQ ID NO: 390405 - DNA, 25 bp, Artificial
  probe
  misc_feature (1)..(25): SEQ ID NO: 4769; WAN0249NE; Start 62; Stop 86
aggaaacggtttcattgtataatgt

SEQ ID NO: 390406 - DNA, 25 bp, Artificial
  probe
  misc_feature (1)..(25): SEQ ID NO: 4769; WAN0249NE; Start 54; Stop 78
cttgacaaaggaaacggtttcattg

SEQ ID NO: 390407 - DNA, 25 bp, Artificial
  probe
  misc_feature (1)..(25): SEQ ID NO: 4769; WAN0249NE; Start 67; Stop 91
acggtttcattgtataatgtaaaca

SEQ ID NO: 390408 - DNA, 25 bp, Artificial
  probe
  misc_feature (1)..(25): SEQ ID NO: 4769; WAN0249NE; Start 59; Stop 83
caaaggaaacggtttcattgtataa

SEQ ID NO: 390409 - DNA, 25 bp, Artificial
  probe
  misc_feature (1)..(25): SEQ ID NO: 4769; WAN0249NE; Start 61; Stop 85
aaggaaacggtttcattgtataatg

SEQ ID NO: 390410 - DNA, 25 bp, Artificial
  probe
  misc_feature (1)..(25): SEQ ID NO: 4769; WAN0249NE; Start 57; Stop 81
gacaaaggaaacggtttcattgtat

SEQ ID NO: 390411 - DNA, 25 bp, Artificial
  probe
  misc_feature (1)..(25): SEQ ID NO: 4769; WAN0249NE; Start 63; Stop 87
ggaaacggtttcattgtataatgta

SEQ ID NO: 390412 - DNA, 25 bp, Artificial
  probe
  misc_feature (1)..(25): SEQ ID NO: 4769; WAN0249NE; Start 58; Stop 82
acaaaggaaacggtttcattgtata

SEQ ID NO: 390413 - DNA, 25 bp, Artificial
  probe
  misc_feature (1)..(25): SEQ ID NO: 4769; WAN0249NE; Start 60; Stop 84
aaaggaaacggtttcattgtataat

SEQ ID NO: 390414 - DNA, 25 bp, Artificial
  probe
  misc_feature (1)..(25): SEQ ID NO: 4769; WAN0249NE; Start 56; Stop 80
tgacaaaggaaacggtttcattgta

SEQ ID NO: 390415 - DNA, 25 bp, Artificial
  probe
  misc_feature (1)..(25): SEQ ID NO: 4769; WAN0249NE; Start 66; Stop 90
aacggtttcattgtataatgtaaac

SEQ ID NO: 390416 - DNA, 25 bp, Artificial
  probe
  misc_feature (1)..(25): SEQ ID NO: 4769; WAN0249NE; Start 53; Stop 77
gcttgacaaaggaaacggtttcatt

SEQ ID NO: 390417 - DNA, 25 bp, Artificial
  probe
  misc_feature (1)..(25): SEQ ID NO: 4769; WAN0249NE; Start 55; Stop 79
ttgacaaaggaaacggtttcattgt

SEQ ID NO: 390418 - DNA, 25 bp, Artificial
  probe
  misc_feature (1)..(25): SEQ ID NO: 4769; WAN0249NE; Start 68; Stop 92
cggtttcattgtataatgtaaacat

SEQ ID NO: 390419 - DNA, 25 bp, Artificial
  probe
  misc_feature (1)..(25): SEQ ID NO: 4769; WAN0249NE; Start 65; Stop 89
aaacggtttcattgtataatgtaaa

SEQ ID NO: 390420 - DNA, 25 bp, Artificial
  probe
  misc_feature (1)..(25): SEQ ID NO: 4769; WAN0249NE; Start 64; Stop 88
gaaacggtttcattgtataatgtaa

SEQ ID NO: 390421 - DNA, 25 bp, Artificial
  probe
  misc_feature (1)..(25): SEQ ID NO: 4770; WAN0249H4; Start 26; Stop 50
aacgcataagattaaggtttgtgta

SEQ ID NO: 390422 - DNA, 25 bp, Artificial
  probe
  misc_feature (1)..(25): SEQ ID NO: 4770; WAN0249H4; Start 27; Stop 51
acgcataagattaaggtttgtgtac

SEQ ID NO: 390423 - DNA, 25 bp, Artificial
  probe
  misc_feature (1)..(25): SEQ ID NO: 4770; WAN0249H4; Start 28; Stop 52
cgcataagattaaggtttgtgtacc

SEQ ID NO: 390424 - DNA, 25 bp, Artificial
  probe
  misc_feature (1)..(25): SEQ ID NO: 4770; WAN0249H4; Start 42; Stop 66
gtttgtgtacctgttcttatacgtt

SEQ ID NO: 390425 - DNA, 25 bp, Artificial
  probe
  misc_feature (1)..(25): SEQ ID NO: 4770; WAN0249H4; Start 43; Stop 67
tttgtgtacctgttcttatacgttt

SEQ ID NO: 390426 - DNA, 25 bp, Artificial
  probe
  misc_feature (1)..(25): SEQ ID NO: 4770; WAN0249H4; Start 25; Stop 49
aaacgcataagattaaggtttgtgt

SEQ ID NO: 390427 - DNA, 25 bp, Artificial
  probe
  misc_feature (1)..(25): SEQ ID NO: 4770; WAN0249H4; Start 41; Stop 65
ggtttgtgtacctgttcttatacgt

SEQ ID NO: 390428 - DNA, 25 bp, Artificial
  probe
  misc_feature (1)..(25): SEQ ID NO: 4770; WAN0249H4; Start 11; Stop 35
tggaaactataacaaaacgcataag

SEQ ID NO: 390429 - DNA, 25 bp, Artificial
  probe
  misc_feature (1)..(25): SEQ ID NO: 4770; WAN0249H4; Start 12; Stop 36
ggaaactataacaaaacgcataaga

SEQ ID NO: 390430 - DNA, 25 bp, Artificial
  probe
  misc_feature (1)..(25): SEQ ID NO: 4770; WAN0249H4; Start 7; Stop 31
tgtatggaaactataacaaaacgca

SEQ ID NO: 390431 - DNA, 25 bp, Artificial
  probe
  misc_feature (1)..(25): SEQ ID NO: 4770; WAN0249H4; Start 8; Stop 32
gtatggaaactataacaaaacgcat

SEQ ID NO: 390432 - DNA, 25 bp, Artificial
  probe
  misc_feature (1)..(25): SEQ ID NO: 4770; WAN0249H4; Start 6; Stop 30
gtgtatggaaactataacaaaacgc

SEQ ID NO: 390433 - DNA, 25 bp, Artificial
  probe
  misc_feature (1)..(25): SEQ ID NO: 4770; WAN0249H4; Start 10; Stop 34
atggaaactataacaaaacgcataa

SEQ ID NO: 390434 - DNA, 25 bp, Artificial
  probe
  misc_feature (1)..(25): SEQ ID NO: 4770; WAN0249H4; Start 20; Stop 44
taacaaaacgcataagattaaggtt

SEQ ID NO: 390435 - DNA, 25 bp, Artificial
  probe
  misc_feature (1)..(25): SEQ ID NO: 4770; WAN0249H4; Start 19; Stop 43
ataacaaaacgcataagattaaggt

SEQ ID NO: 390436 - DNA, 25 bp, Artificial
  probe
  misc_feature (1)..(25): SEQ ID NO: 4770; WAN0249H4; Start 5; Stop 29
tgtgtatggaaactataacaaaacg

SEQ ID NO: 390437 - DNA, 25 bp, Artificial
  probe
  misc_feature (1)..(25): SEQ ID NO: 4770; WAN0249H4; Start 44; Stop 68
ttgtgtacctgttcttatacgtttt

SEQ ID NO: 390438 - DNA, 25 bp, Artificial
  probe
  misc_feature (1)..(25): SEQ ID NO: 4770; WAN0249H4; Start 24; Stop 48
aaaacgcataagattaaggtttgtg

SEQ ID NO: 390439 - DNA, 25 bp, Artificial
  probe
  misc_feature (1)..(25): SEQ ID NO: 4770; WAN0249H4; Start 23; Stop 47
caaaacgcataagattaaggtttgt

SEQ ID NO: 390440 - DNA, 25 bp, Artificial
  probe
  misc_feature (1)..(25): SEQ ID NO: 4770; WAN0249H4; Start 22; Stop 46
acaaaacgcataagattaaggtttg

SEQ ID NO: 390441 - DNA, 25 bp, Artificial
  probe
  misc_feature (1)..(25): SEQ ID NO: 4770; WAN0249H4; Start 21; Stop 45
aacaaaacgcataagattaaggttt

SEQ ID NO: 390442 - DNA, 25 bp, Artificial
  probe
  misc_feature (1)..(25): SEQ ID NO: 4770; WAN0249H4; Start 13; Stop 37
gaaactataacaaaacgcataagat

SEQ ID NO: 390443 - DNA, 25 bp, Artificial
  probe
  misc_feature (1)..(25): SEQ ID NO: 4770; WAN0249H4; Start 34; Stop 58
agattaaggtttgtgtacctgttct

SEQ ID NO: 390444 - DNA, 25 bp, Artificial
  probe
  misc_feature (1)..(25): SEQ ID NO: 4770; WAN0249H4; Start 40; Stop 64
aggtttgtgtacctgttcttatacg

SEQ ID NO: 390445 - DNA, 25 bp, Artificial
  probe
  misc_feature (1)..(25): SEQ ID NO: 4770; WAN0249H4; Start 9; Stop 33
tatggaaactataacaaaacgcata

SEQ ID NO: 390446 - DNA, 25 bp, Artificial
  probe
  misc_feature (1)..(25): SEQ ID NO: 4770; WAN0249H4; Start 35; Stop 59
gattaaggtttgtgtacctgttctt

SEQ ID NO: 390447 - DNA, 25 bp, Artificial
  probe
  misc_feature (1)..(25): SEQ ID NO: 4770; WAN0249H4; Start 33; Stop 57
aagattaaggtttgtgtacctgttc

SEQ ID NO: 390448 - DNA, 25 bp, Artificial
  probe
  misc_feature (1)..(25): SEQ ID NO: 4770; WAN0249H4; Start 29; Stop 53
gcataagattaaggtttgtgtacct

SEQ ID NO: 390449 - DNA, 25 bp, Artificial
  probe
  misc_feature (1)..(25): SEQ ID NO: 4770; WAN0249H4; Start 39; Stop 63
aaggtttgtgtacctgttcttatac

SEQ ID NO: 390450 - DNA, 25 bp, Artificial
  probe
  misc_feature (1)..(25): SEQ ID NO: 4770; WAN0249H4; Start 14; Stop 38
aaactataacaaaacgcataagatt

SEQ ID NO: 390451 - DNA, 25 bp, Artificial
  probe
  misc_feature (1)..(25): SEQ ID NO: 4770; WAN0249H4; Start 37; Stop 61
ttaaggtttgtgtacctgttcttat

SEQ ID NO: 390452 - DNA, 25 bp, Artificial
  probe
  misc_feature (1)..(25): SEQ ID NO: 4770; WAN0249H4; Start 36; Stop 60
attaaggtttgtgtacctgttctta

SEQ ID NO: 390453 - DNA, 25 bp, Artificial
  probe
  misc_feature (1)..(25): SEQ ID NO: 4770; WAN0249H4; Start 32; Stop 56
taagattaaggtttgtgtacctgtt

SEQ ID NO: 390454 - DNA, 25 bp, Artificial
  probe
  misc_feature (1)..(25): SEQ ID NO: 4771; WAN024A6W; Start 75; Stop 99
tgttagtgcttatatggggagaatc

SEQ ID NO: 390455 - DNA, 25 bp, Artificial
  probe
  misc_feature (1)..(25): SEQ ID NO: 4771; WAN024A6W; Start 72; Stop 96
gaatgttagtgcttatatggggaga

SEQ ID NO: 390456 - DNA, 25 bp, Artificial
  probe
  misc_feature (1)..(25): SEQ ID NO: 4771; WAN024A6W; Start 73; Stop 97
aatgttagtgcttatatggggagaa

SEQ ID NO: 390457 - DNA, 25 bp, Artificial
  probe
  misc_feature (1)..(25): SEQ ID NO: 4771; WAN024A6W; Start 74; Stop 98
atgttagtgcttatatggggagaat

SEQ ID NO: 390458 - DNA, 25 bp, Artificial
  probe
  misc_feature (1)..(25): SEQ ID NO: 4771; WAN024A6W; Start 71; Stop 95
ggaatgttagtgcttatatggggag

SEQ ID NO: 390459 - DNA, 25 bp, Artificial
  probe
  misc_feature (1)..(25): SEQ ID NO: 4771; WAN024A6W; Start 70; Stop 94
tggaatgttagtgcttatatgggga

SEQ ID NO: 390460 - DNA, 25 bp, Artificial
  probe
  misc_feature (1)..(25): SEQ ID NO: 4771; WAN024A6W; Start 76; Stop 100
gttagtgcttatatggggagaatcc

SEQ ID NO: 390461 - DNA, 25 bp, Artificial
  probe
  misc_feature (1)..(25): SEQ ID NO: 4771; WAN024A6W; Start 78; Stop 102
tagtgcttatatggggagaatccaa

SEQ ID NO: 390462 - DNA, 25 bp, Artificial
  probe
  misc_feature (1)..(25): SEQ ID NO: 4771; WAN024A6W; Start 77; Stop 101
ttagtgcttatatggggagaatcca

SEQ ID NO: 390463 - DNA, 25 bp, Artificial
  probe
  misc_feature (1)..(25): SEQ ID NO: 4771; WAN024A6W; Start 80; Stop 104
gtgcttatatggggagaatccaaag

SEQ ID NO: 390464 - DNA, 25 bp, Artificial
  probe
  misc_feature (1)..(25): SEQ ID NO: 4771; WAN024A6W; Start 79; Stop 103
agtgcttatatggggagaatccaaa

SEQ ID NO: 390465 - DNA, 25 bp, Artificial
  probe
  misc_feature (1)..(25): SEQ ID NO: 4771; WAN024A6W; Start 82; Stop 106
gcttatatggggagaatccaaagga

SEQ ID NO: 390466 - DNA, 25 bp, Artificial
  probe
  misc_feature (1)..(25): SEQ ID NO: 4771; WAN024A6W; Start 81; Stop 105
tgcttatatggggagaatccaaagg

SEQ ID NO: 390467 - DNA, 25 bp, Artificial
  probe
  misc_feature (1)..(25): SEQ ID NO: 4771; WAN024A6W; Start 83; Stop 107
cttatatggggagaatccaaaggat

SEQ ID NO: 390468 - DNA, 25 bp, Artificial
  probe
  misc_feature (1)..(25): SEQ ID NO: 4772; WAN024AAC; Start 119; Stop 143
gtctgtatcctagtagagtggtgat

SEQ ID NO: 390469 - DNA, 25 bp, Artificial
  probe
  misc_feature (1)..(25): SEQ ID NO: 4772; WAN024AAC; Start 117; Stop 141
ttgtctgtatcctagtagagtggtg

SEQ ID NO: 390470 - DNA, 25 bp, Artificial
  probe
  misc_feature (1)..(25): SEQ ID NO: 4772; WAN024AAC; Start 118; Stop 142
tgtctgtatcctagtagagtggtga

SEQ ID NO: 390471 - DNA, 25 bp, Artificial
  probe
  misc_feature (1)..(25): SEQ ID NO: 4772; WAN024AAC; Start 120; Stop 144
tctgtatcctagtagagtggtgata

SEQ ID NO: 390472 - DNA, 25 bp, Artificial
  probe
  misc_feature (1)..(25): SEQ ID NO: 4772; WAN024AAC; Start 116; Stop 140
tttgtctgtatcctagtagagtggt

SEQ ID NO: 390473 - DNA, 25 bp, Artificial
  probe
  misc_feature (1)..(25): SEQ ID NO: 4772; WAN024AAC; Start 115; Stop 139
atttgtctgtatcctagtagagtgg

SEQ ID NO: 390474 - DNA, 25 bp, Artificial
  probe
  misc_feature (1)..(25): SEQ ID NO: 4772; WAN024AAC; Start 97; Stop 121
aaacggaatttggaacagatttgtc

SEQ ID NO: 390475 - DNA, 25 bp, Artificial
  probe
  misc_feature (1)..(25): SEQ ID NO: 4772; WAN024AAC; Start 98; Stop 122
aacggaatttggaacagatttgtct

SEQ ID NO: 390476 - DNA, 25 bp, Artificial
  probe
  misc_feature (1)..(25): SEQ ID NO: 4772; WAN024AAC; Start 25; Stop 49
tcgaaggattgtaaggtaagagttt

SEQ ID NO: 390477 - DNA, 25 bp, Artificial
  probe
  misc_feature (1)..(25): SEQ ID NO: 4772; WAN024AAC; Start 114; Stop 138
gatttgtctgtatcctagtagagtg

SEQ ID NO: 390478 - DNA, 25 bp, Artificial
  probe
  misc_feature (1)..(25): SEQ ID NO: 4772; WAN024AAC; Start 113; Stop 137
agatttgtctgtatcctagtagagt

SEQ ID NO: 390479 - DNA, 25 bp, Artificial
  probe
  misc_feature (1)..(25): SEQ ID NO: 4772; WAN024AAC; Start 24; Stop 48
ttcgaaggattgtaaggtaagagtt

SEQ ID NO: 390480 - DNA, 25 bp, Artificial
  probe
  misc_feature (1)..(25): SEQ ID NO: 4772; WAN024AAC; Start 23; Stop 47
attcgaaggattgtaaggtaagagt

SEQ ID NO: 390481 - DNA, 25 bp, Artificial
  probe
  misc_feature (1)..(25): SEQ ID NO: 4772; WAN024AAC; Start 26; Stop 50
cgaaggattgtaaggtaagagtttt

SEQ ID NO: 390482 - DNA, 25 bp, Artificial
  probe
  misc_feature (1)..(25): SEQ ID NO: 4772; WAN024AAC; Start 22; Stop 46
aattcgaaggattgtaaggtaagag

SEQ ID NO: 390483 - DNA, 25 bp, Artificial
  probe
  misc_feature (1)..(25): SEQ ID NO: 4772; WAN024AAC; Start 95; Stop 119
taaaacggaatttggaacagatttg

SEQ ID NO: 390484 - DNA, 25 bp, Artificial
  probe
  misc_feature (1)..(25): SEQ ID NO: 4772; WAN024AAC; Start 96; Stop 120
aaaacggaatttggaacagatttgt

SEQ ID NO: 390485 - DNA, 25 bp, Artificial
  probe
  misc_feature (1)..(25): SEQ ID NO: 4772; WAN024AAC; Start 94; Stop 118
ataaaacggaatttggaacagattt

SEQ ID NO: 390486 - DNA, 25 bp, Artificial
  probe
  misc_feature (1)..(25): SEQ ID NO: 4772; WAN024AAC; Start 93; Stop 117
aataaaacggaatttggaacagatt

SEQ ID NO: 390487 - DNA, 25 bp, Artificial
  probe
  misc_feature (1)..(25): SEQ ID NO: 4772; WAN024AAC; Start 91; Stop 115
aaaataaaacggaatttggaacaga

SEQ ID NO: 390488 - DNA, 25 bp, Artificial
  probe
  misc_feature (1)..(25): SEQ ID NO: 4772; WAN024AAC; Start 89; Stop 113
agaaaataaaacggaatttggaaca

SEQ ID NO: 390489 - DNA, 25 bp, Artificial
  probe
  misc_feature (1)..(25): SEQ ID NO: 4772; WAN024AAC; Start 122; Stop 146
tgtatcctagtagagtggtgatact

SEQ ID NO: 390490 - DNA, 25 bp, Artificial
  probe
  misc_feature (1)..(25): SEQ ID NO: 4772; WAN024AAC; Start 90; Stop 114
gaaaataaaacggaatttggaacag

SEQ ID NO: 390491 - DNA, 25 bp, Artificial
  probe
  misc_feature (1)..(25): SEQ ID NO: 4772; WAN024AAC; Start 121; Stop 145
ctgtatcctagtagagtggtgatac

SEQ ID NO: 390492 - DNA, 25 bp, Artificial
  probe
  misc_feature (1)..(25): SEQ ID NO: 4772; WAN024AAC; Start 92; Stop 116
aaataaaacggaatttggaacagat

SEQ ID NO: 390493 - DNA, 25 bp, Artificial
  probe
  misc_feature (1)..(25): SEQ ID NO: 4772; WAN024AAC; Start 21; Stop 45
aaattcgaaggattgtaaggtaaga

SEQ ID NO: 390494 - DNA, 25 bp, Artificial
  probe
  misc_feature (1)..(25): SEQ ID NO: 4772; WAN024AAC; Start 99; Stop 123
acggaatttggaacagatttgtctg

SEQ ID NO: 390495 - DNA, 25 bp, Artificial
  probe
  misc_feature (1)..(25): SEQ ID NO: 4772; WAN024AAC; Start 86; Stop 110
actagaaaataaaacggaatttgga

SEQ ID NO: 390496 - DNA, 25 bp, Artificial
  probe
  misc_feature (1)..(25): SEQ ID NO: 4772; WAN024AAC; Start 112; Stop 136
cagatttgtctgtatcctagtagag

SEQ ID NO: 390497 - DNA, 25 bp, Artificial
  probe
  misc_feature (1)..(25): SEQ ID NO: 4772; WAN024AAC; Start 77; Stop 101
gcaatcaaaactagaaaataaaacg

SEQ ID NO: 390498 - DNA, 25 bp, Artificial
  probe
  misc_feature (1)..(25): SEQ ID NO: 4772; WAN024AAC; Start 88; Stop 112
tagaaaataaaacggaatttggaac

SEQ ID NO: 390499 - DNA, 25 bp, Artificial
  probe
  misc_feature (1)..(25): SEQ ID NO: 4772; WAN024AAC; Start 85; Stop 109
aactagaaaataaaacggaatttgg

SEQ ID NO: 390500 - DNA, 25 bp, Artificial
  probe
  misc_feature (1)..(25): SEQ ID NO: 4772; WAN024AAC; Start 87; Stop 111
ctagaaaataaaacggaatttggaa

SEQ ID NO: 390501 - DNA, 25 bp, Artificial
  probe
  misc_feature (1)..(25): SEQ ID NO: 4773; WAN0249NO; Start 112; Stop 136
aaaagtatttggaggaggaagaatt

SEQ ID NO: 390502 - DNA, 25 bp, Artificial
  probe
  misc_feature (1)..(25): SEQ ID NO: 4774; WAN024A4N; Start 28; Stop 52
aagcgtttgtcgaattgaatttatc

SEQ ID NO: 390503 - DNA, 25 bp, Artificial
  probe
  misc_feature (1)..(25): SEQ ID NO: 4774; WAN024A4N; Start 27; Stop 51
aaagcgtttgtcgaattgaatttat

SEQ ID NO: 390504 - DNA, 25 bp, Artificial
  probe
  misc_feature (1)..(25): SEQ ID NO: 4774; WAN024A4N; Start 29; Stop 53
agcgtttgtcgaattgaatttatca

SEQ ID NO: 390505 - DNA, 25 bp, Artificial
  probe
  misc_feature (1)..(25): SEQ ID NO: 4774; WAN024A4N; Start 43; Stop 67
tgaatttatcaagcaagcgaccaac

SEQ ID NO: 390506 - DNA, 25 bp, Artificial
  probe
  misc_feature (1)..(25): SEQ ID NO: 4774; WAN024A4N; Start 44; Stop 68
gaatttatcaagcaagcgaccaacc

SEQ ID NO: 390507 - DNA, 25 bp, Artificial
  probe
  misc_feature (1)..(25): SEQ ID NO: 4774; WAN024A4N; Start 39; Stop 63
gaattgaatttatcaagcaagcgac

SEQ ID NO: 390508 - DNA, 25 bp, Artificial
  probe
  misc_feature (1)..(25): SEQ ID NO: 4774; WAN024A4N; Start 40; Stop 64
aattgaatttatcaagcaagcgacc

SEQ ID NO: 390509 - DNA, 25 bp, Artificial
  probe
  misc_feature (1)..(25): SEQ ID NO: 4774; WAN024A4N; Start 38; Stop 62
cgaattgaatttatcaagcaagcga

SEQ ID NO: 390510 - DNA, 25 bp, Artificial
  probe
  misc_feature (1)..(25): SEQ ID NO: 4774; WAN024A4N; Start 45; Stop 69
aatttatcaagcaagcgaccaacca

SEQ ID NO: 390511 - DNA, 25 bp, Artificial
  probe
  misc_feature (1)..(25): SEQ ID NO: 4774; WAN024A4N; Start 41; Stop 65
attgaatttatcaagcaagcgacca

SEQ ID NO: 390512 - DNA, 25 bp, Artificial
  probe
  misc_feature (1)..(25): SEQ ID NO: 4774; WAN024A4N; Start 46; Stop 70
atttatcaagcaagcgaccaaccag

SEQ ID NO: 390513 - DNA, 25 bp, Artificial
  probe
  misc_feature (1)..(25): SEQ ID NO: 4774; WAN024A4N; Start 36; Stop 60
gtcgaattgaatttatcaagcaagc

SEQ ID NO: 390514 - DNA, 25 bp, Artificial
  probe
  misc_feature (1)..(25): SEQ ID NO: 4774; WAN024A4N; Start 42; Stop 66
ttgaatttatcaagcaagcgaccaa

SEQ ID NO: 390515 - DNA, 25 bp, Artificial
  probe
  misc_feature (1)..(25): SEQ ID NO: 4774; WAN024A4N; Start 30; Stop 54
gcgtttgtcgaattgaatttatcaa

SEQ ID NO: 390516 - DNA, 25 bp, Artificial
  probe
  misc_feature (1)..(25): SEQ ID NO: 4774; WAN024A4N; Start 37; Stop 61
tcgaattgaatttatcaagcaagcg

SEQ ID NO: 390517 - DNA, 25 bp, Artificial
  probe
  misc_feature (1)..(25): SEQ ID NO: 4774; WAN024A4N; Start 21; Stop 45
actataaaagcgtttgtcgaattga

SEQ ID NO: 390518 - DNA, 25 bp, Artificial
  probe
  misc_feature (1)..(25): SEQ ID NO: 4774; WAN024A4N; Start 35; Stop 59
tgtcgaattgaatttatcaagcaag

SEQ ID NO: 390519 - DNA, 25 bp, Artificial
  probe
  misc_feature (1)..(25): SEQ ID NO: 4774; WAN024A4N; Start 26; Stop 50
aaaagcgtttgtcgaattgaattta

SEQ ID NO: 390520 - DNA, 25 bp, Artificial
  probe
  misc_feature (1)..(25): SEQ ID NO: 4774; WAN024A4N; Start 25; Stop 49
taaaagcgtttgtcgaattgaattt

SEQ ID NO: 390521 - DNA, 25 bp, Artificial
  probe
  misc_feature (1)..(25): SEQ ID NO: 4774; WAN024A4N; Start 9; Stop 33
acattctaacaaactataaaagcgt

SEQ ID NO: 390522 - DNA, 25 bp, Artificial
  probe
  misc_feature (1)..(25): SEQ ID NO: 4774; WAN024A4N; Start 24; Stop 48
ataaaagcgtttgtcgaattgaatt

SEQ ID NO: 390523 - DNA, 25 bp, Artificial
  probe
  misc_feature (1)..(25): SEQ ID NO: 4774; WAN024A4N; Start 22; Stop 46
ctataaaagcgtttgtcgaattgaa

SEQ ID NO: 390524 - DNA, 25 bp, Artificial
  probe
  misc_feature (1)..(25): SEQ ID NO: 4774; WAN024A4N; Start 34; Stop 58
ttgtcgaattgaatttatcaagcaa

SEQ ID NO: 390525 - DNA, 25 bp, Artificial
  probe
  misc_feature (1)..(25): SEQ ID NO: 4774; WAN024A4N; Start 33; Stop 57
tttgtcgaattgaatttatcaagca

SEQ ID NO: 390526 - DNA, 25 bp, Artificial
  probe
  misc_feature (1)..(25): SEQ ID NO: 4774; WAN024A4N; Start 20; Stop 44
aactataaaagcgtttgtcgaattg

SEQ ID NO: 390527 - DNA, 25 bp, Artificial
  probe
  misc_feature (1)..(25): SEQ ID NO: 4774; WAN024A4N; Start 32; Stop 56
gtttgtcgaattgaatttatcaagc

SEQ ID NO: 390528 - DNA, 25 bp, Artificial
  probe
  misc_feature (1)..(25): SEQ ID NO: 4774; WAN024A4N; Start 31; Stop 55
cgtttgtcgaattgaatttatcaag

SEQ ID NO: 390529 - DNA, 25 bp, Artificial
  probe
  misc_feature (1)..(25): SEQ ID NO: 4774; WAN024A4N; Start 23; Stop 47
tataaaagcgtttgtcgaattgaat

SEQ ID NO: 390530 - DNA, 25 bp, Artificial
  probe
  misc_feature (1)..(25): SEQ ID NO: 4774; WAN024A4N; Start 10; Stop 34
cattctaacaaactataaaagcgtt

SEQ ID NO: 390531 - DNA, 25 bp, Artificial
  probe
  misc_feature (1)..(25): SEQ ID NO: 4774; WAN024A4N; Start 19; Stop 43
aaactataaaagcgtttgtcgaatt

SEQ ID NO: 390532 - DNA, 25 bp, Artificial
  probe
  misc_feature (1)..(25): SEQ ID NO: 4774; WAN024A4N; Start 8; Stop 32
tacattctaacaaactataaaagcg

SEQ ID NO: 390533 - DNA, 25 bp, Artificial
  probe
  misc_feature (1)..(25): SEQ ID NO: 4774; WAN024A4N; Start 11; Stop 35
attctaacaaactataaaagcgttt

SEQ ID NO: 390534 - DNA, 25 bp, Artificial
  probe
  misc_feature (1)..(25): SEQ ID NO: 4775; WAN024AMY; Start 9; Stop 33
tccttctttctgtctattatagtct

SEQ ID NO: 390535 - DNA, 25 bp, Artificial
  probe
  misc_feature (1)..(25): SEQ ID NO: 4775; WAN024AMY; Start 3; Stop 27
acaatttccttctttctgtctatta

SEQ ID NO: 390536 - DNA, 25 bp, Artificial
  probe
  misc_feature (1)..(25): SEQ ID NO: 4775; WAN024AMY; Start 2; Stop 26
tacaatttccttctttctgtctatt

SEQ ID NO: 390537 - DNA, 25 bp, Artificial
  probe
  misc_feature (1)..(25): SEQ ID NO: 4775; WAN024AMY; Start 1; Stop 25
ttacaatttccttctttctgtctat

SEQ ID NO: 390538 - DNA, 25 bp, Artificial
  probe
  misc_feature (1)..(25): SEQ ID NO: 4775; WAN024AMY; Start 8; Stop 32
ttccttctttctgtctattatagtc

SEQ ID NO: 390539 - DNA, 25 bp, Artificial
  probe
  misc_feature (1)..(25): SEQ ID NO: 4775; WAN024AMY; Start 7; Stop 31
tttccttctttctgtctattatagt

SEQ ID NO: 390540 - DNA, 25 bp, Artificial
  probe
  misc_feature (1)..(25): SEQ ID NO: 4775; WAN024AMY; Start 4; Stop 28
caatttccttctttctgtctattat

SEQ ID NO: 390541 - DNA, 25 bp, Artificial
  probe
  misc_feature (1)..(25): SEQ ID NO: 4776; WAN024AI9; Start 79; Stop 103
caagtttcatatttgattttcggcg

SEQ ID NO: 390542 - DNA, 25 bp, Artificial
  probe
  misc_feature (1)..(25): SEQ ID NO: 4776; WAN024AI9; Start 78; Stop 102
acaagtttcatatttgattttcggc

SEQ ID NO: 390543 - DNA, 25 bp, Artificial
  probe
  misc_feature (1)..(25): SEQ ID NO: 4776; WAN024AI9; Start 80; Stop 104
aagtttcatatttgattttcggcga

SEQ ID NO: 390544 - DNA, 25 bp, Artificial
  probe
  misc_feature (1)..(25): SEQ ID NO: 4776; WAN024AI9; Start 83; Stop 107
tttcatatttgattttcggcgagag

SEQ ID NO: 390545 - DNA, 25 bp, Artificial
  probe
  misc_feature (1)..(25): SEQ ID NO: 4776; WAN024AI9; Start 82; Stop 106
gtttcatatttgattttcggcgaga

SEQ ID NO: 390546 - DNA, 25 bp, Artificial
  probe
  misc_feature (1)..(25): SEQ ID NO: 4776; WAN024AI9; Start 81; Stop 105
agtttcatatttgattttcggcgag

SEQ ID NO: 390547 - DNA, 25 bp, Artificial
  probe
  misc_feature (1)..(25): SEQ ID NO: 4776; WAN024AI9; Start 44; Stop 68
agttctgctctatgaaaatcaaaga

SEQ ID NO: 390548 - DNA, 25 bp, Artificial
  probe
  misc_feature (1)..(25): SEQ ID NO: 4776; WAN024AI9; Start 86; Stop 110
catatttgattttcggcgagaggaa

SEQ ID NO: 390549 - DNA, 25 bp, Artificial
  probe
  misc_feature (1)..(25): SEQ ID NO: 4776; WAN024AI9; Start 26; Stop 50
attgctccgatcttttaaagttctg

SEQ ID NO: 390550 - DNA, 25 bp, Artificial
  probe
  misc_feature (1)..(25): SEQ ID NO: 4776; WAN024AI9; Start 84; Stop 108
ttcatatttgattttcggcgagagg

SEQ ID NO: 390551 - DNA, 25 bp, Artificial
  probe
  misc_feature (1)..(25): SEQ ID NO: 4776; WAN024AI9; Start 31; Stop 55
tccgatcttttaaagttctgctcta

SEQ ID NO: 390552 - DNA, 25 bp, Artificial
  probe
  misc_feature (1)..(25): SEQ ID NO: 4776; WAN024AI9; Start 25; Stop 49
gattgctccgatcttttaaagttct

SEQ ID NO: 390553 - DNA, 25 bp, Artificial
  probe
  misc_feature (1)..(25): SEQ ID NO: 4776; WAN024AI9; Start 43; Stop 67
aagttctgctctatgaaaatcaaag

SEQ ID NO: 390554 - DNA, 25 bp, Artificial
  probe
  misc_feature (1)..(25): SEQ ID NO: 4776; WAN024AI9; Start 30; Stop 54
ctccgatcttttaaagttctgctct

SEQ ID NO: 390555 - DNA, 25 bp, Artificial
  probe
  misc_feature (1)..(25): SEQ ID NO: 4776; WAN024AI9; Start 32; Stop 56
ccgatcttttaaagttctgctctat

SEQ ID NO: 390556 - DNA, 25 bp, Artificial
  probe
  misc_feature (1)..(25): SEQ ID NO: 4776; WAN024AI9; Start 63; Stop 87
caaagaataaagtctacaagtttca

SEQ ID NO: 390557 - DNA, 25 bp, Artificial
  probe
  misc_feature (1)..(25): SEQ ID NO: 4776; WAN024AI9; Start 42; Stop 66
aaagttctgctctatgaaaatcaaa

SEQ ID NO: 390558 - DNA, 25 bp, Artificial
  probe
  misc_feature (1)..(25): SEQ ID NO: 4776; WAN024AI9; Start 85; Stop 109
tcatatttgattttcggcgagagga

SEQ ID NO: 390559 - DNA, 25 bp, Artificial
  probe
  misc_feature (1)..(25): SEQ ID NO: 4776; WAN024AI9; Start 62; Stop 86
tcaaagaataaagtctacaagtttc

SEQ ID NO: 390560 - DNA, 25 bp, Artificial
  probe
  misc_feature (1)..(25): SEQ ID NO: 4776; WAN024AI9; Start 33; Stop 57
cgatcttttaaagttctgctctatg

SEQ ID NO: 390561 - DNA, 25 bp, Artificial
  probe
  misc_feature (1)..(25): SEQ ID NO: 4776; WAN024AI9; Start 24; Stop 48
ggattgctccgatcttttaaagttc

SEQ ID NO: 390562 - DNA, 25 bp, Artificial
  probe
  misc_feature (1)..(25): SEQ ID NO: 4776; WAN024AI9; Start 27; Stop 51
ttgctccgatcttttaaagttctgc

SEQ ID NO: 390563 - DNA, 25 bp, Artificial
  probe
  misc_feature (1)..(25): SEQ ID NO: 4776; WAN024AI9; Start 29; Stop 53
gctccgatcttttaaagttctgctc

SEQ ID NO: 390564 - DNA, 25 bp, Artificial
  probe
  misc_feature (1)..(25): SEQ ID NO: 4776; WAN024AI9; Start 41; Stop 65
taaagttctgctctatgaaaatcaa

SEQ ID NO: 390565 - DNA, 25 bp, Artificial
  probe
  misc_feature (1)..(25): SEQ ID NO: 4776; WAN024AI9; Start 40; Stop 64
ttaaagttctgctctatgaaaatca

SEQ ID NO: 390566 - DNA, 25 bp, Artificial
  probe
  misc_feature (1)..(25): SEQ ID NO: 4776; WAN024AI9; Start 28; Stop 52
tgctccgatcttttaaagttctgct

SEQ ID NO: 390567 - DNA, 25 bp, Artificial
  probe
  misc_feature (1)..(25): SEQ ID NO: 4776; WAN024AI9; Start 45; Stop 69
gttctgctctatgaaaatcaaagaa

SEQ ID NO: 390568 - DNA, 25 bp, Artificial
  probe
  misc_feature (1)..(25): SEQ ID NO: 4776; WAN024AI9; Start 77; Stop 101
tacaagtttcatatttgattttcgg

SEQ ID NO: 390569 - DNA, 25 bp, Artificial
  probe
  misc_feature (1)..(25): SEQ ID NO: 4776; WAN024AI9; Start 47; Stop 71
tctgctctatgaaaatcaaagaata

SEQ ID NO: 390570 - DNA, 25 bp, Artificial
  probe
  misc_feature (1)..(25): SEQ ID NO: 4776; WAN024AI9; Start 34; Stop 58
gatcttttaaagttctgctctatga

SEQ ID NO: 390571 - DNA, 25 bp, Artificial
  probe
  misc_feature (1)..(25): SEQ ID NO: 4776; WAN024AI9; Start 36; Stop 60
tcttttaaagttctgctctatgaaa

SEQ ID NO: 390572 - DNA, 25 bp, Artificial
  probe
  misc_feature (1)..(25): SEQ ID NO: 4776; WAN024AI9; Start 35; Stop 59
atcttttaaagttctgctctatgaa

SEQ ID NO: 390573 - DNA, 25 bp, Artificial
  probe
  misc_feature (1)..(25): SEQ ID NO: 4776; WAN024AI9; Start 46; Stop 70
ttctgctctatgaaaatcaaagaat

SEQ ID NO: 390574 - DNA, 25 bp, Artificial
  probe
  misc_feature (1)..(25): SEQ ID NO: 4777; WAN024ABN; Start 31; Stop 55
acttgtcaagtttccttagaaattt

SEQ ID NO: 390575 - DNA, 25 bp, Artificial
  probe
  misc_feature (1)..(25): SEQ ID NO: 4777; WAN024ABN; Start 35; Stop 59
gtcaagtttccttagaaattttcca

SEQ ID NO: 390576 - DNA, 25 bp, Artificial
  probe
  misc_feature (1)..(25): SEQ ID NO: 4777; WAN024ABN; Start 34; Stop 58
tgtcaagtttccttagaaattttcc

SEQ ID NO: 390577 - DNA, 25 bp, Artificial
  probe
  misc_feature (1)..(25): SEQ ID NO: 4777; WAN024ABN; Start 36; Stop 60
tcaagtttccttagaaattttccat

SEQ ID NO: 390578 - DNA, 25 bp, Artificial
  probe
  misc_feature (1)..(25): SEQ ID NO: 4777; WAN024ABN; Start 39; Stop 63
agtttccttagaaattttccatagg

SEQ ID NO: 390579 - DNA, 25 bp, Artificial
  probe
  misc_feature (1)..(25): SEQ ID NO: 4777; WAN024ABN; Start 33; Stop 57
ttgtcaagtttccttagaaattttc

SEQ ID NO: 390580 - DNA, 25 bp, Artificial
  probe
  misc_feature (1)..(25): SEQ ID NO: 4777; WAN024ABN; Start 32; Stop 56
cttgtcaagtttccttagaaatttt

SEQ ID NO: 390581 - DNA, 25 bp, Artificial
  probe
  misc_feature (1)..(25): SEQ ID NO: 4777; WAN024ABN; Start 37; Stop 61
caagtttccttagaaattttccata

SEQ ID NO: 390582 - DNA, 25 bp, Artificial
  probe
  misc_feature (1)..(25): SEQ ID NO: 4777; WAN024ABN; Start 40; Stop 64
gtttccttagaaattttccatagga

SEQ ID NO: 390583 - DNA, 25 bp, Artificial
  probe
  misc_feature (1)..(25): SEQ ID NO: 4777; WAN024ABN; Start 38; Stop 62
aagtttccttagaaattttccatag

SEQ ID NO: 390584 - DNA, 25 bp, Artificial
  probe
  misc_feature (1)..(25): SEQ ID NO: 4777; WAN024ABN; Start 30; Stop 54
aacttgtcaagtttccttagaaatt

SEQ ID NO: 390585 - DNA, 25 bp, Artificial
  probe
  misc_feature (1)..(25): SEQ ID NO: 4778; WAN0249KK; Start 5; Stop 29
ttacctcaaacctatacgacttact

SEQ ID NO: 390586 - DNA, 25 bp, Artificial
  probe
  misc_feature (1)..(25): SEQ ID NO: 4778; WAN0249KK; Start 3; Stop 27
acttacctcaaacctatacgactta

SEQ ID NO: 390587 - DNA, 25 bp, Artificial
  probe
  misc_feature (1)..(25): SEQ ID NO: 4778; WAN0249KK; Start 2; Stop 26
tacttacctcaaacctatacgactt

SEQ ID NO: 390588 - DNA, 25 bp, Artificial
  probe
  misc_feature (1)..(25): SEQ ID NO: 4778; WAN0249KK; Start 1; Stop 25
ttacttacctcaaacctatacgact

SEQ ID NO: 390589 - DNA, 25 bp, Artificial
  probe
  misc_feature (1)..(25): SEQ ID NO: 4778; WAN0249KK; Start 7; Stop 31
acctcaaacctatacgacttactat

SEQ ID NO: 390590 - DNA, 25 bp, Artificial
  probe
  misc_feature (1)..(25): SEQ ID NO: 4778; WAN0249KK; Start 4; Stop 28
cttacctcaaacctatacgacttac

SEQ ID NO: 390591 - DNA, 25 bp, Artificial
  probe
  misc_feature (1)..(25): SEQ ID NO: 4778; WAN0249KK; Start 6; Stop 30
tacctcaaacctatacgacttacta

SEQ ID NO: 390592 - DNA, 25 bp, Artificial
  probe
  misc_feature (1)..(25): SEQ ID NO: 4778; WAN0249KK; Start 8; Stop 32
cctcaaacctatacgacttactatt

SEQ ID NO: 390593 - DNA, 25 bp, Artificial
  probe
  misc_feature (1)..(25): SEQ ID NO: 4778; WAN0249KK; Start 10; Stop 34
tcaaacctatacgacttactattgt

SEQ ID NO: 390594 - DNA, 25 bp, Artificial
  probe
  misc_feature (1)..(25): SEQ ID NO: 4778; WAN0249KK; Start 67; Stop 91
tacgagagaggaaaataaagagcaa

SEQ ID NO: 390595 - DNA, 25 bp, Artificial
  probe
  misc_feature (1)..(25): SEQ ID NO: 4778; WAN0249KK; Start 66; Stop 90
ttacgagagaggaaaataaagagca

SEQ ID NO: 390596 - DNA, 25 bp, Artificial
  probe
  misc_feature (1)..(25): SEQ ID NO: 4778; WAN0249KK; Start 65; Stop 89
gttacgagagaggaaaataaagagc

SEQ ID NO: 390597 - DNA, 25 bp, Artificial
  probe
  misc_feature (1)..(25): SEQ ID NO: 4778; WAN0249KK; Start 9; Stop 33
ctcaaacctatacgacttactattg

SEQ ID NO: 390598 - DNA, 25 bp, Artificial
  probe
  misc_feature (1)..(25): SEQ ID NO: 4778; WAN0249KK; Start 69; Stop 93
cgagagaggaaaataaagagcaact

SEQ ID NO: 390599 - DNA, 25 bp, Artificial
  probe
  misc_feature (1)..(25): SEQ ID NO: 4778; WAN0249KK; Start 68; Stop 92
acgagagaggaaaataaagagcaac

SEQ ID NO: 390600 - DNA, 25 bp, Artificial
  probe
  misc_feature (1)..(25): SEQ ID NO: 4778; WAN0249KK; Start 11; Stop 35
caaacctatacgacttactattgtt

SEQ ID NO: 390601 - DNA, 25 bp, Artificial
  probe
  misc_feature (1)..(25): SEQ ID NO: 4778; WAN0249KK; Start 70; Stop 94
gagagaggaaaataaagagcaactt

SEQ ID NO: 390602 - DNA, 25 bp, Artificial
  probe
  misc_feature (1)..(25): SEQ ID NO: 4778; WAN0249KK; Start 64; Stop 88
agttacgagagaggaaaataaagag

SEQ ID NO: 390603 - DNA, 25 bp, Artificial
  probe
  misc_feature (1)..(25): SEQ ID NO: 4778; WAN0249KK; Start 56; Stop 80
aaattattagttacgagagaggaaa

SEQ ID NO: 390604 - DNA, 25 bp, Artificial
  probe
  misc_feature (1)..(25): SEQ ID NO: 4778; WAN0249KK; Start 63; Stop 87
tagttacgagagaggaaaataaaga

SEQ ID NO: 390605 - DNA, 25 bp, Artificial
  probe
  misc_feature (1)..(25): SEQ ID NO: 4778; WAN0249KK; Start 71; Stop 95
agagaggaaaataaagagcaacttt

SEQ ID NO: 390606 - DNA, 25 bp, Artificial
  probe
  misc_feature (1)..(25): SEQ ID NO: 4778; WAN0249KK; Start 46; Stop 70
acctctctcaaaattattagttacg

SEQ ID NO: 390607 - DNA, 25 bp, Artificial
  probe
  misc_feature (1)..(25): SEQ ID NO: 4778; WAN0249KK; Start 72; Stop 96
gagaggaaaataaagagcaactttt

SEQ ID NO: 390608 - DNA, 25 bp, Artificial
  probe
  misc_feature (1)..(25): SEQ ID NO: 4778; WAN0249KK; Start 54; Stop 78
caaaattattagttacgagagagga

SEQ ID NO: 390609 - DNA, 25 bp, Artificial
  probe
  misc_feature (1)..(25): SEQ ID NO: 4778; WAN0249KK; Start 53; Stop 77
tcaaaattattagttacgagagagg

SEQ ID NO: 390610 - DNA, 25 bp, Artificial
  probe
  misc_feature (1)..(25): SEQ ID NO: 4778; WAN0249KK; Start 47; Stop 71
cctctctcaaaattattagttacga

SEQ ID NO: 390611 - DNA, 25 bp, Artificial
  probe
  misc_feature (1)..(25): SEQ ID NO: 4778; WAN0249KK; Start 62; Stop 86
ttagttacgagagaggaaaataaag

SEQ ID NO: 390612 - DNA, 25 bp, Artificial
  probe
  misc_feature (1)..(25): SEQ ID NO: 4778; WAN0249KK; Start 12; Stop 36
aaacctatacgacttactattgttt

SEQ ID NO: 390613 - DNA, 25 bp, Artificial
  probe
  misc_feature (1)..(25): SEQ ID NO: 4778; WAN0249KK; Start 61; Stop 85
attagttacgagagaggaaaataaa

SEQ ID NO: 390614 - DNA, 25 bp, Artificial
  probe
  misc_feature (1)..(25): SEQ ID NO: 4778; WAN0249KK; Start 57; Stop 81
aattattagttacgagagaggaaaa

SEQ ID NO: 390615 - DNA, 25 bp, Artificial
  probe
  misc_feature (1)..(25): SEQ ID NO: 4778; WAN0249KK; Start 55; Stop 79
aaaattattagttacgagagaggaa

SEQ ID NO: 390616 - DNA, 25 bp, Artificial
  probe
  misc_feature (1)..(25): SEQ ID NO: 4778; WAN0249KK; Start 73; Stop 97
agaggaaaataaagagcaactttta

SEQ ID NO: 390617 - DNA, 25 bp, Artificial
  probe
  misc_feature (1)..(25): SEQ ID NO: 4778; WAN0249KK; Start 58; Stop 82
attattagttacgagagaggaaaat

SEQ ID NO: 390618 - DNA, 25 bp, Artificial
  probe
  misc_feature (1)..(25): SEQ ID NO: 4779; WAN0249LZ; Start 1; Stop 25
ttacttcacctcatcactttattga

SEQ ID NO: 390619 - DNA, 25 bp, Artificial
  probe
  misc_feature (1)..(25): SEQ ID NO: 4779; WAN0249LZ; Start 33; Stop 57
ttatcacctgaaatcgctttccaaa

SEQ ID NO: 390620 - DNA, 25 bp, Artificial
  probe
  misc_feature (1)..(25): SEQ ID NO: 4779; WAN0249LZ; Start 32; Stop 56
tttatcacctgaaatcgctttccaa

SEQ ID NO: 390621 - DNA, 25 bp, Artificial
  probe
  misc_feature (1)..(25): SEQ ID NO: 4779; WAN0249LZ; Start 83; Stop 107
taaaatgttaggtaggaggtagcac

SEQ ID NO: 390622 - DNA, 25 bp, Artificial
  probe
  misc_feature (1)..(25): SEQ ID NO: 4779; WAN0249LZ; Start 82; Stop 106
gtaaaatgttaggtaggaggtagca

SEQ ID NO: 390623 - DNA, 25 bp, Artificial
  probe
  misc_feature (1)..(25): SEQ ID NO: 4779; WAN0249LZ; Start 81; Stop 105
ggtaaaatgttaggtaggaggtagc

SEQ ID NO: 390624 - DNA, 25 bp, Artificial
  probe
  misc_feature (1)..(25): SEQ ID NO: 4779; WAN0249LZ; Start 80; Stop 104
tggtaaaatgttaggtaggaggtag

SEQ ID NO: 390625 - DNA, 25 bp, Artificial
  probe
  misc_feature (1)..(25): SEQ ID NO: 4779; WAN0249LZ; Start 79; Stop 103
atggtaaaatgttaggtaggaggta

SEQ ID NO: 390626 - DNA, 25 bp, Artificial
  probe
  misc_feature (1)..(25): SEQ ID NO: 4779; WAN0249LZ; Start 78; Stop 102
tatggtaaaatgttaggtaggaggt

SEQ ID NO: 390627 - DNA, 25 bp, Artificial
  probe
  misc_feature (1)..(25): SEQ ID NO: 4779; WAN0249LZ; Start 3; Stop 27
acttcacctcatcactttattgatt

SEQ ID NO: 390628 - DNA, 25 bp, Artificial
  probe
  misc_feature (1)..(25): SEQ ID NO: 4779; WAN0249LZ; Start 2; Stop 26
tacttcacctcatcactttattgat

SEQ ID NO: 390629 - DNA, 25 bp, Artificial
  probe
  misc_feature (1)..(25): SEQ ID NO: 4779; WAN0249LZ; Start 77; Stop 101
atatggtaaaatgttaggtaggagg

SEQ ID NO: 390630 - DNA, 25 bp, Artificial
  probe
  misc_feature (1)..(25): SEQ ID NO: 4779; WAN0249LZ; Start 39; Stop 63
cctgaaatcgctttccaaaatagaa

SEQ ID NO: 390631 - DNA, 25 bp, Artificial
  probe
  misc_feature (1)..(25): SEQ ID NO: 4779; WAN0249LZ; Start 30; Stop 54
attttatcacctgaaatcgctttcc

SEQ ID NO: 390632 - DNA, 25 bp, Artificial
  probe
  misc_feature (1)..(25): SEQ ID NO: 4779; WAN0249LZ; Start 37; Stop 61
cacctgaaatcgctttccaaaatag

SEQ ID NO: 390633 - DNA, 25 bp, Artificial
  probe
  misc_feature (1)..(25): SEQ ID NO: 4779; WAN0249LZ; Start 38; Stop 62
acctgaaatcgctttccaaaataga

SEQ ID NO: 390634 - DNA, 25 bp, Artificial
  probe
  misc_feature (1)..(25): SEQ ID NO: 4779; WAN0249LZ; Start 4; Stop 28
cttcacctcatcactttattgatta

SEQ ID NO: 390635 - DNA, 25 bp, Artificial
  probe
  misc_feature (1)..(25): SEQ ID NO: 4779; WAN0249LZ; Start 28; Stop 52
atattttatcacctgaaatcgcttt

SEQ ID NO: 390636 - DNA, 25 bp, Artificial
  probe
  misc_feature (1)..(25): SEQ ID NO: 4779; WAN0249LZ; Start 36; Stop 60
tcacctgaaatcgctttccaaaata

SEQ ID NO: 390637 - DNA, 25 bp, Artificial
  probe
  misc_feature (1)..(25): SEQ ID NO: 4779; WAN0249LZ; Start 34; Stop 58
tatcacctgaaatcgctttccaaaa

SEQ ID NO: 390638 - DNA, 25 bp, Artificial
  probe
  misc_feature (1)..(25): SEQ ID NO: 4779; WAN0249LZ; Start 31; Stop 55
ttttatcacctgaaatcgctttcca

SEQ ID NO: 390639 - DNA, 25 bp, Artificial
  probe
  misc_feature (1)..(25): SEQ ID NO: 4779; WAN0249LZ; Start 40; Stop 64
ctgaaatcgctttccaaaatagaaa

SEQ ID NO: 390640 - DNA, 25 bp, Artificial
  probe
  misc_feature (1)..(25): SEQ ID NO: 4779; WAN0249LZ; Start 67; Stop 91
tgtctcaagaatatggtaaaatgtt

SEQ ID NO: 390641 - DNA, 25 bp, Artificial
  probe
  misc_feature (1)..(25): SEQ ID NO: 4779; WAN0249LZ; Start 35; Stop 59
atcacctgaaatcgctttccaaaat

SEQ ID NO: 390642 - DNA, 25 bp, Artificial
  probe
  misc_feature (1)..(25): SEQ ID NO: 4779; WAN0249LZ; Start 41; Stop 65
tgaaatcgctttccaaaatagaaaa

SEQ ID NO: 390643 - DNA, 25 bp, Artificial
  probe
  misc_feature (1)..(25): SEQ ID NO: 4779; WAN0249LZ; Start 66; Stop 90
atgtctcaagaatatggtaaaatgt

SEQ ID NO: 390644 - DNA, 25 bp, Artificial
  probe
  misc_feature (1)..(25): SEQ ID NO: 4779; WAN0249LZ; Start 29; Stop 53
tattttatcacctgaaatcgctttc

SEQ ID NO: 390645 - DNA, 25 bp, Artificial
  probe
  misc_feature (1)..(25): SEQ ID NO: 4779; WAN0249LZ; Start 27; Stop 51
tatattttatcacctgaaatcgctt

SEQ ID NO: 390646 - DNA, 25 bp, Artificial
  probe
  misc_feature (1)..(25): SEQ ID NO: 4779; WAN0249LZ; Start 26; Stop 50
ttatattttatcacctgaaatcgct

SEQ ID NO: 390647 - DNA, 25 bp, Artificial
  probe
  misc_feature (1)..(25): SEQ ID NO: 4779; WAN0249LZ; Start 71; Stop 95
tcaagaatatggtaaaatgttaggt

SEQ ID NO: 390648 - DNA, 25 bp, Artificial
  probe
  misc_feature (1)..(25): SEQ ID NO: 4779; WAN0249LZ; Start 5; Stop 29
ttcacctcatcactttattgattat

SEQ ID NO: 390649 - DNA, 25 bp, Artificial
  probe
  misc_feature (1)..(25): SEQ ID NO: 4779; WAN0249LZ; Start 76; Stop 100
aatatggtaaaatgttaggtaggag

SEQ ID NO: 390650 - DNA, 25 bp, Artificial
  probe
  misc_feature (1)..(25): SEQ ID NO: 4779; WAN0249LZ; Start 75; Stop 99
gaatatggtaaaatgttaggtagga

SEQ ID NO: 390651 - DNA, 25 bp, Artificial
  probe
  misc_feature (1)..(25): SEQ ID NO: 4781; WAN0249OA; Start 17; Stop 41
gaataaattggcttcccttagaacc

SEQ ID NO: 390652 - DNA, 25 bp, Artificial
  probe
  misc_feature (1)..(25): SEQ ID NO: 4781; WAN0249OA; Start 16; Stop 40
tgaataaattggcttcccttagaac

SEQ ID NO: 390653 - DNA, 25 bp, Artificial
  probe
  misc_feature (1)..(25): SEQ ID NO: 4781; WAN0249OA; Start 12; Stop 36
ggtatgaataaattggcttccctta

SEQ ID NO: 390654 - DNA, 25 bp, Artificial
  probe
  misc_feature (1)..(25): SEQ ID NO: 4781; WAN0249OA; Start 9; Stop 33
ataggtatgaataaattggcttccc

SEQ ID NO: 390655 - DNA, 25 bp, Artificial
  probe
  misc_feature (1)..(25): SEQ ID NO: 4781; WAN0249OA; Start 15; Stop 39
atgaataaattggcttcccttagaa

SEQ ID NO: 390656 - DNA, 25 bp, Artificial
  probe
  misc_feature (1)..(25): SEQ ID NO: 4781; WAN0249OA; Start 11; Stop 35
aggtatgaataaattggcttccctt

SEQ ID NO: 390657 - DNA, 25 bp, Artificial
  probe
  misc_feature (1)..(25): SEQ ID NO: 4781; WAN0249OA; Start 10; Stop 34
taggtatgaataaattggcttccct

SEQ ID NO: 390658 - DNA, 25 bp, Artificial
  probe
  misc_feature (1)..(25): SEQ ID NO: 4781; WAN0249OA; Start 13; Stop 37
gtatgaataaattggcttcccttag

SEQ ID NO: 390659 - DNA, 25 bp, Artificial
  probe
  misc_feature (1)..(25): SEQ ID NO: 4781; WAN0249OA; Start 14; Stop 38
tatgaataaattggcttcccttaga

SEQ ID NO: 390660 - DNA, 25 bp, Artificial
  probe
  misc_feature (1)..(25): SEQ ID NO: 4781; WAN0249OA; Start 18; Stop 42
aataaattggcttcccttagaacca

SEQ ID NO: 390661 - DNA, 25 bp, Artificial
  probe
  misc_feature (1)..(25): SEQ ID NO: 4781; WAN0249OA; Start 19; Stop 43
ataaattggcttcccttagaaccac

SEQ ID NO: 390662 - DNA, 25 bp, Artificial
  probe
  misc_feature (1)..(25): SEQ ID NO: 4781; WAN0249OA; Start 8; Stop 32
aataggtatgaataaattggcttcc

SEQ ID NO: 390663 - DNA, 25 bp, Artificial
  probe
  misc_feature (1)..(25): SEQ ID NO: 4781; WAN0249OA; Start 20; Stop 44
taaattggcttcccttagaaccaca

SEQ ID NO: 390664 - DNA, 25 bp, Artificial
  probe
  misc_feature (1)..(25): SEQ ID NO: 4781; WAN0249OA; Start 76; Stop 100
agtatcactcctttacaatacgtgt

SEQ ID NO: 390665 - DNA, 25 bp, Artificial
  probe
  misc_feature (1)..(25): SEQ ID NO: 4781; WAN0249OA; Start 75; Stop 99
aagtatcactcctttacaatacgtg

SEQ ID NO: 390666 - DNA, 25 bp, Artificial
  probe
  misc_feature (1)..(25): SEQ ID NO: 4781; WAN0249OA; Start 21; Stop 45
aaattggcttcccttagaaccacat

SEQ ID NO: 390667 - DNA, 25 bp, Artificial
  probe
  misc_feature (1)..(25): SEQ ID NO: 4781; WAN0249OA; Start 22; Stop 46
aattggcttcccttagaaccacatc

SEQ ID NO: 390668 - DNA, 25 bp, Artificial
  probe
  misc_feature (1)..(25): SEQ ID NO: 4781; WAN0249OA; Start 24; Stop 48
ttggcttcccttagaaccacatcta

SEQ ID NO: 390669 - DNA, 25 bp, Artificial
  probe
  misc_feature (1)..(25): SEQ ID NO: 4781; WAN0249OA; Start 77; Stop 101
gtatcactcctttacaatacgtgta

SEQ ID NO: 390670 - DNA, 25 bp, Artificial
  probe
  misc_feature (1)..(25): SEQ ID NO: 4781; WAN0249OA; Start 35; Stop 59
tagaaccacatctaggggcttttat

SEQ ID NO: 390671 - DNA, 25 bp, Artificial
  probe
  misc_feature (1)..(25): SEQ ID NO: 4781; WAN0249OA; Start 34; Stop 58
ttagaaccacatctaggggctttta

SEQ ID NO: 390672 - DNA, 25 bp, Artificial
  probe
  misc_feature (1)..(25): SEQ ID NO: 4781; WAN0249OA; Start 73; Stop 97
ataagtatcactcctttacaatacg

SEQ ID NO: 390673 - DNA, 25 bp, Artificial
  probe
  misc_feature (1)..(25): SEQ ID NO: 4781; WAN0249OA; Start 74; Stop 98
taagtatcactcctttacaatacgt

SEQ ID NO: 390674 - DNA, 25 bp, Artificial
  probe
  misc_feature (1)..(25): SEQ ID NO: 4781; WAN0249OA; Start 36; Stop 60
agaaccacatctaggggcttttatg

SEQ ID NO: 390675 - DNA, 25 bp, Artificial
  probe
  misc_feature (1)..(25): SEQ ID NO: 4781; WAN0249OA; Start 25; Stop 49
tggcttcccttagaaccacatctag

SEQ ID NO: 390676 - DNA, 25 bp, Artificial
  probe
  misc_feature (1)..(25): SEQ ID NO: 4781; WAN0249OA; Start 23; Stop 47
attggcttcccttagaaccacatct

SEQ ID NO: 390677 - DNA, 25 bp, Artificial
  probe
  misc_feature (1)..(25): SEQ ID NO: 4781; WAN0249OA; Start 7; Stop 31
aaataggtatgaataaattggcttc

SEQ ID NO: 390678 - DNA, 25 bp, Artificial
  probe
  misc_feature (1)..(25): SEQ ID NO: 4781; WAN0249OA; Start 33; Stop 57
cttagaaccacatctaggggctttt

SEQ ID NO: 390679 - DNA, 25 bp, Artificial
  probe
  misc_feature (1)..(25): SEQ ID NO: 4781; WAN0249OA; Start 26; Stop 50
ggcttcccttagaaccacatctagg

SEQ ID NO: 390680 - DNA, 25 bp, Artificial
  probe
  misc_feature (1)..(25): SEQ ID NO: 4781; WAN0249OA; Start 40; Stop 64
ccacatctaggggcttttatgtata

SEQ ID NO: 390681 - DNA, 25 bp, Artificial
  probe
  misc_feature (1)..(25): SEQ ID NO: 4781; WAN0249OA; Start 39; Stop 63
accacatctaggggcttttatgtat

SEQ ID NO: 390682 - DNA, 25 bp, Artificial
  probe
  misc_feature (1)..(25): SEQ ID NO: 4781; WAN0249OA; Start 38; Stop 62
aaccacatctaggggcttttatgta

SEQ ID NO: 390683 - DNA, 25 bp, Artificial
  probe
  misc_feature (1)..(25): SEQ ID NO: 4781; WAN0249OA; Start 41; Stop 65
cacatctaggggcttttatgtataa

SEQ ID NO: 390684 - DNA, 25 bp, Artificial
  probe
  misc_feature (1)..(25): SEQ ID NO: 4782; WAN024AK7; Start 29; Stop 53
aggctaatagaggtgatgagacaat

SEQ ID NO: 390685 - DNA, 25 bp, Artificial
  probe
  misc_feature (1)..(25): SEQ ID NO: 4782; WAN024AK7; Start 30; Stop 54
ggctaatagaggtgatgagacaatt

SEQ ID NO: 390686 - DNA, 25 bp, Artificial
  probe
  misc_feature (1)..(25): SEQ ID NO: 4782; WAN024AK7; Start 28; Stop 52
aaggctaatagaggtgatgagacaa

SEQ ID NO: 390687 - DNA, 25 bp, Artificial
  probe
  misc_feature (1)..(25): SEQ ID NO: 4782; WAN024AK7; Start 26; Stop 50
taaaggctaatagaggtgatgagac

SEQ ID NO: 390688 - DNA, 25 bp, Artificial
  probe
  misc_feature (1)..(25): SEQ ID NO: 4782; WAN024AK7; Start 27; Stop 51
aaaggctaatagaggtgatgagaca

SEQ ID NO: 390689 - DNA, 25 bp, Artificial
  probe
  misc_feature (1)..(25): SEQ ID NO: 4782; WAN024AK7; Start 25; Stop 49
ttaaaggctaatagaggtgatgaga

SEQ ID NO: 390690 - DNA, 25 bp, Artificial
  probe
  misc_feature (1)..(25): SEQ ID NO: 4782; WAN024AK7; Start 31; Stop 55
gctaatagaggtgatgagacaattt

SEQ ID NO: 390691 - DNA, 25 bp, Artificial
  probe
  misc_feature (1)..(25): SEQ ID NO: 4782; WAN024AK7; Start 32; Stop 56
ctaatagaggtgatgagacaatttc

SEQ ID NO: 390692 - DNA, 25 bp, Artificial
  probe
  misc_feature (1)..(25): SEQ ID NO: 4782; WAN024AK7; Start 24; Stop 48
tttaaaggctaatagaggtgatgag

SEQ ID NO: 390693 - DNA, 25 bp, Artificial
  probe
  misc_feature (1)..(25): SEQ ID NO: 4782; WAN024AK7; Start 64; Stop 88
taagtagcgtttggttgcttaattc

SEQ ID NO: 390694 - DNA, 25 bp, Artificial
  probe
  misc_feature (1)..(25): SEQ ID NO: 4782; WAN024AK7; Start 60; Stop 84
gaattaagtagcgtttggttgctta

SEQ ID NO: 390695 - DNA, 25 bp, Artificial
  probe
  misc_feature (1)..(25): SEQ ID NO: 4782; WAN024AK7; Start 23; Stop 47
atttaaaggctaatagaggtgatga

SEQ ID NO: 390696 - DNA, 25 bp, Artificial
  probe
  misc_feature (1)..(25): SEQ ID NO: 4782; WAN024AK7; Start 68; Stop 92
tagcgtttggttgcttaattccttt

SEQ ID NO: 390697 - DNA, 25 bp, Artificial
  probe
  misc_feature (1)..(25): SEQ ID NO: 4782; WAN024AK7; Start 67; Stop 91
gtagcgtttggttgcttaattcctt

SEQ ID NO: 390698 - DNA, 25 bp, Artificial
  probe
  misc_feature (1)..(25): SEQ ID NO: 4782; WAN024AK7; Start 65; Stop 89
aagtagcgtttggttgcttaattcc

SEQ ID NO: 390699 - DNA, 25 bp, Artificial
  probe
  misc_feature (1)..(25): SEQ ID NO: 4782; WAN024AK7; Start 59; Stop 83
ggaattaagtagcgtttggttgctt

SEQ ID NO: 390700 - DNA, 25 bp, Artificial
  probe
  misc_feature (1)..(25): SEQ ID NO: 4782; WAN024AK7; Start 22; Stop 46
aatttaaaggctaatagaggtgatg

SEQ ID NO: 390701 - DNA, 25 bp, Artificial
  probe
  misc_feature (1)..(25): SEQ ID NO: 4782; WAN024AK7; Start 63; Stop 87
ttaagtagcgtttggttgcttaatt

SEQ ID NO: 390702 - DNA, 25 bp, Artificial
  probe
  misc_feature (1)..(25): SEQ ID NO: 4782; WAN024AK7; Start 61; Stop 85
aattaagtagcgtttggttgcttaa

SEQ ID NO: 390703 - DNA, 25 bp, Artificial
  probe
  misc_feature (1)..(25): SEQ ID NO: 4782; WAN024AK7; Start 66; Stop 90
agtagcgtttggttgcttaattcct

SEQ ID NO: 390704 - DNA, 25 bp, Artificial
  probe
  misc_feature (1)..(25): SEQ ID NO: 4782; WAN024AK7; Start 58; Stop 82
aggaattaagtagcgtttggttgct

SEQ ID NO: 390705 - DNA, 25 bp, Artificial
  probe
  misc_feature (1)..(25): SEQ ID NO: 4782; WAN024AK7; Start 21; Stop 45
aaatttaaaggctaatagaggtgat

SEQ ID NO: 390706 - DNA, 25 bp, Artificial
  probe
  misc_feature (1)..(25): SEQ ID NO: 4782; WAN024AK7; Start 69; Stop 93
agcgtttggttgcttaattcctttt

SEQ ID NO: 390707 - DNA, 25 bp, Artificial
  probe
  misc_feature (1)..(25): SEQ ID NO: 4782; WAN024AK7; Start 19; Stop 43
caaaatttaaaggctaatagaggtg

SEQ ID NO: 390708 - DNA, 25 bp, Artificial
  probe
  misc_feature (1)..(25): SEQ ID NO: 4782; WAN024AK7; Start 20; Stop 44
aaaatttaaaggctaatagaggtga

SEQ ID NO: 390709 - DNA, 25 bp, Artificial
  probe
  misc_feature (1)..(25): SEQ ID NO: 4782; WAN024AK7; Start 18; Stop 42
tcaaaatttaaaggctaatagaggt

SEQ ID NO: 390710 - DNA, 25 bp, Artificial
  probe
  misc_feature (1)..(25): SEQ ID NO: 4782; WAN024AK7; Start 10; Stop 34
agagtctatcaaaatttaaaggcta

SEQ ID NO: 390711 - DNA, 25 bp, Artificial
  probe
  misc_feature (1)..(25): SEQ ID NO: 4782; WAN024AK7; Start 9; Stop 33
tagagtctatcaaaatttaaaggct

SEQ ID NO: 390712 - DNA, 25 bp, Artificial
  probe
  misc_feature (1)..(25): SEQ ID NO: 4782; WAN024AK7; Start 17; Stop 41
atcaaaatttaaaggctaatagagg

SEQ ID NO: 390713 - DNA, 25 bp, Artificial
  probe
  misc_feature (1)..(25): SEQ ID NO: 4782; WAN024AK7; Start 11; Stop 35
gagtctatcaaaatttaaaggctaa

SEQ ID NO: 390714 - DNA, 25 bp, Artificial
  probe
  misc_feature (1)..(25): SEQ ID NO: 4782; WAN024AK7; Start 8; Stop 32
atagagtctatcaaaatttaaaggc

SEQ ID NO: 390715 - DNA, 25 bp, Artificial
  probe
  misc_feature (1)..(25): SEQ ID NO: 4783; WAN0249N6; Start 17; Stop 41
cttgttctagttttcaattcaccct

SEQ ID NO: 390716 - DNA, 25 bp, Artificial
  probe
  misc_feature (1)..(25): SEQ ID NO: 4783; WAN0249N6; Start 16; Stop 40
tcttgttctagttttcaattcaccc

SEQ ID NO: 390717 - DNA, 25 bp, Artificial
  probe
  misc_feature (1)..(25): SEQ ID NO: 4783; WAN0249N6; Start 15; Stop 39
gtcttgttctagttttcaattcacc

SEQ ID NO: 390718 - DNA, 25 bp, Artificial
  probe
  misc_feature (1)..(25): SEQ ID NO: 4783; WAN0249N6; Start 19; Stop 43
tgttctagttttcaattcaccctat

SEQ ID NO: 390719 - DNA, 25 bp, Artificial
  probe
  misc_feature (1)..(25): SEQ ID NO: 4783; WAN0249N6; Start 18; Stop 42
ttgttctagttttcaattcacccta

SEQ ID NO: 390720 - DNA, 25 bp, Artificial
  probe
  misc_feature (1)..(25): SEQ ID NO: 4783; WAN0249N6; Start 14; Stop 38
tgtcttgttctagttttcaattcac

SEQ ID NO: 390721 - DNA, 25 bp, Artificial
  probe
  misc_feature (1)..(25): SEQ ID NO: 4783; WAN0249N6; Start 13; Stop 37
gtgtcttgttctagttttcaattca

SEQ ID NO: 390722 - DNA, 25 bp, Artificial
  probe
  misc_feature (1)..(25): SEQ ID NO: 4783; WAN0249N6; Start 12; Stop 36
agtgtcttgttctagttttcaattc

SEQ ID NO: 390723 - DNA, 25 bp, Artificial
  probe
  misc_feature (1)..(25): SEQ ID NO: 4783; WAN0249N6; Start 20; Stop 44
gttctagttttcaattcaccctatt

SEQ ID NO: 390724 - DNA, 25 bp, Artificial
  probe
  misc_feature (1)..(25): SEQ ID NO: 4783; WAN0249N6; Start 9; Stop 33
tctagtgtcttgttctagttttcaa

SEQ ID NO: 390725 - DNA, 25 bp, Artificial
  probe
  misc_feature (1)..(25): SEQ ID NO: 4783; WAN0249N6; Start 22; Stop 46
tctagttttcaattcaccctatttt

SEQ ID NO: 390726 - DNA, 25 bp, Artificial
  probe
  misc_feature (1)..(25): SEQ ID NO: 4783; WAN0249N6; Start 21; Stop 45
ttctagttttcaattcaccctattt

SEQ ID NO: 390727 - DNA, 25 bp, Artificial
  probe
  misc_feature (1)..(25): SEQ ID NO: 4783; WAN0249N6; Start 8; Stop 32
atctagtgtcttgttctagttttca

SEQ ID NO: 390728 - DNA, 25 bp, Artificial
  probe
  misc_feature (1)..(25): SEQ ID NO: 4783; WAN0249N6; Start 11; Stop 35
tagtgtcttgttctagttttcaatt

SEQ ID NO: 390729 - DNA, 25 bp, Artificial
  probe
  misc_feature (1)..(25): SEQ ID NO: 4783; WAN0249N6; Start 10; Stop 34
ctagtgtcttgttctagttttcaat

SEQ ID NO: 390730 - DNA, 25 bp, Artificial
  probe
  misc_feature (1)..(25): SEQ ID NO: 4783; WAN0249N6; Start 3; Stop 27
agaaaatctagtgtcttgttctagt

SEQ ID NO: 390731 - DNA, 25 bp, Artificial
  probe
  misc_feature (1)..(25): SEQ ID NO: 4783; WAN0249N6; Start 7; Stop 31
aatctagtgtcttgttctagttttc

SEQ ID NO: 390732 - DNA, 25 bp, Artificial
  probe
  misc_feature (1)..(25): SEQ ID NO: 4783; WAN0249N6; Start 4; Stop 28
gaaaatctagtgtcttgttctagtt

SEQ ID NO: 390733 - DNA, 25 bp, Artificial
  probe
  misc_feature (1)..(25): SEQ ID NO: 4783; WAN0249N6; Start 6; Stop 30
aaatctagtgtcttgttctagtttt

SEQ ID NO: 390734 - DNA, 25 bp, Artificial
  probe
  misc_feature (1)..(25): SEQ ID NO: 4783; WAN0249N6; Start 5; Stop 29
aaaatctagtgtcttgttctagttt

SEQ ID NO: 390735 - DNA, 25 bp, Artificial
  probe
  misc_feature (1)..(25): SEQ ID NO: 4783; WAN0249N6; Start 2; Stop 26
tagaaaatctagtgtcttgttctag

SEQ ID NO: 390736 - DNA, 25 bp, Artificial
  probe
  misc_feature (1)..(25): SEQ ID NO: 4783; WAN0249N6; Start 1; Stop 25
ttagaaaatctagtgtcttgttcta

SEQ ID NO: 390737 - DNA, 25 bp, Artificial
  probe
  misc_feature (1)..(25): SEQ ID NO: 4784; WAN024AOV; Start 52; Stop 76
attgcatcgttattattggttctag

SEQ ID NO: 390738 - DNA, 25 bp, Artificial
  probe
  misc_feature (1)..(25): SEQ ID NO: 4784; WAN024AOV; Start 51; Stop 75
aattgcatcgttattattggttcta

SEQ ID NO: 390739 - DNA, 25 bp, Artificial
  probe
  misc_feature (1)..(25): SEQ ID NO: 4784; WAN024AOV; Start 50; Stop 74
aaattgcatcgttattattggttct

SEQ ID NO: 390740 - DNA, 25 bp, Artificial
  probe
  misc_feature (1)..(25): SEQ ID NO: 4784; WAN024AOV; Start 49; Stop 73
aaaattgcatcgttattattggttc

SEQ ID NO: 390741 - DNA, 25 bp, Artificial
  probe
  misc_feature (1)..(25): SEQ ID NO: 4785; WAN0249ZD; Start 7; Stop 31
ttgctgctatatctgactcttgaat

SEQ ID NO: 390742 - DNA, 25 bp, Artificial
  probe
  misc_feature (1)..(25): SEQ ID NO: 4785; WAN0249ZD; Start 6; Stop 30
gttgctgctatatctgactcttgaa

SEQ ID NO: 390743 - DNA, 25 bp, Artificial
  probe
  misc_feature (1)..(25): SEQ ID NO: 4785; WAN0249ZD; Start 8; Stop 32
tgctgctatatctgactcttgaata

SEQ ID NO: 390744 - DNA, 25 bp, Artificial
  probe
  misc_feature (1)..(25): SEQ ID NO: 4785; WAN0249ZD; Start 9; Stop 33
gctgctatatctgactcttgaatac

SEQ ID NO: 390745 - DNA, 25 bp, Artificial
  probe
  misc_feature (1)..(25): SEQ ID NO: 4785; WAN0249ZD; Start 11; Stop 35
tgctatatctgactcttgaatacca

SEQ ID NO: 390746 - DNA, 25 bp, Artificial
  probe
  misc_feature (1)..(25): SEQ ID NO: 4785; WAN0249ZD; Start 27; Stop 51
tgaataccaacttccttactaccat

SEQ ID NO: 390747 - DNA, 25 bp, Artificial
  probe
  misc_feature (1)..(25): SEQ ID NO: 4785; WAN0249ZD; Start 17; Stop 41
atctgactcttgaataccaacttcc

SEQ ID NO: 390748 - DNA, 25 bp, Artificial
  probe
  misc_feature (1)..(25): SEQ ID NO: 4785; WAN0249ZD; Start 19; Stop 43
ctgactcttgaataccaacttcctt

SEQ ID NO: 390749 - DNA, 25 bp, Artificial
  probe
  misc_feature (1)..(25): SEQ ID NO: 4785; WAN0249ZD; Start 26; Stop 50
ttgaataccaacttccttactacca

SEQ ID NO: 390750 - DNA, 25 bp, Artificial
  probe
  misc_feature (1)..(25): SEQ ID NO: 4785; WAN0249ZD; Start 22; Stop 46
actcttgaataccaacttccttact

SEQ ID NO: 390751 - DNA, 25 bp, Artificial
  probe
  misc_feature (1)..(25): SEQ ID NO: 4785; WAN0249ZD; Start 20; Stop 44
tgactcttgaataccaacttcctta

SEQ ID NO: 390752 - DNA, 25 bp, Artificial
  probe
  misc_feature (1)..(25): SEQ ID NO: 4785; WAN0249ZD; Start 21; Stop 45
gactcttgaataccaacttccttac

SEQ ID NO: 390753 - DNA, 25 bp, Artificial
  probe
  misc_feature (1)..(25): SEQ ID NO: 4785; WAN0249ZD; Start 10; Stop 34
ctgctatatctgactcttgaatacc

SEQ ID NO: 390754 - DNA, 25 bp, Artificial
  probe
  misc_feature (1)..(25): SEQ ID NO: 4785; WAN0249ZD; Start 25; Stop 49
cttgaataccaacttccttactacc

SEQ ID NO: 390755 - DNA, 25 bp, Artificial
  probe
  misc_feature (1)..(25): SEQ ID NO: 4785; WAN0249ZD; Start 18; Stop 42
tctgactcttgaataccaacttcct

SEQ ID NO: 390756 - DNA, 25 bp, Artificial
  probe
  misc_feature (1)..(25): SEQ ID NO: 4785; WAN0249ZD; Start 28; Stop 52
gaataccaacttccttactaccatt

SEQ ID NO: 390757 - DNA, 25 bp, Artificial
  probe
  misc_feature (1)..(25): SEQ ID NO: 4785; WAN0249ZD; Start 5; Stop 29
agttgctgctatatctgactcttga

SEQ ID NO: 390758 - DNA, 25 bp, Artificial
  probe
  misc_feature (1)..(25): SEQ ID NO: 4785; WAN0249ZD; Start 16; Stop 40
tatctgactcttgaataccaacttc

SEQ ID NO: 390759 - DNA, 25 bp, Artificial
  probe
  misc_feature (1)..(25): SEQ ID NO: 4785; WAN0249ZD; Start 24; Stop 48
tcttgaataccaacttccttactac

SEQ ID NO: 390760 - DNA, 25 bp, Artificial
  probe
  misc_feature (1)..(25): SEQ ID NO: 4785; WAN0249ZD; Start 12; Stop 36
gctatatctgactcttgaataccaa

SEQ ID NO: 390761 - DNA, 25 bp, Artificial
  probe
  misc_feature (1)..(25): SEQ ID NO: 4785; WAN0249ZD; Start 23; Stop 47
ctcttgaataccaacttccttacta

SEQ ID NO: 390762 - DNA, 25 bp, Artificial
  probe
  misc_feature (1)..(25): SEQ ID NO: 4785; WAN0249ZD; Start 15; Stop 39
atatctgactcttgaataccaactt

SEQ ID NO: 390763 - DNA, 25 bp, Artificial
  probe
  misc_feature (1)..(25): SEQ ID NO: 4785; WAN0249ZD; Start 56; Stop 80
agcggcagtatatgtgtatttatct

SEQ ID NO: 390764 - DNA, 25 bp, Artificial
  probe
  misc_feature (1)..(25): SEQ ID NO: 4785; WAN0249ZD; Start 32; Stop 56
accaacttccttactaccatttcta

SEQ ID NO: 390765 - DNA, 25 bp, Artificial
  probe
  misc_feature (1)..(25): SEQ ID NO: 4785; WAN0249ZD; Start 31; Stop 55
taccaacttccttactaccatttct

SEQ ID NO: 390766 - DNA, 25 bp, Artificial
  probe
  misc_feature (1)..(25): SEQ ID NO: 4785; WAN0249ZD; Start 52; Stop 76
ttctagcggcagtatatgtgtattt

SEQ ID NO: 390767 - DNA, 25 bp, Artificial
  probe
  misc_feature (1)..(25): SEQ ID NO: 4785; WAN0249ZD; Start 51; Stop 75
tttctagcggcagtatatgtgtatt

SEQ ID NO: 390768 - DNA, 25 bp, Artificial
  probe
  misc_feature (1)..(25): SEQ ID NO: 4785; WAN0249ZD; Start 50; Stop 74
atttctagcggcagtatatgtgtat

SEQ ID NO: 390769 - DNA, 25 bp, Artificial
  probe
  misc_feature (1)..(25): SEQ ID NO: 4785; WAN0249ZD; Start 35; Stop 59
aacttccttactaccatttctagcg

SEQ ID NO: 390770 - DNA, 25 bp, Artificial
  probe
  misc_feature (1)..(25): SEQ ID NO: 4785; WAN0249ZD; Start 53; Stop 77
tctagcggcagtatatgtgtattta

SEQ ID NO: 390771 - DNA, 25 bp, Artificial
  probe
  misc_feature (1)..(25): SEQ ID NO: 4785; WAN0249ZD; Start 34; Stop 58
caacttccttactaccatttctagc

SEQ ID NO: 390772 - DNA, 25 bp, Artificial
  probe
  misc_feature (1)..(25): SEQ ID NO: 4785; WAN0249ZD; Start 49; Stop 73
catttctagcggcagtatatgtgta

SEQ ID NO: 390773 - DNA, 25 bp, Artificial
  probe
  misc_feature (1)..(25): SEQ ID NO: 4785; WAN0249ZD; Start 55; Stop 79
tagcggcagtatatgtgtatttatc

SEQ ID NO: 390774 - DNA, 25 bp, Artificial
  probe
  misc_feature (1)..(25): SEQ ID NO: 4786; WAN0249TQ; Start 365; Stop 389
acttgaactatgatatgtctggagt

SEQ ID NO: 390775 - DNA, 25 bp, Artificial
  probe
  misc_feature (1)..(25): SEQ ID NO: 4786; WAN0249TQ; Start 139; Stop 163
tctaacttctccatcttaggaacac

SEQ ID NO: 390776 - DNA, 25 bp, Artificial
  probe
  misc_feature (1)..(25): SEQ ID NO: 4786; WAN0249TQ; Start 138; Stop 162
gtctaacttctccatcttaggaaca

SEQ ID NO: 390777 - DNA, 25 bp, Artificial
  probe
  misc_feature (1)..(25): SEQ ID NO: 4786; WAN0249TQ; Start 368; Stop 392
tgaactatgatatgtctggagtaga

SEQ ID NO: 390778 - DNA, 25 bp, Artificial
  probe
  misc_feature (1)..(25): SEQ ID NO: 4786; WAN0249TQ; Start 140; Stop 164
ctaacttctccatcttaggaacacg

SEQ ID NO: 390779 - DNA, 25 bp, Artificial
  probe
  misc_feature (1)..(25): SEQ ID NO: 4786; WAN0249TQ; Start 137; Stop 161
agtctaacttctccatcttaggaac

SEQ ID NO: 390780 - DNA, 25 bp, Artificial
  probe
  misc_feature (1)..(25): SEQ ID NO: 4786; WAN0249TQ; Start 364; Stop 388
tacttgaactatgatatgtctggag

SEQ ID NO: 390781 - DNA, 25 bp, Artificial
  probe
  misc_feature (1)..(25): SEQ ID NO: 4786; WAN0249TQ; Start 543; Stop 567
tgataaagatagaaaggcaagacca

SEQ ID NO: 390782 - DNA, 25 bp, Artificial
  probe
  misc_feature (1)..(25): SEQ ID NO: 4786; WAN0249TQ; Start 367; Stop 391
ttgaactatgatatgtctggagtag

SEQ ID NO: 390783 - DNA, 25 bp, Artificial
  probe
  misc_feature (1)..(25): SEQ ID NO: 4786; WAN0249TQ; Start 366; Stop 390
cttgaactatgatatgtctggagta

SEQ ID NO: 390784 - DNA, 25 bp, Artificial
  probe
  misc_feature (1)..(25): SEQ ID NO: 4786; WAN0249TQ; Start 363; Stop 387
ttacttgaactatgatatgtctgga

SEQ ID NO: 390785 - DNA, 25 bp, Artificial
  probe
  misc_feature (1)..(25): SEQ ID NO: 4786; WAN0249TQ; Start 135; Stop 159
ctagtctaacttctccatcttagga

SEQ ID NO: 390786 - DNA, 25 bp, Artificial
  probe
  misc_feature (1)..(25): SEQ ID NO: 4786; WAN0249TQ; Start 544; Stop 568
gataaagatagaaaggcaagaccat

SEQ ID NO: 390787 - DNA, 25 bp, Artificial
  probe
  misc_feature (1)..(25): SEQ ID NO: 4786; WAN0249TQ; Start 545; Stop 569
ataaagatagaaaggcaagaccatc

SEQ ID NO: 390788 - DNA, 25 bp, Artificial
  probe
  misc_feature (1)..(25): SEQ ID NO: 4786; WAN0249TQ; Start 136; Stop 160
tagtctaacttctccatcttaggaa

SEQ ID NO: 390789 - DNA, 25 bp, Artificial
  probe
  misc_feature (1)..(25): SEQ ID NO: 4786; WAN0249TQ; Start 474; Stop 498
aacttggctgaaactttctatttgc

SEQ ID NO: 390790 - DNA, 25 bp, Artificial
  probe
  misc_feature (1)..(25): SEQ ID NO: 4786; WAN0249TQ; Start 542; Stop 566
ttgataaagatagaaaggcaagacc

SEQ ID NO: 390791 - DNA, 25 bp, Artificial
  probe
  misc_feature (1)..(25): SEQ ID NO: 4786; WAN0249TQ; Start 470; Stop 494
gtcaaacttggctgaaactttctat

SEQ ID NO: 390792 - DNA, 25 bp, Artificial
  probe
  misc_feature (1)..(25): SEQ ID NO: 4786; WAN0249TQ; Start 471; Stop 495
tcaaacttggctgaaactttctatt

SEQ ID NO: 390793 - DNA, 25 bp, Artificial
  probe
  misc_feature (1)..(25): SEQ ID NO: 4786; WAN0249TQ; Start 473; Stop 497
aaacttggctgaaactttctatttg

SEQ ID NO: 390794 - DNA, 25 bp, Artificial
  probe
  misc_feature (1)..(25): SEQ ID NO: 4786; WAN0249TQ; Start 472; Stop 496
caaacttggctgaaactttctattt

SEQ ID NO: 390795 - DNA, 25 bp, Artificial
  probe
  misc_feature (1)..(25): SEQ ID NO: 4786; WAN0249TQ; Start 332; Stop 356
cgcctataagaactgttgaatttca

SEQ ID NO: 390796 - DNA, 25 bp, Artificial
  probe
  misc_feature (1)..(25): SEQ ID NO: 4786; WAN0249TQ; Start 469; Stop 493
tgtcaaacttggctgaaactttcta

SEQ ID NO: 390797 - DNA, 25 bp, Artificial
  probe
  misc_feature (1)..(25): SEQ ID NO: 4786; WAN0249TQ; Start 540; Stop 564
tgttgataaagatagaaaggcaaga

SEQ ID NO: 390798 - DNA, 25 bp, Artificial
  probe
  misc_feature (1)..(25): SEQ ID NO: 4786; WAN0249TQ; Start 467; Stop 491
tttgtcaaacttggctgaaactttc

SEQ ID NO: 390799 - DNA, 25 bp, Artificial
  probe
  misc_feature (1)..(25): SEQ ID NO: 4786; WAN0249TQ; Start 466; Stop 490
ctttgtcaaacttggctgaaacttt

SEQ ID NO: 390800 - DNA, 25 bp, Artificial
  probe
  misc_feature (1)..(25): SEQ ID NO: 4786; WAN0249TQ; Start 276; Stop 300
ttgagtattagaggtttgcttagaa

SEQ ID NO: 390801 - DNA, 25 bp, Artificial
  probe
  misc_feature (1)..(25): SEQ ID NO: 4786; WAN0249TQ; Start 277; Stop 301
tgagtattagaggtttgcttagaaa

SEQ ID NO: 390802 - DNA, 25 bp, Artificial
  probe
  misc_feature (1)..(25): SEQ ID NO: 4786; WAN0249TQ; Start 427; Stop 451
cgcttatatctacaaacttcaaaca

SEQ ID NO: 390803 - DNA, 25 bp, Artificial
  probe
  misc_feature (1)..(25): SEQ ID NO: 4786; WAN0249TQ; Start 541; Stop 565
gttgataaagatagaaaggcaagac

SEQ ID NO: 390804 - DNA, 25 bp, Artificial
  probe
  misc_feature (1)..(25): SEQ ID NO: 4786; WAN0249TQ; Start 539; Stop 563
ctgttgataaagatagaaaggcaag

SEQ ID NO: 390805 - DNA, 25 bp, Artificial
  probe
  misc_feature (1)..(25): SEQ ID NO: 4786; WAN0249TQ; Start 143; Stop 167
acttctccatcttaggaacacgtaa

SEQ ID NO: 390806 - DNA, 25 bp, Artificial
  probe
  misc_feature (1)..(25): SEQ ID NO: 4786; WAN0249TQ; Start 142; Stop 166
aacttctccatcttaggaacacgta

SEQ ID NO: 390807 - DNA, 25 bp, Artificial
  probe
  misc_feature (1)..(25): SEQ ID NO: 4787; WAN0249RF; Start 145; Stop 169
atgaaagccctagcaagatatttga

SEQ ID NO: 390808 - DNA, 25 bp, Artificial
  probe
  misc_feature (1)..(25): SEQ ID NO: 4787; WAN0249RF; Start 144; Stop 168
aatgaaagccctagcaagatatttg

SEQ ID NO: 390809 - DNA, 25 bp, Artificial
  probe
  misc_feature (1)..(25): SEQ ID NO: 4787; WAN0249RF; Start 146; Stop 170
tgaaagccctagcaagatatttgac

SEQ ID NO: 390810 - DNA, 25 bp, Artificial
  probe
  misc_feature (1)..(25): SEQ ID NO: 4787; WAN0249RF; Start 143; Stop 167
aaatgaaagccctagcaagatattt

SEQ ID NO: 390811 - DNA, 25 bp, Artificial
  probe
  misc_feature (1)..(25): SEQ ID NO: 4787; WAN0249RF; Start 147; Stop 171
gaaagccctagcaagatatttgacc

SEQ ID NO: 390812 - DNA, 25 bp, Artificial
  probe
  misc_feature (1)..(25): SEQ ID NO: 4787; WAN0249RF; Start 94; Stop 118
aagcaccccaaatgtctctattatt

SEQ ID NO: 390813 - DNA, 25 bp, Artificial
  probe
  misc_feature (1)..(25): SEQ ID NO: 4787; WAN0249RF; Start 93; Stop 117
aaagcaccccaaatgtctctattat

SEQ ID NO: 390814 - DNA, 25 bp, Artificial
  probe
  misc_feature (1)..(25): SEQ ID NO: 4787; WAN0249RF; Start 92; Stop 116
taaagcaccccaaatgtctctatta

SEQ ID NO: 390815 - DNA, 25 bp, Artificial
  probe
  misc_feature (1)..(25): SEQ ID NO: 4787; WAN0249RF; Start 151; Stop 175
gccctagcaagatatttgaccgaaa

SEQ ID NO: 390816 - DNA, 25 bp, Artificial
  probe
  misc_feature (1)..(25): SEQ ID NO: 4787; WAN0249RF; Start 148; Stop 172
aaagccctagcaagatatttgaccg

SEQ ID NO: 390817 - DNA, 25 bp, Artificial
  probe
  misc_feature (1)..(25): SEQ ID NO: 4787; WAN0249RF; Start 142; Stop 166
aaaatgaaagccctagcaagatatt

SEQ ID NO: 390818 - DNA, 25 bp, Artificial
  probe
  misc_feature (1)..(25): SEQ ID NO: 4787; WAN0249RF; Start 95; Stop 119
agcaccccaaatgtctctattattt

SEQ ID NO: 390819 - DNA, 25 bp, Artificial
  probe
  misc_feature (1)..(25): SEQ ID NO: 4787; WAN0249RF; Start 152; Stop 176
ccctagcaagatatttgaccgaaaa

SEQ ID NO: 390820 - DNA, 25 bp, Artificial
  probe
  misc_feature (1)..(25): SEQ ID NO: 4787; WAN0249RF; Start 96; Stop 120
gcaccccaaatgtctctattattta

SEQ ID NO: 390821 - DNA, 25 bp, Artificial
  probe
  misc_feature (1)..(25): SEQ ID NO: 4787; WAN0249RF; Start 150; Stop 174
agccctagcaagatatttgaccgaa

SEQ ID NO: 390822 - DNA, 25 bp, Artificial
  probe
  misc_feature (1)..(25): SEQ ID NO: 4787; WAN0249RF; Start 149; Stop 173
aagccctagcaagatatttgaccga

SEQ ID NO: 390823 - DNA, 25 bp, Artificial
  probe
  misc_feature (1)..(25): SEQ ID NO: 4787; WAN0249RF; Start 97; Stop 121
caccccaaatgtctctattatttaa

SEQ ID NO: 390824 - DNA, 25 bp, Artificial
  probe
  misc_feature (1)..(25): SEQ ID NO: 4788; WAN024F66; Start 310; Stop 334
aaccaaactcacgaagatactgaat

SEQ ID NO: 390825 - DNA, 25 bp, Artificial
  probe
  misc_feature (1)..(25): SEQ ID NO: 4788; WAN024F66; Start 313; Stop 337
caaactcacgaagatactgaatcaa

SEQ ID NO: 390826 - DNA, 25 bp, Artificial
  probe
  misc_feature (1)..(25): SEQ ID NO: 4788; WAN024F66; Start 309; Stop 333
aaaccaaactcacgaagatactgaa

SEQ ID NO: 390827 - DNA, 25 bp, Artificial
  probe
  misc_feature (1)..(25): SEQ ID NO: 4788; WAN024F66; Start 312; Stop 336
ccaaactcacgaagatactgaatca

SEQ ID NO: 390828 - DNA, 25 bp, Artificial
  probe
  misc_feature (1)..(25): SEQ ID NO: 4788; WAN024F66; Start 311; Stop 335
accaaactcacgaagatactgaatc

SEQ ID NO: 390829 - DNA, 25 bp, Artificial
  probe
  misc_feature (1)..(25): SEQ ID NO: 4788; WAN024F66; Start 32; Stop 56
aagagccaaactttgatgatatacg

SEQ ID NO: 390830 - DNA, 25 bp, Artificial
  probe
  misc_feature (1)..(25): SEQ ID NO: 4788; WAN024F66; Start 314; Stop 338
aaactcacgaagatactgaatcaaa

SEQ ID NO: 390831 - DNA, 25 bp, Artificial
  probe
  misc_feature (1)..(25): SEQ ID NO: 4788; WAN024F66; Start 34; Stop 58
gagccaaactttgatgatatacgtt

SEQ ID NO: 390832 - DNA, 25 bp, Artificial
  probe
  misc_feature (1)..(25): SEQ ID NO: 4788; WAN024F66; Start 33; Stop 57
agagccaaactttgatgatatacgt

SEQ ID NO: 390833 - DNA, 25 bp, Artificial
  probe
  misc_feature (1)..(25): SEQ ID NO: 4788; WAN024F66; Start 307; Stop 331
caaaaccaaactcacgaagatactg

SEQ ID NO: 390834 - DNA, 25 bp, Artificial
  probe
  misc_feature (1)..(25): SEQ ID NO: 4788; WAN024F66; Start 306; Stop 330
tcaaaaccaaactcacgaagatact

SEQ ID NO: 390835 - DNA, 25 bp, Artificial
  probe
  misc_feature (1)..(25): SEQ ID NO: 4788; WAN024F66; Start 305; Stop 329
atcaaaaccaaactcacgaagatac

SEQ ID NO: 390836 - DNA, 25 bp, Artificial
  probe
  misc_feature (1)..(25): SEQ ID NO: 4788; WAN024F66; Start 300; Stop 324
tcaatatcaaaaccaaactcacgaa

SEQ ID NO: 390837 - DNA, 25 bp, Artificial
  probe
  misc_feature (1)..(25): SEQ ID NO: 4788; WAN024F66; Start 302; Stop 326
aatatcaaaaccaaactcacgaaga

SEQ ID NO: 390838 - DNA, 25 bp, Artificial
  probe
  misc_feature (1)..(25): SEQ ID NO: 4788; WAN024F66; Start 301; Stop 325
caatatcaaaaccaaactcacgaag

SEQ ID NO: 390839 - DNA, 25 bp, Artificial
  probe
  misc_feature (1)..(25): SEQ ID NO: 4788; WAN024F66; Start 299; Stop 323
atcaatatcaaaaccaaactcacga

SEQ ID NO: 390840 - DNA, 25 bp, Artificial
  probe
  misc_feature (1)..(25): SEQ ID NO: 4788; WAN024F66; Start 303; Stop 327
atatcaaaaccaaactcacgaagat

SEQ ID NO: 390841 - DNA, 25 bp, Artificial
  probe
  misc_feature (1)..(25): SEQ ID NO: 4788; WAN024F66; Start 308; Stop 332
aaaaccaaactcacgaagatactga

SEQ ID NO: 390842 - DNA, 25 bp, Artificial
  probe
  misc_feature (1)..(25): SEQ ID NO: 4788; WAN024F66; Start 315; Stop 339
aactcacgaagatactgaatcaaaa

SEQ ID NO: 390843 - DNA, 25 bp, Artificial
  probe
  misc_feature (1)..(25): SEQ ID NO: 4788; WAN024F66; Start 20; Stop 44
ctacaattgacaaagagccaaactt

SEQ ID NO: 390844 - DNA, 25 bp, Artificial
  probe
  misc_feature (1)..(25): SEQ ID NO: 4788; WAN024F66; Start 31; Stop 55
aaagagccaaactttgatgatatac

SEQ ID NO: 390845 - DNA, 25 bp, Artificial
  probe
  misc_feature (1)..(25): SEQ ID NO: 4788; WAN024F66; Start 298; Stop 322
tatcaatatcaaaaccaaactcacg

SEQ ID NO: 390846 - DNA, 25 bp, Artificial
  probe
  misc_feature (1)..(25): SEQ ID NO: 4788; WAN024F66; Start 35; Stop 59
agccaaactttgatgatatacgttt

SEQ ID NO: 390847 - DNA, 25 bp, Artificial
  probe
  misc_feature (1)..(25): SEQ ID NO: 4788; WAN024F66; Start 19; Stop 43
actacaattgacaaagagccaaact

SEQ ID NO: 390848 - DNA, 25 bp, Artificial
  probe
  misc_feature (1)..(25): SEQ ID NO: 4788; WAN024F66; Start 18; Stop 42
cactacaattgacaaagagccaaac

SEQ ID NO: 390849 - DNA, 25 bp, Artificial
  probe
  misc_feature (1)..(25): SEQ ID NO: 4788; WAN024F66; Start 304; Stop 328
tatcaaaaccaaactcacgaagata

SEQ ID NO: 390850 - DNA, 25 bp, Artificial
  probe
  misc_feature (1)..(25): SEQ ID NO: 4788; WAN024F66; Start 2; Stop 26
tagcttttcttcaacccactacaat

SEQ ID NO: 390851 - DNA, 25 bp, Artificial
  probe
  misc_feature (1)..(25): SEQ ID NO: 4788; WAN024F66; Start 1; Stop 25
ttagcttttcttcaacccactacaa

SEQ ID NO: 390852 - DNA, 25 bp, Artificial
  probe
  misc_feature (1)..(25): SEQ ID NO: 4788; WAN024F66; Start 3; Stop 27
agcttttcttcaacccactacaatt

SEQ ID NO: 390853 - DNA, 25 bp, Artificial
  probe
  misc_feature (1)..(25): SEQ ID NO: 4788; WAN024F66; Start 17; Stop 41
ccactacaattgacaaagagccaaa

SEQ ID NO: 390854 - DNA, 25 bp, Artificial
  probe
  misc_feature (1)..(25): SEQ ID NO: 4788; WAN024F66; Start 224; Stop 248
tcgctgtaaaatctttgcattatct

SEQ ID NO: 390855 - DNA, 25 bp, Artificial
  probe
  misc_feature (1)..(25): SEQ ID NO: 4788; WAN024F66; Start 223; Stop 247
gtcgctgtaaaatctttgcattatc

SEQ ID NO: 390856 - DNA, 25 bp, Artificial
  probe
  misc_feature (1)..(25): SEQ ID NO: 4788; WAN024F66; Start 222; Stop 246
cgtcgctgtaaaatctttgcattat

SEQ ID NO: 390857 - DNA, 25 bp, Artificial
  probe
  misc_feature (1)..(25): SEQ ID NO: 4789; WAN0249ND; Start 8; Stop 32
cctcttcttaacaaagttcaatagt

SEQ ID NO: 390858 - DNA, 25 bp, Artificial
  probe
  misc_feature (1)..(25): SEQ ID NO: 4789; WAN0249ND; Start 7; Stop 31
acctcttcttaacaaagttcaatag

SEQ ID NO: 390859 - DNA, 25 bp, Artificial
  probe
  misc_feature (1)..(25): SEQ ID NO: 4789; WAN0249ND; Start 5; Stop 29
gtacctcttcttaacaaagttcaat

SEQ ID NO: 390860 - DNA, 25 bp, Artificial
  probe
  misc_feature (1)..(25): SEQ ID NO: 4789; WAN0249ND; Start 6; Stop 30
tacctcttcttaacaaagttcaata

SEQ ID NO: 390861 - DNA, 25 bp, Artificial
  probe
  misc_feature (1)..(25): SEQ ID NO: 4789; WAN0249ND; Start 4; Stop 28
ggtacctcttcttaacaaagttcaa

SEQ ID NO: 390862 - DNA, 25 bp, Artificial
  probe
  misc_feature (1)..(25): SEQ ID NO: 4790; WAN024AMG; Start 33; Stop 57
tagtaagaaattctgaaacccgtgt

SEQ ID NO: 390863 - DNA, 25 bp, Artificial
  probe
  misc_feature (1)..(25): SEQ ID NO: 4790; WAN024AMG; Start 69; Stop 93
cactctttgttcctttctattgatg

SEQ ID NO: 390864 - DNA, 25 bp, Artificial
  probe
  misc_feature (1)..(25): SEQ ID NO: 4790; WAN024AMG; Start 35; Stop 59
gtaagaaattctgaaacccgtgttc

SEQ ID NO: 390865 - DNA, 25 bp, Artificial
  probe
  misc_feature (1)..(25): SEQ ID NO: 4790; WAN024AMG; Start 32; Stop 56
ttagtaagaaattctgaaacccgtg

SEQ ID NO: 390866 - DNA, 25 bp, Artificial
  probe
  misc_feature (1)..(25): SEQ ID NO: 4790; WAN024AMG; Start 70; Stop 94
actctttgttcctttctattgatga

SEQ ID NO: 390867 - DNA, 25 bp, Artificial
  probe
  misc_feature (1)..(25): SEQ ID NO: 4790; WAN024AMG; Start 34; Stop 58
agtaagaaattctgaaacccgtgtt

SEQ ID NO: 390868 - DNA, 25 bp, Artificial
  probe
  misc_feature (1)..(25): SEQ ID NO: 4790; WAN024AMG; Start 104; Stop 128
caaacaaatgagattccgtcccttt

SEQ ID NO: 390869 - DNA, 25 bp, Artificial
  probe
  misc_feature (1)..(25): SEQ ID NO: 4790; WAN024AMG; Start 99; Stop 123
aaacccaaacaaatgagattccgtc

SEQ ID NO: 390870 - DNA, 25 bp, Artificial
  probe
  misc_feature (1)..(25): SEQ ID NO: 4790; WAN024AMG; Start 31; Stop 55
tttagtaagaaattctgaaacccgt

SEQ ID NO: 390871 - DNA, 25 bp, Artificial
  probe
  misc_feature (1)..(25): SEQ ID NO: 4790; WAN024AMG; Start 73; Stop 97
ctttgttcctttctattgatgagac

SEQ ID NO: 390872 - DNA, 25 bp, Artificial
  probe
  misc_feature (1)..(25): SEQ ID NO: 4790; WAN024AMG; Start 72; Stop 96
tctttgttcctttctattgatgaga

SEQ ID NO: 390873 - DNA, 25 bp, Artificial
  probe
  misc_feature (1)..(25): SEQ ID NO: 4790; WAN024AMG; Start 76; Stop 100
tgttcctttctattgatgagacaaa

SEQ ID NO: 390874 - DNA, 25 bp, Artificial
  probe
  misc_feature (1)..(25): SEQ ID NO: 4790; WAN024AMG; Start 74; Stop 98
tttgttcctttctattgatgagaca

SEQ ID NO: 390875 - DNA, 25 bp, Artificial
  probe
  misc_feature (1)..(25): SEQ ID NO: 4790; WAN024AMG; Start 68; Stop 92
acactctttgttcctttctattgat

SEQ ID NO: 390876 - DNA, 25 bp, Artificial
  probe
  misc_feature (1)..(25): SEQ ID NO: 4790; WAN024AMG; Start 71; Stop 95
ctctttgttcctttctattgatgag

SEQ ID NO: 390877 - DNA, 25 bp, Artificial
  probe
  misc_feature (1)..(25): SEQ ID NO: 4790; WAN024AMG; Start 30; Stop 54
atttagtaagaaattctgaaacccg

SEQ ID NO: 390878 - DNA, 25 bp, Artificial
  probe
  misc_feature (1)..(25): SEQ ID NO: 4790; WAN024AMG; Start 94; Stop 118
agacaaaacccaaacaaatgagatt

SEQ ID NO: 390879 - DNA, 25 bp, Artificial
  probe
  misc_feature (1)..(25): SEQ ID NO: 4790; WAN024AMG; Start 93; Stop 117
gagacaaaacccaaacaaatgagat

SEQ ID NO: 390880 - DNA, 25 bp, Artificial
  probe
  misc_feature (1)..(25): SEQ ID NO: 4790; WAN024AMG; Start 95; Stop 119
gacaaaacccaaacaaatgagattc

SEQ ID NO: 390881 - DNA, 25 bp, Artificial
  probe
  misc_feature (1)..(25): SEQ ID NO: 4790; WAN024AMG; Start 91; Stop 115
atgagacaaaacccaaacaaatgag

SEQ ID NO: 390882 - DNA, 25 bp, Artificial
  probe
  misc_feature (1)..(25): SEQ ID NO: 4790; WAN024AMG; Start 90; Stop 114
gatgagacaaaacccaaacaaatga

SEQ ID NO: 390883 - DNA, 25 bp, Artificial
  probe
  misc_feature (1)..(25): SEQ ID NO: 4790; WAN024AMG; Start 96; Stop 120
acaaaacccaaacaaatgagattcc

SEQ ID NO: 390884 - DNA, 25 bp, Artificial
  probe
  misc_feature (1)..(25): SEQ ID NO: 4790; WAN024AMG; Start 89; Stop 113
tgatgagacaaaacccaaacaaatg

SEQ ID NO: 390885 - DNA, 25 bp, Artificial
  probe
  misc_feature (1)..(25): SEQ ID NO: 4790; WAN024AMG; Start 103; Stop 127
ccaaacaaatgagattccgtccctt

SEQ ID NO: 390886 - DNA, 25 bp, Artificial
  probe
  misc_feature (1)..(25): SEQ ID NO: 4790; WAN024AMG; Start 92; Stop 116
tgagacaaaacccaaacaaatgaga

SEQ ID NO: 390887 - DNA, 25 bp, Artificial
  probe
  misc_feature (1)..(25): SEQ ID NO: 4790; WAN024AMG; Start 105; Stop 129
aaacaaatgagattccgtccctttt

SEQ ID NO: 390888 - DNA, 25 bp, Artificial
  probe
  misc_feature (1)..(25): SEQ ID NO: 4790; WAN024AMG; Start 88; Stop 112
ttgatgagacaaaacccaaacaaat

SEQ ID NO: 390889 - DNA, 25 bp, Artificial
  probe
  misc_feature (1)..(25): SEQ ID NO: 4790; WAN024AMG; Start 87; Stop 111
attgatgagacaaaacccaaacaaa

SEQ ID NO: 390890 - DNA, 25 bp, Artificial
  probe
  misc_feature (1)..(25): SEQ ID NO: 4790; WAN024AMG; Start 80; Stop 104
cctttctattgatgagacaaaaccc

SEQ ID NO: 390891 - DNA, 25 bp, Artificial
  probe
  misc_feature (1)..(25): SEQ ID NO: 4790; WAN024AMG; Start 85; Stop 109
ctattgatgagacaaaacccaaaca

SEQ ID NO: 390892 - DNA, 25 bp, Artificial
  probe
  misc_feature (1)..(25): SEQ ID NO: 4790; WAN024AMG; Start 84; Stop 108
tctattgatgagacaaaacccaaac

SEQ ID NO: 390893 - DNA, 25 bp, Artificial
  probe
  misc_feature (1)..(25): SEQ ID NO: 4790; WAN024AMG; Start 86; Stop 110
tattgatgagacaaaacccaaacaa

SEQ ID NO: 390894 - DNA, 25 bp, Artificial
  probe
  misc_feature (1)..(25): SEQ ID NO: 4790; WAN024AMG; Start 81; Stop 105
ctttctattgatgagacaaaaccca

SEQ ID NO: 390895 - DNA, 25 bp, Artificial
  probe
  misc_feature (1)..(25): SEQ ID NO: 4791; WAN024AIR; Start 60; Stop 84
acctataacatcctgagtctatcta

SEQ ID NO: 390896 - DNA, 25 bp, Artificial
  probe
  misc_feature (1)..(25): SEQ ID NO: 4791; WAN024AIR; Start 59; Stop 83
tacctataacatcctgagtctatct

SEQ ID NO: 390897 - DNA, 25 bp, Artificial
  probe
  misc_feature (1)..(25): SEQ ID NO: 4791; WAN024AIR; Start 58; Stop 82
ttacctataacatcctgagtctatc

SEQ ID NO: 390898 - DNA, 25 bp, Artificial
  probe
  misc_feature (1)..(25): SEQ ID NO: 4791; WAN024AIR; Start 61; Stop 85
cctataacatcctgagtctatctaa

SEQ ID NO: 390899 - DNA, 25 bp, Artificial
  probe
  misc_feature (1)..(25): SEQ ID NO: 4791; WAN024AIR; Start 64; Stop 88
ataacatcctgagtctatctaagat

SEQ ID NO: 390900 - DNA, 25 bp, Artificial
  probe
  misc_feature (1)..(25): SEQ ID NO: 4791; WAN024AIR; Start 62; Stop 86
ctataacatcctgagtctatctaag

SEQ ID NO: 390901 - DNA, 25 bp, Artificial
  probe
  misc_feature (1)..(25): SEQ ID NO: 4791; WAN024AIR; Start 63; Stop 87
tataacatcctgagtctatctaaga

SEQ ID NO: 390902 - DNA, 25 bp, Artificial
  probe
  misc_feature (1)..(25): SEQ ID NO: 4791; WAN024AIR; Start 57; Stop 81
tttacctataacatcctgagtctat

SEQ ID NO: 390903 - DNA, 25 bp, Artificial
  probe
  misc_feature (1)..(25): SEQ ID NO: 4791; WAN024AIR; Start 65; Stop 89
taacatcctgagtctatctaagatg

SEQ ID NO: 390904 - DNA, 25 bp, Artificial
  probe
  misc_feature (1)..(25): SEQ ID NO: 4791; WAN024AIR; Start 55; Stop 79
attttacctataacatcctgagtct

SEQ ID NO: 390905 - DNA, 25 bp, Artificial
  probe
  misc_feature (1)..(25): SEQ ID NO: 4791; WAN024AIR; Start 53; Stop 77
agattttacctataacatcctgagt

SEQ ID NO: 390906 - DNA, 25 bp, Artificial
  probe
  misc_feature (1)..(25): SEQ ID NO: 4791; WAN024AIR; Start 54; Stop 78
gattttacctataacatcctgagtc

SEQ ID NO: 390907 - DNA, 25 bp, Artificial
  probe
  misc_feature (1)..(25): SEQ ID NO: 4791; WAN024AIR; Start 56; Stop 80
ttttacctataacatcctgagtcta

SEQ ID NO: 390908 - DNA, 25 bp, Artificial
  probe
  misc_feature (1)..(25): SEQ ID NO: 4791; WAN024AIR; Start 52; Stop 76
aagattttacctataacatcctgag

SEQ ID NO: 390909 - DNA, 25 bp, Artificial
  probe
  misc_feature (1)..(25): SEQ ID NO: 4792; WAN0249KU; Start 77; Stop 101
ataatgattggtaggaagggagaga

SEQ ID NO: 390910 - DNA, 25 bp, Artificial
  probe
  misc_feature (1)..(25): SEQ ID NO: 4792; WAN0249KU; Start 78; Stop 102
taatgattggtaggaagggagagag

SEQ ID NO: 390911 - DNA, 25 bp, Artificial
  probe
  misc_feature (1)..(25): SEQ ID NO: 4792; WAN0249KU; Start 75; Stop 99
gtataatgattggtaggaagggaga

SEQ ID NO: 390912 - DNA, 25 bp, Artificial
  probe
  misc_feature (1)..(25): SEQ ID NO: 4792; WAN0249KU; Start 74; Stop 98
agtataatgattggtaggaagggag

SEQ ID NO: 390913 - DNA, 25 bp, Artificial
  probe
  misc_feature (1)..(25): SEQ ID NO: 4792; WAN0249KU; Start 76; Stop 100
tataatgattggtaggaagggagag

SEQ ID NO: 390914 - DNA, 25 bp, Artificial
  probe
  misc_feature (1)..(25): SEQ ID NO: 4792; WAN0249KU; Start 1; Stop 25
ttagtctctagtgtttgtttagcgt

SEQ ID NO: 390915 - DNA, 25 bp, Artificial
  probe
  misc_feature (1)..(25): SEQ ID NO: 4792; WAN0249KU; Start 5; Stop 29
tctctagtgtttgtttagcgtctta

SEQ ID NO: 390916 - DNA, 25 bp, Artificial
  probe
  misc_feature (1)..(25): SEQ ID NO: 4792; WAN0249KU; Start 2; Stop 26
tagtctctagtgtttgtttagcgtc

SEQ ID NO: 390917 - DNA, 25 bp, Artificial
  probe
  misc_feature (1)..(25): SEQ ID NO: 4792; WAN0249KU; Start 6; Stop 30
ctctagtgtttgtttagcgtcttaa

SEQ ID NO: 390918 - DNA, 25 bp, Artificial
  probe
  misc_feature (1)..(25): SEQ ID NO: 4792; WAN0249KU; Start 4; Stop 28
gtctctagtgtttgtttagcgtctt

SEQ ID NO: 390919 - DNA, 25 bp, Artificial
  probe
  misc_feature (1)..(25): SEQ ID NO: 4792; WAN0249KU; Start 11; Stop 35
gtgtttgtttagcgtcttaaagaga

SEQ ID NO: 390920 - DNA, 25 bp, Artificial
  probe
  misc_feature (1)..(25): SEQ ID NO: 4792; WAN0249KU; Start 10; Stop 34
agtgtttgtttagcgtcttaaagag

SEQ ID NO: 390921 - DNA, 25 bp, Artificial
  probe
  misc_feature (1)..(25): SEQ ID NO: 4792; WAN0249KU; Start 73; Stop 97
tagtataatgattggtaggaaggga

SEQ ID NO: 390922 - DNA, 25 bp, Artificial
  probe
  misc_feature (1)..(25): SEQ ID NO: 4792; WAN0249KU; Start 3; Stop 27
agtctctagtgtttgtttagcgtct

SEQ ID NO: 390923 - DNA, 25 bp, Artificial
  probe
  misc_feature (1)..(25): SEQ ID NO: 4792; WAN0249KU; Start 7; Stop 31
tctagtgtttgtttagcgtcttaaa

SEQ ID NO: 390924 - DNA, 25 bp, Artificial
  probe
  misc_feature (1)..(25): SEQ ID NO: 4792; WAN0249KU; Start 80; Stop 104
atgattggtaggaagggagagagaa

SEQ ID NO: 390925 - DNA, 25 bp, Artificial
  probe
  misc_feature (1)..(25): SEQ ID NO: 4792; WAN0249KU; Start 79; Stop 103
aatgattggtaggaagggagagaga

SEQ ID NO: 390926 - DNA, 25 bp, Artificial
  probe
  misc_feature (1)..(25): SEQ ID NO: 4792; WAN0249KU; Start 9; Stop 33
tagtgtttgtttagcgtcttaaaga

SEQ ID NO: 390927 - DNA, 25 bp, Artificial
  probe
  misc_feature (1)..(25): SEQ ID NO: 4792; WAN0249KU; Start 8; Stop 32
ctagtgtttgtttagcgtcttaaag

SEQ ID NO: 390928 - DNA, 25 bp, Artificial
  probe
  misc_feature (1)..(25): SEQ ID NO: 4792; WAN0249KU; Start 72; Stop 96
ctagtataatgattggtaggaaggg

SEQ ID NO: 390929 - DNA, 25 bp, Artificial
  probe
  misc_feature (1)..(25): SEQ ID NO: 4792; WAN0249KU; Start 81; Stop 105
tgattggtaggaagggagagagaag

SEQ ID NO: 390930 - DNA, 25 bp, Artificial
  probe
  misc_feature (1)..(25): SEQ ID NO: 4792; WAN0249KU; Start 34; Stop 58
gacatttgagaagattagaaacagt

SEQ ID NO: 390931 - DNA, 25 bp, Artificial
  probe
  misc_feature (1)..(25): SEQ ID NO: 4792; WAN0249KU; Start 33; Stop 57
agacatttgagaagattagaaacag

SEQ ID NO: 390932 - DNA, 25 bp, Artificial
  probe
  misc_feature (1)..(25): SEQ ID NO: 4792; WAN0249KU; Start 32; Stop 56
gagacatttgagaagattagaaaca

SEQ ID NO: 390933 - DNA, 25 bp, Artificial
  probe
  misc_feature (1)..(25): SEQ ID NO: 4792; WAN0249KU; Start 35; Stop 59
acatttgagaagattagaaacagtt

SEQ ID NO: 390934 - DNA, 25 bp, Artificial
  probe
  misc_feature (1)..(25): SEQ ID NO: 4792; WAN0249KU; Start 71; Stop 95
cctagtataatgattggtaggaagg

SEQ ID NO: 390935 - DNA, 25 bp, Artificial
  probe
  misc_feature (1)..(25): SEQ ID NO: 4792; WAN0249KU; Start 31; Stop 55
agagacatttgagaagattagaaac

SEQ ID NO: 390936 - DNA, 25 bp, Artificial
  probe
  misc_feature (1)..(25): SEQ ID NO: 4792; WAN0249KU; Start 52; Stop 76
aaacagttctctcttttctcctagt

SEQ ID NO: 390937 - DNA, 25 bp, Artificial
  probe
  misc_feature (1)..(25): SEQ ID NO: 4792; WAN0249KU; Start 36; Stop 60
catttgagaagattagaaacagttc

SEQ ID NO: 390938 - DNA, 25 bp, Artificial
  probe
  misc_feature (1)..(25): SEQ ID NO: 4792; WAN0249KU; Start 67; Stop 91
ttctcctagtataatgattggtagg

SEQ ID NO: 390939 - DNA, 25 bp, Artificial
  probe
  misc_feature (1)..(25): SEQ ID NO: 4792; WAN0249KU; Start 53; Stop 77
aacagttctctcttttctcctagta

SEQ ID NO: 390940 - DNA, 25 bp, Artificial
  probe
  misc_feature (1)..(25): SEQ ID NO: 4792; WAN0249KU; Start 30; Stop 54
aagagacatttgagaagattagaaa

SEQ ID NO: 390941 - DNA, 25 bp, Artificial
  probe
  misc_feature (1)..(25): SEQ ID NO: 4792; WAN0249KU; Start 29; Stop 53
aaagagacatttgagaagattagaa

SEQ ID NO: 390942 - DNA, 25 bp, Artificial
  probe
  misc_feature (1)..(25): SEQ ID NO: 4793; WAN0249QH; Start 243; Stop 267
ggtctactccttactatctagccat

SEQ ID NO: 390943 - DNA, 25 bp, Artificial
  probe
  misc_feature (1)..(25): SEQ ID NO: 4793; WAN0249QH; Start 247; Stop 271
tactccttactatctagccatctgc

SEQ ID NO: 390944 - DNA, 25 bp, Artificial
  probe
  misc_feature (1)..(25): SEQ ID NO: 4793; WAN0249QH; Start 246; Stop 270
ctactccttactatctagccatctg

SEQ ID NO: 390945 - DNA, 25 bp, Artificial
  probe
  misc_feature (1)..(25): SEQ ID NO: 4793; WAN0249QH; Start 244; Stop 268
gtctactccttactatctagccatc

SEQ ID NO: 390946 - DNA, 25 bp, Artificial
  probe
  misc_feature (1)..(25): SEQ ID NO: 4793; WAN0249QH; Start 245; Stop 269
tctactccttactatctagccatct

SEQ ID NO: 390947 - DNA, 25 bp, Artificial
  probe
  misc_feature (1)..(25): SEQ ID NO: 4793; WAN0249QH; Start 241; Stop 265
tcggtctactccttactatctagcc

SEQ ID NO: 390948 - DNA, 25 bp, Artificial
  probe
  misc_feature (1)..(25): SEQ ID NO: 4793; WAN0249QH; Start 242; Stop 266
cggtctactccttactatctagcca

SEQ ID NO: 390949 - DNA, 25 bp, Artificial
  probe
  misc_feature (1)..(25): SEQ ID NO: 4793; WAN0249QH; Start 284; Stop 308
agataattccagctataacatccgc

SEQ ID NO: 390950 - DNA, 25 bp, Artificial
  probe
  misc_feature (1)..(25): SEQ ID NO: 4793; WAN0249QH; Start 422; Stop 446
agatcatcaaggtcacttaattctt

SEQ ID NO: 390951 - DNA, 25 bp, Artificial
  probe
  misc_feature (1)..(25): SEQ ID NO: 4793; WAN0249QH; Start 283; Stop 307
aagataattccagctataacatccg

SEQ ID NO: 390952 - DNA, 25 bp, Artificial
  probe
  misc_feature (1)..(25): SEQ ID NO: 4793; WAN0249QH; Start 270; Stop 294
gcagacgaaatacaagataattcca

SEQ ID NO: 390953 - DNA, 25 bp, Artificial
  probe
  misc_feature (1)..(25): SEQ ID NO: 4793; WAN0249QH; Start 205; Stop 229
tcttagcgatttaacgggtgtttat

SEQ ID NO: 390954 - DNA, 25 bp, Artificial
  probe
  misc_feature (1)..(25): SEQ ID NO: 4793; WAN0249QH; Start 204; Stop 228
atcttagcgatttaacgggtgttta

SEQ ID NO: 390955 - DNA, 25 bp, Artificial
  probe
  misc_feature (1)..(25): SEQ ID NO: 4793; WAN0249QH; Start 203; Stop 227
tatcttagcgatttaacgggtgttt

SEQ ID NO: 390956 - DNA, 25 bp, Artificial
  probe
  misc_feature (1)..(25): SEQ ID NO: 4793; WAN0249QH; Start 211; Stop 235
cgatttaacgggtgtttataggcta

SEQ ID NO: 390957 - DNA, 25 bp, Artificial
  probe
  misc_feature (1)..(25): SEQ ID NO: 4793; WAN0249QH; Start 208; Stop 232
tagcgatttaacgggtgtttatagg

SEQ ID NO: 390958 - DNA, 25 bp, Artificial
  probe
  misc_feature (1)..(25): SEQ ID NO: 4793; WAN0249QH; Start 207; Stop 231
ttagcgatttaacgggtgtttatag

SEQ ID NO: 390959 - DNA, 25 bp, Artificial
  probe
  misc_feature (1)..(25): SEQ ID NO: 4793; WAN0249QH; Start 206; Stop 230
cttagcgatttaacgggtgtttata

SEQ ID NO: 390960 - DNA, 25 bp, Artificial
  probe
  misc_feature (1)..(25): SEQ ID NO: 4793; WAN0249QH; Start 272; Stop 296
agacgaaatacaagataattccagc

SEQ ID NO: 390961 - DNA, 25 bp, Artificial
  probe
  misc_feature (1)..(25): SEQ ID NO: 4793; WAN0249QH; Start 213; Stop 237
atttaacgggtgtttataggctagt

SEQ ID NO: 390962 - DNA, 25 bp, Artificial
  probe
  misc_feature (1)..(25): SEQ ID NO: 4793; WAN0249QH; Start 214; Stop 238
tttaacgggtgtttataggctagtc

SEQ ID NO: 390963 - DNA, 25 bp, Artificial
  probe
  misc_feature (1)..(25): SEQ ID NO: 4793; WAN0249QH; Start 202; Stop 226
gtatcttagcgatttaacgggtgtt

SEQ ID NO: 390964 - DNA, 25 bp, Artificial
  probe
  misc_feature (1)..(25): SEQ ID NO: 4793; WAN0249QH; Start 212; Stop 236
gatttaacgggtgtttataggctag

SEQ ID NO: 390965 - DNA, 25 bp, Artificial
  probe
  misc_feature (1)..(25): SEQ ID NO: 4793; WAN0249QH; Start 421; Stop 445
tagatcatcaaggtcacttaattct

SEQ ID NO: 390966 - DNA, 25 bp, Artificial
  probe
  misc_feature (1)..(25): SEQ ID NO: 4793; WAN0249QH; Start 215; Stop 239
ttaacgggtgtttataggctagtca

SEQ ID NO: 390967 - DNA, 25 bp, Artificial
  probe
  misc_feature (1)..(25): SEQ ID NO: 4793; WAN0249QH; Start 332; Stop 356
tgataaggctcattagtttcacctc

SEQ ID NO: 390968 - DNA, 25 bp, Artificial
  probe
  misc_feature (1)..(25): SEQ ID NO: 4793; WAN0249QH; Start 282; Stop 306
caagataattccagctataacatcc

SEQ ID NO: 390969 - DNA, 25 bp, Artificial
  probe
  misc_feature (1)..(25): SEQ ID NO: 4793; WAN0249QH; Start 248; Stop 272
actccttactatctagccatctgca

SEQ ID NO: 390970 - DNA, 25 bp, Artificial
  probe
  misc_feature (1)..(25): SEQ ID NO: 4793; WAN0249QH; Start 333; Stop 357
gataaggctcattagtttcacctcc

SEQ ID NO: 390971 - DNA, 25 bp, Artificial
  probe
  misc_feature (1)..(25): SEQ ID NO: 4793; WAN0249QH; Start 271; Stop 295
cagacgaaatacaagataattccag

SEQ ID NO: 390972 - DNA, 25 bp, Artificial
  probe
  misc_feature (1)..(25): SEQ ID NO: 4793; WAN0249QH; Start 342; Stop 366
cattagtttcacctcctctcacgaa

SEQ ID NO: 390973 - DNA, 25 bp, Artificial
  probe
  misc_feature (1)..(25): SEQ ID NO: 4793; WAN0249QH; Start 290; Stop 314
ttccagctataacatccgctataat

SEQ ID NO: 390974 - DNA, 25 bp, Artificial
  probe
  misc_feature (1)..(25): SEQ ID NO: 4793; WAN0249QH; Start 289; Stop 313
attccagctataacatccgctataa

SEQ ID NO: 390975 - DNA, 25 bp, Artificial
  probe
  misc_feature (1)..(25): SEQ ID NO: 4794; WAN0249DA; Start 64; Stop 88
ttcttatcaaatccctagctcatgg

SEQ ID NO: 390976 - DNA, 25 bp, Artificial
  probe
  misc_feature (1)..(25): SEQ ID NO: 4794; WAN0249DA; Start 63; Stop 87
attcttatcaaatccctagctcatg

SEQ ID NO: 390977 - DNA, 25 bp, Artificial
  probe
  misc_feature (1)..(25): SEQ ID NO: 4794; WAN0249DA; Start 67; Stop 91
ttatcaaatccctagctcatggcaa

SEQ ID NO: 390978 - DNA, 25 bp, Artificial
  probe
  misc_feature (1)..(25): SEQ ID NO: 4794; WAN0249DA; Start 65; Stop 89
tcttatcaaatccctagctcatggc

SEQ ID NO: 390979 - DNA, 25 bp, Artificial
  probe
  misc_feature (1)..(25): SEQ ID NO: 4794; WAN0249DA; Start 68; Stop 92
tatcaaatccctagctcatggcaag

SEQ ID NO: 390980 - DNA, 25 bp, Artificial
  probe
  misc_feature (1)..(25): SEQ ID NO: 4794; WAN0249DA; Start 66; Stop 90
cttatcaaatccctagctcatggca

SEQ ID NO: 390981 - DNA, 25 bp, Artificial
  probe
  misc_feature (1)..(25): SEQ ID NO: 4794; WAN0249DA; Start 62; Stop 86
tattcttatcaaatccctagctcat

SEQ ID NO: 390982 - DNA, 25 bp, Artificial
  probe
  misc_feature (1)..(25): SEQ ID NO: 4794; WAN0249DA; Start 61; Stop 85
atattcttatcaaatccctagctca

SEQ ID NO: 390983 - DNA, 25 bp, Artificial
  probe
  misc_feature (1)..(25): SEQ ID NO: 4794; WAN0249DA; Start 60; Stop 84
gatattcttatcaaatccctagctc

SEQ ID NO: 390984 - DNA, 25 bp, Artificial
  probe
  misc_feature (1)..(25): SEQ ID NO: 4794; WAN0249DA; Start 78; Stop 102
ctagctcatggcaagcaagtctaga

SEQ ID NO: 390985 - DNA, 25 bp, Artificial
  probe
  misc_feature (1)..(25): SEQ ID NO: 4794; WAN0249DA; Start 77; Stop 101
cctagctcatggcaagcaagtctag

SEQ ID NO: 390986 - DNA, 25 bp, Artificial
  probe
  misc_feature (1)..(25): SEQ ID NO: 4794; WAN0249DA; Start 59; Stop 83
tgatattcttatcaaatccctagct

SEQ ID NO: 390987 - DNA, 25 bp, Artificial
  probe
  misc_feature (1)..(25): SEQ ID NO: 4795; WAN0249X8; Start 11; Stop 35
ctcctaatcaaatcaaaagccactc

SEQ ID NO: 390988 - DNA, 25 bp, Artificial
  probe
  misc_feature (1)..(25): SEQ ID NO: 4795; WAN0249X8; Start 12; Stop 36
tcctaatcaaatcaaaagccactct

SEQ ID NO: 390989 - DNA, 25 bp, Artificial
  probe
  misc_feature (1)..(25): SEQ ID NO: 4795; WAN0249X8; Start 10; Stop 34
tctcctaatcaaatcaaaagccact

SEQ ID NO: 390990 - DNA, 25 bp, Artificial
  probe
  misc_feature (1)..(25): SEQ ID NO: 4795; WAN0249X8; Start 9; Stop 33
atctcctaatcaaatcaaaagccac

SEQ ID NO: 390991 - DNA, 25 bp, Artificial
  probe
  misc_feature (1)..(25): SEQ ID NO: 4795; WAN0249X8; Start 16; Stop 40
aatcaaatcaaaagccactctacaa

SEQ ID NO: 390992 - DNA, 25 bp, Artificial
  probe
  misc_feature (1)..(25): SEQ ID NO: 4795; WAN0249X8; Start 17; Stop 41
atcaaatcaaaagccactctacaat

SEQ ID NO: 390993 - DNA, 25 bp, Artificial
  probe
  misc_feature (1)..(25): SEQ ID NO: 4795; WAN0249X8; Start 13; Stop 37
cctaatcaaatcaaaagccactcta

SEQ ID NO: 390994 - DNA, 25 bp, Artificial
  probe
  misc_feature (1)..(25): SEQ ID NO: 4795; WAN0249X8; Start 8; Stop 32
aatctcctaatcaaatcaaaagcca

SEQ ID NO: 390995 - DNA, 25 bp, Artificial
  probe
  misc_feature (1)..(25): SEQ ID NO: 4795; WAN0249X8; Start 115; Stop 139
gggctaaaatcctagtgaaacaaaa

SEQ ID NO: 390996 - DNA, 25 bp, Artificial
  probe
  misc_feature (1)..(25): SEQ ID NO: 4795; WAN0249X8; Start 18; Stop 42
tcaaatcaaaagccactctacaata

SEQ ID NO: 390997 - DNA, 25 bp, Artificial
  probe
  misc_feature (1)..(25): SEQ ID NO: 4795; WAN0249X8; Start 15; Stop 39
taatcaaatcaaaagccactctaca

SEQ ID NO: 390998 - DNA, 25 bp, Artificial
  probe
  misc_feature (1)..(25): SEQ ID NO: 4795; WAN0249X8; Start 19; Stop 43
caaatcaaaagccactctacaatag

SEQ ID NO: 390999 - DNA, 25 bp, Artificial
  probe
  misc_feature (1)..(25): SEQ ID NO: 4795; WAN0249X8; Start 7; Stop 31
gaatctcctaatcaaatcaaaagcc

SEQ ID NO: 391000 - DNA, 25 bp, Artificial
  probe
  misc_feature (1)..(25): SEQ ID NO: 4795; WAN0249X8; Start 42; Stop 66
agagtaactttaagattgtccattt

SEQ ID NO: 391001 - DNA, 25 bp, Artificial
  probe
  misc_feature (1)..(25): SEQ ID NO: 4795; WAN0249X8; Start 14; Stop 38
ctaatcaaatcaaaagccactctac

SEQ ID NO: 391002 - DNA, 25 bp, Artificial
  probe
  misc_feature (1)..(25): SEQ ID NO: 4795; WAN0249X8; Start 114; Stop 138
cgggctaaaatcctagtgaaacaaa

SEQ ID NO: 391003 - DNA, 25 bp, Artificial
  probe
  misc_feature (1)..(25): SEQ ID NO: 4795; WAN0249X8; Start 6; Stop 30
agaatctcctaatcaaatcaaaagc

SEQ ID NO: 391004 - DNA, 25 bp, Artificial
  probe
  misc_feature (1)..(25): SEQ ID NO: 4795; WAN0249X8; Start 113; Stop 137
tcgggctaaaatcctagtgaaacaa

SEQ ID NO: 391005 - DNA, 25 bp, Artificial
  probe
  misc_feature (1)..(25): SEQ ID NO: 4795; WAN0249X8; Start 112; Stop 136
ctcgggctaaaatcctagtgaaaca

SEQ ID NO: 391006 - DNA, 25 bp, Artificial
  probe
  misc_feature (1)..(25): SEQ ID NO: 4795; WAN0249X8; Start 20; Stop 44
aaatcaaaagccactctacaataga

SEQ ID NO: 391007 - DNA, 25 bp, Artificial
  probe
  misc_feature (1)..(25): SEQ ID NO: 4795; WAN0249X8; Start 41; Stop 65
tagagtaactttaagattgtccatt

SEQ ID NO: 391008 - DNA, 25 bp, Artificial
  probe
  misc_feature (1)..(25): SEQ ID NO: 4795; WAN0249X8; Start 39; Stop 63
aatagagtaactttaagattgtcca

SEQ ID NO: 391009 - DNA, 25 bp, Artificial
  probe
  misc_feature (1)..(25): SEQ ID NO: 4795; WAN0249X8; Start 40; Stop 64
atagagtaactttaagattgtccat

SEQ ID NO: 391010 - DNA, 25 bp, Artificial
  probe
  misc_feature (1)..(25): SEQ ID NO: 4795; WAN0249X8; Start 54; Stop 78
agattgtccatttatactcaatgaa

SEQ ID NO: 391011 - DNA, 25 bp, Artificial
  probe
  misc_feature (1)..(25): SEQ ID NO: 4795; WAN0249X8; Start 53; Stop 77
aagattgtccatttatactcaatga

SEQ ID NO: 391012 - DNA, 25 bp, Artificial
  probe
  misc_feature (1)..(25): SEQ ID NO: 4795; WAN0249X8; Start 43; Stop 67
gagtaactttaagattgtccattta

SEQ ID NO: 391013 - DNA, 25 bp, Artificial
  probe
  misc_feature (1)..(25): SEQ ID NO: 4795; WAN0249X8; Start 111; Stop 135
gctcgggctaaaatcctagtgaaac

SEQ ID NO: 391014 - DNA, 25 bp, Artificial
  probe
  misc_feature (1)..(25): SEQ ID NO: 4795; WAN0249X8; Start 55; Stop 79
gattgtccatttatactcaatgaaa

SEQ ID NO: 391015 - DNA, 25 bp, Artificial
  probe
  misc_feature (1)..(25): SEQ ID NO: 4795; WAN0249X8; Start 38; Stop 62
caatagagtaactttaagattgtcc

SEQ ID NO: 391016 - DNA, 25 bp, Artificial
  probe
  misc_feature (1)..(25): SEQ ID NO: 4795; WAN0249X8; Start 5; Stop 29
aagaatctcctaatcaaatcaaaag

SEQ ID NO: 391017 - DNA, 25 bp, Artificial
  probe
  misc_feature (1)..(25): SEQ ID NO: 4795; WAN0249X8; Start 110; Stop 134
agctcgggctaaaatcctagtgaaa

SEQ ID NO: 391018 - DNA, 25 bp, Artificial
  probe
  misc_feature (1)..(25): SEQ ID NO: 4795; WAN0249X8; Start 21; Stop 45
aatcaaaagccactctacaatagag

SEQ ID NO: 391019 - DNA, 25 bp, Artificial
  probe
  misc_feature (1)..(25): SEQ ID NO: 4795; WAN0249X8; Start 56; Stop 80
attgtccatttatactcaatgaaaa

SEQ ID NO: 391020 - DNA, 25 bp, Artificial
  probe
  misc_feature (1)..(25): SEQ ID NO: 4796; WAN0249L8; Start 14; Stop 38
agtgagattctattacccaaaaggc

SEQ ID NO: 391021 - DNA, 25 bp, Artificial
  probe
  misc_feature (1)..(25): SEQ ID NO: 4796; WAN0249L8; Start 13; Stop 37
aagtgagattctattacccaaaagg

SEQ ID NO: 391022 - DNA, 25 bp, Artificial
  probe
  misc_feature (1)..(25): SEQ ID NO: 4796; WAN0249L8; Start 12; Stop 36
aaagtgagattctattacccaaaag

SEQ ID NO: 391023 - DNA, 25 bp, Artificial
  probe
  misc_feature (1)..(25): SEQ ID NO: 4796; WAN0249L8; Start 11; Stop 35
aaaagtgagattctattacccaaaa

SEQ ID NO: 391024 - DNA, 25 bp, Artificial
  probe
  misc_feature (1)..(25): SEQ ID NO: 4796; WAN0249L8; Start 20; Stop 44
attctattacccaaaaggccgattt

SEQ ID NO: 391025 - DNA, 25 bp, Artificial
  probe
  misc_feature (1)..(25): SEQ ID NO: 4796; WAN0249L8; Start 19; Stop 43
gattctattacccaaaaggccgatt

SEQ ID NO: 391026 - DNA, 25 bp, Artificial
  probe
  misc_feature (1)..(25): SEQ ID NO: 4796; WAN0249L8; Start 15; Stop 39
gtgagattctattacccaaaaggcc

SEQ ID NO: 391027 - DNA, 25 bp, Artificial
  probe
  misc_feature (1)..(25): SEQ ID NO: 4796; WAN0249L8; Start 44; Stop 68
ttgtagtataatagtacagtgtgaa

SEQ ID NO: 391028 - DNA, 25 bp, Artificial
  probe
  misc_feature (1)..(25): SEQ ID NO: 4796; WAN0249L8; Start 18; Stop 42
agattctattacccaaaaggccgat

SEQ ID NO: 391029 - DNA, 25 bp, Artificial
  probe
  misc_feature (1)..(25): SEQ ID NO: 4796; WAN0249L8; Start 21; Stop 45
ttctattacccaaaaggccgatttt

SEQ ID NO: 391030 - DNA, 25 bp, Artificial
  probe
  misc_feature (1)..(25): SEQ ID NO: 4796; WAN0249L8; Start 34; Stop 58
aaggccgattttgtagtataatagt

SEQ ID NO: 391031 - DNA, 25 bp, Artificial
  probe
  misc_feature (1)..(25): SEQ ID NO: 4796; WAN0249L8; Start 17; Stop 41
gagattctattacccaaaaggccga

SEQ ID NO: 391032 - DNA, 25 bp, Artificial
  probe
  misc_feature (1)..(25): SEQ ID NO: 4796; WAN0249L8; Start 16; Stop 40
tgagattctattacccaaaaggccg

SEQ ID NO: 391033 - DNA, 25 bp, Artificial
  probe
  misc_feature (1)..(25): SEQ ID NO: 4796; WAN0249L8; Start 36; Stop 60
ggccgattttgtagtataatagtac

SEQ ID NO: 391034 - DNA, 25 bp, Artificial
  probe
  misc_feature (1)..(25): SEQ ID NO: 4796; WAN0249L8; Start 37; Stop 61
gccgattttgtagtataatagtaca

SEQ ID NO: 391035 - DNA, 25 bp, Artificial
  probe
  misc_feature (1)..(25): SEQ ID NO: 4796; WAN0249L8; Start 35; Stop 59
aggccgattttgtagtataatagta

SEQ ID NO: 391036 - DNA, 25 bp, Artificial
  probe
  misc_feature (1)..(25): SEQ ID NO: 4796; WAN0249L8; Start 33; Stop 57
aaaggccgattttgtagtataatag

SEQ ID NO: 391037 - DNA, 25 bp, Artificial
  probe
  misc_feature (1)..(25): SEQ ID NO: 4796; WAN0249L8; Start 45; Stop 69
tgtagtataatagtacagtgtgaaa

SEQ ID NO: 391038 - DNA, 25 bp, Artificial
  probe
  misc_feature (1)..(25): SEQ ID NO: 4796; WAN0249L8; Start 43; Stop 67
tttgtagtataatagtacagtgtga

SEQ ID NO: 391039 - DNA, 25 bp, Artificial
  probe
  misc_feature (1)..(25): SEQ ID NO: 4796; WAN0249L8; Start 32; Stop 56
aaaaggccgattttgtagtataata

SEQ ID NO: 391040 - DNA, 25 bp, Artificial
  probe
  misc_feature (1)..(25): SEQ ID NO: 4796; WAN0249L8; Start 38; Stop 62
ccgattttgtagtataatagtacag

SEQ ID NO: 391041 - DNA, 25 bp, Artificial
  probe
  misc_feature (1)..(25): SEQ ID NO: 4796; WAN0249L8; Start 30; Stop 54
ccaaaaggccgattttgtagtataa

SEQ ID NO: 391042 - DNA, 25 bp, Artificial
  probe
  misc_feature (1)..(25): SEQ ID NO: 4796; WAN0249L8; Start 24; Stop 48
tattacccaaaaggccgattttgta

SEQ ID NO: 391043 - DNA, 25 bp, Artificial
  probe
  misc_feature (1)..(25): SEQ ID NO: 4796; WAN0249L8; Start 29; Stop 53
cccaaaaggccgattttgtagtata

SEQ ID NO: 391044 - DNA, 25 bp, Artificial
  probe
  misc_feature (1)..(25): SEQ ID NO: 4796; WAN0249L8; Start 22; Stop 46
tctattacccaaaaggccgattttg

SEQ ID NO: 391045 - DNA, 25 bp, Artificial
  probe
  misc_feature (1)..(25): SEQ ID NO: 4796; WAN0249L8; Start 25; Stop 49
attacccaaaaggccgattttgtag

SEQ ID NO: 391046 - DNA, 25 bp, Artificial
  probe
  misc_feature (1)..(25): SEQ ID NO: 4796; WAN0249L8; Start 23; Stop 47
ctattacccaaaaggccgattttgt

SEQ ID NO: 391047 - DNA, 25 bp, Artificial
  probe
  misc_feature (1)..(25): SEQ ID NO: 4796; WAN0249L8; Start 31; Stop 55
caaaaggccgattttgtagtataat

SEQ ID NO: 391048 - DNA, 25 bp, Artificial
  probe
  misc_feature (1)..(25): SEQ ID NO: 4796; WAN0249L8; Start 27; Stop 51
tacccaaaaggccgattttgtagta

SEQ ID NO: 391049 - DNA, 25 bp, Artificial
  probe
  misc_feature (1)..(25): SEQ ID NO: 4796; WAN0249L8; Start 28; Stop 52
acccaaaaggccgattttgtagtat

SEQ ID NO: 391050 - DNA, 25 bp, Artificial
  probe
  misc_feature (1)..(25): SEQ ID NO: 4796; WAN0249L8; Start 26; Stop 50
ttacccaaaaggccgattttgtagt

SEQ ID NO: 391051 - DNA, 25 bp, Artificial
  probe
  misc_feature (1)..(25): SEQ ID NO: 4797; WAN024ANK; Start 72; Stop 96
ttgcggaatagtcaaaggttaaggg

SEQ ID NO: 391052 - DNA, 25 bp, Artificial
  probe
  misc_feature (1)..(25): SEQ ID NO: 4797; WAN024ANK; Start 61; Stop 85
ttacgataattttgcggaatagtca

SEQ ID NO: 391053 - DNA, 25 bp, Artificial
  probe
  misc_feature (1)..(25): SEQ ID NO: 4797; WAN024ANK; Start 71; Stop 95
tttgcggaatagtcaaaggttaagg

SEQ ID NO: 391054 - DNA, 25 bp, Artificial
  probe
  misc_feature (1)..(25): SEQ ID NO: 4797; WAN024ANK; Start 62; Stop 86
tacgataattttgcggaatagtcaa

SEQ ID NO: 391055 - DNA, 25 bp, Artificial
  probe
  misc_feature (1)..(25): SEQ ID NO: 4797; WAN024ANK; Start 60; Stop 84
tttacgataattttgcggaatagtc

SEQ ID NO: 391056 - DNA, 25 bp, Artificial
  probe
  misc_feature (1)..(25): SEQ ID NO: 4797; WAN024ANK; Start 59; Stop 83
ttttacgataattttgcggaatagt

SEQ ID NO: 391057 - DNA, 25 bp, Artificial
  probe
  misc_feature (1)..(25): SEQ ID NO: 4797; WAN024ANK; Start 26; Stop 50
agactctgacctcattttatcattt

SEQ ID NO: 391058 - DNA, 25 bp, Artificial
  probe
  misc_feature (1)..(25): SEQ ID NO: 4797; WAN024ANK; Start 23; Stop 47
aacagactctgacctcattttatca

SEQ ID NO: 391059 - DNA, 25 bp, Artificial
  probe
  misc_feature (1)..(25): SEQ ID NO: 4797; WAN024ANK; Start 24; Stop 48
acagactctgacctcattttatcat

SEQ ID NO: 391060 - DNA, 25 bp, Artificial
  probe
  misc_feature (1)..(25): SEQ ID NO: 4797; WAN024ANK; Start 21; Stop 45
cgaacagactctgacctcattttat

SEQ ID NO: 391061 - DNA, 25 bp, Artificial
  probe
  misc_feature (1)..(25): SEQ ID NO: 4797; WAN024ANK; Start 22; Stop 46
gaacagactctgacctcattttatc

SEQ ID NO: 391062 - DNA, 25 bp, Artificial
  probe
  misc_feature (1)..(25): SEQ ID NO: 4797; WAN024ANK; Start 25; Stop 49
cagactctgacctcattttatcatt

SEQ ID NO: 391063 - DNA, 25 bp, Artificial
  probe
  misc_feature (1)..(25): SEQ ID NO: 4797; WAN024ANK; Start 70; Stop 94
ttttgcggaatagtcaaaggttaag

SEQ ID NO: 391064 - DNA, 25 bp, Artificial
  probe
  misc_feature (1)..(25): SEQ ID NO: 4797; WAN024ANK; Start 54; Stop 78
ctttattttacgataattttgcgga

SEQ ID NO: 391065 - DNA, 25 bp, Artificial
  probe
  misc_feature (1)..(25): SEQ ID NO: 4797; WAN024ANK; Start 53; Stop 77
tctttattttacgataattttgcgg

SEQ ID NO: 391066 - DNA, 25 bp, Artificial
  probe
  misc_feature (1)..(25): SEQ ID NO: 4797; WAN024ANK; Start 63; Stop 87
acgataattttgcggaatagtcaaa

SEQ ID NO: 391067 - DNA, 25 bp, Artificial
  probe
  misc_feature (1)..(25): SEQ ID NO: 4797; WAN024ANK; Start 69; Stop 93
attttgcggaatagtcaaaggttaa

SEQ ID NO: 391068 - DNA, 25 bp, Artificial
  probe
  misc_feature (1)..(25): SEQ ID NO: 4797; WAN024ANK; Start 68; Stop 92
aattttgcggaatagtcaaaggtta

SEQ ID NO: 391069 - DNA, 25 bp, Artificial
  probe
  misc_feature (1)..(25): SEQ ID NO: 4797; WAN024ANK; Start 67; Stop 91
taattttgcggaatagtcaaaggtt

SEQ ID NO: 391070 - DNA, 25 bp, Artificial
  probe
  misc_feature (1)..(25): SEQ ID NO: 4797; WAN024ANK; Start 58; Stop 82
attttacgataattttgcggaatag

SEQ ID NO: 391071 - DNA, 25 bp, Artificial
  probe
  misc_feature (1)..(25): SEQ ID NO: 4797; WAN024ANK; Start 66; Stop 90
ataattttgcggaatagtcaaaggt

SEQ ID NO: 391072 - DNA, 25 bp, Artificial
  probe
  misc_feature (1)..(25): SEQ ID NO: 4797; WAN024ANK; Start 28; Stop 52
actctgacctcattttatcatttac

SEQ ID NO: 391073 - DNA, 25 bp, Artificial
  probe
  misc_feature (1)..(25): SEQ ID NO: 4797; WAN024ANK; Start 64; Stop 88
cgataattttgcggaatagtcaaag

SEQ ID NO: 391074 - DNA, 25 bp, Artificial
  probe
  misc_feature (1)..(25): SEQ ID NO: 4797; WAN024ANK; Start 65; Stop 89
gataattttgcggaatagtcaaagg

SEQ ID NO: 391075 - DNA, 25 bp, Artificial
  probe
  misc_feature (1)..(25): SEQ ID NO: 4797; WAN024ANK; Start 31; Stop 55
ctgacctcattttatcatttactct

SEQ ID NO: 391076 - DNA, 25 bp, Artificial
  probe
  misc_feature (1)..(25): SEQ ID NO: 4797; WAN024ANK; Start 30; Stop 54
tctgacctcattttatcatttactc

SEQ ID NO: 391077 - DNA, 25 bp, Artificial
  probe
  misc_feature (1)..(25): SEQ ID NO: 4797; WAN024ANK; Start 29; Stop 53
ctctgacctcattttatcatttact

SEQ ID NO: 391078 - DNA, 25 bp, Artificial
  probe
  misc_feature (1)..(25): SEQ ID NO: 4797; WAN024ANK; Start 27; Stop 51
gactctgacctcattttatcattta

SEQ ID NO: 391079 - DNA, 25 bp, Artificial
  probe
  misc_feature (1)..(25): SEQ ID NO: 4797; WAN024ANK; Start 55; Stop 79
tttattttacgataattttgcggaa

SEQ ID NO: 391080 - DNA, 25 bp, Artificial
  probe
  misc_feature (1)..(25): SEQ ID NO: 4797; WAN024ANK; Start 20; Stop 44
gcgaacagactctgacctcatttta

SEQ ID NO: 391081 - DNA, 25 bp, Artificial
  probe
  misc_feature (1)..(25): SEQ ID NO: 4797; WAN024ANK; Start 56; Stop 80
ttattttacgataattttgcggaat

SEQ ID NO: 391082 - DNA, 25 bp, Artificial
  probe
  misc_feature (1)..(25): SEQ ID NO: 4797; WAN024ANK; Start 18; Stop 42
gagcgaacagactctgacctcattt

SEQ ID NO: 391083 - DNA, 25 bp, Artificial
  probe
  misc_feature (1)..(25): SEQ ID NO: 4797; WAN024ANK; Start 32; Stop 56
tgacctcattttatcatttactctt

SEQ ID NO: 391084 - DNA, 25 bp, Artificial
  probe
  misc_feature (1)..(25): SEQ ID NO: 4798; WAN024AEB; Start 29; Stop 53
gttattaaaatcagctagaagaggt

SEQ ID NO: 391085 - DNA, 25 bp, Artificial
  probe
  misc_feature (1)..(25): SEQ ID NO: 4798; WAN024AEB; Start 28; Stop 52
tgttattaaaatcagctagaagagg

SEQ ID NO: 391086 - DNA, 25 bp, Artificial
  probe
  misc_feature (1)..(25): SEQ ID NO: 4798; WAN024AEB; Start 32; Stop 56
attaaaatcagctagaagaggtatt

SEQ ID NO: 391087 - DNA, 25 bp, Artificial
  probe
  misc_feature (1)..(25): SEQ ID NO: 4798; WAN024AEB; Start 27; Stop 51
ctgttattaaaatcagctagaagag

SEQ ID NO: 391088 - DNA, 25 bp, Artificial
  probe
  misc_feature (1)..(25): SEQ ID NO: 4798; WAN024AEB; Start 33; Stop 57
ttaaaatcagctagaagaggtatta

SEQ ID NO: 391089 - DNA, 25 bp, Artificial
  probe
  misc_feature (1)..(25): SEQ ID NO: 4798; WAN024AEB; Start 30; Stop 54
ttattaaaatcagctagaagaggta

SEQ ID NO: 391090 - DNA, 25 bp, Artificial
  probe
  misc_feature (1)..(25): SEQ ID NO: 4798; WAN024AEB; Start 10; Stop 34
aaaagccttaaaataagctgttatt

SEQ ID NO: 391091 - DNA, 25 bp, Artificial
  probe
  misc_feature (1)..(25): SEQ ID NO: 4798; WAN024AEB; Start 34; Stop 58
taaaatcagctagaagaggtattat

SEQ ID NO: 391092 - DNA, 25 bp, Artificial
  probe
  misc_feature (1)..(25): SEQ ID NO: 4798; WAN024AEB; Start 31; Stop 55
tattaaaatcagctagaagaggtat

SEQ ID NO: 391093 - DNA, 25 bp, Artificial
  probe
  misc_feature (1)..(25): SEQ ID NO: 4798; WAN024AEB; Start 13; Stop 37
agccttaaaataagctgttattaaa

SEQ ID NO: 391094 - DNA, 25 bp, Artificial
  probe
  misc_feature (1)..(25): SEQ ID NO: 4798; WAN024AEB; Start 12; Stop 36
aagccttaaaataagctgttattaa

SEQ ID NO: 391095 - DNA, 25 bp, Artificial
  probe
  misc_feature (1)..(25): SEQ ID NO: 4798; WAN024AEB; Start 11; Stop 35
aaagccttaaaataagctgttatta

SEQ ID NO: 391096 - DNA, 25 bp, Artificial
  probe
  misc_feature (1)..(25): SEQ ID NO: 4799; WAN0249L2; Start 179; Stop 203
actcggtttacattgtcaaatttag

SEQ ID NO: 391097 - DNA, 25 bp, Artificial
  probe
  misc_feature (1)..(25): SEQ ID NO: 4799; WAN0249L2; Start 177; Stop 201
cgactcggtttacattgtcaaattt

SEQ ID NO: 391098 - DNA, 25 bp, Artificial
  probe
  misc_feature (1)..(25): SEQ ID NO: 4799; WAN0249L2; Start 140; Stop 164
tcgtatcttcaacctcaaaacagta

SEQ ID NO: 391099 - DNA, 25 bp, Artificial
  probe
  misc_feature (1)..(25): SEQ ID NO: 4799; WAN0249L2; Start 139; Stop 163
atcgtatcttcaacctcaaaacagt

SEQ ID NO: 391100 - DNA, 25 bp, Artificial
  probe
  misc_feature (1)..(25): SEQ ID NO: 4799; WAN0249L2; Start 138; Stop 162
aatcgtatcttcaacctcaaaacag

SEQ ID NO: 391101 - DNA, 25 bp, Artificial
  probe
  misc_feature (1)..(25): SEQ ID NO: 4799; WAN0249L2; Start 180; Stop 204
ctcggtttacattgtcaaatttaga

SEQ ID NO: 391102 - DNA, 25 bp, Artificial
  probe
  misc_feature (1)..(25): SEQ ID NO: 4799; WAN0249L2; Start 137; Stop 161
aaatcgtatcttcaacctcaaaaca

SEQ ID NO: 391103 - DNA, 25 bp, Artificial
  probe
  misc_feature (1)..(25): SEQ ID NO: 4799; WAN0249L2; Start 77; Stop 101
aaacaaggaagcaatttattgatgc

SEQ ID NO: 391104 - DNA, 25 bp, Artificial
  probe
  misc_feature (1)..(25): SEQ ID NO: 4799; WAN0249L2; Start 141; Stop 165
cgtatcttcaacctcaaaacagtac

SEQ ID NO: 391105 - DNA, 25 bp, Artificial
  probe
  misc_feature (1)..(25): SEQ ID NO: 4799; WAN0249L2; Start 136; Stop 160
aaaatcgtatcttcaacctcaaaac

SEQ ID NO: 391106 - DNA, 25 bp, Artificial
  probe
  misc_feature (1)..(25): SEQ ID NO: 4799; WAN0249L2; Start 178; Stop 202
gactcggtttacattgtcaaattta

SEQ ID NO: 391107 - DNA, 25 bp, Artificial
  probe
  misc_feature (1)..(25): SEQ ID NO: 4799; WAN0249L2; Start 72; Stop 96
tgacaaaacaaggaagcaatttatt

SEQ ID NO: 391108 - DNA, 25 bp, Artificial
  probe
  misc_feature (1)..(25): SEQ ID NO: 4799; WAN0249L2; Start 69; Stop 93
ttatgacaaaacaaggaagcaattt

SEQ ID NO: 391109 - DNA, 25 bp, Artificial
  probe
  misc_feature (1)..(25): SEQ ID NO: 4799; WAN0249L2; Start 66; Stop 90
aaattatgacaaaacaaggaagcaa

SEQ ID NO: 391110 - DNA, 25 bp, Artificial
  probe
  misc_feature (1)..(25): SEQ ID NO: 4799; WAN0249L2; Start 65; Stop 89
aaaattatgacaaaacaaggaagca

SEQ ID NO: 391111 - DNA, 25 bp, Artificial
  probe
  misc_feature (1)..(25): SEQ ID NO: 4799; WAN0249L2; Start 181; Stop 205
tcggtttacattgtcaaatttagat

SEQ ID NO: 391112 - DNA, 25 bp, Artificial
  probe
  misc_feature (1)..(25): SEQ ID NO: 4799; WAN0249L2; Start 158; Stop 182
aacagtacttaaagctatccgactc

SEQ ID NO: 391113 - DNA, 25 bp, Artificial
  probe
  misc_feature (1)..(25): SEQ ID NO: 4799; WAN0249L2; Start 157; Stop 181
aaacagtacttaaagctatccgact

SEQ ID NO: 391114 - DNA, 25 bp, Artificial
  probe
  misc_feature (1)..(25): SEQ ID NO: 4799; WAN0249L2; Start 68; Stop 92
attatgacaaaacaaggaagcaatt

SEQ ID NO: 391115 - DNA, 25 bp, Artificial
  probe
  misc_feature (1)..(25): SEQ ID NO: 4799; WAN0249L2; Start 67; Stop 91
aattatgacaaaacaaggaagcaat

SEQ ID NO: 391116 - DNA, 25 bp, Artificial
  probe
  misc_feature (1)..(25): SEQ ID NO: 4799; WAN0249L2; Start 71; Stop 95
atgacaaaacaaggaagcaatttat

SEQ ID NO: 391117 - DNA, 25 bp, Artificial
  probe
  misc_feature (1)..(25): SEQ ID NO: 4799; WAN0249L2; Start 74; Stop 98
acaaaacaaggaagcaatttattga

SEQ ID NO: 391118 - DNA, 25 bp, Artificial
  probe
  misc_feature (1)..(25): SEQ ID NO: 4799; WAN0249L2; Start 70; Stop 94
tatgacaaaacaaggaagcaattta

SEQ ID NO: 391119 - DNA, 25 bp, Artificial
  probe
  misc_feature (1)..(25): SEQ ID NO: 4799; WAN0249L2; Start 73; Stop 97
gacaaaacaaggaagcaatttattg

SEQ ID NO: 391120 - DNA, 25 bp, Artificial
  probe
  misc_feature (1)..(25): SEQ ID NO: 4799; WAN0249L2; Start 182; Stop 206
cggtttacattgtcaaatttagatt

SEQ ID NO: 391121 - DNA, 25 bp, Artificial
  probe
  misc_feature (1)..(25): SEQ ID NO: 4799; WAN0249L2; Start 159; Stop 183
acagtacttaaagctatccgactcg

SEQ ID NO: 391122 - DNA, 25 bp, Artificial
  probe
  misc_feature (1)..(25): SEQ ID NO: 4799; WAN0249L2; Start 76; Stop 100
aaaacaaggaagcaatttattgatg

SEQ ID NO: 391123 - DNA, 25 bp, Artificial
  probe
  misc_feature (1)..(25): SEQ ID NO: 4799; WAN0249L2; Start 75; Stop 99
caaaacaaggaagcaatttattgat

SEQ ID NO: 391124 - DNA, 25 bp, Artificial
  probe
  misc_feature (1)..(25): SEQ ID NO: 4799; WAN0249L2; Start 3; Stop 27
atcatattcatacacctctcataaa

SEQ ID NO: 391125 - DNA, 25 bp, Artificial
  probe
  misc_feature (1)..(25): SEQ ID NO: 4799; WAN0249L2; Start 149; Stop 173
caacctcaaaacagtacttaaagct

SEQ ID NO: 391126 - DNA, 25 bp, Artificial
  probe
  misc_feature (1)..(25): SEQ ID NO: 4799; WAN0249L2; Start 148; Stop 172
tcaacctcaaaacagtacttaaagc

SEQ ID NO: 391127 - DNA, 25 bp, Artificial
  probe
  misc_feature (1)..(25): SEQ ID NO: 4799; WAN0249L2; Start 156; Stop 180
aaaacagtacttaaagctatccgac

SEQ ID NO: 391128 - DNA, 25 bp, Artificial
  probe
  misc_feature (1)..(25): SEQ ID NO: 4799; WAN0249L2; Start 155; Stop 179
caaaacagtacttaaagctatccga

SEQ ID NO: 391129 - DNA, 25 bp, Artificial
  probe
  misc_feature (1)..(25): SEQ ID NO: 4800; WAN0249XK; Start 16; Stop 40
tcgaattacattctagcacaagaaa

SEQ ID NO: 391130 - DNA, 25 bp, Artificial
  probe
  misc_feature (1)..(25): SEQ ID NO: 4800; WAN0249XK; Start 77; Stop 101
aaatgaaaacgctttctaggcaaaa

SEQ ID NO: 391131 - DNA, 25 bp, Artificial
  probe
  misc_feature (1)..(25): SEQ ID NO: 4800; WAN0249XK; Start 76; Stop 100
aaaatgaaaacgctttctaggcaaa

SEQ ID NO: 391132 - DNA, 25 bp, Artificial
  probe
  misc_feature (1)..(25): SEQ ID NO: 4800; WAN0249XK; Start 15; Stop 39
ttcgaattacattctagcacaagaa

SEQ ID NO: 391133 - DNA, 25 bp, Artificial
  probe
  misc_feature (1)..(25): SEQ ID NO: 4800; WAN0249XK; Start 17; Stop 41
cgaattacattctagcacaagaaaa

SEQ ID NO: 391134 - DNA, 25 bp, Artificial
  probe
  misc_feature (1)..(25): SEQ ID NO: 4800; WAN0249XK; Start 45; Stop 69
cttttgcacaattctgctacgaaaa

SEQ ID NO: 391135 - DNA, 25 bp, Artificial
  probe
  misc_feature (1)..(25): SEQ ID NO: 4800; WAN0249XK; Start 44; Stop 68
acttttgcacaattctgctacgaaa

SEQ ID NO: 391136 - DNA, 25 bp, Artificial
  probe
  misc_feature (1)..(25): SEQ ID NO: 4800; WAN0249XK; Start 43; Stop 67
aacttttgcacaattctgctacgaa

SEQ ID NO: 391137 - DNA, 25 bp, Artificial
  probe
  misc_feature (1)..(25): SEQ ID NO: 4800; WAN0249XK; Start 42; Stop 66
aaacttttgcacaattctgctacga

SEQ ID NO: 391138 - DNA, 25 bp, Artificial
  probe
  misc_feature (1)..(25): SEQ ID NO: 4800; WAN0249XK; Start 162; Stop 186
gaataaatgttcgaaaataggaggt

SEQ ID NO: 391139 - DNA, 25 bp, Artificial
  probe
  misc_feature (1)..(25): SEQ ID NO: 4800; WAN0249XK; Start 121; Stop 145
agcttgataaactaaaatcctatct

SEQ ID NO: 391140 - DNA, 25 bp, Artificial
  probe
  misc_feature (1)..(25): SEQ ID NO: 4800; WAN0249XK; Start 161; Stop 185
agaataaatgttcgaaaataggagg

SEQ ID NO: 391141 - DNA, 25 bp, Artificial
  probe
  misc_feature (1)..(25): SEQ ID NO: 4800; WAN0249XK; Start 164; Stop 188
ataaatgttcgaaaataggaggttt

SEQ ID NO: 391142 - DNA, 25 bp, Artificial
  probe
  misc_feature (1)..(25): SEQ ID NO: 4800; WAN0249XK; Start 163; Stop 187
aataaatgttcgaaaataggaggtt

SEQ ID NO: 391143 - DNA, 25 bp, Artificial
  probe
  misc_feature (1)..(25): SEQ ID NO: 4800; WAN0249XK; Start 165; Stop 189
taaatgttcgaaaataggaggtttt

SEQ ID NO: 391144 - DNA, 25 bp, Artificial
  probe
  misc_feature (1)..(25): SEQ ID NO: 4800; WAN0249XK; Start 120; Stop 144
aagcttgataaactaaaatcctatc

SEQ ID NO: 391145 - DNA, 25 bp, Artificial
  probe
  misc_feature (1)..(25): SEQ ID NO: 4800; WAN0249XK; Start 160; Stop 184
tagaataaatgttcgaaaataggag

SEQ ID NO: 391146 - DNA, 25 bp, Artificial
  probe
  misc_feature (1)..(25): SEQ ID NO: 4801; WAN024GIQ; Start 47; Stop 71
tggtccttatatggatgacttaatt

SEQ ID NO: 391147 - DNA, 25 bp, Artificial
  probe
  misc_feature (1)..(25): SEQ ID NO: 4801; WAN024GIQ; Start 46; Stop 70
ttggtccttatatggatgacttaat

SEQ ID NO: 391148 - DNA, 25 bp, Artificial
  probe
  misc_feature (1)..(25): SEQ ID NO: 4801; WAN024GIQ; Start 26; Stop 50
tggtttagtagttggtatatttggt

SEQ ID NO: 391149 - DNA, 25 bp, Artificial
  probe
  misc_feature (1)..(25): SEQ ID NO: 4801; WAN024GIQ; Start 28; Stop 52
gtttagtagttggtatatttggtcc

SEQ ID NO: 391150 - DNA, 25 bp, Artificial
  probe
  misc_feature (1)..(25): SEQ ID NO: 4801; WAN024GIQ; Start 27; Stop 51
ggtttagtagttggtatatttggtc

SEQ ID NO: 391151 - DNA, 25 bp, Artificial
  probe
  misc_feature (1)..(25): SEQ ID NO: 4801; WAN024GIQ; Start 30; Stop 54
ttagtagttggtatatttggtcctt

SEQ ID NO: 391152 - DNA, 25 bp, Artificial
  probe
  misc_feature (1)..(25): SEQ ID NO: 4801; WAN024GIQ; Start 29; Stop 53
tttagtagttggtatatttggtcct

SEQ ID NO: 391153 - DNA, 25 bp, Artificial
  probe
  misc_feature (1)..(25): SEQ ID NO: 4801; WAN024GIQ; Start 36; Stop 60
gttggtatatttggtccttatatgg

SEQ ID NO: 391154 - DNA, 25 bp, Artificial
  probe
  misc_feature (1)..(25): SEQ ID NO: 4801; WAN024GIQ; Start 32; Stop 56
agtagttggtatatttggtccttat

SEQ ID NO: 391155 - DNA, 25 bp, Artificial
  probe
  misc_feature (1)..(25): SEQ ID NO: 4801; WAN024GIQ; Start 25; Stop 49
ttggtttagtagttggtatatttgg

SEQ ID NO: 391156 - DNA, 25 bp, Artificial
  probe
  misc_feature (1)..(25): SEQ ID NO: 4801; WAN024GIQ; Start 45; Stop 69
tttggtccttatatggatgacttaa

SEQ ID NO: 391157 - DNA, 25 bp, Artificial
  probe
  misc_feature (1)..(25): SEQ ID NO: 4801; WAN024GIQ; Start 31; Stop 55
tagtagttggtatatttggtcctta

SEQ ID NO: 391158 - DNA, 25 bp, Artificial
  probe
  misc_feature (1)..(25): SEQ ID NO: 4801; WAN024GIQ; Start 44; Stop 68
atttggtccttatatggatgactta

SEQ ID NO: 391159 - DNA, 25 bp, Artificial
  probe
  misc_feature (1)..(25): SEQ ID NO: 4801; WAN024GIQ; Start 43; Stop 67
tatttggtccttatatggatgactt

SEQ ID NO: 391160 - DNA, 25 bp, Artificial
  probe
  misc_feature (1)..(25): SEQ ID NO: 4801; WAN024GIQ; Start 42; Stop 66
atatttggtccttatatggatgact

SEQ ID NO: 391161 - DNA, 25 bp, Artificial
  probe
  misc_feature (1)..(25): SEQ ID NO: 4801; WAN024GIQ; Start 37; Stop 61
ttggtatatttggtccttatatgga

SEQ ID NO: 391162 - DNA, 25 bp, Artificial
  probe
  misc_feature (1)..(25): SEQ ID NO: 4801; WAN024GIQ; Start 35; Stop 59
agttggtatatttggtccttatatg

SEQ ID NO: 391163 - DNA, 25 bp, Artificial
  probe
  misc_feature (1)..(25): SEQ ID NO: 4801; WAN024GIQ; Start 38; Stop 62
tggtatatttggtccttatatggat

SEQ ID NO: 391164 - DNA, 25 bp, Artificial
  probe
  misc_feature (1)..(25): SEQ ID NO: 4801; WAN024GIQ; Start 39; Stop 63
ggtatatttggtccttatatggatg

SEQ ID NO: 391165 - DNA, 25 bp, Artificial
  probe
  misc_feature (1)..(25): SEQ ID NO: 4801; WAN024GIQ; Start 98; Stop 122
aaaggatacggatagtactctctaa

SEQ ID NO: 391166 - DNA, 25 bp, Artificial
  probe
  misc_feature (1)..(25): SEQ ID NO: 4801; WAN024GIQ; Start 33; Stop 57
gtagttggtatatttggtccttata

SEQ ID NO: 391167 - DNA, 25 bp, Artificial
  probe
  misc_feature (1)..(25): SEQ ID NO: 4801; WAN024GIQ; Start 48; Stop 72
ggtccttatatggatgacttaatta

SEQ ID NO: 391168 - DNA, 25 bp, Artificial
  probe
  misc_feature (1)..(25): SEQ ID NO: 4801; WAN024GIQ; Start 24; Stop 48
attggtttagtagttggtatatttg

SEQ ID NO: 391169 - DNA, 25 bp, Artificial
  probe
  misc_feature (1)..(25): SEQ ID NO: 4801; WAN024GIQ; Start 41; Stop 65
tatatttggtccttatatggatgac

SEQ ID NO: 391170 - DNA, 25 bp, Artificial
  probe
  misc_feature (1)..(25): SEQ ID NO: 4801; WAN024GIQ; Start 40; Stop 64
gtatatttggtccttatatggatga

SEQ ID NO: 391171 - DNA, 25 bp, Artificial
  probe
  misc_feature (1)..(25): SEQ ID NO: 4801; WAN024GIQ; Start 97; Stop 121
aaaaggatacggatagtactctcta

SEQ ID NO: 391172 - DNA, 25 bp, Artificial
  probe
  misc_feature (1)..(25): SEQ ID NO: 4802; WAN0249X2; Start 83; Stop 107
agtatcagtttagacttcctatgcg

SEQ ID NO: 391173 - DNA, 25 bp, Artificial
  probe
  misc_feature (1)..(25): SEQ ID NO: 4802; WAN0249X2; Start 86; Stop 110
atcagtttagacttcctatgcgttt

SEQ ID NO: 391174 - DNA, 25 bp, Artificial
  probe
  misc_feature (1)..(25): SEQ ID NO: 4802; WAN0249X2; Start 84; Stop 108
gtatcagtttagacttcctatgcgt

SEQ ID NO: 391175 - DNA, 25 bp, Artificial
  probe
  misc_feature (1)..(25): SEQ ID NO: 4802; WAN0249X2; Start 85; Stop 109
tatcagtttagacttcctatgcgtt

SEQ ID NO: 391176 - DNA, 25 bp, Artificial
  probe
  misc_feature (1)..(25): SEQ ID NO: 4802; WAN0249X2; Start 90; Stop 114
gtttagacttcctatgcgtttccag

SEQ ID NO: 391177 - DNA, 25 bp, Artificial
  probe
  misc_feature (1)..(25): SEQ ID NO: 4802; WAN0249X2; Start 87; Stop 111
tcagtttagacttcctatgcgtttc

SEQ ID NO: 391178 - DNA, 25 bp, Artificial
  probe
  misc_feature (1)..(25): SEQ ID NO: 4802; WAN0249X2; Start 131; Stop 155
agtagaaagggactaagtgacttgt

SEQ ID NO: 391179 - DNA, 25 bp, Artificial
  probe
  misc_feature (1)..(25): SEQ ID NO: 4802; WAN0249X2; Start 88; Stop 112
cagtttagacttcctatgcgtttcc

SEQ ID NO: 391180 - DNA, 25 bp, Artificial
  probe
  misc_feature (1)..(25): SEQ ID NO: 4802; WAN0249X2; Start 89; Stop 113
agtttagacttcctatgcgtttcca

SEQ ID NO: 391181 - DNA, 25 bp, Artificial
  probe
  misc_feature (1)..(25): SEQ ID NO: 4802; WAN0249X2; Start 133; Stop 157
tagaaagggactaagtgacttgtct

SEQ ID NO: 391182 - DNA, 25 bp, Artificial
  probe
  misc_feature (1)..(25): SEQ ID NO: 4802; WAN0249X2; Start 132; Stop 156
gtagaaagggactaagtgacttgtc

SEQ ID NO: 391183 - DNA, 25 bp, Artificial
  probe
  misc_feature (1)..(25): SEQ ID NO: 4802; WAN0249X2; Start 78; Stop 102
agagtagtatcagtttagacttcct

SEQ ID NO: 391184 - DNA, 25 bp, Artificial
  probe
  misc_feature (1)..(25): SEQ ID NO: 4802; WAN0249X2; Start 128; Stop 152
tctagtagaaagggactaagtgact

SEQ ID NO: 391185 - DNA, 25 bp, Artificial
  probe
  misc_feature (1)..(25): SEQ ID NO: 4802; WAN0249X2; Start 127; Stop 151
ctctagtagaaagggactaagtgac

SEQ ID NO: 391186 - DNA, 25 bp, Artificial
  probe
  misc_feature (1)..(25): SEQ ID NO: 4802; WAN0249X2; Start 126; Stop 150
tctctagtagaaagggactaagtga

SEQ ID NO: 391187 - DNA, 25 bp, Artificial
  probe
  misc_feature (1)..(25): SEQ ID NO: 4802; WAN0249X2; Start 124; Stop 148
actctctagtagaaagggactaagt

SEQ ID NO: 391188 - DNA, 25 bp, Artificial
  probe
  misc_feature (1)..(25): SEQ ID NO: 4802; WAN0249X2; Start 122; Stop 146
gcactctctagtagaaagggactaa

SEQ ID NO: 391189 - DNA, 25 bp, Artificial
  probe
  misc_feature (1)..(25): SEQ ID NO: 4802; WAN0249X2; Start 125; Stop 149
ctctctagtagaaagggactaagtg

SEQ ID NO: 391190 - DNA, 25 bp, Artificial
  probe
  misc_feature (1)..(25): SEQ ID NO: 4802; WAN0249X2; Start 123; Stop 147
cactctctagtagaaagggactaag

SEQ ID NO: 391191 - DNA, 25 bp, Artificial
  probe
  misc_feature (1)..(25): SEQ ID NO: 4802; WAN0249X2; Start 130; Stop 154
tagtagaaagggactaagtgacttg

SEQ ID NO: 391192 - DNA, 25 bp, Artificial
  probe
  misc_feature (1)..(25): SEQ ID NO: 4802; WAN0249X2; Start 135; Stop 159
gaaagggactaagtgacttgtctct

SEQ ID NO: 391193 - DNA, 25 bp, Artificial
  probe
  misc_feature (1)..(25): SEQ ID NO: 4802; WAN0249X2; Start 134; Stop 158
agaaagggactaagtgacttgtctc

SEQ ID NO: 391194 - DNA, 25 bp, Artificial
  probe
  misc_feature (1)..(25): SEQ ID NO: 4802; WAN0249X2; Start 129; Stop 153
ctagtagaaagggactaagtgactt

SEQ ID NO: 391195 - DNA, 25 bp, Artificial
  probe
  misc_feature (1)..(25): SEQ ID NO: 4802; WAN0249X2; Start 82; Stop 106
tagtatcagtttagacttcctatgc

SEQ ID NO: 391196 - DNA, 25 bp, Artificial
  probe
  misc_feature (1)..(25): SEQ ID NO: 4802; WAN0249X2; Start 77; Stop 101
aagagtagtatcagtttagacttcc

SEQ ID NO: 391197 - DNA, 25 bp, Artificial
  probe
  misc_feature (1)..(25): SEQ ID NO: 4802; WAN0249X2; Start 91; Stop 115
tttagacttcctatgcgtttccagc

SEQ ID NO: 391198 - DNA, 25 bp, Artificial
  probe
  misc_feature (1)..(25): SEQ ID NO: 4802; WAN0249X2; Start 74; Stop 98
ctcaagagtagtatcagtttagact

SEQ ID NO: 391199 - DNA, 25 bp, Artificial
  probe
  misc_feature (1)..(25): SEQ ID NO: 4802; WAN0249X2; Start 115; Stop 139
caaccacgcactctctagtagaaag

SEQ ID NO: 391200 - DNA, 25 bp, Artificial
  probe
  misc_feature (1)..(25): SEQ ID NO: 4802; WAN0249X2; Start 73; Stop 97
actcaagagtagtatcagtttagac

SEQ ID NO: 391201 - DNA, 25 bp, Artificial
  probe
  misc_feature (1)..(25): SEQ ID NO: 4802; WAN0249X2; Start 75; Stop 99
tcaagagtagtatcagtttagactt

SEQ ID NO: 391202 - DNA, 25 bp, Artificial
  probe
  misc_feature (1)..(25): SEQ ID NO: 4802; WAN0249X2; Start 121; Stop 145
cgcactctctagtagaaagggacta

SEQ ID NO: 391203 - DNA, 25 bp, Artificial
  probe
  misc_feature (1)..(25): SEQ ID NO: 4802; WAN0249X2; Start 79; Stop 103
gagtagtatcagtttagacttccta

SEQ ID NO: 391204 - DNA, 25 bp, Artificial
  probe
  misc_feature (1)..(25): SEQ ID NO: 4802; WAN0249X2; Start 76; Stop 100
caagagtagtatcagtttagacttc

SEQ ID NO: 391205 - DNA, 25 bp, Artificial
  probe
  misc_feature (1)..(25): SEQ ID NO: 4803; WAN024AJJ; Start 56; Stop 80
agcttcatcctatcattcgactaat

SEQ ID NO: 391206 - DNA, 25 bp, Artificial
  probe
  misc_feature (1)..(25): SEQ ID NO: 4803; WAN024AJJ; Start 55; Stop 79
tagcttcatcctatcattcgactaa

SEQ ID NO: 391207 - DNA, 25 bp, Artificial
  probe
  misc_feature (1)..(25): SEQ ID NO: 4803; WAN024AJJ; Start 57; Stop 81
gcttcatcctatcattcgactaatt

SEQ ID NO: 391208 - DNA, 25 bp, Artificial
  probe
  misc_feature (1)..(25): SEQ ID NO: 4803; WAN024AJJ; Start 51; Stop 75
acaatagcttcatcctatcattcga

SEQ ID NO: 391209 - DNA, 25 bp, Artificial
  probe
  misc_feature (1)..(25): SEQ ID NO: 4803; WAN024AJJ; Start 52; Stop 76
caatagcttcatcctatcattcgac

SEQ ID NO: 391210 - DNA, 25 bp, Artificial
  probe
  misc_feature (1)..(25): SEQ ID NO: 4803; WAN024AJJ; Start 53; Stop 77
aatagcttcatcctatcattcgact

SEQ ID NO: 391211 - DNA, 25 bp, Artificial
  probe
  misc_feature (1)..(25): SEQ ID NO: 4803; WAN024AJJ; Start 50; Stop 74
aacaatagcttcatcctatcattcg

SEQ ID NO: 391212 - DNA, 25 bp, Artificial
  probe
  misc_feature (1)..(25): SEQ ID NO: 4803; WAN024AJJ; Start 54; Stop 78
atagcttcatcctatcattcgacta

SEQ ID NO: 391213 - DNA, 25 bp, Artificial
  probe
  misc_feature (1)..(25): SEQ ID NO: 4803; WAN024AJJ; Start 60; Stop 84
tcatcctatcattcgactaatttgg

SEQ ID NO: 391214 - DNA, 25 bp, Artificial
  probe
  misc_feature (1)..(25): SEQ ID NO: 4803; WAN024AJJ; Start 61; Stop 85
catcctatcattcgactaatttgga

SEQ ID NO: 391215 - DNA, 25 bp, Artificial
  probe
  misc_feature (1)..(25): SEQ ID NO: 4803; WAN024AJJ; Start 68; Stop 92
tcattcgactaatttggaaataagg

SEQ ID NO: 391216 - DNA, 25 bp, Artificial
  probe
  misc_feature (1)..(25): SEQ ID NO: 4803; WAN024AJJ; Start 64; Stop 88
cctatcattcgactaatttggaaat

SEQ ID NO: 391217 - DNA, 25 bp, Artificial
  probe
  misc_feature (1)..(25): SEQ ID NO: 4803; WAN024AJJ; Start 63; Stop 87
tcctatcattcgactaatttggaaa

SEQ ID NO: 391218 - DNA, 25 bp, Artificial
  probe
  misc_feature (1)..(25): SEQ ID NO: 4803; WAN024AJJ; Start 59; Stop 83
ttcatcctatcattcgactaatttg

SEQ ID NO: 391219 - DNA, 25 bp, Artificial
  probe
  misc_feature (1)..(25): SEQ ID NO: 4803; WAN024AJJ; Start 62; Stop 86
atcctatcattcgactaatttggaa

SEQ ID NO: 391220 - DNA, 25 bp, Artificial
  probe
  misc_feature (1)..(25): SEQ ID NO: 4803; WAN024AJJ; Start 58; Stop 82
cttcatcctatcattcgactaattt

SEQ ID NO: 391221 - DNA, 25 bp, Artificial
  probe
  misc_feature (1)..(25): SEQ ID NO: 4803; WAN024AJJ; Start 49; Stop 73
aaacaatagcttcatcctatcattc

SEQ ID NO: 391222 - DNA, 25 bp, Artificial
  probe
  misc_feature (1)..(25): SEQ ID NO: 4803; WAN024AJJ; Start 67; Stop 91
atcattcgactaatttggaaataag

SEQ ID NO: 391223 - DNA, 25 bp, Artificial
  probe
  misc_feature (1)..(25): SEQ ID NO: 4803; WAN024AJJ; Start 48; Stop 72
aaaacaatagcttcatcctatcatt

SEQ ID NO: 391224 - DNA, 25 bp, Artificial
  probe
  misc_feature (1)..(25): SEQ ID NO: 4803; WAN024AJJ; Start 65; Stop 89
ctatcattcgactaatttggaaata

SEQ ID NO: 391225 - DNA, 25 bp, Artificial
  probe
  misc_feature (1)..(25): SEQ ID NO: 4803; WAN024AJJ; Start 47; Stop 71
taaaacaatagcttcatcctatcat

SEQ ID NO: 391226 - DNA, 25 bp, Artificial
  probe
  misc_feature (1)..(25): SEQ ID NO: 4803; WAN024AJJ; Start 46; Stop 70
ataaaacaatagcttcatcctatca

SEQ ID NO: 391227 - DNA, 25 bp, Artificial
  probe
  misc_feature (1)..(25): SEQ ID NO: 4803; WAN024AJJ; Start 43; Stop 67
actataaaacaatagcttcatccta

SEQ ID NO: 391228 - DNA, 25 bp, Artificial
  probe
  misc_feature (1)..(25): SEQ ID NO: 4803; WAN024AJJ; Start 42; Stop 66
tactataaaacaatagcttcatcct

SEQ ID NO: 391229 - DNA, 25 bp, Artificial
  probe
  misc_feature (1)..(25): SEQ ID NO: 4804; WAN024AJA; Start 286; Stop 310
acagtattagtattaggagcaggag

SEQ ID NO: 391230 - DNA, 25 bp, Artificial
  probe
  misc_feature (1)..(25): SEQ ID NO: 4804; WAN024AJA; Start 285; Stop 309
aacagtattagtattaggagcagga

SEQ ID NO: 391231 - DNA, 25 bp, Artificial
  probe
  misc_feature (1)..(25): SEQ ID NO: 4804; WAN024AJA; Start 130; Stop 154
agagatagaagaagtattaggcagt

SEQ ID NO: 391232 - DNA, 25 bp, Artificial
  probe
  misc_feature (1)..(25): SEQ ID NO: 4804; WAN024AJA; Start 131; Stop 155
gagatagaagaagtattaggcagta

SEQ ID NO: 391233 - DNA, 25 bp, Artificial
  probe
  misc_feature (1)..(25): SEQ ID NO: 4804; WAN024AJA; Start 129; Stop 153
tagagatagaagaagtattaggcag

SEQ ID NO: 391234 - DNA, 25 bp, Artificial
  probe
  misc_feature (1)..(25): SEQ ID NO: 4804; WAN024AJA; Start 284; Stop 308
aaacagtattagtattaggagcagg

SEQ ID NO: 391235 - DNA, 25 bp, Artificial
  probe
  misc_feature (1)..(25): SEQ ID NO: 4804; WAN024AJA; Start 132; Stop 156
agatagaagaagtattaggcagtaa

SEQ ID NO: 391236 - DNA, 25 bp, Artificial
  probe
  misc_feature (1)..(25): SEQ ID NO: 4804; WAN024AJA; Start 192; Stop 216
ttcggatgagatagatattgatagt

SEQ ID NO: 391237 - DNA, 25 bp, Artificial
  probe
  misc_feature (1)..(25): SEQ ID NO: 4804; WAN024AJA; Start 148; Stop 172
aggcagtaaactaacatttgaacta

SEQ ID NO: 391238 - DNA, 25 bp, Artificial
  probe
  misc_feature (1)..(25): SEQ ID NO: 4804; WAN024AJA; Start 147; Stop 171
taggcagtaaactaacatttgaact

SEQ ID NO: 391239 - DNA, 25 bp, Artificial
  probe
  misc_feature (1)..(25): SEQ ID NO: 4804; WAN024AJA; Start 128; Stop 152
ttagagatagaagaagtattaggca

SEQ ID NO: 391240 - DNA, 25 bp, Artificial
  probe
  misc_feature (1)..(25): SEQ ID NO: 4804; WAN024AJA; Start 84; Stop 108
cgcaagaatttatcaacgatctatt

SEQ ID NO: 391241 - DNA, 25 bp, Artificial
  probe
  misc_feature (1)..(25): SEQ ID NO: 4804; WAN024AJA; Start 26; Stop 50
ggtataatgtatttacgtggtcgga

SEQ ID NO: 391242 - DNA, 25 bp, Artificial
  probe
  misc_feature (1)..(25): SEQ ID NO: 4804; WAN024AJA; Start 25; Stop 49
aggtataatgtatttacgtggtcgg

SEQ ID NO: 391243 - DNA, 25 bp, Artificial
  probe
  misc_feature (1)..(25): SEQ ID NO: 4804; WAN024AJA; Start 28; Stop 52
tataatgtatttacgtggtcggagt

SEQ ID NO: 391244 - DNA, 25 bp, Artificial
  probe
  misc_feature (1)..(25): SEQ ID NO: 4804; WAN024AJA; Start 149; Stop 173
ggcagtaaactaacatttgaactat

SEQ ID NO: 391245 - DNA, 25 bp, Artificial
  probe
  misc_feature (1)..(25): SEQ ID NO: 4804; WAN024AJA; Start 30; Stop 54
taatgtatttacgtggtcggagtat

SEQ ID NO: 391246 - DNA, 25 bp, Artificial
  probe
  misc_feature (1)..(25): SEQ ID NO: 4804; WAN024AJA; Start 29; Stop 53
ataatgtatttacgtggtcggagta

SEQ ID NO: 391247 - DNA, 25 bp, Artificial
  probe
  misc_feature (1)..(25): SEQ ID NO: 4804; WAN024AJA; Start 65; Stop 89
gctatagaacctcaaatttcgcaag

SEQ ID NO: 391248 - DNA, 25 bp, Artificial
  probe
  misc_feature (1)..(25): SEQ ID NO: 4804; WAN024AJA; Start 31; Stop 55
aatgtatttacgtggtcggagtatg

SEQ ID NO: 391249 - DNA, 25 bp, Artificial
  probe
  misc_feature (1)..(25): SEQ ID NO: 4804; WAN024AJA; Start 68; Stop 92
atagaacctcaaatttcgcaagaat

SEQ ID NO: 391250 - DNA, 25 bp, Artificial
  probe
  misc_feature (1)..(25): SEQ ID NO: 4804; WAN024AJA; Start 27; Stop 51
gtataatgtatttacgtggtcggag

SEQ ID NO: 391251 - DNA, 25 bp, Artificial
  probe
  misc_feature (1)..(25): SEQ ID NO: 4804; WAN024AJA; Start 66; Stop 90
ctatagaacctcaaatttcgcaaga

SEQ ID NO: 391252 - DNA, 25 bp, Artificial
  probe
  misc_feature (1)..(25): SEQ ID NO: 4804; WAN024AJA; Start 64; Stop 88
agctatagaacctcaaatttcgcaa

SEQ ID NO: 391253 - DNA, 25 bp, Artificial
  probe
  misc_feature (1)..(25): SEQ ID NO: 4804; WAN024AJA; Start 146; Stop 170
ttaggcagtaaactaacatttgaac

SEQ ID NO: 391254 - DNA, 25 bp, Artificial
  probe
  misc_feature (1)..(25): SEQ ID NO: 4804; WAN024AJA; Start 24; Stop 48
aaggtataatgtatttacgtggtcg

SEQ ID NO: 391255 - DNA, 25 bp, Artificial
  probe
  misc_feature (1)..(25): SEQ ID NO: 4804; WAN024AJA; Start 67; Stop 91
tatagaacctcaaatttcgcaagaa

SEQ ID NO: 391256 - DNA, 25 bp, Artificial
  probe
  misc_feature (1)..(25): SEQ ID NO: 4804; WAN024AJA; Start 193; Stop 217
tcggatgagatagatattgatagta

SEQ ID NO: 391257 - DNA, 25 bp, Artificial
  probe
  misc_feature (1)..(25): SEQ ID NO: 4804; WAN024AJA; Start 69; Stop 93
tagaacctcaaatttcgcaagaatt

SEQ ID NO: 391258 - DNA, 25 bp, Artificial
  probe
  misc_feature (1)..(25): SEQ ID NO: 4804; WAN024AJA; Start 81; Stop 105
tttcgcaagaatttatcaacgatct

SEQ ID NO: 391259 - DNA, 25 bp, Artificial
  probe
  misc_feature (1)..(25): SEQ ID NO: 4804; WAN024AJA; Start 139; Stop 163
agaagtattaggcagtaaactaaca

SEQ ID NO: 391260 - DNA, 25 bp, Artificial
  probe
  misc_feature (1)..(25): SEQ ID NO: 4804; WAN024AJA; Start 82; Stop 106
ttcgcaagaatttatcaacgatcta

SEQ ID NO: 391261 - DNA, 25 bp, Artificial
  probe
  misc_feature (1)..(25): SEQ ID NO: 4804; WAN024AJA; Start 194; Stop 218
cggatgagatagatattgatagtag

SEQ ID NO: 391262 - DNA, 25 bp, Artificial
  probe
  misc_feature (1)..(25): SEQ ID NO: 4805; WAN024F8G; Start 616; Stop 640
aagccatctgactacggtattgtta

SEQ ID NO: 391263 - DNA, 25 bp, Artificial
  probe
  misc_feature (1)..(25): SEQ ID NO: 4805; WAN024F8G; Start 663; Stop 687
caacgactatcttgataacttggtt

SEQ ID NO: 391264 - DNA, 25 bp, Artificial
  probe
  misc_feature (1)..(25): SEQ ID NO: 4805; WAN024F8G; Start 617; Stop 641
agccatctgactacggtattgttac

SEQ ID NO: 391265 - DNA, 25 bp, Artificial
  probe
  misc_feature (1)..(25): SEQ ID NO: 4805; WAN024F8G; Start 184; Stop 208
gctgatgaactcaaggtcaagattc

SEQ ID NO: 391266 - DNA, 25 bp, Artificial
  probe
  misc_feature (1)..(25): SEQ ID NO: 4805; WAN024F8G; Start 251; Stop 275
acaatgaacaggtcgatatggatat

SEQ ID NO: 391267 - DNA, 25 bp, Artificial
  probe
  misc_feature (1)..(25): SEQ ID NO: 4805; WAN024F8G; Start 686; Stop 710
ttactaaatggagcaaggatggtag

SEQ ID NO: 391268 - DNA, 25 bp, Artificial
  probe
  misc_feature (1)..(25): SEQ ID NO: 4805; WAN024F8G; Start 685; Stop 709
gttactaaatggagcaaggatggta

SEQ ID NO: 391269 - DNA, 25 bp, Artificial
  probe
  misc_feature (1)..(25): SEQ ID NO: 4805; WAN024F8G; Start 665; Stop 689
acgactatcttgataacttggttac

SEQ ID NO: 391270 - DNA, 25 bp, Artificial
  probe
  misc_feature (1)..(25): SEQ ID NO: 4805; WAN024F8G; Start 689; Stop 713
ctaaatggagcaaggatggtagttt

SEQ ID NO: 391271 - DNA, 25 bp, Artificial
  probe
  misc_feature (1)..(25): SEQ ID NO: 4805; WAN024F8G; Start 613; Stop 637
ttcaagccatctgactacggtattg

SEQ ID NO: 391272 - DNA, 25 bp, Artificial
  probe
  misc_feature (1)..(25): SEQ ID NO: 4805; WAN024F8G; Start 666; Stop 690
cgactatcttgataacttggttact

SEQ ID NO: 391273 - DNA, 25 bp, Artificial
  probe
  misc_feature (1)..(25): SEQ ID NO: 4805; WAN024F8G; Start 498; Stop 522
ttcctacccagaattgattacttcc

SEQ ID NO: 391274 - DNA, 25 bp, Artificial
  probe
  misc_feature (1)..(25): SEQ ID NO: 4805; WAN024F8G; Start 715; Stop 739
cagaaactttatgaccgttacaagc

SEQ ID NO: 391275 - DNA, 25 bp, Artificial
  probe
  misc_feature (1)..(25): SEQ ID NO: 4805; WAN024F8G; Start 714; Stop 738
gcagaaactttatgaccgttacaag

SEQ ID NO: 391276 - DNA, 25 bp, Artificial
  probe
  misc_feature (1)..(25): SEQ ID NO: 4805; WAN024F8G; Start 615; Stop 639
caagccatctgactacggtattgtt

SEQ ID NO: 391277 - DNA, 25 bp, Artificial
  probe
  misc_feature (1)..(25): SEQ ID NO: 4805; WAN024F8G; Start 250; Stop 274
gacaatgaacaggtcgatatggata

SEQ ID NO: 391278 - DNA, 25 bp, Artificial
  probe
  misc_feature (1)..(25): SEQ ID NO: 4805; WAN024F8G; Start 497; Stop 521
gttcctacccagaattgattacttc

SEQ ID NO: 391279 - DNA, 25 bp, Artificial
  probe
  misc_feature (1)..(25): SEQ ID NO: 4805; WAN024F8G; Start 182; Stop 206
tagctgatgaactcaaggtcaagat

SEQ ID NO: 391280 - DNA, 25 bp, Artificial
  probe
  misc_feature (1)..(25): SEQ ID NO: 4805; WAN024F8G; Start 637; Stop 661
gttaccaagaaatcaaatacagagc

SEQ ID NO: 391281 - DNA, 25 bp, Artificial
  probe
  misc_feature (1)..(25): SEQ ID NO: 4805; WAN024F8G; Start 313; Stop 337
tacaactttaccagtccctactaca

SEQ ID NO: 391282 - DNA, 25 bp, Artificial
  probe
  misc_feature (1)..(25): SEQ ID NO: 4805; WAN024F8G; Start 312; Stop 336
ctacaactttaccagtccctactac

SEQ ID NO: 391283 - DNA, 25 bp, Artificial
  probe
  misc_feature (1)..(25): SEQ ID NO: 4805; WAN024F8G; Start 311; Stop 335
tctacaactttaccagtccctacta

SEQ ID NO: 391284 - DNA, 25 bp, Artificial
  probe
  misc_feature (1)..(25): SEQ ID NO: 4805; WAN024F8G; Start 308; Stop 332
aactctacaactttaccagtcccta

SEQ ID NO: 391285 - DNA, 25 bp, Artificial
  probe
  misc_feature (1)..(25): SEQ ID NO: 4805; WAN024F8G; Start 247; Stop 271
ctagacaatgaacaggtcgatatgg

SEQ ID NO: 391286 - DNA, 25 bp, Artificial
  probe
  misc_feature (1)..(25): SEQ ID NO: 4805; WAN024F8G; Start 690; Stop 714
taaatggagcaaggatggtagtttg

SEQ ID NO: 391287 - DNA, 25 bp, Artificial
  probe
  misc_feature (1)..(25): SEQ ID NO: 4805; WAN024F8G; Start 682; Stop 706
ttggttactaaatggagcaaggatg

SEQ ID NO: 391288 - DNA, 25 bp, Artificial
  probe
  misc_feature (1)..(25): SEQ ID NO: 4805; WAN024F8G; Start 664; Stop 688
aacgactatcttgataacttggtta

SEQ ID NO: 391289 - DNA, 25 bp, Artificial
  probe
  misc_feature (1)..(25): SEQ ID NO: 4805; WAN024F8G; Start 310; Stop 334
ctctacaactttaccagtccctact

SEQ ID NO: 391290 - DNA, 25 bp, Artificial
  probe
  misc_feature (1)..(25): SEQ ID NO: 4805; WAN024F8G; Start 248; Stop 272
tagacaatgaacaggtcgatatgga

SEQ ID NO: 391291 - DNA, 25 bp, Artificial
  probe
  misc_feature (1)..(25): SEQ ID NO: 4805; WAN024F8G; Start 500; Stop 524
cctacccagaattgattacttccct

SEQ ID NO: 391292 - DNA, 25 bp, Artificial
  probe
  misc_feature (1)..(25): SEQ ID NO: 4805; WAN024F8G; Start 499; Stop 523
tcctacccagaattgattacttccc

SEQ ID NO: 391293 - DNA, 25 bp, Artificial
  probe
  misc_feature (1)..(25): SEQ ID NO: 4805; WAN024F8G; Start 309; Stop 333
actctacaactttaccagtccctac

SEQ ID NO: 391294 - DNA, 25 bp, Artificial
  probe
  misc_feature (1)..(25): SEQ ID NO: 4805; WAN024F8G; Start 307; Stop 331
aaactctacaactttaccagtccct

SEQ ID NO: 391295 - DNA, 25 bp, Artificial
  probe
  misc_feature (1)..(25): SEQ ID NO: 4806; WAN0249NV; Start 1; Stop 25
ttattgctggaggtcttattggtct

SEQ ID NO: 391296 - DNA, 25 bp, Artificial
  probe
  misc_feature (1)..(25): SEQ ID NO: 4806; WAN0249NV; Start 13; Stop 37
gtcttattggtctcttggcaggtaa

SEQ ID NO: 391297 - DNA, 25 bp, Artificial
  probe
  misc_feature (1)..(25): SEQ ID NO: 4806; WAN0249NV; Start 2; Stop 26
tattgctggaggtcttattggtctc

SEQ ID NO: 391298 - DNA, 25 bp, Artificial
  probe
  misc_feature (1)..(25): SEQ ID NO: 4806; WAN0249NV; Start 14; Stop 38
tcttattggtctcttggcaggtaaa

SEQ ID NO: 391299 - DNA, 25 bp, Artificial
  probe
  misc_feature (1)..(25): SEQ ID NO: 4806; WAN0249NV; Start 3; Stop 27
attgctggaggtcttattggtctct

SEQ ID NO: 391300 - DNA, 25 bp, Artificial
  probe
  misc_feature (1)..(25): SEQ ID NO: 4806; WAN0249NV; Start 12; Stop 36
ggtcttattggtctcttggcaggta

SEQ ID NO: 391301 - DNA, 25 bp, Artificial
  probe
  misc_feature (1)..(25): SEQ ID NO: 4806; WAN0249NV; Start 4; Stop 28
ttgctggaggtcttattggtctctt

SEQ ID NO: 391302 - DNA, 25 bp, Artificial
  probe
  misc_feature (1)..(25): SEQ ID NO: 4806; WAN0249NV; Start 23; Stop 47
tctcttggcaggtaaaatcactaaa

SEQ ID NO: 391303 - DNA, 25 bp, Artificial
  probe
  misc_feature (1)..(25): SEQ ID NO: 4806; WAN0249NV; Start 5; Stop 29
tgctggaggtcttattggtctcttg

SEQ ID NO: 391304 - DNA, 25 bp, Artificial
  probe
  misc_feature (1)..(25): SEQ ID NO: 4806; WAN0249NV; Start 16; Stop 40
ttattggtctcttggcaggtaaaat

SEQ ID NO: 391305 - DNA, 25 bp, Artificial
  probe
  misc_feature (1)..(25): SEQ ID NO: 4806; WAN0249NV; Start 24; Stop 48
ctcttggcaggtaaaatcactaaaa

SEQ ID NO: 391306 - DNA, 25 bp, Artificial
  probe
  misc_feature (1)..(25): SEQ ID NO: 4806; WAN0249NV; Start 22; Stop 46
gtctcttggcaggtaaaatcactaa

SEQ ID NO: 391307 - DNA, 25 bp, Artificial
  probe
  misc_feature (1)..(25): SEQ ID NO: 4806; WAN0249NV; Start 17; Stop 41
tattggtctcttggcaggtaaaatc

SEQ ID NO: 391308 - DNA, 25 bp, Artificial
  probe
  misc_feature (1)..(25): SEQ ID NO: 4806; WAN0249NV; Start 15; Stop 39
cttattggtctcttggcaggtaaaa

SEQ ID NO: 391309 - DNA, 25 bp, Artificial
  probe
  misc_feature (1)..(25): SEQ ID NO: 4806; WAN0249NV; Start 10; Stop 34
gaggtcttattggtctcttggcagg

SEQ ID NO: 391310 - DNA, 25 bp, Artificial
  probe
  misc_feature (1)..(25): SEQ ID NO: 4806; WAN0249NV; Start 9; Stop 33
ggaggtcttattggtctcttggcag

SEQ ID NO: 391311 - DNA, 25 bp, Artificial
  probe
  misc_feature (1)..(25): SEQ ID NO: 4806; WAN0249NV; Start 7; Stop 31
ctggaggtcttattggtctcttggc

SEQ ID NO: 391312 - DNA, 25 bp, Artificial
  probe
  misc_feature (1)..(25): SEQ ID NO: 4806; WAN0249NV; Start 6; Stop 30
gctggaggtcttattggtctcttgg

SEQ ID NO: 391313 - DNA, 25 bp, Artificial
  probe
  misc_feature (1)..(25): SEQ ID NO: 4806; WAN0249NV; Start 21; Stop 45
ggtctcttggcaggtaaaatcacta

SEQ ID NO: 391314 - DNA, 25 bp, Artificial
  probe
  misc_feature (1)..(25): SEQ ID NO: 4806; WAN0249NV; Start 18; Stop 42
attggtctcttggcaggtaaaatca

SEQ ID NO: 391315 - DNA, 25 bp, Artificial
  probe
  misc_feature (1)..(25): SEQ ID NO: 4806; WAN0249NV; Start 19; Stop 43
ttggtctcttggcaggtaaaatcac

SEQ ID NO: 391316 - DNA, 25 bp, Artificial
  probe
  misc_feature (1)..(25): SEQ ID NO: 4806; WAN0249NV; Start 20; Stop 44
tggtctcttggcaggtaaaatcact

SEQ ID NO: 391317 - DNA, 25 bp, Artificial
  probe
  misc_feature (1)..(25): SEQ ID NO: 4807; WAN024AAM; Start 87; Stop 111
aacaacactttattgaggtattgga

SEQ ID NO: 391318 - DNA, 25 bp, Artificial
  probe
  misc_feature (1)..(25): SEQ ID NO: 4807; WAN024AAM; Start 88; Stop 112
acaacactttattgaggtattggat

SEQ ID NO: 391319 - DNA, 25 bp, Artificial
  probe
  misc_feature (1)..(25): SEQ ID NO: 4807; WAN024AAM; Start 102; Stop 126
aggtattggatacgctttgctaata

SEQ ID NO: 391320 - DNA, 25 bp, Artificial
  probe
  misc_feature (1)..(25): SEQ ID NO: 4807; WAN024AAM; Start 92; Stop 116
cactttattgaggtattggatacgc

SEQ ID NO: 391321 - DNA, 25 bp, Artificial
  probe
  misc_feature (1)..(25): SEQ ID NO: 4807; WAN024AAM; Start 103; Stop 127
ggtattggatacgctttgctaatag

SEQ ID NO: 391322 - DNA, 25 bp, Artificial
  probe
  misc_feature (1)..(25): SEQ ID NO: 4807; WAN024AAM; Start 93; Stop 117
actttattgaggtattggatacgct

SEQ ID NO: 391323 - DNA, 25 bp, Artificial
  probe
  misc_feature (1)..(25): SEQ ID NO: 4807; WAN024AAM; Start 96; Stop 120
ttattgaggtattggatacgctttg

SEQ ID NO: 391324 - DNA, 25 bp, Artificial
  probe
  misc_feature (1)..(25): SEQ ID NO: 4807; WAN024AAM; Start 86; Stop 110
aaacaacactttattgaggtattgg

SEQ ID NO: 391325 - DNA, 25 bp, Artificial
  probe
  misc_feature (1)..(25): SEQ ID NO: 4807; WAN024AAM; Start 101; Stop 125
gaggtattggatacgctttgctaat

SEQ ID NO: 391326 - DNA, 25 bp, Artificial
  probe
  misc_feature (1)..(25): SEQ ID NO: 4807; WAN024AAM; Start 94; Stop 118
ctttattgaggtattggatacgctt

SEQ ID NO: 391327 - DNA, 25 bp, Artificial
  probe
  misc_feature (1)..(25): SEQ ID NO: 4807; WAN024AAM; Start 97; Stop 121
tattgaggtattggatacgctttgc

SEQ ID NO: 391328 - DNA, 25 bp, Artificial
  probe
  misc_feature (1)..(25): SEQ ID NO: 4807; WAN024AAM; Start 91; Stop 115
acactttattgaggtattggatacg

SEQ ID NO: 391329 - DNA, 25 bp, Artificial
  probe
  misc_feature (1)..(25): SEQ ID NO: 4807; WAN024AAM; Start 95; Stop 119
tttattgaggtattggatacgcttt

SEQ ID NO: 391330 - DNA, 25 bp, Artificial
  probe
  misc_feature (1)..(25): SEQ ID NO: 4807; WAN024AAM; Start 100; Stop 124
tgaggtattggatacgctttgctaa

SEQ ID NO: 391331 - DNA, 25 bp, Artificial
  probe
  misc_feature (1)..(25): SEQ ID NO: 4807; WAN024AAM; Start 99; Stop 123
ttgaggtattggatacgctttgcta

SEQ ID NO: 391332 - DNA, 25 bp, Artificial
  probe
  misc_feature (1)..(25): SEQ ID NO: 4807; WAN024AAM; Start 98; Stop 122
attgaggtattggatacgctttgct

SEQ ID NO: 391333 - DNA, 25 bp, Artificial
  probe
  misc_feature (1)..(25): SEQ ID NO: 4807; WAN024AAM; Start 89; Stop 113
caacactttattgaggtattggata

SEQ ID NO: 391334 - DNA, 25 bp, Artificial
  probe
  misc_feature (1)..(25): SEQ ID NO: 4807; WAN024AAM; Start 104; Stop 128
gtattggatacgctttgctaatagc

SEQ ID NO: 391335 - DNA, 25 bp, Artificial
  probe
  misc_feature (1)..(25): SEQ ID NO: 4807; WAN024AAM; Start 114; Stop 138
cgctttgctaatagcctaataatca

SEQ ID NO: 391336 - DNA, 25 bp, Artificial
  probe
  misc_feature (1)..(25): SEQ ID NO: 4807; WAN024AAM; Start 113; Stop 137
acgctttgctaatagcctaataatc

SEQ ID NO: 391337 - DNA, 25 bp, Artificial
  probe
  misc_feature (1)..(25): SEQ ID NO: 4807; WAN024AAM; Start 109; Stop 133
ggatacgctttgctaatagcctaat

SEQ ID NO: 391338 - DNA, 25 bp, Artificial
  probe
  misc_feature (1)..(25): SEQ ID NO: 4807; WAN024AAM; Start 105; Stop 129
tattggatacgctttgctaatagcc

SEQ ID NO: 391339 - DNA, 25 bp, Artificial
  probe
  misc_feature (1)..(25): SEQ ID NO: 4807; WAN024AAM; Start 110; Stop 134
gatacgctttgctaatagcctaata

SEQ ID NO: 391340 - DNA, 25 bp, Artificial
  probe
  misc_feature (1)..(25): SEQ ID NO: 4807; WAN024AAM; Start 115; Stop 139
gctttgctaatagcctaataatcac

SEQ ID NO: 391341 - DNA, 25 bp, Artificial
  probe
  misc_feature (1)..(25): SEQ ID NO: 4807; WAN024AAM; Start 112; Stop 136
tacgctttgctaatagcctaataat

SEQ ID NO: 391342 - DNA, 25 bp, Artificial
  probe
  misc_feature (1)..(25): SEQ ID NO: 4807; WAN024AAM; Start 111; Stop 135
atacgctttgctaatagcctaataa

SEQ ID NO: 391343 - DNA, 25 bp, Artificial
  probe
  misc_feature (1)..(25): SEQ ID NO: 4807; WAN024AAM; Start 90; Stop 114
aacactttattgaggtattggatac

SEQ ID NO: 391344 - DNA, 25 bp, Artificial
  probe
  misc_feature (1)..(25): SEQ ID NO: 4807; WAN024AAM; Start 108; Stop 132
tggatacgctttgctaatagcctaa

SEQ ID NO: 391345 - DNA, 25 bp, Artificial
  probe
  misc_feature (1)..(25): SEQ ID NO: 4807; WAN024AAM; Start 107; Stop 131
ttggatacgctttgctaatagccta

SEQ ID NO: 391346 - DNA, 25 bp, Artificial
  probe
  misc_feature (1)..(25): SEQ ID NO: 4807; WAN024AAM; Start 106; Stop 130
attggatacgctttgctaatagcct

SEQ ID NO: 391347 - DNA, 25 bp, Artificial
  probe
  misc_feature (1)..(25): SEQ ID NO: 4807; WAN024AAM; Start 116; Stop 140
ctttgctaatagcctaataatcaca

SEQ ID NO: 391348 - DNA, 25 bp, Artificial
  probe
  misc_feature (1)..(25): SEQ ID NO: 4807; WAN024AAM; Start 85; Stop 109
aaaacaacactttattgaggtattg

SEQ ID NO: 391349 - DNA, 25 bp, Artificial
  probe
  misc_feature (1)..(25): SEQ ID NO: 4809; WAN024AA9; Start 275; Stop 299
aagcaacagcaagcagtattattac

SEQ ID NO: 391350 - DNA, 25 bp, Artificial
  probe
  misc_feature (1)..(25): SEQ ID NO: 4809; WAN024AA9; Start 277; Stop 301
gcaacagcaagcagtattattacta

SEQ ID NO: 391351 - DNA, 25 bp, Artificial
  probe
  misc_feature (1)..(25): SEQ ID NO: 4809; WAN024AA9; Start 276; Stop 300
agcaacagcaagcagtattattact

SEQ ID NO: 391352 - DNA, 25 bp, Artificial
  probe
  misc_feature (1)..(25): SEQ ID NO: 4809; WAN024AA9; Start 274; Stop 298
aaagcaacagcaagcagtattatta

SEQ ID NO: 391353 - DNA, 25 bp, Artificial
  probe
  misc_feature (1)..(25): SEQ ID NO: 4809; WAN024AA9; Start 273; Stop 297
taaagcaacagcaagcagtattatt

SEQ ID NO: 391354 - DNA, 25 bp, Artificial
  probe
  misc_feature (1)..(25): SEQ ID NO: 4809; WAN024AA9; Start 268; Stop 292
aataataaagcaacagcaagcagta

SEQ ID NO: 391355 - DNA, 25 bp, Artificial
  probe
  misc_feature (1)..(25): SEQ ID NO: 4809; WAN024AA9; Start 267; Stop 291
taataataaagcaacagcaagcagt

SEQ ID NO: 391356 - DNA, 25 bp, Artificial
  probe
  misc_feature (1)..(25): SEQ ID NO: 4809; WAN024AA9; Start 261; Stop 285
ccgagataataataaagcaacagca

SEQ ID NO: 391357 - DNA, 25 bp, Artificial
  probe
  misc_feature (1)..(25): SEQ ID NO: 4809; WAN024AA9; Start 269; Stop 293
ataataaagcaacagcaagcagtat

SEQ ID NO: 391358 - DNA, 25 bp, Artificial
  probe
  misc_feature (1)..(25): SEQ ID NO: 4809; WAN024AA9; Start 260; Stop 284
tccgagataataataaagcaacagc

SEQ ID NO: 391359 - DNA, 25 bp, Artificial
  probe
  misc_feature (1)..(25): SEQ ID NO: 4809; WAN024AA9; Start 271; Stop 295
aataaagcaacagcaagcagtatta

SEQ ID NO: 391360 - DNA, 25 bp, Artificial
  probe
  misc_feature (1)..(25): SEQ ID NO: 4809; WAN024AA9; Start 270; Stop 294
taataaagcaacagcaagcagtatt

SEQ ID NO: 391361 - DNA, 25 bp, Artificial
  probe
  misc_feature (1)..(25): SEQ ID NO: 4809; WAN024AA9; Start 272; Stop 296
ataaagcaacagcaagcagtattat

SEQ ID NO: 391362 - DNA, 25 bp, Artificial
  probe
  misc_feature (1)..(25): SEQ ID NO: 4809; WAN024AA9; Start 266; Stop 290
ataataataaagcaacagcaagcag

SEQ ID NO: 391363 - DNA, 25 bp, Artificial
  probe
  misc_feature (1)..(25): SEQ ID NO: 4809; WAN024AA9; Start 265; Stop 289
gataataataaagcaacagcaagca

SEQ ID NO: 391364 - DNA, 25 bp, Artificial
  probe
  misc_feature (1)..(25): SEQ ID NO: 4809; WAN024AA9; Start 264; Stop 288
agataataataaagcaacagcaagc

SEQ ID NO: 391365 - DNA, 25 bp, Artificial
  probe
  misc_feature (1)..(25): SEQ ID NO: 4809; WAN024AA9; Start 262; Stop 286
cgagataataataaagcaacagcaa

SEQ ID NO: 391366 - DNA, 25 bp, Artificial
  probe
  misc_feature (1)..(25): SEQ ID NO: 4809; WAN024AA9; Start 232; Stop 256
agaacaacatttaacgaatcaaagt

SEQ ID NO: 391367 - DNA, 25 bp, Artificial
  probe
  misc_feature (1)..(25): SEQ ID NO: 4809; WAN024AA9; Start 278; Stop 302
caacagcaagcagtattattactaa

SEQ ID NO: 391368 - DNA, 25 bp, Artificial
  probe
  misc_feature (1)..(25): SEQ ID NO: 4809; WAN024AA9; Start 69; Stop 93
gttacctaaattagacttccttcct

SEQ ID NO: 391369 - DNA, 25 bp, Artificial
  probe
  misc_feature (1)..(25): SEQ ID NO: 4809; WAN024AA9; Start 217; Stop 241
acgatcatcattataagaacaacat

SEQ ID NO: 391370 - DNA, 25 bp, Artificial
  probe
  misc_feature (1)..(25): SEQ ID NO: 4809; WAN024AA9; Start 259; Stop 283
ttccgagataataataaagcaacag

SEQ ID NO: 391371 - DNA, 25 bp, Artificial
  probe
  misc_feature (1)..(25): SEQ ID NO: 4809; WAN024AA9; Start 68; Stop 92
agttacctaaattagacttccttcc

SEQ ID NO: 391372 - DNA, 25 bp, Artificial
  probe
  misc_feature (1)..(25): SEQ ID NO: 4809; WAN024AA9; Start 233; Stop 257
gaacaacatttaacgaatcaaagtt

SEQ ID NO: 391373 - DNA, 25 bp, Artificial
  probe
  misc_feature (1)..(25): SEQ ID NO: 4809; WAN024AA9; Start 231; Stop 255
aagaacaacatttaacgaatcaaag

SEQ ID NO: 391374 - DNA, 25 bp, Artificial
  probe
  misc_feature (1)..(25): SEQ ID NO: 4809; WAN024AA9; Start 258; Stop 282
tttccgagataataataaagcaaca

SEQ ID NO: 391375 - DNA, 25 bp, Artificial
  probe
  misc_feature (1)..(25): SEQ ID NO: 4809; WAN024AA9; Start 70; Stop 94
ttacctaaattagacttccttcctt

SEQ ID NO: 391376 - DNA, 25 bp, Artificial
  probe
  misc_feature (1)..(25): SEQ ID NO: 4809; WAN024AA9; Start 52; Stop 76
atcgcaggctttgtttagttaccta

SEQ ID NO: 391377 - DNA, 25 bp, Artificial
  probe
  misc_feature (1)..(25): SEQ ID NO: 4809; WAN024AA9; Start 49; Stop 73
gtgatcgcaggctttgtttagttac

SEQ ID NO: 391378 - DNA, 25 bp, Artificial
  probe
  misc_feature (1)..(25): SEQ ID NO: 4809; WAN024AA9; Start 48; Stop 72
agtgatcgcaggctttgtttagtta

SEQ ID NO: 391379 - DNA, 25 bp, Artificial
  probe
  misc_feature (1)..(25): SEQ ID NO: 4809; WAN024AA9; Start 71; Stop 95
tacctaaattagacttccttccttt

SEQ ID NO: 391380 - DNA, 25 bp, Artificial
  probe
  misc_feature (1)..(25): SEQ ID NO: 4809; WAN024AA9; Start 216; Stop 240
tacgatcatcattataagaacaaca

SEQ ID NO: 391381 - DNA, 25 bp, Artificial
  probe
  misc_feature (1)..(25): SEQ ID NO: 4809; WAN024AA9; Start 53; Stop 77
tcgcaggctttgtttagttacctaa

SEQ ID NO: 391382 - DNA, 25 bp, Artificial
  probe
  misc_feature (1)..(25): SEQ ID NO: 4810; WAN024A69; Start 95; Stop 119
aatgtgcattacttggtgatctctc

SEQ ID NO: 391383 - DNA, 25 bp, Artificial
  probe
  misc_feature (1)..(25): SEQ ID NO: 4810; WAN024A69; Start 92; Stop 116
ttcaatgtgcattacttggtgatct

SEQ ID NO: 391384 - DNA, 25 bp, Artificial
  probe
  misc_feature (1)..(25): SEQ ID NO: 4810; WAN024A69; Start 94; Stop 118
caatgtgcattacttggtgatctct

SEQ ID NO: 391385 - DNA, 25 bp, Artificial
  probe
  misc_feature (1)..(25): SEQ ID NO: 4810; WAN024A69; Start 93; Stop 117
tcaatgtgcattacttggtgatctc

SEQ ID NO: 391386 - DNA, 25 bp, Artificial
  probe
  misc_feature (1)..(25): SEQ ID NO: 4810; WAN024A69; Start 96; Stop 120
atgtgcattacttggtgatctctca

SEQ ID NO: 391387 - DNA, 25 bp, Artificial
  probe
  misc_feature (1)..(25): SEQ ID NO: 4810; WAN024A69; Start 91; Stop 115
tttcaatgtgcattacttggtgatc

SEQ ID NO: 391388 - DNA, 25 bp, Artificial
  probe
  misc_feature (1)..(25): SEQ ID NO: 4810; WAN024A69; Start 40; Stop 64
tacagcgttttcggtttattttctt

SEQ ID NO: 391389 - DNA, 25 bp, Artificial
  probe
  misc_feature (1)..(25): SEQ ID NO: 4810; WAN024A69; Start 39; Stop 63
ctacagcgttttcggtttattttct

SEQ ID NO: 391390 - DNA, 25 bp, Artificial
  probe
  misc_feature (1)..(25): SEQ ID NO: 4810; WAN024A69; Start 37; Stop 61
tactacagcgttttcggtttatttt

SEQ ID NO: 391391 - DNA, 25 bp, Artificial
  probe
  misc_feature (1)..(25): SEQ ID NO: 4810; WAN024A69; Start 44; Stop 68
gcgttttcggtttattttcttgtta

SEQ ID NO: 391392 - DNA, 25 bp, Artificial
  probe
  misc_feature (1)..(25): SEQ ID NO: 4810; WAN024A69; Start 38; Stop 62
actacagcgttttcggtttattttc

SEQ ID NO: 391393 - DNA, 25 bp, Artificial
  probe
  misc_feature (1)..(25): SEQ ID NO: 4810; WAN024A69; Start 36; Stop 60
atactacagcgttttcggtttattt

SEQ ID NO: 391394 - DNA, 25 bp, Artificial
  probe
  misc_feature (1)..(25): SEQ ID NO: 4810; WAN024A69; Start 43; Stop 67
agcgttttcggtttattttcttgtt

SEQ ID NO: 391395 - DNA, 25 bp, Artificial
  probe
  misc_feature (1)..(25): SEQ ID NO: 4810; WAN024A69; Start 35; Stop 59
aatactacagcgttttcggtttatt

SEQ ID NO: 391396 - DNA, 25 bp, Artificial
  probe
  misc_feature (1)..(25): SEQ ID NO: 4810; WAN024A69; Start 33; Stop 57
ttaatactacagcgttttcggttta

SEQ ID NO: 391397 - DNA, 25 bp, Artificial
  probe
  misc_feature (1)..(25): SEQ ID NO: 4810; WAN024A69; Start 42; Stop 66
cagcgttttcggtttattttcttgt

SEQ ID NO: 391398 - DNA, 25 bp, Artificial
  probe
  misc_feature (1)..(25): SEQ ID NO: 4810; WAN024A69; Start 41; Stop 65
acagcgttttcggtttattttcttg

SEQ ID NO: 391399 - DNA, 25 bp, Artificial
  probe
  misc_feature (1)..(25): SEQ ID NO: 4810; WAN024A69; Start 34; Stop 58
taatactacagcgttttcggtttat

SEQ ID NO: 391400 - DNA, 25 bp, Artificial
  probe
  misc_feature (1)..(25): SEQ ID NO: 4810; WAN024A69; Start 10; Stop 34
gacctttcagtcataaactcttatt

SEQ ID NO: 391401 - DNA, 25 bp, Artificial
  probe
  misc_feature (1)..(25): SEQ ID NO: 4810; WAN024A69; Start 45; Stop 69
cgttttcggtttattttcttgttac

SEQ ID NO: 391402 - DNA, 25 bp, Artificial
  probe
  misc_feature (1)..(25): SEQ ID NO: 4810; WAN024A69; Start 32; Stop 56
attaatactacagcgttttcggttt

SEQ ID NO: 391403 - DNA, 25 bp, Artificial
  probe
  misc_feature (1)..(25): SEQ ID NO: 4810; WAN024A69; Start 90; Stop 114
ttttcaatgtgcattacttggtgat

SEQ ID NO: 391404 - DNA, 25 bp, Artificial
  probe
  misc_feature (1)..(25): SEQ ID NO: 4810; WAN024A69; Start 89; Stop 113
attttcaatgtgcattacttggtga

SEQ ID NO: 391405 - DNA, 25 bp, Artificial
  probe
  misc_feature (1)..(25): SEQ ID NO: 4810; WAN024A69; Start 88; Stop 112
aattttcaatgtgcattacttggtg

SEQ ID NO: 391406 - DNA, 25 bp, Artificial
  probe
  misc_feature (1)..(25): SEQ ID NO: 4810; WAN024A69; Start 87; Stop 111
caattttcaatgtgcattacttggt

SEQ ID NO: 391407 - DNA, 25 bp, Artificial
  probe
  misc_feature (1)..(25): SEQ ID NO: 4810; WAN024A69; Start 86; Stop 110
tcaattttcaatgtgcattacttgg

SEQ ID NO: 391408 - DNA, 25 bp, Artificial
  probe
  misc_feature (1)..(25): SEQ ID NO: 4810; WAN024A69; Start 46; Stop 70
gttttcggtttattttcttgttact

SEQ ID NO: 391409 - DNA, 25 bp, Artificial
  probe
  misc_feature (1)..(25): SEQ ID NO: 4810; WAN024A69; Start 11; Stop 35
acctttcagtcataaactcttatta

SEQ ID NO: 391410 - DNA, 25 bp, Artificial
  probe
  misc_feature (1)..(25): SEQ ID NO: 4810; WAN024A69; Start 7; Stop 31
tctgacctttcagtcataaactctt

SEQ ID NO: 391411 - DNA, 25 bp, Artificial
  probe
  misc_feature (1)..(25): SEQ ID NO: 4810; WAN024A69; Start 6; Stop 30
ttctgacctttcagtcataaactct

SEQ ID NO: 391412 - DNA, 25 bp, Artificial
  probe
  misc_feature (1)..(25): SEQ ID NO: 4810; WAN024A69; Start 5; Stop 29
tttctgacctttcagtcataaactc

SEQ ID NO: 391413 - DNA, 25 bp, Artificial
  probe
  misc_feature (1)..(25): SEQ ID NO: 4810; WAN024A69; Start 31; Stop 55
tattaatactacagcgttttcggtt

SEQ ID NO: 391414 - DNA, 25 bp, Artificial
  probe
  misc_feature (1)..(25): SEQ ID NO: 4810; WAN024A69; Start 30; Stop 54
ttattaatactacagcgttttcggt

SEQ ID NO: 391415 - DNA, 25 bp, Artificial
  probe
  misc_feature (1)..(25): SEQ ID NO: 4811; WAN024ASO; Start 39; Stop 63
tttccaacctaattgacaccattta

SEQ ID NO: 391416 - DNA, 25 bp, Artificial
  probe
  misc_feature (1)..(25): SEQ ID NO: 4811; WAN024ASO; Start 41; Stop 65
tccaacctaattgacaccatttatt

SEQ ID NO: 391417 - DNA, 25 bp, Artificial
  probe
  misc_feature (1)..(25): SEQ ID NO: 4811; WAN024ASO; Start 40; Stop 64
ttccaacctaattgacaccatttat

SEQ ID NO: 391418 - DNA, 25 bp, Artificial
  probe
  misc_feature (1)..(25): SEQ ID NO: 4811; WAN024ASO; Start 42; Stop 66
ccaacctaattgacaccatttatta

SEQ ID NO: 391419 - DNA, 25 bp, Artificial
  probe
  misc_feature (1)..(25): SEQ ID NO: 4811; WAN024ASO; Start 38; Stop 62
ttttccaacctaattgacaccattt

SEQ ID NO: 391420 - DNA, 25 bp, Artificial
  probe
  misc_feature (1)..(25): SEQ ID NO: 4811; WAN024ASO; Start 43; Stop 67
caacctaattgacaccatttattaa

SEQ ID NO: 391421 - DNA, 25 bp, Artificial
  probe
  misc_feature (1)..(25): SEQ ID NO: 4811; WAN024ASO; Start 14; Stop 38
caaaagccaaaagggttggaatttt

SEQ ID NO: 391422 - DNA, 25 bp, Artificial
  probe
  misc_feature (1)..(25): SEQ ID NO: 4811; WAN024ASO; Start 13; Stop 37
tcaaaagccaaaagggttggaattt

SEQ ID NO: 391423 - DNA, 25 bp, Artificial
  probe
  misc_feature (1)..(25): SEQ ID NO: 4811; WAN024ASO; Start 12; Stop 36
ttcaaaagccaaaagggttggaatt

SEQ ID NO: 391424 - DNA, 25 bp, Artificial
  probe
  misc_feature (1)..(25): SEQ ID NO: 4811; WAN024ASO; Start 11; Stop 35
tttcaaaagccaaaagggttggaat

SEQ ID NO: 391425 - DNA, 25 bp, Artificial
  probe
  misc_feature (1)..(25): SEQ ID NO: 4811; WAN024ASO; Start 10; Stop 34
ctttcaaaagccaaaagggttggaa

SEQ ID NO: 391426 - DNA, 25 bp, Artificial
  probe
  misc_feature (1)..(25): SEQ ID NO: 4812; WAN024DDA-3; Start 237; Stop 261
aaacgaacacaagaactaggtaaat

SEQ ID NO: 391427 - DNA, 25 bp, Artificial
  probe
  misc_feature (1)..(25): SEQ ID NO: 4812; WAN024DDA-3; Start 239; Stop 263
acgaacacaagaactaggtaaataa

SEQ ID NO: 391428 - DNA, 25 bp, Artificial
  probe
  misc_feature (1)..(25): SEQ ID NO: 4812; WAN024DDA-3; Start 238; Stop 262
aacgaacacaagaactaggtaaata

SEQ ID NO: 391429 - DNA, 25 bp, Artificial
  probe
  misc_feature (1)..(25): SEQ ID NO: 4812; WAN024DDA-3; Start 240; Stop 264
cgaacacaagaactaggtaaataac

SEQ ID NO: 391430 - DNA, 25 bp, Artificial
  probe
  misc_feature (1)..(25): SEQ ID NO: 4812; WAN024DDA-3; Start 241; Stop 265
gaacacaagaactaggtaaataact

SEQ ID NO: 391431 - DNA, 25 bp, Artificial
  probe
  misc_feature (1)..(25): SEQ ID NO: 4812; WAN024DDA-3; Start 243; Stop 267
acacaagaactaggtaaataactaa

SEQ ID NO: 391432 - DNA, 25 bp, Artificial
  probe
  misc_feature (1)..(25): SEQ ID NO: 4812; WAN024DDA-3; Start 242; Stop 266
aacacaagaactaggtaaataacta

SEQ ID NO: 391433 - DNA, 25 bp, Artificial
  probe
  misc_feature (1)..(25): SEQ ID NO: 4813; WAN0249VE; Start 133; Stop 157
ctcctgccaatctagtttatctacc

SEQ ID NO: 391434 - DNA, 25 bp, Artificial
  probe
  misc_feature (1)..(25): SEQ ID NO: 4813; WAN0249VE; Start 218; Stop 242
atgctatttacaccatacttcctgc

SEQ ID NO: 391435 - DNA, 25 bp, Artificial
  probe
  misc_feature (1)..(25): SEQ ID NO: 4813; WAN0249VE; Start 138; Stop 162
gccaatctagtttatctaccaggac

SEQ ID NO: 391436 - DNA, 25 bp, Artificial
  probe
  misc_feature (1)..(25): SEQ ID NO: 4813; WAN0249VE; Start 141; Stop 165
aatctagtttatctaccaggacacc

SEQ ID NO: 391437 - DNA, 25 bp, Artificial
  probe
  misc_feature (1)..(25): SEQ ID NO: 4813; WAN0249VE; Start 139; Stop 163
ccaatctagtttatctaccaggaca

SEQ ID NO: 391438 - DNA, 25 bp, Artificial
  probe
  misc_feature (1)..(25): SEQ ID NO: 4813; WAN0249VE; Start 137; Stop 161
tgccaatctagtttatctaccagga

SEQ ID NO: 391439 - DNA, 25 bp, Artificial
  probe
  misc_feature (1)..(25): SEQ ID NO: 4813; WAN0249VE; Start 134; Stop 158
tcctgccaatctagtttatctacca

SEQ ID NO: 391440 - DNA, 25 bp, Artificial
  probe
  misc_feature (1)..(25): SEQ ID NO: 4813; WAN0249VE; Start 79; Stop 103
aaacaaactatctcaaattggtgcc

SEQ ID NO: 391441 - DNA, 25 bp, Artificial
  probe
  misc_feature (1)..(25): SEQ ID NO: 4813; WAN0249VE; Start 125; Stop 149
caatcagactcctgccaatctagtt

SEQ ID NO: 391442 - DNA, 25 bp, Artificial
  probe
  misc_feature (1)..(25): SEQ ID NO: 4813; WAN0249VE; Start 142; Stop 166
atctagtttatctaccaggacaccg

SEQ ID NO: 391443 - DNA, 25 bp, Artificial
  probe
  misc_feature (1)..(25): SEQ ID NO: 4813; WAN0249VE; Start 132; Stop 156
actcctgccaatctagtttatctac

SEQ ID NO: 391444 - DNA, 25 bp, Artificial
  probe
  misc_feature (1)..(25): SEQ ID NO: 4813; WAN0249VE; Start 131; Stop 155
gactcctgccaatctagtttatcta

SEQ ID NO: 391445 - DNA, 25 bp, Artificial
  probe
  misc_feature (1)..(25): SEQ ID NO: 4813; WAN0249VE; Start 140; Stop 164
caatctagtttatctaccaggacac

SEQ ID NO: 391446 - DNA, 25 bp, Artificial
  probe
  misc_feature (1)..(25): SEQ ID NO: 4813; WAN0249VE; Start 130; Stop 154
agactcctgccaatctagtttatct

SEQ ID NO: 391447 - DNA, 25 bp, Artificial
  probe
  misc_feature (1)..(25): SEQ ID NO: 4813; WAN0249VE; Start 80; Stop 104
aacaaactatctcaaattggtgcca

SEQ ID NO: 391448 - DNA, 25 bp, Artificial
  probe
  misc_feature (1)..(25): SEQ ID NO: 4813; WAN0249VE; Start 78; Stop 102
taaacaaactatctcaaattggtgc

SEQ ID NO: 391449 - DNA, 25 bp, Artificial
  probe
  misc_feature (1)..(25): SEQ ID NO: 4813; WAN0249VE; Start 136; Stop 160
ctgccaatctagtttatctaccagg

SEQ ID NO: 391450 - DNA, 25 bp, Artificial
  probe
  misc_feature (1)..(25): SEQ ID NO: 4813; WAN0249VE; Start 135; Stop 159
cctgccaatctagtttatctaccag

SEQ ID NO: 391451 - DNA, 25 bp, Artificial
  probe
  misc_feature (1)..(25): SEQ ID NO: 4813; WAN0249VE; Start 129; Stop 153
cagactcctgccaatctagtttatc

SEQ ID NO: 391452 - DNA, 25 bp, Artificial
  probe
  misc_feature (1)..(25): SEQ ID NO: 4813; WAN0249VE; Start 128; Stop 152
tcagactcctgccaatctagtttat

SEQ ID NO: 391453 - DNA, 25 bp, Artificial
  probe
  misc_feature (1)..(25): SEQ ID NO: 4813; WAN0249VE; Start 127; Stop 151
atcagactcctgccaatctagttta

SEQ ID NO: 391454 - DNA, 25 bp, Artificial
  probe
  misc_feature (1)..(25): SEQ ID NO: 4813; WAN0249VE; Start 81; Stop 105
acaaactatctcaaattggtgccaa

SEQ ID NO: 391455 - DNA, 25 bp, Artificial
  probe
  misc_feature (1)..(25): SEQ ID NO: 4813; WAN0249VE; Start 186; Stop 210
tctctttataagcaaatgatggaca

SEQ ID NO: 391456 - DNA, 25 bp, Artificial
  probe
  misc_feature (1)..(25): SEQ ID NO: 4813; WAN0249VE; Start 126; Stop 150
aatcagactcctgccaatctagttt

SEQ ID NO: 391457 - DNA, 25 bp, Artificial
  probe
  misc_feature (1)..(25): SEQ ID NO: 4813; WAN0249VE; Start 217; Stop 241
tatgctatttacaccatacttcctg

SEQ ID NO: 391458 - DNA, 25 bp, Artificial
  probe
  misc_feature (1)..(25): SEQ ID NO: 4813; WAN0249VE; Start 122; Stop 146
ctccaatcagactcctgccaatcta

SEQ ID NO: 391459 - DNA, 25 bp, Artificial
  probe
  misc_feature (1)..(25): SEQ ID NO: 4813; WAN0249VE; Start 123; Stop 147
tccaatcagactcctgccaatctag

SEQ ID NO: 391460 - DNA, 25 bp, Artificial
  probe
  misc_feature (1)..(25): SEQ ID NO: 4813; WAN0249VE; Start 113; Stop 137
ctctcctttctccaatcagactcct

SEQ ID NO: 391461 - DNA, 25 bp, Artificial
  probe
  misc_feature (1)..(25): SEQ ID NO: 4813; WAN0249VE; Start 188; Stop 212
tctttataagcaaatgatggacatc

SEQ ID NO: 391462 - DNA, 25 bp, Artificial
  probe
  misc_feature (1)..(25): SEQ ID NO: 4813; WAN0249VE; Start 187; Stop 211
ctctttataagcaaatgatggacat

SEQ ID NO: 391463 - DNA, 25 bp, Artificial
  probe
  misc_feature (1)..(25): SEQ ID NO: 4813; WAN0249VE; Start 124; Stop 148
ccaatcagactcctgccaatctagt

SEQ ID NO: 391464 - DNA, 25 bp, Artificial
  probe
  misc_feature (1)..(25): SEQ ID NO: 4813; WAN0249VE; Start 76; Stop 100
actaaacaaactatctcaaattggt

SEQ ID NO: 391465 - DNA, 25 bp, Artificial
  probe
  misc_feature (1)..(25): SEQ ID NO: 4813; WAN0249VE; Start 144; Stop 168
ctagtttatctaccaggacaccgct

SEQ ID NO: 391466 - DNA, 25 bp, Artificial
  probe
  misc_feature (1)..(25): SEQ ID NO: 4814; WAN0249U6; Start 42; Stop 66
aggatacgaacaaattgattaggaa

SEQ ID NO: 391467 - DNA, 25 bp, Artificial
  probe
  misc_feature (1)..(25): SEQ ID NO: 4814; WAN0249U6; Start 43; Stop 67
ggatacgaacaaattgattaggaaa

SEQ ID NO: 391468 - DNA, 25 bp, Artificial
  probe
  misc_feature (1)..(25): SEQ ID NO: 4814; WAN0249U6; Start 35; Stop 59
gtgaaataggatacgaacaaattga

SEQ ID NO: 391469 - DNA, 25 bp, Artificial
  probe
  misc_feature (1)..(25): SEQ ID NO: 4814; WAN0249U6; Start 34; Stop 58
agtgaaataggatacgaacaaattg

SEQ ID NO: 391470 - DNA, 25 bp, Artificial
  probe
  misc_feature (1)..(25): SEQ ID NO: 4814; WAN0249U6; Start 41; Stop 65
taggatacgaacaaattgattagga

SEQ ID NO: 391471 - DNA, 25 bp, Artificial
  probe
  misc_feature (1)..(25): SEQ ID NO: 4814; WAN0249U6; Start 33; Stop 57
gagtgaaataggatacgaacaaatt

SEQ ID NO: 391472 - DNA, 25 bp, Artificial
  probe
  misc_feature (1)..(25): SEQ ID NO: 4814; WAN0249U6; Start 40; Stop 64
ataggatacgaacaaattgattagg

SEQ ID NO: 391473 - DNA, 25 bp, Artificial
  probe
  misc_feature (1)..(25): SEQ ID NO: 4814; WAN0249U6; Start 36; Stop 60
tgaaataggatacgaacaaattgat

SEQ ID NO: 391474 - DNA, 25 bp, Artificial
  probe
  misc_feature (1)..(25): SEQ ID NO: 4814; WAN0249U6; Start 140; Stop 164
cattgtgctagtctagattcagttt

SEQ ID NO: 391475 - DNA, 25 bp, Artificial
  probe
  misc_feature (1)..(25): SEQ ID NO: 4814; WAN0249U6; Start 142; Stop 166
ttgtgctagtctagattcagtttac

SEQ ID NO: 391476 - DNA, 25 bp, Artificial
  probe
  misc_feature (1)..(25): SEQ ID NO: 4814; WAN0249U6; Start 143; Stop 167
tgtgctagtctagattcagtttact

SEQ ID NO: 391477 - DNA, 25 bp, Artificial
  probe
  misc_feature (1)..(25): SEQ ID NO: 4814; WAN0249U6; Start 139; Stop 163
gcattgtgctagtctagattcagtt

SEQ ID NO: 391478 - DNA, 25 bp, Artificial
  probe
  misc_feature (1)..(25): SEQ ID NO: 4814; WAN0249U6; Start 37; Stop 61
gaaataggatacgaacaaattgatt

SEQ ID NO: 391479 - DNA, 25 bp, Artificial
  probe
  misc_feature (1)..(25): SEQ ID NO: 4814; WAN0249U6; Start 212; Stop 236
gcaggttttatctgtattattcagc

SEQ ID NO: 391480 - DNA, 25 bp, Artificial
  probe
  misc_feature (1)..(25): SEQ ID NO: 4814; WAN0249U6; Start 141; Stop 165
attgtgctagtctagattcagttta

SEQ ID NO: 391481 - DNA, 25 bp, Artificial
  probe
  misc_feature (1)..(25): SEQ ID NO: 4814; WAN0249U6; Start 210; Stop 234
aggcaggttttatctgtattattca

SEQ ID NO: 391482 - DNA, 25 bp, Artificial
  probe
  misc_feature (1)..(25): SEQ ID NO: 4814; WAN0249U6; Start 170; Stop 194
actaaaacgagtagcttgaaatcaa

SEQ ID NO: 391483 - DNA, 25 bp, Artificial
  probe
  misc_feature (1)..(25): SEQ ID NO: 4814; WAN0249U6; Start 211; Stop 235
ggcaggttttatctgtattattcag

SEQ ID NO: 391484 - DNA, 25 bp, Artificial
  probe
  misc_feature (1)..(25): SEQ ID NO: 4814; WAN0249U6; Start 209; Stop 233
caggcaggttttatctgtattattc

SEQ ID NO: 391485 - DNA, 25 bp, Artificial
  probe
  misc_feature (1)..(25): SEQ ID NO: 4814; WAN0249U6; Start 171; Stop 195
ctaaaacgagtagcttgaaatcaaa

SEQ ID NO: 391486 - DNA, 25 bp, Artificial
  probe
  misc_feature (1)..(25): SEQ ID NO: 4814; WAN0249U6; Start 39; Stop 63
aataggatacgaacaaattgattag

SEQ ID NO: 391487 - DNA, 25 bp, Artificial
  probe
  misc_feature (1)..(25): SEQ ID NO: 4814; WAN0249U6; Start 172; Stop 196
taaaacgagtagcttgaaatcaaaa

SEQ ID NO: 391488 - DNA, 25 bp, Artificial
  probe
  misc_feature (1)..(25): SEQ ID NO: 4814; WAN0249U6; Start 144; Stop 168
gtgctagtctagattcagtttacta

SEQ ID NO: 391489 - DNA, 25 bp, Artificial
  probe
  misc_feature (1)..(25): SEQ ID NO: 4814; WAN0249U6; Start 169; Stop 193
tactaaaacgagtagcttgaaatca

SEQ ID NO: 391490 - DNA, 25 bp, Artificial
  probe
  misc_feature (1)..(25): SEQ ID NO: 4814; WAN0249U6; Start 44; Stop 68
gatacgaacaaattgattaggaaaa

SEQ ID NO: 391491 - DNA, 25 bp, Artificial
  probe
  misc_feature (1)..(25): SEQ ID NO: 4814; WAN0249U6; Start 165; Stop 189
actatactaaaacgagtagcttgaa

SEQ ID NO: 391492 - DNA, 25 bp, Artificial
  probe
  misc_feature (1)..(25): SEQ ID NO: 4814; WAN0249U6; Start 145; Stop 169
tgctagtctagattcagtttactat

SEQ ID NO: 391493 - DNA, 25 bp, Artificial
  probe
  misc_feature (1)..(25): SEQ ID NO: 4814; WAN0249U6; Start 168; Stop 192
atactaaaacgagtagcttgaaatc

SEQ ID NO: 391494 - DNA, 25 bp, Artificial
  probe
  misc_feature (1)..(25): SEQ ID NO: 4814; WAN0249U6; Start 213; Stop 237
caggttttatctgtattattcagct

SEQ ID NO: 391495 - DNA, 25 bp, Artificial
  probe
  misc_feature (1)..(25): SEQ ID NO: 4814; WAN0249U6; Start 45; Stop 69
atacgaacaaattgattaggaaaat

SEQ ID NO: 391496 - DNA, 25 bp, Artificial
  probe
  misc_feature (1)..(25): SEQ ID NO: 4814; WAN0249U6; Start 164; Stop 188
tactatactaaaacgagtagcttga

SEQ ID NO: 391497 - DNA, 25 bp, Artificial
  probe
  misc_feature (1)..(25): SEQ ID NO: 4814; WAN0249U6; Start 46; Stop 70
tacgaacaaattgattaggaaaatc

SEQ ID NO: 391498 - DNA, 25 bp, Artificial
  probe
  misc_feature (1)..(25): SEQ ID NO: 4814; WAN0249U6; Start 166; Stop 190
ctatactaaaacgagtagcttgaaa

SEQ ID NO: 391499 - DNA, 25 bp, Artificial
  probe
  misc_feature (1)..(25): SEQ ID NO: 4815; WAN024AAP; Start 74; Stop 98
tgtccgttgttaaaggaactatctt

SEQ ID NO: 391500 - DNA, 25 bp, Artificial
  probe
  misc_feature (1)..(25): SEQ ID NO: 4815; WAN024AAP; Start 73; Stop 97
atgtccgttgttaaaggaactatct

SEQ ID NO: 391501 - DNA, 25 bp, Artificial
  probe
  misc_feature (1)..(25): SEQ ID NO: 4815; WAN024AAP; Start 72; Stop 96
aatgtccgttgttaaaggaactatc

SEQ ID NO: 391502 - DNA, 25 bp, Artificial
  probe
  misc_feature (1)..(25): SEQ ID NO: 4815; WAN024AAP; Start 71; Stop 95
gaatgtccgttgttaaaggaactat

SEQ ID NO: 391503 - DNA, 25 bp, Artificial
  probe
  misc_feature (1)..(25): SEQ ID NO: 4815; WAN024AAP; Start 70; Stop 94
ggaatgtccgttgttaaaggaacta

SEQ ID NO: 391504 - DNA, 25 bp, Artificial
  probe
  misc_feature (1)..(25): SEQ ID NO: 4815; WAN024AAP; Start 68; Stop 92
aaggaatgtccgttgttaaaggaac

SEQ ID NO: 391505 - DNA, 25 bp, Artificial
  probe
  misc_feature (1)..(25): SEQ ID NO: 4815; WAN024AAP; Start 67; Stop 91
caaggaatgtccgttgttaaaggaa

SEQ ID NO: 391506 - DNA, 25 bp, Artificial
  probe
  misc_feature (1)..(25): SEQ ID NO: 4815; WAN024AAP; Start 75; Stop 99
gtccgttgttaaaggaactatcttt

SEQ ID NO: 391507 - DNA, 25 bp, Artificial
  probe
  misc_feature (1)..(25): SEQ ID NO: 4815; WAN024AAP; Start 69; Stop 93
aggaatgtccgttgttaaaggaact

SEQ ID NO: 391508 - DNA, 25 bp, Artificial
  probe
  misc_feature (1)..(25): SEQ ID NO: 4815; WAN024AAP; Start 66; Stop 90
gcaaggaatgtccgttgttaaagga

SEQ ID NO: 391509 - DNA, 25 bp, Artificial
  probe
  misc_feature (1)..(25): SEQ ID NO: 4815; WAN024AAP; Start 76; Stop 100
tccgttgttaaaggaactatctttt

SEQ ID NO: 391510 - DNA, 25 bp, Artificial
  probe
  misc_feature (1)..(25): SEQ ID NO: 4815; WAN024AAP; Start 77; Stop 101
ccgttgttaaaggaactatctttta

SEQ ID NO: 391511 - DNA, 25 bp, Artificial
  probe
  misc_feature (1)..(25): SEQ ID NO: 4815; WAN024AAP; Start 61; Stop 85
tatttgcaaggaatgtccgttgtta

SEQ ID NO: 391512 - DNA, 25 bp, Artificial
  probe
  misc_feature (1)..(25): SEQ ID NO: 4815; WAN024AAP; Start 65; Stop 89
tgcaaggaatgtccgttgttaaagg

SEQ ID NO: 391513 - DNA, 25 bp, Artificial
  probe
  misc_feature (1)..(25): SEQ ID NO: 4815; WAN024AAP; Start 57; Stop 81
aaactatttgcaaggaatgtccgtt

SEQ ID NO: 391514 - DNA, 25 bp, Artificial
  probe
  misc_feature (1)..(25): SEQ ID NO: 4815; WAN024AAP; Start 62; Stop 86
atttgcaaggaatgtccgttgttaa

SEQ ID NO: 391515 - DNA, 25 bp, Artificial
  probe
  misc_feature (1)..(25): SEQ ID NO: 4815; WAN024AAP; Start 63; Stop 87
tttgcaaggaatgtccgttgttaaa

SEQ ID NO: 391516 - DNA, 25 bp, Artificial
  probe
  misc_feature (1)..(25): SEQ ID NO: 4815; WAN024AAP; Start 60; Stop 84
ctatttgcaaggaatgtccgttgtt

SEQ ID NO: 391517 - DNA, 25 bp, Artificial
  probe
  misc_feature (1)..(25): SEQ ID NO: 4815; WAN024AAP; Start 58; Stop 82
aactatttgcaaggaatgtccgttg

SEQ ID NO: 391518 - DNA, 25 bp, Artificial
  probe
  misc_feature (1)..(25): SEQ ID NO: 4815; WAN024AAP; Start 64; Stop 88
ttgcaaggaatgtccgttgttaaag

SEQ ID NO: 391519 - DNA, 25 bp, Artificial
  probe
  misc_feature (1)..(25): SEQ ID NO: 4815; WAN024AAP; Start 53; Stop 77
tgtaaaactatttgcaaggaatgtc

SEQ ID NO: 391520 - DNA, 25 bp, Artificial
  probe
  misc_feature (1)..(25): SEQ ID NO: 4815; WAN024AAP; Start 59; Stop 83
actatttgcaaggaatgtccgttgt

SEQ ID NO: 391521 - DNA, 25 bp, Artificial
  probe
  misc_feature (1)..(25): SEQ ID NO: 4815; WAN024AAP; Start 55; Stop 79
taaaactatttgcaaggaatgtccg

SEQ ID NO: 391522 - DNA, 25 bp, Artificial
  probe
  misc_feature (1)..(25): SEQ ID NO: 4815; WAN024AAP; Start 52; Stop 76
ttgtaaaactatttgcaaggaatgt

SEQ ID NO: 391523 - DNA, 25 bp, Artificial
  probe
  misc_feature (1)..(25): SEQ ID NO: 4815; WAN024AAP; Start 54; Stop 78
gtaaaactatttgcaaggaatgtcc

SEQ ID NO: 391524 - DNA, 25 bp, Artificial
  probe
  misc_feature (1)..(25): SEQ ID NO: 4815; WAN024AAP; Start 78; Stop 102
cgttgttaaaggaactatcttttaa

SEQ ID NO: 391525 - DNA, 25 bp, Artificial
  probe
  misc_feature (1)..(25): SEQ ID NO: 4815; WAN024AAP; Start 56; Stop 80
aaaactatttgcaaggaatgtccgt

SEQ ID NO: 391526 - DNA, 25 bp, Artificial
  probe
  misc_feature (1)..(25): SEQ ID NO: 4815; WAN024AAP; Start 51; Stop 75
tttgtaaaactatttgcaaggaatg

SEQ ID NO: 391527 - DNA, 25 bp, Artificial
  probe
  misc_feature (1)..(25): SEQ ID NO: 4815; WAN024AAP; Start 50; Stop 74
ttttgtaaaactatttgcaaggaat

SEQ ID NO: 391528 - DNA, 25 bp, Artificial
  probe
  misc_feature (1)..(25): SEQ ID NO: 4816; WAN0249EQ; Start 31; Stop 55
tccgtcgtatttgtcttagagcgta

SEQ ID NO: 391529 - DNA, 25 bp, Artificial
  probe
  misc_feature (1)..(25): SEQ ID NO: 4816; WAN0249EQ; Start 30; Stop 54
ctccgtcgtatttgtcttagagcgt

SEQ ID NO: 391530 - DNA, 25 bp, Artificial
  probe
  misc_feature (1)..(25): SEQ ID NO: 4817; WAN024ABP; Start 5; Stop 29
accttactagtatagcacaatagcc

SEQ ID NO: 391531 - DNA, 25 bp, Artificial
  probe
  misc_feature (1)..(25): SEQ ID NO: 4817; WAN024ABP; Start 6; Stop 30
ccttactagtatagcacaatagcct

SEQ ID NO: 391532 - DNA, 25 bp, Artificial
  probe
  misc_feature (1)..(25): SEQ ID NO: 4817; WAN024ABP; Start 7; Stop 31
cttactagtatagcacaatagcctg

SEQ ID NO: 391533 - DNA, 25 bp, Artificial
  probe
  misc_feature (1)..(25): SEQ ID NO: 4817; WAN024ABP; Start 26; Stop 50
agcctgctttatgctatacttaaag

SEQ ID NO: 391534 - DNA, 25 bp, Artificial
  probe
  misc_feature (1)..(25): SEQ ID NO: 4817; WAN024ABP; Start 4; Stop 28
aaccttactagtatagcacaatagc

SEQ ID NO: 391535 - DNA, 25 bp, Artificial
  probe
  misc_feature (1)..(25): SEQ ID NO: 4817; WAN024ABP; Start 1; Stop 25
ttcaaccttactagtatagcacaat

SEQ ID NO: 391536 - DNA, 25 bp, Artificial
  probe
  misc_feature (1)..(25): SEQ ID NO: 4817; WAN024ABP; Start 25; Stop 49
tagcctgctttatgctatacttaaa

SEQ ID NO: 391537 - DNA, 25 bp, Artificial
  probe
  misc_feature (1)..(25): SEQ ID NO: 4817; WAN024ABP; Start 8; Stop 32
ttactagtatagcacaatagcctgc

SEQ ID NO: 391538 - DNA, 25 bp, Artificial
  probe
  misc_feature (1)..(25): SEQ ID NO: 4817; WAN024ABP; Start 2; Stop 26
tcaaccttactagtatagcacaata

SEQ ID NO: 391539 - DNA, 25 bp, Artificial
  probe
  misc_feature (1)..(25): SEQ ID NO: 4817; WAN024ABP; Start 3; Stop 27
caaccttactagtatagcacaatag

SEQ ID NO: 391540 - DNA, 25 bp, Artificial
  probe
  misc_feature (1)..(25): SEQ ID NO: 4818; WAN0249HH; Start 9; Stop 33
atccttaaaagagaagagtacgatt

SEQ ID NO: 391541 - DNA, 25 bp, Artificial
  probe
  misc_feature (1)..(25): SEQ ID NO: 4818; WAN0249HH; Start 8; Stop 32
aatccttaaaagagaagagtacgat

SEQ ID NO: 391542 - DNA, 25 bp, Artificial
  probe
  misc_feature (1)..(25): SEQ ID NO: 4818; WAN0249HH; Start 10; Stop 34
tccttaaaagagaagagtacgatta

SEQ ID NO: 391543 - DNA, 25 bp, Artificial
  probe
  misc_feature (1)..(25): SEQ ID NO: 4818; WAN0249HH; Start 7; Stop 31
taatccttaaaagagaagagtacga

SEQ ID NO: 391544 - DNA, 25 bp, Artificial
  probe
  misc_feature (1)..(25): SEQ ID NO: 4818; WAN0249HH; Start 6; Stop 30
ctaatccttaaaagagaagagtacg

SEQ ID NO: 391545 - DNA, 25 bp, Artificial
  probe
  misc_feature (1)..(25): SEQ ID NO: 4818; WAN0249HH; Start 3; Stop 27
caactaatccttaaaagagaagagt

SEQ ID NO: 391546 - DNA, 25 bp, Artificial
  probe
  misc_feature (1)..(25): SEQ ID NO: 4818; WAN0249HH; Start 2; Stop 26
tcaactaatccttaaaagagaagag

SEQ ID NO: 391547 - DNA, 25 bp, Artificial
  probe
  misc_feature (1)..(25): SEQ ID NO: 4818; WAN0249HH; Start 11; Stop 35
ccttaaaagagaagagtacgattaa

SEQ ID NO: 391548 - DNA, 25 bp, Artificial
  probe
  misc_feature (1)..(25): SEQ ID NO: 4818; WAN0249HH; Start 1; Stop 25
ttcaactaatccttaaaagagaaga

SEQ ID NO: 391549 - DNA, 25 bp, Artificial
  probe
  misc_feature (1)..(25): SEQ ID NO: 4818; WAN0249HH; Start 13; Stop 37
ttaaaagagaagagtacgattaagt

SEQ ID NO: 391550 - DNA, 25 bp, Artificial
  probe
  misc_feature (1)..(25): SEQ ID NO: 4818; WAN0249HH; Start 5; Stop 29
actaatccttaaaagagaagagtac

SEQ ID NO: 391551 - DNA, 25 bp, Artificial
  probe
  misc_feature (1)..(25): SEQ ID NO: 4818; WAN0249HH; Start 4; Stop 28
aactaatccttaaaagagaagagta

SEQ ID NO: 391552 - DNA, 25 bp, Artificial
  probe
  misc_feature (1)..(25): SEQ ID NO: 4818; WAN0249HH; Start 12; Stop 36
cttaaaagagaagagtacgattaag

SEQ ID NO: 391553 - DNA, 25 bp, Artificial
  probe
  misc_feature (1)..(25): SEQ ID NO: 4819; WAN024AR2; Start 155; Stop 179
ccagtgataacgaataccatacaga

SEQ ID NO: 391554 - DNA, 25 bp, Artificial
  probe
  misc_feature (1)..(25): SEQ ID NO: 4819; WAN024AR2; Start 147; Stop 171
caatgtgaccagtgataacgaatac

SEQ ID NO: 391555 - DNA, 25 bp, Artificial
  probe
  misc_feature (1)..(25): SEQ ID NO: 4819; WAN024AR2; Start 154; Stop 178
accagtgataacgaataccatacag

SEQ ID NO: 391556 - DNA, 25 bp, Artificial
  probe
  misc_feature (1)..(25): SEQ ID NO: 4819; WAN024AR2; Start 153; Stop 177
gaccagtgataacgaataccataca

SEQ ID NO: 391557 - DNA, 25 bp, Artificial
  probe
  misc_feature (1)..(25): SEQ ID NO: 4819; WAN024AR2; Start 152; Stop 176
tgaccagtgataacgaataccatac

SEQ ID NO: 391558 - DNA, 25 bp, Artificial
  probe
  misc_feature (1)..(25): SEQ ID NO: 4819; WAN024AR2; Start 151; Stop 175
gtgaccagtgataacgaataccata

SEQ ID NO: 391559 - DNA, 25 bp, Artificial
  probe
  misc_feature (1)..(25): SEQ ID NO: 4819; WAN024AR2; Start 148; Stop 172
aatgtgaccagtgataacgaatacc

SEQ ID NO: 391560 - DNA, 25 bp, Artificial
  probe
  misc_feature (1)..(25): SEQ ID NO: 4819; WAN024AR2; Start 156; Stop 180
cagtgataacgaataccatacagaa

SEQ ID NO: 391561 - DNA, 25 bp, Artificial
  probe
  misc_feature (1)..(25): SEQ ID NO: 4819; WAN024AR2; Start 146; Stop 170
tcaatgtgaccagtgataacgaata

SEQ ID NO: 391562 - DNA, 25 bp, Artificial
  probe
  misc_feature (1)..(25): SEQ ID NO: 4819; WAN024AR2; Start 145; Stop 169
ttcaatgtgaccagtgataacgaat

SEQ ID NO: 391563 - DNA, 25 bp, Artificial
  probe
  misc_feature (1)..(25): SEQ ID NO: 4819; WAN024AR2; Start 150; Stop 174
tgtgaccagtgataacgaataccat

SEQ ID NO: 391564 - DNA, 25 bp, Artificial
  probe
  misc_feature (1)..(25): SEQ ID NO: 4819; WAN024AR2; Start 149; Stop 173
atgtgaccagtgataacgaatacca

SEQ ID NO: 391565 - DNA, 25 bp, Artificial
  probe
  misc_feature (1)..(25): SEQ ID NO: 4819; WAN024AR2; Start 163; Stop 187
aacgaataccatacagaatcttcat

SEQ ID NO: 391566 - DNA, 25 bp, Artificial
  probe
  misc_feature (1)..(25): SEQ ID NO: 4819; WAN024AR2; Start 157; Stop 181
agtgataacgaataccatacagaat

SEQ ID NO: 391567 - DNA, 25 bp, Artificial
  probe
  misc_feature (1)..(25): SEQ ID NO: 4819; WAN024AR2; Start 158; Stop 182
gtgataacgaataccatacagaatc

SEQ ID NO: 391568 - DNA, 25 bp, Artificial
  probe
  misc_feature (1)..(25): SEQ ID NO: 4819; WAN024AR2; Start 162; Stop 186
taacgaataccatacagaatcttca

SEQ ID NO: 391569 - DNA, 25 bp, Artificial
  probe
  misc_feature (1)..(25): SEQ ID NO: 4819; WAN024AR2; Start 159; Stop 183
tgataacgaataccatacagaatct

SEQ ID NO: 391570 - DNA, 25 bp, Artificial
  probe
  misc_feature (1)..(25): SEQ ID NO: 4819; WAN024AR2; Start 164; Stop 188
acgaataccatacagaatcttcata

SEQ ID NO: 391571 - DNA, 25 bp, Artificial
  probe
  misc_feature (1)..(25): SEQ ID NO: 4819; WAN024AR2; Start 109; Stop 133
ttgtaaagtctatgttgtaggtgct

SEQ ID NO: 391572 - DNA, 25 bp, Artificial
  probe
  misc_feature (1)..(25): SEQ ID NO: 4819; WAN024AR2; Start 108; Stop 132
gttgtaaagtctatgttgtaggtgc

SEQ ID NO: 391573 - DNA, 25 bp, Artificial
  probe
  misc_feature (1)..(25): SEQ ID NO: 4819; WAN024AR2; Start 110; Stop 134
tgtaaagtctatgttgtaggtgctt

SEQ ID NO: 391574 - DNA, 25 bp, Artificial
  probe
  misc_feature (1)..(25): SEQ ID NO: 4819; WAN024AR2; Start 116; Stop 140
gtctatgttgtaggtgcttatttca

SEQ ID NO: 391575 - DNA, 25 bp, Artificial
  probe
  misc_feature (1)..(25): SEQ ID NO: 4819; WAN024AR2; Start 170; Stop 194
accatacagaatcttcatatacact

SEQ ID NO: 391576 - DNA, 25 bp, Artificial
  probe
  misc_feature (1)..(25): SEQ ID NO: 4819; WAN024AR2; Start 107; Stop 131
tgttgtaaagtctatgttgtaggtg

SEQ ID NO: 391577 - DNA, 25 bp, Artificial
  probe
  misc_feature (1)..(25): SEQ ID NO: 4819; WAN024AR2; Start 106; Stop 130
gtgttgtaaagtctatgttgtaggt

SEQ ID NO: 391578 - DNA, 25 bp, Artificial
  probe
  misc_feature (1)..(25): SEQ ID NO: 4819; WAN024AR2; Start 26; Stop 50
tcctttaacctgatgaatagtgaga

SEQ ID NO: 391579 - DNA, 25 bp, Artificial
  probe
  misc_feature (1)..(25): SEQ ID NO: 4819; WAN024AR2; Start 115; Stop 139
agtctatgttgtaggtgcttatttc

SEQ ID NO: 391580 - DNA, 25 bp, Artificial
  probe
  misc_feature (1)..(25): SEQ ID NO: 4819; WAN024AR2; Start 102; Stop 126
tgaagtgttgtaaagtctatgttgt

SEQ ID NO: 391581 - DNA, 25 bp, Artificial
  probe
  misc_feature (1)..(25): SEQ ID NO: 4819; WAN024AR2; Start 105; Stop 129
agtgttgtaaagtctatgttgtagg

SEQ ID NO: 391582 - DNA, 25 bp, Artificial
  probe
  misc_feature (1)..(25): SEQ ID NO: 4819; WAN024AR2; Start 144; Stop 168
tttcaatgtgaccagtgataacgaa

SEQ ID NO: 391583 - DNA, 25 bp, Artificial
  probe
  misc_feature (1)..(25): SEQ ID NO: 4819; WAN024AR2; Start 111; Stop 135
gtaaagtctatgttgtaggtgctta

SEQ ID NO: 391584 - DNA, 25 bp, Artificial
  probe
  misc_feature (1)..(25): SEQ ID NO: 4819; WAN024AR2; Start 27; Stop 51
cctttaacctgatgaatagtgagat

SEQ ID NO: 391585 - DNA, 25 bp, Artificial
  probe
  misc_feature (1)..(25): SEQ ID NO: 4819; WAN024AR2; Start 25; Stop 49
ttcctttaacctgatgaatagtgag

SEQ ID NO: 391586 - DNA, 25 bp, Artificial
  probe
  misc_feature (1)..(25): SEQ ID NO: 4820; WAN024A7D; Start 39; Stop 63
ctacaactcgcaacaattggaatat

SEQ ID NO: 391587 - DNA, 25 bp, Artificial
  probe
  misc_feature (1)..(25): SEQ ID NO: 4820; WAN024A7D; Start 41; Stop 65
acaactcgcaacaattggaatatta

SEQ ID NO: 391588 - DNA, 25 bp, Artificial
  probe
  misc_feature (1)..(25): SEQ ID NO: 4820; WAN024A7D; Start 40; Stop 64
tacaactcgcaacaattggaatatt

SEQ ID NO: 391589 - DNA, 25 bp, Artificial
  probe
  misc_feature (1)..(25): SEQ ID NO: 4820; WAN024A7D; Start 42; Stop 66
caactcgcaacaattggaatattat

SEQ ID NO: 391590 - DNA, 25 bp, Artificial
  probe
  misc_feature (1)..(25): SEQ ID NO: 4820; WAN024A7D; Start 38; Stop 62
cctacaactcgcaacaattggaata

SEQ ID NO: 391591 - DNA, 25 bp, Artificial
  probe
  misc_feature (1)..(25): SEQ ID NO: 4820; WAN024A7D; Start 89; Stop 113
ttagtatggggttttatcaagcaat

SEQ ID NO: 391592 - DNA, 25 bp, Artificial
  probe
  misc_feature (1)..(25): SEQ ID NO: 4820; WAN024A7D; Start 88; Stop 112
attagtatggggttttatcaagcaa

SEQ ID NO: 391593 - DNA, 25 bp, Artificial
  probe
  misc_feature (1)..(25): SEQ ID NO: 4820; WAN024A7D; Start 109; Stop 133
gcaattgttatctatcacccgattt

SEQ ID NO: 391594 - DNA, 25 bp, Artificial
  probe
  misc_feature (1)..(25): SEQ ID NO: 4820; WAN024A7D; Start 36; Stop 60
tacctacaactcgcaacaattggaa

SEQ ID NO: 391595 - DNA, 25 bp, Artificial
  probe
  misc_feature (1)..(25): SEQ ID NO: 4820; WAN024A7D; Start 108; Stop 132
agcaattgttatctatcacccgatt

SEQ ID NO: 391596 - DNA, 25 bp, Artificial
  probe
  misc_feature (1)..(25): SEQ ID NO: 4820; WAN024A7D; Start 107; Stop 131
aagcaattgttatctatcacccgat

SEQ ID NO: 391597 - DNA, 25 bp, Artificial
  probe
  misc_feature (1)..(25): SEQ ID NO: 4820; WAN024A7D; Start 90; Stop 114
tagtatggggttttatcaagcaatt

SEQ ID NO: 391598 - DNA, 25 bp, Artificial
  probe
  misc_feature (1)..(25): SEQ ID NO: 4820; WAN024A7D; Start 44; Stop 68
actcgcaacaattggaatattataa

SEQ ID NO: 391599 - DNA, 25 bp, Artificial
  probe
  misc_feature (1)..(25): SEQ ID NO: 4820; WAN024A7D; Start 43; Stop 67
aactcgcaacaattggaatattata

SEQ ID NO: 391600 - DNA, 25 bp, Artificial
  probe
  misc_feature (1)..(25): SEQ ID NO: 4820; WAN024A7D; Start 104; Stop 128
atcaagcaattgttatctatcaccc

SEQ ID NO: 391601 - DNA, 25 bp, Artificial
  probe
  misc_feature (1)..(25): SEQ ID NO: 4820; WAN024A7D; Start 103; Stop 127
tatcaagcaattgttatctatcacc

SEQ ID NO: 391602 - DNA, 25 bp, Artificial
  probe
  misc_feature (1)..(25): SEQ ID NO: 4820; WAN024A7D; Start 106; Stop 130
caagcaattgttatctatcacccga

SEQ ID NO: 391603 - DNA, 25 bp, Artificial
  probe
  misc_feature (1)..(25): SEQ ID NO: 4820; WAN024A7D; Start 105; Stop 129
tcaagcaattgttatctatcacccg

SEQ ID NO: 391604 - DNA, 25 bp, Artificial
  probe
  misc_feature (1)..(25): SEQ ID NO: 4820; WAN024A7D; Start 87; Stop 111
tattagtatggggttttatcaagca

SEQ ID NO: 391605 - DNA, 25 bp, Artificial
  probe
  misc_feature (1)..(25): SEQ ID NO: 4820; WAN024A7D; Start 32; Stop 56
tgagtacctacaactcgcaacaatt

SEQ ID NO: 391606 - DNA, 25 bp, Artificial
  probe
  misc_feature (1)..(25): SEQ ID NO: 4820; WAN024A7D; Start 31; Stop 55
ttgagtacctacaactcgcaacaat

SEQ ID NO: 391607 - DNA, 25 bp, Artificial
  probe
  misc_feature (1)..(25): SEQ ID NO: 4820; WAN024A7D; Start 37; Stop 61
acctacaactcgcaacaattggaat

SEQ ID NO: 391608 - DNA, 25 bp, Artificial
  probe
  misc_feature (1)..(25): SEQ ID NO: 4820; WAN024A7D; Start 35; Stop 59
gtacctacaactcgcaacaattgga

SEQ ID NO: 391609 - DNA, 25 bp, Artificial
  probe
  misc_feature (1)..(25): SEQ ID NO: 4820; WAN024A7D; Start 34; Stop 58
agtacctacaactcgcaacaattgg

SEQ ID NO: 391610 - DNA, 25 bp, Artificial
  probe
  misc_feature (1)..(25): SEQ ID NO: 4820; WAN024A7D; Start 86; Stop 110
ctattagtatggggttttatcaagc

SEQ ID NO: 391611 - DNA, 25 bp, Artificial
  probe
  misc_feature (1)..(25): SEQ ID NO: 4820; WAN024A7D; Start 27; Stop 51
ttatttgagtacctacaactcgcaa

SEQ ID NO: 391612 - DNA, 25 bp, Artificial
  probe
  misc_feature (1)..(25): SEQ ID NO: 4820; WAN024A7D; Start 26; Stop 50
attatttgagtacctacaactcgca

SEQ ID NO: 391613 - DNA, 25 bp, Artificial
  probe
  misc_feature (1)..(25): SEQ ID NO: 4820; WAN024A7D; Start 25; Stop 49
gattatttgagtacctacaactcgc

SEQ ID NO: 391614 - DNA, 25 bp, Artificial
  probe
  misc_feature (1)..(25): SEQ ID NO: 4820; WAN024A7D; Start 28; Stop 52
tatttgagtacctacaactcgcaac

SEQ ID NO: 391615 - DNA, 25 bp, Artificial
  probe
  misc_feature (1)..(25): SEQ ID NO: 4820; WAN024A7D; Start 69; Stop 93
ttcccaaaaccattctactattagt

SEQ ID NO: 391616 - DNA, 25 bp, Artificial
  probe
  misc_feature (1)..(25): SEQ ID NO: 4820; WAN024A7D; Start 24; Stop 48
agattatttgagtacctacaactcg

SEQ ID NO: 391617 - DNA, 25 bp, Artificial
  probe
  misc_feature (1)..(25): SEQ ID NO: 4820; WAN024A7D; Start 45; Stop 69
ctcgcaacaattggaatattataat

SEQ ID NO: 391618 - DNA, 25 bp, Artificial
  probe
  misc_feature (1)..(25): SEQ ID NO: 4820; WAN024A7D; Start 68; Stop 92
attcccaaaaccattctactattag

SEQ ID NO: 391619 - DNA, 25 bp, Artificial
  probe
  misc_feature (1)..(25): SEQ ID NO: 4821; WAN024AF4; Start 9; Stop 33
atccaaaagaatagcgaaaatcagt

SEQ ID NO: 391620 - DNA, 25 bp, Artificial
  probe
  misc_feature (1)..(25): SEQ ID NO: 4821; WAN024AF4; Start 2; Stop 26
tcagaaaatccaaaagaatagcgaa

SEQ ID NO: 391621 - DNA, 25 bp, Artificial
  probe
  misc_feature (1)..(25): SEQ ID NO: 4821; WAN024AF4; Start 10; Stop 34
tccaaaagaatagcgaaaatcagta

SEQ ID NO: 391622 - DNA, 25 bp, Artificial
  probe
  misc_feature (1)..(25): SEQ ID NO: 4821; WAN024AF4; Start 1; Stop 25
ttcagaaaatccaaaagaatagcga

SEQ ID NO: 391623 - DNA, 25 bp, Artificial
  probe
  misc_feature (1)..(25): SEQ ID NO: 4821; WAN024AF4; Start 3; Stop 27
cagaaaatccaaaagaatagcgaaa

SEQ ID NO: 391624 - DNA, 25 bp, Artificial
  probe
  misc_feature (1)..(25): SEQ ID NO: 4821; WAN024AF4; Start 8; Stop 32
aatccaaaagaatagcgaaaatcag

SEQ ID NO: 391625 - DNA, 25 bp, Artificial
  probe
  misc_feature (1)..(25): SEQ ID NO: 4821; WAN024AF4; Start 11; Stop 35
ccaaaagaatagcgaaaatcagtaa

SEQ ID NO: 391626 - DNA, 25 bp, Artificial
  probe
  misc_feature (1)..(25): SEQ ID NO: 4821; WAN024AF4; Start 7; Stop 31
aaatccaaaagaatagcgaaaatca

SEQ ID NO: 391627 - DNA, 25 bp, Artificial
  probe
  misc_feature (1)..(25): SEQ ID NO: 4821; WAN024AF4; Start 4; Stop 28
agaaaatccaaaagaatagcgaaaa

SEQ ID NO: 391628 - DNA, 25 bp, Artificial
  probe
  misc_feature (1)..(25): SEQ ID NO: 4821; WAN024AF4; Start 6; Stop 30
aaaatccaaaagaatagcgaaaatc

SEQ ID NO: 391629 - DNA, 25 bp, Artificial
  probe
  misc_feature (1)..(25): SEQ ID NO: 4821; WAN024AF4; Start 5; Stop 29
gaaaatccaaaagaatagcgaaaat

SEQ ID NO: 391630 - DNA, 25 bp, Artificial
  probe
  misc_feature (1)..(25): SEQ ID NO: 4821; WAN024AF4; Start 12; Stop 36
caaaagaatagcgaaaatcagtaaa

SEQ ID NO: 391631 - DNA, 25 bp, Artificial
  probe
  misc_feature (1)..(25): SEQ ID NO: 4821; WAN024AF4; Start 13; Stop 37
aaaagaatagcgaaaatcagtaaaa

SEQ ID NO: 391632 - DNA, 25 bp, Artificial
  probe
  misc_feature (1)..(25): SEQ ID NO: 4822; WAN0249NL; Start 3; Stop 27
cagtcctccattacgaacattctaa

SEQ ID NO: 391633 - DNA, 25 bp, Artificial
  probe
  misc_feature (1)..(25): SEQ ID NO: 4822; WAN0249NL; Start 2; Stop 26
tcagtcctccattacgaacattcta

SEQ ID NO: 391634 - DNA, 25 bp, Artificial
  probe
  misc_feature (1)..(25): SEQ ID NO: 4822; WAN0249NL; Start 4; Stop 28
agtcctccattacgaacattctaat

SEQ ID NO: 391635 - DNA, 25 bp, Artificial
  probe
  misc_feature (1)..(25): SEQ ID NO: 4822; WAN0249NL; Start 1; Stop 25
ttcagtcctccattacgaacattct

SEQ ID NO: 391636 - DNA, 25 bp, Artificial
  probe
  misc_feature (1)..(25): SEQ ID NO: 4822; WAN0249NL; Start 5; Stop 29
gtcctccattacgaacattctaata

SEQ ID NO: 391637 - DNA, 25 bp, Artificial
  probe
  misc_feature (1)..(25): SEQ ID NO: 4822; WAN0249NL; Start 6; Stop 30
tcctccattacgaacattctaatat

SEQ ID NO: 391638 - DNA, 25 bp, Artificial
  probe
  misc_feature (1)..(25): SEQ ID NO: 4822; WAN0249NL; Start 7; Stop 31
cctccattacgaacattctaatatt

SEQ ID NO: 391639 - DNA, 25 bp, Artificial
  probe
  misc_feature (1)..(25): SEQ ID NO: 4822; WAN0249NL; Start 76; Stop 100
tatttaagatccacaaattcacaaa

SEQ ID NO: 391640 - DNA, 25 bp, Artificial
  probe
  misc_feature (1)..(25): SEQ ID NO: 4822; WAN0249NL; Start 75; Stop 99
ttatttaagatccacaaattcacaa

SEQ ID NO: 391641 - DNA, 25 bp, Artificial
  probe
  misc_feature (1)..(25): SEQ ID NO: 4822; WAN0249NL; Start 74; Stop 98
attatttaagatccacaaattcaca

SEQ ID NO: 391642 - DNA, 25 bp, Artificial
  probe
  misc_feature (1)..(25): SEQ ID NO: 4822; WAN0249NL; Start 78; Stop 102
tttaagatccacaaattcacaaaat

SEQ ID NO: 391643 - DNA, 25 bp, Artificial
  probe
  misc_feature (1)..(25): SEQ ID NO: 4822; WAN0249NL; Start 81; Stop 105
aagatccacaaattcacaaaattaa

SEQ ID NO: 391644 - DNA, 25 bp, Artificial
  probe
  misc_feature (1)..(25): SEQ ID NO: 4822; WAN0249NL; Start 79; Stop 103
ttaagatccacaaattcacaaaatt

SEQ ID NO: 391645 - DNA, 25 bp, Artificial
  probe
  misc_feature (1)..(25): SEQ ID NO: 4822; WAN0249NL; Start 77; Stop 101
atttaagatccacaaattcacaaaa

SEQ ID NO: 391646 - DNA, 25 bp, Artificial
  probe
  misc_feature (1)..(25): SEQ ID NO: 4822; WAN0249NL; Start 82; Stop 106
agatccacaaattcacaaaattaat

SEQ ID NO: 391647 - DNA, 25 bp, Artificial
  probe
  misc_feature (1)..(25): SEQ ID NO: 4822; WAN0249NL; Start 80; Stop 104
taagatccacaaattcacaaaatta

SEQ ID NO: 391648 - DNA, 25 bp, Artificial
  probe
  misc_feature (1)..(25): SEQ ID NO: 4822; WAN0249NL; Start 83; Stop 107
gatccacaaattcacaaaattaatt

SEQ ID NO: 391649 - DNA, 25 bp, Artificial
  probe
  misc_feature (1)..(25): SEQ ID NO: 4823; WAN0249MF; Start 73; Stop 97
agttagtatcttagtcctgctctat

SEQ ID NO: 391650 - DNA, 25 bp, Artificial
  probe
  misc_feature (1)..(25): SEQ ID NO: 4823; WAN0249MF; Start 72; Stop 96
aagttagtatcttagtcctgctcta

SEQ ID NO: 391651 - DNA, 25 bp, Artificial
  probe
  misc_feature (1)..(25): SEQ ID NO: 4823; WAN0249MF; Start 74; Stop 98
gttagtatcttagtcctgctctatc

SEQ ID NO: 391652 - DNA, 25 bp, Artificial
  probe
  misc_feature (1)..(25): SEQ ID NO: 4823; WAN0249MF; Start 77; Stop 101
agtatcttagtcctgctctatctta

SEQ ID NO: 391653 - DNA, 25 bp, Artificial
  probe
  misc_feature (1)..(25): SEQ ID NO: 4823; WAN0249MF; Start 76; Stop 100
tagtatcttagtcctgctctatctt

SEQ ID NO: 391654 - DNA, 25 bp, Artificial
  probe
  misc_feature (1)..(25): SEQ ID NO: 4823; WAN0249MF; Start 75; Stop 99
ttagtatcttagtcctgctctatct

SEQ ID NO: 391655 - DNA, 25 bp, Artificial
  probe
  misc_feature (1)..(25): SEQ ID NO: 4823; WAN0249MF; Start 78; Stop 102
gtatcttagtcctgctctatcttag

SEQ ID NO: 391656 - DNA, 25 bp, Artificial
  probe
  misc_feature (1)..(25): SEQ ID NO: 4823; WAN0249MF; Start 2; Stop 26
tcagttccttctttctttcatccat

SEQ ID NO: 391657 - DNA, 25 bp, Artificial
  probe
  misc_feature (1)..(25): SEQ ID NO: 4823; WAN0249MF; Start 38; Stop 62
ttataggagaaggatagtgggaagg

SEQ ID NO: 391658 - DNA, 25 bp, Artificial
  probe
  misc_feature (1)..(25): SEQ ID NO: 4823; WAN0249MF; Start 1; Stop 25
ttcagttccttctttctttcatcca

SEQ ID NO: 391659 - DNA, 25 bp, Artificial
  probe
  misc_feature (1)..(25): SEQ ID NO: 4823; WAN0249MF; Start 3; Stop 27
cagttccttctttctttcatccatt

SEQ ID NO: 391660 - DNA, 25 bp, Artificial
  probe
  misc_feature (1)..(25): SEQ ID NO: 4823; WAN0249MF; Start 71; Stop 95
taagttagtatcttagtcctgctct

SEQ ID NO: 391661 - DNA, 25 bp, Artificial
  probe
  misc_feature (1)..(25): SEQ ID NO: 4823; WAN0249MF; Start 50; Stop 74
gatagtgggaaggtggatttctaag

SEQ ID NO: 391662 - DNA, 25 bp, Artificial
  probe
  misc_feature (1)..(25): SEQ ID NO: 4823; WAN0249MF; Start 39; Stop 63
tataggagaaggatagtgggaaggt

SEQ ID NO: 391663 - DNA, 25 bp, Artificial
  probe
  misc_feature (1)..(25): SEQ ID NO: 4823; WAN0249MF; Start 37; Stop 61
tttataggagaaggatagtgggaag

SEQ ID NO: 391664 - DNA, 25 bp, Artificial
  probe
  misc_feature (1)..(25): SEQ ID NO: 4823; WAN0249MF; Start 4; Stop 28
agttccttctttctttcatccattt

SEQ ID NO: 391665 - DNA, 25 bp, Artificial
  probe
  misc_feature (1)..(25): SEQ ID NO: 4823; WAN0249MF; Start 51; Stop 75
atagtgggaaggtggatttctaagt

SEQ ID NO: 391666 - DNA, 25 bp, Artificial
  probe
  misc_feature (1)..(25): SEQ ID NO: 4823; WAN0249MF; Start 56; Stop 80
gggaaggtggatttctaagttagta

SEQ ID NO: 391667 - DNA, 25 bp, Artificial
  probe
  misc_feature (1)..(25): SEQ ID NO: 4823; WAN0249MF; Start 53; Stop 77
agtgggaaggtggatttctaagtta

SEQ ID NO: 391668 - DNA, 25 bp, Artificial
  probe
  misc_feature (1)..(25): SEQ ID NO: 4823; WAN0249MF; Start 52; Stop 76
tagtgggaaggtggatttctaagtt

SEQ ID NO: 391669 - DNA, 25 bp, Artificial
  probe
  misc_feature (1)..(25): SEQ ID NO: 4823; WAN0249MF; Start 80; Stop 104
atcttagtcctgctctatcttagaa

SEQ ID NO: 391670 - DNA, 25 bp, Artificial
  probe
  misc_feature (1)..(25): SEQ ID NO: 4823; WAN0249MF; Start 54; Stop 78
gtgggaaggtggatttctaagttag

SEQ ID NO: 391671 - DNA, 25 bp, Artificial
  probe
  misc_feature (1)..(25): SEQ ID NO: 4823; WAN0249MF; Start 55; Stop 79
tgggaaggtggatttctaagttagt

SEQ ID NO: 391672 - DNA, 25 bp, Artificial
  probe
  misc_feature (1)..(25): SEQ ID NO: 4823; WAN0249MF; Start 49; Stop 73
ggatagtgggaaggtggatttctaa

SEQ ID NO: 391673 - DNA, 25 bp, Artificial
  probe
  misc_feature (1)..(25): SEQ ID NO: 4823; WAN0249MF; Start 48; Stop 72
aggatagtgggaaggtggatttcta

SEQ ID NO: 391674 - DNA, 25 bp, Artificial
  probe
  misc_feature (1)..(25): SEQ ID NO: 4823; WAN0249MF; Start 79; Stop 103
tatcttagtcctgctctatcttaga

SEQ ID NO: 391675 - DNA, 25 bp, Artificial
  probe
  misc_feature (1)..(25): SEQ ID NO: 4823; WAN0249MF; Start 40; Stop 64
ataggagaaggatagtgggaaggtg

SEQ ID NO: 391676 - DNA, 25 bp, Artificial
  probe
  misc_feature (1)..(25): SEQ ID NO: 4823; WAN0249MF; Start 57; Stop 81
ggaaggtggatttctaagttagtat

SEQ ID NO: 391677 - DNA, 25 bp, Artificial
  probe
  misc_feature (1)..(25): SEQ ID NO: 4823; WAN0249MF; Start 46; Stop 70
gaaggatagtgggaaggtggatttc

SEQ ID NO: 391678 - DNA, 25 bp, Artificial
  probe
  misc_feature (1)..(25): SEQ ID NO: 4823; WAN0249MF; Start 45; Stop 69
agaaggatagtgggaaggtggattt

SEQ ID NO: 391679 - DNA, 25 bp, Artificial
  probe
  misc_feature (1)..(25): SEQ ID NO: 4823; WAN0249MF; Start 81; Stop 105
tcttagtcctgctctatcttagaaa

SEQ ID NO: 391680 - DNA, 25 bp, Artificial
  probe
  misc_feature (1)..(25): SEQ ID NO: 4823; WAN0249MF; Start 47; Stop 71
aaggatagtgggaaggtggatttct

SEQ ID NO: 391681 - DNA, 25 bp, Artificial
  probe
  misc_feature (1)..(25): SEQ ID NO: 4823; WAN0249MF; Start 44; Stop 68
gagaaggatagtgggaaggtggatt

SEQ ID NO: 391682 - DNA, 25 bp, Artificial
  probe
  misc_feature (1)..(25): SEQ ID NO: 4824; WAN024AC2; Start 147; Stop 171
atgaaattctcccaaagtcagagtt

SEQ ID NO: 391683 - DNA, 25 bp, Artificial
  probe
  misc_feature (1)..(25): SEQ ID NO: 4824; WAN024AC2; Start 146; Stop 170
aatgaaattctcccaaagtcagagt

SEQ ID NO: 391684 - DNA, 25 bp, Artificial
  probe
  misc_feature (1)..(25): SEQ ID NO: 4824; WAN024AC2; Start 148; Stop 172
tgaaattctcccaaagtcagagttt

SEQ ID NO: 391685 - DNA, 25 bp, Artificial
  probe
  misc_feature (1)..(25): SEQ ID NO: 4824; WAN024AC2; Start 145; Stop 169
aaatgaaattctcccaaagtcagag

SEQ ID NO: 391686 - DNA, 25 bp, Artificial
  probe
  misc_feature (1)..(25): SEQ ID NO: 4824; WAN024AC2; Start 149; Stop 173
gaaattctcccaaagtcagagtttt

SEQ ID NO: 391687 - DNA, 25 bp, Artificial
  probe
  misc_feature (1)..(25): SEQ ID NO: 4824; WAN024AC2; Start 144; Stop 168
aaaatgaaattctcccaaagtcaga

SEQ ID NO: 391688 - DNA, 25 bp, Artificial
  probe
  misc_feature (1)..(25): SEQ ID NO: 4824; WAN024AC2; Start 155; Stop 179
ctcccaaagtcagagttttatttct

SEQ ID NO: 391689 - DNA, 25 bp, Artificial
  probe
  misc_feature (1)..(25): SEQ ID NO: 4824; WAN024AC2; Start 154; Stop 178
tctcccaaagtcagagttttatttc

SEQ ID NO: 391690 - DNA, 25 bp, Artificial
  probe
  misc_feature (1)..(25): SEQ ID NO: 4824; WAN024AC2; Start 153; Stop 177
ttctcccaaagtcagagttttattt

SEQ ID NO: 391691 - DNA, 25 bp, Artificial
  probe
  misc_feature (1)..(25): SEQ ID NO: 4824; WAN024AC2; Start 150; Stop 174
aaattctcccaaagtcagagtttta

SEQ ID NO: 391692 - DNA, 25 bp, Artificial
  probe
  misc_feature (1)..(25): SEQ ID NO: 4824; WAN024AC2; Start 152; Stop 176
attctcccaaagtcagagttttatt

SEQ ID NO: 391693 - DNA, 25 bp, Artificial
  probe
  misc_feature (1)..(25): SEQ ID NO: 4824; WAN024AC2; Start 151; Stop 175
aattctcccaaagtcagagttttat

SEQ ID NO: 391694 - DNA, 25 bp, Artificial
  probe
  misc_feature (1)..(25): SEQ ID NO: 4824; WAN024AC2; Start 156; Stop 180
tcccaaagtcagagttttatttcta

SEQ ID NO: 391695 - DNA, 25 bp, Artificial
  probe
  misc_feature (1)..(25): SEQ ID NO: 4824; WAN024AC2; Start 143; Stop 167
taaaatgaaattctcccaaagtcag

SEQ ID NO: 391696 - DNA, 25 bp, Artificial
  probe
  misc_feature (1)..(25): SEQ ID NO: 4824; WAN024AC2; Start 157; Stop 181
cccaaagtcagagttttatttctaa

SEQ ID NO: 391697 - DNA, 25 bp, Artificial
  probe
  misc_feature (1)..(25): SEQ ID NO: 4824; WAN024AC2; Start 142; Stop 166
ataaaatgaaattctcccaaagtca

SEQ ID NO: 391698 - DNA, 25 bp, Artificial
  probe
  misc_feature (1)..(25): SEQ ID NO: 4824; WAN024AC2; Start 177; Stop 201
tctaacttttgagagaacttcattt

SEQ ID NO: 391699 - DNA, 25 bp, Artificial
  probe
  misc_feature (1)..(25): SEQ ID NO: 4824; WAN024AC2; Start 158; Stop 182
ccaaagtcagagttttatttctaac

SEQ ID NO: 391700 - DNA, 25 bp, Artificial
  probe
  misc_feature (1)..(25): SEQ ID NO: 4824; WAN024AC2; Start 141; Stop 165
aataaaatgaaattctcccaaagtc

SEQ ID NO: 391701 - DNA, 25 bp, Artificial
  probe
  misc_feature (1)..(25): SEQ ID NO: 4824; WAN024AC2; Start 178; Stop 202
ctaacttttgagagaacttcatttt

SEQ ID NO: 391702 - DNA, 25 bp, Artificial
  probe
  misc_feature (1)..(25): SEQ ID NO: 4824; WAN024AC2; Start 176; Stop 200
ttctaacttttgagagaacttcatt

SEQ ID NO: 391703 - DNA, 25 bp, Artificial
  probe
  misc_feature (1)..(25): SEQ ID NO: 4824; WAN024AC2; Start 175; Stop 199
tttctaacttttgagagaacttcat

SEQ ID NO: 391704 - DNA, 25 bp, Artificial
  probe
  misc_feature (1)..(25): SEQ ID NO: 4824; WAN024AC2; Start 174; Stop 198
atttctaacttttgagagaacttca

SEQ ID NO: 391705 - DNA, 25 bp, Artificial
  probe
  misc_feature (1)..(25): SEQ ID NO: 4824; WAN024AC2; Start 140; Stop 164
taataaaatgaaattctcccaaagt

SEQ ID NO: 391706 - DNA, 25 bp, Artificial
  probe
  misc_feature (1)..(25): SEQ ID NO: 4824; WAN024AC2; Start 159; Stop 183
caaagtcagagttttatttctaact

SEQ ID NO: 391707 - DNA, 25 bp, Artificial
  probe
  misc_feature (1)..(25): SEQ ID NO: 4824; WAN024AC2; Start 173; Stop 197
tatttctaacttttgagagaacttc

SEQ ID NO: 391708 - DNA, 25 bp, Artificial
  probe
  misc_feature (1)..(25): SEQ ID NO: 4824; WAN024AC2; Start 163; Stop 187
gtcagagttttatttctaacttttg

SEQ ID NO: 391709 - DNA, 25 bp, Artificial
  probe
  misc_feature (1)..(25): SEQ ID NO: 4825; WAN024AFQ; Start 135; Stop 159
aaacaagcataattgactatccttt

SEQ ID NO: 391710 - DNA, 25 bp, Artificial
  probe
  misc_feature (1)..(25): SEQ ID NO: 4825; WAN024AFQ; Start 133; Stop 157
gtaaacaagcataattgactatcct

SEQ ID NO: 391711 - DNA, 25 bp, Artificial
  probe
  misc_feature (1)..(25): SEQ ID NO: 4825; WAN024AFQ; Start 132; Stop 156
agtaaacaagcataattgactatcc

SEQ ID NO: 391712 - DNA, 25 bp, Artificial
  probe
  misc_feature (1)..(25): SEQ ID NO: 4825; WAN024AFQ; Start 128; Stop 152
agttagtaaacaagcataattgact

SEQ ID NO: 391713 - DNA, 25 bp, Artificial
  probe
  misc_feature (1)..(25): SEQ ID NO: 4825; WAN024AFQ; Start 134; Stop 158
taaacaagcataattgactatcctt

SEQ ID NO: 391714 - DNA, 25 bp, Artificial
  probe
  misc_feature (1)..(25): SEQ ID NO: 4825; WAN024AFQ; Start 136; Stop 160
aacaagcataattgactatcctttt

SEQ ID NO: 391715 - DNA, 25 bp, Artificial
  probe
  misc_feature (1)..(25): SEQ ID NO: 4825; WAN024AFQ; Start 127; Stop 151
tagttagtaaacaagcataattgac

SEQ ID NO: 391716 - DNA, 25 bp, Artificial
  probe
  misc_feature (1)..(25): SEQ ID NO: 4825; WAN024AFQ; Start 129; Stop 153
gttagtaaacaagcataattgacta

SEQ ID NO: 391717 - DNA, 25 bp, Artificial
  probe
  misc_feature (1)..(25): SEQ ID NO: 4825; WAN024AFQ; Start 68; Stop 92
tcaggcttctctgatatagagtttt

SEQ ID NO: 391718 - DNA, 25 bp, Artificial
  probe
  misc_feature (1)..(25): SEQ ID NO: 4825; WAN024AFQ; Start 57; Stop 81
aaaactctatatcaggcttctctga

SEQ ID NO: 391719 - DNA, 25 bp, Artificial
  probe
  misc_feature (1)..(25): SEQ ID NO: 4825; WAN024AFQ; Start 85; Stop 109
agagttttatgtaaacaacctcaat

SEQ ID NO: 391720 - DNA, 25 bp, Artificial
  probe
  misc_feature (1)..(25): SEQ ID NO: 4825; WAN024AFQ; Start 69; Stop 93
caggcttctctgatatagagtttta

SEQ ID NO: 391721 - DNA, 25 bp, Artificial
  probe
  misc_feature (1)..(25): SEQ ID NO: 4825; WAN024AFQ; Start 131; Stop 155
tagtaaacaagcataattgactatc

SEQ ID NO: 391722 - DNA, 25 bp, Artificial
  probe
  misc_feature (1)..(25): SEQ ID NO: 4825; WAN024AFQ; Start 84; Stop 108
tagagttttatgtaaacaacctcaa

SEQ ID NO: 391723 - DNA, 25 bp, Artificial
  probe
  misc_feature (1)..(25): SEQ ID NO: 4825; WAN024AFQ; Start 71; Stop 95
ggcttctctgatatagagttttatg

SEQ ID NO: 391724 - DNA, 25 bp, Artificial
  probe
  misc_feature (1)..(25): SEQ ID NO: 4825; WAN024AFQ; Start 83; Stop 107
atagagttttatgtaaacaacctca

SEQ ID NO: 391725 - DNA, 25 bp, Artificial
  probe
  misc_feature (1)..(25): SEQ ID NO: 4825; WAN024AFQ; Start 70; Stop 94
aggcttctctgatatagagttttat

SEQ ID NO: 391726 - DNA, 25 bp, Artificial
  probe
  misc_feature (1)..(25): SEQ ID NO: 4825; WAN024AFQ; Start 72; Stop 96
gcttctctgatatagagttttatgt

SEQ ID NO: 391727 - DNA, 25 bp, Artificial
  probe
  misc_feature (1)..(25): SEQ ID NO: 4826; WAN024APH; Start 13; Stop 37
taaaatgaagtctgaaataagcgga

SEQ ID NO: 391728 - DNA, 25 bp, Artificial
  probe
  misc_feature (1)..(25): SEQ ID NO: 4826; WAN024APH; Start 12; Stop 36
gtaaaatgaagtctgaaataagcgg

SEQ ID NO: 391729 - DNA, 25 bp, Artificial
  probe
  misc_feature (1)..(25): SEQ ID NO: 4826; WAN024APH; Start 11; Stop 35
agtaaaatgaagtctgaaataagcg

SEQ ID NO: 391730 - DNA, 25 bp, Artificial
  probe
  misc_feature (1)..(25): SEQ ID NO: 4826; WAN024APH; Start 14; Stop 38
aaaatgaagtctgaaataagcggac

SEQ ID NO: 391731 - DNA, 25 bp, Artificial
  probe
  misc_feature (1)..(25): SEQ ID NO: 4826; WAN024APH; Start 15; Stop 39
aaatgaagtctgaaataagcggact

SEQ ID NO: 391732 - DNA, 25 bp, Artificial
  probe
  misc_feature (1)..(25): SEQ ID NO: 4826; WAN024APH; Start 22; Stop 46
gtctgaaataagcggacttcgtttt

SEQ ID NO: 391733 - DNA, 25 bp, Artificial
  probe
  misc_feature (1)..(25): SEQ ID NO: 4826; WAN024APH; Start 10; Stop 34
gagtaaaatgaagtctgaaataagc

SEQ ID NO: 391734 - DNA, 25 bp, Artificial
  probe
  misc_feature (1)..(25): SEQ ID NO: 4826; WAN024APH; Start 6; Stop 30
atctgagtaaaatgaagtctgaaat

SEQ ID NO: 391735 - DNA, 25 bp, Artificial
  probe
  misc_feature (1)..(25): SEQ ID NO: 4826; WAN024APH; Start 3; Stop 27
catatctgagtaaaatgaagtctga

SEQ ID NO: 391736 - DNA, 25 bp, Artificial
  probe
  misc_feature (1)..(25): SEQ ID NO: 4826; WAN024APH; Start 21; Stop 45
agtctgaaataagcggacttcgttt

SEQ ID NO: 391737 - DNA, 25 bp, Artificial
  probe
  misc_feature (1)..(25): SEQ ID NO: 4826; WAN024APH; Start 7; Stop 31
tctgagtaaaatgaagtctgaaata

SEQ ID NO: 391738 - DNA, 25 bp, Artificial
  probe
  misc_feature (1)..(25): SEQ ID NO: 4826; WAN024APH; Start 5; Stop 29
tatctgagtaaaatgaagtctgaaa

SEQ ID NO: 391739 - DNA, 25 bp, Artificial
  probe
  misc_feature (1)..(25): SEQ ID NO: 4826; WAN024APH; Start 4; Stop 28
atatctgagtaaaatgaagtctgaa

SEQ ID NO: 391740 - DNA, 25 bp, Artificial
  probe
  misc_feature (1)..(25): SEQ ID NO: 4826; WAN024APH; Start 65; Stop 89
cgcttttatgttatactgaaactaa

SEQ ID NO: 391741 - DNA, 25 bp, Artificial
  probe
  misc_feature (1)..(25): SEQ ID NO: 4826; WAN024APH; Start 9; Stop 33
tgagtaaaatgaagtctgaaataag

SEQ ID NO: 391742 - DNA, 25 bp, Artificial
  probe
  misc_feature (1)..(25): SEQ ID NO: 4826; WAN024APH; Start 8; Stop 32
ctgagtaaaatgaagtctgaaataa

SEQ ID NO: 391743 - DNA, 25 bp, Artificial
  probe
  misc_feature (1)..(25): SEQ ID NO: 4826; WAN024APH; Start 64; Stop 88
gcgcttttatgttatactgaaacta

SEQ ID NO: 391744 - DNA, 25 bp, Artificial
  probe
  misc_feature (1)..(25): SEQ ID NO: 4826; WAN024APH; Start 2; Stop 26
tcatatctgagtaaaatgaagtctg

SEQ ID NO: 391745 - DNA, 25 bp, Artificial
  probe
  misc_feature (1)..(25): SEQ ID NO: 4826; WAN024APH; Start 1; Stop 25
ttcatatctgagtaaaatgaagtct

SEQ ID NO: 391746 - DNA, 25 bp, Artificial
  probe
  misc_feature (1)..(25): SEQ ID NO: 4827; WAN024AJ8; Start 39; Stop 63
tacaatagtacaaaattagaggagg

SEQ ID NO: 391747 - DNA, 25 bp, Artificial
  probe
  misc_feature (1)..(25): SEQ ID NO: 4828; WAN0249JC; Start 2; Stop 26
tcattacagagatatgtgagtgtgt

SEQ ID NO: 391748 - DNA, 25 bp, Artificial
  probe
  misc_feature (1)..(25): SEQ ID NO: 4828; WAN0249JC; Start 1; Stop 25
ttcattacagagatatgtgagtgtg

SEQ ID NO: 391749 - DNA, 25 bp, Artificial
  probe
  misc_feature (1)..(25): SEQ ID NO: 4828; WAN0249JC; Start 3; Stop 27
cattacagagatatgtgagtgtgta

SEQ ID NO: 391750 - DNA, 25 bp, Artificial
  probe
  misc_feature (1)..(25): SEQ ID NO: 4828; WAN0249JC; Start 5; Stop 29
ttacagagatatgtgagtgtgtatt

SEQ ID NO: 391751 - DNA, 25 bp, Artificial
  probe
  misc_feature (1)..(25): SEQ ID NO: 4828; WAN0249JC; Start 4; Stop 28
attacagagatatgtgagtgtgtat

SEQ ID NO: 391752 - DNA, 25 bp, Artificial
  probe
  misc_feature (1)..(25): SEQ ID NO: 4828; WAN0249JC; Start 6; Stop 30
tacagagatatgtgagtgtgtattt

SEQ ID NO: 391753 - DNA, 25 bp, Artificial
  probe
  misc_feature (1)..(25): SEQ ID NO: 4828; WAN0249JC; Start 7; Stop 31
acagagatatgtgagtgtgtatttt

SEQ ID NO: 391754 - DNA, 25 bp, Artificial
  probe
  misc_feature (1)..(25): SEQ ID NO: 4829; WAN0249YR; Start 304; Stop 328
catatacatcagtccacctccatac

SEQ ID NO: 391755 - DNA, 25 bp, Artificial
  probe
  misc_feature (1)..(25): SEQ ID NO: 4829; WAN0249YR; Start 303; Stop 327
tcatatacatcagtccacctccata

SEQ ID NO: 391756 - DNA, 25 bp, Artificial
  probe
  misc_feature (1)..(25): SEQ ID NO: 4829; WAN0249YR; Start 302; Stop 326
ctcatatacatcagtccacctccat

SEQ ID NO: 391757 - DNA, 25 bp, Artificial
  probe
  misc_feature (1)..(25): SEQ ID NO: 4829; WAN0249YR; Start 308; Stop 332
tacatcagtccacctccatacttat

SEQ ID NO: 391758 - DNA, 25 bp, Artificial
  probe
  misc_feature (1)..(25): SEQ ID NO: 4829; WAN0249YR; Start 307; Stop 331
atacatcagtccacctccatactta

SEQ ID NO: 391759 - DNA, 25 bp, Artificial
  probe
  misc_feature (1)..(25): SEQ ID NO: 4829; WAN0249YR; Start 306; Stop 330
tatacatcagtccacctccatactt

SEQ ID NO: 391760 - DNA, 25 bp, Artificial
  probe
  misc_feature (1)..(25): SEQ ID NO: 4829; WAN0249YR; Start 305; Stop 329
atatacatcagtccacctccatact

SEQ ID NO: 391761 - DNA, 25 bp, Artificial
  probe
  misc_feature (1)..(25): SEQ ID NO: 4829; WAN0249YR; Start 300; Stop 324
tactcatatacatcagtccacctcc

SEQ ID NO: 391762 - DNA, 25 bp, Artificial
  probe
  misc_feature (1)..(25): SEQ ID NO: 4829; WAN0249YR; Start 298; Stop 322
gttactcatatacatcagtccacct

SEQ ID NO: 391763 - DNA, 25 bp, Artificial
  probe
  misc_feature (1)..(25): SEQ ID NO: 4829; WAN0249YR; Start 297; Stop 321
agttactcatatacatcagtccacc

SEQ ID NO: 391764 - DNA, 25 bp, Artificial
  probe
  misc_feature (1)..(25): SEQ ID NO: 4829; WAN0249YR; Start 299; Stop 323
ttactcatatacatcagtccacctc

SEQ ID NO: 391765 - DNA, 25 bp, Artificial
  probe
  misc_feature (1)..(25): SEQ ID NO: 4829; WAN0249YR; Start 310; Stop 334
catcagtccacctccatacttatgt

SEQ ID NO: 391766 - DNA, 25 bp, Artificial
  probe
  misc_feature (1)..(25): SEQ ID NO: 4829; WAN0249YR; Start 309; Stop 333
acatcagtccacctccatacttatg

SEQ ID NO: 391767 - DNA, 25 bp, Artificial
  probe
  misc_feature (1)..(25): SEQ ID NO: 4829; WAN0249YR; Start 195; Stop 219
aacctgataagtcttgattcctaat

SEQ ID NO: 391768 - DNA, 25 bp, Artificial
  probe
  misc_feature (1)..(25): SEQ ID NO: 4829; WAN0249YR; Start 301; Stop 325
actcatatacatcagtccacctcca

SEQ ID NO: 391769 - DNA, 25 bp, Artificial
  probe
  misc_feature (1)..(25): SEQ ID NO: 4829; WAN0249YR; Start 196; Stop 220
acctgataagtcttgattcctaatt

SEQ ID NO: 391770 - DNA, 25 bp, Artificial
  probe
  misc_feature (1)..(25): SEQ ID NO: 4829; WAN0249YR; Start 311; Stop 335
atcagtccacctccatacttatgtg

SEQ ID NO: 391771 - DNA, 25 bp, Artificial
  probe
  misc_feature (1)..(25): SEQ ID NO: 4829; WAN0249YR; Start 192; Stop 216
cttaacctgataagtcttgattcct

SEQ ID NO: 391772 - DNA, 25 bp, Artificial
  probe
  misc_feature (1)..(25): SEQ ID NO: 4829; WAN0249YR; Start 191; Stop 215
tcttaacctgataagtcttgattcc

SEQ ID NO: 391773 - DNA, 25 bp, Artificial
  probe
  misc_feature (1)..(25): SEQ ID NO: 4829; WAN0249YR; Start 339; Stop 363
gcctctctttgtattatacctccat

SEQ ID NO: 391774 - DNA, 25 bp, Artificial
  probe
  misc_feature (1)..(25): SEQ ID NO: 4829; WAN0249YR; Start 338; Stop 362
agcctctctttgtattatacctcca

SEQ ID NO: 391775 - DNA, 25 bp, Artificial
  probe
  misc_feature (1)..(25): SEQ ID NO: 4829; WAN0249YR; Start 194; Stop 218
taacctgataagtcttgattcctaa

SEQ ID NO: 391776 - DNA, 25 bp, Artificial
  probe
  misc_feature (1)..(25): SEQ ID NO: 4829; WAN0249YR; Start 193; Stop 217
ttaacctgataagtcttgattccta

SEQ ID NO: 391777 - DNA, 25 bp, Artificial
  probe
  misc_feature (1)..(25): SEQ ID NO: 4829; WAN0249YR; Start 296; Stop 320
tagttactcatatacatcagtccac

SEQ ID NO: 391778 - DNA, 25 bp, Artificial
  probe
  misc_feature (1)..(25): SEQ ID NO: 4829; WAN0249YR; Start 337; Stop 361
gagcctctctttgtattatacctcc

SEQ ID NO: 391779 - DNA, 25 bp, Artificial
  probe
  misc_feature (1)..(25): SEQ ID NO: 4829; WAN0249YR; Start 336; Stop 360
cgagcctctctttgtattatacctc

SEQ ID NO: 391780 - DNA, 25 bp, Artificial
  probe
  misc_feature (1)..(25): SEQ ID NO: 4829; WAN0249YR; Start 333; Stop 357
gtgcgagcctctctttgtattatac

SEQ ID NO: 391781 - DNA, 25 bp, Artificial
  probe
  misc_feature (1)..(25): SEQ ID NO: 4829; WAN0249YR; Start 332; Stop 356
tgtgcgagcctctctttgtattata

SEQ ID NO: 391782 - DNA, 25 bp, Artificial
  probe
  misc_feature (1)..(25): SEQ ID NO: 4829; WAN0249YR; Start 330; Stop 354
tatgtgcgagcctctctttgtatta

SEQ ID NO: 391783 - DNA, 25 bp, Artificial
  probe
  misc_feature (1)..(25): SEQ ID NO: 4829; WAN0249YR; Start 335; Stop 359
gcgagcctctctttgtattatacct

SEQ ID NO: 391784 - DNA, 25 bp, Artificial
  probe
  misc_feature (1)..(25): SEQ ID NO: 4829; WAN0249YR; Start 331; Stop 355
atgtgcgagcctctctttgtattat

SEQ ID NO: 391785 - DNA, 25 bp, Artificial
  probe
  misc_feature (1)..(25): SEQ ID NO: 4829; WAN0249YR; Start 190; Stop 214
ttcttaacctgataagtcttgattc

SEQ ID NO: 391786 - DNA, 25 bp, Artificial
  probe
  misc_feature (1)..(25): SEQ ID NO: 4829; WAN0249YR; Start 334; Stop 358
tgcgagcctctctttgtattatacc

SEQ ID NO: 391787 - DNA, 25 bp, Artificial
  probe
  misc_feature (1)..(25): SEQ ID NO: 4830; WAN024A2I; Start 69; Stop 93
ggtaattcgcccttatttgtgatag

SEQ ID NO: 391788 - DNA, 25 bp, Artificial
  probe
  misc_feature (1)..(25): SEQ ID NO: 4830; WAN024A2I; Start 68; Stop 92
tggtaattcgcccttatttgtgata

SEQ ID NO: 391789 - DNA, 25 bp, Artificial
  probe
  misc_feature (1)..(25): SEQ ID NO: 4830; WAN024A2I; Start 63; Stop 87
ttagttggtaattcgcccttatttg

SEQ ID NO: 391790 - DNA, 25 bp, Artificial
  probe
  misc_feature (1)..(25): SEQ ID NO: 4830; WAN024A2I; Start 61; Stop 85
gtttagttggtaattcgcccttatt

SEQ ID NO: 391791 - DNA, 25 bp, Artificial
  probe
  misc_feature (1)..(25): SEQ ID NO: 4830; WAN024A2I; Start 64; Stop 88
tagttggtaattcgcccttatttgt

SEQ ID NO: 391792 - DNA, 25 bp, Artificial
  probe
  misc_feature (1)..(25): SEQ ID NO: 4830; WAN024A2I; Start 60; Stop 84
tgtttagttggtaattcgcccttat

SEQ ID NO: 391793 - DNA, 25 bp, Artificial
  probe
  misc_feature (1)..(25): SEQ ID NO: 4830; WAN024A2I; Start 59; Stop 83
ttgtttagttggtaattcgccctta

SEQ ID NO: 391794 - DNA, 25 bp, Artificial
  probe
  misc_feature (1)..(25): SEQ ID NO: 4830; WAN024A2I; Start 52; Stop 76
cttcgccttgtttagttggtaattc

SEQ ID NO: 391795 - DNA, 25 bp, Artificial
  probe
  misc_feature (1)..(25): SEQ ID NO: 4830; WAN024A2I; Start 70; Stop 94
gtaattcgcccttatttgtgataga

SEQ ID NO: 391796 - DNA, 25 bp, Artificial
  probe
  misc_feature (1)..(25): SEQ ID NO: 4830; WAN024A2I; Start 67; Stop 91
ttggtaattcgcccttatttgtgat

SEQ ID NO: 391797 - DNA, 25 bp, Artificial
  probe
  misc_feature (1)..(25): SEQ ID NO: 4830; WAN024A2I; Start 62; Stop 86
tttagttggtaattcgcccttattt

SEQ ID NO: 391798 - DNA, 25 bp, Artificial
  probe
  misc_feature (1)..(25): SEQ ID NO: 4830; WAN024A2I; Start 58; Stop 82
cttgtttagttggtaattcgccctt

SEQ ID NO: 391799 - DNA, 25 bp, Artificial
  probe
  misc_feature (1)..(25): SEQ ID NO: 4830; WAN024A2I; Start 51; Stop 75
acttcgccttgtttagttggtaatt

SEQ ID NO: 391800 - DNA, 25 bp, Artificial
  probe
  misc_feature (1)..(25): SEQ ID NO: 4830; WAN024A2I; Start 66; Stop 90
gttggtaattcgcccttatttgtga

SEQ ID NO: 391801 - DNA, 25 bp, Artificial
  probe
  misc_feature (1)..(25): SEQ ID NO: 4830; WAN024A2I; Start 65; Stop 89
agttggtaattcgcccttatttgtg

SEQ ID NO: 391802 - DNA, 25 bp, Artificial
  probe
  misc_feature (1)..(25): SEQ ID NO: 4830; WAN024A2I; Start 71; Stop 95
taattcgcccttatttgtgatagaa

SEQ ID NO: 391803 - DNA, 25 bp, Artificial
  probe
  misc_feature (1)..(25): SEQ ID NO: 4830; WAN024A2I; Start 74; Stop 98
ttcgcccttatttgtgatagaatat

SEQ ID NO: 391804 - DNA, 25 bp, Artificial
  probe
  misc_feature (1)..(25): SEQ ID NO: 4830; WAN024A2I; Start 53; Stop 77
ttcgccttgtttagttggtaattcg

SEQ ID NO: 391805 - DNA, 25 bp, Artificial
  probe
  misc_feature (1)..(25): SEQ ID NO: 4830; WAN024A2I; Start 72; Stop 96
aattcgcccttatttgtgatagaat

SEQ ID NO: 391806 - DNA, 25 bp, Artificial
  probe
  misc_feature (1)..(25): SEQ ID NO: 4830; WAN024A2I; Start 76; Stop 100
cgcccttatttgtgatagaatattg

SEQ ID NO: 391807 - DNA, 25 bp, Artificial
  probe
  misc_feature (1)..(25): SEQ ID NO: 4830; WAN024A2I; Start 75; Stop 99
tcgcccttatttgtgatagaatatt

SEQ ID NO: 391808 - DNA, 25 bp, Artificial
  probe
  misc_feature (1)..(25): SEQ ID NO: 4830; WAN024A2I; Start 73; Stop 97
attcgcccttatttgtgatagaata

SEQ ID NO: 391809 - DNA, 25 bp, Artificial
  probe
  misc_feature (1)..(25): SEQ ID NO: 4830; WAN024A2I; Start 57; Stop 81
ccttgtttagttggtaattcgccct

SEQ ID NO: 391810 - DNA, 25 bp, Artificial
  probe
  misc_feature (1)..(25): SEQ ID NO: 4830; WAN024A2I; Start 50; Stop 74
aacttcgccttgtttagttggtaat

SEQ ID NO: 391811 - DNA, 25 bp, Artificial
  probe
  misc_feature (1)..(25): SEQ ID NO: 4830; WAN024A2I; Start 49; Stop 73
aaacttcgccttgtttagttggtaa

SEQ ID NO: 391812 - DNA, 25 bp, Artificial
  probe
  misc_feature (1)..(25): SEQ ID NO: 4830; WAN024A2I; Start 77; Stop 101
gcccttatttgtgatagaatattga

SEQ ID NO: 391813 - DNA, 25 bp, Artificial
  probe
  misc_feature (1)..(25): SEQ ID NO: 4830; WAN024A2I; Start 44; Stop 68
aagtcaaacttcgccttgtttagtt

SEQ ID NO: 391814 - DNA, 25 bp, Artificial
  probe
  misc_feature (1)..(25): SEQ ID NO: 4830; WAN024A2I; Start 43; Stop 67
aaagtcaaacttcgccttgtttagt

SEQ ID NO: 391815 - DNA, 25 bp, Artificial
  probe
  misc_feature (1)..(25): SEQ ID NO: 4830; WAN024A2I; Start 48; Stop 72
caaacttcgccttgtttagttggta

SEQ ID NO: 391816 - DNA, 25 bp, Artificial
  probe
  misc_feature (1)..(25): SEQ ID NO: 4830; WAN024A2I; Start 54; Stop 78
tcgccttgtttagttggtaattcgc

SEQ ID NO: 391817 - DNA, 25 bp, Artificial
  probe
  misc_feature (1)..(25): SEQ ID NO: 4830; WAN024A2I; Start 45; Stop 69
agtcaaacttcgccttgtttagttg

SEQ ID NO: 391818 - DNA, 25 bp, Artificial
  probe
  misc_feature (1)..(25): SEQ ID NO: 4830; WAN024A2I; Start 56; Stop 80
gccttgtttagttggtaattcgccc

SEQ ID NO: 391819 - DNA, 25 bp, Artificial
  probe
  misc_feature (1)..(25): SEQ ID NO: 4830; WAN024A2I; Start 46; Stop 70
gtcaaacttcgccttgtttagttgg

SEQ ID NO: 391820 - DNA, 25 bp, Artificial
  probe
  misc_feature (1)..(25): SEQ ID NO: 4831; WAN024GJC-3; Start 174; Stop 198
tcacactccattcttcaacaactac

SEQ ID NO: 391821 - DNA, 25 bp, Artificial
  probe
  misc_feature (1)..(25): SEQ ID NO: 4831; WAN024GJC-3; Start 173; Stop 197
gtcacactccattcttcaacaacta

SEQ ID NO: 391822 - DNA, 25 bp, Artificial
  probe
  misc_feature (1)..(25): SEQ ID NO: 4831; WAN024GJC-3; Start 204; Stop 228
acaattctacttccgtactactgac

SEQ ID NO: 391823 - DNA, 25 bp, Artificial
  probe
  misc_feature (1)..(25): SEQ ID NO: 4831; WAN024GJC-3; Start 203; Stop 227
cacaattctacttccgtactactga

SEQ ID NO: 391824 - DNA, 25 bp, Artificial
  probe
  misc_feature (1)..(25): SEQ ID NO: 4831; WAN024GJC-3; Start 192; Stop 216
caactaccgtccacaattctacttc

SEQ ID NO: 391825 - DNA, 25 bp, Artificial
  probe
  misc_feature (1)..(25): SEQ ID NO: 4831; WAN024GJC-3; Start 202; Stop 226
ccacaattctacttccgtactactg

SEQ ID NO: 391826 - DNA, 25 bp, Artificial
  probe
  misc_feature (1)..(25): SEQ ID NO: 4831; WAN024GJC-3; Start 201; Stop 225
tccacaattctacttccgtactact

SEQ ID NO: 391827 - DNA, 25 bp, Artificial
  probe
  misc_feature (1)..(25): SEQ ID NO: 4831; WAN024GJC-3; Start 200; Stop 224
gtccacaattctacttccgtactac

SEQ ID NO: 391828 - DNA, 25 bp, Artificial
  probe
  misc_feature (1)..(25): SEQ ID NO: 4831; WAN024GJC-3; Start 175; Stop 199
cacactccattcttcaacaactacc

SEQ ID NO: 391829 - DNA, 25 bp, Artificial
  probe
  misc_feature (1)..(25): SEQ ID NO: 4831; WAN024GJC-3; Start 191; Stop 215
acaactaccgtccacaattctactt

SEQ ID NO: 391830 - DNA, 25 bp, Artificial
  probe
  misc_feature (1)..(25): SEQ ID NO: 4831; WAN024GJC-3; Start 190; Stop 214
aacaactaccgtccacaattctact

SEQ ID NO: 391831 - DNA, 25 bp, Artificial
  probe
  misc_feature (1)..(25): SEQ ID NO: 4831; WAN024GJC-3; Start 189; Stop 213
caacaactaccgtccacaattctac

SEQ ID NO: 391832 - DNA, 25 bp, Artificial
  probe
  misc_feature (1)..(25): SEQ ID NO: 4831; WAN024GJC-3; Start 188; Stop 212
tcaacaactaccgtccacaattcta

SEQ ID NO: 391833 - DNA, 25 bp, Artificial
  probe
  misc_feature (1)..(25): SEQ ID NO: 4831; WAN024GJC-3; Start 193; Stop 217
aactaccgtccacaattctacttcc

SEQ ID NO: 391834 - DNA, 25 bp, Artificial
  probe
  misc_feature (1)..(25): SEQ ID NO: 4831; WAN024GJC-3; Start 363; Stop 387
tactgttggttcaggtatggttaca

SEQ ID NO: 391835 - DNA, 25 bp, Artificial
  probe
  misc_feature (1)..(25): SEQ ID NO: 4831; WAN024GJC-3; Start 186; Stop 210
cttcaacaactaccgtccacaattc

SEQ ID NO: 391836 - DNA, 25 bp, Artificial
  probe
  misc_feature (1)..(25): SEQ ID NO: 4831; WAN024GJC-3; Start 199; Stop 223
cgtccacaattctacttccgtacta

SEQ ID NO: 391837 - DNA, 25 bp, Artificial
  probe
  misc_feature (1)..(25): SEQ ID NO: 4831; WAN024GJC-3; Start 366; Stop 390
tgttggttcaggtatggttacagaa

SEQ ID NO: 391838 - DNA, 25 bp, Artificial
  probe
  misc_feature (1)..(25): SEQ ID NO: 4831; WAN024GJC-3; Start 184; Stop 208
ttcttcaacaactaccgtccacaat

SEQ ID NO: 391839 - DNA, 25 bp, Artificial
  probe
  misc_feature (1)..(25): SEQ ID NO: 4831; WAN024GJC-3; Start 183; Stop 207
attcttcaacaactaccgtccacaa

SEQ ID NO: 391840 - DNA, 25 bp, Artificial
  probe
  misc_feature (1)..(25): SEQ ID NO: 4831; WAN024GJC-3; Start 362; Stop 386
gtactgttggttcaggtatggttac

SEQ ID NO: 391841 - DNA, 25 bp, Artificial
  probe
  misc_feature (1)..(25): SEQ ID NO: 4831; WAN024GJC-3; Start 178; Stop 202
actccattcttcaacaactaccgtc

SEQ ID NO: 391842 - DNA, 25 bp, Artificial
  probe
  misc_feature (1)..(25): SEQ ID NO: 4831; WAN024GJC-3; Start 187; Stop 211
ttcaacaactaccgtccacaattct

SEQ ID NO: 391843 - DNA, 25 bp, Artificial
  probe
  misc_feature (1)..(25): SEQ ID NO: 4831; WAN024GJC-3; Start 185; Stop 209
tcttcaacaactaccgtccacaatt

SEQ ID NO: 391844 - DNA, 25 bp, Artificial
  probe
  misc_feature (1)..(25): SEQ ID NO: 4831; WAN024GJC-3; Start 177; Stop 201
cactccattcttcaacaactaccgt

SEQ ID NO: 391845 - DNA, 25 bp, Artificial
  probe
  misc_feature (1)..(25): SEQ ID NO: 4831; WAN024GJC-3; Start 176; Stop 200
acactccattcttcaacaactaccg

SEQ ID NO: 391846 - DNA, 25 bp, Artificial
  probe
  misc_feature (1)..(25): SEQ ID NO: 4831; WAN024GJC-3; Start 112; Stop 136
atcaacccacacactaaattcaaag

SEQ ID NO: 391847 - DNA, 25 bp, Artificial
  probe
  misc_feature (1)..(25): SEQ ID NO: 4831; WAN024GJC-3; Start 110; Stop 134
caatcaacccacacactaaattcaa

SEQ ID NO: 391848 - DNA, 25 bp, Artificial
  probe
  misc_feature (1)..(25): SEQ ID NO: 4831; WAN024GJC-3; Start 108; Stop 132
ttcaatcaacccacacactaaattc

SEQ ID NO: 391849 - DNA, 25 bp, Artificial
  probe
  misc_feature (1)..(25): SEQ ID NO: 4831; WAN024GJC-3; Start 368; Stop 392
ttggttcaggtatggttacagaaat

SEQ ID NO: 391850 - DNA, 25 bp, Artificial
  probe
  misc_feature (1)..(25): SEQ ID NO: 4831; WAN024GJC-3; Start 111; Stop 135
aatcaacccacacactaaattcaaa

SEQ ID NO: 391851 - DNA, 25 bp, Artificial
  probe
  misc_feature (1)..(25): SEQ ID NO: 4831; WAN024GJC-3; Start 369; Stop 393
tggttcaggtatggttacagaaatc

SEQ ID NO: 391852 - DNA, 25 bp, Artificial
  probe
  misc_feature (1)..(25): SEQ ID NO: 4831; WAN024GJC-3; Start 260; Stop 284
ctgaaatggtaatgcctggtgataa

SEQ ID NO: 391853 - DNA, 25 bp, Artificial
  probe
  misc_feature (1)..(25): SEQ ID NO: 4832; WAN024AKQ; Start 2; Stop 26
tcctactctctttcctccagtattt

SEQ ID NO: 391854 - DNA, 25 bp, Artificial
  probe
  misc_feature (1)..(25): SEQ ID NO: 4832; WAN024AKQ; Start 1; Stop 25
ttcctactctctttcctccagtatt

SEQ ID NO: 391855 - DNA, 25 bp, Artificial
  probe
  misc_feature (1)..(25): SEQ ID NO: 4832; WAN024AKQ; Start 3; Stop 27
cctactctctttcctccagtatttt

SEQ ID NO: 391856 - DNA, 25 bp, Artificial
  probe
  misc_feature (1)..(25): SEQ ID NO: 4832; WAN024AKQ; Start 6; Stop 30
actctctttcctccagtattttatt

SEQ ID NO: 391857 - DNA, 25 bp, Artificial
  probe
  misc_feature (1)..(25): SEQ ID NO: 4832; WAN024AKQ; Start 29; Stop 53
ttactattctactactttcgtttga

SEQ ID NO: 391858 - DNA, 25 bp, Artificial
  probe
  misc_feature (1)..(25): SEQ ID NO: 4832; WAN024AKQ; Start 30; Stop 54
tactattctactactttcgtttgaa

SEQ ID NO: 391859 - DNA, 25 bp, Artificial
  probe
  misc_feature (1)..(25): SEQ ID NO: 4832; WAN024AKQ; Start 46; Stop 70
tcgtttgaaaagtctagtgaaaaca

SEQ ID NO: 391860 - DNA, 25 bp, Artificial
  probe
  misc_feature (1)..(25): SEQ ID NO: 4832; WAN024AKQ; Start 43; Stop 67
ctttcgtttgaaaagtctagtgaaa

SEQ ID NO: 391861 - DNA, 25 bp, Artificial
  probe
  misc_feature (1)..(25): SEQ ID NO: 4832; WAN024AKQ; Start 47; Stop 71
cgtttgaaaagtctagtgaaaacat

SEQ ID NO: 391862 - DNA, 25 bp, Artificial
  probe
  misc_feature (1)..(25): SEQ ID NO: 4832; WAN024AKQ; Start 45; Stop 69
ttcgtttgaaaagtctagtgaaaac

SEQ ID NO: 391863 - DNA, 25 bp, Artificial
  probe
  misc_feature (1)..(25): SEQ ID NO: 4832; WAN024AKQ; Start 31; Stop 55
actattctactactttcgtttgaaa

SEQ ID NO: 391864 - DNA, 25 bp, Artificial
  probe
  misc_feature (1)..(25): SEQ ID NO: 4832; WAN024AKQ; Start 44; Stop 68
tttcgtttgaaaagtctagtgaaaa

SEQ ID NO: 391865 - DNA, 25 bp, Artificial
  probe
  misc_feature (1)..(25): SEQ ID NO: 4832; WAN024AKQ; Start 4; Stop 28
ctactctctttcctccagtatttta

SEQ ID NO: 391866 - DNA, 25 bp, Artificial
  probe
  misc_feature (1)..(25): SEQ ID NO: 4832; WAN024AKQ; Start 8; Stop 32
tctctttcctccagtattttattac

SEQ ID NO: 391867 - DNA, 25 bp, Artificial
  probe
  misc_feature (1)..(25): SEQ ID NO: 4832; WAN024AKQ; Start 7; Stop 31
ctctctttcctccagtattttatta

SEQ ID NO: 391868 - DNA, 25 bp, Artificial
  probe
  misc_feature (1)..(25): SEQ ID NO: 4832; WAN024AKQ; Start 5; Stop 29
tactctctttcctccagtattttat

SEQ ID NO: 391869 - DNA, 25 bp, Artificial
  probe
  misc_feature (1)..(25): SEQ ID NO: 4832; WAN024AKQ; Start 9; Stop 33
ctctttcctccagtattttattact

SEQ ID NO: 391870 - DNA, 25 bp, Artificial
  probe
  misc_feature (1)..(25): SEQ ID NO: 4832; WAN024AKQ; Start 50; Stop 74
ttgaaaagtctagtgaaaacatatt

SEQ ID NO: 391871 - DNA, 25 bp, Artificial
  probe
  misc_feature (1)..(25): SEQ ID NO: 4832; WAN024AKQ; Start 51; Stop 75
tgaaaagtctagtgaaaacatattt

SEQ ID NO: 391872 - DNA, 25 bp, Artificial
  probe
  misc_feature (1)..(25): SEQ ID NO: 4832; WAN024AKQ; Start 49; Stop 73
tttgaaaagtctagtgaaaacatat

SEQ ID NO: 391873 - DNA, 25 bp, Artificial
  probe
  misc_feature (1)..(25): SEQ ID NO: 4832; WAN024AKQ; Start 48; Stop 72
gtttgaaaagtctagtgaaaacata

SEQ ID NO: 391874 - DNA, 25 bp, Artificial
  probe
  misc_feature (1)..(25): SEQ ID NO: 4832; WAN024AKQ; Start 33; Stop 57
tattctactactttcgtttgaaaag

SEQ ID NO: 391875 - DNA, 25 bp, Artificial
  probe
  misc_feature (1)..(25): SEQ ID NO: 4832; WAN024AKQ; Start 32; Stop 56
ctattctactactttcgtttgaaaa

SEQ ID NO: 391876 - DNA, 25 bp, Artificial
  probe
  misc_feature (1)..(25): SEQ ID NO: 4832; WAN024AKQ; Start 42; Stop 66
actttcgtttgaaaagtctagtgaa

SEQ ID NO: 391877 - DNA, 25 bp, Artificial
  probe
  misc_feature (1)..(25): SEQ ID NO: 4832; WAN024AKQ; Start 41; Stop 65
tactttcgtttgaaaagtctagtga

SEQ ID NO: 391878 - DNA, 25 bp, Artificial
  probe
  misc_feature (1)..(25): SEQ ID NO: 4832; WAN024AKQ; Start 39; Stop 63
actactttcgtttgaaaagtctagt

SEQ ID NO: 391879 - DNA, 25 bp, Artificial
  probe
  misc_feature (1)..(25): SEQ ID NO: 4832; WAN024AKQ; Start 40; Stop 64
ctactttcgtttgaaaagtctagtg

SEQ ID NO: 391880 - DNA, 25 bp, Artificial
  probe
  misc_feature (1)..(25): SEQ ID NO: 4832; WAN024AKQ; Start 36; Stop 60
tctactactttcgtttgaaaagtct

SEQ ID NO: 391881 - DNA, 25 bp, Artificial
  probe
  misc_feature (1)..(25): SEQ ID NO: 4832; WAN024AKQ; Start 35; Stop 59
ttctactactttcgtttgaaaagtc

SEQ ID NO: 391882 - DNA, 25 bp, Artificial
  probe
  misc_feature (1)..(25): SEQ ID NO: 4832; WAN024AKQ; Start 34; Stop 58
attctactactttcgtttgaaaagt

SEQ ID NO: 391883 - DNA, 25 bp, Artificial
  probe
  misc_feature (1)..(25): SEQ ID NO: 4832; WAN024AKQ; Start 38; Stop 62
tactactttcgtttgaaaagtctag

SEQ ID NO: 391884 - DNA, 25 bp, Artificial
  probe
  misc_feature (1)..(25): SEQ ID NO: 4832; WAN024AKQ; Start 37; Stop 61
ctactactttcgtttgaaaagtcta

SEQ ID NO: 391885 - DNA, 25 bp, Artificial
  probe
  misc_feature (1)..(25): SEQ ID NO: 4833; WAN024A4W; Start 12; Stop 36
acatttccgatgagagagcttgttt

SEQ ID NO: 391886 - DNA, 25 bp, Artificial
  probe
  misc_feature (1)..(25): SEQ ID NO: 4833; WAN024A4W; Start 10; Stop 34
aaacatttccgatgagagagcttgt

SEQ ID NO: 391887 - DNA, 25 bp, Artificial
  probe
  misc_feature (1)..(25): SEQ ID NO: 4833; WAN024A4W; Start 13; Stop 37
catttccgatgagagagcttgtttt

SEQ ID NO: 391888 - DNA, 25 bp, Artificial
  probe
  misc_feature (1)..(25): SEQ ID NO: 4833; WAN024A4W; Start 9; Stop 33
aaaacatttccgatgagagagcttg

SEQ ID NO: 391889 - DNA, 25 bp, Artificial
  probe
  misc_feature (1)..(25): SEQ ID NO: 4833; WAN024A4W; Start 11; Stop 35
aacatttccgatgagagagcttgtt

SEQ ID NO: 391890 - DNA, 25 bp, Artificial
  probe
  misc_feature (1)..(25): SEQ ID NO: 4834; WAN0249Y7; Start 32; Stop 56
tatagcaattatagcacaaaagccg

SEQ ID NO: 391891 - DNA, 25 bp, Artificial
  probe
  misc_feature (1)..(25): SEQ ID NO: 4834; WAN0249Y7; Start 39; Stop 63
attatagcacaaaagccgataactg

SEQ ID NO: 391892 - DNA, 25 bp, Artificial
  probe
  misc_feature (1)..(25): SEQ ID NO: 4834; WAN0249Y7; Start 36; Stop 60
gcaattatagcacaaaagccgataa

SEQ ID NO: 391893 - DNA, 25 bp, Artificial
  probe
  misc_feature (1)..(25): SEQ ID NO: 4834; WAN0249Y7; Start 35; Stop 59
agcaattatagcacaaaagccgata

SEQ ID NO: 391894 - DNA, 25 bp, Artificial
  probe
  misc_feature (1)..(25): SEQ ID NO: 4834; WAN0249Y7; Start 34; Stop 58
tagcaattatagcacaaaagccgat

SEQ ID NO: 391895 - DNA, 25 bp, Artificial
  probe
  misc_feature (1)..(25): SEQ ID NO: 4834; WAN0249Y7; Start 33; Stop 57
atagcaattatagcacaaaagccga

SEQ ID NO: 391896 - DNA, 25 bp, Artificial
  probe
  misc_feature (1)..(25): SEQ ID NO: 4834; WAN0249Y7; Start 37; Stop 61
caattatagcacaaaagccgataac

SEQ ID NO: 391897 - DNA, 25 bp, Artificial
  probe
  misc_feature (1)..(25): SEQ ID NO: 4834; WAN0249Y7; Start 38; Stop 62
aattatagcacaaaagccgataact

SEQ ID NO: 391898 - DNA, 25 bp, Artificial
  probe
  misc_feature (1)..(25): SEQ ID NO: 4834; WAN0249Y7; Start 31; Stop 55
ttatagcaattatagcacaaaagcc

SEQ ID NO: 391899 - DNA, 25 bp, Artificial
  probe
  misc_feature (1)..(25): SEQ ID NO: 4834; WAN0249Y7; Start 56; Stop 80
gataactgcaaaccctttccctcaa

SEQ ID NO: 391900 - DNA, 25 bp, Artificial
  probe
  misc_feature (1)..(25): SEQ ID NO: 4834; WAN0249Y7; Start 66; Stop 90
aaccctttccctcaactgtagcaaa

SEQ ID NO: 391901 - DNA, 25 bp, Artificial
  probe
  misc_feature (1)..(25): SEQ ID NO: 4834; WAN0249Y7; Start 65; Stop 89
aaaccctttccctcaactgtagcaa

SEQ ID NO: 391902 - DNA, 25 bp, Artificial
  probe
  misc_feature (1)..(25): SEQ ID NO: 4834; WAN0249Y7; Start 57; Stop 81
ataactgcaaaccctttccctcaac

SEQ ID NO: 391903 - DNA, 25 bp, Artificial
  probe
  misc_feature (1)..(25): SEQ ID NO: 4834; WAN0249Y7; Start 64; Stop 88
caaaccctttccctcaactgtagca

SEQ ID NO: 391904 - DNA, 25 bp, Artificial
  probe
  misc_feature (1)..(25): SEQ ID NO: 4834; WAN0249Y7; Start 30; Stop 54
attatagcaattatagcacaaaagc

SEQ ID NO: 391905 - DNA, 25 bp, Artificial
  probe
  misc_feature (1)..(25): SEQ ID NO: 4834; WAN0249Y7; Start 58; Stop 82
taactgcaaaccctttccctcaact

SEQ ID NO: 391906 - DNA, 25 bp, Artificial
  probe
  misc_feature (1)..(25): SEQ ID NO: 4834; WAN0249Y7; Start 40; Stop 64
ttatagcacaaaagccgataactgc

SEQ ID NO: 391907 - DNA, 25 bp, Artificial
  probe
  misc_feature (1)..(25): SEQ ID NO: 4834; WAN0249Y7; Start 67; Stop 91
accctttccctcaactgtagcaaaa

SEQ ID NO: 391908 - DNA, 25 bp, Artificial
  probe
  misc_feature (1)..(25): SEQ ID NO: 4834; WAN0249Y7; Start 62; Stop 86
tgcaaaccctttccctcaactgtag

SEQ ID NO: 391909 - DNA, 25 bp, Artificial
  probe
  misc_feature (1)..(25): SEQ ID NO: 4834; WAN0249Y7; Start 61; Stop 85
ctgcaaaccctttccctcaactgta

SEQ ID NO: 391910 - DNA, 25 bp, Artificial
  probe
  misc_feature (1)..(25): SEQ ID NO: 4834; WAN0249Y7; Start 55; Stop 79
cgataactgcaaaccctttccctca

SEQ ID NO: 391911 - DNA, 25 bp, Artificial
  probe
  misc_feature (1)..(25): SEQ ID NO: 4834; WAN0249Y7; Start 50; Stop 74
aaagccgataactgcaaaccctttc

SEQ ID NO: 391912 - DNA, 25 bp, Artificial
  probe
  misc_feature (1)..(25): SEQ ID NO: 4834; WAN0249Y7; Start 41; Stop 65
tatagcacaaaagccgataactgca

SEQ ID NO: 391913 - DNA, 25 bp, Artificial
  probe
  misc_feature (1)..(25): SEQ ID NO: 4834; WAN0249Y7; Start 48; Stop 72
caaaagccgataactgcaaaccctt

SEQ ID NO: 391914 - DNA, 25 bp, Artificial
  probe
  misc_feature (1)..(25): SEQ ID NO: 4834; WAN0249Y7; Start 49; Stop 73
aaaagccgataactgcaaacccttt

SEQ ID NO: 391915 - DNA, 25 bp, Artificial
  probe
  misc_feature (1)..(25): SEQ ID NO: 4834; WAN0249Y7; Start 42; Stop 66
atagcacaaaagccgataactgcaa

SEQ ID NO: 391916 - DNA, 25 bp, Artificial
  probe
  misc_feature (1)..(25): SEQ ID NO: 4834; WAN0249Y7; Start 43; Stop 67
tagcacaaaagccgataactgcaaa

SEQ ID NO: 391917 - DNA, 25 bp, Artificial
  probe
  misc_feature (1)..(25): SEQ ID NO: 4834; WAN0249Y7; Start 44; Stop 68
agcacaaaagccgataactgcaaac

SEQ ID NO: 391918 - DNA, 25 bp, Artificial
  probe
  misc_feature (1)..(25): SEQ ID NO: 4835; WAN0249JT; Start 119; Stop 143
tcaagaactatcaaggacatcaatg

SEQ ID NO: 391919 - DNA, 25 bp, Artificial
  probe
  misc_feature (1)..(25): SEQ ID NO: 4835; WAN0249JT; Start 118; Stop 142
ttcaagaactatcaaggacatcaat

SEQ ID NO: 391920 - DNA, 25 bp, Artificial
  probe
  misc_feature (1)..(25): SEQ ID NO: 4835; WAN0249JT; Start 120; Stop 144
caagaactatcaaggacatcaatgt

SEQ ID NO: 391921 - DNA, 25 bp, Artificial
  probe
  misc_feature (1)..(25): SEQ ID NO: 4835; WAN0249JT; Start 117; Stop 141
tttcaagaactatcaaggacatcaa

SEQ ID NO: 391922 - DNA, 25 bp, Artificial
  probe
  misc_feature (1)..(25): SEQ ID NO: 4835; WAN0249JT; Start 211; Stop 235
tttagaactgttttgatacgaggac

SEQ ID NO: 391923 - DNA, 25 bp, Artificial
  probe
  misc_feature (1)..(25): SEQ ID NO: 4835; WAN0249JT; Start 209; Stop 233
actttagaactgttttgatacgagg

SEQ ID NO: 391924 - DNA, 25 bp, Artificial
  probe
  misc_feature (1)..(25): SEQ ID NO: 4835; WAN0249JT; Start 210; Stop 234
ctttagaactgttttgatacgagga

SEQ ID NO: 391925 - DNA, 25 bp, Artificial
  probe
  misc_feature (1)..(25): SEQ ID NO: 4835; WAN0249JT; Start 202; Stop 226
aagacgaactttagaactgttttga

SEQ ID NO: 391926 - DNA, 25 bp, Artificial
  probe
  misc_feature (1)..(25): SEQ ID NO: 4835; WAN0249JT; Start 203; Stop 227
agacgaactttagaactgttttgat

SEQ ID NO: 391927 - DNA, 25 bp, Artificial
  probe
  misc_feature (1)..(25): SEQ ID NO: 4835; WAN0249JT; Start 206; Stop 230
cgaactttagaactgttttgatacg

SEQ ID NO: 391928 - DNA, 25 bp, Artificial
  probe
  misc_feature (1)..(25): SEQ ID NO: 4835; WAN0249JT; Start 116; Stop 140
ttttcaagaactatcaaggacatca

SEQ ID NO: 391929 - DNA, 25 bp, Artificial
  probe
  misc_feature (1)..(25): SEQ ID NO: 4835; WAN0249JT; Start 48; Stop 72
cactgcgatgttaagaagcttatta

SEQ ID NO: 391930 - DNA, 25 bp, Artificial
  probe
  misc_feature (1)..(25): SEQ ID NO: 4835; WAN0249JT; Start 47; Stop 71
tcactgcgatgttaagaagcttatt

SEQ ID NO: 391931 - DNA, 25 bp, Artificial
  probe
  misc_feature (1)..(25): SEQ ID NO: 4835; WAN0249JT; Start 41; Stop 65
ccacagtcactgcgatgttaagaag

SEQ ID NO: 391932 - DNA, 25 bp, Artificial
  probe
  misc_feature (1)..(25): SEQ ID NO: 4835; WAN0249JT; Start 213; Stop 237
tagaactgttttgatacgaggacaa

SEQ ID NO: 391933 - DNA, 25 bp, Artificial
  probe
  misc_feature (1)..(25): SEQ ID NO: 4835; WAN0249JT; Start 212; Stop 236
ttagaactgttttgatacgaggaca

SEQ ID NO: 391934 - DNA, 25 bp, Artificial
  probe
  misc_feature (1)..(25): SEQ ID NO: 4835; WAN0249JT; Start 90; Stop 114
acatcttcaaatacattatatccgt

SEQ ID NO: 391935 - DNA, 25 bp, Artificial
  probe
  misc_feature (1)..(25): SEQ ID NO: 4835; WAN0249JT; Start 51; Stop 75
tgcgatgttaagaagcttattaagt

SEQ ID NO: 391936 - DNA, 25 bp, Artificial
  probe
  misc_feature (1)..(25): SEQ ID NO: 4835; WAN0249JT; Start 49; Stop 73
actgcgatgttaagaagcttattaa

SEQ ID NO: 391937 - DNA, 25 bp, Artificial
  probe
  misc_feature (1)..(25): SEQ ID NO: 4835; WAN0249JT; Start 214; Stop 238
agaactgttttgatacgaggacaag

SEQ ID NO: 391938 - DNA, 25 bp, Artificial
  probe
  misc_feature (1)..(25): SEQ ID NO: 4835; WAN0249JT; Start 46; Stop 70
gtcactgcgatgttaagaagcttat

SEQ ID NO: 391939 - DNA, 25 bp, Artificial
  probe
  misc_feature (1)..(25): SEQ ID NO: 4835; WAN0249JT; Start 50; Stop 74
ctgcgatgttaagaagcttattaag

SEQ ID NO: 391940 - DNA, 25 bp, Artificial
  probe
  misc_feature (1)..(25): SEQ ID NO: 4835; WAN0249JT; Start 205; Stop 229
acgaactttagaactgttttgatac

SEQ ID NO: 391941 - DNA, 25 bp, Artificial
  probe
  misc_feature (1)..(25): SEQ ID NO: 4835; WAN0249JT; Start 52; Stop 76
gcgatgttaagaagcttattaagtt

SEQ ID NO: 391942 - DNA, 25 bp, Artificial
  probe
  misc_feature (1)..(25): SEQ ID NO: 4835; WAN0249JT; Start 215; Stop 239
gaactgttttgatacgaggacaagg

SEQ ID NO: 391943 - DNA, 25 bp, Artificial
  probe
  misc_feature (1)..(25): SEQ ID NO: 4835; WAN0249JT; Start 208; Stop 232
aactttagaactgttttgatacgag

SEQ ID NO: 391944 - DNA, 25 bp, Artificial
  probe
  misc_feature (1)..(25): SEQ ID NO: 4835; WAN0249JT; Start 207; Stop 231
gaactttagaactgttttgatacga

SEQ ID NO: 391945 - DNA, 25 bp, Artificial
  probe
  misc_feature (1)..(25): SEQ ID NO: 4835; WAN0249JT; Start 204; Stop 228
gacgaactttagaactgttttgata

SEQ ID NO: 391946 - DNA, 25 bp, Artificial
  probe
  misc_feature (1)..(25): SEQ ID NO: 4835; WAN0249JT; Start 42; Stop 66
cacagtcactgcgatgttaagaagc

SEQ ID NO: 391947 - DNA, 25 bp, Artificial
  probe
  misc_feature (1)..(25): SEQ ID NO: 4835; WAN0249JT; Start 216; Stop 240
aactgttttgatacgaggacaagga

SEQ ID NO: 391948 - DNA, 25 bp, Artificial
  probe
  misc_feature (1)..(25): SEQ ID NO: 4835; WAN0249JT; Start 45; Stop 69
agtcactgcgatgttaagaagctta

SEQ ID NO: 391949 - DNA, 25 bp, Artificial
  probe
  misc_feature (1)..(25): SEQ ID NO: 4835; WAN0249JT; Start 121; Stop 145
aagaactatcaaggacatcaatgtc

SEQ ID NO: 391950 - DNA, 25 bp, Artificial
  probe
  misc_feature (1)..(25): SEQ ID NO: 4835; WAN0249JT; Start 219; Stop 243
tgttttgatacgaggacaaggacat

SEQ ID NO: 391951 - DNA, 25 bp, Artificial
  probe
  misc_feature (1)..(25): SEQ ID NO: 4836; WAN024A3X; Start 35; Stop 59
tcaaattgtaggaggaagtttcaga

SEQ ID NO: 391952 - DNA, 25 bp, Artificial
  probe
  misc_feature (1)..(25): SEQ ID NO: 4836; WAN024A3X; Start 36; Stop 60
caaattgtaggaggaagtttcagat

SEQ ID NO: 391953 - DNA, 25 bp, Artificial
  probe
  misc_feature (1)..(25): SEQ ID NO: 4836; WAN024A3X; Start 34; Stop 58
atcaaattgtaggaggaagtttcag

SEQ ID NO: 391954 - DNA, 25 bp, Artificial
  probe
  misc_feature (1)..(25): SEQ ID NO: 4836; WAN024A3X; Start 4; Stop 28
ctccttcaaatgagttcttctctct

SEQ ID NO: 391955 - DNA, 25 bp, Artificial
  probe
  misc_feature (1)..(25): SEQ ID NO: 4836; WAN024A3X; Start 1; Stop 25
ttcctccttcaaatgagttcttctc

SEQ ID NO: 391956 - DNA, 25 bp, Artificial
  probe
  misc_feature (1)..(25): SEQ ID NO: 4836; WAN024A3X; Start 3; Stop 27
cctccttcaaatgagttcttctctc

SEQ ID NO: 391957 - DNA, 25 bp, Artificial
  probe
  misc_feature (1)..(25): SEQ ID NO: 4836; WAN024A3X; Start 38; Stop 62
aattgtaggaggaagtttcagattt

SEQ ID NO: 391958 - DNA, 25 bp, Artificial
  probe
  misc_feature (1)..(25): SEQ ID NO: 4836; WAN024A3X; Start 37; Stop 61
aaattgtaggaggaagtttcagatt

SEQ ID NO: 391959 - DNA, 25 bp, Artificial
  probe
  misc_feature (1)..(25): SEQ ID NO: 4836; WAN024A3X; Start 5; Stop 29
tccttcaaatgagttcttctctcta

SEQ ID NO: 391960 - DNA, 25 bp, Artificial
  probe
  misc_feature (1)..(25): SEQ ID NO: 4836; WAN024A3X; Start 2; Stop 26
tcctccttcaaatgagttcttctct

SEQ ID NO: 391961 - DNA, 25 bp, Artificial
  probe
  misc_feature (1)..(25): SEQ ID NO: 4836; WAN024A3X; Start 102; Stop 126
agatttctctagcctttcatttcaa

SEQ ID NO: 391962 - DNA, 25 bp, Artificial
  probe
  misc_feature (1)..(25): SEQ ID NO: 4836; WAN024A3X; Start 33; Stop 57
tatcaaattgtaggaggaagtttca

SEQ ID NO: 391963 - DNA, 25 bp, Artificial
  probe
  misc_feature (1)..(25): SEQ ID NO: 4836; WAN024A3X; Start 6; Stop 30
ccttcaaatgagttcttctctctat

SEQ ID NO: 391964 - DNA, 25 bp, Artificial
  probe
  misc_feature (1)..(25): SEQ ID NO: 4836; WAN024A3X; Start 62; Stop 86
tttgcaggctttggagtatttattt

SEQ ID NO: 391965 - DNA, 25 bp, Artificial
  probe
  misc_feature (1)..(25): SEQ ID NO: 4836; WAN024A3X; Start 64; Stop 88
tgcaggctttggagtatttatttaa

SEQ ID NO: 391966 - DNA, 25 bp, Artificial
  probe
  misc_feature (1)..(25): SEQ ID NO: 4836; WAN024A3X; Start 63; Stop 87
ttgcaggctttggagtatttattta

SEQ ID NO: 391967 - DNA, 25 bp, Artificial
  probe
  misc_feature (1)..(25): SEQ ID NO: 4836; WAN024A3X; Start 65; Stop 89
gcaggctttggagtatttatttaaa

SEQ ID NO: 391968 - DNA, 25 bp, Artificial
  probe
  misc_feature (1)..(25): SEQ ID NO: 4836; WAN024A3X; Start 32; Stop 56
atatcaaattgtaggaggaagtttc

SEQ ID NO: 391969 - DNA, 25 bp, Artificial
  probe
  misc_feature (1)..(25): SEQ ID NO: 4836; WAN024A3X; Start 101; Stop 125
tagatttctctagcctttcatttca

SEQ ID NO: 391970 - DNA, 25 bp, Artificial
  probe
  misc_feature (1)..(25): SEQ ID NO: 4836; WAN024A3X; Start 39; Stop 63
attgtaggaggaagtttcagatttt

SEQ ID NO: 391971 - DNA, 25 bp, Artificial
  probe
  misc_feature (1)..(25): SEQ ID NO: 4836; WAN024A3X; Start 7; Stop 31
cttcaaatgagttcttctctctatt

SEQ ID NO: 391972 - DNA, 25 bp, Artificial
  probe
  misc_feature (1)..(25): SEQ ID NO: 4836; WAN024A3X; Start 61; Stop 85
ttttgcaggctttggagtatttatt

SEQ ID NO: 391973 - DNA, 25 bp, Artificial
  probe
  misc_feature (1)..(25): SEQ ID NO: 4836; WAN024A3X; Start 31; Stop 55
tatatcaaattgtaggaggaagttt

SEQ ID NO: 391974 - DNA, 25 bp, Artificial
  probe
  misc_feature (1)..(25): SEQ ID NO: 4836; WAN024A3X; Start 30; Stop 54
ttatatcaaattgtaggaggaagtt

SEQ ID NO: 391975 - DNA, 25 bp, Artificial
  probe
  misc_feature (1)..(25): SEQ ID NO: 4836; WAN024A3X; Start 29; Stop 53
attatatcaaattgtaggaggaagt

SEQ ID NO: 391976 - DNA, 25 bp, Artificial
  probe
  misc_feature (1)..(25): SEQ ID NO: 4836; WAN024A3X; Start 8; Stop 32
ttcaaatgagttcttctctctatta

SEQ ID NO: 391977 - DNA, 25 bp, Artificial
  probe
  misc_feature (1)..(25): SEQ ID NO: 4836; WAN024A3X; Start 9; Stop 33
tcaaatgagttcttctctctattat

SEQ ID NO: 391978 - DNA, 25 bp, Artificial
  probe
  misc_feature (1)..(25): SEQ ID NO: 4836; WAN024A3X; Start 97; Stop 121
ggactagatttctctagcctttcat

SEQ ID NO: 391979 - DNA, 25 bp, Artificial
  probe
  misc_feature (1)..(25): SEQ ID NO: 4836; WAN024A3X; Start 96; Stop 120
aggactagatttctctagcctttca

SEQ ID NO: 391980 - DNA, 25 bp, Artificial
  probe
  misc_feature (1)..(25): SEQ ID NO: 4836; WAN024A3X; Start 95; Stop 119
aaggactagatttctctagcctttc

SEQ ID NO: 391981 - DNA, 25 bp, Artificial
  probe
  misc_feature (1)..(25): SEQ ID NO: 4836; WAN024A3X; Start 98; Stop 122
gactagatttctctagcctttcatt

SEQ ID NO: 391982 - DNA, 25 bp, Artificial
  probe
  misc_feature (1)..(25): SEQ ID NO: 4836; WAN024A3X; Start 66; Stop 90
caggctttggagtatttatttaaaa

SEQ ID NO: 391983 - DNA, 25 bp, Artificial
  probe
  misc_feature (1)..(25): SEQ ID NO: 4836; WAN024A3X; Start 99; Stop 123
actagatttctctagcctttcattt

SEQ ID NO: 391984 - DNA, 25 bp, Artificial
  probe
  misc_feature (1)..(25): SEQ ID NO: 4837; WAN024AIC; Start 8; Stop 32
cgccgaaaatcaaatatgaaacttg

SEQ ID NO: 391985 - DNA, 25 bp, Artificial
  probe
  misc_feature (1)..(25): SEQ ID NO: 4837; WAN024AIC; Start 9; Stop 33
gccgaaaatcaaatatgaaacttgt

SEQ ID NO: 391986 - DNA, 25 bp, Artificial
  probe
  misc_feature (1)..(25): SEQ ID NO: 4837; WAN024AIC; Start 7; Stop 31
tcgccgaaaatcaaatatgaaactt

SEQ ID NO: 391987 - DNA, 25 bp, Artificial
  probe
  misc_feature (1)..(25): SEQ ID NO: 4837; WAN024AIC; Start 4; Stop 28
ctctcgccgaaaatcaaatatgaaa

SEQ ID NO: 391988 - DNA, 25 bp, Artificial
  probe
  misc_feature (1)..(25): SEQ ID NO: 4837; WAN024AIC; Start 6; Stop 30
ctcgccgaaaatcaaatatgaaact

SEQ ID NO: 391989 - DNA, 25 bp, Artificial
  probe
  misc_feature (1)..(25): SEQ ID NO: 4837; WAN024AIC; Start 5; Stop 29
tctcgccgaaaatcaaatatgaaac

SEQ ID NO: 391990 - DNA, 25 bp, Artificial
  probe
  misc_feature (1)..(25): SEQ ID NO: 4837; WAN024AIC; Start 43; Stop 67
tctttgattttcatagagcagaact

SEQ ID NO: 391991 - DNA, 25 bp, Artificial
  probe
  misc_feature (1)..(25): SEQ ID NO: 4837; WAN024AIC; Start 1; Stop 25
ttcctctcgccgaaaatcaaatatg

SEQ ID NO: 391992 - DNA, 25 bp, Artificial
  probe
  misc_feature (1)..(25): SEQ ID NO: 4837; WAN024AIC; Start 61; Stop 85
cagaactttaaaagatcggagcaat

SEQ ID NO: 391993 - DNA, 25 bp, Artificial
  probe
  misc_feature (1)..(25): SEQ ID NO: 4837; WAN024AIC; Start 62; Stop 86
agaactttaaaagatcggagcaatc

SEQ ID NO: 391994 - DNA, 25 bp, Artificial
  probe
  misc_feature (1)..(25): SEQ ID NO: 4837; WAN024AIC; Start 56; Stop 80
tagagcagaactttaaaagatcgga

SEQ ID NO: 391995 - DNA, 25 bp, Artificial
  probe
  misc_feature (1)..(25): SEQ ID NO: 4837; WAN024AIC; Start 3; Stop 27
cctctcgccgaaaatcaaatatgaa

SEQ ID NO: 391996 - DNA, 25 bp, Artificial
  probe
  misc_feature (1)..(25): SEQ ID NO: 4837; WAN024AIC; Start 44; Stop 68
ctttgattttcatagagcagaactt

SEQ ID NO: 391997 - DNA, 25 bp, Artificial
  probe
  misc_feature (1)..(25): SEQ ID NO: 4837; WAN024AIC; Start 57; Stop 81
agagcagaactttaaaagatcggag

SEQ ID NO: 391998 - DNA, 25 bp, Artificial
  probe
  misc_feature (1)..(25): SEQ ID NO: 4837; WAN024AIC; Start 55; Stop 79
atagagcagaactttaaaagatcgg

SEQ ID NO: 391999 - DNA, 25 bp, Artificial
  probe
  misc_feature (1)..(25): SEQ ID NO: 4837; WAN024AIC; Start 24; Stop 48
tgaaacttgtagactttattctttg

SEQ ID NO: 392000 - DNA, 25 bp, Artificial
  probe
  misc_feature (1)..(25): SEQ ID NO: 4837; WAN024AIC; Start 45; Stop 69
tttgattttcatagagcagaacttt

SEQ ID NO: 392001 - DNA, 25 bp, Artificial
  probe
  misc_feature (1)..(25): SEQ ID NO: 4837; WAN024AIC; Start 2; Stop 26
tcctctcgccgaaaatcaaatatga

SEQ ID NO: 392002 - DNA, 25 bp, Artificial
  probe
  misc_feature (1)..(25): SEQ ID NO: 4837; WAN024AIC; Start 25; Stop 49
gaaacttgtagactttattctttga

SEQ ID NO: 392003 - DNA, 25 bp, Artificial
  probe
  misc_feature (1)..(25): SEQ ID NO: 4837; WAN024AIC; Start 54; Stop 78
catagagcagaactttaaaagatcg

SEQ ID NO: 392004 - DNA, 25 bp, Artificial
  probe
  misc_feature (1)..(25): SEQ ID NO: 4837; WAN024AIC; Start 63; Stop 87
gaactttaaaagatcggagcaatcc

SEQ ID NO: 392005 - DNA, 25 bp, Artificial
  probe
  misc_feature (1)..(25): SEQ ID NO: 4837; WAN024AIC; Start 60; Stop 84
gcagaactttaaaagatcggagcaa

SEQ ID NO: 392006 - DNA, 25 bp, Artificial
  probe
  misc_feature (1)..(25): SEQ ID NO: 4837; WAN024AIC; Start 58; Stop 82
gagcagaactttaaaagatcggagc

SEQ ID NO: 392007 - DNA, 25 bp, Artificial
  probe
  misc_feature (1)..(25): SEQ ID NO: 4837; WAN024AIC; Start 47; Stop 71
tgattttcatagagcagaactttaa

SEQ ID NO: 392008 - DNA, 25 bp, Artificial
  probe
  misc_feature (1)..(25): SEQ ID NO: 4837; WAN024AIC; Start 46; Stop 70
ttgattttcatagagcagaacttta

SEQ ID NO: 392009 - DNA, 25 bp, Artificial
  probe
  misc_feature (1)..(25): SEQ ID NO: 4837; WAN024AIC; Start 59; Stop 83
agcagaactttaaaagatcggagca

SEQ ID NO: 392010 - DNA, 25 bp, Artificial
  probe
  misc_feature (1)..(25): SEQ ID NO: 4837; WAN024AIC; Start 42; Stop 66
ttctttgattttcatagagcagaac

SEQ ID NO: 392011 - DNA, 25 bp, Artificial
  probe
  misc_feature (1)..(25): SEQ ID NO: 4837; WAN024AIC; Start 10; Stop 34
ccgaaaatcaaatatgaaacttgta

SEQ ID NO: 392012 - DNA, 25 bp, Artificial
  probe
  misc_feature (1)..(25): SEQ ID NO: 4837; WAN024AIC; Start 40; Stop 64
tattctttgattttcatagagcaga

SEQ ID NO: 392013 - DNA, 25 bp, Artificial
  probe
  misc_feature (1)..(25): SEQ ID NO: 4837; WAN024AIC; Start 53; Stop 77
tcatagagcagaactttaaaagatc

SEQ ID NO: 392014 - DNA, 25 bp, Artificial
  probe
  misc_feature (1)..(25): SEQ ID NO: 4837; WAN024AIC; Start 51; Stop 75
tttcatagagcagaactttaaaaga

SEQ ID NO: 392015 - DNA, 25 bp, Artificial
  probe
  misc_feature (1)..(25): SEQ ID NO: 4837; WAN024AIC; Start 52; Stop 76
ttcatagagcagaactttaaaagat

SEQ ID NO: 392016 - DNA, 25 bp, Artificial
  probe
  misc_feature (1)..(25): SEQ ID NO: 4837; WAN024AIC; Start 41; Stop 65
attctttgattttcatagagcagaa

SEQ ID NO: 392017 - DNA, 25 bp, Artificial
  probe
  misc_feature (1)..(25): SEQ ID NO: 4838; WAN024APK; Start 50; Stop 74
catgtactctggaatgcttagataa

SEQ ID NO: 392018 - DNA, 25 bp, Artificial
  probe
  misc_feature (1)..(25): SEQ ID NO: 4838; WAN024APK; Start 55; Stop 79
actctggaatgcttagataaatgct

SEQ ID NO: 392019 - DNA, 25 bp, Artificial
  probe
  misc_feature (1)..(25): SEQ ID NO: 4838; WAN024APK; Start 54; Stop 78
tactctggaatgcttagataaatgc

SEQ ID NO: 392020 - DNA, 25 bp, Artificial
  probe
  misc_feature (1)..(25): SEQ ID NO: 4838; WAN024APK; Start 56; Stop 80
ctctggaatgcttagataaatgcta

SEQ ID NO: 392021 - DNA, 25 bp, Artificial
  probe
  misc_feature (1)..(25): SEQ ID NO: 4838; WAN024APK; Start 57; Stop 81
tctggaatgcttagataaatgctaa

SEQ ID NO: 392022 - DNA, 25 bp, Artificial
  probe
  misc_feature (1)..(25): SEQ ID NO: 4838; WAN024APK; Start 27; Stop 51
aaagaaagagcacatgcaagataca

SEQ ID NO: 392023 - DNA, 25 bp, Artificial
  probe
  misc_feature (1)..(25): SEQ ID NO: 4838; WAN024APK; Start 28; Stop 52
aagaaagagcacatgcaagatacat

SEQ ID NO: 392024 - DNA, 25 bp, Artificial
  probe
  misc_feature (1)..(25): SEQ ID NO: 4838; WAN024APK; Start 52; Stop 76
tgtactctggaatgcttagataaat

SEQ ID NO: 392025 - DNA, 25 bp, Artificial
  probe
  misc_feature (1)..(25): SEQ ID NO: 4838; WAN024APK; Start 51; Stop 75
atgtactctggaatgcttagataaa

SEQ ID NO: 392026 - DNA, 25 bp, Artificial
  probe
  misc_feature (1)..(25): SEQ ID NO: 4838; WAN024APK; Start 53; Stop 77
gtactctggaatgcttagataaatg

SEQ ID NO: 392027 - DNA, 25 bp, Artificial
  probe
  misc_feature (1)..(25): SEQ ID NO: 4838; WAN024APK; Start 58; Stop 82
ctggaatgcttagataaatgctaaa

SEQ ID NO: 392028 - DNA, 25 bp, Artificial
  probe
  misc_feature (1)..(25): SEQ ID NO: 4838; WAN024APK; Start 49; Stop 73
acatgtactctggaatgcttagata

SEQ ID NO: 392029 - DNA, 25 bp, Artificial
  probe
  misc_feature (1)..(25): SEQ ID NO: 4838; WAN024APK; Start 5; Stop 29
ttctcctatcgtttcaaccccaaaa

SEQ ID NO: 392030 - DNA, 25 bp, Artificial
  probe
  misc_feature (1)..(25): SEQ ID NO: 4838; WAN024APK; Start 8; Stop 32
tcctatcgtttcaaccccaaaagaa

SEQ ID NO: 392031 - DNA, 25 bp, Artificial
  probe
  misc_feature (1)..(25): SEQ ID NO: 4838; WAN024APK; Start 7; Stop 31
ctcctatcgtttcaaccccaaaaga

SEQ ID NO: 392032 - DNA, 25 bp, Artificial
  probe
  misc_feature (1)..(25): SEQ ID NO: 4838; WAN024APK; Start 6; Stop 30
tctcctatcgtttcaaccccaaaag

SEQ ID NO: 392033 - DNA, 25 bp, Artificial
  probe
  misc_feature (1)..(25): SEQ ID NO: 4838; WAN024APK; Start 4; Stop 28
cttctcctatcgtttcaaccccaaa

SEQ ID NO: 392034 - DNA, 25 bp, Artificial
  probe
  misc_feature (1)..(25): SEQ ID NO: 4838; WAN024APK; Start 26; Stop 50
aaaagaaagagcacatgcaagatac

SEQ ID NO: 392035 - DNA, 25 bp, Artificial
  probe
  misc_feature (1)..(25): SEQ ID NO: 4838; WAN024APK; Start 25; Stop 49
caaaagaaagagcacatgcaagata

SEQ ID NO: 392036 - DNA, 25 bp, Artificial
  probe
  misc_feature (1)..(25): SEQ ID NO: 4838; WAN024APK; Start 10; Stop 34
ctatcgtttcaaccccaaaagaaag

SEQ ID NO: 392037 - DNA, 25 bp, Artificial
  probe
  misc_feature (1)..(25): SEQ ID NO: 4838; WAN024APK; Start 11; Stop 35
tatcgtttcaaccccaaaagaaaga

SEQ ID NO: 392038 - DNA, 25 bp, Artificial
  probe
  misc_feature (1)..(25): SEQ ID NO: 4838; WAN024APK; Start 17; Stop 41
ttcaaccccaaaagaaagagcacat

SEQ ID NO: 392039 - DNA, 25 bp, Artificial
  probe
  misc_feature (1)..(25): SEQ ID NO: 4838; WAN024APK; Start 9; Stop 33
cctatcgtttcaaccccaaaagaaa

SEQ ID NO: 392040 - DNA, 25 bp, Artificial
  probe
  misc_feature (1)..(25): SEQ ID NO: 4838; WAN024APK; Start 12; Stop 36
atcgtttcaaccccaaaagaaagag

SEQ ID NO: 392041 - DNA, 25 bp, Artificial
  probe
  misc_feature (1)..(25): SEQ ID NO: 4838; WAN024APK; Start 29; Stop 53
agaaagagcacatgcaagatacatg

SEQ ID NO: 392042 - DNA, 25 bp, Artificial
  probe
  misc_feature (1)..(25): SEQ ID NO: 4838; WAN024APK; Start 59; Stop 83
tggaatgcttagataaatgctaaaa

SEQ ID NO: 392043 - DNA, 25 bp, Artificial
  probe
  misc_feature (1)..(25): SEQ ID NO: 4838; WAN024APK; Start 24; Stop 48
ccaaaagaaagagcacatgcaagat

SEQ ID NO: 392044 - DNA, 25 bp, Artificial
  probe
  misc_feature (1)..(25): SEQ ID NO: 4838; WAN024APK; Start 1; Stop 25
ttccttctcctatcgtttcaacccc

SEQ ID NO: 392045 - DNA, 25 bp, Artificial
  probe
  misc_feature (1)..(25): SEQ ID NO: 4838; WAN024APK; Start 18; Stop 42
tcaaccccaaaagaaagagcacatg

SEQ ID NO: 392046 - DNA, 25 bp, Artificial
  probe
  misc_feature (1)..(25): SEQ ID NO: 4838; WAN024APK; Start 3; Stop 27
ccttctcctatcgtttcaaccccaa

SEQ ID NO: 392047 - DNA, 25 bp, Artificial
  probe
  misc_feature (1)..(25): SEQ ID NO: 4838; WAN024APK; Start 15; Stop 39
gtttcaaccccaaaagaaagagcac

SEQ ID NO: 392048 - DNA, 25 bp, Artificial
  probe
  misc_feature (1)..(25): SEQ ID NO: 4838; WAN024APK; Start 16; Stop 40
tttcaaccccaaaagaaagagcaca

SEQ ID NO: 392049 - DNA, 25 bp, Artificial
  probe
  misc_feature (1)..(25): SEQ ID NO: 4838; WAN024APK; Start 2; Stop 26
tccttctcctatcgtttcaacccca

SEQ ID NO: 392050 - DNA, 25 bp, Artificial
  probe
  misc_feature (1)..(25): SEQ ID NO: 4839; WAN0249M9; Start 40; Stop 64
tgtcaactacctctctcttaatcat

SEQ ID NO: 392051 - DNA, 25 bp, Artificial
  probe
  misc_feature (1)..(25): SEQ ID NO: 4839; WAN0249M9; Start 39; Stop 63
atgtcaactacctctctcttaatca

SEQ ID NO: 392052 - DNA, 25 bp, Artificial
  probe
  misc_feature (1)..(25): SEQ ID NO: 4839; WAN0249M9; Start 33; Stop 57
gatagaatgtcaactacctctctct

SEQ ID NO: 392053 - DNA, 25 bp, Artificial
  probe
  misc_feature (1)..(25): SEQ ID NO: 4839; WAN0249M9; Start 32; Stop 56
tgatagaatgtcaactacctctctc

SEQ ID NO: 392054 - DNA, 25 bp, Artificial
  probe
  misc_feature (1)..(25): SEQ ID NO: 4839; WAN0249M9; Start 36; Stop 60
agaatgtcaactacctctctcttaa

SEQ ID NO: 392055 - DNA, 25 bp, Artificial
  probe
  misc_feature (1)..(25): SEQ ID NO: 4839; WAN0249M9; Start 34; Stop 58
atagaatgtcaactacctctctctt

SEQ ID NO: 392056 - DNA, 25 bp, Artificial
  probe
  misc_feature (1)..(25): SEQ ID NO: 4839; WAN0249M9; Start 38; Stop 62
aatgtcaactacctctctcttaatc

SEQ ID NO: 392057 - DNA, 25 bp, Artificial
  probe
  misc_feature (1)..(25): SEQ ID NO: 4839; WAN0249M9; Start 37; Stop 61
gaatgtcaactacctctctcttaat

SEQ ID NO: 392058 - DNA, 25 bp, Artificial
  probe
  misc_feature (1)..(25): SEQ ID NO: 4839; WAN0249M9; Start 35; Stop 59
tagaatgtcaactacctctctctta

SEQ ID NO: 392059 - DNA, 25 bp, Artificial
  probe
  misc_feature (1)..(25): SEQ ID NO: 4839; WAN0249M9; Start 92; Stop 116
aaagtctcatccctaaaccataacc

SEQ ID NO: 392060 - DNA, 25 bp, Artificial
  probe
  misc_feature (1)..(25): SEQ ID NO: 4839; WAN0249M9; Start 97; Stop 121
ctcatccctaaaccataaccaacat

SEQ ID NO: 392061 - DNA, 25 bp, Artificial
  probe
  misc_feature (1)..(25): SEQ ID NO: 4839; WAN0249M9; Start 98; Stop 122
tcatccctaaaccataaccaacata

SEQ ID NO: 392062 - DNA, 25 bp, Artificial
  probe
  misc_feature (1)..(25): SEQ ID NO: 4839; WAN0249M9; Start 99; Stop 123
catccctaaaccataaccaacatag

SEQ ID NO: 392063 - DNA, 25 bp, Artificial
  probe
  misc_feature (1)..(25): SEQ ID NO: 4839; WAN0249M9; Start 41; Stop 65
gtcaactacctctctcttaatcata

SEQ ID NO: 392064 - DNA, 25 bp, Artificial
  probe
  misc_feature (1)..(25): SEQ ID NO: 4839; WAN0249M9; Start 95; Stop 119
gtctcatccctaaaccataaccaac

SEQ ID NO: 392065 - DNA, 25 bp, Artificial
  probe
  misc_feature (1)..(25): SEQ ID NO: 4839; WAN0249M9; Start 94; Stop 118
agtctcatccctaaaccataaccaa

SEQ ID NO: 392066 - DNA, 25 bp, Artificial
  probe
  misc_feature (1)..(25): SEQ ID NO: 4839; WAN0249M9; Start 93; Stop 117
aagtctcatccctaaaccataacca

SEQ ID NO: 392067 - DNA, 25 bp, Artificial
  probe
  misc_feature (1)..(25): SEQ ID NO: 4839; WAN0249M9; Start 96; Stop 120
tctcatccctaaaccataaccaaca

SEQ ID NO: 392068 - DNA, 25 bp, Artificial
  probe
  misc_feature (1)..(25): SEQ ID NO: 4839; WAN0249M9; Start 29; Stop 53
gcttgatagaatgtcaactacctct

SEQ ID NO: 392069 - DNA, 25 bp, Artificial
  probe
  misc_feature (1)..(25): SEQ ID NO: 4839; WAN0249M9; Start 42; Stop 66
tcaactacctctctcttaatcataa

SEQ ID NO: 392070 - DNA, 25 bp, Artificial
  probe
  misc_feature (1)..(25): SEQ ID NO: 4839; WAN0249M9; Start 31; Stop 55
ttgatagaatgtcaactacctctct

SEQ ID NO: 392071 - DNA, 25 bp, Artificial
  probe
  misc_feature (1)..(25): SEQ ID NO: 4839; WAN0249M9; Start 45; Stop 69
actacctctctcttaatcataatca

SEQ ID NO: 392072 - DNA, 25 bp, Artificial
  probe
  misc_feature (1)..(25): SEQ ID NO: 4839; WAN0249M9; Start 30; Stop 54
cttgatagaatgtcaactacctctc

SEQ ID NO: 392073 - DNA, 25 bp, Artificial
  probe
  misc_feature (1)..(25): SEQ ID NO: 4839; WAN0249M9; Start 28; Stop 52
agcttgatagaatgtcaactacctc

SEQ ID NO: 392074 - DNA, 25 bp, Artificial
  probe
  misc_feature (1)..(25): SEQ ID NO: 4839; WAN0249M9; Start 27; Stop 51
cagcttgatagaatgtcaactacct

SEQ ID NO: 392075 - DNA, 25 bp, Artificial
  probe
  misc_feature (1)..(25): SEQ ID NO: 4839; WAN0249M9; Start 16; Stop 40
gaactgaccgacagcttgatagaat

SEQ ID NO: 392076 - DNA, 25 bp, Artificial
  probe
  misc_feature (1)..(25): SEQ ID NO: 4839; WAN0249M9; Start 26; Stop 50
acagcttgatagaatgtcaactacc

SEQ ID NO: 392077 - DNA, 25 bp, Artificial
  probe
  misc_feature (1)..(25): SEQ ID NO: 4839; WAN0249M9; Start 17; Stop 41
aactgaccgacagcttgatagaatg

SEQ ID NO: 392078 - DNA, 25 bp, Artificial
  probe
  misc_feature (1)..(25): SEQ ID NO: 4839; WAN0249M9; Start 43; Stop 67
caactacctctctcttaatcataat

SEQ ID NO: 392079 - DNA, 25 bp, Artificial
  probe
  misc_feature (1)..(25): SEQ ID NO: 4839; WAN0249M9; Start 91; Stop 115
aaaagtctcatccctaaaccataac

SEQ ID NO: 392080 - DNA, 25 bp, Artificial
  probe
  misc_feature (1)..(25): SEQ ID NO: 4839; WAN0249M9; Start 46; Stop 70
ctacctctctcttaatcataatcaa

SEQ ID NO: 392081 - DNA, 25 bp, Artificial
  probe
  misc_feature (1)..(25): SEQ ID NO: 4839; WAN0249M9; Start 44; Stop 68
aactacctctctcttaatcataatc

SEQ ID NO: 392082 - DNA, 25 bp, Artificial
  probe
  misc_feature (1)..(25): SEQ ID NO: 4839; WAN0249M9; Start 18; Stop 42
actgaccgacagcttgatagaatgt

SEQ ID NO: 392083 - DNA, 25 bp, Artificial
  probe
  misc_feature (1)..(25): SEQ ID NO: 4840; WAN0249PI; Start 15; Stop 39
tatacttatacagagcacctttcgg

SEQ ID NO: 392084 - DNA, 25 bp, Artificial
  probe
  misc_feature (1)..(25): SEQ ID NO: 4840; WAN0249PI; Start 14; Stop 38
ctatacttatacagagcacctttcg

SEQ ID NO: 392085 - DNA, 25 bp, Artificial
  probe
  misc_feature (1)..(25): SEQ ID NO: 4840; WAN0249PI; Start 16; Stop 40
atacttatacagagcacctttcggg

SEQ ID NO: 392086 - DNA, 25 bp, Artificial
  probe
  misc_feature (1)..(25): SEQ ID NO: 4840; WAN0249PI; Start 11; Stop 35
ttactatacttatacagagcacctt

SEQ ID NO: 392087 - DNA, 25 bp, Artificial
  probe
  misc_feature (1)..(25): SEQ ID NO: 4840; WAN0249PI; Start 13; Stop 37
actatacttatacagagcacctttc

SEQ ID NO: 392088 - DNA, 25 bp, Artificial
  probe
  misc_feature (1)..(25): SEQ ID NO: 4840; WAN0249PI; Start 10; Stop 34
attactatacttatacagagcacct

SEQ ID NO: 392089 - DNA, 25 bp, Artificial
  probe
  misc_feature (1)..(25): SEQ ID NO: 4840; WAN0249PI; Start 77; Stop 101
aattgacacagttgttgcgacttta

SEQ ID NO: 392090 - DNA, 25 bp, Artificial
  probe
  misc_feature (1)..(25): SEQ ID NO: 4840; WAN0249PI; Start 262; Stop 286
aagaataggacaaatcgaggatagt

SEQ ID NO: 392091 - DNA, 25 bp, Artificial
  probe
  misc_feature (1)..(25): SEQ ID NO: 4840; WAN0249PI; Start 97; Stop 121
ctttagtcgcttacaaatgtggctg

SEQ ID NO: 392092 - DNA, 25 bp, Artificial
  probe
  misc_feature (1)..(25): SEQ ID NO: 4840; WAN0249PI; Start 78; Stop 102
attgacacagttgttgcgactttag

SEQ ID NO: 392093 - DNA, 25 bp, Artificial
  probe
  misc_feature (1)..(25): SEQ ID NO: 4840; WAN0249PI; Start 96; Stop 120
actttagtcgcttacaaatgtggct

SEQ ID NO: 392094 - DNA, 25 bp, Artificial
  probe
  misc_feature (1)..(25): SEQ ID NO: 4840; WAN0249PI; Start 264; Stop 288
gaataggacaaatcgaggatagtca

SEQ ID NO: 392095 - DNA, 25 bp, Artificial
  probe
  misc_feature (1)..(25): SEQ ID NO: 4840; WAN0249PI; Start 268; Stop 292
aggacaaatcgaggatagtcaaatc

SEQ ID NO: 392096 - DNA, 25 bp, Artificial
  probe
  misc_feature (1)..(25): SEQ ID NO: 4840; WAN0249PI; Start 263; Stop 287
agaataggacaaatcgaggatagtc

SEQ ID NO: 392097 - DNA, 25 bp, Artificial
  probe
  misc_feature (1)..(25): SEQ ID NO: 4840; WAN0249PI; Start 267; Stop 291
taggacaaatcgaggatagtcaaat

SEQ ID NO: 392098 - DNA, 25 bp, Artificial
  probe
  misc_feature (1)..(25): SEQ ID NO: 4840; WAN0249PI; Start 266; Stop 290
ataggacaaatcgaggatagtcaaa

SEQ ID NO: 392099 - DNA, 25 bp, Artificial
  probe
  misc_feature (1)..(25): SEQ ID NO: 4840; WAN0249PI; Start 265; Stop 289
aataggacaaatcgaggatagtcaa

SEQ ID NO: 392100 - DNA, 25 bp, Artificial
  probe
  misc_feature (1)..(25): SEQ ID NO: 4840; WAN0249PI; Start 9; Stop 33
aattactatacttatacagagcacc

SEQ ID NO: 392101 - DNA, 25 bp, Artificial
  probe
  misc_feature (1)..(25): SEQ ID NO: 4840; WAN0249PI; Start 12; Stop 36
tactatacttatacagagcaccttt

SEQ ID NO: 392102 - DNA, 25 bp, Artificial
  probe
  misc_feature (1)..(25): SEQ ID NO: 4840; WAN0249PI; Start 261; Stop 285
taagaataggacaaatcgaggatag

SEQ ID NO: 392103 - DNA, 25 bp, Artificial
  probe
  misc_feature (1)..(25): SEQ ID NO: 4840; WAN0249PI; Start 95; Stop 119
gactttagtcgcttacaaatgtggc

SEQ ID NO: 392104 - DNA, 25 bp, Artificial
  probe
  misc_feature (1)..(25): SEQ ID NO: 4840; WAN0249PI; Start 79; Stop 103
ttgacacagttgttgcgactttagt

SEQ ID NO: 392105 - DNA, 25 bp, Artificial
  probe
  misc_feature (1)..(25): SEQ ID NO: 4840; WAN0249PI; Start 279; Stop 303
aggatagtcaaatcgaattctaaca

SEQ ID NO: 392106 - DNA, 25 bp, Artificial
  probe
  misc_feature (1)..(25): SEQ ID NO: 4840; WAN0249PI; Start 269; Stop 293
ggacaaatcgaggatagtcaaatcg

SEQ ID NO: 392107 - DNA, 25 bp, Artificial
  probe
  misc_feature (1)..(25): SEQ ID NO: 4840; WAN0249PI; Start 54; Stop 78
atactttcttactaaattggtgcaa

SEQ ID NO: 392108 - DNA, 25 bp, Artificial
  probe
  misc_feature (1)..(25): SEQ ID NO: 4840; WAN0249PI; Start 278; Stop 302
gaggatagtcaaatcgaattctaac

SEQ ID NO: 392109 - DNA, 25 bp, Artificial
  probe
  misc_feature (1)..(25): SEQ ID NO: 4840; WAN0249PI; Start 98; Stop 122
tttagtcgcttacaaatgtggctgc

SEQ ID NO: 392110 - DNA, 25 bp, Artificial
  probe
  misc_feature (1)..(25): SEQ ID NO: 4840; WAN0249PI; Start 280; Stop 304
ggatagtcaaatcgaattctaacaa

SEQ ID NO: 392111 - DNA, 25 bp, Artificial
  probe
  misc_feature (1)..(25): SEQ ID NO: 4840; WAN0249PI; Start 80; Stop 104
tgacacagttgttgcgactttagtc

SEQ ID NO: 392112 - DNA, 25 bp, Artificial
  probe
  misc_feature (1)..(25): SEQ ID NO: 4840; WAN0249PI; Start 277; Stop 301
cgaggatagtcaaatcgaattctaa

SEQ ID NO: 392113 - DNA, 25 bp, Artificial
  probe
  misc_feature (1)..(25): SEQ ID NO: 4840; WAN0249PI; Start 283; Stop 307
tagtcaaatcgaattctaacaatgt

SEQ ID NO: 392114 - DNA, 25 bp, Artificial
  probe
  misc_feature (1)..(25): SEQ ID NO: 4840; WAN0249PI; Start 52; Stop 76
ttatactttcttactaaattggtgc

SEQ ID NO: 392115 - DNA, 25 bp, Artificial
  probe
  misc_feature (1)..(25): SEQ ID NO: 4840; WAN0249PI; Start 53; Stop 77
tatactttcttactaaattggtgca

SEQ ID NO: 392116 - DNA, 25 bp, Artificial
  probe
  misc_feature (1)..(25): SEQ ID NO: 4841; WAN0249ZO; Start 11; Stop 35
ttcccagaagaacaattatttaagt

SEQ ID NO: 392117 - DNA, 25 bp, Artificial
  probe
  misc_feature (1)..(25): SEQ ID NO: 4841; WAN0249ZO; Start 12; Stop 36
tcccagaagaacaattatttaagtt

SEQ ID NO: 392118 - DNA, 25 bp, Artificial
  probe
  misc_feature (1)..(25): SEQ ID NO: 4841; WAN0249ZO; Start 3; Stop 27
cgatttagttcccagaagaacaatt

SEQ ID NO: 392119 - DNA, 25 bp, Artificial
  probe
  misc_feature (1)..(25): SEQ ID NO: 4841; WAN0249ZO; Start 2; Stop 26
tcgatttagttcccagaagaacaat

SEQ ID NO: 392120 - DNA, 25 bp, Artificial
  probe
  misc_feature (1)..(25): SEQ ID NO: 4841; WAN0249ZO; Start 1; Stop 25
ttcgatttagttcccagaagaacaa

SEQ ID NO: 392121 - DNA, 25 bp, Artificial
  probe
  misc_feature (1)..(25): SEQ ID NO: 4841; WAN0249ZO; Start 13; Stop 37
cccagaagaacaattatttaagtta

SEQ ID NO: 392122 - DNA, 25 bp, Artificial
  probe
  misc_feature (1)..(25): SEQ ID NO: 4841; WAN0249ZO; Start 4; Stop 28
gatttagttcccagaagaacaatta

SEQ ID NO: 392123 - DNA, 25 bp, Artificial
  probe
  misc_feature (1)..(25): SEQ ID NO: 4841; WAN0249ZO; Start 9; Stop 33
agttcccagaagaacaattatttaa

SEQ ID NO: 392124 - DNA, 25 bp, Artificial
  probe
  misc_feature (1)..(25): SEQ ID NO: 4841; WAN0249ZO; Start 7; Stop 31
ttagttcccagaagaacaattattt

SEQ ID NO: 392125 - DNA, 25 bp, Artificial
  probe
  misc_feature (1)..(25): SEQ ID NO: 4841; WAN0249ZO; Start 6; Stop 30
tttagttcccagaagaacaattatt

SEQ ID NO: 392126 - DNA, 25 bp, Artificial
  probe
  misc_feature (1)..(25): SEQ ID NO: 4841; WAN0249ZO; Start 10; Stop 34
gttcccagaagaacaattatttaag

SEQ ID NO: 392127 - DNA, 25 bp, Artificial
  probe
  misc_feature (1)..(25): SEQ ID NO: 4841; WAN0249ZO; Start 5; Stop 29
atttagttcccagaagaacaattat

SEQ ID NO: 392128 - DNA, 25 bp, Artificial
  probe
  misc_feature (1)..(25): SEQ ID NO: 4841; WAN0249ZO; Start 8; Stop 32
tagttcccagaagaacaattattta

SEQ ID NO: 392129 - DNA, 25 bp, Artificial
  probe
  misc_feature (1)..(25): SEQ ID NO: 4842; WAN0249I7; Start 83; Stop 107
gattagcgagattagaatcgacctt

SEQ ID NO: 392130 - DNA, 25 bp, Artificial
  probe
  misc_feature (1)..(25): SEQ ID NO: 4842; WAN0249I7; Start 80; Stop 104
aaggattagcgagattagaatcgac

SEQ ID NO: 392131 - DNA, 25 bp, Artificial
  probe
  misc_feature (1)..(25): SEQ ID NO: 4842; WAN0249I7; Start 82; Stop 106
ggattagcgagattagaatcgacct

SEQ ID NO: 392132 - DNA, 25 bp, Artificial
  probe
  misc_feature (1)..(25): SEQ ID NO: 4842; WAN0249I7; Start 81; Stop 105
aggattagcgagattagaatcgacc

SEQ ID NO: 392133 - DNA, 25 bp, Artificial
  probe
  misc_feature (1)..(25): SEQ ID NO: 4842; WAN0249I7; Start 1; Stop 25
ttctaactcctcaaaaccaattcaa

SEQ ID NO: 392134 - DNA, 25 bp, Artificial
  probe
  misc_feature (1)..(25): SEQ ID NO: 4842; WAN0249I7; Start 3; Stop 27
ctaactcctcaaaaccaattcaatg

SEQ ID NO: 392135 - DNA, 25 bp, Artificial
  probe
  misc_feature (1)..(25): SEQ ID NO: 4842; WAN0249I7; Start 2; Stop 26
tctaactcctcaaaaccaattcaat

SEQ ID NO: 392136 - DNA, 25 bp, Artificial
  probe
  misc_feature (1)..(25): SEQ ID NO: 4842; WAN0249I7; Start 79; Stop 103
aaaggattagcgagattagaatcga

SEQ ID NO: 392137 - DNA, 25 bp, Artificial
  probe
  misc_feature (1)..(25): SEQ ID NO: 4842; WAN0249I7; Start 4; Stop 28
taactcctcaaaaccaattcaatga

SEQ ID NO: 392138 - DNA, 25 bp, Artificial
  probe
  misc_feature (1)..(25): SEQ ID NO: 4842; WAN0249I7; Start 11; Stop 35
tcaaaaccaattcaatgagactttt

SEQ ID NO: 392139 - DNA, 25 bp, Artificial
  probe
  misc_feature (1)..(25): SEQ ID NO: 4842; WAN0249I7; Start 78; Stop 102
aaaaggattagcgagattagaatcg

SEQ ID NO: 392140 - DNA, 25 bp, Artificial
  probe
  misc_feature (1)..(25): SEQ ID NO: 4842; WAN0249I7; Start 54; Stop 78
acatatttcccttattctggattaa

SEQ ID NO: 392141 - DNA, 25 bp, Artificial
  probe
  misc_feature (1)..(25): SEQ ID NO: 4842; WAN0249I7; Start 53; Stop 77
aacatatttcccttattctggatta

SEQ ID NO: 392142 - DNA, 25 bp, Artificial
  probe
  misc_feature (1)..(25): SEQ ID NO: 4842; WAN0249I7; Start 52; Stop 76
taacatatttcccttattctggatt

SEQ ID NO: 392143 - DNA, 25 bp, Artificial
  probe
  misc_feature (1)..(25): SEQ ID NO: 4842; WAN0249I7; Start 49; Stop 73
gtataacatatttcccttattctgg

SEQ ID NO: 392144 - DNA, 25 bp, Artificial
  probe
  misc_feature (1)..(25): SEQ ID NO: 4842; WAN0249I7; Start 51; Stop 75
ataacatatttcccttattctggat

SEQ ID NO: 392145 - DNA, 25 bp, Artificial
  probe
  misc_feature (1)..(25): SEQ ID NO: 4842; WAN0249I7; Start 9; Stop 33
cctcaaaaccaattcaatgagactt

SEQ ID NO: 392146 - DNA, 25 bp, Artificial
  probe
  misc_feature (1)..(25): SEQ ID NO: 4842; WAN0249I7; Start 5; Stop 29
aactcctcaaaaccaattcaatgag

SEQ ID NO: 392147 - DNA, 25 bp, Artificial
  probe
  misc_feature (1)..(25): SEQ ID NO: 4842; WAN0249I7; Start 7; Stop 31
ctcctcaaaaccaattcaatgagac

SEQ ID NO: 392148 - DNA, 25 bp, Artificial
  probe
  misc_feature (1)..(25): SEQ ID NO: 4842; WAN0249I7; Start 8; Stop 32
tcctcaaaaccaattcaatgagact

SEQ ID NO: 392149 - DNA, 25 bp, Artificial
  probe
  misc_feature (1)..(25): SEQ ID NO: 4842; WAN0249I7; Start 6; Stop 30
actcctcaaaaccaattcaatgaga

SEQ ID NO: 392150 - DNA, 25 bp, Artificial
  probe
  misc_feature (1)..(25): SEQ ID NO: 4842; WAN0249I7; Start 10; Stop 34
ctcaaaaccaattcaatgagacttt

SEQ ID NO: 392151 - DNA, 25 bp, Artificial
  probe
  misc_feature (1)..(25): SEQ ID NO: 4844; WAN024CTY-M; Start 1680; Stop 1704
tatccaagccaatactgagaagaag

SEQ ID NO: 392152 - DNA, 25 bp, Artificial
  probe
  misc_feature (1)..(25): SEQ ID NO: 4844; WAN024CTY-M; Start 1679; Stop 1703
ctatccaagccaatactgagaagaa

SEQ ID NO: 392153 - DNA, 25 bp, Artificial
  probe
  misc_feature (1)..(25): SEQ ID NO: 4844; WAN024CTY-M; Start 1683; Stop 1707
ccaagccaatactgagaagaagatt

SEQ ID NO: 392154 - DNA, 25 bp, Artificial
  probe
  misc_feature (1)..(25): SEQ ID NO: 4844; WAN024CTY-M; Start 2087; Stop 2111
ttacagttaatggtcgcttagaagg

SEQ ID NO: 392155 - DNA, 25 bp, Artificial
  probe
  misc_feature (1)..(25): SEQ ID NO: 4844; WAN024CTY-M; Start 1677; Stop 1701
cactatccaagccaatactgagaag

SEQ ID NO: 392156 - DNA, 25 bp, Artificial
  probe
  misc_feature (1)..(25): SEQ ID NO: 4844; WAN024CTY-M; Start 1678; Stop 1702
actatccaagccaatactgagaaga

SEQ ID NO: 392157 - DNA, 25 bp, Artificial
  probe
  misc_feature (1)..(25): SEQ ID NO: 4844; WAN024CTY-M; Start 461; Stop 485
atgtggttccaactgctaataatct

SEQ ID NO: 392158 - DNA, 25 bp, Artificial
  probe
  misc_feature (1)..(25): SEQ ID NO: 4844; WAN024CTY-M; Start 1672; Stop 1696
gaactcactatccaagccaatactg

SEQ ID NO: 392159 - DNA, 25 bp, Artificial
  probe
  misc_feature (1)..(25): SEQ ID NO: 4844; WAN024CTY-M; Start 460; Stop 484
aatgtggttccaactgctaataatc

SEQ ID NO: 392160 - DNA, 25 bp, Artificial
  probe
  misc_feature (1)..(25): SEQ ID NO: 4844; WAN024CTY-M; Start 1682; Stop 1706
tccaagccaatactgagaagaagat

SEQ ID NO: 392161 - DNA, 25 bp, Artificial
  probe
  misc_feature (1)..(25): SEQ ID NO: 4844; WAN024CTY-M; Start 1681; Stop 1705
atccaagccaatactgagaagaaga

SEQ ID NO: 392162 - DNA, 25 bp, Artificial
  probe
  misc_feature (1)..(25): SEQ ID NO: 4844; WAN024CTY-M; Start 459; Stop 483
gaatgtggttccaactgctaataat

SEQ ID NO: 392163 - DNA, 25 bp, Artificial
  probe
  misc_feature (1)..(25): SEQ ID NO: 4844; WAN024CTY-M; Start 462; Stop 486
tgtggttccaactgctaataatctg

SEQ ID NO: 392164 - DNA, 25 bp, Artificial
  probe
  misc_feature (1)..(25): SEQ ID NO: 4844; WAN024CTY-M; Start 1671; Stop 1695
tgaactcactatccaagccaatact

SEQ ID NO: 392165 - DNA, 25 bp, Artificial
  probe
  misc_feature (1)..(25): SEQ ID NO: 4844; WAN024CTY-M; Start 1670; Stop 1694
ttgaactcactatccaagccaatac

SEQ ID NO: 392166 - DNA, 25 bp, Artificial
  probe
  misc_feature (1)..(25): SEQ ID NO: 4844; WAN024CTY-M; Start 1669; Stop 1693
gttgaactcactatccaagccaata

SEQ ID NO: 392167 - DNA, 25 bp, Artificial
  probe
  misc_feature (1)..(25): SEQ ID NO: 4844; WAN024CTY-M; Start 2089; Stop 2113
acagttaatggtcgcttagaaggta

SEQ ID NO: 392168 - DNA, 25 bp, Artificial
  probe
  misc_feature (1)..(25): SEQ ID NO: 4844; WAN024CTY-M; Start 2088; Stop 2112
tacagttaatggtcgcttagaaggt

SEQ ID NO: 392169 - DNA, 25 bp, Artificial
  probe
  misc_feature (1)..(25): SEQ ID NO: 4844; WAN024CTY-M; Start 106; Stop 130
gactcagaaggtaagattccagttc

SEQ ID NO: 392170 - DNA, 25 bp, Artificial
  probe
  misc_feature (1)..(25): SEQ ID NO: 4844; WAN024CTY-M; Start 471; Stop 495
aactgctaataatctggttcgcttc

SEQ ID NO: 392171 - DNA, 25 bp, Artificial
  probe
  misc_feature (1)..(25): SEQ ID NO: 4844; WAN024CTY-M; Start 337; Stop 361
cgagataagattacgactgctggta

SEQ ID NO: 392172 - DNA, 25 bp, Artificial
  probe
  misc_feature (1)..(25): SEQ ID NO: 4844; WAN024CTY-M; Start 105; Stop 129
tgactcagaaggtaagattccagtt

SEQ ID NO: 392173 - DNA, 25 bp, Artificial
  probe
  misc_feature (1)..(25): SEQ ID NO: 4844; WAN024CTY-M; Start 1676; Stop 1700
tcactatccaagccaatactgagaa

SEQ ID NO: 392174 - DNA, 25 bp, Artificial
  probe
  misc_feature (1)..(25): SEQ ID NO: 4844; WAN024CTY-M; Start 2090; Stop 2114
cagttaatggtcgcttagaaggtac

SEQ ID NO: 392175 - DNA, 25 bp, Artificial
  probe
  misc_feature (1)..(25): SEQ ID NO: 4844; WAN024CTY-M; Start 379; Stop 403
cttattaaggaagaccatgcgattg

SEQ ID NO: 392176 - DNA, 25 bp, Artificial
  probe
  misc_feature (1)..(25): SEQ ID NO: 4844; WAN024CTY-M; Start 470; Stop 494
caactgctaataatctggttcgctt

SEQ ID NO: 392177 - DNA, 25 bp, Artificial
  probe
  misc_feature (1)..(25): SEQ ID NO: 4844; WAN024CTY-M; Start 1673; Stop 1697
aactcactatccaagccaatactga

SEQ ID NO: 392178 - DNA, 25 bp, Artificial
  probe
  misc_feature (1)..(25): SEQ ID NO: 4844; WAN024CTY-M; Start 116; Stop 140
gtaagattccagttcgtgcttattc

SEQ ID NO: 392179 - DNA, 25 bp, Artificial
  probe
  misc_feature (1)..(25): SEQ ID NO: 4844; WAN024CTY-M; Start 108; Stop 132
ctcagaaggtaagattccagttcgt

SEQ ID NO: 392180 - DNA, 25 bp, Artificial
  probe
  misc_feature (1)..(25): SEQ ID NO: 4844; WAN024CTY-M; Start 115; Stop 139
ggtaagattccagttcgtgcttatt

SEQ ID NO: 392181 - DNA, 25 bp, Artificial
  probe
  misc_feature (1)..(25): SEQ ID NO: 4844; WAN024CTY-M; Start 117; Stop 141
taagattccagttcgtgcttattcg

SEQ ID NO: 392182 - DNA, 25 bp, Artificial
  probe
  misc_feature (1)..(25): SEQ ID NO: 4844; WAN024CTY-M; Start 339; Stop 363
agataagattacgactgctggtaag

SEQ ID NO: 392183 - DNA, 25 bp, Artificial
  probe
  misc_feature (1)..(25): SEQ ID NO: 4844; WAN024CTY-M; Start 338; Stop 362
gagataagattacgactgctggtaa

SEQ ID NO: 392184 - DNA, 25 bp, Artificial
  probe
  misc_feature (1)..(25): SEQ ID NO: 4845; WAN0249DL; Start 20; Stop 44
aaccattatatcaatttcttgctaa

SEQ ID NO: 392185 - DNA, 25 bp, Artificial
  probe
  misc_feature (1)..(25): SEQ ID NO: 4845; WAN0249DL; Start 27; Stop 51
atatcaatttcttgctaattgtcaa

SEQ ID NO: 392186 - DNA, 25 bp, Artificial
  probe
  misc_feature (1)..(25): SEQ ID NO: 4846; WAN024A2B; Start 14; Stop 38
aaagagtaaactcagctagtccaac

SEQ ID NO: 392187 - DNA, 25 bp, Artificial
  probe
  misc_feature (1)..(25): SEQ ID NO: 4846; WAN024A2B; Start 13; Stop 37
taaagagtaaactcagctagtccaa

SEQ ID NO: 392188 - DNA, 25 bp, Artificial
  probe
  misc_feature (1)..(25): SEQ ID NO: 4846; WAN024A2B; Start 12; Stop 36
ttaaagagtaaactcagctagtcca

SEQ ID NO: 392189 - DNA, 25 bp, Artificial
  probe
  misc_feature (1)..(25): SEQ ID NO: 4846; WAN024A2B; Start 15; Stop 39
aagagtaaactcagctagtccaact

SEQ ID NO: 392190 - DNA, 25 bp, Artificial
  probe
  misc_feature (1)..(25): SEQ ID NO: 4846; WAN024A2B; Start 11; Stop 35
tttaaagagtaaactcagctagtcc

SEQ ID NO: 392191 - DNA, 25 bp, Artificial
  probe
  misc_feature (1)..(25): SEQ ID NO: 4846; WAN024A2B; Start 20; Stop 44
taaactcagctagtccaactaactg

SEQ ID NO: 392192 - DNA, 25 bp, Artificial
  probe
  misc_feature (1)..(25): SEQ ID NO: 4846; WAN024A2B; Start 19; Stop 43
gtaaactcagctagtccaactaact

SEQ ID NO: 392193 - DNA, 25 bp, Artificial
  probe
  misc_feature (1)..(25): SEQ ID NO: 4846; WAN024A2B; Start 18; Stop 42
agtaaactcagctagtccaactaac

SEQ ID NO: 392194 - DNA, 25 bp, Artificial
  probe
  misc_feature (1)..(25): SEQ ID NO: 4846; WAN024A2B; Start 17; Stop 41
gagtaaactcagctagtccaactaa

SEQ ID NO: 392195 - DNA, 25 bp, Artificial
  probe
  misc_feature (1)..(25): SEQ ID NO: 4846; WAN024A2B; Start 16; Stop 40
agagtaaactcagctagtccaacta

SEQ ID NO: 392196 - DNA, 25 bp, Artificial
  probe
  misc_feature (1)..(25): SEQ ID NO: 4846; WAN024A2B; Start 25; Stop 49
tcagctagtccaactaactgagttt

SEQ ID NO: 392197 - DNA, 25 bp, Artificial
  probe
  misc_feature (1)..(25): SEQ ID NO: 4846; WAN024A2B; Start 21; Stop 45
aaactcagctagtccaactaactga

SEQ ID NO: 392198 - DNA, 25 bp, Artificial
  probe
  misc_feature (1)..(25): SEQ ID NO: 4846; WAN024A2B; Start 31; Stop 55
agtccaactaactgagttttccttt

SEQ ID NO: 392199 - DNA, 25 bp, Artificial
  probe
  misc_feature (1)..(25): SEQ ID NO: 4846; WAN024A2B; Start 29; Stop 53
ctagtccaactaactgagttttcct

SEQ ID NO: 392200 - DNA, 25 bp, Artificial
  probe
  misc_feature (1)..(25): SEQ ID NO: 4846; WAN024A2B; Start 30; Stop 54
tagtccaactaactgagttttcctt

SEQ ID NO: 392201 - DNA, 25 bp, Artificial
  probe
  misc_feature (1)..(25): SEQ ID NO: 4846; WAN024A2B; Start 32; Stop 56
gtccaactaactgagttttccttta

SEQ ID NO: 392202 - DNA, 25 bp, Artificial
  probe
  misc_feature (1)..(25): SEQ ID NO: 4846; WAN024A2B; Start 28; Stop 52
gctagtccaactaactgagttttcc

SEQ ID NO: 392203 - DNA, 25 bp, Artificial
  probe
  misc_feature (1)..(25): SEQ ID NO: 4846; WAN024A2B; Start 27; Stop 51
agctagtccaactaactgagttttc

SEQ ID NO: 392204 - DNA, 25 bp, Artificial
  probe
  misc_feature (1)..(25): SEQ ID NO: 4846; WAN024A2B; Start 26; Stop 50
cagctagtccaactaactgagtttt

SEQ ID NO: 392205 - DNA, 25 bp, Artificial
  probe
  misc_feature (1)..(25): SEQ ID NO: 4846; WAN024A2B; Start 33; Stop 57
tccaactaactgagttttcctttat

SEQ ID NO: 392206 - DNA, 25 bp, Artificial
  probe
  misc_feature (1)..(25): SEQ ID NO: 4846; WAN024A2B; Start 34; Stop 58
ccaactaactgagttttcctttatc

SEQ ID NO: 392207 - DNA, 25 bp, Artificial
  probe
  misc_feature (1)..(25): SEQ ID NO: 4846; WAN024A2B; Start 10; Stop 34
ttttaaagagtaaactcagctagtc

SEQ ID NO: 392208 - DNA, 25 bp, Artificial
  probe
  misc_feature (1)..(25): SEQ ID NO: 4846; WAN024A2B; Start 35; Stop 59
caactaactgagttttcctttatct

SEQ ID NO: 392209 - DNA, 25 bp, Artificial
  probe
  misc_feature (1)..(25): SEQ ID NO: 4846; WAN024A2B; Start 37; Stop 61
actaactgagttttcctttatctat

SEQ ID NO: 392210 - DNA, 25 bp, Artificial
  probe
  misc_feature (1)..(25): SEQ ID NO: 4846; WAN024A2B; Start 36; Stop 60
aactaactgagttttcctttatcta

SEQ ID NO: 392211 - DNA, 25 bp, Artificial
  probe
  misc_feature (1)..(25): SEQ ID NO: 4848; WAN0249MJ; Start 51; Stop 75
cgctctattagataatgaactgcct

SEQ ID NO: 392212 - DNA, 25 bp, Artificial
  probe
  misc_feature (1)..(25): SEQ ID NO: 4848; WAN0249MJ; Start 46; Stop 70
cgcaacgctctattagataatgaac

SEQ ID NO: 392213 - DNA, 25 bp, Artificial
  probe
  misc_feature (1)..(25): SEQ ID NO: 4848; WAN0249MJ; Start 45; Stop 69
acgcaacgctctattagataatgaa

SEQ ID NO: 392214 - DNA, 25 bp, Artificial
  probe
  misc_feature (1)..(25): SEQ ID NO: 4848; WAN0249MJ; Start 50; Stop 74
acgctctattagataatgaactgcc

SEQ ID NO: 392215 - DNA, 25 bp, Artificial
  probe
  misc_feature (1)..(25): SEQ ID NO: 4848; WAN0249MJ; Start 61; Stop 85
gataatgaactgcctatacacaaga

SEQ ID NO: 392216 - DNA, 25 bp, Artificial
  probe
  misc_feature (1)..(25): SEQ ID NO: 4848; WAN0249MJ; Start 60; Stop 84
agataatgaactgcctatacacaag

SEQ ID NO: 392217 - DNA, 25 bp, Artificial
  probe
  misc_feature (1)..(25): SEQ ID NO: 4848; WAN0249MJ; Start 49; Stop 73
aacgctctattagataatgaactgc

SEQ ID NO: 392218 - DNA, 25 bp, Artificial
  probe
  misc_feature (1)..(25): SEQ ID NO: 4848; WAN0249MJ; Start 47; Stop 71
gcaacgctctattagataatgaact

SEQ ID NO: 392219 - DNA, 25 bp, Artificial
  probe
  misc_feature (1)..(25): SEQ ID NO: 4848; WAN0249MJ; Start 44; Stop 68
gacgcaacgctctattagataatga

SEQ ID NO: 392220 - DNA, 25 bp, Artificial
  probe
  misc_feature (1)..(25): SEQ ID NO: 4848; WAN0249MJ; Start 63; Stop 87
taatgaactgcctatacacaagatt

SEQ ID NO: 392221 - DNA, 25 bp, Artificial
  probe
  misc_feature (1)..(25): SEQ ID NO: 4848; WAN0249MJ; Start 301; Stop 325
ttaaggaagttgagttcagtatgtt

SEQ ID NO: 392222 - DNA, 25 bp, Artificial
  probe
  misc_feature (1)..(25): SEQ ID NO: 4848; WAN0249MJ; Start 62; Stop 86
ataatgaactgcctatacacaagat

SEQ ID NO: 392223 - DNA, 25 bp, Artificial
  probe
  misc_feature (1)..(25): SEQ ID NO: 4848; WAN0249MJ; Start 43; Stop 67
ggacgcaacgctctattagataatg

SEQ ID NO: 392224 - DNA, 25 bp, Artificial
  probe
  misc_feature (1)..(25): SEQ ID NO: 4848; WAN0249MJ; Start 52; Stop 76
gctctattagataatgaactgccta

SEQ ID NO: 392225 - DNA, 25 bp, Artificial
  probe
  misc_feature (1)..(25): SEQ ID NO: 4848; WAN0249MJ; Start 59; Stop 83
tagataatgaactgcctatacacaa

SEQ ID NO: 392226 - DNA, 25 bp, Artificial
  probe
  misc_feature (1)..(25): SEQ ID NO: 4848; WAN0249MJ; Start 58; Stop 82
ttagataatgaactgcctatacaca

SEQ ID NO: 392227 - DNA, 25 bp, Artificial
  probe
  misc_feature (1)..(25): SEQ ID NO: 4848; WAN0249MJ; Start 48; Stop 72
caacgctctattagataatgaactg

SEQ ID NO: 392228 - DNA, 25 bp, Artificial
  probe
  misc_feature (1)..(25): SEQ ID NO: 4848; WAN0249MJ; Start 71; Stop 95
tgcctatacacaagatttctaacct

SEQ ID NO: 392229 - DNA, 25 bp, Artificial
  probe
  misc_feature (1)..(25): SEQ ID NO: 4848; WAN0249MJ; Start 70; Stop 94
ctgcctatacacaagatttctaacc

SEQ ID NO: 392230 - DNA, 25 bp, Artificial
  probe
  misc_feature (1)..(25): SEQ ID NO: 4848; WAN0249MJ; Start 66; Stop 90
tgaactgcctatacacaagatttct

SEQ ID NO: 392231 - DNA, 25 bp, Artificial
  probe
  misc_feature (1)..(25): SEQ ID NO: 4848; WAN0249MJ; Start 297; Stop 321
tcgtttaaggaagttgagttcagta

SEQ ID NO: 392232 - DNA, 25 bp, Artificial
  probe
  misc_feature (1)..(25): SEQ ID NO: 4848; WAN0249MJ; Start 294; Stop 318
tagtcgtttaaggaagttgagttca

SEQ ID NO: 392233 - DNA, 25 bp, Artificial
  probe
  misc_feature (1)..(25): SEQ ID NO: 4848; WAN0249MJ; Start 65; Stop 89
atgaactgcctatacacaagatttc

SEQ ID NO: 392234 - DNA, 25 bp, Artificial
  probe
  misc_feature (1)..(25): SEQ ID NO: 4848; WAN0249MJ; Start 292; Stop 316
tctagtcgtttaaggaagttgagtt

SEQ ID NO: 392235 - DNA, 25 bp, Artificial
  probe
  misc_feature (1)..(25): SEQ ID NO: 4848; WAN0249MJ; Start 64; Stop 88
aatgaactgcctatacacaagattt

SEQ ID NO: 392236 - DNA, 25 bp, Artificial
  probe
  misc_feature (1)..(25): SEQ ID NO: 4848; WAN0249MJ; Start 291; Stop 315
atctagtcgtttaaggaagttgagt

SEQ ID NO: 392237 - DNA, 25 bp, Artificial
  probe
  misc_feature (1)..(25): SEQ ID NO: 4848; WAN0249MJ; Start 298; Stop 322
cgtttaaggaagttgagttcagtat

SEQ ID NO: 392238 - DNA, 25 bp, Artificial
  probe
  misc_feature (1)..(25): SEQ ID NO: 4848; WAN0249MJ; Start 295; Stop 319
agtcgtttaaggaagttgagttcag

SEQ ID NO: 392239 - DNA, 25 bp, Artificial
  probe
  misc_feature (1)..(25): SEQ ID NO: 4848; WAN0249MJ; Start 69; Stop 93
actgcctatacacaagatttctaac

SEQ ID NO: 392240 - DNA, 25 bp, Artificial
  probe
  misc_feature (1)..(25): SEQ ID NO: 4848; WAN0249MJ; Start 296; Stop 320
gtcgtttaaggaagttgagttcagt

SEQ ID NO: 392241 - DNA, 25 bp, Artificial
  probe
  misc_feature (1)..(25): SEQ ID NO: 4848; WAN0249MJ; Start 293; Stop 317
ctagtcgtttaaggaagttgagttc

SEQ ID NO: 392242 - DNA, 25 bp, Artificial
  probe
  misc_feature (1)..(25): SEQ ID NO: 4848; WAN0249MJ; Start 42; Stop 66
cggacgcaacgctctattagataat

SEQ ID NO: 392243 - DNA, 25 bp, Artificial
  probe
  misc_feature (1)..(25): SEQ ID NO: 4848; WAN0249MJ; Start 72; Stop 96
gcctatacacaagatttctaacctt

SEQ ID NO: 392244 - DNA, 25 bp, Artificial
  probe
  misc_feature (1)..(25): SEQ ID NO: 4849; WAN024AHA; Start 266; Stop 290
agtgaatcatctgctaataagtcca

SEQ ID NO: 392245 - DNA, 25 bp, Artificial
  probe
  misc_feature (1)..(25): SEQ ID NO: 4849; WAN024AHA; Start 259; Stop 283
tcttgctagtgaatcatctgctaat

SEQ ID NO: 392246 - DNA, 25 bp, Artificial
  probe
  misc_feature (1)..(25): SEQ ID NO: 4849; WAN024AHA; Start 255; Stop 279
tatctcttgctagtgaatcatctgc

SEQ ID NO: 392247 - DNA, 25 bp, Artificial
  probe
  misc_feature (1)..(25): SEQ ID NO: 4849; WAN024AHA; Start 258; Stop 282
ctcttgctagtgaatcatctgctaa

SEQ ID NO: 392248 - DNA, 25 bp, Artificial
  probe
  misc_feature (1)..(25): SEQ ID NO: 4849; WAN024AHA; Start 267; Stop 291
gtgaatcatctgctaataagtccat

SEQ ID NO: 392249 - DNA, 25 bp, Artificial
  probe
  misc_feature (1)..(25): SEQ ID NO: 4849; WAN024AHA; Start 317; Stop 341
cttagaagccaagtatccaactctc

SEQ ID NO: 392250 - DNA, 25 bp, Artificial
  probe
  misc_feature (1)..(25): SEQ ID NO: 4849; WAN024AHA; Start 257; Stop 281
tctcttgctagtgaatcatctgcta

SEQ ID NO: 392251 - DNA, 25 bp, Artificial
  probe
  misc_feature (1)..(25): SEQ ID NO: 4849; WAN024AHA; Start 263; Stop 287
gctagtgaatcatctgctaataagt

SEQ ID NO: 392252 - DNA, 25 bp, Artificial
  probe
  misc_feature (1)..(25): SEQ ID NO: 4849; WAN024AHA; Start 262; Stop 286
tgctagtgaatcatctgctaataag

SEQ ID NO: 392253 - DNA, 25 bp, Artificial
  probe
  misc_feature (1)..(25): SEQ ID NO: 4849; WAN024AHA; Start 260; Stop 284
cttgctagtgaatcatctgctaata

SEQ ID NO: 392254 - DNA, 25 bp, Artificial
  probe
  misc_feature (1)..(25): SEQ ID NO: 4849; WAN024AHA; Start 256; Stop 280
atctcttgctagtgaatcatctgct

SEQ ID NO: 392255 - DNA, 25 bp, Artificial
  probe
  misc_feature (1)..(25): SEQ ID NO: 4849; WAN024AHA; Start 265; Stop 289
tagtgaatcatctgctaataagtcc

SEQ ID NO: 392256 - DNA, 25 bp, Artificial
  probe
  misc_feature (1)..(25): SEQ ID NO: 4849; WAN024AHA; Start 261; Stop 285
ttgctagtgaatcatctgctaataa

SEQ ID NO: 392257 - DNA, 25 bp, Artificial
  probe
  misc_feature (1)..(25): SEQ ID NO: 4849; WAN024AHA; Start 318; Stop 342
ttagaagccaagtatccaactctcc

SEQ ID NO: 392258 - DNA, 25 bp, Artificial
  probe
  misc_feature (1)..(25): SEQ ID NO: 4849; WAN024AHA; Start 254; Stop 278
atatctcttgctagtgaatcatctg

SEQ ID NO: 392259 - DNA, 25 bp, Artificial
  probe
  misc_feature (1)..(25): SEQ ID NO: 4849; WAN024AHA; Start 325; Stop 349
ccaagtatccaactctccaactctc

SEQ ID NO: 392260 - DNA, 25 bp, Artificial
  probe
  misc_feature (1)..(25): SEQ ID NO: 4849; WAN024AHA; Start 268; Stop 292
tgaatcatctgctaataagtccata

SEQ ID NO: 392261 - DNA, 25 bp, Artificial
  probe
  misc_feature (1)..(25): SEQ ID NO: 4849; WAN024AHA; Start 365; Stop 389
agggtttgacttggtgttctttata

SEQ ID NO: 392262 - DNA, 25 bp, Artificial
  probe
  misc_feature (1)..(25): SEQ ID NO: 4849; WAN024AHA; Start 329; Stop 353
gtatccaactctccaactctcgttc

SEQ ID NO: 392263 - DNA, 25 bp, Artificial
  probe
  misc_feature (1)..(25): SEQ ID NO: 4849; WAN024AHA; Start 405; Stop 429
agtattcacggatagcatctttcaa

SEQ ID NO: 392264 - DNA, 25 bp, Artificial
  probe
  misc_feature (1)..(25): SEQ ID NO: 4849; WAN024AHA; Start 411; Stop 435
cacggatagcatctttcaaacattt

SEQ ID NO: 392265 - DNA, 25 bp, Artificial
  probe
  misc_feature (1)..(25): SEQ ID NO: 4849; WAN024AHA; Start 407; Stop 431
tattcacggatagcatctttcaaac

SEQ ID NO: 392266 - DNA, 25 bp, Artificial
  probe
  misc_feature (1)..(25): SEQ ID NO: 4849; WAN024AHA; Start 406; Stop 430
gtattcacggatagcatctttcaaa

SEQ ID NO: 392267 - DNA, 25 bp, Artificial
  probe
  misc_feature (1)..(25): SEQ ID NO: 4849; WAN024AHA; Start 404; Stop 428
tagtattcacggatagcatctttca

SEQ ID NO: 392268 - DNA, 25 bp, Artificial
  probe
  misc_feature (1)..(25): SEQ ID NO: 4849; WAN024AHA; Start 412; Stop 436
acggatagcatctttcaaacattta

SEQ ID NO: 392269 - DNA, 25 bp, Artificial
  probe
  misc_feature (1)..(25): SEQ ID NO: 4849; WAN024AHA; Start 326; Stop 350
caagtatccaactctccaactctcg

SEQ ID NO: 392270 - DNA, 25 bp, Artificial
  probe
  misc_feature (1)..(25): SEQ ID NO: 4849; WAN024AHA; Start 275; Stop 299
tctgctaataagtccatatttcgct

SEQ ID NO: 392271 - DNA, 25 bp, Artificial
  probe
  misc_feature (1)..(25): SEQ ID NO: 4849; WAN024AHA; Start 410; Stop 434
tcacggatagcatctttcaaacatt

SEQ ID NO: 392272 - DNA, 25 bp, Artificial
  probe
  misc_feature (1)..(25): SEQ ID NO: 4849; WAN024AHA; Start 409; Stop 433
ttcacggatagcatctttcaaacat

SEQ ID NO: 392273 - DNA, 25 bp, Artificial
  probe
  misc_feature (1)..(25): SEQ ID NO: 4849; WAN024AHA; Start 408; Stop 432
attcacggatagcatctttcaaaca

SEQ ID NO: 392274 - DNA, 25 bp, Artificial
  probe
  misc_feature (1)..(25): SEQ ID NO: 4849; WAN024AHA; Start 364; Stop 388
aagggtttgacttggtgttctttat

SEQ ID NO: 392275 - DNA, 25 bp, Artificial
  probe
  misc_feature (1)..(25): SEQ ID NO: 4849; WAN024AHA; Start 277; Stop 301
tgctaataagtccatatttcgcttg

SEQ ID NO: 392276 - DNA, 25 bp, Artificial
  probe
  misc_feature (1)..(25): SEQ ID NO: 4849; WAN024AHA; Start 319; Stop 343
tagaagccaagtatccaactctcca

SEQ ID NO: 392277 - DNA, 25 bp, Artificial
  probe
  misc_feature (1)..(25): SEQ ID NO: 4850; WAN0249GL; Start 26; Stop 50
gaaaacaccttttagaaagatacct

SEQ ID NO: 392278 - DNA, 25 bp, Artificial
  probe
  misc_feature (1)..(25): SEQ ID NO: 4850; WAN0249GL; Start 25; Stop 49
agaaaacaccttttagaaagatacc

SEQ ID NO: 392279 - DNA, 25 bp, Artificial
  probe
  misc_feature (1)..(25): SEQ ID NO: 4850; WAN0249GL; Start 17; Stop 41
actcatatagaaaacaccttttaga

SEQ ID NO: 392280 - DNA, 25 bp, Artificial
  probe
  misc_feature (1)..(25): SEQ ID NO: 4850; WAN0249GL; Start 24; Stop 48
tagaaaacaccttttagaaagatac

SEQ ID NO: 392281 - DNA, 25 bp, Artificial
  probe
  misc_feature (1)..(25): SEQ ID NO: 4851; WAN0249GD; Start 84; Stop 108
aaagaaattattgggctgaaagttt

SEQ ID NO: 392282 - DNA, 25 bp, Artificial
  probe
  misc_feature (1)..(25): SEQ ID NO: 4851; WAN0249GD; Start 85; Stop 109
aagaaattattgggctgaaagtttt

SEQ ID NO: 392283 - DNA, 25 bp, Artificial
  probe
  misc_feature (1)..(25): SEQ ID NO: 4851; WAN0249GD; Start 83; Stop 107
aaaagaaattattgggctgaaagtt

SEQ ID NO: 392284 - DNA, 25 bp, Artificial
  probe
  misc_feature (1)..(25): SEQ ID NO: 4851; WAN0249GD; Start 82; Stop 106
taaaagaaattattgggctgaaagt

SEQ ID NO: 392285 - DNA, 25 bp, Artificial
  probe
  misc_feature (1)..(25): SEQ ID NO: 4851; WAN0249GD; Start 50; Stop 74
agagtatttgagcacaatataatct

SEQ ID NO: 392286 - DNA, 25 bp, Artificial
  probe
  misc_feature (1)..(25): SEQ ID NO: 4851; WAN0249GD; Start 57; Stop 81
ttgagcacaatataatctcaccttt

SEQ ID NO: 392287 - DNA, 25 bp, Artificial
  probe
  misc_feature (1)..(25): SEQ ID NO: 4851; WAN0249GD; Start 56; Stop 80
tttgagcacaatataatctcacctt

SEQ ID NO: 392288 - DNA, 25 bp, Artificial
  probe
  misc_feature (1)..(25): SEQ ID NO: 4851; WAN0249GD; Start 41; Stop 65
aagaataaaagagtatttgagcaca

SEQ ID NO: 392289 - DNA, 25 bp, Artificial
  probe
  misc_feature (1)..(25): SEQ ID NO: 4851; WAN0249GD; Start 55; Stop 79
atttgagcacaatataatctcacct

SEQ ID NO: 392290 - DNA, 25 bp, Artificial
  probe
  misc_feature (1)..(25): SEQ ID NO: 4851; WAN0249GD; Start 51; Stop 75
gagtatttgagcacaatataatctc

SEQ ID NO: 392291 - DNA, 25 bp, Artificial
  probe
  misc_feature (1)..(25): SEQ ID NO: 4851; WAN0249GD; Start 42; Stop 66
agaataaaagagtatttgagcacaa

SEQ ID NO: 392292 - DNA, 25 bp, Artificial
  probe
  misc_feature (1)..(25): SEQ ID NO: 4851; WAN0249GD; Start 1; Stop 25
ttctcttcctttctaactacaatta

SEQ ID NO: 392293 - DNA, 25 bp, Artificial
  probe
  misc_feature (1)..(25): SEQ ID NO: 4851; WAN0249GD; Start 59; Stop 83
gagcacaatataatctcacctttta

SEQ ID NO: 392294 - DNA, 25 bp, Artificial
  probe
  misc_feature (1)..(25): SEQ ID NO: 4851; WAN0249GD; Start 60; Stop 84
agcacaatataatctcaccttttaa

SEQ ID NO: 392295 - DNA, 25 bp, Artificial
  probe
  misc_feature (1)..(25): SEQ ID NO: 4851; WAN0249GD; Start 81; Stop 105
ttaaaagaaattattgggctgaaag

SEQ ID NO: 392296 - DNA, 25 bp, Artificial
  probe
  misc_feature (1)..(25): SEQ ID NO: 4851; WAN0249GD; Start 49; Stop 73
aagagtatttgagcacaatataatc

SEQ ID NO: 392297 - DNA, 25 bp, Artificial
  probe
  misc_feature (1)..(25): SEQ ID NO: 4851; WAN0249GD; Start 2; Stop 26
tctcttcctttctaactacaattat

SEQ ID NO: 392298 - DNA, 25 bp, Artificial
  probe
  misc_feature (1)..(25): SEQ ID NO: 4851; WAN0249GD; Start 43; Stop 67
gaataaaagagtatttgagcacaat

SEQ ID NO: 392299 - DNA, 25 bp, Artificial
  probe
  misc_feature (1)..(25): SEQ ID NO: 4851; WAN0249GD; Start 54; Stop 78
tatttgagcacaatataatctcacc

SEQ ID NO: 392300 - DNA, 25 bp, Artificial
  probe
  misc_feature (1)..(25): SEQ ID NO: 4851; WAN0249GD; Start 7; Stop 31
tcctttctaactacaattatagtgt

SEQ ID NO: 392301 - DNA, 25 bp, Artificial
  probe
  misc_feature (1)..(25): SEQ ID NO: 4851; WAN0249GD; Start 58; Stop 82
tgagcacaatataatctcacctttt

SEQ ID NO: 392302 - DNA, 25 bp, Artificial
  probe
  misc_feature (1)..(25): SEQ ID NO: 4851; WAN0249GD; Start 80; Stop 104
tttaaaagaaattattgggctgaaa

SEQ ID NO: 392303 - DNA, 25 bp, Artificial
  probe
  misc_feature (1)..(25): SEQ ID NO: 4851; WAN0249GD; Start 53; Stop 77
gtatttgagcacaatataatctcac

SEQ ID NO: 392304 - DNA, 25 bp, Artificial
  probe
  misc_feature (1)..(25): SEQ ID NO: 4851; WAN0249GD; Start 40; Stop 64
taagaataaaagagtatttgagcac

SEQ ID NO: 392305 - DNA, 25 bp, Artificial
  probe
  misc_feature (1)..(25): SEQ ID NO: 4851; WAN0249GD; Start 61; Stop 85
gcacaatataatctcaccttttaaa

SEQ ID NO: 392306 - DNA, 25 bp, Artificial
  probe
  misc_feature (1)..(25): SEQ ID NO: 4851; WAN0249GD; Start 52; Stop 76
agtatttgagcacaatataatctca

SEQ ID NO: 392307 - DNA, 25 bp, Artificial
  probe
  misc_feature (1)..(25): SEQ ID NO: 4851; WAN0249GD; Start 47; Stop 71
aaaagagtatttgagcacaatataa

SEQ ID NO: 392308 - DNA, 25 bp, Artificial
  probe
  misc_feature (1)..(25): SEQ ID NO: 4851; WAN0249GD; Start 44; Stop 68
aataaaagagtatttgagcacaata

SEQ ID NO: 392309 - DNA, 25 bp, Artificial
  probe
  misc_feature (1)..(25): SEQ ID NO: 4851; WAN0249GD; Start 79; Stop 103
ttttaaaagaaattattgggctgaa

SEQ ID NO: 392310 - DNA, 25 bp, Artificial
  probe
  misc_feature (1)..(25): SEQ ID NO: 4852; WAN0249GA; Start 151; Stop 175
tgtcttggtatatctggtactcact

SEQ ID NO: 392311 - DNA, 25 bp, Artificial
  probe
  misc_feature (1)..(25): SEQ ID NO: 4852; WAN0249GA; Start 148; Stop 172
cgatgtcttggtatatctggtactc

SEQ ID NO: 392312 - DNA, 25 bp, Artificial
  probe
  misc_feature (1)..(25): SEQ ID NO: 4852; WAN0249GA; Start 150; Stop 174
atgtcttggtatatctggtactcac

SEQ ID NO: 392313 - DNA, 25 bp, Artificial
  probe
  misc_feature (1)..(25): SEQ ID NO: 4852; WAN0249GA; Start 152; Stop 176
gtcttggtatatctggtactcactt

SEQ ID NO: 392314 - DNA, 25 bp, Artificial
  probe
  misc_feature (1)..(25): SEQ ID NO: 4852; WAN0249GA; Start 147; Stop 171
acgatgtcttggtatatctggtact

SEQ ID NO: 392315 - DNA, 25 bp, Artificial
  probe
  misc_feature (1)..(25): SEQ ID NO: 4852; WAN0249GA; Start 149; Stop 173
gatgtcttggtatatctggtactca

SEQ ID NO: 392316 - DNA, 25 bp, Artificial
  probe
  misc_feature (1)..(25): SEQ ID NO: 4852; WAN0249GA; Start 145; Stop 169
tgacgatgtcttggtatatctggta

SEQ ID NO: 392317 - DNA, 25 bp, Artificial
  probe
  misc_feature (1)..(25): SEQ ID NO: 4852; WAN0249GA; Start 138; Stop 162
tagatggtgacgatgtcttggtata

SEQ ID NO: 392318 - DNA, 25 bp, Artificial
  probe
  misc_feature (1)..(25): SEQ ID NO: 4852; WAN0249GA; Start 140; Stop 164
gatggtgacgatgtcttggtatatc

SEQ ID NO: 392319 - DNA, 25 bp, Artificial
  probe
  misc_feature (1)..(25): SEQ ID NO: 4852; WAN0249GA; Start 155; Stop 179
ttggtatatctggtactcacttaca

SEQ ID NO: 392320 - DNA, 25 bp, Artificial
  probe
  misc_feature (1)..(25): SEQ ID NO: 4852; WAN0249GA; Start 141; Stop 165
atggtgacgatgtcttggtatatct

SEQ ID NO: 392321 - DNA, 25 bp, Artificial
  probe
  misc_feature (1)..(25): SEQ ID NO: 4852; WAN0249GA; Start 139; Stop 163
agatggtgacgatgtcttggtatat

SEQ ID NO: 392322 - DNA, 25 bp, Artificial
  probe
  misc_feature (1)..(25): SEQ ID NO: 4852; WAN0249GA; Start 156; Stop 180
tggtatatctggtactcacttacat

SEQ ID NO: 392323 - DNA, 25 bp, Artificial
  probe
  misc_feature (1)..(25): SEQ ID NO: 4852; WAN0249GA; Start 137; Stop 161
ttagatggtgacgatgtcttggtat

SEQ ID NO: 392324 - DNA, 25 bp, Artificial
  probe
  misc_feature (1)..(25): SEQ ID NO: 4852; WAN0249GA; Start 146; Stop 170
gacgatgtcttggtatatctggtac

SEQ ID NO: 392325 - DNA, 25 bp, Artificial
  probe
  misc_feature (1)..(25): SEQ ID NO: 4852; WAN0249GA; Start 154; Stop 178
cttggtatatctggtactcacttac

SEQ ID NO: 392326 - DNA, 25 bp, Artificial
  probe
  misc_feature (1)..(25): SEQ ID NO: 4852; WAN0249GA; Start 131; Stop 155
tataccttagatggtgacgatgtct

SEQ ID NO: 392327 - DNA, 25 bp, Artificial
  probe
  misc_feature (1)..(25): SEQ ID NO: 4852; WAN0249GA; Start 153; Stop 177
tcttggtatatctggtactcactta

SEQ ID NO: 392328 - DNA, 25 bp, Artificial
  probe
  misc_feature (1)..(25): SEQ ID NO: 4852; WAN0249GA; Start 130; Stop 154
atataccttagatggtgacgatgtc

SEQ ID NO: 392329 - DNA, 25 bp, Artificial
  probe
  misc_feature (1)..(25): SEQ ID NO: 4852; WAN0249GA; Start 129; Stop 153
aatataccttagatggtgacgatgt

SEQ ID NO: 392330 - DNA, 25 bp, Artificial
  probe
  misc_feature (1)..(25): SEQ ID NO: 4852; WAN0249GA; Start 126; Stop 150
ttgaatataccttagatggtgacga

SEQ ID NO: 392331 - DNA, 25 bp, Artificial
  probe
  misc_feature (1)..(25): SEQ ID NO: 4852; WAN0249GA; Start 144; Stop 168
gtgacgatgtcttggtatatctggt

SEQ ID NO: 392332 - DNA, 25 bp, Artificial
  probe
  misc_feature (1)..(25): SEQ ID NO: 4852; WAN0249GA; Start 142; Stop 166
tggtgacgatgtcttggtatatctg

SEQ ID NO: 392333 - DNA, 25 bp, Artificial
  probe
  misc_feature (1)..(25): SEQ ID NO: 4852; WAN0249GA; Start 136; Stop 160
cttagatggtgacgatgtcttggta

SEQ ID NO: 392334 - DNA, 25 bp, Artificial
  probe
  misc_feature (1)..(25): SEQ ID NO: 4852; WAN0249GA; Start 132; Stop 156
ataccttagatggtgacgatgtctt

SEQ ID NO: 392335 - DNA, 25 bp, Artificial
  probe
  misc_feature (1)..(25): SEQ ID NO: 4852; WAN0249GA; Start 127; Stop 151
tgaatataccttagatggtgacgat

SEQ ID NO: 392336 - DNA, 25 bp, Artificial
  probe
  misc_feature (1)..(25): SEQ ID NO: 4852; WAN0249GA; Start 128; Stop 152
gaatataccttagatggtgacgatg

SEQ ID NO: 392337 - DNA, 25 bp, Artificial
  probe
  misc_feature (1)..(25): SEQ ID NO: 4852; WAN0249GA; Start 426; Stop 450
ttctgtattgattcgtattgaatgc

SEQ ID NO: 392338 - DNA, 25 bp, Artificial
  probe
  misc_feature (1)..(25): SEQ ID NO: 4852; WAN0249GA; Start 143; Stop 167
ggtgacgatgtcttggtatatctgg

SEQ ID NO: 392339 - DNA, 25 bp, Artificial
  probe
  misc_feature (1)..(25): SEQ ID NO: 4852; WAN0249GA; Start 133; Stop 157
taccttagatggtgacgatgtcttg

SEQ ID NO: 392340 - DNA, 25 bp, Artificial
  probe
  misc_feature (1)..(25): SEQ ID NO: 4852; WAN0249GA; Start 232; Stop 256
aatagtgtagaggcgttatttgaaa

SEQ ID NO: 392341 - DNA, 25 bp, Artificial
  probe
  misc_feature (1)..(25): SEQ ID NO: 4852; WAN0249GA; Start 423; Stop 447
ttcttctgtattgattcgtattgaa

SEQ ID NO: 392342 - DNA, 25 bp, Artificial
  probe
  misc_feature (1)..(25): SEQ ID NO: 4852; WAN0249GA; Start 90; Stop 114
ggatattcagaaatctagttggtca

SEQ ID NO: 392343 - DNA, 25 bp, Artificial
  probe
  misc_feature (1)..(25): SEQ ID NO: 4853; WAN0249WV; Start 2; Stop 26
tcttactcctttaatagctacattt

SEQ ID NO: 392344 - DNA, 25 bp, Artificial
  probe
  misc_feature (1)..(25): SEQ ID NO: 4853; WAN0249WV; Start 1; Stop 25
ttcttactcctttaatagctacatt

SEQ ID NO: 392345 - DNA, 25 bp, Artificial
  probe
  misc_feature (1)..(25): SEQ ID NO: 4854; WAN024AFM; Start 59; Stop 83
ttgaaagacgtgaatgatatgaaca

SEQ ID NO: 392346 - DNA, 25 bp, Artificial
  probe
  misc_feature (1)..(25): SEQ ID NO: 4854; WAN024AFM; Start 60; Stop 84
tgaaagacgtgaatgatatgaacat

SEQ ID NO: 392347 - DNA, 25 bp, Artificial
  probe
  misc_feature (1)..(25): SEQ ID NO: 4854; WAN024AFM; Start 61; Stop 85
gaaagacgtgaatgatatgaacatg

SEQ ID NO: 392348 - DNA, 25 bp, Artificial
  probe
  misc_feature (1)..(25): SEQ ID NO: 4854; WAN024AFM; Start 67; Stop 91
cgtgaatgatatgaacatgtccttg

SEQ ID NO: 392349 - DNA, 25 bp, Artificial
  probe
  misc_feature (1)..(25): SEQ ID NO: 4854; WAN024AFM; Start 68; Stop 92
gtgaatgatatgaacatgtccttgc

SEQ ID NO: 392350 - DNA, 25 bp, Artificial
  probe
  misc_feature (1)..(25): SEQ ID NO: 4854; WAN024AFM; Start 66; Stop 90
acgtgaatgatatgaacatgtcctt

SEQ ID NO: 392351 - DNA, 25 bp, Artificial
  probe
  misc_feature (1)..(25): SEQ ID NO: 4854; WAN024AFM; Start 58; Stop 82
attgaaagacgtgaatgatatgaac

SEQ ID NO: 392352 - DNA, 25 bp, Artificial
  probe
  misc_feature (1)..(25): SEQ ID NO: 4854; WAN024AFM; Start 63; Stop 87
aagacgtgaatgatatgaacatgtc

SEQ ID NO: 392353 - DNA, 25 bp, Artificial
  probe
  misc_feature (1)..(25): SEQ ID NO: 4854; WAN024AFM; Start 65; Stop 89
gacgtgaatgatatgaacatgtcct

SEQ ID NO: 392354 - DNA, 25 bp, Artificial
  probe
  misc_feature (1)..(25): SEQ ID NO: 4854; WAN024AFM; Start 64; Stop 88
agacgtgaatgatatgaacatgtcc

SEQ ID NO: 392355 - DNA, 25 bp, Artificial
  probe
  misc_feature (1)..(25): SEQ ID NO: 4854; WAN024AFM; Start 57; Stop 81
aattgaaagacgtgaatgatatgaa

SEQ ID NO: 392356 - DNA, 25 bp, Artificial
  probe
  misc_feature (1)..(25): SEQ ID NO: 4854; WAN024AFM; Start 56; Stop 80
taattgaaagacgtgaatgatatga

SEQ ID NO: 392357 - DNA, 25 bp, Artificial
  probe
  misc_feature (1)..(25): SEQ ID NO: 4854; WAN024AFM; Start 62; Stop 86
aaagacgtgaatgatatgaacatgt

SEQ ID NO: 392358 - DNA, 25 bp, Artificial
  probe
  misc_feature (1)..(25): SEQ ID NO: 4854; WAN024AFM; Start 55; Stop 79
ataattgaaagacgtgaatgatatg

SEQ ID NO: 392359 - DNA, 25 bp, Artificial
  probe
  misc_feature (1)..(25): SEQ ID NO: 4854; WAN024AFM; Start 52; Stop 76
tttataattgaaagacgtgaatgat

SEQ ID NO: 392360 - DNA, 25 bp, Artificial
  probe
  misc_feature (1)..(25): SEQ ID NO: 4854; WAN024AFM; Start 51; Stop 75
ttttataattgaaagacgtgaatga

SEQ ID NO: 392361 - DNA, 25 bp, Artificial
  probe
  misc_feature (1)..(25): SEQ ID NO: 4854; WAN024AFM; Start 24; Stop 48
aaagcaaaatatcttagggtatttt

SEQ ID NO: 392362 - DNA, 25 bp, Artificial
  probe
  misc_feature (1)..(25): SEQ ID NO: 4855; WAN0249S6; Start 153; Stop 177
cctctaacaatcgcaatctcttctt

SEQ ID NO: 392363 - DNA, 25 bp, Artificial
  probe
  misc_feature (1)..(25): SEQ ID NO: 4855; WAN0249S6; Start 151; Stop 175
cacctctaacaatcgcaatctcttc

SEQ ID NO: 392364 - DNA, 25 bp, Artificial
  probe
  misc_feature (1)..(25): SEQ ID NO: 4855; WAN0249S6; Start 152; Stop 176
acctctaacaatcgcaatctcttct

SEQ ID NO: 392365 - DNA, 25 bp, Artificial
  probe
  misc_feature (1)..(25): SEQ ID NO: 4855; WAN0249S6; Start 150; Stop 174
tcacctctaacaatcgcaatctctt

SEQ ID NO: 392366 - DNA, 25 bp, Artificial
  probe
  misc_feature (1)..(25): SEQ ID NO: 4855; WAN0249S6; Start 149; Stop 173
ttcacctctaacaatcgcaatctct

SEQ ID NO: 392367 - DNA, 25 bp, Artificial
  probe
  misc_feature (1)..(25): SEQ ID NO: 4855; WAN0249S6; Start 100; Stop 124
tgcctttcctaatagagttgttcat

SEQ ID NO: 392368 - DNA, 25 bp, Artificial
  probe
  misc_feature (1)..(25): SEQ ID NO: 4855; WAN0249S6; Start 99; Stop 123
ttgcctttcctaatagagttgttca

SEQ ID NO: 392369 - DNA, 25 bp, Artificial
  probe
  misc_feature (1)..(25): SEQ ID NO: 4855; WAN0249S6; Start 2; Stop 26
tcttattgagtccaaccattactag

SEQ ID NO: 392370 - DNA, 25 bp, Artificial
  probe
  misc_feature (1)..(25): SEQ ID NO: 4855; WAN0249S6; Start 98; Stop 122
tttgcctttcctaatagagttgttc

SEQ ID NO: 392371 - DNA, 25 bp, Artificial
  probe
  misc_feature (1)..(25): SEQ ID NO: 4855; WAN0249S6; Start 1; Stop 25
ttcttattgagtccaaccattacta

SEQ ID NO: 392372 - DNA, 25 bp, Artificial
  probe
  misc_feature (1)..(25): SEQ ID NO: 4855; WAN0249S6; Start 148; Stop 172
tttcacctctaacaatcgcaatctc

SEQ ID NO: 392373 - DNA, 25 bp, Artificial
  probe
  misc_feature (1)..(25): SEQ ID NO: 4855; WAN0249S6; Start 97; Stop 121
atttgcctttcctaatagagttgtt

SEQ ID NO: 392374 - DNA, 25 bp, Artificial
  probe
  misc_feature (1)..(25): SEQ ID NO: 4855; WAN0249S6; Start 101; Stop 125
gcctttcctaatagagttgttcata

SEQ ID NO: 392375 - DNA, 25 bp, Artificial
  probe
  misc_feature (1)..(25): SEQ ID NO: 4855; WAN0249S6; Start 96; Stop 120
aatttgcctttcctaatagagttgt

SEQ ID NO: 392376 - DNA, 25 bp, Artificial
  probe
  misc_feature (1)..(25): SEQ ID NO: 4855; WAN0249S6; Start 7; Stop 31
ttgagtccaaccattactagtctat

SEQ ID NO: 392377 - DNA, 25 bp, Artificial
  probe
  misc_feature (1)..(25): SEQ ID NO: 4855; WAN0249S6; Start 6; Stop 30
attgagtccaaccattactagtcta

SEQ ID NO: 392378 - DNA, 25 bp, Artificial
  probe
  misc_feature (1)..(25): SEQ ID NO: 4855; WAN0249S6; Start 5; Stop 29
tattgagtccaaccattactagtct

SEQ ID NO: 392379 - DNA, 25 bp, Artificial
  probe
  misc_feature (1)..(25): SEQ ID NO: 4855; WAN0249S6; Start 95; Stop 119
taatttgcctttcctaatagagttg

SEQ ID NO: 392380 - DNA, 25 bp, Artificial
  probe
  misc_feature (1)..(25): SEQ ID NO: 4855; WAN0249S6; Start 4; Stop 28
ttattgagtccaaccattactagtc

SEQ ID NO: 392381 - DNA, 25 bp, Artificial
  probe
  misc_feature (1)..(25): SEQ ID NO: 4855; WAN0249S6; Start 3; Stop 27
cttattgagtccaaccattactagt

SEQ ID NO: 392382 - DNA, 25 bp, Artificial
  probe
  misc_feature (1)..(25): SEQ ID NO: 4855; WAN0249S6; Start 8; Stop 32
tgagtccaaccattactagtctata

SEQ ID NO: 392383 - DNA, 25 bp, Artificial
  probe
  misc_feature (1)..(25): SEQ ID NO: 4855; WAN0249S6; Start 147; Stop 171
ttttcacctctaacaatcgcaatct

SEQ ID NO: 392384 - DNA, 25 bp, Artificial
  probe
  misc_feature (1)..(25): SEQ ID NO: 4855; WAN0249S6; Start 94; Stop 118
ttaatttgcctttcctaatagagtt

SEQ ID NO: 392385 - DNA, 25 bp, Artificial
  probe
  misc_feature (1)..(25): SEQ ID NO: 4855; WAN0249S6; Start 102; Stop 126
cctttcctaatagagttgttcatat

SEQ ID NO: 392386 - DNA, 25 bp, Artificial
  probe
  misc_feature (1)..(25): SEQ ID NO: 4855; WAN0249S6; Start 9; Stop 33
gagtccaaccattactagtctatat

SEQ ID NO: 392387 - DNA, 25 bp, Artificial
  probe
  misc_feature (1)..(25): SEQ ID NO: 4855; WAN0249S6; Start 12; Stop 36
tccaaccattactagtctatattgt

SEQ ID NO: 392388 - DNA, 25 bp, Artificial
  probe
  misc_feature (1)..(25): SEQ ID NO: 4855; WAN0249S6; Start 11; Stop 35
gtccaaccattactagtctatattg

SEQ ID NO: 392389 - DNA, 25 bp, Artificial
  probe
  misc_feature (1)..(25): SEQ ID NO: 4855; WAN0249S6; Start 69; Stop 93
gtagctgctaaaacatttctaggaa

SEQ ID NO: 392390 - DNA, 25 bp, Artificial
  probe
  misc_feature (1)..(25): SEQ ID NO: 4855; WAN0249S6; Start 72; Stop 96
gctgctaaaacatttctaggaatta

SEQ ID NO: 392391 - DNA, 25 bp, Artificial
  probe
  misc_feature (1)..(25): SEQ ID NO: 4855; WAN0249S6; Start 71; Stop 95
agctgctaaaacatttctaggaatt

SEQ ID NO: 392392 - DNA, 25 bp, Artificial
  probe
  misc_feature (1)..(25): SEQ ID NO: 4855; WAN0249S6; Start 68; Stop 92
tgtagctgctaaaacatttctagga

SEQ ID NO: 392393 - DNA, 25 bp, Artificial
  probe
  misc_feature (1)..(25): SEQ ID NO: 4855; WAN0249S6; Start 67; Stop 91
ctgtagctgctaaaacatttctagg

SEQ ID NO: 392394 - DNA, 25 bp, Artificial
  probe
  misc_feature (1)..(25): SEQ ID NO: 4855; WAN0249S6; Start 10; Stop 34
agtccaaccattactagtctatatt

SEQ ID NO: 392395 - DNA, 25 bp, Artificial
  probe
  misc_feature (1)..(25): SEQ ID NO: 4856; WAN0249J4; Start 1; Stop 25
ttcttgagttgatagaaagcaaggc

SEQ ID NO: 392396 - DNA, 25 bp, Artificial
  probe
  misc_feature (1)..(25): SEQ ID NO: 4856; WAN0249J4; Start 2; Stop 26
tcttgagttgatagaaagcaaggct

SEQ ID NO: 392397 - DNA, 25 bp, Artificial
  probe
  misc_feature (1)..(25): SEQ ID NO: 4856; WAN0249J4; Start 3; Stop 27
cttgagttgatagaaagcaaggctt

SEQ ID NO: 392398 - DNA, 25 bp, Artificial
  probe
  misc_feature (1)..(25): SEQ ID NO: 4857; WAN024A45; Start 67; Stop 91
gctatattactctttcctaacctcc

SEQ ID NO: 392399 - DNA, 25 bp, Artificial
  probe
  misc_feature (1)..(25): SEQ ID NO: 4857; WAN024A45; Start 66; Stop 90
ggctatattactctttcctaacctc

SEQ ID NO: 392400 - DNA, 25 bp, Artificial
  probe
  misc_feature (1)..(25): SEQ ID NO: 4857; WAN024A45; Start 1; Stop 25
ttctttatgagttgacgcatgaatt

SEQ ID NO: 392401 - DNA, 25 bp, Artificial
  probe
  misc_feature (1)..(25): SEQ ID NO: 4857; WAN024A45; Start 6; Stop 30
tatgagttgacgcatgaattcttac

SEQ ID NO: 392402 - DNA, 25 bp, Artificial
  probe
  misc_feature (1)..(25): SEQ ID NO: 4857; WAN024A45; Start 5; Stop 29
ttatgagttgacgcatgaattctta

SEQ ID NO: 392403 - DNA, 25 bp, Artificial
  probe
  misc_feature (1)..(25): SEQ ID NO: 4857; WAN024A45; Start 7; Stop 31
atgagttgacgcatgaattcttacc

SEQ ID NO: 392404 - DNA, 25 bp, Artificial
  probe
  misc_feature (1)..(25): SEQ ID NO: 4857; WAN024A45; Start 65; Stop 89
aggctatattactctttcctaacct

SEQ ID NO: 392405 - DNA, 25 bp, Artificial
  probe
  misc_feature (1)..(25): SEQ ID NO: 4857; WAN024A45; Start 9; Stop 33
gagttgacgcatgaattcttaccaa

SEQ ID NO: 392406 - DNA, 25 bp, Artificial
  probe
  misc_feature (1)..(25): SEQ ID NO: 4857; WAN024A45; Start 70; Stop 94
atattactctttcctaacctccttt

SEQ ID NO: 392407 - DNA, 25 bp, Artificial
  probe
  misc_feature (1)..(25): SEQ ID NO: 4857; WAN024A45; Start 8; Stop 32
tgagttgacgcatgaattcttacca

SEQ ID NO: 392408 - DNA, 25 bp, Artificial
  probe
  misc_feature (1)..(25): SEQ ID NO: 4857; WAN024A45; Start 68; Stop 92
ctatattactctttcctaacctcct

SEQ ID NO: 392409 - DNA, 25 bp, Artificial
  probe
  misc_feature (1)..(25): SEQ ID NO: 4857; WAN024A45; Start 3; Stop 27
ctttatgagttgacgcatgaattct

SEQ ID NO: 392410 - DNA, 25 bp, Artificial
  probe
  misc_feature (1)..(25): SEQ ID NO: 4857; WAN024A45; Start 2; Stop 26
tctttatgagttgacgcatgaattc

SEQ ID NO: 392411 - DNA, 25 bp, Artificial
  probe
  misc_feature (1)..(25): SEQ ID NO: 4857; WAN024A45; Start 4; Stop 28
tttatgagttgacgcatgaattctt

SEQ ID NO: 392412 - DNA, 25 bp, Artificial
  probe
  misc_feature (1)..(25): SEQ ID NO: 4857; WAN024A45; Start 11; Stop 35
gttgacgcatgaattcttaccaaat

SEQ ID NO: 392413 - DNA, 25 bp, Artificial
  probe
  misc_feature (1)..(25): SEQ ID NO: 4857; WAN024A45; Start 13; Stop 37
tgacgcatgaattcttaccaaattt

SEQ ID NO: 392414 - DNA, 25 bp, Artificial
  probe
  misc_feature (1)..(25): SEQ ID NO: 4857; WAN024A45; Start 12; Stop 36
ttgacgcatgaattcttaccaaatt

SEQ ID NO: 392415 - DNA, 25 bp, Artificial
  probe
  misc_feature (1)..(25): SEQ ID NO: 4857; WAN024A45; Start 15; Stop 39
acgcatgaattcttaccaaatttct

SEQ ID NO: 392416 - DNA, 25 bp, Artificial
  probe
  misc_feature (1)..(25): SEQ ID NO: 4857; WAN024A45; Start 18; Stop 42
catgaattcttaccaaatttctgcg

SEQ ID NO: 392417 - DNA, 25 bp, Artificial
  probe
  misc_feature (1)..(25): SEQ ID NO: 4857; WAN024A45; Start 16; Stop 40
cgcatgaattcttaccaaatttctg

SEQ ID NO: 392418 - DNA, 25 bp, Artificial
  probe
  misc_feature (1)..(25): SEQ ID NO: 4857; WAN024A45; Start 14; Stop 38
gacgcatgaattcttaccaaatttc

SEQ ID NO: 392419 - DNA, 25 bp, Artificial
  probe
  misc_feature (1)..(25): SEQ ID NO: 4857; WAN024A45; Start 10; Stop 34
agttgacgcatgaattcttaccaaa

SEQ ID NO: 392420 - DNA, 25 bp, Artificial
  probe
  misc_feature (1)..(25): SEQ ID NO: 4857; WAN024A45; Start 69; Stop 93
tatattactctttcctaacctcctt

SEQ ID NO: 392421 - DNA, 25 bp, Artificial
  probe
  misc_feature (1)..(25): SEQ ID NO: 4857; WAN024A45; Start 71; Stop 95
tattactctttcctaacctcctttt

SEQ ID NO: 392422 - DNA, 25 bp, Artificial
  probe
  misc_feature (1)..(25): SEQ ID NO: 4857; WAN024A45; Start 19; Stop 43
atgaattcttaccaaatttctgcgc

SEQ ID NO: 392423 - DNA, 25 bp, Artificial
  probe
  misc_feature (1)..(25): SEQ ID NO: 4857; WAN024A45; Start 17; Stop 41
gcatgaattcttaccaaatttctgc

SEQ ID NO: 392424 - DNA, 25 bp, Artificial
  probe
  misc_feature (1)..(25): SEQ ID NO: 4857; WAN024A45; Start 64; Stop 88
taggctatattactctttcctaacc

SEQ ID NO: 392425 - DNA, 25 bp, Artificial
  probe
  misc_feature (1)..(25): SEQ ID NO: 4857; WAN024A45; Start 63; Stop 87
ataggctatattactctttcctaac

SEQ ID NO: 392426 - DNA, 25 bp, Artificial
  probe
  misc_feature (1)..(25): SEQ ID NO: 4858; WAN024AN9; Start 64; Stop 88
atctaacaagtgttaatgtcaagtt

SEQ ID NO: 392427 - DNA, 25 bp, Artificial
  probe
  misc_feature (1)..(25): SEQ ID NO: 4858; WAN024AN9; Start 63; Stop 87
aatctaacaagtgttaatgtcaagt

SEQ ID NO: 392428 - DNA, 25 bp, Artificial
  probe
  misc_feature (1)..(25): SEQ ID NO: 4858; WAN024AN9; Start 70; Stop 94
caagtgttaatgtcaagtttgtaaa

SEQ ID NO: 392429 - DNA, 25 bp, Artificial
  probe
  misc_feature (1)..(25): SEQ ID NO: 4858; WAN024AN9; Start 66; Stop 90
ctaacaagtgttaatgtcaagtttg

SEQ ID NO: 392430 - DNA, 25 bp, Artificial
  probe
  misc_feature (1)..(25): SEQ ID NO: 4858; WAN024AN9; Start 65; Stop 89
tctaacaagtgttaatgtcaagttt

SEQ ID NO: 392431 - DNA, 25 bp, Artificial
  probe
  misc_feature (1)..(25): SEQ ID NO: 4858; WAN024AN9; Start 145; Stop 169
tttagatttgtgcaaacagttattg

SEQ ID NO: 392432 - DNA, 25 bp, Artificial
  probe
  misc_feature (1)..(25): SEQ ID NO: 4858; WAN024AN9; Start 69; Stop 93
acaagtgttaatgtcaagtttgtaa

SEQ ID NO: 392433 - DNA, 25 bp, Artificial
  probe
  misc_feature (1)..(25): SEQ ID NO: 4858; WAN024AN9; Start 68; Stop 92
aacaagtgttaatgtcaagtttgta

SEQ ID NO: 392434 - DNA, 25 bp, Artificial
  probe
  misc_feature (1)..(25): SEQ ID NO: 4858; WAN024AN9; Start 67; Stop 91
taacaagtgttaatgtcaagtttgt

SEQ ID NO: 392435 - DNA, 25 bp, Artificial
  probe
  misc_feature (1)..(25): SEQ ID NO: 4858; WAN024AN9; Start 22; Stop 46
atcgcggaatatctcctattctatt

SEQ ID NO: 392436 - DNA, 25 bp, Artificial
  probe
  misc_feature (1)..(25): SEQ ID NO: 4858; WAN024AN9; Start 21; Stop 45
aatcgcggaatatctcctattctat

SEQ ID NO: 392437 - DNA, 25 bp, Artificial
  probe
  misc_feature (1)..(25): SEQ ID NO: 4858; WAN024AN9; Start 19; Stop 43
ataatcgcggaatatctcctattct

SEQ ID NO: 392438 - DNA, 25 bp, Artificial
  probe
  misc_feature (1)..(25): SEQ ID NO: 4858; WAN024AN9; Start 73; Stop 97
gtgttaatgtcaagtttgtaaaaga

SEQ ID NO: 392439 - DNA, 25 bp, Artificial
  probe
  misc_feature (1)..(25): SEQ ID NO: 4858; WAN024AN9; Start 72; Stop 96
agtgttaatgtcaagtttgtaaaag

SEQ ID NO: 392440 - DNA, 25 bp, Artificial
  probe
  misc_feature (1)..(25): SEQ ID NO: 4858; WAN024AN9; Start 20; Stop 44
taatcgcggaatatctcctattcta

SEQ ID NO: 392441 - DNA, 25 bp, Artificial
  probe
  misc_feature (1)..(25): SEQ ID NO: 4858; WAN024AN9; Start 18; Stop 42
aataatcgcggaatatctcctattc

SEQ ID NO: 392442 - DNA, 25 bp, Artificial
  probe
  misc_feature (1)..(25): SEQ ID NO: 4858; WAN024AN9; Start 62; Stop 86
aaatctaacaagtgttaatgtcaag

SEQ ID NO: 392443 - DNA, 25 bp, Artificial
  probe
  misc_feature (1)..(25): SEQ ID NO: 4858; WAN024AN9; Start 138; Stop 162
accttattttagatttgtgcaaaca

SEQ ID NO: 392444 - DNA, 25 bp, Artificial
  probe
  misc_feature (1)..(25): SEQ ID NO: 4858; WAN024AN9; Start 71; Stop 95
aagtgttaatgtcaagtttgtaaaa

SEQ ID NO: 392445 - DNA, 25 bp, Artificial
  probe
  misc_feature (1)..(25): SEQ ID NO: 4858; WAN024AN9; Start 17; Stop 41
aaataatcgcggaatatctcctatt

SEQ ID NO: 392446 - DNA, 25 bp, Artificial
  probe
  misc_feature (1)..(25): SEQ ID NO: 4858; WAN024AN9; Start 137; Stop 161
aaccttattttagatttgtgcaaac

SEQ ID NO: 392447 - DNA, 25 bp, Artificial
  probe
  misc_feature (1)..(25): SEQ ID NO: 4858; WAN024AN9; Start 139; Stop 163
ccttattttagatttgtgcaaacag

SEQ ID NO: 392448 - DNA, 25 bp, Artificial
  probe
  misc_feature (1)..(25): SEQ ID NO: 4858; WAN024AN9; Start 74; Stop 98
tgttaatgtcaagtttgtaaaagaa

SEQ ID NO: 392449 - DNA, 25 bp, Artificial
  probe
  misc_feature (1)..(25): SEQ ID NO: 4858; WAN024AN9; Start 60; Stop 84
gtaaatctaacaagtgttaatgtca

SEQ ID NO: 392450 - DNA, 25 bp, Artificial
  probe
  misc_feature (1)..(25): SEQ ID NO: 4858; WAN024AN9; Start 23; Stop 47
tcgcggaatatctcctattctattt

SEQ ID NO: 392451 - DNA, 25 bp, Artificial
  probe
  misc_feature (1)..(25): SEQ ID NO: 4858; WAN024AN9; Start 59; Stop 83
agtaaatctaacaagtgttaatgtc

SEQ ID NO: 392452 - DNA, 25 bp, Artificial
  probe
  misc_feature (1)..(25): SEQ ID NO: 4858; WAN024AN9; Start 140; Stop 164
cttattttagatttgtgcaaacagt

SEQ ID NO: 392453 - DNA, 25 bp, Artificial
  probe
  misc_feature (1)..(25): SEQ ID NO: 4858; WAN024AN9; Start 52; Stop 76
ggataaaagtaaatctaacaagtgt

SEQ ID NO: 392454 - DNA, 25 bp, Artificial
  probe
  misc_feature (1)..(25): SEQ ID NO: 4858; WAN024AN9; Start 144; Stop 168
ttttagatttgtgcaaacagttatt

SEQ ID NO: 392455 - DNA, 25 bp, Artificial
  probe
  misc_feature (1)..(25): SEQ ID NO: 4858; WAN024AN9; Start 141; Stop 165
ttattttagatttgtgcaaacagtt

SEQ ID NO: 392456 - DNA, 25 bp, Artificial
  probe
  misc_feature (1)..(25): SEQ ID NO: 4858; WAN024AN9; Start 51; Stop 75
aggataaaagtaaatctaacaagtg

SEQ ID NO: 392457 - DNA, 25 bp, Artificial
  probe
  misc_feature (1)..(25): SEQ ID NO: 4858; WAN024AN9; Start 143; Stop 167
attttagatttgtgcaaacagttat

SEQ ID NO: 392458 - DNA, 25 bp, Artificial
  probe
  misc_feature (1)..(25): SEQ ID NO: 4858; WAN024AN9; Start 75; Stop 99
gttaatgtcaagtttgtaaaagaaa

SEQ ID NO: 392459 - DNA, 25 bp, Artificial
  probe
  misc_feature (1)..(25): SEQ ID NO: 4859; WAN024A5X; Start 57; Stop 81
cgactattttgtcagatgttggaat

SEQ ID NO: 392460 - DNA, 25 bp, Artificial
  probe
  misc_feature (1)..(25): SEQ ID NO: 4859; WAN024A5X; Start 54; Stop 78
atccgactattttgtcagatgttgg

SEQ ID NO: 392461 - DNA, 25 bp, Artificial
  probe
  misc_feature (1)..(25): SEQ ID NO: 4859; WAN024A5X; Start 56; Stop 80
ccgactattttgtcagatgttggaa

SEQ ID NO: 392462 - DNA, 25 bp, Artificial
  probe
  misc_feature (1)..(25): SEQ ID NO: 4859; WAN024A5X; Start 49; Stop 73
aaaacatccgactattttgtcagat

SEQ ID NO: 392463 - DNA, 25 bp, Artificial
  probe
  misc_feature (1)..(25): SEQ ID NO: 4859; WAN024A5X; Start 58; Stop 82
gactattttgtcagatgttggaatc

SEQ ID NO: 392464 - DNA, 25 bp, Artificial
  probe
  misc_feature (1)..(25): SEQ ID NO: 4859; WAN024A5X; Start 55; Stop 79
tccgactattttgtcagatgttgga

SEQ ID NO: 392465 - DNA, 25 bp, Artificial
  probe
  misc_feature (1)..(25): SEQ ID NO: 4859; WAN024A5X; Start 14; Stop 38
catctatctattcgtaaaagttcgt

SEQ ID NO: 392466 - DNA, 25 bp, Artificial
  probe
  misc_feature (1)..(25): SEQ ID NO: 4859; WAN024A5X; Start 13; Stop 37
tcatctatctattcgtaaaagttcg

SEQ ID NO: 392467 - DNA, 25 bp, Artificial
  probe
  misc_feature (1)..(25): SEQ ID NO: 4859; WAN024A5X; Start 59; Stop 83
actattttgtcagatgttggaatct

SEQ ID NO: 392468 - DNA, 25 bp, Artificial
  probe
  misc_feature (1)..(25): SEQ ID NO: 4859; WAN024A5X; Start 53; Stop 77
catccgactattttgtcagatgttg

SEQ ID NO: 392469 - DNA, 25 bp, Artificial
  probe
  misc_feature (1)..(25): SEQ ID NO: 4859; WAN024A5X; Start 50; Stop 74
aaacatccgactattttgtcagatg

SEQ ID NO: 392470 - DNA, 25 bp, Artificial
  probe
  misc_feature (1)..(25): SEQ ID NO: 4859; WAN024A5X; Start 16; Stop 40
tctatctattcgtaaaagttcgtaa

SEQ ID NO: 392471 - DNA, 25 bp, Artificial
  probe
  misc_feature (1)..(25): SEQ ID NO: 4859; WAN024A5X; Start 15; Stop 39
atctatctattcgtaaaagttcgta

SEQ ID NO: 392472 - DNA, 25 bp, Artificial
  probe
  misc_feature (1)..(25): SEQ ID NO: 4859; WAN024A5X; Start 11; Stop 35
actcatctatctattcgtaaaagtt

SEQ ID NO: 392473 - DNA, 25 bp, Artificial
  probe
  misc_feature (1)..(25): SEQ ID NO: 4859; WAN024A5X; Start 12; Stop 36
ctcatctatctattcgtaaaagttc

SEQ ID NO: 392474 - DNA, 25 bp, Artificial
  probe
  misc_feature (1)..(25): SEQ ID NO: 4859; WAN024A5X; Start 17; Stop 41
ctatctattcgtaaaagttcgtaaa

SEQ ID NO: 392475 - DNA, 25 bp, Artificial
  probe
  misc_feature (1)..(25): SEQ ID NO: 4860; WAN024BFT; Start 43; Stop 67
acttccttttctactgaaattgagt

SEQ ID NO: 392476 - DNA, 25 bp, Artificial
  probe
  misc_feature (1)..(25): SEQ ID NO: 4860; WAN024BFT; Start 46; Stop 70
tccttttctactgaaattgagtctt

SEQ ID NO: 392477 - DNA, 25 bp, Artificial
  probe
  misc_feature (1)..(25): SEQ ID NO: 4860; WAN024BFT; Start 45; Stop 69
ttccttttctactgaaattgagtct

SEQ ID NO: 392478 - DNA, 25 bp, Artificial
  probe
  misc_feature (1)..(25): SEQ ID NO: 4860; WAN024BFT; Start 44; Stop 68
cttccttttctactgaaattgagtc

SEQ ID NO: 392479 - DNA, 25 bp, Artificial
  probe
  misc_feature (1)..(25): SEQ ID NO: 4860; WAN024BFT; Start 47; Stop 71
ccttttctactgaaattgagtcttt

SEQ ID NO: 392480 - DNA, 25 bp, Artificial
  probe
  misc_feature (1)..(25): SEQ ID NO: 4860; WAN024BFT; Start 36; Stop 60
aagatttacttccttttctactgaa

SEQ ID NO: 392481 - DNA, 25 bp, Artificial
  probe
  misc_feature (1)..(25): SEQ ID NO: 4860; WAN024BFT; Start 42; Stop 66
tacttccttttctactgaaattgag

SEQ ID NO: 392482 - DNA, 25 bp, Artificial
  probe
  misc_feature (1)..(25): SEQ ID NO: 4860; WAN024BFT; Start 41; Stop 65
ttacttccttttctactgaaattga

SEQ ID NO: 392483 - DNA, 25 bp, Artificial
  probe
  misc_feature (1)..(25): SEQ ID NO: 4860; WAN024BFT; Start 37; Stop 61
agatttacttccttttctactgaaa

SEQ ID NO: 392484 - DNA, 25 bp, Artificial
  probe
  misc_feature (1)..(25): SEQ ID NO: 4860; WAN024BFT; Start 48; Stop 72
cttttctactgaaattgagtctttt

SEQ ID NO: 392485 - DNA, 25 bp, Artificial
  probe
  misc_feature (1)..(25): SEQ ID NO: 4860; WAN024BFT; Start 35; Stop 59
gaagatttacttccttttctactga

SEQ ID NO: 392486 - DNA, 25 bp, Artificial
  probe
  misc_feature (1)..(25): SEQ ID NO: 4860; WAN024BFT; Start 40; Stop 64
tttacttccttttctactgaaattg

SEQ ID NO: 392487 - DNA, 25 bp, Artificial
  probe
  misc_feature (1)..(25): SEQ ID NO: 4860; WAN024BFT; Start 38; Stop 62
gatttacttccttttctactgaaat

SEQ ID NO: 392488 - DNA, 25 bp, Artificial
  probe
  misc_feature (1)..(25): SEQ ID NO: 4861; WAN024FIV; Start 644; Stop 668
gtgttcaatacggtggttctgttaa

SEQ ID NO: 392489 - DNA, 25 bp, Artificial
  probe
  misc_feature (1)..(25): SEQ ID NO: 4861; WAN024FIV; Start 382; Stop 406
ggtatgcttccaatcatctgttgtg

SEQ ID NO: 392490 - DNA, 25 bp, Artificial
  probe
  misc_feature (1)..(25): SEQ ID NO: 4861; WAN024FIV; Start 279; Stop 303
aatcggtactgactacgttgttatc

SEQ ID NO: 392491 - DNA, 25 bp, Artificial
  probe
  misc_feature (1)..(25): SEQ ID NO: 4861; WAN024FIV; Start 379; Stop 403
aacggtatgcttccaatcatctgtt

SEQ ID NO: 392492 - DNA, 25 bp, Artificial
  probe
  misc_feature (1)..(25): SEQ ID NO: 4861; WAN024FIV; Start 645; Stop 669
tgttcaatacggtggttctgttaaa

SEQ ID NO: 392493 - DNA, 25 bp, Artificial
  probe
  misc_feature (1)..(25): SEQ ID NO: 4861; WAN024FIV; Start 446; Stop 470
aattcgtaggtgctcaagtatctgc

SEQ ID NO: 392494 - DNA, 25 bp, Artificial
  probe
  misc_feature (1)..(25): SEQ ID NO: 4861; WAN024FIV; Start 389; Stop 413
ttccaatcatctgttgtggtgaatc

SEQ ID NO: 392495 - DNA, 25 bp, Artificial
  probe
  misc_feature (1)..(25): SEQ ID NO: 4861; WAN024FIV; Start 388; Stop 412
cttccaatcatctgttgtggtgaat

SEQ ID NO: 392496 - DNA, 25 bp, Artificial
  probe
  misc_feature (1)..(25): SEQ ID NO: 4861; WAN024FIV; Start 393; Stop 417
aatcatctgttgtggtgaatcactt

SEQ ID NO: 392497 - DNA, 25 bp, Artificial
  probe
  misc_feature (1)..(25): SEQ ID NO: 4861; WAN024FIV; Start 646; Stop 670
gttcaatacggtggttctgttaaac

SEQ ID NO: 392498 - DNA, 25 bp, Artificial
  probe
  misc_feature (1)..(25): SEQ ID NO: 4861; WAN024FIV; Start 378; Stop 402
gaacggtatgcttccaatcatctgt

SEQ ID NO: 392499 - DNA, 25 bp, Artificial
  probe
  misc_feature (1)..(25): SEQ ID NO: 4861; WAN024FIV; Start 394; Stop 418
atcatctgttgtggtgaatcacttg

SEQ ID NO: 392500 - DNA, 25 bp, Artificial
  probe
  misc_feature (1)..(25): SEQ ID NO: 4861; WAN024FIV; Start 392; Stop 416
caatcatctgttgtggtgaatcact

SEQ ID NO: 392501 - DNA, 25 bp, Artificial
  probe
  misc_feature (1)..(25): SEQ ID NO: 4861; WAN024FIV; Start 155; Stop 179
ctcttgatttgacaactgttcttgc

SEQ ID NO: 392502 - DNA, 25 bp, Artificial
  probe
  misc_feature (1)..(25): SEQ ID NO: 4861; WAN024FIV; Start 154; Stop 178
gctcttgatttgacaactgttcttg

SEQ ID NO: 392503 - DNA, 25 bp, Artificial
  probe
  misc_feature (1)..(25): SEQ ID NO: 4861; WAN024FIV; Start 396; Stop 420
catctgttgtggtgaatcacttgaa

SEQ ID NO: 392504 - DNA, 25 bp, Artificial
  probe
  misc_feature (1)..(25): SEQ ID NO: 4861; WAN024FIV; Start 271; Stop 295
ttgaaagaaatcggtactgactacg

SEQ ID NO: 392505 - DNA, 25 bp, Artificial
  probe
  misc_feature (1)..(25): SEQ ID NO: 4861; WAN024FIV; Start 270; Stop 294
tttgaaagaaatcggtactgactac

SEQ ID NO: 392506 - DNA, 25 bp, Artificial
  probe
  misc_feature (1)..(25): SEQ ID NO: 4861; WAN024FIV; Start 157; Stop 181
cttgatttgacaactgttcttgctg

SEQ ID NO: 392507 - DNA, 25 bp, Artificial
  probe
  misc_feature (1)..(25): SEQ ID NO: 4861; WAN024FIV; Start 156; Stop 180
tcttgatttgacaactgttcttgct

SEQ ID NO: 392508 - DNA, 25 bp, Artificial
  probe
  misc_feature (1)..(25): SEQ ID NO: 4861; WAN024FIV; Start 383; Stop 407
gtatgcttccaatcatctgttgtgg

SEQ ID NO: 392509 - DNA, 25 bp, Artificial
  probe
  misc_feature (1)..(25): SEQ ID NO: 4861; WAN024FIV; Start 390; Stop 414
tccaatcatctgttgtggtgaatca

SEQ ID NO: 392510 - DNA, 25 bp, Artificial
  probe
  misc_feature (1)..(25): SEQ ID NO: 4861; WAN024FIV; Start 384; Stop 408
tatgcttccaatcatctgttgtggt

SEQ ID NO: 392511 - DNA, 25 bp, Artificial
  probe
  misc_feature (1)..(25): SEQ ID NO: 4861; WAN024FIV; Start 381; Stop 405
cggtatgcttccaatcatctgttgt

SEQ ID NO: 392512 - DNA, 25 bp, Artificial
  probe
  misc_feature (1)..(25): SEQ ID NO: 4861; WAN024FIV; Start 380; Stop 404
acggtatgcttccaatcatctgttg

SEQ ID NO: 392513 - DNA, 25 bp, Artificial
  probe
  misc_feature (1)..(25): SEQ ID NO: 4861; WAN024FIV; Start 193; Stop 217
tcaaaccttaaagttgctgctcaaa

SEQ ID NO: 392514 - DNA, 25 bp, Artificial
  probe
  misc_feature (1)..(25): SEQ ID NO: 4861; WAN024FIV; Start 447; Stop 471
attcgtaggtgctcaagtatctgct

SEQ ID NO: 392515 - DNA, 25 bp, Artificial
  probe
  misc_feature (1)..(25): SEQ ID NO: 4861; WAN024FIV; Start 280; Stop 304
atcggtactgactacgttgttatcg

SEQ ID NO: 392516 - DNA, 25 bp, Artificial
  probe
  misc_feature (1)..(25): SEQ ID NO: 4861; WAN024FIV; Start 445; Stop 469
gaattcgtaggtgctcaagtatctg

SEQ ID NO: 392517 - DNA, 25 bp, Artificial
  probe
  misc_feature (1)..(25): SEQ ID NO: 4861; WAN024FIV; Start 291; Stop 315
ctacgttgttatcggtcactcagaa

SEQ ID NO: 392518 - DNA, 25 bp, Artificial
  probe
  misc_feature (1)..(25): SEQ ID NO: 4861; WAN024FIV; Start 395; Stop 419
tcatctgttgtggtgaatcacttga

SEQ ID NO: 392519 - DNA, 25 bp, Artificial
  probe
  misc_feature (1)..(25): SEQ ID NO: 4861; WAN024FIV; Start 509; Stop 533
cagttatcgcttatgagccaatctg

SEQ ID NO: 392520 - DNA, 25 bp, Artificial
  probe
  misc_feature (1)..(25): SEQ ID NO: 4861; WAN024FIV; Start 508; Stop 532
tcagttatcgcttatgagccaatct

SEQ ID NO: 392521 - DNA, 25 bp, Artificial
  probe
  misc_feature (1)..(25): SEQ ID NO: 4862; WAN024GCF; Start 159; Stop 183
ttctgctggactctatcttcttcta

SEQ ID NO: 392522 - DNA, 25 bp, Artificial
  probe
  misc_feature (1)..(25): SEQ ID NO: 4862; WAN024GCF; Start 284; Stop 308
gacttacttcctctctaaccaacag

SEQ ID NO: 392523 - DNA, 25 bp, Artificial
  probe
  misc_feature (1)..(25): SEQ ID NO: 4862; WAN024GCF; Start 169; Stop 193
ctctatcttcttctaggtgctatcg

SEQ ID NO: 392524 - DNA, 25 bp, Artificial
  probe
  misc_feature (1)..(25): SEQ ID NO: 4862; WAN024GCF; Start 166; Stop 190
ggactctatcttcttctaggtgcta

SEQ ID NO: 392525 - DNA, 25 bp, Artificial
  probe
  misc_feature (1)..(25): SEQ ID NO: 4862; WAN024GCF; Start 160; Stop 184
tctgctggactctatcttcttctag

SEQ ID NO: 392526 - DNA, 25 bp, Artificial
  probe
  misc_feature (1)..(25): SEQ ID NO: 4862; WAN024GCF; Start 170; Stop 194
tctatcttcttctaggtgctatcgg

SEQ ID NO: 392527 - DNA, 25 bp, Artificial
  probe
  misc_feature (1)..(25): SEQ ID NO: 4862; WAN024GCF; Start 287; Stop 311
ttacttcctctctaaccaacagcaa

SEQ ID NO: 392528 - DNA, 25 bp, Artificial
  probe
  misc_feature (1)..(25): SEQ ID NO: 4862; WAN024GCF; Start 172; Stop 196
tatcttcttctaggtgctatcggtc

SEQ ID NO: 392529 - DNA, 25 bp, Artificial
  probe
  misc_feature (1)..(25): SEQ ID NO: 4862; WAN024GCF; Start 171; Stop 195
ctatcttcttctaggtgctatcggt

SEQ ID NO: 392530 - DNA, 25 bp, Artificial
  probe
  misc_feature (1)..(25): SEQ ID NO: 4862; WAN024GCF; Start 168; Stop 192
actctatcttcttctaggtgctatc

SEQ ID NO: 392531 - DNA, 25 bp, Artificial
  probe
  misc_feature (1)..(25): SEQ ID NO: 4862; WAN024GCF; Start 167; Stop 191
gactctatcttcttctaggtgctat

SEQ ID NO: 392532 - DNA, 25 bp, Artificial
  probe
  misc_feature (1)..(25): SEQ ID NO: 4862; WAN024GCF; Start 161; Stop 185
ctgctggactctatcttcttctagg

SEQ ID NO: 392533 - DNA, 25 bp, Artificial
  probe
  misc_feature (1)..(25): SEQ ID NO: 4862; WAN024GCF; Start 286; Stop 310
cttacttcctctctaaccaacagca

SEQ ID NO: 392534 - DNA, 25 bp, Artificial
  probe
  misc_feature (1)..(25): SEQ ID NO: 4862; WAN024GCF; Start 285; Stop 309
acttacttcctctctaaccaacagc

SEQ ID NO: 392535 - DNA, 25 bp, Artificial
  probe
  misc_feature (1)..(25): SEQ ID NO: 4862; WAN024GCF; Start 288; Stop 312
tacttcctctctaaccaacagcaag

SEQ ID NO: 392536 - DNA, 25 bp, Artificial
  probe
  misc_feature (1)..(25): SEQ ID NO: 4862; WAN024GCF; Start 164; Stop 188
ctggactctatcttcttctaggtgc

SEQ ID NO: 392537 - DNA, 25 bp, Artificial
  probe
  misc_feature (1)..(25): SEQ ID NO: 4862; WAN024GCF; Start 163; Stop 187
gctggactctatcttcttctaggtg

SEQ ID NO: 392538 - DNA, 25 bp, Artificial
  probe
  misc_feature (1)..(25): SEQ ID NO: 4862; WAN024GCF; Start 306; Stop 330
cagcaagagtggtgttgttaagatt

SEQ ID NO: 392539 - DNA, 25 bp, Artificial
  probe
  misc_feature (1)..(25): SEQ ID NO: 4862; WAN024GCF; Start 165; Stop 189
tggactctatcttcttctaggtgct

SEQ ID NO: 392540 - DNA, 25 bp, Artificial
  probe
  misc_feature (1)..(25): SEQ ID NO: 4862; WAN024GCF; Start 162; Stop 186
tgctggactctatcttcttctaggt

SEQ ID NO: 392541 - DNA, 25 bp, Artificial
  probe
  misc_feature (1)..(25): SEQ ID NO: 4862; WAN024GCF; Start 277; Stop 301
tactctggacttacttcctctctaa

SEQ ID NO: 392542 - DNA, 25 bp, Artificial
  probe
  misc_feature (1)..(25): SEQ ID NO: 4862; WAN024GCF; Start 276; Stop 300
ttactctggacttacttcctctcta

SEQ ID NO: 392543 - DNA, 25 bp, Artificial
  probe
  misc_feature (1)..(25): SEQ ID NO: 4862; WAN024GCF; Start 278; Stop 302
actctggacttacttcctctctaac

SEQ ID NO: 392544 - DNA, 25 bp, Artificial
  probe
  misc_feature (1)..(25): SEQ ID NO: 4862; WAN024GCF; Start 175; Stop 199
cttcttctaggtgctatcggtcttc

SEQ ID NO: 392545 - DNA, 25 bp, Artificial
  probe
  misc_feature (1)..(25): SEQ ID NO: 4862; WAN024GCF; Start 173; Stop 197
atcttcttctaggtgctatcggtct

SEQ ID NO: 392546 - DNA, 25 bp, Artificial
  probe
  misc_feature (1)..(25): SEQ ID NO: 4862; WAN024GCF; Start 279; Stop 303
ctctggacttacttcctctctaacc

SEQ ID NO: 392547 - DNA, 25 bp, Artificial
  probe
  misc_feature (1)..(25): SEQ ID NO: 4862; WAN024GCF; Start 283; Stop 307
ggacttacttcctctctaaccaaca

SEQ ID NO: 392548 - DNA, 25 bp, Artificial
  probe
  misc_feature (1)..(25): SEQ ID NO: 4862; WAN024GCF; Start 269; Stop 293
atctcgtttactctggacttacttc

SEQ ID NO: 392549 - DNA, 25 bp, Artificial
  probe
  misc_feature (1)..(25): SEQ ID NO: 4862; WAN024GCF; Start 174; Stop 198
tcttcttctaggtgctatcggtctt

SEQ ID NO: 392550 - DNA, 25 bp, Artificial
  probe
  misc_feature (1)..(25): SEQ ID NO: 4862; WAN024GCF; Start 155; Stop 179
tactttctgctggactctatcttct

SEQ ID NO: 392551 - DNA, 25 bp, Artificial
  probe
  misc_feature (1)..(25): SEQ ID NO: 4862; WAN024GCF; Start 281; Stop 305
ctggacttacttcctctctaaccaa

SEQ ID NO: 392552 - DNA, 25 bp, Artificial
  probe
  misc_feature (1)..(25): SEQ ID NO: 4862; WAN024GCF; Start 157; Stop 181
ctttctgctggactctatcttcttc

SEQ ID NO: 392553 - DNA, 25 bp, Artificial
  probe
  misc_feature (1)..(25): SEQ ID NO: 4862; WAN024GCF; Start 158; Stop 182
tttctgctggactctatcttcttct

SEQ ID NO: 392554 - DNA, 25 bp, Artificial
  probe
  misc_feature (1)..(25): SEQ ID NO: 4863; WAN024DGB; Start 250; Stop 274
ttcacatcgtataaattgcttggac

SEQ ID NO: 392555 - DNA, 25 bp, Artificial
  probe
  misc_feature (1)..(25): SEQ ID NO: 4863; WAN024DGB; Start 249; Stop 273
gttcacatcgtataaattgcttgga

SEQ ID NO: 392556 - DNA, 25 bp, Artificial
  probe
  misc_feature (1)..(25): SEQ ID NO: 4863; WAN024DGB; Start 248; Stop 272
tgttcacatcgtataaattgcttgg

SEQ ID NO: 392557 - DNA, 25 bp, Artificial
  probe
  misc_feature (1)..(25): SEQ ID NO: 4863; WAN024DGB; Start 253; Stop 277
acatcgtataaattgcttggactct

SEQ ID NO: 392558 - DNA, 25 bp, Artificial
  probe
  misc_feature (1)..(25): SEQ ID NO: 4863; WAN024DGB; Start 252; Stop 276
cacatcgtataaattgcttggactc

SEQ ID NO: 392559 - DNA, 25 bp, Artificial
  probe
  misc_feature (1)..(25): SEQ ID NO: 4863; WAN024DGB; Start 533; Stop 557
taggaaggacgaaatatgttctacg

SEQ ID NO: 392560 - DNA, 25 bp, Artificial
  probe
  misc_feature (1)..(25): SEQ ID NO: 4863; WAN024DGB; Start 254; Stop 278
catcgtataaattgcttggactctt

SEQ ID NO: 392561 - DNA, 25 bp, Artificial
  probe
  misc_feature (1)..(25): SEQ ID NO: 4863; WAN024DGB; Start 495; Stop 519
ggtggttgtttctatactgctttct

SEQ ID NO: 392562 - DNA, 25 bp, Artificial
  probe
  misc_feature (1)..(25): SEQ ID NO: 4863; WAN024DGB; Start 251; Stop 275
tcacatcgtataaattgcttggact

SEQ ID NO: 392563 - DNA, 25 bp, Artificial
  probe
  misc_feature (1)..(25): SEQ ID NO: 4863; WAN024DGB; Start 530; Stop 554
tgataggaaggacgaaatatgttct

SEQ ID NO: 392564 - DNA, 25 bp, Artificial
  probe
  misc_feature (1)..(25): SEQ ID NO: 4863; WAN024DGB; Start 496; Stop 520
gtggttgtttctatactgctttcta

SEQ ID NO: 392565 - DNA, 25 bp, Artificial
  probe
  misc_feature (1)..(25): SEQ ID NO: 4863; WAN024DGB; Start 247; Stop 271
ttgttcacatcgtataaattgcttg

SEQ ID NO: 392566 - DNA, 25 bp, Artificial
  probe
  misc_feature (1)..(25): SEQ ID NO: 4863; WAN024DGB; Start 529; Stop 553
atgataggaaggacgaaatatgttc

SEQ ID NO: 392567 - DNA, 25 bp, Artificial
  probe
  misc_feature (1)..(25): SEQ ID NO: 4863; WAN024DGB; Start 494; Stop 518
gggtggttgtttctatactgctttc

SEQ ID NO: 392568 - DNA, 25 bp, Artificial
  probe
  misc_feature (1)..(25): SEQ ID NO: 4863; WAN024DGB; Start 497; Stop 521
tggttgtttctatactgctttctat

SEQ ID NO: 392569 - DNA, 25 bp, Artificial
  probe
  misc_feature (1)..(25): SEQ ID NO: 4863; WAN024DGB; Start 255; Stop 279
atcgtataaattgcttggactctta

SEQ ID NO: 392570 - DNA, 25 bp, Artificial
  probe
  misc_feature (1)..(25): SEQ ID NO: 4863; WAN024DGB; Start 532; Stop 556
ataggaaggacgaaatatgttctac

SEQ ID NO: 392571 - DNA, 25 bp, Artificial
  probe
  misc_feature (1)..(25): SEQ ID NO: 4863; WAN024DGB; Start 246; Stop 270
attgttcacatcgtataaattgctt

SEQ ID NO: 392572 - DNA, 25 bp, Artificial
  probe
  misc_feature (1)..(25): SEQ ID NO: 4863; WAN024DGB; Start 256; Stop 280
tcgtataaattgcttggactcttat

SEQ ID NO: 392573 - DNA, 25 bp, Artificial
  probe
  misc_feature (1)..(25): SEQ ID NO: 4863; WAN024DGB; Start 531; Stop 555
gataggaaggacgaaatatgttcta

SEQ ID NO: 392574 - DNA, 25 bp, Artificial
  probe
  misc_feature (1)..(25): SEQ ID NO: 4863; WAN024DGB; Start 528; Stop 552
tatgataggaaggacgaaatatgtt

SEQ ID NO: 392575 - DNA, 25 bp, Artificial
  probe
  misc_feature (1)..(25): SEQ ID NO: 4863; WAN024DGB; Start 90; Stop 114
cccaaattgtggaataatgctactt

SEQ ID NO: 392576 - DNA, 25 bp, Artificial
  probe
  misc_feature (1)..(25): SEQ ID NO: 4863; WAN024DGB; Start 89; Stop 113
tcccaaattgtggaataatgctact

SEQ ID NO: 392577 - DNA, 25 bp, Artificial
  probe
  misc_feature (1)..(25): SEQ ID NO: 4863; WAN024DGB; Start 88; Stop 112
atcccaaattgtggaataatgctac

SEQ ID NO: 392578 - DNA, 25 bp, Artificial
  probe
  misc_feature (1)..(25): SEQ ID NO: 4863; WAN024DGB; Start 257; Stop 281
cgtataaattgcttggactcttatt

SEQ ID NO: 392579 - DNA, 25 bp, Artificial
  probe
  misc_feature (1)..(25): SEQ ID NO: 4863; WAN024DGB; Start 79; Stop 103
caaattgagatcccaaattgtggaa

SEQ ID NO: 392580 - DNA, 25 bp, Artificial
  probe
  misc_feature (1)..(25): SEQ ID NO: 4863; WAN024DGB; Start 77; Stop 101
atcaaattgagatcccaaattgtgg

SEQ ID NO: 392581 - DNA, 25 bp, Artificial
  probe
  misc_feature (1)..(25): SEQ ID NO: 4863; WAN024DGB; Start 85; Stop 109
gagatcccaaattgtggaataatgc

SEQ ID NO: 392582 - DNA, 25 bp, Artificial
  probe
  misc_feature (1)..(25): SEQ ID NO: 4863; WAN024DGB; Start 527; Stop 551
atatgataggaaggacgaaatatgt

SEQ ID NO: 392583 - DNA, 25 bp, Artificial
  probe
  misc_feature (1)..(25): SEQ ID NO: 4863; WAN024DGB; Start 87; Stop 111
gatcccaaattgtggaataatgcta

SEQ ID NO: 392584 - DNA, 25 bp, Artificial
  probe
  misc_feature (1)..(25): SEQ ID NO: 4863; WAN024DGB; Start 80; Stop 104
aaattgagatcccaaattgtggaat

SEQ ID NO: 392585 - DNA, 25 bp, Artificial
  probe
  misc_feature (1)..(25): SEQ ID NO: 4863; WAN024DGB; Start 86; Stop 110
agatcccaaattgtggaataatgct

SEQ ID NO: 392586 - DNA, 25 bp, Artificial
  probe
  misc_feature (1)..(25): SEQ ID NO: 4863; WAN024DGB; Start 84; Stop 108
tgagatcccaaattgtggaataatg

SEQ ID NO: 392587 - DNA, 25 bp, Artificial
  probe
  misc_feature (1)..(25): SEQ ID NO: 4864; WAN024GM7; Start 110; Stop 134
gtttgtctttcatttctgtgtttca

SEQ ID NO: 392588 - DNA, 25 bp, Artificial
  probe
  misc_feature (1)..(25): SEQ ID NO: 4864; WAN024GM7; Start 109; Stop 133
agtttgtctttcatttctgtgtttc

SEQ ID NO: 392589 - DNA, 25 bp, Artificial
  probe
  misc_feature (1)..(25): SEQ ID NO: 4864; WAN024GM7; Start 134; Stop 158
atagatttcacggtaaacggcattg

SEQ ID NO: 392590 - DNA, 25 bp, Artificial
  probe
  misc_feature (1)..(25): SEQ ID NO: 4864; WAN024GM7; Start 133; Stop 157
catagatttcacggtaaacggcatt

SEQ ID NO: 392591 - DNA, 25 bp, Artificial
  probe
  misc_feature (1)..(25): SEQ ID NO: 4864; WAN024GM7; Start 130; Stop 154
tttcatagatttcacggtaaacggc

SEQ ID NO: 392592 - DNA, 25 bp, Artificial
  probe
  misc_feature (1)..(25): SEQ ID NO: 4864; WAN024GM7; Start 111; Stop 135
tttgtctttcatttctgtgtttcat

SEQ ID NO: 392593 - DNA, 25 bp, Artificial
  probe
  misc_feature (1)..(25): SEQ ID NO: 4864; WAN024GM7; Start 113; Stop 137
tgtctttcatttctgtgtttcatag

SEQ ID NO: 392594 - DNA, 25 bp, Artificial
  probe
  misc_feature (1)..(25): SEQ ID NO: 4864; WAN024GM7; Start 124; Stop 148
tctgtgtttcatagatttcacggta

SEQ ID NO: 392595 - DNA, 25 bp, Artificial
  probe
  misc_feature (1)..(25): SEQ ID NO: 4864; WAN024GM7; Start 122; Stop 146
tttctgtgtttcatagatttcacgg

SEQ ID NO: 392596 - DNA, 25 bp, Artificial
  probe
  misc_feature (1)..(25): SEQ ID NO: 4864; WAN024GM7; Start 125; Stop 149
ctgtgtttcatagatttcacggtaa

SEQ ID NO: 392597 - DNA, 25 bp, Artificial
  probe
  misc_feature (1)..(25): SEQ ID NO: 4864; WAN024GM7; Start 123; Stop 147
ttctgtgtttcatagatttcacggt

SEQ ID NO: 392598 - DNA, 25 bp, Artificial
  probe
  misc_feature (1)..(25): SEQ ID NO: 4864; WAN024GM7; Start 108; Stop 132
tagtttgtctttcatttctgtgttt

SEQ ID NO: 392599 - DNA, 25 bp, Artificial
  probe
  misc_feature (1)..(25): SEQ ID NO: 4864; WAN024GM7; Start 126; Stop 150
tgtgtttcatagatttcacggtaaa

SEQ ID NO: 392600 - DNA, 25 bp, Artificial
  probe
  misc_feature (1)..(25): SEQ ID NO: 4864; WAN024GM7; Start 132; Stop 156
tcatagatttcacggtaaacggcat

SEQ ID NO: 392601 - DNA, 25 bp, Artificial
  probe
  misc_feature (1)..(25): SEQ ID NO: 4864; WAN024GM7; Start 112; Stop 136
ttgtctttcatttctgtgtttcata

SEQ ID NO: 392602 - DNA, 25 bp, Artificial
  probe
  misc_feature (1)..(25): SEQ ID NO: 4864; WAN024GM7; Start 107; Stop 131
atagtttgtctttcatttctgtgtt

SEQ ID NO: 392603 - DNA, 25 bp, Artificial
  probe
  misc_feature (1)..(25): SEQ ID NO: 4864; WAN024GM7; Start 114; Stop 138
gtctttcatttctgtgtttcataga

SEQ ID NO: 392604 - DNA, 25 bp, Artificial
  probe
  misc_feature (1)..(25): SEQ ID NO: 4864; WAN024GM7; Start 131; Stop 155
ttcatagatttcacggtaaacggca

SEQ ID NO: 392605 - DNA, 25 bp, Artificial
  probe
  misc_feature (1)..(25): SEQ ID NO: 4864; WAN024GM7; Start 121; Stop 145
atttctgtgtttcatagatttcacg

SEQ ID NO: 392606 - DNA, 25 bp, Artificial
  probe
  misc_feature (1)..(25): SEQ ID NO: 4864; WAN024GM7; Start 135; Stop 159
tagatttcacggtaaacggcattgt

SEQ ID NO: 392607 - DNA, 25 bp, Artificial
  probe
  misc_feature (1)..(25): SEQ ID NO: 4864; WAN024GM7; Start 128; Stop 152
tgtttcatagatttcacggtaaacg

SEQ ID NO: 392608 - DNA, 25 bp, Artificial
  probe
  misc_feature (1)..(25): SEQ ID NO: 4864; WAN024GM7; Start 129; Stop 153
gtttcatagatttcacggtaaacgg

SEQ ID NO: 392609 - DNA, 25 bp, Artificial
  probe
  misc_feature (1)..(25): SEQ ID NO: 4864; WAN024GM7; Start 119; Stop 143
tcatttctgtgtttcatagatttca

SEQ ID NO: 392610 - DNA, 25 bp, Artificial
  probe
  misc_feature (1)..(25): SEQ ID NO: 4864; WAN024GM7; Start 106; Stop 130
tatagtttgtctttcatttctgtgt

SEQ ID NO: 392611 - DNA, 25 bp, Artificial
  probe
  misc_feature (1)..(25): SEQ ID NO: 4864; WAN024GM7; Start 127; Stop 151
gtgtttcatagatttcacggtaaac

SEQ ID NO: 392612 - DNA, 25 bp, Artificial
  probe
  misc_feature (1)..(25): SEQ ID NO: 4864; WAN024GM7; Start 115; Stop 139
tctttcatttctgtgtttcatagat

SEQ ID NO: 392613 - DNA, 25 bp, Artificial
  probe
  misc_feature (1)..(25): SEQ ID NO: 4864; WAN024GM7; Start 193; Stop 217
tcaatcgtccttgatttagaaccaa

SEQ ID NO: 392614 - DNA, 25 bp, Artificial
  probe
  misc_feature (1)..(25): SEQ ID NO: 4864; WAN024GM7; Start 120; Stop 144
catttctgtgtttcatagatttcac

SEQ ID NO: 392615 - DNA, 25 bp, Artificial
  probe
  misc_feature (1)..(25): SEQ ID NO: 4864; WAN024GM7; Start 137; Stop 161
gatttcacggtaaacggcattgttg

SEQ ID NO: 392616 - DNA, 25 bp, Artificial
  probe
  misc_feature (1)..(25): SEQ ID NO: 4864; WAN024GM7; Start 136; Stop 160
agatttcacggtaaacggcattgtt

SEQ ID NO: 392617 - DNA, 25 bp, Artificial
  probe
  misc_feature (1)..(25): SEQ ID NO: 4864; WAN024GM7; Start 118; Stop 142
ttcatttctgtgtttcatagatttc

SEQ ID NO: 392618 - DNA, 25 bp, Artificial
  probe
  misc_feature (1)..(25): SEQ ID NO: 4864; WAN024GM7; Start 116; Stop 140
ctttcatttctgtgtttcatagatt

SEQ ID NO: 392619 - DNA, 25 bp, Artificial
  probe
  misc_feature (1)..(25): SEQ ID NO: 4864; WAN024GM7; Start 196; Stop 220
atcgtccttgatttagaaccaagat

SEQ ID NO: 392620 - DNA, 25 bp, Artificial
  probe
  misc_feature (1)..(25): SEQ ID NO: 4865; WAN024DNE; Start 22; Stop 46
cgtttgattgtgggaagattgactt

SEQ ID NO: 392621 - DNA, 25 bp, Artificial
  probe
  misc_feature (1)..(25): SEQ ID NO: 4865; WAN024DNE; Start 16; Stop 40
actatacgtttgattgtgggaagat

SEQ ID NO: 392622 - DNA, 25 bp, Artificial
  probe
  misc_feature (1)..(25): SEQ ID NO: 4865; WAN024DNE; Start 12; Stop 36
tgatactatacgtttgattgtggga

SEQ ID NO: 392623 - DNA, 25 bp, Artificial
  probe
  misc_feature (1)..(25): SEQ ID NO: 4865; WAN024DNE; Start 15; Stop 39
tactatacgtttgattgtgggaaga

SEQ ID NO: 392624 - DNA, 25 bp, Artificial
  probe
  misc_feature (1)..(25): SEQ ID NO: 4865; WAN024DNE; Start 18; Stop 42
tatacgtttgattgtgggaagattg

SEQ ID NO: 392625 - DNA, 25 bp, Artificial
  probe
  misc_feature (1)..(25): SEQ ID NO: 4865; WAN024DNE; Start 19; Stop 43
atacgtttgattgtgggaagattga

SEQ ID NO: 392626 - DNA, 25 bp, Artificial
  probe
  misc_feature (1)..(25): SEQ ID NO: 4865; WAN024DNE; Start 17; Stop 41
ctatacgtttgattgtgggaagatt

SEQ ID NO: 392627 - DNA, 25 bp, Artificial
  probe
  misc_feature (1)..(25): SEQ ID NO: 4865; WAN024DNE; Start 11; Stop 35
ttgatactatacgtttgattgtggg

SEQ ID NO: 392628 - DNA, 25 bp, Artificial
  probe
  misc_feature (1)..(25): SEQ ID NO: 4865; WAN024DNE; Start 14; Stop 38
atactatacgtttgattgtgggaag

SEQ ID NO: 392629 - DNA, 25 bp, Artificial
  probe
  misc_feature (1)..(25): SEQ ID NO: 4865; WAN024DNE; Start 13; Stop 37
gatactatacgtttgattgtgggaa

SEQ ID NO: 392630 - DNA, 25 bp, Artificial
  probe
  misc_feature (1)..(25): SEQ ID NO: 4865; WAN024DNE; Start 20; Stop 44
tacgtttgattgtgggaagattgac

SEQ ID NO: 392631 - DNA, 25 bp, Artificial
  probe
  misc_feature (1)..(25): SEQ ID NO: 4865; WAN024DNE; Start 8; Stop 32
accttgatactatacgtttgattgt

SEQ ID NO: 392632 - DNA, 25 bp, Artificial
  probe
  misc_feature (1)..(25): SEQ ID NO: 4865; WAN024DNE; Start 10; Stop 34
cttgatactatacgtttgattgtgg

SEQ ID NO: 392633 - DNA, 25 bp, Artificial
  probe
  misc_feature (1)..(25): SEQ ID NO: 4865; WAN024DNE; Start 9; Stop 33
ccttgatactatacgtttgattgtg

SEQ ID NO: 392634 - DNA, 25 bp, Artificial
  probe
  misc_feature (1)..(25): SEQ ID NO: 4865; WAN024DNE; Start 27; Stop 51
gattgtgggaagattgacttcattt

SEQ ID NO: 392635 - DNA, 25 bp, Artificial
  probe
  misc_feature (1)..(25): SEQ ID NO: 4865; WAN024DNE; Start 26; Stop 50
tgattgtgggaagattgacttcatt

SEQ ID NO: 392636 - DNA, 25 bp, Artificial
  probe
  misc_feature (1)..(25): SEQ ID NO: 4865; WAN024DNE; Start 25; Stop 49
ttgattgtgggaagattgacttcat

SEQ ID NO: 392637 - DNA, 25 bp, Artificial
  probe
  misc_feature (1)..(25): SEQ ID NO: 4865; WAN024DNE; Start 23; Stop 47
gtttgattgtgggaagattgacttc

SEQ ID NO: 392638 - DNA, 25 bp, Artificial
  probe
  misc_feature (1)..(25): SEQ ID NO: 4865; WAN024DNE; Start 24; Stop 48
tttgattgtgggaagattgacttca

SEQ ID NO: 392639 - DNA, 25 bp, Artificial
  probe
  misc_feature (1)..(25): SEQ ID NO: 4865; WAN024DNE; Start 21; Stop 45
acgtttgattgtgggaagattgact

SEQ ID NO: 392640 - DNA, 25 bp, Artificial
  probe
  misc_feature (1)..(25): SEQ ID NO: 4865; WAN024DNE; Start 7; Stop 31
aaccttgatactatacgtttgattg

SEQ ID NO: 392641 - DNA, 25 bp, Artificial
  probe
  misc_feature (1)..(25): SEQ ID NO: 4865; WAN024DNE; Start 34; Stop 58
ggaagattgacttcattttctcctg

SEQ ID NO: 392642 - DNA, 25 bp, Artificial
  probe
  misc_feature (1)..(25): SEQ ID NO: 4865; WAN024DNE; Start 31; Stop 55
gtgggaagattgacttcattttctc

SEQ ID NO: 392643 - DNA, 25 bp, Artificial
  probe
  misc_feature (1)..(25): SEQ ID NO: 4865; WAN024DNE; Start 29; Stop 53
ttgtgggaagattgacttcattttc

SEQ ID NO: 392644 - DNA, 25 bp, Artificial
  probe
  misc_feature (1)..(25): SEQ ID NO: 4865; WAN024DNE; Start 41; Stop 65
tgacttcattttctcctgaaattga

SEQ ID NO: 392645 - DNA, 25 bp, Artificial
  probe
  misc_feature (1)..(25): SEQ ID NO: 4865; WAN024DNE; Start 30; Stop 54
tgtgggaagattgacttcattttct

SEQ ID NO: 392646 - DNA, 25 bp, Artificial
  probe
  misc_feature (1)..(25): SEQ ID NO: 4865; WAN024DNE; Start 33; Stop 57
gggaagattgacttcattttctcct

SEQ ID NO: 392647 - DNA, 25 bp, Artificial
  probe
  misc_feature (1)..(25): SEQ ID NO: 4865; WAN024DNE; Start 28; Stop 52
attgtgggaagattgacttcatttt

SEQ ID NO: 392648 - DNA, 25 bp, Artificial
  probe
  misc_feature (1)..(25): SEQ ID NO: 4865; WAN024DNE; Start 37; Stop 61
agattgacttcattttctcctgaaa

SEQ ID NO: 392649 - DNA, 25 bp, Artificial
  probe
  misc_feature (1)..(25): SEQ ID NO: 4865; WAN024DNE; Start 36; Stop 60
aagattgacttcattttctcctgaa

SEQ ID NO: 392650 - DNA, 25 bp, Artificial
  probe
  misc_feature (1)..(25): SEQ ID NO: 4865; WAN024DNE; Start 46; Stop 70
tcattttctcctgaaattgaagttt

SEQ ID NO: 392651 - DNA, 25 bp, Artificial
  probe
  misc_feature (1)..(25): SEQ ID NO: 4865; WAN024DNE; Start 32; Stop 56
tgggaagattgacttcattttctcc

SEQ ID NO: 392652 - DNA, 25 bp, Artificial
  probe
  misc_feature (1)..(25): SEQ ID NO: 4865; WAN024DNE; Start 35; Stop 59
gaagattgacttcattttctcctga

SEQ ID NO: 392653 - DNA, 25 bp, Artificial
  probe
  misc_feature (1)..(25): SEQ ID NO: 4866; WAN024GKH; Start 47; Stop 71
tcaagaaattagaagacaaactcgt

SEQ ID NO: 392654 - DNA, 25 bp, Artificial
  probe
  misc_feature (1)..(25): SEQ ID NO: 4866; WAN024GKH; Start 44; Stop 68
gcgtcaagaaattagaagacaaact

SEQ ID NO: 392655 - DNA, 25 bp, Artificial
  probe
  misc_feature (1)..(25): SEQ ID NO: 4866; WAN024GKH; Start 42; Stop 66
ctgcgtcaagaaattagaagacaaa

SEQ ID NO: 392656 - DNA, 25 bp, Artificial
  probe
  misc_feature (1)..(25): SEQ ID NO: 4866; WAN024GKH; Start 48; Stop 72
caagaaattagaagacaaactcgtt

SEQ ID NO: 392657 - DNA, 25 bp, Artificial
  probe
  misc_feature (1)..(25): SEQ ID NO: 4866; WAN024GKH; Start 43; Stop 67
tgcgtcaagaaattagaagacaaac

SEQ ID NO: 392658 - DNA, 25 bp, Artificial
  probe
  misc_feature (1)..(25): SEQ ID NO: 4866; WAN024GKH; Start 41; Stop 65
actgcgtcaagaaattagaagacaa

SEQ ID NO: 392659 - DNA, 25 bp, Artificial
  probe
  misc_feature (1)..(25): SEQ ID NO: 4866; WAN024GKH; Start 46; Stop 70
gtcaagaaattagaagacaaactcg

SEQ ID NO: 392660 - DNA, 25 bp, Artificial
  probe
  misc_feature (1)..(25): SEQ ID NO: 4866; WAN024GKH; Start 45; Stop 69
cgtcaagaaattagaagacaaactc

SEQ ID NO: 392661 - DNA, 25 bp, Artificial
  probe
  misc_feature (1)..(25): SEQ ID NO: 4866; WAN024GKH; Start 49; Stop 73
aagaaattagaagacaaactcgttt

SEQ ID NO: 392662 - DNA, 25 bp, Artificial
  probe
  misc_feature (1)..(25): SEQ ID NO: 4866; WAN024GKH; Start 50; Stop 74
agaaattagaagacaaactcgtttt

SEQ ID NO: 392663 - DNA, 25 bp, Artificial
  probe
  misc_feature (1)..(25): SEQ ID NO: 4866; WAN024GKH; Start 51; Stop 75
gaaattagaagacaaactcgttttc

SEQ ID NO: 392664 - DNA, 25 bp, Artificial
  probe
  misc_feature (1)..(25): SEQ ID NO: 4866; WAN024GKH; Start 6; Stop 30
aaagcttgctagagcgcatttcaaa

SEQ ID NO: 392665 - DNA, 25 bp, Artificial
  probe
  misc_feature (1)..(25): SEQ ID NO: 4866; WAN024GKH; Start 10; Stop 34
cttgctagagcgcatttcaaaccag

SEQ ID NO: 392666 - DNA, 25 bp, Artificial
  probe
  misc_feature (1)..(25): SEQ ID NO: 4866; WAN024GKH; Start 7; Stop 31
aagcttgctagagcgcatttcaaac

SEQ ID NO: 392667 - DNA, 25 bp, Artificial
  probe
  misc_feature (1)..(25): SEQ ID NO: 4866; WAN024GKH; Start 5; Stop 29
aaaagcttgctagagcgcatttcaa

SEQ ID NO: 392668 - DNA, 25 bp, Artificial
  probe
  misc_feature (1)..(25): SEQ ID NO: 4867; WAN024FXH; Start 544; Stop 568
aatcatcctatattgctgtatgcga

SEQ ID NO: 392669 - DNA, 25 bp, Artificial
  probe
  misc_feature (1)..(25): SEQ ID NO: 4867; WAN024FXH; Start 545; Stop 569
atcatcctatattgctgtatgcgag

SEQ ID NO: 392670 - DNA, 25 bp, Artificial
  probe
  misc_feature (1)..(25): SEQ ID NO: 4867; WAN024FXH; Start 547; Stop 571
catcctatattgctgtatgcgagaa

SEQ ID NO: 392671 - DNA, 25 bp, Artificial
  probe
  misc_feature (1)..(25): SEQ ID NO: 4867; WAN024FXH; Start 381; Stop 405
cttatgtcgttatggaggattatgg

SEQ ID NO: 392672 - DNA, 25 bp, Artificial
  probe
  misc_feature (1)..(25): SEQ ID NO: 4867; WAN024FXH; Start 372; Stop 396
ggtagaactcttatgtcgttatgga

SEQ ID NO: 392673 - DNA, 25 bp, Artificial
  probe
  misc_feature (1)..(25): SEQ ID NO: 4867; WAN024FXH; Start 546; Stop 570
tcatcctatattgctgtatgcgaga

SEQ ID NO: 392674 - DNA, 25 bp, Artificial
  probe
  misc_feature (1)..(25): SEQ ID NO: 4867; WAN024FXH; Start 543; Stop 567
taatcatcctatattgctgtatgcg

SEQ ID NO: 392675 - DNA, 25 bp, Artificial
  probe
  misc_feature (1)..(25): SEQ ID NO: 4867; WAN024FXH; Start 250; Stop 274
ggaagagagattatcgtactgacag

SEQ ID NO: 392676 - DNA, 25 bp, Artificial
  probe
  misc_feature (1)..(25): SEQ ID NO: 4867; WAN024FXH; Start 248; Stop 272
ttggaagagagattatcgtactgac

SEQ ID NO: 392677 - DNA, 25 bp, Artificial
  probe
  misc_feature (1)..(25): SEQ ID NO: 4867; WAN024FXH; Start 249; Stop 273
tggaagagagattatcgtactgaca

SEQ ID NO: 392678 - DNA, 25 bp, Artificial
  probe
  misc_feature (1)..(25): SEQ ID NO: 4867; WAN024FXH; Start 376; Stop 400
gaactcttatgtcgttatggaggat

SEQ ID NO: 392679 - DNA, 25 bp, Artificial
  probe
  misc_feature (1)..(25): SEQ ID NO: 4867; WAN024FXH; Start 247; Stop 271
cttggaagagagattatcgtactga

SEQ ID NO: 392680 - DNA, 25 bp, Artificial
  probe
  misc_feature (1)..(25): SEQ ID NO: 4867; WAN024FXH; Start 377; Stop 401
aactcttatgtcgttatggaggatt

SEQ ID NO: 392681 - DNA, 25 bp, Artificial
  probe
  misc_feature (1)..(25): SEQ ID NO: 4867; WAN024FXH; Start 254; Stop 278
gagagattatcgtactgacagaaga

SEQ ID NO: 392682 - DNA, 25 bp, Artificial
  probe
  misc_feature (1)..(25): SEQ ID NO: 4867; WAN024FXH; Start 253; Stop 277
agagagattatcgtactgacagaag

SEQ ID NO: 392683 - DNA, 25 bp, Artificial
  probe
  misc_feature (1)..(25): SEQ ID NO: 4867; WAN024FXH; Start 251; Stop 275
gaagagagattatcgtactgacaga

SEQ ID NO: 392684 - DNA, 25 bp, Artificial
  probe
  misc_feature (1)..(25): SEQ ID NO: 4867; WAN024FXH; Start 374; Stop 398
tagaactcttatgtcgttatggagg

SEQ ID NO: 392685 - DNA, 25 bp, Artificial
  probe
  misc_feature (1)..(25): SEQ ID NO: 4867; WAN024FXH; Start 375; Stop 399
agaactcttatgtcgttatggagga

SEQ ID NO: 392686 - DNA, 25 bp, Artificial
  probe
  misc_feature (1)..(25): SEQ ID NO: 4867; WAN024FXH; Start 494; Stop 518
aagattctcaagccattgtagcatc

SEQ ID NO: 392687 - DNA, 25 bp, Artificial
  probe
  misc_feature (1)..(25): SEQ ID NO: 4867; WAN024FXH; Start 246; Stop 270
tcttggaagagagattatcgtactg

SEQ ID NO: 392688 - DNA, 25 bp, Artificial
  probe
  misc_feature (1)..(25): SEQ ID NO: 4867; WAN024FXH; Start 255; Stop 279
agagattatcgtactgacagaagaa

SEQ ID NO: 392689 - DNA, 25 bp, Artificial
  probe
  misc_feature (1)..(25): SEQ ID NO: 4867; WAN024FXH; Start 252; Stop 276
aagagagattatcgtactgacagaa

SEQ ID NO: 392690 - DNA, 25 bp, Artificial
  probe
  misc_feature (1)..(25): SEQ ID NO: 4867; WAN024FXH; Start 380; Stop 404
tcttatgtcgttatggaggattatg

SEQ ID NO: 392691 - DNA, 25 bp, Artificial
  probe
  misc_feature (1)..(25): SEQ ID NO: 4867; WAN024FXH; Start 497; Stop 521
attctcaagccattgtagcatcaag

SEQ ID NO: 392692 - DNA, 25 bp, Artificial
  probe
  misc_feature (1)..(25): SEQ ID NO: 4867; WAN024FXH; Start 496; Stop 520
gattctcaagccattgtagcatcaa

SEQ ID NO: 392693 - DNA, 25 bp, Artificial
  probe
  misc_feature (1)..(25): SEQ ID NO: 4867; WAN024FXH; Start 378; Stop 402
actcttatgtcgttatggaggatta

SEQ ID NO: 392694 - DNA, 25 bp, Artificial
  probe
  misc_feature (1)..(25): SEQ ID NO: 4867; WAN024FXH; Start 507; Stop 531
cattgtagcatcaagttggttaatt

SEQ ID NO: 392695 - DNA, 25 bp, Artificial
  probe
  misc_feature (1)..(25): SEQ ID NO: 4867; WAN024FXH; Start 373; Stop 397
gtagaactcttatgtcgttatggag

SEQ ID NO: 392696 - DNA, 25 bp, Artificial
  probe
  misc_feature (1)..(25): SEQ ID NO: 4867; WAN024FXH; Start 245; Stop 269
ttcttggaagagagattatcgtact

SEQ ID NO: 392697 - DNA, 25 bp, Artificial
  probe
  misc_feature (1)..(25): SEQ ID NO: 4867; WAN024FXH; Start 412; Stop 436
gtaacagtgttgaatacaggaggag

SEQ ID NO: 392698 - DNA, 25 bp, Artificial
  probe
  misc_feature (1)..(25): SEQ ID NO: 4867; WAN024FXH; Start 413; Stop 437
taacagtgttgaatacaggaggaga

SEQ ID NO: 392699 - DNA, 25 bp, Artificial
  probe
  misc_feature (1)..(25): SEQ ID NO: 4867; WAN024FXH; Start 506; Stop 530
ccattgtagcatcaagttggttaat

SEQ ID NO: 392700 - DNA, 25 bp, Artificial
  probe
  misc_feature (1)..(25): SEQ ID NO: 4867; WAN024FXH; Start 495; Stop 519
agattctcaagccattgtagcatca

SEQ ID NO: 392701 - DNA, 25 bp, Artificial
  probe
  misc_feature (1)..(25): SEQ ID NO: 4868; WAN024FXE; Start 749; Stop 773
actatggttctacaaggaatcttca

SEQ ID NO: 392702 - DNA, 25 bp, Artificial
  probe
  misc_feature (1)..(25): SEQ ID NO: 4868; WAN024FXE; Start 754; Stop 778
ggttctacaaggaatcttcatggaa

SEQ ID NO: 392703 - DNA, 25 bp, Artificial
  probe
  misc_feature (1)..(25): SEQ ID NO: 4868; WAN024FXE; Start 752; Stop 776
atggttctacaaggaatcttcatgg

SEQ ID NO: 392704 - DNA, 25 bp, Artificial
  probe
  misc_feature (1)..(25): SEQ ID NO: 4868; WAN024FXE; Start 750; Stop 774
ctatggttctacaaggaatcttcat

SEQ ID NO: 392705 - DNA, 25 bp, Artificial
  probe
  misc_feature (1)..(25): SEQ ID NO: 4868; WAN024FXE; Start 755; Stop 779
gttctacaaggaatcttcatggaat

SEQ ID NO: 392706 - DNA, 25 bp, Artificial
  probe
  misc_feature (1)..(25): SEQ ID NO: 4868; WAN024FXE; Start 753; Stop 777
tggttctacaaggaatcttcatgga

SEQ ID NO: 392707 - DNA, 25 bp, Artificial
  probe
  misc_feature (1)..(25): SEQ ID NO: 4868; WAN024FXE; Start 485; Stop 509
tcggtgatacaatatccaattacac

SEQ ID NO: 392708 - DNA, 25 bp, Artificial
  probe
  misc_feature (1)..(25): SEQ ID NO: 4868; WAN024FXE; Start 748; Stop 772
tactatggttctacaaggaatcttc

SEQ ID NO: 392709 - DNA, 25 bp, Artificial
  probe
  misc_feature (1)..(25): SEQ ID NO: 4868; WAN024FXE; Start 486; Stop 510
cggtgatacaatatccaattacact

SEQ ID NO: 392710 - DNA, 25 bp, Artificial
  probe
  misc_feature (1)..(25): SEQ ID NO: 4868; WAN024FXE; Start 751; Stop 775
tatggttctacaaggaatcttcatg

SEQ ID NO: 392711 - DNA, 25 bp, Artificial
  probe
  misc_feature (1)..(25): SEQ ID NO: 4868; WAN024FXE; Start 88; Stop 112
ttatattgtgctgatccagttgtcg

SEQ ID NO: 392712 - DNA, 25 bp, Artificial
  probe
  misc_feature (1)..(25): SEQ ID NO: 4868; WAN024FXE; Start 756; Stop 780
ttctacaaggaatcttcatggaatt

SEQ ID NO: 392713 - DNA, 25 bp, Artificial
  probe
  misc_feature (1)..(25): SEQ ID NO: 4868; WAN024FXE; Start 484; Stop 508
atcggtgatacaatatccaattaca

SEQ ID NO: 392714 - DNA, 25 bp, Artificial
  probe
  misc_feature (1)..(25): SEQ ID NO: 4868; WAN024FXE; Start 235; Stop 259
gatattgactgtattgtgggaatgg

SEQ ID NO: 392715 - DNA, 25 bp, Artificial
  probe
  misc_feature (1)..(25): SEQ ID NO: 4868; WAN024FXE; Start 236; Stop 260
atattgactgtattgtgggaatggg

SEQ ID NO: 392716 - DNA, 25 bp, Artificial
  probe
  misc_feature (1)..(25): SEQ ID NO: 4868; WAN024FXE; Start 777; Stop 801
aattcaggttgcattaggtacagtc

SEQ ID NO: 392717 - DNA, 25 bp, Artificial
  probe
  misc_feature (1)..(25): SEQ ID NO: 4868; WAN024FXE; Start 488; Stop 512
gtgatacaatatccaattacactgc

SEQ ID NO: 392718 - DNA, 25 bp, Artificial
  probe
  misc_feature (1)..(25): SEQ ID NO: 4868; WAN024FXE; Start 21; Stop 45
gataggaagtggagctattcatcaa

SEQ ID NO: 392719 - DNA, 25 bp, Artificial
  probe
  misc_feature (1)..(25): SEQ ID NO: 4868; WAN024FXE; Start 19; Stop 43
aagataggaagtggagctattcatc

SEQ ID NO: 392720 - DNA, 25 bp, Artificial
  probe
  misc_feature (1)..(25): SEQ ID NO: 4868; WAN024FXE; Start 20; Stop 44
agataggaagtggagctattcatca

SEQ ID NO: 392721 - DNA, 25 bp, Artificial
  probe
  misc_feature (1)..(25): SEQ ID NO: 4868; WAN024FXE; Start 747; Stop 771
ttactatggttctacaaggaatctt

SEQ ID NO: 392722 - DNA, 25 bp, Artificial
  probe
  misc_feature (1)..(25): SEQ ID NO: 4868; WAN024FXE; Start 237; Stop 261
tattgactgtattgtgggaatggga

SEQ ID NO: 392723 - DNA, 25 bp, Artificial
  probe
  misc_feature (1)..(25): SEQ ID NO: 4868; WAN024FXE; Start 234; Stop 258
agatattgactgtattgtgggaatg

SEQ ID NO: 392724 - DNA, 25 bp, Artificial
  probe
  misc_feature (1)..(25): SEQ ID NO: 4868; WAN024FXE; Start 444; Stop 468
tgttattgcatcaggacctatacaa

SEQ ID NO: 392725 - DNA, 25 bp, Artificial
  probe
  misc_feature (1)..(25): SEQ ID NO: 4868; WAN024FXE; Start 152; Stop 176
aaattggtcgggtaaaggaagaaag

SEQ ID NO: 392726 - DNA, 25 bp, Artificial
  probe
  misc_feature (1)..(25): SEQ ID NO: 4868; WAN024FXE; Start 151; Stop 175
gaaattggtcgggtaaaggaagaaa

SEQ ID NO: 392727 - DNA, 25 bp, Artificial
  probe
  misc_feature (1)..(25): SEQ ID NO: 4868; WAN024FXE; Start 746; Stop 770
attactatggttctacaaggaatct

SEQ ID NO: 392728 - DNA, 25 bp, Artificial
  probe
  misc_feature (1)..(25): SEQ ID NO: 4868; WAN024FXE; Start 443; Stop 467
atgttattgcatcaggacctataca

SEQ ID NO: 392729 - DNA, 25 bp, Artificial
  probe
  misc_feature (1)..(25): SEQ ID NO: 4868; WAN024FXE; Start 487; Stop 511
ggtgatacaatatccaattacactg

SEQ ID NO: 392730 - DNA, 25 bp, Artificial
  probe
  misc_feature (1)..(25): SEQ ID NO: 4868; WAN024FXE; Start 744; Stop 768
agattactatggttctacaaggaat

SEQ ID NO: 392731 - DNA, 25 bp, Artificial
  probe
  misc_feature (1)..(25): SEQ ID NO: 4868; WAN024FXE; Start 186; Stop 210
taatactattgcttatgcgatgaat

SEQ ID NO: 392732 - DNA, 25 bp, Artificial
  probe
  misc_feature (1)..(25): SEQ ID NO: 4868; WAN024FXE; Start 714; Stop 738
tgggtcagagcacttatttagtcat

SEQ ID NO: 392733 - DNA, 25 bp, Artificial
  probe
  misc_feature (1)..(25): SEQ ID NO: 4868; WAN024FXE; Start 190; Stop 214
actattgcttatgcgatgaatatag

SEQ ID NO: 392734 - DNA, 25 bp, Artificial
  probe
  misc_feature (1)..(25): SEQ ID NO: 4869; WAN024G3Y; Start 6; Stop 30
aaatggatttcctgacctcacaatt

SEQ ID NO: 392735 - DNA, 25 bp, Artificial
  probe
  misc_feature (1)..(25): SEQ ID NO: 4869; WAN024G3Y; Start 60; Stop 84
aatctacagattggcaatcacacca

SEQ ID NO: 392736 - DNA, 25 bp, Artificial
  probe
  misc_feature (1)..(25): SEQ ID NO: 4869; WAN024G3Y; Start 5; Stop 29
aaaatggatttcctgacctcacaat

SEQ ID NO: 392737 - DNA, 25 bp, Artificial
  probe
  misc_feature (1)..(25): SEQ ID NO: 4869; WAN024G3Y; Start 61; Stop 85
atctacagattggcaatcacaccac

SEQ ID NO: 392738 - DNA, 25 bp, Artificial
  probe
  misc_feature (1)..(25): SEQ ID NO: 4869; WAN024G3Y; Start 7; Stop 31
aatggatttcctgacctcacaattg

SEQ ID NO: 392739 - DNA, 25 bp, Artificial
  probe
  misc_feature (1)..(25): SEQ ID NO: 4869; WAN024G3Y; Start 63; Stop 87
ctacagattggcaatcacaccacag

SEQ ID NO: 392740 - DNA, 25 bp, Artificial
  probe
  misc_feature (1)..(25): SEQ ID NO: 4869; WAN024G3Y; Start 8; Stop 32
atggatttcctgacctcacaattga

SEQ ID NO: 392741 - DNA, 25 bp, Artificial
  probe
  misc_feature (1)..(25): SEQ ID NO: 4869; WAN024G3Y; Start 62; Stop 86
tctacagattggcaatcacaccaca

SEQ ID NO: 392742 - DNA, 25 bp, Artificial
  probe
  misc_feature (1)..(25): SEQ ID NO: 4869; WAN024G3Y; Start 14; Stop 38
ttcctgacctcacaattgagtcttg

SEQ ID NO: 392743 - DNA, 25 bp, Artificial
  probe
  misc_feature (1)..(25): SEQ ID NO: 4869; WAN024G3Y; Start 11; Stop 35
gatttcctgacctcacaattgagtc

SEQ ID NO: 392744 - DNA, 25 bp, Artificial
  probe
  misc_feature (1)..(25): SEQ ID NO: 4869; WAN024G3Y; Start 12; Stop 36
atttcctgacctcacaattgagtct

SEQ ID NO: 392745 - DNA, 25 bp, Artificial
  probe
  misc_feature (1)..(25): SEQ ID NO: 4869; WAN024G3Y; Start 13; Stop 37
tttcctgacctcacaattgagtctt

SEQ ID NO: 392746 - DNA, 25 bp, Artificial
  probe
  misc_feature (1)..(25): SEQ ID NO: 4869; WAN024G3Y; Start 20; Stop 44
acctcacaattgagtcttggtctca

SEQ ID NO: 392747 - DNA, 25 bp, Artificial
  probe
  misc_feature (1)..(25): SEQ ID NO: 4869; WAN024G3Y; Start 10; Stop 34
ggatttcctgacctcacaattgagt

SEQ ID NO: 392748 - DNA, 25 bp, Artificial
  probe
  misc_feature (1)..(25): SEQ ID NO: 4869; WAN024G3Y; Start 9; Stop 33
tggatttcctgacctcacaattgag

SEQ ID NO: 392749 - DNA, 25 bp, Artificial
  probe
  misc_feature (1)..(25): SEQ ID NO: 4869; WAN024G3Y; Start 15; Stop 39
tcctgacctcacaattgagtcttgg

SEQ ID NO: 392750 - DNA, 25 bp, Artificial
  probe
  misc_feature (1)..(25): SEQ ID NO: 4869; WAN024G3Y; Start 19; Stop 43
gacctcacaattgagtcttggtctc

SEQ ID NO: 392751 - DNA, 25 bp, Artificial
  probe
  misc_feature (1)..(25): SEQ ID NO: 4869; WAN024G3Y; Start 16; Stop 40
cctgacctcacaattgagtcttggt

SEQ ID NO: 392752 - DNA, 25 bp, Artificial
  probe
  misc_feature (1)..(25): SEQ ID NO: 4869; WAN024G3Y; Start 17; Stop 41
ctgacctcacaattgagtcttggtc

SEQ ID NO: 392753 - DNA, 25 bp, Artificial
  probe
  misc_feature (1)..(25): SEQ ID NO: 4869; WAN024G3Y; Start 18; Stop 42
tgacctcacaattgagtcttggtct

SEQ ID NO: 392754 - DNA, 25 bp, Artificial
  probe
  misc_feature (1)..(25): SEQ ID NO: 4870; WAN024DNK; Start 42; Stop 66
gtacttggtctctcgtttgattagc

SEQ ID NO: 392755 - DNA, 25 bp, Artificial
  probe
  misc_feature (1)..(25): SEQ ID NO: 4870; WAN024DNK; Start 43; Stop 67
tacttggtctctcgtttgattagct

SEQ ID NO: 392756 - DNA, 25 bp, Artificial
  probe
  misc_feature (1)..(25): SEQ ID NO: 4870; WAN024DNK; Start 44; Stop 68
acttggtctctcgtttgattagctc

SEQ ID NO: 392757 - DNA, 25 bp, Artificial
  probe
  misc_feature (1)..(25): SEQ ID NO: 4870; WAN024DNK; Start 41; Stop 65
agtacttggtctctcgtttgattag

SEQ ID NO: 392758 - DNA, 25 bp, Artificial
  probe
  misc_feature (1)..(25): SEQ ID NO: 4870; WAN024DNK; Start 45; Stop 69
cttggtctctcgtttgattagctca

SEQ ID NO: 392759 - DNA, 25 bp, Artificial
  probe
  misc_feature (1)..(25): SEQ ID NO: 4870; WAN024DNK; Start 51; Stop 75
ctctcgtttgattagctcaattcag

SEQ ID NO: 392760 - DNA, 25 bp, Artificial
  probe
  misc_feature (1)..(25): SEQ ID NO: 4870; WAN024DNK; Start 50; Stop 74
tctctcgtttgattagctcaattca

SEQ ID NO: 392761 - DNA, 25 bp, Artificial
  probe
  misc_feature (1)..(25): SEQ ID NO: 4870; WAN024DNK; Start 49; Stop 73
gtctctcgtttgattagctcaattc

SEQ ID NO: 392762 - DNA, 25 bp, Artificial
  probe
  misc_feature (1)..(25): SEQ ID NO: 4870; WAN024DNK; Start 48; Stop 72
ggtctctcgtttgattagctcaatt

SEQ ID NO: 392763 - DNA, 25 bp, Artificial
  probe
  misc_feature (1)..(25): SEQ ID NO: 4870; WAN024DNK; Start 54; Stop 78
tcgtttgattagctcaattcagcaa

SEQ ID NO: 392764 - DNA, 25 bp, Artificial
  probe
  misc_feature (1)..(25): SEQ ID NO: 4870; WAN024DNK; Start 52; Stop 76
tctcgtttgattagctcaattcagc

SEQ ID NO: 392765 - DNA, 25 bp, Artificial
  probe
  misc_feature (1)..(25): SEQ ID NO: 4870; WAN024DNK; Start 53; Stop 77
ctcgtttgattagctcaattcagca

SEQ ID NO: 392766 - DNA, 25 bp, Artificial
  probe
  misc_feature (1)..(25): SEQ ID NO: 4870; WAN024DNK; Start 47; Stop 71
tggtctctcgtttgattagctcaat

SEQ ID NO: 392767 - DNA, 25 bp, Artificial
  probe
  misc_feature (1)..(25): SEQ ID NO: 4870; WAN024DNK; Start 46; Stop 70
ttggtctctcgtttgattagctcaa

SEQ ID NO: 392768 - DNA, 25 bp, Artificial
  probe
  misc_feature (1)..(25): SEQ ID NO: 4871; WAN024DQQ; Start 50; Stop 74
taggaaaagattcggctgaaagtat

SEQ ID NO: 392769 - DNA, 25 bp, Artificial
  probe
  misc_feature (1)..(25): SEQ ID NO: 4871; WAN024DQQ; Start 42; Stop 66
tataatggtaggaaaagattcggct

SEQ ID NO: 392770 - DNA, 25 bp, Artificial
  probe
  misc_feature (1)..(25): SEQ ID NO: 4871; WAN024DQQ; Start 41; Stop 65
gtataatggtaggaaaagattcggc

SEQ ID NO: 392771 - DNA, 25 bp, Artificial
  probe
  misc_feature (1)..(25): SEQ ID NO: 4871; WAN024DQQ; Start 74; Stop 98
tcagaacttttagaataagagggct

SEQ ID NO: 392772 - DNA, 25 bp, Artificial
  probe
  misc_feature (1)..(25): SEQ ID NO: 4871; WAN024DQQ; Start 49; Stop 73
gtaggaaaagattcggctgaaagta

SEQ ID NO: 392773 - DNA, 25 bp, Artificial
  probe
  misc_feature (1)..(25): SEQ ID NO: 4871; WAN024DQQ; Start 43; Stop 67
ataatggtaggaaaagattcggctg

SEQ ID NO: 392774 - DNA, 25 bp, Artificial
  probe
  misc_feature (1)..(25): SEQ ID NO: 4871; WAN024DQQ; Start 40; Stop 64
ggtataatggtaggaaaagattcgg

SEQ ID NO: 392775 - DNA, 25 bp, Artificial
  probe
  misc_feature (1)..(25): SEQ ID NO: 4871; WAN024DQQ; Start 51; Stop 75
aggaaaagattcggctgaaagtatc

SEQ ID NO: 392776 - DNA, 25 bp, Artificial
  probe
  misc_feature (1)..(25): SEQ ID NO: 4871; WAN024DQQ; Start 73; Stop 97
atcagaacttttagaataagagggc

SEQ ID NO: 392777 - DNA, 25 bp, Artificial
  probe
  misc_feature (1)..(25): SEQ ID NO: 4871; WAN024DQQ; Start 39; Stop 63
tggtataatggtaggaaaagattcg

SEQ ID NO: 392778 - DNA, 25 bp, Artificial
  probe
  misc_feature (1)..(25): SEQ ID NO: 4871; WAN024DQQ; Start 44; Stop 68
taatggtaggaaaagattcggctga

SEQ ID NO: 392779 - DNA, 25 bp, Artificial
  probe
  misc_feature (1)..(25): SEQ ID NO: 4871; WAN024DQQ; Start 52; Stop 76
ggaaaagattcggctgaaagtatca

SEQ ID NO: 392780 - DNA, 25 bp, Artificial
  probe
  misc_feature (1)..(25): SEQ ID NO: 4871; WAN024DQQ; Start 75; Stop 99
cagaacttttagaataagagggcta

SEQ ID NO: 392781 - DNA, 25 bp, Artificial
  probe
  misc_feature (1)..(25): SEQ ID NO: 4871; WAN024DQQ; Start 46; Stop 70
atggtaggaaaagattcggctgaaa

SEQ ID NO: 392782 - DNA, 25 bp, Artificial
  probe
  misc_feature (1)..(25): SEQ ID NO: 4871; WAN024DQQ; Start 45; Stop 69
aatggtaggaaaagattcggctgaa

SEQ ID NO: 392783 - DNA, 25 bp, Artificial
  probe
  misc_feature (1)..(25): SEQ ID NO: 4871; WAN024DQQ; Start 55; Stop 79
aaagattcggctgaaagtatcagaa

SEQ ID NO: 392784 - DNA, 25 bp, Artificial
  probe
  misc_feature (1)..(25): SEQ ID NO: 4871; WAN024DQQ; Start 58; Stop 82
gattcggctgaaagtatcagaactt

SEQ ID NO: 392785 - DNA, 25 bp, Artificial
  probe
  misc_feature (1)..(25): SEQ ID NO: 4871; WAN024DQQ; Start 56; Stop 80
aagattcggctgaaagtatcagaac

SEQ ID NO: 392786 - DNA, 25 bp, Artificial
  probe
  misc_feature (1)..(25): SEQ ID NO: 4871; WAN024DQQ; Start 48; Stop 72
ggtaggaaaagattcggctgaaagt

SEQ ID NO: 392787 - DNA, 25 bp, Artificial
  probe
  misc_feature (1)..(25): SEQ ID NO: 4871; WAN024DQQ; Start 47; Stop 71
tggtaggaaaagattcggctgaaag

SEQ ID NO: 392788 - DNA, 25 bp, Artificial
  probe
  misc_feature (1)..(25): SEQ ID NO: 4871; WAN024DQQ; Start 57; Stop 81
agattcggctgaaagtatcagaact

SEQ ID NO: 392789 - DNA, 25 bp, Artificial
  probe
  misc_feature (1)..(25): SEQ ID NO: 4871; WAN024DQQ; Start 38; Stop 62
atggtataatggtaggaaaagattc

SEQ ID NO: 392790 - DNA, 25 bp, Artificial
  probe
  misc_feature (1)..(25): SEQ ID NO: 4871; WAN024DQQ; Start 35; Stop 59
aaaatggtataatggtaggaaaaga

SEQ ID NO: 392791 - DNA, 25 bp, Artificial
  probe
  misc_feature (1)..(25): SEQ ID NO: 4871; WAN024DQQ; Start 2; Stop 26
tgaaaacagaccttcattttgaaaa

SEQ ID NO: 392792 - DNA, 25 bp, Artificial
  probe
  misc_feature (1)..(25): SEQ ID NO: 4871; WAN024DQQ; Start 1; Stop 25
ttgaaaacagaccttcattttgaaa

SEQ ID NO: 392793 - DNA, 25 bp, Artificial
  probe
  misc_feature (1)..(25): SEQ ID NO: 4871; WAN024DQQ; Start 8; Stop 32
cagaccttcattttgaaaatcatca

SEQ ID NO: 392794 - DNA, 25 bp, Artificial
  probe
  misc_feature (1)..(25): SEQ ID NO: 4871; WAN024DQQ; Start 7; Stop 31
acagaccttcattttgaaaatcatc

SEQ ID NO: 392795 - DNA, 25 bp, Artificial
  probe
  misc_feature (1)..(25): SEQ ID NO: 4871; WAN024DQQ; Start 5; Stop 29
aaacagaccttcattttgaaaatca

SEQ ID NO: 392796 - DNA, 25 bp, Artificial
  probe
  misc_feature (1)..(25): SEQ ID NO: 4871; WAN024DQQ; Start 37; Stop 61
aatggtataatggtaggaaaagatt

SEQ ID NO: 392797 - DNA, 25 bp, Artificial
  probe
  misc_feature (1)..(25): SEQ ID NO: 4871; WAN024DQQ; Start 36; Stop 60
aaatggtataatggtaggaaaagat

SEQ ID NO: 392798 - DNA, 25 bp, Artificial
  probe
  misc_feature (1)..(25): SEQ ID NO: 4871; WAN024DQQ; Start 6; Stop 30
aacagaccttcattttgaaaatcat

SEQ ID NO: 392799 - DNA, 25 bp, Artificial
  probe
  misc_feature (1)..(25): SEQ ID NO: 4871; WAN024DQQ; Start 72; Stop 96
tatcagaacttttagaataagaggg

SEQ ID NO: 392800 - DNA, 25 bp, Artificial
  probe
  misc_feature (1)..(25): SEQ ID NO: 4871; WAN024DQQ; Start 53; Stop 77
gaaaagattcggctgaaagtatcag

SEQ ID NO: 392801 - DNA, 25 bp, Artificial
  probe
  misc_feature (1)..(25): SEQ ID NO: 4872; WAN024DP8; Start 3; Stop 27
gaaaacaggtacacttcatgtgaaa

SEQ ID NO: 392802 - DNA, 25 bp, Artificial
  probe
  misc_feature (1)..(25): SEQ ID NO: 4872; WAN024DP8; Start 4; Stop 28
aaaacaggtacacttcatgtgaaaa

SEQ ID NO: 392803 - DNA, 25 bp, Artificial
  probe
  misc_feature (1)..(25): SEQ ID NO: 4872; WAN024DP8; Start 2; Stop 26
tgaaaacaggtacacttcatgtgaa

SEQ ID NO: 392804 - DNA, 25 bp, Artificial
  probe
  misc_feature (1)..(25): SEQ ID NO: 4872; WAN024DP8; Start 1; Stop 25
ttgaaaacaggtacacttcatgtga

SEQ ID NO: 392805 - DNA, 25 bp, Artificial
  probe
  misc_feature (1)..(25): SEQ ID NO: 4872; WAN024DP8; Start 31; Stop 55
acaacatttcagattttctgttcca

SEQ ID NO: 392806 - DNA, 25 bp, Artificial
  probe
  misc_feature (1)..(25): SEQ ID NO: 4872; WAN024DP8; Start 33; Stop 57
aacatttcagattttctgttccaga

SEQ ID NO: 392807 - DNA, 25 bp, Artificial
  probe
  misc_feature (1)..(25): SEQ ID NO: 4872; WAN024DP8; Start 32; Stop 56
caacatttcagattttctgttccag

SEQ ID NO: 392808 - DNA, 25 bp, Artificial
  probe
  misc_feature (1)..(25): SEQ ID NO: 4872; WAN024DP8; Start 30; Stop 54
aacaacatttcagattttctgttcc

SEQ ID NO: 392809 - DNA, 25 bp, Artificial
  probe
  misc_feature (1)..(25): SEQ ID NO: 4872; WAN024DP8; Start 29; Stop 53
aaacaacatttcagattttctgttc

SEQ ID NO: 392810 - DNA, 25 bp, Artificial
  probe
  misc_feature (1)..(25): SEQ ID NO: 4872; WAN024DP8; Start 28; Stop 52
aaaacaacatttcagattttctgtt

SEQ ID NO: 392811 - DNA, 25 bp, Artificial
  probe
  misc_feature (1)..(25): SEQ ID NO: 4873; WAN024CZK; Start 266; Stop 290
cttatgacgagattacaggtgttgg

SEQ ID NO: 392812 - DNA, 25 bp, Artificial
  probe
  misc_feature (1)..(25): SEQ ID NO: 4873; WAN024CZK; Start 259; Stop 283
atcaaggcttatgacgagattacag

SEQ ID NO: 392813 - DNA, 25 bp, Artificial
  probe
  misc_feature (1)..(25): SEQ ID NO: 4873; WAN024CZK; Start 715; Stop 739
actcctcttggtggtattatgatgg

SEQ ID NO: 392814 - DNA, 25 bp, Artificial
  probe
  misc_feature (1)..(25): SEQ ID NO: 4873; WAN024CZK; Start 258; Stop 282
tatcaaggcttatgacgagattaca

SEQ ID NO: 392815 - DNA, 25 bp, Artificial
  probe
  misc_feature (1)..(25): SEQ ID NO: 4873; WAN024CZK; Start 267; Stop 291
ttatgacgagattacaggtgttgga

SEQ ID NO: 392816 - DNA, 25 bp, Artificial
  probe
  misc_feature (1)..(25): SEQ ID NO: 4873; WAN024CZK; Start 252; Stop 276
cgatattatcaaggcttatgacgag

SEQ ID NO: 392817 - DNA, 25 bp, Artificial
  probe
  misc_feature (1)..(25): SEQ ID NO: 4873; WAN024CZK; Start 265; Stop 289
gcttatgacgagattacaggtgttg

SEQ ID NO: 392818 - DNA, 25 bp, Artificial
  probe
  misc_feature (1)..(25): SEQ ID NO: 4873; WAN024CZK; Start 257; Stop 281
ttatcaaggcttatgacgagattac

SEQ ID NO: 392819 - DNA, 25 bp, Artificial
  probe
  misc_feature (1)..(25): SEQ ID NO: 4873; WAN024CZK; Start 424; Stop 448
ttcaaggaattgttgccagacatta

SEQ ID NO: 392820 - DNA, 25 bp, Artificial
  probe
  misc_feature (1)..(25): SEQ ID NO: 4873; WAN024CZK; Start 268; Stop 292
tatgacgagattacaggtgttggac

SEQ ID NO: 392821 - DNA, 25 bp, Artificial
  probe
  misc_feature (1)..(25): SEQ ID NO: 4873; WAN024CZK; Start 818; Stop 842
atatcagtcgtgttcttaaccgtga

SEQ ID NO: 392822 - DNA, 25 bp, Artificial
  probe
  misc_feature (1)..(25): SEQ ID NO: 4873; WAN024CZK; Start 714; Stop 738
cactcctcttggtggtattatgatg

SEQ ID NO: 392823 - DNA, 25 bp, Artificial
  probe
  misc_feature (1)..(25): SEQ ID NO: 4873; WAN024CZK; Start 713; Stop 737
tcactcctcttggtggtattatgat

SEQ ID NO: 392824 - DNA, 25 bp, Artificial
  probe
  misc_feature (1)..(25): SEQ ID NO: 4873; WAN024CZK; Start 712; Stop 736
ttcactcctcttggtggtattatga

SEQ ID NO: 392825 - DNA, 25 bp, Artificial
  probe
  misc_feature (1)..(25): SEQ ID NO: 4873; WAN024CZK; Start 711; Stop 735
gttcactcctcttggtggtattatg

SEQ ID NO: 392826 - DNA, 25 bp, Artificial
  probe
  misc_feature (1)..(25): SEQ ID NO: 4873; WAN024CZK; Start 262; Stop 286
aaggcttatgacgagattacaggtg

SEQ ID NO: 392827 - DNA, 25 bp, Artificial
  probe
  misc_feature (1)..(25): SEQ ID NO: 4873; WAN024CZK; Start 261; Stop 285
caaggcttatgacgagattacaggt

SEQ ID NO: 392828 - DNA, 25 bp, Artificial
  probe
  misc_feature (1)..(25): SEQ ID NO: 4873; WAN024CZK; Start 253; Stop 277
gatattatcaaggcttatgacgaga

SEQ ID NO: 392829 - DNA, 25 bp, Artificial
  probe
  misc_feature (1)..(25): SEQ ID NO: 4873; WAN024CZK; Start 819; Stop 843
tatcagtcgtgttcttaaccgtgaa

SEQ ID NO: 392830 - DNA, 25 bp, Artificial
  probe
  misc_feature (1)..(25): SEQ ID NO: 4873; WAN024CZK; Start 425; Stop 449
tcaaggaattgttgccagacattac

SEQ ID NO: 392831 - DNA, 25 bp, Artificial
  probe
  misc_feature (1)..(25): SEQ ID NO: 4873; WAN024CZK; Start 260; Stop 284
tcaaggcttatgacgagattacagg

SEQ ID NO: 392832 - DNA, 25 bp, Artificial
  probe
  misc_feature (1)..(25): SEQ ID NO: 4873; WAN024CZK; Start 613; Stop 637
cgtccattagaagacttgaagttaa

SEQ ID NO: 392833 - DNA, 25 bp, Artificial
  probe
  misc_feature (1)..(25): SEQ ID NO: 4873; WAN024CZK; Start 264; Stop 288
ggcttatgacgagattacaggtgtt

SEQ ID NO: 392834 - DNA, 25 bp, Artificial
  probe
  misc_feature (1)..(25): SEQ ID NO: 4873; WAN024CZK; Start 256; Stop 280
attatcaaggcttatgacgagatta

SEQ ID NO: 392835 - DNA, 25 bp, Artificial
  probe
  misc_feature (1)..(25): SEQ ID NO: 4873; WAN024CZK; Start 255; Stop 279
tattatcaaggcttatgacgagatt

SEQ ID NO: 392836 - DNA, 25 bp, Artificial
  probe
  misc_feature (1)..(25): SEQ ID NO: 4873; WAN024CZK; Start 1078; Stop 1102
tttggttgtgatgttgatgatgaaa

SEQ ID NO: 392837 - DNA, 25 bp, Artificial
  probe
  misc_feature (1)..(25): SEQ ID NO: 4873; WAN024CZK; Start 928; Stop 952
ttggcttatgaaatgtatgttgacc

SEQ ID NO: 392838 - DNA, 25 bp, Artificial
  probe
  misc_feature (1)..(25): SEQ ID NO: 4873; WAN024CZK; Start 926; Stop 950
gcttggcttatgaaatgtatgttga

SEQ ID NO: 392839 - DNA, 25 bp, Artificial
  probe
  misc_feature (1)..(25): SEQ ID NO: 4873; WAN024CZK; Start 229; Stop 253
ttattggatgacttgattcgtttcg

SEQ ID NO: 392840 - DNA, 25 bp, Artificial
  probe
  misc_feature (1)..(25): SEQ ID NO: 4873; WAN024CZK; Start 935; Stop 959
atgaaatgtatgttgaccgtatcca

SEQ ID NO: 392841 - DNA, 25 bp, Artificial
  probe
  misc_feature (1)..(25): SEQ ID NO: 4873; WAN024CZK; Start 710; Stop 734
ggttcactcctcttggtggtattat

SEQ ID NO: 392842 - DNA, 25 bp, Artificial
  probe
  misc_feature (1)..(25): SEQ ID NO: 4873; WAN024CZK; Start 358; Stop 382
aaagttgaagagttgagtttgttgg

SEQ ID NO: 392843 - DNA, 25 bp, Artificial
  probe
  misc_feature (1)..(25): SEQ ID NO: 4873; WAN024CZK; Start 1077; Stop 1101
gtttggttgtgatgttgatgatgaa

SEQ ID NO: 392844 - DNA, 25 bp, Artificial
  probe
  misc_feature (1)..(25): SEQ ID NO: 4874; WAN024FF5; Start 211; Stop 235
atttggtattgccctgagttaaaga

SEQ ID NO: 392845 - DNA, 25 bp, Artificial
  probe
  misc_feature (1)..(25): SEQ ID NO: 4874; WAN024FF5; Start 213; Stop 237
ttggtattgccctgagttaaagaaa

SEQ ID NO: 392846 - DNA, 25 bp, Artificial
  probe
  misc_feature (1)..(25): SEQ ID NO: 4874; WAN024FF5; Start 212; Stop 236
tttggtattgccctgagttaaagaa

SEQ ID NO: 392847 - DNA, 25 bp, Artificial
  probe
  misc_feature (1)..(25): SEQ ID NO: 4874; WAN024FF5; Start 206; Stop 230
agataatttggtattgccctgagtt

SEQ ID NO: 392848 - DNA, 25 bp, Artificial
  probe
  misc_feature (1)..(25): SEQ ID NO: 4874; WAN024FF5; Start 205; Stop 229
aagataatttggtattgccctgagt

SEQ ID NO: 392849 - DNA, 25 bp, Artificial
  probe
  misc_feature (1)..(25): SEQ ID NO: 4874; WAN024FF5; Start 210; Stop 234
aatttggtattgccctgagttaaag

SEQ ID NO: 392850 - DNA, 25 bp, Artificial
  probe
  misc_feature (1)..(25): SEQ ID NO: 4874; WAN024FF5; Start 38; Stop 62
ctacgataactgggatgattggaac

SEQ ID NO: 392851 - DNA, 25 bp, Artificial
  probe
  misc_feature (1)..(25): SEQ ID NO: 4874; WAN024FF5; Start 204; Stop 228
aaagataatttggtattgccctgag

SEQ ID NO: 392852 - DNA, 25 bp, Artificial
  probe
  misc_feature (1)..(25): SEQ ID NO: 4874; WAN024FF5; Start 42; Stop 66
gataactgggatgattggaacgaaa

SEQ ID NO: 392853 - DNA, 25 bp, Artificial
  probe
  misc_feature (1)..(25): SEQ ID NO: 4874; WAN024FF5; Start 214; Stop 238
tggtattgccctgagttaaagaaag

SEQ ID NO: 392854 - DNA, 25 bp, Artificial
  probe
  misc_feature (1)..(25): SEQ ID NO: 4874; WAN024FF5; Start 207; Stop 231
gataatttggtattgccctgagtta

SEQ ID NO: 392855 - DNA, 25 bp, Artificial
  probe
  misc_feature (1)..(25): SEQ ID NO: 4874; WAN024FF5; Start 209; Stop 233
taatttggtattgccctgagttaaa

SEQ ID NO: 392856 - DNA, 25 bp, Artificial
  probe
  misc_feature (1)..(25): SEQ ID NO: 4874; WAN024FF5; Start 208; Stop 232
ataatttggtattgccctgagttaa

SEQ ID NO: 392857 - DNA, 25 bp, Artificial
  probe
  misc_feature (1)..(25): SEQ ID NO: 4874; WAN024FF5; Start 117; Stop 141
aacttctgctttcatgtcatcctta

SEQ ID NO: 392858 - DNA, 25 bp, Artificial
  probe
  misc_feature (1)..(25): SEQ ID NO: 4874; WAN024FF5; Start 118; Stop 142
acttctgctttcatgtcatccttag

SEQ ID NO: 392859 - DNA, 25 bp, Artificial
  probe
  misc_feature (1)..(25): SEQ ID NO: 4874; WAN024FF5; Start 120; Stop 144
ttctgctttcatgtcatccttagat

SEQ ID NO: 392860 - DNA, 25 bp, Artificial
  probe
  misc_feature (1)..(25): SEQ ID NO: 4874; WAN024FF5; Start 215; Stop 239
ggtattgccctgagttaaagaaagc

SEQ ID NO: 392861 - DNA, 25 bp, Artificial
  probe
  misc_feature (1)..(25): SEQ ID NO: 4874; WAN024FF5; Start 119; Stop 143
cttctgctttcatgtcatccttaga

SEQ ID NO: 392862 - DNA, 25 bp, Artificial
  probe
  misc_feature (1)..(25): SEQ ID NO: 4874; WAN024FF5; Start 158; Stop 182
caagtacaacaacttcatcgtacat

SEQ ID NO: 392863 - DNA, 25 bp, Artificial
  probe
  misc_feature (1)..(25): SEQ ID NO: 4874; WAN024FF5; Start 159; Stop 183
aagtacaacaacttcatcgtacatt

SEQ ID NO: 392864 - DNA, 25 bp, Artificial
  probe
  misc_feature (1)..(25): SEQ ID NO: 4874; WAN024FF5; Start 39; Stop 63
tacgataactgggatgattggaacg

SEQ ID NO: 392865 - DNA, 25 bp, Artificial
  probe
  misc_feature (1)..(25): SEQ ID NO: 4874; WAN024FF5; Start 37; Stop 61
gctacgataactgggatgattggaa

SEQ ID NO: 392866 - DNA, 25 bp, Artificial
  probe
  misc_feature (1)..(25): SEQ ID NO: 4874; WAN024FF5; Start 116; Stop 140
caacttctgctttcatgtcatcctt

SEQ ID NO: 392867 - DNA, 25 bp, Artificial
  probe
  misc_feature (1)..(25): SEQ ID NO: 4874; WAN024FF5; Start 157; Stop 181
ccaagtacaacaacttcatcgtaca

SEQ ID NO: 392868 - DNA, 25 bp, Artificial
  probe
  misc_feature (1)..(25): SEQ ID NO: 4874; WAN024FF5; Start 190; Stop 214
actgtacctgtaccaaagataattt

SEQ ID NO: 392869 - DNA, 25 bp, Artificial
  probe
  misc_feature (1)..(25): SEQ ID NO: 4874; WAN024FF5; Start 189; Stop 213
aactgtacctgtaccaaagataatt

SEQ ID NO: 392870 - DNA, 25 bp, Artificial
  probe
  misc_feature (1)..(25): SEQ ID NO: 4874; WAN024FF5; Start 41; Stop 65
cgataactgggatgattggaacgaa

SEQ ID NO: 392871 - DNA, 25 bp, Artificial
  probe
  misc_feature (1)..(25): SEQ ID NO: 4874; WAN024FF5; Start 222; Stop 246
ccctgagttaaagaaagcaccttga

SEQ ID NO: 392872 - DNA, 25 bp, Artificial
  probe
  misc_feature (1)..(25): SEQ ID NO: 4874; WAN024FF5; Start 187; Stop 211
ttaactgtacctgtaccaaagataa

SEQ ID NO: 392873 - DNA, 25 bp, Artificial
  probe
  misc_feature (1)..(25): SEQ ID NO: 4874; WAN024FF5; Start 188; Stop 212
taactgtacctgtaccaaagataat

SEQ ID NO: 392874 - DNA, 25 bp, Artificial
  probe
  misc_feature (1)..(25): SEQ ID NO: 4874; WAN024FF5; Start 203; Stop 227
caaagataatttggtattgccctga

SEQ ID NO: 392875 - DNA, 25 bp, Artificial
  probe
  misc_feature (1)..(25): SEQ ID NO: 4874; WAN024FF5; Start 43; Stop 67
ataactgggatgattggaacgaaaa

SEQ ID NO: 392876 - DNA, 25 bp, Artificial
  probe
  misc_feature (1)..(25): SEQ ID NO: 4874; WAN024FF5; Start 22; Stop 46
atgaagagacctgtcgctacgataa

SEQ ID NO: 392877 - DNA, 25 bp, Artificial
  probe
  misc_feature (1)..(25): SEQ ID NO: 4875; WAN024B4O; Start 158; Stop 182
ttcctcaccaccttatctatgtttc

SEQ ID NO: 392878 - DNA, 25 bp, Artificial
  probe
  misc_feature (1)..(25): SEQ ID NO: 4875; WAN024B4O; Start 161; Stop 185
ctcaccaccttatctatgtttctcc

SEQ ID NO: 392879 - DNA, 25 bp, Artificial
  probe
  misc_feature (1)..(25): SEQ ID NO: 4875; WAN024B4O; Start 160; Stop 184
cctcaccaccttatctatgtttctc

SEQ ID NO: 392880 - DNA, 25 bp, Artificial
  probe
  misc_feature (1)..(25): SEQ ID NO: 4875; WAN024B4O; Start 157; Stop 181
tttcctcaccaccttatctatgttt

SEQ ID NO: 392881 - DNA, 25 bp, Artificial
  probe
  misc_feature (1)..(25): SEQ ID NO: 4875; WAN024B4O; Start 159; Stop 183
tcctcaccaccttatctatgtttct

SEQ ID NO: 392882 - DNA, 25 bp, Artificial
  probe
  misc_feature (1)..(25): SEQ ID NO: 4875; WAN024B4O; Start 162; Stop 186
tcaccaccttatctatgtttctcca

SEQ ID NO: 392883 - DNA, 25 bp, Artificial
  probe
  misc_feature (1)..(25): SEQ ID NO: 4875; WAN024B4O; Start 163; Stop 187
caccaccttatctatgtttctccat

SEQ ID NO: 392884 - DNA, 25 bp, Artificial
  probe
  misc_feature (1)..(25): SEQ ID NO: 4875; WAN024B4O; Start 164; Stop 188
accaccttatctatgtttctccatt

SEQ ID NO: 392885 - DNA, 25 bp, Artificial
  probe
  misc_feature (1)..(25): SEQ ID NO: 4875; WAN024B4O; Start 60; Stop 84
cattgttcttgaaaggatttgccta

SEQ ID NO: 392886 - DNA, 25 bp, Artificial
  probe
  misc_feature (1)..(25): SEQ ID NO: 4875; WAN024B4O; Start 61; Stop 85
attgttcttgaaaggatttgcctag

SEQ ID NO: 392887 - DNA, 25 bp, Artificial
  probe
  misc_feature (1)..(25): SEQ ID NO: 4875; WAN024B4O; Start 165; Stop 189
ccaccttatctatgtttctccatta

SEQ ID NO: 392888 - DNA, 25 bp, Artificial
  probe
  misc_feature (1)..(25): SEQ ID NO: 4875; WAN024B4O; Start 179; Stop 203
tttctccattatactatttctccca

SEQ ID NO: 392889 - DNA, 25 bp, Artificial
  probe
  misc_feature (1)..(25): SEQ ID NO: 4875; WAN024B4O; Start 59; Stop 83
ccattgttcttgaaaggatttgcct

SEQ ID NO: 392890 - DNA, 25 bp, Artificial
  probe
  misc_feature (1)..(25): SEQ ID NO: 4875; WAN024B4O; Start 178; Stop 202
gtttctccattatactatttctccc

SEQ ID NO: 392891 - DNA, 25 bp, Artificial
  probe
  misc_feature (1)..(25): SEQ ID NO: 4875; WAN024B4O; Start 58; Stop 82
tccattgttcttgaaaggatttgcc

SEQ ID NO: 392892 - DNA, 25 bp, Artificial
  probe
  misc_feature (1)..(25): SEQ ID NO: 4875; WAN024B4O; Start 181; Stop 205
tctccattatactatttctcccatt

SEQ ID NO: 392893 - DNA, 25 bp, Artificial
  probe
  misc_feature (1)..(25): SEQ ID NO: 4875; WAN024B4O; Start 180; Stop 204
ttctccattatactatttctcccat

SEQ ID NO: 392894 - DNA, 25 bp, Artificial
  probe
  misc_feature (1)..(25): SEQ ID NO: 4875; WAN024B4O; Start 155; Stop 179
cttttcctcaccaccttatctatgt

SEQ ID NO: 392895 - DNA, 25 bp, Artificial
  probe
  misc_feature (1)..(25): SEQ ID NO: 4875; WAN024B4O; Start 154; Stop 178
tcttttcctcaccaccttatctatg

SEQ ID NO: 392896 - DNA, 25 bp, Artificial
  probe
  misc_feature (1)..(25): SEQ ID NO: 4875; WAN024B4O; Start 152; Stop 176
catcttttcctcaccaccttatcta

SEQ ID NO: 392897 - DNA, 25 bp, Artificial
  probe
  misc_feature (1)..(25): SEQ ID NO: 4875; WAN024B4O; Start 156; Stop 180
ttttcctcaccaccttatctatgtt

SEQ ID NO: 392898 - DNA, 25 bp, Artificial
  probe
  misc_feature (1)..(25): SEQ ID NO: 4875; WAN024B4O; Start 153; Stop 177
atcttttcctcaccaccttatctat

SEQ ID NO: 392899 - DNA, 25 bp, Artificial
  probe
  misc_feature (1)..(25): SEQ ID NO: 4875; WAN024B4O; Start 151; Stop 175
tcatcttttcctcaccaccttatct

SEQ ID NO: 392900 - DNA, 25 bp, Artificial
  probe
  misc_feature (1)..(25): SEQ ID NO: 4875; WAN024B4O; Start 150; Stop 174
gtcatcttttcctcaccaccttatc

SEQ ID NO: 392901 - DNA, 25 bp, Artificial
  probe
  misc_feature (1)..(25): SEQ ID NO: 4875; WAN024B4O; Start 141; Stop 165
aaacgaattgtcatcttttcctcac

SEQ ID NO: 392902 - DNA, 25 bp, Artificial
  probe
  misc_feature (1)..(25): SEQ ID NO: 4875; WAN024B4O; Start 149; Stop 173
tgtcatcttttcctcaccaccttat

SEQ ID NO: 392903 - DNA, 25 bp, Artificial
  probe
  misc_feature (1)..(25): SEQ ID NO: 4875; WAN024B4O; Start 51; Stop 75
ggtcccatccattgttcttgaaagg

SEQ ID NO: 392904 - DNA, 25 bp, Artificial
  probe
  misc_feature (1)..(25): SEQ ID NO: 4875; WAN024B4O; Start 148; Stop 172
ttgtcatcttttcctcaccacctta

SEQ ID NO: 392905 - DNA, 25 bp, Artificial
  probe
  misc_feature (1)..(25): SEQ ID NO: 4875; WAN024B4O; Start 118; Stop 142
tttctgtgctcaccttttcttcaaa

SEQ ID NO: 392906 - DNA, 25 bp, Artificial
  probe
  misc_feature (1)..(25): SEQ ID NO: 4875; WAN024B4O; Start 117; Stop 141
ttttctgtgctcaccttttcttcaa

SEQ ID NO: 392907 - DNA, 25 bp, Artificial
  probe
  misc_feature (1)..(25): SEQ ID NO: 4875; WAN024B4O; Start 90; Stop 114
ttggaccactggcatacaaattgag

SEQ ID NO: 392908 - DNA, 25 bp, Artificial
  probe
  misc_feature (1)..(25): SEQ ID NO: 4875; WAN024B4O; Start 52; Stop 76
gtcccatccattgttcttgaaagga

SEQ ID NO: 392909 - DNA, 25 bp, Artificial
  probe
  misc_feature (1)..(25): SEQ ID NO: 4875; WAN024B4O; Start 49; Stop 73
ttggtcccatccattgttcttgaaa

SEQ ID NO: 392910 - DNA, 25 bp, Artificial
  probe
  misc_feature (1)..(25): SEQ ID NO: 4876; WAN024B83; Start 1402; Stop 1426
cgttattctgaagcaacactgatta

SEQ ID NO: 392911 - DNA, 25 bp, Artificial
  probe
  misc_feature (1)..(25): SEQ ID NO: 4876; WAN024B83; Start 932; Stop 956
tgattacctatatgcgtaccgattc

SEQ ID NO: 392912 - DNA, 25 bp, Artificial
  probe
  misc_feature (1)..(25): SEQ ID NO: 4876; WAN024B83; Start 931; Stop 955
ttgattacctatatgcgtaccgatt

SEQ ID NO: 392913 - DNA, 25 bp, Artificial
  probe
  misc_feature (1)..(25): SEQ ID NO: 4876; WAN024B83; Start 933; Stop 957
gattacctatatgcgtaccgattcg

SEQ ID NO: 392914 - DNA, 25 bp, Artificial
  probe
  misc_feature (1)..(25): SEQ ID NO: 4876; WAN024B83; Start 1401; Stop 1425
ccgttattctgaagcaacactgatt

SEQ ID NO: 392915 - DNA, 25 bp, Artificial
  probe
  misc_feature (1)..(25): SEQ ID NO: 4876; WAN024B83; Start 1403; Stop 1427
gttattctgaagcaacactgattaa

SEQ ID NO: 392916 - DNA, 25 bp, Artificial
  probe
  misc_feature (1)..(25): SEQ ID NO: 4876; WAN024B83; Start 667; Stop 691
gcttccttctatggagtagatggta

SEQ ID NO: 392917 - DNA, 25 bp, Artificial
  probe
  misc_feature (1)..(25): SEQ ID NO: 4876; WAN024B83; Start 885; Stop 909
ccaacagctctatgaaggaattaat

SEQ ID NO: 392918 - DNA, 25 bp, Artificial
  probe
  misc_feature (1)..(25): SEQ ID NO: 4876; WAN024B83; Start 668; Stop 692
cttccttctatggagtagatggtaa

SEQ ID NO: 392919 - DNA, 25 bp, Artificial
  probe
  misc_feature (1)..(25): SEQ ID NO: 4876; WAN024B83; Start 891; Stop 915
gctctatgaaggaattaatatcggt

SEQ ID NO: 392920 - DNA, 25 bp, Artificial
  probe
  misc_feature (1)..(25): SEQ ID NO: 4876; WAN024B83; Start 801; Stop 825
tcctttaccctataccacttcatct

SEQ ID NO: 392921 - DNA, 25 bp, Artificial
  probe
  misc_feature (1)..(25): SEQ ID NO: 4876; WAN024B83; Start 800; Stop 824
ctcctttaccctataccacttcatc

SEQ ID NO: 392922 - DNA, 25 bp, Artificial
  probe
  misc_feature (1)..(25): SEQ ID NO: 4876; WAN024B83; Start 665; Stop 689
atgcttccttctatggagtagatgg

SEQ ID NO: 392923 - DNA, 25 bp, Artificial
  probe
  misc_feature (1)..(25): SEQ ID NO: 4876; WAN024B83; Start 934; Stop 958
attacctatatgcgtaccgattcga

SEQ ID NO: 392924 - DNA, 25 bp, Artificial
  probe
  misc_feature (1)..(25): SEQ ID NO: 4876; WAN024B83; Start 664; Stop 688
catgcttccttctatggagtagatg

SEQ ID NO: 392925 - DNA, 25 bp, Artificial
  probe
  misc_feature (1)..(25): SEQ ID NO: 4876; WAN024B83; Start 663; Stop 687
tcatgcttccttctatggagtagat

SEQ ID NO: 392926 - DNA, 25 bp, Artificial
  probe
  misc_feature (1)..(25): SEQ ID NO: 4876; WAN024B83; Start 805; Stop 829
ttaccctataccacttcatctatgc

SEQ ID NO: 392927 - DNA, 25 bp, Artificial
  probe
  misc_feature (1)..(25): SEQ ID NO: 4876; WAN024B83; Start 168; Stop 192
atccagtatgtccgtcgatattgaa

SEQ ID NO: 392928 - DNA, 25 bp, Artificial
  probe
  misc_feature (1)..(25): SEQ ID NO: 4876; WAN024B83; Start 167; Stop 191
aatccagtatgtccgtcgatattga

SEQ ID NO: 392929 - DNA, 25 bp, Artificial
  probe
  misc_feature (1)..(25): SEQ ID NO: 4876; WAN024B83; Start 662; Stop 686
ttcatgcttccttctatggagtaga

SEQ ID NO: 392930 - DNA, 25 bp, Artificial
  probe
  misc_feature (1)..(25): SEQ ID NO: 4876; WAN024B83; Start 1084; Stop 1108
attcgtccgtcaagtgtctttaata

SEQ ID NO: 392931 - DNA, 25 bp, Artificial
  probe
  misc_feature (1)..(25): SEQ ID NO: 4876; WAN024B83; Start 1083; Stop 1107
tattcgtccgtcaagtgtctttaat

SEQ ID NO: 392932 - DNA, 25 bp, Artificial
  probe
  misc_feature (1)..(25): SEQ ID NO: 4876; WAN024B83; Start 612; Stop 636
agaagaatactggacagttgatgct

SEQ ID NO: 392933 - DNA, 25 bp, Artificial
  probe
  misc_feature (1)..(25): SEQ ID NO: 4876; WAN024B83; Start 159; Stop 183
tttgaagaaatccagtatgtccgtc

SEQ ID NO: 392934 - DNA, 25 bp, Artificial
  probe
  misc_feature (1)..(25): SEQ ID NO: 4876; WAN024B83; Start 802; Stop 826
cctttaccctataccacttcatcta

SEQ ID NO: 392935 - DNA, 25 bp, Artificial
  probe
  misc_feature (1)..(25): SEQ ID NO: 4876; WAN024B83; Start 796; Stop 820
aatgctcctttaccctataccactt

SEQ ID NO: 392936 - DNA, 25 bp, Artificial
  probe
  misc_feature (1)..(25): SEQ ID NO: 4876; WAN024B83; Start 890; Stop 914
agctctatgaaggaattaatatcgg

SEQ ID NO: 392937 - DNA, 25 bp, Artificial
  probe
  misc_feature (1)..(25): SEQ ID NO: 4876; WAN024B83; Start 1082; Stop 1106
ctattcgtccgtcaagtgtctttaa

SEQ ID NO: 392938 - DNA, 25 bp, Artificial
  probe
  misc_feature (1)..(25): SEQ ID NO: 4876; WAN024B83; Start 1362; Stop 1386
caatagcaaaccagagcaacatttc

SEQ ID NO: 392939 - DNA, 25 bp, Artificial
  probe
  misc_feature (1)..(25): SEQ ID NO: 4876; WAN024B83; Start 1085; Stop 1109
ttcgtccgtcaagtgtctttaatac

SEQ ID NO: 392940 - DNA, 25 bp, Artificial
  probe
  misc_feature (1)..(25): SEQ ID NO: 4876; WAN024B83; Start 565; Stop 589
cttaaactcatcattgaccgtgaaa

SEQ ID NO: 392941 - DNA, 25 bp, Artificial
  probe
  misc_feature (1)..(25): SEQ ID NO: 4876; WAN024B83; Start 1259; Stop 1283
atggtagtcaggttaagtttgatgg

SEQ ID NO: 392942 - DNA, 25 bp, Artificial
  probe
  misc_feature (1)..(25): SEQ ID NO: 4876; WAN024B83; Start 799; Stop 823
gctcctttaccctataccacttcat

SEQ ID NO: 392943 - DNA, 25 bp, Artificial
  probe
  misc_feature (1)..(25): SEQ ID NO: 4877; WAN024G79; Start 261; Stop 285
aacttcagtagcaaccgttcttcat

SEQ ID NO: 392944 - DNA, 25 bp, Artificial
  probe
  misc_feature (1)..(25): SEQ ID NO: 4877; WAN024G79; Start 287; Stop 311
atttactatttggcgaatggaatca

SEQ ID NO: 392945 - DNA, 25 bp, Artificial
  probe
  misc_feature (1)..(25): SEQ ID NO: 4877; WAN024G79; Start 285; Stop 309
tgatttactatttggcgaatggaat

SEQ ID NO: 392946 - DNA, 25 bp, Artificial
  probe
  misc_feature (1)..(25): SEQ ID NO: 4877; WAN024G79; Start 284; Stop 308
atgatttactatttggcgaatggaa

SEQ ID NO: 392947 - DNA, 25 bp, Artificial
  probe
  misc_feature (1)..(25): SEQ ID NO: 4877; WAN024G79; Start 317; Stop 341
agaaagagatgcttaaatcaggaga

SEQ ID NO: 392948 - DNA, 25 bp, Artificial
  probe
  misc_feature (1)..(25): SEQ ID NO: 4877; WAN024G79; Start 222; Stop 246
acgagatagaagttgtgtatacgat

SEQ ID NO: 392949 - DNA, 25 bp, Artificial
  probe
  misc_feature (1)..(25): SEQ ID NO: 4877; WAN024G79; Start 316; Stop 340
gagaaagagatgcttaaatcaggag

SEQ ID NO: 392950 - DNA, 25 bp, Artificial
  probe
  misc_feature (1)..(25): SEQ ID NO: 4877; WAN024G79; Start 289; Stop 313
ttactatttggcgaatggaatcaag

SEQ ID NO: 392951 - DNA, 25 bp, Artificial
  probe
  misc_feature (1)..(25): SEQ ID NO: 4877; WAN024G79; Start 221; Stop 245
aacgagatagaagttgtgtatacga

SEQ ID NO: 392952 - DNA, 25 bp, Artificial
  probe
  misc_feature (1)..(25): SEQ ID NO: 4877; WAN024G79; Start 288; Stop 312
tttactatttggcgaatggaatcaa

SEQ ID NO: 392953 - DNA, 25 bp, Artificial
  probe
  misc_feature (1)..(25): SEQ ID NO: 4877; WAN024G79; Start 60; Stop 84
ctatctgagcacccttatccgttat

SEQ ID NO: 392954 - DNA, 25 bp, Artificial
  probe
  misc_feature (1)..(25): SEQ ID NO: 4877; WAN024G79; Start 315; Stop 339
tgagaaagagatgcttaaatcagga

SEQ ID NO: 392955 - DNA, 25 bp, Artificial
  probe
  misc_feature (1)..(25): SEQ ID NO: 4877; WAN024G79; Start 319; Stop 343
aaagagatgcttaaatcaggagaag

SEQ ID NO: 392956 - DNA, 25 bp, Artificial
  probe
  misc_feature (1)..(25): SEQ ID NO: 4877; WAN024G79; Start 318; Stop 342
gaaagagatgcttaaatcaggagaa

SEQ ID NO: 392957 - DNA, 25 bp, Artificial
  probe
  misc_feature (1)..(25): SEQ ID NO: 4877; WAN024G79; Start 290; Stop 314
tactatttggcgaatggaatcaagt

SEQ ID NO: 392958 - DNA, 25 bp, Artificial
  probe
  misc_feature (1)..(25): SEQ ID NO: 4877; WAN024G79; Start 292; Stop 316
ctatttggcgaatggaatcaagttg

SEQ ID NO: 392959 - DNA, 25 bp, Artificial
  probe
  misc_feature (1)..(25): SEQ ID NO: 4877; WAN024G79; Start 61; Stop 85
tatctgagcacccttatccgttatg

SEQ ID NO: 392960 - DNA, 25 bp, Artificial
  probe
  misc_feature (1)..(25): SEQ ID NO: 4877; WAN024G79; Start 314; Stop 338
ttgagaaagagatgcttaaatcagg

SEQ ID NO: 392961 - DNA, 25 bp, Artificial
  probe
  misc_feature (1)..(25): SEQ ID NO: 4877; WAN024G79; Start 223; Stop 247
cgagatagaagttgtgtatacgatt

SEQ ID NO: 392962 - DNA, 25 bp, Artificial
  probe
  misc_feature (1)..(25): SEQ ID NO: 4877; WAN024G79; Start 291; Stop 315
actatttggcgaatggaatcaagtt

SEQ ID NO: 392963 - DNA, 25 bp, Artificial
  probe
  misc_feature (1)..(25): SEQ ID NO: 4877; WAN024G79; Start 283; Stop 307
catgatttactatttggcgaatgga

SEQ ID NO: 392964 - DNA, 25 bp, Artificial
  probe
  misc_feature (1)..(25): SEQ ID NO: 4877; WAN024G79; Start 300; Stop 324
cgaatggaatcaagttgagaaagag

SEQ ID NO: 392965 - DNA, 25 bp, Artificial
  probe
  misc_feature (1)..(25): SEQ ID NO: 4877; WAN024G79; Start 312; Stop 336
agttgagaaagagatgcttaaatca

SEQ ID NO: 392966 - DNA, 25 bp, Artificial
  probe
  misc_feature (1)..(25): SEQ ID NO: 4877; WAN024G79; Start 306; Stop 330
gaatcaagttgagaaagagatgctt

SEQ ID NO: 392967 - DNA, 25 bp, Artificial
  probe
  misc_feature (1)..(25): SEQ ID NO: 4877; WAN024G79; Start 313; Stop 337
gttgagaaagagatgcttaaatcag

SEQ ID NO: 392968 - DNA, 25 bp, Artificial
  probe
  misc_feature (1)..(25): SEQ ID NO: 4877; WAN024G79; Start 303; Stop 327
atggaatcaagttgagaaagagatg

SEQ ID NO: 392969 - DNA, 25 bp, Artificial
  probe
  misc_feature (1)..(25): SEQ ID NO: 4877; WAN024G79; Start 305; Stop 329
ggaatcaagttgagaaagagatgct

SEQ ID NO: 392970 - DNA, 25 bp, Artificial
  probe
  misc_feature (1)..(25): SEQ ID NO: 4877; WAN024G79; Start 301; Stop 325
gaatggaatcaagttgagaaagaga

SEQ ID NO: 392971 - DNA, 25 bp, Artificial
  probe
  misc_feature (1)..(25): SEQ ID NO: 4877; WAN024G79; Start 262; Stop 286
acttcagtagcaaccgttcttcatg

SEQ ID NO: 392972 - DNA, 25 bp, Artificial
  probe
  misc_feature (1)..(25): SEQ ID NO: 4877; WAN024G79; Start 310; Stop 334
caagttgagaaagagatgcttaaat

SEQ ID NO: 392973 - DNA, 25 bp, Artificial
  probe
  misc_feature (1)..(25): SEQ ID NO: 4877; WAN024G79; Start 304; Stop 328
tggaatcaagttgagaaagagatgc

SEQ ID NO: 392974 - DNA, 25 bp, Artificial
  probe
  misc_feature (1)..(25): SEQ ID NO: 4877; WAN024G79; Start 293; Stop 317
tatttggcgaatggaatcaagttga

SEQ ID NO: 392975 - DNA, 25 bp, Artificial
  probe
  misc_feature (1)..(25): SEQ ID NO: 4877; WAN024G79; Start 309; Stop 333
tcaagttgagaaagagatgcttaaa

SEQ ID NO: 392976 - DNA, 25 bp, Artificial
  probe
  misc_feature (1)..(25): SEQ ID NO: 4878; WAN024EXP; Start 608; Stop 632
caatggtaggaggcaatgtatatca

SEQ ID NO: 392977 - DNA, 25 bp, Artificial
  probe
  misc_feature (1)..(25): SEQ ID NO: 4878; WAN024EXP; Start 609; Stop 633
aatggtaggaggcaatgtatatcat

SEQ ID NO: 392978 - DNA, 25 bp, Artificial
  probe
  misc_feature (1)..(25): SEQ ID NO: 4878; WAN024EXP; Start 611; Stop 635
tggtaggaggcaatgtatatcataa

SEQ ID NO: 392979 - DNA, 25 bp, Artificial
  probe
  misc_feature (1)..(25): SEQ ID NO: 4878; WAN024EXP; Start 684; Stop 708
atactctgatgatcgttatgctgtt

SEQ ID NO: 392980 - DNA, 25 bp, Artificial
  probe
  misc_feature (1)..(25): SEQ ID NO: 4878; WAN024EXP; Start 683; Stop 707
aatactctgatgatcgttatgctgt

SEQ ID NO: 392981 - DNA, 25 bp, Artificial
  probe
  misc_feature (1)..(25): SEQ ID NO: 4878; WAN024EXP; Start 682; Stop 706
gaatactctgatgatcgttatgctg

SEQ ID NO: 392982 - DNA, 25 bp, Artificial
  probe
  misc_feature (1)..(25): SEQ ID NO: 4878; WAN024EXP; Start 610; Stop 634
atggtaggaggcaatgtatatcata

SEQ ID NO: 392983 - DNA, 25 bp, Artificial
  probe
  misc_feature (1)..(25): SEQ ID NO: 4878; WAN024EXP; Start 202; Stop 226
cgtgaagatattgattgtgtgatcg

SEQ ID NO: 392984 - DNA, 25 bp, Artificial
  probe
  misc_feature (1)..(25): SEQ ID NO: 4878; WAN024EXP; Start 203; Stop 227
gtgaagatattgattgtgtgatcgt

SEQ ID NO: 392985 - DNA, 25 bp, Artificial
  probe
  misc_feature (1)..(25): SEQ ID NO: 4878; WAN024EXP; Start 206; Stop 230
aagatattgattgtgtgatcgtagc

SEQ ID NO: 392986 - DNA, 25 bp, Artificial
  probe
  misc_feature (1)..(25): SEQ ID NO: 4878; WAN024EXP; Start 607; Stop 631
acaatggtaggaggcaatgtatatc

SEQ ID NO: 392987 - DNA, 25 bp, Artificial
  probe
  misc_feature (1)..(25): SEQ ID NO: 4878; WAN024EXP; Start 606; Stop 630
gacaatggtaggaggcaatgtatat

SEQ ID NO: 392988 - DNA, 25 bp, Artificial
  probe
  misc_feature (1)..(25): SEQ ID NO: 4878; WAN024EXP; Start 484; Stop 508
gaagaacaacaaccaactgtatcat

SEQ ID NO: 392989 - DNA, 25 bp, Artificial
  probe
  misc_feature (1)..(25): SEQ ID NO: 4878; WAN024EXP; Start 681; Stop 705
agaatactctgatgatcgttatgct

SEQ ID NO: 392990 - DNA, 25 bp, Artificial
  probe
  misc_feature (1)..(25): SEQ ID NO: 4878; WAN024EXP; Start 483; Stop 507
ggaagaacaacaaccaactgtatca

SEQ ID NO: 392991 - DNA, 25 bp, Artificial
  probe
  misc_feature (1)..(25): SEQ ID NO: 4878; WAN024EXP; Start 204; Stop 228
tgaagatattgattgtgtgatcgta

SEQ ID NO: 392992 - DNA, 25 bp, Artificial
  probe
  misc_feature (1)..(25): SEQ ID NO: 4878; WAN024EXP; Start 207; Stop 231
agatattgattgtgtgatcgtagct

SEQ ID NO: 392993 - DNA, 25 bp, Artificial
  probe
  misc_feature (1)..(25): SEQ ID NO: 4878; WAN024EXP; Start 485; Stop 509
aagaacaacaaccaactgtatcatg

SEQ ID NO: 392994 - DNA, 25 bp, Artificial
  probe
  misc_feature (1)..(25): SEQ ID NO: 4878; WAN024EXP; Start 209; Stop 233
atattgattgtgtgatcgtagcttc

SEQ ID NO: 392995 - DNA, 25 bp, Artificial
  probe
  misc_feature (1)..(25): SEQ ID NO: 4878; WAN024EXP; Start 208; Stop 232
gatattgattgtgtgatcgtagctt

SEQ ID NO: 392996 - DNA, 25 bp, Artificial
  probe
  misc_feature (1)..(25): SEQ ID NO: 4878; WAN024EXP; Start 680; Stop 704
tagaatactctgatgatcgttatgc

SEQ ID NO: 392997 - DNA, 25 bp, Artificial
  probe
  misc_feature (1)..(25): SEQ ID NO: 4878; WAN024EXP; Start 137; Stop 161
atggagaagaagttgctcaagagtt

SEQ ID NO: 392998 - DNA, 25 bp, Artificial
  probe
  misc_feature (1)..(25): SEQ ID NO: 4878; WAN024EXP; Start 133; Stop 157
aatcatggagaagaagttgctcaag

SEQ ID NO: 392999 - DNA, 25 bp, Artificial
  probe
  misc_feature (1)..(25): SEQ ID NO: 4878; WAN024EXP; Start 210; Stop 234
tattgattgtgtgatcgtagcttca

SEQ ID NO: 393000 - DNA, 25 bp, Artificial
  probe
  misc_feature (1)..(25): SEQ ID NO: 4878; WAN024EXP; Start 205; Stop 229
gaagatattgattgtgtgatcgtag

SEQ ID NO: 393001 - DNA, 25 bp, Artificial
  probe
  misc_feature (1)..(25): SEQ ID NO: 4878; WAN024EXP; Start 201; Stop 225
acgtgaagatattgattgtgtgatc

SEQ ID NO: 393002 - DNA, 25 bp, Artificial
  probe
  misc_feature (1)..(25): SEQ ID NO: 4878; WAN024EXP; Start 605; Stop 629
cgacaatggtaggaggcaatgtata

SEQ ID NO: 393003 - DNA, 25 bp, Artificial
  probe
  misc_feature (1)..(25): SEQ ID NO: 4878; WAN024EXP; Start 40; Stop 64
tacggtattgttggagctggatatt

SEQ ID NO: 393004 - DNA, 25 bp, Artificial
  probe
  misc_feature (1)..(25): SEQ ID NO: 4878; WAN024EXP; Start 39; Stop 63
ttacggtattgttggagctggatat

SEQ ID NO: 393005 - DNA, 25 bp, Artificial
  probe
  misc_feature (1)..(25): SEQ ID NO: 4878; WAN024EXP; Start 38; Stop 62
attacggtattgttggagctggata

SEQ ID NO: 393006 - DNA, 25 bp, Artificial
  probe
  misc_feature (1)..(25): SEQ ID NO: 4878; WAN024EXP; Start 645; Stop 669
ctttggtgatgaagatgatatgctc

SEQ ID NO: 393007 - DNA, 25 bp, Artificial
  probe
  misc_feature (1)..(25): SEQ ID NO: 4878; WAN024EXP; Start 644; Stop 668
actttggtgatgaagatgatatgct

SEQ ID NO: 393008 - DNA, 25 bp, Artificial
  probe
  misc_feature (1)..(25): SEQ ID NO: 4878; WAN024EXP; Start 643; Stop 667
aactttggtgatgaagatgatatgc

SEQ ID NO: 393009 - DNA, 25 bp, Artificial
  probe
  misc_feature (1)..(25): SEQ ID NO: 4879; WAN024F7E; Start 9; Stop 33
cattcaacaacagagtgctacaatt

SEQ ID NO: 393010 - DNA, 25 bp, Artificial
  probe
  misc_feature (1)..(25): SEQ ID NO: 4879; WAN024F7E; Start 8; Stop 32
tcattcaacaacagagtgctacaat

SEQ ID NO: 393011 - DNA, 25 bp, Artificial
  probe
  misc_feature (1)..(25): SEQ ID NO: 4879; WAN024F7E; Start 7; Stop 31
atcattcaacaacagagtgctacaa

SEQ ID NO: 393012 - DNA, 25 bp, Artificial
  probe
  misc_feature (1)..(25): SEQ ID NO: 4879; WAN024F7E; Start 6; Stop 30
aatcattcaacaacagagtgctaca

SEQ ID NO: 393013 - DNA, 25 bp, Artificial
  probe
  misc_feature (1)..(25): SEQ ID NO: 4879; WAN024F7E; Start 164; Stop 188
atatggaagaagactctgacttacc

SEQ ID NO: 393014 - DNA, 25 bp, Artificial
  probe
  misc_feature (1)..(25): SEQ ID NO: 4879; WAN024F7E; Start 61; Stop 85
cttcgtgaacaagtggcttatctaa

SEQ ID NO: 393015 - DNA, 25 bp, Artificial
  probe
  misc_feature (1)..(25): SEQ ID NO: 4879; WAN024F7E; Start 62; Stop 86
ttcgtgaacaagtggcttatctaac

SEQ ID NO: 393016 - DNA, 25 bp, Artificial
  probe
  misc_feature (1)..(25): SEQ ID NO: 4879; WAN024F7E; Start 60; Stop 84
tcttcgtgaacaagtggcttatcta

SEQ ID NO: 393017 - DNA, 25 bp, Artificial
  probe
  misc_feature (1)..(25): SEQ ID NO: 4879; WAN024F7E; Start 32; Stop 56
ttgatagtctcaccaatgaacttgc

SEQ ID NO: 393018 - DNA, 25 bp, Artificial
  probe
  misc_feature (1)..(25): SEQ ID NO: 4879; WAN024F7E; Start 58; Stop 82
cttcttcgtgaacaagtggcttatc

SEQ ID NO: 393019 - DNA, 25 bp, Artificial
  probe
  misc_feature (1)..(25): SEQ ID NO: 4879; WAN024F7E; Start 163; Stop 187
aatatggaagaagactctgacttac

SEQ ID NO: 393020 - DNA, 25 bp, Artificial
  probe
  misc_feature (1)..(25): SEQ ID NO: 4879; WAN024F7E; Start 59; Stop 83
ttcttcgtgaacaagtggcttatct

SEQ ID NO: 393021 - DNA, 25 bp, Artificial
  probe
  misc_feature (1)..(25): SEQ ID NO: 4879; WAN024F7E; Start 5; Stop 29
aaatcattcaacaacagagtgctac

SEQ ID NO: 393022 - DNA, 25 bp, Artificial
  probe
  misc_feature (1)..(25): SEQ ID NO: 4879; WAN024F7E; Start 66; Stop 90
tgaacaagtggcttatctaacgcaa

SEQ ID NO: 393023 - DNA, 25 bp, Artificial
  probe
  misc_feature (1)..(25): SEQ ID NO: 4879; WAN024F7E; Start 31; Stop 55
attgatagtctcaccaatgaacttg

SEQ ID NO: 393024 - DNA, 25 bp, Artificial
  probe
  misc_feature (1)..(25): SEQ ID NO: 4879; WAN024F7E; Start 165; Stop 189
tatggaagaagactctgacttaccc

SEQ ID NO: 393025 - DNA, 25 bp, Artificial
  probe
  misc_feature (1)..(25): SEQ ID NO: 4879; WAN024F7E; Start 33; Stop 57
tgatagtctcaccaatgaacttgcc

SEQ ID NO: 393026 - DNA, 25 bp, Artificial
  probe
  misc_feature (1)..(25): SEQ ID NO: 4879; WAN024F7E; Start 57; Stop 81
ccttcttcgtgaacaagtggcttat

SEQ ID NO: 393027 - DNA, 25 bp, Artificial
  probe
  misc_feature (1)..(25): SEQ ID NO: 4879; WAN024F7E; Start 30; Stop 54
aattgatagtctcaccaatgaactt

SEQ ID NO: 393028 - DNA, 25 bp, Artificial
  probe
  misc_feature (1)..(25): SEQ ID NO: 4879; WAN024F7E; Start 67; Stop 91
gaacaagtggcttatctaacgcaaa

SEQ ID NO: 393029 - DNA, 25 bp, Artificial
  probe
  misc_feature (1)..(25): SEQ ID NO: 4879; WAN024F7E; Start 65; Stop 89
gtgaacaagtggcttatctaacgca

SEQ ID NO: 393030 - DNA, 25 bp, Artificial
  probe
  misc_feature (1)..(25): SEQ ID NO: 4879; WAN024F7E; Start 17; Stop 41
aacagagtgctacaattgatagtct

SEQ ID NO: 393031 - DNA, 25 bp, Artificial
  probe
  misc_feature (1)..(25): SEQ ID NO: 4879; WAN024F7E; Start 16; Stop 40
caacagagtgctacaattgatagtc

SEQ ID NO: 393032 - DNA, 25 bp, Artificial
  probe
  misc_feature (1)..(25): SEQ ID NO: 4879; WAN024F7E; Start 15; Stop 39
acaacagagtgctacaattgatagt

SEQ ID NO: 393033 - DNA, 25 bp, Artificial
  probe
  misc_feature (1)..(25): SEQ ID NO: 4879; WAN024F7E; Start 10; Stop 34
attcaacaacagagtgctacaattg

SEQ ID NO: 393034 - DNA, 25 bp, Artificial
  probe
  misc_feature (1)..(25): SEQ ID NO: 4879; WAN024F7E; Start 13; Stop 37
caacaacagagtgctacaattgata

SEQ ID NO: 393035 - DNA, 25 bp, Artificial
  probe
  misc_feature (1)..(25): SEQ ID NO: 4879; WAN024F7E; Start 14; Stop 38
aacaacagagtgctacaattgatag

SEQ ID NO: 393036 - DNA, 25 bp, Artificial
  probe
  misc_feature (1)..(25): SEQ ID NO: 4879; WAN024F7E; Start 19; Stop 43
cagagtgctacaattgatagtctca

SEQ ID NO: 393037 - DNA, 25 bp, Artificial
  probe
  misc_feature (1)..(25): SEQ ID NO: 4879; WAN024F7E; Start 18; Stop 42
acagagtgctacaattgatagtctc

SEQ ID NO: 393038 - DNA, 25 bp, Artificial
  probe
  misc_feature (1)..(25): SEQ ID NO: 4879; WAN024F7E; Start 162; Stop 186
aaatatggaagaagactctgactta

SEQ ID NO: 393039 - DNA, 25 bp, Artificial
  probe
  misc_feature (1)..(25): SEQ ID NO: 4879; WAN024F7E; Start 20; Stop 44
agagtgctacaattgatagtctcac

SEQ ID NO: 393040 - DNA, 25 bp, Artificial
  probe
  misc_feature (1)..(25): SEQ ID NO: 4879; WAN024F7E; Start 23; Stop 47
gtgctacaattgatagtctcaccaa

SEQ ID NO: 393041 - DNA, 25 bp, Artificial
  probe
  misc_feature (1)..(25): SEQ ID NO: 4879; WAN024F7E; Start 21; Stop 45
gagtgctacaattgatagtctcacc

SEQ ID NO: 393042 - DNA, 25 bp, Artificial
  probe
  misc_feature (1)..(25): SEQ ID NO: 4880; WAN024F7Z; Start 422; Stop 446
acatgcagtaagaataatccaagtg

SEQ ID NO: 393043 - DNA, 25 bp, Artificial
  probe
  misc_feature (1)..(25): SEQ ID NO: 4880; WAN024F7Z; Start 423; Stop 447
catgcagtaagaataatccaagtga

SEQ ID NO: 393044 - DNA, 25 bp, Artificial
  probe
  misc_feature (1)..(25): SEQ ID NO: 4880; WAN024F7Z; Start 393; Stop 417
atcatatccaacacgcttacaaatg

SEQ ID NO: 393045 - DNA, 25 bp, Artificial
  probe
  misc_feature (1)..(25): SEQ ID NO: 4880; WAN024F7Z; Start 421; Stop 445
aacatgcagtaagaataatccaagt

SEQ ID NO: 393046 - DNA, 25 bp, Artificial
  probe
  misc_feature (1)..(25): SEQ ID NO: 4880; WAN024F7Z; Start 245; Stop 269
gctattcttgcccaatttgattcag

SEQ ID NO: 393047 - DNA, 25 bp, Artificial
  probe
  misc_feature (1)..(25): SEQ ID NO: 4880; WAN024F7Z; Start 246; Stop 270
ctattcttgcccaatttgattcaga

SEQ ID NO: 393048 - DNA, 25 bp, Artificial
  probe
  misc_feature (1)..(25): SEQ ID NO: 4880; WAN024F7Z; Start 426; Stop 450
gcagtaagaataatccaagtgataa

SEQ ID NO: 393049 - DNA, 25 bp, Artificial
  probe
  misc_feature (1)..(25): SEQ ID NO: 4880; WAN024F7Z; Start 392; Stop 416
gatcatatccaacacgcttacaaat

SEQ ID NO: 393050 - DNA, 25 bp, Artificial
  probe
  misc_feature (1)..(25): SEQ ID NO: 4880; WAN024F7Z; Start 424; Stop 448
atgcagtaagaataatccaagtgat

SEQ ID NO: 393051 - DNA, 25 bp, Artificial
  probe
  misc_feature (1)..(25): SEQ ID NO: 4880; WAN024F7Z; Start 425; Stop 449
tgcagtaagaataatccaagtgata

SEQ ID NO: 393052 - DNA, 25 bp, Artificial
  probe
  misc_feature (1)..(25): SEQ ID NO: 4880; WAN024F7Z; Start 195; Stop 219
aaacagaggaaattacctacaaacg

SEQ ID NO: 393053 - DNA, 25 bp, Artificial
  probe
  misc_feature (1)..(25): SEQ ID NO: 4880; WAN024F7Z; Start 394; Stop 418
tcatatccaacacgcttacaaatgc

SEQ ID NO: 393054 - DNA, 25 bp, Artificial
  probe
  misc_feature (1)..(25): SEQ ID NO: 4880; WAN024F7Z; Start 188; Stop 212
ccagttgaaacagaggaaattacct

SEQ ID NO: 393055 - DNA, 25 bp, Artificial
  probe
  misc_feature (1)..(25): SEQ ID NO: 4880; WAN024F7Z; Start 191; Stop 215
gttgaaacagaggaaattacctaca

SEQ ID NO: 393056 - DNA, 25 bp, Artificial
  probe
  misc_feature (1)..(25): SEQ ID NO: 4880; WAN024F7Z; Start 243; Stop 267
aagctattcttgcccaatttgattc

SEQ ID NO: 393057 - DNA, 25 bp, Artificial
  probe
  misc_feature (1)..(25): SEQ ID NO: 4880; WAN024F7Z; Start 190; Stop 214
agttgaaacagaggaaattacctac

SEQ ID NO: 393058 - DNA, 25 bp, Artificial
  probe
  misc_feature (1)..(25): SEQ ID NO: 4880; WAN024F7Z; Start 189; Stop 213
cagttgaaacagaggaaattaccta

SEQ ID NO: 393059 - DNA, 25 bp, Artificial
  probe
  misc_feature (1)..(25): SEQ ID NO: 4880; WAN024F7Z; Start 244; Stop 268
agctattcttgcccaatttgattca

SEQ ID NO: 393060 - DNA, 25 bp, Artificial
  probe
  misc_feature (1)..(25): SEQ ID NO: 4880; WAN024F7Z; Start 226; Stop 250
atctaaagggaaacgtcaagctatt

SEQ ID NO: 393061 - DNA, 25 bp, Artificial
  probe
  misc_feature (1)..(25): SEQ ID NO: 4880; WAN024F7Z; Start 225; Stop 249
aatctaaagggaaacgtcaagctat

SEQ ID NO: 393062 - DNA, 25 bp, Artificial
  probe
  misc_feature (1)..(25): SEQ ID NO: 4880; WAN024F7Z; Start 418; Stop 442
ccaaacatgcagtaagaataatcca

SEQ ID NO: 393063 - DNA, 25 bp, Artificial
  probe
  misc_feature (1)..(25): SEQ ID NO: 4880; WAN024F7Z; Start 224; Stop 248
aaatctaaagggaaacgtcaagcta

SEQ ID NO: 393064 - DNA, 25 bp, Artificial
  probe
  misc_feature (1)..(25): SEQ ID NO: 4880; WAN024F7Z; Start 221; Stop 245
aagaaatctaaagggaaacgtcaag

SEQ ID NO: 393065 - DNA, 25 bp, Artificial
  probe
  misc_feature (1)..(25): SEQ ID NO: 4880; WAN024F7Z; Start 193; Stop 217
tgaaacagaggaaattacctacaaa

SEQ ID NO: 393066 - DNA, 25 bp, Artificial
  probe
  misc_feature (1)..(25): SEQ ID NO: 4880; WAN024F7Z; Start 192; Stop 216
ttgaaacagaggaaattacctacaa

SEQ ID NO: 393067 - DNA, 25 bp, Artificial
  probe
  misc_feature (1)..(25): SEQ ID NO: 4880; WAN024F7Z; Start 417; Stop 441
gccaaacatgcagtaagaataatcc

SEQ ID NO: 393068 - DNA, 25 bp, Artificial
  probe
  misc_feature (1)..(25): SEQ ID NO: 4880; WAN024F7Z; Start 219; Stop 243
gtaagaaatctaaagggaaacgtca

SEQ ID NO: 393069 - DNA, 25 bp, Artificial
  probe
  misc_feature (1)..(25): SEQ ID NO: 4880; WAN024F7Z; Start 229; Stop 253
taaagggaaacgtcaagctattctt

SEQ ID NO: 393070 - DNA, 25 bp, Artificial
  probe
  misc_feature (1)..(25): SEQ ID NO: 4880; WAN024F7Z; Start 194; Stop 218
gaaacagaggaaattacctacaaac

SEQ ID NO: 393071 - DNA, 25 bp, Artificial
  probe
  misc_feature (1)..(25): SEQ ID NO: 4880; WAN024F7Z; Start 228; Stop 252
ctaaagggaaacgtcaagctattct

SEQ ID NO: 393072 - DNA, 25 bp, Artificial
  probe
  misc_feature (1)..(25): SEQ ID NO: 4880; WAN024F7Z; Start 227; Stop 251
tctaaagggaaacgtcaagctattc

SEQ ID NO: 393073 - DNA, 25 bp, Artificial
  probe
  misc_feature (1)..(25): SEQ ID NO: 4880; WAN024F7Z; Start 223; Stop 247
gaaatctaaagggaaacgtcaagct

SEQ ID NO: 393074 - DNA, 25 bp, Artificial
  probe
  misc_feature (1)..(25): SEQ ID NO: 4880; WAN024F7Z; Start 222; Stop 246
agaaatctaaagggaaacgtcaagc

SEQ ID NO: 393075 - DNA, 25 bp, Artificial
  probe
  misc_feature (1)..(25): SEQ ID NO: 4881; WAN024BEV; Start 22; Stop 46
agtcgcttcaccttggattatatag

SEQ ID NO: 393076 - DNA, 25 bp, Artificial
  probe
  misc_feature (1)..(25): SEQ ID NO: 4881; WAN024BEV; Start 21; Stop 45
cagtcgcttcaccttggattatata

SEQ ID NO: 393077 - DNA, 25 bp, Artificial
  probe
  misc_feature (1)..(25): SEQ ID NO: 4881; WAN024BEV; Start 20; Stop 44
acagtcgcttcaccttggattatat

SEQ ID NO: 393078 - DNA, 25 bp, Artificial
  probe
  misc_feature (1)..(25): SEQ ID NO: 4881; WAN024BEV; Start 19; Stop 43
cacagtcgcttcaccttggattata

SEQ ID NO: 393079 - DNA, 25 bp, Artificial
  probe
  misc_feature (1)..(25): SEQ ID NO: 4881; WAN024BEV; Start 23; Stop 47
gtcgcttcaccttggattatatagg

SEQ ID NO: 393080 - DNA, 25 bp, Artificial
  probe
  misc_feature (1)..(25): SEQ ID NO: 4881; WAN024BEV; Start 49; Stop 73
cagtcttatctacaacctcaaagcg

SEQ ID NO: 393081 - DNA, 25 bp, Artificial
  probe
  misc_feature (1)..(25): SEQ ID NO: 4881; WAN024BEV; Start 50; Stop 74
agtcttatctacaacctcaaagcgg

SEQ ID NO: 393082 - DNA, 25 bp, Artificial
  probe
  misc_feature (1)..(25): SEQ ID NO: 4881; WAN024BEV; Start 46; Stop 70
ggtcagtcttatctacaacctcaaa

SEQ ID NO: 393083 - DNA, 25 bp, Artificial
  probe
  misc_feature (1)..(25): SEQ ID NO: 4881; WAN024BEV; Start 87; Stop 111
tctgctactagcttgcctaactaat

SEQ ID NO: 393084 - DNA, 25 bp, Artificial
  probe
  misc_feature (1)..(25): SEQ ID NO: 4881; WAN024BEV; Start 86; Stop 110
atctgctactagcttgcctaactaa

SEQ ID NO: 393085 - DNA, 25 bp, Artificial
  probe
  misc_feature (1)..(25): SEQ ID NO: 4881; WAN024BEV; Start 85; Stop 109
aatctgctactagcttgcctaacta

SEQ ID NO: 393086 - DNA, 25 bp, Artificial
  probe
  misc_feature (1)..(25): SEQ ID NO: 4881; WAN024BEV; Start 32; Stop 56
ccttggattatataggtcagtctta

SEQ ID NO: 393087 - DNA, 25 bp, Artificial
  probe
  misc_feature (1)..(25): SEQ ID NO: 4881; WAN024BEV; Start 41; Stop 65
atataggtcagtcttatctacaacc

SEQ ID NO: 393088 - DNA, 25 bp, Artificial
  probe
  misc_feature (1)..(25): SEQ ID NO: 4881; WAN024BEV; Start 5; Stop 29
aaatctcttcaaaccacagtcgctt

SEQ ID NO: 393089 - DNA, 25 bp, Artificial
  probe
  misc_feature (1)..(25): SEQ ID NO: 4881; WAN024BEV; Start 84; Stop 108
caatctgctactagcttgcctaact

SEQ ID NO: 393090 - DNA, 25 bp, Artificial
  probe
  misc_feature (1)..(25): SEQ ID NO: 4881; WAN024BEV; Start 6; Stop 30
aatctcttcaaaccacagtcgcttc

SEQ ID NO: 393091 - DNA, 25 bp, Artificial
  probe
  misc_feature (1)..(25): SEQ ID NO: 4881; WAN024BEV; Start 35; Stop 59
tggattatataggtcagtcttatct

SEQ ID NO: 393092 - DNA, 25 bp, Artificial
  probe
  misc_feature (1)..(25): SEQ ID NO: 4881; WAN024BEV; Start 55; Stop 79
tatctacaacctcaaagcggtgttt

SEQ ID NO: 393093 - DNA, 25 bp, Artificial
  probe
  misc_feature (1)..(25): SEQ ID NO: 4881; WAN024BEV; Start 54; Stop 78
ttatctacaacctcaaagcggtgtt

SEQ ID NO: 393094 - DNA, 25 bp, Artificial
  probe
  misc_feature (1)..(25): SEQ ID NO: 4881; WAN024BEV; Start 52; Stop 76
tcttatctacaacctcaaagcggtg

SEQ ID NO: 393095 - DNA, 25 bp, Artificial
  probe
  misc_feature (1)..(25): SEQ ID NO: 4881; WAN024BEV; Start 51; Stop 75
gtcttatctacaacctcaaagcggt

SEQ ID NO: 393096 - DNA, 25 bp, Artificial
  probe
  misc_feature (1)..(25): SEQ ID NO: 4881; WAN024BEV; Start 53; Stop 77
cttatctacaacctcaaagcggtgt

SEQ ID NO: 393097 - DNA, 25 bp, Artificial
  probe
  misc_feature (1)..(25): SEQ ID NO: 4881; WAN024BEV; Start 44; Stop 68
taggtcagtcttatctacaacctca

SEQ ID NO: 393098 - DNA, 25 bp, Artificial
  probe
  misc_feature (1)..(25): SEQ ID NO: 4881; WAN024BEV; Start 33; Stop 57
cttggattatataggtcagtcttat

SEQ ID NO: 393099 - DNA, 25 bp, Artificial
  probe
  misc_feature (1)..(25): SEQ ID NO: 4881; WAN024BEV; Start 26; Stop 50
gcttcaccttggattatataggtca

SEQ ID NO: 393100 - DNA, 25 bp, Artificial
  probe
  misc_feature (1)..(25): SEQ ID NO: 4881; WAN024BEV; Start 34; Stop 58
ttggattatataggtcagtcttatc

SEQ ID NO: 393101 - DNA, 25 bp, Artificial
  probe
  misc_feature (1)..(25): SEQ ID NO: 4881; WAN024BEV; Start 45; Stop 69
aggtcagtcttatctacaacctcaa

SEQ ID NO: 393102 - DNA, 25 bp, Artificial
  probe
  misc_feature (1)..(25): SEQ ID NO: 4881; WAN024BEV; Start 25; Stop 49
cgcttcaccttggattatataggtc

SEQ ID NO: 393103 - DNA, 25 bp, Artificial
  probe
  misc_feature (1)..(25): SEQ ID NO: 4881; WAN024BEV; Start 30; Stop 54
caccttggattatataggtcagtct

SEQ ID NO: 393104 - DNA, 25 bp, Artificial
  probe
  misc_feature (1)..(25): SEQ ID NO: 4881; WAN024BEV; Start 29; Stop 53
tcaccttggattatataggtcagtc

SEQ ID NO: 393105 - DNA, 25 bp, Artificial
  probe
  misc_feature (1)..(25): SEQ ID NO: 4881; WAN024BEV; Start 24; Stop 48
tcgcttcaccttggattatataggt

SEQ ID NO: 393106 - DNA, 25 bp, Artificial
  probe
  misc_feature (1)..(25): SEQ ID NO: 4881; WAN024BEV; Start 43; Stop 67
ataggtcagtcttatctacaacctc

SEQ ID NO: 393107 - DNA, 25 bp, Artificial
  probe
  misc_feature (1)..(25): SEQ ID NO: 4881; WAN024BEV; Start 28; Stop 52
ttcaccttggattatataggtcagt

SEQ ID NO: 393108 - DNA, 25 bp, Artificial
  probe
  misc_feature (1)..(25): SEQ ID NO: 4882; WAN024D8E; Start 129; Stop 153
cctaacagcatctatggtcaacaat

SEQ ID NO: 393109 - DNA, 25 bp, Artificial
  probe
  misc_feature (1)..(25): SEQ ID NO: 4882; WAN024D8E; Start 130; Stop 154
ctaacagcatctatggtcaacaatt

SEQ ID NO: 393110 - DNA, 25 bp, Artificial
  probe
  misc_feature (1)..(25): SEQ ID NO: 4882; WAN024D8E; Start 133; Stop 157
acagcatctatggtcaacaattatg

SEQ ID NO: 393111 - DNA, 25 bp, Artificial
  probe
  misc_feature (1)..(25): SEQ ID NO: 4882; WAN024D8E; Start 132; Stop 156
aacagcatctatggtcaacaattat

SEQ ID NO: 393112 - DNA, 25 bp, Artificial
  probe
  misc_feature (1)..(25): SEQ ID NO: 4882; WAN024D8E; Start 131; Stop 155
taacagcatctatggtcaacaatta

SEQ ID NO: 393113 - DNA, 25 bp, Artificial
  probe
  misc_feature (1)..(25): SEQ ID NO: 4882; WAN024D8E; Start 136; Stop 160
gcatctatggtcaacaattatgtga

SEQ ID NO: 393114 - DNA, 25 bp, Artificial
  probe
  misc_feature (1)..(25): SEQ ID NO: 4882; WAN024D8E; Start 135; Stop 159
agcatctatggtcaacaattatgtg

SEQ ID NO: 393115 - DNA, 25 bp, Artificial
  probe
  misc_feature (1)..(25): SEQ ID NO: 4882; WAN024D8E; Start 134; Stop 158
cagcatctatggtcaacaattatgt

SEQ ID NO: 393116 - DNA, 25 bp, Artificial
  probe
  misc_feature (1)..(25): SEQ ID NO: 4882; WAN024D8E; Start 423; Stop 447
cgatcatactcaagaggaggtaatc

SEQ ID NO: 393117 - DNA, 25 bp, Artificial
  probe
  misc_feature (1)..(25): SEQ ID NO: 4882; WAN024D8E; Start 425; Stop 449
atcatactcaagaggaggtaatcca

SEQ ID NO: 393118 - DNA, 25 bp, Artificial
  probe
  misc_feature (1)..(25): SEQ ID NO: 4882; WAN024D8E; Start 426; Stop 450
tcatactcaagaggaggtaatccaa

SEQ ID NO: 393119 - DNA, 25 bp, Artificial
  probe
  misc_feature (1)..(25): SEQ ID NO: 4882; WAN024D8E; Start 424; Stop 448
gatcatactcaagaggaggtaatcc

SEQ ID NO: 393120 - DNA, 25 bp, Artificial
  probe
  misc_feature (1)..(25): SEQ ID NO: 4882; WAN024D8E; Start 331; Stop 355
gactacatgaaccaaggaattgacc

SEQ ID NO: 393121 - DNA, 25 bp, Artificial
  probe
  misc_feature (1)..(25): SEQ ID NO: 4882; WAN024D8E; Start 330; Stop 354
ggactacatgaaccaaggaattgac

SEQ ID NO: 393122 - DNA, 25 bp, Artificial
  probe
  misc_feature (1)..(25): SEQ ID NO: 4882; WAN024D8E; Start 422; Stop 446
tcgatcatactcaagaggaggtaat

SEQ ID NO: 393123 - DNA, 25 bp, Artificial
  probe
  misc_feature (1)..(25): SEQ ID NO: 4882; WAN024D8E; Start 256; Stop 280
attcaagaaatagcccagacactta

SEQ ID NO: 393124 - DNA, 25 bp, Artificial
  probe
  misc_feature (1)..(25): SEQ ID NO: 4882; WAN024D8E; Start 261; Stop 285
agaaatagcccagacacttaatact

SEQ ID NO: 393125 - DNA, 25 bp, Artificial
  probe
  misc_feature (1)..(25): SEQ ID NO: 4882; WAN024D8E; Start 258; Stop 282
tcaagaaatagcccagacacttaat

SEQ ID NO: 393126 - DNA, 25 bp, Artificial
  probe
  misc_feature (1)..(25): SEQ ID NO: 4882; WAN024D8E; Start 257; Stop 281
ttcaagaaatagcccagacacttaa

SEQ ID NO: 393127 - DNA, 25 bp, Artificial
  probe
  misc_feature (1)..(25): SEQ ID NO: 4882; WAN024D8E; Start 255; Stop 279
tattcaagaaatagcccagacactt

SEQ ID NO: 393128 - DNA, 25 bp, Artificial
  probe
  misc_feature (1)..(25): SEQ ID NO: 4882; WAN024D8E; Start 262; Stop 286
gaaatagcccagacacttaatactc

SEQ ID NO: 393129 - DNA, 25 bp, Artificial
  probe
  misc_feature (1)..(25): SEQ ID NO: 4882; WAN024D8E; Start 268; Stop 292
gcccagacacttaatactctacaaa

SEQ ID NO: 393130 - DNA, 25 bp, Artificial
  probe
  misc_feature (1)..(25): SEQ ID NO: 4882; WAN024D8E; Start 266; Stop 290
tagcccagacacttaatactctaca

SEQ ID NO: 393131 - DNA, 25 bp, Artificial
  probe
  misc_feature (1)..(25): SEQ ID NO: 4882; WAN024D8E; Start 263; Stop 287
aaatagcccagacacttaatactct

SEQ ID NO: 393132 - DNA, 25 bp, Artificial
  probe
  misc_feature (1)..(25): SEQ ID NO: 4882; WAN024D8E; Start 128; Stop 152
gcctaacagcatctatggtcaacaa

SEQ ID NO: 393133 - DNA, 25 bp, Artificial
  probe
  misc_feature (1)..(25): SEQ ID NO: 4882; WAN024D8E; Start 267; Stop 291
agcccagacacttaatactctacaa

SEQ ID NO: 393134 - DNA, 25 bp, Artificial
  probe
  misc_feature (1)..(25): SEQ ID NO: 4882; WAN024D8E; Start 265; Stop 289
atagcccagacacttaatactctac

SEQ ID NO: 393135 - DNA, 25 bp, Artificial
  probe
  misc_feature (1)..(25): SEQ ID NO: 4882; WAN024D8E; Start 137; Stop 161
catctatggtcaacaattatgtgaa

SEQ ID NO: 393136 - DNA, 25 bp, Artificial
  probe
  misc_feature (1)..(25): SEQ ID NO: 4882; WAN024D8E; Start 269; Stop 293
cccagacacttaatactctacaaac

SEQ ID NO: 393137 - DNA, 25 bp, Artificial
  probe
  misc_feature (1)..(25): SEQ ID NO: 4882; WAN024D8E; Start 260; Stop 284
aagaaatagcccagacacttaatac

SEQ ID NO: 393138 - DNA, 25 bp, Artificial
  probe
  misc_feature (1)..(25): SEQ ID NO: 4882; WAN024D8E; Start 259; Stop 283
caagaaatagcccagacacttaata

SEQ ID NO: 393139 - DNA, 25 bp, Artificial
  probe
  misc_feature (1)..(25): SEQ ID NO: 4882; WAN024D8E; Start 227; Stop 251
ctatcacaaccctcaagtctgtatt

SEQ ID NO: 393140 - DNA, 25 bp, Artificial
  probe
  misc_feature (1)..(25): SEQ ID NO: 4882; WAN024D8E; Start 264; Stop 288
aatagcccagacacttaatactcta

SEQ ID NO: 393141 - DNA, 25 bp, Artificial
  probe
  misc_feature (1)..(25): SEQ ID NO: 4883; WAN024DGO; Start 543; Stop 567
agagagatacagacatggataacta

SEQ ID NO: 393142 - DNA, 25 bp, Artificial
  probe
  misc_feature (1)..(25): SEQ ID NO: 4883; WAN024DGO; Start 542; Stop 566
tagagagatacagacatggataact

SEQ ID NO: 393143 - DNA, 25 bp, Artificial
  probe
  misc_feature (1)..(25): SEQ ID NO: 4883; WAN024DGO; Start 373; Stop 397
ggtggacgaattgctattatgattt

SEQ ID NO: 393144 - DNA, 25 bp, Artificial
  probe
  misc_feature (1)..(25): SEQ ID NO: 4883; WAN024DGO; Start 133; Stop 157
gtctatgcctttgatattcagaagc

SEQ ID NO: 393145 - DNA, 25 bp, Artificial
  probe
  misc_feature (1)..(25): SEQ ID NO: 4883; WAN024DGO; Start 198; Stop 222
cttgacaaatgcccagttaatcttg

SEQ ID NO: 393146 - DNA, 25 bp, Artificial
  probe
  misc_feature (1)..(25): SEQ ID NO: 4883; WAN024DGO; Start 544; Stop 568
gagagatacagacatggataactaa

SEQ ID NO: 393147 - DNA, 25 bp, Artificial
  probe
  misc_feature (1)..(25): SEQ ID NO: 4883; WAN024DGO; Start 541; Stop 565
ttagagagatacagacatggataac

SEQ ID NO: 393148 - DNA, 25 bp, Artificial
  probe
  misc_feature (1)..(25): SEQ ID NO: 4883; WAN024DGO; Start 130; Stop 154
caagtctatgcctttgatattcaga

SEQ ID NO: 393149 - DNA, 25 bp, Artificial
  probe
  misc_feature (1)..(25): SEQ ID NO: 4883; WAN024DGO; Start 140; Stop 164
cctttgatattcagaagcaagcctt

SEQ ID NO: 393150 - DNA, 25 bp, Artificial
  probe
  misc_feature (1)..(25): SEQ ID NO: 4883; WAN024DGO; Start 132; Stop 156
agtctatgcctttgatattcagaag

SEQ ID NO: 393151 - DNA, 25 bp, Artificial
  probe
  misc_feature (1)..(25): SEQ ID NO: 4883; WAN024DGO; Start 141; Stop 165
ctttgatattcagaagcaagccttg

SEQ ID NO: 393152 - DNA, 25 bp, Artificial
  probe
  misc_feature (1)..(25): SEQ ID NO: 4883; WAN024DGO; Start 131; Stop 155
aagtctatgcctttgatattcagaa

SEQ ID NO: 393153 - DNA, 25 bp, Artificial
  probe
  misc_feature (1)..(25): SEQ ID NO: 4883; WAN024DGO; Start 375; Stop 399
tggacgaattgctattatgatttac

SEQ ID NO: 393154 - DNA, 25 bp, Artificial
  probe
  misc_feature (1)..(25): SEQ ID NO: 4883; WAN024DGO; Start 374; Stop 398
gtggacgaattgctattatgattta

SEQ ID NO: 393155 - DNA, 25 bp, Artificial
  probe
  misc_feature (1)..(25): SEQ ID NO: 4883; WAN024DGO; Start 545; Stop 569
agagatacagacatggataactaat

SEQ ID NO: 393156 - DNA, 25 bp, Artificial
  probe
  misc_feature (1)..(25): SEQ ID NO: 4883; WAN024DGO; Start 376; Stop 400
ggacgaattgctattatgatttact

SEQ ID NO: 393157 - DNA, 25 bp, Artificial
  probe
  misc_feature (1)..(25): SEQ ID NO: 4883; WAN024DGO; Start 199; Stop 223
ttgacaaatgcccagttaatcttgc

SEQ ID NO: 393158 - DNA, 25 bp, Artificial
  probe
  misc_feature (1)..(25): SEQ ID NO: 4883; WAN024DGO; Start 481; Stop 505
gccatttaccgaactttaaaccaag

SEQ ID NO: 393159 - DNA, 25 bp, Artificial
  probe
  misc_feature (1)..(25): SEQ ID NO: 4883; WAN024DGO; Start 540; Stop 564
attagagagatacagacatggataa

SEQ ID NO: 393160 - DNA, 25 bp, Artificial
  probe
  misc_feature (1)..(25): SEQ ID NO: 4883; WAN024DGO; Start 539; Stop 563
aattagagagatacagacatggata

SEQ ID NO: 393161 - DNA, 25 bp, Artificial
  probe
  misc_feature (1)..(25): SEQ ID NO: 4883; WAN024DGO; Start 480; Stop 504
tgccatttaccgaactttaaaccaa

SEQ ID NO: 393162 - DNA, 25 bp, Artificial
  probe
  misc_feature (1)..(25): SEQ ID NO: 4883; WAN024DGO; Start 479; Stop 503
ctgccatttaccgaactttaaacca

SEQ ID NO: 393163 - DNA, 25 bp, Artificial
  probe
  misc_feature (1)..(25): SEQ ID NO: 4883; WAN024DGO; Start 1; Stop 25
ttgaaaatgaaaagaccacttgaga

SEQ ID NO: 393164 - DNA, 25 bp, Artificial
  probe
  misc_feature (1)..(25): SEQ ID NO: 4883; WAN024DGO; Start 538; Stop 562
aaattagagagatacagacatggat

SEQ ID NO: 393165 - DNA, 25 bp, Artificial
  probe
  misc_feature (1)..(25): SEQ ID NO: 4883; WAN024DGO; Start 477; Stop 501
agctgccatttaccgaactttaaac

SEQ ID NO: 393166 - DNA, 25 bp, Artificial
  probe
  misc_feature (1)..(25): SEQ ID NO: 4883; WAN024DGO; Start 134; Stop 158
tctatgcctttgatattcagaagca

SEQ ID NO: 393167 - DNA, 25 bp, Artificial
  probe
  misc_feature (1)..(25): SEQ ID NO: 4883; WAN024DGO; Start 129; Stop 153
gcaagtctatgcctttgatattcag

SEQ ID NO: 393168 - DNA, 25 bp, Artificial
  probe
  misc_feature (1)..(25): SEQ ID NO: 4883; WAN024DGO; Start 128; Stop 152
agcaagtctatgcctttgatattca

SEQ ID NO: 393169 - DNA, 25 bp, Artificial
  probe
  misc_feature (1)..(25): SEQ ID NO: 4883; WAN024DGO; Start 126; Stop 150
caagcaagtctatgcctttgatatt

SEQ ID NO: 393170 - DNA, 25 bp, Artificial
  probe
  misc_feature (1)..(25): SEQ ID NO: 4883; WAN024DGO; Start 2; Stop 26
tgaaaatgaaaagaccacttgagat

SEQ ID NO: 393171 - DNA, 25 bp, Artificial
  probe
  misc_feature (1)..(25): SEQ ID NO: 4883; WAN024DGO; Start 136; Stop 160
tatgcctttgatattcagaagcaag

SEQ ID NO: 393172 - DNA, 25 bp, Artificial
  probe
  misc_feature (1)..(25): SEQ ID NO: 4883; WAN024DGO; Start 135; Stop 159
ctatgcctttgatattcagaagcaa

SEQ ID NO: 393173 - DNA, 25 bp, Artificial
  probe
  misc_feature (1)..(25): SEQ ID NO: 4883; WAN024DGO; Start 127; Stop 151
aagcaagtctatgcctttgatattc

SEQ ID NO: 393174 - DNA, 25 bp, Artificial
  probe
  misc_feature (1)..(25): SEQ ID NO: 4884; WAN024FR5; Start 95; Stop 119
atcctgagtatgaacttattgttgt

SEQ ID NO: 393175 - DNA, 25 bp, Artificial
  probe
  misc_feature (1)..(25): SEQ ID NO: 4884; WAN024FR5; Start 344; Stop 368
tcgatataggagcaatattagccaa

SEQ ID NO: 393176 - DNA, 25 bp, Artificial
  probe
  misc_feature (1)..(25): SEQ ID NO: 4884; WAN024FR5; Start 1025; Stop 1049
tcgacaaggataatcaggatgaatt

SEQ ID NO: 393177 - DNA, 25 bp, Artificial
  probe
  misc_feature (1)..(25): SEQ ID NO: 4884; WAN024FR5; Start 1023; Stop 1047
aatcgacaaggataatcaggatgaa

SEQ ID NO: 393178 - DNA, 25 bp, Artificial
  probe
  misc_feature (1)..(25): SEQ ID NO: 4884; WAN024FR5; Start 1024; Stop 1048
atcgacaaggataatcaggatgaat

SEQ ID NO: 393179 - DNA, 25 bp, Artificial
  probe
  misc_feature (1)..(25): SEQ ID NO: 4884; WAN024FR5; Start 1021; Stop 1045
ttaatcgacaaggataatcaggatg

SEQ ID NO: 393180 - DNA, 25 bp, Artificial
  probe
  misc_feature (1)..(25): SEQ ID NO: 4884; WAN024FR5; Start 400; Stop 424
agagagcatttggatgtatggtatt

SEQ ID NO: 393181 - DNA, 25 bp, Artificial
  probe
  misc_feature (1)..(25): SEQ ID NO: 4884; WAN024FR5; Start 399; Stop 423
aagagagcatttggatgtatggtat

SEQ ID NO: 393182 - DNA, 25 bp, Artificial
  probe
  misc_feature (1)..(25): SEQ ID NO: 4884; WAN024FR5; Start 397; Stop 421
ataagagagcatttggatgtatggt

SEQ ID NO: 393183 - DNA, 25 bp, Artificial
  probe
  misc_feature (1)..(25): SEQ ID NO: 4884; WAN024FR5; Start 1022; Stop 1046
taatcgacaaggataatcaggatga

SEQ ID NO: 393184 - DNA, 25 bp, Artificial
  probe
  misc_feature (1)..(25): SEQ ID NO: 4884; WAN024FR5; Start 96; Stop 120
tcctgagtatgaacttattgttgta

SEQ ID NO: 393185 - DNA, 25 bp, Artificial
  probe
  misc_feature (1)..(25): SEQ ID NO: 4884; WAN024FR5; Start 398; Stop 422
taagagagcatttggatgtatggta

SEQ ID NO: 393186 - DNA, 25 bp, Artificial
  probe
  misc_feature (1)..(25): SEQ ID NO: 4884; WAN024FR5; Start 401; Stop 425
gagagcatttggatgtatggtattt

SEQ ID NO: 393187 - DNA, 25 bp, Artificial
  probe
  misc_feature (1)..(25): SEQ ID NO: 4884; WAN024FR5; Start 664; Stop 688
attgtatttgttggtggttacgata

SEQ ID NO: 393188 - DNA, 25 bp, Artificial
  probe
  misc_feature (1)..(25): SEQ ID NO: 4884; WAN024FR5; Start 663; Stop 687
tattgtatttgttggtggttacgat

SEQ ID NO: 393189 - DNA, 25 bp, Artificial
  probe
  misc_feature (1)..(25): SEQ ID NO: 4884; WAN024FR5; Start 666; Stop 690
tgtatttgttggtggttacgatatt

SEQ ID NO: 393190 - DNA, 25 bp, Artificial
  probe
  misc_feature (1)..(25): SEQ ID NO: 4884; WAN024FR5; Start 665; Stop 689
ttgtatttgttggtggttacgatat

SEQ ID NO: 393191 - DNA, 25 bp, Artificial
  probe
  misc_feature (1)..(25): SEQ ID NO: 4884; WAN024FR5; Start 662; Stop 686
atattgtatttgttggtggttacga

SEQ ID NO: 393192 - DNA, 25 bp, Artificial
  probe
  misc_feature (1)..(25): SEQ ID NO: 4884; WAN024FR5; Start 983; Stop 1007
gagctagtccagaattaataacaga

SEQ ID NO: 393193 - DNA, 25 bp, Artificial
  probe
  misc_feature (1)..(25): SEQ ID NO: 4884; WAN024FR5; Start 581; Stop 605
catctattgttaaagtttacgacgg

SEQ ID NO: 393194 - DNA, 25 bp, Artificial
  probe
  misc_feature (1)..(25): SEQ ID NO: 4884; WAN024FR5; Start 942; Stop 966
atatttagcgaacggtctttgtgtt

SEQ ID NO: 393195 - DNA, 25 bp, Artificial
  probe
  misc_feature (1)..(25): SEQ ID NO: 4884; WAN024FR5; Start 1026; Stop 1050
cgacaaggataatcaggatgaattt

SEQ ID NO: 393196 - DNA, 25 bp, Artificial
  probe
  misc_feature (1)..(25): SEQ ID NO: 4884; WAN024FR5; Start 982; Stop 1006
ggagctagtccagaattaataacag

SEQ ID NO: 393197 - DNA, 25 bp, Artificial
  probe
  misc_feature (1)..(25): SEQ ID NO: 4884; WAN024FR5; Start 396; Stop 420
tataagagagcatttggatgtatgg

SEQ ID NO: 393198 - DNA, 25 bp, Artificial
  probe
  misc_feature (1)..(25): SEQ ID NO: 4884; WAN024FR5; Start 985; Stop 1009
gctagtccagaattaataacagaag

SEQ ID NO: 393199 - DNA, 25 bp, Artificial
  probe
  misc_feature (1)..(25): SEQ ID NO: 4884; WAN024FR5; Start 984; Stop 1008
agctagtccagaattaataacagaa

SEQ ID NO: 393200 - DNA, 25 bp, Artificial
  probe
  misc_feature (1)..(25): SEQ ID NO: 4884; WAN024FR5; Start 97; Stop 121
cctgagtatgaacttattgttgtaa

SEQ ID NO: 393201 - DNA, 25 bp, Artificial
  probe
  misc_feature (1)..(25): SEQ ID NO: 4884; WAN024FR5; Start 938; Stop 962
ttgaatatttagcgaacggtctttg

SEQ ID NO: 393202 - DNA, 25 bp, Artificial
  probe
  misc_feature (1)..(25): SEQ ID NO: 4884; WAN024FR5; Start 534; Stop 558
ctctaactctgtagctatggattgg

SEQ ID NO: 393203 - DNA, 25 bp, Artificial
  probe
  misc_feature (1)..(25): SEQ ID NO: 4884; WAN024FR5; Start 528; Stop 552
tgcaatctctaactctgtagctatg

SEQ ID NO: 393204 - DNA, 25 bp, Artificial
  probe
  misc_feature (1)..(25): SEQ ID NO: 4884; WAN024FR5; Start 536; Stop 560
ctaactctgtagctatggattggtg

SEQ ID NO: 393205 - DNA, 25 bp, Artificial
  probe
  misc_feature (1)..(25): SEQ ID NO: 4884; WAN024FR5; Start 535; Stop 559
tctaactctgtagctatggattggt

SEQ ID NO: 393206 - DNA, 25 bp, Artificial
  probe
  misc_feature (1)..(25): SEQ ID NO: 4884; WAN024FR5; Start 940; Stop 964
gaatatttagcgaacggtctttgtg

SEQ ID NO: 393207 - DNA, 25 bp, Artificial
  probe
  misc_feature (1)..(25): SEQ ID NO: 4885; WAN024G8B; Start 733; Stop 757
gaactggcagactattacaaggatt

SEQ ID NO: 393208 - DNA, 25 bp, Artificial
  probe
  misc_feature (1)..(25): SEQ ID NO: 4885; WAN024G8B; Start 725; Stop 749
aagaaggagaactggcagactatta

SEQ ID NO: 393209 - DNA, 25 bp, Artificial
  probe
  misc_feature (1)..(25): SEQ ID NO: 4885; WAN024G8B; Start 732; Stop 756
agaactggcagactattacaaggat

SEQ ID NO: 393210 - DNA, 25 bp, Artificial
  probe
  misc_feature (1)..(25): SEQ ID NO: 4885; WAN024G8B; Start 251; Stop 275
atgatgtggaatggtacttggaatt

SEQ ID NO: 393211 - DNA, 25 bp, Artificial
  probe
  misc_feature (1)..(25): SEQ ID NO: 4885; WAN024G8B; Start 734; Stop 758
aactggcagactattacaaggattg

SEQ ID NO: 393212 - DNA, 25 bp, Artificial
  probe
  misc_feature (1)..(25): SEQ ID NO: 4885; WAN024G8B; Start 728; Stop 752
aaggagaactggcagactattacaa

SEQ ID NO: 393213 - DNA, 25 bp, Artificial
  probe
  misc_feature (1)..(25): SEQ ID NO: 4885; WAN024G8B; Start 726; Stop 750
agaaggagaactggcagactattac

SEQ ID NO: 393214 - DNA, 25 bp, Artificial
  probe
  misc_feature (1)..(25): SEQ ID NO: 4885; WAN024G8B; Start 250; Stop 274
gatgatgtggaatggtacttggaat

SEQ ID NO: 393215 - DNA, 25 bp, Artificial
  probe
  misc_feature (1)..(25): SEQ ID NO: 4885; WAN024G8B; Start 731; Stop 755
gagaactggcagactattacaagga

SEQ ID NO: 393216 - DNA, 25 bp, Artificial
  probe
  misc_feature (1)..(25): SEQ ID NO: 4885; WAN024G8B; Start 729; Stop 753
aggagaactggcagactattacaag

SEQ ID NO: 393217 - DNA, 25 bp, Artificial
  probe
  misc_feature (1)..(25): SEQ ID NO: 4885; WAN024G8B; Start 727; Stop 751
gaaggagaactggcagactattaca

SEQ ID NO: 393218 - DNA, 25 bp, Artificial
  probe
  misc_feature (1)..(25): SEQ ID NO: 4885; WAN024G8B; Start 312; Stop 336
caataccaatcctgttcattcagag

SEQ ID NO: 393219 - DNA, 25 bp, Artificial
  probe
  misc_feature (1)..(25): SEQ ID NO: 4885; WAN024G8B; Start 311; Stop 335
acaataccaatcctgttcattcaga

SEQ ID NO: 393220 - DNA, 25 bp, Artificial
  probe
  misc_feature (1)..(25): SEQ ID NO: 4885; WAN024G8B; Start 313; Stop 337
aataccaatcctgttcattcagagg

SEQ ID NO: 393221 - DNA, 25 bp, Artificial
  probe
  misc_feature (1)..(25): SEQ ID NO: 4885; WAN024G8B; Start 249; Stop 273
agatgatgtggaatggtacttggaa

SEQ ID NO: 393222 - DNA, 25 bp, Artificial
  probe
  misc_feature (1)..(25): SEQ ID NO: 4885; WAN024G8B; Start 310; Stop 334
tacaataccaatcctgttcattcag

SEQ ID NO: 393223 - DNA, 25 bp, Artificial
  probe
  misc_feature (1)..(25): SEQ ID NO: 4885; WAN024G8B; Start 309; Stop 333
atacaataccaatcctgttcattca

SEQ ID NO: 393224 - DNA, 25 bp, Artificial
  probe
  misc_feature (1)..(25): SEQ ID NO: 4885; WAN024G8B; Start 808; Stop 832
gagaatggcaatcgtattcaactac

SEQ ID NO: 393225 - DNA, 25 bp, Artificial
  probe
  misc_feature (1)..(25): SEQ ID NO: 4885; WAN024G8B; Start 807; Stop 831
tgagaatggcaatcgtattcaacta

SEQ ID NO: 393226 - DNA, 25 bp, Artificial
  probe
  misc_feature (1)..(25): SEQ ID NO: 4885; WAN024G8B; Start 805; Stop 829
gatgagaatggcaatcgtattcaac

SEQ ID NO: 393227 - DNA, 25 bp, Artificial
  probe
  misc_feature (1)..(25): SEQ ID NO: 4885; WAN024G8B; Start 806; Stop 830
atgagaatggcaatcgtattcaact

SEQ ID NO: 393228 - DNA, 25 bp, Artificial
  probe
  misc_feature (1)..(25): SEQ ID NO: 4885; WAN024G8B; Start 735; Stop 759
actggcagactattacaaggattgg

SEQ ID NO: 393229 - DNA, 25 bp, Artificial
  probe
  misc_feature (1)..(25): SEQ ID NO: 4885; WAN024G8B; Start 730; Stop 754
ggagaactggcagactattacaagg

SEQ ID NO: 393230 - DNA, 25 bp, Artificial
  probe
  misc_feature (1)..(25): SEQ ID NO: 4885; WAN024G8B; Start 248; Stop 272
cagatgatgtggaatggtacttgga

SEQ ID NO: 393231 - DNA, 25 bp, Artificial
  probe
  misc_feature (1)..(25): SEQ ID NO: 4885; WAN024G8B; Start 319; Stop 343
aatcctgttcattcagaggtcctag

SEQ ID NO: 393232 - DNA, 25 bp, Artificial
  probe
  misc_feature (1)..(25): SEQ ID NO: 4885; WAN024G8B; Start 318; Stop 342
caatcctgttcattcagaggtccta

SEQ ID NO: 393233 - DNA, 25 bp, Artificial
  probe
  misc_feature (1)..(25): SEQ ID NO: 4885; WAN024G8B; Start 43; Stop 67
tggaataaacaaacaatgcctgaag

SEQ ID NO: 393234 - DNA, 25 bp, Artificial
  probe
  misc_feature (1)..(25): SEQ ID NO: 4885; WAN024G8B; Start 42; Stop 66
gtggaataaacaaacaatgcctgaa

SEQ ID NO: 393235 - DNA, 25 bp, Artificial
  probe
  misc_feature (1)..(25): SEQ ID NO: 4885; WAN024G8B; Start 314; Stop 338
ataccaatcctgttcattcagaggt

SEQ ID NO: 393236 - DNA, 25 bp, Artificial
  probe
  misc_feature (1)..(25): SEQ ID NO: 4885; WAN024G8B; Start 723; Stop 747
taaagaaggagaactggcagactat

SEQ ID NO: 393237 - DNA, 25 bp, Artificial
  probe
  misc_feature (1)..(25): SEQ ID NO: 4885; WAN024G8B; Start 749; Stop 773
acaaggattgggaattggttaagta

SEQ ID NO: 393238 - DNA, 25 bp, Artificial
  probe
  misc_feature (1)..(25): SEQ ID NO: 4885; WAN024G8B; Start 748; Stop 772
tacaaggattgggaattggttaagt

SEQ ID NO: 393239 - DNA, 25 bp, Artificial
  probe
  misc_feature (1)..(25): SEQ ID NO: 4885; WAN024G8B; Start 743; Stop 767
actattacaaggattgggaattggt

SEQ ID NO: 393240 - DNA, 25 bp, Artificial
  probe
  misc_feature (1)..(25): SEQ ID NO: 4886; WAN024GDQ; Start 447; Stop 471
cggaggatggattctagtctatcta

SEQ ID NO: 393241 - DNA, 25 bp, Artificial
  probe
  misc_feature (1)..(25): SEQ ID NO: 4886; WAN024GDQ; Start 443; Stop 467
ttatcggaggatggattctagtcta

SEQ ID NO: 393242 - DNA, 25 bp, Artificial
  probe
  misc_feature (1)..(25): SEQ ID NO: 4886; WAN024GDQ; Start 445; Stop 469
atcggaggatggattctagtctatc

SEQ ID NO: 393243 - DNA, 25 bp, Artificial
  probe
  misc_feature (1)..(25): SEQ ID NO: 4886; WAN024GDQ; Start 444; Stop 468
tatcggaggatggattctagtctat

SEQ ID NO: 393244 - DNA, 25 bp, Artificial
  probe
  misc_feature (1)..(25): SEQ ID NO: 4886; WAN024GDQ; Start 438; Stop 462
cagtgttatcggaggatggattcta

SEQ ID NO: 393245 - DNA, 25 bp, Artificial
  probe
  misc_feature (1)..(25): SEQ ID NO: 4886; WAN024GDQ; Start 442; Stop 466
gttatcggaggatggattctagtct

SEQ ID NO: 393246 - DNA, 25 bp, Artificial
  probe
  misc_feature (1)..(25): SEQ ID NO: 4886; WAN024GDQ; Start 435; Stop 459
ttacagtgttatcggaggatggatt

SEQ ID NO: 393247 - DNA, 25 bp, Artificial
  probe
  misc_feature (1)..(25): SEQ ID NO: 4886; WAN024GDQ; Start 441; Stop 465
tgttatcggaggatggattctagtc

SEQ ID NO: 393248 - DNA, 25 bp, Artificial
  probe
  misc_feature (1)..(25): SEQ ID NO: 4886; WAN024GDQ; Start 439; Stop 463
agtgttatcggaggatggattctag

SEQ ID NO: 393249 - DNA, 25 bp, Artificial
  probe
  misc_feature (1)..(25): SEQ ID NO: 4886; WAN024GDQ; Start 446; Stop 470
tcggaggatggattctagtctatct

SEQ ID NO: 393250 - DNA, 25 bp, Artificial
  probe
  misc_feature (1)..(25): SEQ ID NO: 4886; WAN024GDQ; Start 440; Stop 464
gtgttatcggaggatggattctagt

SEQ ID NO: 393251 - DNA, 25 bp, Artificial
  probe
  misc_feature (1)..(25): SEQ ID NO: 4886; WAN024GDQ; Start 436; Stop 460
tacagtgttatcggaggatggattc

SEQ ID NO: 393252 - DNA, 25 bp, Artificial
  probe
  misc_feature (1)..(25): SEQ ID NO: 4886; WAN024GDQ; Start 879; Stop 903
aatctccatcgtagccatgaatatc

SEQ ID NO: 393253 - DNA, 25 bp, Artificial
  probe
  misc_feature (1)..(25): SEQ ID NO: 4886; WAN024GDQ; Start 878; Stop 902
gaatctccatcgtagccatgaatat

SEQ ID NO: 393254 - DNA, 25 bp, Artificial
  probe
  misc_feature (1)..(25): SEQ ID NO: 4886; WAN024GDQ; Start 880; Stop 904
atctccatcgtagccatgaatatct

SEQ ID NO: 393255 - DNA, 25 bp, Artificial
  probe
  misc_feature (1)..(25): SEQ ID NO: 4886; WAN024GDQ; Start 881; Stop 905
tctccatcgtagccatgaatatctc

SEQ ID NO: 393256 - DNA, 25 bp, Artificial
  probe
  misc_feature (1)..(25): SEQ ID NO: 4886; WAN024GDQ; Start 408; Stop 432
ctttgccctctttatcctcttatct

SEQ ID NO: 393257 - DNA, 25 bp, Artificial
  probe
  misc_feature (1)..(25): SEQ ID NO: 4886; WAN024GDQ; Start 410; Stop 434
ttgccctctttatcctcttatcttt

SEQ ID NO: 393258 - DNA, 25 bp, Artificial
  probe
  misc_feature (1)..(25): SEQ ID NO: 4886; WAN024GDQ; Start 409; Stop 433
tttgccctctttatcctcttatctt

SEQ ID NO: 393259 - DNA, 25 bp, Artificial
  probe
  misc_feature (1)..(25): SEQ ID NO: 4886; WAN024GDQ; Start 407; Stop 431
cctttgccctctttatcctcttatc

SEQ ID NO: 393260 - DNA, 25 bp, Artificial
  probe
  misc_feature (1)..(25): SEQ ID NO: 4886; WAN024GDQ; Start 534; Stop 558
ttcaatcatttcaaatccagccatt

SEQ ID NO: 393261 - DNA, 25 bp, Artificial
  probe
  misc_feature (1)..(25): SEQ ID NO: 4886; WAN024GDQ; Start 531; Stop 555
tacttcaatcatttcaaatccagcc

SEQ ID NO: 393262 - DNA, 25 bp, Artificial
  probe
  misc_feature (1)..(25): SEQ ID NO: 4886; WAN024GDQ; Start 533; Stop 557
cttcaatcatttcaaatccagccat

SEQ ID NO: 393263 - DNA, 25 bp, Artificial
  probe
  misc_feature (1)..(25): SEQ ID NO: 4886; WAN024GDQ; Start 450; Stop 474
aggatggattctagtctatctaggt

SEQ ID NO: 393264 - DNA, 25 bp, Artificial
  probe
  misc_feature (1)..(25): SEQ ID NO: 4886; WAN024GDQ; Start 471; Stop 495
aggtattgagtttgggaaattgttc

SEQ ID NO: 393265 - DNA, 25 bp, Artificial
  probe
  misc_feature (1)..(25): SEQ ID NO: 4886; WAN024GDQ; Start 449; Stop 473
gaggatggattctagtctatctagg

SEQ ID NO: 393266 - DNA, 25 bp, Artificial
  probe
  misc_feature (1)..(25): SEQ ID NO: 4886; WAN024GDQ; Start 448; Stop 472
ggaggatggattctagtctatctag

SEQ ID NO: 393267 - DNA, 25 bp, Artificial
  probe
  misc_feature (1)..(25): SEQ ID NO: 4886; WAN024GDQ; Start 437; Stop 461
acagtgttatcggaggatggattct

SEQ ID NO: 393268 - DNA, 25 bp, Artificial
  probe
  misc_feature (1)..(25): SEQ ID NO: 4886; WAN024GDQ; Start 1396; Stop 1420
tcttccttcttcgtttcttcgtttc

SEQ ID NO: 393269 - DNA, 25 bp, Artificial
  probe
  misc_feature (1)..(25): SEQ ID NO: 4886; WAN024GDQ; Start 1395; Stop 1419
ctcttccttcttcgtttcttcgttt

SEQ ID NO: 393270 - DNA, 25 bp, Artificial
  probe
  misc_feature (1)..(25): SEQ ID NO: 4886; WAN024GDQ; Start 509; Stop 533
cgggtgattatgctcagttatttac

SEQ ID NO: 393271 - DNA, 25 bp, Artificial
  probe
  misc_feature (1)..(25): SEQ ID NO: 4886; WAN024GDQ; Start 508; Stop 532
acgggtgattatgctcagttattta

SEQ ID NO: 393272 - DNA, 25 bp, Artificial
  probe
  misc_feature (1)..(25): SEQ ID NO: 4886; WAN024GDQ; Start 463; Stop 487
gtctatctaggtattgagtttggga

SEQ ID NO: 393273 - DNA, 25 bp, Artificial
  probe
  misc_feature (1)..(25): SEQ ID NO: 4887; WAN024DJV; Start 375; Stop 399
tggtatagccttattggatgattct

SEQ ID NO: 393274 - DNA, 25 bp, Artificial
  probe
  misc_feature (1)..(25): SEQ ID NO: 4887; WAN024DJV; Start 658; Stop 682
atggattggcatataactgacattc

SEQ ID NO: 393275 - DNA, 25 bp, Artificial
  probe
  misc_feature (1)..(25): SEQ ID NO: 4887; WAN024DJV; Start 1905; Stop 1929
agattctagtatcgttccaagcaat

SEQ ID NO: 393276 - DNA, 25 bp, Artificial
  probe
  misc_feature (1)..(25): SEQ ID NO: 4887; WAN024DJV; Start 1904; Stop 1928
gagattctagtatcgttccaagcaa

SEQ ID NO: 393277 - DNA, 25 bp, Artificial
  probe
  misc_feature (1)..(25): SEQ ID NO: 4887; WAN024DJV; Start 376; Stop 400
ggtatagccttattggatgattctc

SEQ ID NO: 393278 - DNA, 25 bp, Artificial
  probe
  misc_feature (1)..(25): SEQ ID NO: 4887; WAN024DJV; Start 1192; Stop 1216
tctaatatcggttatagttggtgga

SEQ ID NO: 393279 - DNA, 25 bp, Artificial
  probe
  misc_feature (1)..(25): SEQ ID NO: 4887; WAN024DJV; Start 2153; Stop 2177
atcatcaggataaggaattgagagg

SEQ ID NO: 393280 - DNA, 25 bp, Artificial
  probe
  misc_feature (1)..(25): SEQ ID NO: 4887; WAN024DJV; Start 2151; Stop 2175
gcatcatcaggataaggaattgaga

SEQ ID NO: 393281 - DNA, 25 bp, Artificial
  probe
  misc_feature (1)..(25): SEQ ID NO: 4887; WAN024DJV; Start 1193; Stop 1217
ctaatatcggttatagttggtggag

SEQ ID NO: 393282 - DNA, 25 bp, Artificial
  probe
  misc_feature (1)..(25): SEQ ID NO: 4887; WAN024DJV; Start 700; Stop 724
ggctggacaggatatagttggaata

SEQ ID NO: 393283 - DNA, 25 bp, Artificial
  probe
  misc_feature (1)..(25): SEQ ID NO: 4887; WAN024DJV; Start 631; Stop 655
attccattatctatcggtgtgttag

SEQ ID NO: 393284 - DNA, 25 bp, Artificial
  probe
  misc_feature (1)..(25): SEQ ID NO: 4887; WAN024DJV; Start 1189; Stop 1213
gcatctaatatcggttatagttggt

SEQ ID NO: 393285 - DNA, 25 bp, Artificial
  probe
  misc_feature (1)..(25): SEQ ID NO: 4887; WAN024DJV; Start 374; Stop 398
atggtatagccttattggatgattc

SEQ ID NO: 393286 - DNA, 25 bp, Artificial
  probe
  misc_feature (1)..(25): SEQ ID NO: 4887; WAN024DJV; Start 642; Stop 666
tatcggtgtgttagatatggattgg

SEQ ID NO: 393287 - DNA, 25 bp, Artificial
  probe
  misc_feature (1)..(25): SEQ ID NO: 4887; WAN024DJV; Start 1953; Stop 1977
aggaacgaatgtgtctataattgaa

SEQ ID NO: 393288 - DNA, 25 bp, Artificial
  probe
  misc_feature (1)..(25): SEQ ID NO: 4887; WAN024DJV; Start 1952; Stop 1976
aaggaacgaatgtgtctataattga

SEQ ID NO: 393289 - DNA, 25 bp, Artificial
  probe
  misc_feature (1)..(25): SEQ ID NO: 4887; WAN024DJV; Start 1188; Stop 1212
agcatctaatatcggttatagttgg

SEQ ID NO: 393290 - DNA, 25 bp, Artificial
  probe
  misc_feature (1)..(25): SEQ ID NO: 4887; WAN024DJV; Start 1907; Stop 1931
attctagtatcgttccaagcaatag

SEQ ID NO: 393291 - DNA, 25 bp, Artificial
  probe
  misc_feature (1)..(25): SEQ ID NO: 4887; WAN024DJV; Start 2152; Stop 2176
catcatcaggataaggaattgagag

SEQ ID NO: 393292 - DNA, 25 bp, Artificial
  probe
  misc_feature (1)..(25): SEQ ID NO: 4887; WAN024DJV; Start 1906; Stop 1930
gattctagtatcgttccaagcaata

SEQ ID NO: 393293 - DNA, 25 bp, Artificial
  probe
  misc_feature (1)..(25): SEQ ID NO: 4887; WAN024DJV; Start 1185; Stop 1209
gacagcatctaatatcggttatagt

SEQ ID NO: 393294 - DNA, 25 bp, Artificial
  probe
  misc_feature (1)..(25): SEQ ID NO: 4887; WAN024DJV; Start 641; Stop 665
ctatcggtgtgttagatatggattg

SEQ ID NO: 393295 - DNA, 25 bp, Artificial
  probe
  misc_feature (1)..(25): SEQ ID NO: 4887; WAN024DJV; Start 379; Stop 403
atagccttattggatgattctcaag

SEQ ID NO: 393296 - DNA, 25 bp, Artificial
  probe
  misc_feature (1)..(25): SEQ ID NO: 4887; WAN024DJV; Start 373; Stop 397
aatggtatagccttattggatgatt

SEQ ID NO: 393297 - DNA, 25 bp, Artificial
  probe
  misc_feature (1)..(25): SEQ ID NO: 4887; WAN024DJV; Start 1191; Stop 1215
atctaatatcggttatagttggtgg

SEQ ID NO: 393298 - DNA, 25 bp, Artificial
  probe
  misc_feature (1)..(25): SEQ ID NO: 4887; WAN024DJV; Start 646; Stop 670
ggtgtgttagatatggattggcata

SEQ ID NO: 393299 - DNA, 25 bp, Artificial
  probe
  misc_feature (1)..(25): SEQ ID NO: 4887; WAN024DJV; Start 630; Stop 654
aattccattatctatcggtgtgtta

SEQ ID NO: 393300 - DNA, 25 bp, Artificial
  probe
  misc_feature (1)..(25): SEQ ID NO: 4887; WAN024DJV; Start 1900; Stop 1924
caaggagattctagtatcgttccaa

SEQ ID NO: 393301 - DNA, 25 bp, Artificial
  probe
  misc_feature (1)..(25): SEQ ID NO: 4887; WAN024DJV; Start 377; Stop 401
gtatagccttattggatgattctca

SEQ ID NO: 393302 - DNA, 25 bp, Artificial
  probe
  misc_feature (1)..(25): SEQ ID NO: 4887; WAN024DJV; Start 1901; Stop 1925
aaggagattctagtatcgttccaag

SEQ ID NO: 393303 - DNA, 25 bp, Artificial
  probe
  misc_feature (1)..(25): SEQ ID NO: 4887; WAN024DJV; Start 1895; Stop 1919
cattacaaggagattctagtatcgt

SEQ ID NO: 393304 - DNA, 25 bp, Artificial
  probe
  misc_feature (1)..(25): SEQ ID NO: 4887; WAN024DJV; Start 659; Stop 683
tggattggcatataactgacattcc

SEQ ID NO: 393305 - DNA, 25 bp, Artificial
  probe
  misc_feature (1)..(25): SEQ ID NO: 4887; WAN024DJV; Start 632; Stop 656
ttccattatctatcggtgtgttaga

SEQ ID NO: 393306 - DNA, 25 bp, Artificial
  probe
  misc_feature (1)..(25): SEQ ID NO: 4888; WAN024FWF; Start 51; Stop 75
caattctatatcgtgcgttaccata

SEQ ID NO: 393307 - DNA, 25 bp, Artificial
  probe
  misc_feature (1)..(25): SEQ ID NO: 4888; WAN024FWF; Start 50; Stop 74
ccaattctatatcgtgcgttaccat

SEQ ID NO: 393308 - DNA, 25 bp, Artificial
  probe
  misc_feature (1)..(25): SEQ ID NO: 4888; WAN024FWF; Start 173; Stop 197
ttatatcactatcagcaataaccgc

SEQ ID NO: 393309 - DNA, 25 bp, Artificial
  probe
  misc_feature (1)..(25): SEQ ID NO: 4888; WAN024FWF; Start 54; Stop 78
ttctatatcgtgcgttaccataatt

SEQ ID NO: 393310 - DNA, 25 bp, Artificial
  probe
  misc_feature (1)..(25): SEQ ID NO: 4888; WAN024FWF; Start 52; Stop 76
aattctatatcgtgcgttaccataa

SEQ ID NO: 393311 - DNA, 25 bp, Artificial
  probe
  misc_feature (1)..(25): SEQ ID NO: 4888; WAN024FWF; Start 53; Stop 77
attctatatcgtgcgttaccataat

SEQ ID NO: 393312 - DNA, 25 bp, Artificial
  probe
  misc_feature (1)..(25): SEQ ID NO: 4888; WAN024FWF; Start 65; Stop 89
gcgttaccataattacacacttacc

SEQ ID NO: 393313 - DNA, 25 bp, Artificial
  probe
  misc_feature (1)..(25): SEQ ID NO: 4888; WAN024FWF; Start 64; Stop 88
tgcgttaccataattacacacttac

SEQ ID NO: 393314 - DNA, 25 bp, Artificial
  probe
  misc_feature (1)..(25): SEQ ID NO: 4888; WAN024FWF; Start 57; Stop 81
tatatcgtgcgttaccataattaca

SEQ ID NO: 393315 - DNA, 25 bp, Artificial
  probe
  misc_feature (1)..(25): SEQ ID NO: 4888; WAN024FWF; Start 59; Stop 83
tatcgtgcgttaccataattacaca

SEQ ID NO: 393316 - DNA, 25 bp, Artificial
  probe
  misc_feature (1)..(25): SEQ ID NO: 4888; WAN024FWF; Start 63; Stop 87
gtgcgttaccataattacacactta

SEQ ID NO: 393317 - DNA, 25 bp, Artificial
  probe
  misc_feature (1)..(25): SEQ ID NO: 4888; WAN024FWF; Start 58; Stop 82
atatcgtgcgttaccataattacac

SEQ ID NO: 393318 - DNA, 25 bp, Artificial
  probe
  misc_feature (1)..(25): SEQ ID NO: 4888; WAN024FWF; Start 358; Stop 382
ggcagggaaggtattaaattgtatg

SEQ ID NO: 393319 - DNA, 25 bp, Artificial
  probe
  misc_feature (1)..(25): SEQ ID NO: 4888; WAN024FWF; Start 256; Stop 280
aagccagcattaaacttcattcttt

SEQ ID NO: 393320 - DNA, 25 bp, Artificial
  probe
  misc_feature (1)..(25): SEQ ID NO: 4888; WAN024FWF; Start 357; Stop 381
cggcagggaaggtattaaattgtat

SEQ ID NO: 393321 - DNA, 25 bp, Artificial
  probe
  misc_feature (1)..(25): SEQ ID NO: 4888; WAN024FWF; Start 56; Stop 80
ctatatcgtgcgttaccataattac

SEQ ID NO: 393322 - DNA, 25 bp, Artificial
  probe
  misc_feature (1)..(25): SEQ ID NO: 4888; WAN024FWF; Start 255; Stop 279
taagccagcattaaacttcattctt

SEQ ID NO: 393323 - DNA, 25 bp, Artificial
  probe
  misc_feature (1)..(25): SEQ ID NO: 4888; WAN024FWF; Start 55; Stop 79
tctatatcgtgcgttaccataatta

SEQ ID NO: 393324 - DNA, 25 bp, Artificial
  probe
  misc_feature (1)..(25): SEQ ID NO: 4888; WAN024FWF; Start 360; Stop 384
cagggaaggtattaaattgtatgct

SEQ ID NO: 393325 - DNA, 25 bp, Artificial
  probe
  misc_feature (1)..(25): SEQ ID NO: 4888; WAN024FWF; Start 254; Stop 278
ttaagccagcattaaacttcattct

SEQ ID NO: 393326 - DNA, 25 bp, Artificial
  probe
  misc_feature (1)..(25): SEQ ID NO: 4888; WAN024FWF; Start 174; Stop 198
tatatcactatcagcaataaccgct

SEQ ID NO: 393327 - DNA, 25 bp, Artificial
  probe
  misc_feature (1)..(25): SEQ ID NO: 4888; WAN024FWF; Start 175; Stop 199
atatcactatcagcaataaccgctc

SEQ ID NO: 393328 - DNA, 25 bp, Artificial
  probe
  misc_feature (1)..(25): SEQ ID NO: 4888; WAN024FWF; Start 60; Stop 84
atcgtgcgttaccataattacacac

SEQ ID NO: 393329 - DNA, 25 bp, Artificial
  probe
  misc_feature (1)..(25): SEQ ID NO: 4888; WAN024FWF; Start 62; Stop 86
cgtgcgttaccataattacacactt

SEQ ID NO: 393330 - DNA, 25 bp, Artificial
  probe
  misc_feature (1)..(25): SEQ ID NO: 4888; WAN024FWF; Start 49; Stop 73
gccaattctatatcgtgcgttacca

SEQ ID NO: 393331 - DNA, 25 bp, Artificial
  probe
  misc_feature (1)..(25): SEQ ID NO: 4888; WAN024FWF; Start 177; Stop 201
atcactatcagcaataaccgctcta

SEQ ID NO: 393332 - DNA, 25 bp, Artificial
  probe
  misc_feature (1)..(25): SEQ ID NO: 4888; WAN024FWF; Start 176; Stop 200
tatcactatcagcaataaccgctct

SEQ ID NO: 393333 - DNA, 25 bp, Artificial
  probe
  misc_feature (1)..(25): SEQ ID NO: 4888; WAN024FWF; Start 172; Stop 196
attatatcactatcagcaataaccg

SEQ ID NO: 393334 - DNA, 25 bp, Artificial
  probe
  misc_feature (1)..(25): SEQ ID NO: 4888; WAN024FWF; Start 67; Stop 91
gttaccataattacacacttacccg

SEQ ID NO: 393335 - DNA, 25 bp, Artificial
  probe
  misc_feature (1)..(25): SEQ ID NO: 4888; WAN024FWF; Start 66; Stop 90
cgttaccataattacacacttaccc

SEQ ID NO: 393336 - DNA, 25 bp, Artificial
  probe
  misc_feature (1)..(25): SEQ ID NO: 4888; WAN024FWF; Start 362; Stop 386
gggaaggtattaaattgtatgcttg

SEQ ID NO: 393337 - DNA, 25 bp, Artificial
  probe
  misc_feature (1)..(25): SEQ ID NO: 4888; WAN024FWF; Start 361; Stop 385
agggaaggtattaaattgtatgctt

SEQ ID NO: 393338 - DNA, 25 bp, Artificial
  probe
  misc_feature (1)..(25): SEQ ID NO: 4888; WAN024FWF; Start 68; Stop 92
ttaccataattacacacttacccgc

SEQ ID NO: 393339 - DNA, 25 bp, Artificial
  probe
  misc_feature (1)..(25): SEQ ID NO: 4889; WAN024DTC; Start 73; Stop 97
aaacatgagtattcagccagtcaaa

SEQ ID NO: 393340 - DNA, 25 bp, Artificial
  probe
  misc_feature (1)..(25): SEQ ID NO: 4889; WAN024DTC; Start 77; Stop 101
atgagtattcagccagtcaaaagga

SEQ ID NO: 393341 - DNA, 25 bp, Artificial
  probe
  misc_feature (1)..(25): SEQ ID NO: 4889; WAN024DTC; Start 74; Stop 98
aacatgagtattcagccagtcaaaa

SEQ ID NO: 393342 - DNA, 25 bp, Artificial
  probe
  misc_feature (1)..(25): SEQ ID NO: 4889; WAN024DTC; Start 72; Stop 96
aaaacatgagtattcagccagtcaa

SEQ ID NO: 393343 - DNA, 25 bp, Artificial
  probe
  misc_feature (1)..(25): SEQ ID NO: 4889; WAN024DTC; Start 75; Stop 99
acatgagtattcagccagtcaaaag

SEQ ID NO: 393344 - DNA, 25 bp, Artificial
  probe
  misc_feature (1)..(25): SEQ ID NO: 4889; WAN024DTC; Start 71; Stop 95
gaaaacatgagtattcagccagtca

SEQ ID NO: 393345 - DNA, 25 bp, Artificial
  probe
  misc_feature (1)..(25): SEQ ID NO: 4889; WAN024DTC; Start 65; Stop 89
tctctggaaaacatgagtattcagc

SEQ ID NO: 393346 - DNA, 25 bp, Artificial
  probe
  misc_feature (1)..(25): SEQ ID NO: 4889; WAN024DTC; Start 64; Stop 88
ttctctggaaaacatgagtattcag

SEQ ID NO: 393347 - DNA, 25 bp, Artificial
  probe
  misc_feature (1)..(25): SEQ ID NO: 4889; WAN024DTC; Start 78; Stop 102
tgagtattcagccagtcaaaaggag

SEQ ID NO: 393348 - DNA, 25 bp, Artificial
  probe
  misc_feature (1)..(25): SEQ ID NO: 4889; WAN024DTC; Start 76; Stop 100
catgagtattcagccagtcaaaagg

SEQ ID NO: 393349 - DNA, 25 bp, Artificial
  probe
  misc_feature (1)..(25): SEQ ID NO: 4889; WAN024DTC; Start 70; Stop 94
ggaaaacatgagtattcagccagtc

SEQ ID NO: 393350 - DNA, 25 bp, Artificial
  probe
  misc_feature (1)..(25): SEQ ID NO: 4889; WAN024DTC; Start 66; Stop 90
ctctggaaaacatgagtattcagcc

SEQ ID NO: 393351 - DNA, 25 bp, Artificial
  probe
  misc_feature (1)..(25): SEQ ID NO: 4889; WAN024DTC; Start 36; Stop 60
gtcattcctaggcgtatttatgcta

SEQ ID NO: 393352 - DNA, 25 bp, Artificial
  probe
  misc_feature (1)..(25): SEQ ID NO: 4889; WAN024DTC; Start 33; Stop 57
aatgtcattcctaggcgtatttatg

SEQ ID NO: 393353 - DNA, 25 bp, Artificial
  probe
  misc_feature (1)..(25): SEQ ID NO: 4889; WAN024DTC; Start 92; Stop 116
gtcaaaaggagctgaatgaactcat

SEQ ID NO: 393354 - DNA, 25 bp, Artificial
  probe
  misc_feature (1)..(25): SEQ ID NO: 4889; WAN024DTC; Start 38; Stop 62
cattcctaggcgtatttatgctatt

SEQ ID NO: 393355 - DNA, 25 bp, Artificial
  probe
  misc_feature (1)..(25): SEQ ID NO: 4889; WAN024DTC; Start 34; Stop 58
atgtcattcctaggcgtatttatgc

SEQ ID NO: 393356 - DNA, 25 bp, Artificial
  probe
  misc_feature (1)..(25): SEQ ID NO: 4889; WAN024DTC; Start 39; Stop 63
attcctaggcgtatttatgctattt

SEQ ID NO: 393357 - DNA, 25 bp, Artificial
  probe
  misc_feature (1)..(25): SEQ ID NO: 4889; WAN024DTC; Start 96; Stop 120
aaaggagctgaatgaactcattttc

SEQ ID NO: 393358 - DNA, 25 bp, Artificial
  probe
  misc_feature (1)..(25): SEQ ID NO: 4889; WAN024DTC; Start 35; Stop 59
tgtcattcctaggcgtatttatgct

SEQ ID NO: 393359 - DNA, 25 bp, Artificial
  probe
  misc_feature (1)..(25): SEQ ID NO: 4889; WAN024DTC; Start 94; Stop 118
caaaaggagctgaatgaactcattt

SEQ ID NO: 393360 - DNA, 25 bp, Artificial
  probe
  misc_feature (1)..(25): SEQ ID NO: 4889; WAN024DTC; Start 79; Stop 103
gagtattcagccagtcaaaaggagc

SEQ ID NO: 393361 - DNA, 25 bp, Artificial
  probe
  misc_feature (1)..(25): SEQ ID NO: 4889; WAN024DTC; Start 63; Stop 87
tttctctggaaaacatgagtattca

SEQ ID NO: 393362 - DNA, 25 bp, Artificial
  probe
  misc_feature (1)..(25): SEQ ID NO: 4889; WAN024DTC; Start 95; Stop 119
aaaaggagctgaatgaactcatttt

SEQ ID NO: 393363 - DNA, 25 bp, Artificial
  probe
  misc_feature (1)..(25): SEQ ID NO: 4889; WAN024DTC; Start 91; Stop 115
agtcaaaaggagctgaatgaactca

SEQ ID NO: 393364 - DNA, 25 bp, Artificial
  probe
  misc_feature (1)..(25): SEQ ID NO: 4889; WAN024DTC; Start 90; Stop 114
cagtcaaaaggagctgaatgaactc

SEQ ID NO: 393365 - DNA, 25 bp, Artificial
  probe
  misc_feature (1)..(25): SEQ ID NO: 4889; WAN024DTC; Start 67; Stop 91
tctggaaaacatgagtattcagcca

SEQ ID NO: 393366 - DNA, 25 bp, Artificial
  probe
  misc_feature (1)..(25): SEQ ID NO: 4889; WAN024DTC; Start 93; Stop 117
tcaaaaggagctgaatgaactcatt

SEQ ID NO: 393367 - DNA, 25 bp, Artificial
  probe
  misc_feature (1)..(25): SEQ ID NO: 4889; WAN024DTC; Start 32; Stop 56
aaatgtcattcctaggcgtatttat

SEQ ID NO: 393368 - DNA, 25 bp, Artificial
  probe
  misc_feature (1)..(25): SEQ ID NO: 4889; WAN024DTC; Start 69; Stop 93
tggaaaacatgagtattcagccagt

SEQ ID NO: 393369 - DNA, 25 bp, Artificial
  probe
  misc_feature (1)..(25): SEQ ID NO: 4889; WAN024DTC; Start 97; Stop 121
aaggagctgaatgaactcattttcc

SEQ ID NO: 393370 - DNA, 25 bp, Artificial
  probe
  misc_feature (1)..(25): SEQ ID NO: 4889; WAN024DTC; Start 100; Stop 124
gagctgaatgaactcattttccctc

SEQ ID NO: 393371 - DNA, 25 bp, Artificial
  probe
  misc_feature (1)..(25): SEQ ID NO: 4889; WAN024DTC; Start 12; Stop 36
aaacctagaaatgctacataaaatg

SEQ ID NO: 393372 - DNA, 25 bp, Artificial
  probe
  misc_feature (1)..(25): SEQ ID NO: 4890; WAN024G5D; Start 16; Stop 40
catagagaatacctgccttcatcca

SEQ ID NO: 393373 - DNA, 25 bp, Artificial
  probe
  misc_feature (1)..(25): SEQ ID NO: 4890; WAN024G5D; Start 32; Stop 56
cttcatccagttcagacagttgttc

SEQ ID NO: 393374 - DNA, 25 bp, Artificial
  probe
  misc_feature (1)..(25): SEQ ID NO: 4890; WAN024G5D; Start 17; Stop 41
atagagaatacctgccttcatccag

SEQ ID NO: 393375 - DNA, 25 bp, Artificial
  probe
  misc_feature (1)..(25): SEQ ID NO: 4890; WAN024G5D; Start 177; Stop 201
tcataggcttgaatccaacggtatt

SEQ ID NO: 393376 - DNA, 25 bp, Artificial
  probe
  misc_feature (1)..(25): SEQ ID NO: 4890; WAN024G5D; Start 176; Stop 200
ctcataggcttgaatccaacggtat

SEQ ID NO: 393377 - DNA, 25 bp, Artificial
  probe
  misc_feature (1)..(25): SEQ ID NO: 4890; WAN024G5D; Start 36; Stop 60
atccagttcagacagttgttccatc

SEQ ID NO: 393378 - DNA, 25 bp, Artificial
  probe
  misc_feature (1)..(25): SEQ ID NO: 4890; WAN024G5D; Start 170; Stop 194
aatgtcctcataggcttgaatccaa

SEQ ID NO: 393379 - DNA, 25 bp, Artificial
  probe
  misc_feature (1)..(25): SEQ ID NO: 4890; WAN024G5D; Start 35; Stop 59
catccagttcagacagttgttccat

SEQ ID NO: 393380 - DNA, 25 bp, Artificial
  probe
  misc_feature (1)..(25): SEQ ID NO: 4890; WAN024G5D; Start 33; Stop 57
ttcatccagttcagacagttgttcc

SEQ ID NO: 393381 - DNA, 25 bp, Artificial
  probe
  misc_feature (1)..(25): SEQ ID NO: 4890; WAN024G5D; Start 31; Stop 55
ccttcatccagttcagacagttgtt

SEQ ID NO: 393382 - DNA, 25 bp, Artificial
  probe
  misc_feature (1)..(25): SEQ ID NO: 4890; WAN024G5D; Start 98; Stop 122
aaacaaatcacccaacattccttct

SEQ ID NO: 393383 - DNA, 25 bp, Artificial
  probe
  misc_feature (1)..(25): SEQ ID NO: 4890; WAN024G5D; Start 97; Stop 121
caaacaaatcacccaacattccttc

SEQ ID NO: 393384 - DNA, 25 bp, Artificial
  probe
  misc_feature (1)..(25): SEQ ID NO: 4890; WAN024G5D; Start 18; Stop 42
tagagaatacctgccttcatccagt

SEQ ID NO: 393385 - DNA, 25 bp, Artificial
  probe
  misc_feature (1)..(25): SEQ ID NO: 4890; WAN024G5D; Start 92; Stop 116
aactccaaacaaatcacccaacatt

SEQ ID NO: 393386 - DNA, 25 bp, Artificial
  probe
  misc_feature (1)..(25): SEQ ID NO: 4890; WAN024G5D; Start 102; Stop 126
aaatcacccaacattccttctgaaa

SEQ ID NO: 393387 - DNA, 25 bp, Artificial
  probe
  misc_feature (1)..(25): SEQ ID NO: 4890; WAN024G5D; Start 99; Stop 123
aacaaatcacccaacattccttctg

SEQ ID NO: 393388 - DNA, 25 bp, Artificial
  probe
  misc_feature (1)..(25): SEQ ID NO: 4890; WAN024G5D; Start 178; Stop 202
cataggcttgaatccaacggtattt

SEQ ID NO: 393389 - DNA, 25 bp, Artificial
  probe
  misc_feature (1)..(25): SEQ ID NO: 4890; WAN024G5D; Start 171; Stop 195
atgtcctcataggcttgaatccaac

SEQ ID NO: 393390 - DNA, 25 bp, Artificial
  probe
  misc_feature (1)..(25): SEQ ID NO: 4890; WAN024G5D; Start 169; Stop 193
caatgtcctcataggcttgaatcca

SEQ ID NO: 393391 - DNA, 25 bp, Artificial
  probe
  misc_feature (1)..(25): SEQ ID NO: 4890; WAN024G5D; Start 83; Stop 107
ttcaaagccaactccaaacaaatca

SEQ ID NO: 393392 - DNA, 25 bp, Artificial
  probe
  misc_feature (1)..(25): SEQ ID NO: 4890; WAN024G5D; Start 82; Stop 106
gttcaaagccaactccaaacaaatc

SEQ ID NO: 393393 - DNA, 25 bp, Artificial
  probe
  misc_feature (1)..(25): SEQ ID NO: 4890; WAN024G5D; Start 93; Stop 117
actccaaacaaatcacccaacattc

SEQ ID NO: 393394 - DNA, 25 bp, Artificial
  probe
  misc_feature (1)..(25): SEQ ID NO: 4890; WAN024G5D; Start 20; Stop 44
gagaatacctgccttcatccagttc

SEQ ID NO: 393395 - DNA, 25 bp, Artificial
  probe
  misc_feature (1)..(25): SEQ ID NO: 4890; WAN024G5D; Start 101; Stop 125
caaatcacccaacattccttctgaa

SEQ ID NO: 393396 - DNA, 25 bp, Artificial
  probe
  misc_feature (1)..(25): SEQ ID NO: 4890; WAN024G5D; Start 96; Stop 120
ccaaacaaatcacccaacattcctt

SEQ ID NO: 393397 - DNA, 25 bp, Artificial
  probe
  misc_feature (1)..(25): SEQ ID NO: 4890; WAN024G5D; Start 3; Stop 27
gaaacacggttcgcatagagaatac

SEQ ID NO: 393398 - DNA, 25 bp, Artificial
  probe
  misc_feature (1)..(25): SEQ ID NO: 4890; WAN024G5D; Start 91; Stop 115
caactccaaacaaatcacccaacat

SEQ ID NO: 393399 - DNA, 25 bp, Artificial
  probe
  misc_feature (1)..(25): SEQ ID NO: 4890; WAN024G5D; Start 22; Stop 46
gaatacctgccttcatccagttcag

SEQ ID NO: 393400 - DNA, 25 bp, Artificial
  probe
  misc_feature (1)..(25): SEQ ID NO: 4890; WAN024G5D; Start 2; Stop 26
tgaaacacggttcgcatagagaata

SEQ ID NO: 393401 - DNA, 25 bp, Artificial
  probe
  misc_feature (1)..(25): SEQ ID NO: 4890; WAN024G5D; Start 19; Stop 43
agagaatacctgccttcatccagtt

SEQ ID NO: 393402 - DNA, 25 bp, Artificial
  probe
  misc_feature (1)..(25): SEQ ID NO: 4890; WAN024G5D; Start 84; Stop 108
tcaaagccaactccaaacaaatcac

SEQ ID NO: 393403 - DNA, 25 bp, Artificial
  probe
  misc_feature (1)..(25): SEQ ID NO: 4890; WAN024G5D; Start 94; Stop 118
ctccaaacaaatcacccaacattcc

SEQ ID NO: 393404 - DNA, 25 bp, Artificial
  probe
  misc_feature (1)..(25): SEQ ID NO: 4890; WAN024G5D; Start 34; Stop 58
tcatccagttcagacagttgttcca

SEQ ID NO: 393405 - DNA, 25 bp, Artificial
  probe
  misc_feature (1)..(25): SEQ ID NO: 4892; WAN024FK5; Start 184; Stop 208
gaggttcaagttcaggtagtggatt

SEQ ID NO: 393406 - DNA, 25 bp, Artificial
  probe
  misc_feature (1)..(25): SEQ ID NO: 4892; WAN024FK5; Start 183; Stop 207
agaggttcaagttcaggtagtggat

SEQ ID NO: 393407 - DNA, 25 bp, Artificial
  probe
  misc_feature (1)..(25): SEQ ID NO: 4892; WAN024FK5; Start 186; Stop 210
ggttcaagttcaggtagtggattta

SEQ ID NO: 393408 - DNA, 25 bp, Artificial
  probe
  misc_feature (1)..(25): SEQ ID NO: 4892; WAN024FK5; Start 187; Stop 211
gttcaagttcaggtagtggatttag

SEQ ID NO: 393409 - DNA, 25 bp, Artificial
  probe
  misc_feature (1)..(25): SEQ ID NO: 4892; WAN024FK5; Start 181; Stop 205
gaagaggttcaagttcaggtagtgg

SEQ ID NO: 393410 - DNA, 25 bp, Artificial
  probe
  misc_feature (1)..(25): SEQ ID NO: 4892; WAN024FK5; Start 188; Stop 212
ttcaagttcaggtagtggatttaga

SEQ ID NO: 393411 - DNA, 25 bp, Artificial
  probe
  misc_feature (1)..(25): SEQ ID NO: 4892; WAN024FK5; Start 190; Stop 214
caagttcaggtagtggatttagatg

SEQ ID NO: 393412 - DNA, 25 bp, Artificial
  probe
  misc_feature (1)..(25): SEQ ID NO: 4892; WAN024FK5; Start 189; Stop 213
tcaagttcaggtagtggatttagat

SEQ ID NO: 393413 - DNA, 25 bp, Artificial
  probe
  misc_feature (1)..(25): SEQ ID NO: 4892; WAN024FK5; Start 182; Stop 206
aagaggttcaagttcaggtagtgga

SEQ ID NO: 393414 - DNA, 25 bp, Artificial
  probe
  misc_feature (1)..(25): SEQ ID NO: 4892; WAN024FK5; Start 85; Stop 109
tttgttgagttagagacgggtgata

SEQ ID NO: 393415 - DNA, 25 bp, Artificial
  probe
  misc_feature (1)..(25): SEQ ID NO: 4892; WAN024FK5; Start 191; Stop 215
aagttcaggtagtggatttagatga

SEQ ID NO: 393416 - DNA, 25 bp, Artificial
  probe
  misc_feature (1)..(25): SEQ ID NO: 4892; WAN024FK5; Start 185; Stop 209
aggttcaagttcaggtagtggattt

SEQ ID NO: 393417 - DNA, 25 bp, Artificial
  probe
  misc_feature (1)..(25): SEQ ID NO: 4892; WAN024FK5; Start 86; Stop 110
ttgttgagttagagacgggtgatac

SEQ ID NO: 393418 - DNA, 25 bp, Artificial
  probe
  misc_feature (1)..(25): SEQ ID NO: 4892; WAN024FK5; Start 178; Stop 202
gatgaagaggttcaagttcaggtag

SEQ ID NO: 393419 - DNA, 25 bp, Artificial
  probe
  misc_feature (1)..(25): SEQ ID NO: 4892; WAN024FK5; Start 84; Stop 108
ctttgttgagttagagacgggtgat

SEQ ID NO: 393420 - DNA, 25 bp, Artificial
  probe
  misc_feature (1)..(25): SEQ ID NO: 4892; WAN024FK5; Start 179; Stop 203
atgaagaggttcaagttcaggtagt

SEQ ID NO: 393421 - DNA, 25 bp, Artificial
  probe
  misc_feature (1)..(25): SEQ ID NO: 4892; WAN024FK5; Start 195; Stop 219
tcaggtagtggatttagatgaattt

SEQ ID NO: 393422 - DNA, 25 bp, Artificial
  probe
  misc_feature (1)..(25): SEQ ID NO: 4892; WAN024FK5; Start 180; Stop 204
tgaagaggttcaagttcaggtagtg

SEQ ID NO: 393423 - DNA, 25 bp, Artificial
  probe
  misc_feature (1)..(25): SEQ ID NO: 4892; WAN024FK5; Start 9; Stop 33
attgaaatcgaggactaagatgaaa

SEQ ID NO: 393424 - DNA, 25 bp, Artificial
  probe
  misc_feature (1)..(25): SEQ ID NO: 4892; WAN024FK5; Start 6; Stop 30
actattgaaatcgaggactaagatg

SEQ ID NO: 393425 - DNA, 25 bp, Artificial
  probe
  misc_feature (1)..(25): SEQ ID NO: 4892; WAN024FK5; Start 177; Stop 201
cgatgaagaggttcaagttcaggta

SEQ ID NO: 393426 - DNA, 25 bp, Artificial
  probe
  misc_feature (1)..(25): SEQ ID NO: 4892; WAN024FK5; Start 7; Stop 31
ctattgaaatcgaggactaagatga

SEQ ID NO: 393427 - DNA, 25 bp, Artificial
  probe
  misc_feature (1)..(25): SEQ ID NO: 4892; WAN024FK5; Start 333; Stop 357
aatgctaccaatctggactggagaa

SEQ ID NO: 393428 - DNA, 25 bp, Artificial
  probe
  misc_feature (1)..(25): SEQ ID NO: 4892; WAN024FK5; Start 75; Stop 99
ctacggtgcctttgttgagttagag

SEQ ID NO: 393429 - DNA, 25 bp, Artificial
  probe
  misc_feature (1)..(25): SEQ ID NO: 4892; WAN024FK5; Start 4; Stop 28
aaactattgaaatcgaggactaaga

SEQ ID NO: 393430 - DNA, 25 bp, Artificial
  probe
  misc_feature (1)..(25): SEQ ID NO: 4892; WAN024FK5; Start 18; Stop 42
gaggactaagatgaaaatcggtgat

SEQ ID NO: 393431 - DNA, 25 bp, Artificial
  probe
  misc_feature (1)..(25): SEQ ID NO: 4892; WAN024FK5; Start 19; Stop 43
aggactaagatgaaaatcggtgata

SEQ ID NO: 393432 - DNA, 25 bp, Artificial
  probe
  misc_feature (1)..(25): SEQ ID NO: 4892; WAN024FK5; Start 22; Stop 46
actaagatgaaaatcggtgataagc

SEQ ID NO: 393433 - DNA, 25 bp, Artificial
  probe
  misc_feature (1)..(25): SEQ ID NO: 4892; WAN024FK5; Start 3; Stop 27
gaaactattgaaatcgaggactaag

SEQ ID NO: 393434 - DNA, 25 bp, Artificial
  probe
  misc_feature (1)..(25): SEQ ID NO: 4892; WAN024FK5; Start 8; Stop 32
tattgaaatcgaggactaagatgaa

SEQ ID NO: 393435 - DNA, 25 bp, Artificial
  probe
  misc_feature (1)..(25): SEQ ID NO: 4892; WAN024FK5; Start 5; Stop 29
aactattgaaatcgaggactaagat

SEQ ID NO: 393436 - DNA, 25 bp, Artificial
  probe
  misc_feature (1)..(25): SEQ ID NO: 4892; WAN024FK5; Start 173; Stop 197
aagtcgatgaagaggttcaagttca

SEQ ID NO: 393437 - DNA, 25 bp, Artificial
  probe
  misc_feature (1)..(25): SEQ ID NO: 4892; WAN024FK5; Start 76; Stop 100
tacggtgcctttgttgagttagaga

SEQ ID NO: 393438 - DNA, 25 bp, Artificial
  probe
  misc_feature (1)..(25): SEQ ID NO: 4893; WAN024FWI; Start 74; Stop 98
taaagaaaaggaggaaagaggatgc

SEQ ID NO: 393439 - DNA, 25 bp, Artificial
  probe
  misc_feature (1)..(25): SEQ ID NO: 4893; WAN024FWI; Start 73; Stop 97
ataaagaaaaggaggaaagaggatg

SEQ ID NO: 393440 - DNA, 25 bp, Artificial
  probe
  misc_feature (1)..(25): SEQ ID NO: 4893; WAN024FWI; Start 18; Stop 42
tatactacaaactattgaaagcgtt

SEQ ID NO: 393441 - DNA, 25 bp, Artificial
  probe
  misc_feature (1)..(25): SEQ ID NO: 4893; WAN024FWI; Start 17; Stop 41
ttatactacaaactattgaaagcgt

SEQ ID NO: 393442 - DNA, 25 bp, Artificial
  probe
  misc_feature (1)..(25): SEQ ID NO: 4893; WAN024FWI; Start 71; Stop 95
aaataaagaaaaggaggaaagagga

SEQ ID NO: 393443 - DNA, 25 bp, Artificial
  probe
  misc_feature (1)..(25): SEQ ID NO: 4893; WAN024FWI; Start 72; Stop 96
aataaagaaaaggaggaaagaggat

SEQ ID NO: 393444 - DNA, 25 bp, Artificial
  probe
  misc_feature (1)..(25): SEQ ID NO: 4893; WAN024FWI; Start 70; Stop 94
gaaataaagaaaaggaggaaagagg

SEQ ID NO: 393445 - DNA, 25 bp, Artificial
  probe
  misc_feature (1)..(25): SEQ ID NO: 4893; WAN024FWI; Start 19; Stop 43
atactacaaactattgaaagcgttt

SEQ ID NO: 393446 - DNA, 25 bp, Artificial
  probe
  misc_feature (1)..(25): SEQ ID NO: 4893; WAN024FWI; Start 75; Stop 99
aaagaaaaggaggaaagaggatgcc

SEQ ID NO: 393447 - DNA, 25 bp, Artificial
  probe
  misc_feature (1)..(25): SEQ ID NO: 4893; WAN024FWI; Start 69; Stop 93
agaaataaagaaaaggaggaaagag

SEQ ID NO: 393448 - DNA, 25 bp, Artificial
  probe
  misc_feature (1)..(25): SEQ ID NO: 4893; WAN024FWI; Start 16; Stop 40
attatactacaaactattgaaagcg

SEQ ID NO: 393449 - DNA, 25 bp, Artificial
  probe
  misc_feature (1)..(25): SEQ ID NO: 4893; WAN024FWI; Start 31; Stop 55
attgaaagcgttttaattttaaggt

SEQ ID NO: 393450 - DNA, 25 bp, Artificial
  probe
  misc_feature (1)..(25): SEQ ID NO: 4893; WAN024FWI; Start 76; Stop 100
aagaaaaggaggaaagaggatgcca

SEQ ID NO: 393451 - DNA, 25 bp, Artificial
  probe
  misc_feature (1)..(25): SEQ ID NO: 4893; WAN024FWI; Start 32; Stop 56
ttgaaagcgttttaattttaaggta

SEQ ID NO: 393452 - DNA, 25 bp, Artificial
  probe
  misc_feature (1)..(25): SEQ ID NO: 4893; WAN024FWI; Start 21; Stop 45
actacaaactattgaaagcgtttta

SEQ ID NO: 393453 - DNA, 25 bp, Artificial
  probe
  misc_feature (1)..(25): SEQ ID NO: 4893; WAN024FWI; Start 20; Stop 44
tactacaaactattgaaagcgtttt

SEQ ID NO: 393454 - DNA, 25 bp, Artificial
  probe
  misc_feature (1)..(25): SEQ ID NO: 4893; WAN024FWI; Start 64; Stop 88
ctcatagaaataaagaaaaggagga

SEQ ID NO: 393455 - DNA, 25 bp, Artificial
  probe
  misc_feature (1)..(25): SEQ ID NO: 4893; WAN024FWI; Start 63; Stop 87
tctcatagaaataaagaaaaggagg

SEQ ID NO: 393456 - DNA, 25 bp, Artificial
  probe
  misc_feature (1)..(25): SEQ ID NO: 4893; WAN024FWI; Start 33; Stop 57
tgaaagcgttttaattttaaggtat

SEQ ID NO: 393457 - DNA, 25 bp, Artificial
  probe
  misc_feature (1)..(25): SEQ ID NO: 4893; WAN024FWI; Start 68; Stop 92
tagaaataaagaaaaggaggaaaga

SEQ ID NO: 393458 - DNA, 25 bp, Artificial
  probe
  misc_feature (1)..(25): SEQ ID NO: 4893; WAN024FWI; Start 65; Stop 89
tcatagaaataaagaaaaggaggaa

SEQ ID NO: 393459 - DNA, 25 bp, Artificial
  probe
  misc_feature (1)..(25): SEQ ID NO: 4893; WAN024FWI; Start 77; Stop 101
agaaaaggaggaaagaggatgccac

SEQ ID NO: 393460 - DNA, 25 bp, Artificial
  probe
  misc_feature (1)..(25): SEQ ID NO: 4893; WAN024FWI; Start 24; Stop 48
acaaactattgaaagcgttttaatt

SEQ ID NO: 393461 - DNA, 25 bp, Artificial
  probe
  misc_feature (1)..(25): SEQ ID NO: 4893; WAN024FWI; Start 22; Stop 46
ctacaaactattgaaagcgttttaa

SEQ ID NO: 393462 - DNA, 25 bp, Artificial
  probe
  misc_feature (1)..(25): SEQ ID NO: 4893; WAN024FWI; Start 79; Stop 103
aaaaggaggaaagaggatgccacag

SEQ ID NO: 393463 - DNA, 25 bp, Artificial
  probe
  misc_feature (1)..(25): SEQ ID NO: 4893; WAN024FWI; Start 78; Stop 102
gaaaaggaggaaagaggatgccaca

SEQ ID NO: 393464 - DNA, 25 bp, Artificial
  probe
  misc_feature (1)..(25): SEQ ID NO: 4893; WAN024FWI; Start 66; Stop 90
catagaaataaagaaaaggaggaaa

SEQ ID NO: 393465 - DNA, 25 bp, Artificial
  probe
  misc_feature (1)..(25): SEQ ID NO: 4893; WAN024FWI; Start 30; Stop 54
tattgaaagcgttttaattttaagg

SEQ ID NO: 393466 - DNA, 25 bp, Artificial
  probe
  misc_feature (1)..(25): SEQ ID NO: 4893; WAN024FWI; Start 67; Stop 91
atagaaataaagaaaaggaggaaag

SEQ ID NO: 393467 - DNA, 25 bp, Artificial
  probe
  misc_feature (1)..(25): SEQ ID NO: 4893; WAN024FWI; Start 23; Stop 47
tacaaactattgaaagcgttttaat

SEQ ID NO: 393468 - DNA, 25 bp, Artificial
  probe
  misc_feature (1)..(25): SEQ ID NO: 4893; WAN024FWI; Start 25; Stop 49
caaactattgaaagcgttttaattt

SEQ ID NO: 393469 - DNA, 25 bp, Artificial
  probe
  misc_feature (1)..(25): SEQ ID NO: 4893; WAN024FWI; Start 26; Stop 50
aaactattgaaagcgttttaatttt

SEQ ID NO: 393470 - DNA, 25 bp, Artificial
  probe
  misc_feature (1)..(25): SEQ ID NO: 4894; WAN024CTM; Start 1256; Stop 1280
aagatcataccacagtcattcatgc

SEQ ID NO: 393471 - DNA, 25 bp, Artificial
  probe
  misc_feature (1)..(25): SEQ ID NO: 4894; WAN024CTM; Start 49; Stop 73
agactgactcgatccatgtatgatt

SEQ ID NO: 393472 - DNA, 25 bp, Artificial
  probe
  misc_feature (1)..(25): SEQ ID NO: 4894; WAN024CTM; Start 48; Stop 72
aagactgactcgatccatgtatgat

SEQ ID NO: 393473 - DNA, 25 bp, Artificial
  probe
  misc_feature (1)..(25): SEQ ID NO: 4894; WAN024CTM; Start 113; Stop 137
atgttgccactatatttctacctcg

SEQ ID NO: 393474 - DNA, 25 bp, Artificial
  probe
  misc_feature (1)..(25): SEQ ID NO: 4894; WAN024CTM; Start 120; Stop 144
cactatatttctacctcgctctgaa

SEQ ID NO: 393475 - DNA, 25 bp, Artificial
  probe
  misc_feature (1)..(25): SEQ ID NO: 4894; WAN024CTM; Start 702; Stop 726
tttcaatacctttaacgcccttcat

SEQ ID NO: 393476 - DNA, 25 bp, Artificial
  probe
  misc_feature (1)..(25): SEQ ID NO: 4894; WAN024CTM; Start 422; Stop 446
ctgaagatttggctctgacctataa

SEQ ID NO: 393477 - DNA, 25 bp, Artificial
  probe
  misc_feature (1)..(25): SEQ ID NO: 4894; WAN024CTM; Start 423; Stop 447
tgaagatttggctctgacctataac

SEQ ID NO: 393478 - DNA, 25 bp, Artificial
  probe
  misc_feature (1)..(25): SEQ ID NO: 4894; WAN024CTM; Start 885; Stop 909
acatttaggctacaatttccaaagt

SEQ ID NO: 393479 - DNA, 25 bp, Artificial
  probe
  misc_feature (1)..(25): SEQ ID NO: 4894; WAN024CTM; Start 119; Stop 143
ccactatatttctacctcgctctga

SEQ ID NO: 393480 - DNA, 25 bp, Artificial
  probe
  misc_feature (1)..(25): SEQ ID NO: 4894; WAN024CTM; Start 421; Stop 445
tctgaagatttggctctgacctata

SEQ ID NO: 393481 - DNA, 25 bp, Artificial
  probe
  misc_feature (1)..(25): SEQ ID NO: 4894; WAN024CTM; Start 888; Stop 912
tttaggctacaatttccaaagtgat

SEQ ID NO: 393482 - DNA, 25 bp, Artificial
  probe
  misc_feature (1)..(25): SEQ ID NO: 4894; WAN024CTM; Start 887; Stop 911
atttaggctacaatttccaaagtga

SEQ ID NO: 393483 - DNA, 25 bp, Artificial
  probe
  misc_feature (1)..(25): SEQ ID NO: 4894; WAN024CTM; Start 886; Stop 910
catttaggctacaatttccaaagtg

SEQ ID NO: 393484 - DNA, 25 bp, Artificial
  probe
  misc_feature (1)..(25): SEQ ID NO: 4894; WAN024CTM; Start 235; Stop 259
ttcaccaaacctcaagatacgacta

SEQ ID NO: 393485 - DNA, 25 bp, Artificial
  probe
  misc_feature (1)..(25): SEQ ID NO: 4894; WAN024CTM; Start 424; Stop 448
gaagatttggctctgacctataacc

SEQ ID NO: 393486 - DNA, 25 bp, Artificial
  probe
  misc_feature (1)..(25): SEQ ID NO: 4894; WAN024CTM; Start 112; Stop 136
aatgttgccactatatttctacctc

SEQ ID NO: 393487 - DNA, 25 bp, Artificial
  probe
  misc_feature (1)..(25): SEQ ID NO: 4894; WAN024CTM; Start 890; Stop 914
taggctacaatttccaaagtgatac

SEQ ID NO: 393488 - DNA, 25 bp, Artificial
  probe
  misc_feature (1)..(25): SEQ ID NO: 4894; WAN024CTM; Start 966; Stop 990
agccatcaacgacatcactttaatt

SEQ ID NO: 393489 - DNA, 25 bp, Artificial
  probe
  misc_feature (1)..(25): SEQ ID NO: 4894; WAN024CTM; Start 892; Stop 916
ggctacaatttccaaagtgatactc

SEQ ID NO: 393490 - DNA, 25 bp, Artificial
  probe
  misc_feature (1)..(25): SEQ ID NO: 4894; WAN024CTM; Start 891; Stop 915
aggctacaatttccaaagtgatact

SEQ ID NO: 393491 - DNA, 25 bp, Artificial
  probe
  misc_feature (1)..(25): SEQ ID NO: 4894; WAN024CTM; Start 1133; Stop 1157
tcaaagaaatgaagggaagtagacg

SEQ ID NO: 393492 - DNA, 25 bp, Artificial
  probe
  misc_feature (1)..(25): SEQ ID NO: 4894; WAN024CTM; Start 976; Stop 1000
gacatcactttaattgccagagtaa

SEQ ID NO: 393493 - DNA, 25 bp, Artificial
  probe
  misc_feature (1)..(25): SEQ ID NO: 4894; WAN024CTM; Start 1257; Stop 1281
agatcataccacagtcattcatgcc

SEQ ID NO: 393494 - DNA, 25 bp, Artificial
  probe
  misc_feature (1)..(25): SEQ ID NO: 4894; WAN024CTM; Start 965; Stop 989
gagccatcaacgacatcactttaat

SEQ ID NO: 393495 - DNA, 25 bp, Artificial
  probe
  misc_feature (1)..(25): SEQ ID NO: 4894; WAN024CTM; Start 893; Stop 917
gctacaatttccaaagtgatactct

SEQ ID NO: 393496 - DNA, 25 bp, Artificial
  probe
  misc_feature (1)..(25): SEQ ID NO: 4894; WAN024CTM; Start 201; Stop 225
aatttatgacgctgaaataactccc

SEQ ID NO: 393497 - DNA, 25 bp, Artificial
  probe
  misc_feature (1)..(25): SEQ ID NO: 4894; WAN024CTM; Start 1179; Stop 1203
ccgtcaagtagccatgtatttatct

SEQ ID NO: 393498 - DNA, 25 bp, Artificial
  probe
  misc_feature (1)..(25): SEQ ID NO: 4894; WAN024CTM; Start 884; Stop 908
aacatttaggctacaatttccaaag

SEQ ID NO: 393499 - DNA, 25 bp, Artificial
  probe
  misc_feature (1)..(25): SEQ ID NO: 4894; WAN024CTM; Start 1132; Stop 1156
atcaaagaaatgaagggaagtagac

SEQ ID NO: 393500 - DNA, 25 bp, Artificial
  probe
  misc_feature (1)..(25): SEQ ID NO: 4894; WAN024CTM; Start 977; Stop 1001
acatcactttaattgccagagtaaa

SEQ ID NO: 393501 - DNA, 25 bp, Artificial
  probe
  misc_feature (1)..(25): SEQ ID NO: 4894; WAN024CTM; Start 975; Stop 999
cgacatcactttaattgccagagta

SEQ ID NO: 393502 - DNA, 25 bp, Artificial
  probe
  misc_feature (1)..(25): SEQ ID NO: 4894; WAN024CTM; Start 969; Stop 993
catcaacgacatcactttaattgcc

SEQ ID NO: 393503 - DNA, 25 bp, Artificial
  probe
  misc_feature (1)..(25): SEQ ID NO: 4895; WAN024CZA; Start 69; Stop 93
cattaccttccgtgatattagtcct

SEQ ID NO: 393504 - DNA, 25 bp, Artificial
  probe
  misc_feature (1)..(25): SEQ ID NO: 4895; WAN024CZA; Start 70; Stop 94
attaccttccgtgatattagtcctt

SEQ ID NO: 393505 - DNA, 25 bp, Artificial
  probe
  misc_feature (1)..(25): SEQ ID NO: 4895; WAN024CZA; Start 68; Stop 92
gcattaccttccgtgatattagtcc

SEQ ID NO: 393506 - DNA, 25 bp, Artificial
  probe
  misc_feature (1)..(25): SEQ ID NO: 4895; WAN024CZA; Start 67; Stop 91
ggcattaccttccgtgatattagtc

SEQ ID NO: 393507 - DNA, 25 bp, Artificial
  probe
  misc_feature (1)..(25): SEQ ID NO: 4895; WAN024CZA; Start 457; Stop 481
cttgttgaattggatgaattgaacg

SEQ ID NO: 393508 - DNA, 25 bp, Artificial
  probe
  misc_feature (1)..(25): SEQ ID NO: 4895; WAN024CZA; Start 456; Stop 480
ccttgttgaattggatgaattgaac

SEQ ID NO: 393509 - DNA, 25 bp, Artificial
  probe
  misc_feature (1)..(25): SEQ ID NO: 4895; WAN024CZA; Start 458; Stop 482
ttgttgaattggatgaattgaacgg

SEQ ID NO: 393510 - DNA, 25 bp, Artificial
  probe
  misc_feature (1)..(25): SEQ ID NO: 4895; WAN024CZA; Start 452; Stop 476
ccttccttgttgaattggatgaatt

SEQ ID NO: 393511 - DNA, 25 bp, Artificial
  probe
  misc_feature (1)..(25): SEQ ID NO: 4895; WAN024CZA; Start 455; Stop 479
tccttgttgaattggatgaattgaa

SEQ ID NO: 393512 - DNA, 25 bp, Artificial
  probe
  misc_feature (1)..(25): SEQ ID NO: 4895; WAN024CZA; Start 454; Stop 478
ttccttgttgaattggatgaattga

SEQ ID NO: 393513 - DNA, 25 bp, Artificial
  probe
  misc_feature (1)..(25): SEQ ID NO: 4895; WAN024CZA; Start 453; Stop 477
cttccttgttgaattggatgaattg

SEQ ID NO: 393514 - DNA, 25 bp, Artificial
  probe
  misc_feature (1)..(25): SEQ ID NO: 4895; WAN024CZA; Start 66; Stop 90
aggcattaccttccgtgatattagt

SEQ ID NO: 393515 - DNA, 25 bp, Artificial
  probe
  misc_feature (1)..(25): SEQ ID NO: 4895; WAN024CZA; Start 396; Stop 420
tgttaaggcaactatcgagatgatt

SEQ ID NO: 393516 - DNA, 25 bp, Artificial
  probe
  misc_feature (1)..(25): SEQ ID NO: 4895; WAN024CZA; Start 395; Stop 419
ctgttaaggcaactatcgagatgat

SEQ ID NO: 393517 - DNA, 25 bp, Artificial
  probe
  misc_feature (1)..(25): SEQ ID NO: 4895; WAN024CZA; Start 399; Stop 423
taaggcaactatcgagatgattgaa

SEQ ID NO: 393518 - DNA, 25 bp, Artificial
  probe
  misc_feature (1)..(25): SEQ ID NO: 4895; WAN024CZA; Start 398; Stop 422
ttaaggcaactatcgagatgattga

SEQ ID NO: 393519 - DNA, 25 bp, Artificial
  probe
  misc_feature (1)..(25): SEQ ID NO: 4895; WAN024CZA; Start 397; Stop 421
gttaaggcaactatcgagatgattg

SEQ ID NO: 393520 - DNA, 25 bp, Artificial
  probe
  misc_feature (1)..(25): SEQ ID NO: 4895; WAN024CZA; Start 387; Stop 411
aggtggaactgttaaggcaactatc

SEQ ID NO: 393521 - DNA, 25 bp, Artificial
  probe
  misc_feature (1)..(25): SEQ ID NO: 4895; WAN024CZA; Start 392; Stop 416
gaactgttaaggcaactatcgagat

SEQ ID NO: 393522 - DNA, 25 bp, Artificial
  probe
  misc_feature (1)..(25): SEQ ID NO: 4895; WAN024CZA; Start 74; Stop 98
ccttccgtgatattagtcctttgat

SEQ ID NO: 393523 - DNA, 25 bp, Artificial
  probe
  misc_feature (1)..(25): SEQ ID NO: 4895; WAN024CZA; Start 72; Stop 96
taccttccgtgatattagtcctttg

SEQ ID NO: 393524 - DNA, 25 bp, Artificial
  probe
  misc_feature (1)..(25): SEQ ID NO: 4895; WAN024CZA; Start 393; Stop 417
aactgttaaggcaactatcgagatg

SEQ ID NO: 393525 - DNA, 25 bp, Artificial
  probe
  misc_feature (1)..(25): SEQ ID NO: 4895; WAN024CZA; Start 83; Stop 107
atattagtcctttgatggctgatgg

SEQ ID NO: 393526 - DNA, 25 bp, Artificial
  probe
  misc_feature (1)..(25): SEQ ID NO: 4895; WAN024CZA; Start 80; Stop 104
gtgatattagtcctttgatggctga

SEQ ID NO: 393527 - DNA, 25 bp, Artificial
  probe
  misc_feature (1)..(25): SEQ ID NO: 4895; WAN024CZA; Start 76; Stop 100
ttccgtgatattagtcctttgatgg

SEQ ID NO: 393528 - DNA, 25 bp, Artificial
  probe
  misc_feature (1)..(25): SEQ ID NO: 4895; WAN024CZA; Start 94; Stop 118
ttgatggctgatggaaatgcttata

SEQ ID NO: 393529 - DNA, 25 bp, Artificial
  probe
  misc_feature (1)..(25): SEQ ID NO: 4895; WAN024CZA; Start 81; Stop 105
tgatattagtcctttgatggctgat

SEQ ID NO: 393530 - DNA, 25 bp, Artificial
  probe
  misc_feature (1)..(25): SEQ ID NO: 4895; WAN024CZA; Start 82; Stop 106
gatattagtcctttgatggctgatg

SEQ ID NO: 393531 - DNA, 25 bp, Artificial
  probe
  misc_feature (1)..(25): SEQ ID NO: 4895; WAN024CZA; Start 75; Stop 99
cttccgtgatattagtcctttgatg

SEQ ID NO: 393532 - DNA, 25 bp, Artificial
  probe
  misc_feature (1)..(25): SEQ ID NO: 4895; WAN024CZA; Start 354; Stop 378
acgtgttcttattgtagatgacctt

SEQ ID NO: 393533 - DNA, 25 bp, Artificial
  probe
  misc_feature (1)..(25): SEQ ID NO: 4895; WAN024CZA; Start 353; Stop 377
aacgtgttcttattgtagatgacct

SEQ ID NO: 393534 - DNA, 25 bp, Artificial
  probe
  misc_feature (1)..(25): SEQ ID NO: 4895; WAN024CZA; Start 71; Stop 95
ttaccttccgtgatattagtccttt

SEQ ID NO: 393535 - DNA, 25 bp, Artificial
  probe
  misc_feature (1)..(25): SEQ ID NO: 4895; WAN024CZA; Start 95; Stop 119
tgatggctgatggaaatgcttatag

SEQ ID NO: 393536 - DNA, 25 bp, Artificial
  probe
  misc_feature (1)..(25): SEQ ID NO: 4896; WAN024CY6; Start 203; Stop 227
acactgagcagattgatcttgatag

SEQ ID NO: 393537 - DNA, 25 bp, Artificial
  probe
  misc_feature (1)..(25): SEQ ID NO: 4896; WAN024CY6; Start 202; Stop 226
gacactgagcagattgatcttgata

SEQ ID NO: 393538 - DNA, 25 bp, Artificial
  probe
  misc_feature (1)..(25): SEQ ID NO: 4896; WAN024CY6; Start 204; Stop 228
cactgagcagattgatcttgatagc

SEQ ID NO: 393539 - DNA, 25 bp, Artificial
  probe
  misc_feature (1)..(25): SEQ ID NO: 4896; WAN024CY6; Start 181; Stop 205
aacattgattacttgctcctggaca

SEQ ID NO: 393540 - DNA, 25 bp, Artificial
  probe
  misc_feature (1)..(25): SEQ ID NO: 4896; WAN024CY6; Start 178; Stop 202
ctaaacattgattacttgctcctgg

SEQ ID NO: 393541 - DNA, 25 bp, Artificial
  probe
  misc_feature (1)..(25): SEQ ID NO: 4896; WAN024CY6; Start 510; Stop 534
tagagctgaagaactcgttaatgtt

SEQ ID NO: 393542 - DNA, 25 bp, Artificial
  probe
  misc_feature (1)..(25): SEQ ID NO: 4896; WAN024CY6; Start 502; Stop 526
aataaggatagagctgaagaactcg

SEQ ID NO: 393543 - DNA, 25 bp, Artificial
  probe
  misc_feature (1)..(25): SEQ ID NO: 4896; WAN024CY6; Start 509; Stop 533
atagagctgaagaactcgttaatgt

SEQ ID NO: 393544 - DNA, 25 bp, Artificial
  probe
  misc_feature (1)..(25): SEQ ID NO: 4896; WAN024CY6; Start 507; Stop 531
ggatagagctgaagaactcgttaat

SEQ ID NO: 393545 - DNA, 25 bp, Artificial
  probe
  misc_feature (1)..(25): SEQ ID NO: 4896; WAN024CY6; Start 508; Stop 532
gatagagctgaagaactcgttaatg

SEQ ID NO: 393546 - DNA, 25 bp, Artificial
  probe
  misc_feature (1)..(25): SEQ ID NO: 4896; WAN024CY6; Start 177; Stop 201
tctaaacattgattacttgctcctg

SEQ ID NO: 393547 - DNA, 25 bp, Artificial
  probe
  misc_feature (1)..(25): SEQ ID NO: 4896; WAN024CY6; Start 503; Stop 527
ataaggatagagctgaagaactcgt

SEQ ID NO: 393548 - DNA, 25 bp, Artificial
  probe
  misc_feature (1)..(25): SEQ ID NO: 4896; WAN024CY6; Start 184; Stop 208
attgattacttgctcctggacactg

SEQ ID NO: 393549 - DNA, 25 bp, Artificial
  probe
  misc_feature (1)..(25): SEQ ID NO: 4896; WAN024CY6; Start 183; Stop 207
cattgattacttgctcctggacact

SEQ ID NO: 393550 - DNA, 25 bp, Artificial
  probe
  misc_feature (1)..(25): SEQ ID NO: 4896; WAN024CY6; Start 179; Stop 203
taaacattgattacttgctcctgga

SEQ ID NO: 393551 - DNA, 25 bp, Artificial
  probe
  misc_feature (1)..(25): SEQ ID NO: 4896; WAN024CY6; Start 506; Stop 530
aggatagagctgaagaactcgttaa

SEQ ID NO: 393552 - DNA, 25 bp, Artificial
  probe
  misc_feature (1)..(25): SEQ ID NO: 4896; WAN024CY6; Start 505; Stop 529
aaggatagagctgaagaactcgtta

SEQ ID NO: 393553 - DNA, 25 bp, Artificial
  probe
  misc_feature (1)..(25): SEQ ID NO: 4896; WAN024CY6; Start 504; Stop 528
taaggatagagctgaagaactcgtt

SEQ ID NO: 393554 - DNA, 25 bp, Artificial
  probe
  misc_feature (1)..(25): SEQ ID NO: 4896; WAN024CY6; Start 524; Stop 548
tcgttaatgttcccataattccact

SEQ ID NO: 393555 - DNA, 25 bp, Artificial
  probe
  misc_feature (1)..(25): SEQ ID NO: 4896; WAN024CY6; Start 523; Stop 547
ctcgttaatgttcccataattccac

SEQ ID NO: 393556 - DNA, 25 bp, Artificial
  probe
  misc_feature (1)..(25): SEQ ID NO: 4896; WAN024CY6; Start 522; Stop 546
actcgttaatgttcccataattcca

SEQ ID NO: 393557 - DNA, 25 bp, Artificial
  probe
  misc_feature (1)..(25): SEQ ID NO: 4896; WAN024CY6; Start 521; Stop 545
aactcgttaatgttcccataattcc

SEQ ID NO: 393558 - DNA, 25 bp, Artificial
  probe
  misc_feature (1)..(25): SEQ ID NO: 4896; WAN024CY6; Start 246; Stop 270
aattatcatcggtggtggaaatacg

SEQ ID NO: 393559 - DNA, 25 bp, Artificial
  probe
  misc_feature (1)..(25): SEQ ID NO: 4896; WAN024CY6; Start 182; Stop 206
acattgattacttgctcctggacac

SEQ ID NO: 393560 - DNA, 25 bp, Artificial
  probe
  misc_feature (1)..(25): SEQ ID NO: 4896; WAN024CY6; Start 201; Stop 225
ggacactgagcagattgatcttgat

SEQ ID NO: 393561 - DNA, 25 bp, Artificial
  probe
  misc_feature (1)..(25): SEQ ID NO: 4896; WAN024CY6; Start 525; Stop 549
cgttaatgttcccataattccacta

SEQ ID NO: 393562 - DNA, 25 bp, Artificial
  probe
  misc_feature (1)..(25): SEQ ID NO: 4896; WAN024CY6; Start 180; Stop 204
aaacattgattacttgctcctggac

SEQ ID NO: 393563 - DNA, 25 bp, Artificial
  probe
  misc_feature (1)..(25): SEQ ID NO: 4896; WAN024CY6; Start 176; Stop 200
atctaaacattgattacttgctcct

SEQ ID NO: 393564 - DNA, 25 bp, Artificial
  probe
  misc_feature (1)..(25): SEQ ID NO: 4896; WAN024CY6; Start 531; Stop 555
tgttcccataattccactaaatgat

SEQ ID NO: 393565 - DNA, 25 bp, Artificial
  probe
  misc_feature (1)..(25): SEQ ID NO: 4896; WAN024CY6; Start 530; Stop 554
atgttcccataattccactaaatga

SEQ ID NO: 393566 - DNA, 25 bp, Artificial
  probe
  misc_feature (1)..(25): SEQ ID NO: 4896; WAN024CY6; Start 245; Stop 269
taattatcatcggtggtggaaatac

SEQ ID NO: 393567 - DNA, 25 bp, Artificial
  probe
  misc_feature (1)..(25): SEQ ID NO: 4896; WAN024CY6; Start 499; Stop 523
gcaaataaggatagagctgaagaac

SEQ ID NO: 393568 - DNA, 25 bp, Artificial
  probe
  misc_feature (1)..(25): SEQ ID NO: 4896; WAN024CY6; Start 185; Stop 209
ttgattacttgctcctggacactga

SEQ ID NO: 393569 - DNA, 25 bp, Artificial
  probe
  misc_feature (1)..(25): SEQ ID NO: 4897; WAN024GDH; Start 440; Stop 464
caatcttggctgttgattctcttaa

SEQ ID NO: 393570 - DNA, 25 bp, Artificial
  probe
  misc_feature (1)..(25): SEQ ID NO: 4897; WAN024GDH; Start 76; Stop 100
ttgcgtcgtacagatacttctacaa

SEQ ID NO: 393571 - DNA, 25 bp, Artificial
  probe
  misc_feature (1)..(25): SEQ ID NO: 4897; WAN024GDH; Start 529; Stop 553
cttcaagaagctcatccagatgtag

SEQ ID NO: 393572 - DNA, 25 bp, Artificial
  probe
  misc_feature (1)..(25): SEQ ID NO: 4897; WAN024GDH; Start 74; Stop 98
tcttgcgtcgtacagatacttctac

SEQ ID NO: 393573 - DNA, 25 bp, Artificial
  probe
  misc_feature (1)..(25): SEQ ID NO: 4897; WAN024GDH; Start 531; Stop 555
tcaagaagctcatccagatgtagaa

SEQ ID NO: 393574 - DNA, 25 bp, Artificial
  probe
  misc_feature (1)..(25): SEQ ID NO: 4897; WAN024GDH; Start 530; Stop 554
ttcaagaagctcatccagatgtaga

SEQ ID NO: 393575 - DNA, 25 bp, Artificial
  probe
  misc_feature (1)..(25): SEQ ID NO: 4897; WAN024GDH; Start 75; Stop 99
cttgcgtcgtacagatacttctaca

SEQ ID NO: 393576 - DNA, 25 bp, Artificial
  probe
  misc_feature (1)..(25): SEQ ID NO: 4897; WAN024GDH; Start 439; Stop 463
gcaatcttggctgttgattctctta

SEQ ID NO: 393577 - DNA, 25 bp, Artificial
  probe
  misc_feature (1)..(25): SEQ ID NO: 4897; WAN024GDH; Start 356; Stop 380
ttgaatacttggtgaaattgcctga

SEQ ID NO: 393578 - DNA, 25 bp, Artificial
  probe
  misc_feature (1)..(25): SEQ ID NO: 4897; WAN024GDH; Start 355; Stop 379
gttgaatacttggtgaaattgcctg

SEQ ID NO: 393579 - DNA, 25 bp, Artificial
  probe
  misc_feature (1)..(25): SEQ ID NO: 4897; WAN024GDH; Start 107; Stop 131
ttcgtgagctagtagatgagattgc

SEQ ID NO: 393580 - DNA, 25 bp, Artificial
  probe
  misc_feature (1)..(25): SEQ ID NO: 4897; WAN024GDH; Start 357; Stop 381
tgaatacttggtgaaattgcctgag

SEQ ID NO: 393581 - DNA, 25 bp, Artificial
  probe
  misc_feature (1)..(25): SEQ ID NO: 4897; WAN024GDH; Start 528; Stop 552
ccttcaagaagctcatccagatgta

SEQ ID NO: 393582 - DNA, 25 bp, Artificial
  probe
  misc_feature (1)..(25): SEQ ID NO: 4897; WAN024GDH; Start 73; Stop 97
atcttgcgtcgtacagatacttcta

SEQ ID NO: 393583 - DNA, 25 bp, Artificial
  probe
  misc_feature (1)..(25): SEQ ID NO: 4897; WAN024GDH; Start 354; Stop 378
agttgaatacttggtgaaattgcct

SEQ ID NO: 393584 - DNA, 25 bp, Artificial
  probe
  misc_feature (1)..(25): SEQ ID NO: 4897; WAN024GDH; Start 353; Stop 377
cagttgaatacttggtgaaattgcc

SEQ ID NO: 393585 - DNA, 25 bp, Artificial
  probe
  misc_feature (1)..(25): SEQ ID NO: 4897; WAN024GDH; Start 551; Stop 575
tagaaatctttacagcagccttgga

SEQ ID NO: 393586 - DNA, 25 bp, Artificial
  probe
  misc_feature (1)..(25): SEQ ID NO: 4897; WAN024GDH; Start 550; Stop 574
gtagaaatctttacagcagccttgg

SEQ ID NO: 393587 - DNA, 25 bp, Artificial
  probe
  misc_feature (1)..(25): SEQ ID NO: 4897; WAN024GDH; Start 71; Stop 95
caatcttgcgtcgtacagatacttc

SEQ ID NO: 393588 - DNA, 25 bp, Artificial
  probe
  misc_feature (1)..(25): SEQ ID NO: 4897; WAN024GDH; Start 358; Stop 382
gaatacttggtgaaattgcctgagg

SEQ ID NO: 393589 - DNA, 25 bp, Artificial
  probe
  misc_feature (1)..(25): SEQ ID NO: 4897; WAN024GDH; Start 72; Stop 96
aatcttgcgtcgtacagatacttct

SEQ ID NO: 393590 - DNA, 25 bp, Artificial
  probe
  misc_feature (1)..(25): SEQ ID NO: 4897; WAN024GDH; Start 106; Stop 130
tttcgtgagctagtagatgagattg

SEQ ID NO: 393591 - DNA, 25 bp, Artificial
  probe
  misc_feature (1)..(25): SEQ ID NO: 4897; WAN024GDH; Start 55; Stop 79
attcaacacaaattgtcaatcttgc

SEQ ID NO: 393592 - DNA, 25 bp, Artificial
  probe
  misc_feature (1)..(25): SEQ ID NO: 4897; WAN024GDH; Start 553; Stop 577
gaaatctttacagcagccttggatg

SEQ ID NO: 393593 - DNA, 25 bp, Artificial
  probe
  misc_feature (1)..(25): SEQ ID NO: 4897; WAN024GDH; Start 552; Stop 576
agaaatctttacagcagccttggat

SEQ ID NO: 393594 - DNA, 25 bp, Artificial
  probe
  misc_feature (1)..(25): SEQ ID NO: 4897; WAN024GDH; Start 70; Stop 94
tcaatcttgcgtcgtacagatactt

SEQ ID NO: 393595 - DNA, 25 bp, Artificial
  probe
  misc_feature (1)..(25): SEQ ID NO: 4897; WAN024GDH; Start 151; Stop 175
gtacttcgtgatcttccactagaag

SEQ ID NO: 393596 - DNA, 25 bp, Artificial
  probe
  misc_feature (1)..(25): SEQ ID NO: 4897; WAN024GDH; Start 49; Stop 73
ccactgattcaacacaaattgtcaa

SEQ ID NO: 393597 - DNA, 25 bp, Artificial
  probe
  misc_feature (1)..(25): SEQ ID NO: 4897; WAN024GDH; Start 65; Stop 89
aattgtcaatcttgcgtcgtacaga

SEQ ID NO: 393598 - DNA, 25 bp, Artificial
  probe
  misc_feature (1)..(25): SEQ ID NO: 4897; WAN024GDH; Start 534; Stop 558
agaagctcatccagatgtagaaatc

SEQ ID NO: 393599 - DNA, 25 bp, Artificial
  probe
  misc_feature (1)..(25): SEQ ID NO: 4897; WAN024GDH; Start 533; Stop 557
aagaagctcatccagatgtagaaat

SEQ ID NO: 393600 - DNA, 25 bp, Artificial
  probe
  misc_feature (1)..(25): SEQ ID NO: 4897; WAN024GDH; Start 324; Stop 348
tatgtaccgtgatgaagaaacactt

SEQ ID NO: 393601 - DNA, 25 bp, Artificial
  probe
  misc_feature (1)..(25): SEQ ID NO: 4897; WAN024GDH; Start 359; Stop 383
aatacttggtgaaattgcctgagga

SEQ ID NO: 393602 - DNA, 25 bp, Artificial
  probe
  misc_feature (1)..(25): SEQ ID NO: 4898; WAN024GH9; Start 81; Stop 105
agcaacttattcagatggtacaact

SEQ ID NO: 393603 - DNA, 25 bp, Artificial
  probe
  misc_feature (1)..(25): SEQ ID NO: 4898; WAN024GH9; Start 82; Stop 106
gcaacttattcagatggtacaactt

SEQ ID NO: 393604 - DNA, 25 bp, Artificial
  probe
  misc_feature (1)..(25): SEQ ID NO: 4898; WAN024GH9; Start 80; Stop 104
tagcaacttattcagatggtacaac

SEQ ID NO: 393605 - DNA, 25 bp, Artificial
  probe
  misc_feature (1)..(25): SEQ ID NO: 4898; WAN024GH9; Start 79; Stop 103
gtagcaacttattcagatggtacaa

SEQ ID NO: 393606 - DNA, 25 bp, Artificial
  probe
  misc_feature (1)..(25): SEQ ID NO: 4898; WAN024GH9; Start 77; Stop 101
ttgtagcaacttattcagatggtac

SEQ ID NO: 393607 - DNA, 25 bp, Artificial
  probe
  misc_feature (1)..(25): SEQ ID NO: 4898; WAN024GH9; Start 76; Stop 100
attgtagcaacttattcagatggta

SEQ ID NO: 393608 - DNA, 25 bp, Artificial
  probe
  misc_feature (1)..(25): SEQ ID NO: 4898; WAN024GH9; Start 75; Stop 99
tattgtagcaacttattcagatggt

SEQ ID NO: 393609 - DNA, 25 bp, Artificial
  probe
  misc_feature (1)..(25): SEQ ID NO: 4898; WAN024GH9; Start 78; Stop 102
tgtagcaacttattcagatggtaca

SEQ ID NO: 393610 - DNA, 25 bp, Artificial
  probe
  misc_feature (1)..(25): SEQ ID NO: 4898; WAN024GH9; Start 74; Stop 98
atattgtagcaacttattcagatgg

SEQ ID NO: 393611 - DNA, 25 bp, Artificial
  probe
  misc_feature (1)..(25): SEQ ID NO: 4898; WAN024GH9; Start 83; Stop 107
caacttattcagatggtacaactta

SEQ ID NO: 393612 - DNA, 25 bp, Artificial
  probe
  misc_feature (1)..(25): SEQ ID NO: 4898; WAN024GH9; Start 110; Stop 134
atgtaccgttaaatgatgtgacaaa

SEQ ID NO: 393613 - DNA, 25 bp, Artificial
  probe
  misc_feature (1)..(25): SEQ ID NO: 4898; WAN024GH9; Start 109; Stop 133
tatgtaccgttaaatgatgtgacaa

SEQ ID NO: 393614 - DNA, 25 bp, Artificial
  probe
  misc_feature (1)..(25): SEQ ID NO: 4898; WAN024GH9; Start 108; Stop 132
ttatgtaccgttaaatgatgtgaca

SEQ ID NO: 393615 - DNA, 25 bp, Artificial
  probe
  misc_feature (1)..(25): SEQ ID NO: 4898; WAN024GH9; Start 107; Stop 131
attatgtaccgttaaatgatgtgac

SEQ ID NO: 393616 - DNA, 25 bp, Artificial
  probe
  misc_feature (1)..(25): SEQ ID NO: 4898; WAN024GH9; Start 72; Stop 96
tgatattgtagcaacttattcagat

SEQ ID NO: 393617 - DNA, 25 bp, Artificial
  probe
  misc_feature (1)..(25): SEQ ID NO: 4898; WAN024GH9; Start 71; Stop 95
atgatattgtagcaacttattcaga

SEQ ID NO: 393618 - DNA, 25 bp, Artificial
  probe
  misc_feature (1)..(25): SEQ ID NO: 4898; WAN024GH9; Start 73; Stop 97
gatattgtagcaacttattcagatg

SEQ ID NO: 393619 - DNA, 25 bp, Artificial
  probe
  misc_feature (1)..(25): SEQ ID NO: 4898; WAN024GH9; Start 85; Stop 109
acttattcagatggtacaacttatt

SEQ ID NO: 393620 - DNA, 25 bp, Artificial
  probe
  misc_feature (1)..(25): SEQ ID NO: 4898; WAN024GH9; Start 84; Stop 108
aacttattcagatggtacaacttat

SEQ ID NO: 393621 - DNA, 25 bp, Artificial
  probe
  misc_feature (1)..(25): SEQ ID NO: 4898; WAN024GH9; Start 120; Stop 144
aaatgatgtgacaaaatatgcgagg

SEQ ID NO: 393622 - DNA, 25 bp, Artificial
  probe
  misc_feature (1)..(25): SEQ ID NO: 4898; WAN024GH9; Start 89; Stop 113
attcagatggtacaacttattatgt

SEQ ID NO: 393623 - DNA, 25 bp, Artificial
  probe
  misc_feature (1)..(25): SEQ ID NO: 4898; WAN024GH9; Start 67; Stop 91
gcaaatgatattgtagcaacttatt

SEQ ID NO: 393624 - DNA, 25 bp, Artificial
  probe
  misc_feature (1)..(25): SEQ ID NO: 4898; WAN024GH9; Start 119; Stop 143
taaatgatgtgacaaaatatgcgag

SEQ ID NO: 393625 - DNA, 25 bp, Artificial
  probe
  misc_feature (1)..(25): SEQ ID NO: 4898; WAN024GH9; Start 70; Stop 94
aatgatattgtagcaacttattcag

SEQ ID NO: 393626 - DNA, 25 bp, Artificial
  probe
  misc_feature (1)..(25): SEQ ID NO: 4898; WAN024GH9; Start 117; Stop 141
gttaaatgatgtgacaaaatatgcg

SEQ ID NO: 393627 - DNA, 25 bp, Artificial
  probe
  misc_feature (1)..(25): SEQ ID NO: 4898; WAN024GH9; Start 116; Stop 140
cgttaaatgatgtgacaaaatatgc

SEQ ID NO: 393628 - DNA, 25 bp, Artificial
  probe
  misc_feature (1)..(25): SEQ ID NO: 4898; WAN024GH9; Start 118; Stop 142
ttaaatgatgtgacaaaatatgcga

SEQ ID NO: 393629 - DNA, 25 bp, Artificial
  probe
  misc_feature (1)..(25): SEQ ID NO: 4898; WAN024GH9; Start 112; Stop 136
gtaccgttaaatgatgtgacaaaat

SEQ ID NO: 393630 - DNA, 25 bp, Artificial
  probe
  misc_feature (1)..(25): SEQ ID NO: 4898; WAN024GH9; Start 111; Stop 135
tgtaccgttaaatgatgtgacaaaa

SEQ ID NO: 393631 - DNA, 25 bp, Artificial
  probe
  misc_feature (1)..(25): SEQ ID NO: 4898; WAN024GH9; Start 106; Stop 130
tattatgtaccgttaaatgatgtga

SEQ ID NO: 393632 - DNA, 25 bp, Artificial
  probe
  misc_feature (1)..(25): SEQ ID NO: 4898; WAN024GH9; Start 114; Stop 138
accgttaaatgatgtgacaaaatat

SEQ ID NO: 393633 - DNA, 25 bp, Artificial
  probe
  misc_feature (1)..(25): SEQ ID NO: 4898; WAN024GH9; Start 121; Stop 145
aatgatgtgacaaaatatgcgaggc

SEQ ID NO: 393634 - DNA, 25 bp, Artificial
  probe
  misc_feature (1)..(25): SEQ ID NO: 4898; WAN024GH9; Start 123; Stop 147
tgatgtgacaaaatatgcgaggcta

SEQ ID NO: 393635 - DNA, 25 bp, Artificial
  probe
  misc_feature (1)..(25): SEQ ID NO: 4899; WAN024GMH; Start 492; Stop 516
ggctatcctaatcaacaatcctact

SEQ ID NO: 393636 - DNA, 25 bp, Artificial
  probe
  misc_feature (1)..(25): SEQ ID NO: 4899; WAN024GMH; Start 501; Stop 525
aatcaacaatcctacttactacggc

SEQ ID NO: 393637 - DNA, 25 bp, Artificial
  probe
  misc_feature (1)..(25): SEQ ID NO: 4899; WAN024GMH; Start 311; Stop 335
gcaaggcaggagataagattattct

SEQ ID NO: 393638 - DNA, 25 bp, Artificial
  probe
  misc_feature (1)..(25): SEQ ID NO: 4899; WAN024GMH; Start 319; Stop 343
ggagataagattattctgccacgaa

SEQ ID NO: 393639 - DNA, 25 bp, Artificial
  probe
  misc_feature (1)..(25): SEQ ID NO: 4899; WAN024GMH; Start 257; Stop 281
ttctaatgattggtggaacaacttc

SEQ ID NO: 393640 - DNA, 25 bp, Artificial
  probe
  misc_feature (1)..(25): SEQ ID NO: 4899; WAN024GMH; Start 503; Stop 527
tcaacaatcctacttactacggcat

SEQ ID NO: 393641 - DNA, 25 bp, Artificial
  probe
  misc_feature (1)..(25): SEQ ID NO: 4899; WAN024GMH; Start 502; Stop 526
atcaacaatcctacttactacggca

SEQ ID NO: 393642 - DNA, 25 bp, Artificial
  probe
  misc_feature (1)..(25): SEQ ID NO: 4899; WAN024GMH; Start 258; Stop 282
tctaatgattggtggaacaacttca

SEQ ID NO: 393643 - DNA, 25 bp, Artificial
  probe
  misc_feature (1)..(25): SEQ ID NO: 4899; WAN024GMH; Start 318; Stop 342
aggagataagattattctgccacga

SEQ ID NO: 393644 - DNA, 25 bp, Artificial
  probe
  misc_feature (1)..(25): SEQ ID NO: 4899; WAN024GMH; Start 411; Stop 435
tgtagatcctaagattggtatcgct

SEQ ID NO: 393645 - DNA, 25 bp, Artificial
  probe
  misc_feature (1)..(25): SEQ ID NO: 4899; WAN024GMH; Start 410; Stop 434
gtgtagatcctaagattggtatcgc

SEQ ID NO: 393646 - DNA, 25 bp, Artificial
  probe
  misc_feature (1)..(25): SEQ ID NO: 4899; WAN024GMH; Start 405; Stop 429
gatgagtgtagatcctaagattggt

SEQ ID NO: 393647 - DNA, 25 bp, Artificial
  probe
  misc_feature (1)..(25): SEQ ID NO: 4899; WAN024GMH; Start 493; Stop 517
gctatcctaatcaacaatcctactt

SEQ ID NO: 393648 - DNA, 25 bp, Artificial
  probe
  misc_feature (1)..(25): SEQ ID NO: 4899; WAN024GMH; Start 412; Stop 436
gtagatcctaagattggtatcgctt

SEQ ID NO: 393649 - DNA, 25 bp, Artificial
  probe
  misc_feature (1)..(25): SEQ ID NO: 4899; WAN024GMH; Start 409; Stop 433
agtgtagatcctaagattggtatcg

SEQ ID NO: 393650 - DNA, 25 bp, Artificial
  probe
  misc_feature (1)..(25): SEQ ID NO: 4899; WAN024GMH; Start 402; Stop 426
cgagatgagtgtagatcctaagatt

SEQ ID NO: 393651 - DNA, 25 bp, Artificial
  probe
  misc_feature (1)..(25): SEQ ID NO: 4899; WAN024GMH; Start 404; Stop 428
agatgagtgtagatcctaagattgg

SEQ ID NO: 393652 - DNA, 25 bp, Artificial
  probe
  misc_feature (1)..(25): SEQ ID NO: 4899; WAN024GMH; Start 500; Stop 524
taatcaacaatcctacttactacgg

SEQ ID NO: 393653 - DNA, 25 bp, Artificial
  probe
  misc_feature (1)..(25): SEQ ID NO: 4899; WAN024GMH; Start 483; Stop 507
agatgctaaggctatcctaatcaac

SEQ ID NO: 393654 - DNA, 25 bp, Artificial
  probe
  misc_feature (1)..(25): SEQ ID NO: 4899; WAN024GMH; Start 482; Stop 506
cagatgctaaggctatcctaatcaa

SEQ ID NO: 393655 - DNA, 25 bp, Artificial
  probe
  misc_feature (1)..(25): SEQ ID NO: 4899; WAN024GMH; Start 486; Stop 510
tgctaaggctatcctaatcaacaat

SEQ ID NO: 393656 - DNA, 25 bp, Artificial
  probe
  misc_feature (1)..(25): SEQ ID NO: 4899; WAN024GMH; Start 485; Stop 509
atgctaaggctatcctaatcaacaa

SEQ ID NO: 393657 - DNA, 25 bp, Artificial
  probe
  misc_feature (1)..(25): SEQ ID NO: 4899; WAN024GMH; Start 484; Stop 508
gatgctaaggctatcctaatcaaca

SEQ ID NO: 393658 - DNA, 25 bp, Artificial
  probe
  misc_feature (1)..(25): SEQ ID NO: 4899; WAN024GMH; Start 491; Stop 515
aggctatcctaatcaacaatcctac

SEQ ID NO: 393659 - DNA, 25 bp, Artificial
  probe
  misc_feature (1)..(25): SEQ ID NO: 4899; WAN024GMH; Start 312; Stop 336
caaggcaggagataagattattctg

SEQ ID NO: 393660 - DNA, 25 bp, Artificial
  probe
  misc_feature (1)..(25): SEQ ID NO: 4899; WAN024GMH; Start 479; Stop 503
atccagatgctaaggctatcctaat

SEQ ID NO: 393661 - DNA, 25 bp, Artificial
  probe
  misc_feature (1)..(25): SEQ ID NO: 4899; WAN024GMH; Start 317; Stop 341
caggagataagattattctgccacg

SEQ ID NO: 393662 - DNA, 25 bp, Artificial
  probe
  misc_feature (1)..(25): SEQ ID NO: 4899; WAN024GMH; Start 487; Stop 511
gctaaggctatcctaatcaacaatc

SEQ ID NO: 393663 - DNA, 25 bp, Artificial
  probe
  misc_feature (1)..(25): SEQ ID NO: 4899; WAN024GMH; Start 359; Stop 383
ctatcaatgcgttggttctatgtgg

SEQ ID NO: 393664 - DNA, 25 bp, Artificial
  probe
  misc_feature (1)..(25): SEQ ID NO: 4899; WAN024GMH; Start 490; Stop 514
aaggctatcctaatcaacaatccta

SEQ ID NO: 393665 - DNA, 25 bp, Artificial
  probe
  misc_feature (1)..(25): SEQ ID NO: 4899; WAN024GMH; Start 489; Stop 513
taaggctatcctaatcaacaatcct

SEQ ID NO: 393666 - DNA, 25 bp, Artificial
  probe
  misc_feature (1)..(25): SEQ ID NO: 4899; WAN024GMH; Start 407; Stop 431
tgagtgtagatcctaagattggtat

SEQ ID NO: 393667 - DNA, 25 bp, Artificial
  probe
  misc_feature (1)..(25): SEQ ID NO: 4899; WAN024GMH; Start 406; Stop 430
atgagtgtagatcctaagattggta

SEQ ID NO: 393668 - DNA, 25 bp, Artificial
  probe
  misc_feature (1)..(25): SEQ ID NO: 4900; WAN024GKG; Start 674; Stop 698
agtataatgatattgccttgcttgc

SEQ ID NO: 393669 - DNA, 25 bp, Artificial
  probe
  misc_feature (1)..(25): SEQ ID NO: 4900; WAN024GKG; Start 671; Stop 695
cgaagtataatgatattgccttgct

SEQ ID NO: 393670 - DNA, 25 bp, Artificial
  probe
  misc_feature (1)..(25): SEQ ID NO: 4900; WAN024GKG; Start 669; Stop 693
agcgaagtataatgatattgccttg

SEQ ID NO: 393671 - DNA, 25 bp, Artificial
  probe
  misc_feature (1)..(25): SEQ ID NO: 4900; WAN024GKG; Start 670; Stop 694
gcgaagtataatgatattgccttgc

SEQ ID NO: 393672 - DNA, 25 bp, Artificial
  probe
  misc_feature (1)..(25): SEQ ID NO: 4900; WAN024GKG; Start 545; Stop 569
ttaacgaaccaattacagcaagagg

SEQ ID NO: 393673 - DNA, 25 bp, Artificial
  probe
  misc_feature (1)..(25): SEQ ID NO: 4900; WAN024GKG; Start 485; Stop 509
gttgtcttagttggttagaatcaga

SEQ ID NO: 393674 - DNA, 25 bp, Artificial
  probe
  misc_feature (1)..(25): SEQ ID NO: 4900; WAN024GKG; Start 484; Stop 508
agttgtcttagttggttagaatcag

SEQ ID NO: 393675 - DNA, 25 bp, Artificial
  probe
  misc_feature (1)..(25): SEQ ID NO: 4900; WAN024GKG; Start 667; Stop 691
ttagcgaagtataatgatattgcct

SEQ ID NO: 393676 - DNA, 25 bp, Artificial
  probe
  misc_feature (1)..(25): SEQ ID NO: 4900; WAN024GKG; Start 668; Stop 692
tagcgaagtataatgatattgcctt

SEQ ID NO: 393677 - DNA, 25 bp, Artificial
  probe
  misc_feature (1)..(25): SEQ ID NO: 4900; WAN024GKG; Start 546; Stop 570
taacgaaccaattacagcaagagga

SEQ ID NO: 393678 - DNA, 25 bp, Artificial
  probe
  misc_feature (1)..(25): SEQ ID NO: 4900; WAN024GKG; Start 673; Stop 697
aagtataatgatattgccttgcttg

SEQ ID NO: 393679 - DNA, 25 bp, Artificial
  probe
  misc_feature (1)..(25): SEQ ID NO: 4900; WAN024GKG; Start 486; Stop 510
ttgtcttagttggttagaatcagaa

SEQ ID NO: 393680 - DNA, 25 bp, Artificial
  probe
  misc_feature (1)..(25): SEQ ID NO: 4900; WAN024GKG; Start 550; Stop 574
gaaccaattacagcaagaggagttg

SEQ ID NO: 393681 - DNA, 25 bp, Artificial
  probe
  misc_feature (1)..(25): SEQ ID NO: 4900; WAN024GKG; Start 672; Stop 696
gaagtataatgatattgccttgctt

SEQ ID NO: 393682 - DNA, 25 bp, Artificial
  probe
  misc_feature (1)..(25): SEQ ID NO: 4900; WAN024GKG; Start 703; Stop 727
ttgatgggacacgaaagtatagaaa

SEQ ID NO: 393683 - DNA, 25 bp, Artificial
  probe
  misc_feature (1)..(25): SEQ ID NO: 4900; WAN024GKG; Start 702; Stop 726
tttgatgggacacgaaagtatagaa

SEQ ID NO: 393684 - DNA, 25 bp, Artificial
  probe
  misc_feature (1)..(25): SEQ ID NO: 4900; WAN024GKG; Start 701; Stop 725
atttgatgggacacgaaagtataga

SEQ ID NO: 393685 - DNA, 25 bp, Artificial
  probe
  misc_feature (1)..(25): SEQ ID NO: 4900; WAN024GKG; Start 699; Stop 723
agatttgatgggacacgaaagtata

SEQ ID NO: 393686 - DNA, 25 bp, Artificial
  probe
  misc_feature (1)..(25): SEQ ID NO: 4900; WAN024GKG; Start 700; Stop 724
gatttgatgggacacgaaagtatag

SEQ ID NO: 393687 - DNA, 25 bp, Artificial
  probe
  misc_feature (1)..(25): SEQ ID NO: 4900; WAN024GKG; Start 483; Stop 507
tagttgtcttagttggttagaatca

SEQ ID NO: 393688 - DNA, 25 bp, Artificial
  probe
  misc_feature (1)..(25): SEQ ID NO: 4900; WAN024GKG; Start 704; Stop 728
tgatgggacacgaaagtatagaaac

SEQ ID NO: 393689 - DNA, 25 bp, Artificial
  probe
  misc_feature (1)..(25): SEQ ID NO: 4900; WAN024GKG; Start 544; Stop 568
tttaacgaaccaattacagcaagag

SEQ ID NO: 393690 - DNA, 25 bp, Artificial
  probe
  misc_feature (1)..(25): SEQ ID NO: 4900; WAN024GKG; Start 543; Stop 567
atttaacgaaccaattacagcaaga

SEQ ID NO: 393691 - DNA, 25 bp, Artificial
  probe
  misc_feature (1)..(25): SEQ ID NO: 4900; WAN024GKG; Start 698; Stop 722
cagatttgatgggacacgaaagtat

SEQ ID NO: 393692 - DNA, 25 bp, Artificial
  probe
  misc_feature (1)..(25): SEQ ID NO: 4900; WAN024GKG; Start 707; Stop 731
tgggacacgaaagtatagaaactac

SEQ ID NO: 393693 - DNA, 25 bp, Artificial
  probe
  misc_feature (1)..(25): SEQ ID NO: 4900; WAN024GKG; Start 705; Stop 729
gatgggacacgaaagtatagaaact

SEQ ID NO: 393694 - DNA, 25 bp, Artificial
  probe
  misc_feature (1)..(25): SEQ ID NO: 4900; WAN024GKG; Start 706; Stop 730
atgggacacgaaagtatagaaacta

SEQ ID NO: 393695 - DNA, 25 bp, Artificial
  probe
  misc_feature (1)..(25): SEQ ID NO: 4900; WAN024GKG; Start 164; Stop 188
tcaatttgcgactacaaggagtaaa

SEQ ID NO: 393696 - DNA, 25 bp, Artificial
  probe
  misc_feature (1)..(25): SEQ ID NO: 4900; WAN024GKG; Start 547; Stop 571
aacgaaccaattacagcaagaggag

SEQ ID NO: 393697 - DNA, 25 bp, Artificial
  probe
  misc_feature (1)..(25): SEQ ID NO: 4900; WAN024GKG; Start 45; Stop 69
aaatactgtgcgttcgtacctttat

SEQ ID NO: 393698 - DNA, 25 bp, Artificial
  probe
  misc_feature (1)..(25): SEQ ID NO: 4900; WAN024GKG; Start 394; Stop 418
aaagtagagcatgtagaaatcggtt

SEQ ID NO: 393699 - DNA, 25 bp, Artificial
  probe
  misc_feature (1)..(25): SEQ ID NO: 4900; WAN024GKG; Start 165; Stop 189
caatttgcgactacaaggagtaaat

SEQ ID NO: 393700 - DNA, 25 bp, Artificial
  probe
  misc_feature (1)..(25): SEQ ID NO: 4900; WAN024GKG; Start 395; Stop 419
aagtagagcatgtagaaatcggtta

SEQ ID NO: 393701 - DNA, 25 bp, Artificial
  probe
  misc_feature (1)..(25): SEQ ID NO: 4901; WAN024GH6; Start 196; Stop 220
gatgctaggtctgacaacttgaatg

SEQ ID NO: 393702 - DNA, 25 bp, Artificial
  probe
  misc_feature (1)..(25): SEQ ID NO: 4901; WAN024GH6; Start 195; Stop 219
agatgctaggtctgacaacttgaat

SEQ ID NO: 393703 - DNA, 25 bp, Artificial
  probe
  misc_feature (1)..(25): SEQ ID NO: 4901; WAN024GH6; Start 182; Stop 206
taatcttgcttacagatgctaggtc

SEQ ID NO: 393704 - DNA, 25 bp, Artificial
  probe
  misc_feature (1)..(25): SEQ ID NO: 4901; WAN024GH6; Start 181; Stop 205
ttaatcttgcttacagatgctaggt

SEQ ID NO: 393705 - DNA, 25 bp, Artificial
  probe
  misc_feature (1)..(25): SEQ ID NO: 4901; WAN024GH6; Start 197; Stop 221
atgctaggtctgacaacttgaatgt

SEQ ID NO: 393706 - DNA, 25 bp, Artificial
  probe
  misc_feature (1)..(25): SEQ ID NO: 4901; WAN024GH6; Start 180; Stop 204
cttaatcttgcttacagatgctagg

SEQ ID NO: 393707 - DNA, 25 bp, Artificial
  probe
  misc_feature (1)..(25): SEQ ID NO: 4901; WAN024GH6; Start 179; Stop 203
ccttaatcttgcttacagatgctag

SEQ ID NO: 393708 - DNA, 25 bp, Artificial
  probe
  misc_feature (1)..(25): SEQ ID NO: 4901; WAN024GH6; Start 50; Stop 74
ccgttaagctaaccaagttattgtc

SEQ ID NO: 393709 - DNA, 25 bp, Artificial
  probe
  misc_feature (1)..(25): SEQ ID NO: 4901; WAN024GH6; Start 53; Stop 77
ttaagctaaccaagttattgtctgc

SEQ ID NO: 393710 - DNA, 25 bp, Artificial
  probe
  misc_feature (1)..(25): SEQ ID NO: 4901; WAN024GH6; Start 51; Stop 75
cgttaagctaaccaagttattgtct

SEQ ID NO: 393711 - DNA, 25 bp, Artificial
  probe
  misc_feature (1)..(25): SEQ ID NO: 4901; WAN024GH6; Start 183; Stop 207
aatcttgcttacagatgctaggtct

SEQ ID NO: 393712 - DNA, 25 bp, Artificial
  probe
  misc_feature (1)..(25): SEQ ID NO: 4901; WAN024GH6; Start 54; Stop 78
taagctaaccaagttattgtctgca

SEQ ID NO: 393713 - DNA, 25 bp, Artificial
  probe
  misc_feature (1)..(25): SEQ ID NO: 4901; WAN024GH6; Start 52; Stop 76
gttaagctaaccaagttattgtctg

SEQ ID NO: 393714 - DNA, 25 bp, Artificial
  probe
  misc_feature (1)..(25): SEQ ID NO: 4901; WAN024GH6; Start 49; Stop 73
gccgttaagctaaccaagttattgt

SEQ ID NO: 393715 - DNA, 25 bp, Artificial
  probe
  misc_feature (1)..(25): SEQ ID NO: 4901; WAN024GH6; Start 47; Stop 71
gagccgttaagctaaccaagttatt

SEQ ID NO: 393716 - DNA, 25 bp, Artificial
  probe
  misc_feature (1)..(25): SEQ ID NO: 4901; WAN024GH6; Start 1; Stop 25
ttgaaagccgaactggtaaaggtta

SEQ ID NO: 393717 - DNA, 25 bp, Artificial
  probe
  misc_feature (1)..(25): SEQ ID NO: 4901; WAN024GH6; Start 34; Stop 58
gatgaatcctcaagagccgttaagc

SEQ ID NO: 393718 - DNA, 25 bp, Artificial
  probe
  misc_feature (1)..(25): SEQ ID NO: 4901; WAN024GH6; Start 48; Stop 72
agccgttaagctaaccaagttattg

SEQ ID NO: 393719 - DNA, 25 bp, Artificial
  probe
  misc_feature (1)..(25): SEQ ID NO: 4901; WAN024GH6; Start 178; Stop 202
cccttaatcttgcttacagatgcta

SEQ ID NO: 393720 - DNA, 25 bp, Artificial
  probe
  misc_feature (1)..(25): SEQ ID NO: 4901; WAN024GH6; Start 46; Stop 70
agagccgttaagctaaccaagttat

SEQ ID NO: 393721 - DNA, 25 bp, Artificial
  probe
  misc_feature (1)..(25): SEQ ID NO: 4901; WAN024GH6; Start 33; Stop 57
ggatgaatcctcaagagccgttaag

SEQ ID NO: 393722 - DNA, 25 bp, Artificial
  probe
  misc_feature (1)..(25): SEQ ID NO: 4901; WAN024GH6; Start 45; Stop 69
aagagccgttaagctaaccaagtta

SEQ ID NO: 393723 - DNA, 25 bp, Artificial
  probe
  misc_feature (1)..(25): SEQ ID NO: 4901; WAN024GH6; Start 191; Stop 215
ttacagatgctaggtctgacaactt

SEQ ID NO: 393724 - DNA, 25 bp, Artificial
  probe
  misc_feature (1)..(25): SEQ ID NO: 4901; WAN024GH6; Start 119; Stop 143
ctgcttccttgtcttttagttttgc

SEQ ID NO: 393725 - DNA, 25 bp, Artificial
  probe
  misc_feature (1)..(25): SEQ ID NO: 4901; WAN024GH6; Start 4; Stop 28
aaagccgaactggtaaaggttacat

SEQ ID NO: 393726 - DNA, 25 bp, Artificial
  probe
  misc_feature (1)..(25): SEQ ID NO: 4901; WAN024GH6; Start 37; Stop 61
gaatcctcaagagccgttaagctaa

SEQ ID NO: 393727 - DNA, 25 bp, Artificial
  probe
  misc_feature (1)..(25): SEQ ID NO: 4901; WAN024GH6; Start 118; Stop 142
actgcttccttgtcttttagttttg

SEQ ID NO: 393728 - DNA, 25 bp, Artificial
  probe
  misc_feature (1)..(25): SEQ ID NO: 4901; WAN024GH6; Start 117; Stop 141
cactgcttccttgtcttttagtttt

SEQ ID NO: 393729 - DNA, 25 bp, Artificial
  probe
  misc_feature (1)..(25): SEQ ID NO: 4901; WAN024GH6; Start 190; Stop 214
cttacagatgctaggtctgacaact

SEQ ID NO: 393730 - DNA, 25 bp, Artificial
  probe
  misc_feature (1)..(25): SEQ ID NO: 4901; WAN024GH6; Start 116; Stop 140
tcactgcttccttgtcttttagttt

SEQ ID NO: 393731 - DNA, 25 bp, Artificial
  probe
  misc_feature (1)..(25): SEQ ID NO: 4901; WAN024GH6; Start 38; Stop 62
aatcctcaagagccgttaagctaac

SEQ ID NO: 393732 - DNA, 25 bp, Artificial
  probe
  misc_feature (1)..(25): SEQ ID NO: 4901; WAN024GH6; Start 32; Stop 56
tggatgaatcctcaagagccgttaa

SEQ ID NO: 393733 - DNA, 25 bp, Artificial
  probe
  misc_feature (1)..(25): SEQ ID NO: 4901; WAN024GH6; Start 31; Stop 55
ttggatgaatcctcaagagccgtta

SEQ ID NO: 393734 - DNA, 25 bp, Artificial
  probe
  misc_feature (1)..(25): SEQ ID NO: 4902; WAN024ER7; Start 1122; Stop 1146
aagccgtgaagatggtattactaag

SEQ ID NO: 393735 - DNA, 25 bp, Artificial
  probe
  misc_feature (1)..(25): SEQ ID NO: 4902; WAN024ER7; Start 1129; Stop 1153
gaagatggtattactaaggctcgtc

SEQ ID NO: 393736 - DNA, 25 bp, Artificial
  probe
  misc_feature (1)..(25): SEQ ID NO: 4902; WAN024ER7; Start 1127; Stop 1151
gtgaagatggtattactaaggctcg

SEQ ID NO: 393737 - DNA, 25 bp, Artificial
  probe
  misc_feature (1)..(25): SEQ ID NO: 4902; WAN024ER7; Start 1126; Stop 1150
cgtgaagatggtattactaaggctc

SEQ ID NO: 393738 - DNA, 25 bp, Artificial
  probe
  misc_feature (1)..(25): SEQ ID NO: 4902; WAN024ER7; Start 333; Stop 357
tgtaacaggattgactcttattgct

SEQ ID NO: 393739 - DNA, 25 bp, Artificial
  probe
  misc_feature (1)..(25): SEQ ID NO: 4902; WAN024ER7; Start 328; Stop 352
gacgatgtaacaggattgactctta

SEQ ID NO: 393740 - DNA, 25 bp, Artificial
  probe
  misc_feature (1)..(25): SEQ ID NO: 4902; WAN024ER7; Start 329; Stop 353
acgatgtaacaggattgactcttat

SEQ ID NO: 393741 - DNA, 25 bp, Artificial
  probe
  misc_feature (1)..(25): SEQ ID NO: 4902; WAN024ER7; Start 322; Stop 346
gaagaagacgatgtaacaggattga

SEQ ID NO: 393742 - DNA, 25 bp, Artificial
  probe
  misc_feature (1)..(25): SEQ ID NO: 4902; WAN024ER7; Start 1131; Stop 1155
agatggtattactaaggctcgtcaa

SEQ ID NO: 393743 - DNA, 25 bp, Artificial
  probe
  misc_feature (1)..(25): SEQ ID NO: 4902; WAN024ER7; Start 1130; Stop 1154
aagatggtattactaaggctcgtca

SEQ ID NO: 393744 - DNA, 25 bp, Artificial
  probe
  misc_feature (1)..(25): SEQ ID NO: 4902; WAN024ER7; Start 1128; Stop 1152
tgaagatggtattactaaggctcgt

SEQ ID NO: 393745 - DNA, 25 bp, Artificial
  probe
  misc_feature (1)..(25): SEQ ID NO: 4902; WAN024ER7; Start 323; Stop 347
aagaagacgatgtaacaggattgac

SEQ ID NO: 393746 - DNA, 25 bp, Artificial
  probe
  misc_feature (1)..(25): SEQ ID NO: 4902; WAN024ER7; Start 332; Stop 356
atgtaacaggattgactcttattgc

SEQ ID NO: 393747 - DNA, 25 bp, Artificial
  probe
  misc_feature (1)..(25): SEQ ID NO: 4902; WAN024ER7; Start 325; Stop 349
gaagacgatgtaacaggattgactc

SEQ ID NO: 393748 - DNA, 25 bp, Artificial
  probe
  misc_feature (1)..(25): SEQ ID NO: 4902; WAN024ER7; Start 1369; Stop 1393
agtgccattaacctcttgaatatca

SEQ ID NO: 393749 - DNA, 25 bp, Artificial
  probe
  misc_feature (1)..(25): SEQ ID NO: 4902; WAN024ER7; Start 330; Stop 354
cgatgtaacaggattgactcttatt

SEQ ID NO: 393750 - DNA, 25 bp, Artificial
  probe
  misc_feature (1)..(25): SEQ ID NO: 4902; WAN024ER7; Start 1368; Stop 1392
tagtgccattaacctcttgaatatc

SEQ ID NO: 393751 - DNA, 25 bp, Artificial
  probe
  misc_feature (1)..(25): SEQ ID NO: 4902; WAN024ER7; Start 324; Stop 348
agaagacgatgtaacaggattgact

SEQ ID NO: 393752 - DNA, 25 bp, Artificial
  probe
  misc_feature (1)..(25): SEQ ID NO: 4902; WAN024ER7; Start 1125; Stop 1149
ccgtgaagatggtattactaaggct

SEQ ID NO: 393753 - DNA, 25 bp, Artificial
  probe
  misc_feature (1)..(25): SEQ ID NO: 4902; WAN024ER7; Start 1123; Stop 1147
agccgtgaagatggtattactaagg

SEQ ID NO: 393754 - DNA, 25 bp, Artificial
  probe
  misc_feature (1)..(25): SEQ ID NO: 4902; WAN024ER7; Start 339; Stop 363
aggattgactcttattgctgaacca

SEQ ID NO: 393755 - DNA, 25 bp, Artificial
  probe
  misc_feature (1)..(25): SEQ ID NO: 4902; WAN024ER7; Start 327; Stop 351
agacgatgtaacaggattgactctt

SEQ ID NO: 393756 - DNA, 25 bp, Artificial
  probe
  misc_feature (1)..(25): SEQ ID NO: 4902; WAN024ER7; Start 326; Stop 350
aagacgatgtaacaggattgactct

SEQ ID NO: 393757 - DNA, 25 bp, Artificial
  probe
  misc_feature (1)..(25): SEQ ID NO: 4902; WAN024ER7; Start 321; Stop 345
cgaagaagacgatgtaacaggattg

SEQ ID NO: 393758 - DNA, 25 bp, Artificial
  probe
  misc_feature (1)..(25): SEQ ID NO: 4902; WAN024ER7; Start 335; Stop 359
taacaggattgactcttattgctga

SEQ ID NO: 393759 - DNA, 25 bp, Artificial
  probe
  misc_feature (1)..(25): SEQ ID NO: 4902; WAN024ER7; Start 334; Stop 358
gtaacaggattgactcttattgctg

SEQ ID NO: 393760 - DNA, 25 bp, Artificial
  probe
  misc_feature (1)..(25): SEQ ID NO: 4902; WAN024ER7; Start 1367; Stop 1391
ttagtgccattaacctcttgaatat

SEQ ID NO: 393761 - DNA, 25 bp, Artificial
  probe
  misc_feature (1)..(25): SEQ ID NO: 4902; WAN024ER7; Start 794; Stop 818
catctgaacaagcagttatcattga

SEQ ID NO: 393762 - DNA, 25 bp, Artificial
  probe
  misc_feature (1)..(25): SEQ ID NO: 4902; WAN024ER7; Start 336; Stop 360
aacaggattgactcttattgctgaa

SEQ ID NO: 393763 - DNA, 25 bp, Artificial
  probe
  misc_feature (1)..(25): SEQ ID NO: 4902; WAN024ER7; Start 342; Stop 366
attgactcttattgctgaaccagtt

SEQ ID NO: 393764 - DNA, 25 bp, Artificial
  probe
  misc_feature (1)..(25): SEQ ID NO: 4902; WAN024ER7; Start 793; Stop 817
gcatctgaacaagcagttatcattg

SEQ ID NO: 393765 - DNA, 25 bp, Artificial
  probe
  misc_feature (1)..(25): SEQ ID NO: 4902; WAN024ER7; Start 341; Stop 365
gattgactcttattgctgaaccagt

SEQ ID NO: 393766 - DNA, 25 bp, Artificial
  probe
  misc_feature (1)..(25): SEQ ID NO: 4902; WAN024ER7; Start 337; Stop 361
acaggattgactcttattgctgaac

SEQ ID NO: 393767 - DNA, 25 bp, Artificial
  probe
  misc_feature (1)..(25): SEQ ID NO: 4903; WAN024G4S; Start 1202; Stop 1226
tcgtaactgagatggtaggagatat

SEQ ID NO: 393768 - DNA, 25 bp, Artificial
  probe
  misc_feature (1)..(25): SEQ ID NO: 4903; WAN024G4S; Start 874; Stop 898
atcataccagtcggaatcttcttac

SEQ ID NO: 393769 - DNA, 25 bp, Artificial
  probe
  misc_feature (1)..(25): SEQ ID NO: 4903; WAN024G4S; Start 871; Stop 895
cttatcataccagtcggaatcttct

SEQ ID NO: 393770 - DNA, 25 bp, Artificial
  probe
  misc_feature (1)..(25): SEQ ID NO: 4903; WAN024G4S; Start 870; Stop 894
ccttatcataccagtcggaatcttc

SEQ ID NO: 393771 - DNA, 25 bp, Artificial
  probe
  misc_feature (1)..(25): SEQ ID NO: 4903; WAN024G4S; Start 872; Stop 896
ttatcataccagtcggaatcttctt

SEQ ID NO: 393772 - DNA, 25 bp, Artificial
  probe
  misc_feature (1)..(25): SEQ ID NO: 4903; WAN024G4S; Start 1203; Stop 1227
cgtaactgagatggtaggagatatt

SEQ ID NO: 393773 - DNA, 25 bp, Artificial
  probe
  misc_feature (1)..(25): SEQ ID NO: 4903; WAN024G4S; Start 1434; Stop 1458
cctcatcacaactcaagtccataat

SEQ ID NO: 393774 - DNA, 25 bp, Artificial
  probe
  misc_feature (1)..(25): SEQ ID NO: 4903; WAN024G4S; Start 1205; Stop 1229
taactgagatggtaggagatattcg

SEQ ID NO: 393775 - DNA, 25 bp, Artificial
  probe
  misc_feature (1)..(25): SEQ ID NO: 4903; WAN024G4S; Start 1435; Stop 1459
ctcatcacaactcaagtccataatg

SEQ ID NO: 393776 - DNA, 25 bp, Artificial
  probe
  misc_feature (1)..(25): SEQ ID NO: 4903; WAN024G4S; Start 877; Stop 901
ataccagtcggaatcttcttacctc

SEQ ID NO: 393777 - DNA, 25 bp, Artificial
  probe
  misc_feature (1)..(25): SEQ ID NO: 4903; WAN024G4S; Start 873; Stop 897
tatcataccagtcggaatcttctta

SEQ ID NO: 393778 - DNA, 25 bp, Artificial
  probe
  misc_feature (1)..(25): SEQ ID NO: 4903; WAN024G4S; Start 1433; Stop 1457
tcctcatcacaactcaagtccataa

SEQ ID NO: 393779 - DNA, 25 bp, Artificial
  probe
  misc_feature (1)..(25): SEQ ID NO: 4903; WAN024G4S; Start 1337; Stop 1361
aagtatctagcgaaggagaagttac

SEQ ID NO: 393780 - DNA, 25 bp, Artificial
  probe
  misc_feature (1)..(25): SEQ ID NO: 4903; WAN024G4S; Start 1333; Stop 1357
gaagaagtatctagcgaaggagaag

SEQ ID NO: 393781 - DNA, 25 bp, Artificial
  probe
  misc_feature (1)..(25): SEQ ID NO: 4903; WAN024G4S; Start 876; Stop 900
cataccagtcggaatcttcttacct

SEQ ID NO: 393782 - DNA, 25 bp, Artificial
  probe
  misc_feature (1)..(25): SEQ ID NO: 4903; WAN024G4S; Start 875; Stop 899
tcataccagtcggaatcttcttacc

SEQ ID NO: 393783 - DNA, 25 bp, Artificial
  probe
  misc_feature (1)..(25): SEQ ID NO: 4903; WAN024G4S; Start 1339; Stop 1363
gtatctagcgaaggagaagttacac

SEQ ID NO: 393784 - DNA, 25 bp, Artificial
  probe
  misc_feature (1)..(25): SEQ ID NO: 4903; WAN024G4S; Start 1338; Stop 1362
agtatctagcgaaggagaagttaca

SEQ ID NO: 393785 - DNA, 25 bp, Artificial
  probe
  misc_feature (1)..(25): SEQ ID NO: 4903; WAN024G4S; Start 1332; Stop 1356
agaagaagtatctagcgaaggagaa

SEQ ID NO: 393786 - DNA, 25 bp, Artificial
  probe
  misc_feature (1)..(25): SEQ ID NO: 4903; WAN024G4S; Start 1336; Stop 1360
gaagtatctagcgaaggagaagtta

SEQ ID NO: 393787 - DNA, 25 bp, Artificial
  probe
  misc_feature (1)..(25): SEQ ID NO: 4903; WAN024G4S; Start 1201; Stop 1225
ctcgtaactgagatggtaggagata

SEQ ID NO: 393788 - DNA, 25 bp, Artificial
  probe
  misc_feature (1)..(25): SEQ ID NO: 4903; WAN024G4S; Start 1208; Stop 1232
ctgagatggtaggagatattcgcaa

SEQ ID NO: 393789 - DNA, 25 bp, Artificial
  probe
  misc_feature (1)..(25): SEQ ID NO: 4903; WAN024G4S; Start 1206; Stop 1230
aactgagatggtaggagatattcgc

SEQ ID NO: 393790 - DNA, 25 bp, Artificial
  probe
  misc_feature (1)..(25): SEQ ID NO: 4903; WAN024G4S; Start 1335; Stop 1359
agaagtatctagcgaaggagaagtt

SEQ ID NO: 393791 - DNA, 25 bp, Artificial
  probe
  misc_feature (1)..(25): SEQ ID NO: 4903; WAN024G4S; Start 1334; Stop 1358
aagaagtatctagcgaaggagaagt

SEQ ID NO: 393792 - DNA, 25 bp, Artificial
  probe
  misc_feature (1)..(25): SEQ ID NO: 4903; WAN024G4S; Start 1340; Stop 1364
tatctagcgaaggagaagttacact

SEQ ID NO: 393793 - DNA, 25 bp, Artificial
  probe
  misc_feature (1)..(25): SEQ ID NO: 4903; WAN024G4S; Start 1331; Stop 1355
cagaagaagtatctagcgaaggaga

SEQ ID NO: 393794 - DNA, 25 bp, Artificial
  probe
  misc_feature (1)..(25): SEQ ID NO: 4903; WAN024G4S; Start 1209; Stop 1233
tgagatggtaggagatattcgcaac

SEQ ID NO: 393795 - DNA, 25 bp, Artificial
  probe
  misc_feature (1)..(25): SEQ ID NO: 4903; WAN024G4S; Start 1432; Stop 1456
gtcctcatcacaactcaagtccata

SEQ ID NO: 393796 - DNA, 25 bp, Artificial
  probe
  misc_feature (1)..(25): SEQ ID NO: 4903; WAN024G4S; Start 1194; Stop 1218
tatgatcctcgtaactgagatggta

SEQ ID NO: 393797 - DNA, 25 bp, Artificial
  probe
  misc_feature (1)..(25): SEQ ID NO: 4903; WAN024G4S; Start 1204; Stop 1228
gtaactgagatggtaggagatattc

SEQ ID NO: 393798 - DNA, 25 bp, Artificial
  probe
  misc_feature (1)..(25): SEQ ID NO: 4903; WAN024G4S; Start 1328; Stop 1352
ttccagaagaagtatctagcgaagg

SEQ ID NO: 393799 - DNA, 25 bp, Artificial
  probe
  misc_feature (1)..(25): SEQ ID NO: 4903; WAN024G4S; Start 1475; Stop 1499
ttaacggctcaaccagaatgtatct

SEQ ID NO: 393800 - DNA, 25 bp, Artificial
  probe
  misc_feature (1)..(25): SEQ ID NO: 4904; WAN024FDC; Start 879; Stop 903
agttcaagatattggtatgatggca

SEQ ID NO: 393801 - DNA, 25 bp, Artificial
  probe
  misc_feature (1)..(25): SEQ ID NO: 4904; WAN024FDC; Start 880; Stop 904
gttcaagatattggtatgatggcaa

SEQ ID NO: 393802 - DNA, 25 bp, Artificial
  probe
  misc_feature (1)..(25): SEQ ID NO: 4904; WAN024FDC; Start 802; Stop 826
gcacctgatgattaccagataattg

SEQ ID NO: 393803 - DNA, 25 bp, Artificial
  probe
  misc_feature (1)..(25): SEQ ID NO: 4904; WAN024FDC; Start 801; Stop 825
agcacctgatgattaccagataatt

SEQ ID NO: 393804 - DNA, 25 bp, Artificial
  probe
  misc_feature (1)..(25): SEQ ID NO: 4904; WAN024FDC; Start 878; Stop 902
tagttcaagatattggtatgatggc

SEQ ID NO: 393805 - DNA, 25 bp, Artificial
  probe
  misc_feature (1)..(25): SEQ ID NO: 4904; WAN024FDC; Start 800; Stop 824
tagcacctgatgattaccagataat

SEQ ID NO: 393806 - DNA, 25 bp, Artificial
  probe
  misc_feature (1)..(25): SEQ ID NO: 4904; WAN024FDC; Start 799; Stop 823
atagcacctgatgattaccagataa

SEQ ID NO: 393807 - DNA, 25 bp, Artificial
  probe
  misc_feature (1)..(25): SEQ ID NO: 4904; WAN024FDC; Start 798; Stop 822
aatagcacctgatgattaccagata

SEQ ID NO: 393808 - DNA, 25 bp, Artificial
  probe
  misc_feature (1)..(25): SEQ ID NO: 4904; WAN024FDC; Start 628; Stop 652
gctaaggaattaggagtagatgtct

SEQ ID NO: 393809 - DNA, 25 bp, Artificial
  probe
  misc_feature (1)..(25): SEQ ID NO: 4904; WAN024FDC; Start 756; Stop 780
gatggctctgagagttattagtgtt

SEQ ID NO: 393810 - DNA, 25 bp, Artificial
  probe
  misc_feature (1)..(25): SEQ ID NO: 4904; WAN024FDC; Start 754; Stop 778
atgatggctctgagagttattagtg

SEQ ID NO: 393811 - DNA, 25 bp, Artificial
  probe
  misc_feature (1)..(25): SEQ ID NO: 4904; WAN024FDC; Start 750; Stop 774
tgatatgatggctctgagagttatt

SEQ ID NO: 393812 - DNA, 25 bp, Artificial
  probe
  misc_feature (1)..(25): SEQ ID NO: 4904; WAN024FDC; Start 748; Stop 772
aatgatatgatggctctgagagtta

SEQ ID NO: 393813 - DNA, 25 bp, Artificial
  probe
  misc_feature (1)..(25): SEQ ID NO: 4904; WAN024FDC; Start 758; Stop 782
tggctctgagagttattagtgttat

SEQ ID NO: 393814 - DNA, 25 bp, Artificial
  probe
  misc_feature (1)..(25): SEQ ID NO: 4904; WAN024FDC; Start 757; Stop 781
atggctctgagagttattagtgtta

SEQ ID NO: 393815 - DNA, 25 bp, Artificial
  probe
  misc_feature (1)..(25): SEQ ID NO: 4904; WAN024FDC; Start 755; Stop 779
tgatggctctgagagttattagtgt

SEQ ID NO: 393816 - DNA, 25 bp, Artificial
  probe
  misc_feature (1)..(25): SEQ ID NO: 4904; WAN024FDC; Start 749; Stop 773
atgatatgatggctctgagagttat

SEQ ID NO: 393817 - DNA, 25 bp, Artificial
  probe
  misc_feature (1)..(25): SEQ ID NO: 4904; WAN024FDC; Start 759; Stop 783
ggctctgagagttattagtgttatg

SEQ ID NO: 393818 - DNA, 25 bp, Artificial
  probe
  misc_feature (1)..(25): SEQ ID NO: 4904; WAN024FDC; Start 753; Stop 777
tatgatggctctgagagttattagt

SEQ ID NO: 393819 - DNA, 25 bp, Artificial
  probe
  misc_feature (1)..(25): SEQ ID NO: 4904; WAN024FDC; Start 803; Stop 827
cacctgatgattaccagataattgg

SEQ ID NO: 393820 - DNA, 25 bp, Artificial
  probe
  misc_feature (1)..(25): SEQ ID NO: 4904; WAN024FDC; Start 849; Stop 873
tgtcgatcaatcttatctagtgtct

SEQ ID NO: 393821 - DNA, 25 bp, Artificial
  probe
  misc_feature (1)..(25): SEQ ID NO: 4904; WAN024FDC; Start 847; Stop 871
tctgtcgatcaatcttatctagtgt

SEQ ID NO: 393822 - DNA, 25 bp, Artificial
  probe
  misc_feature (1)..(25): SEQ ID NO: 4904; WAN024FDC; Start 531; Stop 555
actggttagaagggataataagcac

SEQ ID NO: 393823 - DNA, 25 bp, Artificial
  probe
  misc_feature (1)..(25): SEQ ID NO: 4904; WAN024FDC; Start 848; Stop 872
ctgtcgatcaatcttatctagtgtc

SEQ ID NO: 393824 - DNA, 25 bp, Artificial
  probe
  misc_feature (1)..(25): SEQ ID NO: 4904; WAN024FDC; Start 525; Stop 549
agaggaactggttagaagggataat

SEQ ID NO: 393825 - DNA, 25 bp, Artificial
  probe
  misc_feature (1)..(25): SEQ ID NO: 4904; WAN024FDC; Start 530; Stop 554
aactggttagaagggataataagca

SEQ ID NO: 393826 - DNA, 25 bp, Artificial
  probe
  misc_feature (1)..(25): SEQ ID NO: 4904; WAN024FDC; Start 852; Stop 876
cgatcaatcttatctagtgtctaca

SEQ ID NO: 393827 - DNA, 25 bp, Artificial
  probe
  misc_feature (1)..(25): SEQ ID NO: 4904; WAN024FDC; Start 213; Stop 237
agaaactatcgctttgattattccg

SEQ ID NO: 393828 - DNA, 25 bp, Artificial
  probe
  misc_feature (1)..(25): SEQ ID NO: 4904; WAN024FDC; Start 529; Stop 553
gaactggttagaagggataataagc

SEQ ID NO: 393829 - DNA, 25 bp, Artificial
  probe
  misc_feature (1)..(25): SEQ ID NO: 4904; WAN024FDC; Start 526; Stop 550
gaggaactggttagaagggataata

SEQ ID NO: 393830 - DNA, 25 bp, Artificial
  probe
  misc_feature (1)..(25): SEQ ID NO: 4904; WAN024FDC; Start 489; Stop 513
tacttcagcaaattacaaaggagga

SEQ ID NO: 393831 - DNA, 25 bp, Artificial
  probe
  misc_feature (1)..(25): SEQ ID NO: 4904; WAN024FDC; Start 488; Stop 512
ttacttcagcaaattacaaaggagg

SEQ ID NO: 393832 - DNA, 25 bp, Artificial
  probe
  misc_feature (1)..(25): SEQ ID NO: 4904; WAN024FDC; Start 497; Stop 521
caaattacaaaggaggacaaactgc

SEQ ID NO: 393833 - DNA, 25 bp, Artificial
  probe
  misc_feature (1)..(25): SEQ ID NO: 4905; WAN024CD6; Start 387; Stop 411
agaagtggctgtagatagaagtaga

SEQ ID NO: 393834 - DNA, 25 bp, Artificial
  probe
  misc_feature (1)..(25): SEQ ID NO: 4905; WAN024CD6; Start 390; Stop 414
agtggctgtagatagaagtagaagt

SEQ ID NO: 393835 - DNA, 25 bp, Artificial
  probe
  misc_feature (1)..(25): SEQ ID NO: 4905; WAN024CD6; Start 388; Stop 412
gaagtggctgtagatagaagtagaa

SEQ ID NO: 393836 - DNA, 25 bp, Artificial
  probe
  misc_feature (1)..(25): SEQ ID NO: 4905; WAN024CD6; Start 389; Stop 413
aagtggctgtagatagaagtagaag

SEQ ID NO: 393837 - DNA, 25 bp, Artificial
  probe
  misc_feature (1)..(25): SEQ ID NO: 4905; WAN024CD6; Start 335; Stop 359
cagaattggttattgatggtgagtc

SEQ ID NO: 393838 - DNA, 25 bp, Artificial
  probe
  misc_feature (1)..(25): SEQ ID NO: 4905; WAN024CD6; Start 391; Stop 415
gtggctgtagatagaagtagaagta

SEQ ID NO: 393839 - DNA, 25 bp, Artificial
  probe
  misc_feature (1)..(25): SEQ ID NO: 4905; WAN024CD6; Start 420; Stop 444
tgagaatagagaactagccaatgag

SEQ ID NO: 393840 - DNA, 25 bp, Artificial
  probe
  misc_feature (1)..(25): SEQ ID NO: 4905; WAN024CD6; Start 123; Stop 147
tccttggaatgatgatatggctcta

SEQ ID NO: 393841 - DNA, 25 bp, Artificial
  probe
  misc_feature (1)..(25): SEQ ID NO: 4905; WAN024CD6; Start 386; Stop 410
tagaagtggctgtagatagaagtag

SEQ ID NO: 393842 - DNA, 25 bp, Artificial
  probe
  misc_feature (1)..(25): SEQ ID NO: 4905; WAN024CD6; Start 125; Stop 149
cttggaatgatgatatggctctagg

SEQ ID NO: 393843 - DNA, 25 bp, Artificial
  probe
  misc_feature (1)..(25): SEQ ID NO: 4905; WAN024CD6; Start 124; Stop 148
ccttggaatgatgatatggctctag

SEQ ID NO: 393844 - DNA, 25 bp, Artificial
  probe
  misc_feature (1)..(25): SEQ ID NO: 4905; WAN024CD6; Start 337; Stop 361
gaattggttattgatggtgagtcag

SEQ ID NO: 393845 - DNA, 25 bp, Artificial
  probe
  misc_feature (1)..(25): SEQ ID NO: 4905; WAN024CD6; Start 333; Stop 357
gtcagaattggttattgatggtgag

SEQ ID NO: 393846 - DNA, 25 bp, Artificial
  probe
  misc_feature (1)..(25): SEQ ID NO: 4905; WAN024CD6; Start 329; Stop 353
ggatgtcagaattggttattgatgg

SEQ ID NO: 393847 - DNA, 25 bp, Artificial
  probe
  misc_feature (1)..(25): SEQ ID NO: 4905; WAN024CD6; Start 336; Stop 360
agaattggttattgatggtgagtca

SEQ ID NO: 393848 - DNA, 25 bp, Artificial
  probe
  misc_feature (1)..(25): SEQ ID NO: 4905; WAN024CD6; Start 334; Stop 358
tcagaattggttattgatggtgagt

SEQ ID NO: 393849 - DNA, 25 bp, Artificial
  probe
  misc_feature (1)..(25): SEQ ID NO: 4905; WAN024CD6; Start 332; Stop 356
tgtcagaattggttattgatggtga

SEQ ID NO: 393850 - DNA, 25 bp, Artificial
  probe
  misc_feature (1)..(25): SEQ ID NO: 4905; WAN024CD6; Start 331; Stop 355
atgtcagaattggttattgatggtg

SEQ ID NO: 393851 - DNA, 25 bp, Artificial
  probe
  misc_feature (1)..(25): SEQ ID NO: 4905; WAN024CD6; Start 127; Stop 151
tggaatgatgatatggctctaggtt

SEQ ID NO: 393852 - DNA, 25 bp, Artificial
  probe
  misc_feature (1)..(25): SEQ ID NO: 4905; WAN024CD6; Start 126; Stop 150
ttggaatgatgatatggctctaggt

SEQ ID NO: 393853 - DNA, 25 bp, Artificial
  probe
  misc_feature (1)..(25): SEQ ID NO: 4905; WAN024CD6; Start 330; Stop 354
gatgtcagaattggttattgatggt

SEQ ID NO: 393854 - DNA, 25 bp, Artificial
  probe
  misc_feature (1)..(25): SEQ ID NO: 4905; WAN024CD6; Start 385; Stop 409
ttagaagtggctgtagatagaagta

SEQ ID NO: 393855 - DNA, 25 bp, Artificial
  probe
  misc_feature (1)..(25): SEQ ID NO: 4905; WAN024CD6; Start 328; Stop 352
aggatgtcagaattggttattgatg

SEQ ID NO: 393856 - DNA, 25 bp, Artificial
  probe
  misc_feature (1)..(25): SEQ ID NO: 4905; WAN024CD6; Start 327; Stop 351
caggatgtcagaattggttattgat

SEQ ID NO: 393857 - DNA, 25 bp, Artificial
  probe
  misc_feature (1)..(25): SEQ ID NO: 4905; WAN024CD6; Start 338; Stop 362
aattggttattgatggtgagtcagg

SEQ ID NO: 393858 - DNA, 25 bp, Artificial
  probe
  misc_feature (1)..(25): SEQ ID NO: 4905; WAN024CD6; Start 421; Stop 445
gagaatagagaactagccaatgagt

SEQ ID NO: 393859 - DNA, 25 bp, Artificial
  probe
  misc_feature (1)..(25): SEQ ID NO: 4905; WAN024CD6; Start 326; Stop 350
acaggatgtcagaattggttattga

SEQ ID NO: 393860 - DNA, 25 bp, Artificial
  probe
  misc_feature (1)..(25): SEQ ID NO: 4905; WAN024CD6; Start 419; Stop 443
ttgagaatagagaactagccaatga

SEQ ID NO: 393861 - DNA, 25 bp, Artificial
  probe
  misc_feature (1)..(25): SEQ ID NO: 4905; WAN024CD6; Start 433; Stop 457
ctagccaatgagttaggtagtgttg

SEQ ID NO: 393862 - DNA, 25 bp, Artificial
  probe
  misc_feature (1)..(25): SEQ ID NO: 4905; WAN024CD6; Start 392; Stop 416
tggctgtagatagaagtagaagtat

SEQ ID NO: 393863 - DNA, 25 bp, Artificial
  probe
  misc_feature (1)..(25): SEQ ID NO: 4905; WAN024CD6; Start 339; Stop 363
attggttattgatggtgagtcaggt

SEQ ID NO: 393864 - DNA, 25 bp, Artificial
  probe
  misc_feature (1)..(25): SEQ ID NO: 4905; WAN024CD6; Start 340; Stop 364
ttggttattgatggtgagtcaggtt

SEQ ID NO: 393865 - DNA, 25 bp, Artificial
  probe
  misc_feature (1)..(25): SEQ ID NO: 4905; WAN024CD6; Start 122; Stop 146
ttccttggaatgatgatatggctct

SEQ ID NO: 393866 - DNA, 25 bp, Artificial
  probe
  misc_feature (1)..(25): SEQ ID NO: 4906; WAN024A3C; Start 37; Stop 61
tgaaccccgagtttagaaataagaa

SEQ ID NO: 393867 - DNA, 25 bp, Artificial
  probe
  misc_feature (1)..(25): SEQ ID NO: 4906; WAN024A3C; Start 36; Stop 60
ttgaaccccgagtttagaaataaga

SEQ ID NO: 393868 - DNA, 25 bp, Artificial
  probe
  misc_feature (1)..(25): SEQ ID NO: 4906; WAN024A3C; Start 34; Stop 58
tcttgaaccccgagtttagaaataa

SEQ ID NO: 393869 - DNA, 25 bp, Artificial
  probe
  misc_feature (1)..(25): SEQ ID NO: 4906; WAN024A3C; Start 35; Stop 59
cttgaaccccgagtttagaaataag

SEQ ID NO: 393870 - DNA, 25 bp, Artificial
  probe
  misc_feature (1)..(25): SEQ ID NO: 4906; WAN024A3C; Start 33; Stop 57
atcttgaaccccgagtttagaaata

SEQ ID NO: 393871 - DNA, 25 bp, Artificial
  probe
  misc_feature (1)..(25): SEQ ID NO: 4906; WAN024A3C; Start 38; Stop 62
gaaccccgagtttagaaataagaaa

SEQ ID NO: 393872 - DNA, 25 bp, Artificial
  probe
  misc_feature (1)..(25): SEQ ID NO: 4906; WAN024A3C; Start 40; Stop 64
accccgagtttagaaataagaaaat

SEQ ID NO: 393873 - DNA, 25 bp, Artificial
  probe
  misc_feature (1)..(25): SEQ ID NO: 4906; WAN024A3C; Start 41; Stop 65
ccccgagtttagaaataagaaaatg

SEQ ID NO: 393874 - DNA, 25 bp, Artificial
  probe
  misc_feature (1)..(25): SEQ ID NO: 4906; WAN024A3C; Start 39; Stop 63
aaccccgagtttagaaataagaaaa

SEQ ID NO: 393875 - DNA, 25 bp, Artificial
  probe
  misc_feature (1)..(25): SEQ ID NO: 4906; WAN024A3C; Start 32; Stop 56
gatcttgaaccccgagtttagaaat

SEQ ID NO: 393876 - DNA, 25 bp, Artificial
  probe
  misc_feature (1)..(25): SEQ ID NO: 4906; WAN024A3C; Start 51; Stop 75
agaaataagaaaatgaggcagattc

SEQ ID NO: 393877 - DNA, 25 bp, Artificial
  probe
  misc_feature (1)..(25): SEQ ID NO: 4906; WAN024A3C; Start 42; Stop 66
cccgagtttagaaataagaaaatga

SEQ ID NO: 393878 - DNA, 25 bp, Artificial
  probe
  misc_feature (1)..(25): SEQ ID NO: 4906; WAN024A3C; Start 46; Stop 70
agtttagaaataagaaaatgaggca

SEQ ID NO: 393879 - DNA, 25 bp, Artificial
  probe
  misc_feature (1)..(25): SEQ ID NO: 4906; WAN024A3C; Start 31; Stop 55
ggatcttgaaccccgagtttagaaa

SEQ ID NO: 393880 - DNA, 25 bp, Artificial
  probe
  misc_feature (1)..(25): SEQ ID NO: 4906; WAN024A3C; Start 47; Stop 71
gtttagaaataagaaaatgaggcag

SEQ ID NO: 393881 - DNA, 25 bp, Artificial
  probe
  misc_feature (1)..(25): SEQ ID NO: 4906; WAN024A3C; Start 48; Stop 72
tttagaaataagaaaatgaggcaga

SEQ ID NO: 393882 - DNA, 25 bp, Artificial
  probe
  misc_feature (1)..(25): SEQ ID NO: 4906; WAN024A3C; Start 50; Stop 74
tagaaataagaaaatgaggcagatt

SEQ ID NO: 393883 - DNA, 25 bp, Artificial
  probe
  misc_feature (1)..(25): SEQ ID NO: 4906; WAN024A3C; Start 49; Stop 73
ttagaaataagaaaatgaggcagat

SEQ ID NO: 393884 - DNA, 25 bp, Artificial
  probe
  misc_feature (1)..(25): SEQ ID NO: 4906; WAN024A3C; Start 45; Stop 69
gagtttagaaataagaaaatgaggc

SEQ ID NO: 393885 - DNA, 25 bp, Artificial
  probe
  misc_feature (1)..(25): SEQ ID NO: 4906; WAN024A3C; Start 44; Stop 68
cgagtttagaaataagaaaatgagg

SEQ ID NO: 393886 - DNA, 25 bp, Artificial
  probe
  misc_feature (1)..(25): SEQ ID NO: 4906; WAN024A3C; Start 43; Stop 67
ccgagtttagaaataagaaaatgag

SEQ ID NO: 393887 - DNA, 25 bp, Artificial
  probe
  misc_feature (1)..(25): SEQ ID NO: 4906; WAN024A3C; Start 84; Stop 108
gaagagttcgatttcatcgtcttac

SEQ ID NO: 393888 - DNA, 25 bp, Artificial
  probe
  misc_feature (1)..(25): SEQ ID NO: 4906; WAN024A3C; Start 85; Stop 109
aagagttcgatttcatcgtcttacc

SEQ ID NO: 393889 - DNA, 25 bp, Artificial
  probe
  misc_feature (1)..(25): SEQ ID NO: 4906; WAN024A3C; Start 83; Stop 107
cgaagagttcgatttcatcgtctta

SEQ ID NO: 393890 - DNA, 25 bp, Artificial
  probe
  misc_feature (1)..(25): SEQ ID NO: 4906; WAN024A3C; Start 86; Stop 110
agagttcgatttcatcgtcttaccc

SEQ ID NO: 393891 - DNA, 25 bp, Artificial
  probe
  misc_feature (1)..(25): SEQ ID NO: 4906; WAN024A3C; Start 93; Stop 117
gatttcatcgtcttacccctgcaac

SEQ ID NO: 393892 - DNA, 25 bp, Artificial
  probe
  misc_feature (1)..(25): SEQ ID NO: 4906; WAN024A3C; Start 30; Stop 54
gggatcttgaaccccgagtttagaa

SEQ ID NO: 393893 - DNA, 25 bp, Artificial
  probe
  misc_feature (1)..(25): SEQ ID NO: 4906; WAN024A3C; Start 102; Stop 126
gtcttacccctgcaacgatgactag

SEQ ID NO: 393894 - DNA, 25 bp, Artificial
  probe
  misc_feature (1)..(25): SEQ ID NO: 4906; WAN024A3C; Start 87; Stop 111
gagttcgatttcatcgtcttacccc

SEQ ID NO: 393895 - DNA, 25 bp, Artificial
  probe
  misc_feature (1)..(25): SEQ ID NO: 4906; WAN024A3C; Start 89; Stop 113
gttcgatttcatcgtcttacccctg

SEQ ID NO: 393896 - DNA, 25 bp, Artificial
  probe
  misc_feature (1)..(25): SEQ ID NO: 4906; WAN024A3C; Start 88; Stop 112
agttcgatttcatcgtcttacccct

SEQ ID NO: 393897 - DNA, 25 bp, Artificial
  probe
  misc_feature (1)..(25): SEQ ID NO: 4906; WAN024A3C; Start 90; Stop 114
ttcgatttcatcgtcttacccctgc

SEQ ID NO: 393898 - DNA, 25 bp, Artificial
  probe
  misc_feature (1)..(25): SEQ ID NO: 4907; WAN024AR3; Start 51; Stop 75
gtattcgttatcactggtcacattg

SEQ ID NO: 393899 - DNA, 25 bp, Artificial
  probe
  misc_feature (1)..(25): SEQ ID NO: 4907; WAN024AR3; Start 43; Stop 67
tctgtatggtattcgttatcactgg

SEQ ID NO: 393900 - DNA, 25 bp, Artificial
  probe
  misc_feature (1)..(25): SEQ ID NO: 4907; WAN024AR3; Start 47; Stop 71
tatggtattcgttatcactggtcac

SEQ ID NO: 393901 - DNA, 25 bp, Artificial
  probe
  misc_feature (1)..(25): SEQ ID NO: 4907; WAN024AR3; Start 46; Stop 70
gtatggtattcgttatcactggtca

SEQ ID NO: 393902 - DNA, 25 bp, Artificial
  probe
  misc_feature (1)..(25): SEQ ID NO: 4907; WAN024AR3; Start 45; Stop 69
tgtatggtattcgttatcactggtc

SEQ ID NO: 393903 - DNA, 25 bp, Artificial
  probe
  misc_feature (1)..(25): SEQ ID NO: 4907; WAN024AR3; Start 44; Stop 68
ctgtatggtattcgttatcactggt

SEQ ID NO: 393904 - DNA, 25 bp, Artificial
  probe
  misc_feature (1)..(25): SEQ ID NO: 4907; WAN024AR3; Start 50; Stop 74
ggtattcgttatcactggtcacatt

SEQ ID NO: 393905 - DNA, 25 bp, Artificial
  probe
  misc_feature (1)..(25): SEQ ID NO: 4907; WAN024AR3; Start 52; Stop 76
tattcgttatcactggtcacattga

SEQ ID NO: 393906 - DNA, 25 bp, Artificial
  probe
  misc_feature (1)..(25): SEQ ID NO: 4907; WAN024AR3; Start 42; Stop 66
ttctgtatggtattcgttatcactg

SEQ ID NO: 393907 - DNA, 25 bp, Artificial
  probe
  misc_feature (1)..(25): SEQ ID NO: 4907; WAN024AR3; Start 53; Stop 77
attcgttatcactggtcacattgaa

SEQ ID NO: 393908 - DNA, 25 bp, Artificial
  probe
  misc_feature (1)..(25): SEQ ID NO: 4907; WAN024AR3; Start 49; Stop 73
tggtattcgttatcactggtcacat

SEQ ID NO: 393909 - DNA, 25 bp, Artificial
  probe
  misc_feature (1)..(25): SEQ ID NO: 4907; WAN024AR3; Start 48; Stop 72
atggtattcgttatcactggtcaca

SEQ ID NO: 393910 - DNA, 25 bp, Artificial
  probe
  misc_feature (1)..(25): SEQ ID NO: 4907; WAN024AR3; Start 35; Stop 59
atgaagattctgtatggtattcgtt

SEQ ID NO: 393911 - DNA, 25 bp, Artificial
  probe
  misc_feature (1)..(25): SEQ ID NO: 4907; WAN024AR3; Start 41; Stop 65
attctgtatggtattcgttatcact

SEQ ID NO: 393912 - DNA, 25 bp, Artificial
  probe
  misc_feature (1)..(25): SEQ ID NO: 4907; WAN024AR3; Start 40; Stop 64
gattctgtatggtattcgttatcac

SEQ ID NO: 393913 - DNA, 25 bp, Artificial
  probe
  misc_feature (1)..(25): SEQ ID NO: 4907; WAN024AR3; Start 36; Stop 60
tgaagattctgtatggtattcgtta

SEQ ID NO: 393914 - DNA, 25 bp, Artificial
  probe
  misc_feature (1)..(25): SEQ ID NO: 4907; WAN024AR3; Start 39; Stop 63
agattctgtatggtattcgttatca

SEQ ID NO: 393915 - DNA, 25 bp, Artificial
  probe
  misc_feature (1)..(25): SEQ ID NO: 4907; WAN024AR3; Start 34; Stop 58
tatgaagattctgtatggtattcgt

SEQ ID NO: 393916 - DNA, 25 bp, Artificial
  probe
  misc_feature (1)..(25): SEQ ID NO: 4907; WAN024AR3; Start 90; Stop 114
gcacctacaacatagactttacaac

SEQ ID NO: 393917 - DNA, 25 bp, Artificial
  probe
  misc_feature (1)..(25): SEQ ID NO: 4907; WAN024AR3; Start 89; Stop 113
agcacctacaacatagactttacaa

SEQ ID NO: 393918 - DNA, 25 bp, Artificial
  probe
  misc_feature (1)..(25): SEQ ID NO: 4907; WAN024AR3; Start 88; Stop 112
aagcacctacaacatagactttaca

SEQ ID NO: 393919 - DNA, 25 bp, Artificial
  probe
  misc_feature (1)..(25): SEQ ID NO: 4907; WAN024AR3; Start 82; Stop 106
tgaaataagcacctacaacatagac

SEQ ID NO: 393920 - DNA, 25 bp, Artificial
  probe
  misc_feature (1)..(25): SEQ ID NO: 4907; WAN024AR3; Start 92; Stop 116
acctacaacatagactttacaacac

SEQ ID NO: 393921 - DNA, 25 bp, Artificial
  probe
  misc_feature (1)..(25): SEQ ID NO: 4907; WAN024AR3; Start 91; Stop 115
cacctacaacatagactttacaaca

SEQ ID NO: 393922 - DNA, 25 bp, Artificial
  probe
  misc_feature (1)..(25): SEQ ID NO: 4907; WAN024AR3; Start 28; Stop 52
agtgtatatgaagattctgtatggt

SEQ ID NO: 393923 - DNA, 25 bp, Artificial
  probe
  misc_feature (1)..(25): SEQ ID NO: 4907; WAN024AR3; Start 172; Stop 196
tctcactattcatcaggttaaagga

SEQ ID NO: 393924 - DNA, 25 bp, Artificial
  probe
  misc_feature (1)..(25): SEQ ID NO: 4907; WAN024AR3; Start 96; Stop 120
acaacatagactttacaacacttca

SEQ ID NO: 393925 - DNA, 25 bp, Artificial
  probe
  misc_feature (1)..(25): SEQ ID NO: 4907; WAN024AR3; Start 83; Stop 107
gaaataagcacctacaacatagact

SEQ ID NO: 393926 - DNA, 25 bp, Artificial
  probe
  misc_feature (1)..(25): SEQ ID NO: 4907; WAN024AR3; Start 93; Stop 117
cctacaacatagactttacaacact

SEQ ID NO: 393927 - DNA, 25 bp, Artificial
  probe
  misc_feature (1)..(25): SEQ ID NO: 4907; WAN024AR3; Start 54; Stop 78
ttcgttatcactggtcacattgaaa

SEQ ID NO: 393928 - DNA, 25 bp, Artificial
  probe
  misc_feature (1)..(25): SEQ ID NO: 4907; WAN024AR3; Start 87; Stop 111
taagcacctacaacatagactttac

SEQ ID NO: 393929 - DNA, 25 bp, Artificial
  probe
  misc_feature (1)..(25): SEQ ID NO: 4907; WAN024AR3; Start 173; Stop 197
ctcactattcatcaggttaaaggaa

SEQ ID NO: 393930 - DNA, 25 bp, Artificial
  probe
  misc_feature (1)..(25): SEQ ID NO: 4907; WAN024AR3; Start 171; Stop 195
atctcactattcatcaggttaaagg

SEQ ID NO: 393931 - DNA, 25 bp, Artificial
  probe
  misc_feature (1)..(25): SEQ ID NO: 4908; WAN024FCG; Start 222; Stop 246
gacactccaatcctctatcaactac

SEQ ID NO: 393932 - DNA, 25 bp, Artificial
  probe
  misc_feature (1)..(25): SEQ ID NO: 4908; WAN024FCG; Start 225; Stop 249
actccaatcctctatcaactacctt

SEQ ID NO: 393933 - DNA, 25 bp, Artificial
  probe
  misc_feature (1)..(25): SEQ ID NO: 4908; WAN024FCG; Start 224; Stop 248
cactccaatcctctatcaactacct

SEQ ID NO: 393934 - DNA, 25 bp, Artificial
  probe
  misc_feature (1)..(25): SEQ ID NO: 4908; WAN024FCG; Start 226; Stop 250
ctccaatcctctatcaactacctta

SEQ ID NO: 393935 - DNA, 25 bp, Artificial
  probe
  misc_feature (1)..(25): SEQ ID NO: 4908; WAN024FCG; Start 223; Stop 247
acactccaatcctctatcaactacc

SEQ ID NO: 393936 - DNA, 25 bp, Artificial
  probe
  misc_feature (1)..(25): SEQ ID NO: 4908; WAN024FCG; Start 221; Stop 245
tgacactccaatcctctatcaacta

SEQ ID NO: 393937 - DNA, 25 bp, Artificial
  probe
  misc_feature (1)..(25): SEQ ID NO: 4908; WAN024FCG; Start 227; Stop 251
tccaatcctctatcaactaccttaa

SEQ ID NO: 393938 - DNA, 25 bp, Artificial
  probe
  misc_feature (1)..(25): SEQ ID NO: 4908; WAN024FCG; Start 220; Stop 244
gtgacactccaatcctctatcaact

SEQ ID NO: 393939 - DNA, 25 bp, Artificial
  probe
  misc_feature (1)..(25): SEQ ID NO: 4908; WAN024FCG; Start 260; Stop 284
aactcgacgatgtattgaccattaa

SEQ ID NO: 393940 - DNA, 25 bp, Artificial
  probe
  misc_feature (1)..(25): SEQ ID NO: 4908; WAN024FCG; Start 266; Stop 290
acgatgtattgaccattaaaggaga

SEQ ID NO: 393941 - DNA, 25 bp, Artificial
  probe
  misc_feature (1)..(25): SEQ ID NO: 4908; WAN024FCG; Start 37; Stop 61
tttgacgctatatctgcctttgaaa

SEQ ID NO: 393942 - DNA, 25 bp, Artificial
  probe
  misc_feature (1)..(25): SEQ ID NO: 4908; WAN024FCG; Start 265; Stop 289
gacgatgtattgaccattaaaggag

SEQ ID NO: 393943 - DNA, 25 bp, Artificial
  probe
  misc_feature (1)..(25): SEQ ID NO: 4908; WAN024FCG; Start 179; Stop 203
aaatcagtggtttggtggttatctc

SEQ ID NO: 393944 - DNA, 25 bp, Artificial
  probe
  misc_feature (1)..(25): SEQ ID NO: 4908; WAN024FCG; Start 219; Stop 243
ggtgacactccaatcctctatcaac

SEQ ID NO: 393945 - DNA, 25 bp, Artificial
  probe
  misc_feature (1)..(25): SEQ ID NO: 4908; WAN024FCG; Start 264; Stop 288
cgacgatgtattgaccattaaagga

SEQ ID NO: 393946 - DNA, 25 bp, Artificial
  probe
  misc_feature (1)..(25): SEQ ID NO: 4908; WAN024FCG; Start 267; Stop 291
cgatgtattgaccattaaaggagaa

SEQ ID NO: 393947 - DNA, 25 bp, Artificial
  probe
  misc_feature (1)..(25): SEQ ID NO: 4908; WAN024FCG; Start 2; Stop 26
tgaaatatcaggaggaaacgatgaa

SEQ ID NO: 393948 - DNA, 25 bp, Artificial
  probe
  misc_feature (1)..(25): SEQ ID NO: 4908; WAN024FCG; Start 1; Stop 25
ttgaaatatcaggaggaaacgatga

SEQ ID NO: 393949 - DNA, 25 bp, Artificial
  probe
  misc_feature (1)..(25): SEQ ID NO: 4908; WAN024FCG; Start 5; Stop 29
aatatcaggaggaaacgatgaaaga

SEQ ID NO: 393950 - DNA, 25 bp, Artificial
  probe
  misc_feature (1)..(25): SEQ ID NO: 4908; WAN024FCG; Start 6; Stop 30
atatcaggaggaaacgatgaaagac

SEQ ID NO: 393951 - DNA, 25 bp, Artificial
  probe
  misc_feature (1)..(25): SEQ ID NO: 4908; WAN024FCG; Start 149; Stop 173
atggtggctatctattcacgctatg

SEQ ID NO: 393952 - DNA, 25 bp, Artificial
  probe
  misc_feature (1)..(25): SEQ ID NO: 4908; WAN024FCG; Start 3; Stop 27
gaaatatcaggaggaaacgatgaaa

SEQ ID NO: 393953 - DNA, 25 bp, Artificial
  probe
  misc_feature (1)..(25): SEQ ID NO: 4908; WAN024FCG; Start 4; Stop 28
aaatatcaggaggaaacgatgaaag

SEQ ID NO: 393954 - DNA, 25 bp, Artificial
  probe
  misc_feature (1)..(25): SEQ ID NO: 4908; WAN024FCG; Start 7; Stop 31
tatcaggaggaaacgatgaaagact

SEQ ID NO: 393955 - DNA, 25 bp, Artificial
  probe
  misc_feature (1)..(25): SEQ ID NO: 4908; WAN024FCG; Start 148; Stop 172
catggtggctatctattcacgctat

SEQ ID NO: 393956 - DNA, 25 bp, Artificial
  probe
  misc_feature (1)..(25): SEQ ID NO: 4908; WAN024FCG; Start 228; Stop 252
ccaatcctctatcaactaccttaag

SEQ ID NO: 393957 - DNA, 25 bp, Artificial
  probe
  misc_feature (1)..(25): SEQ ID NO: 4908; WAN024FCG; Start 8; Stop 32
atcaggaggaaacgatgaaagactt

SEQ ID NO: 393958 - DNA, 25 bp, Artificial
  probe
  misc_feature (1)..(25): SEQ ID NO: 4908; WAN024FCG; Start 281; Stop 305
ttaaaggagaatgtgtccatcaagg

SEQ ID NO: 393959 - DNA, 25 bp, Artificial
  probe
  misc_feature (1)..(25): SEQ ID NO: 4908; WAN024FCG; Start 322; Stop 346
atggatgtggatatcaccaatcaag

SEQ ID NO: 393960 - DNA, 25 bp, Artificial
  probe
  misc_feature (1)..(25): SEQ ID NO: 4908; WAN024FCG; Start 151; Stop 175
ggtggctatctattcacgctatgtg

SEQ ID NO: 393961 - DNA, 25 bp, Artificial
  probe
  misc_feature (1)..(25): SEQ ID NO: 4908; WAN024FCG; Start 280; Stop 304
attaaaggagaatgtgtccatcaag

SEQ ID NO: 393962 - DNA, 25 bp, Artificial
  probe
  misc_feature (1)..(25): SEQ ID NO: 4908; WAN024FCG; Start 262; Stop 286
ctcgacgatgtattgaccattaaag

SEQ ID NO: 393963 - DNA, 25 bp, Artificial
  probe
  misc_feature (1)..(25): SEQ ID NO: 4908; WAN024FCG; Start 261; Stop 285
actcgacgatgtattgaccattaaa

SEQ ID NO: 393964 - DNA, 25 bp, Artificial
  probe
  misc_feature (1)..(25): SEQ ID NO: 4909; WAN024FAW; Start 927; Stop 951
tattgatacgattctgagttacgga

SEQ ID NO: 393965 - DNA, 25 bp, Artificial
  probe
  misc_feature (1)..(25): SEQ ID NO: 4909; WAN024FAW; Start 928; Stop 952
attgatacgattctgagttacggaa

SEQ ID NO: 393966 - DNA, 25 bp, Artificial
  probe
  misc_feature (1)..(25): SEQ ID NO: 4909; WAN024FAW; Start 644; Stop 668
ttatcgctggagcaattatctatct

SEQ ID NO: 393967 - DNA, 25 bp, Artificial
  probe
  misc_feature (1)..(25): SEQ ID NO: 4909; WAN024FAW; Start 999; Stop 1023
cttgatgatggatatgagtcaggag

SEQ ID NO: 393968 - DNA, 25 bp, Artificial
  probe
  misc_feature (1)..(25): SEQ ID NO: 4909; WAN024FAW; Start 994; Stop 1018
gttcgcttgatgatggatatgagtc

SEQ ID NO: 393969 - DNA, 25 bp, Artificial
  probe
  misc_feature (1)..(25): SEQ ID NO: 4909; WAN024FAW; Start 992; Stop 1016
ctgttcgcttgatgatggatatgag

SEQ ID NO: 393970 - DNA, 25 bp, Artificial
  probe
  misc_feature (1)..(25): SEQ ID NO: 4909; WAN024FAW; Start 926; Stop 950
atattgatacgattctgagttacgg

SEQ ID NO: 393971 - DNA, 25 bp, Artificial
  probe
  misc_feature (1)..(25): SEQ ID NO: 4909; WAN024FAW; Start 1000; Stop 1024
ttgatgatggatatgagtcaggagt

SEQ ID NO: 393972 - DNA, 25 bp, Artificial
  probe
  misc_feature (1)..(25): SEQ ID NO: 4909; WAN024FAW; Start 1174; Stop 1198
gtatcggacatgacggattaactaa

SEQ ID NO: 393973 - DNA, 25 bp, Artificial
  probe
  misc_feature (1)..(25): SEQ ID NO: 4909; WAN024FAW; Start 1001; Stop 1025
tgatgatggatatgagtcaggagtc

SEQ ID NO: 393974 - DNA, 25 bp, Artificial
  probe
  misc_feature (1)..(25): SEQ ID NO: 4909; WAN024FAW; Start 643; Stop 667
attatcgctggagcaattatctatc

SEQ ID NO: 393975 - DNA, 25 bp, Artificial
  probe
  misc_feature (1)..(25): SEQ ID NO: 4909; WAN024FAW; Start 1175; Stop 1199
tatcggacatgacggattaactaat

SEQ ID NO: 393976 - DNA, 25 bp, Artificial
  probe
  misc_feature (1)..(25): SEQ ID NO: 4909; WAN024FAW; Start 645; Stop 669
tatcgctggagcaattatctatctc

SEQ ID NO: 393977 - DNA, 25 bp, Artificial
  probe
  misc_feature (1)..(25): SEQ ID NO: 4909; WAN024FAW; Start 993; Stop 1017
tgttcgcttgatgatggatatgagt

SEQ ID NO: 393978 - DNA, 25 bp, Artificial
  probe
  misc_feature (1)..(25): SEQ ID NO: 4909; WAN024FAW; Start 641; Stop 665
ctattatcgctggagcaattatcta

SEQ ID NO: 393979 - DNA, 25 bp, Artificial
  probe
  misc_feature (1)..(25): SEQ ID NO: 4909; WAN024FAW; Start 646; Stop 670
atcgctggagcaattatctatctct

SEQ ID NO: 393980 - DNA, 25 bp, Artificial
  probe
  misc_feature (1)..(25): SEQ ID NO: 4909; WAN024FAW; Start 998; Stop 1022
gcttgatgatggatatgagtcagga

SEQ ID NO: 393981 - DNA, 25 bp, Artificial
  probe
  misc_feature (1)..(25): SEQ ID NO: 4909; WAN024FAW; Start 995; Stop 1019
ttcgcttgatgatggatatgagtca

SEQ ID NO: 393982 - DNA, 25 bp, Artificial
  probe
  misc_feature (1)..(25): SEQ ID NO: 4909; WAN024FAW; Start 647; Stop 671
tcgctggagcaattatctatctctt

SEQ ID NO: 393983 - DNA, 25 bp, Artificial
  probe
  misc_feature (1)..(25): SEQ ID NO: 4909; WAN024FAW; Start 1173; Stop 1197
ggtatcggacatgacggattaacta

SEQ ID NO: 393984 - DNA, 25 bp, Artificial
  probe
  misc_feature (1)..(25): SEQ ID NO: 4909; WAN024FAW; Start 1002; Stop 1026
gatgatggatatgagtcaggagtcg

SEQ ID NO: 393985 - DNA, 25 bp, Artificial
  probe
  misc_feature (1)..(25): SEQ ID NO: 4909; WAN024FAW; Start 932; Stop 956
atacgattctgagttacggaattgt

SEQ ID NO: 393986 - DNA, 25 bp, Artificial
  probe
  misc_feature (1)..(25): SEQ ID NO: 4909; WAN024FAW; Start 930; Stop 954
tgatacgattctgagttacggaatt

SEQ ID NO: 393987 - DNA, 25 bp, Artificial
  probe
  misc_feature (1)..(25): SEQ ID NO: 4909; WAN024FAW; Start 929; Stop 953
ttgatacgattctgagttacggaat

SEQ ID NO: 393988 - DNA, 25 bp, Artificial
  probe
  misc_feature (1)..(25): SEQ ID NO: 4909; WAN024FAW; Start 931; Stop 955
gatacgattctgagttacggaattg

SEQ ID NO: 393989 - DNA, 25 bp, Artificial
  probe
  misc_feature (1)..(25): SEQ ID NO: 4909; WAN024FAW; Start 991; Stop 1015
cctgttcgcttgatgatggatatga

SEQ ID NO: 393990 - DNA, 25 bp, Artificial
  probe
  misc_feature (1)..(25): SEQ ID NO: 4909; WAN024FAW; Start 996; Stop 1020
tcgcttgatgatggatatgagtcag

SEQ ID NO: 393991 - DNA, 25 bp, Artificial
  probe
  misc_feature (1)..(25): SEQ ID NO: 4909; WAN024FAW; Start 933; Stop 957
tacgattctgagttacggaattgtg

SEQ ID NO: 393992 - DNA, 25 bp, Artificial
  probe
  misc_feature (1)..(25): SEQ ID NO: 4909; WAN024FAW; Start 642; Stop 666
tattatcgctggagcaattatctat

SEQ ID NO: 393993 - DNA, 25 bp, Artificial
  probe
  misc_feature (1)..(25): SEQ ID NO: 4909; WAN024FAW; Start 1052; Stop 1076
atctatctttccttacagtggttgc

SEQ ID NO: 393994 - DNA, 25 bp, Artificial
  probe
  misc_feature (1)..(25): SEQ ID NO: 4909; WAN024FAW; Start 913; Stop 937
gcccacagtctttatattgatacga

SEQ ID NO: 393995 - DNA, 25 bp, Artificial
  probe
  misc_feature (1)..(25): SEQ ID NO: 4909; WAN024FAW; Start 586; Stop 610
ggctttgttaatctctttggtttga

SEQ ID NO: 393996 - DNA, 25 bp, Artificial
  probe
  misc_feature (1)..(25): SEQ ID NO: 4909; WAN024FAW; Start 585; Stop 609
aggctttgttaatctctttggtttg

SEQ ID NO: 393997 - DNA, 25 bp, Artificial
  probe
  misc_feature (1)..(25): SEQ ID NO: 4910; WAN024GKA; Start 258; Stop 282
aatcttaccatctcttgacaacctt

SEQ ID NO: 393998 - DNA, 25 bp, Artificial
  probe
  misc_feature (1)..(25): SEQ ID NO: 4910; WAN024GKA; Start 259; Stop 283
atcttaccatctcttgacaaccttg

SEQ ID NO: 393999 - DNA, 25 bp, Artificial
  probe
  misc_feature (1)..(25): SEQ ID NO: 4910; WAN024GKA; Start 54; Stop 78
agaagaagttcaagaagaggaagtt

SEQ ID NO: 394000 - DNA, 25 bp, Artificial
  probe
  misc_feature (1)..(25): SEQ ID NO: 4910; WAN024GKA; Start 56; Stop 80
aagaagttcaagaagaggaagttgt

SEQ ID NO: 394001 - DNA, 25 bp, Artificial
  probe
  misc_feature (1)..(25): SEQ ID NO: 4910; WAN024GKA; Start 55; Stop 79
gaagaagttcaagaagaggaagttg

SEQ ID NO: 394002 - DNA, 25 bp, Artificial
  probe
  misc_feature (1)..(25): SEQ ID NO: 4910; WAN024GKA; Start 254; Stop 278
aagcaatcttaccatctcttgacaa

SEQ ID NO: 394003 - DNA, 25 bp, Artificial
  probe
  misc_feature (1)..(25): SEQ ID NO: 4910; WAN024GKA; Start 53; Stop 77
tagaagaagttcaagaagaggaagt

SEQ ID NO: 394004 - DNA, 25 bp, Artificial
  probe
  misc_feature (1)..(25): SEQ ID NO: 4910; WAN024GKA; Start 51; Stop 75
agtagaagaagttcaagaagaggaa

SEQ ID NO: 394005 - DNA, 25 bp, Artificial
  probe
  misc_feature (1)..(25): SEQ ID NO: 4910; WAN024GKA; Start 50; Stop 74
aagtagaagaagttcaagaagagga

SEQ ID NO: 394006 - DNA, 25 bp, Artificial
  probe
  misc_feature (1)..(25): SEQ ID NO: 4910; WAN024GKA; Start 257; Stop 281
caatcttaccatctcttgacaacct

SEQ ID NO: 394007 - DNA, 25 bp, Artificial
  probe
  misc_feature (1)..(25): SEQ ID NO: 4910; WAN024GKA; Start 260; Stop 284
tcttaccatctcttgacaaccttga

SEQ ID NO: 394008 - DNA, 25 bp, Artificial
  probe
  misc_feature (1)..(25): SEQ ID NO: 4910; WAN024GKA; Start 52; Stop 76
gtagaagaagttcaagaagaggaag

SEQ ID NO: 394009 - DNA, 25 bp, Artificial
  probe
  misc_feature (1)..(25): SEQ ID NO: 4910; WAN024GKA; Start 49; Stop 73
gaagtagaagaagttcaagaagagg

SEQ ID NO: 394010 - DNA, 25 bp, Artificial
  probe
  misc_feature (1)..(25): SEQ ID NO: 4910; WAN024GKA; Start 57; Stop 81
agaagttcaagaagaggaagttgtg

SEQ ID NO: 394011 - DNA, 25 bp, Artificial
  probe
  misc_feature (1)..(25): SEQ ID NO: 4910; WAN024GKA; Start 255; Stop 279
agcaatcttaccatctcttgacaac

SEQ ID NO: 394012 - DNA, 25 bp, Artificial
  probe
  misc_feature (1)..(25): SEQ ID NO: 4910; WAN024GKA; Start 261; Stop 285
cttaccatctcttgacaaccttgag

SEQ ID NO: 394013 - DNA, 25 bp, Artificial
  probe
  misc_feature (1)..(25): SEQ ID NO: 4910; WAN024GKA; Start 48; Stop 72
agaagtagaagaagttcaagaagag

SEQ ID NO: 394014 - DNA, 25 bp, Artificial
  probe
  misc_feature (1)..(25): SEQ ID NO: 4910; WAN024GKA; Start 256; Stop 280
gcaatcttaccatctcttgacaacc

SEQ ID NO: 394015 - DNA, 25 bp, Artificial
  probe
  misc_feature (1)..(25): SEQ ID NO: 4910; WAN024GKA; Start 47; Stop 71
aagaagtagaagaagttcaagaaga

SEQ ID NO: 394016 - DNA, 25 bp, Artificial
  probe
  misc_feature (1)..(25): SEQ ID NO: 4910; WAN024GKA; Start 524; Stop 548
cagcaatggtagtggtgtataacta

SEQ ID NO: 394017 - DNA, 25 bp, Artificial
  probe
  misc_feature (1)..(25): SEQ ID NO: 4910; WAN024GKA; Start 526; Stop 550
gcaatggtagtggtgtataactaac

SEQ ID NO: 394018 - DNA, 25 bp, Artificial
  probe
  misc_feature (1)..(25): SEQ ID NO: 4910; WAN024GKA; Start 525; Stop 549
agcaatggtagtggtgtataactaa

SEQ ID NO: 394019 - DNA, 25 bp, Artificial
  probe
  misc_feature (1)..(25): SEQ ID NO: 4910; WAN024GKA; Start 46; Stop 70
gaagaagtagaagaagttcaagaag

SEQ ID NO: 394020 - DNA, 25 bp, Artificial
  probe
  misc_feature (1)..(25): SEQ ID NO: 4910; WAN024GKA; Start 368; Stop 392
aagaagaaggaattgaagaaatcgc

SEQ ID NO: 394021 - DNA, 25 bp, Artificial
  probe
  misc_feature (1)..(25): SEQ ID NO: 4910; WAN024GKA; Start 401; Stop 425
gcgaatttgaccataactaccatat

SEQ ID NO: 394022 - DNA, 25 bp, Artificial
  probe
  misc_feature (1)..(25): SEQ ID NO: 4910; WAN024GKA; Start 370; Stop 394
gaagaaggaattgaagaaatcgcag

SEQ ID NO: 394023 - DNA, 25 bp, Artificial
  probe
  misc_feature (1)..(25): SEQ ID NO: 4910; WAN024GKA; Start 2; Stop 26
tgaaatcattaaaggaggcgaacat

SEQ ID NO: 394024 - DNA, 25 bp, Artificial
  probe
  misc_feature (1)..(25): SEQ ID NO: 4910; WAN024GKA; Start 400; Stop 424
ggcgaatttgaccataactaccata

SEQ ID NO: 394025 - DNA, 25 bp, Artificial
  probe
  misc_feature (1)..(25): SEQ ID NO: 4910; WAN024GKA; Start 369; Stop 393
agaagaaggaattgaagaaatcgca

SEQ ID NO: 394026 - DNA, 25 bp, Artificial
  probe
  misc_feature (1)..(25): SEQ ID NO: 4910; WAN024GKA; Start 253; Stop 277
aaagcaatcttaccatctcttgaca

SEQ ID NO: 394027 - DNA, 25 bp, Artificial
  probe
  misc_feature (1)..(25): SEQ ID NO: 4910; WAN024GKA; Start 1; Stop 25
ttgaaatcattaaaggaggcgaaca

SEQ ID NO: 394028 - DNA, 25 bp, Artificial
  probe
  misc_feature (1)..(25): SEQ ID NO: 4910; WAN024GKA; Start 262; Stop 286
ttaccatctcttgacaaccttgagc

SEQ ID NO: 394029 - DNA, 25 bp, Artificial
  probe
  misc_feature (1)..(25): SEQ ID NO: 4910; WAN024GKA; Start 527; Stop 551
caatggtagtggtgtataactaact

SEQ ID NO: 394030 - DNA, 25 bp, Artificial
  probe
  misc_feature (1)..(25): SEQ ID NO: 4911; WAN024A3W; Start 68; Stop 92
tctgaaacttcctcctacaatttga

SEQ ID NO: 394031 - DNA, 25 bp, Artificial
  probe
  misc_feature (1)..(25): SEQ ID NO: 4911; WAN024A3W; Start 69; Stop 93
ctgaaacttcctcctacaatttgat

SEQ ID NO: 394032 - DNA, 25 bp, Artificial
  probe
  misc_feature (1)..(25): SEQ ID NO: 4911; WAN024A3W; Start 67; Stop 91
atctgaaacttcctcctacaatttg

SEQ ID NO: 394033 - DNA, 25 bp, Artificial
  probe
  misc_feature (1)..(25): SEQ ID NO: 4911; WAN024A3W; Start 99; Stop 123
agagagaagaactcatttgaaggag

SEQ ID NO: 394034 - DNA, 25 bp, Artificial
  probe
  misc_feature (1)..(25): SEQ ID NO: 4911; WAN024A3W; Start 102; Stop 126
gagaagaactcatttgaaggaggaa

SEQ ID NO: 394035 - DNA, 25 bp, Artificial
  probe
  misc_feature (1)..(25): SEQ ID NO: 4911; WAN024A3W; Start 100; Stop 124
gagagaagaactcatttgaaggagg

SEQ ID NO: 394036 - DNA, 25 bp, Artificial
  probe
  misc_feature (1)..(25): SEQ ID NO: 4911; WAN024A3W; Start 66; Stop 90
aatctgaaacttcctcctacaattt

SEQ ID NO: 394037 - DNA, 25 bp, Artificial
  probe
  misc_feature (1)..(25): SEQ ID NO: 4911; WAN024A3W; Start 65; Stop 89
aaatctgaaacttcctcctacaatt

SEQ ID NO: 394038 - DNA, 25 bp, Artificial
  probe
  misc_feature (1)..(25): SEQ ID NO: 4911; WAN024A3W; Start 101; Stop 125
agagaagaactcatttgaaggagga

SEQ ID NO: 394039 - DNA, 25 bp, Artificial
  probe
  misc_feature (1)..(25): SEQ ID NO: 4911; WAN024A3W; Start 98; Stop 122
tagagagaagaactcatttgaagga

SEQ ID NO: 394040 - DNA, 25 bp, Artificial
  probe
  misc_feature (1)..(25): SEQ ID NO: 4911; WAN024A3W; Start 70; Stop 94
tgaaacttcctcctacaatttgata

SEQ ID NO: 394041 - DNA, 25 bp, Artificial
  probe
  misc_feature (1)..(25): SEQ ID NO: 4911; WAN024A3W; Start 1; Stop 25
ttgaaatgaaaggctagagaaatct

SEQ ID NO: 394042 - DNA, 25 bp, Artificial
  probe
  misc_feature (1)..(25): SEQ ID NO: 4911; WAN024A3W; Start 97; Stop 121
atagagagaagaactcatttgaagg

SEQ ID NO: 394043 - DNA, 25 bp, Artificial
  probe
  misc_feature (1)..(25): SEQ ID NO: 4911; WAN024A3W; Start 41; Stop 65
aaataaatactccaaagcctgcaaa

SEQ ID NO: 394044 - DNA, 25 bp, Artificial
  probe
  misc_feature (1)..(25): SEQ ID NO: 4911; WAN024A3W; Start 40; Stop 64
taaataaatactccaaagcctgcaa

SEQ ID NO: 394045 - DNA, 25 bp, Artificial
  probe
  misc_feature (1)..(25): SEQ ID NO: 4911; WAN024A3W; Start 39; Stop 63
ttaaataaatactccaaagcctgca

SEQ ID NO: 394046 - DNA, 25 bp, Artificial
  probe
  misc_feature (1)..(25): SEQ ID NO: 4911; WAN024A3W; Start 38; Stop 62
tttaaataaatactccaaagcctgc

SEQ ID NO: 394047 - DNA, 25 bp, Artificial
  probe
  misc_feature (1)..(25): SEQ ID NO: 4911; WAN024A3W; Start 71; Stop 95
gaaacttcctcctacaatttgatat

SEQ ID NO: 394048 - DNA, 25 bp, Artificial
  probe
  misc_feature (1)..(25): SEQ ID NO: 4911; WAN024A3W; Start 2; Stop 26
tgaaatgaaaggctagagaaatcta

SEQ ID NO: 394049 - DNA, 25 bp, Artificial
  probe
  misc_feature (1)..(25): SEQ ID NO: 4911; WAN024A3W; Start 64; Stop 88
aaaatctgaaacttcctcctacaat

SEQ ID NO: 394050 - DNA, 25 bp, Artificial
  probe
  misc_feature (1)..(25): SEQ ID NO: 4911; WAN024A3W; Start 96; Stop 120
aatagagagaagaactcatttgaag

SEQ ID NO: 394051 - DNA, 25 bp, Artificial
  probe
  misc_feature (1)..(25): SEQ ID NO: 4911; WAN024A3W; Start 42; Stop 66
aataaatactccaaagcctgcaaaa

SEQ ID NO: 394052 - DNA, 25 bp, Artificial
  probe
  misc_feature (1)..(25): SEQ ID NO: 4911; WAN024A3W; Start 73; Stop 97
aacttcctcctacaatttgatataa

SEQ ID NO: 394053 - DNA, 25 bp, Artificial
  probe
  misc_feature (1)..(25): SEQ ID NO: 4911; WAN024A3W; Start 72; Stop 96
aaacttcctcctacaatttgatata

SEQ ID NO: 394054 - DNA, 25 bp, Artificial
  probe
  misc_feature (1)..(25): SEQ ID NO: 4911; WAN024A3W; Start 74; Stop 98
acttcctcctacaatttgatataat

SEQ ID NO: 394055 - DNA, 25 bp, Artificial
  probe
  misc_feature (1)..(25): SEQ ID NO: 4911; WAN024A3W; Start 95; Stop 119
taatagagagaagaactcatttgaa

SEQ ID NO: 394056 - DNA, 25 bp, Artificial
  probe
  misc_feature (1)..(25): SEQ ID NO: 4911; WAN024A3W; Start 94; Stop 118
ataatagagagaagaactcatttga

SEQ ID NO: 394057 - DNA, 25 bp, Artificial
  probe
  misc_feature (1)..(25): SEQ ID NO: 4911; WAN024A3W; Start 7; Stop 31
tgaaaggctagagaaatctagtcct

SEQ ID NO: 394058 - DNA, 25 bp, Artificial
  probe
  misc_feature (1)..(25): SEQ ID NO: 4911; WAN024A3W; Start 6; Stop 30
atgaaaggctagagaaatctagtcc

SEQ ID NO: 394059 - DNA, 25 bp, Artificial
  probe
  misc_feature (1)..(25): SEQ ID NO: 4911; WAN024A3W; Start 8; Stop 32
gaaaggctagagaaatctagtcctt

SEQ ID NO: 394060 - DNA, 25 bp, Artificial
  probe
  misc_feature (1)..(25): SEQ ID NO: 4911; WAN024A3W; Start 5; Stop 29
aatgaaaggctagagaaatctagtc

SEQ ID NO: 394061 - DNA, 25 bp, Artificial
  probe
  misc_feature (1)..(25): SEQ ID NO: 4911; WAN024A3W; Start 37; Stop 61
ttttaaataaatactccaaagcctg

SEQ ID NO: 394062 - DNA, 25 bp, Artificial
  probe
  misc_feature (1)..(25): SEQ ID NO: 4911; WAN024A3W; Start 4; Stop 28
aaatgaaaggctagagaaatctagt

SEQ ID NO: 394063 - DNA, 25 bp, Artificial
  probe
  misc_feature (1)..(25): SEQ ID NO: 4912; WAN024BFV; Start 59; Stop 83
gcaagcagttcatcaataagattta

SEQ ID NO: 394064 - DNA, 25 bp, Artificial
  probe
  misc_feature (1)..(25): SEQ ID NO: 4912; WAN024BFV; Start 57; Stop 81
ctgcaagcagttcatcaataagatt

SEQ ID NO: 394065 - DNA, 25 bp, Artificial
  probe
  misc_feature (1)..(25): SEQ ID NO: 4912; WAN024BFV; Start 2; Stop 26
tgaaattgactttaagtgagtttgg

SEQ ID NO: 394066 - DNA, 25 bp, Artificial
  probe
  misc_feature (1)..(25): SEQ ID NO: 4912; WAN024BFV; Start 58; Stop 82
tgcaagcagttcatcaataagattt

SEQ ID NO: 394067 - DNA, 25 bp, Artificial
  probe
  misc_feature (1)..(25): SEQ ID NO: 4912; WAN024BFV; Start 3; Stop 27
gaaattgactttaagtgagtttgga

SEQ ID NO: 394068 - DNA, 25 bp, Artificial
  probe
  misc_feature (1)..(25): SEQ ID NO: 4912; WAN024BFV; Start 5; Stop 29
aattgactttaagtgagtttggaaa

SEQ ID NO: 394069 - DNA, 25 bp, Artificial
  probe
  misc_feature (1)..(25): SEQ ID NO: 4912; WAN024BFV; Start 4; Stop 28
aaattgactttaagtgagtttggaa

SEQ ID NO: 394070 - DNA, 25 bp, Artificial
  probe
  misc_feature (1)..(25): SEQ ID NO: 4912; WAN024BFV; Start 6; Stop 30
attgactttaagtgagtttggaaat

SEQ ID NO: 394071 - DNA, 25 bp, Artificial
  probe
  misc_feature (1)..(25): SEQ ID NO: 4912; WAN024BFV; Start 8; Stop 32
tgactttaagtgagtttggaaataa

SEQ ID NO: 394072 - DNA, 25 bp, Artificial
  probe
  misc_feature (1)..(25): SEQ ID NO: 4912; WAN024BFV; Start 7; Stop 31
ttgactttaagtgagtttggaaata

SEQ ID NO: 394073 - DNA, 25 bp, Artificial
  probe
  misc_feature (1)..(25): SEQ ID NO: 4912; WAN024BFV; Start 1; Stop 25
ttgaaattgactttaagtgagtttg

SEQ ID NO: 394074 - DNA, 25 bp, Artificial
  probe
  misc_feature (1)..(25): SEQ ID NO: 4912; WAN024BFV; Start 60; Stop 84
caagcagttcatcaataagatttat

SEQ ID NO: 394075 - DNA, 25 bp, Artificial
  probe
  misc_feature (1)..(25): SEQ ID NO: 4912; WAN024BFV; Start 9; Stop 33
gactttaagtgagtttggaaataat

SEQ ID NO: 394076 - DNA, 25 bp, Artificial
  probe
  misc_feature (1)..(25): SEQ ID NO: 4912; WAN024BFV; Start 62; Stop 86
agcagttcatcaataagatttatac

SEQ ID NO: 394077 - DNA, 25 bp, Artificial
  probe
  misc_feature (1)..(25): SEQ ID NO: 4912; WAN024BFV; Start 63; Stop 87
gcagttcatcaataagatttatact

SEQ ID NO: 394078 - DNA, 25 bp, Artificial
  probe
  misc_feature (1)..(25): SEQ ID NO: 4912; WAN024BFV; Start 56; Stop 80
actgcaagcagttcatcaataagat

SEQ ID NO: 394079 - DNA, 25 bp, Artificial
  probe
  misc_feature (1)..(25): SEQ ID NO: 4912; WAN024BFV; Start 55; Stop 79
gactgcaagcagttcatcaataaga

SEQ ID NO: 394080 - DNA, 25 bp, Artificial
  probe
  misc_feature (1)..(25): SEQ ID NO: 4912; WAN024BFV; Start 54; Stop 78
agactgcaagcagttcatcaataag

SEQ ID NO: 394081 - DNA, 25 bp, Artificial
  probe
  misc_feature (1)..(25): SEQ ID NO: 4912; WAN024BFV; Start 53; Stop 77
cagactgcaagcagttcatcaataa

SEQ ID NO: 394082 - DNA, 25 bp, Artificial
  probe
  misc_feature (1)..(25): SEQ ID NO: 4912; WAN024BFV; Start 13; Stop 37
ttaagtgagtttggaaataatatcc

SEQ ID NO: 394083 - DNA, 25 bp, Artificial
  probe
  misc_feature (1)..(25): SEQ ID NO: 4912; WAN024BFV; Start 52; Stop 76
tcagactgcaagcagttcatcaata

SEQ ID NO: 394084 - DNA, 25 bp, Artificial
  probe
  misc_feature (1)..(25): SEQ ID NO: 4912; WAN024BFV; Start 114; Stop 138
agcttcaccttgccgtaggtatatg

SEQ ID NO: 394085 - DNA, 25 bp, Artificial
  probe
  misc_feature (1)..(25): SEQ ID NO: 4912; WAN024BFV; Start 113; Stop 137
cagcttcaccttgccgtaggtatat

SEQ ID NO: 394086 - DNA, 25 bp, Artificial
  probe
  misc_feature (1)..(25): SEQ ID NO: 4912; WAN024BFV; Start 51; Stop 75
ctcagactgcaagcagttcatcaat

SEQ ID NO: 394087 - DNA, 25 bp, Artificial
  probe
  misc_feature (1)..(25): SEQ ID NO: 4912; WAN024BFV; Start 14; Stop 38
taagtgagtttggaaataatatcca

SEQ ID NO: 394088 - DNA, 25 bp, Artificial
  probe
  misc_feature (1)..(25): SEQ ID NO: 4912; WAN024BFV; Start 112; Stop 136
tcagcttcaccttgccgtaggtata

SEQ ID NO: 394089 - DNA, 25 bp, Artificial
  probe
  misc_feature (1)..(25): SEQ ID NO: 4912; WAN024BFV; Start 50; Stop 74
tctcagactgcaagcagttcatcaa

SEQ ID NO: 394090 - DNA, 25 bp, Artificial
  probe
  misc_feature (1)..(25): SEQ ID NO: 4912; WAN024BFV; Start 49; Stop 73
ttctcagactgcaagcagttcatca

SEQ ID NO: 394091 - DNA, 25 bp, Artificial
  probe
  misc_feature (1)..(25): SEQ ID NO: 4912; WAN024BFV; Start 48; Stop 72
tttctcagactgcaagcagttcatc

SEQ ID NO: 394092 - DNA, 25 bp, Artificial
  probe
  misc_feature (1)..(25): SEQ ID NO: 4912; WAN024BFV; Start 24; Stop 48
tggaaataatatccaagctcatttt

SEQ ID NO: 394093 - DNA, 25 bp, Artificial
  probe
  misc_feature (1)..(25): SEQ ID NO: 4912; WAN024BFV; Start 47; Stop 71
ttttctcagactgcaagcagttcat

SEQ ID NO: 394094 - DNA, 25 bp, Artificial
  probe
  misc_feature (1)..(25): SEQ ID NO: 4913; WAN024FAS; Start 790; Stop 814
atcaccattgtctatctcttcttcc

SEQ ID NO: 394095 - DNA, 25 bp, Artificial
  probe
  misc_feature (1)..(25): SEQ ID NO: 4913; WAN024FAS; Start 226; Stop 250
tattattggaactctgtcgtcatca

SEQ ID NO: 394096 - DNA, 25 bp, Artificial
  probe
  misc_feature (1)..(25): SEQ ID NO: 4913; WAN024FAS; Start 778; Stop 802
ggcattatcagtatcaccattgtct

SEQ ID NO: 394097 - DNA, 25 bp, Artificial
  probe
  misc_feature (1)..(25): SEQ ID NO: 4913; WAN024FAS; Start 224; Stop 248
gctattattggaactctgtcgtcat

SEQ ID NO: 394098 - DNA, 25 bp, Artificial
  probe
  misc_feature (1)..(25): SEQ ID NO: 4913; WAN024FAS; Start 791; Stop 815
tcaccattgtctatctcttcttcca

SEQ ID NO: 394099 - DNA, 25 bp, Artificial
  probe
  misc_feature (1)..(25): SEQ ID NO: 4913; WAN024FAS; Start 227; Stop 251
attattggaactctgtcgtcatcac

SEQ ID NO: 394100 - DNA, 25 bp, Artificial
  probe
  misc_feature (1)..(25): SEQ ID NO: 4913; WAN024FAS; Start 225; Stop 249
ctattattggaactctgtcgtcatc

SEQ ID NO: 394101 - DNA, 25 bp, Artificial
  probe
  misc_feature (1)..(25): SEQ ID NO: 4913; WAN024FAS; Start 801; Stop 825
ctatctcttcttccaacgccatatc

SEQ ID NO: 394102 - DNA, 25 bp, Artificial
  probe
  misc_feature (1)..(25): SEQ ID NO: 4913; WAN024FAS; Start 800; Stop 824
tctatctcttcttccaacgccatat

SEQ ID NO: 394103 - DNA, 25 bp, Artificial
  probe
  misc_feature (1)..(25): SEQ ID NO: 4913; WAN024FAS; Start 785; Stop 809
tcagtatcaccattgtctatctctt

SEQ ID NO: 394104 - DNA, 25 bp, Artificial
  probe
  misc_feature (1)..(25): SEQ ID NO: 4913; WAN024FAS; Start 802; Stop 826
tatctcttcttccaacgccatatca

SEQ ID NO: 394105 - DNA, 25 bp, Artificial
  probe
  misc_feature (1)..(25): SEQ ID NO: 4913; WAN024FAS; Start 793; Stop 817
accattgtctatctcttcttccaac

SEQ ID NO: 394106 - DNA, 25 bp, Artificial
  probe
  misc_feature (1)..(25): SEQ ID NO: 4913; WAN024FAS; Start 792; Stop 816
caccattgtctatctcttcttccaa

SEQ ID NO: 394107 - DNA, 25 bp, Artificial
  probe
  misc_feature (1)..(25): SEQ ID NO: 4913; WAN024FAS; Start 786; Stop 810
cagtatcaccattgtctatctcttc

SEQ ID NO: 394108 - DNA, 25 bp, Artificial
  probe
  misc_feature (1)..(25): SEQ ID NO: 4913; WAN024FAS; Start 787; Stop 811
agtatcaccattgtctatctcttct

SEQ ID NO: 394109 - DNA, 25 bp, Artificial
  probe
  misc_feature (1)..(25): SEQ ID NO: 4913; WAN024FAS; Start 784; Stop 808
atcagtatcaccattgtctatctct

SEQ ID NO: 394110 - DNA, 25 bp, Artificial
  probe
  misc_feature (1)..(25): SEQ ID NO: 4913; WAN024FAS; Start 779; Stop 803
gcattatcagtatcaccattgtcta

SEQ ID NO: 394111 - DNA, 25 bp, Artificial
  probe
  misc_feature (1)..(25): SEQ ID NO: 4913; WAN024FAS; Start 445; Stop 469
ttgatcttgctctacttgacctatg

SEQ ID NO: 394112 - DNA, 25 bp, Artificial
  probe
  misc_feature (1)..(25): SEQ ID NO: 4913; WAN024FAS; Start 216; Stop 240
gattggaggctattattggaactct

SEQ ID NO: 394113 - DNA, 25 bp, Artificial
  probe
  misc_feature (1)..(25): SEQ ID NO: 4913; WAN024FAS; Start 228; Stop 252
ttattggaactctgtcgtcatcact

SEQ ID NO: 394114 - DNA, 25 bp, Artificial
  probe
  misc_feature (1)..(25): SEQ ID NO: 4913; WAN024FAS; Start 217; Stop 241
attggaggctattattggaactctg

SEQ ID NO: 394115 - DNA, 25 bp, Artificial
  probe
  misc_feature (1)..(25): SEQ ID NO: 4913; WAN024FAS; Start 794; Stop 818
ccattgtctatctcttcttccaacg

SEQ ID NO: 394116 - DNA, 25 bp, Artificial
  probe
  misc_feature (1)..(25): SEQ ID NO: 4913; WAN024FAS; Start 777; Stop 801
cggcattatcagtatcaccattgtc

SEQ ID NO: 394117 - DNA, 25 bp, Artificial
  probe
  misc_feature (1)..(25): SEQ ID NO: 4913; WAN024FAS; Start 775; Stop 799
gtcggcattatcagtatcaccattg

SEQ ID NO: 394118 - DNA, 25 bp, Artificial
  probe
  misc_feature (1)..(25): SEQ ID NO: 4913; WAN024FAS; Start 799; Stop 823
gtctatctcttcttccaacgccata

SEQ ID NO: 394119 - DNA, 25 bp, Artificial
  probe
  misc_feature (1)..(25): SEQ ID NO: 4913; WAN024FAS; Start 803; Stop 827
atctcttcttccaacgccatatcat

SEQ ID NO: 394120 - DNA, 25 bp, Artificial
  probe
  misc_feature (1)..(25): SEQ ID NO: 4913; WAN024FAS; Start 215; Stop 239
ggattggaggctattattggaactc

SEQ ID NO: 394121 - DNA, 25 bp, Artificial
  probe
  misc_feature (1)..(25): SEQ ID NO: 4913; WAN024FAS; Start 788; Stop 812
gtatcaccattgtctatctcttctt

SEQ ID NO: 394122 - DNA, 25 bp, Artificial
  probe
  misc_feature (1)..(25): SEQ ID NO: 4913; WAN024FAS; Start 776; Stop 800
tcggcattatcagtatcaccattgt

SEQ ID NO: 394123 - DNA, 25 bp, Artificial
  probe
  misc_feature (1)..(25): SEQ ID NO: 4913; WAN024FAS; Start 222; Stop 246
aggctattattggaactctgtcgtc

SEQ ID NO: 394124 - DNA, 25 bp, Artificial
  probe
  misc_feature (1)..(25): SEQ ID NO: 4913; WAN024FAS; Start 795; Stop 819
cattgtctatctcttcttccaacgc

SEQ ID NO: 394125 - DNA, 25 bp, Artificial
  probe
  misc_feature (1)..(25): SEQ ID NO: 4913; WAN024FAS; Start 218; Stop 242
ttggaggctattattggaactctgt

SEQ ID NO: 394126 - DNA, 25 bp, Artificial
  probe
  misc_feature (1)..(25): SEQ ID NO: 4913; WAN024FAS; Start 789; Stop 813
tatcaccattgtctatctcttcttc

SEQ ID NO: 394127 - DNA, 25 bp, Artificial
  probe
  misc_feature (1)..(25): SEQ ID NO: 4914; WAN024FMD; Start 111; Stop 135
cctcaacattctcacggtagtaata

SEQ ID NO: 394128 - DNA, 25 bp, Artificial
  probe
  misc_feature (1)..(25): SEQ ID NO: 4914; WAN024FMD; Start 116; Stop 140
acattctcacggtagtaatagtcaa

SEQ ID NO: 394129 - DNA, 25 bp, Artificial
  probe
  misc_feature (1)..(25): SEQ ID NO: 4914; WAN024FMD; Start 115; Stop 139
aacattctcacggtagtaatagtca

SEQ ID NO: 394130 - DNA, 25 bp, Artificial
  probe
  misc_feature (1)..(25): SEQ ID NO: 4914; WAN024FMD; Start 113; Stop 137
tcaacattctcacggtagtaatagt

SEQ ID NO: 394131 - DNA, 25 bp, Artificial
  probe
  misc_feature (1)..(25): SEQ ID NO: 4914; WAN024FMD; Start 117; Stop 141
cattctcacggtagtaatagtcaac

SEQ ID NO: 394132 - DNA, 25 bp, Artificial
  probe
  misc_feature (1)..(25): SEQ ID NO: 4914; WAN024FMD; Start 114; Stop 138
caacattctcacggtagtaatagtc

SEQ ID NO: 394133 - DNA, 25 bp, Artificial
  probe
  misc_feature (1)..(25): SEQ ID NO: 4914; WAN024FMD; Start 112; Stop 136
ctcaacattctcacggtagtaatag

SEQ ID NO: 394134 - DNA, 25 bp, Artificial
  probe
  misc_feature (1)..(25): SEQ ID NO: 4914; WAN024FMD; Start 110; Stop 134
tcctcaacattctcacggtagtaat

SEQ ID NO: 394135 - DNA, 25 bp, Artificial
  probe
  misc_feature (1)..(25): SEQ ID NO: 4914; WAN024FMD; Start 302; Stop 326
taacagactctaccaacttctcttg

SEQ ID NO: 394136 - DNA, 25 bp, Artificial
  probe
  misc_feature (1)..(25): SEQ ID NO: 4914; WAN024FMD; Start 109; Stop 133
ttcctcaacattctcacggtagtaa

SEQ ID NO: 394137 - DNA, 25 bp, Artificial
  probe
  misc_feature (1)..(25): SEQ ID NO: 4914; WAN024FMD; Start 121; Stop 145
ctcacggtagtaatagtcaactgtt

SEQ ID NO: 394138 - DNA, 25 bp, Artificial
  probe
  misc_feature (1)..(25): SEQ ID NO: 4914; WAN024FMD; Start 119; Stop 143
ttctcacggtagtaatagtcaactg

SEQ ID NO: 394139 - DNA, 25 bp, Artificial
  probe
  misc_feature (1)..(25): SEQ ID NO: 4914; WAN024FMD; Start 301; Stop 325
ataacagactctaccaacttctctt

SEQ ID NO: 394140 - DNA, 25 bp, Artificial
  probe
  misc_feature (1)..(25): SEQ ID NO: 4914; WAN024FMD; Start 199; Stop 223
ttccttgtgataactcggtcttctt

SEQ ID NO: 394141 - DNA, 25 bp, Artificial
  probe
  misc_feature (1)..(25): SEQ ID NO: 4914; WAN024FMD; Start 120; Stop 144
tctcacggtagtaatagtcaactgt

SEQ ID NO: 394142 - DNA, 25 bp, Artificial
  probe
  misc_feature (1)..(25): SEQ ID NO: 4914; WAN024FMD; Start 64; Stop 88
tatagtcttcgtctcagtagaggtt

SEQ ID NO: 394143 - DNA, 25 bp, Artificial
  probe
  misc_feature (1)..(25): SEQ ID NO: 4914; WAN024FMD; Start 63; Stop 87
ttatagtcttcgtctcagtagaggt

SEQ ID NO: 394144 - DNA, 25 bp, Artificial
  probe
  misc_feature (1)..(25): SEQ ID NO: 4914; WAN024FMD; Start 61; Stop 85
cgttatagtcttcgtctcagtagag

SEQ ID NO: 394145 - DNA, 25 bp, Artificial
  probe
  misc_feature (1)..(25): SEQ ID NO: 4914; WAN024FMD; Start 62; Stop 86
gttatagtcttcgtctcagtagagg

SEQ ID NO: 394146 - DNA, 25 bp, Artificial
  probe
  misc_feature (1)..(25): SEQ ID NO: 4914; WAN024FMD; Start 118; Stop 142
attctcacggtagtaatagtcaact

SEQ ID NO: 394147 - DNA, 25 bp, Artificial
  probe
  misc_feature (1)..(25): SEQ ID NO: 4914; WAN024FMD; Start 60; Stop 84
gcgttatagtcttcgtctcagtaga

SEQ ID NO: 394148 - DNA, 25 bp, Artificial
  probe
  misc_feature (1)..(25): SEQ ID NO: 4914; WAN024FMD; Start 65; Stop 89
atagtcttcgtctcagtagaggttg

SEQ ID NO: 394149 - DNA, 25 bp, Artificial
  probe
  misc_feature (1)..(25): SEQ ID NO: 4914; WAN024FMD; Start 300; Stop 324
tataacagactctaccaacttctct

SEQ ID NO: 394150 - DNA, 25 bp, Artificial
  probe
  misc_feature (1)..(25): SEQ ID NO: 4914; WAN024FMD; Start 122; Stop 146
tcacggtagtaatagtcaactgttg

SEQ ID NO: 394151 - DNA, 25 bp, Artificial
  probe
  misc_feature (1)..(25): SEQ ID NO: 4914; WAN024FMD; Start 307; Stop 331
gactctaccaacttctcttgcctac

SEQ ID NO: 394152 - DNA, 25 bp, Artificial
  probe
  misc_feature (1)..(25): SEQ ID NO: 4914; WAN024FMD; Start 306; Stop 330
agactctaccaacttctcttgccta

SEQ ID NO: 394153 - DNA, 25 bp, Artificial
  probe
  misc_feature (1)..(25): SEQ ID NO: 4914; WAN024FMD; Start 303; Stop 327
aacagactctaccaacttctcttgc

SEQ ID NO: 394154 - DNA, 25 bp, Artificial
  probe
  misc_feature (1)..(25): SEQ ID NO: 4914; WAN024FMD; Start 311; Stop 335
ctaccaacttctcttgcctaccttc

SEQ ID NO: 394155 - DNA, 25 bp, Artificial
  probe
  misc_feature (1)..(25): SEQ ID NO: 4914; WAN024FMD; Start 271; Stop 295
tactcagaacctatcgctaaatcag

SEQ ID NO: 394156 - DNA, 25 bp, Artificial
  probe
  misc_feature (1)..(25): SEQ ID NO: 4914; WAN024FMD; Start 316; Stop 340
aacttctcttgcctaccttctttat

SEQ ID NO: 394157 - DNA, 25 bp, Artificial
  probe
  misc_feature (1)..(25): SEQ ID NO: 4914; WAN024FMD; Start 123; Stop 147
cacggtagtaatagtcaactgttgc

SEQ ID NO: 394158 - DNA, 25 bp, Artificial
  probe
  misc_feature (1)..(25): SEQ ID NO: 4914; WAN024FMD; Start 270; Stop 294
atactcagaacctatcgctaaatca

SEQ ID NO: 394159 - DNA, 25 bp, Artificial
  probe
  misc_feature (1)..(25): SEQ ID NO: 4914; WAN024FMD; Start 217; Stop 241
tcttctttgtcctcagttgttgttt

SEQ ID NO: 394160 - DNA, 25 bp, Artificial
  probe
  misc_feature (1)..(25): SEQ ID NO: 4915; WAN024CML; Start 1; Stop 25
ttgaacaaccttgataatatgcgtt

SEQ ID NO: 394161 - DNA, 25 bp, Artificial
  probe
  misc_feature (1)..(25): SEQ ID NO: 4915; WAN024CML; Start 2; Stop 26
tgaacaaccttgataatatgcgttt

SEQ ID NO: 394162 - DNA, 25 bp, Artificial
  probe
  misc_feature (1)..(25): SEQ ID NO: 4915; WAN024CML; Start 102; Stop 126
ttacttcaacttcttacctcttggg

SEQ ID NO: 394163 - DNA, 25 bp, Artificial
  probe
  misc_feature (1)..(25): SEQ ID NO: 4915; WAN024CML; Start 105; Stop 129
cttcaacttcttacctcttgggaaa

SEQ ID NO: 394164 - DNA, 25 bp, Artificial
  probe
  misc_feature (1)..(25): SEQ ID NO: 4915; WAN024CML; Start 103; Stop 127
tacttcaacttcttacctcttggga

SEQ ID NO: 394165 - DNA, 25 bp, Artificial
  probe
  misc_feature (1)..(25): SEQ ID NO: 4915; WAN024CML; Start 101; Stop 125
tttacttcaacttcttacctcttgg

SEQ ID NO: 394166 - DNA, 25 bp, Artificial
  probe
  misc_feature (1)..(25): SEQ ID NO: 4915; WAN024CML; Start 104; Stop 128
acttcaacttcttacctcttgggaa

SEQ ID NO: 394167 - DNA, 25 bp, Artificial
  probe
  misc_feature (1)..(25): SEQ ID NO: 4915; WAN024CML; Start 98; Stop 122
tgatttacttcaacttcttacctct

SEQ ID NO: 394168 - DNA, 25 bp, Artificial
  probe
  misc_feature (1)..(25): SEQ ID NO: 4915; WAN024CML; Start 99; Stop 123
gatttacttcaacttcttacctctt

SEQ ID NO: 394169 - DNA, 25 bp, Artificial
  probe
  misc_feature (1)..(25): SEQ ID NO: 4915; WAN024CML; Start 100; Stop 124
atttacttcaacttcttacctcttg

SEQ ID NO: 394170 - DNA, 25 bp, Artificial
  probe
  misc_feature (1)..(25): SEQ ID NO: 4915; WAN024CML; Start 97; Stop 121
atgatttacttcaacttcttacctc

SEQ ID NO: 394171 - DNA, 25 bp, Artificial
  probe
  misc_feature (1)..(25): SEQ ID NO: 4915; WAN024CML; Start 106; Stop 130
ttcaacttcttacctcttgggaaaa

SEQ ID NO: 394172 - DNA, 25 bp, Artificial
  probe
  misc_feature (1)..(25): SEQ ID NO: 4915; WAN024CML; Start 3; Stop 27
gaacaaccttgataatatgcgtttt

SEQ ID NO: 394173 - DNA, 25 bp, Artificial
  probe
  misc_feature (1)..(25): SEQ ID NO: 4915; WAN024CML; Start 96; Stop 120
aatgatttacttcaacttcttacct

SEQ ID NO: 394174 - DNA, 25 bp, Artificial
  probe
  misc_feature (1)..(25): SEQ ID NO: 4915; WAN024CML; Start 4; Stop 28
aacaaccttgataatatgcgtttta

SEQ ID NO: 394175 - DNA, 25 bp, Artificial
  probe
  misc_feature (1)..(25): SEQ ID NO: 4915; WAN024CML; Start 5; Stop 29
acaaccttgataatatgcgttttat

SEQ ID NO: 394176 - DNA, 25 bp, Artificial
  probe
  misc_feature (1)..(25): SEQ ID NO: 4915; WAN024CML; Start 43; Stop 67
gcttcattttctcctgaaatagagc

SEQ ID NO: 394177 - DNA, 25 bp, Artificial
  probe
  misc_feature (1)..(25): SEQ ID NO: 4915; WAN024CML; Start 49; Stop 73
ttttctcctgaaatagagcttttgc

SEQ ID NO: 394178 - DNA, 25 bp, Artificial
  probe
  misc_feature (1)..(25): SEQ ID NO: 4915; WAN024CML; Start 6; Stop 30
caaccttgataatatgcgttttatt

SEQ ID NO: 394179 - DNA, 25 bp, Artificial
  probe
  misc_feature (1)..(25): SEQ ID NO: 4915; WAN024CML; Start 42; Stop 66
tgcttcattttctcctgaaatagag

SEQ ID NO: 394180 - DNA, 25 bp, Artificial
  probe
  misc_feature (1)..(25): SEQ ID NO: 4915; WAN024CML; Start 52; Stop 76
tctcctgaaatagagcttttgctat

SEQ ID NO: 394181 - DNA, 25 bp, Artificial
  probe
  misc_feature (1)..(25): SEQ ID NO: 4915; WAN024CML; Start 51; Stop 75
ttctcctgaaatagagcttttgcta

SEQ ID NO: 394182 - DNA, 25 bp, Artificial
  probe
  misc_feature (1)..(25): SEQ ID NO: 4915; WAN024CML; Start 53; Stop 77
ctcctgaaatagagcttttgctatc

SEQ ID NO: 394183 - DNA, 25 bp, Artificial
  probe
  misc_feature (1)..(25): SEQ ID NO: 4915; WAN024CML; Start 55; Stop 79
cctgaaatagagcttttgctatcct

SEQ ID NO: 394184 - DNA, 25 bp, Artificial
  probe
  misc_feature (1)..(25): SEQ ID NO: 4915; WAN024CML; Start 54; Stop 78
tcctgaaatagagcttttgctatcc

SEQ ID NO: 394185 - DNA, 25 bp, Artificial
  probe
  misc_feature (1)..(25): SEQ ID NO: 4915; WAN024CML; Start 50; Stop 74
tttctcctgaaatagagcttttgct

SEQ ID NO: 394186 - DNA, 25 bp, Artificial
  probe
  misc_feature (1)..(25): SEQ ID NO: 4915; WAN024CML; Start 41; Stop 65
ttgcttcattttctcctgaaataga

SEQ ID NO: 394187 - DNA, 25 bp, Artificial
  probe
  misc_feature (1)..(25): SEQ ID NO: 4915; WAN024CML; Start 95; Stop 119
taatgatttacttcaacttcttacc

SEQ ID NO: 394188 - DNA, 25 bp, Artificial
  probe
  misc_feature (1)..(25): SEQ ID NO: 4915; WAN024CML; Start 46; Stop 70
tcattttctcctgaaatagagcttt

SEQ ID NO: 394189 - DNA, 25 bp, Artificial
  probe
  misc_feature (1)..(25): SEQ ID NO: 4915; WAN024CML; Start 40; Stop 64
tttgcttcattttctcctgaaatag

SEQ ID NO: 394190 - DNA, 25 bp, Artificial
  probe
  misc_feature (1)..(25): SEQ ID NO: 4915; WAN024CML; Start 56; Stop 80
ctgaaatagagcttttgctatccta

SEQ ID NO: 394191 - DNA, 25 bp, Artificial
  probe
  misc_feature (1)..(25): SEQ ID NO: 4915; WAN024CML; Start 44; Stop 68
cttcattttctcctgaaatagagct

SEQ ID NO: 394192 - DNA, 25 bp, Artificial
  probe
  misc_feature (1)..(25): SEQ ID NO: 4915; WAN024CML; Start 48; Stop 72
attttctcctgaaatagagcttttg

SEQ ID NO: 394193 - DNA, 25 bp, Artificial
  probe
  misc_feature (1)..(25): SEQ ID NO: 4916; WAN024FMQ; Start 56; Stop 80
aagcaaagcaagtgattgatagaaa

SEQ ID NO: 394194 - DNA, 25 bp, Artificial
  probe
  misc_feature (1)..(25): SEQ ID NO: 4916; WAN024FMQ; Start 55; Stop 79
aaagcaaagcaagtgattgatagaa

SEQ ID NO: 394195 - DNA, 25 bp, Artificial
  probe
  misc_feature (1)..(25): SEQ ID NO: 4916; WAN024FMQ; Start 24; Stop 48
aatcacaccgttactatcttcgaat

SEQ ID NO: 394196 - DNA, 25 bp, Artificial
  probe
  misc_feature (1)..(25): SEQ ID NO: 4916; WAN024FMQ; Start 26; Stop 50
tcacaccgttactatcttcgaataa

SEQ ID NO: 394197 - DNA, 25 bp, Artificial
  probe
  misc_feature (1)..(25): SEQ ID NO: 4916; WAN024FMQ; Start 25; Stop 49
atcacaccgttactatcttcgaata

SEQ ID NO: 394198 - DNA, 25 bp, Artificial
  probe
  misc_feature (1)..(25): SEQ ID NO: 4916; WAN024FMQ; Start 70; Stop 94
attgatagaaaatcggctctttgtc

SEQ ID NO: 394199 - DNA, 25 bp, Artificial
  probe
  misc_feature (1)..(25): SEQ ID NO: 4916; WAN024FMQ; Start 73; Stop 97
gatagaaaatcggctctttgtcaac

SEQ ID NO: 394200 - DNA, 25 bp, Artificial
  probe
  misc_feature (1)..(25): SEQ ID NO: 4916; WAN024FMQ; Start 74; Stop 98
atagaaaatcggctctttgtcaact

SEQ ID NO: 394201 - DNA, 25 bp, Artificial
  probe
  misc_feature (1)..(25): SEQ ID NO: 4916; WAN024FMQ; Start 57; Stop 81
agcaaagcaagtgattgatagaaaa

SEQ ID NO: 394202 - DNA, 25 bp, Artificial
  probe
  misc_feature (1)..(25): SEQ ID NO: 4916; WAN024FMQ; Start 54; Stop 78
aaaagcaaagcaagtgattgataga

SEQ ID NO: 394203 - DNA, 25 bp, Artificial
  probe
  misc_feature (1)..(25): SEQ ID NO: 4916; WAN024FMQ; Start 72; Stop 96
tgatagaaaatcggctctttgtcaa

SEQ ID NO: 394204 - DNA, 25 bp, Artificial
  probe
  misc_feature (1)..(25): SEQ ID NO: 4916; WAN024FMQ; Start 71; Stop 95
ttgatagaaaatcggctctttgtca

SEQ ID NO: 394205 - DNA, 25 bp, Artificial
  probe
  misc_feature (1)..(25): SEQ ID NO: 4916; WAN024FMQ; Start 58; Stop 82
gcaaagcaagtgattgatagaaaat

SEQ ID NO: 394206 - DNA, 25 bp, Artificial
  probe
  misc_feature (1)..(25): SEQ ID NO: 4916; WAN024FMQ; Start 75; Stop 99
tagaaaatcggctctttgtcaactg

SEQ ID NO: 394207 - DNA, 25 bp, Artificial
  probe
  misc_feature (1)..(25): SEQ ID NO: 4916; WAN024FMQ; Start 50; Stop 74
aattaaaagcaaagcaagtgattga

SEQ ID NO: 394208 - DNA, 25 bp, Artificial
  probe
  misc_feature (1)..(25): SEQ ID NO: 4916; WAN024FMQ; Start 51; Stop 75
attaaaagcaaagcaagtgattgat

SEQ ID NO: 394209 - DNA, 25 bp, Artificial
  probe
  misc_feature (1)..(25): SEQ ID NO: 4916; WAN024FMQ; Start 53; Stop 77
taaaagcaaagcaagtgattgatag

SEQ ID NO: 394210 - DNA, 25 bp, Artificial
  probe
  misc_feature (1)..(25): SEQ ID NO: 4916; WAN024FMQ; Start 49; Stop 73
aaattaaaagcaaagcaagtgattg

SEQ ID NO: 394211 - DNA, 25 bp, Artificial
  probe
  misc_feature (1)..(25): SEQ ID NO: 4916; WAN024FMQ; Start 52; Stop 76
ttaaaagcaaagcaagtgattgata

SEQ ID NO: 394212 - DNA, 25 bp, Artificial
  probe
  misc_feature (1)..(25): SEQ ID NO: 4916; WAN024FMQ; Start 44; Stop 68
cgaataaattaaaagcaaagcaagt

SEQ ID NO: 394213 - DNA, 25 bp, Artificial
  probe
  misc_feature (1)..(25): SEQ ID NO: 4916; WAN024FMQ; Start 22; Stop 46
aaaatcacaccgttactatcttcga

SEQ ID NO: 394214 - DNA, 25 bp, Artificial
  probe
  misc_feature (1)..(25): SEQ ID NO: 4916; WAN024FMQ; Start 61; Stop 85
aagcaagtgattgatagaaaatcgg

SEQ ID NO: 394215 - DNA, 25 bp, Artificial
  probe
  misc_feature (1)..(25): SEQ ID NO: 4916; WAN024FMQ; Start 69; Stop 93
gattgatagaaaatcggctctttgt

SEQ ID NO: 394216 - DNA, 25 bp, Artificial
  probe
  misc_feature (1)..(25): SEQ ID NO: 4916; WAN024FMQ; Start 68; Stop 92
tgattgatagaaaatcggctctttg

SEQ ID NO: 394217 - DNA, 25 bp, Artificial
  probe
  misc_feature (1)..(25): SEQ ID NO: 4916; WAN024FMQ; Start 67; Stop 91
gtgattgatagaaaatcggctcttt

SEQ ID NO: 394218 - DNA, 25 bp, Artificial
  probe
  misc_feature (1)..(25): SEQ ID NO: 4916; WAN024FMQ; Start 66; Stop 90
agtgattgatagaaaatcggctctt

SEQ ID NO: 394219 - DNA, 25 bp, Artificial
  probe
  misc_feature (1)..(25): SEQ ID NO: 4916; WAN024FMQ; Start 65; Stop 89
aagtgattgatagaaaatcggctct

SEQ ID NO: 394220 - DNA, 25 bp, Artificial
  probe
  misc_feature (1)..(25): SEQ ID NO: 4916; WAN024FMQ; Start 64; Stop 88
caagtgattgatagaaaatcggctc

SEQ ID NO: 394221 - DNA, 25 bp, Artificial
  probe
  misc_feature (1)..(25): SEQ ID NO: 4916; WAN024FMQ; Start 23; Stop 47
aaatcacaccgttactatcttcgaa

SEQ ID NO: 394222 - DNA, 25 bp, Artificial
  probe
  misc_feature (1)..(25): SEQ ID NO: 4916; WAN024FMQ; Start 27; Stop 51
cacaccgttactatcttcgaataaa

SEQ ID NO: 394223 - DNA, 25 bp, Artificial
  probe
  misc_feature (1)..(25): SEQ ID NO: 4916; WAN024FMQ; Start 60; Stop 84
aaagcaagtgattgatagaaaatcg

SEQ ID NO: 394224 - DNA, 25 bp, Artificial
  probe
  misc_feature (1)..(25): SEQ ID NO: 4916; WAN024FMQ; Start 63; Stop 87
gcaagtgattgatagaaaatcggct

SEQ ID NO: 394225 - DNA, 25 bp, Artificial
  probe
  misc_feature (1)..(25): SEQ ID NO: 4916; WAN024FMQ; Start 62; Stop 86
agcaagtgattgatagaaaatcggc

SEQ ID NO: 394226 - DNA, 25 bp, Artificial
  probe
  misc_feature (1)..(25): SEQ ID NO: 4917; WAN024BFB; Start 1; Stop 25
ttgaacaatcttgatattatgcgtt

SEQ ID NO: 394227 - DNA, 25 bp, Artificial
  probe
  misc_feature (1)..(25): SEQ ID NO: 4917; WAN024BFB; Start 2; Stop 26
tgaacaatcttgatattatgcgttt

SEQ ID NO: 394228 - DNA, 25 bp, Artificial
  probe
  misc_feature (1)..(25): SEQ ID NO: 4917; WAN024BFB; Start 17; Stop 41
ttatgcgttttattgtgggaagatt

SEQ ID NO: 394229 - DNA, 25 bp, Artificial
  probe
  misc_feature (1)..(25): SEQ ID NO: 4917; WAN024BFB; Start 118; Stop 142
atgattttggcaacctggattaaag

SEQ ID NO: 394230 - DNA, 25 bp, Artificial
  probe
  misc_feature (1)..(25): SEQ ID NO: 4917; WAN024BFB; Start 115; Stop 139
cttatgattttggcaacctggatta

SEQ ID NO: 394231 - DNA, 25 bp, Artificial
  probe
  misc_feature (1)..(25): SEQ ID NO: 4917; WAN024BFB; Start 16; Stop 40
attatgcgttttattgtgggaagat

SEQ ID NO: 394232 - DNA, 25 bp, Artificial
  probe
  misc_feature (1)..(25): SEQ ID NO: 4917; WAN024BFB; Start 117; Stop 141
tatgattttggcaacctggattaaa

SEQ ID NO: 394233 - DNA, 25 bp, Artificial
  probe
  misc_feature (1)..(25): SEQ ID NO: 4917; WAN024BFB; Start 116; Stop 140
ttatgattttggcaacctggattaa

SEQ ID NO: 394234 - DNA, 25 bp, Artificial
  probe
  misc_feature (1)..(25): SEQ ID NO: 4917; WAN024BFB; Start 12; Stop 36
tgatattatgcgttttattgtggga

SEQ ID NO: 394235 - DNA, 25 bp, Artificial
  probe
  misc_feature (1)..(25): SEQ ID NO: 4917; WAN024BFB; Start 15; Stop 39
tattatgcgttttattgtgggaaga

SEQ ID NO: 394236 - DNA, 25 bp, Artificial
  probe
  misc_feature (1)..(25): SEQ ID NO: 4917; WAN024BFB; Start 105; Stop 129
aatagcgttccttatgattttggca

SEQ ID NO: 394237 - DNA, 25 bp, Artificial
  probe
  misc_feature (1)..(25): SEQ ID NO: 4917; WAN024BFB; Start 106; Stop 130
atagcgttccttatgattttggcaa

SEQ ID NO: 394238 - DNA, 25 bp, Artificial
  probe
  misc_feature (1)..(25): SEQ ID NO: 4917; WAN024BFB; Start 11; Stop 35
ttgatattatgcgttttattgtggg

SEQ ID NO: 394239 - DNA, 25 bp, Artificial
  probe
  misc_feature (1)..(25): SEQ ID NO: 4917; WAN024BFB; Start 114; Stop 138
ccttatgattttggcaacctggatt

SEQ ID NO: 394240 - DNA, 25 bp, Artificial
  probe
  misc_feature (1)..(25): SEQ ID NO: 4917; WAN024BFB; Start 104; Stop 128
aaatagcgttccttatgattttggc

SEQ ID NO: 394241 - DNA, 25 bp, Artificial
  probe
  misc_feature (1)..(25): SEQ ID NO: 4917; WAN024BFB; Start 14; Stop 38
atattatgcgttttattgtgggaag

SEQ ID NO: 394242 - DNA, 25 bp, Artificial
  probe
  misc_feature (1)..(25): SEQ ID NO: 4917; WAN024BFB; Start 13; Stop 37
gatattatgcgttttattgtgggaa

SEQ ID NO: 394243 - DNA, 25 bp, Artificial
  probe
  misc_feature (1)..(25): SEQ ID NO: 4917; WAN024BFB; Start 107; Stop 131
tagcgttccttatgattttggcaac

SEQ ID NO: 394244 - DNA, 25 bp, Artificial
  probe
  misc_feature (1)..(25): SEQ ID NO: 4917; WAN024BFB; Start 119; Stop 143
tgattttggcaacctggattaaagc

SEQ ID NO: 394245 - DNA, 25 bp, Artificial
  probe
  misc_feature (1)..(25): SEQ ID NO: 4917; WAN024BFB; Start 111; Stop 135
gttccttatgattttggcaacctgg

SEQ ID NO: 394246 - DNA, 25 bp, Artificial
  probe
  misc_feature (1)..(25): SEQ ID NO: 4917; WAN024BFB; Start 10; Stop 34
cttgatattatgcgttttattgtgg

SEQ ID NO: 394247 - DNA, 25 bp, Artificial
  probe
  misc_feature (1)..(25): SEQ ID NO: 4917; WAN024BFB; Start 110; Stop 134
cgttccttatgattttggcaacctg

SEQ ID NO: 394248 - DNA, 25 bp, Artificial
  probe
  misc_feature (1)..(25): SEQ ID NO: 4917; WAN024BFB; Start 68; Stop 92
tttctcctacttcaaaactagatga

SEQ ID NO: 394249 - DNA, 25 bp, Artificial
  probe
  misc_feature (1)..(25): SEQ ID NO: 4917; WAN024BFB; Start 70; Stop 94
tctcctacttcaaaactagatgatt

SEQ ID NO: 394250 - DNA, 25 bp, Artificial
  probe
  misc_feature (1)..(25): SEQ ID NO: 4917; WAN024BFB; Start 69; Stop 93
ttctcctacttcaaaactagatgat

SEQ ID NO: 394251 - DNA, 25 bp, Artificial
  probe
  misc_feature (1)..(25): SEQ ID NO: 4917; WAN024BFB; Start 3; Stop 27
gaacaatcttgatattatgcgtttt

SEQ ID NO: 394252 - DNA, 25 bp, Artificial
  probe
  misc_feature (1)..(25): SEQ ID NO: 4917; WAN024BFB; Start 113; Stop 137
tccttatgattttggcaacctggat

SEQ ID NO: 394253 - DNA, 25 bp, Artificial
  probe
  misc_feature (1)..(25): SEQ ID NO: 4917; WAN024BFB; Start 120; Stop 144
gattttggcaacctggattaaagcg

SEQ ID NO: 394254 - DNA, 25 bp, Artificial
  probe
  misc_feature (1)..(25): SEQ ID NO: 4917; WAN024BFB; Start 112; Stop 136
ttccttatgattttggcaacctgga

SEQ ID NO: 394255 - DNA, 25 bp, Artificial
  probe
  misc_feature (1)..(25): SEQ ID NO: 4917; WAN024BFB; Start 9; Stop 33
tcttgatattatgcgttttattgtg

SEQ ID NO: 394256 - DNA, 25 bp, Artificial
  probe
  misc_feature (1)..(25): SEQ ID NO: 4917; WAN024BFB; Start 125; Stop 149
tggcaacctggattaaagcgagaaa

SEQ ID NO: 394257 - DNA, 25 bp, Artificial
  probe
  misc_feature (1)..(25): SEQ ID NO: 4917; WAN024BFB; Start 124; Stop 148
ttggcaacctggattaaagcgagaa

SEQ ID NO: 394258 - DNA, 25 bp, Artificial
  probe
  misc_feature (1)..(25): SEQ ID NO: 4917; WAN024BFB; Start 123; Stop 147
tttggcaacctggattaaagcgaga

SEQ ID NO: 394259 - DNA, 25 bp, Artificial
  probe
  misc_feature (1)..(25): SEQ ID NO: 4918; WAN024DO6; Start 12; Stop 36
tttaggagaacttgaaacttattcc

SEQ ID NO: 394260 - DNA, 25 bp, Artificial
  probe
  misc_feature (1)..(25): SEQ ID NO: 4918; WAN024DO6; Start 2; Stop 26
tgaacaatcttttaggagaacttga

SEQ ID NO: 394261 - DNA, 25 bp, Artificial
  probe
  misc_feature (1)..(25): SEQ ID NO: 4918; WAN024DO6; Start 5; Stop 29
acaatcttttaggagaacttgaaac

SEQ ID NO: 394262 - DNA, 25 bp, Artificial
  probe
  misc_feature (1)..(25): SEQ ID NO: 4918; WAN024DO6; Start 1; Stop 25
ttgaacaatcttttaggagaacttg

SEQ ID NO: 394263 - DNA, 25 bp, Artificial
  probe
  misc_feature (1)..(25): SEQ ID NO: 4918; WAN024DO6; Start 6; Stop 30
caatcttttaggagaacttgaaact

SEQ ID NO: 394264 - DNA, 25 bp, Artificial
  probe
  misc_feature (1)..(25): SEQ ID NO: 4918; WAN024DO6; Start 3; Stop 27
gaacaatcttttaggagaacttgaa

SEQ ID NO: 394265 - DNA, 25 bp, Artificial
  probe
  misc_feature (1)..(25): SEQ ID NO: 4918; WAN024DO6; Start 4; Stop 28
aacaatcttttaggagaacttgaaa

SEQ ID NO: 394266 - DNA, 25 bp, Artificial
  probe
  misc_feature (1)..(25): SEQ ID NO: 4918; WAN024DO6; Start 16; Stop 40
ggagaacttgaaacttattcctttt

SEQ ID NO: 394267 - DNA, 25 bp, Artificial
  probe
  misc_feature (1)..(25): SEQ ID NO: 4918; WAN024DO6; Start 7; Stop 31
aatcttttaggagaacttgaaactt

SEQ ID NO: 394268 - DNA, 25 bp, Artificial
  probe
  misc_feature (1)..(25): SEQ ID NO: 4918; WAN024DO6; Start 15; Stop 39
aggagaacttgaaacttattccttt

SEQ ID NO: 394269 - DNA, 25 bp, Artificial
  probe
  misc_feature (1)..(25): SEQ ID NO: 4918; WAN024DO6; Start 9; Stop 33
tcttttaggagaacttgaaacttat

SEQ ID NO: 394270 - DNA, 25 bp, Artificial
  probe
  misc_feature (1)..(25): SEQ ID NO: 4918; WAN024DO6; Start 8; Stop 32
atcttttaggagaacttgaaactta

SEQ ID NO: 394271 - DNA, 25 bp, Artificial
  probe
  misc_feature (1)..(25): SEQ ID NO: 4918; WAN024DO6; Start 14; Stop 38
taggagaacttgaaacttattcctt

SEQ ID NO: 394272 - DNA, 25 bp, Artificial
  probe
  misc_feature (1)..(25): SEQ ID NO: 4918; WAN024DO6; Start 13; Stop 37
ttaggagaacttgaaacttattcct

SEQ ID NO: 394273 - DNA, 25 bp, Artificial
  probe
  misc_feature (1)..(25): SEQ ID NO: 4918; WAN024DO6; Start 10; Stop 34
cttttaggagaacttgaaacttatt

SEQ ID NO: 394274 - DNA, 25 bp, Artificial
  probe
  misc_feature (1)..(25): SEQ ID NO: 4918; WAN024DO6; Start 11; Stop 35
ttttaggagaacttgaaacttattc

SEQ ID NO: 394275 - DNA, 25 bp, Artificial
  probe
  misc_feature (1)..(25): SEQ ID NO: 4919; WAN024DO5; Start 101; Stop 125
gtatcttgataattgaacacgcctg

SEQ ID NO: 394276 - DNA, 25 bp, Artificial
  probe
  misc_feature (1)..(25): SEQ ID NO: 4919; WAN024DO5; Start 102; Stop 126
tatcttgataattgaacacgcctgg

SEQ ID NO: 394277 - DNA, 25 bp, Artificial
  probe
  misc_feature (1)..(25): SEQ ID NO: 4919; WAN024DO5; Start 99; Stop 123
ttgtatcttgataattgaacacgcc

SEQ ID NO: 394278 - DNA, 25 bp, Artificial
  probe
  misc_feature (1)..(25): SEQ ID NO: 4919; WAN024DO5; Start 100; Stop 124
tgtatcttgataattgaacacgcct

SEQ ID NO: 394279 - DNA, 25 bp, Artificial
  probe
  misc_feature (1)..(25): SEQ ID NO: 4919; WAN024DO5; Start 103; Stop 127
atcttgataattgaacacgcctgga

SEQ ID NO: 394280 - DNA, 25 bp, Artificial
  probe
  misc_feature (1)..(25): SEQ ID NO: 4919; WAN024DO5; Start 105; Stop 129
cttgataattgaacacgcctggaac

SEQ ID NO: 394281 - DNA, 25 bp, Artificial
  probe
  misc_feature (1)..(25): SEQ ID NO: 4919; WAN024DO5; Start 104; Stop 128
tcttgataattgaacacgcctggaa

SEQ ID NO: 394282 - DNA, 25 bp, Artificial
  probe
  misc_feature (1)..(25): SEQ ID NO: 4919; WAN024DO5; Start 98; Stop 122
tttgtatcttgataattgaacacgc

SEQ ID NO: 394283 - DNA, 25 bp, Artificial
  probe
  misc_feature (1)..(25): SEQ ID NO: 4919; WAN024DO5; Start 92; Stop 116
aggtcctttgtatcttgataattga

SEQ ID NO: 394284 - DNA, 25 bp, Artificial
  probe
  misc_feature (1)..(25): SEQ ID NO: 4919; WAN024DO5; Start 106; Stop 130
ttgataattgaacacgcctggaacc

SEQ ID NO: 394285 - DNA, 25 bp, Artificial
  probe
  misc_feature (1)..(25): SEQ ID NO: 4919; WAN024DO5; Start 86; Stop 110
cagctaaggtcctttgtatcttgat

SEQ ID NO: 394286 - DNA, 25 bp, Artificial
  probe
  misc_feature (1)..(25): SEQ ID NO: 4919; WAN024DO5; Start 88; Stop 112
gctaaggtcctttgtatcttgataa

SEQ ID NO: 394287 - DNA, 25 bp, Artificial
  probe
  misc_feature (1)..(25): SEQ ID NO: 4919; WAN024DO5; Start 87; Stop 111
agctaaggtcctttgtatcttgata

SEQ ID NO: 394288 - DNA, 25 bp, Artificial
  probe
  misc_feature (1)..(25): SEQ ID NO: 4919; WAN024DO5; Start 93; Stop 117
ggtcctttgtatcttgataattgaa

SEQ ID NO: 394289 - DNA, 25 bp, Artificial
  probe
  misc_feature (1)..(25): SEQ ID NO: 4919; WAN024DO5; Start 85; Stop 109
gcagctaaggtcctttgtatcttga

SEQ ID NO: 394290 - DNA, 25 bp, Artificial
  probe
  misc_feature (1)..(25): SEQ ID NO: 4919; WAN024DO5; Start 97; Stop 121
ctttgtatcttgataattgaacacg

SEQ ID NO: 394291 - DNA, 25 bp, Artificial
  probe
  misc_feature (1)..(25): SEQ ID NO: 4919; WAN024DO5; Start 91; Stop 115
aaggtcctttgtatcttgataattg

SEQ ID NO: 394292 - DNA, 25 bp, Artificial
  probe
  misc_feature (1)..(25): SEQ ID NO: 4919; WAN024DO5; Start 54; Stop 78
gaaagtcagtgccattccctatttt

SEQ ID NO: 394293 - DNA, 25 bp, Artificial
  probe
  misc_feature (1)..(25): SEQ ID NO: 4919; WAN024DO5; Start 94; Stop 118
gtcctttgtatcttgataattgaac

SEQ ID NO: 394294 - DNA, 25 bp, Artificial
  probe
  misc_feature (1)..(25): SEQ ID NO: 4919; WAN024DO5; Start 96; Stop 120
cctttgtatcttgataattgaacac

SEQ ID NO: 394295 - DNA, 25 bp, Artificial
  probe
  misc_feature (1)..(25): SEQ ID NO: 4919; WAN024DO5; Start 95; Stop 119
tcctttgtatcttgataattgaaca

SEQ ID NO: 394296 - DNA, 25 bp, Artificial
  probe
  misc_feature (1)..(25): SEQ ID NO: 4919; WAN024DO5; Start 84; Stop 108
ggcagctaaggtcctttgtatcttg

SEQ ID NO: 394297 - DNA, 25 bp, Artificial
  probe
  misc_feature (1)..(25): SEQ ID NO: 4919; WAN024DO5; Start 89; Stop 113
ctaaggtcctttgtatcttgataat

SEQ ID NO: 394298 - DNA, 25 bp, Artificial
  probe
  misc_feature (1)..(25): SEQ ID NO: 4919; WAN024DO5; Start 83; Stop 107
aggcagctaaggtcctttgtatctt

SEQ ID NO: 394299 - DNA, 25 bp, Artificial
  probe
  misc_feature (1)..(25): SEQ ID NO: 4919; WAN024DO5; Start 90; Stop 114
taaggtcctttgtatcttgataatt

SEQ ID NO: 394300 - DNA, 25 bp, Artificial
  probe
  misc_feature (1)..(25): SEQ ID NO: 4919; WAN024DO5; Start 82; Stop 106
gaggcagctaaggtcctttgtatct

SEQ ID NO: 394301 - DNA, 25 bp, Artificial
  probe
  misc_feature (1)..(25): SEQ ID NO: 4919; WAN024DO5; Start 81; Stop 105
agaggcagctaaggtcctttgtatc

SEQ ID NO: 394302 - DNA, 25 bp, Artificial
  probe
  misc_feature (1)..(25): SEQ ID NO: 4919; WAN024DO5; Start 108; Stop 132
gataattgaacacgcctggaaccct

SEQ ID NO: 394303 - DNA, 25 bp, Artificial
  probe
  misc_feature (1)..(25): SEQ ID NO: 4919; WAN024DO5; Start 80; Stop 104
cagaggcagctaaggtcctttgtat

SEQ ID NO: 394304 - DNA, 25 bp, Artificial
  probe
  misc_feature (1)..(25): SEQ ID NO: 4919; WAN024DO5; Start 53; Stop 77
ggaaagtcagtgccattccctattt

SEQ ID NO: 394305 - DNA, 25 bp, Artificial
  probe
  misc_feature (1)..(25): SEQ ID NO: 4919; WAN024DO5; Start 77; Stop 101
tttcagaggcagctaaggtcctttg

SEQ ID NO: 394306 - DNA, 25 bp, Artificial
  probe
  misc_feature (1)..(25): SEQ ID NO: 4919; WAN024DO5; Start 79; Stop 103
tcagaggcagctaaggtcctttgta

SEQ ID NO: 394307 - DNA, 25 bp, Artificial
  probe
  misc_feature (1)..(25): SEQ ID NO: 4919; WAN024DO5; Start 52; Stop 76
tggaaagtcagtgccattccctatt

SEQ ID NO: 394308 - DNA, 25 bp, Artificial
  probe
  misc_feature (1)..(25): SEQ ID NO: 4920; WAN024DL2; Start 20; Stop 44
tgagtgtgtatggtagagtagaaga

SEQ ID NO: 394309 - DNA, 25 bp, Artificial
  probe
  misc_feature (1)..(25): SEQ ID NO: 4920; WAN024DL2; Start 13; Stop 37
aacgatatgagtgtgtatggtagag

SEQ ID NO: 394310 - DNA, 25 bp, Artificial
  probe
  misc_feature (1)..(25): SEQ ID NO: 4920; WAN024DL2; Start 799; Stop 823
cgttatcctattgacagtattcgct

SEQ ID NO: 394311 - DNA, 25 bp, Artificial
  probe
  misc_feature (1)..(25): SEQ ID NO: 4920; WAN024DL2; Start 798; Stop 822
tcgttatcctattgacagtattcgc

SEQ ID NO: 394312 - DNA, 25 bp, Artificial
  probe
  misc_feature (1)..(25): SEQ ID NO: 4920; WAN024DL2; Start 792; Stop 816
tggtattcgttatcctattgacagt

SEQ ID NO: 394313 - DNA, 25 bp, Artificial
  probe
  misc_feature (1)..(25): SEQ ID NO: 4920; WAN024DL2; Start 790; Stop 814
agtggtattcgttatcctattgaca

SEQ ID NO: 394314 - DNA, 25 bp, Artificial
  probe
  misc_feature (1)..(25): SEQ ID NO: 4920; WAN024DL2; Start 23; Stop 47
gtgtgtatggtagagtagaagaagt

SEQ ID NO: 394315 - DNA, 25 bp, Artificial
  probe
  misc_feature (1)..(25): SEQ ID NO: 4920; WAN024DL2; Start 14; Stop 38
acgatatgagtgtgtatggtagagt

SEQ ID NO: 394316 - DNA, 25 bp, Artificial
  probe
  misc_feature (1)..(25): SEQ ID NO: 4920; WAN024DL2; Start 791; Stop 815
gtggtattcgttatcctattgacag

SEQ ID NO: 394317 - DNA, 25 bp, Artificial
  probe
  misc_feature (1)..(25): SEQ ID NO: 4920; WAN024DL2; Start 22; Stop 46
agtgtgtatggtagagtagaagaag

SEQ ID NO: 394318 - DNA, 25 bp, Artificial
  probe
  misc_feature (1)..(25): SEQ ID NO: 4920; WAN024DL2; Start 21; Stop 45
gagtgtgtatggtagagtagaagaa

SEQ ID NO: 394319 - DNA, 25 bp, Artificial
  probe
  misc_feature (1)..(25): SEQ ID NO: 4920; WAN024DL2; Start 19; Stop 43
atgagtgtgtatggtagagtagaag

SEQ ID NO: 394320 - DNA, 25 bp, Artificial
  probe
  misc_feature (1)..(25): SEQ ID NO: 4920; WAN024DL2; Start 40; Stop 64
gaagaagttcataaggagaatcgtg

SEQ ID NO: 394321 - DNA, 25 bp, Artificial
  probe
  misc_feature (1)..(25): SEQ ID NO: 4920; WAN024DL2; Start 39; Stop 63
agaagaagttcataaggagaatcgt

SEQ ID NO: 394322 - DNA, 25 bp, Artificial
  probe
  misc_feature (1)..(25): SEQ ID NO: 4920; WAN024DL2; Start 15; Stop 39
cgatatgagtgtgtatggtagagta

SEQ ID NO: 394323 - DNA, 25 bp, Artificial
  probe
  misc_feature (1)..(25): SEQ ID NO: 4920; WAN024DL2; Start 800; Stop 824
gttatcctattgacagtattcgctt

SEQ ID NO: 394324 - DNA, 25 bp, Artificial
  probe
  misc_feature (1)..(25): SEQ ID NO: 4920; WAN024DL2; Start 797; Stop 821
ttcgttatcctattgacagtattcg

SEQ ID NO: 394325 - DNA, 25 bp, Artificial
  probe
  misc_feature (1)..(25): SEQ ID NO: 4920; WAN024DL2; Start 24; Stop 48
tgtgtatggtagagtagaagaagtt

SEQ ID NO: 394326 - DNA, 25 bp, Artificial
  probe
  misc_feature (1)..(25): SEQ ID NO: 4920; WAN024DL2; Start 41; Stop 65
aagaagttcataaggagaatcgtga

SEQ ID NO: 394327 - DNA, 25 bp, Artificial
  probe
  misc_feature (1)..(25): SEQ ID NO: 4920; WAN024DL2; Start 26; Stop 50
tgtatggtagagtagaagaagttca

SEQ ID NO: 394328 - DNA, 25 bp, Artificial
  probe
  misc_feature (1)..(25): SEQ ID NO: 4920; WAN024DL2; Start 18; Stop 42
tatgagtgtgtatggtagagtagaa

SEQ ID NO: 394329 - DNA, 25 bp, Artificial
  probe
  misc_feature (1)..(25): SEQ ID NO: 4920; WAN024DL2; Start 25; Stop 49
gtgtatggtagagtagaagaagttc

SEQ ID NO: 394330 - DNA, 25 bp, Artificial
  probe
  misc_feature (1)..(25): SEQ ID NO: 4920; WAN024DL2; Start 34; Stop 58
agagtagaagaagttcataaggaga

SEQ ID NO: 394331 - DNA, 25 bp, Artificial
  probe
  misc_feature (1)..(25): SEQ ID NO: 4920; WAN024DL2; Start 793; Stop 817
ggtattcgttatcctattgacagta

SEQ ID NO: 394332 - DNA, 25 bp, Artificial
  probe
  misc_feature (1)..(25): SEQ ID NO: 4920; WAN024DL2; Start 789; Stop 813
tagtggtattcgttatcctattgac

SEQ ID NO: 394333 - DNA, 25 bp, Artificial
  probe
  misc_feature (1)..(25): SEQ ID NO: 4920; WAN024DL2; Start 17; Stop 41
atatgagtgtgtatggtagagtaga

SEQ ID NO: 394334 - DNA, 25 bp, Artificial
  probe
  misc_feature (1)..(25): SEQ ID NO: 4920; WAN024DL2; Start 48; Stop 72
tcataaggagaatcgtgaacctcta

SEQ ID NO: 394335 - DNA, 25 bp, Artificial
  probe
  misc_feature (1)..(25): SEQ ID NO: 4920; WAN024DL2; Start 38; Stop 62
tagaagaagttcataaggagaatcg

SEQ ID NO: 394336 - DNA, 25 bp, Artificial
  probe
  misc_feature (1)..(25): SEQ ID NO: 4920; WAN024DL2; Start 31; Stop 55
ggtagagtagaagaagttcataagg

SEQ ID NO: 394337 - DNA, 25 bp, Artificial
  probe
  misc_feature (1)..(25): SEQ ID NO: 4920; WAN024DL2; Start 49; Stop 73
cataaggagaatcgtgaacctctag

SEQ ID NO: 394338 - DNA, 25 bp, Artificial
  probe
  misc_feature (1)..(25): SEQ ID NO: 4920; WAN024DL2; Start 535; Stop 559
tacctaagcaatccaagccatgata

SEQ ID NO: 394339 - DNA, 25 bp, Artificial
  probe
  misc_feature (1)..(25): SEQ ID NO: 4920; WAN024DL2; Start 16; Stop 40
gatatgagtgtgtatggtagagtag

SEQ ID NO: 394340 - DNA, 25 bp, Artificial
  probe
  misc_feature (1)..(25): SEQ ID NO: 4920; WAN024DL2; Start 442; Stop 466
tacatgctagttacaggtcttgctt

SEQ ID NO: 394341 - DNA, 25 bp, Artificial
  probe
  misc_feature (1)..(25): SEQ ID NO: 4921; WAN024GOA; Start 99; Stop 123
cgactgtacgcttaccatatccttt

SEQ ID NO: 394342 - DNA, 25 bp, Artificial
  probe
  misc_feature (1)..(25): SEQ ID NO: 4921; WAN024GOA; Start 127; Stop 151
tgtgataataagaacctcatcttga

SEQ ID NO: 394343 - DNA, 25 bp, Artificial
  probe
  misc_feature (1)..(25): SEQ ID NO: 4921; WAN024GOA; Start 126; Stop 150
ctgtgataataagaacctcatcttg

SEQ ID NO: 394344 - DNA, 25 bp, Artificial
  probe
  misc_feature (1)..(25): SEQ ID NO: 4921; WAN024GOA; Start 125; Stop 149
tctgtgataataagaacctcatctt

SEQ ID NO: 394345 - DNA, 25 bp, Artificial
  probe
  misc_feature (1)..(25): SEQ ID NO: 4921; WAN024GOA; Start 124; Stop 148
ttctgtgataataagaacctcatct

SEQ ID NO: 394346 - DNA, 25 bp, Artificial
  probe
  misc_feature (1)..(25): SEQ ID NO: 4921; WAN024GOA; Start 100; Stop 124
gactgtacgcttaccatatcctttt

SEQ ID NO: 394347 - DNA, 25 bp, Artificial
  probe
  misc_feature (1)..(25): SEQ ID NO: 4921; WAN024GOA; Start 171; Stop 195
caacaactgtgtctccttcacgaag

SEQ ID NO: 394348 - DNA, 25 bp, Artificial
  probe
  misc_feature (1)..(25): SEQ ID NO: 4921; WAN024GOA; Start 128; Stop 152
gtgataataagaacctcatcttgat

SEQ ID NO: 394349 - DNA, 25 bp, Artificial
  probe
  misc_feature (1)..(25): SEQ ID NO: 4921; WAN024GOA; Start 78; Stop 102
cttttgttgggtattcagtagcgac

SEQ ID NO: 394350 - DNA, 25 bp, Artificial
  probe
  misc_feature (1)..(25): SEQ ID NO: 4921; WAN024GOA; Start 137; Stop 161
agaacctcatcttgatcagtaatca

SEQ ID NO: 394351 - DNA, 25 bp, Artificial
  probe
  misc_feature (1)..(25): SEQ ID NO: 4921; WAN024GOA; Start 129; Stop 153
tgataataagaacctcatcttgatc

SEQ ID NO: 394352 - DNA, 25 bp, Artificial
  probe
  misc_feature (1)..(25): SEQ ID NO: 4921; WAN024GOA; Start 150; Stop 174
gatcagtaatcaagctggcaccaac

SEQ ID NO: 394353 - DNA, 25 bp, Artificial
  probe
  misc_feature (1)..(25): SEQ ID NO: 4921; WAN024GOA; Start 136; Stop 160
aagaacctcatcttgatcagtaatc

SEQ ID NO: 394354 - DNA, 25 bp, Artificial
  probe
  misc_feature (1)..(25): SEQ ID NO: 4921; WAN024GOA; Start 79; Stop 103
ttttgttgggtattcagtagcgact

SEQ ID NO: 394355 - DNA, 25 bp, Artificial
  probe
  misc_feature (1)..(25): SEQ ID NO: 4921; WAN024GOA; Start 43; Stop 67
aattttagctgtctgcattccctta

SEQ ID NO: 394356 - DNA, 25 bp, Artificial
  probe
  misc_feature (1)..(25): SEQ ID NO: 4921; WAN024GOA; Start 42; Stop 66
taattttagctgtctgcattccctt

SEQ ID NO: 394357 - DNA, 25 bp, Artificial
  probe
  misc_feature (1)..(25): SEQ ID NO: 4921; WAN024GOA; Start 77; Stop 101
ccttttgttgggtattcagtagcga

SEQ ID NO: 394358 - DNA, 25 bp, Artificial
  probe
  misc_feature (1)..(25): SEQ ID NO: 4921; WAN024GOA; Start 155; Stop 179
gtaatcaagctggcaccaacaactg

SEQ ID NO: 394359 - DNA, 25 bp, Artificial
  probe
  misc_feature (1)..(25): SEQ ID NO: 4921; WAN024GOA; Start 44; Stop 68
attttagctgtctgcattcccttac

SEQ ID NO: 394360 - DNA, 25 bp, Artificial
  probe
  misc_feature (1)..(25): SEQ ID NO: 4921; WAN024GOA; Start 41; Stop 65
gtaattttagctgtctgcattccct

SEQ ID NO: 394361 - DNA, 25 bp, Artificial
  probe
  misc_feature (1)..(25): SEQ ID NO: 4921; WAN024GOA; Start 37; Stop 61
ttcggtaattttagctgtctgcatt

SEQ ID NO: 394362 - DNA, 25 bp, Artificial
  probe
  misc_feature (1)..(25): SEQ ID NO: 4921; WAN024GOA; Start 36; Stop 60
tttcggtaattttagctgtctgcat

SEQ ID NO: 394363 - DNA, 25 bp, Artificial
  probe
  misc_feature (1)..(25): SEQ ID NO: 4921; WAN024GOA; Start 74; Stop 98
cgaccttttgttgggtattcagtag

SEQ ID NO: 394364 - DNA, 25 bp, Artificial
  probe
  misc_feature (1)..(25): SEQ ID NO: 4921; WAN024GOA; Start 35; Stop 59
ttttcggtaattttagctgtctgca

SEQ ID NO: 394365 - DNA, 25 bp, Artificial
  probe
  misc_feature (1)..(25): SEQ ID NO: 4921; WAN024GOA; Start 75; Stop 99
gaccttttgttgggtattcagtagc

SEQ ID NO: 394366 - DNA, 25 bp, Artificial
  probe
  misc_feature (1)..(25): SEQ ID NO: 4921; WAN024GOA; Start 38; Stop 62
tcggtaattttagctgtctgcattc

SEQ ID NO: 394367 - DNA, 25 bp, Artificial
  probe
  misc_feature (1)..(25): SEQ ID NO: 4921; WAN024GOA; Start 123; Stop 147
tttctgtgataataagaacctcatc

SEQ ID NO: 394368 - DNA, 25 bp, Artificial
  probe
  misc_feature (1)..(25): SEQ ID NO: 4921; WAN024GOA; Start 73; Stop 97
acgaccttttgttgggtattcagta

SEQ ID NO: 394369 - DNA, 25 bp, Artificial
  probe
  misc_feature (1)..(25): SEQ ID NO: 4921; WAN024GOA; Start 151; Stop 175
atcagtaatcaagctggcaccaaca

SEQ ID NO: 394370 - DNA, 25 bp, Artificial
  probe
  misc_feature (1)..(25): SEQ ID NO: 4921; WAN024GOA; Start 46; Stop 70
tttagctgtctgcattcccttacca

SEQ ID NO: 394371 - DNA, 25 bp, Artificial
  probe
  misc_feature (1)..(25): SEQ ID NO: 4921; WAN024GOA; Start 154; Stop 178
agtaatcaagctggcaccaacaact

SEQ ID NO: 394372 - DNA, 25 bp, Artificial
  probe
  misc_feature (1)..(25): SEQ ID NO: 4921; WAN024GOA; Start 135; Stop 159
taagaacctcatcttgatcagtaat

SEQ ID NO: 394373 - DNA, 25 bp, Artificial
  probe
  misc_feature (1)..(25): SEQ ID NO: 4921; WAN024GOA; Start 134; Stop 158
ataagaacctcatcttgatcagtaa

SEQ ID NO: 394374 - DNA, 25 bp, Artificial
  probe
  misc_feature (1)..(25): SEQ ID NO: 4922; WAN024CEG; Start 1774; Stop 1798
ttggcacttgatatggaactgtatg

SEQ ID NO: 394375 - DNA, 25 bp, Artificial
  probe
  misc_feature (1)..(25): SEQ ID NO: 4922; WAN024CEG; Start 1318; Stop 1342
attattaccattgatcgcagcctat

SEQ ID NO: 394376 - DNA, 25 bp, Artificial
  probe
  misc_feature (1)..(25): SEQ ID NO: 4922; WAN024CEG; Start 1316; Stop 1340
atattattaccattgatcgcagcct

SEQ ID NO: 394377 - DNA, 25 bp, Artificial
  probe
  misc_feature (1)..(25): SEQ ID NO: 4922; WAN024CEG; Start 1320; Stop 1344
tattaccattgatcgcagcctatta

SEQ ID NO: 394378 - DNA, 25 bp, Artificial
  probe
  misc_feature (1)..(25): SEQ ID NO: 4922; WAN024CEG; Start 1317; Stop 1341
tattattaccattgatcgcagccta

SEQ ID NO: 394379 - DNA, 25 bp, Artificial
  probe
  misc_feature (1)..(25): SEQ ID NO: 4922; WAN024CEG; Start 1321; Stop 1345
attaccattgatcgcagcctattaa

SEQ ID NO: 394380 - DNA, 25 bp, Artificial
  probe
  misc_feature (1)..(25): SEQ ID NO: 4922; WAN024CEG; Start 1319; Stop 1343
ttattaccattgatcgcagcctatt

SEQ ID NO: 394381 - DNA, 25 bp, Artificial
  probe
  misc_feature (1)..(25): SEQ ID NO: 4922; WAN024CEG; Start 1775; Stop 1799
tggcacttgatatggaactgtatgt

SEQ ID NO: 394382 - DNA, 25 bp, Artificial
  probe
  misc_feature (1)..(25): SEQ ID NO: 4922; WAN024CEG; Start 1315; Stop 1339
aatattattaccattgatcgcagcc

SEQ ID NO: 394383 - DNA, 25 bp, Artificial
  probe
  misc_feature (1)..(25): SEQ ID NO: 4922; WAN024CEG; Start 1824; Stop 1848
tcataagaccaatattcagacagga

SEQ ID NO: 394384 - DNA, 25 bp, Artificial
  probe
  misc_feature (1)..(25): SEQ ID NO: 4922; WAN024CEG; Start 1823; Stop 1847
ctcataagaccaatattcagacagg

SEQ ID NO: 394385 - DNA, 25 bp, Artificial
  probe
  misc_feature (1)..(25): SEQ ID NO: 4922; WAN024CEG; Start 1829; Stop 1853
agaccaatattcagacaggatctaa

SEQ ID NO: 394386 - DNA, 25 bp, Artificial
  probe
  misc_feature (1)..(25): SEQ ID NO: 4922; WAN024CEG; Start 1828; Stop 1852
aagaccaatattcagacaggatcta

SEQ ID NO: 394387 - DNA, 25 bp, Artificial
  probe
  misc_feature (1)..(25): SEQ ID NO: 4922; WAN024CEG; Start 1827; Stop 1851
taagaccaatattcagacaggatct

SEQ ID NO: 394388 - DNA, 25 bp, Artificial
  probe
  misc_feature (1)..(25): SEQ ID NO: 4922; WAN024CEG; Start 1200; Stop 1224
agagggagtatcacggagtttatta

SEQ ID NO: 394389 - DNA, 25 bp, Artificial
  probe
  misc_feature (1)..(25): SEQ ID NO: 4922; WAN024CEG; Start 1199; Stop 1223
tagagggagtatcacggagtttatt

SEQ ID NO: 394390 - DNA, 25 bp, Artificial
  probe
  misc_feature (1)..(25): SEQ ID NO: 4922; WAN024CEG; Start 1773; Stop 1797
tttggcacttgatatggaactgtat

SEQ ID NO: 394391 - DNA, 25 bp, Artificial
  probe
  misc_feature (1)..(25): SEQ ID NO: 4922; WAN024CEG; Start 1772; Stop 1796
atttggcacttgatatggaactgta

SEQ ID NO: 394392 - DNA, 25 bp, Artificial
  probe
  misc_feature (1)..(25): SEQ ID NO: 4922; WAN024CEG; Start 1825; Stop 1849
cataagaccaatattcagacaggat

SEQ ID NO: 394393 - DNA, 25 bp, Artificial
  probe
  misc_feature (1)..(25): SEQ ID NO: 4922; WAN024CEG; Start 1201; Stop 1225
gagggagtatcacggagtttattaa

SEQ ID NO: 394394 - DNA, 25 bp, Artificial
  probe
  misc_feature (1)..(25): SEQ ID NO: 4922; WAN024CEG; Start 1770; Stop 1794
gaatttggcacttgatatggaactg

SEQ ID NO: 394395 - DNA, 25 bp, Artificial
  probe
  misc_feature (1)..(25): SEQ ID NO: 4922; WAN024CEG; Start 1769; Stop 1793
agaatttggcacttgatatggaact

SEQ ID NO: 394396 - DNA, 25 bp, Artificial
  probe
  misc_feature (1)..(25): SEQ ID NO: 4922; WAN024CEG; Start 1768; Stop 1792
cagaatttggcacttgatatggaac

SEQ ID NO: 394397 - DNA, 25 bp, Artificial
  probe
  misc_feature (1)..(25): SEQ ID NO: 4922; WAN024CEG; Start 1826; Stop 1850
ataagaccaatattcagacaggatc

SEQ ID NO: 394398 - DNA, 25 bp, Artificial
  probe
  misc_feature (1)..(25): SEQ ID NO: 4922; WAN024CEG; Start 1202; Stop 1226
agggagtatcacggagtttattaac

SEQ ID NO: 394399 - DNA, 25 bp, Artificial
  probe
  misc_feature (1)..(25): SEQ ID NO: 4922; WAN024CEG; Start 2033; Stop 2057
ttaaattgtggagtcgtgtcagaaa

SEQ ID NO: 394400 - DNA, 25 bp, Artificial
  probe
  misc_feature (1)..(25): SEQ ID NO: 4922; WAN024CEG; Start 1771; Stop 1795
aatttggcacttgatatggaactgt

SEQ ID NO: 394401 - DNA, 25 bp, Artificial
  probe
  misc_feature (1)..(25): SEQ ID NO: 4922; WAN024CEG; Start 1822; Stop 1846
tctcataagaccaatattcagacag

SEQ ID NO: 394402 - DNA, 25 bp, Artificial
  probe
  misc_feature (1)..(25): SEQ ID NO: 4922; WAN024CEG; Start 1325; Stop 1349
ccattgatcgcagcctattaaatac

SEQ ID NO: 394403 - DNA, 25 bp, Artificial
  probe
  misc_feature (1)..(25): SEQ ID NO: 4922; WAN024CEG; Start 1327; Stop 1351
attgatcgcagcctattaaatacac

SEQ ID NO: 394404 - DNA, 25 bp, Artificial
  probe
  misc_feature (1)..(25): SEQ ID NO: 4922; WAN024CEG; Start 1326; Stop 1350
cattgatcgcagcctattaaataca

SEQ ID NO: 394405 - DNA, 25 bp, Artificial
  probe
  misc_feature (1)..(25): SEQ ID NO: 4922; WAN024CEG; Start 1324; Stop 1348
accattgatcgcagcctattaaata

SEQ ID NO: 394406 - DNA, 25 bp, Artificial
  probe
  misc_feature (1)..(25): SEQ ID NO: 4922; WAN024CEG; Start 1323; Stop 1347
taccattgatcgcagcctattaaat

SEQ ID NO: 394407 - DNA, 25 bp, Artificial
  probe
  misc_feature (1)..(25): SEQ ID NO: 4923; WAN024FRF; Start 119; Stop 143
attacagtgacctaccttccttgat

SEQ ID NO: 394408 - DNA, 25 bp, Artificial
  probe
  misc_feature (1)..(25): SEQ ID NO: 4923; WAN024FRF; Start 120; Stop 144
ttacagtgacctaccttccttgatt

SEQ ID NO: 394409 - DNA, 25 bp, Artificial
  probe
  misc_feature (1)..(25): SEQ ID NO: 4923; WAN024FRF; Start 118; Stop 142
aattacagtgacctaccttccttga

SEQ ID NO: 394410 - DNA, 25 bp, Artificial
  probe
  misc_feature (1)..(25): SEQ ID NO: 4923; WAN024FRF; Start 81; Stop 105
gcttccatacaagagtaaggttatc

SEQ ID NO: 394411 - DNA, 25 bp, Artificial
  probe
  misc_feature (1)..(25): SEQ ID NO: 4923; WAN024FRF; Start 121; Stop 145
tacagtgacctaccttccttgattc

SEQ ID NO: 394412 - DNA, 25 bp, Artificial
  probe
  misc_feature (1)..(25): SEQ ID NO: 4923; WAN024FRF; Start 124; Stop 148
agtgacctaccttccttgattcatt

SEQ ID NO: 394413 - DNA, 25 bp, Artificial
  probe
  misc_feature (1)..(25): SEQ ID NO: 4923; WAN024FRF; Start 123; Stop 147
cagtgacctaccttccttgattcat

SEQ ID NO: 394414 - DNA, 25 bp, Artificial
  probe
  misc_feature (1)..(25): SEQ ID NO: 4923; WAN024FRF; Start 75; Stop 99
tgaagagcttccatacaagagtaag

SEQ ID NO: 394415 - DNA, 25 bp, Artificial
  probe
  misc_feature (1)..(25): SEQ ID NO: 4923; WAN024FRF; Start 79; Stop 103
gagcttccatacaagagtaaggtta

SEQ ID NO: 394416 - DNA, 25 bp, Artificial
  probe
  misc_feature (1)..(25): SEQ ID NO: 4923; WAN024FRF; Start 82; Stop 106
cttccatacaagagtaaggttatct

SEQ ID NO: 394417 - DNA, 25 bp, Artificial
  probe
  misc_feature (1)..(25): SEQ ID NO: 4923; WAN024FRF; Start 76; Stop 100
gaagagcttccatacaagagtaagg

SEQ ID NO: 394418 - DNA, 25 bp, Artificial
  probe
  misc_feature (1)..(25): SEQ ID NO: 4923; WAN024FRF; Start 80; Stop 104
agcttccatacaagagtaaggttat

SEQ ID NO: 394419 - DNA, 25 bp, Artificial
  probe
  misc_feature (1)..(25): SEQ ID NO: 4923; WAN024FRF; Start 74; Stop 98
ttgaagagcttccatacaagagtaa

SEQ ID NO: 394420 - DNA, 25 bp, Artificial
  probe
  misc_feature (1)..(25): SEQ ID NO: 4923; WAN024FRF; Start 78; Stop 102
agagcttccatacaagagtaaggtt

SEQ ID NO: 394421 - DNA, 25 bp, Artificial
  probe
  misc_feature (1)..(25): SEQ ID NO: 4923; WAN024FRF; Start 77; Stop 101
aagagcttccatacaagagtaaggt

SEQ ID NO: 394422 - DNA, 25 bp, Artificial
  probe
  misc_feature (1)..(25): SEQ ID NO: 4923; WAN024FRF; Start 117; Stop 141
aaattacagtgacctaccttccttg

SEQ ID NO: 394423 - DNA, 25 bp, Artificial
  probe
  misc_feature (1)..(25): SEQ ID NO: 4923; WAN024FRF; Start 125; Stop 149
gtgacctaccttccttgattcattt

SEQ ID NO: 394424 - DNA, 25 bp, Artificial
  probe
  misc_feature (1)..(25): SEQ ID NO: 4923; WAN024FRF; Start 10; Stop 34
tgggatgatttgtatttcaagttca

SEQ ID NO: 394425 - DNA, 25 bp, Artificial
  probe
  misc_feature (1)..(25): SEQ ID NO: 4923; WAN024FRF; Start 122; Stop 146
acagtgacctaccttccttgattca

SEQ ID NO: 394426 - DNA, 25 bp, Artificial
  probe
  misc_feature (1)..(25): SEQ ID NO: 4923; WAN024FRF; Start 11; Stop 35
gggatgatttgtatttcaagttcaa

SEQ ID NO: 394427 - DNA, 25 bp, Artificial
  probe
  misc_feature (1)..(25): SEQ ID NO: 4923; WAN024FRF; Start 9; Stop 33
ttgggatgatttgtatttcaagttc

SEQ ID NO: 394428 - DNA, 25 bp, Artificial
  probe
  misc_feature (1)..(25): SEQ ID NO: 4923; WAN024FRF; Start 63; Stop 87
gatgaaagaatttgaagagcttcca

SEQ ID NO: 394429 - DNA, 25 bp, Artificial
  probe
  misc_feature (1)..(25): SEQ ID NO: 4923; WAN024FRF; Start 62; Stop 86
tgatgaaagaatttgaagagcttcc

SEQ ID NO: 394430 - DNA, 25 bp, Artificial
  probe
  misc_feature (1)..(25): SEQ ID NO: 4923; WAN024FRF; Start 64; Stop 88
atgaaagaatttgaagagcttccat

SEQ ID NO: 394431 - DNA, 25 bp, Artificial
  probe
  misc_feature (1)..(25): SEQ ID NO: 4923; WAN024FRF; Start 72; Stop 96
atttgaagagcttccatacaagagt

SEQ ID NO: 394432 - DNA, 25 bp, Artificial
  probe
  misc_feature (1)..(25): SEQ ID NO: 4923; WAN024FRF; Start 73; Stop 97
tttgaagagcttccatacaagagta

SEQ ID NO: 394433 - DNA, 25 bp, Artificial
  probe
  misc_feature (1)..(25): SEQ ID NO: 4923; WAN024FRF; Start 71; Stop 95
aatttgaagagcttccatacaagag

SEQ ID NO: 394434 - DNA, 25 bp, Artificial
  probe
  misc_feature (1)..(25): SEQ ID NO: 4923; WAN024FRF; Start 70; Stop 94
gaatttgaagagcttccatacaaga

SEQ ID NO: 394435 - DNA, 25 bp, Artificial
  probe
  misc_feature (1)..(25): SEQ ID NO: 4923; WAN024FRF; Start 69; Stop 93
agaatttgaagagcttccatacaag

SEQ ID NO: 394436 - DNA, 25 bp, Artificial
  probe
  misc_feature (1)..(25): SEQ ID NO: 4923; WAN024FRF; Start 67; Stop 91
aaagaatttgaagagcttccataca

SEQ ID NO: 394437 - DNA, 25 bp, Artificial
  probe
  misc_feature (1)..(25): SEQ ID NO: 4923; WAN024FRF; Start 85; Stop 109
ccatacaagagtaaggttatcttct

SEQ ID NO: 394438 - DNA, 25 bp, Artificial
  probe
  misc_feature (1)..(25): SEQ ID NO: 4923; WAN024FRF; Start 84; Stop 108
tccatacaagagtaaggttatcttc

SEQ ID NO: 394439 - DNA, 25 bp, Artificial
  probe
  misc_feature (1)..(25): SEQ ID NO: 4923; WAN024FRF; Start 8; Stop 32
tttgggatgatttgtatttcaagtt

SEQ ID NO: 394440 - DNA, 25 bp, Artificial
  probe
  misc_feature (1)..(25): SEQ ID NO: 4924; WAN024AYD; Start 7; Stop 31
cagacagagatgattcgcttaattc

SEQ ID NO: 394441 - DNA, 25 bp, Artificial
  probe
  misc_feature (1)..(25): SEQ ID NO: 4924; WAN024AYD; Start 6; Stop 30
ccagacagagatgattcgcttaatt

SEQ ID NO: 394442 - DNA, 25 bp, Artificial
  probe
  misc_feature (1)..(25): SEQ ID NO: 4924; WAN024AYD; Start 567; Stop 591
atacagacgcttggataatctctat

SEQ ID NO: 394443 - DNA, 25 bp, Artificial
  probe
  misc_feature (1)..(25): SEQ ID NO: 4924; WAN024AYD; Start 8; Stop 32
agacagagatgattcgcttaattca

SEQ ID NO: 394444 - DNA, 25 bp, Artificial
  probe
  misc_feature (1)..(25): SEQ ID NO: 4924; WAN024AYD; Start 9; Stop 33
gacagagatgattcgcttaattcaa

SEQ ID NO: 394445 - DNA, 25 bp, Artificial
  probe
  misc_feature (1)..(25): SEQ ID NO: 4924; WAN024AYD; Start 5; Stop 29
accagacagagatgattcgcttaat

SEQ ID NO: 394446 - DNA, 25 bp, Artificial
  probe
  misc_feature (1)..(25): SEQ ID NO: 4924; WAN024AYD; Start 566; Stop 590
tatacagacgcttggataatctcta

SEQ ID NO: 394447 - DNA, 25 bp, Artificial
  probe
  misc_feature (1)..(25): SEQ ID NO: 4924; WAN024AYD; Start 4; Stop 28
aaccagacagagatgattcgcttaa

SEQ ID NO: 394448 - DNA, 25 bp, Artificial
  probe
  misc_feature (1)..(25): SEQ ID NO: 4924; WAN024AYD; Start 3; Stop 27
gaaccagacagagatgattcgctta

SEQ ID NO: 394449 - DNA, 25 bp, Artificial
  probe
  misc_feature (1)..(25): SEQ ID NO: 4924; WAN024AYD; Start 653; Stop 677
aagaagttatgccagtagagatttg

SEQ ID NO: 394450 - DNA, 25 bp, Artificial
  probe
  misc_feature (1)..(25): SEQ ID NO: 4924; WAN024AYD; Start 565; Stop 589
gtatacagacgcttggataatctct

SEQ ID NO: 394451 - DNA, 25 bp, Artificial
  probe
  misc_feature (1)..(25): SEQ ID NO: 4924; WAN024AYD; Start 242; Stop 266
aggttcttacttatcaatactgtga

SEQ ID NO: 394452 - DNA, 25 bp, Artificial
  probe
  misc_feature (1)..(25): SEQ ID NO: 4924; WAN024AYD; Start 626; Stop 650
ggactatcaatgcttctttatttgc

SEQ ID NO: 394453 - DNA, 25 bp, Artificial
  probe
  misc_feature (1)..(25): SEQ ID NO: 4924; WAN024AYD; Start 652; Stop 676
aaagaagttatgccagtagagattt

SEQ ID NO: 394454 - DNA, 25 bp, Artificial
  probe
  misc_feature (1)..(25): SEQ ID NO: 4924; WAN024AYD; Start 10; Stop 34
acagagatgattcgcttaattcaaa

SEQ ID NO: 394455 - DNA, 25 bp, Artificial
  probe
  misc_feature (1)..(25): SEQ ID NO: 4924; WAN024AYD; Start 212; Stop 236
tcaaagatagaattatcgctgggaa

SEQ ID NO: 394456 - DNA, 25 bp, Artificial
  probe
  misc_feature (1)..(25): SEQ ID NO: 4924; WAN024AYD; Start 211; Stop 235
ttcaaagatagaattatcgctggga

SEQ ID NO: 394457 - DNA, 25 bp, Artificial
  probe
  misc_feature (1)..(25): SEQ ID NO: 4924; WAN024AYD; Start 241; Stop 265
caggttcttacttatcaatactgtg

SEQ ID NO: 394458 - DNA, 25 bp, Artificial
  probe
  misc_feature (1)..(25): SEQ ID NO: 4924; WAN024AYD; Start 213; Stop 237
caaagatagaattatcgctgggaaa

SEQ ID NO: 394459 - DNA, 25 bp, Artificial
  probe
  misc_feature (1)..(25): SEQ ID NO: 4924; WAN024AYD; Start 210; Stop 234
tttcaaagatagaattatcgctggg

SEQ ID NO: 394460 - DNA, 25 bp, Artificial
  probe
  misc_feature (1)..(25): SEQ ID NO: 4924; WAN024AYD; Start 153; Stop 177
ggatgatgatatggatatcgctgtc

SEQ ID NO: 394461 - DNA, 25 bp, Artificial
  probe
  misc_feature (1)..(25): SEQ ID NO: 4924; WAN024AYD; Start 240; Stop 264
tcaggttcttacttatcaatactgt

SEQ ID NO: 394462 - DNA, 25 bp, Artificial
  probe
  misc_feature (1)..(25): SEQ ID NO: 4924; WAN024AYD; Start 222; Stop 246
aattatcgctgggaaatatcaggtt

SEQ ID NO: 394463 - DNA, 25 bp, Artificial
  probe
  misc_feature (1)..(25): SEQ ID NO: 4924; WAN024AYD; Start 229; Stop 253
gctgggaaatatcaggttcttactt

SEQ ID NO: 394464 - DNA, 25 bp, Artificial
  probe
  misc_feature (1)..(25): SEQ ID NO: 4924; WAN024AYD; Start 220; Stop 244
agaattatcgctgggaaatatcagg

SEQ ID NO: 394465 - DNA, 25 bp, Artificial
  probe
  misc_feature (1)..(25): SEQ ID NO: 4924; WAN024AYD; Start 625; Stop 649
gggactatcaatgcttctttatttg

SEQ ID NO: 394466 - DNA, 25 bp, Artificial
  probe
  misc_feature (1)..(25): SEQ ID NO: 4924; WAN024AYD; Start 223; Stop 247
attatcgctgggaaatatcaggttc

SEQ ID NO: 394467 - DNA, 25 bp, Artificial
  probe
  misc_feature (1)..(25): SEQ ID NO: 4924; WAN024AYD; Start 221; Stop 245
gaattatcgctgggaaatatcaggt

SEQ ID NO: 394468 - DNA, 25 bp, Artificial
  probe
  misc_feature (1)..(25): SEQ ID NO: 4924; WAN024AYD; Start 365; Stop 389
atatcattcctttagatggagcacc

SEQ ID NO: 394469 - DNA, 25 bp, Artificial
  probe
  misc_feature (1)..(25): SEQ ID NO: 4924; WAN024AYD; Start 218; Stop 242
atagaattatcgctgggaaatatca

SEQ ID NO: 394470 - DNA, 25 bp, Artificial
  probe
  misc_feature (1)..(25): SEQ ID NO: 4924; WAN024AYD; Start 214; Stop 238
aaagatagaattatcgctgggaaat

SEQ ID NO: 394471 - DNA, 25 bp, Artificial
  probe
  misc_feature (1)..(25): SEQ ID NO: 4924; WAN024AYD; Start 154; Stop 178
gatgatgatatggatatcgctgtcc

SEQ ID NO: 394472 - DNA, 25 bp, Artificial
  probe
  misc_feature (1)..(25): SEQ ID NO: 4924; WAN024AYD; Start 226; Stop 250
atcgctgggaaatatcaggttctta

SEQ ID NO: 394473 - DNA, 25 bp, Artificial
  probe
  misc_feature (1)..(25): SEQ ID NO: 4925; WAN024FXC; Start 404; Stop 428
gtgctgatatagatgttgttcttgt

SEQ ID NO: 394474 - DNA, 25 bp, Artificial
  probe
  misc_feature (1)..(25): SEQ ID NO: 4925; WAN024FXC; Start 403; Stop 427
agtgctgatatagatgttgttcttg

SEQ ID NO: 394475 - DNA, 25 bp, Artificial
  probe
  misc_feature (1)..(25): SEQ ID NO: 4925; WAN024FXC; Start 405; Stop 429
tgctgatatagatgttgttcttgtt

SEQ ID NO: 394476 - DNA, 25 bp, Artificial
  probe
  misc_feature (1)..(25): SEQ ID NO: 4925; WAN024FXC; Start 682; Stop 706
gttgtgattggagatcgcttgtata

SEQ ID NO: 394477 - DNA, 25 bp, Artificial
  probe
  misc_feature (1)..(25): SEQ ID NO: 4925; WAN024FXC; Start 406; Stop 430
gctgatatagatgttgttcttgttg

SEQ ID NO: 394478 - DNA, 25 bp, Artificial
  probe
  misc_feature (1)..(25): SEQ ID NO: 4925; WAN024FXC; Start 47; Stop 71
ttggtgctgatattagtgaacttca

SEQ ID NO: 394479 - DNA, 25 bp, Artificial
  probe
  misc_feature (1)..(25): SEQ ID NO: 4925; WAN024FXC; Start 408; Stop 432
tgatatagatgttgttcttgttggt

SEQ ID NO: 394480 - DNA, 25 bp, Artificial
  probe
  misc_feature (1)..(25): SEQ ID NO: 4925; WAN024FXC; Start 367; Stop 391
ctatctgacgcaggaattgatgtaa

SEQ ID NO: 394481 - DNA, 25 bp, Artificial
  probe
  misc_feature (1)..(25): SEQ ID NO: 4925; WAN024FXC; Start 399; Stop 423
agttagtgctgatatagatgttgtt

SEQ ID NO: 394482 - DNA, 25 bp, Artificial
  probe
  misc_feature (1)..(25): SEQ ID NO: 4925; WAN024FXC; Start 398; Stop 422
aagttagtgctgatatagatgttgt

SEQ ID NO: 394483 - DNA, 25 bp, Artificial
  probe
  misc_feature (1)..(25): SEQ ID NO: 4925; WAN024FXC; Start 368; Stop 392
tatctgacgcaggaattgatgtaac

SEQ ID NO: 394484 - DNA, 25 bp, Artificial
  probe
  misc_feature (1)..(25): SEQ ID NO: 4925; WAN024FXC; Start 759; Stop 783
aggagaagcaacggtgaatgatatt

SEQ ID NO: 394485 - DNA, 25 bp, Artificial
  probe
  misc_feature (1)..(25): SEQ ID NO: 4925; WAN024FXC; Start 400; Stop 424
gttagtgctgatatagatgttgttc

SEQ ID NO: 394486 - DNA, 25 bp, Artificial
  probe
  misc_feature (1)..(25): SEQ ID NO: 4925; WAN024FXC; Start 377; Stop 401
caggaattgatgtaactgagcaagt

SEQ ID NO: 394487 - DNA, 25 bp, Artificial
  probe
  misc_feature (1)..(25): SEQ ID NO: 4925; WAN024FXC; Start 407; Stop 431
ctgatatagatgttgttcttgttgg

SEQ ID NO: 394488 - DNA, 25 bp, Artificial
  probe
  misc_feature (1)..(25): SEQ ID NO: 4925; WAN024FXC; Start 198; Stop 222
caattcatctaagtctgttgttgac

SEQ ID NO: 394489 - DNA, 25 bp, Artificial
  probe
  misc_feature (1)..(25): SEQ ID NO: 4925; WAN024FXC; Start 366; Stop 390
actatctgacgcaggaattgatgta

SEQ ID NO: 394490 - DNA, 25 bp, Artificial
  probe
  misc_feature (1)..(25): SEQ ID NO: 4925; WAN024FXC; Start 402; Stop 426
tagtgctgatatagatgttgttctt

SEQ ID NO: 394491 - DNA, 25 bp, Artificial
  probe
  misc_feature (1)..(25): SEQ ID NO: 4925; WAN024FXC; Start 401; Stop 425
ttagtgctgatatagatgttgttct

SEQ ID NO: 394492 - DNA, 25 bp, Artificial
  probe
  misc_feature (1)..(25): SEQ ID NO: 4925; WAN024FXC; Start 397; Stop 421
caagttagtgctgatatagatgttg

SEQ ID NO: 394493 - DNA, 25 bp, Artificial
  probe
  misc_feature (1)..(25): SEQ ID NO: 4925; WAN024FXC; Start 364; Stop 388
gaactatctgacgcaggaattgatg

SEQ ID NO: 394494 - DNA, 25 bp, Artificial
  probe
  misc_feature (1)..(25): SEQ ID NO: 4925; WAN024FXC; Start 363; Stop 387
agaactatctgacgcaggaattgat

SEQ ID NO: 394495 - DNA, 25 bp, Artificial
  probe
  misc_feature (1)..(25): SEQ ID NO: 4925; WAN024FXC; Start 409; Stop 433
gatatagatgttgttcttgttggtt

SEQ ID NO: 394496 - DNA, 25 bp, Artificial
  probe
  misc_feature (1)..(25): SEQ ID NO: 4925; WAN024FXC; Start 681; Stop 705
agttgtgattggagatcgcttgtat

SEQ ID NO: 394497 - DNA, 25 bp, Artificial
  probe
  misc_feature (1)..(25): SEQ ID NO: 4925; WAN024FXC; Start 362; Stop 386
aagaactatctgacgcaggaattga

SEQ ID NO: 394498 - DNA, 25 bp, Artificial
  probe
  misc_feature (1)..(25): SEQ ID NO: 4925; WAN024FXC; Start 758; Stop 782
caggagaagcaacggtgaatgatat

SEQ ID NO: 394499 - DNA, 25 bp, Artificial
  probe
  misc_feature (1)..(25): SEQ ID NO: 4925; WAN024FXC; Start 7; Stop 31
cgaatacggagaatgaaattgacaa

SEQ ID NO: 394500 - DNA, 25 bp, Artificial
  probe
  misc_feature (1)..(25): SEQ ID NO: 4925; WAN024FXC; Start 824; Stop 848
tgaaagaaatgtggaaaggaattgt

SEQ ID NO: 394501 - DNA, 25 bp, Artificial
  probe
  misc_feature (1)..(25): SEQ ID NO: 4925; WAN024FXC; Start 822; Stop 846
cgtgaaagaaatgtggaaaggaatt

SEQ ID NO: 394502 - DNA, 25 bp, Artificial
  probe
  misc_feature (1)..(25): SEQ ID NO: 4925; WAN024FXC; Start 692; Stop 716
gagatcgcttgtatacggatatcat

SEQ ID NO: 394503 - DNA, 25 bp, Artificial
  probe
  misc_feature (1)..(25): SEQ ID NO: 4925; WAN024FXC; Start 46; Stop 70
tttggtgctgatattagtgaacttc

SEQ ID NO: 394504 - DNA, 25 bp, Artificial
  probe
  misc_feature (1)..(25): SEQ ID NO: 4925; WAN024FXC; Start 693; Stop 717
agatcgcttgtatacggatatcatg

SEQ ID NO: 394505 - DNA, 25 bp, Artificial
  probe
  misc_feature (1)..(25): SEQ ID NO: 4925; WAN024FXC; Start 672; Stop 696
atttgaaacagttgtgattggagat

SEQ ID NO: 394506 - DNA, 25 bp, Artificial
  probe
  misc_feature (1)..(25): SEQ ID NO: 4926; WAN024C47; Start 43; Stop 67
cttagcagtaacatccaagaagtac

SEQ ID NO: 394507 - DNA, 25 bp, Artificial
  probe
  misc_feature (1)..(25): SEQ ID NO: 4926; WAN024C47; Start 39; Stop 63
ggtacttagcagtaacatccaagaa

SEQ ID NO: 394508 - DNA, 25 bp, Artificial
  probe
  misc_feature (1)..(25): SEQ ID NO: 4926; WAN024C47; Start 40; Stop 64
gtacttagcagtaacatccaagaag

SEQ ID NO: 394509 - DNA, 25 bp, Artificial
  probe
  misc_feature (1)..(25): SEQ ID NO: 4926; WAN024C47; Start 38; Stop 62
tggtacttagcagtaacatccaaga

SEQ ID NO: 394510 - DNA, 25 bp, Artificial
  probe
  misc_feature (1)..(25): SEQ ID NO: 4926; WAN024C47; Start 127; Stop 151
caagaaacgagaacggatgatacag

SEQ ID NO: 394511 - DNA, 25 bp, Artificial
  probe
  misc_feature (1)..(25): SEQ ID NO: 4926; WAN024C47; Start 100; Stop 124
gcggttgtaagcatctgtaatcttt

SEQ ID NO: 394512 - DNA, 25 bp, Artificial
  probe
  misc_feature (1)..(25): SEQ ID NO: 4926; WAN024C47; Start 42; Stop 66
acttagcagtaacatccaagaagta

SEQ ID NO: 394513 - DNA, 25 bp, Artificial
  probe
  misc_feature (1)..(25): SEQ ID NO: 4926; WAN024C47; Start 41; Stop 65
tacttagcagtaacatccaagaagt

SEQ ID NO: 394514 - DNA, 25 bp, Artificial
  probe
  misc_feature (1)..(25): SEQ ID NO: 4926; WAN024C47; Start 51; Stop 75
taacatccaagaagtactcgtccaa

SEQ ID NO: 394515 - DNA, 25 bp, Artificial
  probe
  misc_feature (1)..(25): SEQ ID NO: 4926; WAN024C47; Start 33; Stop 57
cttgttggtacttagcagtaacatc

SEQ ID NO: 394516 - DNA, 25 bp, Artificial
  probe
  misc_feature (1)..(25): SEQ ID NO: 4926; WAN024C47; Start 18; Stop 42
cgatatcacgtactgcttgttggta

SEQ ID NO: 394517 - DNA, 25 bp, Artificial
  probe
  misc_feature (1)..(25): SEQ ID NO: 4926; WAN024C47; Start 34; Stop 58
ttgttggtacttagcagtaacatcc

SEQ ID NO: 394518 - DNA, 25 bp, Artificial
  probe
  misc_feature (1)..(25): SEQ ID NO: 4926; WAN024C47; Start 145; Stop 169
gatacagccatcacgccagatagat

SEQ ID NO: 394519 - DNA, 25 bp, Artificial
  probe
  misc_feature (1)..(25): SEQ ID NO: 4926; WAN024C47; Start 50; Stop 74
gtaacatccaagaagtactcgtcca

SEQ ID NO: 394520 - DNA, 25 bp, Artificial
  probe
  misc_feature (1)..(25): SEQ ID NO: 4926; WAN024C47; Start 32; Stop 56
gcttgttggtacttagcagtaacat

SEQ ID NO: 394521 - DNA, 25 bp, Artificial
  probe
  misc_feature (1)..(25): SEQ ID NO: 4926; WAN024C47; Start 128; Stop 152
aagaaacgagaacggatgatacagc

SEQ ID NO: 394522 - DNA, 25 bp, Artificial
  probe
  misc_feature (1)..(25): SEQ ID NO: 4926; WAN024C47; Start 35; Stop 59
tgttggtacttagcagtaacatcca

SEQ ID NO: 394523 - DNA, 25 bp, Artificial
  probe
  misc_feature (1)..(25): SEQ ID NO: 4926; WAN024C47; Start 45; Stop 69
tagcagtaacatccaagaagtactc

SEQ ID NO: 394524 - DNA, 25 bp, Artificial
  probe
  misc_feature (1)..(25): SEQ ID NO: 4926; WAN024C47; Start 44; Stop 68
ttagcagtaacatccaagaagtact

SEQ ID NO: 394525 - DNA, 25 bp, Artificial
  probe
  misc_feature (1)..(25): SEQ ID NO: 4926; WAN024C47; Start 191; Stop 215
ttccagttgttttctttagaggcta

SEQ ID NO: 394526 - DNA, 25 bp, Artificial
  probe
  misc_feature (1)..(25): SEQ ID NO: 4926; WAN024C47; Start 48; Stop 72
cagtaacatccaagaagtactcgtc

SEQ ID NO: 394527 - DNA, 25 bp, Artificial
  probe
  misc_feature (1)..(25): SEQ ID NO: 4926; WAN024C47; Start 126; Stop 150
gcaagaaacgagaacggatgataca

SEQ ID NO: 394528 - DNA, 25 bp, Artificial
  probe
  misc_feature (1)..(25): SEQ ID NO: 4926; WAN024C47; Start 192; Stop 216
tccagttgttttctttagaggctac

SEQ ID NO: 394529 - DNA, 25 bp, Artificial
  probe
  misc_feature (1)..(25): SEQ ID NO: 4926; WAN024C47; Start 101; Stop 125
cggttgtaagcatctgtaatctttt

SEQ ID NO: 394530 - DNA, 25 bp, Artificial
  probe
  misc_feature (1)..(25): SEQ ID NO: 4926; WAN024C47; Start 188; Stop 212
aagttccagttgttttctttagagg

SEQ ID NO: 394531 - DNA, 25 bp, Artificial
  probe
  misc_feature (1)..(25): SEQ ID NO: 4926; WAN024C47; Start 186; Stop 210
gcaagttccagttgttttctttaga

SEQ ID NO: 394532 - DNA, 25 bp, Artificial
  probe
  misc_feature (1)..(25): SEQ ID NO: 4926; WAN024C47; Start 19; Stop 43
gatatcacgtactgcttgttggtac

SEQ ID NO: 394533 - DNA, 25 bp, Artificial
  probe
  misc_feature (1)..(25): SEQ ID NO: 4926; WAN024C47; Start 200; Stop 224
ttttctttagaggctacacgcaatt

SEQ ID NO: 394534 - DNA, 25 bp, Artificial
  probe
  misc_feature (1)..(25): SEQ ID NO: 4926; WAN024C47; Start 20; Stop 44
atatcacgtactgcttgttggtact

SEQ ID NO: 394535 - DNA, 25 bp, Artificial
  probe
  misc_feature (1)..(25): SEQ ID NO: 4926; WAN024C47; Start 190; Stop 214
gttccagttgttttctttagaggct

SEQ ID NO: 394536 - DNA, 25 bp, Artificial
  probe
  misc_feature (1)..(25): SEQ ID NO: 4926; WAN024C47; Start 189; Stop 213
agttccagttgttttctttagaggc

SEQ ID NO: 394537 - DNA, 25 bp, Artificial
  probe
  misc_feature (1)..(25): SEQ ID NO: 4926; WAN024C47; Start 102; Stop 126
ggttgtaagcatctgtaatcttttg

SEQ ID NO: 394538 - DNA, 25 bp, Artificial
  probe
  misc_feature (1)..(25): SEQ ID NO: 4926; WAN024C47; Start 185; Stop 209
ggcaagttccagttgttttctttag

SEQ ID NO: 394539 - DNA, 25 bp, Artificial
  probe
  misc_feature (1)..(25): SEQ ID NO: 4927; WAN024GH7; Start 1333; Stop 1357
agttctgcttagttgcttatctgta

SEQ ID NO: 394540 - DNA, 25 bp, Artificial
  probe
  misc_feature (1)..(25): SEQ ID NO: 4927; WAN024GH7; Start 1332; Stop 1356
tagttctgcttagttgcttatctgt

SEQ ID NO: 394541 - DNA, 25 bp, Artificial
  probe
  misc_feature (1)..(25): SEQ ID NO: 4927; WAN024GH7; Start 1334; Stop 1358
gttctgcttagttgcttatctgtag

SEQ ID NO: 394542 - DNA, 25 bp, Artificial
  probe
  misc_feature (1)..(25): SEQ ID NO: 4927; WAN024GH7; Start 1331; Stop 1355
ctagttctgcttagttgcttatctg

SEQ ID NO: 394543 - DNA, 25 bp, Artificial
  probe
  misc_feature (1)..(25): SEQ ID NO: 4927; WAN024GH7; Start 1330; Stop 1354
tctagttctgcttagttgcttatct

SEQ ID NO: 394544 - DNA, 25 bp, Artificial
  probe
  misc_feature (1)..(25): SEQ ID NO: 4927; WAN024GH7; Start 320; Stop 344
aagaagatagagaatggtcagacat

SEQ ID NO: 394545 - DNA, 25 bp, Artificial
  probe
  misc_feature (1)..(25): SEQ ID NO: 4927; WAN024GH7; Start 1329; Stop 1353
ttctagttctgcttagttgcttatc

SEQ ID NO: 394546 - DNA, 25 bp, Artificial
  probe
  misc_feature (1)..(25): SEQ ID NO: 4927; WAN024GH7; Start 319; Stop 343
taagaagatagagaatggtcagaca

SEQ ID NO: 394547 - DNA, 25 bp, Artificial
  probe
  misc_feature (1)..(25): SEQ ID NO: 4927; WAN024GH7; Start 617; Stop 641
gaagaattggctaagaagaacggtc

SEQ ID NO: 394548 - DNA, 25 bp, Artificial
  probe
  misc_feature (1)..(25): SEQ ID NO: 4927; WAN024GH7; Start 342; Stop 366
cattcaagttgtcagacctagcatc

SEQ ID NO: 394549 - DNA, 25 bp, Artificial
  probe
  misc_feature (1)..(25): SEQ ID NO: 4927; WAN024GH7; Start 343; Stop 367
attcaagttgtcagacctagcatct

SEQ ID NO: 394550 - DNA, 25 bp, Artificial
  probe
  misc_feature (1)..(25): SEQ ID NO: 4927; WAN024GH7; Start 1228; Stop 1252
aactctactagcaagtggagatcag

SEQ ID NO: 394551 - DNA, 25 bp, Artificial
  probe
  misc_feature (1)..(25): SEQ ID NO: 4927; WAN024GH7; Start 614; Stop 638
cacgaagaattggctaagaagaacg

SEQ ID NO: 394552 - DNA, 25 bp, Artificial
  probe
  misc_feature (1)..(25): SEQ ID NO: 4927; WAN024GH7; Start 618; Stop 642
aagaattggctaagaagaacggtct

SEQ ID NO: 394553 - DNA, 25 bp, Artificial
  probe
  misc_feature (1)..(25): SEQ ID NO: 4927; WAN024GH7; Start 318; Stop 342
ttaagaagatagagaatggtcagac

SEQ ID NO: 394554 - DNA, 25 bp, Artificial
  probe
  misc_feature (1)..(25): SEQ ID NO: 4927; WAN024GH7; Start 609; Stop 633
ttatccacgaagaattggctaagaa

SEQ ID NO: 394555 - DNA, 25 bp, Artificial
  probe
  misc_feature (1)..(25): SEQ ID NO: 4927; WAN024GH7; Start 610; Stop 634
tatccacgaagaattggctaagaag

SEQ ID NO: 394556 - DNA, 25 bp, Artificial
  probe
  misc_feature (1)..(25): SEQ ID NO: 4927; WAN024GH7; Start 608; Stop 632
cttatccacgaagaattggctaaga

SEQ ID NO: 394557 - DNA, 25 bp, Artificial
  probe
  misc_feature (1)..(25): SEQ ID NO: 4927; WAN024GH7; Start 1348; Stop 1372
cttatctgtagccctttgtttccta

SEQ ID NO: 394558 - DNA, 25 bp, Artificial
  probe
  misc_feature (1)..(25): SEQ ID NO: 4927; WAN024GH7; Start 1208; Stop 1232
atcacaacttacctactccaaactc

SEQ ID NO: 394559 - DNA, 25 bp, Artificial
  probe
  misc_feature (1)..(25): SEQ ID NO: 4927; WAN024GH7; Start 1207; Stop 1231
aatcacaacttacctactccaaact

SEQ ID NO: 394560 - DNA, 25 bp, Artificial
  probe
  misc_feature (1)..(25): SEQ ID NO: 4927; WAN024GH7; Start 136; Stop 160
gtgacaaatgaatccaatccaaaga

SEQ ID NO: 394561 - DNA, 25 bp, Artificial
  probe
  misc_feature (1)..(25): SEQ ID NO: 4927; WAN024GH7; Start 1211; Stop 1235
acaacttacctactccaaactctac

SEQ ID NO: 394562 - DNA, 25 bp, Artificial
  probe
  misc_feature (1)..(25): SEQ ID NO: 4927; WAN024GH7; Start 1210; Stop 1234
cacaacttacctactccaaactcta

SEQ ID NO: 394563 - DNA, 25 bp, Artificial
  probe
  misc_feature (1)..(25): SEQ ID NO: 4927; WAN024GH7; Start 1354; Stop 1378
tgtagccctttgtttcctattctta

SEQ ID NO: 394564 - DNA, 25 bp, Artificial
  probe
  misc_feature (1)..(25): SEQ ID NO: 4927; WAN024GH7; Start 1351; Stop 1375
atctgtagccctttgtttcctattc

SEQ ID NO: 394565 - DNA, 25 bp, Artificial
  probe
  misc_feature (1)..(25): SEQ ID NO: 4927; WAN024GH7; Start 1350; Stop 1374
tatctgtagccctttgtttcctatt

SEQ ID NO: 394566 - DNA, 25 bp, Artificial
  probe
  misc_feature (1)..(25): SEQ ID NO: 4927; WAN024GH7; Start 1349; Stop 1373
ttatctgtagccctttgtttcctat

SEQ ID NO: 394567 - DNA, 25 bp, Artificial
  probe
  misc_feature (1)..(25): SEQ ID NO: 4927; WAN024GH7; Start 1212; Stop 1236
caacttacctactccaaactctact

SEQ ID NO: 394568 - DNA, 25 bp, Artificial
  probe
  misc_feature (1)..(25): SEQ ID NO: 4927; WAN024GH7; Start 1353; Stop 1377
ctgtagccctttgtttcctattctt

SEQ ID NO: 394569 - DNA, 25 bp, Artificial
  probe
  misc_feature (1)..(25): SEQ ID NO: 4927; WAN024GH7; Start 542; Stop 566
tttaccagttcggctttcaatctaa

SEQ ID NO: 394570 - DNA, 25 bp, Artificial
  probe
  misc_feature (1)..(25): SEQ ID NO: 4927; WAN024GH7; Start 543; Stop 567
ttaccagttcggctttcaatctaaa

SEQ ID NO: 394571 - DNA, 25 bp, Artificial
  probe
  misc_feature (1)..(25): SEQ ID NO: 4927; WAN024GH7; Start 135; Stop 159
ggtgacaaatgaatccaatccaaag

SEQ ID NO: 394572 - DNA, 25 bp, Artificial
  probe
  misc_feature (1)..(25): SEQ ID NO: 4928; WAN024E2J; Start 212; Stop 236
ttcaggtgtcaattcgtcataatcc

SEQ ID NO: 394573 - DNA, 25 bp, Artificial
  probe
  misc_feature (1)..(25): SEQ ID NO: 4928; WAN024E2J; Start 213; Stop 237
tcaggtgtcaattcgtcataatcca

SEQ ID NO: 394574 - DNA, 25 bp, Artificial
  probe
  misc_feature (1)..(25): SEQ ID NO: 4928; WAN024E2J; Start 211; Stop 235
tttcaggtgtcaattcgtcataatc

SEQ ID NO: 394575 - DNA, 25 bp, Artificial
  probe
  misc_feature (1)..(25): SEQ ID NO: 4928; WAN024E2J; Start 214; Stop 238
caggtgtcaattcgtcataatccac

SEQ ID NO: 394576 - DNA, 25 bp, Artificial
  probe
  misc_feature (1)..(25): SEQ ID NO: 4928; WAN024E2J; Start 95; Stop 119
aaccacactaccaatttctgaccaa

SEQ ID NO: 394577 - DNA, 25 bp, Artificial
  probe
  misc_feature (1)..(25): SEQ ID NO: 4928; WAN024E2J; Start 125; Stop 149
atataattgcacatgagttgggagg

SEQ ID NO: 394578 - DNA, 25 bp, Artificial
  probe
  misc_feature (1)..(25): SEQ ID NO: 4928; WAN024E2J; Start 1; Stop 25
ttgaaccgtagaaataatctgcatg

SEQ ID NO: 394579 - DNA, 25 bp, Artificial
  probe
  misc_feature (1)..(25): SEQ ID NO: 4928; WAN024E2J; Start 8; Stop 32
gtagaaataatctgcatgggttgtt

SEQ ID NO: 394580 - DNA, 25 bp, Artificial
  probe
  misc_feature (1)..(25): SEQ ID NO: 4928; WAN024E2J; Start 9; Stop 33
tagaaataatctgcatgggttgttc

SEQ ID NO: 394581 - DNA, 25 bp, Artificial
  probe
  misc_feature (1)..(25): SEQ ID NO: 4928; WAN024E2J; Start 92; Stop 116
gtgaaccacactaccaatttctgac

SEQ ID NO: 394582 - DNA, 25 bp, Artificial
  probe
  misc_feature (1)..(25): SEQ ID NO: 4928; WAN024E2J; Start 96; Stop 120
accacactaccaatttctgaccaag

SEQ ID NO: 394583 - DNA, 25 bp, Artificial
  probe
  misc_feature (1)..(25): SEQ ID NO: 4928; WAN024E2J; Start 124; Stop 148
tatataattgcacatgagttgggag

SEQ ID NO: 394584 - DNA, 25 bp, Artificial
  probe
  misc_feature (1)..(25): SEQ ID NO: 4928; WAN024E2J; Start 94; Stop 118
gaaccacactaccaatttctgacca

SEQ ID NO: 394585 - DNA, 25 bp, Artificial
  probe
  misc_feature (1)..(25): SEQ ID NO: 4928; WAN024E2J; Start 93; Stop 117
tgaaccacactaccaatttctgacc

SEQ ID NO: 394586 - DNA, 25 bp, Artificial
  probe
  misc_feature (1)..(25): SEQ ID NO: 4928; WAN024E2J; Start 2; Stop 26
tgaaccgtagaaataatctgcatgg

SEQ ID NO: 394587 - DNA, 25 bp, Artificial
  probe
  misc_feature (1)..(25): SEQ ID NO: 4928; WAN024E2J; Start 7; Stop 31
cgtagaaataatctgcatgggttgt

SEQ ID NO: 394588 - DNA, 25 bp, Artificial
  probe
  misc_feature (1)..(25): SEQ ID NO: 4928; WAN024E2J; Start 10; Stop 34
agaaataatctgcatgggttgttcc

SEQ ID NO: 394589 - DNA, 25 bp, Artificial
  probe
  misc_feature (1)..(25): SEQ ID NO: 4928; WAN024E2J; Start 209; Stop 233
gttttcaggtgtcaattcgtcataa

SEQ ID NO: 394590 - DNA, 25 bp, Artificial
  probe
  misc_feature (1)..(25): SEQ ID NO: 4928; WAN024E2J; Start 126; Stop 150
tataattgcacatgagttgggaggt

SEQ ID NO: 394591 - DNA, 25 bp, Artificial
  probe
  misc_feature (1)..(25): SEQ ID NO: 4928; WAN024E2J; Start 3; Stop 27
gaaccgtagaaataatctgcatggg

SEQ ID NO: 394592 - DNA, 25 bp, Artificial
  probe
  misc_feature (1)..(25): SEQ ID NO: 4928; WAN024E2J; Start 210; Stop 234
ttttcaggtgtcaattcgtcataat

SEQ ID NO: 394593 - DNA, 25 bp, Artificial
  probe
  misc_feature (1)..(25): SEQ ID NO: 4928; WAN024E2J; Start 208; Stop 232
tgttttcaggtgtcaattcgtcata

SEQ ID NO: 394594 - DNA, 25 bp, Artificial
  probe
  misc_feature (1)..(25): SEQ ID NO: 4928; WAN024E2J; Start 6; Stop 30
ccgtagaaataatctgcatgggttg

SEQ ID NO: 394595 - DNA, 25 bp, Artificial
  probe
  misc_feature (1)..(25): SEQ ID NO: 4928; WAN024E2J; Start 13; Stop 37
aataatctgcatgggttgttccgta

SEQ ID NO: 394596 - DNA, 25 bp, Artificial
  probe
  misc_feature (1)..(25): SEQ ID NO: 4928; WAN024E2J; Start 123; Stop 147
ttatataattgcacatgagttggga

SEQ ID NO: 394597 - DNA, 25 bp, Artificial
  probe
  misc_feature (1)..(25): SEQ ID NO: 4928; WAN024E2J; Start 36; Stop 60
tagaaaggaatatcacgacctgcct

SEQ ID NO: 394598 - DNA, 25 bp, Artificial
  probe
  misc_feature (1)..(25): SEQ ID NO: 4928; WAN024E2J; Start 35; Stop 59
gtagaaaggaatatcacgacctgcc

SEQ ID NO: 394599 - DNA, 25 bp, Artificial
  probe
  misc_feature (1)..(25): SEQ ID NO: 4928; WAN024E2J; Start 215; Stop 239
aggtgtcaattcgtcataatccacg

SEQ ID NO: 394600 - DNA, 25 bp, Artificial
  probe
  misc_feature (1)..(25): SEQ ID NO: 4928; WAN024E2J; Start 207; Stop 231
atgttttcaggtgtcaattcgtcat

SEQ ID NO: 394601 - DNA, 25 bp, Artificial
  probe
  misc_feature (1)..(25): SEQ ID NO: 4928; WAN024E2J; Start 192; Stop 216
agatcagtcactaccatgttttcag

SEQ ID NO: 394602 - DNA, 25 bp, Artificial
  probe
  misc_feature (1)..(25): SEQ ID NO: 4928; WAN024E2J; Start 191; Stop 215
tagatcagtcactaccatgttttca

SEQ ID NO: 394603 - DNA, 25 bp, Artificial
  probe
  misc_feature (1)..(25): SEQ ID NO: 4928; WAN024E2J; Start 122; Stop 146
cttatataattgcacatgagttggg

SEQ ID NO: 394604 - DNA, 25 bp, Artificial
  probe
  misc_feature (1)..(25): SEQ ID NO: 4928; WAN024E2J; Start 190; Stop 214
ctagatcagtcactaccatgttttc

SEQ ID NO: 394605 - DNA, 25 bp, Artificial
  probe
  misc_feature (1)..(25): SEQ ID NO: 4929; WAN024CH8; Start 33; Stop 57
caactgtttgaaccttagaagagcc

SEQ ID NO: 394606 - DNA, 25 bp, Artificial
  probe
  misc_feature (1)..(25): SEQ ID NO: 4929; WAN024CH8; Start 207; Stop 231
ggaagtattcacgaacgtaggttgt

SEQ ID NO: 394607 - DNA, 25 bp, Artificial
  probe
  misc_feature (1)..(25): SEQ ID NO: 4929; WAN024CH8; Start 206; Stop 230
tggaagtattcacgaacgtaggttg

SEQ ID NO: 394608 - DNA, 25 bp, Artificial
  probe
  misc_feature (1)..(25): SEQ ID NO: 4929; WAN024CH8; Start 34; Stop 58
aactgtttgaaccttagaagagccc

SEQ ID NO: 394609 - DNA, 25 bp, Artificial
  probe
  misc_feature (1)..(25): SEQ ID NO: 4929; WAN024CH8; Start 192; Stop 216
ctacaaagcctgggtggaagtattc

SEQ ID NO: 394610 - DNA, 25 bp, Artificial
  probe
  misc_feature (1)..(25): SEQ ID NO: 4929; WAN024CH8; Start 205; Stop 229
gtggaagtattcacgaacgtaggtt

SEQ ID NO: 394611 - DNA, 25 bp, Artificial
  probe
  misc_feature (1)..(25): SEQ ID NO: 4929; WAN024CH8; Start 30; Stop 54
actcaactgtttgaaccttagaaga

SEQ ID NO: 394612 - DNA, 25 bp, Artificial
  probe
  misc_feature (1)..(25): SEQ ID NO: 4929; WAN024CH8; Start 28; Stop 52
agactcaactgtttgaaccttagaa

SEQ ID NO: 394613 - DNA, 25 bp, Artificial
  probe
  misc_feature (1)..(25): SEQ ID NO: 4929; WAN024CH8; Start 29; Stop 53
gactcaactgtttgaaccttagaag

SEQ ID NO: 394614 - DNA, 25 bp, Artificial
  probe
  misc_feature (1)..(25): SEQ ID NO: 4929; WAN024CH8; Start 31; Stop 55
ctcaactgtttgaaccttagaagag

SEQ ID NO: 394615 - DNA, 25 bp, Artificial
  probe
  misc_feature (1)..(25): SEQ ID NO: 4929; WAN024CH8; Start 27; Stop 51
cagactcaactgtttgaaccttaga

SEQ ID NO: 394616 - DNA, 25 bp, Artificial
  probe
  misc_feature (1)..(25): SEQ ID NO: 4929; WAN024CH8; Start 174; Stop 198
caagttccatacgtttagctacaaa

SEQ ID NO: 394617 - DNA, 25 bp, Artificial
  probe
  misc_feature (1)..(25): SEQ ID NO: 4929; WAN024CH8; Start 175; Stop 199
aagttccatacgtttagctacaaag

SEQ ID NO: 394618 - DNA, 25 bp, Artificial
  probe
  misc_feature (1)..(25): SEQ ID NO: 4929; WAN024CH8; Start 193; Stop 217
tacaaagcctgggtggaagtattca

SEQ ID NO: 394619 - DNA, 25 bp, Artificial
  probe
  misc_feature (1)..(25): SEQ ID NO: 4929; WAN024CH8; Start 32; Stop 56
tcaactgtttgaaccttagaagagc

SEQ ID NO: 394620 - DNA, 25 bp, Artificial
  probe
  misc_feature (1)..(25): SEQ ID NO: 4929; WAN024CH8; Start 173; Stop 197
ccaagttccatacgtttagctacaa

SEQ ID NO: 394621 - DNA, 25 bp, Artificial
  probe
  misc_feature (1)..(25): SEQ ID NO: 4929; WAN024CH8; Start 171; Stop 195
caccaagttccatacgtttagctac

SEQ ID NO: 394622 - DNA, 25 bp, Artificial
  probe
  misc_feature (1)..(25): SEQ ID NO: 4929; WAN024CH8; Start 172; Stop 196
accaagttccatacgtttagctaca

SEQ ID NO: 394623 - DNA, 25 bp, Artificial
  probe
  misc_feature (1)..(25): SEQ ID NO: 4929; WAN024CH8; Start 25; Stop 49
tacagactcaactgtttgaacctta

SEQ ID NO: 394624 - DNA, 25 bp, Artificial
  probe
  misc_feature (1)..(25): SEQ ID NO: 4929; WAN024CH8; Start 21; Stop 45
tctctacagactcaactgtttgaac

SEQ ID NO: 394625 - DNA, 25 bp, Artificial
  probe
  misc_feature (1)..(25): SEQ ID NO: 4929; WAN024CH8; Start 20; Stop 44
gtctctacagactcaactgtttgaa

SEQ ID NO: 394626 - DNA, 25 bp, Artificial
  probe
  misc_feature (1)..(25): SEQ ID NO: 4929; WAN024CH8; Start 234; Stop 258
caagcccaatctggttaccatatga

SEQ ID NO: 394627 - DNA, 25 bp, Artificial
  probe
  misc_feature (1)..(25): SEQ ID NO: 4929; WAN024CH8; Start 204; Stop 228
ggtggaagtattcacgaacgtaggt

SEQ ID NO: 394628 - DNA, 25 bp, Artificial
  probe
  misc_feature (1)..(25): SEQ ID NO: 4929; WAN024CH8; Start 37; Stop 61
tgtttgaaccttagaagagcccgtc

SEQ ID NO: 394629 - DNA, 25 bp, Artificial
  probe
  misc_feature (1)..(25): SEQ ID NO: 4929; WAN024CH8; Start 36; Stop 60
ctgtttgaaccttagaagagcccgt

SEQ ID NO: 394630 - DNA, 25 bp, Artificial
  probe
  misc_feature (1)..(25): SEQ ID NO: 4929; WAN024CH8; Start 35; Stop 59
actgtttgaaccttagaagagcccg

SEQ ID NO: 394631 - DNA, 25 bp, Artificial
  probe
  misc_feature (1)..(25): SEQ ID NO: 4929; WAN024CH8; Start 170; Stop 194
gcaccaagttccatacgtttagcta

SEQ ID NO: 394632 - DNA, 25 bp, Artificial
  probe
  misc_feature (1)..(25): SEQ ID NO: 4929; WAN024CH8; Start 26; Stop 50
acagactcaactgtttgaaccttag

SEQ ID NO: 394633 - DNA, 25 bp, Artificial
  probe
  misc_feature (1)..(25): SEQ ID NO: 4929; WAN024CH8; Start 24; Stop 48
ctacagactcaactgtttgaacctt

SEQ ID NO: 394634 - DNA, 25 bp, Artificial
  probe
  misc_feature (1)..(25): SEQ ID NO: 4929; WAN024CH8; Start 176; Stop 200
agttccatacgtttagctacaaagc

SEQ ID NO: 394635 - DNA, 25 bp, Artificial
  probe
  misc_feature (1)..(25): SEQ ID NO: 4929; WAN024CH8; Start 22; Stop 46
ctctacagactcaactgtttgaacc

SEQ ID NO: 394636 - DNA, 25 bp, Artificial
  probe
  misc_feature (1)..(25): SEQ ID NO: 4929; WAN024CH8; Start 23; Stop 47
tctacagactcaactgtttgaacct

SEQ ID NO: 394637 - DNA, 25 bp, Artificial
  probe
  misc_feature (1)..(25): SEQ ID NO: 4929; WAN024CH8; Start 178; Stop 202
ttccatacgtttagctacaaagcct

SEQ ID NO: 394638 - DNA, 25 bp, Artificial
  probe
  misc_feature (1)..(25): SEQ ID NO: 4930; WAN024CPX; Start 262; Stop 286
ataaccaacaatgatgatgatgtca

SEQ ID NO: 394639 - DNA, 25 bp, Artificial
  probe
  misc_feature (1)..(25): SEQ ID NO: 4930; WAN024CPX; Start 259; Stop 283
aagataaccaacaatgatgatgatg

SEQ ID NO: 394640 - DNA, 25 bp, Artificial
  probe
  misc_feature (1)..(25): SEQ ID NO: 4930; WAN024CPX; Start 260; Stop 284
agataaccaacaatgatgatgatgt

SEQ ID NO: 394641 - DNA, 25 bp, Artificial
  probe
  misc_feature (1)..(25): SEQ ID NO: 4930; WAN024CPX; Start 261; Stop 285
gataaccaacaatgatgatgatgtc

SEQ ID NO: 394642 - DNA, 25 bp, Artificial
  probe
  misc_feature (1)..(25): SEQ ID NO: 4930; WAN024CPX; Start 223; Stop 247
accgtatttctctttcaagtaatcg

SEQ ID NO: 394643 - DNA, 25 bp, Artificial
  probe
  misc_feature (1)..(25): SEQ ID NO: 4930; WAN024CPX; Start 219; Stop 243
gaacaccgtatttctctttcaagta

SEQ ID NO: 394644 - DNA, 25 bp, Artificial
  probe
  misc_feature (1)..(25): SEQ ID NO: 4930; WAN024CPX; Start 220; Stop 244
aacaccgtatttctctttcaagtaa

SEQ ID NO: 394645 - DNA, 25 bp, Artificial
  probe
  misc_feature (1)..(25): SEQ ID NO: 4930; WAN024CPX; Start 221; Stop 245
acaccgtatttctctttcaagtaat

SEQ ID NO: 394646 - DNA, 25 bp, Artificial
  probe
  misc_feature (1)..(25): SEQ ID NO: 4930; WAN024CPX; Start 42; Stop 66
tggtacaatcttcacgataaacact

SEQ ID NO: 394647 - DNA, 25 bp, Artificial
  probe
  misc_feature (1)..(25): SEQ ID NO: 4930; WAN024CPX; Start 218; Stop 242
cgaacaccgtatttctctttcaagt

SEQ ID NO: 394648 - DNA, 25 bp, Artificial
  probe
  misc_feature (1)..(25): SEQ ID NO: 4930; WAN024CPX; Start 222; Stop 246
caccgtatttctctttcaagtaatc

SEQ ID NO: 394649 - DNA, 25 bp, Artificial
  probe
  misc_feature (1)..(25): SEQ ID NO: 4930; WAN024CPX; Start 41; Stop 65
ttggtacaatcttcacgataaacac

SEQ ID NO: 394650 - DNA, 25 bp, Artificial
  probe
  misc_feature (1)..(25): SEQ ID NO: 4930; WAN024CPX; Start 40; Stop 64
gttggtacaatcttcacgataaaca

SEQ ID NO: 394651 - DNA, 25 bp, Artificial
  probe
  misc_feature (1)..(25): SEQ ID NO: 4930; WAN024CPX; Start 43; Stop 67
ggtacaatcttcacgataaacacta

SEQ ID NO: 394652 - DNA, 25 bp, Artificial
  probe
  misc_feature (1)..(25): SEQ ID NO: 4930; WAN024CPX; Start 257; Stop 281
ttaagataaccaacaatgatgatga

SEQ ID NO: 394653 - DNA, 25 bp, Artificial
  probe
  misc_feature (1)..(25): SEQ ID NO: 4930; WAN024CPX; Start 186; Stop 210
tgtagtcagcgtatttatcattgaa

SEQ ID NO: 394654 - DNA, 25 bp, Artificial
  probe
  misc_feature (1)..(25): SEQ ID NO: 4930; WAN024CPX; Start 185; Stop 209
ttgtagtcagcgtatttatcattga

SEQ ID NO: 394655 - DNA, 25 bp, Artificial
  probe
  misc_feature (1)..(25): SEQ ID NO: 4930; WAN024CPX; Start 263; Stop 287
taaccaacaatgatgatgatgtcat

SEQ ID NO: 394656 - DNA, 25 bp, Artificial
  probe
  misc_feature (1)..(25): SEQ ID NO: 4930; WAN024CPX; Start 337; Stop 361
ttgattaacctgaaccaaggcttta

SEQ ID NO: 394657 - DNA, 25 bp, Artificial
  probe
  misc_feature (1)..(25): SEQ ID NO: 4930; WAN024CPX; Start 272; Stop 296
atgatgatgatgtcattgattcctt

SEQ ID NO: 394658 - DNA, 25 bp, Artificial
  probe
  misc_feature (1)..(25): SEQ ID NO: 4930; WAN024CPX; Start 184; Stop 208
attgtagtcagcgtatttatcattg

SEQ ID NO: 394659 - DNA, 25 bp, Artificial
  probe
  misc_feature (1)..(25): SEQ ID NO: 4930; WAN024CPX; Start 305; Stop 329
agaaactcaatttggtactcaatca

SEQ ID NO: 394660 - DNA, 25 bp, Artificial
  probe
  misc_feature (1)..(25): SEQ ID NO: 4930; WAN024CPX; Start 258; Stop 282
taagataaccaacaatgatgatgat

SEQ ID NO: 394661 - DNA, 25 bp, Artificial
  probe
  misc_feature (1)..(25): SEQ ID NO: 4930; WAN024CPX; Start 338; Stop 362
tgattaacctgaaccaaggctttag

SEQ ID NO: 394662 - DNA, 25 bp, Artificial
  probe
  misc_feature (1)..(25): SEQ ID NO: 4930; WAN024CPX; Start 336; Stop 360
tttgattaacctgaaccaaggcttt

SEQ ID NO: 394663 - DNA, 25 bp, Artificial
  probe
  misc_feature (1)..(25): SEQ ID NO: 4930; WAN024CPX; Start 224; Stop 248
ccgtatttctctttcaagtaatcga

SEQ ID NO: 394664 - DNA, 25 bp, Artificial
  probe
  misc_feature (1)..(25): SEQ ID NO: 4930; WAN024CPX; Start 339; Stop 363
gattaacctgaaccaaggctttagg

SEQ ID NO: 394665 - DNA, 25 bp, Artificial
  probe
  misc_feature (1)..(25): SEQ ID NO: 4930; WAN024CPX; Start 306; Stop 330
gaaactcaatttggtactcaatcaa

SEQ ID NO: 394666 - DNA, 25 bp, Artificial
  probe
  misc_feature (1)..(25): SEQ ID NO: 4930; WAN024CPX; Start 304; Stop 328
gagaaactcaatttggtactcaatc

SEQ ID NO: 394667 - DNA, 25 bp, Artificial
  probe
  misc_feature (1)..(25): SEQ ID NO: 4930; WAN024CPX; Start 187; Stop 211
gtagtcagcgtatttatcattgaaa

SEQ ID NO: 394668 - DNA, 25 bp, Artificial
  probe
  misc_feature (1)..(25): SEQ ID NO: 4930; WAN024CPX; Start 181; Stop 205
gttattgtagtcagcgtatttatca

SEQ ID NO: 394669 - DNA, 25 bp, Artificial
  probe
  misc_feature (1)..(25): SEQ ID NO: 4930; WAN024CPX; Start 180; Stop 204
agttattgtagtcagcgtatttatc

SEQ ID NO: 394670 - DNA, 25 bp, Artificial
  probe
  misc_feature (1)..(25): SEQ ID NO: 4930; WAN024CPX; Start 44; Stop 68
gtacaatcttcacgataaacactaa

SEQ ID NO: 394671 - DNA, 25 bp, Artificial
  probe
  misc_feature (1)..(25): SEQ ID NO: 4931; WAN024CMJ; Start 14; Stop 38
atggaaatgtcttacttgatagtcg

SEQ ID NO: 394672 - DNA, 25 bp, Artificial
  probe
  misc_feature (1)..(25): SEQ ID NO: 4931; WAN024CMJ; Start 12; Stop 36
tgatggaaatgtcttacttgatagt

SEQ ID NO: 394673 - DNA, 25 bp, Artificial
  probe
  misc_feature (1)..(25): SEQ ID NO: 4931; WAN024CMJ; Start 21; Stop 45
tgtcttacttgatagtcgagggata

SEQ ID NO: 394674 - DNA, 25 bp, Artificial
  probe
  misc_feature (1)..(25): SEQ ID NO: 4931; WAN024CMJ; Start 18; Stop 42
aaatgtcttacttgatagtcgaggg

SEQ ID NO: 394675 - DNA, 25 bp, Artificial
  probe
  misc_feature (1)..(25): SEQ ID NO: 4931; WAN024CMJ; Start 22; Stop 46
gtcttacttgatagtcgagggatag

SEQ ID NO: 394676 - DNA, 25 bp, Artificial
  probe
  misc_feature (1)..(25): SEQ ID NO: 4931; WAN024CMJ; Start 15; Stop 39
tggaaatgtcttacttgatagtcga

SEQ ID NO: 394677 - DNA, 25 bp, Artificial
  probe
  misc_feature (1)..(25): SEQ ID NO: 4931; WAN024CMJ; Start 20; Stop 44
atgtcttacttgatagtcgagggat

SEQ ID NO: 394678 - DNA, 25 bp, Artificial
  probe
  misc_feature (1)..(25): SEQ ID NO: 4931; WAN024CMJ; Start 19; Stop 43
aatgtcttacttgatagtcgaggga

SEQ ID NO: 394679 - DNA, 25 bp, Artificial
  probe
  misc_feature (1)..(25): SEQ ID NO: 4931; WAN024CMJ; Start 6; Stop 30
cgtatttgatggaaatgtcttactt

SEQ ID NO: 394680 - DNA, 25 bp, Artificial
  probe
  misc_feature (1)..(25): SEQ ID NO: 4931; WAN024CMJ; Start 17; Stop 41
gaaatgtcttacttgatagtcgagg

SEQ ID NO: 394681 - DNA, 25 bp, Artificial
  probe
  misc_feature (1)..(25): SEQ ID NO: 4931; WAN024CMJ; Start 16; Stop 40
ggaaatgtcttacttgatagtcgag

SEQ ID NO: 394682 - DNA, 25 bp, Artificial
  probe
  misc_feature (1)..(25): SEQ ID NO: 4931; WAN024CMJ; Start 23; Stop 47
tcttacttgatagtcgagggatagc

SEQ ID NO: 394683 - DNA, 25 bp, Artificial
  probe
  misc_feature (1)..(25): SEQ ID NO: 4931; WAN024CMJ; Start 13; Stop 37
gatggaaatgtcttacttgatagtc

SEQ ID NO: 394684 - DNA, 25 bp, Artificial
  probe
  misc_feature (1)..(25): SEQ ID NO: 4931; WAN024CMJ; Start 11; Stop 35
ttgatggaaatgtcttacttgatag

SEQ ID NO: 394685 - DNA, 25 bp, Artificial
  probe
  misc_feature (1)..(25): SEQ ID NO: 4931; WAN024CMJ; Start 31; Stop 55
gatagtcgagggatagccattctat

SEQ ID NO: 394686 - DNA, 25 bp, Artificial
  probe
  misc_feature (1)..(25): SEQ ID NO: 4931; WAN024CMJ; Start 30; Stop 54
tgatagtcgagggatagccattcta

SEQ ID NO: 394687 - DNA, 25 bp, Artificial
  probe
  misc_feature (1)..(25): SEQ ID NO: 4931; WAN024CMJ; Start 2; Stop 26
tgaacgtatttgatggaaatgtctt

SEQ ID NO: 394688 - DNA, 25 bp, Artificial
  probe
  misc_feature (1)..(25): SEQ ID NO: 4931; WAN024CMJ; Start 1; Stop 25
ttgaacgtatttgatggaaatgtct

SEQ ID NO: 394689 - DNA, 25 bp, Artificial
  probe
  misc_feature (1)..(25): SEQ ID NO: 4931; WAN024CMJ; Start 24; Stop 48
cttacttgatagtcgagggatagcc

SEQ ID NO: 394690 - DNA, 25 bp, Artificial
  probe
  misc_feature (1)..(25): SEQ ID NO: 4931; WAN024CMJ; Start 28; Stop 52
cttgatagtcgagggatagccattc

SEQ ID NO: 394691 - DNA, 25 bp, Artificial
  probe
  misc_feature (1)..(25): SEQ ID NO: 4931; WAN024CMJ; Start 26; Stop 50
tacttgatagtcgagggatagccat

SEQ ID NO: 394692 - DNA, 25 bp, Artificial
  probe
  misc_feature (1)..(25): SEQ ID NO: 4931; WAN024CMJ; Start 9; Stop 33
atttgatggaaatgtcttacttgat

SEQ ID NO: 394693 - DNA, 25 bp, Artificial
  probe
  misc_feature (1)..(25): SEQ ID NO: 4931; WAN024CMJ; Start 5; Stop 29
acgtatttgatggaaatgtcttact

SEQ ID NO: 394694 - DNA, 25 bp, Artificial
  probe
  misc_feature (1)..(25): SEQ ID NO: 4931; WAN024CMJ; Start 29; Stop 53
ttgatagtcgagggatagccattct

SEQ ID NO: 394695 - DNA, 25 bp, Artificial
  probe
  misc_feature (1)..(25): SEQ ID NO: 4931; WAN024CMJ; Start 10; Stop 34
tttgatggaaatgtcttacttgata

SEQ ID NO: 394696 - DNA, 25 bp, Artificial
  probe
  misc_feature (1)..(25): SEQ ID NO: 4931; WAN024CMJ; Start 25; Stop 49
ttacttgatagtcgagggatagcca

SEQ ID NO: 394697 - DNA, 25 bp, Artificial
  probe
  misc_feature (1)..(25): SEQ ID NO: 4931; WAN024CMJ; Start 4; Stop 28
aacgtatttgatggaaatgtcttac

SEQ ID NO: 394698 - DNA, 25 bp, Artificial
  probe
  misc_feature (1)..(25): SEQ ID NO: 4931; WAN024CMJ; Start 3; Stop 27
gaacgtatttgatggaaatgtctta

SEQ ID NO: 394699 - DNA, 25 bp, Artificial
  probe
  misc_feature (1)..(25): SEQ ID NO: 4931; WAN024CMJ; Start 7; Stop 31
gtatttgatggaaatgtcttacttg

SEQ ID NO: 394700 - DNA, 25 bp, Artificial
  probe
  misc_feature (1)..(25): SEQ ID NO: 4931; WAN024CMJ; Start 27; Stop 51
acttgatagtcgagggatagccatt

SEQ ID NO: 394701 - DNA, 25 bp, Artificial
  probe
  misc_feature (1)..(25): SEQ ID NO: 4931; WAN024CMJ; Start 8; Stop 32
tatttgatggaaatgtcttacttga

SEQ ID NO: 394702 - DNA, 25 bp, Artificial
  probe
  misc_feature (1)..(25): SEQ ID NO: 4931; WAN024CMJ; Start 32; Stop 56
atagtcgagggatagccattctatc

SEQ ID NO: 394703 - DNA, 25 bp, Artificial
  probe
  misc_feature (1)..(25): SEQ ID NO: 4931; WAN024CMJ; Start 38; Stop 62
gagggatagccattctatcggattt

SEQ ID NO: 394704 - DNA, 25 bp, Artificial
  probe
  misc_feature (1)..(25): SEQ ID NO: 4932; WAN024GG4; Start 154; Stop 178
catcatatcaggtgtagcgataact

SEQ ID NO: 394705 - DNA, 25 bp, Artificial
  probe
  misc_feature (1)..(25): SEQ ID NO: 4932; WAN024GG4; Start 153; Stop 177
ccatcatatcaggtgtagcgataac

SEQ ID NO: 394706 - DNA, 25 bp, Artificial
  probe
  misc_feature (1)..(25): SEQ ID NO: 4932; WAN024GG4; Start 155; Stop 179
atcatatcaggtgtagcgataacta

SEQ ID NO: 394707 - DNA, 25 bp, Artificial
  probe
  misc_feature (1)..(25): SEQ ID NO: 4932; WAN024GG4; Start 145; Stop 169
aacaagagccatcatatcaggtgta

SEQ ID NO: 394708 - DNA, 25 bp, Artificial
  probe
  misc_feature (1)..(25): SEQ ID NO: 4932; WAN024GG4; Start 146; Stop 170
acaagagccatcatatcaggtgtag

SEQ ID NO: 394709 - DNA, 25 bp, Artificial
  probe
  misc_feature (1)..(25): SEQ ID NO: 4932; WAN024GG4; Start 43; Stop 67
acctttagactcttcaactgcttta

SEQ ID NO: 394710 - DNA, 25 bp, Artificial
  probe
  misc_feature (1)..(25): SEQ ID NO: 4932; WAN024GG4; Start 38; Stop 62
ttaccacctttagactcttcaactg

SEQ ID NO: 394711 - DNA, 25 bp, Artificial
  probe
  misc_feature (1)..(25): SEQ ID NO: 4932; WAN024GG4; Start 37; Stop 61
tttaccacctttagactcttcaact

SEQ ID NO: 394712 - DNA, 25 bp, Artificial
  probe
  misc_feature (1)..(25): SEQ ID NO: 4932; WAN024GG4; Start 44; Stop 68
cctttagactcttcaactgctttag

SEQ ID NO: 394713 - DNA, 25 bp, Artificial
  probe
  misc_feature (1)..(25): SEQ ID NO: 4932; WAN024GG4; Start 152; Stop 176
gccatcatatcaggtgtagcgataa

SEQ ID NO: 394714 - DNA, 25 bp, Artificial
  probe
  misc_feature (1)..(25): SEQ ID NO: 4932; WAN024GG4; Start 147; Stop 171
caagagccatcatatcaggtgtagc

SEQ ID NO: 394715 - DNA, 25 bp, Artificial
  probe
  misc_feature (1)..(25): SEQ ID NO: 4932; WAN024GG4; Start 42; Stop 66
cacctttagactcttcaactgcttt

SEQ ID NO: 394716 - DNA, 25 bp, Artificial
  probe
  misc_feature (1)..(25): SEQ ID NO: 4932; WAN024GG4; Start 45; Stop 69
ctttagactcttcaactgctttagc

SEQ ID NO: 394717 - DNA, 25 bp, Artificial
  probe
  misc_feature (1)..(25): SEQ ID NO: 4932; WAN024GG4; Start 156; Stop 180
tcatatcaggtgtagcgataactac

SEQ ID NO: 394718 - DNA, 25 bp, Artificial
  probe
  misc_feature (1)..(25): SEQ ID NO: 4932; WAN024GG4; Start 141; Stop 165
gtccaacaagagccatcatatcagg

SEQ ID NO: 394719 - DNA, 25 bp, Artificial
  probe
  misc_feature (1)..(25): SEQ ID NO: 4932; WAN024GG4; Start 157; Stop 181
catatcaggtgtagcgataactacg

SEQ ID NO: 394720 - DNA, 25 bp, Artificial
  probe
  misc_feature (1)..(25): SEQ ID NO: 4932; WAN024GG4; Start 144; Stop 168
caacaagagccatcatatcaggtgt

SEQ ID NO: 394721 - DNA, 25 bp, Artificial
  probe
  misc_feature (1)..(25): SEQ ID NO: 4932; WAN024GG4; Start 143; Stop 167
ccaacaagagccatcatatcaggtg

SEQ ID NO: 394722 - DNA, 25 bp, Artificial
  probe
  misc_feature (1)..(25): SEQ ID NO: 4932; WAN024GG4; Start 142; Stop 166
tccaacaagagccatcatatcaggt

SEQ ID NO: 394723 - DNA, 25 bp, Artificial
  probe
  misc_feature (1)..(25): SEQ ID NO: 4932; WAN024GG4; Start 140; Stop 164
cgtccaacaagagccatcatatcag

SEQ ID NO: 394724 - DNA, 25 bp, Artificial
  probe
  misc_feature (1)..(25): SEQ ID NO: 4932; WAN024GG4; Start 151; Stop 175
agccatcatatcaggtgtagcgata

SEQ ID NO: 394725 - DNA, 25 bp, Artificial
  probe
  misc_feature (1)..(25): SEQ ID NO: 4932; WAN024GG4; Start 39; Stop 63
taccacctttagactcttcaactgc

SEQ ID NO: 394726 - DNA, 25 bp, Artificial
  probe
  misc_feature (1)..(25): SEQ ID NO: 4932; WAN024GG4; Start 71; Stop 95
acatccattgttacagtaccagttt

SEQ ID NO: 394727 - DNA, 25 bp, Artificial
  probe
  misc_feature (1)..(25): SEQ ID NO: 4932; WAN024GG4; Start 209; Stop 233
ttagcaacaaggtcatcttcaccaa

SEQ ID NO: 394728 - DNA, 25 bp, Artificial
  probe
  misc_feature (1)..(25): SEQ ID NO: 4932; WAN024GG4; Start 41; Stop 65
ccacctttagactcttcaactgctt

SEQ ID NO: 394729 - DNA, 25 bp, Artificial
  probe
  misc_feature (1)..(25): SEQ ID NO: 4932; WAN024GG4; Start 70; Stop 94
aacatccattgttacagtaccagtt

SEQ ID NO: 394730 - DNA, 25 bp, Artificial
  probe
  misc_feature (1)..(25): SEQ ID NO: 4932; WAN024GG4; Start 65; Stop 89
ttagcaacatccattgttacagtac

SEQ ID NO: 394731 - DNA, 25 bp, Artificial
  probe
  misc_feature (1)..(25): SEQ ID NO: 4932; WAN024GG4; Start 66; Stop 90
tagcaacatccattgttacagtacc

SEQ ID NO: 394732 - DNA, 25 bp, Artificial
  probe
  misc_feature (1)..(25): SEQ ID NO: 4932; WAN024GG4; Start 172; Stop 196
gataactacgtcgaagtccaaccaa

SEQ ID NO: 394733 - DNA, 25 bp, Artificial
  probe
  misc_feature (1)..(25): SEQ ID NO: 4932; WAN024GG4; Start 150; Stop 174
gagccatcatatcaggtgtagcgat

SEQ ID NO: 394734 - DNA, 25 bp, Artificial
  probe
  misc_feature (1)..(25): SEQ ID NO: 4932; WAN024GG4; Start 69; Stop 93
caacatccattgttacagtaccagt

SEQ ID NO: 394735 - DNA, 25 bp, Artificial
  probe
  misc_feature (1)..(25): SEQ ID NO: 4932; WAN024GG4; Start 158; Stop 182
atatcaggtgtagcgataactacgt

SEQ ID NO: 394736 - DNA, 25 bp, Artificial
  probe
  misc_feature (1)..(25): SEQ ID NO: 4932; WAN024GG4; Start 358; Stop 382
tttaacgtcgatgttcaagttgtaa

SEQ ID NO: 394737 - DNA, 25 bp, Artificial
  probe
  misc_feature (1)..(25): SEQ ID NO: 4933; WAN024FXB; Start 310; Stop 334
gctcatagattgtcaacgattaagg

SEQ ID NO: 394738 - DNA, 25 bp, Artificial
  probe
  misc_feature (1)..(25): SEQ ID NO: 4933; WAN024FXB; Start 314; Stop 338
atagattgtcaacgattaaggatgc

SEQ ID NO: 394739 - DNA, 25 bp, Artificial
  probe
  misc_feature (1)..(25): SEQ ID NO: 4933; WAN024FXB; Start 315; Stop 339
tagattgtcaacgattaaggatgcg

SEQ ID NO: 394740 - DNA, 25 bp, Artificial
  probe
  misc_feature (1)..(25): SEQ ID NO: 4933; WAN024FXB; Start 311; Stop 335
ctcatagattgtcaacgattaagga

SEQ ID NO: 394741 - DNA, 25 bp, Artificial
  probe
  misc_feature (1)..(25): SEQ ID NO: 4933; WAN024FXB; Start 312; Stop 336
tcatagattgtcaacgattaaggat

SEQ ID NO: 394742 - DNA, 25 bp, Artificial
  probe
  misc_feature (1)..(25): SEQ ID NO: 4933; WAN024FXB; Start 313; Stop 337
catagattgtcaacgattaaggatg

SEQ ID NO: 394743 - DNA, 25 bp, Artificial
  probe
  misc_feature (1)..(25): SEQ ID NO: 4933; WAN024FXB; Start 361; Stop 385
ggtggtaagattgttgagtcaggaa

SEQ ID NO: 394744 - DNA, 25 bp, Artificial
  probe
  misc_feature (1)..(25): SEQ ID NO: 4933; WAN024FXB; Start 359; Stop 383
aaggtggtaagattgttgagtcagg

SEQ ID NO: 394745 - DNA, 25 bp, Artificial
  probe
  misc_feature (1)..(25): SEQ ID NO: 4933; WAN024FXB; Start 309; Stop 333
agctcatagattgtcaacgattaag

SEQ ID NO: 394746 - DNA, 25 bp, Artificial
  probe
  misc_feature (1)..(25): SEQ ID NO: 4933; WAN024FXB; Start 355; Stop 379
atgaaaggtggtaagattgttgagt

SEQ ID NO: 394747 - DNA, 25 bp, Artificial
  probe
  misc_feature (1)..(25): SEQ ID NO: 4933; WAN024FXB; Start 56; Stop 80
agatagaggaagtttgtaaagcagt

SEQ ID NO: 394748 - DNA, 25 bp, Artificial
  probe
  misc_feature (1)..(25): SEQ ID NO: 4933; WAN024FXB; Start 354; Stop 378
aatgaaaggtggtaagattgttgag

SEQ ID NO: 394749 - DNA, 25 bp, Artificial
  probe
  misc_feature (1)..(25): SEQ ID NO: 4933; WAN024FXB; Start 363; Stop 387
tggtaagattgttgagtcaggaaat

SEQ ID NO: 394750 - DNA, 25 bp, Artificial
  probe
  misc_feature (1)..(25): SEQ ID NO: 4933; WAN024FXB; Start 356; Stop 380
tgaaaggtggtaagattgttgagtc

SEQ ID NO: 394751 - DNA, 25 bp, Artificial
  probe
  misc_feature (1)..(25): SEQ ID NO: 4933; WAN024FXB; Start 59; Stop 83
tagaggaagtttgtaaagcagttca

SEQ ID NO: 394752 - DNA, 25 bp, Artificial
  probe
  misc_feature (1)..(25): SEQ ID NO: 4933; WAN024FXB; Start 318; Stop 342
attgtcaacgattaaggatgcggat

SEQ ID NO: 394753 - DNA, 25 bp, Artificial
  probe
  misc_feature (1)..(25): SEQ ID NO: 4933; WAN024FXB; Start 57; Stop 81
gatagaggaagtttgtaaagcagtt

SEQ ID NO: 394754 - DNA, 25 bp, Artificial
  probe
  misc_feature (1)..(25): SEQ ID NO: 4933; WAN024FXB; Start 362; Stop 386
gtggtaagattgttgagtcaggaaa

SEQ ID NO: 394755 - DNA, 25 bp, Artificial
  probe
  misc_feature (1)..(25): SEQ ID NO: 4933; WAN024FXB; Start 358; Stop 382
aaaggtggtaagattgttgagtcag

SEQ ID NO: 394756 - DNA, 25 bp, Artificial
  probe
  misc_feature (1)..(25): SEQ ID NO: 4933; WAN024FXB; Start 357; Stop 381
gaaaggtggtaagattgttgagtca

SEQ ID NO: 394757 - DNA, 25 bp, Artificial
  probe
  misc_feature (1)..(25): SEQ ID NO: 4933; WAN024FXB; Start 55; Stop 79
aagatagaggaagtttgtaaagcag

SEQ ID NO: 394758 - DNA, 25 bp, Artificial
  probe
  misc_feature (1)..(25): SEQ ID NO: 4933; WAN024FXB; Start 58; Stop 82
atagaggaagtttgtaaagcagttc

SEQ ID NO: 394759 - DNA, 25 bp, Artificial
  probe
  misc_feature (1)..(25): SEQ ID NO: 4933; WAN024FXB; Start 351; Stop 375
tgtaatgaaaggtggtaagattgtt

SEQ ID NO: 394760 - DNA, 25 bp, Artificial
  probe
  misc_feature (1)..(25): SEQ ID NO: 4933; WAN024FXB; Start 350; Stop 374
ttgtaatgaaaggtggtaagattgt

SEQ ID NO: 394761 - DNA, 25 bp, Artificial
  probe
  misc_feature (1)..(25): SEQ ID NO: 4933; WAN024FXB; Start 360; Stop 384
aggtggtaagattgttgagtcagga

SEQ ID NO: 394762 - DNA, 25 bp, Artificial
  probe
  misc_feature (1)..(25): SEQ ID NO: 4933; WAN024FXB; Start 60; Stop 84
agaggaagtttgtaaagcagttcaa

SEQ ID NO: 394763 - DNA, 25 bp, Artificial
  probe
  misc_feature (1)..(25): SEQ ID NO: 4933; WAN024FXB; Start 308; Stop 332
tagctcatagattgtcaacgattaa

SEQ ID NO: 394764 - DNA, 25 bp, Artificial
  probe
  misc_feature (1)..(25): SEQ ID NO: 4933; WAN024FXB; Start 353; Stop 377
taatgaaaggtggtaagattgttga

SEQ ID NO: 394765 - DNA, 25 bp, Artificial
  probe
  misc_feature (1)..(25): SEQ ID NO: 4933; WAN024FXB; Start 352; Stop 376
gtaatgaaaggtggtaagattgttg

SEQ ID NO: 394766 - DNA, 25 bp, Artificial
  probe
  misc_feature (1)..(25): SEQ ID NO: 4933; WAN024FXB; Start 54; Stop 78
aaagatagaggaagtttgtaaagca

SEQ ID NO: 394767 - DNA, 25 bp, Artificial
  probe
  misc_feature (1)..(25): SEQ ID NO: 4933; WAN024FXB; Start 317; Stop 341
gattgtcaacgattaaggatgcgga

SEQ ID NO: 394768 - DNA, 25 bp, Artificial
  probe
  misc_feature (1)..(25): SEQ ID NO: 4933; WAN024FXB; Start 316; Stop 340
agattgtcaacgattaaggatgcgg

SEQ ID NO: 394769 - DNA, 25 bp, Artificial
  probe
  misc_feature (1)..(25): SEQ ID NO: 4933; WAN024FXB; Start 370; Stop 394
attgttgagtcaggaaatcataagt

SEQ ID NO: 394770 - DNA, 25 bp, Artificial
  probe
  misc_feature (1)..(25): SEQ ID NO: 4934; WAN024DVG; Start 70; Stop 94
caccatcacaacgaattagcttatt

SEQ ID NO: 394771 - DNA, 25 bp, Artificial
  probe
  misc_feature (1)..(25): SEQ ID NO: 4934; WAN024DVG; Start 68; Stop 92
tacaccatcacaacgaattagctta

SEQ ID NO: 394772 - DNA, 25 bp, Artificial
  probe
  misc_feature (1)..(25): SEQ ID NO: 4934; WAN024DVG; Start 69; Stop 93
acaccatcacaacgaattagcttat

SEQ ID NO: 394773 - DNA, 25 bp, Artificial
  probe
  misc_feature (1)..(25): SEQ ID NO: 4934; WAN024DVG; Start 67; Stop 91
ttacaccatcacaacgaattagctt

SEQ ID NO: 394774 - DNA, 25 bp, Artificial
  probe
  misc_feature (1)..(25): SEQ ID NO: 4934; WAN024DVG; Start 8; Stop 32
atcgacgtaactatctaatggcatt

SEQ ID NO: 394775 - DNA, 25 bp, Artificial
  probe
  misc_feature (1)..(25): SEQ ID NO: 4934; WAN024DVG; Start 6; Stop 30
ctatcgacgtaactatctaatggca

SEQ ID NO: 394776 - DNA, 25 bp, Artificial
  probe
  misc_feature (1)..(25): SEQ ID NO: 4934; WAN024DVG; Start 5; Stop 29
actatcgacgtaactatctaatggc

SEQ ID NO: 394777 - DNA, 25 bp, Artificial
  probe
  misc_feature (1)..(25): SEQ ID NO: 4934; WAN024DVG; Start 7; Stop 31
tatcgacgtaactatctaatggcat

SEQ ID NO: 394778 - DNA, 25 bp, Artificial
  probe
  misc_feature (1)..(25): SEQ ID NO: 4934; WAN024DVG; Start 147; Stop 171
tgtcccatttccattaaagtcttca

SEQ ID NO: 394779 - DNA, 25 bp, Artificial
  probe
  misc_feature (1)..(25): SEQ ID NO: 4934; WAN024DVG; Start 148; Stop 172
gtcccatttccattaaagtcttcaa

SEQ ID NO: 394780 - DNA, 25 bp, Artificial
  probe
  misc_feature (1)..(25): SEQ ID NO: 4934; WAN024DVG; Start 65; Stop 89
atttacaccatcacaacgaattagc

SEQ ID NO: 394781 - DNA, 25 bp, Artificial
  probe
  misc_feature (1)..(25): SEQ ID NO: 4934; WAN024DVG; Start 9; Stop 33
tcgacgtaactatctaatggcatta

SEQ ID NO: 394782 - DNA, 25 bp, Artificial
  probe
  misc_feature (1)..(25): SEQ ID NO: 4934; WAN024DVG; Start 146; Stop 170
atgtcccatttccattaaagtcttc

SEQ ID NO: 394783 - DNA, 25 bp, Artificial
  probe
  misc_feature (1)..(25): SEQ ID NO: 4934; WAN024DVG; Start 10; Stop 34
cgacgtaactatctaatggcattaa

SEQ ID NO: 394784 - DNA, 25 bp, Artificial
  probe
  misc_feature (1)..(25): SEQ ID NO: 4934; WAN024DVG; Start 149; Stop 173
tcccatttccattaaagtcttcaat

SEQ ID NO: 394785 - DNA, 25 bp, Artificial
  probe
  misc_feature (1)..(25): SEQ ID NO: 4934; WAN024DVG; Start 257; Stop 281
gccatcaattccatctcctcatcag

SEQ ID NO: 394786 - DNA, 25 bp, Artificial
  probe
  misc_feature (1)..(25): SEQ ID NO: 4934; WAN024DVG; Start 255; Stop 279
ctgccatcaattccatctcctcatc

SEQ ID NO: 394787 - DNA, 25 bp, Artificial
  probe
  misc_feature (1)..(25): SEQ ID NO: 4934; WAN024DVG; Start 132; Stop 156
actatttcatctccatgtcccattt

SEQ ID NO: 394788 - DNA, 25 bp, Artificial
  probe
  misc_feature (1)..(25): SEQ ID NO: 4934; WAN024DVG; Start 140; Stop 164
atctccatgtcccatttccattaaa

SEQ ID NO: 394789 - DNA, 25 bp, Artificial
  probe
  misc_feature (1)..(25): SEQ ID NO: 4934; WAN024DVG; Start 4; Stop 28
aactatcgacgtaactatctaatgg

SEQ ID NO: 394790 - DNA, 25 bp, Artificial
  probe
  misc_feature (1)..(25): SEQ ID NO: 4934; WAN024DVG; Start 145; Stop 169
catgtcccatttccattaaagtctt

SEQ ID NO: 394791 - DNA, 25 bp, Artificial
  probe
  misc_feature (1)..(25): SEQ ID NO: 4934; WAN024DVG; Start 133; Stop 157
ctatttcatctccatgtcccatttc

SEQ ID NO: 394792 - DNA, 25 bp, Artificial
  probe
  misc_feature (1)..(25): SEQ ID NO: 4934; WAN024DVG; Start 134; Stop 158
tatttcatctccatgtcccatttcc

SEQ ID NO: 394793 - DNA, 25 bp, Artificial
  probe
  misc_feature (1)..(25): SEQ ID NO: 4934; WAN024DVG; Start 258; Stop 282
ccatcaattccatctcctcatcagg

SEQ ID NO: 394794 - DNA, 25 bp, Artificial
  probe
  misc_feature (1)..(25): SEQ ID NO: 4934; WAN024DVG; Start 141; Stop 165
tctccatgtcccatttccattaaag

SEQ ID NO: 394795 - DNA, 25 bp, Artificial
  probe
  misc_feature (1)..(25): SEQ ID NO: 4934; WAN024DVG; Start 139; Stop 163
catctccatgtcccatttccattaa

SEQ ID NO: 394796 - DNA, 25 bp, Artificial
  probe
  misc_feature (1)..(25): SEQ ID NO: 4934; WAN024DVG; Start 131; Stop 155
tactatttcatctccatgtcccatt

SEQ ID NO: 394797 - DNA, 25 bp, Artificial
  probe
  misc_feature (1)..(25): SEQ ID NO: 4934; WAN024DVG; Start 129; Stop 153
aatactatttcatctccatgtccca

SEQ ID NO: 394798 - DNA, 25 bp, Artificial
  probe
  misc_feature (1)..(25): SEQ ID NO: 4934; WAN024DVG; Start 60; Stop 84
ggaatatttacaccatcacaacgaa

SEQ ID NO: 394799 - DNA, 25 bp, Artificial
  probe
  misc_feature (1)..(25): SEQ ID NO: 4934; WAN024DVG; Start 144; Stop 168
ccatgtcccatttccattaaagtct

SEQ ID NO: 394800 - DNA, 25 bp, Artificial
  probe
  misc_feature (1)..(25): SEQ ID NO: 4934; WAN024DVG; Start 143; Stop 167
tccatgtcccatttccattaaagtc

SEQ ID NO: 394801 - DNA, 25 bp, Artificial
  probe
  misc_feature (1)..(25): SEQ ID NO: 4934; WAN024DVG; Start 142; Stop 166
ctccatgtcccatttccattaaagt

SEQ ID NO: 394802 - DNA, 25 bp, Artificial
  probe
  misc_feature (1)..(25): SEQ ID NO: 4934; WAN024DVG; Start 130; Stop 154
atactatttcatctccatgtcccat

SEQ ID NO: 394803 - DNA, 25 bp, Artificial
  probe
  misc_feature (1)..(25): SEQ ID NO: 4935; WAN024GKJ; Start 201; Stop 225
aggtggattcatcataataatgtca

SEQ ID NO: 394804 - DNA, 25 bp, Artificial
  probe
  misc_feature (1)..(25): SEQ ID NO: 4935; WAN024GKJ; Start 202; Stop 226
ggtggattcatcataataatgtcaa

SEQ ID NO: 394805 - DNA, 25 bp, Artificial
  probe
  misc_feature (1)..(25): SEQ ID NO: 4935; WAN024GKJ; Start 174; Stop 198
tattgtttctaattctgaccctcca

SEQ ID NO: 394806 - DNA, 25 bp, Artificial
  probe
  misc_feature (1)..(25): SEQ ID NO: 4935; WAN024GKJ; Start 99; Stop 123
caaacgatacataatgacagccata

SEQ ID NO: 394807 - DNA, 25 bp, Artificial
  probe
  misc_feature (1)..(25): SEQ ID NO: 4935; WAN024GKJ; Start 147; Stop 171
ccgtaattctgctggaaagttattt

SEQ ID NO: 394808 - DNA, 25 bp, Artificial
  probe
  misc_feature (1)..(25): SEQ ID NO: 4935; WAN024GKJ; Start 175; Stop 199
attgtttctaattctgaccctccaa

SEQ ID NO: 394809 - DNA, 25 bp, Artificial
  probe
  misc_feature (1)..(25): SEQ ID NO: 4935; WAN024GKJ; Start 176; Stop 200
ttgtttctaattctgaccctccaaa

SEQ ID NO: 394810 - DNA, 25 bp, Artificial
  probe
  misc_feature (1)..(25): SEQ ID NO: 4935; WAN024GKJ; Start 96; Stop 120
tttcaaacgatacataatgacagcc

SEQ ID NO: 394811 - DNA, 25 bp, Artificial
  probe
  misc_feature (1)..(25): SEQ ID NO: 4935; WAN024GKJ; Start 101; Stop 125
aacgatacataatgacagccataaa

SEQ ID NO: 394812 - DNA, 25 bp, Artificial
  probe
  misc_feature (1)..(25): SEQ ID NO: 4935; WAN024GKJ; Start 100; Stop 124
aaacgatacataatgacagccataa

SEQ ID NO: 394813 - DNA, 25 bp, Artificial
  probe
  misc_feature (1)..(25): SEQ ID NO: 4935; WAN024GKJ; Start 98; Stop 122
tcaaacgatacataatgacagccat

SEQ ID NO: 394814 - DNA, 25 bp, Artificial
  probe
  misc_feature (1)..(25): SEQ ID NO: 4935; WAN024GKJ; Start 200; Stop 224
aaggtggattcatcataataatgtc

SEQ ID NO: 394815 - DNA, 25 bp, Artificial
  probe
  misc_feature (1)..(25): SEQ ID NO: 4935; WAN024GKJ; Start 97; Stop 121
ttcaaacgatacataatgacagcca

SEQ ID NO: 394816 - DNA, 25 bp, Artificial
  probe
  misc_feature (1)..(25): SEQ ID NO: 4935; WAN024GKJ; Start 173; Stop 197
ttattgtttctaattctgaccctcc

SEQ ID NO: 394817 - DNA, 25 bp, Artificial
  probe
  misc_feature (1)..(25): SEQ ID NO: 4935; WAN024GKJ; Start 102; Stop 126
acgatacataatgacagccataaat

SEQ ID NO: 394818 - DNA, 25 bp, Artificial
  probe
  misc_feature (1)..(25): SEQ ID NO: 4935; WAN024GKJ; Start 95; Stop 119
ctttcaaacgatacataatgacagc

SEQ ID NO: 394819 - DNA, 25 bp, Artificial
  probe
  misc_feature (1)..(25): SEQ ID NO: 4935; WAN024GKJ; Start 232; Stop 256
tcatcatccgtatattcacgaacat

SEQ ID NO: 394820 - DNA, 25 bp, Artificial
  probe
  misc_feature (1)..(25): SEQ ID NO: 4935; WAN024GKJ; Start 231; Stop 255
ttcatcatccgtatattcacgaaca

SEQ ID NO: 394821 - DNA, 25 bp, Artificial
  probe
  misc_feature (1)..(25): SEQ ID NO: 4935; WAN024GKJ; Start 233; Stop 257
catcatccgtatattcacgaacatt

SEQ ID NO: 394822 - DNA, 25 bp, Artificial
  probe
  misc_feature (1)..(25): SEQ ID NO: 4935; WAN024GKJ; Start 146; Stop 170
tccgtaattctgctggaaagttatt

SEQ ID NO: 394823 - DNA, 25 bp, Artificial
  probe
  misc_feature (1)..(25): SEQ ID NO: 4935; WAN024GKJ; Start 145; Stop 169
ctccgtaattctgctggaaagttat

SEQ ID NO: 394824 - DNA, 25 bp, Artificial
  probe
  misc_feature (1)..(25): SEQ ID NO: 4935; WAN024GKJ; Start 110; Stop 134
taatgacagccataaataaatcagc

SEQ ID NO: 394825 - DNA, 25 bp, Artificial
  probe
  misc_feature (1)..(25): SEQ ID NO: 4935; WAN024GKJ; Start 94; Stop 118
tctttcaaacgatacataatgacag

SEQ ID NO: 394826 - DNA, 25 bp, Artificial
  probe
  misc_feature (1)..(25): SEQ ID NO: 4935; WAN024GKJ; Start 144; Stop 168
actccgtaattctgctggaaagtta

SEQ ID NO: 394827 - DNA, 25 bp, Artificial
  probe
  misc_feature (1)..(25): SEQ ID NO: 4935; WAN024GKJ; Start 172; Stop 196
tttattgtttctaattctgaccctc

SEQ ID NO: 394828 - DNA, 25 bp, Artificial
  probe
  misc_feature (1)..(25): SEQ ID NO: 4935; WAN024GKJ; Start 103; Stop 127
cgatacataatgacagccataaata

SEQ ID NO: 394829 - DNA, 25 bp, Artificial
  probe
  misc_feature (1)..(25): SEQ ID NO: 4935; WAN024GKJ; Start 93; Stop 117
ttctttcaaacgatacataatgaca

SEQ ID NO: 394830 - DNA, 25 bp, Artificial
  probe
  misc_feature (1)..(25): SEQ ID NO: 4935; WAN024GKJ; Start 68; Stop 92
gtaaaataactccaacacgaccatt

SEQ ID NO: 394831 - DNA, 25 bp, Artificial
  probe
  misc_feature (1)..(25): SEQ ID NO: 4935; WAN024GKJ; Start 63; Stop 87
atcaggtaaaataactccaacacga

SEQ ID NO: 394832 - DNA, 25 bp, Artificial
  probe
  misc_feature (1)..(25): SEQ ID NO: 4935; WAN024GKJ; Start 62; Stop 86
catcaggtaaaataactccaacacg

SEQ ID NO: 394833 - DNA, 25 bp, Artificial
  probe
  misc_feature (1)..(25): SEQ ID NO: 4935; WAN024GKJ; Start 61; Stop 85
ccatcaggtaaaataactccaacac

SEQ ID NO: 394834 - DNA, 25 bp, Artificial
  probe
  misc_feature (1)..(25): SEQ ID NO: 4935; WAN024GKJ; Start 85; Stop 109
cgaccattttctttcaaacgataca

SEQ ID NO: 394835 - DNA, 25 bp, Artificial
  probe
  misc_feature (1)..(25): SEQ ID NO: 4935; WAN024GKJ; Start 84; Stop 108
acgaccattttctttcaaacgatac

SEQ ID NO: 394836 - DNA, 25 bp, Artificial
  probe
  misc_feature (1)..(25): SEQ ID NO: 4936; WAN024C93; Start 392; Stop 416
gtgtatgatttgtgtgggaagattt

SEQ ID NO: 394837 - DNA, 25 bp, Artificial
  probe
  misc_feature (1)..(25): SEQ ID NO: 4936; WAN024C93; Start 191; Stop 215
atgccttctccttattctgcttcac

SEQ ID NO: 394838 - DNA, 25 bp, Artificial
  probe
  misc_feature (1)..(25): SEQ ID NO: 4936; WAN024C93; Start 391; Stop 415
agtgtatgatttgtgtgggaagatt

SEQ ID NO: 394839 - DNA, 25 bp, Artificial
  probe
  misc_feature (1)..(25): SEQ ID NO: 4936; WAN024C93; Start 384; Stop 408
ctttagcagtgtatgatttgtgtgg

SEQ ID NO: 394840 - DNA, 25 bp, Artificial
  probe
  misc_feature (1)..(25): SEQ ID NO: 4936; WAN024C93; Start 188; Stop 212
ttcatgccttctccttattctgctt

SEQ ID NO: 394841 - DNA, 25 bp, Artificial
  probe
  misc_feature (1)..(25): SEQ ID NO: 4936; WAN024C93; Start 390; Stop 414
cagtgtatgatttgtgtgggaagat

SEQ ID NO: 394842 - DNA, 25 bp, Artificial
  probe
  misc_feature (1)..(25): SEQ ID NO: 4936; WAN024C93; Start 80; Stop 104
tggaaacgaagttcaaacaattctt

SEQ ID NO: 394843 - DNA, 25 bp, Artificial
  probe
  misc_feature (1)..(25): SEQ ID NO: 4936; WAN024C93; Start 148; Stop 172
accacgaagttctttaacaaattct

SEQ ID NO: 394844 - DNA, 25 bp, Artificial
  probe
  misc_feature (1)..(25): SEQ ID NO: 4936; WAN024C93; Start 146; Stop 170
agaccacgaagttctttaacaaatt

SEQ ID NO: 394845 - DNA, 25 bp, Artificial
  probe
  misc_feature (1)..(25): SEQ ID NO: 4936; WAN024C93; Start 79; Stop 103
ttggaaacgaagttcaaacaattct

SEQ ID NO: 394846 - DNA, 25 bp, Artificial
  probe
  misc_feature (1)..(25): SEQ ID NO: 4936; WAN024C93; Start 78; Stop 102
cttggaaacgaagttcaaacaattc

SEQ ID NO: 394847 - DNA, 25 bp, Artificial
  probe
  misc_feature (1)..(25): SEQ ID NO: 4936; WAN024C93; Start 385; Stop 409
tttagcagtgtatgatttgtgtggg

SEQ ID NO: 394848 - DNA, 25 bp, Artificial
  probe
  misc_feature (1)..(25): SEQ ID NO: 4936; WAN024C93; Start 189; Stop 213
tcatgccttctccttattctgcttc

SEQ ID NO: 394849 - DNA, 25 bp, Artificial
  probe
  misc_feature (1)..(25): SEQ ID NO: 4936; WAN024C93; Start 147; Stop 171
gaccacgaagttctttaacaaattc

SEQ ID NO: 394850 - DNA, 25 bp, Artificial
  probe
  misc_feature (1)..(25): SEQ ID NO: 4936; WAN024C93; Start 81; Stop 105
ggaaacgaagttcaaacaattcttt

SEQ ID NO: 394851 - DNA, 25 bp, Artificial
  probe
  misc_feature (1)..(25): SEQ ID NO: 4936; WAN024C93; Start 383; Stop 407
gctttagcagtgtatgatttgtgtg

SEQ ID NO: 394852 - DNA, 25 bp, Artificial
  probe
  misc_feature (1)..(25): SEQ ID NO: 4936; WAN024C93; Start 230; Stop 254
catttaactggcaatttgtggctag

SEQ ID NO: 394853 - DNA, 25 bp, Artificial
  probe
  misc_feature (1)..(25): SEQ ID NO: 4936; WAN024C93; Start 190; Stop 214
catgccttctccttattctgcttca

SEQ ID NO: 394854 - DNA, 25 bp, Artificial
  probe
  misc_feature (1)..(25): SEQ ID NO: 4936; WAN024C93; Start 149; Stop 173
ccacgaagttctttaacaaattctt

SEQ ID NO: 394855 - DNA, 25 bp, Artificial
  probe
  misc_feature (1)..(25): SEQ ID NO: 4936; WAN024C93; Start 185; Stop 209
agtttcatgccttctccttattctg

SEQ ID NO: 394856 - DNA, 25 bp, Artificial
  probe
  misc_feature (1)..(25): SEQ ID NO: 4936; WAN024C93; Start 184; Stop 208
aagtttcatgccttctccttattct

SEQ ID NO: 394857 - DNA, 25 bp, Artificial
  probe
  misc_feature (1)..(25): SEQ ID NO: 4936; WAN024C93; Start 177; Stop 201
cttcattaagtttcatgccttctcc

SEQ ID NO: 394858 - DNA, 25 bp, Artificial
  probe
  misc_feature (1)..(25): SEQ ID NO: 4936; WAN024C93; Start 179; Stop 203
tcattaagtttcatgccttctcctt

SEQ ID NO: 394859 - DNA, 25 bp, Artificial
  probe
  misc_feature (1)..(25): SEQ ID NO: 4936; WAN024C93; Start 178; Stop 202
ttcattaagtttcatgccttctcct

SEQ ID NO: 394860 - DNA, 25 bp, Artificial
  probe
  misc_feature (1)..(25): SEQ ID NO: 4936; WAN024C93; Start 277; Stop 301
aatctcttcagatacaccagcgatt

SEQ ID NO: 394861 - DNA, 25 bp, Artificial
  probe
  misc_feature (1)..(25): SEQ ID NO: 4936; WAN024C93; Start 77; Stop 101
gcttggaaacgaagttcaaacaatt

SEQ ID NO: 394862 - DNA, 25 bp, Artificial
  probe
  misc_feature (1)..(25): SEQ ID NO: 4936; WAN024C93; Start 227; Stop 251
ttacatttaactggcaatttgtggc

SEQ ID NO: 394863 - DNA, 25 bp, Artificial
  probe
  misc_feature (1)..(25): SEQ ID NO: 4936; WAN024C93; Start 226; Stop 250
tttacatttaactggcaatttgtgg

SEQ ID NO: 394864 - DNA, 25 bp, Artificial
  probe
  misc_feature (1)..(25): SEQ ID NO: 4936; WAN024C93; Start 387; Stop 411
tagcagtgtatgatttgtgtgggaa

SEQ ID NO: 394865 - DNA, 25 bp, Artificial
  probe
  misc_feature (1)..(25): SEQ ID NO: 4936; WAN024C93; Start 386; Stop 410
ttagcagtgtatgatttgtgtggga

SEQ ID NO: 394866 - DNA, 25 bp, Artificial
  probe
  misc_feature (1)..(25): SEQ ID NO: 4936; WAN024C93; Start 219; Stop 243
ttacgaatttacatttaactggcaa

SEQ ID NO: 394867 - DNA, 25 bp, Artificial
  probe
  misc_feature (1)..(25): SEQ ID NO: 4936; WAN024C93; Start 218; Stop 242
tttacgaatttacatttaactggca

SEQ ID NO: 394868 - DNA, 25 bp, Artificial
  probe
  misc_feature (1)..(25): SEQ ID NO: 4936; WAN024C93; Start 229; Stop 253
acatttaactggcaatttgtggcta

SEQ ID NO: 394869 - DNA, 25 bp, Artificial
  probe
  misc_feature (1)..(25): SEQ ID NO: 4937; WAN024D8W; Start 48; Stop 72
gaatgaatctcttgacgacgcactt

SEQ ID NO: 394870 - DNA, 25 bp, Artificial
  probe
  misc_feature (1)..(25): SEQ ID NO: 4937; WAN024D8W; Start 164; Stop 188
gtaaatcagaagtagctcgtaaacg

SEQ ID NO: 394871 - DNA, 25 bp, Artificial
  probe
  misc_feature (1)..(25): SEQ ID NO: 4937; WAN024D8W; Start 163; Stop 187
cgtaaatcagaagtagctcgtaaac

SEQ ID NO: 394872 - DNA, 25 bp, Artificial
  probe
  misc_feature (1)..(25): SEQ ID NO: 4937; WAN024D8W; Start 49; Stop 73
aatgaatctcttgacgacgcacttc

SEQ ID NO: 394873 - DNA, 25 bp, Artificial
  probe
  misc_feature (1)..(25): SEQ ID NO: 4937; WAN024D8W; Start 90; Stop 114
ggttactaaagctggtactcttcaa

SEQ ID NO: 394874 - DNA, 25 bp, Artificial
  probe
  misc_feature (1)..(25): SEQ ID NO: 4937; WAN024D8W; Start 44; Stop 68
gtaagaatgaatctcttgacgacgc

SEQ ID NO: 394875 - DNA, 25 bp, Artificial
  probe
  misc_feature (1)..(25): SEQ ID NO: 4937; WAN024D8W; Start 96; Stop 120
taaagctggtactcttcaagaaaca

SEQ ID NO: 394876 - DNA, 25 bp, Artificial
  probe
  misc_feature (1)..(25): SEQ ID NO: 4937; WAN024D8W; Start 94; Stop 118
actaaagctggtactcttcaagaaa

SEQ ID NO: 394877 - DNA, 25 bp, Artificial
  probe
  misc_feature (1)..(25): SEQ ID NO: 4937; WAN024D8W; Start 95; Stop 119
ctaaagctggtactcttcaagaaac

SEQ ID NO: 394878 - DNA, 25 bp, Artificial
  probe
  misc_feature (1)..(25): SEQ ID NO: 4937; WAN024D8W; Start 91; Stop 115
gttactaaagctggtactcttcaag

SEQ ID NO: 394879 - DNA, 25 bp, Artificial
  probe
  misc_feature (1)..(25): SEQ ID NO: 4937; WAN024D8W; Start 45; Stop 69
taagaatgaatctcttgacgacgca

SEQ ID NO: 394880 - DNA, 25 bp, Artificial
  probe
  misc_feature (1)..(25): SEQ ID NO: 4937; WAN024D8W; Start 168; Stop 192
atcagaagtagctcgtaaacgtaaa

SEQ ID NO: 394881 - DNA, 25 bp, Artificial
  probe
  misc_feature (1)..(25): SEQ ID NO: 4937; WAN024D8W; Start 167; Stop 191
aatcagaagtagctcgtaaacgtaa

SEQ ID NO: 394882 - DNA, 25 bp, Artificial
  probe
  misc_feature (1)..(25): SEQ ID NO: 4937; WAN024D8W; Start 166; Stop 190
aaatcagaagtagctcgtaaacgta

SEQ ID NO: 394883 - DNA, 25 bp, Artificial
  probe
  misc_feature (1)..(25): SEQ ID NO: 4937; WAN024D8W; Start 165; Stop 189
taaatcagaagtagctcgtaaacgt

SEQ ID NO: 394884 - DNA, 25 bp, Artificial
  probe
  misc_feature (1)..(25): SEQ ID NO: 4937; WAN024D8W; Start 158; Stop 182
gtaaacgtaaatcagaagtagctcg

SEQ ID NO: 394885 - DNA, 25 bp, Artificial
  probe
  misc_feature (1)..(25): SEQ ID NO: 4937; WAN024D8W; Start 157; Stop 181
cgtaaacgtaaatcagaagtagctc

SEQ ID NO: 394886 - DNA, 25 bp, Artificial
  probe
  misc_feature (1)..(25): SEQ ID NO: 4937; WAN024D8W; Start 93; Stop 117
tactaaagctggtactcttcaagaa

SEQ ID NO: 394887 - DNA, 25 bp, Artificial
  probe
  misc_feature (1)..(25): SEQ ID NO: 4937; WAN024D8W; Start 92; Stop 116
ttactaaagctggtactcttcaaga

SEQ ID NO: 394888 - DNA, 25 bp, Artificial
  probe
  misc_feature (1)..(25): SEQ ID NO: 4937; WAN024D8W; Start 43; Stop 67
cgtaagaatgaatctcttgacgacg

SEQ ID NO: 394889 - DNA, 25 bp, Artificial
  probe
  misc_feature (1)..(25): SEQ ID NO: 4937; WAN024D8W; Start 97; Stop 121
aaagctggtactcttcaagaaacac

SEQ ID NO: 394890 - DNA, 25 bp, Artificial
  probe
  misc_feature (1)..(25): SEQ ID NO: 4937; WAN024D8W; Start 89; Stop 113
cggttactaaagctggtactcttca

SEQ ID NO: 394891 - DNA, 25 bp, Artificial
  probe
  misc_feature (1)..(25): SEQ ID NO: 4937; WAN024D8W; Start 42; Stop 66
acgtaagaatgaatctcttgacgac

SEQ ID NO: 394892 - DNA, 25 bp, Artificial
  probe
  misc_feature (1)..(25): SEQ ID NO: 4937; WAN024D8W; Start 103; Stop 127
ggtactcttcaagaaacacgcaaac

SEQ ID NO: 394893 - DNA, 25 bp, Artificial
  probe
  misc_feature (1)..(25): SEQ ID NO: 4937; WAN024D8W; Start 47; Stop 71
agaatgaatctcttgacgacgcact

SEQ ID NO: 394894 - DNA, 25 bp, Artificial
  probe
  misc_feature (1)..(25): SEQ ID NO: 4937; WAN024D8W; Start 34; Stop 58
acagtagtacgtaagaatgaatctc

SEQ ID NO: 394895 - DNA, 25 bp, Artificial
  probe
  misc_feature (1)..(25): SEQ ID NO: 4937; WAN024D8W; Start 104; Stop 128
gtactcttcaagaaacacgcaaacg

SEQ ID NO: 394896 - DNA, 25 bp, Artificial
  probe
  misc_feature (1)..(25): SEQ ID NO: 4937; WAN024D8W; Start 102; Stop 126
tggtactcttcaagaaacacgcaaa

SEQ ID NO: 394897 - DNA, 25 bp, Artificial
  probe
  misc_feature (1)..(25): SEQ ID NO: 4937; WAN024D8W; Start 35; Stop 59
cagtagtacgtaagaatgaatctct

SEQ ID NO: 394898 - DNA, 25 bp, Artificial
  probe
  misc_feature (1)..(25): SEQ ID NO: 4937; WAN024D8W; Start 33; Stop 57
aacagtagtacgtaagaatgaatct

SEQ ID NO: 394899 - DNA, 25 bp, Artificial
  probe
  misc_feature (1)..(25): SEQ ID NO: 4937; WAN024D8W; Start 101; Stop 125
ctggtactcttcaagaaacacgcaa

SEQ ID NO: 394900 - DNA, 25 bp, Artificial
  probe
  misc_feature (1)..(25): SEQ ID NO: 4937; WAN024D8W; Start 46; Stop 70
aagaatgaatctcttgacgacgcac

SEQ ID NO: 394901 - DNA, 25 bp, Artificial
  probe
  misc_feature (1)..(25): SEQ ID NO: 4937; WAN024D8W; Start 88; Stop 112
gcggttactaaagctggtactcttc

SEQ ID NO: 394902 - DNA, 25 bp, Artificial
  probe
  misc_feature (1)..(25): SEQ ID NO: 4938; WAN024G3M; Start 1198; Stop 1222
attgtcattcgtcttggctataact

SEQ ID NO: 394903 - DNA, 25 bp, Artificial
  probe
  misc_feature (1)..(25): SEQ ID NO: 4938; WAN024G3M; Start 1197; Stop 1221
cattgtcattcgtcttggctataac

SEQ ID NO: 394904 - DNA, 25 bp, Artificial
  probe
  misc_feature (1)..(25): SEQ ID NO: 4938; WAN024G3M; Start 1199; Stop 1223
ttgtcattcgtcttggctataactt

SEQ ID NO: 394905 - DNA, 25 bp, Artificial
  probe
  misc_feature (1)..(25): SEQ ID NO: 4938; WAN024G3M; Start 369; Stop 393
ctgttgttggattgttaatactggc

SEQ ID NO: 394906 - DNA, 25 bp, Artificial
  probe
  misc_feature (1)..(25): SEQ ID NO: 4938; WAN024G3M; Start 368; Stop 392
gctgttgttggattgttaatactgg

SEQ ID NO: 394907 - DNA, 25 bp, Artificial
  probe
  misc_feature (1)..(25): SEQ ID NO: 4938; WAN024G3M; Start 135; Stop 159
gccagcagtattattctcaagtatt

SEQ ID NO: 394908 - DNA, 25 bp, Artificial
  probe
  misc_feature (1)..(25): SEQ ID NO: 4938; WAN024G3M; Start 371; Stop 395
gttgttggattgttaatactggcag

SEQ ID NO: 394909 - DNA, 25 bp, Artificial
  probe
  misc_feature (1)..(25): SEQ ID NO: 4938; WAN024G3M; Start 370; Stop 394
tgttgttggattgttaatactggca

SEQ ID NO: 394910 - DNA, 25 bp, Artificial
  probe
  misc_feature (1)..(25): SEQ ID NO: 4938; WAN024G3M; Start 134; Stop 158
tgccagcagtattattctcaagtat

SEQ ID NO: 394911 - DNA, 25 bp, Artificial
  probe
  misc_feature (1)..(25): SEQ ID NO: 4938; WAN024G3M; Start 133; Stop 157
atgccagcagtattattctcaagta

SEQ ID NO: 394912 - DNA, 25 bp, Artificial
  probe
  misc_feature (1)..(25): SEQ ID NO: 4938; WAN024G3M; Start 132; Stop 156
tatgccagcagtattattctcaagt

SEQ ID NO: 394913 - DNA, 25 bp, Artificial
  probe
  misc_feature (1)..(25): SEQ ID NO: 4938; WAN024G3M; Start 130; Stop 154
agtatgccagcagtattattctcaa

SEQ ID NO: 394914 - DNA, 25 bp, Artificial
  probe
  misc_feature (1)..(25): SEQ ID NO: 4938; WAN024G3M; Start 131; Stop 155
gtatgccagcagtattattctcaag

SEQ ID NO: 394915 - DNA, 25 bp, Artificial
  probe
  misc_feature (1)..(25): SEQ ID NO: 4938; WAN024G3M; Start 129; Stop 153
cagtatgccagcagtattattctca

SEQ ID NO: 394916 - DNA, 25 bp, Artificial
  probe
  misc_feature (1)..(25): SEQ ID NO: 4938; WAN024G3M; Start 1477; Stop 1501
gaataaggcagcagcagaatacaat

SEQ ID NO: 394917 - DNA, 25 bp, Artificial
  probe
  misc_feature (1)..(25): SEQ ID NO: 4938; WAN024G3M; Start 126; Stop 150
ttccagtatgccagcagtattattc

SEQ ID NO: 394918 - DNA, 25 bp, Artificial
  probe
  misc_feature (1)..(25): SEQ ID NO: 4938; WAN024G3M; Start 511; Stop 535
tgtaaccattagacttcctgaagag

SEQ ID NO: 394919 - DNA, 25 bp, Artificial
  probe
  misc_feature (1)..(25): SEQ ID NO: 4938; WAN024G3M; Start 128; Stop 152
ccagtatgccagcagtattattctc

SEQ ID NO: 394920 - DNA, 25 bp, Artificial
  probe
  misc_feature (1)..(25): SEQ ID NO: 4938; WAN024G3M; Start 1063; Stop 1087
tgttactgctcctattatcaatgtt

SEQ ID NO: 394921 - DNA, 25 bp, Artificial
  probe
  misc_feature (1)..(25): SEQ ID NO: 4938; WAN024G3M; Start 127; Stop 151
tccagtatgccagcagtattattct

SEQ ID NO: 394922 - DNA, 25 bp, Artificial
  probe
  misc_feature (1)..(25): SEQ ID NO: 4938; WAN024G3M; Start 510; Stop 534
atgtaaccattagacttcctgaaga

SEQ ID NO: 394923 - DNA, 25 bp, Artificial
  probe
  misc_feature (1)..(25): SEQ ID NO: 4938; WAN024G3M; Start 372; Stop 396
ttgttggattgttaatactggcagc

SEQ ID NO: 394924 - DNA, 25 bp, Artificial
  probe
  misc_feature (1)..(25): SEQ ID NO: 4938; WAN024G3M; Start 432; Stop 456
taggtactagaggattacttactgc

SEQ ID NO: 394925 - DNA, 25 bp, Artificial
  probe
  misc_feature (1)..(25): SEQ ID NO: 4938; WAN024G3M; Start 1062; Stop 1086
ttgttactgctcctattatcaatgt

SEQ ID NO: 394926 - DNA, 25 bp, Artificial
  probe
  misc_feature (1)..(25): SEQ ID NO: 4938; WAN024G3M; Start 367; Stop 391
agctgttgttggattgttaatactg

SEQ ID NO: 394927 - DNA, 25 bp, Artificial
  probe
  misc_feature (1)..(25): SEQ ID NO: 4938; WAN024G3M; Start 512; Stop 536
gtaaccattagacttcctgaagagg

SEQ ID NO: 394928 - DNA, 25 bp, Artificial
  probe
  misc_feature (1)..(25): SEQ ID NO: 4938; WAN024G3M; Start 1476; Stop 1500
tgaataaggcagcagcagaatacaa

SEQ ID NO: 394929 - DNA, 25 bp, Artificial
  probe
  misc_feature (1)..(25): SEQ ID NO: 4938; WAN024G3M; Start 1475; Stop 1499
ttgaataaggcagcagcagaataca

SEQ ID NO: 394930 - DNA, 25 bp, Artificial
  probe
  misc_feature (1)..(25): SEQ ID NO: 4938; WAN024G3M; Start 433; Stop 457
aggtactagaggattacttactgca

SEQ ID NO: 394931 - DNA, 25 bp, Artificial
  probe
  misc_feature (1)..(25): SEQ ID NO: 4938; WAN024G3M; Start 1283; Stop 1307
ttagaagaagaacggaaaggaaact

SEQ ID NO: 394932 - DNA, 25 bp, Artificial
  probe
  misc_feature (1)..(25): SEQ ID NO: 4938; WAN024G3M; Start 1056; Stop 1080
ttccgtttgttactgctcctattat

SEQ ID NO: 394933 - DNA, 25 bp, Artificial
  probe
  misc_feature (1)..(25): SEQ ID NO: 4938; WAN024G3M; Start 1055; Stop 1079
attccgtttgttactgctcctatta

SEQ ID NO: 394934 - DNA, 25 bp, Artificial
  probe
  misc_feature (1)..(25): SEQ ID NO: 4938; WAN024G3M; Start 1054; Stop 1078
tattccgtttgttactgctcctatt

SEQ ID NO: 394935 - DNA, 25 bp, Artificial
  probe
  misc_feature (1)..(25): SEQ ID NO: 4939; WAN024EW4; Start 119; Stop 143
ttcgagtaggtctatcagttagcaa

SEQ ID NO: 394936 - DNA, 25 bp, Artificial
  probe
  misc_feature (1)..(25): SEQ ID NO: 4939; WAN024EW4; Start 161; Stop 185
tcactagaaatcaaattaagcgacg

SEQ ID NO: 394937 - DNA, 25 bp, Artificial
  probe
  misc_feature (1)..(25): SEQ ID NO: 4939; WAN024EW4; Start 159; Stop 183
cgtcactagaaatcaaattaagcga

SEQ ID NO: 394938 - DNA, 25 bp, Artificial
  probe
  misc_feature (1)..(25): SEQ ID NO: 4939; WAN024EW4; Start 153; Stop 177
gaatgccgtcactagaaatcaaatt

SEQ ID NO: 394939 - DNA, 25 bp, Artificial
  probe
  misc_feature (1)..(25): SEQ ID NO: 4939; WAN024EW4; Start 156; Stop 180
tgccgtcactagaaatcaaattaag

SEQ ID NO: 394940 - DNA, 25 bp, Artificial
  probe
  misc_feature (1)..(25): SEQ ID NO: 4939; WAN024EW4; Start 163; Stop 187
actagaaatcaaattaagcgacgga

SEQ ID NO: 394941 - DNA, 25 bp, Artificial
  probe
  misc_feature (1)..(25): SEQ ID NO: 4939; WAN024EW4; Start 162; Stop 186
cactagaaatcaaattaagcgacgg

SEQ ID NO: 394942 - DNA, 25 bp, Artificial
  probe
  misc_feature (1)..(25): SEQ ID NO: 4939; WAN024EW4; Start 158; Stop 182
ccgtcactagaaatcaaattaagcg

SEQ ID NO: 394943 - DNA, 25 bp, Artificial
  probe
  misc_feature (1)..(25): SEQ ID NO: 4939; WAN024EW4; Start 164; Stop 188
ctagaaatcaaattaagcgacggat

SEQ ID NO: 394944 - DNA, 25 bp, Artificial
  probe
  misc_feature (1)..(25): SEQ ID NO: 4939; WAN024EW4; Start 157; Stop 181
gccgtcactagaaatcaaattaagc

SEQ ID NO: 394945 - DNA, 25 bp, Artificial
  probe
  misc_feature (1)..(25): SEQ ID NO: 4939; WAN024EW4; Start 155; Stop 179
atgccgtcactagaaatcaaattaa

SEQ ID NO: 394946 - DNA, 25 bp, Artificial
  probe
  misc_feature (1)..(25): SEQ ID NO: 4939; WAN024EW4; Start 154; Stop 178
aatgccgtcactagaaatcaaatta

SEQ ID NO: 394947 - DNA, 25 bp, Artificial
  probe
  misc_feature (1)..(25): SEQ ID NO: 4939; WAN024EW4; Start 152; Stop 176
ggaatgccgtcactagaaatcaaat

SEQ ID NO: 394948 - DNA, 25 bp, Artificial
  probe
  misc_feature (1)..(25): SEQ ID NO: 4939; WAN024EW4; Start 166; Stop 190
agaaatcaaattaagcgacggattc

SEQ ID NO: 394949 - DNA, 25 bp, Artificial
  probe
  misc_feature (1)..(25): SEQ ID NO: 4939; WAN024EW4; Start 160; Stop 184
gtcactagaaatcaaattaagcgac

SEQ ID NO: 394950 - DNA, 25 bp, Artificial
  probe
  misc_feature (1)..(25): SEQ ID NO: 4939; WAN024EW4; Start 120; Stop 144
tcgagtaggtctatcagttagcaaa

SEQ ID NO: 394951 - DNA, 25 bp, Artificial
  probe
  misc_feature (1)..(25): SEQ ID NO: 4939; WAN024EW4; Start 118; Stop 142
tttcgagtaggtctatcagttagca

SEQ ID NO: 394952 - DNA, 25 bp, Artificial
  probe
  misc_feature (1)..(25): SEQ ID NO: 4939; WAN024EW4; Start 165; Stop 189
tagaaatcaaattaagcgacggatt

SEQ ID NO: 394953 - DNA, 25 bp, Artificial
  probe
  misc_feature (1)..(25): SEQ ID NO: 4939; WAN024EW4; Start 176; Stop 200
ttaagcgacggattcggcatattat

SEQ ID NO: 394954 - DNA, 25 bp, Artificial
  probe
  misc_feature (1)..(25): SEQ ID NO: 4939; WAN024EW4; Start 175; Stop 199
attaagcgacggattcggcatatta

SEQ ID NO: 394955 - DNA, 25 bp, Artificial
  probe
  misc_feature (1)..(25): SEQ ID NO: 4939; WAN024EW4; Start 177; Stop 201
taagcgacggattcggcatattatc

SEQ ID NO: 394956 - DNA, 25 bp, Artificial
  probe
  misc_feature (1)..(25): SEQ ID NO: 4939; WAN024EW4; Start 121; Stop 145
cgagtaggtctatcagttagcaaaa

SEQ ID NO: 394957 - DNA, 25 bp, Artificial
  probe
  misc_feature (1)..(25): SEQ ID NO: 4939; WAN024EW4; Start 33; Stop 57
agattttaaggcgattttcaaggag

SEQ ID NO: 394958 - DNA, 25 bp, Artificial
  probe
  misc_feature (1)..(25): SEQ ID NO: 4939; WAN024EW4; Start 32; Stop 56
aagattttaaggcgattttcaagga

SEQ ID NO: 394959 - DNA, 25 bp, Artificial
  probe
  misc_feature (1)..(25): SEQ ID NO: 4939; WAN024EW4; Start 34; Stop 58
gattttaaggcgattttcaaggagg

SEQ ID NO: 394960 - DNA, 25 bp, Artificial
  probe
  misc_feature (1)..(25): SEQ ID NO: 4939; WAN024EW4; Start 184; Stop 208
cggattcggcatattatccagaatg

SEQ ID NO: 394961 - DNA, 25 bp, Artificial
  probe
  misc_feature (1)..(25): SEQ ID NO: 4939; WAN024EW4; Start 167; Stop 191
gaaatcaaattaagcgacggattcg

SEQ ID NO: 394962 - DNA, 25 bp, Artificial
  probe
  misc_feature (1)..(25): SEQ ID NO: 4939; WAN024EW4; Start 151; Stop 175
gggaatgccgtcactagaaatcaaa

SEQ ID NO: 394963 - DNA, 25 bp, Artificial
  probe
  misc_feature (1)..(25): SEQ ID NO: 4939; WAN024EW4; Start 317; Stop 341
tatcaaagatttaccgggaaggaaa

SEQ ID NO: 394964 - DNA, 25 bp, Artificial
  probe
  misc_feature (1)..(25): SEQ ID NO: 4939; WAN024EW4; Start 316; Stop 340
ttatcaaagatttaccgggaaggaa

SEQ ID NO: 394965 - DNA, 25 bp, Artificial
  probe
  misc_feature (1)..(25): SEQ ID NO: 4939; WAN024EW4; Start 174; Stop 198
aattaagcgacggattcggcatatt

SEQ ID NO: 394966 - DNA, 25 bp, Artificial
  probe
  misc_feature (1)..(25): SEQ ID NO: 4939; WAN024EW4; Start 315; Stop 339
attatcaaagatttaccgggaagga

SEQ ID NO: 394967 - DNA, 25 bp, Artificial
  probe
  misc_feature (1)..(25): SEQ ID NO: 4939; WAN024EW4; Start 31; Stop 55
aaagattttaaggcgattttcaagg

SEQ ID NO: 394968 - DNA, 25 bp, Artificial
  probe
  misc_feature (1)..(25): SEQ ID NO: 4940; WAN024CWO; Start 161; Stop 185
aatacatgagcaggaaggataacaa

SEQ ID NO: 394969 - DNA, 25 bp, Artificial
  probe
  misc_feature (1)..(25): SEQ ID NO: 4940; WAN024CWO; Start 61; Stop 85
aatttccttgattcccataccgatg

SEQ ID NO: 394970 - DNA, 25 bp, Artificial
  probe
  misc_feature (1)..(25): SEQ ID NO: 4940; WAN024CWO; Start 64; Stop 88
ttccttgattcccataccgatgtta

SEQ ID NO: 394971 - DNA, 25 bp, Artificial
  probe
  misc_feature (1)..(25): SEQ ID NO: 4940; WAN024CWO; Start 60; Stop 84
caatttccttgattcccataccgat

SEQ ID NO: 394972 - DNA, 25 bp, Artificial
  probe
  misc_feature (1)..(25): SEQ ID NO: 4940; WAN024CWO; Start 162; Stop 186
atacatgagcaggaaggataacaaa

SEQ ID NO: 394973 - DNA, 25 bp, Artificial
  probe
  misc_feature (1)..(25): SEQ ID NO: 4940; WAN024CWO; Start 160; Stop 184
aaatacatgagcaggaaggataaca

SEQ ID NO: 394974 - DNA, 25 bp, Artificial
  probe
  misc_feature (1)..(25): SEQ ID NO: 4940; WAN024CWO; Start 146; Stop 170
cgttgctgagtcttaaatacatgag

SEQ ID NO: 394975 - DNA, 25 bp, Artificial
  probe
  misc_feature (1)..(25): SEQ ID NO: 4940; WAN024CWO; Start 152; Stop 176
tgagtcttaaatacatgagcaggaa

SEQ ID NO: 394976 - DNA, 25 bp, Artificial
  probe
  misc_feature (1)..(25): SEQ ID NO: 4940; WAN024CWO; Start 163; Stop 187
tacatgagcaggaaggataacaaag

SEQ ID NO: 394977 - DNA, 25 bp, Artificial
  probe
  misc_feature (1)..(25): SEQ ID NO: 4940; WAN024CWO; Start 155; Stop 179
gtcttaaatacatgagcaggaagga

SEQ ID NO: 394978 - DNA, 25 bp, Artificial
  probe
  misc_feature (1)..(25): SEQ ID NO: 4940; WAN024CWO; Start 154; Stop 178
agtcttaaatacatgagcaggaagg

SEQ ID NO: 394979 - DNA, 25 bp, Artificial
  probe
  misc_feature (1)..(25): SEQ ID NO: 4940; WAN024CWO; Start 156; Stop 180
tcttaaatacatgagcaggaaggat

SEQ ID NO: 394980 - DNA, 25 bp, Artificial
  probe
  misc_feature (1)..(25): SEQ ID NO: 4940; WAN024CWO; Start 153; Stop 177
gagtcttaaatacatgagcaggaag

SEQ ID NO: 394981 - DNA, 25 bp, Artificial
  probe
  misc_feature (1)..(25): SEQ ID NO: 4940; WAN024CWO; Start 62; Stop 86
atttccttgattcccataccgatgt

SEQ ID NO: 394982 - DNA, 25 bp, Artificial
  probe
  misc_feature (1)..(25): SEQ ID NO: 4940; WAN024CWO; Start 65; Stop 89
tccttgattcccataccgatgttac

SEQ ID NO: 394983 - DNA, 25 bp, Artificial
  probe
  misc_feature (1)..(25): SEQ ID NO: 4940; WAN024CWO; Start 63; Stop 87
tttccttgattcccataccgatgtt

SEQ ID NO: 394984 - DNA, 25 bp, Artificial
  probe
  misc_feature (1)..(25): SEQ ID NO: 4940; WAN024CWO; Start 189; Stop 213
tatcaaagctcatatctcctccaag

SEQ ID NO: 394985 - DNA, 25 bp, Artificial
  probe
  misc_feature (1)..(25): SEQ ID NO: 4940; WAN024CWO; Start 188; Stop 212
ctatcaaagctcatatctcctccaa

SEQ ID NO: 394986 - DNA, 25 bp, Artificial
  probe
  misc_feature (1)..(25): SEQ ID NO: 4940; WAN024CWO; Start 159; Stop 183
taaatacatgagcaggaaggataac

SEQ ID NO: 394987 - DNA, 25 bp, Artificial
  probe
  misc_feature (1)..(25): SEQ ID NO: 4940; WAN024CWO; Start 145; Stop 169
gcgttgctgagtcttaaatacatga

SEQ ID NO: 394988 - DNA, 25 bp, Artificial
  probe
  misc_feature (1)..(25): SEQ ID NO: 4940; WAN024CWO; Start 151; Stop 175
ctgagtcttaaatacatgagcagga

SEQ ID NO: 394989 - DNA, 25 bp, Artificial
  probe
  misc_feature (1)..(25): SEQ ID NO: 4940; WAN024CWO; Start 157; Stop 181
cttaaatacatgagcaggaaggata

SEQ ID NO: 394990 - DNA, 25 bp, Artificial
  probe
  misc_feature (1)..(25): SEQ ID NO: 4940; WAN024CWO; Start 158; Stop 182
ttaaatacatgagcaggaaggataa

SEQ ID NO: 394991 - DNA, 25 bp, Artificial
  probe
  misc_feature (1)..(25): SEQ ID NO: 4940; WAN024CWO; Start 171; Stop 195
caggaaggataacaaagctatcaaa

SEQ ID NO: 394992 - DNA, 25 bp, Artificial
  probe
  misc_feature (1)..(25): SEQ ID NO: 4940; WAN024CWO; Start 170; Stop 194
gcaggaaggataacaaagctatcaa

SEQ ID NO: 394993 - DNA, 25 bp, Artificial
  probe
  misc_feature (1)..(25): SEQ ID NO: 4940; WAN024CWO; Start 172; Stop 196
aggaaggataacaaagctatcaaag

SEQ ID NO: 394994 - DNA, 25 bp, Artificial
  probe
  misc_feature (1)..(25): SEQ ID NO: 4940; WAN024CWO; Start 66; Stop 90
ccttgattcccataccgatgttacg

SEQ ID NO: 394995 - DNA, 25 bp, Artificial
  probe
  misc_feature (1)..(25): SEQ ID NO: 4940; WAN024CWO; Start 143; Stop 167
aagcgttgctgagtcttaaatacat

SEQ ID NO: 394996 - DNA, 25 bp, Artificial
  probe
  misc_feature (1)..(25): SEQ ID NO: 4940; WAN024CWO; Start 147; Stop 171
gttgctgagtcttaaatacatgagc

SEQ ID NO: 394997 - DNA, 25 bp, Artificial
  probe
  misc_feature (1)..(25): SEQ ID NO: 4940; WAN024CWO; Start 59; Stop 83
gcaatttccttgattcccataccga

SEQ ID NO: 394998 - DNA, 25 bp, Artificial
  probe
  misc_feature (1)..(25): SEQ ID NO: 4940; WAN024CWO; Start 142; Stop 166
caagcgttgctgagtcttaaataca

SEQ ID NO: 394999 - DNA, 25 bp, Artificial
  probe
  misc_feature (1)..(25): SEQ ID NO: 4940; WAN024CWO; Start 57; Stop 81
ctgcaatttccttgattcccatacc

SEQ ID NO: 395000 - DNA, 25 bp, Artificial
  probe
  misc_feature (1)..(25): SEQ ID NO: 4940; WAN024CWO; Start 190; Stop 214
atcaaagctcatatctcctccaagg

SEQ ID NO: 395001 - DNA, 25 bp, Artificial
  probe
  misc_feature (1)..(25): SEQ ID NO: 4941; WAN024DSW; Start 20; Stop 44
ctttatggaggagtgatacagtctg

SEQ ID NO: 395002 - DNA, 25 bp, Artificial
  probe
  misc_feature (1)..(25): SEQ ID NO: 4941; WAN024DSW; Start 21; Stop 45
tttatggaggagtgatacagtctgg

SEQ ID NO: 395003 - DNA, 25 bp, Artificial
  probe
  misc_feature (1)..(25): SEQ ID NO: 4941; WAN024DSW; Start 19; Stop 43
gctttatggaggagtgatacagtct

SEQ ID NO: 395004 - DNA, 25 bp, Artificial
  probe
  misc_feature (1)..(25): SEQ ID NO: 4941; WAN024DSW; Start 14; Stop 38
caacagctttatggaggagtgatac

SEQ ID NO: 395005 - DNA, 25 bp, Artificial
  probe
  misc_feature (1)..(25): SEQ ID NO: 4941; WAN024DSW; Start 122; Stop 146
aaataagagagaactggtaagtcca

SEQ ID NO: 395006 - DNA, 25 bp, Artificial
  probe
  misc_feature (1)..(25): SEQ ID NO: 4941; WAN024DSW; Start 15; Stop 39
aacagctttatggaggagtgataca

SEQ ID NO: 395007 - DNA, 25 bp, Artificial
  probe
  misc_feature (1)..(25): SEQ ID NO: 4941; WAN024DSW; Start 18; Stop 42
agctttatggaggagtgatacagtc

SEQ ID NO: 395008 - DNA, 25 bp, Artificial
  probe
  misc_feature (1)..(25): SEQ ID NO: 4941; WAN024DSW; Start 121; Stop 145
taaataagagagaactggtaagtcc

SEQ ID NO: 395009 - DNA, 25 bp, Artificial
  probe
  misc_feature (1)..(25): SEQ ID NO: 4941; WAN024DSW; Start 22; Stop 46
ttatggaggagtgatacagtctggg

SEQ ID NO: 395010 - DNA, 25 bp, Artificial
  probe
  misc_feature (1)..(25): SEQ ID NO: 4941; WAN024DSW; Start 13; Stop 37
tcaacagctttatggaggagtgata

SEQ ID NO: 395011 - DNA, 25 bp, Artificial
  probe
  misc_feature (1)..(25): SEQ ID NO: 4941; WAN024DSW; Start 17; Stop 41
cagctttatggaggagtgatacagt

SEQ ID NO: 395012 - DNA, 25 bp, Artificial
  probe
  misc_feature (1)..(25): SEQ ID NO: 4941; WAN024DSW; Start 16; Stop 40
acagctttatggaggagtgatacag

SEQ ID NO: 395013 - DNA, 25 bp, Artificial
  probe
  misc_feature (1)..(25): SEQ ID NO: 4941; WAN024DSW; Start 12; Stop 36
ttcaacagctttatggaggagtgat

SEQ ID NO: 395014 - DNA, 25 bp, Artificial
  probe
  misc_feature (1)..(25): SEQ ID NO: 4941; WAN024DSW; Start 10; Stop 34
tcttcaacagctttatggaggagtg

SEQ ID NO: 395015 - DNA, 25 bp, Artificial
  probe
  misc_feature (1)..(25): SEQ ID NO: 4941; WAN024DSW; Start 9; Stop 33
gtcttcaacagctttatggaggagt

SEQ ID NO: 395016 - DNA, 25 bp, Artificial
  probe
  misc_feature (1)..(25): SEQ ID NO: 4941; WAN024DSW; Start 23; Stop 47
tatggaggagtgatacagtctggga

SEQ ID NO: 395017 - DNA, 25 bp, Artificial
  probe
  misc_feature (1)..(25): SEQ ID NO: 4941; WAN024DSW; Start 11; Stop 35
cttcaacagctttatggaggagtga

SEQ ID NO: 395018 - DNA, 25 bp, Artificial
  probe
  misc_feature (1)..(25): SEQ ID NO: 4941; WAN024DSW; Start 120; Stop 144
ttaaataagagagaactggtaagtc

SEQ ID NO: 395019 - DNA, 25 bp, Artificial
  probe
  misc_feature (1)..(25): SEQ ID NO: 4941; WAN024DSW; Start 24; Stop 48
atggaggagtgatacagtctgggag

SEQ ID NO: 395020 - DNA, 25 bp, Artificial
  probe
  misc_feature (1)..(25): SEQ ID NO: 4941; WAN024DSW; Start 123; Stop 147
aataagagagaactggtaagtccag

SEQ ID NO: 395021 - DNA, 25 bp, Artificial
  probe
  misc_feature (1)..(25): SEQ ID NO: 4941; WAN024DSW; Start 119; Stop 143
tttaaataagagagaactggtaagt

SEQ ID NO: 395022 - DNA, 25 bp, Artificial
  probe
  misc_feature (1)..(25): SEQ ID NO: 4942; WAN024G7P; Start 35; Stop 59
ttaagaagttaccaccgtcctctag

SEQ ID NO: 395023 - DNA, 25 bp, Artificial
  probe
  misc_feature (1)..(25): SEQ ID NO: 4942; WAN024G7P; Start 109; Stop 133
gcttgtgatacgatgctttgtttaa

SEQ ID NO: 395024 - DNA, 25 bp, Artificial
  probe
  misc_feature (1)..(25): SEQ ID NO: 4942; WAN024G7P; Start 111; Stop 135
ttgtgatacgatgctttgtttaagg

SEQ ID NO: 395025 - DNA, 25 bp, Artificial
  probe
  misc_feature (1)..(25): SEQ ID NO: 4942; WAN024G7P; Start 115; Stop 139
gatacgatgctttgtttaaggtcat

SEQ ID NO: 395026 - DNA, 25 bp, Artificial
  probe
  misc_feature (1)..(25): SEQ ID NO: 4942; WAN024G7P; Start 118; Stop 142
acgatgctttgtttaaggtcattta

SEQ ID NO: 395027 - DNA, 25 bp, Artificial
  probe
  misc_feature (1)..(25): SEQ ID NO: 4942; WAN024G7P; Start 117; Stop 141
tacgatgctttgtttaaggtcattt

SEQ ID NO: 395028 - DNA, 25 bp, Artificial
  probe
  misc_feature (1)..(25): SEQ ID NO: 4942; WAN024G7P; Start 113; Stop 137
gtgatacgatgctttgtttaaggtc

SEQ ID NO: 395029 - DNA, 25 bp, Artificial
  probe
  misc_feature (1)..(25): SEQ ID NO: 4942; WAN024G7P; Start 116; Stop 140
atacgatgctttgtttaaggtcatt

SEQ ID NO: 395030 - DNA, 25 bp, Artificial
  probe
  misc_feature (1)..(25): SEQ ID NO: 4942; WAN024G7P; Start 110; Stop 134
cttgtgatacgatgctttgtttaag

SEQ ID NO: 395031 - DNA, 25 bp, Artificial
  probe
  misc_feature (1)..(25): SEQ ID NO: 4942; WAN024G7P; Start 112; Stop 136
tgtgatacgatgctttgtttaaggt

SEQ ID NO: 395032 - DNA, 25 bp, Artificial
  probe
  misc_feature (1)..(25): SEQ ID NO: 4942; WAN024G7P; Start 206; Stop 230
tgatgatattgatctggtttcctgt

SEQ ID NO: 395033 - DNA, 25 bp, Artificial
  probe
  misc_feature (1)..(25): SEQ ID NO: 4942; WAN024G7P; Start 114; Stop 138
tgatacgatgctttgtttaaggtca

SEQ ID NO: 395034 - DNA, 25 bp, Artificial
  probe
  misc_feature (1)..(25): SEQ ID NO: 4942; WAN024G7P; Start 207; Stop 231
gatgatattgatctggtttcctgtt

SEQ ID NO: 395035 - DNA, 25 bp, Artificial
  probe
  misc_feature (1)..(25): SEQ ID NO: 4942; WAN024G7P; Start 212; Stop 236
tattgatctggtttcctgttatgac

SEQ ID NO: 395036 - DNA, 25 bp, Artificial
  probe
  misc_feature (1)..(25): SEQ ID NO: 4942; WAN024G7P; Start 205; Stop 229
atgatgatattgatctggtttcctg

SEQ ID NO: 395037 - DNA, 25 bp, Artificial
  probe
  misc_feature (1)..(25): SEQ ID NO: 4942; WAN024G7P; Start 203; Stop 227
tgatgatgatattgatctggtttcc

SEQ ID NO: 395038 - DNA, 25 bp, Artificial
  probe
  misc_feature (1)..(25): SEQ ID NO: 4942; WAN024G7P; Start 34; Stop 58
cttaagaagttaccaccgtcctcta

SEQ ID NO: 395039 - DNA, 25 bp, Artificial
  probe
  misc_feature (1)..(25): SEQ ID NO: 4942; WAN024G7P; Start 204; Stop 228
gatgatgatattgatctggtttcct

SEQ ID NO: 395040 - DNA, 25 bp, Artificial
  probe
  misc_feature (1)..(25): SEQ ID NO: 4942; WAN024G7P; Start 36; Stop 60
taagaagttaccaccgtcctctagc

SEQ ID NO: 395041 - DNA, 25 bp, Artificial
  probe
  misc_feature (1)..(25): SEQ ID NO: 4942; WAN024G7P; Start 200; Stop 224
aattgatgatgatattgatctggtt

SEQ ID NO: 395042 - DNA, 25 bp, Artificial
  probe
  misc_feature (1)..(25): SEQ ID NO: 4942; WAN024G7P; Start 155; Stop 179
aatctgcattgctgaggatatcact

SEQ ID NO: 395043 - DNA, 25 bp, Artificial
  probe
  misc_feature (1)..(25): SEQ ID NO: 4942; WAN024G7P; Start 211; Stop 235
atattgatctggtttcctgttatga

SEQ ID NO: 395044 - DNA, 25 bp, Artificial
  probe
  misc_feature (1)..(25): SEQ ID NO: 4942; WAN024G7P; Start 209; Stop 233
tgatattgatctggtttcctgttat

SEQ ID NO: 395045 - DNA, 25 bp, Artificial
  probe
  misc_feature (1)..(25): SEQ ID NO: 4942; WAN024G7P; Start 208; Stop 232
atgatattgatctggtttcctgtta

SEQ ID NO: 395046 - DNA, 25 bp, Artificial
  probe
  misc_feature (1)..(25): SEQ ID NO: 4942; WAN024G7P; Start 213; Stop 237
attgatctggtttcctgttatgacc

SEQ ID NO: 395047 - DNA, 25 bp, Artificial
  probe
  misc_feature (1)..(25): SEQ ID NO: 4942; WAN024G7P; Start 210; Stop 234
gatattgatctggtttcctgttatg

SEQ ID NO: 395048 - DNA, 25 bp, Artificial
  probe
  misc_feature (1)..(25): SEQ ID NO: 4942; WAN024G7P; Start 156; Stop 180
atctgcattgctgaggatatcactc

SEQ ID NO: 395049 - DNA, 25 bp, Artificial
  probe
  misc_feature (1)..(25): SEQ ID NO: 4942; WAN024G7P; Start 158; Stop 182
ctgcattgctgaggatatcactctt

SEQ ID NO: 395050 - DNA, 25 bp, Artificial
  probe
  misc_feature (1)..(25): SEQ ID NO: 4942; WAN024G7P; Start 151; Stop 175
gtgaaatctgcattgctgaggatat

SEQ ID NO: 395051 - DNA, 25 bp, Artificial
  probe
  misc_feature (1)..(25): SEQ ID NO: 4942; WAN024G7P; Start 152; Stop 176
tgaaatctgcattgctgaggatatc

SEQ ID NO: 395052 - DNA, 25 bp, Artificial
  probe
  misc_feature (1)..(25): SEQ ID NO: 4942; WAN024G7P; Start 214; Stop 238
ttgatctggtttcctgttatgacct

SEQ ID NO: 395053 - DNA, 25 bp, Artificial
  probe
  misc_feature (1)..(25): SEQ ID NO: 4942; WAN024G7P; Start 202; Stop 226
ttgatgatgatattgatctggtttc

SEQ ID NO: 395054 - DNA, 25 bp, Artificial
  probe
  misc_feature (1)..(25): SEQ ID NO: 4942; WAN024G7P; Start 147; Stop 171
tttagtgaaatctgcattgctgagg

SEQ ID NO: 395055 - DNA, 25 bp, Artificial
  probe
  misc_feature (1)..(25): SEQ ID NO: 4943; WAN024FAK; Start 201; Stop 225
catgaagaggagcttaaagttgttt

SEQ ID NO: 395056 - DNA, 25 bp, Artificial
  probe
  misc_feature (1)..(25): SEQ ID NO: 4943; WAN024FAK; Start 21; Stop 45
caaagccactgtcaaaccagataaa

SEQ ID NO: 395057 - DNA, 25 bp, Artificial
  probe
  misc_feature (1)..(25): SEQ ID NO: 4943; WAN024FAK; Start 200; Stop 224
ccatgaagaggagcttaaagttgtt

SEQ ID NO: 395058 - DNA, 25 bp, Artificial
  probe
  misc_feature (1)..(25): SEQ ID NO: 4943; WAN024FAK; Start 202; Stop 226
atgaagaggagcttaaagttgttta

SEQ ID NO: 395059 - DNA, 25 bp, Artificial
  probe
  misc_feature (1)..(25): SEQ ID NO: 4943; WAN024FAK; Start 19; Stop 43
atcaaagccactgtcaaaccagata

SEQ ID NO: 395060 - DNA, 25 bp, Artificial
  probe
  misc_feature (1)..(25): SEQ ID NO: 4943; WAN024FAK; Start 197; Stop 221
gatccatgaagaggagcttaaagtt

SEQ ID NO: 395061 - DNA, 25 bp, Artificial
  probe
  misc_feature (1)..(25): SEQ ID NO: 4943; WAN024FAK; Start 20; Stop 44
tcaaagccactgtcaaaccagataa

SEQ ID NO: 395062 - DNA, 25 bp, Artificial
  probe
  misc_feature (1)..(25): SEQ ID NO: 4943; WAN024FAK; Start 198; Stop 222
atccatgaagaggagcttaaagttg

SEQ ID NO: 395063 - DNA, 25 bp, Artificial
  probe
  misc_feature (1)..(25): SEQ ID NO: 4943; WAN024FAK; Start 1; Stop 25
ttgaagacttgcttgaagatcaaag

SEQ ID NO: 395064 - DNA, 25 bp, Artificial
  probe
  misc_feature (1)..(25): SEQ ID NO: 4943; WAN024FAK; Start 199; Stop 223
tccatgaagaggagcttaaagttgt

SEQ ID NO: 395065 - DNA, 25 bp, Artificial
  probe
  misc_feature (1)..(25): SEQ ID NO: 4943; WAN024FAK; Start 15; Stop 39
gaagatcaaagccactgtcaaacca

SEQ ID NO: 395066 - DNA, 25 bp, Artificial
  probe
  misc_feature (1)..(25): SEQ ID NO: 4943; WAN024FAK; Start 12; Stop 36
cttgaagatcaaagccactgtcaaa

SEQ ID NO: 395067 - DNA, 25 bp, Artificial
  probe
  misc_feature (1)..(25): SEQ ID NO: 4943; WAN024FAK; Start 203; Stop 227
tgaagaggagcttaaagttgtttaa

SEQ ID NO: 395068 - DNA, 25 bp, Artificial
  probe
  misc_feature (1)..(25): SEQ ID NO: 4943; WAN024FAK; Start 22; Stop 46
aaagccactgtcaaaccagataaaa

SEQ ID NO: 395069 - DNA, 25 bp, Artificial
  probe
  misc_feature (1)..(25): SEQ ID NO: 4943; WAN024FAK; Start 14; Stop 38
tgaagatcaaagccactgtcaaacc

SEQ ID NO: 395070 - DNA, 25 bp, Artificial
  probe
  misc_feature (1)..(25): SEQ ID NO: 4943; WAN024FAK; Start 13; Stop 37
ttgaagatcaaagccactgtcaaac

SEQ ID NO: 395071 - DNA, 25 bp, Artificial
  probe
  misc_feature (1)..(25): SEQ ID NO: 4943; WAN024FAK; Start 18; Stop 42
gatcaaagccactgtcaaaccagat

SEQ ID NO: 395072 - DNA, 25 bp, Artificial
  probe
  misc_feature (1)..(25): SEQ ID NO: 4943; WAN024FAK; Start 23; Stop 47
aagccactgtcaaaccagataaaac

SEQ ID NO: 395073 - DNA, 25 bp, Artificial
  probe
  misc_feature (1)..(25): SEQ ID NO: 4943; WAN024FAK; Start 16; Stop 40
aagatcaaagccactgtcaaaccag

SEQ ID NO: 395074 - DNA, 25 bp, Artificial
  probe
  misc_feature (1)..(25): SEQ ID NO: 4943; WAN024FAK; Start 24; Stop 48
agccactgtcaaaccagataaaaca

SEQ ID NO: 395075 - DNA, 25 bp, Artificial
  probe
  misc_feature (1)..(25): SEQ ID NO: 4943; WAN024FAK; Start 17; Stop 41
agatcaaagccactgtcaaaccaga

SEQ ID NO: 395076 - DNA, 25 bp, Artificial
  probe
  misc_feature (1)..(25): SEQ ID NO: 4943; WAN024FAK; Start 113; Stop 137
caatgaagatcccgagtgcaatctc

SEQ ID NO: 395077 - DNA, 25 bp, Artificial
  probe
  misc_feature (1)..(25): SEQ ID NO: 4943; WAN024FAK; Start 114; Stop 138
aatgaagatcccgagtgcaatctca

SEQ ID NO: 395078 - DNA, 25 bp, Artificial
  probe
  misc_feature (1)..(25): SEQ ID NO: 4943; WAN024FAK; Start 2; Stop 26
tgaagacttgcttgaagatcaaagc

SEQ ID NO: 395079 - DNA, 25 bp, Artificial
  probe
  misc_feature (1)..(25): SEQ ID NO: 4943; WAN024FAK; Start 196; Stop 220
ggatccatgaagaggagcttaaagt

SEQ ID NO: 395080 - DNA, 25 bp, Artificial
  probe
  misc_feature (1)..(25): SEQ ID NO: 4943; WAN024FAK; Start 3; Stop 27
gaagacttgcttgaagatcaaagcc

SEQ ID NO: 395081 - DNA, 25 bp, Artificial
  probe
  misc_feature (1)..(25): SEQ ID NO: 4943; WAN024FAK; Start 115; Stop 139
atgaagatcccgagtgcaatctcac

SEQ ID NO: 395082 - DNA, 25 bp, Artificial
  probe
  misc_feature (1)..(25): SEQ ID NO: 4943; WAN024FAK; Start 4; Stop 28
aagacttgcttgaagatcaaagcca

SEQ ID NO: 395083 - DNA, 25 bp, Artificial
  probe
  misc_feature (1)..(25): SEQ ID NO: 4943; WAN024FAK; Start 27; Stop 51
cactgtcaaaccagataaaacagct

SEQ ID NO: 395084 - DNA, 25 bp, Artificial
  probe
  misc_feature (1)..(25): SEQ ID NO: 4943; WAN024FAK; Start 26; Stop 50
ccactgtcaaaccagataaaacagc

SEQ ID NO: 395085 - DNA, 25 bp, Artificial
  probe
  misc_feature (1)..(25): SEQ ID NO: 4943; WAN024FAK; Start 25; Stop 49
gccactgtcaaaccagataaaacag

SEQ ID NO: 395086 - DNA, 25 bp, Artificial
  probe
  misc_feature (1)..(25): SEQ ID NO: 4943; WAN024FAK; Start 73; Stop 97
aagaaggtttggcctttgattttag

SEQ ID NO: 395087 - DNA, 25 bp, Artificial
  probe
  misc_feature (1)..(25): SEQ ID NO: 4943; WAN024FAK; Start 72; Stop 96
gaagaaggtttggcctttgatttta

SEQ ID NO: 395088 - DNA, 25 bp, Artificial
  probe
  misc_feature (1)..(25): SEQ ID NO: 4944; WAN024AZK; Start 742; Stop 766
cttcaaggtcataaggagaatgctt

SEQ ID NO: 395089 - DNA, 25 bp, Artificial
  probe
  misc_feature (1)..(25): SEQ ID NO: 4944; WAN024AZK; Start 253; Stop 277
ttacataccgacaagatcaacaact

SEQ ID NO: 395090 - DNA, 25 bp, Artificial
  probe
  misc_feature (1)..(25): SEQ ID NO: 4944; WAN024AZK; Start 254; Stop 278
tacataccgacaagatcaacaactg

SEQ ID NO: 395091 - DNA, 25 bp, Artificial
  probe
  misc_feature (1)..(25): SEQ ID NO: 4944; WAN024AZK; Start 183; Stop 207
gcgtgattatcttatctccatgact

SEQ ID NO: 395092 - DNA, 25 bp, Artificial
  probe
  misc_feature (1)..(25): SEQ ID NO: 4944; WAN024AZK; Start 182; Stop 206
tgcgtgattatcttatctccatgac

SEQ ID NO: 395093 - DNA, 25 bp, Artificial
  probe
  misc_feature (1)..(25): SEQ ID NO: 4944; WAN024AZK; Start 181; Stop 205
atgcgtgattatcttatctccatga

SEQ ID NO: 395094 - DNA, 25 bp, Artificial
  probe
  misc_feature (1)..(25): SEQ ID NO: 4944; WAN024AZK; Start 746; Stop 770
aaggtcataaggagaatgcttaact

SEQ ID NO: 395095 - DNA, 25 bp, Artificial
  probe
  misc_feature (1)..(25): SEQ ID NO: 4944; WAN024AZK; Start 745; Stop 769
caaggtcataaggagaatgcttaac

SEQ ID NO: 395096 - DNA, 25 bp, Artificial
  probe
  misc_feature (1)..(25): SEQ ID NO: 4944; WAN024AZK; Start 744; Stop 768
tcaaggtcataaggagaatgcttaa

SEQ ID NO: 395097 - DNA, 25 bp, Artificial
  probe
  misc_feature (1)..(25): SEQ ID NO: 4944; WAN024AZK; Start 743; Stop 767
ttcaaggtcataaggagaatgctta

SEQ ID NO: 395098 - DNA, 25 bp, Artificial
  probe
  misc_feature (1)..(25): SEQ ID NO: 4944; WAN024AZK; Start 185; Stop 209
gtgattatcttatctccatgactgc

SEQ ID NO: 395099 - DNA, 25 bp, Artificial
  probe
  misc_feature (1)..(25): SEQ ID NO: 4944; WAN024AZK; Start 184; Stop 208
cgtgattatcttatctccatgactg

SEQ ID NO: 395100 - DNA, 25 bp, Artificial
  probe
  misc_feature (1)..(25): SEQ ID NO: 4944; WAN024AZK; Start 747; Stop 771
aggtcataaggagaatgcttaacta

SEQ ID NO: 395101 - DNA, 25 bp, Artificial
  probe
  misc_feature (1)..(25): SEQ ID NO: 4944; WAN024AZK; Start 179; Stop 203
ttatgcgtgattatcttatctccat

SEQ ID NO: 395102 - DNA, 25 bp, Artificial
  probe
  misc_feature (1)..(25): SEQ ID NO: 4944; WAN024AZK; Start 180; Stop 204
tatgcgtgattatcttatctccatg

SEQ ID NO: 395103 - DNA, 25 bp, Artificial
  probe
  misc_feature (1)..(25): SEQ ID NO: 4944; WAN024AZK; Start 446; Stop 470
tgctgatagtaggaagtattgcctt

SEQ ID NO: 395104 - DNA, 25 bp, Artificial
  probe
  misc_feature (1)..(25): SEQ ID NO: 4944; WAN024AZK; Start 445; Stop 469
ttgctgatagtaggaagtattgcct

SEQ ID NO: 395105 - DNA, 25 bp, Artificial
  probe
  misc_feature (1)..(25): SEQ ID NO: 4944; WAN024AZK; Start 219; Stop 243
gatgtcaacagctatcttctcattc

SEQ ID NO: 395106 - DNA, 25 bp, Artificial
  probe
  misc_feature (1)..(25): SEQ ID NO: 4944; WAN024AZK; Start 748; Stop 772
ggtcataaggagaatgcttaactaa

SEQ ID NO: 395107 - DNA, 25 bp, Artificial
  probe
  misc_feature (1)..(25): SEQ ID NO: 4944; WAN024AZK; Start 220; Stop 244
atgtcaacagctatcttctcattcc

SEQ ID NO: 395108 - DNA, 25 bp, Artificial
  probe
  misc_feature (1)..(25): SEQ ID NO: 4944; WAN024AZK; Start 213; Stop 237
ttccatgatgtcaacagctatcttc

SEQ ID NO: 395109 - DNA, 25 bp, Artificial
  probe
  misc_feature (1)..(25): SEQ ID NO: 4944; WAN024AZK; Start 218; Stop 242
tgatgtcaacagctatcttctcatt

SEQ ID NO: 395110 - DNA, 25 bp, Artificial
  probe
  misc_feature (1)..(25): SEQ ID NO: 4944; WAN024AZK; Start 215; Stop 239
ccatgatgtcaacagctatcttctc

SEQ ID NO: 395111 - DNA, 25 bp, Artificial
  probe
  misc_feature (1)..(25): SEQ ID NO: 4944; WAN024AZK; Start 600; Stop 624
gatgcaagtagtaggtaagtgtctc

SEQ ID NO: 395112 - DNA, 25 bp, Artificial
  probe
  misc_feature (1)..(25): SEQ ID NO: 4944; WAN024AZK; Start 11; Stop 35
gcagaagggagataactaagatgaa

SEQ ID NO: 395113 - DNA, 25 bp, Artificial
  probe
  misc_feature (1)..(25): SEQ ID NO: 4944; WAN024AZK; Start 444; Stop 468
tttgctgatagtaggaagtattgcc

SEQ ID NO: 395114 - DNA, 25 bp, Artificial
  probe
  misc_feature (1)..(25): SEQ ID NO: 4944; WAN024AZK; Start 216; Stop 240
catgatgtcaacagctatcttctca

SEQ ID NO: 395115 - DNA, 25 bp, Artificial
  probe
  misc_feature (1)..(25): SEQ ID NO: 4944; WAN024AZK; Start 566; Stop 590
gactctggatgcctatctctttatt

SEQ ID NO: 395116 - DNA, 25 bp, Artificial
  probe
  misc_feature (1)..(25): SEQ ID NO: 4944; WAN024AZK; Start 186; Stop 210
tgattatcttatctccatgactgca

SEQ ID NO: 395117 - DNA, 25 bp, Artificial
  probe
  misc_feature (1)..(25): SEQ ID NO: 4944; WAN024AZK; Start 214; Stop 238
tccatgatgtcaacagctatcttct

SEQ ID NO: 395118 - DNA, 25 bp, Artificial
  probe
  misc_feature (1)..(25): SEQ ID NO: 4944; WAN024AZK; Start 340; Stop 364
agtatgctggttgattatttggttt

SEQ ID NO: 395119 - DNA, 25 bp, Artificial
  probe
  misc_feature (1)..(25): SEQ ID NO: 4944; WAN024AZK; Start 339; Stop 363
aagtatgctggttgattatttggtt

SEQ ID NO: 395120 - DNA, 25 bp, Artificial
  probe
  misc_feature (1)..(25): SEQ ID NO: 4944; WAN024AZK; Start 15; Stop 39
aagggagataactaagatgaaacga

SEQ ID NO: 395121 - DNA, 25 bp, Artificial
  probe
  misc_feature (1)..(25): SEQ ID NO: 4945; WAN024AZA; Start 18; Stop 42
aagtatcatcatctatttcagacca

SEQ ID NO: 395122 - DNA, 25 bp, Artificial
  probe
  misc_feature (1)..(25): SEQ ID NO: 4945; WAN024AZA; Start 19; Stop 43
agtatcatcatctatttcagaccat

SEQ ID NO: 395123 - DNA, 25 bp, Artificial
  probe
  misc_feature (1)..(25): SEQ ID NO: 4945; WAN024AZA; Start 20; Stop 44
gtatcatcatctatttcagaccatt

SEQ ID NO: 395124 - DNA, 25 bp, Artificial
  probe
  misc_feature (1)..(25): SEQ ID NO: 4945; WAN024AZA; Start 17; Stop 41
aaagtatcatcatctatttcagacc

SEQ ID NO: 395125 - DNA, 25 bp, Artificial
  probe
  misc_feature (1)..(25): SEQ ID NO: 4945; WAN024AZA; Start 84; Stop 108
tgaattctttcttaaacaagccttg

SEQ ID NO: 395126 - DNA, 25 bp, Artificial
  probe
  misc_feature (1)..(25): SEQ ID NO: 4945; WAN024AZA; Start 83; Stop 107
ttgaattctttcttaaacaagcctt

SEQ ID NO: 395127 - DNA, 25 bp, Artificial
  probe
  misc_feature (1)..(25): SEQ ID NO: 4945; WAN024AZA; Start 82; Stop 106
tttgaattctttcttaaacaagcct

SEQ ID NO: 395128 - DNA, 25 bp, Artificial
  probe
  misc_feature (1)..(25): SEQ ID NO: 4945; WAN024AZA; Start 81; Stop 105
ctttgaattctttcttaaacaagcc

SEQ ID NO: 395129 - DNA, 25 bp, Artificial
  probe
  misc_feature (1)..(25): SEQ ID NO: 4945; WAN024AZA; Start 21; Stop 45
tatcatcatctatttcagaccattt

SEQ ID NO: 395130 - DNA, 25 bp, Artificial
  probe
  misc_feature (1)..(25): SEQ ID NO: 4945; WAN024AZA; Start 77; Stop 101
aggtctttgaattctttcttaaaca

SEQ ID NO: 395131 - DNA, 25 bp, Artificial
  probe
  misc_feature (1)..(25): SEQ ID NO: 4945; WAN024AZA; Start 72; Stop 96
tgtcaaggtctttgaattctttctt

SEQ ID NO: 395132 - DNA, 25 bp, Artificial
  probe
  misc_feature (1)..(25): SEQ ID NO: 4945; WAN024AZA; Start 71; Stop 95
ttgtcaaggtctttgaattctttct

SEQ ID NO: 395133 - DNA, 25 bp, Artificial
  probe
  misc_feature (1)..(25): SEQ ID NO: 4945; WAN024AZA; Start 80; Stop 104
tctttgaattctttcttaaacaagc

SEQ ID NO: 395134 - DNA, 25 bp, Artificial
  probe
  misc_feature (1)..(25): SEQ ID NO: 4945; WAN024AZA; Start 70; Stop 94
tttgtcaaggtctttgaattctttc

SEQ ID NO: 395135 - DNA, 25 bp, Artificial
  probe
  misc_feature (1)..(25): SEQ ID NO: 4945; WAN024AZA; Start 22; Stop 46
atcatcatctatttcagaccatttt

SEQ ID NO: 395136 - DNA, 25 bp, Artificial
  probe
  misc_feature (1)..(25): SEQ ID NO: 4945; WAN024AZA; Start 78; Stop 102
ggtctttgaattctttcttaaacaa

SEQ ID NO: 395137 - DNA, 25 bp, Artificial
  probe
  misc_feature (1)..(25): SEQ ID NO: 4945; WAN024AZA; Start 69; Stop 93
atttgtcaaggtctttgaattcttt

SEQ ID NO: 395138 - DNA, 25 bp, Artificial
  probe
  misc_feature (1)..(25): SEQ ID NO: 4945; WAN024AZA; Start 76; Stop 100
aaggtctttgaattctttcttaaac

SEQ ID NO: 395139 - DNA, 25 bp, Artificial
  probe
  misc_feature (1)..(25): SEQ ID NO: 4945; WAN024AZA; Start 75; Stop 99
caaggtctttgaattctttcttaaa

SEQ ID NO: 395140 - DNA, 25 bp, Artificial
  probe
  misc_feature (1)..(25): SEQ ID NO: 4945; WAN024AZA; Start 73; Stop 97
gtcaaggtctttgaattctttctta

SEQ ID NO: 395141 - DNA, 25 bp, Artificial
  probe
  misc_feature (1)..(25): SEQ ID NO: 4945; WAN024AZA; Start 68; Stop 92
tatttgtcaaggtctttgaattctt

SEQ ID NO: 395142 - DNA, 25 bp, Artificial
  probe
  misc_feature (1)..(25): SEQ ID NO: 4945; WAN024AZA; Start 67; Stop 91
ttatttgtcaaggtctttgaattct

SEQ ID NO: 395143 - DNA, 25 bp, Artificial
  probe
  misc_feature (1)..(25): SEQ ID NO: 4945; WAN024AZA; Start 74; Stop 98
tcaaggtctttgaattctttcttaa

SEQ ID NO: 395144 - DNA, 25 bp, Artificial
  probe
  misc_feature (1)..(25): SEQ ID NO: 4945; WAN024AZA; Start 79; Stop 103
gtctttgaattctttcttaaacaag

SEQ ID NO: 395145 - DNA, 25 bp, Artificial
  probe
  misc_feature (1)..(25): SEQ ID NO: 4945; WAN024AZA; Start 66; Stop 90
tttatttgtcaaggtctttgaattc

SEQ ID NO: 395146 - DNA, 25 bp, Artificial
  probe
  misc_feature (1)..(25): SEQ ID NO: 4945; WAN024AZA; Start 14; Stop 38
cgaaaagtatcatcatctatttcag

SEQ ID NO: 395147 - DNA, 25 bp, Artificial
  probe
  misc_feature (1)..(25): SEQ ID NO: 4945; WAN024AZA; Start 16; Stop 40
aaaagtatcatcatctatttcagac

SEQ ID NO: 395148 - DNA, 25 bp, Artificial
  probe
  misc_feature (1)..(25): SEQ ID NO: 4945; WAN024AZA; Start 65; Stop 89
ttttatttgtcaaggtctttgaatt

SEQ ID NO: 395149 - DNA, 25 bp, Artificial
  probe
  misc_feature (1)..(25): SEQ ID NO: 4945; WAN024AZA; Start 13; Stop 37
tcgaaaagtatcatcatctatttca

SEQ ID NO: 395150 - DNA, 25 bp, Artificial
  probe
  misc_feature (1)..(25): SEQ ID NO: 4945; WAN024AZA; Start 12; Stop 36
ttcgaaaagtatcatcatctatttc

SEQ ID NO: 395151 - DNA, 25 bp, Artificial
  probe
  misc_feature (1)..(25): SEQ ID NO: 4946; WAN024BEW; Start 95; Stop 119
tagtggatgtgagagaagtggatga

SEQ ID NO: 395152 - DNA, 25 bp, Artificial
  probe
  misc_feature (1)..(25): SEQ ID NO: 4946; WAN024BEW; Start 98; Stop 122
tggatgtgagagaagtggatgagtt

SEQ ID NO: 395153 - DNA, 25 bp, Artificial
  probe
  misc_feature (1)..(25): SEQ ID NO: 4946; WAN024BEW; Start 100; Stop 124
gatgtgagagaagtggatgagtttg

SEQ ID NO: 395154 - DNA, 25 bp, Artificial
  probe
  misc_feature (1)..(25): SEQ ID NO: 4946; WAN024BEW; Start 96; Stop 120
agtggatgtgagagaagtggatgag

SEQ ID NO: 395155 - DNA, 25 bp, Artificial
  probe
  misc_feature (1)..(25): SEQ ID NO: 4946; WAN024BEW; Start 99; Stop 123
ggatgtgagagaagtggatgagttt

SEQ ID NO: 395156 - DNA, 25 bp, Artificial
  probe
  misc_feature (1)..(25): SEQ ID NO: 4946; WAN024BEW; Start 97; Stop 121
gtggatgtgagagaagtggatgagt

SEQ ID NO: 395157 - DNA, 25 bp, Artificial
  probe
  misc_feature (1)..(25): SEQ ID NO: 4946; WAN024BEW; Start 159; Stop 183
gcttagtcaattggctgatagttat

SEQ ID NO: 395158 - DNA, 25 bp, Artificial
  probe
  misc_feature (1)..(25): SEQ ID NO: 4946; WAN024BEW; Start 158; Stop 182
cgcttagtcaattggctgatagtta

SEQ ID NO: 395159 - DNA, 25 bp, Artificial
  probe
  misc_feature (1)..(25): SEQ ID NO: 4946; WAN024BEW; Start 34; Stop 58
agaatgaaagaaatagcctttgacg

SEQ ID NO: 395160 - DNA, 25 bp, Artificial
  probe
  misc_feature (1)..(25): SEQ ID NO: 4946; WAN024BEW; Start 101; Stop 125
atgtgagagaagtggatgagtttgc

SEQ ID NO: 395161 - DNA, 25 bp, Artificial
  probe
  misc_feature (1)..(25): SEQ ID NO: 4946; WAN024BEW; Start 39; Stop 63
gaaagaaatagcctttgacgcattt

SEQ ID NO: 395162 - DNA, 25 bp, Artificial
  probe
  misc_feature (1)..(25): SEQ ID NO: 4946; WAN024BEW; Start 163; Stop 187
agtcaattggctgatagttatgatt

SEQ ID NO: 395163 - DNA, 25 bp, Artificial
  probe
  misc_feature (1)..(25): SEQ ID NO: 4946; WAN024BEW; Start 117; Stop 141
tgagtttgcagctcttcatttagaa

SEQ ID NO: 395164 - DNA, 25 bp, Artificial
  probe
  misc_feature (1)..(25): SEQ ID NO: 4946; WAN024BEW; Start 35; Stop 59
gaatgaaagaaatagcctttgacgc

SEQ ID NO: 395165 - DNA, 25 bp, Artificial
  probe
  misc_feature (1)..(25): SEQ ID NO: 4946; WAN024BEW; Start 37; Stop 61
atgaaagaaatagcctttgacgcat

SEQ ID NO: 395166 - DNA, 25 bp, Artificial
  probe
  misc_feature (1)..(25): SEQ ID NO: 4946; WAN024BEW; Start 38; Stop 62
tgaaagaaatagcctttgacgcatt

SEQ ID NO: 395167 - DNA, 25 bp, Artificial
  probe
  misc_feature (1)..(25): SEQ ID NO: 4946; WAN024BEW; Start 36; Stop 60
aatgaaagaaatagcctttgacgca

SEQ ID NO: 395168 - DNA, 25 bp, Artificial
  probe
  misc_feature (1)..(25): SEQ ID NO: 4946; WAN024BEW; Start 161; Stop 185
ttagtcaattggctgatagttatga

SEQ ID NO: 395169 - DNA, 25 bp, Artificial
  probe
  misc_feature (1)..(25): SEQ ID NO: 4946; WAN024BEW; Start 33; Stop 57
aagaatgaaagaaatagcctttgac

SEQ ID NO: 395170 - DNA, 25 bp, Artificial
  probe
  misc_feature (1)..(25): SEQ ID NO: 4946; WAN024BEW; Start 162; Stop 186
tagtcaattggctgatagttatgat

SEQ ID NO: 395171 - DNA, 25 bp, Artificial
  probe
  misc_feature (1)..(25): SEQ ID NO: 4946; WAN024BEW; Start 160; Stop 184
cttagtcaattggctgatagttatg

SEQ ID NO: 395172 - DNA, 25 bp, Artificial
  probe
  misc_feature (1)..(25): SEQ ID NO: 4946; WAN024BEW; Start 155; Stop 179
taccgcttagtcaattggctgatag

SEQ ID NO: 395173 - DNA, 25 bp, Artificial
  probe
  misc_feature (1)..(25): SEQ ID NO: 4946; WAN024BEW; Start 154; Stop 178
ctaccgcttagtcaattggctgata

SEQ ID NO: 395174 - DNA, 25 bp, Artificial
  probe
  misc_feature (1)..(25): SEQ ID NO: 4946; WAN024BEW; Start 41; Stop 65
aagaaatagcctttgacgcatttta

SEQ ID NO: 395175 - DNA, 25 bp, Artificial
  probe
  misc_feature (1)..(25): SEQ ID NO: 4946; WAN024BEW; Start 42; Stop 66
agaaatagcctttgacgcattttac

SEQ ID NO: 395176 - DNA, 25 bp, Artificial
  probe
  misc_feature (1)..(25): SEQ ID NO: 4946; WAN024BEW; Start 45; Stop 69
aatagcctttgacgcattttaccag

SEQ ID NO: 395177 - DNA, 25 bp, Artificial
  probe
  misc_feature (1)..(25): SEQ ID NO: 4946; WAN024BEW; Start 32; Stop 56
aaagaatgaaagaaatagcctttga

SEQ ID NO: 395178 - DNA, 25 bp, Artificial
  probe
  misc_feature (1)..(25): SEQ ID NO: 4946; WAN024BEW; Start 43; Stop 67
gaaatagcctttgacgcattttacc

SEQ ID NO: 395179 - DNA, 25 bp, Artificial
  probe
  misc_feature (1)..(25): SEQ ID NO: 4946; WAN024BEW; Start 164; Stop 188
gtcaattggctgatagttatgatta

SEQ ID NO: 395180 - DNA, 25 bp, Artificial
  probe
  misc_feature (1)..(25): SEQ ID NO: 4946; WAN024BEW; Start 115; Stop 139
gatgagtttgcagctcttcatttag

SEQ ID NO: 395181 - DNA, 25 bp, Artificial
  probe
  misc_feature (1)..(25): SEQ ID NO: 4946; WAN024BEW; Start 157; Stop 181
ccgcttagtcaattggctgatagtt

SEQ ID NO: 395182 - DNA, 25 bp, Artificial
  probe
  misc_feature (1)..(25): SEQ ID NO: 4946; WAN024BEW; Start 116; Stop 140
atgagtttgcagctcttcatttaga

SEQ ID NO: 395183 - DNA, 25 bp, Artificial
  probe
  misc_feature (1)..(25): SEQ ID NO: 4946; WAN024BEW; Start 44; Stop 68
aaatagcctttgacgcattttacca

SEQ ID NO: 395184 - DNA, 25 bp, Artificial
  probe
  misc_feature (1)..(25): SEQ ID NO: 4947; WAN024BE2; Start 182; Stop 206
aattgggctttcatttgaaacctta

SEQ ID NO: 395185 - DNA, 25 bp, Artificial
  probe
  misc_feature (1)..(25): SEQ ID NO: 4947; WAN024BE2; Start 183; Stop 207
attgggctttcatttgaaaccttac

SEQ ID NO: 395186 - DNA, 25 bp, Artificial
  probe
  misc_feature (1)..(25): SEQ ID NO: 4947; WAN024BE2; Start 184; Stop 208
ttgggctttcatttgaaaccttacc

SEQ ID NO: 395187 - DNA, 25 bp, Artificial
  probe
  misc_feature (1)..(25): SEQ ID NO: 4947; WAN024BE2; Start 109; Stop 133
ttacatcatagctaccaacaggcgt

SEQ ID NO: 395188 - DNA, 25 bp, Artificial
  probe
  misc_feature (1)..(25): SEQ ID NO: 4947; WAN024BE2; Start 110; Stop 134
tacatcatagctaccaacaggcgtt

SEQ ID NO: 395189 - DNA, 25 bp, Artificial
  probe
  misc_feature (1)..(25): SEQ ID NO: 4947; WAN024BE2; Start 185; Stop 209
tgggctttcatttgaaaccttacct

SEQ ID NO: 395190 - DNA, 25 bp, Artificial
  probe
  misc_feature (1)..(25): SEQ ID NO: 4947; WAN024BE2; Start 108; Stop 132
tttacatcatagctaccaacaggcg

SEQ ID NO: 395191 - DNA, 25 bp, Artificial
  probe
  misc_feature (1)..(25): SEQ ID NO: 4947; WAN024BE2; Start 181; Stop 205
caattgggctttcatttgaaacctt

SEQ ID NO: 395192 - DNA, 25 bp, Artificial
  probe
  misc_feature (1)..(25): SEQ ID NO: 4947; WAN024BE2; Start 107; Stop 131
ttttacatcatagctaccaacaggc

SEQ ID NO: 395193 - DNA, 25 bp, Artificial
  probe
  misc_feature (1)..(25): SEQ ID NO: 4947; WAN024BE2; Start 116; Stop 140
atagctaccaacaggcgtttcaatg

SEQ ID NO: 395194 - DNA, 25 bp, Artificial
  probe
  misc_feature (1)..(25): SEQ ID NO: 4947; WAN024BE2; Start 115; Stop 139
catagctaccaacaggcgtttcaat

SEQ ID NO: 395195 - DNA, 25 bp, Artificial
  probe
  misc_feature (1)..(25): SEQ ID NO: 4947; WAN024BE2; Start 112; Stop 136
catcatagctaccaacaggcgtttc

SEQ ID NO: 395196 - DNA, 25 bp, Artificial
  probe
  misc_feature (1)..(25): SEQ ID NO: 4947; WAN024BE2; Start 113; Stop 137
atcatagctaccaacaggcgtttca

SEQ ID NO: 395197 - DNA, 25 bp, Artificial
  probe
  misc_feature (1)..(25): SEQ ID NO: 4947; WAN024BE2; Start 114; Stop 138
tcatagctaccaacaggcgtttcaa

SEQ ID NO: 395198 - DNA, 25 bp, Artificial
  probe
  misc_feature (1)..(25): SEQ ID NO: 4947; WAN024BE2; Start 111; Stop 135
acatcatagctaccaacaggcgttt

SEQ ID NO: 395199 - DNA, 25 bp, Artificial
  probe
  misc_feature (1)..(25): SEQ ID NO: 4947; WAN024BE2; Start 150; Stop 174
tcacctgttttcttgccaatcaagg

SEQ ID NO: 395200 - DNA, 25 bp, Artificial
  probe
  misc_feature (1)..(25): SEQ ID NO: 4947; WAN024BE2; Start 120; Stop 144
ctaccaacaggcgtttcaatggttg

SEQ ID NO: 395201 - DNA, 25 bp, Artificial
  probe
  misc_feature (1)..(25): SEQ ID NO: 4948; WAN024DAI; Start 1; Stop 25
ttgaagaggagttacacaatggtaa

SEQ ID NO: 395202 - DNA, 25 bp, Artificial
  probe
  misc_feature (1)..(25): SEQ ID NO: 4948; WAN024DAI; Start 174; Stop 198
tatccaaacaccaactgaagtcttt

SEQ ID NO: 395203 - DNA, 25 bp, Artificial
  probe
  misc_feature (1)..(25): SEQ ID NO: 4948; WAN024DAI; Start 173; Stop 197
ttatccaaacaccaactgaagtctt

SEQ ID NO: 395204 - DNA, 25 bp, Artificial
  probe
  misc_feature (1)..(25): SEQ ID NO: 4948; WAN024DAI; Start 67; Stop 91
aagcgtttcttggacagtaataatg

SEQ ID NO: 395205 - DNA, 25 bp, Artificial
  probe
  misc_feature (1)..(25): SEQ ID NO: 4948; WAN024DAI; Start 80; Stop 104
acagtaataatgtctcttatcgtga

SEQ ID NO: 395206 - DNA, 25 bp, Artificial
  probe
  misc_feature (1)..(25): SEQ ID NO: 4948; WAN024DAI; Start 172; Stop 196
gttatccaaacaccaactgaagtct

SEQ ID NO: 395207 - DNA, 25 bp, Artificial
  probe
  misc_feature (1)..(25): SEQ ID NO: 4948; WAN024DAI; Start 14; Stop 38
acacaatggtaaccgtttattctaa

SEQ ID NO: 395208 - DNA, 25 bp, Artificial
  probe
  misc_feature (1)..(25): SEQ ID NO: 4948; WAN024DAI; Start 90; Stop 114
tgtctcttatcgtgaaatcaatctt

SEQ ID NO: 395209 - DNA, 25 bp, Artificial
  probe
  misc_feature (1)..(25): SEQ ID NO: 4948; WAN024DAI; Start 68; Stop 92
agcgtttcttggacagtaataatgt

SEQ ID NO: 395210 - DNA, 25 bp, Artificial
  probe
  misc_feature (1)..(25): SEQ ID NO: 4948; WAN024DAI; Start 91; Stop 115
gtctcttatcgtgaaatcaatcttg

SEQ ID NO: 395211 - DNA, 25 bp, Artificial
  probe
  misc_feature (1)..(25): SEQ ID NO: 4948; WAN024DAI; Start 89; Stop 113
atgtctcttatcgtgaaatcaatct

SEQ ID NO: 395212 - DNA, 25 bp, Artificial
  probe
  misc_feature (1)..(25): SEQ ID NO: 4948; WAN024DAI; Start 81; Stop 105
cagtaataatgtctcttatcgtgaa

SEQ ID NO: 395213 - DNA, 25 bp, Artificial
  probe
  misc_feature (1)..(25): SEQ ID NO: 4948; WAN024DAI; Start 13; Stop 37
tacacaatggtaaccgtttattcta

SEQ ID NO: 395214 - DNA, 25 bp, Artificial
  probe
  misc_feature (1)..(25): SEQ ID NO: 4948; WAN024DAI; Start 88; Stop 112
aatgtctcttatcgtgaaatcaatc

SEQ ID NO: 395215 - DNA, 25 bp, Artificial
  probe
  misc_feature (1)..(25): SEQ ID NO: 4948; WAN024DAI; Start 15; Stop 39
cacaatggtaaccgtttattctaaa

SEQ ID NO: 395216 - DNA, 25 bp, Artificial
  probe
  misc_feature (1)..(25): SEQ ID NO: 4948; WAN024DAI; Start 12; Stop 36
ttacacaatggtaaccgtttattct

SEQ ID NO: 395217 - DNA, 25 bp, Artificial
  probe
  misc_feature (1)..(25): SEQ ID NO: 4948; WAN024DAI; Start 92; Stop 116
tctcttatcgtgaaatcaatcttga

SEQ ID NO: 395218 - DNA, 25 bp, Artificial
  probe
  misc_feature (1)..(25): SEQ ID NO: 4948; WAN024DAI; Start 105; Stop 129
aatcaatcttgatgagcaacctgag

SEQ ID NO: 395219 - DNA, 25 bp, Artificial
  probe
  misc_feature (1)..(25): SEQ ID NO: 4948; WAN024DAI; Start 52; Stop 76
caatgtaaaatgaccaagcgtttct

SEQ ID NO: 395220 - DNA, 25 bp, Artificial
  probe
  misc_feature (1)..(25): SEQ ID NO: 4948; WAN024DAI; Start 53; Stop 77
aatgtaaaatgaccaagcgtttctt

SEQ ID NO: 395221 - DNA, 25 bp, Artificial
  probe
  misc_feature (1)..(25): SEQ ID NO: 4948; WAN024DAI; Start 106; Stop 130
atcaatcttgatgagcaacctgagt

SEQ ID NO: 395222 - DNA, 25 bp, Artificial
  probe
  misc_feature (1)..(25): SEQ ID NO: 4948; WAN024DAI; Start 175; Stop 199
atccaaacaccaactgaagtctttt

SEQ ID NO: 395223 - DNA, 25 bp, Artificial
  probe
  misc_feature (1)..(25): SEQ ID NO: 4948; WAN024DAI; Start 87; Stop 111
taatgtctcttatcgtgaaatcaat

SEQ ID NO: 395224 - DNA, 25 bp, Artificial
  probe
  misc_feature (1)..(25): SEQ ID NO: 4948; WAN024DAI; Start 51; Stop 75
ccaatgtaaaatgaccaagcgtttc

SEQ ID NO: 395225 - DNA, 25 bp, Artificial
  probe
  misc_feature (1)..(25): SEQ ID NO: 4948; WAN024DAI; Start 86; Stop 110
ataatgtctcttatcgtgaaatcaa

SEQ ID NO: 395226 - DNA, 25 bp, Artificial
  probe
  misc_feature (1)..(25): SEQ ID NO: 4948; WAN024DAI; Start 85; Stop 109
aataatgtctcttatcgtgaaatca

SEQ ID NO: 395227 - DNA, 25 bp, Artificial
  probe
  misc_feature (1)..(25): SEQ ID NO: 4948; WAN024DAI; Start 50; Stop 74
tccaatgtaaaatgaccaagcgttt

SEQ ID NO: 395228 - DNA, 25 bp, Artificial
  probe
  misc_feature (1)..(25): SEQ ID NO: 4948; WAN024DAI; Start 97; Stop 121
tatcgtgaaatcaatcttgatgagc

SEQ ID NO: 395229 - DNA, 25 bp, Artificial
  probe
  misc_feature (1)..(25): SEQ ID NO: 4948; WAN024DAI; Start 211; Stop 235
ccaggaaaactgaaacaattagcat

SEQ ID NO: 395230 - DNA, 25 bp, Artificial
  probe
  misc_feature (1)..(25): SEQ ID NO: 4948; WAN024DAI; Start 207; Stop 231
ccaaccaggaaaactgaaacaatta

SEQ ID NO: 395231 - DNA, 25 bp, Artificial
  probe
  misc_feature (1)..(25): SEQ ID NO: 4948; WAN024DAI; Start 45; Stop 69
ttgtgtccaatgtaaaatgaccaag

SEQ ID NO: 395232 - DNA, 25 bp, Artificial
  probe
  misc_feature (1)..(25): SEQ ID NO: 4948; WAN024DAI; Start 209; Stop 233
aaccaggaaaactgaaacaattagc

SEQ ID NO: 395233 - DNA, 25 bp, Artificial
  probe
  misc_feature (1)..(25): SEQ ID NO: 4948; WAN024DAI; Start 176; Stop 200
tccaaacaccaactgaagtcttttc

SEQ ID NO: 395234 - DNA, 25 bp, Artificial
  probe
  misc_feature (1)..(25): SEQ ID NO: 4949; WAN024CRD; Start 100; Stop 124
gatggtttctggattgatgagtttg

SEQ ID NO: 395235 - DNA, 25 bp, Artificial
  probe
  misc_feature (1)..(25): SEQ ID NO: 4949; WAN024CRD; Start 101; Stop 125
atggtttctggattgatgagtttga

SEQ ID NO: 395236 - DNA, 25 bp, Artificial
  probe
  misc_feature (1)..(25): SEQ ID NO: 4949; WAN024CRD; Start 28; Stop 52
tttaccttccagatacaccatcaaa

SEQ ID NO: 395237 - DNA, 25 bp, Artificial
  probe
  misc_feature (1)..(25): SEQ ID NO: 4949; WAN024CRD; Start 54; Stop 78
tagaaatatctgctgggtttactcc

SEQ ID NO: 395238 - DNA, 25 bp, Artificial
  probe
  misc_feature (1)..(25): SEQ ID NO: 4949; WAN024CRD; Start 102; Stop 126
tggtttctggattgatgagtttgaa

SEQ ID NO: 395239 - DNA, 25 bp, Artificial
  probe
  misc_feature (1)..(25): SEQ ID NO: 4949; WAN024CRD; Start 103; Stop 127
ggtttctggattgatgagtttgaac

SEQ ID NO: 395240 - DNA, 25 bp, Artificial
  probe
  misc_feature (1)..(25): SEQ ID NO: 4949; WAN024CRD; Start 99; Stop 123
cgatggtttctggattgatgagttt

SEQ ID NO: 395241 - DNA, 25 bp, Artificial
  probe
  misc_feature (1)..(25): SEQ ID NO: 4949; WAN024CRD; Start 432; Stop 456
ctggcttgagtttgatactgtctag

SEQ ID NO: 395242 - DNA, 25 bp, Artificial
  probe
  misc_feature (1)..(25): SEQ ID NO: 4949; WAN024CRD; Start 431; Stop 455
actggcttgagtttgatactgtcta

SEQ ID NO: 395243 - DNA, 25 bp, Artificial
  probe
  misc_feature (1)..(25): SEQ ID NO: 4949; WAN024CRD; Start 110; Stop 134
ggattgatgagtttgaacttctgac

SEQ ID NO: 395244 - DNA, 25 bp, Artificial
  probe
  misc_feature (1)..(25): SEQ ID NO: 4949; WAN024CRD; Start 108; Stop 132
ctggattgatgagtttgaacttctg

SEQ ID NO: 395245 - DNA, 25 bp, Artificial
  probe
  misc_feature (1)..(25): SEQ ID NO: 4949; WAN024CRD; Start 107; Stop 131
tctggattgatgagtttgaacttct

SEQ ID NO: 395246 - DNA, 25 bp, Artificial
  probe
  misc_feature (1)..(25): SEQ ID NO: 4949; WAN024CRD; Start 104; Stop 128
gtttctggattgatgagtttgaact

SEQ ID NO: 395247 - DNA, 25 bp, Artificial
  probe
  misc_feature (1)..(25): SEQ ID NO: 4949; WAN024CRD; Start 109; Stop 133
tggattgatgagtttgaacttctga

SEQ ID NO: 395248 - DNA, 25 bp, Artificial
  probe
  misc_feature (1)..(25): SEQ ID NO: 4949; WAN024CRD; Start 53; Stop 77
atagaaatatctgctgggtttactc

SEQ ID NO: 395249 - DNA, 25 bp, Artificial
  probe
  misc_feature (1)..(25): SEQ ID NO: 4949; WAN024CRD; Start 111; Stop 135
gattgatgagtttgaacttctgacg

SEQ ID NO: 395250 - DNA, 25 bp, Artificial
  probe
  misc_feature (1)..(25): SEQ ID NO: 4949; WAN024CRD; Start 106; Stop 130
ttctggattgatgagtttgaacttc

SEQ ID NO: 395251 - DNA, 25 bp, Artificial
  probe
  misc_feature (1)..(25): SEQ ID NO: 4949; WAN024CRD; Start 105; Stop 129
tttctggattgatgagtttgaactt

SEQ ID NO: 395252 - DNA, 25 bp, Artificial
  probe
  misc_feature (1)..(25): SEQ ID NO: 4949; WAN024CRD; Start 427; Stop 451
cttgactggcttgagtttgatactg

SEQ ID NO: 395253 - DNA, 25 bp, Artificial
  probe
  misc_feature (1)..(25): SEQ ID NO: 4949; WAN024CRD; Start 52; Stop 76
aatagaaatatctgctgggtttact

SEQ ID NO: 395254 - DNA, 25 bp, Artificial
  probe
  misc_feature (1)..(25): SEQ ID NO: 4949; WAN024CRD; Start 424; Stop 448
ttccttgactggcttgagtttgata

SEQ ID NO: 395255 - DNA, 25 bp, Artificial
  probe
  misc_feature (1)..(25): SEQ ID NO: 4949; WAN024CRD; Start 428; Stop 452
ttgactggcttgagtttgatactgt

SEQ ID NO: 395256 - DNA, 25 bp, Artificial
  probe
  misc_feature (1)..(25): SEQ ID NO: 4949; WAN024CRD; Start 265; Stop 289
ttcaatcaattcgataatcttgtca

SEQ ID NO: 395257 - DNA, 25 bp, Artificial
  probe
  misc_feature (1)..(25): SEQ ID NO: 4949; WAN024CRD; Start 98; Stop 122
ccgatggtttctggattgatgagtt

SEQ ID NO: 395258 - DNA, 25 bp, Artificial
  probe
  misc_feature (1)..(25): SEQ ID NO: 4949; WAN024CRD; Start 266; Stop 290
tcaatcaattcgataatcttgtcat

SEQ ID NO: 395259 - DNA, 25 bp, Artificial
  probe
  misc_feature (1)..(25): SEQ ID NO: 4949; WAN024CRD; Start 426; Stop 450
ccttgactggcttgagtttgatact

SEQ ID NO: 395260 - DNA, 25 bp, Artificial
  probe
  misc_feature (1)..(25): SEQ ID NO: 4949; WAN024CRD; Start 425; Stop 449
tccttgactggcttgagtttgatac

SEQ ID NO: 395261 - DNA, 25 bp, Artificial
  probe
  misc_feature (1)..(25): SEQ ID NO: 4949; WAN024CRD; Start 51; Stop 75
aaatagaaatatctgctgggtttac

SEQ ID NO: 395262 - DNA, 25 bp, Artificial
  probe
  misc_feature (1)..(25): SEQ ID NO: 4949; WAN024CRD; Start 267; Stop 291
caatcaattcgataatcttgtcatc

SEQ ID NO: 395263 - DNA, 25 bp, Artificial
  probe
  misc_feature (1)..(25): SEQ ID NO: 4949; WAN024CRD; Start 423; Stop 447
tttccttgactggcttgagtttgat

SEQ ID NO: 395264 - DNA, 25 bp, Artificial
  probe
  misc_feature (1)..(25): SEQ ID NO: 4949; WAN024CRD; Start 430; Stop 454
gactggcttgagtttgatactgtct

SEQ ID NO: 395265 - DNA, 25 bp, Artificial
  probe
  misc_feature (1)..(25): SEQ ID NO: 4949; WAN024CRD; Start 326; Stop 350
acatcttggtaagaaacttctggac

SEQ ID NO: 395266 - DNA, 25 bp, Artificial
  probe
  misc_feature (1)..(25): SEQ ID NO: 4949; WAN024CRD; Start 325; Stop 349
cacatcttggtaagaaacttctgga

SEQ ID NO: 395267 - DNA, 25 bp, Artificial
  probe
  misc_feature (1)..(25): SEQ ID NO: 4950; WAN024ER6; Start 66; Stop 90
agcaataagagtcaatcctgttaca

SEQ ID NO: 395268 - DNA, 25 bp, Artificial
  probe
  misc_feature (1)..(25): SEQ ID NO: 4950; WAN024ER6; Start 71; Stop 95
taagagtcaatcctgttacatcgtc

SEQ ID NO: 395269 - DNA, 25 bp, Artificial
  probe
  misc_feature (1)..(25): SEQ ID NO: 4950; WAN024ER6; Start 70; Stop 94
ataagagtcaatcctgttacatcgt

SEQ ID NO: 395270 - DNA, 25 bp, Artificial
  probe
  misc_feature (1)..(25): SEQ ID NO: 4950; WAN024ER6; Start 77; Stop 101
tcaatcctgttacatcgtcttcttc

SEQ ID NO: 395271 - DNA, 25 bp, Artificial
  probe
  misc_feature (1)..(25): SEQ ID NO: 4950; WAN024ER6; Start 76; Stop 100
gtcaatcctgttacatcgtcttctt

SEQ ID NO: 395272 - DNA, 25 bp, Artificial
  probe
  misc_feature (1)..(25): SEQ ID NO: 4950; WAN024ER6; Start 67; Stop 91
gcaataagagtcaatcctgttacat

SEQ ID NO: 395273 - DNA, 25 bp, Artificial
  probe
  misc_feature (1)..(25): SEQ ID NO: 4950; WAN024ER6; Start 74; Stop 98
gagtcaatcctgttacatcgtcttc

SEQ ID NO: 395274 - DNA, 25 bp, Artificial
  probe
  misc_feature (1)..(25): SEQ ID NO: 4950; WAN024ER6; Start 69; Stop 93
aataagagtcaatcctgttacatcg

SEQ ID NO: 395275 - DNA, 25 bp, Artificial
  probe
  misc_feature (1)..(25): SEQ ID NO: 4950; WAN024ER6; Start 75; Stop 99
agtcaatcctgttacatcgtcttct

SEQ ID NO: 395276 - DNA, 25 bp, Artificial
  probe
  misc_feature (1)..(25): SEQ ID NO: 4950; WAN024ER6; Start 60; Stop 84
tggttcagcaataagagtcaatcct

SEQ ID NO: 395277 - DNA, 25 bp, Artificial
  probe
  misc_feature (1)..(25): SEQ ID NO: 4950; WAN024ER6; Start 78; Stop 102
caatcctgttacatcgtcttcttcg

SEQ ID NO: 395278 - DNA, 25 bp, Artificial
  probe
  misc_feature (1)..(25): SEQ ID NO: 4950; WAN024ER6; Start 73; Stop 97
agagtcaatcctgttacatcgtctt

SEQ ID NO: 395279 - DNA, 25 bp, Artificial
  probe
  misc_feature (1)..(25): SEQ ID NO: 4950; WAN024ER6; Start 72; Stop 96
aagagtcaatcctgttacatcgtct

SEQ ID NO: 395280 - DNA, 25 bp, Artificial
  probe
  misc_feature (1)..(25): SEQ ID NO: 4950; WAN024ER6; Start 65; Stop 89
cagcaataagagtcaatcctgttac

SEQ ID NO: 395281 - DNA, 25 bp, Artificial
  probe
  misc_feature (1)..(25): SEQ ID NO: 4950; WAN024ER6; Start 64; Stop 88
tcagcaataagagtcaatcctgtta

SEQ ID NO: 395282 - DNA, 25 bp, Artificial
  probe
  misc_feature (1)..(25): SEQ ID NO: 4950; WAN024ER6; Start 63; Stop 87
ttcagcaataagagtcaatcctgtt

SEQ ID NO: 395283 - DNA, 25 bp, Artificial
  probe
  misc_feature (1)..(25): SEQ ID NO: 4950; WAN024ER6; Start 57; Stop 81
aactggttcagcaataagagtcaat

SEQ ID NO: 395284 - DNA, 25 bp, Artificial
  probe
  misc_feature (1)..(25): SEQ ID NO: 4950; WAN024ER6; Start 62; Stop 86
gttcagcaataagagtcaatcctgt

SEQ ID NO: 395285 - DNA, 25 bp, Artificial
  probe
  misc_feature (1)..(25): SEQ ID NO: 4950; WAN024ER6; Start 58; Stop 82
actggttcagcaataagagtcaatc

SEQ ID NO: 395286 - DNA, 25 bp, Artificial
  probe
  misc_feature (1)..(25): SEQ ID NO: 4950; WAN024ER6; Start 56; Stop 80
caactggttcagcaataagagtcaa

SEQ ID NO: 395287 - DNA, 25 bp, Artificial
  probe
  misc_feature (1)..(25): SEQ ID NO: 4950; WAN024ER6; Start 61; Stop 85
ggttcagcaataagagtcaatcctg

SEQ ID NO: 395288 - DNA, 25 bp, Artificial
  probe
  misc_feature (1)..(25): SEQ ID NO: 4950; WAN024ER6; Start 59; Stop 83
ctggttcagcaataagagtcaatcc

SEQ ID NO: 395289 - DNA, 25 bp, Artificial
  probe
  misc_feature (1)..(25): SEQ ID NO: 4950; WAN024ER6; Start 68; Stop 92
caataagagtcaatcctgttacatc

SEQ ID NO: 395290 - DNA, 25 bp, Artificial
  probe
  misc_feature (1)..(25): SEQ ID NO: 4950; WAN024ER6; Start 35; Stop 59
gagtaataccacaaacaacaccaac

SEQ ID NO: 395291 - DNA, 25 bp, Artificial
  probe
  misc_feature (1)..(25): SEQ ID NO: 4950; WAN024ER6; Start 19; Stop 43
gttgggtttgttgttggagtaatac

SEQ ID NO: 395292 - DNA, 25 bp, Artificial
  probe
  misc_feature (1)..(25): SEQ ID NO: 4950; WAN024ER6; Start 37; Stop 61
gtaataccacaaacaacaccaactg

SEQ ID NO: 395293 - DNA, 25 bp, Artificial
  probe
  misc_feature (1)..(25): SEQ ID NO: 4950; WAN024ER6; Start 18; Stop 42
tgttgggtttgttgttggagtaata

SEQ ID NO: 395294 - DNA, 25 bp, Artificial
  probe
  misc_feature (1)..(25): SEQ ID NO: 4950; WAN024ER6; Start 17; Stop 41
atgttgggtttgttgttggagtaat

SEQ ID NO: 395295 - DNA, 25 bp, Artificial
  probe
  misc_feature (1)..(25): SEQ ID NO: 4950; WAN024ER6; Start 34; Stop 58
ggagtaataccacaaacaacaccaa

SEQ ID NO: 395296 - DNA, 25 bp, Artificial
  probe
  misc_feature (1)..(25): SEQ ID NO: 4950; WAN024ER6; Start 36; Stop 60
agtaataccacaaacaacaccaact

SEQ ID NO: 395297 - DNA, 25 bp, Artificial
  probe
  misc_feature (1)..(25): SEQ ID NO: 4950; WAN024ER6; Start 16; Stop 40
gatgttgggtttgttgttggagtaa

SEQ ID NO: 395298 - DNA, 25 bp, Artificial
  probe
  misc_feature (1)..(25): SEQ ID NO: 4950; WAN024ER6; Start 55; Stop 79
ccaactggttcagcaataagagtca

SEQ ID NO: 395299 - DNA, 25 bp, Artificial
  probe
  misc_feature (1)..(25): SEQ ID NO: 4950; WAN024ER6; Start 292; Stop 316
aatttacgcatttcttcaagggcaa

SEQ ID NO: 395300 - DNA, 25 bp, Artificial
  probe
  misc_feature (1)..(25): SEQ ID NO: 4951; WAN024FTF; Start 689; Stop 713
ttataggtccttcagatgttccgat

SEQ ID NO: 395301 - DNA, 25 bp, Artificial
  probe
  misc_feature (1)..(25): SEQ ID NO: 4951; WAN024FTF; Start 688; Stop 712
attataggtccttcagatgttccga

SEQ ID NO: 395302 - DNA, 25 bp, Artificial
  probe
  misc_feature (1)..(25): SEQ ID NO: 4951; WAN024FTF; Start 687; Stop 711
cattataggtccttcagatgttccg

SEQ ID NO: 395303 - DNA, 25 bp, Artificial
  probe
  misc_feature (1)..(25): SEQ ID NO: 4951; WAN024FTF; Start 690; Stop 714
tataggtccttcagatgttccgatg

SEQ ID NO: 395304 - DNA, 25 bp, Artificial
  probe
  misc_feature (1)..(25): SEQ ID NO: 4951; WAN024FTF; Start 1081; Stop 1105
atgaagcaagatatgaacaacaatc

SEQ ID NO: 395305 - DNA, 25 bp, Artificial
  probe
  misc_feature (1)..(25): SEQ ID NO: 4951; WAN024FTF; Start 217; Stop 241
aatcaagttcatctatcgccagagg

SEQ ID NO: 395306 - DNA, 25 bp, Artificial
  probe
  misc_feature (1)..(25): SEQ ID NO: 4951; WAN024FTF; Start 1079; Stop 1103
ttatgaagcaagatatgaacaacaa

SEQ ID NO: 395307 - DNA, 25 bp, Artificial
  probe
  misc_feature (1)..(25): SEQ ID NO: 4951; WAN024FTF; Start 554; Stop 578
ttcttgaccactctcataaggaacg

SEQ ID NO: 395308 - DNA, 25 bp, Artificial
  probe
  misc_feature (1)..(25): SEQ ID NO: 4951; WAN024FTF; Start 559; Stop 583
gaccactctcataaggaacgtaata

SEQ ID NO: 395309 - DNA, 25 bp, Artificial
  probe
  misc_feature (1)..(25): SEQ ID NO: 4951; WAN024FTF; Start 88; Stop 112
ttagggaaatacgagattgttgagg

SEQ ID NO: 395310 - DNA, 25 bp, Artificial
  probe
  misc_feature (1)..(25): SEQ ID NO: 4951; WAN024FTF; Start 560; Stop 584
accactctcataaggaacgtaataa

SEQ ID NO: 395311 - DNA, 25 bp, Artificial
  probe
  misc_feature (1)..(25): SEQ ID NO: 4951; WAN024FTF; Start 1080; Stop 1104
tatgaagcaagatatgaacaacaat

SEQ ID NO: 395312 - DNA, 25 bp, Artificial
  probe
  misc_feature (1)..(25): SEQ ID NO: 4951; WAN024FTF; Start 1078; Stop 1102
attatgaagcaagatatgaacaaca

SEQ ID NO: 395313 - DNA, 25 bp, Artificial
  probe
  misc_feature (1)..(25): SEQ ID NO: 4951; WAN024FTF; Start 864; Stop 888
atgtatcggtcgtgatttaatggaa

SEQ ID NO: 395314 - DNA, 25 bp, Artificial
  probe
  misc_feature (1)..(25): SEQ ID NO: 4951; WAN024FTF; Start 818; Stop 842
aggcatttggaattgtatttgttga

SEQ ID NO: 395315 - DNA, 25 bp, Artificial
  probe
  misc_feature (1)..(25): SEQ ID NO: 4951; WAN024FTF; Start 816; Stop 840
tgaggcatttggaattgtatttgtt

SEQ ID NO: 395316 - DNA, 25 bp, Artificial
  probe
  misc_feature (1)..(25): SEQ ID NO: 4951; WAN024FTF; Start 815; Stop 839
ttgaggcatttggaattgtatttgt

SEQ ID NO: 395317 - DNA, 25 bp, Artificial
  probe
  misc_feature (1)..(25): SEQ ID NO: 4951; WAN024FTF; Start 817; Stop 841
gaggcatttggaattgtatttgttg

SEQ ID NO: 395318 - DNA, 25 bp, Artificial
  probe
  misc_feature (1)..(25): SEQ ID NO: 4951; WAN024FTF; Start 811; Stop 835
cgatttgaggcatttggaattgtat

SEQ ID NO: 395319 - DNA, 25 bp, Artificial
  probe
  misc_feature (1)..(25): SEQ ID NO: 4951; WAN024FTF; Start 865; Stop 889
tgtatcggtcgtgatttaatggaaa

SEQ ID NO: 395320 - DNA, 25 bp, Artificial
  probe
  misc_feature (1)..(25): SEQ ID NO: 4951; WAN024FTF; Start 527; Stop 551
gggcaggaacaaatatgaataatct

SEQ ID NO: 395321 - DNA, 25 bp, Artificial
  probe
  misc_feature (1)..(25): SEQ ID NO: 4951; WAN024FTF; Start 89; Stop 113
tagggaaatacgagattgttgagga

SEQ ID NO: 395322 - DNA, 25 bp, Artificial
  probe
  misc_feature (1)..(25): SEQ ID NO: 4951; WAN024FTF; Start 819; Stop 843
ggcatttggaattgtatttgttgaa

SEQ ID NO: 395323 - DNA, 25 bp, Artificial
  probe
  misc_feature (1)..(25): SEQ ID NO: 4951; WAN024FTF; Start 561; Stop 585
ccactctcataaggaacgtaataag

SEQ ID NO: 395324 - DNA, 25 bp, Artificial
  probe
  misc_feature (1)..(25): SEQ ID NO: 4951; WAN024FTF; Start 151; Stop 175
aaagtgcttgttcgtttaggtatta

SEQ ID NO: 395325 - DNA, 25 bp, Artificial
  probe
  misc_feature (1)..(25): SEQ ID NO: 4951; WAN024FTF; Start 87; Stop 111
tttagggaaatacgagattgttgag

SEQ ID NO: 395326 - DNA, 25 bp, Artificial
  probe
  misc_feature (1)..(25): SEQ ID NO: 4951; WAN024FTF; Start 152; Stop 176
aagtgcttgttcgtttaggtattaa

SEQ ID NO: 395327 - DNA, 25 bp, Artificial
  probe
  misc_feature (1)..(25): SEQ ID NO: 4951; WAN024FTF; Start 814; Stop 838
tttgaggcatttggaattgtatttg

SEQ ID NO: 395328 - DNA, 25 bp, Artificial
  probe
  misc_feature (1)..(25): SEQ ID NO: 4951; WAN024FTF; Start 150; Stop 174
caaagtgcttgttcgtttaggtatt

SEQ ID NO: 395329 - DNA, 25 bp, Artificial
  probe
  misc_feature (1)..(25): SEQ ID NO: 4951; WAN024FTF; Start 1082; Stop 1106
tgaagcaagatatgaacaacaatct

SEQ ID NO: 395330 - DNA, 25 bp, Artificial
  probe
  misc_feature (1)..(25): SEQ ID NO: 4951; WAN024FTF; Start 216; Stop 240
aaatcaagttcatctatcgccagag

SEQ ID NO: 395331 - DNA, 25 bp, Artificial
  probe
  misc_feature (1)..(25): SEQ ID NO: 4951; WAN024FTF; Start 26; Stop 50
ttcataacaaagaacaactgacctg

SEQ ID NO: 395332 - DNA, 25 bp, Artificial
  probe
  misc_feature (1)..(25): SEQ ID NO: 4951; WAN024FTF; Start 553; Stop 577
tttcttgaccactctcataaggaac

SEQ ID NO: 395333 - DNA, 25 bp, Artificial
  probe
  misc_feature (1)..(25): SEQ ID NO: 4952; WAN024GDN; Start 95; Stop 119
acttcttgaccatatttctctaccg

SEQ ID NO: 395334 - DNA, 25 bp, Artificial
  probe
  misc_feature (1)..(25): SEQ ID NO: 4952; WAN024GDN; Start 102; Stop 126
gaccatatttctctaccgcttcttg

SEQ ID NO: 395335 - DNA, 25 bp, Artificial
  probe
  misc_feature (1)..(25): SEQ ID NO: 4952; WAN024GDN; Start 99; Stop 123
cttgaccatatttctctaccgcttc

SEQ ID NO: 395336 - DNA, 25 bp, Artificial
  probe
  misc_feature (1)..(25): SEQ ID NO: 4952; WAN024GDN; Start 96; Stop 120
cttcttgaccatatttctctaccgc

SEQ ID NO: 395337 - DNA, 25 bp, Artificial
  probe
  misc_feature (1)..(25): SEQ ID NO: 4952; WAN024GDN; Start 94; Stop 118
gacttcttgaccatatttctctacc

SEQ ID NO: 395338 - DNA, 25 bp, Artificial
  probe
  misc_feature (1)..(25): SEQ ID NO: 4952; WAN024GDN; Start 101; Stop 125
tgaccatatttctctaccgcttctt

SEQ ID NO: 395339 - DNA, 25 bp, Artificial
  probe
  misc_feature (1)..(25): SEQ ID NO: 4952; WAN024GDN; Start 100; Stop 124
ttgaccatatttctctaccgcttct

SEQ ID NO: 395340 - DNA, 25 bp, Artificial
  probe
  misc_feature (1)..(25): SEQ ID NO: 4952; WAN024GDN; Start 98; Stop 122
tcttgaccatatttctctaccgctt

SEQ ID NO: 395341 - DNA, 25 bp, Artificial
  probe
  misc_feature (1)..(25): SEQ ID NO: 4952; WAN024GDN; Start 97; Stop 121
ttcttgaccatatttctctaccgct

SEQ ID NO: 395342 - DNA, 25 bp, Artificial
  probe
  misc_feature (1)..(25): SEQ ID NO: 4952; WAN024GDN; Start 93; Stop 117
tgacttcttgaccatatttctctac

SEQ ID NO: 395343 - DNA, 25 bp, Artificial
  probe
  misc_feature (1)..(25): SEQ ID NO: 4952; WAN024GDN; Start 90; Stop 114
ccatgacttcttgaccatatttctc

SEQ ID NO: 395344 - DNA, 25 bp, Artificial
  probe
  misc_feature (1)..(25): SEQ ID NO: 4952; WAN024GDN; Start 89; Stop 113
cccatgacttcttgaccatatttct

SEQ ID NO: 395345 - DNA, 25 bp, Artificial
  probe
  misc_feature (1)..(25): SEQ ID NO: 4952; WAN024GDN; Start 88; Stop 112
tcccatgacttcttgaccatatttc

SEQ ID NO: 395346 - DNA, 25 bp, Artificial
  probe
  misc_feature (1)..(25): SEQ ID NO: 4952; WAN024GDN; Start 227; Stop 251
gaaatcaaggtatccagatgttgcc

SEQ ID NO: 395347 - DNA, 25 bp, Artificial
  probe
  misc_feature (1)..(25): SEQ ID NO: 4952; WAN024GDN; Start 91; Stop 115
catgacttcttgaccatatttctct

SEQ ID NO: 395348 - DNA, 25 bp, Artificial
  probe
  misc_feature (1)..(25): SEQ ID NO: 4952; WAN024GDN; Start 19; Stop 43
agtttgaaagacttggttaaaggcg

SEQ ID NO: 395349 - DNA, 25 bp, Artificial
  probe
  misc_feature (1)..(25): SEQ ID NO: 4952; WAN024GDN; Start 87; Stop 111
gtcccatgacttcttgaccatattt

SEQ ID NO: 395350 - DNA, 25 bp, Artificial
  probe
  misc_feature (1)..(25): SEQ ID NO: 4952; WAN024GDN; Start 92; Stop 116
atgacttcttgaccatatttctcta

SEQ ID NO: 395351 - DNA, 25 bp, Artificial
  probe
  misc_feature (1)..(25): SEQ ID NO: 4952; WAN024GDN; Start 105; Stop 129
catatttctctaccgcttcttggtg

SEQ ID NO: 395352 - DNA, 25 bp, Artificial
  probe
  misc_feature (1)..(25): SEQ ID NO: 4952; WAN024GDN; Start 226; Stop 250
ggaaatcaaggtatccagatgttgc

SEQ ID NO: 395353 - DNA, 25 bp, Artificial
  probe
  misc_feature (1)..(25): SEQ ID NO: 4952; WAN024GDN; Start 86; Stop 110
tgtcccatgacttcttgaccatatt

SEQ ID NO: 395354 - DNA, 25 bp, Artificial
  probe
  misc_feature (1)..(25): SEQ ID NO: 4952; WAN024GDN; Start 85; Stop 109
ttgtcccatgacttcttgaccatat

SEQ ID NO: 395355 - DNA, 25 bp, Artificial
  probe
  misc_feature (1)..(25): SEQ ID NO: 4952; WAN024GDN; Start 228; Stop 252
aaatcaaggtatccagatgttgcct

SEQ ID NO: 395356 - DNA, 25 bp, Artificial
  probe
  misc_feature (1)..(25): SEQ ID NO: 4952; WAN024GDN; Start 20; Stop 44
gtttgaaagacttggttaaaggcgg

SEQ ID NO: 395357 - DNA, 25 bp, Artificial
  probe
  misc_feature (1)..(25): SEQ ID NO: 4952; WAN024GDN; Start 84; Stop 108
cttgtcccatgacttcttgaccata

SEQ ID NO: 395358 - DNA, 25 bp, Artificial
  probe
  misc_feature (1)..(25): SEQ ID NO: 4952; WAN024GDN; Start 106; Stop 130
atatttctctaccgcttcttggtgg

SEQ ID NO: 395359 - DNA, 25 bp, Artificial
  probe
  misc_feature (1)..(25): SEQ ID NO: 4952; WAN024GDN; Start 104; Stop 128
ccatatttctctaccgcttcttggt

SEQ ID NO: 395360 - DNA, 25 bp, Artificial
  probe
  misc_feature (1)..(25): SEQ ID NO: 4952; WAN024GDN; Start 103; Stop 127
accatatttctctaccgcttcttgg

SEQ ID NO: 395361 - DNA, 25 bp, Artificial
  probe
  misc_feature (1)..(25): SEQ ID NO: 4952; WAN024GDN; Start 18; Stop 42
aagtttgaaagacttggttaaaggc

SEQ ID NO: 395362 - DNA, 25 bp, Artificial
  probe
  misc_feature (1)..(25): SEQ ID NO: 4952; WAN024GDN; Start 143; Stop 167
tcttgatagctaaatcccgtgaatt

SEQ ID NO: 395363 - DNA, 25 bp, Artificial
  probe
  misc_feature (1)..(25): SEQ ID NO: 4952; WAN024GDN; Start 142; Stop 166
gtcttgatagctaaatcccgtgaat

SEQ ID NO: 395364 - DNA, 25 bp, Artificial
  probe
  misc_feature (1)..(25): SEQ ID NO: 4952; WAN024GDN; Start 139; Stop 163
attgtcttgatagctaaatcccgtg

SEQ ID NO: 395365 - DNA, 25 bp, Artificial
  probe
  misc_feature (1)..(25): SEQ ID NO: 4952; WAN024GDN; Start 9; Stop 33
tttgtgccaaagtttgaaagacttg

SEQ ID NO: 395366 - DNA, 25 bp, Artificial
  probe
  misc_feature (1)..(25): SEQ ID NO: 4953; WAN024FBY; Start 96; Stop 120
aattcggtttaacagtcgcagtcat

SEQ ID NO: 395367 - DNA, 25 bp, Artificial
  probe
  misc_feature (1)..(25): SEQ ID NO: 4953; WAN024FBY; Start 95; Stop 119
aaattcggtttaacagtcgcagtca

SEQ ID NO: 395368 - DNA, 25 bp, Artificial
  probe
  misc_feature (1)..(25): SEQ ID NO: 4953; WAN024FBY; Start 116; Stop 140
gtcatgctggtattttcttcaatca

SEQ ID NO: 395369 - DNA, 25 bp, Artificial
  probe
  misc_feature (1)..(25): SEQ ID NO: 4953; WAN024FBY; Start 115; Stop 139
agtcatgctggtattttcttcaatc

SEQ ID NO: 395370 - DNA, 25 bp, Artificial
  probe
  misc_feature (1)..(25): SEQ ID NO: 4953; WAN024FBY; Start 114; Stop 138
cagtcatgctggtattttcttcaat

SEQ ID NO: 395371 - DNA, 25 bp, Artificial
  probe
  misc_feature (1)..(25): SEQ ID NO: 4953; WAN024FBY; Start 117; Stop 141
tcatgctggtattttcttcaatcag

SEQ ID NO: 395372 - DNA, 25 bp, Artificial
  probe
  misc_feature (1)..(25): SEQ ID NO: 4953; WAN024FBY; Start 97; Stop 121
attcggtttaacagtcgcagtcatg

SEQ ID NO: 395373 - DNA, 25 bp, Artificial
  probe
  misc_feature (1)..(25): SEQ ID NO: 4953; WAN024FBY; Start 94; Stop 118
aaaattcggtttaacagtcgcagtc

SEQ ID NO: 395374 - DNA, 25 bp, Artificial
  probe
  misc_feature (1)..(25): SEQ ID NO: 4953; WAN024FBY; Start 93; Stop 117
caaaattcggtttaacagtcgcagt

SEQ ID NO: 395375 - DNA, 25 bp, Artificial
  probe
  misc_feature (1)..(25): SEQ ID NO: 4953; WAN024FBY; Start 3; Stop 27
gaagcaaactttcagtcaccgtacc

SEQ ID NO: 395376 - DNA, 25 bp, Artificial
  probe
  misc_feature (1)..(25): SEQ ID NO: 4953; WAN024FBY; Start 1; Stop 25
ttgaagcaaactttcagtcaccgta

SEQ ID NO: 395377 - DNA, 25 bp, Artificial
  probe
  misc_feature (1)..(25): SEQ ID NO: 4953; WAN024FBY; Start 92; Stop 116
ccaaaattcggtttaacagtcgcag

SEQ ID NO: 395378 - DNA, 25 bp, Artificial
  probe
  misc_feature (1)..(25): SEQ ID NO: 4953; WAN024FBY; Start 105; Stop 129
taacagtcgcagtcatgctggtatt

SEQ ID NO: 395379 - DNA, 25 bp, Artificial
  probe
  misc_feature (1)..(25): SEQ ID NO: 4953; WAN024FBY; Start 104; Stop 128
ttaacagtcgcagtcatgctggtat

SEQ ID NO: 395380 - DNA, 25 bp, Artificial
  probe
  misc_feature (1)..(25): SEQ ID NO: 4953; WAN024FBY; Start 2; Stop 26
tgaagcaaactttcagtcaccgtac

SEQ ID NO: 395381 - DNA, 25 bp, Artificial
  probe
  misc_feature (1)..(25): SEQ ID NO: 4953; WAN024FBY; Start 113; Stop 137
gcagtcatgctggtattttcttcaa

SEQ ID NO: 395382 - DNA, 25 bp, Artificial
  probe
  misc_feature (1)..(25): SEQ ID NO: 4953; WAN024FBY; Start 90; Stop 114
tcccaaaattcggtttaacagtcgc

SEQ ID NO: 395383 - DNA, 25 bp, Artificial
  probe
  misc_feature (1)..(25): SEQ ID NO: 4953; WAN024FBY; Start 231; Stop 255
ctggactataagacagacccagtaa

SEQ ID NO: 395384 - DNA, 25 bp, Artificial
  probe
  misc_feature (1)..(25): SEQ ID NO: 4953; WAN024FBY; Start 91; Stop 115
cccaaaattcggtttaacagtcgca

SEQ ID NO: 395385 - DNA, 25 bp, Artificial
  probe
  misc_feature (1)..(25): SEQ ID NO: 4953; WAN024FBY; Start 103; Stop 127
tttaacagtcgcagtcatgctggta

SEQ ID NO: 395386 - DNA, 25 bp, Artificial
  probe
  misc_feature (1)..(25): SEQ ID NO: 4953; WAN024FBY; Start 230; Stop 254
gctggactataagacagacccagta

SEQ ID NO: 395387 - DNA, 25 bp, Artificial
  probe
  misc_feature (1)..(25): SEQ ID NO: 4953; WAN024FBY; Start 111; Stop 135
tcgcagtcatgctggtattttcttc

SEQ ID NO: 395388 - DNA, 25 bp, Artificial
  probe
  misc_feature (1)..(25): SEQ ID NO: 4953; WAN024FBY; Start 106; Stop 130
aacagtcgcagtcatgctggtattt

SEQ ID NO: 395389 - DNA, 25 bp, Artificial
  probe
  misc_feature (1)..(25): SEQ ID NO: 4953; WAN024FBY; Start 112; Stop 136
cgcagtcatgctggtattttcttca

SEQ ID NO: 395390 - DNA, 25 bp, Artificial
  probe
  misc_feature (1)..(25): SEQ ID NO: 4953; WAN024FBY; Start 110; Stop 134
gtcgcagtcatgctggtattttctt

SEQ ID NO: 395391 - DNA, 25 bp, Artificial
  probe
  misc_feature (1)..(25): SEQ ID NO: 4953; WAN024FBY; Start 108; Stop 132
cagtcgcagtcatgctggtattttc

SEQ ID NO: 395392 - DNA, 25 bp, Artificial
  probe
  misc_feature (1)..(25): SEQ ID NO: 4953; WAN024FBY; Start 109; Stop 133
agtcgcagtcatgctggtattttct

SEQ ID NO: 395393 - DNA, 25 bp, Artificial
  probe
  misc_feature (1)..(25): SEQ ID NO: 4953; WAN024FBY; Start 107; Stop 131
acagtcgcagtcatgctggtatttt

SEQ ID NO: 395394 - DNA, 25 bp, Artificial
  probe
  misc_feature (1)..(25): SEQ ID NO: 4954; WAN024D3S; Start 56; Stop 80
ttgccatagagttgataccacttga

SEQ ID NO: 395395 - DNA, 25 bp, Artificial
  probe
  misc_feature (1)..(25): SEQ ID NO: 4954; WAN024D3S; Start 57; Stop 81
tgccatagagttgataccacttgag

SEQ ID NO: 395396 - DNA, 25 bp, Artificial
  probe
  misc_feature (1)..(25): SEQ ID NO: 4954; WAN024D3S; Start 59; Stop 83
ccatagagttgataccacttgaggt

SEQ ID NO: 395397 - DNA, 25 bp, Artificial
  probe
  misc_feature (1)..(25): SEQ ID NO: 4954; WAN024D3S; Start 58; Stop 82
gccatagagttgataccacttgagg

SEQ ID NO: 395398 - DNA, 25 bp, Artificial
  probe
  misc_feature (1)..(25): SEQ ID NO: 4954; WAN024D3S; Start 54; Stop 78
atttgccatagagttgataccactt

SEQ ID NO: 395399 - DNA, 25 bp, Artificial
  probe
  misc_feature (1)..(25): SEQ ID NO: 4954; WAN024D3S; Start 53; Stop 77
aatttgccatagagttgataccact

SEQ ID NO: 395400 - DNA, 25 bp, Artificial
  probe
  misc_feature (1)..(25): SEQ ID NO: 4954; WAN024D3S; Start 193; Stop 217
tacaaagttcatcgcttcttcgttt

SEQ ID NO: 395401 - DNA, 25 bp, Artificial
  probe
  misc_feature (1)..(25): SEQ ID NO: 4954; WAN024D3S; Start 192; Stop 216
ttacaaagttcatcgcttcttcgtt

SEQ ID NO: 395402 - DNA, 25 bp, Artificial
  probe
  misc_feature (1)..(25): SEQ ID NO: 4954; WAN024D3S; Start 191; Stop 215
tttacaaagttcatcgcttcttcgt

SEQ ID NO: 395403 - DNA, 25 bp, Artificial
  probe
  misc_feature (1)..(25): SEQ ID NO: 4954; WAN024D3S; Start 55; Stop 79
tttgccatagagttgataccacttg

SEQ ID NO: 395404 - DNA, 25 bp, Artificial
  probe
  misc_feature (1)..(25): SEQ ID NO: 4954; WAN024D3S; Start 159; Stop 183
caaagaagtccatgtatttaccgat

SEQ ID NO: 395405 - DNA, 25 bp, Artificial
  probe
  misc_feature (1)..(25): SEQ ID NO: 4954; WAN024D3S; Start 162; Stop 186
agaagtccatgtatttaccgatgag

SEQ ID NO: 395406 - DNA, 25 bp, Artificial
  probe
  misc_feature (1)..(25): SEQ ID NO: 4954; WAN024D3S; Start 161; Stop 185
aagaagtccatgtatttaccgatga

SEQ ID NO: 395407 - DNA, 25 bp, Artificial
  probe
  misc_feature (1)..(25): SEQ ID NO: 4954; WAN024D3S; Start 118; Stop 142
gtattcgtcagtaccaaagttgaaa

SEQ ID NO: 395408 - DNA, 25 bp, Artificial
  probe
  misc_feature (1)..(25): SEQ ID NO: 4954; WAN024D3S; Start 160; Stop 184
aaagaagtccatgtatttaccgatg

SEQ ID NO: 395409 - DNA, 25 bp, Artificial
  probe
  misc_feature (1)..(25): SEQ ID NO: 4954; WAN024D3S; Start 163; Stop 187
gaagtccatgtatttaccgatgagg

SEQ ID NO: 395410 - DNA, 25 bp, Artificial
  probe
  misc_feature (1)..(25): SEQ ID NO: 4954; WAN024D3S; Start 158; Stop 182
gcaaagaagtccatgtatttaccga

SEQ ID NO: 395411 - DNA, 25 bp, Artificial
  probe
  misc_feature (1)..(25): SEQ ID NO: 4954; WAN024D3S; Start 117; Stop 141
cgtattcgtcagtaccaaagttgaa

SEQ ID NO: 395412 - DNA, 25 bp, Artificial
  probe
  misc_feature (1)..(25): SEQ ID NO: 4954; WAN024D3S; Start 52; Stop 76
aaatttgccatagagttgataccac

SEQ ID NO: 395413 - DNA, 25 bp, Artificial
  probe
  misc_feature (1)..(25): SEQ ID NO: 4954; WAN024D3S; Start 64; Stop 88
gagttgataccacttgaggtagtac

SEQ ID NO: 395414 - DNA, 25 bp, Artificial
  probe
  misc_feature (1)..(25): SEQ ID NO: 4954; WAN024D3S; Start 63; Stop 87
agagttgataccacttgaggtagta

SEQ ID NO: 395415 - DNA, 25 bp, Artificial
  probe
  misc_feature (1)..(25): SEQ ID NO: 4954; WAN024D3S; Start 62; Stop 86
tagagttgataccacttgaggtagt

SEQ ID NO: 395416 - DNA, 25 bp, Artificial
  probe
  misc_feature (1)..(25): SEQ ID NO: 4954; WAN024D3S; Start 156; Stop 180
ctgcaaagaagtccatgtatttacc

SEQ ID NO: 395417 - DNA, 25 bp, Artificial
  probe
  misc_feature (1)..(25): SEQ ID NO: 4954; WAN024D3S; Start 155; Stop 179
cctgcaaagaagtccatgtatttac

SEQ ID NO: 395418 - DNA, 25 bp, Artificial
  probe
  misc_feature (1)..(25): SEQ ID NO: 4954; WAN024D3S; Start 154; Stop 178
acctgcaaagaagtccatgtattta

SEQ ID NO: 395419 - DNA, 25 bp, Artificial
  probe
  misc_feature (1)..(25): SEQ ID NO: 4954; WAN024D3S; Start 153; Stop 177
tacctgcaaagaagtccatgtattt

SEQ ID NO: 395420 - DNA, 25 bp, Artificial
  probe
  misc_feature (1)..(25): SEQ ID NO: 4954; WAN024D3S; Start 152; Stop 176
ttacctgcaaagaagtccatgtatt

SEQ ID NO: 395421 - DNA, 25 bp, Artificial
  probe
  misc_feature (1)..(25): SEQ ID NO: 4954; WAN024D3S; Start 151; Stop 175
tttacctgcaaagaagtccatgtat

SEQ ID NO: 395422 - DNA, 25 bp, Artificial
  probe
  misc_feature (1)..(25): SEQ ID NO: 4954; WAN024D3S; Start 60; Stop 84
catagagttgataccacttgaggta

SEQ ID NO: 395423 - DNA, 25 bp, Artificial
  probe
  misc_feature (1)..(25): SEQ ID NO: 4954; WAN024D3S; Start 61; Stop 85
atagagttgataccacttgaggtag

SEQ ID NO: 395424 - DNA, 25 bp, Artificial
  probe
  misc_feature (1)..(25): SEQ ID NO: 4954; WAN024D3S; Start 164; Stop 188
aagtccatgtatttaccgatgaggg

SEQ ID NO: 395425 - DNA, 25 bp, Artificial
  probe
  misc_feature (1)..(25): SEQ ID NO: 4954; WAN024D3S; Start 67; Stop 91
ttgataccacttgaggtagtaccag

SEQ ID NO: 395426 - DNA, 25 bp, Artificial
  probe
  misc_feature (1)..(25): SEQ ID NO: 4954; WAN024D3S; Start 65; Stop 89
agttgataccacttgaggtagtacc

SEQ ID NO: 395427 - DNA, 25 bp, Artificial
  probe
  misc_feature (1)..(25): SEQ ID NO: 4955; WAN024CGW; Start 75; Stop 99
tgtaaatagagccttcactacttcc

SEQ ID NO: 395428 - DNA, 25 bp, Artificial
  probe
  misc_feature (1)..(25): SEQ ID NO: 4955; WAN024CGW; Start 76; Stop 100
gtaaatagagccttcactacttccg

SEQ ID NO: 395429 - DNA, 25 bp, Artificial
  probe
  misc_feature (1)..(25): SEQ ID NO: 4955; WAN024CGW; Start 133; Stop 157
gcttcaaatctgtcaatggtatcat

SEQ ID NO: 395430 - DNA, 25 bp, Artificial
  probe
  misc_feature (1)..(25): SEQ ID NO: 4955; WAN024CGW; Start 140; Stop 164
atctgtcaatggtatcatcagctag

SEQ ID NO: 395431 - DNA, 25 bp, Artificial
  probe
  misc_feature (1)..(25): SEQ ID NO: 4955; WAN024CGW; Start 69; Stop 93
tcaatctgtaaatagagccttcact

SEQ ID NO: 395432 - DNA, 25 bp, Artificial
  probe
  misc_feature (1)..(25): SEQ ID NO: 4955; WAN024CGW; Start 68; Stop 92
gtcaatctgtaaatagagccttcac

SEQ ID NO: 395433 - DNA, 25 bp, Artificial
  probe
  misc_feature (1)..(25): SEQ ID NO: 4955; WAN024CGW; Start 67; Stop 91
agtcaatctgtaaatagagccttca

SEQ ID NO: 395434 - DNA, 25 bp, Artificial
  probe
  misc_feature (1)..(25): SEQ ID NO: 4955; WAN024CGW; Start 139; Stop 163
aatctgtcaatggtatcatcagcta

SEQ ID NO: 395435 - DNA, 25 bp, Artificial
  probe
  misc_feature (1)..(25): SEQ ID NO: 4955; WAN024CGW; Start 74; Stop 98
ctgtaaatagagccttcactacttc

SEQ ID NO: 395436 - DNA, 25 bp, Artificial
  probe
  misc_feature (1)..(25): SEQ ID NO: 4955; WAN024CGW; Start 142; Stop 166
ctgtcaatggtatcatcagctagtc

SEQ ID NO: 395437 - DNA, 25 bp, Artificial
  probe
  misc_feature (1)..(25): SEQ ID NO: 4955; WAN024CGW; Start 141; Stop 165
tctgtcaatggtatcatcagctagt

SEQ ID NO: 395438 - DNA, 25 bp, Artificial
  probe
  misc_feature (1)..(25): SEQ ID NO: 4955; WAN024CGW; Start 73; Stop 97
tctgtaaatagagccttcactactt

SEQ ID NO: 395439 - DNA, 25 bp, Artificial
  probe
  misc_feature (1)..(25): SEQ ID NO: 4955; WAN024CGW; Start 11; Stop 35
cttcaacaaacactgactccaattt

SEQ ID NO: 395440 - DNA, 25 bp, Artificial
  probe
  misc_feature (1)..(25): SEQ ID NO: 4955; WAN024CGW; Start 72; Stop 96
atctgtaaatagagccttcactact

SEQ ID NO: 395441 - DNA, 25 bp, Artificial
  probe
  misc_feature (1)..(25): SEQ ID NO: 4955; WAN024CGW; Start 13; Stop 37
tcaacaaacactgactccaatttaa

SEQ ID NO: 395442 - DNA, 25 bp, Artificial
  probe
  misc_feature (1)..(25): SEQ ID NO: 4955; WAN024CGW; Start 12; Stop 36
ttcaacaaacactgactccaattta

SEQ ID NO: 395443 - DNA, 25 bp, Artificial
  probe
  misc_feature (1)..(25): SEQ ID NO: 4955; WAN024CGW; Start 135; Stop 159
ttcaaatctgtcaatggtatcatca

SEQ ID NO: 395444 - DNA, 25 bp, Artificial
  probe
  misc_feature (1)..(25): SEQ ID NO: 4955; WAN024CGW; Start 66; Stop 90
aagtcaatctgtaaatagagccttc

SEQ ID NO: 395445 - DNA, 25 bp, Artificial
  probe
  misc_feature (1)..(25): SEQ ID NO: 4955; WAN024CGW; Start 10; Stop 34
tcttcaacaaacactgactccaatt

SEQ ID NO: 395446 - DNA, 25 bp, Artificial
  probe
  misc_feature (1)..(25): SEQ ID NO: 4955; WAN024CGW; Start 145; Stop 169
tcaatggtatcatcagctagtcgtg

SEQ ID NO: 395447 - DNA, 25 bp, Artificial
  probe
  misc_feature (1)..(25): SEQ ID NO: 4955; WAN024CGW; Start 144; Stop 168
gtcaatggtatcatcagctagtcgt

SEQ ID NO: 395448 - DNA, 25 bp, Artificial
  probe
  misc_feature (1)..(25): SEQ ID NO: 4955; WAN024CGW; Start 143; Stop 167
tgtcaatggtatcatcagctagtcg

SEQ ID NO: 395449 - DNA, 25 bp, Artificial
  probe
  misc_feature (1)..(25): SEQ ID NO: 4955; WAN024CGW; Start 137; Stop 161
caaatctgtcaatggtatcatcagc

SEQ ID NO: 395450 - DNA, 25 bp, Artificial
  probe
  misc_feature (1)..(25): SEQ ID NO: 4955; WAN024CGW; Start 134; Stop 158
cttcaaatctgtcaatggtatcatc

SEQ ID NO: 395451 - DNA, 25 bp, Artificial
  probe
  misc_feature (1)..(25): SEQ ID NO: 4955; WAN024CGW; Start 65; Stop 89
aaagtcaatctgtaaatagagcctt

SEQ ID NO: 395452 - DNA, 25 bp, Artificial
  probe
  misc_feature (1)..(25): SEQ ID NO: 4955; WAN024CGW; Start 71; Stop 95
aatctgtaaatagagccttcactac

SEQ ID NO: 395453 - DNA, 25 bp, Artificial
  probe
  misc_feature (1)..(25): SEQ ID NO: 4955; WAN024CGW; Start 70; Stop 94
caatctgtaaatagagccttcacta

SEQ ID NO: 395454 - DNA, 25 bp, Artificial
  probe
  misc_feature (1)..(25): SEQ ID NO: 4955; WAN024CGW; Start 136; Stop 160
tcaaatctgtcaatggtatcatcag

SEQ ID NO: 395455 - DNA, 25 bp, Artificial
  probe
  misc_feature (1)..(25): SEQ ID NO: 4955; WAN024CGW; Start 131; Stop 155
gagcttcaaatctgtcaatggtatc

SEQ ID NO: 395456 - DNA, 25 bp, Artificial
  probe
  misc_feature (1)..(25): SEQ ID NO: 4955; WAN024CGW; Start 132; Stop 156
agcttcaaatctgtcaatggtatca

SEQ ID NO: 395457 - DNA, 25 bp, Artificial
  probe
  misc_feature (1)..(25): SEQ ID NO: 4955; WAN024CGW; Start 9; Stop 33
gtcttcaacaaacactgactccaat

SEQ ID NO: 395458 - DNA, 25 bp, Artificial
  probe
  misc_feature (1)..(25): SEQ ID NO: 4955; WAN024CGW; Start 14; Stop 38
caacaaacactgactccaatttaaa

SEQ ID NO: 395459 - DNA, 25 bp, Artificial
  probe
  misc_feature (1)..(25): SEQ ID NO: 4955; WAN024CGW; Start 146; Stop 170
caatggtatcatcagctagtcgtgg

SEQ ID NO: 395460 - DNA, 25 bp, Artificial
  probe
  misc_feature (1)..(25): SEQ ID NO: 4956; WAN024ET4; Start 76; Stop 100
agattattcttcaaaatcgaagcca

SEQ ID NO: 395461 - DNA, 25 bp, Artificial
  probe
  misc_feature (1)..(25): SEQ ID NO: 4956; WAN024ET4; Start 75; Stop 99
cagattattcttcaaaatcgaagcc

SEQ ID NO: 395462 - DNA, 25 bp, Artificial
  probe
  misc_feature (1)..(25): SEQ ID NO: 4956; WAN024ET4; Start 77; Stop 101
gattattcttcaaaatcgaagccat

SEQ ID NO: 395463 - DNA, 25 bp, Artificial
  probe
  misc_feature (1)..(25): SEQ ID NO: 4956; WAN024ET4; Start 74; Stop 98
tcagattattcttcaaaatcgaagc

SEQ ID NO: 395464 - DNA, 25 bp, Artificial
  probe
  misc_feature (1)..(25): SEQ ID NO: 4956; WAN024ET4; Start 81; Stop 105
attcttcaaaatcgaagccatataa

SEQ ID NO: 395465 - DNA, 25 bp, Artificial
  probe
  misc_feature (1)..(25): SEQ ID NO: 4956; WAN024ET4; Start 79; Stop 103
ttattcttcaaaatcgaagccatat

SEQ ID NO: 395466 - DNA, 25 bp, Artificial
  probe
  misc_feature (1)..(25): SEQ ID NO: 4956; WAN024ET4; Start 78; Stop 102
attattcttcaaaatcgaagccata

SEQ ID NO: 395467 - DNA, 25 bp, Artificial
  probe
  misc_feature (1)..(25): SEQ ID NO: 4956; WAN024ET4; Start 80; Stop 104
tattcttcaaaatcgaagccatata

SEQ ID NO: 395468 - DNA, 25 bp, Artificial
  probe
  misc_feature (1)..(25): SEQ ID NO: 4956; WAN024ET4; Start 73; Stop 97
atcagattattcttcaaaatcgaag

SEQ ID NO: 395469 - DNA, 25 bp, Artificial
  probe
  misc_feature (1)..(25): SEQ ID NO: 4957; WAN024GHN; Start 129; Stop 153
cgatgtagtggtagttagtgttgaa

SEQ ID NO: 395470 - DNA, 25 bp, Artificial
  probe
  misc_feature (1)..(25): SEQ ID NO: 4957; WAN024GHN; Start 123; Stop 147
taggaacgatgtagtggtagttagt

SEQ ID NO: 395471 - DNA, 25 bp, Artificial
  probe
  misc_feature (1)..(25): SEQ ID NO: 4957; WAN024GHN; Start 126; Stop 150
gaacgatgtagtggtagttagtgtt

SEQ ID NO: 395472 - DNA, 25 bp, Artificial
  probe
  misc_feature (1)..(25): SEQ ID NO: 4957; WAN024GHN; Start 128; Stop 152
acgatgtagtggtagttagtgttga

SEQ ID NO: 395473 - DNA, 25 bp, Artificial
  probe
  misc_feature (1)..(25): SEQ ID NO: 4957; WAN024GHN; Start 127; Stop 151
aacgatgtagtggtagttagtgttg

SEQ ID NO: 395474 - DNA, 25 bp, Artificial
  probe
  misc_feature (1)..(25): SEQ ID NO: 4957; WAN024GHN; Start 122; Stop 146
ttaggaacgatgtagtggtagttag

SEQ ID NO: 395475 - DNA, 25 bp, Artificial
  probe
  misc_feature (1)..(25): SEQ ID NO: 4957; WAN024GHN; Start 130; Stop 154
gatgtagtggtagttagtgttgaac

SEQ ID NO: 395476 - DNA, 25 bp, Artificial
  probe
  misc_feature (1)..(25): SEQ ID NO: 4957; WAN024GHN; Start 124; Stop 148
aggaacgatgtagtggtagttagtg

SEQ ID NO: 395477 - DNA, 25 bp, Artificial
  probe
  misc_feature (1)..(25): SEQ ID NO: 4957; WAN024GHN; Start 125; Stop 149
ggaacgatgtagtggtagttagtgt

SEQ ID NO: 395478 - DNA, 25 bp, Artificial
  probe
  misc_feature (1)..(25): SEQ ID NO: 4957; WAN024GHN; Start 131; Stop 155
atgtagtggtagttagtgttgaacc

SEQ ID NO: 395479 - DNA, 25 bp, Artificial
  probe
  misc_feature (1)..(25): SEQ ID NO: 4957; WAN024GHN; Start 119; Stop 143
aatttaggaacgatgtagtggtagt

SEQ ID NO: 395480 - DNA, 25 bp, Artificial
  probe
  misc_feature (1)..(25): SEQ ID NO: 4957; WAN024GHN; Start 120; Stop 144
atttaggaacgatgtagtggtagtt

SEQ ID NO: 395481 - DNA, 25 bp, Artificial
  probe
  misc_feature (1)..(25): SEQ ID NO: 4957; WAN024GHN; Start 121; Stop 145
tttaggaacgatgtagtggtagtta

SEQ ID NO: 395482 - DNA, 25 bp, Artificial
  probe
  misc_feature (1)..(25): SEQ ID NO: 4957; WAN024GHN; Start 33; Stop 57
gacgagtgttcaatccaagttcttt

SEQ ID NO: 395483 - DNA, 25 bp, Artificial
  probe
  misc_feature (1)..(25): SEQ ID NO: 4957; WAN024GHN; Start 139; Stop 163
gtagttagtgttgaaccatttcttc

SEQ ID NO: 395484 - DNA, 25 bp, Artificial
  probe
  misc_feature (1)..(25): SEQ ID NO: 4957; WAN024GHN; Start 34; Stop 58
acgagtgttcaatccaagttctttg

SEQ ID NO: 395485 - DNA, 25 bp, Artificial
  probe
  misc_feature (1)..(25): SEQ ID NO: 4957; WAN024GHN; Start 8; Stop 32
aaagtgaagggacctacaagaacag

SEQ ID NO: 395486 - DNA, 25 bp, Artificial
  probe
  misc_feature (1)..(25): SEQ ID NO: 4957; WAN024GHN; Start 7; Stop 31
gaaagtgaagggacctacaagaaca

SEQ ID NO: 395487 - DNA, 25 bp, Artificial
  probe
  misc_feature (1)..(25): SEQ ID NO: 4957; WAN024GHN; Start 116; Stop 140
tcaaatttaggaacgatgtagtggt

SEQ ID NO: 395488 - DNA, 25 bp, Artificial
  probe
  misc_feature (1)..(25): SEQ ID NO: 4957; WAN024GHN; Start 138; Stop 162
ggtagttagtgttgaaccatttctt

SEQ ID NO: 395489 - DNA, 25 bp, Artificial
  probe
  misc_feature (1)..(25): SEQ ID NO: 4957; WAN024GHN; Start 115; Stop 139
ttcaaatttaggaacgatgtagtgg

SEQ ID NO: 395490 - DNA, 25 bp, Artificial
  probe
  misc_feature (1)..(25): SEQ ID NO: 4957; WAN024GHN; Start 32; Stop 56
ggacgagtgttcaatccaagttctt

SEQ ID NO: 395491 - DNA, 25 bp, Artificial
  probe
  misc_feature (1)..(25): SEQ ID NO: 4957; WAN024GHN; Start 117; Stop 141
caaatttaggaacgatgtagtggta

SEQ ID NO: 395492 - DNA, 25 bp, Artificial
  probe
  misc_feature (1)..(25): SEQ ID NO: 4957; WAN024GHN; Start 226; Stop 250
ctcaaggtcagacaagtccaagttt

SEQ ID NO: 395493 - DNA, 25 bp, Artificial
  probe
  misc_feature (1)..(25): SEQ ID NO: 4957; WAN024GHN; Start 118; Stop 142
aaatttaggaacgatgtagtggtag

SEQ ID NO: 395494 - DNA, 25 bp, Artificial
  probe
  misc_feature (1)..(25): SEQ ID NO: 4957; WAN024GHN; Start 6; Stop 30
ggaaagtgaagggacctacaagaac

SEQ ID NO: 395495 - DNA, 25 bp, Artificial
  probe
  misc_feature (1)..(25): SEQ ID NO: 4957; WAN024GHN; Start 114; Stop 138
tttcaaatttaggaacgatgtagtg

SEQ ID NO: 395496 - DNA, 25 bp, Artificial
  probe
  misc_feature (1)..(25): SEQ ID NO: 4957; WAN024GHN; Start 3; Stop 27
gaaggaaagtgaagggacctacaag

SEQ ID NO: 395497 - DNA, 25 bp, Artificial
  probe
  misc_feature (1)..(25): SEQ ID NO: 4957; WAN024GHN; Start 31; Stop 55
aggacgagtgttcaatccaagttct

SEQ ID NO: 395498 - DNA, 25 bp, Artificial
  probe
  misc_feature (1)..(25): SEQ ID NO: 4957; WAN024GHN; Start 30; Stop 54
caggacgagtgttcaatccaagttc

SEQ ID NO: 395499 - DNA, 25 bp, Artificial
  probe
  misc_feature (1)..(25): SEQ ID NO: 4957; WAN024GHN; Start 144; Stop 168
tagtgttgaaccatttcttcattgg

SEQ ID NO: 395500 - DNA, 25 bp, Artificial
  probe
  misc_feature (1)..(25): SEQ ID NO: 4957; WAN024GHN; Start 146; Stop 170
gtgttgaaccatttcttcattggaa

SEQ ID NO: 395501 - DNA, 25 bp, Artificial
  probe
  misc_feature (1)..(25): SEQ ID NO: 4957; WAN024GHN; Start 145; Stop 169
agtgttgaaccatttcttcattgga

SEQ ID NO: 395502 - DNA, 25 bp, Artificial
  probe
  misc_feature (1)..(25): SEQ ID NO: 4958; WAN024CPG; Start 6; Stop 30
ggaacattcaatagacattcaactg

SEQ ID NO: 395503 - DNA, 25 bp, Artificial
  probe
  misc_feature (1)..(25): SEQ ID NO: 4958; WAN024CPG; Start 5; Stop 29
aggaacattcaatagacattcaact

SEQ ID NO: 395504 - DNA, 25 bp, Artificial
  probe
  misc_feature (1)..(25): SEQ ID NO: 4958; WAN024CPG; Start 16; Stop 40
atagacattcaactgagtcatccag

SEQ ID NO: 395505 - DNA, 25 bp, Artificial
  probe
  misc_feature (1)..(25): SEQ ID NO: 4958; WAN024CPG; Start 15; Stop 39
aatagacattcaactgagtcatcca

SEQ ID NO: 395506 - DNA, 25 bp, Artificial
  probe
  misc_feature (1)..(25): SEQ ID NO: 4958; WAN024CPG; Start 14; Stop 38
caatagacattcaactgagtcatcc

SEQ ID NO: 395507 - DNA, 25 bp, Artificial
  probe
  misc_feature (1)..(25): SEQ ID NO: 4958; WAN024CPG; Start 9; Stop 33
acattcaatagacattcaactgagt

SEQ ID NO: 395508 - DNA, 25 bp, Artificial
  probe
  misc_feature (1)..(25): SEQ ID NO: 4958; WAN024CPG; Start 17; Stop 41
tagacattcaactgagtcatccaga

SEQ ID NO: 395509 - DNA, 25 bp, Artificial
  probe
  misc_feature (1)..(25): SEQ ID NO: 4958; WAN024CPG; Start 4; Stop 28
aaggaacattcaatagacattcaac

SEQ ID NO: 395510 - DNA, 25 bp, Artificial
  probe
  misc_feature (1)..(25): SEQ ID NO: 4958; WAN024CPG; Start 18; Stop 42
agacattcaactgagtcatccagat

SEQ ID NO: 395511 - DNA, 25 bp, Artificial
  probe
  misc_feature (1)..(25): SEQ ID NO: 4958; WAN024CPG; Start 13; Stop 37
tcaatagacattcaactgagtcatc

SEQ ID NO: 395512 - DNA, 25 bp, Artificial
  probe
  misc_feature (1)..(25): SEQ ID NO: 4958; WAN024CPG; Start 3; Stop 27
gaaggaacattcaatagacattcaa

SEQ ID NO: 395513 - DNA, 25 bp, Artificial
  probe
  misc_feature (1)..(25): SEQ ID NO: 4958; WAN024CPG; Start 12; Stop 36
ttcaatagacattcaactgagtcat

SEQ ID NO: 395514 - DNA, 25 bp, Artificial
  probe
  misc_feature (1)..(25): SEQ ID NO: 4958; WAN024CPG; Start 11; Stop 35
attcaatagacattcaactgagtca

SEQ ID NO: 395515 - DNA, 25 bp, Artificial
  probe
  misc_feature (1)..(25): SEQ ID NO: 4958; WAN024CPG; Start 8; Stop 32
aacattcaatagacattcaactgag

SEQ ID NO: 395516 - DNA, 25 bp, Artificial
  probe
  misc_feature (1)..(25): SEQ ID NO: 4958; WAN024CPG; Start 7; Stop 31
gaacattcaatagacattcaactga

SEQ ID NO: 395517 - DNA, 25 bp, Artificial
  probe
  misc_feature (1)..(25): SEQ ID NO: 4958; WAN024CPG; Start 19; Stop 43
gacattcaactgagtcatccagatg

SEQ ID NO: 395518 - DNA, 25 bp, Artificial
  probe
  misc_feature (1)..(25): SEQ ID NO: 4958; WAN024CPG; Start 10; Stop 34
cattcaatagacattcaactgagtc

SEQ ID NO: 395519 - DNA, 25 bp, Artificial
  probe
  misc_feature (1)..(25): SEQ ID NO: 4958; WAN024CPG; Start 765; Stop 789
ttctaagatgattgtcaatggagat

SEQ ID NO: 395520 - DNA, 25 bp, Artificial
  probe
  misc_feature (1)..(25): SEQ ID NO: 4958; WAN024CPG; Start 764; Stop 788
attctaagatgattgtcaatggaga

SEQ ID NO: 395521 - DNA, 25 bp, Artificial
  probe
  misc_feature (1)..(25): SEQ ID NO: 4958; WAN024CPG; Start 766; Stop 790
tctaagatgattgtcaatggagata

SEQ ID NO: 395522 - DNA, 25 bp, Artificial
  probe
  misc_feature (1)..(25): SEQ ID NO: 4958; WAN024CPG; Start 763; Stop 787
cattctaagatgattgtcaatggag

SEQ ID NO: 395523 - DNA, 25 bp, Artificial
  probe
  misc_feature (1)..(25): SEQ ID NO: 4958; WAN024CPG; Start 2; Stop 26
tgaaggaacattcaatagacattca

SEQ ID NO: 395524 - DNA, 25 bp, Artificial
  probe
  misc_feature (1)..(25): SEQ ID NO: 4958; WAN024CPG; Start 762; Stop 786
tcattctaagatgattgtcaatgga

SEQ ID NO: 395525 - DNA, 25 bp, Artificial
  probe
  misc_feature (1)..(25): SEQ ID NO: 4958; WAN024CPG; Start 973; Stop 997
attagagtctcaacctctgtctgaa

SEQ ID NO: 395526 - DNA, 25 bp, Artificial
  probe
  misc_feature (1)..(25): SEQ ID NO: 4958; WAN024CPG; Start 972; Stop 996
aattagagtctcaacctctgtctga

SEQ ID NO: 395527 - DNA, 25 bp, Artificial
  probe
  misc_feature (1)..(25): SEQ ID NO: 4958; WAN024CPG; Start 83; Stop 107
gtttgatggaagaagagcttgatgt

SEQ ID NO: 395528 - DNA, 25 bp, Artificial
  probe
  misc_feature (1)..(25): SEQ ID NO: 4958; WAN024CPG; Start 974; Stop 998
ttagagtctcaacctctgtctgaag

SEQ ID NO: 395529 - DNA, 25 bp, Artificial
  probe
  misc_feature (1)..(25): SEQ ID NO: 4958; WAN024CPG; Start 724; Stop 748
atcatgcagatgaagatgttcttga

SEQ ID NO: 395530 - DNA, 25 bp, Artificial
  probe
  misc_feature (1)..(25): SEQ ID NO: 4958; WAN024CPG; Start 767; Stop 791
ctaagatgattgtcaatggagatat

SEQ ID NO: 395531 - DNA, 25 bp, Artificial
  probe
  misc_feature (1)..(25): SEQ ID NO: 4958; WAN024CPG; Start 761; Stop 785
ttcattctaagatgattgtcaatgg

SEQ ID NO: 395532 - DNA, 25 bp, Artificial
  probe
  misc_feature (1)..(25): SEQ ID NO: 4958; WAN024CPG; Start 725; Stop 749
tcatgcagatgaagatgttcttgac

SEQ ID NO: 395533 - DNA, 25 bp, Artificial
  probe
  misc_feature (1)..(25): SEQ ID NO: 4958; WAN024CPG; Start 723; Stop 747
catcatgcagatgaagatgttcttg

SEQ ID NO: 395534 - DNA, 25 bp, Artificial
  probe
  misc_feature (1)..(25): SEQ ID NO: 4958; WAN024CPG; Start 20; Stop 44
acattcaactgagtcatccagatga

SEQ ID NO: 395535 - DNA, 25 bp, Artificial
  probe
  misc_feature (1)..(25): SEQ ID NO: 4959; WAN024DQS; Start 24; Stop 48
aggtcaacgacttaatgaactggaa

SEQ ID NO: 395536 - DNA, 25 bp, Artificial
  probe
  misc_feature (1)..(25): SEQ ID NO: 4959; WAN024DQS; Start 37; Stop 61
aatgaactggaaatcaacggtattc

SEQ ID NO: 395537 - DNA, 25 bp, Artificial
  probe
  misc_feature (1)..(25): SEQ ID NO: 4959; WAN024DQS; Start 30; Stop 54
acgacttaatgaactggaaatcaac

SEQ ID NO: 395538 - DNA, 25 bp, Artificial
  probe
  misc_feature (1)..(25): SEQ ID NO: 4959; WAN024DQS; Start 28; Stop 52
caacgacttaatgaactggaaatca

SEQ ID NO: 395539 - DNA, 25 bp, Artificial
  probe
  misc_feature (1)..(25): SEQ ID NO: 4959; WAN024DQS; Start 32; Stop 56
gacttaatgaactggaaatcaacgg

SEQ ID NO: 395540 - DNA, 25 bp, Artificial
  probe
  misc_feature (1)..(25): SEQ ID NO: 4959; WAN024DQS; Start 27; Stop 51
tcaacgacttaatgaactggaaatc

SEQ ID NO: 395541 - DNA, 25 bp, Artificial
  probe
  misc_feature (1)..(25): SEQ ID NO: 4959; WAN024DQS; Start 34; Stop 58
cttaatgaactggaaatcaacggta

SEQ ID NO: 395542 - DNA, 25 bp, Artificial
  probe
  misc_feature (1)..(25): SEQ ID NO: 4959; WAN024DQS; Start 31; Stop 55
cgacttaatgaactggaaatcaacg

SEQ ID NO: 395543 - DNA, 25 bp, Artificial
  probe
  misc_feature (1)..(25): SEQ ID NO: 4959; WAN024DQS; Start 29; Stop 53
aacgacttaatgaactggaaatcaa

SEQ ID NO: 395544 - DNA, 25 bp, Artificial
  probe
  misc_feature (1)..(25): SEQ ID NO: 4959; WAN024DQS; Start 33; Stop 57
acttaatgaactggaaatcaacggt

SEQ ID NO: 395545 - DNA, 25 bp, Artificial
  probe
  misc_feature (1)..(25): SEQ ID NO: 4959; WAN024DQS; Start 36; Stop 60
taatgaactggaaatcaacggtatt

SEQ ID NO: 395546 - DNA, 25 bp, Artificial
  probe
  misc_feature (1)..(25): SEQ ID NO: 4959; WAN024DQS; Start 35; Stop 59
ttaatgaactggaaatcaacggtat

SEQ ID NO: 395547 - DNA, 25 bp, Artificial
  probe
  misc_feature (1)..(25): SEQ ID NO: 4959; WAN024DQS; Start 26; Stop 50
gtcaacgacttaatgaactggaaat

SEQ ID NO: 395548 - DNA, 25 bp, Artificial
  probe
  misc_feature (1)..(25): SEQ ID NO: 4959; WAN024DQS; Start 38; Stop 62
atgaactggaaatcaacggtattcg

SEQ ID NO: 395549 - DNA, 25 bp, Artificial
  probe
  misc_feature (1)..(25): SEQ ID NO: 4959; WAN024DQS; Start 25; Stop 49
ggtcaacgacttaatgaactggaaa

SEQ ID NO: 395550 - DNA, 25 bp, Artificial
  probe
  misc_feature (1)..(25): SEQ ID NO: 4959; WAN024DQS; Start 39; Stop 63
tgaactggaaatcaacggtattcgt

SEQ ID NO: 395551 - DNA, 25 bp, Artificial
  probe
  misc_feature (1)..(25): SEQ ID NO: 4959; WAN024DQS; Start 51; Stop 75
caacggtattcgtttgactaagttt

SEQ ID NO: 395552 - DNA, 25 bp, Artificial
  probe
  misc_feature (1)..(25): SEQ ID NO: 4959; WAN024DQS; Start 48; Stop 72
aatcaacggtattcgtttgactaag

SEQ ID NO: 395553 - DNA, 25 bp, Artificial
  probe
  misc_feature (1)..(25): SEQ ID NO: 4959; WAN024DQS; Start 46; Stop 70
gaaatcaacggtattcgtttgacta

SEQ ID NO: 395554 - DNA, 25 bp, Artificial
  probe
  misc_feature (1)..(25): SEQ ID NO: 4959; WAN024DQS; Start 49; Stop 73
atcaacggtattcgtttgactaagt

SEQ ID NO: 395555 - DNA, 25 bp, Artificial
  probe
  misc_feature (1)..(25): SEQ ID NO: 4959; WAN024DQS; Start 50; Stop 74
tcaacggtattcgtttgactaagtt

SEQ ID NO: 395556 - DNA, 25 bp, Artificial
  probe
  misc_feature (1)..(25): SEQ ID NO: 4959; WAN024DQS; Start 47; Stop 71
aaatcaacggtattcgtttgactaa

SEQ ID NO: 395557 - DNA, 25 bp, Artificial
  probe
  misc_feature (1)..(25): SEQ ID NO: 4959; WAN024DQS; Start 41; Stop 65
aactggaaatcaacggtattcgttt

SEQ ID NO: 395558 - DNA, 25 bp, Artificial
  probe
  misc_feature (1)..(25): SEQ ID NO: 4959; WAN024DQS; Start 45; Stop 69
ggaaatcaacggtattcgtttgact

SEQ ID NO: 395559 - DNA, 25 bp, Artificial
  probe
  misc_feature (1)..(25): SEQ ID NO: 4959; WAN024DQS; Start 43; Stop 67
ctggaaatcaacggtattcgtttga

SEQ ID NO: 395560 - DNA, 25 bp, Artificial
  probe
  misc_feature (1)..(25): SEQ ID NO: 4959; WAN024DQS; Start 40; Stop 64
gaactggaaatcaacggtattcgtt

SEQ ID NO: 395561 - DNA, 25 bp, Artificial
  probe
  misc_feature (1)..(25): SEQ ID NO: 4959; WAN024DQS; Start 44; Stop 68
tggaaatcaacggtattcgtttgac

SEQ ID NO: 395562 - DNA, 25 bp, Artificial
  probe
  misc_feature (1)..(25): SEQ ID NO: 4959; WAN024DQS; Start 42; Stop 66
actggaaatcaacggtattcgtttg

SEQ ID NO: 395563 - DNA, 25 bp, Artificial
  probe
  misc_feature (1)..(25): SEQ ID NO: 4960; WAN024FIZ; Start 82; Stop 106
aagagcttccatgtactcatccatt

SEQ ID NO: 395564 - DNA, 25 bp, Artificial
  probe
  misc_feature (1)..(25): SEQ ID NO: 4960; WAN024FIZ; Start 81; Stop 105
caagagcttccatgtactcatccat

SEQ ID NO: 395565 - DNA, 25 bp, Artificial
  probe
  misc_feature (1)..(25): SEQ ID NO: 4960; WAN024FIZ; Start 11; Stop 35
tctgtcaatgtagagaatgggcttc

SEQ ID NO: 395566 - DNA, 25 bp, Artificial
  probe
  misc_feature (1)..(25): SEQ ID NO: 4960; WAN024FIZ; Start 5; Stop 29
aggaactctgtcaatgtagagaatg

SEQ ID NO: 395567 - DNA, 25 bp, Artificial
  probe
  misc_feature (1)..(25): SEQ ID NO: 4960; WAN024FIZ; Start 3; Stop 27
gaaggaactctgtcaatgtagagaa

SEQ ID NO: 395568 - DNA, 25 bp, Artificial
  probe
  misc_feature (1)..(25): SEQ ID NO: 4960; WAN024FIZ; Start 1; Stop 25
ttgaaggaactctgtcaatgtagag

SEQ ID NO: 395569 - DNA, 25 bp, Artificial
  probe
  misc_feature (1)..(25): SEQ ID NO: 4960; WAN024FIZ; Start 4; Stop 28
aaggaactctgtcaatgtagagaat

SEQ ID NO: 395570 - DNA, 25 bp, Artificial
  probe
  misc_feature (1)..(25): SEQ ID NO: 4960; WAN024FIZ; Start 6; Stop 30
ggaactctgtcaatgtagagaatgg

SEQ ID NO: 395571 - DNA, 25 bp, Artificial
  probe
  misc_feature (1)..(25): SEQ ID NO: 4960; WAN024FIZ; Start 2; Stop 26
tgaaggaactctgtcaatgtagaga

SEQ ID NO: 395572 - DNA, 25 bp, Artificial
  probe
  misc_feature (1)..(25): SEQ ID NO: 4960; WAN024FIZ; Start 79; Stop 103
gtcaagagcttccatgtactcatcc

SEQ ID NO: 395573 - DNA, 25 bp, Artificial
  probe
  misc_feature (1)..(25): SEQ ID NO: 4960; WAN024FIZ; Start 80; Stop 104
tcaagagcttccatgtactcatcca

SEQ ID NO: 395574 - DNA, 25 bp, Artificial
  probe
  misc_feature (1)..(25): SEQ ID NO: 4960; WAN024FIZ; Start 78; Stop 102
cgtcaagagcttccatgtactcatc

SEQ ID NO: 395575 - DNA, 25 bp, Artificial
  probe
  misc_feature (1)..(25): SEQ ID NO: 4960; WAN024FIZ; Start 12; Stop 36
ctgtcaatgtagagaatgggcttcc

SEQ ID NO: 395576 - DNA, 25 bp, Artificial
  probe
  misc_feature (1)..(25): SEQ ID NO: 4960; WAN024FIZ; Start 83; Stop 107
agagcttccatgtactcatccattt

SEQ ID NO: 395577 - DNA, 25 bp, Artificial
  probe
  misc_feature (1)..(25): SEQ ID NO: 4960; WAN024FIZ; Start 174; Stop 198
ctacatacaaatcagcaacagcttg

SEQ ID NO: 395578 - DNA, 25 bp, Artificial
  probe
  misc_feature (1)..(25): SEQ ID NO: 4960; WAN024FIZ; Start 284; Stop 308
tctaccattttctttacctcattca

SEQ ID NO: 395579 - DNA, 25 bp, Artificial
  probe
  misc_feature (1)..(25): SEQ ID NO: 4960; WAN024FIZ; Start 164; Stop 188
gcaacgtgagctacatacaaatcag

SEQ ID NO: 395580 - DNA, 25 bp, Artificial
  probe
  misc_feature (1)..(25): SEQ ID NO: 4960; WAN024FIZ; Start 170; Stop 194
tgagctacatacaaatcagcaacag

SEQ ID NO: 395581 - DNA, 25 bp, Artificial
  probe
  misc_feature (1)..(25): SEQ ID NO: 4960; WAN024FIZ; Start 7; Stop 31
gaactctgtcaatgtagagaatggg

SEQ ID NO: 395582 - DNA, 25 bp, Artificial
  probe
  misc_feature (1)..(25): SEQ ID NO: 4960; WAN024FIZ; Start 169; Stop 193
gtgagctacatacaaatcagcaaca

SEQ ID NO: 395583 - DNA, 25 bp, Artificial
  probe
  misc_feature (1)..(25): SEQ ID NO: 4960; WAN024FIZ; Start 175; Stop 199
tacatacaaatcagcaacagcttgg

SEQ ID NO: 395584 - DNA, 25 bp, Artificial
  probe
  misc_feature (1)..(25): SEQ ID NO: 4960; WAN024FIZ; Start 14; Stop 38
gtcaatgtagagaatgggcttccac

SEQ ID NO: 395585 - DNA, 25 bp, Artificial
  probe
  misc_feature (1)..(25): SEQ ID NO: 4960; WAN024FIZ; Start 161; Stop 185
aaagcaacgtgagctacatacaaat

SEQ ID NO: 395586 - DNA, 25 bp, Artificial
  probe
  misc_feature (1)..(25): SEQ ID NO: 4960; WAN024FIZ; Start 173; Stop 197
gctacatacaaatcagcaacagctt

SEQ ID NO: 395587 - DNA, 25 bp, Artificial
  probe
  misc_feature (1)..(25): SEQ ID NO: 4960; WAN024FIZ; Start 247; Stop 271
caatgatgttacgtcttttactgct

SEQ ID NO: 395588 - DNA, 25 bp, Artificial
  probe
  misc_feature (1)..(25): SEQ ID NO: 4960; WAN024FIZ; Start 246; Stop 270
tcaatgatgttacgtcttttactgc

SEQ ID NO: 395589 - DNA, 25 bp, Artificial
  probe
  misc_feature (1)..(25): SEQ ID NO: 4960; WAN024FIZ; Start 251; Stop 275
gatgttacgtcttttactgcttctt

SEQ ID NO: 395590 - DNA, 25 bp, Artificial
  probe
  misc_feature (1)..(25): SEQ ID NO: 4960; WAN024FIZ; Start 249; Stop 273
atgatgttacgtcttttactgcttc

SEQ ID NO: 395591 - DNA, 25 bp, Artificial
  probe
  misc_feature (1)..(25): SEQ ID NO: 4960; WAN024FIZ; Start 250; Stop 274
tgatgttacgtcttttactgcttct

SEQ ID NO: 395592 - DNA, 25 bp, Artificial
  probe
  misc_feature (1)..(25): SEQ ID NO: 4960; WAN024FIZ; Start 77; Stop 101
ccgtcaagagcttccatgtactcat

SEQ ID NO: 395593 - DNA, 25 bp, Artificial
  probe
  misc_feature (1)..(25): SEQ ID NO: 4960; WAN024FIZ; Start 253; Stop 277
tgttacgtcttttactgcttctttt

SEQ ID NO: 395594 - DNA, 25 bp, Artificial
  probe
  misc_feature (1)..(25): SEQ ID NO: 4960; WAN024FIZ; Start 239; Stop 263
gcttttgtcaatgatgttacgtctt

SEQ ID NO: 395595 - DNA, 25 bp, Artificial
  probe
  misc_feature (1)..(25): SEQ ID NO: 4960; WAN024FIZ; Start 280; Stop 304
caattctaccattttctttacctca

SEQ ID NO: 395596 - DNA, 25 bp, Artificial
  probe
  misc_feature (1)..(25): SEQ ID NO: 4961; WAN024G3W; Start 122; Stop 146
ttgactacataaggatagccagact

SEQ ID NO: 395597 - DNA, 25 bp, Artificial
  probe
  misc_feature (1)..(25): SEQ ID NO: 4961; WAN024G3W; Start 121; Stop 145
gttgactacataaggatagccagac

SEQ ID NO: 395598 - DNA, 25 bp, Artificial
  probe
  misc_feature (1)..(25): SEQ ID NO: 4961; WAN024G3W; Start 124; Stop 148
gactacataaggatagccagactct

SEQ ID NO: 395599 - DNA, 25 bp, Artificial
  probe
  misc_feature (1)..(25): SEQ ID NO: 4961; WAN024G3W; Start 123; Stop 147
tgactacataaggatagccagactc

SEQ ID NO: 395600 - DNA, 25 bp, Artificial
  probe
  misc_feature (1)..(25): SEQ ID NO: 4961; WAN024G3W; Start 126; Stop 150
ctacataaggatagccagactcttg

SEQ ID NO: 395601 - DNA, 25 bp, Artificial
  probe
  misc_feature (1)..(25): SEQ ID NO: 4961; WAN024G3W; Start 125; Stop 149
actacataaggatagccagactctt

SEQ ID NO: 395602 - DNA, 25 bp, Artificial
  probe
  misc_feature (1)..(25): SEQ ID NO: 4961; WAN024G3W; Start 50; Stop 74
agaatctcagaacacaagttactca

SEQ ID NO: 395603 - DNA, 25 bp, Artificial
  probe
  misc_feature (1)..(25): SEQ ID NO: 4961; WAN024G3W; Start 129; Stop 153
cataaggatagccagactcttgttg

SEQ ID NO: 395604 - DNA, 25 bp, Artificial
  probe
  misc_feature (1)..(25): SEQ ID NO: 4961; WAN024G3W; Start 41; Stop 65
tgaacttgaagaatctcagaacaca

SEQ ID NO: 395605 - DNA, 25 bp, Artificial
  probe
  misc_feature (1)..(25): SEQ ID NO: 4961; WAN024G3W; Start 42; Stop 66
gaacttgaagaatctcagaacacaa

SEQ ID NO: 395606 - DNA, 25 bp, Artificial
  probe
  misc_feature (1)..(25): SEQ ID NO: 4961; WAN024G3W; Start 40; Stop 64
ttgaacttgaagaatctcagaacac

SEQ ID NO: 395607 - DNA, 25 bp, Artificial
  probe
  misc_feature (1)..(25): SEQ ID NO: 4961; WAN024G3W; Start 51; Stop 75
gaatctcagaacacaagttactcat

SEQ ID NO: 395608 - DNA, 25 bp, Artificial
  probe
  misc_feature (1)..(25): SEQ ID NO: 4961; WAN024G3W; Start 49; Stop 73
aagaatctcagaacacaagttactc

SEQ ID NO: 395609 - DNA, 25 bp, Artificial
  probe
  misc_feature (1)..(25): SEQ ID NO: 4961; WAN024G3W; Start 48; Stop 72
gaagaatctcagaacacaagttact

SEQ ID NO: 395610 - DNA, 25 bp, Artificial
  probe
  misc_feature (1)..(25): SEQ ID NO: 4961; WAN024G3W; Start 39; Stop 63
cttgaacttgaagaatctcagaaca

SEQ ID NO: 395611 - DNA, 25 bp, Artificial
  probe
  misc_feature (1)..(25): SEQ ID NO: 4961; WAN024G3W; Start 47; Stop 71
tgaagaatctcagaacacaagttac

SEQ ID NO: 395612 - DNA, 25 bp, Artificial
  probe
  misc_feature (1)..(25): SEQ ID NO: 4961; WAN024G3W; Start 127; Stop 151
tacataaggatagccagactcttgt

SEQ ID NO: 395613 - DNA, 25 bp, Artificial
  probe
  misc_feature (1)..(25): SEQ ID NO: 4961; WAN024G3W; Start 120; Stop 144
tgttgactacataaggatagccaga

SEQ ID NO: 395614 - DNA, 25 bp, Artificial
  probe
  misc_feature (1)..(25): SEQ ID NO: 4961; WAN024G3W; Start 46; Stop 70
ttgaagaatctcagaacacaagtta

SEQ ID NO: 395615 - DNA, 25 bp, Artificial
  probe
  misc_feature (1)..(25): SEQ ID NO: 4961; WAN024G3W; Start 128; Stop 152
acataaggatagccagactcttgtt

SEQ ID NO: 395616 - DNA, 25 bp, Artificial
  probe
  misc_feature (1)..(25): SEQ ID NO: 4961; WAN024G3W; Start 251; Stop 275
atgtaattgaatggcacaccgtatt

SEQ ID NO: 395617 - DNA, 25 bp, Artificial
  probe
  misc_feature (1)..(25): SEQ ID NO: 4961; WAN024G3W; Start 52; Stop 76
aatctcagaacacaagttactcatg

SEQ ID NO: 395618 - DNA, 25 bp, Artificial
  probe
  misc_feature (1)..(25): SEQ ID NO: 4961; WAN024G3W; Start 243; Stop 267
taatgtcgatgtaattgaatggcac

SEQ ID NO: 395619 - DNA, 25 bp, Artificial
  probe
  misc_feature (1)..(25): SEQ ID NO: 4961; WAN024G3W; Start 242; Stop 266
gtaatgtcgatgtaattgaatggca

SEQ ID NO: 395620 - DNA, 25 bp, Artificial
  probe
  misc_feature (1)..(25): SEQ ID NO: 4961; WAN024G3W; Start 130; Stop 154
ataaggatagccagactcttgttgc

SEQ ID NO: 395621 - DNA, 25 bp, Artificial
  probe
  misc_feature (1)..(25): SEQ ID NO: 4961; WAN024G3W; Start 241; Stop 265
agtaatgtcgatgtaattgaatggc

SEQ ID NO: 395622 - DNA, 25 bp, Artificial
  probe
  misc_feature (1)..(25): SEQ ID NO: 4961; WAN024G3W; Start 250; Stop 274
gatgtaattgaatggcacaccgtat

SEQ ID NO: 395623 - DNA, 25 bp, Artificial
  probe
  misc_feature (1)..(25): SEQ ID NO: 4961; WAN024G3W; Start 254; Stop 278
taattgaatggcacaccgtattctt

SEQ ID NO: 395624 - DNA, 25 bp, Artificial
  probe
  misc_feature (1)..(25): SEQ ID NO: 4961; WAN024G3W; Start 341; Stop 365
ttatcaggtactacaacaccaagtg

SEQ ID NO: 395625 - DNA, 25 bp, Artificial
  probe
  misc_feature (1)..(25): SEQ ID NO: 4961; WAN024G3W; Start 342; Stop 366
tatcaggtactacaacaccaagtga

SEQ ID NO: 395626 - DNA, 25 bp, Artificial
  probe
  misc_feature (1)..(25): SEQ ID NO: 4961; WAN024G3W; Start 240; Stop 264
cagtaatgtcgatgtaattgaatgg

SEQ ID NO: 395627 - DNA, 25 bp, Artificial
  probe
  misc_feature (1)..(25): SEQ ID NO: 4961; WAN024G3W; Start 253; Stop 277
gtaattgaatggcacaccgtattct

SEQ ID NO: 395628 - DNA, 25 bp, Artificial
  probe
  misc_feature (1)..(25): SEQ ID NO: 4961; WAN024G3W; Start 252; Stop 276
tgtaattgaatggcacaccgtattc

SEQ ID NO: 395629 - DNA, 25 bp, Artificial
  probe
  misc_feature (1)..(25): SEQ ID NO: 4962; WAN024FRV; Start 787; Stop 811
attcctcgtattcgtattccagtta

SEQ ID NO: 395630 - DNA, 25 bp, Artificial
  probe
  misc_feature (1)..(25): SEQ ID NO: 4962; WAN024FRV; Start 786; Stop 810
cattcctcgtattcgtattccagtt

SEQ ID NO: 395631 - DNA, 25 bp, Artificial
  probe
  misc_feature (1)..(25): SEQ ID NO: 4962; WAN024FRV; Start 788; Stop 812
ttcctcgtattcgtattccagttaa

SEQ ID NO: 395632 - DNA, 25 bp, Artificial
  probe
  misc_feature (1)..(25): SEQ ID NO: 4962; WAN024FRV; Start 781; Stop 805
gtagccattcctcgtattcgtattc

SEQ ID NO: 395633 - DNA, 25 bp, Artificial
  probe
  misc_feature (1)..(25): SEQ ID NO: 4962; WAN024FRV; Start 316; Stop 340
gctgctagagaatgtaagattgcta

SEQ ID NO: 395634 - DNA, 25 bp, Artificial
  probe
  misc_feature (1)..(25): SEQ ID NO: 4962; WAN024FRV; Start 313; Stop 337
aaggctgctagagaatgtaagattg

SEQ ID NO: 395635 - DNA, 25 bp, Artificial
  probe
  misc_feature (1)..(25): SEQ ID NO: 4962; WAN024FRV; Start 182; Stop 206
ggatgaaggagtggtcttatctgat

SEQ ID NO: 395636 - DNA, 25 bp, Artificial
  probe
  misc_feature (1)..(25): SEQ ID NO: 4962; WAN024FRV; Start 822; Stop 846
taatatctctgttgtgattgaggca

SEQ ID NO: 395637 - DNA, 25 bp, Artificial
  probe
  misc_feature (1)..(25): SEQ ID NO: 4962; WAN024FRV; Start 150; Stop 174
ctactatacaccagagcggattcaa

SEQ ID NO: 395638 - DNA, 25 bp, Artificial
  probe
  misc_feature (1)..(25): SEQ ID NO: 4962; WAN024FRV; Start 821; Stop 845
gtaatatctctgttgtgattgaggc

SEQ ID NO: 395639 - DNA, 25 bp, Artificial
  probe
  misc_feature (1)..(25): SEQ ID NO: 4962; WAN024FRV; Start 820; Stop 844
cgtaatatctctgttgtgattgagg

SEQ ID NO: 395640 - DNA, 25 bp, Artificial
  probe
  misc_feature (1)..(25): SEQ ID NO: 4962; WAN024FRV; Start 183; Stop 207
gatgaaggagtggtcttatctgatc

SEQ ID NO: 395641 - DNA, 25 bp, Artificial
  probe
  misc_feature (1)..(25): SEQ ID NO: 4962; WAN024FRV; Start 151; Stop 175
tactatacaccagagcggattcaac

SEQ ID NO: 395642 - DNA, 25 bp, Artificial
  probe
  misc_feature (1)..(25): SEQ ID NO: 4962; WAN024FRV; Start 782; Stop 806
tagccattcctcgtattcgtattcc

SEQ ID NO: 395643 - DNA, 25 bp, Artificial
  probe
  misc_feature (1)..(25): SEQ ID NO: 4962; WAN024FRV; Start 148; Stop 172
gactactatacaccagagcggattc

SEQ ID NO: 395644 - DNA, 25 bp, Artificial
  probe
  misc_feature (1)..(25): SEQ ID NO: 4962; WAN024FRV; Start 317; Stop 341
ctgctagagaatgtaagattgctat

SEQ ID NO: 395645 - DNA, 25 bp, Artificial
  probe
  misc_feature (1)..(25): SEQ ID NO: 4962; WAN024FRV; Start 785; Stop 809
ccattcctcgtattcgtattccagt

SEQ ID NO: 395646 - DNA, 25 bp, Artificial
  probe
  misc_feature (1)..(25): SEQ ID NO: 4962; WAN024FRV; Start 823; Stop 847
aatatctctgttgtgattgaggcag

SEQ ID NO: 395647 - DNA, 25 bp, Artificial
  probe
  misc_feature (1)..(25): SEQ ID NO: 4962; WAN024FRV; Start 153; Stop 177
ctatacaccagagcggattcaactt

SEQ ID NO: 395648 - DNA, 25 bp, Artificial
  probe
  misc_feature (1)..(25): SEQ ID NO: 4962; WAN024FRV; Start 318; Stop 342
tgctagagaatgtaagattgctatt

SEQ ID NO: 395649 - DNA, 25 bp, Artificial
  probe
  misc_feature (1)..(25): SEQ ID NO: 4962; WAN024FRV; Start 780; Stop 804
cgtagccattcctcgtattcgtatt

SEQ ID NO: 395650 - DNA, 25 bp, Artificial
  probe
  misc_feature (1)..(25): SEQ ID NO: 4962; WAN024FRV; Start 149; Stop 173
actactatacaccagagcggattca

SEQ ID NO: 395651 - DNA, 25 bp, Artificial
  probe
  misc_feature (1)..(25): SEQ ID NO: 4962; WAN024FRV; Start 147; Stop 171
tgactactatacaccagagcggatt

SEQ ID NO: 395652 - DNA, 25 bp, Artificial
  probe
  misc_feature (1)..(25): SEQ ID NO: 4962; WAN024FRV; Start 146; Stop 170
ttgactactatacaccagagcggat

SEQ ID NO: 395653 - DNA, 25 bp, Artificial
  probe
  misc_feature (1)..(25): SEQ ID NO: 4962; WAN024FRV; Start 434; Stop 458
tcttgatggatatttatgggatggg

SEQ ID NO: 395654 - DNA, 25 bp, Artificial
  probe
  misc_feature (1)..(25): SEQ ID NO: 4962; WAN024FRV; Start 430; Stop 454
ggtgtcttgatggatatttatggga

SEQ ID NO: 395655 - DNA, 25 bp, Artificial
  probe
  misc_feature (1)..(25): SEQ ID NO: 4962; WAN024FRV; Start 315; Stop 339
ggctgctagagaatgtaagattgct

SEQ ID NO: 395656 - DNA, 25 bp, Artificial
  probe
  misc_feature (1)..(25): SEQ ID NO: 4962; WAN024FRV; Start 314; Stop 338
aggctgctagagaatgtaagattgc

SEQ ID NO: 395657 - DNA, 25 bp, Artificial
  probe
  misc_feature (1)..(25): SEQ ID NO: 4962; WAN024FRV; Start 428; Stop 452
acggtgtcttgatggatatttatgg

SEQ ID NO: 395658 - DNA, 25 bp, Artificial
  probe
  misc_feature (1)..(25): SEQ ID NO: 4962; WAN024FRV; Start 427; Stop 451
cacggtgtcttgatggatatttatg

SEQ ID NO: 395659 - DNA, 25 bp, Artificial
  probe
  misc_feature (1)..(25): SEQ ID NO: 4962; WAN024FRV; Start 433; Stop 457
gtcttgatggatatttatgggatgg

SEQ ID NO: 395660 - DNA, 25 bp, Artificial
  probe
  misc_feature (1)..(25): SEQ ID NO: 4962; WAN024FRV; Start 312; Stop 336
aaaggctgctagagaatgtaagatt

SEQ ID NO: 395661 - DNA, 25 bp, Artificial
  probe
  misc_feature (1)..(25): SEQ ID NO: 4962; WAN024FRV; Start 308; Stop 332
tgttaaaggctgctagagaatgtaa

SEQ ID NO: 395662 - DNA, 25 bp, Artificial
  probe
  misc_feature (1)..(25): SEQ ID NO: 4963; WAN024DK4; Start 15; Stop 39
tggaggatataagatgacattgact

SEQ ID NO: 395663 - DNA, 25 bp, Artificial
  probe
  misc_feature (1)..(25): SEQ ID NO: 4963; WAN024DK4; Start 14; Stop 38
ttggaggatataagatgacattgac

SEQ ID NO: 395664 - DNA, 25 bp, Artificial
  probe
  misc_feature (1)..(25): SEQ ID NO: 4963; WAN024DK4; Start 16; Stop 40
ggaggatataagatgacattgacta

SEQ ID NO: 395665 - DNA, 25 bp, Artificial
  probe
  misc_feature (1)..(25): SEQ ID NO: 4963; WAN024DK4; Start 340; Stop 364
aagtcgtttatagacacagggaatt

SEQ ID NO: 395666 - DNA, 25 bp, Artificial
  probe
  misc_feature (1)..(25): SEQ ID NO: 4963; WAN024DK4; Start 337; Stop 361
gataagtcgtttatagacacaggga

SEQ ID NO: 395667 - DNA, 25 bp, Artificial
  probe
  misc_feature (1)..(25): SEQ ID NO: 4963; WAN024DK4; Start 341; Stop 365
agtcgtttatagacacagggaatta

SEQ ID NO: 395668 - DNA, 25 bp, Artificial
  probe
  misc_feature (1)..(25): SEQ ID NO: 4963; WAN024DK4; Start 339; Stop 363
taagtcgtttatagacacagggaat

SEQ ID NO: 395669 - DNA, 25 bp, Artificial
  probe
  misc_feature (1)..(25): SEQ ID NO: 4963; WAN024DK4; Start 338; Stop 362
ataagtcgtttatagacacagggaa

SEQ ID NO: 395670 - DNA, 25 bp, Artificial
  probe
  misc_feature (1)..(25): SEQ ID NO: 4963; WAN024DK4; Start 13; Stop 37
tttggaggatataagatgacattga

SEQ ID NO: 395671 - DNA, 25 bp, Artificial
  probe
  misc_feature (1)..(25): SEQ ID NO: 4963; WAN024DK4; Start 50; Stop 74
attataaaggtgatggagatagtgc

SEQ ID NO: 395672 - DNA, 25 bp, Artificial
  probe
  misc_feature (1)..(25): SEQ ID NO: 4963; WAN024DK4; Start 56; Stop 80
aaggtgatggagatagtgcaataaa

SEQ ID NO: 395673 - DNA, 25 bp, Artificial
  probe
  misc_feature (1)..(25): SEQ ID NO: 4963; WAN024DK4; Start 55; Stop 79
aaaggtgatggagatagtgcaataa

SEQ ID NO: 395674 - DNA, 25 bp, Artificial
  probe
  misc_feature (1)..(25): SEQ ID NO: 4963; WAN024DK4; Start 53; Stop 77
ataaaggtgatggagatagtgcaat

SEQ ID NO: 395675 - DNA, 25 bp, Artificial
  probe
  misc_feature (1)..(25): SEQ ID NO: 4963; WAN024DK4; Start 57; Stop 81
aggtgatggagatagtgcaataaag

SEQ ID NO: 395676 - DNA, 25 bp, Artificial
  probe
  misc_feature (1)..(25): SEQ ID NO: 4963; WAN024DK4; Start 173; Stop 197
aagagggaactattctccttattga

SEQ ID NO: 395677 - DNA, 25 bp, Artificial
  probe
  misc_feature (1)..(25): SEQ ID NO: 4963; WAN024DK4; Start 58; Stop 82
ggtgatggagatagtgcaataaagt

SEQ ID NO: 395678 - DNA, 25 bp, Artificial
  probe
  misc_feature (1)..(25): SEQ ID NO: 4963; WAN024DK4; Start 54; Stop 78
taaaggtgatggagatagtgcaata

SEQ ID NO: 395679 - DNA, 25 bp, Artificial
  probe
  misc_feature (1)..(25): SEQ ID NO: 4963; WAN024DK4; Start 52; Stop 76
tataaaggtgatggagatagtgcaa

SEQ ID NO: 395680 - DNA, 25 bp, Artificial
  probe
  misc_feature (1)..(25): SEQ ID NO: 4963; WAN024DK4; Start 51; Stop 75
ttataaaggtgatggagatagtgca

SEQ ID NO: 395681 - DNA, 25 bp, Artificial
  probe
  misc_feature (1)..(25): SEQ ID NO: 4963; WAN024DK4; Start 59; Stop 83
gtgatggagatagtgcaataaagtt

SEQ ID NO: 395682 - DNA, 25 bp, Artificial
  probe
  misc_feature (1)..(25): SEQ ID NO: 4963; WAN024DK4; Start 174; Stop 198
agagggaactattctccttattgat

SEQ ID NO: 395683 - DNA, 25 bp, Artificial
  probe
  misc_feature (1)..(25): SEQ ID NO: 4963; WAN024DK4; Start 60; Stop 84
tgatggagatagtgcaataaagttt

SEQ ID NO: 395684 - DNA, 25 bp, Artificial
  probe
  misc_feature (1)..(25): SEQ ID NO: 4963; WAN024DK4; Start 172; Stop 196
aaagagggaactattctccttattg

SEQ ID NO: 395685 - DNA, 25 bp, Artificial
  probe
  misc_feature (1)..(25): SEQ ID NO: 4963; WAN024DK4; Start 333; Stop 357
aagcgataagtcgtttatagacaca

SEQ ID NO: 395686 - DNA, 25 bp, Artificial
  probe
  misc_feature (1)..(25): SEQ ID NO: 4963; WAN024DK4; Start 328; Stop 352
ccagaaagcgataagtcgtttatag

SEQ ID NO: 395687 - DNA, 25 bp, Artificial
  probe
  misc_feature (1)..(25): SEQ ID NO: 4963; WAN024DK4; Start 305; Stop 329
atatagaagatgattctgggatgcc

SEQ ID NO: 395688 - DNA, 25 bp, Artificial
  probe
  misc_feature (1)..(25): SEQ ID NO: 4963; WAN024DK4; Start 334; Stop 358
agcgataagtcgtttatagacacag

SEQ ID NO: 395689 - DNA, 25 bp, Artificial
  probe
  misc_feature (1)..(25): SEQ ID NO: 4963; WAN024DK4; Start 332; Stop 356
aaagcgataagtcgtttatagacac

SEQ ID NO: 395690 - DNA, 25 bp, Artificial
  probe
  misc_feature (1)..(25): SEQ ID NO: 4963; WAN024DK4; Start 175; Stop 199
gagggaactattctccttattgatc

SEQ ID NO: 395691 - DNA, 25 bp, Artificial
  probe
  misc_feature (1)..(25): SEQ ID NO: 4963; WAN024DK4; Start 336; Stop 360
cgataagtcgtttatagacacaggg

SEQ ID NO: 395692 - DNA, 25 bp, Artificial
  probe
  misc_feature (1)..(25): SEQ ID NO: 4963; WAN024DK4; Start 306; Stop 330
tatagaagatgattctgggatgcca

SEQ ID NO: 395693 - DNA, 25 bp, Artificial
  probe
  misc_feature (1)..(25): SEQ ID NO: 4963; WAN024DK4; Start 331; Stop 355
gaaagcgataagtcgtttatagaca

SEQ ID NO: 395694 - DNA, 25 bp, Artificial
  probe
  misc_feature (1)..(25): SEQ ID NO: 4963; WAN024DK4; Start 329; Stop 353
cagaaagcgataagtcgtttataga

SEQ ID NO: 395695 - DNA, 25 bp, Artificial
  probe
  misc_feature (1)..(25): SEQ ID NO: 4964; WAN024FHV; Start 268; Stop 292
aaccaactctttgtttacgatgtag

SEQ ID NO: 395696 - DNA, 25 bp, Artificial
  probe
  misc_feature (1)..(25): SEQ ID NO: 4964; WAN024FHV; Start 125; Stop 149
ttcattggacgaaggacaaattctt

SEQ ID NO: 395697 - DNA, 25 bp, Artificial
  probe
  misc_feature (1)..(25): SEQ ID NO: 4964; WAN024FHV; Start 269; Stop 293
accaactctttgtttacgatgtagc

SEQ ID NO: 395698 - DNA, 25 bp, Artificial
  probe
  misc_feature (1)..(25): SEQ ID NO: 4964; WAN024FHV; Start 124; Stop 148
gttcattggacgaaggacaaattct

SEQ ID NO: 395699 - DNA, 25 bp, Artificial
  probe
  misc_feature (1)..(25): SEQ ID NO: 4964; WAN024FHV; Start 123; Stop 147
agttcattggacgaaggacaaattc

SEQ ID NO: 395700 - DNA, 25 bp, Artificial
  probe
  misc_feature (1)..(25): SEQ ID NO: 4964; WAN024FHV; Start 59; Stop 83
atacggattggcaattcacggtaag

SEQ ID NO: 395701 - DNA, 25 bp, Artificial
  probe
  misc_feature (1)..(25): SEQ ID NO: 4964; WAN024FHV; Start 58; Stop 82
gatacggattggcaattcacggtaa

SEQ ID NO: 395702 - DNA, 25 bp, Artificial
  probe
  misc_feature (1)..(25): SEQ ID NO: 4964; WAN024FHV; Start 122; Stop 146
cagttcattggacgaaggacaaatt

SEQ ID NO: 395703 - DNA, 25 bp, Artificial
  probe
  misc_feature (1)..(25): SEQ ID NO: 4964; WAN024FHV; Start 270; Stop 294
ccaactctttgtttacgatgtagcg

SEQ ID NO: 395704 - DNA, 25 bp, Artificial
  probe
  misc_feature (1)..(25): SEQ ID NO: 4964; WAN024FHV; Start 209; Stop 233
gaagtcttgtaaagctcaacagaag

SEQ ID NO: 395705 - DNA, 25 bp, Artificial
  probe
  misc_feature (1)..(25): SEQ ID NO: 4964; WAN024FHV; Start 208; Stop 232
agaagtcttgtaaagctcaacagaa

SEQ ID NO: 395706 - DNA, 25 bp, Artificial
  probe
  misc_feature (1)..(25): SEQ ID NO: 4964; WAN024FHV; Start 207; Stop 231
cagaagtcttgtaaagctcaacaga

SEQ ID NO: 395707 - DNA, 25 bp, Artificial
  probe
  misc_feature (1)..(25): SEQ ID NO: 4964; WAN024FHV; Start 179; Stop 203
atgtcttcttggtaatgatcccagt

SEQ ID NO: 395708 - DNA, 25 bp, Artificial
  probe
  misc_feature (1)..(25): SEQ ID NO: 4964; WAN024FHV; Start 265; Stop 289
agaaaccaactctttgtttacgatg

SEQ ID NO: 395709 - DNA, 25 bp, Artificial
  probe
  misc_feature (1)..(25): SEQ ID NO: 4964; WAN024FHV; Start 264; Stop 288
cagaaaccaactctttgtttacgat

SEQ ID NO: 395710 - DNA, 25 bp, Artificial
  probe
  misc_feature (1)..(25): SEQ ID NO: 4964; WAN024FHV; Start 266; Stop 290
gaaaccaactctttgtttacgatgt

SEQ ID NO: 395711 - DNA, 25 bp, Artificial
  probe
  misc_feature (1)..(25): SEQ ID NO: 4964; WAN024FHV; Start 121; Stop 145
acagttcattggacgaaggacaaat

SEQ ID NO: 395712 - DNA, 25 bp, Artificial
  probe
  misc_feature (1)..(25): SEQ ID NO: 4964; WAN024FHV; Start 260; Stop 284
tagccagaaaccaactctttgttta

SEQ ID NO: 395713 - DNA, 25 bp, Artificial
  probe
  misc_feature (1)..(25): SEQ ID NO: 4964; WAN024FHV; Start 178; Stop 202
catgtcttcttggtaatgatcccag

SEQ ID NO: 395714 - DNA, 25 bp, Artificial
  probe
  misc_feature (1)..(25): SEQ ID NO: 4964; WAN024FHV; Start 175; Stop 199
gaacatgtcttcttggtaatgatcc

SEQ ID NO: 395715 - DNA, 25 bp, Artificial
  probe
  misc_feature (1)..(25): SEQ ID NO: 4964; WAN024FHV; Start 174; Stop 198
ggaacatgtcttcttggtaatgatc

SEQ ID NO: 395716 - DNA, 25 bp, Artificial
  probe
  misc_feature (1)..(25): SEQ ID NO: 4964; WAN024FHV; Start 267; Stop 291
aaaccaactctttgtttacgatgta

SEQ ID NO: 395717 - DNA, 25 bp, Artificial
  probe
  misc_feature (1)..(25): SEQ ID NO: 4964; WAN024FHV; Start 206; Stop 230
ccagaagtcttgtaaagctcaacag

SEQ ID NO: 395718 - DNA, 25 bp, Artificial
  probe
  misc_feature (1)..(25): SEQ ID NO: 4964; WAN024FHV; Start 182; Stop 206
tcttcttggtaatgatcccagtgac

SEQ ID NO: 395719 - DNA, 25 bp, Artificial
  probe
  misc_feature (1)..(25): SEQ ID NO: 4964; WAN024FHV; Start 181; Stop 205
gtcttcttggtaatgatcccagtga

SEQ ID NO: 395720 - DNA, 25 bp, Artificial
  probe
  misc_feature (1)..(25): SEQ ID NO: 4964; WAN024FHV; Start 204; Stop 228
gaccagaagtcttgtaaagctcaac

SEQ ID NO: 395721 - DNA, 25 bp, Artificial
  probe
  misc_feature (1)..(25): SEQ ID NO: 4964; WAN024FHV; Start 263; Stop 287
ccagaaaccaactctttgtttacga

SEQ ID NO: 395722 - DNA, 25 bp, Artificial
  probe
  misc_feature (1)..(25): SEQ ID NO: 4964; WAN024FHV; Start 198; Stop 222
cccagtgaccagaagtcttgtaaag

SEQ ID NO: 395723 - DNA, 25 bp, Artificial
  probe
  misc_feature (1)..(25): SEQ ID NO: 4964; WAN024FHV; Start 191; Stop 215
taatgatcccagtgaccagaagtct

SEQ ID NO: 395724 - DNA, 25 bp, Artificial
  probe
  misc_feature (1)..(25): SEQ ID NO: 4964; WAN024FHV; Start 190; Stop 214
gtaatgatcccagtgaccagaagtc

SEQ ID NO: 395725 - DNA, 25 bp, Artificial
  probe
  misc_feature (1)..(25): SEQ ID NO: 4964; WAN024FHV; Start 60; Stop 84
tacggattggcaattcacggtaaga

SEQ ID NO: 395726 - DNA, 25 bp, Artificial
  probe
  misc_feature (1)..(25): SEQ ID NO: 4964; WAN024FHV; Start 180; Stop 204
tgtcttcttggtaatgatcccagtg

SEQ ID NO: 395727 - DNA, 25 bp, Artificial
  probe
  misc_feature (1)..(25): SEQ ID NO: 4964; WAN024FHV; Start 120; Stop 144
gacagttcattggacgaaggacaaa

SEQ ID NO: 395728 - DNA, 25 bp, Artificial
  probe
  misc_feature (1)..(25): SEQ ID NO: 4965; WAN024CYH; Start 46; Stop 70
ttatcagatagcggtttgtcttctt

SEQ ID NO: 395729 - DNA, 25 bp, Artificial
  probe
  misc_feature (1)..(25): SEQ ID NO: 4965; WAN024CYH; Start 45; Stop 69
tttatcagatagcggtttgtcttct

SEQ ID NO: 395730 - DNA, 25 bp, Artificial
  probe
  misc_feature (1)..(25): SEQ ID NO: 4965; WAN024CYH; Start 47; Stop 71
tatcagatagcggtttgtcttcttc

SEQ ID NO: 395731 - DNA, 25 bp, Artificial
  probe
  misc_feature (1)..(25): SEQ ID NO: 4965; WAN024CYH; Start 44; Stop 68
atttatcagatagcggtttgtcttc

SEQ ID NO: 395732 - DNA, 25 bp, Artificial
  probe
  misc_feature (1)..(25): SEQ ID NO: 4965; WAN024CYH; Start 52; Stop 76
gatagcggtttgtcttcttcttcag

SEQ ID NO: 395733 - DNA, 25 bp, Artificial
  probe
  misc_feature (1)..(25): SEQ ID NO: 4965; WAN024CYH; Start 50; Stop 74
cagatagcggtttgtcttcttcttc

SEQ ID NO: 395734 - DNA, 25 bp, Artificial
  probe
  misc_feature (1)..(25): SEQ ID NO: 4965; WAN024CYH; Start 48; Stop 72
atcagatagcggtttgtcttcttct

SEQ ID NO: 395735 - DNA, 25 bp, Artificial
  probe
  misc_feature (1)..(25): SEQ ID NO: 4965; WAN024CYH; Start 51; Stop 75
agatagcggtttgtcttcttcttca

SEQ ID NO: 395736 - DNA, 25 bp, Artificial
  probe
  misc_feature (1)..(25): SEQ ID NO: 4965; WAN024CYH; Start 49; Stop 73
tcagatagcggtttgtcttcttctt

SEQ ID NO: 395737 - DNA, 25 bp, Artificial
  probe
  misc_feature (1)..(25): SEQ ID NO: 4965; WAN024CYH; Start 43; Stop 67
tatttatcagatagcggtttgtctt

SEQ ID NO: 395738 - DNA, 25 bp, Artificial
  probe
  misc_feature (1)..(25): SEQ ID NO: 4965; WAN024CYH; Start 42; Stop 66
atatttatcagatagcggtttgtct

SEQ ID NO: 395739 - DNA, 25 bp, Artificial
  probe
  misc_feature (1)..(25): SEQ ID NO: 4965; WAN024CYH; Start 60; Stop 84
tttgtcttcttcttcagcttggttt

SEQ ID NO: 395740 - DNA, 25 bp, Artificial
  probe
  misc_feature (1)..(25): SEQ ID NO: 4965; WAN024CYH; Start 59; Stop 83
gtttgtcttcttcttcagcttggtt

SEQ ID NO: 395741 - DNA, 25 bp, Artificial
  probe
  misc_feature (1)..(25): SEQ ID NO: 4965; WAN024CYH; Start 53; Stop 77
atagcggtttgtcttcttcttcagc

SEQ ID NO: 395742 - DNA, 25 bp, Artificial
  probe
  misc_feature (1)..(25): SEQ ID NO: 4965; WAN024CYH; Start 41; Stop 65
tatatttatcagatagcggtttgtc

SEQ ID NO: 395743 - DNA, 25 bp, Artificial
  probe
  misc_feature (1)..(25): SEQ ID NO: 4965; WAN024CYH; Start 58; Stop 82
ggtttgtcttcttcttcagcttggt

SEQ ID NO: 395744 - DNA, 25 bp, Artificial
  probe
  misc_feature (1)..(25): SEQ ID NO: 4965; WAN024CYH; Start 61; Stop 85
ttgtcttcttcttcagcttggtttt

SEQ ID NO: 395745 - DNA, 25 bp, Artificial
  probe
  misc_feature (1)..(25): SEQ ID NO: 4965; WAN024CYH; Start 40; Stop 64
atatatttatcagatagcggtttgt

SEQ ID NO: 395746 - DNA, 25 bp, Artificial
  probe
  misc_feature (1)..(25): SEQ ID NO: 4965; WAN024CYH; Start 57; Stop 81
cggtttgtcttcttcttcagcttgg

SEQ ID NO: 395747 - DNA, 25 bp, Artificial
  probe
  misc_feature (1)..(25): SEQ ID NO: 4965; WAN024CYH; Start 56; Stop 80
gcggtttgtcttcttcttcagcttg

SEQ ID NO: 395748 - DNA, 25 bp, Artificial
  probe
  misc_feature (1)..(25): SEQ ID NO: 4965; WAN024CYH; Start 54; Stop 78
tagcggtttgtcttcttcttcagct

SEQ ID NO: 395749 - DNA, 25 bp, Artificial
  probe
  misc_feature (1)..(25): SEQ ID NO: 4965; WAN024CYH; Start 39; Stop 63
aatatatttatcagatagcggtttg

SEQ ID NO: 395750 - DNA, 25 bp, Artificial
  probe
  misc_feature (1)..(25): SEQ ID NO: 4965; WAN024CYH; Start 55; Stop 79
agcggtttgtcttcttcttcagctt

SEQ ID NO: 395751 - DNA, 25 bp, Artificial
  probe
  misc_feature (1)..(25): SEQ ID NO: 4966; WAN024FC9; Start 189; Stop 213
gttcattgtatttagagtccgccaa

SEQ ID NO: 395752 - DNA, 25 bp, Artificial
  probe
  misc_feature (1)..(25): SEQ ID NO: 4966; WAN024FC9; Start 194; Stop 218
ttgtatttagagtccgccaattcac

SEQ ID NO: 395753 - DNA, 25 bp, Artificial
  probe
  misc_feature (1)..(25): SEQ ID NO: 4966; WAN024FC9; Start 243; Stop 267
caacgacattgtccttcaaatcaag

SEQ ID NO: 395754 - DNA, 25 bp, Artificial
  probe
  misc_feature (1)..(25): SEQ ID NO: 4966; WAN024FC9; Start 235; Stop 259
catgataacaacgacattgtccttc

SEQ ID NO: 395755 - DNA, 25 bp, Artificial
  probe
  misc_feature (1)..(25): SEQ ID NO: 4966; WAN024FC9; Start 192; Stop 216
cattgtatttagagtccgccaattc

SEQ ID NO: 395756 - DNA, 25 bp, Artificial
  probe
  misc_feature (1)..(25): SEQ ID NO: 4966; WAN024FC9; Start 193; Stop 217
attgtatttagagtccgccaattca

SEQ ID NO: 395757 - DNA, 25 bp, Artificial
  probe
  misc_feature (1)..(25): SEQ ID NO: 4966; WAN024FC9; Start 191; Stop 215
tcattgtatttagagtccgccaatt

SEQ ID NO: 395758 - DNA, 25 bp, Artificial
  probe
  misc_feature (1)..(25): SEQ ID NO: 4966; WAN024FC9; Start 190; Stop 214
ttcattgtatttagagtccgccaat

SEQ ID NO: 395759 - DNA, 25 bp, Artificial
  probe
  misc_feature (1)..(25): SEQ ID NO: 4966; WAN024FC9; Start 236; Stop 260
atgataacaacgacattgtccttca

SEQ ID NO: 395760 - DNA, 25 bp, Artificial
  probe
  misc_feature (1)..(25): SEQ ID NO: 4966; WAN024FC9; Start 237; Stop 261
tgataacaacgacattgtccttcaa

SEQ ID NO: 395761 - DNA, 25 bp, Artificial
  probe
  misc_feature (1)..(25): SEQ ID NO: 4966; WAN024FC9; Start 188; Stop 212
cgttcattgtatttagagtccgcca

SEQ ID NO: 395762 - DNA, 25 bp, Artificial
  probe
  misc_feature (1)..(25): SEQ ID NO: 4966; WAN024FC9; Start 244; Stop 268
aacgacattgtccttcaaatcaagt

SEQ ID NO: 395763 - DNA, 25 bp, Artificial
  probe
  misc_feature (1)..(25): SEQ ID NO: 4966; WAN024FC9; Start 181; Stop 205
agcacgacgttcattgtatttagag

SEQ ID NO: 395764 - DNA, 25 bp, Artificial
  probe
  misc_feature (1)..(25): SEQ ID NO: 4966; WAN024FC9; Start 195; Stop 219
tgtatttagagtccgccaattcacg

SEQ ID NO: 395765 - DNA, 25 bp, Artificial
  probe
  misc_feature (1)..(25): SEQ ID NO: 4966; WAN024FC9; Start 182; Stop 206
gcacgacgttcattgtatttagagt

SEQ ID NO: 395766 - DNA, 25 bp, Artificial
  probe
  misc_feature (1)..(25): SEQ ID NO: 4966; WAN024FC9; Start 180; Stop 204
cagcacgacgttcattgtatttaga

SEQ ID NO: 395767 - DNA, 25 bp, Artificial
  probe
  misc_feature (1)..(25): SEQ ID NO: 4966; WAN024FC9; Start 179; Stop 203
tcagcacgacgttcattgtatttag

SEQ ID NO: 395768 - DNA, 25 bp, Artificial
  probe
  misc_feature (1)..(25): SEQ ID NO: 4966; WAN024FC9; Start 178; Stop 202
ctcagcacgacgttcattgtattta

SEQ ID NO: 395769 - DNA, 25 bp, Artificial
  probe
  misc_feature (1)..(25): SEQ ID NO: 4966; WAN024FC9; Start 183; Stop 207
cacgacgttcattgtatttagagtc

SEQ ID NO: 395770 - DNA, 25 bp, Artificial
  probe
  misc_feature (1)..(25): SEQ ID NO: 4966; WAN024FC9; Start 249; Stop 273
cattgtccttcaaatcaagtggcac

SEQ ID NO: 395771 - DNA, 25 bp, Artificial
  probe
  misc_feature (1)..(25): SEQ ID NO: 4966; WAN024FC9; Start 245; Stop 269
acgacattgtccttcaaatcaagtg

SEQ ID NO: 395772 - DNA, 25 bp, Artificial
  probe
  misc_feature (1)..(25): SEQ ID NO: 4966; WAN024FC9; Start 184; Stop 208
acgacgttcattgtatttagagtcc

SEQ ID NO: 395773 - DNA, 25 bp, Artificial
  probe
  misc_feature (1)..(25): SEQ ID NO: 4966; WAN024FC9; Start 248; Stop 272
acattgtccttcaaatcaagtggca

SEQ ID NO: 395774 - DNA, 25 bp, Artificial
  probe
  misc_feature (1)..(25): SEQ ID NO: 4966; WAN024FC9; Start 185; Stop 209
cgacgttcattgtatttagagtccg

SEQ ID NO: 395775 - DNA, 25 bp, Artificial
  probe
  misc_feature (1)..(25): SEQ ID NO: 4966; WAN024FC9; Start 176; Stop 200
cactcagcacgacgttcattgtatt

SEQ ID NO: 395776 - DNA, 25 bp, Artificial
  probe
  misc_feature (1)..(25): SEQ ID NO: 4966; WAN024FC9; Start 246; Stop 270
cgacattgtccttcaaatcaagtgg

SEQ ID NO: 395777 - DNA, 25 bp, Artificial
  probe
  misc_feature (1)..(25): SEQ ID NO: 4966; WAN024FC9; Start 186; Stop 210
gacgttcattgtatttagagtccgc

SEQ ID NO: 395778 - DNA, 25 bp, Artificial
  probe
  misc_feature (1)..(25): SEQ ID NO: 4966; WAN024FC9; Start 13; Stop 37
ttgagctttaagggtacgttggttt

SEQ ID NO: 395779 - DNA, 25 bp, Artificial
  probe
  misc_feature (1)..(25): SEQ ID NO: 4966; WAN024FC9; Start 247; Stop 271
gacattgtccttcaaatcaagtggc

SEQ ID NO: 395780 - DNA, 25 bp, Artificial
  probe
  misc_feature (1)..(25): SEQ ID NO: 4966; WAN024FC9; Start 240; Stop 264
taacaacgacattgtccttcaaatc

SEQ ID NO: 395781 - DNA, 25 bp, Artificial
  probe
  misc_feature (1)..(25): SEQ ID NO: 4966; WAN024FC9; Start 238; Stop 262
gataacaacgacattgtccttcaaa

SEQ ID NO: 395782 - DNA, 25 bp, Artificial
  probe
  misc_feature (1)..(25): SEQ ID NO: 4966; WAN024FC9; Start 239; Stop 263
ataacaacgacattgtccttcaaat

SEQ ID NO: 395783 - DNA, 25 bp, Artificial
  probe
  misc_feature (1)..(25): SEQ ID NO: 4966; WAN024FC9; Start 187; Stop 211
acgttcattgtatttagagtccgcc

SEQ ID NO: 395784 - DNA, 25 bp, Artificial
  probe
  misc_feature (1)..(25): SEQ ID NO: 4967; WAN024GED; Start 151; Stop 175
aacaatatcagccaattccatcaag

SEQ ID NO: 395785 - DNA, 25 bp, Artificial
  probe
  misc_feature (1)..(25): SEQ ID NO: 4967; WAN024GED; Start 150; Stop 174
caacaatatcagccaattccatcaa

SEQ ID NO: 395786 - DNA, 25 bp, Artificial
  probe
  misc_feature (1)..(25): SEQ ID NO: 4967; WAN024GED; Start 148; Stop 172
cacaacaatatcagccaattccatc

SEQ ID NO: 395787 - DNA, 25 bp, Artificial
  probe
  misc_feature (1)..(25): SEQ ID NO: 4967; WAN024GED; Start 149; Stop 173
acaacaatatcagccaattccatca

SEQ ID NO: 395788 - DNA, 25 bp, Artificial
  probe
  misc_feature (1)..(25): SEQ ID NO: 4967; WAN024GED; Start 147; Stop 171
tcacaacaatatcagccaattccat

SEQ ID NO: 395789 - DNA, 25 bp, Artificial
  probe
  misc_feature (1)..(25): SEQ ID NO: 4967; WAN024GED; Start 152; Stop 176
acaatatcagccaattccatcaagg

SEQ ID NO: 395790 - DNA, 25 bp, Artificial
  probe
  misc_feature (1)..(25): SEQ ID NO: 4967; WAN024GED; Start 180; Stop 204
gatagagatcggtcacatagtcaac

SEQ ID NO: 395791 - DNA, 25 bp, Artificial
  probe
  misc_feature (1)..(25): SEQ ID NO: 4967; WAN024GED; Start 181; Stop 205
atagagatcggtcacatagtcaaca

SEQ ID NO: 395792 - DNA, 25 bp, Artificial
  probe
  misc_feature (1)..(25): SEQ ID NO: 4967; WAN024GED; Start 146; Stop 170
gtcacaacaatatcagccaattcca

SEQ ID NO: 395793 - DNA, 25 bp, Artificial
  probe
  misc_feature (1)..(25): SEQ ID NO: 4967; WAN024GED; Start 177; Stop 201
gttgatagagatcggtcacatagtc

SEQ ID NO: 395794 - DNA, 25 bp, Artificial
  probe
  misc_feature (1)..(25): SEQ ID NO: 4967; WAN024GED; Start 144; Stop 168
gtgtcacaacaatatcagccaattc

SEQ ID NO: 395795 - DNA, 25 bp, Artificial
  probe
  misc_feature (1)..(25): SEQ ID NO: 4967; WAN024GED; Start 179; Stop 203
tgatagagatcggtcacatagtcaa

SEQ ID NO: 395796 - DNA, 25 bp, Artificial
  probe
  misc_feature (1)..(25): SEQ ID NO: 4967; WAN024GED; Start 178; Stop 202
ttgatagagatcggtcacatagtca

SEQ ID NO: 395797 - DNA, 25 bp, Artificial
  probe
  misc_feature (1)..(25): SEQ ID NO: 4967; WAN024GED; Start 182; Stop 206
tagagatcggtcacatagtcaacac

SEQ ID NO: 395798 - DNA, 25 bp, Artificial
  probe
  misc_feature (1)..(25): SEQ ID NO: 4967; WAN024GED; Start 176; Stop 200
ggttgatagagatcggtcacatagt

SEQ ID NO: 395799 - DNA, 25 bp, Artificial
  probe
  misc_feature (1)..(25): SEQ ID NO: 4967; WAN024GED; Start 145; Stop 169
tgtcacaacaatatcagccaattcc

SEQ ID NO: 395800 - DNA, 25 bp, Artificial
  probe
  misc_feature (1)..(25): SEQ ID NO: 4967; WAN024GED; Start 143; Stop 167
cgtgtcacaacaatatcagccaatt

SEQ ID NO: 395801 - DNA, 25 bp, Artificial
  probe
  misc_feature (1)..(25): SEQ ID NO: 4967; WAN024GED; Start 153; Stop 177
caatatcagccaattccatcaaggg

SEQ ID NO: 395802 - DNA, 25 bp, Artificial
  probe
  misc_feature (1)..(25): SEQ ID NO: 4967; WAN024GED; Start 142; Stop 166
tcgtgtcacaacaatatcagccaat

SEQ ID NO: 395803 - DNA, 25 bp, Artificial
  probe
  misc_feature (1)..(25): SEQ ID NO: 4967; WAN024GED; Start 155; Stop 179
atatcagccaattccatcaagggtt

SEQ ID NO: 395804 - DNA, 25 bp, Artificial
  probe
  misc_feature (1)..(25): SEQ ID NO: 4967; WAN024GED; Start 154; Stop 178
aatatcagccaattccatcaagggt

SEQ ID NO: 395805 - DNA, 25 bp, Artificial
  probe
  misc_feature (1)..(25): SEQ ID NO: 4967; WAN024GED; Start 175; Stop 199
gggttgatagagatcggtcacatag

SEQ ID NO: 395806 - DNA, 25 bp, Artificial
  probe
  misc_feature (1)..(25): SEQ ID NO: 4967; WAN024GED; Start 141; Stop 165
ctcgtgtcacaacaatatcagccaa

SEQ ID NO: 395807 - DNA, 25 bp, Artificial
  probe
  misc_feature (1)..(25): SEQ ID NO: 4967; WAN024GED; Start 174; Stop 198
agggttgatagagatcggtcacata

SEQ ID NO: 395808 - DNA, 25 bp, Artificial
  probe
  misc_feature (1)..(25): SEQ ID NO: 4967; WAN024GED; Start 137; Stop 161
ccacctcgtgtcacaacaatatcag

SEQ ID NO: 395809 - DNA, 25 bp, Artificial
  probe
  misc_feature (1)..(25): SEQ ID NO: 4967; WAN024GED; Start 156; Stop 180
tatcagccaattccatcaagggttg

SEQ ID NO: 395810 - DNA, 25 bp, Artificial
  probe
  misc_feature (1)..(25): SEQ ID NO: 4967; WAN024GED; Start 183; Stop 207
agagatcggtcacatagtcaacacg

SEQ ID NO: 395811 - DNA, 25 bp, Artificial
  probe
  misc_feature (1)..(25): SEQ ID NO: 4967; WAN024GED; Start 135; Stop 159
caccacctcgtgtcacaacaatatc

SEQ ID NO: 395812 - DNA, 25 bp, Artificial
  probe
  misc_feature (1)..(25): SEQ ID NO: 4967; WAN024GED; Start 173; Stop 197
aagggttgatagagatcggtcacat

SEQ ID NO: 395813 - DNA, 25 bp, Artificial
  probe
  misc_feature (1)..(25): SEQ ID NO: 4967; WAN024GED; Start 138; Stop 162
cacctcgtgtcacaacaatatcagc

SEQ ID NO: 395814 - DNA, 25 bp, Artificial
  probe
  misc_feature (1)..(25): SEQ ID NO: 4967; WAN024GED; Start 136; Stop 160
accacctcgtgtcacaacaatatca

SEQ ID NO: 395815 - DNA, 25 bp, Artificial
  probe
  misc_feature (1)..(25): SEQ ID NO: 4967; WAN024GED; Start 185; Stop 209
agatcggtcacatagtcaacacgaa

SEQ ID NO: 395816 - DNA, 25 bp, Artificial
  probe
  misc_feature (1)..(25): SEQ ID NO: 4967; WAN024GED; Start 29; Stop 53
acaaagtaagctgcattttcaatct

SEQ ID NO: 395817 - DNA, 25 bp, Artificial
  probe
  misc_feature (1)..(25): SEQ ID NO: 4968; WAN024BIM; Start 96; Stop 120
gtttcaaatcagggagtttagcaaa

SEQ ID NO: 395818 - DNA, 25 bp, Artificial
  probe
  misc_feature (1)..(25): SEQ ID NO: 4968; WAN024BIM; Start 95; Stop 119
tgtttcaaatcagggagtttagcaa

SEQ ID NO: 395819 - DNA, 25 bp, Artificial
  probe
  misc_feature (1)..(25): SEQ ID NO: 4968; WAN024BIM; Start 93; Stop 117
cttgtttcaaatcagggagtttagc

SEQ ID NO: 395820 - DNA, 25 bp, Artificial
  probe
  misc_feature (1)..(25): SEQ ID NO: 4968; WAN024BIM; Start 88; Stop 112
agtaacttgtttcaaatcagggagt

SEQ ID NO: 395821 - DNA, 25 bp, Artificial
  probe
  misc_feature (1)..(25): SEQ ID NO: 4968; WAN024BIM; Start 92; Stop 116
acttgtttcaaatcagggagtttag

SEQ ID NO: 395822 - DNA, 25 bp, Artificial
  probe
  misc_feature (1)..(25): SEQ ID NO: 4968; WAN024BIM; Start 94; Stop 118
ttgtttcaaatcagggagtttagca

SEQ ID NO: 395823 - DNA, 25 bp, Artificial
  probe
  misc_feature (1)..(25): SEQ ID NO: 4968; WAN024BIM; Start 117; Stop 141
caaactcttcaaacatcttgtccaa

SEQ ID NO: 395824 - DNA, 25 bp, Artificial
  probe
  misc_feature (1)..(25): SEQ ID NO: 4968; WAN024BIM; Start 75; Stop 99
tgtcatcagggaaagtaacttgttt

SEQ ID NO: 395825 - DNA, 25 bp, Artificial
  probe
  misc_feature (1)..(25): SEQ ID NO: 4968; WAN024BIM; Start 74; Stop 98
ttgtcatcagggaaagtaacttgtt

SEQ ID NO: 395826 - DNA, 25 bp, Artificial
  probe
  misc_feature (1)..(25): SEQ ID NO: 4968; WAN024BIM; Start 73; Stop 97
tttgtcatcagggaaagtaacttgt

SEQ ID NO: 395827 - DNA, 25 bp, Artificial
  probe
  misc_feature (1)..(25): SEQ ID NO: 4968; WAN024BIM; Start 114; Stop 138
tagcaaactcttcaaacatcttgtc

SEQ ID NO: 395828 - DNA, 25 bp, Artificial
  probe
  misc_feature (1)..(25): SEQ ID NO: 4968; WAN024BIM; Start 113; Stop 137
ttagcaaactcttcaaacatcttgt

SEQ ID NO: 395829 - DNA, 25 bp, Artificial
  probe
  misc_feature (1)..(25): SEQ ID NO: 4968; WAN024BIM; Start 112; Stop 136
tttagcaaactcttcaaacatcttg

SEQ ID NO: 395830 - DNA, 25 bp, Artificial
  probe
  misc_feature (1)..(25): SEQ ID NO: 4968; WAN024BIM; Start 87; Stop 111
aagtaacttgtttcaaatcagggag

SEQ ID NO: 395831 - DNA, 25 bp, Artificial
  probe
  misc_feature (1)..(25): SEQ ID NO: 4968; WAN024BIM; Start 86; Stop 110
aaagtaacttgtttcaaatcaggga

SEQ ID NO: 395832 - DNA, 25 bp, Artificial
  probe
  misc_feature (1)..(25): SEQ ID NO: 4968; WAN024BIM; Start 6; Stop 30
gtacactagatgggagttgttgaaa

SEQ ID NO: 395833 - DNA, 25 bp, Artificial
  probe
  misc_feature (1)..(25): SEQ ID NO: 4968; WAN024BIM; Start 3; Stop 27
gaagtacactagatgggagttgttg

SEQ ID NO: 395834 - DNA, 25 bp, Artificial
  probe
  misc_feature (1)..(25): SEQ ID NO: 4968; WAN024BIM; Start 118; Stop 142
aaactcttcaaacatcttgtccaag

SEQ ID NO: 395835 - DNA, 25 bp, Artificial
  probe
  misc_feature (1)..(25): SEQ ID NO: 4968; WAN024BIM; Start 5; Stop 29
agtacactagatgggagttgttgaa

SEQ ID NO: 395836 - DNA, 25 bp, Artificial
  probe
  misc_feature (1)..(25): SEQ ID NO: 4968; WAN024BIM; Start 4; Stop 28
aagtacactagatgggagttgttga

SEQ ID NO: 395837 - DNA, 25 bp, Artificial
  probe
  misc_feature (1)..(25): SEQ ID NO: 4968; WAN024BIM; Start 2; Stop 26
tgaagtacactagatgggagttgtt

SEQ ID NO: 395838 - DNA, 25 bp, Artificial
  probe
  misc_feature (1)..(25): SEQ ID NO: 4968; WAN024BIM; Start 1; Stop 25
ttgaagtacactagatgggagttgt

SEQ ID NO: 395839 - DNA, 25 bp, Artificial
  probe
  misc_feature (1)..(25): SEQ ID NO: 4968; WAN024BIM; Start 119; Stop 143
aactcttcaaacatcttgtccaagt

SEQ ID NO: 395840 - DNA, 25 bp, Artificial
  probe
  misc_feature (1)..(25): SEQ ID NO: 4968; WAN024BIM; Start 115; Stop 139
agcaaactcttcaaacatcttgtcc

SEQ ID NO: 395841 - DNA, 25 bp, Artificial
  probe
  misc_feature (1)..(25): SEQ ID NO: 4968; WAN024BIM; Start 120; Stop 144
actcttcaaacatcttgtccaagtc

SEQ ID NO: 395842 - DNA, 25 bp, Artificial
  probe
  misc_feature (1)..(25): SEQ ID NO: 4968; WAN024BIM; Start 116; Stop 140
gcaaactcttcaaacatcttgtcca

SEQ ID NO: 395843 - DNA, 25 bp, Artificial
  probe
  misc_feature (1)..(25): SEQ ID NO: 4968; WAN024BIM; Start 68; Stop 92
ttctctttgtcatcagggaaagtaa

SEQ ID NO: 395844 - DNA, 25 bp, Artificial
  probe
  misc_feature (1)..(25): SEQ ID NO: 4968; WAN024BIM; Start 67; Stop 91
tttctctttgtcatcagggaaagta

SEQ ID NO: 395845 - DNA, 25 bp, Artificial
  probe
  misc_feature (1)..(25): SEQ ID NO: 4968; WAN024BIM; Start 70; Stop 94
ctctttgtcatcagggaaagtaact

SEQ ID NO: 395846 - DNA, 25 bp, Artificial
  probe
  misc_feature (1)..(25): SEQ ID NO: 4968; WAN024BIM; Start 69; Stop 93
tctctttgtcatcagggaaagtaac

SEQ ID NO: 395847 - DNA, 25 bp, Artificial
  probe
  misc_feature (1)..(25): SEQ ID NO: 4968; WAN024BIM; Start 76; Stop 100
gtcatcagggaaagtaacttgtttc

SEQ ID NO: 395848 - DNA, 25 bp, Artificial
  probe
  misc_feature (1)..(25): SEQ ID NO: 4968; WAN024BIM; Start 72; Stop 96
ctttgtcatcagggaaagtaacttg

SEQ ID NO: 395849 - DNA, 25 bp, Artificial
  probe
  misc_feature (1)..(25): SEQ ID NO: 4968; WAN024BIM; Start 71; Stop 95
tctttgtcatcagggaaagtaactt

SEQ ID NO: 395850 - DNA, 25 bp, Artificial
  probe
  misc_feature (1)..(25): SEQ ID NO: 4969; WAN024FVO; Start 157; Stop 181
tggtgcgataacatcttcattagaa

SEQ ID NO: 395851 - DNA, 25 bp, Artificial
  probe
  misc_feature (1)..(25): SEQ ID NO: 4969; WAN024FVO; Start 156; Stop 180
ctggtgcgataacatcttcattaga

SEQ ID NO: 395852 - DNA, 25 bp, Artificial
  probe
  misc_feature (1)..(25): SEQ ID NO: 4969; WAN024FVO; Start 155; Stop 179
gctggtgcgataacatcttcattag

SEQ ID NO: 395853 - DNA, 25 bp, Artificial
  probe
  misc_feature (1)..(25): SEQ ID NO: 4969; WAN024FVO; Start 8; Stop 32
acagaaaggagcatagaaagaagtc

SEQ ID NO: 395854 - DNA, 25 bp, Artificial
  probe
  misc_feature (1)..(25): SEQ ID NO: 4969; WAN024FVO; Start 7; Stop 31
tacagaaaggagcatagaaagaagt

SEQ ID NO: 395855 - DNA, 25 bp, Artificial
  probe
  misc_feature (1)..(25): SEQ ID NO: 4969; WAN024FVO; Start 158; Stop 182
ggtgcgataacatcttcattagaaa

SEQ ID NO: 395856 - DNA, 25 bp, Artificial
  probe
  misc_feature (1)..(25): SEQ ID NO: 4969; WAN024FVO; Start 106; Stop 130
tttaatttcaagtgcttcagcgttt

SEQ ID NO: 395857 - DNA, 25 bp, Artificial
  probe
  misc_feature (1)..(25): SEQ ID NO: 4969; WAN024FVO; Start 2; Stop 26
tgaagtacagaaaggagcatagaaa

SEQ ID NO: 395858 - DNA, 25 bp, Artificial
  probe
  misc_feature (1)..(25): SEQ ID NO: 4969; WAN024FVO; Start 1; Stop 25
ttgaagtacagaaaggagcatagaa

SEQ ID NO: 395859 - DNA, 25 bp, Artificial
  probe
  misc_feature (1)..(25): SEQ ID NO: 4969; WAN024FVO; Start 5; Stop 29
agtacagaaaggagcatagaaagaa

SEQ ID NO: 395860 - DNA, 25 bp, Artificial
  probe
  misc_feature (1)..(25): SEQ ID NO: 4969; WAN024FVO; Start 4; Stop 28
aagtacagaaaggagcatagaaaga

SEQ ID NO: 395861 - DNA, 25 bp, Artificial
  probe
  misc_feature (1)..(25): SEQ ID NO: 4969; WAN024FVO; Start 6; Stop 30
gtacagaaaggagcatagaaagaag

SEQ ID NO: 395862 - DNA, 25 bp, Artificial
  probe
  misc_feature (1)..(25): SEQ ID NO: 4969; WAN024FVO; Start 3; Stop 27
gaagtacagaaaggagcatagaaag

SEQ ID NO: 395863 - DNA, 25 bp, Artificial
  probe
  misc_feature (1)..(25): SEQ ID NO: 4969; WAN024FVO; Start 105; Stop 129
ctttaatttcaagtgcttcagcgtt

SEQ ID NO: 395864 - DNA, 25 bp, Artificial
  probe
  misc_feature (1)..(25): SEQ ID NO: 4969; WAN024FVO; Start 101; Stop 125
ccacctttaatttcaagtgcttcag

SEQ ID NO: 395865 - DNA, 25 bp, Artificial
  probe
  misc_feature (1)..(25): SEQ ID NO: 4969; WAN024FVO; Start 99; Stop 123
caccacctttaatttcaagtgcttc

SEQ ID NO: 395866 - DNA, 25 bp, Artificial
  probe
  misc_feature (1)..(25): SEQ ID NO: 4969; WAN024FVO; Start 192; Stop 216
cagatggtccaacaaatacagatgc

SEQ ID NO: 395867 - DNA, 25 bp, Artificial
  probe
  misc_feature (1)..(25): SEQ ID NO: 4969; WAN024FVO; Start 191; Stop 215
gcagatggtccaacaaatacagatg

SEQ ID NO: 395868 - DNA, 25 bp, Artificial
  probe
  misc_feature (1)..(25): SEQ ID NO: 4969; WAN024FVO; Start 100; Stop 124
accacctttaatttcaagtgcttca

SEQ ID NO: 395869 - DNA, 25 bp, Artificial
  probe
  misc_feature (1)..(25): SEQ ID NO: 4969; WAN024FVO; Start 9; Stop 33
cagaaaggagcatagaaagaagtcc

SEQ ID NO: 395870 - DNA, 25 bp, Artificial
  probe
  misc_feature (1)..(25): SEQ ID NO: 4969; WAN024FVO; Start 102; Stop 126
cacctttaatttcaagtgcttcagc

SEQ ID NO: 395871 - DNA, 25 bp, Artificial
  probe
  misc_feature (1)..(25): SEQ ID NO: 4969; WAN024FVO; Start 198; Stop 222
gtccaacaaatacagatgcaagatc

SEQ ID NO: 395872 - DNA, 25 bp, Artificial
  probe
  misc_feature (1)..(25): SEQ ID NO: 4969; WAN024FVO; Start 104; Stop 128
cctttaatttcaagtgcttcagcgt

SEQ ID NO: 395873 - DNA, 25 bp, Artificial
  probe
  misc_feature (1)..(25): SEQ ID NO: 4969; WAN024FVO; Start 103; Stop 127
acctttaatttcaagtgcttcagcg

SEQ ID NO: 395874 - DNA, 25 bp, Artificial
  probe
  misc_feature (1)..(25): SEQ ID NO: 4969; WAN024FVO; Start 90; Stop 114
cttcgattgcaccacctttaatttc

SEQ ID NO: 395875 - DNA, 25 bp, Artificial
  probe
  misc_feature (1)..(25): SEQ ID NO: 4969; WAN024FVO; Start 94; Stop 118
gattgcaccacctttaatttcaagt

SEQ ID NO: 395876 - DNA, 25 bp, Artificial
  probe
  misc_feature (1)..(25): SEQ ID NO: 4969; WAN024FVO; Start 197; Stop 221
ggtccaacaaatacagatgcaagat

SEQ ID NO: 395877 - DNA, 25 bp, Artificial
  probe
  misc_feature (1)..(25): SEQ ID NO: 4969; WAN024FVO; Start 62; Stop 86
agaatctcttctttagatgcgacag

SEQ ID NO: 395878 - DNA, 25 bp, Artificial
  probe
  misc_feature (1)..(25): SEQ ID NO: 4969; WAN024FVO; Start 91; Stop 115
ttcgattgcaccacctttaatttca

SEQ ID NO: 395879 - DNA, 25 bp, Artificial
  probe
  misc_feature (1)..(25): SEQ ID NO: 4969; WAN024FVO; Start 195; Stop 219
atggtccaacaaatacagatgcaag

SEQ ID NO: 395880 - DNA, 25 bp, Artificial
  probe
  misc_feature (1)..(25): SEQ ID NO: 4969; WAN024FVO; Start 194; Stop 218
gatggtccaacaaatacagatgcaa

SEQ ID NO: 395881 - DNA, 25 bp, Artificial
  probe
  misc_feature (1)..(25): SEQ ID NO: 4969; WAN024FVO; Start 93; Stop 117
cgattgcaccacctttaatttcaag

SEQ ID NO: 395882 - DNA, 25 bp, Artificial
  probe
  misc_feature (1)..(25): SEQ ID NO: 4969; WAN024FVO; Start 92; Stop 116
tcgattgcaccacctttaatttcaa

SEQ ID NO: 395883 - DNA, 25 bp, Artificial
  probe
  misc_feature (1)..(25): SEQ ID NO: 4970; WAN024C6L; Start 399; Stop 423
aagaagatagtaatggcaagtcctg

SEQ ID NO: 395884 - DNA, 25 bp, Artificial
  probe
  misc_feature (1)..(25): SEQ ID NO: 4970; WAN024C6L; Start 151; Stop 175
tatctgtcaatgagaaggcaagaat

SEQ ID NO: 395885 - DNA, 25 bp, Artificial
  probe
  misc_feature (1)..(25): SEQ ID NO: 4970; WAN024C6L; Start 150; Stop 174
atatctgtcaatgagaaggcaagaa

SEQ ID NO: 395886 - DNA, 25 bp, Artificial
  probe
  misc_feature (1)..(25): SEQ ID NO: 4970; WAN024C6L; Start 149; Stop 173
aatatctgtcaatgagaaggcaaga

SEQ ID NO: 395887 - DNA, 25 bp, Artificial
  probe
  misc_feature (1)..(25): SEQ ID NO: 4970; WAN024C6L; Start 152; Stop 176
atctgtcaatgagaaggcaagaatg

SEQ ID NO: 395888 - DNA, 25 bp, Artificial
  probe
  misc_feature (1)..(25): SEQ ID NO: 4970; WAN024C6L; Start 345; Stop 369
acagttgttgtcaagatagagagaa

SEQ ID NO: 395889 - DNA, 25 bp, Artificial
  probe
  misc_feature (1)..(25): SEQ ID NO: 4970; WAN024C6L; Start 346; Stop 370
cagttgttgtcaagatagagagaat

SEQ ID NO: 395890 - DNA, 25 bp, Artificial
  probe
  misc_feature (1)..(25): SEQ ID NO: 4970; WAN024C6L; Start 335; Stop 359
aatagcaagaacagttgttgtcaag

SEQ ID NO: 395891 - DNA, 25 bp, Artificial
  probe
  misc_feature (1)..(25): SEQ ID NO: 4970; WAN024C6L; Start 344; Stop 368
aacagttgttgtcaagatagagaga

SEQ ID NO: 395892 - DNA, 25 bp, Artificial
  probe
  misc_feature (1)..(25): SEQ ID NO: 4970; WAN024C6L; Start 342; Stop 366
agaacagttgttgtcaagatagaga

SEQ ID NO: 395893 - DNA, 25 bp, Artificial
  probe
  misc_feature (1)..(25): SEQ ID NO: 4970; WAN024C6L; Start 334; Stop 358
caatagcaagaacagttgttgtcaa

SEQ ID NO: 395894 - DNA, 25 bp, Artificial
  probe
  misc_feature (1)..(25): SEQ ID NO: 4970; WAN024C6L; Start 343; Stop 367
gaacagttgttgtcaagatagagag

SEQ ID NO: 395895 - DNA, 25 bp, Artificial
  probe
  misc_feature (1)..(25): SEQ ID NO: 4970; WAN024C6L; Start 339; Stop 363
gcaagaacagttgttgtcaagatag

SEQ ID NO: 395896 - DNA, 25 bp, Artificial
  probe
  misc_feature (1)..(25): SEQ ID NO: 4970; WAN024C6L; Start 340; Stop 364
caagaacagttgttgtcaagataga

SEQ ID NO: 395897 - DNA, 25 bp, Artificial
  probe
  misc_feature (1)..(25): SEQ ID NO: 4970; WAN024C6L; Start 338; Stop 362
agcaagaacagttgttgtcaagata

SEQ ID NO: 395898 - DNA, 25 bp, Artificial
  probe
  misc_feature (1)..(25): SEQ ID NO: 4970; WAN024C6L; Start 337; Stop 361
tagcaagaacagttgttgtcaagat

SEQ ID NO: 395899 - DNA, 25 bp, Artificial
  probe
  misc_feature (1)..(25): SEQ ID NO: 4970; WAN024C6L; Start 336; Stop 360
atagcaagaacagttgttgtcaaga

SEQ ID NO: 395900 - DNA, 25 bp, Artificial
  probe
  misc_feature (1)..(25): SEQ ID NO: 4970; WAN024C6L; Start 341; Stop 365
aagaacagttgttgtcaagatagag

SEQ ID NO: 395901 - DNA, 25 bp, Artificial
  probe
  misc_feature (1)..(25): SEQ ID NO: 4970; WAN024C6L; Start 398; Stop 422
aaagaagatagtaatggcaagtcct

SEQ ID NO: 395902 - DNA, 25 bp, Artificial
  probe
  misc_feature (1)..(25): SEQ ID NO: 4970; WAN024C6L; Start 397; Stop 421
caaagaagatagtaatggcaagtcc

SEQ ID NO: 395903 - DNA, 25 bp, Artificial
  probe
  misc_feature (1)..(25): SEQ ID NO: 4970; WAN024C6L; Start 27; Stop 51
gtcgttccaatcaaatcagagtaaa

SEQ ID NO: 395904 - DNA, 25 bp, Artificial
  probe
  misc_feature (1)..(25): SEQ ID NO: 4970; WAN024C6L; Start 26; Stop 50
tgtcgttccaatcaaatcagagtaa

SEQ ID NO: 395905 - DNA, 25 bp, Artificial
  probe
  misc_feature (1)..(25): SEQ ID NO: 4970; WAN024C6L; Start 29; Stop 53
cgttccaatcaaatcagagtaaaga

SEQ ID NO: 395906 - DNA, 25 bp, Artificial
  probe
  misc_feature (1)..(25): SEQ ID NO: 4970; WAN024C6L; Start 28; Stop 52
tcgttccaatcaaatcagagtaaag

SEQ ID NO: 395907 - DNA, 25 bp, Artificial
  probe
  misc_feature (1)..(25): SEQ ID NO: 4970; WAN024C6L; Start 31; Stop 55
ttccaatcaaatcagagtaaagagc

SEQ ID NO: 395908 - DNA, 25 bp, Artificial
  probe
  misc_feature (1)..(25): SEQ ID NO: 4970; WAN024C6L; Start 33; Stop 57
ccaatcaaatcagagtaaagagcct

SEQ ID NO: 395909 - DNA, 25 bp, Artificial
  probe
  misc_feature (1)..(25): SEQ ID NO: 4970; WAN024C6L; Start 32; Stop 56
tccaatcaaatcagagtaaagagcc

SEQ ID NO: 395910 - DNA, 25 bp, Artificial
  probe
  misc_feature (1)..(25): SEQ ID NO: 4970; WAN024C6L; Start 396; Stop 420
acaaagaagatagtaatggcaagtc

SEQ ID NO: 395911 - DNA, 25 bp, Artificial
  probe
  misc_feature (1)..(25): SEQ ID NO: 4970; WAN024C6L; Start 395; Stop 419
gacaaagaagatagtaatggcaagt

SEQ ID NO: 395912 - DNA, 25 bp, Artificial
  probe
  misc_feature (1)..(25): SEQ ID NO: 4970; WAN024C6L; Start 394; Stop 418
tgacaaagaagatagtaatggcaag

SEQ ID NO: 395913 - DNA, 25 bp, Artificial
  probe
  misc_feature (1)..(25): SEQ ID NO: 4970; WAN024C6L; Start 392; Stop 416
gatgacaaagaagatagtaatggca

SEQ ID NO: 395914 - DNA, 25 bp, Artificial
  probe
  misc_feature (1)..(25): SEQ ID NO: 4970; WAN024C6L; Start 391; Stop 415
tgatgacaaagaagatagtaatggc

SEQ ID NO: 395915 - DNA, 25 bp, Artificial
  probe
  misc_feature (1)..(25): SEQ ID NO: 4970; WAN024C6L; Start 40; Stop 64
aatcagagtaaagagccttatccaa

SEQ ID NO: 395916 - DNA, 25 bp, Artificial
  probe
  misc_feature (1)..(25): SEQ ID NO: 4971; WAN024GBI; Start 47; Stop 71
tgctctcattctttcacacttctaa

SEQ ID NO: 395917 - DNA, 25 bp, Artificial
  probe
  misc_feature (1)..(25): SEQ ID NO: 4971; WAN024GBI; Start 39; Stop 63
aaatcaactgctctcattctttcac

SEQ ID NO: 395918 - DNA, 25 bp, Artificial
  probe
  misc_feature (1)..(25): SEQ ID NO: 4971; WAN024GBI; Start 46; Stop 70
ctgctctcattctttcacacttcta

SEQ ID NO: 395919 - DNA, 25 bp, Artificial
  probe
  misc_feature (1)..(25): SEQ ID NO: 4971; WAN024GBI; Start 40; Stop 64
aatcaactgctctcattctttcaca

SEQ ID NO: 395920 - DNA, 25 bp, Artificial
  probe
  misc_feature (1)..(25): SEQ ID NO: 4971; WAN024GBI; Start 48; Stop 72
gctctcattctttcacacttctaag

SEQ ID NO: 395921 - DNA, 25 bp, Artificial
  probe
  misc_feature (1)..(25): SEQ ID NO: 4971; WAN024GBI; Start 50; Stop 74
tctcattctttcacacttctaagga

SEQ ID NO: 395922 - DNA, 25 bp, Artificial
  probe
  misc_feature (1)..(25): SEQ ID NO: 4971; WAN024GBI; Start 49; Stop 73
ctctcattctttcacacttctaagg

SEQ ID NO: 395923 - DNA, 25 bp, Artificial
  probe
  misc_feature (1)..(25): SEQ ID NO: 4971; WAN024GBI; Start 38; Stop 62
taaatcaactgctctcattctttca

SEQ ID NO: 395924 - DNA, 25 bp, Artificial
  probe
  misc_feature (1)..(25): SEQ ID NO: 4971; WAN024GBI; Start 44; Stop 68
aactgctctcattctttcacacttc

SEQ ID NO: 395925 - DNA, 25 bp, Artificial
  probe
  misc_feature (1)..(25): SEQ ID NO: 4971; WAN024GBI; Start 41; Stop 65
atcaactgctctcattctttcacac

SEQ ID NO: 395926 - DNA, 25 bp, Artificial
  probe
  misc_feature (1)..(25): SEQ ID NO: 4971; WAN024GBI; Start 43; Stop 67
caactgctctcattctttcacactt

SEQ ID NO: 395927 - DNA, 25 bp, Artificial
  probe
  misc_feature (1)..(25): SEQ ID NO: 4971; WAN024GBI; Start 51; Stop 75
ctcattctttcacacttctaaggat

SEQ ID NO: 395928 - DNA, 25 bp, Artificial
  probe
  misc_feature (1)..(25): SEQ ID NO: 4971; WAN024GBI; Start 249; Stop 273
ggataggaggattggaaatgacatg

SEQ ID NO: 395929 - DNA, 25 bp, Artificial
  probe
  misc_feature (1)..(25): SEQ ID NO: 4971; WAN024GBI; Start 45; Stop 69
actgctctcattctttcacacttct

SEQ ID NO: 395930 - DNA, 25 bp, Artificial
  probe
  misc_feature (1)..(25): SEQ ID NO: 4971; WAN024GBI; Start 37; Stop 61
ttaaatcaactgctctcattctttc

SEQ ID NO: 395931 - DNA, 25 bp, Artificial
  probe
  misc_feature (1)..(25): SEQ ID NO: 4971; WAN024GBI; Start 248; Stop 272
cggataggaggattggaaatgacat

SEQ ID NO: 395932 - DNA, 25 bp, Artificial
  probe
  misc_feature (1)..(25): SEQ ID NO: 4971; WAN024GBI; Start 42; Stop 66
tcaactgctctcattctttcacact

SEQ ID NO: 395933 - DNA, 25 bp, Artificial
  probe
  misc_feature (1)..(25): SEQ ID NO: 4971; WAN024GBI; Start 52; Stop 76
tcattctttcacacttctaaggata

SEQ ID NO: 395934 - DNA, 25 bp, Artificial
  probe
  misc_feature (1)..(25): SEQ ID NO: 4971; WAN024GBI; Start 36; Stop 60
attaaatcaactgctctcattcttt

SEQ ID NO: 395935 - DNA, 25 bp, Artificial
  probe
  misc_feature (1)..(25): SEQ ID NO: 4971; WAN024GBI; Start 246; Stop 270
cacggataggaggattggaaatgac

SEQ ID NO: 395936 - DNA, 25 bp, Artificial
  probe
  misc_feature (1)..(25): SEQ ID NO: 4971; WAN024GBI; Start 247; Stop 271
acggataggaggattggaaatgaca

SEQ ID NO: 395937 - DNA, 25 bp, Artificial
  probe
  misc_feature (1)..(25): SEQ ID NO: 4971; WAN024GBI; Start 53; Stop 77
cattctttcacacttctaaggatat

SEQ ID NO: 395938 - DNA, 25 bp, Artificial
  probe
  misc_feature (1)..(25): SEQ ID NO: 4971; WAN024GBI; Start 56; Stop 80
tctttcacacttctaaggatatagt

SEQ ID NO: 395939 - DNA, 25 bp, Artificial
  probe
  misc_feature (1)..(25): SEQ ID NO: 4971; WAN024GBI; Start 55; Stop 79
ttctttcacacttctaaggatatag

SEQ ID NO: 395940 - DNA, 25 bp, Artificial
  probe
  misc_feature (1)..(25): SEQ ID NO: 4971; WAN024GBI; Start 59; Stop 83
ttcacacttctaaggatatagtatc

SEQ ID NO: 395941 - DNA, 25 bp, Artificial
  probe
  misc_feature (1)..(25): SEQ ID NO: 4971; WAN024GBI; Start 245; Stop 269
gcacggataggaggattggaaatga

SEQ ID NO: 395942 - DNA, 25 bp, Artificial
  probe
  misc_feature (1)..(25): SEQ ID NO: 4971; WAN024GBI; Start 57; Stop 81
ctttcacacttctaaggatatagta

SEQ ID NO: 395943 - DNA, 25 bp, Artificial
  probe
  misc_feature (1)..(25): SEQ ID NO: 4971; WAN024GBI; Start 54; Stop 78
attctttcacacttctaaggatata

SEQ ID NO: 395944 - DNA, 25 bp, Artificial
  probe
  misc_feature (1)..(25): SEQ ID NO: 4971; WAN024GBI; Start 60; Stop 84
tcacacttctaaggatatagtatcc

SEQ ID NO: 395945 - DNA, 25 bp, Artificial
  probe
  misc_feature (1)..(25): SEQ ID NO: 4971; WAN024GBI; Start 62; Stop 86
acacttctaaggatatagtatccct

SEQ ID NO: 395946 - DNA, 25 bp, Artificial
  probe
  misc_feature (1)..(25): SEQ ID NO: 4971; WAN024GBI; Start 61; Stop 85
cacacttctaaggatatagtatccc

SEQ ID NO: 395947 - DNA, 25 bp, Artificial
  probe
  misc_feature (1)..(25): SEQ ID NO: 4971; WAN024GBI; Start 3; Stop 27
gaagtcagttcttgaccgtctcgtt

SEQ ID NO: 395948 - DNA, 25 bp, Artificial
  probe
  misc_feature (1)..(25): SEQ ID NO: 4971; WAN024GBI; Start 1; Stop 25
ttgaagtcagttcttgaccgtctcg

SEQ ID NO: 395949 - DNA, 25 bp, Artificial
  probe
  misc_feature (1)..(25): SEQ ID NO: 4972; WAN024FKG; Start 126; Stop 150
tcatcatcagttactaagcgattca

SEQ ID NO: 395950 - DNA, 25 bp, Artificial
  probe
  misc_feature (1)..(25): SEQ ID NO: 4972; WAN024FKG; Start 127; Stop 151
catcatcagttactaagcgattcaa

SEQ ID NO: 395951 - DNA, 25 bp, Artificial
  probe
  misc_feature (1)..(25): SEQ ID NO: 4972; WAN024FKG; Start 122; Stop 146
caattcatcatcagttactaagcga

SEQ ID NO: 395952 - DNA, 25 bp, Artificial
  probe
  misc_feature (1)..(25): SEQ ID NO: 4972; WAN024FKG; Start 121; Stop 145
tcaattcatcatcagttactaagcg

SEQ ID NO: 395953 - DNA, 25 bp, Artificial
  probe
  misc_feature (1)..(25): SEQ ID NO: 4972; WAN024FKG; Start 260; Stop 284
ttgctccattagaatatctcctgaa

SEQ ID NO: 395954 - DNA, 25 bp, Artificial
  probe
  misc_feature (1)..(25): SEQ ID NO: 4972; WAN024FKG; Start 125; Stop 149
ttcatcatcagttactaagcgattc

SEQ ID NO: 395955 - DNA, 25 bp, Artificial
  probe
  misc_feature (1)..(25): SEQ ID NO: 4972; WAN024FKG; Start 164; Stop 188
attgtcacgaatactgccagataag

SEQ ID NO: 395956 - DNA, 25 bp, Artificial
  probe
  misc_feature (1)..(25): SEQ ID NO: 4972; WAN024FKG; Start 163; Stop 187
gattgtcacgaatactgccagataa

SEQ ID NO: 395957 - DNA, 25 bp, Artificial
  probe
  misc_feature (1)..(25): SEQ ID NO: 4972; WAN024FKG; Start 259; Stop 283
attgctccattagaatatctcctga

SEQ ID NO: 395958 - DNA, 25 bp, Artificial
  probe
  misc_feature (1)..(25): SEQ ID NO: 4972; WAN024FKG; Start 257; Stop 281
tgattgctccattagaatatctcct

SEQ ID NO: 395959 - DNA, 25 bp, Artificial
  probe
  misc_feature (1)..(25): SEQ ID NO: 4972; WAN024FKG; Start 258; Stop 282
gattgctccattagaatatctcctg

SEQ ID NO: 395960 - DNA, 25 bp, Artificial
  probe
  misc_feature (1)..(25): SEQ ID NO: 4972; WAN024FKG; Start 124; Stop 148
attcatcatcagttactaagcgatt

SEQ ID NO: 395961 - DNA, 25 bp, Artificial
  probe
  misc_feature (1)..(25): SEQ ID NO: 4972; WAN024FKG; Start 162; Stop 186
agattgtcacgaatactgccagata

SEQ ID NO: 395962 - DNA, 25 bp, Artificial
  probe
  misc_feature (1)..(25): SEQ ID NO: 4972; WAN024FKG; Start 256; Stop 280
ttgattgctccattagaatatctcc

SEQ ID NO: 395963 - DNA, 25 bp, Artificial
  probe
  misc_feature (1)..(25): SEQ ID NO: 4972; WAN024FKG; Start 123; Stop 147
aattcatcatcagttactaagcgat

SEQ ID NO: 395964 - DNA, 25 bp, Artificial
  probe
  misc_feature (1)..(25): SEQ ID NO: 4972; WAN024FKG; Start 43; Stop 67
gttcaccaacttcagtatctagtcc

SEQ ID NO: 395965 - DNA, 25 bp, Artificial
  probe
  misc_feature (1)..(25): SEQ ID NO: 4972; WAN024FKG; Start 165; Stop 189
ttgtcacgaatactgccagataaga

SEQ ID NO: 395966 - DNA, 25 bp, Artificial
  probe
  misc_feature (1)..(25): SEQ ID NO: 4972; WAN024FKG; Start 42; Stop 66
cgttcaccaacttcagtatctagtc

SEQ ID NO: 395967 - DNA, 25 bp, Artificial
  probe
  misc_feature (1)..(25): SEQ ID NO: 4972; WAN024FKG; Start 254; Stop 278
acttgattgctccattagaatatct

SEQ ID NO: 395968 - DNA, 25 bp, Artificial
  probe
  misc_feature (1)..(25): SEQ ID NO: 4972; WAN024FKG; Start 161; Stop 185
aagattgtcacgaatactgccagat

SEQ ID NO: 395969 - DNA, 25 bp, Artificial
  probe
  misc_feature (1)..(25): SEQ ID NO: 4972; WAN024FKG; Start 91; Stop 115
cacctagtgatactaagtctagcac

SEQ ID NO: 395970 - DNA, 25 bp, Artificial
  probe
  misc_feature (1)..(25): SEQ ID NO: 4972; WAN024FKG; Start 255; Stop 279
cttgattgctccattagaatatctc

SEQ ID NO: 395971 - DNA, 25 bp, Artificial
  probe
  misc_feature (1)..(25): SEQ ID NO: 4972; WAN024FKG; Start 120; Stop 144
atcaattcatcatcagttactaagc

SEQ ID NO: 395972 - DNA, 25 bp, Artificial
  probe
  misc_feature (1)..(25): SEQ ID NO: 4972; WAN024FKG; Start 111; Stop 135
agcactttcatcaattcatcatcag

SEQ ID NO: 395973 - DNA, 25 bp, Artificial
  probe
  misc_feature (1)..(25): SEQ ID NO: 4972; WAN024FKG; Start 270; Stop 294
agaatatctcctgaaagcggtttat

SEQ ID NO: 395974 - DNA, 25 bp, Artificial
  probe
  misc_feature (1)..(25): SEQ ID NO: 4972; WAN024FKG; Start 268; Stop 292
ttagaatatctcctgaaagcggttt

SEQ ID NO: 395975 - DNA, 25 bp, Artificial
  probe
  misc_feature (1)..(25): SEQ ID NO: 4972; WAN024FKG; Start 267; Stop 291
attagaatatctcctgaaagcggtt

SEQ ID NO: 395976 - DNA, 25 bp, Artificial
  probe
  misc_feature (1)..(25): SEQ ID NO: 4972; WAN024FKG; Start 264; Stop 288
tccattagaatatctcctgaaagcg

SEQ ID NO: 395977 - DNA, 25 bp, Artificial
  probe
  misc_feature (1)..(25): SEQ ID NO: 4972; WAN024FKG; Start 168; Stop 192
tcacgaatactgccagataagactg

SEQ ID NO: 395978 - DNA, 25 bp, Artificial
  probe
  misc_feature (1)..(25): SEQ ID NO: 4972; WAN024FKG; Start 167; Stop 191
gtcacgaatactgccagataagact

SEQ ID NO: 395979 - DNA, 25 bp, Artificial
  probe
  misc_feature (1)..(25): SEQ ID NO: 4972; WAN024FKG; Start 266; Stop 290
cattagaatatctcctgaaagcggt

SEQ ID NO: 395980 - DNA, 25 bp, Artificial
  probe
  misc_feature (1)..(25): SEQ ID NO: 4972; WAN024FKG; Start 130; Stop 154
catcagttactaagcgattcaaacc

SEQ ID NO: 395981 - DNA, 25 bp, Artificial
  probe
  misc_feature (1)..(25): SEQ ID NO: 4972; WAN024FKG; Start 269; Stop 293
tagaatatctcctgaaagcggttta

SEQ ID NO: 395982 - DNA, 25 bp, Artificial
  probe
  misc_feature (1)..(25): SEQ ID NO: 4973; WAN024G8C; Start 216; Stop 240
gaagaacgatatcaacaggcttacc

SEQ ID NO: 395983 - DNA, 25 bp, Artificial
  probe
  misc_feature (1)..(25): SEQ ID NO: 4973; WAN024G8C; Start 1; Stop 25
ttgaagtgcctcctgactaatctca

SEQ ID NO: 395984 - DNA, 25 bp, Artificial
  probe
  misc_feature (1)..(25): SEQ ID NO: 4973; WAN024G8C; Start 215; Stop 239
cgaagaacgatatcaacaggcttac

SEQ ID NO: 395985 - DNA, 25 bp, Artificial
  probe
  misc_feature (1)..(25): SEQ ID NO: 4973; WAN024G8C; Start 231; Stop 255
caggcttaccttgtttatccactaa

SEQ ID NO: 395986 - DNA, 25 bp, Artificial
  probe
  misc_feature (1)..(25): SEQ ID NO: 4973; WAN024G8C; Start 127; Stop 151
caaatccaacttgctgaaatgttcg

SEQ ID NO: 395987 - DNA, 25 bp, Artificial
  probe
  misc_feature (1)..(25): SEQ ID NO: 4973; WAN024G8C; Start 230; Stop 254
acaggcttaccttgtttatccacta

SEQ ID NO: 395988 - DNA, 25 bp, Artificial
  probe
  misc_feature (1)..(25): SEQ ID NO: 4973; WAN024G8C; Start 219; Stop 243
gaacgatatcaacaggcttaccttg

SEQ ID NO: 395989 - DNA, 25 bp, Artificial
  probe
  misc_feature (1)..(25): SEQ ID NO: 4973; WAN024G8C; Start 218; Stop 242
agaacgatatcaacaggcttacctt

SEQ ID NO: 395990 - DNA, 25 bp, Artificial
  probe
  misc_feature (1)..(25): SEQ ID NO: 4973; WAN024G8C; Start 217; Stop 241
aagaacgatatcaacaggcttacct

SEQ ID NO: 395991 - DNA, 25 bp, Artificial
  probe
  misc_feature (1)..(25): SEQ ID NO: 4973; WAN024G8C; Start 62; Stop 86
gcataatcaataaacttctgaacct

SEQ ID NO: 395992 - DNA, 25 bp, Artificial
  probe
  misc_feature (1)..(25): SEQ ID NO: 4973; WAN024G8C; Start 61; Stop 85
agcataatcaataaacttctgaacc

SEQ ID NO: 395993 - DNA, 25 bp, Artificial
  probe
  misc_feature (1)..(25): SEQ ID NO: 4973; WAN024G8C; Start 214; Stop 238
ccgaagaacgatatcaacaggctta

SEQ ID NO: 395994 - DNA, 25 bp, Artificial
  probe
  misc_feature (1)..(25): SEQ ID NO: 4973; WAN024G8C; Start 128; Stop 152
aaatccaacttgctgaaatgttcgg

SEQ ID NO: 395995 - DNA, 25 bp, Artificial
  probe
  misc_feature (1)..(25): SEQ ID NO: 4973; WAN024G8C; Start 220; Stop 244
aacgatatcaacaggcttaccttgt

SEQ ID NO: 395996 - DNA, 25 bp, Artificial
  probe
  misc_feature (1)..(25): SEQ ID NO: 4973; WAN024G8C; Start 143; Stop 167
aaatgttcggcaactgtttcattag

SEQ ID NO: 395997 - DNA, 25 bp, Artificial
  probe
  misc_feature (1)..(25): SEQ ID NO: 4973; WAN024G8C; Start 142; Stop 166
gaaatgttcggcaactgtttcatta

SEQ ID NO: 395998 - DNA, 25 bp, Artificial
  probe
  misc_feature (1)..(25): SEQ ID NO: 4973; WAN024G8C; Start 2; Stop 26
tgaagtgcctcctgactaatctcac

SEQ ID NO: 395999 - DNA, 25 bp, Artificial
  probe
  misc_feature (1)..(25): SEQ ID NO: 4973; WAN024G8C; Start 167; Stop 191
gccatcaacataaaagactcaatca

SEQ ID NO: 396000 - DNA, 25 bp, Artificial
  probe
  misc_feature (1)..(25): SEQ ID NO: 4973; WAN024G8C; Start 166; Stop 190
agccatcaacataaaagactcaatc

SEQ ID NO: 396001 - DNA, 25 bp, Artificial
  probe
  misc_feature (1)..(25): SEQ ID NO: 4973; WAN024G8C; Start 171; Stop 195
tcaacataaaagactcaatcatccg

SEQ ID NO: 396002 - DNA, 25 bp, Artificial
  probe
  misc_feature (1)..(25): SEQ ID NO: 4973; WAN024G8C; Start 173; Stop 197
aacataaaagactcaatcatccgct

SEQ ID NO: 396003 - DNA, 25 bp, Artificial
  probe
  misc_feature (1)..(25): SEQ ID NO: 4973; WAN024G8C; Start 172; Stop 196
caacataaaagactcaatcatccgc

SEQ ID NO: 396004 - DNA, 25 bp, Artificial
  probe
  misc_feature (1)..(25): SEQ ID NO: 4973; WAN024G8C; Start 113; Stop 137
cgatagataaaaggcaaatccaact

SEQ ID NO: 396005 - DNA, 25 bp, Artificial
  probe
  misc_feature (1)..(25): SEQ ID NO: 4973; WAN024G8C; Start 174; Stop 198
acataaaagactcaatcatccgctc

SEQ ID NO: 396006 - DNA, 25 bp, Artificial
  probe
  misc_feature (1)..(25): SEQ ID NO: 4973; WAN024G8C; Start 164; Stop 188
ttagccatcaacataaaagactcaa

SEQ ID NO: 396007 - DNA, 25 bp, Artificial
  probe
  misc_feature (1)..(25): SEQ ID NO: 4973; WAN024G8C; Start 53; Stop 77
aaactcgaagcataatcaataaact

SEQ ID NO: 396008 - DNA, 25 bp, Artificial
  probe
  misc_feature (1)..(25): SEQ ID NO: 4973; WAN024G8C; Start 165; Stop 189
tagccatcaacataaaagactcaat

SEQ ID NO: 396009 - DNA, 25 bp, Artificial
  probe
  misc_feature (1)..(25): SEQ ID NO: 4973; WAN024G8C; Start 163; Stop 187
attagccatcaacataaaagactca

SEQ ID NO: 396010 - DNA, 25 bp, Artificial
  probe
  misc_feature (1)..(25): SEQ ID NO: 4973; WAN024G8C; Start 161; Stop 185
tcattagccatcaacataaaagact

SEQ ID NO: 396011 - DNA, 25 bp, Artificial
  probe
  misc_feature (1)..(25): SEQ ID NO: 4973; WAN024G8C; Start 54; Stop 78
aactcgaagcataatcaataaactt

SEQ ID NO: 396012 - DNA, 25 bp, Artificial
  probe
  misc_feature (1)..(25): SEQ ID NO: 4973; WAN024G8C; Start 162; Stop 186
cattagccatcaacataaaagactc

SEQ ID NO: 396013 - DNA, 25 bp, Artificial
  probe
  misc_feature (1)..(25): SEQ ID NO: 4973; WAN024G8C; Start 175; Stop 199
cataaaagactcaatcatccgctcg

SEQ ID NO: 396014 - DNA, 25 bp, Artificial
  probe
  misc_feature (1)..(25): SEQ ID NO: 4973; WAN024G8C; Start 160; Stop 184
ttcattagccatcaacataaaagac

SEQ ID NO: 396015 - DNA, 25 bp, Artificial
  probe
  misc_feature (1)..(25): SEQ ID NO: 4974; WAN024CUM; Start 78; Stop 102
tggaattggaatgactcgtaatact

SEQ ID NO: 396016 - DNA, 25 bp, Artificial
  probe
  misc_feature (1)..(25): SEQ ID NO: 4974; WAN024CUM; Start 77; Stop 101
gtggaattggaatgactcgtaatac

SEQ ID NO: 396017 - DNA, 25 bp, Artificial
  probe
  misc_feature (1)..(25): SEQ ID NO: 4974; WAN024CUM; Start 109; Stop 133
agagatggtattacaagtcaagacg

SEQ ID NO: 396018 - DNA, 25 bp, Artificial
  probe
  misc_feature (1)..(25): SEQ ID NO: 4974; WAN024CUM; Start 24; Stop 48
tcttctgatgttaagtggttgtgtc

SEQ ID NO: 396019 - DNA, 25 bp, Artificial
  probe
  misc_feature (1)..(25): SEQ ID NO: 4974; WAN024CUM; Start 23; Stop 47
gtcttctgatgttaagtggttgtgt

SEQ ID NO: 396020 - DNA, 25 bp, Artificial
  probe
  misc_feature (1)..(25): SEQ ID NO: 4974; WAN024CUM; Start 22; Stop 46
tgtcttctgatgttaagtggttgtg

SEQ ID NO: 396021 - DNA, 25 bp, Artificial
  probe
  misc_feature (1)..(25): SEQ ID NO: 4974; WAN024CUM; Start 21; Stop 45
gtgtcttctgatgttaagtggttgt

SEQ ID NO: 396022 - DNA, 25 bp, Artificial
  probe
  misc_feature (1)..(25): SEQ ID NO: 4974; WAN024CUM; Start 76; Stop 100
agtggaattggaatgactcgtaata

SEQ ID NO: 396023 - DNA, 25 bp, Artificial
  probe
  misc_feature (1)..(25): SEQ ID NO: 4974; WAN024CUM; Start 26; Stop 50
ttctgatgttaagtggttgtgtcaa

SEQ ID NO: 396024 - DNA, 25 bp, Artificial
  probe
  misc_feature (1)..(25): SEQ ID NO: 4974; WAN024CUM; Start 75; Stop 99
cagtggaattggaatgactcgtaat

SEQ ID NO: 396025 - DNA, 25 bp, Artificial
  probe
  misc_feature (1)..(25): SEQ ID NO: 4974; WAN024CUM; Start 25; Stop 49
cttctgatgttaagtggttgtgtca

SEQ ID NO: 396026 - DNA, 25 bp, Artificial
  probe
  misc_feature (1)..(25): SEQ ID NO: 4974; WAN024CUM; Start 79; Stop 103
ggaattggaatgactcgtaatacta

SEQ ID NO: 396027 - DNA, 25 bp, Artificial
  probe
  misc_feature (1)..(25): SEQ ID NO: 4974; WAN024CUM; Start 20; Stop 44
ggtgtcttctgatgttaagtggttg

SEQ ID NO: 396028 - DNA, 25 bp, Artificial
  probe
  misc_feature (1)..(25): SEQ ID NO: 4974; WAN024CUM; Start 83; Stop 107
ttggaatgactcgtaatactattga

SEQ ID NO: 396029 - DNA, 25 bp, Artificial
  probe
  misc_feature (1)..(25): SEQ ID NO: 4974; WAN024CUM; Start 108; Stop 132
tagagatggtattacaagtcaagac

SEQ ID NO: 396030 - DNA, 25 bp, Artificial
  probe
  misc_feature (1)..(25): SEQ ID NO: 4974; WAN024CUM; Start 237; Stop 261
ttatcgtgaagaccatcatcagacc

SEQ ID NO: 396031 - DNA, 25 bp, Artificial
  probe
  misc_feature (1)..(25): SEQ ID NO: 4974; WAN024CUM; Start 84; Stop 108
tggaatgactcgtaatactattgat

SEQ ID NO: 396032 - DNA, 25 bp, Artificial
  probe
  misc_feature (1)..(25): SEQ ID NO: 4974; WAN024CUM; Start 111; Stop 135
agatggtattacaagtcaagacgtt

SEQ ID NO: 396033 - DNA, 25 bp, Artificial
  probe
  misc_feature (1)..(25): SEQ ID NO: 4974; WAN024CUM; Start 117; Stop 141
tattacaagtcaagacgttcgctat

SEQ ID NO: 396034 - DNA, 25 bp, Artificial
  probe
  misc_feature (1)..(25): SEQ ID NO: 4974; WAN024CUM; Start 112; Stop 136
gatggtattacaagtcaagacgttc

SEQ ID NO: 396035 - DNA, 25 bp, Artificial
  probe
  misc_feature (1)..(25): SEQ ID NO: 4974; WAN024CUM; Start 110; Stop 134
gagatggtattacaagtcaagacgt

SEQ ID NO: 396036 - DNA, 25 bp, Artificial
  probe
  misc_feature (1)..(25): SEQ ID NO: 4974; WAN024CUM; Start 224; Stop 248
tattggatgtggtttatcgtgaaga

SEQ ID NO: 396037 - DNA, 25 bp, Artificial
  probe
  misc_feature (1)..(25): SEQ ID NO: 4974; WAN024CUM; Start 218; Stop 242
attggttattggatgtggtttatcg

SEQ ID NO: 396038 - DNA, 25 bp, Artificial
  probe
  misc_feature (1)..(25): SEQ ID NO: 4974; WAN024CUM; Start 222; Stop 246
gttattggatgtggtttatcgtgaa

SEQ ID NO: 396039 - DNA, 25 bp, Artificial
  probe
  misc_feature (1)..(25): SEQ ID NO: 4974; WAN024CUM; Start 13; Stop 37
aatactgggtgtcttctgatgttaa

SEQ ID NO: 396040 - DNA, 25 bp, Artificial
  probe
  misc_feature (1)..(25): SEQ ID NO: 4974; WAN024CUM; Start 118; Stop 142
attacaagtcaagacgttcgctatt

SEQ ID NO: 396041 - DNA, 25 bp, Artificial
  probe
  misc_feature (1)..(25): SEQ ID NO: 4974; WAN024CUM; Start 223; Stop 247
ttattggatgtggtttatcgtgaag

SEQ ID NO: 396042 - DNA, 25 bp, Artificial
  probe
  misc_feature (1)..(25): SEQ ID NO: 4974; WAN024CUM; Start 116; Stop 140
gtattacaagtcaagacgttcgcta

SEQ ID NO: 396043 - DNA, 25 bp, Artificial
  probe
  misc_feature (1)..(25): SEQ ID NO: 4974; WAN024CUM; Start 219; Stop 243
ttggttattggatgtggtttatcgt

SEQ ID NO: 396044 - DNA, 25 bp, Artificial
  probe
  misc_feature (1)..(25): SEQ ID NO: 4974; WAN024CUM; Start 216; Stop 240
gcattggttattggatgtggtttat

SEQ ID NO: 396045 - DNA, 25 bp, Artificial
  probe
  misc_feature (1)..(25): SEQ ID NO: 4974; WAN024CUM; Start 12; Stop 36
gaatactgggtgtcttctgatgtta

SEQ ID NO: 396046 - DNA, 25 bp, Artificial
  probe
  misc_feature (1)..(25): SEQ ID NO: 4974; WAN024CUM; Start 14; Stop 38
atactgggtgtcttctgatgttaag

SEQ ID NO: 396047 - DNA, 25 bp, Artificial
  probe
  misc_feature (1)..(25): SEQ ID NO: 4974; WAN024CUM; Start 113; Stop 137
atggtattacaagtcaagacgttcg

SEQ ID NO: 396048 - DNA, 25 bp, Artificial
  probe
  misc_feature (1)..(25): SEQ ID NO: 4975; WAN024GCM; Start 60; Stop 84
tcatatagaggtcattgatacgagc

SEQ ID NO: 396049 - DNA, 25 bp, Artificial
  probe
  misc_feature (1)..(25): SEQ ID NO: 4975; WAN024GCM; Start 63; Stop 87
tatagaggtcattgatacgagcttc

SEQ ID NO: 396050 - DNA, 25 bp, Artificial
  probe
  misc_feature (1)..(25): SEQ ID NO: 4975; WAN024GCM; Start 61; Stop 85
catatagaggtcattgatacgagct

SEQ ID NO: 396051 - DNA, 25 bp, Artificial
  probe
  misc_feature (1)..(25): SEQ ID NO: 4975; WAN024GCM; Start 12; Stop 36
ctacttcttccatgagagcatcaac

SEQ ID NO: 396052 - DNA, 25 bp, Artificial
  probe
  misc_feature (1)..(25): SEQ ID NO: 4975; WAN024GCM; Start 62; Stop 86
atatagaggtcattgatacgagctt

SEQ ID NO: 396053 - DNA, 25 bp, Artificial
  probe
  misc_feature (1)..(25): SEQ ID NO: 4975; WAN024GCM; Start 59; Stop 83
ttcatatagaggtcattgatacgag

SEQ ID NO: 396054 - DNA, 25 bp, Artificial
  probe
  misc_feature (1)..(25): SEQ ID NO: 4975; WAN024GCM; Start 15; Stop 39
cttcttccatgagagcatcaacatc

SEQ ID NO: 396055 - DNA, 25 bp, Artificial
  probe
  misc_feature (1)..(25): SEQ ID NO: 4975; WAN024GCM; Start 13; Stop 37
tacttcttccatgagagcatcaaca

SEQ ID NO: 396056 - DNA, 25 bp, Artificial
  probe
  misc_feature (1)..(25): SEQ ID NO: 4975; WAN024GCM; Start 64; Stop 88
atagaggtcattgatacgagcttca

SEQ ID NO: 396057 - DNA, 25 bp, Artificial
  probe
  misc_feature (1)..(25): SEQ ID NO: 4975; WAN024GCM; Start 11; Stop 35
cctacttcttccatgagagcatcaa

SEQ ID NO: 396058 - DNA, 25 bp, Artificial
  probe
  misc_feature (1)..(25): SEQ ID NO: 4975; WAN024GCM; Start 14; Stop 38
acttcttccatgagagcatcaacat

SEQ ID NO: 396059 - DNA, 25 bp, Artificial
  probe
  misc_feature (1)..(25): SEQ ID NO: 4975; WAN024GCM; Start 224; Stop 248
ttaccagtcacgatactcataaagg

SEQ ID NO: 396060 - DNA, 25 bp, Artificial
  probe
  misc_feature (1)..(25): SEQ ID NO: 4975; WAN024GCM; Start 228; Stop 252
cagtcacgatactcataaaggttga

SEQ ID NO: 396061 - DNA, 25 bp, Artificial
  probe
  misc_feature (1)..(25): SEQ ID NO: 4975; WAN024GCM; Start 9; Stop 33
ctcctacttcttccatgagagcatc

SEQ ID NO: 396062 - DNA, 25 bp, Artificial
  probe
  misc_feature (1)..(25): SEQ ID NO: 4975; WAN024GCM; Start 65; Stop 89
tagaggtcattgatacgagcttcag

SEQ ID NO: 396063 - DNA, 25 bp, Artificial
  probe
  misc_feature (1)..(25): SEQ ID NO: 4975; WAN024GCM; Start 227; Stop 251
ccagtcacgatactcataaaggttg

SEQ ID NO: 396064 - DNA, 25 bp, Artificial
  probe
  misc_feature (1)..(25): SEQ ID NO: 4975; WAN024GCM; Start 182; Stop 206
acatatttggaccactcaacctttc

SEQ ID NO: 396065 - DNA, 25 bp, Artificial
  probe
  misc_feature (1)..(25): SEQ ID NO: 4975; WAN024GCM; Start 10; Stop 34
tcctacttcttccatgagagcatca

SEQ ID NO: 396066 - DNA, 25 bp, Artificial
  probe
  misc_feature (1)..(25): SEQ ID NO: 4975; WAN024GCM; Start 181; Stop 205
cacatatttggaccactcaaccttt

SEQ ID NO: 396067 - DNA, 25 bp, Artificial
  probe
  misc_feature (1)..(25): SEQ ID NO: 4975; WAN024GCM; Start 223; Stop 247
tttaccagtcacgatactcataaag

SEQ ID NO: 396068 - DNA, 25 bp, Artificial
  probe
  misc_feature (1)..(25): SEQ ID NO: 4975; WAN024GCM; Start 16; Stop 40
ttcttccatgagagcatcaacatcc

SEQ ID NO: 396069 - DNA, 25 bp, Artificial
  probe
  misc_feature (1)..(25): SEQ ID NO: 4975; WAN024GCM; Start 163; Stop 187
atccaagtaaccagccgtcacatat

SEQ ID NO: 396070 - DNA, 25 bp, Artificial
  probe
  misc_feature (1)..(25): SEQ ID NO: 4975; WAN024GCM; Start 180; Stop 204
tcacatatttggaccactcaacctt

SEQ ID NO: 396071 - DNA, 25 bp, Artificial
  probe
  misc_feature (1)..(25): SEQ ID NO: 4975; WAN024GCM; Start 225; Stop 249
taccagtcacgatactcataaaggt

SEQ ID NO: 396072 - DNA, 25 bp, Artificial
  probe
  misc_feature (1)..(25): SEQ ID NO: 4975; WAN024GCM; Start 166; Stop 190
caagtaaccagccgtcacatatttg

SEQ ID NO: 396073 - DNA, 25 bp, Artificial
  probe
  misc_feature (1)..(25): SEQ ID NO: 4975; WAN024GCM; Start 164; Stop 188
tccaagtaaccagccgtcacatatt

SEQ ID NO: 396074 - DNA, 25 bp, Artificial
  probe
  misc_feature (1)..(25): SEQ ID NO: 4975; WAN024GCM; Start 226; Stop 250
accagtcacgatactcataaaggtt

SEQ ID NO: 396075 - DNA, 25 bp, Artificial
  probe
  misc_feature (1)..(25): SEQ ID NO: 4975; WAN024GCM; Start 184; Stop 208
atatttggaccactcaacctttcct

SEQ ID NO: 396076 - DNA, 25 bp, Artificial
  probe
  misc_feature (1)..(25): SEQ ID NO: 4975; WAN024GCM; Start 183; Stop 207
catatttggaccactcaacctttcc

SEQ ID NO: 396077 - DNA, 25 bp, Artificial
  probe
  misc_feature (1)..(25): SEQ ID NO: 4975; WAN024GCM; Start 4; Stop 28
aagttctcctacttcttccatgaga

SEQ ID NO: 396078 - DNA, 25 bp, Artificial
  probe
  misc_feature (1)..(25): SEQ ID NO: 4975; WAN024GCM; Start 5; Stop 29
agttctcctacttcttccatgagag

SEQ ID NO: 396079 - DNA, 25 bp, Artificial
  probe
  misc_feature (1)..(25): SEQ ID NO: 4975; WAN024GCM; Start 185; Stop 209
tatttggaccactcaacctttcctt

SEQ ID NO: 396080 - DNA, 25 bp, Artificial
  probe
  misc_feature (1)..(25): SEQ ID NO: 4975; WAN024GCM; Start 58; Stop 82
tttcatatagaggtcattgatacga

SEQ ID NO: 396081 - DNA, 25 bp, Artificial
  probe
  misc_feature (1)..(25): SEQ ID NO: 4976; WAN024CLB; Start 1; Stop 25
ttgaagttctggaaagatgttgttt

SEQ ID NO: 396082 - DNA, 25 bp, Artificial
  probe
  misc_feature (1)..(25): SEQ ID NO: 4976; WAN024CLB; Start 4; Stop 28
aagttctggaaagatgttgtttcag

SEQ ID NO: 396083 - DNA, 25 bp, Artificial
  probe
  misc_feature (1)..(25): SEQ ID NO: 4976; WAN024CLB; Start 3; Stop 27
gaagttctggaaagatgttgtttca

SEQ ID NO: 396084 - DNA, 25 bp, Artificial
  probe
  misc_feature (1)..(25): SEQ ID NO: 4976; WAN024CLB; Start 2; Stop 26
tgaagttctggaaagatgttgtttc

SEQ ID NO: 396085 - DNA, 25 bp, Artificial
  probe
  misc_feature (1)..(25): SEQ ID NO: 4976; WAN024CLB; Start 6; Stop 30
gttctggaaagatgttgtttcagta

SEQ ID NO: 396086 - DNA, 25 bp, Artificial
  probe
  misc_feature (1)..(25): SEQ ID NO: 4976; WAN024CLB; Start 5; Stop 29
agttctggaaagatgttgtttcagt

SEQ ID NO: 396087 - DNA, 25 bp, Artificial
  probe
  misc_feature (1)..(25): SEQ ID NO: 4976; WAN024CLB; Start 10; Stop 34
tggaaagatgttgtttcagtattga

SEQ ID NO: 396088 - DNA, 25 bp, Artificial
  probe
  misc_feature (1)..(25): SEQ ID NO: 4976; WAN024CLB; Start 13; Stop 37
aaagatgttgtttcagtattgagaa

SEQ ID NO: 396089 - DNA, 25 bp, Artificial
  probe
  misc_feature (1)..(25): SEQ ID NO: 4976; WAN024CLB; Start 9; Stop 33
ctggaaagatgttgtttcagtattg

SEQ ID NO: 396090 - DNA, 25 bp, Artificial
  probe
  misc_feature (1)..(25): SEQ ID NO: 4976; WAN024CLB; Start 8; Stop 32
tctggaaagatgttgtttcagtatt

SEQ ID NO: 396091 - DNA, 25 bp, Artificial
  probe
  misc_feature (1)..(25): SEQ ID NO: 4976; WAN024CLB; Start 7; Stop 31
ttctggaaagatgttgtttcagtat

SEQ ID NO: 396092 - DNA, 25 bp, Artificial
  probe
  misc_feature (1)..(25): SEQ ID NO: 4976; WAN024CLB; Start 11; Stop 35
ggaaagatgttgtttcagtattgag

SEQ ID NO: 396093 - DNA, 25 bp, Artificial
  probe
  misc_feature (1)..(25): SEQ ID NO: 4976; WAN024CLB; Start 25; Stop 49
tcagtattgagaaaaggtgggaaaa

SEQ ID NO: 396094 - DNA, 25 bp, Artificial
  probe
  misc_feature (1)..(25): SEQ ID NO: 4976; WAN024CLB; Start 24; Stop 48
ttcagtattgagaaaaggtgggaaa

SEQ ID NO: 396095 - DNA, 25 bp, Artificial
  probe
  misc_feature (1)..(25): SEQ ID NO: 4976; WAN024CLB; Start 12; Stop 36
gaaagatgttgtttcagtattgaga

SEQ ID NO: 396096 - DNA, 25 bp, Artificial
  probe
  misc_feature (1)..(25): SEQ ID NO: 4976; WAN024CLB; Start 14; Stop 38
aagatgttgtttcagtattgagaaa

SEQ ID NO: 396097 - DNA, 25 bp, Artificial
  probe
  misc_feature (1)..(25): SEQ ID NO: 4976; WAN024CLB; Start 55; Stop 79
cgattttcacagagaaaggaagaaa

SEQ ID NO: 396098 - DNA, 25 bp, Artificial
  probe
  misc_feature (1)..(25): SEQ ID NO: 4976; WAN024CLB; Start 23; Stop 47
tttcagtattgagaaaaggtgggaa

SEQ ID NO: 396099 - DNA, 25 bp, Artificial
  probe
  misc_feature (1)..(25): SEQ ID NO: 4976; WAN024CLB; Start 20; Stop 44
ttgtttcagtattgagaaaaggtgg

SEQ ID NO: 396100 - DNA, 25 bp, Artificial
  probe
  misc_feature (1)..(25): SEQ ID NO: 4976; WAN024CLB; Start 47; Stop 71
aaaacttgcgattttcacagagaaa

SEQ ID NO: 396101 - DNA, 25 bp, Artificial
  probe
  misc_feature (1)..(25): SEQ ID NO: 4976; WAN024CLB; Start 48; Stop 72
aaacttgcgattttcacagagaaag

SEQ ID NO: 396102 - DNA, 25 bp, Artificial
  probe
  misc_feature (1)..(25): SEQ ID NO: 4976; WAN024CLB; Start 22; Stop 46
gtttcagtattgagaaaaggtggga

SEQ ID NO: 396103 - DNA, 25 bp, Artificial
  probe
  misc_feature (1)..(25): SEQ ID NO: 4976; WAN024CLB; Start 18; Stop 42
tgttgtttcagtattgagaaaaggt

SEQ ID NO: 396104 - DNA, 25 bp, Artificial
  probe
  misc_feature (1)..(25): SEQ ID NO: 4976; WAN024CLB; Start 21; Stop 45
tgtttcagtattgagaaaaggtggg

SEQ ID NO: 396105 - DNA, 25 bp, Artificial
  probe
  misc_feature (1)..(25): SEQ ID NO: 4976; WAN024CLB; Start 19; Stop 43
gttgtttcagtattgagaaaaggtg

SEQ ID NO: 396106 - DNA, 25 bp, Artificial
  probe
  misc_feature (1)..(25): SEQ ID NO: 4976; WAN024CLB; Start 54; Stop 78
gcgattttcacagagaaaggaagaa

SEQ ID NO: 396107 - DNA, 25 bp, Artificial
  probe
  misc_feature (1)..(25): SEQ ID NO: 4976; WAN024CLB; Start 52; Stop 76
ttgcgattttcacagagaaaggaag

SEQ ID NO: 396108 - DNA, 25 bp, Artificial
  probe
  misc_feature (1)..(25): SEQ ID NO: 4976; WAN024CLB; Start 51; Stop 75
cttgcgattttcacagagaaaggaa

SEQ ID NO: 396109 - DNA, 25 bp, Artificial
  probe
  misc_feature (1)..(25): SEQ ID NO: 4976; WAN024CLB; Start 17; Stop 41
atgttgtttcagtattgagaaaagg

SEQ ID NO: 396110 - DNA, 25 bp, Artificial
  probe
  misc_feature (1)..(25): SEQ ID NO: 4976; WAN024CLB; Start 49; Stop 73
aacttgcgattttcacagagaaagg

SEQ ID NO: 396111 - DNA, 25 bp, Artificial
  probe
  misc_feature (1)..(25): SEQ ID NO: 4976; WAN024CLB; Start 53; Stop 77
tgcgattttcacagagaaaggaaga

SEQ ID NO: 396112 - DNA, 25 bp, Artificial
  probe
  misc_feature (1)..(25): SEQ ID NO: 4976; WAN024CLB; Start 50; Stop 74
acttgcgattttcacagagaaagga

SEQ ID NO: 396113 - DNA, 25 bp, Artificial
  probe
  misc_feature (1)..(25): SEQ ID NO: 4976; WAN024CLB; Start 15; Stop 39
agatgttgtttcagtattgagaaaa

SEQ ID NO: 396114 - DNA, 25 bp, Artificial
  probe
  misc_feature (1)..(25): SEQ ID NO: 4977; WAN024CRC; Start 33; Stop 57
aataggtctgatccttgccattgtc

SEQ ID NO: 396115 - DNA, 25 bp, Artificial
  probe
  misc_feature (1)..(25): SEQ ID NO: 4977; WAN024CRC; Start 17; Stop 41
gaaagttggctgaggaaataggtct

SEQ ID NO: 396116 - DNA, 25 bp, Artificial
  probe
  misc_feature (1)..(25): SEQ ID NO: 4977; WAN024CRC; Start 18; Stop 42
aaagttggctgaggaaataggtctg

SEQ ID NO: 396117 - DNA, 25 bp, Artificial
  probe
  misc_feature (1)..(25): SEQ ID NO: 4977; WAN024CRC; Start 1; Stop 25
ttgaagttgttcttgcgaaagttgg

SEQ ID NO: 396118 - DNA, 25 bp, Artificial
  probe
  misc_feature (1)..(25): SEQ ID NO: 4977; WAN024CRC; Start 31; Stop 55
gaaataggtctgatccttgccattg

SEQ ID NO: 396119 - DNA, 25 bp, Artificial
  probe
  misc_feature (1)..(25): SEQ ID NO: 4977; WAN024CRC; Start 20; Stop 44
agttggctgaggaaataggtctgat

SEQ ID NO: 396120 - DNA, 25 bp, Artificial
  probe
  misc_feature (1)..(25): SEQ ID NO: 4977; WAN024CRC; Start 170; Stop 194
aacttgatttccttgttgcacataa

SEQ ID NO: 396121 - DNA, 25 bp, Artificial
  probe
  misc_feature (1)..(25): SEQ ID NO: 4977; WAN024CRC; Start 169; Stop 193
gaacttgatttccttgttgcacata

SEQ ID NO: 396122 - DNA, 25 bp, Artificial
  probe
  misc_feature (1)..(25): SEQ ID NO: 4977; WAN024CRC; Start 171; Stop 195
acttgatttccttgttgcacataac

SEQ ID NO: 396123 - DNA, 25 bp, Artificial
  probe
  misc_feature (1)..(25): SEQ ID NO: 4977; WAN024CRC; Start 166; Stop 190
cttgaacttgatttccttgttgcac

SEQ ID NO: 396124 - DNA, 25 bp, Artificial
  probe
  misc_feature (1)..(25): SEQ ID NO: 4977; WAN024CRC; Start 21; Stop 45
gttggctgaggaaataggtctgatc

SEQ ID NO: 396125 - DNA, 25 bp, Artificial
  probe
  misc_feature (1)..(25): SEQ ID NO: 4977; WAN024CRC; Start 32; Stop 56
aaataggtctgatccttgccattgt

SEQ ID NO: 396126 - DNA, 25 bp, Artificial
  probe
  misc_feature (1)..(25): SEQ ID NO: 4977; WAN024CRC; Start 19; Stop 43
aagttggctgaggaaataggtctga

SEQ ID NO: 396127 - DNA, 25 bp, Artificial
  probe
  misc_feature (1)..(25): SEQ ID NO: 4977; WAN024CRC; Start 172; Stop 196
cttgatttccttgttgcacataacg

SEQ ID NO: 396128 - DNA, 25 bp, Artificial
  probe
  misc_feature (1)..(25): SEQ ID NO: 4977; WAN024CRC; Start 16; Stop 40
cgaaagttggctgaggaaataggtc

SEQ ID NO: 396129 - DNA, 25 bp, Artificial
  probe
  misc_feature (1)..(25): SEQ ID NO: 4977; WAN024CRC; Start 164; Stop 188
gccttgaacttgatttccttgttgc

SEQ ID NO: 396130 - DNA, 25 bp, Artificial
  probe
  misc_feature (1)..(25): SEQ ID NO: 4977; WAN024CRC; Start 168; Stop 192
tgaacttgatttccttgttgcacat

SEQ ID NO: 396131 - DNA, 25 bp, Artificial
  probe
  misc_feature (1)..(25): SEQ ID NO: 4977; WAN024CRC; Start 13; Stop 37
ttgcgaaagttggctgaggaaatag

SEQ ID NO: 396132 - DNA, 25 bp, Artificial
  probe
  misc_feature (1)..(25): SEQ ID NO: 4977; WAN024CRC; Start 173; Stop 197
ttgatttccttgttgcacataacgt

SEQ ID NO: 396133 - DNA, 25 bp, Artificial
  probe
  misc_feature (1)..(25): SEQ ID NO: 4977; WAN024CRC; Start 30; Stop 54
ggaaataggtctgatccttgccatt

SEQ ID NO: 396134 - DNA, 25 bp, Artificial
  probe
  misc_feature (1)..(25): SEQ ID NO: 4977; WAN024CRC; Start 167; Stop 191
ttgaacttgatttccttgttgcaca

SEQ ID NO: 396135 - DNA, 25 bp, Artificial
  probe
  misc_feature (1)..(25): SEQ ID NO: 4977; WAN024CRC; Start 165; Stop 189
ccttgaacttgatttccttgttgca

SEQ ID NO: 396136 - DNA, 25 bp, Artificial
  probe
  misc_feature (1)..(25): SEQ ID NO: 4977; WAN024CRC; Start 12; Stop 36
cttgcgaaagttggctgaggaaata

SEQ ID NO: 396137 - DNA, 25 bp, Artificial
  probe
  misc_feature (1)..(25): SEQ ID NO: 4977; WAN024CRC; Start 34; Stop 58
ataggtctgatccttgccattgtcc

SEQ ID NO: 396138 - DNA, 25 bp, Artificial
  probe
  misc_feature (1)..(25): SEQ ID NO: 4977; WAN024CRC; Start 174; Stop 198
tgatttccttgttgcacataacgtc

SEQ ID NO: 396139 - DNA, 25 bp, Artificial
  probe
  misc_feature (1)..(25): SEQ ID NO: 4977; WAN024CRC; Start 175; Stop 199
gatttccttgttgcacataacgtcc

SEQ ID NO: 396140 - DNA, 25 bp, Artificial
  probe
  misc_feature (1)..(25): SEQ ID NO: 4977; WAN024CRC; Start 22; Stop 46
ttggctgaggaaataggtctgatcc

SEQ ID NO: 396141 - DNA, 25 bp, Artificial
  probe
  misc_feature (1)..(25): SEQ ID NO: 4977; WAN024CRC; Start 3; Stop 27
gaagttgttcttgcgaaagttggct

SEQ ID NO: 396142 - DNA, 25 bp, Artificial
  probe
  misc_feature (1)..(25): SEQ ID NO: 4977; WAN024CRC; Start 163; Stop 187
ggccttgaacttgatttccttgttg

SEQ ID NO: 396143 - DNA, 25 bp, Artificial
  probe
  misc_feature (1)..(25): SEQ ID NO: 4977; WAN024CRC; Start 4; Stop 28
aagttgttcttgcgaaagttggctg

SEQ ID NO: 396144 - DNA, 25 bp, Artificial
  probe
  misc_feature (1)..(25): SEQ ID NO: 4977; WAN024CRC; Start 2; Stop 26
tgaagttgttcttgcgaaagttggc

SEQ ID NO: 396145 - DNA, 25 bp, Artificial
  probe
  misc_feature (1)..(25): SEQ ID NO: 4977; WAN024CRC; Start 26; Stop 50
ctgaggaaataggtctgatccttgc

SEQ ID NO: 396146 - DNA, 25 bp, Artificial
  probe
  misc_feature (1)..(25): SEQ ID NO: 4977; WAN024CRC; Start 25; Stop 49
gctgaggaaataggtctgatccttg

SEQ ID NO: 396147 - DNA, 25 bp, Artificial
  probe
  misc_feature (1)..(25): SEQ ID NO: 4978; WAN024BEY; Start 120; Stop 144
tatcaagtcgggtttatccattcat

SEQ ID NO: 396148 - DNA, 25 bp, Artificial
  probe
  misc_feature (1)..(25): SEQ ID NO: 4978; WAN024BEY; Start 119; Stop 143
ttatcaagtcgggtttatccattca

SEQ ID NO: 396149 - DNA, 25 bp, Artificial
  probe
  misc_feature (1)..(25): SEQ ID NO: 4978; WAN024BEY; Start 118; Stop 142
gttatcaagtcgggtttatccattc

SEQ ID NO: 396150 - DNA, 25 bp, Artificial
  probe
  misc_feature (1)..(25): SEQ ID NO: 4978; WAN024BEY; Start 117; Stop 141
tgttatcaagtcgggtttatccatt

SEQ ID NO: 396151 - DNA, 25 bp, Artificial
  probe
  misc_feature (1)..(25): SEQ ID NO: 4978; WAN024BEY; Start 124; Stop 148
aagtcgggtttatccattcatctaa

SEQ ID NO: 396152 - DNA, 25 bp, Artificial
  probe
  misc_feature (1)..(25): SEQ ID NO: 4978; WAN024BEY; Start 123; Stop 147
caagtcgggtttatccattcatcta

SEQ ID NO: 396153 - DNA, 25 bp, Artificial
  probe
  misc_feature (1)..(25): SEQ ID NO: 4978; WAN024BEY; Start 115; Stop 139
gatgttatcaagtcgggtttatcca

SEQ ID NO: 396154 - DNA, 25 bp, Artificial
  probe
  misc_feature (1)..(25): SEQ ID NO: 4978; WAN024BEY; Start 121; Stop 145
atcaagtcgggtttatccattcatc

SEQ ID NO: 396155 - DNA, 25 bp, Artificial
  probe
  misc_feature (1)..(25): SEQ ID NO: 4978; WAN024BEY; Start 116; Stop 140
atgttatcaagtcgggtttatccat

SEQ ID NO: 396156 - DNA, 25 bp, Artificial
  probe
  misc_feature (1)..(25): SEQ ID NO: 4978; WAN024BEY; Start 126; Stop 150
gtcgggtttatccattcatctaact

SEQ ID NO: 396157 - DNA, 25 bp, Artificial
  probe
  misc_feature (1)..(25): SEQ ID NO: 4978; WAN024BEY; Start 125; Stop 149
agtcgggtttatccattcatctaac

SEQ ID NO: 396158 - DNA, 25 bp, Artificial
  probe
  misc_feature (1)..(25): SEQ ID NO: 4978; WAN024BEY; Start 127; Stop 151
tcgggtttatccattcatctaacta

SEQ ID NO: 396159 - DNA, 25 bp, Artificial
  probe
  misc_feature (1)..(25): SEQ ID NO: 4978; WAN024BEY; Start 122; Stop 146
tcaagtcgggtttatccattcatct

SEQ ID NO: 396160 - DNA, 25 bp, Artificial
  probe
  misc_feature (1)..(25): SEQ ID NO: 4978; WAN024BEY; Start 128; Stop 152
cgggtttatccattcatctaactaa

SEQ ID NO: 396161 - DNA, 25 bp, Artificial
  probe
  misc_feature (1)..(25): SEQ ID NO: 4978; WAN024BEY; Start 114; Stop 138
tgatgttatcaagtcgggtttatcc

SEQ ID NO: 396162 - DNA, 25 bp, Artificial
  probe
  misc_feature (1)..(25): SEQ ID NO: 4978; WAN024BEY; Start 113; Stop 137
atgatgttatcaagtcgggtttatc

SEQ ID NO: 396163 - DNA, 25 bp, Artificial
  probe
  misc_feature (1)..(25): SEQ ID NO: 4978; WAN024BEY; Start 111; Stop 135
aaatgatgttatcaagtcgggttta

SEQ ID NO: 396164 - DNA, 25 bp, Artificial
  probe
  misc_feature (1)..(25): SEQ ID NO: 4978; WAN024BEY; Start 112; Stop 136
aatgatgttatcaagtcgggtttat

SEQ ID NO: 396165 - DNA, 25 bp, Artificial
  probe
  misc_feature (1)..(25): SEQ ID NO: 4978; WAN024BEY; Start 129; Stop 153
gggtttatccattcatctaactaat

SEQ ID NO: 396166 - DNA, 25 bp, Artificial
  probe
  misc_feature (1)..(25): SEQ ID NO: 4978; WAN024BEY; Start 110; Stop 134
aaaatgatgttatcaagtcgggttt

SEQ ID NO: 396167 - DNA, 25 bp, Artificial
  probe
  misc_feature (1)..(25): SEQ ID NO: 4979; WAN024GBT; Start 450; Stop 474
attgccagtagaagtggttcagtat

SEQ ID NO: 396168 - DNA, 25 bp, Artificial
  probe
  misc_feature (1)..(25): SEQ ID NO: 4979; WAN024GBT; Start 316; Stop 340
gtggatagtcagtttaatggaatca

SEQ ID NO: 396169 - DNA, 25 bp, Artificial
  probe
  misc_feature (1)..(25): SEQ ID NO: 4979; WAN024GBT; Start 449; Stop 473
aattgccagtagaagtggttcagta

SEQ ID NO: 396170 - DNA, 25 bp, Artificial
  probe
  misc_feature (1)..(25): SEQ ID NO: 4979; WAN024GBT; Start 313; Stop 337
gaagtggatagtcagtttaatggaa

SEQ ID NO: 396171 - DNA, 25 bp, Artificial
  probe
  misc_feature (1)..(25): SEQ ID NO: 4979; WAN024GBT; Start 312; Stop 336
tgaagtggatagtcagtttaatgga

SEQ ID NO: 396172 - DNA, 25 bp, Artificial
  probe
  misc_feature (1)..(25): SEQ ID NO: 4979; WAN024GBT; Start 455; Stop 479
cagtagaagtggttcagtatggtgc

SEQ ID NO: 396173 - DNA, 25 bp, Artificial
  probe
  misc_feature (1)..(25): SEQ ID NO: 4979; WAN024GBT; Start 395; Stop 419
aatacatttgggtggtggatgaaag

SEQ ID NO: 396174 - DNA, 25 bp, Artificial
  probe
  misc_feature (1)..(25): SEQ ID NO: 4979; WAN024GBT; Start 394; Stop 418
gaatacatttgggtggtggatgaaa

SEQ ID NO: 396175 - DNA, 25 bp, Artificial
  probe
  misc_feature (1)..(25): SEQ ID NO: 4979; WAN024GBT; Start 391; Stop 415
aaagaatacatttgggtggtggatg

SEQ ID NO: 396176 - DNA, 25 bp, Artificial
  probe
  misc_feature (1)..(25): SEQ ID NO: 4979; WAN024GBT; Start 315; Stop 339
agtggatagtcagtttaatggaatc

SEQ ID NO: 396177 - DNA, 25 bp, Artificial
  probe
  misc_feature (1)..(25): SEQ ID NO: 4979; WAN024GBT; Start 311; Stop 335
atgaagtggatagtcagtttaatgg

SEQ ID NO: 396178 - DNA, 25 bp, Artificial
  probe
  misc_feature (1)..(25): SEQ ID NO: 4979; WAN024GBT; Start 314; Stop 338
aagtggatagtcagtttaatggaat

SEQ ID NO: 396179 - DNA, 25 bp, Artificial
  probe
  misc_feature (1)..(25): SEQ ID NO: 4979; WAN024GBT; Start 317; Stop 341
tggatagtcagtttaatggaatcaa

SEQ ID NO: 396180 - DNA, 25 bp, Artificial
  probe
  misc_feature (1)..(25): SEQ ID NO: 4979; WAN024GBT; Start 40; Stop 64
aatgatggaggtaaatcggtggaaa

SEQ ID NO: 396181 - DNA, 25 bp, Artificial
  probe
  misc_feature (1)..(25): SEQ ID NO: 4979; WAN024GBT; Start 454; Stop 478
ccagtagaagtggttcagtatggtg

SEQ ID NO: 396182 - DNA, 25 bp, Artificial
  probe
  misc_feature (1)..(25): SEQ ID NO: 4979; WAN024GBT; Start 451; Stop 475
ttgccagtagaagtggttcagtatg

SEQ ID NO: 396183 - DNA, 25 bp, Artificial
  probe
  misc_feature (1)..(25): SEQ ID NO: 4979; WAN024GBT; Start 393; Stop 417
agaatacatttgggtggtggatgaa

SEQ ID NO: 396184 - DNA, 25 bp, Artificial
  probe
  misc_feature (1)..(25): SEQ ID NO: 4979; WAN024GBT; Start 392; Stop 416
aagaatacatttgggtggtggatga

SEQ ID NO: 396185 - DNA, 25 bp, Artificial
  probe
  misc_feature (1)..(25): SEQ ID NO: 4979; WAN024GBT; Start 36; Stop 60
tgagaatgatggaggtaaatcggtg

SEQ ID NO: 396186 - DNA, 25 bp, Artificial
  probe
  misc_feature (1)..(25): SEQ ID NO: 4979; WAN024GBT; Start 39; Stop 63
gaatgatggaggtaaatcggtggaa

SEQ ID NO: 396187 - DNA, 25 bp, Artificial
  probe
  misc_feature (1)..(25): SEQ ID NO: 4979; WAN024GBT; Start 446; Stop 470
ttaaattgccagtagaagtggttca

SEQ ID NO: 396188 - DNA, 25 bp, Artificial
  probe
  misc_feature (1)..(25): SEQ ID NO: 4979; WAN024GBT; Start 265; Stop 289
tctattgaccaagtagactttgtcg

SEQ ID NO: 396189 - DNA, 25 bp, Artificial
  probe
  misc_feature (1)..(25): SEQ ID NO: 4979; WAN024GBT; Start 447; Stop 471
taaattgccagtagaagtggttcag

SEQ ID NO: 396190 - DNA, 25 bp, Artificial
  probe
  misc_feature (1)..(25): SEQ ID NO: 4979; WAN024GBT; Start 310; Stop 334
gatgaagtggatagtcagtttaatg

SEQ ID NO: 396191 - DNA, 25 bp, Artificial
  probe
  misc_feature (1)..(25): SEQ ID NO: 4979; WAN024GBT; Start 320; Stop 344
atagtcagtttaatggaatcaaagg

SEQ ID NO: 396192 - DNA, 25 bp, Artificial
  probe
  misc_feature (1)..(25): SEQ ID NO: 4979; WAN024GBT; Start 37; Stop 61
gagaatgatggaggtaaatcggtgg

SEQ ID NO: 396193 - DNA, 25 bp, Artificial
  probe
  misc_feature (1)..(25): SEQ ID NO: 4979; WAN024GBT; Start 318; Stop 342
ggatagtcagtttaatggaatcaaa

SEQ ID NO: 396194 - DNA, 25 bp, Artificial
  probe
  misc_feature (1)..(25): SEQ ID NO: 4979; WAN024GBT; Start 572; Stop 596
ttatcattgacctcgccttggatgt

SEQ ID NO: 396195 - DNA, 25 bp, Artificial
  probe
  misc_feature (1)..(25): SEQ ID NO: 4979; WAN024GBT; Start 644; Stop 668
gtgttgtggagcatggtttattcaa

SEQ ID NO: 396196 - DNA, 25 bp, Artificial
  probe
  misc_feature (1)..(25): SEQ ID NO: 4979; WAN024GBT; Start 267; Stop 291
tattgaccaagtagactttgtcgat

SEQ ID NO: 396197 - DNA, 25 bp, Artificial
  probe
  misc_feature (1)..(25): SEQ ID NO: 4979; WAN024GBT; Start 266; Stop 290
ctattgaccaagtagactttgtcga

SEQ ID NO: 396198 - DNA, 25 bp, Artificial
  probe
  misc_feature (1)..(25): SEQ ID NO: 4979; WAN024GBT; Start 458; Stop 482
tagaagtggttcagtatggtgcaga

SEQ ID NO: 396199 - DNA, 25 bp, Artificial
  probe
  misc_feature (1)..(25): SEQ ID NO: 4979; WAN024GBT; Start 457; Stop 481
gtagaagtggttcagtatggtgcag

SEQ ID NO: 396200 - DNA, 25 bp, Artificial
  probe
  misc_feature (1)..(25): SEQ ID NO: 4980; WAN024GJ9; Start 201; Stop 225
ttcaacactggaattaagcatagca

SEQ ID NO: 396201 - DNA, 25 bp, Artificial
  probe
  misc_feature (1)..(25): SEQ ID NO: 4980; WAN024GJ9; Start 202; Stop 226
tcaacactggaattaagcatagcag

SEQ ID NO: 396202 - DNA, 25 bp, Artificial
  probe
  misc_feature (1)..(25): SEQ ID NO: 4980; WAN024GJ9; Start 200; Stop 224
tttcaacactggaattaagcatagc

SEQ ID NO: 396203 - DNA, 25 bp, Artificial
  probe
  misc_feature (1)..(25): SEQ ID NO: 4980; WAN024GJ9; Start 177; Stop 201
tcaagtagaaattgtaaccgtgttt

SEQ ID NO: 396204 - DNA, 25 bp, Artificial
  probe
  misc_feature (1)..(25): SEQ ID NO: 4980; WAN024GJ9; Start 212; Stop 236
aattaagcatagcagtcgggaaatc

SEQ ID NO: 396205 - DNA, 25 bp, Artificial
  probe
  misc_feature (1)..(25): SEQ ID NO: 4980; WAN024GJ9; Start 211; Stop 235
gaattaagcatagcagtcgggaaat

SEQ ID NO: 396206 - DNA, 25 bp, Artificial
  probe
  misc_feature (1)..(25): SEQ ID NO: 4980; WAN024GJ9; Start 176; Stop 200
atcaagtagaaattgtaaccgtgtt

SEQ ID NO: 396207 - DNA, 25 bp, Artificial
  probe
  misc_feature (1)..(25): SEQ ID NO: 4980; WAN024GJ9; Start 255; Stop 279
aacagatgctggatttacaaagaaa

SEQ ID NO: 396208 - DNA, 25 bp, Artificial
  probe
  misc_feature (1)..(25): SEQ ID NO: 4980; WAN024GJ9; Start 175; Stop 199
tatcaagtagaaattgtaaccgtgt

SEQ ID NO: 396209 - DNA, 25 bp, Artificial
  probe
  misc_feature (1)..(25): SEQ ID NO: 4980; WAN024GJ9; Start 54; Stop 78
catcatatcgggtgaagaattggtg

SEQ ID NO: 396210 - DNA, 25 bp, Artificial
  probe
  misc_feature (1)..(25): SEQ ID NO: 4980; WAN024GJ9; Start 254; Stop 278
taacagatgctggatttacaaagaa

SEQ ID NO: 396211 - DNA, 25 bp, Artificial
  probe
  misc_feature (1)..(25): SEQ ID NO: 4980; WAN024GJ9; Start 253; Stop 277
gtaacagatgctggatttacaaaga

SEQ ID NO: 396212 - DNA, 25 bp, Artificial
  probe
  misc_feature (1)..(25): SEQ ID NO: 4980; WAN024GJ9; Start 174; Stop 198
ttatcaagtagaaattgtaaccgtg

SEQ ID NO: 396213 - DNA, 25 bp, Artificial
  probe
  misc_feature (1)..(25): SEQ ID NO: 4980; WAN024GJ9; Start 55; Stop 79
atcatatcgggtgaagaattggtgg

SEQ ID NO: 396214 - DNA, 25 bp, Artificial
  probe
  misc_feature (1)..(25): SEQ ID NO: 4980; WAN024GJ9; Start 210; Stop 234
ggaattaagcatagcagtcgggaaa

SEQ ID NO: 396215 - DNA, 25 bp, Artificial
  probe
  misc_feature (1)..(25): SEQ ID NO: 4980; WAN024GJ9; Start 213; Stop 237
attaagcatagcagtcgggaaatcg

SEQ ID NO: 396216 - DNA, 25 bp, Artificial
  probe
  misc_feature (1)..(25): SEQ ID NO: 4980; WAN024GJ9; Start 57; Stop 81
catatcgggtgaagaattggtggtc

SEQ ID NO: 396217 - DNA, 25 bp, Artificial
  probe
  misc_feature (1)..(25): SEQ ID NO: 4980; WAN024GJ9; Start 53; Stop 77
gcatcatatcgggtgaagaattggt

SEQ ID NO: 396218 - DNA, 25 bp, Artificial
  probe
  misc_feature (1)..(25): SEQ ID NO: 4980; WAN024GJ9; Start 247; Stop 271
ttggctgtaacagatgctggattta

SEQ ID NO: 396219 - DNA, 25 bp, Artificial
  probe
  misc_feature (1)..(25): SEQ ID NO: 4980; WAN024GJ9; Start 173; Stop 197
attatcaagtagaaattgtaaccgt

SEQ ID NO: 396220 - DNA, 25 bp, Artificial
  probe
  misc_feature (1)..(25): SEQ ID NO: 4980; WAN024GJ9; Start 262; Stop 286
gctggatttacaaagaaaatgaggt

SEQ ID NO: 396221 - DNA, 25 bp, Artificial
  probe
  misc_feature (1)..(25): SEQ ID NO: 4980; WAN024GJ9; Start 261; Stop 285
tgctggatttacaaagaaaatgagg

SEQ ID NO: 396222 - DNA, 25 bp, Artificial
  probe
  misc_feature (1)..(25): SEQ ID NO: 4980; WAN024GJ9; Start 178; Stop 202
caagtagaaattgtaaccgtgtttt

SEQ ID NO: 396223 - DNA, 25 bp, Artificial
  probe
  misc_feature (1)..(25): SEQ ID NO: 4980; WAN024GJ9; Start 256; Stop 280
acagatgctggatttacaaagaaaa

SEQ ID NO: 396224 - DNA, 25 bp, Artificial
  probe
  misc_feature (1)..(25): SEQ ID NO: 4980; WAN024GJ9; Start 198; Stop 222
gttttcaacactggaattaagcata

SEQ ID NO: 396225 - DNA, 25 bp, Artificial
  probe
  misc_feature (1)..(25): SEQ ID NO: 4980; WAN024GJ9; Start 204; Stop 228
aacactggaattaagcatagcagtc

SEQ ID NO: 396226 - DNA, 25 bp, Artificial
  probe
  misc_feature (1)..(25): SEQ ID NO: 4980; WAN024GJ9; Start 199; Stop 223
ttttcaacactggaattaagcatag

SEQ ID NO: 396227 - DNA, 25 bp, Artificial
  probe
  misc_feature (1)..(25): SEQ ID NO: 4980; WAN024GJ9; Start 58; Stop 82
atatcgggtgaagaattggtggtca

SEQ ID NO: 396228 - DNA, 25 bp, Artificial
  probe
  misc_feature (1)..(25): SEQ ID NO: 4980; WAN024GJ9; Start 56; Stop 80
tcatatcgggtgaagaattggtggt

SEQ ID NO: 396229 - DNA, 25 bp, Artificial
  probe
  misc_feature (1)..(25): SEQ ID NO: 4980; WAN024GJ9; Start 264; Stop 288
tggatttacaaagaaaatgaggtct

SEQ ID NO: 396230 - DNA, 25 bp, Artificial
  probe
  misc_feature (1)..(25): SEQ ID NO: 4980; WAN024GJ9; Start 203; Stop 227
caacactggaattaagcatagcagt

SEQ ID NO: 396231 - DNA, 25 bp, Artificial
  probe
  misc_feature (1)..(25): SEQ ID NO: 4980; WAN024GJ9; Start 209; Stop 233
tggaattaagcatagcagtcgggaa

SEQ ID NO: 396232 - DNA, 25 bp, Artificial
  probe
  misc_feature (1)..(25): SEQ ID NO: 4980; WAN024GJ9; Start 106; Stop 130
aagttggtctttctagctcatgatg

SEQ ID NO: 396233 - DNA, 25 bp, Artificial
  probe
  misc_feature (1)..(25): SEQ ID NO: 4981; WAN024G8A; Start 72; Stop 96
aatccttgtaatagtctgccagttc

SEQ ID NO: 396234 - DNA, 25 bp, Artificial
  probe
  misc_feature (1)..(25): SEQ ID NO: 4981; WAN024G8A; Start 80; Stop 104
taatagtctgccagttctccttctt

SEQ ID NO: 396235 - DNA, 25 bp, Artificial
  probe
  misc_feature (1)..(25): SEQ ID NO: 4981; WAN024G8A; Start 73; Stop 97
atccttgtaatagtctgccagttct

SEQ ID NO: 396236 - DNA, 25 bp, Artificial
  probe
  misc_feature (1)..(25): SEQ ID NO: 4981; WAN024G8A; Start 77; Stop 101
ttgtaatagtctgccagttctcctt

SEQ ID NO: 396237 - DNA, 25 bp, Artificial
  probe
  misc_feature (1)..(25): SEQ ID NO: 4981; WAN024G8A; Start 71; Stop 95
caatccttgtaatagtctgccagtt

SEQ ID NO: 396238 - DNA, 25 bp, Artificial
  probe
  misc_feature (1)..(25): SEQ ID NO: 4981; WAN024G8A; Start 79; Stop 103
gtaatagtctgccagttctccttct

SEQ ID NO: 396239 - DNA, 25 bp, Artificial
  probe
  misc_feature (1)..(25): SEQ ID NO: 4981; WAN024G8A; Start 78; Stop 102
tgtaatagtctgccagttctccttc

SEQ ID NO: 396240 - DNA, 25 bp, Artificial
  probe
  misc_feature (1)..(25): SEQ ID NO: 4981; WAN024G8A; Start 76; Stop 100
cttgtaatagtctgccagttctcct

SEQ ID NO: 396241 - DNA, 25 bp, Artificial
  probe
  misc_feature (1)..(25): SEQ ID NO: 4981; WAN024G8A; Start 74; Stop 98
tccttgtaatagtctgccagttctc

SEQ ID NO: 396242 - DNA, 25 bp, Artificial
  probe
  misc_feature (1)..(25): SEQ ID NO: 4981; WAN024G8A; Start 70; Stop 94
ccaatccttgtaatagtctgccagt

SEQ ID NO: 396243 - DNA, 25 bp, Artificial
  probe
  misc_feature (1)..(25): SEQ ID NO: 4981; WAN024G8A; Start 75; Stop 99
ccttgtaatagtctgccagttctcc

SEQ ID NO: 396244 - DNA, 25 bp, Artificial
  probe
  misc_feature (1)..(25): SEQ ID NO: 4981; WAN024G8A; Start 82; Stop 106
atagtctgccagttctccttcttta

SEQ ID NO: 396245 - DNA, 25 bp, Artificial
  probe
  misc_feature (1)..(25): SEQ ID NO: 4981; WAN024G8A; Start 83; Stop 107
tagtctgccagttctccttctttaa

SEQ ID NO: 396246 - DNA, 25 bp, Artificial
  probe
  misc_feature (1)..(25): SEQ ID NO: 4981; WAN024G8A; Start 66; Stop 90
attcccaatccttgtaatagtctgc

SEQ ID NO: 396247 - DNA, 25 bp, Artificial
  probe
  misc_feature (1)..(25): SEQ ID NO: 4981; WAN024G8A; Start 62; Stop 86
accaattcccaatccttgtaatagt

SEQ ID NO: 396248 - DNA, 25 bp, Artificial
  probe
  misc_feature (1)..(25): SEQ ID NO: 4981; WAN024G8A; Start 57; Stop 81
acttaaccaattcccaatccttgta

SEQ ID NO: 396249 - DNA, 25 bp, Artificial
  probe
  misc_feature (1)..(25): SEQ ID NO: 4981; WAN024G8A; Start 56; Stop 80
tacttaaccaattcccaatccttgt

SEQ ID NO: 396250 - DNA, 25 bp, Artificial
  probe
  misc_feature (1)..(25): SEQ ID NO: 4981; WAN024G8A; Start 63; Stop 87
ccaattcccaatccttgtaatagtc

SEQ ID NO: 396251 - DNA, 25 bp, Artificial
  probe
  misc_feature (1)..(25): SEQ ID NO: 4981; WAN024G8A; Start 54; Stop 78
tgtacttaaccaattcccaatcctt

SEQ ID NO: 396252 - DNA, 25 bp, Artificial
  probe
  misc_feature (1)..(25): SEQ ID NO: 4981; WAN024G8A; Start 58; Stop 82
cttaaccaattcccaatccttgtaa

SEQ ID NO: 396253 - DNA, 25 bp, Artificial
  probe
  misc_feature (1)..(25): SEQ ID NO: 4981; WAN024G8A; Start 61; Stop 85
aaccaattcccaatccttgtaatag

SEQ ID NO: 396254 - DNA, 25 bp, Artificial
  probe
  misc_feature (1)..(25): SEQ ID NO: 4981; WAN024G8A; Start 81; Stop 105
aatagtctgccagttctccttcttt

SEQ ID NO: 396255 - DNA, 25 bp, Artificial
  probe
  misc_feature (1)..(25): SEQ ID NO: 4981; WAN024G8A; Start 55; Stop 79
gtacttaaccaattcccaatccttg

SEQ ID NO: 396256 - DNA, 25 bp, Artificial
  probe
  misc_feature (1)..(25): SEQ ID NO: 4981; WAN024G8A; Start 53; Stop 77
ttgtacttaaccaattcccaatcct

SEQ ID NO: 396257 - DNA, 25 bp, Artificial
  probe
  misc_feature (1)..(25): SEQ ID NO: 4981; WAN024G8A; Start 59; Stop 83
ttaaccaattcccaatccttgtaat

SEQ ID NO: 396258 - DNA, 25 bp, Artificial
  probe
  misc_feature (1)..(25): SEQ ID NO: 4981; WAN024G8A; Start 65; Stop 89
aattcccaatccttgtaatagtctg

SEQ ID NO: 396259 - DNA, 25 bp, Artificial
  probe
  misc_feature (1)..(25): SEQ ID NO: 4981; WAN024G8A; Start 64; Stop 88
caattcccaatccttgtaatagtct

SEQ ID NO: 396260 - DNA, 25 bp, Artificial
  probe
  misc_feature (1)..(25): SEQ ID NO: 4981; WAN024G8A; Start 117; Stop 141
ggaagttaaccgagcaaggataatc

SEQ ID NO: 396261 - DNA, 25 bp, Artificial
  probe
  misc_feature (1)..(25): SEQ ID NO: 4981; WAN024G8A; Start 60; Stop 84
taaccaattcccaatccttgtaata

SEQ ID NO: 396262 - DNA, 25 bp, Artificial
  probe
  misc_feature (1)..(25): SEQ ID NO: 4981; WAN024G8A; Start 67; Stop 91
ttcccaatccttgtaatagtctgcc

SEQ ID NO: 396263 - DNA, 25 bp, Artificial
  probe
  misc_feature (1)..(25): SEQ ID NO: 4981; WAN024G8A; Start 204; Stop 228
tttgaataatagctggaatgcggtc

SEQ ID NO: 396264 - DNA, 25 bp, Artificial
  probe
  misc_feature (1)..(25): SEQ ID NO: 4981; WAN024G8A; Start 84; Stop 108
agtctgccagttctccttctttaaa

SEQ ID NO: 396265 - DNA, 25 bp, Artificial
  probe
  misc_feature (1)..(25): SEQ ID NO: 4981; WAN024G8A; Start 52; Stop 76
attgtacttaaccaattcccaatcc

SEQ ID NO: 396266 - DNA, 25 bp, Artificial
  probe
  misc_feature (1)..(25): SEQ ID NO: 4982; WAN024GFA; Start 76; Stop 100
gcaagaggtccacaatcatcatatt

SEQ ID NO: 396267 - DNA, 25 bp, Artificial
  probe
  misc_feature (1)..(25): SEQ ID NO: 4982; WAN024GFA; Start 75; Stop 99
cgcaagaggtccacaatcatcatat

SEQ ID NO: 396268 - DNA, 25 bp, Artificial
  probe
  misc_feature (1)..(25): SEQ ID NO: 4982; WAN024GFA; Start 77; Stop 101
caagaggtccacaatcatcatattt

SEQ ID NO: 396269 - DNA, 25 bp, Artificial
  probe
  misc_feature (1)..(25): SEQ ID NO: 4982; WAN024GFA; Start 264; Stop 288
gtcatgttccacataggcattgtag

SEQ ID NO: 396270 - DNA, 25 bp, Artificial
  probe
  misc_feature (1)..(25): SEQ ID NO: 4982; WAN024GFA; Start 86; Stop 110
cacaatcatcatattttcagagcga

SEQ ID NO: 396271 - DNA, 25 bp, Artificial
  probe
  misc_feature (1)..(25): SEQ ID NO: 4982; WAN024GFA; Start 85; Stop 109
ccacaatcatcatattttcagagcg

SEQ ID NO: 396272 - DNA, 25 bp, Artificial
  probe
  misc_feature (1)..(25): SEQ ID NO: 4982; WAN024GFA; Start 84; Stop 108
tccacaatcatcatattttcagagc

SEQ ID NO: 396273 - DNA, 25 bp, Artificial
  probe
  misc_feature (1)..(25): SEQ ID NO: 4982; WAN024GFA; Start 82; Stop 106
ggtccacaatcatcatattttcaga

SEQ ID NO: 396274 - DNA, 25 bp, Artificial
  probe
  misc_feature (1)..(25): SEQ ID NO: 4982; WAN024GFA; Start 81; Stop 105
aggtccacaatcatcatattttcag

SEQ ID NO: 396275 - DNA, 25 bp, Artificial
  probe
  misc_feature (1)..(25): SEQ ID NO: 4982; WAN024GFA; Start 80; Stop 104
gaggtccacaatcatcatattttca

SEQ ID NO: 396276 - DNA, 25 bp, Artificial
  probe
  misc_feature (1)..(25): SEQ ID NO: 4982; WAN024GFA; Start 87; Stop 111
acaatcatcatattttcagagcgat

SEQ ID NO: 396277 - DNA, 25 bp, Artificial
  probe
  misc_feature (1)..(25): SEQ ID NO: 4982; WAN024GFA; Start 79; Stop 103
agaggtccacaatcatcatattttc

SEQ ID NO: 396278 - DNA, 25 bp, Artificial
  probe
  misc_feature (1)..(25): SEQ ID NO: 4982; WAN024GFA; Start 78; Stop 102
aagaggtccacaatcatcatatttt

SEQ ID NO: 396279 - DNA, 25 bp, Artificial
  probe
  misc_feature (1)..(25): SEQ ID NO: 4982; WAN024GFA; Start 83; Stop 107
gtccacaatcatcatattttcagag

SEQ ID NO: 396280 - DNA, 25 bp, Artificial
  probe
  misc_feature (1)..(25): SEQ ID NO: 4982; WAN024GFA; Start 265; Stop 289
tcatgttccacataggcattgtagc

SEQ ID NO: 396281 - DNA, 25 bp, Artificial
  probe
  misc_feature (1)..(25): SEQ ID NO: 4982; WAN024GFA; Start 263; Stop 287
cgtcatgttccacataggcattgta

SEQ ID NO: 396282 - DNA, 25 bp, Artificial
  probe
  misc_feature (1)..(25): SEQ ID NO: 4982; WAN024GFA; Start 90; Stop 114
atcatcatattttcagagcgatttt

SEQ ID NO: 396283 - DNA, 25 bp, Artificial
  probe
  misc_feature (1)..(25): SEQ ID NO: 4982; WAN024GFA; Start 88; Stop 112
caatcatcatattttcagagcgatt

SEQ ID NO: 396284 - DNA, 25 bp, Artificial
  probe
  misc_feature (1)..(25): SEQ ID NO: 4982; WAN024GFA; Start 89; Stop 113
aatcatcatattttcagagcgattt

SEQ ID NO: 396285 - DNA, 25 bp, Artificial
  probe
  misc_feature (1)..(25): SEQ ID NO: 4982; WAN024GFA; Start 262; Stop 286
tcgtcatgttccacataggcattgt

SEQ ID NO: 396286 - DNA, 25 bp, Artificial
  probe
  misc_feature (1)..(25): SEQ ID NO: 4982; WAN024GFA; Start 266; Stop 290
catgttccacataggcattgtagcc

SEQ ID NO: 396287 - DNA, 25 bp, Artificial
  probe
  misc_feature (1)..(25): SEQ ID NO: 4982; WAN024GFA; Start 267; Stop 291
atgttccacataggcattgtagccc

SEQ ID NO: 396288 - DNA, 25 bp, Artificial
  probe
  misc_feature (1)..(25): SEQ ID NO: 4983; WAN024G83; Start 176; Stop 200
tcaatcaagtaagccatattagcca

SEQ ID NO: 396289 - DNA, 25 bp, Artificial
  probe
  misc_feature (1)..(25): SEQ ID NO: 4983; WAN024G83; Start 175; Stop 199
ctcaatcaagtaagccatattagcc

SEQ ID NO: 396290 - DNA, 25 bp, Artificial
  probe
  misc_feature (1)..(25): SEQ ID NO: 4983; WAN024G83; Start 177; Stop 201
caatcaagtaagccatattagccaa

SEQ ID NO: 396291 - DNA, 25 bp, Artificial
  probe
  misc_feature (1)..(25): SEQ ID NO: 4983; WAN024G83; Start 178; Stop 202
aatcaagtaagccatattagccaag

SEQ ID NO: 396292 - DNA, 25 bp, Artificial
  probe
  misc_feature (1)..(25): SEQ ID NO: 4983; WAN024G83; Start 179; Stop 203
atcaagtaagccatattagccaagc

SEQ ID NO: 396293 - DNA, 25 bp, Artificial
  probe
  misc_feature (1)..(25): SEQ ID NO: 4983; WAN024G83; Start 282; Stop 306
cacgccctggaatgttatagataat

SEQ ID NO: 396294 - DNA, 25 bp, Artificial
  probe
  misc_feature (1)..(25): SEQ ID NO: 4983; WAN024G83; Start 283; Stop 307
acgccctggaatgttatagataata

SEQ ID NO: 396295 - DNA, 25 bp, Artificial
  probe
  misc_feature (1)..(25): SEQ ID NO: 4983; WAN024G83; Start 74; Stop 98
gtatgagaggcaacagaaataaccc

SEQ ID NO: 396296 - DNA, 25 bp, Artificial
  probe
  misc_feature (1)..(25): SEQ ID NO: 4983; WAN024G83; Start 174; Stop 198
gctcaatcaagtaagccatattagc

SEQ ID NO: 396297 - DNA, 25 bp, Artificial
  probe
  misc_feature (1)..(25): SEQ ID NO: 4983; WAN024G83; Start 202; Stop 226
gctagtacattctttgacaccgata

SEQ ID NO: 396298 - DNA, 25 bp, Artificial
  probe
  misc_feature (1)..(25): SEQ ID NO: 4983; WAN024G83; Start 172; Stop 196
gtgctcaatcaagtaagccatatta

SEQ ID NO: 396299 - DNA, 25 bp, Artificial
  probe
  misc_feature (1)..(25): SEQ ID NO: 4983; WAN024G83; Start 171; Stop 195
tgtgctcaatcaagtaagccatatt

SEQ ID NO: 396300 - DNA, 25 bp, Artificial
  probe
  misc_feature (1)..(25): SEQ ID NO: 4983; WAN024G83; Start 170; Stop 194
ttgtgctcaatcaagtaagccatat

SEQ ID NO: 396301 - DNA, 25 bp, Artificial
  probe
  misc_feature (1)..(25): SEQ ID NO: 4983; WAN024G83; Start 173; Stop 197
tgctcaatcaagtaagccatattag

SEQ ID NO: 396302 - DNA, 25 bp, Artificial
  probe
  misc_feature (1)..(25): SEQ ID NO: 4983; WAN024G83; Start 69; Stop 93
catttgtatgagaggcaacagaaat

SEQ ID NO: 396303 - DNA, 25 bp, Artificial
  probe
  misc_feature (1)..(25): SEQ ID NO: 4983; WAN024G83; Start 72; Stop 96
ttgtatgagaggcaacagaaataac

SEQ ID NO: 396304 - DNA, 25 bp, Artificial
  probe
  misc_feature (1)..(25): SEQ ID NO: 4983; WAN024G83; Start 284; Stop 308
cgccctggaatgttatagataataa

SEQ ID NO: 396305 - DNA, 25 bp, Artificial
  probe
  misc_feature (1)..(25): SEQ ID NO: 4983; WAN024G83; Start 73; Stop 97
tgtatgagaggcaacagaaataacc

SEQ ID NO: 396306 - DNA, 25 bp, Artificial
  probe
  misc_feature (1)..(25): SEQ ID NO: 4983; WAN024G83; Start 280; Stop 304
tacacgccctggaatgttatagata

SEQ ID NO: 396307 - DNA, 25 bp, Artificial
  probe
  misc_feature (1)..(25): SEQ ID NO: 4983; WAN024G83; Start 203; Stop 227
ctagtacattctttgacaccgataa

SEQ ID NO: 396308 - DNA, 25 bp, Artificial
  probe
  misc_feature (1)..(25): SEQ ID NO: 4983; WAN024G83; Start 71; Stop 95
tttgtatgagaggcaacagaaataa

SEQ ID NO: 396309 - DNA, 25 bp, Artificial
  probe
  misc_feature (1)..(25): SEQ ID NO: 4983; WAN024G83; Start 70; Stop 94
atttgtatgagaggcaacagaaata

SEQ ID NO: 396310 - DNA, 25 bp, Artificial
  probe
  misc_feature (1)..(25): SEQ ID NO: 4983; WAN024G83; Start 68; Stop 92
ccatttgtatgagaggcaacagaaa

SEQ ID NO: 396311 - DNA, 25 bp, Artificial
  probe
  misc_feature (1)..(25): SEQ ID NO: 4983; WAN024G83; Start 281; Stop 305
acacgccctggaatgttatagataa

SEQ ID NO: 396312 - DNA, 25 bp, Artificial
  probe
  misc_feature (1)..(25): SEQ ID NO: 4983; WAN024G83; Start 211; Stop 235
ttctttgacaccgataatatttgga

SEQ ID NO: 396313 - DNA, 25 bp, Artificial
  probe
  misc_feature (1)..(25): SEQ ID NO: 4983; WAN024G83; Start 279; Stop 303
ctacacgccctggaatgttatagat

SEQ ID NO: 396314 - DNA, 25 bp, Artificial
  probe
  misc_feature (1)..(25): SEQ ID NO: 4983; WAN024G83; Start 213; Stop 237
ctttgacaccgataatatttggatg

SEQ ID NO: 396315 - DNA, 25 bp, Artificial
  probe
  misc_feature (1)..(25): SEQ ID NO: 4983; WAN024G83; Start 205; Stop 229
agtacattctttgacaccgataata

SEQ ID NO: 396316 - DNA, 25 bp, Artificial
  probe
  misc_feature (1)..(25): SEQ ID NO: 4983; WAN024G83; Start 204; Stop 228
tagtacattctttgacaccgataat

SEQ ID NO: 396317 - DNA, 25 bp, Artificial
  probe
  misc_feature (1)..(25): SEQ ID NO: 4983; WAN024G83; Start 212; Stop 236
tctttgacaccgataatatttggat

SEQ ID NO: 396318 - DNA, 25 bp, Artificial
  probe
  misc_feature (1)..(25): SEQ ID NO: 4983; WAN024G83; Start 43; Stop 67
aataaacatctcgtgcatttcatcc

SEQ ID NO: 396319 - DNA, 25 bp, Artificial
  probe
  misc_feature (1)..(25): SEQ ID NO: 4983; WAN024G83; Start 15; Stop 39
ctttcttcacatcactttctgcaat

SEQ ID NO: 396320 - DNA, 25 bp, Artificial
  probe
  misc_feature (1)..(25): SEQ ID NO: 4983; WAN024G83; Start 42; Stop 66
caataaacatctcgtgcatttcatc

SEQ ID NO: 396321 - DNA, 25 bp, Artificial
  probe
  misc_feature (1)..(25): SEQ ID NO: 4984; WAN024C7M; Start 208; Stop 232
gtcaaggttattacggtctatgctt

SEQ ID NO: 396322 - DNA, 25 bp, Artificial
  probe
  misc_feature (1)..(25): SEQ ID NO: 4984; WAN024C7M; Start 413; Stop 437
tgactaagaacaacacaggattgat

SEQ ID NO: 396323 - DNA, 25 bp, Artificial
  probe
  misc_feature (1)..(25): SEQ ID NO: 4984; WAN024C7M; Start 412; Stop 436
ttgactaagaacaacacaggattga

SEQ ID NO: 396324 - DNA, 25 bp, Artificial
  probe
  misc_feature (1)..(25): SEQ ID NO: 4984; WAN024C7M; Start 411; Stop 435
attgactaagaacaacacaggattg

SEQ ID NO: 396325 - DNA, 25 bp, Artificial
  probe
  misc_feature (1)..(25): SEQ ID NO: 4984; WAN024C7M; Start 406; Stop 430
gaggaattgactaagaacaacacag

SEQ ID NO: 396326 - DNA, 25 bp, Artificial
  probe
  misc_feature (1)..(25): SEQ ID NO: 4984; WAN024C7M; Start 405; Stop 429
tgaggaattgactaagaacaacaca

SEQ ID NO: 396327 - DNA, 25 bp, Artificial
  probe
  misc_feature (1)..(25): SEQ ID NO: 4984; WAN024C7M; Start 404; Stop 428
ctgaggaattgactaagaacaacac

SEQ ID NO: 396328 - DNA, 25 bp, Artificial
  probe
  misc_feature (1)..(25): SEQ ID NO: 4984; WAN024C7M; Start 415; Stop 439
actaagaacaacacaggattgattc

SEQ ID NO: 396329 - DNA, 25 bp, Artificial
  probe
  misc_feature (1)..(25): SEQ ID NO: 4984; WAN024C7M; Start 414; Stop 438
gactaagaacaacacaggattgatt

SEQ ID NO: 396330 - DNA, 25 bp, Artificial
  probe
  misc_feature (1)..(25): SEQ ID NO: 4984; WAN024C7M; Start 409; Stop 433
gaattgactaagaacaacacaggat

SEQ ID NO: 396331 - DNA, 25 bp, Artificial
  probe
  misc_feature (1)..(25): SEQ ID NO: 4984; WAN024C7M; Start 408; Stop 432
ggaattgactaagaacaacacagga

SEQ ID NO: 396332 - DNA, 25 bp, Artificial
  probe
  misc_feature (1)..(25): SEQ ID NO: 4984; WAN024C7M; Start 407; Stop 431
aggaattgactaagaacaacacagg

SEQ ID NO: 396333 - DNA, 25 bp, Artificial
  probe
  misc_feature (1)..(25): SEQ ID NO: 4984; WAN024C7M; Start 410; Stop 434
aattgactaagaacaacacaggatt

SEQ ID NO: 396334 - DNA, 25 bp, Artificial
  probe
  misc_feature (1)..(25): SEQ ID NO: 4984; WAN024C7M; Start 403; Stop 427
gctgaggaattgactaagaacaaca

SEQ ID NO: 396335 - DNA, 25 bp, Artificial
  probe
  misc_feature (1)..(25): SEQ ID NO: 4984; WAN024C7M; Start 400; Stop 424
aaggctgaggaattgactaagaaca

SEQ ID NO: 396336 - DNA, 25 bp, Artificial
  probe
  misc_feature (1)..(25): SEQ ID NO: 4984; WAN024C7M; Start 399; Stop 423
caaggctgaggaattgactaagaac

SEQ ID NO: 396337 - DNA, 25 bp, Artificial
  probe
  misc_feature (1)..(25): SEQ ID NO: 4984; WAN024C7M; Start 402; Stop 426
ggctgaggaattgactaagaacaac

SEQ ID NO: 396338 - DNA, 25 bp, Artificial
  probe
  misc_feature (1)..(25): SEQ ID NO: 4984; WAN024C7M; Start 401; Stop 425
aggctgaggaattgactaagaacaa

SEQ ID NO: 396339 - DNA, 25 bp, Artificial
  probe
  misc_feature (1)..(25): SEQ ID NO: 4984; WAN024C7M; Start 420; Stop 444
gaacaacacaggattgattcttaat

SEQ ID NO: 396340 - DNA, 25 bp, Artificial
  probe
  misc_feature (1)..(25): SEQ ID NO: 4984; WAN024C7M; Start 40; Stop 64
gataaggctgtggaagtagaggttc

SEQ ID NO: 396341 - DNA, 25 bp, Artificial
  probe
  misc_feature (1)..(25): SEQ ID NO: 4984; WAN024C7M; Start 39; Stop 63
agataaggctgtggaagtagaggtt

SEQ ID NO: 396342 - DNA, 25 bp, Artificial
  probe
  misc_feature (1)..(25): SEQ ID NO: 4984; WAN024C7M; Start 38; Stop 62
aagataaggctgtggaagtagaggt

SEQ ID NO: 396343 - DNA, 25 bp, Artificial
  probe
  misc_feature (1)..(25): SEQ ID NO: 4984; WAN024C7M; Start 727; Stop 751
gaagctattcttgcctataatcgtc

SEQ ID NO: 396344 - DNA, 25 bp, Artificial
  probe
  misc_feature (1)..(25): SEQ ID NO: 4984; WAN024C7M; Start 726; Stop 750
ggaagctattcttgcctataatcgt

SEQ ID NO: 396345 - DNA, 25 bp, Artificial
  probe
  misc_feature (1)..(25): SEQ ID NO: 4984; WAN024C7M; Start 728; Stop 752
aagctattcttgcctataatcgtcg

SEQ ID NO: 396346 - DNA, 25 bp, Artificial
  probe
  misc_feature (1)..(25): SEQ ID NO: 4984; WAN024C7M; Start 34; Stop 58
aagaaagataaggctgtggaagtag

SEQ ID NO: 396347 - DNA, 25 bp, Artificial
  probe
  misc_feature (1)..(25): SEQ ID NO: 4984; WAN024C7M; Start 591; Stop 615
cttacgagacccagacttgattatc

SEQ ID NO: 396348 - DNA, 25 bp, Artificial
  probe
  misc_feature (1)..(25): SEQ ID NO: 4984; WAN024C7M; Start 32; Stop 56
ttaagaaagataaggctgtggaagt

SEQ ID NO: 396349 - DNA, 25 bp, Artificial
  probe
  misc_feature (1)..(25): SEQ ID NO: 4984; WAN024C7M; Start 36; Stop 60
gaaagataaggctgtggaagtagag

SEQ ID NO: 396350 - DNA, 25 bp, Artificial
  probe
  misc_feature (1)..(25): SEQ ID NO: 4984; WAN024C7M; Start 33; Stop 57
taagaaagataaggctgtggaagta

SEQ ID NO: 396351 - DNA, 25 bp, Artificial
  probe
  misc_feature (1)..(25): SEQ ID NO: 4984; WAN024C7M; Start 35; Stop 59
agaaagataaggctgtggaagtaga

SEQ ID NO: 396352 - DNA, 25 bp, Artificial
  probe
  misc_feature (1)..(25): SEQ ID NO: 4984; WAN024C7M; Start 209; Stop 233
tcaaggttattacggtctatgcttt

SEQ ID NO: 396353 - DNA, 25 bp, Artificial
  probe
  misc_feature (1)..(25): SEQ ID NO: 4984; WAN024C7M; Start 590; Stop 614
acttacgagacccagacttgattat

SEQ ID NO: 396354 - DNA, 25 bp, Artificial
  probe
  misc_feature (1)..(25): SEQ ID NO: 4985; WAN024EWH; Start 1; Stop 25
ttgaatagttacatccaaggcagtt

SEQ ID NO: 396355 - DNA, 25 bp, Artificial
  probe
  misc_feature (1)..(25): SEQ ID NO: 4985; WAN024EWH; Start 2; Stop 26
tgaatagttacatccaaggcagttg

SEQ ID NO: 396356 - DNA, 25 bp, Artificial
  probe
  misc_feature (1)..(25): SEQ ID NO: 4985; WAN024EWH; Start 150; Stop 174
tgccaaccttattcatgtagtcaat

SEQ ID NO: 396357 - DNA, 25 bp, Artificial
  probe
  misc_feature (1)..(25): SEQ ID NO: 4985; WAN024EWH; Start 4; Stop 28
aatagttacatccaaggcagttgtt

SEQ ID NO: 396358 - DNA, 25 bp, Artificial
  probe
  misc_feature (1)..(25): SEQ ID NO: 4985; WAN024EWH; Start 153; Stop 177
caaccttattcatgtagtcaatggc

SEQ ID NO: 396359 - DNA, 25 bp, Artificial
  probe
  misc_feature (1)..(25): SEQ ID NO: 4985; WAN024EWH; Start 151; Stop 175
gccaaccttattcatgtagtcaatg

SEQ ID NO: 396360 - DNA, 25 bp, Artificial
  probe
  misc_feature (1)..(25): SEQ ID NO: 4985; WAN024EWH; Start 149; Stop 173
atgccaaccttattcatgtagtcaa

SEQ ID NO: 396361 - DNA, 25 bp, Artificial
  probe
  misc_feature (1)..(25): SEQ ID NO: 4985; WAN024EWH; Start 148; Stop 172
aatgccaaccttattcatgtagtca

SEQ ID NO: 396362 - DNA, 25 bp, Artificial
  probe
  misc_feature (1)..(25): SEQ ID NO: 4985; WAN024EWH; Start 3; Stop 27
gaatagttacatccaaggcagttgt

SEQ ID NO: 396363 - DNA, 25 bp, Artificial
  probe
  misc_feature (1)..(25): SEQ ID NO: 4985; WAN024EWH; Start 5; Stop 29
atagttacatccaaggcagttgttg

SEQ ID NO: 396364 - DNA, 25 bp, Artificial
  probe
  misc_feature (1)..(25): SEQ ID NO: 4985; WAN024EWH; Start 223; Stop 247
aacttctgtaatctgactaccaatt

SEQ ID NO: 396365 - DNA, 25 bp, Artificial
  probe
  misc_feature (1)..(25): SEQ ID NO: 4985; WAN024EWH; Start 31; Stop 55
ctcatcacagatcaagacatcaggt

SEQ ID NO: 396366 - DNA, 25 bp, Artificial
  probe
  misc_feature (1)..(25): SEQ ID NO: 4985; WAN024EWH; Start 222; Stop 246
taacttctgtaatctgactaccaat

SEQ ID NO: 396367 - DNA, 25 bp, Artificial
  probe
  misc_feature (1)..(25): SEQ ID NO: 4985; WAN024EWH; Start 221; Stop 245
ataacttctgtaatctgactaccaa

SEQ ID NO: 396368 - DNA, 25 bp, Artificial
  probe
  misc_feature (1)..(25): SEQ ID NO: 4985; WAN024EWH; Start 220; Stop 244
aataacttctgtaatctgactacca

SEQ ID NO: 396369 - DNA, 25 bp, Artificial
  probe
  misc_feature (1)..(25): SEQ ID NO: 4985; WAN024EWH; Start 147; Stop 171
gaatgccaaccttattcatgtagtc

SEQ ID NO: 396370 - DNA, 25 bp, Artificial
  probe
  misc_feature (1)..(25): SEQ ID NO: 4985; WAN024EWH; Start 152; Stop 176
ccaaccttattcatgtagtcaatgg

SEQ ID NO: 396371 - DNA, 25 bp, Artificial
  probe
  misc_feature (1)..(25): SEQ ID NO: 4985; WAN024EWH; Start 219; Stop 243
caataacttctgtaatctgactacc

SEQ ID NO: 396372 - DNA, 25 bp, Artificial
  probe
  misc_feature (1)..(25): SEQ ID NO: 4985; WAN024EWH; Start 315; Stop 339
gttcccaatccttgtgagaagataa

SEQ ID NO: 396373 - DNA, 25 bp, Artificial
  probe
  misc_feature (1)..(25): SEQ ID NO: 4985; WAN024EWH; Start 146; Stop 170
ggaatgccaaccttattcatgtagt

SEQ ID NO: 396374 - DNA, 25 bp, Artificial
  probe
  misc_feature (1)..(25): SEQ ID NO: 4985; WAN024EWH; Start 145; Stop 169
tggaatgccaaccttattcatgtag

SEQ ID NO: 396375 - DNA, 25 bp, Artificial
  probe
  misc_feature (1)..(25): SEQ ID NO: 4985; WAN024EWH; Start 144; Stop 168
ctggaatgccaaccttattcatgta

SEQ ID NO: 396376 - DNA, 25 bp, Artificial
  probe
  misc_feature (1)..(25): SEQ ID NO: 4985; WAN024EWH; Start 32; Stop 56
tcatcacagatcaagacatcaggtc

SEQ ID NO: 396377 - DNA, 25 bp, Artificial
  probe
  misc_feature (1)..(25): SEQ ID NO: 4985; WAN024EWH; Start 310; Stop 334
aatttgttcccaatccttgtgagaa

SEQ ID NO: 396378 - DNA, 25 bp, Artificial
  probe
  misc_feature (1)..(25): SEQ ID NO: 4985; WAN024EWH; Start 294; Stop 318
caatcttagcaccacgaatttgttc

SEQ ID NO: 396379 - DNA, 25 bp, Artificial
  probe
  misc_feature (1)..(25): SEQ ID NO: 4985; WAN024EWH; Start 314; Stop 338
tgttcccaatccttgtgagaagata

SEQ ID NO: 396380 - DNA, 25 bp, Artificial
  probe
  misc_feature (1)..(25): SEQ ID NO: 4985; WAN024EWH; Start 311; Stop 335
atttgttcccaatccttgtgagaag

SEQ ID NO: 396381 - DNA, 25 bp, Artificial
  probe
  misc_feature (1)..(25): SEQ ID NO: 4985; WAN024EWH; Start 27; Stop 51
ttggctcatcacagatcaagacatc

SEQ ID NO: 396382 - DNA, 25 bp, Artificial
  probe
  misc_feature (1)..(25): SEQ ID NO: 4985; WAN024EWH; Start 309; Stop 333
gaatttgttcccaatccttgtgaga

SEQ ID NO: 396383 - DNA, 25 bp, Artificial
  probe
  misc_feature (1)..(25): SEQ ID NO: 4985; WAN024EWH; Start 266; Stop 290
ctagtcattgggtcctggaagatag

SEQ ID NO: 396384 - DNA, 25 bp, Artificial
  probe
  misc_feature (1)..(25): SEQ ID NO: 4985; WAN024EWH; Start 30; Stop 54
gctcatcacagatcaagacatcagg

SEQ ID NO: 396385 - DNA, 25 bp, Artificial
  probe
  misc_feature (1)..(25): SEQ ID NO: 4985; WAN024EWH; Start 29; Stop 53
ggctcatcacagatcaagacatcag

SEQ ID NO: 396386 - DNA, 25 bp, Artificial
  probe
  misc_feature (1)..(25): SEQ ID NO: 4985; WAN024EWH; Start 295; Stop 319
aatcttagcaccacgaatttgttcc

SEQ ID NO: 396387 - DNA, 25 bp, Artificial
  probe
  misc_feature (1)..(25): SEQ ID NO: 4986; WAN024DEL; Start 439; Stop 463
ttaacagaggttgaagatgagacaa

SEQ ID NO: 396388 - DNA, 25 bp, Artificial
  probe
  misc_feature (1)..(25): SEQ ID NO: 4986; WAN024DEL; Start 442; Stop 466
acagaggttgaagatgagacaataa

SEQ ID NO: 396389 - DNA, 25 bp, Artificial
  probe
  misc_feature (1)..(25): SEQ ID NO: 4986; WAN024DEL; Start 441; Stop 465
aacagaggttgaagatgagacaata

SEQ ID NO: 396390 - DNA, 25 bp, Artificial
  probe
  misc_feature (1)..(25): SEQ ID NO: 4986; WAN024DEL; Start 440; Stop 464
taacagaggttgaagatgagacaat

SEQ ID NO: 396391 - DNA, 25 bp, Artificial
  probe
  misc_feature (1)..(25): SEQ ID NO: 4986; WAN024DEL; Start 40; Stop 64
ataggaatagcaatcattgttgtgg

SEQ ID NO: 396392 - DNA, 25 bp, Artificial
  probe
  misc_feature (1)..(25): SEQ ID NO: 4986; WAN024DEL; Start 553; Stop 577
ggaacattagatcagttaggctatg

SEQ ID NO: 396393 - DNA, 25 bp, Artificial
  probe
  misc_feature (1)..(25): SEQ ID NO: 4986; WAN024DEL; Start 597; Stop 621
tgcttctacatctattattgttgct

SEQ ID NO: 396394 - DNA, 25 bp, Artificial
  probe
  misc_feature (1)..(25): SEQ ID NO: 4986; WAN024DEL; Start 598; Stop 622
gcttctacatctattattgttgctg

SEQ ID NO: 396395 - DNA, 25 bp, Artificial
  probe
  misc_feature (1)..(25): SEQ ID NO: 4986; WAN024DEL; Start 39; Stop 63
aataggaatagcaatcattgttgtg

SEQ ID NO: 396396 - DNA, 25 bp, Artificial
  probe
  misc_feature (1)..(25): SEQ ID NO: 4986; WAN024DEL; Start 9; Stop 33
aaaggagtttgatatggagtggatt

SEQ ID NO: 396397 - DNA, 25 bp, Artificial
  probe
  misc_feature (1)..(25): SEQ ID NO: 4986; WAN024DEL; Start 12; Stop 36
ggagtttgatatggagtggattaga

SEQ ID NO: 396398 - DNA, 25 bp, Artificial
  probe
  misc_feature (1)..(25): SEQ ID NO: 4986; WAN024DEL; Start 11; Stop 35
aggagtttgatatggagtggattag

SEQ ID NO: 396399 - DNA, 25 bp, Artificial
  probe
  misc_feature (1)..(25): SEQ ID NO: 4986; WAN024DEL; Start 123; Stop 147
tttagtttcaggtgtttctctcgtt

SEQ ID NO: 396400 - DNA, 25 bp, Artificial
  probe
  misc_feature (1)..(25): SEQ ID NO: 4986; WAN024DEL; Start 596; Stop 620
ttgcttctacatctattattgttgc

SEQ ID NO: 396401 - DNA, 25 bp, Artificial
  probe
  misc_feature (1)..(25): SEQ ID NO: 4986; WAN024DEL; Start 554; Stop 578
gaacattagatcagttaggctatga

SEQ ID NO: 396402 - DNA, 25 bp, Artificial
  probe
  misc_feature (1)..(25): SEQ ID NO: 4986; WAN024DEL; Start 10; Stop 34
aaggagtttgatatggagtggatta

SEQ ID NO: 396403 - DNA, 25 bp, Artificial
  probe
  misc_feature (1)..(25): SEQ ID NO: 4986; WAN024DEL; Start 8; Stop 32
taaaggagtttgatatggagtggat

SEQ ID NO: 396404 - DNA, 25 bp, Artificial
  probe
  misc_feature (1)..(25): SEQ ID NO: 4986; WAN024DEL; Start 7; Stop 31
ataaaggagtttgatatggagtgga

SEQ ID NO: 396405 - DNA, 25 bp, Artificial
  probe
  misc_feature (1)..(25): SEQ ID NO: 4986; WAN024DEL; Start 122; Stop 146
ctttagtttcaggtgtttctctcgt

SEQ ID NO: 396406 - DNA, 25 bp, Artificial
  probe
  misc_feature (1)..(25): SEQ ID NO: 4986; WAN024DEL; Start 124; Stop 148
ttagtttcaggtgtttctctcgttg

SEQ ID NO: 396407 - DNA, 25 bp, Artificial
  probe
  misc_feature (1)..(25): SEQ ID NO: 4986; WAN024DEL; Start 415; Stop 439
gcagagtctcaattaggtagaaagt

SEQ ID NO: 396408 - DNA, 25 bp, Artificial
  probe
  misc_feature (1)..(25): SEQ ID NO: 4986; WAN024DEL; Start 278; Stop 302
agattaaaggtctgacagttggaaa

SEQ ID NO: 396409 - DNA, 25 bp, Artificial
  probe
  misc_feature (1)..(25): SEQ ID NO: 4986; WAN024DEL; Start 277; Stop 301
aagattaaaggtctgacagttggaa

SEQ ID NO: 396410 - DNA, 25 bp, Artificial
  probe
  misc_feature (1)..(25): SEQ ID NO: 4986; WAN024DEL; Start 276; Stop 300
aaagattaaaggtctgacagttgga

SEQ ID NO: 396411 - DNA, 25 bp, Artificial
  probe
  misc_feature (1)..(25): SEQ ID NO: 4986; WAN024DEL; Start 279; Stop 303
gattaaaggtctgacagttggaaac

SEQ ID NO: 396412 - DNA, 25 bp, Artificial
  probe
  misc_feature (1)..(25): SEQ ID NO: 4986; WAN024DEL; Start 275; Stop 299
gaaagattaaaggtctgacagttgg

SEQ ID NO: 396413 - DNA, 25 bp, Artificial
  probe
  misc_feature (1)..(25): SEQ ID NO: 4986; WAN024DEL; Start 274; Stop 298
cgaaagattaaaggtctgacagttg

SEQ ID NO: 396414 - DNA, 25 bp, Artificial
  probe
  misc_feature (1)..(25): SEQ ID NO: 4986; WAN024DEL; Start 555; Stop 579
aacattagatcagttaggctatgaa

SEQ ID NO: 396415 - DNA, 25 bp, Artificial
  probe
  misc_feature (1)..(25): SEQ ID NO: 4986; WAN024DEL; Start 443; Stop 467
cagaggttgaagatgagacaataaa

SEQ ID NO: 396416 - DNA, 25 bp, Artificial
  probe
  misc_feature (1)..(25): SEQ ID NO: 4986; WAN024DEL; Start 44; Stop 68
gaatagcaatcattgttgtgggttt

SEQ ID NO: 396417 - DNA, 25 bp, Artificial
  probe
  misc_feature (1)..(25): SEQ ID NO: 4986; WAN024DEL; Start 552; Stop 576
gggaacattagatcagttaggctat

SEQ ID NO: 396418 - DNA, 25 bp, Artificial
  probe
  misc_feature (1)..(25): SEQ ID NO: 4986; WAN024DEL; Start 590; Stop 614
cagggattgcttctacatctattat

SEQ ID NO: 396419 - DNA, 25 bp, Artificial
  probe
  misc_feature (1)..(25): SEQ ID NO: 4986; WAN024DEL; Start 121; Stop 145
gctttagtttcaggtgtttctctcg

SEQ ID NO: 396420 - DNA, 25 bp, Artificial
  probe
  misc_feature (1)..(25): SEQ ID NO: 4987; WAN024GAD; Start 629; Stop 653
taggaacagaagaagcagatgatac

SEQ ID NO: 396421 - DNA, 25 bp, Artificial
  probe
  misc_feature (1)..(25): SEQ ID NO: 4987; WAN024GAD; Start 628; Stop 652
gtaggaacagaagaagcagatgata

SEQ ID NO: 396422 - DNA, 25 bp, Artificial
  probe
  misc_feature (1)..(25): SEQ ID NO: 4987; WAN024GAD; Start 637; Stop 661
gaagaagcagatgatacagacaaga

SEQ ID NO: 396423 - DNA, 25 bp, Artificial
  probe
  misc_feature (1)..(25): SEQ ID NO: 4987; WAN024GAD; Start 636; Stop 660
agaagaagcagatgatacagacaag

SEQ ID NO: 396424 - DNA, 25 bp, Artificial
  probe
  misc_feature (1)..(25): SEQ ID NO: 4987; WAN024GAD; Start 632; Stop 656
gaacagaagaagcagatgatacaga

SEQ ID NO: 396425 - DNA, 25 bp, Artificial
  probe
  misc_feature (1)..(25): SEQ ID NO: 4987; WAN024GAD; Start 638; Stop 662
aagaagcagatgatacagacaagac

SEQ ID NO: 396426 - DNA, 25 bp, Artificial
  probe
  misc_feature (1)..(25): SEQ ID NO: 4987; WAN024GAD; Start 635; Stop 659
cagaagaagcagatgatacagacaa

SEQ ID NO: 396427 - DNA, 25 bp, Artificial
  probe
  misc_feature (1)..(25): SEQ ID NO: 4987; WAN024GAD; Start 633; Stop 657
aacagaagaagcagatgatacagac

SEQ ID NO: 396428 - DNA, 25 bp, Artificial
  probe
  misc_feature (1)..(25): SEQ ID NO: 4987; WAN024GAD; Start 631; Stop 655
ggaacagaagaagcagatgatacag

SEQ ID NO: 396429 - DNA, 25 bp, Artificial
  probe
  misc_feature (1)..(25): SEQ ID NO: 4987; WAN024GAD; Start 634; Stop 658
acagaagaagcagatgatacagaca

SEQ ID NO: 396430 - DNA, 25 bp, Artificial
  probe
  misc_feature (1)..(25): SEQ ID NO: 4987; WAN024GAD; Start 630; Stop 654
aggaacagaagaagcagatgataca

SEQ ID NO: 396431 - DNA, 25 bp, Artificial
  probe
  misc_feature (1)..(25): SEQ ID NO: 4987; WAN024GAD; Start 271; Stop 295
gttgctattgacaatgatggtatgg

SEQ ID NO: 396432 - DNA, 25 bp, Artificial
  probe
  misc_feature (1)..(25): SEQ ID NO: 4987; WAN024GAD; Start 625; Stop 649
tatgtaggaacagaagaagcagatg

SEQ ID NO: 396433 - DNA, 25 bp, Artificial
  probe
  misc_feature (1)..(25): SEQ ID NO: 4987; WAN024GAD; Start 624; Stop 648
ctatgtaggaacagaagaagcagat

SEQ ID NO: 396434 - DNA, 25 bp, Artificial
  probe
  misc_feature (1)..(25): SEQ ID NO: 4987; WAN024GAD; Start 622; Stop 646
atctatgtaggaacagaagaagcag

SEQ ID NO: 396435 - DNA, 25 bp, Artificial
  probe
  misc_feature (1)..(25): SEQ ID NO: 4987; WAN024GAD; Start 621; Stop 645
catctatgtaggaacagaagaagca

SEQ ID NO: 396436 - DNA, 25 bp, Artificial
  probe
  misc_feature (1)..(25): SEQ ID NO: 4987; WAN024GAD; Start 620; Stop 644
tcatctatgtaggaacagaagaagc

SEQ ID NO: 396437 - DNA, 25 bp, Artificial
  probe
  misc_feature (1)..(25): SEQ ID NO: 4987; WAN024GAD; Start 614; Stop 638
gcatcttcatctatgtaggaacaga

SEQ ID NO: 396438 - DNA, 25 bp, Artificial
  probe
  misc_feature (1)..(25): SEQ ID NO: 4987; WAN024GAD; Start 270; Stop 294
cgttgctattgacaatgatggtatg

SEQ ID NO: 396439 - DNA, 25 bp, Artificial
  probe
  misc_feature (1)..(25): SEQ ID NO: 4987; WAN024GAD; Start 269; Stop 293
tcgttgctattgacaatgatggtat

SEQ ID NO: 396440 - DNA, 25 bp, Artificial
  probe
  misc_feature (1)..(25): SEQ ID NO: 4987; WAN024GAD; Start 641; Stop 665
aagcagatgatacagacaagacctt

SEQ ID NO: 396441 - DNA, 25 bp, Artificial
  probe
  misc_feature (1)..(25): SEQ ID NO: 4987; WAN024GAD; Start 623; Stop 647
tctatgtaggaacagaagaagcaga

SEQ ID NO: 396442 - DNA, 25 bp, Artificial
  probe
  misc_feature (1)..(25): SEQ ID NO: 4987; WAN024GAD; Start 640; Stop 664
gaagcagatgatacagacaagacct

SEQ ID NO: 396443 - DNA, 25 bp, Artificial
  probe
  misc_feature (1)..(25): SEQ ID NO: 4987; WAN024GAD; Start 639; Stop 663
agaagcagatgatacagacaagacc

SEQ ID NO: 396444 - DNA, 25 bp, Artificial
  probe
  misc_feature (1)..(25): SEQ ID NO: 4987; WAN024GAD; Start 613; Stop 637
cgcatcttcatctatgtaggaacag

SEQ ID NO: 396445 - DNA, 25 bp, Artificial
  probe
  misc_feature (1)..(25): SEQ ID NO: 4987; WAN024GAD; Start 645; Stop 669
agatgatacagacaagaccttgatg

SEQ ID NO: 396446 - DNA, 25 bp, Artificial
  probe
  misc_feature (1)..(25): SEQ ID NO: 4987; WAN024GAD; Start 644; Stop 668
cagatgatacagacaagaccttgat

SEQ ID NO: 396447 - DNA, 25 bp, Artificial
  probe
  misc_feature (1)..(25): SEQ ID NO: 4987; WAN024GAD; Start 737; Stop 761
gagtacatctggataatcttgtgct

SEQ ID NO: 396448 - DNA, 25 bp, Artificial
  probe
  misc_feature (1)..(25): SEQ ID NO: 4987; WAN024GAD; Start 17; Stop 41
ttctgacaatgaatcaatcctactt

SEQ ID NO: 396449 - DNA, 25 bp, Artificial
  probe
  misc_feature (1)..(25): SEQ ID NO: 4987; WAN024GAD; Start 649; Stop 673
gatacagacaagaccttgatggatg

SEQ ID NO: 396450 - DNA, 25 bp, Artificial
  probe
  misc_feature (1)..(25): SEQ ID NO: 4987; WAN024GAD; Start 646; Stop 670
gatgatacagacaagaccttgatgg

SEQ ID NO: 396451 - DNA, 25 bp, Artificial
  probe
  misc_feature (1)..(25): SEQ ID NO: 4987; WAN024GAD; Start 627; Stop 651
tgtaggaacagaagaagcagatgat

SEQ ID NO: 396452 - DNA, 25 bp, Artificial
  probe
  misc_feature (1)..(25): SEQ ID NO: 4987; WAN024GAD; Start 626; Stop 650
atgtaggaacagaagaagcagatga

SEQ ID NO: 396453 - DNA, 25 bp, Artificial
  probe
  misc_feature (1)..(25): SEQ ID NO: 4988; WAN024AEZ; Start 37; Stop 61
tatatcgtataggtgtcgtcatgga

SEQ ID NO: 396454 - DNA, 25 bp, Artificial
  probe
  misc_feature (1)..(25): SEQ ID NO: 4988; WAN024AEZ; Start 38; Stop 62
atatcgtataggtgtcgtcatggat

SEQ ID NO: 396455 - DNA, 25 bp, Artificial
  probe
  misc_feature (1)..(25): SEQ ID NO: 4988; WAN024AEZ; Start 39; Stop 63
tatcgtataggtgtcgtcatggatc

SEQ ID NO: 396456 - DNA, 25 bp, Artificial
  probe
  misc_feature (1)..(25): SEQ ID NO: 4988; WAN024AEZ; Start 80; Stop 104
ggatacgcaaacacaatactatgac

SEQ ID NO: 396457 - DNA, 25 bp, Artificial
  probe
  misc_feature (1)..(25): SEQ ID NO: 4988; WAN024AEZ; Start 79; Stop 103
aggatacgcaaacacaatactatga

SEQ ID NO: 396458 - DNA, 25 bp, Artificial
  probe
  misc_feature (1)..(25): SEQ ID NO: 4988; WAN024AEZ; Start 78; Stop 102
aaggatacgcaaacacaatactatg

SEQ ID NO: 396459 - DNA, 25 bp, Artificial
  probe
  misc_feature (1)..(25): SEQ ID NO: 4988; WAN024AEZ; Start 85; Stop 109
cgcaaacacaatactatgactcaat

SEQ ID NO: 396460 - DNA, 25 bp, Artificial
  probe
  misc_feature (1)..(25): SEQ ID NO: 4988; WAN024AEZ; Start 71; Stop 95
ctgatttaaggatacgcaaacacaa

SEQ ID NO: 396461 - DNA, 25 bp, Artificial
  probe
  misc_feature (1)..(25): SEQ ID NO: 4988; WAN024AEZ; Start 82; Stop 106
atacgcaaacacaatactatgactc

SEQ ID NO: 396462 - DNA, 25 bp, Artificial
  probe
  misc_feature (1)..(25): SEQ ID NO: 4988; WAN024AEZ; Start 81; Stop 105
gatacgcaaacacaatactatgact

SEQ ID NO: 396463 - DNA, 25 bp, Artificial
  probe
  misc_feature (1)..(25): SEQ ID NO: 4988; WAN024AEZ; Start 83; Stop 107
tacgcaaacacaatactatgactca

SEQ ID NO: 396464 - DNA, 25 bp, Artificial
  probe
  misc_feature (1)..(25): SEQ ID NO: 4988; WAN024AEZ; Start 135; Stop 159
ccacctaatcctgcttcaaatagtt

SEQ ID NO: 396465 - DNA, 25 bp, Artificial
  probe
  misc_feature (1)..(25): SEQ ID NO: 4988; WAN024AEZ; Start 72; Stop 96
tgatttaaggatacgcaaacacaat

SEQ ID NO: 396466 - DNA, 25 bp, Artificial
  probe
  misc_feature (1)..(25): SEQ ID NO: 4988; WAN024AEZ; Start 124; Stop 148
ttaatttctgaccacctaatcctgc

SEQ ID NO: 396467 - DNA, 25 bp, Artificial
  probe
  misc_feature (1)..(25): SEQ ID NO: 4988; WAN024AEZ; Start 75; Stop 99
tttaaggatacgcaaacacaatact

SEQ ID NO: 396468 - DNA, 25 bp, Artificial
  probe
  misc_feature (1)..(25): SEQ ID NO: 4988; WAN024AEZ; Start 133; Stop 157
gaccacctaatcctgcttcaaatag

SEQ ID NO: 396469 - DNA, 25 bp, Artificial
  probe
  misc_feature (1)..(25): SEQ ID NO: 4988; WAN024AEZ; Start 84; Stop 108
acgcaaacacaatactatgactcaa

SEQ ID NO: 396470 - DNA, 25 bp, Artificial
  probe
  misc_feature (1)..(25): SEQ ID NO: 4988; WAN024AEZ; Start 136; Stop 160
cacctaatcctgcttcaaatagtta

SEQ ID NO: 396471 - DNA, 25 bp, Artificial
  probe
  misc_feature (1)..(25): SEQ ID NO: 4988; WAN024AEZ; Start 123; Stop 147
tttaatttctgaccacctaatcctg

SEQ ID NO: 396472 - DNA, 25 bp, Artificial
  probe
  misc_feature (1)..(25): SEQ ID NO: 4988; WAN024AEZ; Start 34; Stop 58
aactatatcgtataggtgtcgtcat

SEQ ID NO: 396473 - DNA, 25 bp, Artificial
  probe
  misc_feature (1)..(25): SEQ ID NO: 4988; WAN024AEZ; Start 125; Stop 149
taatttctgaccacctaatcctgct

SEQ ID NO: 396474 - DNA, 25 bp, Artificial
  probe
  misc_feature (1)..(25): SEQ ID NO: 4988; WAN024AEZ; Start 36; Stop 60
ctatatcgtataggtgtcgtcatgg

SEQ ID NO: 396475 - DNA, 25 bp, Artificial
  probe
  misc_feature (1)..(25): SEQ ID NO: 4988; WAN024AEZ; Start 134; Stop 158
accacctaatcctgcttcaaatagt

SEQ ID NO: 396476 - DNA, 25 bp, Artificial
  probe
  misc_feature (1)..(25): SEQ ID NO: 4988; WAN024AEZ; Start 35; Stop 59
actatatcgtataggtgtcgtcatg

SEQ ID NO: 396477 - DNA, 25 bp, Artificial
  probe
  misc_feature (1)..(25): SEQ ID NO: 4988; WAN024AEZ; Start 76; Stop 100
ttaaggatacgcaaacacaatacta

SEQ ID NO: 396478 - DNA, 25 bp, Artificial
  probe
  misc_feature (1)..(25): SEQ ID NO: 4988; WAN024AEZ; Start 77; Stop 101
taaggatacgcaaacacaatactat

SEQ ID NO: 396479 - DNA, 25 bp, Artificial
  probe
  misc_feature (1)..(25): SEQ ID NO: 4988; WAN024AEZ; Start 74; Stop 98
atttaaggatacgcaaacacaatac

SEQ ID NO: 396480 - DNA, 25 bp, Artificial
  probe
  misc_feature (1)..(25): SEQ ID NO: 4988; WAN024AEZ; Start 86; Stop 110
gcaaacacaatactatgactcaatt

SEQ ID NO: 396481 - DNA, 25 bp, Artificial
  probe
  misc_feature (1)..(25): SEQ ID NO: 4988; WAN024AEZ; Start 73; Stop 97
gatttaaggatacgcaaacacaata

SEQ ID NO: 396482 - DNA, 25 bp, Artificial
  probe
  misc_feature (1)..(25): SEQ ID NO: 4988; WAN024AEZ; Start 70; Stop 94
gctgatttaaggatacgcaaacaca

SEQ ID NO: 396483 - DNA, 25 bp, Artificial
  probe
  misc_feature (1)..(25): SEQ ID NO: 4988; WAN024AEZ; Start 132; Stop 156
tgaccacctaatcctgcttcaaata

SEQ ID NO: 396484 - DNA, 25 bp, Artificial
  probe
  misc_feature (1)..(25): SEQ ID NO: 4988; WAN024AEZ; Start 126; Stop 150
aatttctgaccacctaatcctgctt

SEQ ID NO: 396485 - DNA, 25 bp, Artificial
  probe
  misc_feature (1)..(25): SEQ ID NO: 4988; WAN024AEZ; Start 122; Stop 146
atttaatttctgaccacctaatcct

SEQ ID NO: 396486 - DNA, 25 bp, Artificial
  probe
  misc_feature (1)..(25): SEQ ID NO: 4989; WAN024GJB; Start 230; Stop 254
gaactcgtatcaacattatggacac

SEQ ID NO: 396487 - DNA, 25 bp, Artificial
  probe
  misc_feature (1)..(25): SEQ ID NO: 4989; WAN024GJB; Start 231; Stop 255
aactcgtatcaacattatggacaca

SEQ ID NO: 396488 - DNA, 25 bp, Artificial
  probe
  misc_feature (1)..(25): SEQ ID NO: 4989; WAN024GJB; Start 229; Stop 253
ggaactcgtatcaacattatggaca

SEQ ID NO: 396489 - DNA, 25 bp, Artificial
  probe
  misc_feature (1)..(25): SEQ ID NO: 4989; WAN024GJB; Start 232; Stop 256
actcgtatcaacattatggacacac

SEQ ID NO: 396490 - DNA, 25 bp, Artificial
  probe
  misc_feature (1)..(25): SEQ ID NO: 4989; WAN024GJB; Start 1180; Stop 1204
gtatctcgtccagaagttatcgtaa

SEQ ID NO: 396491 - DNA, 25 bp, Artificial
  probe
  misc_feature (1)..(25): SEQ ID NO: 4989; WAN024GJB; Start 1176; Stop 1200
tcaagtatctcgtccagaagttatc

SEQ ID NO: 396492 - DNA, 25 bp, Artificial
  probe
  misc_feature (1)..(25): SEQ ID NO: 4989; WAN024GJB; Start 1179; Stop 1203
agtatctcgtccagaagttatcgta

SEQ ID NO: 396493 - DNA, 25 bp, Artificial
  probe
  misc_feature (1)..(25): SEQ ID NO: 4989; WAN024GJB; Start 1175; Stop 1199
ttcaagtatctcgtccagaagttat

SEQ ID NO: 396494 - DNA, 25 bp, Artificial
  probe
  misc_feature (1)..(25): SEQ ID NO: 4989; WAN024GJB; Start 1177; Stop 1201
caagtatctcgtccagaagttatcg

SEQ ID NO: 396495 - DNA, 25 bp, Artificial
  probe
  misc_feature (1)..(25): SEQ ID NO: 4989; WAN024GJB; Start 445; Stop 469
gaagtagtggatgaagtcttggaac

SEQ ID NO: 396496 - DNA, 25 bp, Artificial
  probe
  misc_feature (1)..(25): SEQ ID NO: 4989; WAN024GJB; Start 233; Stop 257
ctcgtatcaacattatggacacacc

SEQ ID NO: 396497 - DNA, 25 bp, Artificial
  probe
  misc_feature (1)..(25): SEQ ID NO: 4989; WAN024GJB; Start 1178; Stop 1202
aagtatctcgtccagaagttatcgt

SEQ ID NO: 396498 - DNA, 25 bp, Artificial
  probe
  misc_feature (1)..(25): SEQ ID NO: 4989; WAN024GJB; Start 444; Stop 468
agaagtagtggatgaagtcttggaa

SEQ ID NO: 396499 - DNA, 25 bp, Artificial
  probe
  misc_feature (1)..(25): SEQ ID NO: 4989; WAN024GJB; Start 228; Stop 252
cggaactcgtatcaacattatggac

SEQ ID NO: 396500 - DNA, 25 bp, Artificial
  probe
  misc_feature (1)..(25): SEQ ID NO: 4989; WAN024GJB; Start 535; Stop 559
aacggaacttcttcattgtcagatg

SEQ ID NO: 396501 - DNA, 25 bp, Artificial
  probe
  misc_feature (1)..(25): SEQ ID NO: 4989; WAN024GJB; Start 446; Stop 470
aagtagtggatgaagtcttggaact

SEQ ID NO: 396502 - DNA, 25 bp, Artificial
  probe
  misc_feature (1)..(25): SEQ ID NO: 4989; WAN024GJB; Start 534; Stop 558
caacggaacttcttcattgtcagat

SEQ ID NO: 396503 - DNA, 25 bp, Artificial
  probe
  misc_feature (1)..(25): SEQ ID NO: 4989; WAN024GJB; Start 532; Stop 556
atcaacggaacttcttcattgtcag

SEQ ID NO: 396504 - DNA, 25 bp, Artificial
  probe
  misc_feature (1)..(25): SEQ ID NO: 4989; WAN024GJB; Start 1168; Stop 1192
tatgaacttcaagtatctcgtccag

SEQ ID NO: 396505 - DNA, 25 bp, Artificial
  probe
  misc_feature (1)..(25): SEQ ID NO: 4989; WAN024GJB; Start 1167; Stop 1191
ctatgaacttcaagtatctcgtcca

SEQ ID NO: 396506 - DNA, 25 bp, Artificial
  probe
  misc_feature (1)..(25): SEQ ID NO: 4989; WAN024GJB; Start 1166; Stop 1190
gctatgaacttcaagtatctcgtcc

SEQ ID NO: 396507 - DNA, 25 bp, Artificial
  probe
  misc_feature (1)..(25): SEQ ID NO: 4989; WAN024GJB; Start 1165; Stop 1189
ggctatgaacttcaagtatctcgtc

SEQ ID NO: 396508 - DNA, 25 bp, Artificial
  probe
  misc_feature (1)..(25): SEQ ID NO: 4989; WAN024GJB; Start 1169; Stop 1193
atgaacttcaagtatctcgtccaga

SEQ ID NO: 396509 - DNA, 25 bp, Artificial
  probe
  misc_feature (1)..(25): SEQ ID NO: 4989; WAN024GJB; Start 531; Stop 555
gatcaacggaacttcttcattgtca

SEQ ID NO: 396510 - DNA, 25 bp, Artificial
  probe
  misc_feature (1)..(25): SEQ ID NO: 4989; WAN024GJB; Start 1519; Stop 1543
aaggctacaacttactcaatcatgt

SEQ ID NO: 396511 - DNA, 25 bp, Artificial
  probe
  misc_feature (1)..(25): SEQ ID NO: 4989; WAN024GJB; Start 1170; Stop 1194
tgaacttcaagtatctcgtccagaa

SEQ ID NO: 396512 - DNA, 25 bp, Artificial
  probe
  misc_feature (1)..(25): SEQ ID NO: 4989; WAN024GJB; Start 1521; Stop 1545
ggctacaacttactcaatcatgtct

SEQ ID NO: 396513 - DNA, 25 bp, Artificial
  probe
  misc_feature (1)..(25): SEQ ID NO: 4989; WAN024GJB; Start 1520; Stop 1544
aggctacaacttactcaatcatgtc

SEQ ID NO: 396514 - DNA, 25 bp, Artificial
  probe
  misc_feature (1)..(25): SEQ ID NO: 4989; WAN024GJB; Start 1753; Stop 1777
aacgacgatgagtacatggaagtaa

SEQ ID NO: 396515 - DNA, 25 bp, Artificial
  probe
  misc_feature (1)..(25): SEQ ID NO: 4989; WAN024GJB; Start 533; Stop 557
tcaacggaacttcttcattgtcaga

SEQ ID NO: 396516 - DNA, 25 bp, Artificial
  probe
  misc_feature (1)..(25): SEQ ID NO: 4989; WAN024GJB; Start 625; Stop 649
ccagtagataactcagatgagcctt

SEQ ID NO: 396517 - DNA, 25 bp, Artificial
  probe
  misc_feature (1)..(25): SEQ ID NO: 4989; WAN024GJB; Start 1525; Stop 1549
acaacttactcaatcatgtctatcg

SEQ ID NO: 396518 - DNA, 25 bp, Artificial
  probe
  misc_feature (1)..(25): SEQ ID NO: 4989; WAN024GJB; Start 917; Stop 941
tagaagctcttccaatcctacacat

SEQ ID NO: 396519 - DNA, 25 bp, Artificial
  probe
  misc_feature (1)..(25): SEQ ID NO: 4990; WAN024CAR; Start 24; Stop 48
ttatagtagaagtgtggaatgcgag

SEQ ID NO: 396520 - DNA, 25 bp, Artificial
  probe
  misc_feature (1)..(25): SEQ ID NO: 4990; WAN024CAR; Start 23; Stop 47
gttatagtagaagtgtggaatgcga

SEQ ID NO: 396521 - DNA, 25 bp, Artificial
  probe
  misc_feature (1)..(25): SEQ ID NO: 4990; WAN024CAR; Start 22; Stop 46
agttatagtagaagtgtggaatgcg

SEQ ID NO: 396522 - DNA, 25 bp, Artificial
  probe
  misc_feature (1)..(25): SEQ ID NO: 4990; WAN024CAR; Start 21; Stop 45
tagttatagtagaagtgtggaatgc

SEQ ID NO: 396523 - DNA, 25 bp, Artificial
  probe
  misc_feature (1)..(25): SEQ ID NO: 4990; WAN024CAR; Start 25; Stop 49
tatagtagaagtgtggaatgcgagc

SEQ ID NO: 396524 - DNA, 25 bp, Artificial
  probe
  misc_feature (1)..(25): SEQ ID NO: 4990; WAN024CAR; Start 55; Stop 79
cgtattggatttcaggattgtcttc

SEQ ID NO: 396525 - DNA, 25 bp, Artificial
  probe
  misc_feature (1)..(25): SEQ ID NO: 4990; WAN024CAR; Start 54; Stop 78
tcgtattggatttcaggattgtctt

SEQ ID NO: 396526 - DNA, 25 bp, Artificial
  probe
  misc_feature (1)..(25): SEQ ID NO: 4990; WAN024CAR; Start 53; Stop 77
ctcgtattggatttcaggattgtct

SEQ ID NO: 396527 - DNA, 25 bp, Artificial
  probe
  misc_feature (1)..(25): SEQ ID NO: 4990; WAN024CAR; Start 52; Stop 76
actcgtattggatttcaggattgtc

SEQ ID NO: 396528 - DNA, 25 bp, Artificial
  probe
  misc_feature (1)..(25): SEQ ID NO: 4990; WAN024CAR; Start 51; Stop 75
cactcgtattggatttcaggattgt

SEQ ID NO: 396529 - DNA, 25 bp, Artificial
  probe
  misc_feature (1)..(25): SEQ ID NO: 4990; WAN024CAR; Start 104; Stop 128
gttcaagtctgcgtagagtttattt

SEQ ID NO: 396530 - DNA, 25 bp, Artificial
  probe
  misc_feature (1)..(25): SEQ ID NO: 4990; WAN024CAR; Start 109; Stop 133
agtctgcgtagagtttatttaggaa

SEQ ID NO: 396531 - DNA, 25 bp, Artificial
  probe
  misc_feature (1)..(25): SEQ ID NO: 4990; WAN024CAR; Start 108; Stop 132
aagtctgcgtagagtttatttagga

SEQ ID NO: 396532 - DNA, 25 bp, Artificial
  probe
  misc_feature (1)..(25): SEQ ID NO: 4990; WAN024CAR; Start 107; Stop 131
caagtctgcgtagagtttatttagg

SEQ ID NO: 396533 - DNA, 25 bp, Artificial
  probe
  misc_feature (1)..(25): SEQ ID NO: 4990; WAN024CAR; Start 110; Stop 134
gtctgcgtagagtttatttaggaaa

SEQ ID NO: 396534 - DNA, 25 bp, Artificial
  probe
  misc_feature (1)..(25): SEQ ID NO: 4990; WAN024CAR; Start 103; Stop 127
ggttcaagtctgcgtagagtttatt

SEQ ID NO: 396535 - DNA, 25 bp, Artificial
  probe
  misc_feature (1)..(25): SEQ ID NO: 4990; WAN024CAR; Start 222; Stop 246
cggaaaccatctaggaagttattga

SEQ ID NO: 396536 - DNA, 25 bp, Artificial
  probe
  misc_feature (1)..(25): SEQ ID NO: 4990; WAN024CAR; Start 221; Stop 245
acggaaaccatctaggaagttattg

SEQ ID NO: 396537 - DNA, 25 bp, Artificial
  probe
  misc_feature (1)..(25): SEQ ID NO: 4990; WAN024CAR; Start 220; Stop 244
cacggaaaccatctaggaagttatt

SEQ ID NO: 396538 - DNA, 25 bp, Artificial
  probe
  misc_feature (1)..(25): SEQ ID NO: 4990; WAN024CAR; Start 106; Stop 130
tcaagtctgcgtagagtttatttag

SEQ ID NO: 396539 - DNA, 25 bp, Artificial
  probe
  misc_feature (1)..(25): SEQ ID NO: 4990; WAN024CAR; Start 20; Stop 44
gtagttatagtagaagtgtggaatg

SEQ ID NO: 396540 - DNA, 25 bp, Artificial
  probe
  misc_feature (1)..(25): SEQ ID NO: 4990; WAN024CAR; Start 113; Stop 137
tgcgtagagtttatttaggaaatcg

SEQ ID NO: 396541 - DNA, 25 bp, Artificial
  probe
  misc_feature (1)..(25): SEQ ID NO: 4990; WAN024CAR; Start 70; Stop 94
gattgtcttccttactcaaaccata

SEQ ID NO: 396542 - DNA, 25 bp, Artificial
  probe
  misc_feature (1)..(25): SEQ ID NO: 4990; WAN024CAR; Start 105; Stop 129
ttcaagtctgcgtagagtttattta

SEQ ID NO: 396543 - DNA, 25 bp, Artificial
  probe
  misc_feature (1)..(25): SEQ ID NO: 4990; WAN024CAR; Start 120; Stop 144
agtttatttaggaaatcgcttgtca

SEQ ID NO: 396544 - DNA, 25 bp, Artificial
  probe
  misc_feature (1)..(25): SEQ ID NO: 4990; WAN024CAR; Start 115; Stop 139
cgtagagtttatttaggaaatcgct

SEQ ID NO: 396545 - DNA, 25 bp, Artificial
  probe
  misc_feature (1)..(25): SEQ ID NO: 4990; WAN024CAR; Start 118; Stop 142
agagtttatttaggaaatcgcttgt

SEQ ID NO: 396546 - DNA, 25 bp, Artificial
  probe
  misc_feature (1)..(25): SEQ ID NO: 4990; WAN024CAR; Start 19; Stop 43
agtagttatagtagaagtgtggaat

SEQ ID NO: 396547 - DNA, 25 bp, Artificial
  probe
  misc_feature (1)..(25): SEQ ID NO: 4990; WAN024CAR; Start 102; Stop 126
tggttcaagtctgcgtagagtttat

SEQ ID NO: 396548 - DNA, 25 bp, Artificial
  probe
  misc_feature (1)..(25): SEQ ID NO: 4990; WAN024CAR; Start 72; Stop 96
ttgtcttccttactcaaaccataat

SEQ ID NO: 396549 - DNA, 25 bp, Artificial
  probe
  misc_feature (1)..(25): SEQ ID NO: 4990; WAN024CAR; Start 71; Stop 95
attgtcttccttactcaaaccataa

SEQ ID NO: 396550 - DNA, 25 bp, Artificial
  probe
  misc_feature (1)..(25): SEQ ID NO: 4990; WAN024CAR; Start 119; Stop 143
gagtttatttaggaaatcgcttgtc

SEQ ID NO: 396551 - DNA, 25 bp, Artificial
  probe
  misc_feature (1)..(25): SEQ ID NO: 4990; WAN024CAR; Start 56; Stop 80
gtattggatttcaggattgtcttcc

SEQ ID NO: 396552 - DNA, 25 bp, Artificial
  probe
  misc_feature (1)..(25): SEQ ID NO: 4991; WAN024FVW; Start 157; Stop 181
gttcgattggaatcaagtggagatt

SEQ ID NO: 396553 - DNA, 25 bp, Artificial
  probe
  misc_feature (1)..(25): SEQ ID NO: 4991; WAN024FVW; Start 160; Stop 184
cgattggaatcaagtggagatttaa

SEQ ID NO: 396554 - DNA, 25 bp, Artificial
  probe
  misc_feature (1)..(25): SEQ ID NO: 4991; WAN024FVW; Start 156; Stop 180
ggttcgattggaatcaagtggagat

SEQ ID NO: 396555 - DNA, 25 bp, Artificial
  probe
  misc_feature (1)..(25): SEQ ID NO: 4991; WAN024FVW; Start 154; Stop 178
ttggttcgattggaatcaagtggag

SEQ ID NO: 396556 - DNA, 25 bp, Artificial
  probe
  misc_feature (1)..(25): SEQ ID NO: 4991; WAN024FVW; Start 159; Stop 183
tcgattggaatcaagtggagattta

SEQ ID NO: 396557 - DNA, 25 bp, Artificial
  probe
  misc_feature (1)..(25): SEQ ID NO: 4991; WAN024FVW; Start 164; Stop 188
tggaatcaagtggagatttaatact

SEQ ID NO: 396558 - DNA, 25 bp, Artificial
  probe
  misc_feature (1)..(25): SEQ ID NO: 4991; WAN024FVW; Start 158; Stop 182
ttcgattggaatcaagtggagattt

SEQ ID NO: 396559 - DNA, 25 bp, Artificial
  probe
  misc_feature (1)..(25): SEQ ID NO: 4991; WAN024FVW; Start 109; Stop 133
attgttgaagccatctctcttatgg

SEQ ID NO: 396560 - DNA, 25 bp, Artificial
  probe
  misc_feature (1)..(25): SEQ ID NO: 4991; WAN024FVW; Start 173; Stop 197
gtggagatttaatactcaaagaact

SEQ ID NO: 396561 - DNA, 25 bp, Artificial
  probe
  misc_feature (1)..(25): SEQ ID NO: 4991; WAN024FVW; Start 172; Stop 196
agtggagatttaatactcaaagaac

SEQ ID NO: 396562 - DNA, 25 bp, Artificial
  probe
  misc_feature (1)..(25): SEQ ID NO: 4991; WAN024FVW; Start 170; Stop 194
caagtggagatttaatactcaaaga

SEQ ID NO: 396563 - DNA, 25 bp, Artificial
  probe
  misc_feature (1)..(25): SEQ ID NO: 4991; WAN024FVW; Start 169; Stop 193
tcaagtggagatttaatactcaaag

SEQ ID NO: 396564 - DNA, 25 bp, Artificial
  probe
  misc_feature (1)..(25): SEQ ID NO: 4991; WAN024FVW; Start 161; Stop 185
gattggaatcaagtggagatttaat

SEQ ID NO: 396565 - DNA, 25 bp, Artificial
  probe
  misc_feature (1)..(25): SEQ ID NO: 4991; WAN024FVW; Start 165; Stop 189
ggaatcaagtggagatttaatactc

SEQ ID NO: 396566 - DNA, 25 bp, Artificial
  probe
  misc_feature (1)..(25): SEQ ID NO: 4991; WAN024FVW; Start 155; Stop 179
tggttcgattggaatcaagtggaga

SEQ ID NO: 396567 - DNA, 25 bp, Artificial
  probe
  misc_feature (1)..(25): SEQ ID NO: 4991; WAN024FVW; Start 163; Stop 187
ttggaatcaagtggagatttaatac

SEQ ID NO: 396568 - DNA, 25 bp, Artificial
  probe
  misc_feature (1)..(25): SEQ ID NO: 4991; WAN024FVW; Start 168; Stop 192
atcaagtggagatttaatactcaaa

SEQ ID NO: 396569 - DNA, 25 bp, Artificial
  probe
  misc_feature (1)..(25): SEQ ID NO: 4991; WAN024FVW; Start 171; Stop 195
aagtggagatttaatactcaaagaa

SEQ ID NO: 396570 - DNA, 25 bp, Artificial
  probe
  misc_feature (1)..(25): SEQ ID NO: 4991; WAN024FVW; Start 166; Stop 190
gaatcaagtggagatttaatactca

SEQ ID NO: 396571 - DNA, 25 bp, Artificial
  probe
  misc_feature (1)..(25): SEQ ID NO: 4991; WAN024FVW; Start 83; Stop 107
ttttagtacgtgaaatgggaattga

SEQ ID NO: 396572 - DNA, 25 bp, Artificial
  probe
  misc_feature (1)..(25): SEQ ID NO: 4991; WAN024FVW; Start 167; Stop 191
aatcaagtggagatttaatactcaa

SEQ ID NO: 396573 - DNA, 25 bp, Artificial
  probe
  misc_feature (1)..(25): SEQ ID NO: 4991; WAN024FVW; Start 162; Stop 186
attggaatcaagtggagatttaata

SEQ ID NO: 396574 - DNA, 25 bp, Artificial
  probe
  misc_feature (1)..(25): SEQ ID NO: 4991; WAN024FVW; Start 153; Stop 177
cttggttcgattggaatcaagtgga

SEQ ID NO: 396575 - DNA, 25 bp, Artificial
  probe
  misc_feature (1)..(25): SEQ ID NO: 4991; WAN024FVW; Start 152; Stop 176
gcttggttcgattggaatcaagtgg

SEQ ID NO: 396576 - DNA, 25 bp, Artificial
  probe
  misc_feature (1)..(25): SEQ ID NO: 4991; WAN024FVW; Start 151; Stop 175
ggcttggttcgattggaatcaagtg

SEQ ID NO: 396577 - DNA, 25 bp, Artificial
  probe
  misc_feature (1)..(25): SEQ ID NO: 4991; WAN024FVW; Start 150; Stop 174
tggcttggttcgattggaatcaagt

SEQ ID NO: 396578 - DNA, 25 bp, Artificial
  probe
  misc_feature (1)..(25): SEQ ID NO: 4992; WAN024GB9; Start 353; Stop 377
ttcataatagccatcaactcatcaa

SEQ ID NO: 396579 - DNA, 25 bp, Artificial
  probe
  misc_feature (1)..(25): SEQ ID NO: 4992; WAN024GB9; Start 354; Stop 378
tcataatagccatcaactcatcaat

SEQ ID NO: 396580 - DNA, 25 bp, Artificial
  probe
  misc_feature (1)..(25): SEQ ID NO: 4992; WAN024GB9; Start 355; Stop 379
cataatagccatcaactcatcaatt

SEQ ID NO: 396581 - DNA, 25 bp, Artificial
  probe
  misc_feature (1)..(25): SEQ ID NO: 4992; WAN024GB9; Start 359; Stop 383
atagccatcaactcatcaatttctg

SEQ ID NO: 396582 - DNA, 25 bp, Artificial
  probe
  misc_feature (1)..(25): SEQ ID NO: 4992; WAN024GB9; Start 358; Stop 382
aatagccatcaactcatcaatttct

SEQ ID NO: 396583 - DNA, 25 bp, Artificial
  probe
  misc_feature (1)..(25): SEQ ID NO: 4992; WAN024GB9; Start 400; Stop 424
cgttggttcgtcaaagataaggata

SEQ ID NO: 396584 - DNA, 25 bp, Artificial
  probe
  misc_feature (1)..(25): SEQ ID NO: 4992; WAN024GB9; Start 360; Stop 384
tagccatcaactcatcaatttctga

SEQ ID NO: 396585 - DNA, 25 bp, Artificial
  probe
  misc_feature (1)..(25): SEQ ID NO: 4992; WAN024GB9; Start 352; Stop 376
tttcataatagccatcaactcatca

SEQ ID NO: 396586 - DNA, 25 bp, Artificial
  probe
  misc_feature (1)..(25): SEQ ID NO: 4992; WAN024GB9; Start 401; Stop 425
gttggttcgtcaaagataaggatat

SEQ ID NO: 396587 - DNA, 25 bp, Artificial
  probe
  misc_feature (1)..(25): SEQ ID NO: 4992; WAN024GB9; Start 111; Stop 135
tgaccaccaaatctttgatagacaa

SEQ ID NO: 396588 - DNA, 25 bp, Artificial
  probe
  misc_feature (1)..(25): SEQ ID NO: 4992; WAN024GB9; Start 110; Stop 134
ttgaccaccaaatctttgatagaca

SEQ ID NO: 396589 - DNA, 25 bp, Artificial
  probe
  misc_feature (1)..(25): SEQ ID NO: 4992; WAN024GB9; Start 109; Stop 133
attgaccaccaaatctttgatagac

SEQ ID NO: 396590 - DNA, 25 bp, Artificial
  probe
  misc_feature (1)..(25): SEQ ID NO: 4992; WAN024GB9; Start 108; Stop 132
cattgaccaccaaatctttgataga

SEQ ID NO: 396591 - DNA, 25 bp, Artificial
  probe
  misc_feature (1)..(25): SEQ ID NO: 4992; WAN024GB9; Start 105; Stop 129
tttcattgaccaccaaatctttgat

SEQ ID NO: 396592 - DNA, 25 bp, Artificial
  probe
  misc_feature (1)..(25): SEQ ID NO: 4992; WAN024GB9; Start 107; Stop 131
tcattgaccaccaaatctttgatag

SEQ ID NO: 396593 - DNA, 25 bp, Artificial
  probe
  misc_feature (1)..(25): SEQ ID NO: 4992; WAN024GB9; Start 265; Stop 289
gataactgtaacacggtcagaaact

SEQ ID NO: 396594 - DNA, 25 bp, Artificial
  probe
  misc_feature (1)..(25): SEQ ID NO: 4992; WAN024GB9; Start 266; Stop 290
ataactgtaacacggtcagaaactg

SEQ ID NO: 396595 - DNA, 25 bp, Artificial
  probe
  misc_feature (1)..(25): SEQ ID NO: 4992; WAN024GB9; Start 106; Stop 130
ttcattgaccaccaaatctttgata

SEQ ID NO: 396596 - DNA, 25 bp, Artificial
  probe
  misc_feature (1)..(25): SEQ ID NO: 4992; WAN024GB9; Start 10; Stop 34
ttcagactgaccatttccatcaatc

SEQ ID NO: 396597 - DNA, 25 bp, Artificial
  probe
  misc_feature (1)..(25): SEQ ID NO: 4992; WAN024GB9; Start 264; Stop 288
ggataactgtaacacggtcagaaac

SEQ ID NO: 396598 - DNA, 25 bp, Artificial
  probe
  misc_feature (1)..(25): SEQ ID NO: 4992; WAN024GB9; Start 298; Stop 322
ttcatccaatttgtgggtaatcaag

SEQ ID NO: 396599 - DNA, 25 bp, Artificial
  probe
  misc_feature (1)..(25): SEQ ID NO: 4992; WAN024GB9; Start 293; Stop 317
cgaatttcatccaatttgtgggtaa

SEQ ID NO: 396600 - DNA, 25 bp, Artificial
  probe
  misc_feature (1)..(25): SEQ ID NO: 4992; WAN024GB9; Start 357; Stop 381
taatagccatcaactcatcaatttc

SEQ ID NO: 396601 - DNA, 25 bp, Artificial
  probe
  misc_feature (1)..(25): SEQ ID NO: 4992; WAN024GB9; Start 300; Stop 324
catccaatttgtgggtaatcaagat

SEQ ID NO: 396602 - DNA, 25 bp, Artificial
  probe
  misc_feature (1)..(25): SEQ ID NO: 4992; WAN024GB9; Start 299; Stop 323
tcatccaatttgtgggtaatcaaga

SEQ ID NO: 396603 - DNA, 25 bp, Artificial
  probe
  misc_feature (1)..(25): SEQ ID NO: 4992; WAN024GB9; Start 9; Stop 33
gttcagactgaccatttccatcaat

SEQ ID NO: 396604 - DNA, 25 bp, Artificial
  probe
  misc_feature (1)..(25): SEQ ID NO: 4992; WAN024GB9; Start 297; Stop 321
tttcatccaatttgtgggtaatcaa

SEQ ID NO: 396605 - DNA, 25 bp, Artificial
  probe
  misc_feature (1)..(25): SEQ ID NO: 4992; WAN024GB9; Start 39; Stop 63
caataccaacaatctctccagcacg

SEQ ID NO: 396606 - DNA, 25 bp, Artificial
  probe
  misc_feature (1)..(25): SEQ ID NO: 4992; WAN024GB9; Start 296; Stop 320
atttcatccaatttgtgggtaatca

SEQ ID NO: 396607 - DNA, 25 bp, Artificial
  probe
  misc_feature (1)..(25): SEQ ID NO: 4992; WAN024GB9; Start 41; Stop 65
ataccaacaatctctccagcacgaa

SEQ ID NO: 396608 - DNA, 25 bp, Artificial
  probe
  misc_feature (1)..(25): SEQ ID NO: 4992; WAN024GB9; Start 40; Stop 64
aataccaacaatctctccagcacga

SEQ ID NO: 396609 - DNA, 25 bp, Artificial
  probe
  misc_feature (1)..(25): SEQ ID NO: 4992; WAN024GB9; Start 45; Stop 69
caacaatctctccagcacgaacatc

SEQ ID NO: 396610 - DNA, 25 bp, Artificial
  probe
  misc_feature (1)..(25): SEQ ID NO: 4992; WAN024GB9; Start 38; Stop 62
gcaataccaacaatctctccagcac

SEQ ID NO: 396611 - DNA, 25 bp, Artificial
  probe
  misc_feature (1)..(25): SEQ ID NO: 4993; WAN024FWN; Start 231; Stop 255
agtattagttcgctatggaagatgg

SEQ ID NO: 396612 - DNA, 25 bp, Artificial
  probe
  misc_feature (1)..(25): SEQ ID NO: 4993; WAN024FWN; Start 230; Stop 254
cagtattagttcgctatggaagatg

SEQ ID NO: 396613 - DNA, 25 bp, Artificial
  probe
  misc_feature (1)..(25): SEQ ID NO: 4993; WAN024FWN; Start 859; Stop 883
atcatcctatctagtgtaacagcag

SEQ ID NO: 396614 - DNA, 25 bp, Artificial
  probe
  misc_feature (1)..(25): SEQ ID NO: 4993; WAN024FWN; Start 233; Stop 257
tattagttcgctatggaagatggct

SEQ ID NO: 396615 - DNA, 25 bp, Artificial
  probe
  misc_feature (1)..(25): SEQ ID NO: 4993; WAN024FWN; Start 232; Stop 256
gtattagttcgctatggaagatggc

SEQ ID NO: 396616 - DNA, 25 bp, Artificial
  probe
  misc_feature (1)..(25): SEQ ID NO: 4993; WAN024FWN; Start 134; Stop 158
caccagcagatccattgacatatat

SEQ ID NO: 396617 - DNA, 25 bp, Artificial
  probe
  misc_feature (1)..(25): SEQ ID NO: 4993; WAN024FWN; Start 584; Stop 608
gagttgaacacttaattctaccagt

SEQ ID NO: 396618 - DNA, 25 bp, Artificial
  probe
  misc_feature (1)..(25): SEQ ID NO: 4993; WAN024FWN; Start 858; Stop 882
tatcatcctatctagtgtaacagca

SEQ ID NO: 396619 - DNA, 25 bp, Artificial
  probe
  misc_feature (1)..(25): SEQ ID NO: 4993; WAN024FWN; Start 223; Stop 247
aatgatccagtattagttcgctatg

SEQ ID NO: 396620 - DNA, 25 bp, Artificial
  probe
  misc_feature (1)..(25): SEQ ID NO: 4993; WAN024FWN; Start 583; Stop 607
agagttgaacacttaattctaccag

SEQ ID NO: 396621 - DNA, 25 bp, Artificial
  probe
  misc_feature (1)..(25): SEQ ID NO: 4993; WAN024FWN; Start 851; Stop 875
ttggttctatcatcctatctagtgt

SEQ ID NO: 396622 - DNA, 25 bp, Artificial
  probe
  misc_feature (1)..(25): SEQ ID NO: 4993; WAN024FWN; Start 865; Stop 889
ctatctagtgtaacagcaggtgact

SEQ ID NO: 396623 - DNA, 25 bp, Artificial
  probe
  misc_feature (1)..(25): SEQ ID NO: 4993; WAN024FWN; Start 133; Stop 157
acaccagcagatccattgacatata

SEQ ID NO: 396624 - DNA, 25 bp, Artificial
  probe
  misc_feature (1)..(25): SEQ ID NO: 4993; WAN024FWN; Start 234; Stop 258
attagttcgctatggaagatggctt

SEQ ID NO: 396625 - DNA, 25 bp, Artificial
  probe
  misc_feature (1)..(25): SEQ ID NO: 4993; WAN024FWN; Start 131; Stop 155
taacaccagcagatccattgacata

SEQ ID NO: 396626 - DNA, 25 bp, Artificial
  probe
  misc_feature (1)..(25): SEQ ID NO: 4993; WAN024FWN; Start 2; Stop 26
tgaatcatgtatctctcactcttgt

SEQ ID NO: 396627 - DNA, 25 bp, Artificial
  probe
  misc_feature (1)..(25): SEQ ID NO: 4993; WAN024FWN; Start 857; Stop 881
ctatcatcctatctagtgtaacagc

SEQ ID NO: 396628 - DNA, 25 bp, Artificial
  probe
  misc_feature (1)..(25): SEQ ID NO: 4993; WAN024FWN; Start 3; Stop 27
gaatcatgtatctctcactcttgtt

SEQ ID NO: 396629 - DNA, 25 bp, Artificial
  probe
  misc_feature (1)..(25): SEQ ID NO: 4993; WAN024FWN; Start 844; Stop 868
cctggaattggttctatcatcctat

SEQ ID NO: 396630 - DNA, 25 bp, Artificial
  probe
  misc_feature (1)..(25): SEQ ID NO: 4993; WAN024FWN; Start 809; Stop 833
gtggatcagtaattatcgagagtgt

SEQ ID NO: 396631 - DNA, 25 bp, Artificial
  probe
  misc_feature (1)..(25): SEQ ID NO: 4993; WAN024FWN; Start 806; Stop 830
ttggtggatcagtaattatcgagag

SEQ ID NO: 396632 - DNA, 25 bp, Artificial
  probe
  misc_feature (1)..(25): SEQ ID NO: 4993; WAN024FWN; Start 810; Stop 834
tggatcagtaattatcgagagtgtc

SEQ ID NO: 396633 - DNA, 25 bp, Artificial
  probe
  misc_feature (1)..(25): SEQ ID NO: 4993; WAN024FWN; Start 860; Stop 884
tcatcctatctagtgtaacagcagg

SEQ ID NO: 396634 - DNA, 25 bp, Artificial
  probe
  misc_feature (1)..(25): SEQ ID NO: 4993; WAN024FWN; Start 229; Stop 253
ccagtattagttcgctatggaagat

SEQ ID NO: 396635 - DNA, 25 bp, Artificial
  probe
  misc_feature (1)..(25): SEQ ID NO: 4993; WAN024FWN; Start 808; Stop 832
ggtggatcagtaattatcgagagtg

SEQ ID NO: 396636 - DNA, 25 bp, Artificial
  probe
  misc_feature (1)..(25): SEQ ID NO: 4993; WAN024FWN; Start 805; Stop 829
attggtggatcagtaattatcgaga

SEQ ID NO: 396637 - DNA, 25 bp, Artificial
  probe
  misc_feature (1)..(25): SEQ ID NO: 4993; WAN024FWN; Start 591; Stop 615
acacttaattctaccagtaatggct

SEQ ID NO: 396638 - DNA, 25 bp, Artificial
  probe
  misc_feature (1)..(25): SEQ ID NO: 4993; WAN024FWN; Start 866; Stop 890
tatctagtgtaacagcaggtgacta

SEQ ID NO: 396639 - DNA, 25 bp, Artificial
  probe
  misc_feature (1)..(25): SEQ ID NO: 4993; WAN024FWN; Start 600; Stop 624
tctaccagtaatggctatgtcaatt

SEQ ID NO: 396640 - DNA, 25 bp, Artificial
  probe
  misc_feature (1)..(25): SEQ ID NO: 4993; WAN024FWN; Start 599; Stop 623
ttctaccagtaatggctatgtcaat

SEQ ID NO: 396641 - DNA, 25 bp, Artificial
  probe
  misc_feature (1)..(25): SEQ ID NO: 4993; WAN024FWN; Start 598; Stop 622
attctaccagtaatggctatgtcaa

SEQ ID NO: 396642 - DNA, 25 bp, Artificial
  probe
  misc_feature (1)..(25): SEQ ID NO: 4993; WAN024FWN; Start 597; Stop 621
aattctaccagtaatggctatgtca

SEQ ID NO: 396643 - DNA, 25 bp, Artificial
  probe
  misc_feature (1)..(25): SEQ ID NO: 4993; WAN024FWN; Start 807; Stop 831
tggtggatcagtaattatcgagagt

SEQ ID NO: 396644 - DNA, 25 bp, Artificial
  probe
  misc_feature (1)..(25): SEQ ID NO: 4994; WAN024C7X; Start 684; Stop 708
ttcggctaagattgatgatgataca

SEQ ID NO: 396645 - DNA, 25 bp, Artificial
  probe
  misc_feature (1)..(25): SEQ ID NO: 4994; WAN024C7X; Start 685; Stop 709
tcggctaagattgatgatgatacag

SEQ ID NO: 396646 - DNA, 25 bp, Artificial
  probe
  misc_feature (1)..(25): SEQ ID NO: 4994; WAN024C7X; Start 107; Stop 131
attccatacgccataacgcagatat

SEQ ID NO: 396647 - DNA, 25 bp, Artificial
  probe
  misc_feature (1)..(25): SEQ ID NO: 4994; WAN024C7X; Start 692; Stop 716
agattgatgatgatacagctattgc

SEQ ID NO: 396648 - DNA, 25 bp, Artificial
  probe
  misc_feature (1)..(25): SEQ ID NO: 4994; WAN024C7X; Start 106; Stop 130
aattccatacgccataacgcagata

SEQ ID NO: 396649 - DNA, 25 bp, Artificial
  probe
  misc_feature (1)..(25): SEQ ID NO: 4994; WAN024C7X; Start 124; Stop 148
gcagatatgtttgaggttgatgtaa

SEQ ID NO: 396650 - DNA, 25 bp, Artificial
  probe
  misc_feature (1)..(25): SEQ ID NO: 4994; WAN024C7X; Start 131; Stop 155
tgtttgaggttgatgtaattcgttc

SEQ ID NO: 396651 - DNA, 25 bp, Artificial
  probe
  misc_feature (1)..(25): SEQ ID NO: 4994; WAN024C7X; Start 683; Stop 707
tttcggctaagattgatgatgatac

SEQ ID NO: 396652 - DNA, 25 bp, Artificial
  probe
  misc_feature (1)..(25): SEQ ID NO: 4994; WAN024C7X; Start 130; Stop 154
atgtttgaggttgatgtaattcgtt

SEQ ID NO: 396653 - DNA, 25 bp, Artificial
  probe
  misc_feature (1)..(25): SEQ ID NO: 4994; WAN024C7X; Start 123; Stop 147
cgcagatatgtttgaggttgatgta

SEQ ID NO: 396654 - DNA, 25 bp, Artificial
  probe
  misc_feature (1)..(25): SEQ ID NO: 4994; WAN024C7X; Start 120; Stop 144
taacgcagatatgtttgaggttgat

SEQ ID NO: 396655 - DNA, 25 bp, Artificial
  probe
  misc_feature (1)..(25): SEQ ID NO: 4994; WAN024C7X; Start 119; Stop 143
ataacgcagatatgtttgaggttga

SEQ ID NO: 396656 - DNA, 25 bp, Artificial
  probe
  misc_feature (1)..(25): SEQ ID NO: 4994; WAN024C7X; Start 184; Stop 208
gatgggcaagaacctttagtatttg

SEQ ID NO: 396657 - DNA, 25 bp, Artificial
  probe
  misc_feature (1)..(25): SEQ ID NO: 4994; WAN024C7X; Start 666; Stop 690
aagtgattcaattattctttcggct

SEQ ID NO: 396658 - DNA, 25 bp, Artificial
  probe
  misc_feature (1)..(25): SEQ ID NO: 4994; WAN024C7X; Start 129; Stop 153
tatgtttgaggttgatgtaattcgt

SEQ ID NO: 396659 - DNA, 25 bp, Artificial
  probe
  misc_feature (1)..(25): SEQ ID NO: 4994; WAN024C7X; Start 682; Stop 706
ctttcggctaagattgatgatgata

SEQ ID NO: 396660 - DNA, 25 bp, Artificial
  probe
  misc_feature (1)..(25): SEQ ID NO: 4994; WAN024C7X; Start 132; Stop 156
gtttgaggttgatgtaattcgttca

SEQ ID NO: 396661 - DNA, 25 bp, Artificial
  probe
  misc_feature (1)..(25): SEQ ID NO: 4994; WAN024C7X; Start 183; Stop 207
cgatgggcaagaacctttagtattt

SEQ ID NO: 396662 - DNA, 25 bp, Artificial
  probe
  misc_feature (1)..(25): SEQ ID NO: 4994; WAN024C7X; Start 667; Stop 691
agtgattcaattattctttcggcta

SEQ ID NO: 396663 - DNA, 25 bp, Artificial
  probe
  misc_feature (1)..(25): SEQ ID NO: 4994; WAN024C7X; Start 185; Stop 209
atgggcaagaacctttagtatttgg

SEQ ID NO: 396664 - DNA, 25 bp, Artificial
  probe
  misc_feature (1)..(25): SEQ ID NO: 4994; WAN024C7X; Start 452; Stop 476
tattggaaatgcttagagactctgg

SEQ ID NO: 396665 - DNA, 25 bp, Artificial
  probe
  misc_feature (1)..(25): SEQ ID NO: 4994; WAN024C7X; Start 459; Stop 483
aatgcttagagactctggtttgaat

SEQ ID NO: 396666 - DNA, 25 bp, Artificial
  probe
  misc_feature (1)..(25): SEQ ID NO: 4994; WAN024C7X; Start 555; Stop 579
agtagctgtcgaacttgtattccaa

SEQ ID NO: 396667 - DNA, 25 bp, Artificial
  probe
  misc_feature (1)..(25): SEQ ID NO: 4994; WAN024C7X; Start 458; Stop 482
aaatgcttagagactctggtttgaa

SEQ ID NO: 396668 - DNA, 25 bp, Artificial
  probe
  misc_feature (1)..(25): SEQ ID NO: 4994; WAN024C7X; Start 633; Stop 657
aggattacttatttgggttaatgct

SEQ ID NO: 396669 - DNA, 25 bp, Artificial
  probe
  misc_feature (1)..(25): SEQ ID NO: 4994; WAN024C7X; Start 668; Stop 692
gtgattcaattattctttcggctaa

SEQ ID NO: 396670 - DNA, 25 bp, Artificial
  probe
  misc_feature (1)..(25): SEQ ID NO: 4994; WAN024C7X; Start 457; Stop 481
gaaatgcttagagactctggtttga

SEQ ID NO: 396671 - DNA, 25 bp, Artificial
  probe
  misc_feature (1)..(25): SEQ ID NO: 4994; WAN024C7X; Start 271; Stop 295
tcactgaatgaacccatattacaaa

SEQ ID NO: 396672 - DNA, 25 bp, Artificial
  probe
  misc_feature (1)..(25): SEQ ID NO: 4994; WAN024C7X; Start 121; Stop 145
aacgcagatatgtttgaggttgatg

SEQ ID NO: 396673 - DNA, 25 bp, Artificial
  probe
  misc_feature (1)..(25): SEQ ID NO: 4994; WAN024C7X; Start 686; Stop 710
cggctaagattgatgatgatacagc

SEQ ID NO: 396674 - DNA, 25 bp, Artificial
  probe
  misc_feature (1)..(25): SEQ ID NO: 4994; WAN024C7X; Start 118; Stop 142
cataacgcagatatgtttgaggttg

SEQ ID NO: 396675 - DNA, 25 bp, Artificial
  probe
  misc_feature (1)..(25): SEQ ID NO: 4994; WAN024C7X; Start 665; Stop 689
taagtgattcaattattctttcggc

SEQ ID NO: 396676 - DNA, 25 bp, Artificial
  probe
  misc_feature (1)..(25): SEQ ID NO: 4994; WAN024C7X; Start 128; Stop 152
atatgtttgaggttgatgtaattcg

SEQ ID NO: 396677 - DNA, 25 bp, Artificial
  probe
  misc_feature (1)..(25): SEQ ID NO: 4995; WAN024DQT; Start 72; Stop 96
ttatgatgaacaattacaggcagaa

SEQ ID NO: 396678 - DNA, 25 bp, Artificial
  probe
  misc_feature (1)..(25): SEQ ID NO: 4995; WAN024DQT; Start 73; Stop 97
tatgatgaacaattacaggcagaaa

SEQ ID NO: 396679 - DNA, 25 bp, Artificial
  probe
  misc_feature (1)..(25): SEQ ID NO: 4995; WAN024DQT; Start 71; Stop 95
tttatgatgaacaattacaggcaga

SEQ ID NO: 396680 - DNA, 25 bp, Artificial
  probe
  misc_feature (1)..(25): SEQ ID NO: 4995; WAN024DQT; Start 4; Stop 28
aatcctgatcgagcggaagaatatt

SEQ ID NO: 396681 - DNA, 25 bp, Artificial
  probe
  misc_feature (1)..(25): SEQ ID NO: 4995; WAN024DQT; Start 3; Stop 27
gaatcctgatcgagcggaagaatat

SEQ ID NO: 396682 - DNA, 25 bp, Artificial
  probe
  misc_feature (1)..(25): SEQ ID NO: 4995; WAN024DQT; Start 75; Stop 99
tgatgaacaattacaggcagaaaag

SEQ ID NO: 396683 - DNA, 25 bp, Artificial
  probe
  misc_feature (1)..(25): SEQ ID NO: 4995; WAN024DQT; Start 76; Stop 100
gatgaacaattacaggcagaaaagg

SEQ ID NO: 396684 - DNA, 25 bp, Artificial
  probe
  misc_feature (1)..(25): SEQ ID NO: 4995; WAN024DQT; Start 74; Stop 98
atgatgaacaattacaggcagaaaa

SEQ ID NO: 396685 - DNA, 25 bp, Artificial
  probe
  misc_feature (1)..(25): SEQ ID NO: 4995; WAN024DQT; Start 77; Stop 101
atgaacaattacaggcagaaaaggt

SEQ ID NO: 396686 - DNA, 25 bp, Artificial
  probe
  misc_feature (1)..(25): SEQ ID NO: 4995; WAN024DQT; Start 5; Stop 29
atcctgatcgagcggaagaatattt

SEQ ID NO: 396687 - DNA, 25 bp, Artificial
  probe
  misc_feature (1)..(25): SEQ ID NO: 4995; WAN024DQT; Start 2; Stop 26
tgaatcctgatcgagcggaagaata

SEQ ID NO: 396688 - DNA, 25 bp, Artificial
  probe
  misc_feature (1)..(25): SEQ ID NO: 4995; WAN024DQT; Start 78; Stop 102
tgaacaattacaggcagaaaaggtg

SEQ ID NO: 396689 - DNA, 25 bp, Artificial
  probe
  misc_feature (1)..(25): SEQ ID NO: 4995; WAN024DQT; Start 70; Stop 94
ttttatgatgaacaattacaggcag

SEQ ID NO: 396690 - DNA, 25 bp, Artificial
  probe
  misc_feature (1)..(25): SEQ ID NO: 4995; WAN024DQT; Start 8; Stop 32
ctgatcgagcggaagaatatttctg

SEQ ID NO: 396691 - DNA, 25 bp, Artificial
  probe
  misc_feature (1)..(25): SEQ ID NO: 4995; WAN024DQT; Start 6; Stop 30
tcctgatcgagcggaagaatatttc

SEQ ID NO: 396692 - DNA, 25 bp, Artificial
  probe
  misc_feature (1)..(25): SEQ ID NO: 4995; WAN024DQT; Start 79; Stop 103
gaacaattacaggcagaaaaggtgg

SEQ ID NO: 396693 - DNA, 25 bp, Artificial
  probe
  misc_feature (1)..(25): SEQ ID NO: 4995; WAN024DQT; Start 69; Stop 93
attttatgatgaacaattacaggca

SEQ ID NO: 396694 - DNA, 25 bp, Artificial
  probe
  misc_feature (1)..(25): SEQ ID NO: 4995; WAN024DQT; Start 80; Stop 104
aacaattacaggcagaaaaggtgga

SEQ ID NO: 396695 - DNA, 25 bp, Artificial
  probe
  misc_feature (1)..(25): SEQ ID NO: 4995; WAN024DQT; Start 1; Stop 25
ttgaatcctgatcgagcggaagaat

SEQ ID NO: 396696 - DNA, 25 bp, Artificial
  probe
  misc_feature (1)..(25): SEQ ID NO: 4995; WAN024DQT; Start 7; Stop 31
cctgatcgagcggaagaatatttct

SEQ ID NO: 396697 - DNA, 25 bp, Artificial
  probe
  misc_feature (1)..(25): SEQ ID NO: 4995; WAN024DQT; Start 81; Stop 105
acaattacaggcagaaaaggtggag

SEQ ID NO: 396698 - DNA, 25 bp, Artificial
  probe
  misc_feature (1)..(25): SEQ ID NO: 4995; WAN024DQT; Start 22; Stop 46
gaatatttctgccgaggttgccaag

SEQ ID NO: 396699 - DNA, 25 bp, Artificial
  probe
  misc_feature (1)..(25): SEQ ID NO: 4995; WAN024DQT; Start 9; Stop 33
tgatcgagcggaagaatatttctgc

SEQ ID NO: 396700 - DNA, 25 bp, Artificial
  probe
  misc_feature (1)..(25): SEQ ID NO: 4995; WAN024DQT; Start 82; Stop 106
caattacaggcagaaaaggtggagg

SEQ ID NO: 396701 - DNA, 25 bp, Artificial
  probe
  misc_feature (1)..(25): SEQ ID NO: 4995; WAN024DQT; Start 68; Stop 92
aattttatgatgaacaattacaggc

SEQ ID NO: 396702 - DNA, 25 bp, Artificial
  probe
  misc_feature (1)..(25): SEQ ID NO: 4995; WAN024DQT; Start 10; Stop 34
gatcgagcggaagaatatttctgcc

SEQ ID NO: 396703 - DNA, 25 bp, Artificial
  probe
  misc_feature (1)..(25): SEQ ID NO: 4995; WAN024DQT; Start 19; Stop 43
gaagaatatttctgccgaggttgcc

SEQ ID NO: 396704 - DNA, 25 bp, Artificial
  probe
  misc_feature (1)..(25): SEQ ID NO: 4995; WAN024DQT; Start 18; Stop 42
ggaagaatatttctgccgaggttgc

SEQ ID NO: 396705 - DNA, 25 bp, Artificial
  probe
  misc_feature (1)..(25): SEQ ID NO: 4995; WAN024DQT; Start 17; Stop 41
cggaagaatatttctgccgaggttg

SEQ ID NO: 396706 - DNA, 25 bp, Artificial
  probe
  misc_feature (1)..(25): SEQ ID NO: 4995; WAN024DQT; Start 21; Stop 45
agaatatttctgccgaggttgccaa

SEQ ID NO: 396707 - DNA, 25 bp, Artificial
  probe
  misc_feature (1)..(25): SEQ ID NO: 4995; WAN024DQT; Start 20; Stop 44
aagaatatttctgccgaggttgcca

SEQ ID NO: 396708 - DNA, 25 bp, Artificial
  probe
  misc_feature (1)..(25): SEQ ID NO: 4995; WAN024DQT; Start 67; Stop 91
gaattttatgatgaacaattacagg

SEQ ID NO: 396709 - DNA, 25 bp, Artificial
  probe
  misc_feature (1)..(25): SEQ ID NO: 4996; WAN024GCJ; Start 4; Stop 28
aatcctgtccagttagaaaagcatc

SEQ ID NO: 396710 - DNA, 25 bp, Artificial
  probe
  misc_feature (1)..(25): SEQ ID NO: 4996; WAN024GCJ; Start 3; Stop 27
gaatcctgtccagttagaaaagcat

SEQ ID NO: 396711 - DNA, 25 bp, Artificial
  probe
  misc_feature (1)..(25): SEQ ID NO: 4996; WAN024GCJ; Start 1; Stop 25
ttgaatcctgtccagttagaaaagc

SEQ ID NO: 396712 - DNA, 25 bp, Artificial
  probe
  misc_feature (1)..(25): SEQ ID NO: 4996; WAN024GCJ; Start 14; Stop 38
agttagaaaagcatcgtcttccaga

SEQ ID NO: 396713 - DNA, 25 bp, Artificial
  probe
  misc_feature (1)..(25): SEQ ID NO: 4996; WAN024GCJ; Start 13; Stop 37
cagttagaaaagcatcgtcttccag

SEQ ID NO: 396714 - DNA, 25 bp, Artificial
  probe
  misc_feature (1)..(25): SEQ ID NO: 4996; WAN024GCJ; Start 10; Stop 34
gtccagttagaaaagcatcgtcttc

SEQ ID NO: 396715 - DNA, 25 bp, Artificial
  probe
  misc_feature (1)..(25): SEQ ID NO: 4996; WAN024GCJ; Start 2; Stop 26
tgaatcctgtccagttagaaaagca

SEQ ID NO: 396716 - DNA, 25 bp, Artificial
  probe
  misc_feature (1)..(25): SEQ ID NO: 4996; WAN024GCJ; Start 9; Stop 33
tgtccagttagaaaagcatcgtctt

SEQ ID NO: 396717 - DNA, 25 bp, Artificial
  probe
  misc_feature (1)..(25): SEQ ID NO: 4996; WAN024GCJ; Start 43; Stop 67
gaacctcttggtcaaaatcctctag

SEQ ID NO: 396718 - DNA, 25 bp, Artificial
  probe
  misc_feature (1)..(25): SEQ ID NO: 4996; WAN024GCJ; Start 42; Stop 66
agaacctcttggtcaaaatcctcta

SEQ ID NO: 396719 - DNA, 25 bp, Artificial
  probe
  misc_feature (1)..(25): SEQ ID NO: 4996; WAN024GCJ; Start 5; Stop 29
atcctgtccagttagaaaagcatcg

SEQ ID NO: 396720 - DNA, 25 bp, Artificial
  probe
  misc_feature (1)..(25): SEQ ID NO: 4996; WAN024GCJ; Start 11; Stop 35
tccagttagaaaagcatcgtcttcc

SEQ ID NO: 396721 - DNA, 25 bp, Artificial
  probe
  misc_feature (1)..(25): SEQ ID NO: 4996; WAN024GCJ; Start 8; Stop 32
ctgtccagttagaaaagcatcgtct

SEQ ID NO: 396722 - DNA, 25 bp, Artificial
  probe
  misc_feature (1)..(25): SEQ ID NO: 4996; WAN024GCJ; Start 12; Stop 36
ccagttagaaaagcatcgtcttcca

SEQ ID NO: 396723 - DNA, 25 bp, Artificial
  probe
  misc_feature (1)..(25): SEQ ID NO: 4996; WAN024GCJ; Start 41; Stop 65
cagaacctcttggtcaaaatcctct

SEQ ID NO: 396724 - DNA, 25 bp, Artificial
  probe
  misc_feature (1)..(25): SEQ ID NO: 4996; WAN024GCJ; Start 46; Stop 70
cctcttggtcaaaatcctctagaat

SEQ ID NO: 396725 - DNA, 25 bp, Artificial
  probe
  misc_feature (1)..(25): SEQ ID NO: 4996; WAN024GCJ; Start 7; Stop 31
cctgtccagttagaaaagcatcgtc

SEQ ID NO: 396726 - DNA, 25 bp, Artificial
  probe
  misc_feature (1)..(25): SEQ ID NO: 4996; WAN024GCJ; Start 47; Stop 71
ctcttggtcaaaatcctctagaatt

SEQ ID NO: 396727 - DNA, 25 bp, Artificial
  probe
  misc_feature (1)..(25): SEQ ID NO: 4996; WAN024GCJ; Start 6; Stop 30
tcctgtccagttagaaaagcatcgt

SEQ ID NO: 396728 - DNA, 25 bp, Artificial
  probe
  misc_feature (1)..(25): SEQ ID NO: 4996; WAN024GCJ; Start 40; Stop 64
ccagaacctcttggtcaaaatcctc

SEQ ID NO: 396729 - DNA, 25 bp, Artificial
  probe
  misc_feature (1)..(25): SEQ ID NO: 4996; WAN024GCJ; Start 48; Stop 72
tcttggtcaaaatcctctagaattt

SEQ ID NO: 396730 - DNA, 25 bp, Artificial
  probe
  misc_feature (1)..(25): SEQ ID NO: 4996; WAN024GCJ; Start 45; Stop 69
acctcttggtcaaaatcctctagaa

SEQ ID NO: 396731 - DNA, 25 bp, Artificial
  probe
  misc_feature (1)..(25): SEQ ID NO: 4996; WAN024GCJ; Start 44; Stop 68
aacctcttggtcaaaatcctctaga

SEQ ID NO: 396732 - DNA, 25 bp, Artificial
  probe
  misc_feature (1)..(25): SEQ ID NO: 4996; WAN024GCJ; Start 15; Stop 39
gttagaaaagcatcgtcttccagac

SEQ ID NO: 396733 - DNA, 25 bp, Artificial
  probe
  misc_feature (1)..(25): SEQ ID NO: 4996; WAN024GCJ; Start 49; Stop 73
cttggtcaaaatcctctagaatttg

SEQ ID NO: 396734 - DNA, 25 bp, Artificial
  probe
  misc_feature (1)..(25): SEQ ID NO: 4996; WAN024GCJ; Start 39; Stop 63
cccagaacctcttggtcaaaatcct

SEQ ID NO: 396735 - DNA, 25 bp, Artificial
  probe
  misc_feature (1)..(25): SEQ ID NO: 4996; WAN024GCJ; Start 16; Stop 40
ttagaaaagcatcgtcttccagacc

SEQ ID NO: 396736 - DNA, 25 bp, Artificial
  probe
  misc_feature (1)..(25): SEQ ID NO: 4996; WAN024GCJ; Start 38; Stop 62
acccagaacctcttggtcaaaatcc

SEQ ID NO: 396737 - DNA, 25 bp, Artificial
  probe
  misc_feature (1)..(25): SEQ ID NO: 4996; WAN024GCJ; Start 17; Stop 41
tagaaaagcatcgtcttccagaccc

SEQ ID NO: 396738 - DNA, 25 bp, Artificial
  probe
  misc_feature (1)..(25): SEQ ID NO: 4996; WAN024GCJ; Start 50; Stop 74
ttggtcaaaatcctctagaatttga

SEQ ID NO: 396739 - DNA, 25 bp, Artificial
  probe
  misc_feature (1)..(25): SEQ ID NO: 4996; WAN024GCJ; Start 51; Stop 75
tggtcaaaatcctctagaatttgat

SEQ ID NO: 396740 - DNA, 25 bp, Artificial
  probe
  misc_feature (1)..(25): SEQ ID NO: 4996; WAN024GCJ; Start 37; Stop 61
gacccagaacctcttggtcaaaatc

SEQ ID NO: 396741 - DNA, 25 bp, Artificial
  probe
  misc_feature (1)..(25): SEQ ID NO: 4996; WAN024GCJ; Start 36; Stop 60
agacccagaacctcttggtcaaaat

SEQ ID NO: 396742 - DNA, 25 bp, Artificial
  probe
  misc_feature (1)..(25): SEQ ID NO: 4996; WAN024GCJ; Start 35; Stop 59
cagacccagaacctcttggtcaaaa

SEQ ID NO: 396743 - DNA, 25 bp, Artificial
  probe
  misc_feature (1)..(25): SEQ ID NO: 4997; WAN024D3L; Start 1132; Stop 1156
gattgctacgattctcttgatacca

SEQ ID NO: 396744 - DNA, 25 bp, Artificial
  probe
  misc_feature (1)..(25): SEQ ID NO: 4997; WAN024D3L; Start 2057; Stop 2081
ccgtatgatatggtggaattggtaa

SEQ ID NO: 396745 - DNA, 25 bp, Artificial
  probe
  misc_feature (1)..(25): SEQ ID NO: 4997; WAN024D3L; Start 2062; Stop 2086
tgatatggtggaattggtaagaaga

SEQ ID NO: 396746 - DNA, 25 bp, Artificial
  probe
  misc_feature (1)..(25): SEQ ID NO: 4997; WAN024D3L; Start 2058; Stop 2082
cgtatgatatggtggaattggtaag

SEQ ID NO: 396747 - DNA, 25 bp, Artificial
  probe
  misc_feature (1)..(25): SEQ ID NO: 4997; WAN024D3L; Start 1133; Stop 1157
attgctacgattctcttgataccaa

SEQ ID NO: 396748 - DNA, 25 bp, Artificial
  probe
  misc_feature (1)..(25): SEQ ID NO: 4997; WAN024D3L; Start 939; Stop 963
tgaccaatccaatctataatcctct

SEQ ID NO: 396749 - DNA, 25 bp, Artificial
  probe
  misc_feature (1)..(25): SEQ ID NO: 4997; WAN024D3L; Start 929; Stop 953
gaacctatcttgaccaatccaatct

SEQ ID NO: 396750 - DNA, 25 bp, Artificial
  probe
  misc_feature (1)..(25): SEQ ID NO: 4997; WAN024D3L; Start 928; Stop 952
agaacctatcttgaccaatccaatc

SEQ ID NO: 396751 - DNA, 25 bp, Artificial
  probe
  misc_feature (1)..(25): SEQ ID NO: 4997; WAN024D3L; Start 1361; Stop 1385
ctctatgcggctattgacaattatc

SEQ ID NO: 396752 - DNA, 25 bp, Artificial
  probe
  misc_feature (1)..(25): SEQ ID NO: 4997; WAN024D3L; Start 1131; Stop 1155
cgattgctacgattctcttgatacc

SEQ ID NO: 396753 - DNA, 25 bp, Artificial
  probe
  misc_feature (1)..(25): SEQ ID NO: 4997; WAN024D3L; Start 927; Stop 951
cagaacctatcttgaccaatccaat

SEQ ID NO: 396754 - DNA, 25 bp, Artificial
  probe
  misc_feature (1)..(25): SEQ ID NO: 4997; WAN024D3L; Start 930; Stop 954
aacctatcttgaccaatccaatcta

SEQ ID NO: 396755 - DNA, 25 bp, Artificial
  probe
  misc_feature (1)..(25): SEQ ID NO: 4997; WAN024D3L; Start 1360; Stop 1384
cctctatgcggctattgacaattat

SEQ ID NO: 396756 - DNA, 25 bp, Artificial
  probe
  misc_feature (1)..(25): SEQ ID NO: 4997; WAN024D3L; Start 2063; Stop 2087
gatatggtggaattggtaagaagaa

SEQ ID NO: 396757 - DNA, 25 bp, Artificial
  probe
  misc_feature (1)..(25): SEQ ID NO: 4997; WAN024D3L; Start 2061; Stop 2085
atgatatggtggaattggtaagaag

SEQ ID NO: 396758 - DNA, 25 bp, Artificial
  probe
  misc_feature (1)..(25): SEQ ID NO: 4997; WAN024D3L; Start 931; Stop 955
acctatcttgaccaatccaatctat

SEQ ID NO: 396759 - DNA, 25 bp, Artificial
  probe
  misc_feature (1)..(25): SEQ ID NO: 4997; WAN024D3L; Start 1303; Stop 1327
gaatgaagtaacgctagagttggaa

SEQ ID NO: 396760 - DNA, 25 bp, Artificial
  probe
  misc_feature (1)..(25): SEQ ID NO: 4997; WAN024D3L; Start 1362; Stop 1386
tctatgcggctattgacaattatca

SEQ ID NO: 396761 - DNA, 25 bp, Artificial
  probe
  misc_feature (1)..(25): SEQ ID NO: 4997; WAN024D3L; Start 1301; Stop 1325
ttgaatgaagtaacgctagagttgg

SEQ ID NO: 396762 - DNA, 25 bp, Artificial
  probe
  misc_feature (1)..(25): SEQ ID NO: 4997; WAN024D3L; Start 643; Stop 667
cttcctccataccttcttgctaagt

SEQ ID NO: 396763 - DNA, 25 bp, Artificial
  probe
  misc_feature (1)..(25): SEQ ID NO: 4997; WAN024D3L; Start 1363; Stop 1387
ctatgcggctattgacaattatcat

SEQ ID NO: 396764 - DNA, 25 bp, Artificial
  probe
  misc_feature (1)..(25): SEQ ID NO: 4997; WAN024D3L; Start 1912; Stop 1936
aatgctgagaggctattatctggag

SEQ ID NO: 396765 - DNA, 25 bp, Artificial
  probe
  misc_feature (1)..(25): SEQ ID NO: 4997; WAN024D3L; Start 2059; Stop 2083
gtatgatatggtggaattggtaaga

SEQ ID NO: 396766 - DNA, 25 bp, Artificial
  probe
  misc_feature (1)..(25): SEQ ID NO: 4997; WAN024D3L; Start 644; Stop 668
ttcctccataccttcttgctaagtg

SEQ ID NO: 396767 - DNA, 25 bp, Artificial
  probe
  misc_feature (1)..(25): SEQ ID NO: 4997; WAN024D3L; Start 1364; Stop 1388
tatgcggctattgacaattatcatg

SEQ ID NO: 396768 - DNA, 25 bp, Artificial
  probe
  misc_feature (1)..(25): SEQ ID NO: 4997; WAN024D3L; Start 938; Stop 962
ttgaccaatccaatctataatcctc

SEQ ID NO: 396769 - DNA, 25 bp, Artificial
  probe
  misc_feature (1)..(25): SEQ ID NO: 4997; WAN024D3L; Start 937; Stop 961
cttgaccaatccaatctataatcct

SEQ ID NO: 396770 - DNA, 25 bp, Artificial
  probe
  misc_feature (1)..(25): SEQ ID NO: 4997; WAN024D3L; Start 936; Stop 960
tcttgaccaatccaatctataatcc

SEQ ID NO: 396771 - DNA, 25 bp, Artificial
  probe
  misc_feature (1)..(25): SEQ ID NO: 4997; WAN024D3L; Start 1302; Stop 1326
tgaatgaagtaacgctagagttgga

SEQ ID NO: 396772 - DNA, 25 bp, Artificial
  probe
  misc_feature (1)..(25): SEQ ID NO: 4997; WAN024D3L; Start 941; Stop 965
accaatccaatctataatcctctac

SEQ ID NO: 396773 - DNA, 25 bp, Artificial
  probe
  misc_feature (1)..(25): SEQ ID NO: 4997; WAN024D3L; Start 2060; Stop 2084
tatgatatggtggaattggtaagaa

SEQ ID NO: 396774 - DNA, 25 bp, Artificial
  probe
  misc_feature (1)..(25): SEQ ID NO: 4997; WAN024D3L; Start 1258; Stop 1282
tgaagaggaagaaagcaaggattat

SEQ ID NO: 396775 - DNA, 25 bp, Artificial
  probe
  misc_feature (1)..(25): SEQ ID NO: 4997; WAN024D3L; Start 1257; Stop 1281
atgaagaggaagaaagcaaggatta

SEQ ID NO: 396776 - DNA, 25 bp, Artificial
  probe
  misc_feature (1)..(25): SEQ ID NO: 4998; WAN024BH8; Start 43; Stop 67
ccgtcttgttgtacttgtattcttg

SEQ ID NO: 396777 - DNA, 25 bp, Artificial
  probe
  misc_feature (1)..(25): SEQ ID NO: 4998; WAN024BH8; Start 42; Stop 66
tccgtcttgttgtacttgtattctt

SEQ ID NO: 396778 - DNA, 25 bp, Artificial
  probe
  misc_feature (1)..(25): SEQ ID NO: 4998; WAN024BH8; Start 44; Stop 68
cgtcttgttgtacttgtattcttgt

SEQ ID NO: 396779 - DNA, 25 bp, Artificial
  probe
  misc_feature (1)..(25): SEQ ID NO: 4998; WAN024BH8; Start 41; Stop 65
ctccgtcttgttgtacttgtattct

SEQ ID NO: 396780 - DNA, 25 bp, Artificial
  probe
  misc_feature (1)..(25): SEQ ID NO: 4998; WAN024BH8; Start 40; Stop 64
tctccgtcttgttgtacttgtattc

SEQ ID NO: 396781 - DNA, 25 bp, Artificial
  probe
  misc_feature (1)..(25): SEQ ID NO: 4998; WAN024BH8; Start 39; Stop 63
gtctccgtcttgttgtacttgtatt

SEQ ID NO: 396782 - DNA, 25 bp, Artificial
  probe
  misc_feature (1)..(25): SEQ ID NO: 4998; WAN024BH8; Start 45; Stop 69
gtcttgttgtacttgtattcttgtt

SEQ ID NO: 396783 - DNA, 25 bp, Artificial
  probe
  misc_feature (1)..(25): SEQ ID NO: 4998; WAN024BH8; Start 38; Stop 62
ggtctccgtcttgttgtacttgtat

SEQ ID NO: 396784 - DNA, 25 bp, Artificial
  probe
  misc_feature (1)..(25): SEQ ID NO: 4998; WAN024BH8; Start 231; Stop 255
aggtaaaggagagcatttgaagtaa

SEQ ID NO: 396785 - DNA, 25 bp, Artificial
  probe
  misc_feature (1)..(25): SEQ ID NO: 4998; WAN024BH8; Start 230; Stop 254
gaggtaaaggagagcatttgaagta

SEQ ID NO: 396786 - DNA, 25 bp, Artificial
  probe
  misc_feature (1)..(25): SEQ ID NO: 4998; WAN024BH8; Start 55; Stop 79
acttgtattcttgtttgccattctt

SEQ ID NO: 396787 - DNA, 25 bp, Artificial
  probe
  misc_feature (1)..(25): SEQ ID NO: 4998; WAN024BH8; Start 57; Stop 81
ttgtattcttgtttgccattcttct

SEQ ID NO: 396788 - DNA, 25 bp, Artificial
  probe
  misc_feature (1)..(25): SEQ ID NO: 4998; WAN024BH8; Start 84; Stop 108
tataccatatttcacaggcatttcg

SEQ ID NO: 396789 - DNA, 25 bp, Artificial
  probe
  misc_feature (1)..(25): SEQ ID NO: 4998; WAN024BH8; Start 56; Stop 80
cttgtattcttgtttgccattcttc

SEQ ID NO: 396790 - DNA, 25 bp, Artificial
  probe
  misc_feature (1)..(25): SEQ ID NO: 4998; WAN024BH8; Start 54; Stop 78
tacttgtattcttgtttgccattct

SEQ ID NO: 396791 - DNA, 25 bp, Artificial
  probe
  misc_feature (1)..(25): SEQ ID NO: 4998; WAN024BH8; Start 58; Stop 82
tgtattcttgtttgccattcttcta

SEQ ID NO: 396792 - DNA, 25 bp, Artificial
  probe
  misc_feature (1)..(25): SEQ ID NO: 4998; WAN024BH8; Start 85; Stop 109
ataccatatttcacaggcatttcgg

SEQ ID NO: 396793 - DNA, 25 bp, Artificial
  probe
  misc_feature (1)..(25): SEQ ID NO: 4998; WAN024BH8; Start 201; Stop 225
cttacgattgctcctaccaagacag

SEQ ID NO: 396794 - DNA, 25 bp, Artificial
  probe
  misc_feature (1)..(25): SEQ ID NO: 4998; WAN024BH8; Start 50; Stop 74
gttgtacttgtattcttgtttgcca

SEQ ID NO: 396795 - DNA, 25 bp, Artificial
  probe
  misc_feature (1)..(25): SEQ ID NO: 4998; WAN024BH8; Start 49; Stop 73
tgttgtacttgtattcttgtttgcc

SEQ ID NO: 396796 - DNA, 25 bp, Artificial
  probe
  misc_feature (1)..(25): SEQ ID NO: 4998; WAN024BH8; Start 52; Stop 76
tgtacttgtattcttgtttgccatt

SEQ ID NO: 396797 - DNA, 25 bp, Artificial
  probe
  misc_feature (1)..(25): SEQ ID NO: 4998; WAN024BH8; Start 51; Stop 75
ttgtacttgtattcttgtttgccat

SEQ ID NO: 396798 - DNA, 25 bp, Artificial
  probe
  misc_feature (1)..(25): SEQ ID NO: 4998; WAN024BH8; Start 66; Stop 90
tgtttgccattcttctattatacca

SEQ ID NO: 396799 - DNA, 25 bp, Artificial
  probe
  misc_feature (1)..(25): SEQ ID NO: 4998; WAN024BH8; Start 199; Stop 223
cacttacgattgctcctaccaagac

SEQ ID NO: 396800 - DNA, 25 bp, Artificial
  probe
  misc_feature (1)..(25): SEQ ID NO: 4998; WAN024BH8; Start 53; Stop 77
gtacttgtattcttgtttgccattc

SEQ ID NO: 396801 - DNA, 25 bp, Artificial
  probe
  misc_feature (1)..(25): SEQ ID NO: 4998; WAN024BH8; Start 183; Stop 207
taaccataaaccacaccacttacga

SEQ ID NO: 396802 - DNA, 25 bp, Artificial
  probe
  misc_feature (1)..(25): SEQ ID NO: 4998; WAN024BH8; Start 48; Stop 72
ttgttgtacttgtattcttgtttgc

SEQ ID NO: 396803 - DNA, 25 bp, Artificial
  probe
  misc_feature (1)..(25): SEQ ID NO: 4998; WAN024BH8; Start 219; Stop 243
aagacagaaacgaggtaaaggagag

SEQ ID NO: 396804 - DNA, 25 bp, Artificial
  probe
  misc_feature (1)..(25): SEQ ID NO: 4998; WAN024BH8; Start 203; Stop 227
tacgattgctcctaccaagacagaa

SEQ ID NO: 396805 - DNA, 25 bp, Artificial
  probe
  misc_feature (1)..(25): SEQ ID NO: 4998; WAN024BH8; Start 202; Stop 226
ttacgattgctcctaccaagacaga

SEQ ID NO: 396806 - DNA, 25 bp, Artificial
  probe
  misc_feature (1)..(25): SEQ ID NO: 4998; WAN024BH8; Start 14; Stop 38
tttctttccagttctgctttagacg

SEQ ID NO: 396807 - DNA, 25 bp, Artificial
  probe
  misc_feature (1)..(25): SEQ ID NO: 4998; WAN024BH8; Start 186; Stop 210
ccataaaccacaccacttacgattg

SEQ ID NO: 396808 - DNA, 25 bp, Artificial
  probe
  misc_feature (1)..(25): SEQ ID NO: 4998; WAN024BH8; Start 225; Stop 249
gaaacgaggtaaaggagagcatttg

SEQ ID NO: 396809 - DNA, 25 bp, Artificial
  probe
  misc_feature (1)..(25): SEQ ID NO: 4999; WAN024FNM; Start 704; Stop 728
tgctaggttcaattatcttatggct

SEQ ID NO: 396810 - DNA, 25 bp, Artificial
  probe
  misc_feature (1)..(25): SEQ ID NO: 4999; WAN024FNM; Start 703; Stop 727
atgctaggttcaattatcttatggc

SEQ ID NO: 396811 - DNA, 25 bp, Artificial
  probe
  misc_feature (1)..(25): SEQ ID NO: 4999; WAN024FNM; Start 2; Stop 26
tgaatcttagtatgttagccttgac

SEQ ID NO: 396812 - DNA, 25 bp, Artificial
  probe
  misc_feature (1)..(25): SEQ ID NO: 4999; WAN024FNM; Start 943; Stop 967
tacacaatgattgcgaatactgatg

SEQ ID NO: 396813 - DNA, 25 bp, Artificial
  probe
  misc_feature (1)..(25): SEQ ID NO: 4999; WAN024FNM; Start 941; Stop 965
catacacaatgattgcgaatactga

SEQ ID NO: 396814 - DNA, 25 bp, Artificial
  probe
  misc_feature (1)..(25): SEQ ID NO: 4999; WAN024FNM; Start 942; Stop 966
atacacaatgattgcgaatactgat

SEQ ID NO: 396815 - DNA, 25 bp, Artificial
  probe
  misc_feature (1)..(25): SEQ ID NO: 4999; WAN024FNM; Start 705; Stop 729
gctaggttcaattatcttatggcta

SEQ ID NO: 396816 - DNA, 25 bp, Artificial
  probe
  misc_feature (1)..(25): SEQ ID NO: 4999; WAN024FNM; Start 1; Stop 25
ttgaatcttagtatgttagccttga

SEQ ID NO: 396817 - DNA, 25 bp, Artificial
  probe
  misc_feature (1)..(25): SEQ ID NO: 4999; WAN024FNM; Start 10; Stop 34
agtatgttagccttgacaataggat

SEQ ID NO: 396818 - DNA, 25 bp, Artificial
  probe
  misc_feature (1)..(25): SEQ ID NO: 4999; WAN024FNM; Start 3; Stop 27
gaatcttagtatgttagccttgaca

SEQ ID NO: 396819 - DNA, 25 bp, Artificial
  probe
  misc_feature (1)..(25): SEQ ID NO: 4999; WAN024FNM; Start 698; Stop 722
atggtatgctaggttcaattatctt

SEQ ID NO: 396820 - DNA, 25 bp, Artificial
  probe
  misc_feature (1)..(25): SEQ ID NO: 4999; WAN024FNM; Start 20; Stop 44
ccttgacaataggatcagtggtatt

SEQ ID NO: 396821 - DNA, 25 bp, Artificial
  probe
  misc_feature (1)..(25): SEQ ID NO: 4999; WAN024FNM; Start 13; Stop 37
atgttagccttgacaataggatcag

SEQ ID NO: 396822 - DNA, 25 bp, Artificial
  probe
  misc_feature (1)..(25): SEQ ID NO: 4999; WAN024FNM; Start 9; Stop 33
tagtatgttagccttgacaatagga

SEQ ID NO: 396823 - DNA, 25 bp, Artificial
  probe
  misc_feature (1)..(25): SEQ ID NO: 4999; WAN024FNM; Start 708; Stop 732
aggttcaattatcttatggctatca

SEQ ID NO: 396824 - DNA, 25 bp, Artificial
  probe
  misc_feature (1)..(25): SEQ ID NO: 4999; WAN024FNM; Start 12; Stop 36
tatgttagccttgacaataggatca

SEQ ID NO: 396825 - DNA, 25 bp, Artificial
  probe
  misc_feature (1)..(25): SEQ ID NO: 4999; WAN024FNM; Start 11; Stop 35
gtatgttagccttgacaataggatc

SEQ ID NO: 396826 - DNA, 25 bp, Artificial
  probe
  misc_feature (1)..(25): SEQ ID NO: 4999; WAN024FNM; Start 4; Stop 28
aatcttagtatgttagccttgacaa

SEQ ID NO: 396827 - DNA, 25 bp, Artificial
  probe
  misc_feature (1)..(25): SEQ ID NO: 4999; WAN024FNM; Start 412; Stop 436
gatgcagtagataccagtggattaa

SEQ ID NO: 396828 - DNA, 25 bp, Artificial
  probe
  misc_feature (1)..(25): SEQ ID NO: 4999; WAN024FNM; Start 179; Stop 203
tgcttgggacttctctatttgttat

SEQ ID NO: 396829 - DNA, 25 bp, Artificial
  probe
  misc_feature (1)..(25): SEQ ID NO: 4999; WAN024FNM; Start 178; Stop 202
ttgcttgggacttctctatttgtta

SEQ ID NO: 396830 - DNA, 25 bp, Artificial
  probe
  misc_feature (1)..(25): SEQ ID NO: 4999; WAN024FNM; Start 15; Stop 39
gttagccttgacaataggatcagtg

SEQ ID NO: 396831 - DNA, 25 bp, Artificial
  probe
  misc_feature (1)..(25): SEQ ID NO: 4999; WAN024FNM; Start 5; Stop 29
atcttagtatgttagccttgacaat

SEQ ID NO: 396832 - DNA, 25 bp, Artificial
  probe
  misc_feature (1)..(25): SEQ ID NO: 4999; WAN024FNM; Start 177; Stop 201
tttgcttgggacttctctatttgtt

SEQ ID NO: 396833 - DNA, 25 bp, Artificial
  probe
  misc_feature (1)..(25): SEQ ID NO: 4999; WAN024FNM; Start 14; Stop 38
tgttagccttgacaataggatcagt

SEQ ID NO: 396834 - DNA, 25 bp, Artificial
  probe
  misc_feature (1)..(25): SEQ ID NO: 4999; WAN024FNM; Start 213; Stop 237
gatagcaatttggtttcgggataaa

SEQ ID NO: 396835 - DNA, 25 bp, Artificial
  probe
  misc_feature (1)..(25): SEQ ID NO: 4999; WAN024FNM; Start 8; Stop 32
ttagtatgttagccttgacaatagg

SEQ ID NO: 396836 - DNA, 25 bp, Artificial
  probe
  misc_feature (1)..(25): SEQ ID NO: 4999; WAN024FNM; Start 699; Stop 723
tggtatgctaggttcaattatctta

SEQ ID NO: 396837 - DNA, 25 bp, Artificial
  probe
  misc_feature (1)..(25): SEQ ID NO: 4999; WAN024FNM; Start 415; Stop 439
gcagtagataccagtggattaaaga

SEQ ID NO: 396838 - DNA, 25 bp, Artificial
  probe
  misc_feature (1)..(25): SEQ ID NO: 4999; WAN024FNM; Start 587; Stop 611
gaacgcctctatttaatgttgtcat

SEQ ID NO: 396839 - DNA, 25 bp, Artificial
  probe
  misc_feature (1)..(25): SEQ ID NO: 4999; WAN024FNM; Start 944; Stop 968
acacaatgattgcgaatactgatgc

SEQ ID NO: 396840 - DNA, 25 bp, Artificial
  probe
  misc_feature (1)..(25): SEQ ID NO: 4999; WAN024FNM; Start 586; Stop 610
agaacgcctctatttaatgttgtca

SEQ ID NO: 396841 - DNA, 25 bp, Artificial
  probe
  misc_feature (1)..(25): SEQ ID NO: 4999; WAN024FNM; Start 411; Stop 435
ggatgcagtagataccagtggatta

SEQ ID NO: 396842 - DNA, 25 bp, Artificial
  probe
  misc_feature (1)..(25): SEQ ID NO: 5000; WAN024D4L; Start 104; Stop 128
ttggtcaagacattcacaatctcac

SEQ ID NO: 396843 - DNA, 25 bp, Artificial
  probe
  misc_feature (1)..(25): SEQ ID NO: 5000; WAN024D4L; Start 3; Stop 27
gaatcttatcacaagcacggagaac

SEQ ID NO: 396844 - DNA, 25 bp, Artificial
  probe
  misc_feature (1)..(25): SEQ ID NO: 5000; WAN024D4L; Start 5; Stop 29
atcttatcacaagcacggagaactt

SEQ ID NO: 396845 - DNA, 25 bp, Artificial
  probe
  misc_feature (1)..(25): SEQ ID NO: 5000; WAN024D4L; Start 4; Stop 28
aatcttatcacaagcacggagaact

SEQ ID NO: 396846 - DNA, 25 bp, Artificial
  probe
  misc_feature (1)..(25): SEQ ID NO: 5000; WAN024D4L; Start 2; Stop 26
tgaatcttatcacaagcacggagaa

SEQ ID NO: 396847 - DNA, 25 bp, Artificial
  probe
  misc_feature (1)..(25): SEQ ID NO: 5000; WAN024D4L; Start 1; Stop 25
ttgaatcttatcacaagcacggaga

SEQ ID NO: 396848 - DNA, 25 bp, Artificial
  probe
  misc_feature (1)..(25): SEQ ID NO: 5000; WAN024D4L; Start 8; Stop 32
ttatcacaagcacggagaacttcat

SEQ ID NO: 396849 - DNA, 25 bp, Artificial
  probe
  misc_feature (1)..(25): SEQ ID NO: 5000; WAN024D4L; Start 9; Stop 33
tatcacaagcacggagaacttcatc

SEQ ID NO: 396850 - DNA, 25 bp, Artificial
  probe
  misc_feature (1)..(25): SEQ ID NO: 5000; WAN024D4L; Start 107; Stop 131
gtcaagacattcacaatctcacgac

SEQ ID NO: 396851 - DNA, 25 bp, Artificial
  probe
  misc_feature (1)..(25): SEQ ID NO: 5000; WAN024D4L; Start 6; Stop 30
tcttatcacaagcacggagaacttc

SEQ ID NO: 396852 - DNA, 25 bp, Artificial
  probe
  misc_feature (1)..(25): SEQ ID NO: 5000; WAN024D4L; Start 7; Stop 31
cttatcacaagcacggagaacttca

SEQ ID NO: 396853 - DNA, 25 bp, Artificial
  probe
  misc_feature (1)..(25): SEQ ID NO: 5000; WAN024D4L; Start 103; Stop 127
tttggtcaagacattcacaatctca

SEQ ID NO: 396854 - DNA, 25 bp, Artificial
  probe
  misc_feature (1)..(25): SEQ ID NO: 5000; WAN024D4L; Start 106; Stop 130
ggtcaagacattcacaatctcacga

SEQ ID NO: 396855 - DNA, 25 bp, Artificial
  probe
  misc_feature (1)..(25): SEQ ID NO: 5000; WAN024D4L; Start 38; Stop 62
ttaaagtcaatctcatgctgtccaa

SEQ ID NO: 396856 - DNA, 25 bp, Artificial
  probe
  misc_feature (1)..(25): SEQ ID NO: 5000; WAN024D4L; Start 108; Stop 132
tcaagacattcacaatctcacgacg

SEQ ID NO: 396857 - DNA, 25 bp, Artificial
  probe
  misc_feature (1)..(25): SEQ ID NO: 5000; WAN024D4L; Start 105; Stop 129
tggtcaagacattcacaatctcacg

SEQ ID NO: 396858 - DNA, 25 bp, Artificial
  probe
  misc_feature (1)..(25): SEQ ID NO: 5000; WAN024D4L; Start 37; Stop 61
cttaaagtcaatctcatgctgtcca

SEQ ID NO: 396859 - DNA, 25 bp, Artificial
  probe
  misc_feature (1)..(25): SEQ ID NO: 5000; WAN024D4L; Start 79; Stop 103
actcgcttctacttcaaatcccatt

SEQ ID NO: 396860 - DNA, 25 bp, Artificial
  probe
  misc_feature (1)..(25): SEQ ID NO: 5000; WAN024D4L; Start 39; Stop 63
taaagtcaatctcatgctgtccaac

SEQ ID NO: 396861 - DNA, 25 bp, Artificial
  probe
  misc_feature (1)..(25): SEQ ID NO: 5000; WAN024D4L; Start 80; Stop 104
ctcgcttctacttcaaatcccattt

SEQ ID NO: 396862 - DNA, 25 bp, Artificial
  probe
  misc_feature (1)..(25): SEQ ID NO: 5000; WAN024D4L; Start 33; Stop 57
cgtacttaaagtcaatctcatgctg

SEQ ID NO: 396863 - DNA, 25 bp, Artificial
  probe
  misc_feature (1)..(25): SEQ ID NO: 5000; WAN024D4L; Start 32; Stop 56
tcgtacttaaagtcaatctcatgct

SEQ ID NO: 396864 - DNA, 25 bp, Artificial
  probe
  misc_feature (1)..(25): SEQ ID NO: 5000; WAN024D4L; Start 31; Stop 55
atcgtacttaaagtcaatctcatgc

SEQ ID NO: 396865 - DNA, 25 bp, Artificial
  probe
  misc_feature (1)..(25): SEQ ID NO: 5000; WAN024D4L; Start 34; Stop 58
gtacttaaagtcaatctcatgctgt

SEQ ID NO: 396866 - DNA, 25 bp, Artificial
  probe
  misc_feature (1)..(25): SEQ ID NO: 5000; WAN024D4L; Start 36; Stop 60
acttaaagtcaatctcatgctgtcc

SEQ ID NO: 396867 - DNA, 25 bp, Artificial
  probe
  misc_feature (1)..(25): SEQ ID NO: 5000; WAN024D4L; Start 35; Stop 59
tacttaaagtcaatctcatgctgtc

SEQ ID NO: 396868 - DNA, 25 bp, Artificial
  probe
  misc_feature (1)..(25): SEQ ID NO: 5000; WAN024D4L; Start 78; Stop 102
gactcgcttctacttcaaatcccat

SEQ ID NO: 396869 - DNA, 25 bp, Artificial
  probe
  misc_feature (1)..(25): SEQ ID NO: 5000; WAN024D4L; Start 28; Stop 52
ttcatcgtacttaaagtcaatctca

SEQ ID NO: 396870 - DNA, 25 bp, Artificial
  probe
  misc_feature (1)..(25): SEQ ID NO: 5000; WAN024D4L; Start 29; Stop 53
tcatcgtacttaaagtcaatctcat

SEQ ID NO: 396871 - DNA, 25 bp, Artificial
  probe
  misc_feature (1)..(25): SEQ ID NO: 5000; WAN024D4L; Start 30; Stop 54
catcgtacttaaagtcaatctcatg

SEQ ID NO: 396872 - DNA, 25 bp, Artificial
  probe
  misc_feature (1)..(25): SEQ ID NO: 5000; WAN024D4L; Start 74; Stop 98
tggtgactcgcttctacttcaaatc

SEQ ID NO: 396873 - DNA, 25 bp, Artificial
  probe
  misc_feature (1)..(25): SEQ ID NO: 5000; WAN024D4L; Start 27; Stop 51
cttcatcgtacttaaagtcaatctc

SEQ ID NO: 396874 - DNA, 25 bp, Artificial
  probe
  misc_feature (1)..(25): SEQ ID NO: 5000; WAN024D4L; Start 73; Stop 97
gtggtgactcgcttctacttcaaat

SEQ ID NO: 396875 - DNA, 25 bp, Artificial
  probe
  misc_feature (1)..(25): SEQ ID NO: 5001; WAN024FKE; Start 186; Stop 210
tatctatgcttggttcttgttggtt

SEQ ID NO: 396876 - DNA, 25 bp, Artificial
  probe
  misc_feature (1)..(25): SEQ ID NO: 5001; WAN024FKE; Start 705; Stop 729
aggagataagattaacagtaagcgt

SEQ ID NO: 396877 - DNA, 25 bp, Artificial
  probe
  misc_feature (1)..(25): SEQ ID NO: 5001; WAN024FKE; Start 736; Stop 760
gttgataccattaaggaagccattc

SEQ ID NO: 396878 - DNA, 25 bp, Artificial
  probe
  misc_feature (1)..(25): SEQ ID NO: 5001; WAN024FKE; Start 706; Stop 730
ggagataagattaacagtaagcgtc

SEQ ID NO: 396879 - DNA, 25 bp, Artificial
  probe
  misc_feature (1)..(25): SEQ ID NO: 5001; WAN024FKE; Start 704; Stop 728
caggagataagattaacagtaagcg

SEQ ID NO: 396880 - DNA, 25 bp, Artificial
  probe
  misc_feature (1)..(25): SEQ ID NO: 5001; WAN024FKE; Start 1314; Stop 1338
aaccattgctctcatcattcctaac

SEQ ID NO: 396881 - DNA, 25 bp, Artificial
  probe
  misc_feature (1)..(25): SEQ ID NO: 5001; WAN024FKE; Start 714; Stop 738
gattaacagtaagcgtctcttggtt

SEQ ID NO: 396882 - DNA, 25 bp, Artificial
  probe
  misc_feature (1)..(25): SEQ ID NO: 5001; WAN024FKE; Start 1313; Stop 1337
caaccattgctctcatcattcctaa

SEQ ID NO: 396883 - DNA, 25 bp, Artificial
  probe
  misc_feature (1)..(25): SEQ ID NO: 5001; WAN024FKE; Start 715; Stop 739
attaacagtaagcgtctcttggttg

SEQ ID NO: 396884 - DNA, 25 bp, Artificial
  probe
  misc_feature (1)..(25): SEQ ID NO: 5001; WAN024FKE; Start 256; Stop 280
tataataccatgcgagaagaagagc

SEQ ID NO: 396885 - DNA, 25 bp, Artificial
  probe
  misc_feature (1)..(25): SEQ ID NO: 5001; WAN024FKE; Start 251; Stop 275
ccaagtataataccatgcgagaaga

SEQ ID NO: 396886 - DNA, 25 bp, Artificial
  probe
  misc_feature (1)..(25): SEQ ID NO: 5001; WAN024FKE; Start 839; Stop 863
ttaccaactacagcaatgaggactt

SEQ ID NO: 396887 - DNA, 25 bp, Artificial
  probe
  misc_feature (1)..(25): SEQ ID NO: 5001; WAN024FKE; Start 1308; Stop 1332
ttcaacaaccattgctctcatcatt

SEQ ID NO: 396888 - DNA, 25 bp, Artificial
  probe
  misc_feature (1)..(25): SEQ ID NO: 5001; WAN024FKE; Start 244; Stop 268
caagttgccaagtataataccatgc

SEQ ID NO: 396889 - DNA, 25 bp, Artificial
  probe
  misc_feature (1)..(25): SEQ ID NO: 5001; WAN024FKE; Start 703; Stop 727
acaggagataagattaacagtaagc

SEQ ID NO: 396890 - DNA, 25 bp, Artificial
  probe
  misc_feature (1)..(25): SEQ ID NO: 5001; WAN024FKE; Start 713; Stop 737
agattaacagtaagcgtctcttggt

SEQ ID NO: 396891 - DNA, 25 bp, Artificial
  probe
  misc_feature (1)..(25): SEQ ID NO: 5001; WAN024FKE; Start 709; Stop 733
gataagattaacagtaagcgtctct

SEQ ID NO: 396892 - DNA, 25 bp, Artificial
  probe
  misc_feature (1)..(25): SEQ ID NO: 5001; WAN024FKE; Start 708; Stop 732
agataagattaacagtaagcgtctc

SEQ ID NO: 396893 - DNA, 25 bp, Artificial
  probe
  misc_feature (1)..(25): SEQ ID NO: 5001; WAN024FKE; Start 707; Stop 731
gagataagattaacagtaagcgtct

SEQ ID NO: 396894 - DNA, 25 bp, Artificial
  probe
  misc_feature (1)..(25): SEQ ID NO: 5001; WAN024FKE; Start 254; Stop 278
agtataataccatgcgagaagaaga

SEQ ID NO: 396895 - DNA, 25 bp, Artificial
  probe
  misc_feature (1)..(25): SEQ ID NO: 5001; WAN024FKE; Start 255; Stop 279
gtataataccatgcgagaagaagag

SEQ ID NO: 396896 - DNA, 25 bp, Artificial
  probe
  misc_feature (1)..(25): SEQ ID NO: 5001; WAN024FKE; Start 1309; Stop 1333
tcaacaaccattgctctcatcattc

SEQ ID NO: 396897 - DNA, 25 bp, Artificial
  probe
  misc_feature (1)..(25): SEQ ID NO: 5001; WAN024FKE; Start 252; Stop 276
caagtataataccatgcgagaagaa

SEQ ID NO: 396898 - DNA, 25 bp, Artificial
  probe
  misc_feature (1)..(25): SEQ ID NO: 5001; WAN024FKE; Start 718; Stop 742
aacagtaagcgtctcttggttgata

SEQ ID NO: 396899 - DNA, 25 bp, Artificial
  probe
  misc_feature (1)..(25): SEQ ID NO: 5001; WAN024FKE; Start 717; Stop 741
taacagtaagcgtctcttggttgat

SEQ ID NO: 396900 - DNA, 25 bp, Artificial
  probe
  misc_feature (1)..(25): SEQ ID NO: 5001; WAN024FKE; Start 1312; Stop 1336
acaaccattgctctcatcattccta

SEQ ID NO: 396901 - DNA, 25 bp, Artificial
  probe
  misc_feature (1)..(25): SEQ ID NO: 5001; WAN024FKE; Start 716; Stop 740
ttaacagtaagcgtctcttggttga

SEQ ID NO: 396902 - DNA, 25 bp, Artificial
  probe
  misc_feature (1)..(25): SEQ ID NO: 5001; WAN024FKE; Start 253; Stop 277
aagtataataccatgcgagaagaag

SEQ ID NO: 396903 - DNA, 25 bp, Artificial
  probe
  misc_feature (1)..(25): SEQ ID NO: 5001; WAN024FKE; Start 1436; Stop 1460
ttctgttaataggaaccatccagtg

SEQ ID NO: 396904 - DNA, 25 bp, Artificial
  probe
  misc_feature (1)..(25): SEQ ID NO: 5001; WAN024FKE; Start 250; Stop 274
gccaagtataataccatgcgagaag

SEQ ID NO: 396905 - DNA, 25 bp, Artificial
  probe
  misc_feature (1)..(25): SEQ ID NO: 5001; WAN024FKE; Start 245; Stop 269
aagttgccaagtataataccatgcg

SEQ ID NO: 396906 - DNA, 25 bp, Artificial
  probe
  misc_feature (1)..(25): SEQ ID NO: 5001; WAN024FKE; Start 446; Stop 470
cgtctatgagtgttatccgaggatt

SEQ ID NO: 396907 - DNA, 25 bp, Artificial
  probe
  misc_feature (1)..(25): SEQ ID NO: 5001; WAN024FKE; Start 1093; Stop 1117
gtcttctatggtaagccagatagtt

SEQ ID NO: 396908 - DNA, 25 bp, Artificial
  probe
  misc_feature (1)..(25): SEQ ID NO: 5002; WAN024GGF; Start 447; Stop 471
aacttctaacgctcaattcatcaat

SEQ ID NO: 396909 - DNA, 25 bp, Artificial
  probe
  misc_feature (1)..(25): SEQ ID NO: 5002; WAN024GGF; Start 446; Stop 470
gaacttctaacgctcaattcatcaa

SEQ ID NO: 396910 - DNA, 25 bp, Artificial
  probe
  misc_feature (1)..(25): SEQ ID NO: 5002; WAN024GGF; Start 445; Stop 469
ggaacttctaacgctcaattcatca

SEQ ID NO: 396911 - DNA, 25 bp, Artificial
  probe
  misc_feature (1)..(25): SEQ ID NO: 5002; WAN024GGF; Start 444; Stop 468
cggaacttctaacgctcaattcatc

SEQ ID NO: 396912 - DNA, 25 bp, Artificial
  probe
  misc_feature (1)..(25): SEQ ID NO: 5002; WAN024GGF; Start 209; Stop 233
aactcagcgactacgagattcaatt

SEQ ID NO: 396913 - DNA, 25 bp, Artificial
  probe
  misc_feature (1)..(25): SEQ ID NO: 5002; WAN024GGF; Start 518; Stop 542
ctggtgaggatattggtaaacgaat

SEQ ID NO: 396914 - DNA, 25 bp, Artificial
  probe
  misc_feature (1)..(25): SEQ ID NO: 5002; WAN024GGF; Start 519; Stop 543
tggtgaggatattggtaaacgaatc

SEQ ID NO: 396915 - DNA, 25 bp, Artificial
  probe
  misc_feature (1)..(25): SEQ ID NO: 5002; WAN024GGF; Start 515; Stop 539
tttctggtgaggatattggtaaacg

SEQ ID NO: 396916 - DNA, 25 bp, Artificial
  probe
  misc_feature (1)..(25): SEQ ID NO: 5002; WAN024GGF; Start 390; Stop 414
aaatcctttgacttctcttgaccag

SEQ ID NO: 396917 - DNA, 25 bp, Artificial
  probe
  misc_feature (1)..(25): SEQ ID NO: 5002; WAN024GGF; Start 724; Stop 748
ctcaaagaactctatcaagacggaa

SEQ ID NO: 396918 - DNA, 25 bp, Artificial
  probe
  misc_feature (1)..(25): SEQ ID NO: 5002; WAN024GGF; Start 600; Stop 624
aaagattatcaaggaccgtggttta

SEQ ID NO: 396919 - DNA, 25 bp, Artificial
  probe
  misc_feature (1)..(25): SEQ ID NO: 5002; WAN024GGF; Start 725; Stop 749
tcaaagaactctatcaagacggaac

SEQ ID NO: 396920 - DNA, 25 bp, Artificial
  probe
  misc_feature (1)..(25): SEQ ID NO: 5002; WAN024GGF; Start 601; Stop 625
aagattatcaaggaccgtggtttag

SEQ ID NO: 396921 - DNA, 25 bp, Artificial
  probe
  misc_feature (1)..(25): SEQ ID NO: 5002; WAN024GGF; Start 534; Stop 558
taaacgaatcctagaccttgctaac

SEQ ID NO: 396922 - DNA, 25 bp, Artificial
  probe
  misc_feature (1)..(25): SEQ ID NO: 5002; WAN024GGF; Start 533; Stop 557
gtaaacgaatcctagaccttgctaa

SEQ ID NO: 396923 - DNA, 25 bp, Artificial
  probe
  misc_feature (1)..(25): SEQ ID NO: 5002; WAN024GGF; Start 517; Stop 541
tctggtgaggatattggtaaacgaa

SEQ ID NO: 396924 - DNA, 25 bp, Artificial
  probe
  misc_feature (1)..(25): SEQ ID NO: 5002; WAN024GGF; Start 516; Stop 540
ttctggtgaggatattggtaaacga

SEQ ID NO: 396925 - DNA, 25 bp, Artificial
  probe
  misc_feature (1)..(25): SEQ ID NO: 5002; WAN024GGF; Start 603; Stop 627
gattatcaaggaccgtggtttagac

SEQ ID NO: 396926 - DNA, 25 bp, Artificial
  probe
  misc_feature (1)..(25): SEQ ID NO: 5002; WAN024GGF; Start 602; Stop 626
agattatcaaggaccgtggtttaga

SEQ ID NO: 396927 - DNA, 25 bp, Artificial
  probe
  misc_feature (1)..(25): SEQ ID NO: 5002; WAN024GGF; Start 726; Stop 750
caaagaactctatcaagacggaacc

SEQ ID NO: 396928 - DNA, 25 bp, Artificial
  probe
  misc_feature (1)..(25): SEQ ID NO: 5002; WAN024GGF; Start 392; Stop 416
atcctttgacttctcttgaccagat

SEQ ID NO: 396929 - DNA, 25 bp, Artificial
  probe
  misc_feature (1)..(25): SEQ ID NO: 5002; WAN024GGF; Start 790; Stop 814
ctcccagatcaatctcagttacaat

SEQ ID NO: 396930 - DNA, 25 bp, Artificial
  probe
  misc_feature (1)..(25): SEQ ID NO: 5002; WAN024GGF; Start 786; Stop 810
ttacctcccagatcaatctcagtta

SEQ ID NO: 396931 - DNA, 25 bp, Artificial
  probe
  misc_feature (1)..(25): SEQ ID NO: 5002; WAN024GGF; Start 391; Stop 415
aatcctttgacttctcttgaccaga

SEQ ID NO: 396932 - DNA, 25 bp, Artificial
  probe
  misc_feature (1)..(25): SEQ ID NO: 5002; WAN024GGF; Start 622; Stop 646
ttagacctctcagtcgttgatttac

SEQ ID NO: 396933 - DNA, 25 bp, Artificial
  probe
  misc_feature (1)..(25): SEQ ID NO: 5002; WAN024GGF; Start 791; Stop 815
tcccagatcaatctcagttacaata

SEQ ID NO: 396934 - DNA, 25 bp, Artificial
  probe
  misc_feature (1)..(25): SEQ ID NO: 5002; WAN024GGF; Start 787; Stop 811
tacctcccagatcaatctcagttac

SEQ ID NO: 396935 - DNA, 25 bp, Artificial
  probe
  misc_feature (1)..(25): SEQ ID NO: 5002; WAN024GGF; Start 621; Stop 645
tttagacctctcagtcgttgattta

SEQ ID NO: 396936 - DNA, 25 bp, Artificial
  probe
  misc_feature (1)..(25): SEQ ID NO: 5002; WAN024GGF; Start 620; Stop 644
gtttagacctctcagtcgttgattt

SEQ ID NO: 396937 - DNA, 25 bp, Artificial
  probe
  misc_feature (1)..(25): SEQ ID NO: 5002; WAN024GGF; Start 783; Stop 807
ttcttacctcccagatcaatctcag

SEQ ID NO: 396938 - DNA, 25 bp, Artificial
  probe
  misc_feature (1)..(25): SEQ ID NO: 5002; WAN024GGF; Start 485; Stop 509
aacacactgataatcccgctacaat

SEQ ID NO: 396939 - DNA, 25 bp, Artificial
  probe
  misc_feature (1)..(25): SEQ ID NO: 5002; WAN024GGF; Start 793; Stop 817
ccagatcaatctcagttacaataac

SEQ ID NO: 396940 - DNA, 25 bp, Artificial
  probe
  misc_feature (1)..(25): SEQ ID NO: 5002; WAN024GGF; Start 549; Stop 573
ccttgctaacggagagtttgatttc

SEQ ID NO: 396941 - DNA, 25 bp, Artificial
  probe
  misc_feature (1)..(25): SEQ ID NO: 5003; WAN024DO9; Start 76; Stop 100
actaaggatactgctggtctaacta

SEQ ID NO: 396942 - DNA, 25 bp, Artificial
  probe
  misc_feature (1)..(25): SEQ ID NO: 5003; WAN024DO9; Start 75; Stop 99
aactaaggatactgctggtctaact

SEQ ID NO: 396943 - DNA, 25 bp, Artificial
  probe
  misc_feature (1)..(25): SEQ ID NO: 5003; WAN024DO9; Start 77; Stop 101
ctaaggatactgctggtctaactaa

SEQ ID NO: 396944 - DNA, 25 bp, Artificial
  probe
  misc_feature (1)..(25): SEQ ID NO: 5003; WAN024DO9; Start 78; Stop 102
taaggatactgctggtctaactaat

SEQ ID NO: 396945 - DNA, 25 bp, Artificial
  probe
  misc_feature (1)..(25): SEQ ID NO: 5003; WAN024DO9; Start 50; Stop 74
aaggaacctatcgagtagtcattaa

SEQ ID NO: 396946 - DNA, 25 bp, Artificial
  probe
  misc_feature (1)..(25): SEQ ID NO: 5003; WAN024DO9; Start 74; Stop 98
aaactaaggatactgctggtctaac

SEQ ID NO: 396947 - DNA, 25 bp, Artificial
  probe
  misc_feature (1)..(25): SEQ ID NO: 5003; WAN024DO9; Start 30; Stop 54
agatgactataacggttctaaagga

SEQ ID NO: 396948 - DNA, 25 bp, Artificial
  probe
  misc_feature (1)..(25): SEQ ID NO: 5003; WAN024DO9; Start 31; Stop 55
gatgactataacggttctaaaggaa

SEQ ID NO: 396949 - DNA, 25 bp, Artificial
  probe
  misc_feature (1)..(25): SEQ ID NO: 5003; WAN024DO9; Start 46; Stop 70
tctaaaggaacctatcgagtagtca

SEQ ID NO: 396950 - DNA, 25 bp, Artificial
  probe
  misc_feature (1)..(25): SEQ ID NO: 5003; WAN024DO9; Start 47; Stop 71
ctaaaggaacctatcgagtagtcat

SEQ ID NO: 396951 - DNA, 25 bp, Artificial
  probe
  misc_feature (1)..(25): SEQ ID NO: 5003; WAN024DO9; Start 51; Stop 75
aggaacctatcgagtagtcattaaa

SEQ ID NO: 396952 - DNA, 25 bp, Artificial
  probe
  misc_feature (1)..(25): SEQ ID NO: 5003; WAN024DO9; Start 49; Stop 73
aaaggaacctatcgagtagtcatta

SEQ ID NO: 396953 - DNA, 25 bp, Artificial
  probe
  misc_feature (1)..(25): SEQ ID NO: 5003; WAN024DO9; Start 48; Stop 72
taaaggaacctatcgagtagtcatt

SEQ ID NO: 396954 - DNA, 25 bp, Artificial
  probe
  misc_feature (1)..(25): SEQ ID NO: 5003; WAN024DO9; Start 45; Stop 69
ttctaaaggaacctatcgagtagtc

SEQ ID NO: 396955 - DNA, 25 bp, Artificial
  probe
  misc_feature (1)..(25): SEQ ID NO: 5003; WAN024DO9; Start 26; Stop 50
aactagatgactataacggttctaa

SEQ ID NO: 396956 - DNA, 25 bp, Artificial
  probe
  misc_feature (1)..(25): SEQ ID NO: 5003; WAN024DO9; Start 73; Stop 97
aaaactaaggatactgctggtctaa

SEQ ID NO: 396957 - DNA, 25 bp, Artificial
  probe
  misc_feature (1)..(25): SEQ ID NO: 5003; WAN024DO9; Start 71; Stop 95
ttaaaactaaggatactgctggtct

SEQ ID NO: 396958 - DNA, 25 bp, Artificial
  probe
  misc_feature (1)..(25): SEQ ID NO: 5003; WAN024DO9; Start 72; Stop 96
taaaactaaggatactgctggtcta

SEQ ID NO: 396959 - DNA, 25 bp, Artificial
  probe
  misc_feature (1)..(25): SEQ ID NO: 5003; WAN024DO9; Start 29; Stop 53
tagatgactataacggttctaaagg

SEQ ID NO: 396960 - DNA, 25 bp, Artificial
  probe
  misc_feature (1)..(25): SEQ ID NO: 5003; WAN024DO9; Start 69; Stop 93
cattaaaactaaggatactgctggt

SEQ ID NO: 396961 - DNA, 25 bp, Artificial
  probe
  misc_feature (1)..(25): SEQ ID NO: 5003; WAN024DO9; Start 70; Stop 94
attaaaactaaggatactgctggtc

SEQ ID NO: 396962 - DNA, 25 bp, Artificial
  probe
  misc_feature (1)..(25): SEQ ID NO: 5003; WAN024DO9; Start 68; Stop 92
tcattaaaactaaggatactgctgg

SEQ ID NO: 396963 - DNA, 25 bp, Artificial
  probe
  misc_feature (1)..(25): SEQ ID NO: 5003; WAN024DO9; Start 67; Stop 91
gtcattaaaactaaggatactgctg

SEQ ID NO: 396964 - DNA, 25 bp, Artificial
  probe
  misc_feature (1)..(25): SEQ ID NO: 5003; WAN024DO9; Start 27; Stop 51
actagatgactataacggttctaaa

SEQ ID NO: 396965 - DNA, 25 bp, Artificial
  probe
  misc_feature (1)..(25): SEQ ID NO: 5003; WAN024DO9; Start 25; Stop 49
aaactagatgactataacggttcta

SEQ ID NO: 396966 - DNA, 25 bp, Artificial
  probe
  misc_feature (1)..(25): SEQ ID NO: 5003; WAN024DO9; Start 66; Stop 90
agtcattaaaactaaggatactgct

SEQ ID NO: 396967 - DNA, 25 bp, Artificial
  probe
  misc_feature (1)..(25): SEQ ID NO: 5003; WAN024DO9; Start 28; Stop 52
ctagatgactataacggttctaaag

SEQ ID NO: 396968 - DNA, 25 bp, Artificial
  probe
  misc_feature (1)..(25): SEQ ID NO: 5003; WAN024DO9; Start 32; Stop 56
atgactataacggttctaaaggaac

SEQ ID NO: 396969 - DNA, 25 bp, Artificial
  probe
  misc_feature (1)..(25): SEQ ID NO: 5003; WAN024DO9; Start 24; Stop 48
aaaactagatgactataacggttct

SEQ ID NO: 396970 - DNA, 25 bp, Artificial
  probe
  misc_feature (1)..(25): SEQ ID NO: 5003; WAN024DO9; Start 44; Stop 68
gttctaaaggaacctatcgagtagt

SEQ ID NO: 396971 - DNA, 25 bp, Artificial
  probe
  misc_feature (1)..(25): SEQ ID NO: 5003; WAN024DO9; Start 52; Stop 76
ggaacctatcgagtagtcattaaaa

SEQ ID NO: 396972 - DNA, 25 bp, Artificial
  probe
  misc_feature (1)..(25): SEQ ID NO: 5003; WAN024DO9; Start 53; Stop 77
gaacctatcgagtagtcattaaaac

SEQ ID NO: 396973 - DNA, 25 bp, Artificial
  probe
  misc_feature (1)..(25): SEQ ID NO: 5003; WAN024DO9; Start 54; Stop 78
aacctatcgagtagtcattaaaact

SEQ ID NO: 396974 - DNA, 25 bp, Artificial
  probe
  misc_feature (1)..(25): SEQ ID NO: 5004; WAN0249ZG; Start 29; Stop 53
agagattgcgatactgttatagaag

SEQ ID NO: 396975 - DNA, 25 bp, Artificial
  probe
  misc_feature (1)..(25): SEQ ID NO: 5004; WAN0249ZG; Start 26; Stop 50
accagagattgcgatactgttatag

SEQ ID NO: 396976 - DNA, 25 bp, Artificial
  probe
  misc_feature (1)..(25): SEQ ID NO: 5004; WAN0249ZG; Start 27; Stop 51
ccagagattgcgatactgttataga

SEQ ID NO: 396977 - DNA, 25 bp, Artificial
  probe
  misc_feature (1)..(25): SEQ ID NO: 5004; WAN0249ZG; Start 25; Stop 49
caccagagattgcgatactgttata

SEQ ID NO: 396978 - DNA, 25 bp, Artificial
  probe
  misc_feature (1)..(25): SEQ ID NO: 5004; WAN0249ZG; Start 30; Stop 54
gagattgcgatactgttatagaagt

SEQ ID NO: 396979 - DNA, 25 bp, Artificial
  probe
  misc_feature (1)..(25): SEQ ID NO: 5004; WAN0249ZG; Start 28; Stop 52
cagagattgcgatactgttatagaa

SEQ ID NO: 396980 - DNA, 25 bp, Artificial
  probe
  misc_feature (1)..(25): SEQ ID NO: 5004; WAN0249ZG; Start 24; Stop 48
acaccagagattgcgatactgttat

SEQ ID NO: 396981 - DNA, 25 bp, Artificial
  probe
  misc_feature (1)..(25): SEQ ID NO: 5004; WAN0249ZG; Start 23; Stop 47
cacaccagagattgcgatactgtta

SEQ ID NO: 396982 - DNA, 25 bp, Artificial
  probe
  misc_feature (1)..(25): SEQ ID NO: 5004; WAN0249ZG; Start 1; Stop 25
ttgaattaagatcgagacaacgcac

SEQ ID NO: 396983 - DNA, 25 bp, Artificial
  probe
  misc_feature (1)..(25): SEQ ID NO: 5004; WAN0249ZG; Start 3; Stop 27
gaattaagatcgagacaacgcacac

SEQ ID NO: 396984 - DNA, 25 bp, Artificial
  probe
  misc_feature (1)..(25): SEQ ID NO: 5004; WAN0249ZG; Start 2; Stop 26
tgaattaagatcgagacaacgcaca

SEQ ID NO: 396985 - DNA, 25 bp, Artificial
  probe
  misc_feature (1)..(25): SEQ ID NO: 5004; WAN0249ZG; Start 31; Stop 55
agattgcgatactgttatagaagta

SEQ ID NO: 396986 - DNA, 25 bp, Artificial
  probe
  misc_feature (1)..(25): SEQ ID NO: 5004; WAN0249ZG; Start 32; Stop 56
gattgcgatactgttatagaagtac

SEQ ID NO: 396987 - DNA, 25 bp, Artificial
  probe
  misc_feature (1)..(25): SEQ ID NO: 5004; WAN0249ZG; Start 4; Stop 28
aattaagatcgagacaacgcacacc

SEQ ID NO: 396988 - DNA, 25 bp, Artificial
  probe
  misc_feature (1)..(25): SEQ ID NO: 5004; WAN0249ZG; Start 41; Stop 65
actgttatagaagtactaatgccct

SEQ ID NO: 396989 - DNA, 25 bp, Artificial
  probe
  misc_feature (1)..(25): SEQ ID NO: 5004; WAN0249ZG; Start 33; Stop 57
attgcgatactgttatagaagtact

SEQ ID NO: 396990 - DNA, 25 bp, Artificial
  probe
  misc_feature (1)..(25): SEQ ID NO: 5004; WAN0249ZG; Start 42; Stop 66
ctgttatagaagtactaatgccctt

SEQ ID NO: 396991 - DNA, 25 bp, Artificial
  probe
  misc_feature (1)..(25): SEQ ID NO: 5004; WAN0249ZG; Start 5; Stop 29
attaagatcgagacaacgcacacca

SEQ ID NO: 396992 - DNA, 25 bp, Artificial
  probe
  misc_feature (1)..(25): SEQ ID NO: 5004; WAN0249ZG; Start 35; Stop 59
tgcgatactgttatagaagtactaa

SEQ ID NO: 396993 - DNA, 25 bp, Artificial
  probe
  misc_feature (1)..(25): SEQ ID NO: 5004; WAN0249ZG; Start 34; Stop 58
ttgcgatactgttatagaagtacta

SEQ ID NO: 396994 - DNA, 25 bp, Artificial
  probe
  misc_feature (1)..(25): SEQ ID NO: 5004; WAN0249ZG; Start 43; Stop 67
tgttatagaagtactaatgcccttt

SEQ ID NO: 396995 - DNA, 25 bp, Artificial
  probe
  misc_feature (1)..(25): SEQ ID NO: 5004; WAN0249ZG; Start 6; Stop 30
ttaagatcgagacaacgcacaccag

SEQ ID NO: 396996 - DNA, 25 bp, Artificial
  probe
  misc_feature (1)..(25): SEQ ID NO: 5004; WAN0249ZG; Start 40; Stop 64
tactgttatagaagtactaatgccc

SEQ ID NO: 396997 - DNA, 25 bp, Artificial
  probe
  misc_feature (1)..(25): SEQ ID NO: 5004; WAN0249ZG; Start 36; Stop 60
gcgatactgttatagaagtactaat

SEQ ID NO: 396998 - DNA, 25 bp, Artificial
  probe
  misc_feature (1)..(25): SEQ ID NO: 5004; WAN0249ZG; Start 39; Stop 63
atactgttatagaagtactaatgcc

SEQ ID NO: 396999 - DNA, 25 bp, Artificial
  probe
  misc_feature (1)..(25): SEQ ID NO: 5004; WAN0249ZG; Start 44; Stop 68
gttatagaagtactaatgccctttt

SEQ ID NO: 397000 - DNA, 25 bp, Artificial
  probe
  misc_feature (1)..(25): SEQ ID NO: 5005; WAN024DZ3; Start 43; Stop 67
ttatcaggtagtttaggatggcaaa

SEQ ID NO: 397001 - DNA, 25 bp, Artificial
  probe
  misc_feature (1)..(25): SEQ ID NO: 5005; WAN024DZ3; Start 42; Stop 66
tttatcaggtagtttaggatggcaa

SEQ ID NO: 397002 - DNA, 25 bp, Artificial
  probe
  misc_feature (1)..(25): SEQ ID NO: 5005; WAN024DZ3; Start 44; Stop 68
tatcaggtagtttaggatggcaaat

SEQ ID NO: 397003 - DNA, 25 bp, Artificial
  probe
  misc_feature (1)..(25): SEQ ID NO: 5005; WAN024DZ3; Start 45; Stop 69
atcaggtagtttaggatggcaaatg

SEQ ID NO: 397004 - DNA, 25 bp, Artificial
  probe
  misc_feature (1)..(25): SEQ ID NO: 5005; WAN024DZ3; Start 49; Stop 73
ggtagtttaggatggcaaatgacat

SEQ ID NO: 397005 - DNA, 25 bp, Artificial
  probe
  misc_feature (1)..(25): SEQ ID NO: 5005; WAN024DZ3; Start 50; Stop 74
gtagtttaggatggcaaatgacatt

SEQ ID NO: 397006 - DNA, 25 bp, Artificial
  probe
  misc_feature (1)..(25): SEQ ID NO: 5005; WAN024DZ3; Start 47; Stop 71
caggtagtttaggatggcaaatgac

SEQ ID NO: 397007 - DNA, 25 bp, Artificial
  probe
  misc_feature (1)..(25): SEQ ID NO: 5005; WAN024DZ3; Start 51; Stop 75
tagtttaggatggcaaatgacattc

SEQ ID NO: 397008 - DNA, 25 bp, Artificial
  probe
  misc_feature (1)..(25): SEQ ID NO: 5005; WAN024DZ3; Start 48; Stop 72
aggtagtttaggatggcaaatgaca

SEQ ID NO: 397009 - DNA, 25 bp, Artificial
  probe
  misc_feature (1)..(25): SEQ ID NO: 5005; WAN024DZ3; Start 46; Stop 70
tcaggtagtttaggatggcaaatga

SEQ ID NO: 397010 - DNA, 25 bp, Artificial
  probe
  misc_feature (1)..(25): SEQ ID NO: 5005; WAN024DZ3; Start 52; Stop 76
agtttaggatggcaaatgacattcc

SEQ ID NO: 397011 - DNA, 25 bp, Artificial
  probe
  misc_feature (1)..(25): SEQ ID NO: 5005; WAN024DZ3; Start 41; Stop 65
ttttatcaggtagtttaggatggca

SEQ ID NO: 397012 - DNA, 25 bp, Artificial
  probe
  misc_feature (1)..(25): SEQ ID NO: 5005; WAN024DZ3; Start 54; Stop 78
tttaggatggcaaatgacattccct

SEQ ID NO: 397013 - DNA, 25 bp, Artificial
  probe
  misc_feature (1)..(25): SEQ ID NO: 5005; WAN024DZ3; Start 53; Stop 77
gtttaggatggcaaatgacattccc

SEQ ID NO: 397014 - DNA, 25 bp, Artificial
  probe
  misc_feature (1)..(25): SEQ ID NO: 5005; WAN024DZ3; Start 40; Stop 64
attttatcaggtagtttaggatggc

SEQ ID NO: 397015 - DNA, 25 bp, Artificial
  probe
  misc_feature (1)..(25): SEQ ID NO: 5005; WAN024DZ3; Start 55; Stop 79
ttaggatggcaaatgacattccctg

SEQ ID NO: 397016 - DNA, 25 bp, Artificial
  probe
  misc_feature (1)..(25): SEQ ID NO: 5005; WAN024DZ3; Start 131; Stop 155
gcaagaaaagattttggctaactaa

SEQ ID NO: 397017 - DNA, 25 bp, Artificial
  probe
  misc_feature (1)..(25): SEQ ID NO: 5005; WAN024DZ3; Start 129; Stop 153
atgcaagaaaagattttggctaact

SEQ ID NO: 397018 - DNA, 25 bp, Artificial
  probe
  misc_feature (1)..(25): SEQ ID NO: 5005; WAN024DZ3; Start 128; Stop 152
gatgcaagaaaagattttggctaac

SEQ ID NO: 397019 - DNA, 25 bp, Artificial
  probe
  misc_feature (1)..(25): SEQ ID NO: 5005; WAN024DZ3; Start 127; Stop 151
agatgcaagaaaagattttggctaa

SEQ ID NO: 397020 - DNA, 25 bp, Artificial
  probe
  misc_feature (1)..(25): SEQ ID NO: 5005; WAN024DZ3; Start 126; Stop 150
aagatgcaagaaaagattttggcta

SEQ ID NO: 397021 - DNA, 25 bp, Artificial
  probe
  misc_feature (1)..(25): SEQ ID NO: 5005; WAN024DZ3; Start 125; Stop 149
aaagatgcaagaaaagattttggct

SEQ ID NO: 397022 - DNA, 25 bp, Artificial
  probe
  misc_feature (1)..(25): SEQ ID NO: 5005; WAN024DZ3; Start 130; Stop 154
tgcaagaaaagattttggctaacta

SEQ ID NO: 397023 - DNA, 25 bp, Artificial
  probe
  misc_feature (1)..(25): SEQ ID NO: 5005; WAN024DZ3; Start 56; Stop 80
taggatggcaaatgacattccctgt

SEQ ID NO: 397024 - DNA, 25 bp, Artificial
  probe
  misc_feature (1)..(25): SEQ ID NO: 5005; WAN024DZ3; Start 124; Stop 148
aaaagatgcaagaaaagattttggc

SEQ ID NO: 397025 - DNA, 25 bp, Artificial
  probe
  misc_feature (1)..(25): SEQ ID NO: 5005; WAN024DZ3; Start 39; Stop 63
aattttatcaggtagtttaggatgg

SEQ ID NO: 397026 - DNA, 25 bp, Artificial
  probe
  misc_feature (1)..(25): SEQ ID NO: 5005; WAN024DZ3; Start 15; Stop 39
cgaagagtataagcattttactgaa

SEQ ID NO: 397027 - DNA, 25 bp, Artificial
  probe
  misc_feature (1)..(25): SEQ ID NO: 5005; WAN024DZ3; Start 132; Stop 156
caagaaaagattttggctaactaat

SEQ ID NO: 397028 - DNA, 25 bp, Artificial
  probe
  misc_feature (1)..(25): SEQ ID NO: 5005; WAN024DZ3; Start 14; Stop 38
tcgaagagtataagcattttactga

SEQ ID NO: 397029 - DNA, 25 bp, Artificial
  probe
  misc_feature (1)..(25): SEQ ID NO: 5005; WAN024DZ3; Start 101; Stop 125
aaaataatctgagaatcgaggaaaa

SEQ ID NO: 397030 - DNA, 25 bp, Artificial
  probe
  misc_feature (1)..(25): SEQ ID NO: 5005; WAN024DZ3; Start 7; Stop 31
tggattttcgaagagtataagcatt

SEQ ID NO: 397031 - DNA, 25 bp, Artificial
  probe
  misc_feature (1)..(25): SEQ ID NO: 5005; WAN024DZ3; Start 6; Stop 30
ttggattttcgaagagtataagcat

SEQ ID NO: 397032 - DNA, 25 bp, Artificial
  probe
  misc_feature (1)..(25): SEQ ID NO: 5005; WAN024DZ3; Start 5; Stop 29
attggattttcgaagagtataagca

SEQ ID NO: 397033 - DNA, 25 bp, Artificial
  probe
  misc_feature (1)..(25): SEQ ID NO: 5006; WAN024G9A; Start 134; Stop 158
ttagcattgttgatgatagacagcg

SEQ ID NO: 397034 - DNA, 25 bp, Artificial
  probe
  misc_feature (1)..(25): SEQ ID NO: 5006; WAN024G9A; Start 171; Stop 195
ctgcatccttatccacatagacatg

SEQ ID NO: 397035 - DNA, 25 bp, Artificial
  probe
  misc_feature (1)..(25): SEQ ID NO: 5006; WAN024G9A; Start 170; Stop 194
tctgcatccttatccacatagacat

SEQ ID NO: 397036 - DNA, 25 bp, Artificial
  probe
  misc_feature (1)..(25): SEQ ID NO: 5006; WAN024G9A; Start 133; Stop 157
tttagcattgttgatgatagacagc

SEQ ID NO: 397037 - DNA, 25 bp, Artificial
  probe
  misc_feature (1)..(25): SEQ ID NO: 5006; WAN024G9A; Start 166; Stop 190
ttcgtctgcatccttatccacatag

SEQ ID NO: 397038 - DNA, 25 bp, Artificial
  probe
  misc_feature (1)..(25): SEQ ID NO: 5006; WAN024G9A; Start 165; Stop 189
cttcgtctgcatccttatccacata

SEQ ID NO: 397039 - DNA, 25 bp, Artificial
  probe
  misc_feature (1)..(25): SEQ ID NO: 5006; WAN024G9A; Start 167; Stop 191
tcgtctgcatccttatccacataga

SEQ ID NO: 397040 - DNA, 25 bp, Artificial
  probe
  misc_feature (1)..(25): SEQ ID NO: 5006; WAN024G9A; Start 109; Stop 133
attacaaacagaaggacgactggtt

SEQ ID NO: 397041 - DNA, 25 bp, Artificial
  probe
  misc_feature (1)..(25): SEQ ID NO: 5006; WAN024G9A; Start 172; Stop 196
tgcatccttatccacatagacatgg

SEQ ID NO: 397042 - DNA, 25 bp, Artificial
  probe
  misc_feature (1)..(25): SEQ ID NO: 5006; WAN024G9A; Start 160; Stop 184
cttgtcttcgtctgcatccttatcc

SEQ ID NO: 397043 - DNA, 25 bp, Artificial
  probe
  misc_feature (1)..(25): SEQ ID NO: 5006; WAN024G9A; Start 159; Stop 183
ccttgtcttcgtctgcatccttatc

SEQ ID NO: 397044 - DNA, 25 bp, Artificial
  probe
  misc_feature (1)..(25): SEQ ID NO: 5006; WAN024G9A; Start 267; Stop 291
ctccacgaggaatgagaaggtctag

SEQ ID NO: 397045 - DNA, 25 bp, Artificial
  probe
  misc_feature (1)..(25): SEQ ID NO: 5006; WAN024G9A; Start 126; Stop 150
gactggttttagcattgttgatgat

SEQ ID NO: 397046 - DNA, 25 bp, Artificial
  probe
  misc_feature (1)..(25): SEQ ID NO: 5006; WAN024G9A; Start 164; Stop 188
tcttcgtctgcatccttatccacat

SEQ ID NO: 397047 - DNA, 25 bp, Artificial
  probe
  misc_feature (1)..(25): SEQ ID NO: 5006; WAN024G9A; Start 104; Stop 128
atggcattacaaacagaaggacgac

SEQ ID NO: 397048 - DNA, 25 bp, Artificial
  probe
  misc_feature (1)..(25): SEQ ID NO: 5006; WAN024G9A; Start 108; Stop 132
cattacaaacagaaggacgactggt

SEQ ID NO: 397049 - DNA, 25 bp, Artificial
  probe
  misc_feature (1)..(25): SEQ ID NO: 5006; WAN024G9A; Start 127; Stop 151
actggttttagcattgttgatgata

SEQ ID NO: 397050 - DNA, 25 bp, Artificial
  probe
  misc_feature (1)..(25): SEQ ID NO: 5006; WAN024G9A; Start 161; Stop 185
ttgtcttcgtctgcatccttatcca

SEQ ID NO: 397051 - DNA, 25 bp, Artificial
  probe
  misc_feature (1)..(25): SEQ ID NO: 5006; WAN024G9A; Start 129; Stop 153
tggttttagcattgttgatgataga

SEQ ID NO: 397052 - DNA, 25 bp, Artificial
  probe
  misc_feature (1)..(25): SEQ ID NO: 5006; WAN024G9A; Start 130; Stop 154
ggttttagcattgttgatgatagac

SEQ ID NO: 397053 - DNA, 25 bp, Artificial
  probe
  misc_feature (1)..(25): SEQ ID NO: 5006; WAN024G9A; Start 128; Stop 152
ctggttttagcattgttgatgatag

SEQ ID NO: 397054 - DNA, 25 bp, Artificial
  probe
  misc_feature (1)..(25): SEQ ID NO: 5006; WAN024G9A; Start 123; Stop 147
gacgactggttttagcattgttgat

SEQ ID NO: 397055 - DNA, 25 bp, Artificial
  probe
  misc_feature (1)..(25): SEQ ID NO: 5006; WAN024G9A; Start 103; Stop 127
catggcattacaaacagaaggacga

SEQ ID NO: 397056 - DNA, 25 bp, Artificial
  probe
  misc_feature (1)..(25): SEQ ID NO: 5006; WAN024G9A; Start 125; Stop 149
cgactggttttagcattgttgatga

SEQ ID NO: 397057 - DNA, 25 bp, Artificial
  probe
  misc_feature (1)..(25): SEQ ID NO: 5006; WAN024G9A; Start 110; Stop 134
ttacaaacagaaggacgactggttt

SEQ ID NO: 397058 - DNA, 25 bp, Artificial
  probe
  misc_feature (1)..(25): SEQ ID NO: 5006; WAN024G9A; Start 124; Stop 148
acgactggttttagcattgttgatg

SEQ ID NO: 397059 - DNA, 25 bp, Artificial
  probe
  misc_feature (1)..(25): SEQ ID NO: 5006; WAN024G9A; Start 184; Stop 208
cacatagacatggacaatcccagtc

SEQ ID NO: 397060 - DNA, 25 bp, Artificial
  probe
  misc_feature (1)..(25): SEQ ID NO: 5006; WAN024G9A; Start 179; Stop 203
ttatccacatagacatggacaatcc

SEQ ID NO: 397061 - DNA, 25 bp, Artificial
  probe
  misc_feature (1)..(25): SEQ ID NO: 5006; WAN024G9A; Start 177; Stop 201
ccttatccacatagacatggacaat

SEQ ID NO: 397062 - DNA, 25 bp, Artificial
  probe
  misc_feature (1)..(25): SEQ ID NO: 5006; WAN024G9A; Start 174; Stop 198
catccttatccacatagacatggac

SEQ ID NO: 397063 - DNA, 25 bp, Artificial
  probe
  misc_feature (1)..(25): SEQ ID NO: 5006; WAN024G9A; Start 4; Stop 28
aattggttccagtccagcttcctta

SEQ ID NO: 397064 - DNA, 25 bp, Artificial
  probe
  misc_feature (1)..(25): SEQ ID NO: 5006; WAN024G9A; Start 169; Stop 193
gtctgcatccttatccacatagaca

SEQ ID NO: 397065 - DNA, 25 bp, Artificial
  probe
  misc_feature (1)..(25): SEQ ID NO: 5006; WAN024G9A; Start 175; Stop 199
atccttatccacatagacatggaca

SEQ ID NO: 397066 - DNA, 25 bp, Artificial
  probe
  misc_feature (1)..(25): SEQ ID NO: 5007; WAN024GA3; Start 2369; Stop 2393
tgcttaccttaccttgctaactaat

SEQ ID NO: 397067 - DNA, 25 bp, Artificial
  probe
  misc_feature (1)..(25): SEQ ID NO: 5007; WAN024GA3; Start 2368; Stop 2392
atgcttaccttaccttgctaactaa

SEQ ID NO: 397068 - DNA, 25 bp, Artificial
  probe
  misc_feature (1)..(25): SEQ ID NO: 5007; WAN024GA3; Start 964; Stop 988
aatctctatgtctcaggtgttggta

SEQ ID NO: 397069 - DNA, 25 bp, Artificial
  probe
  misc_feature (1)..(25): SEQ ID NO: 5007; WAN024GA3; Start 97; Stop 121
attctatatggaggttctatgcgtt

SEQ ID NO: 397070 - DNA, 25 bp, Artificial
  probe
  misc_feature (1)..(25): SEQ ID NO: 5007; WAN024GA3; Start 96; Stop 120
cattctatatggaggttctatgcgt

SEQ ID NO: 397071 - DNA, 25 bp, Artificial
  probe
  misc_feature (1)..(25): SEQ ID NO: 5007; WAN024GA3; Start 95; Stop 119
tcattctatatggaggttctatgcg

SEQ ID NO: 397072 - DNA, 25 bp, Artificial
  probe
  misc_feature (1)..(25): SEQ ID NO: 5007; WAN024GA3; Start 250; Stop 274
ttcacttatcaagacaccaactacc

SEQ ID NO: 397073 - DNA, 25 bp, Artificial
  probe
  misc_feature (1)..(25): SEQ ID NO: 5007; WAN024GA3; Start 548; Stop 572
cggaggataatgactaccactactt

SEQ ID NO: 397074 - DNA, 25 bp, Artificial
  probe
  misc_feature (1)..(25): SEQ ID NO: 5007; WAN024GA3; Start 473; Stop 497
tctatcagttactcaatactcgcac

SEQ ID NO: 397075 - DNA, 25 bp, Artificial
  probe
  misc_feature (1)..(25): SEQ ID NO: 5007; WAN024GA3; Start 472; Stop 496
ctctatcagttactcaatactcgca

SEQ ID NO: 397076 - DNA, 25 bp, Artificial
  probe
  misc_feature (1)..(25): SEQ ID NO: 5007; WAN024GA3; Start 471; Stop 495
tctctatcagttactcaatactcgc

SEQ ID NO: 397077 - DNA, 25 bp, Artificial
  probe
  misc_feature (1)..(25): SEQ ID NO: 5007; WAN024GA3; Start 90; Stop 114
aactgtcattctatatggaggttct

SEQ ID NO: 397078 - DNA, 25 bp, Artificial
  probe
  misc_feature (1)..(25): SEQ ID NO: 5007; WAN024GA3; Start 525; Stop 549
acttgttagtgatggtcttattccg

SEQ ID NO: 397079 - DNA, 25 bp, Artificial
  probe
  misc_feature (1)..(25): SEQ ID NO: 5007; WAN024GA3; Start 94; Stop 118
gtcattctatatggaggttctatgc

SEQ ID NO: 397080 - DNA, 25 bp, Artificial
  probe
  misc_feature (1)..(25): SEQ ID NO: 5007; WAN024GA3; Start 2325; Stop 2349
tgacaatacagactaccacttgact

SEQ ID NO: 397081 - DNA, 25 bp, Artificial
  probe
  misc_feature (1)..(25): SEQ ID NO: 5007; WAN024GA3; Start 474; Stop 498
ctatcagttactcaatactcgcacc

SEQ ID NO: 397082 - DNA, 25 bp, Artificial
  probe
  misc_feature (1)..(25): SEQ ID NO: 5007; WAN024GA3; Start 2367; Stop 2391
catgcttaccttaccttgctaacta

SEQ ID NO: 397083 - DNA, 25 bp, Artificial
  probe
  misc_feature (1)..(25): SEQ ID NO: 5007; WAN024GA3; Start 524; Stop 548
aacttgttagtgatggtcttattcc

SEQ ID NO: 397084 - DNA, 25 bp, Artificial
  probe
  misc_feature (1)..(25): SEQ ID NO: 5007; WAN024GA3; Start 2062; Stop 2086
ttaagtgctagaaccattgacaacg

SEQ ID NO: 397085 - DNA, 25 bp, Artificial
  probe
  misc_feature (1)..(25): SEQ ID NO: 5007; WAN024GA3; Start 1697; Stop 1721
ttcaacttcctactgttatctggca

SEQ ID NO: 397086 - DNA, 25 bp, Artificial
  probe
  misc_feature (1)..(25): SEQ ID NO: 5007; WAN024GA3; Start 768; Stop 792
tagtgacaaggctctctacaagatg

SEQ ID NO: 397087 - DNA, 25 bp, Artificial
  probe
  misc_feature (1)..(25): SEQ ID NO: 5007; WAN024GA3; Start 475; Stop 499
tatcagttactcaatactcgcacca

SEQ ID NO: 397088 - DNA, 25 bp, Artificial
  probe
  misc_feature (1)..(25): SEQ ID NO: 5007; WAN024GA3; Start 91; Stop 115
actgtcattctatatggaggttcta

SEQ ID NO: 397089 - DNA, 25 bp, Artificial
  probe
  misc_feature (1)..(25): SEQ ID NO: 5007; WAN024GA3; Start 965; Stop 989
atctctatgtctcaggtgttggtac

SEQ ID NO: 397090 - DNA, 25 bp, Artificial
  probe
  misc_feature (1)..(25): SEQ ID NO: 5007; WAN024GA3; Start 767; Stop 791
ctagtgacaaggctctctacaagat

SEQ ID NO: 397091 - DNA, 25 bp, Artificial
  probe
  misc_feature (1)..(25): SEQ ID NO: 5007; WAN024GA3; Start 330; Stop 354
agaagatgaactgacagcagatatt

SEQ ID NO: 397092 - DNA, 25 bp, Artificial
  probe
  misc_feature (1)..(25): SEQ ID NO: 5007; WAN024GA3; Start 329; Stop 353
cagaagatgaactgacagcagatat

SEQ ID NO: 397093 - DNA, 25 bp, Artificial
  probe
  misc_feature (1)..(25): SEQ ID NO: 5007; WAN024GA3; Start 1551; Stop 1575
gttccatgctcttcctactcatata

SEQ ID NO: 397094 - DNA, 25 bp, Artificial
  probe
  misc_feature (1)..(25): SEQ ID NO: 5007; WAN024GA3; Start 1706; Stop 1730
ctactgttatctggcaggacaatac

SEQ ID NO: 397095 - DNA, 25 bp, Artificial
  probe
  misc_feature (1)..(25): SEQ ID NO: 5007; WAN024GA3; Start 2326; Stop 2350
gacaatacagactaccacttgactg

SEQ ID NO: 397096 - DNA, 25 bp, Artificial
  probe
  misc_feature (1)..(25): SEQ ID NO: 5007; WAN024GA3; Start 1550; Stop 1574
tgttccatgctcttcctactcatat

SEQ ID NO: 397097 - DNA, 25 bp, Artificial
  probe
  misc_feature (1)..(25): SEQ ID NO: 5007; WAN024GA3; Start 1549; Stop 1573
atgttccatgctcttcctactcata

SEQ ID NO: 397098 - DNA, 25 bp, Artificial
  probe
  misc_feature (1)..(25): SEQ ID NO: 5007; WAN024GA3; Start 1908; Stop 1932
gattactattaaccttcctgtgact

SEQ ID NO: 397099 - DNA, 25 bp, Artificial
  probe
  misc_feature (1)..(25): SEQ ID NO: 5008; WAN024FWK; Start 69; Stop 93
ctgccaattcatcaacttctttcat

SEQ ID NO: 397100 - DNA, 25 bp, Artificial
  probe
  misc_feature (1)..(25): SEQ ID NO: 5008; WAN024FWK; Start 67; Stop 91
ttctgccaattcatcaacttctttc

SEQ ID NO: 397101 - DNA, 25 bp, Artificial
  probe
  misc_feature (1)..(25): SEQ ID NO: 5008; WAN024FWK; Start 70; Stop 94
tgccaattcatcaacttctttcata

SEQ ID NO: 397102 - DNA, 25 bp, Artificial
  probe
  misc_feature (1)..(25): SEQ ID NO: 5008; WAN024FWK; Start 68; Stop 92
tctgccaattcatcaacttctttca

SEQ ID NO: 397103 - DNA, 25 bp, Artificial
  probe
  misc_feature (1)..(25): SEQ ID NO: 5008; WAN024FWK; Start 66; Stop 90
gttctgccaattcatcaacttcttt

SEQ ID NO: 397104 - DNA, 25 bp, Artificial
  probe
  misc_feature (1)..(25): SEQ ID NO: 5008; WAN024FWK; Start 71; Stop 95
gccaattcatcaacttctttcatag

SEQ ID NO: 397105 - DNA, 25 bp, Artificial
  probe
  misc_feature (1)..(25): SEQ ID NO: 5008; WAN024FWK; Start 59; Stop 83
atgtccagttctgccaattcatcaa

SEQ ID NO: 397106 - DNA, 25 bp, Artificial
  probe
  misc_feature (1)..(25): SEQ ID NO: 5008; WAN024FWK; Start 77; Stop 101
tcatcaacttctttcatagtagccg

SEQ ID NO: 397107 - DNA, 25 bp, Artificial
  probe
  misc_feature (1)..(25): SEQ ID NO: 5008; WAN024FWK; Start 82; Stop 106
aacttctttcatagtagccgtgatg

SEQ ID NO: 397108 - DNA, 25 bp, Artificial
  probe
  misc_feature (1)..(25): SEQ ID NO: 5008; WAN024FWK; Start 81; Stop 105
caacttctttcatagtagccgtgat

SEQ ID NO: 397109 - DNA, 25 bp, Artificial
  probe
  misc_feature (1)..(25): SEQ ID NO: 5008; WAN024FWK; Start 79; Stop 103
atcaacttctttcatagtagccgtg

SEQ ID NO: 397110 - DNA, 25 bp, Artificial
  probe
  misc_feature (1)..(25): SEQ ID NO: 5008; WAN024FWK; Start 78; Stop 102
catcaacttctttcatagtagccgt

SEQ ID NO: 397111 - DNA, 25 bp, Artificial
  probe
  misc_feature (1)..(25): SEQ ID NO: 5008; WAN024FWK; Start 76; Stop 100
ttcatcaacttctttcatagtagcc

SEQ ID NO: 397112 - DNA, 25 bp, Artificial
  probe
  misc_feature (1)..(25): SEQ ID NO: 5008; WAN024FWK; Start 421; Stop 445
acgctttcaagagtttgtagtataa

SEQ ID NO: 397113 - DNA, 25 bp, Artificial
  probe
  misc_feature (1)..(25): SEQ ID NO: 5008; WAN024FWK; Start 420; Stop 444
aacgctttcaagagtttgtagtata

SEQ ID NO: 397114 - DNA, 25 bp, Artificial
  probe
  misc_feature (1)..(25): SEQ ID NO: 5008; WAN024FWK; Start 80; Stop 104
tcaacttctttcatagtagccgtga

SEQ ID NO: 397115 - DNA, 25 bp, Artificial
  probe
  misc_feature (1)..(25): SEQ ID NO: 5008; WAN024FWK; Start 158; Stop 182
ttagtgacttccttaatttccttga

SEQ ID NO: 397116 - DNA, 25 bp, Artificial
  probe
  misc_feature (1)..(25): SEQ ID NO: 5008; WAN024FWK; Start 65; Stop 89
agttctgccaattcatcaacttctt

SEQ ID NO: 397117 - DNA, 25 bp, Artificial
  probe
  misc_feature (1)..(25): SEQ ID NO: 5008; WAN024FWK; Start 160; Stop 184
agtgacttccttaatttccttgata

SEQ ID NO: 397118 - DNA, 25 bp, Artificial
  probe
  misc_feature (1)..(25): SEQ ID NO: 5008; WAN024FWK; Start 159; Stop 183
tagtgacttccttaatttccttgat

SEQ ID NO: 397119 - DNA, 25 bp, Artificial
  probe
  misc_feature (1)..(25): SEQ ID NO: 5008; WAN024FWK; Start 289; Stop 313
aagagcctgacaagaaacgatgatt

SEQ ID NO: 397120 - DNA, 25 bp, Artificial
  probe
  misc_feature (1)..(25): SEQ ID NO: 5008; WAN024FWK; Start 155; Stop 179
agtttagtgacttccttaatttcct

SEQ ID NO: 397121 - DNA, 25 bp, Artificial
  probe
  misc_feature (1)..(25): SEQ ID NO: 5008; WAN024FWK; Start 64; Stop 88
cagttctgccaattcatcaacttct

SEQ ID NO: 397122 - DNA, 25 bp, Artificial
  probe
  misc_feature (1)..(25): SEQ ID NO: 5008; WAN024FWK; Start 60; Stop 84
tgtccagttctgccaattcatcaac

SEQ ID NO: 397123 - DNA, 25 bp, Artificial
  probe
  misc_feature (1)..(25): SEQ ID NO: 5008; WAN024FWK; Start 422; Stop 446
cgctttcaagagtttgtagtataat

SEQ ID NO: 397124 - DNA, 25 bp, Artificial
  probe
  misc_feature (1)..(25): SEQ ID NO: 5008; WAN024FWK; Start 72; Stop 96
ccaattcatcaacttctttcatagt

SEQ ID NO: 397125 - DNA, 25 bp, Artificial
  probe
  misc_feature (1)..(25): SEQ ID NO: 5008; WAN024FWK; Start 157; Stop 181
tttagtgacttccttaatttccttg

SEQ ID NO: 397126 - DNA, 25 bp, Artificial
  probe
  misc_feature (1)..(25): SEQ ID NO: 5008; WAN024FWK; Start 156; Stop 180
gtttagtgacttccttaatttcctt

SEQ ID NO: 397127 - DNA, 25 bp, Artificial
  probe
  misc_feature (1)..(25): SEQ ID NO: 5008; WAN024FWK; Start 164; Stop 188
acttccttaatttccttgatatcgc

SEQ ID NO: 397128 - DNA, 25 bp, Artificial
  probe
  misc_feature (1)..(25): SEQ ID NO: 5008; WAN024FWK; Start 288; Stop 312
gaagagcctgacaagaaacgatgat

SEQ ID NO: 397129 - DNA, 25 bp, Artificial
  probe
  misc_feature (1)..(25): SEQ ID NO: 5008; WAN024FWK; Start 75; Stop 99
attcatcaacttctttcatagtagc

SEQ ID NO: 397130 - DNA, 25 bp, Artificial
  probe
  misc_feature (1)..(25): SEQ ID NO: 5008; WAN024FWK; Start 3; Stop 27
gaatttccaaaccatcgtagcgttc

SEQ ID NO: 397131 - DNA, 25 bp, Artificial
  probe
  misc_feature (1)..(25): SEQ ID NO: 5008; WAN024FWK; Start 290; Stop 314
agagcctgacaagaaacgatgattc

SEQ ID NO: 397132 - DNA, 25 bp, Artificial
  probe
  misc_feature (1)..(25): SEQ ID NO: 5009; WAN024BF8; Start 127; Stop 151
gactatacagatgatgaattgctcg

SEQ ID NO: 397133 - DNA, 25 bp, Artificial
  probe
  misc_feature (1)..(25): SEQ ID NO: 5009; WAN024BF8; Start 126; Stop 150
tgactatacagatgatgaattgctc

SEQ ID NO: 397134 - DNA, 25 bp, Artificial
  probe
  misc_feature (1)..(25): SEQ ID NO: 5009; WAN024BF8; Start 125; Stop 149
ttgactatacagatgatgaattgct

SEQ ID NO: 397135 - DNA, 25 bp, Artificial
  probe
  misc_feature (1)..(25): SEQ ID NO: 5009; WAN024BF8; Start 128; Stop 152
actatacagatgatgaattgctcga

SEQ ID NO: 397136 - DNA, 25 bp, Artificial
  probe
  misc_feature (1)..(25): SEQ ID NO: 5009; WAN024BF8; Start 129; Stop 153
ctatacagatgatgaattgctcgat

SEQ ID NO: 397137 - DNA, 25 bp, Artificial
  probe
  misc_feature (1)..(25): SEQ ID NO: 5009; WAN024BF8; Start 124; Stop 148
attgactatacagatgatgaattgc

SEQ ID NO: 397138 - DNA, 25 bp, Artificial
  probe
  misc_feature (1)..(25): SEQ ID NO: 5009; WAN024BF8; Start 131; Stop 155
atacagatgatgaattgctcgataa

SEQ ID NO: 397139 - DNA, 25 bp, Artificial
  probe
  misc_feature (1)..(25): SEQ ID NO: 5009; WAN024BF8; Start 72; Stop 96
tatgattcattcaactccgcctcaa

SEQ ID NO: 397140 - DNA, 25 bp, Artificial
  probe
  misc_feature (1)..(25): SEQ ID NO: 5009; WAN024BF8; Start 76; Stop 100
attcattcaactccgcctcaatctg

SEQ ID NO: 397141 - DNA, 25 bp, Artificial
  probe
  misc_feature (1)..(25): SEQ ID NO: 5009; WAN024BF8; Start 71; Stop 95
ctatgattcattcaactccgcctca

SEQ ID NO: 397142 - DNA, 25 bp, Artificial
  probe
  misc_feature (1)..(25): SEQ ID NO: 5009; WAN024BF8; Start 73; Stop 97
atgattcattcaactccgcctcaat

SEQ ID NO: 397143 - DNA, 25 bp, Artificial
  probe
  misc_feature (1)..(25): SEQ ID NO: 5009; WAN024BF8; Start 130; Stop 154
tatacagatgatgaattgctcgata

SEQ ID NO: 397144 - DNA, 25 bp, Artificial
  probe
  misc_feature (1)..(25): SEQ ID NO: 5009; WAN024BF8; Start 81; Stop 105
ttcaactccgcctcaatctgtctta

SEQ ID NO: 397145 - DNA, 25 bp, Artificial
  probe
  misc_feature (1)..(25): SEQ ID NO: 5009; WAN024BF8; Start 133; Stop 157
acagatgatgaattgctcgataaag

SEQ ID NO: 397146 - DNA, 25 bp, Artificial
  probe
  misc_feature (1)..(25): SEQ ID NO: 5009; WAN024BF8; Start 70; Stop 94
cctatgattcattcaactccgcctc

SEQ ID NO: 397147 - DNA, 25 bp, Artificial
  probe
  misc_feature (1)..(25): SEQ ID NO: 5009; WAN024BF8; Start 91; Stop 115
cctcaatctgtcttagatcgagata

SEQ ID NO: 397148 - DNA, 25 bp, Artificial
  probe
  misc_feature (1)..(25): SEQ ID NO: 5009; WAN024BF8; Start 134; Stop 158
cagatgatgaattgctcgataaaga

SEQ ID NO: 397149 - DNA, 25 bp, Artificial
  probe
  misc_feature (1)..(25): SEQ ID NO: 5009; WAN024BF8; Start 135; Stop 159
agatgatgaattgctcgataaagaa

SEQ ID NO: 397150 - DNA, 25 bp, Artificial
  probe
  misc_feature (1)..(25): SEQ ID NO: 5009; WAN024BF8; Start 93; Stop 117
tcaatctgtcttagatcgagatact

SEQ ID NO: 397151 - DNA, 25 bp, Artificial
  probe
  misc_feature (1)..(25): SEQ ID NO: 5009; WAN024BF8; Start 82; Stop 106
tcaactccgcctcaatctgtcttag

SEQ ID NO: 397152 - DNA, 25 bp, Artificial
  probe
  misc_feature (1)..(25): SEQ ID NO: 5009; WAN024BF8; Start 90; Stop 114
gcctcaatctgtcttagatcgagat

SEQ ID NO: 397153 - DNA, 25 bp, Artificial
  probe
  misc_feature (1)..(25): SEQ ID NO: 5009; WAN024BF8; Start 69; Stop 93
tcctatgattcattcaactccgcct

SEQ ID NO: 397154 - DNA, 25 bp, Artificial
  probe
  misc_feature (1)..(25): SEQ ID NO: 5009; WAN024BF8; Start 136; Stop 160
gatgatgaattgctcgataaagaag

SEQ ID NO: 397155 - DNA, 25 bp, Artificial
  probe
  misc_feature (1)..(25): SEQ ID NO: 5009; WAN024BF8; Start 75; Stop 99
gattcattcaactccgcctcaatct

SEQ ID NO: 397156 - DNA, 25 bp, Artificial
  probe
  misc_feature (1)..(25): SEQ ID NO: 5009; WAN024BF8; Start 132; Stop 156
tacagatgatgaattgctcgataaa

SEQ ID NO: 397157 - DNA, 25 bp, Artificial
  probe
  misc_feature (1)..(25): SEQ ID NO: 5009; WAN024BF8; Start 92; Stop 116
ctcaatctgtcttagatcgagatac

SEQ ID NO: 397158 - DNA, 25 bp, Artificial
  probe
  misc_feature (1)..(25): SEQ ID NO: 5009; WAN024BF8; Start 83; Stop 107
caactccgcctcaatctgtcttaga

SEQ ID NO: 397159 - DNA, 25 bp, Artificial
  probe
  misc_feature (1)..(25): SEQ ID NO: 5009; WAN024BF8; Start 80; Stop 104
attcaactccgcctcaatctgtctt

SEQ ID NO: 397160 - DNA, 25 bp, Artificial
  probe
  misc_feature (1)..(25): SEQ ID NO: 5009; WAN024BF8; Start 74; Stop 98
tgattcattcaactccgcctcaatc

SEQ ID NO: 397161 - DNA, 25 bp, Artificial
  probe
  misc_feature (1)..(25): SEQ ID NO: 5009; WAN024BF8; Start 94; Stop 118
caatctgtcttagatcgagatactt

SEQ ID NO: 397162 - DNA, 25 bp, Artificial
  probe
  misc_feature (1)..(25): SEQ ID NO: 5009; WAN024BF8; Start 77; Stop 101
ttcattcaactccgcctcaatctgt

SEQ ID NO: 397163 - DNA, 25 bp, Artificial
  probe
  misc_feature (1)..(25): SEQ ID NO: 5009; WAN024BF8; Start 84; Stop 108
aactccgcctcaatctgtcttagat

SEQ ID NO: 397164 - DNA, 25 bp, Artificial
  probe
  misc_feature (1)..(25): SEQ ID NO: 5009; WAN024BF8; Start 137; Stop 161
atgatgaattgctcgataaagaagc

SEQ ID NO: 397165 - DNA, 25 bp, Artificial
  probe
  misc_feature (1)..(25): SEQ ID NO: 5010; WAN024G64; Start 153; Stop 177
gacagtagccaatgatggtagtatt

SEQ ID NO: 397166 - DNA, 25 bp, Artificial
  probe
  misc_feature (1)..(25): SEQ ID NO: 5010; WAN024G64; Start 152; Stop 176
agacagtagccaatgatggtagtat

SEQ ID NO: 397167 - DNA, 25 bp, Artificial
  probe
  misc_feature (1)..(25): SEQ ID NO: 5010; WAN024G64; Start 154; Stop 178
acagtagccaatgatggtagtatta

SEQ ID NO: 397168 - DNA, 25 bp, Artificial
  probe
  misc_feature (1)..(25): SEQ ID NO: 5010; WAN024G64; Start 151; Stop 175
aagacagtagccaatgatggtagta

SEQ ID NO: 397169 - DNA, 25 bp, Artificial
  probe
  misc_feature (1)..(25): SEQ ID NO: 5010; WAN024G64; Start 155; Stop 179
cagtagccaatgatggtagtattat

SEQ ID NO: 397170 - DNA, 25 bp, Artificial
  probe
  misc_feature (1)..(25): SEQ ID NO: 5010; WAN024G64; Start 56; Stop 80
aacccaaagtgttgaaccaagtaat

SEQ ID NO: 397171 - DNA, 25 bp, Artificial
  probe
  misc_feature (1)..(25): SEQ ID NO: 5010; WAN024G64; Start 150; Stop 174
gaagacagtagccaatgatggtagt

SEQ ID NO: 397172 - DNA, 25 bp, Artificial
  probe
  misc_feature (1)..(25): SEQ ID NO: 5010; WAN024G64; Start 108; Stop 132
cgatggcagttgtgatgatatgttt

SEQ ID NO: 397173 - DNA, 25 bp, Artificial
  probe
  misc_feature (1)..(25): SEQ ID NO: 5010; WAN024G64; Start 55; Stop 79
aaacccaaagtgttgaaccaagtaa

SEQ ID NO: 397174 - DNA, 25 bp, Artificial
  probe
  misc_feature (1)..(25): SEQ ID NO: 5010; WAN024G64; Start 57; Stop 81
acccaaagtgttgaaccaagtaatc

SEQ ID NO: 397175 - DNA, 25 bp, Artificial
  probe
  misc_feature (1)..(25): SEQ ID NO: 5010; WAN024G64; Start 58; Stop 82
cccaaagtgttgaaccaagtaatca

SEQ ID NO: 397176 - DNA, 25 bp, Artificial
  probe
  misc_feature (1)..(25): SEQ ID NO: 5010; WAN024G64; Start 107; Stop 131
tcgatggcagttgtgatgatatgtt

SEQ ID NO: 397177 - DNA, 25 bp, Artificial
  probe
  misc_feature (1)..(25): SEQ ID NO: 5010; WAN024G64; Start 54; Stop 78
caaacccaaagtgttgaaccaagta

SEQ ID NO: 397178 - DNA, 25 bp, Artificial
  probe
  misc_feature (1)..(25): SEQ ID NO: 5010; WAN024G64; Start 145; Stop 169
gtgacgaagacagtagccaatgatg

SEQ ID NO: 397179 - DNA, 25 bp, Artificial
  probe
  misc_feature (1)..(25): SEQ ID NO: 5010; WAN024G64; Start 156; Stop 180
agtagccaatgatggtagtattatt

SEQ ID NO: 397180 - DNA, 25 bp, Artificial
  probe
  misc_feature (1)..(25): SEQ ID NO: 5010; WAN024G64; Start 106; Stop 130
ctcgatggcagttgtgatgatatgt

SEQ ID NO: 397181 - DNA, 25 bp, Artificial
  probe
  misc_feature (1)..(25): SEQ ID NO: 5010; WAN024G64; Start 157; Stop 181
gtagccaatgatggtagtattattg

SEQ ID NO: 397182 - DNA, 25 bp, Artificial
  probe
  misc_feature (1)..(25): SEQ ID NO: 5010; WAN024G64; Start 149; Stop 173
cgaagacagtagccaatgatggtag

SEQ ID NO: 397183 - DNA, 25 bp, Artificial
  probe
  misc_feature (1)..(25): SEQ ID NO: 5010; WAN024G64; Start 136; Stop 160
ttgttcttggtgacgaagacagtag

SEQ ID NO: 397184 - DNA, 25 bp, Artificial
  probe
  misc_feature (1)..(25): SEQ ID NO: 5010; WAN024G64; Start 135; Stop 159
cttgttcttggtgacgaagacagta

SEQ ID NO: 397185 - DNA, 25 bp, Artificial
  probe
  misc_feature (1)..(25): SEQ ID NO: 5010; WAN024G64; Start 113; Stop 137
gcagttgtgatgatatgttttcctt

SEQ ID NO: 397186 - DNA, 25 bp, Artificial
  probe
  misc_feature (1)..(25): SEQ ID NO: 5010; WAN024G64; Start 110; Stop 134
atggcagttgtgatgatatgttttc

SEQ ID NO: 397187 - DNA, 25 bp, Artificial
  probe
  misc_feature (1)..(25): SEQ ID NO: 5010; WAN024G64; Start 109; Stop 133
gatggcagttgtgatgatatgtttt

SEQ ID NO: 397188 - DNA, 25 bp, Artificial
  probe
  misc_feature (1)..(25): SEQ ID NO: 5010; WAN024G64; Start 22; Stop 46
ttcttgattttctggctggataatg

SEQ ID NO: 397189 - DNA, 25 bp, Artificial
  probe
  misc_feature (1)..(25): SEQ ID NO: 5010; WAN024G64; Start 125; Stop 149
atatgttttccttgttcttggtgac

SEQ ID NO: 397190 - DNA, 25 bp, Artificial
  probe
  misc_feature (1)..(25): SEQ ID NO: 5010; WAN024G64; Start 123; Stop 147
tgatatgttttccttgttcttggtg

SEQ ID NO: 397191 - DNA, 25 bp, Artificial
  probe
  misc_feature (1)..(25): SEQ ID NO: 5010; WAN024G64; Start 148; Stop 172
acgaagacagtagccaatgatggta

SEQ ID NO: 397192 - DNA, 25 bp, Artificial
  probe
  misc_feature (1)..(25): SEQ ID NO: 5010; WAN024G64; Start 124; Stop 148
gatatgttttccttgttcttggtga

SEQ ID NO: 397193 - DNA, 25 bp, Artificial
  probe
  misc_feature (1)..(25): SEQ ID NO: 5010; WAN024G64; Start 19; Stop 43
gatttcttgattttctggctggata

SEQ ID NO: 397194 - DNA, 25 bp, Artificial
  probe
  misc_feature (1)..(25): SEQ ID NO: 5010; WAN024G64; Start 31; Stop 55
ttctggctggataatggttgcttca

SEQ ID NO: 397195 - DNA, 25 bp, Artificial
  probe
  misc_feature (1)..(25): SEQ ID NO: 5010; WAN024G64; Start 5; Stop 29
atttgctgggctgtgatttcttgat

SEQ ID NO: 397196 - DNA, 25 bp, Artificial
  probe
  misc_feature (1)..(25): SEQ ID NO: 5010; WAN024G64; Start 25; Stop 49
ttgattttctggctggataatggtt

SEQ ID NO: 397197 - DNA, 25 bp, Artificial
  probe
  misc_feature (1)..(25): SEQ ID NO: 5010; WAN024G64; Start 18; Stop 42
tgatttcttgattttctggctggat

SEQ ID NO: 397198 - DNA, 25 bp, Artificial
  probe
  misc_feature (1)..(25): SEQ ID NO: 5011; WAN024APV; Start 16; Stop 40
tgtcatctagtatatatgtccctca

SEQ ID NO: 397199 - DNA, 25 bp, Artificial
  probe
  misc_feature (1)..(25): SEQ ID NO: 5011; WAN024APV; Start 17; Stop 41
gtcatctagtatatatgtccctcaa

SEQ ID NO: 397200 - DNA, 25 bp, Artificial
  probe
  misc_feature (1)..(25): SEQ ID NO: 5011; WAN024APV; Start 15; Stop 39
ttgtcatctagtatatatgtccctc

SEQ ID NO: 397201 - DNA, 25 bp, Artificial
  probe
  misc_feature (1)..(25): SEQ ID NO: 5011; WAN024APV; Start 34; Stop 58
tccctcaaataggaaaaggagaaat

SEQ ID NO: 397202 - DNA, 25 bp, Artificial
  probe
  misc_feature (1)..(25): SEQ ID NO: 5011; WAN024APV; Start 33; Stop 57
gtccctcaaataggaaaaggagaaa

SEQ ID NO: 397203 - DNA, 25 bp, Artificial
  probe
  misc_feature (1)..(25): SEQ ID NO: 5011; WAN024APV; Start 30; Stop 54
tatgtccctcaaataggaaaaggag

SEQ ID NO: 397204 - DNA, 25 bp, Artificial
  probe
  misc_feature (1)..(25): SEQ ID NO: 5011; WAN024APV; Start 35; Stop 59
ccctcaaataggaaaaggagaaatt

SEQ ID NO: 397205 - DNA, 25 bp, Artificial
  probe
  misc_feature (1)..(25): SEQ ID NO: 5011; WAN024APV; Start 14; Stop 38
tttgtcatctagtatatatgtccct

SEQ ID NO: 397206 - DNA, 25 bp, Artificial
  probe
  misc_feature (1)..(25): SEQ ID NO: 5011; WAN024APV; Start 29; Stop 53
atatgtccctcaaataggaaaagga

SEQ ID NO: 397207 - DNA, 25 bp, Artificial
  probe
  misc_feature (1)..(25): SEQ ID NO: 5011; WAN024APV; Start 31; Stop 55
atgtccctcaaataggaaaaggaga

SEQ ID NO: 397208 - DNA, 25 bp, Artificial
  probe
  misc_feature (1)..(25): SEQ ID NO: 5011; WAN024APV; Start 32; Stop 56
tgtccctcaaataggaaaaggagaa

SEQ ID NO: 397209 - DNA, 25 bp, Artificial
  probe
  misc_feature (1)..(25): SEQ ID NO: 5011; WAN024APV; Start 36; Stop 60
cctcaaataggaaaaggagaaattg

SEQ ID NO: 397210 - DNA, 25 bp, Artificial
  probe
  misc_feature (1)..(25): SEQ ID NO: 5011; WAN024APV; Start 18; Stop 42
tcatctagtatatatgtccctcaaa

SEQ ID NO: 397211 - DNA, 25 bp, Artificial
  probe
  misc_feature (1)..(25): SEQ ID NO: 5011; WAN024APV; Start 28; Stop 52
tatatgtccctcaaataggaaaagg

SEQ ID NO: 397212 - DNA, 25 bp, Artificial
  probe
  misc_feature (1)..(25): SEQ ID NO: 5011; WAN024APV; Start 24; Stop 48
agtatatatgtccctcaaataggaa

SEQ ID NO: 397213 - DNA, 25 bp, Artificial
  probe
  misc_feature (1)..(25): SEQ ID NO: 5011; WAN024APV; Start 13; Stop 37
atttgtcatctagtatatatgtccc

SEQ ID NO: 397214 - DNA, 25 bp, Artificial
  probe
  misc_feature (1)..(25): SEQ ID NO: 5011; WAN024APV; Start 19; Stop 43
catctagtatatatgtccctcaaat

SEQ ID NO: 397215 - DNA, 25 bp, Artificial
  probe
  misc_feature (1)..(25): SEQ ID NO: 5011; WAN024APV; Start 25; Stop 49
gtatatatgtccctcaaataggaaa

SEQ ID NO: 397216 - DNA, 25 bp, Artificial
  probe
  misc_feature (1)..(25): SEQ ID NO: 5011; WAN024APV; Start 23; Stop 47
tagtatatatgtccctcaaatagga

SEQ ID NO: 397217 - DNA, 25 bp, Artificial
  probe
  misc_feature (1)..(25): SEQ ID NO: 5011; WAN024APV; Start 22; Stop 46
ctagtatatatgtccctcaaatagg

SEQ ID NO: 397218 - DNA, 25 bp, Artificial
  probe
  misc_feature (1)..(25): SEQ ID NO: 5011; WAN024APV; Start 37; Stop 61
ctcaaataggaaaaggagaaattga

SEQ ID NO: 397219 - DNA, 25 bp, Artificial
  probe
  misc_feature (1)..(25): SEQ ID NO: 5011; WAN024APV; Start 27; Stop 51
atatatgtccctcaaataggaaaag

SEQ ID NO: 397220 - DNA, 25 bp, Artificial
  probe
  misc_feature (1)..(25): SEQ ID NO: 5012; WAN024GAE; Start 153; Stop 177
tgtgaatccagcaaccatagaatca

SEQ ID NO: 397221 - DNA, 25 bp, Artificial
  probe
  misc_feature (1)..(25): SEQ ID NO: 5012; WAN024GAE; Start 152; Stop 176
ctgtgaatccagcaaccatagaatc

SEQ ID NO: 397222 - DNA, 25 bp, Artificial
  probe
  misc_feature (1)..(25): SEQ ID NO: 5012; WAN024GAE; Start 157; Stop 181
aatccagcaaccatagaatcaccag

SEQ ID NO: 397223 - DNA, 25 bp, Artificial
  probe
  misc_feature (1)..(25): SEQ ID NO: 5012; WAN024GAE; Start 156; Stop 180
gaatccagcaaccatagaatcacca

SEQ ID NO: 397224 - DNA, 25 bp, Artificial
  probe
  misc_feature (1)..(25): SEQ ID NO: 5012; WAN024GAE; Start 196; Stop 220
ttgactgttcctttgattggtttag

SEQ ID NO: 397225 - DNA, 25 bp, Artificial
  probe
  misc_feature (1)..(25): SEQ ID NO: 5012; WAN024GAE; Start 195; Stop 219
tttgactgttcctttgattggttta

SEQ ID NO: 397226 - DNA, 25 bp, Artificial
  probe
  misc_feature (1)..(25): SEQ ID NO: 5012; WAN024GAE; Start 39; Stop 63
tgtttctttaataaattccgccgtt

SEQ ID NO: 397227 - DNA, 25 bp, Artificial
  probe
  misc_feature (1)..(25): SEQ ID NO: 5012; WAN024GAE; Start 40; Stop 64
gtttctttaataaattccgccgttg

SEQ ID NO: 397228 - DNA, 25 bp, Artificial
  probe
  misc_feature (1)..(25): SEQ ID NO: 5012; WAN024GAE; Start 38; Stop 62
atgtttctttaataaattccgccgt

SEQ ID NO: 397229 - DNA, 25 bp, Artificial
  probe
  misc_feature (1)..(25): SEQ ID NO: 5012; WAN024GAE; Start 204; Stop 228
tcctttgattggtttagcgaagtaa

SEQ ID NO: 397230 - DNA, 25 bp, Artificial
  probe
  misc_feature (1)..(25): SEQ ID NO: 5012; WAN024GAE; Start 203; Stop 227
ttcctttgattggtttagcgaagta

SEQ ID NO: 397231 - DNA, 25 bp, Artificial
  probe
  misc_feature (1)..(25): SEQ ID NO: 5012; WAN024GAE; Start 41; Stop 65
tttctttaataaattccgccgttgc

SEQ ID NO: 397232 - DNA, 25 bp, Artificial
  probe
  misc_feature (1)..(25): SEQ ID NO: 5012; WAN024GAE; Start 155; Stop 179
tgaatccagcaaccatagaatcacc

SEQ ID NO: 397233 - DNA, 25 bp, Artificial
  probe
  misc_feature (1)..(25): SEQ ID NO: 5012; WAN024GAE; Start 61; Stop 85
gttgccaagtcatctgagaaggtag

SEQ ID NO: 397234 - DNA, 25 bp, Artificial
  probe
  misc_feature (1)..(25): SEQ ID NO: 5012; WAN024GAE; Start 197; Stop 221
tgactgttcctttgattggtttagc

SEQ ID NO: 397235 - DNA, 25 bp, Artificial
  probe
  misc_feature (1)..(25): SEQ ID NO: 5012; WAN024GAE; Start 66; Stop 90
caagtcatctgagaaggtagttgcc

SEQ ID NO: 397236 - DNA, 25 bp, Artificial
  probe
  misc_feature (1)..(25): SEQ ID NO: 5012; WAN024GAE; Start 65; Stop 89
ccaagtcatctgagaaggtagttgc

SEQ ID NO: 397237 - DNA, 25 bp, Artificial
  probe
  misc_feature (1)..(25): SEQ ID NO: 5012; WAN024GAE; Start 64; Stop 88
gccaagtcatctgagaaggtagttg

SEQ ID NO: 397238 - DNA, 25 bp, Artificial
  probe
  misc_feature (1)..(25): SEQ ID NO: 5012; WAN024GAE; Start 37; Stop 61
tatgtttctttaataaattccgccg

SEQ ID NO: 397239 - DNA, 25 bp, Artificial
  probe
  misc_feature (1)..(25): SEQ ID NO: 5012; WAN024GAE; Start 151; Stop 175
cctgtgaatccagcaaccatagaat

SEQ ID NO: 397240 - DNA, 25 bp, Artificial
  probe
  misc_feature (1)..(25): SEQ ID NO: 5012; WAN024GAE; Start 63; Stop 87
tgccaagtcatctgagaaggtagtt

SEQ ID NO: 397241 - DNA, 25 bp, Artificial
  probe
  misc_feature (1)..(25): SEQ ID NO: 5012; WAN024GAE; Start 62; Stop 86
ttgccaagtcatctgagaaggtagt

SEQ ID NO: 397242 - DNA, 25 bp, Artificial
  probe
  misc_feature (1)..(25): SEQ ID NO: 5012; WAN024GAE; Start 169; Stop 193
atagaatcaccagctccaactgaat

SEQ ID NO: 397243 - DNA, 25 bp, Artificial
  probe
  misc_feature (1)..(25): SEQ ID NO: 5012; WAN024GAE; Start 202; Stop 226
gttcctttgattggtttagcgaagt

SEQ ID NO: 397244 - DNA, 25 bp, Artificial
  probe
  misc_feature (1)..(25): SEQ ID NO: 5012; WAN024GAE; Start 201; Stop 225
tgttcctttgattggtttagcgaag

SEQ ID NO: 397245 - DNA, 25 bp, Artificial
  probe
  misc_feature (1)..(25): SEQ ID NO: 5012; WAN024GAE; Start 200; Stop 224
ctgttcctttgattggtttagcgaa

SEQ ID NO: 397246 - DNA, 25 bp, Artificial
  probe
  misc_feature (1)..(25): SEQ ID NO: 5012; WAN024GAE; Start 170; Stop 194
tagaatcaccagctccaactgaatt

SEQ ID NO: 397247 - DNA, 25 bp, Artificial
  probe
  misc_feature (1)..(25): SEQ ID NO: 5012; WAN024GAE; Start 198; Stop 222
gactgttcctttgattggtttagcg

SEQ ID NO: 397248 - DNA, 25 bp, Artificial
  probe
  misc_feature (1)..(25): SEQ ID NO: 5012; WAN024GAE; Start 42; Stop 66
ttctttaataaattccgccgttgcc

SEQ ID NO: 397249 - DNA, 25 bp, Artificial
  probe
  misc_feature (1)..(25): SEQ ID NO: 5012; WAN024GAE; Start 168; Stop 192
catagaatcaccagctccaactgaa

SEQ ID NO: 397250 - DNA, 25 bp, Artificial
  probe
  misc_feature (1)..(25): SEQ ID NO: 5012; WAN024GAE; Start 199; Stop 223
actgttcctttgattggtttagcga

SEQ ID NO: 397251 - DNA, 25 bp, Artificial
  probe
  misc_feature (1)..(25): SEQ ID NO: 5012; WAN024GAE; Start 45; Stop 69
tttaataaattccgccgttgccaag

SEQ ID NO: 397252 - DNA, 25 bp, Artificial
  probe
  misc_feature (1)..(25): SEQ ID NO: 5012; WAN024GAE; Start 44; Stop 68
ctttaataaattccgccgttgccaa

SEQ ID NO: 397253 - DNA, 25 bp, Artificial
  probe
  misc_feature (1)..(25): SEQ ID NO: 5013; WAN024CLK; Start 77; Stop 101
aaattagtgaggagtttatggctgt

SEQ ID NO: 397254 - DNA, 25 bp, Artificial
  probe
  misc_feature (1)..(25): SEQ ID NO: 5013; WAN024CLK; Start 78; Stop 102
aattagtgaggagtttatggctgtg

SEQ ID NO: 397255 - DNA, 25 bp, Artificial
  probe
  misc_feature (1)..(25): SEQ ID NO: 5013; WAN024CLK; Start 79; Stop 103
attagtgaggagtttatggctgtga

SEQ ID NO: 397256 - DNA, 25 bp, Artificial
  probe
  misc_feature (1)..(25): SEQ ID NO: 5013; WAN024CLK; Start 80; Stop 104
ttagtgaggagtttatggctgtgaa

SEQ ID NO: 397257 - DNA, 25 bp, Artificial
  probe
  misc_feature (1)..(25): SEQ ID NO: 5013; WAN024CLK; Start 81; Stop 105
tagtgaggagtttatggctgtgaaa

SEQ ID NO: 397258 - DNA, 25 bp, Artificial
  probe
  misc_feature (1)..(25): SEQ ID NO: 5013; WAN024CLK; Start 34; Stop 58
atctccatgttgattgacgtttatg

SEQ ID NO: 397259 - DNA, 25 bp, Artificial
  probe
  misc_feature (1)..(25): SEQ ID NO: 5013; WAN024CLK; Start 31; Stop 55
gatatctccatgttgattgacgttt

SEQ ID NO: 397260 - DNA, 25 bp, Artificial
  probe
  misc_feature (1)..(25): SEQ ID NO: 5013; WAN024CLK; Start 40; Stop 64
atgttgattgacgtttatgggcata

SEQ ID NO: 397261 - DNA, 25 bp, Artificial
  probe
  misc_feature (1)..(25): SEQ ID NO: 5013; WAN024CLK; Start 33; Stop 57
tatctccatgttgattgacgtttat

SEQ ID NO: 397262 - DNA, 25 bp, Artificial
  probe
  misc_feature (1)..(25): SEQ ID NO: 5013; WAN024CLK; Start 32; Stop 56
atatctccatgttgattgacgttta

SEQ ID NO: 397263 - DNA, 25 bp, Artificial
  probe
  misc_feature (1)..(25): SEQ ID NO: 5013; WAN024CLK; Start 90; Stop 114
gtttatggctgtgaaaagtttgttg

SEQ ID NO: 397264 - DNA, 25 bp, Artificial
  probe
  misc_feature (1)..(25): SEQ ID NO: 5013; WAN024CLK; Start 89; Stop 113
agtttatggctgtgaaaagtttgtt

SEQ ID NO: 397265 - DNA, 25 bp, Artificial
  probe
  misc_feature (1)..(25): SEQ ID NO: 5013; WAN024CLK; Start 88; Stop 112
gagtttatggctgtgaaaagtttgt

SEQ ID NO: 397266 - DNA, 25 bp, Artificial
  probe
  misc_feature (1)..(25): SEQ ID NO: 5013; WAN024CLK; Start 41; Stop 65
tgttgattgacgtttatgggcatac

SEQ ID NO: 397267 - DNA, 25 bp, Artificial
  probe
  misc_feature (1)..(25): SEQ ID NO: 5013; WAN024CLK; Start 87; Stop 111
ggagtttatggctgtgaaaagtttg

SEQ ID NO: 397268 - DNA, 25 bp, Artificial
  probe
  misc_feature (1)..(25): SEQ ID NO: 5013; WAN024CLK; Start 86; Stop 110
aggagtttatggctgtgaaaagttt

SEQ ID NO: 397269 - DNA, 25 bp, Artificial
  probe
  misc_feature (1)..(25): SEQ ID NO: 5013; WAN024CLK; Start 76; Stop 100
aaaattagtgaggagtttatggctg

SEQ ID NO: 397270 - DNA, 25 bp, Artificial
  probe
  misc_feature (1)..(25): SEQ ID NO: 5013; WAN024CLK; Start 52; Stop 76
gtttatgggcataccttggaggaaa

SEQ ID NO: 397271 - DNA, 25 bp, Artificial
  probe
  misc_feature (1)..(25): SEQ ID NO: 5013; WAN024CLK; Start 45; Stop 69
gattgacgtttatgggcataccttg

SEQ ID NO: 397272 - DNA, 25 bp, Artificial
  probe
  misc_feature (1)..(25): SEQ ID NO: 5013; WAN024CLK; Start 93; Stop 117
tatggctgtgaaaagtttgttgcta

SEQ ID NO: 397273 - DNA, 25 bp, Artificial
  probe
  misc_feature (1)..(25): SEQ ID NO: 5013; WAN024CLK; Start 91; Stop 115
tttatggctgtgaaaagtttgttgc

SEQ ID NO: 397274 - DNA, 25 bp, Artificial
  probe
  misc_feature (1)..(25): SEQ ID NO: 5013; WAN024CLK; Start 85; Stop 109
gaggagtttatggctgtgaaaagtt

SEQ ID NO: 397275 - DNA, 25 bp, Artificial
  probe
  misc_feature (1)..(25): SEQ ID NO: 5013; WAN024CLK; Start 44; Stop 68
tgattgacgtttatgggcatacctt

SEQ ID NO: 397276 - DNA, 25 bp, Artificial
  probe
  misc_feature (1)..(25): SEQ ID NO: 5013; WAN024CLK; Start 43; Stop 67
ttgattgacgtttatgggcatacct

SEQ ID NO: 397277 - DNA, 25 bp, Artificial
  probe
  misc_feature (1)..(25): SEQ ID NO: 5013; WAN024CLK; Start 42; Stop 66
gttgattgacgtttatgggcatacc

SEQ ID NO: 397278 - DNA, 25 bp, Artificial
  probe
  misc_feature (1)..(25): SEQ ID NO: 5013; WAN024CLK; Start 39; Stop 63
catgttgattgacgtttatgggcat

SEQ ID NO: 397279 - DNA, 25 bp, Artificial
  probe
  misc_feature (1)..(25): SEQ ID NO: 5013; WAN024CLK; Start 94; Stop 118
atggctgtgaaaagtttgttgctaa

SEQ ID NO: 397280 - DNA, 25 bp, Artificial
  probe
  misc_feature (1)..(25): SEQ ID NO: 5013; WAN024CLK; Start 92; Stop 116
ttatggctgtgaaaagtttgttgct

SEQ ID NO: 397281 - DNA, 25 bp, Artificial
  probe
  misc_feature (1)..(25): SEQ ID NO: 5013; WAN024CLK; Start 83; Stop 107
gtgaggagtttatggctgtgaaaag

SEQ ID NO: 397282 - DNA, 25 bp, Artificial
  probe
  misc_feature (1)..(25): SEQ ID NO: 5013; WAN024CLK; Start 84; Stop 108
tgaggagtttatggctgtgaaaagt

SEQ ID NO: 397283 - DNA, 25 bp, Artificial
  probe
  misc_feature (1)..(25): SEQ ID NO: 5013; WAN024CLK; Start 82; Stop 106
agtgaggagtttatggctgtgaaaa

SEQ ID NO: 397284 - DNA, 25 bp, Artificial
  probe
  misc_feature (1)..(25): SEQ ID NO: 5013; WAN024CLK; Start 30; Stop 54
agatatctccatgttgattgacgtt

SEQ ID NO: 397285 - DNA, 25 bp, Artificial
  probe
  misc_feature (1)..(25): SEQ ID NO: 5013; WAN024CLK; Start 29; Stop 53
aagatatctccatgttgattgacgt

SEQ ID NO: 397286 - DNA, 25 bp, Artificial
  probe
  misc_feature (1)..(25): SEQ ID NO: 5014; WAN024EZN; Start 3; Stop 27
gacaaagagccaaggaactaagaaa

SEQ ID NO: 397287 - DNA, 25 bp, Artificial
  probe
  misc_feature (1)..(25): SEQ ID NO: 5014; WAN024EZN; Start 2; Stop 26
tgacaaagagccaaggaactaagaa

SEQ ID NO: 397288 - DNA, 25 bp, Artificial
  probe
  misc_feature (1)..(25): SEQ ID NO: 5014; WAN024EZN; Start 1; Stop 25
ttgacaaagagccaaggaactaaga

SEQ ID NO: 397289 - DNA, 25 bp, Artificial
  probe
  misc_feature (1)..(25): SEQ ID NO: 5014; WAN024EZN; Start 20; Stop 44
ctaagaaaacgactcctaaagaagc

SEQ ID NO: 397290 - DNA, 25 bp, Artificial
  probe
  misc_feature (1)..(25): SEQ ID NO: 5014; WAN024EZN; Start 5; Stop 29
caaagagccaaggaactaagaaaac

SEQ ID NO: 397291 - DNA, 25 bp, Artificial
  probe
  misc_feature (1)..(25): SEQ ID NO: 5014; WAN024EZN; Start 21; Stop 45
taagaaaacgactcctaaagaagcc

SEQ ID NO: 397292 - DNA, 25 bp, Artificial
  probe
  misc_feature (1)..(25): SEQ ID NO: 5014; WAN024EZN; Start 4; Stop 28
acaaagagccaaggaactaagaaaa

SEQ ID NO: 397293 - DNA, 25 bp, Artificial
  probe
  misc_feature (1)..(25): SEQ ID NO: 5014; WAN024EZN; Start 17; Stop 41
gaactaagaaaacgactcctaaaga

SEQ ID NO: 397294 - DNA, 25 bp, Artificial
  probe
  misc_feature (1)..(25): SEQ ID NO: 5014; WAN024EZN; Start 19; Stop 43
actaagaaaacgactcctaaagaag

SEQ ID NO: 397295 - DNA, 25 bp, Artificial
  probe
  misc_feature (1)..(25): SEQ ID NO: 5014; WAN024EZN; Start 6; Stop 30
aaagagccaaggaactaagaaaacg

SEQ ID NO: 397296 - DNA, 25 bp, Artificial
  probe
  misc_feature (1)..(25): SEQ ID NO: 5014; WAN024EZN; Start 18; Stop 42
aactaagaaaacgactcctaaagaa

SEQ ID NO: 397297 - DNA, 25 bp, Artificial
  probe
  misc_feature (1)..(25): SEQ ID NO: 5014; WAN024EZN; Start 7; Stop 31
aagagccaaggaactaagaaaacga

SEQ ID NO: 397298 - DNA, 25 bp, Artificial
  probe
  misc_feature (1)..(25): SEQ ID NO: 5014; WAN024EZN; Start 16; Stop 40
ggaactaagaaaacgactcctaaag

SEQ ID NO: 397299 - DNA, 25 bp, Artificial
  probe
  misc_feature (1)..(25): SEQ ID NO: 5014; WAN024EZN; Start 47; Stop 71
ccttcatcgaaaagtggatcaataa

SEQ ID NO: 397300 - DNA, 25 bp, Artificial
  probe
  misc_feature (1)..(25): SEQ ID NO: 5014; WAN024EZN; Start 10; Stop 34
agccaaggaactaagaaaacgactc

SEQ ID NO: 397301 - DNA, 25 bp, Artificial
  probe
  misc_feature (1)..(25): SEQ ID NO: 5014; WAN024EZN; Start 9; Stop 33
gagccaaggaactaagaaaacgact

SEQ ID NO: 397302 - DNA, 25 bp, Artificial
  probe
  misc_feature (1)..(25): SEQ ID NO: 5014; WAN024EZN; Start 8; Stop 32
agagccaaggaactaagaaaacgac

SEQ ID NO: 397303 - DNA, 25 bp, Artificial
  probe
  misc_feature (1)..(25): SEQ ID NO: 5014; WAN024EZN; Start 48; Stop 72
cttcatcgaaaagtggatcaataac

SEQ ID NO: 397304 - DNA, 25 bp, Artificial
  probe
  misc_feature (1)..(25): SEQ ID NO: 5014; WAN024EZN; Start 46; Stop 70
gccttcatcgaaaagtggatcaata

SEQ ID NO: 397305 - DNA, 25 bp, Artificial
  probe
  misc_feature (1)..(25): SEQ ID NO: 5014; WAN024EZN; Start 49; Stop 73
ttcatcgaaaagtggatcaataact

SEQ ID NO: 397306 - DNA, 25 bp, Artificial
  probe
  misc_feature (1)..(25): SEQ ID NO: 5014; WAN024EZN; Start 22; Stop 46
aagaaaacgactcctaaagaagccg

SEQ ID NO: 397307 - DNA, 25 bp, Artificial
  probe
  misc_feature (1)..(25): SEQ ID NO: 5014; WAN024EZN; Start 90; Stop 114
ggactacaagtctcccagagaattt

SEQ ID NO: 397308 - DNA, 25 bp, Artificial
  probe
  misc_feature (1)..(25): SEQ ID NO: 5014; WAN024EZN; Start 50; Stop 74
tcatcgaaaagtggatcaataacta

SEQ ID NO: 397309 - DNA, 25 bp, Artificial
  probe
  misc_feature (1)..(25): SEQ ID NO: 5014; WAN024EZN; Start 89; Stop 113
tggactacaagtctcccagagaatt

SEQ ID NO: 397310 - DNA, 25 bp, Artificial
  probe
  misc_feature (1)..(25): SEQ ID NO: 5014; WAN024EZN; Start 88; Stop 112
ttggactacaagtctcccagagaat

SEQ ID NO: 397311 - DNA, 25 bp, Artificial
  probe
  misc_feature (1)..(25): SEQ ID NO: 5014; WAN024EZN; Start 51; Stop 75
catcgaaaagtggatcaataactat

SEQ ID NO: 397312 - DNA, 25 bp, Artificial
  probe
  misc_feature (1)..(25): SEQ ID NO: 5014; WAN024EZN; Start 87; Stop 111
cttggactacaagtctcccagagaa

SEQ ID NO: 397313 - DNA, 25 bp, Artificial
  probe
  misc_feature (1)..(25): SEQ ID NO: 5014; WAN024EZN; Start 52; Stop 76
atcgaaaagtggatcaataactatc

SEQ ID NO: 397314 - DNA, 25 bp, Artificial
  probe
  misc_feature (1)..(25): SEQ ID NO: 5014; WAN024EZN; Start 91; Stop 115
gactacaagtctcccagagaatttt

SEQ ID NO: 397315 - DNA, 25 bp, Artificial
  probe
  misc_feature (1)..(25): SEQ ID NO: 5014; WAN024EZN; Start 54; Stop 78
cgaaaagtggatcaataactatcct

SEQ ID NO: 397316 - DNA, 25 bp, Artificial
  probe
  misc_feature (1)..(25): SEQ ID NO: 5014; WAN024EZN; Start 11; Stop 35
gccaaggaactaagaaaacgactcc

SEQ ID NO: 397317 - DNA, 25 bp, Artificial
  probe
  misc_feature (1)..(25): SEQ ID NO: 5014; WAN024EZN; Start 53; Stop 77
tcgaaaagtggatcaataactatcc

SEQ ID NO: 397318 - DNA, 25 bp, Artificial
  probe
  misc_feature (1)..(25): SEQ ID NO: 5014; WAN024EZN; Start 13; Stop 37
caaggaactaagaaaacgactccta

SEQ ID NO: 397319 - DNA, 25 bp, Artificial
  probe
  misc_feature (1)..(25): SEQ ID NO: 5015; WAN024CCG; Start 75; Stop 99
taagatgaagaaggtgttgatgacg

SEQ ID NO: 397320 - DNA, 25 bp, Artificial
  probe
  misc_feature (1)..(25): SEQ ID NO: 5015; WAN024CCG; Start 74; Stop 98
ataagatgaagaaggtgttgatgac

SEQ ID NO: 397321 - DNA, 25 bp, Artificial
  probe
  misc_feature (1)..(25): SEQ ID NO: 5015; WAN024CCG; Start 73; Stop 97
aataagatgaagaaggtgttgatga

SEQ ID NO: 397322 - DNA, 25 bp, Artificial
  probe
  misc_feature (1)..(25): SEQ ID NO: 5015; WAN024CCG; Start 71; Stop 95
tgaataagatgaagaaggtgttgat

SEQ ID NO: 397323 - DNA, 25 bp, Artificial
  probe
  misc_feature (1)..(25): SEQ ID NO: 5015; WAN024CCG; Start 70; Stop 94
atgaataagatgaagaaggtgttga

SEQ ID NO: 397324 - DNA, 25 bp, Artificial
  probe
  misc_feature (1)..(25): SEQ ID NO: 5015; WAN024CCG; Start 78; Stop 102
gatgaagaaggtgttgatgacgatg

SEQ ID NO: 397325 - DNA, 25 bp, Artificial
  probe
  misc_feature (1)..(25): SEQ ID NO: 5015; WAN024CCG; Start 77; Stop 101
agatgaagaaggtgttgatgacgat

SEQ ID NO: 397326 - DNA, 25 bp, Artificial
  probe
  misc_feature (1)..(25): SEQ ID NO: 5015; WAN024CCG; Start 72; Stop 96
gaataagatgaagaaggtgttgatg

SEQ ID NO: 397327 - DNA, 25 bp, Artificial
  probe
  misc_feature (1)..(25): SEQ ID NO: 5015; WAN024CCG; Start 76; Stop 100
aagatgaagaaggtgttgatgacga

SEQ ID NO: 397328 - DNA, 25 bp, Artificial
  probe
  misc_feature (1)..(25): SEQ ID NO: 5015; WAN024CCG; Start 79; Stop 103
atgaagaaggtgttgatgacgatgt

SEQ ID NO: 397329 - DNA, 25 bp, Artificial
  probe
  misc_feature (1)..(25): SEQ ID NO: 5015; WAN024CCG; Start 299; Stop 323
aactaggtgtcgaattggaactatc

SEQ ID NO: 397330 - DNA, 25 bp, Artificial
  probe
  misc_feature (1)..(25): SEQ ID NO: 5015; WAN024CCG; Start 301; Stop 325
ctaggtgtcgaattggaactatctc

SEQ ID NO: 397331 - DNA, 25 bp, Artificial
  probe
  misc_feature (1)..(25): SEQ ID NO: 5015; WAN024CCG; Start 80; Stop 104
tgaagaaggtgttgatgacgatgtt

SEQ ID NO: 397332 - DNA, 25 bp, Artificial
  probe
  misc_feature (1)..(25): SEQ ID NO: 5015; WAN024CCG; Start 300; Stop 324
actaggtgtcgaattggaactatct

SEQ ID NO: 397333 - DNA, 25 bp, Artificial
  probe
  misc_feature (1)..(25): SEQ ID NO: 5015; WAN024CCG; Start 393; Stop 417
ttctaagacagatgaacggagcaag

SEQ ID NO: 397334 - DNA, 25 bp, Artificial
  probe
  misc_feature (1)..(25): SEQ ID NO: 5015; WAN024CCG; Start 93; Stop 117
gatgacgatgtttggtttagtgatg

SEQ ID NO: 397335 - DNA, 25 bp, Artificial
  probe
  misc_feature (1)..(25): SEQ ID NO: 5015; WAN024CCG; Start 92; Stop 116
tgatgacgatgtttggtttagtgat

SEQ ID NO: 397336 - DNA, 25 bp, Artificial
  probe
  misc_feature (1)..(25): SEQ ID NO: 5015; WAN024CCG; Start 91; Stop 115
ttgatgacgatgtttggtttagtga

SEQ ID NO: 397337 - DNA, 25 bp, Artificial
  probe
  misc_feature (1)..(25): SEQ ID NO: 5015; WAN024CCG; Start 90; Stop 114
gttgatgacgatgtttggtttagtg

SEQ ID NO: 397338 - DNA, 25 bp, Artificial
  probe
  misc_feature (1)..(25): SEQ ID NO: 5015; WAN024CCG; Start 88; Stop 112
gtgttgatgacgatgtttggtttag

SEQ ID NO: 397339 - DNA, 25 bp, Artificial
  probe
  misc_feature (1)..(25): SEQ ID NO: 5015; WAN024CCG; Start 377; Stop 401
ttgccatatcaggtgtttctaagac

SEQ ID NO: 397340 - DNA, 25 bp, Artificial
  probe
  misc_feature (1)..(25): SEQ ID NO: 5015; WAN024CCG; Start 376; Stop 400
cttgccatatcaggtgtttctaaga

SEQ ID NO: 397341 - DNA, 25 bp, Artificial
  probe
  misc_feature (1)..(25): SEQ ID NO: 5015; WAN024CCG; Start 89; Stop 113
tgttgatgacgatgtttggtttagt

SEQ ID NO: 397342 - DNA, 25 bp, Artificial
  probe
  misc_feature (1)..(25): SEQ ID NO: 5015; WAN024CCG; Start 69; Stop 93
tatgaataagatgaagaaggtgttg

SEQ ID NO: 397343 - DNA, 25 bp, Artificial
  probe
  misc_feature (1)..(25): SEQ ID NO: 5015; WAN024CCG; Start 262; Stop 286
ggttcagatatcgaattagccaagg

SEQ ID NO: 397344 - DNA, 25 bp, Artificial
  probe
  misc_feature (1)..(25): SEQ ID NO: 5015; WAN024CCG; Start 698; Stop 722
atttagcaatcgcagacctcaattt

SEQ ID NO: 397345 - DNA, 25 bp, Artificial
  probe
  misc_feature (1)..(25): SEQ ID NO: 5015; WAN024CCG; Start 81; Stop 105
gaagaaggtgttgatgacgatgttt

SEQ ID NO: 397346 - DNA, 25 bp, Artificial
  probe
  misc_feature (1)..(25): SEQ ID NO: 5015; WAN024CCG; Start 380; Stop 404
ccatatcaggtgtttctaagacaga

SEQ ID NO: 397347 - DNA, 25 bp, Artificial
  probe
  misc_feature (1)..(25): SEQ ID NO: 5015; WAN024CCG; Start 384; Stop 408
atcaggtgtttctaagacagatgaa

SEQ ID NO: 397348 - DNA, 25 bp, Artificial
  probe
  misc_feature (1)..(25): SEQ ID NO: 5015; WAN024CCG; Start 385; Stop 409
tcaggtgtttctaagacagatgaac

SEQ ID NO: 397349 - DNA, 25 bp, Artificial
  probe
  misc_feature (1)..(25): SEQ ID NO: 5015; WAN024CCG; Start 87; Stop 111
ggtgttgatgacgatgtttggttta

SEQ ID NO: 397350 - DNA, 25 bp, Artificial
  probe
  misc_feature (1)..(25): SEQ ID NO: 5015; WAN024CCG; Start 82; Stop 106
aagaaggtgttgatgacgatgtttg

SEQ ID NO: 397351 - DNA, 25 bp, Artificial
  probe
  misc_feature (1)..(25): SEQ ID NO: 5015; WAN024CCG; Start 94; Stop 118
atgacgatgtttggtttagtgatgc

SEQ ID NO: 397352 - DNA, 25 bp, Artificial
  probe
  misc_feature (1)..(25): SEQ ID NO: 5016; WAN024F7O; Start 147; Stop 171
gatttccattgagtgttactgctta

SEQ ID NO: 397353 - DNA, 25 bp, Artificial
  probe
  misc_feature (1)..(25): SEQ ID NO: 5016; WAN024F7O; Start 150; Stop 174
ttccattgagtgttactgcttattt

SEQ ID NO: 397354 - DNA, 25 bp, Artificial
  probe
  misc_feature (1)..(25): SEQ ID NO: 5016; WAN024F7O; Start 149; Stop 173
tttccattgagtgttactgcttatt

SEQ ID NO: 397355 - DNA, 25 bp, Artificial
  probe
  misc_feature (1)..(25): SEQ ID NO: 5016; WAN024F7O; Start 148; Stop 172
atttccattgagtgttactgcttat

SEQ ID NO: 397356 - DNA, 25 bp, Artificial
  probe
  misc_feature (1)..(25): SEQ ID NO: 5016; WAN024F7O; Start 146; Stop 170
cgatttccattgagtgttactgctt

SEQ ID NO: 397357 - DNA, 25 bp, Artificial
  probe
  misc_feature (1)..(25): SEQ ID NO: 5016; WAN024F7O; Start 143; Stop 167
tttcgatttccattgagtgttactg

SEQ ID NO: 397358 - DNA, 25 bp, Artificial
  probe
  misc_feature (1)..(25): SEQ ID NO: 5016; WAN024F7O; Start 144; Stop 168
ttcgatttccattgagtgttactgc

SEQ ID NO: 397359 - DNA, 25 bp, Artificial
  probe
  misc_feature (1)..(25): SEQ ID NO: 5016; WAN024F7O; Start 145; Stop 169
tcgatttccattgagtgttactgct

SEQ ID NO: 397360 - DNA, 25 bp, Artificial
  probe
  misc_feature (1)..(25): SEQ ID NO: 5016; WAN024F7O; Start 151; Stop 175
tccattgagtgttactgcttatttt

SEQ ID NO: 397361 - DNA, 25 bp, Artificial
  probe
  misc_feature (1)..(25): SEQ ID NO: 5016; WAN024F7O; Start 152; Stop 176
ccattgagtgttactgcttattttc

SEQ ID NO: 397362 - DNA, 25 bp, Artificial
  probe
  misc_feature (1)..(25): SEQ ID NO: 5016; WAN024F7O; Start 1; Stop 25
ttgacaaatcatttaacaaaggaaa

SEQ ID NO: 397363 - DNA, 25 bp, Artificial
  probe
  misc_feature (1)..(25): SEQ ID NO: 5016; WAN024F7O; Start 134; Stop 158
tagtttgcttttcgatttccattga

SEQ ID NO: 397364 - DNA, 25 bp, Artificial
  probe
  misc_feature (1)..(25): SEQ ID NO: 5016; WAN024F7O; Start 132; Stop 156
cctagtttgcttttcgatttccatt

SEQ ID NO: 397365 - DNA, 25 bp, Artificial
  probe
  misc_feature (1)..(25): SEQ ID NO: 5016; WAN024F7O; Start 140; Stop 164
gcttttcgatttccattgagtgtta

SEQ ID NO: 397366 - DNA, 25 bp, Artificial
  probe
  misc_feature (1)..(25): SEQ ID NO: 5016; WAN024F7O; Start 133; Stop 157
ctagtttgcttttcgatttccattg

SEQ ID NO: 397367 - DNA, 25 bp, Artificial
  probe
  misc_feature (1)..(25): SEQ ID NO: 5016; WAN024F7O; Start 153; Stop 177
cattgagtgttactgcttattttct

SEQ ID NO: 397368 - DNA, 25 bp, Artificial
  probe
  misc_feature (1)..(25): SEQ ID NO: 5016; WAN024F7O; Start 129; Stop 153
cttcctagtttgcttttcgatttcc

SEQ ID NO: 397369 - DNA, 25 bp, Artificial
  probe
  misc_feature (1)..(25): SEQ ID NO: 5016; WAN024F7O; Start 135; Stop 159
agtttgcttttcgatttccattgag

SEQ ID NO: 397370 - DNA, 25 bp, Artificial
  probe
  misc_feature (1)..(25): SEQ ID NO: 5016; WAN024F7O; Start 141; Stop 165
cttttcgatttccattgagtgttac

SEQ ID NO: 397371 - DNA, 25 bp, Artificial
  probe
  misc_feature (1)..(25): SEQ ID NO: 5016; WAN024F7O; Start 137; Stop 161
tttgcttttcgatttccattgagtg

SEQ ID NO: 397372 - DNA, 25 bp, Artificial
  probe
  misc_feature (1)..(25): SEQ ID NO: 5016; WAN024F7O; Start 136; Stop 160
gtttgcttttcgatttccattgagt

SEQ ID NO: 397373 - DNA, 25 bp, Artificial
  probe
  misc_feature (1)..(25): SEQ ID NO: 5016; WAN024F7O; Start 131; Stop 155
tcctagtttgcttttcgatttccat

SEQ ID NO: 397374 - DNA, 25 bp, Artificial
  probe
  misc_feature (1)..(25): SEQ ID NO: 5016; WAN024F7O; Start 130; Stop 154
ttcctagtttgcttttcgatttcca

SEQ ID NO: 397375 - DNA, 25 bp, Artificial
  probe
  misc_feature (1)..(25): SEQ ID NO: 5016; WAN024F7O; Start 128; Stop 152
gcttcctagtttgcttttcgatttc

SEQ ID NO: 397376 - DNA, 25 bp, Artificial
  probe
  misc_feature (1)..(25): SEQ ID NO: 5016; WAN024F7O; Start 142; Stop 166
ttttcgatttccattgagtgttact

SEQ ID NO: 397377 - DNA, 25 bp, Artificial
  probe
  misc_feature (1)..(25): SEQ ID NO: 5016; WAN024F7O; Start 156; Stop 180
tgagtgttactgcttattttctttt

SEQ ID NO: 397378 - DNA, 25 bp, Artificial
  probe
  misc_feature (1)..(25): SEQ ID NO: 5016; WAN024F7O; Start 155; Stop 179
ttgagtgttactgcttattttcttt

SEQ ID NO: 397379 - DNA, 25 bp, Artificial
  probe
  misc_feature (1)..(25): SEQ ID NO: 5016; WAN024F7O; Start 139; Stop 163
tgcttttcgatttccattgagtgtt

SEQ ID NO: 397380 - DNA, 25 bp, Artificial
  probe
  misc_feature (1)..(25): SEQ ID NO: 5016; WAN024F7O; Start 138; Stop 162
ttgcttttcgatttccattgagtgt

SEQ ID NO: 397381 - DNA, 25 bp, Artificial
  probe
  misc_feature (1)..(25): SEQ ID NO: 5016; WAN024F7O; Start 154; Stop 178
attgagtgttactgcttattttctt

SEQ ID NO: 397382 - DNA, 25 bp, Artificial
  probe
  misc_feature (1)..(25): SEQ ID NO: 5016; WAN024F7O; Start 126; Stop 150
tagcttcctagtttgcttttcgatt

SEQ ID NO: 397383 - DNA, 25 bp, Artificial
  probe
  misc_feature (1)..(25): SEQ ID NO: 5016; WAN024F7O; Start 125; Stop 149
ctagcttcctagtttgcttttcgat

SEQ ID NO: 397384 - DNA, 25 bp, Artificial
  probe
  misc_feature (1)..(25): SEQ ID NO: 5016; WAN024F7O; Start 2; Stop 26
tgacaaatcatttaacaaaggaaaa

SEQ ID NO: 397385 - DNA, 25 bp, Artificial
  probe
  misc_feature (1)..(25): SEQ ID NO: 5017; WAN024DFR; Start 313; Stop 337
gctgacttgattgtagaatgtgaat

SEQ ID NO: 397386 - DNA, 25 bp, Artificial
  probe
  misc_feature (1)..(25): SEQ ID NO: 5017; WAN024DFR; Start 307; Stop 331
ttgttggctgacttgattgtagaat

SEQ ID NO: 397387 - DNA, 25 bp, Artificial
  probe
  misc_feature (1)..(25): SEQ ID NO: 5017; WAN024DFR; Start 312; Stop 336
ggctgacttgattgtagaatgtgaa

SEQ ID NO: 397388 - DNA, 25 bp, Artificial
  probe
  misc_feature (1)..(25): SEQ ID NO: 5017; WAN024DFR; Start 310; Stop 334
ttggctgacttgattgtagaatgtg

SEQ ID NO: 397389 - DNA, 25 bp, Artificial
  probe
  misc_feature (1)..(25): SEQ ID NO: 5017; WAN024DFR; Start 309; Stop 333
gttggctgacttgattgtagaatgt

SEQ ID NO: 397390 - DNA, 25 bp, Artificial
  probe
  misc_feature (1)..(25): SEQ ID NO: 5017; WAN024DFR; Start 308; Stop 332
tgttggctgacttgattgtagaatg

SEQ ID NO: 397391 - DNA, 25 bp, Artificial
  probe
  misc_feature (1)..(25): SEQ ID NO: 5017; WAN024DFR; Start 311; Stop 335
tggctgacttgattgtagaatgtga

SEQ ID NO: 397392 - DNA, 25 bp, Artificial
  probe
  misc_feature (1)..(25): SEQ ID NO: 5017; WAN024DFR; Start 338; Stop 362
ttactcagactgacttggaagactt

SEQ ID NO: 397393 - DNA, 25 bp, Artificial
  probe
  misc_feature (1)..(25): SEQ ID NO: 5017; WAN024DFR; Start 314; Stop 338
ctgacttgattgtagaatgtgaatt

SEQ ID NO: 397394 - DNA, 25 bp, Artificial
  probe
  misc_feature (1)..(25): SEQ ID NO: 5017; WAN024DFR; Start 390; Stop 414
aagtgctgtaacagaagtaagatgt

SEQ ID NO: 397395 - DNA, 25 bp, Artificial
  probe
  misc_feature (1)..(25): SEQ ID NO: 5017; WAN024DFR; Start 389; Stop 413
caagtgctgtaacagaagtaagatg

SEQ ID NO: 397396 - DNA, 25 bp, Artificial
  probe
  misc_feature (1)..(25): SEQ ID NO: 5017; WAN024DFR; Start 388; Stop 412
tcaagtgctgtaacagaagtaagat

SEQ ID NO: 397397 - DNA, 25 bp, Artificial
  probe
  misc_feature (1)..(25): SEQ ID NO: 5017; WAN024DFR; Start 387; Stop 411
atcaagtgctgtaacagaagtaaga

SEQ ID NO: 397398 - DNA, 25 bp, Artificial
  probe
  misc_feature (1)..(25): SEQ ID NO: 5017; WAN024DFR; Start 391; Stop 415
agtgctgtaacagaagtaagatgta

SEQ ID NO: 397399 - DNA, 25 bp, Artificial
  probe
  misc_feature (1)..(25): SEQ ID NO: 5017; WAN024DFR; Start 386; Stop 410
aatcaagtgctgtaacagaagtaag

SEQ ID NO: 397400 - DNA, 25 bp, Artificial
  probe
  misc_feature (1)..(25): SEQ ID NO: 5017; WAN024DFR; Start 339; Stop 363
tactcagactgacttggaagacttg

SEQ ID NO: 397401 - DNA, 25 bp, Artificial
  probe
  misc_feature (1)..(25): SEQ ID NO: 5017; WAN024DFR; Start 305; Stop 329
atttgttggctgacttgattgtaga

SEQ ID NO: 397402 - DNA, 25 bp, Artificial
  probe
  misc_feature (1)..(25): SEQ ID NO: 5017; WAN024DFR; Start 304; Stop 328
aatttgttggctgacttgattgtag

SEQ ID NO: 397403 - DNA, 25 bp, Artificial
  probe
  misc_feature (1)..(25): SEQ ID NO: 5017; WAN024DFR; Start 303; Stop 327
gaatttgttggctgacttgattgta

SEQ ID NO: 397404 - DNA, 25 bp, Artificial
  probe
  misc_feature (1)..(25): SEQ ID NO: 5017; WAN024DFR; Start 378; Stop 402
agagaagaaatcaagtgctgtaaca

SEQ ID NO: 397405 - DNA, 25 bp, Artificial
  probe
  misc_feature (1)..(25): SEQ ID NO: 5017; WAN024DFR; Start 297; Stop 321
gattaggaatttgttggctgacttg

SEQ ID NO: 397406 - DNA, 25 bp, Artificial
  probe
  misc_feature (1)..(25): SEQ ID NO: 5017; WAN024DFR; Start 306; Stop 330
tttgttggctgacttgattgtagaa

SEQ ID NO: 397407 - DNA, 25 bp, Artificial
  probe
  misc_feature (1)..(25): SEQ ID NO: 5017; WAN024DFR; Start 392; Stop 416
gtgctgtaacagaagtaagatgtaa

SEQ ID NO: 397408 - DNA, 25 bp, Artificial
  probe
  misc_feature (1)..(25): SEQ ID NO: 5017; WAN024DFR; Start 294; Stop 318
taggattaggaatttgttggctgac

SEQ ID NO: 397409 - DNA, 25 bp, Artificial
  probe
  misc_feature (1)..(25): SEQ ID NO: 5017; WAN024DFR; Start 293; Stop 317
gtaggattaggaatttgttggctga

SEQ ID NO: 397410 - DNA, 25 bp, Artificial
  probe
  misc_feature (1)..(25): SEQ ID NO: 5017; WAN024DFR; Start 300; Stop 324
taggaatttgttggctgacttgatt

SEQ ID NO: 397411 - DNA, 25 bp, Artificial
  probe
  misc_feature (1)..(25): SEQ ID NO: 5017; WAN024DFR; Start 299; Stop 323
ttaggaatttgttggctgacttgat

SEQ ID NO: 397412 - DNA, 25 bp, Artificial
  probe
  misc_feature (1)..(25): SEQ ID NO: 5017; WAN024DFR; Start 298; Stop 322
attaggaatttgttggctgacttga

SEQ ID NO: 397413 - DNA, 25 bp, Artificial
  probe
  misc_feature (1)..(25): SEQ ID NO: 5017; WAN024DFR; Start 208; Stop 232
aagtcctttgtttattcagcccttt

SEQ ID NO: 397414 - DNA, 25 bp, Artificial
  probe
  misc_feature (1)..(25): SEQ ID NO: 5017; WAN024DFR; Start 86; Stop 110
agcagaccagtacagatttgattag

SEQ ID NO: 397415 - DNA, 25 bp, Artificial
  probe
  misc_feature (1)..(25): SEQ ID NO: 5017; WAN024DFR; Start 343; Stop 367
cagactgacttggaagacttggaag

SEQ ID NO: 397416 - DNA, 25 bp, Artificial
  probe
  misc_feature (1)..(25): SEQ ID NO: 5017; WAN024DFR; Start 85; Stop 109
gagcagaccagtacagatttgatta

SEQ ID NO: 397417 - DNA, 25 bp, Artificial
  probe
  misc_feature (1)..(25): SEQ ID NO: 5017; WAN024DFR; Start 88; Stop 112
cagaccagtacagatttgattaggg

SEQ ID NO: 397418 - DNA, 25 bp, Artificial
  probe
  misc_feature (1)..(25): SEQ ID NO: 5018; WAN024DAS; Start 954; Stop 978
tgctgatattacacctgttattgac

SEQ ID NO: 397419 - DNA, 25 bp, Artificial
  probe
  misc_feature (1)..(25): SEQ ID NO: 5018; WAN024DAS; Start 1267; Stop 1291
cttgaagtaggtacagtccacatta

SEQ ID NO: 397420 - DNA, 25 bp, Artificial
  probe
  misc_feature (1)..(25): SEQ ID NO: 5018; WAN024DAS; Start 1268; Stop 1292
ttgaagtaggtacagtccacattaa

SEQ ID NO: 397421 - DNA, 25 bp, Artificial
  probe
  misc_feature (1)..(25): SEQ ID NO: 5018; WAN024DAS; Start 948; Stop 972
tgacaatgctgatattacacctgtt

SEQ ID NO: 397422 - DNA, 25 bp, Artificial
  probe
  misc_feature (1)..(25): SEQ ID NO: 5018; WAN024DAS; Start 947; Stop 971
ttgacaatgctgatattacacctgt

SEQ ID NO: 397423 - DNA, 25 bp, Artificial
  probe
  misc_feature (1)..(25): SEQ ID NO: 5018; WAN024DAS; Start 953; Stop 977
atgctgatattacacctgttattga

SEQ ID NO: 397424 - DNA, 25 bp, Artificial
  probe
  misc_feature (1)..(25): SEQ ID NO: 5018; WAN024DAS; Start 962; Stop 986
ttacacctgttattgacaatgcttc

SEQ ID NO: 397425 - DNA, 25 bp, Artificial
  probe
  misc_feature (1)..(25): SEQ ID NO: 5018; WAN024DAS; Start 955; Stop 979
gctgatattacacctgttattgaca

SEQ ID NO: 397426 - DNA, 25 bp, Artificial
  probe
  misc_feature (1)..(25): SEQ ID NO: 5018; WAN024DAS; Start 949; Stop 973
gacaatgctgatattacacctgtta

SEQ ID NO: 397427 - DNA, 25 bp, Artificial
  probe
  misc_feature (1)..(25): SEQ ID NO: 5018; WAN024DAS; Start 963; Stop 987
tacacctgttattgacaatgcttca

SEQ ID NO: 397428 - DNA, 25 bp, Artificial
  probe
  misc_feature (1)..(25): SEQ ID NO: 5018; WAN024DAS; Start 961; Stop 985
attacacctgttattgacaatgctt

SEQ ID NO: 397429 - DNA, 25 bp, Artificial
  probe
  misc_feature (1)..(25): SEQ ID NO: 5018; WAN024DAS; Start 1269; Stop 1293
tgaagtaggtacagtccacattaat

SEQ ID NO: 397430 - DNA, 25 bp, Artificial
  probe
  misc_feature (1)..(25): SEQ ID NO: 5018; WAN024DAS; Start 1266; Stop 1290
acttgaagtaggtacagtccacatt

SEQ ID NO: 397431 - DNA, 25 bp, Artificial
  probe
  misc_feature (1)..(25): SEQ ID NO: 5018; WAN024DAS; Start 1265; Stop 1289
aacttgaagtaggtacagtccacat

SEQ ID NO: 397432 - DNA, 25 bp, Artificial
  probe
  misc_feature (1)..(25): SEQ ID NO: 5018; WAN024DAS; Start 950; Stop 974
acaatgctgatattacacctgttat

SEQ ID NO: 397433 - DNA, 25 bp, Artificial
  probe
  misc_feature (1)..(25): SEQ ID NO: 5018; WAN024DAS; Start 960; Stop 984
tattacacctgttattgacaatgct

SEQ ID NO: 397434 - DNA, 25 bp, Artificial
  probe
  misc_feature (1)..(25): SEQ ID NO: 5018; WAN024DAS; Start 304; Stop 328
cgtacagcagacttgattcgttatg

SEQ ID NO: 397435 - DNA, 25 bp, Artificial
  probe
  misc_feature (1)..(25): SEQ ID NO: 5018; WAN024DAS; Start 952; Stop 976
aatgctgatattacacctgttattg

SEQ ID NO: 397436 - DNA, 25 bp, Artificial
  probe
  misc_feature (1)..(25): SEQ ID NO: 5018; WAN024DAS; Start 951; Stop 975
caatgctgatattacacctgttatt

SEQ ID NO: 397437 - DNA, 25 bp, Artificial
  probe
  misc_feature (1)..(25): SEQ ID NO: 5018; WAN024DAS; Start 1149; Stop 1173
aatcattcgtgtggctagtgtagag

SEQ ID NO: 397438 - DNA, 25 bp, Artificial
  probe
  misc_feature (1)..(25): SEQ ID NO: 5018; WAN024DAS; Start 1208; Stop 1232
gccttcaatcatcagtctttacaaa

SEQ ID NO: 397439 - DNA, 25 bp, Artificial
  probe
  misc_feature (1)..(25): SEQ ID NO: 5018; WAN024DAS; Start 964; Stop 988
acacctgttattgacaatgcttcag

SEQ ID NO: 397440 - DNA, 25 bp, Artificial
  probe
  misc_feature (1)..(25): SEQ ID NO: 5018; WAN024DAS; Start 1148; Stop 1172
caatcattcgtgtggctagtgtaga

SEQ ID NO: 397441 - DNA, 25 bp, Artificial
  probe
  misc_feature (1)..(25): SEQ ID NO: 5018; WAN024DAS; Start 946; Stop 970
tttgacaatgctgatattacacctg

SEQ ID NO: 397442 - DNA, 25 bp, Artificial
  probe
  misc_feature (1)..(25): SEQ ID NO: 5018; WAN024DAS; Start 668; Stop 692
acttcatcaactttacaggttcaac

SEQ ID NO: 397443 - DNA, 25 bp, Artificial
  probe
  misc_feature (1)..(25): SEQ ID NO: 5018; WAN024DAS; Start 666; Stop 690
caacttcatcaactttacaggttca

SEQ ID NO: 397444 - DNA, 25 bp, Artificial
  probe
  misc_feature (1)..(25): SEQ ID NO: 5018; WAN024DAS; Start 664; Stop 688
gtcaacttcatcaactttacaggtt

SEQ ID NO: 397445 - DNA, 25 bp, Artificial
  probe
  misc_feature (1)..(25): SEQ ID NO: 5018; WAN024DAS; Start 665; Stop 689
tcaacttcatcaactttacaggttc

SEQ ID NO: 397446 - DNA, 25 bp, Artificial
  probe
  misc_feature (1)..(25): SEQ ID NO: 5018; WAN024DAS; Start 567; Stop 591
taaagcatttgaagaagcagggatt

SEQ ID NO: 397447 - DNA, 25 bp, Artificial
  probe
  misc_feature (1)..(25): SEQ ID NO: 5018; WAN024DAS; Start 945; Stop 969
atttgacaatgctgatattacacct

SEQ ID NO: 397448 - DNA, 25 bp, Artificial
  probe
  misc_feature (1)..(25): SEQ ID NO: 5018; WAN024DAS; Start 312; Stop 336
agacttgattcgttatgctgctgag

SEQ ID NO: 397449 - DNA, 25 bp, Artificial
  probe
  misc_feature (1)..(25): SEQ ID NO: 5018; WAN024DAS; Start 546; Stop 570
catttctggactcttgttggctaaa

SEQ ID NO: 397450 - DNA, 25 bp, Artificial
  probe
  misc_feature (1)..(25): SEQ ID NO: 5018; WAN024DAS; Start 1370; Stop 1394
aatatagcattgaagcgatgacaaa

SEQ ID NO: 397451 - DNA, 25 bp, Artificial
  probe
  misc_feature (1)..(25): SEQ ID NO: 5019; WAN024EWX-5; Start 1439; Stop 1463
gttcatcacagttgtcacagttcat

SEQ ID NO: 397452 - DNA, 25 bp, Artificial
  probe
  misc_feature (1)..(25): SEQ ID NO: 5019; WAN024EWX-5; Start 1570; Stop 1594
cactacactcactatggtcgtatgt

SEQ ID NO: 397453 - DNA, 25 bp, Artificial
  probe
  misc_feature (1)..(25): SEQ ID NO: 5019; WAN024EWX-5; Start 1440; Stop 1464
ttcatcacagttgtcacagttcatg

SEQ ID NO: 397454 - DNA, 25 bp, Artificial
  probe
  misc_feature (1)..(25): SEQ ID NO: 5019; WAN024EWX-5; Start 1571; Stop 1595
actacactcactatggtcgtatgtg

SEQ ID NO: 397455 - DNA, 25 bp, Artificial
  probe
  misc_feature (1)..(25): SEQ ID NO: 5019; WAN024EWX-5; Start 175; Stop 199
aaggaagtgtttgaagatgtattgc

SEQ ID NO: 397456 - DNA, 25 bp, Artificial
  probe
  misc_feature (1)..(25): SEQ ID NO: 5019; WAN024EWX-5; Start 1569; Stop 1593
gcactacactcactatggtcgtatg

SEQ ID NO: 397457 - DNA, 25 bp, Artificial
  probe
  misc_feature (1)..(25): SEQ ID NO: 5019; WAN024EWX-5; Start 202; Stop 226
atttcaaacttcacagacacaatgg

SEQ ID NO: 397458 - DNA, 25 bp, Artificial
  probe
  misc_feature (1)..(25): SEQ ID NO: 5019; WAN024EWX-5; Start 509; Stop 533
gctatggttcaactgttatccctaa

SEQ ID NO: 397459 - DNA, 25 bp, Artificial
  probe
  misc_feature (1)..(25): SEQ ID NO: 5019; WAN024EWX-5; Start 211; Stop 235
ttcacagacacaatggagttggaat

SEQ ID NO: 397460 - DNA, 25 bp, Artificial
  probe
  misc_feature (1)..(25): SEQ ID NO: 5019; WAN024EWX-5; Start 1430; Stop 1454
aattctttggttcatcacagttgtc

SEQ ID NO: 397461 - DNA, 25 bp, Artificial
  probe
  misc_feature (1)..(25): SEQ ID NO: 5019; WAN024EWX-5; Start 224; Stop 248
tggagttggaatttgttggatatga

SEQ ID NO: 397462 - DNA, 25 bp, Artificial
  probe
  misc_feature (1)..(25): SEQ ID NO: 5019; WAN024EWX-5; Start 223; Stop 247
atggagttggaatttgttggatatg

SEQ ID NO: 397463 - DNA, 25 bp, Artificial
  probe
  misc_feature (1)..(25): SEQ ID NO: 5019; WAN024EWX-5; Start 225; Stop 249
ggagttggaatttgttggatatgaa

SEQ ID NO: 397464 - DNA, 25 bp, Artificial
  probe
  misc_feature (1)..(25): SEQ ID NO: 5019; WAN024EWX-5; Start 212; Stop 236
tcacagacacaatggagttggaatt

SEQ ID NO: 397465 - DNA, 25 bp, Artificial
  probe
  misc_feature (1)..(25): SEQ ID NO: 5019; WAN024EWX-5; Start 199; Stop 223
ccaatttcaaacttcacagacacaa

SEQ ID NO: 397466 - DNA, 25 bp, Artificial
  probe
  misc_feature (1)..(25): SEQ ID NO: 5019; WAN024EWX-5; Start 945; Stop 969
tgaaactggagaaatcttggtagaa

SEQ ID NO: 397467 - DNA, 25 bp, Artificial
  probe
  misc_feature (1)..(25): SEQ ID NO: 5019; WAN024EWX-5; Start 944; Stop 968
ctgaaactggagaaatcttggtaga

SEQ ID NO: 397468 - DNA, 25 bp, Artificial
  probe
  misc_feature (1)..(25): SEQ ID NO: 5019; WAN024EWX-5; Start 943; Stop 967
cctgaaactggagaaatcttggtag

SEQ ID NO: 397469 - DNA, 25 bp, Artificial
  probe
  misc_feature (1)..(25): SEQ ID NO: 5019; WAN024EWX-5; Start 738; Stop 762
tacagacgaagccttgaaagaaatt

SEQ ID NO: 397470 - DNA, 25 bp, Artificial
  probe
  misc_feature (1)..(25): SEQ ID NO: 5019; WAN024EWX-5; Start 417; Stop 441
catcaatggtggtgaacgtattatc

SEQ ID NO: 397471 - DNA, 25 bp, Artificial
  probe
  misc_feature (1)..(25): SEQ ID NO: 5019; WAN024EWX-5; Start 416; Stop 440
tcatcaatggtggtgaacgtattat

SEQ ID NO: 397472 - DNA, 25 bp, Artificial
  probe
  misc_feature (1)..(25): SEQ ID NO: 5019; WAN024EWX-5; Start 415; Stop 439
atcatcaatggtggtgaacgtatta

SEQ ID NO: 397473 - DNA, 25 bp, Artificial
  probe
  misc_feature (1)..(25): SEQ ID NO: 5019; WAN024EWX-5; Start 946; Stop 970
gaaactggagaaatcttggtagaag

SEQ ID NO: 397474 - DNA, 25 bp, Artificial
  probe
  misc_feature (1)..(25): SEQ ID NO: 5019; WAN024EWX-5; Start 203; Stop 227
tttcaaacttcacagacacaatgga

SEQ ID NO: 397475 - DNA, 25 bp, Artificial
  probe
  misc_feature (1)..(25): SEQ ID NO: 5019; WAN024EWX-5; Start 201; Stop 225
aatttcaaacttcacagacacaatg

SEQ ID NO: 397476 - DNA, 25 bp, Artificial
  probe
  misc_feature (1)..(25): SEQ ID NO: 5019; WAN024EWX-5; Start 200; Stop 224
caatttcaaacttcacagacacaat

SEQ ID NO: 397477 - DNA, 25 bp, Artificial
  probe
  misc_feature (1)..(25): SEQ ID NO: 5019; WAN024EWX-5; Start 8; Stop 32
ggcttggaacttatttacaaaggag

SEQ ID NO: 397478 - DNA, 25 bp, Artificial
  probe
  misc_feature (1)..(25): SEQ ID NO: 5019; WAN024EWX-5; Start 178; Stop 202
gaagtgtttgaagatgtattgccaa

SEQ ID NO: 397479 - DNA, 25 bp, Artificial
  probe
  misc_feature (1)..(25): SEQ ID NO: 5019; WAN024EWX-5; Start 7; Stop 31
aggcttggaacttatttacaaagga

SEQ ID NO: 397480 - DNA, 25 bp, Artificial
  probe
  misc_feature (1)..(25): SEQ ID NO: 5019; WAN024EWX-5; Start 6; Stop 30
aaggcttggaacttatttacaaagg

SEQ ID NO: 397481 - DNA, 25 bp, Artificial
  probe
  misc_feature (1)..(25): SEQ ID NO: 5019; WAN024EWX-5; Start 1436; Stop 1460
ttggttcatcacagttgtcacagtt

SEQ ID NO: 397482 - DNA, 25 bp, Artificial
  probe
  misc_feature (1)..(25): SEQ ID NO: 5019; WAN024EWX-5; Start 1431; Stop 1455
attctttggttcatcacagttgtca

SEQ ID NO: 397483 - DNA, 25 bp, Artificial
  probe
  misc_feature (1)..(25): SEQ ID NO: 5019; WAN024EWX-5; Start 222; Stop 246
aatggagttggaatttgttggatat

SEQ ID NO: 397484 - DNA, 25 bp, Artificial
  probe
  misc_feature (1)..(25): SEQ ID NO: 5020; WAN0249DK; Start 8; Stop 32
ttagcaagaaattgatataatggtt

SEQ ID NO: 397485 - DNA, 25 bp, Artificial
  probe
  misc_feature (1)..(25): SEQ ID NO: 5020; WAN0249DK; Start 1; Stop 25
ttgacaattagcaagaaattgatat

SEQ ID NO: 397486 - DNA, 25 bp, Artificial
  probe
  misc_feature (1)..(25): SEQ ID NO: 5021; WAN024FS9; Start 163; Stop 187
atgaagaaagaaggtctctggcaaa

SEQ ID NO: 397487 - DNA, 25 bp, Artificial
  probe
  misc_feature (1)..(25): SEQ ID NO: 5021; WAN024FS9; Start 157; Stop 181
gaaggcatgaagaaagaaggtctct

SEQ ID NO: 397488 - DNA, 25 bp, Artificial
  probe
  misc_feature (1)..(25): SEQ ID NO: 5021; WAN024FS9; Start 148; Stop 172
aaagaggaggaaggcatgaagaaag

SEQ ID NO: 397489 - DNA, 25 bp, Artificial
  probe
  misc_feature (1)..(25): SEQ ID NO: 5021; WAN024FS9; Start 8; Stop 32
aattggatttggttaattcactctt

SEQ ID NO: 397490 - DNA, 25 bp, Artificial
  probe
  misc_feature (1)..(25): SEQ ID NO: 5021; WAN024FS9; Start 175; Stop 199
ggtctctggcaaaatcataataaca

SEQ ID NO: 397491 - DNA, 25 bp, Artificial
  probe
  misc_feature (1)..(25): SEQ ID NO: 5021; WAN024FS9; Start 158; Stop 182
aaggcatgaagaaagaaggtctctg

SEQ ID NO: 397492 - DNA, 25 bp, Artificial
  probe
  misc_feature (1)..(25): SEQ ID NO: 5021; WAN024FS9; Start 174; Stop 198
aggtctctggcaaaatcataataac

SEQ ID NO: 397493 - DNA, 25 bp, Artificial
  probe
  misc_feature (1)..(25): SEQ ID NO: 5021; WAN024FS9; Start 235; Stop 259
tcccacaaagagaatttgatggaaa

SEQ ID NO: 397494 - DNA, 25 bp, Artificial
  probe
  misc_feature (1)..(25): SEQ ID NO: 5021; WAN024FS9; Start 172; Stop 196
gaaggtctctggcaaaatcataata

SEQ ID NO: 397495 - DNA, 25 bp, Artificial
  probe
  misc_feature (1)..(25): SEQ ID NO: 5021; WAN024FS9; Start 171; Stop 195
agaaggtctctggcaaaatcataat

SEQ ID NO: 397496 - DNA, 25 bp, Artificial
  probe
  misc_feature (1)..(25): SEQ ID NO: 5021; WAN024FS9; Start 17; Stop 41
tggttaattcactcttaacgatggt

SEQ ID NO: 397497 - DNA, 25 bp, Artificial
  probe
  misc_feature (1)..(25): SEQ ID NO: 5021; WAN024FS9; Start 9; Stop 33
attggatttggttaattcactctta

SEQ ID NO: 397498 - DNA, 25 bp, Artificial
  probe
  misc_feature (1)..(25): SEQ ID NO: 5021; WAN024FS9; Start 170; Stop 194
aagaaggtctctggcaaaatcataa

SEQ ID NO: 397499 - DNA, 25 bp, Artificial
  probe
  misc_feature (1)..(25): SEQ ID NO: 5021; WAN024FS9; Start 169; Stop 193
aaagaaggtctctggcaaaatcata

SEQ ID NO: 397500 - DNA, 25 bp, Artificial
  probe
  misc_feature (1)..(25): SEQ ID NO: 5021; WAN024FS9; Start 10; Stop 34
ttggatttggttaattcactcttaa

SEQ ID NO: 397501 - DNA, 25 bp, Artificial
  probe
  misc_feature (1)..(25): SEQ ID NO: 5021; WAN024FS9; Start 234; Stop 258
ctcccacaaagagaatttgatggaa

SEQ ID NO: 397502 - DNA, 25 bp, Artificial
  probe
  misc_feature (1)..(25): SEQ ID NO: 5021; WAN024FS9; Start 162; Stop 186
catgaagaaagaaggtctctggcaa

SEQ ID NO: 397503 - DNA, 25 bp, Artificial
  probe
  misc_feature (1)..(25): SEQ ID NO: 5021; WAN024FS9; Start 18; Stop 42
ggttaattcactcttaacgatggtt

SEQ ID NO: 397504 - DNA, 25 bp, Artificial
  probe
  misc_feature (1)..(25): SEQ ID NO: 5021; WAN024FS9; Start 16; Stop 40
ttggttaattcactcttaacgatgg

SEQ ID NO: 397505 - DNA, 25 bp, Artificial
  probe
  misc_feature (1)..(25): SEQ ID NO: 5021; WAN024FS9; Start 151; Stop 175
gaggaggaaggcatgaagaaagaag

SEQ ID NO: 397506 - DNA, 25 bp, Artificial
  probe
  misc_feature (1)..(25): SEQ ID NO: 5021; WAN024FS9; Start 254; Stop 278
tggaaaagagtaaagaattggtcaa

SEQ ID NO: 397507 - DNA, 25 bp, Artificial
  probe
  misc_feature (1)..(25): SEQ ID NO: 5021; WAN024FS9; Start 173; Stop 197
aaggtctctggcaaaatcataataa

SEQ ID NO: 397508 - DNA, 25 bp, Artificial
  probe
  misc_feature (1)..(25): SEQ ID NO: 5021; WAN024FS9; Start 253; Stop 277
atggaaaagagtaaagaattggtca

SEQ ID NO: 397509 - DNA, 25 bp, Artificial
  probe
  misc_feature (1)..(25): SEQ ID NO: 5021; WAN024FS9; Start 251; Stop 275
tgatggaaaagagtaaagaattggt

SEQ ID NO: 397510 - DNA, 25 bp, Artificial
  probe
  misc_feature (1)..(25): SEQ ID NO: 5021; WAN024FS9; Start 166; Stop 190
aagaaagaaggtctctggcaaaatc

SEQ ID NO: 397511 - DNA, 25 bp, Artificial
  probe
  misc_feature (1)..(25): SEQ ID NO: 5021; WAN024FS9; Start 165; Stop 189
gaagaaagaaggtctctggcaaaat

SEQ ID NO: 397512 - DNA, 25 bp, Artificial
  probe
  misc_feature (1)..(25): SEQ ID NO: 5021; WAN024FS9; Start 154; Stop 178
gaggaaggcatgaagaaagaaggtc

SEQ ID NO: 397513 - DNA, 25 bp, Artificial
  probe
  misc_feature (1)..(25): SEQ ID NO: 5021; WAN024FS9; Start 168; Stop 192
gaaagaaggtctctggcaaaatcat

SEQ ID NO: 397514 - DNA, 25 bp, Artificial
  probe
  misc_feature (1)..(25): SEQ ID NO: 5021; WAN024FS9; Start 252; Stop 276
gatggaaaagagtaaagaattggtc

SEQ ID NO: 397515 - DNA, 25 bp, Artificial
  probe
  misc_feature (1)..(25): SEQ ID NO: 5021; WAN024FS9; Start 150; Stop 174
agaggaggaaggcatgaagaaagaa

SEQ ID NO: 397516 - DNA, 25 bp, Artificial
  probe
  misc_feature (1)..(25): SEQ ID NO: 5021; WAN024FS9; Start 149; Stop 173
aagaggaggaaggcatgaagaaaga

SEQ ID NO: 397517 - DNA, 25 bp, Artificial
  probe
  misc_feature (1)..(25): SEQ ID NO: 5021; WAN024FS9; Start 219; Stop 243
aaagccaggtatcatctcccacaaa

SEQ ID NO: 397518 - DNA, 25 bp, Artificial
  probe
  misc_feature (1)..(25): SEQ ID NO: 5021; WAN024FS9; Start 156; Stop 180
ggaaggcatgaagaaagaaggtctc

SEQ ID NO: 397519 - DNA, 25 bp, Artificial
  probe
  misc_feature (1)..(25): SEQ ID NO: 5022; WAN024FCD; Start 66; Stop 90
caggcttagagagattgatggtaat

SEQ ID NO: 397520 - DNA, 25 bp, Artificial
  probe
  misc_feature (1)..(25): SEQ ID NO: 5022; WAN024FCD; Start 108; Stop 132
cagatggaacacgataagcgatatt

SEQ ID NO: 397521 - DNA, 25 bp, Artificial
  probe
  misc_feature (1)..(25): SEQ ID NO: 5022; WAN024FCD; Start 67; Stop 91
aggcttagagagattgatggtaatt

SEQ ID NO: 397522 - DNA, 25 bp, Artificial
  probe
  misc_feature (1)..(25): SEQ ID NO: 5022; WAN024FCD; Start 65; Stop 89
tcaggcttagagagattgatggtaa

SEQ ID NO: 397523 - DNA, 25 bp, Artificial
  probe
  misc_feature (1)..(25): SEQ ID NO: 5022; WAN024FCD; Start 64; Stop 88
ttcaggcttagagagattgatggta

SEQ ID NO: 397524 - DNA, 25 bp, Artificial
  probe
  misc_feature (1)..(25): SEQ ID NO: 5022; WAN024FCD; Start 107; Stop 131
tcagatggaacacgataagcgatat

SEQ ID NO: 397525 - DNA, 25 bp, Artificial
  probe
  misc_feature (1)..(25): SEQ ID NO: 5022; WAN024FCD; Start 303; Stop 327
tctgactatcctcaatcgtctctaa

SEQ ID NO: 397526 - DNA, 25 bp, Artificial
  probe
  misc_feature (1)..(25): SEQ ID NO: 5022; WAN024FCD; Start 302; Stop 326
gtctgactatcctcaatcgtctcta

SEQ ID NO: 397527 - DNA, 25 bp, Artificial
  probe
  misc_feature (1)..(25): SEQ ID NO: 5022; WAN024FCD; Start 4; Stop 28
acactgaggataattactagcttgc

SEQ ID NO: 397528 - DNA, 25 bp, Artificial
  probe
  misc_feature (1)..(25): SEQ ID NO: 5022; WAN024FCD; Start 2; Stop 26
tgacactgaggataattactagctt

SEQ ID NO: 397529 - DNA, 25 bp, Artificial
  probe
  misc_feature (1)..(25): SEQ ID NO: 5022; WAN024FCD; Start 1; Stop 25
ttgacactgaggataattactagct

SEQ ID NO: 397530 - DNA, 25 bp, Artificial
  probe
  misc_feature (1)..(25): SEQ ID NO: 5022; WAN024FCD; Start 3; Stop 27
gacactgaggataattactagcttg

SEQ ID NO: 397531 - DNA, 25 bp, Artificial
  probe
  misc_feature (1)..(25): SEQ ID NO: 5022; WAN024FCD; Start 6; Stop 30
actgaggataattactagcttgcac

SEQ ID NO: 397532 - DNA, 25 bp, Artificial
  probe
  misc_feature (1)..(25): SEQ ID NO: 5022; WAN024FCD; Start 5; Stop 29
cactgaggataattactagcttgca

SEQ ID NO: 397533 - DNA, 25 bp, Artificial
  probe
  misc_feature (1)..(25): SEQ ID NO: 5022; WAN024FCD; Start 109; Stop 133
agatggaacacgataagcgatattt

SEQ ID NO: 397534 - DNA, 25 bp, Artificial
  probe
  misc_feature (1)..(25): SEQ ID NO: 5022; WAN024FCD; Start 7; Stop 31
ctgaggataattactagcttgcacc

SEQ ID NO: 397535 - DNA, 25 bp, Artificial
  probe
  misc_feature (1)..(25): SEQ ID NO: 5022; WAN024FCD; Start 13; Stop 37
ataattactagcttgcaccaacttg

SEQ ID NO: 397536 - DNA, 25 bp, Artificial
  probe
  misc_feature (1)..(25): SEQ ID NO: 5022; WAN024FCD; Start 12; Stop 36
gataattactagcttgcaccaactt

SEQ ID NO: 397537 - DNA, 25 bp, Artificial
  probe
  misc_feature (1)..(25): SEQ ID NO: 5022; WAN024FCD; Start 9; Stop 33
gaggataattactagcttgcaccaa

SEQ ID NO: 397538 - DNA, 25 bp, Artificial
  probe
  misc_feature (1)..(25): SEQ ID NO: 5022; WAN024FCD; Start 11; Stop 35
ggataattactagcttgcaccaact

SEQ ID NO: 397539 - DNA, 25 bp, Artificial
  probe
  misc_feature (1)..(25): SEQ ID NO: 5022; WAN024FCD; Start 10; Stop 34
aggataattactagcttgcaccaac

SEQ ID NO: 397540 - DNA, 25 bp, Artificial
  probe
  misc_feature (1)..(25): SEQ ID NO: 5022; WAN024FCD; Start 8; Stop 32
tgaggataattactagcttgcacca

SEQ ID NO: 397541 - DNA, 25 bp, Artificial
  probe
  misc_feature (1)..(25): SEQ ID NO: 5022; WAN024FCD; Start 68; Stop 92
ggcttagagagattgatggtaattt

SEQ ID NO: 397542 - DNA, 25 bp, Artificial
  probe
  misc_feature (1)..(25): SEQ ID NO: 5022; WAN024FCD; Start 301; Stop 325
agtctgactatcctcaatcgtctct

SEQ ID NO: 397543 - DNA, 25 bp, Artificial
  probe
  misc_feature (1)..(25): SEQ ID NO: 5022; WAN024FCD; Start 300; Stop 324
cagtctgactatcctcaatcgtctc

SEQ ID NO: 397544 - DNA, 25 bp, Artificial
  probe
  misc_feature (1)..(25): SEQ ID NO: 5022; WAN024FCD; Start 63; Stop 87
tttcaggcttagagagattgatggt

SEQ ID NO: 397545 - DNA, 25 bp, Artificial
  probe
  misc_feature (1)..(25): SEQ ID NO: 5022; WAN024FCD; Start 69; Stop 93
gcttagagagattgatggtaatttc

SEQ ID NO: 397546 - DNA, 25 bp, Artificial
  probe
  misc_feature (1)..(25): SEQ ID NO: 5022; WAN024FCD; Start 14; Stop 38
taattactagcttgcaccaacttgg

SEQ ID NO: 397547 - DNA, 25 bp, Artificial
  probe
  misc_feature (1)..(25): SEQ ID NO: 5022; WAN024FCD; Start 299; Stop 323
gcagtctgactatcctcaatcgtct

SEQ ID NO: 397548 - DNA, 25 bp, Artificial
  probe
  misc_feature (1)..(25): SEQ ID NO: 5022; WAN024FCD; Start 143; Stop 167
gccttgagtttgatgtagtcatttt

SEQ ID NO: 397549 - DNA, 25 bp, Artificial
  probe
  misc_feature (1)..(25): SEQ ID NO: 5022; WAN024FCD; Start 62; Stop 86
ttttcaggcttagagagattgatgg

SEQ ID NO: 397550 - DNA, 25 bp, Artificial
  probe
  misc_feature (1)..(25): SEQ ID NO: 5022; WAN024FCD; Start 70; Stop 94
cttagagagattgatggtaatttca

SEQ ID NO: 397551 - DNA, 25 bp, Artificial
  probe
  misc_feature (1)..(25): SEQ ID NO: 5022; WAN024FCD; Start 78; Stop 102
gattgatggtaatttcaagttctcc

SEQ ID NO: 397552 - DNA, 25 bp, Artificial
  probe
  misc_feature (1)..(25): SEQ ID NO: 5023; WAN024DO3; Start 50; Stop 74
ataacttcttcttggttacaggcat

SEQ ID NO: 397553 - DNA, 25 bp, Artificial
  probe
  misc_feature (1)..(25): SEQ ID NO: 5023; WAN024DO3; Start 49; Stop 73
aataacttcttcttggttacaggca

SEQ ID NO: 397554 - DNA, 25 bp, Artificial
  probe
  misc_feature (1)..(25): SEQ ID NO: 5023; WAN024DO3; Start 51; Stop 75
taacttcttcttggttacaggcatg

SEQ ID NO: 397555 - DNA, 25 bp, Artificial
  probe
  misc_feature (1)..(25): SEQ ID NO: 5023; WAN024DO3; Start 48; Stop 72
aaataacttcttcttggttacaggc

SEQ ID NO: 397556 - DNA, 25 bp, Artificial
  probe
  misc_feature (1)..(25): SEQ ID NO: 5023; WAN024DO3; Start 47; Stop 71
caaataacttcttcttggttacagg

SEQ ID NO: 397557 - DNA, 25 bp, Artificial
  probe
  misc_feature (1)..(25): SEQ ID NO: 5023; WAN024DO3; Start 18; Stop 42
tcttggtaaaatagggattgtcgta

SEQ ID NO: 397558 - DNA, 25 bp, Artificial
  probe
  misc_feature (1)..(25): SEQ ID NO: 5023; WAN024DO3; Start 17; Stop 41
atcttggtaaaatagggattgtcgt

SEQ ID NO: 397559 - DNA, 25 bp, Artificial
  probe
  misc_feature (1)..(25): SEQ ID NO: 5023; WAN024DO3; Start 46; Stop 70
acaaataacttcttcttggttacag

SEQ ID NO: 397560 - DNA, 25 bp, Artificial
  probe
  misc_feature (1)..(25): SEQ ID NO: 5023; WAN024DO3; Start 45; Stop 69
gacaaataacttcttcttggttaca

SEQ ID NO: 397561 - DNA, 25 bp, Artificial
  probe
  misc_feature (1)..(25): SEQ ID NO: 5023; WAN024DO3; Start 21; Stop 45
tggtaaaatagggattgtcgtaaag

SEQ ID NO: 397562 - DNA, 25 bp, Artificial
  probe
  misc_feature (1)..(25): SEQ ID NO: 5023; WAN024DO3; Start 19; Stop 43
cttggtaaaatagggattgtcgtaa

SEQ ID NO: 397563 - DNA, 25 bp, Artificial
  probe
  misc_feature (1)..(25): SEQ ID NO: 5023; WAN024DO3; Start 22; Stop 46
ggtaaaatagggattgtcgtaaaga

SEQ ID NO: 397564 - DNA, 25 bp, Artificial
  probe
  misc_feature (1)..(25): SEQ ID NO: 5023; WAN024DO3; Start 20; Stop 44
ttggtaaaatagggattgtcgtaaa

SEQ ID NO: 397565 - DNA, 25 bp, Artificial
  probe
  misc_feature (1)..(25): SEQ ID NO: 5023; WAN024DO3; Start 44; Stop 68
agacaaataacttcttcttggttac

SEQ ID NO: 397566 - DNA, 25 bp, Artificial
  probe
  misc_feature (1)..(25): SEQ ID NO: 5023; WAN024DO3; Start 37; Stop 61
gtcgtaaagacaaataacttcttct

SEQ ID NO: 397567 - DNA, 25 bp, Artificial
  probe
  misc_feature (1)..(25): SEQ ID NO: 5023; WAN024DO3; Start 42; Stop 66
aaagacaaataacttcttcttggtt

SEQ ID NO: 397568 - DNA, 25 bp, Artificial
  probe
  misc_feature (1)..(25): SEQ ID NO: 5023; WAN024DO3; Start 16; Stop 40
aatcttggtaaaatagggattgtcg

SEQ ID NO: 397569 - DNA, 25 bp, Artificial
  probe
  misc_feature (1)..(25): SEQ ID NO: 5023; WAN024DO3; Start 23; Stop 47
gtaaaatagggattgtcgtaaagac

SEQ ID NO: 397570 - DNA, 25 bp, Artificial
  probe
  misc_feature (1)..(25): SEQ ID NO: 5023; WAN024DO3; Start 39; Stop 63
cgtaaagacaaataacttcttcttg

SEQ ID NO: 397571 - DNA, 25 bp, Artificial
  probe
  misc_feature (1)..(25): SEQ ID NO: 5023; WAN024DO3; Start 38; Stop 62
tcgtaaagacaaataacttcttctt

SEQ ID NO: 397572 - DNA, 25 bp, Artificial
  probe
  misc_feature (1)..(25): SEQ ID NO: 5023; WAN024DO3; Start 43; Stop 67
aagacaaataacttcttcttggtta

SEQ ID NO: 397573 - DNA, 25 bp, Artificial
  probe
  misc_feature (1)..(25): SEQ ID NO: 5023; WAN024DO3; Start 41; Stop 65
taaagacaaataacttcttcttggt

SEQ ID NO: 397574 - DNA, 25 bp, Artificial
  probe
  misc_feature (1)..(25): SEQ ID NO: 5023; WAN024DO3; Start 40; Stop 64
gtaaagacaaataacttcttcttgg

SEQ ID NO: 397575 - DNA, 25 bp, Artificial
  probe
  misc_feature (1)..(25): SEQ ID NO: 5023; WAN024DO3; Start 15; Stop 39
aaatcttggtaaaatagggattgtc

SEQ ID NO: 397576 - DNA, 25 bp, Artificial
  probe
  misc_feature (1)..(25): SEQ ID NO: 5023; WAN024DO3; Start 36; Stop 60
tgtcgtaaagacaaataacttcttc

SEQ ID NO: 397577 - DNA, 25 bp, Artificial
  probe
  misc_feature (1)..(25): SEQ ID NO: 5023; WAN024DO3; Start 14; Stop 38
taaatcttggtaaaatagggattgt

SEQ ID NO: 397578 - DNA, 25 bp, Artificial
  probe
  misc_feature (1)..(25): SEQ ID NO: 5023; WAN024DO3; Start 24; Stop 48
taaaatagggattgtcgtaaagaca

SEQ ID NO: 397579 - DNA, 25 bp, Artificial
  probe
  misc_feature (1)..(25): SEQ ID NO: 5023; WAN024DO3; Start 13; Stop 37
ttaaatcttggtaaaatagggattg

SEQ ID NO: 397580 - DNA, 25 bp, Artificial
  probe
  misc_feature (1)..(25): SEQ ID NO: 5023; WAN024DO3; Start 2; Stop 26
tgacagaaaatttaaatcttggtaa

SEQ ID NO: 397581 - DNA, 25 bp, Artificial
  probe
  misc_feature (1)..(25): SEQ ID NO: 5023; WAN024DO3; Start 1; Stop 25
ttgacagaaaatttaaatcttggta

SEQ ID NO: 397582 - DNA, 25 bp, Artificial
  probe
  misc_feature (1)..(25): SEQ ID NO: 5024; WAN024CSB; Start 809; Stop 833
tggttgagacgattatgaatggtat

SEQ ID NO: 397583 - DNA, 25 bp, Artificial
  probe
  misc_feature (1)..(25): SEQ ID NO: 5024; WAN024CSB; Start 808; Stop 832
atggttgagacgattatgaatggta

SEQ ID NO: 397584 - DNA, 25 bp, Artificial
  probe
  misc_feature (1)..(25): SEQ ID NO: 5024; WAN024CSB; Start 569; Stop 593
ctgatgatgaggttgaagttattgc

SEQ ID NO: 397585 - DNA, 25 bp, Artificial
  probe
  misc_feature (1)..(25): SEQ ID NO: 5024; WAN024CSB; Start 853; Stop 877
tatatcgcagagcaagtatcatcag

SEQ ID NO: 397586 - DNA, 25 bp, Artificial
  probe
  misc_feature (1)..(25): SEQ ID NO: 5024; WAN024CSB; Start 805; Stop 829
gagatggttgagacgattatgaatg

SEQ ID NO: 397587 - DNA, 25 bp, Artificial
  probe
  misc_feature (1)..(25): SEQ ID NO: 5024; WAN024CSB; Start 804; Stop 828
agagatggttgagacgattatgaat

SEQ ID NO: 397588 - DNA, 25 bp, Artificial
  probe
  misc_feature (1)..(25): SEQ ID NO: 5024; WAN024CSB; Start 803; Stop 827
cagagatggttgagacgattatgaa

SEQ ID NO: 397589 - DNA, 25 bp, Artificial
  probe
  misc_feature (1)..(25): SEQ ID NO: 5024; WAN024CSB; Start 570; Stop 594
tgatgatgaggttgaagttattgct

SEQ ID NO: 397590 - DNA, 25 bp, Artificial
  probe
  misc_feature (1)..(25): SEQ ID NO: 5024; WAN024CSB; Start 31; Stop 55
aatggtgttgtattggcttctgata

SEQ ID NO: 397591 - DNA, 25 bp, Artificial
  probe
  misc_feature (1)..(25): SEQ ID NO: 5024; WAN024CSB; Start 806; Stop 830
agatggttgagacgattatgaatgg

SEQ ID NO: 397592 - DNA, 25 bp, Artificial
  probe
  misc_feature (1)..(25): SEQ ID NO: 5024; WAN024CSB; Start 32; Stop 56
atggtgttgtattggcttctgatag

SEQ ID NO: 397593 - DNA, 25 bp, Artificial
  probe
  misc_feature (1)..(25): SEQ ID NO: 5024; WAN024CSB; Start 807; Stop 831
gatggttgagacgattatgaatggt

SEQ ID NO: 397594 - DNA, 25 bp, Artificial
  probe
  misc_feature (1)..(25): SEQ ID NO: 5024; WAN024CSB; Start 862; Stop 886
gagcaagtatcatcagttatggaga

SEQ ID NO: 397595 - DNA, 25 bp, Artificial
  probe
  misc_feature (1)..(25): SEQ ID NO: 5024; WAN024CSB; Start 861; Stop 885
agagcaagtatcatcagttatggag

SEQ ID NO: 397596 - DNA, 25 bp, Artificial
  probe
  misc_feature (1)..(25): SEQ ID NO: 5024; WAN024CSB; Start 860; Stop 884
cagagcaagtatcatcagttatgga

SEQ ID NO: 397597 - DNA, 25 bp, Artificial
  probe
  misc_feature (1)..(25): SEQ ID NO: 5024; WAN024CSB; Start 645; Stop 669
tggattagttatagcaggttatggt

SEQ ID NO: 397598 - DNA, 25 bp, Artificial
  probe
  misc_feature (1)..(25): SEQ ID NO: 5024; WAN024CSB; Start 863; Stop 887
agcaagtatcatcagttatggagaa

SEQ ID NO: 397599 - DNA, 25 bp, Artificial
  probe
  misc_feature (1)..(25): SEQ ID NO: 5024; WAN024CSB; Start 571; Stop 595
gatgatgaggttgaagttattgcta

SEQ ID NO: 397600 - DNA, 25 bp, Artificial
  probe
  misc_feature (1)..(25): SEQ ID NO: 5024; WAN024CSB; Start 572; Stop 596
atgatgaggttgaagttattgctaa

SEQ ID NO: 397601 - DNA, 25 bp, Artificial
  probe
  misc_feature (1)..(25): SEQ ID NO: 5024; WAN024CSB; Start 659; Stop 683
caggttatggtacagacgagatatt

SEQ ID NO: 397602 - DNA, 25 bp, Artificial
  probe
  misc_feature (1)..(25): SEQ ID NO: 5024; WAN024CSB; Start 651; Stop 675
agttatagcaggttatggtacagac

SEQ ID NO: 397603 - DNA, 25 bp, Artificial
  probe
  misc_feature (1)..(25): SEQ ID NO: 5024; WAN024CSB; Start 810; Stop 834
ggttgagacgattatgaatggtata

SEQ ID NO: 397604 - DNA, 25 bp, Artificial
  probe
  misc_feature (1)..(25): SEQ ID NO: 5024; WAN024CSB; Start 852; Stop 876
atatatcgcagagcaagtatcatca

SEQ ID NO: 397605 - DNA, 25 bp, Artificial
  probe
  misc_feature (1)..(25): SEQ ID NO: 5024; WAN024CSB; Start 854; Stop 878
atatcgcagagcaagtatcatcagt

SEQ ID NO: 397606 - DNA, 25 bp, Artificial
  probe
  misc_feature (1)..(25): SEQ ID NO: 5024; WAN024CSB; Start 568; Stop 592
actgatgatgaggttgaagttattg

SEQ ID NO: 397607 - DNA, 25 bp, Artificial
  probe
  misc_feature (1)..(25): SEQ ID NO: 5024; WAN024CSB; Start 859; Stop 883
gcagagcaagtatcatcagttatgg

SEQ ID NO: 397608 - DNA, 25 bp, Artificial
  probe
  misc_feature (1)..(25): SEQ ID NO: 5024; WAN024CSB; Start 653; Stop 677
ttatagcaggttatggtacagacga

SEQ ID NO: 397609 - DNA, 25 bp, Artificial
  probe
  misc_feature (1)..(25): SEQ ID NO: 5024; WAN024CSB; Start 652; Stop 676
gttatagcaggttatggtacagacg

SEQ ID NO: 397610 - DNA, 25 bp, Artificial
  probe
  misc_feature (1)..(25): SEQ ID NO: 5024; WAN024CSB; Start 849; Stop 873
tgtatatatcgcagagcaagtatca

SEQ ID NO: 397611 - DNA, 25 bp, Artificial
  probe
  misc_feature (1)..(25): SEQ ID NO: 5024; WAN024CSB; Start 802; Stop 826
tcagagatggttgagacgattatga

SEQ ID NO: 397612 - DNA, 25 bp, Artificial
  probe
  misc_feature (1)..(25): SEQ ID NO: 5024; WAN024CSB; Start 857; Stop 881
tcgcagagcaagtatcatcagttat

SEQ ID NO: 397613 - DNA, 25 bp, Artificial
  probe
  misc_feature (1)..(25): SEQ ID NO: 5024; WAN024CSB; Start 856; Stop 880
atcgcagagcaagtatcatcagtta

SEQ ID NO: 397614 - DNA, 25 bp, Artificial
  probe
  misc_feature (1)..(25): SEQ ID NO: 5024; WAN024CSB; Start 855; Stop 879
tatcgcagagcaagtatcatcagtt

SEQ ID NO: 397615 - DNA, 25 bp, Artificial
  probe
  misc_feature (1)..(25): SEQ ID NO: 5025; WAN0249DF; Start 31; Stop 55
agagaaaagatgtgttagtgtagaa

SEQ ID NO: 397616 - DNA, 25 bp, Artificial
  probe
  misc_feature (1)..(25): SEQ ID NO: 5025; WAN0249DF; Start 30; Stop 54
aagagaaaagatgtgttagtgtaga

SEQ ID NO: 397617 - DNA, 25 bp, Artificial
  probe
  misc_feature (1)..(25): SEQ ID NO: 5025; WAN0249DF; Start 27; Stop 51
cataagagaaaagatgtgttagtgt

SEQ ID NO: 397618 - DNA, 25 bp, Artificial
  probe
  misc_feature (1)..(25): SEQ ID NO: 5025; WAN0249DF; Start 32; Stop 56
gagaaaagatgtgttagtgtagaat

SEQ ID NO: 397619 - DNA, 25 bp, Artificial
  probe
  misc_feature (1)..(25): SEQ ID NO: 5025; WAN0249DF; Start 33; Stop 57
agaaaagatgtgttagtgtagaatc

SEQ ID NO: 397620 - DNA, 25 bp, Artificial
  probe
  misc_feature (1)..(25): SEQ ID NO: 5025; WAN0249DF; Start 29; Stop 53
taagagaaaagatgtgttagtgtag

SEQ ID NO: 397621 - DNA, 25 bp, Artificial
  probe
  misc_feature (1)..(25): SEQ ID NO: 5025; WAN0249DF; Start 21; Stop 45
gctttacataagagaaaagatgtgt

SEQ ID NO: 397622 - DNA, 25 bp, Artificial
  probe
  misc_feature (1)..(25): SEQ ID NO: 5025; WAN0249DF; Start 28; Stop 52
ataagagaaaagatgtgttagtgta

SEQ ID NO: 397623 - DNA, 25 bp, Artificial
  probe
  misc_feature (1)..(25): SEQ ID NO: 5025; WAN0249DF; Start 26; Stop 50
acataagagaaaagatgtgttagtg

SEQ ID NO: 397624 - DNA, 25 bp, Artificial
  probe
  misc_feature (1)..(25): SEQ ID NO: 5025; WAN0249DF; Start 20; Stop 44
agctttacataagagaaaagatgtg

SEQ ID NO: 397625 - DNA, 25 bp, Artificial
  probe
  misc_feature (1)..(25): SEQ ID NO: 5025; WAN0249DF; Start 25; Stop 49
tacataagagaaaagatgtgttagt

SEQ ID NO: 397626 - DNA, 25 bp, Artificial
  probe
  misc_feature (1)..(25): SEQ ID NO: 5025; WAN0249DF; Start 22; Stop 46
ctttacataagagaaaagatgtgtt

SEQ ID NO: 397627 - DNA, 25 bp, Artificial
  probe
  misc_feature (1)..(25): SEQ ID NO: 5025; WAN0249DF; Start 19; Stop 43
aagctttacataagagaaaagatgt

SEQ ID NO: 397628 - DNA, 25 bp, Artificial
  probe
  misc_feature (1)..(25): SEQ ID NO: 5026; WAN024DYK; Start 13; Stop 37
ccctcacttgacagcatatacatat

SEQ ID NO: 397629 - DNA, 25 bp, Artificial
  probe
  misc_feature (1)..(25): SEQ ID NO: 5026; WAN024DYK; Start 14; Stop 38
cctcacttgacagcatatacatatg

SEQ ID NO: 397630 - DNA, 25 bp, Artificial
  probe
  misc_feature (1)..(25): SEQ ID NO: 5026; WAN024DYK; Start 130; Stop 154
atacggccaatagctagtatcactc

SEQ ID NO: 397631 - DNA, 25 bp, Artificial
  probe
  misc_feature (1)..(25): SEQ ID NO: 5026; WAN024DYK; Start 172; Stop 196
atggcaactggtagaacaattctaa

SEQ ID NO: 397632 - DNA, 25 bp, Artificial
  probe
  misc_feature (1)..(25): SEQ ID NO: 5026; WAN024DYK; Start 171; Stop 195
catggcaactggtagaacaattcta

SEQ ID NO: 397633 - DNA, 25 bp, Artificial
  probe
  misc_feature (1)..(25): SEQ ID NO: 5026; WAN024DYK; Start 12; Stop 36
cccctcacttgacagcatatacata

SEQ ID NO: 397634 - DNA, 25 bp, Artificial
  probe
  misc_feature (1)..(25): SEQ ID NO: 5026; WAN024DYK; Start 125; Stop 149
caacgatacggccaatagctagtat

SEQ ID NO: 397635 - DNA, 25 bp, Artificial
  probe
  misc_feature (1)..(25): SEQ ID NO: 5026; WAN024DYK; Start 169; Stop 193
ggcatggcaactggtagaacaattc

SEQ ID NO: 397636 - DNA, 25 bp, Artificial
  probe
  misc_feature (1)..(25): SEQ ID NO: 5026; WAN024DYK; Start 131; Stop 155
tacggccaatagctagtatcactcc

SEQ ID NO: 397637 - DNA, 25 bp, Artificial
  probe
  misc_feature (1)..(25): SEQ ID NO: 5026; WAN024DYK; Start 170; Stop 194
gcatggcaactggtagaacaattct

SEQ ID NO: 397638 - DNA, 25 bp, Artificial
  probe
  misc_feature (1)..(25): SEQ ID NO: 5026; WAN024DYK; Start 173; Stop 197
tggcaactggtagaacaattctaaa

SEQ ID NO: 397639 - DNA, 25 bp, Artificial
  probe
  misc_feature (1)..(25): SEQ ID NO: 5026; WAN024DYK; Start 145; Stop 169
agtatcactccagctaaaatacctg

SEQ ID NO: 397640 - DNA, 25 bp, Artificial
  probe
  misc_feature (1)..(25): SEQ ID NO: 5026; WAN024DYK; Start 124; Stop 148
ccaacgatacggccaatagctagta

SEQ ID NO: 397641 - DNA, 25 bp, Artificial
  probe
  misc_feature (1)..(25): SEQ ID NO: 5026; WAN024DYK; Start 144; Stop 168
tagtatcactccagctaaaatacct

SEQ ID NO: 397642 - DNA, 25 bp, Artificial
  probe
  misc_feature (1)..(25): SEQ ID NO: 5026; WAN024DYK; Start 143; Stop 167
ctagtatcactccagctaaaatacc

SEQ ID NO: 397643 - DNA, 25 bp, Artificial
  probe
  misc_feature (1)..(25): SEQ ID NO: 5026; WAN024DYK; Start 44; Stop 68
ctagagaacggcctgaagacatgag

SEQ ID NO: 397644 - DNA, 25 bp, Artificial
  probe
  misc_feature (1)..(25): SEQ ID NO: 5026; WAN024DYK; Start 9; Stop 33
tagcccctcacttgacagcatatac

SEQ ID NO: 397645 - DNA, 25 bp, Artificial
  probe
  misc_feature (1)..(25): SEQ ID NO: 5026; WAN024DYK; Start 8; Stop 32
gtagcccctcacttgacagcatata

SEQ ID NO: 397646 - DNA, 25 bp, Artificial
  probe
  misc_feature (1)..(25): SEQ ID NO: 5026; WAN024DYK; Start 133; Stop 157
cggccaatagctagtatcactccag

SEQ ID NO: 397647 - DNA, 25 bp, Artificial
  probe
  misc_feature (1)..(25): SEQ ID NO: 5026; WAN024DYK; Start 142; Stop 166
gctagtatcactccagctaaaatac

SEQ ID NO: 397648 - DNA, 25 bp, Artificial
  probe
  misc_feature (1)..(25): SEQ ID NO: 5026; WAN024DYK; Start 45; Stop 69
tagagaacggcctgaagacatgaga

SEQ ID NO: 397649 - DNA, 25 bp, Artificial
  probe
  misc_feature (1)..(25): SEQ ID NO: 5026; WAN024DYK; Start 129; Stop 153
gatacggccaatagctagtatcact

SEQ ID NO: 397650 - DNA, 25 bp, Artificial
  probe
  misc_feature (1)..(25): SEQ ID NO: 5026; WAN024DYK; Start 48; Stop 72
agaacggcctgaagacatgagacta

SEQ ID NO: 397651 - DNA, 25 bp, Artificial
  probe
  misc_feature (1)..(25): SEQ ID NO: 5026; WAN024DYK; Start 126; Stop 150
aacgatacggccaatagctagtatc

SEQ ID NO: 397652 - DNA, 25 bp, Artificial
  probe
  misc_feature (1)..(25): SEQ ID NO: 5026; WAN024DYK; Start 132; Stop 156
acggccaatagctagtatcactcca

SEQ ID NO: 397653 - DNA, 25 bp, Artificial
  probe
  misc_feature (1)..(25): SEQ ID NO: 5026; WAN024DYK; Start 11; Stop 35
gcccctcacttgacagcatatacat

SEQ ID NO: 397654 - DNA, 25 bp, Artificial
  probe
  misc_feature (1)..(25): SEQ ID NO: 5026; WAN024DYK; Start 174; Stop 198
ggcaactggtagaacaattctaaaa

SEQ ID NO: 397655 - DNA, 25 bp, Artificial
  probe
  misc_feature (1)..(25): SEQ ID NO: 5026; WAN024DYK; Start 158; Stop 182
ctaaaatacctggcatggcaactgg

SEQ ID NO: 397656 - DNA, 25 bp, Artificial
  probe
  misc_feature (1)..(25): SEQ ID NO: 5026; WAN024DYK; Start 128; Stop 152
cgatacggccaatagctagtatcac

SEQ ID NO: 397657 - DNA, 25 bp, Artificial
  probe
  misc_feature (1)..(25): SEQ ID NO: 5026; WAN024DYK; Start 207; Stop 231
taacttacctgccccaagtccataa

SEQ ID NO: 397658 - DNA, 25 bp, Artificial
  probe
  misc_feature (1)..(25): SEQ ID NO: 5026; WAN024DYK; Start 134; Stop 158
ggccaatagctagtatcactccagc

SEQ ID NO: 397659 - DNA, 25 bp, Artificial
  probe
  misc_feature (1)..(25): SEQ ID NO: 5026; WAN024DYK; Start 127; Stop 151
acgatacggccaatagctagtatca

SEQ ID NO: 397660 - DNA, 25 bp, Artificial
  probe
  misc_feature (1)..(25): SEQ ID NO: 5026; WAN024DYK; Start 157; Stop 181
gctaaaatacctggcatggcaactg

SEQ ID NO: 397661 - DNA, 25 bp, Artificial
  probe
  misc_feature (1)..(25): SEQ ID NO: 5027; WAN024GB4; Start 4; Stop 28
acattatcttcaatccatttacggc

SEQ ID NO: 397662 - DNA, 25 bp, Artificial
  probe
  misc_feature (1)..(25): SEQ ID NO: 5027; WAN024GB4; Start 5; Stop 29
cattatcttcaatccatttacggcg

SEQ ID NO: 397663 - DNA, 25 bp, Artificial
  probe
  misc_feature (1)..(25): SEQ ID NO: 5027; WAN024GB4; Start 204; Stop 228
ctgtttacggagttcttctagttct

SEQ ID NO: 397664 - DNA, 25 bp, Artificial
  probe
  misc_feature (1)..(25): SEQ ID NO: 5027; WAN024GB4; Start 153; Stop 177
attcatctcaccaagtcctttgtat

SEQ ID NO: 397665 - DNA, 25 bp, Artificial
  probe
  misc_feature (1)..(25): SEQ ID NO: 5027; WAN024GB4; Start 154; Stop 178
ttcatctcaccaagtcctttgtatc

SEQ ID NO: 397666 - DNA, 25 bp, Artificial
  probe
  misc_feature (1)..(25): SEQ ID NO: 5027; WAN024GB4; Start 152; Stop 176
cattcatctcaccaagtcctttgta

SEQ ID NO: 397667 - DNA, 25 bp, Artificial
  probe
  misc_feature (1)..(25): SEQ ID NO: 5027; WAN024GB4; Start 6; Stop 30
attatcttcaatccatttacggcgt

SEQ ID NO: 397668 - DNA, 25 bp, Artificial
  probe
  misc_feature (1)..(25): SEQ ID NO: 5027; WAN024GB4; Start 203; Stop 227
actgtttacggagttcttctagttc

SEQ ID NO: 397669 - DNA, 25 bp, Artificial
  probe
  misc_feature (1)..(25): SEQ ID NO: 5027; WAN024GB4; Start 3; Stop 27
gacattatcttcaatccatttacgg

SEQ ID NO: 397670 - DNA, 25 bp, Artificial
  probe
  misc_feature (1)..(25): SEQ ID NO: 5027; WAN024GB4; Start 205; Stop 229
tgtttacggagttcttctagttctc

SEQ ID NO: 397671 - DNA, 25 bp, Artificial
  probe
  misc_feature (1)..(25): SEQ ID NO: 5027; WAN024GB4; Start 157; Stop 181
atctcaccaagtcctttgtatcgtt

SEQ ID NO: 397672 - DNA, 25 bp, Artificial
  probe
  misc_feature (1)..(25): SEQ ID NO: 5027; WAN024GB4; Start 7; Stop 31
ttatcttcaatccatttacggcgtg

SEQ ID NO: 397673 - DNA, 25 bp, Artificial
  probe
  misc_feature (1)..(25): SEQ ID NO: 5027; WAN024GB4; Start 155; Stop 179
tcatctcaccaagtcctttgtatcg

SEQ ID NO: 397674 - DNA, 25 bp, Artificial
  probe
  misc_feature (1)..(25): SEQ ID NO: 5027; WAN024GB4; Start 156; Stop 180
catctcaccaagtcctttgtatcgt

SEQ ID NO: 397675 - DNA, 25 bp, Artificial
  probe
  misc_feature (1)..(25): SEQ ID NO: 5027; WAN024GB4; Start 2; Stop 26
tgacattatcttcaatccatttacg

SEQ ID NO: 397676 - DNA, 25 bp, Artificial
  probe
  misc_feature (1)..(25): SEQ ID NO: 5027; WAN024GB4; Start 158; Stop 182
tctcaccaagtcctttgtatcgttg

SEQ ID NO: 397677 - DNA, 25 bp, Artificial
  probe
  misc_feature (1)..(25): SEQ ID NO: 5027; WAN024GB4; Start 83; Stop 107
aatcttcaattgtgacacggatgag

SEQ ID NO: 397678 - DNA, 25 bp, Artificial
  probe
  misc_feature (1)..(25): SEQ ID NO: 5027; WAN024GB4; Start 113; Stop 137
gtgtttctgggttcatggttgtttc

SEQ ID NO: 397679 - DNA, 25 bp, Artificial
  probe
  misc_feature (1)..(25): SEQ ID NO: 5027; WAN024GB4; Start 29; Stop 53
gtggttctaccttatctcccatgag

SEQ ID NO: 397680 - DNA, 25 bp, Artificial
  probe
  misc_feature (1)..(25): SEQ ID NO: 5027; WAN024GB4; Start 202; Stop 226
aactgtttacggagttcttctagtt

SEQ ID NO: 397681 - DNA, 25 bp, Artificial
  probe
  misc_feature (1)..(25): SEQ ID NO: 5027; WAN024GB4; Start 213; Stop 237
gagttcttctagttctccgtccgtc

SEQ ID NO: 397682 - DNA, 25 bp, Artificial
  probe
  misc_feature (1)..(25): SEQ ID NO: 5027; WAN024GB4; Start 151; Stop 175
gcattcatctcaccaagtcctttgt

SEQ ID NO: 397683 - DNA, 25 bp, Artificial
  probe
  misc_feature (1)..(25): SEQ ID NO: 5027; WAN024GB4; Start 81; Stop 105
taaatcttcaattgtgacacggatg

SEQ ID NO: 397684 - DNA, 25 bp, Artificial
  probe
  misc_feature (1)..(25): SEQ ID NO: 5027; WAN024GB4; Start 20; Stop 44
atttacggcgtggttctaccttatc

SEQ ID NO: 397685 - DNA, 25 bp, Artificial
  probe
  misc_feature (1)..(25): SEQ ID NO: 5027; WAN024GB4; Start 80; Stop 104
ctaaatcttcaattgtgacacggat

SEQ ID NO: 397686 - DNA, 25 bp, Artificial
  probe
  misc_feature (1)..(25): SEQ ID NO: 5027; WAN024GB4; Start 22; Stop 46
ttacggcgtggttctaccttatctc

SEQ ID NO: 397687 - DNA, 25 bp, Artificial
  probe
  misc_feature (1)..(25): SEQ ID NO: 5027; WAN024GB4; Start 165; Stop 189
aagtcctttgtatcgttggagggta

SEQ ID NO: 397688 - DNA, 25 bp, Artificial
  probe
  misc_feature (1)..(25): SEQ ID NO: 5027; WAN024GB4; Start 19; Stop 43
catttacggcgtggttctaccttat

SEQ ID NO: 397689 - DNA, 25 bp, Artificial
  probe
  misc_feature (1)..(25): SEQ ID NO: 5027; WAN024GB4; Start 82; Stop 106
aaatcttcaattgtgacacggatga

SEQ ID NO: 397690 - DNA, 25 bp, Artificial
  probe
  misc_feature (1)..(25): SEQ ID NO: 5027; WAN024GB4; Start 36; Stop 60
taccttatctcccatgagaacattg

SEQ ID NO: 397691 - DNA, 25 bp, Artificial
  probe
  misc_feature (1)..(25): SEQ ID NO: 5027; WAN024GB4; Start 34; Stop 58
tctaccttatctcccatgagaacat

SEQ ID NO: 397692 - DNA, 25 bp, Artificial
  probe
  misc_feature (1)..(25): SEQ ID NO: 5027; WAN024GB4; Start 35; Stop 59
ctaccttatctcccatgagaacatt

SEQ ID NO: 397693 - DNA, 25 bp, Artificial
  probe
  misc_feature (1)..(25): SEQ ID NO: 5027; WAN024GB4; Start 33; Stop 57
ttctaccttatctcccatgagaaca

SEQ ID NO: 397694 - DNA, 25 bp, Artificial
  probe
  misc_feature (1)..(25): SEQ ID NO: 5028; WAN024BGW; Start 38; Stop 62
tcctgcgaaacaaaatatggtatag

SEQ ID NO: 397695 - DNA, 25 bp, Artificial
  probe
  misc_feature (1)..(25): SEQ ID NO: 5028; WAN024BGW; Start 42; Stop 66
gcgaaacaaaatatggtatagtagt

SEQ ID NO: 397696 - DNA, 25 bp, Artificial
  probe
  misc_feature (1)..(25): SEQ ID NO: 5028; WAN024BGW; Start 41; Stop 65
tgcgaaacaaaatatggtatagtag

SEQ ID NO: 397697 - DNA, 25 bp, Artificial
  probe
  misc_feature (1)..(25): SEQ ID NO: 5028; WAN024BGW; Start 40; Stop 64
ctgcgaaacaaaatatggtatagta

SEQ ID NO: 397698 - DNA, 25 bp, Artificial
  probe
  misc_feature (1)..(25): SEQ ID NO: 5028; WAN024BGW; Start 43; Stop 67
cgaaacaaaatatggtatagtagtt

SEQ ID NO: 397699 - DNA, 25 bp, Artificial
  probe
  misc_feature (1)..(25): SEQ ID NO: 5029; WAN024FJ4; Start 94; Stop 118
tgtatccacttgaatcatctcttgt

SEQ ID NO: 397700 - DNA, 25 bp, Artificial
  probe
  misc_feature (1)..(25): SEQ ID NO: 5029; WAN024FJ4; Start 97; Stop 121
atccacttgaatcatctcttgttgt

SEQ ID NO: 397701 - DNA, 25 bp, Artificial
  probe
  misc_feature (1)..(25): SEQ ID NO: 5029; WAN024FJ4; Start 101; Stop 125
acttgaatcatctcttgttgtggat

SEQ ID NO: 397702 - DNA, 25 bp, Artificial
  probe
  misc_feature (1)..(25): SEQ ID NO: 5029; WAN024FJ4; Start 221; Stop 245
atagacacattctcactcttcttgg

SEQ ID NO: 397703 - DNA, 25 bp, Artificial
  probe
  misc_feature (1)..(25): SEQ ID NO: 5029; WAN024FJ4; Start 96; Stop 120
tatccacttgaatcatctcttgttg

SEQ ID NO: 397704 - DNA, 25 bp, Artificial
  probe
  misc_feature (1)..(25): SEQ ID NO: 5029; WAN024FJ4; Start 95; Stop 119
gtatccacttgaatcatctcttgtt

SEQ ID NO: 397705 - DNA, 25 bp, Artificial
  probe
  misc_feature (1)..(25): SEQ ID NO: 5029; WAN024FJ4; Start 93; Stop 117
ttgtatccacttgaatcatctcttg

SEQ ID NO: 397706 - DNA, 25 bp, Artificial
  probe
  misc_feature (1)..(25): SEQ ID NO: 5029; WAN024FJ4; Start 229; Stop 253
attctcactcttcttggcaatcttg

SEQ ID NO: 397707 - DNA, 25 bp, Artificial
  probe
  misc_feature (1)..(25): SEQ ID NO: 5029; WAN024FJ4; Start 228; Stop 252
cattctcactcttcttggcaatctt

SEQ ID NO: 397708 - DNA, 25 bp, Artificial
  probe
  misc_feature (1)..(25): SEQ ID NO: 5029; WAN024FJ4; Start 220; Stop 244
gatagacacattctcactcttcttg

SEQ ID NO: 397709 - DNA, 25 bp, Artificial
  probe
  misc_feature (1)..(25): SEQ ID NO: 5029; WAN024FJ4; Start 219; Stop 243
tgatagacacattctcactcttctt

SEQ ID NO: 397710 - DNA, 25 bp, Artificial
  probe
  misc_feature (1)..(25): SEQ ID NO: 5029; WAN024FJ4; Start 235; Stop 259
actcttcttggcaatcttgtcaatt

SEQ ID NO: 397711 - DNA, 25 bp, Artificial
  probe
  misc_feature (1)..(25): SEQ ID NO: 5029; WAN024FJ4; Start 234; Stop 258
cactcttcttggcaatcttgtcaat

SEQ ID NO: 397712 - DNA, 25 bp, Artificial
  probe
  misc_feature (1)..(25): SEQ ID NO: 5029; WAN024FJ4; Start 226; Stop 250
cacattctcactcttcttggcaatc

SEQ ID NO: 397713 - DNA, 25 bp, Artificial
  probe
  misc_feature (1)..(25): SEQ ID NO: 5029; WAN024FJ4; Start 227; Stop 251
acattctcactcttcttggcaatct

SEQ ID NO: 397714 - DNA, 25 bp, Artificial
  probe
  misc_feature (1)..(25): SEQ ID NO: 5029; WAN024FJ4; Start 230; Stop 254
ttctcactcttcttggcaatcttgt

SEQ ID NO: 397715 - DNA, 25 bp, Artificial
  probe
  misc_feature (1)..(25): SEQ ID NO: 5029; WAN024FJ4; Start 100; Stop 124
cacttgaatcatctcttgttgtgga

SEQ ID NO: 397716 - DNA, 25 bp, Artificial
  probe
  misc_feature (1)..(25): SEQ ID NO: 5029; WAN024FJ4; Start 98; Stop 122
tccacttgaatcatctcttgttgtg

SEQ ID NO: 397717 - DNA, 25 bp, Artificial
  probe
  misc_feature (1)..(25): SEQ ID NO: 5029; WAN024FJ4; Start 222; Stop 246
tagacacattctcactcttcttggc

SEQ ID NO: 397718 - DNA, 25 bp, Artificial
  probe
  misc_feature (1)..(25): SEQ ID NO: 5029; WAN024FJ4; Start 225; Stop 249
acacattctcactcttcttggcaat

SEQ ID NO: 397719 - DNA, 25 bp, Artificial
  probe
  misc_feature (1)..(25): SEQ ID NO: 5029; WAN024FJ4; Start 231; Stop 255
tctcactcttcttggcaatcttgtc

SEQ ID NO: 397720 - DNA, 25 bp, Artificial
  probe
  misc_feature (1)..(25): SEQ ID NO: 5029; WAN024FJ4; Start 233; Stop 257
tcactcttcttggcaatcttgtcaa

SEQ ID NO: 397721 - DNA, 25 bp, Artificial
  probe
  misc_feature (1)..(25): SEQ ID NO: 5029; WAN024FJ4; Start 232; Stop 256
ctcactcttcttggcaatcttgtca

SEQ ID NO: 397722 - DNA, 25 bp, Artificial
  probe
  misc_feature (1)..(25): SEQ ID NO: 5029; WAN024FJ4; Start 257; Stop 281
atttcatccacatagataatgccac

SEQ ID NO: 397723 - DNA, 25 bp, Artificial
  probe
  misc_feature (1)..(25): SEQ ID NO: 5029; WAN024FJ4; Start 239; Stop 263
ttcttggcaatcttgtcaatttcat

SEQ ID NO: 397724 - DNA, 25 bp, Artificial
  probe
  misc_feature (1)..(25): SEQ ID NO: 5029; WAN024FJ4; Start 240; Stop 264
tcttggcaatcttgtcaatttcatc

SEQ ID NO: 397725 - DNA, 25 bp, Artificial
  probe
  misc_feature (1)..(25): SEQ ID NO: 5029; WAN024FJ4; Start 237; Stop 261
tcttcttggcaatcttgtcaatttc

SEQ ID NO: 397726 - DNA, 25 bp, Artificial
  probe
  misc_feature (1)..(25): SEQ ID NO: 5029; WAN024FJ4; Start 236; Stop 260
ctcttcttggcaatcttgtcaattt

SEQ ID NO: 397727 - DNA, 25 bp, Artificial
  probe
  misc_feature (1)..(25): SEQ ID NO: 5029; WAN024FJ4; Start 258; Stop 282
tttcatccacatagataatgccacg

SEQ ID NO: 397728 - DNA, 25 bp, Artificial
  probe
  misc_feature (1)..(25): SEQ ID NO: 5029; WAN024FJ4; Start 238; Stop 262
cttcttggcaatcttgtcaatttca

SEQ ID NO: 397729 - DNA, 25 bp, Artificial
  probe
  misc_feature (1)..(25): SEQ ID NO: 5029; WAN024FJ4; Start 224; Stop 248
gacacattctcactcttcttggcaa

SEQ ID NO: 397730 - DNA, 25 bp, Artificial
  probe
  misc_feature (1)..(25): SEQ ID NO: 5029; WAN024FJ4; Start 259; Stop 283
ttcatccacatagataatgccacgc

SEQ ID NO: 397731 - DNA, 25 bp, Artificial
  probe
  misc_feature (1)..(25): SEQ ID NO: 5029; WAN024FJ4; Start 241; Stop 265
cttggcaatcttgtcaatttcatcc

SEQ ID NO: 397732 - DNA, 25 bp, Artificial
  probe
  misc_feature (1)..(25): SEQ ID NO: 5030; WAN024FC6; Start 447; Stop 471
gaaccacacgaataatcacatcatc

SEQ ID NO: 397733 - DNA, 25 bp, Artificial
  probe
  misc_feature (1)..(25): SEQ ID NO: 5030; WAN024FC6; Start 455; Stop 479
cgaataatcacatcatccgcttcta

SEQ ID NO: 397734 - DNA, 25 bp, Artificial
  probe
  misc_feature (1)..(25): SEQ ID NO: 5030; WAN024FC6; Start 448; Stop 472
aaccacacgaataatcacatcatcc

SEQ ID NO: 397735 - DNA, 25 bp, Artificial
  probe
  misc_feature (1)..(25): SEQ ID NO: 5030; WAN024FC6; Start 456; Stop 480
gaataatcacatcatccgcttctat

SEQ ID NO: 397736 - DNA, 25 bp, Artificial
  probe
  misc_feature (1)..(25): SEQ ID NO: 5030; WAN024FC6; Start 460; Stop 484
aatcacatcatccgcttctattatt

SEQ ID NO: 397737 - DNA, 25 bp, Artificial
  probe
  misc_feature (1)..(25): SEQ ID NO: 5030; WAN024FC6; Start 446; Stop 470
cgaaccacacgaataatcacatcat

SEQ ID NO: 397738 - DNA, 25 bp, Artificial
  probe
  misc_feature (1)..(25): SEQ ID NO: 5030; WAN024FC6; Start 457; Stop 481
aataatcacatcatccgcttctatt

SEQ ID NO: 397739 - DNA, 25 bp, Artificial
  probe
  misc_feature (1)..(25): SEQ ID NO: 5030; WAN024FC6; Start 444; Stop 468
cacgaaccacacgaataatcacatc

SEQ ID NO: 397740 - DNA, 25 bp, Artificial
  probe
  misc_feature (1)..(25): SEQ ID NO: 5030; WAN024FC6; Start 459; Stop 483
taatcacatcatccgcttctattat

SEQ ID NO: 397741 - DNA, 25 bp, Artificial
  probe
  misc_feature (1)..(25): SEQ ID NO: 5030; WAN024FC6; Start 458; Stop 482
ataatcacatcatccgcttctatta

SEQ ID NO: 397742 - DNA, 25 bp, Artificial
  probe
  misc_feature (1)..(25): SEQ ID NO: 5030; WAN024FC6; Start 454; Stop 478
acgaataatcacatcatccgcttct

SEQ ID NO: 397743 - DNA, 25 bp, Artificial
  probe
  misc_feature (1)..(25): SEQ ID NO: 5030; WAN024FC6; Start 453; Stop 477
cacgaataatcacatcatccgcttc

SEQ ID NO: 397744 - DNA, 25 bp, Artificial
  probe
  misc_feature (1)..(25): SEQ ID NO: 5030; WAN024FC6; Start 445; Stop 469
acgaaccacacgaataatcacatca

SEQ ID NO: 397745 - DNA, 25 bp, Artificial
  probe
  misc_feature (1)..(25): SEQ ID NO: 5030; WAN024FC6; Start 413; Stop 437
tacctccataaatctgaaccacaaa

SEQ ID NO: 397746 - DNA, 25 bp, Artificial
  probe
  misc_feature (1)..(25): SEQ ID NO: 5030; WAN024FC6; Start 463; Stop 487
cacatcatccgcttctattatttgc

SEQ ID NO: 397747 - DNA, 25 bp, Artificial
  probe
  misc_feature (1)..(25): SEQ ID NO: 5030; WAN024FC6; Start 462; Stop 486
tcacatcatccgcttctattatttg

SEQ ID NO: 397748 - DNA, 25 bp, Artificial
  probe
  misc_feature (1)..(25): SEQ ID NO: 5030; WAN024FC6; Start 452; Stop 476
acacgaataatcacatcatccgctt

SEQ ID NO: 397749 - DNA, 25 bp, Artificial
  probe
  misc_feature (1)..(25): SEQ ID NO: 5030; WAN024FC6; Start 414; Stop 438
acctccataaatctgaaccacaaac

SEQ ID NO: 397750 - DNA, 25 bp, Artificial
  probe
  misc_feature (1)..(25): SEQ ID NO: 5030; WAN024FC6; Start 461; Stop 485
atcacatcatccgcttctattattt

SEQ ID NO: 397751 - DNA, 25 bp, Artificial
  probe
  misc_feature (1)..(25): SEQ ID NO: 5030; WAN024FC6; Start 449; Stop 473
accacacgaataatcacatcatccg

SEQ ID NO: 397752 - DNA, 25 bp, Artificial
  probe
  misc_feature (1)..(25): SEQ ID NO: 5030; WAN024FC6; Start 412; Stop 436
gtacctccataaatctgaaccacaa

SEQ ID NO: 397753 - DNA, 25 bp, Artificial
  probe
  misc_feature (1)..(25): SEQ ID NO: 5030; WAN024FC6; Start 227; Stop 251
atatgattgtcgcaagaaccgtcaa

SEQ ID NO: 397754 - DNA, 25 bp, Artificial
  probe
  misc_feature (1)..(25): SEQ ID NO: 5030; WAN024FC6; Start 226; Stop 250
aatatgattgtcgcaagaaccgtca

SEQ ID NO: 397755 - DNA, 25 bp, Artificial
  probe
  misc_feature (1)..(25): SEQ ID NO: 5030; WAN024FC6; Start 415; Stop 439
cctccataaatctgaaccacaaacg

SEQ ID NO: 397756 - DNA, 25 bp, Artificial
  probe
  misc_feature (1)..(25): SEQ ID NO: 5030; WAN024FC6; Start 451; Stop 475
cacacgaataatcacatcatccgct

SEQ ID NO: 397757 - DNA, 25 bp, Artificial
  probe
  misc_feature (1)..(25): SEQ ID NO: 5030; WAN024FC6; Start 416; Stop 440
ctccataaatctgaaccacaaacgc

SEQ ID NO: 397758 - DNA, 25 bp, Artificial
  probe
  misc_feature (1)..(25): SEQ ID NO: 5030; WAN024FC6; Start 345; Stop 369
cttcttcaacaatcccaatcgcttc

SEQ ID NO: 397759 - DNA, 25 bp, Artificial
  probe
  misc_feature (1)..(25): SEQ ID NO: 5030; WAN024FC6; Start 169; Stop 193
gtttgcatagtggaagcgaatatat

SEQ ID NO: 397760 - DNA, 25 bp, Artificial
  probe
  misc_feature (1)..(25): SEQ ID NO: 5030; WAN024FC6; Start 168; Stop 192
agtttgcatagtggaagcgaatata

SEQ ID NO: 397761 - DNA, 25 bp, Artificial
  probe
  misc_feature (1)..(25): SEQ ID NO: 5030; WAN024FC6; Start 474; Stop 498
cttctattatttgcggacgttcaat

SEQ ID NO: 397762 - DNA, 25 bp, Artificial
  probe
  misc_feature (1)..(25): SEQ ID NO: 5030; WAN024FC6; Start 225; Stop 249
caatatgattgtcgcaagaaccgtc

SEQ ID NO: 397763 - DNA, 25 bp, Artificial
  probe
  misc_feature (1)..(25): SEQ ID NO: 5030; WAN024FC6; Start 475; Stop 499
ttctattatttgcggacgttcaatg

SEQ ID NO: 397764 - DNA, 25 bp, Artificial
  probe
  misc_feature (1)..(25): SEQ ID NO: 5030; WAN024FC6; Start 443; Stop 467
gcacgaaccacacgaataatcacat

SEQ ID NO: 397765 - DNA, 25 bp, Artificial
  probe
  misc_feature (1)..(25): SEQ ID NO: 5031; WAN024CRN; Start 36; Stop 60
ggtaattcttataaagctgaacggc

SEQ ID NO: 397766 - DNA, 25 bp, Artificial
  probe
  misc_feature (1)..(25): SEQ ID NO: 5031; WAN024CRN; Start 35; Stop 59
tggtaattcttataaagctgaacgg

SEQ ID NO: 397767 - DNA, 25 bp, Artificial
  probe
  misc_feature (1)..(25): SEQ ID NO: 5031; WAN024CRN; Start 283; Stop 307
cgccataaactgggtaacattagat

SEQ ID NO: 397768 - DNA, 25 bp, Artificial
  probe
  misc_feature (1)..(25): SEQ ID NO: 5031; WAN024CRN; Start 21; Stop 45
tgtactcacctgtttggtaattctt

SEQ ID NO: 397769 - DNA, 25 bp, Artificial
  probe
  misc_feature (1)..(25): SEQ ID NO: 5031; WAN024CRN; Start 20; Stop 44
atgtactcacctgtttggtaattct

SEQ ID NO: 397770 - DNA, 25 bp, Artificial
  probe
  misc_feature (1)..(25): SEQ ID NO: 5031; WAN024CRN; Start 19; Stop 43
catgtactcacctgtttggtaattc

SEQ ID NO: 397771 - DNA, 25 bp, Artificial
  probe
  misc_feature (1)..(25): SEQ ID NO: 5031; WAN024CRN; Start 284; Stop 308
gccataaactgggtaacattagata

SEQ ID NO: 397772 - DNA, 25 bp, Artificial
  probe
  misc_feature (1)..(25): SEQ ID NO: 5031; WAN024CRN; Start 22; Stop 46
gtactcacctgtttggtaattctta

SEQ ID NO: 397773 - DNA, 25 bp, Artificial
  probe
  misc_feature (1)..(25): SEQ ID NO: 5031; WAN024CRN; Start 18; Stop 42
gcatgtactcacctgtttggtaatt

SEQ ID NO: 397774 - DNA, 25 bp, Artificial
  probe
  misc_feature (1)..(25): SEQ ID NO: 5031; WAN024CRN; Start 34; Stop 58
ttggtaattcttataaagctgaacg

SEQ ID NO: 397775 - DNA, 25 bp, Artificial
  probe
  misc_feature (1)..(25): SEQ ID NO: 5031; WAN024CRN; Start 24; Stop 48
actcacctgtttggtaattcttata

SEQ ID NO: 397776 - DNA, 25 bp, Artificial
  probe
  misc_feature (1)..(25): SEQ ID NO: 5031; WAN024CRN; Start 23; Stop 47
tactcacctgtttggtaattcttat

SEQ ID NO: 397777 - DNA, 25 bp, Artificial
  probe
  misc_feature (1)..(25): SEQ ID NO: 5031; WAN024CRN; Start 17; Stop 41
agcatgtactcacctgtttggtaat

SEQ ID NO: 397778 - DNA, 25 bp, Artificial
  probe
  misc_feature (1)..(25): SEQ ID NO: 5031; WAN024CRN; Start 282; Stop 306
ccgccataaactgggtaacattaga

SEQ ID NO: 397779 - DNA, 25 bp, Artificial
  probe
  misc_feature (1)..(25): SEQ ID NO: 5031; WAN024CRN; Start 281; Stop 305
tccgccataaactgggtaacattag

SEQ ID NO: 397780 - DNA, 25 bp, Artificial
  probe
  misc_feature (1)..(25): SEQ ID NO: 5031; WAN024CRN; Start 29; Stop 53
cctgtttggtaattcttataaagct

SEQ ID NO: 397781 - DNA, 25 bp, Artificial
  probe
  misc_feature (1)..(25): SEQ ID NO: 5031; WAN024CRN; Start 37; Stop 61
gtaattcttataaagctgaacggct

SEQ ID NO: 397782 - DNA, 25 bp, Artificial
  probe
  misc_feature (1)..(25): SEQ ID NO: 5031; WAN024CRN; Start 38; Stop 62
taattcttataaagctgaacggctc

SEQ ID NO: 397783 - DNA, 25 bp, Artificial
  probe
  misc_feature (1)..(25): SEQ ID NO: 5031; WAN024CRN; Start 28; Stop 52
acctgtttggtaattcttataaagc

SEQ ID NO: 397784 - DNA, 25 bp, Artificial
  probe
  misc_feature (1)..(25): SEQ ID NO: 5031; WAN024CRN; Start 39; Stop 63
aattcttataaagctgaacggctcc

SEQ ID NO: 397785 - DNA, 25 bp, Artificial
  probe
  misc_feature (1)..(25): SEQ ID NO: 5031; WAN024CRN; Start 285; Stop 309
ccataaactgggtaacattagatag

SEQ ID NO: 397786 - DNA, 25 bp, Artificial
  probe
  misc_feature (1)..(25): SEQ ID NO: 5031; WAN024CRN; Start 16; Stop 40
cagcatgtactcacctgtttggtaa

SEQ ID NO: 397787 - DNA, 25 bp, Artificial
  probe
  misc_feature (1)..(25): SEQ ID NO: 5031; WAN024CRN; Start 31; Stop 55
tgtttggtaattcttataaagctga

SEQ ID NO: 397788 - DNA, 25 bp, Artificial
  probe
  misc_feature (1)..(25): SEQ ID NO: 5031; WAN024CRN; Start 40; Stop 64
attcttataaagctgaacggctcct

SEQ ID NO: 397789 - DNA, 25 bp, Artificial
  probe
  misc_feature (1)..(25): SEQ ID NO: 5031; WAN024CRN; Start 44; Stop 68
ttataaagctgaacggctccttctt

SEQ ID NO: 397790 - DNA, 25 bp, Artificial
  probe
  misc_feature (1)..(25): SEQ ID NO: 5031; WAN024CRN; Start 41; Stop 65
ttcttataaagctgaacggctcctt

SEQ ID NO: 397791 - DNA, 25 bp, Artificial
  probe
  misc_feature (1)..(25): SEQ ID NO: 5031; WAN024CRN; Start 30; Stop 54
ctgtttggtaattcttataaagctg

SEQ ID NO: 397792 - DNA, 25 bp, Artificial
  probe
  misc_feature (1)..(25): SEQ ID NO: 5031; WAN024CRN; Start 25; Stop 49
ctcacctgtttggtaattcttataa

SEQ ID NO: 397793 - DNA, 25 bp, Artificial
  probe
  misc_feature (1)..(25): SEQ ID NO: 5031; WAN024CRN; Start 43; Stop 67
cttataaagctgaacggctccttct

SEQ ID NO: 397794 - DNA, 25 bp, Artificial
  probe
  misc_feature (1)..(25): SEQ ID NO: 5031; WAN024CRN; Start 42; Stop 66
tcttataaagctgaacggctccttc

SEQ ID NO: 397795 - DNA, 25 bp, Artificial
  probe
  misc_feature (1)..(25): SEQ ID NO: 5031; WAN024CRN; Start 229; Stop 253
gtaaaccccgataatatcacctgcc

SEQ ID NO: 397796 - DNA, 25 bp, Artificial
  probe
  misc_feature (1)..(25): SEQ ID NO: 5031; WAN024CRN; Start 45; Stop 69
tataaagctgaacggctccttcttg

SEQ ID NO: 397797 - DNA, 25 bp, Artificial
  probe
  misc_feature (1)..(25): SEQ ID NO: 5031; WAN024CRN; Start 26; Stop 50
tcacctgtttggtaattcttataaa

SEQ ID NO: 397798 - DNA, 25 bp, Artificial
  probe
  misc_feature (1)..(25): SEQ ID NO: 5032; WAN024CXO; Start 198; Stop 222
cagcattagcgaatacaaccaactt

SEQ ID NO: 397799 - DNA, 25 bp, Artificial
  probe
  misc_feature (1)..(25): SEQ ID NO: 5032; WAN024CXO; Start 196; Stop 220
aacagcattagcgaatacaaccaac

SEQ ID NO: 397800 - DNA, 25 bp, Artificial
  probe
  misc_feature (1)..(25): SEQ ID NO: 5032; WAN024CXO; Start 195; Stop 219
caacagcattagcgaatacaaccaa

SEQ ID NO: 397801 - DNA, 25 bp, Artificial
  probe
  misc_feature (1)..(25): SEQ ID NO: 5032; WAN024CXO; Start 199; Stop 223
agcattagcgaatacaaccaacttg

SEQ ID NO: 397802 - DNA, 25 bp, Artificial
  probe
  misc_feature (1)..(25): SEQ ID NO: 5032; WAN024CXO; Start 193; Stop 217
ctcaacagcattagcgaatacaacc

SEQ ID NO: 397803 - DNA, 25 bp, Artificial
  probe
  misc_feature (1)..(25): SEQ ID NO: 5032; WAN024CXO; Start 192; Stop 216
cctcaacagcattagcgaatacaac

SEQ ID NO: 397804 - DNA, 25 bp, Artificial
  probe
  misc_feature (1)..(25): SEQ ID NO: 5032; WAN024CXO; Start 191; Stop 215
tcctcaacagcattagcgaatacaa

SEQ ID NO: 397805 - DNA, 25 bp, Artificial
  probe
  misc_feature (1)..(25): SEQ ID NO: 5032; WAN024CXO; Start 120; Stop 144
cagaaactccgacattgatgataac

SEQ ID NO: 397806 - DNA, 25 bp, Artificial
  probe
  misc_feature (1)..(25): SEQ ID NO: 5032; WAN024CXO; Start 121; Stop 145
agaaactccgacattgatgataaca

SEQ ID NO: 397807 - DNA, 25 bp, Artificial
  probe
  misc_feature (1)..(25): SEQ ID NO: 5032; WAN024CXO; Start 119; Stop 143
ccagaaactccgacattgatgataa

SEQ ID NO: 397808 - DNA, 25 bp, Artificial
  probe
  misc_feature (1)..(25): SEQ ID NO: 5032; WAN024CXO; Start 122; Stop 146
gaaactccgacattgatgataacat

SEQ ID NO: 397809 - DNA, 25 bp, Artificial
  probe
  misc_feature (1)..(25): SEQ ID NO: 5032; WAN024CXO; Start 197; Stop 221
acagcattagcgaatacaaccaact

SEQ ID NO: 397810 - DNA, 25 bp, Artificial
  probe
  misc_feature (1)..(25): SEQ ID NO: 5032; WAN024CXO; Start 194; Stop 218
tcaacagcattagcgaatacaacca

SEQ ID NO: 397811 - DNA, 25 bp, Artificial
  probe
  misc_feature (1)..(25): SEQ ID NO: 5032; WAN024CXO; Start 190; Stop 214
gtcctcaacagcattagcgaataca

SEQ ID NO: 397812 - DNA, 25 bp, Artificial
  probe
  misc_feature (1)..(25): SEQ ID NO: 5032; WAN024CXO; Start 188; Stop 212
ttgtcctcaacagcattagcgaata

SEQ ID NO: 397813 - DNA, 25 bp, Artificial
  probe
  misc_feature (1)..(25): SEQ ID NO: 5032; WAN024CXO; Start 182; Stop 206
aatggattgtcctcaacagcattag

SEQ ID NO: 397814 - DNA, 25 bp, Artificial
  probe
  misc_feature (1)..(25): SEQ ID NO: 5032; WAN024CXO; Start 118; Stop 142
accagaaactccgacattgatgata

SEQ ID NO: 397815 - DNA, 25 bp, Artificial
  probe
  misc_feature (1)..(25): SEQ ID NO: 5032; WAN024CXO; Start 44; Stop 68
ttcttaactgtttcggctactacat

SEQ ID NO: 397816 - DNA, 25 bp, Artificial
  probe
  misc_feature (1)..(25): SEQ ID NO: 5032; WAN024CXO; Start 48; Stop 72
taactgtttcggctactacatcaaa

SEQ ID NO: 397817 - DNA, 25 bp, Artificial
  probe
  misc_feature (1)..(25): SEQ ID NO: 5032; WAN024CXO; Start 47; Stop 71
ttaactgtttcggctactacatcaa

SEQ ID NO: 397818 - DNA, 25 bp, Artificial
  probe
  misc_feature (1)..(25): SEQ ID NO: 5032; WAN024CXO; Start 43; Stop 67
tttcttaactgtttcggctactaca

SEQ ID NO: 397819 - DNA, 25 bp, Artificial
  probe
  misc_feature (1)..(25): SEQ ID NO: 5032; WAN024CXO; Start 45; Stop 69
tcttaactgtttcggctactacatc

SEQ ID NO: 397820 - DNA, 25 bp, Artificial
  probe
  misc_feature (1)..(25): SEQ ID NO: 5032; WAN024CXO; Start 46; Stop 70
cttaactgtttcggctactacatca

SEQ ID NO: 397821 - DNA, 25 bp, Artificial
  probe
  misc_feature (1)..(25): SEQ ID NO: 5032; WAN024CXO; Start 187; Stop 211
attgtcctcaacagcattagcgaat

SEQ ID NO: 397822 - DNA, 25 bp, Artificial
  probe
  misc_feature (1)..(25): SEQ ID NO: 5032; WAN024CXO; Start 49; Stop 73
aactgtttcggctactacatcaaag

SEQ ID NO: 397823 - DNA, 25 bp, Artificial
  probe
  misc_feature (1)..(25): SEQ ID NO: 5032; WAN024CXO; Start 189; Stop 213
tgtcctcaacagcattagcgaatac

SEQ ID NO: 397824 - DNA, 25 bp, Artificial
  probe
  misc_feature (1)..(25): SEQ ID NO: 5032; WAN024CXO; Start 130; Stop 154
gacattgatgataacatctgcttcc

SEQ ID NO: 397825 - DNA, 25 bp, Artificial
  probe
  misc_feature (1)..(25): SEQ ID NO: 5032; WAN024CXO; Start 124; Stop 148
aactccgacattgatgataacatct

SEQ ID NO: 397826 - DNA, 25 bp, Artificial
  probe
  misc_feature (1)..(25): SEQ ID NO: 5032; WAN024CXO; Start 129; Stop 153
cgacattgatgataacatctgcttc

SEQ ID NO: 397827 - DNA, 25 bp, Artificial
  probe
  misc_feature (1)..(25): SEQ ID NO: 5032; WAN024CXO; Start 179; Stop 203
ataaatggattgtcctcaacagcat

SEQ ID NO: 397828 - DNA, 25 bp, Artificial
  probe
  misc_feature (1)..(25): SEQ ID NO: 5032; WAN024CXO; Start 125; Stop 149
actccgacattgatgataacatctg

SEQ ID NO: 397829 - DNA, 25 bp, Artificial
  probe
  misc_feature (1)..(25): SEQ ID NO: 5032; WAN024CXO; Start 117; Stop 141
gaccagaaactccgacattgatgat

SEQ ID NO: 397830 - DNA, 25 bp, Artificial
  probe
  misc_feature (1)..(25): SEQ ID NO: 5032; WAN024CXO; Start 128; Stop 152
ccgacattgatgataacatctgctt

SEQ ID NO: 397831 - DNA, 25 bp, Artificial
  probe
  misc_feature (1)..(25): SEQ ID NO: 5033; WAN024FZD; Start 65; Stop 89
ttatcataggtgaactctctcgttg

SEQ ID NO: 397832 - DNA, 25 bp, Artificial
  probe
  misc_feature (1)..(25): SEQ ID NO: 5033; WAN024FZD; Start 62; Stop 86
ggattatcataggtgaactctctcg

SEQ ID NO: 397833 - DNA, 25 bp, Artificial
  probe
  misc_feature (1)..(25): SEQ ID NO: 5033; WAN024FZD; Start 63; Stop 87
gattatcataggtgaactctctcgt

SEQ ID NO: 397834 - DNA, 25 bp, Artificial
  probe
  misc_feature (1)..(25): SEQ ID NO: 5033; WAN024FZD; Start 64; Stop 88
attatcataggtgaactctctcgtt

SEQ ID NO: 397835 - DNA, 25 bp, Artificial
  probe
  misc_feature (1)..(25): SEQ ID NO: 5033; WAN024FZD; Start 25; Stop 49
aatgtattcaatagtgtgacggacc

SEQ ID NO: 397836 - DNA, 25 bp, Artificial
  probe
  misc_feature (1)..(25): SEQ ID NO: 5033; WAN024FZD; Start 24; Stop 48
taatgtattcaatagtgtgacggac

SEQ ID NO: 397837 - DNA, 25 bp, Artificial
  probe
  misc_feature (1)..(25): SEQ ID NO: 5033; WAN024FZD; Start 29; Stop 53
tattcaatagtgtgacggaccaact

SEQ ID NO: 397838 - DNA, 25 bp, Artificial
  probe
  misc_feature (1)..(25): SEQ ID NO: 5033; WAN024FZD; Start 28; Stop 52
gtattcaatagtgtgacggaccaac

SEQ ID NO: 397839 - DNA, 25 bp, Artificial
  probe
  misc_feature (1)..(25): SEQ ID NO: 5033; WAN024FZD; Start 26; Stop 50
atgtattcaatagtgtgacggacca

SEQ ID NO: 397840 - DNA, 25 bp, Artificial
  probe
  misc_feature (1)..(25): SEQ ID NO: 5033; WAN024FZD; Start 27; Stop 51
tgtattcaatagtgtgacggaccaa

SEQ ID NO: 397841 - DNA, 25 bp, Artificial
  probe
  misc_feature (1)..(25): SEQ ID NO: 5033; WAN024FZD; Start 23; Stop 47
ttaatgtattcaatagtgtgacgga

SEQ ID NO: 397842 - DNA, 25 bp, Artificial
  probe
  misc_feature (1)..(25): SEQ ID NO: 5033; WAN024FZD; Start 22; Stop 46
cttaatgtattcaatagtgtgacgg

SEQ ID NO: 397843 - DNA, 25 bp, Artificial
  probe
  misc_feature (1)..(25): SEQ ID NO: 5033; WAN024FZD; Start 61; Stop 85
gggattatcataggtgaactctctc

SEQ ID NO: 397844 - DNA, 25 bp, Artificial
  probe
  misc_feature (1)..(25): SEQ ID NO: 5033; WAN024FZD; Start 30; Stop 54
attcaatagtgtgacggaccaactg

SEQ ID NO: 397845 - DNA, 25 bp, Artificial
  probe
  misc_feature (1)..(25): SEQ ID NO: 5033; WAN024FZD; Start 21; Stop 45
tcttaatgtattcaatagtgtgacg

SEQ ID NO: 397846 - DNA, 25 bp, Artificial
  probe
  misc_feature (1)..(25): SEQ ID NO: 5033; WAN024FZD; Start 2; Stop 26
tgaccaatgcttttctgattcttaa

SEQ ID NO: 397847 - DNA, 25 bp, Artificial
  probe
  misc_feature (1)..(25): SEQ ID NO: 5033; WAN024FZD; Start 1; Stop 25
ttgaccaatgcttttctgattctta

SEQ ID NO: 397848 - DNA, 25 bp, Artificial
  probe
  misc_feature (1)..(25): SEQ ID NO: 5033; WAN024FZD; Start 60; Stop 84
ggggattatcataggtgaactctct

SEQ ID NO: 397849 - DNA, 25 bp, Artificial
  probe
  misc_feature (1)..(25): SEQ ID NO: 5033; WAN024FZD; Start 59; Stop 83
aggggattatcataggtgaactctc

SEQ ID NO: 397850 - DNA, 25 bp, Artificial
  probe
  misc_feature (1)..(25): SEQ ID NO: 5033; WAN024FZD; Start 5; Stop 29
ccaatgcttttctgattcttaatgt

SEQ ID NO: 397851 - DNA, 25 bp, Artificial
  probe
  misc_feature (1)..(25): SEQ ID NO: 5033; WAN024FZD; Start 4; Stop 28
accaatgcttttctgattcttaatg

SEQ ID NO: 397852 - DNA, 25 bp, Artificial
  probe
  misc_feature (1)..(25): SEQ ID NO: 5033; WAN024FZD; Start 58; Stop 82
gaggggattatcataggtgaactct

SEQ ID NO: 397853 - DNA, 25 bp, Artificial
  probe
  misc_feature (1)..(25): SEQ ID NO: 5033; WAN024FZD; Start 57; Stop 81
tgaggggattatcataggtgaactc

SEQ ID NO: 397854 - DNA, 25 bp, Artificial
  probe
  misc_feature (1)..(25): SEQ ID NO: 5033; WAN024FZD; Start 3; Stop 27
gaccaatgcttttctgattcttaat

SEQ ID NO: 397855 - DNA, 25 bp, Artificial
  probe
  misc_feature (1)..(25): SEQ ID NO: 5033; WAN024FZD; Start 181; Stop 205
tcgatgatattccttataaagacct

SEQ ID NO: 397856 - DNA, 25 bp, Artificial
  probe
  misc_feature (1)..(25): SEQ ID NO: 5033; WAN024FZD; Start 20; Stop 44
ttcttaatgtattcaatagtgtgac

SEQ ID NO: 397857 - DNA, 25 bp, Artificial
  probe
  misc_feature (1)..(25): SEQ ID NO: 5033; WAN024FZD; Start 182; Stop 206
cgatgatattccttataaagacctt

SEQ ID NO: 397858 - DNA, 25 bp, Artificial
  probe
  misc_feature (1)..(25): SEQ ID NO: 5033; WAN024FZD; Start 91; Stop 115
gtaggcaatatttcccgtgaaagga

SEQ ID NO: 397859 - DNA, 25 bp, Artificial
  probe
  misc_feature (1)..(25): SEQ ID NO: 5033; WAN024FZD; Start 96; Stop 120
caatatttcccgtgaaaggaagatt

SEQ ID NO: 397860 - DNA, 25 bp, Artificial
  probe
  misc_feature (1)..(25): SEQ ID NO: 5033; WAN024FZD; Start 97; Stop 121
aatatttcccgtgaaaggaagattt

SEQ ID NO: 397861 - DNA, 25 bp, Artificial
  probe
  misc_feature (1)..(25): SEQ ID NO: 5033; WAN024FZD; Start 56; Stop 80
atgaggggattatcataggtgaact

SEQ ID NO: 397862 - DNA, 25 bp, Artificial
  probe
  misc_feature (1)..(25): SEQ ID NO: 5033; WAN024FZD; Start 95; Stop 119
gcaatatttcccgtgaaaggaagat

SEQ ID NO: 397863 - DNA, 25 bp, Artificial
  probe
  misc_feature (1)..(25): SEQ ID NO: 5033; WAN024FZD; Start 55; Stop 79
catgaggggattatcataggtgaac

SEQ ID NO: 397864 - DNA, 25 bp, Artificial
  probe
  misc_feature (1)..(25): SEQ ID NO: 5034; WAN024GE2; Start 194; Stop 218
tacacaggaagaccagagtattcag

SEQ ID NO: 397865 - DNA, 25 bp, Artificial
  probe
  misc_feature (1)..(25): SEQ ID NO: 5034; WAN024GE2; Start 200; Stop 224
ggaagaccagagtattcagcgataa

SEQ ID NO: 397866 - DNA, 25 bp, Artificial
  probe
  misc_feature (1)..(25): SEQ ID NO: 5034; WAN024GE2; Start 192; Stop 216
catacacaggaagaccagagtattc

SEQ ID NO: 397867 - DNA, 25 bp, Artificial
  probe
  misc_feature (1)..(25): SEQ ID NO: 5034; WAN024GE2; Start 193; Stop 217
atacacaggaagaccagagtattca

SEQ ID NO: 397868 - DNA, 25 bp, Artificial
  probe
  misc_feature (1)..(25): SEQ ID NO: 5034; WAN024GE2; Start 191; Stop 215
acatacacaggaagaccagagtatt

SEQ ID NO: 397869 - DNA, 25 bp, Artificial
  probe
  misc_feature (1)..(25): SEQ ID NO: 5034; WAN024GE2; Start 189; Stop 213
tgacatacacaggaagaccagagta

SEQ ID NO: 397870 - DNA, 25 bp, Artificial
  probe
  misc_feature (1)..(25): SEQ ID NO: 5034; WAN024GE2; Start 190; Stop 214
gacatacacaggaagaccagagtat

SEQ ID NO: 397871 - DNA, 25 bp, Artificial
  probe
  misc_feature (1)..(25): SEQ ID NO: 5034; WAN024GE2; Start 199; Stop 223
aggaagaccagagtattcagcgata

SEQ ID NO: 397872 - DNA, 25 bp, Artificial
  probe
  misc_feature (1)..(25): SEQ ID NO: 5034; WAN024GE2; Start 187; Stop 211
cttgacatacacaggaagaccagag

SEQ ID NO: 397873 - DNA, 25 bp, Artificial
  probe
  misc_feature (1)..(25): SEQ ID NO: 5034; WAN024GE2; Start 202; Stop 226
aagaccagagtattcagcgataaat

SEQ ID NO: 397874 - DNA, 25 bp, Artificial
  probe
  misc_feature (1)..(25): SEQ ID NO: 5034; WAN024GE2; Start 203; Stop 227
agaccagagtattcagcgataaatt

SEQ ID NO: 397875 - DNA, 25 bp, Artificial
  probe
  misc_feature (1)..(25): SEQ ID NO: 5034; WAN024GE2; Start 204; Stop 228
gaccagagtattcagcgataaattc

SEQ ID NO: 397876 - DNA, 25 bp, Artificial
  probe
  misc_feature (1)..(25): SEQ ID NO: 5034; WAN024GE2; Start 201; Stop 225
gaagaccagagtattcagcgataaa

SEQ ID NO: 397877 - DNA, 25 bp, Artificial
  probe
  misc_feature (1)..(25): SEQ ID NO: 5034; WAN024GE2; Start 44; Stop 68
ctatcaactgcttctgccacttctt

SEQ ID NO: 397878 - DNA, 25 bp, Artificial
  probe
  misc_feature (1)..(25): SEQ ID NO: 5034; WAN024GE2; Start 205; Stop 229
accagagtattcagcgataaattct

SEQ ID NO: 397879 - DNA, 25 bp, Artificial
  probe
  misc_feature (1)..(25): SEQ ID NO: 5034; WAN024GE2; Start 188; Stop 212
ttgacatacacaggaagaccagagt

SEQ ID NO: 397880 - DNA, 25 bp, Artificial
  probe
  misc_feature (1)..(25): SEQ ID NO: 5034; WAN024GE2; Start 45; Stop 69
tatcaactgcttctgccacttcttg

SEQ ID NO: 397881 - DNA, 25 bp, Artificial
  probe
  misc_feature (1)..(25): SEQ ID NO: 5034; WAN024GE2; Start 206; Stop 230
ccagagtattcagcgataaattcta

SEQ ID NO: 397882 - DNA, 25 bp, Artificial
  probe
  misc_feature (1)..(25): SEQ ID NO: 5034; WAN024GE2; Start 42; Stop 66
gtctatcaactgcttctgccacttc

SEQ ID NO: 397883 - DNA, 25 bp, Artificial
  probe
  misc_feature (1)..(25): SEQ ID NO: 5034; WAN024GE2; Start 43; Stop 67
tctatcaactgcttctgccacttct

SEQ ID NO: 397884 - DNA, 25 bp, Artificial
  probe
  misc_feature (1)..(25): SEQ ID NO: 5034; WAN024GE2; Start 208; Stop 232
agagtattcagcgataaattctaca

SEQ ID NO: 397885 - DNA, 25 bp, Artificial
  probe
  misc_feature (1)..(25): SEQ ID NO: 5034; WAN024GE2; Start 207; Stop 231
cagagtattcagcgataaattctac

SEQ ID NO: 397886 - DNA, 25 bp, Artificial
  probe
  misc_feature (1)..(25): SEQ ID NO: 5034; WAN024GE2; Start 198; Stop 222
caggaagaccagagtattcagcgat

SEQ ID NO: 397887 - DNA, 25 bp, Artificial
  probe
  misc_feature (1)..(25): SEQ ID NO: 5034; WAN024GE2; Start 195; Stop 219
acacaggaagaccagagtattcagc

SEQ ID NO: 397888 - DNA, 25 bp, Artificial
  probe
  misc_feature (1)..(25): SEQ ID NO: 5034; WAN024GE2; Start 209; Stop 233
gagtattcagcgataaattctacat

SEQ ID NO: 397889 - DNA, 25 bp, Artificial
  probe
  misc_feature (1)..(25): SEQ ID NO: 5034; WAN024GE2; Start 210; Stop 234
agtattcagcgataaattctacatc

SEQ ID NO: 397890 - DNA, 25 bp, Artificial
  probe
  misc_feature (1)..(25): SEQ ID NO: 5034; WAN024GE2; Start 186; Stop 210
ccttgacatacacaggaagaccaga

SEQ ID NO: 397891 - DNA, 25 bp, Artificial
  probe
  misc_feature (1)..(25): SEQ ID NO: 5034; WAN024GE2; Start 10; Stop 34
acgaacaccagagtcaaagacaatc

SEQ ID NO: 397892 - DNA, 25 bp, Artificial
  probe
  misc_feature (1)..(25): SEQ ID NO: 5034; WAN024GE2; Start 9; Stop 33
gacgaacaccagagtcaaagacaat

SEQ ID NO: 397893 - DNA, 25 bp, Artificial
  probe
  misc_feature (1)..(25): SEQ ID NO: 5034; WAN024GE2; Start 196; Stop 220
cacaggaagaccagagtattcagcg

SEQ ID NO: 397894 - DNA, 25 bp, Artificial
  probe
  misc_feature (1)..(25): SEQ ID NO: 5034; WAN024GE2; Start 197; Stop 221
acaggaagaccagagtattcagcga

SEQ ID NO: 397895 - DNA, 25 bp, Artificial
  probe
  misc_feature (1)..(25): SEQ ID NO: 5034; WAN024GE2; Start 41; Stop 65
cgtctatcaactgcttctgccactt

SEQ ID NO: 397896 - DNA, 25 bp, Artificial
  probe
  misc_feature (1)..(25): SEQ ID NO: 5034; WAN024GE2; Start 12; Stop 36
gaacaccagagtcaaagacaatcgg

SEQ ID NO: 397897 - DNA, 25 bp, Artificial
  probe
  misc_feature (1)..(25): SEQ ID NO: 5035; WAN024F3R; Start 43; Stop 67
tgtattgataaaggtcacaactgga

SEQ ID NO: 397898 - DNA, 25 bp, Artificial
  probe
  misc_feature (1)..(25): SEQ ID NO: 5035; WAN024F3R; Start 41; Stop 65
gctgtattgataaaggtcacaactg

SEQ ID NO: 397899 - DNA, 25 bp, Artificial
  probe
  misc_feature (1)..(25): SEQ ID NO: 5035; WAN024F3R; Start 39; Stop 63
ctgctgtattgataaaggtcacaac

SEQ ID NO: 397900 - DNA, 25 bp, Artificial
  probe
  misc_feature (1)..(25): SEQ ID NO: 5035; WAN024F3R; Start 42; Stop 66
ctgtattgataaaggtcacaactgg

SEQ ID NO: 397901 - DNA, 25 bp, Artificial
  probe
  misc_feature (1)..(25): SEQ ID NO: 5035; WAN024F3R; Start 40; Stop 64
tgctgtattgataaaggtcacaact

SEQ ID NO: 397902 - DNA, 25 bp, Artificial
  probe
  misc_feature (1)..(25): SEQ ID NO: 5035; WAN024F3R; Start 44; Stop 68
gtattgataaaggtcacaactggac

SEQ ID NO: 397903 - DNA, 25 bp, Artificial
  probe
  misc_feature (1)..(25): SEQ ID NO: 5035; WAN024F3R; Start 45; Stop 69
tattgataaaggtcacaactggacg

SEQ ID NO: 397904 - DNA, 25 bp, Artificial
  probe
  misc_feature (1)..(25): SEQ ID NO: 5035; WAN024F3R; Start 74; Stop 98
aatttctcagcctgtttcatcaacc

SEQ ID NO: 397905 - DNA, 25 bp, Artificial
  probe
  misc_feature (1)..(25): SEQ ID NO: 5035; WAN024F3R; Start 38; Stop 62
cctgctgtattgataaaggtcacaa

SEQ ID NO: 397906 - DNA, 25 bp, Artificial
  probe
  misc_feature (1)..(25): SEQ ID NO: 5035; WAN024F3R; Start 72; Stop 96
caaatttctcagcctgtttcatcaa

SEQ ID NO: 397907 - DNA, 25 bp, Artificial
  probe
  misc_feature (1)..(25): SEQ ID NO: 5035; WAN024F3R; Start 29; Stop 53
ggataagcacctgctgtattgataa

SEQ ID NO: 397908 - DNA, 25 bp, Artificial
  probe
  misc_feature (1)..(25): SEQ ID NO: 5035; WAN024F3R; Start 73; Stop 97
aaatttctcagcctgtttcatcaac

SEQ ID NO: 397909 - DNA, 25 bp, Artificial
  probe
  misc_feature (1)..(25): SEQ ID NO: 5035; WAN024F3R; Start 28; Stop 52
aggataagcacctgctgtattgata

SEQ ID NO: 397910 - DNA, 25 bp, Artificial
  probe
  misc_feature (1)..(25): SEQ ID NO: 5035; WAN024F3R; Start 71; Stop 95
ccaaatttctcagcctgtttcatca

SEQ ID NO: 397911 - DNA, 25 bp, Artificial
  probe
  misc_feature (1)..(25): SEQ ID NO: 5035; WAN024F3R; Start 46; Stop 70
attgataaaggtcacaactggacgg

SEQ ID NO: 397912 - DNA, 25 bp, Artificial
  probe
  misc_feature (1)..(25): SEQ ID NO: 5035; WAN024F3R; Start 177; Stop 201
ggataccaaccactgttacagcttg

SEQ ID NO: 397913 - DNA, 25 bp, Artificial
  probe
  misc_feature (1)..(25): SEQ ID NO: 5035; WAN024F3R; Start 31; Stop 55
ataagcacctgctgtattgataaag

SEQ ID NO: 397914 - DNA, 25 bp, Artificial
  probe
  misc_feature (1)..(25): SEQ ID NO: 5035; WAN024F3R; Start 30; Stop 54
gataagcacctgctgtattgataaa

SEQ ID NO: 397915 - DNA, 25 bp, Artificial
  probe
  misc_feature (1)..(25): SEQ ID NO: 5035; WAN024F3R; Start 75; Stop 99
atttctcagcctgtttcatcaaccg

SEQ ID NO: 397916 - DNA, 25 bp, Artificial
  probe
  misc_feature (1)..(25): SEQ ID NO: 5035; WAN024F3R; Start 32; Stop 56
taagcacctgctgtattgataaagg

SEQ ID NO: 397917 - DNA, 25 bp, Artificial
  probe
  misc_feature (1)..(25): SEQ ID NO: 5035; WAN024F3R; Start 207; Stop 231
caagccaaccaataccaccaacaac

SEQ ID NO: 397918 - DNA, 25 bp, Artificial
  probe
  misc_feature (1)..(25): SEQ ID NO: 5035; WAN024F3R; Start 70; Stop 94
gccaaatttctcagcctgtttcatc

SEQ ID NO: 397919 - DNA, 25 bp, Artificial
  probe
  misc_feature (1)..(25): SEQ ID NO: 5035; WAN024F3R; Start 208; Stop 232
aagccaaccaataccaccaacaact

SEQ ID NO: 397920 - DNA, 25 bp, Artificial
  probe
  misc_feature (1)..(25): SEQ ID NO: 5035; WAN024F3R; Start 176; Stop 200
tggataccaaccactgttacagctt

SEQ ID NO: 397921 - DNA, 25 bp, Artificial
  probe
  misc_feature (1)..(25): SEQ ID NO: 5035; WAN024F3R; Start 216; Stop 240
caataccaccaacaactgcaccatc

SEQ ID NO: 397922 - DNA, 25 bp, Artificial
  probe
  misc_feature (1)..(25): SEQ ID NO: 5035; WAN024F3R; Start 136; Stop 160
aaaattccgtttgaggttgtcttgc

SEQ ID NO: 397923 - DNA, 25 bp, Artificial
  probe
  misc_feature (1)..(25): SEQ ID NO: 5035; WAN024F3R; Start 218; Stop 242
ataccaccaacaactgcaccatcat

SEQ ID NO: 397924 - DNA, 25 bp, Artificial
  probe
  misc_feature (1)..(25): SEQ ID NO: 5035; WAN024F3R; Start 137; Stop 161
aaattccgtttgaggttgtcttgca

SEQ ID NO: 397925 - DNA, 25 bp, Artificial
  probe
  misc_feature (1)..(25): SEQ ID NO: 5035; WAN024F3R; Start 217; Stop 241
aataccaccaacaactgcaccatca

SEQ ID NO: 397926 - DNA, 25 bp, Artificial
  probe
  misc_feature (1)..(25): SEQ ID NO: 5035; WAN024F3R; Start 212; Stop 236
caaccaataccaccaacaactgcac

SEQ ID NO: 397927 - DNA, 25 bp, Artificial
  probe
  misc_feature (1)..(25): SEQ ID NO: 5035; WAN024F3R; Start 135; Stop 159
caaaattccgtttgaggttgtcttg

SEQ ID NO: 397928 - DNA, 25 bp, Artificial
  probe
  misc_feature (1)..(25): SEQ ID NO: 5035; WAN024F3R; Start 225; Stop 249
caacaactgcaccatcatcacgaaa

SEQ ID NO: 397929 - DNA, 25 bp, Artificial
  probe
  misc_feature (1)..(25): SEQ ID NO: 5035; WAN024F3R; Start 178; Stop 202
gataccaaccactgttacagcttgg

SEQ ID NO: 397930 - DNA, 25 bp, Artificial
  probe
  misc_feature (1)..(25): SEQ ID NO: 5036; WAN024FDV; Start 24; Stop 48
gaatcaaggtatagacatcgctcaa

SEQ ID NO: 397931 - DNA, 25 bp, Artificial
  probe
  misc_feature (1)..(25): SEQ ID NO: 5036; WAN024FDV; Start 219; Stop 243
aatcataggcatcgtcaatagtcac

SEQ ID NO: 397932 - DNA, 25 bp, Artificial
  probe
  misc_feature (1)..(25): SEQ ID NO: 5036; WAN024FDV; Start 229; Stop 253
atcgtcaatagtcacttcaggattc

SEQ ID NO: 397933 - DNA, 25 bp, Artificial
  probe
  misc_feature (1)..(25): SEQ ID NO: 5036; WAN024FDV; Start 228; Stop 252
catcgtcaatagtcacttcaggatt

SEQ ID NO: 397934 - DNA, 25 bp, Artificial
  probe
  misc_feature (1)..(25): SEQ ID NO: 5036; WAN024FDV; Start 22; Stop 46
atgaatcaaggtatagacatcgctc

SEQ ID NO: 397935 - DNA, 25 bp, Artificial
  probe
  misc_feature (1)..(25): SEQ ID NO: 5036; WAN024FDV; Start 232; Stop 256
gtcaatagtcacttcaggattcagg

SEQ ID NO: 397936 - DNA, 25 bp, Artificial
  probe
  misc_feature (1)..(25): SEQ ID NO: 5036; WAN024FDV; Start 160; Stop 184
gtaacgagcaacttcctgacaatat

SEQ ID NO: 397937 - DNA, 25 bp, Artificial
  probe
  misc_feature (1)..(25): SEQ ID NO: 5036; WAN024FDV; Start 231; Stop 255
cgtcaatagtcacttcaggattcag

SEQ ID NO: 397938 - DNA, 25 bp, Artificial
  probe
  misc_feature (1)..(25): SEQ ID NO: 5036; WAN024FDV; Start 222; Stop 246
cataggcatcgtcaatagtcacttc

SEQ ID NO: 397939 - DNA, 25 bp, Artificial
  probe
  misc_feature (1)..(25): SEQ ID NO: 5036; WAN024FDV; Start 220; Stop 244
atcataggcatcgtcaatagtcact

SEQ ID NO: 397940 - DNA, 25 bp, Artificial
  probe
  misc_feature (1)..(25): SEQ ID NO: 5036; WAN024FDV; Start 230; Stop 254
tcgtcaatagtcacttcaggattca

SEQ ID NO: 397941 - DNA, 25 bp, Artificial
  probe
  misc_feature (1)..(25): SEQ ID NO: 5036; WAN024FDV; Start 223; Stop 247
ataggcatcgtcaatagtcacttca

SEQ ID NO: 397942 - DNA, 25 bp, Artificial
  probe
  misc_feature (1)..(25): SEQ ID NO: 5036; WAN024FDV; Start 221; Stop 245
tcataggcatcgtcaatagtcactt

SEQ ID NO: 397943 - DNA, 25 bp, Artificial
  probe
  misc_feature (1)..(25): SEQ ID NO: 5036; WAN024FDV; Start 23; Stop 47
tgaatcaaggtatagacatcgctca

SEQ ID NO: 397944 - DNA, 25 bp, Artificial
  probe
  misc_feature (1)..(25): SEQ ID NO: 5036; WAN024FDV; Start 21; Stop 45
catgaatcaaggtatagacatcgct

SEQ ID NO: 397945 - DNA, 25 bp, Artificial
  probe
  misc_feature (1)..(25): SEQ ID NO: 5036; WAN024FDV; Start 161; Stop 185
taacgagcaacttcctgacaatatt

SEQ ID NO: 397946 - DNA, 25 bp, Artificial
  probe
  misc_feature (1)..(25): SEQ ID NO: 5036; WAN024FDV; Start 224; Stop 248
taggcatcgtcaatagtcacttcag

SEQ ID NO: 397947 - DNA, 25 bp, Artificial
  probe
  misc_feature (1)..(25): SEQ ID NO: 5036; WAN024FDV; Start 165; Stop 189
gagcaacttcctgacaatattcttg

SEQ ID NO: 397948 - DNA, 25 bp, Artificial
  probe
  misc_feature (1)..(25): SEQ ID NO: 5036; WAN024FDV; Start 164; Stop 188
cgagcaacttcctgacaatattctt

SEQ ID NO: 397949 - DNA, 25 bp, Artificial
  probe
  misc_feature (1)..(25): SEQ ID NO: 5036; WAN024FDV; Start 162; Stop 186
aacgagcaacttcctgacaatattc

SEQ ID NO: 397950 - DNA, 25 bp, Artificial
  probe
  misc_feature (1)..(25): SEQ ID NO: 5036; WAN024FDV; Start 218; Stop 242
aaatcataggcatcgtcaatagtca

SEQ ID NO: 397951 - DNA, 25 bp, Artificial
  probe
  misc_feature (1)..(25): SEQ ID NO: 5036; WAN024FDV; Start 217; Stop 241
caaatcataggcatcgtcaatagtc

SEQ ID NO: 397952 - DNA, 25 bp, Artificial
  probe
  misc_feature (1)..(25): SEQ ID NO: 5036; WAN024FDV; Start 159; Stop 183
ggtaacgagcaacttcctgacaata

SEQ ID NO: 397953 - DNA, 25 bp, Artificial
  probe
  misc_feature (1)..(25): SEQ ID NO: 5036; WAN024FDV; Start 25; Stop 49
aatcaaggtatagacatcgctcaaa

SEQ ID NO: 397954 - DNA, 25 bp, Artificial
  probe
  misc_feature (1)..(25): SEQ ID NO: 5036; WAN024FDV; Start 227; Stop 251
gcatcgtcaatagtcacttcaggat

SEQ ID NO: 397955 - DNA, 25 bp, Artificial
  probe
  misc_feature (1)..(25): SEQ ID NO: 5036; WAN024FDV; Start 26; Stop 50
atcaaggtatagacatcgctcaaac

SEQ ID NO: 397956 - DNA, 25 bp, Artificial
  probe
  misc_feature (1)..(25): SEQ ID NO: 5036; WAN024FDV; Start 216; Stop 240
ccaaatcataggcatcgtcaatagt

SEQ ID NO: 397957 - DNA, 25 bp, Artificial
  probe
  misc_feature (1)..(25): SEQ ID NO: 5036; WAN024FDV; Start 215; Stop 239
accaaatcataggcatcgtcaatag

SEQ ID NO: 397958 - DNA, 25 bp, Artificial
  probe
  misc_feature (1)..(25): SEQ ID NO: 5036; WAN024FDV; Start 163; Stop 187
acgagcaacttcctgacaatattct

SEQ ID NO: 397959 - DNA, 25 bp, Artificial
  probe
  misc_feature (1)..(25): SEQ ID NO: 5036; WAN024FDV; Start 233; Stop 257
tcaatagtcacttcaggattcaggg

SEQ ID NO: 397960 - DNA, 25 bp, Artificial
  probe
  misc_feature (1)..(25): SEQ ID NO: 5036; WAN024FDV; Start 214; Stop 238
gaccaaatcataggcatcgtcaata

SEQ ID NO: 397961 - DNA, 25 bp, Artificial
  probe
  misc_feature (1)..(25): SEQ ID NO: 5036; WAN024FDV; Start 151; Stop 175
ctcttcttggtaacgagcaacttcc

SEQ ID NO: 397962 - DNA, 25 bp, Artificial
  probe
  misc_feature (1)..(25): SEQ ID NO: 5036; WAN024FDV; Start 27; Stop 51
tcaaggtatagacatcgctcaaacg

SEQ ID NO: 397963 - DNA, 25 bp, Artificial
  probe
  misc_feature (1)..(25): SEQ ID NO: 5037; WAN024GC2; Start 92; Stop 116
cgaatcatactatcagcagaaccaa

SEQ ID NO: 397964 - DNA, 25 bp, Artificial
  probe
  misc_feature (1)..(25): SEQ ID NO: 5037; WAN024GC2; Start 89; Stop 113
aagcgaatcatactatcagcagaac

SEQ ID NO: 397965 - DNA, 25 bp, Artificial
  probe
  misc_feature (1)..(25): SEQ ID NO: 5037; WAN024GC2; Start 90; Stop 114
agcgaatcatactatcagcagaacc

SEQ ID NO: 397966 - DNA, 25 bp, Artificial
  probe
  misc_feature (1)..(25): SEQ ID NO: 5037; WAN024GC2; Start 91; Stop 115
gcgaatcatactatcagcagaacca

SEQ ID NO: 397967 - DNA, 25 bp, Artificial
  probe
  misc_feature (1)..(25): SEQ ID NO: 5037; WAN024GC2; Start 88; Stop 112
aaagcgaatcatactatcagcagaa

SEQ ID NO: 397968 - DNA, 25 bp, Artificial
  probe
  misc_feature (1)..(25): SEQ ID NO: 5037; WAN024GC2; Start 85; Stop 109
atcaaagcgaatcatactatcagca

SEQ ID NO: 397969 - DNA, 25 bp, Artificial
  probe
  misc_feature (1)..(25): SEQ ID NO: 5037; WAN024GC2; Start 78; Stop 102
cactcatatcaaagcgaatcatact

SEQ ID NO: 397970 - DNA, 25 bp, Artificial
  probe
  misc_feature (1)..(25): SEQ ID NO: 5037; WAN024GC2; Start 77; Stop 101
tcactcatatcaaagcgaatcatac

SEQ ID NO: 397971 - DNA, 25 bp, Artificial
  probe
  misc_feature (1)..(25): SEQ ID NO: 5037; WAN024GC2; Start 131; Stop 155
agttgtttggaaagttctgtcttac

SEQ ID NO: 397972 - DNA, 25 bp, Artificial
  probe
  misc_feature (1)..(25): SEQ ID NO: 5037; WAN024GC2; Start 87; Stop 111
caaagcgaatcatactatcagcaga

SEQ ID NO: 397973 - DNA, 25 bp, Artificial
  probe
  misc_feature (1)..(25): SEQ ID NO: 5037; WAN024GC2; Start 86; Stop 110
tcaaagcgaatcatactatcagcag

SEQ ID NO: 397974 - DNA, 25 bp, Artificial
  probe
  misc_feature (1)..(25): SEQ ID NO: 5037; WAN024GC2; Start 132; Stop 156
gttgtttggaaagttctgtcttacc

SEQ ID NO: 397975 - DNA, 25 bp, Artificial
  probe
  misc_feature (1)..(25): SEQ ID NO: 5037; WAN024GC2; Start 243; Stop 267
caatcttatcgactgcatcatcttg

SEQ ID NO: 397976 - DNA, 25 bp, Artificial
  probe
  misc_feature (1)..(25): SEQ ID NO: 5037; WAN024GC2; Start 93; Stop 117
gaatcatactatcagcagaaccaaa

SEQ ID NO: 397977 - DNA, 25 bp, Artificial
  probe
  misc_feature (1)..(25): SEQ ID NO: 5037; WAN024GC2; Start 84; Stop 108
tatcaaagcgaatcatactatcagc

SEQ ID NO: 397978 - DNA, 25 bp, Artificial
  probe
  misc_feature (1)..(25): SEQ ID NO: 5037; WAN024GC2; Start 231; Stop 255
gaatagccttggcaatcttatcgac

SEQ ID NO: 397979 - DNA, 25 bp, Artificial
  probe
  misc_feature (1)..(25): SEQ ID NO: 5037; WAN024GC2; Start 71; Stop 95
atgtattcactcatatcaaagcgaa

SEQ ID NO: 397980 - DNA, 25 bp, Artificial
  probe
  misc_feature (1)..(25): SEQ ID NO: 5037; WAN024GC2; Start 232; Stop 256
aatagccttggcaatcttatcgact

SEQ ID NO: 397981 - DNA, 25 bp, Artificial
  probe
  misc_feature (1)..(25): SEQ ID NO: 5037; WAN024GC2; Start 133; Stop 157
ttgtttggaaagttctgtcttaccg

SEQ ID NO: 397982 - DNA, 25 bp, Artificial
  probe
  misc_feature (1)..(25): SEQ ID NO: 5037; WAN024GC2; Start 76; Stop 100
ttcactcatatcaaagcgaatcata

SEQ ID NO: 397983 - DNA, 25 bp, Artificial
  probe
  misc_feature (1)..(25): SEQ ID NO: 5037; WAN024GC2; Start 11; Stop 35
tcatcatagccaacataacctggag

SEQ ID NO: 397984 - DNA, 25 bp, Artificial
  probe
  misc_feature (1)..(25): SEQ ID NO: 5037; WAN024GC2; Start 10; Stop 34
ctcatcatagccaacataacctgga

SEQ ID NO: 397985 - DNA, 25 bp, Artificial
  probe
  misc_feature (1)..(25): SEQ ID NO: 5037; WAN024GC2; Start 69; Stop 93
ccatgtattcactcatatcaaagcg

SEQ ID NO: 397986 - DNA, 25 bp, Artificial
  probe
  misc_feature (1)..(25): SEQ ID NO: 5037; WAN024GC2; Start 130; Stop 154
cagttgtttggaaagttctgtctta

SEQ ID NO: 397987 - DNA, 25 bp, Artificial
  probe
  misc_feature (1)..(25): SEQ ID NO: 5037; WAN024GC2; Start 8; Stop 32
gcctcatcatagccaacataacctg

SEQ ID NO: 397988 - DNA, 25 bp, Artificial
  probe
  misc_feature (1)..(25): SEQ ID NO: 5037; WAN024GC2; Start 7; Stop 31
agcctcatcatagccaacataacct

SEQ ID NO: 397989 - DNA, 25 bp, Artificial
  probe
  misc_feature (1)..(25): SEQ ID NO: 5037; WAN024GC2; Start 6; Stop 30
cagcctcatcatagccaacataacc

SEQ ID NO: 397990 - DNA, 25 bp, Artificial
  probe
  misc_feature (1)..(25): SEQ ID NO: 5037; WAN024GC2; Start 5; Stop 29
ccagcctcatcatagccaacataac

SEQ ID NO: 397991 - DNA, 25 bp, Artificial
  probe
  misc_feature (1)..(25): SEQ ID NO: 5037; WAN024GC2; Start 70; Stop 94
catgtattcactcatatcaaagcga

SEQ ID NO: 397992 - DNA, 25 bp, Artificial
  probe
  misc_feature (1)..(25): SEQ ID NO: 5037; WAN024GC2; Start 68; Stop 92
tccatgtattcactcatatcaaagc

SEQ ID NO: 397993 - DNA, 25 bp, Artificial
  probe
  misc_feature (1)..(25): SEQ ID NO: 5037; WAN024GC2; Start 79; Stop 103
actcatatcaaagcgaatcatacta

SEQ ID NO: 397994 - DNA, 25 bp, Artificial
  probe
  misc_feature (1)..(25): SEQ ID NO: 5037; WAN024GC2; Start 233; Stop 257
atagccttggcaatcttatcgactg

SEQ ID NO: 397995 - DNA, 25 bp, Artificial
  probe
  misc_feature (1)..(25): SEQ ID NO: 5037; WAN024GC2; Start 272; Stop 296
ataacatgagacttgagatcttcgg

SEQ ID NO: 397996 - DNA, 25 bp, Artificial
  probe
  misc_feature (1)..(25): SEQ ID NO: 5038; WAN024GMB; Start 86; Stop 110
agacttccaaccaactcttcatctg

SEQ ID NO: 397997 - DNA, 25 bp, Artificial
  probe
  misc_feature (1)..(25): SEQ ID NO: 5038; WAN024GMB; Start 52; Stop 76
cattggataggtaaaggtcacattt

SEQ ID NO: 397998 - DNA, 25 bp, Artificial
  probe
  misc_feature (1)..(25): SEQ ID NO: 5038; WAN024GMB; Start 51; Stop 75
ccattggataggtaaaggtcacatt

SEQ ID NO: 397999 - DNA, 25 bp, Artificial
  probe
  misc_feature (1)..(25): SEQ ID NO: 5038; WAN024GMB; Start 84; Stop 108
taagacttccaaccaactcttcatc

SEQ ID NO: 398000 - DNA, 25 bp, Artificial
  probe
  misc_feature (1)..(25): SEQ ID NO: 5038; WAN024GMB; Start 83; Stop 107
ctaagacttccaaccaactcttcat

SEQ ID NO: 398001 - DNA, 25 bp, Artificial
  probe
  misc_feature (1)..(25): SEQ ID NO: 5038; WAN024GMB; Start 214; Stop 238
aacaatggtaaagataatctggctt

SEQ ID NO: 398002 - DNA, 25 bp, Artificial
  probe
  misc_feature (1)..(25): SEQ ID NO: 5038; WAN024GMB; Start 85; Stop 109
aagacttccaaccaactcttcatct

SEQ ID NO: 398003 - DNA, 25 bp, Artificial
  probe
  misc_feature (1)..(25): SEQ ID NO: 5038; WAN024GMB; Start 41; Stop 65
ggttccttgtccattggataggtaa

SEQ ID NO: 398004 - DNA, 25 bp, Artificial
  probe
  misc_feature (1)..(25): SEQ ID NO: 5038; WAN024GMB; Start 7; Stop 31
aggttcaatagtaaagctcacatct

SEQ ID NO: 398005 - DNA, 25 bp, Artificial
  probe
  misc_feature (1)..(25): SEQ ID NO: 5038; WAN024GMB; Start 6; Stop 30
caggttcaatagtaaagctcacatc

SEQ ID NO: 398006 - DNA, 25 bp, Artificial
  probe
  misc_feature (1)..(25): SEQ ID NO: 5038; WAN024GMB; Start 5; Stop 29
ccaggttcaatagtaaagctcacat

SEQ ID NO: 398007 - DNA, 25 bp, Artificial
  probe
  misc_feature (1)..(25): SEQ ID NO: 5038; WAN024GMB; Start 215; Stop 239
acaatggtaaagataatctggctta

SEQ ID NO: 398008 - DNA, 25 bp, Artificial
  probe
  misc_feature (1)..(25): SEQ ID NO: 5038; WAN024GMB; Start 213; Stop 237
taacaatggtaaagataatctggct

SEQ ID NO: 398009 - DNA, 25 bp, Artificial
  probe
  misc_feature (1)..(25): SEQ ID NO: 5038; WAN024GMB; Start 8; Stop 32
ggttcaatagtaaagctcacatctt

SEQ ID NO: 398010 - DNA, 25 bp, Artificial
  probe
  misc_feature (1)..(25): SEQ ID NO: 5038; WAN024GMB; Start 75; Stop 99
tttcaaagctaagacttccaaccaa

SEQ ID NO: 398011 - DNA, 25 bp, Artificial
  probe
  misc_feature (1)..(25): SEQ ID NO: 5038; WAN024GMB; Start 3; Stop 27
gaccaggttcaatagtaaagctcac

SEQ ID NO: 398012 - DNA, 25 bp, Artificial
  probe
  misc_feature (1)..(25): SEQ ID NO: 5038; WAN024GMB; Start 216; Stop 240
caatggtaaagataatctggcttag

SEQ ID NO: 398013 - DNA, 25 bp, Artificial
  probe
  misc_feature (1)..(25): SEQ ID NO: 5038; WAN024GMB; Start 136; Stop 160
ctctgcgtcaagaatttctcgaata

SEQ ID NO: 398014 - DNA, 25 bp, Artificial
  probe
  misc_feature (1)..(25): SEQ ID NO: 5038; WAN024GMB; Start 82; Stop 106
gctaagacttccaaccaactcttca

SEQ ID NO: 398015 - DNA, 25 bp, Artificial
  probe
  misc_feature (1)..(25): SEQ ID NO: 5038; WAN024GMB; Start 76; Stop 100
ttcaaagctaagacttccaaccaac

SEQ ID NO: 398016 - DNA, 25 bp, Artificial
  probe
  misc_feature (1)..(25): SEQ ID NO: 5038; WAN024GMB; Start 87; Stop 111
gacttccaaccaactcttcatctgg

SEQ ID NO: 398017 - DNA, 25 bp, Artificial
  probe
  misc_feature (1)..(25): SEQ ID NO: 5038; WAN024GMB; Start 4; Stop 28
accaggttcaatagtaaagctcaca

SEQ ID NO: 398018 - DNA, 25 bp, Artificial
  probe
  misc_feature (1)..(25): SEQ ID NO: 5038; WAN024GMB; Start 137; Stop 161
tctgcgtcaagaatttctcgaatac

SEQ ID NO: 398019 - DNA, 25 bp, Artificial
  probe
  misc_feature (1)..(25): SEQ ID NO: 5038; WAN024GMB; Start 43; Stop 67
ttccttgtccattggataggtaaag

SEQ ID NO: 398020 - DNA, 25 bp, Artificial
  probe
  misc_feature (1)..(25): SEQ ID NO: 5038; WAN024GMB; Start 42; Stop 66
gttccttgtccattggataggtaaa

SEQ ID NO: 398021 - DNA, 25 bp, Artificial
  probe
  misc_feature (1)..(25): SEQ ID NO: 5038; WAN024GMB; Start 80; Stop 104
aagctaagacttccaaccaactctt

SEQ ID NO: 398022 - DNA, 25 bp, Artificial
  probe
  misc_feature (1)..(25): SEQ ID NO: 5038; WAN024GMB; Start 2; Stop 26
tgaccaggttcaatagtaaagctca

SEQ ID NO: 398023 - DNA, 25 bp, Artificial
  probe
  misc_feature (1)..(25): SEQ ID NO: 5038; WAN024GMB; Start 78; Stop 102
caaagctaagacttccaaccaactc

SEQ ID NO: 398024 - DNA, 25 bp, Artificial
  probe
  misc_feature (1)..(25): SEQ ID NO: 5038; WAN024GMB; Start 212; Stop 236
ataacaatggtaaagataatctggc

SEQ ID NO: 398025 - DNA, 25 bp, Artificial
  probe
  misc_feature (1)..(25): SEQ ID NO: 5038; WAN024GMB; Start 46; Stop 70
cttgtccattggataggtaaaggtc

SEQ ID NO: 398026 - DNA, 25 bp, Artificial
  probe
  misc_feature (1)..(25): SEQ ID NO: 5038; WAN024GMB; Start 92; Stop 116
ccaaccaactcttcatctgggatat

SEQ ID NO: 398027 - DNA, 25 bp, Artificial
  probe
  misc_feature (1)..(25): SEQ ID NO: 5038; WAN024GMB; Start 79; Stop 103
aaagctaagacttccaaccaactct

SEQ ID NO: 398028 - DNA, 25 bp, Artificial
  probe
  misc_feature (1)..(25): SEQ ID NO: 5038; WAN024GMB; Start 55; Stop 79
tggataggtaaaggtcacattttca

SEQ ID NO: 398029 - DNA, 25 bp, Artificial
  probe
  misc_feature (1)..(25): SEQ ID NO: 5039; WAN024CPS; Start 187; Stop 211
gtcaacataagagtagccatctgta

SEQ ID NO: 398030 - DNA, 25 bp, Artificial
  probe
  misc_feature (1)..(25): SEQ ID NO: 5039; WAN024CPS; Start 183; Stop 207
tgaggtcaacataagagtagccatc

SEQ ID NO: 398031 - DNA, 25 bp, Artificial
  probe
  misc_feature (1)..(25): SEQ ID NO: 5039; WAN024CPS; Start 184; Stop 208
gaggtcaacataagagtagccatct

SEQ ID NO: 398032 - DNA, 25 bp, Artificial
  probe
  misc_feature (1)..(25): SEQ ID NO: 5039; WAN024CPS; Start 185; Stop 209
aggtcaacataagagtagccatctg

SEQ ID NO: 398033 - DNA, 25 bp, Artificial
  probe
  misc_feature (1)..(25): SEQ ID NO: 5039; WAN024CPS; Start 192; Stop 216
cataagagtagccatctgtaccatg

SEQ ID NO: 398034 - DNA, 25 bp, Artificial
  probe
  misc_feature (1)..(25): SEQ ID NO: 5039; WAN024CPS; Start 188; Stop 212
tcaacataagagtagccatctgtac

SEQ ID NO: 398035 - DNA, 25 bp, Artificial
  probe
  misc_feature (1)..(25): SEQ ID NO: 5039; WAN024CPS; Start 189; Stop 213
caacataagagtagccatctgtacc

SEQ ID NO: 398036 - DNA, 25 bp, Artificial
  probe
  misc_feature (1)..(25): SEQ ID NO: 5039; WAN024CPS; Start 182; Stop 206
ttgaggtcaacataagagtagccat

SEQ ID NO: 398037 - DNA, 25 bp, Artificial
  probe
  misc_feature (1)..(25): SEQ ID NO: 5039; WAN024CPS; Start 191; Stop 215
acataagagtagccatctgtaccat

SEQ ID NO: 398038 - DNA, 25 bp, Artificial
  probe
  misc_feature (1)..(25): SEQ ID NO: 5039; WAN024CPS; Start 190; Stop 214
aacataagagtagccatctgtacca

SEQ ID NO: 398039 - DNA, 25 bp, Artificial
  probe
  misc_feature (1)..(25): SEQ ID NO: 5039; WAN024CPS; Start 186; Stop 210
ggtcaacataagagtagccatctgt

SEQ ID NO: 398040 - DNA, 25 bp, Artificial
  probe
  misc_feature (1)..(25): SEQ ID NO: 5039; WAN024CPS; Start 142; Stop 166
tgcctcagatacaatctcaatcaag

SEQ ID NO: 398041 - DNA, 25 bp, Artificial
  probe
  misc_feature (1)..(25): SEQ ID NO: 5039; WAN024CPS; Start 141; Stop 165
ctgcctcagatacaatctcaatcaa

SEQ ID NO: 398042 - DNA, 25 bp, Artificial
  probe
  misc_feature (1)..(25): SEQ ID NO: 5039; WAN024CPS; Start 143; Stop 167
gcctcagatacaatctcaatcaagg

SEQ ID NO: 398043 - DNA, 25 bp, Artificial
  probe
  misc_feature (1)..(25): SEQ ID NO: 5039; WAN024CPS; Start 149; Stop 173
gatacaatctcaatcaagggaaccc

SEQ ID NO: 398044 - DNA, 25 bp, Artificial
  probe
  misc_feature (1)..(25): SEQ ID NO: 5039; WAN024CPS; Start 44; Stop 68
gaaccttcctccatcttaacgtcag

SEQ ID NO: 398045 - DNA, 25 bp, Artificial
  probe
  misc_feature (1)..(25): SEQ ID NO: 5039; WAN024CPS; Start 75; Stop 99
cagcgtactggataacttccttgag

SEQ ID NO: 398046 - DNA, 25 bp, Artificial
  probe
  misc_feature (1)..(25): SEQ ID NO: 5039; WAN024CPS; Start 40; Stop 64
catcgaaccttcctccatcttaacg

SEQ ID NO: 398047 - DNA, 25 bp, Artificial
  probe
  misc_feature (1)..(25): SEQ ID NO: 5039; WAN024CPS; Start 145; Stop 169
ctcagatacaatctcaatcaaggga

SEQ ID NO: 398048 - DNA, 25 bp, Artificial
  probe
  misc_feature (1)..(25): SEQ ID NO: 5039; WAN024CPS; Start 48; Stop 72
cttcctccatcttaacgtcagaaat

SEQ ID NO: 398049 - DNA, 25 bp, Artificial
  probe
  misc_feature (1)..(25): SEQ ID NO: 5039; WAN024CPS; Start 148; Stop 172
agatacaatctcaatcaagggaacc

SEQ ID NO: 398050 - DNA, 25 bp, Artificial
  probe
  misc_feature (1)..(25): SEQ ID NO: 5039; WAN024CPS; Start 147; Stop 171
cagatacaatctcaatcaagggaac

SEQ ID NO: 398051 - DNA, 25 bp, Artificial
  probe
  misc_feature (1)..(25): SEQ ID NO: 5039; WAN024CPS; Start 146; Stop 170
tcagatacaatctcaatcaagggaa

SEQ ID NO: 398052 - DNA, 25 bp, Artificial
  probe
  misc_feature (1)..(25): SEQ ID NO: 5039; WAN024CPS; Start 49; Stop 73
ttcctccatcttaacgtcagaaatg

SEQ ID NO: 398053 - DNA, 25 bp, Artificial
  probe
  misc_feature (1)..(25): SEQ ID NO: 5039; WAN024CPS; Start 144; Stop 168
cctcagatacaatctcaatcaaggg

SEQ ID NO: 398054 - DNA, 25 bp, Artificial
  probe
  misc_feature (1)..(25): SEQ ID NO: 5039; WAN024CPS; Start 39; Stop 63
gcatcgaaccttcctccatcttaac

SEQ ID NO: 398055 - DNA, 25 bp, Artificial
  probe
  misc_feature (1)..(25): SEQ ID NO: 5039; WAN024CPS; Start 87; Stop 111
taacttccttgagggctgtcagata

SEQ ID NO: 398056 - DNA, 25 bp, Artificial
  probe
  misc_feature (1)..(25): SEQ ID NO: 5039; WAN024CPS; Start 46; Stop 70
accttcctccatcttaacgtcagaa

SEQ ID NO: 398057 - DNA, 25 bp, Artificial
  probe
  misc_feature (1)..(25): SEQ ID NO: 5039; WAN024CPS; Start 45; Stop 69
aaccttcctccatcttaacgtcaga

SEQ ID NO: 398058 - DNA, 25 bp, Artificial
  probe
  misc_feature (1)..(25): SEQ ID NO: 5039; WAN024CPS; Start 41; Stop 65
atcgaaccttcctccatcttaacgt

SEQ ID NO: 398059 - DNA, 25 bp, Artificial
  probe
  misc_feature (1)..(25): SEQ ID NO: 5039; WAN024CPS; Start 140; Stop 164
tctgcctcagatacaatctcaatca

SEQ ID NO: 398060 - DNA, 25 bp, Artificial
  probe
  misc_feature (1)..(25): SEQ ID NO: 5039; WAN024CPS; Start 86; Stop 110
ataacttccttgagggctgtcagat

SEQ ID NO: 398061 - DNA, 25 bp, Artificial
  probe
  misc_feature (1)..(25): SEQ ID NO: 5039; WAN024CPS; Start 116; Stop 140
taggcttcttcaggagaacgcatat

SEQ ID NO: 398062 - DNA, 25 bp, Artificial
  probe
  misc_feature (1)..(25): SEQ ID NO: 5040; WAN024FE3; Start 345; Stop 369
agcaagagtgatctatgaacctatt

SEQ ID NO: 398063 - DNA, 25 bp, Artificial
  probe
  misc_feature (1)..(25): SEQ ID NO: 5040; WAN024FE3; Start 343; Stop 367
ttagcaagagtgatctatgaaccta

SEQ ID NO: 398064 - DNA, 25 bp, Artificial
  probe
  misc_feature (1)..(25): SEQ ID NO: 5040; WAN024FE3; Start 344; Stop 368
tagcaagagtgatctatgaacctat

SEQ ID NO: 398065 - DNA, 25 bp, Artificial
  probe
  misc_feature (1)..(25): SEQ ID NO: 5040; WAN024FE3; Start 515; Stop 539
gtttacaagatgacctgaaagaagc

SEQ ID NO: 398066 - DNA, 25 bp, Artificial
  probe
  misc_feature (1)..(25): SEQ ID NO: 5040; WAN024FE3; Start 100; Stop 124
tctccagaaattcgtaatgtccttt

SEQ ID NO: 398067 - DNA, 25 bp, Artificial
  probe
  misc_feature (1)..(25): SEQ ID NO: 5040; WAN024FE3; Start 514; Stop 538
agtttacaagatgacctgaaagaag

SEQ ID NO: 398068 - DNA, 25 bp, Artificial
  probe
  misc_feature (1)..(25): SEQ ID NO: 5040; WAN024FE3; Start 95; Stop 119
atccttctccagaaattcgtaatgt

SEQ ID NO: 398069 - DNA, 25 bp, Artificial
  probe
  misc_feature (1)..(25): SEQ ID NO: 5040; WAN024FE3; Start 99; Stop 123
ttctccagaaattcgtaatgtcctt

SEQ ID NO: 398070 - DNA, 25 bp, Artificial
  probe
  misc_feature (1)..(25): SEQ ID NO: 5040; WAN024FE3; Start 467; Stop 491
ttagatcctgtctggtggaagtcta

SEQ ID NO: 398071 - DNA, 25 bp, Artificial
  probe
  misc_feature (1)..(25): SEQ ID NO: 5040; WAN024FE3; Start 98; Stop 122
cttctccagaaattcgtaatgtcct

SEQ ID NO: 398072 - DNA, 25 bp, Artificial
  probe
  misc_feature (1)..(25): SEQ ID NO: 5040; WAN024FE3; Start 96; Stop 120
tccttctccagaaattcgtaatgtc

SEQ ID NO: 398073 - DNA, 25 bp, Artificial
  probe
  misc_feature (1)..(25): SEQ ID NO: 5040; WAN024FE3; Start 61; Stop 85
gaagaaatccagtggttgtttgatc

SEQ ID NO: 398074 - DNA, 25 bp, Artificial
  probe
  misc_feature (1)..(25): SEQ ID NO: 5040; WAN024FE3; Start 340; Stop 364
cgtttagcaagagtgatctatgaac

SEQ ID NO: 398075 - DNA, 25 bp, Artificial
  probe
  misc_feature (1)..(25): SEQ ID NO: 5040; WAN024FE3; Start 94; Stop 118
aatccttctccagaaattcgtaatg

SEQ ID NO: 398076 - DNA, 25 bp, Artificial
  probe
  misc_feature (1)..(25): SEQ ID NO: 5040; WAN024FE3; Start 92; Stop 116
gaaatccttctccagaaattcgtaa

SEQ ID NO: 398077 - DNA, 25 bp, Artificial
  probe
  misc_feature (1)..(25): SEQ ID NO: 5040; WAN024FE3; Start 342; Stop 366
tttagcaagagtgatctatgaacct

SEQ ID NO: 398078 - DNA, 25 bp, Artificial
  probe
  misc_feature (1)..(25): SEQ ID NO: 5040; WAN024FE3; Start 341; Stop 365
gtttagcaagagtgatctatgaacc

SEQ ID NO: 398079 - DNA, 25 bp, Artificial
  probe
  misc_feature (1)..(25): SEQ ID NO: 5040; WAN024FE3; Start 97; Stop 121
ccttctccagaaattcgtaatgtcc

SEQ ID NO: 398080 - DNA, 25 bp, Artificial
  probe
  misc_feature (1)..(25): SEQ ID NO: 5040; WAN024FE3; Start 513; Stop 537
tagtttacaagatgacctgaaagaa

SEQ ID NO: 398081 - DNA, 25 bp, Artificial
  probe
  misc_feature (1)..(25): SEQ ID NO: 5040; WAN024FE3; Start 339; Stop 363
gcgtttagcaagagtgatctatgaa

SEQ ID NO: 398082 - DNA, 25 bp, Artificial
  probe
  misc_feature (1)..(25): SEQ ID NO: 5040; WAN024FE3; Start 234; Stop 258
ggtttgtcatccagactttcctaaa

SEQ ID NO: 398083 - DNA, 25 bp, Artificial
  probe
  misc_feature (1)..(25): SEQ ID NO: 5040; WAN024FE3; Start 93; Stop 117
aaatccttctccagaaattcgtaat

SEQ ID NO: 398084 - DNA, 25 bp, Artificial
  probe
  misc_feature (1)..(25): SEQ ID NO: 5040; WAN024FE3; Start 346; Stop 370
gcaagagtgatctatgaacctattt

SEQ ID NO: 398085 - DNA, 25 bp, Artificial
  probe
  misc_feature (1)..(25): SEQ ID NO: 5040; WAN024FE3; Start 512; Stop 536
atagtttacaagatgacctgaaaga

SEQ ID NO: 398086 - DNA, 25 bp, Artificial
  probe
  misc_feature (1)..(25): SEQ ID NO: 5040; WAN024FE3; Start 508; Stop 532
agaaatagtttacaagatgacctga

SEQ ID NO: 398087 - DNA, 25 bp, Artificial
  probe
  misc_feature (1)..(25): SEQ ID NO: 5040; WAN024FE3; Start 517; Stop 541
ttacaagatgacctgaaagaagcta

SEQ ID NO: 398088 - DNA, 25 bp, Artificial
  probe
  misc_feature (1)..(25): SEQ ID NO: 5040; WAN024FE3; Start 518; Stop 542
tacaagatgacctgaaagaagctat

SEQ ID NO: 398089 - DNA, 25 bp, Artificial
  probe
  misc_feature (1)..(25): SEQ ID NO: 5040; WAN024FE3; Start 516; Stop 540
tttacaagatgacctgaaagaagct

SEQ ID NO: 398090 - DNA, 25 bp, Artificial
  probe
  misc_feature (1)..(25): SEQ ID NO: 5040; WAN024FE3; Start 507; Stop 531
gagaaatagtttacaagatgacctg

SEQ ID NO: 398091 - DNA, 25 bp, Artificial
  probe
  misc_feature (1)..(25): SEQ ID NO: 5040; WAN024FE3; Start 505; Stop 529
cagagaaatagtttacaagatgacc

SEQ ID NO: 398092 - DNA, 25 bp, Artificial
  probe
  misc_feature (1)..(25): SEQ ID NO: 5040; WAN024FE3; Start 504; Stop 528
ccagagaaatagtttacaagatgac

SEQ ID NO: 398093 - DNA, 25 bp, Artificial
  probe
  misc_feature (1)..(25): SEQ ID NO: 5040; WAN024FE3; Start 519; Stop 543
acaagatgacctgaaagaagctatc

SEQ ID NO: 398094 - DNA, 25 bp, Artificial
  probe
  misc_feature (1)..(25): SEQ ID NO: 5040; WAN024FE3; Start 506; Stop 530
agagaaatagtttacaagatgacct

SEQ ID NO: 398095 - DNA, 25 bp, Artificial
  probe
  misc_feature (1)..(25): SEQ ID NO: 5041; WAN024FE2; Start 140; Stop 164
ctaaggagattcaggaagagctatt

SEQ ID NO: 398096 - DNA, 25 bp, Artificial
  probe
  misc_feature (1)..(25): SEQ ID NO: 5041; WAN024FE2; Start 393; Stop 417
aaaggatacaacaggtttctcaagt

SEQ ID NO: 398097 - DNA, 25 bp, Artificial
  probe
  misc_feature (1)..(25): SEQ ID NO: 5041; WAN024FE2; Start 399; Stop 423
tacaacaggtttctcaagtcagtat

SEQ ID NO: 398098 - DNA, 25 bp, Artificial
  probe
  misc_feature (1)..(25): SEQ ID NO: 5041; WAN024FE2; Start 398; Stop 422
atacaacaggtttctcaagtcagta

SEQ ID NO: 398099 - DNA, 25 bp, Artificial
  probe
  misc_feature (1)..(25): SEQ ID NO: 5041; WAN024FE2; Start 397; Stop 421
gatacaacaggtttctcaagtcagt

SEQ ID NO: 398100 - DNA, 25 bp, Artificial
  probe
  misc_feature (1)..(25): SEQ ID NO: 5041; WAN024FE2; Start 394; Stop 418
aaggatacaacaggtttctcaagtc

SEQ ID NO: 398101 - DNA, 25 bp, Artificial
  probe
  misc_feature (1)..(25): SEQ ID NO: 5041; WAN024FE2; Start 400; Stop 424
acaacaggtttctcaagtcagtatg

SEQ ID NO: 398102 - DNA, 25 bp, Artificial
  probe
  misc_feature (1)..(25): SEQ ID NO: 5041; WAN024FE2; Start 135; Stop 159
ctttgctaaggagattcaggaagag

SEQ ID NO: 398103 - DNA, 25 bp, Artificial
  probe
  misc_feature (1)..(25): SEQ ID NO: 5041; WAN024FE2; Start 396; Stop 420
ggatacaacaggtttctcaagtcag

SEQ ID NO: 398104 - DNA, 25 bp, Artificial
  probe
  misc_feature (1)..(25): SEQ ID NO: 5041; WAN024FE2; Start 416; Stop 440
gtcagtatggttgggttcattcttt

SEQ ID NO: 398105 - DNA, 25 bp, Artificial
  probe
  misc_feature (1)..(25): SEQ ID NO: 5041; WAN024FE2; Start 401; Stop 425
caacaggtttctcaagtcagtatgg

SEQ ID NO: 398106 - DNA, 25 bp, Artificial
  probe
  misc_feature (1)..(25): SEQ ID NO: 5041; WAN024FE2; Start 395; Stop 419
aggatacaacaggtttctcaagtca

SEQ ID NO: 398107 - DNA, 25 bp, Artificial
  probe
  misc_feature (1)..(25): SEQ ID NO: 5041; WAN024FE2; Start 752; Stop 776
gtttacaagatgagttgaaagaagc

SEQ ID NO: 398108 - DNA, 25 bp, Artificial
  probe
  misc_feature (1)..(25): SEQ ID NO: 5041; WAN024FE2; Start 403; Stop 427
acaggtttctcaagtcagtatggtt

SEQ ID NO: 398109 - DNA, 25 bp, Artificial
  probe
  misc_feature (1)..(25): SEQ ID NO: 5041; WAN024FE2; Start 402; Stop 426
aacaggtttctcaagtcagtatggt

SEQ ID NO: 398110 - DNA, 25 bp, Artificial
  probe
  misc_feature (1)..(25): SEQ ID NO: 5041; WAN024FE2; Start 404; Stop 428
caggtttctcaagtcagtatggttg

SEQ ID NO: 398111 - DNA, 25 bp, Artificial
  probe
  misc_feature (1)..(25): SEQ ID NO: 5041; WAN024FE2; Start 415; Stop 439
agtcagtatggttgggttcattctt

SEQ ID NO: 398112 - DNA, 25 bp, Artificial
  probe
  misc_feature (1)..(25): SEQ ID NO: 5041; WAN024FE2; Start 414; Stop 438
aagtcagtatggttgggttcattct

SEQ ID NO: 398113 - DNA, 25 bp, Artificial
  probe
  misc_feature (1)..(25): SEQ ID NO: 5041; WAN024FE2; Start 413; Stop 437
caagtcagtatggttgggttcattc

SEQ ID NO: 398114 - DNA, 25 bp, Artificial
  probe
  misc_feature (1)..(25): SEQ ID NO: 5041; WAN024FE2; Start 144; Stop 168
ggagattcaggaagagctatttaca

SEQ ID NO: 398115 - DNA, 25 bp, Artificial
  probe
  misc_feature (1)..(25): SEQ ID NO: 5041; WAN024FE2; Start 148; Stop 172
attcaggaagagctatttacacagg

SEQ ID NO: 398116 - DNA, 25 bp, Artificial
  probe
  misc_feature (1)..(25): SEQ ID NO: 5041; WAN024FE2; Start 143; Stop 167
aggagattcaggaagagctatttac

SEQ ID NO: 398117 - DNA, 25 bp, Artificial
  probe
  misc_feature (1)..(25): SEQ ID NO: 5041; WAN024FE2; Start 146; Stop 170
agattcaggaagagctatttacaca

SEQ ID NO: 398118 - DNA, 25 bp, Artificial
  probe
  misc_feature (1)..(25): SEQ ID NO: 5041; WAN024FE2; Start 759; Stop 783
agatgagttgaaagaagctatccag

SEQ ID NO: 398119 - DNA, 25 bp, Artificial
  probe
  misc_feature (1)..(25): SEQ ID NO: 5041; WAN024FE2; Start 758; Stop 782
aagatgagttgaaagaagctatcca

SEQ ID NO: 398120 - DNA, 25 bp, Artificial
  probe
  misc_feature (1)..(25): SEQ ID NO: 5041; WAN024FE2; Start 412; Stop 436
tcaagtcagtatggttgggttcatt

SEQ ID NO: 398121 - DNA, 25 bp, Artificial
  probe
  misc_feature (1)..(25): SEQ ID NO: 5041; WAN024FE2; Start 761; Stop 785
atgagttgaaagaagctatccagtc

SEQ ID NO: 398122 - DNA, 25 bp, Artificial
  probe
  misc_feature (1)..(25): SEQ ID NO: 5041; WAN024FE2; Start 43; Stop 67
aaaccaaattataaccaggaggaaa

SEQ ID NO: 398123 - DNA, 25 bp, Artificial
  probe
  misc_feature (1)..(25): SEQ ID NO: 5041; WAN024FE2; Start 147; Stop 171
gattcaggaagagctatttacacag

SEQ ID NO: 398124 - DNA, 25 bp, Artificial
  probe
  misc_feature (1)..(25): SEQ ID NO: 5041; WAN024FE2; Start 760; Stop 784
gatgagttgaaagaagctatccagt

SEQ ID NO: 398125 - DNA, 25 bp, Artificial
  probe
  misc_feature (1)..(25): SEQ ID NO: 5041; WAN024FE2; Start 145; Stop 169
gagattcaggaagagctatttacac

SEQ ID NO: 398126 - DNA, 25 bp, Artificial
  probe
  misc_feature (1)..(25): SEQ ID NO: 5041; WAN024FE2; Start 44; Stop 68
aaccaaattataaccaggaggaaat

SEQ ID NO: 398127 - DNA, 25 bp, Artificial
  probe
  misc_feature (1)..(25): SEQ ID NO: 5041; WAN024FE2; Start 149; Stop 173
ttcaggaagagctatttacacagga

SEQ ID NO: 398128 - DNA, 25 bp, Artificial
  probe
  misc_feature (1)..(25): SEQ ID NO: 5042; WAN024C9I; Start 190; Stop 214
aactgtgatacgaccgttgttgtta

SEQ ID NO: 398129 - DNA, 25 bp, Artificial
  probe
  misc_feature (1)..(25): SEQ ID NO: 5042; WAN024C9I; Start 191; Stop 215
actgtgatacgaccgttgttgttac

SEQ ID NO: 398130 - DNA, 25 bp, Artificial
  probe
  misc_feature (1)..(25): SEQ ID NO: 5042; WAN024C9I; Start 189; Stop 213
gaactgtgatacgaccgttgttgtt

SEQ ID NO: 398131 - DNA, 25 bp, Artificial
  probe
  misc_feature (1)..(25): SEQ ID NO: 5042; WAN024C9I; Start 128; Stop 152
tctttattacgtttgaagtcaacca

SEQ ID NO: 398132 - DNA, 25 bp, Artificial
  probe
  misc_feature (1)..(25): SEQ ID NO: 5042; WAN024C9I; Start 127; Stop 151
gtctttattacgtttgaagtcaacc

SEQ ID NO: 398133 - DNA, 25 bp, Artificial
  probe
  misc_feature (1)..(25): SEQ ID NO: 5042; WAN024C9I; Start 129; Stop 153
ctttattacgtttgaagtcaaccaa

SEQ ID NO: 398134 - DNA, 25 bp, Artificial
  probe
  misc_feature (1)..(25): SEQ ID NO: 5042; WAN024C9I; Start 124; Stop 148
gttgtctttattacgtttgaagtca

SEQ ID NO: 398135 - DNA, 25 bp, Artificial
  probe
  misc_feature (1)..(25): SEQ ID NO: 5042; WAN024C9I; Start 126; Stop 150
tgtctttattacgtttgaagtcaac

SEQ ID NO: 398136 - DNA, 25 bp, Artificial
  probe
  misc_feature (1)..(25): SEQ ID NO: 5042; WAN024C9I; Start 29; Stop 53
atgatgtatgctttcacaccgtcag

SEQ ID NO: 398137 - DNA, 25 bp, Artificial
  probe
  misc_feature (1)..(25): SEQ ID NO: 5042; WAN024C9I; Start 28; Stop 52
gatgatgtatgctttcacaccgtca

SEQ ID NO: 398138 - DNA, 25 bp, Artificial
  probe
  misc_feature (1)..(25): SEQ ID NO: 5042; WAN024C9I; Start 125; Stop 149
ttgtctttattacgtttgaagtcaa

SEQ ID NO: 398139 - DNA, 25 bp, Artificial
  probe
  misc_feature (1)..(25): SEQ ID NO: 5042; WAN024C9I; Start 13; Stop 37
aagaccttttggagcgatgatgtat

SEQ ID NO: 398140 - DNA, 25 bp, Artificial
  probe
  misc_feature (1)..(25): SEQ ID NO: 5042; WAN024C9I; Start 2; Stop 26
tgacctacttcaagaccttttggag

SEQ ID NO: 398141 - DNA, 25 bp, Artificial
  probe
  misc_feature (1)..(25): SEQ ID NO: 5042; WAN024C9I; Start 123; Stop 147
cgttgtctttattacgtttgaagtc

SEQ ID NO: 398142 - DNA, 25 bp, Artificial
  probe
  misc_feature (1)..(25): SEQ ID NO: 5042; WAN024C9I; Start 14; Stop 38
agaccttttggagcgatgatgtatg

SEQ ID NO: 398143 - DNA, 25 bp, Artificial
  probe
  misc_feature (1)..(25): SEQ ID NO: 5042; WAN024C9I; Start 20; Stop 44
tttggagcgatgatgtatgctttca

SEQ ID NO: 398144 - DNA, 25 bp, Artificial
  probe
  misc_feature (1)..(25): SEQ ID NO: 5042; WAN024C9I; Start 6; Stop 30
ctacttcaagaccttttggagcgat

SEQ ID NO: 398145 - DNA, 25 bp, Artificial
  probe
  misc_feature (1)..(25): SEQ ID NO: 5042; WAN024C9I; Start 130; Stop 154
tttattacgtttgaagtcaaccaaa

SEQ ID NO: 398146 - DNA, 25 bp, Artificial
  probe
  misc_feature (1)..(25): SEQ ID NO: 5042; WAN024C9I; Start 27; Stop 51
cgatgatgtatgctttcacaccgtc

SEQ ID NO: 398147 - DNA, 25 bp, Artificial
  probe
  misc_feature (1)..(25): SEQ ID NO: 5042; WAN024C9I; Start 194; Stop 218
gtgatacgaccgttgttgttacgac

SEQ ID NO: 398148 - DNA, 25 bp, Artificial
  probe
  misc_feature (1)..(25): SEQ ID NO: 5042; WAN024C9I; Start 192; Stop 216
ctgtgatacgaccgttgttgttacg

SEQ ID NO: 398149 - DNA, 25 bp, Artificial
  probe
  misc_feature (1)..(25): SEQ ID NO: 5042; WAN024C9I; Start 7; Stop 31
tacttcaagaccttttggagcgatg

SEQ ID NO: 398150 - DNA, 25 bp, Artificial
  probe
  misc_feature (1)..(25): SEQ ID NO: 5042; WAN024C9I; Start 31; Stop 55
gatgtatgctttcacaccgtcagtg

SEQ ID NO: 398151 - DNA, 25 bp, Artificial
  probe
  misc_feature (1)..(25): SEQ ID NO: 5042; WAN024C9I; Start 12; Stop 36
caagaccttttggagcgatgatgta

SEQ ID NO: 398152 - DNA, 25 bp, Artificial
  probe
  misc_feature (1)..(25): SEQ ID NO: 5042; WAN024C9I; Start 51; Stop 75
cagtgtagtgtacaagagcgatgtt

SEQ ID NO: 398153 - DNA, 25 bp, Artificial
  probe
  misc_feature (1)..(25): SEQ ID NO: 5042; WAN024C9I; Start 30; Stop 54
tgatgtatgctttcacaccgtcagt

SEQ ID NO: 398154 - DNA, 25 bp, Artificial
  probe
  misc_feature (1)..(25): SEQ ID NO: 5042; WAN024C9I; Start 3; Stop 27
gacctacttcaagaccttttggagc

SEQ ID NO: 398155 - DNA, 25 bp, Artificial
  probe
  misc_feature (1)..(25): SEQ ID NO: 5042; WAN024C9I; Start 21; Stop 45
ttggagcgatgatgtatgctttcac

SEQ ID NO: 398156 - DNA, 25 bp, Artificial
  probe
  misc_feature (1)..(25): SEQ ID NO: 5042; WAN024C9I; Start 193; Stop 217
tgtgatacgaccgttgttgttacga

SEQ ID NO: 398157 - DNA, 25 bp, Artificial
  probe
  misc_feature (1)..(25): SEQ ID NO: 5042; WAN024C9I; Start 9; Stop 33
cttcaagaccttttggagcgatgat

SEQ ID NO: 398158 - DNA, 25 bp, Artificial
  probe
  misc_feature (1)..(25): SEQ ID NO: 5042; WAN024C9I; Start 49; Stop 73
gtcagtgtagtgtacaagagcgatg

SEQ ID NO: 398159 - DNA, 25 bp, Artificial
  probe
  misc_feature (1)..(25): SEQ ID NO: 5042; WAN024C9I; Start 10; Stop 34
ttcaagaccttttggagcgatgatg

SEQ ID NO: 398160 - DNA, 25 bp, Artificial
  probe
  misc_feature (1)..(25): SEQ ID NO: 5042; WAN024C9I; Start 19; Stop 43
ttttggagcgatgatgtatgctttc

SEQ ID NO: 398161 - DNA, 25 bp, Artificial
  probe
  misc_feature (1)..(25): SEQ ID NO: 5043; WAN024EUL; Start 24; Stop 48
agtattgttcttgcctaagctatca

SEQ ID NO: 398162 - DNA, 25 bp, Artificial
  probe
  misc_feature (1)..(25): SEQ ID NO: 5043; WAN024EUL; Start 23; Stop 47
aagtattgttcttgcctaagctatc

SEQ ID NO: 398163 - DNA, 25 bp, Artificial
  probe
  misc_feature (1)..(25): SEQ ID NO: 5043; WAN024EUL; Start 25; Stop 49
gtattgttcttgcctaagctatcaa

SEQ ID NO: 398164 - DNA, 25 bp, Artificial
  probe
  misc_feature (1)..(25): SEQ ID NO: 5043; WAN024EUL; Start 28; Stop 52
ttgttcttgcctaagctatcaataa

SEQ ID NO: 398165 - DNA, 25 bp, Artificial
  probe
  misc_feature (1)..(25): SEQ ID NO: 5043; WAN024EUL; Start 10; Stop 34
agtcacatctatcaagtattgttct

SEQ ID NO: 398166 - DNA, 25 bp, Artificial
  probe
  misc_feature (1)..(25): SEQ ID NO: 5043; WAN024EUL; Start 11; Stop 35
gtcacatctatcaagtattgttctt

SEQ ID NO: 398167 - DNA, 25 bp, Artificial
  probe
  misc_feature (1)..(25): SEQ ID NO: 5043; WAN024EUL; Start 91; Stop 115
gccttatcctatctaagtcatttcg

SEQ ID NO: 398168 - DNA, 25 bp, Artificial
  probe
  misc_feature (1)..(25): SEQ ID NO: 5043; WAN024EUL; Start 27; Stop 51
attgttcttgcctaagctatcaata

SEQ ID NO: 398169 - DNA, 25 bp, Artificial
  probe
  misc_feature (1)..(25): SEQ ID NO: 5043; WAN024EUL; Start 26; Stop 50
tattgttcttgcctaagctatcaat

SEQ ID NO: 398170 - DNA, 25 bp, Artificial
  probe
  misc_feature (1)..(25): SEQ ID NO: 5043; WAN024EUL; Start 90; Stop 114
tgccttatcctatctaagtcatttc

SEQ ID NO: 398171 - DNA, 25 bp, Artificial
  probe
  misc_feature (1)..(25): SEQ ID NO: 5043; WAN024EUL; Start 29; Stop 53
tgttcttgcctaagctatcaataaa

SEQ ID NO: 398172 - DNA, 25 bp, Artificial
  probe
  misc_feature (1)..(25): SEQ ID NO: 5043; WAN024EUL; Start 19; Stop 43
tatcaagtattgttcttgcctaagc

SEQ ID NO: 398173 - DNA, 25 bp, Artificial
  probe
  misc_feature (1)..(25): SEQ ID NO: 5043; WAN024EUL; Start 14; Stop 38
acatctatcaagtattgttcttgcc

SEQ ID NO: 398174 - DNA, 25 bp, Artificial
  probe
  misc_feature (1)..(25): SEQ ID NO: 5043; WAN024EUL; Start 9; Stop 33
tagtcacatctatcaagtattgttc

SEQ ID NO: 398175 - DNA, 25 bp, Artificial
  probe
  misc_feature (1)..(25): SEQ ID NO: 5043; WAN024EUL; Start 15; Stop 39
catctatcaagtattgttcttgcct

SEQ ID NO: 398176 - DNA, 25 bp, Artificial
  probe
  misc_feature (1)..(25): SEQ ID NO: 5043; WAN024EUL; Start 89; Stop 113
ttgccttatcctatctaagtcattt

SEQ ID NO: 398177 - DNA, 25 bp, Artificial
  probe
  misc_feature (1)..(25): SEQ ID NO: 5043; WAN024EUL; Start 88; Stop 112
tttgccttatcctatctaagtcatt

SEQ ID NO: 398178 - DNA, 25 bp, Artificial
  probe
  misc_feature (1)..(25): SEQ ID NO: 5043; WAN024EUL; Start 21; Stop 45
tcaagtattgttcttgcctaagcta

SEQ ID NO: 398179 - DNA, 25 bp, Artificial
  probe
  misc_feature (1)..(25): SEQ ID NO: 5043; WAN024EUL; Start 20; Stop 44
atcaagtattgttcttgcctaagct

SEQ ID NO: 398180 - DNA, 25 bp, Artificial
  probe
  misc_feature (1)..(25): SEQ ID NO: 5043; WAN024EUL; Start 13; Stop 37
cacatctatcaagtattgttcttgc

SEQ ID NO: 398181 - DNA, 25 bp, Artificial
  probe
  misc_feature (1)..(25): SEQ ID NO: 5043; WAN024EUL; Start 22; Stop 46
caagtattgttcttgcctaagctat

SEQ ID NO: 398182 - DNA, 25 bp, Artificial
  probe
  misc_feature (1)..(25): SEQ ID NO: 5043; WAN024EUL; Start 3; Stop 27
gacctatagtcacatctatcaagta

SEQ ID NO: 398183 - DNA, 25 bp, Artificial
  probe
  misc_feature (1)..(25): SEQ ID NO: 5043; WAN024EUL; Start 17; Stop 41
tctatcaagtattgttcttgcctaa

SEQ ID NO: 398184 - DNA, 25 bp, Artificial
  probe
  misc_feature (1)..(25): SEQ ID NO: 5043; WAN024EUL; Start 18; Stop 42
ctatcaagtattgttcttgcctaag

SEQ ID NO: 398185 - DNA, 25 bp, Artificial
  probe
  misc_feature (1)..(25): SEQ ID NO: 5043; WAN024EUL; Start 16; Stop 40
atctatcaagtattgttcttgccta

SEQ ID NO: 398186 - DNA, 25 bp, Artificial
  probe
  misc_feature (1)..(25): SEQ ID NO: 5043; WAN024EUL; Start 92; Stop 116
ccttatcctatctaagtcatttcga

SEQ ID NO: 398187 - DNA, 25 bp, Artificial
  probe
  misc_feature (1)..(25): SEQ ID NO: 5043; WAN024EUL; Start 8; Stop 32
atagtcacatctatcaagtattgtt

SEQ ID NO: 398188 - DNA, 25 bp, Artificial
  probe
  misc_feature (1)..(25): SEQ ID NO: 5043; WAN024EUL; Start 4; Stop 28
acctatagtcacatctatcaagtat

SEQ ID NO: 398189 - DNA, 25 bp, Artificial
  probe
  misc_feature (1)..(25): SEQ ID NO: 5043; WAN024EUL; Start 12; Stop 36
tcacatctatcaagtattgttcttg

SEQ ID NO: 398190 - DNA, 25 bp, Artificial
  probe
  misc_feature (1)..(25): SEQ ID NO: 5043; WAN024EUL; Start 2; Stop 26
tgacctatagtcacatctatcaagt

SEQ ID NO: 398191 - DNA, 25 bp, Artificial
  probe
  misc_feature (1)..(25): SEQ ID NO: 5043; WAN024EUL; Start 87; Stop 111
ttttgccttatcctatctaagtcat

SEQ ID NO: 398192 - DNA, 25 bp, Artificial
  probe
  misc_feature (1)..(25): SEQ ID NO: 5043; WAN024EUL; Start 86; Stop 110
attttgccttatcctatctaagtca

SEQ ID NO: 398193 - DNA, 25 bp, Artificial
  probe
  misc_feature (1)..(25): SEQ ID NO: 5043; WAN024EUL; Start 30; Stop 54
gttcttgcctaagctatcaataaaa

SEQ ID NO: 398194 - DNA, 25 bp, Artificial
  probe
  misc_feature (1)..(25): SEQ ID NO: 5044; WAN024EZ2; Start 337; Stop 361
tcaatatcgacggacatactggatt

SEQ ID NO: 398195 - DNA, 25 bp, Artificial
  probe
  misc_feature (1)..(25): SEQ ID NO: 5044; WAN024EZ2; Start 336; Stop 360
ttcaatatcgacggacatactggat

SEQ ID NO: 398196 - DNA, 25 bp, Artificial
  probe
  misc_feature (1)..(25): SEQ ID NO: 5044; WAN024EZ2; Start 345; Stop 369
gacggacatactggatttcttcaaa

SEQ ID NO: 398197 - DNA, 25 bp, Artificial
  probe
  misc_feature (1)..(25): SEQ ID NO: 5044; WAN024EZ2; Start 128; Stop 152
catccttggtgatttcattgaagac

SEQ ID NO: 398198 - DNA, 25 bp, Artificial
  probe
  misc_feature (1)..(25): SEQ ID NO: 5044; WAN024EZ2; Start 346; Stop 370
acggacatactggatttcttcaaat

SEQ ID NO: 398199 - DNA, 25 bp, Artificial
  probe
  misc_feature (1)..(25): SEQ ID NO: 5044; WAN024EZ2; Start 359; Stop 383
atttcttcaaatcacggatatgccc

SEQ ID NO: 398200 - DNA, 25 bp, Artificial
  probe
  misc_feature (1)..(25): SEQ ID NO: 5044; WAN024EZ2; Start 127; Stop 151
gcatccttggtgatttcattgaaga

SEQ ID NO: 398201 - DNA, 25 bp, Artificial
  probe
  misc_feature (1)..(25): SEQ ID NO: 5044; WAN024EZ2; Start 339; Stop 363
aatatcgacggacatactggatttc

SEQ ID NO: 398202 - DNA, 25 bp, Artificial
  probe
  misc_feature (1)..(25): SEQ ID NO: 5044; WAN024EZ2; Start 338; Stop 362
caatatcgacggacatactggattt

SEQ ID NO: 398203 - DNA, 25 bp, Artificial
  probe
  misc_feature (1)..(25): SEQ ID NO: 5044; WAN024EZ2; Start 344; Stop 368
cgacggacatactggatttcttcaa

SEQ ID NO: 398204 - DNA, 25 bp, Artificial
  probe
  misc_feature (1)..(25): SEQ ID NO: 5044; WAN024EZ2; Start 340; Stop 364
atatcgacggacatactggatttct

SEQ ID NO: 398205 - DNA, 25 bp, Artificial
  probe
  misc_feature (1)..(25): SEQ ID NO: 5044; WAN024EZ2; Start 341; Stop 365
tatcgacggacatactggatttctt

SEQ ID NO: 398206 - DNA, 25 bp, Artificial
  probe
  misc_feature (1)..(25): SEQ ID NO: 5044; WAN024EZ2; Start 170; Stop 194
tttcatccaagttgagaatatgggc

SEQ ID NO: 398207 - DNA, 25 bp, Artificial
  probe
  misc_feature (1)..(25): SEQ ID NO: 5044; WAN024EZ2; Start 335; Stop 359
tttcaatatcgacggacatactgga

SEQ ID NO: 398208 - DNA, 25 bp, Artificial
  probe
  misc_feature (1)..(25): SEQ ID NO: 5044; WAN024EZ2; Start 129; Stop 153
atccttggtgatttcattgaagacc

SEQ ID NO: 398209 - DNA, 25 bp, Artificial
  probe
  misc_feature (1)..(25): SEQ ID NO: 5044; WAN024EZ2; Start 342; Stop 366
atcgacggacatactggatttcttc

SEQ ID NO: 398210 - DNA, 25 bp, Artificial
  probe
  misc_feature (1)..(25): SEQ ID NO: 5044; WAN024EZ2; Start 126; Stop 150
tgcatccttggtgatttcattgaag

SEQ ID NO: 398211 - DNA, 25 bp, Artificial
  probe
  misc_feature (1)..(25): SEQ ID NO: 5044; WAN024EZ2; Start 125; Stop 149
ctgcatccttggtgatttcattgaa

SEQ ID NO: 398212 - DNA, 25 bp, Artificial
  probe
  misc_feature (1)..(25): SEQ ID NO: 5044; WAN024EZ2; Start 6; Stop 30
cttcttccacaaaataggcgaaatc

SEQ ID NO: 398213 - DNA, 25 bp, Artificial
  probe
  misc_feature (1)..(25): SEQ ID NO: 5044; WAN024EZ2; Start 163; Stop 187
gcatcattttcatccaagttgagaa

SEQ ID NO: 398214 - DNA, 25 bp, Artificial
  probe
  misc_feature (1)..(25): SEQ ID NO: 5044; WAN024EZ2; Start 32; Stop 56
aataccctaccaagcgatccaagat

SEQ ID NO: 398215 - DNA, 25 bp, Artificial
  probe
  misc_feature (1)..(25): SEQ ID NO: 5044; WAN024EZ2; Start 123; Stop 147
gactgcatccttggtgatttcattg

SEQ ID NO: 398216 - DNA, 25 bp, Artificial
  probe
  misc_feature (1)..(25): SEQ ID NO: 5044; WAN024EZ2; Start 138; Stop 162
gatttcattgaagaccacacggttg

SEQ ID NO: 398217 - DNA, 25 bp, Artificial
  probe
  misc_feature (1)..(25): SEQ ID NO: 5044; WAN024EZ2; Start 124; Stop 148
actgcatccttggtgatttcattga

SEQ ID NO: 398218 - DNA, 25 bp, Artificial
  probe
  misc_feature (1)..(25): SEQ ID NO: 5044; WAN024EZ2; Start 162; Stop 186
ggcatcattttcatccaagttgaga

SEQ ID NO: 398219 - DNA, 25 bp, Artificial
  probe
  misc_feature (1)..(25): SEQ ID NO: 5044; WAN024EZ2; Start 164; Stop 188
catcattttcatccaagttgagaat

SEQ ID NO: 398220 - DNA, 25 bp, Artificial
  probe
  misc_feature (1)..(25): SEQ ID NO: 5044; WAN024EZ2; Start 31; Stop 55
gaataccctaccaagcgatccaaga

SEQ ID NO: 398221 - DNA, 25 bp, Artificial
  probe
  misc_feature (1)..(25): SEQ ID NO: 5044; WAN024EZ2; Start 17; Stop 41
aaataggcgaaatcgaataccctac

SEQ ID NO: 398222 - DNA, 25 bp, Artificial
  probe
  misc_feature (1)..(25): SEQ ID NO: 5044; WAN024EZ2; Start 300; Stop 324
tcctcggatattaatatattgcggt

SEQ ID NO: 398223 - DNA, 25 bp, Artificial
  probe
  misc_feature (1)..(25): SEQ ID NO: 5044; WAN024EZ2; Start 137; Stop 161
tgatttcattgaagaccacacggtt

SEQ ID NO: 398224 - DNA, 25 bp, Artificial
  probe
  misc_feature (1)..(25): SEQ ID NO: 5044; WAN024EZ2; Start 92; Stop 116
cgatcttacgaggttctttaaaagc

SEQ ID NO: 398225 - DNA, 25 bp, Artificial
  probe
  misc_feature (1)..(25): SEQ ID NO: 5044; WAN024EZ2; Start 333; Stop 357
attttcaatatcgacggacatactg

SEQ ID NO: 398226 - DNA, 25 bp, Artificial
  probe
  misc_feature (1)..(25): SEQ ID NO: 5044; WAN024EZ2; Start 122; Stop 146
tgactgcatccttggtgatttcatt

SEQ ID NO: 398227 - DNA, 25 bp, Artificial
  probe
  misc_feature (1)..(25): SEQ ID NO: 5045; WAN024FUP; Start 202; Stop 226
atggcacgaatgacatcaataatac

SEQ ID NO: 398228 - DNA, 25 bp, Artificial
  probe
  misc_feature (1)..(25): SEQ ID NO: 5045; WAN024FUP; Start 20; Stop 44
catccttgataactgttacaccttg

SEQ ID NO: 398229 - DNA, 25 bp, Artificial
  probe
  misc_feature (1)..(25): SEQ ID NO: 5045; WAN024FUP; Start 21; Stop 45
atccttgataactgttacaccttgg

SEQ ID NO: 398230 - DNA, 25 bp, Artificial
  probe
  misc_feature (1)..(25): SEQ ID NO: 5045; WAN024FUP; Start 19; Stop 43
gcatccttgataactgttacacctt

SEQ ID NO: 398231 - DNA, 25 bp, Artificial
  probe
  misc_feature (1)..(25): SEQ ID NO: 5045; WAN024FUP; Start 203; Stop 227
tggcacgaatgacatcaataatacc

SEQ ID NO: 398232 - DNA, 25 bp, Artificial
  probe
  misc_feature (1)..(25): SEQ ID NO: 5045; WAN024FUP; Start 201; Stop 225
catggcacgaatgacatcaataata

SEQ ID NO: 398233 - DNA, 25 bp, Artificial
  probe
  misc_feature (1)..(25): SEQ ID NO: 5045; WAN024FUP; Start 18; Stop 42
agcatccttgataactgttacacct

SEQ ID NO: 398234 - DNA, 25 bp, Artificial
  probe
  misc_feature (1)..(25): SEQ ID NO: 5045; WAN024FUP; Start 15; Stop 39
ctcagcatccttgataactgttaca

SEQ ID NO: 398235 - DNA, 25 bp, Artificial
  probe
  misc_feature (1)..(25): SEQ ID NO: 5045; WAN024FUP; Start 16; Stop 40
tcagcatccttgataactgttacac

SEQ ID NO: 398236 - DNA, 25 bp, Artificial
  probe
  misc_feature (1)..(25): SEQ ID NO: 5045; WAN024FUP; Start 14; Stop 38
cctcagcatccttgataactgttac

SEQ ID NO: 398237 - DNA, 25 bp, Artificial
  probe
  misc_feature (1)..(25): SEQ ID NO: 5045; WAN024FUP; Start 13; Stop 37
tcctcagcatccttgataactgtta

SEQ ID NO: 398238 - DNA, 25 bp, Artificial
  probe
  misc_feature (1)..(25): SEQ ID NO: 5045; WAN024FUP; Start 73; Stop 97
ggcaattcatcaatcaatcgtggaa

SEQ ID NO: 398239 - DNA, 25 bp, Artificial
  probe
  misc_feature (1)..(25): SEQ ID NO: 5045; WAN024FUP; Start 77; Stop 101
attcatcaatcaatcgtggaatcaa

SEQ ID NO: 398240 - DNA, 25 bp, Artificial
  probe
  misc_feature (1)..(25): SEQ ID NO: 5045; WAN024FUP; Start 76; Stop 100
aattcatcaatcaatcgtggaatca

SEQ ID NO: 398241 - DNA, 25 bp, Artificial
  probe
  misc_feature (1)..(25): SEQ ID NO: 5045; WAN024FUP; Start 74; Stop 98
gcaattcatcaatcaatcgtggaat

SEQ ID NO: 398242 - DNA, 25 bp, Artificial
  probe
  misc_feature (1)..(25): SEQ ID NO: 5045; WAN024FUP; Start 17; Stop 41
cagcatccttgataactgttacacc

SEQ ID NO: 398243 - DNA, 25 bp, Artificial
  probe
  misc_feature (1)..(25): SEQ ID NO: 5045; WAN024FUP; Start 75; Stop 99
caattcatcaatcaatcgtggaatc

SEQ ID NO: 398244 - DNA, 25 bp, Artificial
  probe
  misc_feature (1)..(25): SEQ ID NO: 5045; WAN024FUP; Start 79; Stop 103
tcatcaatcaatcgtggaatcaaag

SEQ ID NO: 398245 - DNA, 25 bp, Artificial
  probe
  misc_feature (1)..(25): SEQ ID NO: 5045; WAN024FUP; Start 78; Stop 102
ttcatcaatcaatcgtggaatcaaa

SEQ ID NO: 398246 - DNA, 25 bp, Artificial
  probe
  misc_feature (1)..(25): SEQ ID NO: 5045; WAN024FUP; Start 68; Stop 92
taatgggcaattcatcaatcaatcg

SEQ ID NO: 398247 - DNA, 25 bp, Artificial
  probe
  misc_feature (1)..(25): SEQ ID NO: 5045; WAN024FUP; Start 80; Stop 104
catcaatcaatcgtggaatcaaagc

SEQ ID NO: 398248 - DNA, 25 bp, Artificial
  probe
  misc_feature (1)..(25): SEQ ID NO: 5045; WAN024FUP; Start 12; Stop 36
ctcctcagcatccttgataactgtt

SEQ ID NO: 398249 - DNA, 25 bp, Artificial
  probe
  misc_feature (1)..(25): SEQ ID NO: 5045; WAN024FUP; Start 64; Stop 88
gcaataatgggcaattcatcaatca

SEQ ID NO: 398250 - DNA, 25 bp, Artificial
  probe
  misc_feature (1)..(25): SEQ ID NO: 5045; WAN024FUP; Start 65; Stop 89
caataatgggcaattcatcaatcaa

SEQ ID NO: 398251 - DNA, 25 bp, Artificial
  probe
  misc_feature (1)..(25): SEQ ID NO: 5045; WAN024FUP; Start 63; Stop 87
ggcaataatgggcaattcatcaatc

SEQ ID NO: 398252 - DNA, 25 bp, Artificial
  probe
  misc_feature (1)..(25): SEQ ID NO: 5045; WAN024FUP; Start 378; Stop 402
tttcttaccatccacacttaaatga

SEQ ID NO: 398253 - DNA, 25 bp, Artificial
  probe
  misc_feature (1)..(25): SEQ ID NO: 5045; WAN024FUP; Start 69; Stop 93
aatgggcaattcatcaatcaatcgt

SEQ ID NO: 398254 - DNA, 25 bp, Artificial
  probe
  misc_feature (1)..(25): SEQ ID NO: 5045; WAN024FUP; Start 67; Stop 91
ataatgggcaattcatcaatcaatc

SEQ ID NO: 398255 - DNA, 25 bp, Artificial
  probe
  misc_feature (1)..(25): SEQ ID NO: 5045; WAN024FUP; Start 22; Stop 46
tccttgataactgttacaccttggg

SEQ ID NO: 398256 - DNA, 25 bp, Artificial
  probe
  misc_feature (1)..(25): SEQ ID NO: 5045; WAN024FUP; Start 81; Stop 105
atcaatcaatcgtggaatcaaagcg

SEQ ID NO: 398257 - DNA, 25 bp, Artificial
  probe
  misc_feature (1)..(25): SEQ ID NO: 5045; WAN024FUP; Start 66; Stop 90
aataatgggcaattcatcaatcaat

SEQ ID NO: 398258 - DNA, 25 bp, Artificial
  probe
  misc_feature (1)..(25): SEQ ID NO: 5045; WAN024FUP; Start 25; Stop 49
ttgataactgttacaccttgggctt

SEQ ID NO: 398259 - DNA, 25 bp, Artificial
  probe
  misc_feature (1)..(25): SEQ ID NO: 5045; WAN024FUP; Start 70; Stop 94
atgggcaattcatcaatcaatcgtg

SEQ ID NO: 398260 - DNA, 25 bp, Artificial
  probe
  misc_feature (1)..(25): SEQ ID NO: 5046; WAN024FTS; Start 407; Stop 431
gtgatatagagcgtgaagaagagtg

SEQ ID NO: 398261 - DNA, 25 bp, Artificial
  probe
  misc_feature (1)..(25): SEQ ID NO: 5046; WAN024FTS; Start 405; Stop 429
aggtgatatagagcgtgaagaagag

SEQ ID NO: 398262 - DNA, 25 bp, Artificial
  probe
  misc_feature (1)..(25): SEQ ID NO: 5046; WAN024FTS; Start 404; Stop 428
gaggtgatatagagcgtgaagaaga

SEQ ID NO: 398263 - DNA, 25 bp, Artificial
  probe
  misc_feature (1)..(25): SEQ ID NO: 5046; WAN024FTS; Start 406; Stop 430
ggtgatatagagcgtgaagaagagt

SEQ ID NO: 398264 - DNA, 25 bp, Artificial
  probe
  misc_feature (1)..(25): SEQ ID NO: 5046; WAN024FTS; Start 446; Stop 470
aagttgagaacgaggtgatctattc

SEQ ID NO: 398265 - DNA, 25 bp, Artificial
  probe
  misc_feature (1)..(25): SEQ ID NO: 5046; WAN024FTS; Start 445; Stop 469
caagttgagaacgaggtgatctatt

SEQ ID NO: 398266 - DNA, 25 bp, Artificial
  probe
  misc_feature (1)..(25): SEQ ID NO: 5046; WAN024FTS; Start 681; Stop 705
aagcattagtatggcgagttatatt

SEQ ID NO: 398267 - DNA, 25 bp, Artificial
  probe
  misc_feature (1)..(25): SEQ ID NO: 5046; WAN024FTS; Start 254; Stop 278
ggattgagaatgctgttggtaatta

SEQ ID NO: 398268 - DNA, 25 bp, Artificial
  probe
  misc_feature (1)..(25): SEQ ID NO: 5046; WAN024FTS; Start 408; Stop 432
tgatatagagcgtgaagaagagtgc

SEQ ID NO: 398269 - DNA, 25 bp, Artificial
  probe
  misc_feature (1)..(25): SEQ ID NO: 5046; WAN024FTS; Start 403; Stop 427
cgaggtgatatagagcgtgaagaag

SEQ ID NO: 398270 - DNA, 25 bp, Artificial
  probe
  misc_feature (1)..(25): SEQ ID NO: 5046; WAN024FTS; Start 165; Stop 189
aatagcaagacaattcgagagagaa

SEQ ID NO: 398271 - DNA, 25 bp, Artificial
  probe
  misc_feature (1)..(25): SEQ ID NO: 5046; WAN024FTS; Start 682; Stop 706
agcattagtatggcgagttatatta

SEQ ID NO: 398272 - DNA, 25 bp, Artificial
  probe
  misc_feature (1)..(25): SEQ ID NO: 5046; WAN024FTS; Start 665; Stop 689
taggaacagagacacaaagcattag

SEQ ID NO: 398273 - DNA, 25 bp, Artificial
  probe
  misc_feature (1)..(25): SEQ ID NO: 5046; WAN024FTS; Start 154; Stop 178
agaaccgaagaaatagcaagacaat

SEQ ID NO: 398274 - DNA, 25 bp, Artificial
  probe
  misc_feature (1)..(25): SEQ ID NO: 5046; WAN024FTS; Start 667; Stop 691
ggaacagagacacaaagcattagta

SEQ ID NO: 398275 - DNA, 25 bp, Artificial
  probe
  misc_feature (1)..(25): SEQ ID NO: 5046; WAN024FTS; Start 489; Stop 513
acgaattaaacaaacggtaggaatg

SEQ ID NO: 398276 - DNA, 25 bp, Artificial
  probe
  misc_feature (1)..(25): SEQ ID NO: 5046; WAN024FTS; Start 488; Stop 512
cacgaattaaacaaacggtaggaat

SEQ ID NO: 398277 - DNA, 25 bp, Artificial
  probe
  misc_feature (1)..(25): SEQ ID NO: 5046; WAN024FTS; Start 155; Stop 179
gaaccgaagaaatagcaagacaatt

SEQ ID NO: 398278 - DNA, 25 bp, Artificial
  probe
  misc_feature (1)..(25): SEQ ID NO: 5046; WAN024FTS; Start 63; Stop 87
aaattatttacaagagacgatgccg

SEQ ID NO: 398279 - DNA, 25 bp, Artificial
  probe
  misc_feature (1)..(25): SEQ ID NO: 5046; WAN024FTS; Start 668; Stop 692
gaacagagacacaaagcattagtat

SEQ ID NO: 398280 - DNA, 25 bp, Artificial
  probe
  misc_feature (1)..(25): SEQ ID NO: 5046; WAN024FTS; Start 335; Stop 359
tagtgtttctatctgaggtggatgt

SEQ ID NO: 398281 - DNA, 25 bp, Artificial
  probe
  misc_feature (1)..(25): SEQ ID NO: 5046; WAN024FTS; Start 485; Stop 509
atacacgaattaaacaaacggtagg

SEQ ID NO: 398282 - DNA, 25 bp, Artificial
  probe
  misc_feature (1)..(25): SEQ ID NO: 5046; WAN024FTS; Start 486; Stop 510
tacacgaattaaacaaacggtagga

SEQ ID NO: 398283 - DNA, 25 bp, Artificial
  probe
  misc_feature (1)..(25): SEQ ID NO: 5046; WAN024FTS; Start 64; Stop 88
aattatttacaagagacgatgccga

SEQ ID NO: 398284 - DNA, 25 bp, Artificial
  probe
  misc_feature (1)..(25): SEQ ID NO: 5046; WAN024FTS; Start 678; Stop 702
acaaagcattagtatggcgagttat

SEQ ID NO: 398285 - DNA, 25 bp, Artificial
  probe
  misc_feature (1)..(25): SEQ ID NO: 5046; WAN024FTS; Start 669; Stop 693
aacagagacacaaagcattagtatg

SEQ ID NO: 398286 - DNA, 25 bp, Artificial
  probe
  misc_feature (1)..(25): SEQ ID NO: 5046; WAN024FTS; Start 397; Stop 421
aattatcgaggtgatatagagcgtg

SEQ ID NO: 398287 - DNA, 25 bp, Artificial
  probe
  misc_feature (1)..(25): SEQ ID NO: 5046; WAN024FTS; Start 396; Stop 420
gaattatcgaggtgatatagagcgt

SEQ ID NO: 398288 - DNA, 25 bp, Artificial
  probe
  misc_feature (1)..(25): SEQ ID NO: 5046; WAN024FTS; Start 395; Stop 419
tgaattatcgaggtgatatagagcg

SEQ ID NO: 398289 - DNA, 25 bp, Artificial
  probe
  misc_feature (1)..(25): SEQ ID NO: 5046; WAN024FTS; Start 145; Stop 169
tctacagacagaaccgaagaaatag

SEQ ID NO: 398290 - DNA, 25 bp, Artificial
  probe
  misc_feature (1)..(25): SEQ ID NO: 5046; WAN024FTS; Start 343; Stop 367
ctatctgaggtggatgtggatcaag

SEQ ID NO: 398291 - DNA, 25 bp, Artificial
  probe
  misc_feature (1)..(25): SEQ ID NO: 5046; WAN024FTS; Start 156; Stop 180
aaccgaagaaatagcaagacaattc

SEQ ID NO: 398292 - DNA, 25 bp, Artificial
  probe
  misc_feature (1)..(25): SEQ ID NO: 5046; WAN024FTS; Start 146; Stop 170
ctacagacagaaccgaagaaatagc

SEQ ID NO: 398293 - DNA, 25 bp, Artificial
  probe
  misc_feature (1)..(25): SEQ ID NO: 5047; WAN024CLP; Start 12; Stop 36
acttcagtttctaggagattttatc

SEQ ID NO: 398294 - DNA, 25 bp, Artificial
  probe
  misc_feature (1)..(25): SEQ ID NO: 5047; WAN024CLP; Start 11; Stop 35
aacttcagtttctaggagattttat

SEQ ID NO: 398295 - DNA, 25 bp, Artificial
  probe
  misc_feature (1)..(25): SEQ ID NO: 5047; WAN024CLP; Start 45; Stop 69
caagtgcttaggccgtgttcaattg

SEQ ID NO: 398296 - DNA, 25 bp, Artificial
  probe
  misc_feature (1)..(25): SEQ ID NO: 5047; WAN024CLP; Start 13; Stop 37
cttcagtttctaggagattttatct

SEQ ID NO: 398297 - DNA, 25 bp, Artificial
  probe
  misc_feature (1)..(25): SEQ ID NO: 5047; WAN024CLP; Start 15; Stop 39
tcagtttctaggagattttatcttt

SEQ ID NO: 398298 - DNA, 25 bp, Artificial
  probe
  misc_feature (1)..(25): SEQ ID NO: 5047; WAN024CLP; Start 14; Stop 38
ttcagtttctaggagattttatctt

SEQ ID NO: 398299 - DNA, 25 bp, Artificial
  probe
  misc_feature (1)..(25): SEQ ID NO: 5047; WAN024CLP; Start 10; Stop 34
aaacttcagtttctaggagatttta

SEQ ID NO: 398300 - DNA, 25 bp, Artificial
  probe
  misc_feature (1)..(25): SEQ ID NO: 5047; WAN024CLP; Start 16; Stop 40
cagtttctaggagattttatctttt

SEQ ID NO: 398301 - DNA, 25 bp, Artificial
  probe
  misc_feature (1)..(25): SEQ ID NO: 5048; WAN024FYS; Start 1; Stop 25
ttgacgaagagccacatacttatag

SEQ ID NO: 398302 - DNA, 25 bp, Artificial
  probe
  misc_feature (1)..(25): SEQ ID NO: 5048; WAN024FYS; Start 163; Stop 187
gtaccaagaagatgtatcgtaggaa

SEQ ID NO: 398303 - DNA, 25 bp, Artificial
  probe
  misc_feature (1)..(25): SEQ ID NO: 5048; WAN024FYS; Start 162; Stop 186
agtaccaagaagatgtatcgtagga

SEQ ID NO: 398304 - DNA, 25 bp, Artificial
  probe
  misc_feature (1)..(25): SEQ ID NO: 5048; WAN024FYS; Start 161; Stop 185
aagtaccaagaagatgtatcgtagg

SEQ ID NO: 398305 - DNA, 25 bp, Artificial
  probe
  misc_feature (1)..(25): SEQ ID NO: 5048; WAN024FYS; Start 159; Stop 183
ggaagtaccaagaagatgtatcgta

SEQ ID NO: 398306 - DNA, 25 bp, Artificial
  probe
  misc_feature (1)..(25): SEQ ID NO: 5048; WAN024FYS; Start 160; Stop 184
gaagtaccaagaagatgtatcgtag

SEQ ID NO: 398307 - DNA, 25 bp, Artificial
  probe
  misc_feature (1)..(25): SEQ ID NO: 5048; WAN024FYS; Start 2; Stop 26
tgacgaagagccacatacttatagc

SEQ ID NO: 398308 - DNA, 25 bp, Artificial
  probe
  misc_feature (1)..(25): SEQ ID NO: 5048; WAN024FYS; Start 98; Stop 122
cgcttgtacttaacatggtcttcta

SEQ ID NO: 398309 - DNA, 25 bp, Artificial
  probe
  misc_feature (1)..(25): SEQ ID NO: 5048; WAN024FYS; Start 169; Stop 193
agaagatgtatcgtaggaaagaacc

SEQ ID NO: 398310 - DNA, 25 bp, Artificial
  probe
  misc_feature (1)..(25): SEQ ID NO: 5048; WAN024FYS; Start 166; Stop 190
ccaagaagatgtatcgtaggaaaga

SEQ ID NO: 398311 - DNA, 25 bp, Artificial
  probe
  misc_feature (1)..(25): SEQ ID NO: 5048; WAN024FYS; Start 165; Stop 189
accaagaagatgtatcgtaggaaag

SEQ ID NO: 398312 - DNA, 25 bp, Artificial
  probe
  misc_feature (1)..(25): SEQ ID NO: 5048; WAN024FYS; Start 157; Stop 181
atggaagtaccaagaagatgtatcg

SEQ ID NO: 398313 - DNA, 25 bp, Artificial
  probe
  misc_feature (1)..(25): SEQ ID NO: 5048; WAN024FYS; Start 99; Stop 123
gcttgtacttaacatggtcttctat

SEQ ID NO: 398314 - DNA, 25 bp, Artificial
  probe
  misc_feature (1)..(25): SEQ ID NO: 5048; WAN024FYS; Start 164; Stop 188
taccaagaagatgtatcgtaggaaa

SEQ ID NO: 398315 - DNA, 25 bp, Artificial
  probe
  misc_feature (1)..(25): SEQ ID NO: 5048; WAN024FYS; Start 158; Stop 182
tggaagtaccaagaagatgtatcgt

SEQ ID NO: 398316 - DNA, 25 bp, Artificial
  probe
  misc_feature (1)..(25): SEQ ID NO: 5048; WAN024FYS; Start 96; Stop 120
gacgcttgtacttaacatggtcttc

SEQ ID NO: 398317 - DNA, 25 bp, Artificial
  probe
  misc_feature (1)..(25): SEQ ID NO: 5048; WAN024FYS; Start 168; Stop 192
aagaagatgtatcgtaggaaagaac

SEQ ID NO: 398318 - DNA, 25 bp, Artificial
  probe
  misc_feature (1)..(25): SEQ ID NO: 5048; WAN024FYS; Start 167; Stop 191
caagaagatgtatcgtaggaaagaa

SEQ ID NO: 398319 - DNA, 25 bp, Artificial
  probe
  misc_feature (1)..(25): SEQ ID NO: 5048; WAN024FYS; Start 97; Stop 121
acgcttgtacttaacatggtcttct

SEQ ID NO: 398320 - DNA, 25 bp, Artificial
  probe
  misc_feature (1)..(25): SEQ ID NO: 5048; WAN024FYS; Start 94; Stop 118
atgacgcttgtacttaacatggtct

SEQ ID NO: 398321 - DNA, 25 bp, Artificial
  probe
  misc_feature (1)..(25): SEQ ID NO: 5048; WAN024FYS; Start 105; Stop 129
acttaacatggtcttctataacagt

SEQ ID NO: 398322 - DNA, 25 bp, Artificial
  probe
  misc_feature (1)..(25): SEQ ID NO: 5048; WAN024FYS; Start 153; Stop 177
aattatggaagtaccaagaagatgt

SEQ ID NO: 398323 - DNA, 25 bp, Artificial
  probe
  misc_feature (1)..(25): SEQ ID NO: 5048; WAN024FYS; Start 95; Stop 119
tgacgcttgtacttaacatggtctt

SEQ ID NO: 398324 - DNA, 25 bp, Artificial
  probe
  misc_feature (1)..(25): SEQ ID NO: 5048; WAN024FYS; Start 172; Stop 196
agatgtatcgtaggaaagaaccttg

SEQ ID NO: 398325 - DNA, 25 bp, Artificial
  probe
  misc_feature (1)..(25): SEQ ID NO: 5048; WAN024FYS; Start 170; Stop 194
gaagatgtatcgtaggaaagaacct

SEQ ID NO: 398326 - DNA, 25 bp, Artificial
  probe
  misc_feature (1)..(25): SEQ ID NO: 5048; WAN024FYS; Start 175; Stop 199
tgtatcgtaggaaagaaccttgtag

SEQ ID NO: 398327 - DNA, 25 bp, Artificial
  probe
  misc_feature (1)..(25): SEQ ID NO: 5048; WAN024FYS; Start 173; Stop 197
gatgtatcgtaggaaagaaccttgt

SEQ ID NO: 398328 - DNA, 25 bp, Artificial
  probe
  misc_feature (1)..(25): SEQ ID NO: 5048; WAN024FYS; Start 171; Stop 195
aagatgtatcgtaggaaagaacctt

SEQ ID NO: 398329 - DNA, 25 bp, Artificial
  probe
  misc_feature (1)..(25): SEQ ID NO: 5048; WAN024FYS; Start 174; Stop 198
atgtatcgtaggaaagaaccttgta

SEQ ID NO: 398330 - DNA, 25 bp, Artificial
  probe
  misc_feature (1)..(25): SEQ ID NO: 5048; WAN024FYS; Start 156; Stop 180
tatggaagtaccaagaagatgtatc

SEQ ID NO: 398331 - DNA, 25 bp, Artificial
  probe
  misc_feature (1)..(25): SEQ ID NO: 5048; WAN024FYS; Start 176; Stop 200
gtatcgtaggaaagaaccttgtagc

SEQ ID NO: 398332 - DNA, 25 bp, Artificial
  probe
  misc_feature (1)..(25): SEQ ID NO: 5048; WAN024FYS; Start 11; Stop 35
gccacatacttatagctcttgtcga

SEQ ID NO: 398333 - DNA, 25 bp, Artificial
  probe
  misc_feature (1)..(25): SEQ ID NO: 5048; WAN024FYS; Start 155; Stop 179
ttatggaagtaccaagaagatgtat

SEQ ID NO: 398334 - DNA, 25 bp, Artificial
  probe
  misc_feature (1)..(25): SEQ ID NO: 5049; WAN024DW8; Start 37; Stop 61
ttcaaatggcatagacatacaacga

SEQ ID NO: 398335 - DNA, 25 bp, Artificial
  probe
  misc_feature (1)..(25): SEQ ID NO: 5049; WAN024DW8; Start 36; Stop 60
gttcaaatggcatagacatacaacg

SEQ ID NO: 398336 - DNA, 25 bp, Artificial
  probe
  misc_feature (1)..(25): SEQ ID NO: 5049; WAN024DW8; Start 35; Stop 59
cgttcaaatggcatagacatacaac

SEQ ID NO: 398337 - DNA, 25 bp, Artificial
  probe
  misc_feature (1)..(25): SEQ ID NO: 5049; WAN024DW8; Start 38; Stop 62
tcaaatggcatagacatacaacgag

SEQ ID NO: 398338 - DNA, 25 bp, Artificial
  probe
  misc_feature (1)..(25): SEQ ID NO: 5049; WAN024DW8; Start 129; Stop 153
aaatcttattggtcacggtattgcg

SEQ ID NO: 398339 - DNA, 25 bp, Artificial
  probe
  misc_feature (1)..(25): SEQ ID NO: 5049; WAN024DW8; Start 41; Stop 65
aatggcatagacatacaacgaggtc

SEQ ID NO: 398340 - DNA, 25 bp, Artificial
  probe
  misc_feature (1)..(25): SEQ ID NO: 5049; WAN024DW8; Start 130; Stop 154
aatcttattggtcacggtattgcgg

SEQ ID NO: 398341 - DNA, 25 bp, Artificial
  probe
  misc_feature (1)..(25): SEQ ID NO: 5049; WAN024DW8; Start 39; Stop 63
caaatggcatagacatacaacgagg

SEQ ID NO: 398342 - DNA, 25 bp, Artificial
  probe
  misc_feature (1)..(25): SEQ ID NO: 5049; WAN024DW8; Start 40; Stop 64
aaatggcatagacatacaacgaggt

SEQ ID NO: 398343 - DNA, 25 bp, Artificial
  probe
  misc_feature (1)..(25): SEQ ID NO: 5049; WAN024DW8; Start 135; Stop 159
tattggtcacggtattgcggtcata

SEQ ID NO: 398344 - DNA, 25 bp, Artificial
  probe
  misc_feature (1)..(25): SEQ ID NO: 5049; WAN024DW8; Start 144; Stop 168
cggtattgcggtcataaacaactac

SEQ ID NO: 398345 - DNA, 25 bp, Artificial
  probe
  misc_feature (1)..(25): SEQ ID NO: 5049; WAN024DW8; Start 98; Stop 122
atcttaatcaagcgaagcccgtatt

SEQ ID NO: 398346 - DNA, 25 bp, Artificial
  probe
  misc_feature (1)..(25): SEQ ID NO: 5049; WAN024DW8; Start 97; Stop 121
aatcttaatcaagcgaagcccgtat

SEQ ID NO: 398347 - DNA, 25 bp, Artificial
  probe
  misc_feature (1)..(25): SEQ ID NO: 5049; WAN024DW8; Start 143; Stop 167
acggtattgcggtcataaacaacta

SEQ ID NO: 398348 - DNA, 25 bp, Artificial
  probe
  misc_feature (1)..(25): SEQ ID NO: 5049; WAN024DW8; Start 147; Stop 171
tattgcggtcataaacaactaccac

SEQ ID NO: 398349 - DNA, 25 bp, Artificial
  probe
  misc_feature (1)..(25): SEQ ID NO: 5049; WAN024DW8; Start 146; Stop 170
gtattgcggtcataaacaactacca

SEQ ID NO: 398350 - DNA, 25 bp, Artificial
  probe
  misc_feature (1)..(25): SEQ ID NO: 5049; WAN024DW8; Start 101; Stop 125
ttaatcaagcgaagcccgtattctt

SEQ ID NO: 398351 - DNA, 25 bp, Artificial
  probe
  misc_feature (1)..(25): SEQ ID NO: 5049; WAN024DW8; Start 31; Stop 55
ttcacgttcaaatggcatagacata

SEQ ID NO: 398352 - DNA, 25 bp, Artificial
  probe
  misc_feature (1)..(25): SEQ ID NO: 5049; WAN024DW8; Start 34; Stop 58
acgttcaaatggcatagacatacaa

SEQ ID NO: 398353 - DNA, 25 bp, Artificial
  probe
  misc_feature (1)..(25): SEQ ID NO: 5049; WAN024DW8; Start 32; Stop 56
tcacgttcaaatggcatagacatac

SEQ ID NO: 398354 - DNA, 25 bp, Artificial
  probe
  misc_feature (1)..(25): SEQ ID NO: 5049; WAN024DW8; Start 131; Stop 155
atcttattggtcacggtattgcggt

SEQ ID NO: 398355 - DNA, 25 bp, Artificial
  probe
  misc_feature (1)..(25): SEQ ID NO: 5049; WAN024DW8; Start 26; Stop 50
acttcttcacgttcaaatggcatag

SEQ ID NO: 398356 - DNA, 25 bp, Artificial
  probe
  misc_feature (1)..(25): SEQ ID NO: 5049; WAN024DW8; Start 128; Stop 152
aaaatcttattggtcacggtattgc

SEQ ID NO: 398357 - DNA, 25 bp, Artificial
  probe
  misc_feature (1)..(25): SEQ ID NO: 5049; WAN024DW8; Start 114; Stop 138
gcccgtattcttccaaaatcttatt

SEQ ID NO: 398358 - DNA, 25 bp, Artificial
  probe
  misc_feature (1)..(25): SEQ ID NO: 5049; WAN024DW8; Start 113; Stop 137
agcccgtattcttccaaaatcttat

SEQ ID NO: 398359 - DNA, 25 bp, Artificial
  probe
  misc_feature (1)..(25): SEQ ID NO: 5049; WAN024DW8; Start 27; Stop 51
cttcttcacgttcaaatggcataga

SEQ ID NO: 398360 - DNA, 25 bp, Artificial
  probe
  misc_feature (1)..(25): SEQ ID NO: 5049; WAN024DW8; Start 33; Stop 57
cacgttcaaatggcatagacataca

SEQ ID NO: 398361 - DNA, 25 bp, Artificial
  probe
  misc_feature (1)..(25): SEQ ID NO: 5049; WAN024DW8; Start 100; Stop 124
cttaatcaagcgaagcccgtattct

SEQ ID NO: 398362 - DNA, 25 bp, Artificial
  probe
  misc_feature (1)..(25): SEQ ID NO: 5049; WAN024DW8; Start 99; Stop 123
tcttaatcaagcgaagcccgtattc

SEQ ID NO: 398363 - DNA, 25 bp, Artificial
  probe
  misc_feature (1)..(25): SEQ ID NO: 5049; WAN024DW8; Start 96; Stop 120
gaatcttaatcaagcgaagcccgta

SEQ ID NO: 398364 - DNA, 25 bp, Artificial
  probe
  misc_feature (1)..(25): SEQ ID NO: 5049; WAN024DW8; Start 243; Stop 267
caccgcaacgaatcaaatgaacttt

SEQ ID NO: 398365 - DNA, 25 bp, Artificial
  probe
  misc_feature (1)..(25): SEQ ID NO: 5049; WAN024DW8; Start 47; Stop 71
atagacatacaacgaggtccaccac

SEQ ID NO: 398366 - DNA, 25 bp, Artificial
  probe
  misc_feature (1)..(25): SEQ ID NO: 5049; WAN024DW8; Start 46; Stop 70
catagacatacaacgaggtccacca

SEQ ID NO: 398367 - DNA, 25 bp, Artificial
  probe
  misc_feature (1)..(25): SEQ ID NO: 5050; WAN024DOV; Start 96; Stop 120
tcaacaatcgtaaccaatttctcaa

SEQ ID NO: 398368 - DNA, 25 bp, Artificial
  probe
  misc_feature (1)..(25): SEQ ID NO: 5050; WAN024DOV; Start 95; Stop 119
ttcaacaatcgtaaccaatttctca

SEQ ID NO: 398369 - DNA, 25 bp, Artificial
  probe
  misc_feature (1)..(25): SEQ ID NO: 5050; WAN024DOV; Start 92; Stop 116
cgtttcaacaatcgtaaccaatttc

SEQ ID NO: 398370 - DNA, 25 bp, Artificial
  probe
  misc_feature (1)..(25): SEQ ID NO: 5050; WAN024DOV; Start 85; Stop 109
tttatgccgtttcaacaatcgtaac

SEQ ID NO: 398371 - DNA, 25 bp, Artificial
  probe
  misc_feature (1)..(25): SEQ ID NO: 5050; WAN024DOV; Start 97; Stop 121
caacaatcgtaaccaatttctcaaa

SEQ ID NO: 398372 - DNA, 25 bp, Artificial
  probe
  misc_feature (1)..(25): SEQ ID NO: 5050; WAN024DOV; Start 94; Stop 118
tttcaacaatcgtaaccaatttctc

SEQ ID NO: 398373 - DNA, 25 bp, Artificial
  probe
  misc_feature (1)..(25): SEQ ID NO: 5050; WAN024DOV; Start 91; Stop 115
ccgtttcaacaatcgtaaccaattt

SEQ ID NO: 398374 - DNA, 25 bp, Artificial
  probe
  misc_feature (1)..(25): SEQ ID NO: 5050; WAN024DOV; Start 93; Stop 117
gtttcaacaatcgtaaccaatttct

SEQ ID NO: 398375 - DNA, 25 bp, Artificial
  probe
  misc_feature (1)..(25): SEQ ID NO: 5050; WAN024DOV; Start 86; Stop 110
ttatgccgtttcaacaatcgtaacc

SEQ ID NO: 398376 - DNA, 25 bp, Artificial
  probe
  misc_feature (1)..(25): SEQ ID NO: 5050; WAN024DOV; Start 90; Stop 114
gccgtttcaacaatcgtaaccaatt

SEQ ID NO: 398377 - DNA, 25 bp, Artificial
  probe
  misc_feature (1)..(25): SEQ ID NO: 5050; WAN024DOV; Start 83; Stop 107
attttatgccgtttcaacaatcgta

SEQ ID NO: 398378 - DNA, 25 bp, Artificial
  probe
  misc_feature (1)..(25): SEQ ID NO: 5050; WAN024DOV; Start 84; Stop 108
ttttatgccgtttcaacaatcgtaa

SEQ ID NO: 398379 - DNA, 25 bp, Artificial
  probe
  misc_feature (1)..(25): SEQ ID NO: 5050; WAN024DOV; Start 87; Stop 111
tatgccgtttcaacaatcgtaacca

SEQ ID NO: 398380 - DNA, 25 bp, Artificial
  probe
  misc_feature (1)..(25): SEQ ID NO: 5050; WAN024DOV; Start 20; Stop 44
aaagtcttggaaaatggtatgtctc

SEQ ID NO: 398381 - DNA, 25 bp, Artificial
  probe
  misc_feature (1)..(25): SEQ ID NO: 5050; WAN024DOV; Start 17; Stop 41
tgaaaagtcttggaaaatggtatgt

SEQ ID NO: 398382 - DNA, 25 bp, Artificial
  probe
  misc_feature (1)..(25): SEQ ID NO: 5050; WAN024DOV; Start 21; Stop 45
aagtcttggaaaatggtatgtctcg

SEQ ID NO: 398383 - DNA, 25 bp, Artificial
  probe
  misc_feature (1)..(25): SEQ ID NO: 5050; WAN024DOV; Start 19; Stop 43
aaaagtcttggaaaatggtatgtct

SEQ ID NO: 398384 - DNA, 25 bp, Artificial
  probe
  misc_feature (1)..(25): SEQ ID NO: 5050; WAN024DOV; Start 18; Stop 42
gaaaagtcttggaaaatggtatgtc

SEQ ID NO: 398385 - DNA, 25 bp, Artificial
  probe
  misc_feature (1)..(25): SEQ ID NO: 5050; WAN024DOV; Start 13; Stop 37
gaattgaaaagtcttggaaaatggt

SEQ ID NO: 398386 - DNA, 25 bp, Artificial
  probe
  misc_feature (1)..(25): SEQ ID NO: 5050; WAN024DOV; Start 16; Stop 40
ttgaaaagtcttggaaaatggtatg

SEQ ID NO: 398387 - DNA, 25 bp, Artificial
  probe
  misc_feature (1)..(25): SEQ ID NO: 5050; WAN024DOV; Start 98; Stop 122
aacaatcgtaaccaatttctcaaaa

SEQ ID NO: 398388 - DNA, 25 bp, Artificial
  probe
  misc_feature (1)..(25): SEQ ID NO: 5050; WAN024DOV; Start 12; Stop 36
agaattgaaaagtcttggaaaatgg

SEQ ID NO: 398389 - DNA, 25 bp, Artificial
  probe
  misc_feature (1)..(25): SEQ ID NO: 5050; WAN024DOV; Start 1; Stop 25
ttgacgagtgaagaattgaaaagtc

SEQ ID NO: 398390 - DNA, 25 bp, Artificial
  probe
  misc_feature (1)..(25): SEQ ID NO: 5050; WAN024DOV; Start 2; Stop 26
tgacgagtgaagaattgaaaagtct

SEQ ID NO: 398391 - DNA, 25 bp, Artificial
  probe
  misc_feature (1)..(25): SEQ ID NO: 5050; WAN024DOV; Start 89; Stop 113
tgccgtttcaacaatcgtaaccaat

SEQ ID NO: 398392 - DNA, 25 bp, Artificial
  probe
  misc_feature (1)..(25): SEQ ID NO: 5050; WAN024DOV; Start 88; Stop 112
atgccgtttcaacaatcgtaaccaa

SEQ ID NO: 398393 - DNA, 25 bp, Artificial
  probe
  misc_feature (1)..(25): SEQ ID NO: 5050; WAN024DOV; Start 14; Stop 38
aattgaaaagtcttggaaaatggta

SEQ ID NO: 398394 - DNA, 25 bp, Artificial
  probe
  misc_feature (1)..(25): SEQ ID NO: 5050; WAN024DOV; Start 15; Stop 39
attgaaaagtcttggaaaatggtat

SEQ ID NO: 398395 - DNA, 25 bp, Artificial
  probe
  misc_feature (1)..(25): SEQ ID NO: 5050; WAN024DOV; Start 82; Stop 106
gattttatgccgtttcaacaatcgt

SEQ ID NO: 398396 - DNA, 25 bp, Artificial
  probe
  misc_feature (1)..(25): SEQ ID NO: 5050; WAN024DOV; Start 22; Stop 46
agtcttggaaaatggtatgtctcga

SEQ ID NO: 398397 - DNA, 25 bp, Artificial
  probe
  misc_feature (1)..(25): SEQ ID NO: 5050; WAN024DOV; Start 4; Stop 28
acgagtgaagaattgaaaagtcttg

SEQ ID NO: 398398 - DNA, 25 bp, Artificial
  probe
  misc_feature (1)..(25): SEQ ID NO: 5050; WAN024DOV; Start 3; Stop 27
gacgagtgaagaattgaaaagtctt

SEQ ID NO: 398399 - DNA, 25 bp, Artificial
  probe
  misc_feature (1)..(25): SEQ ID NO: 5050; WAN024DOV; Start 6; Stop 30
gagtgaagaattgaaaagtcttgga

SEQ ID NO: 398400 - DNA, 25 bp, Artificial
  probe
  misc_feature (1)..(25): SEQ ID NO: 5051; WAN024BEZ; Start 96; Stop 120
ctgctatttctatctttgctctcct

SEQ ID NO: 398401 - DNA, 25 bp, Artificial
  probe
  misc_feature (1)..(25): SEQ ID NO: 5051; WAN024BEZ; Start 95; Stop 119
actgctatttctatctttgctctcc

SEQ ID NO: 398402 - DNA, 25 bp, Artificial
  probe
  misc_feature (1)..(25): SEQ ID NO: 5051; WAN024BEZ; Start 97; Stop 121
tgctatttctatctttgctctccta

SEQ ID NO: 398403 - DNA, 25 bp, Artificial
  probe
  misc_feature (1)..(25): SEQ ID NO: 5051; WAN024BEZ; Start 94; Stop 118
aactgctatttctatctttgctctc

SEQ ID NO: 398404 - DNA, 25 bp, Artificial
  probe
  misc_feature (1)..(25): SEQ ID NO: 5051; WAN024BEZ; Start 93; Stop 117
aaactgctatttctatctttgctct

SEQ ID NO: 398405 - DNA, 25 bp, Artificial
  probe
  misc_feature (1)..(25): SEQ ID NO: 5051; WAN024BEZ; Start 98; Stop 122
gctatttctatctttgctctcctaa

SEQ ID NO: 398406 - DNA, 25 bp, Artificial
  probe
  misc_feature (1)..(25): SEQ ID NO: 5051; WAN024BEZ; Start 39; Stop 63
tcctcaagatactttcttctatcct

SEQ ID NO: 398407 - DNA, 25 bp, Artificial
  probe
  misc_feature (1)..(25): SEQ ID NO: 5051; WAN024BEZ; Start 92; Stop 116
aaaactgctatttctatctttgctc

SEQ ID NO: 398408 - DNA, 25 bp, Artificial
  probe
  misc_feature (1)..(25): SEQ ID NO: 5051; WAN024BEZ; Start 40; Stop 64
cctcaagatactttcttctatcctt

SEQ ID NO: 398409 - DNA, 25 bp, Artificial
  probe
  misc_feature (1)..(25): SEQ ID NO: 5051; WAN024BEZ; Start 38; Stop 62
atcctcaagatactttcttctatcc

SEQ ID NO: 398410 - DNA, 25 bp, Artificial
  probe
  misc_feature (1)..(25): SEQ ID NO: 5051; WAN024BEZ; Start 41; Stop 65
ctcaagatactttcttctatccttt

SEQ ID NO: 398411 - DNA, 25 bp, Artificial
  probe
  misc_feature (1)..(25): SEQ ID NO: 5051; WAN024BEZ; Start 37; Stop 61
aatcctcaagatactttcttctatc

SEQ ID NO: 398412 - DNA, 25 bp, Artificial
  probe
  misc_feature (1)..(25): SEQ ID NO: 5051; WAN024BEZ; Start 36; Stop 60
aaatcctcaagatactttcttctat

SEQ ID NO: 398413 - DNA, 25 bp, Artificial
  probe
  misc_feature (1)..(25): SEQ ID NO: 5051; WAN024BEZ; Start 61; Stop 85
cctttagtttataaggagaatacct

SEQ ID NO: 398414 - DNA, 25 bp, Artificial
  probe
  misc_feature (1)..(25): SEQ ID NO: 5051; WAN024BEZ; Start 35; Stop 59
aaaatcctcaagatactttcttcta

SEQ ID NO: 398415 - DNA, 25 bp, Artificial
  probe
  misc_feature (1)..(25): SEQ ID NO: 5052; WAN024CHD; Start 238; Stop 262
ttcttgtgattcagagatggcaatt

SEQ ID NO: 398416 - DNA, 25 bp, Artificial
  probe
  misc_feature (1)..(25): SEQ ID NO: 5052; WAN024CHD; Start 237; Stop 261
gttcttgtgattcagagatggcaat

SEQ ID NO: 398417 - DNA, 25 bp, Artificial
  probe
  misc_feature (1)..(25): SEQ ID NO: 5052; WAN024CHD; Start 91; Stop 115
caagtcaacgattgtctcaccattc

SEQ ID NO: 398418 - DNA, 25 bp, Artificial
  probe
  misc_feature (1)..(25): SEQ ID NO: 5052; WAN024CHD; Start 233; Stop 257
atccgttcttgtgattcagagatgg

SEQ ID NO: 398419 - DNA, 25 bp, Artificial
  probe
  misc_feature (1)..(25): SEQ ID NO: 5052; WAN024CHD; Start 231; Stop 255
ccatccgttcttgtgattcagagat

SEQ ID NO: 398420 - DNA, 25 bp, Artificial
  probe
  misc_feature (1)..(25): SEQ ID NO: 5052; WAN024CHD; Start 240; Stop 264
cttgtgattcagagatggcaatttc

SEQ ID NO: 398421 - DNA, 25 bp, Artificial
  probe
  misc_feature (1)..(25): SEQ ID NO: 5052; WAN024CHD; Start 241; Stop 265
ttgtgattcagagatggcaatttct

SEQ ID NO: 398422 - DNA, 25 bp, Artificial
  probe
  misc_feature (1)..(25): SEQ ID NO: 5052; WAN024CHD; Start 239; Stop 263
tcttgtgattcagagatggcaattt

SEQ ID NO: 398423 - DNA, 25 bp, Artificial
  probe
  misc_feature (1)..(25): SEQ ID NO: 5052; WAN024CHD; Start 383; Stop 407
atcagacgagtgacattgccattac

SEQ ID NO: 398424 - DNA, 25 bp, Artificial
  probe
  misc_feature (1)..(25): SEQ ID NO: 5052; WAN024CHD; Start 92; Stop 116
aagtcaacgattgtctcaccattcc

SEQ ID NO: 398425 - DNA, 25 bp, Artificial
  probe
  misc_feature (1)..(25): SEQ ID NO: 5052; WAN024CHD; Start 382; Stop 406
gatcagacgagtgacattgccatta

SEQ ID NO: 398426 - DNA, 25 bp, Artificial
  probe
  misc_feature (1)..(25): SEQ ID NO: 5052; WAN024CHD; Start 390; Stop 414
gagtgacattgccattacggaagag

SEQ ID NO: 398427 - DNA, 25 bp, Artificial
  probe
  misc_feature (1)..(25): SEQ ID NO: 5052; WAN024CHD; Start 90; Stop 114
ccaagtcaacgattgtctcaccatt

SEQ ID NO: 398428 - DNA, 25 bp, Artificial
  probe
  misc_feature (1)..(25): SEQ ID NO: 5052; WAN024CHD; Start 236; Stop 260
cgttcttgtgattcagagatggcaa

SEQ ID NO: 398429 - DNA, 25 bp, Artificial
  probe
  misc_feature (1)..(25): SEQ ID NO: 5052; WAN024CHD; Start 270; Stop 294
cattcaagccctggtatttaagagg

SEQ ID NO: 398430 - DNA, 25 bp, Artificial
  probe
  misc_feature (1)..(25): SEQ ID NO: 5052; WAN024CHD; Start 283; Stop 307
gtatttaagaggcaccttgttgagg

SEQ ID NO: 398431 - DNA, 25 bp, Artificial
  probe
  misc_feature (1)..(25): SEQ ID NO: 5052; WAN024CHD; Start 258; Stop 282
caatttctgtaccattcaagccctg

SEQ ID NO: 398432 - DNA, 25 bp, Artificial
  probe
  misc_feature (1)..(25): SEQ ID NO: 5052; WAN024CHD; Start 94; Stop 118
gtcaacgattgtctcaccattccag

SEQ ID NO: 398433 - DNA, 25 bp, Artificial
  probe
  misc_feature (1)..(25): SEQ ID NO: 5052; WAN024CHD; Start 269; Stop 293
ccattcaagccctggtatttaagag

SEQ ID NO: 398434 - DNA, 25 bp, Artificial
  probe
  misc_feature (1)..(25): SEQ ID NO: 5052; WAN024CHD; Start 232; Stop 256
catccgttcttgtgattcagagatg

SEQ ID NO: 398435 - DNA, 25 bp, Artificial
  probe
  misc_feature (1)..(25): SEQ ID NO: 5052; WAN024CHD; Start 282; Stop 306
ggtatttaagaggcaccttgttgag

SEQ ID NO: 398436 - DNA, 25 bp, Artificial
  probe
  misc_feature (1)..(25): SEQ ID NO: 5052; WAN024CHD; Start 280; Stop 304
ctggtatttaagaggcaccttgttg

SEQ ID NO: 398437 - DNA, 25 bp, Artificial
  probe
  misc_feature (1)..(25): SEQ ID NO: 5052; WAN024CHD; Start 95; Stop 119
tcaacgattgtctcaccattccagt

SEQ ID NO: 398438 - DNA, 25 bp, Artificial
  probe
  misc_feature (1)..(25): SEQ ID NO: 5052; WAN024CHD; Start 93; Stop 117
agtcaacgattgtctcaccattcca

SEQ ID NO: 398439 - DNA, 25 bp, Artificial
  probe
  misc_feature (1)..(25): SEQ ID NO: 5052; WAN024CHD; Start 89; Stop 113
tccaagtcaacgattgtctcaccat

SEQ ID NO: 398440 - DNA, 25 bp, Artificial
  probe
  misc_feature (1)..(25): SEQ ID NO: 5052; WAN024CHD; Start 281; Stop 305
tggtatttaagaggcaccttgttga

SEQ ID NO: 398441 - DNA, 25 bp, Artificial
  probe
  misc_feature (1)..(25): SEQ ID NO: 5052; WAN024CHD; Start 376; Stop 400
cttcttgatcagacgagtgacattg

SEQ ID NO: 398442 - DNA, 25 bp, Artificial
  probe
  misc_feature (1)..(25): SEQ ID NO: 5052; WAN024CHD; Start 96; Stop 120
caacgattgtctcaccattccagtg

SEQ ID NO: 398443 - DNA, 25 bp, Artificial
  probe
  misc_feature (1)..(25): SEQ ID NO: 5052; WAN024CHD; Start 375; Stop 399
acttcttgatcagacgagtgacatt

SEQ ID NO: 398444 - DNA, 25 bp, Artificial
  probe
  misc_feature (1)..(25): SEQ ID NO: 5052; WAN024CHD; Start 279; Stop 303
cctggtatttaagaggcaccttgtt

SEQ ID NO: 398445 - DNA, 25 bp, Artificial
  probe
  misc_feature (1)..(25): SEQ ID NO: 5052; WAN024CHD; Start 171; Stop 195
tattttctttgttacattcggcaac

SEQ ID NO: 398446 - DNA, 25 bp, Artificial
  probe
  misc_feature (1)..(25): SEQ ID NO: 5052; WAN024CHD; Start 374; Stop 398
gacttcttgatcagacgagtgacat

SEQ ID NO: 398447 - DNA, 25 bp, Artificial
  probe
  misc_feature (1)..(25): SEQ ID NO: 5052; WAN024CHD; Start 368; Stop 392
tcattggacttcttgatcagacgag

SEQ ID NO: 398448 - DNA, 25 bp, Artificial
  probe
  misc_feature (1)..(25): SEQ ID NO: 5053; WAN024GCW; Start 202; Stop 226
aacgatattcttggcaatatagcga

SEQ ID NO: 398449 - DNA, 25 bp, Artificial
  probe
  misc_feature (1)..(25): SEQ ID NO: 5053; WAN024GCW; Start 201; Stop 225
caacgatattcttggcaatatagcg

SEQ ID NO: 398450 - DNA, 25 bp, Artificial
  probe
  misc_feature (1)..(25): SEQ ID NO: 5053; WAN024GCW; Start 200; Stop 224
gcaacgatattcttggcaatatagc

SEQ ID NO: 398451 - DNA, 25 bp, Artificial
  probe
  misc_feature (1)..(25): SEQ ID NO: 5053; WAN024GCW; Start 203; Stop 227
acgatattcttggcaatatagcgag

SEQ ID NO: 398452 - DNA, 25 bp, Artificial
  probe
  misc_feature (1)..(25): SEQ ID NO: 5053; WAN024GCW; Start 204; Stop 228
cgatattcttggcaatatagcgagc

SEQ ID NO: 398453 - DNA, 25 bp, Artificial
  probe
  misc_feature (1)..(25): SEQ ID NO: 5053; WAN024GCW; Start 99; Stop 123
ctactgttcctgtaccgaaagtatc

SEQ ID NO: 398454 - DNA, 25 bp, Artificial
  probe
  misc_feature (1)..(25): SEQ ID NO: 5053; WAN024GCW; Start 82; Stop 106
ttcaagttgactttcagctactgtt

SEQ ID NO: 398455 - DNA, 25 bp, Artificial
  probe
  misc_feature (1)..(25): SEQ ID NO: 5053; WAN024GCW; Start 81; Stop 105
tttcaagttgactttcagctactgt

SEQ ID NO: 398456 - DNA, 25 bp, Artificial
  probe
  misc_feature (1)..(25): SEQ ID NO: 5053; WAN024GCW; Start 199; Stop 223
tgcaacgatattcttggcaatatag

SEQ ID NO: 398457 - DNA, 25 bp, Artificial
  probe
  misc_feature (1)..(25): SEQ ID NO: 5053; WAN024GCW; Start 198; Stop 222
ctgcaacgatattcttggcaatata

SEQ ID NO: 398458 - DNA, 25 bp, Artificial
  probe
  misc_feature (1)..(25): SEQ ID NO: 5053; WAN024GCW; Start 83; Stop 107
tcaagttgactttcagctactgttc

SEQ ID NO: 398459 - DNA, 25 bp, Artificial
  probe
  misc_feature (1)..(25): SEQ ID NO: 5053; WAN024GCW; Start 88; Stop 112
ttgactttcagctactgttcctgta

SEQ ID NO: 398460 - DNA, 25 bp, Artificial
  probe
  misc_feature (1)..(25): SEQ ID NO: 5053; WAN024GCW; Start 98; Stop 122
gctactgttcctgtaccgaaagtat

SEQ ID NO: 398461 - DNA, 25 bp, Artificial
  probe
  misc_feature (1)..(25): SEQ ID NO: 5053; WAN024GCW; Start 85; Stop 109
aagttgactttcagctactgttcct

SEQ ID NO: 398462 - DNA, 25 bp, Artificial
  probe
  misc_feature (1)..(25): SEQ ID NO: 5053; WAN024GCW; Start 84; Stop 108
caagttgactttcagctactgttcc

SEQ ID NO: 398463 - DNA, 25 bp, Artificial
  probe
  misc_feature (1)..(25): SEQ ID NO: 5053; WAN024GCW; Start 89; Stop 113
tgactttcagctactgttcctgtac

SEQ ID NO: 398464 - DNA, 25 bp, Artificial
  probe
  misc_feature (1)..(25): SEQ ID NO: 5053; WAN024GCW; Start 100; Stop 124
tactgttcctgtaccgaaagtatcg

SEQ ID NO: 398465 - DNA, 25 bp, Artificial
  probe
  misc_feature (1)..(25): SEQ ID NO: 5053; WAN024GCW; Start 205; Stop 229
gatattcttggcaatatagcgagcc

SEQ ID NO: 398466 - DNA, 25 bp, Artificial
  probe
  misc_feature (1)..(25): SEQ ID NO: 5053; WAN024GCW; Start 197; Stop 221
gctgcaacgatattcttggcaatat

SEQ ID NO: 398467 - DNA, 25 bp, Artificial
  probe
  misc_feature (1)..(25): SEQ ID NO: 5053; WAN024GCW; Start 86; Stop 110
agttgactttcagctactgttcctg

SEQ ID NO: 398468 - DNA, 25 bp, Artificial
  probe
  misc_feature (1)..(25): SEQ ID NO: 5053; WAN024GCW; Start 90; Stop 114
gactttcagctactgttcctgtacc

SEQ ID NO: 398469 - DNA, 25 bp, Artificial
  probe
  misc_feature (1)..(25): SEQ ID NO: 5053; WAN024GCW; Start 87; Stop 111
gttgactttcagctactgttcctgt

SEQ ID NO: 398470 - DNA, 25 bp, Artificial
  probe
  misc_feature (1)..(25): SEQ ID NO: 5053; WAN024GCW; Start 97; Stop 121
agctactgttcctgtaccgaaagta

SEQ ID NO: 398471 - DNA, 25 bp, Artificial
  probe
  misc_feature (1)..(25): SEQ ID NO: 5053; WAN024GCW; Start 80; Stop 104
ttttcaagttgactttcagctactg

SEQ ID NO: 398472 - DNA, 25 bp, Artificial
  probe
  misc_feature (1)..(25): SEQ ID NO: 5053; WAN024GCW; Start 196; Stop 220
tgctgcaacgatattcttggcaata

SEQ ID NO: 398473 - DNA, 25 bp, Artificial
  probe
  misc_feature (1)..(25): SEQ ID NO: 5053; WAN024GCW; Start 206; Stop 230
atattcttggcaatatagcgagccg

SEQ ID NO: 398474 - DNA, 25 bp, Artificial
  probe
  misc_feature (1)..(25): SEQ ID NO: 5053; WAN024GCW; Start 94; Stop 118
ttcagctactgttcctgtaccgaaa

SEQ ID NO: 398475 - DNA, 25 bp, Artificial
  probe
  misc_feature (1)..(25): SEQ ID NO: 5053; WAN024GCW; Start 93; Stop 117
tttcagctactgttcctgtaccgaa

SEQ ID NO: 398476 - DNA, 25 bp, Artificial
  probe
  misc_feature (1)..(25): SEQ ID NO: 5053; WAN024GCW; Start 101; Stop 125
actgttcctgtaccgaaagtatcga

SEQ ID NO: 398477 - DNA, 25 bp, Artificial
  probe
  misc_feature (1)..(25): SEQ ID NO: 5053; WAN024GCW; Start 95; Stop 119
tcagctactgttcctgtaccgaaag

SEQ ID NO: 398478 - DNA, 25 bp, Artificial
  probe
  misc_feature (1)..(25): SEQ ID NO: 5053; WAN024GCW; Start 92; Stop 116
ctttcagctactgttcctgtaccga

SEQ ID NO: 398479 - DNA, 25 bp, Artificial
  probe
  misc_feature (1)..(25): SEQ ID NO: 5053; WAN024GCW; Start 96; Stop 120
cagctactgttcctgtaccgaaagt

SEQ ID NO: 398480 - DNA, 25 bp, Artificial
  probe
  misc_feature (1)..(25): SEQ ID NO: 5053; WAN024GCW; Start 91; Stop 115
actttcagctactgttcctgtaccg

SEQ ID NO: 398481 - DNA, 25 bp, Artificial
  probe
  misc_feature (1)..(25): SEQ ID NO: 5054; WAN024G5Z; Start 254; Stop 278
ttgataattgcgtatgtgctcatta

SEQ ID NO: 398482 - DNA, 25 bp, Artificial
  probe
  misc_feature (1)..(25): SEQ ID NO: 5054; WAN024G5Z; Start 143; Stop 167
ccaccaacaagaacaacttcgttaa

SEQ ID NO: 398483 - DNA, 25 bp, Artificial
  probe
  misc_feature (1)..(25): SEQ ID NO: 5054; WAN024G5Z; Start 257; Stop 281
ataattgcgtatgtgctcattatgc

SEQ ID NO: 398484 - DNA, 25 bp, Artificial
  probe
  misc_feature (1)..(25): SEQ ID NO: 5054; WAN024G5Z; Start 255; Stop 279
tgataattgcgtatgtgctcattat

SEQ ID NO: 398485 - DNA, 25 bp, Artificial
  probe
  misc_feature (1)..(25): SEQ ID NO: 5054; WAN024G5Z; Start 256; Stop 280
gataattgcgtatgtgctcattatg

SEQ ID NO: 398486 - DNA, 25 bp, Artificial
  probe
  misc_feature (1)..(25): SEQ ID NO: 5054; WAN024G5Z; Start 144; Stop 168
caccaacaagaacaacttcgttaaa

SEQ ID NO: 398487 - DNA, 25 bp, Artificial
  probe
  misc_feature (1)..(25): SEQ ID NO: 5054; WAN024G5Z; Start 253; Stop 277
tttgataattgcgtatgtgctcatt

SEQ ID NO: 398488 - DNA, 25 bp, Artificial
  probe
  misc_feature (1)..(25): SEQ ID NO: 5054; WAN024G5Z; Start 218; Stop 242
tgaccaacttcaactttaacttgtt

SEQ ID NO: 398489 - DNA, 25 bp, Artificial
  probe
  misc_feature (1)..(25): SEQ ID NO: 5054; WAN024G5Z; Start 142; Stop 166
accaccaacaagaacaacttcgtta

SEQ ID NO: 398490 - DNA, 25 bp, Artificial
  probe
  misc_feature (1)..(25): SEQ ID NO: 5054; WAN024G5Z; Start 82; Stop 106
ttcaacagttccaactacagtagct

SEQ ID NO: 398491 - DNA, 25 bp, Artificial
  probe
  misc_feature (1)..(25): SEQ ID NO: 5054; WAN024G5Z; Start 219; Stop 243
gaccaacttcaactttaacttgttt

SEQ ID NO: 398492 - DNA, 25 bp, Artificial
  probe
  misc_feature (1)..(25): SEQ ID NO: 5054; WAN024G5Z; Start 83; Stop 107
tcaacagttccaactacagtagctc

SEQ ID NO: 398493 - DNA, 25 bp, Artificial
  probe
  misc_feature (1)..(25): SEQ ID NO: 5054; WAN024G5Z; Start 81; Stop 105
tttcaacagttccaactacagtagc

SEQ ID NO: 398494 - DNA, 25 bp, Artificial
  probe
  misc_feature (1)..(25): SEQ ID NO: 5054; WAN024G5Z; Start 138; Stop 162
tttcaccaccaacaagaacaacttc

SEQ ID NO: 398495 - DNA, 25 bp, Artificial
  probe
  misc_feature (1)..(25): SEQ ID NO: 5054; WAN024G5Z; Start 84; Stop 108
caacagttccaactacagtagctcc

SEQ ID NO: 398496 - DNA, 25 bp, Artificial
  probe
  misc_feature (1)..(25): SEQ ID NO: 5054; WAN024G5Z; Start 139; Stop 163
ttcaccaccaacaagaacaacttcg

SEQ ID NO: 398497 - DNA, 25 bp, Artificial
  probe
  misc_feature (1)..(25): SEQ ID NO: 5054; WAN024G5Z; Start 168; Stop 192
aagtaacttcttgaccagcttcaac

SEQ ID NO: 398498 - DNA, 25 bp, Artificial
  probe
  misc_feature (1)..(25): SEQ ID NO: 5054; WAN024G5Z; Start 93; Stop 117
caactacagtagctccagcaacaag

SEQ ID NO: 398499 - DNA, 25 bp, Artificial
  probe
  misc_feature (1)..(25): SEQ ID NO: 5054; WAN024G5Z; Start 85; Stop 109
aacagttccaactacagtagctcca

SEQ ID NO: 398500 - DNA, 25 bp, Artificial
  probe
  misc_feature (1)..(25): SEQ ID NO: 5054; WAN024G5Z; Start 56; Stop 80
accactttcttttgttttccttgtt

SEQ ID NO: 398501 - DNA, 25 bp, Artificial
  probe
  misc_feature (1)..(25): SEQ ID NO: 5054; WAN024G5Z; Start 57; Stop 81
ccactttcttttgttttccttgttt

SEQ ID NO: 398502 - DNA, 25 bp, Artificial
  probe
  misc_feature (1)..(25): SEQ ID NO: 5054; WAN024G5Z; Start 237; Stop 261
cttgttttccgccagttttgataat

SEQ ID NO: 398503 - DNA, 25 bp, Artificial
  probe
  misc_feature (1)..(25): SEQ ID NO: 5054; WAN024G5Z; Start 238; Stop 262
ttgttttccgccagttttgataatt

SEQ ID NO: 398504 - DNA, 25 bp, Artificial
  probe
  misc_feature (1)..(25): SEQ ID NO: 5054; WAN024G5Z; Start 250; Stop 274
agttttgataattgcgtatgtgctc

SEQ ID NO: 398505 - DNA, 25 bp, Artificial
  probe
  misc_feature (1)..(25): SEQ ID NO: 5054; WAN024G5Z; Start 141; Stop 165
caccaccaacaagaacaacttcgtt

SEQ ID NO: 398506 - DNA, 25 bp, Artificial
  probe
  misc_feature (1)..(25): SEQ ID NO: 5054; WAN024G5Z; Start 258; Stop 282
taattgcgtatgtgctcattatgca

SEQ ID NO: 398507 - DNA, 25 bp, Artificial
  probe
  misc_feature (1)..(25): SEQ ID NO: 5054; WAN024G5Z; Start 249; Stop 273
cagttttgataattgcgtatgtgct

SEQ ID NO: 398508 - DNA, 25 bp, Artificial
  probe
  misc_feature (1)..(25): SEQ ID NO: 5054; WAN024G5Z; Start 55; Stop 79
aaccactttcttttgttttccttgt

SEQ ID NO: 398509 - DNA, 25 bp, Artificial
  probe
  misc_feature (1)..(25): SEQ ID NO: 5054; WAN024G5Z; Start 145; Stop 169
accaacaagaacaacttcgttaaaa

SEQ ID NO: 398510 - DNA, 25 bp, Artificial
  probe
  misc_feature (1)..(25): SEQ ID NO: 5054; WAN024G5Z; Start 146; Stop 170
ccaacaagaacaacttcgttaaaag

SEQ ID NO: 398511 - DNA, 25 bp, Artificial
  probe
  misc_feature (1)..(25): SEQ ID NO: 5054; WAN024G5Z; Start 239; Stop 263
tgttttccgccagttttgataattg

SEQ ID NO: 398512 - DNA, 25 bp, Artificial
  probe
  misc_feature (1)..(25): SEQ ID NO: 5054; WAN024G5Z; Start 215; Stop 239
gcttgaccaacttcaactttaactt

SEQ ID NO: 398513 - DNA, 25 bp, Artificial
  probe
  misc_feature (1)..(25): SEQ ID NO: 5054; WAN024G5Z; Start 217; Stop 241
ttgaccaacttcaactttaacttgt

SEQ ID NO: 398514 - DNA, 25 bp, Artificial
  probe
  misc_feature (1)..(25): SEQ ID NO: 5055; WAN024D7R; Start 93; Stop 117
tatcatctggatcagtattggtgtc

SEQ ID NO: 398515 - DNA, 25 bp, Artificial
  probe
  misc_feature (1)..(25): SEQ ID NO: 5055; WAN024D7R; Start 92; Stop 116
atatcatctggatcagtattggtgt

SEQ ID NO: 398516 - DNA, 25 bp, Artificial
  probe
  misc_feature (1)..(25): SEQ ID NO: 5055; WAN024D7R; Start 94; Stop 118
atcatctggatcagtattggtgtca

SEQ ID NO: 398517 - DNA, 25 bp, Artificial
  probe
  misc_feature (1)..(25): SEQ ID NO: 5055; WAN024D7R; Start 96; Stop 120
catctggatcagtattggtgtcaac

SEQ ID NO: 398518 - DNA, 25 bp, Artificial
  probe
  misc_feature (1)..(25): SEQ ID NO: 5055; WAN024D7R; Start 95; Stop 119
tcatctggatcagtattggtgtcaa

SEQ ID NO: 398519 - DNA, 25 bp, Artificial
  probe
  misc_feature (1)..(25): SEQ ID NO: 5055; WAN024D7R; Start 327; Stop 351
taatttctttcaaacgagcgatacg

SEQ ID NO: 398520 - DNA, 25 bp, Artificial
  probe
  misc_feature (1)..(25): SEQ ID NO: 5055; WAN024D7R; Start 167; Stop 191
atttgctctttatgtgggtcaacta

SEQ ID NO: 398521 - DNA, 25 bp, Artificial
  probe
  misc_feature (1)..(25): SEQ ID NO: 5055; WAN024D7R; Start 326; Stop 350
ttaatttctttcaaacgagcgatac

SEQ ID NO: 398522 - DNA, 25 bp, Artificial
  probe
  misc_feature (1)..(25): SEQ ID NO: 5055; WAN024D7R; Start 168; Stop 192
tttgctctttatgtgggtcaactac

SEQ ID NO: 398523 - DNA, 25 bp, Artificial
  probe
  misc_feature (1)..(25): SEQ ID NO: 5055; WAN024D7R; Start 300; Stop 324
cgaaagttccatcttcttccatacg

SEQ ID NO: 398524 - DNA, 25 bp, Artificial
  probe
  misc_feature (1)..(25): SEQ ID NO: 5055; WAN024D7R; Start 166; Stop 190
gatttgctctttatgtgggtcaact

SEQ ID NO: 398525 - DNA, 25 bp, Artificial
  probe
  misc_feature (1)..(25): SEQ ID NO: 5055; WAN024D7R; Start 90; Stop 114
cgatatcatctggatcagtattggt

SEQ ID NO: 398526 - DNA, 25 bp, Artificial
  probe
  misc_feature (1)..(25): SEQ ID NO: 5055; WAN024D7R; Start 89; Stop 113
tcgatatcatctggatcagtattgg

SEQ ID NO: 398527 - DNA, 25 bp, Artificial
  probe
  misc_feature (1)..(25): SEQ ID NO: 5055; WAN024D7R; Start 325; Stop 349
tttaatttctttcaaacgagcgata

SEQ ID NO: 398528 - DNA, 25 bp, Artificial
  probe
  misc_feature (1)..(25): SEQ ID NO: 5055; WAN024D7R; Start 396; Stop 420
ggtggttgatgaagtattgacctga

SEQ ID NO: 398529 - DNA, 25 bp, Artificial
  probe
  misc_feature (1)..(25): SEQ ID NO: 5055; WAN024D7R; Start 97; Stop 121
atctggatcagtattggtgtcaacc

SEQ ID NO: 398530 - DNA, 25 bp, Artificial
  probe
  misc_feature (1)..(25): SEQ ID NO: 5055; WAN024D7R; Start 91; Stop 115
gatatcatctggatcagtattggtg

SEQ ID NO: 398531 - DNA, 25 bp, Artificial
  probe
  misc_feature (1)..(25): SEQ ID NO: 5055; WAN024D7R; Start 12; Stop 36
cgataatagcgtcagccaatttagc

SEQ ID NO: 398532 - DNA, 25 bp, Artificial
  probe
  misc_feature (1)..(25): SEQ ID NO: 5055; WAN024D7R; Start 10; Stop 34
ttcgataatagcgtcagccaattta

SEQ ID NO: 398533 - DNA, 25 bp, Artificial
  probe
  misc_feature (1)..(25): SEQ ID NO: 5055; WAN024D7R; Start 299; Stop 323
tcgaaagttccatcttcttccatac

SEQ ID NO: 398534 - DNA, 25 bp, Artificial
  probe
  misc_feature (1)..(25): SEQ ID NO: 5055; WAN024D7R; Start 11; Stop 35
tcgataatagcgtcagccaatttag

SEQ ID NO: 398535 - DNA, 25 bp, Artificial
  probe
  misc_feature (1)..(25): SEQ ID NO: 5055; WAN024D7R; Start 304; Stop 328
agttccatcttcttccatacgttta

SEQ ID NO: 398536 - DNA, 25 bp, Artificial
  probe
  misc_feature (1)..(25): SEQ ID NO: 5055; WAN024D7R; Start 305; Stop 329
gttccatcttcttccatacgtttaa

SEQ ID NO: 398537 - DNA, 25 bp, Artificial
  probe
  misc_feature (1)..(25): SEQ ID NO: 5055; WAN024D7R; Start 303; Stop 327
aagttccatcttcttccatacgttt

SEQ ID NO: 398538 - DNA, 25 bp, Artificial
  probe
  misc_feature (1)..(25): SEQ ID NO: 5055; WAN024D7R; Start 302; Stop 326
aaagttccatcttcttccatacgtt

SEQ ID NO: 398539 - DNA, 25 bp, Artificial
  probe
  misc_feature (1)..(25): SEQ ID NO: 5055; WAN024D7R; Start 165; Stop 189
cgatttgctctttatgtgggtcaac

SEQ ID NO: 398540 - DNA, 25 bp, Artificial
  probe
  misc_feature (1)..(25): SEQ ID NO: 5055; WAN024D7R; Start 8; Stop 32
ccttcgataatagcgtcagccaatt

SEQ ID NO: 398541 - DNA, 25 bp, Artificial
  probe
  misc_feature (1)..(25): SEQ ID NO: 5055; WAN024D7R; Start 301; Stop 325
gaaagttccatcttcttccatacgt

SEQ ID NO: 398542 - DNA, 25 bp, Artificial
  probe
  misc_feature (1)..(25): SEQ ID NO: 5055; WAN024D7R; Start 393; Stop 417
aacggtggttgatgaagtattgacc

SEQ ID NO: 398543 - DNA, 25 bp, Artificial
  probe
  misc_feature (1)..(25): SEQ ID NO: 5055; WAN024D7R; Start 201; Stop 225
catctgggatacgaggcatatcttc

SEQ ID NO: 398544 - DNA, 25 bp, Artificial
  probe
  misc_feature (1)..(25): SEQ ID NO: 5055; WAN024D7R; Start 197; Stop 221
atcacatctgggatacgaggcatat

SEQ ID NO: 398545 - DNA, 25 bp, Artificial
  probe
  misc_feature (1)..(25): SEQ ID NO: 5055; WAN024D7R; Start 40; Stop 64
gatcaatttaacagcacggatagcg

SEQ ID NO: 398546 - DNA, 25 bp, Artificial
  probe
  misc_feature (1)..(25): SEQ ID NO: 5055; WAN024D7R; Start 9; Stop 33
cttcgataatagcgtcagccaattt

SEQ ID NO: 398547 - DNA, 25 bp, Artificial
  probe
  misc_feature (1)..(25): SEQ ID NO: 5056; WAN024GDF; Start 21; Stop 45
caggcaatttcaccaagtattcaac

SEQ ID NO: 398548 - DNA, 25 bp, Artificial
  probe
  misc_feature (1)..(25): SEQ ID NO: 5056; WAN024GDF; Start 20; Stop 44
tcaggcaatttcaccaagtattcaa

SEQ ID NO: 398549 - DNA, 25 bp, Artificial
  probe
  misc_feature (1)..(25): SEQ ID NO: 5056; WAN024GDF; Start 19; Stop 43
ctcaggcaatttcaccaagtattca

SEQ ID NO: 398550 - DNA, 25 bp, Artificial
  probe
  misc_feature (1)..(25): SEQ ID NO: 5056; WAN024GDF; Start 23; Stop 47
ggcaatttcaccaagtattcaactg

SEQ ID NO: 398551 - DNA, 25 bp, Artificial
  probe
  misc_feature (1)..(25): SEQ ID NO: 5056; WAN024GDF; Start 22; Stop 46
aggcaatttcaccaagtattcaact

SEQ ID NO: 398552 - DNA, 25 bp, Artificial
  probe
  misc_feature (1)..(25): SEQ ID NO: 5056; WAN024GDF; Start 18; Stop 42
cctcaggcaatttcaccaagtattc

SEQ ID NO: 398553 - DNA, 25 bp, Artificial
  probe
  misc_feature (1)..(25): SEQ ID NO: 5056; WAN024GDF; Start 52; Stop 76
aagtgtttcttcatcacggtacata

SEQ ID NO: 398554 - DNA, 25 bp, Artificial
  probe
  misc_feature (1)..(25): SEQ ID NO: 5056; WAN024GDF; Start 17; Stop 41
tcctcaggcaatttcaccaagtatt

SEQ ID NO: 398555 - DNA, 25 bp, Artificial
  probe
  misc_feature (1)..(25): SEQ ID NO: 5056; WAN024GDF; Start 53; Stop 77
agtgtttcttcatcacggtacatac

SEQ ID NO: 398556 - DNA, 25 bp, Artificial
  probe
  misc_feature (1)..(25): SEQ ID NO: 5056; WAN024GDF; Start 24; Stop 48
gcaatttcaccaagtattcaactgg

SEQ ID NO: 398557 - DNA, 25 bp, Artificial
  probe
  misc_feature (1)..(25): SEQ ID NO: 5056; WAN024GDF; Start 16; Stop 40
gtcctcaggcaatttcaccaagtat

SEQ ID NO: 398558 - DNA, 25 bp, Artificial
  probe
  misc_feature (1)..(25): SEQ ID NO: 5056; WAN024GDF; Start 207; Stop 231
gtgtttcgatttccacatcttctag

SEQ ID NO: 398559 - DNA, 25 bp, Artificial
  probe
  misc_feature (1)..(25): SEQ ID NO: 5056; WAN024GDF; Start 54; Stop 78
gtgtttcttcatcacggtacatacc

SEQ ID NO: 398560 - DNA, 25 bp, Artificial
  probe
  misc_feature (1)..(25): SEQ ID NO: 5056; WAN024GDF; Start 206; Stop 230
ggtgtttcgatttccacatcttcta

SEQ ID NO: 398561 - DNA, 25 bp, Artificial
  probe
  misc_feature (1)..(25): SEQ ID NO: 5056; WAN024GDF; Start 201; Stop 225
taattggtgtttcgatttccacatc

SEQ ID NO: 398562 - DNA, 25 bp, Artificial
  probe
  misc_feature (1)..(25): SEQ ID NO: 5056; WAN024GDF; Start 197; Stop 221
tttgtaattggtgtttcgatttcca

SEQ ID NO: 398563 - DNA, 25 bp, Artificial
  probe
  misc_feature (1)..(25): SEQ ID NO: 5056; WAN024GDF; Start 200; Stop 224
gtaattggtgtttcgatttccacat

SEQ ID NO: 398564 - DNA, 25 bp, Artificial
  probe
  misc_feature (1)..(25): SEQ ID NO: 5056; WAN024GDF; Start 198; Stop 222
ttgtaattggtgtttcgatttccac

SEQ ID NO: 398565 - DNA, 25 bp, Artificial
  probe
  misc_feature (1)..(25): SEQ ID NO: 5056; WAN024GDF; Start 203; Stop 227
attggtgtttcgatttccacatctt

SEQ ID NO: 398566 - DNA, 25 bp, Artificial
  probe
  misc_feature (1)..(25): SEQ ID NO: 5056; WAN024GDF; Start 202; Stop 226
aattggtgtttcgatttccacatct

SEQ ID NO: 398567 - DNA, 25 bp, Artificial
  probe
  misc_feature (1)..(25): SEQ ID NO: 5056; WAN024GDF; Start 199; Stop 223
tgtaattggtgtttcgatttccaca

SEQ ID NO: 398568 - DNA, 25 bp, Artificial
  probe
  misc_feature (1)..(25): SEQ ID NO: 5056; WAN024GDF; Start 113; Stop 137
aagagaccatcaaccatcccgatac

SEQ ID NO: 398569 - DNA, 25 bp, Artificial
  probe
  misc_feature (1)..(25): SEQ ID NO: 5056; WAN024GDF; Start 112; Stop 136
caagagaccatcaaccatcccgata

SEQ ID NO: 398570 - DNA, 25 bp, Artificial
  probe
  misc_feature (1)..(25): SEQ ID NO: 5056; WAN024GDF; Start 13; Stop 37
aatgtcctcaggcaatttcaccaag

SEQ ID NO: 398571 - DNA, 25 bp, Artificial
  probe
  misc_feature (1)..(25): SEQ ID NO: 5056; WAN024GDF; Start 51; Stop 75
gaagtgtttcttcatcacggtacat

SEQ ID NO: 398572 - DNA, 25 bp, Artificial
  probe
  misc_feature (1)..(25): SEQ ID NO: 5056; WAN024GDF; Start 204; Stop 228
ttggtgtttcgatttccacatcttc

SEQ ID NO: 398573 - DNA, 25 bp, Artificial
  probe
  misc_feature (1)..(25): SEQ ID NO: 5056; WAN024GDF; Start 7; Stop 31
ttggtcaatgtcctcaggcaatttc

SEQ ID NO: 398574 - DNA, 25 bp, Artificial
  probe
  misc_feature (1)..(25): SEQ ID NO: 5056; WAN024GDF; Start 12; Stop 36
caatgtcctcaggcaatttcaccaa

SEQ ID NO: 398575 - DNA, 25 bp, Artificial
  probe
  misc_feature (1)..(25): SEQ ID NO: 5056; WAN024GDF; Start 6; Stop 30
gttggtcaatgtcctcaggcaattt

SEQ ID NO: 398576 - DNA, 25 bp, Artificial
  probe
  misc_feature (1)..(25): SEQ ID NO: 5056; WAN024GDF; Start 15; Stop 39
tgtcctcaggcaatttcaccaagta

SEQ ID NO: 398577 - DNA, 25 bp, Artificial
  probe
  misc_feature (1)..(25): SEQ ID NO: 5056; WAN024GDF; Start 196; Stop 220
ttttgtaattggtgtttcgatttcc

SEQ ID NO: 398578 - DNA, 25 bp, Artificial
  probe
  misc_feature (1)..(25): SEQ ID NO: 5056; WAN024GDF; Start 205; Stop 229
tggtgtttcgatttccacatcttct

SEQ ID NO: 398579 - DNA, 25 bp, Artificial
  probe
  misc_feature (1)..(25): SEQ ID NO: 5056; WAN024GDF; Start 10; Stop 34
gtcaatgtcctcaggcaatttcacc

SEQ ID NO: 398580 - DNA, 25 bp, Artificial
  probe
  misc_feature (1)..(25): SEQ ID NO: 5057; WAN024F56; Start 135; Stop 159
tgtctttgctggtttctctgtattt

SEQ ID NO: 398581 - DNA, 25 bp, Artificial
  probe
  misc_feature (1)..(25): SEQ ID NO: 5057; WAN024F56; Start 134; Stop 158
ttgtctttgctggtttctctgtatt

SEQ ID NO: 398582 - DNA, 25 bp, Artificial
  probe
  misc_feature (1)..(25): SEQ ID NO: 5057; WAN024F56; Start 133; Stop 157
cttgtctttgctggtttctctgtat

SEQ ID NO: 398583 - DNA, 25 bp, Artificial
  probe
  misc_feature (1)..(25): SEQ ID NO: 5057; WAN024F56; Start 162; Stop 186
taattccaagaatgccatcttaacc

SEQ ID NO: 398584 - DNA, 25 bp, Artificial
  probe
  misc_feature (1)..(25): SEQ ID NO: 5057; WAN024F56; Start 163; Stop 187
aattccaagaatgccatcttaacca

SEQ ID NO: 398585 - DNA, 25 bp, Artificial
  probe
  misc_feature (1)..(25): SEQ ID NO: 5057; WAN024F56; Start 35; Stop 59
ctcttgtagtccagcagttgatttg

SEQ ID NO: 398586 - DNA, 25 bp, Artificial
  probe
  misc_feature (1)..(25): SEQ ID NO: 5057; WAN024F56; Start 164; Stop 188
attccaagaatgccatcttaaccag

SEQ ID NO: 398587 - DNA, 25 bp, Artificial
  probe
  misc_feature (1)..(25): SEQ ID NO: 5057; WAN024F56; Start 166; Stop 190
tccaagaatgccatcttaaccagat

SEQ ID NO: 398588 - DNA, 25 bp, Artificial
  probe
  misc_feature (1)..(25): SEQ ID NO: 5057; WAN024F56; Start 165; Stop 189
ttccaagaatgccatcttaaccaga

SEQ ID NO: 398589 - DNA, 25 bp, Artificial
  probe
  misc_feature (1)..(25): SEQ ID NO: 5057; WAN024F56; Start 161; Stop 185
ttaattccaagaatgccatcttaac

SEQ ID NO: 398590 - DNA, 25 bp, Artificial
  probe
  misc_feature (1)..(25): SEQ ID NO: 5057; WAN024F56; Start 211; Stop 235
gtaatcgccaatacctcacctgttg

SEQ ID NO: 398591 - DNA, 25 bp, Artificial
  probe
  misc_feature (1)..(25): SEQ ID NO: 5057; WAN024F56; Start 218; Stop 242
ccaatacctcacctgttgtgtcttc

SEQ ID NO: 398592 - DNA, 25 bp, Artificial
  probe
  misc_feature (1)..(25): SEQ ID NO: 5057; WAN024F56; Start 132; Stop 156
ccttgtctttgctggtttctctgta

SEQ ID NO: 398593 - DNA, 25 bp, Artificial
  probe
  misc_feature (1)..(25): SEQ ID NO: 5057; WAN024F56; Start 219; Stop 243
caatacctcacctgttgtgtcttcg

SEQ ID NO: 398594 - DNA, 25 bp, Artificial
  probe
  misc_feature (1)..(25): SEQ ID NO: 5057; WAN024F56; Start 212; Stop 236
taatcgccaatacctcacctgttgt

SEQ ID NO: 398595 - DNA, 25 bp, Artificial
  probe
  misc_feature (1)..(25): SEQ ID NO: 5057; WAN024F56; Start 136; Stop 160
gtctttgctggtttctctgtatttt

SEQ ID NO: 398596 - DNA, 25 bp, Artificial
  probe
  misc_feature (1)..(25): SEQ ID NO: 5057; WAN024F56; Start 50; Stop 74
agttgatttgcttgggtaatggctc

SEQ ID NO: 398597 - DNA, 25 bp, Artificial
  probe
  misc_feature (1)..(25): SEQ ID NO: 5057; WAN024F56; Start 1; Stop 25
ttgactaaacattttcctgtcctcc

SEQ ID NO: 398598 - DNA, 25 bp, Artificial
  probe
  misc_feature (1)..(25): SEQ ID NO: 5057; WAN024F56; Start 49; Stop 73
cagttgatttgcttgggtaatggct

SEQ ID NO: 398599 - DNA, 25 bp, Artificial
  probe
  misc_feature (1)..(25): SEQ ID NO: 5057; WAN024F56; Start 3; Stop 27
gactaaacattttcctgtcctcctc

SEQ ID NO: 398600 - DNA, 25 bp, Artificial
  probe
  misc_feature (1)..(25): SEQ ID NO: 5057; WAN024F56; Start 2; Stop 26
tgactaaacattttcctgtcctcct

SEQ ID NO: 398601 - DNA, 25 bp, Artificial
  probe
  misc_feature (1)..(25): SEQ ID NO: 5057; WAN024F56; Start 160; Stop 184
tttaattccaagaatgccatcttaa

SEQ ID NO: 398602 - DNA, 25 bp, Artificial
  probe
  misc_feature (1)..(25): SEQ ID NO: 5057; WAN024F56; Start 192; Stop 216
gttttcctgtccattgttggtaatc

SEQ ID NO: 398603 - DNA, 25 bp, Artificial
  probe
  misc_feature (1)..(25): SEQ ID NO: 5057; WAN024F56; Start 203; Stop 227
cattgttggtaatcgccaatacctc

SEQ ID NO: 398604 - DNA, 25 bp, Artificial
  probe
  misc_feature (1)..(25): SEQ ID NO: 5057; WAN024F56; Start 204; Stop 228
attgttggtaatcgccaatacctca

SEQ ID NO: 398605 - DNA, 25 bp, Artificial
  probe
  misc_feature (1)..(25): SEQ ID NO: 5057; WAN024F56; Start 200; Stop 224
gtccattgttggtaatcgccaatac

SEQ ID NO: 398606 - DNA, 25 bp, Artificial
  probe
  misc_feature (1)..(25): SEQ ID NO: 5057; WAN024F56; Start 34; Stop 58
gctcttgtagtccagcagttgattt

SEQ ID NO: 398607 - DNA, 25 bp, Artificial
  probe
  misc_feature (1)..(25): SEQ ID NO: 5057; WAN024F56; Start 191; Stop 215
ggttttcctgtccattgttggtaat

SEQ ID NO: 398608 - DNA, 25 bp, Artificial
  probe
  misc_feature (1)..(25): SEQ ID NO: 5057; WAN024F56; Start 194; Stop 218
tttcctgtccattgttggtaatcgc

SEQ ID NO: 398609 - DNA, 25 bp, Artificial
  probe
  misc_feature (1)..(25): SEQ ID NO: 5057; WAN024F56; Start 193; Stop 217
ttttcctgtccattgttggtaatcg

SEQ ID NO: 398610 - DNA, 25 bp, Artificial
  probe
  misc_feature (1)..(25): SEQ ID NO: 5057; WAN024F56; Start 4; Stop 28
actaaacattttcctgtcctcctcg

SEQ ID NO: 398611 - DNA, 25 bp, Artificial
  probe
  misc_feature (1)..(25): SEQ ID NO: 5057; WAN024F56; Start 220; Stop 244
aatacctcacctgttgtgtcttcgc

SEQ ID NO: 398612 - DNA, 25 bp, Artificial
  probe
  misc_feature (1)..(25): SEQ ID NO: 5057; WAN024F56; Start 217; Stop 241
gccaatacctcacctgttgtgtctt

SEQ ID NO: 398613 - DNA, 25 bp, Artificial
  probe
  misc_feature (1)..(25): SEQ ID NO: 5058; WAN024CHA; Start 287; Stop 311
aatcatattctgagttggttcctgg

SEQ ID NO: 398614 - DNA, 25 bp, Artificial
  probe
  misc_feature (1)..(25): SEQ ID NO: 5058; WAN024CHA; Start 288; Stop 312
atcatattctgagttggttcctgga

SEQ ID NO: 398615 - DNA, 25 bp, Artificial
  probe
  misc_feature (1)..(25): SEQ ID NO: 5058; WAN024CHA; Start 212; Stop 236
caatagcttcttcattcaaggtcac

SEQ ID NO: 398616 - DNA, 25 bp, Artificial
  probe
  misc_feature (1)..(25): SEQ ID NO: 5058; WAN024CHA; Start 211; Stop 235
acaatagcttcttcattcaaggtca

SEQ ID NO: 398617 - DNA, 25 bp, Artificial
  probe
  misc_feature (1)..(25): SEQ ID NO: 5058; WAN024CHA; Start 85; Stop 109
tcattaagcaggatattgacgataa

SEQ ID NO: 398618 - DNA, 25 bp, Artificial
  probe
  misc_feature (1)..(25): SEQ ID NO: 5058; WAN024CHA; Start 84; Stop 108
ttcattaagcaggatattgacgata

SEQ ID NO: 398619 - DNA, 25 bp, Artificial
  probe
  misc_feature (1)..(25): SEQ ID NO: 5058; WAN024CHA; Start 283; Stop 307
gctgaatcatattctgagttggttc

SEQ ID NO: 398620 - DNA, 25 bp, Artificial
  probe
  misc_feature (1)..(25): SEQ ID NO: 5058; WAN024CHA; Start 285; Stop 309
tgaatcatattctgagttggttcct

SEQ ID NO: 398621 - DNA, 25 bp, Artificial
  probe
  misc_feature (1)..(25): SEQ ID NO: 5058; WAN024CHA; Start 286; Stop 310
gaatcatattctgagttggttcctg

SEQ ID NO: 398622 - DNA, 25 bp, Artificial
  probe
  misc_feature (1)..(25): SEQ ID NO: 5058; WAN024CHA; Start 284; Stop 308
ctgaatcatattctgagttggttcc

SEQ ID NO: 398623 - DNA, 25 bp, Artificial
  probe
  misc_feature (1)..(25): SEQ ID NO: 5058; WAN024CHA; Start 200; Stop 224
caactgacttgacaatagcttcttc

SEQ ID NO: 398624 - DNA, 25 bp, Artificial
  probe
  misc_feature (1)..(25): SEQ ID NO: 5058; WAN024CHA; Start 173; Stop 197
tcttgtcgatattgtcaaccatagt

SEQ ID NO: 398625 - DNA, 25 bp, Artificial
  probe
  misc_feature (1)..(25): SEQ ID NO: 5058; WAN024CHA; Start 171; Stop 195
agtcttgtcgatattgtcaaccata

SEQ ID NO: 398626 - DNA, 25 bp, Artificial
  probe
  misc_feature (1)..(25): SEQ ID NO: 5058; WAN024CHA; Start 170; Stop 194
tagtcttgtcgatattgtcaaccat

SEQ ID NO: 398627 - DNA, 25 bp, Artificial
  probe
  misc_feature (1)..(25): SEQ ID NO: 5058; WAN024CHA; Start 169; Stop 193
ttagtcttgtcgatattgtcaacca

SEQ ID NO: 398628 - DNA, 25 bp, Artificial
  probe
  misc_feature (1)..(25): SEQ ID NO: 5058; WAN024CHA; Start 202; Stop 226
actgacttgacaatagcttcttcat

SEQ ID NO: 398629 - DNA, 25 bp, Artificial
  probe
  misc_feature (1)..(25): SEQ ID NO: 5058; WAN024CHA; Start 289; Stop 313
tcatattctgagttggttcctggaa

SEQ ID NO: 398630 - DNA, 25 bp, Artificial
  probe
  misc_feature (1)..(25): SEQ ID NO: 5058; WAN024CHA; Start 209; Stop 233
tgacaatagcttcttcattcaaggt

SEQ ID NO: 398631 - DNA, 25 bp, Artificial
  probe
  misc_feature (1)..(25): SEQ ID NO: 5058; WAN024CHA; Start 201; Stop 225
aactgacttgacaatagcttcttca

SEQ ID NO: 398632 - DNA, 25 bp, Artificial
  probe
  misc_feature (1)..(25): SEQ ID NO: 5058; WAN024CHA; Start 172; Stop 196
gtcttgtcgatattgtcaaccatag

SEQ ID NO: 398633 - DNA, 25 bp, Artificial
  probe
  misc_feature (1)..(25): SEQ ID NO: 5058; WAN024CHA; Start 92; Stop 116
gcaggatattgacgataaacttagc

SEQ ID NO: 398634 - DNA, 25 bp, Artificial
  probe
  misc_feature (1)..(25): SEQ ID NO: 5058; WAN024CHA; Start 205; Stop 229
gacttgacaatagcttcttcattca

SEQ ID NO: 398635 - DNA, 25 bp, Artificial
  probe
  misc_feature (1)..(25): SEQ ID NO: 5058; WAN024CHA; Start 204; Stop 228
tgacttgacaatagcttcttcattc

SEQ ID NO: 398636 - DNA, 25 bp, Artificial
  probe
  misc_feature (1)..(25): SEQ ID NO: 5058; WAN024CHA; Start 145; Stop 169
aatccaccagcaaagaagagaatat

SEQ ID NO: 398637 - DNA, 25 bp, Artificial
  probe
  misc_feature (1)..(25): SEQ ID NO: 5058; WAN024CHA; Start 203; Stop 227
ctgacttgacaatagcttcttcatt

SEQ ID NO: 398638 - DNA, 25 bp, Artificial
  probe
  misc_feature (1)..(25): SEQ ID NO: 5058; WAN024CHA; Start 25; Stop 49
caaataccgataatcaaaccaccac

SEQ ID NO: 398639 - DNA, 25 bp, Artificial
  probe
  misc_feature (1)..(25): SEQ ID NO: 5058; WAN024CHA; Start 174; Stop 198
cttgtcgatattgtcaaccatagtt

SEQ ID NO: 398640 - DNA, 25 bp, Artificial
  probe
  misc_feature (1)..(25): SEQ ID NO: 5058; WAN024CHA; Start 24; Stop 48
acaaataccgataatcaaaccacca

SEQ ID NO: 398641 - DNA, 25 bp, Artificial
  probe
  misc_feature (1)..(25): SEQ ID NO: 5058; WAN024CHA; Start 144; Stop 168
gaatccaccagcaaagaagagaata

SEQ ID NO: 398642 - DNA, 25 bp, Artificial
  probe
  misc_feature (1)..(25): SEQ ID NO: 5058; WAN024CHA; Start 213; Stop 237
aatagcttcttcattcaaggtcacg

SEQ ID NO: 398643 - DNA, 25 bp, Artificial
  probe
  misc_feature (1)..(25): SEQ ID NO: 5058; WAN024CHA; Start 168; Stop 192
attagtcttgtcgatattgtcaacc

SEQ ID NO: 398644 - DNA, 25 bp, Artificial
  probe
  misc_feature (1)..(25): SEQ ID NO: 5058; WAN024CHA; Start 23; Stop 47
tacaaataccgataatcaaaccacc

SEQ ID NO: 398645 - DNA, 25 bp, Artificial
  probe
  misc_feature (1)..(25): SEQ ID NO: 5058; WAN024CHA; Start 210; Stop 234
gacaatagcttcttcattcaaggtc

SEQ ID NO: 398646 - DNA, 25 bp, Artificial
  probe
  misc_feature (1)..(25): SEQ ID NO: 5059; WAN024F9A; Start 199; Stop 223
agcatagacattggaactgaagaat

SEQ ID NO: 398647 - DNA, 25 bp, Artificial
  probe
  misc_feature (1)..(25): SEQ ID NO: 5059; WAN024F9A; Start 207; Stop 231
cattggaactgaagaatacgcatta

SEQ ID NO: 398648 - DNA, 25 bp, Artificial
  probe
  misc_feature (1)..(25): SEQ ID NO: 5059; WAN024F9A; Start 198; Stop 222
gagcatagacattggaactgaagaa

SEQ ID NO: 398649 - DNA, 25 bp, Artificial
  probe
  misc_feature (1)..(25): SEQ ID NO: 5059; WAN024F9A; Start 203; Stop 227
tagacattggaactgaagaatacgc

SEQ ID NO: 398650 - DNA, 25 bp, Artificial
  probe
  misc_feature (1)..(25): SEQ ID NO: 5059; WAN024F9A; Start 208; Stop 232
attggaactgaagaatacgcattat

SEQ ID NO: 398651 - DNA, 25 bp, Artificial
  probe
  misc_feature (1)..(25): SEQ ID NO: 5059; WAN024F9A; Start 200; Stop 224
gcatagacattggaactgaagaata

SEQ ID NO: 398652 - DNA, 25 bp, Artificial
  probe
  misc_feature (1)..(25): SEQ ID NO: 5059; WAN024F9A; Start 206; Stop 230
acattggaactgaagaatacgcatt

SEQ ID NO: 398653 - DNA, 25 bp, Artificial
  probe
  misc_feature (1)..(25): SEQ ID NO: 5059; WAN024F9A; Start 202; Stop 226
atagacattggaactgaagaatacg

SEQ ID NO: 398654 - DNA, 25 bp, Artificial
  probe
  misc_feature (1)..(25): SEQ ID NO: 5059; WAN024F9A; Start 209; Stop 233
ttggaactgaagaatacgcattata

SEQ ID NO: 398655 - DNA, 25 bp, Artificial
  probe
  misc_feature (1)..(25): SEQ ID NO: 5059; WAN024F9A; Start 205; Stop 229
gacattggaactgaagaatacgcat

SEQ ID NO: 398656 - DNA, 25 bp, Artificial
  probe
  misc_feature (1)..(25): SEQ ID NO: 5059; WAN024F9A; Start 197; Stop 221
tgagcatagacattggaactgaaga

SEQ ID NO: 398657 - DNA, 25 bp, Artificial
  probe
  misc_feature (1)..(25): SEQ ID NO: 5059; WAN024F9A; Start 196; Stop 220
gtgagcatagacattggaactgaag

SEQ ID NO: 398658 - DNA, 25 bp, Artificial
  probe
  misc_feature (1)..(25): SEQ ID NO: 5059; WAN024F9A; Start 210; Stop 234
tggaactgaagaatacgcattatat

SEQ ID NO: 398659 - DNA, 25 bp, Artificial
  probe
  misc_feature (1)..(25): SEQ ID NO: 5059; WAN024F9A; Start 190; Stop 214
gagattgtgagcatagacattggaa

SEQ ID NO: 398660 - DNA, 25 bp, Artificial
  probe
  misc_feature (1)..(25): SEQ ID NO: 5059; WAN024F9A; Start 392; Stop 416
caggagatatactgattgaagcgtt

SEQ ID NO: 398661 - DNA, 25 bp, Artificial
  probe
  misc_feature (1)..(25): SEQ ID NO: 5059; WAN024F9A; Start 390; Stop 414
aacaggagatatactgattgaagcg

SEQ ID NO: 398662 - DNA, 25 bp, Artificial
  probe
  misc_feature (1)..(25): SEQ ID NO: 5059; WAN024F9A; Start 389; Stop 413
caacaggagatatactgattgaagc

SEQ ID NO: 398663 - DNA, 25 bp, Artificial
  probe
  misc_feature (1)..(25): SEQ ID NO: 5059; WAN024F9A; Start 192; Stop 216
gattgtgagcatagacattggaact

SEQ ID NO: 398664 - DNA, 25 bp, Artificial
  probe
  misc_feature (1)..(25): SEQ ID NO: 5059; WAN024F9A; Start 191; Stop 215
agattgtgagcatagacattggaac

SEQ ID NO: 398665 - DNA, 25 bp, Artificial
  probe
  misc_feature (1)..(25): SEQ ID NO: 5059; WAN024F9A; Start 96; Stop 120
tgttattccacaagaggtgtatgat

SEQ ID NO: 398666 - DNA, 25 bp, Artificial
  probe
  misc_feature (1)..(25): SEQ ID NO: 5059; WAN024F9A; Start 193; Stop 217
attgtgagcatagacattggaactg

SEQ ID NO: 398667 - DNA, 25 bp, Artificial
  probe
  misc_feature (1)..(25): SEQ ID NO: 5059; WAN024F9A; Start 386; Stop 410
tgacaacaggagatatactgattga

SEQ ID NO: 398668 - DNA, 25 bp, Artificial
  probe
  misc_feature (1)..(25): SEQ ID NO: 5059; WAN024F9A; Start 97; Stop 121
gttattccacaagaggtgtatgatg

SEQ ID NO: 398669 - DNA, 25 bp, Artificial
  probe
  misc_feature (1)..(25): SEQ ID NO: 5059; WAN024F9A; Start 99; Stop 123
tattccacaagaggtgtatgatgaa

SEQ ID NO: 398670 - DNA, 25 bp, Artificial
  probe
  misc_feature (1)..(25): SEQ ID NO: 5059; WAN024F9A; Start 98; Stop 122
ttattccacaagaggtgtatgatga

SEQ ID NO: 398671 - DNA, 25 bp, Artificial
  probe
  misc_feature (1)..(25): SEQ ID NO: 5059; WAN024F9A; Start 188; Stop 212
ctgagattgtgagcatagacattgg

SEQ ID NO: 398672 - DNA, 25 bp, Artificial
  probe
  misc_feature (1)..(25): SEQ ID NO: 5059; WAN024F9A; Start 391; Stop 415
acaggagatatactgattgaagcgt

SEQ ID NO: 398673 - DNA, 25 bp, Artificial
  probe
  misc_feature (1)..(25): SEQ ID NO: 5059; WAN024F9A; Start 204; Stop 228
agacattggaactgaagaatacgca

SEQ ID NO: 398674 - DNA, 25 bp, Artificial
  probe
  misc_feature (1)..(25): SEQ ID NO: 5059; WAN024F9A; Start 201; Stop 225
catagacattggaactgaagaatac

SEQ ID NO: 398675 - DNA, 25 bp, Artificial
  probe
  misc_feature (1)..(25): SEQ ID NO: 5059; WAN024F9A; Start 189; Stop 213
tgagattgtgagcatagacattgga

SEQ ID NO: 398676 - DNA, 25 bp, Artificial
  probe
  misc_feature (1)..(25): SEQ ID NO: 5059; WAN024F9A; Start 385; Stop 409
atgacaacaggagatatactgattg

SEQ ID NO: 398677 - DNA, 25 bp, Artificial
  probe
  misc_feature (1)..(25): SEQ ID NO: 5059; WAN024F9A; Start 388; Stop 412
acaacaggagatatactgattgaag

SEQ ID NO: 398678 - DNA, 25 bp, Artificial
  probe
  misc_feature (1)..(25): SEQ ID NO: 5059; WAN024F9A; Start 387; Stop 411
gacaacaggagatatactgattgaa

SEQ ID NO: 398679 - DNA, 25 bp, Artificial
  probe
  misc_feature (1)..(25): SEQ ID NO: 5060; WAN024DU8; Start 231; Stop 255
actttccacctcatttgatttaact

SEQ ID NO: 398680 - DNA, 25 bp, Artificial
  probe
  misc_feature (1)..(25): SEQ ID NO: 5060; WAN024DU8; Start 145; Stop 169
ataacatctgctgctaaagtctttg

SEQ ID NO: 398681 - DNA, 25 bp, Artificial
  probe
  misc_feature (1)..(25): SEQ ID NO: 5060; WAN024DU8; Start 234; Stop 258
ttccacctcatttgatttaacttct

SEQ ID NO: 398682 - DNA, 25 bp, Artificial
  probe
  misc_feature (1)..(25): SEQ ID NO: 5060; WAN024DU8; Start 144; Stop 168
aataacatctgctgctaaagtcttt

SEQ ID NO: 398683 - DNA, 25 bp, Artificial
  probe
  misc_feature (1)..(25): SEQ ID NO: 5060; WAN024DU8; Start 143; Stop 167
taataacatctgctgctaaagtctt

SEQ ID NO: 398684 - DNA, 25 bp, Artificial
  probe
  misc_feature (1)..(25): SEQ ID NO: 5060; WAN024DU8; Start 141; Stop 165
cataataacatctgctgctaaagtc

SEQ ID NO: 398685 - DNA, 25 bp, Artificial
  probe
  misc_feature (1)..(25): SEQ ID NO: 5060; WAN024DU8; Start 142; Stop 166
ataataacatctgctgctaaagtct

SEQ ID NO: 398686 - DNA, 25 bp, Artificial
  probe
  misc_feature (1)..(25): SEQ ID NO: 5060; WAN024DU8; Start 230; Stop 254
aactttccacctcatttgatttaac

SEQ ID NO: 398687 - DNA, 25 bp, Artificial
  probe
  misc_feature (1)..(25): SEQ ID NO: 5060; WAN024DU8; Start 233; Stop 257
tttccacctcatttgatttaacttc

SEQ ID NO: 398688 - DNA, 25 bp, Artificial
  probe
  misc_feature (1)..(25): SEQ ID NO: 5060; WAN024DU8; Start 232; Stop 256
ctttccacctcatttgatttaactt

SEQ ID NO: 398689 - DNA, 25 bp, Artificial
  probe
  misc_feature (1)..(25): SEQ ID NO: 5060; WAN024DU8; Start 176; Stop 200
gcaatttagacttcatatcaagcaa

SEQ ID NO: 398690 - DNA, 25 bp, Artificial
  probe
  misc_feature (1)..(25): SEQ ID NO: 5060; WAN024DU8; Start 235; Stop 259
tccacctcatttgatttaacttcta

SEQ ID NO: 398691 - DNA, 25 bp, Artificial
  probe
  misc_feature (1)..(25): SEQ ID NO: 5060; WAN024DU8; Start 146; Stop 170
taacatctgctgctaaagtctttgt

SEQ ID NO: 398692 - DNA, 25 bp, Artificial
  probe
  misc_feature (1)..(25): SEQ ID NO: 5060; WAN024DU8; Start 125; Stop 149
aagataccggagaacgcataataac

SEQ ID NO: 398693 - DNA, 25 bp, Artificial
  probe
  misc_feature (1)..(25): SEQ ID NO: 5060; WAN024DU8; Start 124; Stop 148
caagataccggagaacgcataataa

SEQ ID NO: 398694 - DNA, 25 bp, Artificial
  probe
  misc_feature (1)..(25): SEQ ID NO: 5060; WAN024DU8; Start 128; Stop 152
ataccggagaacgcataataacatc

SEQ ID NO: 398695 - DNA, 25 bp, Artificial
  probe
  misc_feature (1)..(25): SEQ ID NO: 5060; WAN024DU8; Start 127; Stop 151
gataccggagaacgcataataacat

SEQ ID NO: 398696 - DNA, 25 bp, Artificial
  probe
  misc_feature (1)..(25): SEQ ID NO: 5060; WAN024DU8; Start 220; Stop 244
tctgtctttaaactttccacctcat

SEQ ID NO: 398697 - DNA, 25 bp, Artificial
  probe
  misc_feature (1)..(25): SEQ ID NO: 5060; WAN024DU8; Start 219; Stop 243
ttctgtctttaaactttccacctca

SEQ ID NO: 398698 - DNA, 25 bp, Artificial
  probe
  misc_feature (1)..(25): SEQ ID NO: 5060; WAN024DU8; Start 137; Stop 161
aacgcataataacatctgctgctaa

SEQ ID NO: 398699 - DNA, 25 bp, Artificial
  probe
  misc_feature (1)..(25): SEQ ID NO: 5060; WAN024DU8; Start 221; Stop 245
ctgtctttaaactttccacctcatt

SEQ ID NO: 398700 - DNA, 25 bp, Artificial
  probe
  misc_feature (1)..(25): SEQ ID NO: 5060; WAN024DU8; Start 218; Stop 242
tttctgtctttaaactttccacctc

SEQ ID NO: 398701 - DNA, 25 bp, Artificial
  probe
  misc_feature (1)..(25): SEQ ID NO: 5060; WAN024DU8; Start 229; Stop 253
aaactttccacctcatttgatttaa

SEQ ID NO: 398702 - DNA, 25 bp, Artificial
  probe
  misc_feature (1)..(25): SEQ ID NO: 5060; WAN024DU8; Start 227; Stop 251
ttaaactttccacctcatttgattt

SEQ ID NO: 398703 - DNA, 25 bp, Artificial
  probe
  misc_feature (1)..(25): SEQ ID NO: 5060; WAN024DU8; Start 222; Stop 246
tgtctttaaactttccacctcattt

SEQ ID NO: 398704 - DNA, 25 bp, Artificial
  probe
  misc_feature (1)..(25): SEQ ID NO: 5060; WAN024DU8; Start 181; Stop 205
ttagacttcatatcaagcaattggc

SEQ ID NO: 398705 - DNA, 25 bp, Artificial
  probe
  misc_feature (1)..(25): SEQ ID NO: 5060; WAN024DU8; Start 224; Stop 248
tctttaaactttccacctcatttga

SEQ ID NO: 398706 - DNA, 25 bp, Artificial
  probe
  misc_feature (1)..(25): SEQ ID NO: 5060; WAN024DU8; Start 223; Stop 247
gtctttaaactttccacctcatttg

SEQ ID NO: 398707 - DNA, 25 bp, Artificial
  probe
  misc_feature (1)..(25): SEQ ID NO: 5060; WAN024DU8; Start 136; Stop 160
gaacgcataataacatctgctgcta

SEQ ID NO: 398708 - DNA, 25 bp, Artificial
  probe
  misc_feature (1)..(25): SEQ ID NO: 5060; WAN024DU8; Start 126; Stop 150
agataccggagaacgcataataaca

SEQ ID NO: 398709 - DNA, 25 bp, Artificial
  probe
  misc_feature (1)..(25): SEQ ID NO: 5060; WAN024DU8; Start 236; Stop 260
ccacctcatttgatttaacttctaa

SEQ ID NO: 398710 - DNA, 25 bp, Artificial
  probe
  misc_feature (1)..(25): SEQ ID NO: 5060; WAN024DU8; Start 129; Stop 153
taccggagaacgcataataacatct

SEQ ID NO: 398711 - DNA, 25 bp, Artificial
  probe
  misc_feature (1)..(25): SEQ ID NO: 5060; WAN024DU8; Start 147; Stop 171
aacatctgctgctaaagtctttgtg

SEQ ID NO: 398712 - DNA, 25 bp, Artificial
  probe
  misc_feature (1)..(25): SEQ ID NO: 5061; WAN024DQC; Start 20; Stop 44
ctagagcaacagagtcatggaatgg

SEQ ID NO: 398713 - DNA, 25 bp, Artificial
  probe
  misc_feature (1)..(25): SEQ ID NO: 5061; WAN024DQC; Start 60; Stop 84
ttctccttgttgcttggacttcatt

SEQ ID NO: 398714 - DNA, 25 bp, Artificial
  probe
  misc_feature (1)..(25): SEQ ID NO: 5061; WAN024DQC; Start 21; Stop 45
tagagcaacagagtcatggaatgga

SEQ ID NO: 398715 - DNA, 25 bp, Artificial
  probe
  misc_feature (1)..(25): SEQ ID NO: 5061; WAN024DQC; Start 63; Stop 87
tccttgttgcttggacttcattcaa

SEQ ID NO: 398716 - DNA, 25 bp, Artificial
  probe
  misc_feature (1)..(25): SEQ ID NO: 5061; WAN024DQC; Start 47; Stop 71
tcatggttgagatttctccttgttg

SEQ ID NO: 398717 - DNA, 25 bp, Artificial
  probe
  misc_feature (1)..(25): SEQ ID NO: 5061; WAN024DQC; Start 18; Stop 42
ttctagagcaacagagtcatggaat

SEQ ID NO: 398718 - DNA, 25 bp, Artificial
  probe
  misc_feature (1)..(25): SEQ ID NO: 5061; WAN024DQC; Start 64; Stop 88
ccttgttgcttggacttcattcaaa

SEQ ID NO: 398719 - DNA, 25 bp, Artificial
  probe
  misc_feature (1)..(25): SEQ ID NO: 5061; WAN024DQC; Start 61; Stop 85
tctccttgttgcttggacttcattc

SEQ ID NO: 398720 - DNA, 25 bp, Artificial
  probe
  misc_feature (1)..(25): SEQ ID NO: 5061; WAN024DQC; Start 19; Stop 43
tctagagcaacagagtcatggaatg

SEQ ID NO: 398721 - DNA, 25 bp, Artificial
  probe
  misc_feature (1)..(25): SEQ ID NO: 5061; WAN024DQC; Start 62; Stop 86
ctccttgttgcttggacttcattca

SEQ ID NO: 398722 - DNA, 25 bp, Artificial
  probe
  misc_feature (1)..(25): SEQ ID NO: 5061; WAN024DQC; Start 79; Stop 103
ttcattcaaaagtctgttacccaag

SEQ ID NO: 398723 - DNA, 25 bp, Artificial
  probe
  misc_feature (1)..(25): SEQ ID NO: 5061; WAN024DQC; Start 57; Stop 81
gatttctccttgttgcttggacttc

SEQ ID NO: 398724 - DNA, 25 bp, Artificial
  probe
  misc_feature (1)..(25): SEQ ID NO: 5061; WAN024DQC; Start 78; Stop 102
cttcattcaaaagtctgttacccaa

SEQ ID NO: 398725 - DNA, 25 bp, Artificial
  probe
  misc_feature (1)..(25): SEQ ID NO: 5061; WAN024DQC; Start 52; Stop 76
gttgagatttctccttgttgcttgg

SEQ ID NO: 398726 - DNA, 25 bp, Artificial
  probe
  misc_feature (1)..(25): SEQ ID NO: 5061; WAN024DQC; Start 51; Stop 75
ggttgagatttctccttgttgcttg

SEQ ID NO: 398727 - DNA, 25 bp, Artificial
  probe
  misc_feature (1)..(25): SEQ ID NO: 5061; WAN024DQC; Start 94; Stop 118
gttacccaagccttgttcaaacttc

SEQ ID NO: 398728 - DNA, 25 bp, Artificial
  probe
  misc_feature (1)..(25): SEQ ID NO: 5061; WAN024DQC; Start 49; Stop 73
atggttgagatttctccttgttgct

SEQ ID NO: 398729 - DNA, 25 bp, Artificial
  probe
  misc_feature (1)..(25): SEQ ID NO: 5061; WAN024DQC; Start 48; Stop 72
catggttgagatttctccttgttgc

SEQ ID NO: 398730 - DNA, 25 bp, Artificial
  probe
  misc_feature (1)..(25): SEQ ID NO: 5061; WAN024DQC; Start 56; Stop 80
agatttctccttgttgcttggactt

SEQ ID NO: 398731 - DNA, 25 bp, Artificial
  probe
  misc_feature (1)..(25): SEQ ID NO: 5061; WAN024DQC; Start 66; Stop 90
ttgttgcttggacttcattcaaaag

SEQ ID NO: 398732 - DNA, 25 bp, Artificial
  probe
  misc_feature (1)..(25): SEQ ID NO: 5061; WAN024DQC; Start 65; Stop 89
cttgttgcttggacttcattcaaaa

SEQ ID NO: 398733 - DNA, 25 bp, Artificial
  probe
  misc_feature (1)..(25): SEQ ID NO: 5061; WAN024DQC; Start 50; Stop 74
tggttgagatttctccttgttgctt

SEQ ID NO: 398734 - DNA, 25 bp, Artificial
  probe
  misc_feature (1)..(25): SEQ ID NO: 5061; WAN024DQC; Start 59; Stop 83
tttctccttgttgcttggacttcat

SEQ ID NO: 398735 - DNA, 25 bp, Artificial
  probe
  misc_feature (1)..(25): SEQ ID NO: 5061; WAN024DQC; Start 58; Stop 82
atttctccttgttgcttggacttca

SEQ ID NO: 398736 - DNA, 25 bp, Artificial
  probe
  misc_feature (1)..(25): SEQ ID NO: 5061; WAN024DQC; Start 80; Stop 104
tcattcaaaagtctgttacccaagc

SEQ ID NO: 398737 - DNA, 25 bp, Artificial
  probe
  misc_feature (1)..(25): SEQ ID NO: 5061; WAN024DQC; Start 36; Stop 60
atggaatggactcatggttgagatt

SEQ ID NO: 398738 - DNA, 25 bp, Artificial
  probe
  misc_feature (1)..(25): SEQ ID NO: 5061; WAN024DQC; Start 53; Stop 77
ttgagatttctccttgttgcttgga

SEQ ID NO: 398739 - DNA, 25 bp, Artificial
  probe
  misc_feature (1)..(25): SEQ ID NO: 5061; WAN024DQC; Start 93; Stop 117
tgttacccaagccttgttcaaactt

SEQ ID NO: 398740 - DNA, 25 bp, Artificial
  probe
  misc_feature (1)..(25): SEQ ID NO: 5061; WAN024DQC; Start 17; Stop 41
tttctagagcaacagagtcatggaa

SEQ ID NO: 398741 - DNA, 25 bp, Artificial
  probe
  misc_feature (1)..(25): SEQ ID NO: 5061; WAN024DQC; Start 87; Stop 111
aaagtctgttacccaagccttgttc

SEQ ID NO: 398742 - DNA, 25 bp, Artificial
  probe
  misc_feature (1)..(25): SEQ ID NO: 5061; WAN024DQC; Start 55; Stop 79
gagatttctccttgttgcttggact

SEQ ID NO: 398743 - DNA, 25 bp, Artificial
  probe
  misc_feature (1)..(25): SEQ ID NO: 5061; WAN024DQC; Start 82; Stop 106
attcaaaagtctgttacccaagcct

SEQ ID NO: 398744 - DNA, 25 bp, Artificial
  probe
  misc_feature (1)..(25): SEQ ID NO: 5061; WAN024DQC; Start 81; Stop 105
cattcaaaagtctgttacccaagcc

SEQ ID NO: 398745 - DNA, 25 bp, Artificial
  probe
  misc_feature (1)..(25): SEQ ID NO: 5062; WAN024GFW; Start 281; Stop 305
atgatagcaccgatacctgtaagag

SEQ ID NO: 398746 - DNA, 25 bp, Artificial
  probe
  misc_feature (1)..(25): SEQ ID NO: 5062; WAN024GFW; Start 280; Stop 304
gatgatagcaccgatacctgtaaga

SEQ ID NO: 398747 - DNA, 25 bp, Artificial
  probe
  misc_feature (1)..(25): SEQ ID NO: 5062; WAN024GFW; Start 8; Stop 32
acaccattgttatcagcataccatt

SEQ ID NO: 398748 - DNA, 25 bp, Artificial
  probe
  misc_feature (1)..(25): SEQ ID NO: 5062; WAN024GFW; Start 3; Stop 27
gactcacaccattgttatcagcata

SEQ ID NO: 398749 - DNA, 25 bp, Artificial
  probe
  misc_feature (1)..(25): SEQ ID NO: 5062; WAN024GFW; Start 4; Stop 28
actcacaccattgttatcagcatac

SEQ ID NO: 398750 - DNA, 25 bp, Artificial
  probe
  misc_feature (1)..(25): SEQ ID NO: 5062; WAN024GFW; Start 7; Stop 31
cacaccattgttatcagcataccat

SEQ ID NO: 398751 - DNA, 25 bp, Artificial
  probe
  misc_feature (1)..(25): SEQ ID NO: 5062; WAN024GFW; Start 36; Stop 60
tcaagagacctgtgatagacaagtg

SEQ ID NO: 398752 - DNA, 25 bp, Artificial
  probe
  misc_feature (1)..(25): SEQ ID NO: 5062; WAN024GFW; Start 5; Stop 29
ctcacaccattgttatcagcatacc

SEQ ID NO: 398753 - DNA, 25 bp, Artificial
  probe
  misc_feature (1)..(25): SEQ ID NO: 5062; WAN024GFW; Start 279; Stop 303
cgatgatagcaccgatacctgtaag

SEQ ID NO: 398754 - DNA, 25 bp, Artificial
  probe
  misc_feature (1)..(25): SEQ ID NO: 5062; WAN024GFW; Start 44; Stop 68
cctgtgatagacaagtgccagatat

SEQ ID NO: 398755 - DNA, 25 bp, Artificial
  probe
  misc_feature (1)..(25): SEQ ID NO: 5062; WAN024GFW; Start 9; Stop 33
caccattgttatcagcataccattt

SEQ ID NO: 398756 - DNA, 25 bp, Artificial
  probe
  misc_feature (1)..(25): SEQ ID NO: 5062; WAN024GFW; Start 23; Stop 47
gcataccatttaatcaagagacctg

SEQ ID NO: 398757 - DNA, 25 bp, Artificial
  probe
  misc_feature (1)..(25): SEQ ID NO: 5062; WAN024GFW; Start 22; Stop 46
agcataccatttaatcaagagacct

SEQ ID NO: 398758 - DNA, 25 bp, Artificial
  probe
  misc_feature (1)..(25): SEQ ID NO: 5062; WAN024GFW; Start 21; Stop 45
cagcataccatttaatcaagagacc

SEQ ID NO: 398759 - DNA, 25 bp, Artificial
  probe
  misc_feature (1)..(25): SEQ ID NO: 5062; WAN024GFW; Start 6; Stop 30
tcacaccattgttatcagcatacca

SEQ ID NO: 398760 - DNA, 25 bp, Artificial
  probe
  misc_feature (1)..(25): SEQ ID NO: 5062; WAN024GFW; Start 271; Stop 295
tagcataccgatgatagcaccgata

SEQ ID NO: 398761 - DNA, 25 bp, Artificial
  probe
  misc_feature (1)..(25): SEQ ID NO: 5062; WAN024GFW; Start 446; Stop 470
aagattgcatccataacagttcctc

SEQ ID NO: 398762 - DNA, 25 bp, Artificial
  probe
  misc_feature (1)..(25): SEQ ID NO: 5062; WAN024GFW; Start 20; Stop 44
tcagcataccatttaatcaagagac

SEQ ID NO: 398763 - DNA, 25 bp, Artificial
  probe
  misc_feature (1)..(25): SEQ ID NO: 5062; WAN024GFW; Start 2; Stop 26
tgactcacaccattgttatcagcat

SEQ ID NO: 398764 - DNA, 25 bp, Artificial
  probe
  misc_feature (1)..(25): SEQ ID NO: 5062; WAN024GFW; Start 10; Stop 34
accattgttatcagcataccattta

SEQ ID NO: 398765 - DNA, 25 bp, Artificial
  probe
  misc_feature (1)..(25): SEQ ID NO: 5062; WAN024GFW; Start 25; Stop 49
ataccatttaatcaagagacctgtg

SEQ ID NO: 398766 - DNA, 25 bp, Artificial
  probe
  misc_feature (1)..(25): SEQ ID NO: 5062; WAN024GFW; Start 24; Stop 48
cataccatttaatcaagagacctgt

SEQ ID NO: 398767 - DNA, 25 bp, Artificial
  probe
  misc_feature (1)..(25): SEQ ID NO: 5062; WAN024GFW; Start 1; Stop 25
ttgactcacaccattgttatcagca

SEQ ID NO: 398768 - DNA, 25 bp, Artificial
  probe
  misc_feature (1)..(25): SEQ ID NO: 5062; WAN024GFW; Start 26; Stop 50
taccatttaatcaagagacctgtga

SEQ ID NO: 398769 - DNA, 25 bp, Artificial
  probe
  misc_feature (1)..(25): SEQ ID NO: 5062; WAN024GFW; Start 34; Stop 58
aatcaagagacctgtgatagacaag

SEQ ID NO: 398770 - DNA, 25 bp, Artificial
  probe
  misc_feature (1)..(25): SEQ ID NO: 5062; WAN024GFW; Start 19; Stop 43
atcagcataccatttaatcaagaga

SEQ ID NO: 398771 - DNA, 25 bp, Artificial
  probe
  misc_feature (1)..(25): SEQ ID NO: 5062; WAN024GFW; Start 35; Stop 59
atcaagagacctgtgatagacaagt

SEQ ID NO: 398772 - DNA, 25 bp, Artificial
  probe
  misc_feature (1)..(25): SEQ ID NO: 5062; WAN024GFW; Start 33; Stop 57
taatcaagagacctgtgatagacaa

SEQ ID NO: 398773 - DNA, 25 bp, Artificial
  probe
  misc_feature (1)..(25): SEQ ID NO: 5062; WAN024GFW; Start 32; Stop 56
ttaatcaagagacctgtgatagaca

SEQ ID NO: 398774 - DNA, 25 bp, Artificial
  probe
  misc_feature (1)..(25): SEQ ID NO: 5062; WAN024GFW; Start 126; Stop 150
caatcaacatgatgagcaagaagta

SEQ ID NO: 398775 - DNA, 25 bp, Artificial
  probe
  misc_feature (1)..(25): SEQ ID NO: 5062; WAN024GFW; Start 45; Stop 69
ctgtgatagacaagtgccagatatc

SEQ ID NO: 398776 - DNA, 25 bp, Artificial
  probe
  misc_feature (1)..(25): SEQ ID NO: 5062; WAN024GFW; Start 124; Stop 148
gacaatcaacatgatgagcaagaag

SEQ ID NO: 398777 - DNA, 25 bp, Artificial
  probe
  misc_feature (1)..(25): SEQ ID NO: 5062; WAN024GFW; Start 275; Stop 299
ataccgatgatagcaccgatacctg

SEQ ID NO: 398778 - DNA, 25 bp, Artificial
  probe
  misc_feature (1)..(25): SEQ ID NO: 5063; WAN024GBE; Start 175; Stop 199
ttcactaacttatcaccacttgctt

SEQ ID NO: 398779 - DNA, 25 bp, Artificial
  probe
  misc_feature (1)..(25): SEQ ID NO: 5063; WAN024GBE; Start 212; Stop 236
gaatatctgactcaaccaaggctaa

SEQ ID NO: 398780 - DNA, 25 bp, Artificial
  probe
  misc_feature (1)..(25): SEQ ID NO: 5063; WAN024GBE; Start 176; Stop 200
tcactaacttatcaccacttgcttc

SEQ ID NO: 398781 - DNA, 25 bp, Artificial
  probe
  misc_feature (1)..(25): SEQ ID NO: 5063; WAN024GBE; Start 179; Stop 203
ctaacttatcaccacttgcttccac

SEQ ID NO: 398782 - DNA, 25 bp, Artificial
  probe
  misc_feature (1)..(25): SEQ ID NO: 5063; WAN024GBE; Start 177; Stop 201
cactaacttatcaccacttgcttcc

SEQ ID NO: 398783 - DNA, 25 bp, Artificial
  probe
  misc_feature (1)..(25): SEQ ID NO: 5063; WAN024GBE; Start 181; Stop 205
aacttatcaccacttgcttccacta

SEQ ID NO: 398784 - DNA, 25 bp, Artificial
  probe
  misc_feature (1)..(25): SEQ ID NO: 5063; WAN024GBE; Start 180; Stop 204
taacttatcaccacttgcttccact

SEQ ID NO: 398785 - DNA, 25 bp, Artificial
  probe
  misc_feature (1)..(25): SEQ ID NO: 5063; WAN024GBE; Start 178; Stop 202
actaacttatcaccacttgcttcca

SEQ ID NO: 398786 - DNA, 25 bp, Artificial
  probe
  misc_feature (1)..(25): SEQ ID NO: 5063; WAN024GBE; Start 211; Stop 235
cgaatatctgactcaaccaaggcta

SEQ ID NO: 398787 - DNA, 25 bp, Artificial
  probe
  misc_feature (1)..(25): SEQ ID NO: 5063; WAN024GBE; Start 183; Stop 207
cttatcaccacttgcttccactact

SEQ ID NO: 398788 - DNA, 25 bp, Artificial
  probe
  misc_feature (1)..(25): SEQ ID NO: 5063; WAN024GBE; Start 446; Stop 470
catactctctagcctcagacaacaa

SEQ ID NO: 398789 - DNA, 25 bp, Artificial
  probe
  misc_feature (1)..(25): SEQ ID NO: 5063; WAN024GBE; Start 373; Stop 397
ttaacatctgtgccttcaagtcctt

SEQ ID NO: 398790 - DNA, 25 bp, Artificial
  probe
  misc_feature (1)..(25): SEQ ID NO: 5063; WAN024GBE; Start 184; Stop 208
ttatcaccacttgcttccactactg

SEQ ID NO: 398791 - DNA, 25 bp, Artificial
  probe
  misc_feature (1)..(25): SEQ ID NO: 5063; WAN024GBE; Start 182; Stop 206
acttatcaccacttgcttccactac

SEQ ID NO: 398792 - DNA, 25 bp, Artificial
  probe
  misc_feature (1)..(25): SEQ ID NO: 5063; WAN024GBE; Start 455; Stop 479
tagcctcagacaacaaactatcaat

SEQ ID NO: 398793 - DNA, 25 bp, Artificial
  probe
  misc_feature (1)..(25): SEQ ID NO: 5063; WAN024GBE; Start 173; Stop 197
ctttcactaacttatcaccacttgc

SEQ ID NO: 398794 - DNA, 25 bp, Artificial
  probe
  misc_feature (1)..(25): SEQ ID NO: 5063; WAN024GBE; Start 174; Stop 198
tttcactaacttatcaccacttgct

SEQ ID NO: 398795 - DNA, 25 bp, Artificial
  probe
  misc_feature (1)..(25): SEQ ID NO: 5063; WAN024GBE; Start 265; Stop 289
atcaccatatcaatctcatctgcac

SEQ ID NO: 398796 - DNA, 25 bp, Artificial
  probe
  misc_feature (1)..(25): SEQ ID NO: 5063; WAN024GBE; Start 264; Stop 288
gatcaccatatcaatctcatctgca

SEQ ID NO: 398797 - DNA, 25 bp, Artificial
  probe
  misc_feature (1)..(25): SEQ ID NO: 5063; WAN024GBE; Start 369; Stop 393
aaccttaacatctgtgccttcaagt

SEQ ID NO: 398798 - DNA, 25 bp, Artificial
  probe
  misc_feature (1)..(25): SEQ ID NO: 5063; WAN024GBE; Start 213; Stop 237
aatatctgactcaaccaaggctaaa

SEQ ID NO: 398799 - DNA, 25 bp, Artificial
  probe
  misc_feature (1)..(25): SEQ ID NO: 5063; WAN024GBE; Start 214; Stop 238
atatctgactcaaccaaggctaaat

SEQ ID NO: 398800 - DNA, 25 bp, Artificial
  probe
  misc_feature (1)..(25): SEQ ID NO: 5063; WAN024GBE; Start 457; Stop 481
gcctcagacaacaaactatcaattt

SEQ ID NO: 398801 - DNA, 25 bp, Artificial
  probe
  misc_feature (1)..(25): SEQ ID NO: 5063; WAN024GBE; Start 269; Stop 293
ccatatcaatctcatctgcaccatt

SEQ ID NO: 398802 - DNA, 25 bp, Artificial
  probe
  misc_feature (1)..(25): SEQ ID NO: 5063; WAN024GBE; Start 216; Stop 240
atctgactcaaccaaggctaaatta

SEQ ID NO: 398803 - DNA, 25 bp, Artificial
  probe
  misc_feature (1)..(25): SEQ ID NO: 5063; WAN024GBE; Start 215; Stop 239
tatctgactcaaccaaggctaaatt

SEQ ID NO: 398804 - DNA, 25 bp, Artificial
  probe
  misc_feature (1)..(25): SEQ ID NO: 5063; WAN024GBE; Start 372; Stop 396
cttaacatctgtgccttcaagtcct

SEQ ID NO: 398805 - DNA, 25 bp, Artificial
  probe
  misc_feature (1)..(25): SEQ ID NO: 5063; WAN024GBE; Start 456; Stop 480
agcctcagacaacaaactatcaatt

SEQ ID NO: 398806 - DNA, 25 bp, Artificial
  probe
  misc_feature (1)..(25): SEQ ID NO: 5063; WAN024GBE; Start 172; Stop 196
actttcactaacttatcaccacttg

SEQ ID NO: 398807 - DNA, 25 bp, Artificial
  probe
  misc_feature (1)..(25): SEQ ID NO: 5063; WAN024GBE; Start 217; Stop 241
tctgactcaaccaaggctaaattac

SEQ ID NO: 398808 - DNA, 25 bp, Artificial
  probe
  misc_feature (1)..(25): SEQ ID NO: 5063; WAN024GBE; Start 171; Stop 195
gactttcactaacttatcaccactt

SEQ ID NO: 398809 - DNA, 25 bp, Artificial
  probe
  misc_feature (1)..(25): SEQ ID NO: 5063; WAN024GBE; Start 454; Stop 478
ctagcctcagacaacaaactatcaa

SEQ ID NO: 398810 - DNA, 25 bp, Artificial
  probe
  misc_feature (1)..(25): SEQ ID NO: 5063; WAN024GBE; Start 370; Stop 394
accttaacatctgtgccttcaagtc

SEQ ID NO: 398811 - DNA, 25 bp, Artificial
  probe
  misc_feature (1)..(25): SEQ ID NO: 5064; WAN024CUR; Start 199; Stop 223
acctacgataaagatggcaatgtta

SEQ ID NO: 398812 - DNA, 25 bp, Artificial
  probe
  misc_feature (1)..(25): SEQ ID NO: 5064; WAN024CUR; Start 196; Stop 220
atgacctacgataaagatggcaatg

SEQ ID NO: 398813 - DNA, 25 bp, Artificial
  probe
  misc_feature (1)..(25): SEQ ID NO: 5064; WAN024CUR; Start 198; Stop 222
gacctacgataaagatggcaatgtt

SEQ ID NO: 398814 - DNA, 25 bp, Artificial
  probe
  misc_feature (1)..(25): SEQ ID NO: 5064; WAN024CUR; Start 200; Stop 224
cctacgataaagatggcaatgttat

SEQ ID NO: 398815 - DNA, 25 bp, Artificial
  probe
  misc_feature (1)..(25): SEQ ID NO: 5064; WAN024CUR; Start 128; Stop 152
aagtaaagcaccgtatccaccatat

SEQ ID NO: 398816 - DNA, 25 bp, Artificial
  probe
  misc_feature (1)..(25): SEQ ID NO: 5064; WAN024CUR; Start 127; Stop 151
aaagtaaagcaccgtatccaccata

SEQ ID NO: 398817 - DNA, 25 bp, Artificial
  probe
  misc_feature (1)..(25): SEQ ID NO: 5064; WAN024CUR; Start 197; Stop 221
tgacctacgataaagatggcaatgt

SEQ ID NO: 398818 - DNA, 25 bp, Artificial
  probe
  misc_feature (1)..(25): SEQ ID NO: 5064; WAN024CUR; Start 195; Stop 219
catgacctacgataaagatggcaat

SEQ ID NO: 398819 - DNA, 25 bp, Artificial
  probe
  misc_feature (1)..(25): SEQ ID NO: 5064; WAN024CUR; Start 123; Stop 147
cttcaaagtaaagcaccgtatccac

SEQ ID NO: 398820 - DNA, 25 bp, Artificial
  probe
  misc_feature (1)..(25): SEQ ID NO: 5064; WAN024CUR; Start 209; Stop 233
aagatggcaatgttattggtcttgg

SEQ ID NO: 398821 - DNA, 25 bp, Artificial
  probe
  misc_feature (1)..(25): SEQ ID NO: 5064; WAN024CUR; Start 201; Stop 225
ctacgataaagatggcaatgttatt

SEQ ID NO: 398822 - DNA, 25 bp, Artificial
  probe
  misc_feature (1)..(25): SEQ ID NO: 5064; WAN024CUR; Start 48; Stop 72
aaatcccaatctcattagtggaacc

SEQ ID NO: 398823 - DNA, 25 bp, Artificial
  probe
  misc_feature (1)..(25): SEQ ID NO: 5064; WAN024CUR; Start 140; Stop 164
gtatccaccatatgctccaacatac

SEQ ID NO: 398824 - DNA, 25 bp, Artificial
  probe
  misc_feature (1)..(25): SEQ ID NO: 5064; WAN024CUR; Start 194; Stop 218
acatgacctacgataaagatggcaa

SEQ ID NO: 398825 - DNA, 25 bp, Artificial
  probe
  misc_feature (1)..(25): SEQ ID NO: 5064; WAN024CUR; Start 191; Stop 215
gtcacatgacctacgataaagatgg

SEQ ID NO: 398826 - DNA, 25 bp, Artificial
  probe
  misc_feature (1)..(25): SEQ ID NO: 5064; WAN024CUR; Start 204; Stop 228
cgataaagatggcaatgttattggt

SEQ ID NO: 398827 - DNA, 25 bp, Artificial
  probe
  misc_feature (1)..(25): SEQ ID NO: 5064; WAN024CUR; Start 203; Stop 227
acgataaagatggcaatgttattgg

SEQ ID NO: 398828 - DNA, 25 bp, Artificial
  probe
  misc_feature (1)..(25): SEQ ID NO: 5064; WAN024CUR; Start 50; Stop 74
atcccaatctcattagtggaaccaa

SEQ ID NO: 398829 - DNA, 25 bp, Artificial
  probe
  misc_feature (1)..(25): SEQ ID NO: 5064; WAN024CUR; Start 49; Stop 73
aatcccaatctcattagtggaacca

SEQ ID NO: 398830 - DNA, 25 bp, Artificial
  probe
  misc_feature (1)..(25): SEQ ID NO: 5064; WAN024CUR; Start 192; Stop 216
tcacatgacctacgataaagatggc

SEQ ID NO: 398831 - DNA, 25 bp, Artificial
  probe
  misc_feature (1)..(25): SEQ ID NO: 5064; WAN024CUR; Start 122; Stop 146
ccttcaaagtaaagcaccgtatcca

SEQ ID NO: 398832 - DNA, 25 bp, Artificial
  probe
  misc_feature (1)..(25): SEQ ID NO: 5064; WAN024CUR; Start 208; Stop 232
aaagatggcaatgttattggtcttg

SEQ ID NO: 398833 - DNA, 25 bp, Artificial
  probe
  misc_feature (1)..(25): SEQ ID NO: 5064; WAN024CUR; Start 51; Stop 75
tcccaatctcattagtggaaccaaa

SEQ ID NO: 398834 - DNA, 25 bp, Artificial
  probe
  misc_feature (1)..(25): SEQ ID NO: 5064; WAN024CUR; Start 124; Stop 148
ttcaaagtaaagcaccgtatccacc

SEQ ID NO: 398835 - DNA, 25 bp, Artificial
  probe
  misc_feature (1)..(25): SEQ ID NO: 5064; WAN024CUR; Start 206; Stop 230
ataaagatggcaatgttattggtct

SEQ ID NO: 398836 - DNA, 25 bp, Artificial
  probe
  misc_feature (1)..(25): SEQ ID NO: 5064; WAN024CUR; Start 205; Stop 229
gataaagatggcaatgttattggtc

SEQ ID NO: 398837 - DNA, 25 bp, Artificial
  probe
  misc_feature (1)..(25): SEQ ID NO: 5064; WAN024CUR; Start 126; Stop 150
caaagtaaagcaccgtatccaccat

SEQ ID NO: 398838 - DNA, 25 bp, Artificial
  probe
  misc_feature (1)..(25): SEQ ID NO: 5064; WAN024CUR; Start 141; Stop 165
tatccaccatatgctccaacatacg

SEQ ID NO: 398839 - DNA, 25 bp, Artificial
  probe
  misc_feature (1)..(25): SEQ ID NO: 5064; WAN024CUR; Start 139; Stop 163
cgtatccaccatatgctccaacata

SEQ ID NO: 398840 - DNA, 25 bp, Artificial
  probe
  misc_feature (1)..(25): SEQ ID NO: 5064; WAN024CUR; Start 207; Stop 231
taaagatggcaatgttattggtctt

SEQ ID NO: 398841 - DNA, 25 bp, Artificial
  probe
  misc_feature (1)..(25): SEQ ID NO: 5064; WAN024CUR; Start 193; Stop 217
cacatgacctacgataaagatggca

SEQ ID NO: 398842 - DNA, 25 bp, Artificial
  probe
  misc_feature (1)..(25): SEQ ID NO: 5064; WAN024CUR; Start 58; Stop 82
ctcattagtggaaccaaaacgattt

SEQ ID NO: 398843 - DNA, 25 bp, Artificial
  probe
  misc_feature (1)..(25): SEQ ID NO: 5064; WAN024CUR; Start 57; Stop 81
tctcattagtggaaccaaaacgatt

SEQ ID NO: 398844 - DNA, 25 bp, Artificial
  probe
  misc_feature (1)..(25): SEQ ID NO: 5065; WAN024D3W-5; Start 1658; Stop 1682
gttattcaccatcacacctcttcaa

SEQ ID NO: 398845 - DNA, 25 bp, Artificial
  probe
  misc_feature (1)..(25): SEQ ID NO: 5065; WAN024D3W-5; Start 1657; Stop 1681
cgttattcaccatcacacctcttca

SEQ ID NO: 398846 - DNA, 25 bp, Artificial
  probe
  misc_feature (1)..(25): SEQ ID NO: 5065; WAN024D3W-5; Start 1659; Stop 1683
ttattcaccatcacacctcttcaaa

SEQ ID NO: 398847 - DNA, 25 bp, Artificial
  probe
  misc_feature (1)..(25): SEQ ID NO: 5065; WAN024D3W-5; Start 1328; Stop 1352
cctttaacgacggtatctactacaa

SEQ ID NO: 398848 - DNA, 25 bp, Artificial
  probe
  misc_feature (1)..(25): SEQ ID NO: 5065; WAN024D3W-5; Start 1660; Stop 1684
tattcaccatcacacctcttcaaac

SEQ ID NO: 398849 - DNA, 25 bp, Artificial
  probe
  misc_feature (1)..(25): SEQ ID NO: 5065; WAN024D3W-5; Start 404; Stop 428
ctagtgataaagcagaggtggtaac

SEQ ID NO: 398850 - DNA, 25 bp, Artificial
  probe
  misc_feature (1)..(25): SEQ ID NO: 5065; WAN024D3W-5; Start 405; Stop 429
tagtgataaagcagaggtggtaact

SEQ ID NO: 398851 - DNA, 25 bp, Artificial
  probe
  misc_feature (1)..(25): SEQ ID NO: 5065; WAN024D3W-5; Start 1329; Stop 1353
ctttaacgacggtatctactacaat

SEQ ID NO: 398852 - DNA, 25 bp, Artificial
  probe
  misc_feature (1)..(25): SEQ ID NO: 5065; WAN024D3W-5; Start 396; Stop 420
ttcaactcctagtgataaagcagag

SEQ ID NO: 398853 - DNA, 25 bp, Artificial
  probe
  misc_feature (1)..(25): SEQ ID NO: 5065; WAN024D3W-5; Start 1327; Stop 1351
gcctttaacgacggtatctactaca

SEQ ID NO: 398854 - DNA, 25 bp, Artificial
  probe
  misc_feature (1)..(25): SEQ ID NO: 5065; WAN024D3W-5; Start 1661; Stop 1685
attcaccatcacacctcttcaaact

SEQ ID NO: 398855 - DNA, 25 bp, Artificial
  probe
  misc_feature (1)..(25): SEQ ID NO: 5065; WAN024D3W-5; Start 406; Stop 430
agtgataaagcagaggtggtaactc

SEQ ID NO: 398856 - DNA, 25 bp, Artificial
  probe
  misc_feature (1)..(25): SEQ ID NO: 5065; WAN024D3W-5; Start 1656; Stop 1680
acgttattcaccatcacacctcttc

SEQ ID NO: 398857 - DNA, 25 bp, Artificial
  probe
  misc_feature (1)..(25): SEQ ID NO: 5065; WAN024D3W-5; Start 403; Stop 427
cctagtgataaagcagaggtggtaa

SEQ ID NO: 398858 - DNA, 25 bp, Artificial
  probe
  misc_feature (1)..(25): SEQ ID NO: 5065; WAN024D3W-5; Start 397; Stop 421
tcaactcctagtgataaagcagagg

SEQ ID NO: 398859 - DNA, 25 bp, Artificial
  probe
  misc_feature (1)..(25): SEQ ID NO: 5065; WAN024D3W-5; Start 1664; Stop 1688
caccatcacacctcttcaaactcat

SEQ ID NO: 398860 - DNA, 25 bp, Artificial
  probe
  misc_feature (1)..(25): SEQ ID NO: 5065; WAN024D3W-5; Start 1662; Stop 1686
ttcaccatcacacctcttcaaactc

SEQ ID NO: 398861 - DNA, 25 bp, Artificial
  probe
  misc_feature (1)..(25): SEQ ID NO: 5065; WAN024D3W-5; Start 1655; Stop 1679
cacgttattcaccatcacacctctt

SEQ ID NO: 398862 - DNA, 25 bp, Artificial
  probe
  misc_feature (1)..(25): SEQ ID NO: 5065; WAN024D3W-5; Start 399; Stop 423
aactcctagtgataaagcagaggtg

SEQ ID NO: 398863 - DNA, 25 bp, Artificial
  probe
  misc_feature (1)..(25): SEQ ID NO: 5065; WAN024D3W-5; Start 398; Stop 422
caactcctagtgataaagcagaggt

SEQ ID NO: 398864 - DNA, 25 bp, Artificial
  probe
  misc_feature (1)..(25): SEQ ID NO: 5065; WAN024D3W-5; Start 402; Stop 426
tcctagtgataaagcagaggtggta

SEQ ID NO: 398865 - DNA, 25 bp, Artificial
  probe
  misc_feature (1)..(25): SEQ ID NO: 5065; WAN024D3W-5; Start 407; Stop 431
gtgataaagcagaggtggtaactcc

SEQ ID NO: 398866 - DNA, 25 bp, Artificial
  probe
  misc_feature (1)..(25): SEQ ID NO: 5065; WAN024D3W-5; Start 409; Stop 433
gataaagcagaggtggtaactccaa

SEQ ID NO: 398867 - DNA, 25 bp, Artificial
  probe
  misc_feature (1)..(25): SEQ ID NO: 5065; WAN024D3W-5; Start 1665; Stop 1689
accatcacacctcttcaaactcatg

SEQ ID NO: 398868 - DNA, 25 bp, Artificial
  probe
  misc_feature (1)..(25): SEQ ID NO: 5065; WAN024D3W-5; Start 1650; Stop 1674
atctgcacgttattcaccatcacac

SEQ ID NO: 398869 - DNA, 25 bp, Artificial
  probe
  misc_feature (1)..(25): SEQ ID NO: 5065; WAN024D3W-5; Start 1649; Stop 1673
catctgcacgttattcaccatcaca

SEQ ID NO: 398870 - DNA, 25 bp, Artificial
  probe
  misc_feature (1)..(25): SEQ ID NO: 5065; WAN024D3W-5; Start 410; Stop 434
ataaagcagaggtggtaactccaac

SEQ ID NO: 398871 - DNA, 25 bp, Artificial
  probe
  misc_feature (1)..(25): SEQ ID NO: 5065; WAN024D3W-5; Start 677; Stop 701
aatatttctcaccagaacagctcaa

SEQ ID NO: 398872 - DNA, 25 bp, Artificial
  probe
  misc_feature (1)..(25): SEQ ID NO: 5065; WAN024D3W-5; Start 270; Stop 294
gactgaggaaacacctaaagcagag

SEQ ID NO: 398873 - DNA, 25 bp, Artificial
  probe
  misc_feature (1)..(25): SEQ ID NO: 5065; WAN024D3W-5; Start 1673; Stop 1697
acctcttcaaactcatgcgtcattt

SEQ ID NO: 398874 - DNA, 25 bp, Artificial
  probe
  misc_feature (1)..(25): SEQ ID NO: 5065; WAN024D3W-5; Start 1663; Stop 1687
tcaccatcacacctcttcaaactca

SEQ ID NO: 398875 - DNA, 25 bp, Artificial
  probe
  misc_feature (1)..(25): SEQ ID NO: 5065; WAN024D3W-5; Start 678; Stop 702
atatttctcaccagaacagctcaag

SEQ ID NO: 398876 - DNA, 25 bp, Artificial
  probe
  misc_feature (1)..(25): SEQ ID NO: 5065; WAN024D3W-5; Start 687; Stop 711
accagaacagctcaaggaaatcatc

SEQ ID NO: 398877 - DNA, 25 bp, Artificial
  probe
  misc_feature (1)..(25): SEQ ID NO: 5066; WAN024F7J; Start 6; Stop 30
tctgctgagtcctatgattgttatc

SEQ ID NO: 398878 - DNA, 25 bp, Artificial
  probe
  misc_feature (1)..(25): SEQ ID NO: 5066; WAN024F7J; Start 9; Stop 33
gctgagtcctatgattgttatcgtt

SEQ ID NO: 398879 - DNA, 25 bp, Artificial
  probe
  misc_feature (1)..(25): SEQ ID NO: 5066; WAN024F7J; Start 7; Stop 31
ctgctgagtcctatgattgttatcg

SEQ ID NO: 398880 - DNA, 25 bp, Artificial
  probe
  misc_feature (1)..(25): SEQ ID NO: 5066; WAN024F7J; Start 5; Stop 29
ctctgctgagtcctatgattgttat

SEQ ID NO: 398881 - DNA, 25 bp, Artificial
  probe
  misc_feature (1)..(25): SEQ ID NO: 5066; WAN024F7J; Start 8; Stop 32
tgctgagtcctatgattgttatcgt

SEQ ID NO: 398882 - DNA, 25 bp, Artificial
  probe
  misc_feature (1)..(25): SEQ ID NO: 5066; WAN024F7J; Start 10; Stop 34
ctgagtcctatgattgttatcgttt

SEQ ID NO: 398883 - DNA, 25 bp, Artificial
  probe
  misc_feature (1)..(25): SEQ ID NO: 5066; WAN024F7J; Start 60; Stop 84
aatcaaagggcaaactaagaagcta

SEQ ID NO: 398884 - DNA, 25 bp, Artificial
  probe
  misc_feature (1)..(25): SEQ ID NO: 5066; WAN024F7J; Start 61; Stop 85
atcaaagggcaaactaagaagctag

SEQ ID NO: 398885 - DNA, 25 bp, Artificial
  probe
  misc_feature (1)..(25): SEQ ID NO: 5066; WAN024F7J; Start 59; Stop 83
aaatcaaagggcaaactaagaagct

SEQ ID NO: 398886 - DNA, 25 bp, Artificial
  probe
  misc_feature (1)..(25): SEQ ID NO: 5066; WAN024F7J; Start 58; Stop 82
aaaatcaaagggcaaactaagaagc

SEQ ID NO: 398887 - DNA, 25 bp, Artificial
  probe
  misc_feature (1)..(25): SEQ ID NO: 5066; WAN024F7J; Start 4; Stop 28
actctgctgagtcctatgattgtta

SEQ ID NO: 398888 - DNA, 25 bp, Artificial
  probe
  misc_feature (1)..(25): SEQ ID NO: 5066; WAN024F7J; Start 57; Stop 81
gaaaatcaaagggcaaactaagaag

SEQ ID NO: 398889 - DNA, 25 bp, Artificial
  probe
  misc_feature (1)..(25): SEQ ID NO: 5066; WAN024F7J; Start 52; Stop 76
tcaatgaaaatcaaagggcaaacta

SEQ ID NO: 398890 - DNA, 25 bp, Artificial
  probe
  misc_feature (1)..(25): SEQ ID NO: 5066; WAN024F7J; Start 49; Stop 73
tactcaatgaaaatcaaagggcaaa

SEQ ID NO: 398891 - DNA, 25 bp, Artificial
  probe
  misc_feature (1)..(25): SEQ ID NO: 5066; WAN024F7J; Start 56; Stop 80
tgaaaatcaaagggcaaactaagaa

SEQ ID NO: 398892 - DNA, 25 bp, Artificial
  probe
  misc_feature (1)..(25): SEQ ID NO: 5066; WAN024F7J; Start 55; Stop 79
atgaaaatcaaagggcaaactaaga

SEQ ID NO: 398893 - DNA, 25 bp, Artificial
  probe
  misc_feature (1)..(25): SEQ ID NO: 5066; WAN024F7J; Start 48; Stop 72
atactcaatgaaaatcaaagggcaa

SEQ ID NO: 398894 - DNA, 25 bp, Artificial
  probe
  misc_feature (1)..(25): SEQ ID NO: 5066; WAN024F7J; Start 51; Stop 75
ctcaatgaaaatcaaagggcaaact

SEQ ID NO: 398895 - DNA, 25 bp, Artificial
  probe
  misc_feature (1)..(25): SEQ ID NO: 5066; WAN024F7J; Start 50; Stop 74
actcaatgaaaatcaaagggcaaac

SEQ ID NO: 398896 - DNA, 25 bp, Artificial
  probe
  misc_feature (1)..(25): SEQ ID NO: 5066; WAN024F7J; Start 53; Stop 77
caatgaaaatcaaagggcaaactaa

SEQ ID NO: 398897 - DNA, 25 bp, Artificial
  probe
  misc_feature (1)..(25): SEQ ID NO: 5066; WAN024F7J; Start 11; Stop 35
tgagtcctatgattgttatcgtttt

SEQ ID NO: 398898 - DNA, 25 bp, Artificial
  probe
  misc_feature (1)..(25): SEQ ID NO: 5066; WAN024F7J; Start 54; Stop 78
aatgaaaatcaaagggcaaactaag

SEQ ID NO: 398899 - DNA, 25 bp, Artificial
  probe
  misc_feature (1)..(25): SEQ ID NO: 5066; WAN024F7J; Start 47; Stop 71
tatactcaatgaaaatcaaagggca

SEQ ID NO: 398900 - DNA, 25 bp, Artificial
  probe
  misc_feature (1)..(25): SEQ ID NO: 5066; WAN024F7J; Start 101; Stop 125
aacacagttttgaggttgtactaac

SEQ ID NO: 398901 - DNA, 25 bp, Artificial
  probe
  misc_feature (1)..(25): SEQ ID NO: 5066; WAN024F7J; Start 46; Stop 70
ttatactcaatgaaaatcaaagggc

SEQ ID NO: 398902 - DNA, 25 bp, Artificial
  probe
  misc_feature (1)..(25): SEQ ID NO: 5066; WAN024F7J; Start 12; Stop 36
gagtcctatgattgttatcgtttta

SEQ ID NO: 398903 - DNA, 25 bp, Artificial
  probe
  misc_feature (1)..(25): SEQ ID NO: 5066; WAN024F7J; Start 100; Stop 124
aaacacagttttgaggttgtactaa

SEQ ID NO: 398904 - DNA, 25 bp, Artificial
  probe
  misc_feature (1)..(25): SEQ ID NO: 5066; WAN024F7J; Start 17; Stop 41
ctatgattgttatcgttttatctgc

SEQ ID NO: 398905 - DNA, 25 bp, Artificial
  probe
  misc_feature (1)..(25): SEQ ID NO: 5066; WAN024F7J; Start 102; Stop 126
acacagttttgaggttgtactaact

SEQ ID NO: 398906 - DNA, 25 bp, Artificial
  probe
  misc_feature (1)..(25): SEQ ID NO: 5066; WAN024F7J; Start 103; Stop 127
cacagttttgaggttgtactaacta

SEQ ID NO: 398907 - DNA, 25 bp, Artificial
  probe
  misc_feature (1)..(25): SEQ ID NO: 5066; WAN024F7J; Start 19; Stop 43
atgattgttatcgttttatctgcaa

SEQ ID NO: 398908 - DNA, 25 bp, Artificial
  probe
  misc_feature (1)..(25): SEQ ID NO: 5066; WAN024F7J; Start 13; Stop 37
agtcctatgattgttatcgttttat

SEQ ID NO: 398909 - DNA, 25 bp, Artificial
  probe
  misc_feature (1)..(25): SEQ ID NO: 5066; WAN024F7J; Start 16; Stop 40
cctatgattgttatcgttttatctg

SEQ ID NO: 398910 - DNA, 25 bp, Artificial
  probe
  misc_feature (1)..(25): SEQ ID NO: 5067; WAN024D8D; Start 123; Stop 147
cttcaacgccaatagtcaagaatct

SEQ ID NO: 398911 - DNA, 25 bp, Artificial
  probe
  misc_feature (1)..(25): SEQ ID NO: 5067; WAN024D8D; Start 742; Stop 766
gaactagcgagtctaacaatcatct

SEQ ID NO: 398912 - DNA, 25 bp, Artificial
  probe
  misc_feature (1)..(25): SEQ ID NO: 5067; WAN024D8D; Start 352; Stop 376
cctctaatcaatcctcatggtatcg

SEQ ID NO: 398913 - DNA, 25 bp, Artificial
  probe
  misc_feature (1)..(25): SEQ ID NO: 5067; WAN024D8D; Start 124; Stop 148
ttcaacgccaatagtcaagaatctg

SEQ ID NO: 398914 - DNA, 25 bp, Artificial
  probe
  misc_feature (1)..(25): SEQ ID NO: 5067; WAN024D8D; Start 746; Stop 770
tagcgagtctaacaatcatctctga

SEQ ID NO: 398915 - DNA, 25 bp, Artificial
  probe
  misc_feature (1)..(25): SEQ ID NO: 5067; WAN024D8D; Start 351; Stop 375
gcctctaatcaatcctcatggtatc

SEQ ID NO: 398916 - DNA, 25 bp, Artificial
  probe
  misc_feature (1)..(25): SEQ ID NO: 5067; WAN024D8D; Start 743; Stop 767
aactagcgagtctaacaatcatctc

SEQ ID NO: 398917 - DNA, 25 bp, Artificial
  probe
  misc_feature (1)..(25): SEQ ID NO: 5067; WAN024D8D; Start 745; Stop 769
ctagcgagtctaacaatcatctctg

SEQ ID NO: 398918 - DNA, 25 bp, Artificial
  probe
  misc_feature (1)..(25): SEQ ID NO: 5067; WAN024D8D; Start 744; Stop 768
actagcgagtctaacaatcatctct

SEQ ID NO: 398919 - DNA, 25 bp, Artificial
  probe
  misc_feature (1)..(25): SEQ ID NO: 5067; WAN024D8D; Start 741; Stop 765
ggaactagcgagtctaacaatcatc

SEQ ID NO: 398920 - DNA, 25 bp, Artificial
  probe
  misc_feature (1)..(25): SEQ ID NO: 5067; WAN024D8D; Start 350; Stop 374
tgcctctaatcaatcctcatggtat

SEQ ID NO: 398921 - DNA, 25 bp, Artificial
  probe
  misc_feature (1)..(25): SEQ ID NO: 5067; WAN024D8D; Start 349; Stop 373
ctgcctctaatcaatcctcatggta

SEQ ID NO: 398922 - DNA, 25 bp, Artificial
  probe
  misc_feature (1)..(25): SEQ ID NO: 5067; WAN024D8D; Start 129; Stop 153
cgccaatagtcaagaatctgagttg

SEQ ID NO: 398923 - DNA, 25 bp, Artificial
  probe
  misc_feature (1)..(25): SEQ ID NO: 5067; WAN024D8D; Start 126; Stop 150
caacgccaatagtcaagaatctgag

SEQ ID NO: 398924 - DNA, 25 bp, Artificial
  probe
  misc_feature (1)..(25): SEQ ID NO: 5067; WAN024D8D; Start 249; Stop 273
ctctagccacctcaatatcagcatt

SEQ ID NO: 398925 - DNA, 25 bp, Artificial
  probe
  misc_feature (1)..(25): SEQ ID NO: 5067; WAN024D8D; Start 353; Stop 377
ctctaatcaatcctcatggtatcga

SEQ ID NO: 398926 - DNA, 25 bp, Artificial
  probe
  misc_feature (1)..(25): SEQ ID NO: 5067; WAN024D8D; Start 128; Stop 152
acgccaatagtcaagaatctgagtt

SEQ ID NO: 398927 - DNA, 25 bp, Artificial
  probe
  misc_feature (1)..(25): SEQ ID NO: 5067; WAN024D8D; Start 127; Stop 151
aacgccaatagtcaagaatctgagt

SEQ ID NO: 398928 - DNA, 25 bp, Artificial
  probe
  misc_feature (1)..(25): SEQ ID NO: 5067; WAN024D8D; Start 125; Stop 149
tcaacgccaatagtcaagaatctga

SEQ ID NO: 398929 - DNA, 25 bp, Artificial
  probe
  misc_feature (1)..(25): SEQ ID NO: 5067; WAN024D8D; Start 624; Stop 648
catccctgttgtcaataaatctgtc

SEQ ID NO: 398930 - DNA, 25 bp, Artificial
  probe
  misc_feature (1)..(25): SEQ ID NO: 5067; WAN024D8D; Start 122; Stop 146
gcttcaacgccaatagtcaagaatc

SEQ ID NO: 398931 - DNA, 25 bp, Artificial
  probe
  misc_feature (1)..(25): SEQ ID NO: 5067; WAN024D8D; Start 360; Stop 384
caatcctcatggtatcgagttagat

SEQ ID NO: 398932 - DNA, 25 bp, Artificial
  probe
  misc_feature (1)..(25): SEQ ID NO: 5067; WAN024D8D; Start 358; Stop 382
atcaatcctcatggtatcgagttag

SEQ ID NO: 398933 - DNA, 25 bp, Artificial
  probe
  misc_feature (1)..(25): SEQ ID NO: 5067; WAN024D8D; Start 355; Stop 379
ctaatcaatcctcatggtatcgagt

SEQ ID NO: 398934 - DNA, 25 bp, Artificial
  probe
  misc_feature (1)..(25): SEQ ID NO: 5067; WAN024D8D; Start 263; Stop 287
atatcagcattggtcccttaattca

SEQ ID NO: 398935 - DNA, 25 bp, Artificial
  probe
  misc_feature (1)..(25): SEQ ID NO: 5067; WAN024D8D; Start 364; Stop 388
cctcatggtatcgagttagattctt

SEQ ID NO: 398936 - DNA, 25 bp, Artificial
  probe
  misc_feature (1)..(25): SEQ ID NO: 5067; WAN024D8D; Start 363; Stop 387
tcctcatggtatcgagttagattct

SEQ ID NO: 398937 - DNA, 25 bp, Artificial
  probe
  misc_feature (1)..(25): SEQ ID NO: 5067; WAN024D8D; Start 215; Stop 239
tgatttcacttgggttagagcatag

SEQ ID NO: 398938 - DNA, 25 bp, Artificial
  probe
  misc_feature (1)..(25): SEQ ID NO: 5067; WAN024D8D; Start 214; Stop 238
ctgatttcacttgggttagagcata

SEQ ID NO: 398939 - DNA, 25 bp, Artificial
  probe
  misc_feature (1)..(25): SEQ ID NO: 5067; WAN024D8D; Start 366; Stop 390
tcatggtatcgagttagattcttct

SEQ ID NO: 398940 - DNA, 25 bp, Artificial
  probe
  misc_feature (1)..(25): SEQ ID NO: 5067; WAN024D8D; Start 53; Stop 77
cattagtggatgagcaagccgatat

SEQ ID NO: 398941 - DNA, 25 bp, Artificial
  probe
  misc_feature (1)..(25): SEQ ID NO: 5067; WAN024D8D; Start 362; Stop 386
atcctcatggtatcgagttagattc

SEQ ID NO: 398942 - DNA, 25 bp, Artificial
  probe
  misc_feature (1)..(25): SEQ ID NO: 5067; WAN024D8D; Start 354; Stop 378
tctaatcaatcctcatggtatcgag

SEQ ID NO: 398943 - DNA, 25 bp, Artificial
  probe
  misc_feature (1)..(25): SEQ ID NO: 5068; WAN024DPH; Start 47; Stop 71
tgactattgaatctctccaacttct

SEQ ID NO: 398944 - DNA, 25 bp, Artificial
  probe
  misc_feature (1)..(25): SEQ ID NO: 5068; WAN024DPH; Start 46; Stop 70
ttgactattgaatctctccaacttc

SEQ ID NO: 398945 - DNA, 25 bp, Artificial
  probe
  misc_feature (1)..(25): SEQ ID NO: 5068; WAN024DPH; Start 49; Stop 73
actattgaatctctccaacttcttc

SEQ ID NO: 398946 - DNA, 25 bp, Artificial
  probe
  misc_feature (1)..(25): SEQ ID NO: 5068; WAN024DPH; Start 48; Stop 72
gactattgaatctctccaacttctt

SEQ ID NO: 398947 - DNA, 25 bp, Artificial
  probe
  misc_feature (1)..(25): SEQ ID NO: 5068; WAN024DPH; Start 50; Stop 74
ctattgaatctctccaacttcttct

SEQ ID NO: 398948 - DNA, 25 bp, Artificial
  probe
  misc_feature (1)..(25): SEQ ID NO: 5068; WAN024DPH; Start 51; Stop 75
tattgaatctctccaacttcttctt

SEQ ID NO: 398949 - DNA, 25 bp, Artificial
  probe
  misc_feature (1)..(25): SEQ ID NO: 5068; WAN024DPH; Start 40; Stop 64
ctttggttgactattgaatctctcc

SEQ ID NO: 398950 - DNA, 25 bp, Artificial
  probe
  misc_feature (1)..(25): SEQ ID NO: 5068; WAN024DPH; Start 39; Stop 63
actttggttgactattgaatctctc

SEQ ID NO: 398951 - DNA, 25 bp, Artificial
  probe
  misc_feature (1)..(25): SEQ ID NO: 5068; WAN024DPH; Start 33; Stop 57
caaggaactttggttgactattgaa

SEQ ID NO: 398952 - DNA, 25 bp, Artificial
  probe
  misc_feature (1)..(25): SEQ ID NO: 5068; WAN024DPH; Start 36; Stop 60
ggaactttggttgactattgaatct

SEQ ID NO: 398953 - DNA, 25 bp, Artificial
  probe
  misc_feature (1)..(25): SEQ ID NO: 5068; WAN024DPH; Start 35; Stop 59
aggaactttggttgactattgaatc

SEQ ID NO: 398954 - DNA, 25 bp, Artificial
  probe
  misc_feature (1)..(25): SEQ ID NO: 5068; WAN024DPH; Start 32; Stop 56
acaaggaactttggttgactattga

SEQ ID NO: 398955 - DNA, 25 bp, Artificial
  probe
  misc_feature (1)..(25): SEQ ID NO: 5068; WAN024DPH; Start 31; Stop 55
cacaaggaactttggttgactattg

SEQ ID NO: 398956 - DNA, 25 bp, Artificial
  probe
  misc_feature (1)..(25): SEQ ID NO: 5068; WAN024DPH; Start 25; Stop 49
tatactcacaaggaactttggttga

SEQ ID NO: 398957 - DNA, 25 bp, Artificial
  probe
  misc_feature (1)..(25): SEQ ID NO: 5068; WAN024DPH; Start 30; Stop 54
tcacaaggaactttggttgactatt

SEQ ID NO: 398958 - DNA, 25 bp, Artificial
  probe
  misc_feature (1)..(25): SEQ ID NO: 5068; WAN024DPH; Start 34; Stop 58
aaggaactttggttgactattgaat

SEQ ID NO: 398959 - DNA, 25 bp, Artificial
  probe
  misc_feature (1)..(25): SEQ ID NO: 5068; WAN024DPH; Start 24; Stop 48
atatactcacaaggaactttggttg

SEQ ID NO: 398960 - DNA, 25 bp, Artificial
  probe
  misc_feature (1)..(25): SEQ ID NO: 5068; WAN024DPH; Start 29; Stop 53
ctcacaaggaactttggttgactat

SEQ ID NO: 398961 - DNA, 25 bp, Artificial
  probe
  misc_feature (1)..(25): SEQ ID NO: 5068; WAN024DPH; Start 26; Stop 50
atactcacaaggaactttggttgac

SEQ ID NO: 398962 - DNA, 25 bp, Artificial
  probe
  misc_feature (1)..(25): SEQ ID NO: 5068; WAN024DPH; Start 38; Stop 62
aactttggttgactattgaatctct

SEQ ID NO: 398963 - DNA, 25 bp, Artificial
  probe
  misc_feature (1)..(25): SEQ ID NO: 5068; WAN024DPH; Start 37; Stop 61
gaactttggttgactattgaatctc

SEQ ID NO: 398964 - DNA, 25 bp, Artificial
  probe
  misc_feature (1)..(25): SEQ ID NO: 5068; WAN024DPH; Start 28; Stop 52
actcacaaggaactttggttgacta

SEQ ID NO: 398965 - DNA, 25 bp, Artificial
  probe
  misc_feature (1)..(25): SEQ ID NO: 5068; WAN024DPH; Start 27; Stop 51
tactcacaaggaactttggttgact

SEQ ID NO: 398966 - DNA, 25 bp, Artificial
  probe
  misc_feature (1)..(25): SEQ ID NO: 5068; WAN024DPH; Start 41; Stop 65
tttggttgactattgaatctctcca

SEQ ID NO: 398967 - DNA, 25 bp, Artificial
  probe
  misc_feature (1)..(25): SEQ ID NO: 5068; WAN024DPH; Start 23; Stop 47
tatatactcacaaggaactttggtt

SEQ ID NO: 398968 - DNA, 25 bp, Artificial
  probe
  misc_feature (1)..(25): SEQ ID NO: 5068; WAN024DPH; Start 44; Stop 68
ggttgactattgaatctctccaact

SEQ ID NO: 398969 - DNA, 25 bp, Artificial
  probe
  misc_feature (1)..(25): SEQ ID NO: 5068; WAN024DPH; Start 43; Stop 67
tggttgactattgaatctctccaac

SEQ ID NO: 398970 - DNA, 25 bp, Artificial
  probe
  misc_feature (1)..(25): SEQ ID NO: 5068; WAN024DPH; Start 45; Stop 69
gttgactattgaatctctccaactt

SEQ ID NO: 398971 - DNA, 25 bp, Artificial
  probe
  misc_feature (1)..(25): SEQ ID NO: 5068; WAN024DPH; Start 42; Stop 66
ttggttgactattgaatctctccaa

SEQ ID NO: 398972 - DNA, 25 bp, Artificial
  probe
  misc_feature (1)..(25): SEQ ID NO: 5068; WAN024DPH; Start 16; Stop 40
gcaaaggtatatactcacaaggaac

SEQ ID NO: 398973 - DNA, 25 bp, Artificial
  probe
  misc_feature (1)..(25): SEQ ID NO: 5068; WAN024DPH; Start 15; Stop 39
agcaaaggtatatactcacaaggaa

SEQ ID NO: 398974 - DNA, 25 bp, Artificial
  probe
  misc_feature (1)..(25): SEQ ID NO: 5068; WAN024DPH; Start 14; Stop 38
tagcaaaggtatatactcacaagga

SEQ ID NO: 398975 - DNA, 25 bp, Artificial
  probe
  misc_feature (1)..(25): SEQ ID NO: 5068; WAN024DPH; Start 13; Stop 37
ctagcaaaggtatatactcacaagg

SEQ ID NO: 398976 - DNA, 25 bp, Artificial
  probe
  misc_feature (1)..(25): SEQ ID NO: 5069; WAN024EUF; Start 33; Stop 57
tccaacaactattcattacgctcta

SEQ ID NO: 398977 - DNA, 25 bp, Artificial
  probe
  misc_feature (1)..(25): SEQ ID NO: 5069; WAN024EUF; Start 34; Stop 58
ccaacaactattcattacgctctaa

SEQ ID NO: 398978 - DNA, 25 bp, Artificial
  probe
  misc_feature (1)..(25): SEQ ID NO: 5069; WAN024EUF; Start 32; Stop 56
ctccaacaactattcattacgctct

SEQ ID NO: 398979 - DNA, 25 bp, Artificial
  probe
  misc_feature (1)..(25): SEQ ID NO: 5069; WAN024EUF; Start 31; Stop 55
cctccaacaactattcattacgctc

SEQ ID NO: 398980 - DNA, 25 bp, Artificial
  probe
  misc_feature (1)..(25): SEQ ID NO: 5069; WAN024EUF; Start 25; Stop 49
aactgtcctccaacaactattcatt

SEQ ID NO: 398981 - DNA, 25 bp, Artificial
  probe
  misc_feature (1)..(25): SEQ ID NO: 5069; WAN024EUF; Start 21; Stop 45
attcaactgtcctccaacaactatt

SEQ ID NO: 398982 - DNA, 25 bp, Artificial
  probe
  misc_feature (1)..(25): SEQ ID NO: 5069; WAN024EUF; Start 20; Stop 44
aattcaactgtcctccaacaactat

SEQ ID NO: 398983 - DNA, 25 bp, Artificial
  probe
  misc_feature (1)..(25): SEQ ID NO: 5069; WAN024EUF; Start 26; Stop 50
actgtcctccaacaactattcatta

SEQ ID NO: 398984 - DNA, 25 bp, Artificial
  probe
  misc_feature (1)..(25): SEQ ID NO: 5069; WAN024EUF; Start 27; Stop 51
ctgtcctccaacaactattcattac

SEQ ID NO: 398985 - DNA, 25 bp, Artificial
  probe
  misc_feature (1)..(25): SEQ ID NO: 5069; WAN024EUF; Start 30; Stop 54
tcctccaacaactattcattacgct

SEQ ID NO: 398986 - DNA, 25 bp, Artificial
  probe
  misc_feature (1)..(25): SEQ ID NO: 5069; WAN024EUF; Start 29; Stop 53
gtcctccaacaactattcattacgc

SEQ ID NO: 398987 - DNA, 25 bp, Artificial
  probe
  misc_feature (1)..(25): SEQ ID NO: 5069; WAN024EUF; Start 28; Stop 52
tgtcctccaacaactattcattacg

SEQ ID NO: 398988 - DNA, 25 bp, Artificial
  probe
  misc_feature (1)..(25): SEQ ID NO: 5069; WAN024EUF; Start 22; Stop 46
ttcaactgtcctccaacaactattc

SEQ ID NO: 398989 - DNA, 25 bp, Artificial
  probe
  misc_feature (1)..(25): SEQ ID NO: 5069; WAN024EUF; Start 24; Stop 48
caactgtcctccaacaactattcat

SEQ ID NO: 398990 - DNA, 25 bp, Artificial
  probe
  misc_feature (1)..(25): SEQ ID NO: 5069; WAN024EUF; Start 232; Stop 256
cagttagtctctctggaagaagata

SEQ ID NO: 398991 - DNA, 25 bp, Artificial
  probe
  misc_feature (1)..(25): SEQ ID NO: 5069; WAN024EUF; Start 233; Stop 257
agttagtctctctggaagaagatat

SEQ ID NO: 398992 - DNA, 25 bp, Artificial
  probe
  misc_feature (1)..(25): SEQ ID NO: 5069; WAN024EUF; Start 231; Stop 255
gcagttagtctctctggaagaagat

SEQ ID NO: 398993 - DNA, 25 bp, Artificial
  probe
  misc_feature (1)..(25): SEQ ID NO: 5069; WAN024EUF; Start 23; Stop 47
tcaactgtcctccaacaactattca

SEQ ID NO: 398994 - DNA, 25 bp, Artificial
  probe
  misc_feature (1)..(25): SEQ ID NO: 5069; WAN024EUF; Start 39; Stop 63
aactattcattacgctctaaaggct

SEQ ID NO: 398995 - DNA, 25 bp, Artificial
  probe
  misc_feature (1)..(25): SEQ ID NO: 5069; WAN024EUF; Start 38; Stop 62
caactattcattacgctctaaaggc

SEQ ID NO: 398996 - DNA, 25 bp, Artificial
  probe
  misc_feature (1)..(25): SEQ ID NO: 5069; WAN024EUF; Start 49; Stop 73
tacgctctaaaggctatgggatata

SEQ ID NO: 398997 - DNA, 25 bp, Artificial
  probe
  misc_feature (1)..(25): SEQ ID NO: 5069; WAN024EUF; Start 40; Stop 64
actattcattacgctctaaaggcta

SEQ ID NO: 398998 - DNA, 25 bp, Artificial
  probe
  misc_feature (1)..(25): SEQ ID NO: 5069; WAN024EUF; Start 47; Stop 71
attacgctctaaaggctatgggata

SEQ ID NO: 398999 - DNA, 25 bp, Artificial
  probe
  misc_feature (1)..(25): SEQ ID NO: 5069; WAN024EUF; Start 48; Stop 72
ttacgctctaaaggctatgggatat

SEQ ID NO: 399000 - DNA, 25 bp, Artificial
  probe
  misc_feature (1)..(25): SEQ ID NO: 5069; WAN024EUF; Start 37; Stop 61
acaactattcattacgctctaaagg

SEQ ID NO: 399001 - DNA, 25 bp, Artificial
  probe
  misc_feature (1)..(25): SEQ ID NO: 5069; WAN024EUF; Start 43; Stop 67
attcattacgctctaaaggctatgg

SEQ ID NO: 399002 - DNA, 25 bp, Artificial
  probe
  misc_feature (1)..(25): SEQ ID NO: 5069; WAN024EUF; Start 124; Stop 148
cggttccttaaagaattgaatcact

SEQ ID NO: 399003 - DNA, 25 bp, Artificial
  probe
  misc_feature (1)..(25): SEQ ID NO: 5069; WAN024EUF; Start 123; Stop 147
tcggttccttaaagaattgaatcac

SEQ ID NO: 399004 - DNA, 25 bp, Artificial
  probe
  misc_feature (1)..(25): SEQ ID NO: 5069; WAN024EUF; Start 41; Stop 65
ctattcattacgctctaaaggctat

SEQ ID NO: 399005 - DNA, 25 bp, Artificial
  probe
  misc_feature (1)..(25): SEQ ID NO: 5069; WAN024EUF; Start 42; Stop 66
tattcattacgctctaaaggctatg

SEQ ID NO: 399006 - DNA, 25 bp, Artificial
  probe
  misc_feature (1)..(25): SEQ ID NO: 5069; WAN024EUF; Start 122; Stop 146
atcggttccttaaagaattgaatca

SEQ ID NO: 399007 - DNA, 25 bp, Artificial
  probe
  misc_feature (1)..(25): SEQ ID NO: 5069; WAN024EUF; Start 52; Stop 76
gctctaaaggctatgggatatagtc

SEQ ID NO: 399008 - DNA, 25 bp, Artificial
  probe
  misc_feature (1)..(25): SEQ ID NO: 5069; WAN024EUF; Start 135; Stop 159
agaattgaatcacttaagctacctg

SEQ ID NO: 399009 - DNA, 25 bp, Artificial
  probe
  misc_feature (1)..(25): SEQ ID NO: 5070; WAN024DUK; Start 210; Stop 234
actccacgataccagattgatctaa

SEQ ID NO: 399010 - DNA, 25 bp, Artificial
  probe
  misc_feature (1)..(25): SEQ ID NO: 5070; WAN024DUK; Start 209; Stop 233
aactccacgataccagattgatcta

SEQ ID NO: 399011 - DNA, 25 bp, Artificial
  probe
  misc_feature (1)..(25): SEQ ID NO: 5070; WAN024DUK; Start 157; Stop 181
gttaatctgactaggaacaacctga

SEQ ID NO: 399012 - DNA, 25 bp, Artificial
  probe
  misc_feature (1)..(25): SEQ ID NO: 5070; WAN024DUK; Start 156; Stop 180
agttaatctgactaggaacaacctg

SEQ ID NO: 399013 - DNA, 25 bp, Artificial
  probe
  misc_feature (1)..(25): SEQ ID NO: 5070; WAN024DUK; Start 158; Stop 182
ttaatctgactaggaacaacctgaa

SEQ ID NO: 399014 - DNA, 25 bp, Artificial
  probe
  misc_feature (1)..(25): SEQ ID NO: 5070; WAN024DUK; Start 153; Stop 177
cgtagttaatctgactaggaacaac

SEQ ID NO: 399015 - DNA, 25 bp, Artificial
  probe
  misc_feature (1)..(25): SEQ ID NO: 5070; WAN024DUK; Start 208; Stop 232
caactccacgataccagattgatct

SEQ ID NO: 399016 - DNA, 25 bp, Artificial
  probe
  misc_feature (1)..(25): SEQ ID NO: 5070; WAN024DUK; Start 154; Stop 178
gtagttaatctgactaggaacaacc

SEQ ID NO: 399017 - DNA, 25 bp, Artificial
  probe
  misc_feature (1)..(25): SEQ ID NO: 5070; WAN024DUK; Start 155; Stop 179
tagttaatctgactaggaacaacct

SEQ ID NO: 399018 - DNA, 25 bp, Artificial
  probe
  misc_feature (1)..(25): SEQ ID NO: 5070; WAN024DUK; Start 64; Stop 88
ctcaatccgtcctatacgaatgtag

SEQ ID NO: 399019 - DNA, 25 bp, Artificial
  probe
  misc_feature (1)..(25): SEQ ID NO: 5070; WAN024DUK; Start 151; Stop 175
cacgtagttaatctgactaggaaca

SEQ ID NO: 399020 - DNA, 25 bp, Artificial
  probe
  misc_feature (1)..(25): SEQ ID NO: 5070; WAN024DUK; Start 150; Stop 174
tcacgtagttaatctgactaggaac

SEQ ID NO: 399021 - DNA, 25 bp, Artificial
  probe
  misc_feature (1)..(25): SEQ ID NO: 5070; WAN024DUK; Start 63; Stop 87
actcaatccgtcctatacgaatgta

SEQ ID NO: 399022 - DNA, 25 bp, Artificial
  probe
  misc_feature (1)..(25): SEQ ID NO: 5070; WAN024DUK; Start 160; Stop 184
aatctgactaggaacaacctgaaag

SEQ ID NO: 399023 - DNA, 25 bp, Artificial
  probe
  misc_feature (1)..(25): SEQ ID NO: 5070; WAN024DUK; Start 152; Stop 176
acgtagttaatctgactaggaacaa

SEQ ID NO: 399024 - DNA, 25 bp, Artificial
  probe
  misc_feature (1)..(25): SEQ ID NO: 5070; WAN024DUK; Start 148; Stop 172
gatcacgtagttaatctgactagga

SEQ ID NO: 399025 - DNA, 25 bp, Artificial
  probe
  misc_feature (1)..(25): SEQ ID NO: 5070; WAN024DUK; Start 159; Stop 183
taatctgactaggaacaacctgaaa

SEQ ID NO: 399026 - DNA, 25 bp, Artificial
  probe
  misc_feature (1)..(25): SEQ ID NO: 5070; WAN024DUK; Start 149; Stop 173
atcacgtagttaatctgactaggaa

SEQ ID NO: 399027 - DNA, 25 bp, Artificial
  probe
  misc_feature (1)..(25): SEQ ID NO: 5070; WAN024DUK; Start 62; Stop 86
aactcaatccgtcctatacgaatgt

SEQ ID NO: 399028 - DNA, 25 bp, Artificial
  probe
  misc_feature (1)..(25): SEQ ID NO: 5070; WAN024DUK; Start 207; Stop 231
gcaactccacgataccagattgatc

SEQ ID NO: 399029 - DNA, 25 bp, Artificial
  probe
  misc_feature (1)..(25): SEQ ID NO: 5070; WAN024DUK; Start 65; Stop 89
tcaatccgtcctatacgaatgtagc

SEQ ID NO: 399030 - DNA, 25 bp, Artificial
  probe
  misc_feature (1)..(25): SEQ ID NO: 5070; WAN024DUK; Start 161; Stop 185
atctgactaggaacaacctgaaagg

SEQ ID NO: 399031 - DNA, 25 bp, Artificial
  probe
  misc_feature (1)..(25): SEQ ID NO: 5070; WAN024DUK; Start 142; Stop 166
tgtcttgatcacgtagttaatctga

SEQ ID NO: 399032 - DNA, 25 bp, Artificial
  probe
  misc_feature (1)..(25): SEQ ID NO: 5070; WAN024DUK; Start 178; Stop 202
ctgaaaggtatctgccaactgactc

SEQ ID NO: 399033 - DNA, 25 bp, Artificial
  probe
  misc_feature (1)..(25): SEQ ID NO: 5070; WAN024DUK; Start 144; Stop 168
tcttgatcacgtagttaatctgact

SEQ ID NO: 399034 - DNA, 25 bp, Artificial
  probe
  misc_feature (1)..(25): SEQ ID NO: 5070; WAN024DUK; Start 143; Stop 167
gtcttgatcacgtagttaatctgac

SEQ ID NO: 399035 - DNA, 25 bp, Artificial
  probe
  misc_feature (1)..(25): SEQ ID NO: 5070; WAN024DUK; Start 141; Stop 165
gtgtcttgatcacgtagttaatctg

SEQ ID NO: 399036 - DNA, 25 bp, Artificial
  probe
  misc_feature (1)..(25): SEQ ID NO: 5070; WAN024DUK; Start 61; Stop 85
aaactcaatccgtcctatacgaatg

SEQ ID NO: 399037 - DNA, 25 bp, Artificial
  probe
  misc_feature (1)..(25): SEQ ID NO: 5070; WAN024DUK; Start 67; Stop 91
aatccgtcctatacgaatgtagcct

SEQ ID NO: 399038 - DNA, 25 bp, Artificial
  probe
  misc_feature (1)..(25): SEQ ID NO: 5070; WAN024DUK; Start 66; Stop 90
caatccgtcctatacgaatgtagcc

SEQ ID NO: 399039 - DNA, 25 bp, Artificial
  probe
  misc_feature (1)..(25): SEQ ID NO: 5070; WAN024DUK; Start 147; Stop 171
tgatcacgtagttaatctgactagg

SEQ ID NO: 399040 - DNA, 25 bp, Artificial
  probe
  misc_feature (1)..(25): SEQ ID NO: 5070; WAN024DUK; Start 55; Stop 79
actagaaaactcaatccgtcctata

SEQ ID NO: 399041 - DNA, 25 bp, Artificial
  probe
  misc_feature (1)..(25): SEQ ID NO: 5070; WAN024DUK; Start 49; Stop 73
atgatgactagaaaactcaatccgt

SEQ ID NO: 399042 - DNA, 25 bp, Artificial
  probe
  misc_feature (1)..(25): SEQ ID NO: 5071; WAN024FBO; Start 188; Stop 212
ttgatatcgagattgttgagtggtt

SEQ ID NO: 399043 - DNA, 25 bp, Artificial
  probe
  misc_feature (1)..(25): SEQ ID NO: 5071; WAN024FBO; Start 184; Stop 208
ttgcttgatatcgagattgttgagt

SEQ ID NO: 399044 - DNA, 25 bp, Artificial
  probe
  misc_feature (1)..(25): SEQ ID NO: 5071; WAN024FBO; Start 189; Stop 213
tgatatcgagattgttgagtggttc

SEQ ID NO: 399045 - DNA, 25 bp, Artificial
  probe
  misc_feature (1)..(25): SEQ ID NO: 5071; WAN024FBO; Start 187; Stop 211
cttgatatcgagattgttgagtggt

SEQ ID NO: 399046 - DNA, 25 bp, Artificial
  probe
  misc_feature (1)..(25): SEQ ID NO: 5071; WAN024FBO; Start 185; Stop 209
tgcttgatatcgagattgttgagtg

SEQ ID NO: 399047 - DNA, 25 bp, Artificial
  probe
  misc_feature (1)..(25): SEQ ID NO: 5071; WAN024FBO; Start 186; Stop 210
gcttgatatcgagattgttgagtgg

SEQ ID NO: 399048 - DNA, 25 bp, Artificial
  probe
  misc_feature (1)..(25): SEQ ID NO: 5071; WAN024FBO; Start 121; Stop 145
gatgataatggtcttgccgagttcc

SEQ ID NO: 399049 - DNA, 25 bp, Artificial
  probe
  misc_feature (1)..(25): SEQ ID NO: 5071; WAN024FBO; Start 112; Stop 136
gtggaggacgatgataatggtcttg

SEQ ID NO: 399050 - DNA, 25 bp, Artificial
  probe
  misc_feature (1)..(25): SEQ ID NO: 5071; WAN024FBO; Start 122; Stop 146
atgataatggtcttgccgagttcct

SEQ ID NO: 399051 - DNA, 25 bp, Artificial
  probe
  misc_feature (1)..(25): SEQ ID NO: 5071; WAN024FBO; Start 120; Stop 144
cgatgataatggtcttgccgagttc

SEQ ID NO: 399052 - DNA, 25 bp, Artificial
  probe
  misc_feature (1)..(25): SEQ ID NO: 5071; WAN024FBO; Start 26; Stop 50
atttgatcggttcttcccttgctaa

SEQ ID NO: 399053 - DNA, 25 bp, Artificial
  probe
  misc_feature (1)..(25): SEQ ID NO: 5071; WAN024FBO; Start 22; Stop 46
catgatttgatcggttcttcccttg

SEQ ID NO: 399054 - DNA, 25 bp, Artificial
  probe
  misc_feature (1)..(25): SEQ ID NO: 5071; WAN024FBO; Start 183; Stop 207
tttgcttgatatcgagattgttgag

SEQ ID NO: 399055 - DNA, 25 bp, Artificial
  probe
  misc_feature (1)..(25): SEQ ID NO: 5071; WAN024FBO; Start 182; Stop 206
ctttgcttgatatcgagattgttga

SEQ ID NO: 399056 - DNA, 25 bp, Artificial
  probe
  misc_feature (1)..(25): SEQ ID NO: 5071; WAN024FBO; Start 27; Stop 51
tttgatcggttcttcccttgctaaa

SEQ ID NO: 399057 - DNA, 25 bp, Artificial
  probe
  misc_feature (1)..(25): SEQ ID NO: 5071; WAN024FBO; Start 181; Stop 205
gctttgcttgatatcgagattgttg

SEQ ID NO: 399058 - DNA, 25 bp, Artificial
  probe
  misc_feature (1)..(25): SEQ ID NO: 5071; WAN024FBO; Start 25; Stop 49
gatttgatcggttcttcccttgcta

SEQ ID NO: 399059 - DNA, 25 bp, Artificial
  probe
  misc_feature (1)..(25): SEQ ID NO: 5071; WAN024FBO; Start 119; Stop 143
acgatgataatggtcttgccgagtt

SEQ ID NO: 399060 - DNA, 25 bp, Artificial
  probe
  misc_feature (1)..(25): SEQ ID NO: 5071; WAN024FBO; Start 191; Stop 215
atatcgagattgttgagtggttcgt

SEQ ID NO: 399061 - DNA, 25 bp, Artificial
  probe
  misc_feature (1)..(25): SEQ ID NO: 5071; WAN024FBO; Start 190; Stop 214
gatatcgagattgttgagtggttcg

SEQ ID NO: 399062 - DNA, 25 bp, Artificial
  probe
  misc_feature (1)..(25): SEQ ID NO: 5071; WAN024FBO; Start 28; Stop 52
ttgatcggttcttcccttgctaaag

SEQ ID NO: 399063 - DNA, 25 bp, Artificial
  probe
  misc_feature (1)..(25): SEQ ID NO: 5071; WAN024FBO; Start 215; Stop 239
tccagcaagataaagtccgtatcct

SEQ ID NO: 399064 - DNA, 25 bp, Artificial
  probe
  misc_feature (1)..(25): SEQ ID NO: 5071; WAN024FBO; Start 214; Stop 238
gtccagcaagataaagtccgtatcc

SEQ ID NO: 399065 - DNA, 25 bp, Artificial
  probe
  misc_feature (1)..(25): SEQ ID NO: 5071; WAN024FBO; Start 212; Stop 236
tcgtccagcaagataaagtccgtat

SEQ ID NO: 399066 - DNA, 25 bp, Artificial
  probe
  misc_feature (1)..(25): SEQ ID NO: 5071; WAN024FBO; Start 217; Stop 241
cagcaagataaagtccgtatcctgg

SEQ ID NO: 399067 - DNA, 25 bp, Artificial
  probe
  misc_feature (1)..(25): SEQ ID NO: 5071; WAN024FBO; Start 216; Stop 240
ccagcaagataaagtccgtatcctg

SEQ ID NO: 399068 - DNA, 25 bp, Artificial
  probe
  misc_feature (1)..(25): SEQ ID NO: 5071; WAN024FBO; Start 192; Stop 216
tatcgagattgttgagtggttcgtc

SEQ ID NO: 399069 - DNA, 25 bp, Artificial
  probe
  misc_feature (1)..(25): SEQ ID NO: 5071; WAN024FBO; Start 123; Stop 147
tgataatggtcttgccgagttcctc

SEQ ID NO: 399070 - DNA, 25 bp, Artificial
  probe
  misc_feature (1)..(25): SEQ ID NO: 5071; WAN024FBO; Start 211; Stop 235
ttcgtccagcaagataaagtccgta

SEQ ID NO: 399071 - DNA, 25 bp, Artificial
  probe
  misc_feature (1)..(25): SEQ ID NO: 5071; WAN024FBO; Start 180; Stop 204
cgctttgcttgatatcgagattgtt

SEQ ID NO: 399072 - DNA, 25 bp, Artificial
  probe
  misc_feature (1)..(25): SEQ ID NO: 5071; WAN024FBO; Start 213; Stop 237
cgtccagcaagataaagtccgtatc

SEQ ID NO: 399073 - DNA, 25 bp, Artificial
  probe
  misc_feature (1)..(25): SEQ ID NO: 5071; WAN024FBO; Start 178; Stop 202
gacgctttgcttgatatcgagattg

SEQ ID NO: 399074 - DNA, 25 bp, Artificial
  probe
  misc_feature (1)..(25): SEQ ID NO: 5071; WAN024FBO; Start 113; Stop 137
tggaggacgatgataatggtcttgc

SEQ ID NO: 399075 - DNA, 25 bp, Artificial
  probe
  misc_feature (1)..(25): SEQ ID NO: 5072; WAN024CHJ; Start 93; Stop 117
taagactgcctgcttgactgatgta

SEQ ID NO: 399076 - DNA, 25 bp, Artificial
  probe
  misc_feature (1)..(25): SEQ ID NO: 5072; WAN024CHJ; Start 72; Stop 96
tttgttgcgatgtactagccctaag

SEQ ID NO: 399077 - DNA, 25 bp, Artificial
  probe
  misc_feature (1)..(25): SEQ ID NO: 5072; WAN024CHJ; Start 145; Stop 169
cttatcctcctctggaaagtggttc

SEQ ID NO: 399078 - DNA, 25 bp, Artificial
  probe
  misc_feature (1)..(25): SEQ ID NO: 5072; WAN024CHJ; Start 146; Stop 170
ttatcctcctctggaaagtggttct

SEQ ID NO: 399079 - DNA, 25 bp, Artificial
  probe
  misc_feature (1)..(25): SEQ ID NO: 5072; WAN024CHJ; Start 94; Stop 118
aagactgcctgcttgactgatgtag

SEQ ID NO: 399080 - DNA, 25 bp, Artificial
  probe
  misc_feature (1)..(25): SEQ ID NO: 5072; WAN024CHJ; Start 92; Stop 116
ctaagactgcctgcttgactgatgt

SEQ ID NO: 399081 - DNA, 25 bp, Artificial
  probe
  misc_feature (1)..(25): SEQ ID NO: 5072; WAN024CHJ; Start 141; Stop 165
caaacttatcctcctctggaaagtg

SEQ ID NO: 399082 - DNA, 25 bp, Artificial
  probe
  misc_feature (1)..(25): SEQ ID NO: 5072; WAN024CHJ; Start 137; Stop 161
tagccaaacttatcctcctctggaa

SEQ ID NO: 399083 - DNA, 25 bp, Artificial
  probe
  misc_feature (1)..(25): SEQ ID NO: 5072; WAN024CHJ; Start 65; Stop 89
gtctcattttgttgcgatgtactag

SEQ ID NO: 399084 - DNA, 25 bp, Artificial
  probe
  misc_feature (1)..(25): SEQ ID NO: 5072; WAN024CHJ; Start 73; Stop 97
ttgttgcgatgtactagccctaaga

SEQ ID NO: 399085 - DNA, 25 bp, Artificial
  probe
  misc_feature (1)..(25): SEQ ID NO: 5072; WAN024CHJ; Start 147; Stop 171
tatcctcctctggaaagtggttctc

SEQ ID NO: 399086 - DNA, 25 bp, Artificial
  probe
  misc_feature (1)..(25): SEQ ID NO: 5072; WAN024CHJ; Start 61; Stop 85
gatggtctcattttgttgcgatgta

SEQ ID NO: 399087 - DNA, 25 bp, Artificial
  probe
  misc_feature (1)..(25): SEQ ID NO: 5072; WAN024CHJ; Start 139; Stop 163
gccaaacttatcctcctctggaaag

SEQ ID NO: 399088 - DNA, 25 bp, Artificial
  probe
  misc_feature (1)..(25): SEQ ID NO: 5072; WAN024CHJ; Start 142; Stop 166
aaacttatcctcctctggaaagtgg

SEQ ID NO: 399089 - DNA, 25 bp, Artificial
  probe
  misc_feature (1)..(25): SEQ ID NO: 5072; WAN024CHJ; Start 140; Stop 164
ccaaacttatcctcctctggaaagt

SEQ ID NO: 399090 - DNA, 25 bp, Artificial
  probe
  misc_feature (1)..(25): SEQ ID NO: 5072; WAN024CHJ; Start 64; Stop 88
ggtctcattttgttgcgatgtacta

SEQ ID NO: 399091 - DNA, 25 bp, Artificial
  probe
  misc_feature (1)..(25): SEQ ID NO: 5072; WAN024CHJ; Start 136; Stop 160
gtagccaaacttatcctcctctgga

SEQ ID NO: 399092 - DNA, 25 bp, Artificial
  probe
  misc_feature (1)..(25): SEQ ID NO: 5072; WAN024CHJ; Start 66; Stop 90
tctcattttgttgcgatgtactagc

SEQ ID NO: 399093 - DNA, 25 bp, Artificial
  probe
  misc_feature (1)..(25): SEQ ID NO: 5072; WAN024CHJ; Start 138; Stop 162
agccaaacttatcctcctctggaaa

SEQ ID NO: 399094 - DNA, 25 bp, Artificial
  probe
  misc_feature (1)..(25): SEQ ID NO: 5072; WAN024CHJ; Start 80; Stop 104
gatgtactagccctaagactgcctg

SEQ ID NO: 399095 - DNA, 25 bp, Artificial
  probe
  misc_feature (1)..(25): SEQ ID NO: 5072; WAN024CHJ; Start 76; Stop 100
ttgcgatgtactagccctaagactg

SEQ ID NO: 399096 - DNA, 25 bp, Artificial
  probe
  misc_feature (1)..(25): SEQ ID NO: 5072; WAN024CHJ; Start 75; Stop 99
gttgcgatgtactagccctaagact

SEQ ID NO: 399097 - DNA, 25 bp, Artificial
  probe
  misc_feature (1)..(25): SEQ ID NO: 5072; WAN024CHJ; Start 62; Stop 86
atggtctcattttgttgcgatgtac

SEQ ID NO: 399098 - DNA, 25 bp, Artificial
  probe
  misc_feature (1)..(25): SEQ ID NO: 5072; WAN024CHJ; Start 70; Stop 94
attttgttgcgatgtactagcccta

SEQ ID NO: 399099 - DNA, 25 bp, Artificial
  probe
  misc_feature (1)..(25): SEQ ID NO: 5072; WAN024CHJ; Start 134; Stop 158
tggtagccaaacttatcctcctctg

SEQ ID NO: 399100 - DNA, 25 bp, Artificial
  probe
  misc_feature (1)..(25): SEQ ID NO: 5072; WAN024CHJ; Start 74; Stop 98
tgttgcgatgtactagccctaagac

SEQ ID NO: 399101 - DNA, 25 bp, Artificial
  probe
  misc_feature (1)..(25): SEQ ID NO: 5072; WAN024CHJ; Start 71; Stop 95
ttttgttgcgatgtactagccctaa

SEQ ID NO: 399102 - DNA, 25 bp, Artificial
  probe
  misc_feature (1)..(25): SEQ ID NO: 5072; WAN024CHJ; Start 144; Stop 168
acttatcctcctctggaaagtggtt

SEQ ID NO: 399103 - DNA, 25 bp, Artificial
  probe
  misc_feature (1)..(25): SEQ ID NO: 5072; WAN024CHJ; Start 143; Stop 167
aacttatcctcctctggaaagtggt

SEQ ID NO: 399104 - DNA, 25 bp, Artificial
  probe
  misc_feature (1)..(25): SEQ ID NO: 5072; WAN024CHJ; Start 67; Stop 91
ctcattttgttgcgatgtactagcc

SEQ ID NO: 399105 - DNA, 25 bp, Artificial
  probe
  misc_feature (1)..(25): SEQ ID NO: 5072; WAN024CHJ; Start 63; Stop 87
tggtctcattttgttgcgatgtact

SEQ ID NO: 399106 - DNA, 25 bp, Artificial
  probe
  misc_feature (1)..(25): SEQ ID NO: 5072; WAN024CHJ; Start 135; Stop 159
ggtagccaaacttatcctcctctgg

SEQ ID NO: 399107 - DNA, 25 bp, Artificial
  probe
  misc_feature (1)..(25): SEQ ID NO: 5072; WAN024CHJ; Start 182; Stop 206
aggctcttttgcagatactccaatt

SEQ ID NO: 399108 - DNA, 25 bp, Artificial
  probe
  misc_feature (1)..(25): SEQ ID NO: 5073; WAN024F4U; Start 227; Stop 251
ctatcgttagcagaagtcaccagac

SEQ ID NO: 399109 - DNA, 25 bp, Artificial
  probe
  misc_feature (1)..(25): SEQ ID NO: 5073; WAN024F4U; Start 356; Stop 380
ctatccaacttgatccaaatgctca

SEQ ID NO: 399110 - DNA, 25 bp, Artificial
  probe
  misc_feature (1)..(25): SEQ ID NO: 5073; WAN024F4U; Start 83; Stop 107
atttcagggctatactgctctgtat

SEQ ID NO: 399111 - DNA, 25 bp, Artificial
  probe
  misc_feature (1)..(25): SEQ ID NO: 5073; WAN024F4U; Start 82; Stop 106
catttcagggctatactgctctgta

SEQ ID NO: 399112 - DNA, 25 bp, Artificial
  probe
  misc_feature (1)..(25): SEQ ID NO: 5073; WAN024F4U; Start 353; Stop 377
ttgctatccaacttgatccaaatgc

SEQ ID NO: 399113 - DNA, 25 bp, Artificial
  probe
  misc_feature (1)..(25): SEQ ID NO: 5073; WAN024F4U; Start 140; Stop 164
gacatctcacctttaaggacattga

SEQ ID NO: 399114 - DNA, 25 bp, Artificial
  probe
  misc_feature (1)..(25): SEQ ID NO: 5073; WAN024F4U; Start 141; Stop 165
acatctcacctttaaggacattgac

SEQ ID NO: 399115 - DNA, 25 bp, Artificial
  probe
  misc_feature (1)..(25): SEQ ID NO: 5073; WAN024F4U; Start 355; Stop 379
gctatccaacttgatccaaatgctc

SEQ ID NO: 399116 - DNA, 25 bp, Artificial
  probe
  misc_feature (1)..(25): SEQ ID NO: 5073; WAN024F4U; Start 80; Stop 104
atcatttcagggctatactgctctg

SEQ ID NO: 399117 - DNA, 25 bp, Artificial
  probe
  misc_feature (1)..(25): SEQ ID NO: 5073; WAN024F4U; Start 79; Stop 103
catcatttcagggctatactgctct

SEQ ID NO: 399118 - DNA, 25 bp, Artificial
  probe
  misc_feature (1)..(25): SEQ ID NO: 5073; WAN024F4U; Start 142; Stop 166
catctcacctttaaggacattgacc

SEQ ID NO: 399119 - DNA, 25 bp, Artificial
  probe
  misc_feature (1)..(25): SEQ ID NO: 5073; WAN024F4U; Start 139; Stop 163
ggacatctcacctttaaggacattg

SEQ ID NO: 399120 - DNA, 25 bp, Artificial
  probe
  misc_feature (1)..(25): SEQ ID NO: 5073; WAN024F4U; Start 138; Stop 162
aggacatctcacctttaaggacatt

SEQ ID NO: 399121 - DNA, 25 bp, Artificial
  probe
  misc_feature (1)..(25): SEQ ID NO: 5073; WAN024F4U; Start 143; Stop 167
atctcacctttaaggacattgacca

SEQ ID NO: 399122 - DNA, 25 bp, Artificial
  probe
  misc_feature (1)..(25): SEQ ID NO: 5073; WAN024F4U; Start 354; Stop 378
tgctatccaacttgatccaaatgct

SEQ ID NO: 399123 - DNA, 25 bp, Artificial
  probe
  misc_feature (1)..(25): SEQ ID NO: 5073; WAN024F4U; Start 144; Stop 168
tctcacctttaaggacattgaccaa

SEQ ID NO: 399124 - DNA, 25 bp, Artificial
  probe
  misc_feature (1)..(25): SEQ ID NO: 5073; WAN024F4U; Start 85; Stop 109
ttcagggctatactgctctgtataa

SEQ ID NO: 399125 - DNA, 25 bp, Artificial
  probe
  misc_feature (1)..(25): SEQ ID NO: 5073; WAN024F4U; Start 84; Stop 108
tttcagggctatactgctctgtata

SEQ ID NO: 399126 - DNA, 25 bp, Artificial
  probe
  misc_feature (1)..(25): SEQ ID NO: 5073; WAN024F4U; Start 86; Stop 110
tcagggctatactgctctgtataac

SEQ ID NO: 399127 - DNA, 25 bp, Artificial
  probe
  misc_feature (1)..(25): SEQ ID NO: 5073; WAN024F4U; Start 357; Stop 381
tatccaacttgatccaaatgctcaa

SEQ ID NO: 399128 - DNA, 25 bp, Artificial
  probe
  misc_feature (1)..(25): SEQ ID NO: 5073; WAN024F4U; Start 78; Stop 102
ccatcatttcagggctatactgctc

SEQ ID NO: 399129 - DNA, 25 bp, Artificial
  probe
  misc_feature (1)..(25): SEQ ID NO: 5073; WAN024F4U; Start 92; Stop 116
ctatactgctctgtataacgtggca

SEQ ID NO: 399130 - DNA, 25 bp, Artificial
  probe
  misc_feature (1)..(25): SEQ ID NO: 5073; WAN024F4U; Start 81; Stop 105
tcatttcagggctatactgctctgt

SEQ ID NO: 399131 - DNA, 25 bp, Artificial
  probe
  misc_feature (1)..(25): SEQ ID NO: 5073; WAN024F4U; Start 93; Stop 117
tatactgctctgtataacgtggcac

SEQ ID NO: 399132 - DNA, 25 bp, Artificial
  probe
  misc_feature (1)..(25): SEQ ID NO: 5073; WAN024F4U; Start 90; Stop 114
ggctatactgctctgtataacgtgg

SEQ ID NO: 399133 - DNA, 25 bp, Artificial
  probe
  misc_feature (1)..(25): SEQ ID NO: 5073; WAN024F4U; Start 16; Stop 40
gtcctcatccttgtagttgatgctg

SEQ ID NO: 399134 - DNA, 25 bp, Artificial
  probe
  misc_feature (1)..(25): SEQ ID NO: 5073; WAN024F4U; Start 29; Stop 53
tagttgatgctggctggagaggtaa

SEQ ID NO: 399135 - DNA, 25 bp, Artificial
  probe
  misc_feature (1)..(25): SEQ ID NO: 5073; WAN024F4U; Start 87; Stop 111
cagggctatactgctctgtataacg

SEQ ID NO: 399136 - DNA, 25 bp, Artificial
  probe
  misc_feature (1)..(25): SEQ ID NO: 5073; WAN024F4U; Start 15; Stop 39
tgtcctcatccttgtagttgatgct

SEQ ID NO: 399137 - DNA, 25 bp, Artificial
  probe
  misc_feature (1)..(25): SEQ ID NO: 5073; WAN024F4U; Start 14; Stop 38
gtgtcctcatccttgtagttgatgc

SEQ ID NO: 399138 - DNA, 25 bp, Artificial
  probe
  misc_feature (1)..(25): SEQ ID NO: 5073; WAN024F4U; Start 367; Stop 391
gatccaaatgctcaagatgagaaag

SEQ ID NO: 399139 - DNA, 25 bp, Artificial
  probe
  misc_feature (1)..(25): SEQ ID NO: 5073; WAN024F4U; Start 91; Stop 115
gctatactgctctgtataacgtggc

SEQ ID NO: 399140 - DNA, 25 bp, Artificial
  probe
  misc_feature (1)..(25): SEQ ID NO: 5073; WAN024F4U; Start 371; Stop 395
caaatgctcaagatgagaaagatgg

SEQ ID NO: 399141 - DNA, 25 bp, Artificial
  probe
  misc_feature (1)..(25): SEQ ID NO: 5074; WAN024CRX; Start 185; Stop 209
tttcatattgctatcttgtcccttt

SEQ ID NO: 399142 - DNA, 25 bp, Artificial
  probe
  misc_feature (1)..(25): SEQ ID NO: 5074; WAN024CRX; Start 191; Stop 215
attgctatcttgtcccttttgatgt

SEQ ID NO: 399143 - DNA, 25 bp, Artificial
  probe
  misc_feature (1)..(25): SEQ ID NO: 5074; WAN024CRX; Start 188; Stop 212
catattgctatcttgtcccttttga

SEQ ID NO: 399144 - DNA, 25 bp, Artificial
  probe
  misc_feature (1)..(25): SEQ ID NO: 5074; WAN024CRX; Start 187; Stop 211
tcatattgctatcttgtcccttttg

SEQ ID NO: 399145 - DNA, 25 bp, Artificial
  probe
  misc_feature (1)..(25): SEQ ID NO: 5074; WAN024CRX; Start 183; Stop 207
gttttcatattgctatcttgtccct

SEQ ID NO: 399146 - DNA, 25 bp, Artificial
  probe
  misc_feature (1)..(25): SEQ ID NO: 5074; WAN024CRX; Start 182; Stop 206
agttttcatattgctatcttgtccc

SEQ ID NO: 399147 - DNA, 25 bp, Artificial
  probe
  misc_feature (1)..(25): SEQ ID NO: 5074; WAN024CRX; Start 192; Stop 216
ttgctatcttgtcccttttgatgtt

SEQ ID NO: 399148 - DNA, 25 bp, Artificial
  probe
  misc_feature (1)..(25): SEQ ID NO: 5074; WAN024CRX; Start 190; Stop 214
tattgctatcttgtcccttttgatg

SEQ ID NO: 399149 - DNA, 25 bp, Artificial
  probe
  misc_feature (1)..(25): SEQ ID NO: 5074; WAN024CRX; Start 92; Stop 116
gggtaatttcaatagggacgatgaa

SEQ ID NO: 399150 - DNA, 25 bp, Artificial
  probe
  misc_feature (1)..(25): SEQ ID NO: 5074; WAN024CRX; Start 186; Stop 210
ttcatattgctatcttgtccctttt

SEQ ID NO: 399151 - DNA, 25 bp, Artificial
  probe
  misc_feature (1)..(25): SEQ ID NO: 5074; WAN024CRX; Start 184; Stop 208
ttttcatattgctatcttgtccctt

SEQ ID NO: 399152 - DNA, 25 bp, Artificial
  probe
  misc_feature (1)..(25): SEQ ID NO: 5074; WAN024CRX; Start 193; Stop 217
tgctatcttgtcccttttgatgttg

SEQ ID NO: 399153 - DNA, 25 bp, Artificial
  probe
  misc_feature (1)..(25): SEQ ID NO: 5074; WAN024CRX; Start 181; Stop 205
cagttttcatattgctatcttgtcc

SEQ ID NO: 399154 - DNA, 25 bp, Artificial
  probe
  misc_feature (1)..(25): SEQ ID NO: 5074; WAN024CRX; Start 189; Stop 213
atattgctatcttgtcccttttgat

SEQ ID NO: 399155 - DNA, 25 bp, Artificial
  probe
  misc_feature (1)..(25): SEQ ID NO: 5074; WAN024CRX; Start 56; Stop 80
catctggtggtgcaatttcagtatt

SEQ ID NO: 399156 - DNA, 25 bp, Artificial
  probe
  misc_feature (1)..(25): SEQ ID NO: 5074; WAN024CRX; Start 194; Stop 218
gctatcttgtcccttttgatgttgg

SEQ ID NO: 399157 - DNA, 25 bp, Artificial
  probe
  misc_feature (1)..(25): SEQ ID NO: 5074; WAN024CRX; Start 145; Stop 169
gcgaaagtccctatcataggatata

SEQ ID NO: 399158 - DNA, 25 bp, Artificial
  probe
  misc_feature (1)..(25): SEQ ID NO: 5074; WAN024CRX; Start 144; Stop 168
ggcgaaagtccctatcataggatat

SEQ ID NO: 399159 - DNA, 25 bp, Artificial
  probe
  misc_feature (1)..(25): SEQ ID NO: 5074; WAN024CRX; Start 66; Stop 90
tgcaatttcagtattggcactattt

SEQ ID NO: 399160 - DNA, 25 bp, Artificial
  probe
  misc_feature (1)..(25): SEQ ID NO: 5074; WAN024CRX; Start 57; Stop 81
atctggtggtgcaatttcagtattg

SEQ ID NO: 399161 - DNA, 25 bp, Artificial
  probe
  misc_feature (1)..(25): SEQ ID NO: 5074; WAN024CRX; Start 180; Stop 204
acagttttcatattgctatcttgtc

SEQ ID NO: 399162 - DNA, 25 bp, Artificial
  probe
  misc_feature (1)..(25): SEQ ID NO: 5074; WAN024CRX; Start 177; Stop 201
acaacagttttcatattgctatctt

SEQ ID NO: 399163 - DNA, 25 bp, Artificial
  probe
  misc_feature (1)..(25): SEQ ID NO: 5074; WAN024CRX; Start 176; Stop 200
aacaacagttttcatattgctatct

SEQ ID NO: 399164 - DNA, 25 bp, Artificial
  probe
  misc_feature (1)..(25): SEQ ID NO: 5074; WAN024CRX; Start 178; Stop 202
caacagttttcatattgctatcttg

SEQ ID NO: 399165 - DNA, 25 bp, Artificial
  probe
  misc_feature (1)..(25): SEQ ID NO: 5074; WAN024CRX; Start 146; Stop 170
cgaaagtccctatcataggatatac

SEQ ID NO: 399166 - DNA, 25 bp, Artificial
  probe
  misc_feature (1)..(25): SEQ ID NO: 5074; WAN024CRX; Start 179; Stop 203
aacagttttcatattgctatcttgt

SEQ ID NO: 399167 - DNA, 25 bp, Artificial
  probe
  misc_feature (1)..(25): SEQ ID NO: 5074; WAN024CRX; Start 150; Stop 174
agtccctatcataggatatacaaga

SEQ ID NO: 399168 - DNA, 25 bp, Artificial
  probe
  misc_feature (1)..(25): SEQ ID NO: 5074; WAN024CRX; Start 55; Stop 79
ccatctggtggtgcaatttcagtat

SEQ ID NO: 399169 - DNA, 25 bp, Artificial
  probe
  misc_feature (1)..(25): SEQ ID NO: 5074; WAN024CRX; Start 195; Stop 219
ctatcttgtcccttttgatgttggg

SEQ ID NO: 399170 - DNA, 25 bp, Artificial
  probe
  misc_feature (1)..(25): SEQ ID NO: 5074; WAN024CRX; Start 58; Stop 82
tctggtggtgcaatttcagtattgg

SEQ ID NO: 399171 - DNA, 25 bp, Artificial
  probe
  misc_feature (1)..(25): SEQ ID NO: 5074; WAN024CRX; Start 151; Stop 175
gtccctatcataggatatacaagaa

SEQ ID NO: 399172 - DNA, 25 bp, Artificial
  probe
  misc_feature (1)..(25): SEQ ID NO: 5074; WAN024CRX; Start 149; Stop 173
aagtccctatcataggatatacaag

SEQ ID NO: 399173 - DNA, 25 bp, Artificial
  probe
  misc_feature (1)..(25): SEQ ID NO: 5074; WAN024CRX; Start 147; Stop 171
gaaagtccctatcataggatataca

SEQ ID NO: 399174 - DNA, 25 bp, Artificial
  probe
  misc_feature (1)..(25): SEQ ID NO: 5075; WAN024G2F; Start 284; Stop 308
taggcttgaaggatgaataactaat

SEQ ID NO: 399175 - DNA, 25 bp, Artificial
  probe
  misc_feature (1)..(25): SEQ ID NO: 5075; WAN024G2F; Start 283; Stop 307
ttaggcttgaaggatgaataactaa

SEQ ID NO: 399176 - DNA, 25 bp, Artificial
  probe
  misc_feature (1)..(25): SEQ ID NO: 5075; WAN024G2F; Start 113; Stop 137
caatggctaagtttgaaggagtttc

SEQ ID NO: 399177 - DNA, 25 bp, Artificial
  probe
  misc_feature (1)..(25): SEQ ID NO: 5075; WAN024G2F; Start 169; Stop 193
gaagccctagaagatgaatacgatg

SEQ ID NO: 399178 - DNA, 25 bp, Artificial
  probe
  misc_feature (1)..(25): SEQ ID NO: 5075; WAN024G2F; Start 168; Stop 192
tgaagccctagaagatgaatacgat

SEQ ID NO: 399179 - DNA, 25 bp, Artificial
  probe
  misc_feature (1)..(25): SEQ ID NO: 5075; WAN024G2F; Start 167; Stop 191
ttgaagccctagaagatgaatacga

SEQ ID NO: 399180 - DNA, 25 bp, Artificial
  probe
  misc_feature (1)..(25): SEQ ID NO: 5075; WAN024G2F; Start 166; Stop 190
cttgaagccctagaagatgaatacg

SEQ ID NO: 399181 - DNA, 25 bp, Artificial
  probe
  misc_feature (1)..(25): SEQ ID NO: 5075; WAN024G2F; Start 281; Stop 305
atttaggcttgaaggatgaataact

SEQ ID NO: 399182 - DNA, 25 bp, Artificial
  probe
  misc_feature (1)..(25): SEQ ID NO: 5075; WAN024G2F; Start 279; Stop 303
tgatttaggcttgaaggatgaataa

SEQ ID NO: 399183 - DNA, 25 bp, Artificial
  probe
  misc_feature (1)..(25): SEQ ID NO: 5075; WAN024G2F; Start 280; Stop 304
gatttaggcttgaaggatgaataac

SEQ ID NO: 399184 - DNA, 25 bp, Artificial
  probe
  misc_feature (1)..(25): SEQ ID NO: 5075; WAN024G2F; Start 278; Stop 302
atgatttaggcttgaaggatgaata

SEQ ID NO: 399185 - DNA, 25 bp, Artificial
  probe
  misc_feature (1)..(25): SEQ ID NO: 5075; WAN024G2F; Start 277; Stop 301
catgatttaggcttgaaggatgaat

SEQ ID NO: 399186 - DNA, 25 bp, Artificial
  probe
  misc_feature (1)..(25): SEQ ID NO: 5075; WAN024G2F; Start 282; Stop 306
tttaggcttgaaggatgaataacta

SEQ ID NO: 399187 - DNA, 25 bp, Artificial
  probe
  misc_feature (1)..(25): SEQ ID NO: 5075; WAN024G2F; Start 112; Stop 136
gcaatggctaagtttgaaggagttt

SEQ ID NO: 399188 - DNA, 25 bp, Artificial
  probe
  misc_feature (1)..(25): SEQ ID NO: 5075; WAN024G2F; Start 276; Stop 300
gcatgatttaggcttgaaggatgaa

SEQ ID NO: 399189 - DNA, 25 bp, Artificial
  probe
  misc_feature (1)..(25): SEQ ID NO: 5075; WAN024G2F; Start 170; Stop 194
aagccctagaagatgaatacgatgc

SEQ ID NO: 399190 - DNA, 25 bp, Artificial
  probe
  misc_feature (1)..(25): SEQ ID NO: 5075; WAN024G2F; Start 114; Stop 138
aatggctaagtttgaaggagtttcc

SEQ ID NO: 399191 - DNA, 25 bp, Artificial
  probe
  misc_feature (1)..(25): SEQ ID NO: 5075; WAN024G2F; Start 172; Stop 196
gccctagaagatgaatacgatgctc

SEQ ID NO: 399192 - DNA, 25 bp, Artificial
  probe
  misc_feature (1)..(25): SEQ ID NO: 5075; WAN024G2F; Start 165; Stop 189
tcttgaagccctagaagatgaatac

SEQ ID NO: 399193 - DNA, 25 bp, Artificial
  probe
  misc_feature (1)..(25): SEQ ID NO: 5075; WAN024G2F; Start 164; Stop 188
ctcttgaagccctagaagatgaata

SEQ ID NO: 399194 - DNA, 25 bp, Artificial
  probe
  misc_feature (1)..(25): SEQ ID NO: 5075; WAN024G2F; Start 106; Stop 130
atgaaagcaatggctaagtttgaag

SEQ ID NO: 399195 - DNA, 25 bp, Artificial
  probe
  misc_feature (1)..(25): SEQ ID NO: 5075; WAN024G2F; Start 105; Stop 129
tatgaaagcaatggctaagtttgaa

SEQ ID NO: 399196 - DNA, 25 bp, Artificial
  probe
  misc_feature (1)..(25): SEQ ID NO: 5075; WAN024G2F; Start 104; Stop 128
ttatgaaagcaatggctaagtttga

SEQ ID NO: 399197 - DNA, 25 bp, Artificial
  probe
  misc_feature (1)..(25): SEQ ID NO: 5075; WAN024G2F; Start 100; Stop 124
acatttatgaaagcaatggctaagt

SEQ ID NO: 399198 - DNA, 25 bp, Artificial
  probe
  misc_feature (1)..(25): SEQ ID NO: 5075; WAN024G2F; Start 48; Stop 72
gggagcacaaaagatgactactatt

SEQ ID NO: 399199 - DNA, 25 bp, Artificial
  probe
  misc_feature (1)..(25): SEQ ID NO: 5075; WAN024G2F; Start 163; Stop 187
actcttgaagccctagaagatgaat

SEQ ID NO: 399200 - DNA, 25 bp, Artificial
  probe
  misc_feature (1)..(25): SEQ ID NO: 5075; WAN024G2F; Start 103; Stop 127
tttatgaaagcaatggctaagtttg

SEQ ID NO: 399201 - DNA, 25 bp, Artificial
  probe
  misc_feature (1)..(25): SEQ ID NO: 5075; WAN024G2F; Start 162; Stop 186
aactcttgaagccctagaagatgaa

SEQ ID NO: 399202 - DNA, 25 bp, Artificial
  probe
  misc_feature (1)..(25): SEQ ID NO: 5075; WAN024G2F; Start 161; Stop 185
aaactcttgaagccctagaagatga

SEQ ID NO: 399203 - DNA, 25 bp, Artificial
  probe
  misc_feature (1)..(25): SEQ ID NO: 5075; WAN024G2F; Start 101; Stop 125
catttatgaaagcaatggctaagtt

SEQ ID NO: 399204 - DNA, 25 bp, Artificial
  probe
  misc_feature (1)..(25): SEQ ID NO: 5075; WAN024G2F; Start 99; Stop 123
aacatttatgaaagcaatggctaag

SEQ ID NO: 399205 - DNA, 25 bp, Artificial
  probe
  misc_feature (1)..(25): SEQ ID NO: 5075; WAN024G2F; Start 47; Stop 71
agggagcacaaaagatgactactat

SEQ ID NO: 399206 - DNA, 25 bp, Artificial
  probe
  misc_feature (1)..(25): SEQ ID NO: 5075; WAN024G2F; Start 46; Stop 70
aagggagcacaaaagatgactacta

SEQ ID NO: 399207 - DNA, 25 bp, Artificial
  probe
  misc_feature (1)..(25): SEQ ID NO: 5076; WAN024FJE; Start 171; Stop 195
agtcaagaccactgatacttctgaa

SEQ ID NO: 399208 - DNA, 25 bp, Artificial
  probe
  misc_feature (1)..(25): SEQ ID NO: 5076; WAN024FJE; Start 172; Stop 196
gtcaagaccactgatacttctgaag

SEQ ID NO: 399209 - DNA, 25 bp, Artificial
  probe
  misc_feature (1)..(25): SEQ ID NO: 5076; WAN024FJE; Start 175; Stop 199
aagaccactgatacttctgaagcaa

SEQ ID NO: 399210 - DNA, 25 bp, Artificial
  probe
  misc_feature (1)..(25): SEQ ID NO: 5076; WAN024FJE; Start 50; Stop 74
aatcttcaatgctcaaaggaacttc

SEQ ID NO: 399211 - DNA, 25 bp, Artificial
  probe
  misc_feature (1)..(25): SEQ ID NO: 5076; WAN024FJE; Start 54; Stop 78
ttcaatgctcaaaggaacttcaatc

SEQ ID NO: 399212 - DNA, 25 bp, Artificial
  probe
  misc_feature (1)..(25): SEQ ID NO: 5076; WAN024FJE; Start 53; Stop 77
cttcaatgctcaaaggaacttcaat

SEQ ID NO: 399213 - DNA, 25 bp, Artificial
  probe
  misc_feature (1)..(25): SEQ ID NO: 5076; WAN024FJE; Start 46; Stop 70
ggtaaatcttcaatgctcaaaggaa

SEQ ID NO: 399214 - DNA, 25 bp, Artificial
  probe
  misc_feature (1)..(25): SEQ ID NO: 5076; WAN024FJE; Start 49; Stop 73
aaatcttcaatgctcaaaggaactt

SEQ ID NO: 399215 - DNA, 25 bp, Artificial
  probe
  misc_feature (1)..(25): SEQ ID NO: 5076; WAN024FJE; Start 51; Stop 75
atcttcaatgctcaaaggaacttca

SEQ ID NO: 399216 - DNA, 25 bp, Artificial
  probe
  misc_feature (1)..(25): SEQ ID NO: 5076; WAN024FJE; Start 43; Stop 67
ttgggtaaatcttcaatgctcaaag

SEQ ID NO: 399217 - DNA, 25 bp, Artificial
  probe
  misc_feature (1)..(25): SEQ ID NO: 5076; WAN024FJE; Start 47; Stop 71
gtaaatcttcaatgctcaaaggaac

SEQ ID NO: 399218 - DNA, 25 bp, Artificial
  probe
  misc_feature (1)..(25): SEQ ID NO: 5076; WAN024FJE; Start 173; Stop 197
tcaagaccactgatacttctgaagc

SEQ ID NO: 399219 - DNA, 25 bp, Artificial
  probe
  misc_feature (1)..(25): SEQ ID NO: 5076; WAN024FJE; Start 52; Stop 76
tcttcaatgctcaaaggaacttcaa

SEQ ID NO: 399220 - DNA, 25 bp, Artificial
  probe
  misc_feature (1)..(25): SEQ ID NO: 5076; WAN024FJE; Start 48; Stop 72
taaatcttcaatgctcaaaggaact

SEQ ID NO: 399221 - DNA, 25 bp, Artificial
  probe
  misc_feature (1)..(25): SEQ ID NO: 5076; WAN024FJE; Start 174; Stop 198
caagaccactgatacttctgaagca

SEQ ID NO: 399222 - DNA, 25 bp, Artificial
  probe
  misc_feature (1)..(25): SEQ ID NO: 5076; WAN024FJE; Start 45; Stop 69
gggtaaatcttcaatgctcaaagga

SEQ ID NO: 399223 - DNA, 25 bp, Artificial
  probe
  misc_feature (1)..(25): SEQ ID NO: 5076; WAN024FJE; Start 44; Stop 68
tgggtaaatcttcaatgctcaaagg

SEQ ID NO: 399224 - DNA, 25 bp, Artificial
  probe
  misc_feature (1)..(25): SEQ ID NO: 5076; WAN024FJE; Start 57; Stop 81
aatgctcaaaggaacttcaatcgtt

SEQ ID NO: 399225 - DNA, 25 bp, Artificial
  probe
  misc_feature (1)..(25): SEQ ID NO: 5076; WAN024FJE; Start 55; Stop 79
tcaatgctcaaaggaacttcaatcg

SEQ ID NO: 399226 - DNA, 25 bp, Artificial
  probe
  misc_feature (1)..(25): SEQ ID NO: 5076; WAN024FJE; Start 56; Stop 80
caatgctcaaaggaacttcaatcgt

SEQ ID NO: 399227 - DNA, 25 bp, Artificial
  probe
  misc_feature (1)..(25): SEQ ID NO: 5076; WAN024FJE; Start 176; Stop 200
agaccactgatacttctgaagcaaa

SEQ ID NO: 399228 - DNA, 25 bp, Artificial
  probe
  misc_feature (1)..(25): SEQ ID NO: 5076; WAN024FJE; Start 120; Stop 144
tttacgtgtactttcttgcatttca

SEQ ID NO: 399229 - DNA, 25 bp, Artificial
  probe
  misc_feature (1)..(25): SEQ ID NO: 5076; WAN024FJE; Start 126; Stop 150
tgtactttcttgcatttcactagct

SEQ ID NO: 399230 - DNA, 25 bp, Artificial
  probe
  misc_feature (1)..(25): SEQ ID NO: 5076; WAN024FJE; Start 115; Stop 139
ttgaatttacgtgtactttcttgca

SEQ ID NO: 399231 - DNA, 25 bp, Artificial
  probe
  misc_feature (1)..(25): SEQ ID NO: 5076; WAN024FJE; Start 116; Stop 140
tgaatttacgtgtactttcttgcat

SEQ ID NO: 399232 - DNA, 25 bp, Artificial
  probe
  misc_feature (1)..(25): SEQ ID NO: 5076; WAN024FJE; Start 114; Stop 138
cttgaatttacgtgtactttcttgc

SEQ ID NO: 399233 - DNA, 25 bp, Artificial
  probe
  misc_feature (1)..(25): SEQ ID NO: 5076; WAN024FJE; Start 119; Stop 143
atttacgtgtactttcttgcatttc

SEQ ID NO: 399234 - DNA, 25 bp, Artificial
  probe
  misc_feature (1)..(25): SEQ ID NO: 5076; WAN024FJE; Start 42; Stop 66
attgggtaaatcttcaatgctcaaa

SEQ ID NO: 399235 - DNA, 25 bp, Artificial
  probe
  misc_feature (1)..(25): SEQ ID NO: 5076; WAN024FJE; Start 112; Stop 136
accttgaatttacgtgtactttctt

SEQ ID NO: 399236 - DNA, 25 bp, Artificial
  probe
  misc_feature (1)..(25): SEQ ID NO: 5076; WAN024FJE; Start 111; Stop 135
aaccttgaatttacgtgtactttct

SEQ ID NO: 399237 - DNA, 25 bp, Artificial
  probe
  misc_feature (1)..(25): SEQ ID NO: 5076; WAN024FJE; Start 117; Stop 141
gaatttacgtgtactttcttgcatt

SEQ ID NO: 399238 - DNA, 25 bp, Artificial
  probe
  misc_feature (1)..(25): SEQ ID NO: 5076; WAN024FJE; Start 113; Stop 137
ccttgaatttacgtgtactttcttg

SEQ ID NO: 399239 - DNA, 25 bp, Artificial
  probe
  misc_feature (1)..(25): SEQ ID NO: 5076; WAN024FJE; Start 118; Stop 142
aatttacgtgtactttcttgcattt

SEQ ID NO: 399240 - DNA, 25 bp, Artificial
  probe
  misc_feature (1)..(25): SEQ ID NO: 5077; WAN024B7G; Start 77; Stop 101
aattgcttggttcgttcttctcttg

SEQ ID NO: 399241 - DNA, 25 bp, Artificial
  probe
  misc_feature (1)..(25): SEQ ID NO: 5077; WAN024B7G; Start 15; Stop 39
cgatttgtcctgttcttgtttcatt

SEQ ID NO: 399242 - DNA, 25 bp, Artificial
  probe
  misc_feature (1)..(25): SEQ ID NO: 5077; WAN024B7G; Start 16; Stop 40
gatttgtcctgttcttgtttcattt

SEQ ID NO: 399243 - DNA, 25 bp, Artificial
  probe
  misc_feature (1)..(25): SEQ ID NO: 5077; WAN024B7G; Start 76; Stop 100
aaattgcttggttcgttcttctctt

SEQ ID NO: 399244 - DNA, 25 bp, Artificial
  probe
  misc_feature (1)..(25): SEQ ID NO: 5077; WAN024B7G; Start 78; Stop 102
attgcttggttcgttcttctcttgg

SEQ ID NO: 399245 - DNA, 25 bp, Artificial
  probe
  misc_feature (1)..(25): SEQ ID NO: 5077; WAN024B7G; Start 14; Stop 38
tcgatttgtcctgttcttgtttcat

SEQ ID NO: 399246 - DNA, 25 bp, Artificial
  probe
  misc_feature (1)..(25): SEQ ID NO: 5077; WAN024B7G; Start 106; Stop 130
actaaagaattgatgggcattattt

SEQ ID NO: 399247 - DNA, 25 bp, Artificial
  probe
  misc_feature (1)..(25): SEQ ID NO: 5077; WAN024B7G; Start 79; Stop 103
ttgcttggttcgttcttctcttgga

SEQ ID NO: 399248 - DNA, 25 bp, Artificial
  probe
  misc_feature (1)..(25): SEQ ID NO: 5077; WAN024B7G; Start 75; Stop 99
aaaattgcttggttcgttcttctct

SEQ ID NO: 399249 - DNA, 25 bp, Artificial
  probe
  misc_feature (1)..(25): SEQ ID NO: 5077; WAN024B7G; Start 135; Stop 159
caacaattttcccactgtccataaa

SEQ ID NO: 399250 - DNA, 25 bp, Artificial
  probe
  misc_feature (1)..(25): SEQ ID NO: 5077; WAN024B7G; Start 159; Stop 183
aaataacatgatgggctacatctct

SEQ ID NO: 399251 - DNA, 25 bp, Artificial
  probe
  misc_feature (1)..(25): SEQ ID NO: 5077; WAN024B7G; Start 161; Stop 185
ataacatgatgggctacatctctag

SEQ ID NO: 399252 - DNA, 25 bp, Artificial
  probe
  misc_feature (1)..(25): SEQ ID NO: 5077; WAN024B7G; Start 134; Stop 158
tcaacaattttcccactgtccataa

SEQ ID NO: 399253 - DNA, 25 bp, Artificial
  probe
  misc_feature (1)..(25): SEQ ID NO: 5077; WAN024B7G; Start 133; Stop 157
ttcaacaattttcccactgtccata

SEQ ID NO: 399254 - DNA, 25 bp, Artificial
  probe
  misc_feature (1)..(25): SEQ ID NO: 5077; WAN024B7G; Start 160; Stop 184
aataacatgatgggctacatctcta

SEQ ID NO: 399255 - DNA, 25 bp, Artificial
  probe
  misc_feature (1)..(25): SEQ ID NO: 5077; WAN024B7G; Start 74; Stop 98
caaaattgcttggttcgttcttctc

SEQ ID NO: 399256 - DNA, 25 bp, Artificial
  probe
  misc_feature (1)..(25): SEQ ID NO: 5077; WAN024B7G; Start 136; Stop 160
aacaattttcccactgtccataaaa

SEQ ID NO: 399257 - DNA, 25 bp, Artificial
  probe
  misc_feature (1)..(25): SEQ ID NO: 5077; WAN024B7G; Start 132; Stop 156
tttcaacaattttcccactgtccat

SEQ ID NO: 399258 - DNA, 25 bp, Artificial
  probe
  misc_feature (1)..(25): SEQ ID NO: 5077; WAN024B7G; Start 12; Stop 36
gatcgatttgtcctgttcttgtttc

SEQ ID NO: 399259 - DNA, 25 bp, Artificial
  probe
  misc_feature (1)..(25): SEQ ID NO: 5077; WAN024B7G; Start 131; Stop 155
ttttcaacaattttcccactgtcca

SEQ ID NO: 399260 - DNA, 25 bp, Artificial
  probe
  misc_feature (1)..(25): SEQ ID NO: 5077; WAN024B7G; Start 13; Stop 37
atcgatttgtcctgttcttgtttca

SEQ ID NO: 399261 - DNA, 25 bp, Artificial
  probe
  misc_feature (1)..(25): SEQ ID NO: 5077; WAN024B7G; Start 11; Stop 35
tgatcgatttgtcctgttcttgttt

SEQ ID NO: 399262 - DNA, 25 bp, Artificial
  probe
  misc_feature (1)..(25): SEQ ID NO: 5077; WAN024B7G; Start 10; Stop 34
ctgatcgatttgtcctgttcttgtt

SEQ ID NO: 399263 - DNA, 25 bp, Artificial
  probe
  misc_feature (1)..(25): SEQ ID NO: 5077; WAN024B7G; Start 162; Stop 186
taacatgatgggctacatctctagc

SEQ ID NO: 399264 - DNA, 25 bp, Artificial
  probe
  misc_feature (1)..(25): SEQ ID NO: 5077; WAN024B7G; Start 8; Stop 32
tcctgatcgatttgtcctgttcttg

SEQ ID NO: 399265 - DNA, 25 bp, Artificial
  probe
  misc_feature (1)..(25): SEQ ID NO: 5077; WAN024B7G; Start 107; Stop 131
ctaaagaattgatgggcattatttt

SEQ ID NO: 399266 - DNA, 25 bp, Artificial
  probe
  misc_feature (1)..(25): SEQ ID NO: 5077; WAN024B7G; Start 61; Stop 85
aaagaattcgttccaaaattgcttg

SEQ ID NO: 399267 - DNA, 25 bp, Artificial
  probe
  misc_feature (1)..(25): SEQ ID NO: 5077; WAN024B7G; Start 60; Stop 84
gaaagaattcgttccaaaattgctt

SEQ ID NO: 399268 - DNA, 25 bp, Artificial
  probe
  misc_feature (1)..(25): SEQ ID NO: 5077; WAN024B7G; Start 9; Stop 33
cctgatcgatttgtcctgttcttgt

SEQ ID NO: 399269 - DNA, 25 bp, Artificial
  probe
  misc_feature (1)..(25): SEQ ID NO: 5077; WAN024B7G; Start 158; Stop 182
aaaataacatgatgggctacatctc

SEQ ID NO: 399270 - DNA, 25 bp, Artificial
  probe
  misc_feature (1)..(25): SEQ ID NO: 5077; WAN024B7G; Start 164; Stop 188
acatgatgggctacatctctagcaa

SEQ ID NO: 399271 - DNA, 25 bp, Artificial
  probe
  misc_feature (1)..(25): SEQ ID NO: 5077; WAN024B7G; Start 163; Stop 187
aacatgatgggctacatctctagca

SEQ ID NO: 399272 - DNA, 25 bp, Artificial
  probe
  misc_feature (1)..(25): SEQ ID NO: 5077; WAN024B7G; Start 42; Stop 66
actatatagatcgcattcgaaagaa

SEQ ID NO: 399273 - DNA, 25 bp, Artificial
  probe
  misc_feature (1)..(25): SEQ ID NO: 5078; WAN024G4X; Start 151; Stop 175
aagatggtcggtattagcaagaatt

SEQ ID NO: 399274 - DNA, 25 bp, Artificial
  probe
  misc_feature (1)..(25): SEQ ID NO: 5078; WAN024G4X; Start 10; Stop 34
ttcatcatagcggtctgtcttgtag

SEQ ID NO: 399275 - DNA, 25 bp, Artificial
  probe
  misc_feature (1)..(25): SEQ ID NO: 5078; WAN024G4X; Start 9; Stop 33
gttcatcatagcggtctgtcttgta

SEQ ID NO: 399276 - DNA, 25 bp, Artificial
  probe
  misc_feature (1)..(25): SEQ ID NO: 5078; WAN024G4X; Start 149; Stop 173
taaagatggtcggtattagcaagaa

SEQ ID NO: 399277 - DNA, 25 bp, Artificial
  probe
  misc_feature (1)..(25): SEQ ID NO: 5078; WAN024G4X; Start 12; Stop 36
catcatagcggtctgtcttgtagtc

SEQ ID NO: 399278 - DNA, 25 bp, Artificial
  probe
  misc_feature (1)..(25): SEQ ID NO: 5078; WAN024G4X; Start 150; Stop 174
aaagatggtcggtattagcaagaat

SEQ ID NO: 399279 - DNA, 25 bp, Artificial
  probe
  misc_feature (1)..(25): SEQ ID NO: 5078; WAN024G4X; Start 148; Stop 172
ataaagatggtcggtattagcaaga

SEQ ID NO: 399280 - DNA, 25 bp, Artificial
  probe
  misc_feature (1)..(25): SEQ ID NO: 5078; WAN024G4X; Start 147; Stop 171
gataaagatggtcggtattagcaag

SEQ ID NO: 399281 - DNA, 25 bp, Artificial
  probe
  misc_feature (1)..(25): SEQ ID NO: 5078; WAN024G4X; Start 59; Stop 83
taaagcagatagccatcaaggatac

SEQ ID NO: 399282 - DNA, 25 bp, Artificial
  probe
  misc_feature (1)..(25): SEQ ID NO: 5078; WAN024G4X; Start 58; Stop 82
gtaaagcagatagccatcaaggata

SEQ ID NO: 399283 - DNA, 25 bp, Artificial
  probe
  misc_feature (1)..(25): SEQ ID NO: 5078; WAN024G4X; Start 188; Stop 212
actgtgtcaaagaaagcaagaattt

SEQ ID NO: 399284 - DNA, 25 bp, Artificial
  probe
  misc_feature (1)..(25): SEQ ID NO: 5078; WAN024G4X; Start 153; Stop 177
gatggtcggtattagcaagaatttc

SEQ ID NO: 399285 - DNA, 25 bp, Artificial
  probe
  misc_feature (1)..(25): SEQ ID NO: 5078; WAN024G4X; Start 152; Stop 176
agatggtcggtattagcaagaattt

SEQ ID NO: 399286 - DNA, 25 bp, Artificial
  probe
  misc_feature (1)..(25): SEQ ID NO: 5078; WAN024G4X; Start 187; Stop 211
tactgtgtcaaagaaagcaagaatt

SEQ ID NO: 399287 - DNA, 25 bp, Artificial
  probe
  misc_feature (1)..(25): SEQ ID NO: 5078; WAN024G4X; Start 162; Stop 186
tattagcaagaatttcctgaccgag

SEQ ID NO: 399288 - DNA, 25 bp, Artificial
  probe
  misc_feature (1)..(25): SEQ ID NO: 5078; WAN024G4X; Start 11; Stop 35
tcatcatagcggtctgtcttgtagt

SEQ ID NO: 399289 - DNA, 25 bp, Artificial
  probe
  misc_feature (1)..(25): SEQ ID NO: 5078; WAN024G4X; Start 161; Stop 185
gtattagcaagaatttcctgaccga

SEQ ID NO: 399290 - DNA, 25 bp, Artificial
  probe
  misc_feature (1)..(25): SEQ ID NO: 5078; WAN024G4X; Start 158; Stop 182
tcggtattagcaagaatttcctgac

SEQ ID NO: 399291 - DNA, 25 bp, Artificial
  probe
  misc_feature (1)..(25): SEQ ID NO: 5078; WAN024G4X; Start 157; Stop 181
gtcggtattagcaagaatttcctga

SEQ ID NO: 399292 - DNA, 25 bp, Artificial
  probe
  misc_feature (1)..(25): SEQ ID NO: 5078; WAN024G4X; Start 154; Stop 178
atggtcggtattagcaagaatttcc

SEQ ID NO: 399293 - DNA, 25 bp, Artificial
  probe
  misc_feature (1)..(25): SEQ ID NO: 5078; WAN024G4X; Start 250; Stop 274
ttgaacttgtttgagtgtttctgtt

SEQ ID NO: 399294 - DNA, 25 bp, Artificial
  probe
  misc_feature (1)..(25): SEQ ID NO: 5078; WAN024G4X; Start 249; Stop 273
tttgaacttgtttgagtgtttctgt

SEQ ID NO: 399295 - DNA, 25 bp, Artificial
  probe
  misc_feature (1)..(25): SEQ ID NO: 5078; WAN024G4X; Start 248; Stop 272
gtttgaacttgtttgagtgtttctg

SEQ ID NO: 399296 - DNA, 25 bp, Artificial
  probe
  misc_feature (1)..(25): SEQ ID NO: 5078; WAN024G4X; Start 54; Stop 78
tttcgtaaagcagatagccatcaag

SEQ ID NO: 399297 - DNA, 25 bp, Artificial
  probe
  misc_feature (1)..(25): SEQ ID NO: 5078; WAN024G4X; Start 186; Stop 210
gtactgtgtcaaagaaagcaagaat

SEQ ID NO: 399298 - DNA, 25 bp, Artificial
  probe
  misc_feature (1)..(25): SEQ ID NO: 5078; WAN024G4X; Start 251; Stop 275
tgaacttgtttgagtgtttctgtta

SEQ ID NO: 399299 - DNA, 25 bp, Artificial
  probe
  misc_feature (1)..(25): SEQ ID NO: 5078; WAN024G4X; Start 61; Stop 85
aagcagatagccatcaaggatacca

SEQ ID NO: 399300 - DNA, 25 bp, Artificial
  probe
  misc_feature (1)..(25): SEQ ID NO: 5078; WAN024G4X; Start 164; Stop 188
ttagcaagaatttcctgaccgagta

SEQ ID NO: 399301 - DNA, 25 bp, Artificial
  probe
  misc_feature (1)..(25): SEQ ID NO: 5078; WAN024G4X; Start 156; Stop 180
ggtcggtattagcaagaatttcctg

SEQ ID NO: 399302 - DNA, 25 bp, Artificial
  probe
  misc_feature (1)..(25): SEQ ID NO: 5078; WAN024G4X; Start 252; Stop 276
gaacttgtttgagtgtttctgttag

SEQ ID NO: 399303 - DNA, 25 bp, Artificial
  probe
  misc_feature (1)..(25): SEQ ID NO: 5078; WAN024G4X; Start 247; Stop 271
agtttgaacttgtttgagtgtttct

SEQ ID NO: 399304 - DNA, 25 bp, Artificial
  probe
  misc_feature (1)..(25): SEQ ID NO: 5078; WAN024G4X; Start 244; Stop 268
gctagtttgaacttgtttgagtgtt

SEQ ID NO: 399305 - DNA, 25 bp, Artificial
  probe
  misc_feature (1)..(25): SEQ ID NO: 5078; WAN024G4X; Start 155; Stop 179
tggtcggtattagcaagaatttcct

SEQ ID NO: 399306 - DNA, 25 bp, Artificial
  probe
  misc_feature (1)..(25): SEQ ID NO: 5079; WAN024BE7; Start 210; Stop 234
cataactgctagaacatctccgata

SEQ ID NO: 399307 - DNA, 25 bp, Artificial
  probe
  misc_feature (1)..(25): SEQ ID NO: 5079; WAN024BE7; Start 211; Stop 235
ataactgctagaacatctccgatag

SEQ ID NO: 399308 - DNA, 25 bp, Artificial
  probe
  misc_feature (1)..(25): SEQ ID NO: 5079; WAN024BE7; Start 212; Stop 236
taactgctagaacatctccgatagt

SEQ ID NO: 399309 - DNA, 25 bp, Artificial
  probe
  misc_feature (1)..(25): SEQ ID NO: 5079; WAN024BE7; Start 218; Stop 242
ctagaacatctccgatagtctcagg

SEQ ID NO: 399310 - DNA, 25 bp, Artificial
  probe
  misc_feature (1)..(25): SEQ ID NO: 5079; WAN024BE7; Start 217; Stop 241
gctagaacatctccgatagtctcag

SEQ ID NO: 399311 - DNA, 25 bp, Artificial
  probe
  misc_feature (1)..(25): SEQ ID NO: 5079; WAN024BE7; Start 215; Stop 239
ctgctagaacatctccgatagtctc

SEQ ID NO: 399312 - DNA, 25 bp, Artificial
  probe
  misc_feature (1)..(25): SEQ ID NO: 5079; WAN024BE7; Start 231; Stop 255
gatagtctcaggatcaagagcagat

SEQ ID NO: 399313 - DNA, 25 bp, Artificial
  probe
  misc_feature (1)..(25): SEQ ID NO: 5079; WAN024BE7; Start 213; Stop 237
aactgctagaacatctccgatagtc

SEQ ID NO: 399314 - DNA, 25 bp, Artificial
  probe
  misc_feature (1)..(25): SEQ ID NO: 5079; WAN024BE7; Start 232; Stop 256
atagtctcaggatcaagagcagatg

SEQ ID NO: 399315 - DNA, 25 bp, Artificial
  probe
  misc_feature (1)..(25): SEQ ID NO: 5079; WAN024BE7; Start 216; Stop 240
tgctagaacatctccgatagtctca

SEQ ID NO: 399316 - DNA, 25 bp, Artificial
  probe
  misc_feature (1)..(25): SEQ ID NO: 5079; WAN024BE7; Start 219; Stop 243
tagaacatctccgatagtctcagga

SEQ ID NO: 399317 - DNA, 25 bp, Artificial
  probe
  misc_feature (1)..(25): SEQ ID NO: 5079; WAN024BE7; Start 214; Stop 238
actgctagaacatctccgatagtct

SEQ ID NO: 399318 - DNA, 25 bp, Artificial
  probe
  misc_feature (1)..(25): SEQ ID NO: 5079; WAN024BE7; Start 220; Stop 244
agaacatctccgatagtctcaggat

SEQ ID NO: 399319 - DNA, 25 bp, Artificial
  probe
  misc_feature (1)..(25): SEQ ID NO: 5079; WAN024BE7; Start 225; Stop 249
atctccgatagtctcaggatcaaga

SEQ ID NO: 399320 - DNA, 25 bp, Artificial
  probe
  misc_feature (1)..(25): SEQ ID NO: 5079; WAN024BE7; Start 224; Stop 248
catctccgatagtctcaggatcaag

SEQ ID NO: 399321 - DNA, 25 bp, Artificial
  probe
  misc_feature (1)..(25): SEQ ID NO: 5079; WAN024BE7; Start 221; Stop 245
gaacatctccgatagtctcaggatc

SEQ ID NO: 399322 - DNA, 25 bp, Artificial
  probe
  misc_feature (1)..(25): SEQ ID NO: 5079; WAN024BE7; Start 233; Stop 257
tagtctcaggatcaagagcagatgt

SEQ ID NO: 399323 - DNA, 25 bp, Artificial
  probe
  misc_feature (1)..(25): SEQ ID NO: 5079; WAN024BE7; Start 223; Stop 247
acatctccgatagtctcaggatcaa

SEQ ID NO: 399324 - DNA, 25 bp, Artificial
  probe
  misc_feature (1)..(25): SEQ ID NO: 5079; WAN024BE7; Start 222; Stop 246
aacatctccgatagtctcaggatca

SEQ ID NO: 399325 - DNA, 25 bp, Artificial
  probe
  misc_feature (1)..(25): SEQ ID NO: 5079; WAN024BE7; Start 5; Stop 29
ctttgtcactttcgtggttgataat

SEQ ID NO: 399326 - DNA, 25 bp, Artificial
  probe
  misc_feature (1)..(25): SEQ ID NO: 5079; WAN024BE7; Start 241; Stop 265
ggatcaagagcagatgttggttcat

SEQ ID NO: 399327 - DNA, 25 bp, Artificial
  probe
  misc_feature (1)..(25): SEQ ID NO: 5079; WAN024BE7; Start 7; Stop 31
ttgtcactttcgtggttgataattt

SEQ ID NO: 399328 - DNA, 25 bp, Artificial
  probe
  misc_feature (1)..(25): SEQ ID NO: 5079; WAN024BE7; Start 6; Stop 30
tttgtcactttcgtggttgataatt

SEQ ID NO: 399329 - DNA, 25 bp, Artificial
  probe
  misc_feature (1)..(25): SEQ ID NO: 5079; WAN024BE7; Start 226; Stop 250
tctccgatagtctcaggatcaagag

SEQ ID NO: 399330 - DNA, 25 bp, Artificial
  probe
  misc_feature (1)..(25): SEQ ID NO: 5079; WAN024BE7; Start 4; Stop 28
actttgtcactttcgtggttgataa

SEQ ID NO: 399331 - DNA, 25 bp, Artificial
  probe
  misc_feature (1)..(25): SEQ ID NO: 5079; WAN024BE7; Start 235; Stop 259
gtctcaggatcaagagcagatgttg

SEQ ID NO: 399332 - DNA, 25 bp, Artificial
  probe
  misc_feature (1)..(25): SEQ ID NO: 5079; WAN024BE7; Start 234; Stop 258
agtctcaggatcaagagcagatgtt

SEQ ID NO: 399333 - DNA, 25 bp, Artificial
  probe
  misc_feature (1)..(25): SEQ ID NO: 5079; WAN024BE7; Start 230; Stop 254
cgatagtctcaggatcaagagcaga

SEQ ID NO: 399334 - DNA, 25 bp, Artificial
  probe
  misc_feature (1)..(25): SEQ ID NO: 5079; WAN024BE7; Start 3; Stop 27
gactttgtcactttcgtggttgata

SEQ ID NO: 399335 - DNA, 25 bp, Artificial
  probe
  misc_feature (1)..(25): SEQ ID NO: 5079; WAN024BE7; Start 257; Stop 281
ttggttcatcaaagaggaggagttc

SEQ ID NO: 399336 - DNA, 25 bp, Artificial
  probe
  misc_feature (1)..(25): SEQ ID NO: 5079; WAN024BE7; Start 254; Stop 278
atgttggttcatcaaagaggaggag

SEQ ID NO: 399337 - DNA, 25 bp, Artificial
  probe
  misc_feature (1)..(25): SEQ ID NO: 5079; WAN024BE7; Start 256; Stop 280
gttggttcatcaaagaggaggagtt

SEQ ID NO: 399338 - DNA, 25 bp, Artificial
  probe
  misc_feature (1)..(25): SEQ ID NO: 5079; WAN024BE7; Start 239; Stop 263
caggatcaagagcagatgttggttc

SEQ ID NO: 399339 - DNA, 25 bp, Artificial
  probe
  misc_feature (1)..(25): SEQ ID NO: 5080; WAN024DQE; Start 75; Stop 99
cgagtttgccttctatcatcatcta

SEQ ID NO: 399340 - DNA, 25 bp, Artificial
  probe
  misc_feature (1)..(25): SEQ ID NO: 5080; WAN024DQE; Start 74; Stop 98
tcgagtttgccttctatcatcatct

SEQ ID NO: 399341 - DNA, 25 bp, Artificial
  probe
  misc_feature (1)..(25): SEQ ID NO: 5080; WAN024DQE; Start 73; Stop 97
gtcgagtttgccttctatcatcatc

SEQ ID NO: 399342 - DNA, 25 bp, Artificial
  probe
  misc_feature (1)..(25): SEQ ID NO: 5080; WAN024DQE; Start 72; Stop 96
agtcgagtttgccttctatcatcat

SEQ ID NO: 399343 - DNA, 25 bp, Artificial
  probe
  misc_feature (1)..(25): SEQ ID NO: 5080; WAN024DQE; Start 35; Stop 59
agaaatctctccctattataccaaa

SEQ ID NO: 399344 - DNA, 25 bp, Artificial
  probe
  misc_feature (1)..(25): SEQ ID NO: 5080; WAN024DQE; Start 34; Stop 58
aagaaatctctccctattataccaa

SEQ ID NO: 399345 - DNA, 25 bp, Artificial
  probe
  misc_feature (1)..(25): SEQ ID NO: 5080; WAN024DQE; Start 71; Stop 95
cagtcgagtttgccttctatcatca

SEQ ID NO: 399346 - DNA, 25 bp, Artificial
  probe
  misc_feature (1)..(25): SEQ ID NO: 5080; WAN024DQE; Start 24; Stop 48
tcctctttctaagaaatctctccct

SEQ ID NO: 399347 - DNA, 25 bp, Artificial
  probe
  misc_feature (1)..(25): SEQ ID NO: 5080; WAN024DQE; Start 23; Stop 47
atcctctttctaagaaatctctccc

SEQ ID NO: 399348 - DNA, 25 bp, Artificial
  probe
  misc_feature (1)..(25): SEQ ID NO: 5080; WAN024DQE; Start 25; Stop 49
cctctttctaagaaatctctcccta

SEQ ID NO: 399349 - DNA, 25 bp, Artificial
  probe
  misc_feature (1)..(25): SEQ ID NO: 5080; WAN024DQE; Start 9; Stop 33
ttcaaacatgataaatcctctttct

SEQ ID NO: 399350 - DNA, 25 bp, Artificial
  probe
  misc_feature (1)..(25): SEQ ID NO: 5080; WAN024DQE; Start 70; Stop 94
ccagtcgagtttgccttctatcatc

SEQ ID NO: 399351 - DNA, 25 bp, Artificial
  probe
  misc_feature (1)..(25): SEQ ID NO: 5080; WAN024DQE; Start 33; Stop 57
taagaaatctctccctattatacca

SEQ ID NO: 399352 - DNA, 25 bp, Artificial
  probe
  misc_feature (1)..(25): SEQ ID NO: 5080; WAN024DQE; Start 22; Stop 46
aatcctctttctaagaaatctctcc

SEQ ID NO: 399353 - DNA, 25 bp, Artificial
  probe
  misc_feature (1)..(25): SEQ ID NO: 5080; WAN024DQE; Start 8; Stop 32
tttcaaacatgataaatcctctttc

SEQ ID NO: 399354 - DNA, 25 bp, Artificial
  probe
  misc_feature (1)..(25): SEQ ID NO: 5080; WAN024DQE; Start 32; Stop 56
ctaagaaatctctccctattatacc

SEQ ID NO: 399355 - DNA, 25 bp, Artificial
  probe
  misc_feature (1)..(25): SEQ ID NO: 5080; WAN024DQE; Start 26; Stop 50
ctctttctaagaaatctctccctat

SEQ ID NO: 399356 - DNA, 25 bp, Artificial
  probe
  misc_feature (1)..(25): SEQ ID NO: 5080; WAN024DQE; Start 10; Stop 34
tcaaacatgataaatcctctttcta

SEQ ID NO: 399357 - DNA, 25 bp, Artificial
  probe
  misc_feature (1)..(25): SEQ ID NO: 5080; WAN024DQE; Start 11; Stop 35
caaacatgataaatcctctttctaa

SEQ ID NO: 399358 - DNA, 25 bp, Artificial
  probe
  misc_feature (1)..(25): SEQ ID NO: 5080; WAN024DQE; Start 69; Stop 93
cccagtcgagtttgccttctatcat

SEQ ID NO: 399359 - DNA, 25 bp, Artificial
  probe
  misc_feature (1)..(25): SEQ ID NO: 5080; WAN024DQE; Start 27; Stop 51
tctttctaagaaatctctccctatt

SEQ ID NO: 399360 - DNA, 25 bp, Artificial
  probe
  misc_feature (1)..(25): SEQ ID NO: 5080; WAN024DQE; Start 36; Stop 60
gaaatctctccctattataccaaaa

SEQ ID NO: 399361 - DNA, 25 bp, Artificial
  probe
  misc_feature (1)..(25): SEQ ID NO: 5080; WAN024DQE; Start 21; Stop 45
aaatcctctttctaagaaatctctc

SEQ ID NO: 399362 - DNA, 25 bp, Artificial
  probe
  misc_feature (1)..(25): SEQ ID NO: 5080; WAN024DQE; Start 67; Stop 91
aacccagtcgagtttgccttctatc

SEQ ID NO: 399363 - DNA, 25 bp, Artificial
  probe
  misc_feature (1)..(25): SEQ ID NO: 5080; WAN024DQE; Start 12; Stop 36
aaacatgataaatcctctttctaag

SEQ ID NO: 399364 - DNA, 25 bp, Artificial
  probe
  misc_feature (1)..(25): SEQ ID NO: 5080; WAN024DQE; Start 14; Stop 38
acatgataaatcctctttctaagaa

SEQ ID NO: 399365 - DNA, 25 bp, Artificial
  probe
  misc_feature (1)..(25): SEQ ID NO: 5080; WAN024DQE; Start 13; Stop 37
aacatgataaatcctctttctaaga

SEQ ID NO: 399366 - DNA, 25 bp, Artificial
  probe
  misc_feature (1)..(25): SEQ ID NO: 5080; WAN024DQE; Start 66; Stop 90
aaacccagtcgagtttgccttctat

SEQ ID NO: 399367 - DNA, 25 bp, Artificial
  probe
  misc_feature (1)..(25): SEQ ID NO: 5080; WAN024DQE; Start 28; Stop 52
ctttctaagaaatctctccctatta

SEQ ID NO: 399368 - DNA, 25 bp, Artificial
  probe
  misc_feature (1)..(25): SEQ ID NO: 5080; WAN024DQE; Start 7; Stop 31
ttttcaaacatgataaatcctcttt

SEQ ID NO: 399369 - DNA, 25 bp, Artificial
  probe
  misc_feature (1)..(25): SEQ ID NO: 5080; WAN024DQE; Start 20; Stop 44
taaatcctctttctaagaaatctct

SEQ ID NO: 399370 - DNA, 25 bp, Artificial
  probe
  misc_feature (1)..(25): SEQ ID NO: 5081; WAN024B7H; Start 1333; Stop 1357
aatcttgttctccttatagtgctgg

SEQ ID NO: 399371 - DNA, 25 bp, Artificial
  probe
  misc_feature (1)..(25): SEQ ID NO: 5081; WAN024B7H; Start 1077; Stop 1101
tgtgttgtctctaataataggtgct

SEQ ID NO: 399372 - DNA, 25 bp, Artificial
  probe
  misc_feature (1)..(25): SEQ ID NO: 5081; WAN024B7H; Start 1079; Stop 1103
tgttgtctctaataataggtgctct

SEQ ID NO: 399373 - DNA, 25 bp, Artificial
  probe
  misc_feature (1)..(25): SEQ ID NO: 5081; WAN024B7H; Start 1078; Stop 1102
gtgttgtctctaataataggtgctc

SEQ ID NO: 399374 - DNA, 25 bp, Artificial
  probe
  misc_feature (1)..(25): SEQ ID NO: 5081; WAN024B7H; Start 1076; Stop 1100
atgtgttgtctctaataataggtgc

SEQ ID NO: 399375 - DNA, 25 bp, Artificial
  probe
  misc_feature (1)..(25): SEQ ID NO: 5081; WAN024B7H; Start 709; Stop 733
ttaatggttggtgttaagcaagttg

SEQ ID NO: 399376 - DNA, 25 bp, Artificial
  probe
  misc_feature (1)..(25): SEQ ID NO: 5081; WAN024B7H; Start 277; Stop 301
cagttgctaatgtcggttctagtaa

SEQ ID NO: 399377 - DNA, 25 bp, Artificial
  probe
  misc_feature (1)..(25): SEQ ID NO: 5081; WAN024B7H; Start 789; Stop 813
attagaggctgttatgttaccacga

SEQ ID NO: 399378 - DNA, 25 bp, Artificial
  probe
  misc_feature (1)..(25): SEQ ID NO: 5081; WAN024B7H; Start 266; Stop 290
tctactatgtccagttgctaatgtc

SEQ ID NO: 399379 - DNA, 25 bp, Artificial
  probe
  misc_feature (1)..(25): SEQ ID NO: 5081; WAN024B7H; Start 288; Stop 312
gtcggttctagtaactatcgcatat

SEQ ID NO: 399380 - DNA, 25 bp, Artificial
  probe
  misc_feature (1)..(25): SEQ ID NO: 5081; WAN024B7H; Start 284; Stop 308
taatgtcggttctagtaactatcgc

SEQ ID NO: 399381 - DNA, 25 bp, Artificial
  probe
  misc_feature (1)..(25): SEQ ID NO: 5081; WAN024B7H; Start 290; Stop 314
cggttctagtaactatcgcatatct

SEQ ID NO: 399382 - DNA, 25 bp, Artificial
  probe
  misc_feature (1)..(25): SEQ ID NO: 5081; WAN024B7H; Start 289; Stop 313
tcggttctagtaactatcgcatatc

SEQ ID NO: 399383 - DNA, 25 bp, Artificial
  probe
  misc_feature (1)..(25): SEQ ID NO: 5081; WAN024B7H; Start 265; Stop 289
atctactatgtccagttgctaatgt

SEQ ID NO: 399384 - DNA, 25 bp, Artificial
  probe
  misc_feature (1)..(25): SEQ ID NO: 5081; WAN024B7H; Start 790; Stop 814
ttagaggctgttatgttaccacgaa

SEQ ID NO: 399385 - DNA, 25 bp, Artificial
  probe
  misc_feature (1)..(25): SEQ ID NO: 5081; WAN024B7H; Start 279; Stop 303
gttgctaatgtcggttctagtaact

SEQ ID NO: 399386 - DNA, 25 bp, Artificial
  probe
  misc_feature (1)..(25): SEQ ID NO: 5081; WAN024B7H; Start 278; Stop 302
agttgctaatgtcggttctagtaac

SEQ ID NO: 399387 - DNA, 25 bp, Artificial
  probe
  misc_feature (1)..(25): SEQ ID NO: 5081; WAN024B7H; Start 280; Stop 304
ttgctaatgtcggttctagtaacta

SEQ ID NO: 399388 - DNA, 25 bp, Artificial
  probe
  misc_feature (1)..(25): SEQ ID NO: 5081; WAN024B7H; Start 788; Stop 812
cattagaggctgttatgttaccacg

SEQ ID NO: 399389 - DNA, 25 bp, Artificial
  probe
  misc_feature (1)..(25): SEQ ID NO: 5081; WAN024B7H; Start 287; Stop 311
tgtcggttctagtaactatcgcata

SEQ ID NO: 399390 - DNA, 25 bp, Artificial
  probe
  misc_feature (1)..(25): SEQ ID NO: 5081; WAN024B7H; Start 281; Stop 305
tgctaatgtcggttctagtaactat

SEQ ID NO: 399391 - DNA, 25 bp, Artificial
  probe
  misc_feature (1)..(25): SEQ ID NO: 5081; WAN024B7H; Start 267; Stop 291
ctactatgtccagttgctaatgtcg

SEQ ID NO: 399392 - DNA, 25 bp, Artificial
  probe
  misc_feature (1)..(25): SEQ ID NO: 5081; WAN024B7H; Start 787; Stop 811
gcattagaggctgttatgttaccac

SEQ ID NO: 399393 - DNA, 25 bp, Artificial
  probe
  misc_feature (1)..(25): SEQ ID NO: 5081; WAN024B7H; Start 656; Stop 680
ttcctgtgttagcaatcagtatctt

SEQ ID NO: 399394 - DNA, 25 bp, Artificial
  probe
  misc_feature (1)..(25): SEQ ID NO: 5081; WAN024B7H; Start 653; Stop 677
tcattcctgtgttagcaatcagtat

SEQ ID NO: 399395 - DNA, 25 bp, Artificial
  probe
  misc_feature (1)..(25): SEQ ID NO: 5081; WAN024B7H; Start 655; Stop 679
attcctgtgttagcaatcagtatct

SEQ ID NO: 399396 - DNA, 25 bp, Artificial
  probe
  misc_feature (1)..(25): SEQ ID NO: 5081; WAN024B7H; Start 654; Stop 678
cattcctgtgttagcaatcagtatc

SEQ ID NO: 399397 - DNA, 25 bp, Artificial
  probe
  misc_feature (1)..(25): SEQ ID NO: 5081; WAN024B7H; Start 652; Stop 676
ttcattcctgtgttagcaatcagta

SEQ ID NO: 399398 - DNA, 25 bp, Artificial
  probe
  misc_feature (1)..(25): SEQ ID NO: 5081; WAN024B7H; Start 282; Stop 306
gctaatgtcggttctagtaactatc

SEQ ID NO: 399399 - DNA, 25 bp, Artificial
  probe
  misc_feature (1)..(25): SEQ ID NO: 5081; WAN024B7H; Start 286; Stop 310
atgtcggttctagtaactatcgcat

SEQ ID NO: 399400 - DNA, 25 bp, Artificial
  probe
  misc_feature (1)..(25): SEQ ID NO: 5081; WAN024B7H; Start 283; Stop 307
ctaatgtcggttctagtaactatcg

SEQ ID NO: 399401 - DNA, 25 bp, Artificial
  probe
  misc_feature (1)..(25): SEQ ID NO: 5081; WAN024B7H; Start 285; Stop 309
aatgtcggttctagtaactatcgca

SEQ ID NO: 399402 - DNA, 25 bp, Artificial
  probe
  misc_feature (1)..(25): SEQ ID NO: 5081; WAN024B7H; Start 710; Stop 734
taatggttggtgttaagcaagttgg

SEQ ID NO: 399403 - DNA, 25 bp, Artificial
  probe
  misc_feature (1)..(25): SEQ ID NO: 5082; WAN024GES; Start 23; Stop 47
ctaatggttacttggattttgtggg

SEQ ID NO: 399404 - DNA, 25 bp, Artificial
  probe
  misc_feature (1)..(25): SEQ ID NO: 5082; WAN024GES; Start 22; Stop 46
actaatggttacttggattttgtgg

SEQ ID NO: 399405 - DNA, 25 bp, Artificial
  probe
  misc_feature (1)..(25): SEQ ID NO: 5082; WAN024GES; Start 17; Stop 41
aaagaactaatggttacttggattt

SEQ ID NO: 399406 - DNA, 25 bp, Artificial
  probe
  misc_feature (1)..(25): SEQ ID NO: 5082; WAN024GES; Start 24; Stop 48
taatggttacttggattttgtgggc

SEQ ID NO: 399407 - DNA, 25 bp, Artificial
  probe
  misc_feature (1)..(25): SEQ ID NO: 5082; WAN024GES; Start 21; Stop 45
aactaatggttacttggattttgtg

SEQ ID NO: 399408 - DNA, 25 bp, Artificial
  probe
  misc_feature (1)..(25): SEQ ID NO: 5082; WAN024GES; Start 14; Stop 38
agaaaagaactaatggttacttgga

SEQ ID NO: 399409 - DNA, 25 bp, Artificial
  probe
  misc_feature (1)..(25): SEQ ID NO: 5082; WAN024GES; Start 11; Stop 35
tggagaaaagaactaatggttactt

SEQ ID NO: 399410 - DNA, 25 bp, Artificial
  probe
  misc_feature (1)..(25): SEQ ID NO: 5082; WAN024GES; Start 13; Stop 37
gagaaaagaactaatggttacttgg

SEQ ID NO: 399411 - DNA, 25 bp, Artificial
  probe
  misc_feature (1)..(25): SEQ ID NO: 5082; WAN024GES; Start 12; Stop 36
ggagaaaagaactaatggttacttg

SEQ ID NO: 399412 - DNA, 25 bp, Artificial
  probe
  misc_feature (1)..(25): SEQ ID NO: 5082; WAN024GES; Start 10; Stop 34
atggagaaaagaactaatggttact

SEQ ID NO: 399413 - DNA, 25 bp, Artificial
  probe
  misc_feature (1)..(25): SEQ ID NO: 5082; WAN024GES; Start 20; Stop 44
gaactaatggttacttggattttgt

SEQ ID NO: 399414 - DNA, 25 bp, Artificial
  probe
  misc_feature (1)..(25): SEQ ID NO: 5082; WAN024GES; Start 19; Stop 43
agaactaatggttacttggattttg

SEQ ID NO: 399415 - DNA, 25 bp, Artificial
  probe
  misc_feature (1)..(25): SEQ ID NO: 5082; WAN024GES; Start 15; Stop 39
gaaaagaactaatggttacttggat

SEQ ID NO: 399416 - DNA, 25 bp, Artificial
  probe
  misc_feature (1)..(25): SEQ ID NO: 5082; WAN024GES; Start 9; Stop 33
aatggagaaaagaactaatggttac

SEQ ID NO: 399417 - DNA, 25 bp, Artificial
  probe
  misc_feature (1)..(25): SEQ ID NO: 5082; WAN024GES; Start 7; Stop 31
aaaatggagaaaagaactaatggtt

SEQ ID NO: 399418 - DNA, 25 bp, Artificial
  probe
  misc_feature (1)..(25): SEQ ID NO: 5082; WAN024GES; Start 25; Stop 49
aatggttacttggattttgtgggca

SEQ ID NO: 399419 - DNA, 25 bp, Artificial
  probe
  misc_feature (1)..(25): SEQ ID NO: 5082; WAN024GES; Start 18; Stop 42
aagaactaatggttacttggatttt

SEQ ID NO: 399420 - DNA, 25 bp, Artificial
  probe
  misc_feature (1)..(25): SEQ ID NO: 5082; WAN024GES; Start 16; Stop 40
aaaagaactaatggttacttggatt

SEQ ID NO: 399421 - DNA, 25 bp, Artificial
  probe
  misc_feature (1)..(25): SEQ ID NO: 5082; WAN024GES; Start 8; Stop 32
aaatggagaaaagaactaatggtta

SEQ ID NO: 399422 - DNA, 25 bp, Artificial
  probe
  misc_feature (1)..(25): SEQ ID NO: 5083; WAN024BFI; Start 97; Stop 121
gaagtggtagaacgcattaagattg

SEQ ID NO: 399423 - DNA, 25 bp, Artificial
  probe
  misc_feature (1)..(25): SEQ ID NO: 5083; WAN024BFI; Start 96; Stop 120
agaagtggtagaacgcattaagatt

SEQ ID NO: 399424 - DNA, 25 bp, Artificial
  probe
  misc_feature (1)..(25): SEQ ID NO: 5083; WAN024BFI; Start 95; Stop 119
cagaagtggtagaacgcattaagat

SEQ ID NO: 399425 - DNA, 25 bp, Artificial
  probe
  misc_feature (1)..(25): SEQ ID NO: 5083; WAN024BFI; Start 300; Stop 324
aattggtgaggacgaagaagaagtt

SEQ ID NO: 399426 - DNA, 25 bp, Artificial
  probe
  misc_feature (1)..(25): SEQ ID NO: 5083; WAN024BFI; Start 304; Stop 328
ggtgaggacgaagaagaagtttata

SEQ ID NO: 399427 - DNA, 25 bp, Artificial
  probe
  misc_feature (1)..(25): SEQ ID NO: 5083; WAN024BFI; Start 68; Stop 92
tagaagaattgaaattggttcgtcg

SEQ ID NO: 399428 - DNA, 25 bp, Artificial
  probe
  misc_feature (1)..(25): SEQ ID NO: 5083; WAN024BFI; Start 303; Stop 327
tggtgaggacgaagaagaagtttat

SEQ ID NO: 399429 - DNA, 25 bp, Artificial
  probe
  misc_feature (1)..(25): SEQ ID NO: 5083; WAN024BFI; Start 305; Stop 329
gtgaggacgaagaagaagtttatat

SEQ ID NO: 399430 - DNA, 25 bp, Artificial
  probe
  misc_feature (1)..(25): SEQ ID NO: 5083; WAN024BFI; Start 302; Stop 326
ttggtgaggacgaagaagaagttta

SEQ ID NO: 399431 - DNA, 25 bp, Artificial
  probe
  misc_feature (1)..(25): SEQ ID NO: 5083; WAN024BFI; Start 298; Stop 322
gaaattggtgaggacgaagaagaag

SEQ ID NO: 399432 - DNA, 25 bp, Artificial
  probe
  misc_feature (1)..(25): SEQ ID NO: 5083; WAN024BFI; Start 306; Stop 330
tgaggacgaagaagaagtttatatt

SEQ ID NO: 399433 - DNA, 25 bp, Artificial
  probe
  misc_feature (1)..(25): SEQ ID NO: 5083; WAN024BFI; Start 67; Stop 91
ttagaagaattgaaattggttcgtc

SEQ ID NO: 399434 - DNA, 25 bp, Artificial
  probe
  misc_feature (1)..(25): SEQ ID NO: 5083; WAN024BFI; Start 297; Stop 321
agaaattggtgaggacgaagaagaa

SEQ ID NO: 399435 - DNA, 25 bp, Artificial
  probe
  misc_feature (1)..(25): SEQ ID NO: 5083; WAN024BFI; Start 296; Stop 320
aagaaattggtgaggacgaagaaga

SEQ ID NO: 399436 - DNA, 25 bp, Artificial
  probe
  misc_feature (1)..(25): SEQ ID NO: 5083; WAN024BFI; Start 301; Stop 325
attggtgaggacgaagaagaagttt

SEQ ID NO: 399437 - DNA, 25 bp, Artificial
  probe
  misc_feature (1)..(25): SEQ ID NO: 5083; WAN024BFI; Start 94; Stop 118
ccagaagtggtagaacgcattaaga

SEQ ID NO: 399438 - DNA, 25 bp, Artificial
  probe
  misc_feature (1)..(25): SEQ ID NO: 5083; WAN024BFI; Start 299; Stop 323
aaattggtgaggacgaagaagaagt

SEQ ID NO: 399439 - DNA, 25 bp, Artificial
  probe
  misc_feature (1)..(25): SEQ ID NO: 5083; WAN024BFI; Start 295; Stop 319
caagaaattggtgaggacgaagaag

SEQ ID NO: 399440 - DNA, 25 bp, Artificial
  probe
  misc_feature (1)..(25): SEQ ID NO: 5083; WAN024BFI; Start 66; Stop 90
attagaagaattgaaattggttcgt

SEQ ID NO: 399441 - DNA, 25 bp, Artificial
  probe
  misc_feature (1)..(25): SEQ ID NO: 5083; WAN024BFI; Start 98; Stop 122
aagtggtagaacgcattaagattgc

SEQ ID NO: 399442 - DNA, 25 bp, Artificial
  probe
  misc_feature (1)..(25): SEQ ID NO: 5083; WAN024BFI; Start 69; Stop 93
agaagaattgaaattggttcgtcga

SEQ ID NO: 399443 - DNA, 25 bp, Artificial
  probe
  misc_feature (1)..(25): SEQ ID NO: 5083; WAN024BFI; Start 220; Stop 244
atccgctatgctgaaatcgtcaata

SEQ ID NO: 399444 - DNA, 25 bp, Artificial
  probe
  misc_feature (1)..(25): SEQ ID NO: 5083; WAN024BFI; Start 187; Stop 211
gtcgaaggacaaatctctagcttag

SEQ ID NO: 399445 - DNA, 25 bp, Artificial
  probe
  misc_feature (1)..(25): SEQ ID NO: 5083; WAN024BFI; Start 320; Stop 344
aagtttatattatcgtaggttcagc

SEQ ID NO: 399446 - DNA, 25 bp, Artificial
  probe
  misc_feature (1)..(25): SEQ ID NO: 5083; WAN024BFI; Start 189; Stop 213
cgaaggacaaatctctagcttagaa

SEQ ID NO: 399447 - DNA, 25 bp, Artificial
  probe
  misc_feature (1)..(25): SEQ ID NO: 5083; WAN024BFI; Start 192; Stop 216
aggacaaatctctagcttagaaaca

SEQ ID NO: 399448 - DNA, 25 bp, Artificial
  probe
  misc_feature (1)..(25): SEQ ID NO: 5083; WAN024BFI; Start 278; Stop 302
gtaaaacagtcaccatccaagaaat

SEQ ID NO: 399449 - DNA, 25 bp, Artificial
  probe
  misc_feature (1)..(25): SEQ ID NO: 5083; WAN024BFI; Start 188; Stop 212
tcgaaggacaaatctctagcttaga

SEQ ID NO: 399450 - DNA, 25 bp, Artificial
  probe
  misc_feature (1)..(25): SEQ ID NO: 5083; WAN024BFI; Start 193; Stop 217
ggacaaatctctagcttagaaacaa

SEQ ID NO: 399451 - DNA, 25 bp, Artificial
  probe
  misc_feature (1)..(25): SEQ ID NO: 5083; WAN024BFI; Start 279; Stop 303
taaaacagtcaccatccaagaaatt

SEQ ID NO: 399452 - DNA, 25 bp, Artificial
  probe
  misc_feature (1)..(25): SEQ ID NO: 5083; WAN024BFI; Start 221; Stop 245
tccgctatgctgaaatcgtcaatag

SEQ ID NO: 399453 - DNA, 25 bp, Artificial
  probe
  misc_feature (1)..(25): SEQ ID NO: 5083; WAN024BFI; Start 219; Stop 243
aatccgctatgctgaaatcgtcaat

SEQ ID NO: 399454 - DNA, 25 bp, Artificial
  probe
  misc_feature (1)..(25): SEQ ID NO: 5083; WAN024BFI; Start 321; Stop 345
agtttatattatcgtaggttcagct

SEQ ID NO: 399455 - DNA, 25 bp, Artificial
  probe
  misc_feature (1)..(25): SEQ ID NO: 5084; WAN024B6C; Start 112; Stop 136
agattcaaggacgctaacacatcaa

SEQ ID NO: 399456 - DNA, 25 bp, Artificial
  probe
  misc_feature (1)..(25): SEQ ID NO: 5084; WAN024B6C; Start 111; Stop 135
aagattcaaggacgctaacacatca

SEQ ID NO: 399457 - DNA, 25 bp, Artificial
  probe
  misc_feature (1)..(25): SEQ ID NO: 5084; WAN024B6C; Start 123; Stop 147
cgctaacacatcaaatccattcaat

SEQ ID NO: 399458 - DNA, 25 bp, Artificial
  probe
  misc_feature (1)..(25): SEQ ID NO: 5084; WAN024B6C; Start 114; Stop 138
attcaaggacgctaacacatcaaat

SEQ ID NO: 399459 - DNA, 25 bp, Artificial
  probe
  misc_feature (1)..(25): SEQ ID NO: 5084; WAN024B6C; Start 122; Stop 146
acgctaacacatcaaatccattcaa

SEQ ID NO: 399460 - DNA, 25 bp, Artificial
  probe
  misc_feature (1)..(25): SEQ ID NO: 5084; WAN024B6C; Start 110; Stop 134
aaagattcaaggacgctaacacatc

SEQ ID NO: 399461 - DNA, 25 bp, Artificial
  probe
  misc_feature (1)..(25): SEQ ID NO: 5084; WAN024B6C; Start 115; Stop 139
ttcaaggacgctaacacatcaaatc

SEQ ID NO: 399462 - DNA, 25 bp, Artificial
  probe
  misc_feature (1)..(25): SEQ ID NO: 5084; WAN024B6C; Start 30; Stop 54
cgtttctacagttgtctttctttgt

SEQ ID NO: 399463 - DNA, 25 bp, Artificial
  probe
  misc_feature (1)..(25): SEQ ID NO: 5084; WAN024B6C; Start 113; Stop 137
gattcaaggacgctaacacatcaaa

SEQ ID NO: 399464 - DNA, 25 bp, Artificial
  probe
  misc_feature (1)..(25): SEQ ID NO: 5084; WAN024B6C; Start 121; Stop 145
gacgctaacacatcaaatccattca

SEQ ID NO: 399465 - DNA, 25 bp, Artificial
  probe
  misc_feature (1)..(25): SEQ ID NO: 5084; WAN024B6C; Start 124; Stop 148
gctaacacatcaaatccattcaata

SEQ ID NO: 399466 - DNA, 25 bp, Artificial
  probe
  misc_feature (1)..(25): SEQ ID NO: 5084; WAN024B6C; Start 37; Stop 61
acagttgtctttctttgtataacca

SEQ ID NO: 399467 - DNA, 25 bp, Artificial
  probe
  misc_feature (1)..(25): SEQ ID NO: 5084; WAN024B6C; Start 38; Stop 62
cagttgtctttctttgtataaccat

SEQ ID NO: 399468 - DNA, 25 bp, Artificial
  probe
  misc_feature (1)..(25): SEQ ID NO: 5084; WAN024B6C; Start 29; Stop 53
acgtttctacagttgtctttctttg

SEQ ID NO: 399469 - DNA, 25 bp, Artificial
  probe
  misc_feature (1)..(25): SEQ ID NO: 5084; WAN024B6C; Start 40; Stop 64
gttgtctttctttgtataaccatct

SEQ ID NO: 399470 - DNA, 25 bp, Artificial
  probe
  misc_feature (1)..(25): SEQ ID NO: 5084; WAN024B6C; Start 39; Stop 63
agttgtctttctttgtataaccatc

SEQ ID NO: 399471 - DNA, 25 bp, Artificial
  probe
  misc_feature (1)..(25): SEQ ID NO: 5084; WAN024B6C; Start 230; Stop 254
ttggtacaagtagcataatcattaa

SEQ ID NO: 399472 - DNA, 25 bp, Artificial
  probe
  misc_feature (1)..(25): SEQ ID NO: 5084; WAN024B6C; Start 133; Stop 157
tcaaatccattcaatatagtctcac

SEQ ID NO: 399473 - DNA, 25 bp, Artificial
  probe
  misc_feature (1)..(25): SEQ ID NO: 5084; WAN024B6C; Start 107; Stop 131
ataaaagattcaaggacgctaacac

SEQ ID NO: 399474 - DNA, 25 bp, Artificial
  probe
  misc_feature (1)..(25): SEQ ID NO: 5084; WAN024B6C; Start 108; Stop 132
taaaagattcaaggacgctaacaca

SEQ ID NO: 399475 - DNA, 25 bp, Artificial
  probe
  misc_feature (1)..(25): SEQ ID NO: 5084; WAN024B6C; Start 42; Stop 66
tgtctttctttgtataaccatcttt

SEQ ID NO: 399476 - DNA, 25 bp, Artificial
  probe
  misc_feature (1)..(25): SEQ ID NO: 5084; WAN024B6C; Start 41; Stop 65
ttgtctttctttgtataaccatctt

SEQ ID NO: 399477 - DNA, 25 bp, Artificial
  probe
  misc_feature (1)..(25): SEQ ID NO: 5084; WAN024B6C; Start 251; Stop 275
ttaatgaaaacaaggtggctacagt

SEQ ID NO: 399478 - DNA, 25 bp, Artificial
  probe
  misc_feature (1)..(25): SEQ ID NO: 5084; WAN024B6C; Start 231; Stop 255
tggtacaagtagcataatcattaat

SEQ ID NO: 399479 - DNA, 25 bp, Artificial
  probe
  misc_feature (1)..(25): SEQ ID NO: 5084; WAN024B6C; Start 120; Stop 144
ggacgctaacacatcaaatccattc

SEQ ID NO: 399480 - DNA, 25 bp, Artificial
  probe
  misc_feature (1)..(25): SEQ ID NO: 5084; WAN024B6C; Start 252; Stop 276
taatgaaaacaaggtggctacagtc

SEQ ID NO: 399481 - DNA, 25 bp, Artificial
  probe
  misc_feature (1)..(25): SEQ ID NO: 5084; WAN024B6C; Start 128; Stop 152
acacatcaaatccattcaatatagt

SEQ ID NO: 399482 - DNA, 25 bp, Artificial
  probe
  misc_feature (1)..(25): SEQ ID NO: 5084; WAN024B6C; Start 109; Stop 133
aaaagattcaaggacgctaacacat

SEQ ID NO: 399483 - DNA, 25 bp, Artificial
  probe
  misc_feature (1)..(25): SEQ ID NO: 5084; WAN024B6C; Start 193; Stop 217
tttagactaacttctcgcattttcg

SEQ ID NO: 399484 - DNA, 25 bp, Artificial
  probe
  misc_feature (1)..(25): SEQ ID NO: 5084; WAN024B6C; Start 138; Stop 162
tccattcaatatagtctcactagat

SEQ ID NO: 399485 - DNA, 25 bp, Artificial
  probe
  misc_feature (1)..(25): SEQ ID NO: 5084; WAN024B6C; Start 137; Stop 161
atccattcaatatagtctcactaga

SEQ ID NO: 399486 - DNA, 25 bp, Artificial
  probe
  misc_feature (1)..(25): SEQ ID NO: 5084; WAN024B6C; Start 134; Stop 158
caaatccattcaatatagtctcact

SEQ ID NO: 399487 - DNA, 25 bp, Artificial
  probe
  misc_feature (1)..(25): SEQ ID NO: 5084; WAN024B6C; Start 119; Stop 143
aggacgctaacacatcaaatccatt

SEQ ID NO: 399488 - DNA, 25 bp, Artificial
  probe
  misc_feature (1)..(25): SEQ ID NO: 5085; WAN024FZ8; Start 412; Stop 436
gcttatgatgctattgaagatacgg

SEQ ID NO: 399489 - DNA, 25 bp, Artificial
  probe
  misc_feature (1)..(25): SEQ ID NO: 5085; WAN024FZ8; Start 411; Stop 435
ggcttatgatgctattgaagatacg

SEQ ID NO: 399490 - DNA, 25 bp, Artificial
  probe
  misc_feature (1)..(25): SEQ ID NO: 5085; WAN024FZ8; Start 90; Stop 114
ccaagagaatcatatccttatccgt

SEQ ID NO: 399491 - DNA, 25 bp, Artificial
  probe
  misc_feature (1)..(25): SEQ ID NO: 5085; WAN024FZ8; Start 89; Stop 113
accaagagaatcatatccttatccg

SEQ ID NO: 399492 - DNA, 25 bp, Artificial
  probe
  misc_feature (1)..(25): SEQ ID NO: 5085; WAN024FZ8; Start 92; Stop 116
aagagaatcatatccttatccgtcc

SEQ ID NO: 399493 - DNA, 25 bp, Artificial
  probe
  misc_feature (1)..(25): SEQ ID NO: 5085; WAN024FZ8; Start 76; Stop 100
gaagaggctattgaccaagagaatc

SEQ ID NO: 399494 - DNA, 25 bp, Artificial
  probe
  misc_feature (1)..(25): SEQ ID NO: 5085; WAN024FZ8; Start 415; Stop 439
tatgatgctattgaagatacggttg

SEQ ID NO: 399495 - DNA, 25 bp, Artificial
  probe
  misc_feature (1)..(25): SEQ ID NO: 5085; WAN024FZ8; Start 592; Stop 616
gagattgtggttattggtcgtcatt

SEQ ID NO: 399496 - DNA, 25 bp, Artificial
  probe
  misc_feature (1)..(25): SEQ ID NO: 5085; WAN024FZ8; Start 408; Stop 432
ggtggcttatgatgctattgaagat

SEQ ID NO: 399497 - DNA, 25 bp, Artificial
  probe
  misc_feature (1)..(25): SEQ ID NO: 5085; WAN024FZ8; Start 416; Stop 440
atgatgctattgaagatacggttgc

SEQ ID NO: 399498 - DNA, 25 bp, Artificial
  probe
  misc_feature (1)..(25): SEQ ID NO: 5085; WAN024FZ8; Start 79; Stop 103
gaggctattgaccaagagaatcata

SEQ ID NO: 399499 - DNA, 25 bp, Artificial
  probe
  misc_feature (1)..(25): SEQ ID NO: 5085; WAN024FZ8; Start 410; Stop 434
tggcttatgatgctattgaagatac

SEQ ID NO: 399500 - DNA, 25 bp, Artificial
  probe
  misc_feature (1)..(25): SEQ ID NO: 5085; WAN024FZ8; Start 409; Stop 433
gtggcttatgatgctattgaagata

SEQ ID NO: 399501 - DNA, 25 bp, Artificial
  probe
  misc_feature (1)..(25): SEQ ID NO: 5085; WAN024FZ8; Start 91; Stop 115
caagagaatcatatccttatccgtc

SEQ ID NO: 399502 - DNA, 25 bp, Artificial
  probe
  misc_feature (1)..(25): SEQ ID NO: 5085; WAN024FZ8; Start 593; Stop 617
agattgtggttattggtcgtcattg

SEQ ID NO: 399503 - DNA, 25 bp, Artificial
  probe
  misc_feature (1)..(25): SEQ ID NO: 5085; WAN024FZ8; Start 80; Stop 104
aggctattgaccaagagaatcatat

SEQ ID NO: 399504 - DNA, 25 bp, Artificial
  probe
  misc_feature (1)..(25): SEQ ID NO: 5085; WAN024FZ8; Start 413; Stop 437
cttatgatgctattgaagatacggt

SEQ ID NO: 399505 - DNA, 25 bp, Artificial
  probe
  misc_feature (1)..(25): SEQ ID NO: 5085; WAN024FZ8; Start 82; Stop 106
gctattgaccaagagaatcatatcc

SEQ ID NO: 399506 - DNA, 25 bp, Artificial
  probe
  misc_feature (1)..(25): SEQ ID NO: 5085; WAN024FZ8; Start 81; Stop 105
ggctattgaccaagagaatcatatc

SEQ ID NO: 399507 - DNA, 25 bp, Artificial
  probe
  misc_feature (1)..(25): SEQ ID NO: 5085; WAN024FZ8; Start 69; Stop 93
atatcaggaagaggctattgaccaa

SEQ ID NO: 399508 - DNA, 25 bp, Artificial
  probe
  misc_feature (1)..(25): SEQ ID NO: 5085; WAN024FZ8; Start 68; Stop 92
aatatcaggaagaggctattgacca

SEQ ID NO: 399509 - DNA, 25 bp, Artificial
  probe
  misc_feature (1)..(25): SEQ ID NO: 5085; WAN024FZ8; Start 414; Stop 438
ttatgatgctattgaagatacggtt

SEQ ID NO: 399510 - DNA, 25 bp, Artificial
  probe
  misc_feature (1)..(25): SEQ ID NO: 5085; WAN024FZ8; Start 78; Stop 102
agaggctattgaccaagagaatcat

SEQ ID NO: 399511 - DNA, 25 bp, Artificial
  probe
  misc_feature (1)..(25): SEQ ID NO: 5085; WAN024FZ8; Start 88; Stop 112
gaccaagagaatcatatccttatcc

SEQ ID NO: 399512 - DNA, 25 bp, Artificial
  probe
  misc_feature (1)..(25): SEQ ID NO: 5085; WAN024FZ8; Start 591; Stop 615
agagattgtggttattggtcgtcat

SEQ ID NO: 399513 - DNA, 25 bp, Artificial
  probe
  misc_feature (1)..(25): SEQ ID NO: 5085; WAN024FZ8; Start 482; Stop 506
atcgtctattgactcttgctcatag

SEQ ID NO: 399514 - DNA, 25 bp, Artificial
  probe
  misc_feature (1)..(25): SEQ ID NO: 5085; WAN024FZ8; Start 77; Stop 101
aagaggctattgaccaagagaatca

SEQ ID NO: 399515 - DNA, 25 bp, Artificial
  probe
  misc_feature (1)..(25): SEQ ID NO: 5085; WAN024FZ8; Start 481; Stop 505
aatcgtctattgactcttgctcata

SEQ ID NO: 399516 - DNA, 25 bp, Artificial
  probe
  misc_feature (1)..(25): SEQ ID NO: 5085; WAN024FZ8; Start 477; Stop 501
tatgaatcgtctattgactcttgct

SEQ ID NO: 399517 - DNA, 25 bp, Artificial
  probe
  misc_feature (1)..(25): SEQ ID NO: 5085; WAN024FZ8; Start 75; Stop 99
ggaagaggctattgaccaagagaat

SEQ ID NO: 399518 - DNA, 25 bp, Artificial
  probe
  misc_feature (1)..(25): SEQ ID NO: 5085; WAN024FZ8; Start 476; Stop 500
ctatgaatcgtctattgactcttgc

SEQ ID NO: 399519 - DNA, 25 bp, Artificial
  probe
  misc_feature (1)..(25): SEQ ID NO: 5085; WAN024FZ8; Start 475; Stop 499
gctatgaatcgtctattgactcttg

SEQ ID NO: 399520 - DNA, 25 bp, Artificial
  probe
  misc_feature (1)..(25): SEQ ID NO: 5085; WAN024FZ8; Start 474; Stop 498
cgctatgaatcgtctattgactctt

SEQ ID NO: 399521 - DNA, 25 bp, Artificial
  probe
  misc_feature (1)..(25): SEQ ID NO: 5086; WAN024C5Q; Start 211; Stop 235
agcaggatacatcacattggcatat

SEQ ID NO: 399522 - DNA, 25 bp, Artificial
  probe
  misc_feature (1)..(25): SEQ ID NO: 5086; WAN024C5Q; Start 210; Stop 234
aagcaggatacatcacattggcata

SEQ ID NO: 399523 - DNA, 25 bp, Artificial
  probe
  misc_feature (1)..(25): SEQ ID NO: 5086; WAN024C5Q; Start 212; Stop 236
gcaggatacatcacattggcatatc

SEQ ID NO: 399524 - DNA, 25 bp, Artificial
  probe
  misc_feature (1)..(25): SEQ ID NO: 5086; WAN024C5Q; Start 205; Stop 229
tttcaaagcaggatacatcacattg

SEQ ID NO: 399525 - DNA, 25 bp, Artificial
  probe
  misc_feature (1)..(25): SEQ ID NO: 5086; WAN024C5Q; Start 231; Stop 255
catatcccaacccttgatagttact

SEQ ID NO: 399526 - DNA, 25 bp, Artificial
  probe
  misc_feature (1)..(25): SEQ ID NO: 5086; WAN024C5Q; Start 179; Stop 203
ccttcctgatcctctccatagtgtt

SEQ ID NO: 399527 - DNA, 25 bp, Artificial
  probe
  misc_feature (1)..(25): SEQ ID NO: 5086; WAN024C5Q; Start 177; Stop 201
aaccttcctgatcctctccatagtg

SEQ ID NO: 399528 - DNA, 25 bp, Artificial
  probe
  misc_feature (1)..(25): SEQ ID NO: 5086; WAN024C5Q; Start 88; Stop 112
caacattacaagatgcaagctggta

SEQ ID NO: 399529 - DNA, 25 bp, Artificial
  probe
  misc_feature (1)..(25): SEQ ID NO: 5086; WAN024C5Q; Start 206; Stop 230
ttcaaagcaggatacatcacattgg

SEQ ID NO: 399530 - DNA, 25 bp, Artificial
  probe
  misc_feature (1)..(25): SEQ ID NO: 5086; WAN024C5Q; Start 230; Stop 254
gcatatcccaacccttgatagttac

SEQ ID NO: 399531 - DNA, 25 bp, Artificial
  probe
  misc_feature (1)..(25): SEQ ID NO: 5086; WAN024C5Q; Start 180; Stop 204
cttcctgatcctctccatagtgttt

SEQ ID NO: 399532 - DNA, 25 bp, Artificial
  probe
  misc_feature (1)..(25): SEQ ID NO: 5086; WAN024C5Q; Start 120; Stop 144
gcaggaagtgtgggttggtattata

SEQ ID NO: 399533 - DNA, 25 bp, Artificial
  probe
  misc_feature (1)..(25): SEQ ID NO: 5086; WAN024C5Q; Start 85; Stop 109
ttccaacattacaagatgcaagctg

SEQ ID NO: 399534 - DNA, 25 bp, Artificial
  probe
  misc_feature (1)..(25): SEQ ID NO: 5086; WAN024C5Q; Start 89; Stop 113
aacattacaagatgcaagctggtaa

SEQ ID NO: 399535 - DNA, 25 bp, Artificial
  probe
  misc_feature (1)..(25): SEQ ID NO: 5086; WAN024C5Q; Start 229; Stop 253
ggcatatcccaacccttgatagtta

SEQ ID NO: 399536 - DNA, 25 bp, Artificial
  probe
  misc_feature (1)..(25): SEQ ID NO: 5086; WAN024C5Q; Start 175; Stop 199
gaaaccttcctgatcctctccatag

SEQ ID NO: 399537 - DNA, 25 bp, Artificial
  probe
  misc_feature (1)..(25): SEQ ID NO: 5086; WAN024C5Q; Start 232; Stop 256
atatcccaacccttgatagttacta

SEQ ID NO: 399538 - DNA, 25 bp, Artificial
  probe
  misc_feature (1)..(25): SEQ ID NO: 5086; WAN024C5Q; Start 176; Stop 200
aaaccttcctgatcctctccatagt

SEQ ID NO: 399539 - DNA, 25 bp, Artificial
  probe
  misc_feature (1)..(25): SEQ ID NO: 5086; WAN024C5Q; Start 174; Stop 198
agaaaccttcctgatcctctccata

SEQ ID NO: 399540 - DNA, 25 bp, Artificial
  probe
  misc_feature (1)..(25): SEQ ID NO: 5086; WAN024C5Q; Start 173; Stop 197
tagaaaccttcctgatcctctccat

SEQ ID NO: 399541 - DNA, 25 bp, Artificial
  probe
  misc_feature (1)..(25): SEQ ID NO: 5086; WAN024C5Q; Start 209; Stop 233
aaagcaggatacatcacattggcat

SEQ ID NO: 399542 - DNA, 25 bp, Artificial
  probe
  misc_feature (1)..(25): SEQ ID NO: 5086; WAN024C5Q; Start 178; Stop 202
accttcctgatcctctccatagtgt

SEQ ID NO: 399543 - DNA, 25 bp, Artificial
  probe
  misc_feature (1)..(25): SEQ ID NO: 5086; WAN024C5Q; Start 234; Stop 258
atcccaacccttgatagttactata

SEQ ID NO: 399544 - DNA, 25 bp, Artificial
  probe
  misc_feature (1)..(25): SEQ ID NO: 5086; WAN024C5Q; Start 233; Stop 257
tatcccaacccttgatagttactat

SEQ ID NO: 399545 - DNA, 25 bp, Artificial
  probe
  misc_feature (1)..(25): SEQ ID NO: 5086; WAN024C5Q; Start 84; Stop 108
tttccaacattacaagatgcaagct

SEQ ID NO: 399546 - DNA, 25 bp, Artificial
  probe
  misc_feature (1)..(25): SEQ ID NO: 5086; WAN024C5Q; Start 235; Stop 259
tcccaacccttgatagttactatag

SEQ ID NO: 399547 - DNA, 25 bp, Artificial
  probe
  misc_feature (1)..(25): SEQ ID NO: 5086; WAN024C5Q; Start 204; Stop 228
ttttcaaagcaggatacatcacatt

SEQ ID NO: 399548 - DNA, 25 bp, Artificial
  probe
  misc_feature (1)..(25): SEQ ID NO: 5086; WAN024C5Q; Start 45; Stop 69
ccatcttgatgctacgtgtttcttt

SEQ ID NO: 399549 - DNA, 25 bp, Artificial
  probe
  misc_feature (1)..(25): SEQ ID NO: 5086; WAN024C5Q; Start 172; Stop 196
gtagaaaccttcctgatcctctcca

SEQ ID NO: 399550 - DNA, 25 bp, Artificial
  probe
  misc_feature (1)..(25): SEQ ID NO: 5086; WAN024C5Q; Start 168; Stop 192
cttggtagaaaccttcctgatcctc

SEQ ID NO: 399551 - DNA, 25 bp, Artificial
  probe
  misc_feature (1)..(25): SEQ ID NO: 5086; WAN024C5Q; Start 93; Stop 117
ttacaagatgcaagctggtaataaa

SEQ ID NO: 399552 - DNA, 25 bp, Artificial
  probe
  misc_feature (1)..(25): SEQ ID NO: 5086; WAN024C5Q; Start 146; Stop 170
aattcacagttttcttccaaggctt

SEQ ID NO: 399553 - DNA, 25 bp, Artificial
  probe
  misc_feature (1)..(25): SEQ ID NO: 5086; WAN024C5Q; Start 2; Stop 26
tgagaaagagaatccccaatacctg

SEQ ID NO: 399554 - DNA, 25 bp, Artificial
  probe
  misc_feature (1)..(25): SEQ ID NO: 5087; WAN024DJL; Start 1218; Stop 1242
aggaatgagattgactaagcaagaa

SEQ ID NO: 399555 - DNA, 25 bp, Artificial
  probe
  misc_feature (1)..(25): SEQ ID NO: 5087; WAN024DJL; Start 1217; Stop 1241
taggaatgagattgactaagcaaga

SEQ ID NO: 399556 - DNA, 25 bp, Artificial
  probe
  misc_feature (1)..(25): SEQ ID NO: 5087; WAN024DJL; Start 108; Stop 132
tggtgttactcctgttattgttatt

SEQ ID NO: 399557 - DNA, 25 bp, Artificial
  probe
  misc_feature (1)..(25): SEQ ID NO: 5087; WAN024DJL; Start 106; Stop 130
aatggtgttactcctgttattgtta

SEQ ID NO: 399558 - DNA, 25 bp, Artificial
  probe
  misc_feature (1)..(25): SEQ ID NO: 5087; WAN024DJL; Start 1216; Stop 1240
ataggaatgagattgactaagcaag

SEQ ID NO: 399559 - DNA, 25 bp, Artificial
  probe
  misc_feature (1)..(25): SEQ ID NO: 5087; WAN024DJL; Start 107; Stop 131
atggtgttactcctgttattgttat

SEQ ID NO: 399560 - DNA, 25 bp, Artificial
  probe
  misc_feature (1)..(25): SEQ ID NO: 5087; WAN024DJL; Start 741; Stop 765
aattatagtagtctctctctgccta

SEQ ID NO: 399561 - DNA, 25 bp, Artificial
  probe
  misc_feature (1)..(25): SEQ ID NO: 5087; WAN024DJL; Start 1214; Stop 1238
ttataggaatgagattgactaagca

SEQ ID NO: 399562 - DNA, 25 bp, Artificial
  probe
  misc_feature (1)..(25): SEQ ID NO: 5087; WAN024DJL; Start 828; Stop 852
ttatggactggctgatggttctcta

SEQ ID NO: 399563 - DNA, 25 bp, Artificial
  probe
  misc_feature (1)..(25): SEQ ID NO: 5087; WAN024DJL; Start 909; Stop 933
aaaggctattattgggtcaggattt

SEQ ID NO: 399564 - DNA, 25 bp, Artificial
  probe
  misc_feature (1)..(25): SEQ ID NO: 5087; WAN024DJL; Start 814; Stop 838
tcttcactttatcgttatggactgg

SEQ ID NO: 399565 - DNA, 25 bp, Artificial
  probe
  misc_feature (1)..(25): SEQ ID NO: 5087; WAN024DJL; Start 908; Stop 932
taaaggctattattgggtcaggatt

SEQ ID NO: 399566 - DNA, 25 bp, Artificial
  probe
  misc_feature (1)..(25): SEQ ID NO: 5087; WAN024DJL; Start 143; Stop 167
tgtcggcattgtattctttatatcg

SEQ ID NO: 399567 - DNA, 25 bp, Artificial
  probe
  misc_feature (1)..(25): SEQ ID NO: 5087; WAN024DJL; Start 910; Stop 934
aaggctattattgggtcaggatttg

SEQ ID NO: 399568 - DNA, 25 bp, Artificial
  probe
  misc_feature (1)..(25): SEQ ID NO: 5087; WAN024DJL; Start 104; Stop 128
gaaatggtgttactcctgttattgt

SEQ ID NO: 399569 - DNA, 25 bp, Artificial
  probe
  misc_feature (1)..(25): SEQ ID NO: 5087; WAN024DJL; Start 859; Stop 883
cgtattggaactcttagaaattggg

SEQ ID NO: 399570 - DNA, 25 bp, Artificial
  probe
  misc_feature (1)..(25): SEQ ID NO: 5087; WAN024DJL; Start 1215; Stop 1239
tataggaatgagattgactaagcaa

SEQ ID NO: 399571 - DNA, 25 bp, Artificial
  probe
  misc_feature (1)..(25): SEQ ID NO: 5087; WAN024DJL; Start 914; Stop 938
ctattattgggtcaggatttggtgg

SEQ ID NO: 399572 - DNA, 25 bp, Artificial
  probe
  misc_feature (1)..(25): SEQ ID NO: 5087; WAN024DJL; Start 851; Stop 875
taggtcaacgtattggaactcttag

SEQ ID NO: 399573 - DNA, 25 bp, Artificial
  probe
  misc_feature (1)..(25): SEQ ID NO: 5087; WAN024DJL; Start 850; Stop 874
ctaggtcaacgtattggaactctta

SEQ ID NO: 399574 - DNA, 25 bp, Artificial
  probe
  misc_feature (1)..(25): SEQ ID NO: 5087; WAN024DJL; Start 813; Stop 837
ttcttcactttatcgttatggactg

SEQ ID NO: 399575 - DNA, 25 bp, Artificial
  probe
  misc_feature (1)..(25): SEQ ID NO: 5087; WAN024DJL; Start 559; Stop 583
gttatcccatataagaaccgagtgt

SEQ ID NO: 399576 - DNA, 25 bp, Artificial
  probe
  misc_feature (1)..(25): SEQ ID NO: 5087; WAN024DJL; Start 558; Stop 582
tgttatcccatataagaaccgagtg

SEQ ID NO: 399577 - DNA, 25 bp, Artificial
  probe
  misc_feature (1)..(25): SEQ ID NO: 5087; WAN024DJL; Start 853; Stop 877
ggtcaacgtattggaactcttagaa

SEQ ID NO: 399578 - DNA, 25 bp, Artificial
  probe
  misc_feature (1)..(25): SEQ ID NO: 5087; WAN024DJL; Start 445; Stop 469
gcagttaaatggatacaaacgatga

SEQ ID NO: 399579 - DNA, 25 bp, Artificial
  probe
  misc_feature (1)..(25): SEQ ID NO: 5087; WAN024DJL; Start 105; Stop 129
aaatggtgttactcctgttattgtt

SEQ ID NO: 399580 - DNA, 25 bp, Artificial
  probe
  misc_feature (1)..(25): SEQ ID NO: 5087; WAN024DJL; Start 563; Stop 587
tcccatataagaaccgagtgttaaa

SEQ ID NO: 399581 - DNA, 25 bp, Artificial
  probe
  misc_feature (1)..(25): SEQ ID NO: 5087; WAN024DJL; Start 560; Stop 584
ttatcccatataagaaccgagtgtt

SEQ ID NO: 399582 - DNA, 25 bp, Artificial
  probe
  misc_feature (1)..(25): SEQ ID NO: 5087; WAN024DJL; Start 557; Stop 581
ttgttatcccatataagaaccgagt

SEQ ID NO: 399583 - DNA, 25 bp, Artificial
  probe
  misc_feature (1)..(25): SEQ ID NO: 5087; WAN024DJL; Start 995; Stop 1019
caacagtgacaagtttccttattga

SEQ ID NO: 399584 - DNA, 25 bp, Artificial
  probe
  misc_feature (1)..(25): SEQ ID NO: 5087; WAN024DJL; Start 562; Stop 586
atcccatataagaaccgagtgttaa

SEQ ID NO: 399585 - DNA, 25 bp, Artificial
  probe
  misc_feature (1)..(25): SEQ ID NO: 5087; WAN024DJL; Start 907; Stop 931
ataaaggctattattgggtcaggat

SEQ ID NO: 399586 - DNA, 25 bp, Artificial
  probe
  misc_feature (1)..(25): SEQ ID NO: 5087; WAN024DJL; Start 930; Stop 954
atttggtggtgtcaatagttacttg

SEQ ID NO: 399587 - DNA, 25 bp, Artificial
  probe
  misc_feature (1)..(25): SEQ ID NO: 5088; WAN024GC4; Start 172; Stop 196
atattaccatcactcgcagaaccag

SEQ ID NO: 399588 - DNA, 25 bp, Artificial
  probe
  misc_feature (1)..(25): SEQ ID NO: 5088; WAN024GC4; Start 169; Stop 193
tccatattaccatcactcgcagaac

SEQ ID NO: 399589 - DNA, 25 bp, Artificial
  probe
  misc_feature (1)..(25): SEQ ID NO: 5088; WAN024GC4; Start 168; Stop 192
gtccatattaccatcactcgcagaa

SEQ ID NO: 399590 - DNA, 25 bp, Artificial
  probe
  misc_feature (1)..(25): SEQ ID NO: 5088; WAN024GC4; Start 171; Stop 195
catattaccatcactcgcagaacca

SEQ ID NO: 399591 - DNA, 25 bp, Artificial
  probe
  misc_feature (1)..(25): SEQ ID NO: 5088; WAN024GC4; Start 158; Stop 182
tatttcctgcgtccatattaccatc

SEQ ID NO: 399592 - DNA, 25 bp, Artificial
  probe
  misc_feature (1)..(25): SEQ ID NO: 5088; WAN024GC4; Start 157; Stop 181
atatttcctgcgtccatattaccat

SEQ ID NO: 399593 - DNA, 25 bp, Artificial
  probe
  misc_feature (1)..(25): SEQ ID NO: 5088; WAN024GC4; Start 156; Stop 180
gatatttcctgcgtccatattacca

SEQ ID NO: 399594 - DNA, 25 bp, Artificial
  probe
  misc_feature (1)..(25): SEQ ID NO: 5088; WAN024GC4; Start 1; Stop 25
ttgagaatagtgattgtttcgtcca

SEQ ID NO: 399595 - DNA, 25 bp, Artificial
  probe
  misc_feature (1)..(25): SEQ ID NO: 5088; WAN024GC4; Start 88; Stop 112
atacggtattcattgagggtagtag

SEQ ID NO: 399596 - DNA, 25 bp, Artificial
  probe
  misc_feature (1)..(25): SEQ ID NO: 5088; WAN024GC4; Start 87; Stop 111
gatacggtattcattgagggtagta

SEQ ID NO: 399597 - DNA, 25 bp, Artificial
  probe
  misc_feature (1)..(25): SEQ ID NO: 5088; WAN024GC4; Start 170; Stop 194
ccatattaccatcactcgcagaacc

SEQ ID NO: 399598 - DNA, 25 bp, Artificial
  probe
  misc_feature (1)..(25): SEQ ID NO: 5088; WAN024GC4; Start 89; Stop 113
tacggtattcattgagggtagtagc

SEQ ID NO: 399599 - DNA, 25 bp, Artificial
  probe
  misc_feature (1)..(25): SEQ ID NO: 5088; WAN024GC4; Start 86; Stop 110
tgatacggtattcattgagggtagt

SEQ ID NO: 399600 - DNA, 25 bp, Artificial
  probe
  misc_feature (1)..(25): SEQ ID NO: 5088; WAN024GC4; Start 161; Stop 185
ttcctgcgtccatattaccatcact

SEQ ID NO: 399601 - DNA, 25 bp, Artificial
  probe
  misc_feature (1)..(25): SEQ ID NO: 5088; WAN024GC4; Start 159; Stop 183
atttcctgcgtccatattaccatca

SEQ ID NO: 399602 - DNA, 25 bp, Artificial
  probe
  misc_feature (1)..(25): SEQ ID NO: 5088; WAN024GC4; Start 245; Stop 269
gtttgcgaatttcttccatgagttt

SEQ ID NO: 399603 - DNA, 25 bp, Artificial
  probe
  misc_feature (1)..(25): SEQ ID NO: 5088; WAN024GC4; Start 2; Stop 26
tgagaatagtgattgtttcgtccac

SEQ ID NO: 399604 - DNA, 25 bp, Artificial
  probe
  misc_feature (1)..(25): SEQ ID NO: 5088; WAN024GC4; Start 155; Stop 179
ggatatttcctgcgtccatattacc

SEQ ID NO: 399605 - DNA, 25 bp, Artificial
  probe
  misc_feature (1)..(25): SEQ ID NO: 5088; WAN024GC4; Start 162; Stop 186
tcctgcgtccatattaccatcactc

SEQ ID NO: 399606 - DNA, 25 bp, Artificial
  probe
  misc_feature (1)..(25): SEQ ID NO: 5088; WAN024GC4; Start 91; Stop 115
cggtattcattgagggtagtagcac

SEQ ID NO: 399607 - DNA, 25 bp, Artificial
  probe
  misc_feature (1)..(25): SEQ ID NO: 5088; WAN024GC4; Start 3; Stop 27
gagaatagtgattgtttcgtccacc

SEQ ID NO: 399608 - DNA, 25 bp, Artificial
  probe
  misc_feature (1)..(25): SEQ ID NO: 5088; WAN024GC4; Start 160; Stop 184
tttcctgcgtccatattaccatcac

SEQ ID NO: 399609 - DNA, 25 bp, Artificial
  probe
  misc_feature (1)..(25): SEQ ID NO: 5088; WAN024GC4; Start 198; Stop 222
accaacaatttcatggatttcatcg

SEQ ID NO: 399610 - DNA, 25 bp, Artificial
  probe
  misc_feature (1)..(25): SEQ ID NO: 5088; WAN024GC4; Start 197; Stop 221
caccaacaatttcatggatttcatc

SEQ ID NO: 399611 - DNA, 25 bp, Artificial
  probe
  misc_feature (1)..(25): SEQ ID NO: 5088; WAN024GC4; Start 90; Stop 114
acggtattcattgagggtagtagca

SEQ ID NO: 399612 - DNA, 25 bp, Artificial
  probe
  misc_feature (1)..(25): SEQ ID NO: 5088; WAN024GC4; Start 167; Stop 191
cgtccatattaccatcactcgcaga

SEQ ID NO: 399613 - DNA, 25 bp, Artificial
  probe
  misc_feature (1)..(25): SEQ ID NO: 5088; WAN024GC4; Start 196; Stop 220
gcaccaacaatttcatggatttcat

SEQ ID NO: 399614 - DNA, 25 bp, Artificial
  probe
  misc_feature (1)..(25): SEQ ID NO: 5088; WAN024GC4; Start 278; Stop 302
gttcttcaaattgtcctcgaatccc

SEQ ID NO: 399615 - DNA, 25 bp, Artificial
  probe
  misc_feature (1)..(25): SEQ ID NO: 5088; WAN024GC4; Start 194; Stop 218
cagcaccaacaatttcatggatttc

SEQ ID NO: 399616 - DNA, 25 bp, Artificial
  probe
  misc_feature (1)..(25): SEQ ID NO: 5088; WAN024GC4; Start 85; Stop 109
atgatacggtattcattgagggtag

SEQ ID NO: 399617 - DNA, 25 bp, Artificial
  probe
  misc_feature (1)..(25): SEQ ID NO: 5088; WAN024GC4; Start 244; Stop 268
cgtttgcgaatttcttccatgagtt

SEQ ID NO: 399618 - DNA, 25 bp, Artificial
  probe
  misc_feature (1)..(25): SEQ ID NO: 5088; WAN024GC4; Start 199; Stop 223
ccaacaatttcatggatttcatcga

SEQ ID NO: 399619 - DNA, 25 bp, Artificial
  probe
  misc_feature (1)..(25): SEQ ID NO: 5088; WAN024GC4; Start 221; Stop 245
cgataaagaggatgatgtcttcacg

SEQ ID NO: 399620 - DNA, 25 bp, Artificial
  probe
  misc_feature (1)..(25): SEQ ID NO: 5089; WAN024GN8; Start 379; Stop 403
acattgaagcgaatagaggagttag

SEQ ID NO: 399621 - DNA, 25 bp, Artificial
  probe
  misc_feature (1)..(25): SEQ ID NO: 5089; WAN024GN8; Start 848; Stop 872
caattagaggagtgagacatacagt

SEQ ID NO: 399622 - DNA, 25 bp, Artificial
  probe
  misc_feature (1)..(25): SEQ ID NO: 5089; WAN024GN8; Start 380; Stop 404
cattgaagcgaatagaggagttagg

SEQ ID NO: 399623 - DNA, 25 bp, Artificial
  probe
  misc_feature (1)..(25): SEQ ID NO: 5089; WAN024GN8; Start 847; Stop 871
gcaattagaggagtgagacatacag

SEQ ID NO: 399624 - DNA, 25 bp, Artificial
  probe
  misc_feature (1)..(25): SEQ ID NO: 5089; WAN024GN8; Start 378; Stop 402
aacattgaagcgaatagaggagtta

SEQ ID NO: 399625 - DNA, 25 bp, Artificial
  probe
  misc_feature (1)..(25): SEQ ID NO: 5089; WAN024GN8; Start 381; Stop 405
attgaagcgaatagaggagttaggt

SEQ ID NO: 399626 - DNA, 25 bp, Artificial
  probe
  misc_feature (1)..(25): SEQ ID NO: 5089; WAN024GN8; Start 844; Stop 868
aaggcaattagaggagtgagacata

SEQ ID NO: 399627 - DNA, 25 bp, Artificial
  probe
  misc_feature (1)..(25): SEQ ID NO: 5089; WAN024GN8; Start 79; Stop 103
ttagcaagtgaaggtagagttgttc

SEQ ID NO: 399628 - DNA, 25 bp, Artificial
  probe
  misc_feature (1)..(25): SEQ ID NO: 5089; WAN024GN8; Start 382; Stop 406
ttgaagcgaatagaggagttaggtt

SEQ ID NO: 399629 - DNA, 25 bp, Artificial
  probe
  misc_feature (1)..(25): SEQ ID NO: 5089; WAN024GN8; Start 232; Stop 256
ttggatagttcaggtgatgatgtta

SEQ ID NO: 399630 - DNA, 25 bp, Artificial
  probe
  misc_feature (1)..(25): SEQ ID NO: 5089; WAN024GN8; Start 852; Stop 876
tagaggagtgagacatacagtatct

SEQ ID NO: 399631 - DNA, 25 bp, Artificial
  probe
  misc_feature (1)..(25): SEQ ID NO: 5089; WAN024GN8; Start 233; Stop 257
tggatagttcaggtgatgatgttat

SEQ ID NO: 399632 - DNA, 25 bp, Artificial
  probe
  misc_feature (1)..(25): SEQ ID NO: 5089; WAN024GN8; Start 851; Stop 875
ttagaggagtgagacatacagtatc

SEQ ID NO: 399633 - DNA, 25 bp, Artificial
  probe
  misc_feature (1)..(25): SEQ ID NO: 5089; WAN024GN8; Start 845; Stop 869
aggcaattagaggagtgagacatac

SEQ ID NO: 399634 - DNA, 25 bp, Artificial
  probe
  misc_feature (1)..(25): SEQ ID NO: 5089; WAN024GN8; Start 80; Stop 104
tagcaagtgaaggtagagttgttct

SEQ ID NO: 399635 - DNA, 25 bp, Artificial
  probe
  misc_feature (1)..(25): SEQ ID NO: 5089; WAN024GN8; Start 849; Stop 873
aattagaggagtgagacatacagta

SEQ ID NO: 399636 - DNA, 25 bp, Artificial
  probe
  misc_feature (1)..(25): SEQ ID NO: 5089; WAN024GN8; Start 846; Stop 870
ggcaattagaggagtgagacataca

SEQ ID NO: 399637 - DNA, 25 bp, Artificial
  probe
  misc_feature (1)..(25): SEQ ID NO: 5089; WAN024GN8; Start 653; Stop 677
aagtcgttgatctcgttcatagtaa

SEQ ID NO: 399638 - DNA, 25 bp, Artificial
  probe
  misc_feature (1)..(25): SEQ ID NO: 5089; WAN024GN8; Start 654; Stop 678
agtcgttgatctcgttcatagtaag

SEQ ID NO: 399639 - DNA, 25 bp, Artificial
  probe
  misc_feature (1)..(25): SEQ ID NO: 5089; WAN024GN8; Start 652; Stop 676
gaagtcgttgatctcgttcatagta

SEQ ID NO: 399640 - DNA, 25 bp, Artificial
  probe
  misc_feature (1)..(25): SEQ ID NO: 5089; WAN024GN8; Start 234; Stop 258
ggatagttcaggtgatgatgttatt

SEQ ID NO: 399641 - DNA, 25 bp, Artificial
  probe
  misc_feature (1)..(25): SEQ ID NO: 5089; WAN024GN8; Start 850; Stop 874
attagaggagtgagacatacagtat

SEQ ID NO: 399642 - DNA, 25 bp, Artificial
  probe
  misc_feature (1)..(25): SEQ ID NO: 5089; WAN024GN8; Start 655; Stop 679
gtcgttgatctcgttcatagtaagg

SEQ ID NO: 399643 - DNA, 25 bp, Artificial
  probe
  misc_feature (1)..(25): SEQ ID NO: 5089; WAN024GN8; Start 843; Stop 867
caaggcaattagaggagtgagacat

SEQ ID NO: 399644 - DNA, 25 bp, Artificial
  probe
  misc_feature (1)..(25): SEQ ID NO: 5089; WAN024GN8; Start 86; Stop 110
gtgaaggtagagttgttctatctga

SEQ ID NO: 399645 - DNA, 25 bp, Artificial
  probe
  misc_feature (1)..(25): SEQ ID NO: 5089; WAN024GN8; Start 85; Stop 109
agtgaaggtagagttgttctatctg

SEQ ID NO: 399646 - DNA, 25 bp, Artificial
  probe
  misc_feature (1)..(25): SEQ ID NO: 5089; WAN024GN8; Start 82; Stop 106
gcaagtgaaggtagagttgttctat

SEQ ID NO: 399647 - DNA, 25 bp, Artificial
  probe
  misc_feature (1)..(25): SEQ ID NO: 5089; WAN024GN8; Start 592; Stop 616
gatgtgatacttgttccagcagttg

SEQ ID NO: 399648 - DNA, 25 bp, Artificial
  probe
  misc_feature (1)..(25): SEQ ID NO: 5089; WAN024GN8; Start 236; Stop 260
atagttcaggtgatgatgttattca

SEQ ID NO: 399649 - DNA, 25 bp, Artificial
  probe
  misc_feature (1)..(25): SEQ ID NO: 5089; WAN024GN8; Start 87; Stop 111
tgaaggtagagttgttctatctgaa

SEQ ID NO: 399650 - DNA, 25 bp, Artificial
  probe
  misc_feature (1)..(25): SEQ ID NO: 5089; WAN024GN8; Start 84; Stop 108
aagtgaaggtagagttgttctatct

SEQ ID NO: 399651 - DNA, 25 bp, Artificial
  probe
  misc_feature (1)..(25): SEQ ID NO: 5089; WAN024GN8; Start 83; Stop 107
caagtgaaggtagagttgttctatc

SEQ ID NO: 399652 - DNA, 25 bp, Artificial
  probe
  misc_feature (1)..(25): SEQ ID NO: 5089; WAN024GN8; Start 35; Stop 59
ctgagatattacagatgaatgctga

SEQ ID NO: 399653 - DNA, 25 bp, Artificial
  probe
  misc_feature (1)..(25): SEQ ID NO: 5090; WAN024EVB; Start 25; Stop 49
gtttcagatgaacccaactttacag

SEQ ID NO: 399654 - DNA, 25 bp, Artificial
  probe
  misc_feature (1)..(25): SEQ ID NO: 5090; WAN024EVB; Start 14; Stop 38
tttcttctctcgtttcagatgaacc

SEQ ID NO: 399655 - DNA, 25 bp, Artificial
  probe
  misc_feature (1)..(25): SEQ ID NO: 5090; WAN024EVB; Start 22; Stop 46
ctcgtttcagatgaacccaacttta

SEQ ID NO: 399656 - DNA, 25 bp, Artificial
  probe
  misc_feature (1)..(25): SEQ ID NO: 5090; WAN024EVB; Start 83; Stop 107
tctgtgagagaaagaactgtaattt

SEQ ID NO: 399657 - DNA, 25 bp, Artificial
  probe
  misc_feature (1)..(25): SEQ ID NO: 5090; WAN024EVB; Start 23; Stop 47
tcgtttcagatgaacccaactttac

SEQ ID NO: 399658 - DNA, 25 bp, Artificial
  probe
  misc_feature (1)..(25): SEQ ID NO: 5090; WAN024EVB; Start 124; Stop 148
ttagcttctagtagtctgcaatcgc

SEQ ID NO: 399659 - DNA, 25 bp, Artificial
  probe
  misc_feature (1)..(25): SEQ ID NO: 5090; WAN024EVB; Start 26; Stop 50
tttcagatgaacccaactttacagc

SEQ ID NO: 399660 - DNA, 25 bp, Artificial
  probe
  misc_feature (1)..(25): SEQ ID NO: 5090; WAN024EVB; Start 24; Stop 48
cgtttcagatgaacccaactttaca

SEQ ID NO: 399661 - DNA, 25 bp, Artificial
  probe
  misc_feature (1)..(25): SEQ ID NO: 5090; WAN024EVB; Start 123; Stop 147
tttagcttctagtagtctgcaatcg

SEQ ID NO: 399662 - DNA, 25 bp, Artificial
  probe
  misc_feature (1)..(25): SEQ ID NO: 5090; WAN024EVB; Start 32; Stop 56
atgaacccaactttacagctttctc

SEQ ID NO: 399663 - DNA, 25 bp, Artificial
  probe
  misc_feature (1)..(25): SEQ ID NO: 5090; WAN024EVB; Start 31; Stop 55
gatgaacccaactttacagctttct

SEQ ID NO: 399664 - DNA, 25 bp, Artificial
  probe
  misc_feature (1)..(25): SEQ ID NO: 5090; WAN024EVB; Start 30; Stop 54
agatgaacccaactttacagctttc

SEQ ID NO: 399665 - DNA, 25 bp, Artificial
  probe
  misc_feature (1)..(25): SEQ ID NO: 5090; WAN024EVB; Start 29; Stop 53
cagatgaacccaactttacagcttt

SEQ ID NO: 399666 - DNA, 25 bp, Artificial
  probe
  misc_feature (1)..(25): SEQ ID NO: 5090; WAN024EVB; Start 15; Stop 39
ttcttctctcgtttcagatgaaccc

SEQ ID NO: 399667 - DNA, 25 bp, Artificial
  probe
  misc_feature (1)..(25): SEQ ID NO: 5090; WAN024EVB; Start 21; Stop 45
tctcgtttcagatgaacccaacttt

SEQ ID NO: 399668 - DNA, 25 bp, Artificial
  probe
  misc_feature (1)..(25): SEQ ID NO: 5090; WAN024EVB; Start 17; Stop 41
cttctctcgtttcagatgaacccaa

SEQ ID NO: 399669 - DNA, 25 bp, Artificial
  probe
  misc_feature (1)..(25): SEQ ID NO: 5090; WAN024EVB; Start 28; Stop 52
tcagatgaacccaactttacagctt

SEQ ID NO: 399670 - DNA, 25 bp, Artificial
  probe
  misc_feature (1)..(25): SEQ ID NO: 5090; WAN024EVB; Start 33; Stop 57
tgaacccaactttacagctttctct

SEQ ID NO: 399671 - DNA, 25 bp, Artificial
  probe
  misc_feature (1)..(25): SEQ ID NO: 5090; WAN024EVB; Start 27; Stop 51
ttcagatgaacccaactttacagct

SEQ ID NO: 399672 - DNA, 25 bp, Artificial
  probe
  misc_feature (1)..(25): SEQ ID NO: 5090; WAN024EVB; Start 20; Stop 44
ctctcgtttcagatgaacccaactt

SEQ ID NO: 399673 - DNA, 25 bp, Artificial
  probe
  misc_feature (1)..(25): SEQ ID NO: 5090; WAN024EVB; Start 18; Stop 42
ttctctcgtttcagatgaacccaac

SEQ ID NO: 399674 - DNA, 25 bp, Artificial
  probe
  misc_feature (1)..(25): SEQ ID NO: 5090; WAN024EVB; Start 10; Stop 34
atgttttcttctctcgtttcagatg

SEQ ID NO: 399675 - DNA, 25 bp, Artificial
  probe
  misc_feature (1)..(25): SEQ ID NO: 5090; WAN024EVB; Start 11; Stop 35
tgttttcttctctcgtttcagatga

SEQ ID NO: 399676 - DNA, 25 bp, Artificial
  probe
  misc_feature (1)..(25): SEQ ID NO: 5090; WAN024EVB; Start 9; Stop 33
gatgttttcttctctcgtttcagat

SEQ ID NO: 399677 - DNA, 25 bp, Artificial
  probe
  misc_feature (1)..(25): SEQ ID NO: 5090; WAN024EVB; Start 34; Stop 58
gaacccaactttacagctttctctg

SEQ ID NO: 399678 - DNA, 25 bp, Artificial
  probe
  misc_feature (1)..(25): SEQ ID NO: 5090; WAN024EVB; Start 5; Stop 29
gaatgatgttttcttctctcgtttc

SEQ ID NO: 399679 - DNA, 25 bp, Artificial
  probe
  misc_feature (1)..(25): SEQ ID NO: 5090; WAN024EVB; Start 8; Stop 32
tgatgttttcttctctcgtttcaga

SEQ ID NO: 399680 - DNA, 25 bp, Artificial
  probe
  misc_feature (1)..(25): SEQ ID NO: 5090; WAN024EVB; Start 7; Stop 31
atgatgttttcttctctcgtttcag

SEQ ID NO: 399681 - DNA, 25 bp, Artificial
  probe
  misc_feature (1)..(25): SEQ ID NO: 5090; WAN024EVB; Start 6; Stop 30
aatgatgttttcttctctcgtttca

SEQ ID NO: 399682 - DNA, 25 bp, Artificial
  probe
  misc_feature (1)..(25): SEQ ID NO: 5090; WAN024EVB; Start 13; Stop 37
ttttcttctctcgtttcagatgaac

SEQ ID NO: 399683 - DNA, 25 bp, Artificial
  probe
  misc_feature (1)..(25): SEQ ID NO: 5090; WAN024EVB; Start 12; Stop 36
gttttcttctctcgtttcagatgaa

SEQ ID NO: 399684 - DNA, 25 bp, Artificial
  probe
  misc_feature (1)..(25): SEQ ID NO: 5090; WAN024EVB; Start 16; Stop 40
tcttctctcgtttcagatgaaccca

SEQ ID NO: 399685 - DNA, 25 bp, Artificial
  probe
  misc_feature (1)..(25): SEQ ID NO: 5090; WAN024EVB; Start 41; Stop 65
actttacagctttctctgcttgttt

SEQ ID NO: 399686 - DNA, 25 bp, Artificial
  probe
  misc_feature (1)..(25): SEQ ID NO: 5091; WAN024G4P; Start 126; Stop 150
gatttgtccttctgtcatatccacg

SEQ ID NO: 399687 - DNA, 25 bp, Artificial
  probe
  misc_feature (1)..(25): SEQ ID NO: 5091; WAN024G4P; Start 125; Stop 149
cgatttgtccttctgtcatatccac

SEQ ID NO: 399688 - DNA, 25 bp, Artificial
  probe
  misc_feature (1)..(25): SEQ ID NO: 5091; WAN024G4P; Start 178; Stop 202
gccatgtcttccttcctttatctat

SEQ ID NO: 399689 - DNA, 25 bp, Artificial
  probe
  misc_feature (1)..(25): SEQ ID NO: 5091; WAN024G4P; Start 35; Stop 59
cttccaattccatgctgactttatc

SEQ ID NO: 399690 - DNA, 25 bp, Artificial
  probe
  misc_feature (1)..(25): SEQ ID NO: 5091; WAN024G4P; Start 124; Stop 148
acgatttgtccttctgtcatatcca

SEQ ID NO: 399691 - DNA, 25 bp, Artificial
  probe
  misc_feature (1)..(25): SEQ ID NO: 5091; WAN024G4P; Start 23; Stop 47
catcttcttcggcttccaattccat

SEQ ID NO: 399692 - DNA, 25 bp, Artificial
  probe
  misc_feature (1)..(25): SEQ ID NO: 5091; WAN024G4P; Start 36; Stop 60
ttccaattccatgctgactttatca

SEQ ID NO: 399693 - DNA, 25 bp, Artificial
  probe
  misc_feature (1)..(25): SEQ ID NO: 5091; WAN024G4P; Start 161; Stop 185
gcataattacttctaaggccatgtc

SEQ ID NO: 399694 - DNA, 25 bp, Artificial
  probe
  misc_feature (1)..(25): SEQ ID NO: 5091; WAN024G4P; Start 123; Stop 147
gacgatttgtccttctgtcatatcc

SEQ ID NO: 399695 - DNA, 25 bp, Artificial
  probe
  misc_feature (1)..(25): SEQ ID NO: 5091; WAN024G4P; Start 165; Stop 189
aattacttctaaggccatgtcttcc

SEQ ID NO: 399696 - DNA, 25 bp, Artificial
  probe
  misc_feature (1)..(25): SEQ ID NO: 5091; WAN024G4P; Start 24; Stop 48
atcttcttcggcttccaattccatg

SEQ ID NO: 399697 - DNA, 25 bp, Artificial
  probe
  misc_feature (1)..(25): SEQ ID NO: 5091; WAN024G4P; Start 34; Stop 58
gcttccaattccatgctgactttat

SEQ ID NO: 399698 - DNA, 25 bp, Artificial
  probe
  misc_feature (1)..(25): SEQ ID NO: 5091; WAN024G4P; Start 164; Stop 188
taattacttctaaggccatgtcttc

SEQ ID NO: 399699 - DNA, 25 bp, Artificial
  probe
  misc_feature (1)..(25): SEQ ID NO: 5091; WAN024G4P; Start 162; Stop 186
cataattacttctaaggccatgtct

SEQ ID NO: 399700 - DNA, 25 bp, Artificial
  probe
  misc_feature (1)..(25): SEQ ID NO: 5091; WAN024G4P; Start 127; Stop 151
atttgtccttctgtcatatccacgc

SEQ ID NO: 399701 - DNA, 25 bp, Artificial
  probe
  misc_feature (1)..(25): SEQ ID NO: 5091; WAN024G4P; Start 166; Stop 190
attacttctaaggccatgtcttcct

SEQ ID NO: 399702 - DNA, 25 bp, Artificial
  probe
  misc_feature (1)..(25): SEQ ID NO: 5091; WAN024G4P; Start 179; Stop 203
ccatgtcttccttcctttatctata

SEQ ID NO: 399703 - DNA, 25 bp, Artificial
  probe
  misc_feature (1)..(25): SEQ ID NO: 5091; WAN024G4P; Start 163; Stop 187
ataattacttctaaggccatgtctt

SEQ ID NO: 399704 - DNA, 25 bp, Artificial
  probe
  misc_feature (1)..(25): SEQ ID NO: 5091; WAN024G4P; Start 84; Stop 108
tccttcttttacaaattctccgact

SEQ ID NO: 399705 - DNA, 25 bp, Artificial
  probe
  misc_feature (1)..(25): SEQ ID NO: 5091; WAN024G4P; Start 83; Stop 107
ctccttcttttacaaattctccgac

SEQ ID NO: 399706 - DNA, 25 bp, Artificial
  probe
  misc_feature (1)..(25): SEQ ID NO: 5091; WAN024G4P; Start 82; Stop 106
tctccttcttttacaaattctccga

SEQ ID NO: 399707 - DNA, 25 bp, Artificial
  probe
  misc_feature (1)..(25): SEQ ID NO: 5091; WAN024G4P; Start 85; Stop 109
ccttcttttacaaattctccgactt

SEQ ID NO: 399708 - DNA, 25 bp, Artificial
  probe
  misc_feature (1)..(25): SEQ ID NO: 5091; WAN024G4P; Start 81; Stop 105
ttctccttcttttacaaattctccg

SEQ ID NO: 399709 - DNA, 25 bp, Artificial
  probe
  misc_feature (1)..(25): SEQ ID NO: 5091; WAN024G4P; Start 182; Stop 206
tgtcttccttcctttatctatatct

SEQ ID NO: 399710 - DNA, 25 bp, Artificial
  probe
  misc_feature (1)..(25): SEQ ID NO: 5091; WAN024G4P; Start 152; Stop 176
cggcttttggcataattacttctaa

SEQ ID NO: 399711 - DNA, 25 bp, Artificial
  probe
  misc_feature (1)..(25): SEQ ID NO: 5091; WAN024G4P; Start 8; Stop 32
tggcaatcaagtacccatcttcttc

SEQ ID NO: 399712 - DNA, 25 bp, Artificial
  probe
  misc_feature (1)..(25): SEQ ID NO: 5091; WAN024G4P; Start 33; Stop 57
ggcttccaattccatgctgacttta

SEQ ID NO: 399713 - DNA, 25 bp, Artificial
  probe
  misc_feature (1)..(25): SEQ ID NO: 5091; WAN024G4P; Start 86; Stop 110
cttcttttacaaattctccgacttt

SEQ ID NO: 399714 - DNA, 25 bp, Artificial
  probe
  misc_feature (1)..(25): SEQ ID NO: 5091; WAN024G4P; Start 19; Stop 43
tacccatcttcttcggcttccaatt

SEQ ID NO: 399715 - DNA, 25 bp, Artificial
  probe
  misc_feature (1)..(25): SEQ ID NO: 5091; WAN024G4P; Start 177; Stop 201
ggccatgtcttccttcctttatcta

SEQ ID NO: 399716 - DNA, 25 bp, Artificial
  probe
  misc_feature (1)..(25): SEQ ID NO: 5091; WAN024G4P; Start 11; Stop 35
caatcaagtacccatcttcttcggc

SEQ ID NO: 399717 - DNA, 25 bp, Artificial
  probe
  misc_feature (1)..(25): SEQ ID NO: 5091; WAN024G4P; Start 10; Stop 34
gcaatcaagtacccatcttcttcgg

SEQ ID NO: 399718 - DNA, 25 bp, Artificial
  probe
  misc_feature (1)..(25): SEQ ID NO: 5091; WAN024G4P; Start 9; Stop 33
ggcaatcaagtacccatcttcttcg

SEQ ID NO: 399719 - DNA, 25 bp, Artificial
  probe
  misc_feature (1)..(25): SEQ ID NO: 5092; WAN024CFT; Start 216; Stop 240
caacttcgtcgtctacaaccataat

SEQ ID NO: 399720 - DNA, 25 bp, Artificial
  probe
  misc_feature (1)..(25): SEQ ID NO: 5092; WAN024CFT; Start 217; Stop 241
aacttcgtcgtctacaaccataatg

SEQ ID NO: 399721 - DNA, 25 bp, Artificial
  probe
  misc_feature (1)..(25): SEQ ID NO: 5092; WAN024CFT; Start 215; Stop 239
acaacttcgtcgtctacaaccataa

SEQ ID NO: 399722 - DNA, 25 bp, Artificial
  probe
  misc_feature (1)..(25): SEQ ID NO: 5092; WAN024CFT; Start 298; Stop 322
tccatcaatacggcatcctacaatt

SEQ ID NO: 399723 - DNA, 25 bp, Artificial
  probe
  misc_feature (1)..(25): SEQ ID NO: 5092; WAN024CFT; Start 297; Stop 321
gtccatcaatacggcatcctacaat

SEQ ID NO: 399724 - DNA, 25 bp, Artificial
  probe
  misc_feature (1)..(25): SEQ ID NO: 5092; WAN024CFT; Start 227; Stop 251
tctacaaccataatgcgtgaaacat

SEQ ID NO: 399725 - DNA, 25 bp, Artificial
  probe
  misc_feature (1)..(25): SEQ ID NO: 5092; WAN024CFT; Start 218; Stop 242
acttcgtcgtctacaaccataatgc

SEQ ID NO: 399726 - DNA, 25 bp, Artificial
  probe
  misc_feature (1)..(25): SEQ ID NO: 5092; WAN024CFT; Start 214; Stop 238
gacaacttcgtcgtctacaaccata

SEQ ID NO: 399727 - DNA, 25 bp, Artificial
  probe
  misc_feature (1)..(25): SEQ ID NO: 5092; WAN024CFT; Start 1; Stop 25
ttgagacatattcccaacattaagg

SEQ ID NO: 399728 - DNA, 25 bp, Artificial
  probe
  misc_feature (1)..(25): SEQ ID NO: 5092; WAN024CFT; Start 226; Stop 250
gtctacaaccataatgcgtgaaaca

SEQ ID NO: 399729 - DNA, 25 bp, Artificial
  probe
  misc_feature (1)..(25): SEQ ID NO: 5092; WAN024CFT; Start 15; Stop 39
caacattaagggtttcaagtggtac

SEQ ID NO: 399730 - DNA, 25 bp, Artificial
  probe
  misc_feature (1)..(25): SEQ ID NO: 5092; WAN024CFT; Start 16; Stop 40
aacattaagggtttcaagtggtaca

SEQ ID NO: 399731 - DNA, 25 bp, Artificial
  probe
  misc_feature (1)..(25): SEQ ID NO: 5092; WAN024CFT; Start 223; Stop 247
gtcgtctacaaccataatgcgtgaa

SEQ ID NO: 399732 - DNA, 25 bp, Artificial
  probe
  misc_feature (1)..(25): SEQ ID NO: 5092; WAN024CFT; Start 225; Stop 249
cgtctacaaccataatgcgtgaaac

SEQ ID NO: 399733 - DNA, 25 bp, Artificial
  probe
  misc_feature (1)..(25): SEQ ID NO: 5092; WAN024CFT; Start 17; Stop 41
acattaagggtttcaagtggtacac

SEQ ID NO: 399734 - DNA, 25 bp, Artificial
  probe
  misc_feature (1)..(25): SEQ ID NO: 5092; WAN024CFT; Start 224; Stop 248
tcgtctacaaccataatgcgtgaaa

SEQ ID NO: 399735 - DNA, 25 bp, Artificial
  probe
  misc_feature (1)..(25): SEQ ID NO: 5092; WAN024CFT; Start 14; Stop 38
ccaacattaagggtttcaagtggta

SEQ ID NO: 399736 - DNA, 25 bp, Artificial
  probe
  misc_feature (1)..(25): SEQ ID NO: 5092; WAN024CFT; Start 219; Stop 243
cttcgtcgtctacaaccataatgcg

SEQ ID NO: 399737 - DNA, 25 bp, Artificial
  probe
  misc_feature (1)..(25): SEQ ID NO: 5092; WAN024CFT; Start 233; Stop 257
accataatgcgtgaaacatttagtt

SEQ ID NO: 399738 - DNA, 25 bp, Artificial
  probe
  misc_feature (1)..(25): SEQ ID NO: 5092; WAN024CFT; Start 232; Stop 256
aaccataatgcgtgaaacatttagt

SEQ ID NO: 399739 - DNA, 25 bp, Artificial
  probe
  misc_feature (1)..(25): SEQ ID NO: 5092; WAN024CFT; Start 230; Stop 254
acaaccataatgcgtgaaacattta

SEQ ID NO: 399740 - DNA, 25 bp, Artificial
  probe
  misc_feature (1)..(25): SEQ ID NO: 5092; WAN024CFT; Start 229; Stop 253
tacaaccataatgcgtgaaacattt

SEQ ID NO: 399741 - DNA, 25 bp, Artificial
  probe
  misc_feature (1)..(25): SEQ ID NO: 5092; WAN024CFT; Start 231; Stop 255
caaccataatgcgtgaaacatttag

SEQ ID NO: 399742 - DNA, 25 bp, Artificial
  probe
  misc_feature (1)..(25): SEQ ID NO: 5092; WAN024CFT; Start 228; Stop 252
ctacaaccataatgcgtgaaacatt

SEQ ID NO: 399743 - DNA, 25 bp, Artificial
  probe
  misc_feature (1)..(25): SEQ ID NO: 5092; WAN024CFT; Start 18; Stop 42
cattaagggtttcaagtggtacacc

SEQ ID NO: 399744 - DNA, 25 bp, Artificial
  probe
  misc_feature (1)..(25): SEQ ID NO: 5092; WAN024CFT; Start 249; Stop 273
catttagttttccagcccaaagatt

SEQ ID NO: 399745 - DNA, 25 bp, Artificial
  probe
  misc_feature (1)..(25): SEQ ID NO: 5092; WAN024CFT; Start 135; Stop 159
ctttctcaactggcaaaatactcaa

SEQ ID NO: 399746 - DNA, 25 bp, Artificial
  probe
  misc_feature (1)..(25): SEQ ID NO: 5092; WAN024CFT; Start 19; Stop 43
attaagggtttcaagtggtacacct

SEQ ID NO: 399747 - DNA, 25 bp, Artificial
  probe
  misc_feature (1)..(25): SEQ ID NO: 5092; WAN024CFT; Start 234; Stop 258
ccataatgcgtgaaacatttagttt

SEQ ID NO: 399748 - DNA, 25 bp, Artificial
  probe
  misc_feature (1)..(25): SEQ ID NO: 5092; WAN024CFT; Start 136; Stop 160
tttctcaactggcaaaatactcaat

SEQ ID NO: 399749 - DNA, 25 bp, Artificial
  probe
  misc_feature (1)..(25): SEQ ID NO: 5092; WAN024CFT; Start 185; Stop 209
ttcaaaccactcttttcaatatcgt

SEQ ID NO: 399750 - DNA, 25 bp, Artificial
  probe
  misc_feature (1)..(25): SEQ ID NO: 5092; WAN024CFT; Start 137; Stop 161
ttctcaactggcaaaatactcaatt

SEQ ID NO: 399751 - DNA, 25 bp, Artificial
  probe
  misc_feature (1)..(25): SEQ ID NO: 5092; WAN024CFT; Start 248; Stop 272
acatttagttttccagcccaaagat

SEQ ID NO: 399752 - DNA, 25 bp, Artificial
  probe
  misc_feature (1)..(25): SEQ ID NO: 5093; WAN024DX6; Start 155; Stop 179
attcctcatcaacatccacaacttc

SEQ ID NO: 399753 - DNA, 25 bp, Artificial
  probe
  misc_feature (1)..(25): SEQ ID NO: 5093; WAN024DX6; Start 154; Stop 178
cattcctcatcaacatccacaactt

SEQ ID NO: 399754 - DNA, 25 bp, Artificial
  probe
  misc_feature (1)..(25): SEQ ID NO: 5093; WAN024DX6; Start 156; Stop 180
ttcctcatcaacatccacaacttcc

SEQ ID NO: 399755 - DNA, 25 bp, Artificial
  probe
  misc_feature (1)..(25): SEQ ID NO: 5093; WAN024DX6; Start 153; Stop 177
ccattcctcatcaacatccacaact

SEQ ID NO: 399756 - DNA, 25 bp, Artificial
  probe
  misc_feature (1)..(25): SEQ ID NO: 5093; WAN024DX6; Start 147; Stop 171
ctttacccattcctcatcaacatcc

SEQ ID NO: 399757 - DNA, 25 bp, Artificial
  probe
  misc_feature (1)..(25): SEQ ID NO: 5093; WAN024DX6; Start 251; Stop 275
acatttctgcgtttcctttctcttt

SEQ ID NO: 399758 - DNA, 25 bp, Artificial
  probe
  misc_feature (1)..(25): SEQ ID NO: 5093; WAN024DX6; Start 52; Stop 76
ttacacacctactctccgtcaaatt

SEQ ID NO: 399759 - DNA, 25 bp, Artificial
  probe
  misc_feature (1)..(25): SEQ ID NO: 5093; WAN024DX6; Start 148; Stop 172
tttacccattcctcatcaacatcca

SEQ ID NO: 399760 - DNA, 25 bp, Artificial
  probe
  misc_feature (1)..(25): SEQ ID NO: 5093; WAN024DX6; Start 146; Stop 170
gctttacccattcctcatcaacatc

SEQ ID NO: 399761 - DNA, 25 bp, Artificial
  probe
  misc_feature (1)..(25): SEQ ID NO: 5093; WAN024DX6; Start 250; Stop 274
gacatttctgcgtttcctttctctt

SEQ ID NO: 399762 - DNA, 25 bp, Artificial
  probe
  misc_feature (1)..(25): SEQ ID NO: 5093; WAN024DX6; Start 191; Stop 215
gcccaatatacactcccgttataat

SEQ ID NO: 399763 - DNA, 25 bp, Artificial
  probe
  misc_feature (1)..(25): SEQ ID NO: 5093; WAN024DX6; Start 53; Stop 77
tacacacctactctccgtcaaattc

SEQ ID NO: 399764 - DNA, 25 bp, Artificial
  probe
  misc_feature (1)..(25): SEQ ID NO: 5093; WAN024DX6; Start 51; Stop 75
gttacacacctactctccgtcaaat

SEQ ID NO: 399765 - DNA, 25 bp, Artificial
  probe
  misc_feature (1)..(25): SEQ ID NO: 5093; WAN024DX6; Start 149; Stop 173
ttacccattcctcatcaacatccac

SEQ ID NO: 399766 - DNA, 25 bp, Artificial
  probe
  misc_feature (1)..(25): SEQ ID NO: 5093; WAN024DX6; Start 241; Stop 265
aataatctcgacatttctgcgtttc

SEQ ID NO: 399767 - DNA, 25 bp, Artificial
  probe
  misc_feature (1)..(25): SEQ ID NO: 5093; WAN024DX6; Start 192; Stop 216
cccaatatacactcccgttataatt

SEQ ID NO: 399768 - DNA, 25 bp, Artificial
  probe
  misc_feature (1)..(25): SEQ ID NO: 5093; WAN024DX6; Start 143; Stop 167
gtagctttacccattcctcatcaac

SEQ ID NO: 399769 - DNA, 25 bp, Artificial
  probe
  misc_feature (1)..(25): SEQ ID NO: 5093; WAN024DX6; Start 56; Stop 80
acacctactctccgtcaaattcaac

SEQ ID NO: 399770 - DNA, 25 bp, Artificial
  probe
  misc_feature (1)..(25): SEQ ID NO: 5093; WAN024DX6; Start 55; Stop 79
cacacctactctccgtcaaattcaa

SEQ ID NO: 399771 - DNA, 25 bp, Artificial
  probe
  misc_feature (1)..(25): SEQ ID NO: 5093; WAN024DX6; Start 144; Stop 168
tagctttacccattcctcatcaaca

SEQ ID NO: 399772 - DNA, 25 bp, Artificial
  probe
  misc_feature (1)..(25): SEQ ID NO: 5093; WAN024DX6; Start 242; Stop 266
ataatctcgacatttctgcgtttcc

SEQ ID NO: 399773 - DNA, 25 bp, Artificial
  probe
  misc_feature (1)..(25): SEQ ID NO: 5093; WAN024DX6; Start 196; Stop 220
atatacactcccgttataattggtt

SEQ ID NO: 399774 - DNA, 25 bp, Artificial
  probe
  misc_feature (1)..(25): SEQ ID NO: 5093; WAN024DX6; Start 195; Stop 219
aatatacactcccgttataattggt

SEQ ID NO: 399775 - DNA, 25 bp, Artificial
  probe
  misc_feature (1)..(25): SEQ ID NO: 5093; WAN024DX6; Start 145; Stop 169
agctttacccattcctcatcaacat

SEQ ID NO: 399776 - DNA, 25 bp, Artificial
  probe
  misc_feature (1)..(25): SEQ ID NO: 5093; WAN024DX6; Start 253; Stop 277
atttctgcgtttcctttctcttttc

SEQ ID NO: 399777 - DNA, 25 bp, Artificial
  probe
  misc_feature (1)..(25): SEQ ID NO: 5093; WAN024DX6; Start 252; Stop 276
catttctgcgtttcctttctctttt

SEQ ID NO: 399778 - DNA, 25 bp, Artificial
  probe
  misc_feature (1)..(25): SEQ ID NO: 5093; WAN024DX6; Start 150; Stop 174
tacccattcctcatcaacatccaca

SEQ ID NO: 399779 - DNA, 25 bp, Artificial
  probe
  misc_feature (1)..(25): SEQ ID NO: 5093; WAN024DX6; Start 159; Stop 183
ctcatcaacatccacaacttcccag

SEQ ID NO: 399780 - DNA, 25 bp, Artificial
  probe
  misc_feature (1)..(25): SEQ ID NO: 5093; WAN024DX6; Start 243; Stop 267
taatctcgacatttctgcgtttcct

SEQ ID NO: 399781 - DNA, 25 bp, Artificial
  probe
  misc_feature (1)..(25): SEQ ID NO: 5093; WAN024DX6; Start 142; Stop 166
cgtagctttacccattcctcatcaa

SEQ ID NO: 399782 - DNA, 25 bp, Artificial
  probe
  misc_feature (1)..(25): SEQ ID NO: 5093; WAN024DX6; Start 54; Stop 78
acacacctactctccgtcaaattca

SEQ ID NO: 399783 - DNA, 25 bp, Artificial
  probe
  misc_feature (1)..(25): SEQ ID NO: 5093; WAN024DX6; Start 125; Stop 149
ccgtattatctacacgtcgtagctt

SEQ ID NO: 399784 - DNA, 25 bp, Artificial
  probe
  misc_feature (1)..(25): SEQ ID NO: 5093; WAN024DX6; Start 249; Stop 273
cgacatttctgcgtttcctttctct

SEQ ID NO: 399785 - DNA, 25 bp, Artificial
  probe
  misc_feature (1)..(25): SEQ ID NO: 5094; WAN024C4N; Start 34; Stop 58
gtctgtatagttagaggttcctgtt

SEQ ID NO: 399786 - DNA, 25 bp, Artificial
  probe
  misc_feature (1)..(25): SEQ ID NO: 5094; WAN024C4N; Start 32; Stop 56
tcgtctgtatagttagaggttcctg

SEQ ID NO: 399787 - DNA, 25 bp, Artificial
  probe
  misc_feature (1)..(25): SEQ ID NO: 5094; WAN024C4N; Start 33; Stop 57
cgtctgtatagttagaggttcctgt

SEQ ID NO: 399788 - DNA, 25 bp, Artificial
  probe
  misc_feature (1)..(25): SEQ ID NO: 5094; WAN024C4N; Start 31; Stop 55
ctcgtctgtatagttagaggttcct

SEQ ID NO: 399789 - DNA, 25 bp, Artificial
  probe
  misc_feature (1)..(25): SEQ ID NO: 5094; WAN024C4N; Start 122; Stop 146
ttcatcatgtcggtcatcatatagg

SEQ ID NO: 399790 - DNA, 25 bp, Artificial
  probe
  misc_feature (1)..(25): SEQ ID NO: 5094; WAN024C4N; Start 125; Stop 149
atcatgtcggtcatcatataggctg

SEQ ID NO: 399791 - DNA, 25 bp, Artificial
  probe
  misc_feature (1)..(25): SEQ ID NO: 5094; WAN024C4N; Start 124; Stop 148
catcatgtcggtcatcatataggct

SEQ ID NO: 399792 - DNA, 25 bp, Artificial
  probe
  misc_feature (1)..(25): SEQ ID NO: 5094; WAN024C4N; Start 123; Stop 147
tcatcatgtcggtcatcatataggc

SEQ ID NO: 399793 - DNA, 25 bp, Artificial
  probe
  misc_feature (1)..(25): SEQ ID NO: 5094; WAN024C4N; Start 234; Stop 258
gtttatagtaagttccaccatttgc

SEQ ID NO: 399794 - DNA, 25 bp, Artificial
  probe
  misc_feature (1)..(25): SEQ ID NO: 5094; WAN024C4N; Start 211; Stop 235
gacgactttatggatatacattggt

SEQ ID NO: 399795 - DNA, 25 bp, Artificial
  probe
  misc_feature (1)..(25): SEQ ID NO: 5094; WAN024C4N; Start 210; Stop 234
agacgactttatggatatacattgg

SEQ ID NO: 399796 - DNA, 25 bp, Artificial
  probe
  misc_feature (1)..(25): SEQ ID NO: 5094; WAN024C4N; Start 35; Stop 59
tctgtatagttagaggttcctgttt

SEQ ID NO: 399797 - DNA, 25 bp, Artificial
  probe
  misc_feature (1)..(25): SEQ ID NO: 5094; WAN024C4N; Start 21; Stop 45
tttcaatttcctcgtctgtatagtt

SEQ ID NO: 399798 - DNA, 25 bp, Artificial
  probe
  misc_feature (1)..(25): SEQ ID NO: 5094; WAN024C4N; Start 85; Stop 109
ataggcatttcgtccagttccataa

SEQ ID NO: 399799 - DNA, 25 bp, Artificial
  probe
  misc_feature (1)..(25): SEQ ID NO: 5094; WAN024C4N; Start 212; Stop 236
acgactttatggatatacattggtt

SEQ ID NO: 399800 - DNA, 25 bp, Artificial
  probe
  misc_feature (1)..(25): SEQ ID NO: 5094; WAN024C4N; Start 127; Stop 151
catgtcggtcatcatataggctgtc

SEQ ID NO: 399801 - DNA, 25 bp, Artificial
  probe
  misc_feature (1)..(25): SEQ ID NO: 5094; WAN024C4N; Start 23; Stop 47
tcaatttcctcgtctgtatagttag

SEQ ID NO: 399802 - DNA, 25 bp, Artificial
  probe
  misc_feature (1)..(25): SEQ ID NO: 5094; WAN024C4N; Start 24; Stop 48
caatttcctcgtctgtatagttaga

SEQ ID NO: 399803 - DNA, 25 bp, Artificial
  probe
  misc_feature (1)..(25): SEQ ID NO: 5094; WAN024C4N; Start 84; Stop 108
gataggcatttcgtccagttccata

SEQ ID NO: 399804 - DNA, 25 bp, Artificial
  probe
  misc_feature (1)..(25): SEQ ID NO: 5094; WAN024C4N; Start 126; Stop 150
tcatgtcggtcatcatataggctgt

SEQ ID NO: 399805 - DNA, 25 bp, Artificial
  probe
  misc_feature (1)..(25): SEQ ID NO: 5094; WAN024C4N; Start 121; Stop 145
tttcatcatgtcggtcatcatatag

SEQ ID NO: 399806 - DNA, 25 bp, Artificial
  probe
  misc_feature (1)..(25): SEQ ID NO: 5094; WAN024C4N; Start 192; Stop 216
tttcactcccatcactaaagacgac

SEQ ID NO: 399807 - DNA, 25 bp, Artificial
  probe
  misc_feature (1)..(25): SEQ ID NO: 5094; WAN024C4N; Start 22; Stop 46
ttcaatttcctcgtctgtatagtta

SEQ ID NO: 399808 - DNA, 25 bp, Artificial
  probe
  misc_feature (1)..(25): SEQ ID NO: 5094; WAN024C4N; Start 25; Stop 49
aatttcctcgtctgtatagttagag

SEQ ID NO: 399809 - DNA, 25 bp, Artificial
  probe
  misc_feature (1)..(25): SEQ ID NO: 5094; WAN024C4N; Start 228; Stop 252
acattggtttatagtaagttccacc

SEQ ID NO: 399810 - DNA, 25 bp, Artificial
  probe
  misc_feature (1)..(25): SEQ ID NO: 5094; WAN024C4N; Start 213; Stop 237
cgactttatggatatacattggttt

SEQ ID NO: 399811 - DNA, 25 bp, Artificial
  probe
  misc_feature (1)..(25): SEQ ID NO: 5094; WAN024C4N; Start 128; Stop 152
atgtcggtcatcatataggctgtcg

SEQ ID NO: 399812 - DNA, 25 bp, Artificial
  probe
  misc_feature (1)..(25): SEQ ID NO: 5094; WAN024C4N; Start 235; Stop 259
tttatagtaagttccaccatttgca

SEQ ID NO: 399813 - DNA, 25 bp, Artificial
  probe
  misc_feature (1)..(25): SEQ ID NO: 5094; WAN024C4N; Start 193; Stop 217
ttcactcccatcactaaagacgact

SEQ ID NO: 399814 - DNA, 25 bp, Artificial
  probe
  misc_feature (1)..(25): SEQ ID NO: 5094; WAN024C4N; Start 130; Stop 154
gtcggtcatcatataggctgtcgtt

SEQ ID NO: 399815 - DNA, 25 bp, Artificial
  probe
  misc_feature (1)..(25): SEQ ID NO: 5094; WAN024C4N; Start 194; Stop 218
tcactcccatcactaaagacgactt

SEQ ID NO: 399816 - DNA, 25 bp, Artificial
  probe
  misc_feature (1)..(25): SEQ ID NO: 5094; WAN024C4N; Start 132; Stop 156
cggtcatcatataggctgtcgtttc

SEQ ID NO: 399817 - DNA, 25 bp, Artificial
  probe
  misc_feature (1)..(25): SEQ ID NO: 5094; WAN024C4N; Start 209; Stop 233
aagacgactttatggatatacattg

SEQ ID NO: 399818 - DNA, 25 bp, Artificial
  probe
  misc_feature (1)..(25): SEQ ID NO: 5095; WAN024CP7; Start 192; Stop 216
tgctgttgttgcttgtgttagtatt

SEQ ID NO: 399819 - DNA, 25 bp, Artificial
  probe
  misc_feature (1)..(25): SEQ ID NO: 5095; WAN024CP7; Start 191; Stop 215
ttgctgttgttgcttgtgttagtat

SEQ ID NO: 399820 - DNA, 25 bp, Artificial
  probe
  misc_feature (1)..(25): SEQ ID NO: 5095; WAN024CP7; Start 218; Stop 242
gtagttcctggattgcttacagaag

SEQ ID NO: 399821 - DNA, 25 bp, Artificial
  probe
  misc_feature (1)..(25): SEQ ID NO: 5095; WAN024CP7; Start 190; Stop 214
gttgctgttgttgcttgtgttagta

SEQ ID NO: 399822 - DNA, 25 bp, Artificial
  probe
  misc_feature (1)..(25): SEQ ID NO: 5095; WAN024CP7; Start 169; Stop 193
ttgacttgcttgactgttagtgttg

SEQ ID NO: 399823 - DNA, 25 bp, Artificial
  probe
  misc_feature (1)..(25): SEQ ID NO: 5095; WAN024CP7; Start 177; Stop 201
cttgactgttagtgttgctgttgtt

SEQ ID NO: 399824 - DNA, 25 bp, Artificial
  probe
  misc_feature (1)..(25): SEQ ID NO: 5095; WAN024CP7; Start 178; Stop 202
ttgactgttagtgttgctgttgttg

SEQ ID NO: 399825 - DNA, 25 bp, Artificial
  probe
  misc_feature (1)..(25): SEQ ID NO: 5095; WAN024CP7; Start 195; Stop 219
tgttgttgcttgtgttagtatttgt

SEQ ID NO: 399826 - DNA, 25 bp, Artificial
  probe
  misc_feature (1)..(25): SEQ ID NO: 5095; WAN024CP7; Start 162; Stop 186
cattactttgacttgcttgactgtt

SEQ ID NO: 399827 - DNA, 25 bp, Artificial
  probe
  misc_feature (1)..(25): SEQ ID NO: 5095; WAN024CP7; Start 164; Stop 188
ttactttgacttgcttgactgttag

SEQ ID NO: 399828 - DNA, 25 bp, Artificial
  probe
  misc_feature (1)..(25): SEQ ID NO: 5095; WAN024CP7; Start 194; Stop 218
ctgttgttgcttgtgttagtatttg

SEQ ID NO: 399829 - DNA, 25 bp, Artificial
  probe
  misc_feature (1)..(25): SEQ ID NO: 5095; WAN024CP7; Start 201; Stop 225
tgcttgtgttagtatttgtagttcc

SEQ ID NO: 399830 - DNA, 25 bp, Artificial
  probe
  misc_feature (1)..(25): SEQ ID NO: 5095; WAN024CP7; Start 193; Stop 217
gctgttgttgcttgtgttagtattt

SEQ ID NO: 399831 - DNA, 25 bp, Artificial
  probe
  misc_feature (1)..(25): SEQ ID NO: 5095; WAN024CP7; Start 202; Stop 226
gcttgtgttagtatttgtagttcct

SEQ ID NO: 399832 - DNA, 25 bp, Artificial
  probe
  misc_feature (1)..(25): SEQ ID NO: 5095; WAN024CP7; Start 211; Stop 235
agtatttgtagttcctggattgctt

SEQ ID NO: 399833 - DNA, 25 bp, Artificial
  probe
  misc_feature (1)..(25): SEQ ID NO: 5095; WAN024CP7; Start 198; Stop 222
tgttgcttgtgttagtatttgtagt

SEQ ID NO: 399834 - DNA, 25 bp, Artificial
  probe
  misc_feature (1)..(25): SEQ ID NO: 5095; WAN024CP7; Start 163; Stop 187
attactttgacttgcttgactgtta

SEQ ID NO: 399835 - DNA, 25 bp, Artificial
  probe
  misc_feature (1)..(25): SEQ ID NO: 5095; WAN024CP7; Start 219; Stop 243
tagttcctggattgcttacagaagg

SEQ ID NO: 399836 - DNA, 25 bp, Artificial
  probe
  misc_feature (1)..(25): SEQ ID NO: 5095; WAN024CP7; Start 210; Stop 234
tagtatttgtagttcctggattgct

SEQ ID NO: 399837 - DNA, 25 bp, Artificial
  probe
  misc_feature (1)..(25): SEQ ID NO: 5095; WAN024CP7; Start 205; Stop 229
tgtgttagtatttgtagttcctgga

SEQ ID NO: 399838 - DNA, 25 bp, Artificial
  probe
  misc_feature (1)..(25): SEQ ID NO: 5095; WAN024CP7; Start 204; Stop 228
ttgtgttagtatttgtagttcctgg

SEQ ID NO: 399839 - DNA, 25 bp, Artificial
  probe
  misc_feature (1)..(25): SEQ ID NO: 5095; WAN024CP7; Start 221; Stop 245
gttcctggattgcttacagaaggta

SEQ ID NO: 399840 - DNA, 25 bp, Artificial
  probe
  misc_feature (1)..(25): SEQ ID NO: 5095; WAN024CP7; Start 165; Stop 189
tactttgacttgcttgactgttagt

SEQ ID NO: 399841 - DNA, 25 bp, Artificial
  probe
  misc_feature (1)..(25): SEQ ID NO: 5095; WAN024CP7; Start 212; Stop 236
gtatttgtagttcctggattgctta

SEQ ID NO: 399842 - DNA, 25 bp, Artificial
  probe
  misc_feature (1)..(25): SEQ ID NO: 5095; WAN024CP7; Start 209; Stop 233
ttagtatttgtagttcctggattgc

SEQ ID NO: 399843 - DNA, 25 bp, Artificial
  probe
  misc_feature (1)..(25): SEQ ID NO: 5095; WAN024CP7; Start 213; Stop 237
tatttgtagttcctggattgcttac

SEQ ID NO: 399844 - DNA, 25 bp, Artificial
  probe
  misc_feature (1)..(25): SEQ ID NO: 5095; WAN024CP7; Start 196; Stop 220
gttgttgcttgtgttagtatttgta

SEQ ID NO: 399845 - DNA, 25 bp, Artificial
  probe
  misc_feature (1)..(25): SEQ ID NO: 5095; WAN024CP7; Start 161; Stop 185
tcattactttgacttgcttgactgt

SEQ ID NO: 399846 - DNA, 25 bp, Artificial
  probe
  misc_feature (1)..(25): SEQ ID NO: 5095; WAN024CP7; Start 222; Stop 246
ttcctggattgcttacagaaggtac

SEQ ID NO: 399847 - DNA, 25 bp, Artificial
  probe
  misc_feature (1)..(25): SEQ ID NO: 5095; WAN024CP7; Start 217; Stop 241
tgtagttcctggattgcttacagaa

SEQ ID NO: 399848 - DNA, 25 bp, Artificial
  probe
  misc_feature (1)..(25): SEQ ID NO: 5095; WAN024CP7; Start 216; Stop 240
ttgtagttcctggattgcttacaga

SEQ ID NO: 399849 - DNA, 25 bp, Artificial
  probe
  misc_feature (1)..(25): SEQ ID NO: 5095; WAN024CP7; Start 199; Stop 223
gttgcttgtgttagtatttgtagtt

SEQ ID NO: 399850 - DNA, 25 bp, Artificial
  probe
  misc_feature (1)..(25): SEQ ID NO: 5095; WAN024CP7; Start 197; Stop 221
ttgttgcttgtgttagtatttgtag

SEQ ID NO: 399851 - DNA, 25 bp, Artificial
  probe
  misc_feature (1)..(25): SEQ ID NO: 5096; WAN024G7X; Start 103; Stop 127
ccttcacctagtggagtagagatag

SEQ ID NO: 399852 - DNA, 25 bp, Artificial
  probe
  misc_feature (1)..(25): SEQ ID NO: 5096; WAN024G7X; Start 118; Stop 142
gtagagatagcagcgatggtatcaa

SEQ ID NO: 399853 - DNA, 25 bp, Artificial
  probe
  misc_feature (1)..(25): SEQ ID NO: 5096; WAN024G7X; Start 104; Stop 128
cttcacctagtggagtagagatagc

SEQ ID NO: 399854 - DNA, 25 bp, Artificial
  probe
  misc_feature (1)..(25): SEQ ID NO: 5096; WAN024G7X; Start 116; Stop 140
gagtagagatagcagcgatggtatc

SEQ ID NO: 399855 - DNA, 25 bp, Artificial
  probe
  misc_feature (1)..(25): SEQ ID NO: 5096; WAN024G7X; Start 105; Stop 129
ttcacctagtggagtagagatagca

SEQ ID NO: 399856 - DNA, 25 bp, Artificial
  probe
  misc_feature (1)..(25): SEQ ID NO: 5096; WAN024G7X; Start 115; Stop 139
ggagtagagatagcagcgatggtat

SEQ ID NO: 399857 - DNA, 25 bp, Artificial
  probe
  misc_feature (1)..(25): SEQ ID NO: 5096; WAN024G7X; Start 111; Stop 135
tagtggagtagagatagcagcgatg

SEQ ID NO: 399858 - DNA, 25 bp, Artificial
  probe
  misc_feature (1)..(25): SEQ ID NO: 5096; WAN024G7X; Start 110; Stop 134
ctagtggagtagagatagcagcgat

SEQ ID NO: 399859 - DNA, 25 bp, Artificial
  probe
  misc_feature (1)..(25): SEQ ID NO: 5096; WAN024G7X; Start 117; Stop 141
agtagagatagcagcgatggtatca

SEQ ID NO: 399860 - DNA, 25 bp, Artificial
  probe
  misc_feature (1)..(25): SEQ ID NO: 5096; WAN024G7X; Start 106; Stop 130
tcacctagtggagtagagatagcag

SEQ ID NO: 399861 - DNA, 25 bp, Artificial
  probe
  misc_feature (1)..(25): SEQ ID NO: 5096; WAN024G7X; Start 124; Stop 148
atagcagcgatggtatcaaattcac

SEQ ID NO: 399862 - DNA, 25 bp, Artificial
  probe
  misc_feature (1)..(25): SEQ ID NO: 5096; WAN024G7X; Start 122; Stop 146
agatagcagcgatggtatcaaattc

SEQ ID NO: 399863 - DNA, 25 bp, Artificial
  probe
  misc_feature (1)..(25): SEQ ID NO: 5096; WAN024G7X; Start 121; Stop 145
gagatagcagcgatggtatcaaatt

SEQ ID NO: 399864 - DNA, 25 bp, Artificial
  probe
  misc_feature (1)..(25): SEQ ID NO: 5096; WAN024G7X; Start 119; Stop 143
tagagatagcagcgatggtatcaaa

SEQ ID NO: 399865 - DNA, 25 bp, Artificial
  probe
  misc_feature (1)..(25): SEQ ID NO: 5096; WAN024G7X; Start 123; Stop 147
gatagcagcgatggtatcaaattca

SEQ ID NO: 399866 - DNA, 25 bp, Artificial
  probe
  misc_feature (1)..(25): SEQ ID NO: 5096; WAN024G7X; Start 120; Stop 144
agagatagcagcgatggtatcaaat

SEQ ID NO: 399867 - DNA, 25 bp, Artificial
  probe
  misc_feature (1)..(25): SEQ ID NO: 5096; WAN024G7X; Start 102; Stop 126
cccttcacctagtggagtagagata

SEQ ID NO: 399868 - DNA, 25 bp, Artificial
  probe
  misc_feature (1)..(25): SEQ ID NO: 5096; WAN024G7X; Start 114; Stop 138
tggagtagagatagcagcgatggta

SEQ ID NO: 399869 - DNA, 25 bp, Artificial
  probe
  misc_feature (1)..(25): SEQ ID NO: 5096; WAN024G7X; Start 107; Stop 131
cacctagtggagtagagatagcagc

SEQ ID NO: 399870 - DNA, 25 bp, Artificial
  probe
  misc_feature (1)..(25): SEQ ID NO: 5096; WAN024G7X; Start 109; Stop 133
cctagtggagtagagatagcagcga

SEQ ID NO: 399871 - DNA, 25 bp, Artificial
  probe
  misc_feature (1)..(25): SEQ ID NO: 5096; WAN024G7X; Start 125; Stop 149
tagcagcgatggtatcaaattcacg

SEQ ID NO: 399872 - DNA, 25 bp, Artificial
  probe
  misc_feature (1)..(25): SEQ ID NO: 5096; WAN024G7X; Start 17; Stop 41
caaccttgttcaagtcttttccttt

SEQ ID NO: 399873 - DNA, 25 bp, Artificial
  probe
  misc_feature (1)..(25): SEQ ID NO: 5096; WAN024G7X; Start 108; Stop 132
acctagtggagtagagatagcagcg

SEQ ID NO: 399874 - DNA, 25 bp, Artificial
  probe
  misc_feature (1)..(25): SEQ ID NO: 5096; WAN024G7X; Start 19; Stop 43
accttgttcaagtcttttcctttaa

SEQ ID NO: 399875 - DNA, 25 bp, Artificial
  probe
  misc_feature (1)..(25): SEQ ID NO: 5096; WAN024G7X; Start 148; Stop 172
cgtgtaatcataatgtttcctttaa

SEQ ID NO: 399876 - DNA, 25 bp, Artificial
  probe
  misc_feature (1)..(25): SEQ ID NO: 5096; WAN024G7X; Start 18; Stop 42
aaccttgttcaagtcttttccttta

SEQ ID NO: 399877 - DNA, 25 bp, Artificial
  probe
  misc_feature (1)..(25): SEQ ID NO: 5096; WAN024G7X; Start 147; Stop 171
acgtgtaatcataatgtttccttta

SEQ ID NO: 399878 - DNA, 25 bp, Artificial
  probe
  misc_feature (1)..(25): SEQ ID NO: 5096; WAN024G7X; Start 89; Stop 113
caataccaatagccccttcacctag

SEQ ID NO: 399879 - DNA, 25 bp, Artificial
  probe
  misc_feature (1)..(25): SEQ ID NO: 5096; WAN024G7X; Start 88; Stop 112
acaataccaatagccccttcaccta

SEQ ID NO: 399880 - DNA, 25 bp, Artificial
  probe
  misc_feature (1)..(25): SEQ ID NO: 5096; WAN024G7X; Start 90; Stop 114
aataccaatagccccttcacctagt

SEQ ID NO: 399881 - DNA, 25 bp, Artificial
  probe
  misc_feature (1)..(25): SEQ ID NO: 5096; WAN024G7X; Start 16; Stop 40
gcaaccttgttcaagtcttttcctt

SEQ ID NO: 399882 - DNA, 25 bp, Artificial
  probe
  misc_feature (1)..(25): SEQ ID NO: 5096; WAN024G7X; Start 20; Stop 44
ccttgttcaagtcttttcctttaaa

SEQ ID NO: 399883 - DNA, 25 bp, Artificial
  probe
  misc_feature (1)..(25): SEQ ID NO: 5096; WAN024G7X; Start 13; Stop 37
ctggcaaccttgttcaagtcttttc

SEQ ID NO: 399884 - DNA, 25 bp, Artificial
  probe
  misc_feature (1)..(25): SEQ ID NO: 5097; WAN024B7M; Start 157; Stop 181
ggtggtagaggatatggagacaatc

SEQ ID NO: 399885 - DNA, 25 bp, Artificial
  probe
  misc_feature (1)..(25): SEQ ID NO: 5097; WAN024B7M; Start 328; Stop 352
aaggtatggattgacaacattagaa

SEQ ID NO: 399886 - DNA, 25 bp, Artificial
  probe
  misc_feature (1)..(25): SEQ ID NO: 5097; WAN024B7M; Start 156; Stop 180
tggtggtagaggatatggagacaat

SEQ ID NO: 399887 - DNA, 25 bp, Artificial
  probe
  misc_feature (1)..(25): SEQ ID NO: 5097; WAN024B7M; Start 155; Stop 179
ttggtggtagaggatatggagacaa

SEQ ID NO: 399888 - DNA, 25 bp, Artificial
  probe
  misc_feature (1)..(25): SEQ ID NO: 5097; WAN024B7M; Start 557; Stop 581
tttggttggctgataatgttgaaat

SEQ ID NO: 399889 - DNA, 25 bp, Artificial
  probe
  misc_feature (1)..(25): SEQ ID NO: 5097; WAN024B7M; Start 222; Stop 246
tcttgatttagtttgggtagtggaa

SEQ ID NO: 399890 - DNA, 25 bp, Artificial
  probe
  misc_feature (1)..(25): SEQ ID NO: 5097; WAN024B7M; Start 145; Stop 169
tttgataactttggtggtagaggat

SEQ ID NO: 399891 - DNA, 25 bp, Artificial
  probe
  misc_feature (1)..(25): SEQ ID NO: 5097; WAN024B7M; Start 144; Stop 168
atttgataactttggtggtagagga

SEQ ID NO: 399892 - DNA, 25 bp, Artificial
  probe
  misc_feature (1)..(25): SEQ ID NO: 5097; WAN024B7M; Start 221; Stop 245
atcttgatttagtttgggtagtgga

SEQ ID NO: 399893 - DNA, 25 bp, Artificial
  probe
  misc_feature (1)..(25): SEQ ID NO: 5097; WAN024B7M; Start 150; Stop 174
taactttggtggtagaggatatgga

SEQ ID NO: 399894 - DNA, 25 bp, Artificial
  probe
  misc_feature (1)..(25): SEQ ID NO: 5097; WAN024B7M; Start 149; Stop 173
ataactttggtggtagaggatatgg

SEQ ID NO: 399895 - DNA, 25 bp, Artificial
  probe
  misc_feature (1)..(25): SEQ ID NO: 5097; WAN024B7M; Start 1071; Stop 1095
gtttgatgagattattggtcgcttc

SEQ ID NO: 399896 - DNA, 25 bp, Artificial
  probe
  misc_feature (1)..(25): SEQ ID NO: 5097; WAN024B7M; Start 564; Stop 588
ggctgataatgttgaaatcttggag

SEQ ID NO: 399897 - DNA, 25 bp, Artificial
  probe
  misc_feature (1)..(25): SEQ ID NO: 5097; WAN024B7M; Start 562; Stop 586
ttggctgataatgttgaaatcttgg

SEQ ID NO: 399898 - DNA, 25 bp, Artificial
  probe
  misc_feature (1)..(25): SEQ ID NO: 5097; WAN024B7M; Start 560; Stop 584
ggttggctgataatgttgaaatctt

SEQ ID NO: 399899 - DNA, 25 bp, Artificial
  probe
  misc_feature (1)..(25): SEQ ID NO: 5097; WAN024B7M; Start 558; Stop 582
ttggttggctgataatgttgaaatc

SEQ ID NO: 399900 - DNA, 25 bp, Artificial
  probe
  misc_feature (1)..(25): SEQ ID NO: 5097; WAN024B7M; Start 464; Stop 488
atatcaggatggctaaatacgatgg

SEQ ID NO: 399901 - DNA, 25 bp, Artificial
  probe
  misc_feature (1)..(25): SEQ ID NO: 5097; WAN024B7M; Start 565; Stop 589
gctgataatgttgaaatcttggagt

SEQ ID NO: 399902 - DNA, 25 bp, Artificial
  probe
  misc_feature (1)..(25): SEQ ID NO: 5097; WAN024B7M; Start 223; Stop 247
cttgatttagtttgggtagtggaaa

SEQ ID NO: 399903 - DNA, 25 bp, Artificial
  probe
  misc_feature (1)..(25): SEQ ID NO: 5097; WAN024B7M; Start 563; Stop 587
tggctgataatgttgaaatcttgga

SEQ ID NO: 399904 - DNA, 25 bp, Artificial
  probe
  misc_feature (1)..(25): SEQ ID NO: 5097; WAN024B7M; Start 561; Stop 585
gttggctgataatgttgaaatcttg

SEQ ID NO: 399905 - DNA, 25 bp, Artificial
  probe
  misc_feature (1)..(25): SEQ ID NO: 5097; WAN024B7M; Start 559; Stop 583
tggttggctgataatgttgaaatct

SEQ ID NO: 399906 - DNA, 25 bp, Artificial
  probe
  misc_feature (1)..(25): SEQ ID NO: 5097; WAN024B7M; Start 571; Stop 595
aatgttgaaatcttggagtatggtt

SEQ ID NO: 399907 - DNA, 25 bp, Artificial
  probe
  misc_feature (1)..(25): SEQ ID NO: 5097; WAN024B7M; Start 146; Stop 170
ttgataactttggtggtagaggata

SEQ ID NO: 399908 - DNA, 25 bp, Artificial
  probe
  misc_feature (1)..(25): SEQ ID NO: 5097; WAN024B7M; Start 572; Stop 596
atgttgaaatcttggagtatggttt

SEQ ID NO: 399909 - DNA, 25 bp, Artificial
  probe
  misc_feature (1)..(25): SEQ ID NO: 5097; WAN024B7M; Start 466; Stop 490
atcaggatggctaaatacgatggta

SEQ ID NO: 399910 - DNA, 25 bp, Artificial
  probe
  misc_feature (1)..(25): SEQ ID NO: 5097; WAN024B7M; Start 465; Stop 489
tatcaggatggctaaatacgatggt

SEQ ID NO: 399911 - DNA, 25 bp, Artificial
  probe
  misc_feature (1)..(25): SEQ ID NO: 5097; WAN024B7M; Start 325; Stop 349
gcaaaggtatggattgacaacatta

SEQ ID NO: 399912 - DNA, 25 bp, Artificial
  probe
  misc_feature (1)..(25): SEQ ID NO: 5097; WAN024B7M; Start 147; Stop 171
tgataactttggtggtagaggatat

SEQ ID NO: 399913 - DNA, 25 bp, Artificial
  probe
  misc_feature (1)..(25): SEQ ID NO: 5097; WAN024B7M; Start 1072; Stop 1096
tttgatgagattattggtcgcttcc

SEQ ID NO: 399914 - DNA, 25 bp, Artificial
  probe
  misc_feature (1)..(25): SEQ ID NO: 5097; WAN024B7M; Start 1067; Stop 1091
atccgtttgatgagattattggtcg

SEQ ID NO: 399915 - DNA, 25 bp, Artificial
  probe
  misc_feature (1)..(25): SEQ ID NO: 5097; WAN024B7M; Start 890; Stop 914
aggatttaatgtttgtggctgatat

SEQ ID NO: 399916 - DNA, 25 bp, Artificial
  probe
  misc_feature (1)..(25): SEQ ID NO: 5097; WAN024B7M; Start 220; Stop 244
aatcttgatttagtttgggtagtgg

SEQ ID NO: 399917 - DNA, 25 bp, Artificial
  probe
  misc_feature (1)..(25): SEQ ID NO: 5098; WAN024FK4; Start 130; Stop 154
ttccgcaatgtatcatcaatatcaa

SEQ ID NO: 399918 - DNA, 25 bp, Artificial
  probe
  misc_feature (1)..(25): SEQ ID NO: 5098; WAN024FK4; Start 129; Stop 153
attccgcaatgtatcatcaatatca

SEQ ID NO: 399919 - DNA, 25 bp, Artificial
  probe
  misc_feature (1)..(25): SEQ ID NO: 5098; WAN024FK4; Start 128; Stop 152
aattccgcaatgtatcatcaatatc

SEQ ID NO: 399920 - DNA, 25 bp, Artificial
  probe
  misc_feature (1)..(25): SEQ ID NO: 5098; WAN024FK4; Start 200; Stop 224
ccatctcactacctctttcaatcta

SEQ ID NO: 399921 - DNA, 25 bp, Artificial
  probe
  misc_feature (1)..(25): SEQ ID NO: 5098; WAN024FK4; Start 199; Stop 223
tccatctcactacctctttcaatct

SEQ ID NO: 399922 - DNA, 25 bp, Artificial
  probe
  misc_feature (1)..(25): SEQ ID NO: 5098; WAN024FK4; Start 198; Stop 222
gtccatctcactacctctttcaatc

SEQ ID NO: 399923 - DNA, 25 bp, Artificial
  probe
  misc_feature (1)..(25): SEQ ID NO: 5098; WAN024FK4; Start 173; Stop 197
tctttgccttgtatcttaatttcgc

SEQ ID NO: 399924 - DNA, 25 bp, Artificial
  probe
  misc_feature (1)..(25): SEQ ID NO: 5098; WAN024FK4; Start 104; Stop 128
tagttggaataaaccctgtctttga

SEQ ID NO: 399925 - DNA, 25 bp, Artificial
  probe
  misc_feature (1)..(25): SEQ ID NO: 5098; WAN024FK4; Start 103; Stop 127
gtagttggaataaaccctgtctttg

SEQ ID NO: 399926 - DNA, 25 bp, Artificial
  probe
  misc_feature (1)..(25): SEQ ID NO: 5098; WAN024FK4; Start 102; Stop 126
tgtagttggaataaaccctgtcttt

SEQ ID NO: 399927 - DNA, 25 bp, Artificial
  probe
  misc_feature (1)..(25): SEQ ID NO: 5098; WAN024FK4; Start 101; Stop 125
ttgtagttggaataaaccctgtctt

SEQ ID NO: 399928 - DNA, 25 bp, Artificial
  probe
  misc_feature (1)..(25): SEQ ID NO: 5098; WAN024FK4; Start 100; Stop 124
attgtagttggaataaaccctgtct

SEQ ID NO: 399929 - DNA, 25 bp, Artificial
  probe
  misc_feature (1)..(25): SEQ ID NO: 5098; WAN024FK4; Start 106; Stop 130
gttggaataaaccctgtctttgaat

SEQ ID NO: 399930 - DNA, 25 bp, Artificial
  probe
  misc_feature (1)..(25): SEQ ID NO: 5098; WAN024FK4; Start 92; Stop 116
cagtgggaattgtagttggaataaa

SEQ ID NO: 399931 - DNA, 25 bp, Artificial
  probe
  misc_feature (1)..(25): SEQ ID NO: 5098; WAN024FK4; Start 105; Stop 129
agttggaataaaccctgtctttgaa

SEQ ID NO: 399932 - DNA, 25 bp, Artificial
  probe
  misc_feature (1)..(25): SEQ ID NO: 5098; WAN024FK4; Start 107; Stop 131
ttggaataaaccctgtctttgaatt

SEQ ID NO: 399933 - DNA, 25 bp, Artificial
  probe
  misc_feature (1)..(25): SEQ ID NO: 5098; WAN024FK4; Start 97; Stop 121
ggaattgtagttggaataaaccctg

SEQ ID NO: 399934 - DNA, 25 bp, Artificial
  probe
  misc_feature (1)..(25): SEQ ID NO: 5098; WAN024FK4; Start 94; Stop 118
gtgggaattgtagttggaataaacc

SEQ ID NO: 399935 - DNA, 25 bp, Artificial
  probe
  misc_feature (1)..(25): SEQ ID NO: 5098; WAN024FK4; Start 131; Stop 155
tccgcaatgtatcatcaatatcaaa

SEQ ID NO: 399936 - DNA, 25 bp, Artificial
  probe
  misc_feature (1)..(25): SEQ ID NO: 5098; WAN024FK4; Start 99; Stop 123
aattgtagttggaataaaccctgtc

SEQ ID NO: 399937 - DNA, 25 bp, Artificial
  probe
  misc_feature (1)..(25): SEQ ID NO: 5098; WAN024FK4; Start 98; Stop 122
gaattgtagttggaataaaccctgt

SEQ ID NO: 399938 - DNA, 25 bp, Artificial
  probe
  misc_feature (1)..(25): SEQ ID NO: 5098; WAN024FK4; Start 93; Stop 117
agtgggaattgtagttggaataaac

SEQ ID NO: 399939 - DNA, 25 bp, Artificial
  probe
  misc_feature (1)..(25): SEQ ID NO: 5098; WAN024FK4; Start 164; Stop 188
tcttgatcttctttgccttgtatct

SEQ ID NO: 399940 - DNA, 25 bp, Artificial
  probe
  misc_feature (1)..(25): SEQ ID NO: 5098; WAN024FK4; Start 165; Stop 189
cttgatcttctttgccttgtatctt

SEQ ID NO: 399941 - DNA, 25 bp, Artificial
  probe
  misc_feature (1)..(25): SEQ ID NO: 5098; WAN024FK4; Start 91; Stop 115
acagtgggaattgtagttggaataa

SEQ ID NO: 399942 - DNA, 25 bp, Artificial
  probe
  misc_feature (1)..(25): SEQ ID NO: 5098; WAN024FK4; Start 90; Stop 114
aacagtgggaattgtagttggaata

SEQ ID NO: 399943 - DNA, 25 bp, Artificial
  probe
  misc_feature (1)..(25): SEQ ID NO: 5098; WAN024FK4; Start 163; Stop 187
atcttgatcttctttgccttgtatc

SEQ ID NO: 399944 - DNA, 25 bp, Artificial
  probe
  misc_feature (1)..(25): SEQ ID NO: 5098; WAN024FK4; Start 172; Stop 196
ttctttgccttgtatcttaatttcg

SEQ ID NO: 399945 - DNA, 25 bp, Artificial
  probe
  misc_feature (1)..(25): SEQ ID NO: 5098; WAN024FK4; Start 161; Stop 185
caatcttgatcttctttgccttgta

SEQ ID NO: 399946 - DNA, 25 bp, Artificial
  probe
  misc_feature (1)..(25): SEQ ID NO: 5098; WAN024FK4; Start 89; Stop 113
aaacagtgggaattgtagttggaat

SEQ ID NO: 399947 - DNA, 25 bp, Artificial
  probe
  misc_feature (1)..(25): SEQ ID NO: 5098; WAN024FK4; Start 162; Stop 186
aatcttgatcttctttgccttgtat

SEQ ID NO: 399948 - DNA, 25 bp, Artificial
  probe
  misc_feature (1)..(25): SEQ ID NO: 5098; WAN024FK4; Start 159; Stop 183
gacaatcttgatcttctttgccttg

SEQ ID NO: 399949 - DNA, 25 bp, Artificial
  probe
  misc_feature (1)..(25): SEQ ID NO: 5098; WAN024FK4; Start 158; Stop 182
agacaatcttgatcttctttgcctt

SEQ ID NO: 399950 - DNA, 25 bp, Artificial
  probe
  misc_feature (1)..(25): SEQ ID NO: 5099; WAN024CDU; Start 4; Stop 28
agatcattgacaggtgtatcgaatc

SEQ ID NO: 399951 - DNA, 25 bp, Artificial
  probe
  misc_feature (1)..(25): SEQ ID NO: 5099; WAN024CDU; Start 3; Stop 27
gagatcattgacaggtgtatcgaat

SEQ ID NO: 399952 - DNA, 25 bp, Artificial
  probe
  misc_feature (1)..(25): SEQ ID NO: 5099; WAN024CDU; Start 5; Stop 29
gatcattgacaggtgtatcgaatcc

SEQ ID NO: 399953 - DNA, 25 bp, Artificial
  probe
  misc_feature (1)..(25): SEQ ID NO: 5099; WAN024CDU; Start 238; Stop 262
caaactcaagaaattagccaaggaa

SEQ ID NO: 399954 - DNA, 25 bp, Artificial
  probe
  misc_feature (1)..(25): SEQ ID NO: 5099; WAN024CDU; Start 236; Stop 260
atcaaactcaagaaattagccaagg

SEQ ID NO: 399955 - DNA, 25 bp, Artificial
  probe
  misc_feature (1)..(25): SEQ ID NO: 5099; WAN024CDU; Start 232; Stop 256
gcaaatcaaactcaagaaattagcc

SEQ ID NO: 399956 - DNA, 25 bp, Artificial
  probe
  misc_feature (1)..(25): SEQ ID NO: 5099; WAN024CDU; Start 2; Stop 26
tgagatcattgacaggtgtatcgaa

SEQ ID NO: 399957 - DNA, 25 bp, Artificial
  probe
  misc_feature (1)..(25): SEQ ID NO: 5099; WAN024CDU; Start 1; Stop 25
ttgagatcattgacaggtgtatcga

SEQ ID NO: 399958 - DNA, 25 bp, Artificial
  probe
  misc_feature (1)..(25): SEQ ID NO: 5099; WAN024CDU; Start 237; Stop 261
tcaaactcaagaaattagccaagga

SEQ ID NO: 399959 - DNA, 25 bp, Artificial
  probe
  misc_feature (1)..(25): SEQ ID NO: 5099; WAN024CDU; Start 239; Stop 263
aaactcaagaaattagccaaggaat

SEQ ID NO: 399960 - DNA, 25 bp, Artificial
  probe
  misc_feature (1)..(25): SEQ ID NO: 5099; WAN024CDU; Start 85; Stop 109
gatagtttgacagagcaaggtttac

SEQ ID NO: 399961 - DNA, 25 bp, Artificial
  probe
  misc_feature (1)..(25): SEQ ID NO: 5099; WAN024CDU; Start 84; Stop 108
tgatagtttgacagagcaaggttta

SEQ ID NO: 399962 - DNA, 25 bp, Artificial
  probe
  misc_feature (1)..(25): SEQ ID NO: 5099; WAN024CDU; Start 83; Stop 107
atgatagtttgacagagcaaggttt

SEQ ID NO: 399963 - DNA, 25 bp, Artificial
  probe
  misc_feature (1)..(25): SEQ ID NO: 5099; WAN024CDU; Start 82; Stop 106
gatgatagtttgacagagcaaggtt

SEQ ID NO: 399964 - DNA, 25 bp, Artificial
  probe
  misc_feature (1)..(25): SEQ ID NO: 5099; WAN024CDU; Start 233; Stop 257
caaatcaaactcaagaaattagcca

SEQ ID NO: 399965 - DNA, 25 bp, Artificial
  probe
  misc_feature (1)..(25): SEQ ID NO: 5099; WAN024CDU; Start 204; Stop 228
caaagaaacagcaggagaagatgag

SEQ ID NO: 399966 - DNA, 25 bp, Artificial
  probe
  misc_feature (1)..(25): SEQ ID NO: 5099; WAN024CDU; Start 86; Stop 110
atagtttgacagagcaaggtttacg

SEQ ID NO: 399967 - DNA, 25 bp, Artificial
  probe
  misc_feature (1)..(25): SEQ ID NO: 5099; WAN024CDU; Start 8; Stop 32
cattgacaggtgtatcgaatcctac

SEQ ID NO: 399968 - DNA, 25 bp, Artificial
  probe
  misc_feature (1)..(25): SEQ ID NO: 5099; WAN024CDU; Start 235; Stop 259
aatcaaactcaagaaattagccaag

SEQ ID NO: 399969 - DNA, 25 bp, Artificial
  probe
  misc_feature (1)..(25): SEQ ID NO: 5099; WAN024CDU; Start 7; Stop 31
tcattgacaggtgtatcgaatccta

SEQ ID NO: 399970 - DNA, 25 bp, Artificial
  probe
  misc_feature (1)..(25): SEQ ID NO: 5099; WAN024CDU; Start 80; Stop 104
cagatgatagtttgacagagcaagg

SEQ ID NO: 399971 - DNA, 25 bp, Artificial
  probe
  misc_feature (1)..(25): SEQ ID NO: 5099; WAN024CDU; Start 240; Stop 264
aactcaagaaattagccaaggaatt

SEQ ID NO: 399972 - DNA, 25 bp, Artificial
  probe
  misc_feature (1)..(25): SEQ ID NO: 5099; WAN024CDU; Start 205; Stop 229
aaagaaacagcaggagaagatgagt

SEQ ID NO: 399973 - DNA, 25 bp, Artificial
  probe
  misc_feature (1)..(25): SEQ ID NO: 5099; WAN024CDU; Start 81; Stop 105
agatgatagtttgacagagcaaggt

SEQ ID NO: 399974 - DNA, 25 bp, Artificial
  probe
  misc_feature (1)..(25): SEQ ID NO: 5099; WAN024CDU; Start 6; Stop 30
atcattgacaggtgtatcgaatcct

SEQ ID NO: 399975 - DNA, 25 bp, Artificial
  probe
  misc_feature (1)..(25): SEQ ID NO: 5099; WAN024CDU; Start 234; Stop 258
aaatcaaactcaagaaattagccaa

SEQ ID NO: 399976 - DNA, 25 bp, Artificial
  probe
  misc_feature (1)..(25): SEQ ID NO: 5099; WAN024CDU; Start 79; Stop 103
gcagatgatagtttgacagagcaag

SEQ ID NO: 399977 - DNA, 25 bp, Artificial
  probe
  misc_feature (1)..(25): SEQ ID NO: 5099; WAN024CDU; Start 241; Stop 265
actcaagaaattagccaaggaatta

SEQ ID NO: 399978 - DNA, 25 bp, Artificial
  probe
  misc_feature (1)..(25): SEQ ID NO: 5099; WAN024CDU; Start 206; Stop 230
aagaaacagcaggagaagatgagtc

SEQ ID NO: 399979 - DNA, 25 bp, Artificial
  probe
  misc_feature (1)..(25): SEQ ID NO: 5099; WAN024CDU; Start 16; Stop 40
ggtgtatcgaatcctaccacagatt

SEQ ID NO: 399980 - DNA, 25 bp, Artificial
  probe
  misc_feature (1)..(25): SEQ ID NO: 5099; WAN024CDU; Start 9; Stop 33
attgacaggtgtatcgaatcctacc

SEQ ID NO: 399981 - DNA, 25 bp, Artificial
  probe
  misc_feature (1)..(25): SEQ ID NO: 5099; WAN024CDU; Start 244; Stop 268
caagaaattagccaaggaattaagt

SEQ ID NO: 399982 - DNA, 25 bp, Artificial
  probe
  misc_feature (1)..(25): SEQ ID NO: 5099; WAN024CDU; Start 231; Stop 255
tgcaaatcaaactcaagaaattagc

SEQ ID NO: 399983 - DNA, 25 bp, Artificial
  probe
  misc_feature (1)..(25): SEQ ID NO: 5100; WAN024D7A; Start 201; Stop 225
ggaggtgagagcaataatgacatag

SEQ ID NO: 399984 - DNA, 25 bp, Artificial
  probe
  misc_feature (1)..(25): SEQ ID NO: 5100; WAN024D7A; Start 200; Stop 224
aggaggtgagagcaataatgacata

SEQ ID NO: 399985 - DNA, 25 bp, Artificial
  probe
  misc_feature (1)..(25): SEQ ID NO: 5100; WAN024D7A; Start 199; Stop 223
aaggaggtgagagcaataatgacat

SEQ ID NO: 399986 - DNA, 25 bp, Artificial
  probe
  misc_feature (1)..(25): SEQ ID NO: 5100; WAN024D7A; Start 198; Stop 222
gaaggaggtgagagcaataatgaca

SEQ ID NO: 399987 - DNA, 25 bp, Artificial
  probe
  misc_feature (1)..(25): SEQ ID NO: 5100; WAN024D7A; Start 197; Stop 221
ggaaggaggtgagagcaataatgac

SEQ ID NO: 399988 - DNA, 25 bp, Artificial
  probe
  misc_feature (1)..(25): SEQ ID NO: 5100; WAN024D7A; Start 196; Stop 220
aggaaggaggtgagagcaataatga

SEQ ID NO: 399989 - DNA, 25 bp, Artificial
  probe
  misc_feature (1)..(25): SEQ ID NO: 5100; WAN024D7A; Start 151; Stop 175
aaatcaagtatttccagcaagctgt

SEQ ID NO: 399990 - DNA, 25 bp, Artificial
  probe
  misc_feature (1)..(25): SEQ ID NO: 5100; WAN024D7A; Start 145; Stop 169
cagtcaaaatcaagtatttccagca

SEQ ID NO: 399991 - DNA, 25 bp, Artificial
  probe
  misc_feature (1)..(25): SEQ ID NO: 5100; WAN024D7A; Start 143; Stop 167
accagtcaaaatcaagtatttccag

SEQ ID NO: 399992 - DNA, 25 bp, Artificial
  probe
  misc_feature (1)..(25): SEQ ID NO: 5100; WAN024D7A; Start 135; Stop 159
aaagatagaccagtcaaaatcaagt

SEQ ID NO: 399993 - DNA, 25 bp, Artificial
  probe
  misc_feature (1)..(25): SEQ ID NO: 5100; WAN024D7A; Start 148; Stop 172
tcaaaatcaagtatttccagcaagc

SEQ ID NO: 399994 - DNA, 25 bp, Artificial
  probe
  misc_feature (1)..(25): SEQ ID NO: 5100; WAN024D7A; Start 146; Stop 170
agtcaaaatcaagtatttccagcaa

SEQ ID NO: 399995 - DNA, 25 bp, Artificial
  probe
  misc_feature (1)..(25): SEQ ID NO: 5100; WAN024D7A; Start 144; Stop 168
ccagtcaaaatcaagtatttccagc

SEQ ID NO: 399996 - DNA, 25 bp, Artificial
  probe
  misc_feature (1)..(25): SEQ ID NO: 5100; WAN024D7A; Start 142; Stop 166
gaccagtcaaaatcaagtatttcca

SEQ ID NO: 399997 - DNA, 25 bp, Artificial
  probe
  misc_feature (1)..(25): SEQ ID NO: 5100; WAN024D7A; Start 76; Stop 100
gacatgctgaaaaccaacaataaaa

SEQ ID NO: 399998 - DNA, 25 bp, Artificial
  probe
  misc_feature (1)..(25): SEQ ID NO: 5100; WAN024D7A; Start 75; Stop 99
ggacatgctgaaaaccaacaataaa

SEQ ID NO: 399999 - DNA, 25 bp, Artificial
  probe
  misc_feature (1)..(25): SEQ ID NO: 5100; WAN024D7A; Start 147; Stop 171
gtcaaaatcaagtatttccagcaag

SEQ ID NO: 400000 - DNA, 25 bp, Artificial
  probe
  misc_feature (1)..(25): SEQ ID NO: 5100; WAN024D7A; Start 141; Stop 165
agaccagtcaaaatcaagtatttcc

SEQ ID NO: 400001 - DNA, 25 bp, Artificial
  probe
  misc_feature (1)..(25): SEQ ID NO: 5100; WAN024D7A; Start 152; Stop 176
aatcaagtatttccagcaagctgtg

SEQ ID NO: 400002 - DNA, 25 bp, Artificial
  probe
  misc_feature (1)..(25): SEQ ID NO: 5100; WAN024D7A; Start 136; Stop 160
aagatagaccagtcaaaatcaagta

SEQ ID NO: 400003 - DNA, 25 bp, Artificial
  probe
  misc_feature (1)..(25): SEQ ID NO: 5100; WAN024D7A; Start 137; Stop 161
agatagaccagtcaaaatcaagtat

SEQ ID NO: 400004 - DNA, 25 bp, Artificial
  probe
  misc_feature (1)..(25): SEQ ID NO: 5100; WAN024D7A; Start 134; Stop 158
aaaagatagaccagtcaaaatcaag

SEQ ID NO: 400005 - DNA, 25 bp, Artificial
  probe
  misc_feature (1)..(25): SEQ ID NO: 5100; WAN024D7A; Start 149; Stop 173
caaaatcaagtatttccagcaagct

SEQ ID NO: 400006 - DNA, 25 bp, Artificial
  probe
  misc_feature (1)..(25): SEQ ID NO: 5100; WAN024D7A; Start 138; Stop 162
gatagaccagtcaaaatcaagtatt

SEQ ID NO: 400007 - DNA, 25 bp, Artificial
  probe
  misc_feature (1)..(25): SEQ ID NO: 5100; WAN024D7A; Start 73; Stop 97
atggacatgctgaaaaccaacaata

SEQ ID NO: 400008 - DNA, 25 bp, Artificial
  probe
  misc_feature (1)..(25): SEQ ID NO: 5100; WAN024D7A; Start 20; Stop 44
ttcttagagaaagctcttcgatccc

SEQ ID NO: 400009 - DNA, 25 bp, Artificial
  probe
  misc_feature (1)..(25): SEQ ID NO: 5100; WAN024D7A; Start 74; Stop 98
tggacatgctgaaaaccaacaataa

SEQ ID NO: 400010 - DNA, 25 bp, Artificial
  probe
  misc_feature (1)..(25): SEQ ID NO: 5100; WAN024D7A; Start 150; Stop 174
aaaatcaagtatttccagcaagctg

SEQ ID NO: 400011 - DNA, 25 bp, Artificial
  probe
  misc_feature (1)..(25): SEQ ID NO: 5100; WAN024D7A; Start 140; Stop 164
tagaccagtcaaaatcaagtatttc

SEQ ID NO: 400012 - DNA, 25 bp, Artificial
  probe
  misc_feature (1)..(25): SEQ ID NO: 5100; WAN024D7A; Start 22; Stop 46
cttagagaaagctcttcgatccctc

SEQ ID NO: 400013 - DNA, 25 bp, Artificial
  probe
  misc_feature (1)..(25): SEQ ID NO: 5100; WAN024D7A; Start 21; Stop 45
tcttagagaaagctcttcgatccct

SEQ ID NO: 400014 - DNA, 25 bp, Artificial
  probe
  misc_feature (1)..(25): SEQ ID NO: 5100; WAN024D7A; Start 153; Stop 177
atcaagtatttccagcaagctgtgg

SEQ ID NO: 400015 - DNA, 25 bp, Artificial
  probe
  misc_feature (1)..(25): SEQ ID NO: 5100; WAN024D7A; Start 139; Stop 163
atagaccagtcaaaatcaagtattt

SEQ ID NO: 400016 - DNA, 25 bp, Artificial
  probe
  misc_feature (1)..(25): SEQ ID NO: 5101; WAN024FQP; Start 217; Stop 241
gtggtctacgaagatacagatcaat

SEQ ID NO: 400017 - DNA, 25 bp, Artificial
  probe
  misc_feature (1)..(25): SEQ ID NO: 5101; WAN024FQP; Start 218; Stop 242
tggtctacgaagatacagatcaatt

SEQ ID NO: 400018 - DNA, 25 bp, Artificial
  probe
  misc_feature (1)..(25): SEQ ID NO: 5101; WAN024FQP; Start 146; Stop 170
acgatattcaaaccaaacttaccac

SEQ ID NO: 400019 - DNA, 25 bp, Artificial
  probe
  misc_feature (1)..(25): SEQ ID NO: 5101; WAN024FQP; Start 148; Stop 172
gatattcaaaccaaacttaccaccg

SEQ ID NO: 400020 - DNA, 25 bp, Artificial
  probe
  misc_feature (1)..(25): SEQ ID NO: 5101; WAN024FQP; Start 147; Stop 171
cgatattcaaaccaaacttaccacc

SEQ ID NO: 400021 - DNA, 25 bp, Artificial
  probe
  misc_feature (1)..(25): SEQ ID NO: 5101; WAN024FQP; Start 145; Stop 169
gacgatattcaaaccaaacttacca

SEQ ID NO: 400022 - DNA, 25 bp, Artificial
  probe
  misc_feature (1)..(25): SEQ ID NO: 5101; WAN024FQP; Start 149; Stop 173
atattcaaaccaaacttaccaccga

SEQ ID NO: 400023 - DNA, 25 bp, Artificial
  probe
  misc_feature (1)..(25): SEQ ID NO: 5101; WAN024FQP; Start 150; Stop 174
tattcaaaccaaacttaccaccgag

SEQ ID NO: 400024 - DNA, 25 bp, Artificial
  probe
  misc_feature (1)..(25): SEQ ID NO: 5101; WAN024FQP; Start 144; Stop 168
tgacgatattcaaaccaaacttacc

SEQ ID NO: 400025 - DNA, 25 bp, Artificial
  probe
  misc_feature (1)..(25): SEQ ID NO: 5101; WAN024FQP; Start 1; Stop 25
ttgagcaaggaatttcacatctttg

SEQ ID NO: 400026 - DNA, 25 bp, Artificial
  probe
  misc_feature (1)..(25): SEQ ID NO: 5101; WAN024FQP; Start 3; Stop 27
gagcaaggaatttcacatctttgag

SEQ ID NO: 400027 - DNA, 25 bp, Artificial
  probe
  misc_feature (1)..(25): SEQ ID NO: 5101; WAN024FQP; Start 2; Stop 26
tgagcaaggaatttcacatctttga

SEQ ID NO: 400028 - DNA, 25 bp, Artificial
  probe
  misc_feature (1)..(25): SEQ ID NO: 5101; WAN024FQP; Start 219; Stop 243
ggtctacgaagatacagatcaattg

SEQ ID NO: 400029 - DNA, 25 bp, Artificial
  probe
  misc_feature (1)..(25): SEQ ID NO: 5101; WAN024FQP; Start 7; Stop 31
aaggaatttcacatctttgagcttg

SEQ ID NO: 400030 - DNA, 25 bp, Artificial
  probe
  misc_feature (1)..(25): SEQ ID NO: 5101; WAN024FQP; Start 6; Stop 30
caaggaatttcacatctttgagctt

SEQ ID NO: 400031 - DNA, 25 bp, Artificial
  probe
  misc_feature (1)..(25): SEQ ID NO: 5101; WAN024FQP; Start 4; Stop 28
agcaaggaatttcacatctttgagc

SEQ ID NO: 400032 - DNA, 25 bp, Artificial
  probe
  misc_feature (1)..(25): SEQ ID NO: 5101; WAN024FQP; Start 10; Stop 34
gaatttcacatctttgagcttgctt

SEQ ID NO: 400033 - DNA, 25 bp, Artificial
  probe
  misc_feature (1)..(25): SEQ ID NO: 5101; WAN024FQP; Start 216; Stop 240
cgtggtctacgaagatacagatcaa

SEQ ID NO: 400034 - DNA, 25 bp, Artificial
  probe
  misc_feature (1)..(25): SEQ ID NO: 5101; WAN024FQP; Start 11; Stop 35
aatttcacatctttgagcttgcttg

SEQ ID NO: 400035 - DNA, 25 bp, Artificial
  probe
  misc_feature (1)..(25): SEQ ID NO: 5101; WAN024FQP; Start 168; Stop 192
caccgagcatgtccataacttgatc

SEQ ID NO: 400036 - DNA, 25 bp, Artificial
  probe
  misc_feature (1)..(25): SEQ ID NO: 5101; WAN024FQP; Start 39; Stop 63
cgtcatcgaatacatagacaaactc

SEQ ID NO: 400037 - DNA, 25 bp, Artificial
  probe
  misc_feature (1)..(25): SEQ ID NO: 5101; WAN024FQP; Start 45; Stop 69
cgaatacatagacaaactcgttacc

SEQ ID NO: 400038 - DNA, 25 bp, Artificial
  probe
  misc_feature (1)..(25): SEQ ID NO: 5101; WAN024FQP; Start 175; Stop 199
catgtccataacttgatcagcttcg

SEQ ID NO: 400039 - DNA, 25 bp, Artificial
  probe
  misc_feature (1)..(25): SEQ ID NO: 5101; WAN024FQP; Start 164; Stop 188
ttaccaccgagcatgtccataactt

SEQ ID NO: 400040 - DNA, 25 bp, Artificial
  probe
  misc_feature (1)..(25): SEQ ID NO: 5101; WAN024FQP; Start 161; Stop 185
aacttaccaccgagcatgtccataa

SEQ ID NO: 400041 - DNA, 25 bp, Artificial
  probe
  misc_feature (1)..(25): SEQ ID NO: 5101; WAN024FQP; Start 174; Stop 198
gcatgtccataacttgatcagcttc

SEQ ID NO: 400042 - DNA, 25 bp, Artificial
  probe
  misc_feature (1)..(25): SEQ ID NO: 5101; WAN024FQP; Start 9; Stop 33
ggaatttcacatctttgagcttgct

SEQ ID NO: 400043 - DNA, 25 bp, Artificial
  probe
  misc_feature (1)..(25): SEQ ID NO: 5101; WAN024FQP; Start 8; Stop 32
aggaatttcacatctttgagcttgc

SEQ ID NO: 400044 - DNA, 25 bp, Artificial
  probe
  misc_feature (1)..(25): SEQ ID NO: 5101; WAN024FQP; Start 5; Stop 29
gcaaggaatttcacatctttgagct

SEQ ID NO: 400045 - DNA, 25 bp, Artificial
  probe
  misc_feature (1)..(25): SEQ ID NO: 5101; WAN024FQP; Start 163; Stop 187
cttaccaccgagcatgtccataact

SEQ ID NO: 400046 - DNA, 25 bp, Artificial
  probe
  misc_feature (1)..(25): SEQ ID NO: 5101; WAN024FQP; Start 41; Stop 65
tcatcgaatacatagacaaactcgt

SEQ ID NO: 400047 - DNA, 25 bp, Artificial
  probe
  misc_feature (1)..(25): SEQ ID NO: 5101; WAN024FQP; Start 38; Stop 62
tcgtcatcgaatacatagacaaact

SEQ ID NO: 400048 - DNA, 25 bp, Artificial
  probe
  misc_feature (1)..(25): SEQ ID NO: 5101; WAN024FQP; Start 40; Stop 64
gtcatcgaatacatagacaaactcg

SEQ ID NO: 400049 - DNA, 25 bp, Artificial
  probe
  misc_feature (1)..(25): SEQ ID NO: 5102; WAN024GJT; Start 136; Stop 160
gatattcataccagcagccttagtg

SEQ ID NO: 400050 - DNA, 25 bp, Artificial
  probe
  misc_feature (1)..(25): SEQ ID NO: 5102; WAN024GJT; Start 137; Stop 161
atattcataccagcagccttagtga

SEQ ID NO: 400051 - DNA, 25 bp, Artificial
  probe
  misc_feature (1)..(25): SEQ ID NO: 5102; WAN024GJT; Start 135; Stop 159
tgatattcataccagcagccttagt

SEQ ID NO: 400052 - DNA, 25 bp, Artificial
  probe
  misc_feature (1)..(25): SEQ ID NO: 5102; WAN024GJT; Start 138; Stop 162
tattcataccagcagccttagtgac

SEQ ID NO: 400053 - DNA, 25 bp, Artificial
  probe
  misc_feature (1)..(25): SEQ ID NO: 5102; WAN024GJT; Start 115; Stop 139
gacttcttcacagttggaaatgata

SEQ ID NO: 400054 - DNA, 25 bp, Artificial
  probe
  misc_feature (1)..(25): SEQ ID NO: 5102; WAN024GJT; Start 133; Stop 157
aatgatattcataccagcagcctta

SEQ ID NO: 400055 - DNA, 25 bp, Artificial
  probe
  misc_feature (1)..(25): SEQ ID NO: 5102; WAN024GJT; Start 134; Stop 158
atgatattcataccagcagccttag

SEQ ID NO: 400056 - DNA, 25 bp, Artificial
  probe
  misc_feature (1)..(25): SEQ ID NO: 5102; WAN024GJT; Start 114; Stop 138
cgacttcttcacagttggaaatgat

SEQ ID NO: 400057 - DNA, 25 bp, Artificial
  probe
  misc_feature (1)..(25): SEQ ID NO: 5102; WAN024GJT; Start 119; Stop 143
tcttcacagttggaaatgatattca

SEQ ID NO: 400058 - DNA, 25 bp, Artificial
  probe
  misc_feature (1)..(25): SEQ ID NO: 5102; WAN024GJT; Start 116; Stop 140
acttcttcacagttggaaatgatat

SEQ ID NO: 400059 - DNA, 25 bp, Artificial
  probe
  misc_feature (1)..(25): SEQ ID NO: 5102; WAN024GJT; Start 38; Stop 62
aaatcaatcttgaggtcatcgtcag

SEQ ID NO: 400060 - DNA, 25 bp, Artificial
  probe
  misc_feature (1)..(25): SEQ ID NO: 5102; WAN024GJT; Start 39; Stop 63
aatcaatcttgaggtcatcgtcagc

SEQ ID NO: 400061 - DNA, 25 bp, Artificial
  probe
  misc_feature (1)..(25): SEQ ID NO: 5102; WAN024GJT; Start 139; Stop 163
attcataccagcagccttagtgact

SEQ ID NO: 400062 - DNA, 25 bp, Artificial
  probe
  misc_feature (1)..(25): SEQ ID NO: 5102; WAN024GJT; Start 118; Stop 142
ttcttcacagttggaaatgatattc

SEQ ID NO: 400063 - DNA, 25 bp, Artificial
  probe
  misc_feature (1)..(25): SEQ ID NO: 5102; WAN024GJT; Start 117; Stop 141
cttcttcacagttggaaatgatatt

SEQ ID NO: 400064 - DNA, 25 bp, Artificial
  probe
  misc_feature (1)..(25): SEQ ID NO: 5102; WAN024GJT; Start 140; Stop 164
ttcataccagcagccttagtgactt

SEQ ID NO: 400065 - DNA, 25 bp, Artificial
  probe
  misc_feature (1)..(25): SEQ ID NO: 5102; WAN024GJT; Start 3; Stop 27
gagcaagtttgtcaaagtctggttc

SEQ ID NO: 400066 - DNA, 25 bp, Artificial
  probe
  misc_feature (1)..(25): SEQ ID NO: 5102; WAN024GJT; Start 6; Stop 30
caagtttgtcaaagtctggttcgtg

SEQ ID NO: 400067 - DNA, 25 bp, Artificial
  probe
  misc_feature (1)..(25): SEQ ID NO: 5102; WAN024GJT; Start 132; Stop 156
aaatgatattcataccagcagcctt

SEQ ID NO: 400068 - DNA, 25 bp, Artificial
  probe
  misc_feature (1)..(25): SEQ ID NO: 5102; WAN024GJT; Start 127; Stop 151
gttggaaatgatattcataccagca

SEQ ID NO: 400069 - DNA, 25 bp, Artificial
  probe
  misc_feature (1)..(25): SEQ ID NO: 5102; WAN024GJT; Start 128; Stop 152
ttggaaatgatattcataccagcag

SEQ ID NO: 400070 - DNA, 25 bp, Artificial
  probe
  misc_feature (1)..(25): SEQ ID NO: 5102; WAN024GJT; Start 126; Stop 150
agttggaaatgatattcataccagc

SEQ ID NO: 400071 - DNA, 25 bp, Artificial
  probe
  misc_feature (1)..(25): SEQ ID NO: 5102; WAN024GJT; Start 142; Stop 166
cataccagcagccttagtgactttc

SEQ ID NO: 400072 - DNA, 25 bp, Artificial
  probe
  misc_feature (1)..(25): SEQ ID NO: 5102; WAN024GJT; Start 131; Stop 155
gaaatgatattcataccagcagcct

SEQ ID NO: 400073 - DNA, 25 bp, Artificial
  probe
  misc_feature (1)..(25): SEQ ID NO: 5102; WAN024GJT; Start 40; Stop 64
atcaatcttgaggtcatcgtcagca

SEQ ID NO: 400074 - DNA, 25 bp, Artificial
  probe
  misc_feature (1)..(25): SEQ ID NO: 5102; WAN024GJT; Start 129; Stop 153
tggaaatgatattcataccagcagc

SEQ ID NO: 400075 - DNA, 25 bp, Artificial
  probe
  misc_feature (1)..(25): SEQ ID NO: 5102; WAN024GJT; Start 2; Stop 26
tgagcaagtttgtcaaagtctggtt

SEQ ID NO: 400076 - DNA, 25 bp, Artificial
  probe
  misc_feature (1)..(25): SEQ ID NO: 5102; WAN024GJT; Start 130; Stop 154
ggaaatgatattcataccagcagcc

SEQ ID NO: 400077 - DNA, 25 bp, Artificial
  probe
  misc_feature (1)..(25): SEQ ID NO: 5102; WAN024GJT; Start 124; Stop 148
acagttggaaatgatattcatacca

SEQ ID NO: 400078 - DNA, 25 bp, Artificial
  probe
  misc_feature (1)..(25): SEQ ID NO: 5102; WAN024GJT; Start 229; Stop 253
ctccaaaagattgcgatagtgttct

SEQ ID NO: 400079 - DNA, 25 bp, Artificial
  probe
  misc_feature (1)..(25): SEQ ID NO: 5102; WAN024GJT; Start 228; Stop 252
tctccaaaagattgcgatagtgttc

SEQ ID NO: 400080 - DNA, 25 bp, Artificial
  probe
  misc_feature (1)..(25): SEQ ID NO: 5102; WAN024GJT; Start 123; Stop 147
cacagttggaaatgatattcatacc

SEQ ID NO: 400081 - DNA, 25 bp, Artificial
  probe
  misc_feature (1)..(25): SEQ ID NO: 5102; WAN024GJT; Start 32; Stop 56
gcgataaaatcaatcttgaggtcat

SEQ ID NO: 400082 - DNA, 25 bp, Artificial
  probe
  misc_feature (1)..(25): SEQ ID NO: 5103; WAN024DR6; Start 47; Stop 71
cagagttccgtccatttacagtcat

SEQ ID NO: 400083 - DNA, 25 bp, Artificial
  probe
  misc_feature (1)..(25): SEQ ID NO: 5103; WAN024DR6; Start 48; Stop 72
agagttccgtccatttacagtcatg

SEQ ID NO: 400084 - DNA, 25 bp, Artificial
  probe
  misc_feature (1)..(25): SEQ ID NO: 5103; WAN024DR6; Start 82; Stop 106
acgattccccacttctatctaacta

SEQ ID NO: 400085 - DNA, 25 bp, Artificial
  probe
  misc_feature (1)..(25): SEQ ID NO: 5103; WAN024DR6; Start 80; Stop 104
aaacgattccccacttctatctaac

SEQ ID NO: 400086 - DNA, 25 bp, Artificial
  probe
  misc_feature (1)..(25): SEQ ID NO: 5103; WAN024DR6; Start 79; Stop 103
caaacgattccccacttctatctaa

SEQ ID NO: 400087 - DNA, 25 bp, Artificial
  probe
  misc_feature (1)..(25): SEQ ID NO: 5103; WAN024DR6; Start 83; Stop 107
cgattccccacttctatctaactaa

SEQ ID NO: 400088 - DNA, 25 bp, Artificial
  probe
  misc_feature (1)..(25): SEQ ID NO: 5103; WAN024DR6; Start 81; Stop 105
aacgattccccacttctatctaact

SEQ ID NO: 400089 - DNA, 25 bp, Artificial
  probe
  misc_feature (1)..(25): SEQ ID NO: 5103; WAN024DR6; Start 78; Stop 102
tcaaacgattccccacttctatcta

SEQ ID NO: 400090 - DNA, 25 bp, Artificial
  probe
  misc_feature (1)..(25): SEQ ID NO: 5103; WAN024DR6; Start 77; Stop 101
atcaaacgattccccacttctatct

SEQ ID NO: 400091 - DNA, 25 bp, Artificial
  probe
  misc_feature (1)..(25): SEQ ID NO: 5103; WAN024DR6; Start 43; Stop 67
tctccagagttccgtccatttacag

SEQ ID NO: 400092 - DNA, 25 bp, Artificial
  probe
  misc_feature (1)..(25): SEQ ID NO: 5103; WAN024DR6; Start 61; Stop 85
tttacagtcatggaaaatcaaacga

SEQ ID NO: 400093 - DNA, 25 bp, Artificial
  probe
  misc_feature (1)..(25): SEQ ID NO: 5103; WAN024DR6; Start 62; Stop 86
ttacagtcatggaaaatcaaacgat

SEQ ID NO: 400094 - DNA, 25 bp, Artificial
  probe
  misc_feature (1)..(25): SEQ ID NO: 5103; WAN024DR6; Start 45; Stop 69
tccagagttccgtccatttacagtc

SEQ ID NO: 400095 - DNA, 25 bp, Artificial
  probe
  misc_feature (1)..(25): SEQ ID NO: 5103; WAN024DR6; Start 44; Stop 68
ctccagagttccgtccatttacagt

SEQ ID NO: 400096 - DNA, 25 bp, Artificial
  probe
  misc_feature (1)..(25): SEQ ID NO: 5103; WAN024DR6; Start 46; Stop 70
ccagagttccgtccatttacagtca

SEQ ID NO: 400097 - DNA, 25 bp, Artificial
  probe
  misc_feature (1)..(25): SEQ ID NO: 5103; WAN024DR6; Start 41; Stop 65
tctctccagagttccgtccatttac

SEQ ID NO: 400098 - DNA, 25 bp, Artificial
  probe
  misc_feature (1)..(25): SEQ ID NO: 5103; WAN024DR6; Start 40; Stop 64
gtctctccagagttccgtccattta

SEQ ID NO: 400099 - DNA, 25 bp, Artificial
  probe
  misc_feature (1)..(25): SEQ ID NO: 5103; WAN024DR6; Start 75; Stop 99
aaatcaaacgattccccacttctat

SEQ ID NO: 400100 - DNA, 25 bp, Artificial
  probe
  misc_feature (1)..(25): SEQ ID NO: 5103; WAN024DR6; Start 74; Stop 98
aaaatcaaacgattccccacttcta

SEQ ID NO: 400101 - DNA, 25 bp, Artificial
  probe
  misc_feature (1)..(25): SEQ ID NO: 5103; WAN024DR6; Start 84; Stop 108
gattccccacttctatctaactaat

SEQ ID NO: 400102 - DNA, 25 bp, Artificial
  probe
  misc_feature (1)..(25): SEQ ID NO: 5103; WAN024DR6; Start 76; Stop 100
aatcaaacgattccccacttctatc

SEQ ID NO: 400103 - DNA, 25 bp, Artificial
  probe
  misc_feature (1)..(25): SEQ ID NO: 5103; WAN024DR6; Start 42; Stop 66
ctctccagagttccgtccatttaca

SEQ ID NO: 400104 - DNA, 25 bp, Artificial
  probe
  misc_feature (1)..(25): SEQ ID NO: 5103; WAN024DR6; Start 60; Stop 84
atttacagtcatggaaaatcaaacg

SEQ ID NO: 400105 - DNA, 25 bp, Artificial
  probe
  misc_feature (1)..(25): SEQ ID NO: 5103; WAN024DR6; Start 64; Stop 88
acagtcatggaaaatcaaacgattc

SEQ ID NO: 400106 - DNA, 25 bp, Artificial
  probe
  misc_feature (1)..(25): SEQ ID NO: 5103; WAN024DR6; Start 63; Stop 87
tacagtcatggaaaatcaaacgatt

SEQ ID NO: 400107 - DNA, 25 bp, Artificial
  probe
  misc_feature (1)..(25): SEQ ID NO: 5103; WAN024DR6; Start 73; Stop 97
gaaaatcaaacgattccccacttct

SEQ ID NO: 400108 - DNA, 25 bp, Artificial
  probe
  misc_feature (1)..(25): SEQ ID NO: 5103; WAN024DR6; Start 59; Stop 83
catttacagtcatggaaaatcaaac

SEQ ID NO: 400109 - DNA, 25 bp, Artificial
  probe
  misc_feature (1)..(25): SEQ ID NO: 5103; WAN024DR6; Start 49; Stop 73
gagttccgtccatttacagtcatgg

SEQ ID NO: 400110 - DNA, 25 bp, Artificial
  probe
  misc_feature (1)..(25): SEQ ID NO: 5103; WAN024DR6; Start 65; Stop 89
cagtcatggaaaatcaaacgattcc

SEQ ID NO: 400111 - DNA, 25 bp, Artificial
  probe
  misc_feature (1)..(25): SEQ ID NO: 5103; WAN024DR6; Start 58; Stop 82
ccatttacagtcatggaaaatcaaa

SEQ ID NO: 400112 - DNA, 25 bp, Artificial
  probe
  misc_feature (1)..(25): SEQ ID NO: 5103; WAN024DR6; Start 66; Stop 90
agtcatggaaaatcaaacgattccc

SEQ ID NO: 400113 - DNA, 25 bp, Artificial
  probe
  misc_feature (1)..(25): SEQ ID NO: 5103; WAN024DR6; Start 72; Stop 96
ggaaaatcaaacgattccccacttc

SEQ ID NO: 400114 - DNA, 25 bp, Artificial
  probe
  misc_feature (1)..(25): SEQ ID NO: 5103; WAN024DR6; Start 67; Stop 91
gtcatggaaaatcaaacgattcccc

SEQ ID NO: 400115 - DNA, 25 bp, Artificial
  probe
  misc_feature (1)..(25): SEQ ID NO: 5104; WAN024FK8; Start 79; Stop 103
tcttctcatatcagtcgtatagcct

SEQ ID NO: 400116 - DNA, 25 bp, Artificial
  probe
  misc_feature (1)..(25): SEQ ID NO: 5104; WAN024FK8; Start 78; Stop 102
gtcttctcatatcagtcgtatagcc

SEQ ID NO: 400117 - DNA, 25 bp, Artificial
  probe
  misc_feature (1)..(25): SEQ ID NO: 5104; WAN024FK8; Start 77; Stop 101
cgtcttctcatatcagtcgtatagc

SEQ ID NO: 400118 - DNA, 25 bp, Artificial
  probe
  misc_feature (1)..(25): SEQ ID NO: 5104; WAN024FK8; Start 76; Stop 100
gcgtcttctcatatcagtcgtatag

SEQ ID NO: 400119 - DNA, 25 bp, Artificial
  probe
  misc_feature (1)..(25): SEQ ID NO: 5104; WAN024FK8; Start 80; Stop 104
cttctcatatcagtcgtatagccta

SEQ ID NO: 400120 - DNA, 25 bp, Artificial
  probe
  misc_feature (1)..(25): SEQ ID NO: 5104; WAN024FK8; Start 75; Stop 99
ggcgtcttctcatatcagtcgtata

SEQ ID NO: 400121 - DNA, 25 bp, Artificial
  probe
  misc_feature (1)..(25): SEQ ID NO: 5104; WAN024FK8; Start 81; Stop 105
ttctcatatcagtcgtatagcctat

SEQ ID NO: 400122 - DNA, 25 bp, Artificial
  probe
  misc_feature (1)..(25): SEQ ID NO: 5104; WAN024FK8; Start 181; Stop 205
gcgtataagagccatcatcattgtg

SEQ ID NO: 400123 - DNA, 25 bp, Artificial
  probe
  misc_feature (1)..(25): SEQ ID NO: 5104; WAN024FK8; Start 184; Stop 208
tataagagccatcatcattgtggac

SEQ ID NO: 400124 - DNA, 25 bp, Artificial
  probe
  misc_feature (1)..(25): SEQ ID NO: 5104; WAN024FK8; Start 183; Stop 207
gtataagagccatcatcattgtgga

SEQ ID NO: 400125 - DNA, 25 bp, Artificial
  probe
  misc_feature (1)..(25): SEQ ID NO: 5104; WAN024FK8; Start 127; Stop 151
ctccagaacgtacatataagcctta

SEQ ID NO: 400126 - DNA, 25 bp, Artificial
  probe
  misc_feature (1)..(25): SEQ ID NO: 5104; WAN024FK8; Start 82; Stop 106
tctcatatcagtcgtatagcctata

SEQ ID NO: 400127 - DNA, 25 bp, Artificial
  probe
  misc_feature (1)..(25): SEQ ID NO: 5104; WAN024FK8; Start 122; Stop 146
cgacactccagaacgtacatataag

SEQ ID NO: 400128 - DNA, 25 bp, Artificial
  probe
  misc_feature (1)..(25): SEQ ID NO: 5104; WAN024FK8; Start 74; Stop 98
aggcgtcttctcatatcagtcgtat

SEQ ID NO: 400129 - DNA, 25 bp, Artificial
  probe
  misc_feature (1)..(25): SEQ ID NO: 5104; WAN024FK8; Start 123; Stop 147
gacactccagaacgtacatataagc

SEQ ID NO: 400130 - DNA, 25 bp, Artificial
  probe
  misc_feature (1)..(25): SEQ ID NO: 5104; WAN024FK8; Start 126; Stop 150
actccagaacgtacatataagcctt

SEQ ID NO: 400131 - DNA, 25 bp, Artificial
  probe
  misc_feature (1)..(25): SEQ ID NO: 5104; WAN024FK8; Start 182; Stop 206
cgtataagagccatcatcattgtgg

SEQ ID NO: 400132 - DNA, 25 bp, Artificial
  probe
  misc_feature (1)..(25): SEQ ID NO: 5104; WAN024FK8; Start 128; Stop 152
tccagaacgtacatataagccttat

SEQ ID NO: 400133 - DNA, 25 bp, Artificial
  probe
  misc_feature (1)..(25): SEQ ID NO: 5104; WAN024FK8; Start 135; Stop 159
cgtacatataagccttatgatccat

SEQ ID NO: 400134 - DNA, 25 bp, Artificial
  probe
  misc_feature (1)..(25): SEQ ID NO: 5104; WAN024FK8; Start 185; Stop 209
ataagagccatcatcattgtggaca

SEQ ID NO: 400135 - DNA, 25 bp, Artificial
  probe
  misc_feature (1)..(25): SEQ ID NO: 5104; WAN024FK8; Start 125; Stop 149
cactccagaacgtacatataagcct

SEQ ID NO: 400136 - DNA, 25 bp, Artificial
  probe
  misc_feature (1)..(25): SEQ ID NO: 5104; WAN024FK8; Start 4; Stop 28
agcatagataagtttgactggcaag

SEQ ID NO: 400137 - DNA, 25 bp, Artificial
  probe
  misc_feature (1)..(25): SEQ ID NO: 5104; WAN024FK8; Start 3; Stop 27
gagcatagataagtttgactggcaa

SEQ ID NO: 400138 - DNA, 25 bp, Artificial
  probe
  misc_feature (1)..(25): SEQ ID NO: 5104; WAN024FK8; Start 1; Stop 25
ttgagcatagataagtttgactggc

SEQ ID NO: 400139 - DNA, 25 bp, Artificial
  probe
  misc_feature (1)..(25): SEQ ID NO: 5104; WAN024FK8; Start 124; Stop 148
acactccagaacgtacatataagcc

SEQ ID NO: 400140 - DNA, 25 bp, Artificial
  probe
  misc_feature (1)..(25): SEQ ID NO: 5104; WAN024FK8; Start 134; Stop 158
acgtacatataagccttatgatcca

SEQ ID NO: 400141 - DNA, 25 bp, Artificial
  probe
  misc_feature (1)..(25): SEQ ID NO: 5104; WAN024FK8; Start 129; Stop 153
ccagaacgtacatataagccttatg

SEQ ID NO: 400142 - DNA, 25 bp, Artificial
  probe
  misc_feature (1)..(25): SEQ ID NO: 5104; WAN024FK8; Start 83; Stop 107
ctcatatcagtcgtatagcctatat

SEQ ID NO: 400143 - DNA, 25 bp, Artificial
  probe
  misc_feature (1)..(25): SEQ ID NO: 5104; WAN024FK8; Start 186; Stop 210
taagagccatcatcattgtggacaa

SEQ ID NO: 400144 - DNA, 25 bp, Artificial
  probe
  misc_feature (1)..(25): SEQ ID NO: 5104; WAN024FK8; Start 2; Stop 26
tgagcatagataagtttgactggca

SEQ ID NO: 400145 - DNA, 25 bp, Artificial
  probe
  misc_feature (1)..(25): SEQ ID NO: 5104; WAN024FK8; Start 202; Stop 226
tgtggacaatcaaaggaggtaagac

SEQ ID NO: 400146 - DNA, 25 bp, Artificial
  probe
  misc_feature (1)..(25): SEQ ID NO: 5104; WAN024FK8; Start 133; Stop 157
aacgtacatataagccttatgatcc

SEQ ID NO: 400147 - DNA, 25 bp, Artificial
  probe
  misc_feature (1)..(25): SEQ ID NO: 5104; WAN024FK8; Start 130; Stop 154
cagaacgtacatataagccttatga

SEQ ID NO: 400148 - DNA, 25 bp, Artificial
  probe
  misc_feature (1)..(25): SEQ ID NO: 5105; WAN024F28; Start 79; Stop 103
ttcaatagcatcaaaggaatcgaaa

SEQ ID NO: 400149 - DNA, 25 bp, Artificial
  probe
  misc_feature (1)..(25): SEQ ID NO: 5105; WAN024F28; Start 78; Stop 102
tttcaatagcatcaaaggaatcgaa

SEQ ID NO: 400150 - DNA, 25 bp, Artificial
  probe
  misc_feature (1)..(25): SEQ ID NO: 5105; WAN024F28; Start 1; Stop 25
ttgagccaaatcttcagcataagcc

SEQ ID NO: 400151 - DNA, 25 bp, Artificial
  probe
  misc_feature (1)..(25): SEQ ID NO: 5105; WAN024F28; Start 86; Stop 110
gcatcaaaggaatcgaaaataggtt

SEQ ID NO: 400152 - DNA, 25 bp, Artificial
  probe
  misc_feature (1)..(25): SEQ ID NO: 5105; WAN024F28; Start 80; Stop 104
tcaatagcatcaaaggaatcgaaaa

SEQ ID NO: 400153 - DNA, 25 bp, Artificial
  probe
  misc_feature (1)..(25): SEQ ID NO: 5105; WAN024F28; Start 85; Stop 109
agcatcaaaggaatcgaaaataggt

SEQ ID NO: 400154 - DNA, 25 bp, Artificial
  probe
  misc_feature (1)..(25): SEQ ID NO: 5105; WAN024F28; Start 84; Stop 108
tagcatcaaaggaatcgaaaatagg

SEQ ID NO: 400155 - DNA, 25 bp, Artificial
  probe
  misc_feature (1)..(25): SEQ ID NO: 5105; WAN024F28; Start 77; Stop 101
ttttcaatagcatcaaaggaatcga

SEQ ID NO: 400156 - DNA, 25 bp, Artificial
  probe
  misc_feature (1)..(25): SEQ ID NO: 5105; WAN024F28; Start 81; Stop 105
caatagcatcaaaggaatcgaaaat

SEQ ID NO: 400157 - DNA, 25 bp, Artificial
  probe
  misc_feature (1)..(25): SEQ ID NO: 5105; WAN024F28; Start 88; Stop 112
atcaaaggaatcgaaaataggttgt

SEQ ID NO: 400158 - DNA, 25 bp, Artificial
  probe
  misc_feature (1)..(25): SEQ ID NO: 5105; WAN024F28; Start 87; Stop 111
catcaaaggaatcgaaaataggttg

SEQ ID NO: 400159 - DNA, 25 bp, Artificial
  probe
  misc_feature (1)..(25): SEQ ID NO: 5105; WAN024F28; Start 76; Stop 100
cttttcaatagcatcaaaggaatcg

SEQ ID NO: 400160 - DNA, 25 bp, Artificial
  probe
  misc_feature (1)..(25): SEQ ID NO: 5105; WAN024F28; Start 3; Stop 27
gagccaaatcttcagcataagcctg

SEQ ID NO: 400161 - DNA, 25 bp, Artificial
  probe
  misc_feature (1)..(25): SEQ ID NO: 5105; WAN024F28; Start 6; Stop 30
ccaaatcttcagcataagcctgatc

SEQ ID NO: 400162 - DNA, 25 bp, Artificial
  probe
  misc_feature (1)..(25): SEQ ID NO: 5105; WAN024F28; Start 2; Stop 26
tgagccaaatcttcagcataagcct

SEQ ID NO: 400163 - DNA, 25 bp, Artificial
  probe
  misc_feature (1)..(25): SEQ ID NO: 5105; WAN024F28; Start 83; Stop 107
atagcatcaaaggaatcgaaaatag

SEQ ID NO: 400164 - DNA, 25 bp, Artificial
  probe
  misc_feature (1)..(25): SEQ ID NO: 5105; WAN024F28; Start 75; Stop 99
tcttttcaatagcatcaaaggaatc

SEQ ID NO: 400165 - DNA, 25 bp, Artificial
  probe
  misc_feature (1)..(25): SEQ ID NO: 5105; WAN024F28; Start 82; Stop 106
aatagcatcaaaggaatcgaaaata

SEQ ID NO: 400166 - DNA, 25 bp, Artificial
  probe
  misc_feature (1)..(25): SEQ ID NO: 5105; WAN024F28; Start 73; Stop 97
tttcttttcaatagcatcaaaggaa

SEQ ID NO: 400167 - DNA, 25 bp, Artificial
  probe
  misc_feature (1)..(25): SEQ ID NO: 5105; WAN024F28; Start 72; Stop 96
ttttcttttcaatagcatcaaagga

SEQ ID NO: 400168 - DNA, 25 bp, Artificial
  probe
  misc_feature (1)..(25): SEQ ID NO: 5105; WAN024F28; Start 74; Stop 98
ttcttttcaatagcatcaaaggaat

SEQ ID NO: 400169 - DNA, 25 bp, Artificial
  probe
  misc_feature (1)..(25): SEQ ID NO: 5105; WAN024F28; Start 138; Stop 162
ctccgtagggctcatcatctacatg

SEQ ID NO: 400170 - DNA, 25 bp, Artificial
  probe
  misc_feature (1)..(25): SEQ ID NO: 5105; WAN024F28; Start 180; Stop 204
tttctcgaaaattatgatactggat

SEQ ID NO: 400171 - DNA, 25 bp, Artificial
  probe
  misc_feature (1)..(25): SEQ ID NO: 5105; WAN024F28; Start 9; Stop 33
aatcttcagcataagcctgatcaaa

SEQ ID NO: 400172 - DNA, 25 bp, Artificial
  probe
  misc_feature (1)..(25): SEQ ID NO: 5105; WAN024F28; Start 8; Stop 32
aaatcttcagcataagcctgatcaa

SEQ ID NO: 400173 - DNA, 25 bp, Artificial
  probe
  misc_feature (1)..(25): SEQ ID NO: 5105; WAN024F28; Start 142; Stop 166
gtagggctcatcatctacatgacgg

SEQ ID NO: 400174 - DNA, 25 bp, Artificial
  probe
  misc_feature (1)..(25): SEQ ID NO: 5105; WAN024F28; Start 140; Stop 164
ccgtagggctcatcatctacatgac

SEQ ID NO: 400175 - DNA, 25 bp, Artificial
  probe
  misc_feature (1)..(25): SEQ ID NO: 5105; WAN024F28; Start 5; Stop 29
gccaaatcttcagcataagcctgat

SEQ ID NO: 400176 - DNA, 25 bp, Artificial
  probe
  misc_feature (1)..(25): SEQ ID NO: 5105; WAN024F28; Start 139; Stop 163
tccgtagggctcatcatctacatga

SEQ ID NO: 400177 - DNA, 25 bp, Artificial
  probe
  misc_feature (1)..(25): SEQ ID NO: 5105; WAN024F28; Start 10; Stop 34
atcttcagcataagcctgatcaaac

SEQ ID NO: 400178 - DNA, 25 bp, Artificial
  probe
  misc_feature (1)..(25): SEQ ID NO: 5105; WAN024F28; Start 7; Stop 31
caaatcttcagcataagcctgatca

SEQ ID NO: 400179 - DNA, 25 bp, Artificial
  probe
  misc_feature (1)..(25): SEQ ID NO: 5105; WAN024F28; Start 179; Stop 203
ttttctcgaaaattatgatactgga

SEQ ID NO: 400180 - DNA, 25 bp, Artificial
  probe
  misc_feature (1)..(25): SEQ ID NO: 5105; WAN024F28; Start 137; Stop 161
cctccgtagggctcatcatctacat

SEQ ID NO: 400181 - DNA, 25 bp, Artificial
  probe
  misc_feature (1)..(25): SEQ ID NO: 5106; WAN024GNX; Start 196; Stop 220
ggaatcaagtgtaagagaagaccaa

SEQ ID NO: 400182 - DNA, 25 bp, Artificial
  probe
  misc_feature (1)..(25): SEQ ID NO: 5106; WAN024GNX; Start 194; Stop 218
taggaatcaagtgtaagagaagacc

SEQ ID NO: 400183 - DNA, 25 bp, Artificial
  probe
  misc_feature (1)..(25): SEQ ID NO: 5106; WAN024GNX; Start 197; Stop 221
gaatcaagtgtaagagaagaccaag

SEQ ID NO: 400184 - DNA, 25 bp, Artificial
  probe
  misc_feature (1)..(25): SEQ ID NO: 5106; WAN024GNX; Start 195; Stop 219
aggaatcaagtgtaagagaagacca

SEQ ID NO: 400185 - DNA, 25 bp, Artificial
  probe
  misc_feature (1)..(25): SEQ ID NO: 5106; WAN024GNX; Start 191; Stop 215
tgctaggaatcaagtgtaagagaag

SEQ ID NO: 400186 - DNA, 25 bp, Artificial
  probe
  misc_feature (1)..(25): SEQ ID NO: 5106; WAN024GNX; Start 192; Stop 216
gctaggaatcaagtgtaagagaaga

SEQ ID NO: 400187 - DNA, 25 bp, Artificial
  probe
  misc_feature (1)..(25): SEQ ID NO: 5106; WAN024GNX; Start 190; Stop 214
ttgctaggaatcaagtgtaagagaa

SEQ ID NO: 400188 - DNA, 25 bp, Artificial
  probe
  misc_feature (1)..(25): SEQ ID NO: 5106; WAN024GNX; Start 193; Stop 217
ctaggaatcaagtgtaagagaagac

SEQ ID NO: 400189 - DNA, 25 bp, Artificial
  probe
  misc_feature (1)..(25): SEQ ID NO: 5106; WAN024GNX; Start 129; Stop 153
taaggtcaccaacatggacaagata

SEQ ID NO: 400190 - DNA, 25 bp, Artificial
  probe
  misc_feature (1)..(25): SEQ ID NO: 5106; WAN024GNX; Start 189; Stop 213
tttgctaggaatcaagtgtaagaga

SEQ ID NO: 400191 - DNA, 25 bp, Artificial
  probe
  misc_feature (1)..(25): SEQ ID NO: 5106; WAN024GNX; Start 138; Stop 162
caacatggacaagatacctgctgaa

SEQ ID NO: 400192 - DNA, 25 bp, Artificial
  probe
  misc_feature (1)..(25): SEQ ID NO: 5106; WAN024GNX; Start 128; Stop 152
ataaggtcaccaacatggacaagat

SEQ ID NO: 400193 - DNA, 25 bp, Artificial
  probe
  misc_feature (1)..(25): SEQ ID NO: 5106; WAN024GNX; Start 142; Stop 166
atggacaagatacctgctgaaactt

SEQ ID NO: 400194 - DNA, 25 bp, Artificial
  probe
  misc_feature (1)..(25): SEQ ID NO: 5106; WAN024GNX; Start 127; Stop 151
aataaggtcaccaacatggacaaga

SEQ ID NO: 400195 - DNA, 25 bp, Artificial
  probe
  misc_feature (1)..(25): SEQ ID NO: 5106; WAN024GNX; Start 148; Stop 172
aagatacctgctgaaacttggaaca

SEQ ID NO: 400196 - DNA, 25 bp, Artificial
  probe
  misc_feature (1)..(25): SEQ ID NO: 5106; WAN024GNX; Start 150; Stop 174
gatacctgctgaaacttggaacaac

SEQ ID NO: 400197 - DNA, 25 bp, Artificial
  probe
  misc_feature (1)..(25): SEQ ID NO: 5106; WAN024GNX; Start 149; Stop 173
agatacctgctgaaacttggaacaa

SEQ ID NO: 400198 - DNA, 25 bp, Artificial
  probe
  misc_feature (1)..(25): SEQ ID NO: 5106; WAN024GNX; Start 120; Stop 144
caagacaaataaggtcaccaacatg

SEQ ID NO: 400199 - DNA, 25 bp, Artificial
  probe
  misc_feature (1)..(25): SEQ ID NO: 5106; WAN024GNX; Start 155; Stop 179
ctgctgaaacttggaacaacttacc

SEQ ID NO: 400200 - DNA, 25 bp, Artificial
  probe
  misc_feature (1)..(25): SEQ ID NO: 5106; WAN024GNX; Start 154; Stop 178
cctgctgaaacttggaacaacttac

SEQ ID NO: 400201 - DNA, 25 bp, Artificial
  probe
  misc_feature (1)..(25): SEQ ID NO: 5106; WAN024GNX; Start 130; Stop 154
aaggtcaccaacatggacaagatac

SEQ ID NO: 400202 - DNA, 25 bp, Artificial
  probe
  misc_feature (1)..(25): SEQ ID NO: 5106; WAN024GNX; Start 151; Stop 175
atacctgctgaaacttggaacaact

SEQ ID NO: 400203 - DNA, 25 bp, Artificial
  probe
  misc_feature (1)..(25): SEQ ID NO: 5106; WAN024GNX; Start 119; Stop 143
gcaagacaaataaggtcaccaacat

SEQ ID NO: 400204 - DNA, 25 bp, Artificial
  probe
  misc_feature (1)..(25): SEQ ID NO: 5106; WAN024GNX; Start 153; Stop 177
acctgctgaaacttggaacaactta

SEQ ID NO: 400205 - DNA, 25 bp, Artificial
  probe
  misc_feature (1)..(25): SEQ ID NO: 5106; WAN024GNX; Start 152; Stop 176
tacctgctgaaacttggaacaactt

SEQ ID NO: 400206 - DNA, 25 bp, Artificial
  probe
  misc_feature (1)..(25): SEQ ID NO: 5106; WAN024GNX; Start 139; Stop 163
aacatggacaagatacctgctgaaa

SEQ ID NO: 400207 - DNA, 25 bp, Artificial
  probe
  misc_feature (1)..(25): SEQ ID NO: 5106; WAN024GNX; Start 126; Stop 150
aaataaggtcaccaacatggacaag

SEQ ID NO: 400208 - DNA, 25 bp, Artificial
  probe
  misc_feature (1)..(25): SEQ ID NO: 5106; WAN024GNX; Start 121; Stop 145
aagacaaataaggtcaccaacatgg

SEQ ID NO: 400209 - DNA, 25 bp, Artificial
  probe
  misc_feature (1)..(25): SEQ ID NO: 5106; WAN024GNX; Start 141; Stop 165
catggacaagatacctgctgaaact

SEQ ID NO: 400210 - DNA, 25 bp, Artificial
  probe
  misc_feature (1)..(25): SEQ ID NO: 5106; WAN024GNX; Start 158; Stop 182
ctgaaacttggaacaacttaccacc

SEQ ID NO: 400211 - DNA, 25 bp, Artificial
  probe
  misc_feature (1)..(25): SEQ ID NO: 5106; WAN024GNX; Start 125; Stop 149
caaataaggtcaccaacatggacaa

SEQ ID NO: 400212 - DNA, 25 bp, Artificial
  probe
  misc_feature (1)..(25): SEQ ID NO: 5106; WAN024GNX; Start 133; Stop 157
gtcaccaacatggacaagatacctg

SEQ ID NO: 400213 - DNA, 25 bp, Artificial
  probe
  misc_feature (1)..(25): SEQ ID NO: 5106; WAN024GNX; Start 140; Stop 164
acatggacaagatacctgctgaaac

SEQ ID NO: 400214 - DNA, 25 bp, Artificial
  probe
  misc_feature (1)..(25): SEQ ID NO: 5107; WAN024CJV; Start 194; Stop 218
ctaactgccagattgacaatactcc

SEQ ID NO: 400215 - DNA, 25 bp, Artificial
  probe
  misc_feature (1)..(25): SEQ ID NO: 5107; WAN024CJV; Start 193; Stop 217
gctaactgccagattgacaatactc

SEQ ID NO: 400216 - DNA, 25 bp, Artificial
  probe
  misc_feature (1)..(25): SEQ ID NO: 5107; WAN024CJV; Start 192; Stop 216
tgctaactgccagattgacaatact

SEQ ID NO: 400217 - DNA, 25 bp, Artificial
  probe
  misc_feature (1)..(25): SEQ ID NO: 5107; WAN024CJV; Start 219; Stop 243
gagaaagcccaatagactaatgtgt

SEQ ID NO: 400218 - DNA, 25 bp, Artificial
  probe
  misc_feature (1)..(25): SEQ ID NO: 5107; WAN024CJV; Start 195; Stop 219
taactgccagattgacaatactccg

SEQ ID NO: 400219 - DNA, 25 bp, Artificial
  probe
  misc_feature (1)..(25): SEQ ID NO: 5107; WAN024CJV; Start 191; Stop 215
ctgctaactgccagattgacaatac

SEQ ID NO: 400220 - DNA, 25 bp, Artificial
  probe
  misc_feature (1)..(25): SEQ ID NO: 5107; WAN024CJV; Start 218; Stop 242
cgagaaagcccaatagactaatgtg

SEQ ID NO: 400221 - DNA, 25 bp, Artificial
  probe
  misc_feature (1)..(25): SEQ ID NO: 5107; WAN024CJV; Start 14; Stop 38
aactatccatgagcacagccataag

SEQ ID NO: 400222 - DNA, 25 bp, Artificial
  probe
  misc_feature (1)..(25): SEQ ID NO: 5107; WAN024CJV; Start 201; Stop 225
ccagattgacaatactccgagaaag

SEQ ID NO: 400223 - DNA, 25 bp, Artificial
  probe
  misc_feature (1)..(25): SEQ ID NO: 5107; WAN024CJV; Start 215; Stop 239
ctccgagaaagcccaatagactaat

SEQ ID NO: 400224 - DNA, 25 bp, Artificial
  probe
  misc_feature (1)..(25): SEQ ID NO: 5107; WAN024CJV; Start 216; Stop 240
tccgagaaagcccaatagactaatg

SEQ ID NO: 400225 - DNA, 25 bp, Artificial
  probe
  misc_feature (1)..(25): SEQ ID NO: 5107; WAN024CJV; Start 220; Stop 244
agaaagcccaatagactaatgtgtc

SEQ ID NO: 400226 - DNA, 25 bp, Artificial
  probe
  misc_feature (1)..(25): SEQ ID NO: 5107; WAN024CJV; Start 202; Stop 226
cagattgacaatactccgagaaagc

SEQ ID NO: 400227 - DNA, 25 bp, Artificial
  probe
  misc_feature (1)..(25): SEQ ID NO: 5107; WAN024CJV; Start 211; Stop 235
aatactccgagaaagcccaatagac

SEQ ID NO: 400228 - DNA, 25 bp, Artificial
  probe
  misc_feature (1)..(25): SEQ ID NO: 5107; WAN024CJV; Start 210; Stop 234
caatactccgagaaagcccaataga

SEQ ID NO: 400229 - DNA, 25 bp, Artificial
  probe
  misc_feature (1)..(25): SEQ ID NO: 5107; WAN024CJV; Start 190; Stop 214
cctgctaactgccagattgacaata

SEQ ID NO: 400230 - DNA, 25 bp, Artificial
  probe
  misc_feature (1)..(25): SEQ ID NO: 5107; WAN024CJV; Start 16; Stop 40
ctatccatgagcacagccataagac

SEQ ID NO: 400231 - DNA, 25 bp, Artificial
  probe
  misc_feature (1)..(25): SEQ ID NO: 5107; WAN024CJV; Start 217; Stop 241
ccgagaaagcccaatagactaatgt

SEQ ID NO: 400232 - DNA, 25 bp, Artificial
  probe
  misc_feature (1)..(25): SEQ ID NO: 5107; WAN024CJV; Start 213; Stop 237
tactccgagaaagcccaatagacta

SEQ ID NO: 400233 - DNA, 25 bp, Artificial
  probe
  misc_feature (1)..(25): SEQ ID NO: 5107; WAN024CJV; Start 209; Stop 233
acaatactccgagaaagcccaatag

SEQ ID NO: 400234 - DNA, 25 bp, Artificial
  probe
  misc_feature (1)..(25): SEQ ID NO: 5107; WAN024CJV; Start 208; Stop 232
gacaatactccgagaaagcccaata

SEQ ID NO: 400235 - DNA, 25 bp, Artificial
  probe
  misc_feature (1)..(25): SEQ ID NO: 5107; WAN024CJV; Start 221; Stop 245
gaaagcccaatagactaatgtgtcg

SEQ ID NO: 400236 - DNA, 25 bp, Artificial
  probe
  misc_feature (1)..(25): SEQ ID NO: 5107; WAN024CJV; Start 109; Stop 133
agaaattctctgtcacgaacaaagg

SEQ ID NO: 400237 - DNA, 25 bp, Artificial
  probe
  misc_feature (1)..(25): SEQ ID NO: 5107; WAN024CJV; Start 15; Stop 39
actatccatgagcacagccataaga

SEQ ID NO: 400238 - DNA, 25 bp, Artificial
  probe
  misc_feature (1)..(25): SEQ ID NO: 5107; WAN024CJV; Start 125; Stop 149
gaacaaagggctggagaatttcaag

SEQ ID NO: 400239 - DNA, 25 bp, Artificial
  probe
  misc_feature (1)..(25): SEQ ID NO: 5107; WAN024CJV; Start 199; Stop 223
tgccagattgacaatactccgagaa

SEQ ID NO: 400240 - DNA, 25 bp, Artificial
  probe
  misc_feature (1)..(25): SEQ ID NO: 5107; WAN024CJV; Start 212; Stop 236
atactccgagaaagcccaatagact

SEQ ID NO: 400241 - DNA, 25 bp, Artificial
  probe
  misc_feature (1)..(25): SEQ ID NO: 5107; WAN024CJV; Start 17; Stop 41
tatccatgagcacagccataagaca

SEQ ID NO: 400242 - DNA, 25 bp, Artificial
  probe
  misc_feature (1)..(25): SEQ ID NO: 5107; WAN024CJV; Start 203; Stop 227
agattgacaatactccgagaaagcc

SEQ ID NO: 400243 - DNA, 25 bp, Artificial
  probe
  misc_feature (1)..(25): SEQ ID NO: 5107; WAN024CJV; Start 126; Stop 150
aacaaagggctggagaatttcaaga

SEQ ID NO: 400244 - DNA, 25 bp, Artificial
  probe
  misc_feature (1)..(25): SEQ ID NO: 5107; WAN024CJV; Start 110; Stop 134
gaaattctctgtcacgaacaaaggg

SEQ ID NO: 400245 - DNA, 25 bp, Artificial
  probe
  misc_feature (1)..(25): SEQ ID NO: 5107; WAN024CJV; Start 7; Stop 31
caagtcaaactatccatgagcacag

SEQ ID NO: 400246 - DNA, 25 bp, Artificial
  probe
  misc_feature (1)..(25): SEQ ID NO: 5107; WAN024CJV; Start 222; Stop 246
aaagcccaatagactaatgtgtcgt

SEQ ID NO: 400247 - DNA, 25 bp, Artificial
  probe
  misc_feature (1)..(25): SEQ ID NO: 5108; WAN024ATO; Start 75; Stop 99
agataagataaggacttgctggttc

SEQ ID NO: 400248 - DNA, 25 bp, Artificial
  probe
  misc_feature (1)..(25): SEQ ID NO: 5108; WAN024ATO; Start 76; Stop 100
gataagataaggacttgctggttcg

SEQ ID NO: 400249 - DNA, 25 bp, Artificial
  probe
  misc_feature (1)..(25): SEQ ID NO: 5108; WAN024ATO; Start 72; Stop 96
atcagataagataaggacttgctgg

SEQ ID NO: 400250 - DNA, 25 bp, Artificial
  probe
  misc_feature (1)..(25): SEQ ID NO: 5108; WAN024ATO; Start 74; Stop 98
cagataagataaggacttgctggtt

SEQ ID NO: 400251 - DNA, 25 bp, Artificial
  probe
  misc_feature (1)..(25): SEQ ID NO: 5108; WAN024ATO; Start 73; Stop 97
tcagataagataaggacttgctggt

SEQ ID NO: 400252 - DNA, 25 bp, Artificial
  probe
  misc_feature (1)..(25): SEQ ID NO: 5108; WAN024ATO; Start 77; Stop 101
ataagataaggacttgctggttcgg

SEQ ID NO: 400253 - DNA, 25 bp, Artificial
  probe
  misc_feature (1)..(25): SEQ ID NO: 5108; WAN024ATO; Start 41; Stop 65
aaccatacatatctggaacctcctc

SEQ ID NO: 400254 - DNA, 25 bp, Artificial
  probe
  misc_feature (1)..(25): SEQ ID NO: 5108; WAN024ATO; Start 40; Stop 64
caaccatacatatctggaacctcct

SEQ ID NO: 400255 - DNA, 25 bp, Artificial
  probe
  misc_feature (1)..(25): SEQ ID NO: 5108; WAN024ATO; Start 71; Stop 95
tatcagataagataaggacttgctg

SEQ ID NO: 400256 - DNA, 25 bp, Artificial
  probe
  misc_feature (1)..(25): SEQ ID NO: 5108; WAN024ATO; Start 43; Stop 67
ccatacatatctggaacctcctctg

SEQ ID NO: 400257 - DNA, 25 bp, Artificial
  probe
  misc_feature (1)..(25): SEQ ID NO: 5108; WAN024ATO; Start 44; Stop 68
catacatatctggaacctcctctgc

SEQ ID NO: 400258 - DNA, 25 bp, Artificial
  probe
  misc_feature (1)..(25): SEQ ID NO: 5108; WAN024ATO; Start 42; Stop 66
accatacatatctggaacctcctct

SEQ ID NO: 400259 - DNA, 25 bp, Artificial
  probe
  misc_feature (1)..(25): SEQ ID NO: 5108; WAN024ATO; Start 45; Stop 69
atacatatctggaacctcctctgct

SEQ ID NO: 400260 - DNA, 25 bp, Artificial
  probe
  misc_feature (1)..(25): SEQ ID NO: 5108; WAN024ATO; Start 30; Stop 54
ctcctttgtccaaccatacatatct

SEQ ID NO: 400261 - DNA, 25 bp, Artificial
  probe
  misc_feature (1)..(25): SEQ ID NO: 5108; WAN024ATO; Start 29; Stop 53
tctcctttgtccaaccatacatatc

SEQ ID NO: 400262 - DNA, 25 bp, Artificial
  probe
  misc_feature (1)..(25): SEQ ID NO: 5108; WAN024ATO; Start 31; Stop 55
tcctttgtccaaccatacatatctg

SEQ ID NO: 400263 - DNA, 25 bp, Artificial
  probe
  misc_feature (1)..(25): SEQ ID NO: 5108; WAN024ATO; Start 28; Stop 52
gtctcctttgtccaaccatacatat

SEQ ID NO: 400264 - DNA, 25 bp, Artificial
  probe
  misc_feature (1)..(25): SEQ ID NO: 5108; WAN024ATO; Start 46; Stop 70
tacatatctggaacctcctctgctt

SEQ ID NO: 400265 - DNA, 25 bp, Artificial
  probe
  misc_feature (1)..(25): SEQ ID NO: 5108; WAN024ATO; Start 39; Stop 63
ccaaccatacatatctggaacctcc

SEQ ID NO: 400266 - DNA, 25 bp, Artificial
  probe
  misc_feature (1)..(25): SEQ ID NO: 5108; WAN024ATO; Start 27; Stop 51
agtctcctttgtccaaccatacata

SEQ ID NO: 400267 - DNA, 25 bp, Artificial
  probe
  misc_feature (1)..(25): SEQ ID NO: 5108; WAN024ATO; Start 49; Stop 73
atatctggaacctcctctgctttat

SEQ ID NO: 400268 - DNA, 25 bp, Artificial
  probe
  misc_feature (1)..(25): SEQ ID NO: 5108; WAN024ATO; Start 186; Stop 210
caattcttctgctaaatcaccaggt

SEQ ID NO: 400269 - DNA, 25 bp, Artificial
  probe
  misc_feature (1)..(25): SEQ ID NO: 5108; WAN024ATO; Start 50; Stop 74
tatctggaacctcctctgctttatc

SEQ ID NO: 400270 - DNA, 25 bp, Artificial
  probe
  misc_feature (1)..(25): SEQ ID NO: 5108; WAN024ATO; Start 32; Stop 56
cctttgtccaaccatacatatctgg

SEQ ID NO: 400271 - DNA, 25 bp, Artificial
  probe
  misc_feature (1)..(25): SEQ ID NO: 5108; WAN024ATO; Start 48; Stop 72
catatctggaacctcctctgcttta

SEQ ID NO: 400272 - DNA, 25 bp, Artificial
  probe
  misc_feature (1)..(25): SEQ ID NO: 5108; WAN024ATO; Start 136; Stop 160
ttaatcttcgttcctgttcccacaa

SEQ ID NO: 400273 - DNA, 25 bp, Artificial
  probe
  misc_feature (1)..(25): SEQ ID NO: 5108; WAN024ATO; Start 135; Stop 159
tttaatcttcgttcctgttcccaca

SEQ ID NO: 400274 - DNA, 25 bp, Artificial
  probe
  misc_feature (1)..(25): SEQ ID NO: 5108; WAN024ATO; Start 26; Stop 50
cagtctcctttgtccaaccatacat

SEQ ID NO: 400275 - DNA, 25 bp, Artificial
  probe
  misc_feature (1)..(25): SEQ ID NO: 5108; WAN024ATO; Start 137; Stop 161
taatcttcgttcctgttcccacaac

SEQ ID NO: 400276 - DNA, 25 bp, Artificial
  probe
  misc_feature (1)..(25): SEQ ID NO: 5108; WAN024ATO; Start 187; Stop 211
aattcttctgctaaatcaccaggtg

SEQ ID NO: 400277 - DNA, 25 bp, Artificial
  probe
  misc_feature (1)..(25): SEQ ID NO: 5108; WAN024ATO; Start 105; Stop 129
aagattcttcccttcttcagcagaa

SEQ ID NO: 400278 - DNA, 25 bp, Artificial
  probe
  misc_feature (1)..(25): SEQ ID NO: 5108; WAN024ATO; Start 134; Stop 158
ttttaatcttcgttcctgttcccac

SEQ ID NO: 400279 - DNA, 25 bp, Artificial
  probe
  misc_feature (1)..(25): SEQ ID NO: 5108; WAN024ATO; Start 51; Stop 75
atctggaacctcctctgctttatca

SEQ ID NO: 400280 - DNA, 25 bp, Artificial
  probe
  misc_feature (1)..(25): SEQ ID NO: 5109; WAN024CWJ; Start 210; Stop 234
ttggcaagtagttcttcagagcatt

SEQ ID NO: 400281 - DNA, 25 bp, Artificial
  probe
  misc_feature (1)..(25): SEQ ID NO: 5109; WAN024CWJ; Start 161; Stop 185
tctttcaaagcatccatagactctt

SEQ ID NO: 400282 - DNA, 25 bp, Artificial
  probe
  misc_feature (1)..(25): SEQ ID NO: 5109; WAN024CWJ; Start 160; Stop 184
ctctttcaaagcatccatagactct

SEQ ID NO: 400283 - DNA, 25 bp, Artificial
  probe
  misc_feature (1)..(25): SEQ ID NO: 5109; WAN024CWJ; Start 209; Stop 233
gttggcaagtagttcttcagagcat

SEQ ID NO: 400284 - DNA, 25 bp, Artificial
  probe
  misc_feature (1)..(25): SEQ ID NO: 5109; WAN024CWJ; Start 159; Stop 183
cctctttcaaagcatccatagactc

SEQ ID NO: 400285 - DNA, 25 bp, Artificial
  probe
  misc_feature (1)..(25): SEQ ID NO: 5109; WAN024CWJ; Start 171; Stop 195
catccatagactctttggtgtagtt

SEQ ID NO: 400286 - DNA, 25 bp, Artificial
  probe
  misc_feature (1)..(25): SEQ ID NO: 5109; WAN024CWJ; Start 174; Stop 198
ccatagactctttggtgtagttagt

SEQ ID NO: 400287 - DNA, 25 bp, Artificial
  probe
  misc_feature (1)..(25): SEQ ID NO: 5109; WAN024CWJ; Start 173; Stop 197
tccatagactctttggtgtagttag

SEQ ID NO: 400288 - DNA, 25 bp, Artificial
  probe
  misc_feature (1)..(25): SEQ ID NO: 5109; WAN024CWJ; Start 211; Stop 235
tggcaagtagttcttcagagcattt

SEQ ID NO: 400289 - DNA, 25 bp, Artificial
  probe
  misc_feature (1)..(25): SEQ ID NO: 5109; WAN024CWJ; Start 172; Stop 196
atccatagactctttggtgtagtta

SEQ ID NO: 400290 - DNA, 25 bp, Artificial
  probe
  misc_feature (1)..(25): SEQ ID NO: 5109; WAN024CWJ; Start 168; Stop 192
aagcatccatagactctttggtgta

SEQ ID NO: 400291 - DNA, 25 bp, Artificial
  probe
  misc_feature (1)..(25): SEQ ID NO: 5109; WAN024CWJ; Start 183; Stop 207
ctttggtgtagttagtcatggcaac

SEQ ID NO: 400292 - DNA, 25 bp, Artificial
  probe
  misc_feature (1)..(25): SEQ ID NO: 5109; WAN024CWJ; Start 182; Stop 206
tctttggtgtagttagtcatggcaa

SEQ ID NO: 400293 - DNA, 25 bp, Artificial
  probe
  misc_feature (1)..(25): SEQ ID NO: 5109; WAN024CWJ; Start 162; Stop 186
ctttcaaagcatccatagactcttt

SEQ ID NO: 400294 - DNA, 25 bp, Artificial
  probe
  misc_feature (1)..(25): SEQ ID NO: 5109; WAN024CWJ; Start 181; Stop 205
ctctttggtgtagttagtcatggca

SEQ ID NO: 400295 - DNA, 25 bp, Artificial
  probe
  misc_feature (1)..(25): SEQ ID NO: 5109; WAN024CWJ; Start 169; Stop 193
agcatccatagactctttggtgtag

SEQ ID NO: 400296 - DNA, 25 bp, Artificial
  probe
  misc_feature (1)..(25): SEQ ID NO: 5109; WAN024CWJ; Start 158; Stop 182
gcctctttcaaagcatccatagact

SEQ ID NO: 400297 - DNA, 25 bp, Artificial
  probe
  misc_feature (1)..(25): SEQ ID NO: 5109; WAN024CWJ; Start 170; Stop 194
gcatccatagactctttggtgtagt

SEQ ID NO: 400298 - DNA, 25 bp, Artificial
  probe
  misc_feature (1)..(25): SEQ ID NO: 5109; WAN024CWJ; Start 180; Stop 204
actctttggtgtagttagtcatggc

SEQ ID NO: 400299 - DNA, 25 bp, Artificial
  probe
  misc_feature (1)..(25): SEQ ID NO: 5109; WAN024CWJ; Start 228; Stop 252
gagcattttctgtcaacatcttacc

SEQ ID NO: 400300 - DNA, 25 bp, Artificial
  probe
  misc_feature (1)..(25): SEQ ID NO: 5109; WAN024CWJ; Start 229; Stop 253
agcattttctgtcaacatcttacct

SEQ ID NO: 400301 - DNA, 25 bp, Artificial
  probe
  misc_feature (1)..(25): SEQ ID NO: 5109; WAN024CWJ; Start 205; Stop 229
aaccgttggcaagtagttcttcaga

SEQ ID NO: 400302 - DNA, 25 bp, Artificial
  probe
  misc_feature (1)..(25): SEQ ID NO: 5109; WAN024CWJ; Start 230; Stop 254
gcattttctgtcaacatcttacctg

SEQ ID NO: 400303 - DNA, 25 bp, Artificial
  probe
  misc_feature (1)..(25): SEQ ID NO: 5109; WAN024CWJ; Start 213; Stop 237
gcaagtagttcttcagagcattttc

SEQ ID NO: 400304 - DNA, 25 bp, Artificial
  probe
  misc_feature (1)..(25): SEQ ID NO: 5109; WAN024CWJ; Start 214; Stop 238
caagtagttcttcagagcattttct

SEQ ID NO: 400305 - DNA, 25 bp, Artificial
  probe
  misc_feature (1)..(25): SEQ ID NO: 5109; WAN024CWJ; Start 227; Stop 251
agagcattttctgtcaacatcttac

SEQ ID NO: 400306 - DNA, 25 bp, Artificial
  probe
  misc_feature (1)..(25): SEQ ID NO: 5109; WAN024CWJ; Start 188; Stop 212
gtgtagttagtcatggcaaccgttg

SEQ ID NO: 400307 - DNA, 25 bp, Artificial
  probe
  misc_feature (1)..(25): SEQ ID NO: 5109; WAN024CWJ; Start 167; Stop 191
aaagcatccatagactctttggtgt

SEQ ID NO: 400308 - DNA, 25 bp, Artificial
  probe
  misc_feature (1)..(25): SEQ ID NO: 5109; WAN024CWJ; Start 57; Stop 81
tcttctgaaccaaagcattcttcaa

SEQ ID NO: 400309 - DNA, 25 bp, Artificial
  probe
  misc_feature (1)..(25): SEQ ID NO: 5109; WAN024CWJ; Start 56; Stop 80
ttcttctgaaccaaagcattcttca

SEQ ID NO: 400310 - DNA, 25 bp, Artificial
  probe
  misc_feature (1)..(25): SEQ ID NO: 5109; WAN024CWJ; Start 231; Stop 255
cattttctgtcaacatcttacctgt

SEQ ID NO: 400311 - DNA, 25 bp, Artificial
  probe
  misc_feature (1)..(25): SEQ ID NO: 5109; WAN024CWJ; Start 212; Stop 236
ggcaagtagttcttcagagcatttt

SEQ ID NO: 400312 - DNA, 25 bp, Artificial
  probe
  misc_feature (1)..(25): SEQ ID NO: 5109; WAN024CWJ; Start 204; Stop 228
caaccgttggcaagtagttcttcag

SEQ ID NO: 400313 - DNA, 25 bp, Artificial
  probe
  misc_feature (1)..(25): SEQ ID NO: 5110; WAN024FBB; Start 248; Stop 272
ggtcgattatccatacagtcttctt

SEQ ID NO: 400314 - DNA, 25 bp, Artificial
  probe
  misc_feature (1)..(25): SEQ ID NO: 5110; WAN024FBB; Start 35; Stop 59
gcagtgttacaagcaatgacaatca

SEQ ID NO: 400315 - DNA, 25 bp, Artificial
  probe
  misc_feature (1)..(25): SEQ ID NO: 5110; WAN024FBB; Start 99; Stop 123
aagtatattcacgaatttgctcagc

SEQ ID NO: 400316 - DNA, 25 bp, Artificial
  probe
  misc_feature (1)..(25): SEQ ID NO: 5110; WAN024FBB; Start 97; Stop 121
ccaagtatattcacgaatttgctca

SEQ ID NO: 400317 - DNA, 25 bp, Artificial
  probe
  misc_feature (1)..(25): SEQ ID NO: 5110; WAN024FBB; Start 251; Stop 275
cgattatccatacagtcttctttct

SEQ ID NO: 400318 - DNA, 25 bp, Artificial
  probe
  misc_feature (1)..(25): SEQ ID NO: 5110; WAN024FBB; Start 257; Stop 281
tccatacagtcttctttctagtctt

SEQ ID NO: 400319 - DNA, 25 bp, Artificial
  probe
  misc_feature (1)..(25): SEQ ID NO: 5110; WAN024FBB; Start 96; Stop 120
gccaagtatattcacgaatttgctc

SEQ ID NO: 400320 - DNA, 25 bp, Artificial
  probe
  misc_feature (1)..(25): SEQ ID NO: 5110; WAN024FBB; Start 36; Stop 60
cagtgttacaagcaatgacaatcat

SEQ ID NO: 400321 - DNA, 25 bp, Artificial
  probe
  misc_feature (1)..(25): SEQ ID NO: 5110; WAN024FBB; Start 246; Stop 270
ttggtcgattatccatacagtcttc

SEQ ID NO: 400322 - DNA, 25 bp, Artificial
  probe
  misc_feature (1)..(25): SEQ ID NO: 5110; WAN024FBB; Start 94; Stop 118
ctgccaagtatattcacgaatttgc

SEQ ID NO: 400323 - DNA, 25 bp, Artificial
  probe
  misc_feature (1)..(25): SEQ ID NO: 5110; WAN024FBB; Start 93; Stop 117
gctgccaagtatattcacgaatttg

SEQ ID NO: 400324 - DNA, 25 bp, Artificial
  probe
  misc_feature (1)..(25): SEQ ID NO: 5110; WAN024FBB; Start 245; Stop 269
attggtcgattatccatacagtctt

SEQ ID NO: 400325 - DNA, 25 bp, Artificial
  probe
  misc_feature (1)..(25): SEQ ID NO: 5110; WAN024FBB; Start 244; Stop 268
aattggtcgattatccatacagtct

SEQ ID NO: 400326 - DNA, 25 bp, Artificial
  probe
  misc_feature (1)..(25): SEQ ID NO: 5110; WAN024FBB; Start 256; Stop 280
atccatacagtcttctttctagtct

SEQ ID NO: 400327 - DNA, 25 bp, Artificial
  probe
  misc_feature (1)..(25): SEQ ID NO: 5110; WAN024FBB; Start 98; Stop 122
caagtatattcacgaatttgctcag

SEQ ID NO: 400328 - DNA, 25 bp, Artificial
  probe
  misc_feature (1)..(25): SEQ ID NO: 5110; WAN024FBB; Start 95; Stop 119
tgccaagtatattcacgaatttgct

SEQ ID NO: 400329 - DNA, 25 bp, Artificial
  probe
  misc_feature (1)..(25): SEQ ID NO: 5110; WAN024FBB; Start 247; Stop 271
tggtcgattatccatacagtcttct

SEQ ID NO: 400330 - DNA, 25 bp, Artificial
  probe
  misc_feature (1)..(25): SEQ ID NO: 5110; WAN024FBB; Start 258; Stop 282
ccatacagtcttctttctagtcttt

SEQ ID NO: 400331 - DNA, 25 bp, Artificial
  probe
  misc_feature (1)..(25): SEQ ID NO: 5110; WAN024FBB; Start 148; Stop 172
cgccgaatctccaatatagacgatt

SEQ ID NO: 400332 - DNA, 25 bp, Artificial
  probe
  misc_feature (1)..(25): SEQ ID NO: 5110; WAN024FBB; Start 92; Stop 116
agctgccaagtatattcacgaattt

SEQ ID NO: 400333 - DNA, 25 bp, Artificial
  probe
  misc_feature (1)..(25): SEQ ID NO: 5110; WAN024FBB; Start 34; Stop 58
cgcagtgttacaagcaatgacaatc

SEQ ID NO: 400334 - DNA, 25 bp, Artificial
  probe
  misc_feature (1)..(25): SEQ ID NO: 5110; WAN024FBB; Start 150; Stop 174
ccgaatctccaatatagacgatttc

SEQ ID NO: 400335 - DNA, 25 bp, Artificial
  probe
  misc_feature (1)..(25): SEQ ID NO: 5110; WAN024FBB; Start 149; Stop 173
gccgaatctccaatatagacgattt

SEQ ID NO: 400336 - DNA, 25 bp, Artificial
  probe
  misc_feature (1)..(25): SEQ ID NO: 5110; WAN024FBB; Start 155; Stop 179
tctccaatatagacgatttcttcat

SEQ ID NO: 400337 - DNA, 25 bp, Artificial
  probe
  misc_feature (1)..(25): SEQ ID NO: 5110; WAN024FBB; Start 154; Stop 178
atctccaatatagacgatttcttca

SEQ ID NO: 400338 - DNA, 25 bp, Artificial
  probe
  misc_feature (1)..(25): SEQ ID NO: 5110; WAN024FBB; Start 249; Stop 273
gtcgattatccatacagtcttcttt

SEQ ID NO: 400339 - DNA, 25 bp, Artificial
  probe
  misc_feature (1)..(25): SEQ ID NO: 5110; WAN024FBB; Start 158; Stop 182
ccaatatagacgatttcttcatggg

SEQ ID NO: 400340 - DNA, 25 bp, Artificial
  probe
  misc_feature (1)..(25): SEQ ID NO: 5110; WAN024FBB; Start 33; Stop 57
tcgcagtgttacaagcaatgacaat

SEQ ID NO: 400341 - DNA, 25 bp, Artificial
  probe
  misc_feature (1)..(25): SEQ ID NO: 5110; WAN024FBB; Start 151; Stop 175
cgaatctccaatatagacgatttct

SEQ ID NO: 400342 - DNA, 25 bp, Artificial
  probe
  misc_feature (1)..(25): SEQ ID NO: 5110; WAN024FBB; Start 250; Stop 274
tcgattatccatacagtcttctttc

SEQ ID NO: 400343 - DNA, 25 bp, Artificial
  probe
  misc_feature (1)..(25): SEQ ID NO: 5110; WAN024FBB; Start 255; Stop 279
tatccatacagtcttctttctagtc

SEQ ID NO: 400344 - DNA, 25 bp, Artificial
  probe
  misc_feature (1)..(25): SEQ ID NO: 5110; WAN024FBB; Start 64; Stop 88
gacatccttggtcaagagaaagttg

SEQ ID NO: 400345 - DNA, 25 bp, Artificial
  probe
  misc_feature (1)..(25): SEQ ID NO: 5110; WAN024FBB; Start 156; Stop 180
ctccaatatagacgatttcttcatg

SEQ ID NO: 400346 - DNA, 25 bp, Artificial
  probe
  misc_feature (1)..(25): SEQ ID NO: 5111; WAN024FJS; Start 172; Stop 196
cgccttgtccaatatgaattagatg

SEQ ID NO: 400347 - DNA, 25 bp, Artificial
  probe
  misc_feature (1)..(25): SEQ ID NO: 5111; WAN024FJS; Start 171; Stop 195
tcgccttgtccaatatgaattagat

SEQ ID NO: 400348 - DNA, 25 bp, Artificial
  probe
  misc_feature (1)..(25): SEQ ID NO: 5111; WAN024FJS; Start 482; Stop 506
tcactccaattcaagaacaacaaga

SEQ ID NO: 400349 - DNA, 25 bp, Artificial
  probe
  misc_feature (1)..(25): SEQ ID NO: 5111; WAN024FJS; Start 481; Stop 505
gtcactccaattcaagaacaacaag

SEQ ID NO: 400350 - DNA, 25 bp, Artificial
  probe
  misc_feature (1)..(25): SEQ ID NO: 5111; WAN024FJS; Start 173; Stop 197
gccttgtccaatatgaattagatgt

SEQ ID NO: 400351 - DNA, 25 bp, Artificial
  probe
  misc_feature (1)..(25): SEQ ID NO: 5111; WAN024FJS; Start 483; Stop 507
cactccaattcaagaacaacaagaa

SEQ ID NO: 400352 - DNA, 25 bp, Artificial
  probe
  misc_feature (1)..(25): SEQ ID NO: 5111; WAN024FJS; Start 170; Stop 194
gtcgccttgtccaatatgaattaga

SEQ ID NO: 400353 - DNA, 25 bp, Artificial
  probe
  misc_feature (1)..(25): SEQ ID NO: 5111; WAN024FJS; Start 480; Stop 504
agtcactccaattcaagaacaacaa

SEQ ID NO: 400354 - DNA, 25 bp, Artificial
  probe
  misc_feature (1)..(25): SEQ ID NO: 5111; WAN024FJS; Start 479; Stop 503
aagtcactccaattcaagaacaaca

SEQ ID NO: 400355 - DNA, 25 bp, Artificial
  probe
  misc_feature (1)..(25): SEQ ID NO: 5111; WAN024FJS; Start 169; Stop 193
cgtcgccttgtccaatatgaattag

SEQ ID NO: 400356 - DNA, 25 bp, Artificial
  probe
  misc_feature (1)..(25): SEQ ID NO: 5111; WAN024FJS; Start 174; Stop 198
ccttgtccaatatgaattagatgtg

SEQ ID NO: 400357 - DNA, 25 bp, Artificial
  probe
  misc_feature (1)..(25): SEQ ID NO: 5111; WAN024FJS; Start 478; Stop 502
aaagtcactccaattcaagaacaac

SEQ ID NO: 400358 - DNA, 25 bp, Artificial
  probe
  misc_feature (1)..(25): SEQ ID NO: 5111; WAN024FJS; Start 261; Stop 285
ggctattgaattggagaagaaacag

SEQ ID NO: 400359 - DNA, 25 bp, Artificial
  probe
  misc_feature (1)..(25): SEQ ID NO: 5111; WAN024FJS; Start 222; Stop 246
aattgagcgtgatggagtaactaaa

SEQ ID NO: 400360 - DNA, 25 bp, Artificial
  probe
  misc_feature (1)..(25): SEQ ID NO: 5111; WAN024FJS; Start 221; Stop 245
aaattgagcgtgatggagtaactaa

SEQ ID NO: 400361 - DNA, 25 bp, Artificial
  probe
  misc_feature (1)..(25): SEQ ID NO: 5111; WAN024FJS; Start 223; Stop 247
attgagcgtgatggagtaactaaag

SEQ ID NO: 400362 - DNA, 25 bp, Artificial
  probe
  misc_feature (1)..(25): SEQ ID NO: 5111; WAN024FJS; Start 486; Stop 510
tccaattcaagaacaacaagaaaca

SEQ ID NO: 400363 - DNA, 25 bp, Artificial
  probe
  misc_feature (1)..(25): SEQ ID NO: 5111; WAN024FJS; Start 355; Stop 379
tataacgccctaaataacgctctag

SEQ ID NO: 400364 - DNA, 25 bp, Artificial
  probe
  misc_feature (1)..(25): SEQ ID NO: 5111; WAN024FJS; Start 484; Stop 508
actccaattcaagaacaacaagaaa

SEQ ID NO: 400365 - DNA, 25 bp, Artificial
  probe
  misc_feature (1)..(25): SEQ ID NO: 5111; WAN024FJS; Start 114; Stop 138
tgatacaagtcaagagagcttaatg

SEQ ID NO: 400366 - DNA, 25 bp, Artificial
  probe
  misc_feature (1)..(25): SEQ ID NO: 5111; WAN024FJS; Start 485; Stop 509
ctccaattcaagaacaacaagaaac

SEQ ID NO: 400367 - DNA, 25 bp, Artificial
  probe
  misc_feature (1)..(25): SEQ ID NO: 5111; WAN024FJS; Start 226; Stop 250
gagcgtgatggagtaactaaagaag

SEQ ID NO: 400368 - DNA, 25 bp, Artificial
  probe
  misc_feature (1)..(25): SEQ ID NO: 5111; WAN024FJS; Start 117; Stop 141
tacaagtcaagagagcttaatgtgc

SEQ ID NO: 400369 - DNA, 25 bp, Artificial
  probe
  misc_feature (1)..(25): SEQ ID NO: 5111; WAN024FJS; Start 116; Stop 140
atacaagtcaagagagcttaatgtg

SEQ ID NO: 400370 - DNA, 25 bp, Artificial
  probe
  misc_feature (1)..(25): SEQ ID NO: 5111; WAN024FJS; Start 260; Stop 284
gggctattgaattggagaagaaaca

SEQ ID NO: 400371 - DNA, 25 bp, Artificial
  probe
  misc_feature (1)..(25): SEQ ID NO: 5111; WAN024FJS; Start 38; Stop 62
aagacatgacagatattcagattga

SEQ ID NO: 400372 - DNA, 25 bp, Artificial
  probe
  misc_feature (1)..(25): SEQ ID NO: 5111; WAN024FJS; Start 487; Stop 511
ccaattcaagaacaacaagaaacaa

SEQ ID NO: 400373 - DNA, 25 bp, Artificial
  probe
  misc_feature (1)..(25): SEQ ID NO: 5111; WAN024FJS; Start 176; Stop 200
ttgtccaatatgaattagatgtggt

SEQ ID NO: 400374 - DNA, 25 bp, Artificial
  probe
  misc_feature (1)..(25): SEQ ID NO: 5111; WAN024FJS; Start 228; Stop 252
gcgtgatggagtaactaaagaagta

SEQ ID NO: 400375 - DNA, 25 bp, Artificial
  probe
  misc_feature (1)..(25): SEQ ID NO: 5111; WAN024FJS; Start 115; Stop 139
gatacaagtcaagagagcttaatgt

SEQ ID NO: 400376 - DNA, 25 bp, Artificial
  probe
  misc_feature (1)..(25): SEQ ID NO: 5111; WAN024FJS; Start 315; Stop 339
cgacggtacatttgacaagttatat

SEQ ID NO: 400377 - DNA, 25 bp, Artificial
  probe
  misc_feature (1)..(25): SEQ ID NO: 5111; WAN024FJS; Start 225; Stop 249
tgagcgtgatggagtaactaaagaa

SEQ ID NO: 400378 - DNA, 25 bp, Artificial
  probe
  misc_feature (1)..(25): SEQ ID NO: 5111; WAN024FJS; Start 224; Stop 248
ttgagcgtgatggagtaactaaaga

SEQ ID NO: 400379 - DNA, 25 bp, Artificial
  probe
  misc_feature (1)..(25): SEQ ID NO: 5112; WAN024CPH; Start 52; Stop 76
aactatatcgtaacctgtcacatcc

SEQ ID NO: 400380 - DNA, 25 bp, Artificial
  probe
  misc_feature (1)..(25): SEQ ID NO: 5112; WAN024CPH; Start 418; Stop 442
attctcctgctgatagactccttct

SEQ ID NO: 400381 - DNA, 25 bp, Artificial
  probe
  misc_feature (1)..(25): SEQ ID NO: 5112; WAN024CPH; Start 417; Stop 441
cattctcctgctgatagactccttc

SEQ ID NO: 400382 - DNA, 25 bp, Artificial
  probe
  misc_feature (1)..(25): SEQ ID NO: 5112; WAN024CPH; Start 420; Stop 444
tctcctgctgatagactccttctaa

SEQ ID NO: 400383 - DNA, 25 bp, Artificial
  probe
  misc_feature (1)..(25): SEQ ID NO: 5112; WAN024CPH; Start 419; Stop 443
ttctcctgctgatagactccttcta

SEQ ID NO: 400384 - DNA, 25 bp, Artificial
  probe
  misc_feature (1)..(25): SEQ ID NO: 5112; WAN024CPH; Start 23; Stop 47
aaatcgctgataaattctcggtaag

SEQ ID NO: 400385 - DNA, 25 bp, Artificial
  probe
  misc_feature (1)..(25): SEQ ID NO: 5112; WAN024CPH; Start 49; Stop 73
agaaactatatcgtaacctgtcaca

SEQ ID NO: 400386 - DNA, 25 bp, Artificial
  probe
  misc_feature (1)..(25): SEQ ID NO: 5112; WAN024CPH; Start 55; Stop 79
tatatcgtaacctgtcacatccctt

SEQ ID NO: 400387 - DNA, 25 bp, Artificial
  probe
  misc_feature (1)..(25): SEQ ID NO: 5112; WAN024CPH; Start 24; Stop 48
aatcgctgataaattctcggtaaga

SEQ ID NO: 400388 - DNA, 25 bp, Artificial
  probe
  misc_feature (1)..(25): SEQ ID NO: 5112; WAN024CPH; Start 148; Stop 172
ataacccaacatcccttgataatcc

SEQ ID NO: 400389 - DNA, 25 bp, Artificial
  probe
  misc_feature (1)..(25): SEQ ID NO: 5112; WAN024CPH; Start 145; Stop 169
cagataacccaacatcccttgataa

SEQ ID NO: 400390 - DNA, 25 bp, Artificial
  probe
  misc_feature (1)..(25): SEQ ID NO: 5112; WAN024CPH; Start 146; Stop 170
agataacccaacatcccttgataat

SEQ ID NO: 400391 - DNA, 25 bp, Artificial
  probe
  misc_feature (1)..(25): SEQ ID NO: 5112; WAN024CPH; Start 54; Stop 78
ctatatcgtaacctgtcacatccct

SEQ ID NO: 400392 - DNA, 25 bp, Artificial
  probe
  misc_feature (1)..(25): SEQ ID NO: 5112; WAN024CPH; Start 147; Stop 171
gataacccaacatcccttgataatc

SEQ ID NO: 400393 - DNA, 25 bp, Artificial
  probe
  misc_feature (1)..(25): SEQ ID NO: 5112; WAN024CPH; Start 38; Stop 62
tctcggtaagaagaaactatatcgt

SEQ ID NO: 400394 - DNA, 25 bp, Artificial
  probe
  misc_feature (1)..(25): SEQ ID NO: 5112; WAN024CPH; Start 152; Stop 176
cccaacatcccttgataatccttac

SEQ ID NO: 400395 - DNA, 25 bp, Artificial
  probe
  misc_feature (1)..(25): SEQ ID NO: 5112; WAN024CPH; Start 53; Stop 77
actatatcgtaacctgtcacatccc

SEQ ID NO: 400396 - DNA, 25 bp, Artificial
  probe
  misc_feature (1)..(25): SEQ ID NO: 5112; WAN024CPH; Start 48; Stop 72
aagaaactatatcgtaacctgtcac

SEQ ID NO: 400397 - DNA, 25 bp, Artificial
  probe
  misc_feature (1)..(25): SEQ ID NO: 5112; WAN024CPH; Start 151; Stop 175
acccaacatcccttgataatcctta

SEQ ID NO: 400398 - DNA, 25 bp, Artificial
  probe
  misc_feature (1)..(25): SEQ ID NO: 5112; WAN024CPH; Start 149; Stop 173
taacccaacatcccttgataatcct

SEQ ID NO: 400399 - DNA, 25 bp, Artificial
  probe
  misc_feature (1)..(25): SEQ ID NO: 5112; WAN024CPH; Start 56; Stop 80
atatcgtaacctgtcacatcccttt

SEQ ID NO: 400400 - DNA, 25 bp, Artificial
  probe
  misc_feature (1)..(25): SEQ ID NO: 5112; WAN024CPH; Start 51; Stop 75
aaactatatcgtaacctgtcacatc

SEQ ID NO: 400401 - DNA, 25 bp, Artificial
  probe
  misc_feature (1)..(25): SEQ ID NO: 5112; WAN024CPH; Start 50; Stop 74
gaaactatatcgtaacctgtcacat

SEQ ID NO: 400402 - DNA, 25 bp, Artificial
  probe
  misc_feature (1)..(25): SEQ ID NO: 5112; WAN024CPH; Start 144; Stop 168
tcagataacccaacatcccttgata

SEQ ID NO: 400403 - DNA, 25 bp, Artificial
  probe
  misc_feature (1)..(25): SEQ ID NO: 5112; WAN024CPH; Start 153; Stop 177
ccaacatcccttgataatccttacg

SEQ ID NO: 400404 - DNA, 25 bp, Artificial
  probe
  misc_feature (1)..(25): SEQ ID NO: 5112; WAN024CPH; Start 47; Stop 71
gaagaaactatatcgtaacctgtca

SEQ ID NO: 400405 - DNA, 25 bp, Artificial
  probe
  misc_feature (1)..(25): SEQ ID NO: 5112; WAN024CPH; Start 46; Stop 70
agaagaaactatatcgtaacctgtc

SEQ ID NO: 400406 - DNA, 25 bp, Artificial
  probe
  misc_feature (1)..(25): SEQ ID NO: 5112; WAN024CPH; Start 57; Stop 81
tatcgtaacctgtcacatccctttc

SEQ ID NO: 400407 - DNA, 25 bp, Artificial
  probe
  misc_feature (1)..(25): SEQ ID NO: 5112; WAN024CPH; Start 150; Stop 174
aacccaacatcccttgataatcctt

SEQ ID NO: 400408 - DNA, 25 bp, Artificial
  probe
  misc_feature (1)..(25): SEQ ID NO: 5112; WAN024CPH; Start 39; Stop 63
ctcggtaagaagaaactatatcgta

SEQ ID NO: 400409 - DNA, 25 bp, Artificial
  probe
  misc_feature (1)..(25): SEQ ID NO: 5112; WAN024CPH; Start 138; Stop 162
tttcagtcagataacccaacatccc

SEQ ID NO: 400410 - DNA, 25 bp, Artificial
  probe
  misc_feature (1)..(25): SEQ ID NO: 5112; WAN024CPH; Start 45; Stop 69
aagaagaaactatatcgtaacctgt

SEQ ID NO: 400411 - DNA, 25 bp, Artificial
  probe
  misc_feature (1)..(25): SEQ ID NO: 5112; WAN024CPH; Start 41; Stop 65
cggtaagaagaaactatatcgtaac

SEQ ID NO: 400412 - DNA, 25 bp, Artificial
  probe
  misc_feature (1)..(25): SEQ ID NO: 5113; WAN024EZA; Start 120; Stop 144
caacaatacgaagaacctcagcatt

SEQ ID NO: 400413 - DNA, 25 bp, Artificial
  probe
  misc_feature (1)..(25): SEQ ID NO: 5113; WAN024EZA; Start 129; Stop 153
gaagaacctcagcattgtcattacg

SEQ ID NO: 400414 - DNA, 25 bp, Artificial
  probe
  misc_feature (1)..(25): SEQ ID NO: 5113; WAN024EZA; Start 128; Stop 152
cgaagaacctcagcattgtcattac

SEQ ID NO: 400415 - DNA, 25 bp, Artificial
  probe
  misc_feature (1)..(25): SEQ ID NO: 5113; WAN024EZA; Start 125; Stop 149
atacgaagaacctcagcattgtcat

SEQ ID NO: 400416 - DNA, 25 bp, Artificial
  probe
  misc_feature (1)..(25): SEQ ID NO: 5113; WAN024EZA; Start 132; Stop 156
gaacctcagcattgtcattacgaac

SEQ ID NO: 400417 - DNA, 25 bp, Artificial
  probe
  misc_feature (1)..(25): SEQ ID NO: 5113; WAN024EZA; Start 131; Stop 155
agaacctcagcattgtcattacgaa

SEQ ID NO: 400418 - DNA, 25 bp, Artificial
  probe
  misc_feature (1)..(25): SEQ ID NO: 5113; WAN024EZA; Start 130; Stop 154
aagaacctcagcattgtcattacga

SEQ ID NO: 400419 - DNA, 25 bp, Artificial
  probe
  misc_feature (1)..(25): SEQ ID NO: 5113; WAN024EZA; Start 127; Stop 151
acgaagaacctcagcattgtcatta

SEQ ID NO: 400420 - DNA, 25 bp, Artificial
  probe
  misc_feature (1)..(25): SEQ ID NO: 5113; WAN024EZA; Start 126; Stop 150
tacgaagaacctcagcattgtcatt

SEQ ID NO: 400421 - DNA, 25 bp, Artificial
  probe
  misc_feature (1)..(25): SEQ ID NO: 5113; WAN024EZA; Start 124; Stop 148
aatacgaagaacctcagcattgtca

SEQ ID NO: 400422 - DNA, 25 bp, Artificial
  probe
  misc_feature (1)..(25): SEQ ID NO: 5113; WAN024EZA; Start 119; Stop 143
tcaacaatacgaagaacctcagcat

SEQ ID NO: 400423 - DNA, 25 bp, Artificial
  probe
  misc_feature (1)..(25): SEQ ID NO: 5113; WAN024EZA; Start 70; Stop 94
agtgttgatttccttgatttgcttt

SEQ ID NO: 400424 - DNA, 25 bp, Artificial
  probe
  misc_feature (1)..(25): SEQ ID NO: 5113; WAN024EZA; Start 66; Stop 90
ttccagtgttgatttccttgatttg

SEQ ID NO: 400425 - DNA, 25 bp, Artificial
  probe
  misc_feature (1)..(25): SEQ ID NO: 5113; WAN024EZA; Start 65; Stop 89
gttccagtgttgatttccttgattt

SEQ ID NO: 400426 - DNA, 25 bp, Artificial
  probe
  misc_feature (1)..(25): SEQ ID NO: 5113; WAN024EZA; Start 62; Stop 86
tatgttccagtgttgatttccttga

SEQ ID NO: 400427 - DNA, 25 bp, Artificial
  probe
  misc_feature (1)..(25): SEQ ID NO: 5113; WAN024EZA; Start 61; Stop 85
gtatgttccagtgttgatttccttg

SEQ ID NO: 400428 - DNA, 25 bp, Artificial
  probe
  misc_feature (1)..(25): SEQ ID NO: 5113; WAN024EZA; Start 69; Stop 93
cagtgttgatttccttgatttgctt

SEQ ID NO: 400429 - DNA, 25 bp, Artificial
  probe
  misc_feature (1)..(25): SEQ ID NO: 5113; WAN024EZA; Start 63; Stop 87
atgttccagtgttgatttccttgat

SEQ ID NO: 400430 - DNA, 25 bp, Artificial
  probe
  misc_feature (1)..(25): SEQ ID NO: 5113; WAN024EZA; Start 64; Stop 88
tgttccagtgttgatttccttgatt

SEQ ID NO: 400431 - DNA, 25 bp, Artificial
  probe
  misc_feature (1)..(25): SEQ ID NO: 5113; WAN024EZA; Start 118; Stop 142
ctcaacaatacgaagaacctcagca

SEQ ID NO: 400432 - DNA, 25 bp, Artificial
  probe
  misc_feature (1)..(25): SEQ ID NO: 5113; WAN024EZA; Start 116; Stop 140
tgctcaacaatacgaagaacctcag

SEQ ID NO: 400433 - DNA, 25 bp, Artificial
  probe
  misc_feature (1)..(25): SEQ ID NO: 5113; WAN024EZA; Start 115; Stop 139
ctgctcaacaatacgaagaacctca

SEQ ID NO: 400434 - DNA, 25 bp, Artificial
  probe
  misc_feature (1)..(25): SEQ ID NO: 5113; WAN024EZA; Start 114; Stop 138
tctgctcaacaatacgaagaacctc

SEQ ID NO: 400435 - DNA, 25 bp, Artificial
  probe
  misc_feature (1)..(25): SEQ ID NO: 5113; WAN024EZA; Start 177; Stop 201
gattatccgtttcagcagtcaagat

SEQ ID NO: 400436 - DNA, 25 bp, Artificial
  probe
  misc_feature (1)..(25): SEQ ID NO: 5113; WAN024EZA; Start 60; Stop 84
cgtatgttccagtgttgatttcctt

SEQ ID NO: 400437 - DNA, 25 bp, Artificial
  probe
  misc_feature (1)..(25): SEQ ID NO: 5113; WAN024EZA; Start 178; Stop 202
attatccgtttcagcagtcaagata

SEQ ID NO: 400438 - DNA, 25 bp, Artificial
  probe
  misc_feature (1)..(25): SEQ ID NO: 5113; WAN024EZA; Start 179; Stop 203
ttatccgtttcagcagtcaagatag

SEQ ID NO: 400439 - DNA, 25 bp, Artificial
  probe
  misc_feature (1)..(25): SEQ ID NO: 5113; WAN024EZA; Start 133; Stop 157
aacctcagcattgtcattacgaaca

SEQ ID NO: 400440 - DNA, 25 bp, Artificial
  probe
  misc_feature (1)..(25): SEQ ID NO: 5113; WAN024EZA; Start 121; Stop 145
aacaatacgaagaacctcagcattg

SEQ ID NO: 400441 - DNA, 25 bp, Artificial
  probe
  misc_feature (1)..(25): SEQ ID NO: 5113; WAN024EZA; Start 68; Stop 92
ccagtgttgatttccttgatttgct

SEQ ID NO: 400442 - DNA, 25 bp, Artificial
  probe
  misc_feature (1)..(25): SEQ ID NO: 5113; WAN024EZA; Start 67; Stop 91
tccagtgttgatttccttgatttgc

SEQ ID NO: 400443 - DNA, 25 bp, Artificial
  probe
  misc_feature (1)..(25): SEQ ID NO: 5113; WAN024EZA; Start 180; Stop 204
tatccgtttcagcagtcaagatagt

SEQ ID NO: 400444 - DNA, 25 bp, Artificial
  probe
  misc_feature (1)..(25): SEQ ID NO: 5113; WAN024EZA; Start 123; Stop 147
caatacgaagaacctcagcattgtc

SEQ ID NO: 400445 - DNA, 25 bp, Artificial
  probe
  misc_feature (1)..(25): SEQ ID NO: 5114; WAN024D7Q; Start 38; Stop 62
acttcaataactgctgcaacattac

SEQ ID NO: 400446 - DNA, 25 bp, Artificial
  probe
  misc_feature (1)..(25): SEQ ID NO: 5114; WAN024D7Q; Start 36; Stop 60
ttacttcaataactgctgcaacatt

SEQ ID NO: 400447 - DNA, 25 bp, Artificial
  probe
  misc_feature (1)..(25): SEQ ID NO: 5114; WAN024D7Q; Start 356; Stop 380
ccttctacaacttcaacgatttctt

SEQ ID NO: 400448 - DNA, 25 bp, Artificial
  probe
  misc_feature (1)..(25): SEQ ID NO: 5114; WAN024D7Q; Start 66; Stop 90
taacataaacaccagtcaaaccttc

SEQ ID NO: 400449 - DNA, 25 bp, Artificial
  probe
  misc_feature (1)..(25): SEQ ID NO: 5114; WAN024D7Q; Start 39; Stop 63
cttcaataactgctgcaacattacc

SEQ ID NO: 400450 - DNA, 25 bp, Artificial
  probe
  misc_feature (1)..(25): SEQ ID NO: 5114; WAN024D7Q; Start 67; Stop 91
aacataaacaccagtcaaaccttct

SEQ ID NO: 400451 - DNA, 25 bp, Artificial
  probe
  misc_feature (1)..(25): SEQ ID NO: 5114; WAN024D7Q; Start 37; Stop 61
tacttcaataactgctgcaacatta

SEQ ID NO: 400452 - DNA, 25 bp, Artificial
  probe
  misc_feature (1)..(25): SEQ ID NO: 5114; WAN024D7Q; Start 359; Stop 383
tctacaacttcaacgatttcttcaa

SEQ ID NO: 400453 - DNA, 25 bp, Artificial
  probe
  misc_feature (1)..(25): SEQ ID NO: 5114; WAN024D7Q; Start 358; Stop 382
ttctacaacttcaacgatttcttca

SEQ ID NO: 400454 - DNA, 25 bp, Artificial
  probe
  misc_feature (1)..(25): SEQ ID NO: 5114; WAN024D7Q; Start 65; Stop 89
ttaacataaacaccagtcaaacctt

SEQ ID NO: 400455 - DNA, 25 bp, Artificial
  probe
  misc_feature (1)..(25): SEQ ID NO: 5114; WAN024D7Q; Start 357; Stop 381
cttctacaacttcaacgatttcttc

SEQ ID NO: 400456 - DNA, 25 bp, Artificial
  probe
  misc_feature (1)..(25): SEQ ID NO: 5114; WAN024D7Q; Start 22; Stop 46
gtcagtttcagcgtttacttcaata

SEQ ID NO: 400457 - DNA, 25 bp, Artificial
  probe
  misc_feature (1)..(25): SEQ ID NO: 5114; WAN024D7Q; Start 24; Stop 48
cagtttcagcgtttacttcaataac

SEQ ID NO: 400458 - DNA, 25 bp, Artificial
  probe
  misc_feature (1)..(25): SEQ ID NO: 5114; WAN024D7Q; Start 23; Stop 47
tcagtttcagcgtttacttcaataa

SEQ ID NO: 400459 - DNA, 25 bp, Artificial
  probe
  misc_feature (1)..(25): SEQ ID NO: 5114; WAN024D7Q; Start 360; Stop 384
ctacaacttcaacgatttcttcaat

SEQ ID NO: 400460 - DNA, 25 bp, Artificial
  probe
  misc_feature (1)..(25): SEQ ID NO: 5114; WAN024D7Q; Start 21; Stop 45
agtcagtttcagcgtttacttcaat

SEQ ID NO: 400461 - DNA, 25 bp, Artificial
  probe
  misc_feature (1)..(25): SEQ ID NO: 5114; WAN024D7Q; Start 27; Stop 51
tttcagcgtttacttcaataactgc

SEQ ID NO: 400462 - DNA, 25 bp, Artificial
  probe
  misc_feature (1)..(25): SEQ ID NO: 5114; WAN024D7Q; Start 26; Stop 50
gtttcagcgtttacttcaataactg

SEQ ID NO: 400463 - DNA, 25 bp, Artificial
  probe
  misc_feature (1)..(25): SEQ ID NO: 5114; WAN024D7Q; Start 40; Stop 64
ttcaataactgctgcaacattaccg

SEQ ID NO: 400464 - DNA, 25 bp, Artificial
  probe
  misc_feature (1)..(25): SEQ ID NO: 5114; WAN024D7Q; Start 240; Stop 264
caagtttagctgtaatttctgccat

SEQ ID NO: 400465 - DNA, 25 bp, Artificial
  probe
  misc_feature (1)..(25): SEQ ID NO: 5114; WAN024D7Q; Start 361; Stop 385
tacaacttcaacgatttcttcaatt

SEQ ID NO: 400466 - DNA, 25 bp, Artificial
  probe
  misc_feature (1)..(25): SEQ ID NO: 5114; WAN024D7Q; Start 68; Stop 92
acataaacaccagtcaaaccttctg

SEQ ID NO: 400467 - DNA, 25 bp, Artificial
  probe
  misc_feature (1)..(25): SEQ ID NO: 5114; WAN024D7Q; Start 44; Stop 68
ataactgctgcaacattaccgttaa

SEQ ID NO: 400468 - DNA, 25 bp, Artificial
  probe
  misc_feature (1)..(25): SEQ ID NO: 5114; WAN024D7Q; Start 43; Stop 67
aataactgctgcaacattaccgtta

SEQ ID NO: 400469 - DNA, 25 bp, Artificial
  probe
  misc_feature (1)..(25): SEQ ID NO: 5114; WAN024D7Q; Start 242; Stop 266
agtttagctgtaatttctgccattt

SEQ ID NO: 400470 - DNA, 25 bp, Artificial
  probe
  misc_feature (1)..(25): SEQ ID NO: 5114; WAN024D7Q; Start 241; Stop 265
aagtttagctgtaatttctgccatt

SEQ ID NO: 400471 - DNA, 25 bp, Artificial
  probe
  misc_feature (1)..(25): SEQ ID NO: 5114; WAN024D7Q; Start 49; Stop 73
tgctgcaacattaccgttaacataa

SEQ ID NO: 400472 - DNA, 25 bp, Artificial
  probe
  misc_feature (1)..(25): SEQ ID NO: 5114; WAN024D7Q; Start 42; Stop 66
caataactgctgcaacattaccgtt

SEQ ID NO: 400473 - DNA, 25 bp, Artificial
  probe
  misc_feature (1)..(25): SEQ ID NO: 5114; WAN024D7Q; Start 35; Stop 59
tttacttcaataactgctgcaacat

SEQ ID NO: 400474 - DNA, 25 bp, Artificial
  probe
  misc_feature (1)..(25): SEQ ID NO: 5114; WAN024D7Q; Start 48; Stop 72
ctgctgcaacattaccgttaacata

SEQ ID NO: 400475 - DNA, 25 bp, Artificial
  probe
  misc_feature (1)..(25): SEQ ID NO: 5114; WAN024D7Q; Start 34; Stop 58
gtttacttcaataactgctgcaaca

SEQ ID NO: 400476 - DNA, 25 bp, Artificial
  probe
  misc_feature (1)..(25): SEQ ID NO: 5114; WAN024D7Q; Start 239; Stop 263
acaagtttagctgtaatttctgcca

SEQ ID NO: 400477 - DNA, 25 bp, Artificial
  probe
  misc_feature (1)..(25): SEQ ID NO: 5114; WAN024D7Q; Start 41; Stop 65
tcaataactgctgcaacattaccgt

SEQ ID NO: 400478 - DNA, 25 bp, Artificial
  probe
  misc_feature (1)..(25): SEQ ID NO: 5115; WAN024CU9; Start 190; Stop 214
catataacgacaaggtgccacatag

SEQ ID NO: 400479 - DNA, 25 bp, Artificial
  probe
  misc_feature (1)..(25): SEQ ID NO: 5115; WAN024CU9; Start 191; Stop 215
atataacgacaaggtgccacatagt

SEQ ID NO: 400480 - DNA, 25 bp, Artificial
  probe
  misc_feature (1)..(25): SEQ ID NO: 5115; WAN024CU9; Start 189; Stop 213
ccatataacgacaaggtgccacata

SEQ ID NO: 400481 - DNA, 25 bp, Artificial
  probe
  misc_feature (1)..(25): SEQ ID NO: 5115; WAN024CU9; Start 51; Stop 75
cttcttccttacgataagccacctt

SEQ ID NO: 400482 - DNA, 25 bp, Artificial
  probe
  misc_feature (1)..(25): SEQ ID NO: 5115; WAN024CU9; Start 151; Stop 175
aacttcctcaatagcagcaatagcc

SEQ ID NO: 400483 - DNA, 25 bp, Artificial
  probe
  misc_feature (1)..(25): SEQ ID NO: 5115; WAN024CU9; Start 153; Stop 177
cttcctcaatagcagcaatagcctc

SEQ ID NO: 400484 - DNA, 25 bp, Artificial
  probe
  misc_feature (1)..(25): SEQ ID NO: 5115; WAN024CU9; Start 150; Stop 174
aaacttcctcaatagcagcaatagc

SEQ ID NO: 400485 - DNA, 25 bp, Artificial
  probe
  misc_feature (1)..(25): SEQ ID NO: 5115; WAN024CU9; Start 192; Stop 216
tataacgacaaggtgccacatagtg

SEQ ID NO: 400486 - DNA, 25 bp, Artificial
  probe
  misc_feature (1)..(25): SEQ ID NO: 5115; WAN024CU9; Start 154; Stop 178
ttcctcaatagcagcaatagcctct

SEQ ID NO: 400487 - DNA, 25 bp, Artificial
  probe
  misc_feature (1)..(25): SEQ ID NO: 5115; WAN024CU9; Start 184; Stop 208
catttccatataacgacaaggtgcc

SEQ ID NO: 400488 - DNA, 25 bp, Artificial
  probe
  misc_feature (1)..(25): SEQ ID NO: 5115; WAN024CU9; Start 123; Stop 147
cttcataaggaatccctctgtcttc

SEQ ID NO: 400489 - DNA, 25 bp, Artificial
  probe
  misc_feature (1)..(25): SEQ ID NO: 5115; WAN024CU9; Start 120; Stop 144
cttcttcataaggaatccctctgtc

SEQ ID NO: 400490 - DNA, 25 bp, Artificial
  probe
  misc_feature (1)..(25): SEQ ID NO: 5115; WAN024CU9; Start 118; Stop 142
gacttcttcataaggaatccctctg

SEQ ID NO: 400491 - DNA, 25 bp, Artificial
  probe
  misc_feature (1)..(25): SEQ ID NO: 5115; WAN024CU9; Start 122; Stop 146
tcttcataaggaatccctctgtctt

SEQ ID NO: 400492 - DNA, 25 bp, Artificial
  probe
  misc_feature (1)..(25): SEQ ID NO: 5115; WAN024CU9; Start 121; Stop 145
ttcttcataaggaatccctctgtct

SEQ ID NO: 400493 - DNA, 25 bp, Artificial
  probe
  misc_feature (1)..(25): SEQ ID NO: 5115; WAN024CU9; Start 117; Stop 141
tgacttcttcataaggaatccctct

SEQ ID NO: 400494 - DNA, 25 bp, Artificial
  probe
  misc_feature (1)..(25): SEQ ID NO: 5115; WAN024CU9; Start 43; Stop 67
agcacagccttcttccttacgataa

SEQ ID NO: 400495 - DNA, 25 bp, Artificial
  probe
  misc_feature (1)..(25): SEQ ID NO: 5115; WAN024CU9; Start 119; Stop 143
acttcttcataaggaatccctctgt

SEQ ID NO: 400496 - DNA, 25 bp, Artificial
  probe
  misc_feature (1)..(25): SEQ ID NO: 5115; WAN024CU9; Start 185; Stop 209
atttccatataacgacaaggtgcca

SEQ ID NO: 400497 - DNA, 25 bp, Artificial
  probe
  misc_feature (1)..(25): SEQ ID NO: 5115; WAN024CU9; Start 152; Stop 176
acttcctcaatagcagcaatagcct

SEQ ID NO: 400498 - DNA, 25 bp, Artificial
  probe
  misc_feature (1)..(25): SEQ ID NO: 5115; WAN024CU9; Start 52; Stop 76
ttcttccttacgataagccaccttt

SEQ ID NO: 400499 - DNA, 25 bp, Artificial
  probe
  misc_feature (1)..(25): SEQ ID NO: 5115; WAN024CU9; Start 45; Stop 69
cacagccttcttccttacgataagc

SEQ ID NO: 400500 - DNA, 25 bp, Artificial
  probe
  misc_feature (1)..(25): SEQ ID NO: 5115; WAN024CU9; Start 44; Stop 68
gcacagccttcttccttacgataag

SEQ ID NO: 400501 - DNA, 25 bp, Artificial
  probe
  misc_feature (1)..(25): SEQ ID NO: 5115; WAN024CU9; Start 188; Stop 212
tccatataacgacaaggtgccacat

SEQ ID NO: 400502 - DNA, 25 bp, Artificial
  probe
  misc_feature (1)..(25): SEQ ID NO: 5115; WAN024CU9; Start 181; Stop 205
ctgcatttccatataacgacaaggt

SEQ ID NO: 400503 - DNA, 25 bp, Artificial
  probe
  misc_feature (1)..(25): SEQ ID NO: 5115; WAN024CU9; Start 182; Stop 206
tgcatttccatataacgacaaggtg

SEQ ID NO: 400504 - DNA, 25 bp, Artificial
  probe
  misc_feature (1)..(25): SEQ ID NO: 5115; WAN024CU9; Start 42; Stop 66
cagcacagccttcttccttacgata

SEQ ID NO: 400505 - DNA, 25 bp, Artificial
  probe
  misc_feature (1)..(25): SEQ ID NO: 5115; WAN024CU9; Start 187; Stop 211
ttccatataacgacaaggtgccaca

SEQ ID NO: 400506 - DNA, 25 bp, Artificial
  probe
  misc_feature (1)..(25): SEQ ID NO: 5115; WAN024CU9; Start 50; Stop 74
ccttcttccttacgataagccacct

SEQ ID NO: 400507 - DNA, 25 bp, Artificial
  probe
  misc_feature (1)..(25): SEQ ID NO: 5115; WAN024CU9; Start 148; Stop 172
caaaacttcctcaatagcagcaata

SEQ ID NO: 400508 - DNA, 25 bp, Artificial
  probe
  misc_feature (1)..(25): SEQ ID NO: 5115; WAN024CU9; Start 139; Stop 163
tctgtcttccaaaacttcctcaata

SEQ ID NO: 400509 - DNA, 25 bp, Artificial
  probe
  misc_feature (1)..(25): SEQ ID NO: 5115; WAN024CU9; Start 149; Stop 173
aaaacttcctcaatagcagcaatag

SEQ ID NO: 400510 - DNA, 25 bp, Artificial
  probe
  misc_feature (1)..(25): SEQ ID NO: 5115; WAN024CU9; Start 140; Stop 164
ctgtcttccaaaacttcctcaatag

SEQ ID NO: 400511 - DNA, 25 bp, Artificial
  probe
  misc_feature (1)..(25): SEQ ID NO: 5116; WAN024EUV; Start 167; Stop 191
ccttcaactacactattctaatgcc

SEQ ID NO: 400512 - DNA, 25 bp, Artificial
  probe
  misc_feature (1)..(25): SEQ ID NO: 5116; WAN024EUV; Start 168; Stop 192
cttcaactacactattctaatgcca

SEQ ID NO: 400513 - DNA, 25 bp, Artificial
  probe
  misc_feature (1)..(25): SEQ ID NO: 5116; WAN024EUV; Start 169; Stop 193
ttcaactacactattctaatgccaa

SEQ ID NO: 400514 - DNA, 25 bp, Artificial
  probe
  misc_feature (1)..(25): SEQ ID NO: 5116; WAN024EUV; Start 24; Stop 48
acaccactataatctctatcaactc

SEQ ID NO: 400515 - DNA, 25 bp, Artificial
  probe
  misc_feature (1)..(25): SEQ ID NO: 5116; WAN024EUV; Start 25; Stop 49
caccactataatctctatcaactct

SEQ ID NO: 400516 - DNA, 25 bp, Artificial
  probe
  misc_feature (1)..(25): SEQ ID NO: 5116; WAN024EUV; Start 164; Stop 188
tgcccttcaactacactattctaat

SEQ ID NO: 400517 - DNA, 25 bp, Artificial
  probe
  misc_feature (1)..(25): SEQ ID NO: 5116; WAN024EUV; Start 163; Stop 187
atgcccttcaactacactattctaa

SEQ ID NO: 400518 - DNA, 25 bp, Artificial
  probe
  misc_feature (1)..(25): SEQ ID NO: 5116; WAN024EUV; Start 162; Stop 186
aatgcccttcaactacactattcta

SEQ ID NO: 400519 - DNA, 25 bp, Artificial
  probe
  misc_feature (1)..(25): SEQ ID NO: 5116; WAN024EUV; Start 166; Stop 190
cccttcaactacactattctaatgc

SEQ ID NO: 400520 - DNA, 25 bp, Artificial
  probe
  misc_feature (1)..(25): SEQ ID NO: 5116; WAN024EUV; Start 165; Stop 189
gcccttcaactacactattctaatg

SEQ ID NO: 400521 - DNA, 25 bp, Artificial
  probe
  misc_feature (1)..(25): SEQ ID NO: 5116; WAN024EUV; Start 161; Stop 185
caatgcccttcaactacactattct

SEQ ID NO: 400522 - DNA, 25 bp, Artificial
  probe
  misc_feature (1)..(25): SEQ ID NO: 5116; WAN024EUV; Start 160; Stop 184
tcaatgcccttcaactacactattc

SEQ ID NO: 400523 - DNA, 25 bp, Artificial
  probe
  misc_feature (1)..(25): SEQ ID NO: 5116; WAN024EUV; Start 159; Stop 183
gtcaatgcccttcaactacactatt

SEQ ID NO: 400524 - DNA, 25 bp, Artificial
  probe
  misc_feature (1)..(25): SEQ ID NO: 5116; WAN024EUV; Start 173; Stop 197
actacactattctaatgccaaactg

SEQ ID NO: 400525 - DNA, 25 bp, Artificial
  probe
  misc_feature (1)..(25): SEQ ID NO: 5116; WAN024EUV; Start 23; Stop 47
aacaccactataatctctatcaact

SEQ ID NO: 400526 - DNA, 25 bp, Artificial
  probe
  misc_feature (1)..(25): SEQ ID NO: 5116; WAN024EUV; Start 145; Stop 169
ataaagagaagattgtcaatgccct

SEQ ID NO: 400527 - DNA, 25 bp, Artificial
  probe
  misc_feature (1)..(25): SEQ ID NO: 5116; WAN024EUV; Start 144; Stop 168
gataaagagaagattgtcaatgccc

SEQ ID NO: 400528 - DNA, 25 bp, Artificial
  probe
  misc_feature (1)..(25): SEQ ID NO: 5116; WAN024EUV; Start 11; Stop 35
cagaagacttgaaacaccactataa

SEQ ID NO: 400529 - DNA, 25 bp, Artificial
  probe
  misc_feature (1)..(25): SEQ ID NO: 5116; WAN024EUV; Start 146; Stop 170
taaagagaagattgtcaatgccctt

SEQ ID NO: 400530 - DNA, 25 bp, Artificial
  probe
  misc_feature (1)..(25): SEQ ID NO: 5116; WAN024EUV; Start 143; Stop 167
agataaagagaagattgtcaatgcc

SEQ ID NO: 400531 - DNA, 25 bp, Artificial
  probe
  misc_feature (1)..(25): SEQ ID NO: 5116; WAN024EUV; Start 10; Stop 34
tcagaagacttgaaacaccactata

SEQ ID NO: 400532 - DNA, 25 bp, Artificial
  probe
  misc_feature (1)..(25): SEQ ID NO: 5116; WAN024EUV; Start 171; Stop 195
caactacactattctaatgccaaac

SEQ ID NO: 400533 - DNA, 25 bp, Artificial
  probe
  misc_feature (1)..(25): SEQ ID NO: 5116; WAN024EUV; Start 16; Stop 40
gacttgaaacaccactataatctct

SEQ ID NO: 400534 - DNA, 25 bp, Artificial
  probe
  misc_feature (1)..(25): SEQ ID NO: 5116; WAN024EUV; Start 172; Stop 196
aactacactattctaatgccaaact

SEQ ID NO: 400535 - DNA, 25 bp, Artificial
  probe
  misc_feature (1)..(25): SEQ ID NO: 5116; WAN024EUV; Start 170; Stop 194
tcaactacactattctaatgccaaa

SEQ ID NO: 400536 - DNA, 25 bp, Artificial
  probe
  misc_feature (1)..(25): SEQ ID NO: 5116; WAN024EUV; Start 92; Stop 116
gactcattgaggacaatctgaatca

SEQ ID NO: 400537 - DNA, 25 bp, Artificial
  probe
  misc_feature (1)..(25): SEQ ID NO: 5116; WAN024EUV; Start 28; Stop 52
cactataatctctatcaactcttgc

SEQ ID NO: 400538 - DNA, 25 bp, Artificial
  probe
  misc_feature (1)..(25): SEQ ID NO: 5116; WAN024EUV; Start 29; Stop 53
actataatctctatcaactcttgct

SEQ ID NO: 400539 - DNA, 25 bp, Artificial
  probe
  misc_feature (1)..(25): SEQ ID NO: 5116; WAN024EUV; Start 15; Stop 39
agacttgaaacaccactataatctc

SEQ ID NO: 400540 - DNA, 25 bp, Artificial
  probe
  misc_feature (1)..(25): SEQ ID NO: 5116; WAN024EUV; Start 193; Stop 217
aactggaagcgaccaataatctcat

SEQ ID NO: 400541 - DNA, 25 bp, Artificial
  probe
  misc_feature (1)..(25): SEQ ID NO: 5116; WAN024EUV; Start 91; Stop 115
ggactcattgaggacaatctgaatc

SEQ ID NO: 400542 - DNA, 25 bp, Artificial
  probe
  misc_feature (1)..(25): SEQ ID NO: 5116; WAN024EUV; Start 26; Stop 50
accactataatctctatcaactctt

SEQ ID NO: 400543 - DNA, 25 bp, Artificial
  probe
  misc_feature (1)..(25): SEQ ID NO: 5116; WAN024EUV; Start 12; Stop 36
agaagacttgaaacaccactataat

SEQ ID NO: 400544 - DNA, 25 bp, Artificial
  probe
  misc_feature (1)..(25): SEQ ID NO: 5117; WAN024DZR; Start 138; Stop 162
aatctgctatcgtaatgtaaggtgt

SEQ ID NO: 400545 - DNA, 25 bp, Artificial
  probe
  misc_feature (1)..(25): SEQ ID NO: 5117; WAN024DZR; Start 135; Stop 159
tccaatctgctatcgtaatgtaagg

SEQ ID NO: 400546 - DNA, 25 bp, Artificial
  probe
  misc_feature (1)..(25): SEQ ID NO: 5117; WAN024DZR; Start 139; Stop 163
atctgctatcgtaatgtaaggtgtc

SEQ ID NO: 400547 - DNA, 25 bp, Artificial
  probe
  misc_feature (1)..(25): SEQ ID NO: 5117; WAN024DZR; Start 137; Stop 161
caatctgctatcgtaatgtaaggtg

SEQ ID NO: 400548 - DNA, 25 bp, Artificial
  probe
  misc_feature (1)..(25): SEQ ID NO: 5117; WAN024DZR; Start 136; Stop 160
ccaatctgctatcgtaatgtaaggt

SEQ ID NO: 400549 - DNA, 25 bp, Artificial
  probe
  misc_feature (1)..(25): SEQ ID NO: 5117; WAN024DZR; Start 161; Stop 185
gtcttctctgccaattctctcatat

SEQ ID NO: 400550 - DNA, 25 bp, Artificial
  probe
  misc_feature (1)..(25): SEQ ID NO: 5117; WAN024DZR; Start 164; Stop 188
ttctctgccaattctctcatatagg

SEQ ID NO: 400551 - DNA, 25 bp, Artificial
  probe
  misc_feature (1)..(25): SEQ ID NO: 5117; WAN024DZR; Start 146; Stop 170
atcgtaatgtaaggtgtcttctctg

SEQ ID NO: 400552 - DNA, 25 bp, Artificial
  probe
  misc_feature (1)..(25): SEQ ID NO: 5117; WAN024DZR; Start 143; Stop 167
gctatcgtaatgtaaggtgtcttct

SEQ ID NO: 400553 - DNA, 25 bp, Artificial
  probe
  misc_feature (1)..(25): SEQ ID NO: 5117; WAN024DZR; Start 142; Stop 166
tgctatcgtaatgtaaggtgtcttc

SEQ ID NO: 400554 - DNA, 25 bp, Artificial
  probe
  misc_feature (1)..(25): SEQ ID NO: 5117; WAN024DZR; Start 141; Stop 165
ctgctatcgtaatgtaaggtgtctt

SEQ ID NO: 400555 - DNA, 25 bp, Artificial
  probe
  misc_feature (1)..(25): SEQ ID NO: 5117; WAN024DZR; Start 140; Stop 164
tctgctatcgtaatgtaaggtgtct

SEQ ID NO: 400556 - DNA, 25 bp, Artificial
  probe
  misc_feature (1)..(25): SEQ ID NO: 5117; WAN024DZR; Start 134; Stop 158
ttccaatctgctatcgtaatgtaag

SEQ ID NO: 400557 - DNA, 25 bp, Artificial
  probe
  misc_feature (1)..(25): SEQ ID NO: 5117; WAN024DZR; Start 131; Stop 155
tgattccaatctgctatcgtaatgt

SEQ ID NO: 400558 - DNA, 25 bp, Artificial
  probe
  misc_feature (1)..(25): SEQ ID NO: 5117; WAN024DZR; Start 162; Stop 186
tcttctctgccaattctctcatata

SEQ ID NO: 400559 - DNA, 25 bp, Artificial
  probe
  misc_feature (1)..(25): SEQ ID NO: 5117; WAN024DZR; Start 160; Stop 184
tgtcttctctgccaattctctcata

SEQ ID NO: 400560 - DNA, 25 bp, Artificial
  probe
  misc_feature (1)..(25): SEQ ID NO: 5117; WAN024DZR; Start 145; Stop 169
tatcgtaatgtaaggtgtcttctct

SEQ ID NO: 400561 - DNA, 25 bp, Artificial
  probe
  misc_feature (1)..(25): SEQ ID NO: 5117; WAN024DZR; Start 163; Stop 187
cttctctgccaattctctcatatag

SEQ ID NO: 400562 - DNA, 25 bp, Artificial
  probe
  misc_feature (1)..(25): SEQ ID NO: 5117; WAN024DZR; Start 128; Stop 152
acttgattccaatctgctatcgtaa

SEQ ID NO: 400563 - DNA, 25 bp, Artificial
  probe
  misc_feature (1)..(25): SEQ ID NO: 5117; WAN024DZR; Start 127; Stop 151
aacttgattccaatctgctatcgta

SEQ ID NO: 400564 - DNA, 25 bp, Artificial
  probe
  misc_feature (1)..(25): SEQ ID NO: 5117; WAN024DZR; Start 144; Stop 168
ctatcgtaatgtaaggtgtcttctc

SEQ ID NO: 400565 - DNA, 25 bp, Artificial
  probe
  misc_feature (1)..(25): SEQ ID NO: 5117; WAN024DZR; Start 130; Stop 154
ttgattccaatctgctatcgtaatg

SEQ ID NO: 400566 - DNA, 25 bp, Artificial
  probe
  misc_feature (1)..(25): SEQ ID NO: 5117; WAN024DZR; Start 133; Stop 157
attccaatctgctatcgtaatgtaa

SEQ ID NO: 400567 - DNA, 25 bp, Artificial
  probe
  misc_feature (1)..(25): SEQ ID NO: 5117; WAN024DZR; Start 150; Stop 174
taatgtaaggtgtcttctctgccaa

SEQ ID NO: 400568 - DNA, 25 bp, Artificial
  probe
  misc_feature (1)..(25): SEQ ID NO: 5117; WAN024DZR; Start 129; Stop 153
cttgattccaatctgctatcgtaat

SEQ ID NO: 400569 - DNA, 25 bp, Artificial
  probe
  misc_feature (1)..(25): SEQ ID NO: 5117; WAN024DZR; Start 132; Stop 156
gattccaatctgctatcgtaatgta

SEQ ID NO: 400570 - DNA, 25 bp, Artificial
  probe
  misc_feature (1)..(25): SEQ ID NO: 5117; WAN024DZR; Start 126; Stop 150
caacttgattccaatctgctatcgt

SEQ ID NO: 400571 - DNA, 25 bp, Artificial
  probe
  misc_feature (1)..(25): SEQ ID NO: 5117; WAN024DZR; Start 151; Stop 175
aatgtaaggtgtcttctctgccaat

SEQ ID NO: 400572 - DNA, 25 bp, Artificial
  probe
  misc_feature (1)..(25): SEQ ID NO: 5117; WAN024DZR; Start 149; Stop 173
gtaatgtaaggtgtcttctctgcca

SEQ ID NO: 400573 - DNA, 25 bp, Artificial
  probe
  misc_feature (1)..(25): SEQ ID NO: 5117; WAN024DZR; Start 152; Stop 176
atgtaaggtgtcttctctgccaatt

SEQ ID NO: 400574 - DNA, 25 bp, Artificial
  probe
  misc_feature (1)..(25): SEQ ID NO: 5117; WAN024DZR; Start 147; Stop 171
tcgtaatgtaaggtgtcttctctgc

SEQ ID NO: 400575 - DNA, 25 bp, Artificial
  probe
  misc_feature (1)..(25): SEQ ID NO: 5117; WAN024DZR; Start 155; Stop 179
taaggtgtcttctctgccaattctc

SEQ ID NO: 400576 - DNA, 25 bp, Artificial
  probe
  misc_feature (1)..(25): SEQ ID NO: 5117; WAN024DZR; Start 159; Stop 183
gtgtcttctctgccaattctctcat

SEQ ID NO: 400577 - DNA, 25 bp, Artificial
  probe
  misc_feature (1)..(25): SEQ ID NO: 5118; WAN024CQ7; Start 228; Stop 252
ttcatcagccgccagtaattcataa

SEQ ID NO: 400578 - DNA, 25 bp, Artificial
  probe
  misc_feature (1)..(25): SEQ ID NO: 5118; WAN024CQ7; Start 68; Stop 92
caccacctgtaatagctgtcttgag

SEQ ID NO: 400579 - DNA, 25 bp, Artificial
  probe
  misc_feature (1)..(25): SEQ ID NO: 5118; WAN024CQ7; Start 227; Stop 251
tttcatcagccgccagtaattcata

SEQ ID NO: 400580 - DNA, 25 bp, Artificial
  probe
  misc_feature (1)..(25): SEQ ID NO: 5118; WAN024CQ7; Start 201; Stop 225
ttccacgtttccgataaagttcaaa

SEQ ID NO: 400581 - DNA, 25 bp, Artificial
  probe
  misc_feature (1)..(25): SEQ ID NO: 5118; WAN024CQ7; Start 200; Stop 224
cttccacgtttccgataaagttcaa

SEQ ID NO: 400582 - DNA, 25 bp, Artificial
  probe
  misc_feature (1)..(25): SEQ ID NO: 5118; WAN024CQ7; Start 72; Stop 96
acctgtaatagctgtcttgagcaag

SEQ ID NO: 400583 - DNA, 25 bp, Artificial
  probe
  misc_feature (1)..(25): SEQ ID NO: 5118; WAN024CQ7; Start 226; Stop 250
ctttcatcagccgccagtaattcat

SEQ ID NO: 400584 - DNA, 25 bp, Artificial
  probe
  misc_feature (1)..(25): SEQ ID NO: 5118; WAN024CQ7; Start 71; Stop 95
cacctgtaatagctgtcttgagcaa

SEQ ID NO: 400585 - DNA, 25 bp, Artificial
  probe
  misc_feature (1)..(25): SEQ ID NO: 5118; WAN024CQ7; Start 67; Stop 91
ccaccacctgtaatagctgtcttga

SEQ ID NO: 400586 - DNA, 25 bp, Artificial
  probe
  misc_feature (1)..(25): SEQ ID NO: 5118; WAN024CQ7; Start 223; Stop 247
aaactttcatcagccgccagtaatt

SEQ ID NO: 400587 - DNA, 25 bp, Artificial
  probe
  misc_feature (1)..(25): SEQ ID NO: 5118; WAN024CQ7; Start 150; Stop 174
gaaaccatctgccacaacaacatct

SEQ ID NO: 400588 - DNA, 25 bp, Artificial
  probe
  misc_feature (1)..(25): SEQ ID NO: 5118; WAN024CQ7; Start 151; Stop 175
aaaccatctgccacaacaacatctg

SEQ ID NO: 400589 - DNA, 25 bp, Artificial
  probe
  misc_feature (1)..(25): SEQ ID NO: 5118; WAN024CQ7; Start 149; Stop 173
tgaaaccatctgccacaacaacatc

SEQ ID NO: 400590 - DNA, 25 bp, Artificial
  probe
  misc_feature (1)..(25): SEQ ID NO: 5118; WAN024CQ7; Start 224; Stop 248
aactttcatcagccgccagtaattc

SEQ ID NO: 400591 - DNA, 25 bp, Artificial
  probe
  misc_feature (1)..(25): SEQ ID NO: 5118; WAN024CQ7; Start 204; Stop 228
cacgtttccgataaagttcaaactt

SEQ ID NO: 400592 - DNA, 25 bp, Artificial
  probe
  misc_feature (1)..(25): SEQ ID NO: 5118; WAN024CQ7; Start 222; Stop 246
caaactttcatcagccgccagtaat

SEQ ID NO: 400593 - DNA, 25 bp, Artificial
  probe
  misc_feature (1)..(25): SEQ ID NO: 5118; WAN024CQ7; Start 74; Stop 98
ctgtaatagctgtcttgagcaagcc

SEQ ID NO: 400594 - DNA, 25 bp, Artificial
  probe
  misc_feature (1)..(25): SEQ ID NO: 5118; WAN024CQ7; Start 73; Stop 97
cctgtaatagctgtcttgagcaagc

SEQ ID NO: 400595 - DNA, 25 bp, Artificial
  probe
  misc_feature (1)..(25): SEQ ID NO: 5118; WAN024CQ7; Start 203; Stop 227
ccacgtttccgataaagttcaaact

SEQ ID NO: 400596 - DNA, 25 bp, Artificial
  probe
  misc_feature (1)..(25): SEQ ID NO: 5118; WAN024CQ7; Start 202; Stop 226
tccacgtttccgataaagttcaaac

SEQ ID NO: 400597 - DNA, 25 bp, Artificial
  probe
  misc_feature (1)..(25): SEQ ID NO: 5118; WAN024CQ7; Start 170; Stop 194
catctgcaacgccattcatcaaatc

SEQ ID NO: 400598 - DNA, 25 bp, Artificial
  probe
  misc_feature (1)..(25): SEQ ID NO: 5118; WAN024CQ7; Start 171; Stop 195
atctgcaacgccattcatcaaatca

SEQ ID NO: 400599 - DNA, 25 bp, Artificial
  probe
  misc_feature (1)..(25): SEQ ID NO: 5118; WAN024CQ7; Start 199; Stop 223
gcttccacgtttccgataaagttca

SEQ ID NO: 400600 - DNA, 25 bp, Artificial
  probe
  misc_feature (1)..(25): SEQ ID NO: 5118; WAN024CQ7; Start 167; Stop 191
caacatctgcaacgccattcatcaa

SEQ ID NO: 400601 - DNA, 25 bp, Artificial
  probe
  misc_feature (1)..(25): SEQ ID NO: 5118; WAN024CQ7; Start 165; Stop 189
aacaacatctgcaacgccattcatc

SEQ ID NO: 400602 - DNA, 25 bp, Artificial
  probe
  misc_feature (1)..(25): SEQ ID NO: 5118; WAN024CQ7; Start 109; Stop 133
atagctgtcccttcgatggatttga

SEQ ID NO: 400603 - DNA, 25 bp, Artificial
  probe
  misc_feature (1)..(25): SEQ ID NO: 5118; WAN024CQ7; Start 108; Stop 132
catagctgtcccttcgatggatttg

SEQ ID NO: 400604 - DNA, 25 bp, Artificial
  probe
  misc_feature (1)..(25): SEQ ID NO: 5118; WAN024CQ7; Start 169; Stop 193
acatctgcaacgccattcatcaaat

SEQ ID NO: 400605 - DNA, 25 bp, Artificial
  probe
  misc_feature (1)..(25): SEQ ID NO: 5118; WAN024CQ7; Start 69; Stop 93
accacctgtaatagctgtcttgagc

SEQ ID NO: 400606 - DNA, 25 bp, Artificial
  probe
  misc_feature (1)..(25): SEQ ID NO: 5118; WAN024CQ7; Start 148; Stop 172
gtgaaaccatctgccacaacaacat

SEQ ID NO: 400607 - DNA, 25 bp, Artificial
  probe
  misc_feature (1)..(25): SEQ ID NO: 5118; WAN024CQ7; Start 225; Stop 249
actttcatcagccgccagtaattca

SEQ ID NO: 400608 - DNA, 25 bp, Artificial
  probe
  misc_feature (1)..(25): SEQ ID NO: 5118; WAN024CQ7; Start 70; Stop 94
ccacctgtaatagctgtcttgagca

SEQ ID NO: 400609 - DNA, 25 bp, Artificial
  probe
  misc_feature (1)..(25): SEQ ID NO: 5118; WAN024CQ7; Start 164; Stop 188
caacaacatctgcaacgccattcat

SEQ ID NO: 400610 - DNA, 25 bp, Artificial
  probe
  misc_feature (1)..(25): SEQ ID NO: 5119; WAN024D3T; Start 28; Stop 52
gttgacagtttcttgaagtttagca

SEQ ID NO: 400611 - DNA, 25 bp, Artificial
  probe
  misc_feature (1)..(25): SEQ ID NO: 5119; WAN024D3T; Start 27; Stop 51
tgttgacagtttcttgaagtttagc

SEQ ID NO: 400612 - DNA, 25 bp, Artificial
  probe
  misc_feature (1)..(25): SEQ ID NO: 5119; WAN024D3T; Start 24; Stop 48
agttgttgacagtttcttgaagttt

SEQ ID NO: 400613 - DNA, 25 bp, Artificial
  probe
  misc_feature (1)..(25): SEQ ID NO: 5119; WAN024D3T; Start 23; Stop 47
aagttgttgacagtttcttgaagtt

SEQ ID NO: 400614 - DNA, 25 bp, Artificial
  probe
  misc_feature (1)..(25): SEQ ID NO: 5119; WAN024D3T; Start 32; Stop 56
acagtttcttgaagtttagcaatgg

SEQ ID NO: 400615 - DNA, 25 bp, Artificial
  probe
  misc_feature (1)..(25): SEQ ID NO: 5119; WAN024D3T; Start 29; Stop 53
ttgacagtttcttgaagtttagcaa

SEQ ID NO: 400616 - DNA, 25 bp, Artificial
  probe
  misc_feature (1)..(25): SEQ ID NO: 5119; WAN024D3T; Start 30; Stop 54
tgacagtttcttgaagtttagcaat

SEQ ID NO: 400617 - DNA, 25 bp, Artificial
  probe
  misc_feature (1)..(25): SEQ ID NO: 5119; WAN024D3T; Start 31; Stop 55
gacagtttcttgaagtttagcaatg

SEQ ID NO: 400618 - DNA, 25 bp, Artificial
  probe
  misc_feature (1)..(25): SEQ ID NO: 5119; WAN024D3T; Start 25; Stop 49
gttgttgacagtttcttgaagttta

SEQ ID NO: 400619 - DNA, 25 bp, Artificial
  probe
  misc_feature (1)..(25): SEQ ID NO: 5119; WAN024D3T; Start 33; Stop 57
cagtttcttgaagtttagcaatggc

SEQ ID NO: 400620 - DNA, 25 bp, Artificial
  probe
  misc_feature (1)..(25): SEQ ID NO: 5119; WAN024D3T; Start 26; Stop 50
ttgttgacagtttcttgaagtttag

SEQ ID NO: 400621 - DNA, 25 bp, Artificial
  probe
  misc_feature (1)..(25): SEQ ID NO: 5119; WAN024D3T; Start 36; Stop 60
tttcttgaagtttagcaatggcttg

SEQ ID NO: 400622 - DNA, 25 bp, Artificial
  probe
  misc_feature (1)..(25): SEQ ID NO: 5119; WAN024D3T; Start 35; Stop 59
gtttcttgaagtttagcaatggctt

SEQ ID NO: 400623 - DNA, 25 bp, Artificial
  probe
  misc_feature (1)..(25): SEQ ID NO: 5119; WAN024D3T; Start 152; Stop 176
gtataacggttcaggtcttttggta

SEQ ID NO: 400624 - DNA, 25 bp, Artificial
  probe
  misc_feature (1)..(25): SEQ ID NO: 5119; WAN024D3T; Start 39; Stop 63
cttgaagtttagcaatggcttgatc

SEQ ID NO: 400625 - DNA, 25 bp, Artificial
  probe
  misc_feature (1)..(25): SEQ ID NO: 5119; WAN024D3T; Start 38; Stop 62
tcttgaagtttagcaatggcttgat

SEQ ID NO: 400626 - DNA, 25 bp, Artificial
  probe
  misc_feature (1)..(25): SEQ ID NO: 5119; WAN024D3T; Start 37; Stop 61
ttcttgaagtttagcaatggcttga

SEQ ID NO: 400627 - DNA, 25 bp, Artificial
  probe
  misc_feature (1)..(25): SEQ ID NO: 5119; WAN024D3T; Start 34; Stop 58
agtttcttgaagtttagcaatggct

SEQ ID NO: 400628 - DNA, 25 bp, Artificial
  probe
  misc_feature (1)..(25): SEQ ID NO: 5119; WAN024D3T; Start 153; Stop 177
tataacggttcaggtcttttggtac

SEQ ID NO: 400629 - DNA, 25 bp, Artificial
  probe
  misc_feature (1)..(25): SEQ ID NO: 5119; WAN024D3T; Start 150; Stop 174
cagtataacggttcaggtcttttgg

SEQ ID NO: 400630 - DNA, 25 bp, Artificial
  probe
  misc_feature (1)..(25): SEQ ID NO: 5119; WAN024D3T; Start 151; Stop 175
agtataacggttcaggtcttttggt

SEQ ID NO: 400631 - DNA, 25 bp, Artificial
  probe
  misc_feature (1)..(25): SEQ ID NO: 5119; WAN024D3T; Start 149; Stop 173
gcagtataacggttcaggtcttttg

SEQ ID NO: 400632 - DNA, 25 bp, Artificial
  probe
  misc_feature (1)..(25): SEQ ID NO: 5119; WAN024D3T; Start 22; Stop 46
caagttgttgacagtttcttgaagt

SEQ ID NO: 400633 - DNA, 25 bp, Artificial
  probe
  misc_feature (1)..(25): SEQ ID NO: 5119; WAN024D3T; Start 88; Stop 112
aaggttgctatcgagagagcgaata

SEQ ID NO: 400634 - DNA, 25 bp, Artificial
  probe
  misc_feature (1)..(25): SEQ ID NO: 5119; WAN024D3T; Start 87; Stop 111
taaggttgctatcgagagagcgaat

SEQ ID NO: 400635 - DNA, 25 bp, Artificial
  probe
  misc_feature (1)..(25): SEQ ID NO: 5119; WAN024D3T; Start 241; Stop 265
aaaatgacgcatgagtttgaagagg

SEQ ID NO: 400636 - DNA, 25 bp, Artificial
  probe
  misc_feature (1)..(25): SEQ ID NO: 5119; WAN024D3T; Start 89; Stop 113
aggttgctatcgagagagcgaatag

SEQ ID NO: 400637 - DNA, 25 bp, Artificial
  probe
  misc_feature (1)..(25): SEQ ID NO: 5119; WAN024D3T; Start 86; Stop 110
ctaaggttgctatcgagagagcgaa

SEQ ID NO: 400638 - DNA, 25 bp, Artificial
  probe
  misc_feature (1)..(25): SEQ ID NO: 5119; WAN024D3T; Start 148; Stop 172
tgcagtataacggttcaggtctttt

SEQ ID NO: 400639 - DNA, 25 bp, Artificial
  probe
  misc_feature (1)..(25): SEQ ID NO: 5119; WAN024D3T; Start 240; Stop 264
caaaatgacgcatgagtttgaagag

SEQ ID NO: 400640 - DNA, 25 bp, Artificial
  probe
  misc_feature (1)..(25): SEQ ID NO: 5119; WAN024D3T; Start 40; Stop 64
ttgaagtttagcaatggcttgatca

SEQ ID NO: 400641 - DNA, 25 bp, Artificial
  probe
  misc_feature (1)..(25): SEQ ID NO: 5119; WAN024D3T; Start 59; Stop 83
tgatcaatcgtatcttgttgggcac

SEQ ID NO: 400642 - DNA, 25 bp, Artificial
  probe
  misc_feature (1)..(25): SEQ ID NO: 5119; WAN024D3T; Start 60; Stop 84
gatcaatcgtatcttgttgggcacg

SEQ ID NO: 400643 - DNA, 25 bp, Artificial
  probe
  misc_feature (1)..(25): SEQ ID NO: 5120; WAN024CCQ; Start 164; Stop 188
aaggtataggtaaaggcattgtgaa

SEQ ID NO: 400644 - DNA, 25 bp, Artificial
  probe
  misc_feature (1)..(25): SEQ ID NO: 5120; WAN024CCQ; Start 163; Stop 187
aaaggtataggtaaaggcattgtga

SEQ ID NO: 400645 - DNA, 25 bp, Artificial
  probe
  misc_feature (1)..(25): SEQ ID NO: 5120; WAN024CCQ; Start 168; Stop 192
tataggtaaaggcattgtgaatccc

SEQ ID NO: 400646 - DNA, 25 bp, Artificial
  probe
  misc_feature (1)..(25): SEQ ID NO: 5120; WAN024CCQ; Start 165; Stop 189
aggtataggtaaaggcattgtgaat

SEQ ID NO: 400647 - DNA, 25 bp, Artificial
  probe
  misc_feature (1)..(25): SEQ ID NO: 5120; WAN024CCQ; Start 167; Stop 191
gtataggtaaaggcattgtgaatcc

SEQ ID NO: 400648 - DNA, 25 bp, Artificial
  probe
  misc_feature (1)..(25): SEQ ID NO: 5120; WAN024CCQ; Start 166; Stop 190
ggtataggtaaaggcattgtgaatc

SEQ ID NO: 400649 - DNA, 25 bp, Artificial
  probe
  misc_feature (1)..(25): SEQ ID NO: 5120; WAN024CCQ; Start 179; Stop 203
gcattgtgaatcccgatagaactat

SEQ ID NO: 400650 - DNA, 25 bp, Artificial
  probe
  misc_feature (1)..(25): SEQ ID NO: 5120; WAN024CCQ; Start 162; Stop 186
taaaggtataggtaaaggcattgtg

SEQ ID NO: 400651 - DNA, 25 bp, Artificial
  probe
  misc_feature (1)..(25): SEQ ID NO: 5120; WAN024CCQ; Start 174; Stop 198
taaaggcattgtgaatcccgataga

SEQ ID NO: 400652 - DNA, 25 bp, Artificial
  probe
  misc_feature (1)..(25): SEQ ID NO: 5120; WAN024CCQ; Start 173; Stop 197
gtaaaggcattgtgaatcccgatag

SEQ ID NO: 400653 - DNA, 25 bp, Artificial
  probe
  misc_feature (1)..(25): SEQ ID NO: 5120; WAN024CCQ; Start 161; Stop 185
ttaaaggtataggtaaaggcattgt

SEQ ID NO: 400654 - DNA, 25 bp, Artificial
  probe
  misc_feature (1)..(25): SEQ ID NO: 5120; WAN024CCQ; Start 178; Stop 202
ggcattgtgaatcccgatagaacta

SEQ ID NO: 400655 - DNA, 25 bp, Artificial
  probe
  misc_feature (1)..(25): SEQ ID NO: 5120; WAN024CCQ; Start 249; Stop 273
tcatggtttctcctatttgataagc

SEQ ID NO: 400656 - DNA, 25 bp, Artificial
  probe
  misc_feature (1)..(25): SEQ ID NO: 5120; WAN024CCQ; Start 175; Stop 199
aaaggcattgtgaatcccgatagaa

SEQ ID NO: 400657 - DNA, 25 bp, Artificial
  probe
  misc_feature (1)..(25): SEQ ID NO: 5120; WAN024CCQ; Start 250; Stop 274
catggtttctcctatttgataagct

SEQ ID NO: 400658 - DNA, 25 bp, Artificial
  probe
  misc_feature (1)..(25): SEQ ID NO: 5120; WAN024CCQ; Start 247; Stop 271
ggtcatggtttctcctatttgataa

SEQ ID NO: 400659 - DNA, 25 bp, Artificial
  probe
  misc_feature (1)..(25): SEQ ID NO: 5120; WAN024CCQ; Start 183; Stop 207
tgtgaatcccgatagaactatcaac

SEQ ID NO: 400660 - DNA, 25 bp, Artificial
  probe
  misc_feature (1)..(25): SEQ ID NO: 5120; WAN024CCQ; Start 182; Stop 206
ttgtgaatcccgatagaactatcaa

SEQ ID NO: 400661 - DNA, 25 bp, Artificial
  probe
  misc_feature (1)..(25): SEQ ID NO: 5120; WAN024CCQ; Start 541; Stop 565
tttaatgacaaaggcaatagcttga

SEQ ID NO: 400662 - DNA, 25 bp, Artificial
  probe
  misc_feature (1)..(25): SEQ ID NO: 5120; WAN024CCQ; Start 245; Stop 269
gaggtcatggtttctcctatttgat

SEQ ID NO: 400663 - DNA, 25 bp, Artificial
  probe
  misc_feature (1)..(25): SEQ ID NO: 5120; WAN024CCQ; Start 243; Stop 267
tagaggtcatggtttctcctatttg

SEQ ID NO: 400664 - DNA, 25 bp, Artificial
  probe
  misc_feature (1)..(25): SEQ ID NO: 5120; WAN024CCQ; Start 240; Stop 264
tgatagaggtcatggtttctcctat

SEQ ID NO: 400665 - DNA, 25 bp, Artificial
  probe
  misc_feature (1)..(25): SEQ ID NO: 5120; WAN024CCQ; Start 181; Stop 205
attgtgaatcccgatagaactatca

SEQ ID NO: 400666 - DNA, 25 bp, Artificial
  probe
  misc_feature (1)..(25): SEQ ID NO: 5120; WAN024CCQ; Start 186; Stop 210
gaatcccgatagaactatcaacgag

SEQ ID NO: 400667 - DNA, 25 bp, Artificial
  probe
  misc_feature (1)..(25): SEQ ID NO: 5120; WAN024CCQ; Start 241; Stop 265
gatagaggtcatggtttctcctatt

SEQ ID NO: 400668 - DNA, 25 bp, Artificial
  probe
  misc_feature (1)..(25): SEQ ID NO: 5120; WAN024CCQ; Start 180; Stop 204
cattgtgaatcccgatagaactatc

SEQ ID NO: 400669 - DNA, 25 bp, Artificial
  probe
  misc_feature (1)..(25): SEQ ID NO: 5120; WAN024CCQ; Start 246; Stop 270
aggtcatggtttctcctatttgata

SEQ ID NO: 400670 - DNA, 25 bp, Artificial
  probe
  misc_feature (1)..(25): SEQ ID NO: 5120; WAN024CCQ; Start 201; Stop 225
tatcaacgagggttccatccaaatc

SEQ ID NO: 400671 - DNA, 25 bp, Artificial
  probe
  misc_feature (1)..(25): SEQ ID NO: 5120; WAN024CCQ; Start 200; Stop 224
ctatcaacgagggttccatccaaat

SEQ ID NO: 400672 - DNA, 25 bp, Artificial
  probe
  misc_feature (1)..(25): SEQ ID NO: 5120; WAN024CCQ; Start 239; Stop 263
gtgatagaggtcatggtttctccta

SEQ ID NO: 400673 - DNA, 25 bp, Artificial
  probe
  misc_feature (1)..(25): SEQ ID NO: 5120; WAN024CCQ; Start 185; Stop 209
tgaatcccgatagaactatcaacga

SEQ ID NO: 400674 - DNA, 25 bp, Artificial
  probe
  misc_feature (1)..(25): SEQ ID NO: 5120; WAN024CCQ; Start 184; Stop 208
gtgaatcccgatagaactatcaacg

SEQ ID NO: 400675 - DNA, 25 bp, Artificial
  probe
  misc_feature (1)..(25): SEQ ID NO: 5120; WAN024CCQ; Start 172; Stop 196
ggtaaaggcattgtgaatcccgata

SEQ ID NO: 400676 - DNA, 25 bp, Artificial
  probe
  misc_feature (1)..(25): SEQ ID NO: 5121; WAN024F4Q; Start 49; Stop 73
cgtaccaaggtcgttagtatagatt

SEQ ID NO: 400677 - DNA, 25 bp, Artificial
  probe
  misc_feature (1)..(25): SEQ ID NO: 5121; WAN024F4Q; Start 45; Stop 69
tatccgtaccaaggtcgttagtata

SEQ ID NO: 400678 - DNA, 25 bp, Artificial
  probe
  misc_feature (1)..(25): SEQ ID NO: 5121; WAN024F4Q; Start 44; Stop 68
atatccgtaccaaggtcgttagtat

SEQ ID NO: 400679 - DNA, 25 bp, Artificial
  probe
  misc_feature (1)..(25): SEQ ID NO: 5121; WAN024F4Q; Start 48; Stop 72
ccgtaccaaggtcgttagtatagat

SEQ ID NO: 400680 - DNA, 25 bp, Artificial
  probe
  misc_feature (1)..(25): SEQ ID NO: 5121; WAN024F4Q; Start 46; Stop 70
atccgtaccaaggtcgttagtatag

SEQ ID NO: 400681 - DNA, 25 bp, Artificial
  probe
  misc_feature (1)..(25): SEQ ID NO: 5121; WAN024F4Q; Start 47; Stop 71
tccgtaccaaggtcgttagtataga

SEQ ID NO: 400682 - DNA, 25 bp, Artificial
  probe
  misc_feature (1)..(25): SEQ ID NO: 5121; WAN024F4Q; Start 54; Stop 78
caaggtcgttagtatagatttcagc

SEQ ID NO: 400683 - DNA, 25 bp, Artificial
  probe
  misc_feature (1)..(25): SEQ ID NO: 5121; WAN024F4Q; Start 90; Stop 114
tcaagtcaatgataccacggaagtc

SEQ ID NO: 400684 - DNA, 25 bp, Artificial
  probe
  misc_feature (1)..(25): SEQ ID NO: 5121; WAN024F4Q; Start 53; Stop 77
ccaaggtcgttagtatagatttcag

SEQ ID NO: 400685 - DNA, 25 bp, Artificial
  probe
  misc_feature (1)..(25): SEQ ID NO: 5121; WAN024F4Q; Start 52; Stop 76
accaaggtcgttagtatagatttca

SEQ ID NO: 400686 - DNA, 25 bp, Artificial
  probe
  misc_feature (1)..(25): SEQ ID NO: 5121; WAN024F4Q; Start 166; Stop 190
atcgtgaagtgtgcttacagagtaa

SEQ ID NO: 400687 - DNA, 25 bp, Artificial
  probe
  misc_feature (1)..(25): SEQ ID NO: 5121; WAN024F4Q; Start 91; Stop 115
caagtcaatgataccacggaagtca

SEQ ID NO: 400688 - DNA, 25 bp, Artificial
  probe
  misc_feature (1)..(25): SEQ ID NO: 5121; WAN024F4Q; Start 43; Stop 67
gatatccgtaccaaggtcgttagta

SEQ ID NO: 400689 - DNA, 25 bp, Artificial
  probe
  misc_feature (1)..(25): SEQ ID NO: 5121; WAN024F4Q; Start 165; Stop 189
gatcgtgaagtgtgcttacagagta

SEQ ID NO: 400690 - DNA, 25 bp, Artificial
  probe
  misc_feature (1)..(25): SEQ ID NO: 5121; WAN024F4Q; Start 113; Stop 137
tcatcttcagaaccgattggcaatt

SEQ ID NO: 400691 - DNA, 25 bp, Artificial
  probe
  misc_feature (1)..(25): SEQ ID NO: 5121; WAN024F4Q; Start 23; Stop 47
gctgggatgtcttcttcaaggatat

SEQ ID NO: 400692 - DNA, 25 bp, Artificial
  probe
  misc_feature (1)..(25): SEQ ID NO: 5121; WAN024F4Q; Start 88; Stop 112
gatcaagtcaatgataccacggaag

SEQ ID NO: 400693 - DNA, 25 bp, Artificial
  probe
  misc_feature (1)..(25): SEQ ID NO: 5121; WAN024F4Q; Start 172; Stop 196
aagtgtgcttacagagtaaaggaag

SEQ ID NO: 400694 - DNA, 25 bp, Artificial
  probe
  misc_feature (1)..(25): SEQ ID NO: 5121; WAN024F4Q; Start 171; Stop 195
gaagtgtgcttacagagtaaaggaa

SEQ ID NO: 400695 - DNA, 25 bp, Artificial
  probe
  misc_feature (1)..(25): SEQ ID NO: 5121; WAN024F4Q; Start 56; Stop 80
aggtcgttagtatagatttcagctt

SEQ ID NO: 400696 - DNA, 25 bp, Artificial
  probe
  misc_feature (1)..(25): SEQ ID NO: 5121; WAN024F4Q; Start 55; Stop 79
aaggtcgttagtatagatttcagct

SEQ ID NO: 400697 - DNA, 25 bp, Artificial
  probe
  misc_feature (1)..(25): SEQ ID NO: 5121; WAN024F4Q; Start 95; Stop 119
tcaatgataccacggaagtcatctt

SEQ ID NO: 400698 - DNA, 25 bp, Artificial
  probe
  misc_feature (1)..(25): SEQ ID NO: 5121; WAN024F4Q; Start 51; Stop 75
taccaaggtcgttagtatagatttc

SEQ ID NO: 400699 - DNA, 25 bp, Artificial
  probe
  misc_feature (1)..(25): SEQ ID NO: 5121; WAN024F4Q; Start 179; Stop 203
cttacagagtaaaggaagtcagcac

SEQ ID NO: 400700 - DNA, 25 bp, Artificial
  probe
  misc_feature (1)..(25): SEQ ID NO: 5121; WAN024F4Q; Start 176; Stop 200
gtgcttacagagtaaaggaagtcag

SEQ ID NO: 400701 - DNA, 25 bp, Artificial
  probe
  misc_feature (1)..(25): SEQ ID NO: 5121; WAN024F4Q; Start 50; Stop 74
gtaccaaggtcgttagtatagattt

SEQ ID NO: 400702 - DNA, 25 bp, Artificial
  probe
  misc_feature (1)..(25): SEQ ID NO: 5121; WAN024F4Q; Start 112; Stop 136
gtcatcttcagaaccgattggcaat

SEQ ID NO: 400703 - DNA, 25 bp, Artificial
  probe
  misc_feature (1)..(25): SEQ ID NO: 5121; WAN024F4Q; Start 92; Stop 116
aagtcaatgataccacggaagtcat

SEQ ID NO: 400704 - DNA, 25 bp, Artificial
  probe
  misc_feature (1)..(25): SEQ ID NO: 5121; WAN024F4Q; Start 89; Stop 113
atcaagtcaatgataccacggaagt

SEQ ID NO: 400705 - DNA, 25 bp, Artificial
  probe
  misc_feature (1)..(25): SEQ ID NO: 5121; WAN024F4Q; Start 57; Stop 81
ggtcgttagtatagatttcagcttt

SEQ ID NO: 400706 - DNA, 25 bp, Artificial
  probe
  misc_feature (1)..(25): SEQ ID NO: 5121; WAN024F4Q; Start 174; Stop 198
gtgtgcttacagagtaaaggaagtc

SEQ ID NO: 400707 - DNA, 25 bp, Artificial
  probe
  misc_feature (1)..(25): SEQ ID NO: 5121; WAN024F4Q; Start 96; Stop 120
caatgataccacggaagtcatcttc

SEQ ID NO: 400708 - DNA, 25 bp, Artificial
  probe
  misc_feature (1)..(25): SEQ ID NO: 5121; WAN024F4Q; Start 175; Stop 199
tgtgcttacagagtaaaggaagtca

SEQ ID NO: 400709 - DNA, 25 bp, Artificial
  probe
  misc_feature (1)..(25): SEQ ID NO: 5122; WAN024FFG; Start 115; Stop 139
ttgactgttcttggtattcttcctc

SEQ ID NO: 400710 - DNA, 25 bp, Artificial
  probe
  misc_feature (1)..(25): SEQ ID NO: 5122; WAN024FFG; Start 114; Stop 138
gttgactgttcttggtattcttcct

SEQ ID NO: 400711 - DNA, 25 bp, Artificial
  probe
  misc_feature (1)..(25): SEQ ID NO: 5122; WAN024FFG; Start 113; Stop 137
agttgactgttcttggtattcttcc

SEQ ID NO: 400712 - DNA, 25 bp, Artificial
  probe
  misc_feature (1)..(25): SEQ ID NO: 5122; WAN024FFG; Start 117; Stop 141
gactgttcttggtattcttcctcaa

SEQ ID NO: 400713 - DNA, 25 bp, Artificial
  probe
  misc_feature (1)..(25): SEQ ID NO: 5122; WAN024FFG; Start 116; Stop 140
tgactgttcttggtattcttcctca

SEQ ID NO: 400714 - DNA, 25 bp, Artificial
  probe
  misc_feature (1)..(25): SEQ ID NO: 5122; WAN024FFG; Start 111; Stop 135
tcagttgactgttcttggtattctt

SEQ ID NO: 400715 - DNA, 25 bp, Artificial
  probe
  misc_feature (1)..(25): SEQ ID NO: 5122; WAN024FFG; Start 112; Stop 136
cagttgactgttcttggtattcttc

SEQ ID NO: 400716 - DNA, 25 bp, Artificial
  probe
  misc_feature (1)..(25): SEQ ID NO: 5122; WAN024FFG; Start 110; Stop 134
ctcagttgactgttcttggtattct

SEQ ID NO: 400717 - DNA, 25 bp, Artificial
  probe
  misc_feature (1)..(25): SEQ ID NO: 5122; WAN024FFG; Start 109; Stop 133
cctcagttgactgttcttggtattc

SEQ ID NO: 400718 - DNA, 25 bp, Artificial
  probe
  misc_feature (1)..(25): SEQ ID NO: 5122; WAN024FFG; Start 118; Stop 142
actgttcttggtattcttcctcaaa

SEQ ID NO: 400719 - DNA, 25 bp, Artificial
  probe
  misc_feature (1)..(25): SEQ ID NO: 5122; WAN024FFG; Start 119; Stop 143
ctgttcttggtattcttcctcaaag

SEQ ID NO: 400720 - DNA, 25 bp, Artificial
  probe
  misc_feature (1)..(25): SEQ ID NO: 5122; WAN024FFG; Start 108; Stop 132
gcctcagttgactgttcttggtatt

SEQ ID NO: 400721 - DNA, 25 bp, Artificial
  probe
  misc_feature (1)..(25): SEQ ID NO: 5122; WAN024FFG; Start 74; Stop 98
atagtcagcctgaacacggtcataa

SEQ ID NO: 400722 - DNA, 25 bp, Artificial
  probe
  misc_feature (1)..(25): SEQ ID NO: 5122; WAN024FFG; Start 120; Stop 144
tgttcttggtattcttcctcaaaga

SEQ ID NO: 400723 - DNA, 25 bp, Artificial
  probe
  misc_feature (1)..(25): SEQ ID NO: 5122; WAN024FFG; Start 121; Stop 145
gttcttggtattcttcctcaaagac

SEQ ID NO: 400724 - DNA, 25 bp, Artificial
  probe
  misc_feature (1)..(25): SEQ ID NO: 5122; WAN024FFG; Start 75; Stop 99
tagtcagcctgaacacggtcataag

SEQ ID NO: 400725 - DNA, 25 bp, Artificial
  probe
  misc_feature (1)..(25): SEQ ID NO: 5122; WAN024FFG; Start 107; Stop 131
tgcctcagttgactgttcttggtat

SEQ ID NO: 400726 - DNA, 25 bp, Artificial
  probe
  misc_feature (1)..(25): SEQ ID NO: 5122; WAN024FFG; Start 73; Stop 97
catagtcagcctgaacacggtcata

SEQ ID NO: 400727 - DNA, 25 bp, Artificial
  probe
  misc_feature (1)..(25): SEQ ID NO: 5122; WAN024FFG; Start 106; Stop 130
ttgcctcagttgactgttcttggta

SEQ ID NO: 400728 - DNA, 25 bp, Artificial
  probe
  misc_feature (1)..(25): SEQ ID NO: 5122; WAN024FFG; Start 104; Stop 128
gattgcctcagttgactgttcttgg

SEQ ID NO: 400729 - DNA, 25 bp, Artificial
  probe
  misc_feature (1)..(25): SEQ ID NO: 5122; WAN024FFG; Start 103; Stop 127
ggattgcctcagttgactgttcttg

SEQ ID NO: 400730 - DNA, 25 bp, Artificial
  probe
  misc_feature (1)..(25): SEQ ID NO: 5122; WAN024FFG; Start 100; Stop 124
cttggattgcctcagttgactgttc

SEQ ID NO: 400731 - DNA, 25 bp, Artificial
  probe
  misc_feature (1)..(25): SEQ ID NO: 5122; WAN024FFG; Start 102; Stop 126
tggattgcctcagttgactgttctt

SEQ ID NO: 400732 - DNA, 25 bp, Artificial
  probe
  misc_feature (1)..(25): SEQ ID NO: 5122; WAN024FFG; Start 101; Stop 125
ttggattgcctcagttgactgttct

SEQ ID NO: 400733 - DNA, 25 bp, Artificial
  probe
  misc_feature (1)..(25): SEQ ID NO: 5122; WAN024FFG; Start 105; Stop 129
attgcctcagttgactgttcttggt

SEQ ID NO: 400734 - DNA, 25 bp, Artificial
  probe
  misc_feature (1)..(25): SEQ ID NO: 5122; WAN024FFG; Start 95; Stop 119
ataagcttggattgcctcagttgac

SEQ ID NO: 400735 - DNA, 25 bp, Artificial
  probe
  misc_feature (1)..(25): SEQ ID NO: 5122; WAN024FFG; Start 94; Stop 118
cataagcttggattgcctcagttga

SEQ ID NO: 400736 - DNA, 25 bp, Artificial
  probe
  misc_feature (1)..(25): SEQ ID NO: 5122; WAN024FFG; Start 93; Stop 117
tcataagcttggattgcctcagttg

SEQ ID NO: 400737 - DNA, 25 bp, Artificial
  probe
  misc_feature (1)..(25): SEQ ID NO: 5122; WAN024FFG; Start 92; Stop 116
gtcataagcttggattgcctcagtt

SEQ ID NO: 400738 - DNA, 25 bp, Artificial
  probe
  misc_feature (1)..(25): SEQ ID NO: 5122; WAN024FFG; Start 83; Stop 107
ctgaacacggtcataagcttggatt

SEQ ID NO: 400739 - DNA, 25 bp, Artificial
  probe
  misc_feature (1)..(25): SEQ ID NO: 5122; WAN024FFG; Start 84; Stop 108
tgaacacggtcataagcttggattg

SEQ ID NO: 400740 - DNA, 25 bp, Artificial
  probe
  misc_feature (1)..(25): SEQ ID NO: 5122; WAN024FFG; Start 96; Stop 120
taagcttggattgcctcagttgact

SEQ ID NO: 400741 - DNA, 25 bp, Artificial
  probe
  misc_feature (1)..(25): SEQ ID NO: 5122; WAN024FFG; Start 13; Stop 37
cagcttgaccaaactgttctgctag

SEQ ID NO: 400742 - DNA, 25 bp, Artificial
  probe
  misc_feature (1)..(25): SEQ ID NO: 5123; WAN024FID; Start 320; Stop 344
tagttggcattaaggaggacagata

SEQ ID NO: 400743 - DNA, 25 bp, Artificial
  probe
  misc_feature (1)..(25): SEQ ID NO: 5123; WAN024FID; Start 319; Stop 343
atagttggcattaaggaggacagat

SEQ ID NO: 400744 - DNA, 25 bp, Artificial
  probe
  misc_feature (1)..(25): SEQ ID NO: 5123; WAN024FID; Start 321; Stop 345
agttggcattaaggaggacagatag

SEQ ID NO: 400745 - DNA, 25 bp, Artificial
  probe
  misc_feature (1)..(25): SEQ ID NO: 5123; WAN024FID; Start 139; Stop 163
cttgagaacttgctccagattactc

SEQ ID NO: 400746 - DNA, 25 bp, Artificial
  probe
  misc_feature (1)..(25): SEQ ID NO: 5123; WAN024FID; Start 318; Stop 342
catagttggcattaaggaggacaga

SEQ ID NO: 400747 - DNA, 25 bp, Artificial
  probe
  misc_feature (1)..(25): SEQ ID NO: 5123; WAN024FID; Start 138; Stop 162
tcttgagaacttgctccagattact

SEQ ID NO: 400748 - DNA, 25 bp, Artificial
  probe
  misc_feature (1)..(25): SEQ ID NO: 5123; WAN024FID; Start 137; Stop 161
gtcttgagaacttgctccagattac

SEQ ID NO: 400749 - DNA, 25 bp, Artificial
  probe
  misc_feature (1)..(25): SEQ ID NO: 5123; WAN024FID; Start 300; Stop 324
tagtgtcaattccatctgcatagtt

SEQ ID NO: 400750 - DNA, 25 bp, Artificial
  probe
  misc_feature (1)..(25): SEQ ID NO: 5123; WAN024FID; Start 136; Stop 160
ggtcttgagaacttgctccagatta

SEQ ID NO: 400751 - DNA, 25 bp, Artificial
  probe
  misc_feature (1)..(25): SEQ ID NO: 5123; WAN024FID; Start 299; Stop 323
ctagtgtcaattccatctgcatagt

SEQ ID NO: 400752 - DNA, 25 bp, Artificial
  probe
  misc_feature (1)..(25): SEQ ID NO: 5123; WAN024FID; Start 34; Stop 58
ctcctttctaacaatctgacgacta

SEQ ID NO: 400753 - DNA, 25 bp, Artificial
  probe
  misc_feature (1)..(25): SEQ ID NO: 5123; WAN024FID; Start 32; Stop 56
atctcctttctaacaatctgacgac

SEQ ID NO: 400754 - DNA, 25 bp, Artificial
  probe
  misc_feature (1)..(25): SEQ ID NO: 5123; WAN024FID; Start 31; Stop 55
catctcctttctaacaatctgacga

SEQ ID NO: 400755 - DNA, 25 bp, Artificial
  probe
  misc_feature (1)..(25): SEQ ID NO: 5123; WAN024FID; Start 33; Stop 57
tctcctttctaacaatctgacgact

SEQ ID NO: 400756 - DNA, 25 bp, Artificial
  probe
  misc_feature (1)..(25): SEQ ID NO: 5123; WAN024FID; Start 39; Stop 63
ttctaacaatctgacgactagccag

SEQ ID NO: 400757 - DNA, 25 bp, Artificial
  probe
  misc_feature (1)..(25): SEQ ID NO: 5123; WAN024FID; Start 35; Stop 59
tcctttctaacaatctgacgactag

SEQ ID NO: 400758 - DNA, 25 bp, Artificial
  probe
  misc_feature (1)..(25): SEQ ID NO: 5123; WAN024FID; Start 142; Stop 166
gagaacttgctccagattactcgtt

SEQ ID NO: 400759 - DNA, 25 bp, Artificial
  probe
  misc_feature (1)..(25): SEQ ID NO: 5123; WAN024FID; Start 140; Stop 164
ttgagaacttgctccagattactcg

SEQ ID NO: 400760 - DNA, 25 bp, Artificial
  probe
  misc_feature (1)..(25): SEQ ID NO: 5123; WAN024FID; Start 298; Stop 322
gctagtgtcaattccatctgcatag

SEQ ID NO: 400761 - DNA, 25 bp, Artificial
  probe
  misc_feature (1)..(25): SEQ ID NO: 5123; WAN024FID; Start 152; Stop 176
tccagattactcgtttcagtgattt

SEQ ID NO: 400762 - DNA, 25 bp, Artificial
  probe
  misc_feature (1)..(25): SEQ ID NO: 5123; WAN024FID; Start 30; Stop 54
tcatctcctttctaacaatctgacg

SEQ ID NO: 400763 - DNA, 25 bp, Artificial
  probe
  misc_feature (1)..(25): SEQ ID NO: 5123; WAN024FID; Start 151; Stop 175
ctccagattactcgtttcagtgatt

SEQ ID NO: 400764 - DNA, 25 bp, Artificial
  probe
  misc_feature (1)..(25): SEQ ID NO: 5123; WAN024FID; Start 292; Stop 316
gatccagctagtgtcaattccatct

SEQ ID NO: 400765 - DNA, 25 bp, Artificial
  probe
  misc_feature (1)..(25): SEQ ID NO: 5123; WAN024FID; Start 291; Stop 315
agatccagctagtgtcaattccatc

SEQ ID NO: 400766 - DNA, 25 bp, Artificial
  probe
  misc_feature (1)..(25): SEQ ID NO: 5123; WAN024FID; Start 301; Stop 325
agtgtcaattccatctgcatagttg

SEQ ID NO: 400767 - DNA, 25 bp, Artificial
  probe
  misc_feature (1)..(25): SEQ ID NO: 5123; WAN024FID; Start 297; Stop 321
agctagtgtcaattccatctgcata

SEQ ID NO: 400768 - DNA, 25 bp, Artificial
  probe
  misc_feature (1)..(25): SEQ ID NO: 5123; WAN024FID; Start 37; Stop 61
ctttctaacaatctgacgactagcc

SEQ ID NO: 400769 - DNA, 25 bp, Artificial
  probe
  misc_feature (1)..(25): SEQ ID NO: 5123; WAN024FID; Start 36; Stop 60
cctttctaacaatctgacgactagc

SEQ ID NO: 400770 - DNA, 25 bp, Artificial
  probe
  misc_feature (1)..(25): SEQ ID NO: 5123; WAN024FID; Start 290; Stop 314
cagatccagctagtgtcaattccat

SEQ ID NO: 400771 - DNA, 25 bp, Artificial
  probe
  misc_feature (1)..(25): SEQ ID NO: 5123; WAN024FID; Start 74; Stop 98
aattccagcatggcagtataagttg

SEQ ID NO: 400772 - DNA, 25 bp, Artificial
  probe
  misc_feature (1)..(25): SEQ ID NO: 5123; WAN024FID; Start 27; Stop 51
agttcatctcctttctaacaatctg

SEQ ID NO: 400773 - DNA, 25 bp, Artificial
  probe
  misc_feature (1)..(25): SEQ ID NO: 5123; WAN024FID; Start 2; Stop 26
tgaggaaagtgaagtataaaccatt

SEQ ID NO: 400774 - DNA, 25 bp, Artificial
  probe
  misc_feature (1)..(25): SEQ ID NO: 5123; WAN024FID; Start 1; Stop 25
ttgaggaaagtgaagtataaaccat

SEQ ID NO: 400775 - DNA, 25 bp, Artificial
  probe
  misc_feature (1)..(25): SEQ ID NO: 5124; WAN024F7P; Start 90; Stop 114
ttcgccttgccgtagatatagttat

SEQ ID NO: 400776 - DNA, 25 bp, Artificial
  probe
  misc_feature (1)..(25): SEQ ID NO: 5124; WAN024F7P; Start 89; Stop 113
cttcgccttgccgtagatatagtta

SEQ ID NO: 400777 - DNA, 25 bp, Artificial
  probe
  misc_feature (1)..(25): SEQ ID NO: 5124; WAN024F7P; Start 91; Stop 115
tcgccttgccgtagatatagttatc

SEQ ID NO: 400778 - DNA, 25 bp, Artificial
  probe
  misc_feature (1)..(25): SEQ ID NO: 5124; WAN024F7P; Start 24; Stop 48
aagtttgctgctgtataatggattt

SEQ ID NO: 400779 - DNA, 25 bp, Artificial
  probe
  misc_feature (1)..(25): SEQ ID NO: 5124; WAN024F7P; Start 8; Stop 32
gcggaaggtataaattaagtttgct

SEQ ID NO: 400780 - DNA, 25 bp, Artificial
  probe
  misc_feature (1)..(25): SEQ ID NO: 5124; WAN024F7P; Start 7; Stop 31
agcggaaggtataaattaagtttgc

SEQ ID NO: 400781 - DNA, 25 bp, Artificial
  probe
  misc_feature (1)..(25): SEQ ID NO: 5124; WAN024F7P; Start 3; Stop 27
gaggagcggaaggtataaattaagt

SEQ ID NO: 400782 - DNA, 25 bp, Artificial
  probe
  misc_feature (1)..(25): SEQ ID NO: 5124; WAN024F7P; Start 2; Stop 26
tgaggagcggaaggtataaattaag

SEQ ID NO: 400783 - DNA, 25 bp, Artificial
  probe
  misc_feature (1)..(25): SEQ ID NO: 5124; WAN024F7P; Start 1; Stop 25
ttgaggagcggaaggtataaattaa

SEQ ID NO: 400784 - DNA, 25 bp, Artificial
  probe
  misc_feature (1)..(25): SEQ ID NO: 5124; WAN024F7P; Start 4; Stop 28
aggagcggaaggtataaattaagtt

SEQ ID NO: 400785 - DNA, 25 bp, Artificial
  probe
  misc_feature (1)..(25): SEQ ID NO: 5124; WAN024F7P; Start 97; Stop 121
tgccgtagatatagttatcgacttc

SEQ ID NO: 400786 - DNA, 25 bp, Artificial
  probe
  misc_feature (1)..(25): SEQ ID NO: 5124; WAN024F7P; Start 95; Stop 119
cttgccgtagatatagttatcgact

SEQ ID NO: 400787 - DNA, 25 bp, Artificial
  probe
  misc_feature (1)..(25): SEQ ID NO: 5124; WAN024F7P; Start 25; Stop 49
agtttgctgctgtataatggattta

SEQ ID NO: 400788 - DNA, 25 bp, Artificial
  probe
  misc_feature (1)..(25): SEQ ID NO: 5124; WAN024F7P; Start 23; Stop 47
taagtttgctgctgtataatggatt

SEQ ID NO: 400789 - DNA, 25 bp, Artificial
  probe
  misc_feature (1)..(25): SEQ ID NO: 5124; WAN024F7P; Start 99; Stop 123
ccgtagatatagttatcgacttcgt

SEQ ID NO: 400790 - DNA, 25 bp, Artificial
  probe
  misc_feature (1)..(25): SEQ ID NO: 5124; WAN024F7P; Start 94; Stop 118
ccttgccgtagatatagttatcgac

SEQ ID NO: 400791 - DNA, 25 bp, Artificial
  probe
  misc_feature (1)..(25): SEQ ID NO: 5124; WAN024F7P; Start 98; Stop 122
gccgtagatatagttatcgacttcg

SEQ ID NO: 400792 - DNA, 25 bp, Artificial
  probe
  misc_feature (1)..(25): SEQ ID NO: 5124; WAN024F7P; Start 5; Stop 29
ggagcggaaggtataaattaagttt

SEQ ID NO: 400793 - DNA, 25 bp, Artificial
  probe
  misc_feature (1)..(25): SEQ ID NO: 5124; WAN024F7P; Start 96; Stop 120
ttgccgtagatatagttatcgactt

SEQ ID NO: 400794 - DNA, 25 bp, Artificial
  probe
  misc_feature (1)..(25): SEQ ID NO: 5124; WAN024F7P; Start 29; Stop 53
tgctgctgtataatggatttatcac

SEQ ID NO: 400795 - DNA, 25 bp, Artificial
  probe
  misc_feature (1)..(25): SEQ ID NO: 5124; WAN024F7P; Start 13; Stop 37
aggtataaattaagtttgctgctgt

SEQ ID NO: 400796 - DNA, 25 bp, Artificial
  probe
  misc_feature (1)..(25): SEQ ID NO: 5124; WAN024F7P; Start 109; Stop 133
agttatcgacttcgtcagttctatc

SEQ ID NO: 400797 - DNA, 25 bp, Artificial
  probe
  misc_feature (1)..(25): SEQ ID NO: 5124; WAN024F7P; Start 22; Stop 46
ttaagtttgctgctgtataatggat

SEQ ID NO: 400798 - DNA, 25 bp, Artificial
  probe
  misc_feature (1)..(25): SEQ ID NO: 5124; WAN024F7P; Start 10; Stop 34
ggaaggtataaattaagtttgctgc

SEQ ID NO: 400799 - DNA, 25 bp, Artificial
  probe
  misc_feature (1)..(25): SEQ ID NO: 5124; WAN024F7P; Start 30; Stop 54
gctgctgtataatggatttatcact

SEQ ID NO: 400800 - DNA, 25 bp, Artificial
  probe
  misc_feature (1)..(25): SEQ ID NO: 5124; WAN024F7P; Start 110; Stop 134
gttatcgacttcgtcagttctatcc

SEQ ID NO: 400801 - DNA, 25 bp, Artificial
  probe
  misc_feature (1)..(25): SEQ ID NO: 5124; WAN024F7P; Start 9; Stop 33
cggaaggtataaattaagtttgctg

SEQ ID NO: 400802 - DNA, 25 bp, Artificial
  probe
  misc_feature (1)..(25): SEQ ID NO: 5124; WAN024F7P; Start 21; Stop 45
attaagtttgctgctgtataatgga

SEQ ID NO: 400803 - DNA, 25 bp, Artificial
  probe
  misc_feature (1)..(25): SEQ ID NO: 5124; WAN024F7P; Start 111; Stop 135
ttatcgacttcgtcagttctatcca

SEQ ID NO: 400804 - DNA, 25 bp, Artificial
  probe
  misc_feature (1)..(25): SEQ ID NO: 5124; WAN024F7P; Start 108; Stop 132
tagttatcgacttcgtcagttctat

SEQ ID NO: 400805 - DNA, 25 bp, Artificial
  probe
  misc_feature (1)..(25): SEQ ID NO: 5124; WAN024F7P; Start 107; Stop 131
atagttatcgacttcgtcagttcta

SEQ ID NO: 400806 - DNA, 25 bp, Artificial
  probe
  misc_feature (1)..(25): SEQ ID NO: 5124; WAN024F7P; Start 106; Stop 130
tatagttatcgacttcgtcagttct

SEQ ID NO: 400807 - DNA, 25 bp, Artificial
  probe
  misc_feature (1)..(25): SEQ ID NO: 5124; WAN024F7P; Start 28; Stop 52
ttgctgctgtataatggatttatca

SEQ ID NO: 400808 - DNA, 25 bp, Artificial
  probe
  misc_feature (1)..(25): SEQ ID NO: 5125; WAN024CG5; Start 1; Stop 25
ttgaggagttggaagatgatggaag

SEQ ID NO: 400809 - DNA, 25 bp, Artificial
  probe
  misc_feature (1)..(25): SEQ ID NO: 5125; WAN024CG5; Start 2; Stop 26
tgaggagttggaagatgatggaaga

SEQ ID NO: 400810 - DNA, 25 bp, Artificial
  probe
  misc_feature (1)..(25): SEQ ID NO: 5125; WAN024CG5; Start 43; Stop 67
aatgaagtatacaactggacggtag

SEQ ID NO: 400811 - DNA, 25 bp, Artificial
  probe
  misc_feature (1)..(25): SEQ ID NO: 5125; WAN024CG5; Start 41; Stop 65
ttaatgaagtatacaactggacggt

SEQ ID NO: 400812 - DNA, 25 bp, Artificial
  probe
  misc_feature (1)..(25): SEQ ID NO: 5125; WAN024CG5; Start 46; Stop 70
gaagtatacaactggacggtagaag

SEQ ID NO: 400813 - DNA, 25 bp, Artificial
  probe
  misc_feature (1)..(25): SEQ ID NO: 5125; WAN024CG5; Start 40; Stop 64
gttaatgaagtatacaactggacgg

SEQ ID NO: 400814 - DNA, 25 bp, Artificial
  probe
  misc_feature (1)..(25): SEQ ID NO: 5125; WAN024CG5; Start 47; Stop 71
aagtatacaactggacggtagaaga

SEQ ID NO: 400815 - DNA, 25 bp, Artificial
  probe
  misc_feature (1)..(25): SEQ ID NO: 5125; WAN024CG5; Start 44; Stop 68
atgaagtatacaactggacggtaga

SEQ ID NO: 400816 - DNA, 25 bp, Artificial
  probe
  misc_feature (1)..(25): SEQ ID NO: 5125; WAN024CG5; Start 50; Stop 74
tatacaactggacggtagaagacgg

SEQ ID NO: 400817 - DNA, 25 bp, Artificial
  probe
  misc_feature (1)..(25): SEQ ID NO: 5125; WAN024CG5; Start 45; Stop 69
tgaagtatacaactggacggtagaa

SEQ ID NO: 400818 - DNA, 25 bp, Artificial
  probe
  misc_feature (1)..(25): SEQ ID NO: 5125; WAN024CG5; Start 42; Stop 66
taatgaagtatacaactggacggta

SEQ ID NO: 400819 - DNA, 25 bp, Artificial
  probe
  misc_feature (1)..(25): SEQ ID NO: 5125; WAN024CG5; Start 48; Stop 72
agtatacaactggacggtagaagac

SEQ ID NO: 400820 - DNA, 25 bp, Artificial
  probe
  misc_feature (1)..(25): SEQ ID NO: 5125; WAN024CG5; Start 208; Stop 232
gactatgatttgggagctactaagg

SEQ ID NO: 400821 - DNA, 25 bp, Artificial
  probe
  misc_feature (1)..(25): SEQ ID NO: 5125; WAN024CG5; Start 49; Stop 73
gtatacaactggacggtagaagacg

SEQ ID NO: 400822 - DNA, 25 bp, Artificial
  probe
  misc_feature (1)..(25): SEQ ID NO: 5125; WAN024CG5; Start 148; Stop 172
gaagatggtatgacgtttatgggag

SEQ ID NO: 400823 - DNA, 25 bp, Artificial
  probe
  misc_feature (1)..(25): SEQ ID NO: 5125; WAN024CG5; Start 147; Stop 171
agaagatggtatgacgtttatggga

SEQ ID NO: 400824 - DNA, 25 bp, Artificial
  probe
  misc_feature (1)..(25): SEQ ID NO: 5125; WAN024CG5; Start 146; Stop 170
cagaagatggtatgacgtttatggg

SEQ ID NO: 400825 - DNA, 25 bp, Artificial
  probe
  misc_feature (1)..(25): SEQ ID NO: 5125; WAN024CG5; Start 145; Stop 169
gcagaagatggtatgacgtttatgg

SEQ ID NO: 400826 - DNA, 25 bp, Artificial
  probe
  misc_feature (1)..(25): SEQ ID NO: 5125; WAN024CG5; Start 144; Stop 168
ggcagaagatggtatgacgtttatg

SEQ ID NO: 400827 - DNA, 25 bp, Artificial
  probe
  misc_feature (1)..(25): SEQ ID NO: 5125; WAN024CG5; Start 143; Stop 167
tggcagaagatggtatgacgtttat

SEQ ID NO: 400828 - DNA, 25 bp, Artificial
  probe
  misc_feature (1)..(25): SEQ ID NO: 5125; WAN024CG5; Start 142; Stop 166
atggcagaagatggtatgacgttta

SEQ ID NO: 400829 - DNA, 25 bp, Artificial
  probe
  misc_feature (1)..(25): SEQ ID NO: 5125; WAN024CG5; Start 39; Stop 63
agttaatgaagtatacaactggacg

SEQ ID NO: 400830 - DNA, 25 bp, Artificial
  probe
  misc_feature (1)..(25): SEQ ID NO: 5125; WAN024CG5; Start 85; Stop 109
cctcccaagcaagatttaccacaag

SEQ ID NO: 400831 - DNA, 25 bp, Artificial
  probe
  misc_feature (1)..(25): SEQ ID NO: 5125; WAN024CG5; Start 149; Stop 173
aagatggtatgacgtttatgggagc

SEQ ID NO: 400832 - DNA, 25 bp, Artificial
  probe
  misc_feature (1)..(25): SEQ ID NO: 5125; WAN024CG5; Start 82; Stop 106
caacctcccaagcaagatttaccac

SEQ ID NO: 400833 - DNA, 25 bp, Artificial
  probe
  misc_feature (1)..(25): SEQ ID NO: 5125; WAN024CG5; Start 84; Stop 108
acctcccaagcaagatttaccacaa

SEQ ID NO: 400834 - DNA, 25 bp, Artificial
  probe
  misc_feature (1)..(25): SEQ ID NO: 5125; WAN024CG5; Start 83; Stop 107
aacctcccaagcaagatttaccaca

SEQ ID NO: 400835 - DNA, 25 bp, Artificial
  probe
  misc_feature (1)..(25): SEQ ID NO: 5125; WAN024CG5; Start 38; Stop 62
aagttaatgaagtatacaactggac

SEQ ID NO: 400836 - DNA, 25 bp, Artificial
  probe
  misc_feature (1)..(25): SEQ ID NO: 5125; WAN024CG5; Start 156; Stop 180
tatgacgtttatgggagcgatggaa

SEQ ID NO: 400837 - DNA, 25 bp, Artificial
  probe
  misc_feature (1)..(25): SEQ ID NO: 5125; WAN024CG5; Start 238; Stop 262
ttgccaaaatctaaggagtttgatg

SEQ ID NO: 400838 - DNA, 25 bp, Artificial
  probe
  misc_feature (1)..(25): SEQ ID NO: 5125; WAN024CG5; Start 237; Stop 261
gttgccaaaatctaaggagtttgat

SEQ ID NO: 400839 - DNA, 25 bp, Artificial
  probe
  misc_feature (1)..(25): SEQ ID NO: 5125; WAN024CG5; Start 240; Stop 264
gccaaaatctaaggagtttgatgat

SEQ ID NO: 400840 - DNA, 25 bp, Artificial
  probe
  misc_feature (1)..(25): SEQ ID NO: 5125; WAN024CG5; Start 239; Stop 263
tgccaaaatctaaggagtttgatga

SEQ ID NO: 400841 - DNA, 25 bp, Artificial
  probe
  misc_feature (1)..(25): SEQ ID NO: 5126; WAN024GG3; Start 465; Stop 489
aggtattgtagaggtgctaggatta

SEQ ID NO: 400842 - DNA, 25 bp, Artificial
  probe
  misc_feature (1)..(25): SEQ ID NO: 5126; WAN024GG3; Start 469; Stop 493
attgtagaggtgctaggattaactg

SEQ ID NO: 400843 - DNA, 25 bp, Artificial
  probe
  misc_feature (1)..(25): SEQ ID NO: 5126; WAN024GG3; Start 466; Stop 490
ggtattgtagaggtgctaggattaa

SEQ ID NO: 400844 - DNA, 25 bp, Artificial
  probe
  misc_feature (1)..(25): SEQ ID NO: 5126; WAN024GG3; Start 464; Stop 488
aaggtattgtagaggtgctaggatt

SEQ ID NO: 400845 - DNA, 25 bp, Artificial
  probe
  misc_feature (1)..(25): SEQ ID NO: 5126; WAN024GG3; Start 470; Stop 494
ttgtagaggtgctaggattaactgt

SEQ ID NO: 400846 - DNA, 25 bp, Artificial
  probe
  misc_feature (1)..(25): SEQ ID NO: 5126; WAN024GG3; Start 88; Stop 112
gttcaggagttgattacttaccgag

SEQ ID NO: 400847 - DNA, 25 bp, Artificial
  probe
  misc_feature (1)..(25): SEQ ID NO: 5126; WAN024GG3; Start 471; Stop 495
tgtagaggtgctaggattaactgtc

SEQ ID NO: 400848 - DNA, 25 bp, Artificial
  probe
  misc_feature (1)..(25): SEQ ID NO: 5126; WAN024GG3; Start 89; Stop 113
ttcaggagttgattacttaccgagt

SEQ ID NO: 400849 - DNA, 25 bp, Artificial
  probe
  misc_feature (1)..(25): SEQ ID NO: 5126; WAN024GG3; Start 468; Stop 492
tattgtagaggtgctaggattaact

SEQ ID NO: 400850 - DNA, 25 bp, Artificial
  probe
  misc_feature (1)..(25): SEQ ID NO: 5126; WAN024GG3; Start 467; Stop 491
gtattgtagaggtgctaggattaac

SEQ ID NO: 400851 - DNA, 25 bp, Artificial
  probe
  misc_feature (1)..(25): SEQ ID NO: 5126; WAN024GG3; Start 512; Stop 536
taacgctcgcctatctgattaactt

SEQ ID NO: 400852 - DNA, 25 bp, Artificial
  probe
  misc_feature (1)..(25): SEQ ID NO: 5126; WAN024GG3; Start 510; Stop 534
cttaacgctcgcctatctgattaac

SEQ ID NO: 400853 - DNA, 25 bp, Artificial
  probe
  misc_feature (1)..(25): SEQ ID NO: 5126; WAN024GG3; Start 463; Stop 487
caaggtattgtagaggtgctaggat

SEQ ID NO: 400854 - DNA, 25 bp, Artificial
  probe
  misc_feature (1)..(25): SEQ ID NO: 5126; WAN024GG3; Start 737; Stop 761
aatacgatgccagtcagattcttca

SEQ ID NO: 400855 - DNA, 25 bp, Artificial
  probe
  misc_feature (1)..(25): SEQ ID NO: 5126; WAN024GG3; Start 90; Stop 114
tcaggagttgattacttaccgagtc

SEQ ID NO: 400856 - DNA, 25 bp, Artificial
  probe
  misc_feature (1)..(25): SEQ ID NO: 5126; WAN024GG3; Start 511; Stop 535
ttaacgctcgcctatctgattaact

SEQ ID NO: 400857 - DNA, 25 bp, Artificial
  probe
  misc_feature (1)..(25): SEQ ID NO: 5126; WAN024GG3; Start 91; Stop 115
caggagttgattacttaccgagtca

SEQ ID NO: 400858 - DNA, 25 bp, Artificial
  probe
  misc_feature (1)..(25): SEQ ID NO: 5126; WAN024GG3; Start 738; Stop 762
atacgatgccagtcagattcttcag

SEQ ID NO: 400859 - DNA, 25 bp, Artificial
  probe
  misc_feature (1)..(25): SEQ ID NO: 5126; WAN024GG3; Start 461; Stop 485
gtcaaggtattgtagaggtgctagg

SEQ ID NO: 400860 - DNA, 25 bp, Artificial
  probe
  misc_feature (1)..(25): SEQ ID NO: 5126; WAN024GG3; Start 460; Stop 484
ggtcaaggtattgtagaggtgctag

SEQ ID NO: 400861 - DNA, 25 bp, Artificial
  probe
  misc_feature (1)..(25): SEQ ID NO: 5126; WAN024GG3; Start 462; Stop 486
tcaaggtattgtagaggtgctagga

SEQ ID NO: 400862 - DNA, 25 bp, Artificial
  probe
  misc_feature (1)..(25): SEQ ID NO: 5126; WAN024GG3; Start 115; Stop 139
aactttattctctatcggattggcg

SEQ ID NO: 400863 - DNA, 25 bp, Artificial
  probe
  misc_feature (1)..(25): SEQ ID NO: 5126; WAN024GG3; Start 736; Stop 760
aaatacgatgccagtcagattcttc

SEQ ID NO: 400864 - DNA, 25 bp, Artificial
  probe
  misc_feature (1)..(25): SEQ ID NO: 5126; WAN024GG3; Start 449; Stop 473
aaatcatatcgggtcaaggtattgt

SEQ ID NO: 400865 - DNA, 25 bp, Artificial
  probe
  misc_feature (1)..(25): SEQ ID NO: 5126; WAN024GG3; Start 114; Stop 138
caactttattctctatcggattggc

SEQ ID NO: 400866 - DNA, 25 bp, Artificial
  probe
  misc_feature (1)..(25): SEQ ID NO: 5126; WAN024GG3; Start 777; Stop 801
gttcttctggctcttagtgatggtg

SEQ ID NO: 400867 - DNA, 25 bp, Artificial
  probe
  misc_feature (1)..(25): SEQ ID NO: 5126; WAN024GG3; Start 776; Stop 800
agttcttctggctcttagtgatggt

SEQ ID NO: 400868 - DNA, 25 bp, Artificial
  probe
  misc_feature (1)..(25): SEQ ID NO: 5126; WAN024GG3; Start 453; Stop 477
catatcgggtcaaggtattgtagag

SEQ ID NO: 400869 - DNA, 25 bp, Artificial
  probe
  misc_feature (1)..(25): SEQ ID NO: 5126; WAN024GG3; Start 451; Stop 475
atcatatcgggtcaaggtattgtag

SEQ ID NO: 400870 - DNA, 25 bp, Artificial
  probe
  misc_feature (1)..(25): SEQ ID NO: 5126; WAN024GG3; Start 257; Stop 281
ttgtgaccaatcttctgactagatc

SEQ ID NO: 400871 - DNA, 25 bp, Artificial
  probe
  misc_feature (1)..(25): SEQ ID NO: 5126; WAN024GG3; Start 452; Stop 476
tcatatcgggtcaaggtattgtaga

SEQ ID NO: 400872 - DNA, 25 bp, Artificial
  probe
  misc_feature (1)..(25): SEQ ID NO: 5126; WAN024GG3; Start 263; Stop 287
ccaatcttctgactagatccgattc

SEQ ID NO: 400873 - DNA, 25 bp, Artificial
  probe
  misc_feature (1)..(25): SEQ ID NO: 5126; WAN024GG3; Start 450; Stop 474
aatcatatcgggtcaaggtattgta

SEQ ID NO: 400874 - DNA, 25 bp, Artificial
  probe
  misc_feature (1)..(25): SEQ ID NO: 5127; WAN024CCE; Start 686; Stop 710
tgccagaatacattgagattgagtt

SEQ ID NO: 400875 - DNA, 25 bp, Artificial
  probe
  misc_feature (1)..(25): SEQ ID NO: 5127; WAN024CCE; Start 91; Stop 115
ttagacacatcagttgctattacct

SEQ ID NO: 400876 - DNA, 25 bp, Artificial
  probe
  misc_feature (1)..(25): SEQ ID NO: 5127; WAN024CCE; Start 679; Stop 703
ccagatatgccagaatacattgaga

SEQ ID NO: 400877 - DNA, 25 bp, Artificial
  probe
  misc_feature (1)..(25): SEQ ID NO: 5127; WAN024CCE; Start 678; Stop 702
tccagatatgccagaatacattgag

SEQ ID NO: 400878 - DNA, 25 bp, Artificial
  probe
  misc_feature (1)..(25): SEQ ID NO: 5127; WAN024CCE; Start 677; Stop 701
ctccagatatgccagaatacattga

SEQ ID NO: 400879 - DNA, 25 bp, Artificial
  probe
  misc_feature (1)..(25): SEQ ID NO: 5127; WAN024CCE; Start 685; Stop 709
atgccagaatacattgagattgagt

SEQ ID NO: 400880 - DNA, 25 bp, Artificial
  probe
  misc_feature (1)..(25): SEQ ID NO: 5127; WAN024CCE; Start 684; Stop 708
tatgccagaatacattgagattgag

SEQ ID NO: 400881 - DNA, 25 bp, Artificial
  probe
  misc_feature (1)..(25): SEQ ID NO: 5127; WAN024CCE; Start 680; Stop 704
cagatatgccagaatacattgagat

SEQ ID NO: 400882 - DNA, 25 bp, Artificial
  probe
  misc_feature (1)..(25): SEQ ID NO: 5127; WAN024CCE; Start 676; Stop 700
gctccagatatgccagaatacattg

SEQ ID NO: 400883 - DNA, 25 bp, Artificial
  probe
  misc_feature (1)..(25): SEQ ID NO: 5127; WAN024CCE; Start 92; Stop 116
tagacacatcagttgctattacctg

SEQ ID NO: 400884 - DNA, 25 bp, Artificial
  probe
  misc_feature (1)..(25): SEQ ID NO: 5127; WAN024CCE; Start 683; Stop 707
atatgccagaatacattgagattga

SEQ ID NO: 400885 - DNA, 25 bp, Artificial
  probe
  misc_feature (1)..(25): SEQ ID NO: 5127; WAN024CCE; Start 275; Stop 299
atcagtcacatgcctattatgaaca

SEQ ID NO: 400886 - DNA, 25 bp, Artificial
  probe
  misc_feature (1)..(25): SEQ ID NO: 5127; WAN024CCE; Start 276; Stop 300
tcagtcacatgcctattatgaacaa

SEQ ID NO: 400887 - DNA, 25 bp, Artificial
  probe
  misc_feature (1)..(25): SEQ ID NO: 5127; WAN024CCE; Start 274; Stop 298
catcagtcacatgcctattatgaac

SEQ ID NO: 400888 - DNA, 25 bp, Artificial
  probe
  misc_feature (1)..(25): SEQ ID NO: 5127; WAN024CCE; Start 682; Stop 706
gatatgccagaatacattgagattg

SEQ ID NO: 400889 - DNA, 25 bp, Artificial
  probe
  misc_feature (1)..(25): SEQ ID NO: 5127; WAN024CCE; Start 681; Stop 705
agatatgccagaatacattgagatt

SEQ ID NO: 400890 - DNA, 25 bp, Artificial
  probe
  misc_feature (1)..(25): SEQ ID NO: 5127; WAN024CCE; Start 252; Stop 276
tacagattatgtgctagtggctcat

SEQ ID NO: 400891 - DNA, 25 bp, Artificial
  probe
  misc_feature (1)..(25): SEQ ID NO: 5127; WAN024CCE; Start 271; Stop 295
gctcatcagtcacatgcctattatg

SEQ ID NO: 400892 - DNA, 25 bp, Artificial
  probe
  misc_feature (1)..(25): SEQ ID NO: 5127; WAN024CCE; Start 211; Stop 235
gcagtcgaatcttatgtcattgatg

SEQ ID NO: 400893 - DNA, 25 bp, Artificial
  probe
  misc_feature (1)..(25): SEQ ID NO: 5127; WAN024CCE; Start 363; Stop 387
gcatcagataggagcgactacaatt

SEQ ID NO: 400894 - DNA, 25 bp, Artificial
  probe
  misc_feature (1)..(25): SEQ ID NO: 5127; WAN024CCE; Start 212; Stop 236
cagtcgaatcttatgtcattgatgt

SEQ ID NO: 400895 - DNA, 25 bp, Artificial
  probe
  misc_feature (1)..(25): SEQ ID NO: 5127; WAN024CCE; Start 255; Stop 279
agattatgtgctagtggctcatcag

SEQ ID NO: 400896 - DNA, 25 bp, Artificial
  probe
  misc_feature (1)..(25): SEQ ID NO: 5127; WAN024CCE; Start 699; Stop 723
tgagattgagtttagtgaaggtgtt

SEQ ID NO: 400897 - DNA, 25 bp, Artificial
  probe
  misc_feature (1)..(25): SEQ ID NO: 5127; WAN024CCE; Start 698; Stop 722
ttgagattgagtttagtgaaggtgt

SEQ ID NO: 400898 - DNA, 25 bp, Artificial
  probe
  misc_feature (1)..(25): SEQ ID NO: 5127; WAN024CCE; Start 119; Stop 143
tgaagaaagactatgatgttgttgc

SEQ ID NO: 400899 - DNA, 25 bp, Artificial
  probe
  misc_feature (1)..(25): SEQ ID NO: 5127; WAN024CCE; Start 251; Stop 275
ctacagattatgtgctagtggctca

SEQ ID NO: 400900 - DNA, 25 bp, Artificial
  probe
  misc_feature (1)..(25): SEQ ID NO: 5127; WAN024CCE; Start 210; Stop 234
ggcagtcgaatcttatgtcattgat

SEQ ID NO: 400901 - DNA, 25 bp, Artificial
  probe
  misc_feature (1)..(25): SEQ ID NO: 5127; WAN024CCE; Start 109; Stop 133
attacctggctgaagaaagactatg

SEQ ID NO: 400902 - DNA, 25 bp, Artificial
  probe
  misc_feature (1)..(25): SEQ ID NO: 5127; WAN024CCE; Start 979; Stop 1003
tataatgctttgtggtttagttcgg

SEQ ID NO: 400903 - DNA, 25 bp, Artificial
  probe
  misc_feature (1)..(25): SEQ ID NO: 5127; WAN024CCE; Start 687; Stop 711
gccagaatacattgagattgagttt

SEQ ID NO: 400904 - DNA, 25 bp, Artificial
  probe
  misc_feature (1)..(25): SEQ ID NO: 5127; WAN024CCE; Start 257; Stop 281
attatgtgctagtggctcatcagtc

SEQ ID NO: 400905 - DNA, 25 bp, Artificial
  probe
  misc_feature (1)..(25): SEQ ID NO: 5127; WAN024CCE; Start 256; Stop 280
gattatgtgctagtggctcatcagt

SEQ ID NO: 400906 - DNA, 25 bp, Artificial
  probe
  misc_feature (1)..(25): SEQ ID NO: 5127; WAN024CCE; Start 254; Stop 278
cagattatgtgctagtggctcatca

SEQ ID NO: 400907 - DNA, 25 bp, Artificial
  probe
  misc_feature (1)..(25): SEQ ID NO: 5128; WAN024GNZ; Start 22; Stop 46
attccttcttctattggtcttggtt

SEQ ID NO: 400908 - DNA, 25 bp, Artificial
  probe
  misc_feature (1)..(25): SEQ ID NO: 5128; WAN024GNZ; Start 20; Stop 44
tcattccttcttctattggtcttgg

SEQ ID NO: 400909 - DNA, 25 bp, Artificial
  probe
  misc_feature (1)..(25): SEQ ID NO: 5128; WAN024GNZ; Start 312; Stop 336
ttggtcttctcttacacttgattcc

SEQ ID NO: 400910 - DNA, 25 bp, Artificial
  probe
  misc_feature (1)..(25): SEQ ID NO: 5128; WAN024GNZ; Start 314; Stop 338
ggtcttctcttacacttgattccta

SEQ ID NO: 400911 - DNA, 25 bp, Artificial
  probe
  misc_feature (1)..(25): SEQ ID NO: 5128; WAN024GNZ; Start 21; Stop 45
cattccttcttctattggtcttggt

SEQ ID NO: 400912 - DNA, 25 bp, Artificial
  probe
  misc_feature (1)..(25): SEQ ID NO: 5128; WAN024GNZ; Start 311; Stop 335
cttggtcttctcttacacttgattc

SEQ ID NO: 400913 - DNA, 25 bp, Artificial
  probe
  misc_feature (1)..(25): SEQ ID NO: 5128; WAN024GNZ; Start 313; Stop 337
tggtcttctcttacacttgattcct

SEQ ID NO: 400914 - DNA, 25 bp, Artificial
  probe
  misc_feature (1)..(25): SEQ ID NO: 5128; WAN024GNZ; Start 19; Stop 43
ttcattccttcttctattggtcttg

SEQ ID NO: 400915 - DNA, 25 bp, Artificial
  probe
  misc_feature (1)..(25): SEQ ID NO: 5128; WAN024GNZ; Start 316; Stop 340
tcttctcttacacttgattcctagc

SEQ ID NO: 400916 - DNA, 25 bp, Artificial
  probe
  misc_feature (1)..(25): SEQ ID NO: 5128; WAN024GNZ; Start 315; Stop 339
gtcttctcttacacttgattcctag

SEQ ID NO: 400917 - DNA, 25 bp, Artificial
  probe
  misc_feature (1)..(25): SEQ ID NO: 5128; WAN024GNZ; Start 23; Stop 47
ttccttcttctattggtcttggttt

SEQ ID NO: 400918 - DNA, 25 bp, Artificial
  probe
  misc_feature (1)..(25): SEQ ID NO: 5128; WAN024GNZ; Start 270; Stop 294
acttgcttgtatttgggattgtcta

SEQ ID NO: 400919 - DNA, 25 bp, Artificial
  probe
  misc_feature (1)..(25): SEQ ID NO: 5128; WAN024GNZ; Start 268; Stop 292
ctacttgcttgtatttgggattgtc

SEQ ID NO: 400920 - DNA, 25 bp, Artificial
  probe
  misc_feature (1)..(25): SEQ ID NO: 5128; WAN024GNZ; Start 269; Stop 293
tacttgcttgtatttgggattgtct

SEQ ID NO: 400921 - DNA, 25 bp, Artificial
  probe
  misc_feature (1)..(25): SEQ ID NO: 5128; WAN024GNZ; Start 271; Stop 295
cttgcttgtatttgggattgtctat

SEQ ID NO: 400922 - DNA, 25 bp, Artificial
  probe
  misc_feature (1)..(25): SEQ ID NO: 5128; WAN024GNZ; Start 24; Stop 48
tccttcttctattggtcttggtttg

SEQ ID NO: 400923 - DNA, 25 bp, Artificial
  probe
  misc_feature (1)..(25): SEQ ID NO: 5128; WAN024GNZ; Start 159; Stop 183
aattccatttattgctcccttatgc

SEQ ID NO: 400924 - DNA, 25 bp, Artificial
  probe
  misc_feature (1)..(25): SEQ ID NO: 5128; WAN024GNZ; Start 26; Stop 50
cttcttctattggtcttggtttggg

SEQ ID NO: 400925 - DNA, 25 bp, Artificial
  probe
  misc_feature (1)..(25): SEQ ID NO: 5128; WAN024GNZ; Start 25; Stop 49
ccttcttctattggtcttggtttgg

SEQ ID NO: 400926 - DNA, 25 bp, Artificial
  probe
  misc_feature (1)..(25): SEQ ID NO: 5128; WAN024GNZ; Start 379; Stop 403
tatcttgtccatgttggtgacctta

SEQ ID NO: 400927 - DNA, 25 bp, Artificial
  probe
  misc_feature (1)..(25): SEQ ID NO: 5128; WAN024GNZ; Start 272; Stop 296
ttgcttgtatttgggattgtctata

SEQ ID NO: 400928 - DNA, 25 bp, Artificial
  probe
  misc_feature (1)..(25): SEQ ID NO: 5128; WAN024GNZ; Start 267; Stop 291
gctacttgcttgtatttgggattgt

SEQ ID NO: 400929 - DNA, 25 bp, Artificial
  probe
  misc_feature (1)..(25): SEQ ID NO: 5128; WAN024GNZ; Start 18; Stop 42
tttcattccttcttctattggtctt

SEQ ID NO: 400930 - DNA, 25 bp, Artificial
  probe
  misc_feature (1)..(25): SEQ ID NO: 5128; WAN024GNZ; Start 15; Stop 39
tgatttcattccttcttctattggt

SEQ ID NO: 400931 - DNA, 25 bp, Artificial
  probe
  misc_feature (1)..(25): SEQ ID NO: 5128; WAN024GNZ; Start 17; Stop 41
atttcattccttcttctattggtct

SEQ ID NO: 400932 - DNA, 25 bp, Artificial
  probe
  misc_feature (1)..(25): SEQ ID NO: 5128; WAN024GNZ; Start 370; Stop 394
ttcagcaggtatcttgtccatgttg

SEQ ID NO: 400933 - DNA, 25 bp, Artificial
  probe
  misc_feature (1)..(25): SEQ ID NO: 5128; WAN024GNZ; Start 380; Stop 404
atcttgtccatgttggtgaccttat

SEQ ID NO: 400934 - DNA, 25 bp, Artificial
  probe
  misc_feature (1)..(25): SEQ ID NO: 5128; WAN024GNZ; Start 366; Stop 390
aagtttcagcaggtatcttgtccat

SEQ ID NO: 400935 - DNA, 25 bp, Artificial
  probe
  misc_feature (1)..(25): SEQ ID NO: 5128; WAN024GNZ; Start 16; Stop 40
gatttcattccttcttctattggtc

SEQ ID NO: 400936 - DNA, 25 bp, Artificial
  probe
  misc_feature (1)..(25): SEQ ID NO: 5128; WAN024GNZ; Start 381; Stop 405
tcttgtccatgttggtgaccttatt

SEQ ID NO: 400937 - DNA, 25 bp, Artificial
  probe
  misc_feature (1)..(25): SEQ ID NO: 5128; WAN024GNZ; Start 266; Stop 290
ggctacttgcttgtatttgggattg

SEQ ID NO: 400938 - DNA, 25 bp, Artificial
  probe
  misc_feature (1)..(25): SEQ ID NO: 5128; WAN024GNZ; Start 360; Stop 384
tgttccaagtttcagcaggtatctt

SEQ ID NO: 400939 - DNA, 25 bp, Artificial
  probe
  misc_feature (1)..(25): SEQ ID NO: 5128; WAN024GNZ; Start 359; Stop 383
ttgttccaagtttcagcaggtatct

SEQ ID NO: 400940 - DNA, 25 bp, Artificial
  probe
  misc_feature (1)..(25): SEQ ID NO: 5129; WAN024DZM; Start 287; Stop 311
acttctgttacttcttctgcttcat

SEQ ID NO: 400941 - DNA, 25 bp, Artificial
  probe
  misc_feature (1)..(25): SEQ ID NO: 5129; WAN024DZM; Start 289; Stop 313
ttctgttacttcttctgcttcattg

SEQ ID NO: 400942 - DNA, 25 bp, Artificial
  probe
  misc_feature (1)..(25): SEQ ID NO: 5129; WAN024DZM; Start 291; Stop 315
ctgttacttcttctgcttcattgac

SEQ ID NO: 400943 - DNA, 25 bp, Artificial
  probe
  misc_feature (1)..(25): SEQ ID NO: 5129; WAN024DZM; Start 290; Stop 314
tctgttacttcttctgcttcattga

SEQ ID NO: 400944 - DNA, 25 bp, Artificial
  probe
  misc_feature (1)..(25): SEQ ID NO: 5129; WAN024DZM; Start 288; Stop 312
cttctgttacttcttctgcttcatt

SEQ ID NO: 400945 - DNA, 25 bp, Artificial
  probe
  misc_feature (1)..(25): SEQ ID NO: 5129; WAN024DZM; Start 285; Stop 309
caacttctgttacttcttctgcttc

SEQ ID NO: 400946 - DNA, 25 bp, Artificial
  probe
  misc_feature (1)..(25): SEQ ID NO: 5129; WAN024DZM; Start 286; Stop 310
aacttctgttacttcttctgcttca

SEQ ID NO: 400947 - DNA, 25 bp, Artificial
  probe
  misc_feature (1)..(25): SEQ ID NO: 5129; WAN024DZM; Start 284; Stop 308
tcaacttctgttacttcttctgctt

SEQ ID NO: 400948 - DNA, 25 bp, Artificial
  probe
  misc_feature (1)..(25): SEQ ID NO: 5129; WAN024DZM; Start 283; Stop 307
ttcaacttctgttacttcttctgct

SEQ ID NO: 400949 - DNA, 25 bp, Artificial
  probe
  misc_feature (1)..(25): SEQ ID NO: 5129; WAN024DZM; Start 292; Stop 316
tgttacttcttctgcttcattgaca

SEQ ID NO: 400950 - DNA, 25 bp, Artificial
  probe
  misc_feature (1)..(25): SEQ ID NO: 5129; WAN024DZM; Start 242; Stop 266
gttgtcacttcttcactagagtctg

SEQ ID NO: 400951 - DNA, 25 bp, Artificial
  probe
  misc_feature (1)..(25): SEQ ID NO: 5129; WAN024DZM; Start 241; Stop 265
agttgtcacttcttcactagagtct

SEQ ID NO: 400952 - DNA, 25 bp, Artificial
  probe
  misc_feature (1)..(25): SEQ ID NO: 5129; WAN024DZM; Start 240; Stop 264
cagttgtcacttcttcactagagtc

SEQ ID NO: 400953 - DNA, 25 bp, Artificial
  probe
  misc_feature (1)..(25): SEQ ID NO: 5129; WAN024DZM; Start 293; Stop 317
gttacttcttctgcttcattgacag

SEQ ID NO: 400954 - DNA, 25 bp, Artificial
  probe
  misc_feature (1)..(25): SEQ ID NO: 5129; WAN024DZM; Start 294; Stop 318
ttacttcttctgcttcattgacagt

SEQ ID NO: 400955 - DNA, 25 bp, Artificial
  probe
  misc_feature (1)..(25): SEQ ID NO: 5129; WAN024DZM; Start 295; Stop 319
tacttcttctgcttcattgacagtc

SEQ ID NO: 400956 - DNA, 25 bp, Artificial
  probe
  misc_feature (1)..(25): SEQ ID NO: 5129; WAN024DZM; Start 248; Stop 272
acttcttcactagagtctgcttgag

SEQ ID NO: 400957 - DNA, 25 bp, Artificial
  probe
  misc_feature (1)..(25): SEQ ID NO: 5129; WAN024DZM; Start 247; Stop 271
cacttcttcactagagtctgcttga

SEQ ID NO: 400958 - DNA, 25 bp, Artificial
  probe
  misc_feature (1)..(25): SEQ ID NO: 5129; WAN024DZM; Start 246; Stop 270
tcacttcttcactagagtctgcttg

SEQ ID NO: 400959 - DNA, 25 bp, Artificial
  probe
  misc_feature (1)..(25): SEQ ID NO: 5129; WAN024DZM; Start 245; Stop 269
gtcacttcttcactagagtctgctt

SEQ ID NO: 400960 - DNA, 25 bp, Artificial
  probe
  misc_feature (1)..(25): SEQ ID NO: 5129; WAN024DZM; Start 516; Stop 540
cttcttctgcttgagttgccaatac

SEQ ID NO: 400961 - DNA, 25 bp, Artificial
  probe
  misc_feature (1)..(25): SEQ ID NO: 5129; WAN024DZM; Start 429; Stop 453
caccatactgtacggtataacttgt

SEQ ID NO: 400962 - DNA, 25 bp, Artificial
  probe
  misc_feature (1)..(25): SEQ ID NO: 5129; WAN024DZM; Start 428; Stop 452
tcaccatactgtacggtataacttg

SEQ ID NO: 400963 - DNA, 25 bp, Artificial
  probe
  misc_feature (1)..(25): SEQ ID NO: 5129; WAN024DZM; Start 243; Stop 267
ttgtcacttcttcactagagtctgc

SEQ ID NO: 400964 - DNA, 25 bp, Artificial
  probe
  misc_feature (1)..(25): SEQ ID NO: 5129; WAN024DZM; Start 430; Stop 454
accatactgtacggtataacttgtt

SEQ ID NO: 400965 - DNA, 25 bp, Artificial
  probe
  misc_feature (1)..(25): SEQ ID NO: 5129; WAN024DZM; Start 249; Stop 273
cttcttcactagagtctgcttgagg

SEQ ID NO: 400966 - DNA, 25 bp, Artificial
  probe
  misc_feature (1)..(25): SEQ ID NO: 5129; WAN024DZM; Start 427; Stop 451
atcaccatactgtacggtataactt

SEQ ID NO: 400967 - DNA, 25 bp, Artificial
  probe
  misc_feature (1)..(25): SEQ ID NO: 5129; WAN024DZM; Start 517; Stop 541
ttcttctgcttgagttgccaatact

SEQ ID NO: 400968 - DNA, 25 bp, Artificial
  probe
  misc_feature (1)..(25): SEQ ID NO: 5129; WAN024DZM; Start 515; Stop 539
acttcttctgcttgagttgccaata

SEQ ID NO: 400969 - DNA, 25 bp, Artificial
  probe
  misc_feature (1)..(25): SEQ ID NO: 5129; WAN024DZM; Start 239; Stop 263
gcagttgtcacttcttcactagagt

SEQ ID NO: 400970 - DNA, 25 bp, Artificial
  probe
  misc_feature (1)..(25): SEQ ID NO: 5129; WAN024DZM; Start 282; Stop 306
tttcaacttctgttacttcttctgc

SEQ ID NO: 400971 - DNA, 25 bp, Artificial
  probe
  misc_feature (1)..(25): SEQ ID NO: 5129; WAN024DZM; Start 272; Stop 296
ggtgtttggatttcaacttctgtta

SEQ ID NO: 400972 - DNA, 25 bp, Artificial
  probe
  misc_feature (1)..(25): SEQ ID NO: 5129; WAN024DZM; Start 135; Stop 159
aagcaatcactgtctttgtaacttc

SEQ ID NO: 400973 - DNA, 25 bp, Artificial
  probe
  misc_feature (1)..(25): SEQ ID NO: 5130; WAN0249QN; Start 171; Stop 195
aagatgcgaacaaatcaattagaaa

SEQ ID NO: 400974 - DNA, 25 bp, Artificial
  probe
  misc_feature (1)..(25): SEQ ID NO: 5130; WAN0249QN; Start 165; Stop 189
tgaaataagatgcgaacaaatcaat

SEQ ID NO: 400975 - DNA, 25 bp, Artificial
  probe
  misc_feature (1)..(25): SEQ ID NO: 5130; WAN0249QN; Start 226; Stop 250
attcctgtgtactgttctaaattca

SEQ ID NO: 400976 - DNA, 25 bp, Artificial
  probe
  misc_feature (1)..(25): SEQ ID NO: 5130; WAN0249QN; Start 227; Stop 251
ttcctgtgtactgttctaaattcag

SEQ ID NO: 400977 - DNA, 25 bp, Artificial
  probe
  misc_feature (1)..(25): SEQ ID NO: 5130; WAN0249QN; Start 170; Stop 194
taagatgcgaacaaatcaattagaa

SEQ ID NO: 400978 - DNA, 25 bp, Artificial
  probe
  misc_feature (1)..(25): SEQ ID NO: 5130; WAN0249QN; Start 166; Stop 190
gaaataagatgcgaacaaatcaatt

SEQ ID NO: 400979 - DNA, 25 bp, Artificial
  probe
  misc_feature (1)..(25): SEQ ID NO: 5130; WAN0249QN; Start 169; Stop 193
ataagatgcgaacaaatcaattaga

SEQ ID NO: 400980 - DNA, 25 bp, Artificial
  probe
  misc_feature (1)..(25): SEQ ID NO: 5130; WAN0249QN; Start 221; Stop 245
ttagtattcctgtgtactgttctaa

SEQ ID NO: 400981 - DNA, 25 bp, Artificial
  probe
  misc_feature (1)..(25): SEQ ID NO: 5130; WAN0249QN; Start 77; Stop 101
cccacaataaaacgcatcatatcaa

SEQ ID NO: 400982 - DNA, 25 bp, Artificial
  probe
  misc_feature (1)..(25): SEQ ID NO: 5130; WAN0249QN; Start 75; Stop 99
ttcccacaataaaacgcatcatatc

SEQ ID NO: 400983 - DNA, 25 bp, Artificial
  probe
  misc_feature (1)..(25): SEQ ID NO: 5130; WAN0249QN; Start 80; Stop 104
acaataaaacgcatcatatcaaggt

SEQ ID NO: 400984 - DNA, 25 bp, Artificial
  probe
  misc_feature (1)..(25): SEQ ID NO: 5130; WAN0249QN; Start 74; Stop 98
attcccacaataaaacgcatcatat

SEQ ID NO: 400985 - DNA, 25 bp, Artificial
  probe
  misc_feature (1)..(25): SEQ ID NO: 5130; WAN0249QN; Start 79; Stop 103
cacaataaaacgcatcatatcaagg

SEQ ID NO: 400986 - DNA, 25 bp, Artificial
  probe
  misc_feature (1)..(25): SEQ ID NO: 5130; WAN0249QN; Start 78; Stop 102
ccacaataaaacgcatcatatcaag

SEQ ID NO: 400987 - DNA, 25 bp, Artificial
  probe
  misc_feature (1)..(25): SEQ ID NO: 5130; WAN0249QN; Start 76; Stop 100
tcccacaataaaacgcatcatatca

SEQ ID NO: 400988 - DNA, 25 bp, Artificial
  probe
  misc_feature (1)..(25): SEQ ID NO: 5130; WAN0249QN; Start 71; Stop 95
catattcccacaataaaacgcatca

SEQ ID NO: 400989 - DNA, 25 bp, Artificial
  probe
  misc_feature (1)..(25): SEQ ID NO: 5130; WAN0249QN; Start 70; Stop 94
acatattcccacaataaaacgcatc

SEQ ID NO: 400990 - DNA, 25 bp, Artificial
  probe
  misc_feature (1)..(25): SEQ ID NO: 5130; WAN0249QN; Start 168; Stop 192
aataagatgcgaacaaatcaattag

SEQ ID NO: 400991 - DNA, 25 bp, Artificial
  probe
  misc_feature (1)..(25): SEQ ID NO: 5130; WAN0249QN; Start 72; Stop 96
atattcccacaataaaacgcatcat

SEQ ID NO: 400992 - DNA, 25 bp, Artificial
  probe
  misc_feature (1)..(25): SEQ ID NO: 5130; WAN0249QN; Start 224; Stop 248
gtattcctgtgtactgttctaaatt

SEQ ID NO: 400993 - DNA, 25 bp, Artificial
  probe
  misc_feature (1)..(25): SEQ ID NO: 5130; WAN0249QN; Start 69; Stop 93
tacatattcccacaataaaacgcat

SEQ ID NO: 400994 - DNA, 25 bp, Artificial
  probe
  misc_feature (1)..(25): SEQ ID NO: 5130; WAN0249QN; Start 68; Stop 92
atacatattcccacaataaaacgca

SEQ ID NO: 400995 - DNA, 25 bp, Artificial
  probe
  misc_feature (1)..(25): SEQ ID NO: 5130; WAN0249QN; Start 73; Stop 97
tattcccacaataaaacgcatcata

SEQ ID NO: 400996 - DNA, 25 bp, Artificial
  probe
  misc_feature (1)..(25): SEQ ID NO: 5130; WAN0249QN; Start 225; Stop 249
tattcctgtgtactgttctaaattc

SEQ ID NO: 400997 - DNA, 25 bp, Artificial
  probe
  misc_feature (1)..(25): SEQ ID NO: 5130; WAN0249QN; Start 81; Stop 105
caataaaacgcatcatatcaaggtt

SEQ ID NO: 400998 - DNA, 25 bp, Artificial
  probe
  misc_feature (1)..(25): SEQ ID NO: 5130; WAN0249QN; Start 223; Stop 247
agtattcctgtgtactgttctaaat

SEQ ID NO: 400999 - DNA, 25 bp, Artificial
  probe
  misc_feature (1)..(25): SEQ ID NO: 5130; WAN0249QN; Start 67; Stop 91
aatacatattcccacaataaaacgc

SEQ ID NO: 401000 - DNA, 25 bp, Artificial
  probe
  misc_feature (1)..(25): SEQ ID NO: 5130; WAN0249QN; Start 167; Stop 191
aaataagatgcgaacaaatcaatta

SEQ ID NO: 401001 - DNA, 25 bp, Artificial
  probe
  misc_feature (1)..(25): SEQ ID NO: 5130; WAN0249QN; Start 172; Stop 196
agatgcgaacaaatcaattagaaaa

SEQ ID NO: 401002 - DNA, 25 bp, Artificial
  probe
  misc_feature (1)..(25): SEQ ID NO: 5130; WAN0249QN; Start 222; Stop 246
tagtattcctgtgtactgttctaaa

SEQ ID NO: 401003 - DNA, 25 bp, Artificial
  probe
  misc_feature (1)..(25): SEQ ID NO: 5130; WAN0249QN; Start 220; Stop 244
tttagtattcctgtgtactgttcta

SEQ ID NO: 401004 - DNA, 25 bp, Artificial
  probe
  misc_feature (1)..(25): SEQ ID NO: 5130; WAN0249QN; Start 173; Stop 197
gatgcgaacaaatcaattagaaaat

SEQ ID NO: 401005 - DNA, 25 bp, Artificial
  probe
  misc_feature (1)..(25): SEQ ID NO: 5130; WAN0249QN; Start 176; Stop 200
gcgaacaaatcaattagaaaattca

SEQ ID NO: 401006 - DNA, 25 bp, Artificial
  probe
  misc_feature (1)..(25): SEQ ID NO: 5131; WAN024CW9; Start 126; Stop 150
cagaaataccgtatgtgcgtttgat

SEQ ID NO: 401007 - DNA, 25 bp, Artificial
  probe
  misc_feature (1)..(25): SEQ ID NO: 5131; WAN024CW9; Start 127; Stop 151
agaaataccgtatgtgcgtttgatc

SEQ ID NO: 401008 - DNA, 25 bp, Artificial
  probe
  misc_feature (1)..(25): SEQ ID NO: 5131; WAN024CW9; Start 17; Stop 41
gccagaaggagtggaataagatttc

SEQ ID NO: 401009 - DNA, 25 bp, Artificial
  probe
  misc_feature (1)..(25): SEQ ID NO: 5131; WAN024CW9; Start 368; Stop 392
cgaaattctttcacacgattcatct

SEQ ID NO: 401010 - DNA, 25 bp, Artificial
  probe
  misc_feature (1)..(25): SEQ ID NO: 5131; WAN024CW9; Start 369; Stop 393
gaaattctttcacacgattcatctg

SEQ ID NO: 401011 - DNA, 25 bp, Artificial
  probe
  misc_feature (1)..(25): SEQ ID NO: 5131; WAN024CW9; Start 11; Stop 35
ttataggccagaaggagtggaataa

SEQ ID NO: 401012 - DNA, 25 bp, Artificial
  probe
  misc_feature (1)..(25): SEQ ID NO: 5131; WAN024CW9; Start 367; Stop 391
gcgaaattctttcacacgattcatc

SEQ ID NO: 401013 - DNA, 25 bp, Artificial
  probe
  misc_feature (1)..(25): SEQ ID NO: 5131; WAN024CW9; Start 12; Stop 36
tataggccagaaggagtggaataag

SEQ ID NO: 401014 - DNA, 25 bp, Artificial
  probe
  misc_feature (1)..(25): SEQ ID NO: 5131; WAN024CW9; Start 364; Stop 388
cttgcgaaattctttcacacgattc

SEQ ID NO: 401015 - DNA, 25 bp, Artificial
  probe
  misc_feature (1)..(25): SEQ ID NO: 5131; WAN024CW9; Start 41; Stop 65
ccgaaaatcatcagataaaagagga

SEQ ID NO: 401016 - DNA, 25 bp, Artificial
  probe
  misc_feature (1)..(25): SEQ ID NO: 5131; WAN024CW9; Start 40; Stop 64
tccgaaaatcatcagataaaagagg

SEQ ID NO: 401017 - DNA, 25 bp, Artificial
  probe
  misc_feature (1)..(25): SEQ ID NO: 5131; WAN024CW9; Start 366; Stop 390
tgcgaaattctttcacacgattcat

SEQ ID NO: 401018 - DNA, 25 bp, Artificial
  probe
  misc_feature (1)..(25): SEQ ID NO: 5131; WAN024CW9; Start 365; Stop 389
ttgcgaaattctttcacacgattca

SEQ ID NO: 401019 - DNA, 25 bp, Artificial
  probe
  misc_feature (1)..(25): SEQ ID NO: 5131; WAN024CW9; Start 125; Stop 149
ccagaaataccgtatgtgcgtttga

SEQ ID NO: 401020 - DNA, 25 bp, Artificial
  probe
  misc_feature (1)..(25): SEQ ID NO: 5131; WAN024CW9; Start 123; Stop 147
gaccagaaataccgtatgtgcgttt

SEQ ID NO: 401021 - DNA, 25 bp, Artificial
  probe
  misc_feature (1)..(25): SEQ ID NO: 5131; WAN024CW9; Start 272; Stop 296
gttggattgtacttgtcgttttcaa

SEQ ID NO: 401022 - DNA, 25 bp, Artificial
  probe
  misc_feature (1)..(25): SEQ ID NO: 5131; WAN024CW9; Start 1; Stop 25
ttgagggtatttataggccagaagg

SEQ ID NO: 401023 - DNA, 25 bp, Artificial
  probe
  misc_feature (1)..(25): SEQ ID NO: 5131; WAN024CW9; Start 124; Stop 148
accagaaataccgtatgtgcgtttg

SEQ ID NO: 401024 - DNA, 25 bp, Artificial
  probe
  misc_feature (1)..(25): SEQ ID NO: 5131; WAN024CW9; Start 3; Stop 27
gagggtatttataggccagaaggag

SEQ ID NO: 401025 - DNA, 25 bp, Artificial
  probe
  misc_feature (1)..(25): SEQ ID NO: 5131; WAN024CW9; Start 363; Stop 387
ccttgcgaaattctttcacacgatt

SEQ ID NO: 401026 - DNA, 25 bp, Artificial
  probe
  misc_feature (1)..(25): SEQ ID NO: 5131; WAN024CW9; Start 14; Stop 38
taggccagaaggagtggaataagat

SEQ ID NO: 401027 - DNA, 25 bp, Artificial
  probe
  misc_feature (1)..(25): SEQ ID NO: 5131; WAN024CW9; Start 13; Stop 37
ataggccagaaggagtggaataaga

SEQ ID NO: 401028 - DNA, 25 bp, Artificial
  probe
  misc_feature (1)..(25): SEQ ID NO: 5131; WAN024CW9; Start 5; Stop 29
gggtatttataggccagaaggagtg

SEQ ID NO: 401029 - DNA, 25 bp, Artificial
  probe
  misc_feature (1)..(25): SEQ ID NO: 5131; WAN024CW9; Start 4; Stop 28
agggtatttataggccagaaggagt

SEQ ID NO: 401030 - DNA, 25 bp, Artificial
  probe
  misc_feature (1)..(25): SEQ ID NO: 5131; WAN024CW9; Start 2; Stop 26
tgagggtatttataggccagaagga

SEQ ID NO: 401031 - DNA, 25 bp, Artificial
  probe
  misc_feature (1)..(25): SEQ ID NO: 5131; WAN024CW9; Start 39; Stop 63
ttccgaaaatcatcagataaaagag

SEQ ID NO: 401032 - DNA, 25 bp, Artificial
  probe
  misc_feature (1)..(25): SEQ ID NO: 5131; WAN024CW9; Start 10; Stop 34
tttataggccagaaggagtggaata

SEQ ID NO: 401033 - DNA, 25 bp, Artificial
  probe
  misc_feature (1)..(25): SEQ ID NO: 5131; WAN024CW9; Start 8; Stop 32
tatttataggccagaaggagtggaa

SEQ ID NO: 401034 - DNA, 25 bp, Artificial
  probe
  misc_feature (1)..(25): SEQ ID NO: 5131; WAN024CW9; Start 129; Stop 153
aaataccgtatgtgcgtttgatcag

SEQ ID NO: 401035 - DNA, 25 bp, Artificial
  probe
  misc_feature (1)..(25): SEQ ID NO: 5131; WAN024CW9; Start 128; Stop 152
gaaataccgtatgtgcgtttgatca

SEQ ID NO: 401036 - DNA, 25 bp, Artificial
  probe
  misc_feature (1)..(25): SEQ ID NO: 5131; WAN024CW9; Start 110; Stop 134
tattcgtcaaggggaccagaaatac

SEQ ID NO: 401037 - DNA, 25 bp, Artificial
  probe
  misc_feature (1)..(25): SEQ ID NO: 5131; WAN024CW9; Start 109; Stop 133
gtattcgtcaaggggaccagaaata

SEQ ID NO: 401038 - DNA, 25 bp, Artificial
  probe
  misc_feature (1)..(25): SEQ ID NO: 5131; WAN024CW9; Start 9; Stop 33
atttataggccagaaggagtggaat

SEQ ID NO: 401039 - DNA, 25 bp, Artificial
  probe
  misc_feature (1)..(25): SEQ ID NO: 5132; WAN024ETH; Start 25; Stop 49
agttcaatcaagtcatcatctctgt

SEQ ID NO: 401040 - DNA, 25 bp, Artificial
  probe
  misc_feature (1)..(25): SEQ ID NO: 5132; WAN024ETH; Start 22; Stop 46
ccaagttcaatcaagtcatcatctc

SEQ ID NO: 401041 - DNA, 25 bp, Artificial
  probe
  misc_feature (1)..(25): SEQ ID NO: 5132; WAN024ETH; Start 27; Stop 51
ttcaatcaagtcatcatctctgtct

SEQ ID NO: 401042 - DNA, 25 bp, Artificial
  probe
  misc_feature (1)..(25): SEQ ID NO: 5132; WAN024ETH; Start 26; Stop 50
gttcaatcaagtcatcatctctgtc

SEQ ID NO: 401043 - DNA, 25 bp, Artificial
  probe
  misc_feature (1)..(25): SEQ ID NO: 5132; WAN024ETH; Start 34; Stop 58
aagtcatcatctctgtctgtcaatc

SEQ ID NO: 401044 - DNA, 25 bp, Artificial
  probe
  misc_feature (1)..(25): SEQ ID NO: 5132; WAN024ETH; Start 30; Stop 54
aatcaagtcatcatctctgtctgtc

SEQ ID NO: 401045 - DNA, 25 bp, Artificial
  probe
  misc_feature (1)..(25): SEQ ID NO: 5132; WAN024ETH; Start 28; Stop 52
tcaatcaagtcatcatctctgtctg

SEQ ID NO: 401046 - DNA, 25 bp, Artificial
  probe
  misc_feature (1)..(25): SEQ ID NO: 5132; WAN024ETH; Start 21; Stop 45
accaagttcaatcaagtcatcatct

SEQ ID NO: 401047 - DNA, 25 bp, Artificial
  probe
  misc_feature (1)..(25): SEQ ID NO: 5132; WAN024ETH; Start 33; Stop 57
caagtcatcatctctgtctgtcaat

SEQ ID NO: 401048 - DNA, 25 bp, Artificial
  probe
  misc_feature (1)..(25): SEQ ID NO: 5132; WAN024ETH; Start 29; Stop 53
caatcaagtcatcatctctgtctgt

SEQ ID NO: 401049 - DNA, 25 bp, Artificial
  probe
  misc_feature (1)..(25): SEQ ID NO: 5132; WAN024ETH; Start 24; Stop 48
aagttcaatcaagtcatcatctctg

SEQ ID NO: 401050 - DNA, 25 bp, Artificial
  probe
  misc_feature (1)..(25): SEQ ID NO: 5132; WAN024ETH; Start 23; Stop 47
caagttcaatcaagtcatcatctct

SEQ ID NO: 401051 - DNA, 25 bp, Artificial
  probe
  misc_feature (1)..(25): SEQ ID NO: 5132; WAN024ETH; Start 20; Stop 44
taccaagttcaatcaagtcatcatc

SEQ ID NO: 401052 - DNA, 25 bp, Artificial
  probe
  misc_feature (1)..(25): SEQ ID NO: 5132; WAN024ETH; Start 18; Stop 42
cttaccaagttcaatcaagtcatca

SEQ ID NO: 401053 - DNA, 25 bp, Artificial
  probe
  misc_feature (1)..(25): SEQ ID NO: 5132; WAN024ETH; Start 31; Stop 55
atcaagtcatcatctctgtctgtca

SEQ ID NO: 401054 - DNA, 25 bp, Artificial
  probe
  misc_feature (1)..(25): SEQ ID NO: 5132; WAN024ETH; Start 19; Stop 43
ttaccaagttcaatcaagtcatcat

SEQ ID NO: 401055 - DNA, 25 bp, Artificial
  probe
  misc_feature (1)..(25): SEQ ID NO: 5132; WAN024ETH; Start 32; Stop 56
tcaagtcatcatctctgtctgtcaa

SEQ ID NO: 401056 - DNA, 25 bp, Artificial
  probe
  misc_feature (1)..(25): SEQ ID NO: 5132; WAN024ETH; Start 37; Stop 61
tcatcatctctgtctgtcaatcctg

SEQ ID NO: 401057 - DNA, 25 bp, Artificial
  probe
  misc_feature (1)..(25): SEQ ID NO: 5132; WAN024ETH; Start 36; Stop 60
gtcatcatctctgtctgtcaatcct

SEQ ID NO: 401058 - DNA, 25 bp, Artificial
  probe
  misc_feature (1)..(25): SEQ ID NO: 5132; WAN024ETH; Start 35; Stop 59
agtcatcatctctgtctgtcaatcc

SEQ ID NO: 401059 - DNA, 25 bp, Artificial
  probe
  misc_feature (1)..(25): SEQ ID NO: 5132; WAN024ETH; Start 44; Stop 68
ctctgtctgtcaatcctggaactag

SEQ ID NO: 401060 - DNA, 25 bp, Artificial
  probe
  misc_feature (1)..(25): SEQ ID NO: 5132; WAN024ETH; Start 43; Stop 67
tctctgtctgtcaatcctggaacta

SEQ ID NO: 401061 - DNA, 25 bp, Artificial
  probe
  misc_feature (1)..(25): SEQ ID NO: 5132; WAN024ETH; Start 152; Stop 176
caatcttgtgctgttcttcgttgat

SEQ ID NO: 401062 - DNA, 25 bp, Artificial
  probe
  misc_feature (1)..(25): SEQ ID NO: 5132; WAN024ETH; Start 145; Stop 169
ctagtgacaatcttgtgctgttctt

SEQ ID NO: 401063 - DNA, 25 bp, Artificial
  probe
  misc_feature (1)..(25): SEQ ID NO: 5132; WAN024ETH; Start 38; Stop 62
catcatctctgtctgtcaatcctgg

SEQ ID NO: 401064 - DNA, 25 bp, Artificial
  probe
  misc_feature (1)..(25): SEQ ID NO: 5132; WAN024ETH; Start 146; Stop 170
tagtgacaatcttgtgctgttcttc

SEQ ID NO: 401065 - DNA, 25 bp, Artificial
  probe
  misc_feature (1)..(25): SEQ ID NO: 5132; WAN024ETH; Start 312; Stop 336
gaagagagcaatcaggaaatcaatc

SEQ ID NO: 401066 - DNA, 25 bp, Artificial
  probe
  misc_feature (1)..(25): SEQ ID NO: 5132; WAN024ETH; Start 280; Stop 304
gtacagtggattccttgttccttag

SEQ ID NO: 401067 - DNA, 25 bp, Artificial
  probe
  misc_feature (1)..(25): SEQ ID NO: 5132; WAN024ETH; Start 162; Stop 186
ctgttcttcgttgatttccttgata

SEQ ID NO: 401068 - DNA, 25 bp, Artificial
  probe
  misc_feature (1)..(25): SEQ ID NO: 5132; WAN024ETH; Start 39; Stop 63
atcatctctgtctgtcaatcctgga

SEQ ID NO: 401069 - DNA, 25 bp, Artificial
  probe
  misc_feature (1)..(25): SEQ ID NO: 5132; WAN024ETH; Start 358; Stop 382
ctgactgtaatcccacccttatttc

SEQ ID NO: 401070 - DNA, 25 bp, Artificial
  probe
  misc_feature (1)..(25): SEQ ID NO: 5132; WAN024ETH; Start 41; Stop 65
catctctgtctgtcaatcctggaac

SEQ ID NO: 401071 - DNA, 25 bp, Artificial
  probe
  misc_feature (1)..(25): SEQ ID NO: 5132; WAN024ETH; Start 313; Stop 337
aagagagcaatcaggaaatcaatct

SEQ ID NO: 401072 - DNA, 25 bp, Artificial
  probe
  misc_feature (1)..(25): SEQ ID NO: 5133; WAN024G4H; Start 61; Stop 85
tcatctggattgagagctaacatag

SEQ ID NO: 401073 - DNA, 25 bp, Artificial
  probe
  misc_feature (1)..(25): SEQ ID NO: 5133; WAN024G4H; Start 59; Stop 83
gatcatctggattgagagctaacat

SEQ ID NO: 401074 - DNA, 25 bp, Artificial
  probe
  misc_feature (1)..(25): SEQ ID NO: 5133; WAN024G4H; Start 132; Stop 156
tggcactttccctttctttactaat

SEQ ID NO: 401075 - DNA, 25 bp, Artificial
  probe
  misc_feature (1)..(25): SEQ ID NO: 5133; WAN024G4H; Start 231; Stop 255
agttgacatcttcttgcctttctaa

SEQ ID NO: 401076 - DNA, 25 bp, Artificial
  probe
  misc_feature (1)..(25): SEQ ID NO: 5133; WAN024G4H; Start 60; Stop 84
atcatctggattgagagctaacata

SEQ ID NO: 401077 - DNA, 25 bp, Artificial
  probe
  misc_feature (1)..(25): SEQ ID NO: 5133; WAN024G4H; Start 131; Stop 155
ctggcactttccctttctttactaa

SEQ ID NO: 401078 - DNA, 25 bp, Artificial
  probe
  misc_feature (1)..(25): SEQ ID NO: 5133; WAN024G4H; Start 58; Stop 82
agatcatctggattgagagctaaca

SEQ ID NO: 401079 - DNA, 25 bp, Artificial
  probe
  misc_feature (1)..(25): SEQ ID NO: 5133; WAN024G4H; Start 225; Stop 249
atctaaagttgacatcttcttgcct

SEQ ID NO: 401080 - DNA, 25 bp, Artificial
  probe
  misc_feature (1)..(25): SEQ ID NO: 5133; WAN024G4H; Start 230; Stop 254
aagttgacatcttcttgcctttcta

SEQ ID NO: 401081 - DNA, 25 bp, Artificial
  probe
  misc_feature (1)..(25): SEQ ID NO: 5133; WAN024G4H; Start 226; Stop 250
tctaaagttgacatcttcttgcctt

SEQ ID NO: 401082 - DNA, 25 bp, Artificial
  probe
  misc_feature (1)..(25): SEQ ID NO: 5133; WAN024G4H; Start 133; Stop 157
ggcactttccctttctttactaatt

SEQ ID NO: 401083 - DNA, 25 bp, Artificial
  probe
  misc_feature (1)..(25): SEQ ID NO: 5133; WAN024G4H; Start 224; Stop 248
tatctaaagttgacatcttcttgcc

SEQ ID NO: 401084 - DNA, 25 bp, Artificial
  probe
  misc_feature (1)..(25): SEQ ID NO: 5133; WAN024G4H; Start 192; Stop 216
catcttacggaacatttctagcaaa

SEQ ID NO: 401085 - DNA, 25 bp, Artificial
  probe
  misc_feature (1)..(25): SEQ ID NO: 5133; WAN024G4H; Start 137; Stop 161
ctttccctttctttactaattgtgc

SEQ ID NO: 401086 - DNA, 25 bp, Artificial
  probe
  misc_feature (1)..(25): SEQ ID NO: 5133; WAN024G4H; Start 134; Stop 158
gcactttccctttctttactaattg

SEQ ID NO: 401087 - DNA, 25 bp, Artificial
  probe
  misc_feature (1)..(25): SEQ ID NO: 5133; WAN024G4H; Start 191; Stop 215
ccatcttacggaacatttctagcaa

SEQ ID NO: 401088 - DNA, 25 bp, Artificial
  probe
  misc_feature (1)..(25): SEQ ID NO: 5133; WAN024G4H; Start 42; Stop 66
gtggtttgaggtaatcagatcatct

SEQ ID NO: 401089 - DNA, 25 bp, Artificial
  probe
  misc_feature (1)..(25): SEQ ID NO: 5133; WAN024G4H; Start 127; Stop 151
attcctggcactttccctttcttta

SEQ ID NO: 401090 - DNA, 25 bp, Artificial
  probe
  misc_feature (1)..(25): SEQ ID NO: 5133; WAN024G4H; Start 41; Stop 65
ggtggtttgaggtaatcagatcatc

SEQ ID NO: 401091 - DNA, 25 bp, Artificial
  probe
  misc_feature (1)..(25): SEQ ID NO: 5133; WAN024G4H; Start 130; Stop 154
cctggcactttccctttctttacta

SEQ ID NO: 401092 - DNA, 25 bp, Artificial
  probe
  misc_feature (1)..(25): SEQ ID NO: 5133; WAN024G4H; Start 1; Stop 25
ttgaggtcaatccctttagcaatag

SEQ ID NO: 401093 - DNA, 25 bp, Artificial
  probe
  misc_feature (1)..(25): SEQ ID NO: 5133; WAN024G4H; Start 136; Stop 160
actttccctttctttactaattgtg

SEQ ID NO: 401094 - DNA, 25 bp, Artificial
  probe
  misc_feature (1)..(25): SEQ ID NO: 5133; WAN024G4H; Start 135; Stop 159
cactttccctttctttactaattgt

SEQ ID NO: 401095 - DNA, 25 bp, Artificial
  probe
  misc_feature (1)..(25): SEQ ID NO: 5133; WAN024G4H; Start 223; Stop 247
ttatctaaagttgacatcttcttgc

SEQ ID NO: 401096 - DNA, 25 bp, Artificial
  probe
  misc_feature (1)..(25): SEQ ID NO: 5133; WAN024G4H; Start 139; Stop 163
ttccctttctttactaattgtgcaa

SEQ ID NO: 401097 - DNA, 25 bp, Artificial
  probe
  misc_feature (1)..(25): SEQ ID NO: 5133; WAN024G4H; Start 138; Stop 162
tttccctttctttactaattgtgca

SEQ ID NO: 401098 - DNA, 25 bp, Artificial
  probe
  misc_feature (1)..(25): SEQ ID NO: 5133; WAN024G4H; Start 140; Stop 164
tccctttctttactaattgtgcaat

SEQ ID NO: 401099 - DNA, 25 bp, Artificial
  probe
  misc_feature (1)..(25): SEQ ID NO: 5133; WAN024G4H; Start 228; Stop 252
taaagttgacatcttcttgcctttc

SEQ ID NO: 401100 - DNA, 25 bp, Artificial
  probe
  misc_feature (1)..(25): SEQ ID NO: 5133; WAN024G4H; Start 227; Stop 251
ctaaagttgacatcttcttgccttt

SEQ ID NO: 401101 - DNA, 25 bp, Artificial
  probe
  misc_feature (1)..(25): SEQ ID NO: 5133; WAN024G4H; Start 190; Stop 214
tccatcttacggaacatttctagca

SEQ ID NO: 401102 - DNA, 25 bp, Artificial
  probe
  misc_feature (1)..(25): SEQ ID NO: 5133; WAN024G4H; Start 128; Stop 152
ttcctggcactttccctttctttac

SEQ ID NO: 401103 - DNA, 25 bp, Artificial
  probe
  misc_feature (1)..(25): SEQ ID NO: 5133; WAN024G4H; Start 229; Stop 253
aaagttgacatcttcttgcctttct

SEQ ID NO: 401104 - DNA, 25 bp, Artificial
  probe
  misc_feature (1)..(25): SEQ ID NO: 5133; WAN024G4H; Start 40; Stop 64
cggtggtttgaggtaatcagatcat

SEQ ID NO: 401105 - DNA, 25 bp, Artificial
  probe
  misc_feature (1)..(25): SEQ ID NO: 5134; WAN024GEW; Start 15; Stop 39
tttccaaatctgtctgctcttcatt

SEQ ID NO: 401106 - DNA, 25 bp, Artificial
  probe
  misc_feature (1)..(25): SEQ ID NO: 5134; WAN024GEW; Start 14; Stop 38
atttccaaatctgtctgctcttcat

SEQ ID NO: 401107 - DNA, 25 bp, Artificial
  probe
  misc_feature (1)..(25): SEQ ID NO: 5134; WAN024GEW; Start 187; Stop 211
ccaaacttcgttaatctcatccaaa

SEQ ID NO: 401108 - DNA, 25 bp, Artificial
  probe
  misc_feature (1)..(25): SEQ ID NO: 5134; WAN024GEW; Start 179; Stop 203
tcaaagagccaaacttcgttaatct

SEQ ID NO: 401109 - DNA, 25 bp, Artificial
  probe
  misc_feature (1)..(25): SEQ ID NO: 5134; WAN024GEW; Start 178; Stop 202
gtcaaagagccaaacttcgttaatc

SEQ ID NO: 401110 - DNA, 25 bp, Artificial
  probe
  misc_feature (1)..(25): SEQ ID NO: 5134; WAN024GEW; Start 182; Stop 206
aagagccaaacttcgttaatctcat

SEQ ID NO: 401111 - DNA, 25 bp, Artificial
  probe
  misc_feature (1)..(25): SEQ ID NO: 5134; WAN024GEW; Start 180; Stop 204
caaagagccaaacttcgttaatctc

SEQ ID NO: 401112 - DNA, 25 bp, Artificial
  probe
  misc_feature (1)..(25): SEQ ID NO: 5134; WAN024GEW; Start 181; Stop 205
aaagagccaaacttcgttaatctca

SEQ ID NO: 401113 - DNA, 25 bp, Artificial
  probe
  misc_feature (1)..(25): SEQ ID NO: 5134; WAN024GEW; Start 177; Stop 201
agtcaaagagccaaacttcgttaat

SEQ ID NO: 401114 - DNA, 25 bp, Artificial
  probe
  misc_feature (1)..(25): SEQ ID NO: 5134; WAN024GEW; Start 16; Stop 40
ttccaaatctgtctgctcttcattg

SEQ ID NO: 401115 - DNA, 25 bp, Artificial
  probe
  misc_feature (1)..(25): SEQ ID NO: 5134; WAN024GEW; Start 183; Stop 207
agagccaaacttcgttaatctcatc

SEQ ID NO: 401116 - DNA, 25 bp, Artificial
  probe
  misc_feature (1)..(25): SEQ ID NO: 5134; WAN024GEW; Start 186; Stop 210
gccaaacttcgttaatctcatccaa

SEQ ID NO: 401117 - DNA, 25 bp, Artificial
  probe
  misc_feature (1)..(25): SEQ ID NO: 5134; WAN024GEW; Start 176; Stop 200
cagtcaaagagccaaacttcgttaa

SEQ ID NO: 401118 - DNA, 25 bp, Artificial
  probe
  misc_feature (1)..(25): SEQ ID NO: 5134; WAN024GEW; Start 184; Stop 208
gagccaaacttcgttaatctcatcc

SEQ ID NO: 401119 - DNA, 25 bp, Artificial
  probe
  misc_feature (1)..(25): SEQ ID NO: 5134; WAN024GEW; Start 185; Stop 209
agccaaacttcgttaatctcatcca

SEQ ID NO: 401120 - DNA, 25 bp, Artificial
  probe
  misc_feature (1)..(25): SEQ ID NO: 5134; WAN024GEW; Start 175; Stop 199
acagtcaaagagccaaacttcgtta

SEQ ID NO: 401121 - DNA, 25 bp, Artificial
  probe
  misc_feature (1)..(25): SEQ ID NO: 5134; WAN024GEW; Start 136; Stop 160
aattgtggtttccagaatgcgattt

SEQ ID NO: 401122 - DNA, 25 bp, Artificial
  probe
  misc_feature (1)..(25): SEQ ID NO: 5134; WAN024GEW; Start 13; Stop 37
gatttccaaatctgtctgctcttca

SEQ ID NO: 401123 - DNA, 25 bp, Artificial
  probe
  misc_feature (1)..(25): SEQ ID NO: 5134; WAN024GEW; Start 197; Stop 221
ttaatctcatccaaaagtttcaggg

SEQ ID NO: 401124 - DNA, 25 bp, Artificial
  probe
  misc_feature (1)..(25): SEQ ID NO: 5134; WAN024GEW; Start 194; Stop 218
tcgttaatctcatccaaaagtttca

SEQ ID NO: 401125 - DNA, 25 bp, Artificial
  probe
  misc_feature (1)..(25): SEQ ID NO: 5134; WAN024GEW; Start 198; Stop 222
taatctcatccaaaagtttcagggc

SEQ ID NO: 401126 - DNA, 25 bp, Artificial
  probe
  misc_feature (1)..(25): SEQ ID NO: 5134; WAN024GEW; Start 195; Stop 219
cgttaatctcatccaaaagtttcag

SEQ ID NO: 401127 - DNA, 25 bp, Artificial
  probe
  misc_feature (1)..(25): SEQ ID NO: 5134; WAN024GEW; Start 99; Stop 123
gatgggtaataaagattttgctgac

SEQ ID NO: 401128 - DNA, 25 bp, Artificial
  probe
  misc_feature (1)..(25): SEQ ID NO: 5134; WAN024GEW; Start 98; Stop 122
agatgggtaataaagattttgctga

SEQ ID NO: 401129 - DNA, 25 bp, Artificial
  probe
  misc_feature (1)..(25): SEQ ID NO: 5134; WAN024GEW; Start 135; Stop 159
gaattgtggtttccagaatgcgatt

SEQ ID NO: 401130 - DNA, 25 bp, Artificial
  probe
  misc_feature (1)..(25): SEQ ID NO: 5134; WAN024GEW; Start 196; Stop 220
gttaatctcatccaaaagtttcagg

SEQ ID NO: 401131 - DNA, 25 bp, Artificial
  probe
  misc_feature (1)..(25): SEQ ID NO: 5134; WAN024GEW; Start 188; Stop 212
caaacttcgttaatctcatccaaaa

SEQ ID NO: 401132 - DNA, 25 bp, Artificial
  probe
  misc_feature (1)..(25): SEQ ID NO: 5134; WAN024GEW; Start 193; Stop 217
ttcgttaatctcatccaaaagtttc

SEQ ID NO: 401133 - DNA, 25 bp, Artificial
  probe
  misc_feature (1)..(25): SEQ ID NO: 5134; WAN024GEW; Start 192; Stop 216
cttcgttaatctcatccaaaagttt

SEQ ID NO: 401134 - DNA, 25 bp, Artificial
  probe
  misc_feature (1)..(25): SEQ ID NO: 5134; WAN024GEW; Start 57; Stop 81
tagaaaggaaacctggcaaaccaaa

SEQ ID NO: 401135 - DNA, 25 bp, Artificial
  probe
  misc_feature (1)..(25): SEQ ID NO: 5134; WAN024GEW; Start 189; Stop 213
aaacttcgttaatctcatccaaaag

SEQ ID NO: 401136 - DNA, 25 bp, Artificial
  probe
  misc_feature (1)..(25): SEQ ID NO: 5134; WAN024GEW; Start 105; Stop 129
taataaagattttgctgaccttacg

SEQ ID NO: 401137 - DNA, 25 bp, Artificial
  probe
  misc_feature (1)..(25): SEQ ID NO: 5134; WAN024GEW; Start 97; Stop 121
cagatgggtaataaagattttgctg

SEQ ID NO: 401138 - DNA, 25 bp, Artificial
  probe
  misc_feature (1)..(25): SEQ ID NO: 5135; WAN024GNU; Start 101; Stop 125
aaggtcatcttaatcaagccaactt

SEQ ID NO: 401139 - DNA, 25 bp, Artificial
  probe
  misc_feature (1)..(25): SEQ ID NO: 5135; WAN024GNU; Start 93; Stop 117
tctcttccaaggtcatcttaatcaa

SEQ ID NO: 401140 - DNA, 25 bp, Artificial
  probe
  misc_feature (1)..(25): SEQ ID NO: 5135; WAN024GNU; Start 92; Stop 116
ttctcttccaaggtcatcttaatca

SEQ ID NO: 401141 - DNA, 25 bp, Artificial
  probe
  misc_feature (1)..(25): SEQ ID NO: 5135; WAN024GNU; Start 95; Stop 119
tcttccaaggtcatcttaatcaagc

SEQ ID NO: 401142 - DNA, 25 bp, Artificial
  probe
  misc_feature (1)..(25): SEQ ID NO: 5135; WAN024GNU; Start 94; Stop 118
ctcttccaaggtcatcttaatcaag

SEQ ID NO: 401143 - DNA, 25 bp, Artificial
  probe
  misc_feature (1)..(25): SEQ ID NO: 5135; WAN024GNU; Start 173; Stop 197
tgaccataactgagaaccacgatat

SEQ ID NO: 401144 - DNA, 25 bp, Artificial
  probe
  misc_feature (1)..(25): SEQ ID NO: 5135; WAN024GNU; Start 100; Stop 124
caaggtcatcttaatcaagccaact

SEQ ID NO: 401145 - DNA, 25 bp, Artificial
  probe
  misc_feature (1)..(25): SEQ ID NO: 5135; WAN024GNU; Start 96; Stop 120
cttccaaggtcatcttaatcaagcc

SEQ ID NO: 401146 - DNA, 25 bp, Artificial
  probe
  misc_feature (1)..(25): SEQ ID NO: 5135; WAN024GNU; Start 172; Stop 196
ctgaccataactgagaaccacgata

SEQ ID NO: 401147 - DNA, 25 bp, Artificial
  probe
  misc_feature (1)..(25): SEQ ID NO: 5135; WAN024GNU; Start 99; Stop 123
ccaaggtcatcttaatcaagccaac

SEQ ID NO: 401148 - DNA, 25 bp, Artificial
  probe
  misc_feature (1)..(25): SEQ ID NO: 5135; WAN024GNU; Start 98; Stop 122
tccaaggtcatcttaatcaagccaa

SEQ ID NO: 401149 - DNA, 25 bp, Artificial
  probe
  misc_feature (1)..(25): SEQ ID NO: 5135; WAN024GNU; Start 97; Stop 121
ttccaaggtcatcttaatcaagcca

SEQ ID NO: 401150 - DNA, 25 bp, Artificial
  probe
  misc_feature (1)..(25): SEQ ID NO: 5135; WAN024GNU; Start 88; Stop 112
ctctttctcttccaaggtcatctta

SEQ ID NO: 401151 - DNA, 25 bp, Artificial
  probe
  misc_feature (1)..(25): SEQ ID NO: 5135; WAN024GNU; Start 174; Stop 198
gaccataactgagaaccacgatatc

SEQ ID NO: 401152 - DNA, 25 bp, Artificial
  probe
  misc_feature (1)..(25): SEQ ID NO: 5135; WAN024GNU; Start 85; Stop 109
aaactctttctcttccaaggtcatc

SEQ ID NO: 401153 - DNA, 25 bp, Artificial
  probe
  misc_feature (1)..(25): SEQ ID NO: 5135; WAN024GNU; Start 82; Stop 106
atcaaactctttctcttccaaggtc

SEQ ID NO: 401154 - DNA, 25 bp, Artificial
  probe
  misc_feature (1)..(25): SEQ ID NO: 5135; WAN024GNU; Start 89; Stop 113
tctttctcttccaaggtcatcttaa

SEQ ID NO: 401155 - DNA, 25 bp, Artificial
  probe
  misc_feature (1)..(25): SEQ ID NO: 5135; WAN024GNU; Start 84; Stop 108
caaactctttctcttccaaggtcat

SEQ ID NO: 401156 - DNA, 25 bp, Artificial
  probe
  misc_feature (1)..(25): SEQ ID NO: 5135; WAN024GNU; Start 348; Stop 372
tgagaatctggtcactttcacttag

SEQ ID NO: 401157 - DNA, 25 bp, Artificial
  probe
  misc_feature (1)..(25): SEQ ID NO: 5135; WAN024GNU; Start 347; Stop 371
ttgagaatctggtcactttcactta

SEQ ID NO: 401158 - DNA, 25 bp, Artificial
  probe
  misc_feature (1)..(25): SEQ ID NO: 5135; WAN024GNU; Start 346; Stop 370
tttgagaatctggtcactttcactt

SEQ ID NO: 401159 - DNA, 25 bp, Artificial
  probe
  misc_feature (1)..(25): SEQ ID NO: 5135; WAN024GNU; Start 176; Stop 200
ccataactgagaaccacgatatcat

SEQ ID NO: 401160 - DNA, 25 bp, Artificial
  probe
  misc_feature (1)..(25): SEQ ID NO: 5135; WAN024GNU; Start 87; Stop 111
actctttctcttccaaggtcatctt

SEQ ID NO: 401161 - DNA, 25 bp, Artificial
  probe
  misc_feature (1)..(25): SEQ ID NO: 5135; WAN024GNU; Start 86; Stop 110
aactctttctcttccaaggtcatct

SEQ ID NO: 401162 - DNA, 25 bp, Artificial
  probe
  misc_feature (1)..(25): SEQ ID NO: 5135; WAN024GNU; Start 322; Stop 346
gagttgggatttactgtggagattt

SEQ ID NO: 401163 - DNA, 25 bp, Artificial
  probe
  misc_feature (1)..(25): SEQ ID NO: 5135; WAN024GNU; Start 177; Stop 201
cataactgagaaccacgatatcatc

SEQ ID NO: 401164 - DNA, 25 bp, Artificial
  probe
  misc_feature (1)..(25): SEQ ID NO: 5135; WAN024GNU; Start 178; Stop 202
ataactgagaaccacgatatcatct

SEQ ID NO: 401165 - DNA, 25 bp, Artificial
  probe
  misc_feature (1)..(25): SEQ ID NO: 5135; WAN024GNU; Start 91; Stop 115
tttctcttccaaggtcatcttaatc

SEQ ID NO: 401166 - DNA, 25 bp, Artificial
  probe
  misc_feature (1)..(25): SEQ ID NO: 5135; WAN024GNU; Start 90; Stop 114
ctttctcttccaaggtcatcttaat

SEQ ID NO: 401167 - DNA, 25 bp, Artificial
  probe
  misc_feature (1)..(25): SEQ ID NO: 5135; WAN024GNU; Start 81; Stop 105
gatcaaactctttctcttccaaggt

SEQ ID NO: 401168 - DNA, 25 bp, Artificial
  probe
  misc_feature (1)..(25): SEQ ID NO: 5135; WAN024GNU; Start 80; Stop 104
agatcaaactctttctcttccaagg

SEQ ID NO: 401169 - DNA, 25 bp, Artificial
  probe
  misc_feature (1)..(25): SEQ ID NO: 5135; WAN024GNU; Start 83; Stop 107
tcaaactctttctcttccaaggtca

SEQ ID NO: 401170 - DNA, 25 bp, Artificial
  probe
  misc_feature (1)..(25): SEQ ID NO: 5135; WAN024GNU; Start 15; Stop 39
cagaagttcgtttcacaacattgac

SEQ ID NO: 401171 - DNA, 25 bp, Artificial
  probe
  misc_feature (1)..(25): SEQ ID NO: 5136; WAN024D4G; Start 181; Stop 205
ttagagagtattccgagagacaagg

SEQ ID NO: 401172 - DNA, 25 bp, Artificial
  probe
  misc_feature (1)..(25): SEQ ID NO: 5136; WAN024D4G; Start 492; Stop 516
tgaccacaagaaggagaagatacat

SEQ ID NO: 401173 - DNA, 25 bp, Artificial
  probe
  misc_feature (1)..(25): SEQ ID NO: 5136; WAN024D4G; Start 1436; Stop 1460
tgactagaattggagaactaagacc

SEQ ID NO: 401174 - DNA, 25 bp, Artificial
  probe
  misc_feature (1)..(25): SEQ ID NO: 5136; WAN024D4G; Start 491; Stop 515
ttgaccacaagaaggagaagataca

SEQ ID NO: 401175 - DNA, 25 bp, Artificial
  probe
  misc_feature (1)..(25): SEQ ID NO: 5136; WAN024D4G; Start 113; Stop 137
tcattcatggagatgtcttatcacc

SEQ ID NO: 401176 - DNA, 25 bp, Artificial
  probe
  misc_feature (1)..(25): SEQ ID NO: 5136; WAN024D4G; Start 108; Stop 132
acgaatcattcatggagatgtctta

SEQ ID NO: 401177 - DNA, 25 bp, Artificial
  probe
  misc_feature (1)..(25): SEQ ID NO: 5136; WAN024D4G; Start 493; Stop 517
gaccacaagaaggagaagatacatg

SEQ ID NO: 401178 - DNA, 25 bp, Artificial
  probe
  misc_feature (1)..(25): SEQ ID NO: 5136; WAN024D4G; Start 107; Stop 131
aacgaatcattcatggagatgtctt

SEQ ID NO: 401179 - DNA, 25 bp, Artificial
  probe
  misc_feature (1)..(25): SEQ ID NO: 5136; WAN024D4G; Start 106; Stop 130
gaacgaatcattcatggagatgtct

SEQ ID NO: 401180 - DNA, 25 bp, Artificial
  probe
  misc_feature (1)..(25): SEQ ID NO: 5136; WAN024D4G; Start 109; Stop 133
cgaatcattcatggagatgtcttat

SEQ ID NO: 401181 - DNA, 25 bp, Artificial
  probe
  misc_feature (1)..(25): SEQ ID NO: 5136; WAN024D4G; Start 103; Stop 127
atggaacgaatcattcatggagatg

SEQ ID NO: 401182 - DNA, 25 bp, Artificial
  probe
  misc_feature (1)..(25): SEQ ID NO: 5136; WAN024D4G; Start 112; Stop 136
atcattcatggagatgtcttatcac

SEQ ID NO: 401183 - DNA, 25 bp, Artificial
  probe
  misc_feature (1)..(25): SEQ ID NO: 5136; WAN024D4G; Start 1435; Stop 1459
atgactagaattggagaactaagac

SEQ ID NO: 401184 - DNA, 25 bp, Artificial
  probe
  misc_feature (1)..(25): SEQ ID NO: 5136; WAN024D4G; Start 1437; Stop 1461
gactagaattggagaactaagacca

SEQ ID NO: 401185 - DNA, 25 bp, Artificial
  probe
  misc_feature (1)..(25): SEQ ID NO: 5136; WAN024D4G; Start 105; Stop 129
ggaacgaatcattcatggagatgtc

SEQ ID NO: 401186 - DNA, 25 bp, Artificial
  probe
  misc_feature (1)..(25): SEQ ID NO: 5136; WAN024D4G; Start 571; Stop 595
ttgaaccaagtgcttgaggaattac

SEQ ID NO: 401187 - DNA, 25 bp, Artificial
  probe
  misc_feature (1)..(25): SEQ ID NO: 5136; WAN024D4G; Start 182; Stop 206
tagagagtattccgagagacaagga

SEQ ID NO: 401188 - DNA, 25 bp, Artificial
  probe
  misc_feature (1)..(25): SEQ ID NO: 5136; WAN024D4G; Start 1406; Stop 1430
accaagaaaccattaacaaagcaaa

SEQ ID NO: 401189 - DNA, 25 bp, Artificial
  probe
  misc_feature (1)..(25): SEQ ID NO: 5136; WAN024D4G; Start 1405; Stop 1429
taccaagaaaccattaacaaagcaa

SEQ ID NO: 401190 - DNA, 25 bp, Artificial
  probe
  misc_feature (1)..(25): SEQ ID NO: 5136; WAN024D4G; Start 1404; Stop 1428
ataccaagaaaccattaacaaagca

SEQ ID NO: 401191 - DNA, 25 bp, Artificial
  probe
  misc_feature (1)..(25): SEQ ID NO: 5136; WAN024D4G; Start 1400; Stop 1424
acgaataccaagaaaccattaacaa

SEQ ID NO: 401192 - DNA, 25 bp, Artificial
  probe
  misc_feature (1)..(25): SEQ ID NO: 5136; WAN024D4G; Start 1399; Stop 1423
aacgaataccaagaaaccattaaca

SEQ ID NO: 401193 - DNA, 25 bp, Artificial
  probe
  misc_feature (1)..(25): SEQ ID NO: 5136; WAN024D4G; Start 665; Stop 689
cacataagtttgagggaatggtaga

SEQ ID NO: 401194 - DNA, 25 bp, Artificial
  probe
  misc_feature (1)..(25): SEQ ID NO: 5136; WAN024D4G; Start 666; Stop 690
acataagtttgagggaatggtagaa

SEQ ID NO: 401195 - DNA, 25 bp, Artificial
  probe
  misc_feature (1)..(25): SEQ ID NO: 5136; WAN024D4G; Start 117; Stop 141
tcatggagatgtcttatcaccaatc

SEQ ID NO: 401196 - DNA, 25 bp, Artificial
  probe
  misc_feature (1)..(25): SEQ ID NO: 5136; WAN024D4G; Start 116; Stop 140
ttcatggagatgtcttatcaccaat

SEQ ID NO: 401197 - DNA, 25 bp, Artificial
  probe
  misc_feature (1)..(25): SEQ ID NO: 5136; WAN024D4G; Start 115; Stop 139
attcatggagatgtcttatcaccaa

SEQ ID NO: 401198 - DNA, 25 bp, Artificial
  probe
  misc_feature (1)..(25): SEQ ID NO: 5136; WAN024D4G; Start 111; Stop 135
aatcattcatggagatgtcttatca

SEQ ID NO: 401199 - DNA, 25 bp, Artificial
  probe
  misc_feature (1)..(25): SEQ ID NO: 5136; WAN024D4G; Start 120; Stop 144
tggagatgtcttatcaccaatcttg

SEQ ID NO: 401200 - DNA, 25 bp, Artificial
  probe
  misc_feature (1)..(25): SEQ ID NO: 5136; WAN024D4G; Start 114; Stop 138
cattcatggagatgtcttatcacca

SEQ ID NO: 401201 - DNA, 25 bp, Artificial
  probe
  misc_feature (1)..(25): SEQ ID NO: 5136; WAN024D4G; Start 119; Stop 143
atggagatgtcttatcaccaatctt

SEQ ID NO: 401202 - DNA, 25 bp, Artificial
  probe
  misc_feature (1)..(25): SEQ ID NO: 5136; WAN024D4G; Start 104; Stop 128
tggaacgaatcattcatggagatgt

SEQ ID NO: 401203 - DNA, 25 bp, Artificial
  probe
  misc_feature (1)..(25): SEQ ID NO: 5136; WAN024D4G; Start 489; Stop 513
ctttgaccacaagaaggagaagata

SEQ ID NO: 401204 - DNA, 25 bp, Artificial
  probe
  misc_feature (1)..(25): SEQ ID NO: 5137; WAN024FZ5; Start 228; Stop 252
tggcttcaatgatgttcttaatact

SEQ ID NO: 401205 - DNA, 25 bp, Artificial
  probe
  misc_feature (1)..(25): SEQ ID NO: 5137; WAN024FZ5; Start 224; Stop 248
tcaatggcttcaatgatgttcttaa

SEQ ID NO: 401206 - DNA, 25 bp, Artificial
  probe
  misc_feature (1)..(25): SEQ ID NO: 5137; WAN024FZ5; Start 72; Stop 96
caacgatagtatcaaccgcttctac

SEQ ID NO: 401207 - DNA, 25 bp, Artificial
  probe
  misc_feature (1)..(25): SEQ ID NO: 5137; WAN024FZ5; Start 71; Stop 95
tcaacgatagtatcaaccgcttcta

SEQ ID NO: 401208 - DNA, 25 bp, Artificial
  probe
  misc_feature (1)..(25): SEQ ID NO: 5137; WAN024FZ5; Start 225; Stop 249
caatggcttcaatgatgttcttaat

SEQ ID NO: 401209 - DNA, 25 bp, Artificial
  probe
  misc_feature (1)..(25): SEQ ID NO: 5137; WAN024FZ5; Start 140; Stop 164
tcctgaatcatgcgaagtgtaataa

SEQ ID NO: 401210 - DNA, 25 bp, Artificial
  probe
  misc_feature (1)..(25): SEQ ID NO: 5137; WAN024FZ5; Start 139; Stop 163
gtcctgaatcatgcgaagtgtaata

SEQ ID NO: 401211 - DNA, 25 bp, Artificial
  probe
  misc_feature (1)..(25): SEQ ID NO: 5137; WAN024FZ5; Start 346; Stop 370
gtctccatgaacaccaactacaatt

SEQ ID NO: 401212 - DNA, 25 bp, Artificial
  probe
  misc_feature (1)..(25): SEQ ID NO: 5137; WAN024FZ5; Start 241; Stop 265
gttcttaatacttgtattgcggtca

SEQ ID NO: 401213 - DNA, 25 bp, Artificial
  probe
  misc_feature (1)..(25): SEQ ID NO: 5137; WAN024FZ5; Start 240; Stop 264
tgttcttaatacttgtattgcggtc

SEQ ID NO: 401214 - DNA, 25 bp, Artificial
  probe
  misc_feature (1)..(25): SEQ ID NO: 5137; WAN024FZ5; Start 133; Stop 157
gatattgtcctgaatcatgcgaagt

SEQ ID NO: 401215 - DNA, 25 bp, Artificial
  probe
  misc_feature (1)..(25): SEQ ID NO: 5137; WAN024FZ5; Start 242; Stop 266
ttcttaatacttgtattgcggtcag

SEQ ID NO: 401216 - DNA, 25 bp, Artificial
  probe
  misc_feature (1)..(25): SEQ ID NO: 5137; WAN024FZ5; Start 76; Stop 100
gatagtatcaaccgcttctaccact

SEQ ID NO: 401217 - DNA, 25 bp, Artificial
  probe
  misc_feature (1)..(25): SEQ ID NO: 5137; WAN024FZ5; Start 70; Stop 94
ttcaacgatagtatcaaccgcttct

SEQ ID NO: 401218 - DNA, 25 bp, Artificial
  probe
  misc_feature (1)..(25): SEQ ID NO: 5137; WAN024FZ5; Start 134; Stop 158
atattgtcctgaatcatgcgaagtg

SEQ ID NO: 401219 - DNA, 25 bp, Artificial
  probe
  misc_feature (1)..(25): SEQ ID NO: 5137; WAN024FZ5; Start 227; Stop 251
atggcttcaatgatgttcttaatac

SEQ ID NO: 401220 - DNA, 25 bp, Artificial
  probe
  misc_feature (1)..(25): SEQ ID NO: 5137; WAN024FZ5; Start 77; Stop 101
atagtatcaaccgcttctaccactg

SEQ ID NO: 401221 - DNA, 25 bp, Artificial
  probe
  misc_feature (1)..(25): SEQ ID NO: 5137; WAN024FZ5; Start 73; Stop 97
aacgatagtatcaaccgcttctacc

SEQ ID NO: 401222 - DNA, 25 bp, Artificial
  probe
  misc_feature (1)..(25): SEQ ID NO: 5137; WAN024FZ5; Start 243; Stop 267
tcttaatacttgtattgcggtcagc

SEQ ID NO: 401223 - DNA, 25 bp, Artificial
  probe
  misc_feature (1)..(25): SEQ ID NO: 5137; WAN024FZ5; Start 239; Stop 263
atgttcttaatacttgtattgcggt

SEQ ID NO: 401224 - DNA, 25 bp, Artificial
  probe
  misc_feature (1)..(25): SEQ ID NO: 5137; WAN024FZ5; Start 229; Stop 253
ggcttcaatgatgttcttaatactt

SEQ ID NO: 401225 - DNA, 25 bp, Artificial
  probe
  misc_feature (1)..(25): SEQ ID NO: 5137; WAN024FZ5; Start 126; Stop 150
caagttggatattgtcctgaatcat

SEQ ID NO: 401226 - DNA, 25 bp, Artificial
  probe
  misc_feature (1)..(25): SEQ ID NO: 5137; WAN024FZ5; Start 238; Stop 262
gatgttcttaatacttgtattgcgg

SEQ ID NO: 401227 - DNA, 25 bp, Artificial
  probe
  misc_feature (1)..(25): SEQ ID NO: 5137; WAN024FZ5; Start 125; Stop 149
gcaagttggatattgtcctgaatca

SEQ ID NO: 401228 - DNA, 25 bp, Artificial
  probe
  misc_feature (1)..(25): SEQ ID NO: 5137; WAN024FZ5; Start 26; Stop 50
tgagcacgatttggaatatctgtaa

SEQ ID NO: 401229 - DNA, 25 bp, Artificial
  probe
  misc_feature (1)..(25): SEQ ID NO: 5137; WAN024FZ5; Start 27; Stop 51
gagcacgatttggaatatctgtaat

SEQ ID NO: 401230 - DNA, 25 bp, Artificial
  probe
  misc_feature (1)..(25): SEQ ID NO: 5137; WAN024FZ5; Start 345; Stop 369
agtctccatgaacaccaactacaat

SEQ ID NO: 401231 - DNA, 25 bp, Artificial
  probe
  misc_feature (1)..(25): SEQ ID NO: 5137; WAN024FZ5; Start 75; Stop 99
cgatagtatcaaccgcttctaccac

SEQ ID NO: 401232 - DNA, 25 bp, Artificial
  probe
  misc_feature (1)..(25): SEQ ID NO: 5137; WAN024FZ5; Start 127; Stop 151
aagttggatattgtcctgaatcatg

SEQ ID NO: 401233 - DNA, 25 bp, Artificial
  probe
  misc_feature (1)..(25): SEQ ID NO: 5137; WAN024FZ5; Start 149; Stop 173
atgcgaagtgtaataaatggacgaa

SEQ ID NO: 401234 - DNA, 25 bp, Artificial
  probe
  misc_feature (1)..(25): SEQ ID NO: 5137; WAN024FZ5; Start 20; Stop 44
taaaggtgagcacgatttggaatat

SEQ ID NO: 401235 - DNA, 25 bp, Artificial
  probe
  misc_feature (1)..(25): SEQ ID NO: 5137; WAN024FZ5; Start 19; Stop 43
ataaaggtgagcacgatttggaata

SEQ ID NO: 401236 - DNA, 25 bp, Artificial
  probe
  misc_feature (1)..(25): SEQ ID NO: 5137; WAN024FZ5; Start 204; Stop 228
gagtaagcggacgataagcatcaat

SEQ ID NO: 401237 - DNA, 25 bp, Artificial
  probe
  misc_feature (1)..(25): SEQ ID NO: 5138; WAN024FKD; Start 215; Stop 239
gctcttcttctcgcatggtattata

SEQ ID NO: 401238 - DNA, 25 bp, Artificial
  probe
  misc_feature (1)..(25): SEQ ID NO: 5138; WAN024FKD; Start 220; Stop 244
tcttctcgcatggtattatacttgg

SEQ ID NO: 401239 - DNA, 25 bp, Artificial
  probe
  misc_feature (1)..(25): SEQ ID NO: 5138; WAN024FKD; Start 227; Stop 251
gcatggtattatacttggcaacttg

SEQ ID NO: 401240 - DNA, 25 bp, Artificial
  probe
  misc_feature (1)..(25): SEQ ID NO: 5138; WAN024FKD; Start 217; Stop 241
tcttcttctcgcatggtattatact

SEQ ID NO: 401241 - DNA, 25 bp, Artificial
  probe
  misc_feature (1)..(25): SEQ ID NO: 5138; WAN024FKD; Start 216; Stop 240
ctcttcttctcgcatggtattatac

SEQ ID NO: 401242 - DNA, 25 bp, Artificial
  probe
  misc_feature (1)..(25): SEQ ID NO: 5138; WAN024FKD; Start 219; Stop 243
ttcttctcgcatggtattatacttg

SEQ ID NO: 401243 - DNA, 25 bp, Artificial
  probe
  misc_feature (1)..(25): SEQ ID NO: 5138; WAN024FKD; Start 218; Stop 242
cttcttctcgcatggtattatactt

SEQ ID NO: 401244 - DNA, 25 bp, Artificial
  probe
  misc_feature (1)..(25): SEQ ID NO: 5138; WAN024FKD; Start 221; Stop 245
cttctcgcatggtattatacttggc

SEQ ID NO: 401245 - DNA, 25 bp, Artificial
  probe
  misc_feature (1)..(25): SEQ ID NO: 5138; WAN024FKD; Start 226; Stop 250
cgcatggtattatacttggcaactt

SEQ ID NO: 401246 - DNA, 25 bp, Artificial
  probe
  misc_feature (1)..(25): SEQ ID NO: 5138; WAN024FKD; Start 25; Stop 49
aatcctcggataacactcatagacg

SEQ ID NO: 401247 - DNA, 25 bp, Artificial
  probe
  misc_feature (1)..(25): SEQ ID NO: 5138; WAN024FKD; Start 133; Stop 157
gcaaagacatacaagactaaagcaa

SEQ ID NO: 401248 - DNA, 25 bp, Artificial
  probe
  misc_feature (1)..(25): SEQ ID NO: 5138; WAN024FKD; Start 131; Stop 155
gagcaaagacatacaagactaaagc

SEQ ID NO: 401249 - DNA, 25 bp, Artificial
  probe
  misc_feature (1)..(25): SEQ ID NO: 5138; WAN024FKD; Start 129; Stop 153
aggagcaaagacatacaagactaaa

SEQ ID NO: 401250 - DNA, 25 bp, Artificial
  probe
  misc_feature (1)..(25): SEQ ID NO: 5138; WAN024FKD; Start 128; Stop 152
aaggagcaaagacatacaagactaa

SEQ ID NO: 401251 - DNA, 25 bp, Artificial
  probe
  misc_feature (1)..(25): SEQ ID NO: 5138; WAN024FKD; Start 224; Stop 248
ctcgcatggtattatacttggcaac

SEQ ID NO: 401252 - DNA, 25 bp, Artificial
  probe
  misc_feature (1)..(25): SEQ ID NO: 5138; WAN024FKD; Start 223; Stop 247
tctcgcatggtattatacttggcaa

SEQ ID NO: 401253 - DNA, 25 bp, Artificial
  probe
  misc_feature (1)..(25): SEQ ID NO: 5138; WAN024FKD; Start 222; Stop 246
ttctcgcatggtattatacttggca

SEQ ID NO: 401254 - DNA, 25 bp, Artificial
  probe
  misc_feature (1)..(25): SEQ ID NO: 5138; WAN024FKD; Start 130; Stop 154
ggagcaaagacatacaagactaaag

SEQ ID NO: 401255 - DNA, 25 bp, Artificial
  probe
  misc_feature (1)..(25): SEQ ID NO: 5138; WAN024FKD; Start 168; Stop 192
tagtcctgtcataaagcctaagaag

SEQ ID NO: 401256 - DNA, 25 bp, Artificial
  probe
  misc_feature (1)..(25): SEQ ID NO: 5138; WAN024FKD; Start 127; Stop 151
caaggagcaaagacatacaagacta

SEQ ID NO: 401257 - DNA, 25 bp, Artificial
  probe
  misc_feature (1)..(25): SEQ ID NO: 5138; WAN024FKD; Start 132; Stop 156
agcaaagacatacaagactaaagca

SEQ ID NO: 401258 - DNA, 25 bp, Artificial
  probe
  misc_feature (1)..(25): SEQ ID NO: 5138; WAN024FKD; Start 225; Stop 249
tcgcatggtattatacttggcaact

SEQ ID NO: 401259 - DNA, 25 bp, Artificial
  probe
  misc_feature (1)..(25): SEQ ID NO: 5138; WAN024FKD; Start 167; Stop 191
ctagtcctgtcataaagcctaagaa

SEQ ID NO: 401260 - DNA, 25 bp, Artificial
  probe
  misc_feature (1)..(25): SEQ ID NO: 5138; WAN024FKD; Start 166; Stop 190
cctagtcctgtcataaagcctaaga

SEQ ID NO: 401261 - DNA, 25 bp, Artificial
  probe
  misc_feature (1)..(25): SEQ ID NO: 5138; WAN024FKD; Start 282; Stop 306
tgaaaccaacaagaaccaagcatag

SEQ ID NO: 401262 - DNA, 25 bp, Artificial
  probe
  misc_feature (1)..(25): SEQ ID NO: 5138; WAN024FKD; Start 134; Stop 158
caaagacatacaagactaaagcaaa

SEQ ID NO: 401263 - DNA, 25 bp, Artificial
  probe
  misc_feature (1)..(25): SEQ ID NO: 5138; WAN024FKD; Start 24; Stop 48
aaatcctcggataacactcatagac

SEQ ID NO: 401264 - DNA, 25 bp, Artificial
  probe
  misc_feature (1)..(25): SEQ ID NO: 5138; WAN024FKD; Start 281; Stop 305
ttgaaaccaacaagaaccaagcata

SEQ ID NO: 401265 - DNA, 25 bp, Artificial
  probe
  misc_feature (1)..(25): SEQ ID NO: 5138; WAN024FKD; Start 169; Stop 193
agtcctgtcataaagcctaagaagc

SEQ ID NO: 401266 - DNA, 25 bp, Artificial
  probe
  misc_feature (1)..(25): SEQ ID NO: 5138; WAN024FKD; Start 26; Stop 50
atcctcggataacactcatagacgg

SEQ ID NO: 401267 - DNA, 25 bp, Artificial
  probe
  misc_feature (1)..(25): SEQ ID NO: 5138; WAN024FKD; Start 165; Stop 189
gcctagtcctgtcataaagcctaag

SEQ ID NO: 401268 - DNA, 25 bp, Artificial
  probe
  misc_feature (1)..(25): SEQ ID NO: 5138; WAN024FKD; Start 126; Stop 150
ccaaggagcaaagacatacaagact

SEQ ID NO: 401269 - DNA, 25 bp, Artificial
  probe
  misc_feature (1)..(25): SEQ ID NO: 5138; WAN024FKD; Start 123; Stop 147
tagccaaggagcaaagacatacaag

SEQ ID NO: 401270 - DNA, 25 bp, Artificial
  probe
  misc_feature (1)..(25): SEQ ID NO: 5139; WAN024FXQ; Start 308; Stop 332
ttctcattaagattgaccaccatcc

SEQ ID NO: 401271 - DNA, 25 bp, Artificial
  probe
  misc_feature (1)..(25): SEQ ID NO: 5139; WAN024FXQ; Start 310; Stop 334
ctcattaagattgaccaccatccaa

SEQ ID NO: 401272 - DNA, 25 bp, Artificial
  probe
  misc_feature (1)..(25): SEQ ID NO: 5139; WAN024FXQ; Start 56; Stop 80
acaccattatcattcatcgtcatat

SEQ ID NO: 401273 - DNA, 25 bp, Artificial
  probe
  misc_feature (1)..(25): SEQ ID NO: 5139; WAN024FXQ; Start 309; Stop 333
tctcattaagattgaccaccatcca

SEQ ID NO: 401274 - DNA, 25 bp, Artificial
  probe
  misc_feature (1)..(25): SEQ ID NO: 5139; WAN024FXQ; Start 55; Stop 79
gacaccattatcattcatcgtcata

SEQ ID NO: 401275 - DNA, 25 bp, Artificial
  probe
  misc_feature (1)..(25): SEQ ID NO: 5139; WAN024FXQ; Start 615; Stop 639
ctacatctacgaccatctggaagtg

SEQ ID NO: 401276 - DNA, 25 bp, Artificial
  probe
  misc_feature (1)..(25): SEQ ID NO: 5139; WAN024FXQ; Start 536; Stop 560
tgagagaacataactttgactttgc

SEQ ID NO: 401277 - DNA, 25 bp, Artificial
  probe
  misc_feature (1)..(25): SEQ ID NO: 5139; WAN024FXQ; Start 183; Stop 207
aactcttacttggatggctgagatg

SEQ ID NO: 401278 - DNA, 25 bp, Artificial
  probe
  misc_feature (1)..(25): SEQ ID NO: 5139; WAN024FXQ; Start 182; Stop 206
caactcttacttggatggctgagat

SEQ ID NO: 401279 - DNA, 25 bp, Artificial
  probe
  misc_feature (1)..(25): SEQ ID NO: 5139; WAN024FXQ; Start 537; Stop 561
gagagaacataactttgactttgcg

SEQ ID NO: 401280 - DNA, 25 bp, Artificial
  probe
  misc_feature (1)..(25): SEQ ID NO: 5139; WAN024FXQ; Start 1; Stop 25
ttgaggttatttatggagatttgcc

SEQ ID NO: 401281 - DNA, 25 bp, Artificial
  probe
  misc_feature (1)..(25): SEQ ID NO: 5139; WAN024FXQ; Start 523; Stop 547
ctggctgcttatttgagagaacata

SEQ ID NO: 401282 - DNA, 25 bp, Artificial
  probe
  misc_feature (1)..(25): SEQ ID NO: 5139; WAN024FXQ; Start 212; Stop 236
ttgttgaagatagagcctaccaagg

SEQ ID NO: 401283 - DNA, 25 bp, Artificial
  probe
  misc_feature (1)..(25): SEQ ID NO: 5139; WAN024FXQ; Start 525; Stop 549
ggctgcttatttgagagaacataac

SEQ ID NO: 401284 - DNA, 25 bp, Artificial
  probe
  misc_feature (1)..(25): SEQ ID NO: 5139; WAN024FXQ; Start 524; Stop 548
tggctgcttatttgagagaacataa

SEQ ID NO: 401285 - DNA, 25 bp, Artificial
  probe
  misc_feature (1)..(25): SEQ ID NO: 5139; WAN024FXQ; Start 526; Stop 550
gctgcttatttgagagaacataact

SEQ ID NO: 401286 - DNA, 25 bp, Artificial
  probe
  misc_feature (1)..(25): SEQ ID NO: 5139; WAN024FXQ; Start 47; Stop 71
aagaatacgacaccattatcattca

SEQ ID NO: 401287 - DNA, 25 bp, Artificial
  probe
  misc_feature (1)..(25): SEQ ID NO: 5139; WAN024FXQ; Start 315; Stop 339
taagattgaccaccatccaaatgat

SEQ ID NO: 401288 - DNA, 25 bp, Artificial
  probe
  misc_feature (1)..(25): SEQ ID NO: 5139; WAN024FXQ; Start 314; Stop 338
ttaagattgaccaccatccaaatga

SEQ ID NO: 401289 - DNA, 25 bp, Artificial
  probe
  misc_feature (1)..(25): SEQ ID NO: 5139; WAN024FXQ; Start 313; Stop 337
attaagattgaccaccatccaaatg

SEQ ID NO: 401290 - DNA, 25 bp, Artificial
  probe
  misc_feature (1)..(25): SEQ ID NO: 5139; WAN024FXQ; Start 312; Stop 336
cattaagattgaccaccatccaaat

SEQ ID NO: 401291 - DNA, 25 bp, Artificial
  probe
  misc_feature (1)..(25): SEQ ID NO: 5139; WAN024FXQ; Start 187; Stop 211
cttacttggatggctgagatggatc

SEQ ID NO: 401292 - DNA, 25 bp, Artificial
  probe
  misc_feature (1)..(25): SEQ ID NO: 5139; WAN024FXQ; Start 48; Stop 72
agaatacgacaccattatcattcat

SEQ ID NO: 401293 - DNA, 25 bp, Artificial
  probe
  misc_feature (1)..(25): SEQ ID NO: 5139; WAN024FXQ; Start 311; Stop 335
tcattaagattgaccaccatccaaa

SEQ ID NO: 401294 - DNA, 25 bp, Artificial
  probe
  misc_feature (1)..(25): SEQ ID NO: 5139; WAN024FXQ; Start 186; Stop 210
tcttacttggatggctgagatggat

SEQ ID NO: 401295 - DNA, 25 bp, Artificial
  probe
  misc_feature (1)..(25): SEQ ID NO: 5139; WAN024FXQ; Start 50; Stop 74
aatacgacaccattatcattcatcg

SEQ ID NO: 401296 - DNA, 25 bp, Artificial
  probe
  misc_feature (1)..(25): SEQ ID NO: 5139; WAN024FXQ; Start 391; Stop 415
gagatgattaccctatttgcccaaa

SEQ ID NO: 401297 - DNA, 25 bp, Artificial
  probe
  misc_feature (1)..(25): SEQ ID NO: 5139; WAN024FXQ; Start 386; Stop 410
ctagcgagatgattaccctatttgc

SEQ ID NO: 401298 - DNA, 25 bp, Artificial
  probe
  misc_feature (1)..(25): SEQ ID NO: 5139; WAN024FXQ; Start 307; Stop 331
tttctcattaagattgaccaccatc

SEQ ID NO: 401299 - DNA, 25 bp, Artificial
  probe
  misc_feature (1)..(25): SEQ ID NO: 5139; WAN024FXQ; Start 49; Stop 73
gaatacgacaccattatcattcatc

SEQ ID NO: 401300 - DNA, 25 bp, Artificial
  probe
  misc_feature (1)..(25): SEQ ID NO: 5139; WAN024FXQ; Start 538; Stop 562
agagaacataactttgactttgcgg

SEQ ID NO: 401301 - DNA, 25 bp, Artificial
  probe
  misc_feature (1)..(25): SEQ ID NO: 5139; WAN024FXQ; Start 392; Stop 416
agatgattaccctatttgcccaaac

SEQ ID NO: 401302 - DNA, 25 bp, Artificial
  probe
  misc_feature (1)..(25): SEQ ID NO: 5139; WAN024FXQ; Start 334; Stop 358
aatgatgatgtatacggtgacctgt

SEQ ID NO: 401303 - DNA, 25 bp, Artificial
  probe
  misc_feature (1)..(25): SEQ ID NO: 5140; WAN024GD8; Start 802; Stop 826
taacaagagtccacaagtgagtgat

SEQ ID NO: 401304 - DNA, 25 bp, Artificial
  probe
  misc_feature (1)..(25): SEQ ID NO: 5140; WAN024GD8; Start 366; Stop 390
aaacacctattgaagccagagaaat

SEQ ID NO: 401305 - DNA, 25 bp, Artificial
  probe
  misc_feature (1)..(25): SEQ ID NO: 5140; WAN024GD8; Start 367; Stop 391
aacacctattgaagccagagaaatt

SEQ ID NO: 401306 - DNA, 25 bp, Artificial
  probe
  misc_feature (1)..(25): SEQ ID NO: 5140; WAN024GD8; Start 488; Stop 512
gttcatctctcttggtgggataaag

SEQ ID NO: 401307 - DNA, 25 bp, Artificial
  probe
  misc_feature (1)..(25): SEQ ID NO: 5140; WAN024GD8; Start 788; Stop 812
gtcgtatttgatggtaacaagagtc

SEQ ID NO: 401308 - DNA, 25 bp, Artificial
  probe
  misc_feature (1)..(25): SEQ ID NO: 5140; WAN024GD8; Start 410; Stop 434
gatccaacagactatcatactcgcc

SEQ ID NO: 401309 - DNA, 25 bp, Artificial
  probe
  misc_feature (1)..(25): SEQ ID NO: 5140; WAN024GD8; Start 789; Stop 813
tcgtatttgatggtaacaagagtcc

SEQ ID NO: 401310 - DNA, 25 bp, Artificial
  probe
  misc_feature (1)..(25): SEQ ID NO: 5140; WAN024GD8; Start 685; Stop 709
ctatactgttccgcctgaaattgat

SEQ ID NO: 401311 - DNA, 25 bp, Artificial
  probe
  misc_feature (1)..(25): SEQ ID NO: 5140; WAN024GD8; Start 487; Stop 511
tgttcatctctcttggtgggataaa

SEQ ID NO: 401312 - DNA, 25 bp, Artificial
  probe
  misc_feature (1)..(25): SEQ ID NO: 5140; WAN024GD8; Start 492; Stop 516
atctctcttggtgggataaaggttt

SEQ ID NO: 401313 - DNA, 25 bp, Artificial
  probe
  misc_feature (1)..(25): SEQ ID NO: 5140; WAN024GD8; Start 686; Stop 710
tatactgttccgcctgaaattgatg

SEQ ID NO: 401314 - DNA, 25 bp, Artificial
  probe
  misc_feature (1)..(25): SEQ ID NO: 5140; WAN024GD8; Start 801; Stop 825
gtaacaagagtccacaagtgagtga

SEQ ID NO: 401315 - DNA, 25 bp, Artificial
  probe
  misc_feature (1)..(25): SEQ ID NO: 5140; WAN024GD8; Start 795; Stop 819
ttgatggtaacaagagtccacaagt

SEQ ID NO: 401316 - DNA, 25 bp, Artificial
  probe
  misc_feature (1)..(25): SEQ ID NO: 5140; WAN024GD8; Start 637; Stop 661
attaggcttacaagacgcatttgaa

SEQ ID NO: 401317 - DNA, 25 bp, Artificial
  probe
  misc_feature (1)..(25): SEQ ID NO: 5140; WAN024GD8; Start 787; Stop 811
tgtcgtatttgatggtaacaagagt

SEQ ID NO: 401318 - DNA, 25 bp, Artificial
  probe
  misc_feature (1)..(25): SEQ ID NO: 5140; WAN024GD8; Start 489; Stop 513
ttcatctctcttggtgggataaagg

SEQ ID NO: 401319 - DNA, 25 bp, Artificial
  probe
  misc_feature (1)..(25): SEQ ID NO: 5140; WAN024GD8; Start 786; Stop 810
atgtcgtatttgatggtaacaagag

SEQ ID NO: 401320 - DNA, 25 bp, Artificial
  probe
  misc_feature (1)..(25): SEQ ID NO: 5140; WAN024GD8; Start 486; Stop 510
gtgttcatctctcttggtgggataa

SEQ ID NO: 401321 - DNA, 25 bp, Artificial
  probe
  misc_feature (1)..(25): SEQ ID NO: 5140; WAN024GD8; Start 798; Stop 822
atggtaacaagagtccacaagtgag

SEQ ID NO: 401322 - DNA, 25 bp, Artificial
  probe
  misc_feature (1)..(25): SEQ ID NO: 5140; WAN024GD8; Start 797; Stop 821
gatggtaacaagagtccacaagtga

SEQ ID NO: 401323 - DNA, 25 bp, Artificial
  probe
  misc_feature (1)..(25): SEQ ID NO: 5140; WAN024GD8; Start 638; Stop 662
ttaggcttacaagacgcatttgaag

SEQ ID NO: 401324 - DNA, 25 bp, Artificial
  probe
  misc_feature (1)..(25): SEQ ID NO: 5140; WAN024GD8; Start 491; Stop 515
catctctcttggtgggataaaggtt

SEQ ID NO: 401325 - DNA, 25 bp, Artificial
  probe
  misc_feature (1)..(25): SEQ ID NO: 5140; WAN024GD8; Start 636; Stop 660
cattaggcttacaagacgcatttga

SEQ ID NO: 401326 - DNA, 25 bp, Artificial
  probe
  misc_feature (1)..(25): SEQ ID NO: 5140; WAN024GD8; Start 796; Stop 820
tgatggtaacaagagtccacaagtg

SEQ ID NO: 401327 - DNA, 25 bp, Artificial
  probe
  misc_feature (1)..(25): SEQ ID NO: 5140; WAN024GD8; Start 803; Stop 827
aacaagagtccacaagtgagtgatc

SEQ ID NO: 401328 - DNA, 25 bp, Artificial
  probe
  misc_feature (1)..(25): SEQ ID NO: 5140; WAN024GD8; Start 630; Stop 654
ctagtccattaggcttacaagacgc

SEQ ID NO: 401329 - DNA, 25 bp, Artificial
  probe
  misc_feature (1)..(25): SEQ ID NO: 5140; WAN024GD8; Start 629; Stop 653
gctagtccattaggcttacaagacg

SEQ ID NO: 401330 - DNA, 25 bp, Artificial
  probe
  misc_feature (1)..(25): SEQ ID NO: 5140; WAN024GD8; Start 785; Stop 809
catgtcgtatttgatggtaacaaga

SEQ ID NO: 401331 - DNA, 25 bp, Artificial
  probe
  misc_feature (1)..(25): SEQ ID NO: 5140; WAN024GD8; Start 477; Stop 501
cagttgccagtgttcatctctcttg

SEQ ID NO: 401332 - DNA, 25 bp, Artificial
  probe
  misc_feature (1)..(25): SEQ ID NO: 5140; WAN024GD8; Start 792; Stop 816
tatttgatggtaacaagagtccaca

SEQ ID NO: 401333 - DNA, 25 bp, Artificial
  probe
  misc_feature (1)..(25): SEQ ID NO: 5140; WAN024GD8; Start 791; Stop 815
gtatttgatggtaacaagagtccac

SEQ ID NO: 401334 - DNA, 25 bp, Artificial
  probe
  misc_feature (1)..(25): SEQ ID NO: 5140; WAN024GD8; Start 485; Stop 509
agtgttcatctctcttggtgggata

SEQ ID NO: 401335 - DNA, 25 bp, Artificial
  probe
  misc_feature (1)..(25): SEQ ID NO: 5140; WAN024GD8; Start 793; Stop 817
atttgatggtaacaagagtccacaa

SEQ ID NO: 401336 - DNA, 25 bp, Artificial
  probe
  misc_feature (1)..(25): SEQ ID NO: 5141; WAN0249ZN; Start 32; Stop 56
atagatagacagtaggcaatacagt

SEQ ID NO: 401337 - DNA, 25 bp, Artificial
  probe
  misc_feature (1)..(25): SEQ ID NO: 5141; WAN0249ZN; Start 39; Stop 63
gacagtaggcaatacagtctaactt

SEQ ID NO: 401338 - DNA, 25 bp, Artificial
  probe
  misc_feature (1)..(25): SEQ ID NO: 5141; WAN0249ZN; Start 33; Stop 57
tagatagacagtaggcaatacagtc

SEQ ID NO: 401339 - DNA, 25 bp, Artificial
  probe
  misc_feature (1)..(25): SEQ ID NO: 5141; WAN0249ZN; Start 42; Stop 66
agtaggcaatacagtctaactttcc

SEQ ID NO: 401340 - DNA, 25 bp, Artificial
  probe
  misc_feature (1)..(25): SEQ ID NO: 5141; WAN0249ZN; Start 40; Stop 64
acagtaggcaatacagtctaacttt

SEQ ID NO: 401341 - DNA, 25 bp, Artificial
  probe
  misc_feature (1)..(25): SEQ ID NO: 5141; WAN0249ZN; Start 31; Stop 55
tatagatagacagtaggcaatacag

SEQ ID NO: 401342 - DNA, 25 bp, Artificial
  probe
  misc_feature (1)..(25): SEQ ID NO: 5141; WAN0249ZN; Start 46; Stop 70
ggcaatacagtctaactttccttac

SEQ ID NO: 401343 - DNA, 25 bp, Artificial
  probe
  misc_feature (1)..(25): SEQ ID NO: 5141; WAN0249ZN; Start 41; Stop 65
cagtaggcaatacagtctaactttc

SEQ ID NO: 401344 - DNA, 25 bp, Artificial
  probe
  misc_feature (1)..(25): SEQ ID NO: 5141; WAN0249ZN; Start 47; Stop 71
gcaatacagtctaactttccttact

SEQ ID NO: 401345 - DNA, 25 bp, Artificial
  probe
  misc_feature (1)..(25): SEQ ID NO: 5141; WAN0249ZN; Start 43; Stop 67
gtaggcaatacagtctaactttcct

SEQ ID NO: 401346 - DNA, 25 bp, Artificial
  probe
  misc_feature (1)..(25): SEQ ID NO: 5141; WAN0249ZN; Start 45; Stop 69
aggcaatacagtctaactttcctta

SEQ ID NO: 401347 - DNA, 25 bp, Artificial
  probe
  misc_feature (1)..(25): SEQ ID NO: 5141; WAN0249ZN; Start 44; Stop 68
taggcaatacagtctaactttcctt

SEQ ID NO: 401348 - DNA, 25 bp, Artificial
  probe
  misc_feature (1)..(25): SEQ ID NO: 5141; WAN0249ZN; Start 30; Stop 54
ttatagatagacagtaggcaataca

SEQ ID NO: 401349 - DNA, 25 bp, Artificial
  probe
  misc_feature (1)..(25): SEQ ID NO: 5141; WAN0249ZN; Start 34; Stop 58
agatagacagtaggcaatacagtct

SEQ ID NO: 401350 - DNA, 25 bp, Artificial
  probe
  misc_feature (1)..(25): SEQ ID NO: 5141; WAN0249ZN; Start 38; Stop 62
agacagtaggcaatacagtctaact

SEQ ID NO: 401351 - DNA, 25 bp, Artificial
  probe
  misc_feature (1)..(25): SEQ ID NO: 5141; WAN0249ZN; Start 183; Stop 207
gagttttcagcattatccatccact

SEQ ID NO: 401352 - DNA, 25 bp, Artificial
  probe
  misc_feature (1)..(25): SEQ ID NO: 5141; WAN0249ZN; Start 179; Stop 203
caaggagttttcagcattatccatc

SEQ ID NO: 401353 - DNA, 25 bp, Artificial
  probe
  misc_feature (1)..(25): SEQ ID NO: 5141; WAN0249ZN; Start 176; Stop 200
cttcaaggagttttcagcattatcc

SEQ ID NO: 401354 - DNA, 25 bp, Artificial
  probe
  misc_feature (1)..(25): SEQ ID NO: 5141; WAN0249ZN; Start 178; Stop 202
tcaaggagttttcagcattatccat

SEQ ID NO: 401355 - DNA, 25 bp, Artificial
  probe
  misc_feature (1)..(25): SEQ ID NO: 5141; WAN0249ZN; Start 177; Stop 201
ttcaaggagttttcagcattatcca

SEQ ID NO: 401356 - DNA, 25 bp, Artificial
  probe
  misc_feature (1)..(25): SEQ ID NO: 5141; WAN0249ZN; Start 180; Stop 204
aaggagttttcagcattatccatcc

SEQ ID NO: 401357 - DNA, 25 bp, Artificial
  probe
  misc_feature (1)..(25): SEQ ID NO: 5141; WAN0249ZN; Start 175; Stop 199
ccttcaaggagttttcagcattatc

SEQ ID NO: 401358 - DNA, 25 bp, Artificial
  probe
  misc_feature (1)..(25): SEQ ID NO: 5141; WAN0249ZN; Start 48; Stop 72
caatacagtctaactttccttacta

SEQ ID NO: 401359 - DNA, 25 bp, Artificial
  probe
  misc_feature (1)..(25): SEQ ID NO: 5141; WAN0249ZN; Start 29; Stop 53
tttatagatagacagtaggcaatac

SEQ ID NO: 401360 - DNA, 25 bp, Artificial
  probe
  misc_feature (1)..(25): SEQ ID NO: 5141; WAN0249ZN; Start 182; Stop 206
ggagttttcagcattatccatccac

SEQ ID NO: 401361 - DNA, 25 bp, Artificial
  probe
  misc_feature (1)..(25): SEQ ID NO: 5141; WAN0249ZN; Start 181; Stop 205
aggagttttcagcattatccatcca

SEQ ID NO: 401362 - DNA, 25 bp, Artificial
  probe
  misc_feature (1)..(25): SEQ ID NO: 5141; WAN0249ZN; Start 37; Stop 61
tagacagtaggcaatacagtctaac

SEQ ID NO: 401363 - DNA, 25 bp, Artificial
  probe
  misc_feature (1)..(25): SEQ ID NO: 5141; WAN0249ZN; Start 35; Stop 59
gatagacagtaggcaatacagtcta

SEQ ID NO: 401364 - DNA, 25 bp, Artificial
  probe
  misc_feature (1)..(25): SEQ ID NO: 5141; WAN0249ZN; Start 1; Stop 25
ttgagtaaaagcctccaataaaata

SEQ ID NO: 401365 - DNA, 25 bp, Artificial
  probe
  misc_feature (1)..(25): SEQ ID NO: 5141; WAN0249ZN; Start 36; Stop 60
atagacagtaggcaatacagtctaa

SEQ ID NO: 401366 - DNA, 25 bp, Artificial
  probe
  misc_feature (1)..(25): SEQ ID NO: 5141; WAN0249ZN; Start 51; Stop 75
tacagtctaactttccttactattt

SEQ ID NO: 401367 - DNA, 25 bp, Artificial
  probe
  misc_feature (1)..(25): SEQ ID NO: 5141; WAN0249ZN; Start 2; Stop 26
tgagtaaaagcctccaataaaatat

SEQ ID NO: 401368 - DNA, 25 bp, Artificial
  probe
  misc_feature (1)..(25): SEQ ID NO: 5141; WAN0249ZN; Start 159; Stop 183
tactaaatagacttatccttcaagg

SEQ ID NO: 401369 - DNA, 25 bp, Artificial
  probe
  misc_feature (1)..(25): SEQ ID NO: 5142; WAN024FOW; Start 8; Stop 32
agttacagctagagtttaggtttga

SEQ ID NO: 401370 - DNA, 25 bp, Artificial
  probe
  misc_feature (1)..(25): SEQ ID NO: 5142; WAN024FOW; Start 7; Stop 31
aagttacagctagagtttaggtttg

SEQ ID NO: 401371 - DNA, 25 bp, Artificial
  probe
  misc_feature (1)..(25): SEQ ID NO: 5142; WAN024FOW; Start 9; Stop 33
gttacagctagagtttaggtttgat

SEQ ID NO: 401372 - DNA, 25 bp, Artificial
  probe
  misc_feature (1)..(25): SEQ ID NO: 5142; WAN024FOW; Start 4; Stop 28
agtaagttacagctagagtttaggt

SEQ ID NO: 401373 - DNA, 25 bp, Artificial
  probe
  misc_feature (1)..(25): SEQ ID NO: 5142; WAN024FOW; Start 3; Stop 27
gagtaagttacagctagagtttagg

SEQ ID NO: 401374 - DNA, 25 bp, Artificial
  probe
  misc_feature (1)..(25): SEQ ID NO: 5142; WAN024FOW; Start 5; Stop 29
gtaagttacagctagagtttaggtt

SEQ ID NO: 401375 - DNA, 25 bp, Artificial
  probe
  misc_feature (1)..(25): SEQ ID NO: 5142; WAN024FOW; Start 10; Stop 34
ttacagctagagtttaggtttgatt

SEQ ID NO: 401376 - DNA, 25 bp, Artificial
  probe
  misc_feature (1)..(25): SEQ ID NO: 5142; WAN024FOW; Start 12; Stop 36
acagctagagtttaggtttgattat

SEQ ID NO: 401377 - DNA, 25 bp, Artificial
  probe
  misc_feature (1)..(25): SEQ ID NO: 5142; WAN024FOW; Start 2; Stop 26
tgagtaagttacagctagagtttag

SEQ ID NO: 401378 - DNA, 25 bp, Artificial
  probe
  misc_feature (1)..(25): SEQ ID NO: 5142; WAN024FOW; Start 6; Stop 30
taagttacagctagagtttaggttt

SEQ ID NO: 401379 - DNA, 25 bp, Artificial
  probe
  misc_feature (1)..(25): SEQ ID NO: 5142; WAN024FOW; Start 11; Stop 35
tacagctagagtttaggtttgatta

SEQ ID NO: 401380 - DNA, 25 bp, Artificial
  probe
  misc_feature (1)..(25): SEQ ID NO: 5142; WAN024FOW; Start 1; Stop 25
ttgagtaagttacagctagagttta

SEQ ID NO: 401381 - DNA, 25 bp, Artificial
  probe
  misc_feature (1)..(25): SEQ ID NO: 5142; WAN024FOW; Start 13; Stop 37
cagctagagtttaggtttgattata

SEQ ID NO: 401382 - DNA, 25 bp, Artificial
  probe
  misc_feature (1)..(25): SEQ ID NO: 5142; WAN024FOW; Start 15; Stop 39
gctagagtttaggtttgattatatc

SEQ ID NO: 401383 - DNA, 25 bp, Artificial
  probe
  misc_feature (1)..(25): SEQ ID NO: 5142; WAN024FOW; Start 14; Stop 38
agctagagtttaggtttgattatat

SEQ ID NO: 401384 - DNA, 25 bp, Artificial
  probe
  misc_feature (1)..(25): SEQ ID NO: 5142; WAN024FOW; Start 18; Stop 42
agagtttaggtttgattatatcaga

SEQ ID NO: 401385 - DNA, 25 bp, Artificial
  probe
  misc_feature (1)..(25): SEQ ID NO: 5143; WAN024C54; Start 1275; Stop 1299
tcagtcaatagtcttatggttggaa

SEQ ID NO: 401386 - DNA, 25 bp, Artificial
  probe
  misc_feature (1)..(25): SEQ ID NO: 5143; WAN024C54; Start 1274; Stop 1298
ttcagtcaatagtcttatggttgga

SEQ ID NO: 401387 - DNA, 25 bp, Artificial
  probe
  misc_feature (1)..(25): SEQ ID NO: 5143; WAN024C54; Start 83; Stop 107
taatggttccgttatatacaagcgt

SEQ ID NO: 401388 - DNA, 25 bp, Artificial
  probe
  misc_feature (1)..(25): SEQ ID NO: 5143; WAN024C54; Start 802; Stop 826
caagcgtggatattatcatctgtaa

SEQ ID NO: 401389 - DNA, 25 bp, Artificial
  probe
  misc_feature (1)..(25): SEQ ID NO: 5143; WAN024C54; Start 84; Stop 108
aatggttccgttatatacaagcgta

SEQ ID NO: 401390 - DNA, 25 bp, Artificial
  probe
  misc_feature (1)..(25): SEQ ID NO: 5143; WAN024C54; Start 87; Stop 111
ggttccgttatatacaagcgtacta

SEQ ID NO: 401391 - DNA, 25 bp, Artificial
  probe
  misc_feature (1)..(25): SEQ ID NO: 5143; WAN024C54; Start 82; Stop 106
ttaatggttccgttatatacaagcg

SEQ ID NO: 401392 - DNA, 25 bp, Artificial
  probe
  misc_feature (1)..(25): SEQ ID NO: 5143; WAN024C54; Start 100; Stop 124
acaagcgtactatctacatctgatt

SEQ ID NO: 401393 - DNA, 25 bp, Artificial
  probe
  misc_feature (1)..(25): SEQ ID NO: 5143; WAN024C54; Start 85; Stop 109
atggttccgttatatacaagcgtac

SEQ ID NO: 401394 - DNA, 25 bp, Artificial
  probe
  misc_feature (1)..(25): SEQ ID NO: 5143; WAN024C54; Start 590; Stop 614
acattaagtacactagccttcagaa

SEQ ID NO: 401395 - DNA, 25 bp, Artificial
  probe
  misc_feature (1)..(25): SEQ ID NO: 5143; WAN024C54; Start 589; Stop 613
aacattaagtacactagccttcaga

SEQ ID NO: 401396 - DNA, 25 bp, Artificial
  probe
  misc_feature (1)..(25): SEQ ID NO: 5143; WAN024C54; Start 90; Stop 114
tccgttatatacaagcgtactatct

SEQ ID NO: 401397 - DNA, 25 bp, Artificial
  probe
  misc_feature (1)..(25): SEQ ID NO: 5143; WAN024C54; Start 736; Stop 760
aatggcatctattcagttggttata

SEQ ID NO: 401398 - DNA, 25 bp, Artificial
  probe
  misc_feature (1)..(25): SEQ ID NO: 5143; WAN024C54; Start 98; Stop 122
atacaagcgtactatctacatctga

SEQ ID NO: 401399 - DNA, 25 bp, Artificial
  probe
  misc_feature (1)..(25): SEQ ID NO: 5143; WAN024C54; Start 99; Stop 123
tacaagcgtactatctacatctgat

SEQ ID NO: 401400 - DNA, 25 bp, Artificial
  probe
  misc_feature (1)..(25): SEQ ID NO: 5143; WAN024C54; Start 1081; Stop 1105
accttagtaggagcgatagtgaata

SEQ ID NO: 401401 - DNA, 25 bp, Artificial
  probe
  misc_feature (1)..(25): SEQ ID NO: 5143; WAN024C54; Start 88; Stop 112
gttccgttatatacaagcgtactat

SEQ ID NO: 401402 - DNA, 25 bp, Artificial
  probe
  misc_feature (1)..(25): SEQ ID NO: 5143; WAN024C54; Start 86; Stop 110
tggttccgttatatacaagcgtact

SEQ ID NO: 401403 - DNA, 25 bp, Artificial
  probe
  misc_feature (1)..(25): SEQ ID NO: 5143; WAN024C54; Start 104; Stop 128
gcgtactatctacatctgattatgg

SEQ ID NO: 401404 - DNA, 25 bp, Artificial
  probe
  misc_feature (1)..(25): SEQ ID NO: 5143; WAN024C54; Start 1080; Stop 1104
aaccttagtaggagcgatagtgaat

SEQ ID NO: 401405 - DNA, 25 bp, Artificial
  probe
  misc_feature (1)..(25): SEQ ID NO: 5143; WAN024C54; Start 591; Stop 615
cattaagtacactagccttcagaat

SEQ ID NO: 401406 - DNA, 25 bp, Artificial
  probe
  misc_feature (1)..(25): SEQ ID NO: 5143; WAN024C54; Start 1082; Stop 1106
ccttagtaggagcgatagtgaatat

SEQ ID NO: 401407 - DNA, 25 bp, Artificial
  probe
  misc_feature (1)..(25): SEQ ID NO: 5143; WAN024C54; Start 89; Stop 113
ttccgttatatacaagcgtactatc

SEQ ID NO: 401408 - DNA, 25 bp, Artificial
  probe
  misc_feature (1)..(25): SEQ ID NO: 5143; WAN024C54; Start 1070; Stop 1094
atagtcagtcaaccttagtaggagc

SEQ ID NO: 401409 - DNA, 25 bp, Artificial
  probe
  misc_feature (1)..(25): SEQ ID NO: 5143; WAN024C54; Start 588; Stop 612
taacattaagtacactagccttcag

SEQ ID NO: 401410 - DNA, 25 bp, Artificial
  probe
  misc_feature (1)..(25): SEQ ID NO: 5143; WAN024C54; Start 801; Stop 825
ccaagcgtggatattatcatctgta

SEQ ID NO: 401411 - DNA, 25 bp, Artificial
  probe
  misc_feature (1)..(25): SEQ ID NO: 5143; WAN024C54; Start 798; Stop 822
taaccaagcgtggatattatcatct

SEQ ID NO: 401412 - DNA, 25 bp, Artificial
  probe
  misc_feature (1)..(25): SEQ ID NO: 5143; WAN024C54; Start 101; Stop 125
caagcgtactatctacatctgatta

SEQ ID NO: 401413 - DNA, 25 bp, Artificial
  probe
  misc_feature (1)..(25): SEQ ID NO: 5143; WAN024C54; Start 735; Stop 759
gaatggcatctattcagttggttat

SEQ ID NO: 401414 - DNA, 25 bp, Artificial
  probe
  misc_feature (1)..(25): SEQ ID NO: 5143; WAN024C54; Start 1079; Stop 1103
caaccttagtaggagcgatagtgaa

SEQ ID NO: 401415 - DNA, 25 bp, Artificial
  probe
  misc_feature (1)..(25): SEQ ID NO: 5143; WAN024C54; Start 799; Stop 823
aaccaagcgtggatattatcatctg

SEQ ID NO: 401416 - DNA, 25 bp, Artificial
  probe
  misc_feature (1)..(25): SEQ ID NO: 5143; WAN024C54; Start 797; Stop 821
ttaaccaagcgtggatattatcatc

SEQ ID NO: 401417 - DNA, 25 bp, Artificial
  probe
  misc_feature (1)..(25): SEQ ID NO: 5143; WAN024C54; Start 1069; Stop 1093
tatagtcagtcaaccttagtaggag

SEQ ID NO: 401418 - DNA, 25 bp, Artificial
  probe
  misc_feature (1)..(25): SEQ ID NO: 5144; WAN024GMZ; Start 299; Stop 323
gctacagacttatgatgctctacat

SEQ ID NO: 401419 - DNA, 25 bp, Artificial
  probe
  misc_feature (1)..(25): SEQ ID NO: 5144; WAN024GMZ; Start 302; Stop 326
acagacttatgatgctctacattga

SEQ ID NO: 401420 - DNA, 25 bp, Artificial
  probe
  misc_feature (1)..(25): SEQ ID NO: 5144; WAN024GMZ; Start 303; Stop 327
cagacttatgatgctctacattgat

SEQ ID NO: 401421 - DNA, 25 bp, Artificial
  probe
  misc_feature (1)..(25): SEQ ID NO: 5144; WAN024GMZ; Start 99; Stop 123
caagtcctggatcttctgtatgaac

SEQ ID NO: 401422 - DNA, 25 bp, Artificial
  probe
  misc_feature (1)..(25): SEQ ID NO: 5144; WAN024GMZ; Start 301; Stop 325
tacagacttatgatgctctacattg

SEQ ID NO: 401423 - DNA, 25 bp, Artificial
  probe
  misc_feature (1)..(25): SEQ ID NO: 5144; WAN024GMZ; Start 300; Stop 324
ctacagacttatgatgctctacatt

SEQ ID NO: 401424 - DNA, 25 bp, Artificial
  probe
  misc_feature (1)..(25): SEQ ID NO: 5144; WAN024GMZ; Start 96; Stop 120
taacaagtcctggatcttctgtatg

SEQ ID NO: 401425 - DNA, 25 bp, Artificial
  probe
  misc_feature (1)..(25): SEQ ID NO: 5144; WAN024GMZ; Start 94; Stop 118
cataacaagtcctggatcttctgta

SEQ ID NO: 401426 - DNA, 25 bp, Artificial
  probe
  misc_feature (1)..(25): SEQ ID NO: 5144; WAN024GMZ; Start 107; Stop 131
ggatcttctgtatgaacatggactt

SEQ ID NO: 401427 - DNA, 25 bp, Artificial
  probe
  misc_feature (1)..(25): SEQ ID NO: 5144; WAN024GMZ; Start 101; Stop 125
agtcctggatcttctgtatgaacat

SEQ ID NO: 401428 - DNA, 25 bp, Artificial
  probe
  misc_feature (1)..(25): SEQ ID NO: 5144; WAN024GMZ; Start 304; Stop 328
agacttatgatgctctacattgatc

SEQ ID NO: 401429 - DNA, 25 bp, Artificial
  probe
  misc_feature (1)..(25): SEQ ID NO: 5144; WAN024GMZ; Start 100; Stop 124
aagtcctggatcttctgtatgaaca

SEQ ID NO: 401430 - DNA, 25 bp, Artificial
  probe
  misc_feature (1)..(25): SEQ ID NO: 5144; WAN024GMZ; Start 98; Stop 122
acaagtcctggatcttctgtatgaa

SEQ ID NO: 401431 - DNA, 25 bp, Artificial
  probe
  misc_feature (1)..(25): SEQ ID NO: 5144; WAN024GMZ; Start 97; Stop 121
aacaagtcctggatcttctgtatga

SEQ ID NO: 401432 - DNA, 25 bp, Artificial
  probe
  misc_feature (1)..(25): SEQ ID NO: 5144; WAN024GMZ; Start 95; Stop 119
ataacaagtcctggatcttctgtat

SEQ ID NO: 401433 - DNA, 25 bp, Artificial
  probe
  misc_feature (1)..(25): SEQ ID NO: 5144; WAN024GMZ; Start 105; Stop 129
ctggatcttctgtatgaacatggac

SEQ ID NO: 401434 - DNA, 25 bp, Artificial
  probe
  misc_feature (1)..(25): SEQ ID NO: 5144; WAN024GMZ; Start 102; Stop 126
gtcctggatcttctgtatgaacatg

SEQ ID NO: 401435 - DNA, 25 bp, Artificial
  probe
  misc_feature (1)..(25): SEQ ID NO: 5144; WAN024GMZ; Start 106; Stop 130
tggatcttctgtatgaacatggact

SEQ ID NO: 401436 - DNA, 25 bp, Artificial
  probe
  misc_feature (1)..(25): SEQ ID NO: 5144; WAN024GMZ; Start 104; Stop 128
cctggatcttctgtatgaacatgga

SEQ ID NO: 401437 - DNA, 25 bp, Artificial
  probe
  misc_feature (1)..(25): SEQ ID NO: 5144; WAN024GMZ; Start 103; Stop 127
tcctggatcttctgtatgaacatgg

SEQ ID NO: 401438 - DNA, 25 bp, Artificial
  probe
  misc_feature (1)..(25): SEQ ID NO: 5144; WAN024GMZ; Start 126; Stop 150
ggactttgacaatttcatcatcgtt

SEQ ID NO: 401439 - DNA, 25 bp, Artificial
  probe
  misc_feature (1)..(25): SEQ ID NO: 5144; WAN024GMZ; Start 124; Stop 148
atggactttgacaatttcatcatcg

SEQ ID NO: 401440 - DNA, 25 bp, Artificial
  probe
  misc_feature (1)..(25): SEQ ID NO: 5144; WAN024GMZ; Start 248; Stop 272
atgatttcagtacagtaaccaaacg

SEQ ID NO: 401441 - DNA, 25 bp, Artificial
  probe
  misc_feature (1)..(25): SEQ ID NO: 5144; WAN024GMZ; Start 245; Stop 269
accatgatttcagtacagtaaccaa

SEQ ID NO: 401442 - DNA, 25 bp, Artificial
  probe
  misc_feature (1)..(25): SEQ ID NO: 5144; WAN024GMZ; Start 242; Stop 266
gctaccatgatttcagtacagtaac

SEQ ID NO: 401443 - DNA, 25 bp, Artificial
  probe
  misc_feature (1)..(25): SEQ ID NO: 5144; WAN024GMZ; Start 93; Stop 117
gcataacaagtcctggatcttctgt

SEQ ID NO: 401444 - DNA, 25 bp, Artificial
  probe
  misc_feature (1)..(25): SEQ ID NO: 5144; WAN024GMZ; Start 244; Stop 268
taccatgatttcagtacagtaacca

SEQ ID NO: 401445 - DNA, 25 bp, Artificial
  probe
  misc_feature (1)..(25): SEQ ID NO: 5144; WAN024GMZ; Start 125; Stop 149
tggactttgacaatttcatcatcgt

SEQ ID NO: 401446 - DNA, 25 bp, Artificial
  probe
  misc_feature (1)..(25): SEQ ID NO: 5144; WAN024GMZ; Start 246; Stop 270
ccatgatttcagtacagtaaccaaa

SEQ ID NO: 401447 - DNA, 25 bp, Artificial
  probe
  misc_feature (1)..(25): SEQ ID NO: 5144; WAN024GMZ; Start 70; Stop 94
gctaccatatttgagaccttcttgc

SEQ ID NO: 401448 - DNA, 25 bp, Artificial
  probe
  misc_feature (1)..(25): SEQ ID NO: 5144; WAN024GMZ; Start 366; Stop 390
cagatgcaatatattcgccagtaag

SEQ ID NO: 401449 - DNA, 25 bp, Artificial
  probe
  misc_feature (1)..(25): SEQ ID NO: 5144; WAN024GMZ; Start 365; Stop 389
tcagatgcaatatattcgccagtaa

SEQ ID NO: 401450 - DNA, 25 bp, Artificial
  probe
  misc_feature (1)..(25): SEQ ID NO: 5144; WAN024GMZ; Start 243; Stop 267
ctaccatgatttcagtacagtaacc

SEQ ID NO: 401451 - DNA, 25 bp, Artificial
  probe
  misc_feature (1)..(25): SEQ ID NO: 5145; WAN024EU2; Start 223; Stop 247
aaggaaagaatggctgaacttagta

SEQ ID NO: 401452 - DNA, 25 bp, Artificial
  probe
  misc_feature (1)..(25): SEQ ID NO: 5145; WAN024EU2; Start 224; Stop 248
aggaaagaatggctgaacttagtat

SEQ ID NO: 401453 - DNA, 25 bp, Artificial
  probe
  misc_feature (1)..(25): SEQ ID NO: 5145; WAN024EU2; Start 238; Stop 262
gaacttagtatcaaagaagcaagca

SEQ ID NO: 401454 - DNA, 25 bp, Artificial
  probe
  misc_feature (1)..(25): SEQ ID NO: 5145; WAN024EU2; Start 225; Stop 249
ggaaagaatggctgaacttagtatc

SEQ ID NO: 401455 - DNA, 25 bp, Artificial
  probe
  misc_feature (1)..(25): SEQ ID NO: 5145; WAN024EU2; Start 237; Stop 261
tgaacttagtatcaaagaagcaagc

SEQ ID NO: 401456 - DNA, 25 bp, Artificial
  probe
  misc_feature (1)..(25): SEQ ID NO: 5145; WAN024EU2; Start 230; Stop 254
gaatggctgaacttagtatcaaaga

SEQ ID NO: 401457 - DNA, 25 bp, Artificial
  probe
  misc_feature (1)..(25): SEQ ID NO: 5145; WAN024EU2; Start 226; Stop 250
gaaagaatggctgaacttagtatca

SEQ ID NO: 401458 - DNA, 25 bp, Artificial
  probe
  misc_feature (1)..(25): SEQ ID NO: 5145; WAN024EU2; Start 232; Stop 256
atggctgaacttagtatcaaagaag

SEQ ID NO: 401459 - DNA, 25 bp, Artificial
  probe
  misc_feature (1)..(25): SEQ ID NO: 5145; WAN024EU2; Start 229; Stop 253
agaatggctgaacttagtatcaaag

SEQ ID NO: 401460 - DNA, 25 bp, Artificial
  probe
  misc_feature (1)..(25): SEQ ID NO: 5145; WAN024EU2; Start 231; Stop 255
aatggctgaacttagtatcaaagaa

SEQ ID NO: 401461 - DNA, 25 bp, Artificial
  probe
  misc_feature (1)..(25): SEQ ID NO: 5145; WAN024EU2; Start 228; Stop 252
aagaatggctgaacttagtatcaaa

SEQ ID NO: 401462 - DNA, 25 bp, Artificial
  probe
  misc_feature (1)..(25): SEQ ID NO: 5145; WAN024EU2; Start 227; Stop 251
aaagaatggctgaacttagtatcaa

SEQ ID NO: 401463 - DNA, 25 bp, Artificial
  probe
  misc_feature (1)..(25): SEQ ID NO: 5145; WAN024EU2; Start 236; Stop 260
ctgaacttagtatcaaagaagcaag

SEQ ID NO: 401464 - DNA, 25 bp, Artificial
  probe
  misc_feature (1)..(25): SEQ ID NO: 5145; WAN024EU2; Start 77; Stop 101
agaagaccaatactcaattaatgga

SEQ ID NO: 401465 - DNA, 25 bp, Artificial
  probe
  misc_feature (1)..(25): SEQ ID NO: 5145; WAN024EU2; Start 114; Stop 138
tcataacttgaaccaaacagaattt

SEQ ID NO: 401466 - DNA, 25 bp, Artificial
  probe
  misc_feature (1)..(25): SEQ ID NO: 5145; WAN024EU2; Start 76; Stop 100
gagaagaccaatactcaattaatgg

SEQ ID NO: 401467 - DNA, 25 bp, Artificial
  probe
  misc_feature (1)..(25): SEQ ID NO: 5145; WAN024EU2; Start 25; Stop 49
gataatatctggctgagacgtgtcg

SEQ ID NO: 401468 - DNA, 25 bp, Artificial
  probe
  misc_feature (1)..(25): SEQ ID NO: 5145; WAN024EU2; Start 24; Stop 48
agataatatctggctgagacgtgtc

SEQ ID NO: 401469 - DNA, 25 bp, Artificial
  probe
  misc_feature (1)..(25): SEQ ID NO: 5145; WAN024EU2; Start 235; Stop 259
gctgaacttagtatcaaagaagcaa

SEQ ID NO: 401470 - DNA, 25 bp, Artificial
  probe
  misc_feature (1)..(25): SEQ ID NO: 5145; WAN024EU2; Start 78; Stop 102
gaagaccaatactcaattaatggaa

SEQ ID NO: 401471 - DNA, 25 bp, Artificial
  probe
  misc_feature (1)..(25): SEQ ID NO: 5145; WAN024EU2; Start 75; Stop 99
agagaagaccaatactcaattaatg

SEQ ID NO: 401472 - DNA, 25 bp, Artificial
  probe
  misc_feature (1)..(25): SEQ ID NO: 5145; WAN024EU2; Start 234; Stop 258
ggctgaacttagtatcaaagaagca

SEQ ID NO: 401473 - DNA, 25 bp, Artificial
  probe
  misc_feature (1)..(25): SEQ ID NO: 5145; WAN024EU2; Start 233; Stop 257
tggctgaacttagtatcaaagaagc

SEQ ID NO: 401474 - DNA, 25 bp, Artificial
  probe
  misc_feature (1)..(25): SEQ ID NO: 5145; WAN024EU2; Start 74; Stop 98
aagagaagaccaatactcaattaat

SEQ ID NO: 401475 - DNA, 25 bp, Artificial
  probe
  misc_feature (1)..(25): SEQ ID NO: 5145; WAN024EU2; Start 112; Stop 136
cttcataacttgaaccaaacagaat

SEQ ID NO: 401476 - DNA, 25 bp, Artificial
  probe
  misc_feature (1)..(25): SEQ ID NO: 5145; WAN024EU2; Start 73; Stop 97
aaagagaagaccaatactcaattaa

SEQ ID NO: 401477 - DNA, 25 bp, Artificial
  probe
  misc_feature (1)..(25): SEQ ID NO: 5145; WAN024EU2; Start 113; Stop 137
ttcataacttgaaccaaacagaatt

SEQ ID NO: 401478 - DNA, 25 bp, Artificial
  probe
  misc_feature (1)..(25): SEQ ID NO: 5145; WAN024EU2; Start 26; Stop 50
ataatatctggctgagacgtgtcgc

SEQ ID NO: 401479 - DNA, 25 bp, Artificial
  probe
  misc_feature (1)..(25): SEQ ID NO: 5145; WAN024EU2; Start 79; Stop 103
aagaccaatactcaattaatggaaa

SEQ ID NO: 401480 - DNA, 25 bp, Artificial
  probe
  misc_feature (1)..(25): SEQ ID NO: 5145; WAN024EU2; Start 115; Stop 139
cataacttgaaccaaacagaatttt

SEQ ID NO: 401481 - DNA, 25 bp, Artificial
  probe
  misc_feature (1)..(25): SEQ ID NO: 5145; WAN024EU2; Start 72; Stop 96
aaaagagaagaccaatactcaatta

SEQ ID NO: 401482 - DNA, 25 bp, Artificial
  probe
  misc_feature (1)..(25): SEQ ID NO: 5145; WAN024EU2; Start 80; Stop 104
agaccaatactcaattaatggaaaa

SEQ ID NO: 401483 - DNA, 25 bp, Artificial
  probe
  misc_feature (1)..(25): SEQ ID NO: 5146; WAN0249GS; Start 46; Stop 70
cgagtttcgattgaaattcgctttt

SEQ ID NO: 401484 - DNA, 25 bp, Artificial
  probe
  misc_feature (1)..(25): SEQ ID NO: 5146; WAN0249GS; Start 41; Stop 65
aaaagcgagtttcgattgaaattcg

SEQ ID NO: 401485 - DNA, 25 bp, Artificial
  probe
  misc_feature (1)..(25): SEQ ID NO: 5147; WAN024DNV; Start 83; Stop 107
aaatggagggtatgcagttacttta

SEQ ID NO: 401486 - DNA, 25 bp, Artificial
  probe
  misc_feature (1)..(25): SEQ ID NO: 5147; WAN024DNV; Start 87; Stop 111
ggagggtatgcagttactttatgaa

SEQ ID NO: 401487 - DNA, 25 bp, Artificial
  probe
  misc_feature (1)..(25): SEQ ID NO: 5147; WAN024DNV; Start 85; Stop 109
atggagggtatgcagttactttatg

SEQ ID NO: 401488 - DNA, 25 bp, Artificial
  probe
  misc_feature (1)..(25): SEQ ID NO: 5147; WAN024DNV; Start 84; Stop 108
aatggagggtatgcagttactttat

SEQ ID NO: 401489 - DNA, 25 bp, Artificial
  probe
  misc_feature (1)..(25): SEQ ID NO: 5147; WAN024DNV; Start 86; Stop 110
tggagggtatgcagttactttatga

SEQ ID NO: 401490 - DNA, 25 bp, Artificial
  probe
  misc_feature (1)..(25): SEQ ID NO: 5147; WAN024DNV; Start 72; Stop 96
aagtgtctacaaaatggagggtatg

SEQ ID NO: 401491 - DNA, 25 bp, Artificial
  probe
  misc_feature (1)..(25): SEQ ID NO: 5147; WAN024DNV; Start 69; Stop 93
tataagtgtctacaaaatggagggt

SEQ ID NO: 401492 - DNA, 25 bp, Artificial
  probe
  misc_feature (1)..(25): SEQ ID NO: 5147; WAN024DNV; Start 71; Stop 95
taagtgtctacaaaatggagggtat

SEQ ID NO: 401493 - DNA, 25 bp, Artificial
  probe
  misc_feature (1)..(25): SEQ ID NO: 5147; WAN024DNV; Start 70; Stop 94
ataagtgtctacaaaatggagggta

SEQ ID NO: 401494 - DNA, 25 bp, Artificial
  probe
  misc_feature (1)..(25): SEQ ID NO: 5147; WAN024DNV; Start 68; Stop 92
ttataagtgtctacaaaatggaggg

SEQ ID NO: 401495 - DNA, 25 bp, Artificial
  probe
  misc_feature (1)..(25): SEQ ID NO: 5147; WAN024DNV; Start 73; Stop 97
agtgtctacaaaatggagggtatgc

SEQ ID NO: 401496 - DNA, 25 bp, Artificial
  probe
  misc_feature (1)..(25): SEQ ID NO: 5147; WAN024DNV; Start 78; Stop 102
ctacaaaatggagggtatgcagtta

SEQ ID NO: 401497 - DNA, 25 bp, Artificial
  probe
  misc_feature (1)..(25): SEQ ID NO: 5147; WAN024DNV; Start 82; Stop 106
aaaatggagggtatgcagttacttt

SEQ ID NO: 401498 - DNA, 25 bp, Artificial
  probe
  misc_feature (1)..(25): SEQ ID NO: 5147; WAN024DNV; Start 79; Stop 103
tacaaaatggagggtatgcagttac

SEQ ID NO: 401499 - DNA, 25 bp, Artificial
  probe
  misc_feature (1)..(25): SEQ ID NO: 5147; WAN024DNV; Start 81; Stop 105
caaaatggagggtatgcagttactt

SEQ ID NO: 401500 - DNA, 25 bp, Artificial
  probe
  misc_feature (1)..(25): SEQ ID NO: 5147; WAN024DNV; Start 65; Stop 89
aggttataagtgtctacaaaatgga

SEQ ID NO: 401501 - DNA, 25 bp, Artificial
  probe
  misc_feature (1)..(25): SEQ ID NO: 5147; WAN024DNV; Start 67; Stop 91
gttataagtgtctacaaaatggagg

SEQ ID NO: 401502 - DNA, 25 bp, Artificial
  probe
  misc_feature (1)..(25): SEQ ID NO: 5147; WAN024DNV; Start 66; Stop 90
ggttataagtgtctacaaaatggag

SEQ ID NO: 401503 - DNA, 25 bp, Artificial
  probe
  misc_feature (1)..(25): SEQ ID NO: 5147; WAN024DNV; Start 64; Stop 88
gaggttataagtgtctacaaaatgg

SEQ ID NO: 401504 - DNA, 25 bp, Artificial
  probe
  misc_feature (1)..(25): SEQ ID NO: 5147; WAN024DNV; Start 14; Stop 38
aatcaatctatcaagatacagaagt

SEQ ID NO: 401505 - DNA, 25 bp, Artificial
  probe
  misc_feature (1)..(25): SEQ ID NO: 5147; WAN024DNV; Start 77; Stop 101
tctacaaaatggagggtatgcagtt

SEQ ID NO: 401506 - DNA, 25 bp, Artificial
  probe
  misc_feature (1)..(25): SEQ ID NO: 5147; WAN024DNV; Start 80; Stop 104
acaaaatggagggtatgcagttact

SEQ ID NO: 401507 - DNA, 25 bp, Artificial
  probe
  misc_feature (1)..(25): SEQ ID NO: 5147; WAN024DNV; Start 76; Stop 100
gtctacaaaatggagggtatgcagt

SEQ ID NO: 401508 - DNA, 25 bp, Artificial
  probe
  misc_feature (1)..(25): SEQ ID NO: 5147; WAN024DNV; Start 75; Stop 99
tgtctacaaaatggagggtatgcag

SEQ ID NO: 401509 - DNA, 25 bp, Artificial
  probe
  misc_feature (1)..(25): SEQ ID NO: 5147; WAN024DNV; Start 74; Stop 98
gtgtctacaaaatggagggtatgca

SEQ ID NO: 401510 - DNA, 25 bp, Artificial
  probe
  misc_feature (1)..(25): SEQ ID NO: 5147; WAN024DNV; Start 63; Stop 87
agaggttataagtgtctacaaaatg

SEQ ID NO: 401511 - DNA, 25 bp, Artificial
  probe
  misc_feature (1)..(25): SEQ ID NO: 5147; WAN024DNV; Start 9; Stop 33
aggaaaatcaatctatcaagataca

SEQ ID NO: 401512 - DNA, 25 bp, Artificial
  probe
  misc_feature (1)..(25): SEQ ID NO: 5147; WAN024DNV; Start 10; Stop 34
ggaaaatcaatctatcaagatacag

SEQ ID NO: 401513 - DNA, 25 bp, Artificial
  probe
  misc_feature (1)..(25): SEQ ID NO: 5147; WAN024DNV; Start 2; Stop 26
tgagtataggaaaatcaatctatca

SEQ ID NO: 401514 - DNA, 25 bp, Artificial
  probe
  misc_feature (1)..(25): SEQ ID NO: 5147; WAN024DNV; Start 132; Stop 156
acttaagaatggttttagtctaact

SEQ ID NO: 401515 - DNA, 25 bp, Artificial
  probe
  misc_feature (1)..(25): SEQ ID NO: 5147; WAN024DNV; Start 62; Stop 86
tagaggttataagtgtctacaaaat

SEQ ID NO: 401516 - DNA, 25 bp, Artificial
  probe
  misc_feature (1)..(25): SEQ ID NO: 5147; WAN024DNV; Start 61; Stop 85
atagaggttataagtgtctacaaaa

SEQ ID NO: 401517 - DNA, 25 bp, Artificial
  probe
  misc_feature (1)..(25): SEQ ID NO: 5147; WAN024DNV; Start 131; Stop 155
aacttaagaatggttttagtctaac

SEQ ID NO: 401518 - DNA, 25 bp, Artificial
  probe
  misc_feature (1)..(25): SEQ ID NO: 5148; WAN024CHR; Start 332; Stop 356
ggcaggataaggatagcattcatat

SEQ ID NO: 401519 - DNA, 25 bp, Artificial
  probe
  misc_feature (1)..(25): SEQ ID NO: 5148; WAN024CHR; Start 1049; Stop 1073
cggttctgtcttcttctatcattga

SEQ ID NO: 401520 - DNA, 25 bp, Artificial
  probe
  misc_feature (1)..(25): SEQ ID NO: 5148; WAN024CHR; Start 1490; Stop 1514
aggttcattacaagtatggctatgg

SEQ ID NO: 401521 - DNA, 25 bp, Artificial
  probe
  misc_feature (1)..(25): SEQ ID NO: 5148; WAN024CHR; Start 1483; Stop 1507
ttcaagcaggttcattacaagtatg

SEQ ID NO: 401522 - DNA, 25 bp, Artificial
  probe
  misc_feature (1)..(25): SEQ ID NO: 5148; WAN024CHR; Start 1492; Stop 1516
gttcattacaagtatggctatggtc

SEQ ID NO: 401523 - DNA, 25 bp, Artificial
  probe
  misc_feature (1)..(25): SEQ ID NO: 5148; WAN024CHR; Start 1489; Stop 1513
caggttcattacaagtatggctatg

SEQ ID NO: 401524 - DNA, 25 bp, Artificial
  probe
  misc_feature (1)..(25): SEQ ID NO: 5148; WAN024CHR; Start 1491; Stop 1515
ggttcattacaagtatggctatggt

SEQ ID NO: 401525 - DNA, 25 bp, Artificial
  probe
  misc_feature (1)..(25): SEQ ID NO: 5148; WAN024CHR; Start 968; Stop 992
cgcttcctatctacacagtgattat

SEQ ID NO: 401526 - DNA, 25 bp, Artificial
  probe
  misc_feature (1)..(25): SEQ ID NO: 5148; WAN024CHR; Start 1493; Stop 1517
ttcattacaagtatggctatggtcg

SEQ ID NO: 401527 - DNA, 25 bp, Artificial
  probe
  misc_feature (1)..(25): SEQ ID NO: 5148; WAN024CHR; Start 1482; Stop 1506
cttcaagcaggttcattacaagtat

SEQ ID NO: 401528 - DNA, 25 bp, Artificial
  probe
  misc_feature (1)..(25): SEQ ID NO: 5148; WAN024CHR; Start 1051; Stop 1075
gttctgtcttcttctatcattgagg

SEQ ID NO: 401529 - DNA, 25 bp, Artificial
  probe
  misc_feature (1)..(25): SEQ ID NO: 5148; WAN024CHR; Start 1050; Stop 1074
ggttctgtcttcttctatcattgag

SEQ ID NO: 401530 - DNA, 25 bp, Artificial
  probe
  misc_feature (1)..(25): SEQ ID NO: 5148; WAN024CHR; Start 1488; Stop 1512
gcaggttcattacaagtatggctat

SEQ ID NO: 401531 - DNA, 25 bp, Artificial
  probe
  misc_feature (1)..(25): SEQ ID NO: 5148; WAN024CHR; Start 1052; Stop 1076
ttctgtcttcttctatcattgagga

SEQ ID NO: 401532 - DNA, 25 bp, Artificial
  probe
  misc_feature (1)..(25): SEQ ID NO: 5148; WAN024CHR; Start 1484; Stop 1508
tcaagcaggttcattacaagtatgg

SEQ ID NO: 401533 - DNA, 25 bp, Artificial
  probe
  misc_feature (1)..(25): SEQ ID NO: 5148; WAN024CHR; Start 333; Stop 357
gcaggataaggatagcattcatatt

SEQ ID NO: 401534 - DNA, 25 bp, Artificial
  probe
  misc_feature (1)..(25): SEQ ID NO: 5148; WAN024CHR; Start 687; Stop 711
aatcttgtcttacgctcaggagtat

SEQ ID NO: 401535 - DNA, 25 bp, Artificial
  probe
  misc_feature (1)..(25): SEQ ID NO: 5148; WAN024CHR; Start 1048; Stop 1072
gcggttctgtcttcttctatcattg

SEQ ID NO: 401536 - DNA, 25 bp, Artificial
  probe
  misc_feature (1)..(25): SEQ ID NO: 5148; WAN024CHR; Start 1044; Stop 1068
caatgcggttctgtcttcttctatc

SEQ ID NO: 401537 - DNA, 25 bp, Artificial
  probe
  misc_feature (1)..(25): SEQ ID NO: 5148; WAN024CHR; Start 1057; Stop 1081
tcttcttctatcattgaggacatca

SEQ ID NO: 401538 - DNA, 25 bp, Artificial
  probe
  misc_feature (1)..(25): SEQ ID NO: 5148; WAN024CHR; Start 969; Stop 993
gcttcctatctacacagtgattatc

SEQ ID NO: 401539 - DNA, 25 bp, Artificial
  probe
  misc_feature (1)..(25): SEQ ID NO: 5148; WAN024CHR; Start 601; Stop 625
atcattgatacctatgtgccagatc

SEQ ID NO: 401540 - DNA, 25 bp, Artificial
  probe
  misc_feature (1)..(25): SEQ ID NO: 5148; WAN024CHR; Start 688; Stop 712
atcttgtcttacgctcaggagtatc

SEQ ID NO: 401541 - DNA, 25 bp, Artificial
  probe
  misc_feature (1)..(25): SEQ ID NO: 5148; WAN024CHR; Start 1047; Stop 1071
tgcggttctgtcttcttctatcatt

SEQ ID NO: 401542 - DNA, 25 bp, Artificial
  probe
  misc_feature (1)..(25): SEQ ID NO: 5148; WAN024CHR; Start 1045; Stop 1069
aatgcggttctgtcttcttctatca

SEQ ID NO: 401543 - DNA, 25 bp, Artificial
  probe
  misc_feature (1)..(25): SEQ ID NO: 5148; WAN024CHR; Start 1046; Stop 1070
atgcggttctgtcttcttctatcat

SEQ ID NO: 401544 - DNA, 25 bp, Artificial
  probe
  misc_feature (1)..(25): SEQ ID NO: 5148; WAN024CHR; Start 1053; Stop 1077
tctgtcttcttctatcattgaggac

SEQ ID NO: 401545 - DNA, 25 bp, Artificial
  probe
  misc_feature (1)..(25): SEQ ID NO: 5148; WAN024CHR; Start 1297; Stop 1321
ttgattacctataataccttgctgg

SEQ ID NO: 401546 - DNA, 25 bp, Artificial
  probe
  misc_feature (1)..(25): SEQ ID NO: 5148; WAN024CHR; Start 1292; Stop 1316
ggcagttgattacctataatacctt

SEQ ID NO: 401547 - DNA, 25 bp, Artificial
  probe
  misc_feature (1)..(25): SEQ ID NO: 5148; WAN024CHR; Start 1056; Stop 1080
gtcttcttctatcattgaggacatc

SEQ ID NO: 401548 - DNA, 25 bp, Artificial
  probe
  misc_feature (1)..(25): SEQ ID NO: 5148; WAN024CHR; Start 1481; Stop 1505
ccttcaagcaggttcattacaagta

SEQ ID NO: 401549 - DNA, 25 bp, Artificial
  probe
  misc_feature (1)..(25): SEQ ID NO: 5148; WAN024CHR; Start 1485; Stop 1509
caagcaggttcattacaagtatggc

SEQ ID NO: 401550 - DNA, 25 bp, Artificial
  probe
  misc_feature (1)..(25): SEQ ID NO: 5148; WAN024CHR; Start 597; Stop 621
gtctatcattgatacctatgtgcca

SEQ ID NO: 401551 - DNA, 25 bp, Artificial
  probe
  misc_feature (1)..(25): SEQ ID NO: 5149; WAN024FFN; Start 331; Stop 355
cgattgagtattggaagagaagtga

SEQ ID NO: 401552 - DNA, 25 bp, Artificial
  probe
  misc_feature (1)..(25): SEQ ID NO: 5149; WAN024FFN; Start 696; Stop 720
gccttactatatggttcctatgacg

SEQ ID NO: 401553 - DNA, 25 bp, Artificial
  probe
  misc_feature (1)..(25): SEQ ID NO: 5149; WAN024FFN; Start 330; Stop 354
acgattgagtattggaagagaagtg

SEQ ID NO: 401554 - DNA, 25 bp, Artificial
  probe
  misc_feature (1)..(25): SEQ ID NO: 5149; WAN024FFN; Start 695; Stop 719
tgccttactatatggttcctatgac

SEQ ID NO: 401555 - DNA, 25 bp, Artificial
  probe
  misc_feature (1)..(25): SEQ ID NO: 5149; WAN024FFN; Start 692; Stop 716
ccttgccttactatatggttcctat

SEQ ID NO: 401556 - DNA, 25 bp, Artificial
  probe
  misc_feature (1)..(25): SEQ ID NO: 5149; WAN024FFN; Start 329; Stop 353
tacgattgagtattggaagagaagt

SEQ ID NO: 401557 - DNA, 25 bp, Artificial
  probe
  misc_feature (1)..(25): SEQ ID NO: 5149; WAN024FFN; Start 332; Stop 356
gattgagtattggaagagaagtgag

SEQ ID NO: 401558 - DNA, 25 bp, Artificial
  probe
  misc_feature (1)..(25): SEQ ID NO: 5149; WAN024FFN; Start 697; Stop 721
ccttactatatggttcctatgacga

SEQ ID NO: 401559 - DNA, 25 bp, Artificial
  probe
  misc_feature (1)..(25): SEQ ID NO: 5149; WAN024FFN; Start 694; Stop 718
ttgccttactatatggttcctatga

SEQ ID NO: 401560 - DNA, 25 bp, Artificial
  probe
  misc_feature (1)..(25): SEQ ID NO: 5149; WAN024FFN; Start 229; Stop 253
cgtattctccagttcaatctaggtt

SEQ ID NO: 401561 - DNA, 25 bp, Artificial
  probe
  misc_feature (1)..(25): SEQ ID NO: 5149; WAN024FFN; Start 227; Stop 251
ttcgtattctccagttcaatctagg

SEQ ID NO: 401562 - DNA, 25 bp, Artificial
  probe
  misc_feature (1)..(25): SEQ ID NO: 5149; WAN024FFN; Start 693; Stop 717
cttgccttactatatggttcctatg

SEQ ID NO: 401563 - DNA, 25 bp, Artificial
  probe
  misc_feature (1)..(25): SEQ ID NO: 5149; WAN024FFN; Start 228; Stop 252
tcgtattctccagttcaatctaggt

SEQ ID NO: 401564 - DNA, 25 bp, Artificial
  probe
  misc_feature (1)..(25): SEQ ID NO: 5149; WAN024FFN; Start 691; Stop 715
gccttgccttactatatggttccta

SEQ ID NO: 401565 - DNA, 25 bp, Artificial
  probe
  misc_feature (1)..(25): SEQ ID NO: 5149; WAN024FFN; Start 328; Stop 352
ttacgattgagtattggaagagaag

SEQ ID NO: 401566 - DNA, 25 bp, Artificial
  probe
  misc_feature (1)..(25): SEQ ID NO: 5149; WAN024FFN; Start 698; Stop 722
cttactatatggttcctatgacgag

SEQ ID NO: 401567 - DNA, 25 bp, Artificial
  probe
  misc_feature (1)..(25): SEQ ID NO: 5149; WAN024FFN; Start 700; Stop 724
tactatatggttcctatgacgagtt

SEQ ID NO: 401568 - DNA, 25 bp, Artificial
  probe
  misc_feature (1)..(25): SEQ ID NO: 5149; WAN024FFN; Start 699; Stop 723
ttactatatggttcctatgacgagt

SEQ ID NO: 401569 - DNA, 25 bp, Artificial
  probe
  misc_feature (1)..(25): SEQ ID NO: 5149; WAN024FFN; Start 688; Stop 712
agtgccttgccttactatatggttc

SEQ ID NO: 401570 - DNA, 25 bp, Artificial
  probe
  misc_feature (1)..(25): SEQ ID NO: 5149; WAN024FFN; Start 649; Stop 673
tatttgatgtttctttggcttggtt

SEQ ID NO: 401571 - DNA, 25 bp, Artificial
  probe
  misc_feature (1)..(25): SEQ ID NO: 5149; WAN024FFN; Start 648; Stop 672
ctatttgatgtttctttggcttggt

SEQ ID NO: 401572 - DNA, 25 bp, Artificial
  probe
  misc_feature (1)..(25): SEQ ID NO: 5149; WAN024FFN; Start 646; Stop 670
acctatttgatgtttctttggcttg

SEQ ID NO: 401573 - DNA, 25 bp, Artificial
  probe
  misc_feature (1)..(25): SEQ ID NO: 5149; WAN024FFN; Start 645; Stop 669
cacctatttgatgtttctttggctt

SEQ ID NO: 401574 - DNA, 25 bp, Artificial
  probe
  misc_feature (1)..(25): SEQ ID NO: 5149; WAN024FFN; Start 20; Stop 44
ctatttgtaggaggtggcttatgaa

SEQ ID NO: 401575 - DNA, 25 bp, Artificial
  probe
  misc_feature (1)..(25): SEQ ID NO: 5149; WAN024FFN; Start 18; Stop 42
ttctatttgtaggaggtggcttatg

SEQ ID NO: 401576 - DNA, 25 bp, Artificial
  probe
  misc_feature (1)..(25): SEQ ID NO: 5149; WAN024FFN; Start 16; Stop 40
ctttctatttgtaggaggtggctta

SEQ ID NO: 401577 - DNA, 25 bp, Artificial
  probe
  misc_feature (1)..(25): SEQ ID NO: 5149; WAN024FFN; Start 78; Stop 102
tgtttatgtcttgcttactttgctt

SEQ ID NO: 401578 - DNA, 25 bp, Artificial
  probe
  misc_feature (1)..(25): SEQ ID NO: 5149; WAN024FFN; Start 77; Stop 101
ttgtttatgtcttgcttactttgct

SEQ ID NO: 401579 - DNA, 25 bp, Artificial
  probe
  misc_feature (1)..(25): SEQ ID NO: 5149; WAN024FFN; Start 705; Stop 729
tatggttcctatgacgagtttgatg

SEQ ID NO: 401580 - DNA, 25 bp, Artificial
  probe
  misc_feature (1)..(25): SEQ ID NO: 5149; WAN024FFN; Start 704; Stop 728
atatggttcctatgacgagtttgat

SEQ ID NO: 401581 - DNA, 25 bp, Artificial
  probe
  misc_feature (1)..(25): SEQ ID NO: 5149; WAN024FFN; Start 542; Stop 566
gctatttgttctttacttgtgtcct

SEQ ID NO: 401582 - DNA, 25 bp, Artificial
  probe
  misc_feature (1)..(25): SEQ ID NO: 5149; WAN024FFN; Start 654; Stop 678
gatgtttctttggcttggttctatg

SEQ ID NO: 401583 - DNA, 25 bp, Artificial
  probe
  misc_feature (1)..(25): SEQ ID NO: 5149; WAN024FFN; Start 17; Stop 41
tttctatttgtaggaggtggcttat

SEQ ID NO: 401584 - DNA, 25 bp, Artificial
  probe
  misc_feature (1)..(25): SEQ ID NO: 5150; WAN024AER; Start 2; Stop 26
tgagtattatttcattttctcctgc

SEQ ID NO: 401585 - DNA, 25 bp, Artificial
  probe
  misc_feature (1)..(25): SEQ ID NO: 5150; WAN024AER; Start 14; Stop 38
cattttctcctgcaattgaattctt

SEQ ID NO: 401586 - DNA, 25 bp, Artificial
  probe
  misc_feature (1)..(25): SEQ ID NO: 5150; WAN024AER; Start 13; Stop 37
tcattttctcctgcaattgaattct

SEQ ID NO: 401587 - DNA, 25 bp, Artificial
  probe
  misc_feature (1)..(25): SEQ ID NO: 5150; WAN024AER; Start 15; Stop 39
attttctcctgcaattgaattcttg

SEQ ID NO: 401588 - DNA, 25 bp, Artificial
  probe
  misc_feature (1)..(25): SEQ ID NO: 5150; WAN024AER; Start 4; Stop 28
agtattatttcattttctcctgcaa

SEQ ID NO: 401589 - DNA, 25 bp, Artificial
  probe
  misc_feature (1)..(25): SEQ ID NO: 5150; WAN024AER; Start 3; Stop 27
gagtattatttcattttctcctgca

SEQ ID NO: 401590 - DNA, 25 bp, Artificial
  probe
  misc_feature (1)..(25): SEQ ID NO: 5150; WAN024AER; Start 8; Stop 32
ttatttcattttctcctgcaattga

SEQ ID NO: 401591 - DNA, 25 bp, Artificial
  probe
  misc_feature (1)..(25): SEQ ID NO: 5150; WAN024AER; Start 5; Stop 29
gtattatttcattttctcctgcaat

SEQ ID NO: 401592 - DNA, 25 bp, Artificial
  probe
  misc_feature (1)..(25): SEQ ID NO: 5150; WAN024AER; Start 7; Stop 31
attatttcattttctcctgcaattg

SEQ ID NO: 401593 - DNA, 25 bp, Artificial
  probe
  misc_feature (1)..(25): SEQ ID NO: 5150; WAN024AER; Start 18; Stop 42
ttctcctgcaattgaattcttgctc

SEQ ID NO: 401594 - DNA, 25 bp, Artificial
  probe
  misc_feature (1)..(25): SEQ ID NO: 5150; WAN024AER; Start 1; Stop 25
ttgagtattatttcattttctcctg

SEQ ID NO: 401595 - DNA, 25 bp, Artificial
  probe
  misc_feature (1)..(25): SEQ ID NO: 5150; WAN024AER; Start 12; Stop 36
ttcattttctcctgcaattgaattc

SEQ ID NO: 401596 - DNA, 25 bp, Artificial
  probe
  misc_feature (1)..(25): SEQ ID NO: 5150; WAN024AER; Start 11; Stop 35
tttcattttctcctgcaattgaatt

SEQ ID NO: 401597 - DNA, 25 bp, Artificial
  probe
  misc_feature (1)..(25): SEQ ID NO: 5150; WAN024AER; Start 10; Stop 34
atttcattttctcctgcaattgaat

SEQ ID NO: 401598 - DNA, 25 bp, Artificial
  probe
  misc_feature (1)..(25): SEQ ID NO: 5150; WAN024AER; Start 6; Stop 30
tattatttcattttctcctgcaatt

SEQ ID NO: 401599 - DNA, 25 bp, Artificial
  probe
  misc_feature (1)..(25): SEQ ID NO: 5150; WAN024AER; Start 9; Stop 33
tatttcattttctcctgcaattgaa

SEQ ID NO: 401600 - DNA, 25 bp, Artificial
  probe
  misc_feature (1)..(25): SEQ ID NO: 5150; WAN024AER; Start 17; Stop 41
tttctcctgcaattgaattcttgct

SEQ ID NO: 401601 - DNA, 25 bp, Artificial
  probe
  misc_feature (1)..(25): SEQ ID NO: 5150; WAN024AER; Start 19; Stop 43
tctcctgcaattgaattcttgctcg

SEQ ID NO: 401602 - DNA, 25 bp, Artificial
  probe
  misc_feature (1)..(25): SEQ ID NO: 5150; WAN024AER; Start 16; Stop 40
ttttctcctgcaattgaattcttgc

SEQ ID NO: 401603 - DNA, 25 bp, Artificial
  probe
  misc_feature (1)..(25): SEQ ID NO: 5150; WAN024AER; Start 20; Stop 44
ctcctgcaattgaattcttgctcgg

SEQ ID NO: 401604 - DNA, 25 bp, Artificial
  probe
  misc_feature (1)..(25): SEQ ID NO: 5150; WAN024AER; Start 23; Stop 47
ctgcaattgaattcttgctcggctt

SEQ ID NO: 401605 - DNA, 25 bp, Artificial
  probe
  misc_feature (1)..(25): SEQ ID NO: 5150; WAN024AER; Start 24; Stop 48
tgcaattgaattcttgctcggcttt

SEQ ID NO: 401606 - DNA, 25 bp, Artificial
  probe
  misc_feature (1)..(25): SEQ ID NO: 5150; WAN024AER; Start 25; Stop 49
gcaattgaattcttgctcggctttt

SEQ ID NO: 401607 - DNA, 25 bp, Artificial
  probe
  misc_feature (1)..(25): SEQ ID NO: 5151; WAN024DM4; Start 248; Stop 272
catttcctgcgattcttcaagttaa

SEQ ID NO: 401608 - DNA, 25 bp, Artificial
  probe
  misc_feature (1)..(25): SEQ ID NO: 5151; WAN024DM4; Start 244; Stop 268
ttaacatttcctgcgattcttcaag

SEQ ID NO: 401609 - DNA, 25 bp, Artificial
  probe
  misc_feature (1)..(25): SEQ ID NO: 5151; WAN024DM4; Start 243; Stop 267
attaacatttcctgcgattcttcaa

SEQ ID NO: 401610 - DNA, 25 bp, Artificial
  probe
  misc_feature (1)..(25): SEQ ID NO: 5151; WAN024DM4; Start 242; Stop 266
aattaacatttcctgcgattcttca

SEQ ID NO: 401611 - DNA, 25 bp, Artificial
  probe
  misc_feature (1)..(25): SEQ ID NO: 5151; WAN024DM4; Start 249; Stop 273
atttcctgcgattcttcaagttaag

SEQ ID NO: 401612 - DNA, 25 bp, Artificial
  probe
  misc_feature (1)..(25): SEQ ID NO: 5151; WAN024DM4; Start 247; Stop 271
acatttcctgcgattcttcaagtta

SEQ ID NO: 401613 - DNA, 25 bp, Artificial
  probe
  misc_feature (1)..(25): SEQ ID NO: 5151; WAN024DM4; Start 245; Stop 269
taacatttcctgcgattcttcaagt

SEQ ID NO: 401614 - DNA, 25 bp, Artificial
  probe
  misc_feature (1)..(25): SEQ ID NO: 5151; WAN024DM4; Start 148; Stop 172
tatggaacgactgtcagtggtattg

SEQ ID NO: 401615 - DNA, 25 bp, Artificial
  probe
  misc_feature (1)..(25): SEQ ID NO: 5151; WAN024DM4; Start 147; Stop 171
gtatggaacgactgtcagtggtatt

SEQ ID NO: 401616 - DNA, 25 bp, Artificial
  probe
  misc_feature (1)..(25): SEQ ID NO: 5151; WAN024DM4; Start 246; Stop 270
aacatttcctgcgattcttcaagtt

SEQ ID NO: 401617 - DNA, 25 bp, Artificial
  probe
  misc_feature (1)..(25): SEQ ID NO: 5151; WAN024DM4; Start 324; Stop 348
aataaagggaactcgtattaccaaa

SEQ ID NO: 401618 - DNA, 25 bp, Artificial
  probe
  misc_feature (1)..(25): SEQ ID NO: 5151; WAN024DM4; Start 323; Stop 347
aaataaagggaactcgtattaccaa

SEQ ID NO: 401619 - DNA, 25 bp, Artificial
  probe
  misc_feature (1)..(25): SEQ ID NO: 5151; WAN024DM4; Start 241; Stop 265
aaattaacatttcctgcgattcttc

SEQ ID NO: 401620 - DNA, 25 bp, Artificial
  probe
  misc_feature (1)..(25): SEQ ID NO: 5151; WAN024DM4; Start 146; Stop 170
tgtatggaacgactgtcagtggtat

SEQ ID NO: 401621 - DNA, 25 bp, Artificial
  probe
  misc_feature (1)..(25): SEQ ID NO: 5151; WAN024DM4; Start 145; Stop 169
atgtatggaacgactgtcagtggta

SEQ ID NO: 401622 - DNA, 25 bp, Artificial
  probe
  misc_feature (1)..(25): SEQ ID NO: 5151; WAN024DM4; Start 158; Stop 182
ctgtcagtggtattgtttcaggtct

SEQ ID NO: 401623 - DNA, 25 bp, Artificial
  probe
  misc_feature (1)..(25): SEQ ID NO: 5151; WAN024DM4; Start 250; Stop 274
tttcctgcgattcttcaagttaaga

SEQ ID NO: 401624 - DNA, 25 bp, Artificial
  probe
  misc_feature (1)..(25): SEQ ID NO: 5151; WAN024DM4; Start 152; Stop 176
gaacgactgtcagtggtattgtttc

SEQ ID NO: 401625 - DNA, 25 bp, Artificial
  probe
  misc_feature (1)..(25): SEQ ID NO: 5151; WAN024DM4; Start 159; Stop 183
tgtcagtggtattgtttcaggtctg

SEQ ID NO: 401626 - DNA, 25 bp, Artificial
  probe
  misc_feature (1)..(25): SEQ ID NO: 5151; WAN024DM4; Start 153; Stop 177
aacgactgtcagtggtattgtttca

SEQ ID NO: 401627 - DNA, 25 bp, Artificial
  probe
  misc_feature (1)..(25): SEQ ID NO: 5151; WAN024DM4; Start 149; Stop 173
atggaacgactgtcagtggtattgt

SEQ ID NO: 401628 - DNA, 25 bp, Artificial
  probe
  misc_feature (1)..(25): SEQ ID NO: 5151; WAN024DM4; Start 316; Stop 340
aaggagaaaataaagggaactcgta

SEQ ID NO: 401629 - DNA, 25 bp, Artificial
  probe
  misc_feature (1)..(25): SEQ ID NO: 5151; WAN024DM4; Start 315; Stop 339
aaaggagaaaataaagggaactcgt

SEQ ID NO: 401630 - DNA, 25 bp, Artificial
  probe
  misc_feature (1)..(25): SEQ ID NO: 5151; WAN024DM4; Start 317; Stop 341
aggagaaaataaagggaactcgtat

SEQ ID NO: 401631 - DNA, 25 bp, Artificial
  probe
  misc_feature (1)..(25): SEQ ID NO: 5151; WAN024DM4; Start 238; Stop 262
ccaaaattaacatttcctgcgattc

SEQ ID NO: 401632 - DNA, 25 bp, Artificial
  probe
  misc_feature (1)..(25): SEQ ID NO: 5151; WAN024DM4; Start 237; Stop 261
tccaaaattaacatttcctgcgatt

SEQ ID NO: 401633 - DNA, 25 bp, Artificial
  probe
  misc_feature (1)..(25): SEQ ID NO: 5151; WAN024DM4; Start 157; Stop 181
actgtcagtggtattgtttcaggtc

SEQ ID NO: 401634 - DNA, 25 bp, Artificial
  probe
  misc_feature (1)..(25): SEQ ID NO: 5151; WAN024DM4; Start 156; Stop 180
gactgtcagtggtattgtttcaggt

SEQ ID NO: 401635 - DNA, 25 bp, Artificial
  probe
  misc_feature (1)..(25): SEQ ID NO: 5151; WAN024DM4; Start 236; Stop 260
ctccaaaattaacatttcctgcgat

SEQ ID NO: 401636 - DNA, 25 bp, Artificial
  probe
  misc_feature (1)..(25): SEQ ID NO: 5151; WAN024DM4; Start 318; Stop 342
ggagaaaataaagggaactcgtatt

SEQ ID NO: 401637 - DNA, 25 bp, Artificial
  probe
  misc_feature (1)..(25): SEQ ID NO: 5151; WAN024DM4; Start 314; Stop 338
taaaggagaaaataaagggaactcg

SEQ ID NO: 401638 - DNA, 25 bp, Artificial
  probe
  misc_feature (1)..(25): SEQ ID NO: 5151; WAN024DM4; Start 264; Stop 288
tcaagttaagaatgatttaggtcaa

SEQ ID NO: 401639 - DNA, 25 bp, Artificial
  probe
  misc_feature (1)..(25): SEQ ID NO: 5151; WAN024DM4; Start 263; Stop 287
ttcaagttaagaatgatttaggtca

SEQ ID NO: 401640 - DNA, 25 bp, Artificial
  probe
  misc_feature (1)..(25): SEQ ID NO: 5152; WAN024CXR; Start 163; Stop 187
gcagaattaggattgaatattgacg

SEQ ID NO: 401641 - DNA, 25 bp, Artificial
  probe
  misc_feature (1)..(25): SEQ ID NO: 5152; WAN024CXR; Start 111; Stop 135
tgttgttggtaaagataaatctgga

SEQ ID NO: 401642 - DNA, 25 bp, Artificial
  probe
  misc_feature (1)..(25): SEQ ID NO: 5152; WAN024CXR; Start 164; Stop 188
cagaattaggattgaatattgacga

SEQ ID NO: 401643 - DNA, 25 bp, Artificial
  probe
  misc_feature (1)..(25): SEQ ID NO: 5152; WAN024CXR; Start 162; Stop 186
tgcagaattaggattgaatattgac

SEQ ID NO: 401644 - DNA, 25 bp, Artificial
  probe
  misc_feature (1)..(25): SEQ ID NO: 5152; WAN024CXR; Start 110; Stop 134
ctgttgttggtaaagataaatctgg

SEQ ID NO: 401645 - DNA, 25 bp, Artificial
  probe
  misc_feature (1)..(25): SEQ ID NO: 5152; WAN024CXR; Start 312; Stop 336
aatcaatattcagagtgcagcgatt

SEQ ID NO: 401646 - DNA, 25 bp, Artificial
  probe
  misc_feature (1)..(25): SEQ ID NO: 5152; WAN024CXR; Start 77; Stop 101
agaattggagtttacttatgaaagc

SEQ ID NO: 401647 - DNA, 25 bp, Artificial
  probe
  misc_feature (1)..(25): SEQ ID NO: 5152; WAN024CXR; Start 171; Stop 195
aggattgaatattgacgatatctct

SEQ ID NO: 401648 - DNA, 25 bp, Artificial
  probe
  misc_feature (1)..(25): SEQ ID NO: 5152; WAN024CXR; Start 112; Stop 136
gttgttggtaaagataaatctggaa

SEQ ID NO: 401649 - DNA, 25 bp, Artificial
  probe
  misc_feature (1)..(25): SEQ ID NO: 5152; WAN024CXR; Start 109; Stop 133
actgttgttggtaaagataaatctg

SEQ ID NO: 401650 - DNA, 25 bp, Artificial
  probe
  misc_feature (1)..(25): SEQ ID NO: 5152; WAN024CXR; Start 313; Stop 337
atcaatattcagagtgcagcgattt

SEQ ID NO: 401651 - DNA, 25 bp, Artificial
  probe
  misc_feature (1)..(25): SEQ ID NO: 5152; WAN024CXR; Start 311; Stop 335
aaatcaatattcagagtgcagcgat

SEQ ID NO: 401652 - DNA, 25 bp, Artificial
  probe
  misc_feature (1)..(25): SEQ ID NO: 5152; WAN024CXR; Start 161; Stop 185
ttgcagaattaggattgaatattga

SEQ ID NO: 401653 - DNA, 25 bp, Artificial
  probe
  misc_feature (1)..(25): SEQ ID NO: 5152; WAN024CXR; Start 172; Stop 196
ggattgaatattgacgatatctctc

SEQ ID NO: 401654 - DNA, 25 bp, Artificial
  probe
  misc_feature (1)..(25): SEQ ID NO: 5152; WAN024CXR; Start 122; Stop 146
aagataaatctggaattgttgcagg

SEQ ID NO: 401655 - DNA, 25 bp, Artificial
  probe
  misc_feature (1)..(25): SEQ ID NO: 5152; WAN024CXR; Start 119; Stop 143
gtaaagataaatctggaattgttgc

SEQ ID NO: 401656 - DNA, 25 bp, Artificial
  probe
  misc_feature (1)..(25): SEQ ID NO: 5152; WAN024CXR; Start 165; Stop 189
agaattaggattgaatattgacgat

SEQ ID NO: 401657 - DNA, 25 bp, Artificial
  probe
  misc_feature (1)..(25): SEQ ID NO: 5152; WAN024CXR; Start 124; Stop 148
gataaatctggaattgttgcaggtg

SEQ ID NO: 401658 - DNA, 25 bp, Artificial
  probe
  misc_feature (1)..(25): SEQ ID NO: 5152; WAN024CXR; Start 123; Stop 147
agataaatctggaattgttgcaggt

SEQ ID NO: 401659 - DNA, 25 bp, Artificial
  probe
  misc_feature (1)..(25): SEQ ID NO: 5152; WAN024CXR; Start 125; Stop 149
ataaatctggaattgttgcaggtgt

SEQ ID NO: 401660 - DNA, 25 bp, Artificial
  probe
  misc_feature (1)..(25): SEQ ID NO: 5152; WAN024CXR; Start 108; Stop 132
aactgttgttggtaaagataaatct

SEQ ID NO: 401661 - DNA, 25 bp, Artificial
  probe
  misc_feature (1)..(25): SEQ ID NO: 5152; WAN024CXR; Start 126; Stop 150
taaatctggaattgttgcaggtgtt

SEQ ID NO: 401662 - DNA, 25 bp, Artificial
  probe
  misc_feature (1)..(25): SEQ ID NO: 5152; WAN024CXR; Start 121; Stop 145
aaagataaatctggaattgttgcag

SEQ ID NO: 401663 - DNA, 25 bp, Artificial
  probe
  misc_feature (1)..(25): SEQ ID NO: 5152; WAN024CXR; Start 135; Stop 159
aattgttgcaggtgtttctggtaaa

SEQ ID NO: 401664 - DNA, 25 bp, Artificial
  probe
  misc_feature (1)..(25): SEQ ID NO: 5152; WAN024CXR; Start 117; Stop 141
tggtaaagataaatctggaattgtt

SEQ ID NO: 401665 - DNA, 25 bp, Artificial
  probe
  misc_feature (1)..(25): SEQ ID NO: 5152; WAN024CXR; Start 116; Stop 140
ttggtaaagataaatctggaattgt

SEQ ID NO: 401666 - DNA, 25 bp, Artificial
  probe
  misc_feature (1)..(25): SEQ ID NO: 5152; WAN024CXR; Start 114; Stop 138
tgttggtaaagataaatctggaatt

SEQ ID NO: 401667 - DNA, 25 bp, Artificial
  probe
  misc_feature (1)..(25): SEQ ID NO: 5152; WAN024CXR; Start 113; Stop 137
ttgttggtaaagataaatctggaat

SEQ ID NO: 401668 - DNA, 25 bp, Artificial
  probe
  misc_feature (1)..(25): SEQ ID NO: 5152; WAN024CXR; Start 287; Stop 311
cttttgggcaaactttgaatgtaaa

SEQ ID NO: 401669 - DNA, 25 bp, Artificial
  probe
  misc_feature (1)..(25): SEQ ID NO: 5152; WAN024CXR; Start 127; Stop 151
aaatctggaattgttgcaggtgttt

SEQ ID NO: 401670 - DNA, 25 bp, Artificial
  probe
  misc_feature (1)..(25): SEQ ID NO: 5152; WAN024CXR; Start 118; Stop 142
ggtaaagataaatctggaattgttg

SEQ ID NO: 401671 - DNA, 25 bp, Artificial
  probe
  misc_feature (1)..(25): SEQ ID NO: 5152; WAN024CXR; Start 115; Stop 139
gttggtaaagataaatctggaattg

SEQ ID NO: 401672 - DNA, 25 bp, Artificial
  probe
  misc_feature (1)..(25): SEQ ID NO: 5152; WAN024CXR; Start 43; Stop 67
atcctgtttaatgttaaggtttctt

SEQ ID NO: 401673 - DNA, 25 bp, Artificial
  probe
  misc_feature (1)..(25): SEQ ID NO: 5153; WAN024C59; Start 228; Stop 252
tatggaagtctgcgattgattgttc

SEQ ID NO: 401674 - DNA, 25 bp, Artificial
  probe
  misc_feature (1)..(25): SEQ ID NO: 5153; WAN024C59; Start 227; Stop 251
gtatggaagtctgcgattgattgtt

SEQ ID NO: 401675 - DNA, 25 bp, Artificial
  probe
  misc_feature (1)..(25): SEQ ID NO: 5153; WAN024C59; Start 35; Stop 59
aatggttcaatcaagtgagcaacta

SEQ ID NO: 401676 - DNA, 25 bp, Artificial
  probe
  misc_feature (1)..(25): SEQ ID NO: 5153; WAN024C59; Start 158; Stop 182
ttattggtacgagagatcagagtcc

SEQ ID NO: 401677 - DNA, 25 bp, Artificial
  probe
  misc_feature (1)..(25): SEQ ID NO: 5153; WAN024C59; Start 36; Stop 60
atggttcaatcaagtgagcaactac

SEQ ID NO: 401678 - DNA, 25 bp, Artificial
  probe
  misc_feature (1)..(25): SEQ ID NO: 5153; WAN024C59; Start 278; Stop 302
aattcagtcacaccttctacatagg

SEQ ID NO: 401679 - DNA, 25 bp, Artificial
  probe
  misc_feature (1)..(25): SEQ ID NO: 5153; WAN024C59; Start 225; Stop 249
gtgtatggaagtctgcgattgattg

SEQ ID NO: 401680 - DNA, 25 bp, Artificial
  probe
  misc_feature (1)..(25): SEQ ID NO: 5153; WAN024C59; Start 226; Stop 250
tgtatggaagtctgcgattgattgt

SEQ ID NO: 401681 - DNA, 25 bp, Artificial
  probe
  misc_feature (1)..(25): SEQ ID NO: 5153; WAN024C59; Start 224; Stop 248
tgtgtatggaagtctgcgattgatt

SEQ ID NO: 401682 - DNA, 25 bp, Artificial
  probe
  misc_feature (1)..(25): SEQ ID NO: 5153; WAN024C59; Start 206; Stop 230
tagtcaactgcttccatgtgtgtat

SEQ ID NO: 401683 - DNA, 25 bp, Artificial
  probe
  misc_feature (1)..(25): SEQ ID NO: 5153; WAN024C59; Start 205; Stop 229
atagtcaactgcttccatgtgtgta

SEQ ID NO: 401684 - DNA, 25 bp, Artificial
  probe
  misc_feature (1)..(25): SEQ ID NO: 5153; WAN024C59; Start 43; Stop 67
aatcaagtgagcaactacacgaatg

SEQ ID NO: 401685 - DNA, 25 bp, Artificial
  probe
  misc_feature (1)..(25): SEQ ID NO: 5153; WAN024C59; Start 42; Stop 66
caatcaagtgagcaactacacgaat

SEQ ID NO: 401686 - DNA, 25 bp, Artificial
  probe
  misc_feature (1)..(25): SEQ ID NO: 5153; WAN024C59; Start 275; Stop 299
tcaaattcagtcacaccttctacat

SEQ ID NO: 401687 - DNA, 25 bp, Artificial
  probe
  misc_feature (1)..(25): SEQ ID NO: 5153; WAN024C59; Start 274; Stop 298
atcaaattcagtcacaccttctaca

SEQ ID NO: 401688 - DNA, 25 bp, Artificial
  probe
  misc_feature (1)..(25): SEQ ID NO: 5153; WAN024C59; Start 229; Stop 253
atggaagtctgcgattgattgttct

SEQ ID NO: 401689 - DNA, 25 bp, Artificial
  probe
  misc_feature (1)..(25): SEQ ID NO: 5153; WAN024C59; Start 37; Stop 61
tggttcaatcaagtgagcaactaca

SEQ ID NO: 401690 - DNA, 25 bp, Artificial
  probe
  misc_feature (1)..(25): SEQ ID NO: 5153; WAN024C59; Start 279; Stop 303
attcagtcacaccttctacataggc

SEQ ID NO: 401691 - DNA, 25 bp, Artificial
  probe
  misc_feature (1)..(25): SEQ ID NO: 5153; WAN024C59; Start 223; Stop 247
gtgtgtatggaagtctgcgattgat

SEQ ID NO: 401692 - DNA, 25 bp, Artificial
  probe
  misc_feature (1)..(25): SEQ ID NO: 5153; WAN024C59; Start 276; Stop 300
caaattcagtcacaccttctacata

SEQ ID NO: 401693 - DNA, 25 bp, Artificial
  probe
  misc_feature (1)..(25): SEQ ID NO: 5153; WAN024C59; Start 31; Stop 55
cataaatggttcaatcaagtgagca

SEQ ID NO: 401694 - DNA, 25 bp, Artificial
  probe
  misc_feature (1)..(25): SEQ ID NO: 5153; WAN024C59; Start 30; Stop 54
tcataaatggttcaatcaagtgagc

SEQ ID NO: 401695 - DNA, 25 bp, Artificial
  probe
  misc_feature (1)..(25): SEQ ID NO: 5153; WAN024C59; Start 33; Stop 57
taaatggttcaatcaagtgagcaac

SEQ ID NO: 401696 - DNA, 25 bp, Artificial
  probe
  misc_feature (1)..(25): SEQ ID NO: 5153; WAN024C59; Start 38; Stop 62
ggttcaatcaagtgagcaactacac

SEQ ID NO: 401697 - DNA, 25 bp, Artificial
  probe
  misc_feature (1)..(25): SEQ ID NO: 5153; WAN024C59; Start 277; Stop 301
aaattcagtcacaccttctacatag

SEQ ID NO: 401698 - DNA, 25 bp, Artificial
  probe
  misc_feature (1)..(25): SEQ ID NO: 5153; WAN024C59; Start 273; Stop 297
gatcaaattcagtcacaccttctac

SEQ ID NO: 401699 - DNA, 25 bp, Artificial
  probe
  misc_feature (1)..(25): SEQ ID NO: 5153; WAN024C59; Start 157; Stop 181
tttattggtacgagagatcagagtc

SEQ ID NO: 401700 - DNA, 25 bp, Artificial
  probe
  misc_feature (1)..(25): SEQ ID NO: 5153; WAN024C59; Start 32; Stop 56
ataaatggttcaatcaagtgagcaa

SEQ ID NO: 401701 - DNA, 25 bp, Artificial
  probe
  misc_feature (1)..(25): SEQ ID NO: 5153; WAN024C59; Start 156; Stop 180
atttattggtacgagagatcagagt

SEQ ID NO: 401702 - DNA, 25 bp, Artificial
  probe
  misc_feature (1)..(25): SEQ ID NO: 5153; WAN024C59; Start 221; Stop 245
atgtgtgtatggaagtctgcgattg

SEQ ID NO: 401703 - DNA, 25 bp, Artificial
  probe
  misc_feature (1)..(25): SEQ ID NO: 5153; WAN024C59; Start 39; Stop 63
gttcaatcaagtgagcaactacacg

SEQ ID NO: 401704 - DNA, 25 bp, Artificial
  probe
  misc_feature (1)..(25): SEQ ID NO: 5153; WAN024C59; Start 159; Stop 183
tattggtacgagagatcagagtcca

SEQ ID NO: 401705 - DNA, 25 bp, Artificial
  probe
  misc_feature (1)..(25): SEQ ID NO: 5153; WAN024C59; Start 41; Stop 65
tcaatcaagtgagcaactacacgaa

SEQ ID NO: 401706 - DNA, 25 bp, Artificial
  probe
  misc_feature (1)..(25): SEQ ID NO: 5154; WAN024DVV; Start 288; Stop 312
ctaccattccattatgattaaccgt

SEQ ID NO: 401707 - DNA, 25 bp, Artificial
  probe
  misc_feature (1)..(25): SEQ ID NO: 5154; WAN024DVV; Start 280; Stop 304
agacatctctaccattccattatga

SEQ ID NO: 401708 - DNA, 25 bp, Artificial
  probe
  misc_feature (1)..(25): SEQ ID NO: 5154; WAN024DVV; Start 287; Stop 311
tctaccattccattatgattaaccg

SEQ ID NO: 401709 - DNA, 25 bp, Artificial
  probe
  misc_feature (1)..(25): SEQ ID NO: 5154; WAN024DVV; Start 290; Stop 314
accattccattatgattaaccgtaa

SEQ ID NO: 401710 - DNA, 25 bp, Artificial
  probe
  misc_feature (1)..(25): SEQ ID NO: 5154; WAN024DVV; Start 281; Stop 305
gacatctctaccattccattatgat

SEQ ID NO: 401711 - DNA, 25 bp, Artificial
  probe
  misc_feature (1)..(25): SEQ ID NO: 5154; WAN024DVV; Start 289; Stop 313
taccattccattatgattaaccgta

SEQ ID NO: 401712 - DNA, 25 bp, Artificial
  probe
  misc_feature (1)..(25): SEQ ID NO: 5154; WAN024DVV; Start 282; Stop 306
acatctctaccattccattatgatt

SEQ ID NO: 401713 - DNA, 25 bp, Artificial
  probe
  misc_feature (1)..(25): SEQ ID NO: 5154; WAN024DVV; Start 371; Stop 395
tcgccacttatatttatctgaggtt

SEQ ID NO: 401714 - DNA, 25 bp, Artificial
  probe
  misc_feature (1)..(25): SEQ ID NO: 5154; WAN024DVV; Start 370; Stop 394
atcgccacttatatttatctgaggt

SEQ ID NO: 401715 - DNA, 25 bp, Artificial
  probe
  misc_feature (1)..(25): SEQ ID NO: 5154; WAN024DVV; Start 291; Stop 315
ccattccattatgattaaccgtaat

SEQ ID NO: 401716 - DNA, 25 bp, Artificial
  probe
  misc_feature (1)..(25): SEQ ID NO: 5154; WAN024DVV; Start 372; Stop 396
cgccacttatatttatctgaggttt

SEQ ID NO: 401717 - DNA, 25 bp, Artificial
  probe
  misc_feature (1)..(25): SEQ ID NO: 5154; WAN024DVV; Start 159; Stop 183
ggtctccattgtaatctacagaact

SEQ ID NO: 401718 - DNA, 25 bp, Artificial
  probe
  misc_feature (1)..(25): SEQ ID NO: 5154; WAN024DVV; Start 123; Stop 147
aattaccatttctgttaccatccac

SEQ ID NO: 401719 - DNA, 25 bp, Artificial
  probe
  misc_feature (1)..(25): SEQ ID NO: 5154; WAN024DVV; Start 149; Stop 173
gctctattagggtctccattgtaat

SEQ ID NO: 401720 - DNA, 25 bp, Artificial
  probe
  misc_feature (1)..(25): SEQ ID NO: 5154; WAN024DVV; Start 32; Stop 56
ttaacaagcccaactttatccattt

SEQ ID NO: 401721 - DNA, 25 bp, Artificial
  probe
  misc_feature (1)..(25): SEQ ID NO: 5154; WAN024DVV; Start 31; Stop 55
tttaacaagcccaactttatccatt

SEQ ID NO: 401722 - DNA, 25 bp, Artificial
  probe
  misc_feature (1)..(25): SEQ ID NO: 5154; WAN024DVV; Start 231; Stop 255
atttatctggtgttgggaaagagac

SEQ ID NO: 401723 - DNA, 25 bp, Artificial
  probe
  misc_feature (1)..(25): SEQ ID NO: 5154; WAN024DVV; Start 230; Stop 254
aatttatctggtgttgggaaagaga

SEQ ID NO: 401724 - DNA, 25 bp, Artificial
  probe
  misc_feature (1)..(25): SEQ ID NO: 5154; WAN024DVV; Start 286; Stop 310
ctctaccattccattatgattaacc

SEQ ID NO: 401725 - DNA, 25 bp, Artificial
  probe
  misc_feature (1)..(25): SEQ ID NO: 5154; WAN024DVV; Start 84; Stop 108
gattatctgccctagtgtgtgttac

SEQ ID NO: 401726 - DNA, 25 bp, Artificial
  probe
  misc_feature (1)..(25): SEQ ID NO: 5154; WAN024DVV; Start 135; Stop 159
tgttaccatccacagctctattagg

SEQ ID NO: 401727 - DNA, 25 bp, Artificial
  probe
  misc_feature (1)..(25): SEQ ID NO: 5154; WAN024DVV; Start 171; Stop 195
aatctacagaactttgtgttgttgg

SEQ ID NO: 401728 - DNA, 25 bp, Artificial
  probe
  misc_feature (1)..(25): SEQ ID NO: 5154; WAN024DVV; Start 124; Stop 148
attaccatttctgttaccatccaca

SEQ ID NO: 401729 - DNA, 25 bp, Artificial
  probe
  misc_feature (1)..(25): SEQ ID NO: 5154; WAN024DVV; Start 232; Stop 256
tttatctggtgttgggaaagagact

SEQ ID NO: 401730 - DNA, 25 bp, Artificial
  probe
  misc_feature (1)..(25): SEQ ID NO: 5154; WAN024DVV; Start 174; Stop 198
ctacagaactttgtgttgttggttt

SEQ ID NO: 401731 - DNA, 25 bp, Artificial
  probe
  misc_feature (1)..(25): SEQ ID NO: 5154; WAN024DVV; Start 160; Stop 184
gtctccattgtaatctacagaactt

SEQ ID NO: 401732 - DNA, 25 bp, Artificial
  probe
  misc_feature (1)..(25): SEQ ID NO: 5154; WAN024DVV; Start 172; Stop 196
atctacagaactttgtgttgttggt

SEQ ID NO: 401733 - DNA, 25 bp, Artificial
  probe
  misc_feature (1)..(25): SEQ ID NO: 5154; WAN024DVV; Start 173; Stop 197
tctacagaactttgtgttgttggtt

SEQ ID NO: 401734 - DNA, 25 bp, Artificial
  probe
  misc_feature (1)..(25): SEQ ID NO: 5154; WAN024DVV; Start 151; Stop 175
tctattagggtctccattgtaatct

SEQ ID NO: 401735 - DNA, 25 bp, Artificial
  probe
  misc_feature (1)..(25): SEQ ID NO: 5154; WAN024DVV; Start 369; Stop 393
tatcgccacttatatttatctgagg

SEQ ID NO: 401736 - DNA, 25 bp, Artificial
  probe
  misc_feature (1)..(25): SEQ ID NO: 5154; WAN024DVV; Start 279; Stop 303
tagacatctctaccattccattatg

SEQ ID NO: 401737 - DNA, 25 bp, Artificial
  probe
  misc_feature (1)..(25): SEQ ID NO: 5154; WAN024DVV; Start 83; Stop 107
ggattatctgccctagtgtgtgtta

SEQ ID NO: 401738 - DNA, 25 bp, Artificial
  probe
  misc_feature (1)..(25): SEQ ID NO: 5154; WAN024DVV; Start 150; Stop 174
ctctattagggtctccattgtaatc

SEQ ID NO: 401739 - DNA, 25 bp, Artificial
  probe
  misc_feature (1)..(25): SEQ ID NO: 5155; WAN024EUI; Start 205; Stop 229
attgtcataggctacatcctgagtt

SEQ ID NO: 401740 - DNA, 25 bp, Artificial
  probe
  misc_feature (1)..(25): SEQ ID NO: 5155; WAN024EUI; Start 208; Stop 232
gtcataggctacatcctgagttctt

SEQ ID NO: 401741 - DNA, 25 bp, Artificial
  probe
  misc_feature (1)..(25): SEQ ID NO: 5155; WAN024EUI; Start 214; Stop 238
ggctacatcctgagttctttcttta

SEQ ID NO: 401742 - DNA, 25 bp, Artificial
  probe
  misc_feature (1)..(25): SEQ ID NO: 5155; WAN024EUI; Start 222; Stop 246
cctgagttctttctttattagcctg

SEQ ID NO: 401743 - DNA, 25 bp, Artificial
  probe
  misc_feature (1)..(25): SEQ ID NO: 5155; WAN024EUI; Start 221; Stop 245
tcctgagttctttctttattagcct

SEQ ID NO: 401744 - DNA, 25 bp, Artificial
  probe
  misc_feature (1)..(25): SEQ ID NO: 5155; WAN024EUI; Start 206; Stop 230
ttgtcataggctacatcctgagttc

SEQ ID NO: 401745 - DNA, 25 bp, Artificial
  probe
  misc_feature (1)..(25): SEQ ID NO: 5155; WAN024EUI; Start 204; Stop 228
cattgtcataggctacatcctgagt

SEQ ID NO: 401746 - DNA, 25 bp, Artificial
  probe
  misc_feature (1)..(25): SEQ ID NO: 5155; WAN024EUI; Start 24; Stop 48
gcacaaacagagaagatggtataat

SEQ ID NO: 401747 - DNA, 25 bp, Artificial
  probe
  misc_feature (1)..(25): SEQ ID NO: 5155; WAN024EUI; Start 23; Stop 47
cgcacaaacagagaagatggtataa

SEQ ID NO: 401748 - DNA, 25 bp, Artificial
  probe
  misc_feature (1)..(25): SEQ ID NO: 5155; WAN024EUI; Start 223; Stop 247
ctgagttctttctttattagcctgt

SEQ ID NO: 401749 - DNA, 25 bp, Artificial
  probe
  misc_feature (1)..(25): SEQ ID NO: 5155; WAN024EUI; Start 220; Stop 244
atcctgagttctttctttattagcc

SEQ ID NO: 401750 - DNA, 25 bp, Artificial
  probe
  misc_feature (1)..(25): SEQ ID NO: 5155; WAN024EUI; Start 215; Stop 239
gctacatcctgagttctttctttat

SEQ ID NO: 401751 - DNA, 25 bp, Artificial
  probe
  misc_feature (1)..(25): SEQ ID NO: 5155; WAN024EUI; Start 30; Stop 54
acagagaagatggtataatagtcaa

SEQ ID NO: 401752 - DNA, 25 bp, Artificial
  probe
  misc_feature (1)..(25): SEQ ID NO: 5155; WAN024EUI; Start 29; Stop 53
aacagagaagatggtataatagtca

SEQ ID NO: 401753 - DNA, 25 bp, Artificial
  probe
  misc_feature (1)..(25): SEQ ID NO: 5155; WAN024EUI; Start 207; Stop 231
tgtcataggctacatcctgagttct

SEQ ID NO: 401754 - DNA, 25 bp, Artificial
  probe
  misc_feature (1)..(25): SEQ ID NO: 5155; WAN024EUI; Start 234; Stop 258
ctttattagcctgtatcatttgtgg

SEQ ID NO: 401755 - DNA, 25 bp, Artificial
  probe
  misc_feature (1)..(25): SEQ ID NO: 5155; WAN024EUI; Start 219; Stop 243
catcctgagttctttctttattagc

SEQ ID NO: 401756 - DNA, 25 bp, Artificial
  probe
  misc_feature (1)..(25): SEQ ID NO: 5155; WAN024EUI; Start 224; Stop 248
tgagttctttctttattagcctgta

SEQ ID NO: 401757 - DNA, 25 bp, Artificial
  probe
  misc_feature (1)..(25): SEQ ID NO: 5155; WAN024EUI; Start 211; Stop 235
ataggctacatcctgagttctttct

SEQ ID NO: 401758 - DNA, 25 bp, Artificial
  probe
  misc_feature (1)..(25): SEQ ID NO: 5155; WAN024EUI; Start 210; Stop 234
cataggctacatcctgagttctttc

SEQ ID NO: 401759 - DNA, 25 bp, Artificial
  probe
  misc_feature (1)..(25): SEQ ID NO: 5155; WAN024EUI; Start 212; Stop 236
taggctacatcctgagttctttctt

SEQ ID NO: 401760 - DNA, 25 bp, Artificial
  probe
  misc_feature (1)..(25): SEQ ID NO: 5155; WAN024EUI; Start 209; Stop 233
tcataggctacatcctgagttcttt

SEQ ID NO: 401761 - DNA, 25 bp, Artificial
  probe
  misc_feature (1)..(25): SEQ ID NO: 5155; WAN024EUI; Start 203; Stop 227
gcattgtcataggctacatcctgag

SEQ ID NO: 401762 - DNA, 25 bp, Artificial
  probe
  misc_feature (1)..(25): SEQ ID NO: 5155; WAN024EUI; Start 213; Stop 237
aggctacatcctgagttctttcttt

SEQ ID NO: 401763 - DNA, 25 bp, Artificial
  probe
  misc_feature (1)..(25): SEQ ID NO: 5155; WAN024EUI; Start 233; Stop 257
tctttattagcctgtatcatttgtg

SEQ ID NO: 401764 - DNA, 25 bp, Artificial
  probe
  misc_feature (1)..(25): SEQ ID NO: 5155; WAN024EUI; Start 227; Stop 251
gttctttctttattagcctgtatca

SEQ ID NO: 401765 - DNA, 25 bp, Artificial
  probe
  misc_feature (1)..(25): SEQ ID NO: 5155; WAN024EUI; Start 120; Stop 144
aaaggatcttgttagatgggagaag

SEQ ID NO: 401766 - DNA, 25 bp, Artificial
  probe
  misc_feature (1)..(25): SEQ ID NO: 5155; WAN024EUI; Start 124; Stop 148
gatcttgttagatgggagaaggttt

SEQ ID NO: 401767 - DNA, 25 bp, Artificial
  probe
  misc_feature (1)..(25): SEQ ID NO: 5155; WAN024EUI; Start 119; Stop 143
taaaggatcttgttagatgggagaa

SEQ ID NO: 401768 - DNA, 25 bp, Artificial
  probe
  misc_feature (1)..(25): SEQ ID NO: 5155; WAN024EUI; Start 118; Stop 142
ttaaaggatcttgttagatgggaga

SEQ ID NO: 401769 - DNA, 25 bp, Artificial
  probe
  misc_feature (1)..(25): SEQ ID NO: 5155; WAN024EUI; Start 38; Stop 62
gatggtataatagtcaaatggttca

SEQ ID NO: 401770 - DNA, 25 bp, Artificial
  probe
  misc_feature (1)..(25): SEQ ID NO: 5155; WAN024EUI; Start 226; Stop 250
agttctttctttattagcctgtatc

SEQ ID NO: 401771 - DNA, 25 bp, Artificial
  probe
  misc_feature (1)..(25): SEQ ID NO: 5155; WAN024EUI; Start 225; Stop 249
gagttctttctttattagcctgtat

SEQ ID NO: 401772 - DNA, 25 bp, Artificial
  probe
  misc_feature (1)..(25): SEQ ID NO: 5156; WAN024DZ8; Start 679; Stop 703
ctggttaatgaagaagatggcaatt

SEQ ID NO: 401773 - DNA, 25 bp, Artificial
  probe
  misc_feature (1)..(25): SEQ ID NO: 5156; WAN024DZ8; Start 678; Stop 702
tctggttaatgaagaagatggcaat

SEQ ID NO: 401774 - DNA, 25 bp, Artificial
  probe
  misc_feature (1)..(25): SEQ ID NO: 5156; WAN024DZ8; Start 479; Stop 503
ctattgagacagtagaaggaagcgt

SEQ ID NO: 401775 - DNA, 25 bp, Artificial
  probe
  misc_feature (1)..(25): SEQ ID NO: 5156; WAN024DZ8; Start 612; Stop 636
aactattgaagcgattgagtctatc

SEQ ID NO: 401776 - DNA, 25 bp, Artificial
  probe
  misc_feature (1)..(25): SEQ ID NO: 5156; WAN024DZ8; Start 127; Stop 151
tcttgtagattcgcagagatcattc

SEQ ID NO: 401777 - DNA, 25 bp, Artificial
  probe
  misc_feature (1)..(25): SEQ ID NO: 5156; WAN024DZ8; Start 583; Stop 607
cgtgtaactgctattgattcaagag

SEQ ID NO: 401778 - DNA, 25 bp, Artificial
  probe
  misc_feature (1)..(25): SEQ ID NO: 5156; WAN024DZ8; Start 587; Stop 611
taactgctattgattcaagagacca

SEQ ID NO: 401779 - DNA, 25 bp, Artificial
  probe
  misc_feature (1)..(25): SEQ ID NO: 5156; WAN024DZ8; Start 588; Stop 612
aactgctattgattcaagagaccaa

SEQ ID NO: 401780 - DNA, 25 bp, Artificial
  probe
  misc_feature (1)..(25): SEQ ID NO: 5156; WAN024DZ8; Start 586; Stop 610
gtaactgctattgattcaagagacc

SEQ ID NO: 401781 - DNA, 25 bp, Artificial
  probe
  misc_feature (1)..(25): SEQ ID NO: 5156; WAN024DZ8; Start 480; Stop 504
tattgagacagtagaaggaagcgtg

SEQ ID NO: 401782 - DNA, 25 bp, Artificial
  probe
  misc_feature (1)..(25): SEQ ID NO: 5156; WAN024DZ8; Start 580; Stop 604
ttccgtgtaactgctattgattcaa

SEQ ID NO: 401783 - DNA, 25 bp, Artificial
  probe
  misc_feature (1)..(25): SEQ ID NO: 5156; WAN024DZ8; Start 585; Stop 609
tgtaactgctattgattcaagagac

SEQ ID NO: 401784 - DNA, 25 bp, Artificial
  probe
  misc_feature (1)..(25): SEQ ID NO: 5156; WAN024DZ8; Start 584; Stop 608
gtgtaactgctattgattcaagaga

SEQ ID NO: 401785 - DNA, 25 bp, Artificial
  probe
  misc_feature (1)..(25): SEQ ID NO: 5156; WAN024DZ8; Start 582; Stop 606
ccgtgtaactgctattgattcaaga

SEQ ID NO: 401786 - DNA, 25 bp, Artificial
  probe
  misc_feature (1)..(25): SEQ ID NO: 5156; WAN024DZ8; Start 581; Stop 605
tccgtgtaactgctattgattcaag

SEQ ID NO: 401787 - DNA, 25 bp, Artificial
  probe
  misc_feature (1)..(25): SEQ ID NO: 5156; WAN024DZ8; Start 128; Stop 152
cttgtagattcgcagagatcattcg

SEQ ID NO: 401788 - DNA, 25 bp, Artificial
  probe
  misc_feature (1)..(25): SEQ ID NO: 5156; WAN024DZ8; Start 477; Stop 501
ctctattgagacagtagaaggaagc

SEQ ID NO: 401789 - DNA, 25 bp, Artificial
  probe
  misc_feature (1)..(25): SEQ ID NO: 5156; WAN024DZ8; Start 474; Stop 498
tcactctattgagacagtagaagga

SEQ ID NO: 401790 - DNA, 25 bp, Artificial
  probe
  misc_feature (1)..(25): SEQ ID NO: 5156; WAN024DZ8; Start 475; Stop 499
cactctattgagacagtagaaggaa

SEQ ID NO: 401791 - DNA, 25 bp, Artificial
  probe
  misc_feature (1)..(25): SEQ ID NO: 5156; WAN024DZ8; Start 132; Stop 156
tagattcgcagagatcattcgtcaa

SEQ ID NO: 401792 - DNA, 25 bp, Artificial
  probe
  misc_feature (1)..(25): SEQ ID NO: 5156; WAN024DZ8; Start 476; Stop 500
actctattgagacagtagaaggaag

SEQ ID NO: 401793 - DNA, 25 bp, Artificial
  probe
  misc_feature (1)..(25): SEQ ID NO: 5156; WAN024DZ8; Start 10; Stop 34
atgataggactatcgttagcattcg

SEQ ID NO: 401794 - DNA, 25 bp, Artificial
  probe
  misc_feature (1)..(25): SEQ ID NO: 5156; WAN024DZ8; Start 129; Stop 153
ttgtagattcgcagagatcattcgt

SEQ ID NO: 401795 - DNA, 25 bp, Artificial
  probe
  misc_feature (1)..(25): SEQ ID NO: 5156; WAN024DZ8; Start 578; Stop 602
atttccgtgtaactgctattgattc

SEQ ID NO: 401796 - DNA, 25 bp, Artificial
  probe
  misc_feature (1)..(25): SEQ ID NO: 5156; WAN024DZ8; Start 554; Stop 578
aaagcattaaagatttggcacctaa

SEQ ID NO: 401797 - DNA, 25 bp, Artificial
  probe
  misc_feature (1)..(25): SEQ ID NO: 5156; WAN024DZ8; Start 514; Stop 538
ctatttgggaaagaaagtcaggtca

SEQ ID NO: 401798 - DNA, 25 bp, Artificial
  probe
  misc_feature (1)..(25): SEQ ID NO: 5156; WAN024DZ8; Start 544; Stop 568
gtccatcgtcaaagcattaaagatt

SEQ ID NO: 401799 - DNA, 25 bp, Artificial
  probe
  misc_feature (1)..(25): SEQ ID NO: 5156; WAN024DZ8; Start 478; Stop 502
tctattgagacagtagaaggaagcg

SEQ ID NO: 401800 - DNA, 25 bp, Artificial
  probe
  misc_feature (1)..(25): SEQ ID NO: 5156; WAN024DZ8; Start 574; Stop 598
cctaatttccgtgtaactgctattg

SEQ ID NO: 401801 - DNA, 25 bp, Artificial
  probe
  misc_feature (1)..(25): SEQ ID NO: 5156; WAN024DZ8; Start 560; Stop 584
ttaaagatttggcacctaatttccg

SEQ ID NO: 401802 - DNA, 25 bp, Artificial
  probe
  misc_feature (1)..(25): SEQ ID NO: 5156; WAN024DZ8; Start 573; Stop 597
acctaatttccgtgtaactgctatt

SEQ ID NO: 401803 - DNA, 25 bp, Artificial
  probe
  misc_feature (1)..(25): SEQ ID NO: 5156; WAN024DZ8; Start 545; Stop 569
tccatcgtcaaagcattaaagattt

SEQ ID NO: 401804 - DNA, 25 bp, Artificial
  probe
  misc_feature (1)..(25): SEQ ID NO: 5156; WAN024DZ8; Start 680; Stop 704
tggttaatgaagaagatggcaattt

SEQ ID NO: 401805 - DNA, 25 bp, Artificial
  probe
  misc_feature (1)..(25): SEQ ID NO: 5157; WAN024CTV; Start 37; Stop 61
gaaggtcatctcaatcatcgcaaca

SEQ ID NO: 401806 - DNA, 25 bp, Artificial
  probe
  misc_feature (1)..(25): SEQ ID NO: 5157; WAN024CTV; Start 38; Stop 62
aaggtcatctcaatcatcgcaacac

SEQ ID NO: 401807 - DNA, 25 bp, Artificial
  probe
  misc_feature (1)..(25): SEQ ID NO: 5157; WAN024CTV; Start 33; Stop 57
caaggaaggtcatctcaatcatcgc

SEQ ID NO: 401808 - DNA, 25 bp, Artificial
  probe
  misc_feature (1)..(25): SEQ ID NO: 5157; WAN024CTV; Start 32; Stop 56
gcaaggaaggtcatctcaatcatcg

SEQ ID NO: 401809 - DNA, 25 bp, Artificial
  probe
  misc_feature (1)..(25): SEQ ID NO: 5157; WAN024CTV; Start 36; Stop 60
ggaaggtcatctcaatcatcgcaac

SEQ ID NO: 401810 - DNA, 25 bp, Artificial
  probe
  misc_feature (1)..(25): SEQ ID NO: 5157; WAN024CTV; Start 31; Stop 55
tgcaaggaaggtcatctcaatcatc

SEQ ID NO: 401811 - DNA, 25 bp, Artificial
  probe
  misc_feature (1)..(25): SEQ ID NO: 5157; WAN024CTV; Start 35; Stop 59
aggaaggtcatctcaatcatcgcaa

SEQ ID NO: 401812 - DNA, 25 bp, Artificial
  probe
  misc_feature (1)..(25): SEQ ID NO: 5157; WAN024CTV; Start 34; Stop 58
aaggaaggtcatctcaatcatcgca

SEQ ID NO: 401813 - DNA, 25 bp, Artificial
  probe
  misc_feature (1)..(25): SEQ ID NO: 5157; WAN024CTV; Start 30; Stop 54
gtgcaaggaaggtcatctcaatcat

SEQ ID NO: 401814 - DNA, 25 bp, Artificial
  probe
  misc_feature (1)..(25): SEQ ID NO: 5157; WAN024CTV; Start 8; Stop 32
ctttcttgaggcaattcacttggtg

SEQ ID NO: 401815 - DNA, 25 bp, Artificial
  probe
  misc_feature (1)..(25): SEQ ID NO: 5157; WAN024CTV; Start 115; Stop 139
agctttaaatgttacgttgatttca

SEQ ID NO: 401816 - DNA, 25 bp, Artificial
  probe
  misc_feature (1)..(25): SEQ ID NO: 5157; WAN024CTV; Start 122; Stop 146
aatgttacgttgatttcatcaccag

SEQ ID NO: 401817 - DNA, 25 bp, Artificial
  probe
  misc_feature (1)..(25): SEQ ID NO: 5157; WAN024CTV; Start 121; Stop 145
aaatgttacgttgatttcatcacca

SEQ ID NO: 401818 - DNA, 25 bp, Artificial
  probe
  misc_feature (1)..(25): SEQ ID NO: 5157; WAN024CTV; Start 116; Stop 140
gctttaaatgttacgttgatttcat

SEQ ID NO: 401819 - DNA, 25 bp, Artificial
  probe
  misc_feature (1)..(25): SEQ ID NO: 5157; WAN024CTV; Start 7; Stop 31
gctttcttgaggcaattcacttggt

SEQ ID NO: 401820 - DNA, 25 bp, Artificial
  probe
  misc_feature (1)..(25): SEQ ID NO: 5157; WAN024CTV; Start 120; Stop 144
taaatgttacgttgatttcatcacc

SEQ ID NO: 401821 - DNA, 25 bp, Artificial
  probe
  misc_feature (1)..(25): SEQ ID NO: 5157; WAN024CTV; Start 27; Stop 51
ttggtgcaaggaaggtcatctcaat

SEQ ID NO: 401822 - DNA, 25 bp, Artificial
  probe
  misc_feature (1)..(25): SEQ ID NO: 5157; WAN024CTV; Start 123; Stop 147
atgttacgttgatttcatcaccagc

SEQ ID NO: 401823 - DNA, 25 bp, Artificial
  probe
  misc_feature (1)..(25): SEQ ID NO: 5157; WAN024CTV; Start 29; Stop 53
ggtgcaaggaaggtcatctcaatca

SEQ ID NO: 401824 - DNA, 25 bp, Artificial
  probe
  misc_feature (1)..(25): SEQ ID NO: 5157; WAN024CTV; Start 28; Stop 52
tggtgcaaggaaggtcatctcaatc

SEQ ID NO: 401825 - DNA, 25 bp, Artificial
  probe
  misc_feature (1)..(25): SEQ ID NO: 5157; WAN024CTV; Start 75; Stop 99
ctttacgctccatacgccatctcat

SEQ ID NO: 401826 - DNA, 25 bp, Artificial
  probe
  misc_feature (1)..(25): SEQ ID NO: 5157; WAN024CTV; Start 5; Stop 29
gtgctttcttgaggcaattcacttg

SEQ ID NO: 401827 - DNA, 25 bp, Artificial
  probe
  misc_feature (1)..(25): SEQ ID NO: 5157; WAN024CTV; Start 1; Stop 25
ttgagtgctttcttgaggcaattca

SEQ ID NO: 401828 - DNA, 25 bp, Artificial
  probe
  misc_feature (1)..(25): SEQ ID NO: 5157; WAN024CTV; Start 124; Stop 148
tgttacgttgatttcatcaccagct

SEQ ID NO: 401829 - DNA, 25 bp, Artificial
  probe
  misc_feature (1)..(25): SEQ ID NO: 5157; WAN024CTV; Start 119; Stop 143
ttaaatgttacgttgatttcatcac

SEQ ID NO: 401830 - DNA, 25 bp, Artificial
  probe
  misc_feature (1)..(25): SEQ ID NO: 5157; WAN024CTV; Start 2; Stop 26
tgagtgctttcttgaggcaattcac

SEQ ID NO: 401831 - DNA, 25 bp, Artificial
  probe
  misc_feature (1)..(25): SEQ ID NO: 5157; WAN024CTV; Start 177; Stop 201
cagcttcccaattttctggattgtt

SEQ ID NO: 401832 - DNA, 25 bp, Artificial
  probe
  misc_feature (1)..(25): SEQ ID NO: 5157; WAN024CTV; Start 117; Stop 141
ctttaaatgttacgttgatttcatc

SEQ ID NO: 401833 - DNA, 25 bp, Artificial
  probe
  misc_feature (1)..(25): SEQ ID NO: 5157; WAN024CTV; Start 6; Stop 30
tgctttcttgaggcaattcacttgg

SEQ ID NO: 401834 - DNA, 25 bp, Artificial
  probe
  misc_feature (1)..(25): SEQ ID NO: 5157; WAN024CTV; Start 118; Stop 142
tttaaatgttacgttgatttcatca

SEQ ID NO: 401835 - DNA, 25 bp, Artificial
  probe
  misc_feature (1)..(25): SEQ ID NO: 5157; WAN024CTV; Start 9; Stop 33
tttcttgaggcaattcacttggtgc

SEQ ID NO: 401836 - DNA, 25 bp, Artificial
  probe
  misc_feature (1)..(25): SEQ ID NO: 5157; WAN024CTV; Start 19; Stop 43
caattcacttggtgcaaggaaggtc

SEQ ID NO: 401837 - DNA, 25 bp, Artificial
  probe
  misc_feature (1)..(25): SEQ ID NO: 5157; WAN024CTV; Start 4; Stop 28
agtgctttcttgaggcaattcactt

SEQ ID NO: 401838 - DNA, 25 bp, Artificial
  probe
  misc_feature (1)..(25): SEQ ID NO: 5158; WAN024FKU; Start 1589; Stop 1613
actatgctaacaatcaagaagacca

SEQ ID NO: 401839 - DNA, 25 bp, Artificial
  probe
  misc_feature (1)..(25): SEQ ID NO: 5158; WAN024FKU; Start 1590; Stop 1614
ctatgctaacaatcaagaagaccac

SEQ ID NO: 401840 - DNA, 25 bp, Artificial
  probe
  misc_feature (1)..(25): SEQ ID NO: 5158; WAN024FKU; Start 162; Stop 186
cttgtcaacggtagaggagattatg

SEQ ID NO: 401841 - DNA, 25 bp, Artificial
  probe
  misc_feature (1)..(25): SEQ ID NO: 5158; WAN024FKU; Start 1591; Stop 1615
tatgctaacaatcaagaagaccacg

SEQ ID NO: 401842 - DNA, 25 bp, Artificial
  probe
  misc_feature (1)..(25): SEQ ID NO: 5158; WAN024FKU; Start 1581; Stop 1605
caaggtctactatgctaacaatcaa

SEQ ID NO: 401843 - DNA, 25 bp, Artificial
  probe
  misc_feature (1)..(25): SEQ ID NO: 5158; WAN024FKU; Start 1583; Stop 1607
aggtctactatgctaacaatcaaga

SEQ ID NO: 401844 - DNA, 25 bp, Artificial
  probe
  misc_feature (1)..(25): SEQ ID NO: 5158; WAN024FKU; Start 573; Stop 597
ttcattccttgtattccttgccttg

SEQ ID NO: 401845 - DNA, 25 bp, Artificial
  probe
  misc_feature (1)..(25): SEQ ID NO: 5158; WAN024FKU; Start 166; Stop 190
tcaacggtagaggagattatgagaa

SEQ ID NO: 401846 - DNA, 25 bp, Artificial
  probe
  misc_feature (1)..(25): SEQ ID NO: 5158; WAN024FKU; Start 1588; Stop 1612
tactatgctaacaatcaagaagacc

SEQ ID NO: 401847 - DNA, 25 bp, Artificial
  probe
  misc_feature (1)..(25): SEQ ID NO: 5158; WAN024FKU; Start 1582; Stop 1606
aaggtctactatgctaacaatcaag

SEQ ID NO: 401848 - DNA, 25 bp, Artificial
  probe
  misc_feature (1)..(25): SEQ ID NO: 5158; WAN024FKU; Start 923; Stop 947
gttataccttggatcagattgctca

SEQ ID NO: 401849 - DNA, 25 bp, Artificial
  probe
  misc_feature (1)..(25): SEQ ID NO: 5158; WAN024FKU; Start 163; Stop 187
ttgtcaacggtagaggagattatga

SEQ ID NO: 401850 - DNA, 25 bp, Artificial
  probe
  misc_feature (1)..(25): SEQ ID NO: 5158; WAN024FKU; Start 1183; Stop 1207
gctgctatggataagaacctatctc

SEQ ID NO: 401851 - DNA, 25 bp, Artificial
  probe
  misc_feature (1)..(25): SEQ ID NO: 5158; WAN024FKU; Start 165; Stop 189
gtcaacggtagaggagattatgaga

SEQ ID NO: 401852 - DNA, 25 bp, Artificial
  probe
  misc_feature (1)..(25): SEQ ID NO: 5158; WAN024FKU; Start 1584; Stop 1608
ggtctactatgctaacaatcaagaa

SEQ ID NO: 401853 - DNA, 25 bp, Artificial
  probe
  misc_feature (1)..(25): SEQ ID NO: 5158; WAN024FKU; Start 924; Stop 948
ttataccttggatcagattgctcaa

SEQ ID NO: 401854 - DNA, 25 bp, Artificial
  probe
  misc_feature (1)..(25): SEQ ID NO: 5158; WAN024FKU; Start 164; Stop 188
tgtcaacggtagaggagattatgag

SEQ ID NO: 401855 - DNA, 25 bp, Artificial
  probe
  misc_feature (1)..(25): SEQ ID NO: 5158; WAN024FKU; Start 270; Stop 294
tgttccaagtcatccaagtcaagat

SEQ ID NO: 401856 - DNA, 25 bp, Artificial
  probe
  misc_feature (1)..(25): SEQ ID NO: 5158; WAN024FKU; Start 1173; Stop 1197
tgagatgttagctgctatggataag

SEQ ID NO: 401857 - DNA, 25 bp, Artificial
  probe
  misc_feature (1)..(25): SEQ ID NO: 5158; WAN024FKU; Start 1174; Stop 1198
gagatgttagctgctatggataaga

SEQ ID NO: 401858 - DNA, 25 bp, Artificial
  probe
  misc_feature (1)..(25): SEQ ID NO: 5158; WAN024FKU; Start 1171; Stop 1195
gatgagatgttagctgctatggata

SEQ ID NO: 401859 - DNA, 25 bp, Artificial
  probe
  misc_feature (1)..(25): SEQ ID NO: 5158; WAN024FKU; Start 1166; Stop 1190
tgattgatgagatgttagctgctat

SEQ ID NO: 401860 - DNA, 25 bp, Artificial
  probe
  misc_feature (1)..(25): SEQ ID NO: 5158; WAN024FKU; Start 1165; Stop 1189
ttgattgatgagatgttagctgcta

SEQ ID NO: 401861 - DNA, 25 bp, Artificial
  probe
  misc_feature (1)..(25): SEQ ID NO: 5158; WAN024FKU; Start 1158; Stop 1182
tgagagcttgattgatgagatgtta

SEQ ID NO: 401862 - DNA, 25 bp, Artificial
  probe
  misc_feature (1)..(25): SEQ ID NO: 5158; WAN024FKU; Start 1167; Stop 1191
gattgatgagatgttagctgctatg

SEQ ID NO: 401863 - DNA, 25 bp, Artificial
  probe
  misc_feature (1)..(25): SEQ ID NO: 5158; WAN024FKU; Start 1156; Stop 1180
attgagagcttgattgatgagatgt

SEQ ID NO: 401864 - DNA, 25 bp, Artificial
  probe
  misc_feature (1)..(25): SEQ ID NO: 5158; WAN024FKU; Start 1157; Stop 1181
ttgagagcttgattgatgagatgtt

SEQ ID NO: 401865 - DNA, 25 bp, Artificial
  probe
  misc_feature (1)..(25): SEQ ID NO: 5158; WAN024FKU; Start 1153; Stop 1177
actattgagagcttgattgatgaga

SEQ ID NO: 401866 - DNA, 25 bp, Artificial
  probe
  misc_feature (1)..(25): SEQ ID NO: 5158; WAN024FKU; Start 1172; Stop 1196
atgagatgttagctgctatggataa

SEQ ID NO: 401867 - DNA, 25 bp, Artificial
  probe
  misc_feature (1)..(25): SEQ ID NO: 5158; WAN024FKU; Start 1592; Stop 1616
atgctaacaatcaagaagaccacga

SEQ ID NO: 401868 - DNA, 25 bp, Artificial
  probe
  misc_feature (1)..(25): SEQ ID NO: 5158; WAN024FKU; Start 1175; Stop 1199
agatgttagctgctatggataagaa

SEQ ID NO: 401869 - DNA, 25 bp, Artificial
  probe
  misc_feature (1)..(25): SEQ ID NO: 5158; WAN024FKU; Start 1168; Stop 1192
attgatgagatgttagctgctatgg

SEQ ID NO: 401870 - DNA, 25 bp, Artificial
  probe
  misc_feature (1)..(25): SEQ ID NO: 5158; WAN024FKU; Start 1159; Stop 1183
gagagcttgattgatgagatgttag

SEQ ID NO: 401871 - DNA, 25 bp, Artificial
  probe
  misc_feature (1)..(25): SEQ ID NO: 5159; WAN024GD6; Start 53; Stop 77
gcttccaacctcaagtatattacaa

SEQ ID NO: 401872 - DNA, 25 bp, Artificial
  probe
  misc_feature (1)..(25): SEQ ID NO: 5159; WAN024GD6; Start 52; Stop 76
agcttccaacctcaagtatattaca

SEQ ID NO: 401873 - DNA, 25 bp, Artificial
  probe
  misc_feature (1)..(25): SEQ ID NO: 5159; WAN024GD6; Start 50; Stop 74
acagcttccaacctcaagtatatta

SEQ ID NO: 401874 - DNA, 25 bp, Artificial
  probe
  misc_feature (1)..(25): SEQ ID NO: 5159; WAN024GD6; Start 49; Stop 73
tacagcttccaacctcaagtatatt

SEQ ID NO: 401875 - DNA, 25 bp, Artificial
  probe
  misc_feature (1)..(25): SEQ ID NO: 5159; WAN024GD6; Start 51; Stop 75
cagcttccaacctcaagtatattac

SEQ ID NO: 401876 - DNA, 25 bp, Artificial
  probe
  misc_feature (1)..(25): SEQ ID NO: 5159; WAN024GD6; Start 47; Stop 71
aatacagcttccaacctcaagtata

SEQ ID NO: 401877 - DNA, 25 bp, Artificial
  probe
  misc_feature (1)..(25): SEQ ID NO: 5159; WAN024GD6; Start 46; Stop 70
gaatacagcttccaacctcaagtat

SEQ ID NO: 401878 - DNA, 25 bp, Artificial
  probe
  misc_feature (1)..(25): SEQ ID NO: 5159; WAN024GD6; Start 48; Stop 72
atacagcttccaacctcaagtatat

SEQ ID NO: 401879 - DNA, 25 bp, Artificial
  probe
  misc_feature (1)..(25): SEQ ID NO: 5159; WAN024GD6; Start 57; Stop 81
ccaacctcaagtatattacaattct

SEQ ID NO: 401880 - DNA, 25 bp, Artificial
  probe
  misc_feature (1)..(25): SEQ ID NO: 5159; WAN024GD6; Start 56; Stop 80
tccaacctcaagtatattacaattc

SEQ ID NO: 401881 - DNA, 25 bp, Artificial
  probe
  misc_feature (1)..(25): SEQ ID NO: 5159; WAN024GD6; Start 54; Stop 78
cttccaacctcaagtatattacaat

SEQ ID NO: 401882 - DNA, 25 bp, Artificial
  probe
  misc_feature (1)..(25): SEQ ID NO: 5159; WAN024GD6; Start 71; Stop 95
attacaattctactttagcaactgc

SEQ ID NO: 401883 - DNA, 25 bp, Artificial
  probe
  misc_feature (1)..(25): SEQ ID NO: 5159; WAN024GD6; Start 33; Stop 57
aaataagaggttggaatacagcttc

SEQ ID NO: 401884 - DNA, 25 bp, Artificial
  probe
  misc_feature (1)..(25): SEQ ID NO: 5159; WAN024GD6; Start 55; Stop 79
ttccaacctcaagtatattacaatt

SEQ ID NO: 401885 - DNA, 25 bp, Artificial
  probe
  misc_feature (1)..(25): SEQ ID NO: 5159; WAN024GD6; Start 156; Stop 180
tgtgaagacaactactgttgaagtt

SEQ ID NO: 401886 - DNA, 25 bp, Artificial
  probe
  misc_feature (1)..(25): SEQ ID NO: 5159; WAN024GD6; Start 155; Stop 179
ttgtgaagacaactactgttgaagt

SEQ ID NO: 401887 - DNA, 25 bp, Artificial
  probe
  misc_feature (1)..(25): SEQ ID NO: 5159; WAN024GD6; Start 34; Stop 58
aataagaggttggaatacagcttcc

SEQ ID NO: 401888 - DNA, 25 bp, Artificial
  probe
  misc_feature (1)..(25): SEQ ID NO: 5159; WAN024GD6; Start 75; Stop 99
caattctactttagcaactgctgtt

SEQ ID NO: 401889 - DNA, 25 bp, Artificial
  probe
  misc_feature (1)..(25): SEQ ID NO: 5159; WAN024GD6; Start 76; Stop 100
aattctactttagcaactgctgttt

SEQ ID NO: 401890 - DNA, 25 bp, Artificial
  probe
  misc_feature (1)..(25): SEQ ID NO: 5159; WAN024GD6; Start 73; Stop 97
tacaattctactttagcaactgctg

SEQ ID NO: 401891 - DNA, 25 bp, Artificial
  probe
  misc_feature (1)..(25): SEQ ID NO: 5159; WAN024GD6; Start 74; Stop 98
acaattctactttagcaactgctgt

SEQ ID NO: 401892 - DNA, 25 bp, Artificial
  probe
  misc_feature (1)..(25): SEQ ID NO: 5159; WAN024GD6; Start 150; Stop 174
accatttgtgaagacaactactgtt

SEQ ID NO: 401893 - DNA, 25 bp, Artificial
  probe
  misc_feature (1)..(25): SEQ ID NO: 5159; WAN024GD6; Start 72; Stop 96
ttacaattctactttagcaactgct

SEQ ID NO: 401894 - DNA, 25 bp, Artificial
  probe
  misc_feature (1)..(25): SEQ ID NO: 5159; WAN024GD6; Start 149; Stop 173
caccatttgtgaagacaactactgt

SEQ ID NO: 401895 - DNA, 25 bp, Artificial
  probe
  misc_feature (1)..(25): SEQ ID NO: 5159; WAN024GD6; Start 135; Stop 159
tgatttaattgcatcaccatttgtg

SEQ ID NO: 401896 - DNA, 25 bp, Artificial
  probe
  misc_feature (1)..(25): SEQ ID NO: 5159; WAN024GD6; Start 166; Stop 190
actactgttgaagtttcacgtcctg

SEQ ID NO: 401897 - DNA, 25 bp, Artificial
  probe
  misc_feature (1)..(25): SEQ ID NO: 5159; WAN024GD6; Start 134; Stop 158
ctgatttaattgcatcaccatttgt

SEQ ID NO: 401898 - DNA, 25 bp, Artificial
  probe
  misc_feature (1)..(25): SEQ ID NO: 5159; WAN024GD6; Start 133; Stop 157
actgatttaattgcatcaccatttg

SEQ ID NO: 401899 - DNA, 25 bp, Artificial
  probe
  misc_feature (1)..(25): SEQ ID NO: 5159; WAN024GD6; Start 160; Stop 184
aagacaactactgttgaagtttcac

SEQ ID NO: 401900 - DNA, 25 bp, Artificial
  probe
  misc_feature (1)..(25): SEQ ID NO: 5159; WAN024GD6; Start 157; Stop 181
gtgaagacaactactgttgaagttt

SEQ ID NO: 401901 - DNA, 25 bp, Artificial
  probe
  misc_feature (1)..(25): SEQ ID NO: 5159; WAN024GD6; Start 154; Stop 178
tttgtgaagacaactactgttgaag

SEQ ID NO: 401902 - DNA, 25 bp, Artificial
  probe
  misc_feature (1)..(25): SEQ ID NO: 5159; WAN024GD6; Start 152; Stop 176
catttgtgaagacaactactgttga

SEQ ID NO: 401903 - DNA, 25 bp, Artificial
  probe
  misc_feature (1)..(25): SEQ ID NO: 5159; WAN024GD6; Start 151; Stop 175
ccatttgtgaagacaactactgttg

SEQ ID NO: 401904 - DNA, 25 bp, Artificial
  probe
  misc_feature (1)..(25): SEQ ID NO: 5160; WAN024C5U; Start 5; Stop 29
gttctaactgccgaataaccttatc

SEQ ID NO: 401905 - DNA, 25 bp, Artificial
  probe
  misc_feature (1)..(25): SEQ ID NO: 5160; WAN024C5U; Start 4; Stop 28
agttctaactgccgaataaccttat

SEQ ID NO: 401906 - DNA, 25 bp, Artificial
  probe
  misc_feature (1)..(25): SEQ ID NO: 5160; WAN024C5U; Start 3; Stop 27
gagttctaactgccgaataacctta

SEQ ID NO: 401907 - DNA, 25 bp, Artificial
  probe
  misc_feature (1)..(25): SEQ ID NO: 5160; WAN024C5U; Start 2; Stop 26
tgagttctaactgccgaataacctt

SEQ ID NO: 401908 - DNA, 25 bp, Artificial
  probe
  misc_feature (1)..(25): SEQ ID NO: 5160; WAN024C5U; Start 1; Stop 25
ttgagttctaactgccgaataacct

SEQ ID NO: 401909 - DNA, 25 bp, Artificial
  probe
  misc_feature (1)..(25): SEQ ID NO: 5160; WAN024C5U; Start 185; Stop 209
caattctttaccatttacgactccg

SEQ ID NO: 401910 - DNA, 25 bp, Artificial
  probe
  misc_feature (1)..(25): SEQ ID NO: 5160; WAN024C5U; Start 184; Stop 208
acaattctttaccatttacgactcc

SEQ ID NO: 401911 - DNA, 25 bp, Artificial
  probe
  misc_feature (1)..(25): SEQ ID NO: 5160; WAN024C5U; Start 6; Stop 30
ttctaactgccgaataaccttatcg

SEQ ID NO: 401912 - DNA, 25 bp, Artificial
  probe
  misc_feature (1)..(25): SEQ ID NO: 5160; WAN024C5U; Start 186; Stop 210
aattctttaccatttacgactccgc

SEQ ID NO: 401913 - DNA, 25 bp, Artificial
  probe
  misc_feature (1)..(25): SEQ ID NO: 5160; WAN024C5U; Start 151; Stop 175
aatcttcttcctcttcctctgcatc

SEQ ID NO: 401914 - DNA, 25 bp, Artificial
  probe
  misc_feature (1)..(25): SEQ ID NO: 5160; WAN024C5U; Start 183; Stop 207
aacaattctttaccatttacgactc

SEQ ID NO: 401915 - DNA, 25 bp, Artificial
  probe
  misc_feature (1)..(25): SEQ ID NO: 5160; WAN024C5U; Start 182; Stop 206
aaacaattctttaccatttacgact

SEQ ID NO: 401916 - DNA, 25 bp, Artificial
  probe
  misc_feature (1)..(25): SEQ ID NO: 5160; WAN024C5U; Start 126; Stop 150
tttaccctttaaatacccgattcga

SEQ ID NO: 401917 - DNA, 25 bp, Artificial
  probe
  misc_feature (1)..(25): SEQ ID NO: 5160; WAN024C5U; Start 7; Stop 31
tctaactgccgaataaccttatcga

SEQ ID NO: 401918 - DNA, 25 bp, Artificial
  probe
  misc_feature (1)..(25): SEQ ID NO: 5160; WAN024C5U; Start 187; Stop 211
attctttaccatttacgactccgcc

SEQ ID NO: 401919 - DNA, 25 bp, Artificial
  probe
  misc_feature (1)..(25): SEQ ID NO: 5160; WAN024C5U; Start 147; Stop 171
tcgaaatcttcttcctcttcctctg

SEQ ID NO: 401920 - DNA, 25 bp, Artificial
  probe
  misc_feature (1)..(25): SEQ ID NO: 5160; WAN024C5U; Start 150; Stop 174
aaatcttcttcctcttcctctgcat

SEQ ID NO: 401921 - DNA, 25 bp, Artificial
  probe
  misc_feature (1)..(25): SEQ ID NO: 5160; WAN024C5U; Start 148; Stop 172
cgaaatcttcttcctcttcctctgc

SEQ ID NO: 401922 - DNA, 25 bp, Artificial
  probe
  misc_feature (1)..(25): SEQ ID NO: 5160; WAN024C5U; Start 152; Stop 176
atcttcttcctcttcctctgcatcc

SEQ ID NO: 401923 - DNA, 25 bp, Artificial
  probe
  misc_feature (1)..(25): SEQ ID NO: 5160; WAN024C5U; Start 171; Stop 195
gcatccgttgaaaacaattctttac

SEQ ID NO: 401924 - DNA, 25 bp, Artificial
  probe
  misc_feature (1)..(25): SEQ ID NO: 5160; WAN024C5U; Start 174; Stop 198
tccgttgaaaacaattctttaccat

SEQ ID NO: 401925 - DNA, 25 bp, Artificial
  probe
  misc_feature (1)..(25): SEQ ID NO: 5160; WAN024C5U; Start 173; Stop 197
atccgttgaaaacaattctttacca

SEQ ID NO: 401926 - DNA, 25 bp, Artificial
  probe
  misc_feature (1)..(25): SEQ ID NO: 5160; WAN024C5U; Start 149; Stop 173
gaaatcttcttcctcttcctctgca

SEQ ID NO: 401927 - DNA, 25 bp, Artificial
  probe
  misc_feature (1)..(25): SEQ ID NO: 5160; WAN024C5U; Start 172; Stop 196
catccgttgaaaacaattctttacc

SEQ ID NO: 401928 - DNA, 25 bp, Artificial
  probe
  misc_feature (1)..(25): SEQ ID NO: 5160; WAN024C5U; Start 175; Stop 199
ccgttgaaaacaattctttaccatt

SEQ ID NO: 401929 - DNA, 25 bp, Artificial
  probe
  misc_feature (1)..(25): SEQ ID NO: 5160; WAN024C5U; Start 9; Stop 33
taactgccgaataaccttatcgatt

SEQ ID NO: 401930 - DNA, 25 bp, Artificial
  probe
  misc_feature (1)..(25): SEQ ID NO: 5160; WAN024C5U; Start 8; Stop 32
ctaactgccgaataaccttatcgat

SEQ ID NO: 401931 - DNA, 25 bp, Artificial
  probe
  misc_feature (1)..(25): SEQ ID NO: 5160; WAN024C5U; Start 125; Stop 149
ttttaccctttaaatacccgattcg

SEQ ID NO: 401932 - DNA, 25 bp, Artificial
  probe
  misc_feature (1)..(25): SEQ ID NO: 5160; WAN024C5U; Start 176; Stop 200
cgttgaaaacaattctttaccattt

SEQ ID NO: 401933 - DNA, 25 bp, Artificial
  probe
  misc_feature (1)..(25): SEQ ID NO: 5160; WAN024C5U; Start 127; Stop 151
ttaccctttaaatacccgattcgaa

SEQ ID NO: 401934 - DNA, 25 bp, Artificial
  probe
  misc_feature (1)..(25): SEQ ID NO: 5160; WAN024C5U; Start 128; Stop 152
taccctttaaatacccgattcgaaa

SEQ ID NO: 401935 - DNA, 25 bp, Artificial
  probe
  misc_feature (1)..(25): SEQ ID NO: 5160; WAN024C5U; Start 129; Stop 153
accctttaaatacccgattcgaaat

SEQ ID NO: 401936 - DNA, 25 bp, Artificial
  probe
  misc_feature (1)..(25): SEQ ID NO: 5160; WAN024C5U; Start 10; Stop 34
aactgccgaataaccttatcgattg

SEQ ID NO: 401937 - DNA, 25 bp, Artificial
  probe
  misc_feature (1)..(25): SEQ ID NO: 5161; WAN024GJ6; Start 160; Stop 184
gcacctggtttatcaatcttgttaa

SEQ ID NO: 401938 - DNA, 25 bp, Artificial
  probe
  misc_feature (1)..(25): SEQ ID NO: 5161; WAN024GJ6; Start 156; Stop 180
gttagcacctggtttatcaatcttg

SEQ ID NO: 401939 - DNA, 25 bp, Artificial
  probe
  misc_feature (1)..(25): SEQ ID NO: 5161; WAN024GJ6; Start 159; Stop 183
agcacctggtttatcaatcttgtta

SEQ ID NO: 401940 - DNA, 25 bp, Artificial
  probe
  misc_feature (1)..(25): SEQ ID NO: 5161; WAN024GJ6; Start 158; Stop 182
tagcacctggtttatcaatcttgtt

SEQ ID NO: 401941 - DNA, 25 bp, Artificial
  probe
  misc_feature (1)..(25): SEQ ID NO: 5161; WAN024GJ6; Start 157; Stop 181
ttagcacctggtttatcaatcttgt

SEQ ID NO: 401942 - DNA, 25 bp, Artificial
  probe
  misc_feature (1)..(25): SEQ ID NO: 5161; WAN024GJ6; Start 77; Stop 101
tttcaacaaattcagaatctccacc

SEQ ID NO: 401943 - DNA, 25 bp, Artificial
  probe
  misc_feature (1)..(25): SEQ ID NO: 5161; WAN024GJ6; Start 78; Stop 102
ttcaacaaattcagaatctccaccc

SEQ ID NO: 401944 - DNA, 25 bp, Artificial
  probe
  misc_feature (1)..(25): SEQ ID NO: 5161; WAN024GJ6; Start 76; Stop 100
atttcaacaaattcagaatctccac

SEQ ID NO: 401945 - DNA, 25 bp, Artificial
  probe
  misc_feature (1)..(25): SEQ ID NO: 5161; WAN024GJ6; Start 161; Stop 185
cacctggtttatcaatcttgttaat

SEQ ID NO: 401946 - DNA, 25 bp, Artificial
  probe
  misc_feature (1)..(25): SEQ ID NO: 5161; WAN024GJ6; Start 155; Stop 179
ggttagcacctggtttatcaatctt

SEQ ID NO: 401947 - DNA, 25 bp, Artificial
  probe
  misc_feature (1)..(25): SEQ ID NO: 5161; WAN024GJ6; Start 215; Stop 239
ttgagtggttgatggcttcaatagt

SEQ ID NO: 401948 - DNA, 25 bp, Artificial
  probe
  misc_feature (1)..(25): SEQ ID NO: 5161; WAN024GJ6; Start 217; Stop 241
gagtggttgatggcttcaatagtct

SEQ ID NO: 401949 - DNA, 25 bp, Artificial
  probe
  misc_feature (1)..(25): SEQ ID NO: 5161; WAN024GJ6; Start 219; Stop 243
gtggttgatggcttcaatagtctga

SEQ ID NO: 401950 - DNA, 25 bp, Artificial
  probe
  misc_feature (1)..(25): SEQ ID NO: 5161; WAN024GJ6; Start 218; Stop 242
agtggttgatggcttcaatagtctg

SEQ ID NO: 401951 - DNA, 25 bp, Artificial
  probe
  misc_feature (1)..(25): SEQ ID NO: 5161; WAN024GJ6; Start 216; Stop 240
tgagtggttgatggcttcaatagtc

SEQ ID NO: 401952 - DNA, 25 bp, Artificial
  probe
  misc_feature (1)..(25): SEQ ID NO: 5161; WAN024GJ6; Start 154; Stop 178
gggttagcacctggtttatcaatct

SEQ ID NO: 401953 - DNA, 25 bp, Artificial
  probe
  misc_feature (1)..(25): SEQ ID NO: 5161; WAN024GJ6; Start 153; Stop 177
tgggttagcacctggtttatcaatc

SEQ ID NO: 401954 - DNA, 25 bp, Artificial
  probe
  misc_feature (1)..(25): SEQ ID NO: 5161; WAN024GJ6; Start 152; Stop 176
ctgggttagcacctggtttatcaat

SEQ ID NO: 401955 - DNA, 25 bp, Artificial
  probe
  misc_feature (1)..(25): SEQ ID NO: 5161; WAN024GJ6; Start 214; Stop 238
tttgagtggttgatggcttcaatag

SEQ ID NO: 401956 - DNA, 25 bp, Artificial
  probe
  misc_feature (1)..(25): SEQ ID NO: 5161; WAN024GJ6; Start 122; Stop 146
catgctctgccaattcaccgataac

SEQ ID NO: 401957 - DNA, 25 bp, Artificial
  probe
  misc_feature (1)..(25): SEQ ID NO: 5161; WAN024GJ6; Start 26; Stop 50
gaaggactgtttccaacaattcttc

SEQ ID NO: 401958 - DNA, 25 bp, Artificial
  probe
  misc_feature (1)..(25): SEQ ID NO: 5161; WAN024GJ6; Start 25; Stop 49
agaaggactgtttccaacaattctt

SEQ ID NO: 401959 - DNA, 25 bp, Artificial
  probe
  misc_feature (1)..(25): SEQ ID NO: 5161; WAN024GJ6; Start 24; Stop 48
aagaaggactgtttccaacaattct

SEQ ID NO: 401960 - DNA, 25 bp, Artificial
  probe
  misc_feature (1)..(25): SEQ ID NO: 5161; WAN024GJ6; Start 23; Stop 47
caagaaggactgtttccaacaattc

SEQ ID NO: 401961 - DNA, 25 bp, Artificial
  probe
  misc_feature (1)..(25): SEQ ID NO: 5161; WAN024GJ6; Start 22; Stop 46
acaagaaggactgtttccaacaatt

SEQ ID NO: 401962 - DNA, 25 bp, Artificial
  probe
  misc_feature (1)..(25): SEQ ID NO: 5161; WAN024GJ6; Start 149; Stop 173
gttctgggttagcacctggtttatc

SEQ ID NO: 401963 - DNA, 25 bp, Artificial
  probe
  misc_feature (1)..(25): SEQ ID NO: 5161; WAN024GJ6; Start 81; Stop 105
aacaaattcagaatctccaccccaa

SEQ ID NO: 401964 - DNA, 25 bp, Artificial
  probe
  misc_feature (1)..(25): SEQ ID NO: 5161; WAN024GJ6; Start 30; Stop 54
gactgtttccaacaattcttcgata

SEQ ID NO: 401965 - DNA, 25 bp, Artificial
  probe
  misc_feature (1)..(25): SEQ ID NO: 5161; WAN024GJ6; Start 27; Stop 51
aaggactgtttccaacaattcttcg

SEQ ID NO: 401966 - DNA, 25 bp, Artificial
  probe
  misc_feature (1)..(25): SEQ ID NO: 5161; WAN024GJ6; Start 31; Stop 55
actgtttccaacaattcttcgatat

SEQ ID NO: 401967 - DNA, 25 bp, Artificial
  probe
  misc_feature (1)..(25): SEQ ID NO: 5161; WAN024GJ6; Start 151; Stop 175
tctgggttagcacctggtttatcaa

SEQ ID NO: 401968 - DNA, 25 bp, Artificial
  probe
  misc_feature (1)..(25): SEQ ID NO: 5161; WAN024GJ6; Start 150; Stop 174
ttctgggttagcacctggtttatca

SEQ ID NO: 401969 - DNA, 25 bp, Artificial
  probe
  misc_feature (1)..(25): SEQ ID NO: 5161; WAN024GJ6; Start 82; Stop 106
acaaattcagaatctccaccccaag

SEQ ID NO: 401970 - DNA, 25 bp, Artificial
  probe
  misc_feature (1)..(25): SEQ ID NO: 5162; WAN024F2O; Start 86; Stop 110
caatgaccttaacaccgagaacttc

SEQ ID NO: 401971 - DNA, 25 bp, Artificial
  probe
  misc_feature (1)..(25): SEQ ID NO: 5162; WAN024F2O; Start 85; Stop 109
tcaatgaccttaacaccgagaactt

SEQ ID NO: 401972 - DNA, 25 bp, Artificial
  probe
  misc_feature (1)..(25): SEQ ID NO: 5162; WAN024F2O; Start 87; Stop 111
aatgaccttaacaccgagaacttcc

SEQ ID NO: 401973 - DNA, 25 bp, Artificial
  probe
  misc_feature (1)..(25): SEQ ID NO: 5162; WAN024F2O; Start 148; Stop 172
ttgacgatgacagtagtgatttctt

SEQ ID NO: 401974 - DNA, 25 bp, Artificial
  probe
  misc_feature (1)..(25): SEQ ID NO: 5162; WAN024F2O; Start 150; Stop 174
gacgatgacagtagtgatttcttct

SEQ ID NO: 401975 - DNA, 25 bp, Artificial
  probe
  misc_feature (1)..(25): SEQ ID NO: 5162; WAN024F2O; Start 149; Stop 173
tgacgatgacagtagtgatttcttc

SEQ ID NO: 401976 - DNA, 25 bp, Artificial
  probe
  misc_feature (1)..(25): SEQ ID NO: 5162; WAN024F2O; Start 92; Stop 116
ccttaacaccgagaacttcctctag

SEQ ID NO: 401977 - DNA, 25 bp, Artificial
  probe
  misc_feature (1)..(25): SEQ ID NO: 5162; WAN024F2O; Start 147; Stop 171
gttgacgatgacagtagtgatttct

SEQ ID NO: 401978 - DNA, 25 bp, Artificial
  probe
  misc_feature (1)..(25): SEQ ID NO: 5162; WAN024F2O; Start 91; Stop 115
accttaacaccgagaacttcctcta

SEQ ID NO: 401979 - DNA, 25 bp, Artificial
  probe
  misc_feature (1)..(25): SEQ ID NO: 5162; WAN024F2O; Start 214; Stop 238
ccgacgaaggtcttggaatcatatt

SEQ ID NO: 401980 - DNA, 25 bp, Artificial
  probe
  misc_feature (1)..(25): SEQ ID NO: 5162; WAN024F2O; Start 145; Stop 169
ttgttgacgatgacagtagtgattt

SEQ ID NO: 401981 - DNA, 25 bp, Artificial
  probe
  misc_feature (1)..(25): SEQ ID NO: 5162; WAN024F2O; Start 88; Stop 112
atgaccttaacaccgagaacttcct

SEQ ID NO: 401982 - DNA, 25 bp, Artificial
  probe
  misc_feature (1)..(25): SEQ ID NO: 5162; WAN024F2O; Start 151; Stop 175
acgatgacagtagtgatttcttctg

SEQ ID NO: 401983 - DNA, 25 bp, Artificial
  probe
  misc_feature (1)..(25): SEQ ID NO: 5162; WAN024F2O; Start 146; Stop 170
tgttgacgatgacagtagtgatttc

SEQ ID NO: 401984 - DNA, 25 bp, Artificial
  probe
  misc_feature (1)..(25): SEQ ID NO: 5162; WAN024F2O; Start 105; Stop 129
aacttcctctagattgacattctgc

SEQ ID NO: 401985 - DNA, 25 bp, Artificial
  probe
  misc_feature (1)..(25): SEQ ID NO: 5162; WAN024F2O; Start 215; Stop 239
cgacgaaggtcttggaatcatattt

SEQ ID NO: 401986 - DNA, 25 bp, Artificial
  probe
  misc_feature (1)..(25): SEQ ID NO: 5162; WAN024F2O; Start 104; Stop 128
gaacttcctctagattgacattctg

SEQ ID NO: 401987 - DNA, 25 bp, Artificial
  probe
  misc_feature (1)..(25): SEQ ID NO: 5162; WAN024F2O; Start 101; Stop 125
cgagaacttcctctagattgacatt

SEQ ID NO: 401988 - DNA, 25 bp, Artificial
  probe
  misc_feature (1)..(25): SEQ ID NO: 5162; WAN024F2O; Start 95; Stop 119
taacaccgagaacttcctctagatt

SEQ ID NO: 401989 - DNA, 25 bp, Artificial
  probe
  misc_feature (1)..(25): SEQ ID NO: 5162; WAN024F2O; Start 94; Stop 118
ttaacaccgagaacttcctctagat

SEQ ID NO: 401990 - DNA, 25 bp, Artificial
  probe
  misc_feature (1)..(25): SEQ ID NO: 5162; WAN024F2O; Start 108; Stop 132
ttcctctagattgacattctgcctt

SEQ ID NO: 401991 - DNA, 25 bp, Artificial
  probe
  misc_feature (1)..(25): SEQ ID NO: 5162; WAN024F2O; Start 84; Stop 108
gtcaatgaccttaacaccgagaact

SEQ ID NO: 401992 - DNA, 25 bp, Artificial
  probe
  misc_feature (1)..(25): SEQ ID NO: 5162; WAN024F2O; Start 152; Stop 176
cgatgacagtagtgatttcttctgc

SEQ ID NO: 401993 - DNA, 25 bp, Artificial
  probe
  misc_feature (1)..(25): SEQ ID NO: 5162; WAN024F2O; Start 102; Stop 126
gagaacttcctctagattgacattc

SEQ ID NO: 401994 - DNA, 25 bp, Artificial
  probe
  misc_feature (1)..(25): SEQ ID NO: 5162; WAN024F2O; Start 93; Stop 117
cttaacaccgagaacttcctctaga

SEQ ID NO: 401995 - DNA, 25 bp, Artificial
  probe
  misc_feature (1)..(25): SEQ ID NO: 5162; WAN024F2O; Start 107; Stop 131
cttcctctagattgacattctgcct

SEQ ID NO: 401996 - DNA, 25 bp, Artificial
  probe
  misc_feature (1)..(25): SEQ ID NO: 5162; WAN024F2O; Start 100; Stop 124
ccgagaacttcctctagattgacat

SEQ ID NO: 401997 - DNA, 25 bp, Artificial
  probe
  misc_feature (1)..(25): SEQ ID NO: 5162; WAN024F2O; Start 90; Stop 114
gaccttaacaccgagaacttcctct

SEQ ID NO: 401998 - DNA, 25 bp, Artificial
  probe
  misc_feature (1)..(25): SEQ ID NO: 5162; WAN024F2O; Start 109; Stop 133
tcctctagattgacattctgccttg

SEQ ID NO: 401999 - DNA, 25 bp, Artificial
  probe
  misc_feature (1)..(25): SEQ ID NO: 5162; WAN024F2O; Start 106; Stop 130
acttcctctagattgacattctgcc

SEQ ID NO: 402000 - DNA, 25 bp, Artificial
  probe
  misc_feature (1)..(25): SEQ ID NO: 5162; WAN024F2O; Start 164; Stop 188
tgatttcttctgcatccaccataag

SEQ ID NO: 402001 - DNA, 25 bp, Artificial
  probe
  misc_feature (1)..(25): SEQ ID NO: 5162; WAN024F2O; Start 96; Stop 120
aacaccgagaacttcctctagattg

SEQ ID NO: 402002 - DNA, 25 bp, Artificial
  probe
  misc_feature (1)..(25): SEQ ID NO: 5162; WAN024F2O; Start 89; Stop 113
tgaccttaacaccgagaacttcctc

SEQ ID NO: 402003 - DNA, 25 bp, Artificial
  probe
  misc_feature (1)..(25): SEQ ID NO: 5163; WAN024F8S; Start 72; Stop 96
ggttggaatcttaggtgacttgata

SEQ ID NO: 402004 - DNA, 25 bp, Artificial
  probe
  misc_feature (1)..(25): SEQ ID NO: 5163; WAN024F8S; Start 64; Stop 88
atgatgatggttggaatcttaggtg

SEQ ID NO: 402005 - DNA, 25 bp, Artificial
  probe
  misc_feature (1)..(25): SEQ ID NO: 5163; WAN024F8S; Start 66; Stop 90
gatgatggttggaatcttaggtgac

SEQ ID NO: 402006 - DNA, 25 bp, Artificial
  probe
  misc_feature (1)..(25): SEQ ID NO: 5163; WAN024F8S; Start 69; Stop 93
gatggttggaatcttaggtgacttg

SEQ ID NO: 402007 - DNA, 25 bp, Artificial
  probe
  misc_feature (1)..(25): SEQ ID NO: 5163; WAN024F8S; Start 67; Stop 91
atgatggttggaatcttaggtgact

SEQ ID NO: 402008 - DNA, 25 bp, Artificial
  probe
  misc_feature (1)..(25): SEQ ID NO: 5163; WAN024F8S; Start 65; Stop 89
tgatgatggttggaatcttaggtga

SEQ ID NO: 402009 - DNA, 25 bp, Artificial
  probe
  misc_feature (1)..(25): SEQ ID NO: 5163; WAN024F8S; Start 73; Stop 97
gttggaatcttaggtgacttgataa

SEQ ID NO: 402010 - DNA, 25 bp, Artificial
  probe
  misc_feature (1)..(25): SEQ ID NO: 5163; WAN024F8S; Start 70; Stop 94
atggttggaatcttaggtgacttga

SEQ ID NO: 402011 - DNA, 25 bp, Artificial
  probe
  misc_feature (1)..(25): SEQ ID NO: 5163; WAN024F8S; Start 71; Stop 95
tggttggaatcttaggtgacttgat

SEQ ID NO: 402012 - DNA, 25 bp, Artificial
  probe
  misc_feature (1)..(25): SEQ ID NO: 5163; WAN024F8S; Start 68; Stop 92
tgatggttggaatcttaggtgactt

SEQ ID NO: 402013 - DNA, 25 bp, Artificial
  probe
  misc_feature (1)..(25): SEQ ID NO: 5163; WAN024F8S; Start 162; Stop 186
cgcaggattaagtgtatcaatgacc

SEQ ID NO: 402014 - DNA, 25 bp, Artificial
  probe
  misc_feature (1)..(25): SEQ ID NO: 5163; WAN024F8S; Start 63; Stop 87
catgatgatggttggaatcttaggt

SEQ ID NO: 402015 - DNA, 25 bp, Artificial
  probe
  misc_feature (1)..(25): SEQ ID NO: 5163; WAN024F8S; Start 168; Stop 192
attaagtgtatcaatgacctcatgc

SEQ ID NO: 402016 - DNA, 25 bp, Artificial
  probe
  misc_feature (1)..(25): SEQ ID NO: 5163; WAN024F8S; Start 169; Stop 193
ttaagtgtatcaatgacctcatgcc

SEQ ID NO: 402017 - DNA, 25 bp, Artificial
  probe
  misc_feature (1)..(25): SEQ ID NO: 5163; WAN024F8S; Start 163; Stop 187
gcaggattaagtgtatcaatgacct

SEQ ID NO: 402018 - DNA, 25 bp, Artificial
  probe
  misc_feature (1)..(25): SEQ ID NO: 5163; WAN024F8S; Start 166; Stop 190
ggattaagtgtatcaatgacctcat

SEQ ID NO: 402019 - DNA, 25 bp, Artificial
  probe
  misc_feature (1)..(25): SEQ ID NO: 5163; WAN024F8S; Start 165; Stop 189
aggattaagtgtatcaatgacctca

SEQ ID NO: 402020 - DNA, 25 bp, Artificial
  probe
  misc_feature (1)..(25): SEQ ID NO: 5163; WAN024F8S; Start 74; Stop 98
ttggaatcttaggtgacttgataat

SEQ ID NO: 402021 - DNA, 25 bp, Artificial
  probe
  misc_feature (1)..(25): SEQ ID NO: 5163; WAN024F8S; Start 164; Stop 188
caggattaagtgtatcaatgacctc

SEQ ID NO: 402022 - DNA, 25 bp, Artificial
  probe
  misc_feature (1)..(25): SEQ ID NO: 5163; WAN024F8S; Start 75; Stop 99
tggaatcttaggtgacttgataatt

SEQ ID NO: 402023 - DNA, 25 bp, Artificial
  probe
  misc_feature (1)..(25): SEQ ID NO: 5163; WAN024F8S; Start 81; Stop 105
cttaggtgacttgataatttctgcc

SEQ ID NO: 402024 - DNA, 25 bp, Artificial
  probe
  misc_feature (1)..(25): SEQ ID NO: 5163; WAN024F8S; Start 289; Stop 313
tcttggacatcagattcagagattt

SEQ ID NO: 402025 - DNA, 25 bp, Artificial
  probe
  misc_feature (1)..(25): SEQ ID NO: 5163; WAN024F8S; Start 82; Stop 106
ttaggtgacttgataatttctgccg

SEQ ID NO: 402026 - DNA, 25 bp, Artificial
  probe
  misc_feature (1)..(25): SEQ ID NO: 5163; WAN024F8S; Start 80; Stop 104
tcttaggtgacttgataatttctgc

SEQ ID NO: 402027 - DNA, 25 bp, Artificial
  probe
  misc_feature (1)..(25): SEQ ID NO: 5163; WAN024F8S; Start 167; Stop 191
gattaagtgtatcaatgacctcatg

SEQ ID NO: 402028 - DNA, 25 bp, Artificial
  probe
  misc_feature (1)..(25): SEQ ID NO: 5163; WAN024F8S; Start 85; Stop 109
ggtgacttgataatttctgccgtat

SEQ ID NO: 402029 - DNA, 25 bp, Artificial
  probe
  misc_feature (1)..(25): SEQ ID NO: 5163; WAN024F8S; Start 353; Stop 377
gttctgttaaactttcaaatgccat

SEQ ID NO: 402030 - DNA, 25 bp, Artificial
  probe
  misc_feature (1)..(25): SEQ ID NO: 5163; WAN024F8S; Start 352; Stop 376
cgttctgttaaactttcaaatgcca

SEQ ID NO: 402031 - DNA, 25 bp, Artificial
  probe
  misc_feature (1)..(25): SEQ ID NO: 5163; WAN024F8S; Start 86; Stop 110
gtgacttgataatttctgccgtatc

SEQ ID NO: 402032 - DNA, 25 bp, Artificial
  probe
  misc_feature (1)..(25): SEQ ID NO: 5163; WAN024F8S; Start 354; Stop 378
ttctgttaaactttcaaatgccatt

SEQ ID NO: 402033 - DNA, 25 bp, Artificial
  probe
  misc_feature (1)..(25): SEQ ID NO: 5163; WAN024F8S; Start 84; Stop 108
aggtgacttgataatttctgccgta

SEQ ID NO: 402034 - DNA, 25 bp, Artificial
  probe
  misc_feature (1)..(25): SEQ ID NO: 5163; WAN024F8S; Start 83; Stop 107
taggtgacttgataatttctgccgt

SEQ ID NO: 402035 - DNA, 25 bp, Artificial
  probe
  misc_feature (1)..(25): SEQ ID NO: 5163; WAN024F8S; Start 283; Stop 307
gttgcctcttggacatcagattcag

SEQ ID NO: 402036 - DNA, 25 bp, Artificial
  probe
  misc_feature (1)..(25): SEQ ID NO: 5164; WAN024G24; Start 86; Stop 110
ttcactttgctaccacgatagattt

SEQ ID NO: 402037 - DNA, 25 bp, Artificial
  probe
  misc_feature (1)..(25): SEQ ID NO: 5164; WAN024G24; Start 90; Stop 114
ctttgctaccacgatagatttcagt

SEQ ID NO: 402038 - DNA, 25 bp, Artificial
  probe
  misc_feature (1)..(25): SEQ ID NO: 5164; WAN024G24; Start 89; Stop 113
actttgctaccacgatagatttcag

SEQ ID NO: 402039 - DNA, 25 bp, Artificial
  probe
  misc_feature (1)..(25): SEQ ID NO: 5164; WAN024G24; Start 87; Stop 111
tcactttgctaccacgatagatttc

SEQ ID NO: 402040 - DNA, 25 bp, Artificial
  probe
  misc_feature (1)..(25): SEQ ID NO: 5164; WAN024G24; Start 88; Stop 112
cactttgctaccacgatagatttca

SEQ ID NO: 402041 - DNA, 25 bp, Artificial
  probe
  misc_feature (1)..(25): SEQ ID NO: 5164; WAN024G24; Start 85; Stop 109
gttcactttgctaccacgatagatt

SEQ ID NO: 402042 - DNA, 25 bp, Artificial
  probe
  misc_feature (1)..(25): SEQ ID NO: 5164; WAN024G24; Start 141; Stop 165
cagaaaggtcattatcatacaaacg

SEQ ID NO: 402043 - DNA, 25 bp, Artificial
  probe
  misc_feature (1)..(25): SEQ ID NO: 5164; WAN024G24; Start 45; Stop 69
gaacgatttgagcaatttgtgtttg

SEQ ID NO: 402044 - DNA, 25 bp, Artificial
  probe
  misc_feature (1)..(25): SEQ ID NO: 5164; WAN024G24; Start 44; Stop 68
tgaacgatttgagcaatttgtgttt

SEQ ID NO: 402045 - DNA, 25 bp, Artificial
  probe
  misc_feature (1)..(25): SEQ ID NO: 5164; WAN024G24; Start 46; Stop 70
aacgatttgagcaatttgtgtttga

SEQ ID NO: 402046 - DNA, 25 bp, Artificial
  probe
  misc_feature (1)..(25): SEQ ID NO: 5164; WAN024G24; Start 43; Stop 67
ttgaacgatttgagcaatttgtgtt

SEQ ID NO: 402047 - DNA, 25 bp, Artificial
  probe
  misc_feature (1)..(25): SEQ ID NO: 5164; WAN024G24; Start 42; Stop 66
tttgaacgatttgagcaatttgtgt

SEQ ID NO: 402048 - DNA, 25 bp, Artificial
  probe
  misc_feature (1)..(25): SEQ ID NO: 5164; WAN024G24; Start 249; Stop 273
cactagccaattcaactggtacatc

SEQ ID NO: 402049 - DNA, 25 bp, Artificial
  probe
  misc_feature (1)..(25): SEQ ID NO: 5164; WAN024G24; Start 84; Stop 108
agttcactttgctaccacgatagat

SEQ ID NO: 402050 - DNA, 25 bp, Artificial
  probe
  misc_feature (1)..(25): SEQ ID NO: 5164; WAN024G24; Start 47; Stop 71
acgatttgagcaatttgtgtttgag

SEQ ID NO: 402051 - DNA, 25 bp, Artificial
  probe
  misc_feature (1)..(25): SEQ ID NO: 5164; WAN024G24; Start 134; Stop 158
tcttggacagaaaggtcattatcat

SEQ ID NO: 402052 - DNA, 25 bp, Artificial
  probe
  misc_feature (1)..(25): SEQ ID NO: 5164; WAN024G24; Start 248; Stop 272
acactagccaattcaactggtacat

SEQ ID NO: 402053 - DNA, 25 bp, Artificial
  probe
  misc_feature (1)..(25): SEQ ID NO: 5164; WAN024G24; Start 137; Stop 161
tggacagaaaggtcattatcataca

SEQ ID NO: 402054 - DNA, 25 bp, Artificial
  probe
  misc_feature (1)..(25): SEQ ID NO: 5164; WAN024G24; Start 96; Stop 120
taccacgatagatttcagtgacaat

SEQ ID NO: 402055 - DNA, 25 bp, Artificial
  probe
  misc_feature (1)..(25): SEQ ID NO: 5164; WAN024G24; Start 98; Stop 122
ccacgatagatttcagtgacaattt

SEQ ID NO: 402056 - DNA, 25 bp, Artificial
  probe
  misc_feature (1)..(25): SEQ ID NO: 5164; WAN024G24; Start 95; Stop 119
ctaccacgatagatttcagtgacaa

SEQ ID NO: 402057 - DNA, 25 bp, Artificial
  probe
  misc_feature (1)..(25): SEQ ID NO: 5164; WAN024G24; Start 97; Stop 121
accacgatagatttcagtgacaatt

SEQ ID NO: 402058 - DNA, 25 bp, Artificial
  probe
  misc_feature (1)..(25): SEQ ID NO: 5164; WAN024G24; Start 245; Stop 269
cagacactagccaattcaactggta

SEQ ID NO: 402059 - DNA, 25 bp, Artificial
  probe
  misc_feature (1)..(25): SEQ ID NO: 5164; WAN024G24; Start 138; Stop 162
ggacagaaaggtcattatcatacaa

SEQ ID NO: 402060 - DNA, 25 bp, Artificial
  probe
  misc_feature (1)..(25): SEQ ID NO: 5164; WAN024G24; Start 136; Stop 160
ttggacagaaaggtcattatcatac

SEQ ID NO: 402061 - DNA, 25 bp, Artificial
  probe
  misc_feature (1)..(25): SEQ ID NO: 5164; WAN024G24; Start 91; Stop 115
tttgctaccacgatagatttcagtg

SEQ ID NO: 402062 - DNA, 25 bp, Artificial
  probe
  misc_feature (1)..(25): SEQ ID NO: 5164; WAN024G24; Start 246; Stop 270
agacactagccaattcaactggtac

SEQ ID NO: 402063 - DNA, 25 bp, Artificial
  probe
  misc_feature (1)..(25): SEQ ID NO: 5164; WAN024G24; Start 140; Stop 164
acagaaaggtcattatcatacaaac

SEQ ID NO: 402064 - DNA, 25 bp, Artificial
  probe
  misc_feature (1)..(25): SEQ ID NO: 5164; WAN024G24; Start 135; Stop 159
cttggacagaaaggtcattatcata

SEQ ID NO: 402065 - DNA, 25 bp, Artificial
  probe
  misc_feature (1)..(25): SEQ ID NO: 5164; WAN024G24; Start 83; Stop 107
aagttcactttgctaccacgataga

SEQ ID NO: 402066 - DNA, 25 bp, Artificial
  probe
  misc_feature (1)..(25): SEQ ID NO: 5164; WAN024G24; Start 247; Stop 271
gacactagccaattcaactggtaca

SEQ ID NO: 402067 - DNA, 25 bp, Artificial
  probe
  misc_feature (1)..(25): SEQ ID NO: 5164; WAN024G24; Start 250; Stop 274
actagccaattcaactggtacatcg

SEQ ID NO: 402068 - DNA, 25 bp, Artificial
  probe
  misc_feature (1)..(25): SEQ ID NO: 5164; WAN024G24; Start 92; Stop 116
ttgctaccacgatagatttcagtga

SEQ ID NO: 402069 - DNA, 25 bp, Artificial
  probe
  misc_feature (1)..(25): SEQ ID NO: 5165; WAN024C96; Start 143; Stop 167
tcgatgatgttgatgtgtacttgtt

SEQ ID NO: 402070 - DNA, 25 bp, Artificial
  probe
  misc_feature (1)..(25): SEQ ID NO: 5165; WAN024C96; Start 142; Stop 166
ttcgatgatgttgatgtgtacttgt

SEQ ID NO: 402071 - DNA, 25 bp, Artificial
  probe
  misc_feature (1)..(25): SEQ ID NO: 5165; WAN024C96; Start 144; Stop 168
cgatgatgttgatgtgtacttgttt

SEQ ID NO: 402072 - DNA, 25 bp, Artificial
  probe
  misc_feature (1)..(25): SEQ ID NO: 5165; WAN024C96; Start 141; Stop 165
tttcgatgatgttgatgtgtacttg

SEQ ID NO: 402073 - DNA, 25 bp, Artificial
  probe
  misc_feature (1)..(25): SEQ ID NO: 5165; WAN024C96; Start 138; Stop 162
tgatttcgatgatgttgatgtgtac

SEQ ID NO: 402074 - DNA, 25 bp, Artificial
  probe
  misc_feature (1)..(25): SEQ ID NO: 5165; WAN024C96; Start 136; Stop 160
tttgatttcgatgatgttgatgtgt

SEQ ID NO: 402075 - DNA, 25 bp, Artificial
  probe
  misc_feature (1)..(25): SEQ ID NO: 5165; WAN024C96; Start 134; Stop 158
tgtttgatttcgatgatgttgatgt

SEQ ID NO: 402076 - DNA, 25 bp, Artificial
  probe
  misc_feature (1)..(25): SEQ ID NO: 5165; WAN024C96; Start 135; Stop 159
gtttgatttcgatgatgttgatgtg

SEQ ID NO: 402077 - DNA, 25 bp, Artificial
  probe
  misc_feature (1)..(25): SEQ ID NO: 5165; WAN024C96; Start 139; Stop 163
gatttcgatgatgttgatgtgtact

SEQ ID NO: 402078 - DNA, 25 bp, Artificial
  probe
  misc_feature (1)..(25): SEQ ID NO: 5165; WAN024C96; Start 90; Stop 114
gacgagcaattccttcacctacaag

SEQ ID NO: 402079 - DNA, 25 bp, Artificial
  probe
  misc_feature (1)..(25): SEQ ID NO: 5165; WAN024C96; Start 131; Stop 155
ggttgtttgatttcgatgatgttga

SEQ ID NO: 402080 - DNA, 25 bp, Artificial
  probe
  misc_feature (1)..(25): SEQ ID NO: 5165; WAN024C96; Start 130; Stop 154
aggttgtttgatttcgatgatgttg

SEQ ID NO: 402081 - DNA, 25 bp, Artificial
  probe
  misc_feature (1)..(25): SEQ ID NO: 5165; WAN024C96; Start 129; Stop 153
caggttgtttgatttcgatgatgtt

SEQ ID NO: 402082 - DNA, 25 bp, Artificial
  probe
  misc_feature (1)..(25): SEQ ID NO: 5165; WAN024C96; Start 140; Stop 164
atttcgatgatgttgatgtgtactt

SEQ ID NO: 402083 - DNA, 25 bp, Artificial
  probe
  misc_feature (1)..(25): SEQ ID NO: 5165; WAN024C96; Start 137; Stop 161
ttgatttcgatgatgttgatgtgta

SEQ ID NO: 402084 - DNA, 25 bp, Artificial
  probe
  misc_feature (1)..(25): SEQ ID NO: 5165; WAN024C96; Start 133; Stop 157
ttgtttgatttcgatgatgttgatg

SEQ ID NO: 402085 - DNA, 25 bp, Artificial
  probe
  misc_feature (1)..(25): SEQ ID NO: 5165; WAN024C96; Start 132; Stop 156
gttgtttgatttcgatgatgttgat

SEQ ID NO: 402086 - DNA, 25 bp, Artificial
  probe
  misc_feature (1)..(25): SEQ ID NO: 5165; WAN024C96; Start 215; Stop 239
ccacctttaccgataaccatacctg

SEQ ID NO: 402087 - DNA, 25 bp, Artificial
  probe
  misc_feature (1)..(25): SEQ ID NO: 5165; WAN024C96; Start 214; Stop 238
accacctttaccgataaccatacct

SEQ ID NO: 402088 - DNA, 25 bp, Artificial
  probe
  misc_feature (1)..(25): SEQ ID NO: 5165; WAN024C96; Start 213; Stop 237
caccacctttaccgataaccatacc

SEQ ID NO: 402089 - DNA, 25 bp, Artificial
  probe
  misc_feature (1)..(25): SEQ ID NO: 5165; WAN024C96; Start 128; Stop 152
tcaggttgtttgatttcgatgatgt

SEQ ID NO: 402090 - DNA, 25 bp, Artificial
  probe
  misc_feature (1)..(25): SEQ ID NO: 5165; WAN024C96; Start 87; Stop 111
attgacgagcaattccttcacctac

SEQ ID NO: 402091 - DNA, 25 bp, Artificial
  probe
  misc_feature (1)..(25): SEQ ID NO: 5165; WAN024C96; Start 89; Stop 113
tgacgagcaattccttcacctacaa

SEQ ID NO: 402092 - DNA, 25 bp, Artificial
  probe
  misc_feature (1)..(25): SEQ ID NO: 5165; WAN024C96; Start 88; Stop 112
ttgacgagcaattccttcacctaca

SEQ ID NO: 402093 - DNA, 25 bp, Artificial
  probe
  misc_feature (1)..(25): SEQ ID NO: 5165; WAN024C96; Start 212; Stop 236
gcaccacctttaccgataaccatac

SEQ ID NO: 402094 - DNA, 25 bp, Artificial
  probe
  misc_feature (1)..(25): SEQ ID NO: 5165; WAN024C96; Start 233; Stop 257
atacctggtttagcagtgtgaagtg

SEQ ID NO: 402095 - DNA, 25 bp, Artificial
  probe
  misc_feature (1)..(25): SEQ ID NO: 5165; WAN024C96; Start 232; Stop 256
catacctggtttagcagtgtgaagt

SEQ ID NO: 402096 - DNA, 25 bp, Artificial
  probe
  misc_feature (1)..(25): SEQ ID NO: 5165; WAN024C96; Start 211; Stop 235
agcaccacctttaccgataaccata

SEQ ID NO: 402097 - DNA, 25 bp, Artificial
  probe
  misc_feature (1)..(25): SEQ ID NO: 5165; WAN024C96; Start 210; Stop 234
tagcaccacctttaccgataaccat

SEQ ID NO: 402098 - DNA, 25 bp, Artificial
  probe
  misc_feature (1)..(25): SEQ ID NO: 5165; WAN024C96; Start 108; Stop 132
ctacaaggtgagcatccaaatcagg

SEQ ID NO: 402099 - DNA, 25 bp, Artificial
  probe
  misc_feature (1)..(25): SEQ ID NO: 5165; WAN024C96; Start 149; Stop 173
atgttgatgtgtacttgttttccag

SEQ ID NO: 402100 - DNA, 25 bp, Artificial
  probe
  misc_feature (1)..(25): SEQ ID NO: 5165; WAN024C96; Start 148; Stop 172
gatgttgatgtgtacttgttttcca

SEQ ID NO: 402101 - DNA, 25 bp, Artificial
  probe
  misc_feature (1)..(25): SEQ ID NO: 5165; WAN024C96; Start 147; Stop 171
tgatgttgatgtgtacttgttttcc

SEQ ID NO: 402102 - DNA, 25 bp, Artificial
  probe
  misc_feature (1)..(25): SEQ ID NO: 5166; WAN024CZ6; Start 275; Stop 299
ctactgctagacgacatattctcaa

SEQ ID NO: 402103 - DNA, 25 bp, Artificial
  probe
  misc_feature (1)..(25): SEQ ID NO: 5166; WAN024CZ6; Start 160; Stop 184
tgtctggcttataatctctacctct

SEQ ID NO: 402104 - DNA, 25 bp, Artificial
  probe
  misc_feature (1)..(25): SEQ ID NO: 5166; WAN024CZ6; Start 159; Stop 183
ctgtctggcttataatctctacctc

SEQ ID NO: 402105 - DNA, 25 bp, Artificial
  probe
  misc_feature (1)..(25): SEQ ID NO: 5166; WAN024CZ6; Start 122; Stop 146
cgaccatgattaagaatgaagtacg

SEQ ID NO: 402106 - DNA, 25 bp, Artificial
  probe
  misc_feature (1)..(25): SEQ ID NO: 5166; WAN024CZ6; Start 161; Stop 185
gtctggcttataatctctacctctt

SEQ ID NO: 402107 - DNA, 25 bp, Artificial
  probe
  misc_feature (1)..(25): SEQ ID NO: 5166; WAN024CZ6; Start 158; Stop 182
gctgtctggcttataatctctacct

SEQ ID NO: 402108 - DNA, 25 bp, Artificial
  probe
  misc_feature (1)..(25): SEQ ID NO: 5166; WAN024CZ6; Start 273; Stop 297
ctctactgctagacgacatattctc

SEQ ID NO: 402109 - DNA, 25 bp, Artificial
  probe
  misc_feature (1)..(25): SEQ ID NO: 5166; WAN024CZ6; Start 272; Stop 296
tctctactgctagacgacatattct

SEQ ID NO: 402110 - DNA, 25 bp, Artificial
  probe
  misc_feature (1)..(25): SEQ ID NO: 5166; WAN024CZ6; Start 106; Stop 130
gataagacagatagttcgaccatga

SEQ ID NO: 402111 - DNA, 25 bp, Artificial
  probe
  misc_feature (1)..(25): SEQ ID NO: 5166; WAN024CZ6; Start 274; Stop 298
tctactgctagacgacatattctca

SEQ ID NO: 402112 - DNA, 25 bp, Artificial
  probe
  misc_feature (1)..(25): SEQ ID NO: 5166; WAN024CZ6; Start 408; Stop 432
aacatgcctaacagaactaactaat

SEQ ID NO: 402113 - DNA, 25 bp, Artificial
  probe
  misc_feature (1)..(25): SEQ ID NO: 5166; WAN024CZ6; Start 105; Stop 129
ggataagacagatagttcgaccatg

SEQ ID NO: 402114 - DNA, 25 bp, Artificial
  probe
  misc_feature (1)..(25): SEQ ID NO: 5166; WAN024CZ6; Start 112; Stop 136
acagatagttcgaccatgattaaga

SEQ ID NO: 402115 - DNA, 25 bp, Artificial
  probe
  misc_feature (1)..(25): SEQ ID NO: 5166; WAN024CZ6; Start 110; Stop 134
agacagatagttcgaccatgattaa

SEQ ID NO: 402116 - DNA, 25 bp, Artificial
  probe
  misc_feature (1)..(25): SEQ ID NO: 5166; WAN024CZ6; Start 109; Stop 133
aagacagatagttcgaccatgatta

SEQ ID NO: 402117 - DNA, 25 bp, Artificial
  probe
  misc_feature (1)..(25): SEQ ID NO: 5166; WAN024CZ6; Start 108; Stop 132
taagacagatagttcgaccatgatt

SEQ ID NO: 402118 - DNA, 25 bp, Artificial
  probe
  misc_feature (1)..(25): SEQ ID NO: 5166; WAN024CZ6; Start 111; Stop 135
gacagatagttcgaccatgattaag

SEQ ID NO: 402119 - DNA, 25 bp, Artificial
  probe
  misc_feature (1)..(25): SEQ ID NO: 5166; WAN024CZ6; Start 107; Stop 131
ataagacagatagttcgaccatgat

SEQ ID NO: 402120 - DNA, 25 bp, Artificial
  probe
  misc_feature (1)..(25): SEQ ID NO: 5166; WAN024CZ6; Start 119; Stop 143
gttcgaccatgattaagaatgaagt

SEQ ID NO: 402121 - DNA, 25 bp, Artificial
  probe
  misc_feature (1)..(25): SEQ ID NO: 5166; WAN024CZ6; Start 118; Stop 142
agttcgaccatgattaagaatgaag

SEQ ID NO: 402122 - DNA, 25 bp, Artificial
  probe
  misc_feature (1)..(25): SEQ ID NO: 5166; WAN024CZ6; Start 360; Stop 384
gataaatctgatactccctgttcca

SEQ ID NO: 402123 - DNA, 25 bp, Artificial
  probe
  misc_feature (1)..(25): SEQ ID NO: 5166; WAN024CZ6; Start 9; Stop 33
tttaagcagtgtagatagtgaggag

SEQ ID NO: 402124 - DNA, 25 bp, Artificial
  probe
  misc_feature (1)..(25): SEQ ID NO: 5166; WAN024CZ6; Start 121; Stop 145
tcgaccatgattaagaatgaagtac

SEQ ID NO: 402125 - DNA, 25 bp, Artificial
  probe
  misc_feature (1)..(25): SEQ ID NO: 5166; WAN024CZ6; Start 157; Stop 181
ggctgtctggcttataatctctacc

SEQ ID NO: 402126 - DNA, 25 bp, Artificial
  probe
  misc_feature (1)..(25): SEQ ID NO: 5166; WAN024CZ6; Start 363; Stop 387
aaatctgatactccctgttccatat

SEQ ID NO: 402127 - DNA, 25 bp, Artificial
  probe
  misc_feature (1)..(25): SEQ ID NO: 5166; WAN024CZ6; Start 361; Stop 385
ataaatctgatactccctgttccat

SEQ ID NO: 402128 - DNA, 25 bp, Artificial
  probe
  misc_feature (1)..(25): SEQ ID NO: 5166; WAN024CZ6; Start 75; Stop 99
tatcaaagaaaggaaagcaggattc

SEQ ID NO: 402129 - DNA, 25 bp, Artificial
  probe
  misc_feature (1)..(25): SEQ ID NO: 5166; WAN024CZ6; Start 8; Stop 32
atttaagcagtgtagatagtgagga

SEQ ID NO: 402130 - DNA, 25 bp, Artificial
  probe
  misc_feature (1)..(25): SEQ ID NO: 5166; WAN024CZ6; Start 123; Stop 147
gaccatgattaagaatgaagtacgt

SEQ ID NO: 402131 - DNA, 25 bp, Artificial
  probe
  misc_feature (1)..(25): SEQ ID NO: 5166; WAN024CZ6; Start 113; Stop 137
cagatagttcgaccatgattaagaa

SEQ ID NO: 402132 - DNA, 25 bp, Artificial
  probe
  misc_feature (1)..(25): SEQ ID NO: 5166; WAN024CZ6; Start 366; Stop 390
tctgatactccctgttccatataga

SEQ ID NO: 402133 - DNA, 25 bp, Artificial
  probe
  misc_feature (1)..(25): SEQ ID NO: 5166; WAN024CZ6; Start 74; Stop 98
ttatcaaagaaaggaaagcaggatt

SEQ ID NO: 402134 - DNA, 25 bp, Artificial
  probe
  misc_feature (1)..(25): SEQ ID NO: 5166; WAN024CZ6; Start 73; Stop 97
tttatcaaagaaaggaaagcaggat

SEQ ID NO: 402135 - DNA, 25 bp, Artificial
  probe
  misc_feature (1)..(25): SEQ ID NO: 5167; WAN024DCF; Start 266; Stop 290
gtaataatggatctgatgcggactt

SEQ ID NO: 402136 - DNA, 25 bp, Artificial
  probe
  misc_feature (1)..(25): SEQ ID NO: 5167; WAN024DCF; Start 264; Stop 288
aagtaataatggatctgatgcggac

SEQ ID NO: 402137 - DNA, 25 bp, Artificial
  probe
  misc_feature (1)..(25): SEQ ID NO: 5167; WAN024DCF; Start 527; Stop 551
aaccaagcaatacaagagattctaa

SEQ ID NO: 402138 - DNA, 25 bp, Artificial
  probe
  misc_feature (1)..(25): SEQ ID NO: 5167; WAN024DCF; Start 51; Stop 75
acaatccttggcagaagaagtagaa

SEQ ID NO: 402139 - DNA, 25 bp, Artificial
  probe
  misc_feature (1)..(25): SEQ ID NO: 5167; WAN024DCF; Start 583; Stop 607
acagaatcttctacaactactggaa

SEQ ID NO: 402140 - DNA, 25 bp, Artificial
  probe
  misc_feature (1)..(25): SEQ ID NO: 5167; WAN024DCF; Start 582; Stop 606
aacagaatcttctacaactactgga

SEQ ID NO: 402141 - DNA, 25 bp, Artificial
  probe
  misc_feature (1)..(25): SEQ ID NO: 5167; WAN024DCF; Start 581; Stop 605
caacagaatcttctacaactactgg

SEQ ID NO: 402142 - DNA, 25 bp, Artificial
  probe
  misc_feature (1)..(25): SEQ ID NO: 5167; WAN024DCF; Start 265; Stop 289
agtaataatggatctgatgcggact

SEQ ID NO: 402143 - DNA, 25 bp, Artificial
  probe
  misc_feature (1)..(25): SEQ ID NO: 5167; WAN024DCF; Start 50; Stop 74
gacaatccttggcagaagaagtaga

SEQ ID NO: 402144 - DNA, 25 bp, Artificial
  probe
  misc_feature (1)..(25): SEQ ID NO: 5167; WAN024DCF; Start 49; Stop 73
agacaatccttggcagaagaagtag

SEQ ID NO: 402145 - DNA, 25 bp, Artificial
  probe
  misc_feature (1)..(25): SEQ ID NO: 5167; WAN024DCF; Start 579; Stop 603
aacaacagaatcttctacaactact

SEQ ID NO: 402146 - DNA, 25 bp, Artificial
  probe
  misc_feature (1)..(25): SEQ ID NO: 5167; WAN024DCF; Start 45; Stop 69
aatcagacaatccttggcagaagaa

SEQ ID NO: 402147 - DNA, 25 bp, Artificial
  probe
  misc_feature (1)..(25): SEQ ID NO: 5167; WAN024DCF; Start 580; Stop 604
acaacagaatcttctacaactactg

SEQ ID NO: 402148 - DNA, 25 bp, Artificial
  probe
  misc_feature (1)..(25): SEQ ID NO: 5167; WAN024DCF; Start 524; Stop 548
acaaaccaagcaatacaagagattc

SEQ ID NO: 402149 - DNA, 25 bp, Artificial
  probe
  misc_feature (1)..(25): SEQ ID NO: 5167; WAN024DCF; Start 48; Stop 72
cagacaatccttggcagaagaagta

SEQ ID NO: 402150 - DNA, 25 bp, Artificial
  probe
  misc_feature (1)..(25): SEQ ID NO: 5167; WAN024DCF; Start 523; Stop 547
aacaaaccaagcaatacaagagatt

SEQ ID NO: 402151 - DNA, 25 bp, Artificial
  probe
  misc_feature (1)..(25): SEQ ID NO: 5167; WAN024DCF; Start 522; Stop 546
aaacaaaccaagcaatacaagagat

SEQ ID NO: 402152 - DNA, 25 bp, Artificial
  probe
  misc_feature (1)..(25): SEQ ID NO: 5167; WAN024DCF; Start 31; Stop 55
atccatgaagaaggaatcagacaat

SEQ ID NO: 402153 - DNA, 25 bp, Artificial
  probe
  misc_feature (1)..(25): SEQ ID NO: 5167; WAN024DCF; Start 30; Stop 54
aatccatgaagaaggaatcagacaa

SEQ ID NO: 402154 - DNA, 25 bp, Artificial
  probe
  misc_feature (1)..(25): SEQ ID NO: 5167; WAN024DCF; Start 32; Stop 56
tccatgaagaaggaatcagacaatc

SEQ ID NO: 402155 - DNA, 25 bp, Artificial
  probe
  misc_feature (1)..(25): SEQ ID NO: 5167; WAN024DCF; Start 415; Stop 439
gaagaaacaagtccagcaagaaatg

SEQ ID NO: 402156 - DNA, 25 bp, Artificial
  probe
  misc_feature (1)..(25): SEQ ID NO: 5167; WAN024DCF; Start 46; Stop 70
atcagacaatccttggcagaagaag

SEQ ID NO: 402157 - DNA, 25 bp, Artificial
  probe
  misc_feature (1)..(25): SEQ ID NO: 5167; WAN024DCF; Start 525; Stop 549
caaaccaagcaatacaagagattct

SEQ ID NO: 402158 - DNA, 25 bp, Artificial
  probe
  misc_feature (1)..(25): SEQ ID NO: 5167; WAN024DCF; Start 537; Stop 561
tacaagagattctaaacctgctgaa

SEQ ID NO: 402159 - DNA, 25 bp, Artificial
  probe
  misc_feature (1)..(25): SEQ ID NO: 5167; WAN024DCF; Start 536; Stop 560
atacaagagattctaaacctgctga

SEQ ID NO: 402160 - DNA, 25 bp, Artificial
  probe
  misc_feature (1)..(25): SEQ ID NO: 5167; WAN024DCF; Start 414; Stop 438
tgaagaaacaagtccagcaagaaat

SEQ ID NO: 402161 - DNA, 25 bp, Artificial
  probe
  misc_feature (1)..(25): SEQ ID NO: 5167; WAN024DCF; Start 44; Stop 68
gaatcagacaatccttggcagaaga

SEQ ID NO: 402162 - DNA, 25 bp, Artificial
  probe
  misc_feature (1)..(25): SEQ ID NO: 5167; WAN024DCF; Start 33; Stop 57
ccatgaagaaggaatcagacaatcc

SEQ ID NO: 402163 - DNA, 25 bp, Artificial
  probe
  misc_feature (1)..(25): SEQ ID NO: 5167; WAN024DCF; Start 113; Stop 137
tggatgaagtaaacagtcaggtaaa

SEQ ID NO: 402164 - DNA, 25 bp, Artificial
  probe
  misc_feature (1)..(25): SEQ ID NO: 5167; WAN024DCF; Start 112; Stop 136
ttggatgaagtaaacagtcaggtaa

SEQ ID NO: 402165 - DNA, 25 bp, Artificial
  probe
  misc_feature (1)..(25): SEQ ID NO: 5167; WAN024DCF; Start 111; Stop 135
cttggatgaagtaaacagtcaggta

SEQ ID NO: 402166 - DNA, 25 bp, Artificial
  probe
  misc_feature (1)..(25): SEQ ID NO: 5167; WAN024DCF; Start 267; Stop 291
taataatggatctgatgcggacttt

SEQ ID NO: 402167 - DNA, 25 bp, Artificial
  probe
  misc_feature (1)..(25): SEQ ID NO: 5167; WAN024DCF; Start 263; Stop 287
aaagtaataatggatctgatgcgga

SEQ ID NO: 402168 - DNA, 25 bp, Artificial
  probe
  misc_feature (1)..(25): SEQ ID NO: 5168; WAN024DOP; Start 74; Stop 98
ttgcaggaagtctagtataccattt

SEQ ID NO: 402169 - DNA, 25 bp, Artificial
  probe
  misc_feature (1)..(25): SEQ ID NO: 5168; WAN024DOP; Start 73; Stop 97
tttgcaggaagtctagtataccatt

SEQ ID NO: 402170 - DNA, 25 bp, Artificial
  probe
  misc_feature (1)..(25): SEQ ID NO: 5168; WAN024DOP; Start 70; Stop 94
agttttgcaggaagtctagtatacc

SEQ ID NO: 402171 - DNA, 25 bp, Artificial
  probe
  misc_feature (1)..(25): SEQ ID NO: 5168; WAN024DOP; Start 71; Stop 95
gttttgcaggaagtctagtatacca

SEQ ID NO: 402172 - DNA, 25 bp, Artificial
  probe
  misc_feature (1)..(25): SEQ ID NO: 5168; WAN024DOP; Start 75; Stop 99
tgcaggaagtctagtataccatttt

SEQ ID NO: 402173 - DNA, 25 bp, Artificial
  probe
  misc_feature (1)..(25): SEQ ID NO: 5168; WAN024DOP; Start 72; Stop 96
ttttgcaggaagtctagtataccat

SEQ ID NO: 402174 - DNA, 25 bp, Artificial
  probe
  misc_feature (1)..(25): SEQ ID NO: 5168; WAN024DOP; Start 69; Stop 93
tagttttgcaggaagtctagtatac

SEQ ID NO: 402175 - DNA, 25 bp, Artificial
  probe
  misc_feature (1)..(25): SEQ ID NO: 5168; WAN024DOP; Start 67; Stop 91
cctagttttgcaggaagtctagtat

SEQ ID NO: 402176 - DNA, 25 bp, Artificial
  probe
  misc_feature (1)..(25): SEQ ID NO: 5168; WAN024DOP; Start 68; Stop 92
ctagttttgcaggaagtctagtata

SEQ ID NO: 402177 - DNA, 25 bp, Artificial
  probe
  misc_feature (1)..(25): SEQ ID NO: 5168; WAN024DOP; Start 66; Stop 90
tcctagttttgcaggaagtctagta

SEQ ID NO: 402178 - DNA, 25 bp, Artificial
  probe
  misc_feature (1)..(25): SEQ ID NO: 5168; WAN024DOP; Start 16; Stop 40
ctcctccaagacggaagagcatttt

SEQ ID NO: 402179 - DNA, 25 bp, Artificial
  probe
  misc_feature (1)..(25): SEQ ID NO: 5168; WAN024DOP; Start 10; Stop 34
aaaatgctcctccaagacggaagag

SEQ ID NO: 402180 - DNA, 25 bp, Artificial
  probe
  misc_feature (1)..(25): SEQ ID NO: 5169; WAN024F5U; Start 93; Stop 117
gctatctccgatatctccatcaatt

SEQ ID NO: 402181 - DNA, 25 bp, Artificial
  probe
  misc_feature (1)..(25): SEQ ID NO: 5169; WAN024F5U; Start 92; Stop 116
ggctatctccgatatctccatcaat

SEQ ID NO: 402182 - DNA, 25 bp, Artificial
  probe
  misc_feature (1)..(25): SEQ ID NO: 5169; WAN024F5U; Start 96; Stop 120
atctccgatatctccatcaatttcc

SEQ ID NO: 402183 - DNA, 25 bp, Artificial
  probe
  misc_feature (1)..(25): SEQ ID NO: 5169; WAN024F5U; Start 162; Stop 186
atcaactgcacctgagtcaatcaat

SEQ ID NO: 402184 - DNA, 25 bp, Artificial
  probe
  misc_feature (1)..(25): SEQ ID NO: 5169; WAN024F5U; Start 86; Stop 110
caacatggctatctccgatatctcc

SEQ ID NO: 402185 - DNA, 25 bp, Artificial
  probe
  misc_feature (1)..(25): SEQ ID NO: 5169; WAN024F5U; Start 163; Stop 187
tcaactgcacctgagtcaatcaatt

SEQ ID NO: 402186 - DNA, 25 bp, Artificial
  probe
  misc_feature (1)..(25): SEQ ID NO: 5169; WAN024F5U; Start 159; Stop 183
aagatcaactgcacctgagtcaatc

SEQ ID NO: 402187 - DNA, 25 bp, Artificial
  probe
  misc_feature (1)..(25): SEQ ID NO: 5169; WAN024F5U; Start 83; Stop 107
aaccaacatggctatctccgatatc

SEQ ID NO: 402188 - DNA, 25 bp, Artificial
  probe
  misc_feature (1)..(25): SEQ ID NO: 5169; WAN024F5U; Start 18; Stop 42
tgttttggttttattgatagaggcg

SEQ ID NO: 402189 - DNA, 25 bp, Artificial
  probe
  misc_feature (1)..(25): SEQ ID NO: 5169; WAN024F5U; Start 161; Stop 185
gatcaactgcacctgagtcaatcaa

SEQ ID NO: 402190 - DNA, 25 bp, Artificial
  probe
  misc_feature (1)..(25): SEQ ID NO: 5169; WAN024F5U; Start 158; Stop 182
caagatcaactgcacctgagtcaat

SEQ ID NO: 402191 - DNA, 25 bp, Artificial
  probe
  misc_feature (1)..(25): SEQ ID NO: 5169; WAN024F5U; Start 103; Stop 127
atatctccatcaatttccgcacgag

SEQ ID NO: 402192 - DNA, 25 bp, Artificial
  probe
  misc_feature (1)..(25): SEQ ID NO: 5169; WAN024F5U; Start 91; Stop 115
tggctatctccgatatctccatcaa

SEQ ID NO: 402193 - DNA, 25 bp, Artificial
  probe
  misc_feature (1)..(25): SEQ ID NO: 5169; WAN024F5U; Start 85; Stop 109
ccaacatggctatctccgatatctc

SEQ ID NO: 402194 - DNA, 25 bp, Artificial
  probe
  misc_feature (1)..(25): SEQ ID NO: 5169; WAN024F5U; Start 82; Stop 106
aaaccaacatggctatctccgatat

SEQ ID NO: 402195 - DNA, 25 bp, Artificial
  probe
  misc_feature (1)..(25): SEQ ID NO: 5169; WAN024F5U; Start 97; Stop 121
tctccgatatctccatcaatttccg

SEQ ID NO: 402196 - DNA, 25 bp, Artificial
  probe
  misc_feature (1)..(25): SEQ ID NO: 5169; WAN024F5U; Start 194; Stop 218
caatctcaagaccttgctctcctga

SEQ ID NO: 402197 - DNA, 25 bp, Artificial
  probe
  misc_feature (1)..(25): SEQ ID NO: 5169; WAN024F5U; Start 87; Stop 111
aacatggctatctccgatatctcca

SEQ ID NO: 402198 - DNA, 25 bp, Artificial
  probe
  misc_feature (1)..(25): SEQ ID NO: 5169; WAN024F5U; Start 180; Stop 204
aatcaattttcccgcaatctcaaga

SEQ ID NO: 402199 - DNA, 25 bp, Artificial
  probe
  misc_feature (1)..(25): SEQ ID NO: 5169; WAN024F5U; Start 179; Stop 203
caatcaattttcccgcaatctcaag

SEQ ID NO: 402200 - DNA, 25 bp, Artificial
  probe
  misc_feature (1)..(25): SEQ ID NO: 5169; WAN024F5U; Start 17; Stop 41
ttgttttggttttattgatagaggc

SEQ ID NO: 402201 - DNA, 25 bp, Artificial
  probe
  misc_feature (1)..(25): SEQ ID NO: 5169; WAN024F5U; Start 164; Stop 188
caactgcacctgagtcaatcaattt

SEQ ID NO: 402202 - DNA, 25 bp, Artificial
  probe
  misc_feature (1)..(25): SEQ ID NO: 5169; WAN024F5U; Start 178; Stop 202
tcaatcaattttcccgcaatctcaa

SEQ ID NO: 402203 - DNA, 25 bp, Artificial
  probe
  misc_feature (1)..(25): SEQ ID NO: 5169; WAN024F5U; Start 84; Stop 108
accaacatggctatctccgatatct

SEQ ID NO: 402204 - DNA, 25 bp, Artificial
  probe
  misc_feature (1)..(25): SEQ ID NO: 5169; WAN024F5U; Start 81; Stop 105
caaaccaacatggctatctccgata

SEQ ID NO: 402205 - DNA, 25 bp, Artificial
  probe
  misc_feature (1)..(25): SEQ ID NO: 5169; WAN024F5U; Start 181; Stop 205
atcaattttcccgcaatctcaagac

SEQ ID NO: 402206 - DNA, 25 bp, Artificial
  probe
  misc_feature (1)..(25): SEQ ID NO: 5169; WAN024F5U; Start 176; Stop 200
agtcaatcaattttcccgcaatctc

SEQ ID NO: 402207 - DNA, 25 bp, Artificial
  probe
  misc_feature (1)..(25): SEQ ID NO: 5169; WAN024F5U; Start 175; Stop 199
gagtcaatcaattttcccgcaatct

SEQ ID NO: 402208 - DNA, 25 bp, Artificial
  probe
  misc_feature (1)..(25): SEQ ID NO: 5169; WAN024F5U; Start 95; Stop 119
tatctccgatatctccatcaatttc

SEQ ID NO: 402209 - DNA, 25 bp, Artificial
  probe
  misc_feature (1)..(25): SEQ ID NO: 5169; WAN024F5U; Start 94; Stop 118
ctatctccgatatctccatcaattt

SEQ ID NO: 402210 - DNA, 25 bp, Artificial
  probe
  misc_feature (1)..(25): SEQ ID NO: 5169; WAN024F5U; Start 160; Stop 184
agatcaactgcacctgagtcaatca

SEQ ID NO: 402211 - DNA, 25 bp, Artificial
  probe
  misc_feature (1)..(25): SEQ ID NO: 5169; WAN024F5U; Start 177; Stop 201
gtcaatcaattttcccgcaatctca

SEQ ID NO: 402212 - DNA, 25 bp, Artificial
  probe
  misc_feature (1)..(25): SEQ ID NO: 5169; WAN024F5U; Start 102; Stop 126
gatatctccatcaatttccgcacga

SEQ ID NO: 402213 - DNA, 25 bp, Artificial
  probe
  misc_feature (1)..(25): SEQ ID NO: 5170; WAN024ETF; Start 270; Stop 294
agaacattctcaaagtatgactaca

SEQ ID NO: 402214 - DNA, 25 bp, Artificial
  probe
  misc_feature (1)..(25): SEQ ID NO: 5170; WAN024ETF; Start 271; Stop 295
gaacattctcaaagtatgactacaa

SEQ ID NO: 402215 - DNA, 25 bp, Artificial
  probe
  misc_feature (1)..(25): SEQ ID NO: 5170; WAN024ETF; Start 290; Stop 314
ctacaaaagtcggtaaagtgatacg

SEQ ID NO: 402216 - DNA, 25 bp, Artificial
  probe
  misc_feature (1)..(25): SEQ ID NO: 5170; WAN024ETF; Start 458; Stop 482
ctaaaagattgtctgtgaaacctgg

SEQ ID NO: 402217 - DNA, 25 bp, Artificial
  probe
  misc_feature (1)..(25): SEQ ID NO: 5170; WAN024ETF; Start 455; Stop 479
tgtctaaaagattgtctgtgaaacc

SEQ ID NO: 402218 - DNA, 25 bp, Artificial
  probe
  misc_feature (1)..(25): SEQ ID NO: 5170; WAN024ETF; Start 457; Stop 481
tctaaaagattgtctgtgaaacctg

SEQ ID NO: 402219 - DNA, 25 bp, Artificial
  probe
  misc_feature (1)..(25): SEQ ID NO: 5170; WAN024ETF; Start 456; Stop 480
gtctaaaagattgtctgtgaaacct

SEQ ID NO: 402220 - DNA, 25 bp, Artificial
  probe
  misc_feature (1)..(25): SEQ ID NO: 5170; WAN024ETF; Start 272; Stop 296
aacattctcaaagtatgactacaaa

SEQ ID NO: 402221 - DNA, 25 bp, Artificial
  probe
  misc_feature (1)..(25): SEQ ID NO: 5170; WAN024ETF; Start 269; Stop 293
aagaacattctcaaagtatgactac

SEQ ID NO: 402222 - DNA, 25 bp, Artificial
  probe
  misc_feature (1)..(25): SEQ ID NO: 5170; WAN024ETF; Start 459; Stop 483
taaaagattgtctgtgaaacctggt

SEQ ID NO: 402223 - DNA, 25 bp, Artificial
  probe
  misc_feature (1)..(25): SEQ ID NO: 5170; WAN024ETF; Start 289; Stop 313
actacaaaagtcggtaaagtgatac

SEQ ID NO: 402224 - DNA, 25 bp, Artificial
  probe
  misc_feature (1)..(25): SEQ ID NO: 5170; WAN024ETF; Start 452; Stop 476
agatgtctaaaagattgtctgtgaa

SEQ ID NO: 402225 - DNA, 25 bp, Artificial
  probe
  misc_feature (1)..(25): SEQ ID NO: 5170; WAN024ETF; Start 451; Stop 475
aagatgtctaaaagattgtctgtga

SEQ ID NO: 402226 - DNA, 25 bp, Artificial
  probe
  misc_feature (1)..(25): SEQ ID NO: 5170; WAN024ETF; Start 568; Stop 592
aatgtatctttcaagactgatttct

SEQ ID NO: 402227 - DNA, 25 bp, Artificial
  probe
  misc_feature (1)..(25): SEQ ID NO: 5170; WAN024ETF; Start 454; Stop 478
atgtctaaaagattgtctgtgaaac

SEQ ID NO: 402228 - DNA, 25 bp, Artificial
  probe
  misc_feature (1)..(25): SEQ ID NO: 5170; WAN024ETF; Start 460; Stop 484
aaaagattgtctgtgaaacctggtt

SEQ ID NO: 402229 - DNA, 25 bp, Artificial
  probe
  misc_feature (1)..(25): SEQ ID NO: 5170; WAN024ETF; Start 473; Stop 497
tgaaacctggtttgctttgttattg

SEQ ID NO: 402230 - DNA, 25 bp, Artificial
  probe
  misc_feature (1)..(25): SEQ ID NO: 5170; WAN024ETF; Start 472; Stop 496
gtgaaacctggtttgctttgttatt

SEQ ID NO: 402231 - DNA, 25 bp, Artificial
  probe
  misc_feature (1)..(25): SEQ ID NO: 5170; WAN024ETF; Start 453; Stop 477
gatgtctaaaagattgtctgtgaaa

SEQ ID NO: 402232 - DNA, 25 bp, Artificial
  probe
  misc_feature (1)..(25): SEQ ID NO: 5170; WAN024ETF; Start 450; Stop 474
aaagatgtctaaaagattgtctgtg

SEQ ID NO: 402233 - DNA, 25 bp, Artificial
  probe
  misc_feature (1)..(25): SEQ ID NO: 5170; WAN024ETF; Start 268; Stop 292
aaagaacattctcaaagtatgacta

SEQ ID NO: 402234 - DNA, 25 bp, Artificial
  probe
  misc_feature (1)..(25): SEQ ID NO: 5170; WAN024ETF; Start 267; Stop 291
taaagaacattctcaaagtatgact

SEQ ID NO: 402235 - DNA, 25 bp, Artificial
  probe
  misc_feature (1)..(25): SEQ ID NO: 5170; WAN024ETF; Start 461; Stop 485
aaagattgtctgtgaaacctggttt

SEQ ID NO: 402236 - DNA, 25 bp, Artificial
  probe
  misc_feature (1)..(25): SEQ ID NO: 5170; WAN024ETF; Start 474; Stop 498
gaaacctggtttgctttgttattgg

SEQ ID NO: 402237 - DNA, 25 bp, Artificial
  probe
  misc_feature (1)..(25): SEQ ID NO: 5170; WAN024ETF; Start 471; Stop 495
tgtgaaacctggtttgctttgttat

SEQ ID NO: 402238 - DNA, 25 bp, Artificial
  probe
  misc_feature (1)..(25): SEQ ID NO: 5170; WAN024ETF; Start 462; Stop 486
aagattgtctgtgaaacctggtttg

SEQ ID NO: 402239 - DNA, 25 bp, Artificial
  probe
  misc_feature (1)..(25): SEQ ID NO: 5170; WAN024ETF; Start 564; Stop 588
tgataatgtatctttcaagactgat

SEQ ID NO: 402240 - DNA, 25 bp, Artificial
  probe
  misc_feature (1)..(25): SEQ ID NO: 5170; WAN024ETF; Start 470; Stop 494
ctgtgaaacctggtttgctttgtta

SEQ ID NO: 402241 - DNA, 25 bp, Artificial
  probe
  misc_feature (1)..(25): SEQ ID NO: 5170; WAN024ETF; Start 569; Stop 593
atgtatctttcaagactgatttctt

SEQ ID NO: 402242 - DNA, 25 bp, Artificial
  probe
  misc_feature (1)..(25): SEQ ID NO: 5170; WAN024ETF; Start 266; Stop 290
ttaaagaacattctcaaagtatgac

SEQ ID NO: 402243 - DNA, 25 bp, Artificial
  probe
  misc_feature (1)..(25): SEQ ID NO: 5170; WAN024ETF; Start 273; Stop 297
acattctcaaagtatgactacaaaa

SEQ ID NO: 402244 - DNA, 25 bp, Artificial
  probe
  misc_feature (1)..(25): SEQ ID NO: 5170; WAN024ETF; Start 275; Stop 299
attctcaaagtatgactacaaaagt

SEQ ID NO: 402245 - DNA, 25 bp, Artificial
  probe
  misc_feature (1)..(25): SEQ ID NO: 5170; WAN024ETF; Start 475; Stop 499
aaacctggtttgctttgttattggc

SEQ ID NO: 402246 - DNA, 25 bp, Artificial
  probe
  misc_feature (1)..(25): SEQ ID NO: 5171; WAN024DTI; Start 12; Stop 36
tgagcaatccctatatcgcttaatt

SEQ ID NO: 402247 - DNA, 25 bp, Artificial
  probe
  misc_feature (1)..(25): SEQ ID NO: 5171; WAN024DTI; Start 11; Stop 35
atgagcaatccctatatcgcttaat

SEQ ID NO: 402248 - DNA, 25 bp, Artificial
  probe
  misc_feature (1)..(25): SEQ ID NO: 5171; WAN024DTI; Start 8; Stop 32
aatatgagcaatccctatatcgctt

SEQ ID NO: 402249 - DNA, 25 bp, Artificial
  probe
  misc_feature (1)..(25): SEQ ID NO: 5171; WAN024DTI; Start 7; Stop 31
aaatatgagcaatccctatatcgct

SEQ ID NO: 402250 - DNA, 25 bp, Artificial
  probe
  misc_feature (1)..(25): SEQ ID NO: 5171; WAN024DTI; Start 10; Stop 34
tatgagcaatccctatatcgcttaa

SEQ ID NO: 402251 - DNA, 25 bp, Artificial
  probe
  misc_feature (1)..(25): SEQ ID NO: 5171; WAN024DTI; Start 13; Stop 37
gagcaatccctatatcgcttaattt

SEQ ID NO: 402252 - DNA, 25 bp, Artificial
  probe
  misc_feature (1)..(25): SEQ ID NO: 5171; WAN024DTI; Start 9; Stop 33
atatgagcaatccctatatcgctta

SEQ ID NO: 402253 - DNA, 25 bp, Artificial
  probe
  misc_feature (1)..(25): SEQ ID NO: 5171; WAN024DTI; Start 6; Stop 30
aaaatatgagcaatccctatatcgc

SEQ ID NO: 402254 - DNA, 25 bp, Artificial
  probe
  misc_feature (1)..(25): SEQ ID NO: 5171; WAN024DTI; Start 14; Stop 38
agcaatccctatatcgcttaatttt

SEQ ID NO: 402255 - DNA, 25 bp, Artificial
  probe
  misc_feature (1)..(25): SEQ ID NO: 5171; WAN024DTI; Start 5; Stop 29
taaaatatgagcaatccctatatcg

SEQ ID NO: 402256 - DNA, 25 bp, Artificial
  probe
  misc_feature (1)..(25): SEQ ID NO: 5171; WAN024DTI; Start 1; Stop 25
ttgataaaatatgagcaatccctat

SEQ ID NO: 402257 - DNA, 25 bp, Artificial
  probe
  misc_feature (1)..(25): SEQ ID NO: 5171; WAN024DTI; Start 2; Stop 26
tgataaaatatgagcaatccctata

SEQ ID NO: 402258 - DNA, 25 bp, Artificial
  probe
  misc_feature (1)..(25): SEQ ID NO: 5171; WAN024DTI; Start 93; Stop 117
tggtaaaattttctatggagaagga

SEQ ID NO: 402259 - DNA, 25 bp, Artificial
  probe
  misc_feature (1)..(25): SEQ ID NO: 5171; WAN024DTI; Start 94; Stop 118
ggtaaaattttctatggagaaggaa

SEQ ID NO: 402260 - DNA, 25 bp, Artificial
  probe
  misc_feature (1)..(25): SEQ ID NO: 5171; WAN024DTI; Start 92; Stop 116
atggtaaaattttctatggagaagg

SEQ ID NO: 402261 - DNA, 25 bp, Artificial
  probe
  misc_feature (1)..(25): SEQ ID NO: 5171; WAN024DTI; Start 82; Stop 106
tttcgcttttatggtaaaattttct

SEQ ID NO: 402262 - DNA, 25 bp, Artificial
  probe
  misc_feature (1)..(25): SEQ ID NO: 5171; WAN024DTI; Start 81; Stop 105
ttttcgcttttatggtaaaattttc

SEQ ID NO: 402263 - DNA, 25 bp, Artificial
  probe
  misc_feature (1)..(25): SEQ ID NO: 5171; WAN024DTI; Start 83; Stop 107
ttcgcttttatggtaaaattttcta

SEQ ID NO: 402264 - DNA, 25 bp, Artificial
  probe
  misc_feature (1)..(25): SEQ ID NO: 5171; WAN024DTI; Start 85; Stop 109
cgcttttatggtaaaattttctatg

SEQ ID NO: 402265 - DNA, 25 bp, Artificial
  probe
  misc_feature (1)..(25): SEQ ID NO: 5171; WAN024DTI; Start 95; Stop 119
gtaaaattttctatggagaaggaaa

SEQ ID NO: 402266 - DNA, 25 bp, Artificial
  probe
  misc_feature (1)..(25): SEQ ID NO: 5171; WAN024DTI; Start 84; Stop 108
tcgcttttatggtaaaattttctat

SEQ ID NO: 402267 - DNA, 25 bp, Artificial
  probe
  misc_feature (1)..(25): SEQ ID NO: 5171; WAN024DTI; Start 86; Stop 110
gcttttatggtaaaattttctatgg

SEQ ID NO: 402268 - DNA, 25 bp, Artificial
  probe
  misc_feature (1)..(25): SEQ ID NO: 5172; WAN024FW7; Start 127; Stop 151
tggcacgaagtaatgaataatgatg

SEQ ID NO: 402269 - DNA, 25 bp, Artificial
  probe
  misc_feature (1)..(25): SEQ ID NO: 5172; WAN024FW7; Start 1485; Stop 1509
cgagagtgagcaagatatacaagat

SEQ ID NO: 402270 - DNA, 25 bp, Artificial
  probe
  misc_feature (1)..(25): SEQ ID NO: 5172; WAN024FW7; Start 128; Stop 152
ggcacgaagtaatgaataatgatga

SEQ ID NO: 402271 - DNA, 25 bp, Artificial
  probe
  misc_feature (1)..(25): SEQ ID NO: 5172; WAN024FW7; Start 548; Stop 572
taattgttggcgatgaagttgttaa

SEQ ID NO: 402272 - DNA, 25 bp, Artificial
  probe
  misc_feature (1)..(25): SEQ ID NO: 5172; WAN024FW7; Start 547; Stop 571
ttaattgttggcgatgaagttgtta

SEQ ID NO: 402273 - DNA, 25 bp, Artificial
  probe
  misc_feature (1)..(25): SEQ ID NO: 5172; WAN024FW7; Start 126; Stop 150
ttggcacgaagtaatgaataatgat

SEQ ID NO: 402274 - DNA, 25 bp, Artificial
  probe
  misc_feature (1)..(25): SEQ ID NO: 5172; WAN024FW7; Start 125; Stop 149
attggcacgaagtaatgaataatga

SEQ ID NO: 402275 - DNA, 25 bp, Artificial
  probe
  misc_feature (1)..(25): SEQ ID NO: 5172; WAN024FW7; Start 2403; Stop 2427
ttgtggtcttgaagttgctaataat

SEQ ID NO: 402276 - DNA, 25 bp, Artificial
  probe
  misc_feature (1)..(25): SEQ ID NO: 5172; WAN024FW7; Start 2542; Stop 2566
aagataacaacagatattgcttcgg

SEQ ID NO: 402277 - DNA, 25 bp, Artificial
  probe
  misc_feature (1)..(25): SEQ ID NO: 5172; WAN024FW7; Start 129; Stop 153
gcacgaagtaatgaataatgatgag

SEQ ID NO: 402278 - DNA, 25 bp, Artificial
  probe
  misc_feature (1)..(25): SEQ ID NO: 5172; WAN024FW7; Start 124; Stop 148
aattggcacgaagtaatgaataatg

SEQ ID NO: 402279 - DNA, 25 bp, Artificial
  probe
  misc_feature (1)..(25): SEQ ID NO: 5172; WAN024FW7; Start 1104; Stop 1128
cttggttaaggatgaagatgagatt

SEQ ID NO: 402280 - DNA, 25 bp, Artificial
  probe
  misc_feature (1)..(25): SEQ ID NO: 5172; WAN024FW7; Start 1486; Stop 1510
gagagtgagcaagatatacaagatt

SEQ ID NO: 402281 - DNA, 25 bp, Artificial
  probe
  misc_feature (1)..(25): SEQ ID NO: 5172; WAN024FW7; Start 2404; Stop 2428
tgtggtcttgaagttgctaataata

SEQ ID NO: 402282 - DNA, 25 bp, Artificial
  probe
  misc_feature (1)..(25): SEQ ID NO: 5172; WAN024FW7; Start 468; Stop 492
ggatgaagcaccaatatatctgagg

SEQ ID NO: 402283 - DNA, 25 bp, Artificial
  probe
  misc_feature (1)..(25): SEQ ID NO: 5172; WAN024FW7; Start 132; Stop 156
cgaagtaatgaataatgatgagtgg

SEQ ID NO: 402284 - DNA, 25 bp, Artificial
  probe
  misc_feature (1)..(25): SEQ ID NO: 5172; WAN024FW7; Start 1714; Stop 1738
acacaggttattaatgaggcagtaa

SEQ ID NO: 402285 - DNA, 25 bp, Artificial
  probe
  misc_feature (1)..(25): SEQ ID NO: 5172; WAN024FW7; Start 1107; Stop 1131
ggttaaggatgaagatgagattagt

SEQ ID NO: 402286 - DNA, 25 bp, Artificial
  probe
  misc_feature (1)..(25): SEQ ID NO: 5172; WAN024FW7; Start 1106; Stop 1130
tggttaaggatgaagatgagattag

SEQ ID NO: 402287 - DNA, 25 bp, Artificial
  probe
  misc_feature (1)..(25): SEQ ID NO: 5172; WAN024FW7; Start 546; Stop 570
attaattgttggcgatgaagttgtt

SEQ ID NO: 402288 - DNA, 25 bp, Artificial
  probe
  misc_feature (1)..(25): SEQ ID NO: 5172; WAN024FW7; Start 1227; Stop 1251
cagtgagatagattggtatggtatt

SEQ ID NO: 402289 - DNA, 25 bp, Artificial
  probe
  misc_feature (1)..(25): SEQ ID NO: 5172; WAN024FW7; Start 1713; Stop 1737
aacacaggttattaatgaggcagta

SEQ ID NO: 402290 - DNA, 25 bp, Artificial
  probe
  misc_feature (1)..(25): SEQ ID NO: 5172; WAN024FW7; Start 479; Stop 503
caatatatctgaggtatggtgtgtt

SEQ ID NO: 402291 - DNA, 25 bp, Artificial
  probe
  misc_feature (1)..(25): SEQ ID NO: 5172; WAN024FW7; Start 214; Stop 238
agttcagagtataacagttcacatg

SEQ ID NO: 402292 - DNA, 25 bp, Artificial
  probe
  misc_feature (1)..(25): SEQ ID NO: 5172; WAN024FW7; Start 904; Stop 928
cacaccttcttaggaattgaacata

SEQ ID NO: 402293 - DNA, 25 bp, Artificial
  probe
  misc_feature (1)..(25): SEQ ID NO: 5172; WAN024FW7; Start 1483; Stop 1507
atcgagagtgagcaagatatacaag

SEQ ID NO: 402294 - DNA, 25 bp, Artificial
  probe
  misc_feature (1)..(25): SEQ ID NO: 5172; WAN024FW7; Start 1712; Stop 1736
gaacacaggttattaatgaggcagt

SEQ ID NO: 402295 - DNA, 25 bp, Artificial
  probe
  misc_feature (1)..(25): SEQ ID NO: 5172; WAN024FW7; Start 227; Stop 251
acagttcacatgaattgttacaaga

SEQ ID NO: 402296 - DNA, 25 bp, Artificial
  probe
  misc_feature (1)..(25): SEQ ID NO: 5172; WAN024FW7; Start 1484; Stop 1508
tcgagagtgagcaagatatacaaga

SEQ ID NO: 402297 - DNA, 25 bp, Artificial
  probe
  misc_feature (1)..(25): SEQ ID NO: 5172; WAN024FW7; Start 1105; Stop 1129
ttggttaaggatgaagatgagatta

SEQ ID NO: 402298 - DNA, 25 bp, Artificial
  probe
  misc_feature (1)..(25): SEQ ID NO: 5172; WAN024FW7; Start 215; Stop 239
gttcagagtataacagttcacatga

SEQ ID NO: 402299 - DNA, 25 bp, Artificial
  probe
  misc_feature (1)..(25): SEQ ID NO: 5172; WAN024FW7; Start 2251; Stop 2275
ctaccatatctagcaactggaagtg

SEQ ID NO: 402300 - DNA, 25 bp, Artificial
  probe
  misc_feature (1)..(25): SEQ ID NO: 5172; WAN024FW7; Start 903; Stop 927
gcacaccttcttaggaattgaacat

SEQ ID NO: 402301 - DNA, 25 bp, Artificial
  probe
  misc_feature (1)..(25): SEQ ID NO: 5173; WAN024FMY; Start 80; Stop 104
aaagattatcgacaaagaattcaaa

SEQ ID NO: 402302 - DNA, 25 bp, Artificial
  probe
  misc_feature (1)..(25): SEQ ID NO: 5173; WAN024FMY; Start 81; Stop 105
aagattatcgacaaagaattcaaaa

SEQ ID NO: 402303 - DNA, 25 bp, Artificial
  probe
  misc_feature (1)..(25): SEQ ID NO: 5173; WAN024FMY; Start 79; Stop 103
aaaagattatcgacaaagaattcaa

SEQ ID NO: 402304 - DNA, 25 bp, Artificial
  probe
  misc_feature (1)..(25): SEQ ID NO: 5173; WAN024FMY; Start 76; Stop 100
agtaaaagattatcgacaaagaatt

SEQ ID NO: 402305 - DNA, 25 bp, Artificial
  probe
  misc_feature (1)..(25): SEQ ID NO: 5173; WAN024FMY; Start 78; Stop 102
taaaagattatcgacaaagaattca

SEQ ID NO: 402306 - DNA, 25 bp, Artificial
  probe
  misc_feature (1)..(25): SEQ ID NO: 5173; WAN024FMY; Start 77; Stop 101
gtaaaagattatcgacaaagaattc

SEQ ID NO: 402307 - DNA, 25 bp, Artificial
  probe
  misc_feature (1)..(25): SEQ ID NO: 5174; WAN024G74; Start 801; Stop 825
tggacacagttctatatcaatcaca

SEQ ID NO: 402308 - DNA, 25 bp, Artificial
  probe
  misc_feature (1)..(25): SEQ ID NO: 5174; WAN024G74; Start 802; Stop 826
ggacacagttctatatcaatcacac

SEQ ID NO: 402309 - DNA, 25 bp, Artificial
  probe
  misc_feature (1)..(25): SEQ ID NO: 5174; WAN024G74; Start 803; Stop 827
gacacagttctatatcaatcacaca

SEQ ID NO: 402310 - DNA, 25 bp, Artificial
  probe
  misc_feature (1)..(25): SEQ ID NO: 5174; WAN024G74; Start 242; Stop 266
accagcacataattgaagagaatcc

SEQ ID NO: 402311 - DNA, 25 bp, Artificial
  probe
  misc_feature (1)..(25): SEQ ID NO: 5174; WAN024G74; Start 241; Stop 265
taccagcacataattgaagagaatc

SEQ ID NO: 402312 - DNA, 25 bp, Artificial
  probe
  misc_feature (1)..(25): SEQ ID NO: 5174; WAN024G74; Start 156; Stop 180
cgaagagttgacacaatctaacata

SEQ ID NO: 402313 - DNA, 25 bp, Artificial
  probe
  misc_feature (1)..(25): SEQ ID NO: 5174; WAN024G74; Start 239; Stop 263
aataccagcacataattgaagagaa

SEQ ID NO: 402314 - DNA, 25 bp, Artificial
  probe
  misc_feature (1)..(25): SEQ ID NO: 5174; WAN024G74; Start 804; Stop 828
acacagttctatatcaatcacacaa

SEQ ID NO: 402315 - DNA, 25 bp, Artificial
  probe
  misc_feature (1)..(25): SEQ ID NO: 5174; WAN024G74; Start 240; Stop 264
ataccagcacataattgaagagaat

SEQ ID NO: 402316 - DNA, 25 bp, Artificial
  probe
  misc_feature (1)..(25): SEQ ID NO: 5174; WAN024G74; Start 800; Stop 824
ttggacacagttctatatcaatcac

SEQ ID NO: 402317 - DNA, 25 bp, Artificial
  probe
  misc_feature (1)..(25): SEQ ID NO: 5174; WAN024G74; Start 799; Stop 823
cttggacacagttctatatcaatca

SEQ ID NO: 402318 - DNA, 25 bp, Artificial
  probe
  misc_feature (1)..(25): SEQ ID NO: 5174; WAN024G74; Start 798; Stop 822
tcttggacacagttctatatcaatc

SEQ ID NO: 402319 - DNA, 25 bp, Artificial
  probe
  misc_feature (1)..(25): SEQ ID NO: 5174; WAN024G74; Start 795; Stop 819
aattcttggacacagttctatatca

SEQ ID NO: 402320 - DNA, 25 bp, Artificial
  probe
  misc_feature (1)..(25): SEQ ID NO: 5174; WAN024G74; Start 146; Stop 170
aatcctatatcgaagagttgacaca

SEQ ID NO: 402321 - DNA, 25 bp, Artificial
  probe
  misc_feature (1)..(25): SEQ ID NO: 5174; WAN024G74; Start 797; Stop 821
ttcttggacacagttctatatcaat

SEQ ID NO: 402322 - DNA, 25 bp, Artificial
  probe
  misc_feature (1)..(25): SEQ ID NO: 5174; WAN024G74; Start 796; Stop 820
attcttggacacagttctatatcaa

SEQ ID NO: 402323 - DNA, 25 bp, Artificial
  probe
  misc_feature (1)..(25): SEQ ID NO: 5174; WAN024G74; Start 145; Stop 169
gaatcctatatcgaagagttgacac

SEQ ID NO: 402324 - DNA, 25 bp, Artificial
  probe
  misc_feature (1)..(25): SEQ ID NO: 5174; WAN024G74; Start 155; Stop 179
tcgaagagttgacacaatctaacat

SEQ ID NO: 402325 - DNA, 25 bp, Artificial
  probe
  misc_feature (1)..(25): SEQ ID NO: 5174; WAN024G74; Start 154; Stop 178
atcgaagagttgacacaatctaaca

SEQ ID NO: 402326 - DNA, 25 bp, Artificial
  probe
  misc_feature (1)..(25): SEQ ID NO: 5174; WAN024G74; Start 148; Stop 172
tcctatatcgaagagttgacacaat

SEQ ID NO: 402327 - DNA, 25 bp, Artificial
  probe
  misc_feature (1)..(25): SEQ ID NO: 5174; WAN024G74; Start 147; Stop 171
atcctatatcgaagagttgacacaa

SEQ ID NO: 402328 - DNA, 25 bp, Artificial
  probe
  misc_feature (1)..(25): SEQ ID NO: 5174; WAN024G74; Start 149; Stop 173
cctatatcgaagagttgacacaatc

SEQ ID NO: 402329 - DNA, 25 bp, Artificial
  probe
  misc_feature (1)..(25): SEQ ID NO: 5174; WAN024G74; Start 880; Stop 904
aatcctatgtcagtgattcattctg

SEQ ID NO: 402330 - DNA, 25 bp, Artificial
  probe
  misc_feature (1)..(25): SEQ ID NO: 5174; WAN024G74; Start 879; Stop 903
caatcctatgtcagtgattcattct

SEQ ID NO: 402331 - DNA, 25 bp, Artificial
  probe
  misc_feature (1)..(25): SEQ ID NO: 5174; WAN024G74; Start 878; Stop 902
tcaatcctatgtcagtgattcattc

SEQ ID NO: 402332 - DNA, 25 bp, Artificial
  probe
  misc_feature (1)..(25): SEQ ID NO: 5174; WAN024G74; Start 262; Stop 286
aatcccttcaatcaattacgctttc

SEQ ID NO: 402333 - DNA, 25 bp, Artificial
  probe
  misc_feature (1)..(25): SEQ ID NO: 5174; WAN024G74; Start 77; Stop 101
gttcacacacgattcgagcttataa

SEQ ID NO: 402334 - DNA, 25 bp, Artificial
  probe
  misc_feature (1)..(25): SEQ ID NO: 5174; WAN024G74; Start 265; Stop 289
cccttcaatcaattacgctttcaat

SEQ ID NO: 402335 - DNA, 25 bp, Artificial
  probe
  misc_feature (1)..(25): SEQ ID NO: 5174; WAN024G74; Start 817; Stop 841
tcaatcacacaaatctatactcacg

SEQ ID NO: 402336 - DNA, 25 bp, Artificial
  probe
  misc_feature (1)..(25): SEQ ID NO: 5174; WAN024G74; Start 244; Stop 268
cagcacataattgaagagaatccct

SEQ ID NO: 402337 - DNA, 25 bp, Artificial
  probe
  misc_feature (1)..(25): SEQ ID NO: 5174; WAN024G74; Start 261; Stop 285
gaatcccttcaatcaattacgcttt

SEQ ID NO: 402338 - DNA, 25 bp, Artificial
  probe
  misc_feature (1)..(25): SEQ ID NO: 5174; WAN024G74; Start 245; Stop 269
agcacataattgaagagaatccctt

SEQ ID NO: 402339 - DNA, 25 bp, Artificial
  probe
  misc_feature (1)..(25): SEQ ID NO: 5174; WAN024G74; Start 153; Stop 177
tatcgaagagttgacacaatctaac

SEQ ID NO: 402340 - DNA, 25 bp, Artificial
  probe
  misc_feature (1)..(25): SEQ ID NO: 5175; WAN024DD7; Start 372; Stop 396
aatgattgattcgttgagtgaggaa

SEQ ID NO: 402341 - DNA, 25 bp, Artificial
  probe
  misc_feature (1)..(25): SEQ ID NO: 5175; WAN024DD7; Start 375; Stop 399
gattgattcgttgagtgaggaagaa

SEQ ID NO: 402342 - DNA, 25 bp, Artificial
  probe
  misc_feature (1)..(25): SEQ ID NO: 5175; WAN024DD7; Start 373; Stop 397
atgattgattcgttgagtgaggaag

SEQ ID NO: 402343 - DNA, 25 bp, Artificial
  probe
  misc_feature (1)..(25): SEQ ID NO: 5175; WAN024DD7; Start 271; Stop 295
caacttggtgaattatatcagtggt

SEQ ID NO: 402344 - DNA, 25 bp, Artificial
  probe
  misc_feature (1)..(25): SEQ ID NO: 5175; WAN024DD7; Start 273; Stop 297
acttggtgaattatatcagtggttc

SEQ ID NO: 402345 - DNA, 25 bp, Artificial
  probe
  misc_feature (1)..(25): SEQ ID NO: 5175; WAN024DD7; Start 270; Stop 294
tcaacttggtgaattatatcagtgg

SEQ ID NO: 402346 - DNA, 25 bp, Artificial
  probe
  misc_feature (1)..(25): SEQ ID NO: 5175; WAN024DD7; Start 374; Stop 398
tgattgattcgttgagtgaggaaga

SEQ ID NO: 402347 - DNA, 25 bp, Artificial
  probe
  misc_feature (1)..(25): SEQ ID NO: 5175; WAN024DD7; Start 272; Stop 296
aacttggtgaattatatcagtggtt

SEQ ID NO: 402348 - DNA, 25 bp, Artificial
  probe
  misc_feature (1)..(25): SEQ ID NO: 5175; WAN024DD7; Start 371; Stop 395
caatgattgattcgttgagtgagga

SEQ ID NO: 402349 - DNA, 25 bp, Artificial
  probe
  misc_feature (1)..(25): SEQ ID NO: 5175; WAN024DD7; Start 126; Stop 150
agataagagagctgatgaagttgac

SEQ ID NO: 402350 - DNA, 25 bp, Artificial
  probe
  misc_feature (1)..(25): SEQ ID NO: 5175; WAN024DD7; Start 127; Stop 151
gataagagagctgatgaagttgaca

SEQ ID NO: 402351 - DNA, 25 bp, Artificial
  probe
  misc_feature (1)..(25): SEQ ID NO: 5175; WAN024DD7; Start 125; Stop 149
aagataagagagctgatgaagttga

SEQ ID NO: 402352 - DNA, 25 bp, Artificial
  probe
  misc_feature (1)..(25): SEQ ID NO: 5175; WAN024DD7; Start 378; Stop 402
tgattcgttgagtgaggaagaatta

SEQ ID NO: 402353 - DNA, 25 bp, Artificial
  probe
  misc_feature (1)..(25): SEQ ID NO: 5175; WAN024DD7; Start 376; Stop 400
attgattcgttgagtgaggaagaat

SEQ ID NO: 402354 - DNA, 25 bp, Artificial
  probe
  misc_feature (1)..(25): SEQ ID NO: 5175; WAN024DD7; Start 285; Stop 309
atatcagtggttcacagatacctac

SEQ ID NO: 402355 - DNA, 25 bp, Artificial
  probe
  misc_feature (1)..(25): SEQ ID NO: 5175; WAN024DD7; Start 377; Stop 401
ttgattcgttgagtgaggaagaatt

SEQ ID NO: 402356 - DNA, 25 bp, Artificial
  probe
  misc_feature (1)..(25): SEQ ID NO: 5175; WAN024DD7; Start 379; Stop 403
gattcgttgagtgaggaagaattat

SEQ ID NO: 402357 - DNA, 25 bp, Artificial
  probe
  misc_feature (1)..(25): SEQ ID NO: 5175; WAN024DD7; Start 295; Stop 319
ttcacagatacctacgctcatttat

SEQ ID NO: 402358 - DNA, 25 bp, Artificial
  probe
  misc_feature (1)..(25): SEQ ID NO: 5175; WAN024DD7; Start 294; Stop 318
gttcacagatacctacgctcattta

SEQ ID NO: 402359 - DNA, 25 bp, Artificial
  probe
  misc_feature (1)..(25): SEQ ID NO: 5175; WAN024DD7; Start 205; Stop 229
aaatgggaagaagatgaaagaaagg

SEQ ID NO: 402360 - DNA, 25 bp, Artificial
  probe
  misc_feature (1)..(25): SEQ ID NO: 5175; WAN024DD7; Start 387; Stop 411
gagtgaggaagaattatttgaaccg

SEQ ID NO: 402361 - DNA, 25 bp, Artificial
  probe
  misc_feature (1)..(25): SEQ ID NO: 5175; WAN024DD7; Start 283; Stop 307
ttatatcagtggttcacagatacct

SEQ ID NO: 402362 - DNA, 25 bp, Artificial
  probe
  misc_feature (1)..(25): SEQ ID NO: 5175; WAN024DD7; Start 206; Stop 230
aatgggaagaagatgaaagaaaggg

SEQ ID NO: 402363 - DNA, 25 bp, Artificial
  probe
  misc_feature (1)..(25): SEQ ID NO: 5175; WAN024DD7; Start 391; Stop 415
gaggaagaattatttgaaccgcata

SEQ ID NO: 402364 - DNA, 25 bp, Artificial
  probe
  misc_feature (1)..(25): SEQ ID NO: 5175; WAN024DD7; Start 286; Stop 310
tatcagtggttcacagatacctacg

SEQ ID NO: 402365 - DNA, 25 bp, Artificial
  probe
  misc_feature (1)..(25): SEQ ID NO: 5175; WAN024DD7; Start 383; Stop 407
cgttgagtgaggaagaattatttga

SEQ ID NO: 402366 - DNA, 25 bp, Artificial
  probe
  misc_feature (1)..(25): SEQ ID NO: 5175; WAN024DD7; Start 382; Stop 406
tcgttgagtgaggaagaattatttg

SEQ ID NO: 402367 - DNA, 25 bp, Artificial
  probe
  misc_feature (1)..(25): SEQ ID NO: 5175; WAN024DD7; Start 363; Stop 387
tatctctgcaatgattgattcgttg

SEQ ID NO: 402368 - DNA, 25 bp, Artificial
  probe
  misc_feature (1)..(25): SEQ ID NO: 5175; WAN024DD7; Start 361; Stop 385
tctatctctgcaatgattgattcgt

SEQ ID NO: 402369 - DNA, 25 bp, Artificial
  probe
  misc_feature (1)..(25): SEQ ID NO: 5175; WAN024DD7; Start 380; Stop 404
attcgttgagtgaggaagaattatt

SEQ ID NO: 402370 - DNA, 25 bp, Artificial
  probe
  misc_feature (1)..(25): SEQ ID NO: 5175; WAN024DD7; Start 362; Stop 386
ctatctctgcaatgattgattcgtt

SEQ ID NO: 402371 - DNA, 25 bp, Artificial
  probe
  misc_feature (1)..(25): SEQ ID NO: 5175; WAN024DD7; Start 360; Stop 384
ttctatctctgcaatgattgattcg

SEQ ID NO: 402372 - DNA, 25 bp, Artificial
  probe
  misc_feature (1)..(25): SEQ ID NO: 5175; WAN024DD7; Start 128; Stop 152
ataagagagctgatgaagttgacag

SEQ ID NO: 402373 - DNA, 25 bp, Artificial
  probe
  misc_feature (1)..(25): SEQ ID NO: 5176; WAN024FIT; Start 203; Stop 227
tcagcataggtatagagatagacac

SEQ ID NO: 402374 - DNA, 25 bp, Artificial
  probe
  misc_feature (1)..(25): SEQ ID NO: 5176; WAN024FIT; Start 202; Stop 226
ttcagcataggtatagagatagaca

SEQ ID NO: 402375 - DNA, 25 bp, Artificial
  probe
  misc_feature (1)..(25): SEQ ID NO: 5176; WAN024FIT; Start 22; Stop 46
cgtgtccatgtacttgttgatgatt

SEQ ID NO: 402376 - DNA, 25 bp, Artificial
  probe
  misc_feature (1)..(25): SEQ ID NO: 5176; WAN024FIT; Start 205; Stop 229
agcataggtatagagatagacacca

SEQ ID NO: 402377 - DNA, 25 bp, Artificial
  probe
  misc_feature (1)..(25): SEQ ID NO: 5176; WAN024FIT; Start 204; Stop 228
cagcataggtatagagatagacacc

SEQ ID NO: 402378 - DNA, 25 bp, Artificial
  probe
  misc_feature (1)..(25): SEQ ID NO: 5176; WAN024FIT; Start 206; Stop 230
gcataggtatagagatagacaccat

SEQ ID NO: 402379 - DNA, 25 bp, Artificial
  probe
  misc_feature (1)..(25): SEQ ID NO: 5176; WAN024FIT; Start 155; Stop 179
ataagttcaatggtctgtttagcgt

SEQ ID NO: 402380 - DNA, 25 bp, Artificial
  probe
  misc_feature (1)..(25): SEQ ID NO: 5176; WAN024FIT; Start 154; Stop 178
tataagttcaatggtctgtttagcg

SEQ ID NO: 402381 - DNA, 25 bp, Artificial
  probe
  misc_feature (1)..(25): SEQ ID NO: 5176; WAN024FIT; Start 16; Stop 40
cttcatcgtgtccatgtacttgttg

SEQ ID NO: 402382 - DNA, 25 bp, Artificial
  probe
  misc_feature (1)..(25): SEQ ID NO: 5176; WAN024FIT; Start 21; Stop 45
tcgtgtccatgtacttgttgatgat

SEQ ID NO: 402383 - DNA, 25 bp, Artificial
  probe
  misc_feature (1)..(25): SEQ ID NO: 5176; WAN024FIT; Start 20; Stop 44
atcgtgtccatgtacttgttgatga

SEQ ID NO: 402384 - DNA, 25 bp, Artificial
  probe
  misc_feature (1)..(25): SEQ ID NO: 5176; WAN024FIT; Start 156; Stop 180
taagttcaatggtctgtttagcgtc

SEQ ID NO: 402385 - DNA, 25 bp, Artificial
  probe
  misc_feature (1)..(25): SEQ ID NO: 5176; WAN024FIT; Start 18; Stop 42
tcatcgtgtccatgtacttgttgat

SEQ ID NO: 402386 - DNA, 25 bp, Artificial
  probe
  misc_feature (1)..(25): SEQ ID NO: 5176; WAN024FIT; Start 211; Stop 235
ggtatagagatagacaccataagga

SEQ ID NO: 402387 - DNA, 25 bp, Artificial
  probe
  misc_feature (1)..(25): SEQ ID NO: 5176; WAN024FIT; Start 121; Stop 145
gatagggtaagacaggttcatattg

SEQ ID NO: 402388 - DNA, 25 bp, Artificial
  probe
  misc_feature (1)..(25): SEQ ID NO: 5176; WAN024FIT; Start 117; Stop 141
aatagatagggtaagacaggttcat

SEQ ID NO: 402389 - DNA, 25 bp, Artificial
  probe
  misc_feature (1)..(25): SEQ ID NO: 5176; WAN024FIT; Start 210; Stop 234
aggtatagagatagacaccataagg

SEQ ID NO: 402390 - DNA, 25 bp, Artificial
  probe
  misc_feature (1)..(25): SEQ ID NO: 5176; WAN024FIT; Start 120; Stop 144
agatagggtaagacaggttcatatt

SEQ ID NO: 402391 - DNA, 25 bp, Artificial
  probe
  misc_feature (1)..(25): SEQ ID NO: 5176; WAN024FIT; Start 212; Stop 236
gtatagagatagacaccataaggaa

SEQ ID NO: 402392 - DNA, 25 bp, Artificial
  probe
  misc_feature (1)..(25): SEQ ID NO: 5176; WAN024FIT; Start 17; Stop 41
ttcatcgtgtccatgtacttgttga

SEQ ID NO: 402393 - DNA, 25 bp, Artificial
  probe
  misc_feature (1)..(25): SEQ ID NO: 5176; WAN024FIT; Start 23; Stop 47
gtgtccatgtacttgttgatgattt

SEQ ID NO: 402394 - DNA, 25 bp, Artificial
  probe
  misc_feature (1)..(25): SEQ ID NO: 5176; WAN024FIT; Start 116; Stop 140
taatagatagggtaagacaggttca

SEQ ID NO: 402395 - DNA, 25 bp, Artificial
  probe
  misc_feature (1)..(25): SEQ ID NO: 5176; WAN024FIT; Start 124; Stop 148
agggtaagacaggttcatattgtat

SEQ ID NO: 402396 - DNA, 25 bp, Artificial
  probe
  misc_feature (1)..(25): SEQ ID NO: 5176; WAN024FIT; Start 122; Stop 146
atagggtaagacaggttcatattgt

SEQ ID NO: 402397 - DNA, 25 bp, Artificial
  probe
  misc_feature (1)..(25): SEQ ID NO: 5176; WAN024FIT; Start 214; Stop 238
atagagatagacaccataaggaatt

SEQ ID NO: 402398 - DNA, 25 bp, Artificial
  probe
  misc_feature (1)..(25): SEQ ID NO: 5176; WAN024FIT; Start 118; Stop 142
atagatagggtaagacaggttcata

SEQ ID NO: 402399 - DNA, 25 bp, Artificial
  probe
  misc_feature (1)..(25): SEQ ID NO: 5176; WAN024FIT; Start 113; Stop 137
tcataatagatagggtaagacaggt

SEQ ID NO: 402400 - DNA, 25 bp, Artificial
  probe
  misc_feature (1)..(25): SEQ ID NO: 5176; WAN024FIT; Start 119; Stop 143
tagatagggtaagacaggttcatat

SEQ ID NO: 402401 - DNA, 25 bp, Artificial
  probe
  misc_feature (1)..(25): SEQ ID NO: 5176; WAN024FIT; Start 78; Stop 102
tcttgctcttatttacatattccca

SEQ ID NO: 402402 - DNA, 25 bp, Artificial
  probe
  misc_feature (1)..(25): SEQ ID NO: 5176; WAN024FIT; Start 123; Stop 147
tagggtaagacaggttcatattgta

SEQ ID NO: 402403 - DNA, 25 bp, Artificial
  probe
  misc_feature (1)..(25): SEQ ID NO: 5176; WAN024FIT; Start 125; Stop 149
gggtaagacaggttcatattgtatt

SEQ ID NO: 402404 - DNA, 25 bp, Artificial
  probe
  misc_feature (1)..(25): SEQ ID NO: 5176; WAN024FIT; Start 77; Stop 101
ctcttgctcttatttacatattccc

SEQ ID NO: 402405 - DNA, 25 bp, Artificial
  probe
  misc_feature (1)..(25): SEQ ID NO: 5176; WAN024FIT; Start 157; Stop 181
aagttcaatggtctgtttagcgtca

SEQ ID NO: 402406 - DNA, 25 bp, Artificial
  probe
  misc_feature (1)..(25): SEQ ID NO: 5177; WAN024ESC; Start 276; Stop 300
acaacttcactactgtgttcctaag

SEQ ID NO: 402407 - DNA, 25 bp, Artificial
  probe
  misc_feature (1)..(25): SEQ ID NO: 5177; WAN024ESC; Start 217; Stop 241
attacagcagatggtcactacgaag

SEQ ID NO: 402408 - DNA, 25 bp, Artificial
  probe
  misc_feature (1)..(25): SEQ ID NO: 5177; WAN024ESC; Start 216; Stop 240
gattacagcagatggtcactacgaa

SEQ ID NO: 402409 - DNA, 25 bp, Artificial
  probe
  misc_feature (1)..(25): SEQ ID NO: 5177; WAN024ESC; Start 277; Stop 301
caacttcactactgtgttcctaagg

SEQ ID NO: 402410 - DNA, 25 bp, Artificial
  probe
  misc_feature (1)..(25): SEQ ID NO: 5177; WAN024ESC; Start 213; Stop 237
catgattacagcagatggtcactac

SEQ ID NO: 402411 - DNA, 25 bp, Artificial
  probe
  misc_feature (1)..(25): SEQ ID NO: 5177; WAN024ESC; Start 212; Stop 236
acatgattacagcagatggtcacta

SEQ ID NO: 402412 - DNA, 25 bp, Artificial
  probe
  misc_feature (1)..(25): SEQ ID NO: 5177; WAN024ESC; Start 214; Stop 238
atgattacagcagatggtcactacg

SEQ ID NO: 402413 - DNA, 25 bp, Artificial
  probe
  misc_feature (1)..(25): SEQ ID NO: 5177; WAN024ESC; Start 208; Stop 232
gttcacatgattacagcagatggtc

SEQ ID NO: 402414 - DNA, 25 bp, Artificial
  probe
  misc_feature (1)..(25): SEQ ID NO: 5177; WAN024ESC; Start 417; Stop 441
ctatccagagcacaaggagatgatt

SEQ ID NO: 402415 - DNA, 25 bp, Artificial
  probe
  misc_feature (1)..(25): SEQ ID NO: 5177; WAN024ESC; Start 209; Stop 233
ttcacatgattacagcagatggtca

SEQ ID NO: 402416 - DNA, 25 bp, Artificial
  probe
  misc_feature (1)..(25): SEQ ID NO: 5177; WAN024ESC; Start 418; Stop 442
tatccagagcacaaggagatgattg

SEQ ID NO: 402417 - DNA, 25 bp, Artificial
  probe
  misc_feature (1)..(25): SEQ ID NO: 5177; WAN024ESC; Start 207; Stop 231
tgttcacatgattacagcagatggt

SEQ ID NO: 402418 - DNA, 25 bp, Artificial
  probe
  misc_feature (1)..(25): SEQ ID NO: 5177; WAN024ESC; Start 211; Stop 235
cacatgattacagcagatggtcact

SEQ ID NO: 402419 - DNA, 25 bp, Artificial
  probe
  misc_feature (1)..(25): SEQ ID NO: 5177; WAN024ESC; Start 210; Stop 234
tcacatgattacagcagatggtcac

SEQ ID NO: 402420 - DNA, 25 bp, Artificial
  probe
  misc_feature (1)..(25): SEQ ID NO: 5177; WAN024ESC; Start 263; Stop 287
tatccaaagggcaacaacttcacta

SEQ ID NO: 402421 - DNA, 25 bp, Artificial
  probe
  misc_feature (1)..(25): SEQ ID NO: 5177; WAN024ESC; Start 215; Stop 239
tgattacagcagatggtcactacga

SEQ ID NO: 402422 - DNA, 25 bp, Artificial
  probe
  misc_feature (1)..(25): SEQ ID NO: 5177; WAN024ESC; Start 259; Stop 283
gacatatccaaagggcaacaacttc

SEQ ID NO: 402423 - DNA, 25 bp, Artificial
  probe
  misc_feature (1)..(25): SEQ ID NO: 5177; WAN024ESC; Start 65; Stop 89
cttcagacactataaaccttgctgg

SEQ ID NO: 402424 - DNA, 25 bp, Artificial
  probe
  misc_feature (1)..(25): SEQ ID NO: 5177; WAN024ESC; Start 198; Stop 222
cccacttactgttcacatgattaca

SEQ ID NO: 402425 - DNA, 25 bp, Artificial
  probe
  misc_feature (1)..(25): SEQ ID NO: 5177; WAN024ESC; Start 69; Stop 93
agacactataaaccttgctggtaag

SEQ ID NO: 402426 - DNA, 25 bp, Artificial
  probe
  misc_feature (1)..(25): SEQ ID NO: 5177; WAN024ESC; Start 286; Stop 310
tactgtgttcctaagggcactattt

SEQ ID NO: 402427 - DNA, 25 bp, Artificial
  probe
  misc_feature (1)..(25): SEQ ID NO: 5177; WAN024ESC; Start 68; Stop 92
cagacactataaaccttgctggtaa

SEQ ID NO: 402428 - DNA, 25 bp, Artificial
  probe
  misc_feature (1)..(25): SEQ ID NO: 5177; WAN024ESC; Start 275; Stop 299
aacaacttcactactgtgttcctaa

SEQ ID NO: 402429 - DNA, 25 bp, Artificial
  probe
  misc_feature (1)..(25): SEQ ID NO: 5177; WAN024ESC; Start 262; Stop 286
atatccaaagggcaacaacttcact

SEQ ID NO: 402430 - DNA, 25 bp, Artificial
  probe
  misc_feature (1)..(25): SEQ ID NO: 5177; WAN024ESC; Start 261; Stop 285
catatccaaagggcaacaacttcac

SEQ ID NO: 402431 - DNA, 25 bp, Artificial
  probe
  misc_feature (1)..(25): SEQ ID NO: 5177; WAN024ESC; Start 64; Stop 88
gcttcagacactataaaccttgctg

SEQ ID NO: 402432 - DNA, 25 bp, Artificial
  probe
  misc_feature (1)..(25): SEQ ID NO: 5177; WAN024ESC; Start 274; Stop 298
caacaacttcactactgtgttccta

SEQ ID NO: 402433 - DNA, 25 bp, Artificial
  probe
  misc_feature (1)..(25): SEQ ID NO: 5177; WAN024ESC; Start 285; Stop 309
ctactgtgttcctaagggcactatt

SEQ ID NO: 402434 - DNA, 25 bp, Artificial
  probe
  misc_feature (1)..(25): SEQ ID NO: 5177; WAN024ESC; Start 67; Stop 91
tcagacactataaaccttgctggta

SEQ ID NO: 402435 - DNA, 25 bp, Artificial
  probe
  misc_feature (1)..(25): SEQ ID NO: 5177; WAN024ESC; Start 278; Stop 302
aacttcactactgtgttcctaaggg

SEQ ID NO: 402436 - DNA, 25 bp, Artificial
  probe
  misc_feature (1)..(25): SEQ ID NO: 5177; WAN024ESC; Start 260; Stop 284
acatatccaaagggcaacaacttca

SEQ ID NO: 402437 - DNA, 25 bp, Artificial
  probe
  misc_feature (1)..(25): SEQ ID NO: 5177; WAN024ESC; Start 416; Stop 440
cctatccagagcacaaggagatgat

SEQ ID NO: 402438 - DNA, 25 bp, Artificial
  probe
  misc_feature (1)..(25): SEQ ID NO: 5177; WAN024ESC; Start 344; Stop 368
tttcttgtcttgttgctcctggttt

SEQ ID NO: 402439 - DNA, 25 bp, Artificial
  probe
  misc_feature (1)..(25): SEQ ID NO: 5178; WAN024C78; Start 18; Stop 42
tagttgtgaattgtatagcggatct

SEQ ID NO: 402440 - DNA, 25 bp, Artificial
  probe
  misc_feature (1)..(25): SEQ ID NO: 5178; WAN024C78; Start 17; Stop 41
ctagttgtgaattgtatagcggatc

SEQ ID NO: 402441 - DNA, 25 bp, Artificial
  probe
  misc_feature (1)..(25): SEQ ID NO: 5178; WAN024C78; Start 19; Stop 43
agttgtgaattgtatagcggatctg

SEQ ID NO: 402442 - DNA, 25 bp, Artificial
  probe
  misc_feature (1)..(25): SEQ ID NO: 5178; WAN024C78; Start 20; Stop 44
gttgtgaattgtatagcggatctgg

SEQ ID NO: 402443 - DNA, 25 bp, Artificial
  probe
  misc_feature (1)..(25): SEQ ID NO: 5178; WAN024C78; Start 277; Stop 301
gatgtaggcagtaacttcgataagg

SEQ ID NO: 402444 - DNA, 25 bp, Artificial
  probe
  misc_feature (1)..(25): SEQ ID NO: 5178; WAN024C78; Start 276; Stop 300
ggatgtaggcagtaacttcgataag

SEQ ID NO: 402445 - DNA, 25 bp, Artificial
  probe
  misc_feature (1)..(25): SEQ ID NO: 5178; WAN024C78; Start 285; Stop 309
cagtaacttcgataaggttgctcaa

SEQ ID NO: 402446 - DNA, 25 bp, Artificial
  probe
  misc_feature (1)..(25): SEQ ID NO: 5178; WAN024C78; Start 278; Stop 302
atgtaggcagtaacttcgataaggt

SEQ ID NO: 402447 - DNA, 25 bp, Artificial
  probe
  misc_feature (1)..(25): SEQ ID NO: 5178; WAN024C78; Start 280; Stop 304
gtaggcagtaacttcgataaggttg

SEQ ID NO: 402448 - DNA, 25 bp, Artificial
  probe
  misc_feature (1)..(25): SEQ ID NO: 5178; WAN024C78; Start 279; Stop 303
tgtaggcagtaacttcgataaggtt

SEQ ID NO: 402449 - DNA, 25 bp, Artificial
  probe
  misc_feature (1)..(25): SEQ ID NO: 5178; WAN024C78; Start 72; Stop 96
tttacgactcatttctctttatccc

SEQ ID NO: 402450 - DNA, 25 bp, Artificial
  probe
  misc_feature (1)..(25): SEQ ID NO: 5178; WAN024C78; Start 25; Stop 49
gaattgtatagcggatctggcaata

SEQ ID NO: 402451 - DNA, 25 bp, Artificial
  probe
  misc_feature (1)..(25): SEQ ID NO: 5178; WAN024C78; Start 26; Stop 50
aattgtatagcggatctggcaatac

SEQ ID NO: 402452 - DNA, 25 bp, Artificial
  probe
  misc_feature (1)..(25): SEQ ID NO: 5178; WAN024C78; Start 21; Stop 45
ttgtgaattgtatagcggatctggc

SEQ ID NO: 402453 - DNA, 25 bp, Artificial
  probe
  misc_feature (1)..(25): SEQ ID NO: 5178; WAN024C78; Start 16; Stop 40
actagttgtgaattgtatagcggat

SEQ ID NO: 402454 - DNA, 25 bp, Artificial
  probe
  misc_feature (1)..(25): SEQ ID NO: 5178; WAN024C78; Start 23; Stop 47
gtgaattgtatagcggatctggcaa

SEQ ID NO: 402455 - DNA, 25 bp, Artificial
  probe
  misc_feature (1)..(25): SEQ ID NO: 5178; WAN024C78; Start 287; Stop 311
gtaacttcgataaggttgctcaaac

SEQ ID NO: 402456 - DNA, 25 bp, Artificial
  probe
  misc_feature (1)..(25): SEQ ID NO: 5178; WAN024C78; Start 286; Stop 310
agtaacttcgataaggttgctcaaa

SEQ ID NO: 402457 - DNA, 25 bp, Artificial
  probe
  misc_feature (1)..(25): SEQ ID NO: 5178; WAN024C78; Start 24; Stop 48
tgaattgtatagcggatctggcaat

SEQ ID NO: 402458 - DNA, 25 bp, Artificial
  probe
  misc_feature (1)..(25): SEQ ID NO: 5178; WAN024C78; Start 27; Stop 51
attgtatagcggatctggcaatacg

SEQ ID NO: 402459 - DNA, 25 bp, Artificial
  probe
  misc_feature (1)..(25): SEQ ID NO: 5178; WAN024C78; Start 288; Stop 312
taacttcgataaggttgctcaaacg

SEQ ID NO: 402460 - DNA, 25 bp, Artificial
  probe
  misc_feature (1)..(25): SEQ ID NO: 5178; WAN024C78; Start 275; Stop 299
gggatgtaggcagtaacttcgataa

SEQ ID NO: 402461 - DNA, 25 bp, Artificial
  probe
  misc_feature (1)..(25): SEQ ID NO: 5178; WAN024C78; Start 87; Stop 111
tctttatcccctttccttatgcttt

SEQ ID NO: 402462 - DNA, 25 bp, Artificial
  probe
  misc_feature (1)..(25): SEQ ID NO: 5178; WAN024C78; Start 86; Stop 110
ctctttatcccctttccttatgctt

SEQ ID NO: 402463 - DNA, 25 bp, Artificial
  probe
  misc_feature (1)..(25): SEQ ID NO: 5178; WAN024C78; Start 84; Stop 108
ttctctttatcccctttccttatgc

SEQ ID NO: 402464 - DNA, 25 bp, Artificial
  probe
  misc_feature (1)..(25): SEQ ID NO: 5178; WAN024C78; Start 79; Stop 103
ctcatttctctttatcccctttcct

SEQ ID NO: 402465 - DNA, 25 bp, Artificial
  probe
  misc_feature (1)..(25): SEQ ID NO: 5178; WAN024C78; Start 78; Stop 102
actcatttctctttatcccctttcc

SEQ ID NO: 402466 - DNA, 25 bp, Artificial
  probe
  misc_feature (1)..(25): SEQ ID NO: 5178; WAN024C78; Start 73; Stop 97
ttacgactcatttctctttatcccc

SEQ ID NO: 402467 - DNA, 25 bp, Artificial
  probe
  misc_feature (1)..(25): SEQ ID NO: 5178; WAN024C78; Start 80; Stop 104
tcatttctctttatcccctttcctt

SEQ ID NO: 402468 - DNA, 25 bp, Artificial
  probe
  misc_feature (1)..(25): SEQ ID NO: 5178; WAN024C78; Start 89; Stop 113
tttatcccctttccttatgcttttg

SEQ ID NO: 402469 - DNA, 25 bp, Artificial
  probe
  misc_feature (1)..(25): SEQ ID NO: 5178; WAN024C78; Start 76; Stop 100
cgactcatttctctttatccccttt

SEQ ID NO: 402470 - DNA, 25 bp, Artificial
  probe
  misc_feature (1)..(25): SEQ ID NO: 5178; WAN024C78; Start 74; Stop 98
tacgactcatttctctttatcccct

SEQ ID NO: 402471 - DNA, 25 bp, Artificial
  probe
  misc_feature (1)..(25): SEQ ID NO: 5178; WAN024C78; Start 22; Stop 46
tgtgaattgtatagcggatctggca

SEQ ID NO: 402472 - DNA, 25 bp, Artificial
  probe
  misc_feature (1)..(25): SEQ ID NO: 5179; WAN024CZY; Start 118; Stop 142
gagtggtggttggtcaatagtcaag

SEQ ID NO: 402473 - DNA, 25 bp, Artificial
  probe
  misc_feature (1)..(25): SEQ ID NO: 5179; WAN024CZY; Start 3; Stop 27
gataagtagctatccaggcgatgtt

SEQ ID NO: 402474 - DNA, 25 bp, Artificial
  probe
  misc_feature (1)..(25): SEQ ID NO: 5179; WAN024CZY; Start 1; Stop 25
ttgataagtagctatccaggcgatg

SEQ ID NO: 402475 - DNA, 25 bp, Artificial
  probe
  misc_feature (1)..(25): SEQ ID NO: 5179; WAN024CZY; Start 83; Stop 107
atgagcaaggtggtttgtctttgaa

SEQ ID NO: 402476 - DNA, 25 bp, Artificial
  probe
  misc_feature (1)..(25): SEQ ID NO: 5179; WAN024CZY; Start 115; Stop 139
gaggagtggtggttggtcaatagtc

SEQ ID NO: 402477 - DNA, 25 bp, Artificial
  probe
  misc_feature (1)..(25): SEQ ID NO: 5179; WAN024CZY; Start 120; Stop 144
gtggtggttggtcaatagtcaagga

SEQ ID NO: 402478 - DNA, 25 bp, Artificial
  probe
  misc_feature (1)..(25): SEQ ID NO: 5179; WAN024CZY; Start 119; Stop 143
agtggtggttggtcaatagtcaagg

SEQ ID NO: 402479 - DNA, 25 bp, Artificial
  probe
  misc_feature (1)..(25): SEQ ID NO: 5179; WAN024CZY; Start 117; Stop 141
ggagtggtggttggtcaatagtcaa

SEQ ID NO: 402480 - DNA, 25 bp, Artificial
  probe
  misc_feature (1)..(25): SEQ ID NO: 5179; WAN024CZY; Start 113; Stop 137
ctgaggagtggtggttggtcaatag

SEQ ID NO: 402481 - DNA, 25 bp, Artificial
  probe
  misc_feature (1)..(25): SEQ ID NO: 5179; WAN024CZY; Start 4; Stop 28
ataagtagctatccaggcgatgttt

SEQ ID NO: 402482 - DNA, 25 bp, Artificial
  probe
  misc_feature (1)..(25): SEQ ID NO: 5179; WAN024CZY; Start 96; Stop 120
tttgtctttgaaccttgctgaggag

SEQ ID NO: 402483 - DNA, 25 bp, Artificial
  probe
  misc_feature (1)..(25): SEQ ID NO: 5179; WAN024CZY; Start 2; Stop 26
tgataagtagctatccaggcgatgt

SEQ ID NO: 402484 - DNA, 25 bp, Artificial
  probe
  misc_feature (1)..(25): SEQ ID NO: 5179; WAN024CZY; Start 116; Stop 140
aggagtggtggttggtcaatagtca

SEQ ID NO: 402485 - DNA, 25 bp, Artificial
  probe
  misc_feature (1)..(25): SEQ ID NO: 5179; WAN024CZY; Start 84; Stop 108
tgagcaaggtggtttgtctttgaac

SEQ ID NO: 402486 - DNA, 25 bp, Artificial
  probe
  misc_feature (1)..(25): SEQ ID NO: 5179; WAN024CZY; Start 95; Stop 119
gtttgtctttgaaccttgctgagga

SEQ ID NO: 402487 - DNA, 25 bp, Artificial
  probe
  misc_feature (1)..(25): SEQ ID NO: 5179; WAN024CZY; Start 5; Stop 29
taagtagctatccaggcgatgtttg

SEQ ID NO: 402488 - DNA, 25 bp, Artificial
  probe
  misc_feature (1)..(25): SEQ ID NO: 5179; WAN024CZY; Start 31; Stop 55
gaaaatgagatgcaacaagggaaaa

SEQ ID NO: 402489 - DNA, 25 bp, Artificial
  probe
  misc_feature (1)..(25): SEQ ID NO: 5179; WAN024CZY; Start 114; Stop 138
tgaggagtggtggttggtcaatagt

SEQ ID NO: 402490 - DNA, 25 bp, Artificial
  probe
  misc_feature (1)..(25): SEQ ID NO: 5179; WAN024CZY; Start 82; Stop 106
catgagcaaggtggtttgtctttga

SEQ ID NO: 402491 - DNA, 25 bp, Artificial
  probe
  misc_feature (1)..(25): SEQ ID NO: 5179; WAN024CZY; Start 22; Stop 46
gatgtttgggaaaatgagatgcaac

SEQ ID NO: 402492 - DNA, 25 bp, Artificial
  probe
  misc_feature (1)..(25): SEQ ID NO: 5179; WAN024CZY; Start 25; Stop 49
gtttgggaaaatgagatgcaacaag

SEQ ID NO: 402493 - DNA, 25 bp, Artificial
  probe
  misc_feature (1)..(25): SEQ ID NO: 5179; WAN024CZY; Start 97; Stop 121
ttgtctttgaaccttgctgaggagt

SEQ ID NO: 402494 - DNA, 25 bp, Artificial
  probe
  misc_feature (1)..(25): SEQ ID NO: 5179; WAN024CZY; Start 30; Stop 54
ggaaaatgagatgcaacaagggaaa

SEQ ID NO: 402495 - DNA, 25 bp, Artificial
  probe
  misc_feature (1)..(25): SEQ ID NO: 5179; WAN024CZY; Start 18; Stop 42
aggcgatgtttgggaaaatgagatg

SEQ ID NO: 402496 - DNA, 25 bp, Artificial
  probe
  misc_feature (1)..(25): SEQ ID NO: 5179; WAN024CZY; Start 17; Stop 41
caggcgatgtttgggaaaatgagat

SEQ ID NO: 402497 - DNA, 25 bp, Artificial
  probe
  misc_feature (1)..(25): SEQ ID NO: 5179; WAN024CZY; Start 26; Stop 50
tttgggaaaatgagatgcaacaagg

SEQ ID NO: 402498 - DNA, 25 bp, Artificial
  probe
  misc_feature (1)..(25): SEQ ID NO: 5179; WAN024CZY; Start 80; Stop 104
atcatgagcaaggtggtttgtcttt

SEQ ID NO: 402499 - DNA, 25 bp, Artificial
  probe
  misc_feature (1)..(25): SEQ ID NO: 5179; WAN024CZY; Start 21; Stop 45
cgatgtttgggaaaatgagatgcaa

SEQ ID NO: 402500 - DNA, 25 bp, Artificial
  probe
  misc_feature (1)..(25): SEQ ID NO: 5179; WAN024CZY; Start 98; Stop 122
tgtctttgaaccttgctgaggagtg

SEQ ID NO: 402501 - DNA, 25 bp, Artificial
  probe
  misc_feature (1)..(25): SEQ ID NO: 5179; WAN024CZY; Start 79; Stop 103
gatcatgagcaaggtggtttgtctt

SEQ ID NO: 402502 - DNA, 25 bp, Artificial
  probe
  misc_feature (1)..(25): SEQ ID NO: 5179; WAN024CZY; Start 12; Stop 36
ctatccaggcgatgtttgggaaaat

SEQ ID NO: 402503 - DNA, 25 bp, Artificial
  probe
  misc_feature (1)..(25): SEQ ID NO: 5179; WAN024CZY; Start 13; Stop 37
tatccaggcgatgtttgggaaaatg

SEQ ID NO: 402504 - DNA, 25 bp, Artificial
  probe
  misc_feature (1)..(25): SEQ ID NO: 5179; WAN024CZY; Start 81; Stop 105
tcatgagcaaggtggtttgtctttg

SEQ ID NO: 402505 - DNA, 25 bp, Artificial
  probe
  misc_feature (1)..(25): SEQ ID NO: 5180; WAN024DWO; Start 22; Stop 46
caccttctacagcttgaacatattc

SEQ ID NO: 402506 - DNA, 25 bp, Artificial
  probe
  misc_feature (1)..(25): SEQ ID NO: 5180; WAN024DWO; Start 21; Stop 45
gcaccttctacagcttgaacatatt

SEQ ID NO: 402507 - DNA, 25 bp, Artificial
  probe
  misc_feature (1)..(25): SEQ ID NO: 5180; WAN024DWO; Start 260; Stop 284
ccagttggcaaagagaatacctaaa

SEQ ID NO: 402508 - DNA, 25 bp, Artificial
  probe
  misc_feature (1)..(25): SEQ ID NO: 5180; WAN024DWO; Start 258; Stop 282
taccagttggcaaagagaataccta

SEQ ID NO: 402509 - DNA, 25 bp, Artificial
  probe
  misc_feature (1)..(25): SEQ ID NO: 5180; WAN024DWO; Start 54; Stop 78
gaactatgaacaaagattacatccg

SEQ ID NO: 402510 - DNA, 25 bp, Artificial
  probe
  misc_feature (1)..(25): SEQ ID NO: 5180; WAN024DWO; Start 259; Stop 283
accagttggcaaagagaatacctaa

SEQ ID NO: 402511 - DNA, 25 bp, Artificial
  probe
  misc_feature (1)..(25): SEQ ID NO: 5180; WAN024DWO; Start 23; Stop 47
accttctacagcttgaacatattca

SEQ ID NO: 402512 - DNA, 25 bp, Artificial
  probe
  misc_feature (1)..(25): SEQ ID NO: 5180; WAN024DWO; Start 20; Stop 44
cgcaccttctacagcttgaacatat

SEQ ID NO: 402513 - DNA, 25 bp, Artificial
  probe
  misc_feature (1)..(25): SEQ ID NO: 5180; WAN024DWO; Start 255; Stop 279
ctgtaccagttggcaaagagaatac

SEQ ID NO: 402514 - DNA, 25 bp, Artificial
  probe
  misc_feature (1)..(25): SEQ ID NO: 5180; WAN024DWO; Start 257; Stop 281
gtaccagttggcaaagagaatacct

SEQ ID NO: 402515 - DNA, 25 bp, Artificial
  probe
  misc_feature (1)..(25): SEQ ID NO: 5180; WAN024DWO; Start 24; Stop 48
ccttctacagcttgaacatattcat

SEQ ID NO: 402516 - DNA, 25 bp, Artificial
  probe
  misc_feature (1)..(25): SEQ ID NO: 5180; WAN024DWO; Start 256; Stop 280
tgtaccagttggcaaagagaatacc

SEQ ID NO: 402517 - DNA, 25 bp, Artificial
  probe
  misc_feature (1)..(25): SEQ ID NO: 5180; WAN024DWO; Start 53; Stop 77
agaactatgaacaaagattacatcc

SEQ ID NO: 402518 - DNA, 25 bp, Artificial
  probe
  misc_feature (1)..(25): SEQ ID NO: 5180; WAN024DWO; Start 275; Stop 299
aatacctaaaacacgactaccatcc

SEQ ID NO: 402519 - DNA, 25 bp, Artificial
  probe
  misc_feature (1)..(25): SEQ ID NO: 5180; WAN024DWO; Start 272; Stop 296
gagaatacctaaaacacgactacca

SEQ ID NO: 402520 - DNA, 25 bp, Artificial
  probe
  misc_feature (1)..(25): SEQ ID NO: 5180; WAN024DWO; Start 271; Stop 295
agagaatacctaaaacacgactacc

SEQ ID NO: 402521 - DNA, 25 bp, Artificial
  probe
  misc_feature (1)..(25): SEQ ID NO: 5180; WAN024DWO; Start 27; Stop 51
tctacagcttgaacatattcatcaa

SEQ ID NO: 402522 - DNA, 25 bp, Artificial
  probe
  misc_feature (1)..(25): SEQ ID NO: 5180; WAN024DWO; Start 26; Stop 50
ttctacagcttgaacatattcatca

SEQ ID NO: 402523 - DNA, 25 bp, Artificial
  probe
  misc_feature (1)..(25): SEQ ID NO: 5180; WAN024DWO; Start 273; Stop 297
agaatacctaaaacacgactaccat

SEQ ID NO: 402524 - DNA, 25 bp, Artificial
  probe
  misc_feature (1)..(25): SEQ ID NO: 5180; WAN024DWO; Start 267; Stop 291
gcaaagagaatacctaaaacacgac

SEQ ID NO: 402525 - DNA, 25 bp, Artificial
  probe
  misc_feature (1)..(25): SEQ ID NO: 5180; WAN024DWO; Start 274; Stop 298
gaatacctaaaacacgactaccatc

SEQ ID NO: 402526 - DNA, 25 bp, Artificial
  probe
  misc_feature (1)..(25): SEQ ID NO: 5180; WAN024DWO; Start 264; Stop 288
ttggcaaagagaatacctaaaacac

SEQ ID NO: 402527 - DNA, 25 bp, Artificial
  probe
  misc_feature (1)..(25): SEQ ID NO: 5180; WAN024DWO; Start 261; Stop 285
cagttggcaaagagaatacctaaaa

SEQ ID NO: 402528 - DNA, 25 bp, Artificial
  probe
  misc_feature (1)..(25): SEQ ID NO: 5180; WAN024DWO; Start 268; Stop 292
caaagagaatacctaaaacacgact

SEQ ID NO: 402529 - DNA, 25 bp, Artificial
  probe
  misc_feature (1)..(25): SEQ ID NO: 5180; WAN024DWO; Start 276; Stop 300
atacctaaaacacgactaccatcca

SEQ ID NO: 402530 - DNA, 25 bp, Artificial
  probe
  misc_feature (1)..(25): SEQ ID NO: 5180; WAN024DWO; Start 263; Stop 287
gttggcaaagagaatacctaaaaca

SEQ ID NO: 402531 - DNA, 25 bp, Artificial
  probe
  misc_feature (1)..(25): SEQ ID NO: 5180; WAN024DWO; Start 262; Stop 286
agttggcaaagagaatacctaaaac

SEQ ID NO: 402532 - DNA, 25 bp, Artificial
  probe
  misc_feature (1)..(25): SEQ ID NO: 5180; WAN024DWO; Start 25; Stop 49
cttctacagcttgaacatattcatc

SEQ ID NO: 402533 - DNA, 25 bp, Artificial
  probe
  misc_feature (1)..(25): SEQ ID NO: 5180; WAN024DWO; Start 266; Stop 290
ggcaaagagaatacctaaaacacga

SEQ ID NO: 402534 - DNA, 25 bp, Artificial
  probe
  misc_feature (1)..(25): SEQ ID NO: 5180; WAN024DWO; Start 58; Stop 82
tatgaacaaagattacatccgggaa

SEQ ID NO: 402535 - DNA, 25 bp, Artificial
  probe
  misc_feature (1)..(25): SEQ ID NO: 5180; WAN024DWO; Start 265; Stop 289
tggcaaagagaatacctaaaacacg

SEQ ID NO: 402536 - DNA, 25 bp, Artificial
  probe
  misc_feature (1)..(25): SEQ ID NO: 5180; WAN024DWO; Start 57; Stop 81
ctatgaacaaagattacatccggga

SEQ ID NO: 402537 - DNA, 25 bp, Artificial
  probe
  misc_feature (1)..(25): SEQ ID NO: 5180; WAN024DWO; Start 56; Stop 80
actatgaacaaagattacatccggg

SEQ ID NO: 402538 - DNA, 25 bp, Artificial
  probe
  misc_feature (1)..(25): SEQ ID NO: 5181; WAN024DXT; Start 280; Stop 304
atttcagcaccgatattgataacag

SEQ ID NO: 402539 - DNA, 25 bp, Artificial
  probe
  misc_feature (1)..(25): SEQ ID NO: 5181; WAN024DXT; Start 279; Stop 303
gatttcagcaccgatattgataaca

SEQ ID NO: 402540 - DNA, 25 bp, Artificial
  probe
  misc_feature (1)..(25): SEQ ID NO: 5181; WAN024DXT; Start 278; Stop 302
cgatttcagcaccgatattgataac

SEQ ID NO: 402541 - DNA, 25 bp, Artificial
  probe
  misc_feature (1)..(25): SEQ ID NO: 5181; WAN024DXT; Start 312; Stop 336
catgataacagcattgtcaccaatt

SEQ ID NO: 402542 - DNA, 25 bp, Artificial
  probe
  misc_feature (1)..(25): SEQ ID NO: 5181; WAN024DXT; Start 39; Stop 63
ttctgggacatcttgggtaacaata

SEQ ID NO: 402543 - DNA, 25 bp, Artificial
  probe
  misc_feature (1)..(25): SEQ ID NO: 5181; WAN024DXT; Start 277; Stop 301
ccgatttcagcaccgatattgataa

SEQ ID NO: 402544 - DNA, 25 bp, Artificial
  probe
  misc_feature (1)..(25): SEQ ID NO: 5181; WAN024DXT; Start 40; Stop 64
tctgggacatcttgggtaacaatag

SEQ ID NO: 402545 - DNA, 25 bp, Artificial
  probe
  misc_feature (1)..(25): SEQ ID NO: 5181; WAN024DXT; Start 1; Stop 25
ttgataatacgagctggaacacctg

SEQ ID NO: 402546 - DNA, 25 bp, Artificial
  probe
  misc_feature (1)..(25): SEQ ID NO: 5181; WAN024DXT; Start 100; Stop 124
actccttcgataaccactgcattag

SEQ ID NO: 402547 - DNA, 25 bp, Artificial
  probe
  misc_feature (1)..(25): SEQ ID NO: 5181; WAN024DXT; Start 99; Stop 123
gactccttcgataaccactgcatta

SEQ ID NO: 402548 - DNA, 25 bp, Artificial
  probe
  misc_feature (1)..(25): SEQ ID NO: 5181; WAN024DXT; Start 38; Stop 62
tttctgggacatcttgggtaacaat

SEQ ID NO: 402549 - DNA, 25 bp, Artificial
  probe
  misc_feature (1)..(25): SEQ ID NO: 5181; WAN024DXT; Start 276; Stop 300
accgatttcagcaccgatattgata

SEQ ID NO: 402550 - DNA, 25 bp, Artificial
  probe
  misc_feature (1)..(25): SEQ ID NO: 5181; WAN024DXT; Start 314; Stop 338
tgataacagcattgtcaccaatttc

SEQ ID NO: 402551 - DNA, 25 bp, Artificial
  probe
  misc_feature (1)..(25): SEQ ID NO: 5181; WAN024DXT; Start 313; Stop 337
atgataacagcattgtcaccaattt

SEQ ID NO: 402552 - DNA, 25 bp, Artificial
  probe
  misc_feature (1)..(25): SEQ ID NO: 5181; WAN024DXT; Start 315; Stop 339
gataacagcattgtcaccaatttcc

SEQ ID NO: 402553 - DNA, 25 bp, Artificial
  probe
  misc_feature (1)..(25): SEQ ID NO: 5181; WAN024DXT; Start 316; Stop 340
ataacagcattgtcaccaatttcca

SEQ ID NO: 402554 - DNA, 25 bp, Artificial
  probe
  misc_feature (1)..(25): SEQ ID NO: 5181; WAN024DXT; Start 45; Stop 69
gacatcttgggtaacaatagctcct

SEQ ID NO: 402555 - DNA, 25 bp, Artificial
  probe
  misc_feature (1)..(25): SEQ ID NO: 5181; WAN024DXT; Start 41; Stop 65
ctgggacatcttgggtaacaatagc

SEQ ID NO: 402556 - DNA, 25 bp, Artificial
  probe
  misc_feature (1)..(25): SEQ ID NO: 5181; WAN024DXT; Start 379; Stop 403
ttgatagcacgcttatctagcaaag

SEQ ID NO: 402557 - DNA, 25 bp, Artificial
  probe
  misc_feature (1)..(25): SEQ ID NO: 5181; WAN024DXT; Start 101; Stop 125
ctccttcgataaccactgcattagc

SEQ ID NO: 402558 - DNA, 25 bp, Artificial
  probe
  misc_feature (1)..(25): SEQ ID NO: 5181; WAN024DXT; Start 378; Stop 402
gttgatagcacgcttatctagcaaa

SEQ ID NO: 402559 - DNA, 25 bp, Artificial
  probe
  misc_feature (1)..(25): SEQ ID NO: 5181; WAN024DXT; Start 46; Stop 70
acatcttgggtaacaatagctcctg

SEQ ID NO: 402560 - DNA, 25 bp, Artificial
  probe
  misc_feature (1)..(25): SEQ ID NO: 5181; WAN024DXT; Start 317; Stop 341
taacagcattgtcaccaatttccac

SEQ ID NO: 402561 - DNA, 25 bp, Artificial
  probe
  misc_feature (1)..(25): SEQ ID NO: 5181; WAN024DXT; Start 382; Stop 406
atagcacgcttatctagcaaaggaa

SEQ ID NO: 402562 - DNA, 25 bp, Artificial
  probe
  misc_feature (1)..(25): SEQ ID NO: 5181; WAN024DXT; Start 275; Stop 299
caccgatttcagcaccgatattgat

SEQ ID NO: 402563 - DNA, 25 bp, Artificial
  probe
  misc_feature (1)..(25): SEQ ID NO: 5181; WAN024DXT; Start 332; Stop 356
caatttccacctggtcacggataat

SEQ ID NO: 402564 - DNA, 25 bp, Artificial
  probe
  misc_feature (1)..(25): SEQ ID NO: 5181; WAN024DXT; Start 377; Stop 401
cgttgatagcacgcttatctagcaa

SEQ ID NO: 402565 - DNA, 25 bp, Artificial
  probe
  misc_feature (1)..(25): SEQ ID NO: 5181; WAN024DXT; Start 311; Stop 335
tcatgataacagcattgtcaccaat

SEQ ID NO: 402566 - DNA, 25 bp, Artificial
  probe
  misc_feature (1)..(25): SEQ ID NO: 5181; WAN024DXT; Start 43; Stop 67
gggacatcttgggtaacaatagctc

SEQ ID NO: 402567 - DNA, 25 bp, Artificial
  probe
  misc_feature (1)..(25): SEQ ID NO: 5181; WAN024DXT; Start 381; Stop 405
gatagcacgcttatctagcaaagga

SEQ ID NO: 402568 - DNA, 25 bp, Artificial
  probe
  misc_feature (1)..(25): SEQ ID NO: 5181; WAN024DXT; Start 4; Stop 28
ataatacgagctggaacacctgcta

SEQ ID NO: 402569 - DNA, 25 bp, Artificial
  probe
  misc_feature (1)..(25): SEQ ID NO: 5181; WAN024DXT; Start 93; Stop 117
gatttggactccttcgataaccact

SEQ ID NO: 402570 - DNA, 25 bp, Artificial
  probe
  misc_feature (1)..(25): SEQ ID NO: 5181; WAN024DXT; Start 380; Stop 404
tgatagcacgcttatctagcaaagg

SEQ ID NO: 402571 - DNA, 25 bp, Artificial
  probe
  misc_feature (1)..(25): SEQ ID NO: 5182; WAN024C63; Start 41; Stop 65
taactgcctttgaaacgataaatgg

SEQ ID NO: 402572 - DNA, 25 bp, Artificial
  probe
  misc_feature (1)..(25): SEQ ID NO: 5182; WAN024C63; Start 37; Stop 61
ggaataactgcctttgaaacgataa

SEQ ID NO: 402573 - DNA, 25 bp, Artificial
  probe
  misc_feature (1)..(25): SEQ ID NO: 5182; WAN024C63; Start 60; Stop 84
aaatggtgcgtttaagtcaatatcg

SEQ ID NO: 402574 - DNA, 25 bp, Artificial
  probe
  misc_feature (1)..(25): SEQ ID NO: 5182; WAN024C63; Start 348; Stop 372
ggcaatagcaaatccaattccataa

SEQ ID NO: 402575 - DNA, 25 bp, Artificial
  probe
  misc_feature (1)..(25): SEQ ID NO: 5182; WAN024C63; Start 131; Stop 155
ggcggataataccagcgttattaac

SEQ ID NO: 402576 - DNA, 25 bp, Artificial
  probe
  misc_feature (1)..(25): SEQ ID NO: 5182; WAN024C63; Start 349; Stop 373
gcaatagcaaatccaattccataag

SEQ ID NO: 402577 - DNA, 25 bp, Artificial
  probe
  misc_feature (1)..(25): SEQ ID NO: 5182; WAN024C63; Start 353; Stop 377
tagcaaatccaattccataagaagc

SEQ ID NO: 402578 - DNA, 25 bp, Artificial
  probe
  misc_feature (1)..(25): SEQ ID NO: 5182; WAN024C63; Start 56; Stop 80
cgataaatggtgcgtttaagtcaat

SEQ ID NO: 402579 - DNA, 25 bp, Artificial
  probe
  misc_feature (1)..(25): SEQ ID NO: 5182; WAN024C63; Start 40; Stop 64
ataactgcctttgaaacgataaatg

SEQ ID NO: 402580 - DNA, 25 bp, Artificial
  probe
  misc_feature (1)..(25): SEQ ID NO: 5182; WAN024C63; Start 38; Stop 62
gaataactgcctttgaaacgataaa

SEQ ID NO: 402581 - DNA, 25 bp, Artificial
  probe
  misc_feature (1)..(25): SEQ ID NO: 5182; WAN024C63; Start 42; Stop 66
aactgcctttgaaacgataaatggt

SEQ ID NO: 402582 - DNA, 25 bp, Artificial
  probe
  misc_feature (1)..(25): SEQ ID NO: 5182; WAN024C63; Start 39; Stop 63
aataactgcctttgaaacgataaat

SEQ ID NO: 402583 - DNA, 25 bp, Artificial
  probe
  misc_feature (1)..(25): SEQ ID NO: 5182; WAN024C63; Start 287; Stop 311
tgaccagatcttgattgatatcgtt

SEQ ID NO: 402584 - DNA, 25 bp, Artificial
  probe
  misc_feature (1)..(25): SEQ ID NO: 5182; WAN024C63; Start 286; Stop 310
ttgaccagatcttgattgatatcgt

SEQ ID NO: 402585 - DNA, 25 bp, Artificial
  probe
  misc_feature (1)..(25): SEQ ID NO: 5182; WAN024C63; Start 36; Stop 60
aggaataactgcctttgaaacgata

SEQ ID NO: 402586 - DNA, 25 bp, Artificial
  probe
  misc_feature (1)..(25): SEQ ID NO: 5182; WAN024C63; Start 43; Stop 67
actgcctttgaaacgataaatggtg

SEQ ID NO: 402587 - DNA, 25 bp, Artificial
  probe
  misc_feature (1)..(25): SEQ ID NO: 5182; WAN024C63; Start 59; Stop 83
taaatggtgcgtttaagtcaatatc

SEQ ID NO: 402588 - DNA, 25 bp, Artificial
  probe
  misc_feature (1)..(25): SEQ ID NO: 5182; WAN024C63; Start 57; Stop 81
gataaatggtgcgtttaagtcaata

SEQ ID NO: 402589 - DNA, 25 bp, Artificial
  probe
  misc_feature (1)..(25): SEQ ID NO: 5182; WAN024C63; Start 354; Stop 378
agcaaatccaattccataagaagcg

SEQ ID NO: 402590 - DNA, 25 bp, Artificial
  probe
  misc_feature (1)..(25): SEQ ID NO: 5182; WAN024C63; Start 350; Stop 374
caatagcaaatccaattccataaga

SEQ ID NO: 402591 - DNA, 25 bp, Artificial
  probe
  misc_feature (1)..(25): SEQ ID NO: 5182; WAN024C63; Start 118; Stop 142
cacattggaactcggcggataatac

SEQ ID NO: 402592 - DNA, 25 bp, Artificial
  probe
  misc_feature (1)..(25): SEQ ID NO: 5182; WAN024C63; Start 285; Stop 309
attgaccagatcttgattgatatcg

SEQ ID NO: 402593 - DNA, 25 bp, Artificial
  probe
  misc_feature (1)..(25): SEQ ID NO: 5182; WAN024C63; Start 130; Stop 154
cggcggataataccagcgttattaa

SEQ ID NO: 402594 - DNA, 25 bp, Artificial
  probe
  misc_feature (1)..(25): SEQ ID NO: 5182; WAN024C63; Start 61; Stop 85
aatggtgcgtttaagtcaatatcga

SEQ ID NO: 402595 - DNA, 25 bp, Artificial
  probe
  misc_feature (1)..(25): SEQ ID NO: 5182; WAN024C63; Start 347; Stop 371
tggcaatagcaaatccaattccata

SEQ ID NO: 402596 - DNA, 25 bp, Artificial
  probe
  misc_feature (1)..(25): SEQ ID NO: 5182; WAN024C63; Start 352; Stop 376
atagcaaatccaattccataagaag

SEQ ID NO: 402597 - DNA, 25 bp, Artificial
  probe
  misc_feature (1)..(25): SEQ ID NO: 5182; WAN024C63; Start 288; Stop 312
gaccagatcttgattgatatcgtta

SEQ ID NO: 402598 - DNA, 25 bp, Artificial
  probe
  misc_feature (1)..(25): SEQ ID NO: 5182; WAN024C63; Start 58; Stop 82
ataaatggtgcgtttaagtcaatat

SEQ ID NO: 402599 - DNA, 25 bp, Artificial
  probe
  misc_feature (1)..(25): SEQ ID NO: 5182; WAN024C63; Start 165; Stop 189
aatgacaccaacctcttgttcgatt

SEQ ID NO: 402600 - DNA, 25 bp, Artificial
  probe
  misc_feature (1)..(25): SEQ ID NO: 5182; WAN024C63; Start 289; Stop 313
accagatcttgattgatatcgttaa

SEQ ID NO: 402601 - DNA, 25 bp, Artificial
  probe
  misc_feature (1)..(25): SEQ ID NO: 5182; WAN024C63; Start 351; Stop 375
aatagcaaatccaattccataagaa

SEQ ID NO: 402602 - DNA, 25 bp, Artificial
  probe
  misc_feature (1)..(25): SEQ ID NO: 5182; WAN024C63; Start 129; Stop 153
tcggcggataataccagcgttatta

SEQ ID NO: 402603 - DNA, 25 bp, Artificial
  probe
  misc_feature (1)..(25): SEQ ID NO: 5182; WAN024C63; Start 44; Stop 68
ctgcctttgaaacgataaatggtgc

SEQ ID NO: 402604 - DNA, 25 bp, Artificial
  probe
  misc_feature (1)..(25): SEQ ID NO: 5183; WAN0249X6; Start 626; Stop 650
aattaatgtgtctgtgctctcctaa

SEQ ID NO: 402605 - DNA, 25 bp, Artificial
  probe
  misc_feature (1)..(25): SEQ ID NO: 5183; WAN0249X6; Start 66; Stop 90
agtataatctttggttacggttcct

SEQ ID NO: 402606 - DNA, 25 bp, Artificial
  probe
  misc_feature (1)..(25): SEQ ID NO: 5183; WAN0249X6; Start 69; Stop 93
ataatctttggttacggttcctagc

SEQ ID NO: 402607 - DNA, 25 bp, Artificial
  probe
  misc_feature (1)..(25): SEQ ID NO: 5183; WAN0249X6; Start 65; Stop 89
aagtataatctttggttacggttcc

SEQ ID NO: 402608 - DNA, 25 bp, Artificial
  probe
  misc_feature (1)..(25): SEQ ID NO: 5183; WAN0249X6; Start 397; Stop 421
acggtatcagctaattacaccataa

SEQ ID NO: 402609 - DNA, 25 bp, Artificial
  probe
  misc_feature (1)..(25): SEQ ID NO: 5183; WAN0249X6; Start 396; Stop 420
aacggtatcagctaattacaccata

SEQ ID NO: 402610 - DNA, 25 bp, Artificial
  probe
  misc_feature (1)..(25): SEQ ID NO: 5183; WAN0249X6; Start 62; Stop 86
ctcaagtataatctttggttacggt

SEQ ID NO: 402611 - DNA, 25 bp, Artificial
  probe
  misc_feature (1)..(25): SEQ ID NO: 5183; WAN0249X6; Start 67; Stop 91
gtataatctttggttacggttccta

SEQ ID NO: 402612 - DNA, 25 bp, Artificial
  probe
  misc_feature (1)..(25): SEQ ID NO: 5183; WAN0249X6; Start 61; Stop 85
actcaagtataatctttggttacgg

SEQ ID NO: 402613 - DNA, 25 bp, Artificial
  probe
  misc_feature (1)..(25): SEQ ID NO: 5183; WAN0249X6; Start 70; Stop 94
taatctttggttacggttcctagca

SEQ ID NO: 402614 - DNA, 25 bp, Artificial
  probe
  misc_feature (1)..(25): SEQ ID NO: 5183; WAN0249X6; Start 627; Stop 651
attaatgtgtctgtgctctcctaaa

SEQ ID NO: 402615 - DNA, 25 bp, Artificial
  probe
  misc_feature (1)..(25): SEQ ID NO: 5183; WAN0249X6; Start 625; Stop 649
aaattaatgtgtctgtgctctccta

SEQ ID NO: 402616 - DNA, 25 bp, Artificial
  probe
  misc_feature (1)..(25): SEQ ID NO: 5183; WAN0249X6; Start 624; Stop 648
taaattaatgtgtctgtgctctcct

SEQ ID NO: 402617 - DNA, 25 bp, Artificial
  probe
  misc_feature (1)..(25): SEQ ID NO: 5183; WAN0249X6; Start 623; Stop 647
ctaaattaatgtgtctgtgctctcc

SEQ ID NO: 402618 - DNA, 25 bp, Artificial
  probe
  misc_feature (1)..(25): SEQ ID NO: 5183; WAN0249X6; Start 622; Stop 646
gctaaattaatgtgtctgtgctctc

SEQ ID NO: 402619 - DNA, 25 bp, Artificial
  probe
  misc_feature (1)..(25): SEQ ID NO: 5183; WAN0249X6; Start 63; Stop 87
tcaagtataatctttggttacggtt

SEQ ID NO: 402620 - DNA, 25 bp, Artificial
  probe
  misc_feature (1)..(25): SEQ ID NO: 5183; WAN0249X6; Start 81; Stop 105
tacggttcctagcactgtaaggtaa

SEQ ID NO: 402621 - DNA, 25 bp, Artificial
  probe
  misc_feature (1)..(25): SEQ ID NO: 5183; WAN0249X6; Start 80; Stop 104
ttacggttcctagcactgtaaggta

SEQ ID NO: 402622 - DNA, 25 bp, Artificial
  probe
  misc_feature (1)..(25): SEQ ID NO: 5183; WAN0249X6; Start 64; Stop 88
caagtataatctttggttacggttc

SEQ ID NO: 402623 - DNA, 25 bp, Artificial
  probe
  misc_feature (1)..(25): SEQ ID NO: 5183; WAN0249X6; Start 392; Stop 416
ctcaaacggtatcagctaattacac

SEQ ID NO: 402624 - DNA, 25 bp, Artificial
  probe
  misc_feature (1)..(25): SEQ ID NO: 5183; WAN0249X6; Start 68; Stop 92
tataatctttggttacggttcctag

SEQ ID NO: 402625 - DNA, 25 bp, Artificial
  probe
  misc_feature (1)..(25): SEQ ID NO: 5183; WAN0249X6; Start 391; Stop 415
cctcaaacggtatcagctaattaca

SEQ ID NO: 402626 - DNA, 25 bp, Artificial
  probe
  misc_feature (1)..(25): SEQ ID NO: 5183; WAN0249X6; Start 516; Stop 540
ctttacatggaagtagtcactgaat

SEQ ID NO: 402627 - DNA, 25 bp, Artificial
  probe
  misc_feature (1)..(25): SEQ ID NO: 5183; WAN0249X6; Start 518; Stop 542
ttacatggaagtagtcactgaattc

SEQ ID NO: 402628 - DNA, 25 bp, Artificial
  probe
  misc_feature (1)..(25): SEQ ID NO: 5183; WAN0249X6; Start 517; Stop 541
tttacatggaagtagtcactgaatt

SEQ ID NO: 402629 - DNA, 25 bp, Artificial
  probe
  misc_feature (1)..(25): SEQ ID NO: 5183; WAN0249X6; Start 245; Stop 269
aaatagggaaatgacacagtgttcg

SEQ ID NO: 402630 - DNA, 25 bp, Artificial
  probe
  misc_feature (1)..(25): SEQ ID NO: 5183; WAN0249X6; Start 71; Stop 95
aatctttggttacggttcctagcac

SEQ ID NO: 402631 - DNA, 25 bp, Artificial
  probe
  misc_feature (1)..(25): SEQ ID NO: 5183; WAN0249X6; Start 629; Stop 653
taatgtgtctgtgctctcctaaaat

SEQ ID NO: 402632 - DNA, 25 bp, Artificial
  probe
  misc_feature (1)..(25): SEQ ID NO: 5183; WAN0249X6; Start 237; Stop 261
ccgtatgaaaatagggaaatgacac

SEQ ID NO: 402633 - DNA, 25 bp, Artificial
  probe
  misc_feature (1)..(25): SEQ ID NO: 5183; WAN0249X6; Start 628; Stop 652
ttaatgtgtctgtgctctcctaaaa

SEQ ID NO: 402634 - DNA, 25 bp, Artificial
  probe
  misc_feature (1)..(25): SEQ ID NO: 5183; WAN0249X6; Start 389; Stop 413
aacctcaaacggtatcagctaatta

SEQ ID NO: 402635 - DNA, 25 bp, Artificial
  probe
  misc_feature (1)..(25): SEQ ID NO: 5183; WAN0249X6; Start 238; Stop 262
cgtatgaaaatagggaaatgacaca

SEQ ID NO: 402636 - DNA, 25 bp, Artificial
  probe
  misc_feature (1)..(25): SEQ ID NO: 5183; WAN0249X6; Start 395; Stop 419
aaacggtatcagctaattacaccat

SEQ ID NO: 402637 - DNA, 25 bp, Artificial
  probe
  misc_feature (1)..(25): SEQ ID NO: 5184; WAN024GIX; Start 159; Stop 183
aactgtgttcatcaattccataacg

SEQ ID NO: 402638 - DNA, 25 bp, Artificial
  probe
  misc_feature (1)..(25): SEQ ID NO: 5184; WAN024GIX; Start 155; Stop 179
catcaactgtgttcatcaattccat

SEQ ID NO: 402639 - DNA, 25 bp, Artificial
  probe
  misc_feature (1)..(25): SEQ ID NO: 5184; WAN024GIX; Start 152; Stop 176
actcatcaactgtgttcatcaattc

SEQ ID NO: 402640 - DNA, 25 bp, Artificial
  probe
  misc_feature (1)..(25): SEQ ID NO: 5184; WAN024GIX; Start 161; Stop 185
ctgtgttcatcaattccataacgat

SEQ ID NO: 402641 - DNA, 25 bp, Artificial
  probe
  misc_feature (1)..(25): SEQ ID NO: 5184; WAN024GIX; Start 153; Stop 177
ctcatcaactgtgttcatcaattcc

SEQ ID NO: 402642 - DNA, 25 bp, Artificial
  probe
  misc_feature (1)..(25): SEQ ID NO: 5184; WAN024GIX; Start 160; Stop 184
actgtgttcatcaattccataacga

SEQ ID NO: 402643 - DNA, 25 bp, Artificial
  probe
  misc_feature (1)..(25): SEQ ID NO: 5184; WAN024GIX; Start 154; Stop 178
tcatcaactgtgttcatcaattcca

SEQ ID NO: 402644 - DNA, 25 bp, Artificial
  probe
  misc_feature (1)..(25): SEQ ID NO: 5184; WAN024GIX; Start 158; Stop 182
caactgtgttcatcaattccataac

SEQ ID NO: 402645 - DNA, 25 bp, Artificial
  probe
  misc_feature (1)..(25): SEQ ID NO: 5184; WAN024GIX; Start 157; Stop 181
tcaactgtgttcatcaattccataa

SEQ ID NO: 402646 - DNA, 25 bp, Artificial
  probe
  misc_feature (1)..(25): SEQ ID NO: 5184; WAN024GIX; Start 217; Stop 241
ttaagtgctgaaccttggataactg

SEQ ID NO: 402647 - DNA, 25 bp, Artificial
  probe
  misc_feature (1)..(25): SEQ ID NO: 5184; WAN024GIX; Start 156; Stop 180
atcaactgtgttcatcaattccata

SEQ ID NO: 402648 - DNA, 25 bp, Artificial
  probe
  misc_feature (1)..(25): SEQ ID NO: 5184; WAN024GIX; Start 151; Stop 175
tactcatcaactgtgttcatcaatt

SEQ ID NO: 402649 - DNA, 25 bp, Artificial
  probe
  misc_feature (1)..(25): SEQ ID NO: 5184; WAN024GIX; Start 150; Stop 174
atactcatcaactgtgttcatcaat

SEQ ID NO: 402650 - DNA, 25 bp, Artificial
  probe
  misc_feature (1)..(25): SEQ ID NO: 5184; WAN024GIX; Start 146; Stop 170
ggatatactcatcaactgtgttcat

SEQ ID NO: 402651 - DNA, 25 bp, Artificial
  probe
  misc_feature (1)..(25): SEQ ID NO: 5184; WAN024GIX; Start 224; Stop 248
ctgaaccttggataactggaagatc

SEQ ID NO: 402652 - DNA, 25 bp, Artificial
  probe
  misc_feature (1)..(25): SEQ ID NO: 5184; WAN024GIX; Start 294; Stop 318
ttcaaccaattcaagcaattcttcg

SEQ ID NO: 402653 - DNA, 25 bp, Artificial
  probe
  misc_feature (1)..(25): SEQ ID NO: 5184; WAN024GIX; Start 257; Stop 281
ggaagtcgtattctgacaataggtc

SEQ ID NO: 402654 - DNA, 25 bp, Artificial
  probe
  misc_feature (1)..(25): SEQ ID NO: 5184; WAN024GIX; Start 149; Stop 173
tatactcatcaactgtgttcatcaa

SEQ ID NO: 402655 - DNA, 25 bp, Artificial
  probe
  misc_feature (1)..(25): SEQ ID NO: 5184; WAN024GIX; Start 148; Stop 172
atatactcatcaactgtgttcatca

SEQ ID NO: 402656 - DNA, 25 bp, Artificial
  probe
  misc_feature (1)..(25): SEQ ID NO: 5184; WAN024GIX; Start 296; Stop 320
caaccaattcaagcaattcttcgtc

SEQ ID NO: 402657 - DNA, 25 bp, Artificial
  probe
  misc_feature (1)..(25): SEQ ID NO: 5184; WAN024GIX; Start 295; Stop 319
tcaaccaattcaagcaattcttcgt

SEQ ID NO: 402658 - DNA, 25 bp, Artificial
  probe
  misc_feature (1)..(25): SEQ ID NO: 5184; WAN024GIX; Start 223; Stop 247
gctgaaccttggataactggaagat

SEQ ID NO: 402659 - DNA, 25 bp, Artificial
  probe
  misc_feature (1)..(25): SEQ ID NO: 5184; WAN024GIX; Start 301; Stop 325
aattcaagcaattcttcgtcgtcaa

SEQ ID NO: 402660 - DNA, 25 bp, Artificial
  probe
  misc_feature (1)..(25): SEQ ID NO: 5184; WAN024GIX; Start 190; Stop 214
tcgtatttagagtcaccttcaagag

SEQ ID NO: 402661 - DNA, 25 bp, Artificial
  probe
  misc_feature (1)..(25): SEQ ID NO: 5184; WAN024GIX; Start 147; Stop 171
gatatactcatcaactgtgttcatc

SEQ ID NO: 402662 - DNA, 25 bp, Artificial
  probe
  misc_feature (1)..(25): SEQ ID NO: 5184; WAN024GIX; Start 302; Stop 326
attcaagcaattcttcgtcgtcaac

SEQ ID NO: 402663 - DNA, 25 bp, Artificial
  probe
  misc_feature (1)..(25): SEQ ID NO: 5184; WAN024GIX; Start 189; Stop 213
ttcgtatttagagtcaccttcaaga

SEQ ID NO: 402664 - DNA, 25 bp, Artificial
  probe
  misc_feature (1)..(25): SEQ ID NO: 5184; WAN024GIX; Start 141; Stop 165
ttctgggatatactcatcaactgtg

SEQ ID NO: 402665 - DNA, 25 bp, Artificial
  probe
  misc_feature (1)..(25): SEQ ID NO: 5184; WAN024GIX; Start 134; Stop 158
gttctggttctgggatatactcatc

SEQ ID NO: 402666 - DNA, 25 bp, Artificial
  probe
  misc_feature (1)..(25): SEQ ID NO: 5184; WAN024GIX; Start 218; Stop 242
taagtgctgaaccttggataactgg

SEQ ID NO: 402667 - DNA, 25 bp, Artificial
  probe
  misc_feature (1)..(25): SEQ ID NO: 5184; WAN024GIX; Start 136; Stop 160
tctggttctgggatatactcatcaa

SEQ ID NO: 402668 - DNA, 25 bp, Artificial
  probe
  misc_feature (1)..(25): SEQ ID NO: 5184; WAN024GIX; Start 135; Stop 159
ttctggttctgggatatactcatca

SEQ ID NO: 402669 - DNA, 25 bp, Artificial
  probe
  misc_feature (1)..(25): SEQ ID NO: 5184; WAN024GIX; Start 285; Stop 309
gatttccatttcaaccaattcaagc

SEQ ID NO: 402670 - DNA, 25 bp, Artificial
  probe
  misc_feature (1)..(25): SEQ ID NO: 5185; WAN024AQW; Start 243; Stop 267
cggtaaacctaaacaagaaaggaga

SEQ ID NO: 402671 - DNA, 25 bp, Artificial
  probe
  misc_feature (1)..(25): SEQ ID NO: 5185; WAN024AQW; Start 244; Stop 268
ggtaaacctaaacaagaaaggagaa

SEQ ID NO: 402672 - DNA, 25 bp, Artificial
  probe
  misc_feature (1)..(25): SEQ ID NO: 5185; WAN024AQW; Start 245; Stop 269
gtaaacctaaacaagaaaggagaaa

SEQ ID NO: 402673 - DNA, 25 bp, Artificial
  probe
  misc_feature (1)..(25): SEQ ID NO: 5185; WAN024AQW; Start 220; Stop 244
acaatggggaatataaagtaaaccg

SEQ ID NO: 402674 - DNA, 25 bp, Artificial
  probe
  misc_feature (1)..(25): SEQ ID NO: 5185; WAN024AQW; Start 214; Stop 238
aggattacaatggggaatataaagt

SEQ ID NO: 402675 - DNA, 25 bp, Artificial
  probe
  misc_feature (1)..(25): SEQ ID NO: 5185; WAN024AQW; Start 242; Stop 266
ccggtaaacctaaacaagaaaggag

SEQ ID NO: 402676 - DNA, 25 bp, Artificial
  probe
  misc_feature (1)..(25): SEQ ID NO: 5185; WAN024AQW; Start 247; Stop 271
aaacctaaacaagaaaggagaaaag

SEQ ID NO: 402677 - DNA, 25 bp, Artificial
  probe
  misc_feature (1)..(25): SEQ ID NO: 5185; WAN024AQW; Start 207; Stop 231
aaaataaaggattacaatggggaat

SEQ ID NO: 402678 - DNA, 25 bp, Artificial
  probe
  misc_feature (1)..(25): SEQ ID NO: 5185; WAN024AQW; Start 213; Stop 237
aaggattacaatggggaatataaag

SEQ ID NO: 402679 - DNA, 25 bp, Artificial
  probe
  misc_feature (1)..(25): SEQ ID NO: 5185; WAN024AQW; Start 39; Stop 63
accaaattatattctagtaaaccgg

SEQ ID NO: 402680 - DNA, 25 bp, Artificial
  probe
  misc_feature (1)..(25): SEQ ID NO: 5185; WAN024AQW; Start 221; Stop 245
caatggggaatataaagtaaaccgg

SEQ ID NO: 402681 - DNA, 25 bp, Artificial
  probe
  misc_feature (1)..(25): SEQ ID NO: 5185; WAN024AQW; Start 219; Stop 243
tacaatggggaatataaagtaaacc

SEQ ID NO: 402682 - DNA, 25 bp, Artificial
  probe
  misc_feature (1)..(25): SEQ ID NO: 5185; WAN024AQW; Start 20; Stop 44
ttgttaagacttctctataaccaaa

SEQ ID NO: 402683 - DNA, 25 bp, Artificial
  probe
  misc_feature (1)..(25): SEQ ID NO: 5185; WAN024AQW; Start 19; Stop 43
tttgttaagacttctctataaccaa

SEQ ID NO: 402684 - DNA, 25 bp, Artificial
  probe
  misc_feature (1)..(25): SEQ ID NO: 5185; WAN024AQW; Start 38; Stop 62
aaccaaattatattctagtaaaccg

SEQ ID NO: 402685 - DNA, 25 bp, Artificial
  probe
  misc_feature (1)..(25): SEQ ID NO: 5185; WAN024AQW; Start 21; Stop 45
tgttaagacttctctataaccaaat

SEQ ID NO: 402686 - DNA, 25 bp, Artificial
  probe
  misc_feature (1)..(25): SEQ ID NO: 5185; WAN024AQW; Start 18; Stop 42
atttgttaagacttctctataacca

SEQ ID NO: 402687 - DNA, 25 bp, Artificial
  probe
  misc_feature (1)..(25): SEQ ID NO: 5185; WAN024AQW; Start 208; Stop 232
aaataaaggattacaatggggaata

SEQ ID NO: 402688 - DNA, 25 bp, Artificial
  probe
  misc_feature (1)..(25): SEQ ID NO: 5185; WAN024AQW; Start 212; Stop 236
aaaggattacaatggggaatataaa

SEQ ID NO: 402689 - DNA, 25 bp, Artificial
  probe
  misc_feature (1)..(25): SEQ ID NO: 5185; WAN024AQW; Start 215; Stop 239
ggattacaatggggaatataaagta

SEQ ID NO: 402690 - DNA, 25 bp, Artificial
  probe
  misc_feature (1)..(25): SEQ ID NO: 5185; WAN024AQW; Start 246; Stop 270
taaacctaaacaagaaaggagaaaa

SEQ ID NO: 402691 - DNA, 25 bp, Artificial
  probe
  misc_feature (1)..(25): SEQ ID NO: 5185; WAN024AQW; Start 209; Stop 233
aataaaggattacaatggggaatat

SEQ ID NO: 402692 - DNA, 25 bp, Artificial
  probe
  misc_feature (1)..(25): SEQ ID NO: 5185; WAN024AQW; Start 211; Stop 235
taaaggattacaatggggaatataa

SEQ ID NO: 402693 - DNA, 25 bp, Artificial
  probe
  misc_feature (1)..(25): SEQ ID NO: 5185; WAN024AQW; Start 210; Stop 234
ataaaggattacaatggggaatata

SEQ ID NO: 402694 - DNA, 25 bp, Artificial
  probe
  misc_feature (1)..(25): SEQ ID NO: 5185; WAN024AQW; Start 218; Stop 242
ttacaatggggaatataaagtaaac

SEQ ID NO: 402695 - DNA, 25 bp, Artificial
  probe
  misc_feature (1)..(25): SEQ ID NO: 5186; WAN024EUK; Start 44; Stop 68
ttaacgccagctactctatatgctt

SEQ ID NO: 402696 - DNA, 25 bp, Artificial
  probe
  misc_feature (1)..(25): SEQ ID NO: 5186; WAN024EUK; Start 53; Stop 77
gctactctatatgcttttcaggaga

SEQ ID NO: 402697 - DNA, 25 bp, Artificial
  probe
  misc_feature (1)..(25): SEQ ID NO: 5186; WAN024EUK; Start 45; Stop 69
taacgccagctactctatatgcttt

SEQ ID NO: 402698 - DNA, 25 bp, Artificial
  probe
  misc_feature (1)..(25): SEQ ID NO: 5186; WAN024EUK; Start 43; Stop 67
tttaacgccagctactctatatgct

SEQ ID NO: 402699 - DNA, 25 bp, Artificial
  probe
  misc_feature (1)..(25): SEQ ID NO: 5186; WAN024EUK; Start 41; Stop 65
cttttaacgccagctactctatatg

SEQ ID NO: 402700 - DNA, 25 bp, Artificial
  probe
  misc_feature (1)..(25): SEQ ID NO: 5186; WAN024EUK; Start 42; Stop 66
ttttaacgccagctactctatatgc

SEQ ID NO: 402701 - DNA, 25 bp, Artificial
  probe
  misc_feature (1)..(25): SEQ ID NO: 5186; WAN024EUK; Start 54; Stop 78
ctactctatatgcttttcaggagaa

SEQ ID NO: 402702 - DNA, 25 bp, Artificial
  probe
  misc_feature (1)..(25): SEQ ID NO: 5186; WAN024EUK; Start 51; Stop 75
cagctactctatatgcttttcagga

SEQ ID NO: 402703 - DNA, 25 bp, Artificial
  probe
  misc_feature (1)..(25): SEQ ID NO: 5186; WAN024EUK; Start 52; Stop 76
agctactctatatgcttttcaggag

SEQ ID NO: 402704 - DNA, 25 bp, Artificial
  probe
  misc_feature (1)..(25): SEQ ID NO: 5186; WAN024EUK; Start 50; Stop 74
ccagctactctatatgcttttcagg

SEQ ID NO: 402705 - DNA, 25 bp, Artificial
  probe
  misc_feature (1)..(25): SEQ ID NO: 5186; WAN024EUK; Start 40; Stop 64
gcttttaacgccagctactctatat

SEQ ID NO: 402706 - DNA, 25 bp, Artificial
  probe
  misc_feature (1)..(25): SEQ ID NO: 5186; WAN024EUK; Start 49; Stop 73
gccagctactctatatgcttttcag

SEQ ID NO: 402707 - DNA, 25 bp, Artificial
  probe
  misc_feature (1)..(25): SEQ ID NO: 5186; WAN024EUK; Start 55; Stop 79
tactctatatgcttttcaggagaaa

SEQ ID NO: 402708 - DNA, 25 bp, Artificial
  probe
  misc_feature (1)..(25): SEQ ID NO: 5186; WAN024EUK; Start 46; Stop 70
aacgccagctactctatatgctttt

SEQ ID NO: 402709 - DNA, 25 bp, Artificial
  probe
  misc_feature (1)..(25): SEQ ID NO: 5186; WAN024EUK; Start 48; Stop 72
cgccagctactctatatgcttttca

SEQ ID NO: 402710 - DNA, 25 bp, Artificial
  probe
  misc_feature (1)..(25): SEQ ID NO: 5186; WAN024EUK; Start 47; Stop 71
acgccagctactctatatgcttttc

SEQ ID NO: 402711 - DNA, 25 bp, Artificial
  probe
  misc_feature (1)..(25): SEQ ID NO: 5186; WAN024EUK; Start 1; Stop 25
ttgatagatgtgactataggtcaaa

SEQ ID NO: 402712 - DNA, 25 bp, Artificial
  probe
  misc_feature (1)..(25): SEQ ID NO: 5186; WAN024EUK; Start 56; Stop 80
actctatatgcttttcaggagaaaa

SEQ ID NO: 402713 - DNA, 25 bp, Artificial
  probe
  misc_feature (1)..(25): SEQ ID NO: 5186; WAN024EUK; Start 39; Stop 63
agcttttaacgccagctactctata

SEQ ID NO: 402714 - DNA, 25 bp, Artificial
  probe
  misc_feature (1)..(25): SEQ ID NO: 5186; WAN024EUK; Start 2; Stop 26
tgatagatgtgactataggtcaaaa

SEQ ID NO: 402715 - DNA, 25 bp, Artificial
  probe
  misc_feature (1)..(25): SEQ ID NO: 5186; WAN024EUK; Start 57; Stop 81
ctctatatgcttttcaggagaaaat

SEQ ID NO: 402716 - DNA, 25 bp, Artificial
  probe
  misc_feature (1)..(25): SEQ ID NO: 5186; WAN024EUK; Start 61; Stop 85
atatgcttttcaggagaaaatttct

SEQ ID NO: 402717 - DNA, 25 bp, Artificial
  probe
  misc_feature (1)..(25): SEQ ID NO: 5186; WAN024EUK; Start 38; Stop 62
gagcttttaacgccagctactctat

SEQ ID NO: 402718 - DNA, 25 bp, Artificial
  probe
  misc_feature (1)..(25): SEQ ID NO: 5186; WAN024EUK; Start 58; Stop 82
tctatatgcttttcaggagaaaatt

SEQ ID NO: 402719 - DNA, 25 bp, Artificial
  probe
  misc_feature (1)..(25): SEQ ID NO: 5186; WAN024EUK; Start 60; Stop 84
tatatgcttttcaggagaaaatttc

SEQ ID NO: 402720 - DNA, 25 bp, Artificial
  probe
  misc_feature (1)..(25): SEQ ID NO: 5186; WAN024EUK; Start 59; Stop 83
ctatatgcttttcaggagaaaattt

SEQ ID NO: 402721 - DNA, 25 bp, Artificial
  probe
  misc_feature (1)..(25): SEQ ID NO: 5186; WAN024EUK; Start 37; Stop 61
ggagcttttaacgccagctactcta

SEQ ID NO: 402722 - DNA, 25 bp, Artificial
  probe
  misc_feature (1)..(25): SEQ ID NO: 5187; WAN024DUE; Start 43; Stop 67
aatcggagcttgtacttgaatatga

SEQ ID NO: 402723 - DNA, 25 bp, Artificial
  probe
  misc_feature (1)..(25): SEQ ID NO: 5187; WAN024DUE; Start 42; Stop 66
gaatcggagcttgtacttgaatatg

SEQ ID NO: 402724 - DNA, 25 bp, Artificial
  probe
  misc_feature (1)..(25): SEQ ID NO: 5187; WAN024DUE; Start 44; Stop 68
atcggagcttgtacttgaatatgac

SEQ ID NO: 402725 - DNA, 25 bp, Artificial
  probe
  misc_feature (1)..(25): SEQ ID NO: 5187; WAN024DUE; Start 41; Stop 65
cgaatcggagcttgtacttgaatat

SEQ ID NO: 402726 - DNA, 25 bp, Artificial
  probe
  misc_feature (1)..(25): SEQ ID NO: 5187; WAN024DUE; Start 47; Stop 71
ggagcttgtacttgaatatgacgtt

SEQ ID NO: 402727 - DNA, 25 bp, Artificial
  probe
  misc_feature (1)..(25): SEQ ID NO: 5187; WAN024DUE; Start 186; Stop 210
cttctgcttcaagttgtgctttaat

SEQ ID NO: 402728 - DNA, 25 bp, Artificial
  probe
  misc_feature (1)..(25): SEQ ID NO: 5187; WAN024DUE; Start 187; Stop 211
ttctgcttcaagttgtgctttaatt

SEQ ID NO: 402729 - DNA, 25 bp, Artificial
  probe
  misc_feature (1)..(25): SEQ ID NO: 5187; WAN024DUE; Start 40; Stop 64
tcgaatcggagcttgtacttgaata

SEQ ID NO: 402730 - DNA, 25 bp, Artificial
  probe
  misc_feature (1)..(25): SEQ ID NO: 5187; WAN024DUE; Start 258; Stop 282
tttgtttaccacgaagttcacctac

SEQ ID NO: 402731 - DNA, 25 bp, Artificial
  probe
  misc_feature (1)..(25): SEQ ID NO: 5187; WAN024DUE; Start 192; Stop 216
cttcaagttgtgctttaattgcttt

SEQ ID NO: 402732 - DNA, 25 bp, Artificial
  probe
  misc_feature (1)..(25): SEQ ID NO: 5187; WAN024DUE; Start 188; Stop 212
tctgcttcaagttgtgctttaattg

SEQ ID NO: 402733 - DNA, 25 bp, Artificial
  probe
  misc_feature (1)..(25): SEQ ID NO: 5187; WAN024DUE; Start 185; Stop 209
tcttctgcttcaagttgtgctttaa

SEQ ID NO: 402734 - DNA, 25 bp, Artificial
  probe
  misc_feature (1)..(25): SEQ ID NO: 5187; WAN024DUE; Start 184; Stop 208
ttcttctgcttcaagttgtgcttta

SEQ ID NO: 402735 - DNA, 25 bp, Artificial
  probe
  misc_feature (1)..(25): SEQ ID NO: 5187; WAN024DUE; Start 191; Stop 215
gcttcaagttgtgctttaattgctt

SEQ ID NO: 402736 - DNA, 25 bp, Artificial
  probe
  misc_feature (1)..(25): SEQ ID NO: 5187; WAN024DUE; Start 174; Stop 198
ctacaacagtttcttctgcttcaag

SEQ ID NO: 402737 - DNA, 25 bp, Artificial
  probe
  misc_feature (1)..(25): SEQ ID NO: 5187; WAN024DUE; Start 171; Stop 195
attctacaacagtttcttctgcttc

SEQ ID NO: 402738 - DNA, 25 bp, Artificial
  probe
  misc_feature (1)..(25): SEQ ID NO: 5187; WAN024DUE; Start 173; Stop 197
tctacaacagtttcttctgcttcaa

SEQ ID NO: 402739 - DNA, 25 bp, Artificial
  probe
  misc_feature (1)..(25): SEQ ID NO: 5187; WAN024DUE; Start 172; Stop 196
ttctacaacagtttcttctgcttca

SEQ ID NO: 402740 - DNA, 25 bp, Artificial
  probe
  misc_feature (1)..(25): SEQ ID NO: 5187; WAN024DUE; Start 175; Stop 199
tacaacagtttcttctgcttcaagt

SEQ ID NO: 402741 - DNA, 25 bp, Artificial
  probe
  misc_feature (1)..(25): SEQ ID NO: 5187; WAN024DUE; Start 168; Stop 192
caaattctacaacagtttcttctgc

SEQ ID NO: 402742 - DNA, 25 bp, Artificial
  probe
  misc_feature (1)..(25): SEQ ID NO: 5187; WAN024DUE; Start 170; Stop 194
aattctacaacagtttcttctgctt

SEQ ID NO: 402743 - DNA, 25 bp, Artificial
  probe
  misc_feature (1)..(25): SEQ ID NO: 5187; WAN024DUE; Start 169; Stop 193
aaattctacaacagtttcttctgct

SEQ ID NO: 402744 - DNA, 25 bp, Artificial
  probe
  misc_feature (1)..(25): SEQ ID NO: 5187; WAN024DUE; Start 183; Stop 207
tttcttctgcttcaagttgtgcttt

SEQ ID NO: 402745 - DNA, 25 bp, Artificial
  probe
  misc_feature (1)..(25): SEQ ID NO: 5187; WAN024DUE; Start 45; Stop 69
tcggagcttgtacttgaatatgacg

SEQ ID NO: 402746 - DNA, 25 bp, Artificial
  probe
  misc_feature (1)..(25): SEQ ID NO: 5187; WAN024DUE; Start 178; Stop 202
aacagtttcttctgcttcaagttgt

SEQ ID NO: 402747 - DNA, 25 bp, Artificial
  probe
  misc_feature (1)..(25): SEQ ID NO: 5187; WAN024DUE; Start 176; Stop 200
acaacagtttcttctgcttcaagtt

SEQ ID NO: 402748 - DNA, 25 bp, Artificial
  probe
  misc_feature (1)..(25): SEQ ID NO: 5187; WAN024DUE; Start 189; Stop 213
ctgcttcaagttgtgctttaattgc

SEQ ID NO: 402749 - DNA, 25 bp, Artificial
  probe
  misc_feature (1)..(25): SEQ ID NO: 5187; WAN024DUE; Start 164; Stop 188
tcaacaaattctacaacagtttctt

SEQ ID NO: 402750 - DNA, 25 bp, Artificial
  probe
  misc_feature (1)..(25): SEQ ID NO: 5187; WAN024DUE; Start 163; Stop 187
ttcaacaaattctacaacagtttct

SEQ ID NO: 402751 - DNA, 25 bp, Artificial
  probe
  misc_feature (1)..(25): SEQ ID NO: 5187; WAN024DUE; Start 48; Stop 72
gagcttgtacttgaatatgacgttt

SEQ ID NO: 402752 - DNA, 25 bp, Artificial
  probe
  misc_feature (1)..(25): SEQ ID NO: 5187; WAN024DUE; Start 190; Stop 214
tgcttcaagttgtgctttaattgct

SEQ ID NO: 402753 - DNA, 25 bp, Artificial
  probe
  misc_feature (1)..(25): SEQ ID NO: 5187; WAN024DUE; Start 182; Stop 206
gtttcttctgcttcaagttgtgctt

SEQ ID NO: 402754 - DNA, 25 bp, Artificial
  probe
  misc_feature (1)..(25): SEQ ID NO: 5187; WAN024DUE; Start 126; Stop 150
taatagaaccaaaggtacgaccatc

SEQ ID NO: 402755 - DNA, 25 bp, Artificial
  probe
  misc_feature (1)..(25): SEQ ID NO: 5188; WAN024CXQ; Start 262; Stop 286
atcactagatacaacagccatcatc

SEQ ID NO: 402756 - DNA, 25 bp, Artificial
  probe
  misc_feature (1)..(25): SEQ ID NO: 5188; WAN024CXQ; Start 266; Stop 290
ctagatacaacagccatcatcgtaa

SEQ ID NO: 402757 - DNA, 25 bp, Artificial
  probe
  misc_feature (1)..(25): SEQ ID NO: 5188; WAN024CXQ; Start 259; Stop 283
ttcatcactagatacaacagccatc

SEQ ID NO: 402758 - DNA, 25 bp, Artificial
  probe
  misc_feature (1)..(25): SEQ ID NO: 5188; WAN024CXQ; Start 261; Stop 285
catcactagatacaacagccatcat

SEQ ID NO: 402759 - DNA, 25 bp, Artificial
  probe
  misc_feature (1)..(25): SEQ ID NO: 5188; WAN024CXQ; Start 265; Stop 289
actagatacaacagccatcatcgta

SEQ ID NO: 402760 - DNA, 25 bp, Artificial
  probe
  misc_feature (1)..(25): SEQ ID NO: 5188; WAN024CXQ; Start 260; Stop 284
tcatcactagatacaacagccatca

SEQ ID NO: 402761 - DNA, 25 bp, Artificial
  probe
  misc_feature (1)..(25): SEQ ID NO: 5188; WAN024CXQ; Start 128; Stop 152
ctaatatccatgatgacctcctaga

SEQ ID NO: 402762 - DNA, 25 bp, Artificial
  probe
  misc_feature (1)..(25): SEQ ID NO: 5188; WAN024CXQ; Start 127; Stop 151
tctaatatccatgatgacctcctag

SEQ ID NO: 402763 - DNA, 25 bp, Artificial
  probe
  misc_feature (1)..(25): SEQ ID NO: 5188; WAN024CXQ; Start 263; Stop 287
tcactagatacaacagccatcatcg

SEQ ID NO: 402764 - DNA, 25 bp, Artificial
  probe
  misc_feature (1)..(25): SEQ ID NO: 5188; WAN024CXQ; Start 125; Stop 149
tgtctaatatccatgatgacctcct

SEQ ID NO: 402765 - DNA, 25 bp, Artificial
  probe
  misc_feature (1)..(25): SEQ ID NO: 5188; WAN024CXQ; Start 124; Stop 148
ttgtctaatatccatgatgacctcc

SEQ ID NO: 402766 - DNA, 25 bp, Artificial
  probe
  misc_feature (1)..(25): SEQ ID NO: 5188; WAN024CXQ; Start 264; Stop 288
cactagatacaacagccatcatcgt

SEQ ID NO: 402767 - DNA, 25 bp, Artificial
  probe
  misc_feature (1)..(25): SEQ ID NO: 5188; WAN024CXQ; Start 122; Stop 146
acttgtctaatatccatgatgacct

SEQ ID NO: 402768 - DNA, 25 bp, Artificial
  probe
  misc_feature (1)..(25): SEQ ID NO: 5188; WAN024CXQ; Start 267; Stop 291
tagatacaacagccatcatcgtaaa

SEQ ID NO: 402769 - DNA, 25 bp, Artificial
  probe
  misc_feature (1)..(25): SEQ ID NO: 5188; WAN024CXQ; Start 134; Stop 158
tccatgatgacctcctagatattat

SEQ ID NO: 402770 - DNA, 25 bp, Artificial
  probe
  misc_feature (1)..(25): SEQ ID NO: 5188; WAN024CXQ; Start 133; Stop 157
atccatgatgacctcctagatatta

SEQ ID NO: 402771 - DNA, 25 bp, Artificial
  probe
  misc_feature (1)..(25): SEQ ID NO: 5188; WAN024CXQ; Start 129; Stop 153
taatatccatgatgacctcctagat

SEQ ID NO: 402772 - DNA, 25 bp, Artificial
  probe
  misc_feature (1)..(25): SEQ ID NO: 5188; WAN024CXQ; Start 126; Stop 150
gtctaatatccatgatgacctccta

SEQ ID NO: 402773 - DNA, 25 bp, Artificial
  probe
  misc_feature (1)..(25): SEQ ID NO: 5188; WAN024CXQ; Start 123; Stop 147
cttgtctaatatccatgatgacctc

SEQ ID NO: 402774 - DNA, 25 bp, Artificial
  probe
  misc_feature (1)..(25): SEQ ID NO: 5188; WAN024CXQ; Start 121; Stop 145
aacttgtctaatatccatgatgacc

SEQ ID NO: 402775 - DNA, 25 bp, Artificial
  probe
  misc_feature (1)..(25): SEQ ID NO: 5188; WAN024CXQ; Start 258; Stop 282
tttcatcactagatacaacagccat

SEQ ID NO: 402776 - DNA, 25 bp, Artificial
  probe
  misc_feature (1)..(25): SEQ ID NO: 5188; WAN024CXQ; Start 108; Stop 132
cgatggtttcagtaacttgtctaat

SEQ ID NO: 402777 - DNA, 25 bp, Artificial
  probe
  misc_feature (1)..(25): SEQ ID NO: 5188; WAN024CXQ; Start 107; Stop 131
gcgatggtttcagtaacttgtctaa

SEQ ID NO: 402778 - DNA, 25 bp, Artificial
  probe
  misc_feature (1)..(25): SEQ ID NO: 5188; WAN024CXQ; Start 132; Stop 156
tatccatgatgacctcctagatatt

SEQ ID NO: 402779 - DNA, 25 bp, Artificial
  probe
  misc_feature (1)..(25): SEQ ID NO: 5188; WAN024CXQ; Start 130; Stop 154
aatatccatgatgacctcctagata

SEQ ID NO: 402780 - DNA, 25 bp, Artificial
  probe
  misc_feature (1)..(25): SEQ ID NO: 5188; WAN024CXQ; Start 66; Stop 90
tggtaatggttctaatatcgaagtt

SEQ ID NO: 402781 - DNA, 25 bp, Artificial
  probe
  misc_feature (1)..(25): SEQ ID NO: 5188; WAN024CXQ; Start 65; Stop 89
atggtaatggttctaatatcgaagt

SEQ ID NO: 402782 - DNA, 25 bp, Artificial
  probe
  misc_feature (1)..(25): SEQ ID NO: 5188; WAN024CXQ; Start 64; Stop 88
catggtaatggttctaatatcgaag

SEQ ID NO: 402783 - DNA, 25 bp, Artificial
  probe
  misc_feature (1)..(25): SEQ ID NO: 5188; WAN024CXQ; Start 141; Stop 165
tgacctcctagatattatacatagc

SEQ ID NO: 402784 - DNA, 25 bp, Artificial
  probe
  misc_feature (1)..(25): SEQ ID NO: 5188; WAN024CXQ; Start 116; Stop 140
tcagtaacttgtctaatatccatga

SEQ ID NO: 402785 - DNA, 25 bp, Artificial
  probe
  misc_feature (1)..(25): SEQ ID NO: 5188; WAN024CXQ; Start 172; Stop 196
aatcgctgcactctgaatattgatt

SEQ ID NO: 402786 - DNA, 25 bp, Artificial
  probe
  misc_feature (1)..(25): SEQ ID NO: 5188; WAN024CXQ; Start 135; Stop 159
ccatgatgacctcctagatattata

SEQ ID NO: 402787 - DNA, 25 bp, Artificial
  probe
  misc_feature (1)..(25): SEQ ID NO: 5188; WAN024CXQ; Start 115; Stop 139
ttcagtaacttgtctaatatccatg

SEQ ID NO: 402788 - DNA, 25 bp, Artificial
  probe
  misc_feature (1)..(25): SEQ ID NO: 5189; WAN024GJJ; Start 67; Stop 91
ggcagagctaaccatagaattactt

SEQ ID NO: 402789 - DNA, 25 bp, Artificial
  probe
  misc_feature (1)..(25): SEQ ID NO: 5189; WAN024GJJ; Start 263; Stop 287
gaagccaaggcatctataatagagt

SEQ ID NO: 402790 - DNA, 25 bp, Artificial
  probe
  misc_feature (1)..(25): SEQ ID NO: 5189; WAN024GJJ; Start 262; Stop 286
agaagccaaggcatctataatagag

SEQ ID NO: 402791 - DNA, 25 bp, Artificial
  probe
  misc_feature (1)..(25): SEQ ID NO: 5189; WAN024GJJ; Start 259; Stop 283
ggtagaagccaaggcatctataata

SEQ ID NO: 402792 - DNA, 25 bp, Artificial
  probe
  misc_feature (1)..(25): SEQ ID NO: 5189; WAN024GJJ; Start 264; Stop 288
aagccaaggcatctataatagagtt

SEQ ID NO: 402793 - DNA, 25 bp, Artificial
  probe
  misc_feature (1)..(25): SEQ ID NO: 5189; WAN024GJJ; Start 54; Stop 78
tatcttcgataatggcagagctaac

SEQ ID NO: 402794 - DNA, 25 bp, Artificial
  probe
  misc_feature (1)..(25): SEQ ID NO: 5189; WAN024GJJ; Start 53; Stop 77
atatcttcgataatggcagagctaa

SEQ ID NO: 402795 - DNA, 25 bp, Artificial
  probe
  misc_feature (1)..(25): SEQ ID NO: 5189; WAN024GJJ; Start 267; Stop 291
ccaaggcatctataatagagttagc

SEQ ID NO: 402796 - DNA, 25 bp, Artificial
  probe
  misc_feature (1)..(25): SEQ ID NO: 5189; WAN024GJJ; Start 23; Stop 47
gtgagcgactttatagtttcaatcc

SEQ ID NO: 402797 - DNA, 25 bp, Artificial
  probe
  misc_feature (1)..(25): SEQ ID NO: 5189; WAN024GJJ; Start 265; Stop 289
agccaaggcatctataatagagtta

SEQ ID NO: 402798 - DNA, 25 bp, Artificial
  probe
  misc_feature (1)..(25): SEQ ID NO: 5189; WAN024GJJ; Start 28; Stop 52
cgactttatagtttcaatcccgttg

SEQ ID NO: 402799 - DNA, 25 bp, Artificial
  probe
  misc_feature (1)..(25): SEQ ID NO: 5189; WAN024GJJ; Start 22; Stop 46
cgtgagcgactttatagtttcaatc

SEQ ID NO: 402800 - DNA, 25 bp, Artificial
  probe
  misc_feature (1)..(25): SEQ ID NO: 5189; WAN024GJJ; Start 266; Stop 290
gccaaggcatctataatagagttag

SEQ ID NO: 402801 - DNA, 25 bp, Artificial
  probe
  misc_feature (1)..(25): SEQ ID NO: 5189; WAN024GJJ; Start 261; Stop 285
tagaagccaaggcatctataataga

SEQ ID NO: 402802 - DNA, 25 bp, Artificial
  probe
  misc_feature (1)..(25): SEQ ID NO: 5189; WAN024GJJ; Start 260; Stop 284
gtagaagccaaggcatctataatag

SEQ ID NO: 402803 - DNA, 25 bp, Artificial
  probe
  misc_feature (1)..(25): SEQ ID NO: 5189; WAN024GJJ; Start 24; Stop 48
tgagcgactttatagtttcaatccc

SEQ ID NO: 402804 - DNA, 25 bp, Artificial
  probe
  misc_feature (1)..(25): SEQ ID NO: 5189; WAN024GJJ; Start 218; Stop 242
acaagaatcagaatagaaacatcca

SEQ ID NO: 402805 - DNA, 25 bp, Artificial
  probe
  misc_feature (1)..(25): SEQ ID NO: 5189; WAN024GJJ; Start 258; Stop 282
tggtagaagccaaggcatctataat

SEQ ID NO: 402806 - DNA, 25 bp, Artificial
  probe
  misc_feature (1)..(25): SEQ ID NO: 5189; WAN024GJJ; Start 257; Stop 281
atggtagaagccaaggcatctataa

SEQ ID NO: 402807 - DNA, 25 bp, Artificial
  probe
  misc_feature (1)..(25): SEQ ID NO: 5189; WAN024GJJ; Start 256; Stop 280
aatggtagaagccaaggcatctata

SEQ ID NO: 402808 - DNA, 25 bp, Artificial
  probe
  misc_feature (1)..(25): SEQ ID NO: 5189; WAN024GJJ; Start 52; Stop 76
gatatcttcgataatggcagagcta

SEQ ID NO: 402809 - DNA, 25 bp, Artificial
  probe
  misc_feature (1)..(25): SEQ ID NO: 5189; WAN024GJJ; Start 49; Stop 73
gttgatatcttcgataatggcagag

SEQ ID NO: 402810 - DNA, 25 bp, Artificial
  probe
  misc_feature (1)..(25): SEQ ID NO: 5189; WAN024GJJ; Start 333; Stop 357
caaagaaagacatgggaagttcaaa

SEQ ID NO: 402811 - DNA, 25 bp, Artificial
  probe
  misc_feature (1)..(25): SEQ ID NO: 5189; WAN024GJJ; Start 50; Stop 74
ttgatatcttcgataatggcagagc

SEQ ID NO: 402812 - DNA, 25 bp, Artificial
  probe
  misc_feature (1)..(25): SEQ ID NO: 5189; WAN024GJJ; Start 268; Stop 292
caaggcatctataatagagttagca

SEQ ID NO: 402813 - DNA, 25 bp, Artificial
  probe
  misc_feature (1)..(25): SEQ ID NO: 5189; WAN024GJJ; Start 48; Stop 72
cgttgatatcttcgataatggcaga

SEQ ID NO: 402814 - DNA, 25 bp, Artificial
  probe
  misc_feature (1)..(25): SEQ ID NO: 5189; WAN024GJJ; Start 219; Stop 243
caagaatcagaatagaaacatccag

SEQ ID NO: 402815 - DNA, 25 bp, Artificial
  probe
  misc_feature (1)..(25): SEQ ID NO: 5189; WAN024GJJ; Start 27; Stop 51
gcgactttatagtttcaatcccgtt

SEQ ID NO: 402816 - DNA, 25 bp, Artificial
  probe
  misc_feature (1)..(25): SEQ ID NO: 5189; WAN024GJJ; Start 66; Stop 90
tggcagagctaaccatagaattact

SEQ ID NO: 402817 - DNA, 25 bp, Artificial
  probe
  misc_feature (1)..(25): SEQ ID NO: 5189; WAN024GJJ; Start 221; Stop 245
agaatcagaatagaaacatccagaa

SEQ ID NO: 402818 - DNA, 25 bp, Artificial
  probe
  misc_feature (1)..(25): SEQ ID NO: 5189; WAN024GJJ; Start 220; Stop 244
aagaatcagaatagaaacatccaga

SEQ ID NO: 402819 - DNA, 25 bp, Artificial
  probe
  misc_feature (1)..(25): SEQ ID NO: 5189; WAN024GJJ; Start 25; Stop 49
gagcgactttatagtttcaatcccg

SEQ ID NO: 402820 - DNA, 25 bp, Artificial
  probe
  misc_feature (1)..(25): SEQ ID NO: 5189; WAN024GJJ; Start 55; Stop 79
atcttcgataatggcagagctaacc

SEQ ID NO: 402821 - DNA, 25 bp, Artificial
  probe
  misc_feature (1)..(25): SEQ ID NO: 5190; WAN024DPT; Start 20; Stop 44
ttgccaatgttcttacctccatatt

SEQ ID NO: 402822 - DNA, 25 bp, Artificial
  probe
  misc_feature (1)..(25): SEQ ID NO: 5190; WAN024DPT; Start 14; Stop 38
taatgtttgccaatgttcttacctc

SEQ ID NO: 402823 - DNA, 25 bp, Artificial
  probe
  misc_feature (1)..(25): SEQ ID NO: 5190; WAN024DPT; Start 7; Stop 31
gctgatttaatgtttgccaatgttc

SEQ ID NO: 402824 - DNA, 25 bp, Artificial
  probe
  misc_feature (1)..(25): SEQ ID NO: 5190; WAN024DPT; Start 13; Stop 37
ttaatgtttgccaatgttcttacct

SEQ ID NO: 402825 - DNA, 25 bp, Artificial
  probe
  misc_feature (1)..(25): SEQ ID NO: 5190; WAN024DPT; Start 21; Stop 45
tgccaatgttcttacctccatattt

SEQ ID NO: 402826 - DNA, 25 bp, Artificial
  probe
  misc_feature (1)..(25): SEQ ID NO: 5190; WAN024DPT; Start 19; Stop 43
tttgccaatgttcttacctccatat

SEQ ID NO: 402827 - DNA, 25 bp, Artificial
  probe
  misc_feature (1)..(25): SEQ ID NO: 5190; WAN024DPT; Start 12; Stop 36
tttaatgtttgccaatgttcttacc

SEQ ID NO: 402828 - DNA, 25 bp, Artificial
  probe
  misc_feature (1)..(25): SEQ ID NO: 5190; WAN024DPT; Start 8; Stop 32
ctgatttaatgtttgccaatgttct

SEQ ID NO: 402829 - DNA, 25 bp, Artificial
  probe
  misc_feature (1)..(25): SEQ ID NO: 5190; WAN024DPT; Start 22; Stop 46
gccaatgttcttacctccatattta

SEQ ID NO: 402830 - DNA, 25 bp, Artificial
  probe
  misc_feature (1)..(25): SEQ ID NO: 5190; WAN024DPT; Start 18; Stop 42
gtttgccaatgttcttacctccata

SEQ ID NO: 402831 - DNA, 25 bp, Artificial
  probe
  misc_feature (1)..(25): SEQ ID NO: 5190; WAN024DPT; Start 9; Stop 33
tgatttaatgtttgccaatgttctt

SEQ ID NO: 402832 - DNA, 25 bp, Artificial
  probe
  misc_feature (1)..(25): SEQ ID NO: 5190; WAN024DPT; Start 15; Stop 39
aatgtttgccaatgttcttacctcc

SEQ ID NO: 402833 - DNA, 25 bp, Artificial
  probe
  misc_feature (1)..(25): SEQ ID NO: 5190; WAN024DPT; Start 6; Stop 30
agctgatttaatgtttgccaatgtt

SEQ ID NO: 402834 - DNA, 25 bp, Artificial
  probe
  misc_feature (1)..(25): SEQ ID NO: 5190; WAN024DPT; Start 5; Stop 29
tagctgatttaatgtttgccaatgt

SEQ ID NO: 402835 - DNA, 25 bp, Artificial
  probe
  misc_feature (1)..(25): SEQ ID NO: 5190; WAN024DPT; Start 2; Stop 26
tgatagctgatttaatgtttgccaa

SEQ ID NO: 402836 - DNA, 25 bp, Artificial
  probe
  misc_feature (1)..(25): SEQ ID NO: 5190; WAN024DPT; Start 1; Stop 25
ttgatagctgatttaatgtttgcca

SEQ ID NO: 402837 - DNA, 25 bp, Artificial
  probe
  misc_feature (1)..(25): SEQ ID NO: 5190; WAN024DPT; Start 23; Stop 47
ccaatgttcttacctccatatttac

SEQ ID NO: 402838 - DNA, 25 bp, Artificial
  probe
  misc_feature (1)..(25): SEQ ID NO: 5190; WAN024DPT; Start 4; Stop 28
atagctgatttaatgtttgccaatg

SEQ ID NO: 402839 - DNA, 25 bp, Artificial
  probe
  misc_feature (1)..(25): SEQ ID NO: 5190; WAN024DPT; Start 3; Stop 27
gatagctgatttaatgtttgccaat

SEQ ID NO: 402840 - DNA, 25 bp, Artificial
  probe
  misc_feature (1)..(25): SEQ ID NO: 5190; WAN024DPT; Start 16; Stop 40
atgtttgccaatgttcttacctcca

SEQ ID NO: 402841 - DNA, 25 bp, Artificial
  probe
  misc_feature (1)..(25): SEQ ID NO: 5190; WAN024DPT; Start 11; Stop 35
atttaatgtttgccaatgttcttac

SEQ ID NO: 402842 - DNA, 25 bp, Artificial
  probe
  misc_feature (1)..(25): SEQ ID NO: 5190; WAN024DPT; Start 17; Stop 41
tgtttgccaatgttcttacctccat

SEQ ID NO: 402843 - DNA, 25 bp, Artificial
  probe
  misc_feature (1)..(25): SEQ ID NO: 5190; WAN024DPT; Start 10; Stop 34
gatttaatgtttgccaatgttctta

SEQ ID NO: 402844 - DNA, 25 bp, Artificial
  probe
  misc_feature (1)..(25): SEQ ID NO: 5190; WAN024DPT; Start 24; Stop 48
caatgttcttacctccatatttact

SEQ ID NO: 402845 - DNA, 25 bp, Artificial
  probe
  misc_feature (1)..(25): SEQ ID NO: 5190; WAN024DPT; Start 34; Stop 58
acctccatatttactaactatacca

SEQ ID NO: 402846 - DNA, 25 bp, Artificial
  probe
  misc_feature (1)..(25): SEQ ID NO: 5190; WAN024DPT; Start 27; Stop 51
tgttcttacctccatatttactaac

SEQ ID NO: 402847 - DNA, 25 bp, Artificial
  probe
  misc_feature (1)..(25): SEQ ID NO: 5190; WAN024DPT; Start 28; Stop 52
gttcttacctccatatttactaact

SEQ ID NO: 402848 - DNA, 25 bp, Artificial
  probe
  misc_feature (1)..(25): SEQ ID NO: 5190; WAN024DPT; Start 71; Stop 95
acttacgttttgacaagggaaaatt

SEQ ID NO: 402849 - DNA, 25 bp, Artificial
  probe
  misc_feature (1)..(25): SEQ ID NO: 5190; WAN024DPT; Start 70; Stop 94
aacttacgttttgacaagggaaaat

SEQ ID NO: 402850 - DNA, 25 bp, Artificial
  probe
  misc_feature (1)..(25): SEQ ID NO: 5190; WAN024DPT; Start 26; Stop 50
atgttcttacctccatatttactaa

SEQ ID NO: 402851 - DNA, 25 bp, Artificial
  probe
  misc_feature (1)..(25): SEQ ID NO: 5190; WAN024DPT; Start 25; Stop 49
aatgttcttacctccatatttacta

SEQ ID NO: 402852 - DNA, 25 bp, Artificial
  probe
  misc_feature (1)..(25): SEQ ID NO: 5190; WAN024DPT; Start 35; Stop 59
cctccatatttactaactataccat

SEQ ID NO: 402853 - DNA, 25 bp, Artificial
  probe
  misc_feature (1)..(25): SEQ ID NO: 5190; WAN024DPT; Start 72; Stop 96
cttacgttttgacaagggaaaatta

SEQ ID NO: 402854 - DNA, 25 bp, Artificial
  probe
  misc_feature (1)..(25): SEQ ID NO: 5191; WAN024CPM; Start 196; Stop 220
gagcataggaccattattgactacc

SEQ ID NO: 402855 - DNA, 25 bp, Artificial
  probe
  misc_feature (1)..(25): SEQ ID NO: 5191; WAN024CPM; Start 195; Stop 219
ggagcataggaccattattgactac

SEQ ID NO: 402856 - DNA, 25 bp, Artificial
  probe
  misc_feature (1)..(25): SEQ ID NO: 5191; WAN024CPM; Start 26; Stop 50
tcctgatactgaagaccgatatgtt

SEQ ID NO: 402857 - DNA, 25 bp, Artificial
  probe
  misc_feature (1)..(25): SEQ ID NO: 5191; WAN024CPM; Start 27; Stop 51
cctgatactgaagaccgatatgttc

SEQ ID NO: 402858 - DNA, 25 bp, Artificial
  probe
  misc_feature (1)..(25): SEQ ID NO: 5191; WAN024CPM; Start 25; Stop 49
ttcctgatactgaagaccgatatgt

SEQ ID NO: 402859 - DNA, 25 bp, Artificial
  probe
  misc_feature (1)..(25): SEQ ID NO: 5191; WAN024CPM; Start 203; Stop 227
ggaccattattgactaccttctcgt

SEQ ID NO: 402860 - DNA, 25 bp, Artificial
  probe
  misc_feature (1)..(25): SEQ ID NO: 5191; WAN024CPM; Start 204; Stop 228
gaccattattgactaccttctcgtc

SEQ ID NO: 402861 - DNA, 25 bp, Artificial
  probe
  misc_feature (1)..(25): SEQ ID NO: 5191; WAN024CPM; Start 198; Stop 222
gcataggaccattattgactacctt

SEQ ID NO: 402862 - DNA, 25 bp, Artificial
  probe
  misc_feature (1)..(25): SEQ ID NO: 5191; WAN024CPM; Start 197; Stop 221
agcataggaccattattgactacct

SEQ ID NO: 402863 - DNA, 25 bp, Artificial
  probe
  misc_feature (1)..(25): SEQ ID NO: 5191; WAN024CPM; Start 201; Stop 225
taggaccattattgactaccttctc

SEQ ID NO: 402864 - DNA, 25 bp, Artificial
  probe
  misc_feature (1)..(25): SEQ ID NO: 5191; WAN024CPM; Start 199; Stop 223
cataggaccattattgactaccttc

SEQ ID NO: 402865 - DNA, 25 bp, Artificial
  probe
  misc_feature (1)..(25): SEQ ID NO: 5191; WAN024CPM; Start 194; Stop 218
tggagcataggaccattattgacta

SEQ ID NO: 402866 - DNA, 25 bp, Artificial
  probe
  misc_feature (1)..(25): SEQ ID NO: 5191; WAN024CPM; Start 202; Stop 226
aggaccattattgactaccttctcg

SEQ ID NO: 402867 - DNA, 25 bp, Artificial
  probe
  misc_feature (1)..(25): SEQ ID NO: 5191; WAN024CPM; Start 200; Stop 224
ataggaccattattgactaccttct

SEQ ID NO: 402868 - DNA, 25 bp, Artificial
  probe
  misc_feature (1)..(25): SEQ ID NO: 5191; WAN024CPM; Start 267; Stop 291
aaccaccaatacctttatcaatcca

SEQ ID NO: 402869 - DNA, 25 bp, Artificial
  probe
  misc_feature (1)..(25): SEQ ID NO: 5191; WAN024CPM; Start 260; Stop 284
atacggaaaccaccaatacctttat

SEQ ID NO: 402870 - DNA, 25 bp, Artificial
  probe
  misc_feature (1)..(25): SEQ ID NO: 5191; WAN024CPM; Start 269; Stop 293
ccaccaatacctttatcaatccaga

SEQ ID NO: 402871 - DNA, 25 bp, Artificial
  probe
  misc_feature (1)..(25): SEQ ID NO: 5191; WAN024CPM; Start 268; Stop 292
accaccaatacctttatcaatccag

SEQ ID NO: 402872 - DNA, 25 bp, Artificial
  probe
  misc_feature (1)..(25): SEQ ID NO: 5191; WAN024CPM; Start 261; Stop 285
tacggaaaccaccaatacctttatc

SEQ ID NO: 402873 - DNA, 25 bp, Artificial
  probe
  misc_feature (1)..(25): SEQ ID NO: 5191; WAN024CPM; Start 266; Stop 290
aaaccaccaatacctttatcaatcc

SEQ ID NO: 402874 - DNA, 25 bp, Artificial
  probe
  misc_feature (1)..(25): SEQ ID NO: 5191; WAN024CPM; Start 264; Stop 288
ggaaaccaccaatacctttatcaat

SEQ ID NO: 402875 - DNA, 25 bp, Artificial
  probe
  misc_feature (1)..(25): SEQ ID NO: 5191; WAN024CPM; Start 259; Stop 283
catacggaaaccaccaataccttta

SEQ ID NO: 402876 - DNA, 25 bp, Artificial
  probe
  misc_feature (1)..(25): SEQ ID NO: 5191; WAN024CPM; Start 270; Stop 294
caccaatacctttatcaatccagaa

SEQ ID NO: 402877 - DNA, 25 bp, Artificial
  probe
  misc_feature (1)..(25): SEQ ID NO: 5191; WAN024CPM; Start 263; Stop 287
cggaaaccaccaatacctttatcaa

SEQ ID NO: 402878 - DNA, 25 bp, Artificial
  probe
  misc_feature (1)..(25): SEQ ID NO: 5191; WAN024CPM; Start 37; Stop 61
aagaccgatatgttcaaactggaag

SEQ ID NO: 402879 - DNA, 25 bp, Artificial
  probe
  misc_feature (1)..(25): SEQ ID NO: 5191; WAN024CPM; Start 36; Stop 60
gaagaccgatatgttcaaactggaa

SEQ ID NO: 402880 - DNA, 25 bp, Artificial
  probe
  misc_feature (1)..(25): SEQ ID NO: 5191; WAN024CPM; Start 53; Stop 77
aactggaagaccatagacaattctt

SEQ ID NO: 402881 - DNA, 25 bp, Artificial
  probe
  misc_feature (1)..(25): SEQ ID NO: 5191; WAN024CPM; Start 54; Stop 78
actggaagaccatagacaattcttg

SEQ ID NO: 402882 - DNA, 25 bp, Artificial
  probe
  misc_feature (1)..(25): SEQ ID NO: 5191; WAN024CPM; Start 272; Stop 296
ccaatacctttatcaatccagaagt

SEQ ID NO: 402883 - DNA, 25 bp, Artificial
  probe
  misc_feature (1)..(25): SEQ ID NO: 5191; WAN024CPM; Start 271; Stop 295
accaatacctttatcaatccagaag

SEQ ID NO: 402884 - DNA, 25 bp, Artificial
  probe
  misc_feature (1)..(25): SEQ ID NO: 5191; WAN024CPM; Start 265; Stop 289
gaaaccaccaatacctttatcaatc

SEQ ID NO: 402885 - DNA, 25 bp, Artificial
  probe
  misc_feature (1)..(25): SEQ ID NO: 5191; WAN024CPM; Start 39; Stop 63
gaccgatatgttcaaactggaagac

SEQ ID NO: 402886 - DNA, 25 bp, Artificial
  probe
  misc_feature (1)..(25): SEQ ID NO: 5191; WAN024CPM; Start 38; Stop 62
agaccgatatgttcaaactggaaga

SEQ ID NO: 402887 - DNA, 25 bp, Artificial
  probe
  misc_feature (1)..(25): SEQ ID NO: 5192; WAN024ERI; Start 137; Stop 161
gtgataggttgatgatgtgtggaat

SEQ ID NO: 402888 - DNA, 25 bp, Artificial
  probe
  misc_feature (1)..(25): SEQ ID NO: 5192; WAN024ERI; Start 138; Stop 162
tgataggttgatgatgtgtggaatg

SEQ ID NO: 402889 - DNA, 25 bp, Artificial
  probe
  misc_feature (1)..(25): SEQ ID NO: 5192; WAN024ERI; Start 61; Stop 85
cgactcactaagaatgttgctatta

SEQ ID NO: 402890 - DNA, 25 bp, Artificial
  probe
  misc_feature (1)..(25): SEQ ID NO: 5192; WAN024ERI; Start 208; Stop 232
aatagtaatggttctaggatggcac

SEQ ID NO: 402891 - DNA, 25 bp, Artificial
  probe
  misc_feature (1)..(25): SEQ ID NO: 5192; WAN024ERI; Start 60; Stop 84
gcgactcactaagaatgttgctatt

SEQ ID NO: 402892 - DNA, 25 bp, Artificial
  probe
  misc_feature (1)..(25): SEQ ID NO: 5192; WAN024ERI; Start 139; Stop 163
gataggttgatgatgtgtggaatgg

SEQ ID NO: 402893 - DNA, 25 bp, Artificial
  probe
  misc_feature (1)..(25): SEQ ID NO: 5192; WAN024ERI; Start 213; Stop 237
taatggttctaggatggcactgtaa

SEQ ID NO: 402894 - DNA, 25 bp, Artificial
  probe
  misc_feature (1)..(25): SEQ ID NO: 5192; WAN024ERI; Start 207; Stop 231
taatagtaatggttctaggatggca

SEQ ID NO: 402895 - DNA, 25 bp, Artificial
  probe
  misc_feature (1)..(25): SEQ ID NO: 5192; WAN024ERI; Start 1; Stop 25
ttgatattgaagataccaggtccaa

SEQ ID NO: 402896 - DNA, 25 bp, Artificial
  probe
  misc_feature (1)..(25): SEQ ID NO: 5192; WAN024ERI; Start 136; Stop 160
tgtgataggttgatgatgtgtggaa

SEQ ID NO: 402897 - DNA, 25 bp, Artificial
  probe
  misc_feature (1)..(25): SEQ ID NO: 5192; WAN024ERI; Start 135; Stop 159
ttgtgataggttgatgatgtgtgga

SEQ ID NO: 402898 - DNA, 25 bp, Artificial
  probe
  misc_feature (1)..(25): SEQ ID NO: 5192; WAN024ERI; Start 209; Stop 233
atagtaatggttctaggatggcact

SEQ ID NO: 402899 - DNA, 25 bp, Artificial
  probe
  misc_feature (1)..(25): SEQ ID NO: 5192; WAN024ERI; Start 212; Stop 236
gtaatggttctaggatggcactgta

SEQ ID NO: 402900 - DNA, 25 bp, Artificial
  probe
  misc_feature (1)..(25): SEQ ID NO: 5192; WAN024ERI; Start 59; Stop 83
tgcgactcactaagaatgttgctat

SEQ ID NO: 402901 - DNA, 25 bp, Artificial
  probe
  misc_feature (1)..(25): SEQ ID NO: 5192; WAN024ERI; Start 210; Stop 234
tagtaatggttctaggatggcactg

SEQ ID NO: 402902 - DNA, 25 bp, Artificial
  probe
  misc_feature (1)..(25): SEQ ID NO: 5192; WAN024ERI; Start 206; Stop 230
ttaatagtaatggttctaggatggc

SEQ ID NO: 402903 - DNA, 25 bp, Artificial
  probe
  misc_feature (1)..(25): SEQ ID NO: 5192; WAN024ERI; Start 58; Stop 82
ttgcgactcactaagaatgttgcta

SEQ ID NO: 402904 - DNA, 25 bp, Artificial
  probe
  misc_feature (1)..(25): SEQ ID NO: 5192; WAN024ERI; Start 121; Stop 145
gcgaatgtttgtatttgtgataggt

SEQ ID NO: 402905 - DNA, 25 bp, Artificial
  probe
  misc_feature (1)..(25): SEQ ID NO: 5192; WAN024ERI; Start 120; Stop 144
agcgaatgtttgtatttgtgatagg

SEQ ID NO: 402906 - DNA, 25 bp, Artificial
  probe
  misc_feature (1)..(25): SEQ ID NO: 5192; WAN024ERI; Start 133; Stop 157
atttgtgataggttgatgatgtgtg

SEQ ID NO: 402907 - DNA, 25 bp, Artificial
  probe
  misc_feature (1)..(25): SEQ ID NO: 5192; WAN024ERI; Start 57; Stop 81
attgcgactcactaagaatgttgct

SEQ ID NO: 402908 - DNA, 25 bp, Artificial
  probe
  misc_feature (1)..(25): SEQ ID NO: 5192; WAN024ERI; Start 134; Stop 158
tttgtgataggttgatgatgtgtgg

SEQ ID NO: 402909 - DNA, 25 bp, Artificial
  probe
  misc_feature (1)..(25): SEQ ID NO: 5192; WAN024ERI; Start 140; Stop 164
ataggttgatgatgtgtggaatggc

SEQ ID NO: 402910 - DNA, 25 bp, Artificial
  probe
  misc_feature (1)..(25): SEQ ID NO: 5192; WAN024ERI; Start 62; Stop 86
gactcactaagaatgttgctattaa

SEQ ID NO: 402911 - DNA, 25 bp, Artificial
  probe
  misc_feature (1)..(25): SEQ ID NO: 5192; WAN024ERI; Start 119; Stop 143
aagcgaatgtttgtatttgtgatag

SEQ ID NO: 402912 - DNA, 25 bp, Artificial
  probe
  misc_feature (1)..(25): SEQ ID NO: 5192; WAN024ERI; Start 89; Stop 113
aacataatgtagatccactaccacc

SEQ ID NO: 402913 - DNA, 25 bp, Artificial
  probe
  misc_feature (1)..(25): SEQ ID NO: 5192; WAN024ERI; Start 132; Stop 156
tatttgtgataggttgatgatgtgt

SEQ ID NO: 402914 - DNA, 25 bp, Artificial
  probe
  misc_feature (1)..(25): SEQ ID NO: 5192; WAN024ERI; Start 130; Stop 154
tgtatttgtgataggttgatgatgt

SEQ ID NO: 402915 - DNA, 25 bp, Artificial
  probe
  misc_feature (1)..(25): SEQ ID NO: 5192; WAN024ERI; Start 2; Stop 26
tgatattgaagataccaggtccaaa

SEQ ID NO: 402916 - DNA, 25 bp, Artificial
  probe
  misc_feature (1)..(25): SEQ ID NO: 5192; WAN024ERI; Start 122; Stop 146
cgaatgtttgtatttgtgataggtt

SEQ ID NO: 402917 - DNA, 25 bp, Artificial
  probe
  misc_feature (1)..(25): SEQ ID NO: 5192; WAN024ERI; Start 116; Stop 140
ttaaagcgaatgtttgtatttgtga

SEQ ID NO: 402918 - DNA, 25 bp, Artificial
  probe
  misc_feature (1)..(25): SEQ ID NO: 5192; WAN024ERI; Start 131; Stop 155
gtatttgtgataggttgatgatgtg

SEQ ID NO: 402919 - DNA, 25 bp, Artificial
  probe
  misc_feature (1)..(25): SEQ ID NO: 5192; WAN024ERI; Start 118; Stop 142
aaagcgaatgtttgtatttgtgata

SEQ ID NO: 402920 - DNA, 25 bp, Artificial
  probe
  misc_feature (1)..(25): SEQ ID NO: 5193; WAN024FD6; Start 119; Stop 143
aatcacgaatcatgtcttccatctt

SEQ ID NO: 402921 - DNA, 25 bp, Artificial
  probe
  misc_feature (1)..(25): SEQ ID NO: 5193; WAN024FD6; Start 205; Stop 229
tcttcatacagcttggaatcatcat

SEQ ID NO: 402922 - DNA, 25 bp, Artificial
  probe
  misc_feature (1)..(25): SEQ ID NO: 5193; WAN024FD6; Start 204; Stop 228
ttcttcatacagcttggaatcatca

SEQ ID NO: 402923 - DNA, 25 bp, Artificial
  probe
  misc_feature (1)..(25): SEQ ID NO: 5193; WAN024FD6; Start 203; Stop 227
cttcttcatacagcttggaatcatc

SEQ ID NO: 402924 - DNA, 25 bp, Artificial
  probe
  misc_feature (1)..(25): SEQ ID NO: 5193; WAN024FD6; Start 206; Stop 230
cttcatacagcttggaatcatcatt

SEQ ID NO: 402925 - DNA, 25 bp, Artificial
  probe
  misc_feature (1)..(25): SEQ ID NO: 5193; WAN024FD6; Start 217; Stop 241
ttggaatcatcatttctcagaacct

SEQ ID NO: 402926 - DNA, 25 bp, Artificial
  probe
  misc_feature (1)..(25): SEQ ID NO: 5193; WAN024FD6; Start 216; Stop 240
cttggaatcatcatttctcagaacc

SEQ ID NO: 402927 - DNA, 25 bp, Artificial
  probe
  misc_feature (1)..(25): SEQ ID NO: 5193; WAN024FD6; Start 215; Stop 239
gcttggaatcatcatttctcagaac

SEQ ID NO: 402928 - DNA, 25 bp, Artificial
  probe
  misc_feature (1)..(25): SEQ ID NO: 5193; WAN024FD6; Start 120; Stop 144
atcacgaatcatgtcttccatcttt

SEQ ID NO: 402929 - DNA, 25 bp, Artificial
  probe
  misc_feature (1)..(25): SEQ ID NO: 5193; WAN024FD6; Start 118; Stop 142
aaatcacgaatcatgtcttccatct

SEQ ID NO: 402930 - DNA, 25 bp, Artificial
  probe
  misc_feature (1)..(25): SEQ ID NO: 5193; WAN024FD6; Start 121; Stop 145
tcacgaatcatgtcttccatctttc

SEQ ID NO: 402931 - DNA, 25 bp, Artificial
  probe
  misc_feature (1)..(25): SEQ ID NO: 5193; WAN024FD6; Start 218; Stop 242
tggaatcatcatttctcagaacctg

SEQ ID NO: 402932 - DNA, 25 bp, Artificial
  probe
  misc_feature (1)..(25): SEQ ID NO: 5193; WAN024FD6; Start 211; Stop 235
tacagcttggaatcatcatttctca

SEQ ID NO: 402933 - DNA, 25 bp, Artificial
  probe
  misc_feature (1)..(25): SEQ ID NO: 5193; WAN024FD6; Start 130; Stop 154
atgtcttccatctttccagcatcaa

SEQ ID NO: 402934 - DNA, 25 bp, Artificial
  probe
  misc_feature (1)..(25): SEQ ID NO: 5193; WAN024FD6; Start 214; Stop 238
agcttggaatcatcatttctcagaa

SEQ ID NO: 402935 - DNA, 25 bp, Artificial
  probe
  misc_feature (1)..(25): SEQ ID NO: 5193; WAN024FD6; Start 209; Stop 233
catacagcttggaatcatcatttct

SEQ ID NO: 402936 - DNA, 25 bp, Artificial
  probe
  misc_feature (1)..(25): SEQ ID NO: 5193; WAN024FD6; Start 208; Stop 232
tcatacagcttggaatcatcatttc

SEQ ID NO: 402937 - DNA, 25 bp, Artificial
  probe
  misc_feature (1)..(25): SEQ ID NO: 5193; WAN024FD6; Start 124; Stop 148
cgaatcatgtcttccatctttccag

SEQ ID NO: 402938 - DNA, 25 bp, Artificial
  probe
  misc_feature (1)..(25): SEQ ID NO: 5193; WAN024FD6; Start 210; Stop 234
atacagcttggaatcatcatttctc

SEQ ID NO: 402939 - DNA, 25 bp, Artificial
  probe
  misc_feature (1)..(25): SEQ ID NO: 5193; WAN024FD6; Start 207; Stop 231
ttcatacagcttggaatcatcattt

SEQ ID NO: 402940 - DNA, 25 bp, Artificial
  probe
  misc_feature (1)..(25): SEQ ID NO: 5193; WAN024FD6; Start 125; Stop 149
gaatcatgtcttccatctttccagc

SEQ ID NO: 402941 - DNA, 25 bp, Artificial
  probe
  misc_feature (1)..(25): SEQ ID NO: 5193; WAN024FD6; Start 213; Stop 237
cagcttggaatcatcatttctcaga

SEQ ID NO: 402942 - DNA, 25 bp, Artificial
  probe
  misc_feature (1)..(25): SEQ ID NO: 5193; WAN024FD6; Start 202; Stop 226
gcttcttcatacagcttggaatcat

SEQ ID NO: 402943 - DNA, 25 bp, Artificial
  probe
  misc_feature (1)..(25): SEQ ID NO: 5193; WAN024FD6; Start 122; Stop 146
cacgaatcatgtcttccatctttcc

SEQ ID NO: 402944 - DNA, 25 bp, Artificial
  probe
  misc_feature (1)..(25): SEQ ID NO: 5193; WAN024FD6; Start 212; Stop 236
acagcttggaatcatcatttctcag

SEQ ID NO: 402945 - DNA, 25 bp, Artificial
  probe
  misc_feature (1)..(25): SEQ ID NO: 5193; WAN024FD6; Start 123; Stop 147
acgaatcatgtcttccatctttcca

SEQ ID NO: 402946 - DNA, 25 bp, Artificial
  probe
  misc_feature (1)..(25): SEQ ID NO: 5193; WAN024FD6; Start 132; Stop 156
gtcttccatctttccagcatcaact

SEQ ID NO: 402947 - DNA, 25 bp, Artificial
  probe
  misc_feature (1)..(25): SEQ ID NO: 5193; WAN024FD6; Start 127; Stop 151
atcatgtcttccatctttccagcat

SEQ ID NO: 402948 - DNA, 25 bp, Artificial
  probe
  misc_feature (1)..(25): SEQ ID NO: 5193; WAN024FD6; Start 126; Stop 150
aatcatgtcttccatctttccagca

SEQ ID NO: 402949 - DNA, 25 bp, Artificial
  probe
  misc_feature (1)..(25): SEQ ID NO: 5193; WAN024FD6; Start 131; Stop 155
tgtcttccatctttccagcatcaac

SEQ ID NO: 402950 - DNA, 25 bp, Artificial
  probe
  misc_feature (1)..(25): SEQ ID NO: 5193; WAN024FD6; Start 84; Stop 108
caaacaaatcccaagaatcggcttc

SEQ ID NO: 402951 - DNA, 25 bp, Artificial
  probe
  misc_feature (1)..(25): SEQ ID NO: 5193; WAN024FD6; Start 40; Stop 64
aaacctagcttaccaccaaagactt

SEQ ID NO: 402952 - DNA, 25 bp, Artificial
  probe
  misc_feature (1)..(25): SEQ ID NO: 5193; WAN024FD6; Start 128; Stop 152
tcatgtcttccatctttccagcatc

SEQ ID NO: 402953 - DNA, 25 bp, Artificial
  probe
  misc_feature (1)..(25): SEQ ID NO: 5194; WAN024FY5; Start 90; Stop 114
agtaccatgcttacggataatcttg

SEQ ID NO: 402954 - DNA, 25 bp, Artificial
  probe
  misc_feature (1)..(25): SEQ ID NO: 5194; WAN024FY5; Start 89; Stop 113
tagtaccatgcttacggataatctt

SEQ ID NO: 402955 - DNA, 25 bp, Artificial
  probe
  misc_feature (1)..(25): SEQ ID NO: 5194; WAN024FY5; Start 88; Stop 112
atagtaccatgcttacggataatct

SEQ ID NO: 402956 - DNA, 25 bp, Artificial
  probe
  misc_feature (1)..(25): SEQ ID NO: 5194; WAN024FY5; Start 87; Stop 111
catagtaccatgcttacggataatc

SEQ ID NO: 402957 - DNA, 25 bp, Artificial
  probe
  misc_feature (1)..(25): SEQ ID NO: 5194; WAN024FY5; Start 94; Stop 118
ccatgcttacggataatcttggtaa

SEQ ID NO: 402958 - DNA, 25 bp, Artificial
  probe
  misc_feature (1)..(25): SEQ ID NO: 5194; WAN024FY5; Start 100; Stop 124
ttacggataatcttggtaagagcac

SEQ ID NO: 402959 - DNA, 25 bp, Artificial
  probe
  misc_feature (1)..(25): SEQ ID NO: 5194; WAN024FY5; Start 91; Stop 115
gtaccatgcttacggataatcttgg

SEQ ID NO: 402960 - DNA, 25 bp, Artificial
  probe
  misc_feature (1)..(25): SEQ ID NO: 5194; WAN024FY5; Start 101; Stop 125
tacggataatcttggtaagagcacg

SEQ ID NO: 402961 - DNA, 25 bp, Artificial
  probe
  misc_feature (1)..(25): SEQ ID NO: 5194; WAN024FY5; Start 2; Stop 26
tgatattgtctgtcggtaaaactgt

SEQ ID NO: 402962 - DNA, 25 bp, Artificial
  probe
  misc_feature (1)..(25): SEQ ID NO: 5194; WAN024FY5; Start 126; Stop 150
cgtatcaattcctgaaatccctgga

SEQ ID NO: 402963 - DNA, 25 bp, Artificial
  probe
  misc_feature (1)..(25): SEQ ID NO: 5194; WAN024FY5; Start 4; Stop 28
atattgtctgtcggtaaaactgttg

SEQ ID NO: 402964 - DNA, 25 bp, Artificial
  probe
  misc_feature (1)..(25): SEQ ID NO: 5194; WAN024FY5; Start 1; Stop 25
ttgatattgtctgtcggtaaaactg

SEQ ID NO: 402965 - DNA, 25 bp, Artificial
  probe
  misc_feature (1)..(25): SEQ ID NO: 5194; WAN024FY5; Start 3; Stop 27
gatattgtctgtcggtaaaactgtt

SEQ ID NO: 402966 - DNA, 25 bp, Artificial
  probe
  misc_feature (1)..(25): SEQ ID NO: 5194; WAN024FY5; Start 5; Stop 29
tattgtctgtcggtaaaactgttgc

SEQ ID NO: 402967 - DNA, 25 bp, Artificial
  probe
  misc_feature (1)..(25): SEQ ID NO: 5194; WAN024FY5; Start 125; Stop 149
gcgtatcaattcctgaaatccctgg

SEQ ID NO: 402968 - DNA, 25 bp, Artificial
  probe
  misc_feature (1)..(25): SEQ ID NO: 5194; WAN024FY5; Start 141; Stop 165
aatccctggaattttcttggctttc

SEQ ID NO: 402969 - DNA, 25 bp, Artificial
  probe
  misc_feature (1)..(25): SEQ ID NO: 5194; WAN024FY5; Start 145; Stop 169
cctggaattttcttggctttcaaaa

SEQ ID NO: 402970 - DNA, 25 bp, Artificial
  probe
  misc_feature (1)..(25): SEQ ID NO: 5194; WAN024FY5; Start 140; Stop 164
aaatccctggaattttcttggcttt

SEQ ID NO: 402971 - DNA, 25 bp, Artificial
  probe
  misc_feature (1)..(25): SEQ ID NO: 5194; WAN024FY5; Start 144; Stop 168
ccctggaattttcttggctttcaaa

SEQ ID NO: 402972 - DNA, 25 bp, Artificial
  probe
  misc_feature (1)..(25): SEQ ID NO: 5194; WAN024FY5; Start 99; Stop 123
cttacggataatcttggtaagagca

SEQ ID NO: 402973 - DNA, 25 bp, Artificial
  probe
  misc_feature (1)..(25): SEQ ID NO: 5194; WAN024FY5; Start 97; Stop 121
tgcttacggataatcttggtaagag

SEQ ID NO: 402974 - DNA, 25 bp, Artificial
  probe
  misc_feature (1)..(25): SEQ ID NO: 5194; WAN024FY5; Start 96; Stop 120
atgcttacggataatcttggtaaga

SEQ ID NO: 402975 - DNA, 25 bp, Artificial
  probe
  misc_feature (1)..(25): SEQ ID NO: 5194; WAN024FY5; Start 95; Stop 119
catgcttacggataatcttggtaag

SEQ ID NO: 402976 - DNA, 25 bp, Artificial
  probe
  misc_feature (1)..(25): SEQ ID NO: 5194; WAN024FY5; Start 86; Stop 110
gcatagtaccatgcttacggataat

SEQ ID NO: 402977 - DNA, 25 bp, Artificial
  probe
  misc_feature (1)..(25): SEQ ID NO: 5194; WAN024FY5; Start 127; Stop 151
gtatcaattcctgaaatccctggaa

SEQ ID NO: 402978 - DNA, 25 bp, Artificial
  probe
  misc_feature (1)..(25): SEQ ID NO: 5194; WAN024FY5; Start 142; Stop 166
atccctggaattttcttggctttca

SEQ ID NO: 402979 - DNA, 25 bp, Artificial
  probe
  misc_feature (1)..(25): SEQ ID NO: 5194; WAN024FY5; Start 6; Stop 30
attgtctgtcggtaaaactgttgct

SEQ ID NO: 402980 - DNA, 25 bp, Artificial
  probe
  misc_feature (1)..(25): SEQ ID NO: 5194; WAN024FY5; Start 98; Stop 122
gcttacggataatcttggtaagagc

SEQ ID NO: 402981 - DNA, 25 bp, Artificial
  probe
  misc_feature (1)..(25): SEQ ID NO: 5194; WAN024FY5; Start 135; Stop 159
tcctgaaatccctggaattttcttg

SEQ ID NO: 402982 - DNA, 25 bp, Artificial
  probe
  misc_feature (1)..(25): SEQ ID NO: 5194; WAN024FY5; Start 93; Stop 117
accatgcttacggataatcttggta

SEQ ID NO: 402983 - DNA, 25 bp, Artificial
  probe
  misc_feature (1)..(25): SEQ ID NO: 5194; WAN024FY5; Start 92; Stop 116
taccatgcttacggataatcttggt

SEQ ID NO: 402984 - DNA, 25 bp, Artificial
  probe
  misc_feature (1)..(25): SEQ ID NO: 5194; WAN024FY5; Start 7; Stop 31
ttgtctgtcggtaaaactgttgctt

SEQ ID NO: 402985 - DNA, 25 bp, Artificial
  probe
  misc_feature (1)..(25): SEQ ID NO: 5194; WAN024FY5; Start 143; Stop 167
tccctggaattttcttggctttcaa

SEQ ID NO: 402986 - DNA, 25 bp, Artificial
  probe
  misc_feature (1)..(25): SEQ ID NO: 5195; WAN024F5A; Start 159; Stop 183
ctgttgcttcatctcctgtcaattc

SEQ ID NO: 402987 - DNA, 25 bp, Artificial
  probe
  misc_feature (1)..(25): SEQ ID NO: 5195; WAN024F5A; Start 166; Stop 190
ttcatctcctgtcaattccaaggta

SEQ ID NO: 402988 - DNA, 25 bp, Artificial
  probe
  misc_feature (1)..(25): SEQ ID NO: 5195; WAN024F5A; Start 148; Stop 172
aatattacgtcctgttgcttcatct

SEQ ID NO: 402989 - DNA, 25 bp, Artificial
  probe
  misc_feature (1)..(25): SEQ ID NO: 5195; WAN024F5A; Start 167; Stop 191
tcatctcctgtcaattccaaggtag

SEQ ID NO: 402990 - DNA, 25 bp, Artificial
  probe
  misc_feature (1)..(25): SEQ ID NO: 5195; WAN024F5A; Start 149; Stop 173
atattacgtcctgttgcttcatctc

SEQ ID NO: 402991 - DNA, 25 bp, Artificial
  probe
  misc_feature (1)..(25): SEQ ID NO: 5195; WAN024F5A; Start 162; Stop 186
ttgcttcatctcctgtcaattccaa

SEQ ID NO: 402992 - DNA, 25 bp, Artificial
  probe
  misc_feature (1)..(25): SEQ ID NO: 5195; WAN024F5A; Start 147; Stop 171
caatattacgtcctgttgcttcatc

SEQ ID NO: 402993 - DNA, 25 bp, Artificial
  probe
  misc_feature (1)..(25): SEQ ID NO: 5195; WAN024F5A; Start 324; Stop 348
ctccaaccttaataaccgctacacc

SEQ ID NO: 402994 - DNA, 25 bp, Artificial
  probe
  misc_feature (1)..(25): SEQ ID NO: 5195; WAN024F5A; Start 163; Stop 187
tgcttcatctcctgtcaattccaag

SEQ ID NO: 402995 - DNA, 25 bp, Artificial
  probe
  misc_feature (1)..(25): SEQ ID NO: 5195; WAN024F5A; Start 165; Stop 189
cttcatctcctgtcaattccaaggt

SEQ ID NO: 402996 - DNA, 25 bp, Artificial
  probe
  misc_feature (1)..(25): SEQ ID NO: 5195; WAN024F5A; Start 78; Stop 102
taacgatagatccttcaaatcctgc

SEQ ID NO: 402997 - DNA, 25 bp, Artificial
  probe
  misc_feature (1)..(25): SEQ ID NO: 5195; WAN024F5A; Start 146; Stop 170
acaatattacgtcctgttgcttcat

SEQ ID NO: 402998 - DNA, 25 bp, Artificial
  probe
  misc_feature (1)..(25): SEQ ID NO: 5195; WAN024F5A; Start 75; Stop 99
cgataacgatagatccttcaaatcc

SEQ ID NO: 402999 - DNA, 25 bp, Artificial
  probe
  misc_feature (1)..(25): SEQ ID NO: 5195; WAN024F5A; Start 30; Stop 54
ttgctgcgttaaatcctataccaag

SEQ ID NO: 403000 - DNA, 25 bp, Artificial
  probe
  misc_feature (1)..(25): SEQ ID NO: 5195; WAN024F5A; Start 29; Stop 53
gttgctgcgttaaatcctataccaa

SEQ ID NO: 403001 - DNA, 25 bp, Artificial
  probe
  misc_feature (1)..(25): SEQ ID NO: 5195; WAN024F5A; Start 161; Stop 185
gttgcttcatctcctgtcaattcca

SEQ ID NO: 403002 - DNA, 25 bp, Artificial
  probe
  misc_feature (1)..(25): SEQ ID NO: 5195; WAN024F5A; Start 160; Stop 184
tgttgcttcatctcctgtcaattcc

SEQ ID NO: 403003 - DNA, 25 bp, Artificial
  probe
  misc_feature (1)..(25): SEQ ID NO: 5195; WAN024F5A; Start 158; Stop 182
cctgttgcttcatctcctgtcaatt

SEQ ID NO: 403004 - DNA, 25 bp, Artificial
  probe
  misc_feature (1)..(25): SEQ ID NO: 5195; WAN024F5A; Start 294; Stop 318
tcatttctttcaactcagtttcagt

SEQ ID NO: 403005 - DNA, 25 bp, Artificial
  probe
  misc_feature (1)..(25): SEQ ID NO: 5195; WAN024F5A; Start 327; Stop 351
caaccttaataaccgctacaccacc

SEQ ID NO: 403006 - DNA, 25 bp, Artificial
  probe
  misc_feature (1)..(25): SEQ ID NO: 5195; WAN024F5A; Start 326; Stop 350
ccaaccttaataaccgctacaccac

SEQ ID NO: 403007 - DNA, 25 bp, Artificial
  probe
  misc_feature (1)..(25): SEQ ID NO: 5195; WAN024F5A; Start 323; Stop 347
gctccaaccttaataaccgctacac

SEQ ID NO: 403008 - DNA, 25 bp, Artificial
  probe
  misc_feature (1)..(25): SEQ ID NO: 5195; WAN024F5A; Start 150; Stop 174
tattacgtcctgttgcttcatctcc

SEQ ID NO: 403009 - DNA, 25 bp, Artificial
  probe
  misc_feature (1)..(25): SEQ ID NO: 5195; WAN024F5A; Start 28; Stop 52
agttgctgcgttaaatcctatacca

SEQ ID NO: 403010 - DNA, 25 bp, Artificial
  probe
  misc_feature (1)..(25): SEQ ID NO: 5195; WAN024F5A; Start 39; Stop 63
taaatcctataccaagctcagcatt

SEQ ID NO: 403011 - DNA, 25 bp, Artificial
  probe
  misc_feature (1)..(25): SEQ ID NO: 5195; WAN024F5A; Start 38; Stop 62
ttaaatcctataccaagctcagcat

SEQ ID NO: 403012 - DNA, 25 bp, Artificial
  probe
  misc_feature (1)..(25): SEQ ID NO: 5195; WAN024F5A; Start 228; Stop 252
cacctgcaacaataccttcttcaac

SEQ ID NO: 403013 - DNA, 25 bp, Artificial
  probe
  misc_feature (1)..(25): SEQ ID NO: 5195; WAN024F5A; Start 77; Stop 101
ataacgatagatccttcaaatcctg

SEQ ID NO: 403014 - DNA, 25 bp, Artificial
  probe
  misc_feature (1)..(25): SEQ ID NO: 5195; WAN024F5A; Start 328; Stop 352
aaccttaataaccgctacaccacct

SEQ ID NO: 403015 - DNA, 25 bp, Artificial
  probe
  misc_feature (1)..(25): SEQ ID NO: 5195; WAN024F5A; Start 325; Stop 349
tccaaccttaataaccgctacacca

SEQ ID NO: 403016 - DNA, 25 bp, Artificial
  probe
  misc_feature (1)..(25): SEQ ID NO: 5195; WAN024F5A; Start 37; Stop 61
gttaaatcctataccaagctcagca

SEQ ID NO: 403017 - DNA, 25 bp, Artificial
  probe
  misc_feature (1)..(25): SEQ ID NO: 5195; WAN024F5A; Start 293; Stop 317
ttcatttctttcaactcagtttcag

SEQ ID NO: 403018 - DNA, 25 bp, Artificial
  probe
  misc_feature (1)..(25): SEQ ID NO: 5195; WAN024F5A; Start 168; Stop 192
catctcctgtcaattccaaggtagc

SEQ ID NO: 403019 - DNA, 25 bp, Artificial
  probe
  misc_feature (1)..(25): SEQ ID NO: 5196; WAN024FH9; Start 355; Stop 379
aggattcaaggcatctgtcacaatt

SEQ ID NO: 403020 - DNA, 25 bp, Artificial
  probe
  misc_feature (1)..(25): SEQ ID NO: 5196; WAN024FH9; Start 357; Stop 381
gattcaaggcatctgtcacaatttc

SEQ ID NO: 403021 - DNA, 25 bp, Artificial
  probe
  misc_feature (1)..(25): SEQ ID NO: 5196; WAN024FH9; Start 358; Stop 382
attcaaggcatctgtcacaatttca

SEQ ID NO: 403022 - DNA, 25 bp, Artificial
  probe
  misc_feature (1)..(25): SEQ ID NO: 5196; WAN024FH9; Start 14; Stop 38
tactccaaactgtcaatatcctgag

SEQ ID NO: 403023 - DNA, 25 bp, Artificial
  probe
  misc_feature (1)..(25): SEQ ID NO: 5196; WAN024FH9; Start 111; Stop 135
aagctccattatgagtcacgatgat

SEQ ID NO: 403024 - DNA, 25 bp, Artificial
  probe
  misc_feature (1)..(25): SEQ ID NO: 5196; WAN024FH9; Start 376; Stop 400
aatttcagaagccagttccacattt

SEQ ID NO: 403025 - DNA, 25 bp, Artificial
  probe
  misc_feature (1)..(25): SEQ ID NO: 5196; WAN024FH9; Start 13; Stop 37
gtactccaaactgtcaatatcctga

SEQ ID NO: 403026 - DNA, 25 bp, Artificial
  probe
  misc_feature (1)..(25): SEQ ID NO: 5196; WAN024FH9; Start 215; Stop 239
gtcggttcatcacaaaggagaattt

SEQ ID NO: 403027 - DNA, 25 bp, Artificial
  probe
  misc_feature (1)..(25): SEQ ID NO: 5196; WAN024FH9; Start 356; Stop 380
ggattcaaggcatctgtcacaattt

SEQ ID NO: 403028 - DNA, 25 bp, Artificial
  probe
  misc_feature (1)..(25): SEQ ID NO: 5196; WAN024FH9; Start 112; Stop 136
agctccattatgagtcacgatgatc

SEQ ID NO: 403029 - DNA, 25 bp, Artificial
  probe
  misc_feature (1)..(25): SEQ ID NO: 5196; WAN024FH9; Start 375; Stop 399
caatttcagaagccagttccacatt

SEQ ID NO: 403030 - DNA, 25 bp, Artificial
  probe
  misc_feature (1)..(25): SEQ ID NO: 5196; WAN024FH9; Start 400; Stop 424
ttccttagctgtcagattagaaact

SEQ ID NO: 403031 - DNA, 25 bp, Artificial
  probe
  misc_feature (1)..(25): SEQ ID NO: 5196; WAN024FH9; Start 214; Stop 238
agtcggttcatcacaaaggagaatt

SEQ ID NO: 403032 - DNA, 25 bp, Artificial
  probe
  misc_feature (1)..(25): SEQ ID NO: 5196; WAN024FH9; Start 15; Stop 39
actccaaactgtcaatatcctgagg

SEQ ID NO: 403033 - DNA, 25 bp, Artificial
  probe
  misc_feature (1)..(25): SEQ ID NO: 5196; WAN024FH9; Start 354; Stop 378
caggattcaaggcatctgtcacaat

SEQ ID NO: 403034 - DNA, 25 bp, Artificial
  probe
  misc_feature (1)..(25): SEQ ID NO: 5196; WAN024FH9; Start 401; Stop 425
tccttagctgtcagattagaaacta

SEQ ID NO: 403035 - DNA, 25 bp, Artificial
  probe
  misc_feature (1)..(25): SEQ ID NO: 5196; WAN024FH9; Start 402; Stop 426
ccttagctgtcagattagaaactag

SEQ ID NO: 403036 - DNA, 25 bp, Artificial
  probe
  misc_feature (1)..(25): SEQ ID NO: 5196; WAN024FH9; Start 359; Stop 383
ttcaaggcatctgtcacaatttcag

SEQ ID NO: 403037 - DNA, 25 bp, Artificial
  probe
  misc_feature (1)..(25): SEQ ID NO: 5196; WAN024FH9; Start 351; Stop 375
gatcaggattcaaggcatctgtcac

SEQ ID NO: 403038 - DNA, 25 bp, Artificial
  probe
  misc_feature (1)..(25): SEQ ID NO: 5196; WAN024FH9; Start 213; Stop 237
cagtcggttcatcacaaaggagaat

SEQ ID NO: 403039 - DNA, 25 bp, Artificial
  probe
  misc_feature (1)..(25): SEQ ID NO: 5196; WAN024FH9; Start 369; Stop 393
ctgtcacaatttcagaagccagttc

SEQ ID NO: 403040 - DNA, 25 bp, Artificial
  probe
  misc_feature (1)..(25): SEQ ID NO: 5196; WAN024FH9; Start 374; Stop 398
acaatttcagaagccagttccacat

SEQ ID NO: 403041 - DNA, 25 bp, Artificial
  probe
  misc_feature (1)..(25): SEQ ID NO: 5196; WAN024FH9; Start 114; Stop 138
ctccattatgagtcacgatgatcac

SEQ ID NO: 403042 - DNA, 25 bp, Artificial
  probe
  misc_feature (1)..(25): SEQ ID NO: 5196; WAN024FH9; Start 352; Stop 376
atcaggattcaaggcatctgtcaca

SEQ ID NO: 403043 - DNA, 25 bp, Artificial
  probe
  misc_feature (1)..(25): SEQ ID NO: 5196; WAN024FH9; Start 16; Stop 40
ctccaaactgtcaatatcctgagga

SEQ ID NO: 403044 - DNA, 25 bp, Artificial
  probe
  misc_feature (1)..(25): SEQ ID NO: 5196; WAN024FH9; Start 109; Stop 133
caaagctccattatgagtcacgatg

SEQ ID NO: 403045 - DNA, 25 bp, Artificial
  probe
  misc_feature (1)..(25): SEQ ID NO: 5196; WAN024FH9; Start 217; Stop 241
cggttcatcacaaaggagaatttta

SEQ ID NO: 403046 - DNA, 25 bp, Artificial
  probe
  misc_feature (1)..(25): SEQ ID NO: 5196; WAN024FH9; Start 110; Stop 134
aaagctccattatgagtcacgatga

SEQ ID NO: 403047 - DNA, 25 bp, Artificial
  probe
  misc_feature (1)..(25): SEQ ID NO: 5196; WAN024FH9; Start 353; Stop 377
tcaggattcaaggcatctgtcacaa

SEQ ID NO: 403048 - DNA, 25 bp, Artificial
  probe
  misc_feature (1)..(25): SEQ ID NO: 5196; WAN024FH9; Start 162; Stop 186
tgtcttggagaattttcaaaacctg

SEQ ID NO: 403049 - DNA, 25 bp, Artificial
  probe
  misc_feature (1)..(25): SEQ ID NO: 5196; WAN024FH9; Start 216; Stop 240
tcggttcatcacaaaggagaatttt

SEQ ID NO: 403050 - DNA, 25 bp, Artificial
  probe
  misc_feature (1)..(25): SEQ ID NO: 5196; WAN024FH9; Start 165; Stop 189
cttggagaattttcaaaacctgctt

SEQ ID NO: 403051 - DNA, 25 bp, Artificial
  probe
  misc_feature (1)..(25): SEQ ID NO: 5196; WAN024FH9; Start 161; Stop 185
atgtcttggagaattttcaaaacct

SEQ ID NO: 403052 - DNA, 25 bp, Artificial
  probe
  misc_feature (1)..(25): SEQ ID NO: 5197; WAN024FFY; Start 196; Stop 220
ataatcaaaccaagacgagcatact

SEQ ID NO: 403053 - DNA, 25 bp, Artificial
  probe
  misc_feature (1)..(25): SEQ ID NO: 5197; WAN024FFY; Start 195; Stop 219
aataatcaaaccaagacgagcatac

SEQ ID NO: 403054 - DNA, 25 bp, Artificial
  probe
  misc_feature (1)..(25): SEQ ID NO: 5197; WAN024FFY; Start 191; Stop 215
cgataataatcaaaccaagacgagc

SEQ ID NO: 403055 - DNA, 25 bp, Artificial
  probe
  misc_feature (1)..(25): SEQ ID NO: 5197; WAN024FFY; Start 192; Stop 216
gataataatcaaaccaagacgagca

SEQ ID NO: 403056 - DNA, 25 bp, Artificial
  probe
  misc_feature (1)..(25): SEQ ID NO: 5197; WAN024FFY; Start 193; Stop 217
ataataatcaaaccaagacgagcat

SEQ ID NO: 403057 - DNA, 25 bp, Artificial
  probe
  misc_feature (1)..(25): SEQ ID NO: 5197; WAN024FFY; Start 194; Stop 218
taataatcaaaccaagacgagcata

SEQ ID NO: 403058 - DNA, 25 bp, Artificial
  probe
  misc_feature (1)..(25): SEQ ID NO: 5197; WAN024FFY; Start 55; Stop 79
gaaacatccatatctccaaaggctg

SEQ ID NO: 403059 - DNA, 25 bp, Artificial
  probe
  misc_feature (1)..(25): SEQ ID NO: 5197; WAN024FFY; Start 197; Stop 221
taatcaaaccaagacgagcatactc

SEQ ID NO: 403060 - DNA, 25 bp, Artificial
  probe
  misc_feature (1)..(25): SEQ ID NO: 5197; WAN024FFY; Start 59; Stop 83
catccatatctccaaaggctgtgat

SEQ ID NO: 403061 - DNA, 25 bp, Artificial
  probe
  misc_feature (1)..(25): SEQ ID NO: 5197; WAN024FFY; Start 60; Stop 84
atccatatctccaaaggctgtgatg

SEQ ID NO: 403062 - DNA, 25 bp, Artificial
  probe
  misc_feature (1)..(25): SEQ ID NO: 5197; WAN024FFY; Start 56; Stop 80
aaacatccatatctccaaaggctgt

SEQ ID NO: 403063 - DNA, 25 bp, Artificial
  probe
  misc_feature (1)..(25): SEQ ID NO: 5197; WAN024FFY; Start 179; Stop 203
ggtgctgctcatcgataataatcaa

SEQ ID NO: 403064 - DNA, 25 bp, Artificial
  probe
  misc_feature (1)..(25): SEQ ID NO: 5197; WAN024FFY; Start 57; Stop 81
aacatccatatctccaaaggctgtg

SEQ ID NO: 403065 - DNA, 25 bp, Artificial
  probe
  misc_feature (1)..(25): SEQ ID NO: 5197; WAN024FFY; Start 38; Stop 62
gcatctggtcgataatggaaacatc

SEQ ID NO: 403066 - DNA, 25 bp, Artificial
  probe
  misc_feature (1)..(25): SEQ ID NO: 5197; WAN024FFY; Start 198; Stop 222
aatcaaaccaagacgagcatactcc

SEQ ID NO: 403067 - DNA, 25 bp, Artificial
  probe
  misc_feature (1)..(25): SEQ ID NO: 5197; WAN024FFY; Start 54; Stop 78
ggaaacatccatatctccaaaggct

SEQ ID NO: 403068 - DNA, 25 bp, Artificial
  probe
  misc_feature (1)..(25): SEQ ID NO: 5197; WAN024FFY; Start 39; Stop 63
catctggtcgataatggaaacatcc

SEQ ID NO: 403069 - DNA, 25 bp, Artificial
  probe
  misc_feature (1)..(25): SEQ ID NO: 5197; WAN024FFY; Start 190; Stop 214
tcgataataatcaaaccaagacgag

SEQ ID NO: 403070 - DNA, 25 bp, Artificial
  probe
  misc_feature (1)..(25): SEQ ID NO: 5197; WAN024FFY; Start 58; Stop 82
acatccatatctccaaaggctgtga

SEQ ID NO: 403071 - DNA, 25 bp, Artificial
  probe
  misc_feature (1)..(25): SEQ ID NO: 5197; WAN024FFY; Start 176; Stop 200
aacggtgctgctcatcgataataat

SEQ ID NO: 403072 - DNA, 25 bp, Artificial
  probe
  misc_feature (1)..(25): SEQ ID NO: 5197; WAN024FFY; Start 112; Stop 136
gtcatcatgaggacatctggattgt

SEQ ID NO: 403073 - DNA, 25 bp, Artificial
  probe
  misc_feature (1)..(25): SEQ ID NO: 5197; WAN024FFY; Start 181; Stop 205
tgctgctcatcgataataatcaaac

SEQ ID NO: 403074 - DNA, 25 bp, Artificial
  probe
  misc_feature (1)..(25): SEQ ID NO: 5197; WAN024FFY; Start 180; Stop 204
gtgctgctcatcgataataatcaaa

SEQ ID NO: 403075 - DNA, 25 bp, Artificial
  probe
  misc_feature (1)..(25): SEQ ID NO: 5197; WAN024FFY; Start 182; Stop 206
gctgctcatcgataataatcaaacc

SEQ ID NO: 403076 - DNA, 25 bp, Artificial
  probe
  misc_feature (1)..(25): SEQ ID NO: 5197; WAN024FFY; Start 37; Stop 61
ggcatctggtcgataatggaaacat

SEQ ID NO: 403077 - DNA, 25 bp, Artificial
  probe
  misc_feature (1)..(25): SEQ ID NO: 5197; WAN024FFY; Start 183; Stop 207
ctgctcatcgataataatcaaacca

SEQ ID NO: 403078 - DNA, 25 bp, Artificial
  probe
  misc_feature (1)..(25): SEQ ID NO: 5197; WAN024FFY; Start 184; Stop 208
tgctcatcgataataatcaaaccaa

SEQ ID NO: 403079 - DNA, 25 bp, Artificial
  probe
  misc_feature (1)..(25): SEQ ID NO: 5197; WAN024FFY; Start 178; Stop 202
cggtgctgctcatcgataataatca

SEQ ID NO: 403080 - DNA, 25 bp, Artificial
  probe
  misc_feature (1)..(25): SEQ ID NO: 5197; WAN024FFY; Start 177; Stop 201
acggtgctgctcatcgataataatc

SEQ ID NO: 403081 - DNA, 25 bp, Artificial
  probe
  misc_feature (1)..(25): SEQ ID NO: 5197; WAN024FFY; Start 199; Stop 223
atcaaaccaagacgagcatactcca

SEQ ID NO: 403082 - DNA, 25 bp, Artificial
  probe
  misc_feature (1)..(25): SEQ ID NO: 5197; WAN024FFY; Start 188; Stop 212
catcgataataatcaaaccaagacg

SEQ ID NO: 403083 - DNA, 25 bp, Artificial
  probe
  misc_feature (1)..(25): SEQ ID NO: 5197; WAN024FFY; Start 185; Stop 209
gctcatcgataataatcaaaccaag

SEQ ID NO: 403084 - DNA, 25 bp, Artificial
  probe
  misc_feature (1)..(25): SEQ ID NO: 5197; WAN024FFY; Start 35; Stop 59
ctggcatctggtcgataatggaaac

SEQ ID NO: 403085 - DNA, 25 bp, Artificial
  probe
  misc_feature (1)..(25): SEQ ID NO: 5198; WAN024FKB; Start 146; Stop 170
ttcctacgcttgaatcacttgatag

SEQ ID NO: 403086 - DNA, 25 bp, Artificial
  probe
  misc_feature (1)..(25): SEQ ID NO: 5198; WAN024FKB; Start 150; Stop 174
tacgcttgaatcacttgatagtctt

SEQ ID NO: 403087 - DNA, 25 bp, Artificial
  probe
  misc_feature (1)..(25): SEQ ID NO: 5198; WAN024FKB; Start 158; Stop 182
aatcacttgatagtcttgaactgga

SEQ ID NO: 403088 - DNA, 25 bp, Artificial
  probe
  misc_feature (1)..(25): SEQ ID NO: 5198; WAN024FKB; Start 160; Stop 184
tcacttgatagtcttgaactggatc

SEQ ID NO: 403089 - DNA, 25 bp, Artificial
  probe
  misc_feature (1)..(25): SEQ ID NO: 5198; WAN024FKB; Start 159; Stop 183
atcacttgatagtcttgaactggat

SEQ ID NO: 403090 - DNA, 25 bp, Artificial
  probe
  misc_feature (1)..(25): SEQ ID NO: 5198; WAN024FKB; Start 149; Stop 173
ctacgcttgaatcacttgatagtct

SEQ ID NO: 403091 - DNA, 25 bp, Artificial
  probe
  misc_feature (1)..(25): SEQ ID NO: 5198; WAN024FKB; Start 157; Stop 181
gaatcacttgatagtcttgaactgg

SEQ ID NO: 403092 - DNA, 25 bp, Artificial
  probe
  misc_feature (1)..(25): SEQ ID NO: 5198; WAN024FKB; Start 153; Stop 177
gcttgaatcacttgatagtcttgaa

SEQ ID NO: 403093 - DNA, 25 bp, Artificial
  probe
  misc_feature (1)..(25): SEQ ID NO: 5198; WAN024FKB; Start 156; Stop 180
tgaatcacttgatagtcttgaactg

SEQ ID NO: 403094 - DNA, 25 bp, Artificial
  probe
  misc_feature (1)..(25): SEQ ID NO: 5198; WAN024FKB; Start 152; Stop 176
cgcttgaatcacttgatagtcttga

SEQ ID NO: 403095 - DNA, 25 bp, Artificial
  probe
  misc_feature (1)..(25): SEQ ID NO: 5198; WAN024FKB; Start 148; Stop 172
cctacgcttgaatcacttgatagtc

SEQ ID NO: 403096 - DNA, 25 bp, Artificial
  probe
  misc_feature (1)..(25): SEQ ID NO: 5198; WAN024FKB; Start 151; Stop 175
acgcttgaatcacttgatagtcttg

SEQ ID NO: 403097 - DNA, 25 bp, Artificial
  probe
  misc_feature (1)..(25): SEQ ID NO: 5198; WAN024FKB; Start 147; Stop 171
tcctacgcttgaatcacttgatagt

SEQ ID NO: 403098 - DNA, 25 bp, Artificial
  probe
  misc_feature (1)..(25): SEQ ID NO: 5198; WAN024FKB; Start 155; Stop 179
ttgaatcacttgatagtcttgaact

SEQ ID NO: 403099 - DNA, 25 bp, Artificial
  probe
  misc_feature (1)..(25): SEQ ID NO: 5198; WAN024FKB; Start 154; Stop 178
cttgaatcacttgatagtcttgaac

SEQ ID NO: 403100 - DNA, 25 bp, Artificial
  probe
  misc_feature (1)..(25): SEQ ID NO: 5198; WAN024FKB; Start 343; Stop 367
aaacagcagtatcctttgacagaaa

SEQ ID NO: 403101 - DNA, 25 bp, Artificial
  probe
  misc_feature (1)..(25): SEQ ID NO: 5198; WAN024FKB; Start 332; Stop 356
tttacaaggtcaaacagcagtatcc

SEQ ID NO: 403102 - DNA, 25 bp, Artificial
  probe
  misc_feature (1)..(25): SEQ ID NO: 5198; WAN024FKB; Start 46; Stop 70
attaaggctcaatttccagatgttg

SEQ ID NO: 403103 - DNA, 25 bp, Artificial
  probe
  misc_feature (1)..(25): SEQ ID NO: 5198; WAN024FKB; Start 570; Stop 594
ggagagattaactttctacttagcg

SEQ ID NO: 403104 - DNA, 25 bp, Artificial
  probe
  misc_feature (1)..(25): SEQ ID NO: 5198; WAN024FKB; Start 145; Stop 169
tttcctacgcttgaatcacttgata

SEQ ID NO: 403105 - DNA, 25 bp, Artificial
  probe
  misc_feature (1)..(25): SEQ ID NO: 5198; WAN024FKB; Start 573; Stop 597
gagattaactttctacttagcgtga

SEQ ID NO: 403106 - DNA, 25 bp, Artificial
  probe
  misc_feature (1)..(25): SEQ ID NO: 5198; WAN024FKB; Start 572; Stop 596
agagattaactttctacttagcgtg

SEQ ID NO: 403107 - DNA, 25 bp, Artificial
  probe
  misc_feature (1)..(25): SEQ ID NO: 5198; WAN024FKB; Start 161; Stop 185
cacttgatagtcttgaactggatca

SEQ ID NO: 403108 - DNA, 25 bp, Artificial
  probe
  misc_feature (1)..(25): SEQ ID NO: 5198; WAN024FKB; Start 45; Stop 69
aattaaggctcaatttccagatgtt

SEQ ID NO: 403109 - DNA, 25 bp, Artificial
  probe
  misc_feature (1)..(25): SEQ ID NO: 5198; WAN024FKB; Start 571; Stop 595
gagagattaactttctacttagcgt

SEQ ID NO: 403110 - DNA, 25 bp, Artificial
  probe
  misc_feature (1)..(25): SEQ ID NO: 5198; WAN024FKB; Start 19; Stop 43
cagtatgaggatgtgattctacggg

SEQ ID NO: 403111 - DNA, 25 bp, Artificial
  probe
  misc_feature (1)..(25): SEQ ID NO: 5198; WAN024FKB; Start 47; Stop 71
ttaaggctcaatttccagatgttgc

SEQ ID NO: 403112 - DNA, 25 bp, Artificial
  probe
  misc_feature (1)..(25): SEQ ID NO: 5198; WAN024FKB; Start 569; Stop 593
aggagagattaactttctacttagc

SEQ ID NO: 403113 - DNA, 25 bp, Artificial
  probe
  misc_feature (1)..(25): SEQ ID NO: 5198; WAN024FKB; Start 56; Stop 80
aatttccagatgttgcagttgataa

SEQ ID NO: 403114 - DNA, 25 bp, Artificial
  probe
  misc_feature (1)..(25): SEQ ID NO: 5198; WAN024FKB; Start 57; Stop 81
atttccagatgttgcagttgataaa

SEQ ID NO: 403115 - DNA, 25 bp, Artificial
  probe
  misc_feature (1)..(25): SEQ ID NO: 5198; WAN024FKB; Start 333; Stop 357
ttacaaggtcaaacagcagtatcct

SEQ ID NO: 403116 - DNA, 25 bp, Artificial
  probe
  misc_feature (1)..(25): SEQ ID NO: 5198; WAN024FKB; Start 58; Stop 82
tttccagatgttgcagttgataaac

SEQ ID NO: 403117 - DNA, 25 bp, Artificial
  probe
  misc_feature (1)..(25): SEQ ID NO: 5198; WAN024FKB; Start 55; Stop 79
caatttccagatgttgcagttgata

SEQ ID NO: 403118 - DNA, 25 bp, Artificial
  probe
  misc_feature (1)..(25): SEQ ID NO: 5199; WAN024GFK; Start 222; Stop 246
ggttaatcaattcgtacttggttgt

SEQ ID NO: 403119 - DNA, 25 bp, Artificial
  probe
  misc_feature (1)..(25): SEQ ID NO: 5199; WAN024GFK; Start 221; Stop 245
tggttaatcaattcgtacttggttg

SEQ ID NO: 403120 - DNA, 25 bp, Artificial
  probe
  misc_feature (1)..(25): SEQ ID NO: 5199; WAN024GFK; Start 220; Stop 244
ttggttaatcaattcgtacttggtt

SEQ ID NO: 403121 - DNA, 25 bp, Artificial
  probe
  misc_feature (1)..(25): SEQ ID NO: 5199; WAN024GFK; Start 223; Stop 247
gttaatcaattcgtacttggttgtt

SEQ ID NO: 403122 - DNA, 25 bp, Artificial
  probe
  misc_feature (1)..(25): SEQ ID NO: 5199; WAN024GFK; Start 130; Stop 154
attgataatgcggaaatagtgaagc

SEQ ID NO: 403123 - DNA, 25 bp, Artificial
  probe
  misc_feature (1)..(25): SEQ ID NO: 5199; WAN024GFK; Start 126; Stop 150
ttggattgataatgcggaaatagtg

SEQ ID NO: 403124 - DNA, 25 bp, Artificial
  probe
  misc_feature (1)..(25): SEQ ID NO: 5199; WAN024GFK; Start 125; Stop 149
gttggattgataatgcggaaatagt

SEQ ID NO: 403125 - DNA, 25 bp, Artificial
  probe
  misc_feature (1)..(25): SEQ ID NO: 5199; WAN024GFK; Start 124; Stop 148
ggttggattgataatgcggaaatag

SEQ ID NO: 403126 - DNA, 25 bp, Artificial
  probe
  misc_feature (1)..(25): SEQ ID NO: 5199; WAN024GFK; Start 127; Stop 151
tggattgataatgcggaaatagtga

SEQ ID NO: 403127 - DNA, 25 bp, Artificial
  probe
  misc_feature (1)..(25): SEQ ID NO: 5199; WAN024GFK; Start 128; Stop 152
ggattgataatgcggaaatagtgaa

SEQ ID NO: 403128 - DNA, 25 bp, Artificial
  probe
  misc_feature (1)..(25): SEQ ID NO: 5199; WAN024GFK; Start 123; Stop 147
tggttggattgataatgcggaaata

SEQ ID NO: 403129 - DNA, 25 bp, Artificial
  probe
  misc_feature (1)..(25): SEQ ID NO: 5199; WAN024GFK; Start 7; Stop 31
gtatttcttagccacctcatcaaag

SEQ ID NO: 403130 - DNA, 25 bp, Artificial
  probe
  misc_feature (1)..(25): SEQ ID NO: 5199; WAN024GFK; Start 6; Stop 30
cgtatttcttagccacctcatcaaa

SEQ ID NO: 403131 - DNA, 25 bp, Artificial
  probe
  misc_feature (1)..(25): SEQ ID NO: 5199; WAN024GFK; Start 47; Stop 71
tccaaatccttgtcatctgtgtaat

SEQ ID NO: 403132 - DNA, 25 bp, Artificial
  probe
  misc_feature (1)..(25): SEQ ID NO: 5199; WAN024GFK; Start 36; Stop 60
ggttaatcacttccaaatccttgtc

SEQ ID NO: 403133 - DNA, 25 bp, Artificial
  probe
  misc_feature (1)..(25): SEQ ID NO: 5199; WAN024GFK; Start 21; Stop 45
cctcatcaaagacttggttaatcac

SEQ ID NO: 403134 - DNA, 25 bp, Artificial
  probe
  misc_feature (1)..(25): SEQ ID NO: 5199; WAN024GFK; Start 46; Stop 70
ttccaaatccttgtcatctgtgtaa

SEQ ID NO: 403135 - DNA, 25 bp, Artificial
  probe
  misc_feature (1)..(25): SEQ ID NO: 5199; WAN024GFK; Start 40; Stop 64
aatcacttccaaatccttgtcatct

SEQ ID NO: 403136 - DNA, 25 bp, Artificial
  probe
  misc_feature (1)..(25): SEQ ID NO: 5199; WAN024GFK; Start 37; Stop 61
gttaatcacttccaaatccttgtca

SEQ ID NO: 403137 - DNA, 25 bp, Artificial
  probe
  misc_feature (1)..(25): SEQ ID NO: 5199; WAN024GFK; Start 129; Stop 153
gattgataatgcggaaatagtgaag

SEQ ID NO: 403138 - DNA, 25 bp, Artificial
  probe
  misc_feature (1)..(25): SEQ ID NO: 5199; WAN024GFK; Start 45; Stop 69
cttccaaatccttgtcatctgtgta

SEQ ID NO: 403139 - DNA, 25 bp, Artificial
  probe
  misc_feature (1)..(25): SEQ ID NO: 5199; WAN024GFK; Start 25; Stop 49
atcaaagacttggttaatcacttcc

SEQ ID NO: 403140 - DNA, 25 bp, Artificial
  probe
  misc_feature (1)..(25): SEQ ID NO: 5199; WAN024GFK; Start 39; Stop 63
taatcacttccaaatccttgtcatc

SEQ ID NO: 403141 - DNA, 25 bp, Artificial
  probe
  misc_feature (1)..(25): SEQ ID NO: 5199; WAN024GFK; Start 4; Stop 28
atcgtatttcttagccacctcatca

SEQ ID NO: 403142 - DNA, 25 bp, Artificial
  probe
  misc_feature (1)..(25): SEQ ID NO: 5199; WAN024GFK; Start 41; Stop 65
atcacttccaaatccttgtcatctg

SEQ ID NO: 403143 - DNA, 25 bp, Artificial
  probe
  misc_feature (1)..(25): SEQ ID NO: 5199; WAN024GFK; Start 22; Stop 46
ctcatcaaagacttggttaatcact

SEQ ID NO: 403144 - DNA, 25 bp, Artificial
  probe
  misc_feature (1)..(25): SEQ ID NO: 5199; WAN024GFK; Start 48; Stop 72
ccaaatccttgtcatctgtgtaata

SEQ ID NO: 403145 - DNA, 25 bp, Artificial
  probe
  misc_feature (1)..(25): SEQ ID NO: 5199; WAN024GFK; Start 5; Stop 29
tcgtatttcttagccacctcatcaa

SEQ ID NO: 403146 - DNA, 25 bp, Artificial
  probe
  misc_feature (1)..(25): SEQ ID NO: 5199; WAN024GFK; Start 122; Stop 146
ctggttggattgataatgcggaaat

SEQ ID NO: 403147 - DNA, 25 bp, Artificial
  probe
  misc_feature (1)..(25): SEQ ID NO: 5199; WAN024GFK; Start 38; Stop 62
ttaatcacttccaaatccttgtcat

SEQ ID NO: 403148 - DNA, 25 bp, Artificial
  probe
  misc_feature (1)..(25): SEQ ID NO: 5199; WAN024GFK; Start 23; Stop 47
tcatcaaagacttggttaatcactt

SEQ ID NO: 403149 - DNA, 25 bp, Artificial
  probe
  misc_feature (1)..(25): SEQ ID NO: 5199; WAN024GFK; Start 227; Stop 251
atcaattcgtacttggttgtttctc

SEQ ID NO: 403150 - DNA, 25 bp, Artificial
  probe
  misc_feature (1)..(25): SEQ ID NO: 5199; WAN024GFK; Start 230; Stop 254
aattcgtacttggttgtttctcctc

SEQ ID NO: 403151 - DNA, 25 bp, Artificial
  probe
  misc_feature (1)..(25): SEQ ID NO: 5200; WAN024CHT; Start 21; Stop 45
gtctaccgccttctataacttgatt

SEQ ID NO: 403152 - DNA, 25 bp, Artificial
  probe
  misc_feature (1)..(25): SEQ ID NO: 5200; WAN024CHT; Start 20; Stop 44
cgtctaccgccttctataacttgat

SEQ ID NO: 403153 - DNA, 25 bp, Artificial
  probe
  misc_feature (1)..(25): SEQ ID NO: 5200; WAN024CHT; Start 22; Stop 46
tctaccgccttctataacttgattt

SEQ ID NO: 403154 - DNA, 25 bp, Artificial
  probe
  misc_feature (1)..(25): SEQ ID NO: 5200; WAN024CHT; Start 17; Stop 41
atccgtctaccgccttctataactt

SEQ ID NO: 403155 - DNA, 25 bp, Artificial
  probe
  misc_feature (1)..(25): SEQ ID NO: 5200; WAN024CHT; Start 16; Stop 40
aatccgtctaccgccttctataact

SEQ ID NO: 403156 - DNA, 25 bp, Artificial
  probe
  misc_feature (1)..(25): SEQ ID NO: 5200; WAN024CHT; Start 58; Stop 82
aatgaacagaaagcccaatttgaag

SEQ ID NO: 403157 - DNA, 25 bp, Artificial
  probe
  misc_feature (1)..(25): SEQ ID NO: 5200; WAN024CHT; Start 25; Stop 49
accgccttctataacttgatttatc

SEQ ID NO: 403158 - DNA, 25 bp, Artificial
  probe
  misc_feature (1)..(25): SEQ ID NO: 5200; WAN024CHT; Start 23; Stop 47
ctaccgccttctataacttgattta

SEQ ID NO: 403159 - DNA, 25 bp, Artificial
  probe
  misc_feature (1)..(25): SEQ ID NO: 5200; WAN024CHT; Start 57; Stop 81
aaatgaacagaaagcccaatttgaa

SEQ ID NO: 403160 - DNA, 25 bp, Artificial
  probe
  misc_feature (1)..(25): SEQ ID NO: 5200; WAN024CHT; Start 15; Stop 39
aaatccgtctaccgccttctataac

SEQ ID NO: 403161 - DNA, 25 bp, Artificial
  probe
  misc_feature (1)..(25): SEQ ID NO: 5200; WAN024CHT; Start 14; Stop 38
caaatccgtctaccgccttctataa

SEQ ID NO: 403162 - DNA, 25 bp, Artificial
  probe
  misc_feature (1)..(25): SEQ ID NO: 5200; WAN024CHT; Start 19; Stop 43
ccgtctaccgccttctataacttga

SEQ ID NO: 403163 - DNA, 25 bp, Artificial
  probe
  misc_feature (1)..(25): SEQ ID NO: 5200; WAN024CHT; Start 18; Stop 42
tccgtctaccgccttctataacttg

SEQ ID NO: 403164 - DNA, 25 bp, Artificial
  probe
  misc_feature (1)..(25): SEQ ID NO: 5200; WAN024CHT; Start 54; Stop 78
ttcaaatgaacagaaagcccaattt

SEQ ID NO: 403165 - DNA, 25 bp, Artificial
  probe
  misc_feature (1)..(25): SEQ ID NO: 5200; WAN024CHT; Start 59; Stop 83
atgaacagaaagcccaatttgaagg

SEQ ID NO: 403166 - DNA, 25 bp, Artificial
  probe
  misc_feature (1)..(25): SEQ ID NO: 5200; WAN024CHT; Start 26; Stop 50
ccgccttctataacttgatttatca

SEQ ID NO: 403167 - DNA, 25 bp, Artificial
  probe
  misc_feature (1)..(25): SEQ ID NO: 5200; WAN024CHT; Start 24; Stop 48
taccgccttctataacttgatttat

SEQ ID NO: 403168 - DNA, 25 bp, Artificial
  probe
  misc_feature (1)..(25): SEQ ID NO: 5200; WAN024CHT; Start 13; Stop 37
tcaaatccgtctaccgccttctata

SEQ ID NO: 403169 - DNA, 25 bp, Artificial
  probe
  misc_feature (1)..(25): SEQ ID NO: 5200; WAN024CHT; Start 27; Stop 51
cgccttctataacttgatttatcag

SEQ ID NO: 403170 - DNA, 25 bp, Artificial
  probe
  misc_feature (1)..(25): SEQ ID NO: 5200; WAN024CHT; Start 53; Stop 77
tttcaaatgaacagaaagcccaatt

SEQ ID NO: 403171 - DNA, 25 bp, Artificial
  probe
  misc_feature (1)..(25): SEQ ID NO: 5200; WAN024CHT; Start 47; Stop 71
atcaggtttcaaatgaacagaaagc

SEQ ID NO: 403172 - DNA, 25 bp, Artificial
  probe
  misc_feature (1)..(25): SEQ ID NO: 5200; WAN024CHT; Start 52; Stop 76
gtttcaaatgaacagaaagcccaat

SEQ ID NO: 403173 - DNA, 25 bp, Artificial
  probe
  misc_feature (1)..(25): SEQ ID NO: 5200; WAN024CHT; Start 44; Stop 68
tttatcaggtttcaaatgaacagaa

SEQ ID NO: 403174 - DNA, 25 bp, Artificial
  probe
  misc_feature (1)..(25): SEQ ID NO: 5200; WAN024CHT; Start 41; Stop 65
tgatttatcaggtttcaaatgaaca

SEQ ID NO: 403175 - DNA, 25 bp, Artificial
  probe
  misc_feature (1)..(25): SEQ ID NO: 5200; WAN024CHT; Start 12; Stop 36
ttcaaatccgtctaccgccttctat

SEQ ID NO: 403176 - DNA, 25 bp, Artificial
  probe
  misc_feature (1)..(25): SEQ ID NO: 5200; WAN024CHT; Start 43; Stop 67
atttatcaggtttcaaatgaacaga

SEQ ID NO: 403177 - DNA, 25 bp, Artificial
  probe
  misc_feature (1)..(25): SEQ ID NO: 5200; WAN024CHT; Start 28; Stop 52
gccttctataacttgatttatcagg

SEQ ID NO: 403178 - DNA, 25 bp, Artificial
  probe
  misc_feature (1)..(25): SEQ ID NO: 5200; WAN024CHT; Start 48; Stop 72
tcaggtttcaaatgaacagaaagcc

SEQ ID NO: 403179 - DNA, 25 bp, Artificial
  probe
  misc_feature (1)..(25): SEQ ID NO: 5200; WAN024CHT; Start 42; Stop 66
gatttatcaggtttcaaatgaacag

SEQ ID NO: 403180 - DNA, 25 bp, Artificial
  probe
  misc_feature (1)..(25): SEQ ID NO: 5200; WAN024CHT; Start 46; Stop 70
tatcaggtttcaaatgaacagaaag

SEQ ID NO: 403181 - DNA, 25 bp, Artificial
  probe
  misc_feature (1)..(25): SEQ ID NO: 5200; WAN024CHT; Start 51; Stop 75
ggtttcaaatgaacagaaagcccaa

SEQ ID NO: 403182 - DNA, 25 bp, Artificial
  probe
  misc_feature (1)..(25): SEQ ID NO: 5200; WAN024CHT; Start 45; Stop 69
ttatcaggtttcaaatgaacagaaa

SEQ ID NO: 403183 - DNA, 25 bp, Artificial
  probe
  misc_feature (1)..(25): SEQ ID NO: 5200; WAN024CHT; Start 11; Stop 35
gttcaaatccgtctaccgccttcta

SEQ ID NO: 403184 - DNA, 25 bp, Artificial
  probe
  misc_feature (1)..(25): SEQ ID NO: 5201; WAN024FN6; Start 406; Stop 430
atcaatatgacgataaccagccttc

SEQ ID NO: 403185 - DNA, 25 bp, Artificial
  probe
  misc_feature (1)..(25): SEQ ID NO: 5201; WAN024FN6; Start 409; Stop 433
aatatgacgataaccagccttcaag

SEQ ID NO: 403186 - DNA, 25 bp, Artificial
  probe
  misc_feature (1)..(25): SEQ ID NO: 5201; WAN024FN6; Start 405; Stop 429
tatcaatatgacgataaccagcctt

SEQ ID NO: 403187 - DNA, 25 bp, Artificial
  probe
  misc_feature (1)..(25): SEQ ID NO: 5201; WAN024FN6; Start 404; Stop 428
gtatcaatatgacgataaccagcct

SEQ ID NO: 403188 - DNA, 25 bp, Artificial
  probe
  misc_feature (1)..(25): SEQ ID NO: 5201; WAN024FN6; Start 408; Stop 432
caatatgacgataaccagccttcaa

SEQ ID NO: 403189 - DNA, 25 bp, Artificial
  probe
  misc_feature (1)..(25): SEQ ID NO: 5201; WAN024FN6; Start 407; Stop 431
tcaatatgacgataaccagccttca

SEQ ID NO: 403190 - DNA, 25 bp, Artificial
  probe
  misc_feature (1)..(25): SEQ ID NO: 5201; WAN024FN6; Start 226; Stop 250
atacaaatccaaataatccaagccc

SEQ ID NO: 403191 - DNA, 25 bp, Artificial
  probe
  misc_feature (1)..(25): SEQ ID NO: 5201; WAN024FN6; Start 227; Stop 251
tacaaatccaaataatccaagccca

SEQ ID NO: 403192 - DNA, 25 bp, Artificial
  probe
  misc_feature (1)..(25): SEQ ID NO: 5201; WAN024FN6; Start 126; Stop 150
cttcttgatagaggtcttccatcgc

SEQ ID NO: 403193 - DNA, 25 bp, Artificial
  probe
  misc_feature (1)..(25): SEQ ID NO: 5201; WAN024FN6; Start 230; Stop 254
aaatccaaataatccaagcccagtt

SEQ ID NO: 403194 - DNA, 25 bp, Artificial
  probe
  misc_feature (1)..(25): SEQ ID NO: 5201; WAN024FN6; Start 231; Stop 255
aatccaaataatccaagcccagttt

SEQ ID NO: 403195 - DNA, 25 bp, Artificial
  probe
  misc_feature (1)..(25): SEQ ID NO: 5201; WAN024FN6; Start 317; Stop 341
ttggtagttacgaacatttcttcac

SEQ ID NO: 403196 - DNA, 25 bp, Artificial
  probe
  misc_feature (1)..(25): SEQ ID NO: 5201; WAN024FN6; Start 315; Stop 339
gcttggtagttacgaacatttcttc

SEQ ID NO: 403197 - DNA, 25 bp, Artificial
  probe
  misc_feature (1)..(25): SEQ ID NO: 5201; WAN024FN6; Start 213; Stop 237
gccaatgaatcaaatacaaatccaa

SEQ ID NO: 403198 - DNA, 25 bp, Artificial
  probe
  misc_feature (1)..(25): SEQ ID NO: 5201; WAN024FN6; Start 316; Stop 340
cttggtagttacgaacatttcttca

SEQ ID NO: 403199 - DNA, 25 bp, Artificial
  probe
  misc_feature (1)..(25): SEQ ID NO: 5201; WAN024FN6; Start 125; Stop 149
ccttcttgatagaggtcttccatcg

SEQ ID NO: 403200 - DNA, 25 bp, Artificial
  probe
  misc_feature (1)..(25): SEQ ID NO: 5201; WAN024FN6; Start 353; Stop 377
ctatctttgattgcttgaccaacac

SEQ ID NO: 403201 - DNA, 25 bp, Artificial
  probe
  misc_feature (1)..(25): SEQ ID NO: 5201; WAN024FN6; Start 376; Stop 400
actttcttcattctgataaatcgcc

SEQ ID NO: 403202 - DNA, 25 bp, Artificial
  probe
  misc_feature (1)..(25): SEQ ID NO: 5201; WAN024FN6; Start 366; Stop 390
cttgaccaacactttcttcattctg

SEQ ID NO: 403203 - DNA, 25 bp, Artificial
  probe
  misc_feature (1)..(25): SEQ ID NO: 5201; WAN024FN6; Start 127; Stop 151
ttcttgatagaggtcttccatcgct

SEQ ID NO: 403204 - DNA, 25 bp, Artificial
  probe
  misc_feature (1)..(25): SEQ ID NO: 5201; WAN024FN6; Start 354; Stop 378
tatctttgattgcttgaccaacact

SEQ ID NO: 403205 - DNA, 25 bp, Artificial
  probe
  misc_feature (1)..(25): SEQ ID NO: 5201; WAN024FN6; Start 377; Stop 401
ctttcttcattctgataaatcgccg

SEQ ID NO: 403206 - DNA, 25 bp, Artificial
  probe
  misc_feature (1)..(25): SEQ ID NO: 5201; WAN024FN6; Start 368; Stop 392
tgaccaacactttcttcattctgat

SEQ ID NO: 403207 - DNA, 25 bp, Artificial
  probe
  misc_feature (1)..(25): SEQ ID NO: 5201; WAN024FN6; Start 367; Stop 391
ttgaccaacactttcttcattctga

SEQ ID NO: 403208 - DNA, 25 bp, Artificial
  probe
  misc_feature (1)..(25): SEQ ID NO: 5201; WAN024FN6; Start 318; Stop 342
tggtagttacgaacatttcttcacg

SEQ ID NO: 403209 - DNA, 25 bp, Artificial
  probe
  misc_feature (1)..(25): SEQ ID NO: 5201; WAN024FN6; Start 369; Stop 393
gaccaacactttcttcattctgata

SEQ ID NO: 403210 - DNA, 25 bp, Artificial
  probe
  misc_feature (1)..(25): SEQ ID NO: 5201; WAN024FN6; Start 229; Stop 253
caaatccaaataatccaagcccagt

SEQ ID NO: 403211 - DNA, 25 bp, Artificial
  probe
  misc_feature (1)..(25): SEQ ID NO: 5201; WAN024FN6; Start 228; Stop 252
acaaatccaaataatccaagcccag

SEQ ID NO: 403212 - DNA, 25 bp, Artificial
  probe
  misc_feature (1)..(25): SEQ ID NO: 5201; WAN024FN6; Start 375; Stop 399
cactttcttcattctgataaatcgc

SEQ ID NO: 403213 - DNA, 25 bp, Artificial
  probe
  misc_feature (1)..(25): SEQ ID NO: 5201; WAN024FN6; Start 225; Stop 249
aatacaaatccaaataatccaagcc

SEQ ID NO: 403214 - DNA, 25 bp, Artificial
  probe
  misc_feature (1)..(25): SEQ ID NO: 5201; WAN024FN6; Start 289; Stop 313
ctcataggtttgctgactattccaa

SEQ ID NO: 403215 - DNA, 25 bp, Artificial
  probe
  misc_feature (1)..(25): SEQ ID NO: 5201; WAN024FN6; Start 357; Stop 381
ctttgattgcttgaccaacactttc

SEQ ID NO: 403216 - DNA, 25 bp, Artificial
  probe
  misc_feature (1)..(25): SEQ ID NO: 5201; WAN024FN6; Start 285; Stop 309
tttgctcataggtttgctgactatt

SEQ ID NO: 403217 - DNA, 25 bp, Artificial
  probe
  misc_feature (1)..(25): SEQ ID NO: 5202; WAN024GMJ; Start 1141; Stop 1165
gcggattacaaggtatctgatagtc

SEQ ID NO: 403218 - DNA, 25 bp, Artificial
  probe
  misc_feature (1)..(25): SEQ ID NO: 5202; WAN024GMJ; Start 1142; Stop 1166
cggattacaaggtatctgatagtct

SEQ ID NO: 403219 - DNA, 25 bp, Artificial
  probe
  misc_feature (1)..(25): SEQ ID NO: 5202; WAN024GMJ; Start 1139; Stop 1163
ttgcggattacaaggtatctgatag

SEQ ID NO: 403220 - DNA, 25 bp, Artificial
  probe
  misc_feature (1)..(25): SEQ ID NO: 5202; WAN024GMJ; Start 1140; Stop 1164
tgcggattacaaggtatctgatagt

SEQ ID NO: 403221 - DNA, 25 bp, Artificial
  probe
  misc_feature (1)..(25): SEQ ID NO: 5202; WAN024GMJ; Start 1493; Stop 1517
gactagataatcgtgatggtgttct

SEQ ID NO: 403222 - DNA, 25 bp, Artificial
  probe
  misc_feature (1)..(25): SEQ ID NO: 5202; WAN024GMJ; Start 318; Stop 342
tgtgagagtctataatccaggtcag

SEQ ID NO: 403223 - DNA, 25 bp, Artificial
  probe
  misc_feature (1)..(25): SEQ ID NO: 5202; WAN024GMJ; Start 305; Stop 329
cggatggttatactgtgagagtcta

SEQ ID NO: 403224 - DNA, 25 bp, Artificial
  probe
  misc_feature (1)..(25): SEQ ID NO: 5202; WAN024GMJ; Start 306; Stop 330
ggatggttatactgtgagagtctat

SEQ ID NO: 403225 - DNA, 25 bp, Artificial
  probe
  misc_feature (1)..(25): SEQ ID NO: 5202; WAN024GMJ; Start 319; Stop 343
gtgagagtctataatccaggtcagg

SEQ ID NO: 403226 - DNA, 25 bp, Artificial
  probe
  misc_feature (1)..(25): SEQ ID NO: 5202; WAN024GMJ; Start 315; Stop 339
tactgtgagagtctataatccaggt

SEQ ID NO: 403227 - DNA, 25 bp, Artificial
  probe
  misc_feature (1)..(25): SEQ ID NO: 5202; WAN024GMJ; Start 294; Stop 318
aacagaagaagcggatggttatact

SEQ ID NO: 403228 - DNA, 25 bp, Artificial
  probe
  misc_feature (1)..(25): SEQ ID NO: 5202; WAN024GMJ; Start 280; Stop 304
gtgactagcgaagtaacagaagaag

SEQ ID NO: 403229 - DNA, 25 bp, Artificial
  probe
  misc_feature (1)..(25): SEQ ID NO: 5202; WAN024GMJ; Start 317; Stop 341
ctgtgagagtctataatccaggtca

SEQ ID NO: 403230 - DNA, 25 bp, Artificial
  probe
  misc_feature (1)..(25): SEQ ID NO: 5202; WAN024GMJ; Start 316; Stop 340
actgtgagagtctataatccaggtc

SEQ ID NO: 403231 - DNA, 25 bp, Artificial
  probe
  misc_feature (1)..(25): SEQ ID NO: 5202; WAN024GMJ; Start 299; Stop 323
aagaagcggatggttatactgtgag

SEQ ID NO: 403232 - DNA, 25 bp, Artificial
  probe
  misc_feature (1)..(25): SEQ ID NO: 5202; WAN024GMJ; Start 298; Stop 322
gaagaagcggatggttatactgtga

SEQ ID NO: 403233 - DNA, 25 bp, Artificial
  probe
  misc_feature (1)..(25): SEQ ID NO: 5202; WAN024GMJ; Start 297; Stop 321
agaagaagcggatggttatactgtg

SEQ ID NO: 403234 - DNA, 25 bp, Artificial
  probe
  misc_feature (1)..(25): SEQ ID NO: 5202; WAN024GMJ; Start 977; Stop 1001
ctaccttgctagatgtgatagaccg

SEQ ID NO: 403235 - DNA, 25 bp, Artificial
  probe
  misc_feature (1)..(25): SEQ ID NO: 5202; WAN024GMJ; Start 293; Stop 317
taacagaagaagcggatggttatac

SEQ ID NO: 403236 - DNA, 25 bp, Artificial
  probe
  misc_feature (1)..(25): SEQ ID NO: 5202; WAN024GMJ; Start 292; Stop 316
gtaacagaagaagcggatggttata

SEQ ID NO: 403237 - DNA, 25 bp, Artificial
  probe
  misc_feature (1)..(25): SEQ ID NO: 5202; WAN024GMJ; Start 277; Stop 301
gatgtgactagcgaagtaacagaag

SEQ ID NO: 403238 - DNA, 25 bp, Artificial
  probe
  misc_feature (1)..(25): SEQ ID NO: 5202; WAN024GMJ; Start 314; Stop 338
atactgtgagagtctataatccagg

SEQ ID NO: 403239 - DNA, 25 bp, Artificial
  probe
  misc_feature (1)..(25): SEQ ID NO: 5202; WAN024GMJ; Start 434; Stop 458
tgacagatagttcagagtctattga

SEQ ID NO: 403240 - DNA, 25 bp, Artificial
  probe
  misc_feature (1)..(25): SEQ ID NO: 5202; WAN024GMJ; Start 278; Stop 302
atgtgactagcgaagtaacagaaga

SEQ ID NO: 403241 - DNA, 25 bp, Artificial
  probe
  misc_feature (1)..(25): SEQ ID NO: 5202; WAN024GMJ; Start 276; Stop 300
agatgtgactagcgaagtaacagaa

SEQ ID NO: 403242 - DNA, 25 bp, Artificial
  probe
  misc_feature (1)..(25): SEQ ID NO: 5202; WAN024GMJ; Start 976; Stop 1000
gctaccttgctagatgtgatagacc

SEQ ID NO: 403243 - DNA, 25 bp, Artificial
  probe
  misc_feature (1)..(25): SEQ ID NO: 5202; WAN024GMJ; Start 321; Stop 345
gagagtctataatccaggtcaggag

SEQ ID NO: 403244 - DNA, 25 bp, Artificial
  probe
  misc_feature (1)..(25): SEQ ID NO: 5202; WAN024GMJ; Start 279; Stop 303
tgtgactagcgaagtaacagaagaa

SEQ ID NO: 403245 - DNA, 25 bp, Artificial
  probe
  misc_feature (1)..(25): SEQ ID NO: 5202; WAN024GMJ; Start 301; Stop 325
gaagcggatggttatactgtgagag

SEQ ID NO: 403246 - DNA, 25 bp, Artificial
  probe
  misc_feature (1)..(25): SEQ ID NO: 5202; WAN024GMJ; Start 1494; Stop 1518
actagataatcgtgatggtgttcta

SEQ ID NO: 403247 - DNA, 25 bp, Artificial
  probe
  misc_feature (1)..(25): SEQ ID NO: 5202; WAN024GMJ; Start 142; Stop 166
aagatagtttaccagtttgaggagg

SEQ ID NO: 403248 - DNA, 25 bp, Artificial
  probe
  misc_feature (1)..(25): SEQ ID NO: 5202; WAN024GMJ; Start 126; Stop 150
ggcagagtttagacagaagatagtt

SEQ ID NO: 403249 - DNA, 25 bp, Artificial
  probe
  misc_feature (1)..(25): SEQ ID NO: 5202; WAN024GMJ; Start 1375; Stop 1399
tttatcggatttggtttgttcttgt

SEQ ID NO: 403250 - DNA, 25 bp, Artificial
  probe
  misc_feature (1)..(25): SEQ ID NO: 5203; WAN024DUQ; Start 626; Stop 650
ctctaaccaagattccattcatcgc

SEQ ID NO: 403251 - DNA, 25 bp, Artificial
  probe
  misc_feature (1)..(25): SEQ ID NO: 5203; WAN024DUQ; Start 625; Stop 649
gctctaaccaagattccattcatcg

SEQ ID NO: 403252 - DNA, 25 bp, Artificial
  probe
  misc_feature (1)..(25): SEQ ID NO: 5203; WAN024DUQ; Start 623; Stop 647
aagctctaaccaagattccattcat

SEQ ID NO: 403253 - DNA, 25 bp, Artificial
  probe
  misc_feature (1)..(25): SEQ ID NO: 5203; WAN024DUQ; Start 809; Stop 833
ttgaagacaagatgaagatcgccta

SEQ ID NO: 403254 - DNA, 25 bp, Artificial
  probe
  misc_feature (1)..(25): SEQ ID NO: 5203; WAN024DUQ; Start 624; Stop 648
agctctaaccaagattccattcatc

SEQ ID NO: 403255 - DNA, 25 bp, Artificial
  probe
  misc_feature (1)..(25): SEQ ID NO: 5203; WAN024DUQ; Start 629; Stop 653
taaccaagattccattcatcgccaa

SEQ ID NO: 403256 - DNA, 25 bp, Artificial
  probe
  misc_feature (1)..(25): SEQ ID NO: 5203; WAN024DUQ; Start 831; Stop 855
ctacgaacacttgaaacgattgatt

SEQ ID NO: 403257 - DNA, 25 bp, Artificial
  probe
  misc_feature (1)..(25): SEQ ID NO: 5203; WAN024DUQ; Start 743; Stop 767
atccttacctcttcaaccaaatcaa

SEQ ID NO: 403258 - DNA, 25 bp, Artificial
  probe
  misc_feature (1)..(25): SEQ ID NO: 5203; WAN024DUQ; Start 742; Stop 766
aatccttacctcttcaaccaaatca

SEQ ID NO: 403259 - DNA, 25 bp, Artificial
  probe
  misc_feature (1)..(25): SEQ ID NO: 5203; WAN024DUQ; Start 622; Stop 646
caagctctaaccaagattccattca

SEQ ID NO: 403260 - DNA, 25 bp, Artificial
  probe
  misc_feature (1)..(25): SEQ ID NO: 5203; WAN024DUQ; Start 750; Stop 774
cctcttcaaccaaatcaaccattac

SEQ ID NO: 403261 - DNA, 25 bp, Artificial
  probe
  misc_feature (1)..(25): SEQ ID NO: 5203; WAN024DUQ; Start 751; Stop 775
ctcttcaaccaaatcaaccattact

SEQ ID NO: 403262 - DNA, 25 bp, Artificial
  probe
  misc_feature (1)..(25): SEQ ID NO: 5203; WAN024DUQ; Start 749; Stop 773
acctcttcaaccaaatcaaccatta

SEQ ID NO: 403263 - DNA, 25 bp, Artificial
  probe
  misc_feature (1)..(25): SEQ ID NO: 5203; WAN024DUQ; Start 748; Stop 772
tacctcttcaaccaaatcaaccatt

SEQ ID NO: 403264 - DNA, 25 bp, Artificial
  probe
  misc_feature (1)..(25): SEQ ID NO: 5203; WAN024DUQ; Start 747; Stop 771
ttacctcttcaaccaaatcaaccat

SEQ ID NO: 403265 - DNA, 25 bp, Artificial
  probe
  misc_feature (1)..(25): SEQ ID NO: 5203; WAN024DUQ; Start 837; Stop 861
acacttgaaacgattgattaacctc

SEQ ID NO: 403266 - DNA, 25 bp, Artificial
  probe
  misc_feature (1)..(25): SEQ ID NO: 5203; WAN024DUQ; Start 833; Stop 857
acgaacacttgaaacgattgattaa

SEQ ID NO: 403267 - DNA, 25 bp, Artificial
  probe
  misc_feature (1)..(25): SEQ ID NO: 5203; WAN024DUQ; Start 834; Stop 858
cgaacacttgaaacgattgattaac

SEQ ID NO: 403268 - DNA, 25 bp, Artificial
  probe
  misc_feature (1)..(25): SEQ ID NO: 5203; WAN024DUQ; Start 793; Stop 817
ctacctgatttgacctttgaagaca

SEQ ID NO: 403269 - DNA, 25 bp, Artificial
  probe
  misc_feature (1)..(25): SEQ ID NO: 5203; WAN024DUQ; Start 790; Stop 814
atcctacctgatttgacctttgaag

SEQ ID NO: 403270 - DNA, 25 bp, Artificial
  probe
  misc_feature (1)..(25): SEQ ID NO: 5203; WAN024DUQ; Start 741; Stop 765
aaatccttacctcttcaaccaaatc

SEQ ID NO: 403271 - DNA, 25 bp, Artificial
  probe
  misc_feature (1)..(25): SEQ ID NO: 5203; WAN024DUQ; Start 836; Stop 860
aacacttgaaacgattgattaacct

SEQ ID NO: 403272 - DNA, 25 bp, Artificial
  probe
  misc_feature (1)..(25): SEQ ID NO: 5203; WAN024DUQ; Start 810; Stop 834
tgaagacaagatgaagatcgcctac

SEQ ID NO: 403273 - DNA, 25 bp, Artificial
  probe
  misc_feature (1)..(25): SEQ ID NO: 5203; WAN024DUQ; Start 832; Stop 856
tacgaacacttgaaacgattgatta

SEQ ID NO: 403274 - DNA, 25 bp, Artificial
  probe
  misc_feature (1)..(25): SEQ ID NO: 5203; WAN024DUQ; Start 752; Stop 776
tcttcaaccaaatcaaccattactt

SEQ ID NO: 403275 - DNA, 25 bp, Artificial
  probe
  misc_feature (1)..(25): SEQ ID NO: 5203; WAN024DUQ; Start 744; Stop 768
tccttacctcttcaaccaaatcaac

SEQ ID NO: 403276 - DNA, 25 bp, Artificial
  probe
  misc_feature (1)..(25): SEQ ID NO: 5203; WAN024DUQ; Start 835; Stop 859
gaacacttgaaacgattgattaacc

SEQ ID NO: 403277 - DNA, 25 bp, Artificial
  probe
  misc_feature (1)..(25): SEQ ID NO: 5203; WAN024DUQ; Start 766; Stop 790
aaccattactttgaaacaggagaaa

SEQ ID NO: 403278 - DNA, 25 bp, Artificial
  probe
  misc_feature (1)..(25): SEQ ID NO: 5203; WAN024DUQ; Start 746; Stop 770
cttacctcttcaaccaaatcaacca

SEQ ID NO: 403279 - DNA, 25 bp, Artificial
  probe
  misc_feature (1)..(25): SEQ ID NO: 5203; WAN024DUQ; Start 767; Stop 791
accattactttgaaacaggagaaat

SEQ ID NO: 403280 - DNA, 25 bp, Artificial
  probe
  misc_feature (1)..(25): SEQ ID NO: 5203; WAN024DUQ; Start 740; Stop 764
gaaatccttacctcttcaaccaaat

SEQ ID NO: 403281 - DNA, 25 bp, Artificial
  probe
  misc_feature (1)..(25): SEQ ID NO: 5203; WAN024DUQ; Start 621; Stop 645
ccaagctctaaccaagattccattc

SEQ ID NO: 403282 - DNA, 25 bp, Artificial
  probe
  misc_feature (1)..(25): SEQ ID NO: 5203; WAN024DUQ; Start 803; Stop 827
tgacctttgaagacaagatgaagat

SEQ ID NO: 403283 - DNA, 25 bp, Artificial
  probe
  misc_feature (1)..(25): SEQ ID NO: 5204; WAN024FOH; Start 152; Stop 176
ttcaagtattaggtgttcagattgt

SEQ ID NO: 403284 - DNA, 25 bp, Artificial
  probe
  misc_feature (1)..(25): SEQ ID NO: 5204; WAN024FOH; Start 66; Stop 90
ttcatacctcgaatacatggacttg

SEQ ID NO: 403285 - DNA, 25 bp, Artificial
  probe
  misc_feature (1)..(25): SEQ ID NO: 5204; WAN024FOH; Start 512; Stop 536
ttaatcctcatcttcgccgagtatt

SEQ ID NO: 403286 - DNA, 25 bp, Artificial
  probe
  misc_feature (1)..(25): SEQ ID NO: 5204; WAN024FOH; Start 800; Stop 824
tgttattaccgagtttatacgaggg

SEQ ID NO: 403287 - DNA, 25 bp, Artificial
  probe
  misc_feature (1)..(25): SEQ ID NO: 5204; WAN024FOH; Start 530; Stop 554
gagtatttcggacaacacattcatt

SEQ ID NO: 403288 - DNA, 25 bp, Artificial
  probe
  misc_feature (1)..(25): SEQ ID NO: 5204; WAN024FOH; Start 187; Stop 211
agaaagaaatcctcaatactggcat

SEQ ID NO: 403289 - DNA, 25 bp, Artificial
  probe
  misc_feature (1)..(25): SEQ ID NO: 5204; WAN024FOH; Start 155; Stop 179
aagtattaggtgttcagattgtaga

SEQ ID NO: 403290 - DNA, 25 bp, Artificial
  probe
  misc_feature (1)..(25): SEQ ID NO: 5204; WAN024FOH; Start 900; Stop 924
catcttcacaaacagtatccaacaa

SEQ ID NO: 403291 - DNA, 25 bp, Artificial
  probe
  misc_feature (1)..(25): SEQ ID NO: 5204; WAN024FOH; Start 825; Stop 849
gttacctttagttgctattgagtgg

SEQ ID NO: 403292 - DNA, 25 bp, Artificial
  probe
  misc_feature (1)..(25): SEQ ID NO: 5204; WAN024FOH; Start 186; Stop 210
aagaaagaaatcctcaatactggca

SEQ ID NO: 403293 - DNA, 25 bp, Artificial
  probe
  misc_feature (1)..(25): SEQ ID NO: 5204; WAN024FOH; Start 185; Stop 209
aaagaaagaaatcctcaatactggc

SEQ ID NO: 403294 - DNA, 25 bp, Artificial
  probe
  misc_feature (1)..(25): SEQ ID NO: 5204; WAN024FOH; Start 638; Stop 662
aaatgaaatgtaagcagaaggatgt

SEQ ID NO: 403295 - DNA, 25 bp, Artificial
  probe
  misc_feature (1)..(25): SEQ ID NO: 5204; WAN024FOH; Start 632; Stop 656
tggatgaaatgaaatgtaagcagaa

SEQ ID NO: 403296 - DNA, 25 bp, Artificial
  probe
  misc_feature (1)..(25): SEQ ID NO: 5204; WAN024FOH; Start 153; Stop 177
tcaagtattaggtgttcagattgta

SEQ ID NO: 403297 - DNA, 25 bp, Artificial
  probe
  misc_feature (1)..(25): SEQ ID NO: 5204; WAN024FOH; Start 906; Stop 930
cacaaacagtatccaacaattacca

SEQ ID NO: 403298 - DNA, 25 bp, Artificial
  probe
  misc_feature (1)..(25): SEQ ID NO: 5204; WAN024FOH; Start 156; Stop 180
agtattaggtgttcagattgtagaa

SEQ ID NO: 403299 - DNA, 25 bp, Artificial
  probe
  misc_feature (1)..(25): SEQ ID NO: 5204; WAN024FOH; Start 905; Stop 929
tcacaaacagtatccaacaattacc

SEQ ID NO: 403300 - DNA, 25 bp, Artificial
  probe
  misc_feature (1)..(25): SEQ ID NO: 5204; WAN024FOH; Start 826; Stop 850
ttacctttagttgctattgagtggc

SEQ ID NO: 403301 - DNA, 25 bp, Artificial
  probe
  misc_feature (1)..(25): SEQ ID NO: 5204; WAN024FOH; Start 636; Stop 660
tgaaatgaaatgtaagcagaaggat

SEQ ID NO: 403302 - DNA, 25 bp, Artificial
  probe
  misc_feature (1)..(25): SEQ ID NO: 5204; WAN024FOH; Start 635; Stop 659
atgaaatgaaatgtaagcagaagga

SEQ ID NO: 403303 - DNA, 25 bp, Artificial
  probe
  misc_feature (1)..(25): SEQ ID NO: 5204; WAN024FOH; Start 631; Stop 655
atggatgaaatgaaatgtaagcaga

SEQ ID NO: 403304 - DNA, 25 bp, Artificial
  probe
  misc_feature (1)..(25): SEQ ID NO: 5204; WAN024FOH; Start 901; Stop 925
atcttcacaaacagtatccaacaat

SEQ ID NO: 403305 - DNA, 25 bp, Artificial
  probe
  misc_feature (1)..(25): SEQ ID NO: 5204; WAN024FOH; Start 188; Stop 212
gaaagaaatcctcaatactggcata

SEQ ID NO: 403306 - DNA, 25 bp, Artificial
  probe
  misc_feature (1)..(25): SEQ ID NO: 5204; WAN024FOH; Start 154; Stop 178
caagtattaggtgttcagattgtag

SEQ ID NO: 403307 - DNA, 25 bp, Artificial
  probe
  misc_feature (1)..(25): SEQ ID NO: 5204; WAN024FOH; Start 68; Stop 92
catacctcgaatacatggacttgag

SEQ ID NO: 403308 - DNA, 25 bp, Artificial
  probe
  misc_feature (1)..(25): SEQ ID NO: 5204; WAN024FOH; Start 824; Stop 848
ggttacctttagttgctattgagtg

SEQ ID NO: 403309 - DNA, 25 bp, Artificial
  probe
  misc_feature (1)..(25): SEQ ID NO: 5204; WAN024FOH; Start 637; Stop 661
gaaatgaaatgtaagcagaaggatg

SEQ ID NO: 403310 - DNA, 25 bp, Artificial
  probe
  misc_feature (1)..(25): SEQ ID NO: 5204; WAN024FOH; Start 634; Stop 658
gatgaaatgaaatgtaagcagaagg

SEQ ID NO: 403311 - DNA, 25 bp, Artificial
  probe
  misc_feature (1)..(25): SEQ ID NO: 5204; WAN024FOH; Start 633; Stop 657
ggatgaaatgaaatgtaagcagaag

SEQ ID NO: 403312 - DNA, 25 bp, Artificial
  probe
  misc_feature (1)..(25): SEQ ID NO: 5204; WAN024FOH; Start 531; Stop 555
agtatttcggacaacacattcatta

SEQ ID NO: 403313 - DNA, 25 bp, Artificial
  probe
  misc_feature (1)..(25): SEQ ID NO: 5204; WAN024FOH; Start 88; Stop 112
ttgagtgaaattgaagtgacgattc

SEQ ID NO: 403314 - DNA, 25 bp, Artificial
  probe
  misc_feature (1)..(25): SEQ ID NO: 5204; WAN024FOH; Start 87; Stop 111
cttgagtgaaattgaagtgacgatt

SEQ ID NO: 403315 - DNA, 25 bp, Artificial
  probe
  misc_feature (1)..(25): SEQ ID NO: 5204; WAN024FOH; Start 67; Stop 91
tcatacctcgaatacatggacttga

SEQ ID NO: 403316 - DNA, 25 bp, Artificial
  probe
  misc_feature (1)..(25): SEQ ID NO: 5205; WAN024DMT; Start 64; Stop 88
tttctagggctgctttacttcttta

SEQ ID NO: 403317 - DNA, 25 bp, Artificial
  probe
  misc_feature (1)..(25): SEQ ID NO: 5205; WAN024DMT; Start 60; Stop 84
tatctttctagggctgctttacttc

SEQ ID NO: 403318 - DNA, 25 bp, Artificial
  probe
  misc_feature (1)..(25): SEQ ID NO: 5205; WAN024DMT; Start 58; Stop 82
cttatctttctagggctgctttact

SEQ ID NO: 403319 - DNA, 25 bp, Artificial
  probe
  misc_feature (1)..(25): SEQ ID NO: 5205; WAN024DMT; Start 57; Stop 81
tcttatctttctagggctgctttac

SEQ ID NO: 403320 - DNA, 25 bp, Artificial
  probe
  misc_feature (1)..(25): SEQ ID NO: 5205; WAN024DMT; Start 55; Stop 79
tttcttatctttctagggctgcttt

SEQ ID NO: 403321 - DNA, 25 bp, Artificial
  probe
  misc_feature (1)..(25): SEQ ID NO: 5205; WAN024DMT; Start 65; Stop 89
ttctagggctgctttacttctttag

SEQ ID NO: 403322 - DNA, 25 bp, Artificial
  probe
  misc_feature (1)..(25): SEQ ID NO: 5205; WAN024DMT; Start 59; Stop 83
ttatctttctagggctgctttactt

SEQ ID NO: 403323 - DNA, 25 bp, Artificial
  probe
  misc_feature (1)..(25): SEQ ID NO: 5205; WAN024DMT; Start 56; Stop 80
ttcttatctttctagggctgcttta

SEQ ID NO: 403324 - DNA, 25 bp, Artificial
  probe
  misc_feature (1)..(25): SEQ ID NO: 5205; WAN024DMT; Start 63; Stop 87
ctttctagggctgctttacttcttt

SEQ ID NO: 403325 - DNA, 25 bp, Artificial
  probe
  misc_feature (1)..(25): SEQ ID NO: 5205; WAN024DMT; Start 61; Stop 85
atctttctagggctgctttacttct

SEQ ID NO: 403326 - DNA, 25 bp, Artificial
  probe
  misc_feature (1)..(25): SEQ ID NO: 5205; WAN024DMT; Start 62; Stop 86
tctttctagggctgctttacttctt

SEQ ID NO: 403327 - DNA, 25 bp, Artificial
  probe
  misc_feature (1)..(25): SEQ ID NO: 5205; WAN024DMT; Start 54; Stop 78
ttttcttatctttctagggctgctt

SEQ ID NO: 403328 - DNA, 25 bp, Artificial
  probe
  misc_feature (1)..(25): SEQ ID NO: 5205; WAN024DMT; Start 53; Stop 77
attttcttatctttctagggctgct

SEQ ID NO: 403329 - DNA, 25 bp, Artificial
  probe
  misc_feature (1)..(25): SEQ ID NO: 5205; WAN024DMT; Start 79; Stop 103
tacttctttagctatcttggtcagg

SEQ ID NO: 403330 - DNA, 25 bp, Artificial
  probe
  misc_feature (1)..(25): SEQ ID NO: 5205; WAN024DMT; Start 19; Stop 43
gaattgtacctctttcttggtcgga

SEQ ID NO: 403331 - DNA, 25 bp, Artificial
  probe
  misc_feature (1)..(25): SEQ ID NO: 5205; WAN024DMT; Start 52; Stop 76
tattttcttatctttctagggctgc

SEQ ID NO: 403332 - DNA, 25 bp, Artificial
  probe
  misc_feature (1)..(25): SEQ ID NO: 5205; WAN024DMT; Start 41; Stop 65
ggacagccttgtattttcttatctt

SEQ ID NO: 403333 - DNA, 25 bp, Artificial
  probe
  misc_feature (1)..(25): SEQ ID NO: 5205; WAN024DMT; Start 40; Stop 64
cggacagccttgtattttcttatct

SEQ ID NO: 403334 - DNA, 25 bp, Artificial
  probe
  misc_feature (1)..(25): SEQ ID NO: 5205; WAN024DMT; Start 39; Stop 63
tcggacagccttgtattttcttatc

SEQ ID NO: 403335 - DNA, 25 bp, Artificial
  probe
  misc_feature (1)..(25): SEQ ID NO: 5205; WAN024DMT; Start 20; Stop 44
aattgtacctctttcttggtcggac

SEQ ID NO: 403336 - DNA, 25 bp, Artificial
  probe
  misc_feature (1)..(25): SEQ ID NO: 5205; WAN024DMT; Start 66; Stop 90
tctagggctgctttacttctttagc

SEQ ID NO: 403337 - DNA, 25 bp, Artificial
  probe
  misc_feature (1)..(25): SEQ ID NO: 5205; WAN024DMT; Start 81; Stop 105
cttctttagctatcttggtcagggt

SEQ ID NO: 403338 - DNA, 25 bp, Artificial
  probe
  misc_feature (1)..(25): SEQ ID NO: 5205; WAN024DMT; Start 80; Stop 104
acttctttagctatcttggtcaggg

SEQ ID NO: 403339 - DNA, 25 bp, Artificial
  probe
  misc_feature (1)..(25): SEQ ID NO: 5205; WAN024DMT; Start 38; Stop 62
gtcggacagccttgtattttcttat

SEQ ID NO: 403340 - DNA, 25 bp, Artificial
  probe
  misc_feature (1)..(25): SEQ ID NO: 5205; WAN024DMT; Start 82; Stop 106
ttctttagctatcttggtcagggtc

SEQ ID NO: 403341 - DNA, 25 bp, Artificial
  probe
  misc_feature (1)..(25): SEQ ID NO: 5205; WAN024DMT; Start 78; Stop 102
ttacttctttagctatcttggtcag

SEQ ID NO: 403342 - DNA, 25 bp, Artificial
  probe
  misc_feature (1)..(25): SEQ ID NO: 5205; WAN024DMT; Start 18; Stop 42
agaattgtacctctttcttggtcgg

SEQ ID NO: 403343 - DNA, 25 bp, Artificial
  probe
  misc_feature (1)..(25): SEQ ID NO: 5205; WAN024DMT; Start 84; Stop 108
ctttagctatcttggtcagggtcaa

SEQ ID NO: 403344 - DNA, 25 bp, Artificial
  probe
  misc_feature (1)..(25): SEQ ID NO: 5205; WAN024DMT; Start 77; Stop 101
tttacttctttagctatcttggtca

SEQ ID NO: 403345 - DNA, 25 bp, Artificial
  probe
  misc_feature (1)..(25): SEQ ID NO: 5205; WAN024DMT; Start 5; Stop 29
tgaaacagagaaaagaattgtacct

SEQ ID NO: 403346 - DNA, 25 bp, Artificial
  probe
  misc_feature (1)..(25): SEQ ID NO: 5205; WAN024DMT; Start 44; Stop 68
cagccttgtattttcttatctttct

SEQ ID NO: 403347 - DNA, 25 bp, Artificial
  probe
  misc_feature (1)..(25): SEQ ID NO: 5205; WAN024DMT; Start 100; Stop 124
cagggtcaaggaagctttatctata

SEQ ID NO: 403348 - DNA, 25 bp, Artificial
  probe
  misc_feature (1)..(25): SEQ ID NO: 5205; WAN024DMT; Start 67; Stop 91
ctagggctgctttacttctttagct

SEQ ID NO: 403349 - DNA, 25 bp, Artificial
  probe
  misc_feature (1)..(25): SEQ ID NO: 5206; WAN024DQL; Start 605; Stop 629
caagttatcaaggaggtaatggagt

SEQ ID NO: 403350 - DNA, 25 bp, Artificial
  probe
  misc_feature (1)..(25): SEQ ID NO: 5206; WAN024DQL; Start 604; Stop 628
acaagttatcaaggaggtaatggag

SEQ ID NO: 403351 - DNA, 25 bp, Artificial
  probe
  misc_feature (1)..(25): SEQ ID NO: 5206; WAN024DQL; Start 1493; Stop 1517
gttatcgtgtagatggttcaggtaa

SEQ ID NO: 403352 - DNA, 25 bp, Artificial
  probe
  misc_feature (1)..(25): SEQ ID NO: 5206; WAN024DQL; Start 723; Stop 747
taatgttaagactggcgaggttatt

SEQ ID NO: 403353 - DNA, 25 bp, Artificial
  probe
  misc_feature (1)..(25): SEQ ID NO: 5206; WAN024DQL; Start 722; Stop 746
ttaatgttaagactggcgaggttat

SEQ ID NO: 403354 - DNA, 25 bp, Artificial
  probe
  misc_feature (1)..(25): SEQ ID NO: 5206; WAN024DQL; Start 603; Stop 627
aacaagttatcaaggaggtaatgga

SEQ ID NO: 403355 - DNA, 25 bp, Artificial
  probe
  misc_feature (1)..(25): SEQ ID NO: 5206; WAN024DQL; Start 606; Stop 630
aagttatcaaggaggtaatggagtt

SEQ ID NO: 403356 - DNA, 25 bp, Artificial
  probe
  misc_feature (1)..(25): SEQ ID NO: 5206; WAN024DQL; Start 1489; Stop 1513
gatggttatcgtgtagatggttcag

SEQ ID NO: 403357 - DNA, 25 bp, Artificial
  probe
  misc_feature (1)..(25): SEQ ID NO: 5206; WAN024DQL; Start 1487; Stop 1511
cagatggttatcgtgtagatggttc

SEQ ID NO: 403358 - DNA, 25 bp, Artificial
  probe
  misc_feature (1)..(25): SEQ ID NO: 5206; WAN024DQL; Start 1400; Stop 1424
catcagaaggaagttatgctcgtaa

SEQ ID NO: 403359 - DNA, 25 bp, Artificial
  probe
  misc_feature (1)..(25): SEQ ID NO: 5206; WAN024DQL; Start 1269; Stop 1293
ctactatctaacatcagaaggcagc

SEQ ID NO: 403360 - DNA, 25 bp, Artificial
  probe
  misc_feature (1)..(25): SEQ ID NO: 5206; WAN024DQL; Start 1268; Stop 1292
actactatctaacatcagaaggcag

SEQ ID NO: 403361 - DNA, 25 bp, Artificial
  probe
  misc_feature (1)..(25): SEQ ID NO: 5206; WAN024DQL; Start 1396; Stop 1420
ttgacatcagaaggaagttatgctc

SEQ ID NO: 403362 - DNA, 25 bp, Artificial
  probe
  misc_feature (1)..(25): SEQ ID NO: 5206; WAN024DQL; Start 1395; Stop 1419
cttgacatcagaaggaagttatgct

SEQ ID NO: 403363 - DNA, 25 bp, Artificial
  probe
  misc_feature (1)..(25): SEQ ID NO: 5206; WAN024DQL; Start 607; Stop 631
agttatcaaggaggtaatggagtta

SEQ ID NO: 403364 - DNA, 25 bp, Artificial
  probe
  misc_feature (1)..(25): SEQ ID NO: 5206; WAN024DQL; Start 278; Stop 302
tagtgaatgctaagacaggtgaagt

SEQ ID NO: 403365 - DNA, 25 bp, Artificial
  probe
  misc_feature (1)..(25): SEQ ID NO: 5206; WAN024DQL; Start 1488; Stop 1512
agatggttatcgtgtagatggttca

SEQ ID NO: 403366 - DNA, 25 bp, Artificial
  probe
  misc_feature (1)..(25): SEQ ID NO: 5206; WAN024DQL; Start 724; Stop 748
aatgttaagactggcgaggttattg

SEQ ID NO: 403367 - DNA, 25 bp, Artificial
  probe
  misc_feature (1)..(25): SEQ ID NO: 5206; WAN024DQL; Start 1301; Stop 1325
gtaacacttggtcaggcaattatta

SEQ ID NO: 403368 - DNA, 25 bp, Artificial
  probe
  misc_feature (1)..(25): SEQ ID NO: 5206; WAN024DQL; Start 1303; Stop 1327
aacacttggtcaggcaattattatt

SEQ ID NO: 403369 - DNA, 25 bp, Artificial
  probe
  misc_feature (1)..(25): SEQ ID NO: 5206; WAN024DQL; Start 1492; Stop 1516
ggttatcgtgtagatggttcaggta

SEQ ID NO: 403370 - DNA, 25 bp, Artificial
  probe
  misc_feature (1)..(25): SEQ ID NO: 5206; WAN024DQL; Start 1399; Stop 1423
acatcagaaggaagttatgctcgta

SEQ ID NO: 403371 - DNA, 25 bp, Artificial
  probe
  misc_feature (1)..(25): SEQ ID NO: 5206; WAN024DQL; Start 729; Stop 753
taagactggcgaggttattgatgaa

SEQ ID NO: 403372 - DNA, 25 bp, Artificial
  probe
  misc_feature (1)..(25): SEQ ID NO: 5206; WAN024DQL; Start 727; Stop 751
gttaagactggcgaggttattgatg

SEQ ID NO: 403373 - DNA, 25 bp, Artificial
  probe
  misc_feature (1)..(25): SEQ ID NO: 5206; WAN024DQL; Start 892; Stop 916
acattgactcatcagtatagaggag

SEQ ID NO: 403374 - DNA, 25 bp, Artificial
  probe
  misc_feature (1)..(25): SEQ ID NO: 5206; WAN024DQL; Start 728; Stop 752
ttaagactggcgaggttattgatga

SEQ ID NO: 403375 - DNA, 25 bp, Artificial
  probe
  misc_feature (1)..(25): SEQ ID NO: 5206; WAN024DQL; Start 893; Stop 917
cattgactcatcagtatagaggaga

SEQ ID NO: 403376 - DNA, 25 bp, Artificial
  probe
  misc_feature (1)..(25): SEQ ID NO: 5206; WAN024DQL; Start 602; Stop 626
taacaagttatcaaggaggtaatgg

SEQ ID NO: 403377 - DNA, 25 bp, Artificial
  probe
  misc_feature (1)..(25): SEQ ID NO: 5206; WAN024DQL; Start 1267; Stop 1291
tactactatctaacatcagaaggca

SEQ ID NO: 403378 - DNA, 25 bp, Artificial
  probe
  misc_feature (1)..(25): SEQ ID NO: 5206; WAN024DQL; Start 283; Stop 307
aatgctaagacaggtgaagttgtag

SEQ ID NO: 403379 - DNA, 25 bp, Artificial
  probe
  misc_feature (1)..(25): SEQ ID NO: 5206; WAN024DQL; Start 282; Stop 306
gaatgctaagacaggtgaagttgta

SEQ ID NO: 403380 - DNA, 25 bp, Artificial
  probe
  misc_feature (1)..(25): SEQ ID NO: 5206; WAN024DQL; Start 890; Stop 914
caacattgactcatcagtatagagg

SEQ ID NO: 403381 - DNA, 25 bp, Artificial
  probe
  misc_feature (1)..(25): SEQ ID NO: 5206; WAN024DQL; Start 1302; Stop 1326
taacacttggtcaggcaattattat

SEQ ID NO: 403382 - DNA, 25 bp, Artificial
  probe
  misc_feature (1)..(25): SEQ ID NO: 5207; WAN024CI2; Start 17; Stop 41
ctatctacagctccatgcctactac

SEQ ID NO: 403383 - DNA, 25 bp, Artificial
  probe
  misc_feature (1)..(25): SEQ ID NO: 5207; WAN024CI2; Start 16; Stop 40
tctatctacagctccatgcctacta

SEQ ID NO: 403384 - DNA, 25 bp, Artificial
  probe
  misc_feature (1)..(25): SEQ ID NO: 5207; WAN024CI2; Start 9; Stop 33
cttgagttctatctacagctccatg

SEQ ID NO: 403385 - DNA, 25 bp, Artificial
  probe
  misc_feature (1)..(25): SEQ ID NO: 5207; WAN024CI2; Start 8; Stop 32
acttgagttctatctacagctccat

SEQ ID NO: 403386 - DNA, 25 bp, Artificial
  probe
  misc_feature (1)..(25): SEQ ID NO: 5207; WAN024CI2; Start 7; Stop 31
aacttgagttctatctacagctcca

SEQ ID NO: 403387 - DNA, 25 bp, Artificial
  probe
  misc_feature (1)..(25): SEQ ID NO: 5207; WAN024CI2; Start 19; Stop 43
atctacagctccatgcctactacta

SEQ ID NO: 403388 - DNA, 25 bp, Artificial
  probe
  misc_feature (1)..(25): SEQ ID NO: 5207; WAN024CI2; Start 18; Stop 42
tatctacagctccatgcctactact

SEQ ID NO: 403389 - DNA, 25 bp, Artificial
  probe
  misc_feature (1)..(25): SEQ ID NO: 5207; WAN024CI2; Start 20; Stop 44
tctacagctccatgcctactactaa

SEQ ID NO: 403390 - DNA, 25 bp, Artificial
  probe
  misc_feature (1)..(25): SEQ ID NO: 5207; WAN024CI2; Start 15; Stop 39
ttctatctacagctccatgcctact

SEQ ID NO: 403391 - DNA, 25 bp, Artificial
  probe
  misc_feature (1)..(25): SEQ ID NO: 5207; WAN024CI2; Start 14; Stop 38
gttctatctacagctccatgcctac

SEQ ID NO: 403392 - DNA, 25 bp, Artificial
  probe
  misc_feature (1)..(25): SEQ ID NO: 5207; WAN024CI2; Start 13; Stop 37
agttctatctacagctccatgccta

SEQ ID NO: 403393 - DNA, 25 bp, Artificial
  probe
  misc_feature (1)..(25): SEQ ID NO: 5207; WAN024CI2; Start 10; Stop 34
ttgagttctatctacagctccatgc

SEQ ID NO: 403394 - DNA, 25 bp, Artificial
  probe
  misc_feature (1)..(25): SEQ ID NO: 5207; WAN024CI2; Start 21; Stop 45
ctacagctccatgcctactactaaa

SEQ ID NO: 403395 - DNA, 25 bp, Artificial
  probe
  misc_feature (1)..(25): SEQ ID NO: 5207; WAN024CI2; Start 12; Stop 36
gagttctatctacagctccatgcct

SEQ ID NO: 403396 - DNA, 25 bp, Artificial
  probe
  misc_feature (1)..(25): SEQ ID NO: 5207; WAN024CI2; Start 11; Stop 35
tgagttctatctacagctccatgcc

SEQ ID NO: 403397 - DNA, 25 bp, Artificial
  probe
  misc_feature (1)..(25): SEQ ID NO: 5207; WAN024CI2; Start 5; Stop 29
tgaacttgagttctatctacagctc

SEQ ID NO: 403398 - DNA, 25 bp, Artificial
  probe
  misc_feature (1)..(25): SEQ ID NO: 5207; WAN024CI2; Start 6; Stop 30
gaacttgagttctatctacagctcc

SEQ ID NO: 403399 - DNA, 25 bp, Artificial
  probe
  misc_feature (1)..(25): SEQ ID NO: 5207; WAN024CI2; Start 4; Stop 28
atgaacttgagttctatctacagct

SEQ ID NO: 403400 - DNA, 25 bp, Artificial
  probe
  misc_feature (1)..(25): SEQ ID NO: 5207; WAN024CI2; Start 3; Stop 27
gatgaacttgagttctatctacagc

SEQ ID NO: 403401 - DNA, 25 bp, Artificial
  probe
  misc_feature (1)..(25): SEQ ID NO: 5207; WAN024CI2; Start 22; Stop 46
tacagctccatgcctactactaaaa

SEQ ID NO: 403402 - DNA, 25 bp, Artificial
  probe
  misc_feature (1)..(25): SEQ ID NO: 5207; WAN024CI2; Start 2; Stop 26
tgatgaacttgagttctatctacag

SEQ ID NO: 403403 - DNA, 25 bp, Artificial
  probe
  misc_feature (1)..(25): SEQ ID NO: 5207; WAN024CI2; Start 1; Stop 25
ttgatgaacttgagttctatctaca

SEQ ID NO: 403404 - DNA, 25 bp, Artificial
  probe
  misc_feature (1)..(25): SEQ ID NO: 5207; WAN024CI2; Start 23; Stop 47
acagctccatgcctactactaaaag

SEQ ID NO: 403405 - DNA, 25 bp, Artificial
  probe
  misc_feature (1)..(25): SEQ ID NO: 5207; WAN024CI2; Start 32; Stop 56
tgcctactactaaaagcaaacaaaa

SEQ ID NO: 403406 - DNA, 25 bp, Artificial
  probe
  misc_feature (1)..(25): SEQ ID NO: 5207; WAN024CI2; Start 31; Stop 55
atgcctactactaaaagcaaacaaa

SEQ ID NO: 403407 - DNA, 25 bp, Artificial
  probe
  misc_feature (1)..(25): SEQ ID NO: 5207; WAN024CI2; Start 30; Stop 54
catgcctactactaaaagcaaacaa

SEQ ID NO: 403408 - DNA, 25 bp, Artificial
  probe
  misc_feature (1)..(25): SEQ ID NO: 5207; WAN024CI2; Start 27; Stop 51
ctccatgcctactactaaaagcaaa

SEQ ID NO: 403409 - DNA, 25 bp, Artificial
  probe
  misc_feature (1)..(25): SEQ ID NO: 5207; WAN024CI2; Start 28; Stop 52
tccatgcctactactaaaagcaaac

SEQ ID NO: 403410 - DNA, 25 bp, Artificial
  probe
  misc_feature (1)..(25): SEQ ID NO: 5207; WAN024CI2; Start 29; Stop 53
ccatgcctactactaaaagcaaaca

SEQ ID NO: 403411 - DNA, 25 bp, Artificial
  probe
  misc_feature (1)..(25): SEQ ID NO: 5207; WAN024CI2; Start 26; Stop 50
gctccatgcctactactaaaagcaa

SEQ ID NO: 403412 - DNA, 25 bp, Artificial
  probe
  misc_feature (1)..(25): SEQ ID NO: 5207; WAN024CI2; Start 24; Stop 48
cagctccatgcctactactaaaagc

SEQ ID NO: 403413 - DNA, 25 bp, Artificial
  probe
  misc_feature (1)..(25): SEQ ID NO: 5207; WAN024CI2; Start 25; Stop 49
agctccatgcctactactaaaagca

SEQ ID NO: 403414 - DNA, 25 bp, Artificial
  probe
  misc_feature (1)..(25): SEQ ID NO: 5208; WAN024GEG; Start 123; Stop 147
cttaattggagtagcctgttgtcta

SEQ ID NO: 403415 - DNA, 25 bp, Artificial
  probe
  misc_feature (1)..(25): SEQ ID NO: 5208; WAN024GEG; Start 124; Stop 148
ttaattggagtagcctgttgtctaa

SEQ ID NO: 403416 - DNA, 25 bp, Artificial
  probe
  misc_feature (1)..(25): SEQ ID NO: 5208; WAN024GEG; Start 125; Stop 149
taattggagtagcctgttgtctaac

SEQ ID NO: 403417 - DNA, 25 bp, Artificial
  probe
  misc_feature (1)..(25): SEQ ID NO: 5208; WAN024GEG; Start 122; Stop 146
tcttaattggagtagcctgttgtct

SEQ ID NO: 403418 - DNA, 25 bp, Artificial
  probe
  misc_feature (1)..(25): SEQ ID NO: 5208; WAN024GEG; Start 129; Stop 153
tggagtagcctgttgtctaactaat

SEQ ID NO: 403419 - DNA, 25 bp, Artificial
  probe
  misc_feature (1)..(25): SEQ ID NO: 5208; WAN024GEG; Start 127; Stop 151
attggagtagcctgttgtctaacta

SEQ ID NO: 403420 - DNA, 25 bp, Artificial
  probe
  misc_feature (1)..(25): SEQ ID NO: 5208; WAN024GEG; Start 116; Stop 140
tagttctcttaattggagtagcctg

SEQ ID NO: 403421 - DNA, 25 bp, Artificial
  probe
  misc_feature (1)..(25): SEQ ID NO: 5208; WAN024GEG; Start 115; Stop 139
gtagttctcttaattggagtagcct

SEQ ID NO: 403422 - DNA, 25 bp, Artificial
  probe
  misc_feature (1)..(25): SEQ ID NO: 5208; WAN024GEG; Start 114; Stop 138
ggtagttctcttaattggagtagcc

SEQ ID NO: 403423 - DNA, 25 bp, Artificial
  probe
  misc_feature (1)..(25): SEQ ID NO: 5208; WAN024GEG; Start 119; Stop 143
ttctcttaattggagtagcctgttg

SEQ ID NO: 403424 - DNA, 25 bp, Artificial
  probe
  misc_feature (1)..(25): SEQ ID NO: 5208; WAN024GEG; Start 118; Stop 142
gttctcttaattggagtagcctgtt

SEQ ID NO: 403425 - DNA, 25 bp, Artificial
  probe
  misc_feature (1)..(25): SEQ ID NO: 5208; WAN024GEG; Start 128; Stop 152
ttggagtagcctgttgtctaactaa

SEQ ID NO: 403426 - DNA, 25 bp, Artificial
  probe
  misc_feature (1)..(25): SEQ ID NO: 5208; WAN024GEG; Start 121; Stop 145
ctcttaattggagtagcctgttgtc

SEQ ID NO: 403427 - DNA, 25 bp, Artificial
  probe
  misc_feature (1)..(25): SEQ ID NO: 5208; WAN024GEG; Start 117; Stop 141
agttctcttaattggagtagcctgt

SEQ ID NO: 403428 - DNA, 25 bp, Artificial
  probe
  misc_feature (1)..(25): SEQ ID NO: 5208; WAN024GEG; Start 120; Stop 144
tctcttaattggagtagcctgttgt

SEQ ID NO: 403429 - DNA, 25 bp, Artificial
  probe
  misc_feature (1)..(25): SEQ ID NO: 5208; WAN024GEG; Start 126; Stop 150
aattggagtagcctgttgtctaact

SEQ ID NO: 403430 - DNA, 25 bp, Artificial
  probe
  misc_feature (1)..(25): SEQ ID NO: 5208; WAN024GEG; Start 45; Stop 69
tgaagaaattgaagaaatcgtagcc

SEQ ID NO: 403431 - DNA, 25 bp, Artificial
  probe
  misc_feature (1)..(25): SEQ ID NO: 5208; WAN024GEG; Start 46; Stop 70
gaagaaattgaagaaatcgtagccc

SEQ ID NO: 403432 - DNA, 25 bp, Artificial
  probe
  misc_feature (1)..(25): SEQ ID NO: 5208; WAN024GEG; Start 113; Stop 137
gggtagttctcttaattggagtagc

SEQ ID NO: 403433 - DNA, 25 bp, Artificial
  probe
  misc_feature (1)..(25): SEQ ID NO: 5208; WAN024GEG; Start 44; Stop 68
ttgaagaaattgaagaaatcgtagc

SEQ ID NO: 403434 - DNA, 25 bp, Artificial
  probe
  misc_feature (1)..(25): SEQ ID NO: 5208; WAN024GEG; Start 49; Stop 73
gaaattgaagaaatcgtagccccta

SEQ ID NO: 403435 - DNA, 25 bp, Artificial
  probe
  misc_feature (1)..(25): SEQ ID NO: 5208; WAN024GEG; Start 43; Stop 67
tttgaagaaattgaagaaatcgtag

SEQ ID NO: 403436 - DNA, 25 bp, Artificial
  probe
  misc_feature (1)..(25): SEQ ID NO: 5208; WAN024GEG; Start 112; Stop 136
ggggtagttctcttaattggagtag

SEQ ID NO: 403437 - DNA, 25 bp, Artificial
  probe
  misc_feature (1)..(25): SEQ ID NO: 5208; WAN024GEG; Start 111; Stop 135
tggggtagttctcttaattggagta

SEQ ID NO: 403438 - DNA, 25 bp, Artificial
  probe
  misc_feature (1)..(25): SEQ ID NO: 5208; WAN024GEG; Start 47; Stop 71
aagaaattgaagaaatcgtagcccc

SEQ ID NO: 403439 - DNA, 25 bp, Artificial
  probe
  misc_feature (1)..(25): SEQ ID NO: 5208; WAN024GEG; Start 110; Stop 134
ctggggtagttctcttaattggagt

SEQ ID NO: 403440 - DNA, 25 bp, Artificial
  probe
  misc_feature (1)..(25): SEQ ID NO: 5208; WAN024GEG; Start 109; Stop 133
actggggtagttctcttaattggag

SEQ ID NO: 403441 - DNA, 25 bp, Artificial
  probe
  misc_feature (1)..(25): SEQ ID NO: 5208; WAN024GEG; Start 48; Stop 72
agaaattgaagaaatcgtagcccct

SEQ ID NO: 403442 - DNA, 25 bp, Artificial
  probe
  misc_feature (1)..(25): SEQ ID NO: 5208; WAN024GEG; Start 23; Stop 47
tgtcagatgaagtattcttatttga

SEQ ID NO: 403443 - DNA, 25 bp, Artificial
  probe
  misc_feature (1)..(25): SEQ ID NO: 5208; WAN024GEG; Start 42; Stop 66
atttgaagaaattgaagaaatcgta

SEQ ID NO: 403444 - DNA, 25 bp, Artificial
  probe
  misc_feature (1)..(25): SEQ ID NO: 5208; WAN024GEG; Start 41; Stop 65
tatttgaagaaattgaagaaatcgt

SEQ ID NO: 403445 - DNA, 25 bp, Artificial
  probe
  misc_feature (1)..(25): SEQ ID NO: 5208; WAN024GEG; Start 50; Stop 74
aaattgaagaaatcgtagcccctac

SEQ ID NO: 403446 - DNA, 25 bp, Artificial
  probe
  misc_feature (1)..(25): SEQ ID NO: 5208; WAN024GEG; Start 108; Stop 132
aactggggtagttctcttaattgga

SEQ ID NO: 403447 - DNA, 25 bp, Artificial
  probe
  misc_feature (1)..(25): SEQ ID NO: 5209; WAN024DXY; Start 246; Stop 270
ttattatcttggaaggcaggtagag

SEQ ID NO: 403448 - DNA, 25 bp, Artificial
  probe
  misc_feature (1)..(25): SEQ ID NO: 5209; WAN024DXY; Start 247; Stop 271
tattatcttggaaggcaggtagagg

SEQ ID NO: 403449 - DNA, 25 bp, Artificial
  probe
  misc_feature (1)..(25): SEQ ID NO: 5209; WAN024DXY; Start 612; Stop 636
gagattaggagcggtagtcttgttc

SEQ ID NO: 403450 - DNA, 25 bp, Artificial
  probe
  misc_feature (1)..(25): SEQ ID NO: 5209; WAN024DXY; Start 248; Stop 272
attatcttggaaggcaggtagagga

SEQ ID NO: 403451 - DNA, 25 bp, Artificial
  probe
  misc_feature (1)..(25): SEQ ID NO: 5209; WAN024DXY; Start 101; Stop 125
actttgacagggcagatacattatt

SEQ ID NO: 403452 - DNA, 25 bp, Artificial
  probe
  misc_feature (1)..(25): SEQ ID NO: 5209; WAN024DXY; Start 100; Stop 124
aactttgacagggcagatacattat

SEQ ID NO: 403453 - DNA, 25 bp, Artificial
  probe
  misc_feature (1)..(25): SEQ ID NO: 5209; WAN024DXY; Start 376; Stop 400
tctacctctctttatgggctatttg

SEQ ID NO: 403454 - DNA, 25 bp, Artificial
  probe
  misc_feature (1)..(25): SEQ ID NO: 5209; WAN024DXY; Start 99; Stop 123
aaactttgacagggcagatacatta

SEQ ID NO: 403455 - DNA, 25 bp, Artificial
  probe
  misc_feature (1)..(25): SEQ ID NO: 5209; WAN024DXY; Start 103; Stop 127
tttgacagggcagatacattatttc

SEQ ID NO: 403456 - DNA, 25 bp, Artificial
  probe
  misc_feature (1)..(25): SEQ ID NO: 5209; WAN024DXY; Start 375; Stop 399
ctctacctctctttatgggctattt

SEQ ID NO: 403457 - DNA, 25 bp, Artificial
  probe
  misc_feature (1)..(25): SEQ ID NO: 5209; WAN024DXY; Start 102; Stop 126
ctttgacagggcagatacattattt

SEQ ID NO: 403458 - DNA, 25 bp, Artificial
  probe
  misc_feature (1)..(25): SEQ ID NO: 5209; WAN024DXY; Start 374; Stop 398
cctctacctctctttatgggctatt

SEQ ID NO: 403459 - DNA, 25 bp, Artificial
  probe
  misc_feature (1)..(25): SEQ ID NO: 5209; WAN024DXY; Start 611; Stop 635
agagattaggagcggtagtcttgtt

SEQ ID NO: 403460 - DNA, 25 bp, Artificial
  probe
  misc_feature (1)..(25): SEQ ID NO: 5209; WAN024DXY; Start 377; Stop 401
ctacctctctttatgggctatttgc

SEQ ID NO: 403461 - DNA, 25 bp, Artificial
  probe
  misc_feature (1)..(25): SEQ ID NO: 5209; WAN024DXY; Start 241; Stop 265
tcactttattatcttggaaggcagg

SEQ ID NO: 403462 - DNA, 25 bp, Artificial
  probe
  misc_feature (1)..(25): SEQ ID NO: 5209; WAN024DXY; Start 615; Stop 639
attaggagcggtagtcttgttcgta

SEQ ID NO: 403463 - DNA, 25 bp, Artificial
  probe
  misc_feature (1)..(25): SEQ ID NO: 5209; WAN024DXY; Start 243; Stop 267
actttattatcttggaaggcaggta

SEQ ID NO: 403464 - DNA, 25 bp, Artificial
  probe
  misc_feature (1)..(25): SEQ ID NO: 5209; WAN024DXY; Start 205; Stop 229
catattgggtgggaacatttcattg

SEQ ID NO: 403465 - DNA, 25 bp, Artificial
  probe
  misc_feature (1)..(25): SEQ ID NO: 5209; WAN024DXY; Start 204; Stop 228
tcatattgggtgggaacatttcatt

SEQ ID NO: 403466 - DNA, 25 bp, Artificial
  probe
  misc_feature (1)..(25): SEQ ID NO: 5209; WAN024DXY; Start 203; Stop 227
ttcatattgggtgggaacatttcat

SEQ ID NO: 403467 - DNA, 25 bp, Artificial
  probe
  misc_feature (1)..(25): SEQ ID NO: 5209; WAN024DXY; Start 560; Stop 584
tagcagttatctttccagttagagg

SEQ ID NO: 403468 - DNA, 25 bp, Artificial
  probe
  misc_feature (1)..(25): SEQ ID NO: 5209; WAN024DXY; Start 104; Stop 128
ttgacagggcagatacattatttcg

SEQ ID NO: 403469 - DNA, 25 bp, Artificial
  probe
  misc_feature (1)..(25): SEQ ID NO: 5209; WAN024DXY; Start 242; Stop 266
cactttattatcttggaaggcaggt

SEQ ID NO: 403470 - DNA, 25 bp, Artificial
  probe
  misc_feature (1)..(25): SEQ ID NO: 5209; WAN024DXY; Start 553; Stop 577
gcatttctagcagttatctttccag

SEQ ID NO: 403471 - DNA, 25 bp, Artificial
  probe
  misc_feature (1)..(25): SEQ ID NO: 5209; WAN024DXY; Start 240; Stop 264
ttcactttattatcttggaaggcag

SEQ ID NO: 403472 - DNA, 25 bp, Artificial
  probe
  misc_feature (1)..(25): SEQ ID NO: 5209; WAN024DXY; Start 245; Stop 269
tttattatcttggaaggcaggtaga

SEQ ID NO: 403473 - DNA, 25 bp, Artificial
  probe
  misc_feature (1)..(25): SEQ ID NO: 5209; WAN024DXY; Start 244; Stop 268
ctttattatcttggaaggcaggtag

SEQ ID NO: 403474 - DNA, 25 bp, Artificial
  probe
  misc_feature (1)..(25): SEQ ID NO: 5209; WAN024DXY; Start 98; Stop 122
gaaactttgacagggcagatacatt

SEQ ID NO: 403475 - DNA, 25 bp, Artificial
  probe
  misc_feature (1)..(25): SEQ ID NO: 5209; WAN024DXY; Start 249; Stop 273
ttatcttggaaggcaggtagaggag

SEQ ID NO: 403476 - DNA, 25 bp, Artificial
  probe
  misc_feature (1)..(25): SEQ ID NO: 5209; WAN024DXY; Start 2; Stop 26
tgatgaaggaaatctttgatagacg

SEQ ID NO: 403477 - DNA, 25 bp, Artificial
  probe
  misc_feature (1)..(25): SEQ ID NO: 5209; WAN024DXY; Start 239; Stop 263
tttcactttattatcttggaaggca

SEQ ID NO: 403478 - DNA, 25 bp, Artificial
  probe
  misc_feature (1)..(25): SEQ ID NO: 5209; WAN024DXY; Start 554; Stop 578
catttctagcagttatctttccagt

SEQ ID NO: 403479 - DNA, 25 bp, Artificial
  probe
  misc_feature (1)..(25): SEQ ID NO: 5209; WAN024DXY; Start 552; Stop 576
cgcatttctagcagttatctttcca

SEQ ID NO: 403480 - DNA, 25 bp, Artificial
  probe
  misc_feature (1)..(25): SEQ ID NO: 5210; WAN024FGG; Start 56; Stop 80
ctacactccagaaggtacgaatctc

SEQ ID NO: 403481 - DNA, 25 bp, Artificial
  probe
  misc_feature (1)..(25): SEQ ID NO: 5210; WAN024FGG; Start 267; Stop 291
catagcagcgataaagatagcaaat

SEQ ID NO: 403482 - DNA, 25 bp, Artificial
  probe
  misc_feature (1)..(25): SEQ ID NO: 5210; WAN024FGG; Start 166; Stop 190
catccaatcaaaggcaagataactg

SEQ ID NO: 403483 - DNA, 25 bp, Artificial
  probe
  misc_feature (1)..(25): SEQ ID NO: 5210; WAN024FGG; Start 269; Stop 293
tagcagcgataaagatagcaaatag

SEQ ID NO: 403484 - DNA, 25 bp, Artificial
  probe
  misc_feature (1)..(25): SEQ ID NO: 5210; WAN024FGG; Start 57; Stop 81
tacactccagaaggtacgaatctca

SEQ ID NO: 403485 - DNA, 25 bp, Artificial
  probe
  misc_feature (1)..(25): SEQ ID NO: 5210; WAN024FGG; Start 266; Stop 290
ccatagcagcgataaagatagcaaa

SEQ ID NO: 403486 - DNA, 25 bp, Artificial
  probe
  misc_feature (1)..(25): SEQ ID NO: 5210; WAN024FGG; Start 165; Stop 189
ccatccaatcaaaggcaagataact

SEQ ID NO: 403487 - DNA, 25 bp, Artificial
  probe
  misc_feature (1)..(25): SEQ ID NO: 5210; WAN024FGG; Start 268; Stop 292
atagcagcgataaagatagcaaata

SEQ ID NO: 403488 - DNA, 25 bp, Artificial
  probe
  misc_feature (1)..(25): SEQ ID NO: 5210; WAN024FGG; Start 97; Stop 121
ttagctgattcaagcaactctgtag

SEQ ID NO: 403489 - DNA, 25 bp, Artificial
  probe
  misc_feature (1)..(25): SEQ ID NO: 5210; WAN024FGG; Start 55; Stop 79
gctacactccagaaggtacgaatct

SEQ ID NO: 403490 - DNA, 25 bp, Artificial
  probe
  misc_feature (1)..(25): SEQ ID NO: 5210; WAN024FGG; Start 58; Stop 82
acactccagaaggtacgaatctcac

SEQ ID NO: 403491 - DNA, 25 bp, Artificial
  probe
  misc_feature (1)..(25): SEQ ID NO: 5210; WAN024FGG; Start 265; Stop 289
gccatagcagcgataaagatagcaa

SEQ ID NO: 403492 - DNA, 25 bp, Artificial
  probe
  misc_feature (1)..(25): SEQ ID NO: 5210; WAN024FGG; Start 64; Stop 88
cagaaggtacgaatctcaccacaac

SEQ ID NO: 403493 - DNA, 25 bp, Artificial
  probe
  misc_feature (1)..(25): SEQ ID NO: 5210; WAN024FGG; Start 98; Stop 122
tagctgattcaagcaactctgtagg

SEQ ID NO: 403494 - DNA, 25 bp, Artificial
  probe
  misc_feature (1)..(25): SEQ ID NO: 5210; WAN024FGG; Start 96; Stop 120
tttagctgattcaagcaactctgta

SEQ ID NO: 403495 - DNA, 25 bp, Artificial
  probe
  misc_feature (1)..(25): SEQ ID NO: 5210; WAN024FGG; Start 54; Stop 78
ggctacactccagaaggtacgaatc

SEQ ID NO: 403496 - DNA, 25 bp, Artificial
  probe
  misc_feature (1)..(25): SEQ ID NO: 5210; WAN024FGG; Start 167; Stop 191
atccaatcaaaggcaagataactgc

SEQ ID NO: 403497 - DNA, 25 bp, Artificial
  probe
  misc_feature (1)..(25): SEQ ID NO: 5210; WAN024FGG; Start 53; Stop 77
aggctacactccagaaggtacgaat

SEQ ID NO: 403498 - DNA, 25 bp, Artificial
  probe
  misc_feature (1)..(25): SEQ ID NO: 5210; WAN024FGG; Start 65; Stop 89
agaaggtacgaatctcaccacaacc

SEQ ID NO: 403499 - DNA, 25 bp, Artificial
  probe
  misc_feature (1)..(25): SEQ ID NO: 5210; WAN024FGG; Start 63; Stop 87
ccagaaggtacgaatctcaccacaa

SEQ ID NO: 403500 - DNA, 25 bp, Artificial
  probe
  misc_feature (1)..(25): SEQ ID NO: 5210; WAN024FGG; Start 61; Stop 85
ctccagaaggtacgaatctcaccac

SEQ ID NO: 403501 - DNA, 25 bp, Artificial
  probe
  misc_feature (1)..(25): SEQ ID NO: 5210; WAN024FGG; Start 59; Stop 83
cactccagaaggtacgaatctcacc

SEQ ID NO: 403502 - DNA, 25 bp, Artificial
  probe
  misc_feature (1)..(25): SEQ ID NO: 5210; WAN024FGG; Start 52; Stop 76
aaggctacactccagaaggtacgaa

SEQ ID NO: 403503 - DNA, 25 bp, Artificial
  probe
  misc_feature (1)..(25): SEQ ID NO: 5210; WAN024FGG; Start 179; Stop 203
gcaagataactgcccagagagtatc

SEQ ID NO: 403504 - DNA, 25 bp, Artificial
  probe
  misc_feature (1)..(25): SEQ ID NO: 5210; WAN024FGG; Start 86; Stop 110
aaccgtcgattttagctgattcaag

SEQ ID NO: 403505 - DNA, 25 bp, Artificial
  probe
  misc_feature (1)..(25): SEQ ID NO: 5210; WAN024FGG; Start 60; Stop 84
actccagaaggtacgaatctcacca

SEQ ID NO: 403506 - DNA, 25 bp, Artificial
  probe
  misc_feature (1)..(25): SEQ ID NO: 5210; WAN024FGG; Start 85; Stop 109
caaccgtcgattttagctgattcaa

SEQ ID NO: 403507 - DNA, 25 bp, Artificial
  probe
  misc_feature (1)..(25): SEQ ID NO: 5210; WAN024FGG; Start 39; Stop 63
tttcacaatcgggaaggctacactc

SEQ ID NO: 403508 - DNA, 25 bp, Artificial
  probe
  misc_feature (1)..(25): SEQ ID NO: 5210; WAN024FGG; Start 62; Stop 86
tccagaaggtacgaatctcaccaca

SEQ ID NO: 403509 - DNA, 25 bp, Artificial
  probe
  misc_feature (1)..(25): SEQ ID NO: 5210; WAN024FGG; Start 83; Stop 107
cacaaccgtcgattttagctgattc

SEQ ID NO: 403510 - DNA, 25 bp, Artificial
  probe
  misc_feature (1)..(25): SEQ ID NO: 5210; WAN024FGG; Start 1; Stop 25
ttgatgaaggtaaagattgcaaggg

SEQ ID NO: 403511 - DNA, 25 bp, Artificial
  probe
  misc_feature (1)..(25): SEQ ID NO: 5210; WAN024FGG; Start 94; Stop 118
attttagctgattcaagcaactctg

SEQ ID NO: 403512 - DNA, 25 bp, Artificial
  probe
  misc_feature (1)..(25): SEQ ID NO: 5210; WAN024FGG; Start 93; Stop 117
gattttagctgattcaagcaactct

SEQ ID NO: 403513 - DNA, 25 bp, Artificial
  probe
  misc_feature (1)..(25): SEQ ID NO: 5211; WAN024FZK; Start 1797; Stop 1821
ctacttgcgaggttcttatgatgag

SEQ ID NO: 403514 - DNA, 25 bp, Artificial
  probe
  misc_feature (1)..(25): SEQ ID NO: 5211; WAN024FZK; Start 1795; Stop 1819
gactacttgcgaggttcttatgatg

SEQ ID NO: 403515 - DNA, 25 bp, Artificial
  probe
  misc_feature (1)..(25): SEQ ID NO: 5211; WAN024FZK; Start 1796; Stop 1820
actacttgcgaggttcttatgatga

SEQ ID NO: 403516 - DNA, 25 bp, Artificial
  probe
  misc_feature (1)..(25): SEQ ID NO: 5211; WAN024FZK; Start 1778; Stop 1802
ttaagcctctcctagaagactactt

SEQ ID NO: 403517 - DNA, 25 bp, Artificial
  probe
  misc_feature (1)..(25): SEQ ID NO: 5211; WAN024FZK; Start 1777; Stop 1801
attaagcctctcctagaagactact

SEQ ID NO: 403518 - DNA, 25 bp, Artificial
  probe
  misc_feature (1)..(25): SEQ ID NO: 5211; WAN024FZK; Start 1779; Stop 1803
taagcctctcctagaagactacttg

SEQ ID NO: 403519 - DNA, 25 bp, Artificial
  probe
  misc_feature (1)..(25): SEQ ID NO: 5211; WAN024FZK; Start 1794; Stop 1818
agactacttgcgaggttcttatgat

SEQ ID NO: 403520 - DNA, 25 bp, Artificial
  probe
  misc_feature (1)..(25): SEQ ID NO: 5211; WAN024FZK; Start 1503; Stop 1527
cggaactatgaatgatattgatcgt

SEQ ID NO: 403521 - DNA, 25 bp, Artificial
  probe
  misc_feature (1)..(25): SEQ ID NO: 5211; WAN024FZK; Start 1516; Stop 1540
gatattgatcgttcagtggatacct

SEQ ID NO: 403522 - DNA, 25 bp, Artificial
  probe
  misc_feature (1)..(25): SEQ ID NO: 5211; WAN024FZK; Start 1515; Stop 1539
tgatattgatcgttcagtggatacc

SEQ ID NO: 403523 - DNA, 25 bp, Artificial
  probe
  misc_feature (1)..(25): SEQ ID NO: 5211; WAN024FZK; Start 1798; Stop 1822
tacttgcgaggttcttatgatgagg

SEQ ID NO: 403524 - DNA, 25 bp, Artificial
  probe
  misc_feature (1)..(25): SEQ ID NO: 5211; WAN024FZK; Start 1517; Stop 1541
atattgatcgttcagtggatacctt

SEQ ID NO: 403525 - DNA, 25 bp, Artificial
  probe
  misc_feature (1)..(25): SEQ ID NO: 5211; WAN024FZK; Start 1502; Stop 1526
tcggaactatgaatgatattgatcg

SEQ ID NO: 403526 - DNA, 25 bp, Artificial
  probe
  misc_feature (1)..(25): SEQ ID NO: 5211; WAN024FZK; Start 1512; Stop 1536
gaatgatattgatcgttcagtggat

SEQ ID NO: 403527 - DNA, 25 bp, Artificial
  probe
  misc_feature (1)..(25): SEQ ID NO: 5211; WAN024FZK; Start 1776; Stop 1800
tattaagcctctcctagaagactac

SEQ ID NO: 403528 - DNA, 25 bp, Artificial
  probe
  misc_feature (1)..(25): SEQ ID NO: 5211; WAN024FZK; Start 702; Stop 726
ggaagacaatagtacaatggattca

SEQ ID NO: 403529 - DNA, 25 bp, Artificial
  probe
  misc_feature (1)..(25): SEQ ID NO: 5211; WAN024FZK; Start 701; Stop 725
aggaagacaatagtacaatggattc

SEQ ID NO: 403530 - DNA, 25 bp, Artificial
  probe
  misc_feature (1)..(25): SEQ ID NO: 5211; WAN024FZK; Start 1514; Stop 1538
atgatattgatcgttcagtggatac

SEQ ID NO: 403531 - DNA, 25 bp, Artificial
  probe
  misc_feature (1)..(25): SEQ ID NO: 5211; WAN024FZK; Start 1145; Stop 1169
attatgatagtggtgttccaggatg

SEQ ID NO: 403532 - DNA, 25 bp, Artificial
  probe
  misc_feature (1)..(25): SEQ ID NO: 5211; WAN024FZK; Start 700; Stop 724
aaggaagacaatagtacaatggatt

SEQ ID NO: 403533 - DNA, 25 bp, Artificial
  probe
  misc_feature (1)..(25): SEQ ID NO: 5211; WAN024FZK; Start 1144; Stop 1168
aattatgatagtggtgttccaggat

SEQ ID NO: 403534 - DNA, 25 bp, Artificial
  probe
  misc_feature (1)..(25): SEQ ID NO: 5211; WAN024FZK; Start 1800; Stop 1824
cttgcgaggttcttatgatgaggtt

SEQ ID NO: 403535 - DNA, 25 bp, Artificial
  probe
  misc_feature (1)..(25): SEQ ID NO: 5211; WAN024FZK; Start 705; Stop 729
agacaatagtacaatggattcatca

SEQ ID NO: 403536 - DNA, 25 bp, Artificial
  probe
  misc_feature (1)..(25): SEQ ID NO: 5211; WAN024FZK; Start 1447; Stop 1471
gcaaatctacacgaaactgatgaaa

SEQ ID NO: 403537 - DNA, 25 bp, Artificial
  probe
  misc_feature (1)..(25): SEQ ID NO: 5211; WAN024FZK; Start 1036; Stop 1060
gatgaggcttgggattcttacttag

SEQ ID NO: 403538 - DNA, 25 bp, Artificial
  probe
  misc_feature (1)..(25): SEQ ID NO: 5211; WAN024FZK; Start 1811; Stop 1835
cttatgatgaggttgaaactttgga

SEQ ID NO: 403539 - DNA, 25 bp, Artificial
  probe
  misc_feature (1)..(25): SEQ ID NO: 5211; WAN024FZK; Start 1810; Stop 1834
tcttatgatgaggttgaaactttgg

SEQ ID NO: 403540 - DNA, 25 bp, Artificial
  probe
  misc_feature (1)..(25): SEQ ID NO: 5211; WAN024FZK; Start 1803; Stop 1827
gcgaggttcttatgatgaggttgaa

SEQ ID NO: 403541 - DNA, 25 bp, Artificial
  probe
  misc_feature (1)..(25): SEQ ID NO: 5211; WAN024FZK; Start 1513; Stop 1537
aatgatattgatcgttcagtggata

SEQ ID NO: 403542 - DNA, 25 bp, Artificial
  probe
  misc_feature (1)..(25): SEQ ID NO: 5211; WAN024FZK; Start 1264; Stop 1288
acattgagaaagagatttggtttga

SEQ ID NO: 403543 - DNA, 25 bp, Artificial
  probe
  misc_feature (1)..(25): SEQ ID NO: 5211; WAN024FZK; Start 1775; Stop 1799
atattaagcctctcctagaagacta

SEQ ID NO: 403544 - DNA, 25 bp, Artificial
  probe
  misc_feature (1)..(25): SEQ ID NO: 5211; WAN024FZK; Start 1774; Stop 1798
tatattaagcctctcctagaagact

SEQ ID NO: 403545 - DNA, 25 bp, Artificial
  probe
  misc_feature (1)..(25): SEQ ID NO: 5211; WAN024FZK; Start 1820; Stop 1844
aggttgaaactttggaaactttgaa

SEQ ID NO: 403546 - DNA, 25 bp, Artificial
  probe
  misc_feature (1)..(25): SEQ ID NO: 5212; WAN024CCW; Start 1080; Stop 1104
ccttagagtcaatgccttagtaatg

SEQ ID NO: 403547 - DNA, 25 bp, Artificial
  probe
  misc_feature (1)..(25): SEQ ID NO: 5212; WAN024CCW; Start 1079; Stop 1103
tccttagagtcaatgccttagtaat

SEQ ID NO: 403548 - DNA, 25 bp, Artificial
  probe
  misc_feature (1)..(25): SEQ ID NO: 5212; WAN024CCW; Start 1078; Stop 1102
atccttagagtcaatgccttagtaa

SEQ ID NO: 403549 - DNA, 25 bp, Artificial
  probe
  misc_feature (1)..(25): SEQ ID NO: 5212; WAN024CCW; Start 278; Stop 302
gcttcttaatgattatctccttgct

SEQ ID NO: 403550 - DNA, 25 bp, Artificial
  probe
  misc_feature (1)..(25): SEQ ID NO: 5212; WAN024CCW; Start 1076; Stop 1100
atatccttagagtcaatgccttagt

SEQ ID NO: 403551 - DNA, 25 bp, Artificial
  probe
  misc_feature (1)..(25): SEQ ID NO: 5212; WAN024CCW; Start 698; Stop 722
tgattatcggtattgttcgtctagg

SEQ ID NO: 403552 - DNA, 25 bp, Artificial
  probe
  misc_feature (1)..(25): SEQ ID NO: 5212; WAN024CCW; Start 699; Stop 723
gattatcggtattgttcgtctagga

SEQ ID NO: 403553 - DNA, 25 bp, Artificial
  probe
  misc_feature (1)..(25): SEQ ID NO: 5212; WAN024CCW; Start 702; Stop 726
tatcggtattgttcgtctaggaatc

SEQ ID NO: 403554 - DNA, 25 bp, Artificial
  probe
  misc_feature (1)..(25): SEQ ID NO: 5212; WAN024CCW; Start 1081; Stop 1105
cttagagtcaatgccttagtaatgt

SEQ ID NO: 403555 - DNA, 25 bp, Artificial
  probe
  misc_feature (1)..(25): SEQ ID NO: 5212; WAN024CCW; Start 701; Stop 725
ttatcggtattgttcgtctaggaat

SEQ ID NO: 403556 - DNA, 25 bp, Artificial
  probe
  misc_feature (1)..(25): SEQ ID NO: 5212; WAN024CCW; Start 700; Stop 724
attatcggtattgttcgtctaggaa

SEQ ID NO: 403557 - DNA, 25 bp, Artificial
  probe
  misc_feature (1)..(25): SEQ ID NO: 5212; WAN024CCW; Start 1077; Stop 1101
tatccttagagtcaatgccttagta

SEQ ID NO: 403558 - DNA, 25 bp, Artificial
  probe
  misc_feature (1)..(25): SEQ ID NO: 5212; WAN024CCW; Start 697; Stop 721
ttgattatcggtattgttcgtctag

SEQ ID NO: 403559 - DNA, 25 bp, Artificial
  probe
  misc_feature (1)..(25): SEQ ID NO: 5212; WAN024CCW; Start 1083; Stop 1107
tagagtcaatgccttagtaatgttg

SEQ ID NO: 403560 - DNA, 25 bp, Artificial
  probe
  misc_feature (1)..(25): SEQ ID NO: 5212; WAN024CCW; Start 440; Stop 464
atagttccatcattctactcagtga

SEQ ID NO: 403561 - DNA, 25 bp, Artificial
  probe
  misc_feature (1)..(25): SEQ ID NO: 5212; WAN024CCW; Start 1082; Stop 1106
ttagagtcaatgccttagtaatgtt

SEQ ID NO: 403562 - DNA, 25 bp, Artificial
  probe
  misc_feature (1)..(25): SEQ ID NO: 5212; WAN024CCW; Start 439; Stop 463
gatagttccatcattctactcagtg

SEQ ID NO: 403563 - DNA, 25 bp, Artificial
  probe
  misc_feature (1)..(25): SEQ ID NO: 5212; WAN024CCW; Start 509; Stop 533
gttggcatgaatacaaggttatgat

SEQ ID NO: 403564 - DNA, 25 bp, Artificial
  probe
  misc_feature (1)..(25): SEQ ID NO: 5212; WAN024CCW; Start 506; Stop 530
ttggttggcatgaatacaaggttat

SEQ ID NO: 403565 - DNA, 25 bp, Artificial
  probe
  misc_feature (1)..(25): SEQ ID NO: 5212; WAN024CCW; Start 510; Stop 534
ttggcatgaatacaaggttatgatt

SEQ ID NO: 403566 - DNA, 25 bp, Artificial
  probe
  misc_feature (1)..(25): SEQ ID NO: 5212; WAN024CCW; Start 703; Stop 727
atcggtattgttcgtctaggaatcc

SEQ ID NO: 403567 - DNA, 25 bp, Artificial
  probe
  misc_feature (1)..(25): SEQ ID NO: 5212; WAN024CCW; Start 438; Stop 462
ggatagttccatcattctactcagt

SEQ ID NO: 403568 - DNA, 25 bp, Artificial
  probe
  misc_feature (1)..(25): SEQ ID NO: 5212; WAN024CCW; Start 431; Stop 455
gcttgaaggatagttccatcattct

SEQ ID NO: 403569 - DNA, 25 bp, Artificial
  probe
  misc_feature (1)..(25): SEQ ID NO: 5212; WAN024CCW; Start 508; Stop 532
ggttggcatgaatacaaggttatga

SEQ ID NO: 403570 - DNA, 25 bp, Artificial
  probe
  misc_feature (1)..(25): SEQ ID NO: 5212; WAN024CCW; Start 437; Stop 461
aggatagttccatcattctactcag

SEQ ID NO: 403571 - DNA, 25 bp, Artificial
  probe
  misc_feature (1)..(25): SEQ ID NO: 5212; WAN024CCW; Start 277; Stop 301
agcttcttaatgattatctccttgc

SEQ ID NO: 403572 - DNA, 25 bp, Artificial
  probe
  misc_feature (1)..(25): SEQ ID NO: 5212; WAN024CCW; Start 1192; Stop 1216
ttgagaagtatcatagccgaattaa

SEQ ID NO: 403573 - DNA, 25 bp, Artificial
  probe
  misc_feature (1)..(25): SEQ ID NO: 5212; WAN024CCW; Start 1028; Stop 1052
tggcattggtcattaatacttactt

SEQ ID NO: 403574 - DNA, 25 bp, Artificial
  probe
  misc_feature (1)..(25): SEQ ID NO: 5212; WAN024CCW; Start 507; Stop 531
tggttggcatgaatacaaggttatg

SEQ ID NO: 403575 - DNA, 25 bp, Artificial
  probe
  misc_feature (1)..(25): SEQ ID NO: 5212; WAN024CCW; Start 75; Stop 99
gacctcttccttggttgtcttaatt

SEQ ID NO: 403576 - DNA, 25 bp, Artificial
  probe
  misc_feature (1)..(25): SEQ ID NO: 5212; WAN024CCW; Start 436; Stop 460
aaggatagttccatcattctactca

SEQ ID NO: 403577 - DNA, 25 bp, Artificial
  probe
  misc_feature (1)..(25): SEQ ID NO: 5212; WAN024CCW; Start 434; Stop 458
tgaaggatagttccatcattctact

SEQ ID NO: 403578 - DNA, 25 bp, Artificial
  probe
  misc_feature (1)..(25): SEQ ID NO: 5212; WAN024CCW; Start 1330; Stop 1354
gtctacacaatagcctacggtttat

SEQ ID NO: 403579 - DNA, 25 bp, Artificial
  probe
  misc_feature (1)..(25): SEQ ID NO: 5213; WAN024D7T; Start 150; Stop 174
ctggaatcctaagatggctaagtac

SEQ ID NO: 403580 - DNA, 25 bp, Artificial
  probe
  misc_feature (1)..(25): SEQ ID NO: 5213; WAN024D7T; Start 151; Stop 175
tggaatcctaagatggctaagtaca

SEQ ID NO: 403581 - DNA, 25 bp, Artificial
  probe
  misc_feature (1)..(25): SEQ ID NO: 5213; WAN024D7T; Start 152; Stop 176
ggaatcctaagatggctaagtacat

SEQ ID NO: 403582 - DNA, 25 bp, Artificial
  probe
  misc_feature (1)..(25): SEQ ID NO: 5213; WAN024D7T; Start 280; Stop 304
gttgtattgttcgttggtactaaga

SEQ ID NO: 403583 - DNA, 25 bp, Artificial
  probe
  misc_feature (1)..(25): SEQ ID NO: 5213; WAN024D7T; Start 149; Stop 173
gctggaatcctaagatggctaagta

SEQ ID NO: 403584 - DNA, 25 bp, Artificial
  probe
  misc_feature (1)..(25): SEQ ID NO: 5213; WAN024D7T; Start 278; Stop 302
cagttgtattgttcgttggtactaa

SEQ ID NO: 403585 - DNA, 25 bp, Artificial
  probe
  misc_feature (1)..(25): SEQ ID NO: 5213; WAN024D7T; Start 279; Stop 303
agttgtattgttcgttggtactaag

SEQ ID NO: 403586 - DNA, 25 bp, Artificial
  probe
  misc_feature (1)..(25): SEQ ID NO: 5213; WAN024D7T; Start 281; Stop 305
ttgtattgttcgttggtactaagaa

SEQ ID NO: 403587 - DNA, 25 bp, Artificial
  probe
  misc_feature (1)..(25): SEQ ID NO: 5213; WAN024D7T; Start 646; Stop 670
gacaccaatactgatccagatgata

SEQ ID NO: 403588 - DNA, 25 bp, Artificial
  probe
  misc_feature (1)..(25): SEQ ID NO: 5213; WAN024D7T; Start 277; Stop 301
gcagttgtattgttcgttggtacta

SEQ ID NO: 403589 - DNA, 25 bp, Artificial
  probe
  misc_feature (1)..(25): SEQ ID NO: 5213; WAN024D7T; Start 647; Stop 671
acaccaatactgatccagatgatat

SEQ ID NO: 403590 - DNA, 25 bp, Artificial
  probe
  misc_feature (1)..(25): SEQ ID NO: 5213; WAN024D7T; Start 645; Stop 669
tgacaccaatactgatccagatgat

SEQ ID NO: 403591 - DNA, 25 bp, Artificial
  probe
  misc_feature (1)..(25): SEQ ID NO: 5213; WAN024D7T; Start 338; Stop 362
tacgttcaggtcaatacttcatcaa

SEQ ID NO: 403592 - DNA, 25 bp, Artificial
  probe
  misc_feature (1)..(25): SEQ ID NO: 5213; WAN024D7T; Start 644; Stop 668
ttgacaccaatactgatccagatga

SEQ ID NO: 403593 - DNA, 25 bp, Artificial
  probe
  misc_feature (1)..(25): SEQ ID NO: 5213; WAN024D7T; Start 643; Stop 667
gttgacaccaatactgatccagatg

SEQ ID NO: 403594 - DNA, 25 bp, Artificial
  probe
  misc_feature (1)..(25): SEQ ID NO: 5213; WAN024D7T; Start 342; Stop 366
ttcaggtcaatacttcatcaaccac

SEQ ID NO: 403595 - DNA, 25 bp, Artificial
  probe
  misc_feature (1)..(25): SEQ ID NO: 5213; WAN024D7T; Start 341; Stop 365
gttcaggtcaatacttcatcaacca

SEQ ID NO: 403596 - DNA, 25 bp, Artificial
  probe
  misc_feature (1)..(25): SEQ ID NO: 5213; WAN024D7T; Start 827; Stop 851
aagaaatcgttgaagttgtagaagg

SEQ ID NO: 403597 - DNA, 25 bp, Artificial
  probe
  misc_feature (1)..(25): SEQ ID NO: 5213; WAN024D7T; Start 337; Stop 361
gtacgttcaggtcaatacttcatca

SEQ ID NO: 403598 - DNA, 25 bp, Artificial
  probe
  misc_feature (1)..(25): SEQ ID NO: 5213; WAN024D7T; Start 412; Stop 436
cgtatcgctcgtttgaaagaaatta

SEQ ID NO: 403599 - DNA, 25 bp, Artificial
  probe
  misc_feature (1)..(25): SEQ ID NO: 5213; WAN024D7T; Start 825; Stop 849
tgaagaaatcgttgaagttgtagaa

SEQ ID NO: 403600 - DNA, 25 bp, Artificial
  probe
  misc_feature (1)..(25): SEQ ID NO: 5213; WAN024D7T; Start 824; Stop 848
ttgaagaaatcgttgaagttgtaga

SEQ ID NO: 403601 - DNA, 25 bp, Artificial
  probe
  misc_feature (1)..(25): SEQ ID NO: 5213; WAN024D7T; Start 572; Stop 596
tagttgacccacataaagagcaaat

SEQ ID NO: 403602 - DNA, 25 bp, Artificial
  probe
  misc_feature (1)..(25): SEQ ID NO: 5213; WAN024D7T; Start 826; Stop 850
gaagaaatcgttgaagttgtagaag

SEQ ID NO: 403603 - DNA, 25 bp, Artificial
  probe
  misc_feature (1)..(25): SEQ ID NO: 5213; WAN024D7T; Start 339; Stop 363
acgttcaggtcaatacttcatcaac

SEQ ID NO: 403604 - DNA, 25 bp, Artificial
  probe
  misc_feature (1)..(25): SEQ ID NO: 5213; WAN024D7T; Start 340; Stop 364
cgttcaggtcaatacttcatcaacc

SEQ ID NO: 403605 - DNA, 25 bp, Artificial
  probe
  misc_feature (1)..(25): SEQ ID NO: 5213; WAN024D7T; Start 413; Stop 437
gtatcgctcgtttgaaagaaattaa

SEQ ID NO: 403606 - DNA, 25 bp, Artificial
  probe
  misc_feature (1)..(25): SEQ ID NO: 5213; WAN024D7T; Start 274; Stop 298
gatgcagttgtattgttcgttggta

SEQ ID NO: 403607 - DNA, 25 bp, Artificial
  probe
  misc_feature (1)..(25): SEQ ID NO: 5213; WAN024D7T; Start 571; Stop 595
gtagttgacccacataaagagcaaa

SEQ ID NO: 403608 - DNA, 25 bp, Artificial
  probe
  misc_feature (1)..(25): SEQ ID NO: 5213; WAN024D7T; Start 823; Stop 847
attgaagaaatcgttgaagttgtag

SEQ ID NO: 403609 - DNA, 25 bp, Artificial
  probe
  misc_feature (1)..(25): SEQ ID NO: 5213; WAN024D7T; Start 439; Stop 463
cgtatggaagaagatggaactttcg

SEQ ID NO: 403610 - DNA, 25 bp, Artificial
  probe
  misc_feature (1)..(25): SEQ ID NO: 5213; WAN024D7T; Start 573; Stop 597
agttgacccacataaagagcaaatc

SEQ ID NO: 403611 - DNA, 25 bp, Artificial
  probe
  misc_feature (1)..(25): SEQ ID NO: 5213; WAN024D7T; Start 649; Stop 673
accaatactgatccagatgatatcg

SEQ ID NO: 403612 - DNA, 25 bp, Artificial
  probe
  misc_feature (1)..(25): SEQ ID NO: 5214; WAN024CVH; Start 577; Stop 601
ttgattggagaataccgttacagtt

SEQ ID NO: 403613 - DNA, 25 bp, Artificial
  probe
  misc_feature (1)..(25): SEQ ID NO: 5214; WAN024CVH; Start 1052; Stop 1076
aagatactcgtaaggaactggtaac

SEQ ID NO: 403614 - DNA, 25 bp, Artificial
  probe
  misc_feature (1)..(25): SEQ ID NO: 5214; WAN024CVH; Start 1134; Stop 1158
cttgtatatcttgatgcttgttgcc

SEQ ID NO: 403615 - DNA, 25 bp, Artificial
  probe
  misc_feature (1)..(25): SEQ ID NO: 5214; WAN024CVH; Start 1133; Stop 1157
ccttgtatatcttgatgcttgttgc

SEQ ID NO: 403616 - DNA, 25 bp, Artificial
  probe
  misc_feature (1)..(25): SEQ ID NO: 5214; WAN024CVH; Start 576; Stop 600
cttgattggagaataccgttacagt

SEQ ID NO: 403617 - DNA, 25 bp, Artificial
  probe
  misc_feature (1)..(25): SEQ ID NO: 5214; WAN024CVH; Start 1132; Stop 1156
accttgtatatcttgatgcttgttg

SEQ ID NO: 403618 - DNA, 25 bp, Artificial
  probe
  misc_feature (1)..(25): SEQ ID NO: 5214; WAN024CVH; Start 1053; Stop 1077
agatactcgtaaggaactggtaaca

SEQ ID NO: 403619 - DNA, 25 bp, Artificial
  probe
  misc_feature (1)..(25): SEQ ID NO: 5214; WAN024CVH; Start 1137; Stop 1161
gtatatcttgatgcttgttgccatt

SEQ ID NO: 403620 - DNA, 25 bp, Artificial
  probe
  misc_feature (1)..(25): SEQ ID NO: 5214; WAN024CVH; Start 185; Stop 209
aagtatggaagttggatgattcgta

SEQ ID NO: 403621 - DNA, 25 bp, Artificial
  probe
  misc_feature (1)..(25): SEQ ID NO: 5214; WAN024CVH; Start 186; Stop 210
agtatggaagttggatgattcgtat

SEQ ID NO: 403622 - DNA, 25 bp, Artificial
  probe
  misc_feature (1)..(25): SEQ ID NO: 5214; WAN024CVH; Start 1135; Stop 1159
ttgtatatcttgatgcttgttgcca

SEQ ID NO: 403623 - DNA, 25 bp, Artificial
  probe
  misc_feature (1)..(25): SEQ ID NO: 5214; WAN024CVH; Start 909; Stop 933
tggtaaggaagtagttgtaacatca

SEQ ID NO: 403624 - DNA, 25 bp, Artificial
  probe
  misc_feature (1)..(25): SEQ ID NO: 5214; WAN024CVH; Start 578; Stop 602
tgattggagaataccgttacagttc

SEQ ID NO: 403625 - DNA, 25 bp, Artificial
  probe
  misc_feature (1)..(25): SEQ ID NO: 5214; WAN024CVH; Start 350; Stop 374
actatgttcgctctattatccagac

SEQ ID NO: 403626 - DNA, 25 bp, Artificial
  probe
  misc_feature (1)..(25): SEQ ID NO: 5214; WAN024CVH; Start 575; Stop 599
ccttgattggagaataccgttacag

SEQ ID NO: 403627 - DNA, 25 bp, Artificial
  probe
  misc_feature (1)..(25): SEQ ID NO: 5214; WAN024CVH; Start 1136; Stop 1160
tgtatatcttgatgcttgttgccat

SEQ ID NO: 403628 - DNA, 25 bp, Artificial
  probe
  misc_feature (1)..(25): SEQ ID NO: 5214; WAN024CVH; Start 351; Stop 375
ctatgttcgctctattatccagacg

SEQ ID NO: 403629 - DNA, 25 bp, Artificial
  probe
  misc_feature (1)..(25): SEQ ID NO: 5214; WAN024CVH; Start 911; Stop 935
gtaaggaagtagttgtaacatcagg

SEQ ID NO: 403630 - DNA, 25 bp, Artificial
  probe
  misc_feature (1)..(25): SEQ ID NO: 5214; WAN024CVH; Start 910; Stop 934
ggtaaggaagtagttgtaacatcag

SEQ ID NO: 403631 - DNA, 25 bp, Artificial
  probe
  misc_feature (1)..(25): SEQ ID NO: 5214; WAN024CVH; Start 187; Stop 211
gtatggaagttggatgattcgtatt

SEQ ID NO: 403632 - DNA, 25 bp, Artificial
  probe
  misc_feature (1)..(25): SEQ ID NO: 5214; WAN024CVH; Start 1000; Stop 1024
gctccaactggttatgttcaattaa

SEQ ID NO: 403633 - DNA, 25 bp, Artificial
  probe
  misc_feature (1)..(25): SEQ ID NO: 5214; WAN024CVH; Start 188; Stop 212
tatggaagttggatgattcgtattc

SEQ ID NO: 403634 - DNA, 25 bp, Artificial
  probe
  misc_feature (1)..(25): SEQ ID NO: 5214; WAN024CVH; Start 201; Stop 225
tgattcgtattcctatgatgatcgg

SEQ ID NO: 403635 - DNA, 25 bp, Artificial
  probe
  misc_feature (1)..(25): SEQ ID NO: 5214; WAN024CVH; Start 184; Stop 208
caagtatggaagttggatgattcgt

SEQ ID NO: 403636 - DNA, 25 bp, Artificial
  probe
  misc_feature (1)..(25): SEQ ID NO: 5214; WAN024CVH; Start 1131; Stop 1155
aaccttgtatatcttgatgcttgtt

SEQ ID NO: 403637 - DNA, 25 bp, Artificial
  probe
  misc_feature (1)..(25): SEQ ID NO: 5214; WAN024CVH; Start 296; Stop 320
agatgaccttccttgagaatcagat

SEQ ID NO: 403638 - DNA, 25 bp, Artificial
  probe
  misc_feature (1)..(25): SEQ ID NO: 5214; WAN024CVH; Start 297; Stop 321
gatgaccttccttgagaatcagatt

SEQ ID NO: 403639 - DNA, 25 bp, Artificial
  probe
  misc_feature (1)..(25): SEQ ID NO: 5214; WAN024CVH; Start 300; Stop 324
gaccttccttgagaatcagattgaa

SEQ ID NO: 403640 - DNA, 25 bp, Artificial
  probe
  misc_feature (1)..(25): SEQ ID NO: 5214; WAN024CVH; Start 298; Stop 322
atgaccttccttgagaatcagattg

SEQ ID NO: 403641 - DNA, 25 bp, Artificial
  probe
  misc_feature (1)..(25): SEQ ID NO: 5214; WAN024CVH; Start 349; Stop 373
tactatgttcgctctattatccaga

SEQ ID NO: 403642 - DNA, 25 bp, Artificial
  probe
  misc_feature (1)..(25): SEQ ID NO: 5214; WAN024CVH; Start 293; Stop 317
ttgagatgaccttccttgagaatca

SEQ ID NO: 403643 - DNA, 25 bp, Artificial
  probe
  misc_feature (1)..(25): SEQ ID NO: 5214; WAN024CVH; Start 908; Stop 932
atggtaaggaagtagttgtaacatc

SEQ ID NO: 403644 - DNA, 25 bp, Artificial
  probe
  misc_feature (1)..(25): SEQ ID NO: 5214; WAN024CVH; Start 1054; Stop 1078
gatactcgtaaggaactggtaacag

SEQ ID NO: 403645 - DNA, 25 bp, Artificial
  probe
  misc_feature (1)..(25): SEQ ID NO: 5215; WAN024BEN; Start 13; Stop 37
ttggatcaattcaataacagtgtgg

SEQ ID NO: 403646 - DNA, 25 bp, Artificial
  probe
  misc_feature (1)..(25): SEQ ID NO: 5215; WAN024BEN; Start 11; Stop 35
gcttggatcaattcaataacagtgt

SEQ ID NO: 403647 - DNA, 25 bp, Artificial
  probe
  misc_feature (1)..(25): SEQ ID NO: 5215; WAN024BEN; Start 10; Stop 34
tgcttggatcaattcaataacagtg

SEQ ID NO: 403648 - DNA, 25 bp, Artificial
  probe
  misc_feature (1)..(25): SEQ ID NO: 5215; WAN024BEN; Start 6; Stop 30
gacctgcttggatcaattcaataac

SEQ ID NO: 403649 - DNA, 25 bp, Artificial
  probe
  misc_feature (1)..(25): SEQ ID NO: 5215; WAN024BEN; Start 4; Stop 28
atgacctgcttggatcaattcaata

SEQ ID NO: 403650 - DNA, 25 bp, Artificial
  probe
  misc_feature (1)..(25): SEQ ID NO: 5215; WAN024BEN; Start 7; Stop 31
acctgcttggatcaattcaataaca

SEQ ID NO: 403651 - DNA, 25 bp, Artificial
  probe
  misc_feature (1)..(25): SEQ ID NO: 5215; WAN024BEN; Start 5; Stop 29
tgacctgcttggatcaattcaataa

SEQ ID NO: 403652 - DNA, 25 bp, Artificial
  probe
  misc_feature (1)..(25): SEQ ID NO: 5215; WAN024BEN; Start 12; Stop 36
cttggatcaattcaataacagtgtg

SEQ ID NO: 403653 - DNA, 25 bp, Artificial
  probe
  misc_feature (1)..(25): SEQ ID NO: 5215; WAN024BEN; Start 9; Stop 33
ctgcttggatcaattcaataacagt

SEQ ID NO: 403654 - DNA, 25 bp, Artificial
  probe
  misc_feature (1)..(25): SEQ ID NO: 5215; WAN024BEN; Start 8; Stop 32
cctgcttggatcaattcaataacag

SEQ ID NO: 403655 - DNA, 25 bp, Artificial
  probe
  misc_feature (1)..(25): SEQ ID NO: 5215; WAN024BEN; Start 3; Stop 27
gatgacctgcttggatcaattcaat

SEQ ID NO: 403656 - DNA, 25 bp, Artificial
  probe
  misc_feature (1)..(25): SEQ ID NO: 5215; WAN024BEN; Start 147; Stop 171
ttgccatcctaaactacctgataaa

SEQ ID NO: 403657 - DNA, 25 bp, Artificial
  probe
  misc_feature (1)..(25): SEQ ID NO: 5215; WAN024BEN; Start 146; Stop 170
tttgccatcctaaactacctgataa

SEQ ID NO: 403658 - DNA, 25 bp, Artificial
  probe
  misc_feature (1)..(25): SEQ ID NO: 5215; WAN024BEN; Start 145; Stop 169
atttgccatcctaaactacctgata

SEQ ID NO: 403659 - DNA, 25 bp, Artificial
  probe
  misc_feature (1)..(25): SEQ ID NO: 5215; WAN024BEN; Start 144; Stop 168
catttgccatcctaaactacctgat

SEQ ID NO: 403660 - DNA, 25 bp, Artificial
  probe
  misc_feature (1)..(25): SEQ ID NO: 5215; WAN024BEN; Start 17; Stop 41
atcaattcaataacagtgtgggttc

SEQ ID NO: 403661 - DNA, 25 bp, Artificial
  probe
  misc_feature (1)..(25): SEQ ID NO: 5215; WAN024BEN; Start 140; Stop 164
atgtcatttgccatcctaaactacc

SEQ ID NO: 403662 - DNA, 25 bp, Artificial
  probe
  misc_feature (1)..(25): SEQ ID NO: 5215; WAN024BEN; Start 142; Stop 166
gtcatttgccatcctaaactacctg

SEQ ID NO: 403663 - DNA, 25 bp, Artificial
  probe
  misc_feature (1)..(25): SEQ ID NO: 5215; WAN024BEN; Start 139; Stop 163
aatgtcatttgccatcctaaactac

SEQ ID NO: 403664 - DNA, 25 bp, Artificial
  probe
  misc_feature (1)..(25): SEQ ID NO: 5215; WAN024BEN; Start 138; Stop 162
gaatgtcatttgccatcctaaacta

SEQ ID NO: 403665 - DNA, 25 bp, Artificial
  probe
  misc_feature (1)..(25): SEQ ID NO: 5215; WAN024BEN; Start 16; Stop 40
gatcaattcaataacagtgtgggtt

SEQ ID NO: 403666 - DNA, 25 bp, Artificial
  probe
  misc_feature (1)..(25): SEQ ID NO: 5215; WAN024BEN; Start 141; Stop 165
tgtcatttgccatcctaaactacct

SEQ ID NO: 403667 - DNA, 25 bp, Artificial
  probe
  misc_feature (1)..(25): SEQ ID NO: 5215; WAN024BEN; Start 18; Stop 42
tcaattcaataacagtgtgggttcc

SEQ ID NO: 403668 - DNA, 25 bp, Artificial
  probe
  misc_feature (1)..(25): SEQ ID NO: 5215; WAN024BEN; Start 15; Stop 39
ggatcaattcaataacagtgtgggt

SEQ ID NO: 403669 - DNA, 25 bp, Artificial
  probe
  misc_feature (1)..(25): SEQ ID NO: 5215; WAN024BEN; Start 14; Stop 38
tggatcaattcaataacagtgtggg

SEQ ID NO: 403670 - DNA, 25 bp, Artificial
  probe
  misc_feature (1)..(25): SEQ ID NO: 5215; WAN024BEN; Start 143; Stop 167
tcatttgccatcctaaactacctga

SEQ ID NO: 403671 - DNA, 25 bp, Artificial
  probe
  misc_feature (1)..(25): SEQ ID NO: 5215; WAN024BEN; Start 24; Stop 48
caataacagtgtgggttccaataaa

SEQ ID NO: 403672 - DNA, 25 bp, Artificial
  probe
  misc_feature (1)..(25): SEQ ID NO: 5215; WAN024BEN; Start 23; Stop 47
tcaataacagtgtgggttccaataa

SEQ ID NO: 403673 - DNA, 25 bp, Artificial
  probe
  misc_feature (1)..(25): SEQ ID NO: 5215; WAN024BEN; Start 22; Stop 46
ttcaataacagtgtgggttccaata

SEQ ID NO: 403674 - DNA, 25 bp, Artificial
  probe
  misc_feature (1)..(25): SEQ ID NO: 5215; WAN024BEN; Start 21; Stop 45
attcaataacagtgtgggttccaat

SEQ ID NO: 403675 - DNA, 25 bp, Artificial
  probe
  misc_feature (1)..(25): SEQ ID NO: 5215; WAN024BEN; Start 20; Stop 44
aattcaataacagtgtgggttccaa

SEQ ID NO: 403676 - DNA, 25 bp, Artificial
  probe
  misc_feature (1)..(25): SEQ ID NO: 5215; WAN024BEN; Start 137; Stop 161
ggaatgtcatttgccatcctaaact

SEQ ID NO: 403677 - DNA, 25 bp, Artificial
  probe
  misc_feature (1)..(25): SEQ ID NO: 5215; WAN024BEN; Start 19; Stop 43
caattcaataacagtgtgggttcca

SEQ ID NO: 403678 - DNA, 25 bp, Artificial
  probe
  misc_feature (1)..(25): SEQ ID NO: 5216; WAN024CJY; Start 274; Stop 298
aatgacctgatttaccctatgatgg

SEQ ID NO: 403679 - DNA, 25 bp, Artificial
  probe
  misc_feature (1)..(25): SEQ ID NO: 5216; WAN024CJY; Start 33; Stop 57
acacattagtctattgggctttctc

SEQ ID NO: 403680 - DNA, 25 bp, Artificial
  probe
  misc_feature (1)..(25): SEQ ID NO: 5216; WAN024CJY; Start 273; Stop 297
caatgacctgatttaccctatgatg

SEQ ID NO: 403681 - DNA, 25 bp, Artificial
  probe
  misc_feature (1)..(25): SEQ ID NO: 5216; WAN024CJY; Start 34; Stop 58
cacattagtctattgggctttctcg

SEQ ID NO: 403682 - DNA, 25 bp, Artificial
  probe
  misc_feature (1)..(25): SEQ ID NO: 5216; WAN024CJY; Start 272; Stop 296
tcaatgacctgatttaccctatgat

SEQ ID NO: 403683 - DNA, 25 bp, Artificial
  probe
  misc_feature (1)..(25): SEQ ID NO: 5216; WAN024CJY; Start 37; Stop 61
attagtctattgggctttctcggag

SEQ ID NO: 403684 - DNA, 25 bp, Artificial
  probe
  misc_feature (1)..(25): SEQ ID NO: 5216; WAN024CJY; Start 36; Stop 60
cattagtctattgggctttctcgga

SEQ ID NO: 403685 - DNA, 25 bp, Artificial
  probe
  misc_feature (1)..(25): SEQ ID NO: 5216; WAN024CJY; Start 32; Stop 56
gacacattagtctattgggctttct

SEQ ID NO: 403686 - DNA, 25 bp, Artificial
  probe
  misc_feature (1)..(25): SEQ ID NO: 5216; WAN024CJY; Start 35; Stop 59
acattagtctattgggctttctcgg

SEQ ID NO: 403687 - DNA, 25 bp, Artificial
  probe
  misc_feature (1)..(25): SEQ ID NO: 5216; WAN024CJY; Start 143; Stop 167
cctttgttcgtgacagagaatttct

SEQ ID NO: 403688 - DNA, 25 bp, Artificial
  probe
  misc_feature (1)..(25): SEQ ID NO: 5216; WAN024CJY; Start 31; Stop 55
cgacacattagtctattgggctttc

SEQ ID NO: 403689 - DNA, 25 bp, Artificial
  probe
  misc_feature (1)..(25): SEQ ID NO: 5216; WAN024CJY; Start 127; Stop 151
cttgaaattctccagccctttgttc

SEQ ID NO: 403690 - DNA, 25 bp, Artificial
  probe
  misc_feature (1)..(25): SEQ ID NO: 5216; WAN024CJY; Start 275; Stop 299
atgacctgatttaccctatgatggt

SEQ ID NO: 403691 - DNA, 25 bp, Artificial
  probe
  misc_feature (1)..(25): SEQ ID NO: 5216; WAN024CJY; Start 126; Stop 150
tcttgaaattctccagccctttgtt

SEQ ID NO: 403692 - DNA, 25 bp, Artificial
  probe
  misc_feature (1)..(25): SEQ ID NO: 5216; WAN024CJY; Start 142; Stop 166
ccctttgttcgtgacagagaatttc

SEQ ID NO: 403693 - DNA, 25 bp, Artificial
  probe
  misc_feature (1)..(25): SEQ ID NO: 5216; WAN024CJY; Start 30; Stop 54
acgacacattagtctattgggcttt

SEQ ID NO: 403694 - DNA, 25 bp, Artificial
  probe
  misc_feature (1)..(25): SEQ ID NO: 5216; WAN024CJY; Start 38; Stop 62
ttagtctattgggctttctcggagt

SEQ ID NO: 403695 - DNA, 25 bp, Artificial
  probe
  misc_feature (1)..(25): SEQ ID NO: 5216; WAN024CJY; Start 280; Stop 304
ctgatttaccctatgatggtggtca

SEQ ID NO: 403696 - DNA, 25 bp, Artificial
  probe
  misc_feature (1)..(25): SEQ ID NO: 5216; WAN024CJY; Start 276; Stop 300
tgacctgatttaccctatgatggtg

SEQ ID NO: 403697 - DNA, 25 bp, Artificial
  probe
  misc_feature (1)..(25): SEQ ID NO: 5216; WAN024CJY; Start 125; Stop 149
ctcttgaaattctccagccctttgt

SEQ ID NO: 403698 - DNA, 25 bp, Artificial
  probe
  misc_feature (1)..(25): SEQ ID NO: 5216; WAN024CJY; Start 24; Stop 48
actgagacgacacattagtctattg

SEQ ID NO: 403699 - DNA, 25 bp, Artificial
  probe
  misc_feature (1)..(25): SEQ ID NO: 5216; WAN024CJY; Start 29; Stop 53
gacgacacattagtctattgggctt

SEQ ID NO: 403700 - DNA, 25 bp, Artificial
  probe
  misc_feature (1)..(25): SEQ ID NO: 5216; WAN024CJY; Start 25; Stop 49
ctgagacgacacattagtctattgg

SEQ ID NO: 403701 - DNA, 25 bp, Artificial
  probe
  misc_feature (1)..(25): SEQ ID NO: 5216; WAN024CJY; Start 283; Stop 307
atttaccctatgatggtggtcattc

SEQ ID NO: 403702 - DNA, 25 bp, Artificial
  probe
  misc_feature (1)..(25): SEQ ID NO: 5216; WAN024CJY; Start 282; Stop 306
gatttaccctatgatggtggtcatt

SEQ ID NO: 403703 - DNA, 25 bp, Artificial
  probe
  misc_feature (1)..(25): SEQ ID NO: 5216; WAN024CJY; Start 301; Stop 325
gtcattcagaccattccgaccattg

SEQ ID NO: 403704 - DNA, 25 bp, Artificial
  probe
  misc_feature (1)..(25): SEQ ID NO: 5216; WAN024CJY; Start 23; Stop 47
tactgagacgacacattagtctatt

SEQ ID NO: 403705 - DNA, 25 bp, Artificial
  probe
  misc_feature (1)..(25): SEQ ID NO: 5216; WAN024CJY; Start 22; Stop 46
atactgagacgacacattagtctat

SEQ ID NO: 403706 - DNA, 25 bp, Artificial
  probe
  misc_feature (1)..(25): SEQ ID NO: 5216; WAN024CJY; Start 279; Stop 303
cctgatttaccctatgatggtggtc

SEQ ID NO: 403707 - DNA, 25 bp, Artificial
  probe
  misc_feature (1)..(25): SEQ ID NO: 5216; WAN024CJY; Start 277; Stop 301
gacctgatttaccctatgatggtgg

SEQ ID NO: 403708 - DNA, 25 bp, Artificial
  probe
  misc_feature (1)..(25): SEQ ID NO: 5216; WAN024CJY; Start 281; Stop 305
tgatttaccctatgatggtggtcat

SEQ ID NO: 403709 - DNA, 25 bp, Artificial
  probe
  misc_feature (1)..(25): SEQ ID NO: 5216; WAN024CJY; Start 284; Stop 308
tttaccctatgatggtggtcattca

SEQ ID NO: 403710 - DNA, 25 bp, Artificial
  probe
  misc_feature (1)..(25): SEQ ID NO: 5216; WAN024CJY; Start 21; Stop 45
tatactgagacgacacattagtcta

SEQ ID NO: 403711 - DNA, 25 bp, Artificial
  probe
  misc_feature (1)..(25): SEQ ID NO: 5217; WAN024EXL; Start 1; Stop 25
ttgatgagaatgatagttggacacg

SEQ ID NO: 403712 - DNA, 25 bp, Artificial
  probe
  misc_feature (1)..(25): SEQ ID NO: 5217; WAN024EXL; Start 6; Stop 30
gagaatgatagttggacacggaatt

SEQ ID NO: 403713 - DNA, 25 bp, Artificial
  probe
  misc_feature (1)..(25): SEQ ID NO: 5217; WAN024EXL; Start 8; Stop 32
gaatgatagttggacacggaattga

SEQ ID NO: 403714 - DNA, 25 bp, Artificial
  probe
  misc_feature (1)..(25): SEQ ID NO: 5217; WAN024EXL; Start 7; Stop 31
agaatgatagttggacacggaattg

SEQ ID NO: 403715 - DNA, 25 bp, Artificial
  probe
  misc_feature (1)..(25): SEQ ID NO: 5217; WAN024EXL; Start 9; Stop 33
aatgatagttggacacggaattgac

SEQ ID NO: 403716 - DNA, 25 bp, Artificial
  probe
  misc_feature (1)..(25): SEQ ID NO: 5217; WAN024EXL; Start 5; Stop 29
tgagaatgatagttggacacggaat

SEQ ID NO: 403717 - DNA, 25 bp, Artificial
  probe
  misc_feature (1)..(25): SEQ ID NO: 5217; WAN024EXL; Start 4; Stop 28
atgagaatgatagttggacacggaa

SEQ ID NO: 403718 - DNA, 25 bp, Artificial
  probe
  misc_feature (1)..(25): SEQ ID NO: 5217; WAN024EXL; Start 12; Stop 36
gatagttggacacggaattgacatc

SEQ ID NO: 403719 - DNA, 25 bp, Artificial
  probe
  misc_feature (1)..(25): SEQ ID NO: 5217; WAN024EXL; Start 3; Stop 27
gatgagaatgatagttggacacgga

SEQ ID NO: 403720 - DNA, 25 bp, Artificial
  probe
  misc_feature (1)..(25): SEQ ID NO: 5217; WAN024EXL; Start 11; Stop 35
tgatagttggacacggaattgacat

SEQ ID NO: 403721 - DNA, 25 bp, Artificial
  probe
  misc_feature (1)..(25): SEQ ID NO: 5217; WAN024EXL; Start 10; Stop 34
atgatagttggacacggaattgaca

SEQ ID NO: 403722 - DNA, 25 bp, Artificial
  probe
  misc_feature (1)..(25): SEQ ID NO: 5217; WAN024EXL; Start 2; Stop 26
tgatgagaatgatagttggacacgg

SEQ ID NO: 403723 - DNA, 25 bp, Artificial
  probe
  misc_feature (1)..(25): SEQ ID NO: 5217; WAN024EXL; Start 231; Stop 255
ggatttggaagtcttgaacaatgaa

SEQ ID NO: 403724 - DNA, 25 bp, Artificial
  probe
  misc_feature (1)..(25): SEQ ID NO: 5217; WAN024EXL; Start 233; Stop 257
atttggaagtcttgaacaatgaacg

SEQ ID NO: 403725 - DNA, 25 bp, Artificial
  probe
  misc_feature (1)..(25): SEQ ID NO: 5217; WAN024EXL; Start 230; Stop 254
aggatttggaagtcttgaacaatga

SEQ ID NO: 403726 - DNA, 25 bp, Artificial
  probe
  misc_feature (1)..(25): SEQ ID NO: 5217; WAN024EXL; Start 229; Stop 253
caggatttggaagtcttgaacaatg

SEQ ID NO: 403727 - DNA, 25 bp, Artificial
  probe
  misc_feature (1)..(25): SEQ ID NO: 5217; WAN024EXL; Start 13; Stop 37
atagttggacacggaattgacatcg

SEQ ID NO: 403728 - DNA, 25 bp, Artificial
  probe
  misc_feature (1)..(25): SEQ ID NO: 5217; WAN024EXL; Start 232; Stop 256
gatttggaagtcttgaacaatgaac

SEQ ID NO: 403729 - DNA, 25 bp, Artificial
  probe
  misc_feature (1)..(25): SEQ ID NO: 5217; WAN024EXL; Start 228; Stop 252
tcaggatttggaagtcttgaacaat

SEQ ID NO: 403730 - DNA, 25 bp, Artificial
  probe
  misc_feature (1)..(25): SEQ ID NO: 5217; WAN024EXL; Start 132; Stop 156
caaaggacgcaggcaaatagaatat

SEQ ID NO: 403731 - DNA, 25 bp, Artificial
  probe
  misc_feature (1)..(25): SEQ ID NO: 5217; WAN024EXL; Start 65; Stop 89
ttacacgacatgaaggatttgctaa

SEQ ID NO: 403732 - DNA, 25 bp, Artificial
  probe
  misc_feature (1)..(25): SEQ ID NO: 5217; WAN024EXL; Start 66; Stop 90
tacacgacatgaaggatttgctaag

SEQ ID NO: 403733 - DNA, 25 bp, Artificial
  probe
  misc_feature (1)..(25): SEQ ID NO: 5217; WAN024EXL; Start 288; Stop 312
ttcaggaaagatttggctgtctatc

SEQ ID NO: 403734 - DNA, 25 bp, Artificial
  probe
  misc_feature (1)..(25): SEQ ID NO: 5217; WAN024EXL; Start 20; Stop 44
gacacggaattgacatcgaagaatt

SEQ ID NO: 403735 - DNA, 25 bp, Artificial
  probe
  misc_feature (1)..(25): SEQ ID NO: 5217; WAN024EXL; Start 287; Stop 311
tttcaggaaagatttggctgtctat

SEQ ID NO: 403736 - DNA, 25 bp, Artificial
  probe
  misc_feature (1)..(25): SEQ ID NO: 5217; WAN024EXL; Start 64; Stop 88
gttacacgacatgaaggatttgcta

SEQ ID NO: 403737 - DNA, 25 bp, Artificial
  probe
  misc_feature (1)..(25): SEQ ID NO: 5217; WAN024EXL; Start 25; Stop 49
ggaattgacatcgaagaattggctt

SEQ ID NO: 403738 - DNA, 25 bp, Artificial
  probe
  misc_feature (1)..(25): SEQ ID NO: 5217; WAN024EXL; Start 21; Stop 45
acacggaattgacatcgaagaattg

SEQ ID NO: 403739 - DNA, 25 bp, Artificial
  probe
  misc_feature (1)..(25): SEQ ID NO: 5217; WAN024EXL; Start 235; Stop 259
ttggaagtcttgaacaatgaacgtg

SEQ ID NO: 403740 - DNA, 25 bp, Artificial
  probe
  misc_feature (1)..(25): SEQ ID NO: 5217; WAN024EXL; Start 290; Stop 314
caggaaagatttggctgtctatcag

SEQ ID NO: 403741 - DNA, 25 bp, Artificial
  probe
  misc_feature (1)..(25): SEQ ID NO: 5217; WAN024EXL; Start 131; Stop 155
tcaaaggacgcaggcaaatagaata

SEQ ID NO: 403742 - DNA, 25 bp, Artificial
  probe
  misc_feature (1)..(25): SEQ ID NO: 5217; WAN024EXL; Start 133; Stop 157
aaaggacgcaggcaaatagaatatt

SEQ ID NO: 403743 - DNA, 25 bp, Artificial
  probe
  misc_feature (1)..(25): SEQ ID NO: 5217; WAN024EXL; Start 289; Stop 313
tcaggaaagatttggctgtctatca

SEQ ID NO: 403744 - DNA, 25 bp, Artificial
  probe
  misc_feature (1)..(25): SEQ ID NO: 5218; WAN024DF3; Start 569; Stop 593
ttaatatggaagatagtcaagcagc

SEQ ID NO: 403745 - DNA, 25 bp, Artificial
  probe
  misc_feature (1)..(25): SEQ ID NO: 5218; WAN024DF3; Start 753; Stop 777
agtaacctcttcaactattgccatt

SEQ ID NO: 403746 - DNA, 25 bp, Artificial
  probe
  misc_feature (1)..(25): SEQ ID NO: 5218; WAN024DF3; Start 752; Stop 776
gagtaacctcttcaactattgccat

SEQ ID NO: 403747 - DNA, 25 bp, Artificial
  probe
  misc_feature (1)..(25): SEQ ID NO: 5218; WAN024DF3; Start 749; Stop 773
atggagtaacctcttcaactattgc

SEQ ID NO: 403748 - DNA, 25 bp, Artificial
  probe
  misc_feature (1)..(25): SEQ ID NO: 5218; WAN024DF3; Start 567; Stop 591
tgttaatatggaagatagtcaagca

SEQ ID NO: 403749 - DNA, 25 bp, Artificial
  probe
  misc_feature (1)..(25): SEQ ID NO: 5218; WAN024DF3; Start 571; Stop 595
aatatggaagatagtcaagcagcta

SEQ ID NO: 403750 - DNA, 25 bp, Artificial
  probe
  misc_feature (1)..(25): SEQ ID NO: 5218; WAN024DF3; Start 570; Stop 594
taatatggaagatagtcaagcagct

SEQ ID NO: 403751 - DNA, 25 bp, Artificial
  probe
  misc_feature (1)..(25): SEQ ID NO: 5218; WAN024DF3; Start 568; Stop 592
gttaatatggaagatagtcaagcag

SEQ ID NO: 403752 - DNA, 25 bp, Artificial
  probe
  misc_feature (1)..(25): SEQ ID NO: 5218; WAN024DF3; Start 751; Stop 775
ggagtaacctcttcaactattgcca

SEQ ID NO: 403753 - DNA, 25 bp, Artificial
  probe
  misc_feature (1)..(25): SEQ ID NO: 5218; WAN024DF3; Start 750; Stop 774
tggagtaacctcttcaactattgcc

SEQ ID NO: 403754 - DNA, 25 bp, Artificial
  probe
  misc_feature (1)..(25): SEQ ID NO: 5218; WAN024DF3; Start 748; Stop 772
tatggagtaacctcttcaactattg

SEQ ID NO: 403755 - DNA, 25 bp, Artificial
  probe
  misc_feature (1)..(25): SEQ ID NO: 5218; WAN024DF3; Start 167; Stop 191
gtcgttgtgaagaactgttaggtct

SEQ ID NO: 403756 - DNA, 25 bp, Artificial
  probe
  misc_feature (1)..(25): SEQ ID NO: 5218; WAN024DF3; Start 573; Stop 597
tatggaagatagtcaagcagctatg

SEQ ID NO: 403757 - DNA, 25 bp, Artificial
  probe
  misc_feature (1)..(25): SEQ ID NO: 5218; WAN024DF3; Start 911; Stop 935
cagggaataatttgccgtaactaat

SEQ ID NO: 403758 - DNA, 25 bp, Artificial
  probe
  misc_feature (1)..(25): SEQ ID NO: 5218; WAN024DF3; Start 626; Stop 650
aattacacgatgtggtcattcaagc

SEQ ID NO: 403759 - DNA, 25 bp, Artificial
  probe
  misc_feature (1)..(25): SEQ ID NO: 5218; WAN024DF3; Start 572; Stop 596
atatggaagatagtcaagcagctat

SEQ ID NO: 403760 - DNA, 25 bp, Artificial
  probe
  misc_feature (1)..(25): SEQ ID NO: 5218; WAN024DF3; Start 758; Stop 782
cctcttcaactattgccatttcttg

SEQ ID NO: 403761 - DNA, 25 bp, Artificial
  probe
  misc_feature (1)..(25): SEQ ID NO: 5218; WAN024DF3; Start 754; Stop 778
gtaacctcttcaactattgccattt

SEQ ID NO: 403762 - DNA, 25 bp, Artificial
  probe
  misc_feature (1)..(25): SEQ ID NO: 5218; WAN024DF3; Start 757; Stop 781
acctcttcaactattgccatttctt

SEQ ID NO: 403763 - DNA, 25 bp, Artificial
  probe
  misc_feature (1)..(25): SEQ ID NO: 5218; WAN024DF3; Start 756; Stop 780
aacctcttcaactattgccatttct

SEQ ID NO: 403764 - DNA, 25 bp, Artificial
  probe
  misc_feature (1)..(25): SEQ ID NO: 5218; WAN024DF3; Start 755; Stop 779
taacctcttcaactattgccatttc

SEQ ID NO: 403765 - DNA, 25 bp, Artificial
  probe
  misc_feature (1)..(25): SEQ ID NO: 5218; WAN024DF3; Start 826; Stop 850
acaaatcctaagcacttgagagaag

SEQ ID NO: 403766 - DNA, 25 bp, Artificial
  probe
  misc_feature (1)..(25): SEQ ID NO: 5218; WAN024DF3; Start 171; Stop 195
ttgtgaagaactgttaggtcttgtc

SEQ ID NO: 403767 - DNA, 25 bp, Artificial
  probe
  misc_feature (1)..(25): SEQ ID NO: 5218; WAN024DF3; Start 149; Stop 173
ctgatatttatggtcgtggtcgttg

SEQ ID NO: 403768 - DNA, 25 bp, Artificial
  probe
  misc_feature (1)..(25): SEQ ID NO: 5218; WAN024DF3; Start 566; Stop 590
atgttaatatggaagatagtcaagc

SEQ ID NO: 403769 - DNA, 25 bp, Artificial
  probe
  misc_feature (1)..(25): SEQ ID NO: 5218; WAN024DF3; Start 170; Stop 194
gttgtgaagaactgttaggtcttgt

SEQ ID NO: 403770 - DNA, 25 bp, Artificial
  probe
  misc_feature (1)..(25): SEQ ID NO: 5218; WAN024DF3; Start 151; Stop 175
gatatttatggtcgtggtcgttgtg

SEQ ID NO: 403771 - DNA, 25 bp, Artificial
  probe
  misc_feature (1)..(25): SEQ ID NO: 5218; WAN024DF3; Start 747; Stop 771
atatggagtaacctcttcaactatt

SEQ ID NO: 403772 - DNA, 25 bp, Artificial
  probe
  misc_feature (1)..(25): SEQ ID NO: 5218; WAN024DF3; Start 746; Stop 770
aatatggagtaacctcttcaactat

SEQ ID NO: 403773 - DNA, 25 bp, Artificial
  probe
  misc_feature (1)..(25): SEQ ID NO: 5218; WAN024DF3; Start 830; Stop 854
atcctaagcacttgagagaagttag

SEQ ID NO: 403774 - DNA, 25 bp, Artificial
  probe
  misc_feature (1)..(25): SEQ ID NO: 5218; WAN024DF3; Start 829; Stop 853
aatcctaagcacttgagagaagtta

SEQ ID NO: 403775 - DNA, 25 bp, Artificial
  probe
  misc_feature (1)..(25): SEQ ID NO: 5218; WAN024DF3; Start 376; Stop 400
ttgatggaatctgaccaagtagcag

SEQ ID NO: 403776 - DNA, 25 bp, Artificial
  probe
  misc_feature (1)..(25): SEQ ID NO: 5218; WAN024DF3; Start 174; Stop 198
tgaagaactgttaggtcttgtccta

SEQ ID NO: 403777 - DNA, 25 bp, Artificial
  probe
  misc_feature (1)..(25): SEQ ID NO: 5219; WAN024FWW; Start 470; Stop 494
cgtatatcattgttggattaggtgg

SEQ ID NO: 403778 - DNA, 25 bp, Artificial
  probe
  misc_feature (1)..(25): SEQ ID NO: 5219; WAN024FWW; Start 469; Stop 493
ccgtatatcattgttggattaggtg

SEQ ID NO: 403779 - DNA, 25 bp, Artificial
  probe
  misc_feature (1)..(25): SEQ ID NO: 5219; WAN024FWW; Start 885; Stop 909
cgttaattcagcacacaatacctta

SEQ ID NO: 403780 - DNA, 25 bp, Artificial
  probe
  misc_feature (1)..(25): SEQ ID NO: 5219; WAN024FWW; Start 882; Stop 906
tatcgttaattcagcacacaatacc

SEQ ID NO: 403781 - DNA, 25 bp, Artificial
  probe
  misc_feature (1)..(25): SEQ ID NO: 5219; WAN024FWW; Start 883; Stop 907
atcgttaattcagcacacaatacct

SEQ ID NO: 403782 - DNA, 25 bp, Artificial
  probe
  misc_feature (1)..(25): SEQ ID NO: 5219; WAN024FWW; Start 884; Stop 908
tcgttaattcagcacacaatacctt

SEQ ID NO: 403783 - DNA, 25 bp, Artificial
  probe
  misc_feature (1)..(25): SEQ ID NO: 5219; WAN024FWW; Start 878; Stop 902
ggattatcgttaattcagcacacaa

SEQ ID NO: 403784 - DNA, 25 bp, Artificial
  probe
  misc_feature (1)..(25): SEQ ID NO: 5219; WAN024FWW; Start 471; Stop 495
gtatatcattgttggattaggtggt

SEQ ID NO: 403785 - DNA, 25 bp, Artificial
  probe
  misc_feature (1)..(25): SEQ ID NO: 5219; WAN024FWW; Start 1044; Stop 1068
tacaatggagacttcatctatgagc

SEQ ID NO: 403786 - DNA, 25 bp, Artificial
  probe
  misc_feature (1)..(25): SEQ ID NO: 5219; WAN024FWW; Start 1046; Stop 1070
caatggagacttcatctatgagcat

SEQ ID NO: 403787 - DNA, 25 bp, Artificial
  probe
  misc_feature (1)..(25): SEQ ID NO: 5219; WAN024FWW; Start 879; Stop 903
gattatcgttaattcagcacacaat

SEQ ID NO: 403788 - DNA, 25 bp, Artificial
  probe
  misc_feature (1)..(25): SEQ ID NO: 5219; WAN024FWW; Start 881; Stop 905
ttatcgttaattcagcacacaatac

SEQ ID NO: 403789 - DNA, 25 bp, Artificial
  probe
  misc_feature (1)..(25): SEQ ID NO: 5219; WAN024FWW; Start 1049; Stop 1073
tggagacttcatctatgagcatatt

SEQ ID NO: 403790 - DNA, 25 bp, Artificial
  probe
  misc_feature (1)..(25): SEQ ID NO: 5219; WAN024FWW; Start 1047; Stop 1071
aatggagacttcatctatgagcata

SEQ ID NO: 403791 - DNA, 25 bp, Artificial
  probe
  misc_feature (1)..(25): SEQ ID NO: 5219; WAN024FWW; Start 1050; Stop 1074
ggagacttcatctatgagcatattg

SEQ ID NO: 403792 - DNA, 25 bp, Artificial
  probe
  misc_feature (1)..(25): SEQ ID NO: 5219; WAN024FWW; Start 1048; Stop 1072
atggagacttcatctatgagcatat

SEQ ID NO: 403793 - DNA, 25 bp, Artificial
  probe
  misc_feature (1)..(25): SEQ ID NO: 5219; WAN024FWW; Start 891; Stop 915
ttcagcacacaataccttattagat

SEQ ID NO: 403794 - DNA, 25 bp, Artificial
  probe
  misc_feature (1)..(25): SEQ ID NO: 5219; WAN024FWW; Start 890; Stop 914
attcagcacacaataccttattaga

SEQ ID NO: 403795 - DNA, 25 bp, Artificial
  probe
  misc_feature (1)..(25): SEQ ID NO: 5219; WAN024FWW; Start 472; Stop 496
tatatcattgttggattaggtggtt

SEQ ID NO: 403796 - DNA, 25 bp, Artificial
  probe
  misc_feature (1)..(25): SEQ ID NO: 5219; WAN024FWW; Start 886; Stop 910
gttaattcagcacacaataccttat

SEQ ID NO: 403797 - DNA, 25 bp, Artificial
  probe
  misc_feature (1)..(25): SEQ ID NO: 5219; WAN024FWW; Start 1045; Stop 1069
acaatggagacttcatctatgagca

SEQ ID NO: 403798 - DNA, 25 bp, Artificial
  probe
  misc_feature (1)..(25): SEQ ID NO: 5219; WAN024FWW; Start 83; Stop 107
cgactttatttgctttgctttctac

SEQ ID NO: 403799 - DNA, 25 bp, Artificial
  probe
  misc_feature (1)..(25): SEQ ID NO: 5219; WAN024FWW; Start 468; Stop 492
cccgtatatcattgttggattaggt

SEQ ID NO: 403800 - DNA, 25 bp, Artificial
  probe
  misc_feature (1)..(25): SEQ ID NO: 5219; WAN024FWW; Start 1043; Stop 1067
ttacaatggagacttcatctatgag

SEQ ID NO: 403801 - DNA, 25 bp, Artificial
  probe
  misc_feature (1)..(25): SEQ ID NO: 5219; WAN024FWW; Start 889; Stop 913
aattcagcacacaataccttattag

SEQ ID NO: 403802 - DNA, 25 bp, Artificial
  probe
  misc_feature (1)..(25): SEQ ID NO: 5219; WAN024FWW; Start 892; Stop 916
tcagcacacaataccttattagata

SEQ ID NO: 403803 - DNA, 25 bp, Artificial
  probe
  misc_feature (1)..(25): SEQ ID NO: 5219; WAN024FWW; Start 590; Stop 614
ccagtacagcgattatatgttatgg

SEQ ID NO: 403804 - DNA, 25 bp, Artificial
  probe
  misc_feature (1)..(25): SEQ ID NO: 5219; WAN024FWW; Start 82; Stop 106
gcgactttatttgctttgctttcta

SEQ ID NO: 403805 - DNA, 25 bp, Artificial
  probe
  misc_feature (1)..(25): SEQ ID NO: 5219; WAN024FWW; Start 959; Stop 983
tgcttcttatgaatctgtttcttgg

SEQ ID NO: 403806 - DNA, 25 bp, Artificial
  probe
  misc_feature (1)..(25): SEQ ID NO: 5219; WAN024FWW; Start 960; Stop 984
gcttcttatgaatctgtttcttgga

SEQ ID NO: 403807 - DNA, 25 bp, Artificial
  probe
  misc_feature (1)..(25): SEQ ID NO: 5219; WAN024FWW; Start 880; Stop 904
attatcgttaattcagcacacaata

SEQ ID NO: 403808 - DNA, 25 bp, Artificial
  probe
  misc_feature (1)..(25): SEQ ID NO: 5219; WAN024FWW; Start 861; Stop 885
taatgcttggacaaatgggattatc

SEQ ID NO: 403809 - DNA, 25 bp, Artificial
  probe
  misc_feature (1)..(25): SEQ ID NO: 5219; WAN024FWW; Start 874; Stop 898
aatgggattatcgttaattcagcac

SEQ ID NO: 403810 - DNA, 25 bp, Artificial
  probe
  misc_feature (1)..(25): SEQ ID NO: 5220; WAN024D6H; Start 3; Stop 27
gatgataaccacagctaggatgata

SEQ ID NO: 403811 - DNA, 25 bp, Artificial
  probe
  misc_feature (1)..(25): SEQ ID NO: 5220; WAN024D6H; Start 5; Stop 29
tgataaccacagctaggatgataat

SEQ ID NO: 403812 - DNA, 25 bp, Artificial
  probe
  misc_feature (1)..(25): SEQ ID NO: 5220; WAN024D6H; Start 4; Stop 28
atgataaccacagctaggatgataa

SEQ ID NO: 403813 - DNA, 25 bp, Artificial
  probe
  misc_feature (1)..(25): SEQ ID NO: 5220; WAN024D6H; Start 6; Stop 30
gataaccacagctaggatgataatg

SEQ ID NO: 403814 - DNA, 25 bp, Artificial
  probe
  misc_feature (1)..(25): SEQ ID NO: 5220; WAN024D6H; Start 2; Stop 26
tgatgataaccacagctaggatgat

SEQ ID NO: 403815 - DNA, 25 bp, Artificial
  probe
  misc_feature (1)..(25): SEQ ID NO: 5220; WAN024D6H; Start 1; Stop 25
ttgatgataaccacagctaggatga

SEQ ID NO: 403816 - DNA, 25 bp, Artificial
  probe
  misc_feature (1)..(25): SEQ ID NO: 5220; WAN024D6H; Start 122; Stop 146
tgaatttgaccaagattgatcgttt

SEQ ID NO: 403817 - DNA, 25 bp, Artificial
  probe
  misc_feature (1)..(25): SEQ ID NO: 5220; WAN024D6H; Start 121; Stop 145
atgaatttgaccaagattgatcgtt

SEQ ID NO: 403818 - DNA, 25 bp, Artificial
  probe
  misc_feature (1)..(25): SEQ ID NO: 5220; WAN024D6H; Start 120; Stop 144
gatgaatttgaccaagattgatcgt

SEQ ID NO: 403819 - DNA, 25 bp, Artificial
  probe
  misc_feature (1)..(25): SEQ ID NO: 5220; WAN024D6H; Start 7; Stop 31
ataaccacagctaggatgataatgg

SEQ ID NO: 403820 - DNA, 25 bp, Artificial
  probe
  misc_feature (1)..(25): SEQ ID NO: 5220; WAN024D6H; Start 125; Stop 149
atttgaccaagattgatcgtttctc

SEQ ID NO: 403821 - DNA, 25 bp, Artificial
  probe
  misc_feature (1)..(25): SEQ ID NO: 5220; WAN024D6H; Start 22; Stop 46
atgataatggcatctgcgatatctt

SEQ ID NO: 403822 - DNA, 25 bp, Artificial
  probe
  misc_feature (1)..(25): SEQ ID NO: 5220; WAN024D6H; Start 123; Stop 147
gaatttgaccaagattgatcgtttc

SEQ ID NO: 403823 - DNA, 25 bp, Artificial
  probe
  misc_feature (1)..(25): SEQ ID NO: 5220; WAN024D6H; Start 124; Stop 148
aatttgaccaagattgatcgtttct

SEQ ID NO: 403824 - DNA, 25 bp, Artificial
  probe
  misc_feature (1)..(25): SEQ ID NO: 5220; WAN024D6H; Start 96; Stop 120
aatcatcaaatccttaaattgctcg

SEQ ID NO: 403825 - DNA, 25 bp, Artificial
  probe
  misc_feature (1)..(25): SEQ ID NO: 5220; WAN024D6H; Start 23; Stop 47
tgataatggcatctgcgatatcttc

SEQ ID NO: 403826 - DNA, 25 bp, Artificial
  probe
  misc_feature (1)..(25): SEQ ID NO: 5220; WAN024D6H; Start 24; Stop 48
gataatggcatctgcgatatcttcc

SEQ ID NO: 403827 - DNA, 25 bp, Artificial
  probe
  misc_feature (1)..(25): SEQ ID NO: 5220; WAN024D6H; Start 117; Stop 141
ctcgatgaatttgaccaagattgat

SEQ ID NO: 403828 - DNA, 25 bp, Artificial
  probe
  misc_feature (1)..(25): SEQ ID NO: 5220; WAN024D6H; Start 118; Stop 142
tcgatgaatttgaccaagattgatc

SEQ ID NO: 403829 - DNA, 25 bp, Artificial
  probe
  misc_feature (1)..(25): SEQ ID NO: 5220; WAN024D6H; Start 126; Stop 150
tttgaccaagattgatcgtttctcg

SEQ ID NO: 403830 - DNA, 25 bp, Artificial
  probe
  misc_feature (1)..(25): SEQ ID NO: 5220; WAN024D6H; Start 18; Stop 42
taggatgataatggcatctgcgata

SEQ ID NO: 403831 - DNA, 25 bp, Artificial
  probe
  misc_feature (1)..(25): SEQ ID NO: 5220; WAN024D6H; Start 8; Stop 32
taaccacagctaggatgataatggc

SEQ ID NO: 403832 - DNA, 25 bp, Artificial
  probe
  misc_feature (1)..(25): SEQ ID NO: 5220; WAN024D6H; Start 98; Stop 122
tcatcaaatccttaaattgctcgat

SEQ ID NO: 403833 - DNA, 25 bp, Artificial
  probe
  misc_feature (1)..(25): SEQ ID NO: 5220; WAN024D6H; Start 97; Stop 121
atcatcaaatccttaaattgctcga

SEQ ID NO: 403834 - DNA, 25 bp, Artificial
  probe
  misc_feature (1)..(25): SEQ ID NO: 5220; WAN024D6H; Start 101; Stop 125
tcaaatccttaaattgctcgatgaa

SEQ ID NO: 403835 - DNA, 25 bp, Artificial
  probe
  misc_feature (1)..(25): SEQ ID NO: 5220; WAN024D6H; Start 100; Stop 124
atcaaatccttaaattgctcgatga

SEQ ID NO: 403836 - DNA, 25 bp, Artificial
  probe
  misc_feature (1)..(25): SEQ ID NO: 5220; WAN024D6H; Start 113; Stop 137
attgctcgatgaatttgaccaagat

SEQ ID NO: 403837 - DNA, 25 bp, Artificial
  probe
  misc_feature (1)..(25): SEQ ID NO: 5220; WAN024D6H; Start 19; Stop 43
aggatgataatggcatctgcgatat

SEQ ID NO: 403838 - DNA, 25 bp, Artificial
  probe
  misc_feature (1)..(25): SEQ ID NO: 5220; WAN024D6H; Start 116; Stop 140
gctcgatgaatttgaccaagattga

SEQ ID NO: 403839 - DNA, 25 bp, Artificial
  probe
  misc_feature (1)..(25): SEQ ID NO: 5220; WAN024D6H; Start 114; Stop 138
ttgctcgatgaatttgaccaagatt

SEQ ID NO: 403840 - DNA, 25 bp, Artificial
  probe
  misc_feature (1)..(25): SEQ ID NO: 5220; WAN024D6H; Start 102; Stop 126
caaatccttaaattgctcgatgaat

SEQ ID NO: 403841 - DNA, 25 bp, Artificial
  probe
  misc_feature (1)..(25): SEQ ID NO: 5220; WAN024D6H; Start 115; Stop 139
tgctcgatgaatttgaccaagattg

SEQ ID NO: 403842 - DNA, 25 bp, Artificial
  probe
  misc_feature (1)..(25): SEQ ID NO: 5220; WAN024D6H; Start 112; Stop 136
aattgctcgatgaatttgaccaaga

SEQ ID NO: 403843 - DNA, 25 bp, Artificial
  probe
  misc_feature (1)..(25): SEQ ID NO: 5221; WAN024DWT; Start 109; Stop 133
atcttacctcttgttctggattatc

SEQ ID NO: 403844 - DNA, 25 bp, Artificial
  probe
  misc_feature (1)..(25): SEQ ID NO: 5221; WAN024DWT; Start 175; Stop 199
ctatttcattcacaccttcatctgg

SEQ ID NO: 403845 - DNA, 25 bp, Artificial
  probe
  misc_feature (1)..(25): SEQ ID NO: 5221; WAN024DWT; Start 174; Stop 198
cctatttcattcacaccttcatctg

SEQ ID NO: 403846 - DNA, 25 bp, Artificial
  probe
  misc_feature (1)..(25): SEQ ID NO: 5221; WAN024DWT; Start 173; Stop 197
tcctatttcattcacaccttcatct

SEQ ID NO: 403847 - DNA, 25 bp, Artificial
  probe
  misc_feature (1)..(25): SEQ ID NO: 5221; WAN024DWT; Start 170; Stop 194
cattcctatttcattcacaccttca

SEQ ID NO: 403848 - DNA, 25 bp, Artificial
  probe
  misc_feature (1)..(25): SEQ ID NO: 5221; WAN024DWT; Start 169; Stop 193
acattcctatttcattcacaccttc

SEQ ID NO: 403849 - DNA, 25 bp, Artificial
  probe
  misc_feature (1)..(25): SEQ ID NO: 5221; WAN024DWT; Start 168; Stop 192
gacattcctatttcattcacacctt

SEQ ID NO: 403850 - DNA, 25 bp, Artificial
  probe
  misc_feature (1)..(25): SEQ ID NO: 5221; WAN024DWT; Start 110; Stop 134
tcttacctcttgttctggattatcc

SEQ ID NO: 403851 - DNA, 25 bp, Artificial
  probe
  misc_feature (1)..(25): SEQ ID NO: 5221; WAN024DWT; Start 172; Stop 196
ttcctatttcattcacaccttcatc

SEQ ID NO: 403852 - DNA, 25 bp, Artificial
  probe
  misc_feature (1)..(25): SEQ ID NO: 5221; WAN024DWT; Start 213; Stop 237
attgctactcccttccctaaattaa

SEQ ID NO: 403853 - DNA, 25 bp, Artificial
  probe
  misc_feature (1)..(25): SEQ ID NO: 5221; WAN024DWT; Start 176; Stop 200
tatttcattcacaccttcatctggc

SEQ ID NO: 403854 - DNA, 25 bp, Artificial
  probe
  misc_feature (1)..(25): SEQ ID NO: 5221; WAN024DWT; Start 107; Stop 131
caatcttacctcttgttctggatta

SEQ ID NO: 403855 - DNA, 25 bp, Artificial
  probe
  misc_feature (1)..(25): SEQ ID NO: 5221; WAN024DWT; Start 132; Stop 156
tccaataaataaatcggttcttcca

SEQ ID NO: 403856 - DNA, 25 bp, Artificial
  probe
  misc_feature (1)..(25): SEQ ID NO: 5221; WAN024DWT; Start 167; Stop 191
tgacattcctatttcattcacacct

SEQ ID NO: 403857 - DNA, 25 bp, Artificial
  probe
  misc_feature (1)..(25): SEQ ID NO: 5221; WAN024DWT; Start 166; Stop 190
ttgacattcctatttcattcacacc

SEQ ID NO: 403858 - DNA, 25 bp, Artificial
  probe
  misc_feature (1)..(25): SEQ ID NO: 5221; WAN024DWT; Start 171; Stop 195
attcctatttcattcacaccttcat

SEQ ID NO: 403859 - DNA, 25 bp, Artificial
  probe
  misc_feature (1)..(25): SEQ ID NO: 5221; WAN024DWT; Start 93; Stop 117
gcaatacaaatcaacaatcttacct

SEQ ID NO: 403860 - DNA, 25 bp, Artificial
  probe
  misc_feature (1)..(25): SEQ ID NO: 5221; WAN024DWT; Start 211; Stop 235
gaattgctactcccttccctaaatt

SEQ ID NO: 403861 - DNA, 25 bp, Artificial
  probe
  misc_feature (1)..(25): SEQ ID NO: 5221; WAN024DWT; Start 212; Stop 236
aattgctactcccttccctaaatta

SEQ ID NO: 403862 - DNA, 25 bp, Artificial
  probe
  misc_feature (1)..(25): SEQ ID NO: 5221; WAN024DWT; Start 133; Stop 157
ccaataaataaatcggttcttccaa

SEQ ID NO: 403863 - DNA, 25 bp, Artificial
  probe
  misc_feature (1)..(25): SEQ ID NO: 5221; WAN024DWT; Start 108; Stop 132
aatcttacctcttgttctggattat

SEQ ID NO: 403864 - DNA, 25 bp, Artificial
  probe
  misc_feature (1)..(25): SEQ ID NO: 5221; WAN024DWT; Start 53; Stop 77
atgtgacaaagcctttaaatgactc

SEQ ID NO: 403865 - DNA, 25 bp, Artificial
  probe
  misc_feature (1)..(25): SEQ ID NO: 5221; WAN024DWT; Start 55; Stop 79
gtgacaaagcctttaaatgactctc

SEQ ID NO: 403866 - DNA, 25 bp, Artificial
  probe
  misc_feature (1)..(25): SEQ ID NO: 5221; WAN024DWT; Start 52; Stop 76
aatgtgacaaagcctttaaatgact

SEQ ID NO: 403867 - DNA, 25 bp, Artificial
  probe
  misc_feature (1)..(25): SEQ ID NO: 5221; WAN024DWT; Start 54; Stop 78
tgtgacaaagcctttaaatgactct

SEQ ID NO: 403868 - DNA, 25 bp, Artificial
  probe
  misc_feature (1)..(25): SEQ ID NO: 5221; WAN024DWT; Start 165; Stop 189
attgacattcctatttcattcacac

SEQ ID NO: 403869 - DNA, 25 bp, Artificial
  probe
  misc_feature (1)..(25): SEQ ID NO: 5221; WAN024DWT; Start 164; Stop 188
cattgacattcctatttcattcaca

SEQ ID NO: 403870 - DNA, 25 bp, Artificial
  probe
  misc_feature (1)..(25): SEQ ID NO: 5221; WAN024DWT; Start 163; Stop 187
acattgacattcctatttcattcac

SEQ ID NO: 403871 - DNA, 25 bp, Artificial
  probe
  misc_feature (1)..(25): SEQ ID NO: 5221; WAN024DWT; Start 131; Stop 155
atccaataaataaatcggttcttcc

SEQ ID NO: 403872 - DNA, 25 bp, Artificial
  probe
  misc_feature (1)..(25): SEQ ID NO: 5221; WAN024DWT; Start 77; Stop 101
ctcattatcaatggctgcaatacaa

SEQ ID NO: 403873 - DNA, 25 bp, Artificial
  probe
  misc_feature (1)..(25): SEQ ID NO: 5221; WAN024DWT; Start 75; Stop 99
ctctcattatcaatggctgcaatac

SEQ ID NO: 403874 - DNA, 25 bp, Artificial
  probe
  misc_feature (1)..(25): SEQ ID NO: 5221; WAN024DWT; Start 51; Stop 75
aaatgtgacaaagcctttaaatgac

SEQ ID NO: 403875 - DNA, 25 bp, Artificial
  probe
  misc_feature (1)..(25): SEQ ID NO: 5221; WAN024DWT; Start 74; Stop 98
actctcattatcaatggctgcaata

SEQ ID NO: 403876 - DNA, 25 bp, Artificial
  probe
  misc_feature (1)..(25): SEQ ID NO: 5222; WAN024AV2; Start 116; Stop 140
aaagtcaggatataaagaacggagt

SEQ ID NO: 403877 - DNA, 25 bp, Artificial
  probe
  misc_feature (1)..(25): SEQ ID NO: 5222; WAN024AV2; Start 135; Stop 159
cggagttaatgcctttgtagatgat

SEQ ID NO: 403878 - DNA, 25 bp, Artificial
  probe
  misc_feature (1)..(25): SEQ ID NO: 5222; WAN024AV2; Start 123; Stop 147
ggatataaagaacggagttaatgcc

SEQ ID NO: 403879 - DNA, 25 bp, Artificial
  probe
  misc_feature (1)..(25): SEQ ID NO: 5222; WAN024AV2; Start 117; Stop 141
aagtcaggatataaagaacggagtt

SEQ ID NO: 403880 - DNA, 25 bp, Artificial
  probe
  misc_feature (1)..(25): SEQ ID NO: 5222; WAN024AV2; Start 132; Stop 156
gaacggagttaatgcctttgtagat

SEQ ID NO: 403881 - DNA, 25 bp, Artificial
  probe
  misc_feature (1)..(25): SEQ ID NO: 5222; WAN024AV2; Start 118; Stop 142
agtcaggatataaagaacggagtta

SEQ ID NO: 403882 - DNA, 25 bp, Artificial
  probe
  misc_feature (1)..(25): SEQ ID NO: 5222; WAN024AV2; Start 136; Stop 160
ggagttaatgcctttgtagatgata

SEQ ID NO: 403883 - DNA, 25 bp, Artificial
  probe
  misc_feature (1)..(25): SEQ ID NO: 5222; WAN024AV2; Start 133; Stop 157
aacggagttaatgcctttgtagatg

SEQ ID NO: 403884 - DNA, 25 bp, Artificial
  probe
  misc_feature (1)..(25): SEQ ID NO: 5222; WAN024AV2; Start 130; Stop 154
aagaacggagttaatgcctttgtag

SEQ ID NO: 403885 - DNA, 25 bp, Artificial
  probe
  misc_feature (1)..(25): SEQ ID NO: 5222; WAN024AV2; Start 124; Stop 148
gatataaagaacggagttaatgcct

SEQ ID NO: 403886 - DNA, 25 bp, Artificial
  probe
  misc_feature (1)..(25): SEQ ID NO: 5222; WAN024AV2; Start 122; Stop 146
aggatataaagaacggagttaatgc

SEQ ID NO: 403887 - DNA, 25 bp, Artificial
  probe
  misc_feature (1)..(25): SEQ ID NO: 5222; WAN024AV2; Start 125; Stop 149
atataaagaacggagttaatgcctt

SEQ ID NO: 403888 - DNA, 25 bp, Artificial
  probe
  misc_feature (1)..(25): SEQ ID NO: 5222; WAN024AV2; Start 134; Stop 158
acggagttaatgcctttgtagatga

SEQ ID NO: 403889 - DNA, 25 bp, Artificial
  probe
  misc_feature (1)..(25): SEQ ID NO: 5222; WAN024AV2; Start 119; Stop 143
gtcaggatataaagaacggagttaa

SEQ ID NO: 403890 - DNA, 25 bp, Artificial
  probe
  misc_feature (1)..(25): SEQ ID NO: 5222; WAN024AV2; Start 131; Stop 155
agaacggagttaatgcctttgtaga

SEQ ID NO: 403891 - DNA, 25 bp, Artificial
  probe
  misc_feature (1)..(25): SEQ ID NO: 5222; WAN024AV2; Start 8; Stop 32
ccaattatccatgtgagtttgaggt

SEQ ID NO: 403892 - DNA, 25 bp, Artificial
  probe
  misc_feature (1)..(25): SEQ ID NO: 5222; WAN024AV2; Start 11; Stop 35
attatccatgtgagtttgaggtaac

SEQ ID NO: 403893 - DNA, 25 bp, Artificial
  probe
  misc_feature (1)..(25): SEQ ID NO: 5222; WAN024AV2; Start 12; Stop 36
ttatccatgtgagtttgaggtaaca

SEQ ID NO: 403894 - DNA, 25 bp, Artificial
  probe
  misc_feature (1)..(25): SEQ ID NO: 5222; WAN024AV2; Start 9; Stop 33
caattatccatgtgagtttgaggta

SEQ ID NO: 403895 - DNA, 25 bp, Artificial
  probe
  misc_feature (1)..(25): SEQ ID NO: 5222; WAN024AV2; Start 10; Stop 34
aattatccatgtgagtttgaggtaa

SEQ ID NO: 403896 - DNA, 25 bp, Artificial
  probe
  misc_feature (1)..(25): SEQ ID NO: 5222; WAN024AV2; Start 7; Stop 31
cccaattatccatgtgagtttgagg

SEQ ID NO: 403897 - DNA, 25 bp, Artificial
  probe
  misc_feature (1)..(25): SEQ ID NO: 5222; WAN024AV2; Start 144; Stop 168
tgcctttgtagatgataatcagaat

SEQ ID NO: 403898 - DNA, 25 bp, Artificial
  probe
  misc_feature (1)..(25): SEQ ID NO: 5222; WAN024AV2; Start 143; Stop 167
atgcctttgtagatgataatcagaa

SEQ ID NO: 403899 - DNA, 25 bp, Artificial
  probe
  misc_feature (1)..(25): SEQ ID NO: 5222; WAN024AV2; Start 142; Stop 166
aatgcctttgtagatgataatcaga

SEQ ID NO: 403900 - DNA, 25 bp, Artificial
  probe
  misc_feature (1)..(25): SEQ ID NO: 5222; WAN024AV2; Start 121; Stop 145
caggatataaagaacggagttaatg

SEQ ID NO: 403901 - DNA, 25 bp, Artificial
  probe
  misc_feature (1)..(25): SEQ ID NO: 5222; WAN024AV2; Start 120; Stop 144
tcaggatataaagaacggagttaat

SEQ ID NO: 403902 - DNA, 25 bp, Artificial
  probe
  misc_feature (1)..(25): SEQ ID NO: 5222; WAN024AV2; Start 127; Stop 151
ataaagaacggagttaatgcctttg

SEQ ID NO: 403903 - DNA, 25 bp, Artificial
  probe
  misc_feature (1)..(25): SEQ ID NO: 5222; WAN024AV2; Start 6; Stop 30
gcccaattatccatgtgagtttgag

SEQ ID NO: 403904 - DNA, 25 bp, Artificial
  probe
  misc_feature (1)..(25): SEQ ID NO: 5222; WAN024AV2; Start 129; Stop 153
aaagaacggagttaatgcctttgta

SEQ ID NO: 403905 - DNA, 25 bp, Artificial
  probe
  misc_feature (1)..(25): SEQ ID NO: 5222; WAN024AV2; Start 128; Stop 152
taaagaacggagttaatgcctttgt

SEQ ID NO: 403906 - DNA, 25 bp, Artificial
  probe
  misc_feature (1)..(25): SEQ ID NO: 5222; WAN024AV2; Start 145; Stop 169
gcctttgtagatgataatcagaatc

SEQ ID NO: 403907 - DNA, 25 bp, Artificial
  probe
  misc_feature (1)..(25): SEQ ID NO: 5222; WAN024AV2; Start 137; Stop 161
gagttaatgcctttgtagatgataa

SEQ ID NO: 403908 - DNA, 25 bp, Artificial
  probe
  misc_feature (1)..(25): SEQ ID NO: 5222; WAN024AV2; Start 126; Stop 150
tataaagaacggagttaatgccttt

SEQ ID NO: 403909 - DNA, 25 bp, Artificial
  probe
  misc_feature (1)..(25): SEQ ID NO: 5223; WAN024DTG; Start 89; Stop 113
gaagtgacaagagagagctaactaa

SEQ ID NO: 403910 - DNA, 25 bp, Artificial
  probe
  misc_feature (1)..(25): SEQ ID NO: 5223; WAN024DTG; Start 90; Stop 114
aagtgacaagagagagctaactaat

SEQ ID NO: 403911 - DNA, 25 bp, Artificial
  probe
  misc_feature (1)..(25): SEQ ID NO: 5223; WAN024DTG; Start 57; Stop 81
ttcaaaggctggactttatggtaaa

SEQ ID NO: 403912 - DNA, 25 bp, Artificial
  probe
  misc_feature (1)..(25): SEQ ID NO: 5223; WAN024DTG; Start 56; Stop 80
cttcaaaggctggactttatggtaa

SEQ ID NO: 403913 - DNA, 25 bp, Artificial
  probe
  misc_feature (1)..(25): SEQ ID NO: 5223; WAN024DTG; Start 52; Stop 76
agttcttcaaaggctggactttatg

SEQ ID NO: 403914 - DNA, 25 bp, Artificial
  probe
  misc_feature (1)..(25): SEQ ID NO: 5223; WAN024DTG; Start 45; Stop 69
tagtaaaagttcttcaaaggctgga

SEQ ID NO: 403915 - DNA, 25 bp, Artificial
  probe
  misc_feature (1)..(25): SEQ ID NO: 5223; WAN024DTG; Start 55; Stop 79
tcttcaaaggctggactttatggta

SEQ ID NO: 403916 - DNA, 25 bp, Artificial
  probe
  misc_feature (1)..(25): SEQ ID NO: 5223; WAN024DTG; Start 44; Stop 68
ctagtaaaagttcttcaaaggctgg

SEQ ID NO: 403917 - DNA, 25 bp, Artificial
  probe
  misc_feature (1)..(25): SEQ ID NO: 5223; WAN024DTG; Start 53; Stop 77
gttcttcaaaggctggactttatgg

SEQ ID NO: 403918 - DNA, 25 bp, Artificial
  probe
  misc_feature (1)..(25): SEQ ID NO: 5223; WAN024DTG; Start 51; Stop 75
aagttcttcaaaggctggactttat

SEQ ID NO: 403919 - DNA, 25 bp, Artificial
  probe
  misc_feature (1)..(25): SEQ ID NO: 5223; WAN024DTG; Start 62; Stop 86
aggctggactttatggtaaaataga

SEQ ID NO: 403920 - DNA, 25 bp, Artificial
  probe
  misc_feature (1)..(25): SEQ ID NO: 5223; WAN024DTG; Start 46; Stop 70
agtaaaagttcttcaaaggctggac

SEQ ID NO: 403921 - DNA, 25 bp, Artificial
  probe
  misc_feature (1)..(25): SEQ ID NO: 5223; WAN024DTG; Start 33; Stop 57
ccccttgtcttctagtaaaagttct

SEQ ID NO: 403922 - DNA, 25 bp, Artificial
  probe
  misc_feature (1)..(25): SEQ ID NO: 5223; WAN024DTG; Start 43; Stop 67
tctagtaaaagttcttcaaaggctg

SEQ ID NO: 403923 - DNA, 25 bp, Artificial
  probe
  misc_feature (1)..(25): SEQ ID NO: 5223; WAN024DTG; Start 63; Stop 87
ggctggactttatggtaaaatagaa

SEQ ID NO: 403924 - DNA, 25 bp, Artificial
  probe
  misc_feature (1)..(25): SEQ ID NO: 5223; WAN024DTG; Start 61; Stop 85
aaggctggactttatggtaaaatag

SEQ ID NO: 403925 - DNA, 25 bp, Artificial
  probe
  misc_feature (1)..(25): SEQ ID NO: 5223; WAN024DTG; Start 54; Stop 78
ttcttcaaaggctggactttatggt

SEQ ID NO: 403926 - DNA, 25 bp, Artificial
  probe
  misc_feature (1)..(25): SEQ ID NO: 5223; WAN024DTG; Start 32; Stop 56
gccccttgtcttctagtaaaagttc

SEQ ID NO: 403927 - DNA, 25 bp, Artificial
  probe
  misc_feature (1)..(25): SEQ ID NO: 5223; WAN024DTG; Start 47; Stop 71
gtaaaagttcttcaaaggctggact

SEQ ID NO: 403928 - DNA, 25 bp, Artificial
  probe
  misc_feature (1)..(25): SEQ ID NO: 5223; WAN024DTG; Start 42; Stop 66
ttctagtaaaagttcttcaaaggct

SEQ ID NO: 403929 - DNA, 25 bp, Artificial
  probe
  misc_feature (1)..(25): SEQ ID NO: 5223; WAN024DTG; Start 31; Stop 55
agccccttgtcttctagtaaaagtt

SEQ ID NO: 403930 - DNA, 25 bp, Artificial
  probe
  misc_feature (1)..(25): SEQ ID NO: 5223; WAN024DTG; Start 30; Stop 54
aagccccttgtcttctagtaaaagt

SEQ ID NO: 403931 - DNA, 25 bp, Artificial
  probe
  misc_feature (1)..(25): SEQ ID NO: 5223; WAN024DTG; Start 34; Stop 58
cccttgtcttctagtaaaagttctt

SEQ ID NO: 403932 - DNA, 25 bp, Artificial
  probe
  misc_feature (1)..(25): SEQ ID NO: 5223; WAN024DTG; Start 41; Stop 65
cttctagtaaaagttcttcaaaggc

SEQ ID NO: 403933 - DNA, 25 bp, Artificial
  probe
  misc_feature (1)..(25): SEQ ID NO: 5223; WAN024DTG; Start 59; Stop 83
caaaggctggactttatggtaaaat

SEQ ID NO: 403934 - DNA, 25 bp, Artificial
  probe
  misc_feature (1)..(25): SEQ ID NO: 5223; WAN024DTG; Start 35; Stop 59
ccttgtcttctagtaaaagttcttc

SEQ ID NO: 403935 - DNA, 25 bp, Artificial
  probe
  misc_feature (1)..(25): SEQ ID NO: 5223; WAN024DTG; Start 58; Stop 82
tcaaaggctggactttatggtaaaa

SEQ ID NO: 403936 - DNA, 25 bp, Artificial
  probe
  misc_feature (1)..(25): SEQ ID NO: 5223; WAN024DTG; Start 60; Stop 84
aaaggctggactttatggtaaaata

SEQ ID NO: 403937 - DNA, 25 bp, Artificial
  probe
  misc_feature (1)..(25): SEQ ID NO: 5223; WAN024DTG; Start 48; Stop 72
taaaagttcttcaaaggctggactt

SEQ ID NO: 403938 - DNA, 25 bp, Artificial
  probe
  misc_feature (1)..(25): SEQ ID NO: 5223; WAN024DTG; Start 40; Stop 64
tcttctagtaaaagttcttcaaagg

SEQ ID NO: 403939 - DNA, 25 bp, Artificial
  probe
  misc_feature (1)..(25): SEQ ID NO: 5223; WAN024DTG; Start 36; Stop 60
cttgtcttctagtaaaagttcttca

SEQ ID NO: 403940 - DNA, 25 bp, Artificial
  probe
  misc_feature (1)..(25): SEQ ID NO: 5223; WAN024DTG; Start 29; Stop 53
gaagccccttgtcttctagtaaaag

SEQ ID NO: 403941 - DNA, 25 bp, Artificial
  probe
  misc_feature (1)..(25): SEQ ID NO: 5223; WAN024DTG; Start 38; Stop 62
tgtcttctagtaaaagttcttcaaa

SEQ ID NO: 403942 - DNA, 25 bp, Artificial
  probe
  misc_feature (1)..(25): SEQ ID NO: 5224; WAN024CYQ; Start 126; Stop 150
ttcattgataatattggttacacgg

SEQ ID NO: 403943 - DNA, 25 bp, Artificial
  probe
  misc_feature (1)..(25): SEQ ID NO: 5224; WAN024CYQ; Start 72; Stop 96
catgtattccaagagtaaatcacgg

SEQ ID NO: 403944 - DNA, 25 bp, Artificial
  probe
  misc_feature (1)..(25): SEQ ID NO: 5224; WAN024CYQ; Start 71; Stop 95
tcatgtattccaagagtaaatcacg

SEQ ID NO: 403945 - DNA, 25 bp, Artificial
  probe
  misc_feature (1)..(25): SEQ ID NO: 5224; WAN024CYQ; Start 128; Stop 152
cattgataatattggttacacgggc

SEQ ID NO: 403946 - DNA, 25 bp, Artificial
  probe
  misc_feature (1)..(25): SEQ ID NO: 5224; WAN024CYQ; Start 129; Stop 153
attgataatattggttacacgggca

SEQ ID NO: 403947 - DNA, 25 bp, Artificial
  probe
  misc_feature (1)..(25): SEQ ID NO: 5224; WAN024CYQ; Start 127; Stop 151
tcattgataatattggttacacggg

SEQ ID NO: 403948 - DNA, 25 bp, Artificial
  probe
  misc_feature (1)..(25): SEQ ID NO: 5224; WAN024CYQ; Start 73; Stop 97
atgtattccaagagtaaatcacgga

SEQ ID NO: 403949 - DNA, 25 bp, Artificial
  probe
  misc_feature (1)..(25): SEQ ID NO: 5224; WAN024CYQ; Start 43; Stop 67
tattcagtcatctctgggtactctt

SEQ ID NO: 403950 - DNA, 25 bp, Artificial
  probe
  misc_feature (1)..(25): SEQ ID NO: 5224; WAN024CYQ; Start 42; Stop 66
gtattcagtcatctctgggtactct

SEQ ID NO: 403951 - DNA, 25 bp, Artificial
  probe
  misc_feature (1)..(25): SEQ ID NO: 5224; WAN024CYQ; Start 130; Stop 154
ttgataatattggttacacgggcac

SEQ ID NO: 403952 - DNA, 25 bp, Artificial
  probe
  misc_feature (1)..(25): SEQ ID NO: 5224; WAN024CYQ; Start 44; Stop 68
attcagtcatctctgggtactcttt

SEQ ID NO: 403953 - DNA, 25 bp, Artificial
  probe
  misc_feature (1)..(25): SEQ ID NO: 5224; WAN024CYQ; Start 41; Stop 65
cgtattcagtcatctctgggtactc

SEQ ID NO: 403954 - DNA, 25 bp, Artificial
  probe
  misc_feature (1)..(25): SEQ ID NO: 5224; WAN024CYQ; Start 70; Stop 94
ttcatgtattccaagagtaaatcac

SEQ ID NO: 403955 - DNA, 25 bp, Artificial
  probe
  misc_feature (1)..(25): SEQ ID NO: 5224; WAN024CYQ; Start 125; Stop 149
attcattgataatattggttacacg

SEQ ID NO: 403956 - DNA, 25 bp, Artificial
  probe
  misc_feature (1)..(25): SEQ ID NO: 5224; WAN024CYQ; Start 131; Stop 155
tgataatattggttacacgggcacg

SEQ ID NO: 403957 - DNA, 25 bp, Artificial
  probe
  misc_feature (1)..(25): SEQ ID NO: 5224; WAN024CYQ; Start 36; Stop 60
aaagacgtattcagtcatctctggg

SEQ ID NO: 403958 - DNA, 25 bp, Artificial
  probe
  misc_feature (1)..(25): SEQ ID NO: 5224; WAN024CYQ; Start 39; Stop 63
gacgtattcagtcatctctgggtac

SEQ ID NO: 403959 - DNA, 25 bp, Artificial
  probe
  misc_feature (1)..(25): SEQ ID NO: 5224; WAN024CYQ; Start 38; Stop 62
agacgtattcagtcatctctgggta

SEQ ID NO: 403960 - DNA, 25 bp, Artificial
  probe
  misc_feature (1)..(25): SEQ ID NO: 5224; WAN024CYQ; Start 69; Stop 93
tttcatgtattccaagagtaaatca

SEQ ID NO: 403961 - DNA, 25 bp, Artificial
  probe
  misc_feature (1)..(25): SEQ ID NO: 5224; WAN024CYQ; Start 12; Stop 36
gatttcggccaattcttcttctgaa

SEQ ID NO: 403962 - DNA, 25 bp, Artificial
  probe
  misc_feature (1)..(25): SEQ ID NO: 5224; WAN024CYQ; Start 156; Stop 180
gacggatttcacaccttttgattca

SEQ ID NO: 403963 - DNA, 25 bp, Artificial
  probe
  misc_feature (1)..(25): SEQ ID NO: 5224; WAN024CYQ; Start 40; Stop 64
acgtattcagtcatctctgggtact

SEQ ID NO: 403964 - DNA, 25 bp, Artificial
  probe
  misc_feature (1)..(25): SEQ ID NO: 5224; WAN024CYQ; Start 223; Stop 247
aaatcaacgtcaaagagcaagcaac

SEQ ID NO: 403965 - DNA, 25 bp, Artificial
  probe
  misc_feature (1)..(25): SEQ ID NO: 5224; WAN024CYQ; Start 222; Stop 246
caaatcaacgtcaaagagcaagcaa

SEQ ID NO: 403966 - DNA, 25 bp, Artificial
  probe
  misc_feature (1)..(25): SEQ ID NO: 5224; WAN024CYQ; Start 157; Stop 181
acggatttcacaccttttgattcaa

SEQ ID NO: 403967 - DNA, 25 bp, Artificial
  probe
  misc_feature (1)..(25): SEQ ID NO: 5224; WAN024CYQ; Start 45; Stop 69
ttcagtcatctctgggtactctttt

SEQ ID NO: 403968 - DNA, 25 bp, Artificial
  probe
  misc_feature (1)..(25): SEQ ID NO: 5224; WAN024CYQ; Start 10; Stop 34
ttgatttcggccaattcttcttctg

SEQ ID NO: 403969 - DNA, 25 bp, Artificial
  probe
  misc_feature (1)..(25): SEQ ID NO: 5224; WAN024CYQ; Start 132; Stop 156
gataatattggttacacgggcacgg

SEQ ID NO: 403970 - DNA, 25 bp, Artificial
  probe
  misc_feature (1)..(25): SEQ ID NO: 5224; WAN024CYQ; Start 155; Stop 179
ggacggatttcacaccttttgattc

SEQ ID NO: 403971 - DNA, 25 bp, Artificial
  probe
  misc_feature (1)..(25): SEQ ID NO: 5224; WAN024CYQ; Start 37; Stop 61
aagacgtattcagtcatctctgggt

SEQ ID NO: 403972 - DNA, 25 bp, Artificial
  probe
  misc_feature (1)..(25): SEQ ID NO: 5224; WAN024CYQ; Start 74; Stop 98
tgtattccaagagtaaatcacggaa

SEQ ID NO: 403973 - DNA, 25 bp, Artificial
  probe
  misc_feature (1)..(25): SEQ ID NO: 5224; WAN024CYQ; Start 11; Stop 35
tgatttcggccaattcttcttctga

SEQ ID NO: 403974 - DNA, 25 bp, Artificial
  probe
  misc_feature (1)..(25): SEQ ID NO: 5224; WAN024CYQ; Start 8; Stop 32
gattgatttcggccaattcttcttc

SEQ ID NO: 403975 - DNA, 25 bp, Artificial
  probe
  misc_feature (1)..(25): SEQ ID NO: 5225; WAN024DHI; Start 512; Stop 536
ttcaggtagatgtccaagagtattc

SEQ ID NO: 403976 - DNA, 25 bp, Artificial
  probe
  misc_feature (1)..(25): SEQ ID NO: 5225; WAN024DHI; Start 513; Stop 537
tcaggtagatgtccaagagtattct

SEQ ID NO: 403977 - DNA, 25 bp, Artificial
  probe
  misc_feature (1)..(25): SEQ ID NO: 5225; WAN024DHI; Start 737; Stop 761
tcattgaatatagaagcgtagagga

SEQ ID NO: 403978 - DNA, 25 bp, Artificial
  probe
  misc_feature (1)..(25): SEQ ID NO: 5225; WAN024DHI; Start 528; Stop 552
agagtattcttaccttgccgaagta

SEQ ID NO: 403979 - DNA, 25 bp, Artificial
  probe
  misc_feature (1)..(25): SEQ ID NO: 5225; WAN024DHI; Start 738; Stop 762
cattgaatatagaagcgtagaggat

SEQ ID NO: 403980 - DNA, 25 bp, Artificial
  probe
  misc_feature (1)..(25): SEQ ID NO: 5225; WAN024DHI; Start 736; Stop 760
atcattgaatatagaagcgtagagg

SEQ ID NO: 403981 - DNA, 25 bp, Artificial
  probe
  misc_feature (1)..(25): SEQ ID NO: 5225; WAN024DHI; Start 529; Stop 553
gagtattcttaccttgccgaagtaa

SEQ ID NO: 403982 - DNA, 25 bp, Artificial
  probe
  misc_feature (1)..(25): SEQ ID NO: 5225; WAN024DHI; Start 739; Stop 763
attgaatatagaagcgtagaggatt

SEQ ID NO: 403983 - DNA, 25 bp, Artificial
  probe
  misc_feature (1)..(25): SEQ ID NO: 5225; WAN024DHI; Start 511; Stop 535
tttcaggtagatgtccaagagtatt

SEQ ID NO: 403984 - DNA, 25 bp, Artificial
  probe
  misc_feature (1)..(25): SEQ ID NO: 5225; WAN024DHI; Start 510; Stop 534
ctttcaggtagatgtccaagagtat

SEQ ID NO: 403985 - DNA, 25 bp, Artificial
  probe
  misc_feature (1)..(25): SEQ ID NO: 5225; WAN024DHI; Start 608; Stop 632
aagtcaaggagtttcaatcggattt

SEQ ID NO: 403986 - DNA, 25 bp, Artificial
  probe
  misc_feature (1)..(25): SEQ ID NO: 5225; WAN024DHI; Start 607; Stop 631
aaagtcaaggagtttcaatcggatt

SEQ ID NO: 403987 - DNA, 25 bp, Artificial
  probe
  misc_feature (1)..(25): SEQ ID NO: 5225; WAN024DHI; Start 493; Stop 517
tatggtgatggatatgactttcagg

SEQ ID NO: 403988 - DNA, 25 bp, Artificial
  probe
  misc_feature (1)..(25): SEQ ID NO: 5225; WAN024DHI; Start 497; Stop 521
gtgatggatatgactttcaggtaga

SEQ ID NO: 403989 - DNA, 25 bp, Artificial
  probe
  misc_feature (1)..(25): SEQ ID NO: 5225; WAN024DHI; Start 514; Stop 538
caggtagatgtccaagagtattctt

SEQ ID NO: 403990 - DNA, 25 bp, Artificial
  probe
  misc_feature (1)..(25): SEQ ID NO: 5225; WAN024DHI; Start 496; Stop 520
ggtgatggatatgactttcaggtag

SEQ ID NO: 403991 - DNA, 25 bp, Artificial
  probe
  misc_feature (1)..(25): SEQ ID NO: 5225; WAN024DHI; Start 509; Stop 533
actttcaggtagatgtccaagagta

SEQ ID NO: 403992 - DNA, 25 bp, Artificial
  probe
  misc_feature (1)..(25): SEQ ID NO: 5225; WAN024DHI; Start 742; Stop 766
gaatatagaagcgtagaggatttgt

SEQ ID NO: 403993 - DNA, 25 bp, Artificial
  probe
  misc_feature (1)..(25): SEQ ID NO: 5225; WAN024DHI; Start 741; Stop 765
tgaatatagaagcgtagaggatttg

SEQ ID NO: 403994 - DNA, 25 bp, Artificial
  probe
  misc_feature (1)..(25): SEQ ID NO: 5225; WAN024DHI; Start 495; Stop 519
tggtgatggatatgactttcaggta

SEQ ID NO: 403995 - DNA, 25 bp, Artificial
  probe
  misc_feature (1)..(25): SEQ ID NO: 5225; WAN024DHI; Start 500; Stop 524
atggatatgactttcaggtagatgt

SEQ ID NO: 403996 - DNA, 25 bp, Artificial
  probe
  misc_feature (1)..(25): SEQ ID NO: 5225; WAN024DHI; Start 519; Stop 543
agatgtccaagagtattcttacctt

SEQ ID NO: 403997 - DNA, 25 bp, Artificial
  probe
  misc_feature (1)..(25): SEQ ID NO: 5225; WAN024DHI; Start 498; Stop 522
tgatggatatgactttcaggtagat

SEQ ID NO: 403998 - DNA, 25 bp, Artificial
  probe
  misc_feature (1)..(25): SEQ ID NO: 5225; WAN024DHI; Start 485; Stop 509
cccgtctttatggtgatggatatga

SEQ ID NO: 403999 - DNA, 25 bp, Artificial
  probe
  misc_feature (1)..(25): SEQ ID NO: 5225; WAN024DHI; Start 271; Stop 295
atgatgtttggaaatgaagatgttc

SEQ ID NO: 404000 - DNA, 25 bp, Artificial
  probe
  misc_feature (1)..(25): SEQ ID NO: 5225; WAN024DHI; Start 735; Stop 759
aatcattgaatatagaagcgtagag

SEQ ID NO: 404001 - DNA, 25 bp, Artificial
  probe
  misc_feature (1)..(25): SEQ ID NO: 5225; WAN024DHI; Start 505; Stop 529
tatgactttcaggtagatgtccaag

SEQ ID NO: 404002 - DNA, 25 bp, Artificial
  probe
  misc_feature (1)..(25): SEQ ID NO: 5225; WAN024DHI; Start 499; Stop 523
gatggatatgactttcaggtagatg

SEQ ID NO: 404003 - DNA, 25 bp, Artificial
  probe
  misc_feature (1)..(25): SEQ ID NO: 5225; WAN024DHI; Start 487; Stop 511
cgtctttatggtgatggatatgact

SEQ ID NO: 404004 - DNA, 25 bp, Artificial
  probe
  misc_feature (1)..(25): SEQ ID NO: 5225; WAN024DHI; Start 18; Stop 42
gtccaaacaccctcattatgaattg

SEQ ID NO: 404005 - DNA, 25 bp, Artificial
  probe
  misc_feature (1)..(25): SEQ ID NO: 5225; WAN024DHI; Start 503; Stop 527
gatatgactttcaggtagatgtcca

SEQ ID NO: 404006 - DNA, 25 bp, Artificial
  probe
  misc_feature (1)..(25): SEQ ID NO: 5225; WAN024DHI; Start 501; Stop 525
tggatatgactttcaggtagatgtc

SEQ ID NO: 404007 - DNA, 25 bp, Artificial
  probe
  misc_feature (1)..(25): SEQ ID NO: 5225; WAN024DHI; Start 494; Stop 518
atggtgatggatatgactttcaggt

SEQ ID NO: 404008 - DNA, 25 bp, Artificial
  probe
  misc_feature (1)..(25): SEQ ID NO: 5226; WAN024CHF-5; Start 866; Stop 890
gattggatgatatggaagtctctga

SEQ ID NO: 404009 - DNA, 25 bp, Artificial
  probe
  misc_feature (1)..(25): SEQ ID NO: 5226; WAN024CHF-5; Start 865; Stop 889
cgattggatgatatggaagtctctg

SEQ ID NO: 404010 - DNA, 25 bp, Artificial
  probe
  misc_feature (1)..(25): SEQ ID NO: 5226; WAN024CHF-5; Start 864; Stop 888
acgattggatgatatggaagtctct

SEQ ID NO: 404011 - DNA, 25 bp, Artificial
  probe
  misc_feature (1)..(25): SEQ ID NO: 5226; WAN024CHF-5; Start 754; Stop 778
tcaacctatgacaagtatattgcca

SEQ ID NO: 404012 - DNA, 25 bp, Artificial
  probe
  misc_feature (1)..(25): SEQ ID NO: 5226; WAN024CHF-5; Start 1629; Stop 1653
aattgccatctctgaatcacaagaa

SEQ ID NO: 404013 - DNA, 25 bp, Artificial
  probe
  misc_feature (1)..(25): SEQ ID NO: 5226; WAN024CHF-5; Start 755; Stop 779
caacctatgacaagtatattgccat

SEQ ID NO: 404014 - DNA, 25 bp, Artificial
  probe
  misc_feature (1)..(25): SEQ ID NO: 5226; WAN024CHF-5; Start 813; Stop 837
aaccttgatggatatggcgactatt

SEQ ID NO: 404015 - DNA, 25 bp, Artificial
  probe
  misc_feature (1)..(25): SEQ ID NO: 5226; WAN024CHF-5; Start 867; Stop 891
attggatgatatggaagtctctgac

SEQ ID NO: 404016 - DNA, 25 bp, Artificial
  probe
  misc_feature (1)..(25): SEQ ID NO: 5226; WAN024CHF-5; Start 1630; Stop 1654
attgccatctctgaatcacaagaac

SEQ ID NO: 404017 - DNA, 25 bp, Artificial
  probe
  misc_feature (1)..(25): SEQ ID NO: 5226; WAN024CHF-5; Start 863; Stop 887
gacgattggatgatatggaagtctc

SEQ ID NO: 404018 - DNA, 25 bp, Artificial
  probe
  misc_feature (1)..(25): SEQ ID NO: 5226; WAN024CHF-5; Start 757; Stop 781
acctatgacaagtatattgccatgc

SEQ ID NO: 404019 - DNA, 25 bp, Artificial
  probe
  misc_feature (1)..(25): SEQ ID NO: 5226; WAN024CHF-5; Start 756; Stop 780
aacctatgacaagtatattgccatg

SEQ ID NO: 404020 - DNA, 25 bp, Artificial
  probe
  misc_feature (1)..(25): SEQ ID NO: 5226; WAN024CHF-5; Start 1164; Stop 1188
agcagctcatggttattcttcatat

SEQ ID NO: 404021 - DNA, 25 bp, Artificial
  probe
  misc_feature (1)..(25): SEQ ID NO: 5226; WAN024CHF-5; Start 870; Stop 894
ggatgatatggaagtctctgacgaa

SEQ ID NO: 404022 - DNA, 25 bp, Artificial
  probe
  misc_feature (1)..(25): SEQ ID NO: 5226; WAN024CHF-5; Start 1163; Stop 1187
cagcagctcatggttattcttcata

SEQ ID NO: 404023 - DNA, 25 bp, Artificial
  probe
  misc_feature (1)..(25): SEQ ID NO: 5226; WAN024CHF-5; Start 1776; Stop 1800
gaatggtgagacaatcgttgacttg

SEQ ID NO: 404024 - DNA, 25 bp, Artificial
  probe
  misc_feature (1)..(25): SEQ ID NO: 5226; WAN024CHF-5; Start 868; Stop 892
ttggatgatatggaagtctctgacg

SEQ ID NO: 404025 - DNA, 25 bp, Artificial
  probe
  misc_feature (1)..(25): SEQ ID NO: 5226; WAN024CHF-5; Start 862; Stop 886
ggacgattggatgatatggaagtct

SEQ ID NO: 404026 - DNA, 25 bp, Artificial
  probe
  misc_feature (1)..(25): SEQ ID NO: 5226; WAN024CHF-5; Start 233; Stop 257
atcttgctaactatgctttctttgc

SEQ ID NO: 404027 - DNA, 25 bp, Artificial
  probe
  misc_feature (1)..(25): SEQ ID NO: 5226; WAN024CHF-5; Start 1636; Stop 1660
atctctgaatcacaagaacggatgg

SEQ ID NO: 404028 - DNA, 25 bp, Artificial
  probe
  misc_feature (1)..(25): SEQ ID NO: 5226; WAN024CHF-5; Start 1634; Stop 1658
ccatctctgaatcacaagaacggat

SEQ ID NO: 404029 - DNA, 25 bp, Artificial
  probe
  misc_feature (1)..(25): SEQ ID NO: 5226; WAN024CHF-5; Start 758; Stop 782
cctatgacaagtatattgccatgcg

SEQ ID NO: 404030 - DNA, 25 bp, Artificial
  probe
  misc_feature (1)..(25): SEQ ID NO: 5226; WAN024CHF-5; Start 576; Stop 600
ggaagtggatgatttgctctttatc

SEQ ID NO: 404031 - DNA, 25 bp, Artificial
  probe
  misc_feature (1)..(25): SEQ ID NO: 5226; WAN024CHF-5; Start 239; Stop 263
ctaactatgctttctttgccattga

SEQ ID NO: 404032 - DNA, 25 bp, Artificial
  probe
  misc_feature (1)..(25): SEQ ID NO: 5226; WAN024CHF-5; Start 375; Stop 399
taaagatattgatgcgactgagttg

SEQ ID NO: 404033 - DNA, 25 bp, Artificial
  probe
  misc_feature (1)..(25): SEQ ID NO: 5226; WAN024CHF-5; Start 575; Stop 599
tggaagtggatgatttgctctttat

SEQ ID NO: 404034 - DNA, 25 bp, Artificial
  probe
  misc_feature (1)..(25): SEQ ID NO: 5226; WAN024CHF-5; Start 574; Stop 598
atggaagtggatgatttgctcttta

SEQ ID NO: 404035 - DNA, 25 bp, Artificial
  probe
  misc_feature (1)..(25): SEQ ID NO: 5226; WAN024CHF-5; Start 240; Stop 264
taactatgctttctttgccattgaa

SEQ ID NO: 404036 - DNA, 25 bp, Artificial
  probe
  misc_feature (1)..(25): SEQ ID NO: 5226; WAN024CHF-5; Start 110; Stop 134
ttcgtattgtgcaagtatatgatgt

SEQ ID NO: 404037 - DNA, 25 bp, Artificial
  probe
  misc_feature (1)..(25): SEQ ID NO: 5226; WAN024CHF-5; Start 368; Stop 392
tggtgaataaagatattgatgcgac

SEQ ID NO: 404038 - DNA, 25 bp, Artificial
  probe
  misc_feature (1)..(25): SEQ ID NO: 5226; WAN024CHF-5; Start 1137; Stop 1161
attgccacaacaagtcatttctaaa

SEQ ID NO: 404039 - DNA, 25 bp, Artificial
  probe
  misc_feature (1)..(25): SEQ ID NO: 5226; WAN024CHF-5; Start 369; Stop 393
ggtgaataaagatattgatgcgact

SEQ ID NO: 404040 - DNA, 25 bp, Artificial
  probe
  misc_feature (1)..(25): SEQ ID NO: 5226; WAN024CHF-5; Start 1136; Stop 1160
aattgccacaacaagtcatttctaa

SEQ ID NO: 404041 - DNA, 25 bp, Artificial
  probe
  misc_feature (1)..(25): SEQ ID NO: 5227; WAN024DAK; Start 10; Stop 34
agtattggtcttgttatcgtttcac

SEQ ID NO: 404042 - DNA, 25 bp, Artificial
  probe
  misc_feature (1)..(25): SEQ ID NO: 5227; WAN024DAK; Start 333; Stop 357
gtcagttattcaaacacagttagcg

SEQ ID NO: 404043 - DNA, 25 bp, Artificial
  probe
  misc_feature (1)..(25): SEQ ID NO: 5227; WAN024DAK; Start 258; Stop 282
tatcatcatcaacagggttccaatt

SEQ ID NO: 404044 - DNA, 25 bp, Artificial
  probe
  misc_feature (1)..(25): SEQ ID NO: 5227; WAN024DAK; Start 257; Stop 281
gtatcatcatcaacagggttccaat

SEQ ID NO: 404045 - DNA, 25 bp, Artificial
  probe
  misc_feature (1)..(25): SEQ ID NO: 5227; WAN024DAK; Start 254; Stop 278
aaagtatcatcatcaacagggttcc

SEQ ID NO: 404046 - DNA, 25 bp, Artificial
  probe
  misc_feature (1)..(25): SEQ ID NO: 5227; WAN024DAK; Start 336; Stop 360
agttattcaaacacagttagcggag

SEQ ID NO: 404047 - DNA, 25 bp, Artificial
  probe
  misc_feature (1)..(25): SEQ ID NO: 5227; WAN024DAK; Start 17; Stop 41
gtcttgttatcgtttcacattccaa

SEQ ID NO: 404048 - DNA, 25 bp, Artificial
  probe
  misc_feature (1)..(25): SEQ ID NO: 5227; WAN024DAK; Start 14; Stop 38
ttggtcttgttatcgtttcacattc

SEQ ID NO: 404049 - DNA, 25 bp, Artificial
  probe
  misc_feature (1)..(25): SEQ ID NO: 5227; WAN024DAK; Start 335; Stop 359
cagttattcaaacacagttagcgga

SEQ ID NO: 404050 - DNA, 25 bp, Artificial
  probe
  misc_feature (1)..(25): SEQ ID NO: 5227; WAN024DAK; Start 334; Stop 358
tcagttattcaaacacagttagcgg

SEQ ID NO: 404051 - DNA, 25 bp, Artificial
  probe
  misc_feature (1)..(25): SEQ ID NO: 5227; WAN024DAK; Start 332; Stop 356
tgtcagttattcaaacacagttagc

SEQ ID NO: 404052 - DNA, 25 bp, Artificial
  probe
  misc_feature (1)..(25): SEQ ID NO: 5227; WAN024DAK; Start 11; Stop 35
gtattggtcttgttatcgtttcaca

SEQ ID NO: 404053 - DNA, 25 bp, Artificial
  probe
  misc_feature (1)..(25): SEQ ID NO: 5227; WAN024DAK; Start 13; Stop 37
attggtcttgttatcgtttcacatt

SEQ ID NO: 404054 - DNA, 25 bp, Artificial
  probe
  misc_feature (1)..(25): SEQ ID NO: 5227; WAN024DAK; Start 18; Stop 42
tcttgttatcgtttcacattccaaa

SEQ ID NO: 404055 - DNA, 25 bp, Artificial
  probe
  misc_feature (1)..(25): SEQ ID NO: 5227; WAN024DAK; Start 256; Stop 280
agtatcatcatcaacagggttccaa

SEQ ID NO: 404056 - DNA, 25 bp, Artificial
  probe
  misc_feature (1)..(25): SEQ ID NO: 5227; WAN024DAK; Start 255; Stop 279
aagtatcatcatcaacagggttcca

SEQ ID NO: 404057 - DNA, 25 bp, Artificial
  probe
  misc_feature (1)..(25): SEQ ID NO: 5227; WAN024DAK; Start 12; Stop 36
tattggtcttgttatcgtttcacat

SEQ ID NO: 404058 - DNA, 25 bp, Artificial
  probe
  misc_feature (1)..(25): SEQ ID NO: 5227; WAN024DAK; Start 82; Stop 106
gctaaagatgttccgattacttatg

SEQ ID NO: 404059 - DNA, 25 bp, Artificial
  probe
  misc_feature (1)..(25): SEQ ID NO: 5227; WAN024DAK; Start 278; Stop 302
caattgtagaaggtgcctataatgc

SEQ ID NO: 404060 - DNA, 25 bp, Artificial
  probe
  misc_feature (1)..(25): SEQ ID NO: 5227; WAN024DAK; Start 16; Stop 40
ggtcttgttatcgtttcacattcca

SEQ ID NO: 404061 - DNA, 25 bp, Artificial
  probe
  misc_feature (1)..(25): SEQ ID NO: 5227; WAN024DAK; Start 15; Stop 39
tggtcttgttatcgtttcacattcc

SEQ ID NO: 404062 - DNA, 25 bp, Artificial
  probe
  misc_feature (1)..(25): SEQ ID NO: 5227; WAN024DAK; Start 277; Stop 301
ccaattgtagaaggtgcctataatg

SEQ ID NO: 404063 - DNA, 25 bp, Artificial
  probe
  misc_feature (1)..(25): SEQ ID NO: 5227; WAN024DAK; Start 276; Stop 300
tccaattgtagaaggtgcctataat

SEQ ID NO: 404064 - DNA, 25 bp, Artificial
  probe
  misc_feature (1)..(25): SEQ ID NO: 5227; WAN024DAK; Start 275; Stop 299
ttccaattgtagaaggtgcctataa

SEQ ID NO: 404065 - DNA, 25 bp, Artificial
  probe
  misc_feature (1)..(25): SEQ ID NO: 5227; WAN024DAK; Start 274; Stop 298
gttccaattgtagaaggtgcctata

SEQ ID NO: 404066 - DNA, 25 bp, Artificial
  probe
  misc_feature (1)..(25): SEQ ID NO: 5227; WAN024DAK; Start 355; Stop 379
gcggagcttgaaatcaataaataac

SEQ ID NO: 404067 - DNA, 25 bp, Artificial
  probe
  misc_feature (1)..(25): SEQ ID NO: 5227; WAN024DAK; Start 337; Stop 361
gttattcaaacacagttagcggagc

SEQ ID NO: 404068 - DNA, 25 bp, Artificial
  probe
  misc_feature (1)..(25): SEQ ID NO: 5227; WAN024DAK; Start 279; Stop 303
aattgtagaaggtgcctataatgca

SEQ ID NO: 404069 - DNA, 25 bp, Artificial
  probe
  misc_feature (1)..(25): SEQ ID NO: 5227; WAN024DAK; Start 24; Stop 48
tatcgtttcacattccaaacacatt

SEQ ID NO: 404070 - DNA, 25 bp, Artificial
  probe
  misc_feature (1)..(25): SEQ ID NO: 5227; WAN024DAK; Start 23; Stop 47
ttatcgtttcacattccaaacacat

SEQ ID NO: 404071 - DNA, 25 bp, Artificial
  probe
  misc_feature (1)..(25): SEQ ID NO: 5227; WAN024DAK; Start 280; Stop 304
attgtagaaggtgcctataatgcag

SEQ ID NO: 404072 - DNA, 25 bp, Artificial
  probe
  misc_feature (1)..(25): SEQ ID NO: 5227; WAN024DAK; Start 22; Stop 46
gttatcgtttcacattccaaacaca

SEQ ID NO: 404073 - DNA, 25 bp, Artificial
  probe
  misc_feature (1)..(25): SEQ ID NO: 5227; WAN024DAK; Start 19; Stop 43
cttgttatcgtttcacattccaaac

SEQ ID NO: 404074 - DNA, 25 bp, Artificial
  probe
  misc_feature (1)..(25): SEQ ID NO: 5228; WAN024GOE; Start 131; Stop 155
ttccagagagaaccttgttaagagc

SEQ ID NO: 404075 - DNA, 25 bp, Artificial
  probe
  misc_feature (1)..(25): SEQ ID NO: 5228; WAN024GOE; Start 357; Stop 381
agtttggaggagattatctgtcatt

SEQ ID NO: 404076 - DNA, 25 bp, Artificial
  probe
  misc_feature (1)..(25): SEQ ID NO: 5228; WAN024GOE; Start 355; Stop 379
ctagtttggaggagattatctgtca

SEQ ID NO: 404077 - DNA, 25 bp, Artificial
  probe
  misc_feature (1)..(25): SEQ ID NO: 5228; WAN024GOE; Start 338; Stop 362
gttggtctgtcttgtctctagtttg

SEQ ID NO: 404078 - DNA, 25 bp, Artificial
  probe
  misc_feature (1)..(25): SEQ ID NO: 5228; WAN024GOE; Start 361; Stop 385
tggaggagattatctgtcatttctt

SEQ ID NO: 404079 - DNA, 25 bp, Artificial
  probe
  misc_feature (1)..(25): SEQ ID NO: 5228; WAN024GOE; Start 360; Stop 384
ttggaggagattatctgtcatttct

SEQ ID NO: 404080 - DNA, 25 bp, Artificial
  probe
  misc_feature (1)..(25): SEQ ID NO: 5228; WAN024GOE; Start 198; Stop 222
attgacagactccagttgtttagaa

SEQ ID NO: 404081 - DNA, 25 bp, Artificial
  probe
  misc_feature (1)..(25): SEQ ID NO: 5228; WAN024GOE; Start 199; Stop 223
ttgacagactccagttgtttagaaa

SEQ ID NO: 404082 - DNA, 25 bp, Artificial
  probe
  misc_feature (1)..(25): SEQ ID NO: 5228; WAN024GOE; Start 354; Stop 378
tctagtttggaggagattatctgtc

SEQ ID NO: 404083 - DNA, 25 bp, Artificial
  probe
  misc_feature (1)..(25): SEQ ID NO: 5228; WAN024GOE; Start 197; Stop 221
gattgacagactccagttgtttaga

SEQ ID NO: 404084 - DNA, 25 bp, Artificial
  probe
  misc_feature (1)..(25): SEQ ID NO: 5228; WAN024GOE; Start 362; Stop 386
ggaggagattatctgtcatttcttg

SEQ ID NO: 404085 - DNA, 25 bp, Artificial
  probe
  misc_feature (1)..(25): SEQ ID NO: 5228; WAN024GOE; Start 358; Stop 382
gtttggaggagattatctgtcattt

SEQ ID NO: 404086 - DNA, 25 bp, Artificial
  probe
  misc_feature (1)..(25): SEQ ID NO: 5228; WAN024GOE; Start 356; Stop 380
tagtttggaggagattatctgtcat

SEQ ID NO: 404087 - DNA, 25 bp, Artificial
  probe
  misc_feature (1)..(25): SEQ ID NO: 5228; WAN024GOE; Start 359; Stop 383
tttggaggagattatctgtcatttc

SEQ ID NO: 404088 - DNA, 25 bp, Artificial
  probe
  misc_feature (1)..(25): SEQ ID NO: 5228; WAN024GOE; Start 353; Stop 377
ctctagtttggaggagattatctgt

SEQ ID NO: 404089 - DNA, 25 bp, Artificial
  probe
  misc_feature (1)..(25): SEQ ID NO: 5228; WAN024GOE; Start 200; Stop 224
tgacagactccagttgtttagaaac

SEQ ID NO: 404090 - DNA, 25 bp, Artificial
  probe
  misc_feature (1)..(25): SEQ ID NO: 5228; WAN024GOE; Start 339; Stop 363
ttggtctgtcttgtctctagtttgg

SEQ ID NO: 404091 - DNA, 25 bp, Artificial
  probe
  misc_feature (1)..(25): SEQ ID NO: 5228; WAN024GOE; Start 196; Stop 220
cgattgacagactccagttgtttag

SEQ ID NO: 404092 - DNA, 25 bp, Artificial
  probe
  misc_feature (1)..(25): SEQ ID NO: 5228; WAN024GOE; Start 132; Stop 156
tccagagagaaccttgttaagagct

SEQ ID NO: 404093 - DNA, 25 bp, Artificial
  probe
  misc_feature (1)..(25): SEQ ID NO: 5228; WAN024GOE; Start 363; Stop 387
gaggagattatctgtcatttcttga

SEQ ID NO: 404094 - DNA, 25 bp, Artificial
  probe
  misc_feature (1)..(25): SEQ ID NO: 5228; WAN024GOE; Start 337; Stop 361
cgttggtctgtcttgtctctagttt

SEQ ID NO: 404095 - DNA, 25 bp, Artificial
  probe
  misc_feature (1)..(25): SEQ ID NO: 5228; WAN024GOE; Start 344; Stop 368
ctgtcttgtctctagtttggaggag

SEQ ID NO: 404096 - DNA, 25 bp, Artificial
  probe
  misc_feature (1)..(25): SEQ ID NO: 5228; WAN024GOE; Start 195; Stop 219
acgattgacagactccagttgttta

SEQ ID NO: 404097 - DNA, 25 bp, Artificial
  probe
  misc_feature (1)..(25): SEQ ID NO: 5228; WAN024GOE; Start 343; Stop 367
tctgtcttgtctctagtttggagga

SEQ ID NO: 404098 - DNA, 25 bp, Artificial
  probe
  misc_feature (1)..(25): SEQ ID NO: 5228; WAN024GOE; Start 342; Stop 366
gtctgtcttgtctctagtttggagg

SEQ ID NO: 404099 - DNA, 25 bp, Artificial
  probe
  misc_feature (1)..(25): SEQ ID NO: 5228; WAN024GOE; Start 341; Stop 365
ggtctgtcttgtctctagtttggag

SEQ ID NO: 404100 - DNA, 25 bp, Artificial
  probe
  misc_feature (1)..(25): SEQ ID NO: 5228; WAN024GOE; Start 340; Stop 364
tggtctgtcttgtctctagtttgga

SEQ ID NO: 404101 - DNA, 25 bp, Artificial
  probe
  misc_feature (1)..(25): SEQ ID NO: 5228; WAN024GOE; Start 130; Stop 154
gttccagagagaaccttgttaagag

SEQ ID NO: 404102 - DNA, 25 bp, Artificial
  probe
  misc_feature (1)..(25): SEQ ID NO: 5228; WAN024GOE; Start 65; Stop 89
caggtgtcatgatgtcttcaataat

SEQ ID NO: 404103 - DNA, 25 bp, Artificial
  probe
  misc_feature (1)..(25): SEQ ID NO: 5228; WAN024GOE; Start 336; Stop 360
acgttggtctgtcttgtctctagtt

SEQ ID NO: 404104 - DNA, 25 bp, Artificial
  probe
  misc_feature (1)..(25): SEQ ID NO: 5228; WAN024GOE; Start 64; Stop 88
gcaggtgtcatgatgtcttcaataa

SEQ ID NO: 404105 - DNA, 25 bp, Artificial
  probe
  misc_feature (1)..(25): SEQ ID NO: 5228; WAN024GOE; Start 66; Stop 90
aggtgtcatgatgtcttcaataatt

SEQ ID NO: 404106 - DNA, 25 bp, Artificial
  probe
  misc_feature (1)..(25): SEQ ID NO: 5228; WAN024GOE; Start 201; Stop 225
gacagactccagttgtttagaaact

SEQ ID NO: 404107 - DNA, 25 bp, Artificial
  probe
  misc_feature (1)..(25): SEQ ID NO: 5229; WAN024DEM; Start 356; Stop 380
atcgctatgttggttatctatcagg

SEQ ID NO: 404108 - DNA, 25 bp, Artificial
  probe
  misc_feature (1)..(25): SEQ ID NO: 5229; WAN024DEM; Start 352; Stop 376
ggctatcgctatgttggttatctat

SEQ ID NO: 404109 - DNA, 25 bp, Artificial
  probe
  misc_feature (1)..(25): SEQ ID NO: 5229; WAN024DEM; Start 359; Stop 383
gctatgttggttatctatcaggtga

SEQ ID NO: 404110 - DNA, 25 bp, Artificial
  probe
  misc_feature (1)..(25): SEQ ID NO: 5229; WAN024DEM; Start 508; Stop 532
aaccaagtagtagagacagaggaag

SEQ ID NO: 404111 - DNA, 25 bp, Artificial
  probe
  misc_feature (1)..(25): SEQ ID NO: 5229; WAN024DEM; Start 353; Stop 377
gctatcgctatgttggttatctatc

SEQ ID NO: 404112 - DNA, 25 bp, Artificial
  probe
  misc_feature (1)..(25): SEQ ID NO: 5229; WAN024DEM; Start 364; Stop 388
gttggttatctatcaggtgacatcc

SEQ ID NO: 404113 - DNA, 25 bp, Artificial
  probe
  misc_feature (1)..(25): SEQ ID NO: 5229; WAN024DEM; Start 358; Stop 382
cgctatgttggttatctatcaggtg

SEQ ID NO: 404114 - DNA, 25 bp, Artificial
  probe
  misc_feature (1)..(25): SEQ ID NO: 5229; WAN024DEM; Start 357; Stop 381
tcgctatgttggttatctatcaggt

SEQ ID NO: 404115 - DNA, 25 bp, Artificial
  probe
  misc_feature (1)..(25): SEQ ID NO: 5229; WAN024DEM; Start 661; Stop 685
gttgaagaagtaggtggagaagttg

SEQ ID NO: 404116 - DNA, 25 bp, Artificial
  probe
  misc_feature (1)..(25): SEQ ID NO: 5229; WAN024DEM; Start 662; Stop 686
ttgaagaagtaggtggagaagttga

SEQ ID NO: 404117 - DNA, 25 bp, Artificial
  probe
  misc_feature (1)..(25): SEQ ID NO: 5229; WAN024DEM; Start 660; Stop 684
agttgaagaagtaggtggagaagtt

SEQ ID NO: 404118 - DNA, 25 bp, Artificial
  probe
  misc_feature (1)..(25): SEQ ID NO: 5229; WAN024DEM; Start 360; Stop 384
ctatgttggttatctatcaggtgac

SEQ ID NO: 404119 - DNA, 25 bp, Artificial
  probe
  misc_feature (1)..(25): SEQ ID NO: 5229; WAN024DEM; Start 665; Stop 689
aagaagtaggtggagaagttgagtc

SEQ ID NO: 404120 - DNA, 25 bp, Artificial
  probe
  misc_feature (1)..(25): SEQ ID NO: 5229; WAN024DEM; Start 664; Stop 688
gaagaagtaggtggagaagttgagt

SEQ ID NO: 404121 - DNA, 25 bp, Artificial
  probe
  misc_feature (1)..(25): SEQ ID NO: 5229; WAN024DEM; Start 663; Stop 687
tgaagaagtaggtggagaagttgag

SEQ ID NO: 404122 - DNA, 25 bp, Artificial
  probe
  misc_feature (1)..(25): SEQ ID NO: 5229; WAN024DEM; Start 363; Stop 387
tgttggttatctatcaggtgacatc

SEQ ID NO: 404123 - DNA, 25 bp, Artificial
  probe
  misc_feature (1)..(25): SEQ ID NO: 5229; WAN024DEM; Start 99; Stop 123
tgacaggaatgaagttgtatatggt

SEQ ID NO: 404124 - DNA, 25 bp, Artificial
  probe
  misc_feature (1)..(25): SEQ ID NO: 5229; WAN024DEM; Start 659; Stop 683
cagttgaagaagtaggtggagaagt

SEQ ID NO: 404125 - DNA, 25 bp, Artificial
  probe
  misc_feature (1)..(25): SEQ ID NO: 5229; WAN024DEM; Start 98; Stop 122
ctgacaggaatgaagttgtatatgg

SEQ ID NO: 404126 - DNA, 25 bp, Artificial
  probe
  misc_feature (1)..(25): SEQ ID NO: 5229; WAN024DEM; Start 355; Stop 379
tatcgctatgttggttatctatcag

SEQ ID NO: 404127 - DNA, 25 bp, Artificial
  probe
  misc_feature (1)..(25): SEQ ID NO: 5229; WAN024DEM; Start 354; Stop 378
ctatcgctatgttggttatctatca

SEQ ID NO: 404128 - DNA, 25 bp, Artificial
  probe
  misc_feature (1)..(25): SEQ ID NO: 5229; WAN024DEM; Start 361; Stop 385
tatgttggttatctatcaggtgaca

SEQ ID NO: 404129 - DNA, 25 bp, Artificial
  probe
  misc_feature (1)..(25): SEQ ID NO: 5229; WAN024DEM; Start 100; Stop 124
gacaggaatgaagttgtatatggtt

SEQ ID NO: 404130 - DNA, 25 bp, Artificial
  probe
  misc_feature (1)..(25): SEQ ID NO: 5229; WAN024DEM; Start 368; Stop 392
gttatctatcaggtgacatcctcaa

SEQ ID NO: 404131 - DNA, 25 bp, Artificial
  probe
  misc_feature (1)..(25): SEQ ID NO: 5229; WAN024DEM; Start 365; Stop 389
ttggttatctatcaggtgacatcct

SEQ ID NO: 404132 - DNA, 25 bp, Artificial
  probe
  misc_feature (1)..(25): SEQ ID NO: 5229; WAN024DEM; Start 367; Stop 391
ggttatctatcaggtgacatcctca

SEQ ID NO: 404133 - DNA, 25 bp, Artificial
  probe
  misc_feature (1)..(25): SEQ ID NO: 5229; WAN024DEM; Start 366; Stop 390
tggttatctatcaggtgacatcctc

SEQ ID NO: 404134 - DNA, 25 bp, Artificial
  probe
  misc_feature (1)..(25): SEQ ID NO: 5229; WAN024DEM; Start 666; Stop 690
agaagtaggtggagaagttgagtca

SEQ ID NO: 404135 - DNA, 25 bp, Artificial
  probe
  misc_feature (1)..(25): SEQ ID NO: 5229; WAN024DEM; Start 667; Stop 691
gaagtaggtggagaagttgagtcaa

SEQ ID NO: 404136 - DNA, 25 bp, Artificial
  probe
  misc_feature (1)..(25): SEQ ID NO: 5229; WAN024DEM; Start 25; Stop 49
gcagccacctatcactatgtaaata

SEQ ID NO: 404137 - DNA, 25 bp, Artificial
  probe
  misc_feature (1)..(25): SEQ ID NO: 5229; WAN024DEM; Start 507; Stop 531
aaaccaagtagtagagacagaggaa

SEQ ID NO: 404138 - DNA, 25 bp, Artificial
  probe
  misc_feature (1)..(25): SEQ ID NO: 5229; WAN024DEM; Start 104; Stop 128
ggaatgaagttgtatatggtttggt

SEQ ID NO: 404139 - DNA, 25 bp, Artificial
  probe
  misc_feature (1)..(25): SEQ ID NO: 5229; WAN024DEM; Start 103; Stop 127
aggaatgaagttgtatatggtttgg

SEQ ID NO: 404140 - DNA, 25 bp, Artificial
  probe
  misc_feature (1)..(25): SEQ ID NO: 5230; WAN024CRF; Start 88; Stop 112
ctcatctgcccagttgtaaatcaaa

SEQ ID NO: 404141 - DNA, 25 bp, Artificial
  probe
  misc_feature (1)..(25): SEQ ID NO: 5230; WAN024CRF; Start 89; Stop 113
tcatctgcccagttgtaaatcaaac

SEQ ID NO: 404142 - DNA, 25 bp, Artificial
  probe
  misc_feature (1)..(25): SEQ ID NO: 5230; WAN024CRF; Start 87; Stop 111
actcatctgcccagttgtaaatcaa

SEQ ID NO: 404143 - DNA, 25 bp, Artificial
  probe
  misc_feature (1)..(25): SEQ ID NO: 5230; WAN024CRF; Start 90; Stop 114
catctgcccagttgtaaatcaaacc

SEQ ID NO: 404144 - DNA, 25 bp, Artificial
  probe
  misc_feature (1)..(25): SEQ ID NO: 5230; WAN024CRF; Start 65; Stop 89
aactgtggagcaaatttctgaaact

SEQ ID NO: 404145 - DNA, 25 bp, Artificial
  probe
  misc_feature (1)..(25): SEQ ID NO: 5230; WAN024CRF; Start 64; Stop 88
caactgtggagcaaatttctgaaac

SEQ ID NO: 404146 - DNA, 25 bp, Artificial
  probe
  misc_feature (1)..(25): SEQ ID NO: 5230; WAN024CRF; Start 71; Stop 95
ggagcaaatttctgaaactcatctg

SEQ ID NO: 404147 - DNA, 25 bp, Artificial
  probe
  misc_feature (1)..(25): SEQ ID NO: 5230; WAN024CRF; Start 16; Stop 40
aagaatctcctcacgacttgctttc

SEQ ID NO: 404148 - DNA, 25 bp, Artificial
  probe
  misc_feature (1)..(25): SEQ ID NO: 5230; WAN024CRF; Start 19; Stop 43
aatctcctcacgacttgctttcaaa

SEQ ID NO: 404149 - DNA, 25 bp, Artificial
  probe
  misc_feature (1)..(25): SEQ ID NO: 5230; WAN024CRF; Start 70; Stop 94
tggagcaaatttctgaaactcatct

SEQ ID NO: 404150 - DNA, 25 bp, Artificial
  probe
  misc_feature (1)..(25): SEQ ID NO: 5230; WAN024CRF; Start 69; Stop 93
gtggagcaaatttctgaaactcatc

SEQ ID NO: 404151 - DNA, 25 bp, Artificial
  probe
  misc_feature (1)..(25): SEQ ID NO: 5230; WAN024CRF; Start 68; Stop 92
tgtggagcaaatttctgaaactcat

SEQ ID NO: 404152 - DNA, 25 bp, Artificial
  probe
  misc_feature (1)..(25): SEQ ID NO: 5230; WAN024CRF; Start 255; Stop 279
caattcccttttcctgataatctcg

SEQ ID NO: 404153 - DNA, 25 bp, Artificial
  probe
  misc_feature (1)..(25): SEQ ID NO: 5230; WAN024CRF; Start 77; Stop 101
aatttctgaaactcatctgcccagt

SEQ ID NO: 404154 - DNA, 25 bp, Artificial
  probe
  misc_feature (1)..(25): SEQ ID NO: 5230; WAN024CRF; Start 18; Stop 42
gaatctcctcacgacttgctttcaa

SEQ ID NO: 404155 - DNA, 25 bp, Artificial
  probe
  misc_feature (1)..(25): SEQ ID NO: 5230; WAN024CRF; Start 254; Stop 278
ccaattcccttttcctgataatctc

SEQ ID NO: 404156 - DNA, 25 bp, Artificial
  probe
  misc_feature (1)..(25): SEQ ID NO: 5230; WAN024CRF; Start 193; Stop 217
aagtcccatatcatcagccaaaatc

SEQ ID NO: 404157 - DNA, 25 bp, Artificial
  probe
  misc_feature (1)..(25): SEQ ID NO: 5230; WAN024CRF; Start 253; Stop 277
gccaattcccttttcctgataatct

SEQ ID NO: 404158 - DNA, 25 bp, Artificial
  probe
  misc_feature (1)..(25): SEQ ID NO: 5230; WAN024CRF; Start 252; Stop 276
agccaattcccttttcctgataatc

SEQ ID NO: 404159 - DNA, 25 bp, Artificial
  probe
  misc_feature (1)..(25): SEQ ID NO: 5230; WAN024CRF; Start 256; Stop 280
aattcccttttcctgataatctcgc

SEQ ID NO: 404160 - DNA, 25 bp, Artificial
  probe
  misc_feature (1)..(25): SEQ ID NO: 5230; WAN024CRF; Start 75; Stop 99
caaatttctgaaactcatctgccca

SEQ ID NO: 404161 - DNA, 25 bp, Artificial
  probe
  misc_feature (1)..(25): SEQ ID NO: 5230; WAN024CRF; Start 67; Stop 91
ctgtggagcaaatttctgaaactca

SEQ ID NO: 404162 - DNA, 25 bp, Artificial
  probe
  misc_feature (1)..(25): SEQ ID NO: 5230; WAN024CRF; Start 66; Stop 90
actgtggagcaaatttctgaaactc

SEQ ID NO: 404163 - DNA, 25 bp, Artificial
  probe
  misc_feature (1)..(25): SEQ ID NO: 5230; WAN024CRF; Start 192; Stop 216
caagtcccatatcatcagccaaaat

SEQ ID NO: 404164 - DNA, 25 bp, Artificial
  probe
  misc_feature (1)..(25): SEQ ID NO: 5230; WAN024CRF; Start 185; Stop 209
gttttcccaagtcccatatcatcag

SEQ ID NO: 404165 - DNA, 25 bp, Artificial
  probe
  misc_feature (1)..(25): SEQ ID NO: 5230; WAN024CRF; Start 76; Stop 100
aaatttctgaaactcatctgcccag

SEQ ID NO: 404166 - DNA, 25 bp, Artificial
  probe
  misc_feature (1)..(25): SEQ ID NO: 5230; WAN024CRF; Start 91; Stop 115
atctgcccagttgtaaatcaaaccc

SEQ ID NO: 404167 - DNA, 25 bp, Artificial
  probe
  misc_feature (1)..(25): SEQ ID NO: 5230; WAN024CRF; Start 20; Stop 44
atctcctcacgacttgctttcaaac

SEQ ID NO: 404168 - DNA, 25 bp, Artificial
  probe
  misc_feature (1)..(25): SEQ ID NO: 5230; WAN024CRF; Start 262; Stop 286
cttttcctgataatctcgcaagtca

SEQ ID NO: 404169 - DNA, 25 bp, Artificial
  probe
  misc_feature (1)..(25): SEQ ID NO: 5230; WAN024CRF; Start 261; Stop 285
ccttttcctgataatctcgcaagtc

SEQ ID NO: 404170 - DNA, 25 bp, Artificial
  probe
  misc_feature (1)..(25): SEQ ID NO: 5230; WAN024CRF; Start 85; Stop 109
aaactcatctgcccagttgtaaatc

SEQ ID NO: 404171 - DNA, 25 bp, Artificial
  probe
  misc_feature (1)..(25): SEQ ID NO: 5230; WAN024CRF; Start 84; Stop 108
gaaactcatctgcccagttgtaaat

SEQ ID NO: 404172 - DNA, 25 bp, Artificial
  probe
  misc_feature (1)..(25): SEQ ID NO: 5230; WAN024CRF; Start 257; Stop 281
attcccttttcctgataatctcgca

SEQ ID NO: 404173 - DNA, 25 bp, Artificial
  probe
  misc_feature (1)..(25): SEQ ID NO: 5231; WAN024FGK; Start 11; Stop 35
ctgaaccttggaagacaatggactg

SEQ ID NO: 404174 - DNA, 25 bp, Artificial
  probe
  misc_feature (1)..(25): SEQ ID NO: 5231; WAN024FGK; Start 114; Stop 138
tggaacaaagacattggttaccgtt

SEQ ID NO: 404175 - DNA, 25 bp, Artificial
  probe
  misc_feature (1)..(25): SEQ ID NO: 5231; WAN024FGK; Start 181; Stop 205
ttaatccctgacatagacaaaaccg

SEQ ID NO: 404176 - DNA, 25 bp, Artificial
  probe
  misc_feature (1)..(25): SEQ ID NO: 5231; WAN024FGK; Start 180; Stop 204
tttaatccctgacatagacaaaacc

SEQ ID NO: 404177 - DNA, 25 bp, Artificial
  probe
  misc_feature (1)..(25): SEQ ID NO: 5231; WAN024FGK; Start 175; Stop 199
tcatgtttaatccctgacatagaca

SEQ ID NO: 404178 - DNA, 25 bp, Artificial
  probe
  misc_feature (1)..(25): SEQ ID NO: 5231; WAN024FGK; Start 165; Stop 189
cgttttcaagtcatgtttaatccct

SEQ ID NO: 404179 - DNA, 25 bp, Artificial
  probe
  misc_feature (1)..(25): SEQ ID NO: 5231; WAN024FGK; Start 162; Stop 186
tcccgttttcaagtcatgtttaatc

SEQ ID NO: 404180 - DNA, 25 bp, Artificial
  probe
  misc_feature (1)..(25): SEQ ID NO: 5231; WAN024FGK; Start 161; Stop 185
ctcccgttttcaagtcatgtttaat

SEQ ID NO: 404181 - DNA, 25 bp, Artificial
  probe
  misc_feature (1)..(25): SEQ ID NO: 5231; WAN024FGK; Start 113; Stop 137
ctggaacaaagacattggttaccgt

SEQ ID NO: 404182 - DNA, 25 bp, Artificial
  probe
  misc_feature (1)..(25): SEQ ID NO: 5231; WAN024FGK; Start 176; Stop 200
catgtttaatccctgacatagacaa

SEQ ID NO: 404183 - DNA, 25 bp, Artificial
  probe
  misc_feature (1)..(25): SEQ ID NO: 5231; WAN024FGK; Start 51; Stop 75
gtttcctgacaagactccattttcc

SEQ ID NO: 404184 - DNA, 25 bp, Artificial
  probe
  misc_feature (1)..(25): SEQ ID NO: 5231; WAN024FGK; Start 50; Stop 74
ggtttcctgacaagactccattttc

SEQ ID NO: 404185 - DNA, 25 bp, Artificial
  probe
  misc_feature (1)..(25): SEQ ID NO: 5231; WAN024FGK; Start 12; Stop 36
tgaaccttggaagacaatggactgg

SEQ ID NO: 404186 - DNA, 25 bp, Artificial
  probe
  misc_feature (1)..(25): SEQ ID NO: 5231; WAN024FGK; Start 164; Stop 188
ccgttttcaagtcatgtttaatccc

SEQ ID NO: 404187 - DNA, 25 bp, Artificial
  probe
  misc_feature (1)..(25): SEQ ID NO: 5231; WAN024FGK; Start 163; Stop 187
cccgttttcaagtcatgtttaatcc

SEQ ID NO: 404188 - DNA, 25 bp, Artificial
  probe
  misc_feature (1)..(25): SEQ ID NO: 5231; WAN024FGK; Start 160; Stop 184
tctcccgttttcaagtcatgtttaa

SEQ ID NO: 404189 - DNA, 25 bp, Artificial
  probe
  misc_feature (1)..(25): SEQ ID NO: 5231; WAN024FGK; Start 104; Stop 128
caaccgaacctggaacaaagacatt

SEQ ID NO: 404190 - DNA, 25 bp, Artificial
  probe
  misc_feature (1)..(25): SEQ ID NO: 5231; WAN024FGK; Start 48; Stop 72
ctggtttcctgacaagactccattt

SEQ ID NO: 404191 - DNA, 25 bp, Artificial
  probe
  misc_feature (1)..(25): SEQ ID NO: 5231; WAN024FGK; Start 166; Stop 190
gttttcaagtcatgtttaatccctg

SEQ ID NO: 404192 - DNA, 25 bp, Artificial
  probe
  misc_feature (1)..(25): SEQ ID NO: 5231; WAN024FGK; Start 159; Stop 183
ctctcccgttttcaagtcatgttta

SEQ ID NO: 404193 - DNA, 25 bp, Artificial
  probe
  misc_feature (1)..(25): SEQ ID NO: 5231; WAN024FGK; Start 117; Stop 141
aacaaagacattggttaccgttccc

SEQ ID NO: 404194 - DNA, 25 bp, Artificial
  probe
  misc_feature (1)..(25): SEQ ID NO: 5231; WAN024FGK; Start 177; Stop 201
atgtttaatccctgacatagacaaa

SEQ ID NO: 404195 - DNA, 25 bp, Artificial
  probe
  misc_feature (1)..(25): SEQ ID NO: 5231; WAN024FGK; Start 111; Stop 135
acctggaacaaagacattggttacc

SEQ ID NO: 404196 - DNA, 25 bp, Artificial
  probe
  misc_feature (1)..(25): SEQ ID NO: 5231; WAN024FGK; Start 105; Stop 129
aaccgaacctggaacaaagacattg

SEQ ID NO: 404197 - DNA, 25 bp, Artificial
  probe
  misc_feature (1)..(25): SEQ ID NO: 5231; WAN024FGK; Start 178; Stop 202
tgtttaatccctgacatagacaaaa

SEQ ID NO: 404198 - DNA, 25 bp, Artificial
  probe
  misc_feature (1)..(25): SEQ ID NO: 5231; WAN024FGK; Start 167; Stop 191
ttttcaagtcatgtttaatccctga

SEQ ID NO: 404199 - DNA, 25 bp, Artificial
  probe
  misc_feature (1)..(25): SEQ ID NO: 5231; WAN024FGK; Start 10; Stop 34
gctgaaccttggaagacaatggact

SEQ ID NO: 404200 - DNA, 25 bp, Artificial
  probe
  misc_feature (1)..(25): SEQ ID NO: 5231; WAN024FGK; Start 182; Stop 206
taatccctgacatagacaaaaccgc

SEQ ID NO: 404201 - DNA, 25 bp, Artificial
  probe
  misc_feature (1)..(25): SEQ ID NO: 5231; WAN024FGK; Start 112; Stop 136
cctggaacaaagacattggttaccg

SEQ ID NO: 404202 - DNA, 25 bp, Artificial
  probe
  misc_feature (1)..(25): SEQ ID NO: 5231; WAN024FGK; Start 47; Stop 71
tctggtttcctgacaagactccatt

SEQ ID NO: 404203 - DNA, 25 bp, Artificial
  probe
  misc_feature (1)..(25): SEQ ID NO: 5231; WAN024FGK; Start 52; Stop 76
tttcctgacaagactccattttccc

SEQ ID NO: 404204 - DNA, 25 bp, Artificial
  probe
  misc_feature (1)..(25): SEQ ID NO: 5231; WAN024FGK; Start 14; Stop 38
aaccttggaagacaatggactggtc

SEQ ID NO: 404205 - DNA, 25 bp, Artificial
  probe
  misc_feature (1)..(25): SEQ ID NO: 5231; WAN024FGK; Start 13; Stop 37
gaaccttggaagacaatggactggt

SEQ ID NO: 404206 - DNA, 25 bp, Artificial
  probe
  misc_feature (1)..(25): SEQ ID NO: 5232; WAN024GNK; Start 215; Stop 239
ttagaacgatacgagtacctggatg

SEQ ID NO: 404207 - DNA, 25 bp, Artificial
  probe
  misc_feature (1)..(25): SEQ ID NO: 5232; WAN024GNK; Start 72; Stop 96
accgatgttaagttcttccaggatt

SEQ ID NO: 404208 - DNA, 25 bp, Artificial
  probe
  misc_feature (1)..(25): SEQ ID NO: 5232; WAN024GNK; Start 71; Stop 95
aaccgatgttaagttcttccaggat

SEQ ID NO: 404209 - DNA, 25 bp, Artificial
  probe
  misc_feature (1)..(25): SEQ ID NO: 5232; WAN024GNK; Start 19; Stop 43
cgagaacggagaatgatagaaagat

SEQ ID NO: 404210 - DNA, 25 bp, Artificial
  probe
  misc_feature (1)..(25): SEQ ID NO: 5232; WAN024GNK; Start 74; Stop 98
cgatgttaagttcttccaggatttg

SEQ ID NO: 404211 - DNA, 25 bp, Artificial
  probe
  misc_feature (1)..(25): SEQ ID NO: 5232; WAN024GNK; Start 242; Stop 266
cagggttgttggtattcttgataac

SEQ ID NO: 404212 - DNA, 25 bp, Artificial
  probe
  misc_feature (1)..(25): SEQ ID NO: 5232; WAN024GNK; Start 75; Stop 99
gatgttaagttcttccaggatttgc

SEQ ID NO: 404213 - DNA, 25 bp, Artificial
  probe
  misc_feature (1)..(25): SEQ ID NO: 5232; WAN024GNK; Start 61; Stop 85
atatgttcccaaccgatgttaagtt

SEQ ID NO: 404214 - DNA, 25 bp, Artificial
  probe
  misc_feature (1)..(25): SEQ ID NO: 5232; WAN024GNK; Start 70; Stop 94
caaccgatgttaagttcttccagga

SEQ ID NO: 404215 - DNA, 25 bp, Artificial
  probe
  misc_feature (1)..(25): SEQ ID NO: 5232; WAN024GNK; Start 252; Stop 276
ggtattcttgataaccagaggaatt

SEQ ID NO: 404216 - DNA, 25 bp, Artificial
  probe
  misc_feature (1)..(25): SEQ ID NO: 5232; WAN024GNK; Start 190; Stop 214
actggaaattcatcattactgtgtt

SEQ ID NO: 404217 - DNA, 25 bp, Artificial
  probe
  misc_feature (1)..(25): SEQ ID NO: 5232; WAN024GNK; Start 189; Stop 213
aactggaaattcatcattactgtgt

SEQ ID NO: 404218 - DNA, 25 bp, Artificial
  probe
  misc_feature (1)..(25): SEQ ID NO: 5232; WAN024GNK; Start 73; Stop 97
ccgatgttaagttcttccaggattt

SEQ ID NO: 404219 - DNA, 25 bp, Artificial
  probe
  misc_feature (1)..(25): SEQ ID NO: 5232; WAN024GNK; Start 241; Stop 265
tcagggttgttggtattcttgataa

SEQ ID NO: 404220 - DNA, 25 bp, Artificial
  probe
  misc_feature (1)..(25): SEQ ID NO: 5232; WAN024GNK; Start 188; Stop 212
caactggaaattcatcattactgtg

SEQ ID NO: 404221 - DNA, 25 bp, Artificial
  probe
  misc_feature (1)..(25): SEQ ID NO: 5232; WAN024GNK; Start 186; Stop 210
cacaactggaaattcatcattactg

SEQ ID NO: 404222 - DNA, 25 bp, Artificial
  probe
  misc_feature (1)..(25): SEQ ID NO: 5232; WAN024GNK; Start 240; Stop 264
gtcagggttgttggtattcttgata

SEQ ID NO: 404223 - DNA, 25 bp, Artificial
  probe
  misc_feature (1)..(25): SEQ ID NO: 5232; WAN024GNK; Start 62; Stop 86
tatgttcccaaccgatgttaagttc

SEQ ID NO: 404224 - DNA, 25 bp, Artificial
  probe
  misc_feature (1)..(25): SEQ ID NO: 5232; WAN024GNK; Start 21; Stop 45
agaacggagaatgatagaaagatcg

SEQ ID NO: 404225 - DNA, 25 bp, Artificial
  probe
  misc_feature (1)..(25): SEQ ID NO: 5232; WAN024GNK; Start 216; Stop 240
tagaacgatacgagtacctggatgg

SEQ ID NO: 404226 - DNA, 25 bp, Artificial
  probe
  misc_feature (1)..(25): SEQ ID NO: 5232; WAN024GNK; Start 214; Stop 238
tttagaacgatacgagtacctggat

SEQ ID NO: 404227 - DNA, 25 bp, Artificial
  probe
  misc_feature (1)..(25): SEQ ID NO: 5232; WAN024GNK; Start 20; Stop 44
gagaacggagaatgatagaaagatc

SEQ ID NO: 404228 - DNA, 25 bp, Artificial
  probe
  misc_feature (1)..(25): SEQ ID NO: 5232; WAN024GNK; Start 191; Stop 215
ctggaaattcatcattactgtgttt

SEQ ID NO: 404229 - DNA, 25 bp, Artificial
  probe
  misc_feature (1)..(25): SEQ ID NO: 5232; WAN024GNK; Start 12; Stop 36
tagttggcgagaacggagaatgata

SEQ ID NO: 404230 - DNA, 25 bp, Artificial
  probe
  misc_feature (1)..(25): SEQ ID NO: 5232; WAN024GNK; Start 187; Stop 211
acaactggaaattcatcattactgt

SEQ ID NO: 404231 - DNA, 25 bp, Artificial
  probe
  misc_feature (1)..(25): SEQ ID NO: 5232; WAN024GNK; Start 69; Stop 93
ccaaccgatgttaagttcttccagg

SEQ ID NO: 404232 - DNA, 25 bp, Artificial
  probe
  misc_feature (1)..(25): SEQ ID NO: 5232; WAN024GNK; Start 65; Stop 89
gttcccaaccgatgttaagttcttc

SEQ ID NO: 404233 - DNA, 25 bp, Artificial
  probe
  misc_feature (1)..(25): SEQ ID NO: 5232; WAN024GNK; Start 18; Stop 42
gcgagaacggagaatgatagaaaga

SEQ ID NO: 404234 - DNA, 25 bp, Artificial
  probe
  misc_feature (1)..(25): SEQ ID NO: 5232; WAN024GNK; Start 33; Stop 57
gatagaaagatcgtcgatacctgtt

SEQ ID NO: 404235 - DNA, 25 bp, Artificial
  probe
  misc_feature (1)..(25): SEQ ID NO: 5232; WAN024GNK; Start 31; Stop 55
atgatagaaagatcgtcgatacctg

SEQ ID NO: 404236 - DNA, 25 bp, Artificial
  probe
  misc_feature (1)..(25): SEQ ID NO: 5232; WAN024GNK; Start 26; Stop 50
ggagaatgatagaaagatcgtcgat

SEQ ID NO: 404237 - DNA, 25 bp, Artificial
  probe
  misc_feature (1)..(25): SEQ ID NO: 5232; WAN024GNK; Start 34; Stop 58
atagaaagatcgtcgatacctgttg

SEQ ID NO: 404238 - DNA, 25 bp, Artificial
  probe
  misc_feature (1)..(25): SEQ ID NO: 5232; WAN024GNK; Start 15; Stop 39
ttggcgagaacggagaatgatagaa

SEQ ID NO: 404239 - DNA, 25 bp, Artificial
  probe
  misc_feature (1)..(25): SEQ ID NO: 5233; WAN024DRF; Start 37; Stop 61
ctagcattttacaaaagaggagaaa

SEQ ID NO: 404240 - DNA, 25 bp, Artificial
  probe
  misc_feature (1)..(25): SEQ ID NO: 5233; WAN024DRF; Start 38; Stop 62
tagcattttacaaaagaggagaaaa

SEQ ID NO: 404241 - DNA, 25 bp, Artificial
  probe
  misc_feature (1)..(25): SEQ ID NO: 5233; WAN024DRF; Start 39; Stop 63
agcattttacaaaagaggagaaaat

SEQ ID NO: 404242 - DNA, 25 bp, Artificial
  probe
  misc_feature (1)..(25): SEQ ID NO: 5233; WAN024DRF; Start 11; Stop 35
agacaaccttttctcccttatcggc

SEQ ID NO: 404243 - DNA, 25 bp, Artificial
  probe
  misc_feature (1)..(25): SEQ ID NO: 5233; WAN024DRF; Start 10; Stop 34
gagacaaccttttctcccttatcgg

SEQ ID NO: 404244 - DNA, 25 bp, Artificial
  probe
  misc_feature (1)..(25): SEQ ID NO: 5233; WAN024DRF; Start 40; Stop 64
gcattttacaaaagaggagaaaata

SEQ ID NO: 404245 - DNA, 25 bp, Artificial
  probe
  misc_feature (1)..(25): SEQ ID NO: 5234; WAN024G2M; Start 144; Stop 168
ttgttgtgataccataacgaggaag

SEQ ID NO: 404246 - DNA, 25 bp, Artificial
  probe
  misc_feature (1)..(25): SEQ ID NO: 5234; WAN024G2M; Start 143; Stop 167
gttgttgtgataccataacgaggaa

SEQ ID NO: 404247 - DNA, 25 bp, Artificial
  probe
  misc_feature (1)..(25): SEQ ID NO: 5234; WAN024G2M; Start 145; Stop 169
tgttgtgataccataacgaggaagg

SEQ ID NO: 404248 - DNA, 25 bp, Artificial
  probe
  misc_feature (1)..(25): SEQ ID NO: 5234; WAN024G2M; Start 140; Stop 164
aaggttgttgtgataccataacgag

SEQ ID NO: 404249 - DNA, 25 bp, Artificial
  probe
  misc_feature (1)..(25): SEQ ID NO: 5234; WAN024G2M; Start 106; Stop 130
tgcttctacttcctccaaattatca

SEQ ID NO: 404250 - DNA, 25 bp, Artificial
  probe
  misc_feature (1)..(25): SEQ ID NO: 5234; WAN024G2M; Start 105; Stop 129
ctgcttctacttcctccaaattatc

SEQ ID NO: 404251 - DNA, 25 bp, Artificial
  probe
  misc_feature (1)..(25): SEQ ID NO: 5234; WAN024G2M; Start 104; Stop 128
gctgcttctacttcctccaaattat

SEQ ID NO: 404252 - DNA, 25 bp, Artificial
  probe
  misc_feature (1)..(25): SEQ ID NO: 5234; WAN024G2M; Start 107; Stop 131
gcttctacttcctccaaattatcaa

SEQ ID NO: 404253 - DNA, 25 bp, Artificial
  probe
  misc_feature (1)..(25): SEQ ID NO: 5234; WAN024G2M; Start 142; Stop 166
ggttgttgtgataccataacgagga

SEQ ID NO: 404254 - DNA, 25 bp, Artificial
  probe
  misc_feature (1)..(25): SEQ ID NO: 5234; WAN024G2M; Start 141; Stop 165
aggttgttgtgataccataacgagg

SEQ ID NO: 404255 - DNA, 25 bp, Artificial
  probe
  misc_feature (1)..(25): SEQ ID NO: 5234; WAN024G2M; Start 92; Stop 116
ttgtctttgatagctgcttctactt

SEQ ID NO: 404256 - DNA, 25 bp, Artificial
  probe
  misc_feature (1)..(25): SEQ ID NO: 5234; WAN024G2M; Start 91; Stop 115
attgtctttgatagctgcttctact

SEQ ID NO: 404257 - DNA, 25 bp, Artificial
  probe
  misc_feature (1)..(25): SEQ ID NO: 5234; WAN024G2M; Start 93; Stop 117
tgtctttgatagctgcttctacttc

SEQ ID NO: 404258 - DNA, 25 bp, Artificial
  probe
  misc_feature (1)..(25): SEQ ID NO: 5234; WAN024G2M; Start 86; Stop 110
ttggtattgtctttgatagctgctt

SEQ ID NO: 404259 - DNA, 25 bp, Artificial
  probe
  misc_feature (1)..(25): SEQ ID NO: 5234; WAN024G2M; Start 88; Stop 112
ggtattgtctttgatagctgcttct

SEQ ID NO: 404260 - DNA, 25 bp, Artificial
  probe
  misc_feature (1)..(25): SEQ ID NO: 5234; WAN024G2M; Start 181; Stop 205
aagattgaaggttccaccgtaaata

SEQ ID NO: 404261 - DNA, 25 bp, Artificial
  probe
  misc_feature (1)..(25): SEQ ID NO: 5234; WAN024G2M; Start 96; Stop 120
ctttgatagctgcttctacttcctc

SEQ ID NO: 404262 - DNA, 25 bp, Artificial
  probe
  misc_feature (1)..(25): SEQ ID NO: 5234; WAN024G2M; Start 99; Stop 123
tgatagctgcttctacttcctccaa

SEQ ID NO: 404263 - DNA, 25 bp, Artificial
  probe
  misc_feature (1)..(25): SEQ ID NO: 5234; WAN024G2M; Start 98; Stop 122
ttgatagctgcttctacttcctcca

SEQ ID NO: 404264 - DNA, 25 bp, Artificial
  probe
  misc_feature (1)..(25): SEQ ID NO: 5234; WAN024G2M; Start 87; Stop 111
tggtattgtctttgatagctgcttc

SEQ ID NO: 404265 - DNA, 25 bp, Artificial
  probe
  misc_feature (1)..(25): SEQ ID NO: 5234; WAN024G2M; Start 85; Stop 109
cttggtattgtctttgatagctgct

SEQ ID NO: 404266 - DNA, 25 bp, Artificial
  probe
  misc_feature (1)..(25): SEQ ID NO: 5234; WAN024G2M; Start 182; Stop 206
agattgaaggttccaccgtaaatag

SEQ ID NO: 404267 - DNA, 25 bp, Artificial
  probe
  misc_feature (1)..(25): SEQ ID NO: 5234; WAN024G2M; Start 139; Stop 163
aaaggttgttgtgataccataacga

SEQ ID NO: 404268 - DNA, 25 bp, Artificial
  probe
  misc_feature (1)..(25): SEQ ID NO: 5234; WAN024G2M; Start 95; Stop 119
tctttgatagctgcttctacttcct

SEQ ID NO: 404269 - DNA, 25 bp, Artificial
  probe
  misc_feature (1)..(25): SEQ ID NO: 5234; WAN024G2M; Start 94; Stop 118
gtctttgatagctgcttctacttcc

SEQ ID NO: 404270 - DNA, 25 bp, Artificial
  probe
  misc_feature (1)..(25): SEQ ID NO: 5234; WAN024G2M; Start 59; Stop 83
ttacccaaggtttcaatcaagacaa

SEQ ID NO: 404271 - DNA, 25 bp, Artificial
  probe
  misc_feature (1)..(25): SEQ ID NO: 5234; WAN024G2M; Start 184; Stop 208
attgaaggttccaccgtaaatagtc

SEQ ID NO: 404272 - DNA, 25 bp, Artificial
  probe
  misc_feature (1)..(25): SEQ ID NO: 5234; WAN024G2M; Start 183; Stop 207
gattgaaggttccaccgtaaatagt

SEQ ID NO: 404273 - DNA, 25 bp, Artificial
  probe
  misc_feature (1)..(25): SEQ ID NO: 5234; WAN024G2M; Start 90; Stop 114
tattgtctttgatagctgcttctac

SEQ ID NO: 404274 - DNA, 25 bp, Artificial
  probe
  misc_feature (1)..(25): SEQ ID NO: 5234; WAN024G2M; Start 89; Stop 113
gtattgtctttgatagctgcttcta

SEQ ID NO: 404275 - DNA, 25 bp, Artificial
  probe
  misc_feature (1)..(25): SEQ ID NO: 5234; WAN024G2M; Start 180; Stop 204
aaagattgaaggttccaccgtaaat

SEQ ID NO: 404276 - DNA, 25 bp, Artificial
  probe
  misc_feature (1)..(25): SEQ ID NO: 5234; WAN024G2M; Start 60; Stop 84
tacccaaggtttcaatcaagacaag

SEQ ID NO: 404277 - DNA, 25 bp, Artificial
  probe
  misc_feature (1)..(25): SEQ ID NO: 5234; WAN024G2M; Start 101; Stop 125
atagctgcttctacttcctccaaat

SEQ ID NO: 404278 - DNA, 25 bp, Artificial
  probe
  misc_feature (1)..(25): SEQ ID NO: 5235; WAN024DPL; Start 53; Stop 77
tcattaaagcctatacttctcttgc

SEQ ID NO: 404279 - DNA, 25 bp, Artificial
  probe
  misc_feature (1)..(25): SEQ ID NO: 5235; WAN024DPL; Start 17; Stop 41
atttgaccagtaccttgattgatgt

SEQ ID NO: 404280 - DNA, 25 bp, Artificial
  probe
  misc_feature (1)..(25): SEQ ID NO: 5235; WAN024DPL; Start 19; Stop 43
ttgaccagtaccttgattgatgttt

SEQ ID NO: 404281 - DNA, 25 bp, Artificial
  probe
  misc_feature (1)..(25): SEQ ID NO: 5235; WAN024DPL; Start 18; Stop 42
tttgaccagtaccttgattgatgtt

SEQ ID NO: 404282 - DNA, 25 bp, Artificial
  probe
  misc_feature (1)..(25): SEQ ID NO: 5235; WAN024DPL; Start 10; Stop 34
agtagttatttgaccagtaccttga

SEQ ID NO: 404283 - DNA, 25 bp, Artificial
  probe
  misc_feature (1)..(25): SEQ ID NO: 5235; WAN024DPL; Start 14; Stop 38
gttatttgaccagtaccttgattga

SEQ ID NO: 404284 - DNA, 25 bp, Artificial
  probe
  misc_feature (1)..(25): SEQ ID NO: 5235; WAN024DPL; Start 13; Stop 37
agttatttgaccagtaccttgattg

SEQ ID NO: 404285 - DNA, 25 bp, Artificial
  probe
  misc_feature (1)..(25): SEQ ID NO: 5235; WAN024DPL; Start 16; Stop 40
tatttgaccagtaccttgattgatg

SEQ ID NO: 404286 - DNA, 25 bp, Artificial
  probe
  misc_feature (1)..(25): SEQ ID NO: 5235; WAN024DPL; Start 9; Stop 33
aagtagttatttgaccagtaccttg

SEQ ID NO: 404287 - DNA, 25 bp, Artificial
  probe
  misc_feature (1)..(25): SEQ ID NO: 5235; WAN024DPL; Start 11; Stop 35
gtagttatttgaccagtaccttgat

SEQ ID NO: 404288 - DNA, 25 bp, Artificial
  probe
  misc_feature (1)..(25): SEQ ID NO: 5235; WAN024DPL; Start 15; Stop 39
ttatttgaccagtaccttgattgat

SEQ ID NO: 404289 - DNA, 25 bp, Artificial
  probe
  misc_feature (1)..(25): SEQ ID NO: 5235; WAN024DPL; Start 8; Stop 32
aaagtagttatttgaccagtacctt

SEQ ID NO: 404290 - DNA, 25 bp, Artificial
  probe
  misc_feature (1)..(25): SEQ ID NO: 5235; WAN024DPL; Start 12; Stop 36
tagttatttgaccagtaccttgatt

SEQ ID NO: 404291 - DNA, 25 bp, Artificial
  probe
  misc_feature (1)..(25): SEQ ID NO: 5235; WAN024DPL; Start 50; Stop 74
acttcattaaagcctatacttctct

SEQ ID NO: 404292 - DNA, 25 bp, Artificial
  probe
  misc_feature (1)..(25): SEQ ID NO: 5235; WAN024DPL; Start 54; Stop 78
cattaaagcctatacttctcttgca

SEQ ID NO: 404293 - DNA, 25 bp, Artificial
  probe
  misc_feature (1)..(25): SEQ ID NO: 5235; WAN024DPL; Start 48; Stop 72
caacttcattaaagcctatacttct

SEQ ID NO: 404294 - DNA, 25 bp, Artificial
  probe
  misc_feature (1)..(25): SEQ ID NO: 5235; WAN024DPL; Start 47; Stop 71
tcaacttcattaaagcctatacttc

SEQ ID NO: 404295 - DNA, 25 bp, Artificial
  probe
  misc_feature (1)..(25): SEQ ID NO: 5235; WAN024DPL; Start 45; Stop 69
cttcaacttcattaaagcctatact

SEQ ID NO: 404296 - DNA, 25 bp, Artificial
  probe
  misc_feature (1)..(25): SEQ ID NO: 5235; WAN024DPL; Start 44; Stop 68
tcttcaacttcattaaagcctatac

SEQ ID NO: 404297 - DNA, 25 bp, Artificial
  probe
  misc_feature (1)..(25): SEQ ID NO: 5235; WAN024DPL; Start 42; Stop 66
tttcttcaacttcattaaagcctat

SEQ ID NO: 404298 - DNA, 25 bp, Artificial
  probe
  misc_feature (1)..(25): SEQ ID NO: 5235; WAN024DPL; Start 52; Stop 76
ttcattaaagcctatacttctcttg

SEQ ID NO: 404299 - DNA, 25 bp, Artificial
  probe
  misc_feature (1)..(25): SEQ ID NO: 5235; WAN024DPL; Start 49; Stop 73
aacttcattaaagcctatacttctc

SEQ ID NO: 404300 - DNA, 25 bp, Artificial
  probe
  misc_feature (1)..(25): SEQ ID NO: 5235; WAN024DPL; Start 21; Stop 45
gaccagtaccttgattgatgttttc

SEQ ID NO: 404301 - DNA, 25 bp, Artificial
  probe
  misc_feature (1)..(25): SEQ ID NO: 5235; WAN024DPL; Start 22; Stop 46
accagtaccttgattgatgttttct

SEQ ID NO: 404302 - DNA, 25 bp, Artificial
  probe
  misc_feature (1)..(25): SEQ ID NO: 5235; WAN024DPL; Start 23; Stop 47
ccagtaccttgattgatgttttctt

SEQ ID NO: 404303 - DNA, 25 bp, Artificial
  probe
  misc_feature (1)..(25): SEQ ID NO: 5235; WAN024DPL; Start 20; Stop 44
tgaccagtaccttgattgatgtttt

SEQ ID NO: 404304 - DNA, 25 bp, Artificial
  probe
  misc_feature (1)..(25): SEQ ID NO: 5235; WAN024DPL; Start 51; Stop 75
cttcattaaagcctatacttctctt

SEQ ID NO: 404305 - DNA, 25 bp, Artificial
  probe
  misc_feature (1)..(25): SEQ ID NO: 5235; WAN024DPL; Start 46; Stop 70
ttcaacttcattaaagcctatactt

SEQ ID NO: 404306 - DNA, 25 bp, Artificial
  probe
  misc_feature (1)..(25): SEQ ID NO: 5235; WAN024DPL; Start 39; Stop 63
tgttttcttcaacttcattaaagcc

SEQ ID NO: 404307 - DNA, 25 bp, Artificial
  probe
  misc_feature (1)..(25): SEQ ID NO: 5235; WAN024DPL; Start 40; Stop 64
gttttcttcaacttcattaaagcct

SEQ ID NO: 404308 - DNA, 25 bp, Artificial
  probe
  misc_feature (1)..(25): SEQ ID NO: 5235; WAN024DPL; Start 43; Stop 67
ttcttcaacttcattaaagcctata

SEQ ID NO: 404309 - DNA, 25 bp, Artificial
  probe
  misc_feature (1)..(25): SEQ ID NO: 5235; WAN024DPL; Start 24; Stop 48
cagtaccttgattgatgttttcttc

SEQ ID NO: 404310 - DNA, 25 bp, Artificial
  probe
  misc_feature (1)..(25): SEQ ID NO: 5235; WAN024DPL; Start 25; Stop 49
agtaccttgattgatgttttcttca

SEQ ID NO: 404311 - DNA, 25 bp, Artificial
  probe
  misc_feature (1)..(25): SEQ ID NO: 5236; WAN024G27; Start 82; Stop 106
aatatcgtggttgacttcaaacaga

SEQ ID NO: 404312 - DNA, 25 bp, Artificial
  probe
  misc_feature (1)..(25): SEQ ID NO: 5236; WAN024G27; Start 81; Stop 105
caatatcgtggttgacttcaaacag

SEQ ID NO: 404313 - DNA, 25 bp, Artificial
  probe
  misc_feature (1)..(25): SEQ ID NO: 5236; WAN024G27; Start 218; Stop 242
ccttcataggtatttggaaattggc

SEQ ID NO: 404314 - DNA, 25 bp, Artificial
  probe
  misc_feature (1)..(25): SEQ ID NO: 5236; WAN024G27; Start 83; Stop 107
atatcgtggttgacttcaaacagac

SEQ ID NO: 404315 - DNA, 25 bp, Artificial
  probe
  misc_feature (1)..(25): SEQ ID NO: 5236; WAN024G27; Start 29; Stop 53
ttaatcaagatctccatcattgcct

SEQ ID NO: 404316 - DNA, 25 bp, Artificial
  probe
  misc_feature (1)..(25): SEQ ID NO: 5236; WAN024G27; Start 30; Stop 54
taatcaagatctccatcattgcctg

SEQ ID NO: 404317 - DNA, 25 bp, Artificial
  probe
  misc_feature (1)..(25): SEQ ID NO: 5236; WAN024G27; Start 28; Stop 52
attaatcaagatctccatcattgcc

SEQ ID NO: 404318 - DNA, 25 bp, Artificial
  probe
  misc_feature (1)..(25): SEQ ID NO: 5236; WAN024G27; Start 217; Stop 241
tccttcataggtatttggaaattgg

SEQ ID NO: 404319 - DNA, 25 bp, Artificial
  probe
  misc_feature (1)..(25): SEQ ID NO: 5236; WAN024G27; Start 243; Stop 267
caccaaagtcagtcataatctgctg

SEQ ID NO: 404320 - DNA, 25 bp, Artificial
  probe
  misc_feature (1)..(25): SEQ ID NO: 5236; WAN024G27; Start 208; Stop 232
gctggaaattccttcataggtattt

SEQ ID NO: 404321 - DNA, 25 bp, Artificial
  probe
  misc_feature (1)..(25): SEQ ID NO: 5236; WAN024G27; Start 75; Stop 99
gaatcccaatatcgtggttgacttc

SEQ ID NO: 404322 - DNA, 25 bp, Artificial
  probe
  misc_feature (1)..(25): SEQ ID NO: 5236; WAN024G27; Start 210; Stop 234
tggaaattccttcataggtatttgg

SEQ ID NO: 404323 - DNA, 25 bp, Artificial
  probe
  misc_feature (1)..(25): SEQ ID NO: 5236; WAN024G27; Start 207; Stop 231
agctggaaattccttcataggtatt

SEQ ID NO: 404324 - DNA, 25 bp, Artificial
  probe
  misc_feature (1)..(25): SEQ ID NO: 5236; WAN024G27; Start 206; Stop 230
aagctggaaattccttcataggtat

SEQ ID NO: 404325 - DNA, 25 bp, Artificial
  probe
  misc_feature (1)..(25): SEQ ID NO: 5236; WAN024G27; Start 205; Stop 229
caagctggaaattccttcataggta

SEQ ID NO: 404326 - DNA, 25 bp, Artificial
  probe
  misc_feature (1)..(25): SEQ ID NO: 5236; WAN024G27; Start 32; Stop 56
atcaagatctccatcattgcctgaa

SEQ ID NO: 404327 - DNA, 25 bp, Artificial
  probe
  misc_feature (1)..(25): SEQ ID NO: 5236; WAN024G27; Start 31; Stop 55
aatcaagatctccatcattgcctga

SEQ ID NO: 404328 - DNA, 25 bp, Artificial
  probe
  misc_feature (1)..(25): SEQ ID NO: 5236; WAN024G27; Start 211; Stop 235
ggaaattccttcataggtatttgga

SEQ ID NO: 404329 - DNA, 25 bp, Artificial
  probe
  misc_feature (1)..(25): SEQ ID NO: 5236; WAN024G27; Start 80; Stop 104
ccaatatcgtggttgacttcaaaca

SEQ ID NO: 404330 - DNA, 25 bp, Artificial
  probe
  misc_feature (1)..(25): SEQ ID NO: 5236; WAN024G27; Start 203; Stop 227
ttcaagctggaaattccttcatagg

SEQ ID NO: 404331 - DNA, 25 bp, Artificial
  probe
  misc_feature (1)..(25): SEQ ID NO: 5236; WAN024G27; Start 76; Stop 100
aatcccaatatcgtggttgacttca

SEQ ID NO: 404332 - DNA, 25 bp, Artificial
  probe
  misc_feature (1)..(25): SEQ ID NO: 5236; WAN024G27; Start 242; Stop 266
ccaccaaagtcagtcataatctgct

SEQ ID NO: 404333 - DNA, 25 bp, Artificial
  probe
  misc_feature (1)..(25): SEQ ID NO: 5236; WAN024G27; Start 77; Stop 101
atcccaatatcgtggttgacttcaa

SEQ ID NO: 404334 - DNA, 25 bp, Artificial
  probe
  misc_feature (1)..(25): SEQ ID NO: 5236; WAN024G27; Start 202; Stop 226
tttcaagctggaaattccttcatag

SEQ ID NO: 404335 - DNA, 25 bp, Artificial
  probe
  misc_feature (1)..(25): SEQ ID NO: 5236; WAN024G27; Start 201; Stop 225
ctttcaagctggaaattccttcata

SEQ ID NO: 404336 - DNA, 25 bp, Artificial
  probe
  misc_feature (1)..(25): SEQ ID NO: 5236; WAN024G27; Start 153; Stop 177
agttaaaagcaatactggaaatggc

SEQ ID NO: 404337 - DNA, 25 bp, Artificial
  probe
  misc_feature (1)..(25): SEQ ID NO: 5236; WAN024G27; Start 79; Stop 103
cccaatatcgtggttgacttcaaac

SEQ ID NO: 404338 - DNA, 25 bp, Artificial
  probe
  misc_feature (1)..(25): SEQ ID NO: 5236; WAN024G27; Start 149; Stop 173
ggcaagttaaaagcaatactggaaa

SEQ ID NO: 404339 - DNA, 25 bp, Artificial
  probe
  misc_feature (1)..(25): SEQ ID NO: 5236; WAN024G27; Start 219; Stop 243
cttcataggtatttggaaattggcc

SEQ ID NO: 404340 - DNA, 25 bp, Artificial
  probe
  misc_feature (1)..(25): SEQ ID NO: 5236; WAN024G27; Start 78; Stop 102
tcccaatatcgtggttgacttcaaa

SEQ ID NO: 404341 - DNA, 25 bp, Artificial
  probe
  misc_feature (1)..(25): SEQ ID NO: 5236; WAN024G27; Start 209; Stop 233
ctggaaattccttcataggtatttg

SEQ ID NO: 404342 - DNA, 25 bp, Artificial
  probe
  misc_feature (1)..(25): SEQ ID NO: 5236; WAN024G27; Start 204; Stop 228
tcaagctggaaattccttcataggt

SEQ ID NO: 404343 - DNA, 25 bp, Artificial
  probe
  misc_feature (1)..(25): SEQ ID NO: 5236; WAN024G27; Start 148; Stop 172
aggcaagttaaaagcaatactggaa

SEQ ID NO: 404344 - DNA, 25 bp, Artificial
  probe
  misc_feature (1)..(25): SEQ ID NO: 5237; WAN024CR8; Start 59; Stop 83
ctaagtattatggagtagccgatgg

SEQ ID NO: 404345 - DNA, 25 bp, Artificial
  probe
  misc_feature (1)..(25): SEQ ID NO: 5237; WAN024CR8; Start 60; Stop 84
taagtattatggagtagccgatgga

SEQ ID NO: 404346 - DNA, 25 bp, Artificial
  probe
  misc_feature (1)..(25): SEQ ID NO: 5237; WAN024CR8; Start 58; Stop 82
tctaagtattatggagtagccgatg

SEQ ID NO: 404347 - DNA, 25 bp, Artificial
  probe
  misc_feature (1)..(25): SEQ ID NO: 5237; WAN024CR8; Start 64; Stop 88
tattatggagtagccgatggaatga

SEQ ID NO: 404348 - DNA, 25 bp, Artificial
  probe
  misc_feature (1)..(25): SEQ ID NO: 5237; WAN024CR8; Start 63; Stop 87
gtattatggagtagccgatggaatg

SEQ ID NO: 404349 - DNA, 25 bp, Artificial
  probe
  misc_feature (1)..(25): SEQ ID NO: 5237; WAN024CR8; Start 62; Stop 86
agtattatggagtagccgatggaat

SEQ ID NO: 404350 - DNA, 25 bp, Artificial
  probe
  misc_feature (1)..(25): SEQ ID NO: 5237; WAN024CR8; Start 61; Stop 85
aagtattatggagtagccgatggaa

SEQ ID NO: 404351 - DNA, 25 bp, Artificial
  probe
  misc_feature (1)..(25): SEQ ID NO: 5237; WAN024CR8; Start 73; Stop 97
gtagccgatggaatgaatgtagaag

SEQ ID NO: 404352 - DNA, 25 bp, Artificial
  probe
  misc_feature (1)..(25): SEQ ID NO: 5237; WAN024CR8; Start 653; Stop 677
aaggttactctcttgaaggatggaa

SEQ ID NO: 404353 - DNA, 25 bp, Artificial
  probe
  misc_feature (1)..(25): SEQ ID NO: 5237; WAN024CR8; Start 72; Stop 96
agtagccgatggaatgaatgtagaa

SEQ ID NO: 404354 - DNA, 25 bp, Artificial
  probe
  misc_feature (1)..(25): SEQ ID NO: 5237; WAN024CR8; Start 66; Stop 90
ttatggagtagccgatggaatgaat

SEQ ID NO: 404355 - DNA, 25 bp, Artificial
  probe
  misc_feature (1)..(25): SEQ ID NO: 5237; WAN024CR8; Start 65; Stop 89
attatggagtagccgatggaatgaa

SEQ ID NO: 404356 - DNA, 25 bp, Artificial
  probe
  misc_feature (1)..(25): SEQ ID NO: 5237; WAN024CR8; Start 654; Stop 678
aggttactctcttgaaggatggaag

SEQ ID NO: 404357 - DNA, 25 bp, Artificial
  probe
  misc_feature (1)..(25): SEQ ID NO: 5237; WAN024CR8; Start 57; Stop 81
atctaagtattatggagtagccgat

SEQ ID NO: 404358 - DNA, 25 bp, Artificial
  probe
  misc_feature (1)..(25): SEQ ID NO: 5237; WAN024CR8; Start 71; Stop 95
gagtagccgatggaatgaatgtaga

SEQ ID NO: 404359 - DNA, 25 bp, Artificial
  probe
  misc_feature (1)..(25): SEQ ID NO: 5237; WAN024CR8; Start 149; Stop 173
acaactactacagacatgactatgg

SEQ ID NO: 404360 - DNA, 25 bp, Artificial
  probe
  misc_feature (1)..(25): SEQ ID NO: 5237; WAN024CR8; Start 56; Stop 80
tatctaagtattatggagtagccga

SEQ ID NO: 404361 - DNA, 25 bp, Artificial
  probe
  misc_feature (1)..(25): SEQ ID NO: 5237; WAN024CR8; Start 874; Stop 898
tataacttcgcttcatctggtgagt

SEQ ID NO: 404362 - DNA, 25 bp, Artificial
  probe
  misc_feature (1)..(25): SEQ ID NO: 5237; WAN024CR8; Start 74; Stop 98
tagccgatggaatgaatgtagaagg

SEQ ID NO: 404363 - DNA, 25 bp, Artificial
  probe
  misc_feature (1)..(25): SEQ ID NO: 5237; WAN024CR8; Start 67; Stop 91
tatggagtagccgatggaatgaatg

SEQ ID NO: 404364 - DNA, 25 bp, Artificial
  probe
  misc_feature (1)..(25): SEQ ID NO: 5237; WAN024CR8; Start 148; Stop 172
cacaactactacagacatgactatg

SEQ ID NO: 404365 - DNA, 25 bp, Artificial
  probe
  misc_feature (1)..(25): SEQ ID NO: 5237; WAN024CR8; Start 146; Stop 170
ctcacaactactacagacatgacta

SEQ ID NO: 404366 - DNA, 25 bp, Artificial
  probe
  misc_feature (1)..(25): SEQ ID NO: 5237; WAN024CR8; Start 474; Stop 498
tgatgatggcatgttcttggattac

SEQ ID NO: 404367 - DNA, 25 bp, Artificial
  probe
  misc_feature (1)..(25): SEQ ID NO: 5237; WAN024CR8; Start 473; Stop 497
gtgatgatggcatgttcttggatta

SEQ ID NO: 404368 - DNA, 25 bp, Artificial
  probe
  misc_feature (1)..(25): SEQ ID NO: 5237; WAN024CR8; Start 873; Stop 897
ttataacttcgcttcatctggtgag

SEQ ID NO: 404369 - DNA, 25 bp, Artificial
  probe
  misc_feature (1)..(25): SEQ ID NO: 5237; WAN024CR8; Start 469; Stop 493
ttaagtgatgatggcatgttcttgg

SEQ ID NO: 404370 - DNA, 25 bp, Artificial
  probe
  misc_feature (1)..(25): SEQ ID NO: 5237; WAN024CR8; Start 134; Stop 158
taattacagcggctcacaactacta

SEQ ID NO: 404371 - DNA, 25 bp, Artificial
  probe
  misc_feature (1)..(25): SEQ ID NO: 5237; WAN024CR8; Start 147; Stop 171
tcacaactactacagacatgactat

SEQ ID NO: 404372 - DNA, 25 bp, Artificial
  probe
  misc_feature (1)..(25): SEQ ID NO: 5237; WAN024CR8; Start 122; Stop 146
aagataatgtgttaattacagcggc

SEQ ID NO: 404373 - DNA, 25 bp, Artificial
  probe
  misc_feature (1)..(25): SEQ ID NO: 5237; WAN024CR8; Start 124; Stop 148
gataatgtgttaattacagcggctc

SEQ ID NO: 404374 - DNA, 25 bp, Artificial
  probe
  misc_feature (1)..(25): SEQ ID NO: 5237; WAN024CR8; Start 123; Stop 147
agataatgtgttaattacagcggct

SEQ ID NO: 404375 - DNA, 25 bp, Artificial
  probe
  misc_feature (1)..(25): SEQ ID NO: 5237; WAN024CR8; Start 55; Stop 79
ttatctaagtattatggagtagccg

SEQ ID NO: 404376 - DNA, 25 bp, Artificial
  probe
  misc_feature (1)..(25): SEQ ID NO: 5237; WAN024CR8; Start 125; Stop 149
ataatgtgttaattacagcggctca

SEQ ID NO: 404377 - DNA, 25 bp, Artificial
  probe
  misc_feature (1)..(25): SEQ ID NO: 5238; WAN024F9B; Start 219; Stop 243
aagaccaaccttgattgacttagat

SEQ ID NO: 404378 - DNA, 25 bp, Artificial
  probe
  misc_feature (1)..(25): SEQ ID NO: 5238; WAN024F9B; Start 220; Stop 244
agaccaaccttgattgacttagata

SEQ ID NO: 404379 - DNA, 25 bp, Artificial
  probe
  misc_feature (1)..(25): SEQ ID NO: 5238; WAN024F9B; Start 221; Stop 245
gaccaaccttgattgacttagataa

SEQ ID NO: 404380 - DNA, 25 bp, Artificial
  probe
  misc_feature (1)..(25): SEQ ID NO: 5238; WAN024F9B; Start 222; Stop 246
accaaccttgattgacttagataag

SEQ ID NO: 404381 - DNA, 25 bp, Artificial
  probe
  misc_feature (1)..(25): SEQ ID NO: 5238; WAN024F9B; Start 304; Stop 328
aatgtctcagaagaattgtacgagg

SEQ ID NO: 404382 - DNA, 25 bp, Artificial
  probe
  misc_feature (1)..(25): SEQ ID NO: 5238; WAN024F9B; Start 1; Stop 25
ttgattaagagaggagatgttgtag

SEQ ID NO: 404383 - DNA, 25 bp, Artificial
  probe
  misc_feature (1)..(25): SEQ ID NO: 5238; WAN024F9B; Start 305; Stop 329
atgtctcagaagaattgtacgagga

SEQ ID NO: 404384 - DNA, 25 bp, Artificial
  probe
  misc_feature (1)..(25): SEQ ID NO: 5238; WAN024F9B; Start 306; Stop 330
tgtctcagaagaattgtacgaggaa

SEQ ID NO: 404385 - DNA, 25 bp, Artificial
  probe
  misc_feature (1)..(25): SEQ ID NO: 5238; WAN024F9B; Start 384; Stop 408
tatgcaactcaatccaggaacttat

SEQ ID NO: 404386 - DNA, 25 bp, Artificial
  probe
  misc_feature (1)..(25): SEQ ID NO: 5238; WAN024F9B; Start 386; Stop 410
tgcaactcaatccaggaacttatta

SEQ ID NO: 404387 - DNA, 25 bp, Artificial
  probe
  misc_feature (1)..(25): SEQ ID NO: 5238; WAN024F9B; Start 383; Stop 407
ttatgcaactcaatccaggaactta

SEQ ID NO: 404388 - DNA, 25 bp, Artificial
  probe
  misc_feature (1)..(25): SEQ ID NO: 5238; WAN024F9B; Start 385; Stop 409
atgcaactcaatccaggaacttatt

SEQ ID NO: 404389 - DNA, 25 bp, Artificial
  probe
  misc_feature (1)..(25): SEQ ID NO: 5238; WAN024F9B; Start 171; Stop 195
caagaactttatgatagaagagccg

SEQ ID NO: 404390 - DNA, 25 bp, Artificial
  probe
  misc_feature (1)..(25): SEQ ID NO: 5238; WAN024F9B; Start 303; Stop 327
caatgtctcagaagaattgtacgag

SEQ ID NO: 404391 - DNA, 25 bp, Artificial
  probe
  misc_feature (1)..(25): SEQ ID NO: 5238; WAN024F9B; Start 362; Stop 386
tttcgctgaacaagtctgagtttat

SEQ ID NO: 404392 - DNA, 25 bp, Artificial
  probe
  misc_feature (1)..(25): SEQ ID NO: 5238; WAN024F9B; Start 361; Stop 385
atttcgctgaacaagtctgagttta

SEQ ID NO: 404393 - DNA, 25 bp, Artificial
  probe
  misc_feature (1)..(25): SEQ ID NO: 5238; WAN024F9B; Start 299; Stop 323
gacgcaatgtctcagaagaattgta

SEQ ID NO: 404394 - DNA, 25 bp, Artificial
  probe
  misc_feature (1)..(25): SEQ ID NO: 5238; WAN024F9B; Start 40; Stop 64
tttccgactattagtagcgatttgg

SEQ ID NO: 404395 - DNA, 25 bp, Artificial
  probe
  misc_feature (1)..(25): SEQ ID NO: 5238; WAN024F9B; Start 363; Stop 387
ttcgctgaacaagtctgagtttatg

SEQ ID NO: 404396 - DNA, 25 bp, Artificial
  probe
  misc_feature (1)..(25): SEQ ID NO: 5238; WAN024F9B; Start 302; Stop 326
gcaatgtctcagaagaattgtacga

SEQ ID NO: 404397 - DNA, 25 bp, Artificial
  probe
  misc_feature (1)..(25): SEQ ID NO: 5238; WAN024F9B; Start 300; Stop 324
acgcaatgtctcagaagaattgtac

SEQ ID NO: 404398 - DNA, 25 bp, Artificial
  probe
  misc_feature (1)..(25): SEQ ID NO: 5238; WAN024F9B; Start 308; Stop 332
tctcagaagaattgtacgaggaaat

SEQ ID NO: 404399 - DNA, 25 bp, Artificial
  probe
  misc_feature (1)..(25): SEQ ID NO: 5238; WAN024F9B; Start 170; Stop 194
tcaagaactttatgatagaagagcc

SEQ ID NO: 404400 - DNA, 25 bp, Artificial
  probe
  misc_feature (1)..(25): SEQ ID NO: 5238; WAN024F9B; Start 163; Stop 187
cgtttggtcaagaactttatgatag

SEQ ID NO: 404401 - DNA, 25 bp, Artificial
  probe
  misc_feature (1)..(25): SEQ ID NO: 5238; WAN024F9B; Start 307; Stop 331
gtctcagaagaattgtacgaggaaa

SEQ ID NO: 404402 - DNA, 25 bp, Artificial
  probe
  misc_feature (1)..(25): SEQ ID NO: 5238; WAN024F9B; Start 360; Stop 384
gatttcgctgaacaagtctgagttt

SEQ ID NO: 404403 - DNA, 25 bp, Artificial
  probe
  misc_feature (1)..(25): SEQ ID NO: 5238; WAN024F9B; Start 309; Stop 333
ctcagaagaattgtacgaggaaatt

SEQ ID NO: 404404 - DNA, 25 bp, Artificial
  probe
  misc_feature (1)..(25): SEQ ID NO: 5238; WAN024F9B; Start 169; Stop 193
gtcaagaactttatgatagaagagc

SEQ ID NO: 404405 - DNA, 25 bp, Artificial
  probe
  misc_feature (1)..(25): SEQ ID NO: 5238; WAN024F9B; Start 301; Stop 325
cgcaatgtctcagaagaattgtacg

SEQ ID NO: 404406 - DNA, 25 bp, Artificial
  probe
  misc_feature (1)..(25): SEQ ID NO: 5238; WAN024F9B; Start 382; Stop 406
tttatgcaactcaatccaggaactt

SEQ ID NO: 404407 - DNA, 25 bp, Artificial
  probe
  misc_feature (1)..(25): SEQ ID NO: 5238; WAN024F9B; Start 61; Stop 85
ttggctgtgaagaatcatatgtata

SEQ ID NO: 404408 - DNA, 25 bp, Artificial
  probe
  misc_feature (1)..(25): SEQ ID NO: 5238; WAN024F9B; Start 367; Stop 391
ctgaacaagtctgagtttatgcaac

SEQ ID NO: 404409 - DNA, 25 bp, Artificial
  probe
  misc_feature (1)..(25): SEQ ID NO: 5238; WAN024F9B; Start 216; Stop 240
tacaagaccaaccttgattgactta

SEQ ID NO: 404410 - DNA, 25 bp, Artificial
  probe
  misc_feature (1)..(25): SEQ ID NO: 5239; WAN024EXO; Start 186; Stop 210
tatgaagattatttggagttgcgac

SEQ ID NO: 404411 - DNA, 25 bp, Artificial
  probe
  misc_feature (1)..(25): SEQ ID NO: 5239; WAN024EXO; Start 190; Stop 214
aagattatttggagttgcgacgata

SEQ ID NO: 404412 - DNA, 25 bp, Artificial
  probe
  misc_feature (1)..(25): SEQ ID NO: 5239; WAN024EXO; Start 78; Stop 102
tttctttacacgcatctaccatctc

SEQ ID NO: 404413 - DNA, 25 bp, Artificial
  probe
  misc_feature (1)..(25): SEQ ID NO: 5239; WAN024EXO; Start 185; Stop 209
ttatgaagattatttggagttgcga

SEQ ID NO: 404414 - DNA, 25 bp, Artificial
  probe
  misc_feature (1)..(25): SEQ ID NO: 5239; WAN024EXO; Start 192; Stop 216
gattatttggagttgcgacgataac

SEQ ID NO: 404415 - DNA, 25 bp, Artificial
  probe
  misc_feature (1)..(25): SEQ ID NO: 5239; WAN024EXO; Start 191; Stop 215
agattatttggagttgcgacgataa

SEQ ID NO: 404416 - DNA, 25 bp, Artificial
  probe
  misc_feature (1)..(25): SEQ ID NO: 5239; WAN024EXO; Start 193; Stop 217
attatttggagttgcgacgataaca

SEQ ID NO: 404417 - DNA, 25 bp, Artificial
  probe
  misc_feature (1)..(25): SEQ ID NO: 5239; WAN024EXO; Start 189; Stop 213
gaagattatttggagttgcgacgat

SEQ ID NO: 404418 - DNA, 25 bp, Artificial
  probe
  misc_feature (1)..(25): SEQ ID NO: 5239; WAN024EXO; Start 184; Stop 208
cttatgaagattatttggagttgcg

SEQ ID NO: 404419 - DNA, 25 bp, Artificial
  probe
  misc_feature (1)..(25): SEQ ID NO: 5239; WAN024EXO; Start 222; Stop 246
ctacttcatcgctagaaaccaactc

SEQ ID NO: 404420 - DNA, 25 bp, Artificial
  probe
  misc_feature (1)..(25): SEQ ID NO: 5239; WAN024EXO; Start 183; Stop 207
ccttatgaagattatttggagttgc

SEQ ID NO: 404421 - DNA, 25 bp, Artificial
  probe
  misc_feature (1)..(25): SEQ ID NO: 5239; WAN024EXO; Start 38; Stop 62
aagaaattcataatatgtcctgcca

SEQ ID NO: 404422 - DNA, 25 bp, Artificial
  probe
  misc_feature (1)..(25): SEQ ID NO: 5239; WAN024EXO; Start 187; Stop 211
atgaagattatttggagttgcgacg

SEQ ID NO: 404423 - DNA, 25 bp, Artificial
  probe
  misc_feature (1)..(25): SEQ ID NO: 5239; WAN024EXO; Start 39; Stop 63
agaaattcataatatgtcctgccat

SEQ ID NO: 404424 - DNA, 25 bp, Artificial
  probe
  misc_feature (1)..(25): SEQ ID NO: 5239; WAN024EXO; Start 194; Stop 218
ttatttggagttgcgacgataacac

SEQ ID NO: 404425 - DNA, 25 bp, Artificial
  probe
  misc_feature (1)..(25): SEQ ID NO: 5239; WAN024EXO; Start 49; Stop 73
aatatgtcctgccataaaggttaca

SEQ ID NO: 404426 - DNA, 25 bp, Artificial
  probe
  misc_feature (1)..(25): SEQ ID NO: 5239; WAN024EXO; Start 225; Stop 249
cttcatcgctagaaaccaactcatc

SEQ ID NO: 404427 - DNA, 25 bp, Artificial
  probe
  misc_feature (1)..(25): SEQ ID NO: 5239; WAN024EXO; Start 223; Stop 247
tacttcatcgctagaaaccaactca

SEQ ID NO: 404428 - DNA, 25 bp, Artificial
  probe
  misc_feature (1)..(25): SEQ ID NO: 5239; WAN024EXO; Start 45; Stop 69
tcataatatgtcctgccataaaggt

SEQ ID NO: 404429 - DNA, 25 bp, Artificial
  probe
  misc_feature (1)..(25): SEQ ID NO: 5239; WAN024EXO; Start 55; Stop 79
tcctgccataaaggttacattgttt

SEQ ID NO: 404430 - DNA, 25 bp, Artificial
  probe
  misc_feature (1)..(25): SEQ ID NO: 5239; WAN024EXO; Start 20; Stop 44
gcatgatgaacaccattaaagaaat

SEQ ID NO: 404431 - DNA, 25 bp, Artificial
  probe
  misc_feature (1)..(25): SEQ ID NO: 5239; WAN024EXO; Start 46; Stop 70
cataatatgtcctgccataaaggtt

SEQ ID NO: 404432 - DNA, 25 bp, Artificial
  probe
  misc_feature (1)..(25): SEQ ID NO: 5239; WAN024EXO; Start 226; Stop 250
ttcatcgctagaaaccaactcatct

SEQ ID NO: 404433 - DNA, 25 bp, Artificial
  probe
  misc_feature (1)..(25): SEQ ID NO: 5239; WAN024EXO; Start 44; Stop 68
ttcataatatgtcctgccataaagg

SEQ ID NO: 404434 - DNA, 25 bp, Artificial
  probe
  misc_feature (1)..(25): SEQ ID NO: 5239; WAN024EXO; Start 228; Stop 252
catcgctagaaaccaactcatctaa

SEQ ID NO: 404435 - DNA, 25 bp, Artificial
  probe
  misc_feature (1)..(25): SEQ ID NO: 5239; WAN024EXO; Start 37; Stop 61
aaagaaattcataatatgtcctgcc

SEQ ID NO: 404436 - DNA, 25 bp, Artificial
  probe
  misc_feature (1)..(25): SEQ ID NO: 5239; WAN024EXO; Start 178; Stop 202
cggttccttatgaagattatttgga

SEQ ID NO: 404437 - DNA, 25 bp, Artificial
  probe
  misc_feature (1)..(25): SEQ ID NO: 5239; WAN024EXO; Start 224; Stop 248
acttcatcgctagaaaccaactcat

SEQ ID NO: 404438 - DNA, 25 bp, Artificial
  probe
  misc_feature (1)..(25): SEQ ID NO: 5239; WAN024EXO; Start 54; Stop 78
gtcctgccataaaggttacattgtt

SEQ ID NO: 404439 - DNA, 25 bp, Artificial
  probe
  misc_feature (1)..(25): SEQ ID NO: 5239; WAN024EXO; Start 79; Stop 103
ttctttacacgcatctaccatctcg

SEQ ID NO: 404440 - DNA, 25 bp, Artificial
  probe
  misc_feature (1)..(25): SEQ ID NO: 5239; WAN024EXO; Start 48; Stop 72
taatatgtcctgccataaaggttac

SEQ ID NO: 404441 - DNA, 25 bp, Artificial
  probe
  misc_feature (1)..(25): SEQ ID NO: 5239; WAN024EXO; Start 188; Stop 212
tgaagattatttggagttgcgacga

SEQ ID NO: 404442 - DNA, 25 bp, Artificial
  probe
  misc_feature (1)..(25): SEQ ID NO: 5239; WAN024EXO; Start 227; Stop 251
tcatcgctagaaaccaactcatcta

SEQ ID NO: 404443 - DNA, 25 bp, Artificial
  probe
  misc_feature (1)..(25): SEQ ID NO: 5240; WAN024ABY; Start 7; Stop 31
acttctctaaattttgggcacacta

SEQ ID NO: 404444 - DNA, 25 bp, Artificial
  probe
  misc_feature (1)..(25): SEQ ID NO: 5240; WAN024ABY; Start 6; Stop 30
tacttctctaaattttgggcacact

SEQ ID NO: 404445 - DNA, 25 bp, Artificial
  probe
  misc_feature (1)..(25): SEQ ID NO: 5240; WAN024ABY; Start 5; Stop 29
ttacttctctaaattttgggcacac

SEQ ID NO: 404446 - DNA, 25 bp, Artificial
  probe
  misc_feature (1)..(25): SEQ ID NO: 5240; WAN024ABY; Start 8; Stop 32
cttctctaaattttgggcacactaa

SEQ ID NO: 404447 - DNA, 25 bp, Artificial
  probe
  misc_feature (1)..(25): SEQ ID NO: 5240; WAN024ABY; Start 9; Stop 33
ttctctaaattttgggcacactaaa

SEQ ID NO: 404448 - DNA, 25 bp, Artificial
  probe
  misc_feature (1)..(25): SEQ ID NO: 5240; WAN024ABY; Start 4; Stop 28
attacttctctaaattttgggcaca

SEQ ID NO: 404449 - DNA, 25 bp, Artificial
  probe
  misc_feature (1)..(25): SEQ ID NO: 5240; WAN024ABY; Start 2; Stop 26
tgattacttctctaaattttgggca

SEQ ID NO: 404450 - DNA, 25 bp, Artificial
  probe
  misc_feature (1)..(25): SEQ ID NO: 5240; WAN024ABY; Start 3; Stop 27
gattacttctctaaattttgggcac

SEQ ID NO: 404451 - DNA, 25 bp, Artificial
  probe
  misc_feature (1)..(25): SEQ ID NO: 5240; WAN024ABY; Start 10; Stop 34
tctctaaattttgggcacactaaaa

SEQ ID NO: 404452 - DNA, 25 bp, Artificial
  probe
  misc_feature (1)..(25): SEQ ID NO: 5240; WAN024ABY; Start 1; Stop 25
ttgattacttctctaaattttgggc

SEQ ID NO: 404453 - DNA, 25 bp, Artificial
  probe
  misc_feature (1)..(25): SEQ ID NO: 5240; WAN024ABY; Start 33; Stop 57
aaagaggtcttgacacctaaacttt

SEQ ID NO: 404454 - DNA, 25 bp, Artificial
  probe
  misc_feature (1)..(25): SEQ ID NO: 5240; WAN024ABY; Start 35; Stop 59
agaggtcttgacacctaaactttaa

SEQ ID NO: 404455 - DNA, 25 bp, Artificial
  probe
  misc_feature (1)..(25): SEQ ID NO: 5240; WAN024ABY; Start 34; Stop 58
aagaggtcttgacacctaaacttta

SEQ ID NO: 404456 - DNA, 25 bp, Artificial
  probe
  misc_feature (1)..(25): SEQ ID NO: 5240; WAN024ABY; Start 36; Stop 60
gaggtcttgacacctaaactttaaa

SEQ ID NO: 404457 - DNA, 25 bp, Artificial
  probe
  misc_feature (1)..(25): SEQ ID NO: 5240; WAN024ABY; Start 32; Stop 56
aaaagaggtcttgacacctaaactt

SEQ ID NO: 404458 - DNA, 25 bp, Artificial
  probe
  misc_feature (1)..(25): SEQ ID NO: 5240; WAN024ABY; Start 37; Stop 61
aggtcttgacacctaaactttaaaa

SEQ ID NO: 404459 - DNA, 25 bp, Artificial
  probe
  misc_feature (1)..(25): SEQ ID NO: 5241; WAN024DCM; Start 2; Stop 26
tgattagaacagagacagtagagga

SEQ ID NO: 404460 - DNA, 25 bp, Artificial
  probe
  misc_feature (1)..(25): SEQ ID NO: 5241; WAN024DCM; Start 5; Stop 29
ttagaacagagacagtagaggagag

SEQ ID NO: 404461 - DNA, 25 bp, Artificial
  probe
  misc_feature (1)..(25): SEQ ID NO: 5241; WAN024DCM; Start 4; Stop 28
attagaacagagacagtagaggaga

SEQ ID NO: 404462 - DNA, 25 bp, Artificial
  probe
  misc_feature (1)..(25): SEQ ID NO: 5241; WAN024DCM; Start 38; Stop 62
tggaacgattagaagattacattgc

SEQ ID NO: 404463 - DNA, 25 bp, Artificial
  probe
  misc_feature (1)..(25): SEQ ID NO: 5241; WAN024DCM; Start 3; Stop 27
gattagaacagagacagtagaggag

SEQ ID NO: 404464 - DNA, 25 bp, Artificial
  probe
  misc_feature (1)..(25): SEQ ID NO: 5241; WAN024DCM; Start 1; Stop 25
ttgattagaacagagacagtagagg

SEQ ID NO: 404465 - DNA, 25 bp, Artificial
  probe
  misc_feature (1)..(25): SEQ ID NO: 5241; WAN024DCM; Start 39; Stop 63
ggaacgattagaagattacattgct

SEQ ID NO: 404466 - DNA, 25 bp, Artificial
  probe
  misc_feature (1)..(25): SEQ ID NO: 5241; WAN024DCM; Start 29; Stop 53
ggtacagaatggaacgattagaaga

SEQ ID NO: 404467 - DNA, 25 bp, Artificial
  probe
  misc_feature (1)..(25): SEQ ID NO: 5241; WAN024DCM; Start 28; Stop 52
aggtacagaatggaacgattagaag

SEQ ID NO: 404468 - DNA, 25 bp, Artificial
  probe
  misc_feature (1)..(25): SEQ ID NO: 5241; WAN024DCM; Start 27; Stop 51
gaggtacagaatggaacgattagaa

SEQ ID NO: 404469 - DNA, 25 bp, Artificial
  probe
  misc_feature (1)..(25): SEQ ID NO: 5241; WAN024DCM; Start 25; Stop 49
gagaggtacagaatggaacgattag

SEQ ID NO: 404470 - DNA, 25 bp, Artificial
  probe
  misc_feature (1)..(25): SEQ ID NO: 5241; WAN024DCM; Start 6; Stop 30
tagaacagagacagtagaggagagg

SEQ ID NO: 404471 - DNA, 25 bp, Artificial
  probe
  misc_feature (1)..(25): SEQ ID NO: 5241; WAN024DCM; Start 26; Stop 50
agaggtacagaatggaacgattaga

SEQ ID NO: 404472 - DNA, 25 bp, Artificial
  probe
  misc_feature (1)..(25): SEQ ID NO: 5241; WAN024DCM; Start 8; Stop 32
gaacagagacagtagaggagaggta

SEQ ID NO: 404473 - DNA, 25 bp, Artificial
  probe
  misc_feature (1)..(25): SEQ ID NO: 5241; WAN024DCM; Start 15; Stop 39
gacagtagaggagaggtacagaatg

SEQ ID NO: 404474 - DNA, 25 bp, Artificial
  probe
  misc_feature (1)..(25): SEQ ID NO: 5241; WAN024DCM; Start 14; Stop 38
agacagtagaggagaggtacagaat

SEQ ID NO: 404475 - DNA, 25 bp, Artificial
  probe
  misc_feature (1)..(25): SEQ ID NO: 5241; WAN024DCM; Start 30; Stop 54
gtacagaatggaacgattagaagat

SEQ ID NO: 404476 - DNA, 25 bp, Artificial
  probe
  misc_feature (1)..(25): SEQ ID NO: 5241; WAN024DCM; Start 34; Stop 58
agaatggaacgattagaagattaca

SEQ ID NO: 404477 - DNA, 25 bp, Artificial
  probe
  misc_feature (1)..(25): SEQ ID NO: 5241; WAN024DCM; Start 32; Stop 56
acagaatggaacgattagaagatta

SEQ ID NO: 404478 - DNA, 25 bp, Artificial
  probe
  misc_feature (1)..(25): SEQ ID NO: 5241; WAN024DCM; Start 31; Stop 55
tacagaatggaacgattagaagatt

SEQ ID NO: 404479 - DNA, 25 bp, Artificial
  probe
  misc_feature (1)..(25): SEQ ID NO: 5241; WAN024DCM; Start 24; Stop 48
ggagaggtacagaatggaacgatta

SEQ ID NO: 404480 - DNA, 25 bp, Artificial
  probe
  misc_feature (1)..(25): SEQ ID NO: 5241; WAN024DCM; Start 19; Stop 43
gtagaggagaggtacagaatggaac

SEQ ID NO: 404481 - DNA, 25 bp, Artificial
  probe
  misc_feature (1)..(25): SEQ ID NO: 5241; WAN024DCM; Start 18; Stop 42
agtagaggagaggtacagaatggaa

SEQ ID NO: 404482 - DNA, 25 bp, Artificial
  probe
  misc_feature (1)..(25): SEQ ID NO: 5241; WAN024DCM; Start 40; Stop 64
gaacgattagaagattacattgctt

SEQ ID NO: 404483 - DNA, 25 bp, Artificial
  probe
  misc_feature (1)..(25): SEQ ID NO: 5241; WAN024DCM; Start 33; Stop 57
cagaatggaacgattagaagattac

SEQ ID NO: 404484 - DNA, 25 bp, Artificial
  probe
  misc_feature (1)..(25): SEQ ID NO: 5241; WAN024DCM; Start 13; Stop 37
gagacagtagaggagaggtacagaa

SEQ ID NO: 404485 - DNA, 25 bp, Artificial
  probe
  misc_feature (1)..(25): SEQ ID NO: 5241; WAN024DCM; Start 9; Stop 33
aacagagacagtagaggagaggtac

SEQ ID NO: 404486 - DNA, 25 bp, Artificial
  probe
  misc_feature (1)..(25): SEQ ID NO: 5241; WAN024DCM; Start 462; Stop 486
tggatttcaaggtcagtctcataat

SEQ ID NO: 404487 - DNA, 25 bp, Artificial
  probe
  misc_feature (1)..(25): SEQ ID NO: 5241; WAN024DCM; Start 17; Stop 41
cagtagaggagaggtacagaatgga

SEQ ID NO: 404488 - DNA, 25 bp, Artificial
  probe
  misc_feature (1)..(25): SEQ ID NO: 5241; WAN024DCM; Start 37; Stop 61
atggaacgattagaagattacattg

SEQ ID NO: 404489 - DNA, 25 bp, Artificial
  probe
  misc_feature (1)..(25): SEQ ID NO: 5241; WAN024DCM; Start 71; Stop 95
tagaatttaatcagcacgaaggaca

SEQ ID NO: 404490 - DNA, 25 bp, Artificial
  probe
  misc_feature (1)..(25): SEQ ID NO: 5241; WAN024DCM; Start 73; Stop 97
gaatttaatcagcacgaaggacaaa

SEQ ID NO: 404491 - DNA, 25 bp, Artificial
  probe
  misc_feature (1)..(25): SEQ ID NO: 5241; WAN024DCM; Start 70; Stop 94
ttagaatttaatcagcacgaaggac

SEQ ID NO: 404492 - DNA, 25 bp, Artificial
  probe
  misc_feature (1)..(25): SEQ ID NO: 5242; WAN024D4X; Start 739; Stop 763
tcatatcataacatcaactcatcgc

SEQ ID NO: 404493 - DNA, 25 bp, Artificial
  probe
  misc_feature (1)..(25): SEQ ID NO: 5242; WAN024D4X; Start 740; Stop 764
catatcataacatcaactcatcgct

SEQ ID NO: 404494 - DNA, 25 bp, Artificial
  probe
  misc_feature (1)..(25): SEQ ID NO: 5242; WAN024D4X; Start 741; Stop 765
atatcataacatcaactcatcgctt

SEQ ID NO: 404495 - DNA, 25 bp, Artificial
  probe
  misc_feature (1)..(25): SEQ ID NO: 5242; WAN024D4X; Start 592; Stop 616
gataacctagtagaatggcagttcg

SEQ ID NO: 404496 - DNA, 25 bp, Artificial
  probe
  misc_feature (1)..(25): SEQ ID NO: 5242; WAN024D4X; Start 591; Stop 615
cgataacctagtagaatggcagttc

SEQ ID NO: 404497 - DNA, 25 bp, Artificial
  probe
  misc_feature (1)..(25): SEQ ID NO: 5242; WAN024D4X; Start 1124; Stop 1148
acattgatcgtagccatcttattca

SEQ ID NO: 404498 - DNA, 25 bp, Artificial
  probe
  misc_feature (1)..(25): SEQ ID NO: 5242; WAN024D4X; Start 1123; Stop 1147
tacattgatcgtagccatcttattc

SEQ ID NO: 404499 - DNA, 25 bp, Artificial
  probe
  misc_feature (1)..(25): SEQ ID NO: 5242; WAN024D4X; Start 733; Stop 757
ggagactcatatcataacatcaact

SEQ ID NO: 404500 - DNA, 25 bp, Artificial
  probe
  misc_feature (1)..(25): SEQ ID NO: 5242; WAN024D4X; Start 76; Stop 100
actcaatataagcctgaagaacatt

SEQ ID NO: 404501 - DNA, 25 bp, Artificial
  probe
  misc_feature (1)..(25): SEQ ID NO: 5242; WAN024D4X; Start 1183; Stop 1207
cgacggtatgtagatattgaagcta

SEQ ID NO: 404502 - DNA, 25 bp, Artificial
  probe
  misc_feature (1)..(25): SEQ ID NO: 5242; WAN024D4X; Start 738; Stop 762
ctcatatcataacatcaactcatcg

SEQ ID NO: 404503 - DNA, 25 bp, Artificial
  probe
  misc_feature (1)..(25): SEQ ID NO: 5242; WAN024D4X; Start 1122; Stop 1146
ttacattgatcgtagccatcttatt

SEQ ID NO: 404504 - DNA, 25 bp, Artificial
  probe
  misc_feature (1)..(25): SEQ ID NO: 5242; WAN024D4X; Start 1280; Stop 1304
caacttattacttaacggtgccagc

SEQ ID NO: 404505 - DNA, 25 bp, Artificial
  probe
  misc_feature (1)..(25): SEQ ID NO: 5242; WAN024D4X; Start 590; Stop 614
ccgataacctagtagaatggcagtt

SEQ ID NO: 404506 - DNA, 25 bp, Artificial
  probe
  misc_feature (1)..(25): SEQ ID NO: 5242; WAN024D4X; Start 588; Stop 612
gtccgataacctagtagaatggcag

SEQ ID NO: 404507 - DNA, 25 bp, Artificial
  probe
  misc_feature (1)..(25): SEQ ID NO: 5242; WAN024D4X; Start 1157; Stop 1181
taggtgaagaagaacaggacactag

SEQ ID NO: 404508 - DNA, 25 bp, Artificial
  probe
  misc_feature (1)..(25): SEQ ID NO: 5242; WAN024D4X; Start 1156; Stop 1180
ctaggtgaagaagaacaggacacta

SEQ ID NO: 404509 - DNA, 25 bp, Artificial
  probe
  misc_feature (1)..(25): SEQ ID NO: 5242; WAN024D4X; Start 735; Stop 759
agactcatatcataacatcaactca

SEQ ID NO: 404510 - DNA, 25 bp, Artificial
  probe
  misc_feature (1)..(25): SEQ ID NO: 5242; WAN024D4X; Start 1275; Stop 1299
gactgcaacttattacttaacggtg

SEQ ID NO: 404511 - DNA, 25 bp, Artificial
  probe
  misc_feature (1)..(25): SEQ ID NO: 5242; WAN024D4X; Start 1182; Stop 1206
tcgacggtatgtagatattgaagct

SEQ ID NO: 404512 - DNA, 25 bp, Artificial
  probe
  misc_feature (1)..(25): SEQ ID NO: 5242; WAN024D4X; Start 1274; Stop 1298
tgactgcaacttattacttaacggt

SEQ ID NO: 404513 - DNA, 25 bp, Artificial
  probe
  misc_feature (1)..(25): SEQ ID NO: 5242; WAN024D4X; Start 589; Stop 613
tccgataacctagtagaatggcagt

SEQ ID NO: 404514 - DNA, 25 bp, Artificial
  probe
  misc_feature (1)..(25): SEQ ID NO: 5242; WAN024D4X; Start 67; Stop 91
ctcgttaatactcaatataagcctg

SEQ ID NO: 404515 - DNA, 25 bp, Artificial
  probe
  misc_feature (1)..(25): SEQ ID NO: 5242; WAN024D4X; Start 66; Stop 90
tctcgttaatactcaatataagcct

SEQ ID NO: 404516 - DNA, 25 bp, Artificial
  probe
  misc_feature (1)..(25): SEQ ID NO: 5242; WAN024D4X; Start 593; Stop 617
ataacctagtagaatggcagttcga

SEQ ID NO: 404517 - DNA, 25 bp, Artificial
  probe
  misc_feature (1)..(25): SEQ ID NO: 5242; WAN024D4X; Start 75; Stop 99
tactcaatataagcctgaagaacat

SEQ ID NO: 404518 - DNA, 25 bp, Artificial
  probe
  misc_feature (1)..(25): SEQ ID NO: 5242; WAN024D4X; Start 74; Stop 98
atactcaatataagcctgaagaaca

SEQ ID NO: 404519 - DNA, 25 bp, Artificial
  probe
  misc_feature (1)..(25): SEQ ID NO: 5242; WAN024D4X; Start 561; Stop 585
taatgtgggctgtatcgttctacta

SEQ ID NO: 404520 - DNA, 25 bp, Artificial
  probe
  misc_feature (1)..(25): SEQ ID NO: 5242; WAN024D4X; Start 690; Stop 714
gaaagattgccttattatgtcaccc

SEQ ID NO: 404521 - DNA, 25 bp, Artificial
  probe
  misc_feature (1)..(25): SEQ ID NO: 5242; WAN024D4X; Start 689; Stop 713
ggaaagattgccttattatgtcacc

SEQ ID NO: 404522 - DNA, 25 bp, Artificial
  probe
  misc_feature (1)..(25): SEQ ID NO: 5242; WAN024D4X; Start 688; Stop 712
gggaaagattgccttattatgtcac

SEQ ID NO: 404523 - DNA, 25 bp, Artificial
  probe
  misc_feature (1)..(25): SEQ ID NO: 5242; WAN024D4X; Start 692; Stop 716
aagattgccttattatgtcacccat

SEQ ID NO: 404524 - DNA, 25 bp, Artificial
  probe
  misc_feature (1)..(25): SEQ ID NO: 5242; WAN024D4X; Start 687; Stop 711
tgggaaagattgccttattatgtca

SEQ ID NO: 404525 - DNA, 25 bp, Artificial
  probe
  misc_feature (1)..(25): SEQ ID NO: 5243; WAN024DMM; Start 172; Stop 196
taccattatcgtgttgcttatcgtt

SEQ ID NO: 404526 - DNA, 25 bp, Artificial
  probe
  misc_feature (1)..(25): SEQ ID NO: 5243; WAN024DMM; Start 171; Stop 195
ttaccattatcgtgttgcttatcgt

SEQ ID NO: 404527 - DNA, 25 bp, Artificial
  probe
  misc_feature (1)..(25): SEQ ID NO: 5243; WAN024DMM; Start 130; Stop 154
ttagtgagatatggcattggttgtc

SEQ ID NO: 404528 - DNA, 25 bp, Artificial
  probe
  misc_feature (1)..(25): SEQ ID NO: 5243; WAN024DMM; Start 53; Stop 77
ttgaagaagagtatggtcctacatt

SEQ ID NO: 404529 - DNA, 25 bp, Artificial
  probe
  misc_feature (1)..(25): SEQ ID NO: 5243; WAN024DMM; Start 52; Stop 76
attgaagaagagtatggtcctacat

SEQ ID NO: 404530 - DNA, 25 bp, Artificial
  probe
  misc_feature (1)..(25): SEQ ID NO: 5243; WAN024DMM; Start 51; Stop 75
tattgaagaagagtatggtcctaca

SEQ ID NO: 404531 - DNA, 25 bp, Artificial
  probe
  misc_feature (1)..(25): SEQ ID NO: 5243; WAN024DMM; Start 49; Stop 73
agtattgaagaagagtatggtccta

SEQ ID NO: 404532 - DNA, 25 bp, Artificial
  probe
  misc_feature (1)..(25): SEQ ID NO: 5243; WAN024DMM; Start 48; Stop 72
tagtattgaagaagagtatggtcct

SEQ ID NO: 404533 - DNA, 25 bp, Artificial
  probe
  misc_feature (1)..(25): SEQ ID NO: 5243; WAN024DMM; Start 50; Stop 74
gtattgaagaagagtatggtcctac

SEQ ID NO: 404534 - DNA, 25 bp, Artificial
  probe
  misc_feature (1)..(25): SEQ ID NO: 5243; WAN024DMM; Start 47; Stop 71
atagtattgaagaagagtatggtcc

SEQ ID NO: 404535 - DNA, 25 bp, Artificial
  probe
  misc_feature (1)..(25): SEQ ID NO: 5243; WAN024DMM; Start 131; Stop 155
tagtgagatatggcattggttgtcg

SEQ ID NO: 404536 - DNA, 25 bp, Artificial
  probe
  misc_feature (1)..(25): SEQ ID NO: 5243; WAN024DMM; Start 182; Stop 206
gtgttgcttatcgtttgtatcttga

SEQ ID NO: 404537 - DNA, 25 bp, Artificial
  probe
  misc_feature (1)..(25): SEQ ID NO: 5243; WAN024DMM; Start 170; Stop 194
tttaccattatcgtgttgcttatcg

SEQ ID NO: 404538 - DNA, 25 bp, Artificial
  probe
  misc_feature (1)..(25): SEQ ID NO: 5243; WAN024DMM; Start 178; Stop 202
tatcgtgttgcttatcgtttgtatc

SEQ ID NO: 404539 - DNA, 25 bp, Artificial
  probe
  misc_feature (1)..(25): SEQ ID NO: 5243; WAN024DMM; Start 175; Stop 199
cattatcgtgttgcttatcgtttgt

SEQ ID NO: 404540 - DNA, 25 bp, Artificial
  probe
  misc_feature (1)..(25): SEQ ID NO: 5243; WAN024DMM; Start 129; Stop 153
tttagtgagatatggcattggttgt

SEQ ID NO: 404541 - DNA, 25 bp, Artificial
  probe
  misc_feature (1)..(25): SEQ ID NO: 5243; WAN024DMM; Start 183; Stop 207
tgttgcttatcgtttgtatcttgaa

SEQ ID NO: 404542 - DNA, 25 bp, Artificial
  probe
  misc_feature (1)..(25): SEQ ID NO: 5243; WAN024DMM; Start 128; Stop 152
atttagtgagatatggcattggttg

SEQ ID NO: 404543 - DNA, 25 bp, Artificial
  probe
  misc_feature (1)..(25): SEQ ID NO: 5243; WAN024DMM; Start 177; Stop 201
ttatcgtgttgcttatcgtttgtat

SEQ ID NO: 404544 - DNA, 25 bp, Artificial
  probe
  misc_feature (1)..(25): SEQ ID NO: 5243; WAN024DMM; Start 176; Stop 200
attatcgtgttgcttatcgtttgta

SEQ ID NO: 404545 - DNA, 25 bp, Artificial
  probe
  misc_feature (1)..(25): SEQ ID NO: 5243; WAN024DMM; Start 179; Stop 203
atcgtgttgcttatcgtttgtatct

SEQ ID NO: 404546 - DNA, 25 bp, Artificial
  probe
  misc_feature (1)..(25): SEQ ID NO: 5243; WAN024DMM; Start 133; Stop 157
gtgagatatggcattggttgtcgta

SEQ ID NO: 404547 - DNA, 25 bp, Artificial
  probe
  misc_feature (1)..(25): SEQ ID NO: 5243; WAN024DMM; Start 56; Stop 80
aagaagagtatggtcctacatttgg

SEQ ID NO: 404548 - DNA, 25 bp, Artificial
  probe
  misc_feature (1)..(25): SEQ ID NO: 5243; WAN024DMM; Start 61; Stop 85
gagtatggtcctacatttggtgata

SEQ ID NO: 404549 - DNA, 25 bp, Artificial
  probe
  misc_feature (1)..(25): SEQ ID NO: 5243; WAN024DMM; Start 181; Stop 205
cgtgttgcttatcgtttgtatcttg

SEQ ID NO: 404550 - DNA, 25 bp, Artificial
  probe
  misc_feature (1)..(25): SEQ ID NO: 5243; WAN024DMM; Start 180; Stop 204
tcgtgttgcttatcgtttgtatctt

SEQ ID NO: 404551 - DNA, 25 bp, Artificial
  probe
  misc_feature (1)..(25): SEQ ID NO: 5243; WAN024DMM; Start 174; Stop 198
ccattatcgtgttgcttatcgtttg

SEQ ID NO: 404552 - DNA, 25 bp, Artificial
  probe
  misc_feature (1)..(25): SEQ ID NO: 5243; WAN024DMM; Start 62; Stop 86
agtatggtcctacatttggtgataa

SEQ ID NO: 404553 - DNA, 25 bp, Artificial
  probe
  misc_feature (1)..(25): SEQ ID NO: 5243; WAN024DMM; Start 169; Stop 193
gtttaccattatcgtgttgcttatc

SEQ ID NO: 404554 - DNA, 25 bp, Artificial
  probe
  misc_feature (1)..(25): SEQ ID NO: 5243; WAN024DMM; Start 60; Stop 84
agagtatggtcctacatttggtgat

SEQ ID NO: 404555 - DNA, 25 bp, Artificial
  probe
  misc_feature (1)..(25): SEQ ID NO: 5243; WAN024DMM; Start 58; Stop 82
gaagagtatggtcctacatttggtg

SEQ ID NO: 404556 - DNA, 25 bp, Artificial
  probe
  misc_feature (1)..(25): SEQ ID NO: 5243; WAN024DMM; Start 57; Stop 81
agaagagtatggtcctacatttggt

SEQ ID NO: 404557 - DNA, 25 bp, Artificial
  probe
  misc_feature (1)..(25): SEQ ID NO: 5243; WAN024DMM; Start 54; Stop 78
tgaagaagagtatggtcctacattt

SEQ ID NO: 404558 - DNA, 25 bp, Artificial
  probe
  misc_feature (1)..(25): SEQ ID NO: 5244; WAN024AZS; Start 73; Stop 97
atcttatccttatattcccagcgag

SEQ ID NO: 404559 - DNA, 25 bp, Artificial
  probe
  misc_feature (1)..(25): SEQ ID NO: 5244; WAN024AZS; Start 72; Stop 96
tatcttatccttatattcccagcga

SEQ ID NO: 404560 - DNA, 25 bp, Artificial
  probe
  misc_feature (1)..(25): SEQ ID NO: 5244; WAN024AZS; Start 74; Stop 98
tcttatccttatattcccagcgagc

SEQ ID NO: 404561 - DNA, 25 bp, Artificial
  probe
  misc_feature (1)..(25): SEQ ID NO: 5244; WAN024AZS; Start 76; Stop 100
ttatccttatattcccagcgagcag

SEQ ID NO: 404562 - DNA, 25 bp, Artificial
  probe
  misc_feature (1)..(25): SEQ ID NO: 5244; WAN024AZS; Start 75; Stop 99
cttatccttatattcccagcgagca

SEQ ID NO: 404563 - DNA, 25 bp, Artificial
  probe
  misc_feature (1)..(25): SEQ ID NO: 5244; WAN024AZS; Start 71; Stop 95
atatcttatccttatattcccagcg

SEQ ID NO: 404564 - DNA, 25 bp, Artificial
  probe
  misc_feature (1)..(25): SEQ ID NO: 5244; WAN024AZS; Start 77; Stop 101
tatccttatattcccagcgagcagg

SEQ ID NO: 404565 - DNA, 25 bp, Artificial
  probe
  misc_feature (1)..(25): SEQ ID NO: 5244; WAN024AZS; Start 81; Stop 105
cttatattcccagcgagcaggagat

SEQ ID NO: 404566 - DNA, 25 bp, Artificial
  probe
  misc_feature (1)..(25): SEQ ID NO: 5244; WAN024AZS; Start 82; Stop 106
ttatattcccagcgagcaggagatg

SEQ ID NO: 404567 - DNA, 25 bp, Artificial
  probe
  misc_feature (1)..(25): SEQ ID NO: 5244; WAN024AZS; Start 70; Stop 94
aatatcttatccttatattcccagc

SEQ ID NO: 404568 - DNA, 25 bp, Artificial
  probe
  misc_feature (1)..(25): SEQ ID NO: 5244; WAN024AZS; Start 108; Stop 132
tgtgagtcctgcattccctatcgat

SEQ ID NO: 404569 - DNA, 25 bp, Artificial
  probe
  misc_feature (1)..(25): SEQ ID NO: 5244; WAN024AZS; Start 78; Stop 102
atccttatattcccagcgagcagga

SEQ ID NO: 404570 - DNA, 25 bp, Artificial
  probe
  misc_feature (1)..(25): SEQ ID NO: 5245; WAN024FGX; Start 142; Stop 166
ataccagcagtgatgaagaccatat

SEQ ID NO: 404571 - DNA, 25 bp, Artificial
  probe
  misc_feature (1)..(25): SEQ ID NO: 5245; WAN024FGX; Start 157; Stop 181
aagaccatatcggcaccactaatag

SEQ ID NO: 404572 - DNA, 25 bp, Artificial
  probe
  misc_feature (1)..(25): SEQ ID NO: 5245; WAN024FGX; Start 156; Stop 180
gaagaccatatcggcaccactaata

SEQ ID NO: 404573 - DNA, 25 bp, Artificial
  probe
  misc_feature (1)..(25): SEQ ID NO: 5245; WAN024FGX; Start 143; Stop 167
taccagcagtgatgaagaccatatc

SEQ ID NO: 404574 - DNA, 25 bp, Artificial
  probe
  misc_feature (1)..(25): SEQ ID NO: 5245; WAN024FGX; Start 141; Stop 165
cataccagcagtgatgaagaccata

SEQ ID NO: 404575 - DNA, 25 bp, Artificial
  probe
  misc_feature (1)..(25): SEQ ID NO: 5245; WAN024FGX; Start 84; Stop 108
taaatctttggcgatacgagcaata

SEQ ID NO: 404576 - DNA, 25 bp, Artificial
  probe
  misc_feature (1)..(25): SEQ ID NO: 5245; WAN024FGX; Start 19; Stop 43
aattgtccacgcttacttccttcaa

SEQ ID NO: 404577 - DNA, 25 bp, Artificial
  probe
  misc_feature (1)..(25): SEQ ID NO: 5245; WAN024FGX; Start 1; Stop 25
ttgattccttctacagcaaattgtc

SEQ ID NO: 404578 - DNA, 25 bp, Artificial
  probe
  misc_feature (1)..(25): SEQ ID NO: 5245; WAN024FGX; Start 85; Stop 109
aaatctttggcgatacgagcaataa

SEQ ID NO: 404579 - DNA, 25 bp, Artificial
  probe
  misc_feature (1)..(25): SEQ ID NO: 5245; WAN024FGX; Start 155; Stop 179
tgaagaccatatcggcaccactaat

SEQ ID NO: 404580 - DNA, 25 bp, Artificial
  probe
  misc_feature (1)..(25): SEQ ID NO: 5245; WAN024FGX; Start 83; Stop 107
ctaaatctttggcgatacgagcaat

SEQ ID NO: 404581 - DNA, 25 bp, Artificial
  probe
  misc_feature (1)..(25): SEQ ID NO: 5245; WAN024FGX; Start 3; Stop 27
gattccttctacagcaaattgtcca

SEQ ID NO: 404582 - DNA, 25 bp, Artificial
  probe
  misc_feature (1)..(25): SEQ ID NO: 5245; WAN024FGX; Start 2; Stop 26
tgattccttctacagcaaattgtcc

SEQ ID NO: 404583 - DNA, 25 bp, Artificial
  probe
  misc_feature (1)..(25): SEQ ID NO: 5245; WAN024FGX; Start 154; Stop 178
atgaagaccatatcggcaccactaa

SEQ ID NO: 404584 - DNA, 25 bp, Artificial
  probe
  misc_feature (1)..(25): SEQ ID NO: 5245; WAN024FGX; Start 86; Stop 110
aatctttggcgatacgagcaataac

SEQ ID NO: 404585 - DNA, 25 bp, Artificial
  probe
  misc_feature (1)..(25): SEQ ID NO: 5245; WAN024FGX; Start 4; Stop 28
attccttctacagcaaattgtccac

SEQ ID NO: 404586 - DNA, 25 bp, Artificial
  probe
  misc_feature (1)..(25): SEQ ID NO: 5245; WAN024FGX; Start 175; Stop 199
ctaatagcttccgtcagtgtttctt

SEQ ID NO: 404587 - DNA, 25 bp, Artificial
  probe
  misc_feature (1)..(25): SEQ ID NO: 5245; WAN024FGX; Start 176; Stop 200
taatagcttccgtcagtgtttcttc

SEQ ID NO: 404588 - DNA, 25 bp, Artificial
  probe
  misc_feature (1)..(25): SEQ ID NO: 5245; WAN024FGX; Start 187; Stop 211
gtcagtgtttcttcgctttcttcag

SEQ ID NO: 404589 - DNA, 25 bp, Artificial
  probe
  misc_feature (1)..(25): SEQ ID NO: 5245; WAN024FGX; Start 17; Stop 41
caaattgtccacgcttacttccttc

SEQ ID NO: 404590 - DNA, 25 bp, Artificial
  probe
  misc_feature (1)..(25): SEQ ID NO: 5245; WAN024FGX; Start 162; Stop 186
catatcggcaccactaatagcttcc

SEQ ID NO: 404591 - DNA, 25 bp, Artificial
  probe
  misc_feature (1)..(25): SEQ ID NO: 5245; WAN024FGX; Start 161; Stop 185
ccatatcggcaccactaatagcttc

SEQ ID NO: 404592 - DNA, 25 bp, Artificial
  probe
  misc_feature (1)..(25): SEQ ID NO: 5245; WAN024FGX; Start 158; Stop 182
agaccatatcggcaccactaatagc

SEQ ID NO: 404593 - DNA, 25 bp, Artificial
  probe
  misc_feature (1)..(25): SEQ ID NO: 5245; WAN024FGX; Start 153; Stop 177
gatgaagaccatatcggcaccacta

SEQ ID NO: 404594 - DNA, 25 bp, Artificial
  probe
  misc_feature (1)..(25): SEQ ID NO: 5245; WAN024FGX; Start 18; Stop 42
aaattgtccacgcttacttccttca

SEQ ID NO: 404595 - DNA, 25 bp, Artificial
  probe
  misc_feature (1)..(25): SEQ ID NO: 5245; WAN024FGX; Start 87; Stop 111
atctttggcgatacgagcaataaca

SEQ ID NO: 404596 - DNA, 25 bp, Artificial
  probe
  misc_feature (1)..(25): SEQ ID NO: 5245; WAN024FGX; Start 20; Stop 44
attgtccacgcttacttccttcaaa

SEQ ID NO: 404597 - DNA, 25 bp, Artificial
  probe
  misc_feature (1)..(25): SEQ ID NO: 5245; WAN024FGX; Start 174; Stop 198
actaatagcttccgtcagtgtttct

SEQ ID NO: 404598 - DNA, 25 bp, Artificial
  probe
  misc_feature (1)..(25): SEQ ID NO: 5245; WAN024FGX; Start 160; Stop 184
accatatcggcaccactaatagctt

SEQ ID NO: 404599 - DNA, 25 bp, Artificial
  probe
  misc_feature (1)..(25): SEQ ID NO: 5245; WAN024FGX; Start 140; Stop 164
ccataccagcagtgatgaagaccat

SEQ ID NO: 404600 - DNA, 25 bp, Artificial
  probe
  misc_feature (1)..(25): SEQ ID NO: 5245; WAN024FGX; Start 144; Stop 168
accagcagtgatgaagaccatatcg

SEQ ID NO: 404601 - DNA, 25 bp, Artificial
  probe
  misc_feature (1)..(25): SEQ ID NO: 5245; WAN024FGX; Start 88; Stop 112
tctttggcgatacgagcaataacag

SEQ ID NO: 404602 - DNA, 25 bp, Artificial
  probe
  misc_feature (1)..(25): SEQ ID NO: 5245; WAN024FGX; Start 82; Stop 106
cctaaatctttggcgatacgagcaa

SEQ ID NO: 404603 - DNA, 25 bp, Artificial
  probe
  misc_feature (1)..(25): SEQ ID NO: 5246; WAN024G9U; Start 196; Stop 220
gagaagttgaatcggaatgtgttag

SEQ ID NO: 404604 - DNA, 25 bp, Artificial
  probe
  misc_feature (1)..(25): SEQ ID NO: 5246; WAN024G9U; Start 195; Stop 219
tgagaagttgaatcggaatgtgtta

SEQ ID NO: 404605 - DNA, 25 bp, Artificial
  probe
  misc_feature (1)..(25): SEQ ID NO: 5246; WAN024G9U; Start 197; Stop 221
agaagttgaatcggaatgtgttagc

SEQ ID NO: 404606 - DNA, 25 bp, Artificial
  probe
  misc_feature (1)..(25): SEQ ID NO: 5246; WAN024G9U; Start 198; Stop 222
gaagttgaatcggaatgtgttagca

SEQ ID NO: 404607 - DNA, 25 bp, Artificial
  probe
  misc_feature (1)..(25): SEQ ID NO: 5246; WAN024G9U; Start 194; Stop 218
gtgagaagttgaatcggaatgtgtt

SEQ ID NO: 404608 - DNA, 25 bp, Artificial
  probe
  misc_feature (1)..(25): SEQ ID NO: 5246; WAN024G9U; Start 192; Stop 216
gtgtgagaagttgaatcggaatgtg

SEQ ID NO: 404609 - DNA, 25 bp, Artificial
  probe
  misc_feature (1)..(25): SEQ ID NO: 5246; WAN024G9U; Start 193; Stop 217
tgtgagaagttgaatcggaatgtgt

SEQ ID NO: 404610 - DNA, 25 bp, Artificial
  probe
  misc_feature (1)..(25): SEQ ID NO: 5246; WAN024G9U; Start 199; Stop 223
aagttgaatcggaatgtgttagcac

SEQ ID NO: 404611 - DNA, 25 bp, Artificial
  probe
  misc_feature (1)..(25): SEQ ID NO: 5246; WAN024G9U; Start 101; Stop 125
ttgtatcaagaaggaaaccaacttt

SEQ ID NO: 404612 - DNA, 25 bp, Artificial
  probe
  misc_feature (1)..(25): SEQ ID NO: 5246; WAN024G9U; Start 100; Stop 124
tttgtatcaagaaggaaaccaactt

SEQ ID NO: 404613 - DNA, 25 bp, Artificial
  probe
  misc_feature (1)..(25): SEQ ID NO: 5246; WAN024G9U; Start 191; Stop 215
cgtgtgagaagttgaatcggaatgt

SEQ ID NO: 404614 - DNA, 25 bp, Artificial
  probe
  misc_feature (1)..(25): SEQ ID NO: 5246; WAN024G9U; Start 73; Stop 97
aacaattctgtacggatttcaggtc

SEQ ID NO: 404615 - DNA, 25 bp, Artificial
  probe
  misc_feature (1)..(25): SEQ ID NO: 5246; WAN024G9U; Start 72; Stop 96
gaacaattctgtacggatttcaggt

SEQ ID NO: 404616 - DNA, 25 bp, Artificial
  probe
  misc_feature (1)..(25): SEQ ID NO: 5246; WAN024G9U; Start 202; Stop 226
ttgaatcggaatgtgttagcaccag

SEQ ID NO: 404617 - DNA, 25 bp, Artificial
  probe
  misc_feature (1)..(25): SEQ ID NO: 5246; WAN024G9U; Start 200; Stop 224
agttgaatcggaatgtgttagcacc

SEQ ID NO: 404618 - DNA, 25 bp, Artificial
  probe
  misc_feature (1)..(25): SEQ ID NO: 5246; WAN024G9U; Start 146; Stop 170
caagtttaacagttgccatacgctc

SEQ ID NO: 404619 - DNA, 25 bp, Artificial
  probe
  misc_feature (1)..(25): SEQ ID NO: 5246; WAN024G9U; Start 147; Stop 171
aagtttaacagttgccatacgctca

SEQ ID NO: 404620 - DNA, 25 bp, Artificial
  probe
  misc_feature (1)..(25): SEQ ID NO: 5246; WAN024G9U; Start 71; Stop 95
cgaacaattctgtacggatttcagg

SEQ ID NO: 404621 - DNA, 25 bp, Artificial
  probe
  misc_feature (1)..(25): SEQ ID NO: 5246; WAN024G9U; Start 77; Stop 101
attctgtacggatttcaggtccttt

SEQ ID NO: 404622 - DNA, 25 bp, Artificial
  probe
  misc_feature (1)..(25): SEQ ID NO: 5246; WAN024G9U; Start 76; Stop 100
aattctgtacggatttcaggtcctt

SEQ ID NO: 404623 - DNA, 25 bp, Artificial
  probe
  misc_feature (1)..(25): SEQ ID NO: 5246; WAN024G9U; Start 214; Stop 238
gtgttagcaccagcttcaatcaatt

SEQ ID NO: 404624 - DNA, 25 bp, Artificial
  probe
  misc_feature (1)..(25): SEQ ID NO: 5246; WAN024G9U; Start 201; Stop 225
gttgaatcggaatgtgttagcacca

SEQ ID NO: 404625 - DNA, 25 bp, Artificial
  probe
  misc_feature (1)..(25): SEQ ID NO: 5246; WAN024G9U; Start 70; Stop 94
tcgaacaattctgtacggatttcag

SEQ ID NO: 404626 - DNA, 25 bp, Artificial
  probe
  misc_feature (1)..(25): SEQ ID NO: 5246; WAN024G9U; Start 210; Stop 234
gaatgtgttagcaccagcttcaatc

SEQ ID NO: 404627 - DNA, 25 bp, Artificial
  probe
  misc_feature (1)..(25): SEQ ID NO: 5246; WAN024G9U; Start 102; Stop 126
tgtatcaagaaggaaaccaactttt

SEQ ID NO: 404628 - DNA, 25 bp, Artificial
  probe
  misc_feature (1)..(25): SEQ ID NO: 5246; WAN024G9U; Start 75; Stop 99
caattctgtacggatttcaggtcct

SEQ ID NO: 404629 - DNA, 25 bp, Artificial
  probe
  misc_feature (1)..(25): SEQ ID NO: 5246; WAN024G9U; Start 99; Stop 123
ttttgtatcaagaaggaaaccaact

SEQ ID NO: 404630 - DNA, 25 bp, Artificial
  probe
  misc_feature (1)..(25): SEQ ID NO: 5246; WAN024G9U; Start 217; Stop 241
ttagcaccagcttcaatcaatttag

SEQ ID NO: 404631 - DNA, 25 bp, Artificial
  probe
  misc_feature (1)..(25): SEQ ID NO: 5246; WAN024G9U; Start 216; Stop 240
gttagcaccagcttcaatcaattta

SEQ ID NO: 404632 - DNA, 25 bp, Artificial
  probe
  misc_feature (1)..(25): SEQ ID NO: 5246; WAN024G9U; Start 58; Stop 82
ttagcttcaccttcgaacaattctg

SEQ ID NO: 404633 - DNA, 25 bp, Artificial
  probe
  misc_feature (1)..(25): SEQ ID NO: 5246; WAN024G9U; Start 89; Stop 113
tttcaggtccttttgtatcaagaag

SEQ ID NO: 404634 - DNA, 25 bp, Artificial
  probe
  misc_feature (1)..(25): SEQ ID NO: 5246; WAN024G9U; Start 98; Stop 122
cttttgtatcaagaaggaaaccaac

SEQ ID NO: 404635 - DNA, 25 bp, Artificial
  probe
  misc_feature (1)..(25): SEQ ID NO: 5246; WAN024G9U; Start 223; Stop 247
ccagcttcaatcaatttagcaatgt

SEQ ID NO: 404636 - DNA, 25 bp, Artificial
  probe
  misc_feature (1)..(25): SEQ ID NO: 5247; WAN024A67; Start 65; Stop 89
ttatcaaggcaaataactactgttt

SEQ ID NO: 404637 - DNA, 25 bp, Artificial
  probe
  misc_feature (1)..(25): SEQ ID NO: 5247; WAN024A67; Start 64; Stop 88
tttatcaaggcaaataactactgtt

SEQ ID NO: 404638 - DNA, 25 bp, Artificial
  probe
  misc_feature (1)..(25): SEQ ID NO: 5247; WAN024A67; Start 68; Stop 92
tcaaggcaaataactactgttttaa

SEQ ID NO: 404639 - DNA, 25 bp, Artificial
  probe
  misc_feature (1)..(25): SEQ ID NO: 5247; WAN024A67; Start 50; Stop 74
aatatgctttcaattttatcaaggc

SEQ ID NO: 404640 - DNA, 25 bp, Artificial
  probe
  misc_feature (1)..(25): SEQ ID NO: 5247; WAN024A67; Start 67; Stop 91
atcaaggcaaataactactgtttta

SEQ ID NO: 404641 - DNA, 25 bp, Artificial
  probe
  misc_feature (1)..(25): SEQ ID NO: 5247; WAN024A67; Start 66; Stop 90
tatcaaggcaaataactactgtttt

SEQ ID NO: 404642 - DNA, 25 bp, Artificial
  probe
  misc_feature (1)..(25): SEQ ID NO: 5247; WAN024A67; Start 63; Stop 87
ttttatcaaggcaaataactactgt

SEQ ID NO: 404643 - DNA, 25 bp, Artificial
  probe
  misc_feature (1)..(25): SEQ ID NO: 5247; WAN024A67; Start 55; Stop 79
gctttcaattttatcaaggcaaata

SEQ ID NO: 404644 - DNA, 25 bp, Artificial
  probe
  misc_feature (1)..(25): SEQ ID NO: 5247; WAN024A67; Start 1; Stop 25
ttgattctccttgaatattacttca

SEQ ID NO: 404645 - DNA, 25 bp, Artificial
  probe
  misc_feature (1)..(25): SEQ ID NO: 5247; WAN024A67; Start 54; Stop 78
tgctttcaattttatcaaggcaaat

SEQ ID NO: 404646 - DNA, 25 bp, Artificial
  probe
  misc_feature (1)..(25): SEQ ID NO: 5247; WAN024A67; Start 53; Stop 77
atgctttcaattttatcaaggcaaa

SEQ ID NO: 404647 - DNA, 25 bp, Artificial
  probe
  misc_feature (1)..(25): SEQ ID NO: 5247; WAN024A67; Start 52; Stop 76
tatgctttcaattttatcaaggcaa

SEQ ID NO: 404648 - DNA, 25 bp, Artificial
  probe
  misc_feature (1)..(25): SEQ ID NO: 5247; WAN024A67; Start 51; Stop 75
atatgctttcaattttatcaaggca

SEQ ID NO: 404649 - DNA, 25 bp, Artificial
  probe
  misc_feature (1)..(25): SEQ ID NO: 5247; WAN024A67; Start 62; Stop 86
attttatcaaggcaaataactactg

SEQ ID NO: 404650 - DNA, 25 bp, Artificial
  probe
  misc_feature (1)..(25): SEQ ID NO: 5247; WAN024A67; Start 58; Stop 82
ttcaattttatcaaggcaaataact

SEQ ID NO: 404651 - DNA, 25 bp, Artificial
  probe
  misc_feature (1)..(25): SEQ ID NO: 5247; WAN024A67; Start 49; Stop 73
gaatatgctttcaattttatcaagg

SEQ ID NO: 404652 - DNA, 25 bp, Artificial
  probe
  misc_feature (1)..(25): SEQ ID NO: 5247; WAN024A67; Start 60; Stop 84
caattttatcaaggcaaataactac

SEQ ID NO: 404653 - DNA, 25 bp, Artificial
  probe
  misc_feature (1)..(25): SEQ ID NO: 5247; WAN024A67; Start 57; Stop 81
tttcaattttatcaaggcaaataac

SEQ ID NO: 404654 - DNA, 25 bp, Artificial
  probe
  misc_feature (1)..(25): SEQ ID NO: 5247; WAN024A67; Start 61; Stop 85
aattttatcaaggcaaataactact

SEQ ID NO: 404655 - DNA, 25 bp, Artificial
  probe
  misc_feature (1)..(25): SEQ ID NO: 5247; WAN024A67; Start 59; Stop 83
tcaattttatcaaggcaaataacta

SEQ ID NO: 404656 - DNA, 25 bp, Artificial
  probe
  misc_feature (1)..(25): SEQ ID NO: 5247; WAN024A67; Start 56; Stop 80
ctttcaattttatcaaggcaaataa

SEQ ID NO: 404657 - DNA, 25 bp, Artificial
  probe
  misc_feature (1)..(25): SEQ ID NO: 5247; WAN024A67; Start 2; Stop 26
tgattctccttgaatattacttcaa

SEQ ID NO: 404658 - DNA, 25 bp, Artificial
  probe
  misc_feature (1)..(25): SEQ ID NO: 5248; WAN024FAY; Start 222; Stop 246
ccaaggtatagataatcgtgtaggt

SEQ ID NO: 404659 - DNA, 25 bp, Artificial
  probe
  misc_feature (1)..(25): SEQ ID NO: 5248; WAN024FAY; Start 218; Stop 242
ggaaccaaggtatagataatcgtgt

SEQ ID NO: 404660 - DNA, 25 bp, Artificial
  probe
  misc_feature (1)..(25): SEQ ID NO: 5248; WAN024FAY; Start 217; Stop 241
aggaaccaaggtatagataatcgtg

SEQ ID NO: 404661 - DNA, 25 bp, Artificial
  probe
  misc_feature (1)..(25): SEQ ID NO: 5248; WAN024FAY; Start 216; Stop 240
gaggaaccaaggtatagataatcgt

SEQ ID NO: 404662 - DNA, 25 bp, Artificial
  probe
  misc_feature (1)..(25): SEQ ID NO: 5248; WAN024FAY; Start 221; Stop 245
accaaggtatagataatcgtgtagg

SEQ ID NO: 404663 - DNA, 25 bp, Artificial
  probe
  misc_feature (1)..(25): SEQ ID NO: 5248; WAN024FAY; Start 225; Stop 249
aggtatagataatcgtgtaggtcaa

SEQ ID NO: 404664 - DNA, 25 bp, Artificial
  probe
  misc_feature (1)..(25): SEQ ID NO: 5248; WAN024FAY; Start 224; Stop 248
aaggtatagataatcgtgtaggtca

SEQ ID NO: 404665 - DNA, 25 bp, Artificial
  probe
  misc_feature (1)..(25): SEQ ID NO: 5248; WAN024FAY; Start 223; Stop 247
caaggtatagataatcgtgtaggtc

SEQ ID NO: 404666 - DNA, 25 bp, Artificial
  probe
  misc_feature (1)..(25): SEQ ID NO: 5248; WAN024FAY; Start 52; Stop 76
tgttacagaagaatccatgctactt

SEQ ID NO: 404667 - DNA, 25 bp, Artificial
  probe
  misc_feature (1)..(25): SEQ ID NO: 5248; WAN024FAY; Start 53; Stop 77
gttacagaagaatccatgctacttg

SEQ ID NO: 404668 - DNA, 25 bp, Artificial
  probe
  misc_feature (1)..(25): SEQ ID NO: 5248; WAN024FAY; Start 54; Stop 78
ttacagaagaatccatgctacttgc

SEQ ID NO: 404669 - DNA, 25 bp, Artificial
  probe
  misc_feature (1)..(25): SEQ ID NO: 5248; WAN024FAY; Start 219; Stop 243
gaaccaaggtatagataatcgtgta

SEQ ID NO: 404670 - DNA, 25 bp, Artificial
  probe
  misc_feature (1)..(25): SEQ ID NO: 5248; WAN024FAY; Start 220; Stop 244
aaccaaggtatagataatcgtgtag

SEQ ID NO: 404671 - DNA, 25 bp, Artificial
  probe
  misc_feature (1)..(25): SEQ ID NO: 5248; WAN024FAY; Start 214; Stop 238
tcgaggaaccaaggtatagataatc

SEQ ID NO: 404672 - DNA, 25 bp, Artificial
  probe
  misc_feature (1)..(25): SEQ ID NO: 5248; WAN024FAY; Start 51; Stop 75
ctgttacagaagaatccatgctact

SEQ ID NO: 404673 - DNA, 25 bp, Artificial
  probe
  misc_feature (1)..(25): SEQ ID NO: 5248; WAN024FAY; Start 48; Stop 72
ctactgttacagaagaatccatgct

SEQ ID NO: 404674 - DNA, 25 bp, Artificial
  probe
  misc_feature (1)..(25): SEQ ID NO: 5248; WAN024FAY; Start 233; Stop 257
ataatcgtgtaggtcaaagtcgtta

SEQ ID NO: 404675 - DNA, 25 bp, Artificial
  probe
  misc_feature (1)..(25): SEQ ID NO: 5248; WAN024FAY; Start 230; Stop 254
tagataatcgtgtaggtcaaagtcg

SEQ ID NO: 404676 - DNA, 25 bp, Artificial
  probe
  misc_feature (1)..(25): SEQ ID NO: 5248; WAN024FAY; Start 47; Stop 71
tctactgttacagaagaatccatgc

SEQ ID NO: 404677 - DNA, 25 bp, Artificial
  probe
  misc_feature (1)..(25): SEQ ID NO: 5248; WAN024FAY; Start 50; Stop 74
actgttacagaagaatccatgctac

SEQ ID NO: 404678 - DNA, 25 bp, Artificial
  probe
  misc_feature (1)..(25): SEQ ID NO: 5248; WAN024FAY; Start 213; Stop 237
ttcgaggaaccaaggtatagataat

SEQ ID NO: 404679 - DNA, 25 bp, Artificial
  probe
  misc_feature (1)..(25): SEQ ID NO: 5248; WAN024FAY; Start 49; Stop 73
tactgttacagaagaatccatgcta

SEQ ID NO: 404680 - DNA, 25 bp, Artificial
  probe
  misc_feature (1)..(25): SEQ ID NO: 5248; WAN024FAY; Start 234; Stop 258
taatcgtgtaggtcaaagtcgttac

SEQ ID NO: 404681 - DNA, 25 bp, Artificial
  probe
  misc_feature (1)..(25): SEQ ID NO: 5248; WAN024FAY; Start 232; Stop 256
gataatcgtgtaggtcaaagtcgtt

SEQ ID NO: 404682 - DNA, 25 bp, Artificial
  probe
  misc_feature (1)..(25): SEQ ID NO: 5248; WAN024FAY; Start 101; Stop 125
tcgtaatactcaatgtagcccatac

SEQ ID NO: 404683 - DNA, 25 bp, Artificial
  probe
  misc_feature (1)..(25): SEQ ID NO: 5248; WAN024FAY; Start 100; Stop 124
atcgtaatactcaatgtagcccata

SEQ ID NO: 404684 - DNA, 25 bp, Artificial
  probe
  misc_feature (1)..(25): SEQ ID NO: 5248; WAN024FAY; Start 99; Stop 123
tatcgtaatactcaatgtagcccat

SEQ ID NO: 404685 - DNA, 25 bp, Artificial
  probe
  misc_feature (1)..(25): SEQ ID NO: 5248; WAN024FAY; Start 215; Stop 239
cgaggaaccaaggtatagataatcg

SEQ ID NO: 404686 - DNA, 25 bp, Artificial
  probe
  misc_feature (1)..(25): SEQ ID NO: 5248; WAN024FAY; Start 231; Stop 255
agataatcgtgtaggtcaaagtcgt

SEQ ID NO: 404687 - DNA, 25 bp, Artificial
  probe
  misc_feature (1)..(25): SEQ ID NO: 5248; WAN024FAY; Start 103; Stop 127
gtaatactcaatgtagcccatacgc

SEQ ID NO: 404688 - DNA, 25 bp, Artificial
  probe
  misc_feature (1)..(25): SEQ ID NO: 5248; WAN024FAY; Start 55; Stop 79
tacagaagaatccatgctacttgcc

SEQ ID NO: 404689 - DNA, 25 bp, Artificial
  probe
  misc_feature (1)..(25): SEQ ID NO: 5248; WAN024FAY; Start 27; Stop 51
ctttattggtcgcatttgcttctac

SEQ ID NO: 404690 - DNA, 25 bp, Artificial
  probe
  misc_feature (1)..(25): SEQ ID NO: 5248; WAN024FAY; Start 236; Stop 260
atcgtgtaggtcaaagtcgttacta

SEQ ID NO: 404691 - DNA, 25 bp, Artificial
  probe
  misc_feature (1)..(25): SEQ ID NO: 5249; WAN024DYZ; Start 159; Stop 183
tataaccctgctcaatcaagacatc

SEQ ID NO: 404692 - DNA, 25 bp, Artificial
  probe
  misc_feature (1)..(25): SEQ ID NO: 5249; WAN024DYZ; Start 80; Stop 104
gtaatgacctgaacaacctctcgtt

SEQ ID NO: 404693 - DNA, 25 bp, Artificial
  probe
  misc_feature (1)..(25): SEQ ID NO: 5249; WAN024DYZ; Start 158; Stop 182
ttataaccctgctcaatcaagacat

SEQ ID NO: 404694 - DNA, 25 bp, Artificial
  probe
  misc_feature (1)..(25): SEQ ID NO: 5249; WAN024DYZ; Start 185; Stop 209
atatactgttgggcagaatgatagg

SEQ ID NO: 404695 - DNA, 25 bp, Artificial
  probe
  misc_feature (1)..(25): SEQ ID NO: 5249; WAN024DYZ; Start 183; Stop 207
cgatatactgttgggcagaatgata

SEQ ID NO: 404696 - DNA, 25 bp, Artificial
  probe
  misc_feature (1)..(25): SEQ ID NO: 5249; WAN024DYZ; Start 157; Stop 181
cttataaccctgctcaatcaagaca

SEQ ID NO: 404697 - DNA, 25 bp, Artificial
  probe
  misc_feature (1)..(25): SEQ ID NO: 5249; WAN024DYZ; Start 184; Stop 208
gatatactgttgggcagaatgatag

SEQ ID NO: 404698 - DNA, 25 bp, Artificial
  probe
  misc_feature (1)..(25): SEQ ID NO: 5249; WAN024DYZ; Start 82; Stop 106
aatgacctgaacaacctctcgttta

SEQ ID NO: 404699 - DNA, 25 bp, Artificial
  probe
  misc_feature (1)..(25): SEQ ID NO: 5249; WAN024DYZ; Start 81; Stop 105
taatgacctgaacaacctctcgttt

SEQ ID NO: 404700 - DNA, 25 bp, Artificial
  probe
  misc_feature (1)..(25): SEQ ID NO: 5249; WAN024DYZ; Start 83; Stop 107
atgacctgaacaacctctcgtttaa

SEQ ID NO: 404701 - DNA, 25 bp, Artificial
  probe
  misc_feature (1)..(25): SEQ ID NO: 5249; WAN024DYZ; Start 156; Stop 180
ccttataaccctgctcaatcaagac

SEQ ID NO: 404702 - DNA, 25 bp, Artificial
  probe
  misc_feature (1)..(25): SEQ ID NO: 5249; WAN024DYZ; Start 88; Stop 112
ctgaacaacctctcgtttaacaacc

SEQ ID NO: 404703 - DNA, 25 bp, Artificial
  probe
  misc_feature (1)..(25): SEQ ID NO: 5249; WAN024DYZ; Start 87; Stop 111
cctgaacaacctctcgtttaacaac

SEQ ID NO: 404704 - DNA, 25 bp, Artificial
  probe
  misc_feature (1)..(25): SEQ ID NO: 5249; WAN024DYZ; Start 155; Stop 179
accttataaccctgctcaatcaaga

SEQ ID NO: 404705 - DNA, 25 bp, Artificial
  probe
  misc_feature (1)..(25): SEQ ID NO: 5249; WAN024DYZ; Start 154; Stop 178
caccttataaccctgctcaatcaag

SEQ ID NO: 404706 - DNA, 25 bp, Artificial
  probe
  misc_feature (1)..(25): SEQ ID NO: 5249; WAN024DYZ; Start 186; Stop 210
tatactgttgggcagaatgataggg

SEQ ID NO: 404707 - DNA, 25 bp, Artificial
  probe
  misc_feature (1)..(25): SEQ ID NO: 5249; WAN024DYZ; Start 86; Stop 110
acctgaacaacctctcgtttaacaa

SEQ ID NO: 404708 - DNA, 25 bp, Artificial
  probe
  misc_feature (1)..(25): SEQ ID NO: 5249; WAN024DYZ; Start 33; Stop 57
aattattctgactgtccggcttact

SEQ ID NO: 404709 - DNA, 25 bp, Artificial
  probe
  misc_feature (1)..(25): SEQ ID NO: 5249; WAN024DYZ; Start 115; Stop 139
aactgcttgtttaggatcttccatc

SEQ ID NO: 404710 - DNA, 25 bp, Artificial
  probe
  misc_feature (1)..(25): SEQ ID NO: 5249; WAN024DYZ; Start 160; Stop 184
ataaccctgctcaatcaagacatcg

SEQ ID NO: 404711 - DNA, 25 bp, Artificial
  probe
  misc_feature (1)..(25): SEQ ID NO: 5249; WAN024DYZ; Start 120; Stop 144
cttgtttaggatcttccatctgctc

SEQ ID NO: 404712 - DNA, 25 bp, Artificial
  probe
  misc_feature (1)..(25): SEQ ID NO: 5249; WAN024DYZ; Start 114; Stop 138
caactgcttgtttaggatcttccat

SEQ ID NO: 404713 - DNA, 25 bp, Artificial
  probe
  misc_feature (1)..(25): SEQ ID NO: 5249; WAN024DYZ; Start 121; Stop 145
ttgtttaggatcttccatctgctct

SEQ ID NO: 404714 - DNA, 25 bp, Artificial
  probe
  misc_feature (1)..(25): SEQ ID NO: 5249; WAN024DYZ; Start 117; Stop 141
ctgcttgtttaggatcttccatctg

SEQ ID NO: 404715 - DNA, 25 bp, Artificial
  probe
  misc_feature (1)..(25): SEQ ID NO: 5249; WAN024DYZ; Start 167; Stop 191
tgctcaatcaagacatcgatatact

SEQ ID NO: 404716 - DNA, 25 bp, Artificial
  probe
  misc_feature (1)..(25): SEQ ID NO: 5249; WAN024DYZ; Start 165; Stop 189
cctgctcaatcaagacatcgatata

SEQ ID NO: 404717 - DNA, 25 bp, Artificial
  probe
  misc_feature (1)..(25): SEQ ID NO: 5249; WAN024DYZ; Start 168; Stop 192
gctcaatcaagacatcgatatactg

SEQ ID NO: 404718 - DNA, 25 bp, Artificial
  probe
  misc_feature (1)..(25): SEQ ID NO: 5249; WAN024DYZ; Start 166; Stop 190
ctgctcaatcaagacatcgatatac

SEQ ID NO: 404719 - DNA, 25 bp, Artificial
  probe
  misc_feature (1)..(25): SEQ ID NO: 5249; WAN024DYZ; Start 85; Stop 109
gacctgaacaacctctcgtttaaca

SEQ ID NO: 404720 - DNA, 25 bp, Artificial
  probe
  misc_feature (1)..(25): SEQ ID NO: 5249; WAN024DYZ; Start 84; Stop 108
tgacctgaacaacctctcgtttaac

SEQ ID NO: 404721 - DNA, 25 bp, Artificial
  probe
  misc_feature (1)..(25): SEQ ID NO: 5249; WAN024DYZ; Start 116; Stop 140
actgcttgtttaggatcttccatct

SEQ ID NO: 404722 - DNA, 25 bp, Artificial
  probe
  misc_feature (1)..(25): SEQ ID NO: 5249; WAN024DYZ; Start 34; Stop 58
attattctgactgtccggcttactg

SEQ ID NO: 404723 - DNA, 25 bp, Artificial
  probe
  misc_feature (1)..(25): SEQ ID NO: 5249; WAN024DYZ; Start 153; Stop 177
ccaccttataaccctgctcaatcaa

SEQ ID NO: 404724 - DNA, 25 bp, Artificial
  probe
  misc_feature (1)..(25): SEQ ID NO: 5250; WAN024ESW; Start 47; Stop 71
aatcaaccttgagaatatcttcgtt

SEQ ID NO: 404725 - DNA, 25 bp, Artificial
  probe
  misc_feature (1)..(25): SEQ ID NO: 5250; WAN024ESW; Start 340; Stop 364
acgctataatctgcaattctcatct

SEQ ID NO: 404726 - DNA, 25 bp, Artificial
  probe
  misc_feature (1)..(25): SEQ ID NO: 5250; WAN024ESW; Start 339; Stop 363
cacgctataatctgcaattctcatc

SEQ ID NO: 404727 - DNA, 25 bp, Artificial
  probe
  misc_feature (1)..(25): SEQ ID NO: 5250; WAN024ESW; Start 338; Stop 362
tcacgctataatctgcaattctcat

SEQ ID NO: 404728 - DNA, 25 bp, Artificial
  probe
  misc_feature (1)..(25): SEQ ID NO: 5250; WAN024ESW; Start 49; Stop 73
tcaaccttgagaatatcttcgttaa

SEQ ID NO: 404729 - DNA, 25 bp, Artificial
  probe
  misc_feature (1)..(25): SEQ ID NO: 5250; WAN024ESW; Start 48; Stop 72
atcaaccttgagaatatcttcgtta

SEQ ID NO: 404730 - DNA, 25 bp, Artificial
  probe
  misc_feature (1)..(25): SEQ ID NO: 5250; WAN024ESW; Start 341; Stop 365
cgctataatctgcaattctcatcta

SEQ ID NO: 404731 - DNA, 25 bp, Artificial
  probe
  misc_feature (1)..(25): SEQ ID NO: 5250; WAN024ESW; Start 337; Stop 361
gtcacgctataatctgcaattctca

SEQ ID NO: 404732 - DNA, 25 bp, Artificial
  probe
  misc_feature (1)..(25): SEQ ID NO: 5250; WAN024ESW; Start 336; Stop 360
ggtcacgctataatctgcaattctc

SEQ ID NO: 404733 - DNA, 25 bp, Artificial
  probe
  misc_feature (1)..(25): SEQ ID NO: 5250; WAN024ESW; Start 334; Stop 358
ttggtcacgctataatctgcaattc

SEQ ID NO: 404734 - DNA, 25 bp, Artificial
  probe
  misc_feature (1)..(25): SEQ ID NO: 5250; WAN024ESW; Start 333; Stop 357
cttggtcacgctataatctgcaatt

SEQ ID NO: 404735 - DNA, 25 bp, Artificial
  probe
  misc_feature (1)..(25): SEQ ID NO: 5250; WAN024ESW; Start 227; Stop 251
catcaatttcagccgtatccacaat

SEQ ID NO: 404736 - DNA, 25 bp, Artificial
  probe
  misc_feature (1)..(25): SEQ ID NO: 5250; WAN024ESW; Start 43; Stop 67
gccaaatcaaccttgagaatatctt

SEQ ID NO: 404737 - DNA, 25 bp, Artificial
  probe
  misc_feature (1)..(25): SEQ ID NO: 5250; WAN024ESW; Start 348; Stop 372
atctgcaattctcatctattctctt

SEQ ID NO: 404738 - DNA, 25 bp, Artificial
  probe
  misc_feature (1)..(25): SEQ ID NO: 5250; WAN024ESW; Start 347; Stop 371
aatctgcaattctcatctattctct

SEQ ID NO: 404739 - DNA, 25 bp, Artificial
  probe
  misc_feature (1)..(25): SEQ ID NO: 5250; WAN024ESW; Start 228; Stop 252
atcaatttcagccgtatccacaatt

SEQ ID NO: 404740 - DNA, 25 bp, Artificial
  probe
  misc_feature (1)..(25): SEQ ID NO: 5250; WAN024ESW; Start 335; Stop 359
tggtcacgctataatctgcaattct

SEQ ID NO: 404741 - DNA, 25 bp, Artificial
  probe
  misc_feature (1)..(25): SEQ ID NO: 5250; WAN024ESW; Start 229; Stop 253
tcaatttcagccgtatccacaattt

SEQ ID NO: 404742 - DNA, 25 bp, Artificial
  probe
  misc_feature (1)..(25): SEQ ID NO: 5250; WAN024ESW; Start 42; Stop 66
cgccaaatcaaccttgagaatatct

SEQ ID NO: 404743 - DNA, 25 bp, Artificial
  probe
  misc_feature (1)..(25): SEQ ID NO: 5250; WAN024ESW; Start 46; Stop 70
aaatcaaccttgagaatatcttcgt

SEQ ID NO: 404744 - DNA, 25 bp, Artificial
  probe
  misc_feature (1)..(25): SEQ ID NO: 5250; WAN024ESW; Start 224; Stop 248
gatcatcaatttcagccgtatccac

SEQ ID NO: 404745 - DNA, 25 bp, Artificial
  probe
  misc_feature (1)..(25): SEQ ID NO: 5250; WAN024ESW; Start 45; Stop 69
caaatcaaccttgagaatatcttcg

SEQ ID NO: 404746 - DNA, 25 bp, Artificial
  probe
  misc_feature (1)..(25): SEQ ID NO: 5250; WAN024ESW; Start 225; Stop 249
atcatcaatttcagccgtatccaca

SEQ ID NO: 404747 - DNA, 25 bp, Artificial
  probe
  misc_feature (1)..(25): SEQ ID NO: 5250; WAN024ESW; Start 175; Stop 199
aattctgtcaaggcaccaatacctg

SEQ ID NO: 404748 - DNA, 25 bp, Artificial
  probe
  misc_feature (1)..(25): SEQ ID NO: 5250; WAN024ESW; Start 44; Stop 68
ccaaatcaaccttgagaatatcttc

SEQ ID NO: 404749 - DNA, 25 bp, Artificial
  probe
  misc_feature (1)..(25): SEQ ID NO: 5250; WAN024ESW; Start 50; Stop 74
caaccttgagaatatcttcgttaac

SEQ ID NO: 404750 - DNA, 25 bp, Artificial
  probe
  misc_feature (1)..(25): SEQ ID NO: 5250; WAN024ESW; Start 226; Stop 250
tcatcaatttcagccgtatccacaa

SEQ ID NO: 404751 - DNA, 25 bp, Artificial
  probe
  misc_feature (1)..(25): SEQ ID NO: 5250; WAN024ESW; Start 51; Stop 75
aaccttgagaatatcttcgttaact

SEQ ID NO: 404752 - DNA, 25 bp, Artificial
  probe
  misc_feature (1)..(25): SEQ ID NO: 5250; WAN024ESW; Start 203; Stop 227
cgatttcgatgacattgacctgatc

SEQ ID NO: 404753 - DNA, 25 bp, Artificial
  probe
  misc_feature (1)..(25): SEQ ID NO: 5250; WAN024ESW; Start 84; Stop 108
attatcaaaatcacgcagggtatct

SEQ ID NO: 404754 - DNA, 25 bp, Artificial
  probe
  misc_feature (1)..(25): SEQ ID NO: 5250; WAN024ESW; Start 83; Stop 107
cattatcaaaatcacgcagggtatc

SEQ ID NO: 404755 - DNA, 25 bp, Artificial
  probe
  misc_feature (1)..(25): SEQ ID NO: 5250; WAN024ESW; Start 74; Stop 98
ctacggtcacattatcaaaatcacg

SEQ ID NO: 404756 - DNA, 25 bp, Artificial
  probe
  misc_feature (1)..(25): SEQ ID NO: 5250; WAN024ESW; Start 342; Stop 366
gctataatctgcaattctcatctat

SEQ ID NO: 404757 - DNA, 25 bp, Artificial
  probe
  misc_feature (1)..(25): SEQ ID NO: 5251; WAN024GKK; Start 22; Stop 46
cctctgacaatttcaaccaatgtag

SEQ ID NO: 404758 - DNA, 25 bp, Artificial
  probe
  misc_feature (1)..(25): SEQ ID NO: 5251; WAN024GKK; Start 21; Stop 45
acctctgacaatttcaaccaatgta

SEQ ID NO: 404759 - DNA, 25 bp, Artificial
  probe
  misc_feature (1)..(25): SEQ ID NO: 5251; WAN024GKK; Start 23; Stop 47
ctctgacaatttcaaccaatgtaga

SEQ ID NO: 404760 - DNA, 25 bp, Artificial
  probe
  misc_feature (1)..(25): SEQ ID NO: 5251; WAN024GKK; Start 24; Stop 48
tctgacaatttcaaccaatgtagaa

SEQ ID NO: 404761 - DNA, 25 bp, Artificial
  probe
  misc_feature (1)..(25): SEQ ID NO: 5251; WAN024GKK; Start 20; Stop 44
cacctctgacaatttcaaccaatgt

SEQ ID NO: 404762 - DNA, 25 bp, Artificial
  probe
  misc_feature (1)..(25): SEQ ID NO: 5251; WAN024GKK; Start 57; Stop 81
ccactcccaagtatcaggaatatca

SEQ ID NO: 404763 - DNA, 25 bp, Artificial
  probe
  misc_feature (1)..(25): SEQ ID NO: 5251; WAN024GKK; Start 19; Stop 43
ccacctctgacaatttcaaccaatg

SEQ ID NO: 404764 - DNA, 25 bp, Artificial
  probe
  misc_feature (1)..(25): SEQ ID NO: 5251; WAN024GKK; Start 56; Stop 80
cccactcccaagtatcaggaatatc

SEQ ID NO: 404765 - DNA, 25 bp, Artificial
  probe
  misc_feature (1)..(25): SEQ ID NO: 5251; WAN024GKK; Start 55; Stop 79
acccactcccaagtatcaggaatat

SEQ ID NO: 404766 - DNA, 25 bp, Artificial
  probe
  misc_feature (1)..(25): SEQ ID NO: 5251; WAN024GKK; Start 25; Stop 49
ctgacaatttcaaccaatgtagaaa

SEQ ID NO: 404767 - DNA, 25 bp, Artificial
  probe
  misc_feature (1)..(25): SEQ ID NO: 5251; WAN024GKK; Start 33; Stop 57
ttcaaccaatgtagaaaacctcacc

SEQ ID NO: 404768 - DNA, 25 bp, Artificial
  probe
  misc_feature (1)..(25): SEQ ID NO: 5251; WAN024GKK; Start 54; Stop 78
cacccactcccaagtatcaggaata

SEQ ID NO: 404769 - DNA, 25 bp, Artificial
  probe
  misc_feature (1)..(25): SEQ ID NO: 5251; WAN024GKK; Start 18; Stop 42
gccacctctgacaatttcaaccaat

SEQ ID NO: 404770 - DNA, 25 bp, Artificial
  probe
  misc_feature (1)..(25): SEQ ID NO: 5251; WAN024GKK; Start 34; Stop 58
tcaaccaatgtagaaaacctcaccc

SEQ ID NO: 404771 - DNA, 25 bp, Artificial
  probe
  misc_feature (1)..(25): SEQ ID NO: 5251; WAN024GKK; Start 32; Stop 56
tttcaaccaatgtagaaaacctcac

SEQ ID NO: 404772 - DNA, 25 bp, Artificial
  probe
  misc_feature (1)..(25): SEQ ID NO: 5251; WAN024GKK; Start 36; Stop 60
aaccaatgtagaaaacctcacccac

SEQ ID NO: 404773 - DNA, 25 bp, Artificial
  probe
  misc_feature (1)..(25): SEQ ID NO: 5251; WAN024GKK; Start 35; Stop 59
caaccaatgtagaaaacctcaccca

SEQ ID NO: 404774 - DNA, 25 bp, Artificial
  probe
  misc_feature (1)..(25): SEQ ID NO: 5251; WAN024GKK; Start 31; Stop 55
atttcaaccaatgtagaaaacctca

SEQ ID NO: 404775 - DNA, 25 bp, Artificial
  probe
  misc_feature (1)..(25): SEQ ID NO: 5251; WAN024GKK; Start 39; Stop 63
caatgtagaaaacctcacccactcc

SEQ ID NO: 404776 - DNA, 25 bp, Artificial
  probe
  misc_feature (1)..(25): SEQ ID NO: 5251; WAN024GKK; Start 38; Stop 62
ccaatgtagaaaacctcacccactc

SEQ ID NO: 404777 - DNA, 25 bp, Artificial
  probe
  misc_feature (1)..(25): SEQ ID NO: 5251; WAN024GKK; Start 28; Stop 52
acaatttcaaccaatgtagaaaacc

SEQ ID NO: 404778 - DNA, 25 bp, Artificial
  probe
  misc_feature (1)..(25): SEQ ID NO: 5251; WAN024GKK; Start 29; Stop 53
caatttcaaccaatgtagaaaacct

SEQ ID NO: 404779 - DNA, 25 bp, Artificial
  probe
  misc_feature (1)..(25): SEQ ID NO: 5251; WAN024GKK; Start 30; Stop 54
aatttcaaccaatgtagaaaacctc

SEQ ID NO: 404780 - DNA, 25 bp, Artificial
  probe
  misc_feature (1)..(25): SEQ ID NO: 5251; WAN024GKK; Start 26; Stop 50
tgacaatttcaaccaatgtagaaaa

SEQ ID NO: 404781 - DNA, 25 bp, Artificial
  probe
  misc_feature (1)..(25): SEQ ID NO: 5251; WAN024GKK; Start 27; Stop 51
gacaatttcaaccaatgtagaaaac

SEQ ID NO: 404782 - DNA, 25 bp, Artificial
  probe
  misc_feature (1)..(25): SEQ ID NO: 5251; WAN024GKK; Start 37; Stop 61
accaatgtagaaaacctcacccact

SEQ ID NO: 404783 - DNA, 25 bp, Artificial
  probe
  misc_feature (1)..(25): SEQ ID NO: 5251; WAN024GKK; Start 17; Stop 41
agccacctctgacaatttcaaccaa

SEQ ID NO: 404784 - DNA, 25 bp, Artificial
  probe
  misc_feature (1)..(25): SEQ ID NO: 5251; WAN024GKK; Start 53; Stop 77
tcacccactcccaagtatcaggaat

SEQ ID NO: 404785 - DNA, 25 bp, Artificial
  probe
  misc_feature (1)..(25): SEQ ID NO: 5251; WAN024GKK; Start 48; Stop 72
aaacctcacccactcccaagtatca

SEQ ID NO: 404786 - DNA, 25 bp, Artificial
  probe
  misc_feature (1)..(25): SEQ ID NO: 5251; WAN024GKK; Start 40; Stop 64
aatgtagaaaacctcacccactccc

SEQ ID NO: 404787 - DNA, 25 bp, Artificial
  probe
  misc_feature (1)..(25): SEQ ID NO: 5251; WAN024GKK; Start 14; Stop 38
gagagccacctctgacaatttcaac

SEQ ID NO: 404788 - DNA, 25 bp, Artificial
  probe
  misc_feature (1)..(25): SEQ ID NO: 5251; WAN024GKK; Start 47; Stop 71
aaaacctcacccactcccaagtatc

SEQ ID NO: 404789 - DNA, 25 bp, Artificial
  probe
  misc_feature (1)..(25): SEQ ID NO: 5251; WAN024GKK; Start 46; Stop 70
gaaaacctcacccactcccaagtat

SEQ ID NO: 404790 - DNA, 25 bp, Artificial
  probe
  misc_feature (1)..(25): SEQ ID NO: 5252; WAN024DD2; Start 180; Stop 204
aaccaagaataacattgctcagttc

SEQ ID NO: 404791 - DNA, 25 bp, Artificial
  probe
  misc_feature (1)..(25): SEQ ID NO: 5252; WAN024DD2; Start 544; Stop 568
gttcattatgtcttgaccaaggaag

SEQ ID NO: 404792 - DNA, 25 bp, Artificial
  probe
  misc_feature (1)..(25): SEQ ID NO: 5252; WAN024DD2; Start 543; Stop 567
agttcattatgtcttgaccaaggaa

SEQ ID NO: 404793 - DNA, 25 bp, Artificial
  probe
  misc_feature (1)..(25): SEQ ID NO: 5252; WAN024DD2; Start 542; Stop 566
gagttcattatgtcttgaccaagga

SEQ ID NO: 404794 - DNA, 25 bp, Artificial
  probe
  misc_feature (1)..(25): SEQ ID NO: 5252; WAN024DD2; Start 541; Stop 565
agagttcattatgtcttgaccaagg

SEQ ID NO: 404795 - DNA, 25 bp, Artificial
  probe
  misc_feature (1)..(25): SEQ ID NO: 5252; WAN024DD2; Start 338; Stop 362
attggaatcaaggattaacgacaga

SEQ ID NO: 404796 - DNA, 25 bp, Artificial
  probe
  misc_feature (1)..(25): SEQ ID NO: 5252; WAN024DD2; Start 339; Stop 363
ttggaatcaaggattaacgacagaa

SEQ ID NO: 404797 - DNA, 25 bp, Artificial
  probe
  misc_feature (1)..(25): SEQ ID NO: 5252; WAN024DD2; Start 336; Stop 360
gtattggaatcaaggattaacgaca

SEQ ID NO: 404798 - DNA, 25 bp, Artificial
  probe
  misc_feature (1)..(25): SEQ ID NO: 5252; WAN024DD2; Start 337; Stop 361
tattggaatcaaggattaacgacag

SEQ ID NO: 404799 - DNA, 25 bp, Artificial
  probe
  misc_feature (1)..(25): SEQ ID NO: 5252; WAN024DD2; Start 178; Stop 202
gaaaccaagaataacattgctcagt

SEQ ID NO: 404800 - DNA, 25 bp, Artificial
  probe
  misc_feature (1)..(25): SEQ ID NO: 5252; WAN024DD2; Start 177; Stop 201
agaaaccaagaataacattgctcag

SEQ ID NO: 404801 - DNA, 25 bp, Artificial
  probe
  misc_feature (1)..(25): SEQ ID NO: 5252; WAN024DD2; Start 174; Stop 198
ggaagaaaccaagaataacattgct

SEQ ID NO: 404802 - DNA, 25 bp, Artificial
  probe
  misc_feature (1)..(25): SEQ ID NO: 5252; WAN024DD2; Start 179; Stop 203
aaaccaagaataacattgctcagtt

SEQ ID NO: 404803 - DNA, 25 bp, Artificial
  probe
  misc_feature (1)..(25): SEQ ID NO: 5252; WAN024DD2; Start 176; Stop 200
aagaaaccaagaataacattgctca

SEQ ID NO: 404804 - DNA, 25 bp, Artificial
  probe
  misc_feature (1)..(25): SEQ ID NO: 5252; WAN024DD2; Start 181; Stop 205
accaagaataacattgctcagttct

SEQ ID NO: 404805 - DNA, 25 bp, Artificial
  probe
  misc_feature (1)..(25): SEQ ID NO: 5252; WAN024DD2; Start 175; Stop 199
gaagaaaccaagaataacattgctc

SEQ ID NO: 404806 - DNA, 25 bp, Artificial
  probe
  misc_feature (1)..(25): SEQ ID NO: 5252; WAN024DD2; Start 182; Stop 206
ccaagaataacattgctcagttcta

SEQ ID NO: 404807 - DNA, 25 bp, Artificial
  probe
  misc_feature (1)..(25): SEQ ID NO: 5252; WAN024DD2; Start 545; Stop 569
ttcattatgtcttgaccaaggaaga

SEQ ID NO: 404808 - DNA, 25 bp, Artificial
  probe
  misc_feature (1)..(25): SEQ ID NO: 5252; WAN024DD2; Start 540; Stop 564
aagagttcattatgtcttgaccaag

SEQ ID NO: 404809 - DNA, 25 bp, Artificial
  probe
  misc_feature (1)..(25): SEQ ID NO: 5252; WAN024DD2; Start 173; Stop 197
tggaagaaaccaagaataacattgc

SEQ ID NO: 404810 - DNA, 25 bp, Artificial
  probe
  misc_feature (1)..(25): SEQ ID NO: 5252; WAN024DD2; Start 448; Stop 472
tcaggaaaggtcatggagaaatcag

SEQ ID NO: 404811 - DNA, 25 bp, Artificial
  probe
  misc_feature (1)..(25): SEQ ID NO: 5252; WAN024DD2; Start 1; Stop 25
ttgattggttggaaaagtatggaat

SEQ ID NO: 404812 - DNA, 25 bp, Artificial
  probe
  misc_feature (1)..(25): SEQ ID NO: 5252; WAN024DD2; Start 449; Stop 473
caggaaaggtcatggagaaatcagg

SEQ ID NO: 404813 - DNA, 25 bp, Artificial
  probe
  misc_feature (1)..(25): SEQ ID NO: 5252; WAN024DD2; Start 131; Stop 155
acaagggtaatacacgttacacttt

SEQ ID NO: 404814 - DNA, 25 bp, Artificial
  probe
  misc_feature (1)..(25): SEQ ID NO: 5252; WAN024DD2; Start 145; Stop 169
cgttacacttttccaaccaatcaaa

SEQ ID NO: 404815 - DNA, 25 bp, Artificial
  probe
  misc_feature (1)..(25): SEQ ID NO: 5252; WAN024DD2; Start 130; Stop 154
gacaagggtaatacacgttacactt

SEQ ID NO: 404816 - DNA, 25 bp, Artificial
  probe
  misc_feature (1)..(25): SEQ ID NO: 5252; WAN024DD2; Start 5; Stop 29
ttggttggaaaagtatggaatcaat

SEQ ID NO: 404817 - DNA, 25 bp, Artificial
  probe
  misc_feature (1)..(25): SEQ ID NO: 5252; WAN024DD2; Start 4; Stop 28
attggttggaaaagtatggaatcaa

SEQ ID NO: 404818 - DNA, 25 bp, Artificial
  probe
  misc_feature (1)..(25): SEQ ID NO: 5252; WAN024DD2; Start 111; Stop 135
aatgtttgactatgcctcggacaag

SEQ ID NO: 404819 - DNA, 25 bp, Artificial
  probe
  misc_feature (1)..(25): SEQ ID NO: 5252; WAN024DD2; Start 110; Stop 134
caatgtttgactatgcctcggacaa

SEQ ID NO: 404820 - DNA, 25 bp, Artificial
  probe
  misc_feature (1)..(25): SEQ ID NO: 5252; WAN024DD2; Start 85; Stop 109
cctgtaactttggatgatgcggaag

SEQ ID NO: 404821 - DNA, 25 bp, Artificial
  probe
  misc_feature (1)..(25): SEQ ID NO: 5252; WAN024DD2; Start 118; Stop 142
gactatgcctcggacaagggtaata

SEQ ID NO: 404822 - DNA, 25 bp, Artificial
  probe
  misc_feature (1)..(25): SEQ ID NO: 5252; WAN024DD2; Start 486; Stop 510
ccatgcagaaccatatgcttgtatg

SEQ ID NO: 404823 - DNA, 25 bp, Artificial
  probe
  misc_feature (1)..(25): SEQ ID NO: 5253; WAN024CQ9; Start 104; Stop 128
cgttggatatattccttcttcatgg

SEQ ID NO: 404824 - DNA, 25 bp, Artificial
  probe
  misc_feature (1)..(25): SEQ ID NO: 5253; WAN024CQ9; Start 109; Stop 133
gatatattccttcttcatgggctcc

SEQ ID NO: 404825 - DNA, 25 bp, Artificial
  probe
  misc_feature (1)..(25): SEQ ID NO: 5253; WAN024CQ9; Start 101; Stop 125
cgacgttggatatattccttcttca

SEQ ID NO: 404826 - DNA, 25 bp, Artificial
  probe
  misc_feature (1)..(25): SEQ ID NO: 5253; WAN024CQ9; Start 100; Stop 124
ccgacgttggatatattccttcttc

SEQ ID NO: 404827 - DNA, 25 bp, Artificial
  probe
  misc_feature (1)..(25): SEQ ID NO: 5253; WAN024CQ9; Start 103; Stop 127
acgttggatatattccttcttcatg

SEQ ID NO: 404828 - DNA, 25 bp, Artificial
  probe
  misc_feature (1)..(25): SEQ ID NO: 5253; WAN024CQ9; Start 102; Stop 126
gacgttggatatattccttcttcat

SEQ ID NO: 404829 - DNA, 25 bp, Artificial
  probe
  misc_feature (1)..(25): SEQ ID NO: 5253; WAN024CQ9; Start 110; Stop 134
atatattccttcttcatgggctccg

SEQ ID NO: 404830 - DNA, 25 bp, Artificial
  probe
  misc_feature (1)..(25): SEQ ID NO: 5253; WAN024CQ9; Start 108; Stop 132
ggatatattccttcttcatgggctc

SEQ ID NO: 404831 - DNA, 25 bp, Artificial
  probe
  misc_feature (1)..(25): SEQ ID NO: 5253; WAN024CQ9; Start 106; Stop 130
ttggatatattccttcttcatgggc

SEQ ID NO: 404832 - DNA, 25 bp, Artificial
  probe
  misc_feature (1)..(25): SEQ ID NO: 5253; WAN024CQ9; Start 107; Stop 131
tggatatattccttcttcatgggct

SEQ ID NO: 404833 - DNA, 25 bp, Artificial
  probe
  misc_feature (1)..(25): SEQ ID NO: 5253; WAN024CQ9; Start 105; Stop 129
gttggatatattccttcttcatggg

SEQ ID NO: 404834 - DNA, 25 bp, Artificial
  probe
  misc_feature (1)..(25): SEQ ID NO: 5253; WAN024CQ9; Start 30; Stop 54
aaatatagaaggcaccgtctggttt

SEQ ID NO: 404835 - DNA, 25 bp, Artificial
  probe
  misc_feature (1)..(25): SEQ ID NO: 5253; WAN024CQ9; Start 90; Stop 114
tgatatagtcccgacgttggatata

SEQ ID NO: 404836 - DNA, 25 bp, Artificial
  probe
  misc_feature (1)..(25): SEQ ID NO: 5253; WAN024CQ9; Start 93; Stop 117
tatagtcccgacgttggatatattc

SEQ ID NO: 404837 - DNA, 25 bp, Artificial
  probe
  misc_feature (1)..(25): SEQ ID NO: 5253; WAN024CQ9; Start 91; Stop 115
gatatagtcccgacgttggatatat

SEQ ID NO: 404838 - DNA, 25 bp, Artificial
  probe
  misc_feature (1)..(25): SEQ ID NO: 5253; WAN024CQ9; Start 89; Stop 113
atgatatagtcccgacgttggatat

SEQ ID NO: 404839 - DNA, 25 bp, Artificial
  probe
  misc_feature (1)..(25): SEQ ID NO: 5253; WAN024CQ9; Start 92; Stop 116
atatagtcccgacgttggatatatt

SEQ ID NO: 404840 - DNA, 25 bp, Artificial
  probe
  misc_feature (1)..(25): SEQ ID NO: 5253; WAN024CQ9; Start 55; Stop 79
gataatctcaaaaccaagagcagtc

SEQ ID NO: 404841 - DNA, 25 bp, Artificial
  probe
  misc_feature (1)..(25): SEQ ID NO: 5253; WAN024CQ9; Start 57; Stop 81
taatctcaaaaccaagagcagtcat

SEQ ID NO: 404842 - DNA, 25 bp, Artificial
  probe
  misc_feature (1)..(25): SEQ ID NO: 5253; WAN024CQ9; Start 56; Stop 80
ataatctcaaaaccaagagcagtca

SEQ ID NO: 404843 - DNA, 25 bp, Artificial
  probe
  misc_feature (1)..(25): SEQ ID NO: 5253; WAN024CQ9; Start 54; Stop 78
tgataatctcaaaaccaagagcagt

SEQ ID NO: 404844 - DNA, 25 bp, Artificial
  probe
  misc_feature (1)..(25): SEQ ID NO: 5253; WAN024CQ9; Start 88; Stop 112
gatgatatagtcccgacgttggata

SEQ ID NO: 404845 - DNA, 25 bp, Artificial
  probe
  misc_feature (1)..(25): SEQ ID NO: 5253; WAN024CQ9; Start 94; Stop 118
atagtcccgacgttggatatattcc

SEQ ID NO: 404846 - DNA, 25 bp, Artificial
  probe
  misc_feature (1)..(25): SEQ ID NO: 5253; WAN024CQ9; Start 31; Stop 55
aatatagaaggcaccgtctggtttg

SEQ ID NO: 404847 - DNA, 25 bp, Artificial
  probe
  misc_feature (1)..(25): SEQ ID NO: 5253; WAN024CQ9; Start 59; Stop 83
atctcaaaaccaagagcagtcattt

SEQ ID NO: 404848 - DNA, 25 bp, Artificial
  probe
  misc_feature (1)..(25): SEQ ID NO: 5253; WAN024CQ9; Start 58; Stop 82
aatctcaaaaccaagagcagtcatt

SEQ ID NO: 404849 - DNA, 25 bp, Artificial
  probe
  misc_feature (1)..(25): SEQ ID NO: 5253; WAN024CQ9; Start 99; Stop 123
cccgacgttggatatattccttctt

SEQ ID NO: 404850 - DNA, 25 bp, Artificial
  probe
  misc_feature (1)..(25): SEQ ID NO: 5253; WAN024CQ9; Start 60; Stop 84
tctcaaaaccaagagcagtcatttt

SEQ ID NO: 404851 - DNA, 25 bp, Artificial
  probe
  misc_feature (1)..(25): SEQ ID NO: 5253; WAN024CQ9; Start 95; Stop 119
tagtcccgacgttggatatattcct

SEQ ID NO: 404852 - DNA, 25 bp, Artificial
  probe
  misc_feature (1)..(25): SEQ ID NO: 5253; WAN024CQ9; Start 201; Stop 225
ccaagtactggtgactcttgattaa

SEQ ID NO: 404853 - DNA, 25 bp, Artificial
  probe
  misc_feature (1)..(25): SEQ ID NO: 5253; WAN024CQ9; Start 34; Stop 58
atagaaggcaccgtctggtttgata

SEQ ID NO: 404854 - DNA, 25 bp, Artificial
  probe
  misc_feature (1)..(25): SEQ ID NO: 5253; WAN024CQ9; Start 33; Stop 57
tatagaaggcaccgtctggtttgat

SEQ ID NO: 404855 - DNA, 25 bp, Artificial
  probe
  misc_feature (1)..(25): SEQ ID NO: 5253; WAN024CQ9; Start 32; Stop 56
atatagaaggcaccgtctggtttga

SEQ ID NO: 404856 - DNA, 25 bp, Artificial
  probe
  misc_feature (1)..(25): SEQ ID NO: 5254; WAN024FPU; Start 76; Stop 100
aatcttggtccacttcatacttctt

SEQ ID NO: 404857 - DNA, 25 bp, Artificial
  probe
  misc_feature (1)..(25): SEQ ID NO: 5254; WAN024FPU; Start 77; Stop 101
atcttggtccacttcatacttcttc

SEQ ID NO: 404858 - DNA, 25 bp, Artificial
  probe
  misc_feature (1)..(25): SEQ ID NO: 5254; WAN024FPU; Start 75; Stop 99
taatcttggtccacttcatacttct

SEQ ID NO: 404859 - DNA, 25 bp, Artificial
  probe
  misc_feature (1)..(25): SEQ ID NO: 5254; WAN024FPU; Start 78; Stop 102
tcttggtccacttcatacttcttca

SEQ ID NO: 404860 - DNA, 25 bp, Artificial
  probe
  misc_feature (1)..(25): SEQ ID NO: 5254; WAN024FPU; Start 79; Stop 103
cttggtccacttcatacttcttcaa

SEQ ID NO: 404861 - DNA, 25 bp, Artificial
  probe
  misc_feature (1)..(25): SEQ ID NO: 5254; WAN024FPU; Start 74; Stop 98
ataatcttggtccacttcatacttc

SEQ ID NO: 404862 - DNA, 25 bp, Artificial
  probe
  misc_feature (1)..(25): SEQ ID NO: 5254; WAN024FPU; Start 215; Stop 239
tgaccaagaacttgagcatagataa

SEQ ID NO: 404863 - DNA, 25 bp, Artificial
  probe
  misc_feature (1)..(25): SEQ ID NO: 5254; WAN024FPU; Start 214; Stop 238
ttgaccaagaacttgagcatagata

SEQ ID NO: 404864 - DNA, 25 bp, Artificial
  probe
  misc_feature (1)..(25): SEQ ID NO: 5254; WAN024FPU; Start 213; Stop 237
attgaccaagaacttgagcatagat

SEQ ID NO: 404865 - DNA, 25 bp, Artificial
  probe
  misc_feature (1)..(25): SEQ ID NO: 5254; WAN024FPU; Start 198; Stop 222
tgctatgtctaattcattgaccaag

SEQ ID NO: 404866 - DNA, 25 bp, Artificial
  probe
  misc_feature (1)..(25): SEQ ID NO: 5254; WAN024FPU; Start 196; Stop 220
cttgctatgtctaattcattgacca

SEQ ID NO: 404867 - DNA, 25 bp, Artificial
  probe
  misc_feature (1)..(25): SEQ ID NO: 5254; WAN024FPU; Start 195; Stop 219
acttgctatgtctaattcattgacc

SEQ ID NO: 404868 - DNA, 25 bp, Artificial
  probe
  misc_feature (1)..(25): SEQ ID NO: 5254; WAN024FPU; Start 216; Stop 240
gaccaagaacttgagcatagataag

SEQ ID NO: 404869 - DNA, 25 bp, Artificial
  probe
  misc_feature (1)..(25): SEQ ID NO: 5254; WAN024FPU; Start 207; Stop 231
taattcattgaccaagaacttgagc

SEQ ID NO: 404870 - DNA, 25 bp, Artificial
  probe
  misc_feature (1)..(25): SEQ ID NO: 5254; WAN024FPU; Start 199; Stop 223
gctatgtctaattcattgaccaaga

SEQ ID NO: 404871 - DNA, 25 bp, Artificial
  probe
  misc_feature (1)..(25): SEQ ID NO: 5254; WAN024FPU; Start 210; Stop 234
ttcattgaccaagaacttgagcata

SEQ ID NO: 404872 - DNA, 25 bp, Artificial
  probe
  misc_feature (1)..(25): SEQ ID NO: 5254; WAN024FPU; Start 212; Stop 236
cattgaccaagaacttgagcataga

SEQ ID NO: 404873 - DNA, 25 bp, Artificial
  probe
  misc_feature (1)..(25): SEQ ID NO: 5254; WAN024FPU; Start 73; Stop 97
aataatcttggtccacttcatactt

SEQ ID NO: 404874 - DNA, 25 bp, Artificial
  probe
  misc_feature (1)..(25): SEQ ID NO: 5254; WAN024FPU; Start 197; Stop 221
ttgctatgtctaattcattgaccaa

SEQ ID NO: 404875 - DNA, 25 bp, Artificial
  probe
  misc_feature (1)..(25): SEQ ID NO: 5254; WAN024FPU; Start 211; Stop 235
tcattgaccaagaacttgagcatag

SEQ ID NO: 404876 - DNA, 25 bp, Artificial
  probe
  misc_feature (1)..(25): SEQ ID NO: 5254; WAN024FPU; Start 203; Stop 227
tgtctaattcattgaccaagaactt

SEQ ID NO: 404877 - DNA, 25 bp, Artificial
  probe
  misc_feature (1)..(25): SEQ ID NO: 5254; WAN024FPU; Start 209; Stop 233
attcattgaccaagaacttgagcat

SEQ ID NO: 404878 - DNA, 25 bp, Artificial
  probe
  misc_feature (1)..(25): SEQ ID NO: 5254; WAN024FPU; Start 202; Stop 226
atgtctaattcattgaccaagaact

SEQ ID NO: 404879 - DNA, 25 bp, Artificial
  probe
  misc_feature (1)..(25): SEQ ID NO: 5254; WAN024FPU; Start 208; Stop 232
aattcattgaccaagaacttgagca

SEQ ID NO: 404880 - DNA, 25 bp, Artificial
  probe
  misc_feature (1)..(25): SEQ ID NO: 5254; WAN024FPU; Start 205; Stop 229
tctaattcattgaccaagaacttga

SEQ ID NO: 404881 - DNA, 25 bp, Artificial
  probe
  misc_feature (1)..(25): SEQ ID NO: 5254; WAN024FPU; Start 194; Stop 218
gacttgctatgtctaattcattgac

SEQ ID NO: 404882 - DNA, 25 bp, Artificial
  probe
  misc_feature (1)..(25): SEQ ID NO: 5254; WAN024FPU; Start 86; Stop 110
cacttcatacttcttcaaaccacaa

SEQ ID NO: 404883 - DNA, 25 bp, Artificial
  probe
  misc_feature (1)..(25): SEQ ID NO: 5254; WAN024FPU; Start 226; Stop 250
ttgagcatagataagtcccaggtaa

SEQ ID NO: 404884 - DNA, 25 bp, Artificial
  probe
  misc_feature (1)..(25): SEQ ID NO: 5254; WAN024FPU; Start 206; Stop 230
ctaattcattgaccaagaacttgag

SEQ ID NO: 404885 - DNA, 25 bp, Artificial
  probe
  misc_feature (1)..(25): SEQ ID NO: 5254; WAN024FPU; Start 94; Stop 118
acttcttcaaaccacaattcaacat

SEQ ID NO: 404886 - DNA, 25 bp, Artificial
  probe
  misc_feature (1)..(25): SEQ ID NO: 5254; WAN024FPU; Start 84; Stop 108
tccacttcatacttcttcaaaccac

SEQ ID NO: 404887 - DNA, 25 bp, Artificial
  probe
  misc_feature (1)..(25): SEQ ID NO: 5254; WAN024FPU; Start 83; Stop 107
gtccacttcatacttcttcaaacca

SEQ ID NO: 404888 - DNA, 25 bp, Artificial
  probe
  misc_feature (1)..(25): SEQ ID NO: 5254; WAN024FPU; Start 93; Stop 117
tacttcttcaaaccacaattcaaca

SEQ ID NO: 404889 - DNA, 25 bp, Artificial
  probe
  misc_feature (1)..(25): SEQ ID NO: 5255; WAN024CU2; Start 648; Stop 672
taagcacaacctaacacttgatgaa

SEQ ID NO: 404890 - DNA, 25 bp, Artificial
  probe
  misc_feature (1)..(25): SEQ ID NO: 5255; WAN024CU2; Start 647; Stop 671
ttaagcacaacctaacacttgatga

SEQ ID NO: 404891 - DNA, 25 bp, Artificial
  probe
  misc_feature (1)..(25): SEQ ID NO: 5255; WAN024CU2; Start 649; Stop 673
aagcacaacctaacacttgatgaat

SEQ ID NO: 404892 - DNA, 25 bp, Artificial
  probe
  misc_feature (1)..(25): SEQ ID NO: 5255; WAN024CU2; Start 650; Stop 674
agcacaacctaacacttgatgaatt

SEQ ID NO: 404893 - DNA, 25 bp, Artificial
  probe
  misc_feature (1)..(25): SEQ ID NO: 5255; WAN024CU2; Start 568; Stop 592
ttatcagaagtctcagatgccttga

SEQ ID NO: 404894 - DNA, 25 bp, Artificial
  probe
  misc_feature (1)..(25): SEQ ID NO: 5255; WAN024CU2; Start 254; Stop 278
ctattagtgctgaggaacagatgat

SEQ ID NO: 404895 - DNA, 25 bp, Artificial
  probe
  misc_feature (1)..(25): SEQ ID NO: 5255; WAN024CU2; Start 255; Stop 279
tattagtgctgaggaacagatgatt

SEQ ID NO: 404896 - DNA, 25 bp, Artificial
  probe
  misc_feature (1)..(25): SEQ ID NO: 5255; WAN024CU2; Start 256; Stop 280
attagtgctgaggaacagatgattc

SEQ ID NO: 404897 - DNA, 25 bp, Artificial
  probe
  misc_feature (1)..(25): SEQ ID NO: 5255; WAN024CU2; Start 292; Stop 316
aagtctgttgaatacatgagtcctc

SEQ ID NO: 404898 - DNA, 25 bp, Artificial
  probe
  misc_feature (1)..(25): SEQ ID NO: 5255; WAN024CU2; Start 296; Stop 320
ctgttgaatacatgagtcctcgtaa

SEQ ID NO: 404899 - DNA, 25 bp, Artificial
  probe
  misc_feature (1)..(25): SEQ ID NO: 5255; WAN024CU2; Start 291; Stop 315
taagtctgttgaatacatgagtcct

SEQ ID NO: 404900 - DNA, 25 bp, Artificial
  probe
  misc_feature (1)..(25): SEQ ID NO: 5255; WAN024CU2; Start 295; Stop 319
tctgttgaatacatgagtcctcgta

SEQ ID NO: 404901 - DNA, 25 bp, Artificial
  probe
  misc_feature (1)..(25): SEQ ID NO: 5255; WAN024CU2; Start 569; Stop 593
tatcagaagtctcagatgccttgac

SEQ ID NO: 404902 - DNA, 25 bp, Artificial
  probe
  misc_feature (1)..(25): SEQ ID NO: 5255; WAN024CU2; Start 253; Stop 277
cctattagtgctgaggaacagatga

SEQ ID NO: 404903 - DNA, 25 bp, Artificial
  probe
  misc_feature (1)..(25): SEQ ID NO: 5255; WAN024CU2; Start 113; Stop 137
tgattggtttgactacgatttcttg

SEQ ID NO: 404904 - DNA, 25 bp, Artificial
  probe
  misc_feature (1)..(25): SEQ ID NO: 5255; WAN024CU2; Start 117; Stop 141
tggtttgactacgatttcttggtta

SEQ ID NO: 404905 - DNA, 25 bp, Artificial
  probe
  misc_feature (1)..(25): SEQ ID NO: 5255; WAN024CU2; Start 114; Stop 138
gattggtttgactacgatttcttgg

SEQ ID NO: 404906 - DNA, 25 bp, Artificial
  probe
  misc_feature (1)..(25): SEQ ID NO: 5255; WAN024CU2; Start 290; Stop 314
ttaagtctgttgaatacatgagtcc

SEQ ID NO: 404907 - DNA, 25 bp, Artificial
  probe
  misc_feature (1)..(25): SEQ ID NO: 5255; WAN024CU2; Start 562; Stop 586
atcggtttatcagaagtctcagatg

SEQ ID NO: 404908 - DNA, 25 bp, Artificial
  probe
  misc_feature (1)..(25): SEQ ID NO: 5255; WAN024CU2; Start 118; Stop 142
ggtttgactacgatttcttggttaa

SEQ ID NO: 404909 - DNA, 25 bp, Artificial
  probe
  misc_feature (1)..(25): SEQ ID NO: 5255; WAN024CU2; Start 560; Stop 584
ctatcggtttatcagaagtctcaga

SEQ ID NO: 404910 - DNA, 25 bp, Artificial
  probe
  misc_feature (1)..(25): SEQ ID NO: 5255; WAN024CU2; Start 115; Stop 139
attggtttgactacgatttcttggt

SEQ ID NO: 404911 - DNA, 25 bp, Artificial
  probe
  misc_feature (1)..(25): SEQ ID NO: 5255; WAN024CU2; Start 559; Stop 583
gctatcggtttatcagaagtctcag

SEQ ID NO: 404912 - DNA, 25 bp, Artificial
  probe
  misc_feature (1)..(25): SEQ ID NO: 5255; WAN024CU2; Start 112; Stop 136
atgattggtttgactacgatttctt

SEQ ID NO: 404913 - DNA, 25 bp, Artificial
  probe
  misc_feature (1)..(25): SEQ ID NO: 5255; WAN024CU2; Start 282; Stop 306
tgcctttgttaagtctgttgaatac

SEQ ID NO: 404914 - DNA, 25 bp, Artificial
  probe
  misc_feature (1)..(25): SEQ ID NO: 5255; WAN024CU2; Start 281; Stop 305
gtgcctttgttaagtctgttgaata

SEQ ID NO: 404915 - DNA, 25 bp, Artificial
  probe
  misc_feature (1)..(25): SEQ ID NO: 5255; WAN024CU2; Start 116; Stop 140
ttggtttgactacgatttcttggtt

SEQ ID NO: 404916 - DNA, 25 bp, Artificial
  probe
  misc_feature (1)..(25): SEQ ID NO: 5255; WAN024CU2; Start 567; Stop 591
tttatcagaagtctcagatgccttg

SEQ ID NO: 404917 - DNA, 25 bp, Artificial
  probe
  misc_feature (1)..(25): SEQ ID NO: 5255; WAN024CU2; Start 566; Stop 590
gtttatcagaagtctcagatgcctt

SEQ ID NO: 404918 - DNA, 25 bp, Artificial
  probe
  misc_feature (1)..(25): SEQ ID NO: 5255; WAN024CU2; Start 35; Stop 59
aagctattgcaggaaccaagattat

SEQ ID NO: 404919 - DNA, 25 bp, Artificial
  probe
  misc_feature (1)..(25): SEQ ID NO: 5255; WAN024CU2; Start 288; Stop 312
tgttaagtctgttgaatacatgagt

SEQ ID NO: 404920 - DNA, 25 bp, Artificial
  probe
  misc_feature (1)..(25): SEQ ID NO: 5255; WAN024CU2; Start 646; Stop 670
tttaagcacaacctaacacttgatg

SEQ ID NO: 404921 - DNA, 25 bp, Artificial
  probe
  misc_feature (1)..(25): SEQ ID NO: 5255; WAN024CU2; Start 645; Stop 669
gtttaagcacaacctaacacttgat

SEQ ID NO: 404922 - DNA, 25 bp, Artificial
  probe
  misc_feature (1)..(25): SEQ ID NO: 5256; WAN024D3Y-5; Start 1967; Stop 1991
ctggacgcaaatactttactctgaa

SEQ ID NO: 404923 - DNA, 25 bp, Artificial
  probe
  misc_feature (1)..(25): SEQ ID NO: 5256; WAN024D3Y-5; Start 1970; Stop 1994
gacgcaaatactttactctgaacca

SEQ ID NO: 404924 - DNA, 25 bp, Artificial
  probe
  misc_feature (1)..(25): SEQ ID NO: 5256; WAN024D3Y-5; Start 1968; Stop 1992
tggacgcaaatactttactctgaac

SEQ ID NO: 404925 - DNA, 25 bp, Artificial
  probe
  misc_feature (1)..(25): SEQ ID NO: 5256; WAN024D3Y-5; Start 1444; Stop 1468
aatgatgcttggtactacgttcttg

SEQ ID NO: 404926 - DNA, 25 bp, Artificial
  probe
  misc_feature (1)..(25): SEQ ID NO: 5256; WAN024D3Y-5; Start 1622; Stop 1646
gttattcaccatcacgcctcttcaa

SEQ ID NO: 404927 - DNA, 25 bp, Artificial
  probe
  misc_feature (1)..(25): SEQ ID NO: 5256; WAN024D3Y-5; Start 1443; Stop 1467
caatgatgcttggtactacgttctt

SEQ ID NO: 404928 - DNA, 25 bp, Artificial
  probe
  misc_feature (1)..(25): SEQ ID NO: 5256; WAN024D3Y-5; Start 1969; Stop 1993
ggacgcaaatactttactctgaacc

SEQ ID NO: 404929 - DNA, 25 bp, Artificial
  probe
  misc_feature (1)..(25): SEQ ID NO: 5256; WAN024D3Y-5; Start 1971; Stop 1995
acgcaaatactttactctgaaccag

SEQ ID NO: 404930 - DNA, 25 bp, Artificial
  probe
  misc_feature (1)..(25): SEQ ID NO: 5256; WAN024D3Y-5; Start 1623; Stop 1647
ttattcaccatcacgcctcttcaaa

SEQ ID NO: 404931 - DNA, 25 bp, Artificial
  probe
  misc_feature (1)..(25): SEQ ID NO: 5256; WAN024D3Y-5; Start 1445; Stop 1469
atgatgcttggtactacgttcttgg

SEQ ID NO: 404932 - DNA, 25 bp, Artificial
  probe
  misc_feature (1)..(25): SEQ ID NO: 5256; WAN024D3Y-5; Start 1974; Stop 1998
caaatactttactctgaaccagctc

SEQ ID NO: 404933 - DNA, 25 bp, Artificial
  probe
  misc_feature (1)..(25): SEQ ID NO: 5256; WAN024D3Y-5; Start 1966; Stop 1990
gctggacgcaaatactttactctga

SEQ ID NO: 404934 - DNA, 25 bp, Artificial
  probe
  misc_feature (1)..(25): SEQ ID NO: 5256; WAN024D3Y-5; Start 1972; Stop 1996
cgcaaatactttactctgaaccagc

SEQ ID NO: 404935 - DNA, 25 bp, Artificial
  probe
  misc_feature (1)..(25): SEQ ID NO: 5256; WAN024D3Y-5; Start 1973; Stop 1997
gcaaatactttactctgaaccagct

SEQ ID NO: 404936 - DNA, 25 bp, Artificial
  probe
  misc_feature (1)..(25): SEQ ID NO: 5256; WAN024D3Y-5; Start 1624; Stop 1648
tattcaccatcacgcctcttcaaac

SEQ ID NO: 404937 - DNA, 25 bp, Artificial
  probe
  misc_feature (1)..(25): SEQ ID NO: 5256; WAN024D3Y-5; Start 1447; Stop 1471
gatgcttggtactacgttcttggac

SEQ ID NO: 404938 - DNA, 25 bp, Artificial
  probe
  misc_feature (1)..(25): SEQ ID NO: 5256; WAN024D3Y-5; Start 1291; Stop 1315
gcttttaacgacggtatctactaca

SEQ ID NO: 404939 - DNA, 25 bp, Artificial
  probe
  misc_feature (1)..(25): SEQ ID NO: 5256; WAN024D3Y-5; Start 1290; Stop 1314
ggcttttaacgacggtatctactac

SEQ ID NO: 404940 - DNA, 25 bp, Artificial
  probe
  misc_feature (1)..(25): SEQ ID NO: 5256; WAN024D3Y-5; Start 1287; Stop 1311
aatggcttttaacgacggtatctac

SEQ ID NO: 404941 - DNA, 25 bp, Artificial
  probe
  misc_feature (1)..(25): SEQ ID NO: 5256; WAN024D3Y-5; Start 1286; Stop 1310
caatggcttttaacgacggtatcta

SEQ ID NO: 404942 - DNA, 25 bp, Artificial
  probe
  misc_feature (1)..(25): SEQ ID NO: 5256; WAN024D3Y-5; Start 1289; Stop 1313
tggcttttaacgacggtatctacta

SEQ ID NO: 404943 - DNA, 25 bp, Artificial
  probe
  misc_feature (1)..(25): SEQ ID NO: 5256; WAN024D3Y-5; Start 1446; Stop 1470
tgatgcttggtactacgttcttgga

SEQ ID NO: 404944 - DNA, 25 bp, Artificial
  probe
  misc_feature (1)..(25): SEQ ID NO: 5256; WAN024D3Y-5; Start 1292; Stop 1316
cttttaacgacggtatctactacaa

SEQ ID NO: 404945 - DNA, 25 bp, Artificial
  probe
  misc_feature (1)..(25): SEQ ID NO: 5256; WAN024D3Y-5; Start 1288; Stop 1312
atggcttttaacgacggtatctact

SEQ ID NO: 404946 - DNA, 25 bp, Artificial
  probe
  misc_feature (1)..(25): SEQ ID NO: 5256; WAN024D3Y-5; Start 1293; Stop 1317
ttttaacgacggtatctactacaat

SEQ ID NO: 404947 - DNA, 25 bp, Artificial
  probe
  misc_feature (1)..(25): SEQ ID NO: 5256; WAN024D3Y-5; Start 1278; Stop 1302
tctcaaaccaatggcttttaacgac

SEQ ID NO: 404948 - DNA, 25 bp, Artificial
  probe
  misc_feature (1)..(25): SEQ ID NO: 5256; WAN024D3Y-5; Start 1277; Stop 1301
gtctcaaaccaatggcttttaacga

SEQ ID NO: 404949 - DNA, 25 bp, Artificial
  probe
  misc_feature (1)..(25): SEQ ID NO: 5256; WAN024D3Y-5; Start 1963; Stop 1987
gatgctggacgcaaatactttactc

SEQ ID NO: 404950 - DNA, 25 bp, Artificial
  probe
  misc_feature (1)..(25): SEQ ID NO: 5256; WAN024D3Y-5; Start 1964; Stop 1988
atgctggacgcaaatactttactct

SEQ ID NO: 404951 - DNA, 25 bp, Artificial
  probe
  misc_feature (1)..(25): SEQ ID NO: 5256; WAN024D3Y-5; Start 1625; Stop 1649
attcaccatcacgcctcttcaaact

SEQ ID NO: 404952 - DNA, 25 bp, Artificial
  probe
  misc_feature (1)..(25): SEQ ID NO: 5256; WAN024D3Y-5; Start 1637; Stop 1661
gcctcttcaaactcatgcgtcattt

SEQ ID NO: 404953 - DNA, 25 bp, Artificial
  probe
  misc_feature (1)..(25): SEQ ID NO: 5256; WAN024D3Y-5; Start 1279; Stop 1303
ctcaaaccaatggcttttaacgacg

SEQ ID NO: 404954 - DNA, 25 bp, Artificial
  probe
  misc_feature (1)..(25): SEQ ID NO: 5256; WAN024D3Y-5; Start 1965; Stop 1989
tgctggacgcaaatactttactctg

SEQ ID NO: 404955 - DNA, 25 bp, Artificial
  probe
  misc_feature (1)..(25): SEQ ID NO: 5257; WAN024G65; Start 89; Stop 113
atccttctagtattcatggtcatgg

SEQ ID NO: 404956 - DNA, 25 bp, Artificial
  probe
  misc_feature (1)..(25): SEQ ID NO: 5257; WAN024G65; Start 91; Stop 115
ccttctagtattcatggtcatggtc

SEQ ID NO: 404957 - DNA, 25 bp, Artificial
  probe
  misc_feature (1)..(25): SEQ ID NO: 5257; WAN024G65; Start 90; Stop 114
tccttctagtattcatggtcatggt

SEQ ID NO: 404958 - DNA, 25 bp, Artificial
  probe
  misc_feature (1)..(25): SEQ ID NO: 5257; WAN024G65; Start 92; Stop 116
cttctagtattcatggtcatggtcg

SEQ ID NO: 404959 - DNA, 25 bp, Artificial
  probe
  misc_feature (1)..(25): SEQ ID NO: 5257; WAN024G65; Start 93; Stop 117
ttctagtattcatggtcatggtcgt

SEQ ID NO: 404960 - DNA, 25 bp, Artificial
  probe
  misc_feature (1)..(25): SEQ ID NO: 5257; WAN024G65; Start 96; Stop 120
tagtattcatggtcatggtcgtcaa

SEQ ID NO: 404961 - DNA, 25 bp, Artificial
  probe
  misc_feature (1)..(25): SEQ ID NO: 5257; WAN024G65; Start 220; Stop 244
aatactaccatcattggctactgtc

SEQ ID NO: 404962 - DNA, 25 bp, Artificial
  probe
  misc_feature (1)..(25): SEQ ID NO: 5257; WAN024G65; Start 94; Stop 118
tctagtattcatggtcatggtcgtc

SEQ ID NO: 404963 - DNA, 25 bp, Artificial
  probe
  misc_feature (1)..(25): SEQ ID NO: 5257; WAN024G65; Start 221; Stop 245
atactaccatcattggctactgtct

SEQ ID NO: 404964 - DNA, 25 bp, Artificial
  probe
  misc_feature (1)..(25): SEQ ID NO: 5257; WAN024G65; Start 95; Stop 119
ctagtattcatggtcatggtcgtca

SEQ ID NO: 404965 - DNA, 25 bp, Artificial
  probe
  misc_feature (1)..(25): SEQ ID NO: 5257; WAN024G65; Start 88; Stop 112
aatccttctagtattcatggtcatg

SEQ ID NO: 404966 - DNA, 25 bp, Artificial
  probe
  misc_feature (1)..(25): SEQ ID NO: 5257; WAN024G65; Start 222; Stop 246
tactaccatcattggctactgtctt

SEQ ID NO: 404967 - DNA, 25 bp, Artificial
  probe
  misc_feature (1)..(25): SEQ ID NO: 5257; WAN024G65; Start 219; Stop 243
taatactaccatcattggctactgt

SEQ ID NO: 404968 - DNA, 25 bp, Artificial
  probe
  misc_feature (1)..(25): SEQ ID NO: 5257; WAN024G65; Start 926; Stop 950
ctggaatttcaatctctactggctc

SEQ ID NO: 404969 - DNA, 25 bp, Artificial
  probe
  misc_feature (1)..(25): SEQ ID NO: 5257; WAN024G65; Start 81; Stop 105
ccacggaaatccttctagtattcat

SEQ ID NO: 404970 - DNA, 25 bp, Artificial
  probe
  misc_feature (1)..(25): SEQ ID NO: 5257; WAN024G65; Start 901; Stop 925
ctcttactccttcggctagatttag

SEQ ID NO: 404971 - DNA, 25 bp, Artificial
  probe
  misc_feature (1)..(25): SEQ ID NO: 5257; WAN024G65; Start 218; Stop 242
ataatactaccatcattggctactg

SEQ ID NO: 404972 - DNA, 25 bp, Artificial
  probe
  misc_feature (1)..(25): SEQ ID NO: 5257; WAN024G65; Start 97; Stop 121
agtattcatggtcatggtcgtcaag

SEQ ID NO: 404973 - DNA, 25 bp, Artificial
  probe
  misc_feature (1)..(25): SEQ ID NO: 5257; WAN024G65; Start 1056; Stop 1080
aaataccgttgaagacctacaaacc

SEQ ID NO: 404974 - DNA, 25 bp, Artificial
  probe
  misc_feature (1)..(25): SEQ ID NO: 5257; WAN024G65; Start 317; Stop 341
attacttggttcaacactttgggtt

SEQ ID NO: 404975 - DNA, 25 bp, Artificial
  probe
  misc_feature (1)..(25): SEQ ID NO: 5257; WAN024G65; Start 223; Stop 247
actaccatcattggctactgtcttc

SEQ ID NO: 404976 - DNA, 25 bp, Artificial
  probe
  misc_feature (1)..(25): SEQ ID NO: 5257; WAN024G65; Start 927; Stop 951
tggaatttcaatctctactggctca

SEQ ID NO: 404977 - DNA, 25 bp, Artificial
  probe
  misc_feature (1)..(25): SEQ ID NO: 5257; WAN024G65; Start 318; Stop 342
ttacttggttcaacactttgggttt

SEQ ID NO: 404978 - DNA, 25 bp, Artificial
  probe
  misc_feature (1)..(25): SEQ ID NO: 5257; WAN024G65; Start 265; Stop 289
aaacatatcatcacaactgccatcg

SEQ ID NO: 404979 - DNA, 25 bp, Artificial
  probe
  misc_feature (1)..(25): SEQ ID NO: 5257; WAN024G65; Start 900; Stop 924
cctcttactccttcggctagattta

SEQ ID NO: 404980 - DNA, 25 bp, Artificial
  probe
  misc_feature (1)..(25): SEQ ID NO: 5257; WAN024G65; Start 84; Stop 108
cggaaatccttctagtattcatggt

SEQ ID NO: 404981 - DNA, 25 bp, Artificial
  probe
  misc_feature (1)..(25): SEQ ID NO: 5257; WAN024G65; Start 83; Stop 107
acggaaatccttctagtattcatgg

SEQ ID NO: 404982 - DNA, 25 bp, Artificial
  probe
  misc_feature (1)..(25): SEQ ID NO: 5257; WAN024G65; Start 78; Stop 102
aacccacggaaatccttctagtatt

SEQ ID NO: 404983 - DNA, 25 bp, Artificial
  probe
  misc_feature (1)..(25): SEQ ID NO: 5257; WAN024G65; Start 77; Stop 101
aaacccacggaaatccttctagtat

SEQ ID NO: 404984 - DNA, 25 bp, Artificial
  probe
  misc_feature (1)..(25): SEQ ID NO: 5257; WAN024G65; Start 316; Stop 340
gattacttggttcaacactttgggt

SEQ ID NO: 404985 - DNA, 25 bp, Artificial
  probe
  misc_feature (1)..(25): SEQ ID NO: 5257; WAN024G65; Start 898; Stop 922
gacctcttactccttcggctagatt

SEQ ID NO: 404986 - DNA, 25 bp, Artificial
  probe
  misc_feature (1)..(25): SEQ ID NO: 5257; WAN024G65; Start 82; Stop 106
cacggaaatccttctagtattcatg

SEQ ID NO: 404987 - DNA, 25 bp, Artificial
  probe
  misc_feature (1)..(25): SEQ ID NO: 5257; WAN024G65; Start 54; Stop 78
agctatgaccaaggttatgcaagaa

SEQ ID NO: 404988 - DNA, 25 bp, Artificial
  probe
  misc_feature (1)..(25): SEQ ID NO: 5258; WAN024E2U; Start 8; Stop 32
cattgagtgttaaattatttcactg

SEQ ID NO: 404989 - DNA, 25 bp, Artificial
  probe
  misc_feature (1)..(25): SEQ ID NO: 5258; WAN024E2U; Start 7; Stop 31
tcattgagtgttaaattatttcact

SEQ ID NO: 404990 - DNA, 25 bp, Artificial
  probe
  misc_feature (1)..(25): SEQ ID NO: 5259; WAN0249R9; Start 6; Stop 30
ttcctggaattgtaatagctgaacc

SEQ ID NO: 404991 - DNA, 25 bp, Artificial
  probe
  misc_feature (1)..(25): SEQ ID NO: 5259; WAN0249R9; Start 10; Stop 34
tggaattgtaatagctgaaccatct

SEQ ID NO: 404992 - DNA, 25 bp, Artificial
  probe
  misc_feature (1)..(25): SEQ ID NO: 5259; WAN0249R9; Start 9; Stop 33
ctggaattgtaatagctgaaccatc

SEQ ID NO: 404993 - DNA, 25 bp, Artificial
  probe
  misc_feature (1)..(25): SEQ ID NO: 5259; WAN0249R9; Start 8; Stop 32
cctggaattgtaatagctgaaccat

SEQ ID NO: 404994 - DNA, 25 bp, Artificial
  probe
  misc_feature (1)..(25): SEQ ID NO: 5259; WAN0249R9; Start 7; Stop 31
tcctggaattgtaatagctgaacca

SEQ ID NO: 404995 - DNA, 25 bp, Artificial
  probe
  misc_feature (1)..(25): SEQ ID NO: 5259; WAN0249R9; Start 5; Stop 29
tttcctggaattgtaatagctgaac

SEQ ID NO: 404996 - DNA, 25 bp, Artificial
  probe
  misc_feature (1)..(25): SEQ ID NO: 5259; WAN0249R9; Start 2; Stop 26
tgatttcctggaattgtaatagctg

SEQ ID NO: 404997 - DNA, 25 bp, Artificial
  probe
  misc_feature (1)..(25): SEQ ID NO: 5259; WAN0249R9; Start 196; Stop 220
gaatccatttgcatctactgaactt

SEQ ID NO: 404998 - DNA, 25 bp, Artificial
  probe
  misc_feature (1)..(25): SEQ ID NO: 5259; WAN0249R9; Start 3; Stop 27
gatttcctggaattgtaatagctga

SEQ ID NO: 404999 - DNA, 25 bp, Artificial
  probe
  misc_feature (1)..(25): SEQ ID NO: 5259; WAN0249R9; Start 197; Stop 221
aatccatttgcatctactgaacttt

SEQ ID NO: 405000 - DNA, 25 bp, Artificial
  probe
  misc_feature (1)..(25): SEQ ID NO: 5259; WAN0249R9; Start 4; Stop 28
atttcctggaattgtaatagctgaa

SEQ ID NO: 405001 - DNA, 25 bp, Artificial
  probe
  misc_feature (1)..(25): SEQ ID NO: 5259; WAN0249R9; Start 1; Stop 25
ttgatttcctggaattgtaatagct

SEQ ID NO: 405002 - DNA, 25 bp, Artificial
  probe
  misc_feature (1)..(25): SEQ ID NO: 5259; WAN0249R9; Start 195; Stop 219
cgaatccatttgcatctactgaact

SEQ ID NO: 405003 - DNA, 25 bp, Artificial
  probe
  misc_feature (1)..(25): SEQ ID NO: 5259; WAN0249R9; Start 150; Stop 174
acagaggtgtactattctagtttca

SEQ ID NO: 405004 - DNA, 25 bp, Artificial
  probe
  misc_feature (1)..(25): SEQ ID NO: 5259; WAN0249R9; Start 191; Stop 215
cttccgaatccatttgcatctactg

SEQ ID NO: 405005 - DNA, 25 bp, Artificial
  probe
  misc_feature (1)..(25): SEQ ID NO: 5259; WAN0249R9; Start 194; Stop 218
ccgaatccatttgcatctactgaac

SEQ ID NO: 405006 - DNA, 25 bp, Artificial
  probe
  misc_feature (1)..(25): SEQ ID NO: 5259; WAN0249R9; Start 193; Stop 217
tccgaatccatttgcatctactgaa

SEQ ID NO: 405007 - DNA, 25 bp, Artificial
  probe
  misc_feature (1)..(25): SEQ ID NO: 5259; WAN0249R9; Start 192; Stop 216
ttccgaatccatttgcatctactga

SEQ ID NO: 405008 - DNA, 25 bp, Artificial
  probe
  misc_feature (1)..(25): SEQ ID NO: 5259; WAN0249R9; Start 149; Stop 173
aacagaggtgtactattctagtttc

SEQ ID NO: 405009 - DNA, 25 bp, Artificial
  probe
  misc_feature (1)..(25): SEQ ID NO: 5259; WAN0249R9; Start 147; Stop 171
gaaacagaggtgtactattctagtt

SEQ ID NO: 405010 - DNA, 25 bp, Artificial
  probe
  misc_feature (1)..(25): SEQ ID NO: 5259; WAN0249R9; Start 146; Stop 170
agaaacagaggtgtactattctagt

SEQ ID NO: 405011 - DNA, 25 bp, Artificial
  probe
  misc_feature (1)..(25): SEQ ID NO: 5259; WAN0249R9; Start 93; Stop 117
taataacaggacaaatcgatcagga

SEQ ID NO: 405012 - DNA, 25 bp, Artificial
  probe
  misc_feature (1)..(25): SEQ ID NO: 5259; WAN0249R9; Start 148; Stop 172
aaacagaggtgtactattctagttt

SEQ ID NO: 405013 - DNA, 25 bp, Artificial
  probe
  misc_feature (1)..(25): SEQ ID NO: 5259; WAN0249R9; Start 94; Stop 118
aataacaggacaaatcgatcaggac

SEQ ID NO: 405014 - DNA, 25 bp, Artificial
  probe
  misc_feature (1)..(25): SEQ ID NO: 5259; WAN0249R9; Start 92; Stop 116
ataataacaggacaaatcgatcagg

SEQ ID NO: 405015 - DNA, 25 bp, Artificial
  probe
  misc_feature (1)..(25): SEQ ID NO: 5259; WAN0249R9; Start 143; Stop 167
tttagaaacagaggtgtactattct

SEQ ID NO: 405016 - DNA, 25 bp, Artificial
  probe
  misc_feature (1)..(25): SEQ ID NO: 5259; WAN0249R9; Start 190; Stop 214
gcttccgaatccatttgcatctact

SEQ ID NO: 405017 - DNA, 25 bp, Artificial
  probe
  misc_feature (1)..(25): SEQ ID NO: 5259; WAN0249R9; Start 198; Stop 222
atccatttgcatctactgaactttt

SEQ ID NO: 405018 - DNA, 25 bp, Artificial
  probe
  misc_feature (1)..(25): SEQ ID NO: 5259; WAN0249R9; Start 95; Stop 119
ataacaggacaaatcgatcaggaca

SEQ ID NO: 405019 - DNA, 25 bp, Artificial
  probe
  misc_feature (1)..(25): SEQ ID NO: 5259; WAN0249R9; Start 96; Stop 120
taacaggacaaatcgatcaggacag

SEQ ID NO: 405020 - DNA, 25 bp, Artificial
  probe
  misc_feature (1)..(25): SEQ ID NO: 5259; WAN0249R9; Start 91; Stop 115
aataataacaggacaaatcgatcag

SEQ ID NO: 405021 - DNA, 25 bp, Artificial
  probe
  misc_feature (1)..(25): SEQ ID NO: 5259; WAN0249R9; Start 90; Stop 114
aaataataacaggacaaatcgatca

SEQ ID NO: 405022 - DNA, 25 bp, Artificial
  probe
  misc_feature (1)..(25): SEQ ID NO: 5259; WAN0249R9; Start 183; Stop 207
taacatcgcttccgaatccatttgc

SEQ ID NO: 405023 - DNA, 25 bp, Artificial
  probe
  misc_feature (1)..(25): SEQ ID NO: 5260; WAN024DVZ; Start 39; Stop 63
aatactggttggtcaagaggataga

SEQ ID NO: 405024 - DNA, 25 bp, Artificial
  probe
  misc_feature (1)..(25): SEQ ID NO: 5260; WAN024DVZ; Start 40; Stop 64
atactggttggtcaagaggatagac

SEQ ID NO: 405025 - DNA, 25 bp, Artificial
  probe
  misc_feature (1)..(25): SEQ ID NO: 5260; WAN024DVZ; Start 46; Stop 70
gttggtcaagaggatagacatgatt

SEQ ID NO: 405026 - DNA, 25 bp, Artificial
  probe
  misc_feature (1)..(25): SEQ ID NO: 5260; WAN024DVZ; Start 336; Stop 360
cgataatgtagccgtaagtggtcat

SEQ ID NO: 405027 - DNA, 25 bp, Artificial
  probe
  misc_feature (1)..(25): SEQ ID NO: 5260; WAN024DVZ; Start 12; Stop 36
tagaggcaaaggtattcaaggtatc

SEQ ID NO: 405028 - DNA, 25 bp, Artificial
  probe
  misc_feature (1)..(25): SEQ ID NO: 5260; WAN024DVZ; Start 17; Stop 41
gcaaaggtattcaaggtatccaaat

SEQ ID NO: 405029 - DNA, 25 bp, Artificial
  probe
  misc_feature (1)..(25): SEQ ID NO: 5260; WAN024DVZ; Start 10; Stop 34
tttagaggcaaaggtattcaaggta

SEQ ID NO: 405030 - DNA, 25 bp, Artificial
  probe
  misc_feature (1)..(25): SEQ ID NO: 5260; WAN024DVZ; Start 38; Stop 62
aaatactggttggtcaagaggatag

SEQ ID NO: 405031 - DNA, 25 bp, Artificial
  probe
  misc_feature (1)..(25): SEQ ID NO: 5260; WAN024DVZ; Start 11; Stop 35
ttagaggcaaaggtattcaaggtat

SEQ ID NO: 405032 - DNA, 25 bp, Artificial
  probe
  misc_feature (1)..(25): SEQ ID NO: 5260; WAN024DVZ; Start 16; Stop 40
ggcaaaggtattcaaggtatccaaa

SEQ ID NO: 405033 - DNA, 25 bp, Artificial
  probe
  misc_feature (1)..(25): SEQ ID NO: 5260; WAN024DVZ; Start 359; Stop 383
atttcttctgctacttggtgttgaa

SEQ ID NO: 405034 - DNA, 25 bp, Artificial
  probe
  misc_feature (1)..(25): SEQ ID NO: 5260; WAN024DVZ; Start 337; Stop 361
gataatgtagccgtaagtggtcatt

SEQ ID NO: 405035 - DNA, 25 bp, Artificial
  probe
  misc_feature (1)..(25): SEQ ID NO: 5260; WAN024DVZ; Start 37; Stop 61
caaatactggttggtcaagaggata

SEQ ID NO: 405036 - DNA, 25 bp, Artificial
  probe
  misc_feature (1)..(25): SEQ ID NO: 5260; WAN024DVZ; Start 406; Stop 430
tttctcaaacaattcatccaaggtt

SEQ ID NO: 405037 - DNA, 25 bp, Artificial
  probe
  misc_feature (1)..(25): SEQ ID NO: 5260; WAN024DVZ; Start 45; Stop 69
ggttggtcaagaggatagacatgat

SEQ ID NO: 405038 - DNA, 25 bp, Artificial
  probe
  misc_feature (1)..(25): SEQ ID NO: 5260; WAN024DVZ; Start 41; Stop 65
tactggttggtcaagaggatagaca

SEQ ID NO: 405039 - DNA, 25 bp, Artificial
  probe
  misc_feature (1)..(25): SEQ ID NO: 5260; WAN024DVZ; Start 358; Stop 382
catttcttctgctacttggtgttga

SEQ ID NO: 405040 - DNA, 25 bp, Artificial
  probe
  misc_feature (1)..(25): SEQ ID NO: 5260; WAN024DVZ; Start 357; Stop 381
tcatttcttctgctacttggtgttg

SEQ ID NO: 405041 - DNA, 25 bp, Artificial
  probe
  misc_feature (1)..(25): SEQ ID NO: 5260; WAN024DVZ; Start 356; Stop 380
gtcatttcttctgctacttggtgtt

SEQ ID NO: 405042 - DNA, 25 bp, Artificial
  probe
  misc_feature (1)..(25): SEQ ID NO: 5260; WAN024DVZ; Start 349; Stop 373
gtaagtggtcatttcttctgctact

SEQ ID NO: 405043 - DNA, 25 bp, Artificial
  probe
  misc_feature (1)..(25): SEQ ID NO: 5260; WAN024DVZ; Start 408; Stop 432
tctcaaacaattcatccaaggttaa

SEQ ID NO: 405044 - DNA, 25 bp, Artificial
  probe
  misc_feature (1)..(25): SEQ ID NO: 5260; WAN024DVZ; Start 407; Stop 431
ttctcaaacaattcatccaaggtta

SEQ ID NO: 405045 - DNA, 25 bp, Artificial
  probe
  misc_feature (1)..(25): SEQ ID NO: 5260; WAN024DVZ; Start 360; Stop 384
tttcttctgctacttggtgttgaac

SEQ ID NO: 405046 - DNA, 25 bp, Artificial
  probe
  misc_feature (1)..(25): SEQ ID NO: 5260; WAN024DVZ; Start 15; Stop 39
aggcaaaggtattcaaggtatccaa

SEQ ID NO: 405047 - DNA, 25 bp, Artificial
  probe
  misc_feature (1)..(25): SEQ ID NO: 5260; WAN024DVZ; Start 348; Stop 372
cgtaagtggtcatttcttctgctac

SEQ ID NO: 405048 - DNA, 25 bp, Artificial
  probe
  misc_feature (1)..(25): SEQ ID NO: 5260; WAN024DVZ; Start 13; Stop 37
agaggcaaaggtattcaaggtatcc

SEQ ID NO: 405049 - DNA, 25 bp, Artificial
  probe
  misc_feature (1)..(25): SEQ ID NO: 5260; WAN024DVZ; Start 114; Stop 138
tagactctgccaatccatccacaat

SEQ ID NO: 405050 - DNA, 25 bp, Artificial
  probe
  misc_feature (1)..(25): SEQ ID NO: 5260; WAN024DVZ; Start 113; Stop 137
atagactctgccaatccatccacaa

SEQ ID NO: 405051 - DNA, 25 bp, Artificial
  probe
  misc_feature (1)..(25): SEQ ID NO: 5260; WAN024DVZ; Start 42; Stop 66
actggttggtcaagaggatagacat

SEQ ID NO: 405052 - DNA, 25 bp, Artificial
  probe
  misc_feature (1)..(25): SEQ ID NO: 5260; WAN024DVZ; Start 14; Stop 38
gaggcaaaggtattcaaggtatcca

SEQ ID NO: 405053 - DNA, 25 bp, Artificial
  probe
  misc_feature (1)..(25): SEQ ID NO: 5260; WAN024DVZ; Start 341; Stop 365
atgtagccgtaagtggtcatttctt

SEQ ID NO: 405054 - DNA, 25 bp, Artificial
  probe
  misc_feature (1)..(25): SEQ ID NO: 5260; WAN024DVZ; Start 43; Stop 67
ctggttggtcaagaggatagacatg

SEQ ID NO: 405055 - DNA, 25 bp, Artificial
  probe
  misc_feature (1)..(25): SEQ ID NO: 5260; WAN024DVZ; Start 49; Stop 73
ggtcaagaggatagacatgatttgt

SEQ ID NO: 405056 - DNA, 25 bp, Artificial
  probe
  misc_feature (1)..(25): SEQ ID NO: 5261; WAN024GL6; Start 477; Stop 501
ggctcctactgataacttacgaata

SEQ ID NO: 405057 - DNA, 25 bp, Artificial
  probe
  misc_feature (1)..(25): SEQ ID NO: 5261; WAN024GL6; Start 478; Stop 502
gctcctactgataacttacgaatac

SEQ ID NO: 405058 - DNA, 25 bp, Artificial
  probe
  misc_feature (1)..(25): SEQ ID NO: 5261; WAN024GL6; Start 476; Stop 500
aggctcctactgataacttacgaat

SEQ ID NO: 405059 - DNA, 25 bp, Artificial
  probe
  misc_feature (1)..(25): SEQ ID NO: 5261; WAN024GL6; Start 481; Stop 505
cctactgataacttacgaatactgt

SEQ ID NO: 405060 - DNA, 25 bp, Artificial
  probe
  misc_feature (1)..(25): SEQ ID NO: 5261; WAN024GL6; Start 480; Stop 504
tcctactgataacttacgaatactg

SEQ ID NO: 405061 - DNA, 25 bp, Artificial
  probe
  misc_feature (1)..(25): SEQ ID NO: 5261; WAN024GL6; Start 475; Stop 499
caggctcctactgataacttacgaa

SEQ ID NO: 405062 - DNA, 25 bp, Artificial
  probe
  misc_feature (1)..(25): SEQ ID NO: 5261; WAN024GL6; Start 479; Stop 503
ctcctactgataacttacgaatact

SEQ ID NO: 405063 - DNA, 25 bp, Artificial
  probe
  misc_feature (1)..(25): SEQ ID NO: 5261; WAN024GL6; Start 131; Stop 155
ctgtttccttgtcagacttaggttt

SEQ ID NO: 405064 - DNA, 25 bp, Artificial
  probe
  misc_feature (1)..(25): SEQ ID NO: 5261; WAN024GL6; Start 333; Stop 357
ttcattctgcttatcagcttcattg

SEQ ID NO: 405065 - DNA, 25 bp, Artificial
  probe
  misc_feature (1)..(25): SEQ ID NO: 5261; WAN024GL6; Start 332; Stop 356
cttcattctgcttatcagcttcatt

SEQ ID NO: 405066 - DNA, 25 bp, Artificial
  probe
  misc_feature (1)..(25): SEQ ID NO: 5261; WAN024GL6; Start 331; Stop 355
ccttcattctgcttatcagcttcat

SEQ ID NO: 405067 - DNA, 25 bp, Artificial
  probe
  misc_feature (1)..(25): SEQ ID NO: 5261; WAN024GL6; Start 472; Stop 496
gagcaggctcctactgataacttac

SEQ ID NO: 405068 - DNA, 25 bp, Artificial
  probe
  misc_feature (1)..(25): SEQ ID NO: 5261; WAN024GL6; Start 336; Stop 360
attctgcttatcagcttcattggtc

SEQ ID NO: 405069 - DNA, 25 bp, Artificial
  probe
  misc_feature (1)..(25): SEQ ID NO: 5261; WAN024GL6; Start 334; Stop 358
tcattctgcttatcagcttcattgg

SEQ ID NO: 405070 - DNA, 25 bp, Artificial
  probe
  misc_feature (1)..(25): SEQ ID NO: 5261; WAN024GL6; Start 373; Stop 397
tctcctgaaacaagctctgtattag

SEQ ID NO: 405071 - DNA, 25 bp, Artificial
  probe
  misc_feature (1)..(25): SEQ ID NO: 5261; WAN024GL6; Start 372; Stop 396
ctctcctgaaacaagctctgtatta

SEQ ID NO: 405072 - DNA, 25 bp, Artificial
  probe
  misc_feature (1)..(25): SEQ ID NO: 5261; WAN024GL6; Start 335; Stop 359
cattctgcttatcagcttcattggt

SEQ ID NO: 405073 - DNA, 25 bp, Artificial
  probe
  misc_feature (1)..(25): SEQ ID NO: 5261; WAN024GL6; Start 474; Stop 498
gcaggctcctactgataacttacga

SEQ ID NO: 405074 - DNA, 25 bp, Artificial
  probe
  misc_feature (1)..(25): SEQ ID NO: 5261; WAN024GL6; Start 362; Stop 386
aatgctcactctctcctgaaacaag

SEQ ID NO: 405075 - DNA, 25 bp, Artificial
  probe
  misc_feature (1)..(25): SEQ ID NO: 5261; WAN024GL6; Start 361; Stop 385
gaatgctcactctctcctgaaacaa

SEQ ID NO: 405076 - DNA, 25 bp, Artificial
  probe
  misc_feature (1)..(25): SEQ ID NO: 5261; WAN024GL6; Start 473; Stop 497
agcaggctcctactgataacttacg

SEQ ID NO: 405077 - DNA, 25 bp, Artificial
  probe
  misc_feature (1)..(25): SEQ ID NO: 5261; WAN024GL6; Start 371; Stop 395
tctctcctgaaacaagctctgtatt

SEQ ID NO: 405078 - DNA, 25 bp, Artificial
  probe
  misc_feature (1)..(25): SEQ ID NO: 5261; WAN024GL6; Start 446; Stop 470
caaataaaacagcaccaatcatcag

SEQ ID NO: 405079 - DNA, 25 bp, Artificial
  probe
  misc_feature (1)..(25): SEQ ID NO: 5261; WAN024GL6; Start 447; Stop 471
aaataaaacagcaccaatcatcagc

SEQ ID NO: 405080 - DNA, 25 bp, Artificial
  probe
  misc_feature (1)..(25): SEQ ID NO: 5261; WAN024GL6; Start 444; Stop 468
agcaaataaaacagcaccaatcatc

SEQ ID NO: 405081 - DNA, 25 bp, Artificial
  probe
  misc_feature (1)..(25): SEQ ID NO: 5261; WAN024GL6; Start 231; Stop 255
agtttcagtagttgcagcttcattg

SEQ ID NO: 405082 - DNA, 25 bp, Artificial
  probe
  misc_feature (1)..(25): SEQ ID NO: 5261; WAN024GL6; Start 230; Stop 254
cagtttcagtagttgcagcttcatt

SEQ ID NO: 405083 - DNA, 25 bp, Artificial
  probe
  misc_feature (1)..(25): SEQ ID NO: 5261; WAN024GL6; Start 482; Stop 506
ctactgataacttacgaatactgta

SEQ ID NO: 405084 - DNA, 25 bp, Artificial
  probe
  misc_feature (1)..(25): SEQ ID NO: 5261; WAN024GL6; Start 342; Stop 366
cttatcagcttcattggtcgaatgc

SEQ ID NO: 405085 - DNA, 25 bp, Artificial
  probe
  misc_feature (1)..(25): SEQ ID NO: 5261; WAN024GL6; Start 370; Stop 394
ctctctcctgaaacaagctctgtat

SEQ ID NO: 405086 - DNA, 25 bp, Artificial
  probe
  misc_feature (1)..(25): SEQ ID NO: 5261; WAN024GL6; Start 445; Stop 469
gcaaataaaacagcaccaatcatca

SEQ ID NO: 405087 - DNA, 25 bp, Artificial
  probe
  misc_feature (1)..(25): SEQ ID NO: 5261; WAN024GL6; Start 443; Stop 467
cagcaaataaaacagcaccaatcat

SEQ ID NO: 405088 - DNA, 25 bp, Artificial
  probe
  misc_feature (1)..(25): SEQ ID NO: 5261; WAN024GL6; Start 341; Stop 365
gcttatcagcttcattggtcgaatg

SEQ ID NO: 405089 - DNA, 25 bp, Artificial
  probe
  misc_feature (1)..(25): SEQ ID NO: 5262; WAN024DDA-M; Start 112; Stop 136
gtgattagttatgccttgtctccta

SEQ ID NO: 405090 - DNA, 25 bp, Artificial
  probe
  misc_feature (1)..(25): SEQ ID NO: 5262; WAN024DDA-M; Start 117; Stop 141
tagttatgccttgtctcctaattgc

SEQ ID NO: 405091 - DNA, 25 bp, Artificial
  probe
  misc_feature (1)..(25): SEQ ID NO: 5262; WAN024DDA-M; Start 111; Stop 135
agtgattagttatgccttgtctcct

SEQ ID NO: 405092 - DNA, 25 bp, Artificial
  probe
  misc_feature (1)..(25): SEQ ID NO: 5262; WAN024DDA-M; Start 110; Stop 134
gagtgattagttatgccttgtctcc

SEQ ID NO: 405093 - DNA, 25 bp, Artificial
  probe
  misc_feature (1)..(25): SEQ ID NO: 5262; WAN024DDA-M; Start 109; Stop 133
ggagtgattagttatgccttgtctc

SEQ ID NO: 405094 - DNA, 25 bp, Artificial
  probe
  misc_feature (1)..(25): SEQ ID NO: 5262; WAN024DDA-M; Start 113; Stop 137
tgattagttatgccttgtctcctaa

SEQ ID NO: 405095 - DNA, 25 bp, Artificial
  probe
  misc_feature (1)..(25): SEQ ID NO: 5262; WAN024DDA-M; Start 116; Stop 140
ttagttatgccttgtctcctaattg

SEQ ID NO: 405096 - DNA, 25 bp, Artificial
  probe
  misc_feature (1)..(25): SEQ ID NO: 5262; WAN024DDA-M; Start 108; Stop 132
aggagtgattagttatgccttgtct

SEQ ID NO: 405097 - DNA, 25 bp, Artificial
  probe
  misc_feature (1)..(25): SEQ ID NO: 5262; WAN024DDA-M; Start 99; Stop 123
tatcgggcaaggagtgattagttat

SEQ ID NO: 405098 - DNA, 25 bp, Artificial
  probe
  misc_feature (1)..(25): SEQ ID NO: 5262; WAN024DDA-M; Start 98; Stop 122
ctatcgggcaaggagtgattagtta

SEQ ID NO: 405099 - DNA, 25 bp, Artificial
  probe
  misc_feature (1)..(25): SEQ ID NO: 5262; WAN024DDA-M; Start 100; Stop 124
atcgggcaaggagtgattagttatg

SEQ ID NO: 405100 - DNA, 25 bp, Artificial
  probe
  misc_feature (1)..(25): SEQ ID NO: 5262; WAN024DDA-M; Start 66; Stop 90
aattattcgtatgatgcctaatacc

SEQ ID NO: 405101 - DNA, 25 bp, Artificial
  probe
  misc_feature (1)..(25): SEQ ID NO: 5262; WAN024DDA-M; Start 95; Stop 119
cttctatcgggcaaggagtgattag

SEQ ID NO: 405102 - DNA, 25 bp, Artificial
  probe
  misc_feature (1)..(25): SEQ ID NO: 5262; WAN024DDA-M; Start 67; Stop 91
attattcgtatgatgcctaataccc

SEQ ID NO: 405103 - DNA, 25 bp, Artificial
  probe
  misc_feature (1)..(25): SEQ ID NO: 5262; WAN024DDA-M; Start 97; Stop 121
tctatcgggcaaggagtgattagtt

SEQ ID NO: 405104 - DNA, 25 bp, Artificial
  probe
  misc_feature (1)..(25): SEQ ID NO: 5262; WAN024DDA-M; Start 96; Stop 120
ttctatcgggcaaggagtgattagt

SEQ ID NO: 405105 - DNA, 25 bp, Artificial
  probe
  misc_feature (1)..(25): SEQ ID NO: 5262; WAN024DDA-M; Start 114; Stop 138
gattagttatgccttgtctcctaat

SEQ ID NO: 405106 - DNA, 25 bp, Artificial
  probe
  misc_feature (1)..(25): SEQ ID NO: 5262; WAN024DDA-M; Start 107; Stop 131
aaggagtgattagttatgccttgtc

SEQ ID NO: 405107 - DNA, 25 bp, Artificial
  probe
  misc_feature (1)..(25): SEQ ID NO: 5262; WAN024DDA-M; Start 115; Stop 139
attagttatgccttgtctcctaatt

SEQ ID NO: 405108 - DNA, 25 bp, Artificial
  probe
  misc_feature (1)..(25): SEQ ID NO: 5262; WAN024DDA-M; Start 119; Stop 143
gttatgccttgtctcctaattgcag

SEQ ID NO: 405109 - DNA, 25 bp, Artificial
  probe
  misc_feature (1)..(25): SEQ ID NO: 5262; WAN024DDA-M; Start 65; Stop 89
gaattattcgtatgatgcctaatac

SEQ ID NO: 405110 - DNA, 25 bp, Artificial
  probe
  misc_feature (1)..(25): SEQ ID NO: 5262; WAN024DDA-M; Start 118; Stop 142
agttatgccttgtctcctaattgca

SEQ ID NO: 405111 - DNA, 25 bp, Artificial
  probe
  misc_feature (1)..(25): SEQ ID NO: 5262; WAN024DDA-M; Start 68; Stop 92
ttattcgtatgatgcctaatacccc

SEQ ID NO: 405112 - DNA, 25 bp, Artificial
  probe
  misc_feature (1)..(25): SEQ ID NO: 5262; WAN024DDA-M; Start 69; Stop 93
tattcgtatgatgcctaatacccct

SEQ ID NO: 405113 - DNA, 25 bp, Artificial
  probe
  misc_feature (1)..(25): SEQ ID NO: 5262; WAN024DDA-M; Start 78; Stop 102
gatgcctaatacccctgcttctatc

SEQ ID NO: 405114 - DNA, 25 bp, Artificial
  probe
  misc_feature (1)..(25): SEQ ID NO: 5262; WAN024DDA-M; Start 120; Stop 144
ttatgccttgtctcctaattgcagg

SEQ ID NO: 405115 - DNA, 25 bp, Artificial
  probe
  misc_feature (1)..(25): SEQ ID NO: 5262; WAN024DDA-M; Start 94; Stop 118
gcttctatcgggcaaggagtgatta

SEQ ID NO: 405116 - DNA, 25 bp, Artificial
  probe
  misc_feature (1)..(25): SEQ ID NO: 5262; WAN024DDA-M; Start 77; Stop 101
tgatgcctaatacccctgcttctat

SEQ ID NO: 405117 - DNA, 25 bp, Artificial
  probe
  misc_feature (1)..(25): SEQ ID NO: 5262; WAN024DDA-M; Start 76; Stop 100
atgatgcctaatacccctgcttcta

SEQ ID NO: 405118 - DNA, 25 bp, Artificial
  probe
  misc_feature (1)..(25): SEQ ID NO: 5262; WAN024DDA-M; Start 75; Stop 99
tatgatgcctaatacccctgcttct

SEQ ID NO: 405119 - DNA, 25 bp, Artificial
  probe
  misc_feature (1)..(25): SEQ ID NO: 5262; WAN024DDA-M; Start 70; Stop 94
attcgtatgatgcctaatacccctg

SEQ ID NO: 405120 - DNA, 25 bp, Artificial
  probe
  misc_feature (1)..(25): SEQ ID NO: 5262; WAN024DDA-M; Start 74; Stop 98
gtatgatgcctaatacccctgcttc

SEQ ID NO: 405121 - DNA, 25 bp, Artificial
  probe
  misc_feature (1)..(25): SEQ ID NO: 5262; WAN024DDA-M; Start 79; Stop 103
atgcctaatacccctgcttctatcg

SEQ ID NO: 405122 - DNA, 25 bp, Artificial
  probe
  misc_feature (1)..(25): SEQ ID NO: 5263; WAN024FKW; Start 101; Stop 125
cacataaatcgcaagaaatagggaa

SEQ ID NO: 405123 - DNA, 25 bp, Artificial
  probe
  misc_feature (1)..(25): SEQ ID NO: 5263; WAN024FKW; Start 100; Stop 124
tcacataaatcgcaagaaataggga

SEQ ID NO: 405124 - DNA, 25 bp, Artificial
  probe
  misc_feature (1)..(25): SEQ ID NO: 5263; WAN024FKW; Start 99; Stop 123
atcacataaatcgcaagaaataggg

SEQ ID NO: 405125 - DNA, 25 bp, Artificial
  probe
  misc_feature (1)..(25): SEQ ID NO: 5263; WAN024FKW; Start 94; Stop 118
aaggaatcacataaatcgcaagaaa

SEQ ID NO: 405126 - DNA, 25 bp, Artificial
  probe
  misc_feature (1)..(25): SEQ ID NO: 5263; WAN024FKW; Start 95; Stop 119
aggaatcacataaatcgcaagaaat

SEQ ID NO: 405127 - DNA, 25 bp, Artificial
  probe
  misc_feature (1)..(25): SEQ ID NO: 5263; WAN024FKW; Start 107; Stop 131
aatcgcaagaaatagggaatctgat

SEQ ID NO: 405128 - DNA, 25 bp, Artificial
  probe
  misc_feature (1)..(25): SEQ ID NO: 5263; WAN024FKW; Start 102; Stop 126
acataaatcgcaagaaatagggaat

SEQ ID NO: 405129 - DNA, 25 bp, Artificial
  probe
  misc_feature (1)..(25): SEQ ID NO: 5263; WAN024FKW; Start 93; Stop 117
taaggaatcacataaatcgcaagaa

SEQ ID NO: 405130 - DNA, 25 bp, Artificial
  probe
  misc_feature (1)..(25): SEQ ID NO: 5263; WAN024FKW; Start 106; Stop 130
aaatcgcaagaaatagggaatctga

SEQ ID NO: 405131 - DNA, 25 bp, Artificial
  probe
  misc_feature (1)..(25): SEQ ID NO: 5263; WAN024FKW; Start 362; Stop 386
ttgtcaatacttaccagttccaggc

SEQ ID NO: 405132 - DNA, 25 bp, Artificial
  probe
  misc_feature (1)..(25): SEQ ID NO: 5263; WAN024FKW; Start 105; Stop 129
taaatcgcaagaaatagggaatctg

SEQ ID NO: 405133 - DNA, 25 bp, Artificial
  probe
  misc_feature (1)..(25): SEQ ID NO: 5263; WAN024FKW; Start 92; Stop 116
ataaggaatcacataaatcgcaaga

SEQ ID NO: 405134 - DNA, 25 bp, Artificial
  probe
  misc_feature (1)..(25): SEQ ID NO: 5263; WAN024FKW; Start 360; Stop 384
ctttgtcaatacttaccagttccag

SEQ ID NO: 405135 - DNA, 25 bp, Artificial
  probe
  misc_feature (1)..(25): SEQ ID NO: 5263; WAN024FKW; Start 108; Stop 132
atcgcaagaaatagggaatctgatt

SEQ ID NO: 405136 - DNA, 25 bp, Artificial
  probe
  misc_feature (1)..(25): SEQ ID NO: 5263; WAN024FKW; Start 103; Stop 127
cataaatcgcaagaaatagggaatc

SEQ ID NO: 405137 - DNA, 25 bp, Artificial
  probe
  misc_feature (1)..(25): SEQ ID NO: 5263; WAN024FKW; Start 361; Stop 385
tttgtcaatacttaccagttccagg

SEQ ID NO: 405138 - DNA, 25 bp, Artificial
  probe
  misc_feature (1)..(25): SEQ ID NO: 5263; WAN024FKW; Start 359; Stop 383
cctttgtcaatacttaccagttcca

SEQ ID NO: 405139 - DNA, 25 bp, Artificial
  probe
  misc_feature (1)..(25): SEQ ID NO: 5263; WAN024FKW; Start 356; Stop 380
ttgcctttgtcaatacttaccagtt

SEQ ID NO: 405140 - DNA, 25 bp, Artificial
  probe
  misc_feature (1)..(25): SEQ ID NO: 5263; WAN024FKW; Start 355; Stop 379
tttgcctttgtcaatacttaccagt

SEQ ID NO: 405141 - DNA, 25 bp, Artificial
  probe
  misc_feature (1)..(25): SEQ ID NO: 5263; WAN024FKW; Start 396; Stop 420
ttatcagaaacatggctacaaggaa

SEQ ID NO: 405142 - DNA, 25 bp, Artificial
  probe
  misc_feature (1)..(25): SEQ ID NO: 5263; WAN024FKW; Start 395; Stop 419
tttatcagaaacatggctacaagga

SEQ ID NO: 405143 - DNA, 25 bp, Artificial
  probe
  misc_feature (1)..(25): SEQ ID NO: 5263; WAN024FKW; Start 96; Stop 120
ggaatcacataaatcgcaagaaata

SEQ ID NO: 405144 - DNA, 25 bp, Artificial
  probe
  misc_feature (1)..(25): SEQ ID NO: 5263; WAN024FKW; Start 397; Stop 421
tatcagaaacatggctacaaggaag

SEQ ID NO: 405145 - DNA, 25 bp, Artificial
  probe
  misc_feature (1)..(25): SEQ ID NO: 5263; WAN024FKW; Start 357; Stop 381
tgcctttgtcaatacttaccagttc

SEQ ID NO: 405146 - DNA, 25 bp, Artificial
  probe
  misc_feature (1)..(25): SEQ ID NO: 5263; WAN024FKW; Start 104; Stop 128
ataaatcgcaagaaatagggaatct

SEQ ID NO: 405147 - DNA, 25 bp, Artificial
  probe
  misc_feature (1)..(25): SEQ ID NO: 5263; WAN024FKW; Start 98; Stop 122
aatcacataaatcgcaagaaatagg

SEQ ID NO: 405148 - DNA, 25 bp, Artificial
  probe
  misc_feature (1)..(25): SEQ ID NO: 5263; WAN024FKW; Start 91; Stop 115
aataaggaatcacataaatcgcaag

SEQ ID NO: 405149 - DNA, 25 bp, Artificial
  probe
  misc_feature (1)..(25): SEQ ID NO: 5263; WAN024FKW; Start 125; Stop 149
atctgattcgtgtttataaccgttc

SEQ ID NO: 405150 - DNA, 25 bp, Artificial
  probe
  misc_feature (1)..(25): SEQ ID NO: 5263; WAN024FKW; Start 364; Stop 388
gtcaatacttaccagttccaggcac

SEQ ID NO: 405151 - DNA, 25 bp, Artificial
  probe
  misc_feature (1)..(25): SEQ ID NO: 5263; WAN024FKW; Start 358; Stop 382
gcctttgtcaatacttaccagttcc

SEQ ID NO: 405152 - DNA, 25 bp, Artificial
  probe
  misc_feature (1)..(25): SEQ ID NO: 5263; WAN024FKW; Start 127; Stop 151
ctgattcgtgtttataaccgttcaa

SEQ ID NO: 405153 - DNA, 25 bp, Artificial
  probe
  misc_feature (1)..(25): SEQ ID NO: 5263; WAN024FKW; Start 124; Stop 148
aatctgattcgtgtttataaccgtt

SEQ ID NO: 405154 - DNA, 25 bp, Artificial
  probe
  misc_feature (1)..(25): SEQ ID NO: 5263; WAN024FKW; Start 90; Stop 114
aaataaggaatcacataaatcgcaa

SEQ ID NO: 405155 - DNA, 25 bp, Artificial
  probe
  misc_feature (1)..(25): SEQ ID NO: 5264; WAN024GAF; Start 206; Stop 230
acttatcatcactgtccatacgatt

SEQ ID NO: 405156 - DNA, 25 bp, Artificial
  probe
  misc_feature (1)..(25): SEQ ID NO: 5264; WAN024GAF; Start 205; Stop 229
aacttatcatcactgtccatacgat

SEQ ID NO: 405157 - DNA, 25 bp, Artificial
  probe
  misc_feature (1)..(25): SEQ ID NO: 5264; WAN024GAF; Start 204; Stop 228
aaacttatcatcactgtccatacga

SEQ ID NO: 405158 - DNA, 25 bp, Artificial
  probe
  misc_feature (1)..(25): SEQ ID NO: 5264; WAN024GAF; Start 203; Stop 227
caaacttatcatcactgtccatacg

SEQ ID NO: 405159 - DNA, 25 bp, Artificial
  probe
  misc_feature (1)..(25): SEQ ID NO: 5264; WAN024GAF; Start 202; Stop 226
gcaaacttatcatcactgtccatac

SEQ ID NO: 405160 - DNA, 25 bp, Artificial
  probe
  misc_feature (1)..(25): SEQ ID NO: 5264; WAN024GAF; Start 201; Stop 225
agcaaacttatcatcactgtccata

SEQ ID NO: 405161 - DNA, 25 bp, Artificial
  probe
  misc_feature (1)..(25): SEQ ID NO: 5264; WAN024GAF; Start 33; Stop 57
aacattgatacgagtatcttctgcc

SEQ ID NO: 405162 - DNA, 25 bp, Artificial
  probe
  misc_feature (1)..(25): SEQ ID NO: 5264; WAN024GAF; Start 83; Stop 107
cttcctctgctaaagtatctgtgat

SEQ ID NO: 405163 - DNA, 25 bp, Artificial
  probe
  misc_feature (1)..(25): SEQ ID NO: 5264; WAN024GAF; Start 81; Stop 105
ttcttcctctgctaaagtatctgtg

SEQ ID NO: 405164 - DNA, 25 bp, Artificial
  probe
  misc_feature (1)..(25): SEQ ID NO: 5264; WAN024GAF; Start 3; Stop 27
gatttctgtttcttggtctgctttg

SEQ ID NO: 405165 - DNA, 25 bp, Artificial
  probe
  misc_feature (1)..(25): SEQ ID NO: 5264; WAN024GAF; Start 80; Stop 104
tttcttcctctgctaaagtatctgt

SEQ ID NO: 405166 - DNA, 25 bp, Artificial
  probe
  misc_feature (1)..(25): SEQ ID NO: 5264; WAN024GAF; Start 77; Stop 101
cgatttcttcctctgctaaagtatc

SEQ ID NO: 405167 - DNA, 25 bp, Artificial
  probe
  misc_feature (1)..(25): SEQ ID NO: 5264; WAN024GAF; Start 82; Stop 106
tcttcctctgctaaagtatctgtga

SEQ ID NO: 405168 - DNA, 25 bp, Artificial
  probe
  misc_feature (1)..(25): SEQ ID NO: 5264; WAN024GAF; Start 7; Stop 31
tctgtttcttggtctgctttgattt

SEQ ID NO: 405169 - DNA, 25 bp, Artificial
  probe
  misc_feature (1)..(25): SEQ ID NO: 5264; WAN024GAF; Start 6; Stop 30
ttctgtttcttggtctgctttgatt

SEQ ID NO: 405170 - DNA, 25 bp, Artificial
  probe
  misc_feature (1)..(25): SEQ ID NO: 5264; WAN024GAF; Start 5; Stop 29
tttctgtttcttggtctgctttgat

SEQ ID NO: 405171 - DNA, 25 bp, Artificial
  probe
  misc_feature (1)..(25): SEQ ID NO: 5264; WAN024GAF; Start 4; Stop 28
atttctgtttcttggtctgctttga

SEQ ID NO: 405172 - DNA, 25 bp, Artificial
  probe
  misc_feature (1)..(25): SEQ ID NO: 5264; WAN024GAF; Start 2; Stop 26
tgatttctgtttcttggtctgcttt

SEQ ID NO: 405173 - DNA, 25 bp, Artificial
  probe
  misc_feature (1)..(25): SEQ ID NO: 5264; WAN024GAF; Start 1; Stop 25
ttgatttctgtttcttggtctgctt

SEQ ID NO: 405174 - DNA, 25 bp, Artificial
  probe
  misc_feature (1)..(25): SEQ ID NO: 5264; WAN024GAF; Start 35; Stop 59
cattgatacgagtatcttctgccac

SEQ ID NO: 405175 - DNA, 25 bp, Artificial
  probe
  misc_feature (1)..(25): SEQ ID NO: 5264; WAN024GAF; Start 112; Stop 136
ttaccagtaaagccaccgataaatc

SEQ ID NO: 405176 - DNA, 25 bp, Artificial
  probe
  misc_feature (1)..(25): SEQ ID NO: 5264; WAN024GAF; Start 32; Stop 56
taacattgatacgagtatcttctgc

SEQ ID NO: 405177 - DNA, 25 bp, Artificial
  probe
  misc_feature (1)..(25): SEQ ID NO: 5264; WAN024GAF; Start 34; Stop 58
acattgatacgagtatcttctgcca

SEQ ID NO: 405178 - DNA, 25 bp, Artificial
  probe
  misc_feature (1)..(25): SEQ ID NO: 5264; WAN024GAF; Start 137; Stop 161
ccgtcgctgtatttggtatattcaa

SEQ ID NO: 405179 - DNA, 25 bp, Artificial
  probe
  misc_feature (1)..(25): SEQ ID NO: 5264; WAN024GAF; Start 79; Stop 103
atttcttcctctgctaaagtatctg

SEQ ID NO: 405180 - DNA, 25 bp, Artificial
  probe
  misc_feature (1)..(25): SEQ ID NO: 5264; WAN024GAF; Start 134; Stop 158
atcccgtcgctgtatttggtatatt

SEQ ID NO: 405181 - DNA, 25 bp, Artificial
  probe
  misc_feature (1)..(25): SEQ ID NO: 5264; WAN024GAF; Start 133; Stop 157
aatcccgtcgctgtatttggtatat

SEQ ID NO: 405182 - DNA, 25 bp, Artificial
  probe
  misc_feature (1)..(25): SEQ ID NO: 5264; WAN024GAF; Start 191; Stop 215
ctttcccaccagcaaacttatcatc

SEQ ID NO: 405183 - DNA, 25 bp, Artificial
  probe
  misc_feature (1)..(25): SEQ ID NO: 5264; WAN024GAF; Start 78; Stop 102
gatttcttcctctgctaaagtatct

SEQ ID NO: 405184 - DNA, 25 bp, Artificial
  probe
  misc_feature (1)..(25): SEQ ID NO: 5264; WAN024GAF; Start 85; Stop 109
tcctctgctaaagtatctgtgataa

SEQ ID NO: 405185 - DNA, 25 bp, Artificial
  probe
  misc_feature (1)..(25): SEQ ID NO: 5264; WAN024GAF; Start 84; Stop 108
ttcctctgctaaagtatctgtgata

SEQ ID NO: 405186 - DNA, 25 bp, Artificial
  probe
  misc_feature (1)..(25): SEQ ID NO: 5264; WAN024GAF; Start 36; Stop 60
attgatacgagtatcttctgccacc

SEQ ID NO: 405187 - DNA, 25 bp, Artificial
  probe
  misc_feature (1)..(25): SEQ ID NO: 5264; WAN024GAF; Start 111; Stop 135
tttaccagtaaagccaccgataaat

SEQ ID NO: 405188 - DNA, 25 bp, Artificial
  probe
  misc_feature (1)..(25): SEQ ID NO: 5265; WAN024DYF; Start 33; Stop 57
tacctcgtgtccattgtcatttaag

SEQ ID NO: 405189 - DNA, 25 bp, Artificial
  probe
  misc_feature (1)..(25): SEQ ID NO: 5265; WAN024DYF; Start 113; Stop 137
tttccatgatttcctccttgataga

SEQ ID NO: 405190 - DNA, 25 bp, Artificial
  probe
  misc_feature (1)..(25): SEQ ID NO: 5265; WAN024DYF; Start 32; Stop 56
gtacctcgtgtccattgtcatttaa

SEQ ID NO: 405191 - DNA, 25 bp, Artificial
  probe
  misc_feature (1)..(25): SEQ ID NO: 5265; WAN024DYF; Start 46; Stop 70
ttgtcatttaagacttgtgaaaggg

SEQ ID NO: 405192 - DNA, 25 bp, Artificial
  probe
  misc_feature (1)..(25): SEQ ID NO: 5265; WAN024DYF; Start 40; Stop 64
tgtccattgtcatttaagacttgtg

SEQ ID NO: 405193 - DNA, 25 bp, Artificial
  probe
  misc_feature (1)..(25): SEQ ID NO: 5265; WAN024DYF; Start 39; Stop 63
gtgtccattgtcatttaagacttgt

SEQ ID NO: 405194 - DNA, 25 bp, Artificial
  probe
  misc_feature (1)..(25): SEQ ID NO: 5265; WAN024DYF; Start 41; Stop 65
gtccattgtcatttaagacttgtga

SEQ ID NO: 405195 - DNA, 25 bp, Artificial
  probe
  misc_feature (1)..(25): SEQ ID NO: 5265; WAN024DYF; Start 38; Stop 62
cgtgtccattgtcatttaagacttg

SEQ ID NO: 405196 - DNA, 25 bp, Artificial
  probe
  misc_feature (1)..(25): SEQ ID NO: 5265; WAN024DYF; Start 37; Stop 61
tcgtgtccattgtcatttaagactt

SEQ ID NO: 405197 - DNA, 25 bp, Artificial
  probe
  misc_feature (1)..(25): SEQ ID NO: 5265; WAN024DYF; Start 34; Stop 58
acctcgtgtccattgtcatttaaga

SEQ ID NO: 405198 - DNA, 25 bp, Artificial
  probe
  misc_feature (1)..(25): SEQ ID NO: 5265; WAN024DYF; Start 42; Stop 66
tccattgtcatttaagacttgtgaa

SEQ ID NO: 405199 - DNA, 25 bp, Artificial
  probe
  misc_feature (1)..(25): SEQ ID NO: 5265; WAN024DYF; Start 36; Stop 60
ctcgtgtccattgtcatttaagact

SEQ ID NO: 405200 - DNA, 25 bp, Artificial
  probe
  misc_feature (1)..(25): SEQ ID NO: 5265; WAN024DYF; Start 47; Stop 71
tgtcatttaagacttgtgaaagggc

SEQ ID NO: 405201 - DNA, 25 bp, Artificial
  probe
  misc_feature (1)..(25): SEQ ID NO: 5265; WAN024DYF; Start 43; Stop 67
ccattgtcatttaagacttgtgaaa

SEQ ID NO: 405202 - DNA, 25 bp, Artificial
  probe
  misc_feature (1)..(25): SEQ ID NO: 5265; WAN024DYF; Start 35; Stop 59
cctcgtgtccattgtcatttaagac

SEQ ID NO: 405203 - DNA, 25 bp, Artificial
  probe
  misc_feature (1)..(25): SEQ ID NO: 5265; WAN024DYF; Start 45; Stop 69
attgtcatttaagacttgtgaaagg

SEQ ID NO: 405204 - DNA, 25 bp, Artificial
  probe
  misc_feature (1)..(25): SEQ ID NO: 5265; WAN024DYF; Start 51; Stop 75
atttaagacttgtgaaagggcggtt

SEQ ID NO: 405205 - DNA, 25 bp, Artificial
  probe
  misc_feature (1)..(25): SEQ ID NO: 5265; WAN024DYF; Start 31; Stop 55
cgtacctcgtgtccattgtcattta

SEQ ID NO: 405206 - DNA, 25 bp, Artificial
  probe
  misc_feature (1)..(25): SEQ ID NO: 5265; WAN024DYF; Start 48; Stop 72
gtcatttaagacttgtgaaagggcg

SEQ ID NO: 405207 - DNA, 25 bp, Artificial
  probe
  misc_feature (1)..(25): SEQ ID NO: 5265; WAN024DYF; Start 44; Stop 68
cattgtcatttaagacttgtgaaag

SEQ ID NO: 405208 - DNA, 25 bp, Artificial
  probe
  misc_feature (1)..(25): SEQ ID NO: 5265; WAN024DYF; Start 52; Stop 76
tttaagacttgtgaaagggcggttc

SEQ ID NO: 405209 - DNA, 25 bp, Artificial
  probe
  misc_feature (1)..(25): SEQ ID NO: 5265; WAN024DYF; Start 49; Stop 73
tcatttaagacttgtgaaagggcgg

SEQ ID NO: 405210 - DNA, 25 bp, Artificial
  probe
  misc_feature (1)..(25): SEQ ID NO: 5265; WAN024DYF; Start 50; Stop 74
catttaagacttgtgaaagggcggt

SEQ ID NO: 405211 - DNA, 25 bp, Artificial
  probe
  misc_feature (1)..(25): SEQ ID NO: 5265; WAN024DYF; Start 112; Stop 136
ttttccatgatttcctccttgatag

SEQ ID NO: 405212 - DNA, 25 bp, Artificial
  probe
  misc_feature (1)..(25): SEQ ID NO: 5265; WAN024DYF; Start 152; Stop 176
tctatcatattctaggggattttgc

SEQ ID NO: 405213 - DNA, 25 bp, Artificial
  probe
  misc_feature (1)..(25): SEQ ID NO: 5265; WAN024DYF; Start 157; Stop 181
catattctaggggattttgcacttg

SEQ ID NO: 405214 - DNA, 25 bp, Artificial
  probe
  misc_feature (1)..(25): SEQ ID NO: 5265; WAN024DYF; Start 156; Stop 180
tcatattctaggggattttgcactt

SEQ ID NO: 405215 - DNA, 25 bp, Artificial
  probe
  misc_feature (1)..(25): SEQ ID NO: 5265; WAN024DYF; Start 155; Stop 179
atcatattctaggggattttgcact

SEQ ID NO: 405216 - DNA, 25 bp, Artificial
  probe
  misc_feature (1)..(25): SEQ ID NO: 5265; WAN024DYF; Start 158; Stop 182
atattctaggggattttgcacttgc

SEQ ID NO: 405217 - DNA, 25 bp, Artificial
  probe
  misc_feature (1)..(25): SEQ ID NO: 5265; WAN024DYF; Start 154; Stop 178
tatcatattctaggggattttgcac

SEQ ID NO: 405218 - DNA, 25 bp, Artificial
  probe
  misc_feature (1)..(25): SEQ ID NO: 5265; WAN024DYF; Start 153; Stop 177
ctatcatattctaggggattttgca

SEQ ID NO: 405219 - DNA, 25 bp, Artificial
  probe
  misc_feature (1)..(25): SEQ ID NO: 5265; WAN024DYF; Start 151; Stop 175
ttctatcatattctaggggattttg

SEQ ID NO: 405220 - DNA, 25 bp, Artificial
  probe
  misc_feature (1)..(25): SEQ ID NO: 5265; WAN024DYF; Start 28; Stop 52
atacgtacctcgtgtccattgtcat

SEQ ID NO: 405221 - DNA, 25 bp, Artificial
  probe
  misc_feature (1)..(25): SEQ ID NO: 5266; WAN0249RE; Start 89; Stop 113
agttcagcttacaagattagacagt

SEQ ID NO: 405222 - DNA, 25 bp, Artificial
  probe
  misc_feature (1)..(25): SEQ ID NO: 5266; WAN0249RE; Start 87; Stop 111
agagttcagcttacaagattagaca

SEQ ID NO: 405223 - DNA, 25 bp, Artificial
  probe
  misc_feature (1)..(25): SEQ ID NO: 5266; WAN0249RE; Start 88; Stop 112
gagttcagcttacaagattagacag

SEQ ID NO: 405224 - DNA, 25 bp, Artificial
  probe
  misc_feature (1)..(25): SEQ ID NO: 5266; WAN0249RE; Start 90; Stop 114
gttcagcttacaagattagacagtt

SEQ ID NO: 405225 - DNA, 25 bp, Artificial
  probe
  misc_feature (1)..(25): SEQ ID NO: 5266; WAN0249RE; Start 92; Stop 116
tcagcttacaagattagacagttct

SEQ ID NO: 405226 - DNA, 25 bp, Artificial
  probe
  misc_feature (1)..(25): SEQ ID NO: 5266; WAN0249RE; Start 91; Stop 115
ttcagcttacaagattagacagttc

SEQ ID NO: 405227 - DNA, 25 bp, Artificial
  probe
  misc_feature (1)..(25): SEQ ID NO: 5266; WAN0249RE; Start 330; Stop 354
aaatgacctgtttgatgaattagcc

SEQ ID NO: 405228 - DNA, 25 bp, Artificial
  probe
  misc_feature (1)..(25): SEQ ID NO: 5266; WAN0249RE; Start 167; Stop 191
gtatcaggttcaatgggtatcatct

SEQ ID NO: 405229 - DNA, 25 bp, Artificial
  probe
  misc_feature (1)..(25): SEQ ID NO: 5266; WAN0249RE; Start 166; Stop 190
tgtatcaggttcaatgggtatcatc

SEQ ID NO: 405230 - DNA, 25 bp, Artificial
  probe
  misc_feature (1)..(25): SEQ ID NO: 5266; WAN0249RE; Start 168; Stop 192
tatcaggttcaatgggtatcatctc

SEQ ID NO: 405231 - DNA, 25 bp, Artificial
  probe
  misc_feature (1)..(25): SEQ ID NO: 5266; WAN0249RE; Start 331; Stop 355
aatgacctgtttgatgaattagcca

SEQ ID NO: 405232 - DNA, 25 bp, Artificial
  probe
  misc_feature (1)..(25): SEQ ID NO: 5266; WAN0249RE; Start 332; Stop 356
atgacctgtttgatgaattagccat

SEQ ID NO: 405233 - DNA, 25 bp, Artificial
  probe
  misc_feature (1)..(25): SEQ ID NO: 5266; WAN0249RE; Start 177; Stop 201
caatgggtatcatctcagcctaaag

SEQ ID NO: 405234 - DNA, 25 bp, Artificial
  probe
  misc_feature (1)..(25): SEQ ID NO: 5266; WAN0249RE; Start 333; Stop 357
tgacctgtttgatgaattagccatt

SEQ ID NO: 405235 - DNA, 25 bp, Artificial
  probe
  misc_feature (1)..(25): SEQ ID NO: 5266; WAN0249RE; Start 176; Stop 200
tcaatgggtatcatctcagcctaaa

SEQ ID NO: 405236 - DNA, 25 bp, Artificial
  probe
  misc_feature (1)..(25): SEQ ID NO: 5266; WAN0249RE; Start 175; Stop 199
ttcaatgggtatcatctcagcctaa

SEQ ID NO: 405237 - DNA, 25 bp, Artificial
  probe
  misc_feature (1)..(25): SEQ ID NO: 5266; WAN0249RE; Start 169; Stop 193
atcaggttcaatgggtatcatctca

SEQ ID NO: 405238 - DNA, 25 bp, Artificial
  probe
  misc_feature (1)..(25): SEQ ID NO: 5266; WAN0249RE; Start 86; Stop 110
tagagttcagcttacaagattagac

SEQ ID NO: 405239 - DNA, 25 bp, Artificial
  probe
  misc_feature (1)..(25): SEQ ID NO: 5266; WAN0249RE; Start 30; Stop 54
ctatatcatcttcatccagtttcgt

SEQ ID NO: 405240 - DNA, 25 bp, Artificial
  probe
  misc_feature (1)..(25): SEQ ID NO: 5266; WAN0249RE; Start 394; Stop 418
aatcctacttacttagaatccaagg

SEQ ID NO: 405241 - DNA, 25 bp, Artificial
  probe
  misc_feature (1)..(25): SEQ ID NO: 5266; WAN0249RE; Start 33; Stop 57
tatcatcttcatccagtttcgtaaa

SEQ ID NO: 405242 - DNA, 25 bp, Artificial
  probe
  misc_feature (1)..(25): SEQ ID NO: 5266; WAN0249RE; Start 170; Stop 194
tcaggttcaatgggtatcatctcag

SEQ ID NO: 405243 - DNA, 25 bp, Artificial
  probe
  misc_feature (1)..(25): SEQ ID NO: 5266; WAN0249RE; Start 267; Stop 291
aaattgaactggaaatacagccttg

SEQ ID NO: 405244 - DNA, 25 bp, Artificial
  probe
  misc_feature (1)..(25): SEQ ID NO: 5266; WAN0249RE; Start 266; Stop 290
gaaattgaactggaaatacagcctt

SEQ ID NO: 405245 - DNA, 25 bp, Artificial
  probe
  misc_feature (1)..(25): SEQ ID NO: 5266; WAN0249RE; Start 264; Stop 288
aagaaattgaactggaaatacagcc

SEQ ID NO: 405246 - DNA, 25 bp, Artificial
  probe
  misc_feature (1)..(25): SEQ ID NO: 5266; WAN0249RE; Start 165; Stop 189
ctgtatcaggttcaatgggtatcat

SEQ ID NO: 405247 - DNA, 25 bp, Artificial
  probe
  misc_feature (1)..(25): SEQ ID NO: 5266; WAN0249RE; Start 163; Stop 187
aactgtatcaggttcaatgggtatc

SEQ ID NO: 405248 - DNA, 25 bp, Artificial
  probe
  misc_feature (1)..(25): SEQ ID NO: 5266; WAN0249RE; Start 174; Stop 198
gttcaatgggtatcatctcagccta

SEQ ID NO: 405249 - DNA, 25 bp, Artificial
  probe
  misc_feature (1)..(25): SEQ ID NO: 5266; WAN0249RE; Start 265; Stop 289
agaaattgaactggaaatacagcct

SEQ ID NO: 405250 - DNA, 25 bp, Artificial
  probe
  misc_feature (1)..(25): SEQ ID NO: 5266; WAN0249RE; Start 32; Stop 56
atatcatcttcatccagtttcgtaa

SEQ ID NO: 405251 - DNA, 25 bp, Artificial
  probe
  misc_feature (1)..(25): SEQ ID NO: 5266; WAN0249RE; Start 263; Stop 287
caagaaattgaactggaaatacagc

SEQ ID NO: 405252 - DNA, 25 bp, Artificial
  probe
  misc_feature (1)..(25): SEQ ID NO: 5266; WAN0249RE; Start 29; Stop 53
actatatcatcttcatccagtttcg

SEQ ID NO: 405253 - DNA, 25 bp, Artificial
  probe
  misc_feature (1)..(25): SEQ ID NO: 5266; WAN0249RE; Start 164; Stop 188
actgtatcaggttcaatgggtatca

SEQ ID NO: 405254 - DNA, 25 bp, Artificial
  probe
  misc_feature (1)..(25): SEQ ID NO: 5267; WAN024C68-5; Start 1142; Stop 1166
tgaccaatccttcttctcgttatta

SEQ ID NO: 405255 - DNA, 25 bp, Artificial
  probe
  misc_feature (1)..(25): SEQ ID NO: 5267; WAN024C68-5; Start 1141; Stop 1165
gtgaccaatccttcttctcgttatt

SEQ ID NO: 405256 - DNA, 25 bp, Artificial
  probe
  misc_feature (1)..(25): SEQ ID NO: 5267; WAN024C68-5; Start 1140; Stop 1164
agtgaccaatccttcttctcgttat

SEQ ID NO: 405257 - DNA, 25 bp, Artificial
  probe
  misc_feature (1)..(25): SEQ ID NO: 5267; WAN024C68-5; Start 1145; Stop 1169
ccaatccttcttctcgttattatca

SEQ ID NO: 405258 - DNA, 25 bp, Artificial
  probe
  misc_feature (1)..(25): SEQ ID NO: 5267; WAN024C68-5; Start 1144; Stop 1168
accaatccttcttctcgttattatc

SEQ ID NO: 405259 - DNA, 25 bp, Artificial
  probe
  misc_feature (1)..(25): SEQ ID NO: 5267; WAN024C68-5; Start 1143; Stop 1167
gaccaatccttcttctcgttattat

SEQ ID NO: 405260 - DNA, 25 bp, Artificial
  probe
  misc_feature (1)..(25): SEQ ID NO: 5267; WAN024C68-5; Start 1139; Stop 1163
aagtgaccaatccttcttctcgtta

SEQ ID NO: 405261 - DNA, 25 bp, Artificial
  probe
  misc_feature (1)..(25): SEQ ID NO: 5267; WAN024C68-5; Start 153; Stop 177
aagccagaaggaagttcagtatcag

SEQ ID NO: 405262 - DNA, 25 bp, Artificial
  probe
  misc_feature (1)..(25): SEQ ID NO: 5267; WAN024C68-5; Start 633; Stop 657
taaggatattgagctggtagaggta

SEQ ID NO: 405263 - DNA, 25 bp, Artificial
  probe
  misc_feature (1)..(25): SEQ ID NO: 5267; WAN024C68-5; Start 632; Stop 656
ttaaggatattgagctggtagaggt

SEQ ID NO: 405264 - DNA, 25 bp, Artificial
  probe
  misc_feature (1)..(25): SEQ ID NO: 5267; WAN024C68-5; Start 385; Stop 409
cgtatggttcctattgaagctaaga

SEQ ID NO: 405265 - DNA, 25 bp, Artificial
  probe
  misc_feature (1)..(25): SEQ ID NO: 5267; WAN024C68-5; Start 634; Stop 658
aaggatattgagctggtagaggtag

SEQ ID NO: 405266 - DNA, 25 bp, Artificial
  probe
  misc_feature (1)..(25): SEQ ID NO: 5267; WAN024C68-5; Start 156; Stop 180
ccagaaggaagttcagtatcagcaa

SEQ ID NO: 405267 - DNA, 25 bp, Artificial
  probe
  misc_feature (1)..(25): SEQ ID NO: 5267; WAN024C68-5; Start 384; Stop 408
ccgtatggttcctattgaagctaag

SEQ ID NO: 405268 - DNA, 25 bp, Artificial
  probe
  misc_feature (1)..(25): SEQ ID NO: 5267; WAN024C68-5; Start 560; Stop 584
atagcccgactttagatgttgataa

SEQ ID NO: 405269 - DNA, 25 bp, Artificial
  probe
  misc_feature (1)..(25): SEQ ID NO: 5267; WAN024C68-5; Start 936; Stop 960
catcatcgctgggaatcaatactat

SEQ ID NO: 405270 - DNA, 25 bp, Artificial
  probe
  misc_feature (1)..(25): SEQ ID NO: 5267; WAN024C68-5; Start 471; Stop 495
tatcattgaggaaagtggtaaggac

SEQ ID NO: 405271 - DNA, 25 bp, Artificial
  probe
  misc_feature (1)..(25): SEQ ID NO: 5267; WAN024C68-5; Start 470; Stop 494
gtatcattgaggaaagtggtaagga

SEQ ID NO: 405272 - DNA, 25 bp, Artificial
  probe
  misc_feature (1)..(25): SEQ ID NO: 5267; WAN024C68-5; Start 468; Stop 492
tcgtatcattgaggaaagtggtaag

SEQ ID NO: 405273 - DNA, 25 bp, Artificial
  probe
  misc_feature (1)..(25): SEQ ID NO: 5267; WAN024C68-5; Start 467; Stop 491
ttcgtatcattgaggaaagtggtaa

SEQ ID NO: 405274 - DNA, 25 bp, Artificial
  probe
  misc_feature (1)..(25): SEQ ID NO: 5267; WAN024C68-5; Start 1146; Stop 1170
caatccttcttctcgttattatcaa

SEQ ID NO: 405275 - DNA, 25 bp, Artificial
  probe
  misc_feature (1)..(25): SEQ ID NO: 5267; WAN024C68-5; Start 559; Stop 583
tatagcccgactttagatgttgata

SEQ ID NO: 405276 - DNA, 25 bp, Artificial
  probe
  misc_feature (1)..(25): SEQ ID NO: 5267; WAN024C68-5; Start 937; Stop 961
atcatcgctgggaatcaatactatg

SEQ ID NO: 405277 - DNA, 25 bp, Artificial
  probe
  misc_feature (1)..(25): SEQ ID NO: 5267; WAN024C68-5; Start 386; Stop 410
gtatggttcctattgaagctaagaa

SEQ ID NO: 405278 - DNA, 25 bp, Artificial
  probe
  misc_feature (1)..(25): SEQ ID NO: 5267; WAN024C68-5; Start 1138; Stop 1162
caagtgaccaatccttcttctcgtt

SEQ ID NO: 405279 - DNA, 25 bp, Artificial
  probe
  misc_feature (1)..(25): SEQ ID NO: 5267; WAN024C68-5; Start 1135; Stop 1159
aagcaagtgaccaatccttcttctc

SEQ ID NO: 405280 - DNA, 25 bp, Artificial
  probe
  misc_feature (1)..(25): SEQ ID NO: 5267; WAN024C68-5; Start 466; Stop 490
gttcgtatcattgaggaaagtggta

SEQ ID NO: 405281 - DNA, 25 bp, Artificial
  probe
  misc_feature (1)..(25): SEQ ID NO: 5267; WAN024C68-5; Start 158; Stop 182
agaaggaagttcagtatcagcaaag

SEQ ID NO: 405282 - DNA, 25 bp, Artificial
  probe
  misc_feature (1)..(25): SEQ ID NO: 5267; WAN024C68-5; Start 1300; Stop 1324
accttgtctctgatgaaagaatact

SEQ ID NO: 405283 - DNA, 25 bp, Artificial
  probe
  misc_feature (1)..(25): SEQ ID NO: 5267; WAN024C68-5; Start 561; Stop 585
tagcccgactttagatgttgataaa

SEQ ID NO: 405284 - DNA, 25 bp, Artificial
  probe
  misc_feature (1)..(25): SEQ ID NO: 5267; WAN024C68-5; Start 469; Stop 493
cgtatcattgaggaaagtggtaagg

SEQ ID NO: 405285 - DNA, 25 bp, Artificial
  probe
  misc_feature (1)..(25): SEQ ID NO: 5267; WAN024C68-5; Start 157; Stop 181
cagaaggaagttcagtatcagcaaa

SEQ ID NO: 405286 - DNA, 25 bp, Artificial
  probe
  misc_feature (1)..(25): SEQ ID NO: 5267; WAN024C68-5; Start 843; Stop 867
cagtaaagatggcaaggaagtgaaa

SEQ ID NO: 405287 - DNA, 25 bp, Artificial
  probe
  misc_feature (1)..(25): SEQ ID NO: 5268; WAN024FUR; Start 179; Stop 203
accgtttgttaggaggaaagtatag

SEQ ID NO: 405288 - DNA, 25 bp, Artificial
  probe
  misc_feature (1)..(25): SEQ ID NO: 5268; WAN024FUR; Start 92; Stop 116
ataaacatcataggcatctacccag

SEQ ID NO: 405289 - DNA, 25 bp, Artificial
  probe
  misc_feature (1)..(25): SEQ ID NO: 5268; WAN024FUR; Start 91; Stop 115
cataaacatcataggcatctaccca

SEQ ID NO: 405290 - DNA, 25 bp, Artificial
  probe
  misc_feature (1)..(25): SEQ ID NO: 5268; WAN024FUR; Start 182; Stop 206
gtttgttaggaggaaagtatagggt

SEQ ID NO: 405291 - DNA, 25 bp, Artificial
  probe
  misc_feature (1)..(25): SEQ ID NO: 5268; WAN024FUR; Start 181; Stop 205
cgtttgttaggaggaaagtataggg

SEQ ID NO: 405292 - DNA, 25 bp, Artificial
  probe
  misc_feature (1)..(25): SEQ ID NO: 5268; WAN024FUR; Start 180; Stop 204
ccgtttgttaggaggaaagtatagg

SEQ ID NO: 405293 - DNA, 25 bp, Artificial
  probe
  misc_feature (1)..(25): SEQ ID NO: 5268; WAN024FUR; Start 90; Stop 114
ccataaacatcataggcatctaccc

SEQ ID NO: 405294 - DNA, 25 bp, Artificial
  probe
  misc_feature (1)..(25): SEQ ID NO: 5268; WAN024FUR; Start 93; Stop 117
taaacatcataggcatctacccagt

SEQ ID NO: 405295 - DNA, 25 bp, Artificial
  probe
  misc_feature (1)..(25): SEQ ID NO: 5268; WAN024FUR; Start 178; Stop 202
aaccgtttgttaggaggaaagtata

SEQ ID NO: 405296 - DNA, 25 bp, Artificial
  probe
  misc_feature (1)..(25): SEQ ID NO: 5268; WAN024FUR; Start 183; Stop 207
tttgttaggaggaaagtatagggta

SEQ ID NO: 405297 - DNA, 25 bp, Artificial
  probe
  misc_feature (1)..(25): SEQ ID NO: 5268; WAN024FUR; Start 176; Stop 200
taaaccgtttgttaggaggaaagta

SEQ ID NO: 405298 - DNA, 25 bp, Artificial
  probe
  misc_feature (1)..(25): SEQ ID NO: 5268; WAN024FUR; Start 174; Stop 198
gataaaccgtttgttaggaggaaag

SEQ ID NO: 405299 - DNA, 25 bp, Artificial
  probe
  misc_feature (1)..(25): SEQ ID NO: 5268; WAN024FUR; Start 173; Stop 197
agataaaccgtttgttaggaggaaa

SEQ ID NO: 405300 - DNA, 25 bp, Artificial
  probe
  misc_feature (1)..(25): SEQ ID NO: 5268; WAN024FUR; Start 177; Stop 201
aaaccgtttgttaggaggaaagtat

SEQ ID NO: 405301 - DNA, 25 bp, Artificial
  probe
  misc_feature (1)..(25): SEQ ID NO: 5268; WAN024FUR; Start 175; Stop 199
ataaaccgtttgttaggaggaaagt

SEQ ID NO: 405302 - DNA, 25 bp, Artificial
  probe
  misc_feature (1)..(25): SEQ ID NO: 5268; WAN024FUR; Start 185; Stop 209
tgttaggaggaaagtatagggtacg

SEQ ID NO: 405303 - DNA, 25 bp, Artificial
  probe
  misc_feature (1)..(25): SEQ ID NO: 5268; WAN024FUR; Start 184; Stop 208
ttgttaggaggaaagtatagggtac

SEQ ID NO: 405304 - DNA, 25 bp, Artificial
  probe
  misc_feature (1)..(25): SEQ ID NO: 5268; WAN024FUR; Start 172; Stop 196
cagataaaccgtttgttaggaggaa

SEQ ID NO: 405305 - DNA, 25 bp, Artificial
  probe
  misc_feature (1)..(25): SEQ ID NO: 5268; WAN024FUR; Start 94; Stop 118
aaacatcataggcatctacccagtc

SEQ ID NO: 405306 - DNA, 25 bp, Artificial
  probe
  misc_feature (1)..(25): SEQ ID NO: 5268; WAN024FUR; Start 171; Stop 195
acagataaaccgtttgttaggagga

SEQ ID NO: 405307 - DNA, 25 bp, Artificial
  probe
  misc_feature (1)..(25): SEQ ID NO: 5268; WAN024FUR; Start 187; Stop 211
ttaggaggaaagtatagggtacgtt

SEQ ID NO: 405308 - DNA, 25 bp, Artificial
  probe
  misc_feature (1)..(25): SEQ ID NO: 5268; WAN024FUR; Start 188; Stop 212
taggaggaaagtatagggtacgttg

SEQ ID NO: 405309 - DNA, 25 bp, Artificial
  probe
  misc_feature (1)..(25): SEQ ID NO: 5268; WAN024FUR; Start 186; Stop 210
gttaggaggaaagtatagggtacgt

SEQ ID NO: 405310 - DNA, 25 bp, Artificial
  probe
  misc_feature (1)..(25): SEQ ID NO: 5268; WAN024FUR; Start 36; Stop 60
atttgagcgagcttggtttgatatt

SEQ ID NO: 405311 - DNA, 25 bp, Artificial
  probe
  misc_feature (1)..(25): SEQ ID NO: 5268; WAN024FUR; Start 194; Stop 218
gaaagtatagggtacgttggttgag

SEQ ID NO: 405312 - DNA, 25 bp, Artificial
  probe
  misc_feature (1)..(25): SEQ ID NO: 5268; WAN024FUR; Start 37; Stop 61
tttgagcgagcttggtttgatattt

SEQ ID NO: 405313 - DNA, 25 bp, Artificial
  probe
  misc_feature (1)..(25): SEQ ID NO: 5268; WAN024FUR; Start 95; Stop 119
aacatcataggcatctacccagtca

SEQ ID NO: 405314 - DNA, 25 bp, Artificial
  probe
  misc_feature (1)..(25): SEQ ID NO: 5268; WAN024FUR; Start 41; Stop 65
agcgagcttggtttgatatttgttt

SEQ ID NO: 405315 - DNA, 25 bp, Artificial
  probe
  misc_feature (1)..(25): SEQ ID NO: 5268; WAN024FUR; Start 35; Stop 59
catttgagcgagcttggtttgatat

SEQ ID NO: 405316 - DNA, 25 bp, Artificial
  probe
  misc_feature (1)..(25): SEQ ID NO: 5268; WAN024FUR; Start 191; Stop 215
gaggaaagtatagggtacgttggtt

SEQ ID NO: 405317 - DNA, 25 bp, Artificial
  probe
  misc_feature (1)..(25): SEQ ID NO: 5268; WAN024FUR; Start 40; Stop 64
gagcgagcttggtttgatatttgtt

SEQ ID NO: 405318 - DNA, 25 bp, Artificial
  probe
  misc_feature (1)..(25): SEQ ID NO: 5268; WAN024FUR; Start 38; Stop 62
ttgagcgagcttggtttgatatttg

SEQ ID NO: 405319 - DNA, 25 bp, Artificial
  probe
  misc_feature (1)..(25): SEQ ID NO: 5268; WAN024FUR; Start 195; Stop 219
aaagtatagggtacgttggttgagg

SEQ ID NO: 405320 - DNA, 25 bp, Artificial
  probe
  misc_feature (1)..(25): SEQ ID NO: 5269; WAN024GFU; Start 203; Stop 227
ccttcaagagtagagtgagtaatca

SEQ ID NO: 405321 - DNA, 25 bp, Artificial
  probe
  misc_feature (1)..(25): SEQ ID NO: 5269; WAN024GFU; Start 201; Stop 225
gtccttcaagagtagagtgagtaat

SEQ ID NO: 405322 - DNA, 25 bp, Artificial
  probe
  misc_feature (1)..(25): SEQ ID NO: 5269; WAN024GFU; Start 202; Stop 226
tccttcaagagtagagtgagtaatc

SEQ ID NO: 405323 - DNA, 25 bp, Artificial
  probe
  misc_feature (1)..(25): SEQ ID NO: 5269; WAN024GFU; Start 200; Stop 224
ggtccttcaagagtagagtgagtaa

SEQ ID NO: 405324 - DNA, 25 bp, Artificial
  probe
  misc_feature (1)..(25): SEQ ID NO: 5269; WAN024GFU; Start 197; Stop 221
attggtccttcaagagtagagtgag

SEQ ID NO: 405325 - DNA, 25 bp, Artificial
  probe
  misc_feature (1)..(25): SEQ ID NO: 5269; WAN024GFU; Start 196; Stop 220
gattggtccttcaagagtagagtga

SEQ ID NO: 405326 - DNA, 25 bp, Artificial
  probe
  misc_feature (1)..(25): SEQ ID NO: 5269; WAN024GFU; Start 151; Stop 175
atcaccagttgtagtgttaccaatt

SEQ ID NO: 405327 - DNA, 25 bp, Artificial
  probe
  misc_feature (1)..(25): SEQ ID NO: 5269; WAN024GFU; Start 150; Stop 174
tatcaccagttgtagtgttaccaat

SEQ ID NO: 405328 - DNA, 25 bp, Artificial
  probe
  misc_feature (1)..(25): SEQ ID NO: 5269; WAN024GFU; Start 149; Stop 173
atatcaccagttgtagtgttaccaa

SEQ ID NO: 405329 - DNA, 25 bp, Artificial
  probe
  misc_feature (1)..(25): SEQ ID NO: 5269; WAN024GFU; Start 199; Stop 223
tggtccttcaagagtagagtgagta

SEQ ID NO: 405330 - DNA, 25 bp, Artificial
  probe
  misc_feature (1)..(25): SEQ ID NO: 5269; WAN024GFU; Start 204; Stop 228
cttcaagagtagagtgagtaatcaa

SEQ ID NO: 405331 - DNA, 25 bp, Artificial
  probe
  misc_feature (1)..(25): SEQ ID NO: 5269; WAN024GFU; Start 90; Stop 114
accaagcaaagataccgatatagaa

SEQ ID NO: 405332 - DNA, 25 bp, Artificial
  probe
  misc_feature (1)..(25): SEQ ID NO: 5269; WAN024GFU; Start 198; Stop 222
ttggtccttcaagagtagagtgagt

SEQ ID NO: 405333 - DNA, 25 bp, Artificial
  probe
  misc_feature (1)..(25): SEQ ID NO: 5269; WAN024GFU; Start 195; Stop 219
cgattggtccttcaagagtagagtg

SEQ ID NO: 405334 - DNA, 25 bp, Artificial
  probe
  misc_feature (1)..(25): SEQ ID NO: 5269; WAN024GFU; Start 89; Stop 113
taccaagcaaagataccgatataga

SEQ ID NO: 405335 - DNA, 25 bp, Artificial
  probe
  misc_feature (1)..(25): SEQ ID NO: 5269; WAN024GFU; Start 91; Stop 115
ccaagcaaagataccgatatagaat

SEQ ID NO: 405336 - DNA, 25 bp, Artificial
  probe
  misc_feature (1)..(25): SEQ ID NO: 5269; WAN024GFU; Start 205; Stop 229
ttcaagagtagagtgagtaatcaat

SEQ ID NO: 405337 - DNA, 25 bp, Artificial
  probe
  misc_feature (1)..(25): SEQ ID NO: 5269; WAN024GFU; Start 206; Stop 230
tcaagagtagagtgagtaatcaatt

SEQ ID NO: 405338 - DNA, 25 bp, Artificial
  probe
  misc_feature (1)..(25): SEQ ID NO: 5269; WAN024GFU; Start 86; Stop 110
ctgtaccaagcaaagataccgatat

SEQ ID NO: 405339 - DNA, 25 bp, Artificial
  probe
  misc_feature (1)..(25): SEQ ID NO: 5269; WAN024GFU; Start 87; Stop 111
tgtaccaagcaaagataccgatata

SEQ ID NO: 405340 - DNA, 25 bp, Artificial
  probe
  misc_feature (1)..(25): SEQ ID NO: 5269; WAN024GFU; Start 193; Stop 217
ttcgattggtccttcaagagtagag

SEQ ID NO: 405341 - DNA, 25 bp, Artificial
  probe
  misc_feature (1)..(25): SEQ ID NO: 5269; WAN024GFU; Start 88; Stop 112
gtaccaagcaaagataccgatatag

SEQ ID NO: 405342 - DNA, 25 bp, Artificial
  probe
  misc_feature (1)..(25): SEQ ID NO: 5269; WAN024GFU; Start 148; Stop 172
gatatcaccagttgtagtgttacca

SEQ ID NO: 405343 - DNA, 25 bp, Artificial
  probe
  misc_feature (1)..(25): SEQ ID NO: 5269; WAN024GFU; Start 85; Stop 109
tctgtaccaagcaaagataccgata

SEQ ID NO: 405344 - DNA, 25 bp, Artificial
  probe
  misc_feature (1)..(25): SEQ ID NO: 5269; WAN024GFU; Start 99; Stop 123
agataccgatatagaatacaaggaa

SEQ ID NO: 405345 - DNA, 25 bp, Artificial
  probe
  misc_feature (1)..(25): SEQ ID NO: 5269; WAN024GFU; Start 98; Stop 122
aagataccgatatagaatacaagga

SEQ ID NO: 405346 - DNA, 25 bp, Artificial
  probe
  misc_feature (1)..(25): SEQ ID NO: 5269; WAN024GFU; Start 260; Stop 284
cctacacctttagcaagttctgttg

SEQ ID NO: 405347 - DNA, 25 bp, Artificial
  probe
  misc_feature (1)..(25): SEQ ID NO: 5269; WAN024GFU; Start 100; Stop 124
gataccgatatagaatacaaggaag

SEQ ID NO: 405348 - DNA, 25 bp, Artificial
  probe
  misc_feature (1)..(25): SEQ ID NO: 5269; WAN024GFU; Start 194; Stop 218
tcgattggtccttcaagagtagagt

SEQ ID NO: 405349 - DNA, 25 bp, Artificial
  probe
  misc_feature (1)..(25): SEQ ID NO: 5269; WAN024GFU; Start 157; Stop 181
agttgtagtgttaccaattgtccaa

SEQ ID NO: 405350 - DNA, 25 bp, Artificial
  probe
  misc_feature (1)..(25): SEQ ID NO: 5269; WAN024GFU; Start 259; Stop 283
acctacacctttagcaagttctgtt

SEQ ID NO: 405351 - DNA, 25 bp, Artificial
  probe
  misc_feature (1)..(25): SEQ ID NO: 5269; WAN024GFU; Start 84; Stop 108
ttctgtaccaagcaaagataccgat

SEQ ID NO: 405352 - DNA, 25 bp, Artificial
  probe
  misc_feature (1)..(25): SEQ ID NO: 5269; WAN024GFU; Start 167; Stop 191
ttaccaattgtccaaccaagaagtt

SEQ ID NO: 405353 - DNA, 25 bp, Artificial
  probe
  misc_feature (1)..(25): SEQ ID NO: 5270; WAN024EVR; Start 30; Stop 54
gacttatggtcagatgctgatactt

SEQ ID NO: 405354 - DNA, 25 bp, Artificial
  probe
  misc_feature (1)..(25): SEQ ID NO: 5270; WAN024EVR; Start 29; Stop 53
tgacttatggtcagatgctgatact

SEQ ID NO: 405355 - DNA, 25 bp, Artificial
  probe
  misc_feature (1)..(25): SEQ ID NO: 5270; WAN024EVR; Start 28; Stop 52
gtgacttatggtcagatgctgatac

SEQ ID NO: 405356 - DNA, 25 bp, Artificial
  probe
  misc_feature (1)..(25): SEQ ID NO: 5270; WAN024EVR; Start 27; Stop 51
tgtgacttatggtcagatgctgata

SEQ ID NO: 405357 - DNA, 25 bp, Artificial
  probe
  misc_feature (1)..(25): SEQ ID NO: 5270; WAN024EVR; Start 152; Stop 176
ccaacttgtcctccacttctgtttg

SEQ ID NO: 405358 - DNA, 25 bp, Artificial
  probe
  misc_feature (1)..(25): SEQ ID NO: 5270; WAN024EVR; Start 31; Stop 55
acttatggtcagatgctgatacttt

SEQ ID NO: 405359 - DNA, 25 bp, Artificial
  probe
  misc_feature (1)..(25): SEQ ID NO: 5270; WAN024EVR; Start 26; Stop 50
ctgtgacttatggtcagatgctgat

SEQ ID NO: 405360 - DNA, 25 bp, Artificial
  probe
  misc_feature (1)..(25): SEQ ID NO: 5270; WAN024EVR; Start 21; Stop 45
ctccactgtgacttatggtcagatg

SEQ ID NO: 405361 - DNA, 25 bp, Artificial
  probe
  misc_feature (1)..(25): SEQ ID NO: 5270; WAN024EVR; Start 153; Stop 177
caacttgtcctccacttctgtttgc

SEQ ID NO: 405362 - DNA, 25 bp, Artificial
  probe
  misc_feature (1)..(25): SEQ ID NO: 5270; WAN024EVR; Start 20; Stop 44
actccactgtgacttatggtcagat

SEQ ID NO: 405363 - DNA, 25 bp, Artificial
  probe
  misc_feature (1)..(25): SEQ ID NO: 5270; WAN024EVR; Start 71; Stop 95
tatcaaattttaactggcctgcttt

SEQ ID NO: 405364 - DNA, 25 bp, Artificial
  probe
  misc_feature (1)..(25): SEQ ID NO: 5270; WAN024EVR; Start 66; Stop 90
tgcaatatcaaattttaactggcct

SEQ ID NO: 405365 - DNA, 25 bp, Artificial
  probe
  misc_feature (1)..(25): SEQ ID NO: 5270; WAN024EVR; Start 70; Stop 94
atatcaaattttaactggcctgctt

SEQ ID NO: 405366 - DNA, 25 bp, Artificial
  probe
  misc_feature (1)..(25): SEQ ID NO: 5270; WAN024EVR; Start 69; Stop 93
aatatcaaattttaactggcctgct

SEQ ID NO: 405367 - DNA, 25 bp, Artificial
  probe
  misc_feature (1)..(25): SEQ ID NO: 5270; WAN024EVR; Start 68; Stop 92
caatatcaaattttaactggcctgc

SEQ ID NO: 405368 - DNA, 25 bp, Artificial
  probe
  misc_feature (1)..(25): SEQ ID NO: 5270; WAN024EVR; Start 67; Stop 91
gcaatatcaaattttaactggcctg

SEQ ID NO: 405369 - DNA, 25 bp, Artificial
  probe
  misc_feature (1)..(25): SEQ ID NO: 5270; WAN024EVR; Start 44; Stop 68
tgctgatacttttattcttttatgc

SEQ ID NO: 405370 - DNA, 25 bp, Artificial
  probe
  misc_feature (1)..(25): SEQ ID NO: 5270; WAN024EVR; Start 17; Stop 41
ttcactccactgtgacttatggtca

SEQ ID NO: 405371 - DNA, 25 bp, Artificial
  probe
  misc_feature (1)..(25): SEQ ID NO: 5270; WAN024EVR; Start 65; Stop 89
atgcaatatcaaattttaactggcc

SEQ ID NO: 405372 - DNA, 25 bp, Artificial
  probe
  misc_feature (1)..(25): SEQ ID NO: 5270; WAN024EVR; Start 87; Stop 111
gcctgctttgacaccaatcttaagt

SEQ ID NO: 405373 - DNA, 25 bp, Artificial
  probe
  misc_feature (1)..(25): SEQ ID NO: 5270; WAN024EVR; Start 25; Stop 49
actgtgacttatggtcagatgctga

SEQ ID NO: 405374 - DNA, 25 bp, Artificial
  probe
  misc_feature (1)..(25): SEQ ID NO: 5270; WAN024EVR; Start 24; Stop 48
cactgtgacttatggtcagatgctg

SEQ ID NO: 405375 - DNA, 25 bp, Artificial
  probe
  misc_feature (1)..(25): SEQ ID NO: 5270; WAN024EVR; Start 16; Stop 40
tttcactccactgtgacttatggtc

SEQ ID NO: 405376 - DNA, 25 bp, Artificial
  probe
  misc_feature (1)..(25): SEQ ID NO: 5270; WAN024EVR; Start 19; Stop 43
cactccactgtgacttatggtcaga

SEQ ID NO: 405377 - DNA, 25 bp, Artificial
  probe
  misc_feature (1)..(25): SEQ ID NO: 5270; WAN024EVR; Start 18; Stop 42
tcactccactgtgacttatggtcag

SEQ ID NO: 405378 - DNA, 25 bp, Artificial
  probe
  misc_feature (1)..(25): SEQ ID NO: 5270; WAN024EVR; Start 75; Stop 99
aaattttaactggcctgctttgaca

SEQ ID NO: 405379 - DNA, 25 bp, Artificial
  probe
  misc_feature (1)..(25): SEQ ID NO: 5270; WAN024EVR; Start 64; Stop 88
tatgcaatatcaaattttaactggc

SEQ ID NO: 405380 - DNA, 25 bp, Artificial
  probe
  misc_feature (1)..(25): SEQ ID NO: 5270; WAN024EVR; Start 36; Stop 60
tggtcagatgctgatacttttattc

SEQ ID NO: 405381 - DNA, 25 bp, Artificial
  probe
  misc_feature (1)..(25): SEQ ID NO: 5270; WAN024EVR; Start 32; Stop 56
cttatggtcagatgctgatactttt

SEQ ID NO: 405382 - DNA, 25 bp, Artificial
  probe
  misc_feature (1)..(25): SEQ ID NO: 5270; WAN024EVR; Start 154; Stop 178
aacttgtcctccacttctgtttgca

SEQ ID NO: 405383 - DNA, 25 bp, Artificial
  probe
  misc_feature (1)..(25): SEQ ID NO: 5270; WAN024EVR; Start 76; Stop 100
aattttaactggcctgctttgacac

SEQ ID NO: 405384 - DNA, 25 bp, Artificial
  probe
  misc_feature (1)..(25): SEQ ID NO: 5270; WAN024EVR; Start 37; Stop 61
ggtcagatgctgatacttttattct

SEQ ID NO: 405385 - DNA, 25 bp, Artificial
  probe
  misc_feature (1)..(25): SEQ ID NO: 5270; WAN024EVR; Start 23; Stop 47
ccactgtgacttatggtcagatgct

SEQ ID NO: 405386 - DNA, 25 bp, Artificial
  probe
  misc_feature (1)..(25): SEQ ID NO: 5271; WAN024FJG; Start 213; Stop 237
atttagtcaatcccaatttcagcac

SEQ ID NO: 405387 - DNA, 25 bp, Artificial
  probe
  misc_feature (1)..(25): SEQ ID NO: 5271; WAN024FJG; Start 147; Stop 171
tctccatcggctacaatattataag

SEQ ID NO: 405388 - DNA, 25 bp, Artificial
  probe
  misc_feature (1)..(25): SEQ ID NO: 5271; WAN024FJG; Start 146; Stop 170
ttctccatcggctacaatattataa

SEQ ID NO: 405389 - DNA, 25 bp, Artificial
  probe
  misc_feature (1)..(25): SEQ ID NO: 5271; WAN024FJG; Start 214; Stop 238
tttagtcaatcccaatttcagcacg

SEQ ID NO: 405390 - DNA, 25 bp, Artificial
  probe
  misc_feature (1)..(25): SEQ ID NO: 5271; WAN024FJG; Start 143; Stop 167
tctttctccatcggctacaatatta

SEQ ID NO: 405391 - DNA, 25 bp, Artificial
  probe
  misc_feature (1)..(25): SEQ ID NO: 5271; WAN024FJG; Start 142; Stop 166
gtctttctccatcggctacaatatt

SEQ ID NO: 405392 - DNA, 25 bp, Artificial
  probe
  misc_feature (1)..(25): SEQ ID NO: 5271; WAN024FJG; Start 148; Stop 172
ctccatcggctacaatattataagc

SEQ ID NO: 405393 - DNA, 25 bp, Artificial
  probe
  misc_feature (1)..(25): SEQ ID NO: 5271; WAN024FJG; Start 141; Stop 165
tgtctttctccatcggctacaatat

SEQ ID NO: 405394 - DNA, 25 bp, Artificial
  probe
  misc_feature (1)..(25): SEQ ID NO: 5271; WAN024FJG; Start 140; Stop 164
atgtctttctccatcggctacaata

SEQ ID NO: 405395 - DNA, 25 bp, Artificial
  probe
  misc_feature (1)..(25): SEQ ID NO: 5271; WAN024FJG; Start 149; Stop 173
tccatcggctacaatattataagct

SEQ ID NO: 405396 - DNA, 25 bp, Artificial
  probe
  misc_feature (1)..(25): SEQ ID NO: 5271; WAN024FJG; Start 144; Stop 168
ctttctccatcggctacaatattat

SEQ ID NO: 405397 - DNA, 25 bp, Artificial
  probe
  misc_feature (1)..(25): SEQ ID NO: 5271; WAN024FJG; Start 212; Stop 236
gatttagtcaatcccaatttcagca

SEQ ID NO: 405398 - DNA, 25 bp, Artificial
  probe
  misc_feature (1)..(25): SEQ ID NO: 5271; WAN024FJG; Start 226; Stop 250
caatttcagcacgaactacatctgt

SEQ ID NO: 405399 - DNA, 25 bp, Artificial
  probe
  misc_feature (1)..(25): SEQ ID NO: 5271; WAN024FJG; Start 215; Stop 239
ttagtcaatcccaatttcagcacga

SEQ ID NO: 405400 - DNA, 25 bp, Artificial
  probe
  misc_feature (1)..(25): SEQ ID NO: 5271; WAN024FJG; Start 220; Stop 244
caatcccaatttcagcacgaactac

SEQ ID NO: 405401 - DNA, 25 bp, Artificial
  probe
  misc_feature (1)..(25): SEQ ID NO: 5271; WAN024FJG; Start 227; Stop 251
aatttcagcacgaactacatctgtg

SEQ ID NO: 405402 - DNA, 25 bp, Artificial
  probe
  misc_feature (1)..(25): SEQ ID NO: 5271; WAN024FJG; Start 222; Stop 246
atcccaatttcagcacgaactacat

SEQ ID NO: 405403 - DNA, 25 bp, Artificial
  probe
  misc_feature (1)..(25): SEQ ID NO: 5271; WAN024FJG; Start 219; Stop 243
tcaatcccaatttcagcacgaacta

SEQ ID NO: 405404 - DNA, 25 bp, Artificial
  probe
  misc_feature (1)..(25): SEQ ID NO: 5271; WAN024FJG; Start 216; Stop 240
tagtcaatcccaatttcagcacgaa

SEQ ID NO: 405405 - DNA, 25 bp, Artificial
  probe
  misc_feature (1)..(25): SEQ ID NO: 5271; WAN024FJG; Start 121; Stop 145
ttgttcacgtttaagattcatgtct

SEQ ID NO: 405406 - DNA, 25 bp, Artificial
  probe
  misc_feature (1)..(25): SEQ ID NO: 5271; WAN024FJG; Start 120; Stop 144
cttgttcacgtttaagattcatgtc

SEQ ID NO: 405407 - DNA, 25 bp, Artificial
  probe
  misc_feature (1)..(25): SEQ ID NO: 5271; WAN024FJG; Start 150; Stop 174
ccatcggctacaatattataagcta

SEQ ID NO: 405408 - DNA, 25 bp, Artificial
  probe
  misc_feature (1)..(25): SEQ ID NO: 5271; WAN024FJG; Start 221; Stop 245
aatcccaatttcagcacgaactaca

SEQ ID NO: 405409 - DNA, 25 bp, Artificial
  probe
  misc_feature (1)..(25): SEQ ID NO: 5271; WAN024FJG; Start 135; Stop 159
gattcatgtctttctccatcggcta

SEQ ID NO: 405410 - DNA, 25 bp, Artificial
  probe
  misc_feature (1)..(25): SEQ ID NO: 5271; WAN024FJG; Start 225; Stop 249
ccaatttcagcacgaactacatctg

SEQ ID NO: 405411 - DNA, 25 bp, Artificial
  probe
  misc_feature (1)..(25): SEQ ID NO: 5271; WAN024FJG; Start 32; Stop 56
aaattcacatccaccttggtttcag

SEQ ID NO: 405412 - DNA, 25 bp, Artificial
  probe
  misc_feature (1)..(25): SEQ ID NO: 5271; WAN024FJG; Start 228; Stop 252
atttcagcacgaactacatctgtga

SEQ ID NO: 405413 - DNA, 25 bp, Artificial
  probe
  misc_feature (1)..(25): SEQ ID NO: 5271; WAN024FJG; Start 136; Stop 160
attcatgtctttctccatcggctac

SEQ ID NO: 405414 - DNA, 25 bp, Artificial
  probe
  misc_feature (1)..(25): SEQ ID NO: 5271; WAN024FJG; Start 59; Stop 83
gctccattttcattttcccattcaa

SEQ ID NO: 405415 - DNA, 25 bp, Artificial
  probe
  misc_feature (1)..(25): SEQ ID NO: 5271; WAN024FJG; Start 145; Stop 169
tttctccatcggctacaatattata

SEQ ID NO: 405416 - DNA, 25 bp, Artificial
  probe
  misc_feature (1)..(25): SEQ ID NO: 5271; WAN024FJG; Start 132; Stop 156
taagattcatgtctttctccatcgg

SEQ ID NO: 405417 - DNA, 25 bp, Artificial
  probe
  misc_feature (1)..(25): SEQ ID NO: 5271; WAN024FJG; Start 128; Stop 152
cgtttaagattcatgtctttctcca

SEQ ID NO: 405418 - DNA, 25 bp, Artificial
  probe
  misc_feature (1)..(25): SEQ ID NO: 5271; WAN024FJG; Start 224; Stop 248
cccaatttcagcacgaactacatct

SEQ ID NO: 405419 - DNA, 25 bp, Artificial
  probe
  misc_feature (1)..(25): SEQ ID NO: 5272; WAN024DNM; Start 58; Stop 82
tatgaaaagaatcattcatgcttgg

SEQ ID NO: 405420 - DNA, 25 bp, Artificial
  probe
  misc_feature (1)..(25): SEQ ID NO: 5272; WAN024DNM; Start 57; Stop 81
ttatgaaaagaatcattcatgcttg

SEQ ID NO: 405421 - DNA, 25 bp, Artificial
  probe
  misc_feature (1)..(25): SEQ ID NO: 5272; WAN024DNM; Start 56; Stop 80
attatgaaaagaatcattcatgctt

SEQ ID NO: 405422 - DNA, 25 bp, Artificial
  probe
  misc_feature (1)..(25): SEQ ID NO: 5272; WAN024DNM; Start 55; Stop 79
tattatgaaaagaatcattcatgct

SEQ ID NO: 405423 - DNA, 25 bp, Artificial
  probe
  misc_feature (1)..(25): SEQ ID NO: 5273; WAN024C6G; Start 334; Stop 358
gaaactatcctcctcccagaagaaa

SEQ ID NO: 405424 - DNA, 25 bp, Artificial
  probe
  misc_feature (1)..(25): SEQ ID NO: 5273; WAN024C6G; Start 317; Stop 341
tagacatggacggtagagaaactat

SEQ ID NO: 405425 - DNA, 25 bp, Artificial
  probe
  misc_feature (1)..(25): SEQ ID NO: 5273; WAN024C6G; Start 316; Stop 340
ttagacatggacggtagagaaacta

SEQ ID NO: 405426 - DNA, 25 bp, Artificial
  probe
  misc_feature (1)..(25): SEQ ID NO: 5273; WAN024C6G; Start 333; Stop 357
agaaactatcctcctcccagaagaa

SEQ ID NO: 405427 - DNA, 25 bp, Artificial
  probe
  misc_feature (1)..(25): SEQ ID NO: 5273; WAN024C6G; Start 330; Stop 354
tagagaaactatcctcctcccagaa

SEQ ID NO: 405428 - DNA, 25 bp, Artificial
  probe
  misc_feature (1)..(25): SEQ ID NO: 5273; WAN024C6G; Start 315; Stop 339
tttagacatggacggtagagaaact

SEQ ID NO: 405429 - DNA, 25 bp, Artificial
  probe
  misc_feature (1)..(25): SEQ ID NO: 5273; WAN024C6G; Start 318; Stop 342
agacatggacggtagagaaactatc

SEQ ID NO: 405430 - DNA, 25 bp, Artificial
  probe
  misc_feature (1)..(25): SEQ ID NO: 5273; WAN024C6G; Start 201; Stop 225
gcttaataaccaaggaaagattacc

SEQ ID NO: 405431 - DNA, 25 bp, Artificial
  probe
  misc_feature (1)..(25): SEQ ID NO: 5273; WAN024C6G; Start 329; Stop 353
gtagagaaactatcctcctcccaga

SEQ ID NO: 405432 - DNA, 25 bp, Artificial
  probe
  misc_feature (1)..(25): SEQ ID NO: 5273; WAN024C6G; Start 265; Stop 289
tttgactttaaccatcctttcgacc

SEQ ID NO: 405433 - DNA, 25 bp, Artificial
  probe
  misc_feature (1)..(25): SEQ ID NO: 5273; WAN024C6G; Start 200; Stop 224
tgcttaataaccaaggaaagattac

SEQ ID NO: 405434 - DNA, 25 bp, Artificial
  probe
  misc_feature (1)..(25): SEQ ID NO: 5273; WAN024C6G; Start 332; Stop 356
gagaaactatcctcctcccagaaga

SEQ ID NO: 405435 - DNA, 25 bp, Artificial
  probe
  misc_feature (1)..(25): SEQ ID NO: 5273; WAN024C6G; Start 331; Stop 355
agagaaactatcctcctcccagaag

SEQ ID NO: 405436 - DNA, 25 bp, Artificial
  probe
  misc_feature (1)..(25): SEQ ID NO: 5273; WAN024C6G; Start 198; Stop 222
attgcttaataaccaaggaaagatt

SEQ ID NO: 405437 - DNA, 25 bp, Artificial
  probe
  misc_feature (1)..(25): SEQ ID NO: 5273; WAN024C6G; Start 197; Stop 221
aattgcttaataaccaaggaaagat

SEQ ID NO: 405438 - DNA, 25 bp, Artificial
  probe
  misc_feature (1)..(25): SEQ ID NO: 5273; WAN024C6G; Start 166; Stop 190
gtctttgaattggaagaagaactcg

SEQ ID NO: 405439 - DNA, 25 bp, Artificial
  probe
  misc_feature (1)..(25): SEQ ID NO: 5273; WAN024C6G; Start 165; Stop 189
tgtctttgaattggaagaagaactc

SEQ ID NO: 405440 - DNA, 25 bp, Artificial
  probe
  misc_feature (1)..(25): SEQ ID NO: 5273; WAN024C6G; Start 328; Stop 352
ggtagagaaactatcctcctcccag

SEQ ID NO: 405441 - DNA, 25 bp, Artificial
  probe
  misc_feature (1)..(25): SEQ ID NO: 5273; WAN024C6G; Start 250; Stop 274
cctacagccattgattttgacttta

SEQ ID NO: 405442 - DNA, 25 bp, Artificial
  probe
  misc_feature (1)..(25): SEQ ID NO: 5273; WAN024C6G; Start 255; Stop 279
agccattgattttgactttaaccat

SEQ ID NO: 405443 - DNA, 25 bp, Artificial
  probe
  misc_feature (1)..(25): SEQ ID NO: 5273; WAN024C6G; Start 254; Stop 278
cagccattgattttgactttaacca

SEQ ID NO: 405444 - DNA, 25 bp, Artificial
  probe
  misc_feature (1)..(25): SEQ ID NO: 5273; WAN024C6G; Start 253; Stop 277
acagccattgattttgactttaacc

SEQ ID NO: 405445 - DNA, 25 bp, Artificial
  probe
  misc_feature (1)..(25): SEQ ID NO: 5273; WAN024C6G; Start 164; Stop 188
atgtctttgaattggaagaagaact

SEQ ID NO: 405446 - DNA, 25 bp, Artificial
  probe
  misc_feature (1)..(25): SEQ ID NO: 5273; WAN024C6G; Start 336; Stop 360
aactatcctcctcccagaagaaaat

SEQ ID NO: 405447 - DNA, 25 bp, Artificial
  probe
  misc_feature (1)..(25): SEQ ID NO: 5273; WAN024C6G; Start 335; Stop 359
aaactatcctcctcccagaagaaaa

SEQ ID NO: 405448 - DNA, 25 bp, Artificial
  probe
  misc_feature (1)..(25): SEQ ID NO: 5273; WAN024C6G; Start 256; Stop 280
gccattgattttgactttaaccatc

SEQ ID NO: 405449 - DNA, 25 bp, Artificial
  probe
  misc_feature (1)..(25): SEQ ID NO: 5273; WAN024C6G; Start 344; Stop 368
tcctcccagaagaaaatgacctatt

SEQ ID NO: 405450 - DNA, 25 bp, Artificial
  probe
  misc_feature (1)..(25): SEQ ID NO: 5273; WAN024C6G; Start 321; Stop 345
catggacggtagagaaactatcctc

SEQ ID NO: 405451 - DNA, 25 bp, Artificial
  probe
  misc_feature (1)..(25): SEQ ID NO: 5273; WAN024C6G; Start 262; Stop 286
gattttgactttaaccatcctttcg

SEQ ID NO: 405452 - DNA, 25 bp, Artificial
  probe
  misc_feature (1)..(25): SEQ ID NO: 5273; WAN024C6G; Start 338; Stop 362
ctatcctcctcccagaagaaaatga

SEQ ID NO: 405453 - DNA, 25 bp, Artificial
  probe
  misc_feature (1)..(25): SEQ ID NO: 5273; WAN024C6G; Start 257; Stop 281
ccattgattttgactttaaccatcc

SEQ ID NO: 405454 - DNA, 25 bp, Artificial
  probe
  misc_feature (1)..(25): SEQ ID NO: 5273; WAN024C6G; Start 319; Stop 343
gacatggacggtagagaaactatcc

SEQ ID NO: 405455 - DNA, 25 bp, Artificial
  probe
  misc_feature (1)..(25): SEQ ID NO: 5273; WAN024C6G; Start 325; Stop 349
gacggtagagaaactatcctcctcc

SEQ ID NO: 405456 - DNA, 25 bp, Artificial
  probe
  misc_feature (1)..(25): SEQ ID NO: 5275; WAN024E2V; Start 46; Stop 70
gactttgtctatgtggagggattgg

SEQ ID NO: 405457 - DNA, 25 bp, Artificial
  probe
  misc_feature (1)..(25): SEQ ID NO: 5275; WAN024E2V; Start 45; Stop 69
ggactttgtctatgtggagggattg

SEQ ID NO: 405458 - DNA, 25 bp, Artificial
  probe
  misc_feature (1)..(25): SEQ ID NO: 5275; WAN024E2V; Start 47; Stop 71
actttgtctatgtggagggattggg

SEQ ID NO: 405459 - DNA, 25 bp, Artificial
  probe
  misc_feature (1)..(25): SEQ ID NO: 5275; WAN024E2V; Start 44; Stop 68
gggactttgtctatgtggagggatt

SEQ ID NO: 405460 - DNA, 25 bp, Artificial
  probe
  misc_feature (1)..(25): SEQ ID NO: 5275; WAN024E2V; Start 16; Stop 40
tataccactattttactccctctgg

SEQ ID NO: 405461 - DNA, 25 bp, Artificial
  probe
  misc_feature (1)..(25): SEQ ID NO: 5275; WAN024E2V; Start 17; Stop 41
ataccactattttactccctctggc

SEQ ID NO: 405462 - DNA, 25 bp, Artificial
  probe
  misc_feature (1)..(25): SEQ ID NO: 5275; WAN024E2V; Start 35; Stop 59
ctctggcaagggactttgtctatgt

SEQ ID NO: 405463 - DNA, 25 bp, Artificial
  probe
  misc_feature (1)..(25): SEQ ID NO: 5275; WAN024E2V; Start 43; Stop 67
agggactttgtctatgtggagggat

SEQ ID NO: 405464 - DNA, 25 bp, Artificial
  probe
  misc_feature (1)..(25): SEQ ID NO: 5275; WAN024E2V; Start 36; Stop 60
tctggcaagggactttgtctatgtg

SEQ ID NO: 405465 - DNA, 25 bp, Artificial
  probe
  misc_feature (1)..(25): SEQ ID NO: 5275; WAN024E2V; Start 15; Stop 39
gtataccactattttactccctctg

SEQ ID NO: 405466 - DNA, 25 bp, Artificial
  probe
  misc_feature (1)..(25): SEQ ID NO: 5275; WAN024E2V; Start 21; Stop 45
cactattttactccctctggcaagg

SEQ ID NO: 405467 - DNA, 25 bp, Artificial
  probe
  misc_feature (1)..(25): SEQ ID NO: 5275; WAN024E2V; Start 41; Stop 65
caagggactttgtctatgtggaggg

SEQ ID NO: 405468 - DNA, 25 bp, Artificial
  probe
  misc_feature (1)..(25): SEQ ID NO: 5275; WAN024E2V; Start 18; Stop 42
taccactattttactccctctggca

SEQ ID NO: 405469 - DNA, 25 bp, Artificial
  probe
  misc_feature (1)..(25): SEQ ID NO: 5275; WAN024E2V; Start 42; Stop 66
aagggactttgtctatgtggaggga

SEQ ID NO: 405470 - DNA, 25 bp, Artificial
  probe
  misc_feature (1)..(25): SEQ ID NO: 5275; WAN024E2V; Start 20; Stop 44
ccactattttactccctctggcaag

SEQ ID NO: 405471 - DNA, 25 bp, Artificial
  probe
  misc_feature (1)..(25): SEQ ID NO: 5275; WAN024E2V; Start 34; Stop 58
cctctggcaagggactttgtctatg

SEQ ID NO: 405472 - DNA, 25 bp, Artificial
  probe
  misc_feature (1)..(25): SEQ ID NO: 5275; WAN024E2V; Start 19; Stop 43
accactattttactccctctggcaa

SEQ ID NO: 405473 - DNA, 25 bp, Artificial
  probe
  misc_feature (1)..(25): SEQ ID NO: 5275; WAN024E2V; Start 40; Stop 64
gcaagggactttgtctatgtggagg

SEQ ID NO: 405474 - DNA, 25 bp, Artificial
  probe
  misc_feature (1)..(25): SEQ ID NO: 5275; WAN024E2V; Start 39; Stop 63
ggcaagggactttgtctatgtggag

SEQ ID NO: 405475 - DNA, 25 bp, Artificial
  probe
  misc_feature (1)..(25): SEQ ID NO: 5275; WAN024E2V; Start 14; Stop 38
agtataccactattttactccctct

SEQ ID NO: 405476 - DNA, 25 bp, Artificial
  probe
  misc_feature (1)..(25): SEQ ID NO: 5275; WAN024E2V; Start 12; Stop 36
tgagtataccactattttactccct

SEQ ID NO: 405477 - DNA, 25 bp, Artificial
  probe
  misc_feature (1)..(25): SEQ ID NO: 5275; WAN024E2V; Start 13; Stop 37
gagtataccactattttactccctc

SEQ ID NO: 405478 - DNA, 25 bp, Artificial
  probe
  misc_feature (1)..(25): SEQ ID NO: 5275; WAN024E2V; Start 11; Stop 35
ttgagtataccactattttactccc

SEQ ID NO: 405479 - DNA, 25 bp, Artificial
  probe
  misc_feature (1)..(25): SEQ ID NO: 5275; WAN024E2V; Start 54; Stop 78
ctatgtggagggattgggctcctat

SEQ ID NO: 405480 - DNA, 25 bp, Artificial
  probe
  misc_feature (1)..(25): SEQ ID NO: 5275; WAN024E2V; Start 10; Stop 34
attgagtataccactattttactcc

SEQ ID NO: 405481 - DNA, 25 bp, Artificial
  probe
  misc_feature (1)..(25): SEQ ID NO: 5276; WAN024FMS; Start 187; Stop 211
gcgaatatcatctgtaatagcacca

SEQ ID NO: 405482 - DNA, 25 bp, Artificial
  probe
  misc_feature (1)..(25): SEQ ID NO: 5276; WAN024FMS; Start 188; Stop 212
cgaatatcatctgtaatagcaccat

SEQ ID NO: 405483 - DNA, 25 bp, Artificial
  probe
  misc_feature (1)..(25): SEQ ID NO: 5276; WAN024FMS; Start 36; Stop 60
cattgactgtcggactgtgaatatc

SEQ ID NO: 405484 - DNA, 25 bp, Artificial
  probe
  misc_feature (1)..(25): SEQ ID NO: 5276; WAN024FMS; Start 192; Stop 216
tatcatctgtaatagcaccataagg

SEQ ID NO: 405485 - DNA, 25 bp, Artificial
  probe
  misc_feature (1)..(25): SEQ ID NO: 5276; WAN024FMS; Start 38; Stop 62
ttgactgtcggactgtgaatatcat

SEQ ID NO: 405486 - DNA, 25 bp, Artificial
  probe
  misc_feature (1)..(25): SEQ ID NO: 5276; WAN024FMS; Start 37; Stop 61
attgactgtcggactgtgaatatca

SEQ ID NO: 405487 - DNA, 25 bp, Artificial
  probe
  misc_feature (1)..(25): SEQ ID NO: 5276; WAN024FMS; Start 193; Stop 217
atcatctgtaatagcaccataaggt

SEQ ID NO: 405488 - DNA, 25 bp, Artificial
  probe
  misc_feature (1)..(25): SEQ ID NO: 5276; WAN024FMS; Start 175; Stop 199
atccaagctattgcgaatatcatct

SEQ ID NO: 405489 - DNA, 25 bp, Artificial
  probe
  misc_feature (1)..(25): SEQ ID NO: 5276; WAN024FMS; Start 174; Stop 198
aatccaagctattgcgaatatcatc

SEQ ID NO: 405490 - DNA, 25 bp, Artificial
  probe
  misc_feature (1)..(25): SEQ ID NO: 5276; WAN024FMS; Start 178; Stop 202
caagctattgcgaatatcatctgta

SEQ ID NO: 405491 - DNA, 25 bp, Artificial
  probe
  misc_feature (1)..(25): SEQ ID NO: 5276; WAN024FMS; Start 176; Stop 200
tccaagctattgcgaatatcatctg

SEQ ID NO: 405492 - DNA, 25 bp, Artificial
  probe
  misc_feature (1)..(25): SEQ ID NO: 5276; WAN024FMS; Start 177; Stop 201
ccaagctattgcgaatatcatctgt

SEQ ID NO: 405493 - DNA, 25 bp, Artificial
  probe
  misc_feature (1)..(25): SEQ ID NO: 5276; WAN024FMS; Start 179; Stop 203
aagctattgcgaatatcatctgtaa

SEQ ID NO: 405494 - DNA, 25 bp, Artificial
  probe
  misc_feature (1)..(25): SEQ ID NO: 5276; WAN024FMS; Start 128; Stop 152
ttactcttccagtccagactatcca

SEQ ID NO: 405495 - DNA, 25 bp, Artificial
  probe
  misc_feature (1)..(25): SEQ ID NO: 5276; WAN024FMS; Start 230; Stop 254
ttagaactagaacccagcactttag

SEQ ID NO: 405496 - DNA, 25 bp, Artificial
  probe
  misc_feature (1)..(25): SEQ ID NO: 5276; WAN024FMS; Start 229; Stop 253
tttagaactagaacccagcacttta

SEQ ID NO: 405497 - DNA, 25 bp, Artificial
  probe
  misc_feature (1)..(25): SEQ ID NO: 5276; WAN024FMS; Start 180; Stop 204
agctattgcgaatatcatctgtaat

SEQ ID NO: 405498 - DNA, 25 bp, Artificial
  probe
  misc_feature (1)..(25): SEQ ID NO: 5276; WAN024FMS; Start 183; Stop 207
tattgcgaatatcatctgtaatagc

SEQ ID NO: 405499 - DNA, 25 bp, Artificial
  probe
  misc_feature (1)..(25): SEQ ID NO: 5276; WAN024FMS; Start 181; Stop 205
gctattgcgaatatcatctgtaata

SEQ ID NO: 405500 - DNA, 25 bp, Artificial
  probe
  misc_feature (1)..(25): SEQ ID NO: 5276; WAN024FMS; Start 35; Stop 59
gcattgactgtcggactgtgaatat

SEQ ID NO: 405501 - DNA, 25 bp, Artificial
  probe
  misc_feature (1)..(25): SEQ ID NO: 5276; WAN024FMS; Start 39; Stop 63
tgactgtcggactgtgaatatcatg

SEQ ID NO: 405502 - DNA, 25 bp, Artificial
  probe
  misc_feature (1)..(25): SEQ ID NO: 5276; WAN024FMS; Start 228; Stop 252
gtttagaactagaacccagcacttt

SEQ ID NO: 405503 - DNA, 25 bp, Artificial
  probe
  misc_feature (1)..(25): SEQ ID NO: 5276; WAN024FMS; Start 129; Stop 153
tactcttccagtccagactatccac

SEQ ID NO: 405504 - DNA, 25 bp, Artificial
  probe
  misc_feature (1)..(25): SEQ ID NO: 5276; WAN024FMS; Start 185; Stop 209
ttgcgaatatcatctgtaatagcac

SEQ ID NO: 405505 - DNA, 25 bp, Artificial
  probe
  misc_feature (1)..(25): SEQ ID NO: 5276; WAN024FMS; Start 7; Stop 31
tttcaaatactcaatgacccttggc

SEQ ID NO: 405506 - DNA, 25 bp, Artificial
  probe
  misc_feature (1)..(25): SEQ ID NO: 5276; WAN024FMS; Start 186; Stop 210
tgcgaatatcatctgtaatagcacc

SEQ ID NO: 405507 - DNA, 25 bp, Artificial
  probe
  misc_feature (1)..(25): SEQ ID NO: 5276; WAN024FMS; Start 145; Stop 169
actatccacatcccacatgataaag

SEQ ID NO: 405508 - DNA, 25 bp, Artificial
  probe
  misc_feature (1)..(25): SEQ ID NO: 5276; WAN024FMS; Start 144; Stop 168
gactatccacatcccacatgataaa

SEQ ID NO: 405509 - DNA, 25 bp, Artificial
  probe
  misc_feature (1)..(25): SEQ ID NO: 5276; WAN024FMS; Start 127; Stop 151
tttactcttccagtccagactatcc

SEQ ID NO: 405510 - DNA, 25 bp, Artificial
  probe
  misc_feature (1)..(25): SEQ ID NO: 5276; WAN024FMS; Start 184; Stop 208
attgcgaatatcatctgtaatagca

SEQ ID NO: 405511 - DNA, 25 bp, Artificial
  probe
  misc_feature (1)..(25): SEQ ID NO: 5276; WAN024FMS; Start 132; Stop 156
tcttccagtccagactatccacatc

SEQ ID NO: 405512 - DNA, 25 bp, Artificial
  probe
  misc_feature (1)..(25): SEQ ID NO: 5276; WAN024FMS; Start 131; Stop 155
ctcttccagtccagactatccacat

SEQ ID NO: 405513 - DNA, 25 bp, Artificial
  probe
  misc_feature (1)..(25): SEQ ID NO: 5276; WAN024FMS; Start 143; Stop 167
agactatccacatcccacatgataa

SEQ ID NO: 405514 - DNA, 25 bp, Artificial
  probe
  misc_feature (1)..(25): SEQ ID NO: 5277; WAN024GKI; Start 300; Stop 324
taattcaactcagccaattcactag

SEQ ID NO: 405515 - DNA, 25 bp, Artificial
  probe
  misc_feature (1)..(25): SEQ ID NO: 5277; WAN024GKI; Start 299; Stop 323
ataattcaactcagccaattcacta

SEQ ID NO: 405516 - DNA, 25 bp, Artificial
  probe
  misc_feature (1)..(25): SEQ ID NO: 5277; WAN024GKI; Start 298; Stop 322
tataattcaactcagccaattcact

SEQ ID NO: 405517 - DNA, 25 bp, Artificial
  probe
  misc_feature (1)..(25): SEQ ID NO: 5277; WAN024GKI; Start 50; Stop 74
ttaataattcacttgcaggttcgtc

SEQ ID NO: 405518 - DNA, 25 bp, Artificial
  probe
  misc_feature (1)..(25): SEQ ID NO: 5277; WAN024GKI; Start 133; Stop 157
agttgttctggtgtcattatttgtc

SEQ ID NO: 405519 - DNA, 25 bp, Artificial
  probe
  misc_feature (1)..(25): SEQ ID NO: 5277; WAN024GKI; Start 135; Stop 159
ttgttctggtgtcattatttgtcct

SEQ ID NO: 405520 - DNA, 25 bp, Artificial
  probe
  misc_feature (1)..(25): SEQ ID NO: 5277; WAN024GKI; Start 134; Stop 158
gttgttctggtgtcattatttgtcc

SEQ ID NO: 405521 - DNA, 25 bp, Artificial
  probe
  misc_feature (1)..(25): SEQ ID NO: 5277; WAN024GKI; Start 127; Stop 151
gctttaagttgttctggtgtcatta

SEQ ID NO: 405522 - DNA, 25 bp, Artificial
  probe
  misc_feature (1)..(25): SEQ ID NO: 5277; WAN024GKI; Start 51; Stop 75
taataattcacttgcaggttcgtca

SEQ ID NO: 405523 - DNA, 25 bp, Artificial
  probe
  misc_feature (1)..(25): SEQ ID NO: 5277; WAN024GKI; Start 132; Stop 156
aagttgttctggtgtcattatttgt

SEQ ID NO: 405524 - DNA, 25 bp, Artificial
  probe
  misc_feature (1)..(25): SEQ ID NO: 5277; WAN024GKI; Start 136; Stop 160
tgttctggtgtcattatttgtcctc

SEQ ID NO: 405525 - DNA, 25 bp, Artificial
  probe
  misc_feature (1)..(25): SEQ ID NO: 5277; WAN024GKI; Start 53; Stop 77
ataattcacttgcaggttcgtcatt

SEQ ID NO: 405526 - DNA, 25 bp, Artificial
  probe
  misc_feature (1)..(25): SEQ ID NO: 5277; WAN024GKI; Start 52; Stop 76
aataattcacttgcaggttcgtcat

SEQ ID NO: 405527 - DNA, 25 bp, Artificial
  probe
  misc_feature (1)..(25): SEQ ID NO: 5277; WAN024GKI; Start 126; Stop 150
tgctttaagttgttctggtgtcatt

SEQ ID NO: 405528 - DNA, 25 bp, Artificial
  probe
  misc_feature (1)..(25): SEQ ID NO: 5277; WAN024GKI; Start 125; Stop 149
ttgctttaagttgttctggtgtcat

SEQ ID NO: 405529 - DNA, 25 bp, Artificial
  probe
  misc_feature (1)..(25): SEQ ID NO: 5277; WAN024GKI; Start 215; Stop 239
tctttccgcttgataattctgaatc

SEQ ID NO: 405530 - DNA, 25 bp, Artificial
  probe
  misc_feature (1)..(25): SEQ ID NO: 5277; WAN024GKI; Start 214; Stop 238
ctctttccgcttgataattctgaat

SEQ ID NO: 405531 - DNA, 25 bp, Artificial
  probe
  misc_feature (1)..(25): SEQ ID NO: 5277; WAN024GKI; Start 137; Stop 161
gttctggtgtcattatttgtcctcc

SEQ ID NO: 405532 - DNA, 25 bp, Artificial
  probe
  misc_feature (1)..(25): SEQ ID NO: 5277; WAN024GKI; Start 109; Stop 133
gctctttggagaatacttgctttaa

SEQ ID NO: 405533 - DNA, 25 bp, Artificial
  probe
  misc_feature (1)..(25): SEQ ID NO: 5277; WAN024GKI; Start 297; Stop 321
ttataattcaactcagccaattcac

SEQ ID NO: 405534 - DNA, 25 bp, Artificial
  probe
  misc_feature (1)..(25): SEQ ID NO: 5277; WAN024GKI; Start 208; Stop 232
aagttgctctttccgcttgataatt

SEQ ID NO: 405535 - DNA, 25 bp, Artificial
  probe
  misc_feature (1)..(25): SEQ ID NO: 5277; WAN024GKI; Start 54; Stop 78
taattcacttgcaggttcgtcattg

SEQ ID NO: 405536 - DNA, 25 bp, Artificial
  probe
  misc_feature (1)..(25): SEQ ID NO: 5277; WAN024GKI; Start 213; Stop 237
gctctttccgcttgataattctgaa

SEQ ID NO: 405537 - DNA, 25 bp, Artificial
  probe
  misc_feature (1)..(25): SEQ ID NO: 5277; WAN024GKI; Start 211; Stop 235
ttgctctttccgcttgataattctg

SEQ ID NO: 405538 - DNA, 25 bp, Artificial
  probe
  misc_feature (1)..(25): SEQ ID NO: 5277; WAN024GKI; Start 210; Stop 234
gttgctctttccgcttgataattct

SEQ ID NO: 405539 - DNA, 25 bp, Artificial
  probe
  misc_feature (1)..(25): SEQ ID NO: 5277; WAN024GKI; Start 209; Stop 233
agttgctctttccgcttgataattc

SEQ ID NO: 405540 - DNA, 25 bp, Artificial
  probe
  misc_feature (1)..(25): SEQ ID NO: 5277; WAN024GKI; Start 92; Stop 116
ctaatttcccttccatcgctctttg

SEQ ID NO: 405541 - DNA, 25 bp, Artificial
  probe
  misc_feature (1)..(25): SEQ ID NO: 5277; WAN024GKI; Start 124; Stop 148
cttgctttaagttgttctggtgtca

SEQ ID NO: 405542 - DNA, 25 bp, Artificial
  probe
  misc_feature (1)..(25): SEQ ID NO: 5277; WAN024GKI; Start 131; Stop 155
taagttgttctggtgtcattatttg

SEQ ID NO: 405543 - DNA, 25 bp, Artificial
  probe
  misc_feature (1)..(25): SEQ ID NO: 5277; WAN024GKI; Start 108; Stop 132
cgctctttggagaatacttgcttta

SEQ ID NO: 405544 - DNA, 25 bp, Artificial
  probe
  misc_feature (1)..(25): SEQ ID NO: 5277; WAN024GKI; Start 91; Stop 115
actaatttcccttccatcgctcttt

SEQ ID NO: 405545 - DNA, 25 bp, Artificial
  probe
  misc_feature (1)..(25): SEQ ID NO: 5277; WAN024GKI; Start 238; Stop 262
tcaactcaaagggatttaagatttc

SEQ ID NO: 405546 - DNA, 25 bp, Artificial
  probe
  misc_feature (1)..(25): SEQ ID NO: 5277; WAN024GKI; Start 128; Stop 152
ctttaagttgttctggtgtcattat

SEQ ID NO: 405547 - DNA, 25 bp, Artificial
  probe
  misc_feature (1)..(25): SEQ ID NO: 5278; WAN024FT9; Start 264; Stop 288
ccttctggcgagataagtatgagtt

SEQ ID NO: 405548 - DNA, 25 bp, Artificial
  probe
  misc_feature (1)..(25): SEQ ID NO: 5278; WAN024FT9; Start 260; Stop 284
ttgaccttctggcgagataagtatg

SEQ ID NO: 405549 - DNA, 25 bp, Artificial
  probe
  misc_feature (1)..(25): SEQ ID NO: 5278; WAN024FT9; Start 259; Stop 283
gttgaccttctggcgagataagtat

SEQ ID NO: 405550 - DNA, 25 bp, Artificial
  probe
  misc_feature (1)..(25): SEQ ID NO: 5278; WAN024FT9; Start 262; Stop 286
gaccttctggcgagataagtatgag

SEQ ID NO: 405551 - DNA, 25 bp, Artificial
  probe
  misc_feature (1)..(25): SEQ ID NO: 5278; WAN024FT9; Start 268; Stop 292
ctggcgagataagtatgagtttgat

SEQ ID NO: 405552 - DNA, 25 bp, Artificial
  probe
  misc_feature (1)..(25): SEQ ID NO: 5278; WAN024FT9; Start 269; Stop 293
tggcgagataagtatgagtttgata

SEQ ID NO: 405553 - DNA, 25 bp, Artificial
  probe
  misc_feature (1)..(25): SEQ ID NO: 5278; WAN024FT9; Start 467; Stop 491
attgactatgtggaaatgctggaaa

SEQ ID NO: 405554 - DNA, 25 bp, Artificial
  probe
  misc_feature (1)..(25): SEQ ID NO: 5278; WAN024FT9; Start 263; Stop 287
accttctggcgagataagtatgagt

SEQ ID NO: 405555 - DNA, 25 bp, Artificial
  probe
  misc_feature (1)..(25): SEQ ID NO: 5278; WAN024FT9; Start 261; Stop 285
tgaccttctggcgagataagtatga

SEQ ID NO: 405556 - DNA, 25 bp, Artificial
  probe
  misc_feature (1)..(25): SEQ ID NO: 5278; WAN024FT9; Start 265; Stop 289
cttctggcgagataagtatgagttt

SEQ ID NO: 405557 - DNA, 25 bp, Artificial
  probe
  misc_feature (1)..(25): SEQ ID NO: 5278; WAN024FT9; Start 466; Stop 490
gattgactatgtggaaatgctggaa

SEQ ID NO: 405558 - DNA, 25 bp, Artificial
  probe
  misc_feature (1)..(25): SEQ ID NO: 5278; WAN024FT9; Start 266; Stop 290
ttctggcgagataagtatgagtttg

SEQ ID NO: 405559 - DNA, 25 bp, Artificial
  probe
  misc_feature (1)..(25): SEQ ID NO: 5278; WAN024FT9; Start 468; Stop 492
ttgactatgtggaaatgctggaaag

SEQ ID NO: 405560 - DNA, 25 bp, Artificial
  probe
  misc_feature (1)..(25): SEQ ID NO: 5278; WAN024FT9; Start 270; Stop 294
ggcgagataagtatgagtttgataa

SEQ ID NO: 405561 - DNA, 25 bp, Artificial
  probe
  misc_feature (1)..(25): SEQ ID NO: 5278; WAN024FT9; Start 313; Stop 337
gggcaatatctgggatttgaatttc

SEQ ID NO: 405562 - DNA, 25 bp, Artificial
  probe
  misc_feature (1)..(25): SEQ ID NO: 5278; WAN024FT9; Start 258; Stop 282
agttgaccttctggcgagataagta

SEQ ID NO: 405563 - DNA, 25 bp, Artificial
  probe
  misc_feature (1)..(25): SEQ ID NO: 5278; WAN024FT9; Start 312; Stop 336
agggcaatatctgggatttgaattt

SEQ ID NO: 405564 - DNA, 25 bp, Artificial
  probe
  misc_feature (1)..(25): SEQ ID NO: 5278; WAN024FT9; Start 184; Stop 208
taaagaaatcttgaccttgcttcct

SEQ ID NO: 405565 - DNA, 25 bp, Artificial
  probe
  misc_feature (1)..(25): SEQ ID NO: 5278; WAN024FT9; Start 183; Stop 207
gtaaagaaatcttgaccttgcttcc

SEQ ID NO: 405566 - DNA, 25 bp, Artificial
  probe
  misc_feature (1)..(25): SEQ ID NO: 5278; WAN024FT9; Start 267; Stop 291
tctggcgagataagtatgagtttga

SEQ ID NO: 405567 - DNA, 25 bp, Artificial
  probe
  misc_feature (1)..(25): SEQ ID NO: 5278; WAN024FT9; Start 182; Stop 206
agtaaagaaatcttgaccttgcttc

SEQ ID NO: 405568 - DNA, 25 bp, Artificial
  probe
  misc_feature (1)..(25): SEQ ID NO: 5278; WAN024FT9; Start 311; Stop 335
gagggcaatatctgggatttgaatt

SEQ ID NO: 405569 - DNA, 25 bp, Artificial
  probe
  misc_feature (1)..(25): SEQ ID NO: 5278; WAN024FT9; Start 314; Stop 338
ggcaatatctgggatttgaatttca

SEQ ID NO: 405570 - DNA, 25 bp, Artificial
  probe
  misc_feature (1)..(25): SEQ ID NO: 5278; WAN024FT9; Start 185; Stop 209
aaagaaatcttgaccttgcttcctc

SEQ ID NO: 405571 - DNA, 25 bp, Artificial
  probe
  misc_feature (1)..(25): SEQ ID NO: 5278; WAN024FT9; Start 330; Stop 354
tgaatttcaaattgctggatgatcg

SEQ ID NO: 405572 - DNA, 25 bp, Artificial
  probe
  misc_feature (1)..(25): SEQ ID NO: 5278; WAN024FT9; Start 485; Stop 509
ctggaaagccaatcacattaactaa

SEQ ID NO: 405573 - DNA, 25 bp, Artificial
  probe
  misc_feature (1)..(25): SEQ ID NO: 5278; WAN024FT9; Start 257; Stop 281
aagttgaccttctggcgagataagt

SEQ ID NO: 405574 - DNA, 25 bp, Artificial
  probe
  misc_feature (1)..(25): SEQ ID NO: 5278; WAN024FT9; Start 486; Stop 510
tggaaagccaatcacattaactaat

SEQ ID NO: 405575 - DNA, 25 bp, Artificial
  probe
  misc_feature (1)..(25): SEQ ID NO: 5278; WAN024FT9; Start 331; Stop 355
gaatttcaaattgctggatgatcgc

SEQ ID NO: 405576 - DNA, 25 bp, Artificial
  probe
  misc_feature (1)..(25): SEQ ID NO: 5278; WAN024FT9; Start 465; Stop 489
cgattgactatgtggaaatgctgga

SEQ ID NO: 405577 - DNA, 25 bp, Artificial
  probe
  misc_feature (1)..(25): SEQ ID NO: 5278; WAN024FT9; Start 271; Stop 295
gcgagataagtatgagtttgataat

SEQ ID NO: 405578 - DNA, 25 bp, Artificial
  probe
  misc_feature (1)..(25): SEQ ID NO: 5278; WAN024FT9; Start 189; Stop 213
aaatcttgaccttgcttcctcgttt

SEQ ID NO: 405579 - DNA, 25 bp, Artificial
  probe
  misc_feature (1)..(25): SEQ ID NO: 5278; WAN024FT9; Start 310; Stop 334
cgagggcaatatctgggatttgaat

SEQ ID NO: 405580 - DNA, 25 bp, Artificial
  probe
  misc_feature (1)..(25): SEQ ID NO: 5279; WAN024FLW; Start 133; Stop 157
ttgaagtcttctacgacagtgatag

SEQ ID NO: 405581 - DNA, 25 bp, Artificial
  probe
  misc_feature (1)..(25): SEQ ID NO: 5279; WAN024FLW; Start 132; Stop 156
cttgaagtcttctacgacagtgata

SEQ ID NO: 405582 - DNA, 25 bp, Artificial
  probe
  misc_feature (1)..(25): SEQ ID NO: 5279; WAN024FLW; Start 183; Stop 207
attgttgcggaatttagccataatc

SEQ ID NO: 405583 - DNA, 25 bp, Artificial
  probe
  misc_feature (1)..(25): SEQ ID NO: 5279; WAN024FLW; Start 182; Stop 206
cattgttgcggaatttagccataat

SEQ ID NO: 405584 - DNA, 25 bp, Artificial
  probe
  misc_feature (1)..(25): SEQ ID NO: 5279; WAN024FLW; Start 134; Stop 158
tgaagtcttctacgacagtgatagc

SEQ ID NO: 405585 - DNA, 25 bp, Artificial
  probe
  misc_feature (1)..(25): SEQ ID NO: 5279; WAN024FLW; Start 61; Stop 85
tatttcaacacatcacttggaggag

SEQ ID NO: 405586 - DNA, 25 bp, Artificial
  probe
  misc_feature (1)..(25): SEQ ID NO: 5279; WAN024FLW; Start 131; Stop 155
ccttgaagtcttctacgacagtgat

SEQ ID NO: 405587 - DNA, 25 bp, Artificial
  probe
  misc_feature (1)..(25): SEQ ID NO: 5279; WAN024FLW; Start 60; Stop 84
gtatttcaacacatcacttggagga

SEQ ID NO: 405588 - DNA, 25 bp, Artificial
  probe
  misc_feature (1)..(25): SEQ ID NO: 5279; WAN024FLW; Start 77; Stop 101
ttggaggagttgtcaagtttgtaac

SEQ ID NO: 405589 - DNA, 25 bp, Artificial
  probe
  misc_feature (1)..(25): SEQ ID NO: 5279; WAN024FLW; Start 81; Stop 105
aggagttgtcaagtttgtaacagta

SEQ ID NO: 405590 - DNA, 25 bp, Artificial
  probe
  misc_feature (1)..(25): SEQ ID NO: 5279; WAN024FLW; Start 135; Stop 159
gaagtcttctacgacagtgatagct

SEQ ID NO: 405591 - DNA, 25 bp, Artificial
  probe
  misc_feature (1)..(25): SEQ ID NO: 5279; WAN024FLW; Start 231; Stop 255
gacacctgaaagagtaacagagatt

SEQ ID NO: 405592 - DNA, 25 bp, Artificial
  probe
  misc_feature (1)..(25): SEQ ID NO: 5279; WAN024FLW; Start 97; Stop 121
gtaacagtaccgtcagcaacagtag

SEQ ID NO: 405593 - DNA, 25 bp, Artificial
  probe
  misc_feature (1)..(25): SEQ ID NO: 5279; WAN024FLW; Start 233; Stop 257
cacctgaaagagtaacagagattgt

SEQ ID NO: 405594 - DNA, 25 bp, Artificial
  probe
  misc_feature (1)..(25): SEQ ID NO: 5279; WAN024FLW; Start 232; Stop 256
acacctgaaagagtaacagagattg

SEQ ID NO: 405595 - DNA, 25 bp, Artificial
  probe
  misc_feature (1)..(25): SEQ ID NO: 5279; WAN024FLW; Start 80; Stop 104
gaggagttgtcaagtttgtaacagt

SEQ ID NO: 405596 - DNA, 25 bp, Artificial
  probe
  misc_feature (1)..(25): SEQ ID NO: 5279; WAN024FLW; Start 59; Stop 83
tgtatttcaacacatcacttggagg

SEQ ID NO: 405597 - DNA, 25 bp, Artificial
  probe
  misc_feature (1)..(25): SEQ ID NO: 5279; WAN024FLW; Start 136; Stop 160
aagtcttctacgacagtgatagctg

SEQ ID NO: 405598 - DNA, 25 bp, Artificial
  probe
  misc_feature (1)..(25): SEQ ID NO: 5279; WAN024FLW; Start 83; Stop 107
gagttgtcaagtttgtaacagtacc

SEQ ID NO: 405599 - DNA, 25 bp, Artificial
  probe
  misc_feature (1)..(25): SEQ ID NO: 5279; WAN024FLW; Start 82; Stop 106
ggagttgtcaagtttgtaacagtac

SEQ ID NO: 405600 - DNA, 25 bp, Artificial
  probe
  misc_feature (1)..(25): SEQ ID NO: 5279; WAN024FLW; Start 79; Stop 103
ggaggagttgtcaagtttgtaacag

SEQ ID NO: 405601 - DNA, 25 bp, Artificial
  probe
  misc_feature (1)..(25): SEQ ID NO: 5279; WAN024FLW; Start 88; Stop 112
gtcaagtttgtaacagtaccgtcag

SEQ ID NO: 405602 - DNA, 25 bp, Artificial
  probe
  misc_feature (1)..(25): SEQ ID NO: 5279; WAN024FLW; Start 184; Stop 208
ttgttgcggaatttagccataatcg

SEQ ID NO: 405603 - DNA, 25 bp, Artificial
  probe
  misc_feature (1)..(25): SEQ ID NO: 5279; WAN024FLW; Start 86; Stop 110
ttgtcaagtttgtaacagtaccgtc

SEQ ID NO: 405604 - DNA, 25 bp, Artificial
  probe
  misc_feature (1)..(25): SEQ ID NO: 5279; WAN024FLW; Start 84; Stop 108
agttgtcaagtttgtaacagtaccg

SEQ ID NO: 405605 - DNA, 25 bp, Artificial
  probe
  misc_feature (1)..(25): SEQ ID NO: 5279; WAN024FLW; Start 122; Stop 146
cagtttgtgccttgaagtcttctac

SEQ ID NO: 405606 - DNA, 25 bp, Artificial
  probe
  misc_feature (1)..(25): SEQ ID NO: 5279; WAN024FLW; Start 62; Stop 86
atttcaacacatcacttggaggagt

SEQ ID NO: 405607 - DNA, 25 bp, Artificial
  probe
  misc_feature (1)..(25): SEQ ID NO: 5279; WAN024FLW; Start 230; Stop 254
cgacacctgaaagagtaacagagat

SEQ ID NO: 405608 - DNA, 25 bp, Artificial
  probe
  misc_feature (1)..(25): SEQ ID NO: 5279; WAN024FLW; Start 85; Stop 109
gttgtcaagtttgtaacagtaccgt

SEQ ID NO: 405609 - DNA, 25 bp, Artificial
  probe
  misc_feature (1)..(25): SEQ ID NO: 5279; WAN024FLW; Start 78; Stop 102
tggaggagttgtcaagtttgtaaca

SEQ ID NO: 405610 - DNA, 25 bp, Artificial
  probe
  misc_feature (1)..(25): SEQ ID NO: 5279; WAN024FLW; Start 63; Stop 87
tttcaacacatcacttggaggagtt

SEQ ID NO: 405611 - DNA, 25 bp, Artificial
  probe
  misc_feature (1)..(25): SEQ ID NO: 5279; WAN024FLW; Start 199; Stop 223
gccataatcgctttgatttgttcag

SEQ ID NO: 405612 - DNA, 25 bp, Artificial
  probe
  misc_feature (1)..(25): SEQ ID NO: 5279; WAN024FLW; Start 191; Stop 215
ggaatttagccataatcgctttgat

SEQ ID NO: 405613 - DNA, 25 bp, Artificial
  probe
  misc_feature (1)..(25): SEQ ID NO: 5280; WAN024D3I; Start 8; Stop 32
tttggtcaatcttggaacagtcttt

SEQ ID NO: 405614 - DNA, 25 bp, Artificial
  probe
  misc_feature (1)..(25): SEQ ID NO: 5280; WAN024D3I; Start 55; Stop 79
cgttccatttcaagagcaactaatt

SEQ ID NO: 405615 - DNA, 25 bp, Artificial
  probe
  misc_feature (1)..(25): SEQ ID NO: 5280; WAN024D3I; Start 56; Stop 80
gttccatttcaagagcaactaattt

SEQ ID NO: 405616 - DNA, 25 bp, Artificial
  probe
  misc_feature (1)..(25): SEQ ID NO: 5280; WAN024D3I; Start 9; Stop 33
ttggtcaatcttggaacagtctttg

SEQ ID NO: 405617 - DNA, 25 bp, Artificial
  probe
  misc_feature (1)..(25): SEQ ID NO: 5280; WAN024D3I; Start 54; Stop 78
ccgttccatttcaagagcaactaat

SEQ ID NO: 405618 - DNA, 25 bp, Artificial
  probe
  misc_feature (1)..(25): SEQ ID NO: 5280; WAN024D3I; Start 202; Stop 226
tgtttatccatgtctgtatctctct

SEQ ID NO: 405619 - DNA, 25 bp, Artificial
  probe
  misc_feature (1)..(25): SEQ ID NO: 5280; WAN024D3I; Start 19; Stop 43
ttggaacagtctttgtgctcaattt

SEQ ID NO: 405620 - DNA, 25 bp, Artificial
  probe
  misc_feature (1)..(25): SEQ ID NO: 5280; WAN024D3I; Start 201; Stop 225
ttgtttatccatgtctgtatctctc

SEQ ID NO: 405621 - DNA, 25 bp, Artificial
  probe
  misc_feature (1)..(25): SEQ ID NO: 5280; WAN024D3I; Start 18; Stop 42
cttggaacagtctttgtgctcaatt

SEQ ID NO: 405622 - DNA, 25 bp, Artificial
  probe
  misc_feature (1)..(25): SEQ ID NO: 5280; WAN024D3I; Start 11; Stop 35
ggtcaatcttggaacagtctttgtg

SEQ ID NO: 405623 - DNA, 25 bp, Artificial
  probe
  misc_feature (1)..(25): SEQ ID NO: 5280; WAN024D3I; Start 200; Stop 224
attgtttatccatgtctgtatctct

SEQ ID NO: 405624 - DNA, 25 bp, Artificial
  probe
  misc_feature (1)..(25): SEQ ID NO: 5280; WAN024D3I; Start 53; Stop 77
accgttccatttcaagagcaactaa

SEQ ID NO: 405625 - DNA, 25 bp, Artificial
  probe
  misc_feature (1)..(25): SEQ ID NO: 5280; WAN024D3I; Start 14; Stop 38
caatcttggaacagtctttgtgctc

SEQ ID NO: 405626 - DNA, 25 bp, Artificial
  probe
  misc_feature (1)..(25): SEQ ID NO: 5280; WAN024D3I; Start 10; Stop 34
tggtcaatcttggaacagtctttgt

SEQ ID NO: 405627 - DNA, 25 bp, Artificial
  probe
  misc_feature (1)..(25): SEQ ID NO: 5280; WAN024D3I; Start 203; Stop 227
gtttatccatgtctgtatctctcta

SEQ ID NO: 405628 - DNA, 25 bp, Artificial
  probe
  misc_feature (1)..(25): SEQ ID NO: 5280; WAN024D3I; Start 17; Stop 41
tcttggaacagtctttgtgctcaat

SEQ ID NO: 405629 - DNA, 25 bp, Artificial
  probe
  misc_feature (1)..(25): SEQ ID NO: 5280; WAN024D3I; Start 16; Stop 40
atcttggaacagtctttgtgctcaa

SEQ ID NO: 405630 - DNA, 25 bp, Artificial
  probe
  misc_feature (1)..(25): SEQ ID NO: 5280; WAN024D3I; Start 15; Stop 39
aatcttggaacagtctttgtgctca

SEQ ID NO: 405631 - DNA, 25 bp, Artificial
  probe
  misc_feature (1)..(25): SEQ ID NO: 5280; WAN024D3I; Start 13; Stop 37
tcaatcttggaacagtctttgtgct

SEQ ID NO: 405632 - DNA, 25 bp, Artificial
  probe
  misc_feature (1)..(25): SEQ ID NO: 5280; WAN024D3I; Start 12; Stop 36
gtcaatcttggaacagtctttgtgc

SEQ ID NO: 405633 - DNA, 25 bp, Artificial
  probe
  misc_feature (1)..(25): SEQ ID NO: 5280; WAN024D3I; Start 7; Stop 31
ttttggtcaatcttggaacagtctt

SEQ ID NO: 405634 - DNA, 25 bp, Artificial
  probe
  misc_feature (1)..(25): SEQ ID NO: 5280; WAN024D3I; Start 52; Stop 76
caccgttccatttcaagagcaacta

SEQ ID NO: 405635 - DNA, 25 bp, Artificial
  probe
  misc_feature (1)..(25): SEQ ID NO: 5280; WAN024D3I; Start 204; Stop 228
tttatccatgtctgtatctctctaa

SEQ ID NO: 405636 - DNA, 25 bp, Artificial
  probe
  misc_feature (1)..(25): SEQ ID NO: 5280; WAN024D3I; Start 198; Stop 222
gtattgtttatccatgtctgtatct

SEQ ID NO: 405637 - DNA, 25 bp, Artificial
  probe
  misc_feature (1)..(25): SEQ ID NO: 5280; WAN024D3I; Start 57; Stop 81
ttccatttcaagagcaactaatttt

SEQ ID NO: 405638 - DNA, 25 bp, Artificial
  probe
  misc_feature (1)..(25): SEQ ID NO: 5280; WAN024D3I; Start 20; Stop 44
tggaacagtctttgtgctcaatttt

SEQ ID NO: 405639 - DNA, 25 bp, Artificial
  probe
  misc_feature (1)..(25): SEQ ID NO: 5280; WAN024D3I; Start 199; Stop 223
tattgtttatccatgtctgtatctc

SEQ ID NO: 405640 - DNA, 25 bp, Artificial
  probe
  misc_feature (1)..(25): SEQ ID NO: 5280; WAN024D3I; Start 147; Stop 171
gtgggttgattcaacaaaattctgg

SEQ ID NO: 405641 - DNA, 25 bp, Artificial
  probe
  misc_feature (1)..(25): SEQ ID NO: 5280; WAN024D3I; Start 146; Stop 170
ggtgggttgattcaacaaaattctg

SEQ ID NO: 405642 - DNA, 25 bp, Artificial
  probe
  misc_feature (1)..(25): SEQ ID NO: 5280; WAN024D3I; Start 145; Stop 169
tggtgggttgattcaacaaaattct

SEQ ID NO: 405643 - DNA, 25 bp, Artificial
  probe
  misc_feature (1)..(25): SEQ ID NO: 5280; WAN024D3I; Start 144; Stop 168
gtggtgggttgattcaacaaaattc

SEQ ID NO: 405644 - DNA, 25 bp, Artificial
  probe
  misc_feature (1)..(25): SEQ ID NO: 5280; WAN024D3I; Start 152; Stop 176
ttgattcaacaaaattctggcgcat

SEQ ID NO: 405645 - DNA, 25 bp, Artificial
  probe
  misc_feature (1)..(25): SEQ ID NO: 5280; WAN024D3I; Start 153; Stop 177
tgattcaacaaaattctggcgcatg

SEQ ID NO: 405646 - DNA, 25 bp, Artificial
  probe
  misc_feature (1)..(25): SEQ ID NO: 5281; WAN024CVJ; Start 797; Stop 821
atgcgtctcaaggtcattaactaat

SEQ ID NO: 405647 - DNA, 25 bp, Artificial
  probe
  misc_feature (1)..(25): SEQ ID NO: 5281; WAN024CVJ; Start 796; Stop 820
gatgcgtctcaaggtcattaactaa

SEQ ID NO: 405648 - DNA, 25 bp, Artificial
  probe
  misc_feature (1)..(25): SEQ ID NO: 5281; WAN024CVJ; Start 141; Stop 165
aaatggagagattatgggcttgatt

SEQ ID NO: 405649 - DNA, 25 bp, Artificial
  probe
  misc_feature (1)..(25): SEQ ID NO: 5281; WAN024CVJ; Start 89; Stop 113
gtaagttgtatggtgataaagaggc

SEQ ID NO: 405650 - DNA, 25 bp, Artificial
  probe
  misc_feature (1)..(25): SEQ ID NO: 5281; WAN024CVJ; Start 142; Stop 166
aatggagagattatgggcttgattg

SEQ ID NO: 405651 - DNA, 25 bp, Artificial
  probe
  misc_feature (1)..(25): SEQ ID NO: 5281; WAN024CVJ; Start 200; Stop 224
aatccctagtcagtatcatttcacc

SEQ ID NO: 405652 - DNA, 25 bp, Artificial
  probe
  misc_feature (1)..(25): SEQ ID NO: 5281; WAN024CVJ; Start 201; Stop 225
atccctagtcagtatcatttcaccc

SEQ ID NO: 405653 - DNA, 25 bp, Artificial
  probe
  misc_feature (1)..(25): SEQ ID NO: 5281; WAN024CVJ; Start 88; Stop 112
agtaagttgtatggtgataaagagg

SEQ ID NO: 405654 - DNA, 25 bp, Artificial
  probe
  misc_feature (1)..(25): SEQ ID NO: 5281; WAN024CVJ; Start 206; Stop 230
tagtcagtatcatttcacccagcag

SEQ ID NO: 405655 - DNA, 25 bp, Artificial
  probe
  misc_feature (1)..(25): SEQ ID NO: 5281; WAN024CVJ; Start 148; Stop 172
gagattatgggcttgattggtcata

SEQ ID NO: 405656 - DNA, 25 bp, Artificial
  probe
  misc_feature (1)..(25): SEQ ID NO: 5281; WAN024CVJ; Start 147; Stop 171
agagattatgggcttgattggtcat

SEQ ID NO: 405657 - DNA, 25 bp, Artificial
  probe
  misc_feature (1)..(25): SEQ ID NO: 5281; WAN024CVJ; Start 143; Stop 167
atggagagattatgggcttgattgg

SEQ ID NO: 405658 - DNA, 25 bp, Artificial
  probe
  misc_feature (1)..(25): SEQ ID NO: 5281; WAN024CVJ; Start 205; Stop 229
ctagtcagtatcatttcacccagca

SEQ ID NO: 405659 - DNA, 25 bp, Artificial
  probe
  misc_feature (1)..(25): SEQ ID NO: 5281; WAN024CVJ; Start 203; Stop 227
ccctagtcagtatcatttcacccag

SEQ ID NO: 405660 - DNA, 25 bp, Artificial
  probe
  misc_feature (1)..(25): SEQ ID NO: 5281; WAN024CVJ; Start 199; Stop 223
aaatccctagtcagtatcatttcac

SEQ ID NO: 405661 - DNA, 25 bp, Artificial
  probe
  misc_feature (1)..(25): SEQ ID NO: 5281; WAN024CVJ; Start 202; Stop 226
tccctagtcagtatcatttcaccca

SEQ ID NO: 405662 - DNA, 25 bp, Artificial
  probe
  misc_feature (1)..(25): SEQ ID NO: 5281; WAN024CVJ; Start 146; Stop 170
gagagattatgggcttgattggtca

SEQ ID NO: 405663 - DNA, 25 bp, Artificial
  probe
  misc_feature (1)..(25): SEQ ID NO: 5281; WAN024CVJ; Start 145; Stop 169
ggagagattatgggcttgattggtc

SEQ ID NO: 405664 - DNA, 25 bp, Artificial
  probe
  misc_feature (1)..(25): SEQ ID NO: 5281; WAN024CVJ; Start 204; Stop 228
cctagtcagtatcatttcacccagc

SEQ ID NO: 405665 - DNA, 25 bp, Artificial
  probe
  misc_feature (1)..(25): SEQ ID NO: 5281; WAN024CVJ; Start 83; Stop 107
atgttagtaagttgtatggtgataa

SEQ ID NO: 405666 - DNA, 25 bp, Artificial
  probe
  misc_feature (1)..(25): SEQ ID NO: 5281; WAN024CVJ; Start 82; Stop 106
aatgttagtaagttgtatggtgata

SEQ ID NO: 405667 - DNA, 25 bp, Artificial
  probe
  misc_feature (1)..(25): SEQ ID NO: 5281; WAN024CVJ; Start 140; Stop 164
aaaatggagagattatgggcttgat

SEQ ID NO: 405668 - DNA, 25 bp, Artificial
  probe
  misc_feature (1)..(25): SEQ ID NO: 5281; WAN024CVJ; Start 136; Stop 160
attgaaaatggagagattatgggct

SEQ ID NO: 405669 - DNA, 25 bp, Artificial
  probe
  misc_feature (1)..(25): SEQ ID NO: 5281; WAN024CVJ; Start 135; Stop 159
gattgaaaatggagagattatgggc

SEQ ID NO: 405670 - DNA, 25 bp, Artificial
  probe
  misc_feature (1)..(25): SEQ ID NO: 5281; WAN024CVJ; Start 137; Stop 161
ttgaaaatggagagattatgggctt

SEQ ID NO: 405671 - DNA, 25 bp, Artificial
  probe
  misc_feature (1)..(25): SEQ ID NO: 5281; WAN024CVJ; Start 139; Stop 163
gaaaatggagagattatgggcttga

SEQ ID NO: 405672 - DNA, 25 bp, Artificial
  probe
  misc_feature (1)..(25): SEQ ID NO: 5281; WAN024CVJ; Start 153; Stop 177
tatgggcttgattggtcataatggg

SEQ ID NO: 405673 - DNA, 25 bp, Artificial
  probe
  misc_feature (1)..(25): SEQ ID NO: 5281; WAN024CVJ; Start 138; Stop 162
tgaaaatggagagattatgggcttg

SEQ ID NO: 405674 - DNA, 25 bp, Artificial
  probe
  misc_feature (1)..(25): SEQ ID NO: 5281; WAN024CVJ; Start 144; Stop 168
tggagagattatgggcttgattggt

SEQ ID NO: 405675 - DNA, 25 bp, Artificial
  probe
  misc_feature (1)..(25): SEQ ID NO: 5281; WAN024CVJ; Start 134; Stop 158
agattgaaaatggagagattatggg

SEQ ID NO: 405676 - DNA, 25 bp, Artificial
  probe
  misc_feature (1)..(25): SEQ ID NO: 5281; WAN024CVJ; Start 90; Stop 114
taagttgtatggtgataaagaggcc

SEQ ID NO: 405677 - DNA, 25 bp, Artificial
  probe
  misc_feature (1)..(25): SEQ ID NO: 5281; WAN024CVJ; Start 81; Stop 105
aaatgttagtaagttgtatggtgat

SEQ ID NO: 405678 - DNA, 25 bp, Artificial
  probe
  misc_feature (1)..(25): SEQ ID NO: 5281; WAN024CVJ; Start 207; Stop 231
agtcagtatcatttcacccagcagt

SEQ ID NO: 405679 - DNA, 25 bp, Artificial
  probe
  misc_feature (1)..(25): SEQ ID NO: 5282; WAN0249UR; Start 23; Stop 47
cattttgttcttgtttgaaagcgat

SEQ ID NO: 405680 - DNA, 25 bp, Artificial
  probe
  misc_feature (1)..(25): SEQ ID NO: 5282; WAN0249UR; Start 54; Stop 78
cgcccttacgactattattttatca

SEQ ID NO: 405681 - DNA, 25 bp, Artificial
  probe
  misc_feature (1)..(25): SEQ ID NO: 5282; WAN0249UR; Start 26; Stop 50
tttgttcttgtttgaaagcgatttt

SEQ ID NO: 405682 - DNA, 25 bp, Artificial
  probe
  misc_feature (1)..(25): SEQ ID NO: 5282; WAN0249UR; Start 25; Stop 49
ttttgttcttgtttgaaagcgattt

SEQ ID NO: 405683 - DNA, 25 bp, Artificial
  probe
  misc_feature (1)..(25): SEQ ID NO: 5282; WAN0249UR; Start 24; Stop 48
attttgttcttgtttgaaagcgatt

SEQ ID NO: 405684 - DNA, 25 bp, Artificial
  probe
  misc_feature (1)..(25): SEQ ID NO: 5282; WAN0249UR; Start 49; Stop 73
ttattcgcccttacgactattattt

SEQ ID NO: 405685 - DNA, 25 bp, Artificial
  probe
  misc_feature (1)..(25): SEQ ID NO: 5282; WAN0249UR; Start 48; Stop 72
tttattcgcccttacgactattatt

SEQ ID NO: 405686 - DNA, 25 bp, Artificial
  probe
  misc_feature (1)..(25): SEQ ID NO: 5282; WAN0249UR; Start 27; Stop 51
ttgttcttgtttgaaagcgatttta

SEQ ID NO: 405687 - DNA, 25 bp, Artificial
  probe
  misc_feature (1)..(25): SEQ ID NO: 5282; WAN0249UR; Start 28; Stop 52
tgttcttgtttgaaagcgattttat

SEQ ID NO: 405688 - DNA, 25 bp, Artificial
  probe
  misc_feature (1)..(25): SEQ ID NO: 5282; WAN0249UR; Start 22; Stop 46
acattttgttcttgtttgaaagcga

SEQ ID NO: 405689 - DNA, 25 bp, Artificial
  probe
  misc_feature (1)..(25): SEQ ID NO: 5282; WAN0249UR; Start 29; Stop 53
gttcttgtttgaaagcgattttatt

SEQ ID NO: 405690 - DNA, 25 bp, Artificial
  probe
  misc_feature (1)..(25): SEQ ID NO: 5282; WAN0249UR; Start 30; Stop 54
ttcttgtttgaaagcgattttattc

SEQ ID NO: 405691 - DNA, 25 bp, Artificial
  probe
  misc_feature (1)..(25): SEQ ID NO: 5282; WAN0249UR; Start 87; Stop 111
aaatatgtcaagcgttttgcagaaa

SEQ ID NO: 405692 - DNA, 25 bp, Artificial
  probe
  misc_feature (1)..(25): SEQ ID NO: 5282; WAN0249UR; Start 55; Stop 79
gcccttacgactattattttatcat

SEQ ID NO: 405693 - DNA, 25 bp, Artificial
  probe
  misc_feature (1)..(25): SEQ ID NO: 5282; WAN0249UR; Start 45; Stop 69
gattttattcgcccttacgactatt

SEQ ID NO: 405694 - DNA, 25 bp, Artificial
  probe
  misc_feature (1)..(25): SEQ ID NO: 5282; WAN0249UR; Start 31; Stop 55
tcttgtttgaaagcgattttattcg

SEQ ID NO: 405695 - DNA, 25 bp, Artificial
  probe
  misc_feature (1)..(25): SEQ ID NO: 5282; WAN0249UR; Start 44; Stop 68
cgattttattcgcccttacgactat

SEQ ID NO: 405696 - DNA, 25 bp, Artificial
  probe
  misc_feature (1)..(25): SEQ ID NO: 5282; WAN0249UR; Start 88; Stop 112
aatatgtcaagcgttttgcagaaaa

SEQ ID NO: 405697 - DNA, 25 bp, Artificial
  probe
  misc_feature (1)..(25): SEQ ID NO: 5282; WAN0249UR; Start 86; Stop 110
aaaatatgtcaagcgttttgcagaa

SEQ ID NO: 405698 - DNA, 25 bp, Artificial
  probe
  misc_feature (1)..(25): SEQ ID NO: 5282; WAN0249UR; Start 53; Stop 77
tcgcccttacgactattattttatc

SEQ ID NO: 405699 - DNA, 25 bp, Artificial
  probe
  misc_feature (1)..(25): SEQ ID NO: 5282; WAN0249UR; Start 52; Stop 76
ttcgcccttacgactattattttat

SEQ ID NO: 405700 - DNA, 25 bp, Artificial
  probe
  misc_feature (1)..(25): SEQ ID NO: 5282; WAN0249UR; Start 51; Stop 75
attcgcccttacgactattatttta

SEQ ID NO: 405701 - DNA, 25 bp, Artificial
  probe
  misc_feature (1)..(25): SEQ ID NO: 5282; WAN0249UR; Start 50; Stop 74
tattcgcccttacgactattatttt

SEQ ID NO: 405702 - DNA, 25 bp, Artificial
  probe
  misc_feature (1)..(25): SEQ ID NO: 5282; WAN0249UR; Start 47; Stop 71
ttttattcgcccttacgactattat

SEQ ID NO: 405703 - DNA, 25 bp, Artificial
  probe
  misc_feature (1)..(25): SEQ ID NO: 5282; WAN0249UR; Start 46; Stop 70
attttattcgcccttacgactatta

SEQ ID NO: 405704 - DNA, 25 bp, Artificial
  probe
  misc_feature (1)..(25): SEQ ID NO: 5282; WAN0249UR; Start 21; Stop 45
aacattttgttcttgtttgaaagcg

SEQ ID NO: 405705 - DNA, 25 bp, Artificial
  probe
  misc_feature (1)..(25): SEQ ID NO: 5282; WAN0249UR; Start 20; Stop 44
taacattttgttcttgtttgaaagc

SEQ ID NO: 405706 - DNA, 25 bp, Artificial
  probe
  misc_feature (1)..(25): SEQ ID NO: 5282; WAN0249UR; Start 56; Stop 80
cccttacgactattattttatcatg

SEQ ID NO: 405707 - DNA, 25 bp, Artificial
  probe
  misc_feature (1)..(25): SEQ ID NO: 5282; WAN0249UR; Start 19; Stop 43
ataacattttgttcttgtttgaaag

SEQ ID NO: 405708 - DNA, 25 bp, Artificial
  probe
  misc_feature (1)..(25): SEQ ID NO: 5283; WAN024CVX; Start 73; Stop 97
gatacctgggaagatgaagacattt

SEQ ID NO: 405709 - DNA, 25 bp, Artificial
  probe
  misc_feature (1)..(25): SEQ ID NO: 5283; WAN024CVX; Start 74; Stop 98
atacctgggaagatgaagacatttg

SEQ ID NO: 405710 - DNA, 25 bp, Artificial
  probe
  misc_feature (1)..(25): SEQ ID NO: 5283; WAN024CVX; Start 83; Stop 107
aagatgaagacatttgcttgaccag

SEQ ID NO: 405711 - DNA, 25 bp, Artificial
  probe
  misc_feature (1)..(25): SEQ ID NO: 5283; WAN024CVX; Start 82; Stop 106
gaagatgaagacatttgcttgacca

SEQ ID NO: 405712 - DNA, 25 bp, Artificial
  probe
  misc_feature (1)..(25): SEQ ID NO: 5283; WAN024CVX; Start 72; Stop 96
cgatacctgggaagatgaagacatt

SEQ ID NO: 405713 - DNA, 25 bp, Artificial
  probe
  misc_feature (1)..(25): SEQ ID NO: 5283; WAN024CVX; Start 81; Stop 105
ggaagatgaagacatttgcttgacc

SEQ ID NO: 405714 - DNA, 25 bp, Artificial
  probe
  misc_feature (1)..(25): SEQ ID NO: 5283; WAN024CVX; Start 80; Stop 104
gggaagatgaagacatttgcttgac

SEQ ID NO: 405715 - DNA, 25 bp, Artificial
  probe
  misc_feature (1)..(25): SEQ ID NO: 5283; WAN024CVX; Start 78; Stop 102
ctgggaagatgaagacatttgcttg

SEQ ID NO: 405716 - DNA, 25 bp, Artificial
  probe
  misc_feature (1)..(25): SEQ ID NO: 5283; WAN024CVX; Start 222; Stop 246
cttcaacgaccttatcaacgctttc

SEQ ID NO: 405717 - DNA, 25 bp, Artificial
  probe
  misc_feature (1)..(25): SEQ ID NO: 5283; WAN024CVX; Start 79; Stop 103
tgggaagatgaagacatttgcttga

SEQ ID NO: 405718 - DNA, 25 bp, Artificial
  probe
  misc_feature (1)..(25): SEQ ID NO: 5283; WAN024CVX; Start 229; Stop 253
gaccttatcaacgctttcaccaaac

SEQ ID NO: 405719 - DNA, 25 bp, Artificial
  probe
  misc_feature (1)..(25): SEQ ID NO: 5283; WAN024CVX; Start 75; Stop 99
tacctgggaagatgaagacatttgc

SEQ ID NO: 405720 - DNA, 25 bp, Artificial
  probe
  misc_feature (1)..(25): SEQ ID NO: 5283; WAN024CVX; Start 223; Stop 247
ttcaacgaccttatcaacgctttca

SEQ ID NO: 405721 - DNA, 25 bp, Artificial
  probe
  misc_feature (1)..(25): SEQ ID NO: 5283; WAN024CVX; Start 215; Stop 239
ttagttgcttcaacgaccttatcaa

SEQ ID NO: 405722 - DNA, 25 bp, Artificial
  probe
  misc_feature (1)..(25): SEQ ID NO: 5283; WAN024CVX; Start 77; Stop 101
cctgggaagatgaagacatttgctt

SEQ ID NO: 405723 - DNA, 25 bp, Artificial
  probe
  misc_feature (1)..(25): SEQ ID NO: 5283; WAN024CVX; Start 216; Stop 240
tagttgcttcaacgaccttatcaac

SEQ ID NO: 405724 - DNA, 25 bp, Artificial
  probe
  misc_feature (1)..(25): SEQ ID NO: 5283; WAN024CVX; Start 232; Stop 256
cttatcaacgctttcaccaaaccct

SEQ ID NO: 405725 - DNA, 25 bp, Artificial
  probe
  misc_feature (1)..(25): SEQ ID NO: 5283; WAN024CVX; Start 224; Stop 248
tcaacgaccttatcaacgctttcac

SEQ ID NO: 405726 - DNA, 25 bp, Artificial
  probe
  misc_feature (1)..(25): SEQ ID NO: 5283; WAN024CVX; Start 71; Stop 95
tcgatacctgggaagatgaagacat

SEQ ID NO: 405727 - DNA, 25 bp, Artificial
  probe
  misc_feature (1)..(25): SEQ ID NO: 5283; WAN024CVX; Start 233; Stop 257
ttatcaacgctttcaccaaaccctg

SEQ ID NO: 405728 - DNA, 25 bp, Artificial
  probe
  misc_feature (1)..(25): SEQ ID NO: 5283; WAN024CVX; Start 230; Stop 254
accttatcaacgctttcaccaaacc

SEQ ID NO: 405729 - DNA, 25 bp, Artificial
  probe
  misc_feature (1)..(25): SEQ ID NO: 5283; WAN024CVX; Start 228; Stop 252
cgaccttatcaacgctttcaccaaa

SEQ ID NO: 405730 - DNA, 25 bp, Artificial
  probe
  misc_feature (1)..(25): SEQ ID NO: 5283; WAN024CVX; Start 70; Stop 94
ctcgatacctgggaagatgaagaca

SEQ ID NO: 405731 - DNA, 25 bp, Artificial
  probe
  misc_feature (1)..(25): SEQ ID NO: 5283; WAN024CVX; Start 76; Stop 100
acctgggaagatgaagacatttgct

SEQ ID NO: 405732 - DNA, 25 bp, Artificial
  probe
  misc_feature (1)..(25): SEQ ID NO: 5283; WAN024CVX; Start 221; Stop 245
gcttcaacgaccttatcaacgcttt

SEQ ID NO: 405733 - DNA, 25 bp, Artificial
  probe
  misc_feature (1)..(25): SEQ ID NO: 5283; WAN024CVX; Start 214; Stop 238
tttagttgcttcaacgaccttatca

SEQ ID NO: 405734 - DNA, 25 bp, Artificial
  probe
  misc_feature (1)..(25): SEQ ID NO: 5283; WAN024CVX; Start 231; Stop 255
ccttatcaacgctttcaccaaaccc

SEQ ID NO: 405735 - DNA, 25 bp, Artificial
  probe
  misc_feature (1)..(25): SEQ ID NO: 5283; WAN024CVX; Start 225; Stop 249
caacgaccttatcaacgctttcacc

SEQ ID NO: 405736 - DNA, 25 bp, Artificial
  probe
  misc_feature (1)..(25): SEQ ID NO: 5283; WAN024CVX; Start 86; Stop 110
atgaagacatttgcttgaccagcta

SEQ ID NO: 405737 - DNA, 25 bp, Artificial
  probe
  misc_feature (1)..(25): SEQ ID NO: 5283; WAN024CVX; Start 69; Stop 93
cctcgatacctgggaagatgaagac

SEQ ID NO: 405738 - DNA, 25 bp, Artificial
  probe
  misc_feature (1)..(25): SEQ ID NO: 5283; WAN024CVX; Start 234; Stop 258
tatcaacgctttcaccaaaccctga

SEQ ID NO: 405739 - DNA, 25 bp, Artificial
  probe
  misc_feature (1)..(25): SEQ ID NO: 5283; WAN024CVX; Start 84; Stop 108
agatgaagacatttgcttgaccagc

SEQ ID NO: 405740 - DNA, 25 bp, Artificial
  probe
  misc_feature (1)..(25): SEQ ID NO: 5283; WAN024CVX; Start 227; Stop 251
acgaccttatcaacgctttcaccaa

SEQ ID NO: 405741 - DNA, 25 bp, Artificial
  probe
  misc_feature (1)..(25): SEQ ID NO: 5284; WAN024F47; Start 139; Stop 163
cgtattgagaactgctaccatcttg

SEQ ID NO: 405742 - DNA, 25 bp, Artificial
  probe
  misc_feature (1)..(25): SEQ ID NO: 5284; WAN024F47; Start 140; Stop 164
gtattgagaactgctaccatcttgc

SEQ ID NO: 405743 - DNA, 25 bp, Artificial
  probe
  misc_feature (1)..(25): SEQ ID NO: 5284; WAN024F47; Start 62; Stop 86
ggtgtgttatagttggctggagtaa

SEQ ID NO: 405744 - DNA, 25 bp, Artificial
  probe
  misc_feature (1)..(25): SEQ ID NO: 5284; WAN024F47; Start 120; Stop 144
cttcaatgacctctactggcgtatt

SEQ ID NO: 405745 - DNA, 25 bp, Artificial
  probe
  misc_feature (1)..(25): SEQ ID NO: 5284; WAN024F47; Start 63; Stop 87
gtgtgttatagttggctggagtaac

SEQ ID NO: 405746 - DNA, 25 bp, Artificial
  probe
  misc_feature (1)..(25): SEQ ID NO: 5284; WAN024F47; Start 141; Stop 165
tattgagaactgctaccatcttgcc

SEQ ID NO: 405747 - DNA, 25 bp, Artificial
  probe
  misc_feature (1)..(25): SEQ ID NO: 5284; WAN024F47; Start 61; Stop 85
aggtgtgttatagttggctggagta

SEQ ID NO: 405748 - DNA, 25 bp, Artificial
  probe
  misc_feature (1)..(25): SEQ ID NO: 5284; WAN024F47; Start 132; Stop 156
ctactggcgtattgagaactgctac

SEQ ID NO: 405749 - DNA, 25 bp, Artificial
  probe
  misc_feature (1)..(25): SEQ ID NO: 5284; WAN024F47; Start 119; Stop 143
tcttcaatgacctctactggcgtat

SEQ ID NO: 405750 - DNA, 25 bp, Artificial
  probe
  misc_feature (1)..(25): SEQ ID NO: 5284; WAN024F47; Start 138; Stop 162
gcgtattgagaactgctaccatctt

SEQ ID NO: 405751 - DNA, 25 bp, Artificial
  probe
  misc_feature (1)..(25): SEQ ID NO: 5284; WAN024F47; Start 184; Stop 208
ttcttccatataggctccacgctta

SEQ ID NO: 405752 - DNA, 25 bp, Artificial
  probe
  misc_feature (1)..(25): SEQ ID NO: 5284; WAN024F47; Start 131; Stop 155
tctactggcgtattgagaactgcta

SEQ ID NO: 405753 - DNA, 25 bp, Artificial
  probe
  misc_feature (1)..(25): SEQ ID NO: 5284; WAN024F47; Start 64; Stop 88
tgtgttatagttggctggagtaacc

SEQ ID NO: 405754 - DNA, 25 bp, Artificial
  probe
  misc_feature (1)..(25): SEQ ID NO: 5284; WAN024F47; Start 118; Stop 142
ttcttcaatgacctctactggcgta

SEQ ID NO: 405755 - DNA, 25 bp, Artificial
  probe
  misc_feature (1)..(25): SEQ ID NO: 5284; WAN024F47; Start 67; Stop 91
gttatagttggctggagtaaccact

SEQ ID NO: 405756 - DNA, 25 bp, Artificial
  probe
  misc_feature (1)..(25): SEQ ID NO: 5284; WAN024F47; Start 185; Stop 209
tcttccatataggctccacgcttag

SEQ ID NO: 405757 - DNA, 25 bp, Artificial
  probe
  misc_feature (1)..(25): SEQ ID NO: 5284; WAN024F47; Start 66; Stop 90
tgttatagttggctggagtaaccac

SEQ ID NO: 405758 - DNA, 25 bp, Artificial
  probe
  misc_feature (1)..(25): SEQ ID NO: 5284; WAN024F47; Start 65; Stop 89
gtgttatagttggctggagtaacca

SEQ ID NO: 405759 - DNA, 25 bp, Artificial
  probe
  misc_feature (1)..(25): SEQ ID NO: 5284; WAN024F47; Start 125; Stop 149
atgacctctactggcgtattgagaa

SEQ ID NO: 405760 - DNA, 25 bp, Artificial
  probe
  misc_feature (1)..(25): SEQ ID NO: 5284; WAN024F47; Start 124; Stop 148
aatgacctctactggcgtattgaga

SEQ ID NO: 405761 - DNA, 25 bp, Artificial
  probe
  misc_feature (1)..(25): SEQ ID NO: 5284; WAN024F47; Start 273; Stop 297
caagagacaaaccagcaaccatatc

SEQ ID NO: 405762 - DNA, 25 bp, Artificial
  probe
  misc_feature (1)..(25): SEQ ID NO: 5284; WAN024F47; Start 113; Stop 137
caggcttcttcaatgacctctactg

SEQ ID NO: 405763 - DNA, 25 bp, Artificial
  probe
  misc_feature (1)..(25): SEQ ID NO: 5284; WAN024F47; Start 111; Stop 135
gacaggcttcttcaatgacctctac

SEQ ID NO: 405764 - DNA, 25 bp, Artificial
  probe
  misc_feature (1)..(25): SEQ ID NO: 5284; WAN024F47; Start 274; Stop 298
aagagacaaaccagcaaccatatca

SEQ ID NO: 405765 - DNA, 25 bp, Artificial
  probe
  misc_feature (1)..(25): SEQ ID NO: 5284; WAN024F47; Start 112; Stop 136
acaggcttcttcaatgacctctact

SEQ ID NO: 405766 - DNA, 25 bp, Artificial
  probe
  misc_feature (1)..(25): SEQ ID NO: 5284; WAN024F47; Start 110; Stop 134
tgacaggcttcttcaatgacctcta

SEQ ID NO: 405767 - DNA, 25 bp, Artificial
  probe
  misc_feature (1)..(25): SEQ ID NO: 5284; WAN024F47; Start 121; Stop 145
ttcaatgacctctactggcgtattg

SEQ ID NO: 405768 - DNA, 25 bp, Artificial
  probe
  misc_feature (1)..(25): SEQ ID NO: 5284; WAN024F47; Start 275; Stop 299
agagacaaaccagcaaccatatcag

SEQ ID NO: 405769 - DNA, 25 bp, Artificial
  probe
  misc_feature (1)..(25): SEQ ID NO: 5284; WAN024F47; Start 127; Stop 151
gacctctactggcgtattgagaact

SEQ ID NO: 405770 - DNA, 25 bp, Artificial
  probe
  misc_feature (1)..(25): SEQ ID NO: 5284; WAN024F47; Start 52; Stop 76
gatttgtgcaggtgtgttatagttg

SEQ ID NO: 405771 - DNA, 25 bp, Artificial
  probe
  misc_feature (1)..(25): SEQ ID NO: 5284; WAN024F47; Start 254; Stop 278
accaaggcagagtattctccaagag

SEQ ID NO: 405772 - DNA, 25 bp, Artificial
  probe
  misc_feature (1)..(25): SEQ ID NO: 5284; WAN024F47; Start 183; Stop 207
cttcttccatataggctccacgctt

SEQ ID NO: 405773 - DNA, 25 bp, Artificial
  probe
  misc_feature (1)..(25): SEQ ID NO: 5284; WAN024F47; Start 133; Stop 157
tactggcgtattgagaactgctacc

SEQ ID NO: 405774 - DNA, 25 bp, Artificial
  probe
  misc_feature (1)..(25): SEQ ID NO: 5285; WAN024DD4; Start 93; Stop 117
atcctacaactgtaatactctaact

SEQ ID NO: 405775 - DNA, 25 bp, Artificial
  probe
  misc_feature (1)..(25): SEQ ID NO: 5285; WAN024DD4; Start 94; Stop 118
tcctacaactgtaatactctaacta

SEQ ID NO: 405776 - DNA, 25 bp, Artificial
  probe
  misc_feature (1)..(25): SEQ ID NO: 5285; WAN024DD4; Start 22; Stop 46
gacaatgctgaaaatacagaggatt

SEQ ID NO: 405777 - DNA, 25 bp, Artificial
  probe
  misc_feature (1)..(25): SEQ ID NO: 5285; WAN024DD4; Start 14; Stop 38
ctctggtggacaatgctgaaaatac

SEQ ID NO: 405778 - DNA, 25 bp, Artificial
  probe
  misc_feature (1)..(25): SEQ ID NO: 5285; WAN024DD4; Start 95; Stop 119
cctacaactgtaatactctaactaa

SEQ ID NO: 405779 - DNA, 25 bp, Artificial
  probe
  misc_feature (1)..(25): SEQ ID NO: 5285; WAN024DD4; Start 78; Stop 102
tccttttcagttagtatcctacaac

SEQ ID NO: 405780 - DNA, 25 bp, Artificial
  probe
  misc_feature (1)..(25): SEQ ID NO: 5285; WAN024DD4; Start 21; Stop 45
ggacaatgctgaaaatacagaggat

SEQ ID NO: 405781 - DNA, 25 bp, Artificial
  probe
  misc_feature (1)..(25): SEQ ID NO: 5285; WAN024DD4; Start 92; Stop 116
tatcctacaactgtaatactctaac

SEQ ID NO: 405782 - DNA, 25 bp, Artificial
  probe
  misc_feature (1)..(25): SEQ ID NO: 5285; WAN024DD4; Start 23; Stop 47
acaatgctgaaaatacagaggatta

SEQ ID NO: 405783 - DNA, 25 bp, Artificial
  probe
  misc_feature (1)..(25): SEQ ID NO: 5285; WAN024DD4; Start 27; Stop 51
tgctgaaaatacagaggattacttt

SEQ ID NO: 405784 - DNA, 25 bp, Artificial
  probe
  misc_feature (1)..(25): SEQ ID NO: 5285; WAN024DD4; Start 15; Stop 39
tctggtggacaatgctgaaaataca

SEQ ID NO: 405785 - DNA, 25 bp, Artificial
  probe
  misc_feature (1)..(25): SEQ ID NO: 5285; WAN024DD4; Start 24; Stop 48
caatgctgaaaatacagaggattac

SEQ ID NO: 405786 - DNA, 25 bp, Artificial
  probe
  misc_feature (1)..(25): SEQ ID NO: 5285; WAN024DD4; Start 26; Stop 50
atgctgaaaatacagaggattactt

SEQ ID NO: 405787 - DNA, 25 bp, Artificial
  probe
  misc_feature (1)..(25): SEQ ID NO: 5285; WAN024DD4; Start 25; Stop 49
aatgctgaaaatacagaggattact

SEQ ID NO: 405788 - DNA, 25 bp, Artificial
  probe
  misc_feature (1)..(25): SEQ ID NO: 5285; WAN024DD4; Start 77; Stop 101
atccttttcagttagtatcctacaa

SEQ ID NO: 405789 - DNA, 25 bp, Artificial
  probe
  misc_feature (1)..(25): SEQ ID NO: 5285; WAN024DD4; Start 19; Stop 43
gtggacaatgctgaaaatacagagg

SEQ ID NO: 405790 - DNA, 25 bp, Artificial
  probe
  misc_feature (1)..(25): SEQ ID NO: 5285; WAN024DD4; Start 18; Stop 42
ggtggacaatgctgaaaatacagag

SEQ ID NO: 405791 - DNA, 25 bp, Artificial
  probe
  misc_feature (1)..(25): SEQ ID NO: 5285; WAN024DD4; Start 20; Stop 44
tggacaatgctgaaaatacagagga

SEQ ID NO: 405792 - DNA, 25 bp, Artificial
  probe
  misc_feature (1)..(25): SEQ ID NO: 5285; WAN024DD4; Start 16; Stop 40
ctggtggacaatgctgaaaatacag

SEQ ID NO: 405793 - DNA, 25 bp, Artificial
  probe
  misc_feature (1)..(25): SEQ ID NO: 5285; WAN024DD4; Start 91; Stop 115
gtatcctacaactgtaatactctaa

SEQ ID NO: 405794 - DNA, 25 bp, Artificial
  probe
  misc_feature (1)..(25): SEQ ID NO: 5285; WAN024DD4; Start 68; Stop 92
acttggaatatccttttcagttagt

SEQ ID NO: 405795 - DNA, 25 bp, Artificial
  probe
  misc_feature (1)..(25): SEQ ID NO: 5285; WAN024DD4; Start 17; Stop 41
tggtggacaatgctgaaaatacaga

SEQ ID NO: 405796 - DNA, 25 bp, Artificial
  probe
  misc_feature (1)..(25): SEQ ID NO: 5285; WAN024DD4; Start 13; Stop 37
gctctggtggacaatgctgaaaata

SEQ ID NO: 405797 - DNA, 25 bp, Artificial
  probe
  misc_feature (1)..(25): SEQ ID NO: 5285; WAN024DD4; Start 28; Stop 52
gctgaaaatacagaggattactttc

SEQ ID NO: 405798 - DNA, 25 bp, Artificial
  probe
  misc_feature (1)..(25): SEQ ID NO: 5285; WAN024DD4; Start 76; Stop 100
tatccttttcagttagtatcctaca

SEQ ID NO: 405799 - DNA, 25 bp, Artificial
  probe
  misc_feature (1)..(25): SEQ ID NO: 5285; WAN024DD4; Start 86; Stop 110
agttagtatcctacaactgtaatac

SEQ ID NO: 405800 - DNA, 25 bp, Artificial
  probe
  misc_feature (1)..(25): SEQ ID NO: 5285; WAN024DD4; Start 72; Stop 96
ggaatatccttttcagttagtatcc

SEQ ID NO: 405801 - DNA, 25 bp, Artificial
  probe
  misc_feature (1)..(25): SEQ ID NO: 5285; WAN024DD4; Start 79; Stop 103
ccttttcagttagtatcctacaact

SEQ ID NO: 405802 - DNA, 25 bp, Artificial
  probe
  misc_feature (1)..(25): SEQ ID NO: 5285; WAN024DD4; Start 73; Stop 97
gaatatccttttcagttagtatcct

SEQ ID NO: 405803 - DNA, 25 bp, Artificial
  probe
  misc_feature (1)..(25): SEQ ID NO: 5285; WAN024DD4; Start 4; Stop 28
caaaatttggctctggtggacaatg

SEQ ID NO: 405804 - DNA, 25 bp, Artificial
  probe
  misc_feature (1)..(25): SEQ ID NO: 5285; WAN024DD4; Start 65; Stop 89
aatacttggaatatccttttcagtt

SEQ ID NO: 405805 - DNA, 25 bp, Artificial
  probe
  misc_feature (1)..(25): SEQ ID NO: 5285; WAN024DD4; Start 64; Stop 88
aaatacttggaatatccttttcagt

SEQ ID NO: 405806 - DNA, 25 bp, Artificial
  probe
  misc_feature (1)..(25): SEQ ID NO: 5285; WAN024DD4; Start 69; Stop 93
cttggaatatccttttcagttagta

SEQ ID NO: 405807 - DNA, 25 bp, Artificial
  probe
  misc_feature (1)..(25): SEQ ID NO: 5286; WAN024CDT; Start 87; Stop 111
caaagaaacagcagataaggatgtc

SEQ ID NO: 405808 - DNA, 25 bp, Artificial
  probe
  misc_feature (1)..(25): SEQ ID NO: 5286; WAN024CDT; Start 208; Stop 232
aaagaggttattgctaagttgaaag

SEQ ID NO: 405809 - DNA, 25 bp, Artificial
  probe
  misc_feature (1)..(25): SEQ ID NO: 5286; WAN024CDT; Start 88; Stop 112
aaagaaacagcagataaggatgtcc

SEQ ID NO: 405810 - DNA, 25 bp, Artificial
  probe
  misc_feature (1)..(25): SEQ ID NO: 5286; WAN024CDT; Start 85; Stop 109
ggcaaagaaacagcagataaggatg

SEQ ID NO: 405811 - DNA, 25 bp, Artificial
  probe
  misc_feature (1)..(25): SEQ ID NO: 5286; WAN024CDT; Start 86; Stop 110
gcaaagaaacagcagataaggatgt

SEQ ID NO: 405812 - DNA, 25 bp, Artificial
  probe
  misc_feature (1)..(25): SEQ ID NO: 5286; WAN024CDT; Start 225; Stop 249
gttgaaagcaaacgccctaactaat

SEQ ID NO: 405813 - DNA, 25 bp, Artificial
  probe
  misc_feature (1)..(25): SEQ ID NO: 5286; WAN024CDT; Start 221; Stop 245
ctaagttgaaagcaaacgccctaac

SEQ ID NO: 405814 - DNA, 25 bp, Artificial
  probe
  misc_feature (1)..(25): SEQ ID NO: 5286; WAN024CDT; Start 209; Stop 233
aagaggttattgctaagttgaaagc

SEQ ID NO: 405815 - DNA, 25 bp, Artificial
  probe
  misc_feature (1)..(25): SEQ ID NO: 5286; WAN024CDT; Start 84; Stop 108
gggcaaagaaacagcagataaggat

SEQ ID NO: 405816 - DNA, 25 bp, Artificial
  probe
  misc_feature (1)..(25): SEQ ID NO: 5286; WAN024CDT; Start 89; Stop 113
aagaaacagcagataaggatgtcct

SEQ ID NO: 405817 - DNA, 25 bp, Artificial
  probe
  misc_feature (1)..(25): SEQ ID NO: 5286; WAN024CDT; Start 207; Stop 231
taaagaggttattgctaagttgaaa

SEQ ID NO: 405818 - DNA, 25 bp, Artificial
  probe
  misc_feature (1)..(25): SEQ ID NO: 5286; WAN024CDT; Start 206; Stop 230
ttaaagaggttattgctaagttgaa

SEQ ID NO: 405819 - DNA, 25 bp, Artificial
  probe
  misc_feature (1)..(25): SEQ ID NO: 5286; WAN024CDT; Start 205; Stop 229
cttaaagaggttattgctaagttga

SEQ ID NO: 405820 - DNA, 25 bp, Artificial
  probe
  misc_feature (1)..(25): SEQ ID NO: 5286; WAN024CDT; Start 204; Stop 228
tcttaaagaggttattgctaagttg

SEQ ID NO: 405821 - DNA, 25 bp, Artificial
  probe
  misc_feature (1)..(25): SEQ ID NO: 5286; WAN024CDT; Start 143; Stop 167
cagttttgttcttggcagatgaaaa

SEQ ID NO: 405822 - DNA, 25 bp, Artificial
  probe
  misc_feature (1)..(25): SEQ ID NO: 5286; WAN024CDT; Start 198; Stop 222
tgataatcttaaagaggttattgct

SEQ ID NO: 405823 - DNA, 25 bp, Artificial
  probe
  misc_feature (1)..(25): SEQ ID NO: 5286; WAN024CDT; Start 115; Stop 139
gaaaactctcaagaagaacttcaaa

SEQ ID NO: 405824 - DNA, 25 bp, Artificial
  probe
  misc_feature (1)..(25): SEQ ID NO: 5286; WAN024CDT; Start 203; Stop 227
atcttaaagaggttattgctaagtt

SEQ ID NO: 405825 - DNA, 25 bp, Artificial
  probe
  misc_feature (1)..(25): SEQ ID NO: 5286; WAN024CDT; Start 202; Stop 226
aatcttaaagaggttattgctaagt

SEQ ID NO: 405826 - DNA, 25 bp, Artificial
  probe
  misc_feature (1)..(25): SEQ ID NO: 5286; WAN024CDT; Start 142; Stop 166
gcagttttgttcttggcagatgaaa

SEQ ID NO: 405827 - DNA, 25 bp, Artificial
  probe
  misc_feature (1)..(25): SEQ ID NO: 5286; WAN024CDT; Start 139; Stop 163
aaagcagttttgttcttggcagatg

SEQ ID NO: 405828 - DNA, 25 bp, Artificial
  probe
  misc_feature (1)..(25): SEQ ID NO: 5286; WAN024CDT; Start 93; Stop 117
aacagcagataaggatgtccttgaa

SEQ ID NO: 405829 - DNA, 25 bp, Artificial
  probe
  misc_feature (1)..(25): SEQ ID NO: 5286; WAN024CDT; Start 116; Stop 140
aaaactctcaagaagaacttcaaaa

SEQ ID NO: 405830 - DNA, 25 bp, Artificial
  probe
  misc_feature (1)..(25): SEQ ID NO: 5286; WAN024CDT; Start 138; Stop 162
aaaagcagttttgttcttggcagat

SEQ ID NO: 405831 - DNA, 25 bp, Artificial
  probe
  misc_feature (1)..(25): SEQ ID NO: 5286; WAN024CDT; Start 224; Stop 248
agttgaaagcaaacgccctaactaa

SEQ ID NO: 405832 - DNA, 25 bp, Artificial
  probe
  misc_feature (1)..(25): SEQ ID NO: 5286; WAN024CDT; Start 223; Stop 247
aagttgaaagcaaacgccctaacta

SEQ ID NO: 405833 - DNA, 25 bp, Artificial
  probe
  misc_feature (1)..(25): SEQ ID NO: 5286; WAN024CDT; Start 222; Stop 246
taagttgaaagcaaacgccctaact

SEQ ID NO: 405834 - DNA, 25 bp, Artificial
  probe
  misc_feature (1)..(25): SEQ ID NO: 5286; WAN024CDT; Start 197; Stop 221
ttgataatcttaaagaggttattgc

SEQ ID NO: 405835 - DNA, 25 bp, Artificial
  probe
  misc_feature (1)..(25): SEQ ID NO: 5286; WAN024CDT; Start 141; Stop 165
agcagttttgttcttggcagatgaa

SEQ ID NO: 405836 - DNA, 25 bp, Artificial
  probe
  misc_feature (1)..(25): SEQ ID NO: 5286; WAN024CDT; Start 140; Stop 164
aagcagttttgttcttggcagatga

SEQ ID NO: 405837 - DNA, 25 bp, Artificial
  probe
  misc_feature (1)..(25): SEQ ID NO: 5286; WAN024CDT; Start 114; Stop 138
tgaaaactctcaagaagaacttcaa

SEQ ID NO: 405838 - DNA, 25 bp, Artificial
  probe
  misc_feature (1)..(25): SEQ ID NO: 5286; WAN024CDT; Start 113; Stop 137
ttgaaaactctcaagaagaacttca

SEQ ID NO: 405839 - DNA, 25 bp, Artificial
  probe
  misc_feature (1)..(25): SEQ ID NO: 5286; WAN024CDT; Start 220; Stop 244
gctaagttgaaagcaaacgccctaa

SEQ ID NO: 405840 - DNA, 25 bp, Artificial
  probe
  misc_feature (1)..(25): SEQ ID NO: 5287; WAN024EZY; Start 193; Stop 217
aatggcaataatctctacaccgtat

SEQ ID NO: 405841 - DNA, 25 bp, Artificial
  probe
  misc_feature (1)..(25): SEQ ID NO: 5287; WAN024EZY; Start 192; Stop 216
caatggcaataatctctacaccgta

SEQ ID NO: 405842 - DNA, 25 bp, Artificial
  probe
  misc_feature (1)..(25): SEQ ID NO: 5287; WAN024EZY; Start 200; Stop 224
ataatctctacaccgtattgaccaa

SEQ ID NO: 405843 - DNA, 25 bp, Artificial
  probe
  misc_feature (1)..(25): SEQ ID NO: 5287; WAN024EZY; Start 194; Stop 218
atggcaataatctctacaccgtatt

SEQ ID NO: 405844 - DNA, 25 bp, Artificial
  probe
  misc_feature (1)..(25): SEQ ID NO: 5287; WAN024EZY; Start 199; Stop 223
aataatctctacaccgtattgacca

SEQ ID NO: 405845 - DNA, 25 bp, Artificial
  probe
  misc_feature (1)..(25): SEQ ID NO: 5287; WAN024EZY; Start 202; Stop 226
aatctctacaccgtattgaccaatt

SEQ ID NO: 405846 - DNA, 25 bp, Artificial
  probe
  misc_feature (1)..(25): SEQ ID NO: 5287; WAN024EZY; Start 189; Stop 213
ttccaatggcaataatctctacacc

SEQ ID NO: 405847 - DNA, 25 bp, Artificial
  probe
  misc_feature (1)..(25): SEQ ID NO: 5287; WAN024EZY; Start 204; Stop 228
tctctacaccgtattgaccaattaa

SEQ ID NO: 405848 - DNA, 25 bp, Artificial
  probe
  misc_feature (1)..(25): SEQ ID NO: 5287; WAN024EZY; Start 203; Stop 227
atctctacaccgtattgaccaatta

SEQ ID NO: 405849 - DNA, 25 bp, Artificial
  probe
  misc_feature (1)..(25): SEQ ID NO: 5287; WAN024EZY; Start 201; Stop 225
taatctctacaccgtattgaccaat

SEQ ID NO: 405850 - DNA, 25 bp, Artificial
  probe
  misc_feature (1)..(25): SEQ ID NO: 5287; WAN024EZY; Start 190; Stop 214
tccaatggcaataatctctacaccg

SEQ ID NO: 405851 - DNA, 25 bp, Artificial
  probe
  misc_feature (1)..(25): SEQ ID NO: 5287; WAN024EZY; Start 95; Stop 119
gcaccactttcattaacgataacat

SEQ ID NO: 405852 - DNA, 25 bp, Artificial
  probe
  misc_feature (1)..(25): SEQ ID NO: 5287; WAN024EZY; Start 85; Stop 109
atagacagaagcaccactttcatta

SEQ ID NO: 405853 - DNA, 25 bp, Artificial
  probe
  misc_feature (1)..(25): SEQ ID NO: 5287; WAN024EZY; Start 93; Stop 117
aagcaccactttcattaacgataac

SEQ ID NO: 405854 - DNA, 25 bp, Artificial
  probe
  misc_feature (1)..(25): SEQ ID NO: 5287; WAN024EZY; Start 92; Stop 116
gaagcaccactttcattaacgataa

SEQ ID NO: 405855 - DNA, 25 bp, Artificial
  probe
  misc_feature (1)..(25): SEQ ID NO: 5287; WAN024EZY; Start 86; Stop 110
tagacagaagcaccactttcattaa

SEQ ID NO: 405856 - DNA, 25 bp, Artificial
  probe
  misc_feature (1)..(25): SEQ ID NO: 5287; WAN024EZY; Start 106; Stop 130
attaacgataacatagctgacttca

SEQ ID NO: 405857 - DNA, 25 bp, Artificial
  probe
  misc_feature (1)..(25): SEQ ID NO: 5287; WAN024EZY; Start 91; Stop 115
agaagcaccactttcattaacgata

SEQ ID NO: 405858 - DNA, 25 bp, Artificial
  probe
  misc_feature (1)..(25): SEQ ID NO: 5287; WAN024EZY; Start 84; Stop 108
aatagacagaagcaccactttcatt

SEQ ID NO: 405859 - DNA, 25 bp, Artificial
  probe
  misc_feature (1)..(25): SEQ ID NO: 5287; WAN024EZY; Start 94; Stop 118
agcaccactttcattaacgataaca

SEQ ID NO: 405860 - DNA, 25 bp, Artificial
  probe
  misc_feature (1)..(25): SEQ ID NO: 5287; WAN024EZY; Start 108; Stop 132
taacgataacatagctgacttcagg

SEQ ID NO: 405861 - DNA, 25 bp, Artificial
  probe
  misc_feature (1)..(25): SEQ ID NO: 5287; WAN024EZY; Start 188; Stop 212
tttccaatggcaataatctctacac

SEQ ID NO: 405862 - DNA, 25 bp, Artificial
  probe
  misc_feature (1)..(25): SEQ ID NO: 5287; WAN024EZY; Start 83; Stop 107
gaatagacagaagcaccactttcat

SEQ ID NO: 405863 - DNA, 25 bp, Artificial
  probe
  misc_feature (1)..(25): SEQ ID NO: 5287; WAN024EZY; Start 191; Stop 215
ccaatggcaataatctctacaccgt

SEQ ID NO: 405864 - DNA, 25 bp, Artificial
  probe
  misc_feature (1)..(25): SEQ ID NO: 5287; WAN024EZY; Start 135; Stop 159
aatctttcagaacttccgctacaaa

SEQ ID NO: 405865 - DNA, 25 bp, Artificial
  probe
  misc_feature (1)..(25): SEQ ID NO: 5287; WAN024EZY; Start 134; Stop 158
aaatctttcagaacttccgctacaa

SEQ ID NO: 405866 - DNA, 25 bp, Artificial
  probe
  misc_feature (1)..(25): SEQ ID NO: 5287; WAN024EZY; Start 105; Stop 129
cattaacgataacatagctgacttc

SEQ ID NO: 405867 - DNA, 25 bp, Artificial
  probe
  misc_feature (1)..(25): SEQ ID NO: 5287; WAN024EZY; Start 126; Stop 150
cttcagggaaatctttcagaacttc

SEQ ID NO: 405868 - DNA, 25 bp, Artificial
  probe
  misc_feature (1)..(25): SEQ ID NO: 5287; WAN024EZY; Start 125; Stop 149
acttcagggaaatctttcagaactt

SEQ ID NO: 405869 - DNA, 25 bp, Artificial
  probe
  misc_feature (1)..(25): SEQ ID NO: 5287; WAN024EZY; Start 107; Stop 131
ttaacgataacatagctgacttcag

SEQ ID NO: 405870 - DNA, 25 bp, Artificial
  probe
  misc_feature (1)..(25): SEQ ID NO: 5287; WAN024EZY; Start 98; Stop 122
ccactttcattaacgataacatagc

SEQ ID NO: 405871 - DNA, 25 bp, Artificial
  probe
  misc_feature (1)..(25): SEQ ID NO: 5287; WAN024EZY; Start 104; Stop 128
tcattaacgataacatagctgactt

SEQ ID NO: 405872 - DNA, 25 bp, Artificial
  probe
  misc_feature (1)..(25): SEQ ID NO: 5287; WAN024EZY; Start 103; Stop 127
ttcattaacgataacatagctgact

SEQ ID NO: 405873 - DNA, 25 bp, Artificial
  probe
  misc_feature (1)..(25): SEQ ID NO: 5288; WAN024FLF; Start 39; Stop 63
aatgtttgtcttgtgcttcttcaat

SEQ ID NO: 405874 - DNA, 25 bp, Artificial
  probe
  misc_feature (1)..(25): SEQ ID NO: 5288; WAN024FLF; Start 38; Stop 62
aaatgtttgtcttgtgcttcttcaa

SEQ ID NO: 405875 - DNA, 25 bp, Artificial
  probe
  misc_feature (1)..(25): SEQ ID NO: 5288; WAN024FLF; Start 40; Stop 64
atgtttgtcttgtgcttcttcaatt

SEQ ID NO: 405876 - DNA, 25 bp, Artificial
  probe
  misc_feature (1)..(25): SEQ ID NO: 5288; WAN024FLF; Start 225; Stop 249
ttacctttacttcatcaactgctaa

SEQ ID NO: 405877 - DNA, 25 bp, Artificial
  probe
  misc_feature (1)..(25): SEQ ID NO: 5288; WAN024FLF; Start 224; Stop 248
tttacctttacttcatcaactgcta

SEQ ID NO: 405878 - DNA, 25 bp, Artificial
  probe
  misc_feature (1)..(25): SEQ ID NO: 5288; WAN024FLF; Start 35; Stop 59
atcaaatgtttgtcttgtgcttctt

SEQ ID NO: 405879 - DNA, 25 bp, Artificial
  probe
  misc_feature (1)..(25): SEQ ID NO: 5288; WAN024FLF; Start 34; Stop 58
aatcaaatgtttgtcttgtgcttct

SEQ ID NO: 405880 - DNA, 25 bp, Artificial
  probe
  misc_feature (1)..(25): SEQ ID NO: 5288; WAN024FLF; Start 33; Stop 57
caatcaaatgtttgtcttgtgcttc

SEQ ID NO: 405881 - DNA, 25 bp, Artificial
  probe
  misc_feature (1)..(25): SEQ ID NO: 5288; WAN024FLF; Start 28; Stop 52
ttggtcaatcaaatgtttgtcttgt

SEQ ID NO: 405882 - DNA, 25 bp, Artificial
  probe
  misc_feature (1)..(25): SEQ ID NO: 5288; WAN024FLF; Start 32; Stop 56
tcaatcaaatgtttgtcttgtgctt

SEQ ID NO: 405883 - DNA, 25 bp, Artificial
  probe
  misc_feature (1)..(25): SEQ ID NO: 5288; WAN024FLF; Start 27; Stop 51
cttggtcaatcaaatgtttgtcttg

SEQ ID NO: 405884 - DNA, 25 bp, Artificial
  probe
  misc_feature (1)..(25): SEQ ID NO: 5288; WAN024FLF; Start 26; Stop 50
tcttggtcaatcaaatgtttgtctt

SEQ ID NO: 405885 - DNA, 25 bp, Artificial
  probe
  misc_feature (1)..(25): SEQ ID NO: 5288; WAN024FLF; Start 25; Stop 49
ttcttggtcaatcaaatgtttgtct

SEQ ID NO: 405886 - DNA, 25 bp, Artificial
  probe
  misc_feature (1)..(25): SEQ ID NO: 5288; WAN024FLF; Start 24; Stop 48
gttcttggtcaatcaaatgtttgtc

SEQ ID NO: 405887 - DNA, 25 bp, Artificial
  probe
  misc_feature (1)..(25): SEQ ID NO: 5288; WAN024FLF; Start 36; Stop 60
tcaaatgtttgtcttgtgcttcttc

SEQ ID NO: 405888 - DNA, 25 bp, Artificial
  probe
  misc_feature (1)..(25): SEQ ID NO: 5288; WAN024FLF; Start 29; Stop 53
tggtcaatcaaatgtttgtcttgtg

SEQ ID NO: 405889 - DNA, 25 bp, Artificial
  probe
  misc_feature (1)..(25): SEQ ID NO: 5288; WAN024FLF; Start 37; Stop 61
caaatgtttgtcttgtgcttcttca

SEQ ID NO: 405890 - DNA, 25 bp, Artificial
  probe
  misc_feature (1)..(25): SEQ ID NO: 5288; WAN024FLF; Start 31; Stop 55
gtcaatcaaatgtttgtcttgtgct

SEQ ID NO: 405891 - DNA, 25 bp, Artificial
  probe
  misc_feature (1)..(25): SEQ ID NO: 5288; WAN024FLF; Start 23; Stop 47
cgttcttggtcaatcaaatgtttgt

SEQ ID NO: 405892 - DNA, 25 bp, Artificial
  probe
  misc_feature (1)..(25): SEQ ID NO: 5288; WAN024FLF; Start 30; Stop 54
ggtcaatcaaatgtttgtcttgtgc

SEQ ID NO: 405893 - DNA, 25 bp, Artificial
  probe
  misc_feature (1)..(25): SEQ ID NO: 5288; WAN024FLF; Start 152; Stop 176
atatcattggcaatttcaataacgc

SEQ ID NO: 405894 - DNA, 25 bp, Artificial
  probe
  misc_feature (1)..(25): SEQ ID NO: 5288; WAN024FLF; Start 22; Stop 46
acgttcttggtcaatcaaatgtttg

SEQ ID NO: 405895 - DNA, 25 bp, Artificial
  probe
  misc_feature (1)..(25): SEQ ID NO: 5288; WAN024FLF; Start 21; Stop 45
gacgttcttggtcaatcaaatgttt

SEQ ID NO: 405896 - DNA, 25 bp, Artificial
  probe
  misc_feature (1)..(25): SEQ ID NO: 5288; WAN024FLF; Start 223; Stop 247
ttttacctttacttcatcaactgct

SEQ ID NO: 405897 - DNA, 25 bp, Artificial
  probe
  misc_feature (1)..(25): SEQ ID NO: 5288; WAN024FLF; Start 222; Stop 246
gttttacctttacttcatcaactgc

SEQ ID NO: 405898 - DNA, 25 bp, Artificial
  probe
  misc_feature (1)..(25): SEQ ID NO: 5288; WAN024FLF; Start 221; Stop 245
cgttttacctttacttcatcaactg

SEQ ID NO: 405899 - DNA, 25 bp, Artificial
  probe
  misc_feature (1)..(25): SEQ ID NO: 5288; WAN024FLF; Start 151; Stop 175
catatcattggcaatttcaataacg

SEQ ID NO: 405900 - DNA, 25 bp, Artificial
  probe
  misc_feature (1)..(25): SEQ ID NO: 5288; WAN024FLF; Start 41; Stop 65
tgtttgtcttgtgcttcttcaattg

SEQ ID NO: 405901 - DNA, 25 bp, Artificial
  probe
  misc_feature (1)..(25): SEQ ID NO: 5288; WAN024FLF; Start 141; Stop 165
cgattgtgatcatatcattggcaat

SEQ ID NO: 405902 - DNA, 25 bp, Artificial
  probe
  misc_feature (1)..(25): SEQ ID NO: 5288; WAN024FLF; Start 20; Stop 44
cgacgttcttggtcaatcaaatgtt

SEQ ID NO: 405903 - DNA, 25 bp, Artificial
  probe
  misc_feature (1)..(25): SEQ ID NO: 5288; WAN024FLF; Start 140; Stop 164
acgattgtgatcatatcattggcaa

SEQ ID NO: 405904 - DNA, 25 bp, Artificial
  probe
  misc_feature (1)..(25): SEQ ID NO: 5288; WAN024FLF; Start 6; Stop 30
aagcaatcttagcacgacgttcttg

SEQ ID NO: 405905 - DNA, 25 bp, Artificial
  probe
  misc_feature (1)..(25): SEQ ID NO: 5288; WAN024FLF; Start 139; Stop 163
gacgattgtgatcatatcattggca

SEQ ID NO: 405906 - DNA, 25 bp, Artificial
  probe
  misc_feature (1)..(25): SEQ ID NO: 5289; WAN024FRL; Start 199; Stop 223
aagtatggtgccaaggtctatgtag

SEQ ID NO: 405907 - DNA, 25 bp, Artificial
  probe
  misc_feature (1)..(25): SEQ ID NO: 5289; WAN024FRL; Start 198; Stop 222
caagtatggtgccaaggtctatgta

SEQ ID NO: 405908 - DNA, 25 bp, Artificial
  probe
  misc_feature (1)..(25): SEQ ID NO: 5289; WAN024FRL; Start 1010; Stop 1034
ctgaagtggtttcttatgatgatgc

SEQ ID NO: 405909 - DNA, 25 bp, Artificial
  probe
  misc_feature (1)..(25): SEQ ID NO: 5289; WAN024FRL; Start 1009; Stop 1033
gctgaagtggtttcttatgatgatg

SEQ ID NO: 405910 - DNA, 25 bp, Artificial
  probe
  misc_feature (1)..(25): SEQ ID NO: 5289; WAN024FRL; Start 498; Stop 522
agatgttgaaattgaagcctttgtc

SEQ ID NO: 405911 - DNA, 25 bp, Artificial
  probe
  misc_feature (1)..(25): SEQ ID NO: 5289; WAN024FRL; Start 495; Stop 519
tacagatgttgaaattgaagccttt

SEQ ID NO: 405912 - DNA, 25 bp, Artificial
  probe
  misc_feature (1)..(25): SEQ ID NO: 5289; WAN024FRL; Start 497; Stop 521
cagatgttgaaattgaagcctttgt

SEQ ID NO: 405913 - DNA, 25 bp, Artificial
  probe
  misc_feature (1)..(25): SEQ ID NO: 5289; WAN024FRL; Start 496; Stop 520
acagatgttgaaattgaagcctttg

SEQ ID NO: 405914 - DNA, 25 bp, Artificial
  probe
  misc_feature (1)..(25): SEQ ID NO: 5289; WAN024FRL; Start 540; Stop 564
ttcatactctggacgttgtactctt

SEQ ID NO: 405915 - DNA, 25 bp, Artificial
  probe
  misc_feature (1)..(25): SEQ ID NO: 5289; WAN024FRL; Start 400; Stop 424
tatgaaacccttgagttctggaaag

SEQ ID NO: 405916 - DNA, 25 bp, Artificial
  probe
  misc_feature (1)..(25): SEQ ID NO: 5289; WAN024FRL; Start 399; Stop 423
ctatgaaacccttgagttctggaaa

SEQ ID NO: 405917 - DNA, 25 bp, Artificial
  probe
  misc_feature (1)..(25): SEQ ID NO: 5289; WAN024FRL; Start 628; Stop 652
tacgacctttacgatatgccatttg

SEQ ID NO: 405918 - DNA, 25 bp, Artificial
  probe
  misc_feature (1)..(25): SEQ ID NO: 5289; WAN024FRL; Start 1266; Stop 1290
ttataaggaagatggaaccagcgtc

SEQ ID NO: 405919 - DNA, 25 bp, Artificial
  probe
  misc_feature (1)..(25): SEQ ID NO: 5289; WAN024FRL; Start 636; Stop 660
ttacgatatgccatttgggaaagaa

SEQ ID NO: 405920 - DNA, 25 bp, Artificial
  probe
  misc_feature (1)..(25): SEQ ID NO: 5289; WAN024FRL; Start 635; Stop 659
tttacgatatgccatttgggaaaga

SEQ ID NO: 405921 - DNA, 25 bp, Artificial
  probe
  misc_feature (1)..(25): SEQ ID NO: 5289; WAN024FRL; Start 499; Stop 523
gatgttgaaattgaagcctttgtcc

SEQ ID NO: 405922 - DNA, 25 bp, Artificial
  probe
  misc_feature (1)..(25): SEQ ID NO: 5289; WAN024FRL; Start 494; Stop 518
gtacagatgttgaaattgaagcctt

SEQ ID NO: 405923 - DNA, 25 bp, Artificial
  probe
  misc_feature (1)..(25): SEQ ID NO: 5289; WAN024FRL; Start 454; Stop 478
cgtgaggtttcaatggaagaattag

SEQ ID NO: 405924 - DNA, 25 bp, Artificial
  probe
  misc_feature (1)..(25): SEQ ID NO: 5289; WAN024FRL; Start 455; Stop 479
gtgaggtttcaatggaagaattagc

SEQ ID NO: 405925 - DNA, 25 bp, Artificial
  probe
  misc_feature (1)..(25): SEQ ID NO: 5289; WAN024FRL; Start 1008; Stop 1032
cgctgaagtggtttcttatgatgat

SEQ ID NO: 405926 - DNA, 25 bp, Artificial
  probe
  misc_feature (1)..(25): SEQ ID NO: 5289; WAN024FRL; Start 637; Stop 661
tacgatatgccatttgggaaagaac

SEQ ID NO: 405927 - DNA, 25 bp, Artificial
  probe
  misc_feature (1)..(25): SEQ ID NO: 5289; WAN024FRL; Start 1011; Stop 1035
tgaagtggtttcttatgatgatgcg

SEQ ID NO: 405928 - DNA, 25 bp, Artificial
  probe
  misc_feature (1)..(25): SEQ ID NO: 5289; WAN024FRL; Start 633; Stop 657
cctttacgatatgccatttgggaaa

SEQ ID NO: 405929 - DNA, 25 bp, Artificial
  probe
  misc_feature (1)..(25): SEQ ID NO: 5289; WAN024FRL; Start 501; Stop 525
tgttgaaattgaagcctttgtccat

SEQ ID NO: 405930 - DNA, 25 bp, Artificial
  probe
  misc_feature (1)..(25): SEQ ID NO: 5289; WAN024FRL; Start 500; Stop 524
atgttgaaattgaagcctttgtcca

SEQ ID NO: 405931 - DNA, 25 bp, Artificial
  probe
  misc_feature (1)..(25): SEQ ID NO: 5289; WAN024FRL; Start 1267; Stop 1291
tataaggaagatggaaccagcgtca

SEQ ID NO: 405932 - DNA, 25 bp, Artificial
  probe
  misc_feature (1)..(25): SEQ ID NO: 5289; WAN024FRL; Start 398; Stop 422
actatgaaacccttgagttctggaa

SEQ ID NO: 405933 - DNA, 25 bp, Artificial
  probe
  misc_feature (1)..(25): SEQ ID NO: 5289; WAN024FRL; Start 1003; Stop 1027
tttgtcgctgaagtggtttcttatg

SEQ ID NO: 405934 - DNA, 25 bp, Artificial
  probe
  misc_feature (1)..(25): SEQ ID NO: 5289; WAN024FRL; Start 1002; Stop 1026
gtttgtcgctgaagtggtttcttat

SEQ ID NO: 405935 - DNA, 25 bp, Artificial
  probe
  misc_feature (1)..(25): SEQ ID NO: 5289; WAN024FRL; Start 401; Stop 425
atgaaacccttgagttctggaaaga

SEQ ID NO: 405936 - DNA, 25 bp, Artificial
  probe
  misc_feature (1)..(25): SEQ ID NO: 5289; WAN024FRL; Start 314; Stop 338
tatctgacccagccttgattatgat

SEQ ID NO: 405937 - DNA, 25 bp, Artificial
  probe
  misc_feature (1)..(25): SEQ ID NO: 5289; WAN024FRL; Start 1007; Stop 1031
tcgctgaagtggtttcttatgatga

SEQ ID NO: 405938 - DNA, 25 bp, Artificial
  probe
  misc_feature (1)..(25): SEQ ID NO: 5289; WAN024FRL; Start 1006; Stop 1030
gtcgctgaagtggtttcttatgatg

SEQ ID NO: 405939 - DNA, 25 bp, Artificial
  probe
  misc_feature (1)..(25): SEQ ID NO: 5290; WAN024CEQ; Start 68; Stop 92
ttcaacgaagtctactactgattgt

SEQ ID NO: 405940 - DNA, 25 bp, Artificial
  probe
  misc_feature (1)..(25): SEQ ID NO: 5290; WAN024CEQ; Start 69; Stop 93
tcaacgaagtctactactgattgta

SEQ ID NO: 405941 - DNA, 25 bp, Artificial
  probe
  misc_feature (1)..(25): SEQ ID NO: 5290; WAN024CEQ; Start 70; Stop 94
caacgaagtctactactgattgtac

SEQ ID NO: 405942 - DNA, 25 bp, Artificial
  probe
  misc_feature (1)..(25): SEQ ID NO: 5290; WAN024CEQ; Start 175; Stop 199
tgcgttcaatacctttatagtcaaa

SEQ ID NO: 405943 - DNA, 25 bp, Artificial
  probe
  misc_feature (1)..(25): SEQ ID NO: 5290; WAN024CEQ; Start 167; Stop 191
caagtagttgcgttcaataccttta

SEQ ID NO: 405944 - DNA, 25 bp, Artificial
  probe
  misc_feature (1)..(25): SEQ ID NO: 5290; WAN024CEQ; Start 173; Stop 197
gttgcgttcaatacctttatagtca

SEQ ID NO: 405945 - DNA, 25 bp, Artificial
  probe
  misc_feature (1)..(25): SEQ ID NO: 5290; WAN024CEQ; Start 172; Stop 196
agttgcgttcaatacctttatagtc

SEQ ID NO: 405946 - DNA, 25 bp, Artificial
  probe
  misc_feature (1)..(25): SEQ ID NO: 5290; WAN024CEQ; Start 174; Stop 198
ttgcgttcaatacctttatagtcaa

SEQ ID NO: 405947 - DNA, 25 bp, Artificial
  probe
  misc_feature (1)..(25): SEQ ID NO: 5290; WAN024CEQ; Start 168; Stop 192
aagtagttgcgttcaatacctttat

SEQ ID NO: 405948 - DNA, 25 bp, Artificial
  probe
  misc_feature (1)..(25): SEQ ID NO: 5290; WAN024CEQ; Start 171; Stop 195
tagttgcgttcaatacctttatagt

SEQ ID NO: 405949 - DNA, 25 bp, Artificial
  probe
  misc_feature (1)..(25): SEQ ID NO: 5290; WAN024CEQ; Start 169; Stop 193
agtagttgcgttcaatacctttata

SEQ ID NO: 405950 - DNA, 25 bp, Artificial
  probe
  misc_feature (1)..(25): SEQ ID NO: 5290; WAN024CEQ; Start 170; Stop 194
gtagttgcgttcaatacctttatag

SEQ ID NO: 405951 - DNA, 25 bp, Artificial
  probe
  misc_feature (1)..(25): SEQ ID NO: 5290; WAN024CEQ; Start 66; Stop 90
gcttcaacgaagtctactactgatt

SEQ ID NO: 405952 - DNA, 25 bp, Artificial
  probe
  misc_feature (1)..(25): SEQ ID NO: 5290; WAN024CEQ; Start 67; Stop 91
cttcaacgaagtctactactgattg

SEQ ID NO: 405953 - DNA, 25 bp, Artificial
  probe
  misc_feature (1)..(25): SEQ ID NO: 5290; WAN024CEQ; Start 60; Stop 84
ttgtaggcttcaacgaagtctacta

SEQ ID NO: 405954 - DNA, 25 bp, Artificial
  probe
  misc_feature (1)..(25): SEQ ID NO: 5290; WAN024CEQ; Start 63; Stop 87
taggcttcaacgaagtctactactg

SEQ ID NO: 405955 - DNA, 25 bp, Artificial
  probe
  misc_feature (1)..(25): SEQ ID NO: 5290; WAN024CEQ; Start 62; Stop 86
gtaggcttcaacgaagtctactact

SEQ ID NO: 405956 - DNA, 25 bp, Artificial
  probe
  misc_feature (1)..(25): SEQ ID NO: 5290; WAN024CEQ; Start 182; Stop 206
aatacctttatagtcaaagcgttcg

SEQ ID NO: 405957 - DNA, 25 bp, Artificial
  probe
  misc_feature (1)..(25): SEQ ID NO: 5290; WAN024CEQ; Start 61; Stop 85
tgtaggcttcaacgaagtctactac

SEQ ID NO: 405958 - DNA, 25 bp, Artificial
  probe
  misc_feature (1)..(25): SEQ ID NO: 5290; WAN024CEQ; Start 71; Stop 95
aacgaagtctactactgattgtaca

SEQ ID NO: 405959 - DNA, 25 bp, Artificial
  probe
  misc_feature (1)..(25): SEQ ID NO: 5290; WAN024CEQ; Start 65; Stop 89
ggcttcaacgaagtctactactgat

SEQ ID NO: 405960 - DNA, 25 bp, Artificial
  probe
  misc_feature (1)..(25): SEQ ID NO: 5290; WAN024CEQ; Start 180; Stop 204
tcaatacctttatagtcaaagcgtt

SEQ ID NO: 405961 - DNA, 25 bp, Artificial
  probe
  misc_feature (1)..(25): SEQ ID NO: 5290; WAN024CEQ; Start 179; Stop 203
ttcaatacctttatagtcaaagcgt

SEQ ID NO: 405962 - DNA, 25 bp, Artificial
  probe
  misc_feature (1)..(25): SEQ ID NO: 5290; WAN024CEQ; Start 188; Stop 212
tttatagtcaaagcgttcgattgca

SEQ ID NO: 405963 - DNA, 25 bp, Artificial
  probe
  misc_feature (1)..(25): SEQ ID NO: 5290; WAN024CEQ; Start 181; Stop 205
caatacctttatagtcaaagcgttc

SEQ ID NO: 405964 - DNA, 25 bp, Artificial
  probe
  misc_feature (1)..(25): SEQ ID NO: 5290; WAN024CEQ; Start 178; Stop 202
gttcaatacctttatagtcaaagcg

SEQ ID NO: 405965 - DNA, 25 bp, Artificial
  probe
  misc_feature (1)..(25): SEQ ID NO: 5290; WAN024CEQ; Start 177; Stop 201
cgttcaatacctttatagtcaaagc

SEQ ID NO: 405966 - DNA, 25 bp, Artificial
  probe
  misc_feature (1)..(25): SEQ ID NO: 5290; WAN024CEQ; Start 176; Stop 200
gcgttcaatacctttatagtcaaag

SEQ ID NO: 405967 - DNA, 25 bp, Artificial
  probe
  misc_feature (1)..(25): SEQ ID NO: 5290; WAN024CEQ; Start 189; Stop 213
ttatagtcaaagcgttcgattgcag

SEQ ID NO: 405968 - DNA, 25 bp, Artificial
  probe
  misc_feature (1)..(25): SEQ ID NO: 5290; WAN024CEQ; Start 184; Stop 208
tacctttatagtcaaagcgttcgat

SEQ ID NO: 405969 - DNA, 25 bp, Artificial
  probe
  misc_feature (1)..(25): SEQ ID NO: 5290; WAN024CEQ; Start 183; Stop 207
atacctttatagtcaaagcgttcga

SEQ ID NO: 405970 - DNA, 25 bp, Artificial
  probe
  misc_feature (1)..(25): SEQ ID NO: 5290; WAN024CEQ; Start 186; Stop 210
cctttatagtcaaagcgttcgattg

SEQ ID NO: 405971 - DNA, 25 bp, Artificial
  probe
  misc_feature (1)..(25): SEQ ID NO: 5290; WAN024CEQ; Start 185; Stop 209
acctttatagtcaaagcgttcgatt

SEQ ID NO: 405972 - DNA, 25 bp, Artificial
  probe
  misc_feature (1)..(25): SEQ ID NO: 5291; WAN024FF6; Start 1278; Stop 1302
acaacttccacaataccttcttatg

SEQ ID NO: 405973 - DNA, 25 bp, Artificial
  probe
  misc_feature (1)..(25): SEQ ID NO: 5291; WAN024FF6; Start 537; Stop 561
tatcgttcttggtatgatgcttgtc

SEQ ID NO: 405974 - DNA, 25 bp, Artificial
  probe
  misc_feature (1)..(25): SEQ ID NO: 5291; WAN024FF6; Start 1277; Stop 1301
gacaacttccacaataccttcttat

SEQ ID NO: 405975 - DNA, 25 bp, Artificial
  probe
  misc_feature (1)..(25): SEQ ID NO: 5291; WAN024FF6; Start 536; Stop 560
gtatcgttcttggtatgatgcttgt

SEQ ID NO: 405976 - DNA, 25 bp, Artificial
  probe
  misc_feature (1)..(25): SEQ ID NO: 5291; WAN024FF6; Start 1773; Stop 1797
tggacttgatgatacaacaatggtt

SEQ ID NO: 405977 - DNA, 25 bp, Artificial
  probe
  misc_feature (1)..(25): SEQ ID NO: 5291; WAN024FF6; Start 1774; Stop 1798
ggacttgatgatacaacaatggtta

SEQ ID NO: 405978 - DNA, 25 bp, Artificial
  probe
  misc_feature (1)..(25): SEQ ID NO: 5291; WAN024FF6; Start 1772; Stop 1796
ctggacttgatgatacaacaatggt

SEQ ID NO: 405979 - DNA, 25 bp, Artificial
  probe
  misc_feature (1)..(25): SEQ ID NO: 5291; WAN024FF6; Start 541; Stop 565
gttcttggtatgatgcttgtctctg

SEQ ID NO: 405980 - DNA, 25 bp, Artificial
  probe
  misc_feature (1)..(25): SEQ ID NO: 5291; WAN024FF6; Start 535; Stop 559
ggtatcgttcttggtatgatgcttg

SEQ ID NO: 405981 - DNA, 25 bp, Artificial
  probe
  misc_feature (1)..(25): SEQ ID NO: 5291; WAN024FF6; Start 531; Stop 555
cgttggtatcgttcttggtatgatg

SEQ ID NO: 405982 - DNA, 25 bp, Artificial
  probe
  misc_feature (1)..(25): SEQ ID NO: 5291; WAN024FF6; Start 453; Stop 477
cttgacagatacagccttcatcatc

SEQ ID NO: 405983 - DNA, 25 bp, Artificial
  probe
  misc_feature (1)..(25): SEQ ID NO: 5291; WAN024FF6; Start 532; Stop 556
gttggtatcgttcttggtatgatgc

SEQ ID NO: 405984 - DNA, 25 bp, Artificial
  probe
  misc_feature (1)..(25): SEQ ID NO: 5291; WAN024FF6; Start 452; Stop 476
tcttgacagatacagccttcatcat

SEQ ID NO: 405985 - DNA, 25 bp, Artificial
  probe
  misc_feature (1)..(25): SEQ ID NO: 5291; WAN024FF6; Start 534; Stop 558
tggtatcgttcttggtatgatgctt

SEQ ID NO: 405986 - DNA, 25 bp, Artificial
  probe
  misc_feature (1)..(25): SEQ ID NO: 5291; WAN024FF6; Start 533; Stop 557
ttggtatcgttcttggtatgatgct

SEQ ID NO: 405987 - DNA, 25 bp, Artificial
  probe
  misc_feature (1)..(25): SEQ ID NO: 5291; WAN024FF6; Start 1779; Stop 1803
tgatgatacaacaatggttatcgtt

SEQ ID NO: 405988 - DNA, 25 bp, Artificial
  probe
  misc_feature (1)..(25): SEQ ID NO: 5291; WAN024FF6; Start 1778; Stop 1802
ttgatgatacaacaatggttatcgt

SEQ ID NO: 405989 - DNA, 25 bp, Artificial
  probe
  misc_feature (1)..(25): SEQ ID NO: 5291; WAN024FF6; Start 1349; Stop 1373
gttacgaagatgaagtagacgcaac

SEQ ID NO: 405990 - DNA, 25 bp, Artificial
  probe
  misc_feature (1)..(25): SEQ ID NO: 5291; WAN024FF6; Start 1782; Stop 1806
tgatacaacaatggttatcgttaca

SEQ ID NO: 405991 - DNA, 25 bp, Artificial
  probe
  misc_feature (1)..(25): SEQ ID NO: 5291; WAN024FF6; Start 538; Stop 562
atcgttcttggtatgatgcttgtct

SEQ ID NO: 405992 - DNA, 25 bp, Artificial
  probe
  misc_feature (1)..(25): SEQ ID NO: 5291; WAN024FF6; Start 1777; Stop 1801
cttgatgatacaacaatggttatcg

SEQ ID NO: 405993 - DNA, 25 bp, Artificial
  probe
  misc_feature (1)..(25): SEQ ID NO: 5291; WAN024FF6; Start 1276; Stop 1300
ggacaacttccacaataccttctta

SEQ ID NO: 405994 - DNA, 25 bp, Artificial
  probe
  misc_feature (1)..(25): SEQ ID NO: 5291; WAN024FF6; Start 1106; Stop 1130
taggtattacagagcctgctatctt

SEQ ID NO: 405995 - DNA, 25 bp, Artificial
  probe
  misc_feature (1)..(25): SEQ ID NO: 5291; WAN024FF6; Start 1350; Stop 1374
ttacgaagatgaagtagacgcaact

SEQ ID NO: 405996 - DNA, 25 bp, Artificial
  probe
  misc_feature (1)..(25): SEQ ID NO: 5291; WAN024FF6; Start 542; Stop 566
ttcttggtatgatgcttgtctctgg

SEQ ID NO: 405997 - DNA, 25 bp, Artificial
  probe
  misc_feature (1)..(25): SEQ ID NO: 5291; WAN024FF6; Start 1771; Stop 1795
gctggacttgatgatacaacaatgg

SEQ ID NO: 405998 - DNA, 25 bp, Artificial
  probe
  misc_feature (1)..(25): SEQ ID NO: 5291; WAN024FF6; Start 1105; Stop 1129
ctaggtattacagagcctgctatct

SEQ ID NO: 405999 - DNA, 25 bp, Artificial
  probe
  misc_feature (1)..(25): SEQ ID NO: 5291; WAN024FF6; Start 1215; Stop 1239
acttgctggtactggtaatggtatc

SEQ ID NO: 406000 - DNA, 25 bp, Artificial
  probe
  misc_feature (1)..(25): SEQ ID NO: 5291; WAN024FF6; Start 1214; Stop 1238
gacttgctggtactggtaatggtat

SEQ ID NO: 406001 - DNA, 25 bp, Artificial
  probe
  misc_feature (1)..(25): SEQ ID NO: 5291; WAN024FF6; Start 1280; Stop 1304
aacttccacaataccttcttatggt

SEQ ID NO: 406002 - DNA, 25 bp, Artificial
  probe
  misc_feature (1)..(25): SEQ ID NO: 5291; WAN024FF6; Start 1279; Stop 1303
caacttccacaataccttcttatgg

SEQ ID NO: 406003 - DNA, 25 bp, Artificial
  probe
  misc_feature (1)..(25): SEQ ID NO: 5291; WAN024FF6; Start 1216; Stop 1240
cttgctggtactggtaatggtatca

SEQ ID NO: 406004 - DNA, 25 bp, Artificial
  probe
  misc_feature (1)..(25): SEQ ID NO: 5291; WAN024FF6; Start 530; Stop 554
ccgttggtatcgttcttggtatgat

SEQ ID NO: 406005 - DNA, 25 bp, Artificial
  probe
  misc_feature (1)..(25): SEQ ID NO: 5292; WAN024EVI; Start 16; Stop 40
agcaagcattcacaagaatacttac

SEQ ID NO: 406006 - DNA, 25 bp, Artificial
  probe
  misc_feature (1)..(25): SEQ ID NO: 5292; WAN024EVI; Start 18; Stop 42
caagcattcacaagaatacttacct

SEQ ID NO: 406007 - DNA, 25 bp, Artificial
  probe
  misc_feature (1)..(25): SEQ ID NO: 5292; WAN024EVI; Start 17; Stop 41
gcaagcattcacaagaatacttacc

SEQ ID NO: 406008 - DNA, 25 bp, Artificial
  probe
  misc_feature (1)..(25): SEQ ID NO: 5292; WAN024EVI; Start 15; Stop 39
aagcaagcattcacaagaatactta

SEQ ID NO: 406009 - DNA, 25 bp, Artificial
  probe
  misc_feature (1)..(25): SEQ ID NO: 5292; WAN024EVI; Start 25; Stop 49
tcacaagaatacttacctatcatgg

SEQ ID NO: 406010 - DNA, 25 bp, Artificial
  probe
  misc_feature (1)..(25): SEQ ID NO: 5292; WAN024EVI; Start 19; Stop 43
aagcattcacaagaatacttaccta

SEQ ID NO: 406011 - DNA, 25 bp, Artificial
  probe
  misc_feature (1)..(25): SEQ ID NO: 5292; WAN024EVI; Start 20; Stop 44
agcattcacaagaatacttacctat

SEQ ID NO: 406012 - DNA, 25 bp, Artificial
  probe
  misc_feature (1)..(25): SEQ ID NO: 5292; WAN024EVI; Start 21; Stop 45
gcattcacaagaatacttacctatc

SEQ ID NO: 406013 - DNA, 25 bp, Artificial
  probe
  misc_feature (1)..(25): SEQ ID NO: 5292; WAN024EVI; Start 27; Stop 51
acaagaatacttacctatcatggga

SEQ ID NO: 406014 - DNA, 25 bp, Artificial
  probe
  misc_feature (1)..(25): SEQ ID NO: 5292; WAN024EVI; Start 26; Stop 50
cacaagaatacttacctatcatggg

SEQ ID NO: 406015 - DNA, 25 bp, Artificial
  probe
  misc_feature (1)..(25): SEQ ID NO: 5292; WAN024EVI; Start 14; Stop 38
aaagcaagcattcacaagaatactt

SEQ ID NO: 406016 - DNA, 25 bp, Artificial
  probe
  misc_feature (1)..(25): SEQ ID NO: 5292; WAN024EVI; Start 28; Stop 52
caagaatacttacctatcatgggag

SEQ ID NO: 406017 - DNA, 25 bp, Artificial
  probe
  misc_feature (1)..(25): SEQ ID NO: 5292; WAN024EVI; Start 33; Stop 57
atacttacctatcatgggaggaaca

SEQ ID NO: 406018 - DNA, 25 bp, Artificial
  probe
  misc_feature (1)..(25): SEQ ID NO: 5292; WAN024EVI; Start 30; Stop 54
agaatacttacctatcatgggagga

SEQ ID NO: 406019 - DNA, 25 bp, Artificial
  probe
  misc_feature (1)..(25): SEQ ID NO: 5292; WAN024EVI; Start 34; Stop 58
tacttacctatcatgggaggaacaa

SEQ ID NO: 406020 - DNA, 25 bp, Artificial
  probe
  misc_feature (1)..(25): SEQ ID NO: 5292; WAN024EVI; Start 32; Stop 56
aatacttacctatcatgggaggaac

SEQ ID NO: 406021 - DNA, 25 bp, Artificial
  probe
  misc_feature (1)..(25): SEQ ID NO: 5292; WAN024EVI; Start 31; Stop 55
gaatacttacctatcatgggaggaa

SEQ ID NO: 406022 - DNA, 25 bp, Artificial
  probe
  misc_feature (1)..(25): SEQ ID NO: 5292; WAN024EVI; Start 29; Stop 53
aagaatacttacctatcatgggagg

SEQ ID NO: 406023 - DNA, 25 bp, Artificial
  probe
  misc_feature (1)..(25): SEQ ID NO: 5292; WAN024EVI; Start 24; Stop 48
ttcacaagaatacttacctatcatg

SEQ ID NO: 406024 - DNA, 25 bp, Artificial
  probe
  misc_feature (1)..(25): SEQ ID NO: 5292; WAN024EVI; Start 35; Stop 59
acttacctatcatgggaggaacaac

SEQ ID NO: 406025 - DNA, 25 bp, Artificial
  probe
  misc_feature (1)..(25): SEQ ID NO: 5292; WAN024EVI; Start 22; Stop 46
cattcacaagaatacttacctatca

SEQ ID NO: 406026 - DNA, 25 bp, Artificial
  probe
  misc_feature (1)..(25): SEQ ID NO: 5292; WAN024EVI; Start 36; Stop 60
cttacctatcatgggaggaacaacc

SEQ ID NO: 406027 - DNA, 25 bp, Artificial
  probe
  misc_feature (1)..(25): SEQ ID NO: 5292; WAN024EVI; Start 13; Stop 37
aaaagcaagcattcacaagaatact

SEQ ID NO: 406028 - DNA, 25 bp, Artificial
  probe
  misc_feature (1)..(25): SEQ ID NO: 5292; WAN024EVI; Start 23; Stop 47
attcacaagaatacttacctatcat

SEQ ID NO: 406029 - DNA, 25 bp, Artificial
  probe
  misc_feature (1)..(25): SEQ ID NO: 5292; WAN024EVI; Start 37; Stop 61
ttacctatcatgggaggaacaaccg

SEQ ID NO: 406030 - DNA, 25 bp, Artificial
  probe
  misc_feature (1)..(25): SEQ ID NO: 5292; WAN024EVI; Start 38; Stop 62
tacctatcatgggaggaacaaccgt

SEQ ID NO: 406031 - DNA, 25 bp, Artificial
  probe
  misc_feature (1)..(25): SEQ ID NO: 5292; WAN024EVI; Start 40; Stop 64
cctatcatgggaggaacaaccgttc

SEQ ID NO: 406032 - DNA, 25 bp, Artificial
  probe
  misc_feature (1)..(25): SEQ ID NO: 5293; WAN024CSH; Start 42; Stop 66
gcctatgttagatgtagaagcgatt

SEQ ID NO: 406033 - DNA, 25 bp, Artificial
  probe
  misc_feature (1)..(25): SEQ ID NO: 5293; WAN024CSH; Start 38; Stop 62
ggaagcctatgttagatgtagaagc

SEQ ID NO: 406034 - DNA, 25 bp, Artificial
  probe
  misc_feature (1)..(25): SEQ ID NO: 5293; WAN024CSH; Start 39; Stop 63
gaagcctatgttagatgtagaagcg

SEQ ID NO: 406035 - DNA, 25 bp, Artificial
  probe
  misc_feature (1)..(25): SEQ ID NO: 5293; WAN024CSH; Start 41; Stop 65
agcctatgttagatgtagaagcgat

SEQ ID NO: 406036 - DNA, 25 bp, Artificial
  probe
  misc_feature (1)..(25): SEQ ID NO: 5293; WAN024CSH; Start 40; Stop 64
aagcctatgttagatgtagaagcga

SEQ ID NO: 406037 - DNA, 25 bp, Artificial
  probe
  misc_feature (1)..(25): SEQ ID NO: 5293; WAN024CSH; Start 43; Stop 67
cctatgttagatgtagaagcgattc

SEQ ID NO: 406038 - DNA, 25 bp, Artificial
  probe
  misc_feature (1)..(25): SEQ ID NO: 5293; WAN024CSH; Start 44; Stop 68
ctatgttagatgtagaagcgattcg

SEQ ID NO: 406039 - DNA, 25 bp, Artificial
  probe
  misc_feature (1)..(25): SEQ ID NO: 5293; WAN024CSH; Start 454; Stop 478
gcagagcttgtctatgtctatctta

SEQ ID NO: 406040 - DNA, 25 bp, Artificial
  probe
  misc_feature (1)..(25): SEQ ID NO: 5293; WAN024CSH; Start 99; Stop 123
caatgatgaacctctggtctatctg

SEQ ID NO: 406041 - DNA, 25 bp, Artificial
  probe
  misc_feature (1)..(25): SEQ ID NO: 5293; WAN024CSH; Start 98; Stop 122
tcaatgatgaacctctggtctatct

SEQ ID NO: 406042 - DNA, 25 bp, Artificial
  probe
  misc_feature (1)..(25): SEQ ID NO: 5293; WAN024CSH; Start 97; Stop 121
gtcaatgatgaacctctggtctatc

SEQ ID NO: 406043 - DNA, 25 bp, Artificial
  probe
  misc_feature (1)..(25): SEQ ID NO: 5293; WAN024CSH; Start 37; Stop 61
gggaagcctatgttagatgtagaag

SEQ ID NO: 406044 - DNA, 25 bp, Artificial
  probe
  misc_feature (1)..(25): SEQ ID NO: 5293; WAN024CSH; Start 96; Stop 120
tgtcaatgatgaacctctggtctat

SEQ ID NO: 406045 - DNA, 25 bp, Artificial
  probe
  misc_feature (1)..(25): SEQ ID NO: 5293; WAN024CSH; Start 95; Stop 119
ttgtcaatgatgaacctctggtcta

SEQ ID NO: 406046 - DNA, 25 bp, Artificial
  probe
  misc_feature (1)..(25): SEQ ID NO: 5293; WAN024CSH; Start 385; Stop 409
gtcttgatttcagtaatggaacacc

SEQ ID NO: 406047 - DNA, 25 bp, Artificial
  probe
  misc_feature (1)..(25): SEQ ID NO: 5293; WAN024CSH; Start 384; Stop 408
ggtcttgatttcagtaatggaacac

SEQ ID NO: 406048 - DNA, 25 bp, Artificial
  probe
  misc_feature (1)..(25): SEQ ID NO: 5293; WAN024CSH; Start 625; Stop 649
atggtagtggatggtgctcaatcta

SEQ ID NO: 406049 - DNA, 25 bp, Artificial
  probe
  misc_feature (1)..(25): SEQ ID NO: 5293; WAN024CSH; Start 100; Stop 124
aatgatgaacctctggtctatctgg

SEQ ID NO: 406050 - DNA, 25 bp, Artificial
  probe
  misc_feature (1)..(25): SEQ ID NO: 5293; WAN024CSH; Start 657; Stop 681
tatgaagattgatgtccaggacttg

SEQ ID NO: 406051 - DNA, 25 bp, Artificial
  probe
  misc_feature (1)..(25): SEQ ID NO: 5293; WAN024CSH; Start 583; Stop 607
atcaaggaaatcactcaattagccc

SEQ ID NO: 406052 - DNA, 25 bp, Artificial
  probe
  misc_feature (1)..(25): SEQ ID NO: 5293; WAN024CSH; Start 93; Stop 117
gattgtcaatgatgaacctctggtc

SEQ ID NO: 406053 - DNA, 25 bp, Artificial
  probe
  misc_feature (1)..(25): SEQ ID NO: 5293; WAN024CSH; Start 656; Stop 680
atatgaagattgatgtccaggactt

SEQ ID NO: 406054 - DNA, 25 bp, Artificial
  probe
  misc_feature (1)..(25): SEQ ID NO: 5293; WAN024CSH; Start 1093; Stop 1117
ctggattatgaaggagtggctgttc

SEQ ID NO: 406055 - DNA, 25 bp, Artificial
  probe
  misc_feature (1)..(25): SEQ ID NO: 5293; WAN024CSH; Start 403; Stop 427
gaacaccattctaatatcattccat

SEQ ID NO: 406056 - DNA, 25 bp, Artificial
  probe
  misc_feature (1)..(25): SEQ ID NO: 5293; WAN024CSH; Start 582; Stop 606
gatcaaggaaatcactcaattagcc

SEQ ID NO: 406057 - DNA, 25 bp, Artificial
  probe
  misc_feature (1)..(25): SEQ ID NO: 5293; WAN024CSH; Start 580; Stop 604
ccgatcaaggaaatcactcaattag

SEQ ID NO: 406058 - DNA, 25 bp, Artificial
  probe
  misc_feature (1)..(25): SEQ ID NO: 5293; WAN024CSH; Start 581; Stop 605
cgatcaaggaaatcactcaattagc

SEQ ID NO: 406059 - DNA, 25 bp, Artificial
  probe
  misc_feature (1)..(25): SEQ ID NO: 5293; WAN024CSH; Start 759; Stop 783
gtatcttgagcaaatgtctccagta

SEQ ID NO: 406060 - DNA, 25 bp, Artificial
  probe
  misc_feature (1)..(25): SEQ ID NO: 5293; WAN024CSH; Start 756; Stop 780
aaagtatcttgagcaaatgtctcca

SEQ ID NO: 406061 - DNA, 25 bp, Artificial
  probe
  misc_feature (1)..(25): SEQ ID NO: 5293; WAN024CSH; Start 94; Stop 118
attgtcaatgatgaacctctggtct

SEQ ID NO: 406062 - DNA, 25 bp, Artificial
  probe
  misc_feature (1)..(25): SEQ ID NO: 5293; WAN024CSH; Start 92; Stop 116
agattgtcaatgatgaacctctggt

SEQ ID NO: 406063 - DNA, 25 bp, Artificial
  probe
  misc_feature (1)..(25): SEQ ID NO: 5293; WAN024CSH; Start 757; Stop 781
aagtatcttgagcaaatgtctccag

SEQ ID NO: 406064 - DNA, 25 bp, Artificial
  probe
  misc_feature (1)..(25): SEQ ID NO: 5293; WAN024CSH; Start 89; Stop 113
atcagattgtcaatgatgaacctct

SEQ ID NO: 406065 - DNA, 25 bp, Artificial
  probe
  misc_feature (1)..(25): SEQ ID NO: 5294; WAN024D8K; Start 268; Stop 292
tatagcgagctagattacatccttg

SEQ ID NO: 406066 - DNA, 25 bp, Artificial
  probe
  misc_feature (1)..(25): SEQ ID NO: 5294; WAN024D8K; Start 43; Stop 67
aatgatattgtctatggtgtccacg

SEQ ID NO: 406067 - DNA, 25 bp, Artificial
  probe
  misc_feature (1)..(25): SEQ ID NO: 5294; WAN024D8K; Start 267; Stop 291
ctatagcgagctagattacatcctt

SEQ ID NO: 406068 - DNA, 25 bp, Artificial
  probe
  misc_feature (1)..(25): SEQ ID NO: 5294; WAN024D8K; Start 266; Stop 290
cctatagcgagctagattacatcct

SEQ ID NO: 406069 - DNA, 25 bp, Artificial
  probe
  misc_feature (1)..(25): SEQ ID NO: 5294; WAN024D8K; Start 88; Stop 112
gcaaatacaggaaacaaactctacc

SEQ ID NO: 406070 - DNA, 25 bp, Artificial
  probe
  misc_feature (1)..(25): SEQ ID NO: 5294; WAN024D8K; Start 263; Stop 287
ttgcctatagcgagctagattacat

SEQ ID NO: 406071 - DNA, 25 bp, Artificial
  probe
  misc_feature (1)..(25): SEQ ID NO: 5294; WAN024D8K; Start 247; Stop 271
ctacgagtgtctgaatttgcctata

SEQ ID NO: 406072 - DNA, 25 bp, Artificial
  probe
  misc_feature (1)..(25): SEQ ID NO: 5294; WAN024D8K; Start 99; Stop 123
aaacaaactctacctccaagaagat

SEQ ID NO: 406073 - DNA, 25 bp, Artificial
  probe
  misc_feature (1)..(25): SEQ ID NO: 5294; WAN024D8K; Start 352; Stop 376
cataatctgggttctatcttgcgaa

SEQ ID NO: 406074 - DNA, 25 bp, Artificial
  probe
  misc_feature (1)..(25): SEQ ID NO: 5294; WAN024D8K; Start 241; Stop 265
tttgttctacgagtgtctgaatttg

SEQ ID NO: 406075 - DNA, 25 bp, Artificial
  probe
  misc_feature (1)..(25): SEQ ID NO: 5294; WAN024D8K; Start 98; Stop 122
gaaacaaactctacctccaagaaga

SEQ ID NO: 406076 - DNA, 25 bp, Artificial
  probe
  misc_feature (1)..(25): SEQ ID NO: 5294; WAN024D8K; Start 264; Stop 288
tgcctatagcgagctagattacatc

SEQ ID NO: 406077 - DNA, 25 bp, Artificial
  probe
  misc_feature (1)..(25): SEQ ID NO: 5294; WAN024D8K; Start 246; Stop 270
tctacgagtgtctgaatttgcctat

SEQ ID NO: 406078 - DNA, 25 bp, Artificial
  probe
  misc_feature (1)..(25): SEQ ID NO: 5294; WAN024D8K; Start 269; Stop 293
atagcgagctagattacatccttgc

SEQ ID NO: 406079 - DNA, 25 bp, Artificial
  probe
  misc_feature (1)..(25): SEQ ID NO: 5294; WAN024D8K; Start 100; Stop 124
aacaaactctacctccaagaagatc

SEQ ID NO: 406080 - DNA, 25 bp, Artificial
  probe
  misc_feature (1)..(25): SEQ ID NO: 5294; WAN024D8K; Start 245; Stop 269
ttctacgagtgtctgaatttgccta

SEQ ID NO: 406081 - DNA, 25 bp, Artificial
  probe
  misc_feature (1)..(25): SEQ ID NO: 5294; WAN024D8K; Start 265; Stop 289
gcctatagcgagctagattacatcc

SEQ ID NO: 406082 - DNA, 25 bp, Artificial
  probe
  misc_feature (1)..(25): SEQ ID NO: 5294; WAN024D8K; Start 242; Stop 266
ttgttctacgagtgtctgaatttgc

SEQ ID NO: 406083 - DNA, 25 bp, Artificial
  probe
  misc_feature (1)..(25): SEQ ID NO: 5294; WAN024D8K; Start 91; Stop 115
aatacaggaaacaaactctacctcc

SEQ ID NO: 406084 - DNA, 25 bp, Artificial
  probe
  misc_feature (1)..(25): SEQ ID NO: 5294; WAN024D8K; Start 89; Stop 113
caaatacaggaaacaaactctacct

SEQ ID NO: 406085 - DNA, 25 bp, Artificial
  probe
  misc_feature (1)..(25): SEQ ID NO: 5294; WAN024D8K; Start 44; Stop 68
atgatattgtctatggtgtccacgc

SEQ ID NO: 406086 - DNA, 25 bp, Artificial
  probe
  misc_feature (1)..(25): SEQ ID NO: 5294; WAN024D8K; Start 115; Stop 139
caagaagatctccgaggtaagaatg

SEQ ID NO: 406087 - DNA, 25 bp, Artificial
  probe
  misc_feature (1)..(25): SEQ ID NO: 5294; WAN024D8K; Start 90; Stop 114
aaatacaggaaacaaactctacctc

SEQ ID NO: 406088 - DNA, 25 bp, Artificial
  probe
  misc_feature (1)..(25): SEQ ID NO: 5294; WAN024D8K; Start 118; Stop 142
gaagatctccgaggtaagaatgttg

SEQ ID NO: 406089 - DNA, 25 bp, Artificial
  probe
  misc_feature (1)..(25): SEQ ID NO: 5294; WAN024D8K; Start 117; Stop 141
agaagatctccgaggtaagaatgtt

SEQ ID NO: 406090 - DNA, 25 bp, Artificial
  probe
  misc_feature (1)..(25): SEQ ID NO: 5294; WAN024D8K; Start 116; Stop 140
aagaagatctccgaggtaagaatgt

SEQ ID NO: 406091 - DNA, 25 bp, Artificial
  probe
  misc_feature (1)..(25): SEQ ID NO: 5294; WAN024D8K; Start 92; Stop 116
atacaggaaacaaactctacctcca

SEQ ID NO: 406092 - DNA, 25 bp, Artificial
  probe
  misc_feature (1)..(25): SEQ ID NO: 5294; WAN024D8K; Start 248; Stop 272
tacgagtgtctgaatttgcctatag

SEQ ID NO: 406093 - DNA, 25 bp, Artificial
  probe
  misc_feature (1)..(25): SEQ ID NO: 5294; WAN024D8K; Start 261; Stop 285
atttgcctatagcgagctagattac

SEQ ID NO: 406094 - DNA, 25 bp, Artificial
  probe
  misc_feature (1)..(25): SEQ ID NO: 5294; WAN024D8K; Start 260; Stop 284
aatttgcctatagcgagctagatta

SEQ ID NO: 406095 - DNA, 25 bp, Artificial
  probe
  misc_feature (1)..(25): SEQ ID NO: 5294; WAN024D8K; Start 97; Stop 121
ggaaacaaactctacctccaagaag

SEQ ID NO: 406096 - DNA, 25 bp, Artificial
  probe
  misc_feature (1)..(25): SEQ ID NO: 5294; WAN024D8K; Start 119; Stop 143
aagatctccgaggtaagaatgttga

SEQ ID NO: 406097 - DNA, 25 bp, Artificial
  probe
  misc_feature (1)..(25): SEQ ID NO: 5294; WAN024D8K; Start 392; Stop 416
atgtttcaggtgtcatcattcccaa

SEQ ID NO: 406098 - DNA, 25 bp, Artificial
  probe
  misc_feature (1)..(25): SEQ ID NO: 5295; WAN024DJ8; Start 1077; Stop 1101
ccaagcagataagaagcgtaagtta

SEQ ID NO: 406099 - DNA, 25 bp, Artificial
  probe
  misc_feature (1)..(25): SEQ ID NO: 5295; WAN024DJ8; Start 1078; Stop 1102
caagcagataagaagcgtaagttat

SEQ ID NO: 406100 - DNA, 25 bp, Artificial
  probe
  misc_feature (1)..(25): SEQ ID NO: 5295; WAN024DJ8; Start 1094; Stop 1118
gtaagttatacaacggaaccttgaa

SEQ ID NO: 406101 - DNA, 25 bp, Artificial
  probe
  misc_feature (1)..(25): SEQ ID NO: 5295; WAN024DJ8; Start 1081; Stop 1105
gcagataagaagcgtaagttataca

SEQ ID NO: 406102 - DNA, 25 bp, Artificial
  probe
  misc_feature (1)..(25): SEQ ID NO: 5295; WAN024DJ8; Start 1080; Stop 1104
agcagataagaagcgtaagttatac

SEQ ID NO: 406103 - DNA, 25 bp, Artificial
  probe
  misc_feature (1)..(25): SEQ ID NO: 5295; WAN024DJ8; Start 1079; Stop 1103
aagcagataagaagcgtaagttata

SEQ ID NO: 406104 - DNA, 25 bp, Artificial
  probe
  misc_feature (1)..(25): SEQ ID NO: 5295; WAN024DJ8; Start 1074; Stop 1098
tagccaagcagataagaagcgtaag

SEQ ID NO: 406105 - DNA, 25 bp, Artificial
  probe
  misc_feature (1)..(25): SEQ ID NO: 5295; WAN024DJ8; Start 1068; Stop 1092
gtatggtagccaagcagataagaag

SEQ ID NO: 406106 - DNA, 25 bp, Artificial
  probe
  misc_feature (1)..(25): SEQ ID NO: 5295; WAN024DJ8; Start 921; Stop 945
agtaatcatttccaatccgccttat

SEQ ID NO: 406107 - DNA, 25 bp, Artificial
  probe
  misc_feature (1)..(25): SEQ ID NO: 5295; WAN024DJ8; Start 1065; Stop 1089
caagtatggtagccaagcagataag

SEQ ID NO: 406108 - DNA, 25 bp, Artificial
  probe
  misc_feature (1)..(25): SEQ ID NO: 5295; WAN024DJ8; Start 1073; Stop 1097
gtagccaagcagataagaagcgtaa

SEQ ID NO: 406109 - DNA, 25 bp, Artificial
  probe
  misc_feature (1)..(25): SEQ ID NO: 5295; WAN024DJ8; Start 1067; Stop 1091
agtatggtagccaagcagataagaa

SEQ ID NO: 406110 - DNA, 25 bp, Artificial
  probe
  misc_feature (1)..(25): SEQ ID NO: 5295; WAN024DJ8; Start 1066; Stop 1090
aagtatggtagccaagcagataaga

SEQ ID NO: 406111 - DNA, 25 bp, Artificial
  probe
  misc_feature (1)..(25): SEQ ID NO: 5295; WAN024DJ8; Start 920; Stop 944
gagtaatcatttccaatccgcctta

SEQ ID NO: 406112 - DNA, 25 bp, Artificial
  probe
  misc_feature (1)..(25): SEQ ID NO: 5295; WAN024DJ8; Start 922; Stop 946
gtaatcatttccaatccgccttatg

SEQ ID NO: 406113 - DNA, 25 bp, Artificial
  probe
  misc_feature (1)..(25): SEQ ID NO: 5295; WAN024DJ8; Start 650; Stop 674
cagttatgattgctagaaagatggc

SEQ ID NO: 406114 - DNA, 25 bp, Artificial
  probe
  misc_feature (1)..(25): SEQ ID NO: 5295; WAN024DJ8; Start 1098; Stop 1122
gttatacaacggaaccttgaaagtg

SEQ ID NO: 406115 - DNA, 25 bp, Artificial
  probe
  misc_feature (1)..(25): SEQ ID NO: 5295; WAN024DJ8; Start 1097; Stop 1121
agttatacaacggaaccttgaaagt

SEQ ID NO: 406116 - DNA, 25 bp, Artificial
  probe
  misc_feature (1)..(25): SEQ ID NO: 5295; WAN024DJ8; Start 453; Stop 477
ctctattctcaaagatgtggcaact

SEQ ID NO: 406117 - DNA, 25 bp, Artificial
  probe
  misc_feature (1)..(25): SEQ ID NO: 5295; WAN024DJ8; Start 452; Stop 476
tctctattctcaaagatgtggcaac

SEQ ID NO: 406118 - DNA, 25 bp, Artificial
  probe
  misc_feature (1)..(25): SEQ ID NO: 5295; WAN024DJ8; Start 451; Stop 475
gtctctattctcaaagatgtggcaa

SEQ ID NO: 406119 - DNA, 25 bp, Artificial
  probe
  misc_feature (1)..(25): SEQ ID NO: 5295; WAN024DJ8; Start 1096; Stop 1120
aagttatacaacggaaccttgaaag

SEQ ID NO: 406120 - DNA, 25 bp, Artificial
  probe
  misc_feature (1)..(25): SEQ ID NO: 5295; WAN024DJ8; Start 454; Stop 478
tctattctcaaagatgtggcaactg

SEQ ID NO: 406121 - DNA, 25 bp, Artificial
  probe
  misc_feature (1)..(25): SEQ ID NO: 5295; WAN024DJ8; Start 456; Stop 480
tattctcaaagatgtggcaactgtc

SEQ ID NO: 406122 - DNA, 25 bp, Artificial
  probe
  misc_feature (1)..(25): SEQ ID NO: 5295; WAN024DJ8; Start 455; Stop 479
ctattctcaaagatgtggcaactgt

SEQ ID NO: 406123 - DNA, 25 bp, Artificial
  probe
  misc_feature (1)..(25): SEQ ID NO: 5295; WAN024DJ8; Start 448; Stop 472
gaggtctctattctcaaagatgtgg

SEQ ID NO: 406124 - DNA, 25 bp, Artificial
  probe
  misc_feature (1)..(25): SEQ ID NO: 5295; WAN024DJ8; Start 651; Stop 675
agttatgattgctagaaagatggcg

SEQ ID NO: 406125 - DNA, 25 bp, Artificial
  probe
  misc_feature (1)..(25): SEQ ID NO: 5295; WAN024DJ8; Start 1099; Stop 1123
ttatacaacggaaccttgaaagtgg

SEQ ID NO: 406126 - DNA, 25 bp, Artificial
  probe
  misc_feature (1)..(25): SEQ ID NO: 5295; WAN024DJ8; Start 1083; Stop 1107
agataagaagcgtaagttatacaac

SEQ ID NO: 406127 - DNA, 25 bp, Artificial
  probe
  misc_feature (1)..(25): SEQ ID NO: 5295; WAN024DJ8; Start 1082; Stop 1106
cagataagaagcgtaagttatacaa

SEQ ID NO: 406128 - DNA, 25 bp, Artificial
  probe
  misc_feature (1)..(25): SEQ ID NO: 5295; WAN024DJ8; Start 1095; Stop 1119
taagttatacaacggaaccttgaaa

SEQ ID NO: 406129 - DNA, 25 bp, Artificial
  probe
  misc_feature (1)..(25): SEQ ID NO: 5295; WAN024DJ8; Start 1086; Stop 1110
taagaagcgtaagttatacaacgga

SEQ ID NO: 406130 - DNA, 25 bp, Artificial
  probe
  misc_feature (1)..(25): SEQ ID NO: 5295; WAN024DJ8; Start 1069; Stop 1093
tatggtagccaagcagataagaagc

SEQ ID NO: 406131 - DNA, 25 bp, Artificial
  probe
  misc_feature (1)..(25): SEQ ID NO: 5296; WAN024FEZ; Start 8; Stop 32
agaagatcaatagtgagacaagcaa

SEQ ID NO: 406132 - DNA, 25 bp, Artificial
  probe
  misc_feature (1)..(25): SEQ ID NO: 5296; WAN024FEZ; Start 6; Stop 30
agagaagatcaatagtgagacaagc

SEQ ID NO: 406133 - DNA, 25 bp, Artificial
  probe
  misc_feature (1)..(25): SEQ ID NO: 5296; WAN024FEZ; Start 7; Stop 31
gagaagatcaatagtgagacaagca

SEQ ID NO: 406134 - DNA, 25 bp, Artificial
  probe
  misc_feature (1)..(25): SEQ ID NO: 5296; WAN024FEZ; Start 3; Stop 27
gcaagagaagatcaatagtgagaca

SEQ ID NO: 406135 - DNA, 25 bp, Artificial
  probe
  misc_feature (1)..(25): SEQ ID NO: 5296; WAN024FEZ; Start 10; Stop 34
aagatcaatagtgagacaagcaatc

SEQ ID NO: 406136 - DNA, 25 bp, Artificial
  probe
  misc_feature (1)..(25): SEQ ID NO: 5296; WAN024FEZ; Start 9; Stop 33
gaagatcaatagtgagacaagcaat

SEQ ID NO: 406137 - DNA, 25 bp, Artificial
  probe
  misc_feature (1)..(25): SEQ ID NO: 5296; WAN024FEZ; Start 4; Stop 28
caagagaagatcaatagtgagacaa

SEQ ID NO: 406138 - DNA, 25 bp, Artificial
  probe
  misc_feature (1)..(25): SEQ ID NO: 5296; WAN024FEZ; Start 261; Stop 285
cactggaaacattgataataggagc

SEQ ID NO: 406139 - DNA, 25 bp, Artificial
  probe
  misc_feature (1)..(25): SEQ ID NO: 5296; WAN024FEZ; Start 5; Stop 29
aagagaagatcaatagtgagacaag

SEQ ID NO: 406140 - DNA, 25 bp, Artificial
  probe
  misc_feature (1)..(25): SEQ ID NO: 5296; WAN024FEZ; Start 2; Stop 26
tgcaagagaagatcaatagtgagac

SEQ ID NO: 406141 - DNA, 25 bp, Artificial
  probe
  misc_feature (1)..(25): SEQ ID NO: 5296; WAN024FEZ; Start 11; Stop 35
agatcaatagtgagacaagcaatct

SEQ ID NO: 406142 - DNA, 25 bp, Artificial
  probe
  misc_feature (1)..(25): SEQ ID NO: 5296; WAN024FEZ; Start 31; Stop 55
aatctcttccaaaggttgcttgata

SEQ ID NO: 406143 - DNA, 25 bp, Artificial
  probe
  misc_feature (1)..(25): SEQ ID NO: 5296; WAN024FEZ; Start 35; Stop 59
tcttccaaaggttgcttgatagtag

SEQ ID NO: 406144 - DNA, 25 bp, Artificial
  probe
  misc_feature (1)..(25): SEQ ID NO: 5296; WAN024FEZ; Start 34; Stop 58
ctcttccaaaggttgcttgatagta

SEQ ID NO: 406145 - DNA, 25 bp, Artificial
  probe
  misc_feature (1)..(25): SEQ ID NO: 5296; WAN024FEZ; Start 32; Stop 56
atctcttccaaaggttgcttgatag

SEQ ID NO: 406146 - DNA, 25 bp, Artificial
  probe
  misc_feature (1)..(25): SEQ ID NO: 5296; WAN024FEZ; Start 259; Stop 283
gtcactggaaacattgataatagga

SEQ ID NO: 406147 - DNA, 25 bp, Artificial
  probe
  misc_feature (1)..(25): SEQ ID NO: 5296; WAN024FEZ; Start 258; Stop 282
agtcactggaaacattgataatagg

SEQ ID NO: 406148 - DNA, 25 bp, Artificial
  probe
  misc_feature (1)..(25): SEQ ID NO: 5296; WAN024FEZ; Start 30; Stop 54
caatctcttccaaaggttgcttgat

SEQ ID NO: 406149 - DNA, 25 bp, Artificial
  probe
  misc_feature (1)..(25): SEQ ID NO: 5296; WAN024FEZ; Start 260; Stop 284
tcactggaaacattgataataggag

SEQ ID NO: 406150 - DNA, 25 bp, Artificial
  probe
  misc_feature (1)..(25): SEQ ID NO: 5296; WAN024FEZ; Start 33; Stop 57
tctcttccaaaggttgcttgatagt

SEQ ID NO: 406151 - DNA, 25 bp, Artificial
  probe
  misc_feature (1)..(25): SEQ ID NO: 5296; WAN024FEZ; Start 82; Stop 106
gataaagtaggtcccatcatagccg

SEQ ID NO: 406152 - DNA, 25 bp, Artificial
  probe
  misc_feature (1)..(25): SEQ ID NO: 5296; WAN024FEZ; Start 81; Stop 105
cgataaagtaggtcccatcatagcc

SEQ ID NO: 406153 - DNA, 25 bp, Artificial
  probe
  misc_feature (1)..(25): SEQ ID NO: 5296; WAN024FEZ; Start 262; Stop 286
actggaaacattgataataggagct

SEQ ID NO: 406154 - DNA, 25 bp, Artificial
  probe
  misc_feature (1)..(25): SEQ ID NO: 5296; WAN024FEZ; Start 164; Stop 188
agaatagctgtcaaatcatccgaag

SEQ ID NO: 406155 - DNA, 25 bp, Artificial
  probe
  misc_feature (1)..(25): SEQ ID NO: 5296; WAN024FEZ; Start 83; Stop 107
ataaagtaggtcccatcatagccga

SEQ ID NO: 406156 - DNA, 25 bp, Artificial
  probe
  misc_feature (1)..(25): SEQ ID NO: 5296; WAN024FEZ; Start 79; Stop 103
ttcgataaagtaggtcccatcatag

SEQ ID NO: 406157 - DNA, 25 bp, Artificial
  probe
  misc_feature (1)..(25): SEQ ID NO: 5296; WAN024FEZ; Start 263; Stop 287
ctggaaacattgataataggagctt

SEQ ID NO: 406158 - DNA, 25 bp, Artificial
  probe
  misc_feature (1)..(25): SEQ ID NO: 5296; WAN024FEZ; Start 84; Stop 108
taaagtaggtcccatcatagccgat

SEQ ID NO: 406159 - DNA, 25 bp, Artificial
  probe
  misc_feature (1)..(25): SEQ ID NO: 5296; WAN024FEZ; Start 78; Stop 102
tttcgataaagtaggtcccatcata

SEQ ID NO: 406160 - DNA, 25 bp, Artificial
  probe
  misc_feature (1)..(25): SEQ ID NO: 5296; WAN024FEZ; Start 24; Stop 48
gacaagcaatctcttccaaaggttg

SEQ ID NO: 406161 - DNA, 25 bp, Artificial
  probe
  misc_feature (1)..(25): SEQ ID NO: 5296; WAN024FEZ; Start 23; Stop 47
agacaagcaatctcttccaaaggtt

SEQ ID NO: 406162 - DNA, 25 bp, Artificial
  probe
  misc_feature (1)..(25): SEQ ID NO: 5296; WAN024FEZ; Start 264; Stop 288
tggaaacattgataataggagcttt

SEQ ID NO: 406163 - DNA, 25 bp, Artificial
  probe
  misc_feature (1)..(25): SEQ ID NO: 5296; WAN024FEZ; Start 80; Stop 104
tcgataaagtaggtcccatcatagc

SEQ ID NO: 406164 - DNA, 25 bp, Artificial
  probe
  misc_feature (1)..(25): SEQ ID NO: 5297; WAN024G6E; Start 154; Stop 178
tgccattattactccattcttctct

SEQ ID NO: 406165 - DNA, 25 bp, Artificial
  probe
  misc_feature (1)..(25): SEQ ID NO: 5297; WAN024G6E; Start 151; Stop 175
tgttgccattattactccattcttc

SEQ ID NO: 406166 - DNA, 25 bp, Artificial
  probe
  misc_feature (1)..(25): SEQ ID NO: 5297; WAN024G6E; Start 152; Stop 176
gttgccattattactccattcttct

SEQ ID NO: 406167 - DNA, 25 bp, Artificial
  probe
  misc_feature (1)..(25): SEQ ID NO: 5297; WAN024G6E; Start 153; Stop 177
ttgccattattactccattcttctc

SEQ ID NO: 406168 - DNA, 25 bp, Artificial
  probe
  misc_feature (1)..(25): SEQ ID NO: 5297; WAN024G6E; Start 150; Stop 174
ttgttgccattattactccattctt

SEQ ID NO: 406169 - DNA, 25 bp, Artificial
  probe
  misc_feature (1)..(25): SEQ ID NO: 5297; WAN024G6E; Start 155; Stop 179
gccattattactccattcttctctt

SEQ ID NO: 406170 - DNA, 25 bp, Artificial
  probe
  misc_feature (1)..(25): SEQ ID NO: 5297; WAN024G6E; Start 40; Stop 64
aggaataaccagacttgcattgatt

SEQ ID NO: 406171 - DNA, 25 bp, Artificial
  probe
  misc_feature (1)..(25): SEQ ID NO: 5297; WAN024G6E; Start 97; Stop 121
attacggataaattctgctacctgt

SEQ ID NO: 406172 - DNA, 25 bp, Artificial
  probe
  misc_feature (1)..(25): SEQ ID NO: 5297; WAN024G6E; Start 95; Stop 119
tgattacggataaattctgctacct

SEQ ID NO: 406173 - DNA, 25 bp, Artificial
  probe
  misc_feature (1)..(25): SEQ ID NO: 5297; WAN024G6E; Start 39; Stop 63
aaggaataaccagacttgcattgat

SEQ ID NO: 406174 - DNA, 25 bp, Artificial
  probe
  misc_feature (1)..(25): SEQ ID NO: 5297; WAN024G6E; Start 96; Stop 120
gattacggataaattctgctacctg

SEQ ID NO: 406175 - DNA, 25 bp, Artificial
  probe
  misc_feature (1)..(25): SEQ ID NO: 5297; WAN024G6E; Start 149; Stop 173
tttgttgccattattactccattct

SEQ ID NO: 406176 - DNA, 25 bp, Artificial
  probe
  misc_feature (1)..(25): SEQ ID NO: 5297; WAN024G6E; Start 98; Stop 122
ttacggataaattctgctacctgta

SEQ ID NO: 406177 - DNA, 25 bp, Artificial
  probe
  misc_feature (1)..(25): SEQ ID NO: 5297; WAN024G6E; Start 201; Stop 225
ttcttctagggctgtatctgtatct

SEQ ID NO: 406178 - DNA, 25 bp, Artificial
  probe
  misc_feature (1)..(25): SEQ ID NO: 5297; WAN024G6E; Start 202; Stop 226
tcttctagggctgtatctgtatctc

SEQ ID NO: 406179 - DNA, 25 bp, Artificial
  probe
  misc_feature (1)..(25): SEQ ID NO: 5297; WAN024G6E; Start 198; Stop 222
caattcttctagggctgtatctgta

SEQ ID NO: 406180 - DNA, 25 bp, Artificial
  probe
  misc_feature (1)..(25): SEQ ID NO: 5297; WAN024G6E; Start 94; Stop 118
atgattacggataaattctgctacc

SEQ ID NO: 406181 - DNA, 25 bp, Artificial
  probe
  misc_feature (1)..(25): SEQ ID NO: 5297; WAN024G6E; Start 200; Stop 224
attcttctagggctgtatctgtatc

SEQ ID NO: 406182 - DNA, 25 bp, Artificial
  probe
  misc_feature (1)..(25): SEQ ID NO: 5297; WAN024G6E; Start 195; Stop 219
ttccaattcttctagggctgtatct

SEQ ID NO: 406183 - DNA, 25 bp, Artificial
  probe
  misc_feature (1)..(25): SEQ ID NO: 5297; WAN024G6E; Start 194; Stop 218
gttccaattcttctagggctgtatc

SEQ ID NO: 406184 - DNA, 25 bp, Artificial
  probe
  misc_feature (1)..(25): SEQ ID NO: 5297; WAN024G6E; Start 99; Stop 123
tacggataaattctgctacctgtac

SEQ ID NO: 406185 - DNA, 25 bp, Artificial
  probe
  misc_feature (1)..(25): SEQ ID NO: 5297; WAN024G6E; Start 213; Stop 237
tgtatctgtatctcctacatggcta

SEQ ID NO: 406186 - DNA, 25 bp, Artificial
  probe
  misc_feature (1)..(25): SEQ ID NO: 5297; WAN024G6E; Start 214; Stop 238
gtatctgtatctcctacatggctag

SEQ ID NO: 406187 - DNA, 25 bp, Artificial
  probe
  misc_feature (1)..(25): SEQ ID NO: 5297; WAN024G6E; Start 199; Stop 223
aattcttctagggctgtatctgtat

SEQ ID NO: 406188 - DNA, 25 bp, Artificial
  probe
  misc_feature (1)..(25): SEQ ID NO: 5297; WAN024G6E; Start 203; Stop 227
cttctagggctgtatctgtatctcc

SEQ ID NO: 406189 - DNA, 25 bp, Artificial
  probe
  misc_feature (1)..(25): SEQ ID NO: 5297; WAN024G6E; Start 212; Stop 236
ctgtatctgtatctcctacatggct

SEQ ID NO: 406190 - DNA, 25 bp, Artificial
  probe
  misc_feature (1)..(25): SEQ ID NO: 5297; WAN024G6E; Start 90; Stop 114
gcttatgattacggataaattctgc

SEQ ID NO: 406191 - DNA, 25 bp, Artificial
  probe
  misc_feature (1)..(25): SEQ ID NO: 5297; WAN024G6E; Start 196; Stop 220
tccaattcttctagggctgtatctg

SEQ ID NO: 406192 - DNA, 25 bp, Artificial
  probe
  misc_feature (1)..(25): SEQ ID NO: 5297; WAN024G6E; Start 197; Stop 221
ccaattcttctagggctgtatctgt

SEQ ID NO: 406193 - DNA, 25 bp, Artificial
  probe
  misc_feature (1)..(25): SEQ ID NO: 5297; WAN024G6E; Start 210; Stop 234
ggctgtatctgtatctcctacatgg

SEQ ID NO: 406194 - DNA, 25 bp, Artificial
  probe
  misc_feature (1)..(25): SEQ ID NO: 5297; WAN024G6E; Start 193; Stop 217
cgttccaattcttctagggctgtat

SEQ ID NO: 406195 - DNA, 25 bp, Artificial
  probe
  misc_feature (1)..(25): SEQ ID NO: 5297; WAN024G6E; Start 62; Stop 86
atttcatcatctgttgctgtccctt

SEQ ID NO: 406196 - DNA, 25 bp, Artificial
  probe
  misc_feature (1)..(25): SEQ ID NO: 5297; WAN024G6E; Start 105; Stop 129
taaattctgctacctgtacgtcaaa

SEQ ID NO: 406197 - DNA, 25 bp, Artificial
  probe
  misc_feature (1)..(25): SEQ ID NO: 5298; WAN024F94; Start 44; Stop 68
tggttggttattggtacagtattca

SEQ ID NO: 406198 - DNA, 25 bp, Artificial
  probe
  misc_feature (1)..(25): SEQ ID NO: 5298; WAN024F94; Start 51; Stop 75
ttattggtacagtattcatgcgtct

SEQ ID NO: 406199 - DNA, 25 bp, Artificial
  probe
  misc_feature (1)..(25): SEQ ID NO: 5298; WAN024F94; Start 50; Stop 74
gttattggtacagtattcatgcgtc

SEQ ID NO: 406200 - DNA, 25 bp, Artificial
  probe
  misc_feature (1)..(25): SEQ ID NO: 5298; WAN024F94; Start 43; Stop 67
ttggttggttattggtacagtattc

SEQ ID NO: 406201 - DNA, 25 bp, Artificial
  probe
  misc_feature (1)..(25): SEQ ID NO: 5298; WAN024F94; Start 47; Stop 71
ttggttattggtacagtattcatgc

SEQ ID NO: 406202 - DNA, 25 bp, Artificial
  probe
  misc_feature (1)..(25): SEQ ID NO: 5298; WAN024F94; Start 45; Stop 69
ggttggttattggtacagtattcat

SEQ ID NO: 406203 - DNA, 25 bp, Artificial
  probe
  misc_feature (1)..(25): SEQ ID NO: 5298; WAN024F94; Start 49; Stop 73
ggttattggtacagtattcatgcgt

SEQ ID NO: 406204 - DNA, 25 bp, Artificial
  probe
  misc_feature (1)..(25): SEQ ID NO: 5298; WAN024F94; Start 48; Stop 72
tggttattggtacagtattcatgcg

SEQ ID NO: 406205 - DNA, 25 bp, Artificial
  probe
  misc_feature (1)..(25): SEQ ID NO: 5298; WAN024F94; Start 46; Stop 70
gttggttattggtacagtattcatg

SEQ ID NO: 406206 - DNA, 25 bp, Artificial
  probe
  misc_feature (1)..(25): SEQ ID NO: 5298; WAN024F94; Start 41; Stop 65
gtttggttggttattggtacagtat

SEQ ID NO: 406207 - DNA, 25 bp, Artificial
  probe
  misc_feature (1)..(25): SEQ ID NO: 5298; WAN024F94; Start 35; Stop 59
gtggttgtttggttggttattggta

SEQ ID NO: 406208 - DNA, 25 bp, Artificial
  probe
  misc_feature (1)..(25): SEQ ID NO: 5298; WAN024F94; Start 31; Stop 55
ctgagtggttgtttggttggttatt

SEQ ID NO: 406209 - DNA, 25 bp, Artificial
  probe
  misc_feature (1)..(25): SEQ ID NO: 5298; WAN024F94; Start 32; Stop 56
tgagtggttgtttggttggttattg

SEQ ID NO: 406210 - DNA, 25 bp, Artificial
  probe
  misc_feature (1)..(25): SEQ ID NO: 5298; WAN024F94; Start 42; Stop 66
tttggttggttattggtacagtatt

SEQ ID NO: 406211 - DNA, 25 bp, Artificial
  probe
  misc_feature (1)..(25): SEQ ID NO: 5298; WAN024F94; Start 40; Stop 64
tgtttggttggttattggtacagta

SEQ ID NO: 406212 - DNA, 25 bp, Artificial
  probe
  misc_feature (1)..(25): SEQ ID NO: 5298; WAN024F94; Start 38; Stop 62
gttgtttggttggttattggtacag

SEQ ID NO: 406213 - DNA, 25 bp, Artificial
  probe
  misc_feature (1)..(25): SEQ ID NO: 5298; WAN024F94; Start 36; Stop 60
tggttgtttggttggttattggtac

SEQ ID NO: 406214 - DNA, 25 bp, Artificial
  probe
  misc_feature (1)..(25): SEQ ID NO: 5298; WAN024F94; Start 30; Stop 54
tctgagtggttgtttggttggttat

SEQ ID NO: 406215 - DNA, 25 bp, Artificial
  probe
  misc_feature (1)..(25): SEQ ID NO: 5298; WAN024F94; Start 39; Stop 63
ttgtttggttggttattggtacagt

SEQ ID NO: 406216 - DNA, 25 bp, Artificial
  probe
  misc_feature (1)..(25): SEQ ID NO: 5298; WAN024F94; Start 33; Stop 57
gagtggttgtttggttggttattgg

SEQ ID NO: 406217 - DNA, 25 bp, Artificial
  probe
  misc_feature (1)..(25): SEQ ID NO: 5298; WAN024F94; Start 37; Stop 61
ggttgtttggttggttattggtaca

SEQ ID NO: 406218 - DNA, 25 bp, Artificial
  probe
  misc_feature (1)..(25): SEQ ID NO: 5298; WAN024F94; Start 34; Stop 58
agtggttgtttggttggttattggt

SEQ ID NO: 406219 - DNA, 25 bp, Artificial
  probe
  misc_feature (1)..(25): SEQ ID NO: 5298; WAN024F94; Start 29; Stop 53
gtctgagtggttgtttggttggtta

SEQ ID NO: 406220 - DNA, 25 bp, Artificial
  probe
  misc_feature (1)..(25): SEQ ID NO: 5298; WAN024F94; Start 25; Stop 49
catggtctgagtggttgtttggttg

SEQ ID NO: 406221 - DNA, 25 bp, Artificial
  probe
  misc_feature (1)..(25): SEQ ID NO: 5298; WAN024F94; Start 24; Stop 48
acatggtctgagtggttgtttggtt

SEQ ID NO: 406222 - DNA, 25 bp, Artificial
  probe
  misc_feature (1)..(25): SEQ ID NO: 5299; WAN024C6H; Start 786; Stop 810
acaaggttggtataaggctaagaat

SEQ ID NO: 406223 - DNA, 25 bp, Artificial
  probe
  misc_feature (1)..(25): SEQ ID NO: 5299; WAN024C6H; Start 785; Stop 809
gacaaggttggtataaggctaagaa

SEQ ID NO: 406224 - DNA, 25 bp, Artificial
  probe
  misc_feature (1)..(25): SEQ ID NO: 5299; WAN024C6H; Start 777; Stop 801
tactgatggacaaggttggtataag

SEQ ID NO: 406225 - DNA, 25 bp, Artificial
  probe
  misc_feature (1)..(25): SEQ ID NO: 5299; WAN024C6H; Start 774; Stop 798
gattactgatggacaaggttggtat

SEQ ID NO: 406226 - DNA, 25 bp, Artificial
  probe
  misc_feature (1)..(25): SEQ ID NO: 5299; WAN024C6H; Start 776; Stop 800
ttactgatggacaaggttggtataa

SEQ ID NO: 406227 - DNA, 25 bp, Artificial
  probe
  misc_feature (1)..(25): SEQ ID NO: 5299; WAN024C6H; Start 775; Stop 799
attactgatggacaaggttggtata

SEQ ID NO: 406228 - DNA, 25 bp, Artificial
  probe
  misc_feature (1)..(25): SEQ ID NO: 5299; WAN024C6H; Start 425; Stop 449
gtgttgaggttggtatggatactaa

SEQ ID NO: 406229 - DNA, 25 bp, Artificial
  probe
  misc_feature (1)..(25): SEQ ID NO: 5299; WAN024C6H; Start 428; Stop 452
ttgaggttggtatggatactaatgg

SEQ ID NO: 406230 - DNA, 25 bp, Artificial
  probe
  misc_feature (1)..(25): SEQ ID NO: 5299; WAN024C6H; Start 426; Stop 450
tgttgaggttggtatggatactaat

SEQ ID NO: 406231 - DNA, 25 bp, Artificial
  probe
  misc_feature (1)..(25): SEQ ID NO: 5299; WAN024C6H; Start 427; Stop 451
gttgaggttggtatggatactaatg

SEQ ID NO: 406232 - DNA, 25 bp, Artificial
  probe
  misc_feature (1)..(25): SEQ ID NO: 5299; WAN024C6H; Start 782; Stop 806
atggacaaggttggtataaggctaa

SEQ ID NO: 406233 - DNA, 25 bp, Artificial
  probe
  misc_feature (1)..(25): SEQ ID NO: 5299; WAN024C6H; Start 784; Stop 808
ggacaaggttggtataaggctaaga

SEQ ID NO: 406234 - DNA, 25 bp, Artificial
  probe
  misc_feature (1)..(25): SEQ ID NO: 5299; WAN024C6H; Start 424; Stop 448
ggtgttgaggttggtatggatacta

SEQ ID NO: 406235 - DNA, 25 bp, Artificial
  probe
  misc_feature (1)..(25): SEQ ID NO: 5299; WAN024C6H; Start 781; Stop 805
gatggacaaggttggtataaggcta

SEQ ID NO: 406236 - DNA, 25 bp, Artificial
  probe
  misc_feature (1)..(25): SEQ ID NO: 5299; WAN024C6H; Start 767; Stop 791
ttatgtggattactgatggacaagg

SEQ ID NO: 406237 - DNA, 25 bp, Artificial
  probe
  misc_feature (1)..(25): SEQ ID NO: 5299; WAN024C6H; Start 787; Stop 811
caaggttggtataaggctaagaata

SEQ ID NO: 406238 - DNA, 25 bp, Artificial
  probe
  misc_feature (1)..(25): SEQ ID NO: 5299; WAN024C6H; Start 783; Stop 807
tggacaaggttggtataaggctaag

SEQ ID NO: 406239 - DNA, 25 bp, Artificial
  probe
  misc_feature (1)..(25): SEQ ID NO: 5299; WAN024C6H; Start 778; Stop 802
actgatggacaaggttggtataagg

SEQ ID NO: 406240 - DNA, 25 bp, Artificial
  probe
  misc_feature (1)..(25): SEQ ID NO: 5299; WAN024C6H; Start 773; Stop 797
ggattactgatggacaaggttggta

SEQ ID NO: 406241 - DNA, 25 bp, Artificial
  probe
  misc_feature (1)..(25): SEQ ID NO: 5299; WAN024C6H; Start 768; Stop 792
tatgtggattactgatggacaaggt

SEQ ID NO: 406242 - DNA, 25 bp, Artificial
  probe
  misc_feature (1)..(25): SEQ ID NO: 5299; WAN024C6H; Start 788; Stop 812
aaggttggtataaggctaagaataa

SEQ ID NO: 406243 - DNA, 25 bp, Artificial
  probe
  misc_feature (1)..(25): SEQ ID NO: 5299; WAN024C6H; Start 769; Stop 793
atgtggattactgatggacaaggtt

SEQ ID NO: 406244 - DNA, 25 bp, Artificial
  probe
  misc_feature (1)..(25): SEQ ID NO: 5299; WAN024C6H; Start 82; Stop 106
gctgactggacttattatacagatt

SEQ ID NO: 406245 - DNA, 25 bp, Artificial
  probe
  misc_feature (1)..(25): SEQ ID NO: 5299; WAN024C6H; Start 789; Stop 813
aggttggtataaggctaagaataat

SEQ ID NO: 406246 - DNA, 25 bp, Artificial
  probe
  misc_feature (1)..(25): SEQ ID NO: 5299; WAN024C6H; Start 597; Stop 621
tacgaatgatgggaatactgtgaaa

SEQ ID NO: 406247 - DNA, 25 bp, Artificial
  probe
  misc_feature (1)..(25): SEQ ID NO: 5299; WAN024C6H; Start 596; Stop 620
ttacgaatgatgggaatactgtgaa

SEQ ID NO: 406248 - DNA, 25 bp, Artificial
  probe
  misc_feature (1)..(25): SEQ ID NO: 5299; WAN024C6H; Start 595; Stop 619
attacgaatgatgggaatactgtga

SEQ ID NO: 406249 - DNA, 25 bp, Artificial
  probe
  misc_feature (1)..(25): SEQ ID NO: 5299; WAN024C6H; Start 588; Stop 612
atctgctattacgaatgatgggaat

SEQ ID NO: 406250 - DNA, 25 bp, Artificial
  probe
  misc_feature (1)..(25): SEQ ID NO: 5299; WAN024C6H; Start 406; Stop 430
ttagttgactacgttacaggtgttg

SEQ ID NO: 406251 - DNA, 25 bp, Artificial
  probe
  misc_feature (1)..(25): SEQ ID NO: 5299; WAN024C6H; Start 587; Stop 611
tatctgctattacgaatgatgggaa

SEQ ID NO: 406252 - DNA, 25 bp, Artificial
  probe
  misc_feature (1)..(25): SEQ ID NO: 5299; WAN024C6H; Start 586; Stop 610
ttatctgctattacgaatgatggga

SEQ ID NO: 406253 - DNA, 25 bp, Artificial
  probe
  misc_feature (1)..(25): SEQ ID NO: 5299; WAN024C6H; Start 263; Stop 287
tgagagatacgattattgttaagga

SEQ ID NO: 406254 - DNA, 25 bp, Artificial
  probe
  misc_feature (1)..(25): SEQ ID NO: 5299; WAN024C6H; Start 422; Stop 446
caggtgttgaggttggtatggatac

SEQ ID NO: 406255 - DNA, 25 bp, Artificial
  probe
  misc_feature (1)..(25): SEQ ID NO: 5300; WAN024CJW; Start 279; Stop 303
tctatactcgttctccatcactgtt

SEQ ID NO: 406256 - DNA, 25 bp, Artificial
  probe
  misc_feature (1)..(25): SEQ ID NO: 5300; WAN024CJW; Start 278; Stop 302
ttctatactcgttctccatcactgt

SEQ ID NO: 406257 - DNA, 25 bp, Artificial
  probe
  misc_feature (1)..(25): SEQ ID NO: 5300; WAN024CJW; Start 280; Stop 304
ctatactcgttctccatcactgttt

SEQ ID NO: 406258 - DNA, 25 bp, Artificial
  probe
  misc_feature (1)..(25): SEQ ID NO: 5300; WAN024CJW; Start 277; Stop 301
tttctatactcgttctccatcactg

SEQ ID NO: 406259 - DNA, 25 bp, Artificial
  probe
  misc_feature (1)..(25): SEQ ID NO: 5300; WAN024CJW; Start 288; Stop 312
gttctccatcactgtttactctgta

SEQ ID NO: 406260 - DNA, 25 bp, Artificial
  probe
  misc_feature (1)..(25): SEQ ID NO: 5300; WAN024CJW; Start 282; Stop 306
atactcgttctccatcactgtttac

SEQ ID NO: 406261 - DNA, 25 bp, Artificial
  probe
  misc_feature (1)..(25): SEQ ID NO: 5300; WAN024CJW; Start 281; Stop 305
tatactcgttctccatcactgttta

SEQ ID NO: 406262 - DNA, 25 bp, Artificial
  probe
  misc_feature (1)..(25): SEQ ID NO: 5300; WAN024CJW; Start 94; Stop 118
aattagactaagtatcgttccctcc

SEQ ID NO: 406263 - DNA, 25 bp, Artificial
  probe
  misc_feature (1)..(25): SEQ ID NO: 5300; WAN024CJW; Start 283; Stop 307
tactcgttctccatcactgtttact

SEQ ID NO: 406264 - DNA, 25 bp, Artificial
  probe
  misc_feature (1)..(25): SEQ ID NO: 5300; WAN024CJW; Start 95; Stop 119
attagactaagtatcgttccctccg

SEQ ID NO: 406265 - DNA, 25 bp, Artificial
  probe
  misc_feature (1)..(25): SEQ ID NO: 5300; WAN024CJW; Start 9; Stop 33
caatgcttgctttcataagaacctc

SEQ ID NO: 406266 - DNA, 25 bp, Artificial
  probe
  misc_feature (1)..(25): SEQ ID NO: 5300; WAN024CJW; Start 150; Stop 174
gtttaacacttcctctcagactgta

SEQ ID NO: 406267 - DNA, 25 bp, Artificial
  probe
  misc_feature (1)..(25): SEQ ID NO: 5300; WAN024CJW; Start 20; Stop 44
ttcataagaacctcctcttctcgtt

SEQ ID NO: 406268 - DNA, 25 bp, Artificial
  probe
  misc_feature (1)..(25): SEQ ID NO: 5300; WAN024CJW; Start 285; Stop 309
ctcgttctccatcactgtttactct

SEQ ID NO: 406269 - DNA, 25 bp, Artificial
  probe
  misc_feature (1)..(25): SEQ ID NO: 5300; WAN024CJW; Start 10; Stop 34
aatgcttgctttcataagaacctcc

SEQ ID NO: 406270 - DNA, 25 bp, Artificial
  probe
  misc_feature (1)..(25): SEQ ID NO: 5300; WAN024CJW; Start 225; Stop 249
atgtcaaggaaactgcttacagaaa

SEQ ID NO: 406271 - DNA, 25 bp, Artificial
  probe
  misc_feature (1)..(25): SEQ ID NO: 5300; WAN024CJW; Start 224; Stop 248
aatgtcaaggaaactgcttacagaa

SEQ ID NO: 406272 - DNA, 25 bp, Artificial
  probe
  misc_feature (1)..(25): SEQ ID NO: 5300; WAN024CJW; Start 223; Stop 247
aaatgtcaaggaaactgcttacaga

SEQ ID NO: 406273 - DNA, 25 bp, Artificial
  probe
  misc_feature (1)..(25): SEQ ID NO: 5300; WAN024CJW; Start 286; Stop 310
tcgttctccatcactgtttactctg

SEQ ID NO: 406274 - DNA, 25 bp, Artificial
  probe
  misc_feature (1)..(25): SEQ ID NO: 5300; WAN024CJW; Start 284; Stop 308
actcgttctccatcactgtttactc

SEQ ID NO: 406275 - DNA, 25 bp, Artificial
  probe
  misc_feature (1)..(25): SEQ ID NO: 5300; WAN024CJW; Start 151; Stop 175
tttaacacttcctctcagactgtac

SEQ ID NO: 406276 - DNA, 25 bp, Artificial
  probe
  misc_feature (1)..(25): SEQ ID NO: 5300; WAN024CJW; Start 93; Stop 117
aaattagactaagtatcgttccctc

SEQ ID NO: 406277 - DNA, 25 bp, Artificial
  probe
  misc_feature (1)..(25): SEQ ID NO: 5300; WAN024CJW; Start 149; Stop 173
agtttaacacttcctctcagactgt

SEQ ID NO: 406278 - DNA, 25 bp, Artificial
  probe
  misc_feature (1)..(25): SEQ ID NO: 5300; WAN024CJW; Start 287; Stop 311
cgttctccatcactgtttactctgt

SEQ ID NO: 406279 - DNA, 25 bp, Artificial
  probe
  misc_feature (1)..(25): SEQ ID NO: 5300; WAN024CJW; Start 11; Stop 35
atgcttgctttcataagaacctcct

SEQ ID NO: 406280 - DNA, 25 bp, Artificial
  probe
  misc_feature (1)..(25): SEQ ID NO: 5300; WAN024CJW; Start 13; Stop 37
gcttgctttcataagaacctcctct

SEQ ID NO: 406281 - DNA, 25 bp, Artificial
  probe
  misc_feature (1)..(25): SEQ ID NO: 5300; WAN024CJW; Start 12; Stop 36
tgcttgctttcataagaacctcctc

SEQ ID NO: 406282 - DNA, 25 bp, Artificial
  probe
  misc_feature (1)..(25): SEQ ID NO: 5300; WAN024CJW; Start 18; Stop 42
ctttcataagaacctcctcttctcg

SEQ ID NO: 406283 - DNA, 25 bp, Artificial
  probe
  misc_feature (1)..(25): SEQ ID NO: 5300; WAN024CJW; Start 15; Stop 39
ttgctttcataagaacctcctcttc

SEQ ID NO: 406284 - DNA, 25 bp, Artificial
  probe
  misc_feature (1)..(25): SEQ ID NO: 5300; WAN024CJW; Start 14; Stop 38
cttgctttcataagaacctcctctt

SEQ ID NO: 406285 - DNA, 25 bp, Artificial
  probe
  misc_feature (1)..(25): SEQ ID NO: 5300; WAN024CJW; Start 17; Stop 41
gctttcataagaacctcctcttctc

SEQ ID NO: 406286 - DNA, 25 bp, Artificial
  probe
  misc_feature (1)..(25): SEQ ID NO: 5300; WAN024CJW; Start 152; Stop 176
ttaacacttcctctcagactgtaca

SEQ ID NO: 406287 - DNA, 25 bp, Artificial
  probe
  misc_feature (1)..(25): SEQ ID NO: 5300; WAN024CJW; Start 276; Stop 300
ttttctatactcgttctccatcact

SEQ ID NO: 406288 - DNA, 25 bp, Artificial
  probe
  misc_feature (1)..(25): SEQ ID NO: 5301; WAN024FVI; Start 200; Stop 224
ttcatcttattctcctagcaccttg

SEQ ID NO: 406289 - DNA, 25 bp, Artificial
  probe
  misc_feature (1)..(25): SEQ ID NO: 5301; WAN024FVI; Start 199; Stop 223
cttcatcttattctcctagcacctt

SEQ ID NO: 406290 - DNA, 25 bp, Artificial
  probe
  misc_feature (1)..(25): SEQ ID NO: 5301; WAN024FVI; Start 197; Stop 221
atcttcatcttattctcctagcacc

SEQ ID NO: 406291 - DNA, 25 bp, Artificial
  probe
  misc_feature (1)..(25): SEQ ID NO: 5301; WAN024FVI; Start 198; Stop 222
tcttcatcttattctcctagcacct

SEQ ID NO: 406292 - DNA, 25 bp, Artificial
  probe
  misc_feature (1)..(25): SEQ ID NO: 5301; WAN024FVI; Start 201; Stop 225
tcatcttattctcctagcaccttga

SEQ ID NO: 406293 - DNA, 25 bp, Artificial
  probe
  misc_feature (1)..(25): SEQ ID NO: 5301; WAN024FVI; Start 196; Stop 220
aatcttcatcttattctcctagcac

SEQ ID NO: 406294 - DNA, 25 bp, Artificial
  probe
  misc_feature (1)..(25): SEQ ID NO: 5301; WAN024FVI; Start 122; Stop 146
tgaagatacttggttacagctacac

SEQ ID NO: 406295 - DNA, 25 bp, Artificial
  probe
  misc_feature (1)..(25): SEQ ID NO: 5301; WAN024FVI; Start 121; Stop 145
ttgaagatacttggttacagctaca

SEQ ID NO: 406296 - DNA, 25 bp, Artificial
  probe
  misc_feature (1)..(25): SEQ ID NO: 5301; WAN024FVI; Start 181; Stop 205
ggttgcaggtacaataatcttcatc

SEQ ID NO: 406297 - DNA, 25 bp, Artificial
  probe
  misc_feature (1)..(25): SEQ ID NO: 5301; WAN024FVI; Start 180; Stop 204
tggttgcaggtacaataatcttcat

SEQ ID NO: 406298 - DNA, 25 bp, Artificial
  probe
  misc_feature (1)..(25): SEQ ID NO: 5301; WAN024FVI; Start 182; Stop 206
gttgcaggtacaataatcttcatct

SEQ ID NO: 406299 - DNA, 25 bp, Artificial
  probe
  misc_feature (1)..(25): SEQ ID NO: 5301; WAN024FVI; Start 183; Stop 207
ttgcaggtacaataatcttcatctt

SEQ ID NO: 406300 - DNA, 25 bp, Artificial
  probe
  misc_feature (1)..(25): SEQ ID NO: 5301; WAN024FVI; Start 117; Stop 141
caatttgaagatacttggttacagc

SEQ ID NO: 406301 - DNA, 25 bp, Artificial
  probe
  misc_feature (1)..(25): SEQ ID NO: 5301; WAN024FVI; Start 195; Stop 219
taatcttcatcttattctcctagca

SEQ ID NO: 406302 - DNA, 25 bp, Artificial
  probe
  misc_feature (1)..(25): SEQ ID NO: 5301; WAN024FVI; Start 179; Stop 203
ctggttgcaggtacaataatcttca

SEQ ID NO: 406303 - DNA, 25 bp, Artificial
  probe
  misc_feature (1)..(25): SEQ ID NO: 5301; WAN024FVI; Start 178; Stop 202
actggttgcaggtacaataatcttc

SEQ ID NO: 406304 - DNA, 25 bp, Artificial
  probe
  misc_feature (1)..(25): SEQ ID NO: 5301; WAN024FVI; Start 123; Stop 147
gaagatacttggttacagctacacc

SEQ ID NO: 406305 - DNA, 25 bp, Artificial
  probe
  misc_feature (1)..(25): SEQ ID NO: 5301; WAN024FVI; Start 109; Stop 133
gcagacctcaatttgaagatacttg

SEQ ID NO: 406306 - DNA, 25 bp, Artificial
  probe
  misc_feature (1)..(25): SEQ ID NO: 5301; WAN024FVI; Start 110; Stop 134
cagacctcaatttgaagatacttgg

SEQ ID NO: 406307 - DNA, 25 bp, Artificial
  probe
  misc_feature (1)..(25): SEQ ID NO: 5301; WAN024FVI; Start 184; Stop 208
tgcaggtacaataatcttcatctta

SEQ ID NO: 406308 - DNA, 25 bp, Artificial
  probe
  misc_feature (1)..(25): SEQ ID NO: 5301; WAN024FVI; Start 177; Stop 201
cactggttgcaggtacaataatctt

SEQ ID NO: 406309 - DNA, 25 bp, Artificial
  probe
  misc_feature (1)..(25): SEQ ID NO: 5301; WAN024FVI; Start 84; Stop 108
caatcagccactcatctcgttcttc

SEQ ID NO: 406310 - DNA, 25 bp, Artificial
  probe
  misc_feature (1)..(25): SEQ ID NO: 5301; WAN024FVI; Start 108; Stop 132
cgcagacctcaatttgaagatactt

SEQ ID NO: 406311 - DNA, 25 bp, Artificial
  probe
  misc_feature (1)..(25): SEQ ID NO: 5301; WAN024FVI; Start 106; Stop 130
ttcgcagacctcaatttgaagatac

SEQ ID NO: 406312 - DNA, 25 bp, Artificial
  probe
  misc_feature (1)..(25): SEQ ID NO: 5301; WAN024FVI; Start 185; Stop 209
gcaggtacaataatcttcatcttat

SEQ ID NO: 406313 - DNA, 25 bp, Artificial
  probe
  misc_feature (1)..(25): SEQ ID NO: 5301; WAN024FVI; Start 81; Stop 105
gttcaatcagccactcatctcgttc

SEQ ID NO: 406314 - DNA, 25 bp, Artificial
  probe
  misc_feature (1)..(25): SEQ ID NO: 5301; WAN024FVI; Start 120; Stop 144
tttgaagatacttggttacagctac

SEQ ID NO: 406315 - DNA, 25 bp, Artificial
  probe
  misc_feature (1)..(25): SEQ ID NO: 5301; WAN024FVI; Start 111; Stop 135
agacctcaatttgaagatacttggt

SEQ ID NO: 406316 - DNA, 25 bp, Artificial
  probe
  misc_feature (1)..(25): SEQ ID NO: 5301; WAN024FVI; Start 83; Stop 107
tcaatcagccactcatctcgttctt

SEQ ID NO: 406317 - DNA, 25 bp, Artificial
  probe
  misc_feature (1)..(25): SEQ ID NO: 5301; WAN024FVI; Start 82; Stop 106
ttcaatcagccactcatctcgttct

SEQ ID NO: 406318 - DNA, 25 bp, Artificial
  probe
  misc_feature (1)..(25): SEQ ID NO: 5301; WAN024FVI; Start 118; Stop 142
aatttgaagatacttggttacagct

SEQ ID NO: 406319 - DNA, 25 bp, Artificial
  probe
  misc_feature (1)..(25): SEQ ID NO: 5301; WAN024FVI; Start 107; Stop 131
tcgcagacctcaatttgaagatact

SEQ ID NO: 406320 - DNA, 25 bp, Artificial
  probe
  misc_feature (1)..(25): SEQ ID NO: 5301; WAN024FVI; Start 112; Stop 136
gacctcaatttgaagatacttggtt

SEQ ID NO: 406321 - DNA, 25 bp, Artificial
  probe
  misc_feature (1)..(25): SEQ ID NO: 5302; WAN024GCL; Start 122; Stop 146
cgagacatagccatattacgagttg

SEQ ID NO: 406322 - DNA, 25 bp, Artificial
  probe
  misc_feature (1)..(25): SEQ ID NO: 5302; WAN024GCL; Start 123; Stop 147
gagacatagccatattacgagttgc

SEQ ID NO: 406323 - DNA, 25 bp, Artificial
  probe
  misc_feature (1)..(25): SEQ ID NO: 5302; WAN024GCL; Start 121; Stop 145
acgagacatagccatattacgagtt

SEQ ID NO: 406324 - DNA, 25 bp, Artificial
  probe
  misc_feature (1)..(25): SEQ ID NO: 5302; WAN024GCL; Start 118; Stop 142
ttgacgagacatagccatattacga

SEQ ID NO: 406325 - DNA, 25 bp, Artificial
  probe
  misc_feature (1)..(25): SEQ ID NO: 5302; WAN024GCL; Start 120; Stop 144
gacgagacatagccatattacgagt

SEQ ID NO: 406326 - DNA, 25 bp, Artificial
  probe
  misc_feature (1)..(25): SEQ ID NO: 5302; WAN024GCL; Start 119; Stop 143
tgacgagacatagccatattacgag

SEQ ID NO: 406327 - DNA, 25 bp, Artificial
  probe
  misc_feature (1)..(25): SEQ ID NO: 5302; WAN024GCL; Start 117; Stop 141
tttgacgagacatagccatattacg

SEQ ID NO: 406328 - DNA, 25 bp, Artificial
  probe
  misc_feature (1)..(25): SEQ ID NO: 5302; WAN024GCL; Start 124; Stop 148
agacatagccatattacgagttgca

SEQ ID NO: 406329 - DNA, 25 bp, Artificial
  probe
  misc_feature (1)..(25): SEQ ID NO: 5302; WAN024GCL; Start 157; Stop 181
tttattacgagccacaaagtccttg

SEQ ID NO: 406330 - DNA, 25 bp, Artificial
  probe
  misc_feature (1)..(25): SEQ ID NO: 5302; WAN024GCL; Start 158; Stop 182
ttattacgagccacaaagtccttga

SEQ ID NO: 406331 - DNA, 25 bp, Artificial
  probe
  misc_feature (1)..(25): SEQ ID NO: 5302; WAN024GCL; Start 159; Stop 183
tattacgagccacaaagtccttgag

SEQ ID NO: 406332 - DNA, 25 bp, Artificial
  probe
  misc_feature (1)..(25): SEQ ID NO: 5302; WAN024GCL; Start 72; Stop 96
gtttctcactttggagttcgataat

SEQ ID NO: 406333 - DNA, 25 bp, Artificial
  probe
  misc_feature (1)..(25): SEQ ID NO: 5302; WAN024GCL; Start 71; Stop 95
ggtttctcactttggagttcgataa

SEQ ID NO: 406334 - DNA, 25 bp, Artificial
  probe
  misc_feature (1)..(25): SEQ ID NO: 5302; WAN024GCL; Start 156; Stop 180
ctttattacgagccacaaagtcctt

SEQ ID NO: 406335 - DNA, 25 bp, Artificial
  probe
  misc_feature (1)..(25): SEQ ID NO: 5302; WAN024GCL; Start 75; Stop 99
tctcactttggagttcgataatatc

SEQ ID NO: 406336 - DNA, 25 bp, Artificial
  probe
  misc_feature (1)..(25): SEQ ID NO: 5302; WAN024GCL; Start 76; Stop 100
ctcactttggagttcgataatatcc

SEQ ID NO: 406337 - DNA, 25 bp, Artificial
  probe
  misc_feature (1)..(25): SEQ ID NO: 5302; WAN024GCL; Start 116; Stop 140
ttttgacgagacatagccatattac

SEQ ID NO: 406338 - DNA, 25 bp, Artificial
  probe
  misc_feature (1)..(25): SEQ ID NO: 5302; WAN024GCL; Start 70; Stop 94
tggtttctcactttggagttcgata

SEQ ID NO: 406339 - DNA, 25 bp, Artificial
  probe
  misc_feature (1)..(25): SEQ ID NO: 5302; WAN024GCL; Start 114; Stop 138
tcttttgacgagacatagccatatt

SEQ ID NO: 406340 - DNA, 25 bp, Artificial
  probe
  misc_feature (1)..(25): SEQ ID NO: 5302; WAN024GCL; Start 113; Stop 137
ttcttttgacgagacatagccatat

SEQ ID NO: 406341 - DNA, 25 bp, Artificial
  probe
  misc_feature (1)..(25): SEQ ID NO: 5302; WAN024GCL; Start 112; Stop 136
tttcttttgacgagacatagccata

SEQ ID NO: 406342 - DNA, 25 bp, Artificial
  probe
  misc_feature (1)..(25): SEQ ID NO: 5302; WAN024GCL; Start 115; Stop 139
cttttgacgagacatagccatatta

SEQ ID NO: 406343 - DNA, 25 bp, Artificial
  probe
  misc_feature (1)..(25): SEQ ID NO: 5302; WAN024GCL; Start 73; Stop 97
tttctcactttggagttcgataata

SEQ ID NO: 406344 - DNA, 25 bp, Artificial
  probe
  misc_feature (1)..(25): SEQ ID NO: 5302; WAN024GCL; Start 111; Stop 135
atttcttttgacgagacatagccat

SEQ ID NO: 406345 - DNA, 25 bp, Artificial
  probe
  misc_feature (1)..(25): SEQ ID NO: 5302; WAN024GCL; Start 59; Stop 83
aaggatggttttggtttctcacttt

SEQ ID NO: 406346 - DNA, 25 bp, Artificial
  probe
  misc_feature (1)..(25): SEQ ID NO: 5302; WAN024GCL; Start 58; Stop 82
aaaggatggttttggtttctcactt

SEQ ID NO: 406347 - DNA, 25 bp, Artificial
  probe
  misc_feature (1)..(25): SEQ ID NO: 5302; WAN024GCL; Start 107; Stop 131
tccaatttcttttgacgagacatag

SEQ ID NO: 406348 - DNA, 25 bp, Artificial
  probe
  misc_feature (1)..(25): SEQ ID NO: 5302; WAN024GCL; Start 74; Stop 98
ttctcactttggagttcgataatat

SEQ ID NO: 406349 - DNA, 25 bp, Artificial
  probe
  misc_feature (1)..(25): SEQ ID NO: 5302; WAN024GCL; Start 109; Stop 133
caatttcttttgacgagacatagcc

SEQ ID NO: 406350 - DNA, 25 bp, Artificial
  probe
  misc_feature (1)..(25): SEQ ID NO: 5302; WAN024GCL; Start 108; Stop 132
ccaatttcttttgacgagacatagc

SEQ ID NO: 406351 - DNA, 25 bp, Artificial
  probe
  misc_feature (1)..(25): SEQ ID NO: 5302; WAN024GCL; Start 110; Stop 134
aatttcttttgacgagacatagcca

SEQ ID NO: 406352 - DNA, 25 bp, Artificial
  probe
  misc_feature (1)..(25): SEQ ID NO: 5302; WAN024GCL; Start 104; Stop 128
ttatccaatttcttttgacgagaca

SEQ ID NO: 406353 - DNA, 25 bp, Artificial
  probe
  misc_feature (1)..(25): SEQ ID NO: 5302; WAN024GCL; Start 62; Stop 86
gatggttttggtttctcactttgga

SEQ ID NO: 406354 - DNA, 25 bp, Artificial
  probe
  misc_feature (1)..(25): SEQ ID NO: 5303; WAN024D7J; Start 301; Stop 325
ttctctccagtctacaacttctcta

SEQ ID NO: 406355 - DNA, 25 bp, Artificial
  probe
  misc_feature (1)..(25): SEQ ID NO: 5303; WAN024D7J; Start 302; Stop 326
tctctccagtctacaacttctctat

SEQ ID NO: 406356 - DNA, 25 bp, Artificial
  probe
  misc_feature (1)..(25): SEQ ID NO: 5303; WAN024D7J; Start 304; Stop 328
tctccagtctacaacttctctatcc

SEQ ID NO: 406357 - DNA, 25 bp, Artificial
  probe
  misc_feature (1)..(25): SEQ ID NO: 5303; WAN024D7J; Start 303; Stop 327
ctctccagtctacaacttctctatc

SEQ ID NO: 406358 - DNA, 25 bp, Artificial
  probe
  misc_feature (1)..(25): SEQ ID NO: 5303; WAN024D7J; Start 310; Stop 334
gtctacaacttctctatccctggta

SEQ ID NO: 406359 - DNA, 25 bp, Artificial
  probe
  misc_feature (1)..(25): SEQ ID NO: 5303; WAN024D7J; Start 570; Stop 594
agaaacagtcctaaactcacttgaa

SEQ ID NO: 406360 - DNA, 25 bp, Artificial
  probe
  misc_feature (1)..(25): SEQ ID NO: 5303; WAN024D7J; Start 569; Stop 593
aagaaacagtcctaaactcacttga

SEQ ID NO: 406361 - DNA, 25 bp, Artificial
  probe
  misc_feature (1)..(25): SEQ ID NO: 5303; WAN024D7J; Start 567; Stop 591
tgaagaaacagtcctaaactcactt

SEQ ID NO: 406362 - DNA, 25 bp, Artificial
  probe
  misc_feature (1)..(25): SEQ ID NO: 5303; WAN024D7J; Start 566; Stop 590
ttgaagaaacagtcctaaactcact

SEQ ID NO: 406363 - DNA, 25 bp, Artificial
  probe
  misc_feature (1)..(25): SEQ ID NO: 5303; WAN024D7J; Start 568; Stop 592
gaagaaacagtcctaaactcacttg

SEQ ID NO: 406364 - DNA, 25 bp, Artificial
  probe
  misc_feature (1)..(25): SEQ ID NO: 5303; WAN024D7J; Start 565; Stop 589
cttgaagaaacagtcctaaactcac

SEQ ID NO: 406365 - DNA, 25 bp, Artificial
  probe
  misc_feature (1)..(25): SEQ ID NO: 5303; WAN024D7J; Start 571; Stop 595
gaaacagtcctaaactcacttgaaa

SEQ ID NO: 406366 - DNA, 25 bp, Artificial
  probe
  misc_feature (1)..(25): SEQ ID NO: 5303; WAN024D7J; Start 300; Stop 324
tttctctccagtctacaacttctct

SEQ ID NO: 406367 - DNA, 25 bp, Artificial
  probe
  misc_feature (1)..(25): SEQ ID NO: 5303; WAN024D7J; Start 311; Stop 335
tctacaacttctctatccctggtac

SEQ ID NO: 406368 - DNA, 25 bp, Artificial
  probe
  misc_feature (1)..(25): SEQ ID NO: 5303; WAN024D7J; Start 312; Stop 336
ctacaacttctctatccctggtaca

SEQ ID NO: 406369 - DNA, 25 bp, Artificial
  probe
  misc_feature (1)..(25): SEQ ID NO: 5303; WAN024D7J; Start 197; Stop 221
attattcagcccttcctctcttcag

SEQ ID NO: 406370 - DNA, 25 bp, Artificial
  probe
  misc_feature (1)..(25): SEQ ID NO: 5303; WAN024D7J; Start 196; Stop 220
gattattcagcccttcctctcttca

SEQ ID NO: 406371 - DNA, 25 bp, Artificial
  probe
  misc_feature (1)..(25): SEQ ID NO: 5303; WAN024D7J; Start 467; Stop 491
tctacaaagacctcttgccatttat

SEQ ID NO: 406372 - DNA, 25 bp, Artificial
  probe
  misc_feature (1)..(25): SEQ ID NO: 5303; WAN024D7J; Start 466; Stop 490
atctacaaagacctcttgccattta

SEQ ID NO: 406373 - DNA, 25 bp, Artificial
  probe
  misc_feature (1)..(25): SEQ ID NO: 5303; WAN024D7J; Start 465; Stop 489
tatctacaaagacctcttgccattt

SEQ ID NO: 406374 - DNA, 25 bp, Artificial
  probe
  misc_feature (1)..(25): SEQ ID NO: 5303; WAN024D7J; Start 468; Stop 492
ctacaaagacctcttgccatttatc

SEQ ID NO: 406375 - DNA, 25 bp, Artificial
  probe
  misc_feature (1)..(25): SEQ ID NO: 5303; WAN024D7J; Start 464; Stop 488
ctatctacaaagacctcttgccatt

SEQ ID NO: 406376 - DNA, 25 bp, Artificial
  probe
  misc_feature (1)..(25): SEQ ID NO: 5303; WAN024D7J; Start 459; Stop 483
tttcgctatctacaaagacctcttg

SEQ ID NO: 406377 - DNA, 25 bp, Artificial
  probe
  misc_feature (1)..(25): SEQ ID NO: 5303; WAN024D7J; Start 564; Stop 588
tcttgaagaaacagtcctaaactca

SEQ ID NO: 406378 - DNA, 25 bp, Artificial
  probe
  misc_feature (1)..(25): SEQ ID NO: 5303; WAN024D7J; Start 469; Stop 493
tacaaagacctcttgccatttatcc

SEQ ID NO: 406379 - DNA, 25 bp, Artificial
  probe
  misc_feature (1)..(25): SEQ ID NO: 5303; WAN024D7J; Start 305; Stop 329
ctccagtctacaacttctctatccc

SEQ ID NO: 406380 - DNA, 25 bp, Artificial
  probe
  misc_feature (1)..(25): SEQ ID NO: 5303; WAN024D7J; Start 194; Stop 218
ttgattattcagcccttcctctctt

SEQ ID NO: 406381 - DNA, 25 bp, Artificial
  probe
  misc_feature (1)..(25): SEQ ID NO: 5303; WAN024D7J; Start 306; Stop 330
tccagtctacaacttctctatccct

SEQ ID NO: 406382 - DNA, 25 bp, Artificial
  probe
  misc_feature (1)..(25): SEQ ID NO: 5303; WAN024D7J; Start 195; Stop 219
tgattattcagcccttcctctcttc

SEQ ID NO: 406383 - DNA, 25 bp, Artificial
  probe
  misc_feature (1)..(25): SEQ ID NO: 5303; WAN024D7J; Start 193; Stop 217
cttgattattcagcccttcctctct

SEQ ID NO: 406384 - DNA, 25 bp, Artificial
  probe
  misc_feature (1)..(25): SEQ ID NO: 5303; WAN024D7J; Start 190; Stop 214
taccttgattattcagcccttcctc

SEQ ID NO: 406385 - DNA, 25 bp, Artificial
  probe
  misc_feature (1)..(25): SEQ ID NO: 5303; WAN024D7J; Start 189; Stop 213
ctaccttgattattcagcccttcct

SEQ ID NO: 406386 - DNA, 25 bp, Artificial
  probe
  misc_feature (1)..(25): SEQ ID NO: 5303; WAN024D7J; Start 309; Stop 333
agtctacaacttctctatccctggt

SEQ ID NO: 406387 - DNA, 25 bp, Artificial
  probe
  misc_feature (1)..(25): SEQ ID NO: 5304; WAN024F2N; Start 94; Stop 118
ataaagcgtcaagtgaggaatatct

SEQ ID NO: 406388 - DNA, 25 bp, Artificial
  probe
  misc_feature (1)..(25): SEQ ID NO: 5304; WAN024F2N; Start 72; Stop 96
cctccaccaaatccgctttattata

SEQ ID NO: 406389 - DNA, 25 bp, Artificial
  probe
  misc_feature (1)..(25): SEQ ID NO: 5304; WAN024F2N; Start 95; Stop 119
taaagcgtcaagtgaggaatatctt

SEQ ID NO: 406390 - DNA, 25 bp, Artificial
  probe
  misc_feature (1)..(25): SEQ ID NO: 5304; WAN024F2N; Start 26; Stop 50
gacttggcagaaatgagggtatatg

SEQ ID NO: 406391 - DNA, 25 bp, Artificial
  probe
  misc_feature (1)..(25): SEQ ID NO: 5304; WAN024F2N; Start 25; Stop 49
agacttggcagaaatgagggtatat

SEQ ID NO: 406392 - DNA, 25 bp, Artificial
  probe
  misc_feature (1)..(25): SEQ ID NO: 5304; WAN024F2N; Start 96; Stop 120
aaagcgtcaagtgaggaatatcttc

SEQ ID NO: 406393 - DNA, 25 bp, Artificial
  probe
  misc_feature (1)..(25): SEQ ID NO: 5304; WAN024F2N; Start 93; Stop 117
tataaagcgtcaagtgaggaatatc

SEQ ID NO: 406394 - DNA, 25 bp, Artificial
  probe
  misc_feature (1)..(25): SEQ ID NO: 5304; WAN024F2N; Start 112; Stop 136
aatatcttccatgtccaggtctttc

SEQ ID NO: 406395 - DNA, 25 bp, Artificial
  probe
  misc_feature (1)..(25): SEQ ID NO: 5304; WAN024F2N; Start 71; Stop 95
tcctccaccaaatccgctttattat

SEQ ID NO: 406396 - DNA, 25 bp, Artificial
  probe
  misc_feature (1)..(25): SEQ ID NO: 5304; WAN024F2N; Start 70; Stop 94
atcctccaccaaatccgctttatta

SEQ ID NO: 406397 - DNA, 25 bp, Artificial
  probe
  misc_feature (1)..(25): SEQ ID NO: 5304; WAN024F2N; Start 24; Stop 48
cagacttggcagaaatgagggtata

SEQ ID NO: 406398 - DNA, 25 bp, Artificial
  probe
  misc_feature (1)..(25): SEQ ID NO: 5304; WAN024F2N; Start 111; Stop 135
gaatatcttccatgtccaggtcttt

SEQ ID NO: 406399 - DNA, 25 bp, Artificial
  probe
  misc_feature (1)..(25): SEQ ID NO: 5304; WAN024F2N; Start 33; Stop 57
cagaaatgagggtatatggcgtttg

SEQ ID NO: 406400 - DNA, 25 bp, Artificial
  probe
  misc_feature (1)..(25): SEQ ID NO: 5304; WAN024F2N; Start 191; Stop 215
ataacatgaaccagaaggtccacat

SEQ ID NO: 406401 - DNA, 25 bp, Artificial
  probe
  misc_feature (1)..(25): SEQ ID NO: 5304; WAN024F2N; Start 73; Stop 97
ctccaccaaatccgctttattataa

SEQ ID NO: 406402 - DNA, 25 bp, Artificial
  probe
  misc_feature (1)..(25): SEQ ID NO: 5304; WAN024F2N; Start 113; Stop 137
atatcttccatgtccaggtctttca

SEQ ID NO: 406403 - DNA, 25 bp, Artificial
  probe
  misc_feature (1)..(25): SEQ ID NO: 5304; WAN024F2N; Start 27; Stop 51
acttggcagaaatgagggtatatgg

SEQ ID NO: 406404 - DNA, 25 bp, Artificial
  probe
  misc_feature (1)..(25): SEQ ID NO: 5304; WAN024F2N; Start 114; Stop 138
tatcttccatgtccaggtctttcat

SEQ ID NO: 406405 - DNA, 25 bp, Artificial
  probe
  misc_feature (1)..(25): SEQ ID NO: 5304; WAN024F2N; Start 74; Stop 98
tccaccaaatccgctttattataaa

SEQ ID NO: 406406 - DNA, 25 bp, Artificial
  probe
  misc_feature (1)..(25): SEQ ID NO: 5304; WAN024F2N; Start 89; Stop 113
ttattataaagcgtcaagtgaggaa

SEQ ID NO: 406407 - DNA, 25 bp, Artificial
  probe
  misc_feature (1)..(25): SEQ ID NO: 5304; WAN024F2N; Start 190; Stop 214
gataacatgaaccagaaggtccaca

SEQ ID NO: 406408 - DNA, 25 bp, Artificial
  probe
  misc_feature (1)..(25): SEQ ID NO: 5304; WAN024F2N; Start 69; Stop 93
aatcctccaccaaatccgctttatt

SEQ ID NO: 406409 - DNA, 25 bp, Artificial
  probe
  misc_feature (1)..(25): SEQ ID NO: 5304; WAN024F2N; Start 68; Stop 92
aaatcctccaccaaatccgctttat

SEQ ID NO: 406410 - DNA, 25 bp, Artificial
  probe
  misc_feature (1)..(25): SEQ ID NO: 5304; WAN024F2N; Start 92; Stop 116
ttataaagcgtcaagtgaggaatat

SEQ ID NO: 406411 - DNA, 25 bp, Artificial
  probe
  misc_feature (1)..(25): SEQ ID NO: 5304; WAN024F2N; Start 91; Stop 115
attataaagcgtcaagtgaggaata

SEQ ID NO: 406412 - DNA, 25 bp, Artificial
  probe
  misc_feature (1)..(25): SEQ ID NO: 5304; WAN024F2N; Start 90; Stop 114
tattataaagcgtcaagtgaggaat

SEQ ID NO: 406413 - DNA, 25 bp, Artificial
  probe
  misc_feature (1)..(25): SEQ ID NO: 5304; WAN024F2N; Start 88; Stop 112
tttattataaagcgtcaagtgagga

SEQ ID NO: 406414 - DNA, 25 bp, Artificial
  probe
  misc_feature (1)..(25): SEQ ID NO: 5304; WAN024F2N; Start 34; Stop 58
agaaatgagggtatatggcgtttgg

SEQ ID NO: 406415 - DNA, 25 bp, Artificial
  probe
  misc_feature (1)..(25): SEQ ID NO: 5304; WAN024F2N; Start 183; Stop 207
tagcatcgataacatgaaccagaag

SEQ ID NO: 406416 - DNA, 25 bp, Artificial
  probe
  misc_feature (1)..(25): SEQ ID NO: 5304; WAN024F2N; Start 182; Stop 206
ctagcatcgataacatgaaccagaa

SEQ ID NO: 406417 - DNA, 25 bp, Artificial
  probe
  misc_feature (1)..(25): SEQ ID NO: 5304; WAN024F2N; Start 67; Stop 91
gaaatcctccaccaaatccgcttta

SEQ ID NO: 406418 - DNA, 25 bp, Artificial
  probe
  misc_feature (1)..(25): SEQ ID NO: 5304; WAN024F2N; Start 32; Stop 56
gcagaaatgagggtatatggcgttt

SEQ ID NO: 406419 - DNA, 25 bp, Artificial
  probe
  misc_feature (1)..(25): SEQ ID NO: 5304; WAN024F2N; Start 28; Stop 52
cttggcagaaatgagggtatatggc

SEQ ID NO: 406420 - DNA, 25 bp, Artificial
  probe
  misc_feature (1)..(25): SEQ ID NO: 5305; WAN024CHO; Start 125; Stop 149
tattcttctgcttcatcttctgtaa

SEQ ID NO: 406421 - DNA, 25 bp, Artificial
  probe
  misc_feature (1)..(25): SEQ ID NO: 5305; WAN024CHO; Start 124; Stop 148
ttattcttctgcttcatcttctgta

SEQ ID NO: 406422 - DNA, 25 bp, Artificial
  probe
  misc_feature (1)..(25): SEQ ID NO: 5305; WAN024CHO; Start 201; Stop 225
catagttgccttgctcgatgatatt

SEQ ID NO: 406423 - DNA, 25 bp, Artificial
  probe
  misc_feature (1)..(25): SEQ ID NO: 5305; WAN024CHO; Start 127; Stop 151
ttcttctgcttcatcttctgtaaat

SEQ ID NO: 406424 - DNA, 25 bp, Artificial
  probe
  misc_feature (1)..(25): SEQ ID NO: 5305; WAN024CHO; Start 126; Stop 150
attcttctgcttcatcttctgtaaa

SEQ ID NO: 406425 - DNA, 25 bp, Artificial
  probe
  misc_feature (1)..(25): SEQ ID NO: 5305; WAN024CHO; Start 123; Stop 147
tttattcttctgcttcatcttctgt

SEQ ID NO: 406426 - DNA, 25 bp, Artificial
  probe
  misc_feature (1)..(25): SEQ ID NO: 5305; WAN024CHO; Start 48; Stop 72
ttctgactcatacttctctctttct

SEQ ID NO: 406427 - DNA, 25 bp, Artificial
  probe
  misc_feature (1)..(25): SEQ ID NO: 5305; WAN024CHO; Start 131; Stop 155
tctgcttcatcttctgtaaattgac

SEQ ID NO: 406428 - DNA, 25 bp, Artificial
  probe
  misc_feature (1)..(25): SEQ ID NO: 5305; WAN024CHO; Start 132; Stop 156
ctgcttcatcttctgtaaattgact

SEQ ID NO: 406429 - DNA, 25 bp, Artificial
  probe
  misc_feature (1)..(25): SEQ ID NO: 5305; WAN024CHO; Start 129; Stop 153
cttctgcttcatcttctgtaaattg

SEQ ID NO: 406430 - DNA, 25 bp, Artificial
  probe
  misc_feature (1)..(25): SEQ ID NO: 5305; WAN024CHO; Start 128; Stop 152
tcttctgcttcatcttctgtaaatt

SEQ ID NO: 406431 - DNA, 25 bp, Artificial
  probe
  misc_feature (1)..(25): SEQ ID NO: 5305; WAN024CHO; Start 189; Stop 213
ccatcagttcctcatagttgccttg

SEQ ID NO: 406432 - DNA, 25 bp, Artificial
  probe
  misc_feature (1)..(25): SEQ ID NO: 5305; WAN024CHO; Start 47; Stop 71
tttctgactcatacttctctctttc

SEQ ID NO: 406433 - DNA, 25 bp, Artificial
  probe
  misc_feature (1)..(25): SEQ ID NO: 5305; WAN024CHO; Start 130; Stop 154
ttctgcttcatcttctgtaaattga

SEQ ID NO: 406434 - DNA, 25 bp, Artificial
  probe
  misc_feature (1)..(25): SEQ ID NO: 5305; WAN024CHO; Start 49; Stop 73
tctgactcatacttctctctttcta

SEQ ID NO: 406435 - DNA, 25 bp, Artificial
  probe
  misc_feature (1)..(25): SEQ ID NO: 5305; WAN024CHO; Start 133; Stop 157
tgcttcatcttctgtaaattgacta

SEQ ID NO: 406436 - DNA, 25 bp, Artificial
  probe
  misc_feature (1)..(25): SEQ ID NO: 5305; WAN024CHO; Start 454; Stop 478
ggtgtcatccaagatggtatcatag

SEQ ID NO: 406437 - DNA, 25 bp, Artificial
  probe
  misc_feature (1)..(25): SEQ ID NO: 5305; WAN024CHO; Start 202; Stop 226
atagttgccttgctcgatgatattt

SEQ ID NO: 406438 - DNA, 25 bp, Artificial
  probe
  misc_feature (1)..(25): SEQ ID NO: 5305; WAN024CHO; Start 122; Stop 146
atttattcttctgcttcatcttctg

SEQ ID NO: 406439 - DNA, 25 bp, Artificial
  probe
  misc_feature (1)..(25): SEQ ID NO: 5305; WAN024CHO; Start 46; Stop 70
atttctgactcatacttctctcttt

SEQ ID NO: 406440 - DNA, 25 bp, Artificial
  probe
  misc_feature (1)..(25): SEQ ID NO: 5305; WAN024CHO; Start 13; Stop 37
ctaagtagacagcagcaaatttcat

SEQ ID NO: 406441 - DNA, 25 bp, Artificial
  probe
  misc_feature (1)..(25): SEQ ID NO: 5305; WAN024CHO; Start 191; Stop 215
atcagttcctcatagttgccttgct

SEQ ID NO: 406442 - DNA, 25 bp, Artificial
  probe
  misc_feature (1)..(25): SEQ ID NO: 5305; WAN024CHO; Start 190; Stop 214
catcagttcctcatagttgccttgc

SEQ ID NO: 406443 - DNA, 25 bp, Artificial
  probe
  misc_feature (1)..(25): SEQ ID NO: 5305; WAN024CHO; Start 45; Stop 69
aatttctgactcatacttctctctt

SEQ ID NO: 406444 - DNA, 25 bp, Artificial
  probe
  misc_feature (1)..(25): SEQ ID NO: 5305; WAN024CHO; Start 203; Stop 227
tagttgccttgctcgatgatatttc

SEQ ID NO: 406445 - DNA, 25 bp, Artificial
  probe
  misc_feature (1)..(25): SEQ ID NO: 5305; WAN024CHO; Start 16; Stop 40
agtagacagcagcaaatttcatatt

SEQ ID NO: 406446 - DNA, 25 bp, Artificial
  probe
  misc_feature (1)..(25): SEQ ID NO: 5305; WAN024CHO; Start 15; Stop 39
aagtagacagcagcaaatttcatat

SEQ ID NO: 406447 - DNA, 25 bp, Artificial
  probe
  misc_feature (1)..(25): SEQ ID NO: 5305; WAN024CHO; Start 121; Stop 145
gatttattcttctgcttcatcttct

SEQ ID NO: 406448 - DNA, 25 bp, Artificial
  probe
  misc_feature (1)..(25): SEQ ID NO: 5305; WAN024CHO; Start 50; Stop 74
ctgactcatacttctctctttctat

SEQ ID NO: 406449 - DNA, 25 bp, Artificial
  probe
  misc_feature (1)..(25): SEQ ID NO: 5305; WAN024CHO; Start 120; Stop 144
tgatttattcttctgcttcatcttc

SEQ ID NO: 406450 - DNA, 25 bp, Artificial
  probe
  misc_feature (1)..(25): SEQ ID NO: 5305; WAN024CHO; Start 17; Stop 41
gtagacagcagcaaatttcatattg

SEQ ID NO: 406451 - DNA, 25 bp, Artificial
  probe
  misc_feature (1)..(25): SEQ ID NO: 5305; WAN024CHO; Start 14; Stop 38
taagtagacagcagcaaatttcata

SEQ ID NO: 406452 - DNA, 25 bp, Artificial
  probe
  misc_feature (1)..(25): SEQ ID NO: 5305; WAN024CHO; Start 453; Stop 477
cggtgtcatccaagatggtatcata

SEQ ID NO: 406453 - DNA, 25 bp, Artificial
  probe
  misc_feature (1)..(25): SEQ ID NO: 5306; WAN024BDV; Start 104; Stop 128
ggctctataatatttgtagtgggct

SEQ ID NO: 406454 - DNA, 25 bp, Artificial
  probe
  misc_feature (1)..(25): SEQ ID NO: 5306; WAN024BDV; Start 101; Stop 125
tcgggctctataatatttgtagtgg

SEQ ID NO: 406455 - DNA, 25 bp, Artificial
  probe
  misc_feature (1)..(25): SEQ ID NO: 5306; WAN024BDV; Start 102; Stop 126
cgggctctataatatttgtagtggg

SEQ ID NO: 406456 - DNA, 25 bp, Artificial
  probe
  misc_feature (1)..(25): SEQ ID NO: 5306; WAN024BDV; Start 103; Stop 127
gggctctataatatttgtagtgggc

SEQ ID NO: 406457 - DNA, 25 bp, Artificial
  probe
  misc_feature (1)..(25): SEQ ID NO: 5306; WAN024BDV; Start 17; Stop 41
agaatatcggagaatttgaagaaga

SEQ ID NO: 406458 - DNA, 25 bp, Artificial
  probe
  misc_feature (1)..(25): SEQ ID NO: 5306; WAN024BDV; Start 15; Stop 39
agagaatatcggagaatttgaagaa

SEQ ID NO: 406459 - DNA, 25 bp, Artificial
  probe
  misc_feature (1)..(25): SEQ ID NO: 5306; WAN024BDV; Start 16; Stop 40
gagaatatcggagaatttgaagaag

SEQ ID NO: 406460 - DNA, 25 bp, Artificial
  probe
  misc_feature (1)..(25): SEQ ID NO: 5306; WAN024BDV; Start 100; Stop 124
ttcgggctctataatatttgtagtg

SEQ ID NO: 406461 - DNA, 25 bp, Artificial
  probe
  misc_feature (1)..(25): SEQ ID NO: 5306; WAN024BDV; Start 23; Stop 47
tcggagaatttgaagaagataatct

SEQ ID NO: 406462 - DNA, 25 bp, Artificial
  probe
  misc_feature (1)..(25): SEQ ID NO: 5306; WAN024BDV; Start 14; Stop 38
tagagaatatcggagaatttgaaga

SEQ ID NO: 406463 - DNA, 25 bp, Artificial
  probe
  misc_feature (1)..(25): SEQ ID NO: 5306; WAN024BDV; Start 105; Stop 129
gctctataatatttgtagtgggcta

SEQ ID NO: 406464 - DNA, 25 bp, Artificial
  probe
  misc_feature (1)..(25): SEQ ID NO: 5306; WAN024BDV; Start 22; Stop 46
atcggagaatttgaagaagataatc

SEQ ID NO: 406465 - DNA, 25 bp, Artificial
  probe
  misc_feature (1)..(25): SEQ ID NO: 5306; WAN024BDV; Start 18; Stop 42
gaatatcggagaatttgaagaagat

SEQ ID NO: 406466 - DNA, 25 bp, Artificial
  probe
  misc_feature (1)..(25): SEQ ID NO: 5306; WAN024BDV; Start 99; Stop 123
tttcgggctctataatatttgtagt

SEQ ID NO: 406467 - DNA, 25 bp, Artificial
  probe
  misc_feature (1)..(25): SEQ ID NO: 5306; WAN024BDV; Start 3; Stop 27
gcacaaaactttagagaatatcgga

SEQ ID NO: 406468 - DNA, 25 bp, Artificial
  probe
  misc_feature (1)..(25): SEQ ID NO: 5306; WAN024BDV; Start 10; Stop 34
actttagagaatatcggagaatttg

SEQ ID NO: 406469 - DNA, 25 bp, Artificial
  probe
  misc_feature (1)..(25): SEQ ID NO: 5306; WAN024BDV; Start 13; Stop 37
ttagagaatatcggagaatttgaag

SEQ ID NO: 406470 - DNA, 25 bp, Artificial
  probe
  misc_feature (1)..(25): SEQ ID NO: 5306; WAN024BDV; Start 11; Stop 35
ctttagagaatatcggagaatttga

SEQ ID NO: 406471 - DNA, 25 bp, Artificial
  probe
  misc_feature (1)..(25): SEQ ID NO: 5306; WAN024BDV; Start 61; Stop 85
atagacaaaagcagaaacaaggatc

SEQ ID NO: 406472 - DNA, 25 bp, Artificial
  probe
  misc_feature (1)..(25): SEQ ID NO: 5306; WAN024BDV; Start 60; Stop 84
tatagacaaaagcagaaacaaggat

SEQ ID NO: 406473 - DNA, 25 bp, Artificial
  probe
  misc_feature (1)..(25): SEQ ID NO: 5306; WAN024BDV; Start 62; Stop 86
tagacaaaagcagaaacaaggatca

SEQ ID NO: 406474 - DNA, 25 bp, Artificial
  probe
  misc_feature (1)..(25): SEQ ID NO: 5306; WAN024BDV; Start 12; Stop 36
tttagagaatatcggagaatttgaa

SEQ ID NO: 406475 - DNA, 25 bp, Artificial
  probe
  misc_feature (1)..(25): SEQ ID NO: 5306; WAN024BDV; Start 5; Stop 29
acaaaactttagagaatatcggaga

SEQ ID NO: 406476 - DNA, 25 bp, Artificial
  probe
  misc_feature (1)..(25): SEQ ID NO: 5306; WAN024BDV; Start 4; Stop 28
cacaaaactttagagaatatcggag

SEQ ID NO: 406477 - DNA, 25 bp, Artificial
  probe
  misc_feature (1)..(25): SEQ ID NO: 5306; WAN024BDV; Start 63; Stop 87
agacaaaagcagaaacaaggatcag

SEQ ID NO: 406478 - DNA, 25 bp, Artificial
  probe
  misc_feature (1)..(25): SEQ ID NO: 5306; WAN024BDV; Start 65; Stop 89
acaaaagcagaaacaaggatcagtt

SEQ ID NO: 406479 - DNA, 25 bp, Artificial
  probe
  misc_feature (1)..(25): SEQ ID NO: 5306; WAN024BDV; Start 9; Stop 33
aactttagagaatatcggagaattt

SEQ ID NO: 406480 - DNA, 25 bp, Artificial
  probe
  misc_feature (1)..(25): SEQ ID NO: 5306; WAN024BDV; Start 8; Stop 32
aaactttagagaatatcggagaatt

SEQ ID NO: 406481 - DNA, 25 bp, Artificial
  probe
  misc_feature (1)..(25): SEQ ID NO: 5306; WAN024BDV; Start 64; Stop 88
gacaaaagcagaaacaaggatcagt

SEQ ID NO: 406482 - DNA, 25 bp, Artificial
  probe
  misc_feature (1)..(25): SEQ ID NO: 5306; WAN024BDV; Start 79; Stop 103
aaggatcagttttcccatattttcg

SEQ ID NO: 406483 - DNA, 25 bp, Artificial
  probe
  misc_feature (1)..(25): SEQ ID NO: 5306; WAN024BDV; Start 2; Stop 26
tgcacaaaactttagagaatatcgg

SEQ ID NO: 406484 - DNA, 25 bp, Artificial
  probe
  misc_feature (1)..(25): SEQ ID NO: 5306; WAN024BDV; Start 59; Stop 83
ctatagacaaaagcagaaacaagga

SEQ ID NO: 406485 - DNA, 25 bp, Artificial
  probe
  misc_feature (1)..(25): SEQ ID NO: 5306; WAN024BDV; Start 80; Stop 104
aggatcagttttcccatattttcgg

SEQ ID NO: 406486 - DNA, 25 bp, Artificial
  probe
  misc_feature (1)..(25): SEQ ID NO: 5307; WAN024CGY; Start 166; Stop 190
ttcatagactgcttcatccaacaat

SEQ ID NO: 406487 - DNA, 25 bp, Artificial
  probe
  misc_feature (1)..(25): SEQ ID NO: 5307; WAN024CGY; Start 168; Stop 192
catagactgcttcatccaacaattc

SEQ ID NO: 406488 - DNA, 25 bp, Artificial
  probe
  misc_feature (1)..(25): SEQ ID NO: 5307; WAN024CGY; Start 167; Stop 191
tcatagactgcttcatccaacaatt

SEQ ID NO: 406489 - DNA, 25 bp, Artificial
  probe
  misc_feature (1)..(25): SEQ ID NO: 5307; WAN024CGY; Start 169; Stop 193
atagactgcttcatccaacaattct

SEQ ID NO: 406490 - DNA, 25 bp, Artificial
  probe
  misc_feature (1)..(25): SEQ ID NO: 5307; WAN024CGY; Start 170; Stop 194
tagactgcttcatccaacaattctt

SEQ ID NO: 406491 - DNA, 25 bp, Artificial
  probe
  misc_feature (1)..(25): SEQ ID NO: 5307; WAN024CGY; Start 164; Stop 188
atttcatagactgcttcatccaaca

SEQ ID NO: 406492 - DNA, 25 bp, Artificial
  probe
  misc_feature (1)..(25): SEQ ID NO: 5307; WAN024CGY; Start 165; Stop 189
tttcatagactgcttcatccaacaa

SEQ ID NO: 406493 - DNA, 25 bp, Artificial
  probe
  misc_feature (1)..(25): SEQ ID NO: 5307; WAN024CGY; Start 159; Stop 183
gaccaatttcatagactgcttcatc

SEQ ID NO: 406494 - DNA, 25 bp, Artificial
  probe
  misc_feature (1)..(25): SEQ ID NO: 5307; WAN024CGY; Start 163; Stop 187
aatttcatagactgcttcatccaac

SEQ ID NO: 406495 - DNA, 25 bp, Artificial
  probe
  misc_feature (1)..(25): SEQ ID NO: 5307; WAN024CGY; Start 162; Stop 186
caatttcatagactgcttcatccaa

SEQ ID NO: 406496 - DNA, 25 bp, Artificial
  probe
  misc_feature (1)..(25): SEQ ID NO: 5307; WAN024CGY; Start 229; Stop 253
cataagtcccacacccatattgaag

SEQ ID NO: 406497 - DNA, 25 bp, Artificial
  probe
  misc_feature (1)..(25): SEQ ID NO: 5307; WAN024CGY; Start 231; Stop 255
taagtcccacacccatattgaagat

SEQ ID NO: 406498 - DNA, 25 bp, Artificial
  probe
  misc_feature (1)..(25): SEQ ID NO: 5307; WAN024CGY; Start 230; Stop 254
ataagtcccacacccatattgaaga

SEQ ID NO: 406499 - DNA, 25 bp, Artificial
  probe
  misc_feature (1)..(25): SEQ ID NO: 5307; WAN024CGY; Start 161; Stop 185
ccaatttcatagactgcttcatcca

SEQ ID NO: 406500 - DNA, 25 bp, Artificial
  probe
  misc_feature (1)..(25): SEQ ID NO: 5307; WAN024CGY; Start 160; Stop 184
accaatttcatagactgcttcatcc

SEQ ID NO: 406501 - DNA, 25 bp, Artificial
  probe
  misc_feature (1)..(25): SEQ ID NO: 5307; WAN024CGY; Start 158; Stop 182
cgaccaatttcatagactgcttcat

SEQ ID NO: 406502 - DNA, 25 bp, Artificial
  probe
  misc_feature (1)..(25): SEQ ID NO: 5307; WAN024CGY; Start 228; Stop 252
acataagtcccacacccatattgaa

SEQ ID NO: 406503 - DNA, 25 bp, Artificial
  probe
  misc_feature (1)..(25): SEQ ID NO: 5307; WAN024CGY; Start 227; Stop 251
aacataagtcccacacccatattga

SEQ ID NO: 406504 - DNA, 25 bp, Artificial
  probe
  misc_feature (1)..(25): SEQ ID NO: 5307; WAN024CGY; Start 171; Stop 195
agactgcttcatccaacaattcttt

SEQ ID NO: 406505 - DNA, 25 bp, Artificial
  probe
  misc_feature (1)..(25): SEQ ID NO: 5307; WAN024CGY; Start 234; Stop 258
gtcccacacccatattgaagatttc

SEQ ID NO: 406506 - DNA, 25 bp, Artificial
  probe
  misc_feature (1)..(25): SEQ ID NO: 5307; WAN024CGY; Start 261; Stop 285
acatttcttcgtgtttaatctgacc

SEQ ID NO: 406507 - DNA, 25 bp, Artificial
  probe
  misc_feature (1)..(25): SEQ ID NO: 5307; WAN024CGY; Start 233; Stop 257
agtcccacacccatattgaagattt

SEQ ID NO: 406508 - DNA, 25 bp, Artificial
  probe
  misc_feature (1)..(25): SEQ ID NO: 5307; WAN024CGY; Start 232; Stop 256
aagtcccacacccatattgaagatt

SEQ ID NO: 406509 - DNA, 25 bp, Artificial
  probe
  misc_feature (1)..(25): SEQ ID NO: 5307; WAN024CGY; Start 226; Stop 250
caacataagtcccacacccatattg

SEQ ID NO: 406510 - DNA, 25 bp, Artificial
  probe
  misc_feature (1)..(25): SEQ ID NO: 5307; WAN024CGY; Start 225; Stop 249
ccaacataagtcccacacccatatt

SEQ ID NO: 406511 - DNA, 25 bp, Artificial
  probe
  misc_feature (1)..(25): SEQ ID NO: 5307; WAN024CGY; Start 55; Stop 79
gaaattcttcggcaatcacctgaaa

SEQ ID NO: 406512 - DNA, 25 bp, Artificial
  probe
  misc_feature (1)..(25): SEQ ID NO: 5307; WAN024CGY; Start 148; Stop 172
cttgacgatgcgaccaatttcatag

SEQ ID NO: 406513 - DNA, 25 bp, Artificial
  probe
  misc_feature (1)..(25): SEQ ID NO: 5307; WAN024CGY; Start 149; Stop 173
ttgacgatgcgaccaatttcataga

SEQ ID NO: 406514 - DNA, 25 bp, Artificial
  probe
  misc_feature (1)..(25): SEQ ID NO: 5307; WAN024CGY; Start 147; Stop 171
tcttgacgatgcgaccaatttcata

SEQ ID NO: 406515 - DNA, 25 bp, Artificial
  probe
  misc_feature (1)..(25): SEQ ID NO: 5307; WAN024CGY; Start 38; Stop 62
aaagacaaactccactggaaattct

SEQ ID NO: 406516 - DNA, 25 bp, Artificial
  probe
  misc_feature (1)..(25): SEQ ID NO: 5307; WAN024CGY; Start 155; Stop 179
atgcgaccaatttcatagactgctt

SEQ ID NO: 406517 - DNA, 25 bp, Artificial
  probe
  misc_feature (1)..(25): SEQ ID NO: 5307; WAN024CGY; Start 40; Stop 64
agacaaactccactggaaattcttc

SEQ ID NO: 406518 - DNA, 25 bp, Artificial
  probe
  misc_feature (1)..(25): SEQ ID NO: 5307; WAN024CGY; Start 191; Stop 215
tcttttacacgctctacattttcag

SEQ ID NO: 406519 - DNA, 25 bp, Artificial
  probe
  misc_feature (1)..(25): SEQ ID NO: 5308; WAN024BDG; Start 184; Stop 208
ttcaatatcaccttcaatacttgcc

SEQ ID NO: 406520 - DNA, 25 bp, Artificial
  probe
  misc_feature (1)..(25): SEQ ID NO: 5308; WAN024BDG; Start 337; Stop 361
gtaatgaccaaagaaaggacgaatc

SEQ ID NO: 406521 - DNA, 25 bp, Artificial
  probe
  misc_feature (1)..(25): SEQ ID NO: 5308; WAN024BDG; Start 321; Stop 345
catcaagatagtcggtgtaatgacc

SEQ ID NO: 406522 - DNA, 25 bp, Artificial
  probe
  misc_feature (1)..(25): SEQ ID NO: 5308; WAN024BDG; Start 336; Stop 360
tgtaatgaccaaagaaaggacgaat

SEQ ID NO: 406523 - DNA, 25 bp, Artificial
  probe
  misc_feature (1)..(25): SEQ ID NO: 5308; WAN024BDG; Start 322; Stop 346
atcaagatagtcggtgtaatgacca

SEQ ID NO: 406524 - DNA, 25 bp, Artificial
  probe
  misc_feature (1)..(25): SEQ ID NO: 5308; WAN024BDG; Start 146; Stop 170
atttcctcttcaatagcagcgatac

SEQ ID NO: 406525 - DNA, 25 bp, Artificial
  probe
  misc_feature (1)..(25): SEQ ID NO: 5308; WAN024BDG; Start 145; Stop 169
catttcctcttcaatagcagcgata

SEQ ID NO: 406526 - DNA, 25 bp, Artificial
  probe
  misc_feature (1)..(25): SEQ ID NO: 5308; WAN024BDG; Start 338; Stop 362
taatgaccaaagaaaggacgaatct

SEQ ID NO: 406527 - DNA, 25 bp, Artificial
  probe
  misc_feature (1)..(25): SEQ ID NO: 5308; WAN024BDG; Start 323; Stop 347
tcaagatagtcggtgtaatgaccaa

SEQ ID NO: 406528 - DNA, 25 bp, Artificial
  probe
  misc_feature (1)..(25): SEQ ID NO: 5308; WAN024BDG; Start 318; Stop 342
tttcatcaagatagtcggtgtaatg

SEQ ID NO: 406529 - DNA, 25 bp, Artificial
  probe
  misc_feature (1)..(25): SEQ ID NO: 5308; WAN024BDG; Start 335; Stop 359
gtgtaatgaccaaagaaaggacgaa

SEQ ID NO: 406530 - DNA, 25 bp, Artificial
  probe
  misc_feature (1)..(25): SEQ ID NO: 5308; WAN024BDG; Start 185; Stop 209
tcaatatcaccttcaatacttgccc

SEQ ID NO: 406531 - DNA, 25 bp, Artificial
  probe
  misc_feature (1)..(25): SEQ ID NO: 5308; WAN024BDG; Start 187; Stop 211
aatatcaccttcaatacttgcccac

SEQ ID NO: 406532 - DNA, 25 bp, Artificial
  probe
  misc_feature (1)..(25): SEQ ID NO: 5308; WAN024BDG; Start 186; Stop 210
caatatcaccttcaatacttgccca

SEQ ID NO: 406533 - DNA, 25 bp, Artificial
  probe
  misc_feature (1)..(25): SEQ ID NO: 5308; WAN024BDG; Start 320; Stop 344
tcatcaagatagtcggtgtaatgac

SEQ ID NO: 406534 - DNA, 25 bp, Artificial
  probe
  misc_feature (1)..(25): SEQ ID NO: 5308; WAN024BDG; Start 319; Stop 343
ttcatcaagatagtcggtgtaatga

SEQ ID NO: 406535 - DNA, 25 bp, Artificial
  probe
  misc_feature (1)..(25): SEQ ID NO: 5308; WAN024BDG; Start 188; Stop 212
atatcaccttcaatacttgcccact

SEQ ID NO: 406536 - DNA, 25 bp, Artificial
  probe
  misc_feature (1)..(25): SEQ ID NO: 5308; WAN024BDG; Start 379; Stop 403
gagaatcttggtcgctaccttatcc

SEQ ID NO: 406537 - DNA, 25 bp, Artificial
  probe
  misc_feature (1)..(25): SEQ ID NO: 5308; WAN024BDG; Start 183; Stop 207
tttcaatatcaccttcaatacttgc

SEQ ID NO: 406538 - DNA, 25 bp, Artificial
  probe
  misc_feature (1)..(25): SEQ ID NO: 5308; WAN024BDG; Start 328; Stop 352
atagtcggtgtaatgaccaaagaaa

SEQ ID NO: 406539 - DNA, 25 bp, Artificial
  probe
  misc_feature (1)..(25): SEQ ID NO: 5308; WAN024BDG; Start 189; Stop 213
tatcaccttcaatacttgcccactc

SEQ ID NO: 406540 - DNA, 25 bp, Artificial
  probe
  misc_feature (1)..(25): SEQ ID NO: 5308; WAN024BDG; Start 327; Stop 351
gatagtcggtgtaatgaccaaagaa

SEQ ID NO: 406541 - DNA, 25 bp, Artificial
  probe
  misc_feature (1)..(25): SEQ ID NO: 5308; WAN024BDG; Start 325; Stop 349
aagatagtcggtgtaatgaccaaag

SEQ ID NO: 406542 - DNA, 25 bp, Artificial
  probe
  misc_feature (1)..(25): SEQ ID NO: 5308; WAN024BDG; Start 393; Stop 417
ctaccttatccaagaaatagcggtc

SEQ ID NO: 406543 - DNA, 25 bp, Artificial
  probe
  misc_feature (1)..(25): SEQ ID NO: 5308; WAN024BDG; Start 388; Stop 412
ggtcgctaccttatccaagaaatag

SEQ ID NO: 406544 - DNA, 25 bp, Artificial
  probe
  misc_feature (1)..(25): SEQ ID NO: 5308; WAN024BDG; Start 329; Stop 353
tagtcggtgtaatgaccaaagaaag

SEQ ID NO: 406545 - DNA, 25 bp, Artificial
  probe
  misc_feature (1)..(25): SEQ ID NO: 5308; WAN024BDG; Start 324; Stop 348
caagatagtcggtgtaatgaccaaa

SEQ ID NO: 406546 - DNA, 25 bp, Artificial
  probe
  misc_feature (1)..(25): SEQ ID NO: 5308; WAN024BDG; Start 380; Stop 404
agaatcttggtcgctaccttatcca

SEQ ID NO: 406547 - DNA, 25 bp, Artificial
  probe
  misc_feature (1)..(25): SEQ ID NO: 5308; WAN024BDG; Start 397; Stop 421
cttatccaagaaatagcggtcgtga

SEQ ID NO: 406548 - DNA, 25 bp, Artificial
  probe
  misc_feature (1)..(25): SEQ ID NO: 5308; WAN024BDG; Start 137; Stop 161
ttagcctgcatttcctcttcaatag

SEQ ID NO: 406549 - DNA, 25 bp, Artificial
  probe
  misc_feature (1)..(25): SEQ ID NO: 5308; WAN024BDG; Start 326; Stop 350
agatagtcggtgtaatgaccaaaga

SEQ ID NO: 406550 - DNA, 25 bp, Artificial
  probe
  misc_feature (1)..(25): SEQ ID NO: 5308; WAN024BDG; Start 387; Stop 411
tggtcgctaccttatccaagaaata

SEQ ID NO: 406551 - DNA, 25 bp, Artificial
  probe
  misc_feature (1)..(25): SEQ ID NO: 5308; WAN024BDG; Start 136; Stop 160
gttagcctgcatttcctcttcaata

SEQ ID NO: 406552 - DNA, 25 bp, Artificial
  probe
  misc_feature (1)..(25): SEQ ID NO: 5309; WAN024GLY; Start 657; Stop 681
tcttattcatcatcgtgttggtcat

SEQ ID NO: 406553 - DNA, 25 bp, Artificial
  probe
  misc_feature (1)..(25): SEQ ID NO: 5309; WAN024GLY; Start 1757; Stop 1781
gtgaatatgttgttaagatggcgaa

SEQ ID NO: 406554 - DNA, 25 bp, Artificial
  probe
  misc_feature (1)..(25): SEQ ID NO: 5309; WAN024GLY; Start 1759; Stop 1783
gaatatgttgttaagatggcgaagg

SEQ ID NO: 406555 - DNA, 25 bp, Artificial
  probe
  misc_feature (1)..(25): SEQ ID NO: 5309; WAN024GLY; Start 1758; Stop 1782
tgaatatgttgttaagatggcgaag

SEQ ID NO: 406556 - DNA, 25 bp, Artificial
  probe
  misc_feature (1)..(25): SEQ ID NO: 5309; WAN024GLY; Start 1754; Stop 1778
atcgtgaatatgttgttaagatggc

SEQ ID NO: 406557 - DNA, 25 bp, Artificial
  probe
  misc_feature (1)..(25): SEQ ID NO: 5309; WAN024GLY; Start 652; Stop 676
agaggtcttattcatcatcgtgttg

SEQ ID NO: 406558 - DNA, 25 bp, Artificial
  probe
  misc_feature (1)..(25): SEQ ID NO: 5309; WAN024GLY; Start 476; Stop 500
tcattgattggctacctaagattgg

SEQ ID NO: 406559 - DNA, 25 bp, Artificial
  probe
  misc_feature (1)..(25): SEQ ID NO: 5309; WAN024GLY; Start 917; Stop 941
ggttgtcggatgctcgtaataatat

SEQ ID NO: 406560 - DNA, 25 bp, Artificial
  probe
  misc_feature (1)..(25): SEQ ID NO: 5309; WAN024GLY; Start 656; Stop 680
gtcttattcatcatcgtgttggtca

SEQ ID NO: 406561 - DNA, 25 bp, Artificial
  probe
  misc_feature (1)..(25): SEQ ID NO: 5309; WAN024GLY; Start 475; Stop 499
ttcattgattggctacctaagattg

SEQ ID NO: 406562 - DNA, 25 bp, Artificial
  probe
  misc_feature (1)..(25): SEQ ID NO: 5309; WAN024GLY; Start 1476; Stop 1500
gctctggaagaagacaagaagttat

SEQ ID NO: 406563 - DNA, 25 bp, Artificial
  probe
  misc_feature (1)..(25): SEQ ID NO: 5309; WAN024GLY; Start 1478; Stop 1502
tctggaagaagacaagaagttatga

SEQ ID NO: 406564 - DNA, 25 bp, Artificial
  probe
  misc_feature (1)..(25): SEQ ID NO: 5309; WAN024GLY; Start 1480; Stop 1504
tggaagaagacaagaagttatgaag

SEQ ID NO: 406565 - DNA, 25 bp, Artificial
  probe
  misc_feature (1)..(25): SEQ ID NO: 5309; WAN024GLY; Start 1479; Stop 1503
ctggaagaagacaagaagttatgaa

SEQ ID NO: 406566 - DNA, 25 bp, Artificial
  probe
  misc_feature (1)..(25): SEQ ID NO: 5309; WAN024GLY; Start 1477; Stop 1501
ctctggaagaagacaagaagttatg

SEQ ID NO: 406567 - DNA, 25 bp, Artificial
  probe
  misc_feature (1)..(25): SEQ ID NO: 5309; WAN024GLY; Start 612; Stop 636
acaagaattgagtgataggttggat

SEQ ID NO: 406568 - DNA, 25 bp, Artificial
  probe
  misc_feature (1)..(25): SEQ ID NO: 5309; WAN024GLY; Start 1481; Stop 1505
ggaagaagacaagaagttatgaaga

SEQ ID NO: 406569 - DNA, 25 bp, Artificial
  probe
  misc_feature (1)..(25): SEQ ID NO: 5309; WAN024GLY; Start 653; Stop 677
gaggtcttattcatcatcgtgttgg

SEQ ID NO: 406570 - DNA, 25 bp, Artificial
  probe
  misc_feature (1)..(25): SEQ ID NO: 5309; WAN024GLY; Start 611; Stop 635
tacaagaattgagtgataggttgga

SEQ ID NO: 406571 - DNA, 25 bp, Artificial
  probe
  misc_feature (1)..(25): SEQ ID NO: 5309; WAN024GLY; Start 1743; Stop 1767
gctcagttatcatcgtgaatatgtt

SEQ ID NO: 406572 - DNA, 25 bp, Artificial
  probe
  misc_feature (1)..(25): SEQ ID NO: 5309; WAN024GLY; Start 651; Stop 675
aagaggtcttattcatcatcgtgtt

SEQ ID NO: 406573 - DNA, 25 bp, Artificial
  probe
  misc_feature (1)..(25): SEQ ID NO: 5309; WAN024GLY; Start 655; Stop 679
ggtcttattcatcatcgtgttggtc

SEQ ID NO: 406574 - DNA, 25 bp, Artificial
  probe
  misc_feature (1)..(25): SEQ ID NO: 5309; WAN024GLY; Start 1756; Stop 1780
cgtgaatatgttgttaagatggcga

SEQ ID NO: 406575 - DNA, 25 bp, Artificial
  probe
  misc_feature (1)..(25): SEQ ID NO: 5309; WAN024GLY; Start 1755; Stop 1779
tcgtgaatatgttgttaagatggcg

SEQ ID NO: 406576 - DNA, 25 bp, Artificial
  probe
  misc_feature (1)..(25): SEQ ID NO: 5309; WAN024GLY; Start 916; Stop 940
tggttgtcggatgctcgtaataata

SEQ ID NO: 406577 - DNA, 25 bp, Artificial
  probe
  misc_feature (1)..(25): SEQ ID NO: 5309; WAN024GLY; Start 914; Stop 938
tatggttgtcggatgctcgtaataa

SEQ ID NO: 406578 - DNA, 25 bp, Artificial
  probe
  misc_feature (1)..(25): SEQ ID NO: 5309; WAN024GLY; Start 1475; Stop 1499
tgctctggaagaagacaagaagtta

SEQ ID NO: 406579 - DNA, 25 bp, Artificial
  probe
  misc_feature (1)..(25): SEQ ID NO: 5309; WAN024GLY; Start 1760; Stop 1784
aatatgttgttaagatggcgaaggc

SEQ ID NO: 406580 - DNA, 25 bp, Artificial
  probe
  misc_feature (1)..(25): SEQ ID NO: 5309; WAN024GLY; Start 1175; Stop 1199
ttgacaattccatacctacgcctaa

SEQ ID NO: 406581 - DNA, 25 bp, Artificial
  probe
  misc_feature (1)..(25): SEQ ID NO: 5309; WAN024GLY; Start 976; Stop 1000
tcggatcagtatattcgtattctca

SEQ ID NO: 406582 - DNA, 25 bp, Artificial
  probe
  misc_feature (1)..(25): SEQ ID NO: 5309; WAN024GLY; Start 654; Stop 678
aggtcttattcatcatcgtgttggt

SEQ ID NO: 406583 - DNA, 25 bp, Artificial
  probe
  misc_feature (1)..(25): SEQ ID NO: 5309; WAN024GLY; Start 658; Stop 682
cttattcatcatcgtgttggtcatg

SEQ ID NO: 406584 - DNA, 25 bp, Artificial
  probe
  misc_feature (1)..(25): SEQ ID NO: 5309; WAN024GLY; Start 610; Stop 634
gtacaagaattgagtgataggttgg

SEQ ID NO: 406585 - DNA, 25 bp, Artificial
  probe
  misc_feature (1)..(25): SEQ ID NO: 5310; WAN024G3K; Start 32; Stop 56
tgaatctggaatattacactacggt

SEQ ID NO: 406586 - DNA, 25 bp, Artificial
  probe
  misc_feature (1)..(25): SEQ ID NO: 5310; WAN024G3K; Start 33; Stop 57
gaatctggaatattacactacggtt

SEQ ID NO: 406587 - DNA, 25 bp, Artificial
  probe
  misc_feature (1)..(25): SEQ ID NO: 5310; WAN024G3K; Start 31; Stop 55
ttgaatctggaatattacactacgg

SEQ ID NO: 406588 - DNA, 25 bp, Artificial
  probe
  misc_feature (1)..(25): SEQ ID NO: 5310; WAN024G3K; Start 34; Stop 58
aatctggaatattacactacggttc

SEQ ID NO: 406589 - DNA, 25 bp, Artificial
  probe
  misc_feature (1)..(25): SEQ ID NO: 5310; WAN024G3K; Start 74; Stop 98
aaagcgatttgaatttcccaataaa

SEQ ID NO: 406590 - DNA, 25 bp, Artificial
  probe
  misc_feature (1)..(25): SEQ ID NO: 5310; WAN024G3K; Start 75; Stop 99
aagcgatttgaatttcccaataaat

SEQ ID NO: 406591 - DNA, 25 bp, Artificial
  probe
  misc_feature (1)..(25): SEQ ID NO: 5310; WAN024G3K; Start 30; Stop 54
attgaatctggaatattacactacg

SEQ ID NO: 406592 - DNA, 25 bp, Artificial
  probe
  misc_feature (1)..(25): SEQ ID NO: 5310; WAN024G3K; Start 72; Stop 96
agaaagcgatttgaatttcccaata

SEQ ID NO: 406593 - DNA, 25 bp, Artificial
  probe
  misc_feature (1)..(25): SEQ ID NO: 5310; WAN024G3K; Start 71; Stop 95
cagaaagcgatttgaatttcccaat

SEQ ID NO: 406594 - DNA, 25 bp, Artificial
  probe
  misc_feature (1)..(25): SEQ ID NO: 5310; WAN024G3K; Start 73; Stop 97
gaaagcgatttgaatttcccaataa

SEQ ID NO: 406595 - DNA, 25 bp, Artificial
  probe
  misc_feature (1)..(25): SEQ ID NO: 5310; WAN024G3K; Start 3; Stop 27
gcaggagaaaggtcagttttatagt

SEQ ID NO: 406596 - DNA, 25 bp, Artificial
  probe
  misc_feature (1)..(25): SEQ ID NO: 5310; WAN024G3K; Start 27; Stop 51
tgaattgaatctggaatattacact

SEQ ID NO: 406597 - DNA, 25 bp, Artificial
  probe
  misc_feature (1)..(25): SEQ ID NO: 5310; WAN024G3K; Start 25; Stop 49
agtgaattgaatctggaatattaca

SEQ ID NO: 406598 - DNA, 25 bp, Artificial
  probe
  misc_feature (1)..(25): SEQ ID NO: 5310; WAN024G3K; Start 70; Stop 94
tcagaaagcgatttgaatttcccaa

SEQ ID NO: 406599 - DNA, 25 bp, Artificial
  probe
  misc_feature (1)..(25): SEQ ID NO: 5310; WAN024G3K; Start 4; Stop 28
caggagaaaggtcagttttatagtg

SEQ ID NO: 406600 - DNA, 25 bp, Artificial
  probe
  misc_feature (1)..(25): SEQ ID NO: 5310; WAN024G3K; Start 35; Stop 59
atctggaatattacactacggttcc

SEQ ID NO: 406601 - DNA, 25 bp, Artificial
  probe
  misc_feature (1)..(25): SEQ ID NO: 5310; WAN024G3K; Start 68; Stop 92
tttcagaaagcgatttgaatttccc

SEQ ID NO: 406602 - DNA, 25 bp, Artificial
  probe
  misc_feature (1)..(25): SEQ ID NO: 5310; WAN024G3K; Start 37; Stop 61
ctggaatattacactacggttccta

SEQ ID NO: 406603 - DNA, 25 bp, Artificial
  probe
  misc_feature (1)..(25): SEQ ID NO: 5310; WAN024G3K; Start 36; Stop 60
tctggaatattacactacggttcct

SEQ ID NO: 406604 - DNA, 25 bp, Artificial
  probe
  misc_feature (1)..(25): SEQ ID NO: 5310; WAN024G3K; Start 38; Stop 62
tggaatattacactacggttcctaa

SEQ ID NO: 406605 - DNA, 25 bp, Artificial
  probe
  misc_feature (1)..(25): SEQ ID NO: 5310; WAN024G3K; Start 26; Stop 50
gtgaattgaatctggaatattacac

SEQ ID NO: 406606 - DNA, 25 bp, Artificial
  probe
  misc_feature (1)..(25): SEQ ID NO: 5310; WAN024G3K; Start 5; Stop 29
aggagaaaggtcagttttatagtga

SEQ ID NO: 406607 - DNA, 25 bp, Artificial
  probe
  misc_feature (1)..(25): SEQ ID NO: 5310; WAN024G3K; Start 69; Stop 93
ttcagaaagcgatttgaatttccca

SEQ ID NO: 406608 - DNA, 25 bp, Artificial
  probe
  misc_feature (1)..(25): SEQ ID NO: 5310; WAN024G3K; Start 6; Stop 30
ggagaaaggtcagttttatagtgaa

SEQ ID NO: 406609 - DNA, 25 bp, Artificial
  probe
  misc_feature (1)..(25): SEQ ID NO: 5310; WAN024G3K; Start 76; Stop 100
agcgatttgaatttcccaataaatt

SEQ ID NO: 406610 - DNA, 25 bp, Artificial
  probe
  misc_feature (1)..(25): SEQ ID NO: 5310; WAN024G3K; Start 1; Stop 25
ttgcaggagaaaggtcagttttata

SEQ ID NO: 406611 - DNA, 25 bp, Artificial
  probe
  misc_feature (1)..(25): SEQ ID NO: 5310; WAN024G3K; Start 2; Stop 26
tgcaggagaaaggtcagttttatag

SEQ ID NO: 406612 - DNA, 25 bp, Artificial
  probe
  misc_feature (1)..(25): SEQ ID NO: 5310; WAN024G3K; Start 7; Stop 31
gagaaaggtcagttttatagtgaat

SEQ ID NO: 406613 - DNA, 25 bp, Artificial
  probe
  misc_feature (1)..(25): SEQ ID NO: 5310; WAN024G3K; Start 86; Stop 110
atttcccaataaatttgttcagttt

SEQ ID NO: 406614 - DNA, 25 bp, Artificial
  probe
  misc_feature (1)..(25): SEQ ID NO: 5310; WAN024G3K; Start 67; Stop 91
ttttcagaaagcgatttgaatttcc

SEQ ID NO: 406615 - DNA, 25 bp, Artificial
  probe
  misc_feature (1)..(25): SEQ ID NO: 5310; WAN024G3K; Start 39; Stop 63
ggaatattacactacggttcctaaa

SEQ ID NO: 406616 - DNA, 25 bp, Artificial
  probe
  misc_feature (1)..(25): SEQ ID NO: 5310; WAN024G3K; Start 77; Stop 101
gcgatttgaatttcccaataaattt

SEQ ID NO: 406617 - DNA, 25 bp, Artificial
  probe
  misc_feature (1)..(25): SEQ ID NO: 5310; WAN024G3K; Start 11; Stop 35
aaggtcagttttatagtgaattgaa

SEQ ID NO: 406618 - DNA, 25 bp, Artificial
  probe
  misc_feature (1)..(25): SEQ ID NO: 5311; WAN024GJR; Start 137; Stop 161
tgaatcaaatcagaaatagccagcg

SEQ ID NO: 406619 - DNA, 25 bp, Artificial
  probe
  misc_feature (1)..(25): SEQ ID NO: 5311; WAN024GJR; Start 138; Stop 162
gaatcaaatcagaaatagccagcgg

SEQ ID NO: 406620 - DNA, 25 bp, Artificial
  probe
  misc_feature (1)..(25): SEQ ID NO: 5311; WAN024GJR; Start 43; Stop 67
aatgacaaaggcatcacacatcttc

SEQ ID NO: 406621 - DNA, 25 bp, Artificial
  probe
  misc_feature (1)..(25): SEQ ID NO: 5311; WAN024GJR; Start 42; Stop 66
gaatgacaaaggcatcacacatctt

SEQ ID NO: 406622 - DNA, 25 bp, Artificial
  probe
  misc_feature (1)..(25): SEQ ID NO: 5311; WAN024GJR; Start 40; Stop 64
aagaatgacaaaggcatcacacatc

SEQ ID NO: 406623 - DNA, 25 bp, Artificial
  probe
  misc_feature (1)..(25): SEQ ID NO: 5311; WAN024GJR; Start 39; Stop 63
gaagaatgacaaaggcatcacacat

SEQ ID NO: 406624 - DNA, 25 bp, Artificial
  probe
  misc_feature (1)..(25): SEQ ID NO: 5311; WAN024GJR; Start 140; Stop 164
atcaaatcagaaatagccagcggat

SEQ ID NO: 406625 - DNA, 25 bp, Artificial
  probe
  misc_feature (1)..(25): SEQ ID NO: 5311; WAN024GJR; Start 139; Stop 163
aatcaaatcagaaatagccagcgga

SEQ ID NO: 406626 - DNA, 25 bp, Artificial
  probe
  misc_feature (1)..(25): SEQ ID NO: 5311; WAN024GJR; Start 44; Stop 68
atgacaaaggcatcacacatcttct

SEQ ID NO: 406627 - DNA, 25 bp, Artificial
  probe
  misc_feature (1)..(25): SEQ ID NO: 5311; WAN024GJR; Start 41; Stop 65
agaatgacaaaggcatcacacatct

SEQ ID NO: 406628 - DNA, 25 bp, Artificial
  probe
  misc_feature (1)..(25): SEQ ID NO: 5311; WAN024GJR; Start 143; Stop 167
aaatcagaaatagccagcggatcaa

SEQ ID NO: 406629 - DNA, 25 bp, Artificial
  probe
  misc_feature (1)..(25): SEQ ID NO: 5311; WAN024GJR; Start 38; Stop 62
tgaagaatgacaaaggcatcacaca

SEQ ID NO: 406630 - DNA, 25 bp, Artificial
  probe
  misc_feature (1)..(25): SEQ ID NO: 5311; WAN024GJR; Start 45; Stop 69
tgacaaaggcatcacacatcttctc

SEQ ID NO: 406631 - DNA, 25 bp, Artificial
  probe
  misc_feature (1)..(25): SEQ ID NO: 5311; WAN024GJR; Start 144; Stop 168
aatcagaaatagccagcggatcaag

SEQ ID NO: 406632 - DNA, 25 bp, Artificial
  probe
  misc_feature (1)..(25): SEQ ID NO: 5311; WAN024GJR; Start 141; Stop 165
tcaaatcagaaatagccagcggatc

SEQ ID NO: 406633 - DNA, 25 bp, Artificial
  probe
  misc_feature (1)..(25): SEQ ID NO: 5311; WAN024GJR; Start 162; Stop 186
gatcaagaccaaggaaaggctcatc

SEQ ID NO: 406634 - DNA, 25 bp, Artificial
  probe
  misc_feature (1)..(25): SEQ ID NO: 5311; WAN024GJR; Start 205; Stop 229
atccaccacaaaagcacagataatc

SEQ ID NO: 406635 - DNA, 25 bp, Artificial
  probe
  misc_feature (1)..(25): SEQ ID NO: 5311; WAN024GJR; Start 207; Stop 231
ccaccacaaaagcacagataatcat

SEQ ID NO: 406636 - DNA, 25 bp, Artificial
  probe
  misc_feature (1)..(25): SEQ ID NO: 5311; WAN024GJR; Start 142; Stop 166
caaatcagaaatagccagcggatca

SEQ ID NO: 406637 - DNA, 25 bp, Artificial
  probe
  misc_feature (1)..(25): SEQ ID NO: 5311; WAN024GJR; Start 208; Stop 232
caccacaaaagcacagataatcatg

SEQ ID NO: 406638 - DNA, 25 bp, Artificial
  probe
  misc_feature (1)..(25): SEQ ID NO: 5311; WAN024GJR; Start 46; Stop 70
gacaaaggcatcacacatcttctcc

SEQ ID NO: 406639 - DNA, 25 bp, Artificial
  probe
  misc_feature (1)..(25): SEQ ID NO: 5311; WAN024GJR; Start 204; Stop 228
gatccaccacaaaagcacagataat

SEQ ID NO: 406640 - DNA, 25 bp, Artificial
  probe
  misc_feature (1)..(25): SEQ ID NO: 5311; WAN024GJR; Start 97; Stop 121
gagaatagacttgcccttttgcttc

SEQ ID NO: 406641 - DNA, 25 bp, Artificial
  probe
  misc_feature (1)..(25): SEQ ID NO: 5311; WAN024GJR; Start 215; Stop 239
aaagcacagataatcatgaccttct

SEQ ID NO: 406642 - DNA, 25 bp, Artificial
  probe
  misc_feature (1)..(25): SEQ ID NO: 5311; WAN024GJR; Start 222; Stop 246
agataatcatgaccttctgcttcat

SEQ ID NO: 406643 - DNA, 25 bp, Artificial
  probe
  misc_feature (1)..(25): SEQ ID NO: 5311; WAN024GJR; Start 99; Stop 123
gaatagacttgcccttttgcttctc

SEQ ID NO: 406644 - DNA, 25 bp, Artificial
  probe
  misc_feature (1)..(25): SEQ ID NO: 5311; WAN024GJR; Start 223; Stop 247
gataatcatgaccttctgcttcatc

SEQ ID NO: 406645 - DNA, 25 bp, Artificial
  probe
  misc_feature (1)..(25): SEQ ID NO: 5311; WAN024GJR; Start 95; Stop 119
atgagaatagacttgcccttttgct

SEQ ID NO: 406646 - DNA, 25 bp, Artificial
  probe
  misc_feature (1)..(25): SEQ ID NO: 5311; WAN024GJR; Start 224; Stop 248
ataatcatgaccttctgcttcatcc

SEQ ID NO: 406647 - DNA, 25 bp, Artificial
  probe
  misc_feature (1)..(25): SEQ ID NO: 5311; WAN024GJR; Start 145; Stop 169
atcagaaatagccagcggatcaaga

SEQ ID NO: 406648 - DNA, 25 bp, Artificial
  probe
  misc_feature (1)..(25): SEQ ID NO: 5311; WAN024GJR; Start 28; Stop 52
ctctcccttgtgaagaatgacaaag

SEQ ID NO: 406649 - DNA, 25 bp, Artificial
  probe
  misc_feature (1)..(25): SEQ ID NO: 5311; WAN024GJR; Start 96; Stop 120
tgagaatagacttgcccttttgctt

SEQ ID NO: 406650 - DNA, 25 bp, Artificial
  probe
  misc_feature (1)..(25): SEQ ID NO: 5311; WAN024GJR; Start 206; Stop 230
tccaccacaaaagcacagataatca

SEQ ID NO: 406651 - DNA, 25 bp, Artificial
  probe
  misc_feature (1)..(25): SEQ ID NO: 5312; WAN024AYR; Start 4; Stop 28
caggtaggtcaagctaacgaaattg

SEQ ID NO: 406652 - DNA, 25 bp, Artificial
  probe
  misc_feature (1)..(25): SEQ ID NO: 5312; WAN024AYR; Start 5; Stop 29
aggtaggtcaagctaacgaaattgg

SEQ ID NO: 406653 - DNA, 25 bp, Artificial
  probe
  misc_feature (1)..(25): SEQ ID NO: 5312; WAN024AYR; Start 3; Stop 27
gcaggtaggtcaagctaacgaaatt

SEQ ID NO: 406654 - DNA, 25 bp, Artificial
  probe
  misc_feature (1)..(25): SEQ ID NO: 5312; WAN024AYR; Start 6; Stop 30
ggtaggtcaagctaacgaaattggg

SEQ ID NO: 406655 - DNA, 25 bp, Artificial
  probe
  misc_feature (1)..(25): SEQ ID NO: 5312; WAN024AYR; Start 2; Stop 26
tgcaggtaggtcaagctaacgaaat

SEQ ID NO: 406656 - DNA, 25 bp, Artificial
  probe
  misc_feature (1)..(25): SEQ ID NO: 5312; WAN024AYR; Start 78; Stop 102
atttgaccaactgatccagcccaat

SEQ ID NO: 406657 - DNA, 25 bp, Artificial
  probe
  misc_feature (1)..(25): SEQ ID NO: 5312; WAN024AYR; Start 1; Stop 25
ttgcaggtaggtcaagctaacgaaa

SEQ ID NO: 406658 - DNA, 25 bp, Artificial
  probe
  misc_feature (1)..(25): SEQ ID NO: 5312; WAN024AYR; Start 51; Stop 75
ccagtggaatctgctggacgatata

SEQ ID NO: 406659 - DNA, 25 bp, Artificial
  probe
  misc_feature (1)..(25): SEQ ID NO: 5313; WAN024FAN; Start 63; Stop 87
gtgtcttcaatacttcaccagcatt

SEQ ID NO: 406660 - DNA, 25 bp, Artificial
  probe
  misc_feature (1)..(25): SEQ ID NO: 5313; WAN024FAN; Start 64; Stop 88
tgtcttcaatacttcaccagcattt

SEQ ID NO: 406661 - DNA, 25 bp, Artificial
  probe
  misc_feature (1)..(25): SEQ ID NO: 5313; WAN024FAN; Start 26; Stop 50
atattgaccacatcaggcacatctc

SEQ ID NO: 406662 - DNA, 25 bp, Artificial
  probe
  misc_feature (1)..(25): SEQ ID NO: 5313; WAN024FAN; Start 65; Stop 89
gtcttcaatacttcaccagcatttg

SEQ ID NO: 406663 - DNA, 25 bp, Artificial
  probe
  misc_feature (1)..(25): SEQ ID NO: 5313; WAN024FAN; Start 94; Stop 118
attgacgactttgaccttgatctta

SEQ ID NO: 406664 - DNA, 25 bp, Artificial
  probe
  misc_feature (1)..(25): SEQ ID NO: 5313; WAN024FAN; Start 95; Stop 119
ttgacgactttgaccttgatcttag

SEQ ID NO: 406665 - DNA, 25 bp, Artificial
  probe
  misc_feature (1)..(25): SEQ ID NO: 5313; WAN024FAN; Start 84; Stop 108
catttggtacattgacgactttgac

SEQ ID NO: 406666 - DNA, 25 bp, Artificial
  probe
  misc_feature (1)..(25): SEQ ID NO: 5313; WAN024FAN; Start 91; Stop 115
tacattgacgactttgaccttgatc

SEQ ID NO: 406667 - DNA, 25 bp, Artificial
  probe
  misc_feature (1)..(25): SEQ ID NO: 5313; WAN024FAN; Start 25; Stop 49
aatattgaccacatcaggcacatct

SEQ ID NO: 406668 - DNA, 25 bp, Artificial
  probe
  misc_feature (1)..(25): SEQ ID NO: 5313; WAN024FAN; Start 90; Stop 114
gtacattgacgactttgaccttgat

SEQ ID NO: 406669 - DNA, 25 bp, Artificial
  probe
  misc_feature (1)..(25): SEQ ID NO: 5313; WAN024FAN; Start 93; Stop 117
cattgacgactttgaccttgatctt

SEQ ID NO: 406670 - DNA, 25 bp, Artificial
  probe
  misc_feature (1)..(25): SEQ ID NO: 5313; WAN024FAN; Start 23; Stop 47
taaatattgaccacatcaggcacat

SEQ ID NO: 406671 - DNA, 25 bp, Artificial
  probe
  misc_feature (1)..(25): SEQ ID NO: 5313; WAN024FAN; Start 9; Stop 33
cgatggactgtgggtaaatattgac

SEQ ID NO: 406672 - DNA, 25 bp, Artificial
  probe
  misc_feature (1)..(25): SEQ ID NO: 5313; WAN024FAN; Start 7; Stop 31
ttcgatggactgtgggtaaatattg

SEQ ID NO: 406673 - DNA, 25 bp, Artificial
  probe
  misc_feature (1)..(25): SEQ ID NO: 5313; WAN024FAN; Start 6; Stop 30
gttcgatggactgtgggtaaatatt

SEQ ID NO: 406674 - DNA, 25 bp, Artificial
  probe
  misc_feature (1)..(25): SEQ ID NO: 5313; WAN024FAN; Start 83; Stop 107
gcatttggtacattgacgactttga

SEQ ID NO: 406675 - DNA, 25 bp, Artificial
  probe
  misc_feature (1)..(25): SEQ ID NO: 5313; WAN024FAN; Start 82; Stop 106
agcatttggtacattgacgactttg

SEQ ID NO: 406676 - DNA, 25 bp, Artificial
  probe
  misc_feature (1)..(25): SEQ ID NO: 5313; WAN024FAN; Start 81; Stop 105
cagcatttggtacattgacgacttt

SEQ ID NO: 406677 - DNA, 25 bp, Artificial
  probe
  misc_feature (1)..(25): SEQ ID NO: 5313; WAN024FAN; Start 62; Stop 86
cgtgtcttcaatacttcaccagcat

SEQ ID NO: 406678 - DNA, 25 bp, Artificial
  probe
  misc_feature (1)..(25): SEQ ID NO: 5313; WAN024FAN; Start 22; Stop 46
gtaaatattgaccacatcaggcaca

SEQ ID NO: 406679 - DNA, 25 bp, Artificial
  probe
  misc_feature (1)..(25): SEQ ID NO: 5313; WAN024FAN; Start 92; Stop 116
acattgacgactttgaccttgatct

SEQ ID NO: 406680 - DNA, 25 bp, Artificial
  probe
  misc_feature (1)..(25): SEQ ID NO: 5313; WAN024FAN; Start 100; Stop 124
gactttgaccttgatcttagggttt

SEQ ID NO: 406681 - DNA, 25 bp, Artificial
  probe
  misc_feature (1)..(25): SEQ ID NO: 5313; WAN024FAN; Start 8; Stop 32
tcgatggactgtgggtaaatattga

SEQ ID NO: 406682 - DNA, 25 bp, Artificial
  probe
  misc_feature (1)..(25): SEQ ID NO: 5313; WAN024FAN; Start 66; Stop 90
tcttcaatacttcaccagcatttgg

SEQ ID NO: 406683 - DNA, 25 bp, Artificial
  probe
  misc_feature (1)..(25): SEQ ID NO: 5313; WAN024FAN; Start 24; Stop 48
aaatattgaccacatcaggcacatc

SEQ ID NO: 406684 - DNA, 25 bp, Artificial
  probe
  misc_feature (1)..(25): SEQ ID NO: 5313; WAN024FAN; Start 5; Stop 29
agttcgatggactgtgggtaaatat

SEQ ID NO: 406685 - DNA, 25 bp, Artificial
  probe
  misc_feature (1)..(25): SEQ ID NO: 5313; WAN024FAN; Start 213; Stop 237
cagatttaccatagttggagcaagc

SEQ ID NO: 406686 - DNA, 25 bp, Artificial
  probe
  misc_feature (1)..(25): SEQ ID NO: 5313; WAN024FAN; Start 212; Stop 236
gcagatttaccatagttggagcaag

SEQ ID NO: 406687 - DNA, 25 bp, Artificial
  probe
  misc_feature (1)..(25): SEQ ID NO: 5313; WAN024FAN; Start 85; Stop 109
atttggtacattgacgactttgacc

SEQ ID NO: 406688 - DNA, 25 bp, Artificial
  probe
  misc_feature (1)..(25): SEQ ID NO: 5313; WAN024FAN; Start 181; Stop 205
gttgaaatactcgatggtcactgtg

SEQ ID NO: 406689 - DNA, 25 bp, Artificial
  probe
  misc_feature (1)..(25): SEQ ID NO: 5313; WAN024FAN; Start 176; Stop 200
ttctggttgaaatactcgatggtca

SEQ ID NO: 406690 - DNA, 25 bp, Artificial
  probe
  misc_feature (1)..(25): SEQ ID NO: 5313; WAN024FAN; Start 10; Stop 34
gatggactgtgggtaaatattgacc

SEQ ID NO: 406691 - DNA, 25 bp, Artificial
  probe
  misc_feature (1)..(25): SEQ ID NO: 5313; WAN024FAN; Start 96; Stop 120
tgacgactttgaccttgatcttagg

SEQ ID NO: 406692 - DNA, 25 bp, Artificial
  probe
  misc_feature (1)..(25): SEQ ID NO: 5314; WAN024G36; Start 151; Stop 175
attgtattcttccgtaatcttggca

SEQ ID NO: 406693 - DNA, 25 bp, Artificial
  probe
  misc_feature (1)..(25): SEQ ID NO: 5314; WAN024G36; Start 136; Stop 160
attgcctgtcaagagattgtattct

SEQ ID NO: 406694 - DNA, 25 bp, Artificial
  probe
  misc_feature (1)..(25): SEQ ID NO: 5314; WAN024G36; Start 131; Stop 155
agattattgcctgtcaagagattgt

SEQ ID NO: 406695 - DNA, 25 bp, Artificial
  probe
  misc_feature (1)..(25): SEQ ID NO: 5314; WAN024G36; Start 76; Stop 100
attgacaagattgacttccaacttc

SEQ ID NO: 406696 - DNA, 25 bp, Artificial
  probe
  misc_feature (1)..(25): SEQ ID NO: 5314; WAN024G36; Start 213; Stop 237
tacgagtaatagtatgaaggaggtc

SEQ ID NO: 406697 - DNA, 25 bp, Artificial
  probe
  misc_feature (1)..(25): SEQ ID NO: 5314; WAN024G36; Start 77; Stop 101
ttgacaagattgacttccaacttct

SEQ ID NO: 406698 - DNA, 25 bp, Artificial
  probe
  misc_feature (1)..(25): SEQ ID NO: 5314; WAN024G36; Start 216; Stop 240
gagtaatagtatgaaggaggtccaa

SEQ ID NO: 406699 - DNA, 25 bp, Artificial
  probe
  misc_feature (1)..(25): SEQ ID NO: 5314; WAN024G36; Start 215; Stop 239
cgagtaatagtatgaaggaggtcca

SEQ ID NO: 406700 - DNA, 25 bp, Artificial
  probe
  misc_feature (1)..(25): SEQ ID NO: 5314; WAN024G36; Start 214; Stop 238
acgagtaatagtatgaaggaggtcc

SEQ ID NO: 406701 - DNA, 25 bp, Artificial
  probe
  misc_feature (1)..(25): SEQ ID NO: 5314; WAN024G36; Start 130; Stop 154
aagattattgcctgtcaagagattg

SEQ ID NO: 406702 - DNA, 25 bp, Artificial
  probe
  misc_feature (1)..(25): SEQ ID NO: 5314; WAN024G36; Start 152; Stop 176
ttgtattcttccgtaatcttggcaa

SEQ ID NO: 406703 - DNA, 25 bp, Artificial
  probe
  misc_feature (1)..(25): SEQ ID NO: 5314; WAN024G36; Start 75; Stop 99
aattgacaagattgacttccaactt

SEQ ID NO: 406704 - DNA, 25 bp, Artificial
  probe
  misc_feature (1)..(25): SEQ ID NO: 5314; WAN024G36; Start 135; Stop 159
tattgcctgtcaagagattgtattc

SEQ ID NO: 406705 - DNA, 25 bp, Artificial
  probe
  misc_feature (1)..(25): SEQ ID NO: 5314; WAN024G36; Start 132; Stop 156
gattattgcctgtcaagagattgta

SEQ ID NO: 406706 - DNA, 25 bp, Artificial
  probe
  misc_feature (1)..(25): SEQ ID NO: 5314; WAN024G36; Start 134; Stop 158
ttattgcctgtcaagagattgtatt

SEQ ID NO: 406707 - DNA, 25 bp, Artificial
  probe
  misc_feature (1)..(25): SEQ ID NO: 5314; WAN024G36; Start 212; Stop 236
ttacgagtaatagtatgaaggaggt

SEQ ID NO: 406708 - DNA, 25 bp, Artificial
  probe
  misc_feature (1)..(25): SEQ ID NO: 5314; WAN024G36; Start 133; Stop 157
attattgcctgtcaagagattgtat

SEQ ID NO: 406709 - DNA, 25 bp, Artificial
  probe
  misc_feature (1)..(25): SEQ ID NO: 5314; WAN024G36; Start 42; Stop 66
aattatgacgagcagaagcaagttg

SEQ ID NO: 406710 - DNA, 25 bp, Artificial
  probe
  misc_feature (1)..(25): SEQ ID NO: 5314; WAN024G36; Start 211; Stop 235
cttacgagtaatagtatgaaggagg

SEQ ID NO: 406711 - DNA, 25 bp, Artificial
  probe
  misc_feature (1)..(25): SEQ ID NO: 5314; WAN024G36; Start 150; Stop 174
gattgtattcttccgtaatcttggc

SEQ ID NO: 406712 - DNA, 25 bp, Artificial
  probe
  misc_feature (1)..(25): SEQ ID NO: 5314; WAN024G36; Start 43; Stop 67
attatgacgagcagaagcaagttga

SEQ ID NO: 406713 - DNA, 25 bp, Artificial
  probe
  misc_feature (1)..(25): SEQ ID NO: 5314; WAN024G36; Start 153; Stop 177
tgtattcttccgtaatcttggcaaa

SEQ ID NO: 406714 - DNA, 25 bp, Artificial
  probe
  misc_feature (1)..(25): SEQ ID NO: 5314; WAN024G36; Start 219; Stop 243
taatagtatgaaggaggtccaaacg

SEQ ID NO: 406715 - DNA, 25 bp, Artificial
  probe
  misc_feature (1)..(25): SEQ ID NO: 5314; WAN024G36; Start 72; Stop 96
ccaaattgacaagattgacttccaa

SEQ ID NO: 406716 - DNA, 25 bp, Artificial
  probe
  misc_feature (1)..(25): SEQ ID NO: 5314; WAN024G36; Start 221; Stop 245
atagtatgaaggaggtccaaacgat

SEQ ID NO: 406717 - DNA, 25 bp, Artificial
  probe
  misc_feature (1)..(25): SEQ ID NO: 5314; WAN024G36; Start 137; Stop 161
ttgcctgtcaagagattgtattctt

SEQ ID NO: 406718 - DNA, 25 bp, Artificial
  probe
  misc_feature (1)..(25): SEQ ID NO: 5314; WAN024G36; Start 142; Stop 166
tgtcaagagattgtattcttccgta

SEQ ID NO: 406719 - DNA, 25 bp, Artificial
  probe
  misc_feature (1)..(25): SEQ ID NO: 5314; WAN024G36; Start 78; Stop 102
tgacaagattgacttccaacttctt

SEQ ID NO: 406720 - DNA, 25 bp, Artificial
  probe
  misc_feature (1)..(25): SEQ ID NO: 5314; WAN024G36; Start 73; Stop 97
caaattgacaagattgacttccaac

SEQ ID NO: 406721 - DNA, 25 bp, Artificial
  probe
  misc_feature (1)..(25): SEQ ID NO: 5314; WAN024G36; Start 128; Stop 152
gaaagattattgcctgtcaagagat

SEQ ID NO: 406722 - DNA, 25 bp, Artificial
  probe
  misc_feature (1)..(25): SEQ ID NO: 5314; WAN024G36; Start 74; Stop 98
aaattgacaagattgacttccaact

SEQ ID NO: 406723 - DNA, 25 bp, Artificial
  probe
  misc_feature (1)..(25): SEQ ID NO: 5314; WAN024G36; Start 222; Stop 246
tagtatgaaggaggtccaaacgatt

SEQ ID NO: 406724 - DNA, 25 bp, Artificial
  probe
  misc_feature (1)..(25): SEQ ID NO: 5314; WAN024G36; Start 220; Stop 244
aatagtatgaaggaggtccaaacga

SEQ ID NO: 406725 - DNA, 25 bp, Artificial
  probe
  misc_feature (1)..(25): SEQ ID NO: 5315; WAN024DII; Start 19; Stop 43
ttcatcacatcctgtcttgatagaa

SEQ ID NO: 406726 - DNA, 25 bp, Artificial
  probe
  misc_feature (1)..(25): SEQ ID NO: 5315; WAN024DII; Start 12; Stop 36
tatcagtttcatcacatcctgtctt

SEQ ID NO: 406727 - DNA, 25 bp, Artificial
  probe
  misc_feature (1)..(25): SEQ ID NO: 5315; WAN024DII; Start 13; Stop 37
atcagtttcatcacatcctgtcttg

SEQ ID NO: 406728 - DNA, 25 bp, Artificial
  probe
  misc_feature (1)..(25): SEQ ID NO: 5315; WAN024DII; Start 14; Stop 38
tcagtttcatcacatcctgtcttga

SEQ ID NO: 406729 - DNA, 25 bp, Artificial
  probe
  misc_feature (1)..(25): SEQ ID NO: 5315; WAN024DII; Start 16; Stop 40
agtttcatcacatcctgtcttgata

SEQ ID NO: 406730 - DNA, 25 bp, Artificial
  probe
  misc_feature (1)..(25): SEQ ID NO: 5315; WAN024DII; Start 20; Stop 44
tcatcacatcctgtcttgatagaaa

SEQ ID NO: 406731 - DNA, 25 bp, Artificial
  probe
  misc_feature (1)..(25): SEQ ID NO: 5315; WAN024DII; Start 18; Stop 42
tttcatcacatcctgtcttgataga

SEQ ID NO: 406732 - DNA, 25 bp, Artificial
  probe
  misc_feature (1)..(25): SEQ ID NO: 5315; WAN024DII; Start 17; Stop 41
gtttcatcacatcctgtcttgatag

SEQ ID NO: 406733 - DNA, 25 bp, Artificial
  probe
  misc_feature (1)..(25): SEQ ID NO: 5315; WAN024DII; Start 15; Stop 39
cagtttcatcacatcctgtcttgat

SEQ ID NO: 406734 - DNA, 25 bp, Artificial
  probe
  misc_feature (1)..(25): SEQ ID NO: 5315; WAN024DII; Start 23; Stop 47
tcacatcctgtcttgatagaaaaca

SEQ ID NO: 406735 - DNA, 25 bp, Artificial
  probe
  misc_feature (1)..(25): SEQ ID NO: 5315; WAN024DII; Start 24; Stop 48
cacatcctgtcttgatagaaaacaa

SEQ ID NO: 406736 - DNA, 25 bp, Artificial
  probe
  misc_feature (1)..(25): SEQ ID NO: 5315; WAN024DII; Start 29; Stop 53
cctgtcttgatagaaaacaaattgg

SEQ ID NO: 406737 - DNA, 25 bp, Artificial
  probe
  misc_feature (1)..(25): SEQ ID NO: 5315; WAN024DII; Start 25; Stop 49
acatcctgtcttgatagaaaacaaa

SEQ ID NO: 406738 - DNA, 25 bp, Artificial
  probe
  misc_feature (1)..(25): SEQ ID NO: 5315; WAN024DII; Start 30; Stop 54
ctgtcttgatagaaaacaaattggt

SEQ ID NO: 406739 - DNA, 25 bp, Artificial
  probe
  misc_feature (1)..(25): SEQ ID NO: 5315; WAN024DII; Start 28; Stop 52
tcctgtcttgatagaaaacaaattg

SEQ ID NO: 406740 - DNA, 25 bp, Artificial
  probe
  misc_feature (1)..(25): SEQ ID NO: 5315; WAN024DII; Start 26; Stop 50
catcctgtcttgatagaaaacaaat

SEQ ID NO: 406741 - DNA, 25 bp, Artificial
  probe
  misc_feature (1)..(25): SEQ ID NO: 5315; WAN024DII; Start 22; Stop 46
atcacatcctgtcttgatagaaaac

SEQ ID NO: 406742 - DNA, 25 bp, Artificial
  probe
  misc_feature (1)..(25): SEQ ID NO: 5315; WAN024DII; Start 21; Stop 45
catcacatcctgtcttgatagaaaa

SEQ ID NO: 406743 - DNA, 25 bp, Artificial
  probe
  misc_feature (1)..(25): SEQ ID NO: 5315; WAN024DII; Start 31; Stop 55
tgtcttgatagaaaacaaattggta

SEQ ID NO: 406744 - DNA, 25 bp, Artificial
  probe
  misc_feature (1)..(25): SEQ ID NO: 5315; WAN024DII; Start 27; Stop 51
atcctgtcttgatagaaaacaaatt

SEQ ID NO: 406745 - DNA, 25 bp, Artificial
  probe
  misc_feature (1)..(25): SEQ ID NO: 5315; WAN024DII; Start 32; Stop 56
gtcttgatagaaaacaaattggtaa

SEQ ID NO: 406746 - DNA, 25 bp, Artificial
  probe
  misc_feature (1)..(25): SEQ ID NO: 5315; WAN024DII; Start 33; Stop 57
tcttgatagaaaacaaattggtaat

SEQ ID NO: 406747 - DNA, 25 bp, Artificial
  probe
  misc_feature (1)..(25): SEQ ID NO: 5316; WAN024CUQ; Start 307; Stop 331
aggattagttggcttgtctttgtag

SEQ ID NO: 406748 - DNA, 25 bp, Artificial
  probe
  misc_feature (1)..(25): SEQ ID NO: 5316; WAN024CUQ; Start 306; Stop 330
gaggattagttggcttgtctttgta

SEQ ID NO: 406749 - DNA, 25 bp, Artificial
  probe
  misc_feature (1)..(25): SEQ ID NO: 5316; WAN024CUQ; Start 81; Stop 105
taagagaatttgtcacggattatgc

SEQ ID NO: 406750 - DNA, 25 bp, Artificial
  probe
  misc_feature (1)..(25): SEQ ID NO: 5316; WAN024CUQ; Start 202; Stop 226
aatcttagtaaagcccagtttagca

SEQ ID NO: 406751 - DNA, 25 bp, Artificial
  probe
  misc_feature (1)..(25): SEQ ID NO: 5316; WAN024CUQ; Start 203; Stop 227
atcttagtaaagcccagtttagcag

SEQ ID NO: 406752 - DNA, 25 bp, Artificial
  probe
  misc_feature (1)..(25): SEQ ID NO: 5316; WAN024CUQ; Start 201; Stop 225
aaatcttagtaaagcccagtttagc

SEQ ID NO: 406753 - DNA, 25 bp, Artificial
  probe
  misc_feature (1)..(25): SEQ ID NO: 5316; WAN024CUQ; Start 380; Stop 404
aatttaacaccaccagcagatttga

SEQ ID NO: 406754 - DNA, 25 bp, Artificial
  probe
  misc_feature (1)..(25): SEQ ID NO: 5316; WAN024CUQ; Start 362; Stop 386
tcaatcgcaggttcatccaatttaa

SEQ ID NO: 406755 - DNA, 25 bp, Artificial
  probe
  misc_feature (1)..(25): SEQ ID NO: 5316; WAN024CUQ; Start 384; Stop 408
taacaccaccagcagatttgagata

SEQ ID NO: 406756 - DNA, 25 bp, Artificial
  probe
  misc_feature (1)..(25): SEQ ID NO: 5316; WAN024CUQ; Start 363; Stop 387
caatcgcaggttcatccaatttaac

SEQ ID NO: 406757 - DNA, 25 bp, Artificial
  probe
  misc_feature (1)..(25): SEQ ID NO: 5316; WAN024CUQ; Start 359; Stop 383
aagtcaatcgcaggttcatccaatt

SEQ ID NO: 406758 - DNA, 25 bp, Artificial
  probe
  misc_feature (1)..(25): SEQ ID NO: 5316; WAN024CUQ; Start 381; Stop 405
atttaacaccaccagcagatttgag

SEQ ID NO: 406759 - DNA, 25 bp, Artificial
  probe
  misc_feature (1)..(25): SEQ ID NO: 5316; WAN024CUQ; Start 304; Stop 328
ctgaggattagttggcttgtctttg

SEQ ID NO: 406760 - DNA, 25 bp, Artificial
  probe
  misc_feature (1)..(25): SEQ ID NO: 5316; WAN024CUQ; Start 379; Stop 403
caatttaacaccaccagcagatttg

SEQ ID NO: 406761 - DNA, 25 bp, Artificial
  probe
  misc_feature (1)..(25): SEQ ID NO: 5316; WAN024CUQ; Start 364; Stop 388
aatcgcaggttcatccaatttaaca

SEQ ID NO: 406762 - DNA, 25 bp, Artificial
  probe
  misc_feature (1)..(25): SEQ ID NO: 5316; WAN024CUQ; Start 197; Stop 221
acataaatcttagtaaagcccagtt

SEQ ID NO: 406763 - DNA, 25 bp, Artificial
  probe
  misc_feature (1)..(25): SEQ ID NO: 5316; WAN024CUQ; Start 361; Stop 385
gtcaatcgcaggttcatccaattta

SEQ ID NO: 406764 - DNA, 25 bp, Artificial
  probe
  misc_feature (1)..(25): SEQ ID NO: 5316; WAN024CUQ; Start 160; Stop 184
cttaggcagagtgattcctgtcaag

SEQ ID NO: 406765 - DNA, 25 bp, Artificial
  probe
  misc_feature (1)..(25): SEQ ID NO: 5316; WAN024CUQ; Start 151; Stop 175
ctgaatttccttaggcagagtgatt

SEQ ID NO: 406766 - DNA, 25 bp, Artificial
  probe
  misc_feature (1)..(25): SEQ ID NO: 5316; WAN024CUQ; Start 397; Stop 421
agatttgagataggcatcctgattt

SEQ ID NO: 406767 - DNA, 25 bp, Artificial
  probe
  misc_feature (1)..(25): SEQ ID NO: 5316; WAN024CUQ; Start 396; Stop 420
cagatttgagataggcatcctgatt

SEQ ID NO: 406768 - DNA, 25 bp, Artificial
  probe
  misc_feature (1)..(25): SEQ ID NO: 5316; WAN024CUQ; Start 305; Stop 329
tgaggattagttggcttgtctttgt

SEQ ID NO: 406769 - DNA, 25 bp, Artificial
  probe
  misc_feature (1)..(25): SEQ ID NO: 5316; WAN024CUQ; Start 378; Stop 402
ccaatttaacaccaccagcagattt

SEQ ID NO: 406770 - DNA, 25 bp, Artificial
  probe
  misc_feature (1)..(25): SEQ ID NO: 5316; WAN024CUQ; Start 297; Stop 321
aacattcctgaggattagttggctt

SEQ ID NO: 406771 - DNA, 25 bp, Artificial
  probe
  misc_feature (1)..(25): SEQ ID NO: 5316; WAN024CUQ; Start 194; Stop 218
ggtacataaatcttagtaaagccca

SEQ ID NO: 406772 - DNA, 25 bp, Artificial
  probe
  misc_feature (1)..(25): SEQ ID NO: 5316; WAN024CUQ; Start 383; Stop 407
ttaacaccaccagcagatttgagat

SEQ ID NO: 406773 - DNA, 25 bp, Artificial
  probe
  misc_feature (1)..(25): SEQ ID NO: 5316; WAN024CUQ; Start 365; Stop 389
atcgcaggttcatccaatttaacac

SEQ ID NO: 406774 - DNA, 25 bp, Artificial
  probe
  misc_feature (1)..(25): SEQ ID NO: 5316; WAN024CUQ; Start 358; Stop 382
caagtcaatcgcaggttcatccaat

SEQ ID NO: 406775 - DNA, 25 bp, Artificial
  probe
  misc_feature (1)..(25): SEQ ID NO: 5316; WAN024CUQ; Start 193; Stop 217
aggtacataaatcttagtaaagccc

SEQ ID NO: 406776 - DNA, 25 bp, Artificial
  probe
  misc_feature (1)..(25): SEQ ID NO: 5316; WAN024CUQ; Start 80; Stop 104
ttaagagaatttgtcacggattatg

SEQ ID NO: 406777 - DNA, 25 bp, Artificial
  probe
  misc_feature (1)..(25): SEQ ID NO: 5316; WAN024CUQ; Start 382; Stop 406
tttaacaccaccagcagatttgaga

SEQ ID NO: 406778 - DNA, 25 bp, Artificial
  probe
  misc_feature (1)..(25): SEQ ID NO: 5316; WAN024CUQ; Start 152; Stop 176
tgaatttccttaggcagagtgattc

SEQ ID NO: 406779 - DNA, 25 bp, Artificial
  probe
  misc_feature (1)..(25): SEQ ID NO: 5316; WAN024CUQ; Start 300; Stop 324
attcctgaggattagttggcttgtc

SEQ ID NO: 406780 - DNA, 25 bp, Artificial
  probe
  misc_feature (1)..(25): SEQ ID NO: 5317; WAN024FOX; Start 218; Stop 242
ccattagcaacaaccagaaccactc

SEQ ID NO: 406781 - DNA, 25 bp, Artificial
  probe
  misc_feature (1)..(25): SEQ ID NO: 5317; WAN024FOX; Start 174; Stop 198
atgtctgagcctgaatcaattcatt

SEQ ID NO: 406782 - DNA, 25 bp, Artificial
  probe
  misc_feature (1)..(25): SEQ ID NO: 5317; WAN024FOX; Start 177; Stop 201
tctgagcctgaatcaattcattgtt

SEQ ID NO: 406783 - DNA, 25 bp, Artificial
  probe
  misc_feature (1)..(25): SEQ ID NO: 5317; WAN024FOX; Start 21; Stop 45
tttcaatcatttctggagtcataaa

SEQ ID NO: 406784 - DNA, 25 bp, Artificial
  probe
  misc_feature (1)..(25): SEQ ID NO: 5317; WAN024FOX; Start 173; Stop 197
catgtctgagcctgaatcaattcat

SEQ ID NO: 406785 - DNA, 25 bp, Artificial
  probe
  misc_feature (1)..(25): SEQ ID NO: 5317; WAN024FOX; Start 176; Stop 200
gtctgagcctgaatcaattcattgt

SEQ ID NO: 406786 - DNA, 25 bp, Artificial
  probe
  misc_feature (1)..(25): SEQ ID NO: 5317; WAN024FOX; Start 175; Stop 199
tgtctgagcctgaatcaattcattg

SEQ ID NO: 406787 - DNA, 25 bp, Artificial
  probe
  misc_feature (1)..(25): SEQ ID NO: 5317; WAN024FOX; Start 219; Stop 243
cattagcaacaaccagaaccactcg

SEQ ID NO: 406788 - DNA, 25 bp, Artificial
  probe
  misc_feature (1)..(25): SEQ ID NO: 5317; WAN024FOX; Start 63; Stop 87
aaatcgtaccttccttgacaaaatc

SEQ ID NO: 406789 - DNA, 25 bp, Artificial
  probe
  misc_feature (1)..(25): SEQ ID NO: 5317; WAN024FOX; Start 62; Stop 86
aaaatcgtaccttccttgacaaaat

SEQ ID NO: 406790 - DNA, 25 bp, Artificial
  probe
  misc_feature (1)..(25): SEQ ID NO: 5317; WAN024FOX; Start 133; Stop 157
cttgaaatgagtcaaagccttgttg

SEQ ID NO: 406791 - DNA, 25 bp, Artificial
  probe
  misc_feature (1)..(25): SEQ ID NO: 5317; WAN024FOX; Start 134; Stop 158
ttgaaatgagtcaaagccttgttga

SEQ ID NO: 406792 - DNA, 25 bp, Artificial
  probe
  misc_feature (1)..(25): SEQ ID NO: 5317; WAN024FOX; Start 73; Stop 97
ttccttgacaaaatcacccttcatc

SEQ ID NO: 406793 - DNA, 25 bp, Artificial
  probe
  misc_feature (1)..(25): SEQ ID NO: 5317; WAN024FOX; Start 72; Stop 96
cttccttgacaaaatcacccttcat

SEQ ID NO: 406794 - DNA, 25 bp, Artificial
  probe
  misc_feature (1)..(25): SEQ ID NO: 5317; WAN024FOX; Start 64; Stop 88
aatcgtaccttccttgacaaaatca

SEQ ID NO: 406795 - DNA, 25 bp, Artificial
  probe
  misc_feature (1)..(25): SEQ ID NO: 5317; WAN024FOX; Start 178; Stop 202
ctgagcctgaatcaattcattgttt

SEQ ID NO: 406796 - DNA, 25 bp, Artificial
  probe
  misc_feature (1)..(25): SEQ ID NO: 5317; WAN024FOX; Start 31; Stop 55
ttctggagtcataaaactttcaaga

SEQ ID NO: 406797 - DNA, 25 bp, Artificial
  probe
  misc_feature (1)..(25): SEQ ID NO: 5317; WAN024FOX; Start 23; Stop 47
tcaatcatttctggagtcataaaac

SEQ ID NO: 406798 - DNA, 25 bp, Artificial
  probe
  misc_feature (1)..(25): SEQ ID NO: 5317; WAN024FOX; Start 32; Stop 56
tctggagtcataaaactttcaagat

SEQ ID NO: 406799 - DNA, 25 bp, Artificial
  probe
  misc_feature (1)..(25): SEQ ID NO: 5317; WAN024FOX; Start 132; Stop 156
ccttgaaatgagtcaaagccttgtt

SEQ ID NO: 406800 - DNA, 25 bp, Artificial
  probe
  misc_feature (1)..(25): SEQ ID NO: 5317; WAN024FOX; Start 65; Stop 89
atcgtaccttccttgacaaaatcac

SEQ ID NO: 406801 - DNA, 25 bp, Artificial
  probe
  misc_feature (1)..(25): SEQ ID NO: 5317; WAN024FOX; Start 172; Stop 196
ccatgtctgagcctgaatcaattca

SEQ ID NO: 406802 - DNA, 25 bp, Artificial
  probe
  misc_feature (1)..(25): SEQ ID NO: 5317; WAN024FOX; Start 69; Stop 93
taccttccttgacaaaatcaccctt

SEQ ID NO: 406803 - DNA, 25 bp, Artificial
  probe
  misc_feature (1)..(25): SEQ ID NO: 5317; WAN024FOX; Start 221; Stop 245
ttagcaacaaccagaaccactcgat

SEQ ID NO: 406804 - DNA, 25 bp, Artificial
  probe
  misc_feature (1)..(25): SEQ ID NO: 5317; WAN024FOX; Start 220; Stop 244
attagcaacaaccagaaccactcga

SEQ ID NO: 406805 - DNA, 25 bp, Artificial
  probe
  misc_feature (1)..(25): SEQ ID NO: 5317; WAN024FOX; Start 28; Stop 52
catttctggagtcataaaactttca

SEQ ID NO: 406806 - DNA, 25 bp, Artificial
  probe
  misc_feature (1)..(25): SEQ ID NO: 5317; WAN024FOX; Start 171; Stop 195
cccatgtctgagcctgaatcaattc

SEQ ID NO: 406807 - DNA, 25 bp, Artificial
  probe
  misc_feature (1)..(25): SEQ ID NO: 5317; WAN024FOX; Start 30; Stop 54
tttctggagtcataaaactttcaag

SEQ ID NO: 406808 - DNA, 25 bp, Artificial
  probe
  misc_feature (1)..(25): SEQ ID NO: 5317; WAN024FOX; Start 24; Stop 48
caatcatttctggagtcataaaact

SEQ ID NO: 406809 - DNA, 25 bp, Artificial
  probe
  misc_feature (1)..(25): SEQ ID NO: 5317; WAN024FOX; Start 27; Stop 51
tcatttctggagtcataaaactttc

SEQ ID NO: 406810 - DNA, 25 bp, Artificial
  probe
  misc_feature (1)..(25): SEQ ID NO: 5317; WAN024FOX; Start 169; Stop 193
atcccatgtctgagcctgaatcaat

SEQ ID NO: 406811 - DNA, 25 bp, Artificial
  probe
  misc_feature (1)..(25): SEQ ID NO: 5317; WAN024FOX; Start 101; Stop 125
gttacaacaaactggtcctgacacg

SEQ ID NO: 406812 - DNA, 25 bp, Artificial
  probe
  misc_feature (1)..(25): SEQ ID NO: 5317; WAN024FOX; Start 100; Stop 124
cgttacaacaaactggtcctgacac

SEQ ID NO: 406813 - DNA, 25 bp, Artificial
  probe
  misc_feature (1)..(25): SEQ ID NO: 5318; WAN024FZH; Start 158; Stop 182
ggcaacatcaaagagaataccatag

SEQ ID NO: 406814 - DNA, 25 bp, Artificial
  probe
  misc_feature (1)..(25): SEQ ID NO: 5318; WAN024FZH; Start 157; Stop 181
aggcaacatcaaagagaataccata

SEQ ID NO: 406815 - DNA, 25 bp, Artificial
  probe
  misc_feature (1)..(25): SEQ ID NO: 5318; WAN024FZH; Start 80; Stop 104
tccatccgtcttatccttatttctg

SEQ ID NO: 406816 - DNA, 25 bp, Artificial
  probe
  misc_feature (1)..(25): SEQ ID NO: 5318; WAN024FZH; Start 79; Stop 103
ttccatccgtcttatccttatttct

SEQ ID NO: 406817 - DNA, 25 bp, Artificial
  probe
  misc_feature (1)..(25): SEQ ID NO: 5318; WAN024FZH; Start 82; Stop 106
catccgtcttatccttatttctggg

SEQ ID NO: 406818 - DNA, 25 bp, Artificial
  probe
  misc_feature (1)..(25): SEQ ID NO: 5318; WAN024FZH; Start 71; Stop 95
tactgaaattccatccgtcttatcc

SEQ ID NO: 406819 - DNA, 25 bp, Artificial
  probe
  misc_feature (1)..(25): SEQ ID NO: 5318; WAN024FZH; Start 74; Stop 98
tgaaattccatccgtcttatcctta

SEQ ID NO: 406820 - DNA, 25 bp, Artificial
  probe
  misc_feature (1)..(25): SEQ ID NO: 5318; WAN024FZH; Start 73; Stop 97
ctgaaattccatccgtcttatcctt

SEQ ID NO: 406821 - DNA, 25 bp, Artificial
  probe
  misc_feature (1)..(25): SEQ ID NO: 5318; WAN024FZH; Start 159; Stop 183
gcaacatcaaagagaataccataga

SEQ ID NO: 406822 - DNA, 25 bp, Artificial
  probe
  misc_feature (1)..(25): SEQ ID NO: 5318; WAN024FZH; Start 129; Stop 153
aaggtgtaaacatactcttcccaaa

SEQ ID NO: 406823 - DNA, 25 bp, Artificial
  probe
  misc_feature (1)..(25): SEQ ID NO: 5318; WAN024FZH; Start 130; Stop 154
aggtgtaaacatactcttcccaaag

SEQ ID NO: 406824 - DNA, 25 bp, Artificial
  probe
  misc_feature (1)..(25): SEQ ID NO: 5318; WAN024FZH; Start 156; Stop 180
caggcaacatcaaagagaataccat

SEQ ID NO: 406825 - DNA, 25 bp, Artificial
  probe
  misc_feature (1)..(25): SEQ ID NO: 5318; WAN024FZH; Start 128; Stop 152
caaggtgtaaacatactcttcccaa

SEQ ID NO: 406826 - DNA, 25 bp, Artificial
  probe
  misc_feature (1)..(25): SEQ ID NO: 5318; WAN024FZH; Start 78; Stop 102
attccatccgtcttatccttatttc

SEQ ID NO: 406827 - DNA, 25 bp, Artificial
  probe
  misc_feature (1)..(25): SEQ ID NO: 5318; WAN024FZH; Start 219; Stop 243
tggtttaggatcatcagacaaagtt

SEQ ID NO: 406828 - DNA, 25 bp, Artificial
  probe
  misc_feature (1)..(25): SEQ ID NO: 5318; WAN024FZH; Start 220; Stop 244
ggtttaggatcatcagacaaagttc

SEQ ID NO: 406829 - DNA, 25 bp, Artificial
  probe
  misc_feature (1)..(25): SEQ ID NO: 5318; WAN024FZH; Start 75; Stop 99
gaaattccatccgtcttatccttat

SEQ ID NO: 406830 - DNA, 25 bp, Artificial
  probe
  misc_feature (1)..(25): SEQ ID NO: 5318; WAN024FZH; Start 72; Stop 96
actgaaattccatccgtcttatcct

SEQ ID NO: 406831 - DNA, 25 bp, Artificial
  probe
  misc_feature (1)..(25): SEQ ID NO: 5318; WAN024FZH; Start 70; Stop 94
atactgaaattccatccgtcttatc

SEQ ID NO: 406832 - DNA, 25 bp, Artificial
  probe
  misc_feature (1)..(25): SEQ ID NO: 5318; WAN024FZH; Start 187; Stop 211
tttgatcttgataccctaaaccgtg

SEQ ID NO: 406833 - DNA, 25 bp, Artificial
  probe
  misc_feature (1)..(25): SEQ ID NO: 5318; WAN024FZH; Start 134; Stop 158
gtaaacatactcttcccaaagccag

SEQ ID NO: 406834 - DNA, 25 bp, Artificial
  probe
  misc_feature (1)..(25): SEQ ID NO: 5318; WAN024FZH; Start 214; Stop 238
tttcttggtttaggatcatcagaca

SEQ ID NO: 406835 - DNA, 25 bp, Artificial
  probe
  misc_feature (1)..(25): SEQ ID NO: 5318; WAN024FZH; Start 125; Stop 149
caacaaggtgtaaacatactcttcc

SEQ ID NO: 406836 - DNA, 25 bp, Artificial
  probe
  misc_feature (1)..(25): SEQ ID NO: 5318; WAN024FZH; Start 124; Stop 148
gcaacaaggtgtaaacatactcttc

SEQ ID NO: 406837 - DNA, 25 bp, Artificial
  probe
  misc_feature (1)..(25): SEQ ID NO: 5318; WAN024FZH; Start 68; Stop 92
aaatactgaaattccatccgtctta

SEQ ID NO: 406838 - DNA, 25 bp, Artificial
  probe
  misc_feature (1)..(25): SEQ ID NO: 5318; WAN024FZH; Start 218; Stop 242
ttggtttaggatcatcagacaaagt

SEQ ID NO: 406839 - DNA, 25 bp, Artificial
  probe
  misc_feature (1)..(25): SEQ ID NO: 5318; WAN024FZH; Start 216; Stop 240
tcttggtttaggatcatcagacaaa

SEQ ID NO: 406840 - DNA, 25 bp, Artificial
  probe
  misc_feature (1)..(25): SEQ ID NO: 5318; WAN024FZH; Start 215; Stop 239
ttcttggtttaggatcatcagacaa

SEQ ID NO: 406841 - DNA, 25 bp, Artificial
  probe
  misc_feature (1)..(25): SEQ ID NO: 5318; WAN024FZH; Start 126; Stop 150
aacaaggtgtaaacatactcttccc

SEQ ID NO: 406842 - DNA, 25 bp, Artificial
  probe
  misc_feature (1)..(25): SEQ ID NO: 5318; WAN024FZH; Start 217; Stop 241
cttggtttaggatcatcagacaaag

SEQ ID NO: 406843 - DNA, 25 bp, Artificial
  probe
  misc_feature (1)..(25): SEQ ID NO: 5318; WAN024FZH; Start 243; Stop 267
tcttgtaagtttctgtactcgtgaa

SEQ ID NO: 406844 - DNA, 25 bp, Artificial
  probe
  misc_feature (1)..(25): SEQ ID NO: 5318; WAN024FZH; Start 242; Stop 266
ttcttgtaagtttctgtactcgtga

SEQ ID NO: 406845 - DNA, 25 bp, Artificial
  probe
  misc_feature (1)..(25): SEQ ID NO: 5318; WAN024FZH; Start 241; Stop 265
gttcttgtaagtttctgtactcgtg

SEQ ID NO: 406846 - DNA, 25 bp, Artificial
  probe
  misc_feature (1)..(25): SEQ ID NO: 5319; WAN024CLE; Start 69; Stop 93
caatacaccatcaaagttgtttgga

SEQ ID NO: 406847 - DNA, 25 bp, Artificial
  probe
  misc_feature (1)..(25): SEQ ID NO: 5319; WAN024CLE; Start 72; Stop 96
tacaccatcaaagttgtttggattt

SEQ ID NO: 406848 - DNA, 25 bp, Artificial
  probe
  misc_feature (1)..(25): SEQ ID NO: 5319; WAN024CLE; Start 71; Stop 95
atacaccatcaaagttgtttggatt

SEQ ID NO: 406849 - DNA, 25 bp, Artificial
  probe
  misc_feature (1)..(25): SEQ ID NO: 5319; WAN024CLE; Start 70; Stop 94
aatacaccatcaaagttgtttggat

SEQ ID NO: 406850 - DNA, 25 bp, Artificial
  probe
  misc_feature (1)..(25): SEQ ID NO: 5319; WAN024CLE; Start 68; Stop 92
acaatacaccatcaaagttgtttgg

SEQ ID NO: 406851 - DNA, 25 bp, Artificial
  probe
  misc_feature (1)..(25): SEQ ID NO: 5319; WAN024CLE; Start 9; Stop 33
agtgcaaaatctagtaaacattcca

SEQ ID NO: 406852 - DNA, 25 bp, Artificial
  probe
  misc_feature (1)..(25): SEQ ID NO: 5319; WAN024CLE; Start 10; Stop 34
gtgcaaaatctagtaaacattccaa

SEQ ID NO: 406853 - DNA, 25 bp, Artificial
  probe
  misc_feature (1)..(25): SEQ ID NO: 5319; WAN024CLE; Start 73; Stop 97
acaccatcaaagttgtttggatttt

SEQ ID NO: 406854 - DNA, 25 bp, Artificial
  probe
  misc_feature (1)..(25): SEQ ID NO: 5319; WAN024CLE; Start 12; Stop 36
gcaaaatctagtaaacattccaaaa

SEQ ID NO: 406855 - DNA, 25 bp, Artificial
  probe
  misc_feature (1)..(25): SEQ ID NO: 5319; WAN024CLE; Start 11; Stop 35
tgcaaaatctagtaaacattccaaa

SEQ ID NO: 406856 - DNA, 25 bp, Artificial
  probe
  misc_feature (1)..(25): SEQ ID NO: 5319; WAN024CLE; Start 40; Stop 64
actcgaatatttatttccaaacaaa

SEQ ID NO: 406857 - DNA, 25 bp, Artificial
  probe
  misc_feature (1)..(25): SEQ ID NO: 5319; WAN024CLE; Start 39; Stop 63
aactcgaatatttatttccaaacaa

SEQ ID NO: 406858 - DNA, 25 bp, Artificial
  probe
  misc_feature (1)..(25): SEQ ID NO: 5319; WAN024CLE; Start 8; Stop 32
tagtgcaaaatctagtaaacattcc

SEQ ID NO: 406859 - DNA, 25 bp, Artificial
  probe
  misc_feature (1)..(25): SEQ ID NO: 5319; WAN024CLE; Start 21; Stop 45
agtaaacattccaaaattaactcga

SEQ ID NO: 406860 - DNA, 25 bp, Artificial
  probe
  misc_feature (1)..(25): SEQ ID NO: 5319; WAN024CLE; Start 4; Stop 28
catgtagtgcaaaatctagtaaaca

SEQ ID NO: 406861 - DNA, 25 bp, Artificial
  probe
  misc_feature (1)..(25): SEQ ID NO: 5319; WAN024CLE; Start 22; Stop 46
gtaaacattccaaaattaactcgaa

SEQ ID NO: 406862 - DNA, 25 bp, Artificial
  probe
  misc_feature (1)..(25): SEQ ID NO: 5319; WAN024CLE; Start 3; Stop 27
gcatgtagtgcaaaatctagtaaac

SEQ ID NO: 406863 - DNA, 25 bp, Artificial
  probe
  misc_feature (1)..(25): SEQ ID NO: 5319; WAN024CLE; Start 7; Stop 31
gtagtgcaaaatctagtaaacattc

SEQ ID NO: 406864 - DNA, 25 bp, Artificial
  probe
  misc_feature (1)..(25): SEQ ID NO: 5319; WAN024CLE; Start 20; Stop 44
tagtaaacattccaaaattaactcg

SEQ ID NO: 406865 - DNA, 25 bp, Artificial
  probe
  misc_feature (1)..(25): SEQ ID NO: 5319; WAN024CLE; Start 6; Stop 30
tgtagtgcaaaatctagtaaacatt

SEQ ID NO: 406866 - DNA, 25 bp, Artificial
  probe
  misc_feature (1)..(25): SEQ ID NO: 5319; WAN024CLE; Start 38; Stop 62
taactcgaatatttatttccaaaca

SEQ ID NO: 406867 - DNA, 25 bp, Artificial
  probe
  misc_feature (1)..(25): SEQ ID NO: 5319; WAN024CLE; Start 5; Stop 29
atgtagtgcaaaatctagtaaacat

SEQ ID NO: 406868 - DNA, 25 bp, Artificial
  probe
  misc_feature (1)..(25): SEQ ID NO: 5319; WAN024CLE; Start 24; Stop 48
aaacattccaaaattaactcgaata

SEQ ID NO: 406869 - DNA, 25 bp, Artificial
  probe
  misc_feature (1)..(25): SEQ ID NO: 5319; WAN024CLE; Start 23; Stop 47
taaacattccaaaattaactcgaat

SEQ ID NO: 406870 - DNA, 25 bp, Artificial
  probe
  misc_feature (1)..(25): SEQ ID NO: 5319; WAN024CLE; Start 26; Stop 50
acattccaaaattaactcgaatatt

SEQ ID NO: 406871 - DNA, 25 bp, Artificial
  probe
  misc_feature (1)..(25): SEQ ID NO: 5319; WAN024CLE; Start 25; Stop 49
aacattccaaaattaactcgaatat

SEQ ID NO: 406872 - DNA, 25 bp, Artificial
  probe
  misc_feature (1)..(25): SEQ ID NO: 5319; WAN024CLE; Start 41; Stop 65
ctcgaatatttatttccaaacaaaa

SEQ ID NO: 406873 - DNA, 25 bp, Artificial
  probe
  misc_feature (1)..(25): SEQ ID NO: 5320; WAN024CIJ; Start 194; Stop 218
ttctctcaagcgacaactatattag

SEQ ID NO: 406874 - DNA, 25 bp, Artificial
  probe
  misc_feature (1)..(25): SEQ ID NO: 5320; WAN024CIJ; Start 193; Stop 217
cttctctcaagcgacaactatatta

SEQ ID NO: 406875 - DNA, 25 bp, Artificial
  probe
  misc_feature (1)..(25): SEQ ID NO: 5320; WAN024CIJ; Start 195; Stop 219
tctctcaagcgacaactatattagt

SEQ ID NO: 406876 - DNA, 25 bp, Artificial
  probe
  misc_feature (1)..(25): SEQ ID NO: 5320; WAN024CIJ; Start 196; Stop 220
ctctcaagcgacaactatattagta

SEQ ID NO: 406877 - DNA, 25 bp, Artificial
  probe
  misc_feature (1)..(25): SEQ ID NO: 5320; WAN024CIJ; Start 36; Stop 60
gagccaggatcaaactctcattaaa

SEQ ID NO: 406878 - DNA, 25 bp, Artificial
  probe
  misc_feature (1)..(25): SEQ ID NO: 5320; WAN024CIJ; Start 197; Stop 221
tctcaagcgacaactatattagtat

SEQ ID NO: 406879 - DNA, 25 bp, Artificial
  probe
  misc_feature (1)..(25): SEQ ID NO: 5320; WAN024CIJ; Start 175; Stop 199
aaaggtctttgtcacttgcttctct

SEQ ID NO: 406880 - DNA, 25 bp, Artificial
  probe
  misc_feature (1)..(25): SEQ ID NO: 5320; WAN024CIJ; Start 148; Stop 172
cacattggttcgtcttgttcagttt

SEQ ID NO: 406881 - DNA, 25 bp, Artificial
  probe
  misc_feature (1)..(25): SEQ ID NO: 5320; WAN024CIJ; Start 176; Stop 200
aaggtctttgtcacttgcttctctc

SEQ ID NO: 406882 - DNA, 25 bp, Artificial
  probe
  misc_feature (1)..(25): SEQ ID NO: 5320; WAN024CIJ; Start 178; Stop 202
ggtctttgtcacttgcttctctcaa

SEQ ID NO: 406883 - DNA, 25 bp, Artificial
  probe
  misc_feature (1)..(25): SEQ ID NO: 5320; WAN024CIJ; Start 159; Stop 183
gtcttgttcagttttcaaaggtctt

SEQ ID NO: 406884 - DNA, 25 bp, Artificial
  probe
  misc_feature (1)..(25): SEQ ID NO: 5320; WAN024CIJ; Start 150; Stop 174
cattggttcgtcttgttcagttttc

SEQ ID NO: 406885 - DNA, 25 bp, Artificial
  probe
  misc_feature (1)..(25): SEQ ID NO: 5320; WAN024CIJ; Start 203; Stop 227
gcgacaactatattagtatatcaca

SEQ ID NO: 406886 - DNA, 25 bp, Artificial
  probe
  misc_feature (1)..(25): SEQ ID NO: 5320; WAN024CIJ; Start 151; Stop 175
attggttcgtcttgttcagttttca

SEQ ID NO: 406887 - DNA, 25 bp, Artificial
  probe
  misc_feature (1)..(25): SEQ ID NO: 5320; WAN024CIJ; Start 37; Stop 61
agccaggatcaaactctcattaaaa

SEQ ID NO: 406888 - DNA, 25 bp, Artificial
  probe
  misc_feature (1)..(25): SEQ ID NO: 5320; WAN024CIJ; Start 160; Stop 184
tcttgttcagttttcaaaggtcttt

SEQ ID NO: 406889 - DNA, 25 bp, Artificial
  probe
  misc_feature (1)..(25): SEQ ID NO: 5320; WAN024CIJ; Start 155; Stop 179
gttcgtcttgttcagttttcaaagg

SEQ ID NO: 406890 - DNA, 25 bp, Artificial
  probe
  misc_feature (1)..(25): SEQ ID NO: 5320; WAN024CIJ; Start 154; Stop 178
ggttcgtcttgttcagttttcaaag

SEQ ID NO: 406891 - DNA, 25 bp, Artificial
  probe
  misc_feature (1)..(25): SEQ ID NO: 5320; WAN024CIJ; Start 177; Stop 201
aggtctttgtcacttgcttctctca

SEQ ID NO: 406892 - DNA, 25 bp, Artificial
  probe
  misc_feature (1)..(25): SEQ ID NO: 5320; WAN024CIJ; Start 202; Stop 226
agcgacaactatattagtatatcac

SEQ ID NO: 406893 - DNA, 25 bp, Artificial
  probe
  misc_feature (1)..(25): SEQ ID NO: 5320; WAN024CIJ; Start 156; Stop 180
ttcgtcttgttcagttttcaaaggt

SEQ ID NO: 406894 - DNA, 25 bp, Artificial
  probe
  misc_feature (1)..(25): SEQ ID NO: 5320; WAN024CIJ; Start 147; Stop 171
gcacattggttcgtcttgttcagtt

SEQ ID NO: 406895 - DNA, 25 bp, Artificial
  probe
  misc_feature (1)..(25): SEQ ID NO: 5320; WAN024CIJ; Start 198; Stop 222
ctcaagcgacaactatattagtata

SEQ ID NO: 406896 - DNA, 25 bp, Artificial
  probe
  misc_feature (1)..(25): SEQ ID NO: 5320; WAN024CIJ; Start 153; Stop 177
tggttcgtcttgttcagttttcaaa

SEQ ID NO: 406897 - DNA, 25 bp, Artificial
  probe
  misc_feature (1)..(25): SEQ ID NO: 5320; WAN024CIJ; Start 152; Stop 176
ttggttcgtcttgttcagttttcaa

SEQ ID NO: 406898 - DNA, 25 bp, Artificial
  probe
  misc_feature (1)..(25): SEQ ID NO: 5320; WAN024CIJ; Start 158; Stop 182
cgtcttgttcagttttcaaaggtct

SEQ ID NO: 406899 - DNA, 25 bp, Artificial
  probe
  misc_feature (1)..(25): SEQ ID NO: 5320; WAN024CIJ; Start 157; Stop 181
tcgtcttgttcagttttcaaaggtc

SEQ ID NO: 406900 - DNA, 25 bp, Artificial
  probe
  misc_feature (1)..(25): SEQ ID NO: 5320; WAN024CIJ; Start 149; Stop 173
acattggttcgtcttgttcagtttt

SEQ ID NO: 406901 - DNA, 25 bp, Artificial
  probe
  misc_feature (1)..(25): SEQ ID NO: 5320; WAN024CIJ; Start 171; Stop 195
tttcaaaggtctttgtcacttgctt

SEQ ID NO: 406902 - DNA, 25 bp, Artificial
  probe
  misc_feature (1)..(25): SEQ ID NO: 5320; WAN024CIJ; Start 192; Stop 216
gcttctctcaagcgacaactatatt

SEQ ID NO: 406903 - DNA, 25 bp, Artificial
  probe
  misc_feature (1)..(25): SEQ ID NO: 5320; WAN024CIJ; Start 179; Stop 203
gtctttgtcacttgcttctctcaag

SEQ ID NO: 406904 - DNA, 25 bp, Artificial
  probe
  misc_feature (1)..(25): SEQ ID NO: 5320; WAN024CIJ; Start 172; Stop 196
ttcaaaggtctttgtcacttgcttc

SEQ ID NO: 406905 - DNA, 25 bp, Artificial
  probe
  misc_feature (1)..(25): SEQ ID NO: 5320; WAN024CIJ; Start 201; Stop 225
aagcgacaactatattagtatatca

SEQ ID NO: 406906 - DNA, 25 bp, Artificial
  probe
  misc_feature (1)..(25): SEQ ID NO: 5321; WAN024DBO; Start 275; Stop 299
caggtattgatgagagagactacat

SEQ ID NO: 406907 - DNA, 25 bp, Artificial
  probe
  misc_feature (1)..(25): SEQ ID NO: 5321; WAN024DBO; Start 282; Stop 306
tgatgagagagactacattcctaag

SEQ ID NO: 406908 - DNA, 25 bp, Artificial
  probe
  misc_feature (1)..(25): SEQ ID NO: 5321; WAN024DBO; Start 274; Stop 298
tcaggtattgatgagagagactaca

SEQ ID NO: 406909 - DNA, 25 bp, Artificial
  probe
  misc_feature (1)..(25): SEQ ID NO: 5321; WAN024DBO; Start 824; Stop 848
cagatagtgaattggagtcagatgt

SEQ ID NO: 406910 - DNA, 25 bp, Artificial
  probe
  misc_feature (1)..(25): SEQ ID NO: 5321; WAN024DBO; Start 823; Stop 847
tcagatagtgaattggagtcagatg

SEQ ID NO: 406911 - DNA, 25 bp, Artificial
  probe
  misc_feature (1)..(25): SEQ ID NO: 5321; WAN024DBO; Start 827; Stop 851
atagtgaattggagtcagatgttga

SEQ ID NO: 406912 - DNA, 25 bp, Artificial
  probe
  misc_feature (1)..(25): SEQ ID NO: 5321; WAN024DBO; Start 826; Stop 850
gatagtgaattggagtcagatgttg

SEQ ID NO: 406913 - DNA, 25 bp, Artificial
  probe
  misc_feature (1)..(25): SEQ ID NO: 5321; WAN024DBO; Start 825; Stop 849
agatagtgaattggagtcagatgtt

SEQ ID NO: 406914 - DNA, 25 bp, Artificial
  probe
  misc_feature (1)..(25): SEQ ID NO: 5321; WAN024DBO; Start 273; Stop 297
ttcaggtattgatgagagagactac

SEQ ID NO: 406915 - DNA, 25 bp, Artificial
  probe
  misc_feature (1)..(25): SEQ ID NO: 5321; WAN024DBO; Start 276; Stop 300
aggtattgatgagagagactacatt

SEQ ID NO: 406916 - DNA, 25 bp, Artificial
  probe
  misc_feature (1)..(25): SEQ ID NO: 5321; WAN024DBO; Start 283; Stop 307
gatgagagagactacattcctaagt

SEQ ID NO: 406917 - DNA, 25 bp, Artificial
  probe
  misc_feature (1)..(25): SEQ ID NO: 5321; WAN024DBO; Start 281; Stop 305
ttgatgagagagactacattcctaa

SEQ ID NO: 406918 - DNA, 25 bp, Artificial
  probe
  misc_feature (1)..(25): SEQ ID NO: 5321; WAN024DBO; Start 280; Stop 304
attgatgagagagactacattccta

SEQ ID NO: 406919 - DNA, 25 bp, Artificial
  probe
  misc_feature (1)..(25): SEQ ID NO: 5321; WAN024DBO; Start 279; Stop 303
tattgatgagagagactacattcct

SEQ ID NO: 406920 - DNA, 25 bp, Artificial
  probe
  misc_feature (1)..(25): SEQ ID NO: 5321; WAN024DBO; Start 278; Stop 302
gtattgatgagagagactacattcc

SEQ ID NO: 406921 - DNA, 25 bp, Artificial
  probe
  misc_feature (1)..(25): SEQ ID NO: 5321; WAN024DBO; Start 277; Stop 301
ggtattgatgagagagactacattc

SEQ ID NO: 406922 - DNA, 25 bp, Artificial
  probe
  misc_feature (1)..(25): SEQ ID NO: 5321; WAN024DBO; Start 248; Stop 272
gagatggaactgtcaatgaagtcat

SEQ ID NO: 406923 - DNA, 25 bp, Artificial
  probe
  misc_feature (1)..(25): SEQ ID NO: 5321; WAN024DBO; Start 284; Stop 308
atgagagagactacattcctaagtt

SEQ ID NO: 406924 - DNA, 25 bp, Artificial
  probe
  misc_feature (1)..(25): SEQ ID NO: 5321; WAN024DBO; Start 285; Stop 309
tgagagagactacattcctaagtta

SEQ ID NO: 406925 - DNA, 25 bp, Artificial
  probe
  misc_feature (1)..(25): SEQ ID NO: 5321; WAN024DBO; Start 452; Stop 476
atatctttagtatcggttctctgcc

SEQ ID NO: 406926 - DNA, 25 bp, Artificial
  probe
  misc_feature (1)..(25): SEQ ID NO: 5321; WAN024DBO; Start 453; Stop 477
tatctttagtatcggttctctgcct

SEQ ID NO: 406927 - DNA, 25 bp, Artificial
  probe
  misc_feature (1)..(25): SEQ ID NO: 5321; WAN024DBO; Start 851; Stop 875
acggagataaatcagataacctacc

SEQ ID NO: 406928 - DNA, 25 bp, Artificial
  probe
  misc_feature (1)..(25): SEQ ID NO: 5321; WAN024DBO; Start 247; Stop 271
ggagatggaactgtcaatgaagtca

SEQ ID NO: 406929 - DNA, 25 bp, Artificial
  probe
  misc_feature (1)..(25): SEQ ID NO: 5321; WAN024DBO; Start 246; Stop 270
tggagatggaactgtcaatgaagtc

SEQ ID NO: 406930 - DNA, 25 bp, Artificial
  probe
  misc_feature (1)..(25): SEQ ID NO: 5321; WAN024DBO; Start 852; Stop 876
cggagataaatcagataacctacct

SEQ ID NO: 406931 - DNA, 25 bp, Artificial
  probe
  misc_feature (1)..(25): SEQ ID NO: 5321; WAN024DBO; Start 726; Stop 750
attctccaaattatccgtcattcct

SEQ ID NO: 406932 - DNA, 25 bp, Artificial
  probe
  misc_feature (1)..(25): SEQ ID NO: 5321; WAN024DBO; Start 286; Stop 310
gagagagactacattcctaagttag

SEQ ID NO: 406933 - DNA, 25 bp, Artificial
  probe
  misc_feature (1)..(25): SEQ ID NO: 5321; WAN024DBO; Start 709; Stop 733
ctgaaagatgcctctatattctcca

SEQ ID NO: 406934 - DNA, 25 bp, Artificial
  probe
  misc_feature (1)..(25): SEQ ID NO: 5321; WAN024DBO; Start 727; Stop 751
ttctccaaattatccgtcattcctg

SEQ ID NO: 406935 - DNA, 25 bp, Artificial
  probe
  misc_feature (1)..(25): SEQ ID NO: 5321; WAN024DBO; Start 872; Stop 896
tacctgtagaaatcaaagtcctagc

SEQ ID NO: 406936 - DNA, 25 bp, Artificial
  probe
  misc_feature (1)..(25): SEQ ID NO: 5321; WAN024DBO; Start 708; Stop 732
tctgaaagatgcctctatattctcc

SEQ ID NO: 406937 - DNA, 25 bp, Artificial
  probe
  misc_feature (1)..(25): SEQ ID NO: 5321; WAN024DBO; Start 710; Stop 734
tgaaagatgcctctatattctccaa

SEQ ID NO: 406938 - DNA, 25 bp, Artificial
  probe
  misc_feature (1)..(25): SEQ ID NO: 5321; WAN024DBO; Start 245; Stop 269
gtggagatggaactgtcaatgaagt

SEQ ID NO: 406939 - DNA, 25 bp, Artificial
  probe
  misc_feature (1)..(25): SEQ ID NO: 5322; WAN024DXH; Start 814; Stop 838
ccaatctgtattctcttcttcttcc

SEQ ID NO: 406940 - DNA, 25 bp, Artificial
  probe
  misc_feature (1)..(25): SEQ ID NO: 5322; WAN024DXH; Start 810; Stop 834
ccttccaatctgtattctcttcttc

SEQ ID NO: 406941 - DNA, 25 bp, Artificial
  probe
  misc_feature (1)..(25): SEQ ID NO: 5322; WAN024DXH; Start 131; Stop 155
atccactgttgattaccattatgtc

SEQ ID NO: 406942 - DNA, 25 bp, Artificial
  probe
  misc_feature (1)..(25): SEQ ID NO: 5322; WAN024DXH; Start 132; Stop 156
tccactgttgattaccattatgtca

SEQ ID NO: 406943 - DNA, 25 bp, Artificial
  probe
  misc_feature (1)..(25): SEQ ID NO: 5322; WAN024DXH; Start 137; Stop 161
tgttgattaccattatgtcagcctt

SEQ ID NO: 406944 - DNA, 25 bp, Artificial
  probe
  misc_feature (1)..(25): SEQ ID NO: 5322; WAN024DXH; Start 815; Stop 839
caatctgtattctcttcttcttcct

SEQ ID NO: 406945 - DNA, 25 bp, Artificial
  probe
  misc_feature (1)..(25): SEQ ID NO: 5322; WAN024DXH; Start 813; Stop 837
tccaatctgtattctcttcttcttc

SEQ ID NO: 406946 - DNA, 25 bp, Artificial
  probe
  misc_feature (1)..(25): SEQ ID NO: 5322; WAN024DXH; Start 811; Stop 835
cttccaatctgtattctcttcttct

SEQ ID NO: 406947 - DNA, 25 bp, Artificial
  probe
  misc_feature (1)..(25): SEQ ID NO: 5322; WAN024DXH; Start 134; Stop 158
cactgttgattaccattatgtcagc

SEQ ID NO: 406948 - DNA, 25 bp, Artificial
  probe
  misc_feature (1)..(25): SEQ ID NO: 5322; WAN024DXH; Start 133; Stop 157
ccactgttgattaccattatgtcag

SEQ ID NO: 406949 - DNA, 25 bp, Artificial
  probe
  misc_feature (1)..(25): SEQ ID NO: 5322; WAN024DXH; Start 136; Stop 160
ctgttgattaccattatgtcagcct

SEQ ID NO: 406950 - DNA, 25 bp, Artificial
  probe
  misc_feature (1)..(25): SEQ ID NO: 5322; WAN024DXH; Start 135; Stop 159
actgttgattaccattatgtcagcc

SEQ ID NO: 406951 - DNA, 25 bp, Artificial
  probe
  misc_feature (1)..(25): SEQ ID NO: 5322; WAN024DXH; Start 465; Stop 489
caactggttcctcatcttcctctac

SEQ ID NO: 406952 - DNA, 25 bp, Artificial
  probe
  misc_feature (1)..(25): SEQ ID NO: 5322; WAN024DXH; Start 812; Stop 836
ttccaatctgtattctcttcttctt

SEQ ID NO: 406953 - DNA, 25 bp, Artificial
  probe
  misc_feature (1)..(25): SEQ ID NO: 5322; WAN024DXH; Start 130; Stop 154
tatccactgttgattaccattatgt

SEQ ID NO: 406954 - DNA, 25 bp, Artificial
  probe
  misc_feature (1)..(25): SEQ ID NO: 5322; WAN024DXH; Start 312; Stop 336
tatcatcgtacttgctggttatgct

SEQ ID NO: 406955 - DNA, 25 bp, Artificial
  probe
  misc_feature (1)..(25): SEQ ID NO: 5322; WAN024DXH; Start 311; Stop 335
gtatcatcgtacttgctggttatgc

SEQ ID NO: 406956 - DNA, 25 bp, Artificial
  probe
  misc_feature (1)..(25): SEQ ID NO: 5322; WAN024DXH; Start 464; Stop 488
acaactggttcctcatcttcctcta

SEQ ID NO: 406957 - DNA, 25 bp, Artificial
  probe
  misc_feature (1)..(25): SEQ ID NO: 5322; WAN024DXH; Start 315; Stop 339
catcgtacttgctggttatgcttac

SEQ ID NO: 406958 - DNA, 25 bp, Artificial
  probe
  misc_feature (1)..(25): SEQ ID NO: 5322; WAN024DXH; Start 817; Stop 841
atctgtattctcttcttcttcctac

SEQ ID NO: 406959 - DNA, 25 bp, Artificial
  probe
  misc_feature (1)..(25): SEQ ID NO: 5322; WAN024DXH; Start 314; Stop 338
tcatcgtacttgctggttatgctta

SEQ ID NO: 406960 - DNA, 25 bp, Artificial
  probe
  misc_feature (1)..(25): SEQ ID NO: 5322; WAN024DXH; Start 129; Stop 153
ctatccactgttgattaccattatg

SEQ ID NO: 406961 - DNA, 25 bp, Artificial
  probe
  misc_feature (1)..(25): SEQ ID NO: 5322; WAN024DXH; Start 809; Stop 833
cccttccaatctgtattctcttctt

SEQ ID NO: 406962 - DNA, 25 bp, Artificial
  probe
  misc_feature (1)..(25): SEQ ID NO: 5322; WAN024DXH; Start 85; Stop 109
agccttacttacctttacctgattg

SEQ ID NO: 406963 - DNA, 25 bp, Artificial
  probe
  misc_feature (1)..(25): SEQ ID NO: 5322; WAN024DXH; Start 316; Stop 340
atcgtacttgctggttatgcttaca

SEQ ID NO: 406964 - DNA, 25 bp, Artificial
  probe
  misc_feature (1)..(25): SEQ ID NO: 5322; WAN024DXH; Start 128; Stop 152
tctatccactgttgattaccattat

SEQ ID NO: 406965 - DNA, 25 bp, Artificial
  probe
  misc_feature (1)..(25): SEQ ID NO: 5322; WAN024DXH; Start 127; Stop 151
atctatccactgttgattaccatta

SEQ ID NO: 406966 - DNA, 25 bp, Artificial
  probe
  misc_feature (1)..(25): SEQ ID NO: 5322; WAN024DXH; Start 126; Stop 150
tatctatccactgttgattaccatt

SEQ ID NO: 406967 - DNA, 25 bp, Artificial
  probe
  misc_feature (1)..(25): SEQ ID NO: 5322; WAN024DXH; Start 125; Stop 149
ttatctatccactgttgattaccat

SEQ ID NO: 406968 - DNA, 25 bp, Artificial
  probe
  misc_feature (1)..(25): SEQ ID NO: 5322; WAN024DXH; Start 124; Stop 148
attatctatccactgttgattacca

SEQ ID NO: 406969 - DNA, 25 bp, Artificial
  probe
  misc_feature (1)..(25): SEQ ID NO: 5322; WAN024DXH; Start 310; Stop 334
agtatcatcgtacttgctggttatg

SEQ ID NO: 406970 - DNA, 25 bp, Artificial
  probe
  misc_feature (1)..(25): SEQ ID NO: 5322; WAN024DXH; Start 84; Stop 108
aagccttacttacctttacctgatt

SEQ ID NO: 406971 - DNA, 25 bp, Artificial
  probe
  misc_feature (1)..(25): SEQ ID NO: 5322; WAN024DXH; Start 86; Stop 110
gccttacttacctttacctgattgg

SEQ ID NO: 406972 - DNA, 25 bp, Artificial
  probe
  misc_feature (1)..(25): SEQ ID NO: 5323; WAN024FHK; Start 1361; Stop 1385
atatggtcaatgcctactacaatcc

SEQ ID NO: 406973 - DNA, 25 bp, Artificial
  probe
  misc_feature (1)..(25): SEQ ID NO: 5323; WAN024FHK; Start 1225; Stop 1249
cgttacaaggataaggtagtgaatg

SEQ ID NO: 406974 - DNA, 25 bp, Artificial
  probe
  misc_feature (1)..(25): SEQ ID NO: 5323; WAN024FHK; Start 1368; Stop 1392
caatgcctactacaatcctcagaag

SEQ ID NO: 406975 - DNA, 25 bp, Artificial
  probe
  misc_feature (1)..(25): SEQ ID NO: 5323; WAN024FHK; Start 1373; Stop 1397
cctactacaatcctcagaagaacct

SEQ ID NO: 406976 - DNA, 25 bp, Artificial
  probe
  misc_feature (1)..(25): SEQ ID NO: 5323; WAN024FHK; Start 1370; Stop 1394
atgcctactacaatcctcagaagaa

SEQ ID NO: 406977 - DNA, 25 bp, Artificial
  probe
  misc_feature (1)..(25): SEQ ID NO: 5323; WAN024FHK; Start 1369; Stop 1393
aatgcctactacaatcctcagaaga

SEQ ID NO: 406978 - DNA, 25 bp, Artificial
  probe
  misc_feature (1)..(25): SEQ ID NO: 5323; WAN024FHK; Start 1362; Stop 1386
tatggtcaatgcctactacaatcct

SEQ ID NO: 406979 - DNA, 25 bp, Artificial
  probe
  misc_feature (1)..(25): SEQ ID NO: 5323; WAN024FHK; Start 1367; Stop 1391
tcaatgcctactacaatcctcagaa

SEQ ID NO: 406980 - DNA, 25 bp, Artificial
  probe
  misc_feature (1)..(25): SEQ ID NO: 5323; WAN024FHK; Start 1452; Stop 1476
atcttctgctaactacggtggtatt

SEQ ID NO: 406981 - DNA, 25 bp, Artificial
  probe
  misc_feature (1)..(25): SEQ ID NO: 5323; WAN024FHK; Start 92; Stop 116
ctatcaatggagaatggcaacagac

SEQ ID NO: 406982 - DNA, 25 bp, Artificial
  probe
  misc_feature (1)..(25): SEQ ID NO: 5323; WAN024FHK; Start 1371; Stop 1395
tgcctactacaatcctcagaagaac

SEQ ID NO: 406983 - DNA, 25 bp, Artificial
  probe
  misc_feature (1)..(25): SEQ ID NO: 5323; WAN024FHK; Start 1366; Stop 1390
gtcaatgcctactacaatcctcaga

SEQ ID NO: 406984 - DNA, 25 bp, Artificial
  probe
  misc_feature (1)..(25): SEQ ID NO: 5323; WAN024FHK; Start 1451; Stop 1475
catcttctgctaactacggtggtat

SEQ ID NO: 406985 - DNA, 25 bp, Artificial
  probe
  misc_feature (1)..(25): SEQ ID NO: 5323; WAN024FHK; Start 1226; Stop 1250
gttacaaggataaggtagtgaatga

SEQ ID NO: 406986 - DNA, 25 bp, Artificial
  probe
  misc_feature (1)..(25): SEQ ID NO: 5323; WAN024FHK; Start 1374; Stop 1398
ctactacaatcctcagaagaacctg

SEQ ID NO: 406987 - DNA, 25 bp, Artificial
  probe
  misc_feature (1)..(25): SEQ ID NO: 5323; WAN024FHK; Start 1363; Stop 1387
atggtcaatgcctactacaatcctc

SEQ ID NO: 406988 - DNA, 25 bp, Artificial
  probe
  misc_feature (1)..(25): SEQ ID NO: 5323; WAN024FHK; Start 1453; Stop 1477
tcttctgctaactacggtggtattg

SEQ ID NO: 406989 - DNA, 25 bp, Artificial
  probe
  misc_feature (1)..(25): SEQ ID NO: 5323; WAN024FHK; Start 93; Stop 117
tatcaatggagaatggcaacagaca

SEQ ID NO: 406990 - DNA, 25 bp, Artificial
  probe
  misc_feature (1)..(25): SEQ ID NO: 5323; WAN024FHK; Start 1621; Stop 1645
gatggacaggattcttatggagcaa

SEQ ID NO: 406991 - DNA, 25 bp, Artificial
  probe
  misc_feature (1)..(25): SEQ ID NO: 5323; WAN024FHK; Start 1619; Stop 1643
ttgatggacaggattcttatggagc

SEQ ID NO: 406992 - DNA, 25 bp, Artificial
  probe
  misc_feature (1)..(25): SEQ ID NO: 5323; WAN024FHK; Start 1444; Stop 1468
catcagtcatcttctgctaactacg

SEQ ID NO: 406993 - DNA, 25 bp, Artificial
  probe
  misc_feature (1)..(25): SEQ ID NO: 5323; WAN024FHK; Start 1372; Stop 1396
gcctactacaatcctcagaagaacc

SEQ ID NO: 406994 - DNA, 25 bp, Artificial
  probe
  misc_feature (1)..(25): SEQ ID NO: 5323; WAN024FHK; Start 1622; Stop 1646
atggacaggattcttatggagcaac

SEQ ID NO: 406995 - DNA, 25 bp, Artificial
  probe
  misc_feature (1)..(25): SEQ ID NO: 5323; WAN024FHK; Start 1227; Stop 1251
ttacaaggataaggtagtgaatgaa

SEQ ID NO: 406996 - DNA, 25 bp, Artificial
  probe
  misc_feature (1)..(25): SEQ ID NO: 5323; WAN024FHK; Start 1365; Stop 1389
ggtcaatgcctactacaatcctcag

SEQ ID NO: 406997 - DNA, 25 bp, Artificial
  probe
  misc_feature (1)..(25): SEQ ID NO: 5323; WAN024FHK; Start 1450; Stop 1474
tcatcttctgctaactacggtggta

SEQ ID NO: 406998 - DNA, 25 bp, Artificial
  probe
  misc_feature (1)..(25): SEQ ID NO: 5323; WAN024FHK; Start 307; Stop 331
atcacacctgtcttaccactcctta

SEQ ID NO: 406999 - DNA, 25 bp, Artificial
  probe
  misc_feature (1)..(25): SEQ ID NO: 5323; WAN024FHK; Start 306; Stop 330
tatcacacctgtcttaccactcctt

SEQ ID NO: 407000 - DNA, 25 bp, Artificial
  probe
  misc_feature (1)..(25): SEQ ID NO: 5323; WAN024FHK; Start 1445; Stop 1469
atcagtcatcttctgctaactacgg

SEQ ID NO: 407001 - DNA, 25 bp, Artificial
  probe
  misc_feature (1)..(25): SEQ ID NO: 5323; WAN024FHK; Start 1191; Stop 1215
accttatattggctatccagaagaa

SEQ ID NO: 407002 - DNA, 25 bp, Artificial
  probe
  misc_feature (1)..(25): SEQ ID NO: 5323; WAN024FHK; Start 1190; Stop 1214
aaccttatattggctatccagaaga

SEQ ID NO: 407003 - DNA, 25 bp, Artificial
  probe
  misc_feature (1)..(25): SEQ ID NO: 5323; WAN024FHK; Start 39; Stop 63
tacaaatgaaagcgagaacaagatg

SEQ ID NO: 407004 - DNA, 25 bp, Artificial
  probe
  misc_feature (1)..(25): SEQ ID NO: 5323; WAN024FHK; Start 1618; Stop 1642
tttgatggacaggattcttatggag

SEQ ID NO: 407005 - DNA, 25 bp, Artificial
  probe
  misc_feature (1)..(25): SEQ ID NO: 5324; WAN024C66; Start 103; Stop 127
aacattggtgtggtcgatataggat

SEQ ID NO: 407006 - DNA, 25 bp, Artificial
  probe
  misc_feature (1)..(25): SEQ ID NO: 5324; WAN024C66; Start 154; Stop 178
gtctaccaacttgaacacttgctca

SEQ ID NO: 407007 - DNA, 25 bp, Artificial
  probe
  misc_feature (1)..(25): SEQ ID NO: 5324; WAN024C66; Start 75; Stop 99
aaacattcccataagcacccgtata

SEQ ID NO: 407008 - DNA, 25 bp, Artificial
  probe
  misc_feature (1)..(25): SEQ ID NO: 5324; WAN024C66; Start 104; Stop 128
acattggtgtggtcgatataggatc

SEQ ID NO: 407009 - DNA, 25 bp, Artificial
  probe
  misc_feature (1)..(25): SEQ ID NO: 5324; WAN024C66; Start 76; Stop 100
aacattcccataagcacccgtatag

SEQ ID NO: 407010 - DNA, 25 bp, Artificial
  probe
  misc_feature (1)..(25): SEQ ID NO: 5324; WAN024C66; Start 102; Stop 126
caacattggtgtggtcgatatagga

SEQ ID NO: 407011 - DNA, 25 bp, Artificial
  probe
  misc_feature (1)..(25): SEQ ID NO: 5324; WAN024C66; Start 178; Stop 202
aatcgagcgaatggtagaagaaatt

SEQ ID NO: 407012 - DNA, 25 bp, Artificial
  probe
  misc_feature (1)..(25): SEQ ID NO: 5324; WAN024C66; Start 157; Stop 181
taccaacttgaacacttgctcaatc

SEQ ID NO: 407013 - DNA, 25 bp, Artificial
  probe
  misc_feature (1)..(25): SEQ ID NO: 5324; WAN024C66; Start 156; Stop 180
ctaccaacttgaacacttgctcaat

SEQ ID NO: 407014 - DNA, 25 bp, Artificial
  probe
  misc_feature (1)..(25): SEQ ID NO: 5324; WAN024C66; Start 179; Stop 203
atcgagcgaatggtagaagaaattt

SEQ ID NO: 407015 - DNA, 25 bp, Artificial
  probe
  misc_feature (1)..(25): SEQ ID NO: 5324; WAN024C66; Start 175; Stop 199
ctcaatcgagcgaatggtagaagaa

SEQ ID NO: 407016 - DNA, 25 bp, Artificial
  probe
  misc_feature (1)..(25): SEQ ID NO: 5324; WAN024C66; Start 177; Stop 201
caatcgagcgaatggtagaagaaat

SEQ ID NO: 407017 - DNA, 25 bp, Artificial
  probe
  misc_feature (1)..(25): SEQ ID NO: 5324; WAN024C66; Start 153; Stop 177
ggtctaccaacttgaacacttgctc

SEQ ID NO: 407018 - DNA, 25 bp, Artificial
  probe
  misc_feature (1)..(25): SEQ ID NO: 5324; WAN024C66; Start 84; Stop 108
cataagcacccgtataggcaacatt

SEQ ID NO: 407019 - DNA, 25 bp, Artificial
  probe
  misc_feature (1)..(25): SEQ ID NO: 5324; WAN024C66; Start 85; Stop 109
ataagcacccgtataggcaacattg

SEQ ID NO: 407020 - DNA, 25 bp, Artificial
  probe
  misc_feature (1)..(25): SEQ ID NO: 5324; WAN024C66; Start 155; Stop 179
tctaccaacttgaacacttgctcaa

SEQ ID NO: 407021 - DNA, 25 bp, Artificial
  probe
  misc_feature (1)..(25): SEQ ID NO: 5324; WAN024C66; Start 68; Stop 92
tcaatcaaaacattcccataagcac

SEQ ID NO: 407022 - DNA, 25 bp, Artificial
  probe
  misc_feature (1)..(25): SEQ ID NO: 5324; WAN024C66; Start 64; Stop 88
gccatcaatcaaaacattcccataa

SEQ ID NO: 407023 - DNA, 25 bp, Artificial
  probe
  misc_feature (1)..(25): SEQ ID NO: 5324; WAN024C66; Start 67; Stop 91
atcaatcaaaacattcccataagca

SEQ ID NO: 407024 - DNA, 25 bp, Artificial
  probe
  misc_feature (1)..(25): SEQ ID NO: 5324; WAN024C66; Start 66; Stop 90
catcaatcaaaacattcccataagc

SEQ ID NO: 407025 - DNA, 25 bp, Artificial
  probe
  misc_feature (1)..(25): SEQ ID NO: 5324; WAN024C66; Start 176; Stop 200
tcaatcgagcgaatggtagaagaaa

SEQ ID NO: 407026 - DNA, 25 bp, Artificial
  probe
  misc_feature (1)..(25): SEQ ID NO: 5324; WAN024C66; Start 69; Stop 93
caatcaaaacattcccataagcacc

SEQ ID NO: 407027 - DNA, 25 bp, Artificial
  probe
  misc_feature (1)..(25): SEQ ID NO: 5324; WAN024C66; Start 65; Stop 89
ccatcaatcaaaacattcccataag

SEQ ID NO: 407028 - DNA, 25 bp, Artificial
  probe
  misc_feature (1)..(25): SEQ ID NO: 5324; WAN024C66; Start 101; Stop 125
gcaacattggtgtggtcgatatagg

SEQ ID NO: 407029 - DNA, 25 bp, Artificial
  probe
  misc_feature (1)..(25): SEQ ID NO: 5324; WAN024C66; Start 100; Stop 124
ggcaacattggtgtggtcgatatag

SEQ ID NO: 407030 - DNA, 25 bp, Artificial
  probe
  misc_feature (1)..(25): SEQ ID NO: 5324; WAN024C66; Start 70; Stop 94
aatcaaaacattcccataagcaccc

SEQ ID NO: 407031 - DNA, 25 bp, Artificial
  probe
  misc_feature (1)..(25): SEQ ID NO: 5324; WAN024C66; Start 77; Stop 101
acattcccataagcacccgtatagg

SEQ ID NO: 407032 - DNA, 25 bp, Artificial
  probe
  misc_feature (1)..(25): SEQ ID NO: 5324; WAN024C66; Start 198; Stop 222
aaatttcttgatcatccttacgcag

SEQ ID NO: 407033 - DNA, 25 bp, Artificial
  probe
  misc_feature (1)..(25): SEQ ID NO: 5324; WAN024C66; Start 200; Stop 224
atttcttgatcatccttacgcagta

SEQ ID NO: 407034 - DNA, 25 bp, Artificial
  probe
  misc_feature (1)..(25): SEQ ID NO: 5324; WAN024C66; Start 199; Stop 223
aatttcttgatcatccttacgcagt

SEQ ID NO: 407035 - DNA, 25 bp, Artificial
  probe
  misc_feature (1)..(25): SEQ ID NO: 5324; WAN024C66; Start 160; Stop 184
caacttgaacacttgctcaatcgag

SEQ ID NO: 407036 - DNA, 25 bp, Artificial
  probe
  misc_feature (1)..(25): SEQ ID NO: 5324; WAN024C66; Start 114; Stop 138
ggtcgatataggatccatcttgata

SEQ ID NO: 407037 - DNA, 25 bp, Artificial
  probe
  misc_feature (1)..(25): SEQ ID NO: 5324; WAN024C66; Start 11; Stop 35
tctttatcgattggattcttggtct

SEQ ID NO: 407038 - DNA, 25 bp, Artificial
  probe
  misc_feature (1)..(25): SEQ ID NO: 5325; WAN024F97; Start 169; Stop 193
attagcggagtctgttataaaggaa

SEQ ID NO: 407039 - DNA, 25 bp, Artificial
  probe
  misc_feature (1)..(25): SEQ ID NO: 5325; WAN024F97; Start 151; Stop 175
tatggactcggaaagaatattagcg

SEQ ID NO: 407040 - DNA, 25 bp, Artificial
  probe
  misc_feature (1)..(25): SEQ ID NO: 5325; WAN024F97; Start 170; Stop 194
ttagcggagtctgttataaaggaac

SEQ ID NO: 407041 - DNA, 25 bp, Artificial
  probe
  misc_feature (1)..(25): SEQ ID NO: 5325; WAN024F97; Start 168; Stop 192
tattagcggagtctgttataaagga

SEQ ID NO: 407042 - DNA, 25 bp, Artificial
  probe
  misc_feature (1)..(25): SEQ ID NO: 5325; WAN024F97; Start 164; Stop 188
agaatattagcggagtctgttataa

SEQ ID NO: 407043 - DNA, 25 bp, Artificial
  probe
  misc_feature (1)..(25): SEQ ID NO: 5325; WAN024F97; Start 163; Stop 187
aagaatattagcggagtctgttata

SEQ ID NO: 407044 - DNA, 25 bp, Artificial
  probe
  misc_feature (1)..(25): SEQ ID NO: 5325; WAN024F97; Start 160; Stop 184
ggaaagaatattagcggagtctgtt

SEQ ID NO: 407045 - DNA, 25 bp, Artificial
  probe
  misc_feature (1)..(25): SEQ ID NO: 5325; WAN024F97; Start 171; Stop 195
tagcggagtctgttataaaggaact

SEQ ID NO: 407046 - DNA, 25 bp, Artificial
  probe
  misc_feature (1)..(25): SEQ ID NO: 5325; WAN024F97; Start 150; Stop 174
ttatggactcggaaagaatattagc

SEQ ID NO: 407047 - DNA, 25 bp, Artificial
  probe
  misc_feature (1)..(25): SEQ ID NO: 5325; WAN024F97; Start 167; Stop 191
atattagcggagtctgttataaagg

SEQ ID NO: 407048 - DNA, 25 bp, Artificial
  probe
  misc_feature (1)..(25): SEQ ID NO: 5325; WAN024F97; Start 161; Stop 185
gaaagaatattagcggagtctgtta

SEQ ID NO: 407049 - DNA, 25 bp, Artificial
  probe
  misc_feature (1)..(25): SEQ ID NO: 5325; WAN024F97; Start 199; Stop 223
ttcagtctcattgcagtcaattcag

SEQ ID NO: 407050 - DNA, 25 bp, Artificial
  probe
  misc_feature (1)..(25): SEQ ID NO: 5325; WAN024F97; Start 197; Stop 221
agttcagtctcattgcagtcaattc

SEQ ID NO: 407051 - DNA, 25 bp, Artificial
  probe
  misc_feature (1)..(25): SEQ ID NO: 5325; WAN024F97; Start 204; Stop 228
tctcattgcagtcaattcagacatg

SEQ ID NO: 407052 - DNA, 25 bp, Artificial
  probe
  misc_feature (1)..(25): SEQ ID NO: 5325; WAN024F97; Start 198; Stop 222
gttcagtctcattgcagtcaattca

SEQ ID NO: 407053 - DNA, 25 bp, Artificial
  probe
  misc_feature (1)..(25): SEQ ID NO: 5325; WAN024F97; Start 196; Stop 220
cagttcagtctcattgcagtcaatt

SEQ ID NO: 407054 - DNA, 25 bp, Artificial
  probe
  misc_feature (1)..(25): SEQ ID NO: 5325; WAN024F97; Start 194; Stop 218
ctcagttcagtctcattgcagtcaa

SEQ ID NO: 407055 - DNA, 25 bp, Artificial
  probe
  misc_feature (1)..(25): SEQ ID NO: 5325; WAN024F97; Start 162; Stop 186
aaagaatattagcggagtctgttat

SEQ ID NO: 407056 - DNA, 25 bp, Artificial
  probe
  misc_feature (1)..(25): SEQ ID NO: 5325; WAN024F97; Start 192; Stop 216
aactcagttcagtctcattgcagtc

SEQ ID NO: 407057 - DNA, 25 bp, Artificial
  probe
  misc_feature (1)..(25): SEQ ID NO: 5325; WAN024F97; Start 158; Stop 182
tcggaaagaatattagcggagtctg

SEQ ID NO: 407058 - DNA, 25 bp, Artificial
  probe
  misc_feature (1)..(25): SEQ ID NO: 5325; WAN024F97; Start 157; Stop 181
ctcggaaagaatattagcggagtct

SEQ ID NO: 407059 - DNA, 25 bp, Artificial
  probe
  misc_feature (1)..(25): SEQ ID NO: 5325; WAN024F97; Start 152; Stop 176
atggactcggaaagaatattagcgg

SEQ ID NO: 407060 - DNA, 25 bp, Artificial
  probe
  misc_feature (1)..(25): SEQ ID NO: 5325; WAN024F97; Start 143; Stop 167
tggtattttatggactcggaaagaa

SEQ ID NO: 407061 - DNA, 25 bp, Artificial
  probe
  misc_feature (1)..(25): SEQ ID NO: 5325; WAN024F97; Start 142; Stop 166
ctggtattttatggactcggaaaga

SEQ ID NO: 407062 - DNA, 25 bp, Artificial
  probe
  misc_feature (1)..(25): SEQ ID NO: 5325; WAN024F97; Start 32; Stop 56
cacgaatggatttaagtaataaagc

SEQ ID NO: 407063 - DNA, 25 bp, Artificial
  probe
  misc_feature (1)..(25): SEQ ID NO: 5325; WAN024F97; Start 159; Stop 183
cggaaagaatattagcggagtctgt

SEQ ID NO: 407064 - DNA, 25 bp, Artificial
  probe
  misc_feature (1)..(25): SEQ ID NO: 5325; WAN024F97; Start 134; Stop 158
atttgacgctggtattttatggact

SEQ ID NO: 407065 - DNA, 25 bp, Artificial
  probe
  misc_feature (1)..(25): SEQ ID NO: 5325; WAN024F97; Start 200; Stop 224
tcagtctcattgcagtcaattcaga

SEQ ID NO: 407066 - DNA, 25 bp, Artificial
  probe
  misc_feature (1)..(25): SEQ ID NO: 5325; WAN024F97; Start 133; Stop 157
aatttgacgctggtattttatggac

SEQ ID NO: 407067 - DNA, 25 bp, Artificial
  probe
  misc_feature (1)..(25): SEQ ID NO: 5325; WAN024F97; Start 144; Stop 168
ggtattttatggactcggaaagaat

SEQ ID NO: 407068 - DNA, 25 bp, Artificial
  probe
  misc_feature (1)..(25): SEQ ID NO: 5325; WAN024F97; Start 195; Stop 219
tcagttcagtctcattgcagtcaat

SEQ ID NO: 407069 - DNA, 25 bp, Artificial
  probe
  misc_feature (1)..(25): SEQ ID NO: 5325; WAN024F97; Start 135; Stop 159
tttgacgctggtattttatggactc

SEQ ID NO: 407070 - DNA, 25 bp, Artificial
  probe
  misc_feature (1)..(25): SEQ ID NO: 5325; WAN024F97; Start 141; Stop 165
gctggtattttatggactcggaaag

SEQ ID NO: 407071 - DNA, 25 bp, Artificial
  probe
  misc_feature (1)..(25): SEQ ID NO: 5326; WAN024DYU; Start 104; Stop 128
cggacatagagtttaaggagttcat

SEQ ID NO: 407072 - DNA, 25 bp, Artificial
  probe
  misc_feature (1)..(25): SEQ ID NO: 5326; WAN024DYU; Start 106; Stop 130
gacatagagtttaaggagttcatcg

SEQ ID NO: 407073 - DNA, 25 bp, Artificial
  probe
  misc_feature (1)..(25): SEQ ID NO: 5326; WAN024DYU; Start 105; Stop 129
ggacatagagtttaaggagttcatc

SEQ ID NO: 407074 - DNA, 25 bp, Artificial
  probe
  misc_feature (1)..(25): SEQ ID NO: 5326; WAN024DYU; Start 173; Stop 197
taggcaacaatcaacatcccaaatt

SEQ ID NO: 407075 - DNA, 25 bp, Artificial
  probe
  misc_feature (1)..(25): SEQ ID NO: 5326; WAN024DYU; Start 97; Stop 121
gttgatgcggacatagagtttaagg

SEQ ID NO: 407076 - DNA, 25 bp, Artificial
  probe
  misc_feature (1)..(25): SEQ ID NO: 5326; WAN024DYU; Start 172; Stop 196
gtaggcaacaatcaacatcccaaat

SEQ ID NO: 407077 - DNA, 25 bp, Artificial
  probe
  misc_feature (1)..(25): SEQ ID NO: 5326; WAN024DYU; Start 101; Stop 125
atgcggacatagagtttaaggagtt

SEQ ID NO: 407078 - DNA, 25 bp, Artificial
  probe
  misc_feature (1)..(25): SEQ ID NO: 5326; WAN024DYU; Start 98; Stop 122
ttgatgcggacatagagtttaagga

SEQ ID NO: 407079 - DNA, 25 bp, Artificial
  probe
  misc_feature (1)..(25): SEQ ID NO: 5326; WAN024DYU; Start 100; Stop 124
gatgcggacatagagtttaaggagt

SEQ ID NO: 407080 - DNA, 25 bp, Artificial
  probe
  misc_feature (1)..(25): SEQ ID NO: 5326; WAN024DYU; Start 99; Stop 123
tgatgcggacatagagtttaaggag

SEQ ID NO: 407081 - DNA, 25 bp, Artificial
  probe
  misc_feature (1)..(25): SEQ ID NO: 5326; WAN024DYU; Start 96; Stop 120
cgttgatgcggacatagagtttaag

SEQ ID NO: 407082 - DNA, 25 bp, Artificial
  probe
  misc_feature (1)..(25): SEQ ID NO: 5326; WAN024DYU; Start 103; Stop 127
gcggacatagagtttaaggagttca

SEQ ID NO: 407083 - DNA, 25 bp, Artificial
  probe
  misc_feature (1)..(25): SEQ ID NO: 5326; WAN024DYU; Start 102; Stop 126
tgcggacatagagtttaaggagttc

SEQ ID NO: 407084 - DNA, 25 bp, Artificial
  probe
  misc_feature (1)..(25): SEQ ID NO: 5326; WAN024DYU; Start 107; Stop 131
acatagagtttaaggagttcatcga

SEQ ID NO: 407085 - DNA, 25 bp, Artificial
  probe
  misc_feature (1)..(25): SEQ ID NO: 5326; WAN024DYU; Start 224; Stop 248
accttgaccgtttgataaccgattt

SEQ ID NO: 407086 - DNA, 25 bp, Artificial
  probe
  misc_feature (1)..(25): SEQ ID NO: 5326; WAN024DYU; Start 61; Stop 85
ttcttcatccaagctagggtcattt

SEQ ID NO: 407087 - DNA, 25 bp, Artificial
  probe
  misc_feature (1)..(25): SEQ ID NO: 5326; WAN024DYU; Start 22; Stop 46
ctcatctccattttcaagtttacgg

SEQ ID NO: 407088 - DNA, 25 bp, Artificial
  probe
  misc_feature (1)..(25): SEQ ID NO: 5326; WAN024DYU; Start 21; Stop 45
cctcatctccattttcaagtttacg

SEQ ID NO: 407089 - DNA, 25 bp, Artificial
  probe
  misc_feature (1)..(25): SEQ ID NO: 5326; WAN024DYU; Start 60; Stop 84
cttcttcatccaagctagggtcatt

SEQ ID NO: 407090 - DNA, 25 bp, Artificial
  probe
  misc_feature (1)..(25): SEQ ID NO: 5326; WAN024DYU; Start 20; Stop 44
tcctcatctccattttcaagtttac

SEQ ID NO: 407091 - DNA, 25 bp, Artificial
  probe
  misc_feature (1)..(25): SEQ ID NO: 5326; WAN024DYU; Start 223; Stop 247
gaccttgaccgtttgataaccgatt

SEQ ID NO: 407092 - DNA, 25 bp, Artificial
  probe
  misc_feature (1)..(25): SEQ ID NO: 5326; WAN024DYU; Start 18; Stop 42
cttcctcatctccattttcaagttt

SEQ ID NO: 407093 - DNA, 25 bp, Artificial
  probe
  misc_feature (1)..(25): SEQ ID NO: 5326; WAN024DYU; Start 29; Stop 53
ccattttcaagtttacggaaccatt

SEQ ID NO: 407094 - DNA, 25 bp, Artificial
  probe
  misc_feature (1)..(25): SEQ ID NO: 5326; WAN024DYU; Start 31; Stop 55
attttcaagtttacggaaccattcg

SEQ ID NO: 407095 - DNA, 25 bp, Artificial
  probe
  misc_feature (1)..(25): SEQ ID NO: 5326; WAN024DYU; Start 30; Stop 54
cattttcaagtttacggaaccattc

SEQ ID NO: 407096 - DNA, 25 bp, Artificial
  probe
  misc_feature (1)..(25): SEQ ID NO: 5326; WAN024DYU; Start 171; Stop 195
tgtaggcaacaatcaacatcccaaa

SEQ ID NO: 407097 - DNA, 25 bp, Artificial
  probe
  misc_feature (1)..(25): SEQ ID NO: 5326; WAN024DYU; Start 217; Stop 241
atggttgaccttgaccgtttgataa

SEQ ID NO: 407098 - DNA, 25 bp, Artificial
  probe
  misc_feature (1)..(25): SEQ ID NO: 5326; WAN024DYU; Start 216; Stop 240
aatggttgaccttgaccgtttgata

SEQ ID NO: 407099 - DNA, 25 bp, Artificial
  probe
  misc_feature (1)..(25): SEQ ID NO: 5326; WAN024DYU; Start 19; Stop 43
ttcctcatctccattttcaagttta

SEQ ID NO: 407100 - DNA, 25 bp, Artificial
  probe
  misc_feature (1)..(25): SEQ ID NO: 5326; WAN024DYU; Start 17; Stop 41
gcttcctcatctccattttcaagtt

SEQ ID NO: 407101 - DNA, 25 bp, Artificial
  probe
  misc_feature (1)..(25): SEQ ID NO: 5326; WAN024DYU; Start 95; Stop 119
gcgttgatgcggacatagagtttaa

SEQ ID NO: 407102 - DNA, 25 bp, Artificial
  probe
  misc_feature (1)..(25): SEQ ID NO: 5326; WAN024DYU; Start 181; Stop 205
aatcaacatcccaaattgtttaccc

SEQ ID NO: 407103 - DNA, 25 bp, Artificial
  probe
  misc_feature (1)..(25): SEQ ID NO: 5326; WAN024DYU; Start 180; Stop 204
caatcaacatcccaaattgtttacc

SEQ ID NO: 407104 - DNA, 25 bp, Artificial
  probe
  misc_feature (1)..(25): SEQ ID NO: 5327; WAN024CWD; Start 60; Stop 84
gattccattaaccttgattctacct

SEQ ID NO: 407105 - DNA, 25 bp, Artificial
  probe
  misc_feature (1)..(25): SEQ ID NO: 5327; WAN024CWD; Start 59; Stop 83
agattccattaaccttgattctacc

SEQ ID NO: 407106 - DNA, 25 bp, Artificial
  probe
  misc_feature (1)..(25): SEQ ID NO: 5327; WAN024CWD; Start 61; Stop 85
attccattaaccttgattctacctt

SEQ ID NO: 407107 - DNA, 25 bp, Artificial
  probe
  misc_feature (1)..(25): SEQ ID NO: 5327; WAN024CWD; Start 80; Stop 104
tacctttatctgctacttcctttgc

SEQ ID NO: 407108 - DNA, 25 bp, Artificial
  probe
  misc_feature (1)..(25): SEQ ID NO: 5327; WAN024CWD; Start 69; Stop 93
aaccttgattctacctttatctgct

SEQ ID NO: 407109 - DNA, 25 bp, Artificial
  probe
  misc_feature (1)..(25): SEQ ID NO: 5327; WAN024CWD; Start 9; Stop 33
gcgaatttcaacttggtcattaact

SEQ ID NO: 407110 - DNA, 25 bp, Artificial
  probe
  misc_feature (1)..(25): SEQ ID NO: 5327; WAN024CWD; Start 8; Stop 32
agcgaatttcaacttggtcattaac

SEQ ID NO: 407111 - DNA, 25 bp, Artificial
  probe
  misc_feature (1)..(25): SEQ ID NO: 5327; WAN024CWD; Start 79; Stop 103
ctacctttatctgctacttcctttg

SEQ ID NO: 407112 - DNA, 25 bp, Artificial
  probe
  misc_feature (1)..(25): SEQ ID NO: 5327; WAN024CWD; Start 78; Stop 102
tctacctttatctgctacttccttt

SEQ ID NO: 407113 - DNA, 25 bp, Artificial
  probe
  misc_feature (1)..(25): SEQ ID NO: 5327; WAN024CWD; Start 77; Stop 101
ttctacctttatctgctacttcctt

SEQ ID NO: 407114 - DNA, 25 bp, Artificial
  probe
  misc_feature (1)..(25): SEQ ID NO: 5327; WAN024CWD; Start 70; Stop 94
accttgattctacctttatctgcta

SEQ ID NO: 407115 - DNA, 25 bp, Artificial
  probe
  misc_feature (1)..(25): SEQ ID NO: 5327; WAN024CWD; Start 7; Stop 31
aagcgaatttcaacttggtcattaa

SEQ ID NO: 407116 - DNA, 25 bp, Artificial
  probe
  misc_feature (1)..(25): SEQ ID NO: 5327; WAN024CWD; Start 6; Stop 30
aaagcgaatttcaacttggtcatta

SEQ ID NO: 407117 - DNA, 25 bp, Artificial
  probe
  misc_feature (1)..(25): SEQ ID NO: 5327; WAN024CWD; Start 76; Stop 100
attctacctttatctgctacttcct

SEQ ID NO: 407118 - DNA, 25 bp, Artificial
  probe
  misc_feature (1)..(25): SEQ ID NO: 5327; WAN024CWD; Start 71; Stop 95
ccttgattctacctttatctgctac

SEQ ID NO: 407119 - DNA, 25 bp, Artificial
  probe
  misc_feature (1)..(25): SEQ ID NO: 5327; WAN024CWD; Start 75; Stop 99
gattctacctttatctgctacttcc

SEQ ID NO: 407120 - DNA, 25 bp, Artificial
  probe
  misc_feature (1)..(25): SEQ ID NO: 5327; WAN024CWD; Start 10; Stop 34
cgaatttcaacttggtcattaactt

SEQ ID NO: 407121 - DNA, 25 bp, Artificial
  probe
  misc_feature (1)..(25): SEQ ID NO: 5327; WAN024CWD; Start 68; Stop 92
taaccttgattctacctttatctgc

SEQ ID NO: 407122 - DNA, 25 bp, Artificial
  probe
  misc_feature (1)..(25): SEQ ID NO: 5327; WAN024CWD; Start 58; Stop 82
aagattccattaaccttgattctac

SEQ ID NO: 407123 - DNA, 25 bp, Artificial
  probe
  misc_feature (1)..(25): SEQ ID NO: 5327; WAN024CWD; Start 5; Stop 29
caaagcgaatttcaacttggtcatt

SEQ ID NO: 407124 - DNA, 25 bp, Artificial
  probe
  misc_feature (1)..(25): SEQ ID NO: 5327; WAN024CWD; Start 62; Stop 86
ttccattaaccttgattctaccttt

SEQ ID NO: 407125 - DNA, 25 bp, Artificial
  probe
  misc_feature (1)..(25): SEQ ID NO: 5327; WAN024CWD; Start 83; Stop 107
ctttatctgctacttcctttgcgac

SEQ ID NO: 407126 - DNA, 25 bp, Artificial
  probe
  misc_feature (1)..(25): SEQ ID NO: 5327; WAN024CWD; Start 74; Stop 98
tgattctacctttatctgctacttc

SEQ ID NO: 407127 - DNA, 25 bp, Artificial
  probe
  misc_feature (1)..(25): SEQ ID NO: 5327; WAN024CWD; Start 72; Stop 96
cttgattctacctttatctgctact

SEQ ID NO: 407128 - DNA, 25 bp, Artificial
  probe
  misc_feature (1)..(25): SEQ ID NO: 5327; WAN024CWD; Start 84; Stop 108
tttatctgctacttcctttgcgact

SEQ ID NO: 407129 - DNA, 25 bp, Artificial
  probe
  misc_feature (1)..(25): SEQ ID NO: 5327; WAN024CWD; Start 21; Stop 45
ttggtcattaactttcaagtccgtt

SEQ ID NO: 407130 - DNA, 25 bp, Artificial
  probe
  misc_feature (1)..(25): SEQ ID NO: 5327; WAN024CWD; Start 148; Stop 172
tctaatctcatccttattacctcaa

SEQ ID NO: 407131 - DNA, 25 bp, Artificial
  probe
  misc_feature (1)..(25): SEQ ID NO: 5327; WAN024CWD; Start 13; Stop 37
atttcaacttggtcattaactttca

SEQ ID NO: 407132 - DNA, 25 bp, Artificial
  probe
  misc_feature (1)..(25): SEQ ID NO: 5327; WAN024CWD; Start 14; Stop 38
tttcaacttggtcattaactttcaa

SEQ ID NO: 407133 - DNA, 25 bp, Artificial
  probe
  misc_feature (1)..(25): SEQ ID NO: 5327; WAN024CWD; Start 73; Stop 97
ttgattctacctttatctgctactt

SEQ ID NO: 407134 - DNA, 25 bp, Artificial
  probe
  misc_feature (1)..(25): SEQ ID NO: 5327; WAN024CWD; Start 22; Stop 46
tggtcattaactttcaagtccgttg

SEQ ID NO: 407135 - DNA, 25 bp, Artificial
  probe
  misc_feature (1)..(25): SEQ ID NO: 5327; WAN024CWD; Start 63; Stop 87
tccattaaccttgattctaccttta

SEQ ID NO: 407136 - DNA, 25 bp, Artificial
  probe
  misc_feature (1)..(25): SEQ ID NO: 5327; WAN024CWD; Start 147; Stop 171
atctaatctcatccttattacctca

SEQ ID NO: 407137 - DNA, 25 bp, Artificial
  probe
  misc_feature (1)..(25): SEQ ID NO: 5328; WAN024FMT; Start 1085; Stop 1109
ttactgatactgaggatgtgctaac

SEQ ID NO: 407138 - DNA, 25 bp, Artificial
  probe
  misc_feature (1)..(25): SEQ ID NO: 5328; WAN024FMT; Start 1088; Stop 1112
ctgatactgaggatgtgctaactaa

SEQ ID NO: 407139 - DNA, 25 bp, Artificial
  probe
  misc_feature (1)..(25): SEQ ID NO: 5328; WAN024FMT; Start 1087; Stop 1111
actgatactgaggatgtgctaacta

SEQ ID NO: 407140 - DNA, 25 bp, Artificial
  probe
  misc_feature (1)..(25): SEQ ID NO: 5328; WAN024FMT; Start 1086; Stop 1110
tactgatactgaggatgtgctaact

SEQ ID NO: 407141 - DNA, 25 bp, Artificial
  probe
  misc_feature (1)..(25): SEQ ID NO: 5328; WAN024FMT; Start 1083; Stop 1107
gattactgatactgaggatgtgcta

SEQ ID NO: 407142 - DNA, 25 bp, Artificial
  probe
  misc_feature (1)..(25): SEQ ID NO: 5328; WAN024FMT; Start 277; Stop 301
gaagtgattgcctattatcctctcc

SEQ ID NO: 407143 - DNA, 25 bp, Artificial
  probe
  misc_feature (1)..(25): SEQ ID NO: 5328; WAN024FMT; Start 1082; Stop 1106
agattactgatactgaggatgtgct

SEQ ID NO: 407144 - DNA, 25 bp, Artificial
  probe
  misc_feature (1)..(25): SEQ ID NO: 5328; WAN024FMT; Start 391; Stop 415
tatacagagcaagaagagtcaggtt

SEQ ID NO: 407145 - DNA, 25 bp, Artificial
  probe
  misc_feature (1)..(25): SEQ ID NO: 5328; WAN024FMT; Start 1084; Stop 1108
attactgatactgaggatgtgctaa

SEQ ID NO: 407146 - DNA, 25 bp, Artificial
  probe
  misc_feature (1)..(25): SEQ ID NO: 5328; WAN024FMT; Start 276; Stop 300
cgaagtgattgcctattatcctctc

SEQ ID NO: 407147 - DNA, 25 bp, Artificial
  probe
  misc_feature (1)..(25): SEQ ID NO: 5328; WAN024FMT; Start 278; Stop 302
aagtgattgcctattatcctctcca

SEQ ID NO: 407148 - DNA, 25 bp, Artificial
  probe
  misc_feature (1)..(25): SEQ ID NO: 5328; WAN024FMT; Start 742; Stop 766
ttagaagagatagccttgccagtat

SEQ ID NO: 407149 - DNA, 25 bp, Artificial
  probe
  misc_feature (1)..(25): SEQ ID NO: 5328; WAN024FMT; Start 390; Stop 414
ctatacagagcaagaagagtcaggt

SEQ ID NO: 407150 - DNA, 25 bp, Artificial
  probe
  misc_feature (1)..(25): SEQ ID NO: 5328; WAN024FMT; Start 976; Stop 1000
aatgaggacttggtgaagaggataa

SEQ ID NO: 407151 - DNA, 25 bp, Artificial
  probe
  misc_feature (1)..(25): SEQ ID NO: 5328; WAN024FMT; Start 280; Stop 304
gtgattgcctattatcctctccaag

SEQ ID NO: 407152 - DNA, 25 bp, Artificial
  probe
  misc_feature (1)..(25): SEQ ID NO: 5328; WAN024FMT; Start 279; Stop 303
agtgattgcctattatcctctccaa

SEQ ID NO: 407153 - DNA, 25 bp, Artificial
  probe
  misc_feature (1)..(25): SEQ ID NO: 5328; WAN024FMT; Start 388; Stop 412
tactatacagagcaagaagagtcag

SEQ ID NO: 407154 - DNA, 25 bp, Artificial
  probe
  misc_feature (1)..(25): SEQ ID NO: 5328; WAN024FMT; Start 387; Stop 411
ctactatacagagcaagaagagtca

SEQ ID NO: 407155 - DNA, 25 bp, Artificial
  probe
  misc_feature (1)..(25): SEQ ID NO: 5328; WAN024FMT; Start 1303; Stop 1327
gatattcacagtccgacagtcaatg

SEQ ID NO: 407156 - DNA, 25 bp, Artificial
  probe
  misc_feature (1)..(25): SEQ ID NO: 5328; WAN024FMT; Start 975; Stop 999
gaatgaggacttggtgaagaggata

SEQ ID NO: 407157 - DNA, 25 bp, Artificial
  probe
  misc_feature (1)..(25): SEQ ID NO: 5328; WAN024FMT; Start 781; Stop 805
gttatccaatcttcgtacttactcg

SEQ ID NO: 407158 - DNA, 25 bp, Artificial
  probe
  misc_feature (1)..(25): SEQ ID NO: 5328; WAN024FMT; Start 555; Stop 579
ttcagatgctagtaaggctaaggaa

SEQ ID NO: 407159 - DNA, 25 bp, Artificial
  probe
  misc_feature (1)..(25): SEQ ID NO: 5328; WAN024FMT; Start 386; Stop 410
tctactatacagagcaagaagagtc

SEQ ID NO: 407160 - DNA, 25 bp, Artificial
  probe
  misc_feature (1)..(25): SEQ ID NO: 5328; WAN024FMT; Start 389; Stop 413
actatacagagcaagaagagtcagg

SEQ ID NO: 407161 - DNA, 25 bp, Artificial
  probe
  misc_feature (1)..(25): SEQ ID NO: 5328; WAN024FMT; Start 275; Stop 299
ccgaagtgattgcctattatcctct

SEQ ID NO: 407162 - DNA, 25 bp, Artificial
  probe
  misc_feature (1)..(25): SEQ ID NO: 5328; WAN024FMT; Start 558; Stop 582
agatgctagtaaggctaaggaacag

SEQ ID NO: 407163 - DNA, 25 bp, Artificial
  probe
  misc_feature (1)..(25): SEQ ID NO: 5328; WAN024FMT; Start 556; Stop 580
tcagatgctagtaaggctaaggaac

SEQ ID NO: 407164 - DNA, 25 bp, Artificial
  probe
  misc_feature (1)..(25): SEQ ID NO: 5328; WAN024FMT; Start 1078; Stop 1102
aagcagattactgatactgaggatg

SEQ ID NO: 407165 - DNA, 25 bp, Artificial
  probe
  misc_feature (1)..(25): SEQ ID NO: 5328; WAN024FMT; Start 557; Stop 581
cagatgctagtaaggctaaggaaca

SEQ ID NO: 407166 - DNA, 25 bp, Artificial
  probe
  misc_feature (1)..(25): SEQ ID NO: 5328; WAN024FMT; Start 1081; Stop 1105
cagattactgatactgaggatgtgc

SEQ ID NO: 407167 - DNA, 25 bp, Artificial
  probe
  misc_feature (1)..(25): SEQ ID NO: 5328; WAN024FMT; Start 1080; Stop 1104
gcagattactgatactgaggatgtg

SEQ ID NO: 407168 - DNA, 25 bp, Artificial
  probe
  misc_feature (1)..(25): SEQ ID NO: 5328; WAN024FMT; Start 1079; Stop 1103
agcagattactgatactgaggatgt

SEQ ID NO: 407169 - DNA, 25 bp, Artificial
  probe
  misc_feature (1)..(25): SEQ ID NO: 5328; WAN024FMT; Start 743; Stop 767
tagaagagatagccttgccagtatc

SEQ ID NO: 407170 - DNA, 25 bp, Artificial
  probe
  misc_feature (1)..(25): SEQ ID NO: 5329; WAN024FS5; Start 517; Stop 541
acgaaccacctcaatatcatattct

SEQ ID NO: 407171 - DNA, 25 bp, Artificial
  probe
  misc_feature (1)..(25): SEQ ID NO: 5329; WAN024FS5; Start 516; Stop 540
aacgaaccacctcaatatcatattc

SEQ ID NO: 407172 - DNA, 25 bp, Artificial
  probe
  misc_feature (1)..(25): SEQ ID NO: 5329; WAN024FS5; Start 112; Stop 136
ttccttgacatacttgaggttgatt

SEQ ID NO: 407173 - DNA, 25 bp, Artificial
  probe
  misc_feature (1)..(25): SEQ ID NO: 5329; WAN024FS5; Start 111; Stop 135
cttccttgacatacttgaggttgat

SEQ ID NO: 407174 - DNA, 25 bp, Artificial
  probe
  misc_feature (1)..(25): SEQ ID NO: 5329; WAN024FS5; Start 108; Stop 132
gaacttccttgacatacttgaggtt

SEQ ID NO: 407175 - DNA, 25 bp, Artificial
  probe
  misc_feature (1)..(25): SEQ ID NO: 5329; WAN024FS5; Start 109; Stop 133
aacttccttgacatacttgaggttg

SEQ ID NO: 407176 - DNA, 25 bp, Artificial
  probe
  misc_feature (1)..(25): SEQ ID NO: 5329; WAN024FS5; Start 110; Stop 134
acttccttgacatacttgaggttga

SEQ ID NO: 407177 - DNA, 25 bp, Artificial
  probe
  misc_feature (1)..(25): SEQ ID NO: 5329; WAN024FS5; Start 429; Stop 453
tataaatagtaaagcgacggtagca

SEQ ID NO: 407178 - DNA, 25 bp, Artificial
  probe
  misc_feature (1)..(25): SEQ ID NO: 5329; WAN024FS5; Start 430; Stop 454
ataaatagtaaagcgacggtagcaa

SEQ ID NO: 407179 - DNA, 25 bp, Artificial
  probe
  misc_feature (1)..(25): SEQ ID NO: 5329; WAN024FS5; Start 431; Stop 455
taaatagtaaagcgacggtagcaaa

SEQ ID NO: 407180 - DNA, 25 bp, Artificial
  probe
  misc_feature (1)..(25): SEQ ID NO: 5329; WAN024FS5; Start 514; Stop 538
caaacgaaccacctcaatatcatat

SEQ ID NO: 407181 - DNA, 25 bp, Artificial
  probe
  misc_feature (1)..(25): SEQ ID NO: 5329; WAN024FS5; Start 200; Stop 224
ttactgttattgacatgaccattca

SEQ ID NO: 407182 - DNA, 25 bp, Artificial
  probe
  misc_feature (1)..(25): SEQ ID NO: 5329; WAN024FS5; Start 136; Stop 160
tttcttgggaatatagtgggtcaaa

SEQ ID NO: 407183 - DNA, 25 bp, Artificial
  probe
  misc_feature (1)..(25): SEQ ID NO: 5329; WAN024FS5; Start 513; Stop 537
gcaaacgaaccacctcaatatcata

SEQ ID NO: 407184 - DNA, 25 bp, Artificial
  probe
  misc_feature (1)..(25): SEQ ID NO: 5329; WAN024FS5; Start 240; Stop 264
aacgaacatggtaatccttgctgat

SEQ ID NO: 407185 - DNA, 25 bp, Artificial
  probe
  misc_feature (1)..(25): SEQ ID NO: 5329; WAN024FS5; Start 39; Stop 63
cacttgtaatttcatgcttgctttc

SEQ ID NO: 407186 - DNA, 25 bp, Artificial
  probe
  misc_feature (1)..(25): SEQ ID NO: 5329; WAN024FS5; Start 38; Stop 62
tcacttgtaatttcatgcttgcttt

SEQ ID NO: 407187 - DNA, 25 bp, Artificial
  probe
  misc_feature (1)..(25): SEQ ID NO: 5329; WAN024FS5; Start 37; Stop 61
atcacttgtaatttcatgcttgctt

SEQ ID NO: 407188 - DNA, 25 bp, Artificial
  probe
  misc_feature (1)..(25): SEQ ID NO: 5329; WAN024FS5; Start 214; Stop 238
atgaccattcatatccaagtcgtaa

SEQ ID NO: 407189 - DNA, 25 bp, Artificial
  probe
  misc_feature (1)..(25): SEQ ID NO: 5329; WAN024FS5; Start 107; Stop 131
cgaacttccttgacatacttgaggt

SEQ ID NO: 407190 - DNA, 25 bp, Artificial
  probe
  misc_feature (1)..(25): SEQ ID NO: 5329; WAN024FS5; Start 105; Stop 129
gtcgaacttccttgacatacttgag

SEQ ID NO: 407191 - DNA, 25 bp, Artificial
  probe
  misc_feature (1)..(25): SEQ ID NO: 5329; WAN024FS5; Start 42; Stop 66
ttgtaatttcatgcttgctttccag

SEQ ID NO: 407192 - DNA, 25 bp, Artificial
  probe
  misc_feature (1)..(25): SEQ ID NO: 5329; WAN024FS5; Start 41; Stop 65
cttgtaatttcatgcttgctttcca

SEQ ID NO: 407193 - DNA, 25 bp, Artificial
  probe
  misc_feature (1)..(25): SEQ ID NO: 5329; WAN024FS5; Start 40; Stop 64
acttgtaatttcatgcttgctttcc

SEQ ID NO: 407194 - DNA, 25 bp, Artificial
  probe
  misc_feature (1)..(25): SEQ ID NO: 5329; WAN024FS5; Start 215; Stop 239
tgaccattcatatccaagtcgtaaa

SEQ ID NO: 407195 - DNA, 25 bp, Artificial
  probe
  misc_feature (1)..(25): SEQ ID NO: 5329; WAN024FS5; Start 36; Stop 60
catcacttgtaatttcatgcttgct

SEQ ID NO: 407196 - DNA, 25 bp, Artificial
  probe
  misc_feature (1)..(25): SEQ ID NO: 5329; WAN024FS5; Start 515; Stop 539
aaacgaaccacctcaatatcatatt

SEQ ID NO: 407197 - DNA, 25 bp, Artificial
  probe
  misc_feature (1)..(25): SEQ ID NO: 5329; WAN024FS5; Start 209; Stop 233
ttgacatgaccattcatatccaagt

SEQ ID NO: 407198 - DNA, 25 bp, Artificial
  probe
  misc_feature (1)..(25): SEQ ID NO: 5329; WAN024FS5; Start 213; Stop 237
catgaccattcatatccaagtcgta

SEQ ID NO: 407199 - DNA, 25 bp, Artificial
  probe
  misc_feature (1)..(25): SEQ ID NO: 5329; WAN024FS5; Start 44; Stop 68
gtaatttcatgcttgctttccagtc

SEQ ID NO: 407200 - DNA, 25 bp, Artificial
  probe
  misc_feature (1)..(25): SEQ ID NO: 5329; WAN024FS5; Start 210; Stop 234
tgacatgaccattcatatccaagtc

SEQ ID NO: 407201 - DNA, 25 bp, Artificial
  probe
  misc_feature (1)..(25): SEQ ID NO: 5329; WAN024FS5; Start 34; Stop 58
cccatcacttgtaatttcatgcttg

SEQ ID NO: 407202 - DNA, 25 bp, Artificial
  probe
  misc_feature (1)..(25): SEQ ID NO: 5329; WAN024FS5; Start 113; Stop 137
tccttgacatacttgaggttgattt

SEQ ID NO: 407203 - DNA, 25 bp, Artificial
  probe
  misc_feature (1)..(25): SEQ ID NO: 5330; WAN024GJK; Start 651; Stop 675
tcacctatatcctccaacaagtcat

SEQ ID NO: 407204 - DNA, 25 bp, Artificial
  probe
  misc_feature (1)..(25): SEQ ID NO: 5330; WAN024GJK; Start 650; Stop 674
atcacctatatcctccaacaagtca

SEQ ID NO: 407205 - DNA, 25 bp, Artificial
  probe
  misc_feature (1)..(25): SEQ ID NO: 5330; WAN024GJK; Start 1554; Stop 1578
tagttggagttagtggttctggtaa

SEQ ID NO: 407206 - DNA, 25 bp, Artificial
  probe
  misc_feature (1)..(25): SEQ ID NO: 5330; WAN024GJK; Start 506; Stop 530
tctctcattgcttacattgttctct

SEQ ID NO: 407207 - DNA, 25 bp, Artificial
  probe
  misc_feature (1)..(25): SEQ ID NO: 5330; WAN024GJK; Start 508; Stop 532
tctcattgcttacattgttctctca

SEQ ID NO: 407208 - DNA, 25 bp, Artificial
  probe
  misc_feature (1)..(25): SEQ ID NO: 5330; WAN024GJK; Start 507; Stop 531
ctctcattgcttacattgttctctc

SEQ ID NO: 407209 - DNA, 25 bp, Artificial
  probe
  misc_feature (1)..(25): SEQ ID NO: 5330; WAN024GJK; Start 649; Stop 673
tatcacctatatcctccaacaagtc

SEQ ID NO: 407210 - DNA, 25 bp, Artificial
  probe
  misc_feature (1)..(25): SEQ ID NO: 5330; WAN024GJK; Start 505; Stop 529
atctctcattgcttacattgttctc

SEQ ID NO: 407211 - DNA, 25 bp, Artificial
  probe
  misc_feature (1)..(25): SEQ ID NO: 5330; WAN024GJK; Start 648; Stop 672
ttatcacctatatcctccaacaagt

SEQ ID NO: 407212 - DNA, 25 bp, Artificial
  probe
  misc_feature (1)..(25): SEQ ID NO: 5330; WAN024GJK; Start 510; Stop 534
tcattgcttacattgttctctcaag

SEQ ID NO: 407213 - DNA, 25 bp, Artificial
  probe
  misc_feature (1)..(25): SEQ ID NO: 5330; WAN024GJK; Start 509; Stop 533
ctcattgcttacattgttctctcaa

SEQ ID NO: 407214 - DNA, 25 bp, Artificial
  probe
  misc_feature (1)..(25): SEQ ID NO: 5330; WAN024GJK; Start 504; Stop 528
aatctctcattgcttacattgttct

SEQ ID NO: 407215 - DNA, 25 bp, Artificial
  probe
  misc_feature (1)..(25): SEQ ID NO: 5330; WAN024GJK; Start 1553; Stop 1577
ctagttggagttagtggttctggta

SEQ ID NO: 407216 - DNA, 25 bp, Artificial
  probe
  misc_feature (1)..(25): SEQ ID NO: 5330; WAN024GJK; Start 647; Stop 671
gttatcacctatatcctccaacaag

SEQ ID NO: 407217 - DNA, 25 bp, Artificial
  probe
  misc_feature (1)..(25): SEQ ID NO: 5330; WAN024GJK; Start 652; Stop 676
cacctatatcctccaacaagtcatg

SEQ ID NO: 407218 - DNA, 25 bp, Artificial
  probe
  misc_feature (1)..(25): SEQ ID NO: 5330; WAN024GJK; Start 628; Stop 652
aatcatctcagttggtctggttatc

SEQ ID NO: 407219 - DNA, 25 bp, Artificial
  probe
  misc_feature (1)..(25): SEQ ID NO: 5330; WAN024GJK; Start 627; Stop 651
gaatcatctcagttggtctggttat

SEQ ID NO: 407220 - DNA, 25 bp, Artificial
  probe
  misc_feature (1)..(25): SEQ ID NO: 5330; WAN024GJK; Start 1548; Stop 1572
ttagcctagttggagttagtggttc

SEQ ID NO: 407221 - DNA, 25 bp, Artificial
  probe
  misc_feature (1)..(25): SEQ ID NO: 5330; WAN024GJK; Start 1547; Stop 1571
gttagcctagttggagttagtggtt

SEQ ID NO: 407222 - DNA, 25 bp, Artificial
  probe
  misc_feature (1)..(25): SEQ ID NO: 5330; WAN024GJK; Start 629; Stop 653
atcatctcagttggtctggttatca

SEQ ID NO: 407223 - DNA, 25 bp, Artificial
  probe
  misc_feature (1)..(25): SEQ ID NO: 5330; WAN024GJK; Start 1543; Stop 1567
taaggttagcctagttggagttagt

SEQ ID NO: 407224 - DNA, 25 bp, Artificial
  probe
  misc_feature (1)..(25): SEQ ID NO: 5330; WAN024GJK; Start 1535; Stop 1559
caaggagataaggttagcctagttg

SEQ ID NO: 407225 - DNA, 25 bp, Artificial
  probe
  misc_feature (1)..(25): SEQ ID NO: 5330; WAN024GJK; Start 1540; Stop 1564
agataaggttagcctagttggagtt

SEQ ID NO: 407226 - DNA, 25 bp, Artificial
  probe
  misc_feature (1)..(25): SEQ ID NO: 5330; WAN024GJK; Start 1534; Stop 1558
acaaggagataaggttagcctagtt

SEQ ID NO: 407227 - DNA, 25 bp, Artificial
  probe
  misc_feature (1)..(25): SEQ ID NO: 5330; WAN024GJK; Start 1533; Stop 1557
aacaaggagataaggttagcctagt

SEQ ID NO: 407228 - DNA, 25 bp, Artificial
  probe
  misc_feature (1)..(25): SEQ ID NO: 5330; WAN024GJK; Start 1542; Stop 1566
ataaggttagcctagttggagttag

SEQ ID NO: 407229 - DNA, 25 bp, Artificial
  probe
  misc_feature (1)..(25): SEQ ID NO: 5330; WAN024GJK; Start 1541; Stop 1565
gataaggttagcctagttggagtta

SEQ ID NO: 407230 - DNA, 25 bp, Artificial
  probe
  misc_feature (1)..(25): SEQ ID NO: 5330; WAN024GJK; Start 1024; Stop 1048
aagtaattctatggttagctctgcc

SEQ ID NO: 407231 - DNA, 25 bp, Artificial
  probe
  misc_feature (1)..(25): SEQ ID NO: 5330; WAN024GJK; Start 1539; Stop 1563
gagataaggttagcctagttggagt

SEQ ID NO: 407232 - DNA, 25 bp, Artificial
  probe
  misc_feature (1)..(25): SEQ ID NO: 5330; WAN024GJK; Start 644; Stop 668
ctggttatcacctatatcctccaac

SEQ ID NO: 407233 - DNA, 25 bp, Artificial
  probe
  misc_feature (1)..(25): SEQ ID NO: 5330; WAN024GJK; Start 643; Stop 667
tctggttatcacctatatcctccaa

SEQ ID NO: 407234 - DNA, 25 bp, Artificial
  probe
  misc_feature (1)..(25): SEQ ID NO: 5330; WAN024GJK; Start 639; Stop 663
ttggtctggttatcacctatatcct

SEQ ID NO: 407235 - DNA, 25 bp, Artificial
  probe
  misc_feature (1)..(25): SEQ ID NO: 5330; WAN024GJK; Start 638; Stop 662
gttggtctggttatcacctatatcc

SEQ ID NO: 407236 - DNA, 25 bp, Artificial
  probe
  misc_feature (1)..(25): SEQ ID NO: 5331; WAN024FIK; Start 194; Stop 218
tcagactcaagatatacattgccaa

SEQ ID NO: 407237 - DNA, 25 bp, Artificial
  probe
  misc_feature (1)..(25): SEQ ID NO: 5331; WAN024FIK; Start 193; Stop 217
gtcagactcaagatatacattgcca

SEQ ID NO: 407238 - DNA, 25 bp, Artificial
  probe
  misc_feature (1)..(25): SEQ ID NO: 5331; WAN024FIK; Start 186; Stop 210
ttggactgtcagactcaagatatac

SEQ ID NO: 407239 - DNA, 25 bp, Artificial
  probe
  misc_feature (1)..(25): SEQ ID NO: 5331; WAN024FIK; Start 192; Stop 216
tgtcagactcaagatatacattgcc

SEQ ID NO: 407240 - DNA, 25 bp, Artificial
  probe
  misc_feature (1)..(25): SEQ ID NO: 5331; WAN024FIK; Start 187; Stop 211
tggactgtcagactcaagatataca

SEQ ID NO: 407241 - DNA, 25 bp, Artificial
  probe
  misc_feature (1)..(25): SEQ ID NO: 5331; WAN024FIK; Start 188; Stop 212
ggactgtcagactcaagatatacat

SEQ ID NO: 407242 - DNA, 25 bp, Artificial
  probe
  misc_feature (1)..(25): SEQ ID NO: 5331; WAN024FIK; Start 195; Stop 219
cagactcaagatatacattgccaat

SEQ ID NO: 407243 - DNA, 25 bp, Artificial
  probe
  misc_feature (1)..(25): SEQ ID NO: 5331; WAN024FIK; Start 191; Stop 215
ctgtcagactcaagatatacattgc

SEQ ID NO: 407244 - DNA, 25 bp, Artificial
  probe
  misc_feature (1)..(25): SEQ ID NO: 5331; WAN024FIK; Start 198; Stop 222
actcaagatatacattgccaattct

SEQ ID NO: 407245 - DNA, 25 bp, Artificial
  probe
  misc_feature (1)..(25): SEQ ID NO: 5331; WAN024FIK; Start 196; Stop 220
agactcaagatatacattgccaatt

SEQ ID NO: 407246 - DNA, 25 bp, Artificial
  probe
  misc_feature (1)..(25): SEQ ID NO: 5331; WAN024FIK; Start 197; Stop 221
gactcaagatatacattgccaattc

SEQ ID NO: 407247 - DNA, 25 bp, Artificial
  probe
  misc_feature (1)..(25): SEQ ID NO: 5331; WAN024FIK; Start 190; Stop 214
actgtcagactcaagatatacattg

SEQ ID NO: 407248 - DNA, 25 bp, Artificial
  probe
  misc_feature (1)..(25): SEQ ID NO: 5331; WAN024FIK; Start 208; Stop 232
tacattgccaattcttctggagtaa

SEQ ID NO: 407249 - DNA, 25 bp, Artificial
  probe
  misc_feature (1)..(25): SEQ ID NO: 5331; WAN024FIK; Start 207; Stop 231
atacattgccaattcttctggagta

SEQ ID NO: 407250 - DNA, 25 bp, Artificial
  probe
  misc_feature (1)..(25): SEQ ID NO: 5331; WAN024FIK; Start 206; Stop 230
tatacattgccaattcttctggagt

SEQ ID NO: 407251 - DNA, 25 bp, Artificial
  probe
  misc_feature (1)..(25): SEQ ID NO: 5331; WAN024FIK; Start 189; Stop 213
gactgtcagactcaagatatacatt

SEQ ID NO: 407252 - DNA, 25 bp, Artificial
  probe
  misc_feature (1)..(25): SEQ ID NO: 5331; WAN024FIK; Start 205; Stop 229
atatacattgccaattcttctggag

SEQ ID NO: 407253 - DNA, 25 bp, Artificial
  probe
  misc_feature (1)..(25): SEQ ID NO: 5331; WAN024FIK; Start 204; Stop 228
gatatacattgccaattcttctgga

SEQ ID NO: 407254 - DNA, 25 bp, Artificial
  probe
  misc_feature (1)..(25): SEQ ID NO: 5331; WAN024FIK; Start 203; Stop 227
agatatacattgccaattcttctgg

SEQ ID NO: 407255 - DNA, 25 bp, Artificial
  probe
  misc_feature (1)..(25): SEQ ID NO: 5331; WAN024FIK; Start 378; Stop 402
tttcatgcgtttcttagtcaagttt

SEQ ID NO: 407256 - DNA, 25 bp, Artificial
  probe
  misc_feature (1)..(25): SEQ ID NO: 5331; WAN024FIK; Start 377; Stop 401
ctttcatgcgtttcttagtcaagtt

SEQ ID NO: 407257 - DNA, 25 bp, Artificial
  probe
  misc_feature (1)..(25): SEQ ID NO: 5331; WAN024FIK; Start 102; Stop 126
tttaccaccgaaaccattacctgat

SEQ ID NO: 407258 - DNA, 25 bp, Artificial
  probe
  misc_feature (1)..(25): SEQ ID NO: 5331; WAN024FIK; Start 346; Stop 370
aaggattcttctacacttgcaggtt

SEQ ID NO: 407259 - DNA, 25 bp, Artificial
  probe
  misc_feature (1)..(25): SEQ ID NO: 5331; WAN024FIK; Start 339; Stop 363
tgattggaaggattcttctacactt

SEQ ID NO: 407260 - DNA, 25 bp, Artificial
  probe
  misc_feature (1)..(25): SEQ ID NO: 5331; WAN024FIK; Start 338; Stop 362
ttgattggaaggattcttctacact

SEQ ID NO: 407261 - DNA, 25 bp, Artificial
  probe
  misc_feature (1)..(25): SEQ ID NO: 5331; WAN024FIK; Start 340; Stop 364
gattggaaggattcttctacacttg

SEQ ID NO: 407262 - DNA, 25 bp, Artificial
  probe
  misc_feature (1)..(25): SEQ ID NO: 5331; WAN024FIK; Start 369; Stop 393
tttgagacctttcatgcgtttctta

SEQ ID NO: 407263 - DNA, 25 bp, Artificial
  probe
  misc_feature (1)..(25): SEQ ID NO: 5331; WAN024FIK; Start 341; Stop 365
attggaaggattcttctacacttgc

SEQ ID NO: 407264 - DNA, 25 bp, Artificial
  probe
  misc_feature (1)..(25): SEQ ID NO: 5331; WAN024FIK; Start 96; Stop 120
cttagctttaccaccgaaaccatta

SEQ ID NO: 407265 - DNA, 25 bp, Artificial
  probe
  misc_feature (1)..(25): SEQ ID NO: 5331; WAN024FIK; Start 376; Stop 400
cctttcatgcgtttcttagtcaagt

SEQ ID NO: 407266 - DNA, 25 bp, Artificial
  probe
  misc_feature (1)..(25): SEQ ID NO: 5331; WAN024FIK; Start 375; Stop 399
acctttcatgcgtttcttagtcaag

SEQ ID NO: 407267 - DNA, 25 bp, Artificial
  probe
  misc_feature (1)..(25): SEQ ID NO: 5331; WAN024FIK; Start 101; Stop 125
ctttaccaccgaaaccattacctga

SEQ ID NO: 407268 - DNA, 25 bp, Artificial
  probe
  misc_feature (1)..(25): SEQ ID NO: 5331; WAN024FIK; Start 370; Stop 394
ttgagacctttcatgcgtttcttag

SEQ ID NO: 407269 - DNA, 25 bp, Artificial
  probe
  misc_feature (1)..(25): SEQ ID NO: 5332; WAN024FI2; Start 78; Stop 102
aatcacacttatacctgaacgatgt

SEQ ID NO: 407270 - DNA, 25 bp, Artificial
  probe
  misc_feature (1)..(25): SEQ ID NO: 5332; WAN024FI2; Start 79; Stop 103
atcacacttatacctgaacgatgta

SEQ ID NO: 407271 - DNA, 25 bp, Artificial
  probe
  misc_feature (1)..(25): SEQ ID NO: 5332; WAN024FI2; Start 80; Stop 104
tcacacttatacctgaacgatgtat

SEQ ID NO: 407272 - DNA, 25 bp, Artificial
  probe
  misc_feature (1)..(25): SEQ ID NO: 5332; WAN024FI2; Start 81; Stop 105
cacacttatacctgaacgatgtatc

SEQ ID NO: 407273 - DNA, 25 bp, Artificial
  probe
  misc_feature (1)..(25): SEQ ID NO: 5332; WAN024FI2; Start 77; Stop 101
aaatcacacttatacctgaacgatg

SEQ ID NO: 407274 - DNA, 25 bp, Artificial
  probe
  misc_feature (1)..(25): SEQ ID NO: 5332; WAN024FI2; Start 82; Stop 106
acacttatacctgaacgatgtatcg

SEQ ID NO: 407275 - DNA, 25 bp, Artificial
  probe
  misc_feature (1)..(25): SEQ ID NO: 5332; WAN024FI2; Start 83; Stop 107
cacttatacctgaacgatgtatcgc

SEQ ID NO: 407276 - DNA, 25 bp, Artificial
  probe
  misc_feature (1)..(25): SEQ ID NO: 5332; WAN024FI2; Start 85; Stop 109
cttatacctgaacgatgtatcgcct

SEQ ID NO: 407277 - DNA, 25 bp, Artificial
  probe
  misc_feature (1)..(25): SEQ ID NO: 5332; WAN024FI2; Start 260; Stop 284
ttggaaaccaggaagcctaactaat

SEQ ID NO: 407278 - DNA, 25 bp, Artificial
  probe
  misc_feature (1)..(25): SEQ ID NO: 5332; WAN024FI2; Start 259; Stop 283
attggaaaccaggaagcctaactaa

SEQ ID NO: 407279 - DNA, 25 bp, Artificial
  probe
  misc_feature (1)..(25): SEQ ID NO: 5332; WAN024FI2; Start 129; Stop 153
ttctgatttatttgattaccacgat

SEQ ID NO: 407280 - DNA, 25 bp, Artificial
  probe
  misc_feature (1)..(25): SEQ ID NO: 5332; WAN024FI2; Start 128; Stop 152
attctgatttatttgattaccacga

SEQ ID NO: 407281 - DNA, 25 bp, Artificial
  probe
  misc_feature (1)..(25): SEQ ID NO: 5332; WAN024FI2; Start 86; Stop 110
ttatacctgaacgatgtatcgcctg

SEQ ID NO: 407282 - DNA, 25 bp, Artificial
  probe
  misc_feature (1)..(25): SEQ ID NO: 5332; WAN024FI2; Start 84; Stop 108
acttatacctgaacgatgtatcgcc

SEQ ID NO: 407283 - DNA, 25 bp, Artificial
  probe
  misc_feature (1)..(25): SEQ ID NO: 5332; WAN024FI2; Start 14; Stop 38
tttgccataccttactccttgtttt

SEQ ID NO: 407284 - DNA, 25 bp, Artificial
  probe
  misc_feature (1)..(25): SEQ ID NO: 5332; WAN024FI2; Start 13; Stop 37
ttttgccataccttactccttgttt

SEQ ID NO: 407285 - DNA, 25 bp, Artificial
  probe
  misc_feature (1)..(25): SEQ ID NO: 5332; WAN024FI2; Start 258; Stop 282
gattggaaaccaggaagcctaacta

SEQ ID NO: 407286 - DNA, 25 bp, Artificial
  probe
  misc_feature (1)..(25): SEQ ID NO: 5332; WAN024FI2; Start 10; Stop 34
ttcttttgccataccttactccttg

SEQ ID NO: 407287 - DNA, 25 bp, Artificial
  probe
  misc_feature (1)..(25): SEQ ID NO: 5332; WAN024FI2; Start 9; Stop 33
gttcttttgccataccttactcctt

SEQ ID NO: 407288 - DNA, 25 bp, Artificial
  probe
  misc_feature (1)..(25): SEQ ID NO: 5332; WAN024FI2; Start 12; Stop 36
cttttgccataccttactccttgtt

SEQ ID NO: 407289 - DNA, 25 bp, Artificial
  probe
  misc_feature (1)..(25): SEQ ID NO: 5332; WAN024FI2; Start 74; Stop 98
tgaaaatcacacttatacctgaacg

SEQ ID NO: 407290 - DNA, 25 bp, Artificial
  probe
  misc_feature (1)..(25): SEQ ID NO: 5332; WAN024FI2; Start 75; Stop 99
gaaaatcacacttatacctgaacga

SEQ ID NO: 407291 - DNA, 25 bp, Artificial
  probe
  misc_feature (1)..(25): SEQ ID NO: 5332; WAN024FI2; Start 11; Stop 35
tcttttgccataccttactccttgt

SEQ ID NO: 407292 - DNA, 25 bp, Artificial
  probe
  misc_feature (1)..(25): SEQ ID NO: 5332; WAN024FI2; Start 115; Stop 139
ctttgccaaacttattctgatttat

SEQ ID NO: 407293 - DNA, 25 bp, Artificial
  probe
  misc_feature (1)..(25): SEQ ID NO: 5332; WAN024FI2; Start 76; Stop 100
aaaatcacacttatacctgaacgat

SEQ ID NO: 407294 - DNA, 25 bp, Artificial
  probe
  misc_feature (1)..(25): SEQ ID NO: 5332; WAN024FI2; Start 87; Stop 111
tatacctgaacgatgtatcgcctgt

SEQ ID NO: 407295 - DNA, 25 bp, Artificial
  probe
  misc_feature (1)..(25): SEQ ID NO: 5332; WAN024FI2; Start 117; Stop 141
ttgccaaacttattctgatttattt

SEQ ID NO: 407296 - DNA, 25 bp, Artificial
  probe
  misc_feature (1)..(25): SEQ ID NO: 5332; WAN024FI2; Start 256; Stop 280
ctgattggaaaccaggaagcctaac

SEQ ID NO: 407297 - DNA, 25 bp, Artificial
  probe
  misc_feature (1)..(25): SEQ ID NO: 5332; WAN024FI2; Start 116; Stop 140
tttgccaaacttattctgatttatt

SEQ ID NO: 407298 - DNA, 25 bp, Artificial
  probe
  misc_feature (1)..(25): SEQ ID NO: 5332; WAN024FI2; Start 71; Stop 95
acatgaaaatcacacttatacctga

SEQ ID NO: 407299 - DNA, 25 bp, Artificial
  probe
  misc_feature (1)..(25): SEQ ID NO: 5332; WAN024FI2; Start 127; Stop 151
tattctgatttatttgattaccacg

SEQ ID NO: 407300 - DNA, 25 bp, Artificial
  probe
  misc_feature (1)..(25): SEQ ID NO: 5332; WAN024FI2; Start 73; Stop 97
atgaaaatcacacttatacctgaac

SEQ ID NO: 407301 - DNA, 25 bp, Artificial
  probe
  misc_feature (1)..(25): SEQ ID NO: 5332; WAN024FI2; Start 257; Stop 281
tgattggaaaccaggaagcctaact

SEQ ID NO: 407302 - DNA, 25 bp, Artificial
  probe
  misc_feature (1)..(25): SEQ ID NO: 5333; WAN024BGI; Start 91; Stop 115
cagcaaacaatacagttcaggatta

SEQ ID NO: 407303 - DNA, 25 bp, Artificial
  probe
  misc_feature (1)..(25): SEQ ID NO: 5333; WAN024BGI; Start 92; Stop 116
agcaaacaatacagttcaggattaa

SEQ ID NO: 407304 - DNA, 25 bp, Artificial
  probe
  misc_feature (1)..(25): SEQ ID NO: 5333; WAN024BGI; Start 81; Stop 105
aatttccctccagcaaacaatacag

SEQ ID NO: 407305 - DNA, 25 bp, Artificial
  probe
  misc_feature (1)..(25): SEQ ID NO: 5333; WAN024BGI; Start 160; Stop 184
atacactatcttgacttatttggca

SEQ ID NO: 407306 - DNA, 25 bp, Artificial
  probe
  misc_feature (1)..(25): SEQ ID NO: 5333; WAN024BGI; Start 90; Stop 114
ccagcaaacaatacagttcaggatt

SEQ ID NO: 407307 - DNA, 25 bp, Artificial
  probe
  misc_feature (1)..(25): SEQ ID NO: 5333; WAN024BGI; Start 93; Stop 117
gcaaacaatacagttcaggattaaa

SEQ ID NO: 407308 - DNA, 25 bp, Artificial
  probe
  misc_feature (1)..(25): SEQ ID NO: 5333; WAN024BGI; Start 161; Stop 185
tacactatcttgacttatttggcaa

SEQ ID NO: 407309 - DNA, 25 bp, Artificial
  probe
  misc_feature (1)..(25): SEQ ID NO: 5333; WAN024BGI; Start 82; Stop 106
atttccctccagcaaacaatacagt

SEQ ID NO: 407310 - DNA, 25 bp, Artificial
  probe
  misc_feature (1)..(25): SEQ ID NO: 5333; WAN024BGI; Start 108; Stop 132
caggattaaacaatcgttcggaatt

SEQ ID NO: 407311 - DNA, 25 bp, Artificial
  probe
  misc_feature (1)..(25): SEQ ID NO: 5333; WAN024BGI; Start 102; Stop 126
acagttcaggattaaacaatcgttc

SEQ ID NO: 407312 - DNA, 25 bp, Artificial
  probe
  misc_feature (1)..(25): SEQ ID NO: 5333; WAN024BGI; Start 109; Stop 133
aggattaaacaatcgttcggaattt

SEQ ID NO: 407313 - DNA, 25 bp, Artificial
  probe
  misc_feature (1)..(25): SEQ ID NO: 5333; WAN024BGI; Start 72; Stop 96
attataccaaatttccctccagcaa

SEQ ID NO: 407314 - DNA, 25 bp, Artificial
  probe
  misc_feature (1)..(25): SEQ ID NO: 5333; WAN024BGI; Start 71; Stop 95
tattataccaaatttccctccagca

SEQ ID NO: 407315 - DNA, 25 bp, Artificial
  probe
  misc_feature (1)..(25): SEQ ID NO: 5333; WAN024BGI; Start 68; Stop 92
tgctattataccaaatttccctcca

SEQ ID NO: 407316 - DNA, 25 bp, Artificial
  probe
  misc_feature (1)..(25): SEQ ID NO: 5333; WAN024BGI; Start 107; Stop 131
tcaggattaaacaatcgttcggaat

SEQ ID NO: 407317 - DNA, 25 bp, Artificial
  probe
  misc_feature (1)..(25): SEQ ID NO: 5333; WAN024BGI; Start 103; Stop 127
cagttcaggattaaacaatcgttcg

SEQ ID NO: 407318 - DNA, 25 bp, Artificial
  probe
  misc_feature (1)..(25): SEQ ID NO: 5333; WAN024BGI; Start 73; Stop 97
ttataccaaatttccctccagcaaa

SEQ ID NO: 407319 - DNA, 25 bp, Artificial
  probe
  misc_feature (1)..(25): SEQ ID NO: 5333; WAN024BGI; Start 106; Stop 130
ttcaggattaaacaatcgttcggaa

SEQ ID NO: 407320 - DNA, 25 bp, Artificial
  probe
  misc_feature (1)..(25): SEQ ID NO: 5333; WAN024BGI; Start 70; Stop 94
ctattataccaaatttccctccagc

SEQ ID NO: 407321 - DNA, 25 bp, Artificial
  probe
  misc_feature (1)..(25): SEQ ID NO: 5333; WAN024BGI; Start 69; Stop 93
gctattataccaaatttccctccag

SEQ ID NO: 407322 - DNA, 25 bp, Artificial
  probe
  misc_feature (1)..(25): SEQ ID NO: 5333; WAN024BGI; Start 79; Stop 103
caaatttccctccagcaaacaatac

SEQ ID NO: 407323 - DNA, 25 bp, Artificial
  probe
  misc_feature (1)..(25): SEQ ID NO: 5333; WAN024BGI; Start 101; Stop 125
tacagttcaggattaaacaatcgtt

SEQ ID NO: 407324 - DNA, 25 bp, Artificial
  probe
  misc_feature (1)..(25): SEQ ID NO: 5333; WAN024BGI; Start 74; Stop 98
tataccaaatttccctccagcaaac

SEQ ID NO: 407325 - DNA, 25 bp, Artificial
  probe
  misc_feature (1)..(25): SEQ ID NO: 5333; WAN024BGI; Start 80; Stop 104
aaatttccctccagcaaacaataca

SEQ ID NO: 407326 - DNA, 25 bp, Artificial
  probe
  misc_feature (1)..(25): SEQ ID NO: 5333; WAN024BGI; Start 100; Stop 124
atacagttcaggattaaacaatcgt

SEQ ID NO: 407327 - DNA, 25 bp, Artificial
  probe
  misc_feature (1)..(25): SEQ ID NO: 5333; WAN024BGI; Start 159; Stop 183
aatacactatcttgacttatttggc

SEQ ID NO: 407328 - DNA, 25 bp, Artificial
  probe
  misc_feature (1)..(25): SEQ ID NO: 5333; WAN024BGI; Start 83; Stop 107
tttccctccagcaaacaatacagtt

SEQ ID NO: 407329 - DNA, 25 bp, Artificial
  probe
  misc_feature (1)..(25): SEQ ID NO: 5333; WAN024BGI; Start 105; Stop 129
gttcaggattaaacaatcgttcgga

SEQ ID NO: 407330 - DNA, 25 bp, Artificial
  probe
  misc_feature (1)..(25): SEQ ID NO: 5333; WAN024BGI; Start 104; Stop 128
agttcaggattaaacaatcgttcgg

SEQ ID NO: 407331 - DNA, 25 bp, Artificial
  probe
  misc_feature (1)..(25): SEQ ID NO: 5333; WAN024BGI; Start 96; Stop 120
aacaatacagttcaggattaaacaa

SEQ ID NO: 407332 - DNA, 25 bp, Artificial
  probe
  misc_feature (1)..(25): SEQ ID NO: 5333; WAN024BGI; Start 95; Stop 119
aaacaatacagttcaggattaaaca

SEQ ID NO: 407333 - DNA, 25 bp, Artificial
  probe
  misc_feature (1)..(25): SEQ ID NO: 5333; WAN024BGI; Start 67; Stop 91
ttgctattataccaaatttccctcc

SEQ ID NO: 407334 - DNA, 25 bp, Artificial
  probe
  misc_feature (1)..(25): SEQ ID NO: 5333; WAN024BGI; Start 94; Stop 118
caaacaatacagttcaggattaaac

SEQ ID NO: 407335 - DNA, 25 bp, Artificial
  probe
  misc_feature (1)..(25): SEQ ID NO: 5334; WAN024B24; Start 37; Stop 61
accatttctcgtacatatctagtaa

SEQ ID NO: 407336 - DNA, 25 bp, Artificial
  probe
  misc_feature (1)..(25): SEQ ID NO: 5334; WAN024B24; Start 34; Stop 58
cgtaccatttctcgtacatatctag

SEQ ID NO: 407337 - DNA, 25 bp, Artificial
  probe
  misc_feature (1)..(25): SEQ ID NO: 5334; WAN024B24; Start 81; Stop 105
tggagaactgactgaaaataaattg

SEQ ID NO: 407338 - DNA, 25 bp, Artificial
  probe
  misc_feature (1)..(25): SEQ ID NO: 5334; WAN024B24; Start 36; Stop 60
taccatttctcgtacatatctagta

SEQ ID NO: 407339 - DNA, 25 bp, Artificial
  probe
  misc_feature (1)..(25): SEQ ID NO: 5334; WAN024B24; Start 82; Stop 106
ggagaactgactgaaaataaattga

SEQ ID NO: 407340 - DNA, 25 bp, Artificial
  probe
  misc_feature (1)..(25): SEQ ID NO: 5334; WAN024B24; Start 38; Stop 62
ccatttctcgtacatatctagtaaa

SEQ ID NO: 407341 - DNA, 25 bp, Artificial
  probe
  misc_feature (1)..(25): SEQ ID NO: 5334; WAN024B24; Start 33; Stop 57
acgtaccatttctcgtacatatcta

SEQ ID NO: 407342 - DNA, 25 bp, Artificial
  probe
  misc_feature (1)..(25): SEQ ID NO: 5334; WAN024B24; Start 35; Stop 59
gtaccatttctcgtacatatctagt

SEQ ID NO: 407343 - DNA, 25 bp, Artificial
  probe
  misc_feature (1)..(25): SEQ ID NO: 5334; WAN024B24; Start 78; Stop 102
aaatggagaactgactgaaaataaa

SEQ ID NO: 407344 - DNA, 25 bp, Artificial
  probe
  misc_feature (1)..(25): SEQ ID NO: 5334; WAN024B24; Start 77; Stop 101
aaaatggagaactgactgaaaataa

SEQ ID NO: 407345 - DNA, 25 bp, Artificial
  probe
  misc_feature (1)..(25): SEQ ID NO: 5334; WAN024B24; Start 2; Stop 26
tgccagacatttccattagaaaatc

SEQ ID NO: 407346 - DNA, 25 bp, Artificial
  probe
  misc_feature (1)..(25): SEQ ID NO: 5334; WAN024B24; Start 1; Stop 25
ttgccagacatttccattagaaaat

SEQ ID NO: 407347 - DNA, 25 bp, Artificial
  probe
  misc_feature (1)..(25): SEQ ID NO: 5334; WAN024B24; Start 79; Stop 103
aatggagaactgactgaaaataaat

SEQ ID NO: 407348 - DNA, 25 bp, Artificial
  probe
  misc_feature (1)..(25): SEQ ID NO: 5334; WAN024B24; Start 80; Stop 104
atggagaactgactgaaaataaatt

SEQ ID NO: 407349 - DNA, 25 bp, Artificial
  probe
  misc_feature (1)..(25): SEQ ID NO: 5334; WAN024B24; Start 84; Stop 108
agaactgactgaaaataaattgagt

SEQ ID NO: 407350 - DNA, 25 bp, Artificial
  probe
  misc_feature (1)..(25): SEQ ID NO: 5334; WAN024B24; Start 83; Stop 107
gagaactgactgaaaataaattgag

SEQ ID NO: 407351 - DNA, 25 bp, Artificial
  probe
  misc_feature (1)..(25): SEQ ID NO: 5334; WAN024B24; Start 89; Stop 113
tgactgaaaataaattgagttcact

SEQ ID NO: 407352 - DNA, 25 bp, Artificial
  probe
  misc_feature (1)..(25): SEQ ID NO: 5334; WAN024B24; Start 87; Stop 111
actgactgaaaataaattgagttca

SEQ ID NO: 407353 - DNA, 25 bp, Artificial
  probe
  misc_feature (1)..(25): SEQ ID NO: 5334; WAN024B24; Start 88; Stop 112
ctgactgaaaataaattgagttcac

SEQ ID NO: 407354 - DNA, 25 bp, Artificial
  probe
  misc_feature (1)..(25): SEQ ID NO: 5334; WAN024B24; Start 32; Stop 56
tacgtaccatttctcgtacatatct

SEQ ID NO: 407355 - DNA, 25 bp, Artificial
  probe
  misc_feature (1)..(25): SEQ ID NO: 5334; WAN024B24; Start 31; Stop 55
ttacgtaccatttctcgtacatatc

SEQ ID NO: 407356 - DNA, 25 bp, Artificial
  probe
  misc_feature (1)..(25): SEQ ID NO: 5334; WAN024B24; Start 30; Stop 54
tttacgtaccatttctcgtacatat

SEQ ID NO: 407357 - DNA, 25 bp, Artificial
  probe
  misc_feature (1)..(25): SEQ ID NO: 5334; WAN024B24; Start 29; Stop 53
atttacgtaccatttctcgtacata

SEQ ID NO: 407358 - DNA, 25 bp, Artificial
  probe
  misc_feature (1)..(25): SEQ ID NO: 5334; WAN024B24; Start 86; Stop 110
aactgactgaaaataaattgagttc

SEQ ID NO: 407359 - DNA, 25 bp, Artificial
  probe
  misc_feature (1)..(25): SEQ ID NO: 5334; WAN024B24; Start 85; Stop 109
gaactgactgaaaataaattgagtt

SEQ ID NO: 407360 - DNA, 25 bp, Artificial
  probe
  misc_feature (1)..(25): SEQ ID NO: 5334; WAN024B24; Start 90; Stop 114
gactgaaaataaattgagttcacta

SEQ ID NO: 407361 - DNA, 25 bp, Artificial
  probe
  misc_feature (1)..(25): SEQ ID NO: 5334; WAN024B24; Start 93; Stop 117
tgaaaataaattgagttcactaact

SEQ ID NO: 407362 - DNA, 25 bp, Artificial
  probe
  misc_feature (1)..(25): SEQ ID NO: 5334; WAN024B24; Start 91; Stop 115
actgaaaataaattgagttcactaa

SEQ ID NO: 407363 - DNA, 25 bp, Artificial
  probe
  misc_feature (1)..(25): SEQ ID NO: 5334; WAN024B24; Start 92; Stop 116
ctgaaaataaattgagttcactaac

SEQ ID NO: 407364 - DNA, 25 bp, Artificial
  probe
  misc_feature (1)..(25): SEQ ID NO: 5335; WAN024DUX; Start 44; Stop 68
ccatagtaatcacaatccaacctga

SEQ ID NO: 407365 - DNA, 25 bp, Artificial
  probe
  misc_feature (1)..(25): SEQ ID NO: 5335; WAN024DUX; Start 46; Stop 70
atagtaatcacaatccaacctgagc

SEQ ID NO: 407366 - DNA, 25 bp, Artificial
  probe
  misc_feature (1)..(25): SEQ ID NO: 5335; WAN024DUX; Start 45; Stop 69
catagtaatcacaatccaacctgag

SEQ ID NO: 407367 - DNA, 25 bp, Artificial
  probe
  misc_feature (1)..(25): SEQ ID NO: 5335; WAN024DUX; Start 50; Stop 74
taatcacaatccaacctgagctatt

SEQ ID NO: 407368 - DNA, 25 bp, Artificial
  probe
  misc_feature (1)..(25): SEQ ID NO: 5335; WAN024DUX; Start 162; Stop 186
ttcattcatcatctttctgtctcca

SEQ ID NO: 407369 - DNA, 25 bp, Artificial
  probe
  misc_feature (1)..(25): SEQ ID NO: 5335; WAN024DUX; Start 40; Stop 64
caacccatagtaatcacaatccaac

SEQ ID NO: 407370 - DNA, 25 bp, Artificial
  probe
  misc_feature (1)..(25): SEQ ID NO: 5335; WAN024DUX; Start 163; Stop 187
tcattcatcatctttctgtctccat

SEQ ID NO: 407371 - DNA, 25 bp, Artificial
  probe
  misc_feature (1)..(25): SEQ ID NO: 5335; WAN024DUX; Start 49; Stop 73
gtaatcacaatccaacctgagctat

SEQ ID NO: 407372 - DNA, 25 bp, Artificial
  probe
  misc_feature (1)..(25): SEQ ID NO: 5335; WAN024DUX; Start 41; Stop 65
aacccatagtaatcacaatccaacc

SEQ ID NO: 407373 - DNA, 25 bp, Artificial
  probe
  misc_feature (1)..(25): SEQ ID NO: 5335; WAN024DUX; Start 39; Stop 63
ccaacccatagtaatcacaatccaa

SEQ ID NO: 407374 - DNA, 25 bp, Artificial
  probe
  misc_feature (1)..(25): SEQ ID NO: 5335; WAN024DUX; Start 164; Stop 188
cattcatcatctttctgtctccatt

SEQ ID NO: 407375 - DNA, 25 bp, Artificial
  probe
  misc_feature (1)..(25): SEQ ID NO: 5335; WAN024DUX; Start 161; Stop 185
attcattcatcatctttctgtctcc

SEQ ID NO: 407376 - DNA, 25 bp, Artificial
  probe
  misc_feature (1)..(25): SEQ ID NO: 5335; WAN024DUX; Start 43; Stop 67
cccatagtaatcacaatccaacctg

SEQ ID NO: 407377 - DNA, 25 bp, Artificial
  probe
  misc_feature (1)..(25): SEQ ID NO: 5335; WAN024DUX; Start 48; Stop 72
agtaatcacaatccaacctgagcta

SEQ ID NO: 407378 - DNA, 25 bp, Artificial
  probe
  misc_feature (1)..(25): SEQ ID NO: 5335; WAN024DUX; Start 47; Stop 71
tagtaatcacaatccaacctgagct

SEQ ID NO: 407379 - DNA, 25 bp, Artificial
  probe
  misc_feature (1)..(25): SEQ ID NO: 5335; WAN024DUX; Start 42; Stop 66
acccatagtaatcacaatccaacct

SEQ ID NO: 407380 - DNA, 25 bp, Artificial
  probe
  misc_feature (1)..(25): SEQ ID NO: 5335; WAN024DUX; Start 106; Stop 130
acaacaccatttcctagaagaatca

SEQ ID NO: 407381 - DNA, 25 bp, Artificial
  probe
  misc_feature (1)..(25): SEQ ID NO: 5335; WAN024DUX; Start 107; Stop 131
caacaccatttcctagaagaatcag

SEQ ID NO: 407382 - DNA, 25 bp, Artificial
  probe
  misc_feature (1)..(25): SEQ ID NO: 5335; WAN024DUX; Start 104; Stop 128
caacaacaccatttcctagaagaat

SEQ ID NO: 407383 - DNA, 25 bp, Artificial
  probe
  misc_feature (1)..(25): SEQ ID NO: 5335; WAN024DUX; Start 105; Stop 129
aacaacaccatttcctagaagaatc

SEQ ID NO: 407384 - DNA, 25 bp, Artificial
  probe
  misc_feature (1)..(25): SEQ ID NO: 5335; WAN024DUX; Start 166; Stop 190
ttcatcatctttctgtctccattaa

SEQ ID NO: 407385 - DNA, 25 bp, Artificial
  probe
  misc_feature (1)..(25): SEQ ID NO: 5335; WAN024DUX; Start 167; Stop 191
tcatcatctttctgtctccattaaa

SEQ ID NO: 407386 - DNA, 25 bp, Artificial
  probe
  misc_feature (1)..(25): SEQ ID NO: 5335; WAN024DUX; Start 103; Stop 127
gcaacaacaccatttcctagaagaa

SEQ ID NO: 407387 - DNA, 25 bp, Artificial
  probe
  misc_feature (1)..(25): SEQ ID NO: 5335; WAN024DUX; Start 165; Stop 189
attcatcatctttctgtctccatta

SEQ ID NO: 407388 - DNA, 25 bp, Artificial
  probe
  misc_feature (1)..(25): SEQ ID NO: 5335; WAN024DUX; Start 38; Stop 62
cccaacccatagtaatcacaatcca

SEQ ID NO: 407389 - DNA, 25 bp, Artificial
  probe
  misc_feature (1)..(25): SEQ ID NO: 5335; WAN024DUX; Start 108; Stop 132
aacaccatttcctagaagaatcagg

SEQ ID NO: 407390 - DNA, 25 bp, Artificial
  probe
  misc_feature (1)..(25): SEQ ID NO: 5335; WAN024DUX; Start 51; Stop 75
aatcacaatccaacctgagctattg

SEQ ID NO: 407391 - DNA, 25 bp, Artificial
  probe
  misc_feature (1)..(25): SEQ ID NO: 5335; WAN024DUX; Start 132; Stop 156
gattaaagtccctagaaattctcca

SEQ ID NO: 407392 - DNA, 25 bp, Artificial
  probe
  misc_feature (1)..(25): SEQ ID NO: 5335; WAN024DUX; Start 160; Stop 184
aattcattcatcatctttctgtctc

SEQ ID NO: 407393 - DNA, 25 bp, Artificial
  probe
  misc_feature (1)..(25): SEQ ID NO: 5335; WAN024DUX; Start 134; Stop 158
ttaaagtccctagaaattctccaaa

SEQ ID NO: 407394 - DNA, 25 bp, Artificial
  probe
  misc_feature (1)..(25): SEQ ID NO: 5335; WAN024DUX; Start 121; Stop 145
agaagaatcaggattaaagtcccta

SEQ ID NO: 407395 - DNA, 25 bp, Artificial
  probe
  misc_feature (1)..(25): SEQ ID NO: 5335; WAN024DUX; Start 120; Stop 144
tagaagaatcaggattaaagtccct

SEQ ID NO: 407396 - DNA, 25 bp, Artificial
  probe
  misc_feature (1)..(25): SEQ ID NO: 5335; WAN024DUX; Start 124; Stop 148
agaatcaggattaaagtccctagaa

SEQ ID NO: 407397 - DNA, 25 bp, Artificial
  probe
  misc_feature (1)..(25): SEQ ID NO: 5336; WAN024D37; Start 59; Stop 83
ctatctatcttcttggatcggcttc

SEQ ID NO: 407398 - DNA, 25 bp, Artificial
  probe
  misc_feature (1)..(25): SEQ ID NO: 5336; WAN024D37; Start 58; Stop 82
gctatctatcttcttggatcggctt

SEQ ID NO: 407399 - DNA, 25 bp, Artificial
  probe
  misc_feature (1)..(25): SEQ ID NO: 5336; WAN024D37; Start 60; Stop 84
tatctatcttcttggatcggcttcc

SEQ ID NO: 407400 - DNA, 25 bp, Artificial
  probe
  misc_feature (1)..(25): SEQ ID NO: 5336; WAN024D37; Start 55; Stop 79
ttagctatctatcttcttggatcgg

SEQ ID NO: 407401 - DNA, 25 bp, Artificial
  probe
  misc_feature (1)..(25): SEQ ID NO: 5336; WAN024D37; Start 56; Stop 80
tagctatctatcttcttggatcggc

SEQ ID NO: 407402 - DNA, 25 bp, Artificial
  probe
  misc_feature (1)..(25): SEQ ID NO: 5336; WAN024D37; Start 57; Stop 81
agctatctatcttcttggatcggct

SEQ ID NO: 407403 - DNA, 25 bp, Artificial
  probe
  misc_feature (1)..(25): SEQ ID NO: 5336; WAN024D37; Start 54; Stop 78
tttagctatctatcttcttggatcg

SEQ ID NO: 407404 - DNA, 25 bp, Artificial
  probe
  misc_feature (1)..(25): SEQ ID NO: 5336; WAN024D37; Start 18; Stop 42
gaaattacttggggctaggctcatg

SEQ ID NO: 407405 - DNA, 25 bp, Artificial
  probe
  misc_feature (1)..(25): SEQ ID NO: 5336; WAN024D37; Start 13; Stop 37
aattggaaattacttggggctaggc

SEQ ID NO: 407406 - DNA, 25 bp, Artificial
  probe
  misc_feature (1)..(25): SEQ ID NO: 5336; WAN024D37; Start 14; Stop 38
attggaaattacttggggctaggct

SEQ ID NO: 407407 - DNA, 25 bp, Artificial
  probe
  misc_feature (1)..(25): SEQ ID NO: 5336; WAN024D37; Start 11; Stop 35
tcaattggaaattacttggggctag

SEQ ID NO: 407408 - DNA, 25 bp, Artificial
  probe
  misc_feature (1)..(25): SEQ ID NO: 5336; WAN024D37; Start 19; Stop 43
aaattacttggggctaggctcatgt

SEQ ID NO: 407409 - DNA, 25 bp, Artificial
  probe
  misc_feature (1)..(25): SEQ ID NO: 5336; WAN024D37; Start 12; Stop 36
caattggaaattacttggggctagg

SEQ ID NO: 407410 - DNA, 25 bp, Artificial
  probe
  misc_feature (1)..(25): SEQ ID NO: 5336; WAN024D37; Start 53; Stop 77
atttagctatctatcttcttggatc

SEQ ID NO: 407411 - DNA, 25 bp, Artificial
  probe
  misc_feature (1)..(25): SEQ ID NO: 5336; WAN024D37; Start 17; Stop 41
ggaaattacttggggctaggctcat

SEQ ID NO: 407412 - DNA, 25 bp, Artificial
  probe
  misc_feature (1)..(25): SEQ ID NO: 5336; WAN024D37; Start 20; Stop 44
aattacttggggctaggctcatgtc

SEQ ID NO: 407413 - DNA, 25 bp, Artificial
  probe
  misc_feature (1)..(25): SEQ ID NO: 5336; WAN024D37; Start 15; Stop 39
ttggaaattacttggggctaggctc

SEQ ID NO: 407414 - DNA, 25 bp, Artificial
  probe
  misc_feature (1)..(25): SEQ ID NO: 5336; WAN024D37; Start 51; Stop 75
aaatttagctatctatcttcttgga

SEQ ID NO: 407415 - DNA, 25 bp, Artificial
  probe
  misc_feature (1)..(25): SEQ ID NO: 5336; WAN024D37; Start 50; Stop 74
caaatttagctatctatcttcttgg

SEQ ID NO: 407416 - DNA, 25 bp, Artificial
  probe
  misc_feature (1)..(25): SEQ ID NO: 5336; WAN024D37; Start 52; Stop 76
aatttagctatctatcttcttggat

SEQ ID NO: 407417 - DNA, 25 bp, Artificial
  probe
  misc_feature (1)..(25): SEQ ID NO: 5336; WAN024D37; Start 21; Stop 45
attacttggggctaggctcatgtct

SEQ ID NO: 407418 - DNA, 25 bp, Artificial
  probe
  misc_feature (1)..(25): SEQ ID NO: 5337; WAN024DZ5; Start 80; Stop 104
ataattggtttattctgacgaagcg

SEQ ID NO: 407419 - DNA, 25 bp, Artificial
  probe
  misc_feature (1)..(25): SEQ ID NO: 5337; WAN024DZ5; Start 108; Stop 132
ccttcaagagtgccaattcaaattc

SEQ ID NO: 407420 - DNA, 25 bp, Artificial
  probe
  misc_feature (1)..(25): SEQ ID NO: 5337; WAN024DZ5; Start 107; Stop 131
tccttcaagagtgccaattcaaatt

SEQ ID NO: 407421 - DNA, 25 bp, Artificial
  probe
  misc_feature (1)..(25): SEQ ID NO: 5337; WAN024DZ5; Start 106; Stop 130
ttccttcaagagtgccaattcaaat

SEQ ID NO: 407422 - DNA, 25 bp, Artificial
  probe
  misc_feature (1)..(25): SEQ ID NO: 5337; WAN024DZ5; Start 109; Stop 133
cttcaagagtgccaattcaaattcg

SEQ ID NO: 407423 - DNA, 25 bp, Artificial
  probe
  misc_feature (1)..(25): SEQ ID NO: 5337; WAN024DZ5; Start 79; Stop 103
cataattggtttattctgacgaagc

SEQ ID NO: 407424 - DNA, 25 bp, Artificial
  probe
  misc_feature (1)..(25): SEQ ID NO: 5337; WAN024DZ5; Start 225; Stop 249
tgtcaatcatttccacataatcacg

SEQ ID NO: 407425 - DNA, 25 bp, Artificial
  probe
  misc_feature (1)..(25): SEQ ID NO: 5337; WAN024DZ5; Start 138; Stop 162
ggaccagattgtaatcatcgctctc

SEQ ID NO: 407426 - DNA, 25 bp, Artificial
  probe
  misc_feature (1)..(25): SEQ ID NO: 5337; WAN024DZ5; Start 128; Stop 152
aattcgtcacggaccagattgtaat

SEQ ID NO: 407427 - DNA, 25 bp, Artificial
  probe
  misc_feature (1)..(25): SEQ ID NO: 5337; WAN024DZ5; Start 110; Stop 134
ttcaagagtgccaattcaaattcgt

SEQ ID NO: 407428 - DNA, 25 bp, Artificial
  probe
  misc_feature (1)..(25): SEQ ID NO: 5337; WAN024DZ5; Start 219; Stop 243
tgagtttgtcaatcatttccacata

SEQ ID NO: 407429 - DNA, 25 bp, Artificial
  probe
  misc_feature (1)..(25): SEQ ID NO: 5337; WAN024DZ5; Start 105; Stop 129
cttccttcaagagtgccaattcaaa

SEQ ID NO: 407430 - DNA, 25 bp, Artificial
  probe
  misc_feature (1)..(25): SEQ ID NO: 5337; WAN024DZ5; Start 139; Stop 163
gaccagattgtaatcatcgctctcg

SEQ ID NO: 407431 - DNA, 25 bp, Artificial
  probe
  misc_feature (1)..(25): SEQ ID NO: 5337; WAN024DZ5; Start 111; Stop 135
tcaagagtgccaattcaaattcgtc

SEQ ID NO: 407432 - DNA, 25 bp, Artificial
  probe
  misc_feature (1)..(25): SEQ ID NO: 5337; WAN024DZ5; Start 129; Stop 153
attcgtcacggaccagattgtaatc

SEQ ID NO: 407433 - DNA, 25 bp, Artificial
  probe
  misc_feature (1)..(25): SEQ ID NO: 5337; WAN024DZ5; Start 77; Stop 101
gccataattggtttattctgacgaa

SEQ ID NO: 407434 - DNA, 25 bp, Artificial
  probe
  misc_feature (1)..(25): SEQ ID NO: 5337; WAN024DZ5; Start 68; Stop 92
cgacagattgccataattggtttat

SEQ ID NO: 407435 - DNA, 25 bp, Artificial
  probe
  misc_feature (1)..(25): SEQ ID NO: 5337; WAN024DZ5; Start 75; Stop 99
ttgccataattggtttattctgacg

SEQ ID NO: 407436 - DNA, 25 bp, Artificial
  probe
  misc_feature (1)..(25): SEQ ID NO: 5337; WAN024DZ5; Start 112; Stop 136
caagagtgccaattcaaattcgtca

SEQ ID NO: 407437 - DNA, 25 bp, Artificial
  probe
  misc_feature (1)..(25): SEQ ID NO: 5337; WAN024DZ5; Start 224; Stop 248
ttgtcaatcatttccacataatcac

SEQ ID NO: 407438 - DNA, 25 bp, Artificial
  probe
  misc_feature (1)..(25): SEQ ID NO: 5337; WAN024DZ5; Start 220; Stop 244
gagtttgtcaatcatttccacataa

SEQ ID NO: 407439 - DNA, 25 bp, Artificial
  probe
  misc_feature (1)..(25): SEQ ID NO: 5337; WAN024DZ5; Start 76; Stop 100
tgccataattggtttattctgacga

SEQ ID NO: 407440 - DNA, 25 bp, Artificial
  probe
  misc_feature (1)..(25): SEQ ID NO: 5337; WAN024DZ5; Start 6; Stop 30
agtgaccttcgatttcttgattgag

SEQ ID NO: 407441 - DNA, 25 bp, Artificial
  probe
  misc_feature (1)..(25): SEQ ID NO: 5337; WAN024DZ5; Start 226; Stop 250
gtcaatcatttccacataatcacgt

SEQ ID NO: 407442 - DNA, 25 bp, Artificial
  probe
  misc_feature (1)..(25): SEQ ID NO: 5337; WAN024DZ5; Start 233; Stop 257
atttccacataatcacgtacaactg

SEQ ID NO: 407443 - DNA, 25 bp, Artificial
  probe
  misc_feature (1)..(25): SEQ ID NO: 5337; WAN024DZ5; Start 232; Stop 256
catttccacataatcacgtacaact

SEQ ID NO: 407444 - DNA, 25 bp, Artificial
  probe
  misc_feature (1)..(25): SEQ ID NO: 5337; WAN024DZ5; Start 231; Stop 255
tcatttccacataatcacgtacaac

SEQ ID NO: 407445 - DNA, 25 bp, Artificial
  probe
  misc_feature (1)..(25): SEQ ID NO: 5337; WAN024DZ5; Start 5; Stop 29
cagtgaccttcgatttcttgattga

SEQ ID NO: 407446 - DNA, 25 bp, Artificial
  probe
  misc_feature (1)..(25): SEQ ID NO: 5337; WAN024DZ5; Start 104; Stop 128
gcttccttcaagagtgccaattcaa

SEQ ID NO: 407447 - DNA, 25 bp, Artificial
  probe
  misc_feature (1)..(25): SEQ ID NO: 5337; WAN024DZ5; Start 230; Stop 254
atcatttccacataatcacgtacaa

SEQ ID NO: 407448 - DNA, 25 bp, Artificial
  probe
  misc_feature (1)..(25): SEQ ID NO: 5337; WAN024DZ5; Start 229; Stop 253
aatcatttccacataatcacgtaca

SEQ ID NO: 407449 - DNA, 25 bp, Artificial
  probe
  misc_feature (1)..(25): SEQ ID NO: 5337; WAN024DZ5; Start 133; Stop 157
gtcacggaccagattgtaatcatcg

SEQ ID NO: 407450 - DNA, 25 bp, Artificial
  probe
  misc_feature (1)..(25): SEQ ID NO: 5337; WAN024DZ5; Start 228; Stop 252
caatcatttccacataatcacgtac

SEQ ID NO: 407451 - DNA, 25 bp, Artificial
  probe
  misc_feature (1)..(25): SEQ ID NO: 5338; WAN024G7D; Start 118; Stop 142
atccattccagtcattgtccaatat

SEQ ID NO: 407452 - DNA, 25 bp, Artificial
  probe
  misc_feature (1)..(25): SEQ ID NO: 5338; WAN024G7D; Start 117; Stop 141
aatccattccagtcattgtccaata

SEQ ID NO: 407453 - DNA, 25 bp, Artificial
  probe
  misc_feature (1)..(25): SEQ ID NO: 5338; WAN024G7D; Start 119; Stop 143
tccattccagtcattgtccaatata

SEQ ID NO: 407454 - DNA, 25 bp, Artificial
  probe
  misc_feature (1)..(25): SEQ ID NO: 5338; WAN024G7D; Start 124; Stop 148
tccagtcattgtccaatatatacct

SEQ ID NO: 407455 - DNA, 25 bp, Artificial
  probe
  misc_feature (1)..(25): SEQ ID NO: 5338; WAN024G7D; Start 120; Stop 144
ccattccagtcattgtccaatatat

SEQ ID NO: 407456 - DNA, 25 bp, Artificial
  probe
  misc_feature (1)..(25): SEQ ID NO: 5338; WAN024G7D; Start 126; Stop 150
cagtcattgtccaatatatacctcc

SEQ ID NO: 407457 - DNA, 25 bp, Artificial
  probe
  misc_feature (1)..(25): SEQ ID NO: 5338; WAN024G7D; Start 125; Stop 149
ccagtcattgtccaatatatacctc

SEQ ID NO: 407458 - DNA, 25 bp, Artificial
  probe
  misc_feature (1)..(25): SEQ ID NO: 5338; WAN024G7D; Start 127; Stop 151
agtcattgtccaatatatacctcct

SEQ ID NO: 407459 - DNA, 25 bp, Artificial
  probe
  misc_feature (1)..(25): SEQ ID NO: 5338; WAN024G7D; Start 129; Stop 153
tcattgtccaatatatacctcctct

SEQ ID NO: 407460 - DNA, 25 bp, Artificial
  probe
  misc_feature (1)..(25): SEQ ID NO: 5338; WAN024G7D; Start 128; Stop 152
gtcattgtccaatatatacctcctc

SEQ ID NO: 407461 - DNA, 25 bp, Artificial
  probe
  misc_feature (1)..(25): SEQ ID NO: 5338; WAN024G7D; Start 123; Stop 147
ttccagtcattgtccaatatatacc

SEQ ID NO: 407462 - DNA, 25 bp, Artificial
  probe
  misc_feature (1)..(25): SEQ ID NO: 5338; WAN024G7D; Start 109; Stop 133
aatcagccaatccattccagtcatt

SEQ ID NO: 407463 - DNA, 25 bp, Artificial
  probe
  misc_feature (1)..(25): SEQ ID NO: 5338; WAN024G7D; Start 105; Stop 129
attaaatcagccaatccattccagt

SEQ ID NO: 407464 - DNA, 25 bp, Artificial
  probe
  misc_feature (1)..(25): SEQ ID NO: 5338; WAN024G7D; Start 104; Stop 128
tattaaatcagccaatccattccag

SEQ ID NO: 407465 - DNA, 25 bp, Artificial
  probe
  misc_feature (1)..(25): SEQ ID NO: 5338; WAN024G7D; Start 103; Stop 127
ctattaaatcagccaatccattcca

SEQ ID NO: 407466 - DNA, 25 bp, Artificial
  probe
  misc_feature (1)..(25): SEQ ID NO: 5338; WAN024G7D; Start 106; Stop 130
ttaaatcagccaatccattccagtc

SEQ ID NO: 407467 - DNA, 25 bp, Artificial
  probe
  misc_feature (1)..(25): SEQ ID NO: 5338; WAN024G7D; Start 196; Stop 220
gacattgacaagtgctttggattag

SEQ ID NO: 407468 - DNA, 25 bp, Artificial
  probe
  misc_feature (1)..(25): SEQ ID NO: 5338; WAN024G7D; Start 60; Stop 84
ttatctaaatctaaagcaccagcat

SEQ ID NO: 407469 - DNA, 25 bp, Artificial
  probe
  misc_feature (1)..(25): SEQ ID NO: 5338; WAN024G7D; Start 59; Stop 83
attatctaaatctaaagcaccagca

SEQ ID NO: 407470 - DNA, 25 bp, Artificial
  probe
  misc_feature (1)..(25): SEQ ID NO: 5338; WAN024G7D; Start 195; Stop 219
tgacattgacaagtgctttggatta

SEQ ID NO: 407471 - DNA, 25 bp, Artificial
  probe
  misc_feature (1)..(25): SEQ ID NO: 5338; WAN024G7D; Start 63; Stop 87
tctaaatctaaagcaccagcatatt

SEQ ID NO: 407472 - DNA, 25 bp, Artificial
  probe
  misc_feature (1)..(25): SEQ ID NO: 5338; WAN024G7D; Start 116; Stop 140
caatccattccagtcattgtccaat

SEQ ID NO: 407473 - DNA, 25 bp, Artificial
  probe
  misc_feature (1)..(25): SEQ ID NO: 5338; WAN024G7D; Start 62; Stop 86
atctaaatctaaagcaccagcatat

SEQ ID NO: 407474 - DNA, 25 bp, Artificial
  probe
  misc_feature (1)..(25): SEQ ID NO: 5338; WAN024G7D; Start 130; Stop 154
cattgtccaatatatacctcctcta

SEQ ID NO: 407475 - DNA, 25 bp, Artificial
  probe
  misc_feature (1)..(25): SEQ ID NO: 5338; WAN024G7D; Start 107; Stop 131
taaatcagccaatccattccagtca

SEQ ID NO: 407476 - DNA, 25 bp, Artificial
  probe
  misc_feature (1)..(25): SEQ ID NO: 5338; WAN024G7D; Start 194; Stop 218
ttgacattgacaagtgctttggatt

SEQ ID NO: 407477 - DNA, 25 bp, Artificial
  probe
  misc_feature (1)..(25): SEQ ID NO: 5338; WAN024G7D; Start 193; Stop 217
tttgacattgacaagtgctttggat

SEQ ID NO: 407478 - DNA, 25 bp, Artificial
  probe
  misc_feature (1)..(25): SEQ ID NO: 5338; WAN024G7D; Start 61; Stop 85
tatctaaatctaaagcaccagcata

SEQ ID NO: 407479 - DNA, 25 bp, Artificial
  probe
  misc_feature (1)..(25): SEQ ID NO: 5338; WAN024G7D; Start 122; Stop 146
attccagtcattgtccaatatatac

SEQ ID NO: 407480 - DNA, 25 bp, Artificial
  probe
  misc_feature (1)..(25): SEQ ID NO: 5338; WAN024G7D; Start 121; Stop 145
cattccagtcattgtccaatatata

SEQ ID NO: 407481 - DNA, 25 bp, Artificial
  probe
  misc_feature (1)..(25): SEQ ID NO: 5338; WAN024G7D; Start 108; Stop 132
aaatcagccaatccattccagtcat

SEQ ID NO: 407482 - DNA, 25 bp, Artificial
  probe
  misc_feature (1)..(25): SEQ ID NO: 5338; WAN024G7D; Start 44; Stop 68
cgttggatcgggtagattatctaaa

SEQ ID NO: 407483 - DNA, 25 bp, Artificial
  probe
  misc_feature (1)..(25): SEQ ID NO: 5338; WAN024G7D; Start 64; Stop 88
ctaaatctaaagcaccagcatattt

SEQ ID NO: 407484 - DNA, 25 bp, Artificial
  probe
  misc_feature (1)..(25): SEQ ID NO: 5339; WAN024DPG; Start 17; Stop 41
ctcaagttaattctatcacaggtgt

SEQ ID NO: 407485 - DNA, 25 bp, Artificial
  probe
  misc_feature (1)..(25): SEQ ID NO: 5339; WAN024DPG; Start 13; Stop 37
tcacctcaagttaattctatcacag

SEQ ID NO: 407486 - DNA, 25 bp, Artificial
  probe
  misc_feature (1)..(25): SEQ ID NO: 5339; WAN024DPG; Start 16; Stop 40
cctcaagttaattctatcacaggtg

SEQ ID NO: 407487 - DNA, 25 bp, Artificial
  probe
  misc_feature (1)..(25): SEQ ID NO: 5339; WAN024DPG; Start 14; Stop 38
cacctcaagttaattctatcacagg

SEQ ID NO: 407488 - DNA, 25 bp, Artificial
  probe
  misc_feature (1)..(25): SEQ ID NO: 5339; WAN024DPG; Start 12; Stop 36
atcacctcaagttaattctatcaca

SEQ ID NO: 407489 - DNA, 25 bp, Artificial
  probe
  misc_feature (1)..(25): SEQ ID NO: 5339; WAN024DPG; Start 11; Stop 35
catcacctcaagttaattctatcac

SEQ ID NO: 407490 - DNA, 25 bp, Artificial
  probe
  misc_feature (1)..(25): SEQ ID NO: 5339; WAN024DPG; Start 10; Stop 34
tcatcacctcaagttaattctatca

SEQ ID NO: 407491 - DNA, 25 bp, Artificial
  probe
  misc_feature (1)..(25): SEQ ID NO: 5339; WAN024DPG; Start 18; Stop 42
tcaagttaattctatcacaggtgta

SEQ ID NO: 407492 - DNA, 25 bp, Artificial
  probe
  misc_feature (1)..(25): SEQ ID NO: 5339; WAN024DPG; Start 26; Stop 50
attctatcacaggtgtaacacttgt

SEQ ID NO: 407493 - DNA, 25 bp, Artificial
  probe
  misc_feature (1)..(25): SEQ ID NO: 5339; WAN024DPG; Start 25; Stop 49
aattctatcacaggtgtaacacttg

SEQ ID NO: 407494 - DNA, 25 bp, Artificial
  probe
  misc_feature (1)..(25): SEQ ID NO: 5339; WAN024DPG; Start 21; Stop 45
agttaattctatcacaggtgtaaca

SEQ ID NO: 407495 - DNA, 25 bp, Artificial
  probe
  misc_feature (1)..(25): SEQ ID NO: 5339; WAN024DPG; Start 19; Stop 43
caagttaattctatcacaggtgtaa

SEQ ID NO: 407496 - DNA, 25 bp, Artificial
  probe
  misc_feature (1)..(25): SEQ ID NO: 5339; WAN024DPG; Start 9; Stop 33
ttcatcacctcaagttaattctatc

SEQ ID NO: 407497 - DNA, 25 bp, Artificial
  probe
  misc_feature (1)..(25): SEQ ID NO: 5339; WAN024DPG; Start 24; Stop 48
taattctatcacaggtgtaacactt

SEQ ID NO: 407498 - DNA, 25 bp, Artificial
  probe
  misc_feature (1)..(25): SEQ ID NO: 5339; WAN024DPG; Start 23; Stop 47
ttaattctatcacaggtgtaacact

SEQ ID NO: 407499 - DNA, 25 bp, Artificial
  probe
  misc_feature (1)..(25): SEQ ID NO: 5339; WAN024DPG; Start 22; Stop 46
gttaattctatcacaggtgtaacac

SEQ ID NO: 407500 - DNA, 25 bp, Artificial
  probe
  misc_feature (1)..(25): SEQ ID NO: 5339; WAN024DPG; Start 20; Stop 44
aagttaattctatcacaggtgtaac

SEQ ID NO: 407501 - DNA, 25 bp, Artificial
  probe
  misc_feature (1)..(25): SEQ ID NO: 5339; WAN024DPG; Start 3; Stop 27
gccattttcatcacctcaagttaat

SEQ ID NO: 407502 - DNA, 25 bp, Artificial
  probe
  misc_feature (1)..(25): SEQ ID NO: 5339; WAN024DPG; Start 34; Stop 58
acaggtgtaacacttgtgtcaactg

SEQ ID NO: 407503 - DNA, 25 bp, Artificial
  probe
  misc_feature (1)..(25): SEQ ID NO: 5339; WAN024DPG; Start 2; Stop 26
tgccattttcatcacctcaagttaa

SEQ ID NO: 407504 - DNA, 25 bp, Artificial
  probe
  misc_feature (1)..(25): SEQ ID NO: 5339; WAN024DPG; Start 1; Stop 25
ttgccattttcatcacctcaagtta

SEQ ID NO: 407505 - DNA, 25 bp, Artificial
  probe
  misc_feature (1)..(25): SEQ ID NO: 5339; WAN024DPG; Start 8; Stop 32
tttcatcacctcaagttaattctat

SEQ ID NO: 407506 - DNA, 25 bp, Artificial
  probe
  misc_feature (1)..(25): SEQ ID NO: 5339; WAN024DPG; Start 38; Stop 62
gtgtaacacttgtgtcaactggctt

SEQ ID NO: 407507 - DNA, 25 bp, Artificial
  probe
  misc_feature (1)..(25): SEQ ID NO: 5339; WAN024DPG; Start 4; Stop 28
ccattttcatcacctcaagttaatt

SEQ ID NO: 407508 - DNA, 25 bp, Artificial
  probe
  misc_feature (1)..(25): SEQ ID NO: 5339; WAN024DPG; Start 35; Stop 59
caggtgtaacacttgtgtcaactgg

SEQ ID NO: 407509 - DNA, 25 bp, Artificial
  probe
  misc_feature (1)..(25): SEQ ID NO: 5339; WAN024DPG; Start 44; Stop 68
cacttgtgtcaactggcttttataa

SEQ ID NO: 407510 - DNA, 25 bp, Artificial
  probe
  misc_feature (1)..(25): SEQ ID NO: 5339; WAN024DPG; Start 45; Stop 69
acttgtgtcaactggcttttataat

SEQ ID NO: 407511 - DNA, 25 bp, Artificial
  probe
  misc_feature (1)..(25): SEQ ID NO: 5339; WAN024DPG; Start 39; Stop 63
tgtaacacttgtgtcaactggcttt

SEQ ID NO: 407512 - DNA, 25 bp, Artificial
  probe
  misc_feature (1)..(25): SEQ ID NO: 5339; WAN024DPG; Start 15; Stop 39
acctcaagttaattctatcacaggt

SEQ ID NO: 407513 - DNA, 25 bp, Artificial
  probe
  misc_feature (1)..(25): SEQ ID NO: 5339; WAN024DPG; Start 27; Stop 51
ttctatcacaggtgtaacacttgtg

SEQ ID NO: 407514 - DNA, 25 bp, Artificial
  probe
  misc_feature (1)..(25): SEQ ID NO: 5339; WAN024DPG; Start 43; Stop 67
acacttgtgtcaactggcttttata

SEQ ID NO: 407515 - DNA, 25 bp, Artificial
  probe
  misc_feature (1)..(25): SEQ ID NO: 5339; WAN024DPG; Start 29; Stop 53
ctatcacaggtgtaacacttgtgtc

SEQ ID NO: 407516 - DNA, 25 bp, Artificial
  probe
  misc_feature (1)..(25): SEQ ID NO: 5339; WAN024DPG; Start 48; Stop 72
tgtgtcaactggcttttataataca

SEQ ID NO: 407517 - DNA, 25 bp, Artificial
  probe
  misc_feature (1)..(25): SEQ ID NO: 5340; WAN024FYO; Start 49; Stop 73
cttaacagcagttcgcatgtaagaa

SEQ ID NO: 407518 - DNA, 25 bp, Artificial
  probe
  misc_feature (1)..(25): SEQ ID NO: 5340; WAN024FYO; Start 170; Stop 194
agagctgcttcttcttcattggtag

SEQ ID NO: 407519 - DNA, 25 bp, Artificial
  probe
  misc_feature (1)..(25): SEQ ID NO: 5340; WAN024FYO; Start 177; Stop 201
cttcttcttcattggtagccgtttg

SEQ ID NO: 407520 - DNA, 25 bp, Artificial
  probe
  misc_feature (1)..(25): SEQ ID NO: 5340; WAN024FYO; Start 217; Stop 241
aatatccaattctttgagagcttgc

SEQ ID NO: 407521 - DNA, 25 bp, Artificial
  probe
  misc_feature (1)..(25): SEQ ID NO: 5340; WAN024FYO; Start 218; Stop 242
atatccaattctttgagagcttgct

SEQ ID NO: 407522 - DNA, 25 bp, Artificial
  probe
  misc_feature (1)..(25): SEQ ID NO: 5340; WAN024FYO; Start 178; Stop 202
ttcttcttcattggtagccgtttgt

SEQ ID NO: 407523 - DNA, 25 bp, Artificial
  probe
  misc_feature (1)..(25): SEQ ID NO: 5340; WAN024FYO; Start 48; Stop 72
ccttaacagcagttcgcatgtaaga

SEQ ID NO: 407524 - DNA, 25 bp, Artificial
  probe
  misc_feature (1)..(25): SEQ ID NO: 5340; WAN024FYO; Start 179; Stop 203
tcttcttcattggtagccgtttgtc

SEQ ID NO: 407525 - DNA, 25 bp, Artificial
  probe
  misc_feature (1)..(25): SEQ ID NO: 5340; WAN024FYO; Start 169; Stop 193
aagagctgcttcttcttcattggta

SEQ ID NO: 407526 - DNA, 25 bp, Artificial
  probe
  misc_feature (1)..(25): SEQ ID NO: 5340; WAN024FYO; Start 219; Stop 243
tatccaattctttgagagcttgctc

SEQ ID NO: 407527 - DNA, 25 bp, Artificial
  probe
  misc_feature (1)..(25): SEQ ID NO: 5340; WAN024FYO; Start 215; Stop 239
ggaatatccaattctttgagagctt

SEQ ID NO: 407528 - DNA, 25 bp, Artificial
  probe
  misc_feature (1)..(25): SEQ ID NO: 5340; WAN024FYO; Start 121; Stop 145
tacataagatgggcggacaagaact

SEQ ID NO: 407529 - DNA, 25 bp, Artificial
  probe
  misc_feature (1)..(25): SEQ ID NO: 5340; WAN024FYO; Start 38; Stop 62
tctggactagccttaacagcagttc

SEQ ID NO: 407530 - DNA, 25 bp, Artificial
  probe
  misc_feature (1)..(25): SEQ ID NO: 5340; WAN024FYO; Start 50; Stop 74
ttaacagcagttcgcatgtaagaac

SEQ ID NO: 407531 - DNA, 25 bp, Artificial
  probe
  misc_feature (1)..(25): SEQ ID NO: 5340; WAN024FYO; Start 107; Stop 131
gcacgtccaccaagtacataagatg

SEQ ID NO: 407532 - DNA, 25 bp, Artificial
  probe
  misc_feature (1)..(25): SEQ ID NO: 5340; WAN024FYO; Start 216; Stop 240
gaatatccaattctttgagagcttg

SEQ ID NO: 407533 - DNA, 25 bp, Artificial
  probe
  misc_feature (1)..(25): SEQ ID NO: 5340; WAN024FYO; Start 120; Stop 144
gtacataagatgggcggacaagaac

SEQ ID NO: 407534 - DNA, 25 bp, Artificial
  probe
  misc_feature (1)..(25): SEQ ID NO: 5340; WAN024FYO; Start 117; Stop 141
caagtacataagatgggcggacaag

SEQ ID NO: 407535 - DNA, 25 bp, Artificial
  probe
  misc_feature (1)..(25): SEQ ID NO: 5340; WAN024FYO; Start 37; Stop 61
gtctggactagccttaacagcagtt

SEQ ID NO: 407536 - DNA, 25 bp, Artificial
  probe
  misc_feature (1)..(25): SEQ ID NO: 5340; WAN024FYO; Start 108; Stop 132
cacgtccaccaagtacataagatgg

SEQ ID NO: 407537 - DNA, 25 bp, Artificial
  probe
  misc_feature (1)..(25): SEQ ID NO: 5340; WAN024FYO; Start 119; Stop 143
agtacataagatgggcggacaagaa

SEQ ID NO: 407538 - DNA, 25 bp, Artificial
  probe
  misc_feature (1)..(25): SEQ ID NO: 5340; WAN024FYO; Start 118; Stop 142
aagtacataagatgggcggacaaga

SEQ ID NO: 407539 - DNA, 25 bp, Artificial
  probe
  misc_feature (1)..(25): SEQ ID NO: 5340; WAN024FYO; Start 180; Stop 204
cttcttcattggtagccgtttgtcc

SEQ ID NO: 407540 - DNA, 25 bp, Artificial
  probe
  misc_feature (1)..(25): SEQ ID NO: 5340; WAN024FYO; Start 45; Stop 69
tagccttaacagcagttcgcatgta

SEQ ID NO: 407541 - DNA, 25 bp, Artificial
  probe
  misc_feature (1)..(25): SEQ ID NO: 5340; WAN024FYO; Start 223; Stop 247
caattctttgagagcttgctcgaag

SEQ ID NO: 407542 - DNA, 25 bp, Artificial
  probe
  misc_feature (1)..(25): SEQ ID NO: 5340; WAN024FYO; Start 168; Stop 192
caagagctgcttcttcttcattggt

SEQ ID NO: 407543 - DNA, 25 bp, Artificial
  probe
  misc_feature (1)..(25): SEQ ID NO: 5340; WAN024FYO; Start 181; Stop 205
ttcttcattggtagccgtttgtcct

SEQ ID NO: 407544 - DNA, 25 bp, Artificial
  probe
  misc_feature (1)..(25): SEQ ID NO: 5340; WAN024FYO; Start 61; Stop 85
tcgcatgtaagaacgaaggtcttct

SEQ ID NO: 407545 - DNA, 25 bp, Artificial
  probe
  misc_feature (1)..(25): SEQ ID NO: 5340; WAN024FYO; Start 106; Stop 130
ggcacgtccaccaagtacataagat

SEQ ID NO: 407546 - DNA, 25 bp, Artificial
  probe
  misc_feature (1)..(25): SEQ ID NO: 5340; WAN024FYO; Start 47; Stop 71
gccttaacagcagttcgcatgtaag

SEQ ID NO: 407547 - DNA, 25 bp, Artificial
  probe
  misc_feature (1)..(25): SEQ ID NO: 5340; WAN024FYO; Start 171; Stop 195
gagctgcttcttcttcattggtagc

SEQ ID NO: 407548 - DNA, 25 bp, Artificial
  probe
  misc_feature (1)..(25): SEQ ID NO: 5340; WAN024FYO; Start 46; Stop 70
agccttaacagcagttcgcatgtaa

SEQ ID NO: 407549 - DNA, 25 bp, Artificial
  probe
  misc_feature (1)..(25): SEQ ID NO: 5340; WAN024FYO; Start 220; Stop 244
atccaattctttgagagcttgctcg

SEQ ID NO: 407550 - DNA, 25 bp, Artificial
  probe
  misc_feature (1)..(25): SEQ ID NO: 5341; WAN024EX8; Start 155; Stop 179
ccaatatgagcatagatagcctgat

SEQ ID NO: 407551 - DNA, 25 bp, Artificial
  probe
  misc_feature (1)..(25): SEQ ID NO: 5341; WAN024EX8; Start 104; Stop 128
ctcgtcaactgatggtattcttctc

SEQ ID NO: 407552 - DNA, 25 bp, Artificial
  probe
  misc_feature (1)..(25): SEQ ID NO: 5341; WAN024EX8; Start 154; Stop 178
accaatatgagcatagatagcctga

SEQ ID NO: 407553 - DNA, 25 bp, Artificial
  probe
  misc_feature (1)..(25): SEQ ID NO: 5341; WAN024EX8; Start 153; Stop 177
caccaatatgagcatagatagcctg

SEQ ID NO: 407554 - DNA, 25 bp, Artificial
  probe
  misc_feature (1)..(25): SEQ ID NO: 5341; WAN024EX8; Start 151; Stop 175
atcaccaatatgagcatagatagcc

SEQ ID NO: 407555 - DNA, 25 bp, Artificial
  probe
  misc_feature (1)..(25): SEQ ID NO: 5341; WAN024EX8; Start 152; Stop 176
tcaccaatatgagcatagatagcct

SEQ ID NO: 407556 - DNA, 25 bp, Artificial
  probe
  misc_feature (1)..(25): SEQ ID NO: 5341; WAN024EX8; Start 156; Stop 180
caatatgagcatagatagcctgatt

SEQ ID NO: 407557 - DNA, 25 bp, Artificial
  probe
  misc_feature (1)..(25): SEQ ID NO: 5341; WAN024EX8; Start 147; Stop 171
gcgaatcaccaatatgagcatagat

SEQ ID NO: 407558 - DNA, 25 bp, Artificial
  probe
  misc_feature (1)..(25): SEQ ID NO: 5341; WAN024EX8; Start 150; Stop 174
aatcaccaatatgagcatagatagc

SEQ ID NO: 407559 - DNA, 25 bp, Artificial
  probe
  misc_feature (1)..(25): SEQ ID NO: 5341; WAN024EX8; Start 105; Stop 129
tcgtcaactgatggtattcttctcc

SEQ ID NO: 407560 - DNA, 25 bp, Artificial
  probe
  misc_feature (1)..(25): SEQ ID NO: 5341; WAN024EX8; Start 148; Stop 172
cgaatcaccaatatgagcatagata

SEQ ID NO: 407561 - DNA, 25 bp, Artificial
  probe
  misc_feature (1)..(25): SEQ ID NO: 5341; WAN024EX8; Start 161; Stop 185
tgagcatagatagcctgattatcaa

SEQ ID NO: 407562 - DNA, 25 bp, Artificial
  probe
  misc_feature (1)..(25): SEQ ID NO: 5341; WAN024EX8; Start 160; Stop 184
atgagcatagatagcctgattatca

SEQ ID NO: 407563 - DNA, 25 bp, Artificial
  probe
  misc_feature (1)..(25): SEQ ID NO: 5341; WAN024EX8; Start 180; Stop 204
tatcaataatagcaaggacttccaa

SEQ ID NO: 407564 - DNA, 25 bp, Artificial
  probe
  misc_feature (1)..(25): SEQ ID NO: 5341; WAN024EX8; Start 179; Stop 203
ttatcaataatagcaaggacttcca

SEQ ID NO: 407565 - DNA, 25 bp, Artificial
  probe
  misc_feature (1)..(25): SEQ ID NO: 5341; WAN024EX8; Start 115; Stop 139
atggtattcttctccacgaatcaag

SEQ ID NO: 407566 - DNA, 25 bp, Artificial
  probe
  misc_feature (1)..(25): SEQ ID NO: 5341; WAN024EX8; Start 114; Stop 138
gatggtattcttctccacgaatcaa

SEQ ID NO: 407567 - DNA, 25 bp, Artificial
  probe
  misc_feature (1)..(25): SEQ ID NO: 5341; WAN024EX8; Start 103; Stop 127
gctcgtcaactgatggtattcttct

SEQ ID NO: 407568 - DNA, 25 bp, Artificial
  probe
  misc_feature (1)..(25): SEQ ID NO: 5341; WAN024EX8; Start 74; Stop 98
ttgagcaattcattaaccaaggaat

SEQ ID NO: 407569 - DNA, 25 bp, Artificial
  probe
  misc_feature (1)..(25): SEQ ID NO: 5341; WAN024EX8; Start 173; Stop 197
gcctgattatcaataatagcaagga

SEQ ID NO: 407570 - DNA, 25 bp, Artificial
  probe
  misc_feature (1)..(25): SEQ ID NO: 5341; WAN024EX8; Start 69; Stop 93
cagccttgagcaattcattaaccaa

SEQ ID NO: 407571 - DNA, 25 bp, Artificial
  probe
  misc_feature (1)..(25): SEQ ID NO: 5341; WAN024EX8; Start 112; Stop 136
ctgatggtattcttctccacgaatc

SEQ ID NO: 407572 - DNA, 25 bp, Artificial
  probe
  misc_feature (1)..(25): SEQ ID NO: 5341; WAN024EX8; Start 172; Stop 196
agcctgattatcaataatagcaagg

SEQ ID NO: 407573 - DNA, 25 bp, Artificial
  probe
  misc_feature (1)..(25): SEQ ID NO: 5341; WAN024EX8; Start 107; Stop 131
gtcaactgatggtattcttctccac

SEQ ID NO: 407574 - DNA, 25 bp, Artificial
  probe
  misc_feature (1)..(25): SEQ ID NO: 5341; WAN024EX8; Start 162; Stop 186
gagcatagatagcctgattatcaat

SEQ ID NO: 407575 - DNA, 25 bp, Artificial
  probe
  misc_feature (1)..(25): SEQ ID NO: 5341; WAN024EX8; Start 75; Stop 99
tgagcaattcattaaccaaggaatg

SEQ ID NO: 407576 - DNA, 25 bp, Artificial
  probe
  misc_feature (1)..(25): SEQ ID NO: 5341; WAN024EX8; Start 111; Stop 135
actgatggtattcttctccacgaat

SEQ ID NO: 407577 - DNA, 25 bp, Artificial
  probe
  misc_feature (1)..(25): SEQ ID NO: 5341; WAN024EX8; Start 66; Stop 90
gaccagccttgagcaattcattaac

SEQ ID NO: 407578 - DNA, 25 bp, Artificial
  probe
  misc_feature (1)..(25): SEQ ID NO: 5341; WAN024EX8; Start 110; Stop 134
aactgatggtattcttctccacgaa

SEQ ID NO: 407579 - DNA, 25 bp, Artificial
  probe
  misc_feature (1)..(25): SEQ ID NO: 5341; WAN024EX8; Start 157; Stop 181
aatatgagcatagatagcctgatta

SEQ ID NO: 407580 - DNA, 25 bp, Artificial
  probe
  misc_feature (1)..(25): SEQ ID NO: 5341; WAN024EX8; Start 182; Stop 206
tcaataatagcaaggacttccaaag

SEQ ID NO: 407581 - DNA, 25 bp, Artificial
  probe
  misc_feature (1)..(25): SEQ ID NO: 5341; WAN024EX8; Start 159; Stop 183
tatgagcatagatagcctgattatc

SEQ ID NO: 407582 - DNA, 25 bp, Artificial
  probe
  misc_feature (1)..(25): SEQ ID NO: 5341; WAN024EX8; Start 65; Stop 89
tgaccagccttgagcaattcattaa

SEQ ID NO: 407583 - DNA, 25 bp, Artificial
  probe
  misc_feature (1)..(25): SEQ ID NO: 5342; WAN024D3J; Start 62; Stop 86
ccagaagcatcattcaagagtcctt

SEQ ID NO: 407584 - DNA, 25 bp, Artificial
  probe
  misc_feature (1)..(25): SEQ ID NO: 5342; WAN024D3J; Start 271; Stop 295
tatgagataaacaatgattcgccag

SEQ ID NO: 407585 - DNA, 25 bp, Artificial
  probe
  misc_feature (1)..(25): SEQ ID NO: 5342; WAN024D3J; Start 272; Stop 296
atgagataaacaatgattcgccagt

SEQ ID NO: 407586 - DNA, 25 bp, Artificial
  probe
  misc_feature (1)..(25): SEQ ID NO: 5342; WAN024D3J; Start 270; Stop 294
atatgagataaacaatgattcgcca

SEQ ID NO: 407587 - DNA, 25 bp, Artificial
  probe
  misc_feature (1)..(25): SEQ ID NO: 5342; WAN024D3J; Start 60; Stop 84
aaccagaagcatcattcaagagtcc

SEQ ID NO: 407588 - DNA, 25 bp, Artificial
  probe
  misc_feature (1)..(25): SEQ ID NO: 5342; WAN024D3J; Start 273; Stop 297
tgagataaacaatgattcgccagtg

SEQ ID NO: 407589 - DNA, 25 bp, Artificial
  probe
  misc_feature (1)..(25): SEQ ID NO: 5342; WAN024D3J; Start 59; Stop 83
aaaccagaagcatcattcaagagtc

SEQ ID NO: 407590 - DNA, 25 bp, Artificial
  probe
  misc_feature (1)..(25): SEQ ID NO: 5342; WAN024D3J; Start 58; Stop 82
caaaccagaagcatcattcaagagt

SEQ ID NO: 407591 - DNA, 25 bp, Artificial
  probe
  misc_feature (1)..(25): SEQ ID NO: 5342; WAN024D3J; Start 269; Stop 293
aatatgagataaacaatgattcgcc

SEQ ID NO: 407592 - DNA, 25 bp, Artificial
  probe
  misc_feature (1)..(25): SEQ ID NO: 5342; WAN024D3J; Start 57; Stop 81
ccaaaccagaagcatcattcaagag

SEQ ID NO: 407593 - DNA, 25 bp, Artificial
  probe
  misc_feature (1)..(25): SEQ ID NO: 5342; WAN024D3J; Start 274; Stop 298
gagataaacaatgattcgccagtgt

SEQ ID NO: 407594 - DNA, 25 bp, Artificial
  probe
  misc_feature (1)..(25): SEQ ID NO: 5342; WAN024D3J; Start 61; Stop 85
accagaagcatcattcaagagtcct

SEQ ID NO: 407595 - DNA, 25 bp, Artificial
  probe
  misc_feature (1)..(25): SEQ ID NO: 5342; WAN024D3J; Start 56; Stop 80
accaaaccagaagcatcattcaaga

SEQ ID NO: 407596 - DNA, 25 bp, Artificial
  probe
  misc_feature (1)..(25): SEQ ID NO: 5342; WAN024D3J; Start 55; Stop 79
caccaaaccagaagcatcattcaag

SEQ ID NO: 407597 - DNA, 25 bp, Artificial
  probe
  misc_feature (1)..(25): SEQ ID NO: 5342; WAN024D3J; Start 63; Stop 87
cagaagcatcattcaagagtccttc

SEQ ID NO: 407598 - DNA, 25 bp, Artificial
  probe
  misc_feature (1)..(25): SEQ ID NO: 5342; WAN024D3J; Start 79; Stop 103
gagtccttcgcccttaagaatattg

SEQ ID NO: 407599 - DNA, 25 bp, Artificial
  probe
  misc_feature (1)..(25): SEQ ID NO: 5342; WAN024D3J; Start 78; Stop 102
agagtccttcgcccttaagaatatt

SEQ ID NO: 407600 - DNA, 25 bp, Artificial
  probe
  misc_feature (1)..(25): SEQ ID NO: 5342; WAN024D3J; Start 77; Stop 101
aagagtccttcgcccttaagaatat

SEQ ID NO: 407601 - DNA, 25 bp, Artificial
  probe
  misc_feature (1)..(25): SEQ ID NO: 5342; WAN024D3J; Start 268; Stop 292
aaatatgagataaacaatgattcgc

SEQ ID NO: 407602 - DNA, 25 bp, Artificial
  probe
  misc_feature (1)..(25): SEQ ID NO: 5342; WAN024D3J; Start 70; Stop 94
atcattcaagagtccttcgccctta

SEQ ID NO: 407603 - DNA, 25 bp, Artificial
  probe
  misc_feature (1)..(25): SEQ ID NO: 5342; WAN024D3J; Start 84; Stop 108
cttcgcccttaagaatattggacac

SEQ ID NO: 407604 - DNA, 25 bp, Artificial
  probe
  misc_feature (1)..(25): SEQ ID NO: 5342; WAN024D3J; Start 262; Stop 286
cactggaaatatgagataaacaatg

SEQ ID NO: 407605 - DNA, 25 bp, Artificial
  probe
  misc_feature (1)..(25): SEQ ID NO: 5342; WAN024D3J; Start 64; Stop 88
agaagcatcattcaagagtccttcg

SEQ ID NO: 407606 - DNA, 25 bp, Artificial
  probe
  misc_feature (1)..(25): SEQ ID NO: 5342; WAN024D3J; Start 263; Stop 287
actggaaatatgagataaacaatga

SEQ ID NO: 407607 - DNA, 25 bp, Artificial
  probe
  misc_feature (1)..(25): SEQ ID NO: 5342; WAN024D3J; Start 71; Stop 95
tcattcaagagtccttcgcccttaa

SEQ ID NO: 407608 - DNA, 25 bp, Artificial
  probe
  misc_feature (1)..(25): SEQ ID NO: 5342; WAN024D3J; Start 76; Stop 100
caagagtccttcgcccttaagaata

SEQ ID NO: 407609 - DNA, 25 bp, Artificial
  probe
  misc_feature (1)..(25): SEQ ID NO: 5342; WAN024D3J; Start 92; Stop 116
ttaagaatattggacacgcgcttag

SEQ ID NO: 407610 - DNA, 25 bp, Artificial
  probe
  misc_feature (1)..(25): SEQ ID NO: 5342; WAN024D3J; Start 91; Stop 115
cttaagaatattggacacgcgctta

SEQ ID NO: 407611 - DNA, 25 bp, Artificial
  probe
  misc_feature (1)..(25): SEQ ID NO: 5342; WAN024D3J; Start 80; Stop 104
agtccttcgcccttaagaatattgg

SEQ ID NO: 407612 - DNA, 25 bp, Artificial
  probe
  misc_feature (1)..(25): SEQ ID NO: 5342; WAN024D3J; Start 54; Stop 78
ccaccaaaccagaagcatcattcaa

SEQ ID NO: 407613 - DNA, 25 bp, Artificial
  probe
  misc_feature (1)..(25): SEQ ID NO: 5342; WAN024D3J; Start 261; Stop 285
tcactggaaatatgagataaacaat

SEQ ID NO: 407614 - DNA, 25 bp, Artificial
  probe
  misc_feature (1)..(25): SEQ ID NO: 5342; WAN024D3J; Start 260; Stop 284
atcactggaaatatgagataaacaa

SEQ ID NO: 407615 - DNA, 25 bp, Artificial
  probe
  misc_feature (1)..(25): SEQ ID NO: 5342; WAN024D3J; Start 259; Stop 283
aatcactggaaatatgagataaaca

SEQ ID NO: 407616 - DNA, 25 bp, Artificial
  probe
  misc_feature (1)..(25): SEQ ID NO: 5343; WAN024G2S; Start 225; Stop 249
ttctaattgtaagccagcagcacta

SEQ ID NO: 407617 - DNA, 25 bp, Artificial
  probe
  misc_feature (1)..(25): SEQ ID NO: 5343; WAN024G2S; Start 226; Stop 250
tctaattgtaagccagcagcactag

SEQ ID NO: 407618 - DNA, 25 bp, Artificial
  probe
  misc_feature (1)..(25): SEQ ID NO: 5343; WAN024G2S; Start 217; Stop 241
agagcgtcttctaattgtaagccag

SEQ ID NO: 407619 - DNA, 25 bp, Artificial
  probe
  misc_feature (1)..(25): SEQ ID NO: 5343; WAN024G2S; Start 26; Stop 50
acaatttatcatcttcaaaggcagc

SEQ ID NO: 407620 - DNA, 25 bp, Artificial
  probe
  misc_feature (1)..(25): SEQ ID NO: 5343; WAN024G2S; Start 25; Stop 49
aacaatttatcatcttcaaaggcag

SEQ ID NO: 407621 - DNA, 25 bp, Artificial
  probe
  misc_feature (1)..(25): SEQ ID NO: 5343; WAN024G2S; Start 170; Stop 194
aatctaattgcccagcctctacttt

SEQ ID NO: 407622 - DNA, 25 bp, Artificial
  probe
  misc_feature (1)..(25): SEQ ID NO: 5343; WAN024G2S; Start 169; Stop 193
aaatctaattgcccagcctctactt

SEQ ID NO: 407623 - DNA, 25 bp, Artificial
  probe
  misc_feature (1)..(25): SEQ ID NO: 5343; WAN024G2S; Start 224; Stop 248
cttctaattgtaagccagcagcact

SEQ ID NO: 407624 - DNA, 25 bp, Artificial
  probe
  misc_feature (1)..(25): SEQ ID NO: 5343; WAN024G2S; Start 223; Stop 247
tcttctaattgtaagccagcagcac

SEQ ID NO: 407625 - DNA, 25 bp, Artificial
  probe
  misc_feature (1)..(25): SEQ ID NO: 5343; WAN024G2S; Start 222; Stop 246
gtcttctaattgtaagccagcagca

SEQ ID NO: 407626 - DNA, 25 bp, Artificial
  probe
  misc_feature (1)..(25): SEQ ID NO: 5343; WAN024G2S; Start 27; Stop 51
caatttatcatcttcaaaggcagcc

SEQ ID NO: 407627 - DNA, 25 bp, Artificial
  probe
  misc_feature (1)..(25): SEQ ID NO: 5343; WAN024G2S; Start 28; Stop 52
aatttatcatcttcaaaggcagcca

SEQ ID NO: 407628 - DNA, 25 bp, Artificial
  probe
  misc_feature (1)..(25): SEQ ID NO: 5343; WAN024G2S; Start 247; Stop 271
ctagtacgagtcaaatgggacatat

SEQ ID NO: 407629 - DNA, 25 bp, Artificial
  probe
  misc_feature (1)..(25): SEQ ID NO: 5343; WAN024G2S; Start 215; Stop 239
caagagcgtcttctaattgtaagcc

SEQ ID NO: 407630 - DNA, 25 bp, Artificial
  probe
  misc_feature (1)..(25): SEQ ID NO: 5343; WAN024G2S; Start 213; Stop 237
ggcaagagcgtcttctaattgtaag

SEQ ID NO: 407631 - DNA, 25 bp, Artificial
  probe
  misc_feature (1)..(25): SEQ ID NO: 5343; WAN024G2S; Start 29; Stop 53
atttatcatcttcaaaggcagccag

SEQ ID NO: 407632 - DNA, 25 bp, Artificial
  probe
  misc_feature (1)..(25): SEQ ID NO: 5343; WAN024G2S; Start 216; Stop 240
aagagcgtcttctaattgtaagcca

SEQ ID NO: 407633 - DNA, 25 bp, Artificial
  probe
  misc_feature (1)..(25): SEQ ID NO: 5343; WAN024G2S; Start 212; Stop 236
aggcaagagcgtcttctaattgtaa

SEQ ID NO: 407634 - DNA, 25 bp, Artificial
  probe
  misc_feature (1)..(25): SEQ ID NO: 5343; WAN024G2S; Start 211; Stop 235
aaggcaagagcgtcttctaattgta

SEQ ID NO: 407635 - DNA, 25 bp, Artificial
  probe
  misc_feature (1)..(25): SEQ ID NO: 5343; WAN024G2S; Start 228; Stop 252
taattgtaagccagcagcactagta

SEQ ID NO: 407636 - DNA, 25 bp, Artificial
  probe
  misc_feature (1)..(25): SEQ ID NO: 5343; WAN024G2S; Start 214; Stop 238
gcaagagcgtcttctaattgtaagc

SEQ ID NO: 407637 - DNA, 25 bp, Artificial
  probe
  misc_feature (1)..(25): SEQ ID NO: 5343; WAN024G2S; Start 24; Stop 48
taacaatttatcatcttcaaaggca

SEQ ID NO: 407638 - DNA, 25 bp, Artificial
  probe
  misc_feature (1)..(25): SEQ ID NO: 5343; WAN024G2S; Start 20; Stop 44
tggctaacaatttatcatcttcaaa

SEQ ID NO: 407639 - DNA, 25 bp, Artificial
  probe
  misc_feature (1)..(25): SEQ ID NO: 5343; WAN024G2S; Start 218; Stop 242
gagcgtcttctaattgtaagccagc

SEQ ID NO: 407640 - DNA, 25 bp, Artificial
  probe
  misc_feature (1)..(25): SEQ ID NO: 5343; WAN024G2S; Start 19; Stop 43
atggctaacaatttatcatcttcaa

SEQ ID NO: 407641 - DNA, 25 bp, Artificial
  probe
  misc_feature (1)..(25): SEQ ID NO: 5343; WAN024G2S; Start 18; Stop 42
aatggctaacaatttatcatcttca

SEQ ID NO: 407642 - DNA, 25 bp, Artificial
  probe
  misc_feature (1)..(25): SEQ ID NO: 5343; WAN024G2S; Start 23; Stop 47
ctaacaatttatcatcttcaaaggc

SEQ ID NO: 407643 - DNA, 25 bp, Artificial
  probe
  misc_feature (1)..(25): SEQ ID NO: 5343; WAN024G2S; Start 22; Stop 46
gctaacaatttatcatcttcaaagg

SEQ ID NO: 407644 - DNA, 25 bp, Artificial
  probe
  misc_feature (1)..(25): SEQ ID NO: 5343; WAN024G2S; Start 21; Stop 45
ggctaacaatttatcatcttcaaag

SEQ ID NO: 407645 - DNA, 25 bp, Artificial
  probe
  misc_feature (1)..(25): SEQ ID NO: 5343; WAN024G2S; Start 221; Stop 245
cgtcttctaattgtaagccagcagc

SEQ ID NO: 407646 - DNA, 25 bp, Artificial
  probe
  misc_feature (1)..(25): SEQ ID NO: 5343; WAN024G2S; Start 220; Stop 244
gcgtcttctaattgtaagccagcag

SEQ ID NO: 407647 - DNA, 25 bp, Artificial
  probe
  misc_feature (1)..(25): SEQ ID NO: 5343; WAN024G2S; Start 143; Stop 167
ctgtcccaatctctaaaggatggag

SEQ ID NO: 407648 - DNA, 25 bp, Artificial
  probe
  misc_feature (1)..(25): SEQ ID NO: 5343; WAN024G2S; Start 31; Stop 55
ttatcatcttcaaaggcagccagtt

SEQ ID NO: 407649 - DNA, 25 bp, Artificial
  probe
  misc_feature (1)..(25): SEQ ID NO: 5344; WAN024EY2; Start 218; Stop 242
gcataaacatcactttgggtatcta

SEQ ID NO: 407650 - DNA, 25 bp, Artificial
  probe
  misc_feature (1)..(25): SEQ ID NO: 5344; WAN024EY2; Start 217; Stop 241
ggcataaacatcactttgggtatct

SEQ ID NO: 407651 - DNA, 25 bp, Artificial
  probe
  misc_feature (1)..(25): SEQ ID NO: 5344; WAN024EY2; Start 215; Stop 239
atggcataaacatcactttgggtat

SEQ ID NO: 407652 - DNA, 25 bp, Artificial
  probe
  misc_feature (1)..(25): SEQ ID NO: 5344; WAN024EY2; Start 216; Stop 240
tggcataaacatcactttgggtatc

SEQ ID NO: 407653 - DNA, 25 bp, Artificial
  probe
  misc_feature (1)..(25): SEQ ID NO: 5344; WAN024EY2; Start 214; Stop 238
catggcataaacatcactttgggta

SEQ ID NO: 407654 - DNA, 25 bp, Artificial
  probe
  misc_feature (1)..(25): SEQ ID NO: 5344; WAN024EY2; Start 124; Stop 148
gatagactgataaccattggccttg

SEQ ID NO: 407655 - DNA, 25 bp, Artificial
  probe
  misc_feature (1)..(25): SEQ ID NO: 5344; WAN024EY2; Start 210; Stop 234
caagcatggcataaacatcactttg

SEQ ID NO: 407656 - DNA, 25 bp, Artificial
  probe
  misc_feature (1)..(25): SEQ ID NO: 5344; WAN024EY2; Start 123; Stop 147
ggatagactgataaccattggcctt

SEQ ID NO: 407657 - DNA, 25 bp, Artificial
  probe
  misc_feature (1)..(25): SEQ ID NO: 5344; WAN024EY2; Start 219; Stop 243
cataaacatcactttgggtatctaa

SEQ ID NO: 407658 - DNA, 25 bp, Artificial
  probe
  misc_feature (1)..(25): SEQ ID NO: 5344; WAN024EY2; Start 211; Stop 235
aagcatggcataaacatcactttgg

SEQ ID NO: 407659 - DNA, 25 bp, Artificial
  probe
  misc_feature (1)..(25): SEQ ID NO: 5344; WAN024EY2; Start 151; Stop 175
gttggcgatatagtctttgaagcga

SEQ ID NO: 407660 - DNA, 25 bp, Artificial
  probe
  misc_feature (1)..(25): SEQ ID NO: 5344; WAN024EY2; Start 115; Stop 139
agtcgtatggatagactgataacca

SEQ ID NO: 407661 - DNA, 25 bp, Artificial
  probe
  misc_feature (1)..(25): SEQ ID NO: 5344; WAN024EY2; Start 120; Stop 144
tatggatagactgataaccattggc

SEQ ID NO: 407662 - DNA, 25 bp, Artificial
  probe
  misc_feature (1)..(25): SEQ ID NO: 5344; WAN024EY2; Start 116; Stop 140
gtcgtatggatagactgataaccat

SEQ ID NO: 407663 - DNA, 25 bp, Artificial
  probe
  misc_feature (1)..(25): SEQ ID NO: 5344; WAN024EY2; Start 206; Stop 230
taaccaagcatggcataaacatcac

SEQ ID NO: 407664 - DNA, 25 bp, Artificial
  probe
  misc_feature (1)..(25): SEQ ID NO: 5344; WAN024EY2; Start 205; Stop 229
gtaaccaagcatggcataaacatca

SEQ ID NO: 407665 - DNA, 25 bp, Artificial
  probe
  misc_feature (1)..(25): SEQ ID NO: 5344; WAN024EY2; Start 156; Stop 180
cgatatagtctttgaagcgacctgg

SEQ ID NO: 407666 - DNA, 25 bp, Artificial
  probe
  misc_feature (1)..(25): SEQ ID NO: 5344; WAN024EY2; Start 118; Stop 142
cgtatggatagactgataaccattg

SEQ ID NO: 407667 - DNA, 25 bp, Artificial
  probe
  misc_feature (1)..(25): SEQ ID NO: 5344; WAN024EY2; Start 117; Stop 141
tcgtatggatagactgataaccatt

SEQ ID NO: 407668 - DNA, 25 bp, Artificial
  probe
  misc_feature (1)..(25): SEQ ID NO: 5344; WAN024EY2; Start 98; Stop 122
ccttttggtccataaacagtcgtat

SEQ ID NO: 407669 - DNA, 25 bp, Artificial
  probe
  misc_feature (1)..(25): SEQ ID NO: 5344; WAN024EY2; Start 125; Stop 149
atagactgataaccattggccttgc

SEQ ID NO: 407670 - DNA, 25 bp, Artificial
  probe
  misc_feature (1)..(25): SEQ ID NO: 5344; WAN024EY2; Start 119; Stop 143
gtatggatagactgataaccattgg

SEQ ID NO: 407671 - DNA, 25 bp, Artificial
  probe
  misc_feature (1)..(25): SEQ ID NO: 5344; WAN024EY2; Start 152; Stop 176
ttggcgatatagtctttgaagcgac

SEQ ID NO: 407672 - DNA, 25 bp, Artificial
  probe
  misc_feature (1)..(25): SEQ ID NO: 5344; WAN024EY2; Start 209; Stop 233
ccaagcatggcataaacatcacttt

SEQ ID NO: 407673 - DNA, 25 bp, Artificial
  probe
  misc_feature (1)..(25): SEQ ID NO: 5344; WAN024EY2; Start 157; Stop 181
gatatagtctttgaagcgacctggc

SEQ ID NO: 407674 - DNA, 25 bp, Artificial
  probe
  misc_feature (1)..(25): SEQ ID NO: 5344; WAN024EY2; Start 150; Stop 174
ggttggcgatatagtctttgaagcg

SEQ ID NO: 407675 - DNA, 25 bp, Artificial
  probe
  misc_feature (1)..(25): SEQ ID NO: 5344; WAN024EY2; Start 149; Stop 173
cggttggcgatatagtctttgaagc

SEQ ID NO: 407676 - DNA, 25 bp, Artificial
  probe
  misc_feature (1)..(25): SEQ ID NO: 5344; WAN024EY2; Start 148; Stop 172
gcggttggcgatatagtctttgaag

SEQ ID NO: 407677 - DNA, 25 bp, Artificial
  probe
  misc_feature (1)..(25): SEQ ID NO: 5344; WAN024EY2; Start 99; Stop 123
cttttggtccataaacagtcgtatg

SEQ ID NO: 407678 - DNA, 25 bp, Artificial
  probe
  misc_feature (1)..(25): SEQ ID NO: 5344; WAN024EY2; Start 70; Stop 94
cttggttcgaatctggaattcaatc

SEQ ID NO: 407679 - DNA, 25 bp, Artificial
  probe
  misc_feature (1)..(25): SEQ ID NO: 5344; WAN024EY2; Start 155; Stop 179
gcgatatagtctttgaagcgacctg

SEQ ID NO: 407680 - DNA, 25 bp, Artificial
  probe
  misc_feature (1)..(25): SEQ ID NO: 5344; WAN024EY2; Start 145; Stop 169
cttgcggttggcgatatagtctttg

SEQ ID NO: 407681 - DNA, 25 bp, Artificial
  probe
  misc_feature (1)..(25): SEQ ID NO: 5344; WAN024EY2; Start 204; Stop 228
cgtaaccaagcatggcataaacatc

SEQ ID NO: 407682 - DNA, 25 bp, Artificial
  probe
  misc_feature (1)..(25): SEQ ID NO: 5345; WAN024DQU; Start 62; Stop 86
cgtctgatgataaatctaattcgca

SEQ ID NO: 407683 - DNA, 25 bp, Artificial
  probe
  misc_feature (1)..(25): SEQ ID NO: 5345; WAN024DQU; Start 63; Stop 87
gtctgatgataaatctaattcgcaa

SEQ ID NO: 407684 - DNA, 25 bp, Artificial
  probe
  misc_feature (1)..(25): SEQ ID NO: 5345; WAN024DQU; Start 61; Stop 85
acgtctgatgataaatctaattcgc

SEQ ID NO: 407685 - DNA, 25 bp, Artificial
  probe
  misc_feature (1)..(25): SEQ ID NO: 5345; WAN024DQU; Start 64; Stop 88
tctgatgataaatctaattcgcaaa

SEQ ID NO: 407686 - DNA, 25 bp, Artificial
  probe
  misc_feature (1)..(25): SEQ ID NO: 5345; WAN024DQU; Start 54; Stop 78
cttctacacgtctgatgataaatct

SEQ ID NO: 407687 - DNA, 25 bp, Artificial
  probe
  misc_feature (1)..(25): SEQ ID NO: 5345; WAN024DQU; Start 53; Stop 77
tcttctacacgtctgatgataaatc

SEQ ID NO: 407688 - DNA, 25 bp, Artificial
  probe
  misc_feature (1)..(25): SEQ ID NO: 5345; WAN024DQU; Start 60; Stop 84
cacgtctgatgataaatctaattcg

SEQ ID NO: 407689 - DNA, 25 bp, Artificial
  probe
  misc_feature (1)..(25): SEQ ID NO: 5345; WAN024DQU; Start 51; Stop 75
tttcttctacacgtctgatgataaa

SEQ ID NO: 407690 - DNA, 25 bp, Artificial
  probe
  misc_feature (1)..(25): SEQ ID NO: 5345; WAN024DQU; Start 78; Stop 102
taattcgcaaaagagtcaagaggat

SEQ ID NO: 407691 - DNA, 25 bp, Artificial
  probe
  misc_feature (1)..(25): SEQ ID NO: 5345; WAN024DQU; Start 52; Stop 76
ttcttctacacgtctgatgataaat

SEQ ID NO: 407692 - DNA, 25 bp, Artificial
  probe
  misc_feature (1)..(25): SEQ ID NO: 5345; WAN024DQU; Start 80; Stop 104
attcgcaaaagagtcaagaggattt

SEQ ID NO: 407693 - DNA, 25 bp, Artificial
  probe
  misc_feature (1)..(25): SEQ ID NO: 5345; WAN024DQU; Start 77; Stop 101
ctaattcgcaaaagagtcaagagga

SEQ ID NO: 407694 - DNA, 25 bp, Artificial
  probe
  misc_feature (1)..(25): SEQ ID NO: 5345; WAN024DQU; Start 79; Stop 103
aattcgcaaaagagtcaagaggatt

SEQ ID NO: 407695 - DNA, 25 bp, Artificial
  probe
  misc_feature (1)..(25): SEQ ID NO: 5345; WAN024DQU; Start 75; Stop 99
atctaattcgcaaaagagtcaagag

SEQ ID NO: 407696 - DNA, 25 bp, Artificial
  probe
  misc_feature (1)..(25): SEQ ID NO: 5345; WAN024DQU; Start 74; Stop 98
aatctaattcgcaaaagagtcaaga

SEQ ID NO: 407697 - DNA, 25 bp, Artificial
  probe
  misc_feature (1)..(25): SEQ ID NO: 5345; WAN024DQU; Start 76; Stop 100
tctaattcgcaaaagagtcaagagg

SEQ ID NO: 407698 - DNA, 25 bp, Artificial
  probe
  misc_feature (1)..(25): SEQ ID NO: 5345; WAN024DQU; Start 73; Stop 97
aaatctaattcgcaaaagagtcaag

SEQ ID NO: 407699 - DNA, 25 bp, Artificial
  probe
  misc_feature (1)..(25): SEQ ID NO: 5345; WAN024DQU; Start 59; Stop 83
acacgtctgatgataaatctaattc

SEQ ID NO: 407700 - DNA, 25 bp, Artificial
  probe
  misc_feature (1)..(25): SEQ ID NO: 5345; WAN024DQU; Start 56; Stop 80
tctacacgtctgatgataaatctaa

SEQ ID NO: 407701 - DNA, 25 bp, Artificial
  probe
  misc_feature (1)..(25): SEQ ID NO: 5345; WAN024DQU; Start 55; Stop 79
ttctacacgtctgatgataaatcta

SEQ ID NO: 407702 - DNA, 25 bp, Artificial
  probe
  misc_feature (1)..(25): SEQ ID NO: 5345; WAN024DQU; Start 81; Stop 105
ttcgcaaaagagtcaagaggatttt

SEQ ID NO: 407703 - DNA, 25 bp, Artificial
  probe
  misc_feature (1)..(25): SEQ ID NO: 5345; WAN024DQU; Start 72; Stop 96
taaatctaattcgcaaaagagtcaa

SEQ ID NO: 407704 - DNA, 25 bp, Artificial
  probe
  misc_feature (1)..(25): SEQ ID NO: 5345; WAN024DQU; Start 57; Stop 81
ctacacgtctgatgataaatctaat

SEQ ID NO: 407705 - DNA, 25 bp, Artificial
  probe
  misc_feature (1)..(25): SEQ ID NO: 5345; WAN024DQU; Start 71; Stop 95
ataaatctaattcgcaaaagagtca

SEQ ID NO: 407706 - DNA, 25 bp, Artificial
  probe
  misc_feature (1)..(25): SEQ ID NO: 5345; WAN024DQU; Start 69; Stop 93
tgataaatctaattcgcaaaagagt

SEQ ID NO: 407707 - DNA, 25 bp, Artificial
  probe
  misc_feature (1)..(25): SEQ ID NO: 5345; WAN024DQU; Start 50; Stop 74
ttttcttctacacgtctgatgataa

SEQ ID NO: 407708 - DNA, 25 bp, Artificial
  probe
  misc_feature (1)..(25): SEQ ID NO: 5345; WAN024DQU; Start 49; Stop 73
attttcttctacacgtctgatgata

SEQ ID NO: 407709 - DNA, 25 bp, Artificial
  probe
  misc_feature (1)..(25): SEQ ID NO: 5345; WAN024DQU; Start 70; Stop 94
gataaatctaattcgcaaaagagtc

SEQ ID NO: 407710 - DNA, 25 bp, Artificial
  probe
  misc_feature (1)..(25): SEQ ID NO: 5345; WAN024DQU; Start 58; Stop 82
tacacgtctgatgataaatctaatt

SEQ ID NO: 407711 - DNA, 25 bp, Artificial
  probe
  misc_feature (1)..(25): SEQ ID NO: 5345; WAN024DQU; Start 66; Stop 90
tgatgataaatctaattcgcaaaag

SEQ ID NO: 407712 - DNA, 25 bp, Artificial
  probe
  misc_feature (1)..(25): SEQ ID NO: 5345; WAN024DQU; Start 65; Stop 89
ctgatgataaatctaattcgcaaaa

SEQ ID NO: 407713 - DNA, 25 bp, Artificial
  probe
  misc_feature (1)..(25): SEQ ID NO: 5345; WAN024DQU; Start 68; Stop 92
atgataaatctaattcgcaaaagag

SEQ ID NO: 407714 - DNA, 25 bp, Artificial
  probe
  misc_feature (1)..(25): SEQ ID NO: 5345; WAN024DQU; Start 67; Stop 91
gatgataaatctaattcgcaaaaga

SEQ ID NO: 407715 - DNA, 25 bp, Artificial
  probe
  misc_feature (1)..(25): SEQ ID NO: 5346; WAN024CDS; Start 180; Stop 204
attcgatacacctgtcaatgatctc

SEQ ID NO: 407716 - DNA, 25 bp, Artificial
  probe
  misc_feature (1)..(25): SEQ ID NO: 5346; WAN024CDS; Start 179; Stop 203
gattcgatacacctgtcaatgatct

SEQ ID NO: 407717 - DNA, 25 bp, Artificial
  probe
  misc_feature (1)..(25): SEQ ID NO: 5346; WAN024CDS; Start 178; Stop 202
ggattcgatacacctgtcaatgatc

SEQ ID NO: 407718 - DNA, 25 bp, Artificial
  probe
  misc_feature (1)..(25): SEQ ID NO: 5346; WAN024CDS; Start 182; Stop 206
tcgatacacctgtcaatgatctcaa

SEQ ID NO: 407719 - DNA, 25 bp, Artificial
  probe
  misc_feature (1)..(25): SEQ ID NO: 5346; WAN024CDS; Start 181; Stop 205
ttcgatacacctgtcaatgatctca

SEQ ID NO: 407720 - DNA, 25 bp, Artificial
  probe
  misc_feature (1)..(25): SEQ ID NO: 5346; WAN024CDS; Start 99; Stop 123
taaaccttgctctgtcaaactatca

SEQ ID NO: 407721 - DNA, 25 bp, Artificial
  probe
  misc_feature (1)..(25): SEQ ID NO: 5346; WAN024CDS; Start 98; Stop 122
gtaaaccttgctctgtcaaactatc

SEQ ID NO: 407722 - DNA, 25 bp, Artificial
  probe
  misc_feature (1)..(25): SEQ ID NO: 5346; WAN024CDS; Start 100; Stop 124
aaaccttgctctgtcaaactatcat

SEQ ID NO: 407723 - DNA, 25 bp, Artificial
  probe
  misc_feature (1)..(25): SEQ ID NO: 5346; WAN024CDS; Start 101; Stop 125
aaccttgctctgtcaaactatcatc

SEQ ID NO: 407724 - DNA, 25 bp, Artificial
  probe
  misc_feature (1)..(25): SEQ ID NO: 5346; WAN024CDS; Start 45; Stop 69
cttaatggactctagggaagcaatg

SEQ ID NO: 407725 - DNA, 25 bp, Artificial
  probe
  misc_feature (1)..(25): SEQ ID NO: 5346; WAN024CDS; Start 97; Stop 121
cgtaaaccttgctctgtcaaactat

SEQ ID NO: 407726 - DNA, 25 bp, Artificial
  probe
  misc_feature (1)..(25): SEQ ID NO: 5346; WAN024CDS; Start 175; Stop 199
gtaggattcgatacacctgtcaatg

SEQ ID NO: 407727 - DNA, 25 bp, Artificial
  probe
  misc_feature (1)..(25): SEQ ID NO: 5346; WAN024CDS; Start 183; Stop 207
cgatacacctgtcaatgatctcaaa

SEQ ID NO: 407728 - DNA, 25 bp, Artificial
  probe
  misc_feature (1)..(25): SEQ ID NO: 5346; WAN024CDS; Start 176; Stop 200
taggattcgatacacctgtcaatga

SEQ ID NO: 407729 - DNA, 25 bp, Artificial
  probe
  misc_feature (1)..(25): SEQ ID NO: 5346; WAN024CDS; Start 103; Stop 127
ccttgctctgtcaaactatcatctg

SEQ ID NO: 407730 - DNA, 25 bp, Artificial
  probe
  misc_feature (1)..(25): SEQ ID NO: 5346; WAN024CDS; Start 102; Stop 126
accttgctctgtcaaactatcatct

SEQ ID NO: 407731 - DNA, 25 bp, Artificial
  probe
  misc_feature (1)..(25): SEQ ID NO: 5346; WAN024CDS; Start 177; Stop 201
aggattcgatacacctgtcaatgat

SEQ ID NO: 407732 - DNA, 25 bp, Artificial
  probe
  misc_feature (1)..(25): SEQ ID NO: 5346; WAN024CDS; Start 46; Stop 70
ttaatggactctagggaagcaatgg

SEQ ID NO: 407733 - DNA, 25 bp, Artificial
  probe
  misc_feature (1)..(25): SEQ ID NO: 5346; WAN024CDS; Start 104; Stop 128
cttgctctgtcaaactatcatctgc

SEQ ID NO: 407734 - DNA, 25 bp, Artificial
  probe
  misc_feature (1)..(25): SEQ ID NO: 5346; WAN024CDS; Start 26; Stop 50
tagttgctgactggctttccttaat

SEQ ID NO: 407735 - DNA, 25 bp, Artificial
  probe
  misc_feature (1)..(25): SEQ ID NO: 5346; WAN024CDS; Start 174; Stop 198
ggtaggattcgatacacctgtcaat

SEQ ID NO: 407736 - DNA, 25 bp, Artificial
  probe
  misc_feature (1)..(25): SEQ ID NO: 5346; WAN024CDS; Start 167; Stop 191
aatctgtggtaggattcgatacacc

SEQ ID NO: 407737 - DNA, 25 bp, Artificial
  probe
  misc_feature (1)..(25): SEQ ID NO: 5346; WAN024CDS; Start 25; Stop 49
ttagttgctgactggctttccttaa

SEQ ID NO: 407738 - DNA, 25 bp, Artificial
  probe
  misc_feature (1)..(25): SEQ ID NO: 5346; WAN024CDS; Start 44; Stop 68
ccttaatggactctagggaagcaat

SEQ ID NO: 407739 - DNA, 25 bp, Artificial
  probe
  misc_feature (1)..(25): SEQ ID NO: 5346; WAN024CDS; Start 61; Stop 85
gaagcaatggcatctttgactgttt

SEQ ID NO: 407740 - DNA, 25 bp, Artificial
  probe
  misc_feature (1)..(25): SEQ ID NO: 5346; WAN024CDS; Start 35; Stop 59
actggctttccttaatggactctag

SEQ ID NO: 407741 - DNA, 25 bp, Artificial
  probe
  misc_feature (1)..(25): SEQ ID NO: 5346; WAN024CDS; Start 34; Stop 58
gactggctttccttaatggactcta

SEQ ID NO: 407742 - DNA, 25 bp, Artificial
  probe
  misc_feature (1)..(25): SEQ ID NO: 5346; WAN024CDS; Start 24; Stop 48
cttagttgctgactggctttcctta

SEQ ID NO: 407743 - DNA, 25 bp, Artificial
  probe
  misc_feature (1)..(25): SEQ ID NO: 5346; WAN024CDS; Start 168; Stop 192
atctgtggtaggattcgatacacct

SEQ ID NO: 407744 - DNA, 25 bp, Artificial
  probe
  misc_feature (1)..(25): SEQ ID NO: 5346; WAN024CDS; Start 107; Stop 131
gctctgtcaaactatcatctgcaaa

SEQ ID NO: 407745 - DNA, 25 bp, Artificial
  probe
  misc_feature (1)..(25): SEQ ID NO: 5346; WAN024CDS; Start 88; Stop 112
aagatatcacgtaaaccttgctctg

SEQ ID NO: 407746 - DNA, 25 bp, Artificial
  probe
  misc_feature (1)..(25): SEQ ID NO: 5346; WAN024CDS; Start 62; Stop 86
aagcaatggcatctttgactgtttg

SEQ ID NO: 407747 - DNA, 25 bp, Artificial
  probe
  misc_feature (1)..(25): SEQ ID NO: 5346; WAN024CDS; Start 90; Stop 114
gatatcacgtaaaccttgctctgtc

SEQ ID NO: 407748 - DNA, 25 bp, Artificial
  probe
  misc_feature (1)..(25): SEQ ID NO: 5347; WAN024DOC; Start 50; Stop 74
agactttctttcctgctgactatta

SEQ ID NO: 407749 - DNA, 25 bp, Artificial
  probe
  misc_feature (1)..(25): SEQ ID NO: 5347; WAN024DOC; Start 51; Stop 75
gactttctttcctgctgactattat

SEQ ID NO: 407750 - DNA, 25 bp, Artificial
  probe
  misc_feature (1)..(25): SEQ ID NO: 5347; WAN024DOC; Start 52; Stop 76
actttctttcctgctgactattata

SEQ ID NO: 407751 - DNA, 25 bp, Artificial
  probe
  misc_feature (1)..(25): SEQ ID NO: 5347; WAN024DOC; Start 33; Stop 57
gcttgaagaacgccataagactttc

SEQ ID NO: 407752 - DNA, 25 bp, Artificial
  probe
  misc_feature (1)..(25): SEQ ID NO: 5347; WAN024DOC; Start 56; Stop 80
tctttcctgctgactattatatcaa

SEQ ID NO: 407753 - DNA, 25 bp, Artificial
  probe
  misc_feature (1)..(25): SEQ ID NO: 5347; WAN024DOC; Start 55; Stop 79
ttctttcctgctgactattatatca

SEQ ID NO: 407754 - DNA, 25 bp, Artificial
  probe
  misc_feature (1)..(25): SEQ ID NO: 5347; WAN024DOC; Start 49; Stop 73
aagactttctttcctgctgactatt

SEQ ID NO: 407755 - DNA, 25 bp, Artificial
  probe
  misc_feature (1)..(25): SEQ ID NO: 5347; WAN024DOC; Start 48; Stop 72
taagactttctttcctgctgactat

SEQ ID NO: 407756 - DNA, 25 bp, Artificial
  probe
  misc_feature (1)..(25): SEQ ID NO: 5347; WAN024DOC; Start 47; Stop 71
ataagactttctttcctgctgacta

SEQ ID NO: 407757 - DNA, 25 bp, Artificial
  probe
  misc_feature (1)..(25): SEQ ID NO: 5347; WAN024DOC; Start 46; Stop 70
cataagactttctttcctgctgact

SEQ ID NO: 407758 - DNA, 25 bp, Artificial
  probe
  misc_feature (1)..(25): SEQ ID NO: 5347; WAN024DOC; Start 34; Stop 58
cttgaagaacgccataagactttct

SEQ ID NO: 407759 - DNA, 25 bp, Artificial
  probe
  misc_feature (1)..(25): SEQ ID NO: 5347; WAN024DOC; Start 54; Stop 78
tttctttcctgctgactattatatc

SEQ ID NO: 407760 - DNA, 25 bp, Artificial
  probe
  misc_feature (1)..(25): SEQ ID NO: 5347; WAN024DOC; Start 45; Stop 69
ccataagactttctttcctgctgac

SEQ ID NO: 407761 - DNA, 25 bp, Artificial
  probe
  misc_feature (1)..(25): SEQ ID NO: 5347; WAN024DOC; Start 53; Stop 77
ctttctttcctgctgactattatat

SEQ ID NO: 407762 - DNA, 25 bp, Artificial
  probe
  misc_feature (1)..(25): SEQ ID NO: 5347; WAN024DOC; Start 57; Stop 81
ctttcctgctgactattatatcaaa

SEQ ID NO: 407763 - DNA, 25 bp, Artificial
  probe
  misc_feature (1)..(25): SEQ ID NO: 5347; WAN024DOC; Start 40; Stop 64
gaacgccataagactttctttcctg

SEQ ID NO: 407764 - DNA, 25 bp, Artificial
  probe
  misc_feature (1)..(25): SEQ ID NO: 5347; WAN024DOC; Start 39; Stop 63
agaacgccataagactttctttcct

SEQ ID NO: 407765 - DNA, 25 bp, Artificial
  probe
  misc_feature (1)..(25): SEQ ID NO: 5347; WAN024DOC; Start 31; Stop 55
tcgcttgaagaacgccataagactt

SEQ ID NO: 407766 - DNA, 25 bp, Artificial
  probe
  misc_feature (1)..(25): SEQ ID NO: 5347; WAN024DOC; Start 32; Stop 56
cgcttgaagaacgccataagacttt

SEQ ID NO: 407767 - DNA, 25 bp, Artificial
  probe
  misc_feature (1)..(25): SEQ ID NO: 5347; WAN024DOC; Start 44; Stop 68
gccataagactttctttcctgctga

SEQ ID NO: 407768 - DNA, 25 bp, Artificial
  probe
  misc_feature (1)..(25): SEQ ID NO: 5347; WAN024DOC; Start 41; Stop 65
aacgccataagactttctttcctgc

SEQ ID NO: 407769 - DNA, 25 bp, Artificial
  probe
  misc_feature (1)..(25): SEQ ID NO: 5347; WAN024DOC; Start 58; Stop 82
tttcctgctgactattatatcaaaa

SEQ ID NO: 407770 - DNA, 25 bp, Artificial
  probe
  misc_feature (1)..(25): SEQ ID NO: 5347; WAN024DOC; Start 43; Stop 67
cgccataagactttctttcctgctg

SEQ ID NO: 407771 - DNA, 25 bp, Artificial
  probe
  misc_feature (1)..(25): SEQ ID NO: 5347; WAN024DOC; Start 37; Stop 61
gaagaacgccataagactttctttc

SEQ ID NO: 407772 - DNA, 25 bp, Artificial
  probe
  misc_feature (1)..(25): SEQ ID NO: 5347; WAN024DOC; Start 36; Stop 60
tgaagaacgccataagactttcttt

SEQ ID NO: 407773 - DNA, 25 bp, Artificial
  probe
  misc_feature (1)..(25): SEQ ID NO: 5347; WAN024DOC; Start 35; Stop 59
ttgaagaacgccataagactttctt

SEQ ID NO: 407774 - DNA, 25 bp, Artificial
  probe
  misc_feature (1)..(25): SEQ ID NO: 5347; WAN024DOC; Start 42; Stop 66
acgccataagactttctttcctgct

SEQ ID NO: 407775 - DNA, 25 bp, Artificial
  probe
  misc_feature (1)..(25): SEQ ID NO: 5347; WAN024DOC; Start 38; Stop 62
aagaacgccataagactttctttcc

SEQ ID NO: 407776 - DNA, 25 bp, Artificial
  probe
  misc_feature (1)..(25): SEQ ID NO: 5347; WAN024DOC; Start 19; Stop 43
actatcccaagctcgcttgaagaac

SEQ ID NO: 407777 - DNA, 25 bp, Artificial
  probe
  misc_feature (1)..(25): SEQ ID NO: 5347; WAN024DOC; Start 18; Stop 42
cactatcccaagctcgcttgaagaa

SEQ ID NO: 407778 - DNA, 25 bp, Artificial
  probe
  misc_feature (1)..(25): SEQ ID NO: 5348; WAN024FRX; Start 262; Stop 286
atcgtagccaccttgacattgatat

SEQ ID NO: 407779 - DNA, 25 bp, Artificial
  probe
  misc_feature (1)..(25): SEQ ID NO: 5348; WAN024FRX; Start 261; Stop 285
aatcgtagccaccttgacattgata

SEQ ID NO: 407780 - DNA, 25 bp, Artificial
  probe
  misc_feature (1)..(25): SEQ ID NO: 5348; WAN024FRX; Start 300; Stop 324
attgaccttagccaacaactcattg

SEQ ID NO: 407781 - DNA, 25 bp, Artificial
  probe
  misc_feature (1)..(25): SEQ ID NO: 5348; WAN024FRX; Start 299; Stop 323
cattgaccttagccaacaactcatt

SEQ ID NO: 407782 - DNA, 25 bp, Artificial
  probe
  misc_feature (1)..(25): SEQ ID NO: 5348; WAN024FRX; Start 283; Stop 307
atatcatctgccaagacattgacct

SEQ ID NO: 407783 - DNA, 25 bp, Artificial
  probe
  misc_feature (1)..(25): SEQ ID NO: 5348; WAN024FRX; Start 285; Stop 309
atcatctgccaagacattgacctta

SEQ ID NO: 407784 - DNA, 25 bp, Artificial
  probe
  misc_feature (1)..(25): SEQ ID NO: 5348; WAN024FRX; Start 284; Stop 308
tatcatctgccaagacattgacctt

SEQ ID NO: 407785 - DNA, 25 bp, Artificial
  probe
  misc_feature (1)..(25): SEQ ID NO: 5348; WAN024FRX; Start 294; Stop 318
caagacattgaccttagccaacaac

SEQ ID NO: 407786 - DNA, 25 bp, Artificial
  probe
  misc_feature (1)..(25): SEQ ID NO: 5348; WAN024FRX; Start 295; Stop 319
aagacattgaccttagccaacaact

SEQ ID NO: 407787 - DNA, 25 bp, Artificial
  probe
  misc_feature (1)..(25): SEQ ID NO: 5348; WAN024FRX; Start 286; Stop 310
tcatctgccaagacattgaccttag

SEQ ID NO: 407788 - DNA, 25 bp, Artificial
  probe
  misc_feature (1)..(25): SEQ ID NO: 5348; WAN024FRX; Start 298; Stop 322
acattgaccttagccaacaactcat

SEQ ID NO: 407789 - DNA, 25 bp, Artificial
  probe
  misc_feature (1)..(25): SEQ ID NO: 5348; WAN024FRX; Start 296; Stop 320
agacattgaccttagccaacaactc

SEQ ID NO: 407790 - DNA, 25 bp, Artificial
  probe
  misc_feature (1)..(25): SEQ ID NO: 5348; WAN024FRX; Start 297; Stop 321
gacattgaccttagccaacaactca

SEQ ID NO: 407791 - DNA, 25 bp, Artificial
  probe
  misc_feature (1)..(25): SEQ ID NO: 5348; WAN024FRX; Start 282; Stop 306
gatatcatctgccaagacattgacc

SEQ ID NO: 407792 - DNA, 25 bp, Artificial
  probe
  misc_feature (1)..(25): SEQ ID NO: 5348; WAN024FRX; Start 56; Stop 80
aaaggattgaggataatttacccat

SEQ ID NO: 407793 - DNA, 25 bp, Artificial
  probe
  misc_feature (1)..(25): SEQ ID NO: 5348; WAN024FRX; Start 293; Stop 317
ccaagacattgaccttagccaacaa

SEQ ID NO: 407794 - DNA, 25 bp, Artificial
  probe
  misc_feature (1)..(25): SEQ ID NO: 5348; WAN024FRX; Start 263; Stop 287
tcgtagccaccttgacattgatatc

SEQ ID NO: 407795 - DNA, 25 bp, Artificial
  probe
  misc_feature (1)..(25): SEQ ID NO: 5348; WAN024FRX; Start 63; Stop 87
tgaggataatttacccataaggatt

SEQ ID NO: 407796 - DNA, 25 bp, Artificial
  probe
  misc_feature (1)..(25): SEQ ID NO: 5348; WAN024FRX; Start 62; Stop 86
ttgaggataatttacccataaggat

SEQ ID NO: 407797 - DNA, 25 bp, Artificial
  probe
  misc_feature (1)..(25): SEQ ID NO: 5348; WAN024FRX; Start 61; Stop 85
attgaggataatttacccataagga

SEQ ID NO: 407798 - DNA, 25 bp, Artificial
  probe
  misc_feature (1)..(25): SEQ ID NO: 5348; WAN024FRX; Start 58; Stop 82
aggattgaggataatttacccataa

SEQ ID NO: 407799 - DNA, 25 bp, Artificial
  probe
  misc_feature (1)..(25): SEQ ID NO: 5348; WAN024FRX; Start 57; Stop 81
aaggattgaggataatttacccata

SEQ ID NO: 407800 - DNA, 25 bp, Artificial
  probe
  misc_feature (1)..(25): SEQ ID NO: 5348; WAN024FRX; Start 287; Stop 311
catctgccaagacattgaccttagc

SEQ ID NO: 407801 - DNA, 25 bp, Artificial
  probe
  misc_feature (1)..(25): SEQ ID NO: 5348; WAN024FRX; Start 60; Stop 84
gattgaggataatttacccataagg

SEQ ID NO: 407802 - DNA, 25 bp, Artificial
  probe
  misc_feature (1)..(25): SEQ ID NO: 5348; WAN024FRX; Start 59; Stop 83
ggattgaggataatttacccataag

SEQ ID NO: 407803 - DNA, 25 bp, Artificial
  probe
  misc_feature (1)..(25): SEQ ID NO: 5348; WAN024FRX; Start 65; Stop 89
aggataatttacccataaggattct

SEQ ID NO: 407804 - DNA, 25 bp, Artificial
  probe
  misc_feature (1)..(25): SEQ ID NO: 5348; WAN024FRX; Start 66; Stop 90
ggataatttacccataaggattctc

SEQ ID NO: 407805 - DNA, 25 bp, Artificial
  probe
  misc_feature (1)..(25): SEQ ID NO: 5348; WAN024FRX; Start 64; Stop 88
gaggataatttacccataaggattc

SEQ ID NO: 407806 - DNA, 25 bp, Artificial
  probe
  misc_feature (1)..(25): SEQ ID NO: 5348; WAN024FRX; Start 260; Stop 284
caatcgtagccaccttgacattgat

SEQ ID NO: 407807 - DNA, 25 bp, Artificial
  probe
  misc_feature (1)..(25): SEQ ID NO: 5348; WAN024FRX; Start 246; Stop 270
actgaagagtggatcaatcgtagcc

SEQ ID NO: 407808 - DNA, 25 bp, Artificial
  probe
  misc_feature (1)..(25): SEQ ID NO: 5348; WAN024FRX; Start 257; Stop 281
gatcaatcgtagccaccttgacatt

SEQ ID NO: 407809 - DNA, 25 bp, Artificial
  probe
  misc_feature (1)..(25): SEQ ID NO: 5348; WAN024FRX; Start 55; Stop 79
aaaaggattgaggataatttaccca

SEQ ID NO: 407810 - DNA, 25 bp, Artificial
  probe
  misc_feature (1)..(25): SEQ ID NO: 5348; WAN024FRX; Start 258; Stop 282
atcaatcgtagccaccttgacattg

SEQ ID NO: 407811 - DNA, 25 bp, Artificial
  probe
  misc_feature (1)..(25): SEQ ID NO: 5349; WAN024D2X; Start 217; Stop 241
gagtttccaaagagtttccagttct

SEQ ID NO: 407812 - DNA, 25 bp, Artificial
  probe
  misc_feature (1)..(25): SEQ ID NO: 5349; WAN024D2X; Start 200; Stop 224
tctatttcctcttcttggagtttcc

SEQ ID NO: 407813 - DNA, 25 bp, Artificial
  probe
  misc_feature (1)..(25): SEQ ID NO: 5349; WAN024D2X; Start 197; Stop 221
cgatctatttcctcttcttggagtt

SEQ ID NO: 407814 - DNA, 25 bp, Artificial
  probe
  misc_feature (1)..(25): SEQ ID NO: 5349; WAN024D2X; Start 195; Stop 219
gacgatctatttcctcttcttggag

SEQ ID NO: 407815 - DNA, 25 bp, Artificial
  probe
  misc_feature (1)..(25): SEQ ID NO: 5349; WAN024D2X; Start 194; Stop 218
agacgatctatttcctcttcttgga

SEQ ID NO: 407816 - DNA, 25 bp, Artificial
  probe
  misc_feature (1)..(25): SEQ ID NO: 5349; WAN024D2X; Start 196; Stop 220
acgatctatttcctcttcttggagt

SEQ ID NO: 407817 - DNA, 25 bp, Artificial
  probe
  misc_feature (1)..(25): SEQ ID NO: 5349; WAN024D2X; Start 199; Stop 223
atctatttcctcttcttggagtttc

SEQ ID NO: 407818 - DNA, 25 bp, Artificial
  probe
  misc_feature (1)..(25): SEQ ID NO: 5349; WAN024D2X; Start 232; Stop 256
ttccagttcttcaacttgctgacta

SEQ ID NO: 407819 - DNA, 25 bp, Artificial
  probe
  misc_feature (1)..(25): SEQ ID NO: 5349; WAN024D2X; Start 216; Stop 240
ggagtttccaaagagtttccagttc

SEQ ID NO: 407820 - DNA, 25 bp, Artificial
  probe
  misc_feature (1)..(25): SEQ ID NO: 5349; WAN024D2X; Start 198; Stop 222
gatctatttcctcttcttggagttt

SEQ ID NO: 407821 - DNA, 25 bp, Artificial
  probe
  misc_feature (1)..(25): SEQ ID NO: 5349; WAN024D2X; Start 219; Stop 243
gtttccaaagagtttccagttcttc

SEQ ID NO: 407822 - DNA, 25 bp, Artificial
  probe
  misc_feature (1)..(25): SEQ ID NO: 5349; WAN024D2X; Start 233; Stop 257
tccagttcttcaacttgctgactag

SEQ ID NO: 407823 - DNA, 25 bp, Artificial
  probe
  misc_feature (1)..(25): SEQ ID NO: 5349; WAN024D2X; Start 221; Stop 245
ttccaaagagtttccagttcttcaa

SEQ ID NO: 407824 - DNA, 25 bp, Artificial
  probe
  misc_feature (1)..(25): SEQ ID NO: 5349; WAN024D2X; Start 220; Stop 244
tttccaaagagtttccagttcttca

SEQ ID NO: 407825 - DNA, 25 bp, Artificial
  probe
  misc_feature (1)..(25): SEQ ID NO: 5349; WAN024D2X; Start 218; Stop 242
agtttccaaagagtttccagttctt

SEQ ID NO: 407826 - DNA, 25 bp, Artificial
  probe
  misc_feature (1)..(25): SEQ ID NO: 5349; WAN024D2X; Start 193; Stop 217
aagacgatctatttcctcttcttgg

SEQ ID NO: 407827 - DNA, 25 bp, Artificial
  probe
  misc_feature (1)..(25): SEQ ID NO: 5349; WAN024D2X; Start 222; Stop 246
tccaaagagtttccagttcttcaac

SEQ ID NO: 407828 - DNA, 25 bp, Artificial
  probe
  misc_feature (1)..(25): SEQ ID NO: 5349; WAN024D2X; Start 225; Stop 249
aaagagtttccagttcttcaacttg

SEQ ID NO: 407829 - DNA, 25 bp, Artificial
  probe
  misc_feature (1)..(25): SEQ ID NO: 5349; WAN024D2X; Start 224; Stop 248
caaagagtttccagttcttcaactt

SEQ ID NO: 407830 - DNA, 25 bp, Artificial
  probe
  misc_feature (1)..(25): SEQ ID NO: 5349; WAN024D2X; Start 192; Stop 216
aaagacgatctatttcctcttcttg

SEQ ID NO: 407831 - DNA, 25 bp, Artificial
  probe
  misc_feature (1)..(25): SEQ ID NO: 5349; WAN024D2X; Start 191; Stop 215
gaaagacgatctatttcctcttctt

SEQ ID NO: 407832 - DNA, 25 bp, Artificial
  probe
  misc_feature (1)..(25): SEQ ID NO: 5349; WAN024D2X; Start 223; Stop 247
ccaaagagtttccagttcttcaact

SEQ ID NO: 407833 - DNA, 25 bp, Artificial
  probe
  misc_feature (1)..(25): SEQ ID NO: 5349; WAN024D2X; Start 245; Stop 269
acttgctgactagtttgctgataag

SEQ ID NO: 407834 - DNA, 25 bp, Artificial
  probe
  misc_feature (1)..(25): SEQ ID NO: 5349; WAN024D2X; Start 226; Stop 250
aagagtttccagttcttcaacttgc

SEQ ID NO: 407835 - DNA, 25 bp, Artificial
  probe
  misc_feature (1)..(25): SEQ ID NO: 5349; WAN024D2X; Start 235; Stop 259
cagttcttcaacttgctgactagtt

SEQ ID NO: 407836 - DNA, 25 bp, Artificial
  probe
  misc_feature (1)..(25): SEQ ID NO: 5349; WAN024D2X; Start 54; Stop 78
aattttgatagcgttcttggatggc

SEQ ID NO: 407837 - DNA, 25 bp, Artificial
  probe
  misc_feature (1)..(25): SEQ ID NO: 5349; WAN024D2X; Start 53; Stop 77
aaattttgatagcgttcttggatgg

SEQ ID NO: 407838 - DNA, 25 bp, Artificial
  probe
  misc_feature (1)..(25): SEQ ID NO: 5349; WAN024D2X; Start 228; Stop 252
gagtttccagttcttcaacttgctg

SEQ ID NO: 407839 - DNA, 25 bp, Artificial
  probe
  misc_feature (1)..(25): SEQ ID NO: 5349; WAN024D2X; Start 227; Stop 251
agagtttccagttcttcaacttgct

SEQ ID NO: 407840 - DNA, 25 bp, Artificial
  probe
  misc_feature (1)..(25): SEQ ID NO: 5349; WAN024D2X; Start 52; Stop 76
caaattttgatagcgttcttggatg

SEQ ID NO: 407841 - DNA, 25 bp, Artificial
  probe
  misc_feature (1)..(25): SEQ ID NO: 5349; WAN024D2X; Start 231; Stop 255
tttccagttcttcaacttgctgact

SEQ ID NO: 407842 - DNA, 25 bp, Artificial
  probe
  misc_feature (1)..(25): SEQ ID NO: 5349; WAN024D2X; Start 230; Stop 254
gtttccagttcttcaacttgctgac

SEQ ID NO: 407843 - DNA, 25 bp, Artificial
  probe
  misc_feature (1)..(25): SEQ ID NO: 5349; WAN024D2X; Start 229; Stop 253
agtttccagttcttcaacttgctga

SEQ ID NO: 407844 - DNA, 25 bp, Artificial
  probe
  misc_feature (1)..(25): SEQ ID NO: 5350; WAN024BDL; Start 112; Stop 136
cctacggctagtttactctttgatt

SEQ ID NO: 407845 - DNA, 25 bp, Artificial
  probe
  misc_feature (1)..(25): SEQ ID NO: 5350; WAN024BDL; Start 113; Stop 137
ctacggctagtttactctttgattt

SEQ ID NO: 407846 - DNA, 25 bp, Artificial
  probe
  misc_feature (1)..(25): SEQ ID NO: 5350; WAN024BDL; Start 111; Stop 135
acctacggctagtttactctttgat

SEQ ID NO: 407847 - DNA, 25 bp, Artificial
  probe
  misc_feature (1)..(25): SEQ ID NO: 5350; WAN024BDL; Start 110; Stop 134
aacctacggctagtttactctttga

SEQ ID NO: 407848 - DNA, 25 bp, Artificial
  probe
  misc_feature (1)..(25): SEQ ID NO: 5350; WAN024BDL; Start 109; Stop 133
caacctacggctagtttactctttg

SEQ ID NO: 407849 - DNA, 25 bp, Artificial
  probe
  misc_feature (1)..(25): SEQ ID NO: 5350; WAN024BDL; Start 108; Stop 132
gcaacctacggctagtttactcttt

SEQ ID NO: 407850 - DNA, 25 bp, Artificial
  probe
  misc_feature (1)..(25): SEQ ID NO: 5350; WAN024BDL; Start 115; Stop 139
acggctagtttactctttgattttc

SEQ ID NO: 407851 - DNA, 25 bp, Artificial
  probe
  misc_feature (1)..(25): SEQ ID NO: 5350; WAN024BDL; Start 116; Stop 140
cggctagtttactctttgattttca

SEQ ID NO: 407852 - DNA, 25 bp, Artificial
  probe
  misc_feature (1)..(25): SEQ ID NO: 5350; WAN024BDL; Start 114; Stop 138
tacggctagtttactctttgatttt

SEQ ID NO: 407853 - DNA, 25 bp, Artificial
  probe
  misc_feature (1)..(25): SEQ ID NO: 5350; WAN024BDL; Start 102; Stop 126
ctttgagcaacctacggctagttta

SEQ ID NO: 407854 - DNA, 25 bp, Artificial
  probe
  misc_feature (1)..(25): SEQ ID NO: 5350; WAN024BDL; Start 103; Stop 127
tttgagcaacctacggctagtttac

SEQ ID NO: 407855 - DNA, 25 bp, Artificial
  probe
  misc_feature (1)..(25): SEQ ID NO: 5350; WAN024BDL; Start 117; Stop 141
ggctagtttactctttgattttcat

SEQ ID NO: 407856 - DNA, 25 bp, Artificial
  probe
  misc_feature (1)..(25): SEQ ID NO: 5350; WAN024BDL; Start 107; Stop 131
agcaacctacggctagtttactctt

SEQ ID NO: 407857 - DNA, 25 bp, Artificial
  probe
  misc_feature (1)..(25): SEQ ID NO: 5350; WAN024BDL; Start 104; Stop 128
ttgagcaacctacggctagtttact

SEQ ID NO: 407858 - DNA, 25 bp, Artificial
  probe
  misc_feature (1)..(25): SEQ ID NO: 5350; WAN024BDL; Start 100; Stop 124
tactttgagcaacctacggctagtt

SEQ ID NO: 407859 - DNA, 25 bp, Artificial
  probe
  misc_feature (1)..(25): SEQ ID NO: 5350; WAN024BDL; Start 106; Stop 130
gagcaacctacggctagtttactct

SEQ ID NO: 407860 - DNA, 25 bp, Artificial
  probe
  misc_feature (1)..(25): SEQ ID NO: 5350; WAN024BDL; Start 118; Stop 142
gctagtttactctttgattttcatc

SEQ ID NO: 407861 - DNA, 25 bp, Artificial
  probe
  misc_feature (1)..(25): SEQ ID NO: 5350; WAN024BDL; Start 105; Stop 129
tgagcaacctacggctagtttactc

SEQ ID NO: 407862 - DNA, 25 bp, Artificial
  probe
  misc_feature (1)..(25): SEQ ID NO: 5350; WAN024BDL; Start 93; Stop 117
aaagctgtactttgagcaacctacg

SEQ ID NO: 407863 - DNA, 25 bp, Artificial
  probe
  misc_feature (1)..(25): SEQ ID NO: 5350; WAN024BDL; Start 6; Stop 30
gtacgtatggttactgacttcgtca

SEQ ID NO: 407864 - DNA, 25 bp, Artificial
  probe
  misc_feature (1)..(25): SEQ ID NO: 5350; WAN024BDL; Start 99; Stop 123
gtactttgagcaacctacggctagt

SEQ ID NO: 407865 - DNA, 25 bp, Artificial
  probe
  misc_feature (1)..(25): SEQ ID NO: 5350; WAN024BDL; Start 98; Stop 122
tgtactttgagcaacctacggctag

SEQ ID NO: 407866 - DNA, 25 bp, Artificial
  probe
  misc_feature (1)..(25): SEQ ID NO: 5350; WAN024BDL; Start 97; Stop 121
ctgtactttgagcaacctacggcta

SEQ ID NO: 407867 - DNA, 25 bp, Artificial
  probe
  misc_feature (1)..(25): SEQ ID NO: 5350; WAN024BDL; Start 101; Stop 125
actttgagcaacctacggctagttt

SEQ ID NO: 407868 - DNA, 25 bp, Artificial
  probe
  misc_feature (1)..(25): SEQ ID NO: 5350; WAN024BDL; Start 94; Stop 118
aagctgtactttgagcaacctacgg

SEQ ID NO: 407869 - DNA, 25 bp, Artificial
  probe
  misc_feature (1)..(25): SEQ ID NO: 5350; WAN024BDL; Start 119; Stop 143
ctagtttactctttgattttcatct

SEQ ID NO: 407870 - DNA, 25 bp, Artificial
  probe
  misc_feature (1)..(25): SEQ ID NO: 5351; WAN024FJQ; Start 174; Stop 198
tttatcccagttgccgttattctta

SEQ ID NO: 407871 - DNA, 25 bp, Artificial
  probe
  misc_feature (1)..(25): SEQ ID NO: 5351; WAN024FJQ; Start 229; Stop 253
tatttatcgccgtctttaccttgat

SEQ ID NO: 407872 - DNA, 25 bp, Artificial
  probe
  misc_feature (1)..(25): SEQ ID NO: 5351; WAN024FJQ; Start 175; Stop 199
ttatcccagttgccgttattcttaa

SEQ ID NO: 407873 - DNA, 25 bp, Artificial
  probe
  misc_feature (1)..(25): SEQ ID NO: 5351; WAN024FJQ; Start 228; Stop 252
gtatttatcgccgtctttaccttga

SEQ ID NO: 407874 - DNA, 25 bp, Artificial
  probe
  misc_feature (1)..(25): SEQ ID NO: 5351; WAN024FJQ; Start 173; Stop 197
ctttatcccagttgccgttattctt

SEQ ID NO: 407875 - DNA, 25 bp, Artificial
  probe
  misc_feature (1)..(25): SEQ ID NO: 5351; WAN024FJQ; Start 230; Stop 254
atttatcgccgtctttaccttgatg

SEQ ID NO: 407876 - DNA, 25 bp, Artificial
  probe
  misc_feature (1)..(25): SEQ ID NO: 5351; WAN024FJQ; Start 171; Stop 195
ctctttatcccagttgccgttattc

SEQ ID NO: 407877 - DNA, 25 bp, Artificial
  probe
  misc_feature (1)..(25): SEQ ID NO: 5351; WAN024FJQ; Start 172; Stop 196
tctttatcccagttgccgttattct

SEQ ID NO: 407878 - DNA, 25 bp, Artificial
  probe
  misc_feature (1)..(25): SEQ ID NO: 5351; WAN024FJQ; Start 227; Stop 251
cgtatttatcgccgtctttaccttg

SEQ ID NO: 407879 - DNA, 25 bp, Artificial
  probe
  misc_feature (1)..(25): SEQ ID NO: 5351; WAN024FJQ; Start 231; Stop 255
tttatcgccgtctttaccttgatgt

SEQ ID NO: 407880 - DNA, 25 bp, Artificial
  probe
  misc_feature (1)..(25): SEQ ID NO: 5351; WAN024FJQ; Start 176; Stop 200
tatcccagttgccgttattcttaac

SEQ ID NO: 407881 - DNA, 25 bp, Artificial
  probe
  misc_feature (1)..(25): SEQ ID NO: 5351; WAN024FJQ; Start 216; Stop 240
ttctgtattaacgtatttatcgccg

SEQ ID NO: 407882 - DNA, 25 bp, Artificial
  probe
  misc_feature (1)..(25): SEQ ID NO: 5351; WAN024FJQ; Start 170; Stop 194
cctctttatcccagttgccgttatt

SEQ ID NO: 407883 - DNA, 25 bp, Artificial
  probe
  misc_feature (1)..(25): SEQ ID NO: 5351; WAN024FJQ; Start 209; Stop 233
cgcctgtttctgtattaacgtattt

SEQ ID NO: 407884 - DNA, 25 bp, Artificial
  probe
  misc_feature (1)..(25): SEQ ID NO: 5351; WAN024FJQ; Start 208; Stop 232
tcgcctgtttctgtattaacgtatt

SEQ ID NO: 407885 - DNA, 25 bp, Artificial
  probe
  misc_feature (1)..(25): SEQ ID NO: 5351; WAN024FJQ; Start 159; Stop 183
tttgatgttgccctctttatcccag

SEQ ID NO: 407886 - DNA, 25 bp, Artificial
  probe
  misc_feature (1)..(25): SEQ ID NO: 5351; WAN024FJQ; Start 158; Stop 182
ctttgatgttgccctctttatccca

SEQ ID NO: 407887 - DNA, 25 bp, Artificial
  probe
  misc_feature (1)..(25): SEQ ID NO: 5351; WAN024FJQ; Start 232; Stop 256
ttatcgccgtctttaccttgatgtg

SEQ ID NO: 407888 - DNA, 25 bp, Artificial
  probe
  misc_feature (1)..(25): SEQ ID NO: 5351; WAN024FJQ; Start 207; Stop 231
gtcgcctgtttctgtattaacgtat

SEQ ID NO: 407889 - DNA, 25 bp, Artificial
  probe
  misc_feature (1)..(25): SEQ ID NO: 5351; WAN024FJQ; Start 243; Stop 267
tttaccttgatgtgcttctgggtta

SEQ ID NO: 407890 - DNA, 25 bp, Artificial
  probe
  misc_feature (1)..(25): SEQ ID NO: 5351; WAN024FJQ; Start 240; Stop 264
gtctttaccttgatgtgcttctggg

SEQ ID NO: 407891 - DNA, 25 bp, Artificial
  probe
  misc_feature (1)..(25): SEQ ID NO: 5351; WAN024FJQ; Start 215; Stop 239
tttctgtattaacgtatttatcgcc

SEQ ID NO: 407892 - DNA, 25 bp, Artificial
  probe
  misc_feature (1)..(25): SEQ ID NO: 5351; WAN024FJQ; Start 244; Stop 268
ttaccttgatgtgcttctgggttag

SEQ ID NO: 407893 - DNA, 25 bp, Artificial
  probe
  misc_feature (1)..(25): SEQ ID NO: 5351; WAN024FJQ; Start 162; Stop 186
gatgttgccctctttatcccagttg

SEQ ID NO: 407894 - DNA, 25 bp, Artificial
  probe
  misc_feature (1)..(25): SEQ ID NO: 5351; WAN024FJQ; Start 157; Stop 181
cctttgatgttgccctctttatccc

SEQ ID NO: 407895 - DNA, 25 bp, Artificial
  probe
  misc_feature (1)..(25): SEQ ID NO: 5351; WAN024FJQ; Start 239; Stop 263
cgtctttaccttgatgtgcttctgg

SEQ ID NO: 407896 - DNA, 25 bp, Artificial
  probe
  misc_feature (1)..(25): SEQ ID NO: 5351; WAN024FJQ; Start 238; Stop 262
ccgtctttaccttgatgtgcttctg

SEQ ID NO: 407897 - DNA, 25 bp, Artificial
  probe
  misc_feature (1)..(25): SEQ ID NO: 5351; WAN024FJQ; Start 210; Stop 234
gcctgtttctgtattaacgtattta

SEQ ID NO: 407898 - DNA, 25 bp, Artificial
  probe
  misc_feature (1)..(25): SEQ ID NO: 5351; WAN024FJQ; Start 161; Stop 185
tgatgttgccctctttatcccagtt

SEQ ID NO: 407899 - DNA, 25 bp, Artificial
  probe
  misc_feature (1)..(25): SEQ ID NO: 5351; WAN024FJQ; Start 160; Stop 184
ttgatgttgccctctttatcccagt

SEQ ID NO: 407900 - DNA, 25 bp, Artificial
  probe
  misc_feature (1)..(25): SEQ ID NO: 5351; WAN024FJQ; Start 242; Stop 266
ctttaccttgatgtgcttctgggtt

SEQ ID NO: 407901 - DNA, 25 bp, Artificial
  probe
  misc_feature (1)..(25): SEQ ID NO: 5351; WAN024FJQ; Start 156; Stop 180
gcctttgatgttgccctctttatcc

SEQ ID NO: 407902 - DNA, 25 bp, Artificial
  probe
  misc_feature (1)..(25): SEQ ID NO: 5351; WAN024FJQ; Start 218; Stop 242
ctgtattaacgtatttatcgccgtc

SEQ ID NO: 407903 - DNA, 25 bp, Artificial
  probe
  misc_feature (1)..(25): SEQ ID NO: 5352; WAN024FYM; Start 329; Stop 353
ttcagattgtagcctatatccaagt

SEQ ID NO: 407904 - DNA, 25 bp, Artificial
  probe
  misc_feature (1)..(25): SEQ ID NO: 5352; WAN024FYM; Start 1163; Stop 1187
cagagttagttctatgttgctatca

SEQ ID NO: 407905 - DNA, 25 bp, Artificial
  probe
  misc_feature (1)..(25): SEQ ID NO: 5352; WAN024FYM; Start 330; Stop 354
tcagattgtagcctatatccaagta

SEQ ID NO: 407906 - DNA, 25 bp, Artificial
  probe
  misc_feature (1)..(25): SEQ ID NO: 5352; WAN024FYM; Start 1164; Stop 1188
agagttagttctatgttgctatcaa

SEQ ID NO: 407907 - DNA, 25 bp, Artificial
  probe
  misc_feature (1)..(25): SEQ ID NO: 5352; WAN024FYM; Start 331; Stop 355
cagattgtagcctatatccaagtat

SEQ ID NO: 407908 - DNA, 25 bp, Artificial
  probe
  misc_feature (1)..(25): SEQ ID NO: 5352; WAN024FYM; Start 685; Stop 709
atgcttgggatgtatagtagtttga

SEQ ID NO: 407909 - DNA, 25 bp, Artificial
  probe
  misc_feature (1)..(25): SEQ ID NO: 5352; WAN024FYM; Start 1157; Stop 1181
ttgttgcagagttagttctatgttg

SEQ ID NO: 407910 - DNA, 25 bp, Artificial
  probe
  misc_feature (1)..(25): SEQ ID NO: 5352; WAN024FYM; Start 684; Stop 708
aatgcttgggatgtatagtagtttg

SEQ ID NO: 407911 - DNA, 25 bp, Artificial
  probe
  misc_feature (1)..(25): SEQ ID NO: 5352; WAN024FYM; Start 103; Stop 127
gcagagcaaattggagtttattctt

SEQ ID NO: 407912 - DNA, 25 bp, Artificial
  probe
  misc_feature (1)..(25): SEQ ID NO: 5352; WAN024FYM; Start 1156; Stop 1180
attgttgcagagttagttctatgtt

SEQ ID NO: 407913 - DNA, 25 bp, Artificial
  probe
  misc_feature (1)..(25): SEQ ID NO: 5352; WAN024FYM; Start 1155; Stop 1179
aattgttgcagagttagttctatgt

SEQ ID NO: 407914 - DNA, 25 bp, Artificial
  probe
  misc_feature (1)..(25): SEQ ID NO: 5352; WAN024FYM; Start 1219; Stop 1243
agagaatatctgataaatgctggga

SEQ ID NO: 407915 - DNA, 25 bp, Artificial
  probe
  misc_feature (1)..(25): SEQ ID NO: 5352; WAN024FYM; Start 364; Stop 388
ttatcgtatgcaacagatgttagtt

SEQ ID NO: 407916 - DNA, 25 bp, Artificial
  probe
  misc_feature (1)..(25): SEQ ID NO: 5352; WAN024FYM; Start 210; Stop 234
acgaacaagtagagaacatttgaat

SEQ ID NO: 407917 - DNA, 25 bp, Artificial
  probe
  misc_feature (1)..(25): SEQ ID NO: 5352; WAN024FYM; Start 211; Stop 235
cgaacaagtagagaacatttgaatc

SEQ ID NO: 407918 - DNA, 25 bp, Artificial
  probe
  misc_feature (1)..(25): SEQ ID NO: 5352; WAN024FYM; Start 207; Stop 231
ggtacgaacaagtagagaacatttg

SEQ ID NO: 407919 - DNA, 25 bp, Artificial
  probe
  misc_feature (1)..(25): SEQ ID NO: 5352; WAN024FYM; Start 209; Stop 233
tacgaacaagtagagaacatttgaa

SEQ ID NO: 407920 - DNA, 25 bp, Artificial
  probe
  misc_feature (1)..(25): SEQ ID NO: 5352; WAN024FYM; Start 332; Stop 356
agattgtagcctatatccaagtatt

SEQ ID NO: 407921 - DNA, 25 bp, Artificial
  probe
  misc_feature (1)..(25): SEQ ID NO: 5352; WAN024FYM; Start 398; Stop 422
atggtcttgaagagtttcgtattac

SEQ ID NO: 407922 - DNA, 25 bp, Artificial
  probe
  misc_feature (1)..(25): SEQ ID NO: 5352; WAN024FYM; Start 416; Stop 440
gtattacggttgctaggaattcatt

SEQ ID NO: 407923 - DNA, 25 bp, Artificial
  probe
  misc_feature (1)..(25): SEQ ID NO: 5352; WAN024FYM; Start 1220; Stop 1244
gagaatatctgataaatgctgggat

SEQ ID NO: 407924 - DNA, 25 bp, Artificial
  probe
  misc_feature (1)..(25): SEQ ID NO: 5352; WAN024FYM; Start 104; Stop 128
cagagcaaattggagtttattcttt

SEQ ID NO: 407925 - DNA, 25 bp, Artificial
  probe
  misc_feature (1)..(25): SEQ ID NO: 5352; WAN024FYM; Start 208; Stop 232
gtacgaacaagtagagaacatttga

SEQ ID NO: 407926 - DNA, 25 bp, Artificial
  probe
  misc_feature (1)..(25): SEQ ID NO: 5352; WAN024FYM; Start 328; Stop 352
tttcagattgtagcctatatccaag

SEQ ID NO: 407927 - DNA, 25 bp, Artificial
  probe
  misc_feature (1)..(25): SEQ ID NO: 5352; WAN024FYM; Start 1162; Stop 1186
gcagagttagttctatgttgctatc

SEQ ID NO: 407928 - DNA, 25 bp, Artificial
  probe
  misc_feature (1)..(25): SEQ ID NO: 5352; WAN024FYM; Start 683; Stop 707
taatgcttgggatgtatagtagttt

SEQ ID NO: 407929 - DNA, 25 bp, Artificial
  probe
  misc_feature (1)..(25): SEQ ID NO: 5352; WAN024FYM; Start 396; Stop 420
ttatggtcttgaagagtttcgtatt

SEQ ID NO: 407930 - DNA, 25 bp, Artificial
  probe
  misc_feature (1)..(25): SEQ ID NO: 5352; WAN024FYM; Start 395; Stop 419
tttatggtcttgaagagtttcgtat

SEQ ID NO: 407931 - DNA, 25 bp, Artificial
  probe
  misc_feature (1)..(25): SEQ ID NO: 5352; WAN024FYM; Start 1049; Stop 1073
ttgacaaggaatatacggtatcttt

SEQ ID NO: 407932 - DNA, 25 bp, Artificial
  probe
  misc_feature (1)..(25): SEQ ID NO: 5352; WAN024FYM; Start 1048; Stop 1072
tttgacaaggaatatacggtatctt

SEQ ID NO: 407933 - DNA, 25 bp, Artificial
  probe
  misc_feature (1)..(25): SEQ ID NO: 5352; WAN024FYM; Start 682; Stop 706
ataatgcttgggatgtatagtagtt

SEQ ID NO: 407934 - DNA, 25 bp, Artificial
  probe
  misc_feature (1)..(25): SEQ ID NO: 5352; WAN024FYM; Start 681; Stop 705
aataatgcttgggatgtatagtagt

SEQ ID NO: 407935 - DNA, 25 bp, Artificial
  probe
  misc_feature (1)..(25): SEQ ID NO: 5352; WAN024FYM; Start 212; Stop 236
gaacaagtagagaacatttgaatca

SEQ ID NO: 407936 - DNA, 25 bp, Artificial
  probe
  misc_feature (1)..(25): SEQ ID NO: 5353; WAN024FAZ; Start 109; Stop 133
acgaccatagagttattagatgctt

SEQ ID NO: 407937 - DNA, 25 bp, Artificial
  probe
  misc_feature (1)..(25): SEQ ID NO: 5353; WAN024FAZ; Start 104; Stop 128
gaccaacgaccatagagttattaga

SEQ ID NO: 407938 - DNA, 25 bp, Artificial
  probe
  misc_feature (1)..(25): SEQ ID NO: 5353; WAN024FAZ; Start 103; Stop 127
agaccaacgaccatagagttattag

SEQ ID NO: 407939 - DNA, 25 bp, Artificial
  probe
  misc_feature (1)..(25): SEQ ID NO: 5353; WAN024FAZ; Start 108; Stop 132
aacgaccatagagttattagatgct

SEQ ID NO: 407940 - DNA, 25 bp, Artificial
  probe
  misc_feature (1)..(25): SEQ ID NO: 5353; WAN024FAZ; Start 107; Stop 131
caacgaccatagagttattagatgc

SEQ ID NO: 407941 - DNA, 25 bp, Artificial
  probe
  misc_feature (1)..(25): SEQ ID NO: 5353; WAN024FAZ; Start 101; Stop 125
caagaccaacgaccatagagttatt

SEQ ID NO: 407942 - DNA, 25 bp, Artificial
  probe
  misc_feature (1)..(25): SEQ ID NO: 5353; WAN024FAZ; Start 102; Stop 126
aagaccaacgaccatagagttatta

SEQ ID NO: 407943 - DNA, 25 bp, Artificial
  probe
  misc_feature (1)..(25): SEQ ID NO: 5353; WAN024FAZ; Start 105; Stop 129
accaacgaccatagagttattagat

SEQ ID NO: 407944 - DNA, 25 bp, Artificial
  probe
  misc_feature (1)..(25): SEQ ID NO: 5353; WAN024FAZ; Start 106; Stop 130
ccaacgaccatagagttattagatg

SEQ ID NO: 407945 - DNA, 25 bp, Artificial
  probe
  misc_feature (1)..(25): SEQ ID NO: 5353; WAN024FAZ; Start 100; Stop 124
acaagaccaacgaccatagagttat

SEQ ID NO: 407946 - DNA, 25 bp, Artificial
  probe
  misc_feature (1)..(25): SEQ ID NO: 5353; WAN024FAZ; Start 99; Stop 123
gacaagaccaacgaccatagagtta

SEQ ID NO: 407947 - DNA, 25 bp, Artificial
  probe
  misc_feature (1)..(25): SEQ ID NO: 5353; WAN024FAZ; Start 94; Stop 118
atgaagacaagaccaacgaccatag

SEQ ID NO: 407948 - DNA, 25 bp, Artificial
  probe
  misc_feature (1)..(25): SEQ ID NO: 5353; WAN024FAZ; Start 93; Stop 117
gatgaagacaagaccaacgaccata

SEQ ID NO: 407949 - DNA, 25 bp, Artificial
  probe
  misc_feature (1)..(25): SEQ ID NO: 5353; WAN024FAZ; Start 96; Stop 120
gaagacaagaccaacgaccatagag

SEQ ID NO: 407950 - DNA, 25 bp, Artificial
  probe
  misc_feature (1)..(25): SEQ ID NO: 5353; WAN024FAZ; Start 2; Stop 26
tgcctcctttctcagtcaatttaat

SEQ ID NO: 407951 - DNA, 25 bp, Artificial
  probe
  misc_feature (1)..(25): SEQ ID NO: 5353; WAN024FAZ; Start 89; Stop 113
taaagatgaagacaagaccaacgac

SEQ ID NO: 407952 - DNA, 25 bp, Artificial
  probe
  misc_feature (1)..(25): SEQ ID NO: 5353; WAN024FAZ; Start 88; Stop 112
gtaaagatgaagacaagaccaacga

SEQ ID NO: 407953 - DNA, 25 bp, Artificial
  probe
  misc_feature (1)..(25): SEQ ID NO: 5353; WAN024FAZ; Start 3; Stop 27
gcctcctttctcagtcaatttaata

SEQ ID NO: 407954 - DNA, 25 bp, Artificial
  probe
  misc_feature (1)..(25): SEQ ID NO: 5353; WAN024FAZ; Start 1; Stop 25
ttgcctcctttctcagtcaatttaa

SEQ ID NO: 407955 - DNA, 25 bp, Artificial
  probe
  misc_feature (1)..(25): SEQ ID NO: 5353; WAN024FAZ; Start 110; Stop 134
cgaccatagagttattagatgcttt

SEQ ID NO: 407956 - DNA, 25 bp, Artificial
  probe
  misc_feature (1)..(25): SEQ ID NO: 5353; WAN024FAZ; Start 97; Stop 121
aagacaagaccaacgaccatagagt

SEQ ID NO: 407957 - DNA, 25 bp, Artificial
  probe
  misc_feature (1)..(25): SEQ ID NO: 5353; WAN024FAZ; Start 95; Stop 119
tgaagacaagaccaacgaccataga

SEQ ID NO: 407958 - DNA, 25 bp, Artificial
  probe
  misc_feature (1)..(25): SEQ ID NO: 5353; WAN024FAZ; Start 86; Stop 110
atgtaaagatgaagacaagaccaac

SEQ ID NO: 407959 - DNA, 25 bp, Artificial
  probe
  misc_feature (1)..(25): SEQ ID NO: 5353; WAN024FAZ; Start 98; Stop 122
agacaagaccaacgaccatagagtt

SEQ ID NO: 407960 - DNA, 25 bp, Artificial
  probe
  misc_feature (1)..(25): SEQ ID NO: 5353; WAN024FAZ; Start 87; Stop 111
tgtaaagatgaagacaagaccaacg

SEQ ID NO: 407961 - DNA, 25 bp, Artificial
  probe
  misc_feature (1)..(25): SEQ ID NO: 5353; WAN024FAZ; Start 39; Stop 63
aatagtcatccaaatatctcccaaa

SEQ ID NO: 407962 - DNA, 25 bp, Artificial
  probe
  misc_feature (1)..(25): SEQ ID NO: 5353; WAN024FAZ; Start 5; Stop 29
ctcctttctcagtcaatttaatacg

SEQ ID NO: 407963 - DNA, 25 bp, Artificial
  probe
  misc_feature (1)..(25): SEQ ID NO: 5353; WAN024FAZ; Start 85; Stop 109
catgtaaagatgaagacaagaccaa

SEQ ID NO: 407964 - DNA, 25 bp, Artificial
  probe
  misc_feature (1)..(25): SEQ ID NO: 5353; WAN024FAZ; Start 4; Stop 28
cctcctttctcagtcaatttaatac

SEQ ID NO: 407965 - DNA, 25 bp, Artificial
  probe
  misc_feature (1)..(25): SEQ ID NO: 5353; WAN024FAZ; Start 28; Stop 52
cgtgggtcaataatagtcatccaaa

SEQ ID NO: 407966 - DNA, 25 bp, Artificial
  probe
  misc_feature (1)..(25): SEQ ID NO: 5353; WAN024FAZ; Start 25; Stop 49
atacgtgggtcaataatagtcatcc

SEQ ID NO: 407967 - DNA, 25 bp, Artificial
  probe
  misc_feature (1)..(25): SEQ ID NO: 5353; WAN024FAZ; Start 10; Stop 34
ttctcagtcaatttaatacgtgggt

SEQ ID NO: 407968 - DNA, 25 bp, Artificial
  probe
  misc_feature (1)..(25): SEQ ID NO: 5353; WAN024FAZ; Start 14; Stop 38
cagtcaatttaatacgtgggtcaat

SEQ ID NO: 407969 - DNA, 25 bp, Artificial
  probe
  misc_feature (1)..(25): SEQ ID NO: 5354; WAN024F9C; Start 192; Stop 216
gcactatacgcttaaccagattact

SEQ ID NO: 407970 - DNA, 25 bp, Artificial
  probe
  misc_feature (1)..(25): SEQ ID NO: 5354; WAN024F9C; Start 46; Stop 70
cttcatcaatgtcttccatcaactg

SEQ ID NO: 407971 - DNA, 25 bp, Artificial
  probe
  misc_feature (1)..(25): SEQ ID NO: 5354; WAN024F9C; Start 45; Stop 69
tcttcatcaatgtcttccatcaact

SEQ ID NO: 407972 - DNA, 25 bp, Artificial
  probe
  misc_feature (1)..(25): SEQ ID NO: 5354; WAN024F9C; Start 42; Stop 66
tcatcttcatcaatgtcttccatca

SEQ ID NO: 407973 - DNA, 25 bp, Artificial
  probe
  misc_feature (1)..(25): SEQ ID NO: 5354; WAN024F9C; Start 44; Stop 68
atcttcatcaatgtcttccatcaac

SEQ ID NO: 407974 - DNA, 25 bp, Artificial
  probe
  misc_feature (1)..(25): SEQ ID NO: 5354; WAN024F9C; Start 43; Stop 67
catcttcatcaatgtcttccatcaa

SEQ ID NO: 407975 - DNA, 25 bp, Artificial
  probe
  misc_feature (1)..(25): SEQ ID NO: 5354; WAN024F9C; Start 41; Stop 65
ttcatcttcatcaatgtcttccatc

SEQ ID NO: 407976 - DNA, 25 bp, Artificial
  probe
  misc_feature (1)..(25): SEQ ID NO: 5354; WAN024F9C; Start 39; Stop 63
aattcatcttcatcaatgtcttcca

SEQ ID NO: 407977 - DNA, 25 bp, Artificial
  probe
  misc_feature (1)..(25): SEQ ID NO: 5354; WAN024F9C; Start 40; Stop 64
attcatcttcatcaatgtcttccat

SEQ ID NO: 407978 - DNA, 25 bp, Artificial
  probe
  misc_feature (1)..(25): SEQ ID NO: 5354; WAN024F9C; Start 49; Stop 73
catcaatgtcttccatcaactgctt

SEQ ID NO: 407979 - DNA, 25 bp, Artificial
  probe
  misc_feature (1)..(25): SEQ ID NO: 5354; WAN024F9C; Start 47; Stop 71
ttcatcaatgtcttccatcaactgc

SEQ ID NO: 407980 - DNA, 25 bp, Artificial
  probe
  misc_feature (1)..(25): SEQ ID NO: 5354; WAN024F9C; Start 56; Stop 80
gtcttccatcaactgcttgtctatg

SEQ ID NO: 407981 - DNA, 25 bp, Artificial
  probe
  misc_feature (1)..(25): SEQ ID NO: 5354; WAN024F9C; Start 50; Stop 74
atcaatgtcttccatcaactgcttg

SEQ ID NO: 407982 - DNA, 25 bp, Artificial
  probe
  misc_feature (1)..(25): SEQ ID NO: 5354; WAN024F9C; Start 193; Stop 217
cactatacgcttaaccagattacta

SEQ ID NO: 407983 - DNA, 25 bp, Artificial
  probe
  misc_feature (1)..(25): SEQ ID NO: 5354; WAN024F9C; Start 55; Stop 79
tgtcttccatcaactgcttgtctat

SEQ ID NO: 407984 - DNA, 25 bp, Artificial
  probe
  misc_feature (1)..(25): SEQ ID NO: 5354; WAN024F9C; Start 54; Stop 78
atgtcttccatcaactgcttgtcta

SEQ ID NO: 407985 - DNA, 25 bp, Artificial
  probe
  misc_feature (1)..(25): SEQ ID NO: 5354; WAN024F9C; Start 48; Stop 72
tcatcaatgtcttccatcaactgct

SEQ ID NO: 407986 - DNA, 25 bp, Artificial
  probe
  misc_feature (1)..(25): SEQ ID NO: 5354; WAN024F9C; Start 190; Stop 214
ttgcactatacgcttaaccagatta

SEQ ID NO: 407987 - DNA, 25 bp, Artificial
  probe
  misc_feature (1)..(25): SEQ ID NO: 5354; WAN024F9C; Start 194; Stop 218
actatacgcttaaccagattactag

SEQ ID NO: 407988 - DNA, 25 bp, Artificial
  probe
  misc_feature (1)..(25): SEQ ID NO: 5354; WAN024F9C; Start 191; Stop 215
tgcactatacgcttaaccagattac

SEQ ID NO: 407989 - DNA, 25 bp, Artificial
  probe
  misc_feature (1)..(25): SEQ ID NO: 5354; WAN024F9C; Start 53; Stop 77
aatgtcttccatcaactgcttgtct

SEQ ID NO: 407990 - DNA, 25 bp, Artificial
  probe
  misc_feature (1)..(25): SEQ ID NO: 5354; WAN024F9C; Start 52; Stop 76
caatgtcttccatcaactgcttgtc

SEQ ID NO: 407991 - DNA, 25 bp, Artificial
  probe
  misc_feature (1)..(25): SEQ ID NO: 5354; WAN024F9C; Start 229; Stop 253
ggtaatattgagttcctgctcgata

SEQ ID NO: 407992 - DNA, 25 bp, Artificial
  probe
  misc_feature (1)..(25): SEQ ID NO: 5354; WAN024F9C; Start 226; Stop 250
cttggtaatattgagttcctgctcg

SEQ ID NO: 407993 - DNA, 25 bp, Artificial
  probe
  misc_feature (1)..(25): SEQ ID NO: 5354; WAN024F9C; Start 38; Stop 62
taattcatcttcatcaatgtcttcc

SEQ ID NO: 407994 - DNA, 25 bp, Artificial
  probe
  misc_feature (1)..(25): SEQ ID NO: 5354; WAN024F9C; Start 35; Stop 59
cagtaattcatcttcatcaatgtct

SEQ ID NO: 407995 - DNA, 25 bp, Artificial
  probe
  misc_feature (1)..(25): SEQ ID NO: 5354; WAN024F9C; Start 34; Stop 58
tcagtaattcatcttcatcaatgtc

SEQ ID NO: 407996 - DNA, 25 bp, Artificial
  probe
  misc_feature (1)..(25): SEQ ID NO: 5354; WAN024F9C; Start 197; Stop 221
atacgcttaaccagattactagcaa

SEQ ID NO: 407997 - DNA, 25 bp, Artificial
  probe
  misc_feature (1)..(25): SEQ ID NO: 5354; WAN024F9C; Start 51; Stop 75
tcaatgtcttccatcaactgcttgt

SEQ ID NO: 407998 - DNA, 25 bp, Artificial
  probe
  misc_feature (1)..(25): SEQ ID NO: 5354; WAN024F9C; Start 198; Stop 222
tacgcttaaccagattactagcaac

SEQ ID NO: 407999 - DNA, 25 bp, Artificial
  probe
  misc_feature (1)..(25): SEQ ID NO: 5354; WAN024F9C; Start 196; Stop 220
tatacgcttaaccagattactagca

SEQ ID NO: 408000 - DNA, 25 bp, Artificial
  probe
  misc_feature (1)..(25): SEQ ID NO: 5354; WAN024F9C; Start 233; Stop 257
atattgagttcctgctcgatatctt

SEQ ID NO: 408001 - DNA, 25 bp, Artificial
  probe
  misc_feature (1)..(25): SEQ ID NO: 5354; WAN024F9C; Start 232; Stop 256
aatattgagttcctgctcgatatct

SEQ ID NO: 408002 - DNA, 25 bp, Artificial
  probe
  misc_feature (1)..(25): SEQ ID NO: 5355; WAN024C76; Start 18; Stop 42
ttcttcgctcaaacctttctttaat

SEQ ID NO: 408003 - DNA, 25 bp, Artificial
  probe
  misc_feature (1)..(25): SEQ ID NO: 5355; WAN024C76; Start 17; Stop 41
attcttcgctcaaacctttctttaa

SEQ ID NO: 408004 - DNA, 25 bp, Artificial
  probe
  misc_feature (1)..(25): SEQ ID NO: 5355; WAN024C76; Start 15; Stop 39
aaattcttcgctcaaacctttcttt

SEQ ID NO: 408005 - DNA, 25 bp, Artificial
  probe
  misc_feature (1)..(25): SEQ ID NO: 5355; WAN024C76; Start 21; Stop 45
ttcgctcaaacctttctttaattct

SEQ ID NO: 408006 - DNA, 25 bp, Artificial
  probe
  misc_feature (1)..(25): SEQ ID NO: 5355; WAN024C76; Start 19; Stop 43
tcttcgctcaaacctttctttaatt

SEQ ID NO: 408007 - DNA, 25 bp, Artificial
  probe
  misc_feature (1)..(25): SEQ ID NO: 5355; WAN024C76; Start 16; Stop 40
aattcttcgctcaaacctttcttta

SEQ ID NO: 408008 - DNA, 25 bp, Artificial
  probe
  misc_feature (1)..(25): SEQ ID NO: 5355; WAN024C76; Start 20; Stop 44
cttcgctcaaacctttctttaattc

SEQ ID NO: 408009 - DNA, 25 bp, Artificial
  probe
  misc_feature (1)..(25): SEQ ID NO: 5355; WAN024C76; Start 22; Stop 46
tcgctcaaacctttctttaattcta

SEQ ID NO: 408010 - DNA, 25 bp, Artificial
  probe
  misc_feature (1)..(25): SEQ ID NO: 5355; WAN024C76; Start 23; Stop 47
cgctcaaacctttctttaattctaa

SEQ ID NO: 408011 - DNA, 25 bp, Artificial
  probe
  misc_feature (1)..(25): SEQ ID NO: 5355; WAN024C76; Start 14; Stop 38
aaaattcttcgctcaaacctttctt

SEQ ID NO: 408012 - DNA, 25 bp, Artificial
  probe
  misc_feature (1)..(25): SEQ ID NO: 5355; WAN024C76; Start 9; Stop 33
cttagaaaattcttcgctcaaacct

SEQ ID NO: 408013 - DNA, 25 bp, Artificial
  probe
  misc_feature (1)..(25): SEQ ID NO: 5355; WAN024C76; Start 8; Stop 32
tcttagaaaattcttcgctcaaacc

SEQ ID NO: 408014 - DNA, 25 bp, Artificial
  probe
  misc_feature (1)..(25): SEQ ID NO: 5355; WAN024C76; Start 5; Stop 29
ctgtcttagaaaattcttcgctcaa

SEQ ID NO: 408015 - DNA, 25 bp, Artificial
  probe
  misc_feature (1)..(25): SEQ ID NO: 5355; WAN024C76; Start 11; Stop 35
tagaaaattcttcgctcaaaccttt

SEQ ID NO: 408016 - DNA, 25 bp, Artificial
  probe
  misc_feature (1)..(25): SEQ ID NO: 5355; WAN024C76; Start 10; Stop 34
ttagaaaattcttcgctcaaacctt

SEQ ID NO: 408017 - DNA, 25 bp, Artificial
  probe
  misc_feature (1)..(25): SEQ ID NO: 5355; WAN024C76; Start 6; Stop 30
tgtcttagaaaattcttcgctcaaa

SEQ ID NO: 408018 - DNA, 25 bp, Artificial
  probe
  misc_feature (1)..(25): SEQ ID NO: 5355; WAN024C76; Start 7; Stop 31
gtcttagaaaattcttcgctcaaac

SEQ ID NO: 408019 - DNA, 25 bp, Artificial
  probe
  misc_feature (1)..(25): SEQ ID NO: 5355; WAN024C76; Start 4; Stop 28
cctgtcttagaaaattcttcgctca

SEQ ID NO: 408020 - DNA, 25 bp, Artificial
  probe
  misc_feature (1)..(25): SEQ ID NO: 5355; WAN024C76; Start 24; Stop 48
gctcaaacctttctttaattctaaa

SEQ ID NO: 408021 - DNA, 25 bp, Artificial
  probe
  misc_feature (1)..(25): SEQ ID NO: 5355; WAN024C76; Start 1; Stop 25
ttgcctgtcttagaaaattcttcgc

SEQ ID NO: 408022 - DNA, 25 bp, Artificial
  probe
  misc_feature (1)..(25): SEQ ID NO: 5355; WAN024C76; Start 3; Stop 27
gcctgtcttagaaaattcttcgctc

SEQ ID NO: 408023 - DNA, 25 bp, Artificial
  probe
  misc_feature (1)..(25): SEQ ID NO: 5355; WAN024C76; Start 13; Stop 37
gaaaattcttcgctcaaacctttct

SEQ ID NO: 408024 - DNA, 25 bp, Artificial
  probe
  misc_feature (1)..(25): SEQ ID NO: 5355; WAN024C76; Start 12; Stop 36
agaaaattcttcgctcaaacctttc

SEQ ID NO: 408025 - DNA, 25 bp, Artificial
  probe
  misc_feature (1)..(25): SEQ ID NO: 5355; WAN024C76; Start 2; Stop 26
tgcctgtcttagaaaattcttcgct

SEQ ID NO: 408026 - DNA, 25 bp, Artificial
  probe
  misc_feature (1)..(25): SEQ ID NO: 5356; WAN024CXV; Start 1; Stop 25
ttgccttcacctaaattattcggag

SEQ ID NO: 408027 - DNA, 25 bp, Artificial
  probe
  misc_feature (1)..(25): SEQ ID NO: 5356; WAN024CXV; Start 3; Stop 27
gccttcacctaaattattcggagaa

SEQ ID NO: 408028 - DNA, 25 bp, Artificial
  probe
  misc_feature (1)..(25): SEQ ID NO: 5356; WAN024CXV; Start 4; Stop 28
ccttcacctaaattattcggagaaa

SEQ ID NO: 408029 - DNA, 25 bp, Artificial
  probe
  misc_feature (1)..(25): SEQ ID NO: 5356; WAN024CXV; Start 2; Stop 26
tgccttcacctaaattattcggaga

SEQ ID NO: 408030 - DNA, 25 bp, Artificial
  probe
  misc_feature (1)..(25): SEQ ID NO: 5356; WAN024CXV; Start 51; Stop 75
tcactttagtcaagataatgaatca

SEQ ID NO: 408031 - DNA, 25 bp, Artificial
  probe
  misc_feature (1)..(25): SEQ ID NO: 5356; WAN024CXV; Start 48; Stop 72
ttctcactttagtcaagataatgaa

SEQ ID NO: 408032 - DNA, 25 bp, Artificial
  probe
  misc_feature (1)..(25): SEQ ID NO: 5356; WAN024CXV; Start 47; Stop 71
tttctcactttagtcaagataatga

SEQ ID NO: 408033 - DNA, 25 bp, Artificial
  probe
  misc_feature (1)..(25): SEQ ID NO: 5356; WAN024CXV; Start 5; Stop 29
cttcacctaaattattcggagaaaa

SEQ ID NO: 408034 - DNA, 25 bp, Artificial
  probe
  misc_feature (1)..(25): SEQ ID NO: 5356; WAN024CXV; Start 49; Stop 73
tctcactttagtcaagataatgaat

SEQ ID NO: 408035 - DNA, 25 bp, Artificial
  probe
  misc_feature (1)..(25): SEQ ID NO: 5356; WAN024CXV; Start 50; Stop 74
ctcactttagtcaagataatgaatc

SEQ ID NO: 408036 - DNA, 25 bp, Artificial
  probe
  misc_feature (1)..(25): SEQ ID NO: 5356; WAN024CXV; Start 52; Stop 76
cactttagtcaagataatgaatcaa

SEQ ID NO: 408037 - DNA, 25 bp, Artificial
  probe
  misc_feature (1)..(25): SEQ ID NO: 5356; WAN024CXV; Start 46; Stop 70
atttctcactttagtcaagataatg

SEQ ID NO: 408038 - DNA, 25 bp, Artificial
  probe
  misc_feature (1)..(25): SEQ ID NO: 5356; WAN024CXV; Start 58; Stop 82
agtcaagataatgaatcaaattctt

SEQ ID NO: 408039 - DNA, 25 bp, Artificial
  probe
  misc_feature (1)..(25): SEQ ID NO: 5356; WAN024CXV; Start 42; Stop 66
gaaaatttctcactttagtcaagat

SEQ ID NO: 408040 - DNA, 25 bp, Artificial
  probe
  misc_feature (1)..(25): SEQ ID NO: 5356; WAN024CXV; Start 41; Stop 65
agaaaatttctcactttagtcaaga

SEQ ID NO: 408041 - DNA, 25 bp, Artificial
  probe
  misc_feature (1)..(25): SEQ ID NO: 5357; WAN024CGC; Start 139; Stop 163
atcgttataaggtgccacaatgatt

SEQ ID NO: 408042 - DNA, 25 bp, Artificial
  probe
  misc_feature (1)..(25): SEQ ID NO: 5357; WAN024CGC; Start 138; Stop 162
catcgttataaggtgccacaatgat

SEQ ID NO: 408043 - DNA, 25 bp, Artificial
  probe
  misc_feature (1)..(25): SEQ ID NO: 5357; WAN024CGC; Start 137; Stop 161
acatcgttataaggtgccacaatga

SEQ ID NO: 408044 - DNA, 25 bp, Artificial
  probe
  misc_feature (1)..(25): SEQ ID NO: 5357; WAN024CGC; Start 142; Stop 166
gttataaggtgccacaatgatttcc

SEQ ID NO: 408045 - DNA, 25 bp, Artificial
  probe
  misc_feature (1)..(25): SEQ ID NO: 5357; WAN024CGC; Start 141; Stop 165
cgttataaggtgccacaatgatttc

SEQ ID NO: 408046 - DNA, 25 bp, Artificial
  probe
  misc_feature (1)..(25): SEQ ID NO: 5357; WAN024CGC; Start 140; Stop 164
tcgttataaggtgccacaatgattt

SEQ ID NO: 408047 - DNA, 25 bp, Artificial
  probe
  misc_feature (1)..(25): SEQ ID NO: 5357; WAN024CGC; Start 143; Stop 167
ttataaggtgccacaatgatttccg

SEQ ID NO: 408048 - DNA, 25 bp, Artificial
  probe
  misc_feature (1)..(25): SEQ ID NO: 5357; WAN024CGC; Start 36; Stop 60
gttgtccatccttgataacggcatc

SEQ ID NO: 408049 - DNA, 25 bp, Artificial
  probe
  misc_feature (1)..(25): SEQ ID NO: 5357; WAN024CGC; Start 35; Stop 59
agttgtccatccttgataacggcat

SEQ ID NO: 408050 - DNA, 25 bp, Artificial
  probe
  misc_feature (1)..(25): SEQ ID NO: 5357; WAN024CGC; Start 266; Stop 290
ccaccgataattccgattgttttag

SEQ ID NO: 408051 - DNA, 25 bp, Artificial
  probe
  misc_feature (1)..(25): SEQ ID NO: 5357; WAN024CGC; Start 267; Stop 291
caccgataattccgattgttttaga

SEQ ID NO: 408052 - DNA, 25 bp, Artificial
  probe
  misc_feature (1)..(25): SEQ ID NO: 5357; WAN024CGC; Start 30; Stop 54
gagggagttgtccatccttgataac

SEQ ID NO: 408053 - DNA, 25 bp, Artificial
  probe
  misc_feature (1)..(25): SEQ ID NO: 5357; WAN024CGC; Start 268; Stop 292
accgataattccgattgttttagat

SEQ ID NO: 408054 - DNA, 25 bp, Artificial
  probe
  misc_feature (1)..(25): SEQ ID NO: 5357; WAN024CGC; Start 269; Stop 293
ccgataattccgattgttttagatg

SEQ ID NO: 408055 - DNA, 25 bp, Artificial
  probe
  misc_feature (1)..(25): SEQ ID NO: 5357; WAN024CGC; Start 144; Stop 168
tataaggtgccacaatgatttccgc

SEQ ID NO: 408056 - DNA, 25 bp, Artificial
  probe
  misc_feature (1)..(25): SEQ ID NO: 5357; WAN024CGC; Start 29; Stop 53
tgagggagttgtccatccttgataa

SEQ ID NO: 408057 - DNA, 25 bp, Artificial
  probe
  misc_feature (1)..(25): SEQ ID NO: 5357; WAN024CGC; Start 28; Stop 52
ttgagggagttgtccatccttgata

SEQ ID NO: 408058 - DNA, 25 bp, Artificial
  probe
  misc_feature (1)..(25): SEQ ID NO: 5357; WAN024CGC; Start 265; Stop 289
gccaccgataattccgattgtttta

SEQ ID NO: 408059 - DNA, 25 bp, Artificial
  probe
  misc_feature (1)..(25): SEQ ID NO: 5357; WAN024CGC; Start 37; Stop 61
ttgtccatccttgataacggcatcc

SEQ ID NO: 408060 - DNA, 25 bp, Artificial
  probe
  misc_feature (1)..(25): SEQ ID NO: 5357; WAN024CGC; Start 209; Stop 233
ataaccttgtggcccatgtagatag

SEQ ID NO: 408061 - DNA, 25 bp, Artificial
  probe
  misc_feature (1)..(25): SEQ ID NO: 5357; WAN024CGC; Start 208; Stop 232
gataaccttgtggcccatgtagata

SEQ ID NO: 408062 - DNA, 25 bp, Artificial
  probe
  misc_feature (1)..(25): SEQ ID NO: 5357; WAN024CGC; Start 34; Stop 58
gagttgtccatccttgataacggca

SEQ ID NO: 408063 - DNA, 25 bp, Artificial
  probe
  misc_feature (1)..(25): SEQ ID NO: 5357; WAN024CGC; Start 39; Stop 63
gtccatccttgataacggcatccaa

SEQ ID NO: 408064 - DNA, 25 bp, Artificial
  probe
  misc_feature (1)..(25): SEQ ID NO: 5357; WAN024CGC; Start 270; Stop 294
cgataattccgattgttttagatga

SEQ ID NO: 408065 - DNA, 25 bp, Artificial
  probe
  misc_feature (1)..(25): SEQ ID NO: 5357; WAN024CGC; Start 42; Stop 66
catccttgataacggcatccaaacc

SEQ ID NO: 408066 - DNA, 25 bp, Artificial
  probe
  misc_feature (1)..(25): SEQ ID NO: 5357; WAN024CGC; Start 41; Stop 65
ccatccttgataacggcatccaaac

SEQ ID NO: 408067 - DNA, 25 bp, Artificial
  probe
  misc_feature (1)..(25): SEQ ID NO: 5357; WAN024CGC; Start 40; Stop 64
tccatccttgataacggcatccaaa

SEQ ID NO: 408068 - DNA, 25 bp, Artificial
  probe
  misc_feature (1)..(25): SEQ ID NO: 5357; WAN024CGC; Start 27; Stop 51
cttgagggagttgtccatccttgat

SEQ ID NO: 408069 - DNA, 25 bp, Artificial
  probe
  misc_feature (1)..(25): SEQ ID NO: 5357; WAN024CGC; Start 31; Stop 55
agggagttgtccatccttgataacg

SEQ ID NO: 408070 - DNA, 25 bp, Artificial
  probe
  misc_feature (1)..(25): SEQ ID NO: 5357; WAN024CGC; Start 217; Stop 241
gtggcccatgtagatagcagaaatg

SEQ ID NO: 408071 - DNA, 25 bp, Artificial
  probe
  misc_feature (1)..(25): SEQ ID NO: 5357; WAN024CGC; Start 216; Stop 240
tgtggcccatgtagatagcagaaat

SEQ ID NO: 408072 - DNA, 25 bp, Artificial
  probe
  misc_feature (1)..(25): SEQ ID NO: 5357; WAN024CGC; Start 18; Stop 42
gatctgttccttgagggagttgtcc

SEQ ID NO: 408073 - DNA, 25 bp, Artificial
  probe
  misc_feature (1)..(25): SEQ ID NO: 5357; WAN024CGC; Start 215; Stop 239
ttgtggcccatgtagatagcagaaa

SEQ ID NO: 408074 - DNA, 25 bp, Artificial
  probe
  misc_feature (1)..(25): SEQ ID NO: 5358; WAN024FR6; Start 279; Stop 303
ttggttagatgatgatactgagatt

SEQ ID NO: 408075 - DNA, 25 bp, Artificial
  probe
  misc_feature (1)..(25): SEQ ID NO: 5358; WAN024FR6; Start 268; Stop 292
ggttatgtggtttggttagatgatg

SEQ ID NO: 408076 - DNA, 25 bp, Artificial
  probe
  misc_feature (1)..(25): SEQ ID NO: 5358; WAN024FR6; Start 267; Stop 291
aggttatgtggtttggttagatgat

SEQ ID NO: 408077 - DNA, 25 bp, Artificial
  probe
  misc_feature (1)..(25): SEQ ID NO: 5358; WAN024FR6; Start 259; Stop 283
ggtagaataggttatgtggtttggt

SEQ ID NO: 408078 - DNA, 25 bp, Artificial
  probe
  misc_feature (1)..(25): SEQ ID NO: 5358; WAN024FR6; Start 257; Stop 281
agggtagaataggttatgtggtttg

SEQ ID NO: 408079 - DNA, 25 bp, Artificial
  probe
  misc_feature (1)..(25): SEQ ID NO: 5358; WAN024FR6; Start 273; Stop 297
tgtggtttggttagatgatgatact

SEQ ID NO: 408080 - DNA, 25 bp, Artificial
  probe
  misc_feature (1)..(25): SEQ ID NO: 5358; WAN024FR6; Start 691; Stop 715
attcgggatttgatagtggcttata

SEQ ID NO: 408081 - DNA, 25 bp, Artificial
  probe
  misc_feature (1)..(25): SEQ ID NO: 5358; WAN024FR6; Start 274; Stop 298
gtggtttggttagatgatgatactg

SEQ ID NO: 408082 - DNA, 25 bp, Artificial
  probe
  misc_feature (1)..(25): SEQ ID NO: 5358; WAN024FR6; Start 275; Stop 299
tggtttggttagatgatgatactga

SEQ ID NO: 408083 - DNA, 25 bp, Artificial
  probe
  misc_feature (1)..(25): SEQ ID NO: 5358; WAN024FR6; Start 266; Stop 290
taggttatgtggtttggttagatga

SEQ ID NO: 408084 - DNA, 25 bp, Artificial
  probe
  misc_feature (1)..(25): SEQ ID NO: 5358; WAN024FR6; Start 256; Stop 280
aagggtagaataggttatgtggttt

SEQ ID NO: 408085 - DNA, 25 bp, Artificial
  probe
  misc_feature (1)..(25): SEQ ID NO: 5358; WAN024FR6; Start 255; Stop 279
aaagggtagaataggttatgtggtt

SEQ ID NO: 408086 - DNA, 25 bp, Artificial
  probe
  misc_feature (1)..(25): SEQ ID NO: 5358; WAN024FR6; Start 258; Stop 282
gggtagaataggttatgtggtttgg

SEQ ID NO: 408087 - DNA, 25 bp, Artificial
  probe
  misc_feature (1)..(25): SEQ ID NO: 5358; WAN024FR6; Start 690; Stop 714
aattcgggatttgatagtggcttat

SEQ ID NO: 408088 - DNA, 25 bp, Artificial
  probe
  misc_feature (1)..(25): SEQ ID NO: 5358; WAN024FR6; Start 269; Stop 293
gttatgtggtttggttagatgatga

SEQ ID NO: 408089 - DNA, 25 bp, Artificial
  probe
  misc_feature (1)..(25): SEQ ID NO: 5358; WAN024FR6; Start 8; Stop 32
gagttagtgtgcccaatttatatgc

SEQ ID NO: 408090 - DNA, 25 bp, Artificial
  probe
  misc_feature (1)..(25): SEQ ID NO: 5358; WAN024FR6; Start 276; Stop 300
ggtttggttagatgatgatactgag

SEQ ID NO: 408091 - DNA, 25 bp, Artificial
  probe
  misc_feature (1)..(25): SEQ ID NO: 5358; WAN024FR6; Start 272; Stop 296
atgtggtttggttagatgatgatac

SEQ ID NO: 408092 - DNA, 25 bp, Artificial
  probe
  misc_feature (1)..(25): SEQ ID NO: 5358; WAN024FR6; Start 260; Stop 284
gtagaataggttatgtggtttggtt

SEQ ID NO: 408093 - DNA, 25 bp, Artificial
  probe
  misc_feature (1)..(25): SEQ ID NO: 5358; WAN024FR6; Start 7; Stop 31
agagttagtgtgcccaatttatatg

SEQ ID NO: 408094 - DNA, 25 bp, Artificial
  probe
  misc_feature (1)..(25): SEQ ID NO: 5358; WAN024FR6; Start 265; Stop 289
ataggttatgtggtttggttagatg

SEQ ID NO: 408095 - DNA, 25 bp, Artificial
  probe
  misc_feature (1)..(25): SEQ ID NO: 5358; WAN024FR6; Start 254; Stop 278
taaagggtagaataggttatgtggt

SEQ ID NO: 408096 - DNA, 25 bp, Artificial
  probe
  misc_feature (1)..(25): SEQ ID NO: 5358; WAN024FR6; Start 401; Stop 425
caaattctcgtggtttactttcaaa

SEQ ID NO: 408097 - DNA, 25 bp, Artificial
  probe
  misc_feature (1)..(25): SEQ ID NO: 5358; WAN024FR6; Start 5; Stop 29
gaagagttagtgtgcccaatttata

SEQ ID NO: 408098 - DNA, 25 bp, Artificial
  probe
  misc_feature (1)..(25): SEQ ID NO: 5358; WAN024FR6; Start 263; Stop 287
gaataggttatgtggtttggttaga

SEQ ID NO: 408099 - DNA, 25 bp, Artificial
  probe
  misc_feature (1)..(25): SEQ ID NO: 5358; WAN024FR6; Start 262; Stop 286
agaataggttatgtggtttggttag

SEQ ID NO: 408100 - DNA, 25 bp, Artificial
  probe
  misc_feature (1)..(25): SEQ ID NO: 5358; WAN024FR6; Start 4; Stop 28
cgaagagttagtgtgcccaatttat

SEQ ID NO: 408101 - DNA, 25 bp, Artificial
  probe
  misc_feature (1)..(25): SEQ ID NO: 5358; WAN024FR6; Start 270; Stop 294
ttatgtggtttggttagatgatgat

SEQ ID NO: 408102 - DNA, 25 bp, Artificial
  probe
  misc_feature (1)..(25): SEQ ID NO: 5358; WAN024FR6; Start 277; Stop 301
gtttggttagatgatgatactgaga

SEQ ID NO: 408103 - DNA, 25 bp, Artificial
  probe
  misc_feature (1)..(25): SEQ ID NO: 5358; WAN024FR6; Start 280; Stop 304
tggttagatgatgatactgagatta

SEQ ID NO: 408104 - DNA, 25 bp, Artificial
  probe
  misc_feature (1)..(25): SEQ ID NO: 5358; WAN024FR6; Start 6; Stop 30
aagagttagtgtgcccaatttatat

SEQ ID NO: 408105 - DNA, 25 bp, Artificial
  probe
  misc_feature (1)..(25): SEQ ID NO: 5358; WAN024FR6; Start 693; Stop 717
tcgggatttgatagtggcttataaa

SEQ ID NO: 408106 - DNA, 25 bp, Artificial
  probe
  misc_feature (1)..(25): SEQ ID NO: 5358; WAN024FR6; Start 692; Stop 716
ttcgggatttgatagtggcttataa

SEQ ID NO: 408107 - DNA, 25 bp, Artificial
  probe
  misc_feature (1)..(25): SEQ ID NO: 5359; WAN024FLX; Start 194; Stop 218
aagtggtgtgtagacaatcttcatg

SEQ ID NO: 408108 - DNA, 25 bp, Artificial
  probe
  misc_feature (1)..(25): SEQ ID NO: 5359; WAN024FLX; Start 190; Stop 214
catgaagtggtgtgtagacaatctt

SEQ ID NO: 408109 - DNA, 25 bp, Artificial
  probe
  misc_feature (1)..(25): SEQ ID NO: 5359; WAN024FLX; Start 275; Stop 299
aaggtattctatgtcaacagcttcg

SEQ ID NO: 408110 - DNA, 25 bp, Artificial
  probe
  misc_feature (1)..(25): SEQ ID NO: 5359; WAN024FLX; Start 368; Stop 392
ttcgattgcacggatataagtagtc

SEQ ID NO: 408111 - DNA, 25 bp, Artificial
  probe
  misc_feature (1)..(25): SEQ ID NO: 5359; WAN024FLX; Start 274; Stop 298
taaggtattctatgtcaacagcttc

SEQ ID NO: 408112 - DNA, 25 bp, Artificial
  probe
  misc_feature (1)..(25): SEQ ID NO: 5359; WAN024FLX; Start 244; Stop 268
ctgggttgatgtttatgtccttaac

SEQ ID NO: 408113 - DNA, 25 bp, Artificial
  probe
  misc_feature (1)..(25): SEQ ID NO: 5359; WAN024FLX; Start 222; Stop 246
ttaccaaattcttcaatcaaggctg

SEQ ID NO: 408114 - DNA, 25 bp, Artificial
  probe
  misc_feature (1)..(25): SEQ ID NO: 5359; WAN024FLX; Start 370; Stop 394
cgattgcacggatataagtagtcaa

SEQ ID NO: 408115 - DNA, 25 bp, Artificial
  probe
  misc_feature (1)..(25): SEQ ID NO: 5359; WAN024FLX; Start 221; Stop 245
tttaccaaattcttcaatcaaggct

SEQ ID NO: 408116 - DNA, 25 bp, Artificial
  probe
  misc_feature (1)..(25): SEQ ID NO: 5359; WAN024FLX; Start 369; Stop 393
tcgattgcacggatataagtagtca

SEQ ID NO: 408117 - DNA, 25 bp, Artificial
  probe
  misc_feature (1)..(25): SEQ ID NO: 5359; WAN024FLX; Start 195; Stop 219
agtggtgtgtagacaatcttcatgt

SEQ ID NO: 408118 - DNA, 25 bp, Artificial
  probe
  misc_feature (1)..(25): SEQ ID NO: 5359; WAN024FLX; Start 243; Stop 267
gctgggttgatgtttatgtccttaa

SEQ ID NO: 408119 - DNA, 25 bp, Artificial
  probe
  misc_feature (1)..(25): SEQ ID NO: 5359; WAN024FLX; Start 220; Stop 244
ctttaccaaattcttcaatcaaggc

SEQ ID NO: 408120 - DNA, 25 bp, Artificial
  probe
  misc_feature (1)..(25): SEQ ID NO: 5359; WAN024FLX; Start 437; Stop 461
gtaaaccttgtaaccgttaaatgga

SEQ ID NO: 408121 - DNA, 25 bp, Artificial
  probe
  misc_feature (1)..(25): SEQ ID NO: 5359; WAN024FLX; Start 438; Stop 462
taaaccttgtaaccgttaaatggag

SEQ ID NO: 408122 - DNA, 25 bp, Artificial
  probe
  misc_feature (1)..(25): SEQ ID NO: 5359; WAN024FLX; Start 436; Stop 460
cgtaaaccttgtaaccgttaaatgg

SEQ ID NO: 408123 - DNA, 25 bp, Artificial
  probe
  misc_feature (1)..(25): SEQ ID NO: 5359; WAN024FLX; Start 435; Stop 459
ccgtaaaccttgtaaccgttaaatg

SEQ ID NO: 408124 - DNA, 25 bp, Artificial
  probe
  misc_feature (1)..(25): SEQ ID NO: 5359; WAN024FLX; Start 273; Stop 297
ttaaggtattctatgtcaacagctt

SEQ ID NO: 408125 - DNA, 25 bp, Artificial
  probe
  misc_feature (1)..(25): SEQ ID NO: 5359; WAN024FLX; Start 72; Stop 96
gggtttggagatgttacagttgaaa

SEQ ID NO: 408126 - DNA, 25 bp, Artificial
  probe
  misc_feature (1)..(25): SEQ ID NO: 5359; WAN024FLX; Start 248; Stop 272
gttgatgtttatgtccttaacctct

SEQ ID NO: 408127 - DNA, 25 bp, Artificial
  probe
  misc_feature (1)..(25): SEQ ID NO: 5359; WAN024FLX; Start 434; Stop 458
accgtaaaccttgtaaccgttaaat

SEQ ID NO: 408128 - DNA, 25 bp, Artificial
  probe
  misc_feature (1)..(25): SEQ ID NO: 5359; WAN024FLX; Start 250; Stop 274
tgatgtttatgtccttaacctcttt

SEQ ID NO: 408129 - DNA, 25 bp, Artificial
  probe
  misc_feature (1)..(25): SEQ ID NO: 5359; WAN024FLX; Start 249; Stop 273
ttgatgtttatgtccttaacctctt

SEQ ID NO: 408130 - DNA, 25 bp, Artificial
  probe
  misc_feature (1)..(25): SEQ ID NO: 5359; WAN024FLX; Start 433; Stop 457
caccgtaaaccttgtaaccgttaaa

SEQ ID NO: 408131 - DNA, 25 bp, Artificial
  probe
  misc_feature (1)..(25): SEQ ID NO: 5359; WAN024FLX; Start 271; Stop 295
ctttaaggtattctatgtcaacagc

SEQ ID NO: 408132 - DNA, 25 bp, Artificial
  probe
  misc_feature (1)..(25): SEQ ID NO: 5359; WAN024FLX; Start 71; Stop 95
tgggtttggagatgttacagttgaa

SEQ ID NO: 408133 - DNA, 25 bp, Artificial
  probe
  misc_feature (1)..(25): SEQ ID NO: 5359; WAN024FLX; Start 299; Stop 323
gccgataacttcaatcaagccagaa

SEQ ID NO: 408134 - DNA, 25 bp, Artificial
  probe
  misc_feature (1)..(25): SEQ ID NO: 5359; WAN024FLX; Start 439; Stop 463
aaaccttgtaaccgttaaatggagc

SEQ ID NO: 408135 - DNA, 25 bp, Artificial
  probe
  misc_feature (1)..(25): SEQ ID NO: 5359; WAN024FLX; Start 226; Stop 250
caaattcttcaatcaaggctgggtt

SEQ ID NO: 408136 - DNA, 25 bp, Artificial
  probe
  misc_feature (1)..(25): SEQ ID NO: 5359; WAN024FLX; Start 276; Stop 300
aggtattctatgtcaacagcttcgc

SEQ ID NO: 408137 - DNA, 25 bp, Artificial
  probe
  misc_feature (1)..(25): SEQ ID NO: 5359; WAN024FLX; Start 66; Stop 90
ctttctgggtttggagatgttacag

SEQ ID NO: 408138 - DNA, 25 bp, Artificial
  probe
  misc_feature (1)..(25): SEQ ID NO: 5359; WAN024FLX; Start 219; Stop 243
tctttaccaaattcttcaatcaagg

SEQ ID NO: 408139 - DNA, 25 bp, Artificial
  probe
  misc_feature (1)..(25): SEQ ID NO: 5359; WAN024FLX; Start 193; Stop 217
gaagtggtgtgtagacaatcttcat

SEQ ID NO: 408140 - DNA, 25 bp, Artificial
  probe
  misc_feature (1)..(25): SEQ ID NO: 5360; WAN024CB2; Start 121; Stop 145
aattgtaatacgatactgaacaccg

SEQ ID NO: 408141 - DNA, 25 bp, Artificial
  probe
  misc_feature (1)..(25): SEQ ID NO: 5360; WAN024CB2; Start 55; Stop 79
ctgtcaccatgtactcatcatctac

SEQ ID NO: 408142 - DNA, 25 bp, Artificial
  probe
  misc_feature (1)..(25): SEQ ID NO: 5360; WAN024CB2; Start 54; Stop 78
tctgtcaccatgtactcatcatcta

SEQ ID NO: 408143 - DNA, 25 bp, Artificial
  probe
  misc_feature (1)..(25): SEQ ID NO: 5360; WAN024CB2; Start 56; Stop 80
tgtcaccatgtactcatcatctact

SEQ ID NO: 408144 - DNA, 25 bp, Artificial
  probe
  misc_feature (1)..(25): SEQ ID NO: 5360; WAN024CB2; Start 57; Stop 81
gtcaccatgtactcatcatctacta

SEQ ID NO: 408145 - DNA, 25 bp, Artificial
  probe
  misc_feature (1)..(25): SEQ ID NO: 5360; WAN024CB2; Start 52; Stop 76
cttctgtcaccatgtactcatcatc

SEQ ID NO: 408146 - DNA, 25 bp, Artificial
  probe
  misc_feature (1)..(25): SEQ ID NO: 5360; WAN024CB2; Start 53; Stop 77
ttctgtcaccatgtactcatcatct

SEQ ID NO: 408147 - DNA, 25 bp, Artificial
  probe
  misc_feature (1)..(25): SEQ ID NO: 5360; WAN024CB2; Start 58; Stop 82
tcaccatgtactcatcatctactaa

SEQ ID NO: 408148 - DNA, 25 bp, Artificial
  probe
  misc_feature (1)..(25): SEQ ID NO: 5360; WAN024CB2; Start 120; Stop 144
gaattgtaatacgatactgaacacc

SEQ ID NO: 408149 - DNA, 25 bp, Artificial
  probe
  misc_feature (1)..(25): SEQ ID NO: 5360; WAN024CB2; Start 51; Stop 75
ccttctgtcaccatgtactcatcat

SEQ ID NO: 408150 - DNA, 25 bp, Artificial
  probe
  misc_feature (1)..(25): SEQ ID NO: 5360; WAN024CB2; Start 8; Stop 32
gacctccatatcccacttatcaaag

SEQ ID NO: 408151 - DNA, 25 bp, Artificial
  probe
  misc_feature (1)..(25): SEQ ID NO: 5360; WAN024CB2; Start 23; Stop 47
cttatcaaagggaatcaaacgcttc

SEQ ID NO: 408152 - DNA, 25 bp, Artificial
  probe
  misc_feature (1)..(25): SEQ ID NO: 5360; WAN024CB2; Start 59; Stop 83
caccatgtactcatcatctactaat

SEQ ID NO: 408153 - DNA, 25 bp, Artificial
  probe
  misc_feature (1)..(25): SEQ ID NO: 5360; WAN024CB2; Start 156; Stop 180
cagactctatagtaatggcatagcg

SEQ ID NO: 408154 - DNA, 25 bp, Artificial
  probe
  misc_feature (1)..(25): SEQ ID NO: 5360; WAN024CB2; Start 24; Stop 48
ttatcaaagggaatcaaacgcttca

SEQ ID NO: 408155 - DNA, 25 bp, Artificial
  probe
  misc_feature (1)..(25): SEQ ID NO: 5360; WAN024CB2; Start 22; Stop 46
acttatcaaagggaatcaaacgctt

SEQ ID NO: 408156 - DNA, 25 bp, Artificial
  probe
  misc_feature (1)..(25): SEQ ID NO: 5360; WAN024CB2; Start 155; Stop 179
gcagactctatagtaatggcatagc

SEQ ID NO: 408157 - DNA, 25 bp, Artificial
  probe
  misc_feature (1)..(25): SEQ ID NO: 5360; WAN024CB2; Start 102; Stop 126
tccctttctactcatcttgaattgt

SEQ ID NO: 408158 - DNA, 25 bp, Artificial
  probe
  misc_feature (1)..(25): SEQ ID NO: 5360; WAN024CB2; Start 98; Stop 122
tttctccctttctactcatcttgaa

SEQ ID NO: 408159 - DNA, 25 bp, Artificial
  probe
  misc_feature (1)..(25): SEQ ID NO: 5360; WAN024CB2; Start 119; Stop 143
tgaattgtaatacgatactgaacac

SEQ ID NO: 408160 - DNA, 25 bp, Artificial
  probe
  misc_feature (1)..(25): SEQ ID NO: 5360; WAN024CB2; Start 99; Stop 123
ttctccctttctactcatcttgaat

SEQ ID NO: 408161 - DNA, 25 bp, Artificial
  probe
  misc_feature (1)..(25): SEQ ID NO: 5360; WAN024CB2; Start 101; Stop 125
ctccctttctactcatcttgaattg

SEQ ID NO: 408162 - DNA, 25 bp, Artificial
  probe
  misc_feature (1)..(25): SEQ ID NO: 5360; WAN024CB2; Start 100; Stop 124
tctccctttctactcatcttgaatt

SEQ ID NO: 408163 - DNA, 25 bp, Artificial
  probe
  misc_feature (1)..(25): SEQ ID NO: 5360; WAN024CB2; Start 25; Stop 49
tatcaaagggaatcaaacgcttcag

SEQ ID NO: 408164 - DNA, 25 bp, Artificial
  probe
  misc_feature (1)..(25): SEQ ID NO: 5360; WAN024CB2; Start 210; Stop 234
gtacattgacaatcccgatagactg

SEQ ID NO: 408165 - DNA, 25 bp, Artificial
  probe
  misc_feature (1)..(25): SEQ ID NO: 5360; WAN024CB2; Start 7; Stop 31
cgacctccatatcccacttatcaaa

SEQ ID NO: 408166 - DNA, 25 bp, Artificial
  probe
  misc_feature (1)..(25): SEQ ID NO: 5360; WAN024CB2; Start 161; Stop 185
tctatagtaatggcatagcggtctc

SEQ ID NO: 408167 - DNA, 25 bp, Artificial
  probe
  misc_feature (1)..(25): SEQ ID NO: 5360; WAN024CB2; Start 160; Stop 184
ctctatagtaatggcatagcggtct

SEQ ID NO: 408168 - DNA, 25 bp, Artificial
  probe
  misc_feature (1)..(25): SEQ ID NO: 5360; WAN024CB2; Start 157; Stop 181
agactctatagtaatggcatagcgg

SEQ ID NO: 408169 - DNA, 25 bp, Artificial
  probe
  misc_feature (1)..(25): SEQ ID NO: 5360; WAN024CB2; Start 21; Stop 45
cacttatcaaagggaatcaaacgct

SEQ ID NO: 408170 - DNA, 25 bp, Artificial
  probe
  misc_feature (1)..(25): SEQ ID NO: 5360; WAN024CB2; Start 159; Stop 183
actctatagtaatggcatagcggtc

SEQ ID NO: 408171 - DNA, 25 bp, Artificial
  probe
  misc_feature (1)..(25): SEQ ID NO: 5360; WAN024CB2; Start 158; Stop 182
gactctatagtaatggcatagcggt

SEQ ID NO: 408172 - DNA, 25 bp, Artificial
  probe
  misc_feature (1)..(25): SEQ ID NO: 5360; WAN024CB2; Start 103; Stop 127
ccctttctactcatcttgaattgta

SEQ ID NO: 408173 - DNA, 25 bp, Artificial
  probe
  misc_feature (1)..(25): SEQ ID NO: 5361; WAN024DUS; Start 6; Stop 30
agattcgttcatagatggctcaaag

SEQ ID NO: 408174 - DNA, 25 bp, Artificial
  probe
  misc_feature (1)..(25): SEQ ID NO: 5361; WAN024DUS; Start 7; Stop 31
gattcgttcatagatggctcaaaga

SEQ ID NO: 408175 - DNA, 25 bp, Artificial
  probe
  misc_feature (1)..(25): SEQ ID NO: 5361; WAN024DUS; Start 13; Stop 37
ttcatagatggctcaaagagttctc

SEQ ID NO: 408176 - DNA, 25 bp, Artificial
  probe
  misc_feature (1)..(25): SEQ ID NO: 5361; WAN024DUS; Start 12; Stop 36
gttcatagatggctcaaagagttct

SEQ ID NO: 408177 - DNA, 25 bp, Artificial
  probe
  misc_feature (1)..(25): SEQ ID NO: 5361; WAN024DUS; Start 8; Stop 32
attcgttcatagatggctcaaagag

SEQ ID NO: 408178 - DNA, 25 bp, Artificial
  probe
  misc_feature (1)..(25): SEQ ID NO: 5361; WAN024DUS; Start 5; Stop 29
gagattcgttcatagatggctcaaa

SEQ ID NO: 408179 - DNA, 25 bp, Artificial
  probe
  misc_feature (1)..(25): SEQ ID NO: 5361; WAN024DUS; Start 28; Stop 52
aagagttctcctgtctcgttcaaga

SEQ ID NO: 408180 - DNA, 25 bp, Artificial
  probe
  misc_feature (1)..(25): SEQ ID NO: 5361; WAN024DUS; Start 11; Stop 35
cgttcatagatggctcaaagagttc

SEQ ID NO: 408181 - DNA, 25 bp, Artificial
  probe
  misc_feature (1)..(25): SEQ ID NO: 5361; WAN024DUS; Start 31; Stop 55
agttctcctgtctcgttcaagagtt

SEQ ID NO: 408182 - DNA, 25 bp, Artificial
  probe
  misc_feature (1)..(25): SEQ ID NO: 5361; WAN024DUS; Start 16; Stop 40
atagatggctcaaagagttctcctg

SEQ ID NO: 408183 - DNA, 25 bp, Artificial
  probe
  misc_feature (1)..(25): SEQ ID NO: 5361; WAN024DUS; Start 15; Stop 39
catagatggctcaaagagttctcct

SEQ ID NO: 408184 - DNA, 25 bp, Artificial
  probe
  misc_feature (1)..(25): SEQ ID NO: 5361; WAN024DUS; Start 14; Stop 38
tcatagatggctcaaagagttctcc

SEQ ID NO: 408185 - DNA, 25 bp, Artificial
  probe
  misc_feature (1)..(25): SEQ ID NO: 5361; WAN024DUS; Start 10; Stop 34
tcgttcatagatggctcaaagagtt

SEQ ID NO: 408186 - DNA, 25 bp, Artificial
  probe
  misc_feature (1)..(25): SEQ ID NO: 5361; WAN024DUS; Start 9; Stop 33
ttcgttcatagatggctcaaagagt

SEQ ID NO: 408187 - DNA, 25 bp, Artificial
  probe
  misc_feature (1)..(25): SEQ ID NO: 5361; WAN024DUS; Start 29; Stop 53
agagttctcctgtctcgttcaagag

SEQ ID NO: 408188 - DNA, 25 bp, Artificial
  probe
  misc_feature (1)..(25): SEQ ID NO: 5361; WAN024DUS; Start 33; Stop 57
ttctcctgtctcgttcaagagtttc

SEQ ID NO: 408189 - DNA, 25 bp, Artificial
  probe
  misc_feature (1)..(25): SEQ ID NO: 5361; WAN024DUS; Start 27; Stop 51
aaagagttctcctgtctcgttcaag

SEQ ID NO: 408190 - DNA, 25 bp, Artificial
  probe
  misc_feature (1)..(25): SEQ ID NO: 5361; WAN024DUS; Start 30; Stop 54
gagttctcctgtctcgttcaagagt

SEQ ID NO: 408191 - DNA, 25 bp, Artificial
  probe
  misc_feature (1)..(25): SEQ ID NO: 5361; WAN024DUS; Start 4; Stop 28
cgagattcgttcatagatggctcaa

SEQ ID NO: 408192 - DNA, 25 bp, Artificial
  probe
  misc_feature (1)..(25): SEQ ID NO: 5361; WAN024DUS; Start 35; Stop 59
ctcctgtctcgttcaagagtttcaa

SEQ ID NO: 408193 - DNA, 25 bp, Artificial
  probe
  misc_feature (1)..(25): SEQ ID NO: 5361; WAN024DUS; Start 32; Stop 56
gttctcctgtctcgttcaagagttt

SEQ ID NO: 408194 - DNA, 25 bp, Artificial
  probe
  misc_feature (1)..(25): SEQ ID NO: 5361; WAN024DUS; Start 26; Stop 50
caaagagttctcctgtctcgttcaa

SEQ ID NO: 408195 - DNA, 25 bp, Artificial
  probe
  misc_feature (1)..(25): SEQ ID NO: 5361; WAN024DUS; Start 24; Stop 48
ctcaaagagttctcctgtctcgttc

SEQ ID NO: 408196 - DNA, 25 bp, Artificial
  probe
  misc_feature (1)..(25): SEQ ID NO: 5361; WAN024DUS; Start 36; Stop 60
tcctgtctcgttcaagagtttcaac

SEQ ID NO: 408197 - DNA, 25 bp, Artificial
  probe
  misc_feature (1)..(25): SEQ ID NO: 5361; WAN024DUS; Start 17; Stop 41
tagatggctcaaagagttctcctgt

SEQ ID NO: 408198 - DNA, 25 bp, Artificial
  probe
  misc_feature (1)..(25): SEQ ID NO: 5361; WAN024DUS; Start 54; Stop 78
tttcaactcgtccaagtctttccag

SEQ ID NO: 408199 - DNA, 25 bp, Artificial
  probe
  misc_feature (1)..(25): SEQ ID NO: 5361; WAN024DUS; Start 146; Stop 170
caatgtcaatgcctaaaatatccgc

SEQ ID NO: 408200 - DNA, 25 bp, Artificial
  probe
  misc_feature (1)..(25): SEQ ID NO: 5361; WAN024DUS; Start 56; Stop 80
tcaactcgtccaagtctttccagta

SEQ ID NO: 408201 - DNA, 25 bp, Artificial
  probe
  misc_feature (1)..(25): SEQ ID NO: 5361; WAN024DUS; Start 37; Stop 61
cctgtctcgttcaagagtttcaact

SEQ ID NO: 408202 - DNA, 25 bp, Artificial
  probe
  misc_feature (1)..(25): SEQ ID NO: 5361; WAN024DUS; Start 34; Stop 58
tctcctgtctcgttcaagagtttca

SEQ ID NO: 408203 - DNA, 25 bp, Artificial
  probe
  misc_feature (1)..(25): SEQ ID NO: 5361; WAN024DUS; Start 25; Stop 49
tcaaagagttctcctgtctcgttca

SEQ ID NO: 408204 - DNA, 25 bp, Artificial
  probe
  misc_feature (1)..(25): SEQ ID NO: 5361; WAN024DUS; Start 53; Stop 77
gtttcaactcgtccaagtctttcca

SEQ ID NO: 408205 - DNA, 25 bp, Artificial
  probe
  misc_feature (1)..(25): SEQ ID NO: 5361; WAN024DUS; Start 52; Stop 76
agtttcaactcgtccaagtctttcc

SEQ ID NO: 408206 - DNA, 25 bp, Artificial
  probe
  misc_feature (1)..(25): SEQ ID NO: 5362; WAN024CPF; Start 119; Stop 143
atttgatacaaggcatcgtaaacag

SEQ ID NO: 408207 - DNA, 25 bp, Artificial
  probe
  misc_feature (1)..(25): SEQ ID NO: 5362; WAN024CPF; Start 114; Stop 138
caagaatttgatacaaggcatcgta

SEQ ID NO: 408208 - DNA, 25 bp, Artificial
  probe
  misc_feature (1)..(25): SEQ ID NO: 5362; WAN024CPF; Start 118; Stop 142
aatttgatacaaggcatcgtaaaca

SEQ ID NO: 408209 - DNA, 25 bp, Artificial
  probe
  misc_feature (1)..(25): SEQ ID NO: 5362; WAN024CPF; Start 108; Stop 132
ctttcccaagaatttgatacaaggc

SEQ ID NO: 408210 - DNA, 25 bp, Artificial
  probe
  misc_feature (1)..(25): SEQ ID NO: 5362; WAN024CPF; Start 117; Stop 141
gaatttgatacaaggcatcgtaaac

SEQ ID NO: 408211 - DNA, 25 bp, Artificial
  probe
  misc_feature (1)..(25): SEQ ID NO: 5362; WAN024CPF; Start 116; Stop 140
agaatttgatacaaggcatcgtaaa

SEQ ID NO: 408212 - DNA, 25 bp, Artificial
  probe
  misc_feature (1)..(25): SEQ ID NO: 5362; WAN024CPF; Start 115; Stop 139
aagaatttgatacaaggcatcgtaa

SEQ ID NO: 408213 - DNA, 25 bp, Artificial
  probe
  misc_feature (1)..(25): SEQ ID NO: 5362; WAN024CPF; Start 110; Stop 134
ttcccaagaatttgatacaaggcat

SEQ ID NO: 408214 - DNA, 25 bp, Artificial
  probe
  misc_feature (1)..(25): SEQ ID NO: 5362; WAN024CPF; Start 109; Stop 133
tttcccaagaatttgatacaaggca

SEQ ID NO: 408215 - DNA, 25 bp, Artificial
  probe
  misc_feature (1)..(25): SEQ ID NO: 5362; WAN024CPF; Start 111; Stop 135
tcccaagaatttgatacaaggcatc

SEQ ID NO: 408216 - DNA, 25 bp, Artificial
  probe
  misc_feature (1)..(25): SEQ ID NO: 5362; WAN024CPF; Start 120; Stop 144
tttgatacaaggcatcgtaaacagg

SEQ ID NO: 408217 - DNA, 25 bp, Artificial
  probe
  misc_feature (1)..(25): SEQ ID NO: 5362; WAN024CPF; Start 113; Stop 137
ccaagaatttgatacaaggcatcgt

SEQ ID NO: 408218 - DNA, 25 bp, Artificial
  probe
  misc_feature (1)..(25): SEQ ID NO: 5362; WAN024CPF; Start 121; Stop 145
ttgatacaaggcatcgtaaacagga

SEQ ID NO: 408219 - DNA, 25 bp, Artificial
  probe
  misc_feature (1)..(25): SEQ ID NO: 5362; WAN024CPF; Start 122; Stop 146
tgatacaaggcatcgtaaacaggac

SEQ ID NO: 408220 - DNA, 25 bp, Artificial
  probe
  misc_feature (1)..(25): SEQ ID NO: 5362; WAN024CPF; Start 112; Stop 136
cccaagaatttgatacaaggcatcg

SEQ ID NO: 408221 - DNA, 25 bp, Artificial
  probe
  misc_feature (1)..(25): SEQ ID NO: 5362; WAN024CPF; Start 67; Stop 91
aatttcgataatttcacgctccatg

SEQ ID NO: 408222 - DNA, 25 bp, Artificial
  probe
  misc_feature (1)..(25): SEQ ID NO: 5362; WAN024CPF; Start 66; Stop 90
caatttcgataatttcacgctccat

SEQ ID NO: 408223 - DNA, 25 bp, Artificial
  probe
  misc_feature (1)..(25): SEQ ID NO: 5362; WAN024CPF; Start 68; Stop 92
atttcgataatttcacgctccatga

SEQ ID NO: 408224 - DNA, 25 bp, Artificial
  probe
  misc_feature (1)..(25): SEQ ID NO: 5362; WAN024CPF; Start 104; Stop 128
tggtctttcccaagaatttgataca

SEQ ID NO: 408225 - DNA, 25 bp, Artificial
  probe
  misc_feature (1)..(25): SEQ ID NO: 5362; WAN024CPF; Start 105; Stop 129
ggtctttcccaagaatttgatacaa

SEQ ID NO: 408226 - DNA, 25 bp, Artificial
  probe
  misc_feature (1)..(25): SEQ ID NO: 5362; WAN024CPF; Start 107; Stop 131
tctttcccaagaatttgatacaagg

SEQ ID NO: 408227 - DNA, 25 bp, Artificial
  probe
  misc_feature (1)..(25): SEQ ID NO: 5362; WAN024CPF; Start 69; Stop 93
tttcgataatttcacgctccatgag

SEQ ID NO: 408228 - DNA, 25 bp, Artificial
  probe
  misc_feature (1)..(25): SEQ ID NO: 5362; WAN024CPF; Start 106; Stop 130
gtctttcccaagaatttgatacaag

SEQ ID NO: 408229 - DNA, 25 bp, Artificial
  probe
  misc_feature (1)..(25): SEQ ID NO: 5362; WAN024CPF; Start 70; Stop 94
ttcgataatttcacgctccatgaga

SEQ ID NO: 408230 - DNA, 25 bp, Artificial
  probe
  misc_feature (1)..(25): SEQ ID NO: 5362; WAN024CPF; Start 74; Stop 98
ataatttcacgctccatgagacgag

SEQ ID NO: 408231 - DNA, 25 bp, Artificial
  probe
  misc_feature (1)..(25): SEQ ID NO: 5362; WAN024CPF; Start 73; Stop 97
gataatttcacgctccatgagacga

SEQ ID NO: 408232 - DNA, 25 bp, Artificial
  probe
  misc_feature (1)..(25): SEQ ID NO: 5362; WAN024CPF; Start 13; Stop 37
gagaatgacaaaggcatcatccaag

SEQ ID NO: 408233 - DNA, 25 bp, Artificial
  probe
  misc_feature (1)..(25): SEQ ID NO: 5362; WAN024CPF; Start 65; Stop 89
gcaatttcgataatttcacgctcca

SEQ ID NO: 408234 - DNA, 25 bp, Artificial
  probe
  misc_feature (1)..(25): SEQ ID NO: 5362; WAN024CPF; Start 156; Stop 180
gatccaccttctccttaagatcacc

SEQ ID NO: 408235 - DNA, 25 bp, Artificial
  probe
  misc_feature (1)..(25): SEQ ID NO: 5362; WAN024CPF; Start 71; Stop 95
tcgataatttcacgctccatgagac

SEQ ID NO: 408236 - DNA, 25 bp, Artificial
  probe
  misc_feature (1)..(25): SEQ ID NO: 5362; WAN024CPF; Start 170; Stop 194
ttaagatcacccggaagaaatccaa

SEQ ID NO: 408237 - DNA, 25 bp, Artificial
  probe
  misc_feature (1)..(25): SEQ ID NO: 5362; WAN024CPF; Start 9; Stop 33
catcgagaatgacaaaggcatcatc

SEQ ID NO: 408238 - DNA, 25 bp, Artificial
  probe
  misc_feature (1)..(25): SEQ ID NO: 5362; WAN024CPF; Start 167; Stop 191
tccttaagatcacccggaagaaatc

SEQ ID NO: 408239 - DNA, 25 bp, Artificial
  probe
  misc_feature (1)..(25): SEQ ID NO: 5363; WAN024FVX; Start 27; Stop 51
tgagagcgataagcgattgatagaa

SEQ ID NO: 408240 - DNA, 25 bp, Artificial
  probe
  misc_feature (1)..(25): SEQ ID NO: 5363; WAN024FVX; Start 26; Stop 50
ttgagagcgataagcgattgataga

SEQ ID NO: 408241 - DNA, 25 bp, Artificial
  probe
  misc_feature (1)..(25): SEQ ID NO: 5363; WAN024FVX; Start 33; Stop 57
cgataagcgattgatagaaactgat

SEQ ID NO: 408242 - DNA, 25 bp, Artificial
  probe
  misc_feature (1)..(25): SEQ ID NO: 5363; WAN024FVX; Start 54; Stop 78
tgataaattgatttggtttcctgcc

SEQ ID NO: 408243 - DNA, 25 bp, Artificial
  probe
  misc_feature (1)..(25): SEQ ID NO: 5363; WAN024FVX; Start 28; Stop 52
gagagcgataagcgattgatagaaa

SEQ ID NO: 408244 - DNA, 25 bp, Artificial
  probe
  misc_feature (1)..(25): SEQ ID NO: 5363; WAN024FVX; Start 30; Stop 54
gagcgataagcgattgatagaaact

SEQ ID NO: 408245 - DNA, 25 bp, Artificial
  probe
  misc_feature (1)..(25): SEQ ID NO: 5363; WAN024FVX; Start 29; Stop 53
agagcgataagcgattgatagaaac

SEQ ID NO: 408246 - DNA, 25 bp, Artificial
  probe
  misc_feature (1)..(25): SEQ ID NO: 5363; WAN024FVX; Start 25; Stop 49
tttgagagcgataagcgattgatag

SEQ ID NO: 408247 - DNA, 25 bp, Artificial
  probe
  misc_feature (1)..(25): SEQ ID NO: 5363; WAN024FVX; Start 6; Stop 30
gaatccctatttaccagtctttgag

SEQ ID NO: 408248 - DNA, 25 bp, Artificial
  probe
  misc_feature (1)..(25): SEQ ID NO: 5363; WAN024FVX; Start 5; Stop 29
ggaatccctatttaccagtctttga

SEQ ID NO: 408249 - DNA, 25 bp, Artificial
  probe
  misc_feature (1)..(25): SEQ ID NO: 5363; WAN024FVX; Start 14; Stop 38
atttaccagtctttgagagcgataa

SEQ ID NO: 408250 - DNA, 25 bp, Artificial
  probe
  misc_feature (1)..(25): SEQ ID NO: 5363; WAN024FVX; Start 53; Stop 77
ctgataaattgatttggtttcctgc

SEQ ID NO: 408251 - DNA, 25 bp, Artificial
  probe
  misc_feature (1)..(25): SEQ ID NO: 5363; WAN024FVX; Start 12; Stop 36
ctatttaccagtctttgagagcgat

SEQ ID NO: 408252 - DNA, 25 bp, Artificial
  probe
  misc_feature (1)..(25): SEQ ID NO: 5363; WAN024FVX; Start 8; Stop 32
atccctatttaccagtctttgagag

SEQ ID NO: 408253 - DNA, 25 bp, Artificial
  probe
  misc_feature (1)..(25): SEQ ID NO: 5363; WAN024FVX; Start 15; Stop 39
tttaccagtctttgagagcgataag

SEQ ID NO: 408254 - DNA, 25 bp, Artificial
  probe
  misc_feature (1)..(25): SEQ ID NO: 5363; WAN024FVX; Start 31; Stop 55
agcgataagcgattgatagaaactg

SEQ ID NO: 408255 - DNA, 25 bp, Artificial
  probe
  misc_feature (1)..(25): SEQ ID NO: 5363; WAN024FVX; Start 13; Stop 37
tatttaccagtctttgagagcgata

SEQ ID NO: 408256 - DNA, 25 bp, Artificial
  probe
  misc_feature (1)..(25): SEQ ID NO: 5363; WAN024FVX; Start 32; Stop 56
gcgataagcgattgatagaaactga

SEQ ID NO: 408257 - DNA, 25 bp, Artificial
  probe
  misc_feature (1)..(25): SEQ ID NO: 5363; WAN024FVX; Start 24; Stop 48
ctttgagagcgataagcgattgata

SEQ ID NO: 408258 - DNA, 25 bp, Artificial
  probe
  misc_feature (1)..(25): SEQ ID NO: 5363; WAN024FVX; Start 7; Stop 31
aatccctatttaccagtctttgaga

SEQ ID NO: 408259 - DNA, 25 bp, Artificial
  probe
  misc_feature (1)..(25): SEQ ID NO: 5363; WAN024FVX; Start 4; Stop 28
cggaatccctatttaccagtctttg

SEQ ID NO: 408260 - DNA, 25 bp, Artificial
  probe
  misc_feature (1)..(25): SEQ ID NO: 5363; WAN024FVX; Start 9; Stop 33
tccctatttaccagtctttgagagc

SEQ ID NO: 408261 - DNA, 25 bp, Artificial
  probe
  misc_feature (1)..(25): SEQ ID NO: 5363; WAN024FVX; Start 52; Stop 76
actgataaattgatttggtttcctg

SEQ ID NO: 408262 - DNA, 25 bp, Artificial
  probe
  misc_feature (1)..(25): SEQ ID NO: 5363; WAN024FVX; Start 11; Stop 35
cctatttaccagtctttgagagcga

SEQ ID NO: 408263 - DNA, 25 bp, Artificial
  probe
  misc_feature (1)..(25): SEQ ID NO: 5363; WAN024FVX; Start 55; Stop 79
gataaattgatttggtttcctgcca

SEQ ID NO: 408264 - DNA, 25 bp, Artificial
  probe
  misc_feature (1)..(25): SEQ ID NO: 5363; WAN024FVX; Start 23; Stop 47
tctttgagagcgataagcgattgat

SEQ ID NO: 408265 - DNA, 25 bp, Artificial
  probe
  misc_feature (1)..(25): SEQ ID NO: 5363; WAN024FVX; Start 16; Stop 40
ttaccagtctttgagagcgataagc

SEQ ID NO: 408266 - DNA, 25 bp, Artificial
  probe
  misc_feature (1)..(25): SEQ ID NO: 5363; WAN024FVX; Start 3; Stop 27
gcggaatccctatttaccagtcttt

SEQ ID NO: 408267 - DNA, 25 bp, Artificial
  probe
  misc_feature (1)..(25): SEQ ID NO: 5363; WAN024FVX; Start 51; Stop 75
aactgataaattgatttggtttcct

SEQ ID NO: 408268 - DNA, 25 bp, Artificial
  probe
  misc_feature (1)..(25): SEQ ID NO: 5363; WAN024FVX; Start 37; Stop 61
aagcgattgatagaaactgataaat

SEQ ID NO: 408269 - DNA, 25 bp, Artificial
  probe
  misc_feature (1)..(25): SEQ ID NO: 5363; WAN024FVX; Start 39; Stop 63
gcgattgatagaaactgataaattg

SEQ ID NO: 408270 - DNA, 25 bp, Artificial
  probe
  misc_feature (1)..(25): SEQ ID NO: 5363; WAN024FVX; Start 10; Stop 34
ccctatttaccagtctttgagagcg

SEQ ID NO: 408271 - DNA, 25 bp, Artificial
  probe
  misc_feature (1)..(25): SEQ ID NO: 5363; WAN024FVX; Start 38; Stop 62
agcgattgatagaaactgataaatt

SEQ ID NO: 408272 - DNA, 25 bp, Artificial
  probe
  misc_feature (1)..(25): SEQ ID NO: 5364; WAN024CNG; Start 633; Stop 657
ttcttctggtagtgcttctaatgag

SEQ ID NO: 408273 - DNA, 25 bp, Artificial
  probe
  misc_feature (1)..(25): SEQ ID NO: 5364; WAN024CNG; Start 130; Stop 154
tataaccaacaacaagcagaacaac

SEQ ID NO: 408274 - DNA, 25 bp, Artificial
  probe
  misc_feature (1)..(25): SEQ ID NO: 5364; WAN024CNG; Start 88; Stop 112
gcagttggtgttgtattggtattag

SEQ ID NO: 408275 - DNA, 25 bp, Artificial
  probe
  misc_feature (1)..(25): SEQ ID NO: 5364; WAN024CNG; Start 128; Stop 152
catataaccaacaacaagcagaaca

SEQ ID NO: 408276 - DNA, 25 bp, Artificial
  probe
  misc_feature (1)..(25): SEQ ID NO: 5364; WAN024CNG; Start 638; Stop 662
ctggtagtgcttctaatgagtctta

SEQ ID NO: 408277 - DNA, 25 bp, Artificial
  probe
  misc_feature (1)..(25): SEQ ID NO: 5364; WAN024CNG; Start 127; Stop 151
tcatataaccaacaacaagcagaac

SEQ ID NO: 408278 - DNA, 25 bp, Artificial
  probe
  misc_feature (1)..(25): SEQ ID NO: 5364; WAN024CNG; Start 89; Stop 113
cagttggtgttgtattggtattagg

SEQ ID NO: 408279 - DNA, 25 bp, Artificial
  probe
  misc_feature (1)..(25): SEQ ID NO: 5364; WAN024CNG; Start 632; Stop 656
attcttctggtagtgcttctaatga

SEQ ID NO: 408280 - DNA, 25 bp, Artificial
  probe
  misc_feature (1)..(25): SEQ ID NO: 5364; WAN024CNG; Start 891; Stop 915
taatggagatgtgtatgatgacgat

SEQ ID NO: 408281 - DNA, 25 bp, Artificial
  probe
  misc_feature (1)..(25): SEQ ID NO: 5364; WAN024CNG; Start 890; Stop 914
ataatggagatgtgtatgatgacga

SEQ ID NO: 408282 - DNA, 25 bp, Artificial
  probe
  misc_feature (1)..(25): SEQ ID NO: 5364; WAN024CNG; Start 635; Stop 659
cttctggtagtgcttctaatgagtc

SEQ ID NO: 408283 - DNA, 25 bp, Artificial
  probe
  misc_feature (1)..(25): SEQ ID NO: 5364; WAN024CNG; Start 129; Stop 153
atataaccaacaacaagcagaacaa

SEQ ID NO: 408284 - DNA, 25 bp, Artificial
  probe
  misc_feature (1)..(25): SEQ ID NO: 5364; WAN024CNG; Start 892; Stop 916
aatggagatgtgtatgatgacgatg

SEQ ID NO: 408285 - DNA, 25 bp, Artificial
  probe
  misc_feature (1)..(25): SEQ ID NO: 5364; WAN024CNG; Start 637; Stop 661
tctggtagtgcttctaatgagtctt

SEQ ID NO: 408286 - DNA, 25 bp, Artificial
  probe
  misc_feature (1)..(25): SEQ ID NO: 5364; WAN024CNG; Start 636; Stop 660
ttctggtagtgcttctaatgagtct

SEQ ID NO: 408287 - DNA, 25 bp, Artificial
  probe
  misc_feature (1)..(25): SEQ ID NO: 5364; WAN024CNG; Start 634; Stop 658
tcttctggtagtgcttctaatgagt

SEQ ID NO: 408288 - DNA, 25 bp, Artificial
  probe
  misc_feature (1)..(25): SEQ ID NO: 5364; WAN024CNG; Start 639; Stop 663
tggtagtgcttctaatgagtcttat

SEQ ID NO: 408289 - DNA, 25 bp, Artificial
  probe
  misc_feature (1)..(25): SEQ ID NO: 5364; WAN024CNG; Start 125; Stop 149
attcatataaccaacaacaagcaga

SEQ ID NO: 408290 - DNA, 25 bp, Artificial
  probe
  misc_feature (1)..(25): SEQ ID NO: 5364; WAN024CNG; Start 889; Stop 913
aataatggagatgtgtatgatgacg

SEQ ID NO: 408291 - DNA, 25 bp, Artificial
  probe
  misc_feature (1)..(25): SEQ ID NO: 5364; WAN024CNG; Start 126; Stop 150
ttcatataaccaacaacaagcagaa

SEQ ID NO: 408292 - DNA, 25 bp, Artificial
  probe
  misc_feature (1)..(25): SEQ ID NO: 5364; WAN024CNG; Start 627; Stop 651
aagtaattcttctggtagtgcttct

SEQ ID NO: 408293 - DNA, 25 bp, Artificial
  probe
  misc_feature (1)..(25): SEQ ID NO: 5364; WAN024CNG; Start 628; Stop 652
agtaattcttctggtagtgcttcta

SEQ ID NO: 408294 - DNA, 25 bp, Artificial
  probe
  misc_feature (1)..(25): SEQ ID NO: 5364; WAN024CNG; Start 727; Stop 751
aattatggcggtcaagattattctg

SEQ ID NO: 408295 - DNA, 25 bp, Artificial
  probe
  misc_feature (1)..(25): SEQ ID NO: 5364; WAN024CNG; Start 631; Stop 655
aattcttctggtagtgcttctaatg

SEQ ID NO: 408296 - DNA, 25 bp, Artificial
  probe
  misc_feature (1)..(25): SEQ ID NO: 5364; WAN024CNG; Start 728; Stop 752
attatggcggtcaagattattctgg

SEQ ID NO: 408297 - DNA, 25 bp, Artificial
  probe
  misc_feature (1)..(25): SEQ ID NO: 5364; WAN024CNG; Start 131; Stop 155
ataaccaacaacaagcagaacaaca

SEQ ID NO: 408298 - DNA, 25 bp, Artificial
  probe
  misc_feature (1)..(25): SEQ ID NO: 5364; WAN024CNG; Start 629; Stop 653
gtaattcttctggtagtgcttctaa

SEQ ID NO: 408299 - DNA, 25 bp, Artificial
  probe
  misc_feature (1)..(25): SEQ ID NO: 5364; WAN024CNG; Start 132; Stop 156
taaccaacaacaagcagaacaacaa

SEQ ID NO: 408300 - DNA, 25 bp, Artificial
  probe
  misc_feature (1)..(25): SEQ ID NO: 5364; WAN024CNG; Start 737; Stop 761
gtcaagattattctggttcaggaga

SEQ ID NO: 408301 - DNA, 25 bp, Artificial
  probe
  misc_feature (1)..(25): SEQ ID NO: 5364; WAN024CNG; Start 746; Stop 770
attctggttcaggagatagttcaac

SEQ ID NO: 408302 - DNA, 25 bp, Artificial
  probe
  misc_feature (1)..(25): SEQ ID NO: 5364; WAN024CNG; Start 123; Stop 147
gtattcatataaccaacaacaagca

SEQ ID NO: 408303 - DNA, 25 bp, Artificial
  probe
  misc_feature (1)..(25): SEQ ID NO: 5364; WAN024CNG; Start 895; Stop 919
ggagatgtgtatgatgacgatggaa

SEQ ID NO: 408304 - DNA, 25 bp, Artificial
  probe
  misc_feature (1)..(25): SEQ ID NO: 5364; WAN024CNG; Start 893; Stop 917
atggagatgtgtatgatgacgatgg

SEQ ID NO: 408305 - DNA, 25 bp, Artificial
  probe
  misc_feature (1)..(25): SEQ ID NO: 5365; WAN024F9V; Start 257; Stop 281
acaacaaacttaggttccttatcat

SEQ ID NO: 408306 - DNA, 25 bp, Artificial
  probe
  misc_feature (1)..(25): SEQ ID NO: 5365; WAN024F9V; Start 258; Stop 282
caacaaacttaggttccttatcatt

SEQ ID NO: 408307 - DNA, 25 bp, Artificial
  probe
  misc_feature (1)..(25): SEQ ID NO: 5365; WAN024F9V; Start 263; Stop 287
aacttaggttccttatcattaacaa

SEQ ID NO: 408308 - DNA, 25 bp, Artificial
  probe
  misc_feature (1)..(25): SEQ ID NO: 5365; WAN024F9V; Start 264; Stop 288
acttaggttccttatcattaacaat

SEQ ID NO: 408309 - DNA, 25 bp, Artificial
  probe
  misc_feature (1)..(25): SEQ ID NO: 5365; WAN024F9V; Start 285; Stop 309
caatttcttctgtaaaaccttccgc

SEQ ID NO: 408310 - DNA, 25 bp, Artificial
  probe
  misc_feature (1)..(25): SEQ ID NO: 5365; WAN024F9V; Start 284; Stop 308
acaatttcttctgtaaaaccttccg

SEQ ID NO: 408311 - DNA, 25 bp, Artificial
  probe
  misc_feature (1)..(25): SEQ ID NO: 5365; WAN024F9V; Start 268; Stop 292
aggttccttatcattaacaatttct

SEQ ID NO: 408312 - DNA, 25 bp, Artificial
  probe
  misc_feature (1)..(25): SEQ ID NO: 5365; WAN024F9V; Start 286; Stop 310
aatttcttctgtaaaaccttccgcc

SEQ ID NO: 408313 - DNA, 25 bp, Artificial
  probe
  misc_feature (1)..(25): SEQ ID NO: 5365; WAN024F9V; Start 262; Stop 286
aaacttaggttccttatcattaaca

SEQ ID NO: 408314 - DNA, 25 bp, Artificial
  probe
  misc_feature (1)..(25): SEQ ID NO: 5365; WAN024F9V; Start 260; Stop 284
acaaacttaggttccttatcattaa

SEQ ID NO: 408315 - DNA, 25 bp, Artificial
  probe
  misc_feature (1)..(25): SEQ ID NO: 5365; WAN024F9V; Start 259; Stop 283
aacaaacttaggttccttatcatta

SEQ ID NO: 408316 - DNA, 25 bp, Artificial
  probe
  misc_feature (1)..(25): SEQ ID NO: 5365; WAN024F9V; Start 287; Stop 311
atttcttctgtaaaaccttccgcct

SEQ ID NO: 408317 - DNA, 25 bp, Artificial
  probe
  misc_feature (1)..(25): SEQ ID NO: 5365; WAN024F9V; Start 283; Stop 307
aacaatttcttctgtaaaaccttcc

SEQ ID NO: 408318 - DNA, 25 bp, Artificial
  probe
  misc_feature (1)..(25): SEQ ID NO: 5365; WAN024F9V; Start 261; Stop 285
caaacttaggttccttatcattaac

SEQ ID NO: 408319 - DNA, 25 bp, Artificial
  probe
  misc_feature (1)..(25): SEQ ID NO: 5365; WAN024F9V; Start 265; Stop 289
cttaggttccttatcattaacaatt

SEQ ID NO: 408320 - DNA, 25 bp, Artificial
  probe
  misc_feature (1)..(25): SEQ ID NO: 5365; WAN024F9V; Start 269; Stop 293
ggttccttatcattaacaatttctt

SEQ ID NO: 408321 - DNA, 25 bp, Artificial
  probe
  misc_feature (1)..(25): SEQ ID NO: 5365; WAN024F9V; Start 272; Stop 296
tccttatcattaacaatttcttctg

SEQ ID NO: 408322 - DNA, 25 bp, Artificial
  probe
  misc_feature (1)..(25): SEQ ID NO: 5365; WAN024F9V; Start 288; Stop 312
tttcttctgtaaaaccttccgcctg

SEQ ID NO: 408323 - DNA, 25 bp, Artificial
  probe
  misc_feature (1)..(25): SEQ ID NO: 5365; WAN024F9V; Start 273; Stop 297
ccttatcattaacaatttcttctgt

SEQ ID NO: 408324 - DNA, 25 bp, Artificial
  probe
  misc_feature (1)..(25): SEQ ID NO: 5365; WAN024F9V; Start 48; Stop 72
caaaactcttttcaccacgaagttc

SEQ ID NO: 408325 - DNA, 25 bp, Artificial
  probe
  misc_feature (1)..(25): SEQ ID NO: 5365; WAN024F9V; Start 267; Stop 291
taggttccttatcattaacaatttc

SEQ ID NO: 408326 - DNA, 25 bp, Artificial
  probe
  misc_feature (1)..(25): SEQ ID NO: 5365; WAN024F9V; Start 10; Stop 34
atttggcaaatgcaattcacgagga

SEQ ID NO: 408327 - DNA, 25 bp, Artificial
  probe
  misc_feature (1)..(25): SEQ ID NO: 5365; WAN024F9V; Start 47; Stop 71
ccaaaactcttttcaccacgaagtt

SEQ ID NO: 408328 - DNA, 25 bp, Artificial
  probe
  misc_feature (1)..(25): SEQ ID NO: 5365; WAN024F9V; Start 282; Stop 306
taacaatttcttctgtaaaaccttc

SEQ ID NO: 408329 - DNA, 25 bp, Artificial
  probe
  misc_feature (1)..(25): SEQ ID NO: 5365; WAN024F9V; Start 11; Stop 35
tttggcaaatgcaattcacgaggac

SEQ ID NO: 408330 - DNA, 25 bp, Artificial
  probe
  misc_feature (1)..(25): SEQ ID NO: 5365; WAN024F9V; Start 281; Stop 305
ttaacaatttcttctgtaaaacctt

SEQ ID NO: 408331 - DNA, 25 bp, Artificial
  probe
  misc_feature (1)..(25): SEQ ID NO: 5365; WAN024F9V; Start 279; Stop 303
cattaacaatttcttctgtaaaacc

SEQ ID NO: 408332 - DNA, 25 bp, Artificial
  probe
  misc_feature (1)..(25): SEQ ID NO: 5365; WAN024F9V; Start 280; Stop 304
attaacaatttcttctgtaaaacct

SEQ ID NO: 408333 - DNA, 25 bp, Artificial
  probe
  misc_feature (1)..(25): SEQ ID NO: 5365; WAN024F9V; Start 360; Stop 384
gaccgcgctctgcaatttcaaataa

SEQ ID NO: 408334 - DNA, 25 bp, Artificial
  probe
  misc_feature (1)..(25): SEQ ID NO: 5365; WAN024F9V; Start 9; Stop 33
catttggcaaatgcaattcacgagg

SEQ ID NO: 408335 - DNA, 25 bp, Artificial
  probe
  misc_feature (1)..(25): SEQ ID NO: 5366; WAN024DZ6; Start 59; Stop 83
gttccaatcgttacagttcattcaa

SEQ ID NO: 408336 - DNA, 25 bp, Artificial
  probe
  misc_feature (1)..(25): SEQ ID NO: 5366; WAN024DZ6; Start 60; Stop 84
ttccaatcgttacagttcattcaat

SEQ ID NO: 408337 - DNA, 25 bp, Artificial
  probe
  misc_feature (1)..(25): SEQ ID NO: 5366; WAN024DZ6; Start 104; Stop 128
aattgccatcttcttcattaaccag

SEQ ID NO: 408338 - DNA, 25 bp, Artificial
  probe
  misc_feature (1)..(25): SEQ ID NO: 5366; WAN024DZ6; Start 105; Stop 129
attgccatcttcttcattaaccaga

SEQ ID NO: 408339 - DNA, 25 bp, Artificial
  probe
  misc_feature (1)..(25): SEQ ID NO: 5366; WAN024DZ6; Start 61; Stop 85
tccaatcgttacagttcattcaata

SEQ ID NO: 408340 - DNA, 25 bp, Artificial
  probe
  misc_feature (1)..(25): SEQ ID NO: 5366; WAN024DZ6; Start 57; Stop 81
atgttccaatcgttacagttcattc

SEQ ID NO: 408341 - DNA, 25 bp, Artificial
  probe
  misc_feature (1)..(25): SEQ ID NO: 5366; WAN024DZ6; Start 56; Stop 80
gatgttccaatcgttacagttcatt

SEQ ID NO: 408342 - DNA, 25 bp, Artificial
  probe
  misc_feature (1)..(25): SEQ ID NO: 5366; WAN024DZ6; Start 171; Stop 195
gatagactcaatcgcttcaatagtt

SEQ ID NO: 408343 - DNA, 25 bp, Artificial
  probe
  misc_feature (1)..(25): SEQ ID NO: 5366; WAN024DZ6; Start 55; Stop 79
agatgttccaatcgttacagttcat

SEQ ID NO: 408344 - DNA, 25 bp, Artificial
  probe
  misc_feature (1)..(25): SEQ ID NO: 5366; WAN024DZ6; Start 200; Stop 224
ctcttgaatcaatagcagttacacg

SEQ ID NO: 408345 - DNA, 25 bp, Artificial
  probe
  misc_feature (1)..(25): SEQ ID NO: 5366; WAN024DZ6; Start 196; Stop 220
tggtctcttgaatcaatagcagtta

SEQ ID NO: 408346 - DNA, 25 bp, Artificial
  probe
  misc_feature (1)..(25): SEQ ID NO: 5366; WAN024DZ6; Start 195; Stop 219
ttggtctcttgaatcaatagcagtt

SEQ ID NO: 408347 - DNA, 25 bp, Artificial
  probe
  misc_feature (1)..(25): SEQ ID NO: 5366; WAN024DZ6; Start 197; Stop 221
ggtctcttgaatcaatagcagttac

SEQ ID NO: 408348 - DNA, 25 bp, Artificial
  probe
  misc_feature (1)..(25): SEQ ID NO: 5366; WAN024DZ6; Start 58; Stop 82
tgttccaatcgttacagttcattca

SEQ ID NO: 408349 - DNA, 25 bp, Artificial
  probe
  misc_feature (1)..(25): SEQ ID NO: 5366; WAN024DZ6; Start 62; Stop 86
ccaatcgttacagttcattcaataa

SEQ ID NO: 408350 - DNA, 25 bp, Artificial
  probe
  misc_feature (1)..(25): SEQ ID NO: 5366; WAN024DZ6; Start 203; Stop 227
ttgaatcaatagcagttacacggaa

SEQ ID NO: 408351 - DNA, 25 bp, Artificial
  probe
  misc_feature (1)..(25): SEQ ID NO: 5366; WAN024DZ6; Start 202; Stop 226
cttgaatcaatagcagttacacgga

SEQ ID NO: 408352 - DNA, 25 bp, Artificial
  probe
  misc_feature (1)..(25): SEQ ID NO: 5366; WAN024DZ6; Start 201; Stop 225
tcttgaatcaatagcagttacacgg

SEQ ID NO: 408353 - DNA, 25 bp, Artificial
  probe
  misc_feature (1)..(25): SEQ ID NO: 5366; WAN024DZ6; Start 199; Stop 223
tctcttgaatcaatagcagttacac

SEQ ID NO: 408354 - DNA, 25 bp, Artificial
  probe
  misc_feature (1)..(25): SEQ ID NO: 5366; WAN024DZ6; Start 198; Stop 222
gtctcttgaatcaatagcagttaca

SEQ ID NO: 408355 - DNA, 25 bp, Artificial
  probe
  misc_feature (1)..(25): SEQ ID NO: 5366; WAN024DZ6; Start 54; Stop 78
cagatgttccaatcgttacagttca

SEQ ID NO: 408356 - DNA, 25 bp, Artificial
  probe
  misc_feature (1)..(25): SEQ ID NO: 5366; WAN024DZ6; Start 53; Stop 77
ccagatgttccaatcgttacagttc

SEQ ID NO: 408357 - DNA, 25 bp, Artificial
  probe
  misc_feature (1)..(25): SEQ ID NO: 5366; WAN024DZ6; Start 205; Stop 229
gaatcaatagcagttacacggaaat

SEQ ID NO: 408358 - DNA, 25 bp, Artificial
  probe
  misc_feature (1)..(25): SEQ ID NO: 5366; WAN024DZ6; Start 229; Stop 253
ttaggtgccaaatctttaatgcttt

SEQ ID NO: 408359 - DNA, 25 bp, Artificial
  probe
  misc_feature (1)..(25): SEQ ID NO: 5366; WAN024DZ6; Start 223; Stop 247
cggaaattaggtgccaaatctttaa

SEQ ID NO: 408360 - DNA, 25 bp, Artificial
  probe
  misc_feature (1)..(25): SEQ ID NO: 5366; WAN024DZ6; Start 209; Stop 233
caatagcagttacacggaaattagg

SEQ ID NO: 408361 - DNA, 25 bp, Artificial
  probe
  misc_feature (1)..(25): SEQ ID NO: 5366; WAN024DZ6; Start 210; Stop 234
aatagcagttacacggaaattaggt

SEQ ID NO: 408362 - DNA, 25 bp, Artificial
  probe
  misc_feature (1)..(25): SEQ ID NO: 5366; WAN024DZ6; Start 103; Stop 127
aaattgccatcttcttcattaacca

SEQ ID NO: 408363 - DNA, 25 bp, Artificial
  probe
  misc_feature (1)..(25): SEQ ID NO: 5366; WAN024DZ6; Start 204; Stop 228
tgaatcaatagcagttacacggaaa

SEQ ID NO: 408364 - DNA, 25 bp, Artificial
  probe
  misc_feature (1)..(25): SEQ ID NO: 5366; WAN024DZ6; Start 206; Stop 230
aatcaatagcagttacacggaaatt

SEQ ID NO: 408365 - DNA, 25 bp, Artificial
  probe
  misc_feature (1)..(25): SEQ ID NO: 5366; WAN024DZ6; Start 208; Stop 232
tcaatagcagttacacggaaattag

SEQ ID NO: 408366 - DNA, 25 bp, Artificial
  probe
  misc_feature (1)..(25): SEQ ID NO: 5366; WAN024DZ6; Start 52; Stop 76
accagatgttccaatcgttacagtt

SEQ ID NO: 408367 - DNA, 25 bp, Artificial
  probe
  misc_feature (1)..(25): SEQ ID NO: 5366; WAN024DZ6; Start 228; Stop 252
attaggtgccaaatctttaatgctt

SEQ ID NO: 408368 - DNA, 25 bp, Artificial
  probe
  misc_feature (1)..(25): SEQ ID NO: 5367; WAN024EWP; Start 112; Stop 136
aaactgctgtcatcaatgtttctgg

SEQ ID NO: 408369 - DNA, 25 bp, Artificial
  probe
  misc_feature (1)..(25): SEQ ID NO: 5367; WAN024EWP; Start 113; Stop 137
aactgctgtcatcaatgtttctggg

SEQ ID NO: 408370 - DNA, 25 bp, Artificial
  probe
  misc_feature (1)..(25): SEQ ID NO: 5367; WAN024EWP; Start 104; Stop 128
caactccaaaactgctgtcatcaat

SEQ ID NO: 408371 - DNA, 25 bp, Artificial
  probe
  misc_feature (1)..(25): SEQ ID NO: 5367; WAN024EWP; Start 105; Stop 129
aactccaaaactgctgtcatcaatg

SEQ ID NO: 408372 - DNA, 25 bp, Artificial
  probe
  misc_feature (1)..(25): SEQ ID NO: 5367; WAN024EWP; Start 202; Stop 226
accctctctataaatcttctaatct

SEQ ID NO: 408373 - DNA, 25 bp, Artificial
  probe
  misc_feature (1)..(25): SEQ ID NO: 5367; WAN024EWP; Start 107; Stop 131
ctccaaaactgctgtcatcaatgtt

SEQ ID NO: 408374 - DNA, 25 bp, Artificial
  probe
  misc_feature (1)..(25): SEQ ID NO: 5367; WAN024EWP; Start 158; Stop 182
tccgtaaaatccatctttatttggt

SEQ ID NO: 408375 - DNA, 25 bp, Artificial
  probe
  misc_feature (1)..(25): SEQ ID NO: 5367; WAN024EWP; Start 114; Stop 138
actgctgtcatcaatgtttctggga

SEQ ID NO: 408376 - DNA, 25 bp, Artificial
  probe
  misc_feature (1)..(25): SEQ ID NO: 5367; WAN024EWP; Start 50; Stop 74
gtttaattcctcttggaaacttggg

SEQ ID NO: 408377 - DNA, 25 bp, Artificial
  probe
  misc_feature (1)..(25): SEQ ID NO: 5367; WAN024EWP; Start 49; Stop 73
ggtttaattcctcttggaaacttgg

SEQ ID NO: 408378 - DNA, 25 bp, Artificial
  probe
  misc_feature (1)..(25): SEQ ID NO: 5367; WAN024EWP; Start 48; Stop 72
tggtttaattcctcttggaaacttg

SEQ ID NO: 408379 - DNA, 25 bp, Artificial
  probe
  misc_feature (1)..(25): SEQ ID NO: 5367; WAN024EWP; Start 115; Stop 139
ctgctgtcatcaatgtttctgggac

SEQ ID NO: 408380 - DNA, 25 bp, Artificial
  probe
  misc_feature (1)..(25): SEQ ID NO: 5367; WAN024EWP; Start 51; Stop 75
tttaattcctcttggaaacttgggt

SEQ ID NO: 408381 - DNA, 25 bp, Artificial
  probe
  misc_feature (1)..(25): SEQ ID NO: 5367; WAN024EWP; Start 106; Stop 130
actccaaaactgctgtcatcaatgt

SEQ ID NO: 408382 - DNA, 25 bp, Artificial
  probe
  misc_feature (1)..(25): SEQ ID NO: 5367; WAN024EWP; Start 52; Stop 76
ttaattcctcttggaaacttgggtc

SEQ ID NO: 408383 - DNA, 25 bp, Artificial
  probe
  misc_feature (1)..(25): SEQ ID NO: 5367; WAN024EWP; Start 159; Stop 183
ccgtaaaatccatctttatttggtt

SEQ ID NO: 408384 - DNA, 25 bp, Artificial
  probe
  misc_feature (1)..(25): SEQ ID NO: 5367; WAN024EWP; Start 111; Stop 135
aaaactgctgtcatcaatgtttctg

SEQ ID NO: 408385 - DNA, 25 bp, Artificial
  probe
  misc_feature (1)..(25): SEQ ID NO: 5367; WAN024EWP; Start 110; Stop 134
caaaactgctgtcatcaatgtttct

SEQ ID NO: 408386 - DNA, 25 bp, Artificial
  probe
  misc_feature (1)..(25): SEQ ID NO: 5367; WAN024EWP; Start 120; Stop 144
gtcatcaatgtttctgggacaaaac

SEQ ID NO: 408387 - DNA, 25 bp, Artificial
  probe
  misc_feature (1)..(25): SEQ ID NO: 5367; WAN024EWP; Start 157; Stop 181
ttccgtaaaatccatctttatttgg

SEQ ID NO: 408388 - DNA, 25 bp, Artificial
  probe
  misc_feature (1)..(25): SEQ ID NO: 5367; WAN024EWP; Start 53; Stop 77
taattcctcttggaaacttgggtct

SEQ ID NO: 408389 - DNA, 25 bp, Artificial
  probe
  misc_feature (1)..(25): SEQ ID NO: 5367; WAN024EWP; Start 109; Stop 133
ccaaaactgctgtcatcaatgtttc

SEQ ID NO: 408390 - DNA, 25 bp, Artificial
  probe
  misc_feature (1)..(25): SEQ ID NO: 5367; WAN024EWP; Start 203; Stop 227
ccctctctataaatcttctaatctt

SEQ ID NO: 408391 - DNA, 25 bp, Artificial
  probe
  misc_feature (1)..(25): SEQ ID NO: 5367; WAN024EWP; Start 108; Stop 132
tccaaaactgctgtcatcaatgttt

SEQ ID NO: 408392 - DNA, 25 bp, Artificial
  probe
  misc_feature (1)..(25): SEQ ID NO: 5367; WAN024EWP; Start 118; Stop 142
ctgtcatcaatgtttctgggacaaa

SEQ ID NO: 408393 - DNA, 25 bp, Artificial
  probe
  misc_feature (1)..(25): SEQ ID NO: 5367; WAN024EWP; Start 121; Stop 145
tcatcaatgtttctgggacaaaacg

SEQ ID NO: 408394 - DNA, 25 bp, Artificial
  probe
  misc_feature (1)..(25): SEQ ID NO: 5367; WAN024EWP; Start 103; Stop 127
ccaactccaaaactgctgtcatcaa

SEQ ID NO: 408395 - DNA, 25 bp, Artificial
  probe
  misc_feature (1)..(25): SEQ ID NO: 5367; WAN024EWP; Start 98; Stop 122
cttctccaactccaaaactgctgtc

SEQ ID NO: 408396 - DNA, 25 bp, Artificial
  probe
  misc_feature (1)..(25): SEQ ID NO: 5367; WAN024EWP; Start 160; Stop 184
cgtaaaatccatctttatttggttc

SEQ ID NO: 408397 - DNA, 25 bp, Artificial
  probe
  misc_feature (1)..(25): SEQ ID NO: 5367; WAN024EWP; Start 101; Stop 125
ctccaactccaaaactgctgtcatc

SEQ ID NO: 408398 - DNA, 25 bp, Artificial
  probe
  misc_feature (1)..(25): SEQ ID NO: 5367; WAN024EWP; Start 156; Stop 180
tttccgtaaaatccatctttatttg

SEQ ID NO: 408399 - DNA, 25 bp, Artificial
  probe
  misc_feature (1)..(25): SEQ ID NO: 5367; WAN024EWP; Start 54; Stop 78
aattcctcttggaaacttgggtctg

SEQ ID NO: 408400 - DNA, 25 bp, Artificial
  probe
  misc_feature (1)..(25): SEQ ID NO: 5367; WAN024EWP; Start 100; Stop 124
tctccaactccaaaactgctgtcat

SEQ ID NO: 408401 - DNA, 25 bp, Artificial
  probe
  misc_feature (1)..(25): SEQ ID NO: 5368; WAN024D56; Start 97; Stop 121
tatatagatgccagcaagaacgaaa

SEQ ID NO: 408402 - DNA, 25 bp, Artificial
  probe
  misc_feature (1)..(25): SEQ ID NO: 5368; WAN024D56; Start 98; Stop 122
atatagatgccagcaagaacgaaag

SEQ ID NO: 408403 - DNA, 25 bp, Artificial
  probe
  misc_feature (1)..(25): SEQ ID NO: 5368; WAN024D56; Start 99; Stop 123
tatagatgccagcaagaacgaaaga

SEQ ID NO: 408404 - DNA, 25 bp, Artificial
  probe
  misc_feature (1)..(25): SEQ ID NO: 5368; WAN024D56; Start 51; Stop 75
aaagttagcattaaacaaaggagtt

SEQ ID NO: 408405 - DNA, 25 bp, Artificial
  probe
  misc_feature (1)..(25): SEQ ID NO: 5368; WAN024D56; Start 93; Stop 117
tacctatatagatgccagcaagaac

SEQ ID NO: 408406 - DNA, 25 bp, Artificial
  probe
  misc_feature (1)..(25): SEQ ID NO: 5368; WAN024D56; Start 96; Stop 120
ctatatagatgccagcaagaacgaa

SEQ ID NO: 408407 - DNA, 25 bp, Artificial
  probe
  misc_feature (1)..(25): SEQ ID NO: 5368; WAN024D56; Start 92; Stop 116
ttacctatatagatgccagcaagaa

SEQ ID NO: 408408 - DNA, 25 bp, Artificial
  probe
  misc_feature (1)..(25): SEQ ID NO: 5368; WAN024D56; Start 91; Stop 115
attacctatatagatgccagcaaga

SEQ ID NO: 408409 - DNA, 25 bp, Artificial
  probe
  misc_feature (1)..(25): SEQ ID NO: 5368; WAN024D56; Start 100; Stop 124
atagatgccagcaagaacgaaagaa

SEQ ID NO: 408410 - DNA, 25 bp, Artificial
  probe
  misc_feature (1)..(25): SEQ ID NO: 5368; WAN024D56; Start 109; Stop 133
agcaagaacgaaagaactgtgactt

SEQ ID NO: 408411 - DNA, 25 bp, Artificial
  probe
  misc_feature (1)..(25): SEQ ID NO: 5368; WAN024D56; Start 50; Stop 74
taaagttagcattaaacaaaggagt

SEQ ID NO: 408412 - DNA, 25 bp, Artificial
  probe
  misc_feature (1)..(25): SEQ ID NO: 5368; WAN024D56; Start 90; Stop 114
aattacctatatagatgccagcaag

SEQ ID NO: 408413 - DNA, 25 bp, Artificial
  probe
  misc_feature (1)..(25): SEQ ID NO: 5368; WAN024D56; Start 95; Stop 119
cctatatagatgccagcaagaacga

SEQ ID NO: 408414 - DNA, 25 bp, Artificial
  probe
  misc_feature (1)..(25): SEQ ID NO: 5368; WAN024D56; Start 94; Stop 118
acctatatagatgccagcaagaacg

SEQ ID NO: 408415 - DNA, 25 bp, Artificial
  probe
  misc_feature (1)..(25): SEQ ID NO: 5368; WAN024D56; Start 110; Stop 134
gcaagaacgaaagaactgtgacttt

SEQ ID NO: 408416 - DNA, 25 bp, Artificial
  probe
  misc_feature (1)..(25): SEQ ID NO: 5368; WAN024D56; Start 101; Stop 125
tagatgccagcaagaacgaaagaac

SEQ ID NO: 408417 - DNA, 25 bp, Artificial
  probe
  misc_feature (1)..(25): SEQ ID NO: 5368; WAN024D56; Start 52; Stop 76
aagttagcattaaacaaaggagttt

SEQ ID NO: 408418 - DNA, 25 bp, Artificial
  probe
  misc_feature (1)..(25): SEQ ID NO: 5368; WAN024D56; Start 273; Stop 297
catgaaacaagatttaagccaatat

SEQ ID NO: 408419 - DNA, 25 bp, Artificial
  probe
  misc_feature (1)..(25): SEQ ID NO: 5368; WAN024D56; Start 270; Stop 294
tctcatgaaacaagatttaagccaa

SEQ ID NO: 408420 - DNA, 25 bp, Artificial
  probe
  misc_feature (1)..(25): SEQ ID NO: 5368; WAN024D56; Start 108; Stop 132
cagcaagaacgaaagaactgtgact

SEQ ID NO: 408421 - DNA, 25 bp, Artificial
  probe
  misc_feature (1)..(25): SEQ ID NO: 5368; WAN024D56; Start 271; Stop 295
ctcatgaaacaagatttaagccaat

SEQ ID NO: 408422 - DNA, 25 bp, Artificial
  probe
  misc_feature (1)..(25): SEQ ID NO: 5368; WAN024D56; Start 88; Stop 112
gaaattacctatatagatgccagca

SEQ ID NO: 408423 - DNA, 25 bp, Artificial
  probe
  misc_feature (1)..(25): SEQ ID NO: 5368; WAN024D56; Start 87; Stop 111
tgaaattacctatatagatgccagc

SEQ ID NO: 408424 - DNA, 25 bp, Artificial
  probe
  misc_feature (1)..(25): SEQ ID NO: 5368; WAN024D56; Start 49; Stop 73
ataaagttagcattaaacaaaggag

SEQ ID NO: 408425 - DNA, 25 bp, Artificial
  probe
  misc_feature (1)..(25): SEQ ID NO: 5368; WAN024D56; Start 89; Stop 113
aaattacctatatagatgccagcaa

SEQ ID NO: 408426 - DNA, 25 bp, Artificial
  probe
  misc_feature (1)..(25): SEQ ID NO: 5368; WAN024D56; Start 123; Stop 147
aactgtgactttcgagtcttatgaa

SEQ ID NO: 408427 - DNA, 25 bp, Artificial
  probe
  misc_feature (1)..(25): SEQ ID NO: 5368; WAN024D56; Start 120; Stop 144
aagaactgtgactttcgagtcttat

SEQ ID NO: 408428 - DNA, 25 bp, Artificial
  probe
  misc_feature (1)..(25): SEQ ID NO: 5368; WAN024D56; Start 119; Stop 143
aaagaactgtgactttcgagtctta

SEQ ID NO: 408429 - DNA, 25 bp, Artificial
  probe
  misc_feature (1)..(25): SEQ ID NO: 5368; WAN024D56; Start 125; Stop 149
ctgtgactttcgagtcttatgaaga

SEQ ID NO: 408430 - DNA, 25 bp, Artificial
  probe
  misc_feature (1)..(25): SEQ ID NO: 5368; WAN024D56; Start 124; Stop 148
actgtgactttcgagtcttatgaag

SEQ ID NO: 408431 - DNA, 25 bp, Artificial
  probe
  misc_feature (1)..(25): SEQ ID NO: 5368; WAN024D56; Start 122; Stop 146
gaactgtgactttcgagtcttatga

SEQ ID NO: 408432 - DNA, 25 bp, Artificial
  probe
  misc_feature (1)..(25): SEQ ID NO: 5368; WAN024D56; Start 121; Stop 145
agaactgtgactttcgagtcttatg

SEQ ID NO: 408433 - DNA, 25 bp, Artificial
  probe
  misc_feature (1)..(25): SEQ ID NO: 5368; WAN024D56; Start 48; Stop 72
aataaagttagcattaaacaaagga

SEQ ID NO: 408434 - DNA, 25 bp, Artificial
  probe
  misc_feature (1)..(25): SEQ ID NO: 5369; WAN024ESI; Start 484; Stop 508
tacggtaagcaaggaactaagtatg

SEQ ID NO: 408435 - DNA, 25 bp, Artificial
  probe
  misc_feature (1)..(25): SEQ ID NO: 5369; WAN024ESI; Start 483; Stop 507
ctacggtaagcaaggaactaagtat

SEQ ID NO: 408436 - DNA, 25 bp, Artificial
  probe
  misc_feature (1)..(25): SEQ ID NO: 5369; WAN024ESI; Start 487; Stop 511
ggtaagcaaggaactaagtatgagg

SEQ ID NO: 408437 - DNA, 25 bp, Artificial
  probe
  misc_feature (1)..(25): SEQ ID NO: 5369; WAN024ESI; Start 486; Stop 510
cggtaagcaaggaactaagtatgag

SEQ ID NO: 408438 - DNA, 25 bp, Artificial
  probe
  misc_feature (1)..(25): SEQ ID NO: 5369; WAN024ESI; Start 485; Stop 509
acggtaagcaaggaactaagtatga

SEQ ID NO: 408439 - DNA, 25 bp, Artificial
  probe
  misc_feature (1)..(25): SEQ ID NO: 5369; WAN024ESI; Start 482; Stop 506
actacggtaagcaaggaactaagta

SEQ ID NO: 408440 - DNA, 25 bp, Artificial
  probe
  misc_feature (1)..(25): SEQ ID NO: 5369; WAN024ESI; Start 481; Stop 505
aactacggtaagcaaggaactaagt

SEQ ID NO: 408441 - DNA, 25 bp, Artificial
  probe
  misc_feature (1)..(25): SEQ ID NO: 5369; WAN024ESI; Start 268; Stop 292
gcgacgattcatatttcctacattc

SEQ ID NO: 408442 - DNA, 25 bp, Artificial
  probe
  misc_feature (1)..(25): SEQ ID NO: 5369; WAN024ESI; Start 264; Stop 288
ctttgcgacgattcatatttcctac

SEQ ID NO: 408443 - DNA, 25 bp, Artificial
  probe
  misc_feature (1)..(25): SEQ ID NO: 5369; WAN024ESI; Start 267; Stop 291
tgcgacgattcatatttcctacatt

SEQ ID NO: 408444 - DNA, 25 bp, Artificial
  probe
  misc_feature (1)..(25): SEQ ID NO: 5369; WAN024ESI; Start 266; Stop 290
ttgcgacgattcatatttcctacat

SEQ ID NO: 408445 - DNA, 25 bp, Artificial
  probe
  misc_feature (1)..(25): SEQ ID NO: 5369; WAN024ESI; Start 263; Stop 287
actttgcgacgattcatatttccta

SEQ ID NO: 408446 - DNA, 25 bp, Artificial
  probe
  misc_feature (1)..(25): SEQ ID NO: 5369; WAN024ESI; Start 488; Stop 512
gtaagcaaggaactaagtatgaggg

SEQ ID NO: 408447 - DNA, 25 bp, Artificial
  probe
  misc_feature (1)..(25): SEQ ID NO: 5369; WAN024ESI; Start 265; Stop 289
tttgcgacgattcatatttcctaca

SEQ ID NO: 408448 - DNA, 25 bp, Artificial
  probe
  misc_feature (1)..(25): SEQ ID NO: 5369; WAN024ESI; Start 260; Stop 284
cagactttgcgacgattcatatttc

SEQ ID NO: 408449 - DNA, 25 bp, Artificial
  probe
  misc_feature (1)..(25): SEQ ID NO: 5369; WAN024ESI; Start 262; Stop 286
gactttgcgacgattcatatttcct

SEQ ID NO: 408450 - DNA, 25 bp, Artificial
  probe
  misc_feature (1)..(25): SEQ ID NO: 5369; WAN024ESI; Start 261; Stop 285
agactttgcgacgattcatatttcc

SEQ ID NO: 408451 - DNA, 25 bp, Artificial
  probe
  misc_feature (1)..(25): SEQ ID NO: 5369; WAN024ESI; Start 259; Stop 283
ccagactttgcgacgattcatattt

SEQ ID NO: 408452 - DNA, 25 bp, Artificial
  probe
  misc_feature (1)..(25): SEQ ID NO: 5369; WAN024ESI; Start 489; Stop 513
taagcaaggaactaagtatgagggc

SEQ ID NO: 408453 - DNA, 25 bp, Artificial
  probe
  misc_feature (1)..(25): SEQ ID NO: 5369; WAN024ESI; Start 181; Stop 205
actagagaaatcgctaaggaacagg

SEQ ID NO: 408454 - DNA, 25 bp, Artificial
  probe
  misc_feature (1)..(25): SEQ ID NO: 5369; WAN024ESI; Start 406; Stop 430
ttgctagaccctcgctatttagaag

SEQ ID NO: 408455 - DNA, 25 bp, Artificial
  probe
  misc_feature (1)..(25): SEQ ID NO: 5369; WAN024ESI; Start 534; Stop 558
ccaacacgacctttatccagagaaa

SEQ ID NO: 408456 - DNA, 25 bp, Artificial
  probe
  misc_feature (1)..(25): SEQ ID NO: 5369; WAN024ESI; Start 182; Stop 206
ctagagaaatcgctaaggaacaggg

SEQ ID NO: 408457 - DNA, 25 bp, Artificial
  probe
  misc_feature (1)..(25): SEQ ID NO: 5369; WAN024ESI; Start 374; Stop 398
gtatcaacaccatcgggaaagactt

SEQ ID NO: 408458 - DNA, 25 bp, Artificial
  probe
  misc_feature (1)..(25): SEQ ID NO: 5369; WAN024ESI; Start 407; Stop 431
tgctagaccctcgctatttagaagt

SEQ ID NO: 408459 - DNA, 25 bp, Artificial
  probe
  misc_feature (1)..(25): SEQ ID NO: 5369; WAN024ESI; Start 531; Stop 555
cttccaacacgacctttatccagag

SEQ ID NO: 408460 - DNA, 25 bp, Artificial
  probe
  misc_feature (1)..(25): SEQ ID NO: 5369; WAN024ESI; Start 529; Stop 553
ctcttccaacacgacctttatccag

SEQ ID NO: 408461 - DNA, 25 bp, Artificial
  probe
  misc_feature (1)..(25): SEQ ID NO: 5369; WAN024ESI; Start 408; Stop 432
gctagaccctcgctatttagaagtc

SEQ ID NO: 408462 - DNA, 25 bp, Artificial
  probe
  misc_feature (1)..(25): SEQ ID NO: 5369; WAN024ESI; Start 369; Stop 393
aaactgtatcaacaccatcgggaaa

SEQ ID NO: 408463 - DNA, 25 bp, Artificial
  probe
  misc_feature (1)..(25): SEQ ID NO: 5369; WAN024ESI; Start 536; Stop 560
aacacgacctttatccagagaaaat

SEQ ID NO: 408464 - DNA, 25 bp, Artificial
  probe
  misc_feature (1)..(25): SEQ ID NO: 5369; WAN024ESI; Start 533; Stop 557
tccaacacgacctttatccagagaa

SEQ ID NO: 408465 - DNA, 25 bp, Artificial
  probe
  misc_feature (1)..(25): SEQ ID NO: 5369; WAN024ESI; Start 532; Stop 556
ttccaacacgacctttatccagaga

SEQ ID NO: 408466 - DNA, 25 bp, Artificial
  probe
  misc_feature (1)..(25): SEQ ID NO: 5369; WAN024ESI; Start 553; Stop 577
gagaaaattgacaaccgctaactaa

SEQ ID NO: 408467 - DNA, 25 bp, Artificial
  probe
  misc_feature (1)..(25): SEQ ID NO: 5370; WAN024CW6; Start 160; Stop 184
ctctatcaaggcataacgactatca

SEQ ID NO: 408468 - DNA, 25 bp, Artificial
  probe
  misc_feature (1)..(25): SEQ ID NO: 5370; WAN024CW6; Start 159; Stop 183
actctatcaaggcataacgactatc

SEQ ID NO: 408469 - DNA, 25 bp, Artificial
  probe
  misc_feature (1)..(25): SEQ ID NO: 5370; WAN024CW6; Start 158; Stop 182
aactctatcaaggcataacgactat

SEQ ID NO: 408470 - DNA, 25 bp, Artificial
  probe
  misc_feature (1)..(25): SEQ ID NO: 5370; WAN024CW6; Start 161; Stop 185
tctatcaaggcataacgactatcat

SEQ ID NO: 408471 - DNA, 25 bp, Artificial
  probe
  misc_feature (1)..(25): SEQ ID NO: 5370; WAN024CW6; Start 162; Stop 186
ctatcaaggcataacgactatcatt

SEQ ID NO: 408472 - DNA, 25 bp, Artificial
  probe
  misc_feature (1)..(25): SEQ ID NO: 5370; WAN024CW6; Start 163; Stop 187
tatcaaggcataacgactatcattg

SEQ ID NO: 408473 - DNA, 25 bp, Artificial
  probe
  misc_feature (1)..(25): SEQ ID NO: 5370; WAN024CW6; Start 166; Stop 190
caaggcataacgactatcattgagg

SEQ ID NO: 408474 - DNA, 25 bp, Artificial
  probe
  misc_feature (1)..(25): SEQ ID NO: 5370; WAN024CW6; Start 157; Stop 181
aaactctatcaaggcataacgacta

SEQ ID NO: 408475 - DNA, 25 bp, Artificial
  probe
  misc_feature (1)..(25): SEQ ID NO: 5370; WAN024CW6; Start 156; Stop 180
taaactctatcaaggcataacgact

SEQ ID NO: 408476 - DNA, 25 bp, Artificial
  probe
  misc_feature (1)..(25): SEQ ID NO: 5370; WAN024CW6; Start 154; Stop 178
actaaactctatcaaggcataacga

SEQ ID NO: 408477 - DNA, 25 bp, Artificial
  probe
  misc_feature (1)..(25): SEQ ID NO: 5370; WAN024CW6; Start 155; Stop 179
ctaaactctatcaaggcataacgac

SEQ ID NO: 408478 - DNA, 25 bp, Artificial
  probe
  misc_feature (1)..(25): SEQ ID NO: 5370; WAN024CW6; Start 136; Stop 160
gcgataaggagtgttcatactaaac

SEQ ID NO: 408479 - DNA, 25 bp, Artificial
  probe
  misc_feature (1)..(25): SEQ ID NO: 5370; WAN024CW6; Start 153; Stop 177
tactaaactctatcaaggcataacg

SEQ ID NO: 408480 - DNA, 25 bp, Artificial
  probe
  misc_feature (1)..(25): SEQ ID NO: 5370; WAN024CW6; Start 148; Stop 172
gttcatactaaactctatcaaggca

SEQ ID NO: 408481 - DNA, 25 bp, Artificial
  probe
  misc_feature (1)..(25): SEQ ID NO: 5370; WAN024CW6; Start 147; Stop 171
tgttcatactaaactctatcaaggc

SEQ ID NO: 408482 - DNA, 25 bp, Artificial
  probe
  misc_feature (1)..(25): SEQ ID NO: 5370; WAN024CW6; Start 164; Stop 188
atcaaggcataacgactatcattga

SEQ ID NO: 408483 - DNA, 25 bp, Artificial
  probe
  misc_feature (1)..(25): SEQ ID NO: 5370; WAN024CW6; Start 165; Stop 189
tcaaggcataacgactatcattgag

SEQ ID NO: 408484 - DNA, 25 bp, Artificial
  probe
  misc_feature (1)..(25): SEQ ID NO: 5370; WAN024CW6; Start 137; Stop 161
cgataaggagtgttcatactaaact

SEQ ID NO: 408485 - DNA, 25 bp, Artificial
  probe
  misc_feature (1)..(25): SEQ ID NO: 5370; WAN024CW6; Start 389; Stop 413
tgtctgtaggattctgccaagagag

SEQ ID NO: 408486 - DNA, 25 bp, Artificial
  probe
  misc_feature (1)..(25): SEQ ID NO: 5370; WAN024CW6; Start 388; Stop 412
ctgtctgtaggattctgccaagaga

SEQ ID NO: 408487 - DNA, 25 bp, Artificial
  probe
  misc_feature (1)..(25): SEQ ID NO: 5370; WAN024CW6; Start 167; Stop 191
aaggcataacgactatcattgaggg

SEQ ID NO: 408488 - DNA, 25 bp, Artificial
  probe
  misc_feature (1)..(25): SEQ ID NO: 5370; WAN024CW6; Start 149; Stop 173
ttcatactaaactctatcaaggcat

SEQ ID NO: 408489 - DNA, 25 bp, Artificial
  probe
  misc_feature (1)..(25): SEQ ID NO: 5370; WAN024CW6; Start 87; Stop 111
ctggagtaattcccaacatcaagat

SEQ ID NO: 408490 - DNA, 25 bp, Artificial
  probe
  misc_feature (1)..(25): SEQ ID NO: 5370; WAN024CW6; Start 82; Stop 106
aatgactggagtaattcccaacatc

SEQ ID NO: 408491 - DNA, 25 bp, Artificial
  probe
  misc_feature (1)..(25): SEQ ID NO: 5370; WAN024CW6; Start 81; Stop 105
caatgactggagtaattcccaacat

SEQ ID NO: 408492 - DNA, 25 bp, Artificial
  probe
  misc_feature (1)..(25): SEQ ID NO: 5370; WAN024CW6; Start 73; Stop 97
aatgtgggcaatgactggagtaatt

SEQ ID NO: 408493 - DNA, 25 bp, Artificial
  probe
  misc_feature (1)..(25): SEQ ID NO: 5370; WAN024CW6; Start 88; Stop 112
tggagtaattcccaacatcaagatc

SEQ ID NO: 408494 - DNA, 25 bp, Artificial
  probe
  misc_feature (1)..(25): SEQ ID NO: 5370; WAN024CW6; Start 85; Stop 109
gactggagtaattcccaacatcaag

SEQ ID NO: 408495 - DNA, 25 bp, Artificial
  probe
  misc_feature (1)..(25): SEQ ID NO: 5370; WAN024CW6; Start 289; Stop 313
tatttcccgaacctgaagaaagttt

SEQ ID NO: 408496 - DNA, 25 bp, Artificial
  probe
  misc_feature (1)..(25): SEQ ID NO: 5370; WAN024CW6; Start 86; Stop 110
actggagtaattcccaacatcaaga

SEQ ID NO: 408497 - DNA, 25 bp, Artificial
  probe
  misc_feature (1)..(25): SEQ ID NO: 5370; WAN024CW6; Start 83; Stop 107
atgactggagtaattcccaacatca

SEQ ID NO: 408498 - DNA, 25 bp, Artificial
  probe
  misc_feature (1)..(25): SEQ ID NO: 5370; WAN024CW6; Start 74; Stop 98
atgtgggcaatgactggagtaattc

SEQ ID NO: 408499 - DNA, 25 bp, Artificial
  probe
  misc_feature (1)..(25): SEQ ID NO: 5370; WAN024CW6; Start 288; Stop 312
ctatttcccgaacctgaagaaagtt

SEQ ID NO: 408500 - DNA, 25 bp, Artificial
  probe
  misc_feature (1)..(25): SEQ ID NO: 5371; WAN024DUV; Start 34; Stop 58
atcactccaaggacctgttgtatta

SEQ ID NO: 408501 - DNA, 25 bp, Artificial
  probe
  misc_feature (1)..(25): SEQ ID NO: 5371; WAN024DUV; Start 33; Stop 57
tatcactccaaggacctgttgtatt

SEQ ID NO: 408502 - DNA, 25 bp, Artificial
  probe
  misc_feature (1)..(25): SEQ ID NO: 5371; WAN024DUV; Start 32; Stop 56
ttatcactccaaggacctgttgtat

SEQ ID NO: 408503 - DNA, 25 bp, Artificial
  probe
  misc_feature (1)..(25): SEQ ID NO: 5371; WAN024DUV; Start 233; Stop 257
ttgttacggaagtcaagatacactc

SEQ ID NO: 408504 - DNA, 25 bp, Artificial
  probe
  misc_feature (1)..(25): SEQ ID NO: 5371; WAN024DUV; Start 232; Stop 256
gttgttacggaagtcaagatacact

SEQ ID NO: 408505 - DNA, 25 bp, Artificial
  probe
  misc_feature (1)..(25): SEQ ID NO: 5371; WAN024DUV; Start 35; Stop 59
tcactccaaggacctgttgtattaa

SEQ ID NO: 408506 - DNA, 25 bp, Artificial
  probe
  misc_feature (1)..(25): SEQ ID NO: 5371; WAN024DUV; Start 36; Stop 60
cactccaaggacctgttgtattaat

SEQ ID NO: 408507 - DNA, 25 bp, Artificial
  probe
  misc_feature (1)..(25): SEQ ID NO: 5371; WAN024DUV; Start 242; Stop 266
aagtcaagatacactccacctccta

SEQ ID NO: 408508 - DNA, 25 bp, Artificial
  probe
  misc_feature (1)..(25): SEQ ID NO: 5371; WAN024DUV; Start 264; Stop 288
ctaccaagccttccttcttcaagtt

SEQ ID NO: 408509 - DNA, 25 bp, Artificial
  probe
  misc_feature (1)..(25): SEQ ID NO: 5371; WAN024DUV; Start 2; Stop 26
tgcgttcccttattagacaaattac

SEQ ID NO: 408510 - DNA, 25 bp, Artificial
  probe
  misc_feature (1)..(25): SEQ ID NO: 5371; WAN024DUV; Start 247; Stop 271
aagatacactccacctcctaccaag

SEQ ID NO: 408511 - DNA, 25 bp, Artificial
  probe
  misc_feature (1)..(25): SEQ ID NO: 5371; WAN024DUV; Start 381; Stop 405
ctactttaagacggaagaggctaaa

SEQ ID NO: 408512 - DNA, 25 bp, Artificial
  probe
  misc_feature (1)..(25): SEQ ID NO: 5371; WAN024DUV; Start 243; Stop 267
agtcaagatacactccacctcctac

SEQ ID NO: 408513 - DNA, 25 bp, Artificial
  probe
  misc_feature (1)..(25): SEQ ID NO: 5371; WAN024DUV; Start 236; Stop 260
ttacggaagtcaagatacactccac

SEQ ID NO: 408514 - DNA, 25 bp, Artificial
  probe
  misc_feature (1)..(25): SEQ ID NO: 5371; WAN024DUV; Start 235; Stop 259
gttacggaagtcaagatacactcca

SEQ ID NO: 408515 - DNA, 25 bp, Artificial
  probe
  misc_feature (1)..(25): SEQ ID NO: 5371; WAN024DUV; Start 234; Stop 258
tgttacggaagtcaagatacactcc

SEQ ID NO: 408516 - DNA, 25 bp, Artificial
  probe
  misc_feature (1)..(25): SEQ ID NO: 5371; WAN024DUV; Start 246; Stop 270
caagatacactccacctcctaccaa

SEQ ID NO: 408517 - DNA, 25 bp, Artificial
  probe
  misc_feature (1)..(25): SEQ ID NO: 5371; WAN024DUV; Start 28; Stop 52
tactttatcactccaaggacctgtt

SEQ ID NO: 408518 - DNA, 25 bp, Artificial
  probe
  misc_feature (1)..(25): SEQ ID NO: 5371; WAN024DUV; Start 1; Stop 25
ttgcgttcccttattagacaaatta

SEQ ID NO: 408519 - DNA, 25 bp, Artificial
  probe
  misc_feature (1)..(25): SEQ ID NO: 5371; WAN024DUV; Start 402; Stop 426
taaaggttgctccatcttcatcgta

SEQ ID NO: 408520 - DNA, 25 bp, Artificial
  probe
  misc_feature (1)..(25): SEQ ID NO: 5371; WAN024DUV; Start 31; Stop 55
tttatcactccaaggacctgttgta

SEQ ID NO: 408521 - DNA, 25 bp, Artificial
  probe
  misc_feature (1)..(25): SEQ ID NO: 5371; WAN024DUV; Start 241; Stop 265
gaagtcaagatacactccacctcct

SEQ ID NO: 408522 - DNA, 25 bp, Artificial
  probe
  misc_feature (1)..(25): SEQ ID NO: 5371; WAN024DUV; Start 40; Stop 64
ccaaggacctgttgtattaataacc

SEQ ID NO: 408523 - DNA, 25 bp, Artificial
  probe
  misc_feature (1)..(25): SEQ ID NO: 5371; WAN024DUV; Start 244; Stop 268
gtcaagatacactccacctcctacc

SEQ ID NO: 408524 - DNA, 25 bp, Artificial
  probe
  misc_feature (1)..(25): SEQ ID NO: 5371; WAN024DUV; Start 385; Stop 409
tttaagacggaagaggctaaaggtt

SEQ ID NO: 408525 - DNA, 25 bp, Artificial
  probe
  misc_feature (1)..(25): SEQ ID NO: 5371; WAN024DUV; Start 380; Stop 404
gctactttaagacggaagaggctaa

SEQ ID NO: 408526 - DNA, 25 bp, Artificial
  probe
  misc_feature (1)..(25): SEQ ID NO: 5371; WAN024DUV; Start 229; Stop 253
atcgttgttacggaagtcaagatac

SEQ ID NO: 408527 - DNA, 25 bp, Artificial
  probe
  misc_feature (1)..(25): SEQ ID NO: 5371; WAN024DUV; Start 228; Stop 252
catcgttgttacggaagtcaagata

SEQ ID NO: 408528 - DNA, 25 bp, Artificial
  probe
  misc_feature (1)..(25): SEQ ID NO: 5371; WAN024DUV; Start 37; Stop 61
actccaaggacctgttgtattaata

SEQ ID NO: 408529 - DNA, 25 bp, Artificial
  probe
  misc_feature (1)..(25): SEQ ID NO: 5371; WAN024DUV; Start 120; Stop 144
ctgtaatcttgccactttcgtcaaa

SEQ ID NO: 408530 - DNA, 25 bp, Artificial
  probe
  misc_feature (1)..(25): SEQ ID NO: 5371; WAN024DUV; Start 407; Stop 431
gttgctccatcttcatcgtaaactg

SEQ ID NO: 408531 - DNA, 25 bp, Artificial
  probe
  misc_feature (1)..(25): SEQ ID NO: 5371; WAN024DUV; Start 27; Stop 51
gtactttatcactccaaggacctgt

SEQ ID NO: 408532 - DNA, 25 bp, Artificial
  probe
  misc_feature (1)..(25): SEQ ID NO: 5371; WAN024DUV; Start 265; Stop 289
taccaagccttccttcttcaagttt

SEQ ID NO: 408533 - DNA, 25 bp, Artificial
  probe
  misc_feature (1)..(25): SEQ ID NO: 5372; WAN024GK7; Start 58; Stop 82
gaagaccgtagattgagataccatt

SEQ ID NO: 408534 - DNA, 25 bp, Artificial
  probe
  misc_feature (1)..(25): SEQ ID NO: 5372; WAN024GK7; Start 54; Stop 78
atgtgaagaccgtagattgagatac

SEQ ID NO: 408535 - DNA, 25 bp, Artificial
  probe
  misc_feature (1)..(25): SEQ ID NO: 5372; WAN024GK7; Start 57; Stop 81
tgaagaccgtagattgagataccat

SEQ ID NO: 408536 - DNA, 25 bp, Artificial
  probe
  misc_feature (1)..(25): SEQ ID NO: 5372; WAN024GK7; Start 56; Stop 80
gtgaagaccgtagattgagatacca

SEQ ID NO: 408537 - DNA, 25 bp, Artificial
  probe
  misc_feature (1)..(25): SEQ ID NO: 5372; WAN024GK7; Start 55; Stop 79
tgtgaagaccgtagattgagatacc

SEQ ID NO: 408538 - DNA, 25 bp, Artificial
  probe
  misc_feature (1)..(25): SEQ ID NO: 5372; WAN024GK7; Start 53; Stop 77
catgtgaagaccgtagattgagata

SEQ ID NO: 408539 - DNA, 25 bp, Artificial
  probe
  misc_feature (1)..(25): SEQ ID NO: 5372; WAN024GK7; Start 98; Stop 122
gattccttccaattcatgtccacaa

SEQ ID NO: 408540 - DNA, 25 bp, Artificial
  probe
  misc_feature (1)..(25): SEQ ID NO: 5372; WAN024GK7; Start 99; Stop 123
attccttccaattcatgtccacaag

SEQ ID NO: 408541 - DNA, 25 bp, Artificial
  probe
  misc_feature (1)..(25): SEQ ID NO: 5372; WAN024GK7; Start 88; Stop 112
cttgaacaccgattccttccaattc

SEQ ID NO: 408542 - DNA, 25 bp, Artificial
  probe
  misc_feature (1)..(25): SEQ ID NO: 5372; WAN024GK7; Start 52; Stop 76
ccatgtgaagaccgtagattgagat

SEQ ID NO: 408543 - DNA, 25 bp, Artificial
  probe
  misc_feature (1)..(25): SEQ ID NO: 5372; WAN024GK7; Start 72; Stop 96
gagataccatttgaaccttgaacac

SEQ ID NO: 408544 - DNA, 25 bp, Artificial
  probe
  misc_feature (1)..(25): SEQ ID NO: 5372; WAN024GK7; Start 71; Stop 95
tgagataccatttgaaccttgaaca

SEQ ID NO: 408545 - DNA, 25 bp, Artificial
  probe
  misc_feature (1)..(25): SEQ ID NO: 5372; WAN024GK7; Start 62; Stop 86
accgtagattgagataccatttgaa

SEQ ID NO: 408546 - DNA, 25 bp, Artificial
  probe
  misc_feature (1)..(25): SEQ ID NO: 5372; WAN024GK7; Start 61; Stop 85
gaccgtagattgagataccatttga

SEQ ID NO: 408547 - DNA, 25 bp, Artificial
  probe
  misc_feature (1)..(25): SEQ ID NO: 5372; WAN024GK7; Start 60; Stop 84
agaccgtagattgagataccatttg

SEQ ID NO: 408548 - DNA, 25 bp, Artificial
  probe
  misc_feature (1)..(25): SEQ ID NO: 5372; WAN024GK7; Start 70; Stop 94
ttgagataccatttgaaccttgaac

SEQ ID NO: 408549 - DNA, 25 bp, Artificial
  probe
  misc_feature (1)..(25): SEQ ID NO: 5372; WAN024GK7; Start 64; Stop 88
cgtagattgagataccatttgaacc

SEQ ID NO: 408550 - DNA, 25 bp, Artificial
  probe
  misc_feature (1)..(25): SEQ ID NO: 5372; WAN024GK7; Start 63; Stop 87
ccgtagattgagataccatttgaac

SEQ ID NO: 408551 - DNA, 25 bp, Artificial
  probe
  misc_feature (1)..(25): SEQ ID NO: 5372; WAN024GK7; Start 180; Stop 204
cttgtatctttacgagcattgtcat

SEQ ID NO: 408552 - DNA, 25 bp, Artificial
  probe
  misc_feature (1)..(25): SEQ ID NO: 5372; WAN024GK7; Start 59; Stop 83
aagaccgtagattgagataccattt

SEQ ID NO: 408553 - DNA, 25 bp, Artificial
  probe
  misc_feature (1)..(25): SEQ ID NO: 5372; WAN024GK7; Start 68; Stop 92
gattgagataccatttgaaccttga

SEQ ID NO: 408554 - DNA, 25 bp, Artificial
  probe
  misc_feature (1)..(25): SEQ ID NO: 5372; WAN024GK7; Start 67; Stop 91
agattgagataccatttgaaccttg

SEQ ID NO: 408555 - DNA, 25 bp, Artificial
  probe
  misc_feature (1)..(25): SEQ ID NO: 5372; WAN024GK7; Start 73; Stop 97
agataccatttgaaccttgaacacc

SEQ ID NO: 408556 - DNA, 25 bp, Artificial
  probe
  misc_feature (1)..(25): SEQ ID NO: 5372; WAN024GK7; Start 50; Stop 74
aaccatgtgaagaccgtagattgag

SEQ ID NO: 408557 - DNA, 25 bp, Artificial
  probe
  misc_feature (1)..(25): SEQ ID NO: 5372; WAN024GK7; Start 91; Stop 115
gaacaccgattccttccaattcatg

SEQ ID NO: 408558 - DNA, 25 bp, Artificial
  probe
  misc_feature (1)..(25): SEQ ID NO: 5372; WAN024GK7; Start 69; Stop 93
attgagataccatttgaaccttgaa

SEQ ID NO: 408559 - DNA, 25 bp, Artificial
  probe
  misc_feature (1)..(25): SEQ ID NO: 5372; WAN024GK7; Start 182; Stop 206
tgtatctttacgagcattgtcataa

SEQ ID NO: 408560 - DNA, 25 bp, Artificial
  probe
  misc_feature (1)..(25): SEQ ID NO: 5372; WAN024GK7; Start 181; Stop 205
ttgtatctttacgagcattgtcata

SEQ ID NO: 408561 - DNA, 25 bp, Artificial
  probe
  misc_feature (1)..(25): SEQ ID NO: 5372; WAN024GK7; Start 65; Stop 89
gtagattgagataccatttgaacct

SEQ ID NO: 408562 - DNA, 25 bp, Artificial
  probe
  misc_feature (1)..(25): SEQ ID NO: 5372; WAN024GK7; Start 188; Stop 212
tttacgagcattgtcataaacagtc

SEQ ID NO: 408563 - DNA, 25 bp, Artificial
  probe
  misc_feature (1)..(25): SEQ ID NO: 5372; WAN024GK7; Start 187; Stop 211
ctttacgagcattgtcataaacagt

SEQ ID NO: 408564 - DNA, 25 bp, Artificial
  probe
  misc_feature (1)..(25): SEQ ID NO: 5372; WAN024GK7; Start 186; Stop 210
tctttacgagcattgtcataaacag

SEQ ID NO: 408565 - DNA, 25 bp, Artificial
  probe
  misc_feature (1)..(25): SEQ ID NO: 5372; WAN024GK7; Start 155; Stop 179
agcatttgaagcaagagcgatatag

SEQ ID NO: 408566 - DNA, 25 bp, Artificial
  probe
  misc_feature (1)..(25): SEQ ID NO: 5373; WAN024GH5; Start 172; Stop 196
ctcctgctatcaacatcccataaag

SEQ ID NO: 408567 - DNA, 25 bp, Artificial
  probe
  misc_feature (1)..(25): SEQ ID NO: 5373; WAN024GH5; Start 191; Stop 215
ataaaggaagatggtcaggaaggtt

SEQ ID NO: 408568 - DNA, 25 bp, Artificial
  probe
  misc_feature (1)..(25): SEQ ID NO: 5373; WAN024GH5; Start 192; Stop 216
taaaggaagatggtcaggaaggttt

SEQ ID NO: 408569 - DNA, 25 bp, Artificial
  probe
  misc_feature (1)..(25): SEQ ID NO: 5373; WAN024GH5; Start 61; Stop 85
aacagaattgtaggaagatcgagct

SEQ ID NO: 408570 - DNA, 25 bp, Artificial
  probe
  misc_feature (1)..(25): SEQ ID NO: 5373; WAN024GH5; Start 190; Stop 214
cataaaggaagatggtcaggaaggt

SEQ ID NO: 408571 - DNA, 25 bp, Artificial
  probe
  misc_feature (1)..(25): SEQ ID NO: 5373; WAN024GH5; Start 54; Stop 78
acctctaaacagaattgtaggaaga

SEQ ID NO: 408572 - DNA, 25 bp, Artificial
  probe
  misc_feature (1)..(25): SEQ ID NO: 5373; WAN024GH5; Start 177; Stop 201
gctatcaacatcccataaaggaaga

SEQ ID NO: 408573 - DNA, 25 bp, Artificial
  probe
  misc_feature (1)..(25): SEQ ID NO: 5373; WAN024GH5; Start 176; Stop 200
tgctatcaacatcccataaaggaag

SEQ ID NO: 408574 - DNA, 25 bp, Artificial
  probe
  misc_feature (1)..(25): SEQ ID NO: 5373; WAN024GH5; Start 175; Stop 199
ctgctatcaacatcccataaaggaa

SEQ ID NO: 408575 - DNA, 25 bp, Artificial
  probe
  misc_feature (1)..(25): SEQ ID NO: 5373; WAN024GH5; Start 171; Stop 195
gctcctgctatcaacatcccataaa

SEQ ID NO: 408576 - DNA, 25 bp, Artificial
  probe
  misc_feature (1)..(25): SEQ ID NO: 5373; WAN024GH5; Start 198; Stop 222
aagatggtcaggaaggtttggaaag

SEQ ID NO: 408577 - DNA, 25 bp, Artificial
  probe
  misc_feature (1)..(25): SEQ ID NO: 5373; WAN024GH5; Start 193; Stop 217
aaaggaagatggtcaggaaggtttg

SEQ ID NO: 408578 - DNA, 25 bp, Artificial
  probe
  misc_feature (1)..(25): SEQ ID NO: 5373; WAN024GH5; Start 57; Stop 81
tctaaacagaattgtaggaagatcg

SEQ ID NO: 408579 - DNA, 25 bp, Artificial
  probe
  misc_feature (1)..(25): SEQ ID NO: 5373; WAN024GH5; Start 197; Stop 221
gaagatggtcaggaaggtttggaaa

SEQ ID NO: 408580 - DNA, 25 bp, Artificial
  probe
  misc_feature (1)..(25): SEQ ID NO: 5373; WAN024GH5; Start 55; Stop 79
cctctaaacagaattgtaggaagat

SEQ ID NO: 408581 - DNA, 25 bp, Artificial
  probe
  misc_feature (1)..(25): SEQ ID NO: 5373; WAN024GH5; Start 173; Stop 197
tcctgctatcaacatcccataaagg

SEQ ID NO: 408582 - DNA, 25 bp, Artificial
  probe
  misc_feature (1)..(25): SEQ ID NO: 5373; WAN024GH5; Start 178; Stop 202
ctatcaacatcccataaaggaagat

SEQ ID NO: 408583 - DNA, 25 bp, Artificial
  probe
  misc_feature (1)..(25): SEQ ID NO: 5373; WAN024GH5; Start 200; Stop 224
gatggtcaggaaggtttggaaagtt

SEQ ID NO: 408584 - DNA, 25 bp, Artificial
  probe
  misc_feature (1)..(25): SEQ ID NO: 5373; WAN024GH5; Start 116; Stop 140
cacttcatagacccgttctctcaac

SEQ ID NO: 408585 - DNA, 25 bp, Artificial
  probe
  misc_feature (1)..(25): SEQ ID NO: 5373; WAN024GH5; Start 53; Stop 77
tacctctaaacagaattgtaggaag

SEQ ID NO: 408586 - DNA, 25 bp, Artificial
  probe
  misc_feature (1)..(25): SEQ ID NO: 5373; WAN024GH5; Start 60; Stop 84
aaacagaattgtaggaagatcgagc

SEQ ID NO: 408587 - DNA, 25 bp, Artificial
  probe
  misc_feature (1)..(25): SEQ ID NO: 5373; WAN024GH5; Start 174; Stop 198
cctgctatcaacatcccataaagga

SEQ ID NO: 408588 - DNA, 25 bp, Artificial
  probe
  misc_feature (1)..(25): SEQ ID NO: 5373; WAN024GH5; Start 201; Stop 225
atggtcaggaaggtttggaaagttg

SEQ ID NO: 408589 - DNA, 25 bp, Artificial
  probe
  misc_feature (1)..(25): SEQ ID NO: 5373; WAN024GH5; Start 139; Stop 163
accagagagacaaaaccagaattaa

SEQ ID NO: 408590 - DNA, 25 bp, Artificial
  probe
  misc_feature (1)..(25): SEQ ID NO: 5373; WAN024GH5; Start 138; Stop 162
aaccagagagacaaaaccagaatta

SEQ ID NO: 408591 - DNA, 25 bp, Artificial
  probe
  misc_feature (1)..(25): SEQ ID NO: 5373; WAN024GH5; Start 59; Stop 83
taaacagaattgtaggaagatcgag

SEQ ID NO: 408592 - DNA, 25 bp, Artificial
  probe
  misc_feature (1)..(25): SEQ ID NO: 5373; WAN024GH5; Start 58; Stop 82
ctaaacagaattgtaggaagatcga

SEQ ID NO: 408593 - DNA, 25 bp, Artificial
  probe
  misc_feature (1)..(25): SEQ ID NO: 5373; WAN024GH5; Start 141; Stop 165
cagagagacaaaaccagaattaagg

SEQ ID NO: 408594 - DNA, 25 bp, Artificial
  probe
  misc_feature (1)..(25): SEQ ID NO: 5373; WAN024GH5; Start 140; Stop 164
ccagagagacaaaaccagaattaag

SEQ ID NO: 408595 - DNA, 25 bp, Artificial
  probe
  misc_feature (1)..(25): SEQ ID NO: 5373; WAN024GH5; Start 51; Stop 75
actacctctaaacagaattgtagga

SEQ ID NO: 408596 - DNA, 25 bp, Artificial
  probe
  misc_feature (1)..(25): SEQ ID NO: 5373; WAN024GH5; Start 143; Stop 167
gagagacaaaaccagaattaaggct

SEQ ID NO: 408597 - DNA, 25 bp, Artificial
  probe
  misc_feature (1)..(25): SEQ ID NO: 5373; WAN024GH5; Start 142; Stop 166
agagagacaaaaccagaattaaggc

SEQ ID NO: 408598 - DNA, 25 bp, Artificial
  probe
  misc_feature (1)..(25): SEQ ID NO: 5373; WAN024GH5; Start 137; Stop 161
caaccagagagacaaaaccagaatt

SEQ ID NO: 408599 - DNA, 25 bp, Artificial
  probe
  misc_feature (1)..(25): SEQ ID NO: 5374; WAN024FG6; Start 321; Stop 345
aataccactgctcctacaatcatag

SEQ ID NO: 408600 - DNA, 25 bp, Artificial
  probe
  misc_feature (1)..(25): SEQ ID NO: 5374; WAN024FG6; Start 119; Stop 143
tcgtgcatagtaatctcttggaatt

SEQ ID NO: 408601 - DNA, 25 bp, Artificial
  probe
  misc_feature (1)..(25): SEQ ID NO: 5374; WAN024FG6; Start 118; Stop 142
ctcgtgcatagtaatctcttggaat

SEQ ID NO: 408602 - DNA, 25 bp, Artificial
  probe
  misc_feature (1)..(25): SEQ ID NO: 5374; WAN024FG6; Start 115; Stop 139
aatctcgtgcatagtaatctcttgg

SEQ ID NO: 408603 - DNA, 25 bp, Artificial
  probe
  misc_feature (1)..(25): SEQ ID NO: 5374; WAN024FG6; Start 320; Stop 344
aaataccactgctcctacaatcata

SEQ ID NO: 408604 - DNA, 25 bp, Artificial
  probe
  misc_feature (1)..(25): SEQ ID NO: 5374; WAN024FG6; Start 162; Stop 186
ttcctttcttgttcttgcttattgc

SEQ ID NO: 408605 - DNA, 25 bp, Artificial
  probe
  misc_feature (1)..(25): SEQ ID NO: 5374; WAN024FG6; Start 319; Stop 343
caaataccactgctcctacaatcat

SEQ ID NO: 408606 - DNA, 25 bp, Artificial
  probe
  misc_feature (1)..(25): SEQ ID NO: 5374; WAN024FG6; Start 116; Stop 140
atctcgtgcatagtaatctcttgga

SEQ ID NO: 408607 - DNA, 25 bp, Artificial
  probe
  misc_feature (1)..(25): SEQ ID NO: 5374; WAN024FG6; Start 165; Stop 189
ctttcttgttcttgcttattgccag

SEQ ID NO: 408608 - DNA, 25 bp, Artificial
  probe
  misc_feature (1)..(25): SEQ ID NO: 5374; WAN024FG6; Start 159; Stop 183
tctttcctttcttgttcttgcttat

SEQ ID NO: 408609 - DNA, 25 bp, Artificial
  probe
  misc_feature (1)..(25): SEQ ID NO: 5374; WAN024FG6; Start 158; Stop 182
atctttcctttcttgttcttgctta

SEQ ID NO: 408610 - DNA, 25 bp, Artificial
  probe
  misc_feature (1)..(25): SEQ ID NO: 5374; WAN024FG6; Start 157; Stop 181
tatctttcctttcttgttcttgctt

SEQ ID NO: 408611 - DNA, 25 bp, Artificial
  probe
  misc_feature (1)..(25): SEQ ID NO: 5374; WAN024FG6; Start 156; Stop 180
ttatctttcctttcttgttcttgct

SEQ ID NO: 408612 - DNA, 25 bp, Artificial
  probe
  misc_feature (1)..(25): SEQ ID NO: 5374; WAN024FG6; Start 153; Stop 177
tgcttatctttcctttcttgttctt

SEQ ID NO: 408613 - DNA, 25 bp, Artificial
  probe
  misc_feature (1)..(25): SEQ ID NO: 5374; WAN024FG6; Start 152; Stop 176
ttgcttatctttcctttcttgttct

SEQ ID NO: 408614 - DNA, 25 bp, Artificial
  probe
  misc_feature (1)..(25): SEQ ID NO: 5374; WAN024FG6; Start 150; Stop 174
tcttgcttatctttcctttcttgtt

SEQ ID NO: 408615 - DNA, 25 bp, Artificial
  probe
  misc_feature (1)..(25): SEQ ID NO: 5374; WAN024FG6; Start 149; Stop 173
ttcttgcttatctttcctttcttgt

SEQ ID NO: 408616 - DNA, 25 bp, Artificial
  probe
  misc_feature (1)..(25): SEQ ID NO: 5374; WAN024FG6; Start 117; Stop 141
tctcgtgcatagtaatctcttggaa

SEQ ID NO: 408617 - DNA, 25 bp, Artificial
  probe
  misc_feature (1)..(25): SEQ ID NO: 5374; WAN024FG6; Start 155; Stop 179
cttatctttcctttcttgttcttgc

SEQ ID NO: 408618 - DNA, 25 bp, Artificial
  probe
  misc_feature (1)..(25): SEQ ID NO: 5374; WAN024FG6; Start 154; Stop 178
gcttatctttcctttcttgttcttg

SEQ ID NO: 408619 - DNA, 25 bp, Artificial
  probe
  misc_feature (1)..(25): SEQ ID NO: 5374; WAN024FG6; Start 151; Stop 175
cttgcttatctttcctttcttgttc

SEQ ID NO: 408620 - DNA, 25 bp, Artificial
  probe
  misc_feature (1)..(25): SEQ ID NO: 5374; WAN024FG6; Start 64; Stop 88
aagcattggtttcaacatcttcttt

SEQ ID NO: 408621 - DNA, 25 bp, Artificial
  probe
  misc_feature (1)..(25): SEQ ID NO: 5374; WAN024FG6; Start 179; Stop 203
cttattgccagaaagttcagtctct

SEQ ID NO: 408622 - DNA, 25 bp, Artificial
  probe
  misc_feature (1)..(25): SEQ ID NO: 5374; WAN024FG6; Start 161; Stop 185
tttcctttcttgttcttgcttattg

SEQ ID NO: 408623 - DNA, 25 bp, Artificial
  probe
  misc_feature (1)..(25): SEQ ID NO: 5374; WAN024FG6; Start 148; Stop 172
cttcttgcttatctttcctttcttg

SEQ ID NO: 408624 - DNA, 25 bp, Artificial
  probe
  misc_feature (1)..(25): SEQ ID NO: 5374; WAN024FG6; Start 147; Stop 171
tcttcttgcttatctttcctttctt

SEQ ID NO: 408625 - DNA, 25 bp, Artificial
  probe
  misc_feature (1)..(25): SEQ ID NO: 5374; WAN024FG6; Start 146; Stop 170
ttcttcttgcttatctttcctttct

SEQ ID NO: 408626 - DNA, 25 bp, Artificial
  probe
  misc_feature (1)..(25): SEQ ID NO: 5374; WAN024FG6; Start 47; Stop 71
aactctctgaccatttgaagcattg

SEQ ID NO: 408627 - DNA, 25 bp, Artificial
  probe
  misc_feature (1)..(25): SEQ ID NO: 5374; WAN024FG6; Start 166; Stop 190
tttcttgttcttgcttattgccaga

SEQ ID NO: 408628 - DNA, 25 bp, Artificial
  probe
  misc_feature (1)..(25): SEQ ID NO: 5374; WAN024FG6; Start 160; Stop 184
ctttcctttcttgttcttgcttatt

SEQ ID NO: 408629 - DNA, 25 bp, Artificial
  probe
  misc_feature (1)..(25): SEQ ID NO: 5374; WAN024FG6; Start 316; Stop 340
ttccaaataccactgctcctacaat

SEQ ID NO: 408630 - DNA, 25 bp, Artificial
  probe
  misc_feature (1)..(25): SEQ ID NO: 5374; WAN024FG6; Start 163; Stop 187
tcctttcttgttcttgcttattgcc

SEQ ID NO: 408631 - DNA, 25 bp, Artificial
  probe
  misc_feature (1)..(25): SEQ ID NO: 5374; WAN024FG6; Start 174; Stop 198
tcttgcttattgccagaaagttcag

SEQ ID NO: 408632 - DNA, 25 bp, Artificial
  probe
  misc_feature (1)..(25): SEQ ID NO: 5375; WAN024GDT; Start 108; Stop 132
caatagcaactactggaatggcaac

SEQ ID NO: 408633 - DNA, 25 bp, Artificial
  probe
  misc_feature (1)..(25): SEQ ID NO: 5375; WAN024GDT; Start 81; Stop 105
gatcaatattctccgaagtcaagcc

SEQ ID NO: 408634 - DNA, 25 bp, Artificial
  probe
  misc_feature (1)..(25): SEQ ID NO: 5375; WAN024GDT; Start 95; Stop 119
gaagtcaagcctccaatagcaacta

SEQ ID NO: 408635 - DNA, 25 bp, Artificial
  probe
  misc_feature (1)..(25): SEQ ID NO: 5375; WAN024GDT; Start 149; Stop 173
ttcaaggtcgatatcagagtaatgg

SEQ ID NO: 408636 - DNA, 25 bp, Artificial
  probe
  misc_feature (1)..(25): SEQ ID NO: 5375; WAN024GDT; Start 82; Stop 106
atcaatattctccgaagtcaagcct

SEQ ID NO: 408637 - DNA, 25 bp, Artificial
  probe
  misc_feature (1)..(25): SEQ ID NO: 5375; WAN024GDT; Start 96; Stop 120
aagtcaagcctccaatagcaactac

SEQ ID NO: 408638 - DNA, 25 bp, Artificial
  probe
  misc_feature (1)..(25): SEQ ID NO: 5375; WAN024GDT; Start 109; Stop 133
aatagcaactactggaatggcaacc

SEQ ID NO: 408639 - DNA, 25 bp, Artificial
  probe
  misc_feature (1)..(25): SEQ ID NO: 5375; WAN024GDT; Start 12; Stop 36
cctcaatatcttctgcttgcatcaa

SEQ ID NO: 408640 - DNA, 25 bp, Artificial
  probe
  misc_feature (1)..(25): SEQ ID NO: 5375; WAN024GDT; Start 83; Stop 107
tcaatattctccgaagtcaagcctc

SEQ ID NO: 408641 - DNA, 25 bp, Artificial
  probe
  misc_feature (1)..(25): SEQ ID NO: 5375; WAN024GDT; Start 98; Stop 122
gtcaagcctccaatagcaactactg

SEQ ID NO: 408642 - DNA, 25 bp, Artificial
  probe
  misc_feature (1)..(25): SEQ ID NO: 5375; WAN024GDT; Start 88; Stop 112
attctccgaagtcaagcctccaata

SEQ ID NO: 408643 - DNA, 25 bp, Artificial
  probe
  misc_feature (1)..(25): SEQ ID NO: 5375; WAN024GDT; Start 87; Stop 111
tattctccgaagtcaagcctccaat

SEQ ID NO: 408644 - DNA, 25 bp, Artificial
  probe
  misc_feature (1)..(25): SEQ ID NO: 5375; WAN024GDT; Start 86; Stop 110
atattctccgaagtcaagcctccaa

SEQ ID NO: 408645 - DNA, 25 bp, Artificial
  probe
  misc_feature (1)..(25): SEQ ID NO: 5375; WAN024GDT; Start 97; Stop 121
agtcaagcctccaatagcaactact

SEQ ID NO: 408646 - DNA, 25 bp, Artificial
  probe
  misc_feature (1)..(25): SEQ ID NO: 5375; WAN024GDT; Start 72; Stop 96
ccataagctgatcaatattctccga

SEQ ID NO: 408647 - DNA, 25 bp, Artificial
  probe
  misc_feature (1)..(25): SEQ ID NO: 5375; WAN024GDT; Start 84; Stop 108
caatattctccgaagtcaagcctcc

SEQ ID NO: 408648 - DNA, 25 bp, Artificial
  probe
  misc_feature (1)..(25): SEQ ID NO: 5375; WAN024GDT; Start 75; Stop 99
taagctgatcaatattctccgaagt

SEQ ID NO: 408649 - DNA, 25 bp, Artificial
  probe
  misc_feature (1)..(25): SEQ ID NO: 5375; WAN024GDT; Start 76; Stop 100
aagctgatcaatattctccgaagtc

SEQ ID NO: 408650 - DNA, 25 bp, Artificial
  probe
  misc_feature (1)..(25): SEQ ID NO: 5375; WAN024GDT; Start 17; Stop 41
atatcttctgcttgcatcaaatcac

SEQ ID NO: 408651 - DNA, 25 bp, Artificial
  probe
  misc_feature (1)..(25): SEQ ID NO: 5375; WAN024GDT; Start 13; Stop 37
ctcaatatcttctgcttgcatcaaa

SEQ ID NO: 408652 - DNA, 25 bp, Artificial
  probe
  misc_feature (1)..(25): SEQ ID NO: 5375; WAN024GDT; Start 89; Stop 113
ttctccgaagtcaagcctccaatag

SEQ ID NO: 408653 - DNA, 25 bp, Artificial
  probe
  misc_feature (1)..(25): SEQ ID NO: 5375; WAN024GDT; Start 16; Stop 40
aatatcttctgcttgcatcaaatca

SEQ ID NO: 408654 - DNA, 25 bp, Artificial
  probe
  misc_feature (1)..(25): SEQ ID NO: 5375; WAN024GDT; Start 14; Stop 38
tcaatatcttctgcttgcatcaaat

SEQ ID NO: 408655 - DNA, 25 bp, Artificial
  probe
  misc_feature (1)..(25): SEQ ID NO: 5375; WAN024GDT; Start 73; Stop 97
cataagctgatcaatattctccgaa

SEQ ID NO: 408656 - DNA, 25 bp, Artificial
  probe
  misc_feature (1)..(25): SEQ ID NO: 5375; WAN024GDT; Start 15; Stop 39
caatatcttctgcttgcatcaaatc

SEQ ID NO: 408657 - DNA, 25 bp, Artificial
  probe
  misc_feature (1)..(25): SEQ ID NO: 5375; WAN024GDT; Start 85; Stop 109
aatattctccgaagtcaagcctcca

SEQ ID NO: 408658 - DNA, 25 bp, Artificial
  probe
  misc_feature (1)..(25): SEQ ID NO: 5375; WAN024GDT; Start 79; Stop 103
ctgatcaatattctccgaagtcaag

SEQ ID NO: 408659 - DNA, 25 bp, Artificial
  probe
  misc_feature (1)..(25): SEQ ID NO: 5375; WAN024GDT; Start 107; Stop 131
ccaatagcaactactggaatggcaa

SEQ ID NO: 408660 - DNA, 25 bp, Artificial
  probe
  misc_feature (1)..(25): SEQ ID NO: 5375; WAN024GDT; Start 74; Stop 98
ataagctgatcaatattctccgaag

SEQ ID NO: 408661 - DNA, 25 bp, Artificial
  probe
  misc_feature (1)..(25): SEQ ID NO: 5375; WAN024GDT; Start 32; Stop 56
atcaaatcacgtacaacagctacac

SEQ ID NO: 408662 - DNA, 25 bp, Artificial
  probe
  misc_feature (1)..(25): SEQ ID NO: 5375; WAN024GDT; Start 31; Stop 55
catcaaatcacgtacaacagctaca

SEQ ID NO: 408663 - DNA, 25 bp, Artificial
  probe
  misc_feature (1)..(25): SEQ ID NO: 5375; WAN024GDT; Start 80; Stop 104
tgatcaatattctccgaagtcaagc

SEQ ID NO: 408664 - DNA, 25 bp, Artificial
  probe
  misc_feature (1)..(25): SEQ ID NO: 5375; WAN024GDT; Start 78; Stop 102
gctgatcaatattctccgaagtcaa

SEQ ID NO: 408665 - DNA, 25 bp, Artificial
  probe
  misc_feature (1)..(25): SEQ ID NO: 5376; WAN024F3X; Start 50; Stop 74
tactccataacctgttaccactact

SEQ ID NO: 408666 - DNA, 25 bp, Artificial
  probe
  misc_feature (1)..(25): SEQ ID NO: 5376; WAN024F3X; Start 49; Stop 73
ttactccataacctgttaccactac

SEQ ID NO: 408667 - DNA, 25 bp, Artificial
  probe
  misc_feature (1)..(25): SEQ ID NO: 5376; WAN024F3X; Start 51; Stop 75
actccataacctgttaccactactc

SEQ ID NO: 408668 - DNA, 25 bp, Artificial
  probe
  misc_feature (1)..(25): SEQ ID NO: 5376; WAN024F3X; Start 45; Stop 69
gatgttactccataacctgttacca

SEQ ID NO: 408669 - DNA, 25 bp, Artificial
  probe
  misc_feature (1)..(25): SEQ ID NO: 5376; WAN024F3X; Start 44; Stop 68
agatgttactccataacctgttacc

SEQ ID NO: 408670 - DNA, 25 bp, Artificial
  probe
  misc_feature (1)..(25): SEQ ID NO: 5376; WAN024F3X; Start 46; Stop 70
atgttactccataacctgttaccac

SEQ ID NO: 408671 - DNA, 25 bp, Artificial
  probe
  misc_feature (1)..(25): SEQ ID NO: 5376; WAN024F3X; Start 52; Stop 76
ctccataacctgttaccactactcg

SEQ ID NO: 408672 - DNA, 25 bp, Artificial
  probe
  misc_feature (1)..(25): SEQ ID NO: 5376; WAN024F3X; Start 48; Stop 72
gttactccataacctgttaccacta

SEQ ID NO: 408673 - DNA, 25 bp, Artificial
  probe
  misc_feature (1)..(25): SEQ ID NO: 5376; WAN024F3X; Start 55; Stop 79
cataacctgttaccactactcgatt

SEQ ID NO: 408674 - DNA, 25 bp, Artificial
  probe
  misc_feature (1)..(25): SEQ ID NO: 5376; WAN024F3X; Start 47; Stop 71
tgttactccataacctgttaccact

SEQ ID NO: 408675 - DNA, 25 bp, Artificial
  probe
  misc_feature (1)..(25): SEQ ID NO: 5376; WAN024F3X; Start 43; Stop 67
gagatgttactccataacctgttac

SEQ ID NO: 408676 - DNA, 25 bp, Artificial
  probe
  misc_feature (1)..(25): SEQ ID NO: 5376; WAN024F3X; Start 18; Stop 42
aattcttctggtgtatttccgattg

SEQ ID NO: 408677 - DNA, 25 bp, Artificial
  probe
  misc_feature (1)..(25): SEQ ID NO: 5376; WAN024F3X; Start 54; Stop 78
ccataacctgttaccactactcgat

SEQ ID NO: 408678 - DNA, 25 bp, Artificial
  probe
  misc_feature (1)..(25): SEQ ID NO: 5376; WAN024F3X; Start 19; Stop 43
attcttctggtgtatttccgattgg

SEQ ID NO: 408679 - DNA, 25 bp, Artificial
  probe
  misc_feature (1)..(25): SEQ ID NO: 5376; WAN024F3X; Start 216; Stop 240
ttcatcggaatctgagctagtgtag

SEQ ID NO: 408680 - DNA, 25 bp, Artificial
  probe
  misc_feature (1)..(25): SEQ ID NO: 5376; WAN024F3X; Start 110; Stop 134
ctacatacttaagccaccatcaatg

SEQ ID NO: 408681 - DNA, 25 bp, Artificial
  probe
  misc_feature (1)..(25): SEQ ID NO: 5376; WAN024F3X; Start 53; Stop 77
tccataacctgttaccactactcga

SEQ ID NO: 408682 - DNA, 25 bp, Artificial
  probe
  misc_feature (1)..(25): SEQ ID NO: 5376; WAN024F3X; Start 17; Stop 41
aaattcttctggtgtatttccgatt

SEQ ID NO: 408683 - DNA, 25 bp, Artificial
  probe
  misc_feature (1)..(25): SEQ ID NO: 5376; WAN024F3X; Start 29; Stop 53
tgtatttccgattggagatgttact

SEQ ID NO: 408684 - DNA, 25 bp, Artificial
  probe
  misc_feature (1)..(25): SEQ ID NO: 5376; WAN024F3X; Start 28; Stop 52
gtgtatttccgattggagatgttac

SEQ ID NO: 408685 - DNA, 25 bp, Artificial
  probe
  misc_feature (1)..(25): SEQ ID NO: 5376; WAN024F3X; Start 58; Stop 82
aacctgttaccactactcgatttag

SEQ ID NO: 408686 - DNA, 25 bp, Artificial
  probe
  misc_feature (1)..(25): SEQ ID NO: 5376; WAN024F3X; Start 27; Stop 51
ggtgtatttccgattggagatgtta

SEQ ID NO: 408687 - DNA, 25 bp, Artificial
  probe
  misc_feature (1)..(25): SEQ ID NO: 5376; WAN024F3X; Start 30; Stop 54
gtatttccgattggagatgttactc

SEQ ID NO: 408688 - DNA, 25 bp, Artificial
  probe
  misc_feature (1)..(25): SEQ ID NO: 5376; WAN024F3X; Start 56; Stop 80
ataacctgttaccactactcgattt

SEQ ID NO: 408689 - DNA, 25 bp, Artificial
  probe
  misc_feature (1)..(25): SEQ ID NO: 5376; WAN024F3X; Start 207; Stop 231
ccaaattctttcatcggaatctgag

SEQ ID NO: 408690 - DNA, 25 bp, Artificial
  probe
  misc_feature (1)..(25): SEQ ID NO: 5376; WAN024F3X; Start 57; Stop 81
taacctgttaccactactcgattta

SEQ ID NO: 408691 - DNA, 25 bp, Artificial
  probe
  misc_feature (1)..(25): SEQ ID NO: 5376; WAN024F3X; Start 208; Stop 232
caaattctttcatcggaatctgagc

SEQ ID NO: 408692 - DNA, 25 bp, Artificial
  probe
  misc_feature (1)..(25): SEQ ID NO: 5376; WAN024F3X; Start 111; Stop 135
tacatacttaagccaccatcaatgg

SEQ ID NO: 408693 - DNA, 25 bp, Artificial
  probe
  misc_feature (1)..(25): SEQ ID NO: 5376; WAN024F3X; Start 206; Stop 230
cccaaattctttcatcggaatctga

SEQ ID NO: 408694 - DNA, 25 bp, Artificial
  probe
  misc_feature (1)..(25): SEQ ID NO: 5376; WAN024F3X; Start 148; Stop 172
cagttagataatcttggcctgctaa

SEQ ID NO: 408695 - DNA, 25 bp, Artificial
  probe
  misc_feature (1)..(25): SEQ ID NO: 5376; WAN024F3X; Start 23; Stop 47
ttctggtgtatttccgattggagat

SEQ ID NO: 408696 - DNA, 25 bp, Artificial
  probe
  misc_feature (1)..(25): SEQ ID NO: 5376; WAN024F3X; Start 215; Stop 239
tttcatcggaatctgagctagtgta

SEQ ID NO: 408697 - DNA, 25 bp, Artificial
  probe
  misc_feature (1)..(25): SEQ ID NO: 5376; WAN024F3X; Start 20; Stop 44
ttcttctggtgtatttccgattgga

SEQ ID NO: 408698 - DNA, 25 bp, Artificial
  probe
  misc_feature (1)..(25): SEQ ID NO: 5377; WAN024F23; Start 166; Stop 190
aaagaagattcaagcaagacaaagc

SEQ ID NO: 408699 - DNA, 25 bp, Artificial
  probe
  misc_feature (1)..(25): SEQ ID NO: 5377; WAN024F23; Start 3; Stop 27
gctaagcgaatcatttcaaacagat

SEQ ID NO: 408700 - DNA, 25 bp, Artificial
  probe
  misc_feature (1)..(25): SEQ ID NO: 5377; WAN024F23; Start 1; Stop 25
ttgctaagcgaatcatttcaaacag

SEQ ID NO: 408701 - DNA, 25 bp, Artificial
  probe
  misc_feature (1)..(25): SEQ ID NO: 5377; WAN024F23; Start 2; Stop 26
tgctaagcgaatcatttcaaacaga

SEQ ID NO: 408702 - DNA, 25 bp, Artificial
  probe
  misc_feature (1)..(25): SEQ ID NO: 5377; WAN024F23; Start 51; Stop 75
tctacaaagactgaactatgatgag

SEQ ID NO: 408703 - DNA, 25 bp, Artificial
  probe
  misc_feature (1)..(25): SEQ ID NO: 5377; WAN024F23; Start 52; Stop 76
ctacaaagactgaactatgatgagt

SEQ ID NO: 408704 - DNA, 25 bp, Artificial
  probe
  misc_feature (1)..(25): SEQ ID NO: 5377; WAN024F23; Start 142; Stop 166
gagtcatgctcttaccattgtcaaa

SEQ ID NO: 408705 - DNA, 25 bp, Artificial
  probe
  misc_feature (1)..(25): SEQ ID NO: 5377; WAN024F23; Start 141; Stop 165
cgagtcatgctcttaccattgtcaa

SEQ ID NO: 408706 - DNA, 25 bp, Artificial
  probe
  misc_feature (1)..(25): SEQ ID NO: 5377; WAN024F23; Start 139; Stop 163
aacgagtcatgctcttaccattgtc

SEQ ID NO: 408707 - DNA, 25 bp, Artificial
  probe
  misc_feature (1)..(25): SEQ ID NO: 5377; WAN024F23; Start 50; Stop 74
ttctacaaagactgaactatgatga

SEQ ID NO: 408708 - DNA, 25 bp, Artificial
  probe
  misc_feature (1)..(25): SEQ ID NO: 5377; WAN024F23; Start 54; Stop 78
acaaagactgaactatgatgagtat

SEQ ID NO: 408709 - DNA, 25 bp, Artificial
  probe
  misc_feature (1)..(25): SEQ ID NO: 5377; WAN024F23; Start 4; Stop 28
ctaagcgaatcatttcaaacagatt

SEQ ID NO: 408710 - DNA, 25 bp, Artificial
  probe
  misc_feature (1)..(25): SEQ ID NO: 5377; WAN024F23; Start 5; Stop 29
taagcgaatcatttcaaacagattt

SEQ ID NO: 408711 - DNA, 25 bp, Artificial
  probe
  misc_feature (1)..(25): SEQ ID NO: 5377; WAN024F23; Start 49; Stop 73
tttctacaaagactgaactatgatg

SEQ ID NO: 408712 - DNA, 25 bp, Artificial
  probe
  misc_feature (1)..(25): SEQ ID NO: 5377; WAN024F23; Start 53; Stop 77
tacaaagactgaactatgatgagta

SEQ ID NO: 408713 - DNA, 25 bp, Artificial
  probe
  misc_feature (1)..(25): SEQ ID NO: 5377; WAN024F23; Start 165; Stop 189
aaaagaagattcaagcaagacaaag

SEQ ID NO: 408714 - DNA, 25 bp, Artificial
  probe
  misc_feature (1)..(25): SEQ ID NO: 5377; WAN024F23; Start 138; Stop 162
aaacgagtcatgctcttaccattgt

SEQ ID NO: 408715 - DNA, 25 bp, Artificial
  probe
  misc_feature (1)..(25): SEQ ID NO: 5377; WAN024F23; Start 55; Stop 79
caaagactgaactatgatgagtatt

SEQ ID NO: 408716 - DNA, 25 bp, Artificial
  probe
  misc_feature (1)..(25): SEQ ID NO: 5377; WAN024F23; Start 140; Stop 164
acgagtcatgctcttaccattgtca

SEQ ID NO: 408717 - DNA, 25 bp, Artificial
  probe
  misc_feature (1)..(25): SEQ ID NO: 5377; WAN024F23; Start 86; Stop 110
ccctgtttgaacaattaacaagtct

SEQ ID NO: 408718 - DNA, 25 bp, Artificial
  probe
  misc_feature (1)..(25): SEQ ID NO: 5377; WAN024F23; Start 167; Stop 191
aagaagattcaagcaagacaaagct

SEQ ID NO: 408719 - DNA, 25 bp, Artificial
  probe
  misc_feature (1)..(25): SEQ ID NO: 5377; WAN024F23; Start 143; Stop 167
agtcatgctcttaccattgtcaaaa

SEQ ID NO: 408720 - DNA, 25 bp, Artificial
  probe
  misc_feature (1)..(25): SEQ ID NO: 5377; WAN024F23; Start 87; Stop 111
cctgtttgaacaattaacaagtctc

SEQ ID NO: 408721 - DNA, 25 bp, Artificial
  probe
  misc_feature (1)..(25): SEQ ID NO: 5377; WAN024F23; Start 90; Stop 114
gtttgaacaattaacaagtctctta

SEQ ID NO: 408722 - DNA, 25 bp, Artificial
  probe
  misc_feature (1)..(25): SEQ ID NO: 5377; WAN024F23; Start 56; Stop 80
aaagactgaactatgatgagtattt

SEQ ID NO: 408723 - DNA, 25 bp, Artificial
  probe
  misc_feature (1)..(25): SEQ ID NO: 5377; WAN024F23; Start 35; Stop 59
aggaagtgccaaattttctacaaag

SEQ ID NO: 408724 - DNA, 25 bp, Artificial
  probe
  misc_feature (1)..(25): SEQ ID NO: 5377; WAN024F23; Start 34; Stop 58
gaggaagtgccaaattttctacaaa

SEQ ID NO: 408725 - DNA, 25 bp, Artificial
  probe
  misc_feature (1)..(25): SEQ ID NO: 5377; WAN024F23; Start 40; Stop 64
gtgccaaattttctacaaagactga

SEQ ID NO: 408726 - DNA, 25 bp, Artificial
  probe
  misc_feature (1)..(25): SEQ ID NO: 5377; WAN024F23; Start 36; Stop 60
ggaagtgccaaattttctacaaaga

SEQ ID NO: 408727 - DNA, 25 bp, Artificial
  probe
  misc_feature (1)..(25): SEQ ID NO: 5377; WAN024F23; Start 101; Stop 125
taacaagtctcttaaatagtgcaaa

SEQ ID NO: 408728 - DNA, 25 bp, Artificial
  probe
  misc_feature (1)..(25): SEQ ID NO: 5377; WAN024F23; Start 41; Stop 65
tgccaaattttctacaaagactgaa

SEQ ID NO: 408729 - DNA, 25 bp, Artificial
  probe
  misc_feature (1)..(25): SEQ ID NO: 5377; WAN024F23; Start 6; Stop 30
aagcgaatcatttcaaacagatttt

SEQ ID NO: 408730 - DNA, 25 bp, Artificial
  probe
  misc_feature (1)..(25): SEQ ID NO: 5377; WAN024F23; Start 111; Stop 135
cttaaatagtgcaaaagatcggtca

SEQ ID NO: 408731 - DNA, 25 bp, Artificial
  probe
  misc_feature (1)..(25): SEQ ID NO: 5378; WAN024EZZ; Start 182; Stop 206
ctgtattgacattgacaccaacttg

SEQ ID NO: 408732 - DNA, 25 bp, Artificial
  probe
  misc_feature (1)..(25): SEQ ID NO: 5378; WAN024EZZ; Start 181; Stop 205
gctgtattgacattgacaccaactt

SEQ ID NO: 408733 - DNA, 25 bp, Artificial
  probe
  misc_feature (1)..(25): SEQ ID NO: 5378; WAN024EZZ; Start 178; Stop 202
ctagctgtattgacattgacaccaa

SEQ ID NO: 408734 - DNA, 25 bp, Artificial
  probe
  misc_feature (1)..(25): SEQ ID NO: 5378; WAN024EZZ; Start 232; Stop 256
tccagactctcagatagtttcttct

SEQ ID NO: 408735 - DNA, 25 bp, Artificial
  probe
  misc_feature (1)..(25): SEQ ID NO: 5378; WAN024EZZ; Start 179; Stop 203
tagctgtattgacattgacaccaac

SEQ ID NO: 408736 - DNA, 25 bp, Artificial
  probe
  misc_feature (1)..(25): SEQ ID NO: 5378; WAN024EZZ; Start 231; Stop 255
gtccagactctcagatagtttcttc

SEQ ID NO: 408737 - DNA, 25 bp, Artificial
  probe
  misc_feature (1)..(25): SEQ ID NO: 5378; WAN024EZZ; Start 183; Stop 207
tgtattgacattgacaccaacttgg

SEQ ID NO: 408738 - DNA, 25 bp, Artificial
  probe
  misc_feature (1)..(25): SEQ ID NO: 5378; WAN024EZZ; Start 227; Stop 251
caaagtccagactctcagatagttt

SEQ ID NO: 408739 - DNA, 25 bp, Artificial
  probe
  misc_feature (1)..(25): SEQ ID NO: 5378; WAN024EZZ; Start 228; Stop 252
aaagtccagactctcagatagtttc

SEQ ID NO: 408740 - DNA, 25 bp, Artificial
  probe
  misc_feature (1)..(25): SEQ ID NO: 5378; WAN024EZZ; Start 230; Stop 254
agtccagactctcagatagtttctt

SEQ ID NO: 408741 - DNA, 25 bp, Artificial
  probe
  misc_feature (1)..(25): SEQ ID NO: 5378; WAN024EZZ; Start 229; Stop 253
aagtccagactctcagatagtttct

SEQ ID NO: 408742 - DNA, 25 bp, Artificial
  probe
  misc_feature (1)..(25): SEQ ID NO: 5378; WAN024EZZ; Start 57; Stop 81
cagacgaggaactttcttgatttgg

SEQ ID NO: 408743 - DNA, 25 bp, Artificial
  probe
  misc_feature (1)..(25): SEQ ID NO: 5378; WAN024EZZ; Start 56; Stop 80
ccagacgaggaactttcttgatttg

SEQ ID NO: 408744 - DNA, 25 bp, Artificial
  probe
  misc_feature (1)..(25): SEQ ID NO: 5378; WAN024EZZ; Start 224; Stop 248
caacaaagtccagactctcagatag

SEQ ID NO: 408745 - DNA, 25 bp, Artificial
  probe
  misc_feature (1)..(25): SEQ ID NO: 5378; WAN024EZZ; Start 226; Stop 250
acaaagtccagactctcagatagtt

SEQ ID NO: 408746 - DNA, 25 bp, Artificial
  probe
  misc_feature (1)..(25): SEQ ID NO: 5378; WAN024EZZ; Start 225; Stop 249
aacaaagtccagactctcagatagt

SEQ ID NO: 408747 - DNA, 25 bp, Artificial
  probe
  misc_feature (1)..(25): SEQ ID NO: 5378; WAN024EZZ; Start 223; Stop 247
acaacaaagtccagactctcagata

SEQ ID NO: 408748 - DNA, 25 bp, Artificial
  probe
  misc_feature (1)..(25): SEQ ID NO: 5378; WAN024EZZ; Start 180; Stop 204
agctgtattgacattgacaccaact

SEQ ID NO: 408749 - DNA, 25 bp, Artificial
  probe
  misc_feature (1)..(25): SEQ ID NO: 5378; WAN024EZZ; Start 208; Stop 232
ttaaccactgtatcgacaacaaagt

SEQ ID NO: 408750 - DNA, 25 bp, Artificial
  probe
  misc_feature (1)..(25): SEQ ID NO: 5378; WAN024EZZ; Start 58; Stop 82
agacgaggaactttcttgatttggg

SEQ ID NO: 408751 - DNA, 25 bp, Artificial
  probe
  misc_feature (1)..(25): SEQ ID NO: 5378; WAN024EZZ; Start 55; Stop 79
cccagacgaggaactttcttgattt

SEQ ID NO: 408752 - DNA, 25 bp, Artificial
  probe
  misc_feature (1)..(25): SEQ ID NO: 5378; WAN024EZZ; Start 4; Stop 28
ctactttcagggatacgaaggaaac

SEQ ID NO: 408753 - DNA, 25 bp, Artificial
  probe
  misc_feature (1)..(25): SEQ ID NO: 5378; WAN024EZZ; Start 209; Stop 233
taaccactgtatcgacaacaaagtc

SEQ ID NO: 408754 - DNA, 25 bp, Artificial
  probe
  misc_feature (1)..(25): SEQ ID NO: 5378; WAN024EZZ; Start 2; Stop 26
tgctactttcagggatacgaaggaa

SEQ ID NO: 408755 - DNA, 25 bp, Artificial
  probe
  misc_feature (1)..(25): SEQ ID NO: 5378; WAN024EZZ; Start 1; Stop 25
ttgctactttcagggatacgaagga

SEQ ID NO: 408756 - DNA, 25 bp, Artificial
  probe
  misc_feature (1)..(25): SEQ ID NO: 5378; WAN024EZZ; Start 222; Stop 246
gacaacaaagtccagactctcagat

SEQ ID NO: 408757 - DNA, 25 bp, Artificial
  probe
  misc_feature (1)..(25): SEQ ID NO: 5378; WAN024EZZ; Start 5; Stop 29
tactttcagggatacgaaggaaacc

SEQ ID NO: 408758 - DNA, 25 bp, Artificial
  probe
  misc_feature (1)..(25): SEQ ID NO: 5378; WAN024EZZ; Start 130; Stop 154
tcagagatagttttgttgagtccag

SEQ ID NO: 408759 - DNA, 25 bp, Artificial
  probe
  misc_feature (1)..(25): SEQ ID NO: 5378; WAN024EZZ; Start 129; Stop 153
ttcagagatagttttgttgagtcca

SEQ ID NO: 408760 - DNA, 25 bp, Artificial
  probe
  misc_feature (1)..(25): SEQ ID NO: 5378; WAN024EZZ; Start 131; Stop 155
cagagatagttttgttgagtccagc

SEQ ID NO: 408761 - DNA, 25 bp, Artificial
  probe
  misc_feature (1)..(25): SEQ ID NO: 5378; WAN024EZZ; Start 218; Stop 242
tatcgacaacaaagtccagactctc

SEQ ID NO: 408762 - DNA, 25 bp, Artificial
  probe
  misc_feature (1)..(25): SEQ ID NO: 5378; WAN024EZZ; Start 128; Stop 152
tttcagagatagttttgttgagtcc

SEQ ID NO: 408763 - DNA, 25 bp, Artificial
  probe
  misc_feature (1)..(25): SEQ ID NO: 5378; WAN024EZZ; Start 3; Stop 27
gctactttcagggatacgaaggaaa

SEQ ID NO: 408764 - DNA, 25 bp, Artificial
  probe
  misc_feature (1)..(25): SEQ ID NO: 5379; WAN024BEB; Start 183; Stop 207
tattgatttgggagttatagcgaaa

SEQ ID NO: 408765 - DNA, 25 bp, Artificial
  probe
  misc_feature (1)..(25): SEQ ID NO: 5379; WAN024BEB; Start 182; Stop 206
atattgatttgggagttatagcgaa

SEQ ID NO: 408766 - DNA, 25 bp, Artificial
  probe
  misc_feature (1)..(25): SEQ ID NO: 5379; WAN024BEB; Start 57; Stop 81
aaatcaaattcaaaccaagtcagct

SEQ ID NO: 408767 - DNA, 25 bp, Artificial
  probe
  misc_feature (1)..(25): SEQ ID NO: 5379; WAN024BEB; Start 58; Stop 82
aatcaaattcaaaccaagtcagctt

SEQ ID NO: 408768 - DNA, 25 bp, Artificial
  probe
  misc_feature (1)..(25): SEQ ID NO: 5379; WAN024BEB; Start 59; Stop 83
atcaaattcaaaccaagtcagcttc

SEQ ID NO: 408769 - DNA, 25 bp, Artificial
  probe
  misc_feature (1)..(25): SEQ ID NO: 5379; WAN024BEB; Start 181; Stop 205
aatattgatttgggagttatagcga

SEQ ID NO: 408770 - DNA, 25 bp, Artificial
  probe
  misc_feature (1)..(25): SEQ ID NO: 5379; WAN024BEB; Start 152; Stop 176
actcttatggtagttatttatggca

SEQ ID NO: 408771 - DNA, 25 bp, Artificial
  probe
  misc_feature (1)..(25): SEQ ID NO: 5379; WAN024BEB; Start 56; Stop 80
aaaatcaaattcaaaccaagtcagc

SEQ ID NO: 408772 - DNA, 25 bp, Artificial
  probe
  misc_feature (1)..(25): SEQ ID NO: 5379; WAN024BEB; Start 184; Stop 208
attgatttgggagttatagcgaaaa

SEQ ID NO: 408773 - DNA, 25 bp, Artificial
  probe
  misc_feature (1)..(25): SEQ ID NO: 5379; WAN024BEB; Start 173; Stop 197
ggcataataatattgatttgggagt

SEQ ID NO: 408774 - DNA, 25 bp, Artificial
  probe
  misc_feature (1)..(25): SEQ ID NO: 5379; WAN024BEB; Start 172; Stop 196
tggcataataatattgatttgggag

SEQ ID NO: 408775 - DNA, 25 bp, Artificial
  probe
  misc_feature (1)..(25): SEQ ID NO: 5379; WAN024BEB; Start 60; Stop 84
tcaaattcaaaccaagtcagcttcg

SEQ ID NO: 408776 - DNA, 25 bp, Artificial
  probe
  misc_feature (1)..(25): SEQ ID NO: 5379; WAN024BEB; Start 54; Stop 78
cgaaaatcaaattcaaaccaagtca

SEQ ID NO: 408777 - DNA, 25 bp, Artificial
  probe
  misc_feature (1)..(25): SEQ ID NO: 5379; WAN024BEB; Start 153; Stop 177
ctcttatggtagttatttatggcat

SEQ ID NO: 408778 - DNA, 25 bp, Artificial
  probe
  misc_feature (1)..(25): SEQ ID NO: 5379; WAN024BEB; Start 213; Stop 237
aggttctataatatttgtagtgggt

SEQ ID NO: 408779 - DNA, 25 bp, Artificial
  probe
  misc_feature (1)..(25): SEQ ID NO: 5379; WAN024BEB; Start 180; Stop 204
taatattgatttgggagttatagcg

SEQ ID NO: 408780 - DNA, 25 bp, Artificial
  probe
  misc_feature (1)..(25): SEQ ID NO: 5379; WAN024BEB; Start 186; Stop 210
tgatttgggagttatagcgaaaatt

SEQ ID NO: 408781 - DNA, 25 bp, Artificial
  probe
  misc_feature (1)..(25): SEQ ID NO: 5379; WAN024BEB; Start 185; Stop 209
ttgatttgggagttatagcgaaaat

SEQ ID NO: 408782 - DNA, 25 bp, Artificial
  probe
  misc_feature (1)..(25): SEQ ID NO: 5379; WAN024BEB; Start 171; Stop 195
atggcataataatattgatttggga

SEQ ID NO: 408783 - DNA, 25 bp, Artificial
  probe
  misc_feature (1)..(25): SEQ ID NO: 5379; WAN024BEB; Start 55; Stop 79
gaaaatcaaattcaaaccaagtcag

SEQ ID NO: 408784 - DNA, 25 bp, Artificial
  probe
  misc_feature (1)..(25): SEQ ID NO: 5379; WAN024BEB; Start 242; Stop 266
ccactatagatattatggagcctat

SEQ ID NO: 408785 - DNA, 25 bp, Artificial
  probe
  misc_feature (1)..(25): SEQ ID NO: 5379; WAN024BEB; Start 92; Stop 116
gtactcaagtgctgtctgtggctag

SEQ ID NO: 408786 - DNA, 25 bp, Artificial
  probe
  misc_feature (1)..(25): SEQ ID NO: 5379; WAN024BEB; Start 53; Stop 77
tcgaaaatcaaattcaaaccaagtc

SEQ ID NO: 408787 - DNA, 25 bp, Artificial
  probe
  misc_feature (1)..(25): SEQ ID NO: 5379; WAN024BEB; Start 151; Stop 175
tactcttatggtagttatttatggc

SEQ ID NO: 408788 - DNA, 25 bp, Artificial
  probe
  misc_feature (1)..(25): SEQ ID NO: 5379; WAN024BEB; Start 61; Stop 85
caaattcaaaccaagtcagcttcgc

SEQ ID NO: 408789 - DNA, 25 bp, Artificial
  probe
  misc_feature (1)..(25): SEQ ID NO: 5379; WAN024BEB; Start 174; Stop 198
gcataataatattgatttgggagtt

SEQ ID NO: 408790 - DNA, 25 bp, Artificial
  probe
  misc_feature (1)..(25): SEQ ID NO: 5379; WAN024BEB; Start 240; Stop 264
atccactatagatattatggagcct

SEQ ID NO: 408791 - DNA, 25 bp, Artificial
  probe
  misc_feature (1)..(25): SEQ ID NO: 5379; WAN024BEB; Start 214; Stop 238
ggttctataatatttgtagtgggta

SEQ ID NO: 408792 - DNA, 25 bp, Artificial
  probe
  misc_feature (1)..(25): SEQ ID NO: 5379; WAN024BEB; Start 187; Stop 211
gatttgggagttatagcgaaaattt

SEQ ID NO: 408793 - DNA, 25 bp, Artificial
  probe
  misc_feature (1)..(25): SEQ ID NO: 5379; WAN024BEB; Start 212; Stop 236
taggttctataatatttgtagtggg

SEQ ID NO: 408794 - DNA, 25 bp, Artificial
  probe
  misc_feature (1)..(25): SEQ ID NO: 5379; WAN024BEB; Start 15; Stop 39
aagccatatcgaaattgaattattt

SEQ ID NO: 408795 - DNA, 25 bp, Artificial
  probe
  misc_feature (1)..(25): SEQ ID NO: 5379; WAN024BEB; Start 170; Stop 194
tatggcataataatattgatttggg

SEQ ID NO: 408796 - DNA, 25 bp, Artificial
  probe
  misc_feature (1)..(25): SEQ ID NO: 5379; WAN024BEB; Start 241; Stop 265
tccactatagatattatggagccta

SEQ ID NO: 408797 - DNA, 25 bp, Artificial
  probe
  misc_feature (1)..(25): SEQ ID NO: 5380; WAN024DGU; Start 90; Stop 114
ttggatagttgtgctcttatgtgtg

SEQ ID NO: 408798 - DNA, 25 bp, Artificial
  probe
  misc_feature (1)..(25): SEQ ID NO: 5380; WAN024DGU; Start 93; Stop 117
gatagttgtgctcttatgtgtgctt

SEQ ID NO: 408799 - DNA, 25 bp, Artificial
  probe
  misc_feature (1)..(25): SEQ ID NO: 5380; WAN024DGU; Start 512; Stop 536
taacggtgcggttgaatcattatta

SEQ ID NO: 408800 - DNA, 25 bp, Artificial
  probe
  misc_feature (1)..(25): SEQ ID NO: 5380; WAN024DGU; Start 514; Stop 538
acggtgcggttgaatcattattatt

SEQ ID NO: 408801 - DNA, 25 bp, Artificial
  probe
  misc_feature (1)..(25): SEQ ID NO: 5380; WAN024DGU; Start 549; Stop 573
atactatggctactcctatgaacgc

SEQ ID NO: 408802 - DNA, 25 bp, Artificial
  probe
  misc_feature (1)..(25): SEQ ID NO: 5380; WAN024DGU; Start 94; Stop 118
atagttgtgctcttatgtgtgcttg

SEQ ID NO: 408803 - DNA, 25 bp, Artificial
  probe
  misc_feature (1)..(25): SEQ ID NO: 5380; WAN024DGU; Start 513; Stop 537
aacggtgcggttgaatcattattat

SEQ ID NO: 408804 - DNA, 25 bp, Artificial
  probe
  misc_feature (1)..(25): SEQ ID NO: 5380; WAN024DGU; Start 400; Stop 424
actgagtctagtaaggcggatatta

SEQ ID NO: 408805 - DNA, 25 bp, Artificial
  probe
  misc_feature (1)..(25): SEQ ID NO: 5380; WAN024DGU; Start 237; Stop 261
taagttaagccagacagatagtcac

SEQ ID NO: 408806 - DNA, 25 bp, Artificial
  probe
  misc_feature (1)..(25): SEQ ID NO: 5380; WAN024DGU; Start 548; Stop 572
catactatggctactcctatgaacg

SEQ ID NO: 408807 - DNA, 25 bp, Artificial
  probe
  misc_feature (1)..(25): SEQ ID NO: 5380; WAN024DGU; Start 401; Stop 425
ctgagtctagtaaggcggatattac

SEQ ID NO: 408808 - DNA, 25 bp, Artificial
  probe
  misc_feature (1)..(25): SEQ ID NO: 5380; WAN024DGU; Start 511; Stop 535
gtaacggtgcggttgaatcattatt

SEQ ID NO: 408809 - DNA, 25 bp, Artificial
  probe
  misc_feature (1)..(25): SEQ ID NO: 5380; WAN024DGU; Start 417; Stop 441
ggatattacggctacggagatgaac

SEQ ID NO: 408810 - DNA, 25 bp, Artificial
  probe
  misc_feature (1)..(25): SEQ ID NO: 5380; WAN024DGU; Start 615; Stop 639
cttggaccatacagatgagaagtct

SEQ ID NO: 408811 - DNA, 25 bp, Artificial
  probe
  misc_feature (1)..(25): SEQ ID NO: 5380; WAN024DGU; Start 92; Stop 116
ggatagttgtgctcttatgtgtgct

SEQ ID NO: 408812 - DNA, 25 bp, Artificial
  probe
  misc_feature (1)..(25): SEQ ID NO: 5380; WAN024DGU; Start 88; Stop 112
gtttggatagttgtgctcttatgtg

SEQ ID NO: 408813 - DNA, 25 bp, Artificial
  probe
  misc_feature (1)..(25): SEQ ID NO: 5380; WAN024DGU; Start 402; Stop 426
tgagtctagtaaggcggatattacg

SEQ ID NO: 408814 - DNA, 25 bp, Artificial
  probe
  misc_feature (1)..(25): SEQ ID NO: 5380; WAN024DGU; Start 89; Stop 113
tttggatagttgtgctcttatgtgt

SEQ ID NO: 408815 - DNA, 25 bp, Artificial
  probe
  misc_feature (1)..(25): SEQ ID NO: 5380; WAN024DGU; Start 477; Stop 501
tcaaactaatctcttaacagggcaa

SEQ ID NO: 408816 - DNA, 25 bp, Artificial
  probe
  misc_feature (1)..(25): SEQ ID NO: 5380; WAN024DGU; Start 238; Stop 262
aagttaagccagacagatagtcacc

SEQ ID NO: 408817 - DNA, 25 bp, Artificial
  probe
  misc_feature (1)..(25): SEQ ID NO: 5380; WAN024DGU; Start 399; Stop 423
gactgagtctagtaaggcggatatt

SEQ ID NO: 408818 - DNA, 25 bp, Artificial
  probe
  misc_feature (1)..(25): SEQ ID NO: 5380; WAN024DGU; Start 85; Stop 109
ctggtttggatagttgtgctcttat

SEQ ID NO: 408819 - DNA, 25 bp, Artificial
  probe
  misc_feature (1)..(25): SEQ ID NO: 5380; WAN024DGU; Start 515; Stop 539
cggtgcggttgaatcattattattt

SEQ ID NO: 408820 - DNA, 25 bp, Artificial
  probe
  misc_feature (1)..(25): SEQ ID NO: 5380; WAN024DGU; Start 418; Stop 442
gatattacggctacggagatgaacg

SEQ ID NO: 408821 - DNA, 25 bp, Artificial
  probe
  misc_feature (1)..(25): SEQ ID NO: 5380; WAN024DGU; Start 516; Stop 540
ggtgcggttgaatcattattatttg

SEQ ID NO: 408822 - DNA, 25 bp, Artificial
  probe
  misc_feature (1)..(25): SEQ ID NO: 5380; WAN024DGU; Start 481; Stop 505
actaatctcttaacagggcaattct

SEQ ID NO: 408823 - DNA, 25 bp, Artificial
  probe
  misc_feature (1)..(25): SEQ ID NO: 5380; WAN024DGU; Start 478; Stop 502
caaactaatctcttaacagggcaat

SEQ ID NO: 408824 - DNA, 25 bp, Artificial
  probe
  misc_feature (1)..(25): SEQ ID NO: 5380; WAN024DGU; Start 476; Stop 500
gtcaaactaatctcttaacagggca

SEQ ID NO: 408825 - DNA, 25 bp, Artificial
  probe
  misc_feature (1)..(25): SEQ ID NO: 5380; WAN024DGU; Start 328; Stop 352
cgctttcaagaggcttatttagaag

SEQ ID NO: 408826 - DNA, 25 bp, Artificial
  probe
  misc_feature (1)..(25): SEQ ID NO: 5380; WAN024DGU; Start 87; Stop 111
ggtttggatagttgtgctcttatgt

SEQ ID NO: 408827 - DNA, 25 bp, Artificial
  probe
  misc_feature (1)..(25): SEQ ID NO: 5380; WAN024DGU; Start 86; Stop 110
tggtttggatagttgtgctcttatg

SEQ ID NO: 408828 - DNA, 25 bp, Artificial
  probe
  misc_feature (1)..(25): SEQ ID NO: 5380; WAN024DGU; Start 519; Stop 543
gcggttgaatcattattatttgtcc

SEQ ID NO: 408829 - DNA, 25 bp, Artificial
  probe
  misc_feature (1)..(25): SEQ ID NO: 5380; WAN024DGU; Start 327; Stop 351
acgctttcaagaggcttatttagaa

SEQ ID NO: 408830 - DNA, 25 bp, Artificial
  probe
  misc_feature (1)..(25): SEQ ID NO: 5381; WAN024CLU; Start 2; Stop 26
tgctagaaattgatttgattgtcct

SEQ ID NO: 408831 - DNA, 25 bp, Artificial
  probe
  misc_feature (1)..(25): SEQ ID NO: 5381; WAN024CLU; Start 3; Stop 27
gctagaaattgatttgattgtcctg

SEQ ID NO: 408832 - DNA, 25 bp, Artificial
  probe
  misc_feature (1)..(25): SEQ ID NO: 5381; WAN024CLU; Start 1; Stop 25
ttgctagaaattgatttgattgtcc

SEQ ID NO: 408833 - DNA, 25 bp, Artificial
  probe
  misc_feature (1)..(25): SEQ ID NO: 5381; WAN024CLU; Start 10; Stop 34
attgatttgattgtcctgattgttt

SEQ ID NO: 408834 - DNA, 25 bp, Artificial
  probe
  misc_feature (1)..(25): SEQ ID NO: 5381; WAN024CLU; Start 9; Stop 33
aattgatttgattgtcctgattgtt

SEQ ID NO: 408835 - DNA, 25 bp, Artificial
  probe
  misc_feature (1)..(25): SEQ ID NO: 5381; WAN024CLU; Start 8; Stop 32
aaattgatttgattgtcctgattgt

SEQ ID NO: 408836 - DNA, 25 bp, Artificial
  probe
  misc_feature (1)..(25): SEQ ID NO: 5381; WAN024CLU; Start 7; Stop 31
gaaattgatttgattgtcctgattg

SEQ ID NO: 408837 - DNA, 25 bp, Artificial
  probe
  misc_feature (1)..(25): SEQ ID NO: 5381; WAN024CLU; Start 6; Stop 30
agaaattgatttgattgtcctgatt

SEQ ID NO: 408838 - DNA, 25 bp, Artificial
  probe
  misc_feature (1)..(25): SEQ ID NO: 5381; WAN024CLU; Start 4; Stop 28
ctagaaattgatttgattgtcctga

SEQ ID NO: 408839 - DNA, 25 bp, Artificial
  probe
  misc_feature (1)..(25): SEQ ID NO: 5381; WAN024CLU; Start 5; Stop 29
tagaaattgatttgattgtcctgat

SEQ ID NO: 408840 - DNA, 25 bp, Artificial
  probe
  misc_feature (1)..(25): SEQ ID NO: 5381; WAN024CLU; Start 16; Stop 40
ttgattgtcctgattgttttatcct

SEQ ID NO: 408841 - DNA, 25 bp, Artificial
  probe
  misc_feature (1)..(25): SEQ ID NO: 5381; WAN024CLU; Start 11; Stop 35
ttgatttgattgtcctgattgtttt

SEQ ID NO: 408842 - DNA, 25 bp, Artificial
  probe
  misc_feature (1)..(25): SEQ ID NO: 5381; WAN024CLU; Start 15; Stop 39
tttgattgtcctgattgttttatcc

SEQ ID NO: 408843 - DNA, 25 bp, Artificial
  probe
  misc_feature (1)..(25): SEQ ID NO: 5381; WAN024CLU; Start 17; Stop 41
tgattgtcctgattgttttatccta

SEQ ID NO: 408844 - DNA, 25 bp, Artificial
  probe
  misc_feature (1)..(25): SEQ ID NO: 5381; WAN024CLU; Start 12; Stop 36
tgatttgattgtcctgattgtttta

SEQ ID NO: 408845 - DNA, 25 bp, Artificial
  probe
  misc_feature (1)..(25): SEQ ID NO: 5381; WAN024CLU; Start 21; Stop 45
tgtcctgattgttttatcctatttc

SEQ ID NO: 408846 - DNA, 25 bp, Artificial
  probe
  misc_feature (1)..(25): SEQ ID NO: 5381; WAN024CLU; Start 18; Stop 42
gattgtcctgattgttttatcctat

SEQ ID NO: 408847 - DNA, 25 bp, Artificial
  probe
  misc_feature (1)..(25): SEQ ID NO: 5381; WAN024CLU; Start 22; Stop 46
gtcctgattgttttatcctatttct

SEQ ID NO: 408848 - DNA, 25 bp, Artificial
  probe
  misc_feature (1)..(25): SEQ ID NO: 5381; WAN024CLU; Start 20; Stop 44
ttgtcctgattgttttatcctattt

SEQ ID NO: 408849 - DNA, 25 bp, Artificial
  probe
  misc_feature (1)..(25): SEQ ID NO: 5381; WAN024CLU; Start 13; Stop 37
gatttgattgtcctgattgttttat

SEQ ID NO: 408850 - DNA, 25 bp, Artificial
  probe
  misc_feature (1)..(25): SEQ ID NO: 5381; WAN024CLU; Start 19; Stop 43
attgtcctgattgttttatcctatt

SEQ ID NO: 408851 - DNA, 25 bp, Artificial
  probe
  misc_feature (1)..(25): SEQ ID NO: 5381; WAN024CLU; Start 14; Stop 38
atttgattgtcctgattgttttatc

SEQ ID NO: 408852 - DNA, 25 bp, Artificial
  probe
  misc_feature (1)..(25): SEQ ID NO: 5381; WAN024CLU; Start 23; Stop 47
tcctgattgttttatcctatttcta

SEQ ID NO: 408853 - DNA, 25 bp, Artificial
  probe
  misc_feature (1)..(25): SEQ ID NO: 5382; WAN024DOD; Start 62; Stop 86
aaatcagtcagctaaatccactttt

SEQ ID NO: 408854 - DNA, 25 bp, Artificial
  probe
  misc_feature (1)..(25): SEQ ID NO: 5382; WAN024DOD; Start 61; Stop 85
aaaatcagtcagctaaatccacttt

SEQ ID NO: 408855 - DNA, 25 bp, Artificial
  probe
  misc_feature (1)..(25): SEQ ID NO: 5382; WAN024DOD; Start 63; Stop 87
aatcagtcagctaaatccactttta

SEQ ID NO: 408856 - DNA, 25 bp, Artificial
  probe
  misc_feature (1)..(25): SEQ ID NO: 5383; WAN024FW2; Start 13; Stop 37
gtagtaatctatgaccttggctgta

SEQ ID NO: 408857 - DNA, 25 bp, Artificial
  probe
  misc_feature (1)..(25): SEQ ID NO: 5383; WAN024FW2; Start 14; Stop 38
tagtaatctatgaccttggctgtac

SEQ ID NO: 408858 - DNA, 25 bp, Artificial
  probe
  misc_feature (1)..(25): SEQ ID NO: 5383; WAN024FW2; Start 16; Stop 40
gtaatctatgaccttggctgtactg

SEQ ID NO: 408859 - DNA, 25 bp, Artificial
  probe
  misc_feature (1)..(25): SEQ ID NO: 5383; WAN024FW2; Start 17; Stop 41
taatctatgaccttggctgtactgc

SEQ ID NO: 408860 - DNA, 25 bp, Artificial
  probe
  misc_feature (1)..(25): SEQ ID NO: 5383; WAN024FW2; Start 9; Stop 33
tatggtagtaatctatgaccttggc

SEQ ID NO: 408861 - DNA, 25 bp, Artificial
  probe
  misc_feature (1)..(25): SEQ ID NO: 5383; WAN024FW2; Start 10; Stop 34
atggtagtaatctatgaccttggct

SEQ ID NO: 408862 - DNA, 25 bp, Artificial
  probe
  misc_feature (1)..(25): SEQ ID NO: 5383; WAN024FW2; Start 30; Stop 54
tggctgtactgcaatgaattattac

SEQ ID NO: 408863 - DNA, 25 bp, Artificial
  probe
  misc_feature (1)..(25): SEQ ID NO: 5383; WAN024FW2; Start 31; Stop 55
ggctgtactgcaatgaattattact

SEQ ID NO: 408864 - DNA, 25 bp, Artificial
  probe
  misc_feature (1)..(25): SEQ ID NO: 5383; WAN024FW2; Start 15; Stop 39
agtaatctatgaccttggctgtact

SEQ ID NO: 408865 - DNA, 25 bp, Artificial
  probe
  misc_feature (1)..(25): SEQ ID NO: 5383; WAN024FW2; Start 28; Stop 52
cttggctgtactgcaatgaattatt

SEQ ID NO: 408866 - DNA, 25 bp, Artificial
  probe
  misc_feature (1)..(25): SEQ ID NO: 5383; WAN024FW2; Start 69; Stop 93
gcaactaattctttatctacagcca

SEQ ID NO: 408867 - DNA, 25 bp, Artificial
  probe
  misc_feature (1)..(25): SEQ ID NO: 5383; WAN024FW2; Start 12; Stop 36
ggtagtaatctatgaccttggctgt

SEQ ID NO: 408868 - DNA, 25 bp, Artificial
  probe
  misc_feature (1)..(25): SEQ ID NO: 5383; WAN024FW2; Start 11; Stop 35
tggtagtaatctatgaccttggctg

SEQ ID NO: 408869 - DNA, 25 bp, Artificial
  probe
  misc_feature (1)..(25): SEQ ID NO: 5383; WAN024FW2; Start 68; Stop 92
agcaactaattctttatctacagcc

SEQ ID NO: 408870 - DNA, 25 bp, Artificial
  probe
  misc_feature (1)..(25): SEQ ID NO: 5383; WAN024FW2; Start 29; Stop 53
ttggctgtactgcaatgaattatta

SEQ ID NO: 408871 - DNA, 25 bp, Artificial
  probe
  misc_feature (1)..(25): SEQ ID NO: 5383; WAN024FW2; Start 165; Stop 189
gcgtgaccatatagtaatccaccaa

SEQ ID NO: 408872 - DNA, 25 bp, Artificial
  probe
  misc_feature (1)..(25): SEQ ID NO: 5383; WAN024FW2; Start 27; Stop 51
ccttggctgtactgcaatgaattat

SEQ ID NO: 408873 - DNA, 25 bp, Artificial
  probe
  misc_feature (1)..(25): SEQ ID NO: 5383; WAN024FW2; Start 163; Stop 187
ctgcgtgaccatatagtaatccacc

SEQ ID NO: 408874 - DNA, 25 bp, Artificial
  probe
  misc_feature (1)..(25): SEQ ID NO: 5383; WAN024FW2; Start 162; Stop 186
cctgcgtgaccatatagtaatccac

SEQ ID NO: 408875 - DNA, 25 bp, Artificial
  probe
  misc_feature (1)..(25): SEQ ID NO: 5383; WAN024FW2; Start 166; Stop 190
cgtgaccatatagtaatccaccaaa

SEQ ID NO: 408876 - DNA, 25 bp, Artificial
  probe
  misc_feature (1)..(25): SEQ ID NO: 5383; WAN024FW2; Start 8; Stop 32
atatggtagtaatctatgaccttgg

SEQ ID NO: 408877 - DNA, 25 bp, Artificial
  probe
  misc_feature (1)..(25): SEQ ID NO: 5383; WAN024FW2; Start 32; Stop 56
gctgtactgcaatgaattattacta

SEQ ID NO: 408878 - DNA, 25 bp, Artificial
  probe
  misc_feature (1)..(25): SEQ ID NO: 5383; WAN024FW2; Start 164; Stop 188
tgcgtgaccatatagtaatccacca

SEQ ID NO: 408879 - DNA, 25 bp, Artificial
  probe
  misc_feature (1)..(25): SEQ ID NO: 5383; WAN024FW2; Start 67; Stop 91
aagcaactaattctttatctacagc

SEQ ID NO: 408880 - DNA, 25 bp, Artificial
  probe
  misc_feature (1)..(25): SEQ ID NO: 5383; WAN024FW2; Start 26; Stop 50
accttggctgtactgcaatgaatta

SEQ ID NO: 408881 - DNA, 25 bp, Artificial
  probe
  misc_feature (1)..(25): SEQ ID NO: 5383; WAN024FW2; Start 70; Stop 94
caactaattctttatctacagccaa

SEQ ID NO: 408882 - DNA, 25 bp, Artificial
  probe
  misc_feature (1)..(25): SEQ ID NO: 5383; WAN024FW2; Start 82; Stop 106
tatctacagccaattctagaccatt

SEQ ID NO: 408883 - DNA, 25 bp, Artificial
  probe
  misc_feature (1)..(25): SEQ ID NO: 5383; WAN024FW2; Start 81; Stop 105
ttatctacagccaattctagaccat

SEQ ID NO: 408884 - DNA, 25 bp, Artificial
  probe
  misc_feature (1)..(25): SEQ ID NO: 5383; WAN024FW2; Start 18; Stop 42
aatctatgaccttggctgtactgca

SEQ ID NO: 408885 - DNA, 25 bp, Artificial
  probe
  misc_feature (1)..(25): SEQ ID NO: 5383; WAN024FW2; Start 161; Stop 185
ccctgcgtgaccatatagtaatcca

SEQ ID NO: 408886 - DNA, 25 bp, Artificial
  probe
  misc_feature (1)..(25): SEQ ID NO: 5383; WAN024FW2; Start 21; Stop 45
ctatgaccttggctgtactgcaatg

SEQ ID NO: 408887 - DNA, 25 bp, Artificial
  probe
  misc_feature (1)..(25): SEQ ID NO: 5383; WAN024FW2; Start 7; Stop 31
gatatggtagtaatctatgaccttg

SEQ ID NO: 408888 - DNA, 25 bp, Artificial
  probe
  misc_feature (1)..(25): SEQ ID NO: 5383; WAN024FW2; Start 76; Stop 100
attctttatctacagccaattctag

SEQ ID NO: 408889 - DNA, 25 bp, Artificial
  probe
  misc_feature (1)..(25): SEQ ID NO: 5384; WAN0249ZF; Start 54; Stop 78
ccctatttagcaactgatttctgga

SEQ ID NO: 408890 - DNA, 25 bp, Artificial
  probe
  misc_feature (1)..(25): SEQ ID NO: 5384; WAN0249ZF; Start 53; Stop 77
accctatttagcaactgatttctgg

SEQ ID NO: 408891 - DNA, 25 bp, Artificial
  probe
  misc_feature (1)..(25): SEQ ID NO: 5384; WAN0249ZF; Start 55; Stop 79
cctatttagcaactgatttctggaa

SEQ ID NO: 408892 - DNA, 25 bp, Artificial
  probe
  misc_feature (1)..(25): SEQ ID NO: 5384; WAN0249ZF; Start 99; Stop 123
attcatagtttcccagttcaacaga

SEQ ID NO: 408893 - DNA, 25 bp, Artificial
  probe
  misc_feature (1)..(25): SEQ ID NO: 5384; WAN0249ZF; Start 98; Stop 122
gattcatagtttcccagttcaacag

SEQ ID NO: 408894 - DNA, 25 bp, Artificial
  probe
  misc_feature (1)..(25): SEQ ID NO: 5384; WAN0249ZF; Start 52; Stop 76
taccctatttagcaactgatttctg

SEQ ID NO: 408895 - DNA, 25 bp, Artificial
  probe
  misc_feature (1)..(25): SEQ ID NO: 5384; WAN0249ZF; Start 100; Stop 124
ttcatagtttcccagttcaacagac

SEQ ID NO: 408896 - DNA, 25 bp, Artificial
  probe
  misc_feature (1)..(25): SEQ ID NO: 5384; WAN0249ZF; Start 103; Stop 127
atagtttcccagttcaacagacttg

SEQ ID NO: 408897 - DNA, 25 bp, Artificial
  probe
  misc_feature (1)..(25): SEQ ID NO: 5384; WAN0249ZF; Start 102; Stop 126
catagtttcccagttcaacagactt

SEQ ID NO: 408898 - DNA, 25 bp, Artificial
  probe
  misc_feature (1)..(25): SEQ ID NO: 5384; WAN0249ZF; Start 51; Stop 75
ttaccctatttagcaactgatttct

SEQ ID NO: 408899 - DNA, 25 bp, Artificial
  probe
  misc_feature (1)..(25): SEQ ID NO: 5384; WAN0249ZF; Start 107; Stop 131
tttcccagttcaacagacttgtaag

SEQ ID NO: 408900 - DNA, 25 bp, Artificial
  probe
  misc_feature (1)..(25): SEQ ID NO: 5384; WAN0249ZF; Start 101; Stop 125
tcatagtttcccagttcaacagact

SEQ ID NO: 408901 - DNA, 25 bp, Artificial
  probe
  misc_feature (1)..(25): SEQ ID NO: 5384; WAN0249ZF; Start 106; Stop 130
gtttcccagttcaacagacttgtaa

SEQ ID NO: 408902 - DNA, 25 bp, Artificial
  probe
  misc_feature (1)..(25): SEQ ID NO: 5384; WAN0249ZF; Start 95; Stop 119
taggattcatagtttcccagttcaa

SEQ ID NO: 408903 - DNA, 25 bp, Artificial
  probe
  misc_feature (1)..(25): SEQ ID NO: 5384; WAN0249ZF; Start 96; Stop 120
aggattcatagtttcccagttcaac

SEQ ID NO: 408904 - DNA, 25 bp, Artificial
  probe
  misc_feature (1)..(25): SEQ ID NO: 5384; WAN0249ZF; Start 94; Stop 118
ataggattcatagtttcccagttca

SEQ ID NO: 408905 - DNA, 25 bp, Artificial
  probe
  misc_feature (1)..(25): SEQ ID NO: 5384; WAN0249ZF; Start 97; Stop 121
ggattcatagtttcccagttcaaca

SEQ ID NO: 408906 - DNA, 25 bp, Artificial
  probe
  misc_feature (1)..(25): SEQ ID NO: 5384; WAN0249ZF; Start 50; Stop 74
tttaccctatttagcaactgatttc

SEQ ID NO: 408907 - DNA, 25 bp, Artificial
  probe
  misc_feature (1)..(25): SEQ ID NO: 5384; WAN0249ZF; Start 105; Stop 129
agtttcccagttcaacagacttgta

SEQ ID NO: 408908 - DNA, 25 bp, Artificial
  probe
  misc_feature (1)..(25): SEQ ID NO: 5384; WAN0249ZF; Start 104; Stop 128
tagtttcccagttcaacagacttgt

SEQ ID NO: 408909 - DNA, 25 bp, Artificial
  probe
  misc_feature (1)..(25): SEQ ID NO: 5384; WAN0249ZF; Start 56; Stop 80
ctatttagcaactgatttctggaaa

SEQ ID NO: 408910 - DNA, 25 bp, Artificial
  probe
  misc_feature (1)..(25): SEQ ID NO: 5384; WAN0249ZF; Start 112; Stop 136
cagttcaacagacttgtaagcgttt

SEQ ID NO: 408911 - DNA, 25 bp, Artificial
  probe
  misc_feature (1)..(25): SEQ ID NO: 5384; WAN0249ZF; Start 111; Stop 135
ccagttcaacagacttgtaagcgtt

SEQ ID NO: 408912 - DNA, 25 bp, Artificial
  probe
  misc_feature (1)..(25): SEQ ID NO: 5384; WAN0249ZF; Start 93; Stop 117
aataggattcatagtttcccagttc

SEQ ID NO: 408913 - DNA, 25 bp, Artificial
  probe
  misc_feature (1)..(25): SEQ ID NO: 5384; WAN0249ZF; Start 92; Stop 116
aaataggattcatagtttcccagtt

SEQ ID NO: 408914 - DNA, 25 bp, Artificial
  probe
  misc_feature (1)..(25): SEQ ID NO: 5384; WAN0249ZF; Start 193; Stop 217
gcttttcctggttcctagattctaa

SEQ ID NO: 408915 - DNA, 25 bp, Artificial
  probe
  misc_feature (1)..(25): SEQ ID NO: 5384; WAN0249ZF; Start 108; Stop 132
ttcccagttcaacagacttgtaagc

SEQ ID NO: 408916 - DNA, 25 bp, Artificial
  probe
  misc_feature (1)..(25): SEQ ID NO: 5384; WAN0249ZF; Start 194; Stop 218
cttttcctggttcctagattctaaa

SEQ ID NO: 408917 - DNA, 25 bp, Artificial
  probe
  misc_feature (1)..(25): SEQ ID NO: 5384; WAN0249ZF; Start 60; Stop 84
ttagcaactgatttctggaaatatt

SEQ ID NO: 408918 - DNA, 25 bp, Artificial
  probe
  misc_feature (1)..(25): SEQ ID NO: 5384; WAN0249ZF; Start 59; Stop 83
tttagcaactgatttctggaaatat

SEQ ID NO: 408919 - DNA, 25 bp, Artificial
  probe
  misc_feature (1)..(25): SEQ ID NO: 5384; WAN0249ZF; Start 58; Stop 82
atttagcaactgatttctggaaata

SEQ ID NO: 408920 - DNA, 25 bp, Artificial
  probe
  misc_feature (1)..(25): SEQ ID NO: 5384; WAN0249ZF; Start 57; Stop 81
tatttagcaactgatttctggaaat

SEQ ID NO: 408921 - DNA, 25 bp, Artificial
  probe
  misc_feature (1)..(25): SEQ ID NO: 5384; WAN0249ZF; Start 113; Stop 137
agttcaacagacttgtaagcgtttt

SEQ ID NO: 408922 - DNA, 25 bp, Artificial
  probe
  misc_feature (1)..(25): SEQ ID NO: 5385; WAN024CY7; Start 4; Stop 28
ctagctgtctcatatctgactcctt

SEQ ID NO: 408923 - DNA, 25 bp, Artificial
  probe
  misc_feature (1)..(25): SEQ ID NO: 5385; WAN024CY7; Start 10; Stop 34
gtctcatatctgactcctttccttt

SEQ ID NO: 408924 - DNA, 25 bp, Artificial
  probe
  misc_feature (1)..(25): SEQ ID NO: 5385; WAN024CY7; Start 9; Stop 33
tgtctcatatctgactcctttcctt

SEQ ID NO: 408925 - DNA, 25 bp, Artificial
  probe
  misc_feature (1)..(25): SEQ ID NO: 5385; WAN024CY7; Start 8; Stop 32
ctgtctcatatctgactcctttcct

SEQ ID NO: 408926 - DNA, 25 bp, Artificial
  probe
  misc_feature (1)..(25): SEQ ID NO: 5385; WAN024CY7; Start 5; Stop 29
tagctgtctcatatctgactccttt

SEQ ID NO: 408927 - DNA, 25 bp, Artificial
  probe
  misc_feature (1)..(25): SEQ ID NO: 5385; WAN024CY7; Start 83; Stop 107
taccagttaattatatcacaagcaa

SEQ ID NO: 408928 - DNA, 25 bp, Artificial
  probe
  misc_feature (1)..(25): SEQ ID NO: 5385; WAN024CY7; Start 82; Stop 106
ttaccagttaattatatcacaagca

SEQ ID NO: 408929 - DNA, 25 bp, Artificial
  probe
  misc_feature (1)..(25): SEQ ID NO: 5385; WAN024CY7; Start 7; Stop 31
gctgtctcatatctgactcctttcc

SEQ ID NO: 408930 - DNA, 25 bp, Artificial
  probe
  misc_feature (1)..(25): SEQ ID NO: 5385; WAN024CY7; Start 20; Stop 44
tgactcctttccttttagacttctc

SEQ ID NO: 408931 - DNA, 25 bp, Artificial
  probe
  misc_feature (1)..(25): SEQ ID NO: 5385; WAN024CY7; Start 19; Stop 43
ctgactcctttccttttagacttct

SEQ ID NO: 408932 - DNA, 25 bp, Artificial
  probe
  misc_feature (1)..(25): SEQ ID NO: 5385; WAN024CY7; Start 6; Stop 30
agctgtctcatatctgactcctttc

SEQ ID NO: 408933 - DNA, 25 bp, Artificial
  probe
  misc_feature (1)..(25): SEQ ID NO: 5385; WAN024CY7; Start 18; Stop 42
tctgactcctttccttttagacttc

SEQ ID NO: 408934 - DNA, 25 bp, Artificial
  probe
  misc_feature (1)..(25): SEQ ID NO: 5385; WAN024CY7; Start 21; Stop 45
gactcctttccttttagacttctct

SEQ ID NO: 408935 - DNA, 25 bp, Artificial
  probe
  misc_feature (1)..(25): SEQ ID NO: 5385; WAN024CY7; Start 17; Stop 41
atctgactcctttccttttagactt

SEQ ID NO: 408936 - DNA, 25 bp, Artificial
  probe
  misc_feature (1)..(25): SEQ ID NO: 5385; WAN024CY7; Start 22; Stop 46
actcctttccttttagacttctctt

SEQ ID NO: 408937 - DNA, 25 bp, Artificial
  probe
  misc_feature (1)..(25): SEQ ID NO: 5385; WAN024CY7; Start 84; Stop 108
accagttaattatatcacaagcaaa

SEQ ID NO: 408938 - DNA, 25 bp, Artificial
  probe
  misc_feature (1)..(25): SEQ ID NO: 5385; WAN024CY7; Start 11; Stop 35
tctcatatctgactcctttcctttt

SEQ ID NO: 408939 - DNA, 25 bp, Artificial
  probe
  misc_feature (1)..(25): SEQ ID NO: 5385; WAN024CY7; Start 16; Stop 40
tatctgactcctttccttttagact

SEQ ID NO: 408940 - DNA, 25 bp, Artificial
  probe
  misc_feature (1)..(25): SEQ ID NO: 5385; WAN024CY7; Start 23; Stop 47
ctcctttccttttagacttctcttt

SEQ ID NO: 408941 - DNA, 25 bp, Artificial
  probe
  misc_feature (1)..(25): SEQ ID NO: 5385; WAN024CY7; Start 24; Stop 48
tcctttccttttagacttctctttt

SEQ ID NO: 408942 - DNA, 25 bp, Artificial
  probe
  misc_feature (1)..(25): SEQ ID NO: 5385; WAN024CY7; Start 15; Stop 39
atatctgactcctttccttttagac

SEQ ID NO: 408943 - DNA, 25 bp, Artificial
  probe
  misc_feature (1)..(25): SEQ ID NO: 5385; WAN024CY7; Start 14; Stop 38
catatctgactcctttccttttaga

SEQ ID NO: 408944 - DNA, 25 bp, Artificial
  probe
  misc_feature (1)..(25): SEQ ID NO: 5385; WAN024CY7; Start 13; Stop 37
tcatatctgactcctttccttttag

SEQ ID NO: 408945 - DNA, 25 bp, Artificial
  probe
  misc_feature (1)..(25): SEQ ID NO: 5385; WAN024CY7; Start 12; Stop 36
ctcatatctgactcctttcctttta

SEQ ID NO: 408946 - DNA, 25 bp, Artificial
  probe
  misc_feature (1)..(25): SEQ ID NO: 5385; WAN024CY7; Start 66; Stop 90
ttctttgacattttgtttaccagtt

SEQ ID NO: 408947 - DNA, 25 bp, Artificial
  probe
  misc_feature (1)..(25): SEQ ID NO: 5385; WAN024CY7; Start 65; Stop 89
attctttgacattttgtttaccagt

SEQ ID NO: 408948 - DNA, 25 bp, Artificial
  probe
  misc_feature (1)..(25): SEQ ID NO: 5385; WAN024CY7; Start 67; Stop 91
tctttgacattttgtttaccagtta

SEQ ID NO: 408949 - DNA, 25 bp, Artificial
  probe
  misc_feature (1)..(25): SEQ ID NO: 5385; WAN024CY7; Start 81; Stop 105
tttaccagttaattatatcacaagc

SEQ ID NO: 408950 - DNA, 25 bp, Artificial
  probe
  misc_feature (1)..(25): SEQ ID NO: 5385; WAN024CY7; Start 68; Stop 92
ctttgacattttgtttaccagttaa

SEQ ID NO: 408951 - DNA, 25 bp, Artificial
  probe
  misc_feature (1)..(25): SEQ ID NO: 5385; WAN024CY7; Start 64; Stop 88
tattctttgacattttgtttaccag

SEQ ID NO: 408952 - DNA, 25 bp, Artificial
  probe
  misc_feature (1)..(25): SEQ ID NO: 5385; WAN024CY7; Start 63; Stop 87
ctattctttgacattttgtttacca

SEQ ID NO: 408953 - DNA, 25 bp, Artificial
  probe
  misc_feature (1)..(25): SEQ ID NO: 5385; WAN024CY7; Start 62; Stop 86
actattctttgacattttgtttacc

SEQ ID NO: 408954 - DNA, 25 bp, Artificial
  probe
  misc_feature (1)..(25): SEQ ID NO: 5385; WAN024CY7; Start 85; Stop 109
ccagttaattatatcacaagcaaaa

SEQ ID NO: 408955 - DNA, 25 bp, Artificial
  probe
  misc_feature (1)..(25): SEQ ID NO: 5386; WAN024COC; Start 1710; Stop 1734
cacttgtctaatctatactgcctca

SEQ ID NO: 408956 - DNA, 25 bp, Artificial
  probe
  misc_feature (1)..(25): SEQ ID NO: 5386; WAN024COC; Start 1709; Stop 1733
tcacttgtctaatctatactgcctc

SEQ ID NO: 408957 - DNA, 25 bp, Artificial
  probe
  misc_feature (1)..(25): SEQ ID NO: 5386; WAN024COC; Start 108; Stop 132
gattgttgtcgttaatgatggttct

SEQ ID NO: 408958 - DNA, 25 bp, Artificial
  probe
  misc_feature (1)..(25): SEQ ID NO: 5386; WAN024COC; Start 107; Stop 131
agattgttgtcgttaatgatggttc

SEQ ID NO: 408959 - DNA, 25 bp, Artificial
  probe
  misc_feature (1)..(25): SEQ ID NO: 5386; WAN024COC; Start 106; Stop 130
gagattgttgtcgttaatgatggtt

SEQ ID NO: 408960 - DNA, 25 bp, Artificial
  probe
  misc_feature (1)..(25): SEQ ID NO: 5386; WAN024COC; Start 104; Stop 128
ttgagattgttgtcgttaatgatgg

SEQ ID NO: 408961 - DNA, 25 bp, Artificial
  probe
  misc_feature (1)..(25): SEQ ID NO: 5386; WAN024COC; Start 110; Stop 134
ttgttgtcgttaatgatggttctac

SEQ ID NO: 408962 - DNA, 25 bp, Artificial
  probe
  misc_feature (1)..(25): SEQ ID NO: 5386; WAN024COC; Start 105; Stop 129
tgagattgttgtcgttaatgatggt

SEQ ID NO: 408963 - DNA, 25 bp, Artificial
  probe
  misc_feature (1)..(25): SEQ ID NO: 5386; WAN024COC; Start 1708; Stop 1732
ttcacttgtctaatctatactgcct

SEQ ID NO: 408964 - DNA, 25 bp, Artificial
  probe
  misc_feature (1)..(25): SEQ ID NO: 5386; WAN024COC; Start 119; Stop 143
ttaatgatggttctacggatgcttc

SEQ ID NO: 408965 - DNA, 25 bp, Artificial
  probe
  misc_feature (1)..(25): SEQ ID NO: 5386; WAN024COC; Start 118; Stop 142
gttaatgatggttctacggatgctt

SEQ ID NO: 408966 - DNA, 25 bp, Artificial
  probe
  misc_feature (1)..(25): SEQ ID NO: 5386; WAN024COC; Start 109; Stop 133
attgttgtcgttaatgatggttcta

SEQ ID NO: 408967 - DNA, 25 bp, Artificial
  probe
  misc_feature (1)..(25): SEQ ID NO: 5386; WAN024COC; Start 103; Stop 127
attgagattgttgtcgttaatgatg

SEQ ID NO: 408968 - DNA, 25 bp, Artificial
  probe
  misc_feature (1)..(25): SEQ ID NO: 5386; WAN024COC; Start 1759; Stop 1783
ttggttcaatccttgcctgatattc

SEQ ID NO: 408969 - DNA, 25 bp, Artificial
  probe
  misc_feature (1)..(25): SEQ ID NO: 5386; WAN024COC; Start 1723; Stop 1747
tatactgcctcagaccatattgaac

SEQ ID NO: 408970 - DNA, 25 bp, Artificial
  probe
  misc_feature (1)..(25): SEQ ID NO: 5386; WAN024COC; Start 1716; Stop 1740
tctaatctatactgcctcagaccat

SEQ ID NO: 408971 - DNA, 25 bp, Artificial
  probe
  misc_feature (1)..(25): SEQ ID NO: 5386; WAN024COC; Start 1722; Stop 1746
ctatactgcctcagaccatattgaa

SEQ ID NO: 408972 - DNA, 25 bp, Artificial
  probe
  misc_feature (1)..(25): SEQ ID NO: 5386; WAN024COC; Start 1721; Stop 1745
tctatactgcctcagaccatattga

SEQ ID NO: 408973 - DNA, 25 bp, Artificial
  probe
  misc_feature (1)..(25): SEQ ID NO: 5386; WAN024COC; Start 1190; Stop 1214
acttggactgtgatctagttgtaac

SEQ ID NO: 408974 - DNA, 25 bp, Artificial
  probe
  misc_feature (1)..(25): SEQ ID NO: 5386; WAN024COC; Start 1186; Stop 1210
ctctacttggactgtgatctagttg

SEQ ID NO: 408975 - DNA, 25 bp, Artificial
  probe
  misc_feature (1)..(25): SEQ ID NO: 5386; WAN024COC; Start 1720; Stop 1744
atctatactgcctcagaccatattg

SEQ ID NO: 408976 - DNA, 25 bp, Artificial
  probe
  misc_feature (1)..(25): SEQ ID NO: 5386; WAN024COC; Start 1711; Stop 1735
acttgtctaatctatactgcctcag

SEQ ID NO: 408977 - DNA, 25 bp, Artificial
  probe
  misc_feature (1)..(25): SEQ ID NO: 5386; WAN024COC; Start 1187; Stop 1211
tctacttggactgtgatctagttgt

SEQ ID NO: 408978 - DNA, 25 bp, Artificial
  probe
  misc_feature (1)..(25): SEQ ID NO: 5386; WAN024COC; Start 1188; Stop 1212
ctacttggactgtgatctagttgta

SEQ ID NO: 408979 - DNA, 25 bp, Artificial
  probe
  misc_feature (1)..(25): SEQ ID NO: 5386; WAN024COC; Start 1712; Stop 1736
cttgtctaatctatactgcctcaga

SEQ ID NO: 408980 - DNA, 25 bp, Artificial
  probe
  misc_feature (1)..(25): SEQ ID NO: 5386; WAN024COC; Start 1185; Stop 1209
cctctacttggactgtgatctagtt

SEQ ID NO: 408981 - DNA, 25 bp, Artificial
  probe
  misc_feature (1)..(25): SEQ ID NO: 5386; WAN024COC; Start 1390; Stop 1414
aatgaatggcatgataaggtggatc

SEQ ID NO: 408982 - DNA, 25 bp, Artificial
  probe
  misc_feature (1)..(25): SEQ ID NO: 5386; WAN024COC; Start 1189; Stop 1213
tacttggactgtgatctagttgtaa

SEQ ID NO: 408983 - DNA, 25 bp, Artificial
  probe
  misc_feature (1)..(25): SEQ ID NO: 5386; WAN024COC; Start 120; Stop 144
taatgatggttctacggatgcttca

SEQ ID NO: 408984 - DNA, 25 bp, Artificial
  probe
  misc_feature (1)..(25): SEQ ID NO: 5386; WAN024COC; Start 563; Stop 587
taggagaagatggttacctcaatca

SEQ ID NO: 408985 - DNA, 25 bp, Artificial
  probe
  misc_feature (1)..(25): SEQ ID NO: 5386; WAN024COC; Start 57; Stop 81
tctgaggaagtgcctagatagtatt

SEQ ID NO: 408986 - DNA, 25 bp, Artificial
  probe
  misc_feature (1)..(25): SEQ ID NO: 5386; WAN024COC; Start 1719; Stop 1743
aatctatactgcctcagaccatatt

SEQ ID NO: 408987 - DNA, 25 bp, Artificial
  probe
  misc_feature (1)..(25): SEQ ID NO: 5386; WAN024COC; Start 562; Stop 586
ttaggagaagatggttacctcaatc

SEQ ID NO: 408988 - DNA, 25 bp, Artificial
  probe
  misc_feature (1)..(25): SEQ ID NO: 5387; WAN024DXO; Start 284; Stop 308
agcaattagatagccttataggtga

SEQ ID NO: 408989 - DNA, 25 bp, Artificial
  probe
  misc_feature (1)..(25): SEQ ID NO: 5387; WAN024DXO; Start 283; Stop 307
gagcaattagatagccttataggtg

SEQ ID NO: 408990 - DNA, 25 bp, Artificial
  probe
  misc_feature (1)..(25): SEQ ID NO: 5387; WAN024DXO; Start 282; Stop 306
agagcaattagatagccttataggt

SEQ ID NO: 408991 - DNA, 25 bp, Artificial
  probe
  misc_feature (1)..(25): SEQ ID NO: 5387; WAN024DXO; Start 278; Stop 302
aagaagagcaattagatagccttat

SEQ ID NO: 408992 - DNA, 25 bp, Artificial
  probe
  misc_feature (1)..(25): SEQ ID NO: 5387; WAN024DXO; Start 285; Stop 309
gcaattagatagccttataggtgaa

SEQ ID NO: 408993 - DNA, 25 bp, Artificial
  probe
  misc_feature (1)..(25): SEQ ID NO: 5387; WAN024DXO; Start 281; Stop 305
aagagcaattagatagccttatagg

SEQ ID NO: 408994 - DNA, 25 bp, Artificial
  probe
  misc_feature (1)..(25): SEQ ID NO: 5387; WAN024DXO; Start 171; Stop 195
taaggcttacaagttgaaagacgag

SEQ ID NO: 408995 - DNA, 25 bp, Artificial
  probe
  misc_feature (1)..(25): SEQ ID NO: 5387; WAN024DXO; Start 170; Stop 194
ctaaggcttacaagttgaaagacga

SEQ ID NO: 408996 - DNA, 25 bp, Artificial
  probe
  misc_feature (1)..(25): SEQ ID NO: 5387; WAN024DXO; Start 279; Stop 303
agaagagcaattagatagccttata

SEQ ID NO: 408997 - DNA, 25 bp, Artificial
  probe
  misc_feature (1)..(25): SEQ ID NO: 5387; WAN024DXO; Start 165; Stop 189
tttggctaaggcttacaagttgaaa

SEQ ID NO: 408998 - DNA, 25 bp, Artificial
  probe
  misc_feature (1)..(25): SEQ ID NO: 5387; WAN024DXO; Start 280; Stop 304
gaagagcaattagatagccttatag

SEQ ID NO: 408999 - DNA, 25 bp, Artificial
  probe
  misc_feature (1)..(25): SEQ ID NO: 5387; WAN024DXO; Start 166; Stop 190
ttggctaaggcttacaagttgaaag

SEQ ID NO: 409000 - DNA, 25 bp, Artificial
  probe
  misc_feature (1)..(25): SEQ ID NO: 5387; WAN024DXO; Start 164; Stop 188
ctttggctaaggcttacaagttgaa

SEQ ID NO: 409001 - DNA, 25 bp, Artificial
  probe
  misc_feature (1)..(25): SEQ ID NO: 5387; WAN024DXO; Start 177; Stop 201
ttacaagttgaaagacgagctagat

SEQ ID NO: 409002 - DNA, 25 bp, Artificial
  probe
  misc_feature (1)..(25): SEQ ID NO: 5387; WAN024DXO; Start 168; Stop 192
ggctaaggcttacaagttgaaagac

SEQ ID NO: 409003 - DNA, 25 bp, Artificial
  probe
  misc_feature (1)..(25): SEQ ID NO: 5387; WAN024DXO; Start 277; Stop 301
aaagaagagcaattagatagcctta

SEQ ID NO: 409004 - DNA, 25 bp, Artificial
  probe
  misc_feature (1)..(25): SEQ ID NO: 5387; WAN024DXO; Start 178; Stop 202
tacaagttgaaagacgagctagatg

SEQ ID NO: 409005 - DNA, 25 bp, Artificial
  probe
  misc_feature (1)..(25): SEQ ID NO: 5387; WAN024DXO; Start 176; Stop 200
cttacaagttgaaagacgagctaga

SEQ ID NO: 409006 - DNA, 25 bp, Artificial
  probe
  misc_feature (1)..(25): SEQ ID NO: 5387; WAN024DXO; Start 167; Stop 191
tggctaaggcttacaagttgaaaga

SEQ ID NO: 409007 - DNA, 25 bp, Artificial
  probe
  misc_feature (1)..(25): SEQ ID NO: 5387; WAN024DXO; Start 169; Stop 193
gctaaggcttacaagttgaaagacg

SEQ ID NO: 409008 - DNA, 25 bp, Artificial
  probe
  misc_feature (1)..(25): SEQ ID NO: 5387; WAN024DXO; Start 291; Stop 315
agatagccttataggtgaataacta

SEQ ID NO: 409009 - DNA, 25 bp, Artificial
  probe
  misc_feature (1)..(25): SEQ ID NO: 5387; WAN024DXO; Start 290; Stop 314
tagatagccttataggtgaataact

SEQ ID NO: 409010 - DNA, 25 bp, Artificial
  probe
  misc_feature (1)..(25): SEQ ID NO: 5387; WAN024DXO; Start 286; Stop 310
caattagatagccttataggtgaat

SEQ ID NO: 409011 - DNA, 25 bp, Artificial
  probe
  misc_feature (1)..(25): SEQ ID NO: 5387; WAN024DXO; Start 276; Stop 300
aaaagaagagcaattagatagcctt

SEQ ID NO: 409012 - DNA, 25 bp, Artificial
  probe
  misc_feature (1)..(25): SEQ ID NO: 5387; WAN024DXO; Start 119; Stop 143
tgaaaatcttagcaagtaaggaagc

SEQ ID NO: 409013 - DNA, 25 bp, Artificial
  probe
  misc_feature (1)..(25): SEQ ID NO: 5387; WAN024DXO; Start 163; Stop 187
gctttggctaaggcttacaagttga

SEQ ID NO: 409014 - DNA, 25 bp, Artificial
  probe
  misc_feature (1)..(25): SEQ ID NO: 5387; WAN024DXO; Start 179; Stop 203
acaagttgaaagacgagctagatgc

SEQ ID NO: 409015 - DNA, 25 bp, Artificial
  probe
  misc_feature (1)..(25): SEQ ID NO: 5387; WAN024DXO; Start 115; Stop 139
ggtttgaaaatcttagcaagtaagg

SEQ ID NO: 409016 - DNA, 25 bp, Artificial
  probe
  misc_feature (1)..(25): SEQ ID NO: 5387; WAN024DXO; Start 292; Stop 316
gatagccttataggtgaataactaa

SEQ ID NO: 409017 - DNA, 25 bp, Artificial
  probe
  misc_feature (1)..(25): SEQ ID NO: 5387; WAN024DXO; Start 289; Stop 313
ttagatagccttataggtgaataac

SEQ ID NO: 409018 - DNA, 25 bp, Artificial
  probe
  misc_feature (1)..(25): SEQ ID NO: 5387; WAN024DXO; Start 175; Stop 199
gcttacaagttgaaagacgagctag

SEQ ID NO: 409019 - DNA, 25 bp, Artificial
  probe
  misc_feature (1)..(25): SEQ ID NO: 5387; WAN024DXO; Start 108; Stop 132
tacccttggtttgaaaatcttagca

SEQ ID NO: 409020 - DNA, 25 bp, Artificial
  probe
  misc_feature (1)..(25): SEQ ID NO: 5387; WAN024DXO; Start 113; Stop 137
ttggtttgaaaatcttagcaagtaa

SEQ ID NO: 409021 - DNA, 25 bp, Artificial
  probe
  misc_feature (1)..(25): SEQ ID NO: 5388; WAN024G4U; Start 20; Stop 44
actcaatggctactattcaatggtt

SEQ ID NO: 409022 - DNA, 25 bp, Artificial
  probe
  misc_feature (1)..(25): SEQ ID NO: 5388; WAN024G4U; Start 19; Stop 43
aactcaatggctactattcaatggt

SEQ ID NO: 409023 - DNA, 25 bp, Artificial
  probe
  misc_feature (1)..(25): SEQ ID NO: 5388; WAN024G4U; Start 837; Stop 861
taccttagatacattggaagacctc

SEQ ID NO: 409024 - DNA, 25 bp, Artificial
  probe
  misc_feature (1)..(25): SEQ ID NO: 5388; WAN024G4U; Start 838; Stop 862
accttagatacattggaagacctcg

SEQ ID NO: 409025 - DNA, 25 bp, Artificial
  probe
  misc_feature (1)..(25): SEQ ID NO: 5388; WAN024G4U; Start 836; Stop 860
ataccttagatacattggaagacct

SEQ ID NO: 409026 - DNA, 25 bp, Artificial
  probe
  misc_feature (1)..(25): SEQ ID NO: 5388; WAN024G4U; Start 841; Stop 865
ttagatacattggaagacctcgatg

SEQ ID NO: 409027 - DNA, 25 bp, Artificial
  probe
  misc_feature (1)..(25): SEQ ID NO: 5388; WAN024G4U; Start 840; Stop 864
cttagatacattggaagacctcgat

SEQ ID NO: 409028 - DNA, 25 bp, Artificial
  probe
  misc_feature (1)..(25): SEQ ID NO: 5388; WAN024G4U; Start 148; Stop 172
aatcctatgttgaccaagattgttg

SEQ ID NO: 409029 - DNA, 25 bp, Artificial
  probe
  misc_feature (1)..(25): SEQ ID NO: 5388; WAN024G4U; Start 29; Stop 53
ctactattcaatggtttcctggtca

SEQ ID NO: 409030 - DNA, 25 bp, Artificial
  probe
  misc_feature (1)..(25): SEQ ID NO: 5388; WAN024G4U; Start 24; Stop 48
aatggctactattcaatggtttcct

SEQ ID NO: 409031 - DNA, 25 bp, Artificial
  probe
  misc_feature (1)..(25): SEQ ID NO: 5388; WAN024G4U; Start 23; Stop 47
caatggctactattcaatggtttcc

SEQ ID NO: 409032 - DNA, 25 bp, Artificial
  probe
  misc_feature (1)..(25): SEQ ID NO: 5388; WAN024G4U; Start 30; Stop 54
tactattcaatggtttcctggtcac

SEQ ID NO: 409033 - DNA, 25 bp, Artificial
  probe
  misc_feature (1)..(25): SEQ ID NO: 5388; WAN024G4U; Start 22; Stop 46
tcaatggctactattcaatggtttc

SEQ ID NO: 409034 - DNA, 25 bp, Artificial
  probe
  misc_feature (1)..(25): SEQ ID NO: 5388; WAN024G4U; Start 21; Stop 45
ctcaatggctactattcaatggttt

SEQ ID NO: 409035 - DNA, 25 bp, Artificial
  probe
  misc_feature (1)..(25): SEQ ID NO: 5388; WAN024G4U; Start 18; Stop 42
aaactcaatggctactattcaatgg

SEQ ID NO: 409036 - DNA, 25 bp, Artificial
  probe
  misc_feature (1)..(25): SEQ ID NO: 5388; WAN024G4U; Start 25; Stop 49
atggctactattcaatggtttcctg

SEQ ID NO: 409037 - DNA, 25 bp, Artificial
  probe
  misc_feature (1)..(25): SEQ ID NO: 5388; WAN024G4U; Start 842; Stop 866
tagatacattggaagacctcgatgg

SEQ ID NO: 409038 - DNA, 25 bp, Artificial
  probe
  misc_feature (1)..(25): SEQ ID NO: 5388; WAN024G4U; Start 839; Stop 863
ccttagatacattggaagacctcga

SEQ ID NO: 409039 - DNA, 25 bp, Artificial
  probe
  misc_feature (1)..(25): SEQ ID NO: 5388; WAN024G4U; Start 835; Stop 859
tataccttagatacattggaagacc

SEQ ID NO: 409040 - DNA, 25 bp, Artificial
  probe
  misc_feature (1)..(25): SEQ ID NO: 5388; WAN024G4U; Start 32; Stop 56
ctattcaatggtttcctggtcacat

SEQ ID NO: 409041 - DNA, 25 bp, Artificial
  probe
  misc_feature (1)..(25): SEQ ID NO: 5388; WAN024G4U; Start 28; Stop 52
gctactattcaatggtttcctggtc

SEQ ID NO: 409042 - DNA, 25 bp, Artificial
  probe
  misc_feature (1)..(25): SEQ ID NO: 5388; WAN024G4U; Start 620; Stop 644
agttgcttcctatggatgaggttac

SEQ ID NO: 409043 - DNA, 25 bp, Artificial
  probe
  misc_feature (1)..(25): SEQ ID NO: 5388; WAN024G4U; Start 619; Stop 643
cagttgcttcctatggatgaggtta

SEQ ID NO: 409044 - DNA, 25 bp, Artificial
  probe
  misc_feature (1)..(25): SEQ ID NO: 5388; WAN024G4U; Start 815; Stop 839
gtgatggcaaactcggtaactatac

SEQ ID NO: 409045 - DNA, 25 bp, Artificial
  probe
  misc_feature (1)..(25): SEQ ID NO: 5388; WAN024G4U; Start 31; Stop 55
actattcaatggtttcctggtcaca

SEQ ID NO: 409046 - DNA, 25 bp, Artificial
  probe
  misc_feature (1)..(25): SEQ ID NO: 5388; WAN024G4U; Start 587; Stop 611
ttaagttggcattgactggagctat

SEQ ID NO: 409047 - DNA, 25 bp, Artificial
  probe
  misc_feature (1)..(25): SEQ ID NO: 5388; WAN024G4U; Start 343; Stop 367
gataagattgctcgccagaaagaac

SEQ ID NO: 409048 - DNA, 25 bp, Artificial
  probe
  misc_feature (1)..(25): SEQ ID NO: 5388; WAN024G4U; Start 33; Stop 57
tattcaatggtttcctggtcacatg

SEQ ID NO: 409049 - DNA, 25 bp, Artificial
  probe
  misc_feature (1)..(25): SEQ ID NO: 5388; WAN024G4U; Start 342; Stop 366
tgataagattgctcgccagaaagaa

SEQ ID NO: 409050 - DNA, 25 bp, Artificial
  probe
  misc_feature (1)..(25): SEQ ID NO: 5388; WAN024G4U; Start 27; Stop 51
ggctactattcaatggtttcctggt

SEQ ID NO: 409051 - DNA, 25 bp, Artificial
  probe
  misc_feature (1)..(25): SEQ ID NO: 5388; WAN024G4U; Start 26; Stop 50
tggctactattcaatggtttcctgg

SEQ ID NO: 409052 - DNA, 25 bp, Artificial
  probe
  misc_feature (1)..(25): SEQ ID NO: 5388; WAN024G4U; Start 588; Stop 612
taagttggcattgactggagctatc

SEQ ID NO: 409053 - DNA, 25 bp, Artificial
  probe
  misc_feature (1)..(25): SEQ ID NO: 5388; WAN024G4U; Start 621; Stop 645
gttgcttcctatggatgaggttacc

SEQ ID NO: 409054 - DNA, 25 bp, Artificial
  probe
  misc_feature (1)..(25): SEQ ID NO: 5389; WAN024FYN; Start 92; Stop 116
ttatcgtcatcaccaatcttaccaa

SEQ ID NO: 409055 - DNA, 25 bp, Artificial
  probe
  misc_feature (1)..(25): SEQ ID NO: 5389; WAN024FYN; Start 89; Stop 113
tccttatcgtcatcaccaatcttac

SEQ ID NO: 409056 - DNA, 25 bp, Artificial
  probe
  misc_feature (1)..(25): SEQ ID NO: 5389; WAN024FYN; Start 91; Stop 115
cttatcgtcatcaccaatcttacca

SEQ ID NO: 409057 - DNA, 25 bp, Artificial
  probe
  misc_feature (1)..(25): SEQ ID NO: 5389; WAN024FYN; Start 88; Stop 112
atccttatcgtcatcaccaatctta

SEQ ID NO: 409058 - DNA, 25 bp, Artificial
  probe
  misc_feature (1)..(25): SEQ ID NO: 5389; WAN024FYN; Start 87; Stop 111
tatccttatcgtcatcaccaatctt

SEQ ID NO: 409059 - DNA, 25 bp, Artificial
  probe
  misc_feature (1)..(25): SEQ ID NO: 5389; WAN024FYN; Start 93; Stop 117
tatcgtcatcaccaatcttaccaac

SEQ ID NO: 409060 - DNA, 25 bp, Artificial
  probe
  misc_feature (1)..(25): SEQ ID NO: 5389; WAN024FYN; Start 86; Stop 110
atatccttatcgtcatcaccaatct

SEQ ID NO: 409061 - DNA, 25 bp, Artificial
  probe
  misc_feature (1)..(25): SEQ ID NO: 5389; WAN024FYN; Start 90; Stop 114
ccttatcgtcatcaccaatcttacc

SEQ ID NO: 409062 - DNA, 25 bp, Artificial
  probe
  misc_feature (1)..(25): SEQ ID NO: 5389; WAN024FYN; Start 30; Stop 54
ttgttcctactgtgttaatgatagc

SEQ ID NO: 409063 - DNA, 25 bp, Artificial
  probe
  misc_feature (1)..(25): SEQ ID NO: 5389; WAN024FYN; Start 94; Stop 118
atcgtcatcaccaatcttaccaaca

SEQ ID NO: 409064 - DNA, 25 bp, Artificial
  probe
  misc_feature (1)..(25): SEQ ID NO: 5389; WAN024FYN; Start 31; Stop 55
tgttcctactgtgttaatgatagct

SEQ ID NO: 409065 - DNA, 25 bp, Artificial
  probe
  misc_feature (1)..(25): SEQ ID NO: 5389; WAN024FYN; Start 34; Stop 58
tcctactgtgttaatgatagcttga

SEQ ID NO: 409066 - DNA, 25 bp, Artificial
  probe
  misc_feature (1)..(25): SEQ ID NO: 5389; WAN024FYN; Start 35; Stop 59
cctactgtgttaatgatagcttgaa

SEQ ID NO: 409067 - DNA, 25 bp, Artificial
  probe
  misc_feature (1)..(25): SEQ ID NO: 5389; WAN024FYN; Start 33; Stop 57
ttcctactgtgttaatgatagcttg

SEQ ID NO: 409068 - DNA, 25 bp, Artificial
  probe
  misc_feature (1)..(25): SEQ ID NO: 5389; WAN024FYN; Start 32; Stop 56
gttcctactgtgttaatgatagctt

SEQ ID NO: 409069 - DNA, 25 bp, Artificial
  probe
  misc_feature (1)..(25): SEQ ID NO: 5389; WAN024FYN; Start 95; Stop 119
tcgtcatcaccaatcttaccaacag

SEQ ID NO: 409070 - DNA, 25 bp, Artificial
  probe
  misc_feature (1)..(25): SEQ ID NO: 5389; WAN024FYN; Start 168; Stop 192
tcgcaaggattccataaccaatgtt

SEQ ID NO: 409071 - DNA, 25 bp, Artificial
  probe
  misc_feature (1)..(25): SEQ ID NO: 5389; WAN024FYN; Start 98; Stop 122
tcatcaccaatcttaccaacaggtt

SEQ ID NO: 409072 - DNA, 25 bp, Artificial
  probe
  misc_feature (1)..(25): SEQ ID NO: 5389; WAN024FYN; Start 165; Stop 189
ctgtcgcaaggattccataaccaat

SEQ ID NO: 409073 - DNA, 25 bp, Artificial
  probe
  misc_feature (1)..(25): SEQ ID NO: 5389; WAN024FYN; Start 85; Stop 109
gatatccttatcgtcatcaccaatc

SEQ ID NO: 409074 - DNA, 25 bp, Artificial
  probe
  misc_feature (1)..(25): SEQ ID NO: 5389; WAN024FYN; Start 96; Stop 120
cgtcatcaccaatcttaccaacagg

SEQ ID NO: 409075 - DNA, 25 bp, Artificial
  probe
  misc_feature (1)..(25): SEQ ID NO: 5389; WAN024FYN; Start 235; Stop 259
atcagcgatggtaaagacgacatta

SEQ ID NO: 409076 - DNA, 25 bp, Artificial
  probe
  misc_feature (1)..(25): SEQ ID NO: 5389; WAN024FYN; Start 99; Stop 123
catcaccaatcttaccaacaggttg

SEQ ID NO: 409077 - DNA, 25 bp, Artificial
  probe
  misc_feature (1)..(25): SEQ ID NO: 5389; WAN024FYN; Start 97; Stop 121
gtcatcaccaatcttaccaacaggt

SEQ ID NO: 409078 - DNA, 25 bp, Artificial
  probe
  misc_feature (1)..(25): SEQ ID NO: 5389; WAN024FYN; Start 167; Stop 191
gtcgcaaggattccataaccaatgt

SEQ ID NO: 409079 - DNA, 25 bp, Artificial
  probe
  misc_feature (1)..(25): SEQ ID NO: 5389; WAN024FYN; Start 166; Stop 190
tgtcgcaaggattccataaccaatg

SEQ ID NO: 409080 - DNA, 25 bp, Artificial
  probe
  misc_feature (1)..(25): SEQ ID NO: 5389; WAN024FYN; Start 162; Stop 186
cttctgtcgcaaggattccataacc

SEQ ID NO: 409081 - DNA, 25 bp, Artificial
  probe
  misc_feature (1)..(25): SEQ ID NO: 5389; WAN024FYN; Start 36; Stop 60
ctactgtgttaatgatagcttgaat

SEQ ID NO: 409082 - DNA, 25 bp, Artificial
  probe
  misc_feature (1)..(25): SEQ ID NO: 5389; WAN024FYN; Start 169; Stop 193
cgcaaggattccataaccaatgttt

SEQ ID NO: 409083 - DNA, 25 bp, Artificial
  probe
  misc_feature (1)..(25): SEQ ID NO: 5389; WAN024FYN; Start 38; Stop 62
actgtgttaatgatagcttgaattc

SEQ ID NO: 409084 - DNA, 25 bp, Artificial
  probe
  misc_feature (1)..(25): SEQ ID NO: 5389; WAN024FYN; Start 37; Stop 61
tactgtgttaatgatagcttgaatt

SEQ ID NO: 409085 - DNA, 25 bp, Artificial
  probe
  misc_feature (1)..(25): SEQ ID NO: 5389; WAN024FYN; Start 39; Stop 63
ctgtgttaatgatagcttgaattct

SEQ ID NO: 409086 - DNA, 25 bp, Artificial
  probe
  misc_feature (1)..(25): SEQ ID NO: 5389; WAN024FYN; Start 29; Stop 53
tttgttcctactgtgttaatgatag

SEQ ID NO: 409087 - DNA, 25 bp, Artificial
  probe
  misc_feature (1)..(25): SEQ ID NO: 5390; WAN024C3Y; Start 70; Stop 94
agcaatcatctcttcaccacgataa

SEQ ID NO: 409088 - DNA, 25 bp, Artificial
  probe
  misc_feature (1)..(25): SEQ ID NO: 5390; WAN024C3Y; Start 222; Stop 246
taaggactggcttatagatgtatga

SEQ ID NO: 409089 - DNA, 25 bp, Artificial
  probe
  misc_feature (1)..(25): SEQ ID NO: 5390; WAN024C3Y; Start 72; Stop 96
caatcatctcttcaccacgataaac

SEQ ID NO: 409090 - DNA, 25 bp, Artificial
  probe
  misc_feature (1)..(25): SEQ ID NO: 5390; WAN024C3Y; Start 69; Stop 93
gagcaatcatctcttcaccacgata

SEQ ID NO: 409091 - DNA, 25 bp, Artificial
  probe
  misc_feature (1)..(25): SEQ ID NO: 5390; WAN024C3Y; Start 109; Stop 133
aacatctatcctaagattgcggtag

SEQ ID NO: 409092 - DNA, 25 bp, Artificial
  probe
  misc_feature (1)..(25): SEQ ID NO: 5390; WAN024C3Y; Start 108; Stop 132
caacatctatcctaagattgcggta

SEQ ID NO: 409093 - DNA, 25 bp, Artificial
  probe
  misc_feature (1)..(25): SEQ ID NO: 5390; WAN024C3Y; Start 105; Stop 129
gttcaacatctatcctaagattgcg

SEQ ID NO: 409094 - DNA, 25 bp, Artificial
  probe
  misc_feature (1)..(25): SEQ ID NO: 5390; WAN024C3Y; Start 73; Stop 97
aatcatctcttcaccacgataaacc

SEQ ID NO: 409095 - DNA, 25 bp, Artificial
  probe
  misc_feature (1)..(25): SEQ ID NO: 5390; WAN024C3Y; Start 106; Stop 130
ttcaacatctatcctaagattgcgg

SEQ ID NO: 409096 - DNA, 25 bp, Artificial
  probe
  misc_feature (1)..(25): SEQ ID NO: 5390; WAN024C3Y; Start 11; Stop 35
gtcaatactttcttgcttcccataa

SEQ ID NO: 409097 - DNA, 25 bp, Artificial
  probe
  misc_feature (1)..(25): SEQ ID NO: 5390; WAN024C3Y; Start 10; Stop 34
agtcaatactttcttgcttcccata

SEQ ID NO: 409098 - DNA, 25 bp, Artificial
  probe
  misc_feature (1)..(25): SEQ ID NO: 5390; WAN024C3Y; Start 71; Stop 95
gcaatcatctcttcaccacgataaa

SEQ ID NO: 409099 - DNA, 25 bp, Artificial
  probe
  misc_feature (1)..(25): SEQ ID NO: 5390; WAN024C3Y; Start 12; Stop 36
tcaatactttcttgcttcccataag

SEQ ID NO: 409100 - DNA, 25 bp, Artificial
  probe
  misc_feature (1)..(25): SEQ ID NO: 5390; WAN024C3Y; Start 9; Stop 33
gagtcaatactttcttgcttcccat

SEQ ID NO: 409101 - DNA, 25 bp, Artificial
  probe
  misc_feature (1)..(25): SEQ ID NO: 5390; WAN024C3Y; Start 107; Stop 131
tcaacatctatcctaagattgcggt

SEQ ID NO: 409102 - DNA, 25 bp, Artificial
  probe
  misc_feature (1)..(25): SEQ ID NO: 5390; WAN024C3Y; Start 104; Stop 128
tgttcaacatctatcctaagattgc

SEQ ID NO: 409103 - DNA, 25 bp, Artificial
  probe
  misc_feature (1)..(25): SEQ ID NO: 5390; WAN024C3Y; Start 5; Stop 29
tcacgagtcaatactttcttgcttc

SEQ ID NO: 409104 - DNA, 25 bp, Artificial
  probe
  misc_feature (1)..(25): SEQ ID NO: 5390; WAN024C3Y; Start 4; Stop 28
ctcacgagtcaatactttcttgctt

SEQ ID NO: 409105 - DNA, 25 bp, Artificial
  probe
  misc_feature (1)..(25): SEQ ID NO: 5390; WAN024C3Y; Start 130; Stop 154
gtaggtccttggaactttcatcaga

SEQ ID NO: 409106 - DNA, 25 bp, Artificial
  probe
  misc_feature (1)..(25): SEQ ID NO: 5390; WAN024C3Y; Start 1; Stop 25
ttgctcacgagtcaatactttcttg

SEQ ID NO: 409107 - DNA, 25 bp, Artificial
  probe
  misc_feature (1)..(25): SEQ ID NO: 5390; WAN024C3Y; Start 112; Stop 136
atctatcctaagattgcggtaggtc

SEQ ID NO: 409108 - DNA, 25 bp, Artificial
  probe
  misc_feature (1)..(25): SEQ ID NO: 5390; WAN024C3Y; Start 6; Stop 30
cacgagtcaatactttcttgcttcc

SEQ ID NO: 409109 - DNA, 25 bp, Artificial
  probe
  misc_feature (1)..(25): SEQ ID NO: 5390; WAN024C3Y; Start 111; Stop 135
catctatcctaagattgcggtaggt

SEQ ID NO: 409110 - DNA, 25 bp, Artificial
  probe
  misc_feature (1)..(25): SEQ ID NO: 5390; WAN024C3Y; Start 110; Stop 134
acatctatcctaagattgcggtagg

SEQ ID NO: 409111 - DNA, 25 bp, Artificial
  probe
  misc_feature (1)..(25): SEQ ID NO: 5390; WAN024C3Y; Start 74; Stop 98
atcatctcttcaccacgataaaccg

SEQ ID NO: 409112 - DNA, 25 bp, Artificial
  probe
  misc_feature (1)..(25): SEQ ID NO: 5390; WAN024C3Y; Start 219; Stop 243
cgataaggactggcttatagatgta

SEQ ID NO: 409113 - DNA, 25 bp, Artificial
  probe
  misc_feature (1)..(25): SEQ ID NO: 5390; WAN024C3Y; Start 131; Stop 155
taggtccttggaactttcatcagac

SEQ ID NO: 409114 - DNA, 25 bp, Artificial
  probe
  misc_feature (1)..(25): SEQ ID NO: 5390; WAN024C3Y; Start 129; Stop 153
ggtaggtccttggaactttcatcag

SEQ ID NO: 409115 - DNA, 25 bp, Artificial
  probe
  misc_feature (1)..(25): SEQ ID NO: 5390; WAN024C3Y; Start 119; Stop 143
ctaagattgcggtaggtccttggaa

SEQ ID NO: 409116 - DNA, 25 bp, Artificial
  probe
  misc_feature (1)..(25): SEQ ID NO: 5390; WAN024C3Y; Start 217; Stop 241
ttcgataaggactggcttatagatg

SEQ ID NO: 409117 - DNA, 25 bp, Artificial
  probe
  misc_feature (1)..(25): SEQ ID NO: 5390; WAN024C3Y; Start 115; Stop 139
tatcctaagattgcggtaggtcctt

SEQ ID NO: 409118 - DNA, 25 bp, Artificial
  probe
  misc_feature (1)..(25): SEQ ID NO: 5390; WAN024C3Y; Start 218; Stop 242
tcgataaggactggcttatagatgt

SEQ ID NO: 409119 - DNA, 25 bp, Artificial
  probe
  misc_feature (1)..(25): SEQ ID NO: 5390; WAN024C3Y; Start 8; Stop 32
cgagtcaatactttcttgcttccca

SEQ ID NO: 409120 - DNA, 25 bp, Artificial
  probe
  misc_feature (1)..(25): SEQ ID NO: 5391; WAN024EVZ; Start 21; Stop 45
gaccagtcacctcaataacaaattc

SEQ ID NO: 409121 - DNA, 25 bp, Artificial
  probe
  misc_feature (1)..(25): SEQ ID NO: 5391; WAN024EVZ; Start 26; Stop 50
gtcacctcaataacaaattcgctac

SEQ ID NO: 409122 - DNA, 25 bp, Artificial
  probe
  misc_feature (1)..(25): SEQ ID NO: 5391; WAN024EVZ; Start 25; Stop 49
agtcacctcaataacaaattcgcta

SEQ ID NO: 409123 - DNA, 25 bp, Artificial
  probe
  misc_feature (1)..(25): SEQ ID NO: 5391; WAN024EVZ; Start 192; Stop 216
ttatttcttgtccgatgtgttcctc

SEQ ID NO: 409124 - DNA, 25 bp, Artificial
  probe
  misc_feature (1)..(25): SEQ ID NO: 5391; WAN024EVZ; Start 99; Stop 123
tgataaccaactgcatgattccttc

SEQ ID NO: 409125 - DNA, 25 bp, Artificial
  probe
  misc_feature (1)..(25): SEQ ID NO: 5391; WAN024EVZ; Start 191; Stop 215
gttatttcttgtccgatgtgttcct

SEQ ID NO: 409126 - DNA, 25 bp, Artificial
  probe
  misc_feature (1)..(25): SEQ ID NO: 5391; WAN024EVZ; Start 189; Stop 213
aggttatttcttgtccgatgtgttc

SEQ ID NO: 409127 - DNA, 25 bp, Artificial
  probe
  misc_feature (1)..(25): SEQ ID NO: 5391; WAN024EVZ; Start 188; Stop 212
aaggttatttcttgtccgatgtgtt

SEQ ID NO: 409128 - DNA, 25 bp, Artificial
  probe
  misc_feature (1)..(25): SEQ ID NO: 5391; WAN024EVZ; Start 98; Stop 122
ttgataaccaactgcatgattcctt

SEQ ID NO: 409129 - DNA, 25 bp, Artificial
  probe
  misc_feature (1)..(25): SEQ ID NO: 5391; WAN024EVZ; Start 22; Stop 46
accagtcacctcaataacaaattcg

SEQ ID NO: 409130 - DNA, 25 bp, Artificial
  probe
  misc_feature (1)..(25): SEQ ID NO: 5391; WAN024EVZ; Start 219; Stop 243
gaacacgaccagcatacatactacg

SEQ ID NO: 409131 - DNA, 25 bp, Artificial
  probe
  misc_feature (1)..(25): SEQ ID NO: 5391; WAN024EVZ; Start 218; Stop 242
cgaacacgaccagcatacatactac

SEQ ID NO: 409132 - DNA, 25 bp, Artificial
  probe
  misc_feature (1)..(25): SEQ ID NO: 5391; WAN024EVZ; Start 100; Stop 124
gataaccaactgcatgattccttca

SEQ ID NO: 409133 - DNA, 25 bp, Artificial
  probe
  misc_feature (1)..(25): SEQ ID NO: 5391; WAN024EVZ; Start 193; Stop 217
tatttcttgtccgatgtgttcctca

SEQ ID NO: 409134 - DNA, 25 bp, Artificial
  probe
  misc_feature (1)..(25): SEQ ID NO: 5391; WAN024EVZ; Start 27; Stop 51
tcacctcaataacaaattcgctacg

SEQ ID NO: 409135 - DNA, 25 bp, Artificial
  probe
  misc_feature (1)..(25): SEQ ID NO: 5391; WAN024EVZ; Start 24; Stop 48
cagtcacctcaataacaaattcgct

SEQ ID NO: 409136 - DNA, 25 bp, Artificial
  probe
  misc_feature (1)..(25): SEQ ID NO: 5391; WAN024EVZ; Start 101; Stop 125
ataaccaactgcatgattccttcac

SEQ ID NO: 409137 - DNA, 25 bp, Artificial
  probe
  misc_feature (1)..(25): SEQ ID NO: 5391; WAN024EVZ; Start 190; Stop 214
ggttatttcttgtccgatgtgttcc

SEQ ID NO: 409138 - DNA, 25 bp, Artificial
  probe
  misc_feature (1)..(25): SEQ ID NO: 5391; WAN024EVZ; Start 217; Stop 241
acgaacacgaccagcatacatacta

SEQ ID NO: 409139 - DNA, 25 bp, Artificial
  probe
  misc_feature (1)..(25): SEQ ID NO: 5391; WAN024EVZ; Start 20; Stop 44
tgaccagtcacctcaataacaaatt

SEQ ID NO: 409140 - DNA, 25 bp, Artificial
  probe
  misc_feature (1)..(25): SEQ ID NO: 5391; WAN024EVZ; Start 19; Stop 43
ctgaccagtcacctcaataacaaat

SEQ ID NO: 409141 - DNA, 25 bp, Artificial
  probe
  misc_feature (1)..(25): SEQ ID NO: 5391; WAN024EVZ; Start 23; Stop 47
ccagtcacctcaataacaaattcgc

SEQ ID NO: 409142 - DNA, 25 bp, Artificial
  probe
  misc_feature (1)..(25): SEQ ID NO: 5391; WAN024EVZ; Start 226; Stop 250
accagcatacatactacgtttcatt

SEQ ID NO: 409143 - DNA, 25 bp, Artificial
  probe
  misc_feature (1)..(25): SEQ ID NO: 5391; WAN024EVZ; Start 225; Stop 249
gaccagcatacatactacgtttcat

SEQ ID NO: 409144 - DNA, 25 bp, Artificial
  probe
  misc_feature (1)..(25): SEQ ID NO: 5391; WAN024EVZ; Start 139; Stop 163
gataaagatcaaaccaccaaggtca

SEQ ID NO: 409145 - DNA, 25 bp, Artificial
  probe
  misc_feature (1)..(25): SEQ ID NO: 5391; WAN024EVZ; Start 227; Stop 251
ccagcatacatactacgtttcatta

SEQ ID NO: 409146 - DNA, 25 bp, Artificial
  probe
  misc_feature (1)..(25): SEQ ID NO: 5391; WAN024EVZ; Start 140; Stop 164
ataaagatcaaaccaccaaggtcac

SEQ ID NO: 409147 - DNA, 25 bp, Artificial
  probe
  misc_feature (1)..(25): SEQ ID NO: 5391; WAN024EVZ; Start 176; Stop 200
acccatcctttcaaggttatttctt

SEQ ID NO: 409148 - DNA, 25 bp, Artificial
  probe
  misc_feature (1)..(25): SEQ ID NO: 5391; WAN024EVZ; Start 241; Stop 265
acgtttcattatttctctcctcttt

SEQ ID NO: 409149 - DNA, 25 bp, Artificial
  probe
  misc_feature (1)..(25): SEQ ID NO: 5391; WAN024EVZ; Start 238; Stop 262
actacgtttcattatttctctcctc

SEQ ID NO: 409150 - DNA, 25 bp, Artificial
  probe
  misc_feature (1)..(25): SEQ ID NO: 5391; WAN024EVZ; Start 17; Stop 41
acctgaccagtcacctcaataacaa

SEQ ID NO: 409151 - DNA, 25 bp, Artificial
  probe
  misc_feature (1)..(25): SEQ ID NO: 5391; WAN024EVZ; Start 239; Stop 263
ctacgtttcattatttctctcctct

SEQ ID NO: 409152 - DNA, 25 bp, Artificial
  probe
  misc_feature (1)..(25): SEQ ID NO: 5391; WAN024EVZ; Start 308; Stop 332
aaaatcatcagaaaagtttgccagt

SEQ ID NO: 409153 - DNA, 25 bp, Artificial
  probe
  misc_feature (1)..(25): SEQ ID NO: 5392; WAN024C7D; Start 172; Stop 196
aatctcacgataagcctgaatcaac

SEQ ID NO: 409154 - DNA, 25 bp, Artificial
  probe
  misc_feature (1)..(25): SEQ ID NO: 5392; WAN024C7D; Start 171; Stop 195
caatctcacgataagcctgaatcaa

SEQ ID NO: 409155 - DNA, 25 bp, Artificial
  probe
  misc_feature (1)..(25): SEQ ID NO: 5392; WAN024C7D; Start 219; Stop 243
caccaataatagcatatacaatcgg

SEQ ID NO: 409156 - DNA, 25 bp, Artificial
  probe
  misc_feature (1)..(25): SEQ ID NO: 5392; WAN024C7D; Start 218; Stop 242
ccaccaataatagcatatacaatcg

SEQ ID NO: 409157 - DNA, 25 bp, Artificial
  probe
  misc_feature (1)..(25): SEQ ID NO: 5392; WAN024C7D; Start 173; Stop 197
atctcacgataagcctgaatcaact

SEQ ID NO: 409158 - DNA, 25 bp, Artificial
  probe
  misc_feature (1)..(25): SEQ ID NO: 5392; WAN024C7D; Start 174; Stop 198
tctcacgataagcctgaatcaactt

SEQ ID NO: 409159 - DNA, 25 bp, Artificial
  probe
  misc_feature (1)..(25): SEQ ID NO: 5392; WAN024C7D; Start 168; Stop 192
ttccaatctcacgataagcctgaat

SEQ ID NO: 409160 - DNA, 25 bp, Artificial
  probe
  misc_feature (1)..(25): SEQ ID NO: 5392; WAN024C7D; Start 169; Stop 193
tccaatctcacgataagcctgaatc

SEQ ID NO: 409161 - DNA, 25 bp, Artificial
  probe
  misc_feature (1)..(25): SEQ ID NO: 5392; WAN024C7D; Start 59; Stop 83
tgcttagtcggatggaaataatctt

SEQ ID NO: 409162 - DNA, 25 bp, Artificial
  probe
  misc_feature (1)..(25): SEQ ID NO: 5392; WAN024C7D; Start 58; Stop 82
ttgcttagtcggatggaaataatct

SEQ ID NO: 409163 - DNA, 25 bp, Artificial
  probe
  misc_feature (1)..(25): SEQ ID NO: 5392; WAN024C7D; Start 57; Stop 81
cttgcttagtcggatggaaataatc

SEQ ID NO: 409164 - DNA, 25 bp, Artificial
  probe
  misc_feature (1)..(25): SEQ ID NO: 5392; WAN024C7D; Start 60; Stop 84
gcttagtcggatggaaataatcttt

SEQ ID NO: 409165 - DNA, 25 bp, Artificial
  probe
  misc_feature (1)..(25): SEQ ID NO: 5392; WAN024C7D; Start 167; Stop 191
cttccaatctcacgataagcctgaa

SEQ ID NO: 409166 - DNA, 25 bp, Artificial
  probe
  misc_feature (1)..(25): SEQ ID NO: 5392; WAN024C7D; Start 170; Stop 194
ccaatctcacgataagcctgaatca

SEQ ID NO: 409167 - DNA, 25 bp, Artificial
  probe
  misc_feature (1)..(25): SEQ ID NO: 5392; WAN024C7D; Start 56; Stop 80
acttgcttagtcggatggaaataat

SEQ ID NO: 409168 - DNA, 25 bp, Artificial
  probe
  misc_feature (1)..(25): SEQ ID NO: 5392; WAN024C7D; Start 217; Stop 241
accaccaataatagcatatacaatc

SEQ ID NO: 409169 - DNA, 25 bp, Artificial
  probe
  misc_feature (1)..(25): SEQ ID NO: 5392; WAN024C7D; Start 220; Stop 244
accaataatagcatatacaatcggt

SEQ ID NO: 409170 - DNA, 25 bp, Artificial
  probe
  misc_feature (1)..(25): SEQ ID NO: 5392; WAN024C7D; Start 55; Stop 79
cacttgcttagtcggatggaaataa

SEQ ID NO: 409171 - DNA, 25 bp, Artificial
  probe
  misc_feature (1)..(25): SEQ ID NO: 5392; WAN024C7D; Start 175; Stop 199
ctcacgataagcctgaatcaacttt

SEQ ID NO: 409172 - DNA, 25 bp, Artificial
  probe
  misc_feature (1)..(25): SEQ ID NO: 5392; WAN024C7D; Start 211; Stop 235
tggattaccaccaataatagcatat

SEQ ID NO: 409173 - DNA, 25 bp, Artificial
  probe
  misc_feature (1)..(25): SEQ ID NO: 5392; WAN024C7D; Start 221; Stop 245
ccaataatagcatatacaatcggta

SEQ ID NO: 409174 - DNA, 25 bp, Artificial
  probe
  misc_feature (1)..(25): SEQ ID NO: 5392; WAN024C7D; Start 212; Stop 236
ggattaccaccaataatagcatata

SEQ ID NO: 409175 - DNA, 25 bp, Artificial
  probe
  misc_feature (1)..(25): SEQ ID NO: 5392; WAN024C7D; Start 64; Stop 88
agtcggatggaaataatctttcacc

SEQ ID NO: 409176 - DNA, 25 bp, Artificial
  probe
  misc_feature (1)..(25): SEQ ID NO: 5392; WAN024C7D; Start 215; Stop 239
ttaccaccaataatagcatatacaa

SEQ ID NO: 409177 - DNA, 25 bp, Artificial
  probe
  misc_feature (1)..(25): SEQ ID NO: 5392; WAN024C7D; Start 63; Stop 87
tagtcggatggaaataatctttcac

SEQ ID NO: 409178 - DNA, 25 bp, Artificial
  probe
  misc_feature (1)..(25): SEQ ID NO: 5392; WAN024C7D; Start 216; Stop 240
taccaccaataatagcatatacaat

SEQ ID NO: 409179 - DNA, 25 bp, Artificial
  probe
  misc_feature (1)..(25): SEQ ID NO: 5392; WAN024C7D; Start 133; Stop 157
cactttcaagtctttgtcagcatgg

SEQ ID NO: 409180 - DNA, 25 bp, Artificial
  probe
  misc_feature (1)..(25): SEQ ID NO: 5392; WAN024C7D; Start 132; Stop 156
ccactttcaagtctttgtcagcatg

SEQ ID NO: 409181 - DNA, 25 bp, Artificial
  probe
  misc_feature (1)..(25): SEQ ID NO: 5392; WAN024C7D; Start 214; Stop 238
attaccaccaataatagcatataca

SEQ ID NO: 409182 - DNA, 25 bp, Artificial
  probe
  misc_feature (1)..(25): SEQ ID NO: 5392; WAN024C7D; Start 62; Stop 86
ttagtcggatggaaataatctttca

SEQ ID NO: 409183 - DNA, 25 bp, Artificial
  probe
  misc_feature (1)..(25): SEQ ID NO: 5392; WAN024C7D; Start 222; Stop 246
caataatagcatatacaatcggtag

SEQ ID NO: 409184 - DNA, 25 bp, Artificial
  probe
  misc_feature (1)..(25): SEQ ID NO: 5392; WAN024C7D; Start 54; Stop 78
ccacttgcttagtcggatggaaata

SEQ ID NO: 409185 - DNA, 25 bp, Artificial
  probe
  misc_feature (1)..(25): SEQ ID NO: 5392; WAN024C7D; Start 69; Stop 93
gatggaaataatctttcaccgcctg

SEQ ID NO: 409186 - DNA, 25 bp, Artificial
  probe
  misc_feature (1)..(25): SEQ ID NO: 5393; WAN024ESS; Start 220; Stop 244
gatgatgtggaggaggatgtggatt

SEQ ID NO: 409187 - DNA, 25 bp, Artificial
  probe
  misc_feature (1)..(25): SEQ ID NO: 5393; WAN024ESS; Start 32; Stop 56
gggtatctgattatcctagtgccag

SEQ ID NO: 409188 - DNA, 25 bp, Artificial
  probe
  misc_feature (1)..(25): SEQ ID NO: 5393; WAN024ESS; Start 58; Stop 82
ggtggtttagaagatatcctcatca

SEQ ID NO: 409189 - DNA, 25 bp, Artificial
  probe
  misc_feature (1)..(25): SEQ ID NO: 5393; WAN024ESS; Start 31; Stop 55
agggtatctgattatcctagtgcca

SEQ ID NO: 409190 - DNA, 25 bp, Artificial
  probe
  misc_feature (1)..(25): SEQ ID NO: 5393; WAN024ESS; Start 34; Stop 58
gtatctgattatcctagtgccagag

SEQ ID NO: 409191 - DNA, 25 bp, Artificial
  probe
  misc_feature (1)..(25): SEQ ID NO: 5393; WAN024ESS; Start 50; Stop 74
gtgccagaggtggtttagaagatat

SEQ ID NO: 409192 - DNA, 25 bp, Artificial
  probe
  misc_feature (1)..(25): SEQ ID NO: 5393; WAN024ESS; Start 61; Stop 85
ggtttagaagatatcctcatcatgg

SEQ ID NO: 409193 - DNA, 25 bp, Artificial
  probe
  misc_feature (1)..(25): SEQ ID NO: 5393; WAN024ESS; Start 35; Stop 59
tatctgattatcctagtgccagagg

SEQ ID NO: 409194 - DNA, 25 bp, Artificial
  probe
  misc_feature (1)..(25): SEQ ID NO: 5393; WAN024ESS; Start 33; Stop 57
ggtatctgattatcctagtgccaga

SEQ ID NO: 409195 - DNA, 25 bp, Artificial
  probe
  misc_feature (1)..(25): SEQ ID NO: 5393; WAN024ESS; Start 40; Stop 64
gattatcctagtgccagaggtggtt

SEQ ID NO: 409196 - DNA, 25 bp, Artificial
  probe
  misc_feature (1)..(25): SEQ ID NO: 5393; WAN024ESS; Start 221; Stop 245
atgatgtggaggaggatgtggattt

SEQ ID NO: 409197 - DNA, 25 bp, Artificial
  probe
  misc_feature (1)..(25): SEQ ID NO: 5393; WAN024ESS; Start 130; Stop 154
ggctatttgcttgattttgctagta

SEQ ID NO: 409198 - DNA, 25 bp, Artificial
  probe
  misc_feature (1)..(25): SEQ ID NO: 5393; WAN024ESS; Start 128; Stop 152
atggctatttgcttgattttgctag

SEQ ID NO: 409199 - DNA, 25 bp, Artificial
  probe
  misc_feature (1)..(25): SEQ ID NO: 5393; WAN024ESS; Start 57; Stop 81
aggtggtttagaagatatcctcatc

SEQ ID NO: 409200 - DNA, 25 bp, Artificial
  probe
  misc_feature (1)..(25): SEQ ID NO: 5393; WAN024ESS; Start 60; Stop 84
tggtttagaagatatcctcatcatg

SEQ ID NO: 409201 - DNA, 25 bp, Artificial
  probe
  misc_feature (1)..(25): SEQ ID NO: 5393; WAN024ESS; Start 59; Stop 83
gtggtttagaagatatcctcatcat

SEQ ID NO: 409202 - DNA, 25 bp, Artificial
  probe
  misc_feature (1)..(25): SEQ ID NO: 5393; WAN024ESS; Start 137; Stop 161
tgcttgattttgctagtattgaagg

SEQ ID NO: 409203 - DNA, 25 bp, Artificial
  probe
  misc_feature (1)..(25): SEQ ID NO: 5393; WAN024ESS; Start 139; Stop 163
cttgattttgctagtattgaagggc

SEQ ID NO: 409204 - DNA, 25 bp, Artificial
  probe
  misc_feature (1)..(25): SEQ ID NO: 5393; WAN024ESS; Start 138; Stop 162
gcttgattttgctagtattgaaggg

SEQ ID NO: 409205 - DNA, 25 bp, Artificial
  probe
  misc_feature (1)..(25): SEQ ID NO: 5393; WAN024ESS; Start 206; Stop 230
ttgaactgacagtggatgatgtgga

SEQ ID NO: 409206 - DNA, 25 bp, Artificial
  probe
  misc_feature (1)..(25): SEQ ID NO: 5393; WAN024ESS; Start 205; Stop 229
gttgaactgacagtggatgatgtgg

SEQ ID NO: 409207 - DNA, 25 bp, Artificial
  probe
  misc_feature (1)..(25): SEQ ID NO: 5393; WAN024ESS; Start 204; Stop 228
ggttgaactgacagtggatgatgtg

SEQ ID NO: 409208 - DNA, 25 bp, Artificial
  probe
  misc_feature (1)..(25): SEQ ID NO: 5393; WAN024ESS; Start 42; Stop 66
ttatcctagtgccagaggtggttta

SEQ ID NO: 409209 - DNA, 25 bp, Artificial
  probe
  misc_feature (1)..(25): SEQ ID NO: 5393; WAN024ESS; Start 38; Stop 62
ctgattatcctagtgccagaggtgg

SEQ ID NO: 409210 - DNA, 25 bp, Artificial
  probe
  misc_feature (1)..(25): SEQ ID NO: 5393; WAN024ESS; Start 129; Stop 153
tggctatttgcttgattttgctagt

SEQ ID NO: 409211 - DNA, 25 bp, Artificial
  probe
  misc_feature (1)..(25): SEQ ID NO: 5393; WAN024ESS; Start 127; Stop 151
catggctatttgcttgattttgcta

SEQ ID NO: 409212 - DNA, 25 bp, Artificial
  probe
  misc_feature (1)..(25): SEQ ID NO: 5393; WAN024ESS; Start 53; Stop 77
ccagaggtggtttagaagatatcct

SEQ ID NO: 409213 - DNA, 25 bp, Artificial
  probe
  misc_feature (1)..(25): SEQ ID NO: 5393; WAN024ESS; Start 49; Stop 73
agtgccagaggtggtttagaagata

SEQ ID NO: 409214 - DNA, 25 bp, Artificial
  probe
  misc_feature (1)..(25): SEQ ID NO: 5393; WAN024ESS; Start 48; Stop 72
tagtgccagaggtggtttagaagat

SEQ ID NO: 409215 - DNA, 25 bp, Artificial
  probe
  misc_feature (1)..(25): SEQ ID NO: 5393; WAN024ESS; Start 131; Stop 155
gctatttgcttgattttgctagtat

SEQ ID NO: 409216 - DNA, 25 bp, Artificial
  probe
  misc_feature (1)..(25): SEQ ID NO: 5393; WAN024ESS; Start 150; Stop 174
tagtattgaagggcaaaggcaaaag

SEQ ID NO: 409217 - DNA, 25 bp, Artificial
  probe
  misc_feature (1)..(25): SEQ ID NO: 5393; WAN024ESS; Start 136; Stop 160
ttgcttgattttgctagtattgaag

SEQ ID NO: 409218 - DNA, 25 bp, Artificial
  probe
  misc_feature (1)..(25): SEQ ID NO: 5393; WAN024ESS; Start 36; Stop 60
atctgattatcctagtgccagaggt

SEQ ID NO: 409219 - DNA, 25 bp, Artificial
  probe
  misc_feature (1)..(25): SEQ ID NO: 5394; WAN024EZI; Start 230; Stop 254
cagtcaatggcttcaatatctaact

SEQ ID NO: 409220 - DNA, 25 bp, Artificial
  probe
  misc_feature (1)..(25): SEQ ID NO: 5394; WAN024EZI; Start 13; Stop 37
gagactagcatcaatcttgacaatg

SEQ ID NO: 409221 - DNA, 25 bp, Artificial
  probe
  misc_feature (1)..(25): SEQ ID NO: 5394; WAN024EZI; Start 12; Stop 36
ggagactagcatcaatcttgacaat

SEQ ID NO: 409222 - DNA, 25 bp, Artificial
  probe
  misc_feature (1)..(25): SEQ ID NO: 5394; WAN024EZI; Start 229; Stop 253
ccagtcaatggcttcaatatctaac

SEQ ID NO: 409223 - DNA, 25 bp, Artificial
  probe
  misc_feature (1)..(25): SEQ ID NO: 5394; WAN024EZI; Start 231; Stop 255
agtcaatggcttcaatatctaacta

SEQ ID NO: 409224 - DNA, 25 bp, Artificial
  probe
  misc_feature (1)..(25): SEQ ID NO: 5394; WAN024EZI; Start 29; Stop 53
ttgacaatgcgatttccctctttat

SEQ ID NO: 409225 - DNA, 25 bp, Artificial
  probe
  misc_feature (1)..(25): SEQ ID NO: 5394; WAN024EZI; Start 232; Stop 256
gtcaatggcttcaatatctaactaa

SEQ ID NO: 409226 - DNA, 25 bp, Artificial
  probe
  misc_feature (1)..(25): SEQ ID NO: 5394; WAN024EZI; Start 30; Stop 54
tgacaatgcgatttccctctttatc

SEQ ID NO: 409227 - DNA, 25 bp, Artificial
  probe
  misc_feature (1)..(25): SEQ ID NO: 5394; WAN024EZI; Start 28; Stop 52
cttgacaatgcgatttccctcttta

SEQ ID NO: 409228 - DNA, 25 bp, Artificial
  probe
  misc_feature (1)..(25): SEQ ID NO: 5394; WAN024EZI; Start 128; Stop 152
cggtcactattagcagcaatacgag

SEQ ID NO: 409229 - DNA, 25 bp, Artificial
  probe
  misc_feature (1)..(25): SEQ ID NO: 5394; WAN024EZI; Start 33; Stop 57
caatgcgatttccctctttatccag

SEQ ID NO: 409230 - DNA, 25 bp, Artificial
  probe
  misc_feature (1)..(25): SEQ ID NO: 5394; WAN024EZI; Start 31; Stop 55
gacaatgcgatttccctctttatcc

SEQ ID NO: 409231 - DNA, 25 bp, Artificial
  probe
  misc_feature (1)..(25): SEQ ID NO: 5394; WAN024EZI; Start 7; Stop 31
caaagggagactagcatcaatcttg

SEQ ID NO: 409232 - DNA, 25 bp, Artificial
  probe
  misc_feature (1)..(25): SEQ ID NO: 5394; WAN024EZI; Start 35; Stop 59
atgcgatttccctctttatccagaa

SEQ ID NO: 409233 - DNA, 25 bp, Artificial
  probe
  misc_feature (1)..(25): SEQ ID NO: 5394; WAN024EZI; Start 34; Stop 58
aatgcgatttccctctttatccaga

SEQ ID NO: 409234 - DNA, 25 bp, Artificial
  probe
  misc_feature (1)..(25): SEQ ID NO: 5394; WAN024EZI; Start 132; Stop 156
cactattagcagcaatacgagccag

SEQ ID NO: 409235 - DNA, 25 bp, Artificial
  probe
  misc_feature (1)..(25): SEQ ID NO: 5394; WAN024EZI; Start 130; Stop 154
gtcactattagcagcaatacgagcc

SEQ ID NO: 409236 - DNA, 25 bp, Artificial
  probe
  misc_feature (1)..(25): SEQ ID NO: 5394; WAN024EZI; Start 129; Stop 153
ggtcactattagcagcaatacgagc

SEQ ID NO: 409237 - DNA, 25 bp, Artificial
  probe
  misc_feature (1)..(25): SEQ ID NO: 5394; WAN024EZI; Start 49; Stop 73
tttatccagaagagaaaggtagcct

SEQ ID NO: 409238 - DNA, 25 bp, Artificial
  probe
  misc_feature (1)..(25): SEQ ID NO: 5394; WAN024EZI; Start 8; Stop 32
aaagggagactagcatcaatcttga

SEQ ID NO: 409239 - DNA, 25 bp, Artificial
  probe
  misc_feature (1)..(25): SEQ ID NO: 5394; WAN024EZI; Start 32; Stop 56
acaatgcgatttccctctttatcca

SEQ ID NO: 409240 - DNA, 25 bp, Artificial
  probe
  misc_feature (1)..(25): SEQ ID NO: 5394; WAN024EZI; Start 102; Stop 126
cttccaaatccaaacgattaacctc

SEQ ID NO: 409241 - DNA, 25 bp, Artificial
  probe
  misc_feature (1)..(25): SEQ ID NO: 5394; WAN024EZI; Start 233; Stop 257
tcaatggcttcaatatctaactaat

SEQ ID NO: 409242 - DNA, 25 bp, Artificial
  probe
  misc_feature (1)..(25): SEQ ID NO: 5394; WAN024EZI; Start 26; Stop 50
atcttgacaatgcgatttccctctt

SEQ ID NO: 409243 - DNA, 25 bp, Artificial
  probe
  misc_feature (1)..(25): SEQ ID NO: 5394; WAN024EZI; Start 6; Stop 30
ccaaagggagactagcatcaatctt

SEQ ID NO: 409244 - DNA, 25 bp, Artificial
  probe
  misc_feature (1)..(25): SEQ ID NO: 5394; WAN024EZI; Start 98; Stop 122
aacccttccaaatccaaacgattaa

SEQ ID NO: 409245 - DNA, 25 bp, Artificial
  probe
  misc_feature (1)..(25): SEQ ID NO: 5394; WAN024EZI; Start 36; Stop 60
tgcgatttccctctttatccagaag

SEQ ID NO: 409246 - DNA, 25 bp, Artificial
  probe
  misc_feature (1)..(25): SEQ ID NO: 5394; WAN024EZI; Start 131; Stop 155
tcactattagcagcaatacgagcca

SEQ ID NO: 409247 - DNA, 25 bp, Artificial
  probe
  misc_feature (1)..(25): SEQ ID NO: 5394; WAN024EZI; Start 27; Stop 51
tcttgacaatgcgatttccctcttt

SEQ ID NO: 409248 - DNA, 25 bp, Artificial
  probe
  misc_feature (1)..(25): SEQ ID NO: 5394; WAN024EZI; Start 9; Stop 33
aagggagactagcatcaatcttgac

SEQ ID NO: 409249 - DNA, 25 bp, Artificial
  probe
  misc_feature (1)..(25): SEQ ID NO: 5394; WAN024EZI; Start 101; Stop 125
ccttccaaatccaaacgattaacct

SEQ ID NO: 409250 - DNA, 25 bp, Artificial
  probe
  misc_feature (1)..(25): SEQ ID NO: 5394; WAN024EZI; Start 48; Stop 72
ctttatccagaagagaaaggtagcc

SEQ ID NO: 409251 - DNA, 25 bp, Artificial
  probe
  misc_feature (1)..(25): SEQ ID NO: 5394; WAN024EZI; Start 21; Stop 45
catcaatcttgacaatgcgatttcc

SEQ ID NO: 409252 - DNA, 25 bp, Artificial
  probe
  misc_feature (1)..(25): SEQ ID NO: 5395; WAN024C73; Start 266; Stop 290
tcattcttctcgacttgacagttaa

SEQ ID NO: 409253 - DNA, 25 bp, Artificial
  probe
  misc_feature (1)..(25): SEQ ID NO: 5395; WAN024C73; Start 265; Stop 289
atcattcttctcgacttgacagtta

SEQ ID NO: 409254 - DNA, 25 bp, Artificial
  probe
  misc_feature (1)..(25): SEQ ID NO: 5395; WAN024C73; Start 53; Stop 77
gtcacttcgatcataggagtaatct

SEQ ID NO: 409255 - DNA, 25 bp, Artificial
  probe
  misc_feature (1)..(25): SEQ ID NO: 5395; WAN024C73; Start 52; Stop 76
cgtcacttcgatcataggagtaatc

SEQ ID NO: 409256 - DNA, 25 bp, Artificial
  probe
  misc_feature (1)..(25): SEQ ID NO: 5395; WAN024C73; Start 54; Stop 78
tcacttcgatcataggagtaatctc

SEQ ID NO: 409257 - DNA, 25 bp, Artificial
  probe
  misc_feature (1)..(25): SEQ ID NO: 5395; WAN024C73; Start 264; Stop 288
catcattcttctcgacttgacagtt

SEQ ID NO: 409258 - DNA, 25 bp, Artificial
  probe
  misc_feature (1)..(25): SEQ ID NO: 5395; WAN024C73; Start 262; Stop 286
gacatcattcttctcgacttgacag

SEQ ID NO: 409259 - DNA, 25 bp, Artificial
  probe
  misc_feature (1)..(25): SEQ ID NO: 5395; WAN024C73; Start 258; Stop 282
tcaggacatcattcttctcgacttg

SEQ ID NO: 409260 - DNA, 25 bp, Artificial
  probe
  misc_feature (1)..(25): SEQ ID NO: 5395; WAN024C73; Start 263; Stop 287
acatcattcttctcgacttgacagt

SEQ ID NO: 409261 - DNA, 25 bp, Artificial
  probe
  misc_feature (1)..(25): SEQ ID NO: 5395; WAN024C73; Start 260; Stop 284
aggacatcattcttctcgacttgac

SEQ ID NO: 409262 - DNA, 25 bp, Artificial
  probe
  misc_feature (1)..(25): SEQ ID NO: 5395; WAN024C73; Start 259; Stop 283
caggacatcattcttctcgacttga

SEQ ID NO: 409263 - DNA, 25 bp, Artificial
  probe
  misc_feature (1)..(25): SEQ ID NO: 5395; WAN024C73; Start 261; Stop 285
ggacatcattcttctcgacttgaca

SEQ ID NO: 409264 - DNA, 25 bp, Artificial
  probe
  misc_feature (1)..(25): SEQ ID NO: 5395; WAN024C73; Start 257; Stop 281
gtcaggacatcattcttctcgactt

SEQ ID NO: 409265 - DNA, 25 bp, Artificial
  probe
  misc_feature (1)..(25): SEQ ID NO: 5395; WAN024C73; Start 51; Stop 75
tcgtcacttcgatcataggagtaat

SEQ ID NO: 409266 - DNA, 25 bp, Artificial
  probe
  misc_feature (1)..(25): SEQ ID NO: 5395; WAN024C73; Start 267; Stop 291
cattcttctcgacttgacagttaaa

SEQ ID NO: 409267 - DNA, 25 bp, Artificial
  probe
  misc_feature (1)..(25): SEQ ID NO: 5395; WAN024C73; Start 252; Stop 276
cttgggtcaggacatcattcttctc

SEQ ID NO: 409268 - DNA, 25 bp, Artificial
  probe
  misc_feature (1)..(25): SEQ ID NO: 5395; WAN024C73; Start 250; Stop 274
ctcttgggtcaggacatcattcttc

SEQ ID NO: 409269 - DNA, 25 bp, Artificial
  probe
  misc_feature (1)..(25): SEQ ID NO: 5395; WAN024C73; Start 50; Stop 74
gtcgtcacttcgatcataggagtaa

SEQ ID NO: 409270 - DNA, 25 bp, Artificial
  probe
  misc_feature (1)..(25): SEQ ID NO: 5395; WAN024C73; Start 251; Stop 275
tcttgggtcaggacatcattcttct

SEQ ID NO: 409271 - DNA, 25 bp, Artificial
  probe
  misc_feature (1)..(25): SEQ ID NO: 5395; WAN024C73; Start 279; Stop 303
cttgacagttaaaagttggaaaacc

SEQ ID NO: 409272 - DNA, 25 bp, Artificial
  probe
  misc_feature (1)..(25): SEQ ID NO: 5395; WAN024C73; Start 49; Stop 73
tgtcgtcacttcgatcataggagta

SEQ ID NO: 409273 - DNA, 25 bp, Artificial
  probe
  misc_feature (1)..(25): SEQ ID NO: 5395; WAN024C73; Start 14; Stop 38
aaaacaaccccttcaaataccagac

SEQ ID NO: 409274 - DNA, 25 bp, Artificial
  probe
  misc_feature (1)..(25): SEQ ID NO: 5395; WAN024C73; Start 25; Stop 49
ttcaaataccagacgattttcctct

SEQ ID NO: 409275 - DNA, 25 bp, Artificial
  probe
  misc_feature (1)..(25): SEQ ID NO: 5395; WAN024C73; Start 24; Stop 48
cttcaaataccagacgattttcctc

SEQ ID NO: 409276 - DNA, 25 bp, Artificial
  probe
  misc_feature (1)..(25): SEQ ID NO: 5395; WAN024C73; Start 70; Stop 94
agtaatctccgccttatccagcttg

SEQ ID NO: 409277 - DNA, 25 bp, Artificial
  probe
  misc_feature (1)..(25): SEQ ID NO: 5395; WAN024C73; Start 23; Stop 47
ccttcaaataccagacgattttcct

SEQ ID NO: 409278 - DNA, 25 bp, Artificial
  probe
  misc_feature (1)..(25): SEQ ID NO: 5395; WAN024C73; Start 69; Stop 93
gagtaatctccgccttatccagctt

SEQ ID NO: 409279 - DNA, 25 bp, Artificial
  probe
  misc_feature (1)..(25): SEQ ID NO: 5395; WAN024C73; Start 43; Stop 67
ttcctctgtcgtcacttcgatcata

SEQ ID NO: 409280 - DNA, 25 bp, Artificial
  probe
  misc_feature (1)..(25): SEQ ID NO: 5395; WAN024C73; Start 256; Stop 280
ggtcaggacatcattcttctcgact

SEQ ID NO: 409281 - DNA, 25 bp, Artificial
  probe
  misc_feature (1)..(25): SEQ ID NO: 5395; WAN024C73; Start 280; Stop 304
ttgacagttaaaagttggaaaacca

SEQ ID NO: 409282 - DNA, 25 bp, Artificial
  probe
  misc_feature (1)..(25): SEQ ID NO: 5395; WAN024C73; Start 47; Stop 71
tctgtcgtcacttcgatcataggag

SEQ ID NO: 409283 - DNA, 25 bp, Artificial
  probe
  misc_feature (1)..(25): SEQ ID NO: 5395; WAN024C73; Start 46; Stop 70
ctctgtcgtcacttcgatcatagga

SEQ ID NO: 409284 - DNA, 25 bp, Artificial
  probe
  misc_feature (1)..(25): SEQ ID NO: 5395; WAN024C73; Start 44; Stop 68
tcctctgtcgtcacttcgatcatag

SEQ ID NO: 409285 - DNA, 25 bp, Artificial
  probe
  misc_feature (1)..(25): SEQ ID NO: 5396; WAN024FRW; Start 65; Stop 89
gttggtatgccttatgtattgtgac

SEQ ID NO: 409286 - DNA, 25 bp, Artificial
  probe
  misc_feature (1)..(25): SEQ ID NO: 5396; WAN024FRW; Start 61; Stop 85
attcgttggtatgccttatgtattg

SEQ ID NO: 409287 - DNA, 25 bp, Artificial
  probe
  misc_feature (1)..(25): SEQ ID NO: 5396; WAN024FRW; Start 62; Stop 86
ttcgttggtatgccttatgtattgt

SEQ ID NO: 409288 - DNA, 25 bp, Artificial
  probe
  misc_feature (1)..(25): SEQ ID NO: 5396; WAN024FRW; Start 483; Stop 507
tatccgtgaccagatgtatattgag

SEQ ID NO: 409289 - DNA, 25 bp, Artificial
  probe
  misc_feature (1)..(25): SEQ ID NO: 5396; WAN024FRW; Start 60; Stop 84
cattcgttggtatgccttatgtatt

SEQ ID NO: 409290 - DNA, 25 bp, Artificial
  probe
  misc_feature (1)..(25): SEQ ID NO: 5396; WAN024FRW; Start 482; Stop 506
ttatccgtgaccagatgtatattga

SEQ ID NO: 409291 - DNA, 25 bp, Artificial
  probe
  misc_feature (1)..(25): SEQ ID NO: 5396; WAN024FRW; Start 64; Stop 88
cgttggtatgccttatgtattgtga

SEQ ID NO: 409292 - DNA, 25 bp, Artificial
  probe
  misc_feature (1)..(25): SEQ ID NO: 5396; WAN024FRW; Start 63; Stop 87
tcgttggtatgccttatgtattgtg

SEQ ID NO: 409293 - DNA, 25 bp, Artificial
  probe
  misc_feature (1)..(25): SEQ ID NO: 5396; WAN024FRW; Start 665; Stop 689
aaggtatgcgaacagatagtctcat

SEQ ID NO: 409294 - DNA, 25 bp, Artificial
  probe
  misc_feature (1)..(25): SEQ ID NO: 5396; WAN024FRW; Start 484; Stop 508
atccgtgaccagatgtatattgagg

SEQ ID NO: 409295 - DNA, 25 bp, Artificial
  probe
  misc_feature (1)..(25): SEQ ID NO: 5396; WAN024FRW; Start 77; Stop 101
tatgtattgtgacaggcttgattct

SEQ ID NO: 409296 - DNA, 25 bp, Artificial
  probe
  misc_feature (1)..(25): SEQ ID NO: 5396; WAN024FRW; Start 66; Stop 90
ttggtatgccttatgtattgtgaca

SEQ ID NO: 409297 - DNA, 25 bp, Artificial
  probe
  misc_feature (1)..(25): SEQ ID NO: 5396; WAN024FRW; Start 735; Stop 759
cggtctcggtataatgatcgttatt

SEQ ID NO: 409298 - DNA, 25 bp, Artificial
  probe
  misc_feature (1)..(25): SEQ ID NO: 5396; WAN024FRW; Start 733; Stop 757
atcggtctcggtataatgatcgtta

SEQ ID NO: 409299 - DNA, 25 bp, Artificial
  probe
  misc_feature (1)..(25): SEQ ID NO: 5396; WAN024FRW; Start 732; Stop 756
tatcggtctcggtataatgatcgtt

SEQ ID NO: 409300 - DNA, 25 bp, Artificial
  probe
  misc_feature (1)..(25): SEQ ID NO: 5396; WAN024FRW; Start 76; Stop 100
ttatgtattgtgacaggcttgattc

SEQ ID NO: 409301 - DNA, 25 bp, Artificial
  probe
  misc_feature (1)..(25): SEQ ID NO: 5396; WAN024FRW; Start 75; Stop 99
cttatgtattgtgacaggcttgatt

SEQ ID NO: 409302 - DNA, 25 bp, Artificial
  probe
  misc_feature (1)..(25): SEQ ID NO: 5396; WAN024FRW; Start 67; Stop 91
tggtatgccttatgtattgtgacag

SEQ ID NO: 409303 - DNA, 25 bp, Artificial
  probe
  misc_feature (1)..(25): SEQ ID NO: 5396; WAN024FRW; Start 78; Stop 102
atgtattgtgacaggcttgattctt

SEQ ID NO: 409304 - DNA, 25 bp, Artificial
  probe
  misc_feature (1)..(25): SEQ ID NO: 5396; WAN024FRW; Start 734; Stop 758
tcggtctcggtataatgatcgttat

SEQ ID NO: 409305 - DNA, 25 bp, Artificial
  probe
  misc_feature (1)..(25): SEQ ID NO: 5396; WAN024FRW; Start 731; Stop 755
ttatcggtctcggtataatgatcgt

SEQ ID NO: 409306 - DNA, 25 bp, Artificial
  probe
  misc_feature (1)..(25): SEQ ID NO: 5396; WAN024FRW; Start 664; Stop 688
gaaggtatgcgaacagatagtctca

SEQ ID NO: 409307 - DNA, 25 bp, Artificial
  probe
  misc_feature (1)..(25): SEQ ID NO: 5396; WAN024FRW; Start 74; Stop 98
ccttatgtattgtgacaggcttgat

SEQ ID NO: 409308 - DNA, 25 bp, Artificial
  probe
  misc_feature (1)..(25): SEQ ID NO: 5396; WAN024FRW; Start 79; Stop 103
tgtattgtgacaggcttgattcttg

SEQ ID NO: 409309 - DNA, 25 bp, Artificial
  probe
  misc_feature (1)..(25): SEQ ID NO: 5396; WAN024FRW; Start 68; Stop 92
ggtatgccttatgtattgtgacagg

SEQ ID NO: 409310 - DNA, 25 bp, Artificial
  probe
  misc_feature (1)..(25): SEQ ID NO: 5396; WAN024FRW; Start 80; Stop 104
gtattgtgacaggcttgattcttgc

SEQ ID NO: 409311 - DNA, 25 bp, Artificial
  probe
  misc_feature (1)..(25): SEQ ID NO: 5396; WAN024FRW; Start 166; Stop 190
tttatcttagtagcctttcccttgg

SEQ ID NO: 409312 - DNA, 25 bp, Artificial
  probe
  misc_feature (1)..(25): SEQ ID NO: 5396; WAN024FRW; Start 59; Stop 83
ccattcgttggtatgccttatgtat

SEQ ID NO: 409313 - DNA, 25 bp, Artificial
  probe
  misc_feature (1)..(25): SEQ ID NO: 5396; WAN024FRW; Start 626; Stop 650
tttacttgatttggtatggtttcgg

SEQ ID NO: 409314 - DNA, 25 bp, Artificial
  probe
  misc_feature (1)..(25): SEQ ID NO: 5396; WAN024FRW; Start 314; Stop 338
ctcttgtgctctatatctttgctga

SEQ ID NO: 409315 - DNA, 25 bp, Artificial
  probe
  misc_feature (1)..(25): SEQ ID NO: 5396; WAN024FRW; Start 323; Stop 347
tctatatctttgctgaccgtaaact

SEQ ID NO: 409316 - DNA, 25 bp, Artificial
  probe
  misc_feature (1)..(25): SEQ ID NO: 5396; WAN024FRW; Start 479; Stop 503
gctttatccgtgaccagatgtatat

SEQ ID NO: 409317 - DNA, 25 bp, Artificial
  probe
  misc_feature (1)..(25): SEQ ID NO: 5396; WAN024FRW; Start 324; Stop 348
ctatatctttgctgaccgtaaactc

SEQ ID NO: 409318 - DNA, 25 bp, Artificial
  probe
  misc_feature (1)..(25): SEQ ID NO: 5397; WAN024DZ2; Start 1861; Stop 1885
aagtctacctatatgcgtcagttag

SEQ ID NO: 409319 - DNA, 25 bp, Artificial
  probe
  misc_feature (1)..(25): SEQ ID NO: 5397; WAN024DZ2; Start 1860; Stop 1884
gaagtctacctatatgcgtcagtta

SEQ ID NO: 409320 - DNA, 25 bp, Artificial
  probe
  misc_feature (1)..(25): SEQ ID NO: 5397; WAN024DZ2; Start 1799; Stop 1823
atacgattcagatggcagaagatac

SEQ ID NO: 409321 - DNA, 25 bp, Artificial
  probe
  misc_feature (1)..(25): SEQ ID NO: 5397; WAN024DZ2; Start 1798; Stop 1822
aatacgattcagatggcagaagata

SEQ ID NO: 409322 - DNA, 25 bp, Artificial
  probe
  misc_feature (1)..(25): SEQ ID NO: 5397; WAN024DZ2; Start 2476; Stop 2500
gagcatcctatcctagcagaattag

SEQ ID NO: 409323 - DNA, 25 bp, Artificial
  probe
  misc_feature (1)..(25): SEQ ID NO: 5397; WAN024DZ2; Start 2389; Stop 2413
ctagagaatcaaggaacagagagtc

SEQ ID NO: 409324 - DNA, 25 bp, Artificial
  probe
  misc_feature (1)..(25): SEQ ID NO: 5397; WAN024DZ2; Start 2475; Stop 2499
agagcatcctatcctagcagaatta

SEQ ID NO: 409325 - DNA, 25 bp, Artificial
  probe
  misc_feature (1)..(25): SEQ ID NO: 5397; WAN024DZ2; Start 568; Stop 592
tatgacttgtctgaggaagaagaac

SEQ ID NO: 409326 - DNA, 25 bp, Artificial
  probe
  misc_feature (1)..(25): SEQ ID NO: 5397; WAN024DZ2; Start 566; Stop 590
gttatgacttgtctgaggaagaaga

SEQ ID NO: 409327 - DNA, 25 bp, Artificial
  probe
  misc_feature (1)..(25): SEQ ID NO: 5397; WAN024DZ2; Start 567; Stop 591
ttatgacttgtctgaggaagaagaa

SEQ ID NO: 409328 - DNA, 25 bp, Artificial
  probe
  misc_feature (1)..(25): SEQ ID NO: 5397; WAN024DZ2; Start 1862; Stop 1886
agtctacctatatgcgtcagttagc

SEQ ID NO: 409329 - DNA, 25 bp, Artificial
  probe
  misc_feature (1)..(25): SEQ ID NO: 5397; WAN024DZ2; Start 565; Stop 589
ggttatgacttgtctgaggaagaag

SEQ ID NO: 409330 - DNA, 25 bp, Artificial
  probe
  misc_feature (1)..(25): SEQ ID NO: 5397; WAN024DZ2; Start 2474; Stop 2498
aagagcatcctatcctagcagaatt

SEQ ID NO: 409331 - DNA, 25 bp, Artificial
  probe
  misc_feature (1)..(25): SEQ ID NO: 5397; WAN024DZ2; Start 1859; Stop 1883
ggaagtctacctatatgcgtcagtt

SEQ ID NO: 409332 - DNA, 25 bp, Artificial
  probe
  misc_feature (1)..(25): SEQ ID NO: 5397; WAN024DZ2; Start 2473; Stop 2497
gaagagcatcctatcctagcagaat

SEQ ID NO: 409333 - DNA, 25 bp, Artificial
  probe
  misc_feature (1)..(25): SEQ ID NO: 5397; WAN024DZ2; Start 2388; Stop 2412
gctagagaatcaaggaacagagagt

SEQ ID NO: 409334 - DNA, 25 bp, Artificial
  probe
  misc_feature (1)..(25): SEQ ID NO: 5397; WAN024DZ2; Start 1865; Stop 1889
ctacctatatgcgtcagttagccat

SEQ ID NO: 409335 - DNA, 25 bp, Artificial
  probe
  misc_feature (1)..(25): SEQ ID NO: 5397; WAN024DZ2; Start 2477; Stop 2501
agcatcctatcctagcagaattagc

SEQ ID NO: 409336 - DNA, 25 bp, Artificial
  probe
  misc_feature (1)..(25): SEQ ID NO: 5397; WAN024DZ2; Start 1800; Stop 1824
tacgattcagatggcagaagatacc

SEQ ID NO: 409337 - DNA, 25 bp, Artificial
  probe
  misc_feature (1)..(25): SEQ ID NO: 5397; WAN024DZ2; Start 1863; Stop 1887
gtctacctatatgcgtcagttagcc

SEQ ID NO: 409338 - DNA, 25 bp, Artificial
  probe
  misc_feature (1)..(25): SEQ ID NO: 5397; WAN024DZ2; Start 569; Stop 593
atgacttgtctgaggaagaagaaca

SEQ ID NO: 409339 - DNA, 25 bp, Artificial
  probe
  misc_feature (1)..(25): SEQ ID NO: 5397; WAN024DZ2; Start 2124; Stop 2148
tgctcagtccatcatcgaatatatc

SEQ ID NO: 409340 - DNA, 25 bp, Artificial
  probe
  misc_feature (1)..(25): SEQ ID NO: 5397; WAN024DZ2; Start 2123; Stop 2147
ttgctcagtccatcatcgaatatat

SEQ ID NO: 409341 - DNA, 25 bp, Artificial
  probe
  misc_feature (1)..(25): SEQ ID NO: 5397; WAN024DZ2; Start 2122; Stop 2146
cttgctcagtccatcatcgaatata

SEQ ID NO: 409342 - DNA, 25 bp, Artificial
  probe
  misc_feature (1)..(25): SEQ ID NO: 5397; WAN024DZ2; Start 2126; Stop 2150
ctcagtccatcatcgaatatatcca

SEQ ID NO: 409343 - DNA, 25 bp, Artificial
  probe
  misc_feature (1)..(25): SEQ ID NO: 5397; WAN024DZ2; Start 608; Stop 632
agatgaatctggtactctcttatga

SEQ ID NO: 409344 - DNA, 25 bp, Artificial
  probe
  misc_feature (1)..(25): SEQ ID NO: 5397; WAN024DZ2; Start 2125; Stop 2149
gctcagtccatcatcgaatatatcc

SEQ ID NO: 409345 - DNA, 25 bp, Artificial
  probe
  misc_feature (1)..(25): SEQ ID NO: 5397; WAN024DZ2; Start 2472; Stop 2496
agaagagcatcctatcctagcagaa

SEQ ID NO: 409346 - DNA, 25 bp, Artificial
  probe
  misc_feature (1)..(25): SEQ ID NO: 5397; WAN024DZ2; Start 2390; Stop 2414
tagagaatcaaggaacagagagtcc

SEQ ID NO: 409347 - DNA, 25 bp, Artificial
  probe
  misc_feature (1)..(25): SEQ ID NO: 5397; WAN024DZ2; Start 1864; Stop 1888
tctacctatatgcgtcagttagcca

SEQ ID NO: 409348 - DNA, 25 bp, Artificial
  probe
  misc_feature (1)..(25): SEQ ID NO: 5397; WAN024DZ2; Start 1809; Stop 1833
gatggcagaagataccagtattcaa

SEQ ID NO: 409349 - DNA, 25 bp, Artificial
  probe
  misc_feature (1)..(25): SEQ ID NO: 5397; WAN024DZ2; Start 2136; Stop 2160
catcgaatatatccatgagcacatc

SEQ ID NO: 409350 - DNA, 25 bp, Artificial
  probe
  misc_feature (1)..(25): SEQ ID NO: 5397; WAN024DZ2; Start 2127; Stop 2151
tcagtccatcatcgaatatatccat

SEQ ID NO: 409351 - DNA, 25 bp, Artificial
  probe
  misc_feature (1)..(25): SEQ ID NO: 5398; WAN024G99; Start 200; Stop 224
atacggcggtcaatgttagtcatat

SEQ ID NO: 409352 - DNA, 25 bp, Artificial
  probe
  misc_feature (1)..(25): SEQ ID NO: 5398; WAN024G99; Start 49; Stop 73
cagaagaagctccttactctcatag

SEQ ID NO: 409353 - DNA, 25 bp, Artificial
  probe
  misc_feature (1)..(25): SEQ ID NO: 5398; WAN024G99; Start 199; Stop 223
gatacggcggtcaatgttagtcata

SEQ ID NO: 409354 - DNA, 25 bp, Artificial
  probe
  misc_feature (1)..(25): SEQ ID NO: 5398; WAN024G99; Start 57; Stop 81
gctccttactctcatagtgacagta

SEQ ID NO: 409355 - DNA, 25 bp, Artificial
  probe
  misc_feature (1)..(25): SEQ ID NO: 5398; WAN024G99; Start 51; Stop 75
gaagaagctccttactctcatagtg

SEQ ID NO: 409356 - DNA, 25 bp, Artificial
  probe
  misc_feature (1)..(25): SEQ ID NO: 5398; WAN024G99; Start 50; Stop 74
agaagaagctccttactctcatagt

SEQ ID NO: 409357 - DNA, 25 bp, Artificial
  probe
  misc_feature (1)..(25): SEQ ID NO: 5398; WAN024G99; Start 52; Stop 76
aagaagctccttactctcatagtga

SEQ ID NO: 409358 - DNA, 25 bp, Artificial
  probe
  misc_feature (1)..(25): SEQ ID NO: 5398; WAN024G99; Start 48; Stop 72
ccagaagaagctccttactctcata

SEQ ID NO: 409359 - DNA, 25 bp, Artificial
  probe
  misc_feature (1)..(25): SEQ ID NO: 5398; WAN024G99; Start 53; Stop 77
agaagctccttactctcatagtgac

SEQ ID NO: 409360 - DNA, 25 bp, Artificial
  probe
  misc_feature (1)..(25): SEQ ID NO: 5398; WAN024G99; Start 55; Stop 79
aagctccttactctcatagtgacag

SEQ ID NO: 409361 - DNA, 25 bp, Artificial
  probe
  misc_feature (1)..(25): SEQ ID NO: 5398; WAN024G99; Start 54; Stop 78
gaagctccttactctcatagtgaca

SEQ ID NO: 409362 - DNA, 25 bp, Artificial
  probe
  misc_feature (1)..(25): SEQ ID NO: 5398; WAN024G99; Start 111; Stop 135
caatgatatcctgaacagtagtggc

SEQ ID NO: 409363 - DNA, 25 bp, Artificial
  probe
  misc_feature (1)..(25): SEQ ID NO: 5398; WAN024G99; Start 110; Stop 134
tcaatgatatcctgaacagtagtgg

SEQ ID NO: 409364 - DNA, 25 bp, Artificial
  probe
  misc_feature (1)..(25): SEQ ID NO: 5398; WAN024G99; Start 105; Stop 129
cgagatcaatgatatcctgaacagt

SEQ ID NO: 409365 - DNA, 25 bp, Artificial
  probe
  misc_feature (1)..(25): SEQ ID NO: 5398; WAN024G99; Start 104; Stop 128
gcgagatcaatgatatcctgaacag

SEQ ID NO: 409366 - DNA, 25 bp, Artificial
  probe
  misc_feature (1)..(25): SEQ ID NO: 5398; WAN024G99; Start 102; Stop 126
ctgcgagatcaatgatatcctgaac

SEQ ID NO: 409367 - DNA, 25 bp, Artificial
  probe
  misc_feature (1)..(25): SEQ ID NO: 5398; WAN024G99; Start 101; Stop 125
tctgcgagatcaatgatatcctgaa

SEQ ID NO: 409368 - DNA, 25 bp, Artificial
  probe
  misc_feature (1)..(25): SEQ ID NO: 5398; WAN024G99; Start 56; Stop 80
agctccttactctcatagtgacagt

SEQ ID NO: 409369 - DNA, 25 bp, Artificial
  probe
  misc_feature (1)..(25): SEQ ID NO: 5398; WAN024G99; Start 47; Stop 71
tccagaagaagctccttactctcat

SEQ ID NO: 409370 - DNA, 25 bp, Artificial
  probe
  misc_feature (1)..(25): SEQ ID NO: 5398; WAN024G99; Start 207; Stop 231
ggtcaatgttagtcatatggacact

SEQ ID NO: 409371 - DNA, 25 bp, Artificial
  probe
  misc_feature (1)..(25): SEQ ID NO: 5398; WAN024G99; Start 109; Stop 133
atcaatgatatcctgaacagtagtg

SEQ ID NO: 409372 - DNA, 25 bp, Artificial
  probe
  misc_feature (1)..(25): SEQ ID NO: 5398; WAN024G99; Start 103; Stop 127
tgcgagatcaatgatatcctgaaca

SEQ ID NO: 409373 - DNA, 25 bp, Artificial
  probe
  misc_feature (1)..(25): SEQ ID NO: 5398; WAN024G99; Start 208; Stop 232
gtcaatgttagtcatatggacactt

SEQ ID NO: 409374 - DNA, 25 bp, Artificial
  probe
  misc_feature (1)..(25): SEQ ID NO: 5398; WAN024G99; Start 108; Stop 132
gatcaatgatatcctgaacagtagt

SEQ ID NO: 409375 - DNA, 25 bp, Artificial
  probe
  misc_feature (1)..(25): SEQ ID NO: 5398; WAN024G99; Start 206; Stop 230
cggtcaatgttagtcatatggacac

SEQ ID NO: 409376 - DNA, 25 bp, Artificial
  probe
  misc_feature (1)..(25): SEQ ID NO: 5398; WAN024G99; Start 107; Stop 131
agatcaatgatatcctgaacagtag

SEQ ID NO: 409377 - DNA, 25 bp, Artificial
  probe
  misc_feature (1)..(25): SEQ ID NO: 5398; WAN024G99; Start 106; Stop 130
gagatcaatgatatcctgaacagta

SEQ ID NO: 409378 - DNA, 25 bp, Artificial
  probe
  misc_feature (1)..(25): SEQ ID NO: 5398; WAN024G99; Start 100; Stop 124
atctgcgagatcaatgatatcctga

SEQ ID NO: 409379 - DNA, 25 bp, Artificial
  probe
  misc_feature (1)..(25): SEQ ID NO: 5398; WAN024G99; Start 99; Stop 123
catctgcgagatcaatgatatcctg

SEQ ID NO: 409380 - DNA, 25 bp, Artificial
  probe
  misc_feature (1)..(25): SEQ ID NO: 5398; WAN024G99; Start 46; Stop 70
gtccagaagaagctccttactctca

SEQ ID NO: 409381 - DNA, 25 bp, Artificial
  probe
  misc_feature (1)..(25): SEQ ID NO: 5398; WAN024G99; Start 112; Stop 136
aatgatatcctgaacagtagtggcc

SEQ ID NO: 409382 - DNA, 25 bp, Artificial
  probe
  misc_feature (1)..(25): SEQ ID NO: 5398; WAN024G99; Start 97; Stop 121
cacatctgcgagatcaatgatatcc

SEQ ID NO: 409383 - DNA, 25 bp, Artificial
  probe
  misc_feature (1)..(25): SEQ ID NO: 5398; WAN024G99; Start 96; Stop 120
ccacatctgcgagatcaatgatatc

SEQ ID NO: 409384 - DNA, 25 bp, Artificial
  probe
  misc_feature (1)..(25): SEQ ID NO: 5399; WAN024DZ9; Start 194; Stop 218
atgatacgagttccttcttggataa

SEQ ID NO: 409385 - DNA, 25 bp, Artificial
  probe
  misc_feature (1)..(25): SEQ ID NO: 5399; WAN024DZ9; Start 193; Stop 217
catgatacgagttccttcttggata

SEQ ID NO: 409386 - DNA, 25 bp, Artificial
  probe
  misc_feature (1)..(25): SEQ ID NO: 5399; WAN024DZ9; Start 192; Stop 216
acatgatacgagttccttcttggat

SEQ ID NO: 409387 - DNA, 25 bp, Artificial
  probe
  misc_feature (1)..(25): SEQ ID NO: 5399; WAN024DZ9; Start 191; Stop 215
aacatgatacgagttccttcttgga

SEQ ID NO: 409388 - DNA, 25 bp, Artificial
  probe
  misc_feature (1)..(25): SEQ ID NO: 5399; WAN024DZ9; Start 189; Stop 213
caaacatgatacgagttccttcttg

SEQ ID NO: 409389 - DNA, 25 bp, Artificial
  probe
  misc_feature (1)..(25): SEQ ID NO: 5399; WAN024DZ9; Start 188; Stop 212
tcaaacatgatacgagttccttctt

SEQ ID NO: 409390 - DNA, 25 bp, Artificial
  probe
  misc_feature (1)..(25): SEQ ID NO: 5399; WAN024DZ9; Start 187; Stop 211
ttcaaacatgatacgagttccttct

SEQ ID NO: 409391 - DNA, 25 bp, Artificial
  probe
  misc_feature (1)..(25): SEQ ID NO: 5399; WAN024DZ9; Start 185; Stop 209
gtttcaaacatgatacgagttcctt

SEQ ID NO: 409392 - DNA, 25 bp, Artificial
  probe
  misc_feature (1)..(25): SEQ ID NO: 5399; WAN024DZ9; Start 186; Stop 210
tttcaaacatgatacgagttccttc

SEQ ID NO: 409393 - DNA, 25 bp, Artificial
  probe
  misc_feature (1)..(25): SEQ ID NO: 5399; WAN024DZ9; Start 190; Stop 214
aaacatgatacgagttccttcttgg

SEQ ID NO: 409394 - DNA, 25 bp, Artificial
  probe
  misc_feature (1)..(25): SEQ ID NO: 5399; WAN024DZ9; Start 200; Stop 224
cgagttccttcttggataaattgac

SEQ ID NO: 409395 - DNA, 25 bp, Artificial
  probe
  misc_feature (1)..(25): SEQ ID NO: 5399; WAN024DZ9; Start 199; Stop 223
acgagttccttcttggataaattga

SEQ ID NO: 409396 - DNA, 25 bp, Artificial
  probe
  misc_feature (1)..(25): SEQ ID NO: 5399; WAN024DZ9; Start 201; Stop 225
gagttccttcttggataaattgacc

SEQ ID NO: 409397 - DNA, 25 bp, Artificial
  probe
  misc_feature (1)..(25): SEQ ID NO: 5399; WAN024DZ9; Start 195; Stop 219
tgatacgagttccttcttggataaa

SEQ ID NO: 409398 - DNA, 25 bp, Artificial
  probe
  misc_feature (1)..(25): SEQ ID NO: 5399; WAN024DZ9; Start 202; Stop 226
agttccttcttggataaattgacca

SEQ ID NO: 409399 - DNA, 25 bp, Artificial
  probe
  misc_feature (1)..(25): SEQ ID NO: 5399; WAN024DZ9; Start 198; Stop 222
tacgagttccttcttggataaattg

SEQ ID NO: 409400 - DNA, 25 bp, Artificial
  probe
  misc_feature (1)..(25): SEQ ID NO: 5399; WAN024DZ9; Start 196; Stop 220
gatacgagttccttcttggataaat

SEQ ID NO: 409401 - DNA, 25 bp, Artificial
  probe
  misc_feature (1)..(25): SEQ ID NO: 5399; WAN024DZ9; Start 121; Stop 145
gtcaaggtcttcttccaaagtagga

SEQ ID NO: 409402 - DNA, 25 bp, Artificial
  probe
  misc_feature (1)..(25): SEQ ID NO: 5399; WAN024DZ9; Start 197; Stop 221
atacgagttccttcttggataaatt

SEQ ID NO: 409403 - DNA, 25 bp, Artificial
  probe
  misc_feature (1)..(25): SEQ ID NO: 5399; WAN024DZ9; Start 120; Stop 144
cgtcaaggtcttcttccaaagtagg

SEQ ID NO: 409404 - DNA, 25 bp, Artificial
  probe
  misc_feature (1)..(25): SEQ ID NO: 5399; WAN024DZ9; Start 119; Stop 143
ccgtcaaggtcttcttccaaagtag

SEQ ID NO: 409405 - DNA, 25 bp, Artificial
  probe
  misc_feature (1)..(25): SEQ ID NO: 5399; WAN024DZ9; Start 110; Stop 134
taaccaagtccgtcaaggtcttctt

SEQ ID NO: 409406 - DNA, 25 bp, Artificial
  probe
  misc_feature (1)..(25): SEQ ID NO: 5399; WAN024DZ9; Start 118; Stop 142
tccgtcaaggtcttcttccaaagta

SEQ ID NO: 409407 - DNA, 25 bp, Artificial
  probe
  misc_feature (1)..(25): SEQ ID NO: 5399; WAN024DZ9; Start 1; Stop 25
ttgctctggaagagtcacatacatg

SEQ ID NO: 409408 - DNA, 25 bp, Artificial
  probe
  misc_feature (1)..(25): SEQ ID NO: 5399; WAN024DZ9; Start 114; Stop 138
caagtccgtcaaggtcttcttccaa

SEQ ID NO: 409409 - DNA, 25 bp, Artificial
  probe
  misc_feature (1)..(25): SEQ ID NO: 5399; WAN024DZ9; Start 109; Stop 133
gtaaccaagtccgtcaaggtcttct

SEQ ID NO: 409410 - DNA, 25 bp, Artificial
  probe
  misc_feature (1)..(25): SEQ ID NO: 5399; WAN024DZ9; Start 115; Stop 139
aagtccgtcaaggtcttcttccaaa

SEQ ID NO: 409411 - DNA, 25 bp, Artificial
  probe
  misc_feature (1)..(25): SEQ ID NO: 5399; WAN024DZ9; Start 51; Stop 75
caagaagaacaccgtcagttgcttt

SEQ ID NO: 409412 - DNA, 25 bp, Artificial
  probe
  misc_feature (1)..(25): SEQ ID NO: 5399; WAN024DZ9; Start 182; Stop 206
actgtttcaaacatgatacgagttc

SEQ ID NO: 409413 - DNA, 25 bp, Artificial
  probe
  misc_feature (1)..(25): SEQ ID NO: 5399; WAN024DZ9; Start 180; Stop 204
caactgtttcaaacatgatacgagt

SEQ ID NO: 409414 - DNA, 25 bp, Artificial
  probe
  misc_feature (1)..(25): SEQ ID NO: 5399; WAN024DZ9; Start 179; Stop 203
acaactgtttcaaacatgatacgag

SEQ ID NO: 409415 - DNA, 25 bp, Artificial
  probe
  misc_feature (1)..(25): SEQ ID NO: 5399; WAN024DZ9; Start 178; Stop 202
gacaactgtttcaaacatgatacga

SEQ ID NO: 409416 - DNA, 25 bp, Artificial
  probe
  misc_feature (1)..(25): SEQ ID NO: 5399; WAN024DZ9; Start 183; Stop 207
ctgtttcaaacatgatacgagttcc

SEQ ID NO: 409417 - DNA, 25 bp, Artificial
  probe
  misc_feature (1)..(25): SEQ ID NO: 5400; WAN024GB2; Start 90; Stop 114
caaaggtaaaggcaagaaagaagaa

SEQ ID NO: 409418 - DNA, 25 bp, Artificial
  probe
  misc_feature (1)..(25): SEQ ID NO: 5400; WAN024GB2; Start 91; Stop 115
aaaggtaaaggcaagaaagaagaag

SEQ ID NO: 409419 - DNA, 25 bp, Artificial
  probe
  misc_feature (1)..(25): SEQ ID NO: 5400; WAN024GB2; Start 164; Stop 188
tcgtctatcatttcatcatcggtat

SEQ ID NO: 409420 - DNA, 25 bp, Artificial
  probe
  misc_feature (1)..(25): SEQ ID NO: 5400; WAN024GB2; Start 92; Stop 116
aaggtaaaggcaagaaagaagaagt

SEQ ID NO: 409421 - DNA, 25 bp, Artificial
  probe
  misc_feature (1)..(25): SEQ ID NO: 5400; WAN024GB2; Start 165; Stop 189
cgtctatcatttcatcatcggtatc

SEQ ID NO: 409422 - DNA, 25 bp, Artificial
  probe
  misc_feature (1)..(25): SEQ ID NO: 5400; WAN024GB2; Start 93; Stop 117
aggtaaaggcaagaaagaagaagtg

SEQ ID NO: 409423 - DNA, 25 bp, Artificial
  probe
  misc_feature (1)..(25): SEQ ID NO: 5400; WAN024GB2; Start 89; Stop 113
ccaaaggtaaaggcaagaaagaaga

SEQ ID NO: 409424 - DNA, 25 bp, Artificial
  probe
  misc_feature (1)..(25): SEQ ID NO: 5400; WAN024GB2; Start 88; Stop 112
tccaaaggtaaaggcaagaaagaag

SEQ ID NO: 409425 - DNA, 25 bp, Artificial
  probe
  misc_feature (1)..(25): SEQ ID NO: 5400; WAN024GB2; Start 87; Stop 111
gtccaaaggtaaaggcaagaaagaa

SEQ ID NO: 409426 - DNA, 25 bp, Artificial
  probe
  misc_feature (1)..(25): SEQ ID NO: 5400; WAN024GB2; Start 85; Stop 109
atgtccaaaggtaaaggcaagaaag

SEQ ID NO: 409427 - DNA, 25 bp, Artificial
  probe
  misc_feature (1)..(25): SEQ ID NO: 5400; WAN024GB2; Start 84; Stop 108
gatgtccaaaggtaaaggcaagaaa

SEQ ID NO: 409428 - DNA, 25 bp, Artificial
  probe
  misc_feature (1)..(25): SEQ ID NO: 5400; WAN024GB2; Start 38; Stop 62
tagtcgaggcaggtcatgtctatat

SEQ ID NO: 409429 - DNA, 25 bp, Artificial
  probe
  misc_feature (1)..(25): SEQ ID NO: 5400; WAN024GB2; Start 94; Stop 118
ggtaaaggcaagaaagaagaagtgg

SEQ ID NO: 409430 - DNA, 25 bp, Artificial
  probe
  misc_feature (1)..(25): SEQ ID NO: 5400; WAN024GB2; Start 57; Stop 81
ctatattgccctcccacctctttac

SEQ ID NO: 409431 - DNA, 25 bp, Artificial
  probe
  misc_feature (1)..(25): SEQ ID NO: 5400; WAN024GB2; Start 83; Stop 107
agatgtccaaaggtaaaggcaagaa

SEQ ID NO: 409432 - DNA, 25 bp, Artificial
  probe
  misc_feature (1)..(25): SEQ ID NO: 5400; WAN024GB2; Start 82; Stop 106
aagatgtccaaaggtaaaggcaaga

SEQ ID NO: 409433 - DNA, 25 bp, Artificial
  probe
  misc_feature (1)..(25): SEQ ID NO: 5400; WAN024GB2; Start 81; Stop 105
caagatgtccaaaggtaaaggcaag

SEQ ID NO: 409434 - DNA, 25 bp, Artificial
  probe
  misc_feature (1)..(25): SEQ ID NO: 5400; WAN024GB2; Start 37; Stop 61
ctagtcgaggcaggtcatgtctata

SEQ ID NO: 409435 - DNA, 25 bp, Artificial
  probe
  misc_feature (1)..(25): SEQ ID NO: 5400; WAN024GB2; Start 95; Stop 119
gtaaaggcaagaaagaagaagtggc

SEQ ID NO: 409436 - DNA, 25 bp, Artificial
  probe
  misc_feature (1)..(25): SEQ ID NO: 5400; WAN024GB2; Start 86; Stop 110
tgtccaaaggtaaaggcaagaaaga

SEQ ID NO: 409437 - DNA, 25 bp, Artificial
  probe
  misc_feature (1)..(25): SEQ ID NO: 5400; WAN024GB2; Start 40; Stop 64
gtcgaggcaggtcatgtctatattg

SEQ ID NO: 409438 - DNA, 25 bp, Artificial
  probe
  misc_feature (1)..(25): SEQ ID NO: 5400; WAN024GB2; Start 39; Stop 63
agtcgaggcaggtcatgtctatatt

SEQ ID NO: 409439 - DNA, 25 bp, Artificial
  probe
  misc_feature (1)..(25): SEQ ID NO: 5400; WAN024GB2; Start 78; Stop 102
ttacaagatgtccaaaggtaaaggc

SEQ ID NO: 409440 - DNA, 25 bp, Artificial
  probe
  misc_feature (1)..(25): SEQ ID NO: 5400; WAN024GB2; Start 58; Stop 82
tatattgccctcccacctctttaca

SEQ ID NO: 409441 - DNA, 25 bp, Artificial
  probe
  misc_feature (1)..(25): SEQ ID NO: 5400; WAN024GB2; Start 79; Stop 103
tacaagatgtccaaaggtaaaggca

SEQ ID NO: 409442 - DNA, 25 bp, Artificial
  probe
  misc_feature (1)..(25): SEQ ID NO: 5400; WAN024GB2; Start 73; Stop 97
cctctttacaagatgtccaaaggta

SEQ ID NO: 409443 - DNA, 25 bp, Artificial
  probe
  misc_feature (1)..(25): SEQ ID NO: 5400; WAN024GB2; Start 80; Stop 104
acaagatgtccaaaggtaaaggcaa

SEQ ID NO: 409444 - DNA, 25 bp, Artificial
  probe
  misc_feature (1)..(25): SEQ ID NO: 5400; WAN024GB2; Start 74; Stop 98
ctctttacaagatgtccaaaggtaa

SEQ ID NO: 409445 - DNA, 25 bp, Artificial
  probe
  misc_feature (1)..(25): SEQ ID NO: 5400; WAN024GB2; Start 71; Stop 95
cacctctttacaagatgtccaaagg

SEQ ID NO: 409446 - DNA, 25 bp, Artificial
  probe
  misc_feature (1)..(25): SEQ ID NO: 5400; WAN024GB2; Start 70; Stop 94
ccacctctttacaagatgtccaaag

SEQ ID NO: 409447 - DNA, 25 bp, Artificial
  probe
  misc_feature (1)..(25): SEQ ID NO: 5400; WAN024GB2; Start 59; Stop 83
atattgccctcccacctctttacaa

SEQ ID NO: 409448 - DNA, 25 bp, Artificial
  probe
  misc_feature (1)..(25): SEQ ID NO: 5400; WAN024GB2; Start 69; Stop 93
cccacctctttacaagatgtccaaa

SEQ ID NO: 409449 - DNA, 25 bp, Artificial
  probe
  misc_feature (1)..(25): SEQ ID NO: 5400; WAN024GB2; Start 60; Stop 84
tattgccctcccacctctttacaag

SEQ ID NO: 409450 - DNA, 25 bp, Artificial
  probe
  misc_feature (1)..(25): SEQ ID NO: 5401; WAN024D6D; Start 139; Stop 163
ttccgttcttctatctctccttcta

SEQ ID NO: 409451 - DNA, 25 bp, Artificial
  probe
  misc_feature (1)..(25): SEQ ID NO: 5401; WAN024D6D; Start 140; Stop 164
tccgttcttctatctctccttctat

SEQ ID NO: 409452 - DNA, 25 bp, Artificial
  probe
  misc_feature (1)..(25): SEQ ID NO: 5401; WAN024D6D; Start 141; Stop 165
ccgttcttctatctctccttctatc

SEQ ID NO: 409453 - DNA, 25 bp, Artificial
  probe
  misc_feature (1)..(25): SEQ ID NO: 5401; WAN024D6D; Start 145; Stop 169
tcttctatctctccttctatcacct

SEQ ID NO: 409454 - DNA, 25 bp, Artificial
  probe
  misc_feature (1)..(25): SEQ ID NO: 5401; WAN024D6D; Start 142; Stop 166
cgttcttctatctctccttctatca

SEQ ID NO: 409455 - DNA, 25 bp, Artificial
  probe
  misc_feature (1)..(25): SEQ ID NO: 5401; WAN024D6D; Start 144; Stop 168
ttcttctatctctccttctatcacc

SEQ ID NO: 409456 - DNA, 25 bp, Artificial
  probe
  misc_feature (1)..(25): SEQ ID NO: 5401; WAN024D6D; Start 146; Stop 170
cttctatctctccttctatcaccta

SEQ ID NO: 409457 - DNA, 25 bp, Artificial
  probe
  misc_feature (1)..(25): SEQ ID NO: 5401; WAN024D6D; Start 143; Stop 167
gttcttctatctctccttctatcac

SEQ ID NO: 409458 - DNA, 25 bp, Artificial
  probe
  misc_feature (1)..(25): SEQ ID NO: 5401; WAN024D6D; Start 147; Stop 171
ttctatctctccttctatcacctaa

SEQ ID NO: 409459 - DNA, 25 bp, Artificial
  probe
  misc_feature (1)..(25): SEQ ID NO: 5401; WAN024D6D; Start 47; Stop 71
gtaccagtgtatgtgatacgagttc

SEQ ID NO: 409460 - DNA, 25 bp, Artificial
  probe
  misc_feature (1)..(25): SEQ ID NO: 5401; WAN024D6D; Start 48; Stop 72
taccagtgtatgtgatacgagttcc

SEQ ID NO: 409461 - DNA, 25 bp, Artificial
  probe
  misc_feature (1)..(25): SEQ ID NO: 5401; WAN024D6D; Start 133; Stop 157
tatggtttccgttcttctatctctc

SEQ ID NO: 409462 - DNA, 25 bp, Artificial
  probe
  misc_feature (1)..(25): SEQ ID NO: 5401; WAN024D6D; Start 69; Stop 93
ttccaccgtttatctttcgtatctt

SEQ ID NO: 409463 - DNA, 25 bp, Artificial
  probe
  misc_feature (1)..(25): SEQ ID NO: 5401; WAN024D6D; Start 125; Stop 149
ggttacaatatggtttccgttcttc

SEQ ID NO: 409464 - DNA, 25 bp, Artificial
  probe
  misc_feature (1)..(25): SEQ ID NO: 5401; WAN024D6D; Start 72; Stop 96
caccgtttatctttcgtatcttcaa

SEQ ID NO: 409465 - DNA, 25 bp, Artificial
  probe
  misc_feature (1)..(25): SEQ ID NO: 5401; WAN024D6D; Start 138; Stop 162
tttccgttcttctatctctccttct

SEQ ID NO: 409466 - DNA, 25 bp, Artificial
  probe
  misc_feature (1)..(25): SEQ ID NO: 5401; WAN024D6D; Start 137; Stop 161
gtttccgttcttctatctctccttc

SEQ ID NO: 409467 - DNA, 25 bp, Artificial
  probe
  misc_feature (1)..(25): SEQ ID NO: 5401; WAN024D6D; Start 70; Stop 94
tccaccgtttatctttcgtatcttc

SEQ ID NO: 409468 - DNA, 25 bp, Artificial
  probe
  misc_feature (1)..(25): SEQ ID NO: 5401; WAN024D6D; Start 126; Stop 150
gttacaatatggtttccgttcttct

SEQ ID NO: 409469 - DNA, 25 bp, Artificial
  probe
  misc_feature (1)..(25): SEQ ID NO: 5401; WAN024D6D; Start 71; Stop 95
ccaccgtttatctttcgtatcttca

SEQ ID NO: 409470 - DNA, 25 bp, Artificial
  probe
  misc_feature (1)..(25): SEQ ID NO: 5401; WAN024D6D; Start 68; Stop 92
gttccaccgtttatctttcgtatct

SEQ ID NO: 409471 - DNA, 25 bp, Artificial
  probe
  misc_feature (1)..(25): SEQ ID NO: 5401; WAN024D6D; Start 67; Stop 91
agttccaccgtttatctttcgtatc

SEQ ID NO: 409472 - DNA, 25 bp, Artificial
  probe
  misc_feature (1)..(25): SEQ ID NO: 5401; WAN024D6D; Start 66; Stop 90
gagttccaccgtttatctttcgtat

SEQ ID NO: 409473 - DNA, 25 bp, Artificial
  probe
  misc_feature (1)..(25): SEQ ID NO: 5401; WAN024D6D; Start 132; Stop 156
atatggtttccgttcttctatctct

SEQ ID NO: 409474 - DNA, 25 bp, Artificial
  probe
  misc_feature (1)..(25): SEQ ID NO: 5401; WAN024D6D; Start 129; Stop 153
acaatatggtttccgttcttctatc

SEQ ID NO: 409475 - DNA, 25 bp, Artificial
  probe
  misc_feature (1)..(25): SEQ ID NO: 5401; WAN024D6D; Start 118; Stop 142
gtctttgggttacaatatggtttcc

SEQ ID NO: 409476 - DNA, 25 bp, Artificial
  probe
  misc_feature (1)..(25): SEQ ID NO: 5401; WAN024D6D; Start 130; Stop 154
caatatggtttccgttcttctatct

SEQ ID NO: 409477 - DNA, 25 bp, Artificial
  probe
  misc_feature (1)..(25): SEQ ID NO: 5401; WAN024D6D; Start 124; Stop 148
gggttacaatatggtttccgttctt

SEQ ID NO: 409478 - DNA, 25 bp, Artificial
  probe
  misc_feature (1)..(25): SEQ ID NO: 5401; WAN024D6D; Start 73; Stop 97
accgtttatctttcgtatcttcaat

SEQ ID NO: 409479 - DNA, 25 bp, Artificial
  probe
  misc_feature (1)..(25): SEQ ID NO: 5401; WAN024D6D; Start 75; Stop 99
cgtttatctttcgtatcttcaatgg

SEQ ID NO: 409480 - DNA, 25 bp, Artificial
  probe
  misc_feature (1)..(25): SEQ ID NO: 5401; WAN024D6D; Start 74; Stop 98
ccgtttatctttcgtatcttcaatg

SEQ ID NO: 409481 - DNA, 25 bp, Artificial
  probe
  misc_feature (1)..(25): SEQ ID NO: 5401; WAN024D6D; Start 117; Stop 141
agtctttgggttacaatatggtttc

SEQ ID NO: 409482 - DNA, 25 bp, Artificial
  probe
  misc_feature (1)..(25): SEQ ID NO: 5401; WAN024D6D; Start 131; Stop 155
aatatggtttccgttcttctatctc

SEQ ID NO: 409483 - DNA, 25 bp, Artificial
  probe
  misc_feature (1)..(25): SEQ ID NO: 5402; WAN024GJ7; Start 331; Stop 355
tttcttttctgcacttacttttggt

SEQ ID NO: 409484 - DNA, 25 bp, Artificial
  probe
  misc_feature (1)..(25): SEQ ID NO: 5402; WAN024GJ7; Start 323; Stop 347
ttttcggttttcttttctgcactta

SEQ ID NO: 409485 - DNA, 25 bp, Artificial
  probe
  misc_feature (1)..(25): SEQ ID NO: 5402; WAN024GJ7; Start 327; Stop 351
cggttttcttttctgcacttacttt

SEQ ID NO: 409486 - DNA, 25 bp, Artificial
  probe
  misc_feature (1)..(25): SEQ ID NO: 5402; WAN024GJ7; Start 324; Stop 348
tttcggttttcttttctgcacttac

SEQ ID NO: 409487 - DNA, 25 bp, Artificial
  probe
  misc_feature (1)..(25): SEQ ID NO: 5402; WAN024GJ7; Start 330; Stop 354
ttttcttttctgcacttacttttgg

SEQ ID NO: 409488 - DNA, 25 bp, Artificial
  probe
  misc_feature (1)..(25): SEQ ID NO: 5402; WAN024GJ7; Start 328; Stop 352
ggttttcttttctgcacttactttt

SEQ ID NO: 409489 - DNA, 25 bp, Artificial
  probe
  misc_feature (1)..(25): SEQ ID NO: 5402; WAN024GJ7; Start 326; Stop 350
tcggttttcttttctgcacttactt

SEQ ID NO: 409490 - DNA, 25 bp, Artificial
  probe
  misc_feature (1)..(25): SEQ ID NO: 5402; WAN024GJ7; Start 325; Stop 349
ttcggttttcttttctgcacttact

SEQ ID NO: 409491 - DNA, 25 bp, Artificial
  probe
  misc_feature (1)..(25): SEQ ID NO: 5402; WAN024GJ7; Start 329; Stop 353
gttttcttttctgcacttacttttg

SEQ ID NO: 409492 - DNA, 25 bp, Artificial
  probe
  misc_feature (1)..(25): SEQ ID NO: 5402; WAN024GJ7; Start 332; Stop 356
ttcttttctgcacttacttttggtg

SEQ ID NO: 409493 - DNA, 25 bp, Artificial
  probe
  misc_feature (1)..(25): SEQ ID NO: 5402; WAN024GJ7; Start 214; Stop 238
cttgaaattacggctttgcggtttc

SEQ ID NO: 409494 - DNA, 25 bp, Artificial
  probe
  misc_feature (1)..(25): SEQ ID NO: 5402; WAN024GJ7; Start 213; Stop 237
ccttgaaattacggctttgcggttt

SEQ ID NO: 409495 - DNA, 25 bp, Artificial
  probe
  misc_feature (1)..(25): SEQ ID NO: 5402; WAN024GJ7; Start 90; Stop 114
cttgttttccaccattacggccatc

SEQ ID NO: 409496 - DNA, 25 bp, Artificial
  probe
  misc_feature (1)..(25): SEQ ID NO: 5402; WAN024GJ7; Start 277; Stop 301
cggttttgcctcttccttagctaca

SEQ ID NO: 409497 - DNA, 25 bp, Artificial
  probe
  misc_feature (1)..(25): SEQ ID NO: 5403; WAN024GJ2; Start 215; Stop 239
ttgaaattacgactttgcggtttag

SEQ ID NO: 409498 - DNA, 25 bp, Artificial
  probe
  misc_feature (1)..(25): SEQ ID NO: 5403; WAN024GJ2; Start 214; Stop 238
cttgaaattacgactttgcggttta

SEQ ID NO: 409499 - DNA, 25 bp, Artificial
  probe
  misc_feature (1)..(25): SEQ ID NO: 5403; WAN024GJ2; Start 216; Stop 240
tgaaattacgactttgcggtttagc

SEQ ID NO: 409500 - DNA, 25 bp, Artificial
  probe
  misc_feature (1)..(25): SEQ ID NO: 5403; WAN024GJ2; Start 213; Stop 237
ccttgaaattacgactttgcggttt

SEQ ID NO: 409501 - DNA, 25 bp, Artificial
  probe
  misc_feature (1)..(25): SEQ ID NO: 5403; WAN024GJ2; Start 208; Stop 232
ctcagccttgaaattacgactttgc

SEQ ID NO: 409502 - DNA, 25 bp, Artificial
  probe
  misc_feature (1)..(25): SEQ ID NO: 5403; WAN024GJ2; Start 217; Stop 241
gaaattacgactttgcggtttagcc

SEQ ID NO: 409503 - DNA, 25 bp, Artificial
  probe
  misc_feature (1)..(25): SEQ ID NO: 5403; WAN024GJ2; Start 207; Stop 231
gctcagccttgaaattacgactttg

SEQ ID NO: 409504 - DNA, 25 bp, Artificial
  probe
  misc_feature (1)..(25): SEQ ID NO: 5403; WAN024GJ2; Start 316; Stop 340
ttcagacttttcggctttcttttct

SEQ ID NO: 409505 - DNA, 25 bp, Artificial
  probe
  misc_feature (1)..(25): SEQ ID NO: 5403; WAN024GJ2; Start 315; Stop 339
gttcagacttttcggctttcttttc

SEQ ID NO: 409506 - DNA, 25 bp, Artificial
  probe
  misc_feature (1)..(25): SEQ ID NO: 5403; WAN024GJ2; Start 303; Stop 327
ctggttttactggttcagacttttc

SEQ ID NO: 409507 - DNA, 25 bp, Artificial
  probe
  misc_feature (1)..(25): SEQ ID NO: 5403; WAN024GJ2; Start 304; Stop 328
tggttttactggttcagacttttcg

SEQ ID NO: 409508 - DNA, 25 bp, Artificial
  probe
  misc_feature (1)..(25): SEQ ID NO: 5403; WAN024GJ2; Start 314; Stop 338
ggttcagacttttcggctttctttt

SEQ ID NO: 409509 - DNA, 25 bp, Artificial
  probe
  misc_feature (1)..(25): SEQ ID NO: 5403; WAN024GJ2; Start 413; Stop 437
gctttcttttctgcacttacttttg

SEQ ID NO: 409510 - DNA, 25 bp, Artificial
  probe
  misc_feature (1)..(25): SEQ ID NO: 5403; WAN024GJ2; Start 415; Stop 439
tttcttttctgcacttacttttggg

SEQ ID NO: 409511 - DNA, 25 bp, Artificial
  probe
  misc_feature (1)..(25): SEQ ID NO: 5403; WAN024GJ2; Start 302; Stop 326
gctggttttactggttcagactttt

SEQ ID NO: 409512 - DNA, 25 bp, Artificial
  probe
  misc_feature (1)..(25): SEQ ID NO: 5403; WAN024GJ2; Start 414; Stop 438
ctttcttttctgcacttacttttgg

SEQ ID NO: 409513 - DNA, 25 bp, Artificial
  probe
  misc_feature (1)..(25): SEQ ID NO: 5403; WAN024GJ2; Start 412; Stop 436
ggctttcttttctgcacttactttt

SEQ ID NO: 409514 - DNA, 25 bp, Artificial
  probe
  misc_feature (1)..(25): SEQ ID NO: 5403; WAN024GJ2; Start 206; Stop 230
cgctcagccttgaaattacgacttt

SEQ ID NO: 409515 - DNA, 25 bp, Artificial
  probe
  misc_feature (1)..(25): SEQ ID NO: 5403; WAN024GJ2; Start 305; Stop 329
ggttttactggttcagacttttcgg

SEQ ID NO: 409516 - DNA, 25 bp, Artificial
  probe
  misc_feature (1)..(25): SEQ ID NO: 5403; WAN024GJ2; Start 209; Stop 233
tcagccttgaaattacgactttgcg

SEQ ID NO: 409517 - DNA, 25 bp, Artificial
  probe
  misc_feature (1)..(25): SEQ ID NO: 5403; WAN024GJ2; Start 416; Stop 440
ttcttttctgcacttacttttgggg

SEQ ID NO: 409518 - DNA, 25 bp, Artificial
  probe
  misc_feature (1)..(25): SEQ ID NO: 5403; WAN024GJ2; Start 407; Stop 431
ttttcggctttcttttctgcactta

SEQ ID NO: 409519 - DNA, 25 bp, Artificial
  probe
  misc_feature (1)..(25): SEQ ID NO: 5403; WAN024GJ2; Start 330; Stop 354
ctttcttttctgcacttgcttttgg

SEQ ID NO: 409520 - DNA, 25 bp, Artificial
  probe
  misc_feature (1)..(25): SEQ ID NO: 5403; WAN024GJ2; Start 212; Stop 236
gccttgaaattacgactttgcggtt

SEQ ID NO: 409521 - DNA, 25 bp, Artificial
  probe
  misc_feature (1)..(25): SEQ ID NO: 5403; WAN024GJ2; Start 309; Stop 333
ttactggttcagacttttcggcttt

SEQ ID NO: 409522 - DNA, 25 bp, Artificial
  probe
  misc_feature (1)..(25): SEQ ID NO: 5403; WAN024GJ2; Start 308; Stop 332
tttactggttcagacttttcggctt

SEQ ID NO: 409523 - DNA, 25 bp, Artificial
  probe
  misc_feature (1)..(25): SEQ ID NO: 5403; WAN024GJ2; Start 307; Stop 331
ttttactggttcagacttttcggct

SEQ ID NO: 409524 - DNA, 25 bp, Artificial
  probe
  misc_feature (1)..(25): SEQ ID NO: 5403; WAN024GJ2; Start 306; Stop 330
gttttactggttcagacttttcggc

SEQ ID NO: 409525 - DNA, 25 bp, Artificial
  probe
  misc_feature (1)..(25): SEQ ID NO: 5403; WAN024GJ2; Start 313; Stop 337
tggttcagacttttcggctttcttt

SEQ ID NO: 409526 - DNA, 25 bp, Artificial
  probe
  misc_feature (1)..(25): SEQ ID NO: 5403; WAN024GJ2; Start 411; Stop 435
cggctttcttttctgcacttacttt

SEQ ID NO: 409527 - DNA, 25 bp, Artificial
  probe
  misc_feature (1)..(25): SEQ ID NO: 5403; WAN024GJ2; Start 408; Stop 432
tttcggctttcttttctgcacttac

SEQ ID NO: 409528 - DNA, 25 bp, Artificial
  probe
  misc_feature (1)..(25): SEQ ID NO: 5403; WAN024GJ2; Start 329; Stop 353
gctttcttttctgcacttgcttttg

SEQ ID NO: 409529 - DNA, 25 bp, Artificial
  probe
  misc_feature (1)..(25): SEQ ID NO: 5403; WAN024GJ2; Start 310; Stop 334
tactggttcagacttttcggctttc

SEQ ID NO: 409530 - DNA, 25 bp, Artificial
  probe
  misc_feature (1)..(25): SEQ ID NO: 5404; WAN024GBZ; Start 159; Stop 183
catgataatgatggcatccttgaag

SEQ ID NO: 409531 - DNA, 25 bp, Artificial
  probe
  misc_feature (1)..(25): SEQ ID NO: 5404; WAN024GBZ; Start 160; Stop 184
atgataatgatggcatccttgaagc

SEQ ID NO: 409532 - DNA, 25 bp, Artificial
  probe
  misc_feature (1)..(25): SEQ ID NO: 5404; WAN024GBZ; Start 163; Stop 187
ataatgatggcatccttgaagctaa

SEQ ID NO: 409533 - DNA, 25 bp, Artificial
  probe
  misc_feature (1)..(25): SEQ ID NO: 5404; WAN024GBZ; Start 162; Stop 186
gataatgatggcatccttgaagcta

SEQ ID NO: 409534 - DNA, 25 bp, Artificial
  probe
  misc_feature (1)..(25): SEQ ID NO: 5404; WAN024GBZ; Start 164; Stop 188
taatgatggcatccttgaagctaac

SEQ ID NO: 409535 - DNA, 25 bp, Artificial
  probe
  misc_feature (1)..(25): SEQ ID NO: 5404; WAN024GBZ; Start 39; Stop 63
gttcataaactctgggctaaagaag

SEQ ID NO: 409536 - DNA, 25 bp, Artificial
  probe
  misc_feature (1)..(25): SEQ ID NO: 5404; WAN024GBZ; Start 38; Stop 62
ggttcataaactctgggctaaagaa

SEQ ID NO: 409537 - DNA, 25 bp, Artificial
  probe
  misc_feature (1)..(25): SEQ ID NO: 5404; WAN024GBZ; Start 40; Stop 64
ttcataaactctgggctaaagaagt

SEQ ID NO: 409538 - DNA, 25 bp, Artificial
  probe
  misc_feature (1)..(25): SEQ ID NO: 5404; WAN024GBZ; Start 161; Stop 185
tgataatgatggcatccttgaagct

SEQ ID NO: 409539 - DNA, 25 bp, Artificial
  probe
  misc_feature (1)..(25): SEQ ID NO: 5404; WAN024GBZ; Start 56; Stop 80
taaagaagttaccgagttcaccgag

SEQ ID NO: 409540 - DNA, 25 bp, Artificial
  probe
  misc_feature (1)..(25): SEQ ID NO: 5404; WAN024GBZ; Start 55; Stop 79
ctaaagaagttaccgagttcaccga

SEQ ID NO: 409541 - DNA, 25 bp, Artificial
  probe
  misc_feature (1)..(25): SEQ ID NO: 5404; WAN024GBZ; Start 4; Stop 28
ctgagagccttaaattcgataatgc

SEQ ID NO: 409542 - DNA, 25 bp, Artificial
  probe
  misc_feature (1)..(25): SEQ ID NO: 5404; WAN024GBZ; Start 10; Stop 34
gccttaaattcgataatgccatcaa

SEQ ID NO: 409543 - DNA, 25 bp, Artificial
  probe
  misc_feature (1)..(25): SEQ ID NO: 5404; WAN024GBZ; Start 7; Stop 31
agagccttaaattcgataatgccat

SEQ ID NO: 409544 - DNA, 25 bp, Artificial
  probe
  misc_feature (1)..(25): SEQ ID NO: 5404; WAN024GBZ; Start 8; Stop 32
gagccttaaattcgataatgccatc

SEQ ID NO: 409545 - DNA, 25 bp, Artificial
  probe
  misc_feature (1)..(25): SEQ ID NO: 5404; WAN024GBZ; Start 35; Stop 59
aacggttcataaactctgggctaaa

SEQ ID NO: 409546 - DNA, 25 bp, Artificial
  probe
  misc_feature (1)..(25): SEQ ID NO: 5404; WAN024GBZ; Start 34; Stop 58
aaacggttcataaactctgggctaa

SEQ ID NO: 409547 - DNA, 25 bp, Artificial
  probe
  misc_feature (1)..(25): SEQ ID NO: 5404; WAN024GBZ; Start 9; Stop 33
agccttaaattcgataatgccatca

SEQ ID NO: 409548 - DNA, 25 bp, Artificial
  probe
  misc_feature (1)..(25): SEQ ID NO: 5404; WAN024GBZ; Start 37; Stop 61
cggttcataaactctgggctaaaga

SEQ ID NO: 409549 - DNA, 25 bp, Artificial
  probe
  misc_feature (1)..(25): SEQ ID NO: 5404; WAN024GBZ; Start 85; Stop 109
gaattggtacgtccttctctagcag

SEQ ID NO: 409550 - DNA, 25 bp, Artificial
  probe
  misc_feature (1)..(25): SEQ ID NO: 5404; WAN024GBZ; Start 6; Stop 30
gagagccttaaattcgataatgcca

SEQ ID NO: 409551 - DNA, 25 bp, Artificial
  probe
  misc_feature (1)..(25): SEQ ID NO: 5404; WAN024GBZ; Start 5; Stop 29
tgagagccttaaattcgataatgcc

SEQ ID NO: 409552 - DNA, 25 bp, Artificial
  probe
  misc_feature (1)..(25): SEQ ID NO: 5404; WAN024GBZ; Start 36; Stop 60
acggttcataaactctgggctaaag

SEQ ID NO: 409553 - DNA, 25 bp, Artificial
  probe
  misc_feature (1)..(25): SEQ ID NO: 5404; WAN024GBZ; Start 11; Stop 35
ccttaaattcgataatgccatcaaa

SEQ ID NO: 409554 - DNA, 25 bp, Artificial
  probe
  misc_feature (1)..(25): SEQ ID NO: 5404; WAN024GBZ; Start 82; Stop 106
acagaattggtacgtccttctctag

SEQ ID NO: 409555 - DNA, 25 bp, Artificial
  probe
  misc_feature (1)..(25): SEQ ID NO: 5404; WAN024GBZ; Start 81; Stop 105
gacagaattggtacgtccttctcta

SEQ ID NO: 409556 - DNA, 25 bp, Artificial
  probe
  misc_feature (1)..(25): SEQ ID NO: 5404; WAN024GBZ; Start 50; Stop 74
ctgggctaaagaagttaccgagttc

SEQ ID NO: 409557 - DNA, 25 bp, Artificial
  probe
  misc_feature (1)..(25): SEQ ID NO: 5404; WAN024GBZ; Start 165; Stop 189
aatgatggcatccttgaagctaacg

SEQ ID NO: 409558 - DNA, 25 bp, Artificial
  probe
  misc_feature (1)..(25): SEQ ID NO: 5404; WAN024GBZ; Start 53; Stop 77
ggctaaagaagttaccgagttcacc

SEQ ID NO: 409559 - DNA, 25 bp, Artificial
  probe
  misc_feature (1)..(25): SEQ ID NO: 5404; WAN024GBZ; Start 52; Stop 76
gggctaaagaagttaccgagttcac

SEQ ID NO: 409560 - DNA, 25 bp, Artificial
  probe
  misc_feature (1)..(25): SEQ ID NO: 5404; WAN024GBZ; Start 23; Stop 47
taatgccatcaaaacggttcataaa

SEQ ID NO: 409561 - DNA, 25 bp, Artificial
  probe
  misc_feature (1)..(25): SEQ ID NO: 5404; WAN024GBZ; Start 21; Stop 45
gataatgccatcaaaacggttcata

SEQ ID NO: 409562 - DNA, 25 bp, Artificial
  probe
  misc_feature (1)..(25): SEQ ID NO: 5404; WAN024GBZ; Start 22; Stop 46
ataatgccatcaaaacggttcataa

SEQ ID NO: 409563 - DNA, 25 bp, Artificial
  probe
  misc_feature (1)..(25): SEQ ID NO: 5405; WAN024G2G; Start 336; Stop 360
gtatgtggacttacgatggttagag

SEQ ID NO: 409564 - DNA, 25 bp, Artificial
  probe
  misc_feature (1)..(25): SEQ ID NO: 5405; WAN024G2G; Start 765; Stop 789
gctagaagtccaagaagtagaagaa

SEQ ID NO: 409565 - DNA, 25 bp, Artificial
  probe
  misc_feature (1)..(25): SEQ ID NO: 5405; WAN024G2G; Start 337; Stop 361
tatgtggacttacgatggttagagg

SEQ ID NO: 409566 - DNA, 25 bp, Artificial
  probe
  misc_feature (1)..(25): SEQ ID NO: 5405; WAN024G2G; Start 528; Stop 552
tgcttcgtatggttatgagtatcaa

SEQ ID NO: 409567 - DNA, 25 bp, Artificial
  probe
  misc_feature (1)..(25): SEQ ID NO: 5405; WAN024G2G; Start 527; Stop 551
atgcttcgtatggttatgagtatca

SEQ ID NO: 409568 - DNA, 25 bp, Artificial
  probe
  misc_feature (1)..(25): SEQ ID NO: 5405; WAN024G2G; Start 1697; Stop 1721
aagttactcagcataattcacgcaa

SEQ ID NO: 409569 - DNA, 25 bp, Artificial
  probe
  misc_feature (1)..(25): SEQ ID NO: 5405; WAN024G2G; Start 1125; Stop 1149
tggagtagcaataacttatcgtgat

SEQ ID NO: 409570 - DNA, 25 bp, Artificial
  probe
  misc_feature (1)..(25): SEQ ID NO: 5405; WAN024G2G; Start 1124; Stop 1148
gtggagtagcaataacttatcgtga

SEQ ID NO: 409571 - DNA, 25 bp, Artificial
  probe
  misc_feature (1)..(25): SEQ ID NO: 5405; WAN024G2G; Start 533; Stop 557
cgtatggttatgagtatcaaggaga

SEQ ID NO: 409572 - DNA, 25 bp, Artificial
  probe
  misc_feature (1)..(25): SEQ ID NO: 5405; WAN024G2G; Start 532; Stop 556
tcgtatggttatgagtatcaaggag

SEQ ID NO: 409573 - DNA, 25 bp, Artificial
  probe
  misc_feature (1)..(25): SEQ ID NO: 5405; WAN024G2G; Start 334; Stop 358
gagtatgtggacttacgatggttag

SEQ ID NO: 409574 - DNA, 25 bp, Artificial
  probe
  misc_feature (1)..(25): SEQ ID NO: 5405; WAN024G2G; Start 1126; Stop 1150
ggagtagcaataacttatcgtgatg

SEQ ID NO: 409575 - DNA, 25 bp, Artificial
  probe
  misc_feature (1)..(25): SEQ ID NO: 5405; WAN024G2G; Start 529; Stop 553
gcttcgtatggttatgagtatcaag

SEQ ID NO: 409576 - DNA, 25 bp, Artificial
  probe
  misc_feature (1)..(25): SEQ ID NO: 5405; WAN024G2G; Start 768; Stop 792
agaagtccaagaagtagaagaatct

SEQ ID NO: 409577 - DNA, 25 bp, Artificial
  probe
  misc_feature (1)..(25): SEQ ID NO: 5405; WAN024G2G; Start 152; Stop 176
atcgcatcaatccaagtaaggttac

SEQ ID NO: 409578 - DNA, 25 bp, Artificial
  probe
  misc_feature (1)..(25): SEQ ID NO: 5405; WAN024G2G; Start 1131; Stop 1155
agcaataacttatcgtgatgttgat

SEQ ID NO: 409579 - DNA, 25 bp, Artificial
  probe
  misc_feature (1)..(25): SEQ ID NO: 5405; WAN024G2G; Start 335; Stop 359
agtatgtggacttacgatggttaga

SEQ ID NO: 409580 - DNA, 25 bp, Artificial
  probe
  misc_feature (1)..(25): SEQ ID NO: 5405; WAN024G2G; Start 531; Stop 555
ttcgtatggttatgagtatcaagga

SEQ ID NO: 409581 - DNA, 25 bp, Artificial
  probe
  misc_feature (1)..(25): SEQ ID NO: 5405; WAN024G2G; Start 318; Stop 342
ctcgttaagtcttgaggagtatgtg

SEQ ID NO: 409582 - DNA, 25 bp, Artificial
  probe
  misc_feature (1)..(25): SEQ ID NO: 5405; WAN024G2G; Start 1412; Stop 1436
atgttgctctacttggaagaattgg

SEQ ID NO: 409583 - DNA, 25 bp, Artificial
  probe
  misc_feature (1)..(25): SEQ ID NO: 5405; WAN024G2G; Start 530; Stop 554
cttcgtatggttatgagtatcaagg

SEQ ID NO: 409584 - DNA, 25 bp, Artificial
  probe
  misc_feature (1)..(25): SEQ ID NO: 5405; WAN024G2G; Start 320; Stop 344
cgttaagtcttgaggagtatgtgga

SEQ ID NO: 409585 - DNA, 25 bp, Artificial
  probe
  misc_feature (1)..(25): SEQ ID NO: 5405; WAN024G2G; Start 319; Stop 343
tcgttaagtcttgaggagtatgtgg

SEQ ID NO: 409586 - DNA, 25 bp, Artificial
  probe
  misc_feature (1)..(25): SEQ ID NO: 5405; WAN024G2G; Start 151; Stop 175
gatcgcatcaatccaagtaaggtta

SEQ ID NO: 409587 - DNA, 25 bp, Artificial
  probe
  misc_feature (1)..(25): SEQ ID NO: 5405; WAN024G2G; Start 1127; Stop 1151
gagtagcaataacttatcgtgatgt

SEQ ID NO: 409588 - DNA, 25 bp, Artificial
  probe
  misc_feature (1)..(25): SEQ ID NO: 5405; WAN024G2G; Start 1123; Stop 1147
ggtggagtagcaataacttatcgtg

SEQ ID NO: 409589 - DNA, 25 bp, Artificial
  probe
  misc_feature (1)..(25): SEQ ID NO: 5405; WAN024G2G; Start 537; Stop 561
tggttatgagtatcaaggagattct

SEQ ID NO: 409590 - DNA, 25 bp, Artificial
  probe
  misc_feature (1)..(25): SEQ ID NO: 5405; WAN024G2G; Start 1129; Stop 1153
gtagcaataacttatcgtgatgttg

SEQ ID NO: 409591 - DNA, 25 bp, Artificial
  probe
  misc_feature (1)..(25): SEQ ID NO: 5405; WAN024G2G; Start 520; Stop 544
gcttatcatgcttcgtatggttatg

SEQ ID NO: 409592 - DNA, 25 bp, Artificial
  probe
  misc_feature (1)..(25): SEQ ID NO: 5405; WAN024G2G; Start 1130; Stop 1154
tagcaataacttatcgtgatgttga

SEQ ID NO: 409593 - DNA, 25 bp, Artificial
  probe
  misc_feature (1)..(25): SEQ ID NO: 5405; WAN024G2G; Start 526; Stop 550
catgcttcgtatggttatgagtatc

SEQ ID NO: 409594 - DNA, 25 bp, Artificial
  probe
  misc_feature (1)..(25): SEQ ID NO: 5405; WAN024G2G; Start 519; Stop 543
tgcttatcatgcttcgtatggttat

SEQ ID NO: 409595 - DNA, 25 bp, Artificial
  probe
  misc_feature (1)..(25): SEQ ID NO: 5405; WAN024G2G; Start 518; Stop 542
atgcttatcatgcttcgtatggtta

SEQ ID NO: 409596 - DNA, 25 bp, Artificial
  probe
  misc_feature (1)..(25): SEQ ID NO: 5406; WAN024GEV; Start 104; Stop 128
tagcgattctaaggcaagtatggta

SEQ ID NO: 409597 - DNA, 25 bp, Artificial
  probe
  misc_feature (1)..(25): SEQ ID NO: 5406; WAN024GEV; Start 107; Stop 131
cgattctaaggcaagtatggtacaa

SEQ ID NO: 409598 - DNA, 25 bp, Artificial
  probe
  misc_feature (1)..(25): SEQ ID NO: 5406; WAN024GEV; Start 108; Stop 132
gattctaaggcaagtatggtacaat

SEQ ID NO: 409599 - DNA, 25 bp, Artificial
  probe
  misc_feature (1)..(25): SEQ ID NO: 5406; WAN024GEV; Start 66; Stop 90
agagactcacacaatgctccttatt

SEQ ID NO: 409600 - DNA, 25 bp, Artificial
  probe
  misc_feature (1)..(25): SEQ ID NO: 5406; WAN024GEV; Start 65; Stop 89
aagagactcacacaatgctccttat

SEQ ID NO: 409601 - DNA, 25 bp, Artificial
  probe
  misc_feature (1)..(25): SEQ ID NO: 5406; WAN024GEV; Start 59; Stop 83
ttcaagaagagactcacacaatgct

SEQ ID NO: 409602 - DNA, 25 bp, Artificial
  probe
  misc_feature (1)..(25): SEQ ID NO: 5406; WAN024GEV; Start 103; Stop 127
ttagcgattctaaggcaagtatggt

SEQ ID NO: 409603 - DNA, 25 bp, Artificial
  probe
  misc_feature (1)..(25): SEQ ID NO: 5406; WAN024GEV; Start 846; Stop 870
tctcttgattggtttggatggttat

SEQ ID NO: 409604 - DNA, 25 bp, Artificial
  probe
  misc_feature (1)..(25): SEQ ID NO: 5406; WAN024GEV; Start 110; Stop 134
ttctaaggcaagtatggtacaataa

SEQ ID NO: 409605 - DNA, 25 bp, Artificial
  probe
  misc_feature (1)..(25): SEQ ID NO: 5406; WAN024GEV; Start 64; Stop 88
gaagagactcacacaatgctcctta

SEQ ID NO: 409606 - DNA, 25 bp, Artificial
  probe
  misc_feature (1)..(25): SEQ ID NO: 5406; WAN024GEV; Start 845; Stop 869
atctcttgattggtttggatggtta

SEQ ID NO: 409607 - DNA, 25 bp, Artificial
  probe
  misc_feature (1)..(25): SEQ ID NO: 5406; WAN024GEV; Start 568; Stop 592
ctcttcttaaacagttacaaccgtg

SEQ ID NO: 409608 - DNA, 25 bp, Artificial
  probe
  misc_feature (1)..(25): SEQ ID NO: 5406; WAN024GEV; Start 571; Stop 595
ttcttaaacagttacaaccgtgatg

SEQ ID NO: 409609 - DNA, 25 bp, Artificial
  probe
  misc_feature (1)..(25): SEQ ID NO: 5406; WAN024GEV; Start 569; Stop 593
tcttcttaaacagttacaaccgtga

SEQ ID NO: 409610 - DNA, 25 bp, Artificial
  probe
  misc_feature (1)..(25): SEQ ID NO: 5406; WAN024GEV; Start 563; Stop 587
gggtcctcttcttaaacagttacaa

SEQ ID NO: 409611 - DNA, 25 bp, Artificial
  probe
  misc_feature (1)..(25): SEQ ID NO: 5406; WAN024GEV; Start 570; Stop 594
cttcttaaacagttacaaccgtgat

SEQ ID NO: 409612 - DNA, 25 bp, Artificial
  probe
  misc_feature (1)..(25): SEQ ID NO: 5406; WAN024GEV; Start 565; Stop 589
gtcctcttcttaaacagttacaacc

SEQ ID NO: 409613 - DNA, 25 bp, Artificial
  probe
  misc_feature (1)..(25): SEQ ID NO: 5406; WAN024GEV; Start 564; Stop 588
ggtcctcttcttaaacagttacaac

SEQ ID NO: 409614 - DNA, 25 bp, Artificial
  probe
  misc_feature (1)..(25): SEQ ID NO: 5406; WAN024GEV; Start 105; Stop 129
agcgattctaaggcaagtatggtac

SEQ ID NO: 409615 - DNA, 25 bp, Artificial
  probe
  misc_feature (1)..(25): SEQ ID NO: 5406; WAN024GEV; Start 598; Stop 622
ttaaccaagatgctggatgacaatc

SEQ ID NO: 409616 - DNA, 25 bp, Artificial
  probe
  misc_feature (1)..(25): SEQ ID NO: 5406; WAN024GEV; Start 566; Stop 590
tcctcttcttaaacagttacaaccg

SEQ ID NO: 409617 - DNA, 25 bp, Artificial
  probe
  misc_feature (1)..(25): SEQ ID NO: 5406; WAN024GEV; Start 848; Stop 872
tcttgattggtttggatggttatac

SEQ ID NO: 409618 - DNA, 25 bp, Artificial
  probe
  misc_feature (1)..(25): SEQ ID NO: 5406; WAN024GEV; Start 109; Stop 133
attctaaggcaagtatggtacaata

SEQ ID NO: 409619 - DNA, 25 bp, Artificial
  probe
  misc_feature (1)..(25): SEQ ID NO: 5406; WAN024GEV; Start 567; Stop 591
cctcttcttaaacagttacaaccgt

SEQ ID NO: 409620 - DNA, 25 bp, Artificial
  probe
  misc_feature (1)..(25): SEQ ID NO: 5406; WAN024GEV; Start 847; Stop 871
ctcttgattggtttggatggttata

SEQ ID NO: 409621 - DNA, 25 bp, Artificial
  probe
  misc_feature (1)..(25): SEQ ID NO: 5406; WAN024GEV; Start 703; Stop 727
gtgaaactgtctgatttggagaatt

SEQ ID NO: 409622 - DNA, 25 bp, Artificial
  probe
  misc_feature (1)..(25): SEQ ID NO: 5406; WAN024GEV; Start 106; Stop 130
gcgattctaaggcaagtatggtaca

SEQ ID NO: 409623 - DNA, 25 bp, Artificial
  probe
  misc_feature (1)..(25): SEQ ID NO: 5406; WAN024GEV; Start 60; Stop 84
tcaagaagagactcacacaatgctc

SEQ ID NO: 409624 - DNA, 25 bp, Artificial
  probe
  misc_feature (1)..(25): SEQ ID NO: 5406; WAN024GEV; Start 704; Stop 728
tgaaactgtctgatttggagaattt

SEQ ID NO: 409625 - DNA, 25 bp, Artificial
  probe
  misc_feature (1)..(25): SEQ ID NO: 5406; WAN024GEV; Start 702; Stop 726
ggtgaaactgtctgatttggagaat

SEQ ID NO: 409626 - DNA, 25 bp, Artificial
  probe
  misc_feature (1)..(25): SEQ ID NO: 5406; WAN024GEV; Start 216; Stop 240
tatcactcagccaagtctctccaat

SEQ ID NO: 409627 - DNA, 25 bp, Artificial
  probe
  misc_feature (1)..(25): SEQ ID NO: 5406; WAN024GEV; Start 58; Stop 82
tttcaagaagagactcacacaatgc

SEQ ID NO: 409628 - DNA, 25 bp, Artificial
  probe
  misc_feature (1)..(25): SEQ ID NO: 5406; WAN024GEV; Start 412; Stop 436
tttagcgtttcgtctcaacactatg

SEQ ID NO: 409629 - DNA, 25 bp, Artificial
  probe
  misc_feature (1)..(25): SEQ ID NO: 5407; WAN024GBU; Start 329; Stop 353
gtaaggatactatgactggacactg

SEQ ID NO: 409630 - DNA, 25 bp, Artificial
  probe
  misc_feature (1)..(25): SEQ ID NO: 5407; WAN024GBU; Start 326; Stop 350
ttggtaaggatactatgactggaca

SEQ ID NO: 409631 - DNA, 25 bp, Artificial
  probe
  misc_feature (1)..(25): SEQ ID NO: 5407; WAN024GBU; Start 330; Stop 354
taaggatactatgactggacactgg

SEQ ID NO: 409632 - DNA, 25 bp, Artificial
  probe
  misc_feature (1)..(25): SEQ ID NO: 5407; WAN024GBU; Start 328; Stop 352
ggtaaggatactatgactggacact

SEQ ID NO: 409633 - DNA, 25 bp, Artificial
  probe
  misc_feature (1)..(25): SEQ ID NO: 5407; WAN024GBU; Start 325; Stop 349
cttggtaaggatactatgactggac

SEQ ID NO: 409634 - DNA, 25 bp, Artificial
  probe
  misc_feature (1)..(25): SEQ ID NO: 5407; WAN024GBU; Start 324; Stop 348
tcttggtaaggatactatgactgga

SEQ ID NO: 409635 - DNA, 25 bp, Artificial
  probe
  misc_feature (1)..(25): SEQ ID NO: 5407; WAN024GBU; Start 323; Stop 347
ctcttggtaaggatactatgactgg

SEQ ID NO: 409636 - DNA, 25 bp, Artificial
  probe
  misc_feature (1)..(25): SEQ ID NO: 5407; WAN024GBU; Start 327; Stop 351
tggtaaggatactatgactggacac

SEQ ID NO: 409637 - DNA, 25 bp, Artificial
  probe
  misc_feature (1)..(25): SEQ ID NO: 5407; WAN024GBU; Start 683; Stop 707
cttatgtaggtgaaccaggtaactt

SEQ ID NO: 409638 - DNA, 25 bp, Artificial
  probe
  misc_feature (1)..(25): SEQ ID NO: 5407; WAN024GBU; Start 684; Stop 708
ttatgtaggtgaaccaggtaacttc

SEQ ID NO: 409639 - DNA, 25 bp, Artificial
  probe
  misc_feature (1)..(25): SEQ ID NO: 5407; WAN024GBU; Start 322; Stop 346
tctcttggtaaggatactatgactg

SEQ ID NO: 409640 - DNA, 25 bp, Artificial
  probe
  misc_feature (1)..(25): SEQ ID NO: 5407; WAN024GBU; Start 600; Stop 624
ggatgaattgtaccgtatctgtgaa

SEQ ID NO: 409641 - DNA, 25 bp, Artificial
  probe
  misc_feature (1)..(25): SEQ ID NO: 5407; WAN024GBU; Start 598; Stop 622
ttggatgaattgtaccgtatctgtg

SEQ ID NO: 409642 - DNA, 25 bp, Artificial
  probe
  misc_feature (1)..(25): SEQ ID NO: 5407; WAN024GBU; Start 1053; Stop 1077
gaatgaccttctcttgattactgcg

SEQ ID NO: 409643 - DNA, 25 bp, Artificial
  probe
  misc_feature (1)..(25): SEQ ID NO: 5407; WAN024GBU; Start 601; Stop 625
gatgaattgtaccgtatctgtgaat

SEQ ID NO: 409644 - DNA, 25 bp, Artificial
  probe
  misc_feature (1)..(25): SEQ ID NO: 5407; WAN024GBU; Start 321; Stop 345
atctcttggtaaggatactatgact

SEQ ID NO: 409645 - DNA, 25 bp, Artificial
  probe
  misc_feature (1)..(25): SEQ ID NO: 5407; WAN024GBU; Start 599; Stop 623
tggatgaattgtaccgtatctgtga

SEQ ID NO: 409646 - DNA, 25 bp, Artificial
  probe
  misc_feature (1)..(25): SEQ ID NO: 5407; WAN024GBU; Start 313; Stop 337
gaggaagtatctcttggtaaggata

SEQ ID NO: 409647 - DNA, 25 bp, Artificial
  probe
  misc_feature (1)..(25): SEQ ID NO: 5407; WAN024GBU; Start 1032; Stop 1056
aattatcgcagctatgagagagaat

SEQ ID NO: 409648 - DNA, 25 bp, Artificial
  probe
  misc_feature (1)..(25): SEQ ID NO: 5407; WAN024GBU; Start 876; Stop 900
tggaattgatacactattgaagact

SEQ ID NO: 409649 - DNA, 25 bp, Artificial
  probe
  misc_feature (1)..(25): SEQ ID NO: 5407; WAN024GBU; Start 1033; Stop 1057
attatcgcagctatgagagagaatg

SEQ ID NO: 409650 - DNA, 25 bp, Artificial
  probe
  misc_feature (1)..(25): SEQ ID NO: 5407; WAN024GBU; Start 602; Stop 626
atgaattgtaccgtatctgtgaata

SEQ ID NO: 409651 - DNA, 25 bp, Artificial
  probe
  misc_feature (1)..(25): SEQ ID NO: 5407; WAN024GBU; Start 1034; Stop 1058
ttatcgcagctatgagagagaatga

SEQ ID NO: 409652 - DNA, 25 bp, Artificial
  probe
  misc_feature (1)..(25): SEQ ID NO: 5407; WAN024GBU; Start 682; Stop 706
ccttatgtaggtgaaccaggtaact

SEQ ID NO: 409653 - DNA, 25 bp, Artificial
  probe
  misc_feature (1)..(25): SEQ ID NO: 5407; WAN024GBU; Start 1054; Stop 1078
aatgaccttctcttgattactgcgg

SEQ ID NO: 409654 - DNA, 25 bp, Artificial
  probe
  misc_feature (1)..(25): SEQ ID NO: 5407; WAN024GBU; Start 818; Stop 842
atatctttaacggtgctggtatcaa

SEQ ID NO: 409655 - DNA, 25 bp, Artificial
  probe
  misc_feature (1)..(25): SEQ ID NO: 5407; WAN024GBU; Start 1217; Stop 1241
ataactttggtgtggaaactgctat

SEQ ID NO: 409656 - DNA, 25 bp, Artificial
  probe
  misc_feature (1)..(25): SEQ ID NO: 5407; WAN024GBU; Start 603; Stop 627
tgaattgtaccgtatctgtgaatac

SEQ ID NO: 409657 - DNA, 25 bp, Artificial
  probe
  misc_feature (1)..(25): SEQ ID NO: 5407; WAN024GBU; Start 122; Stop 146
caccagatgctaataactttgtcaa

SEQ ID NO: 409658 - DNA, 25 bp, Artificial
  probe
  misc_feature (1)..(25): SEQ ID NO: 5407; WAN024GBU; Start 335; Stop 359
atactatgactggacactgggaaat

SEQ ID NO: 409659 - DNA, 25 bp, Artificial
  probe
  misc_feature (1)..(25): SEQ ID NO: 5407; WAN024GBU; Start 886; Stop 910
acactattgaagactatgggacttg

SEQ ID NO: 409660 - DNA, 25 bp, Artificial
  probe
  misc_feature (1)..(25): SEQ ID NO: 5407; WAN024GBU; Start 1015; Stop 1039
gatgaacgcttacctgaaattatcg

SEQ ID NO: 409661 - DNA, 25 bp, Artificial
  probe
  misc_feature (1)..(25): SEQ ID NO: 5407; WAN024GBU; Start 1014; Stop 1038
tgatgaacgcttacctgaaattatc

SEQ ID NO: 409662 - DNA, 25 bp, Artificial
  probe
  misc_feature (1)..(25): SEQ ID NO: 5408; WAN024CVK; Start 1618; Stop 1642
cattattacctgtcacgcatattgg

SEQ ID NO: 409663 - DNA, 25 bp, Artificial
  probe
  misc_feature (1)..(25): SEQ ID NO: 5408; WAN024CVK; Start 1524; Stop 1548
catattcttggttcagtctctctcc

SEQ ID NO: 409664 - DNA, 25 bp, Artificial
  probe
  misc_feature (1)..(25): SEQ ID NO: 5408; WAN024CVK; Start 1610; Stop 1634
ttggctatcattattacctgtcacg

SEQ ID NO: 409665 - DNA, 25 bp, Artificial
  probe
  misc_feature (1)..(25): SEQ ID NO: 5408; WAN024CVK; Start 1617; Stop 1641
tcattattacctgtcacgcatattg

SEQ ID NO: 409666 - DNA, 25 bp, Artificial
  probe
  misc_feature (1)..(25): SEQ ID NO: 5408; WAN024CVK; Start 1523; Stop 1547
gcatattcttggttcagtctctctc

SEQ ID NO: 409667 - DNA, 25 bp, Artificial
  probe
  misc_feature (1)..(25): SEQ ID NO: 5408; WAN024CVK; Start 1613; Stop 1637
gctatcattattacctgtcacgcat

SEQ ID NO: 409668 - DNA, 25 bp, Artificial
  probe
  misc_feature (1)..(25): SEQ ID NO: 5408; WAN024CVK; Start 1522; Stop 1546
agcatattcttggttcagtctctct

SEQ ID NO: 409669 - DNA, 25 bp, Artificial
  probe
  misc_feature (1)..(25): SEQ ID NO: 5408; WAN024CVK; Start 1619; Stop 1643
attattacctgtcacgcatattggc

SEQ ID NO: 409670 - DNA, 25 bp, Artificial
  probe
  misc_feature (1)..(25): SEQ ID NO: 5408; WAN024CVK; Start 1616; Stop 1640
atcattattacctgtcacgcatatt

SEQ ID NO: 409671 - DNA, 25 bp, Artificial
  probe
  misc_feature (1)..(25): SEQ ID NO: 5408; WAN024CVK; Start 1614; Stop 1638
ctatcattattacctgtcacgcata

SEQ ID NO: 409672 - DNA, 25 bp, Artificial
  probe
  misc_feature (1)..(25): SEQ ID NO: 5408; WAN024CVK; Start 1072; Stop 1096
gttccagacattcatcctccatact

SEQ ID NO: 409673 - DNA, 25 bp, Artificial
  probe
  misc_feature (1)..(25): SEQ ID NO: 5408; WAN024CVK; Start 1521; Stop 1545
gagcatattcttggttcagtctctc

SEQ ID NO: 409674 - DNA, 25 bp, Artificial
  probe
  misc_feature (1)..(25): SEQ ID NO: 5408; WAN024CVK; Start 498; Stop 522
gatgctactgtccttgaccttatta

SEQ ID NO: 409675 - DNA, 25 bp, Artificial
  probe
  misc_feature (1)..(25): SEQ ID NO: 5408; WAN024CVK; Start 500; Stop 524
tgctactgtccttgaccttattatt

SEQ ID NO: 409676 - DNA, 25 bp, Artificial
  probe
  misc_feature (1)..(25): SEQ ID NO: 5408; WAN024CVK; Start 499; Stop 523
atgctactgtccttgaccttattat

SEQ ID NO: 409677 - DNA, 25 bp, Artificial
  probe
  misc_feature (1)..(25): SEQ ID NO: 5408; WAN024CVK; Start 1134; Stop 1158
tgtcaataacaatatcaccagcctg

SEQ ID NO: 409678 - DNA, 25 bp, Artificial
  probe
  misc_feature (1)..(25): SEQ ID NO: 5408; WAN024CVK; Start 786; Stop 810
cgcttggataggactaactctcttc

SEQ ID NO: 409679 - DNA, 25 bp, Artificial
  probe
  misc_feature (1)..(25): SEQ ID NO: 5408; WAN024CVK; Start 1615; Stop 1639
tatcattattacctgtcacgcatat

SEQ ID NO: 409680 - DNA, 25 bp, Artificial
  probe
  misc_feature (1)..(25): SEQ ID NO: 5408; WAN024CVK; Start 1135; Stop 1159
gtcaataacaatatcaccagcctgc

SEQ ID NO: 409681 - DNA, 25 bp, Artificial
  probe
  misc_feature (1)..(25): SEQ ID NO: 5408; WAN024CVK; Start 497; Stop 521
tgatgctactgtccttgaccttatt

SEQ ID NO: 409682 - DNA, 25 bp, Artificial
  probe
  misc_feature (1)..(25): SEQ ID NO: 5408; WAN024CVK; Start 496; Stop 520
ttgatgctactgtccttgaccttat

SEQ ID NO: 409683 - DNA, 25 bp, Artificial
  probe
  misc_feature (1)..(25): SEQ ID NO: 5408; WAN024CVK; Start 785; Stop 809
tcgcttggataggactaactctctt

SEQ ID NO: 409684 - DNA, 25 bp, Artificial
  probe
  misc_feature (1)..(25): SEQ ID NO: 5408; WAN024CVK; Start 1620; Stop 1644
ttattacctgtcacgcatattggca

SEQ ID NO: 409685 - DNA, 25 bp, Artificial
  probe
  misc_feature (1)..(25): SEQ ID NO: 5408; WAN024CVK; Start 1520; Stop 1544
ggagcatattcttggttcagtctct

SEQ ID NO: 409686 - DNA, 25 bp, Artificial
  probe
  misc_feature (1)..(25): SEQ ID NO: 5408; WAN024CVK; Start 1612; Stop 1636
ggctatcattattacctgtcacgca

SEQ ID NO: 409687 - DNA, 25 bp, Artificial
  probe
  misc_feature (1)..(25): SEQ ID NO: 5408; WAN024CVK; Start 1611; Stop 1635
tggctatcattattacctgtcacgc

SEQ ID NO: 409688 - DNA, 25 bp, Artificial
  probe
  misc_feature (1)..(25): SEQ ID NO: 5408; WAN024CVK; Start 1078; Stop 1102
gacattcatcctccatactggttac

SEQ ID NO: 409689 - DNA, 25 bp, Artificial
  probe
  misc_feature (1)..(25): SEQ ID NO: 5408; WAN024CVK; Start 1077; Stop 1101
agacattcatcctccatactggtta

SEQ ID NO: 409690 - DNA, 25 bp, Artificial
  probe
  misc_feature (1)..(25): SEQ ID NO: 5408; WAN024CVK; Start 1073; Stop 1097
ttccagacattcatcctccatactg

SEQ ID NO: 409691 - DNA, 25 bp, Artificial
  probe
  misc_feature (1)..(25): SEQ ID NO: 5408; WAN024CVK; Start 74; Stop 98
attcatctcaagaagctaatctggc

SEQ ID NO: 409692 - DNA, 25 bp, Artificial
  probe
  misc_feature (1)..(25): SEQ ID NO: 5408; WAN024CVK; Start 1222; Stop 1246
tttgctcgttatgtgaaagtgaaat

SEQ ID NO: 409693 - DNA, 25 bp, Artificial
  probe
  misc_feature (1)..(25): SEQ ID NO: 5408; WAN024CVK; Start 800; Stop 824
taactctcttcctgctttatctgac

SEQ ID NO: 409694 - DNA, 25 bp, Artificial
  probe
  misc_feature (1)..(25): SEQ ID NO: 5408; WAN024CVK; Start 798; Stop 822
actaactctcttcctgctttatctg

SEQ ID NO: 409695 - DNA, 25 bp, Artificial
  probe
  misc_feature (1)..(25): SEQ ID NO: 5409; WAN0249M7; Start 3; Stop 27
gctgtaatatgtgatgaaaatgcca

SEQ ID NO: 409696 - DNA, 25 bp, Artificial
  probe
  misc_feature (1)..(25): SEQ ID NO: 5409; WAN0249M7; Start 2; Stop 26
tgctgtaatatgtgatgaaaatgcc

SEQ ID NO: 409697 - DNA, 25 bp, Artificial
  probe
  misc_feature (1)..(25): SEQ ID NO: 5409; WAN0249M7; Start 5; Stop 29
tgtaatatgtgatgaaaatgccagt

SEQ ID NO: 409698 - DNA, 25 bp, Artificial
  probe
  misc_feature (1)..(25): SEQ ID NO: 5409; WAN0249M7; Start 1; Stop 25
ttgctgtaatatgtgatgaaaatgc

SEQ ID NO: 409699 - DNA, 25 bp, Artificial
  probe
  misc_feature (1)..(25): SEQ ID NO: 5409; WAN0249M7; Start 4; Stop 28
ctgtaatatgtgatgaaaatgccag

SEQ ID NO: 409700 - DNA, 25 bp, Artificial
  probe
  misc_feature (1)..(25): SEQ ID NO: 5409; WAN0249M7; Start 6; Stop 30
gtaatatgtgatgaaaatgccagta

SEQ ID NO: 409701 - DNA, 25 bp, Artificial
  probe
  misc_feature (1)..(25): SEQ ID NO: 5409; WAN0249M7; Start 8; Stop 32
aatatgtgatgaaaatgccagtaat

SEQ ID NO: 409702 - DNA, 25 bp, Artificial
  probe
  misc_feature (1)..(25): SEQ ID NO: 5409; WAN0249M7; Start 7; Stop 31
taatatgtgatgaaaatgccagtaa

SEQ ID NO: 409703 - DNA, 25 bp, Artificial
  probe
  misc_feature (1)..(25): SEQ ID NO: 5410; WAN024BH6; Start 148; Stop 172
cataatcgtgatacttgcggtaatc

SEQ ID NO: 409704 - DNA, 25 bp, Artificial
  probe
  misc_feature (1)..(25): SEQ ID NO: 5410; WAN024BH6; Start 147; Stop 171
tcataatcgtgatacttgcggtaat

SEQ ID NO: 409705 - DNA, 25 bp, Artificial
  probe
  misc_feature (1)..(25): SEQ ID NO: 5410; WAN024BH6; Start 146; Stop 170
ttcataatcgtgatacttgcggtaa

SEQ ID NO: 409706 - DNA, 25 bp, Artificial
  probe
  misc_feature (1)..(25): SEQ ID NO: 5410; WAN024BH6; Start 128; Stop 152
ttgttattatccaaggcgttcataa

SEQ ID NO: 409707 - DNA, 25 bp, Artificial
  probe
  misc_feature (1)..(25): SEQ ID NO: 5410; WAN024BH6; Start 145; Stop 169
gttcataatcgtgatacttgcggta

SEQ ID NO: 409708 - DNA, 25 bp, Artificial
  probe
  misc_feature (1)..(25): SEQ ID NO: 5410; WAN024BH6; Start 168; Stop 192
taatcaagccaaggatactagcgat

SEQ ID NO: 409709 - DNA, 25 bp, Artificial
  probe
  misc_feature (1)..(25): SEQ ID NO: 5410; WAN024BH6; Start 140; Stop 164
aaggcgttcataatcgtgatacttg

SEQ ID NO: 409710 - DNA, 25 bp, Artificial
  probe
  misc_feature (1)..(25): SEQ ID NO: 5410; WAN024BH6; Start 139; Stop 163
caaggcgttcataatcgtgatactt

SEQ ID NO: 409711 - DNA, 25 bp, Artificial
  probe
  misc_feature (1)..(25): SEQ ID NO: 5410; WAN024BH6; Start 177; Stop 201
caaggatactagcgattgtagcaac

SEQ ID NO: 409712 - DNA, 25 bp, Artificial
  probe
  misc_feature (1)..(25): SEQ ID NO: 5410; WAN024BH6; Start 167; Stop 191
gtaatcaagccaaggatactagcga

SEQ ID NO: 409713 - DNA, 25 bp, Artificial
  probe
  misc_feature (1)..(25): SEQ ID NO: 5410; WAN024BH6; Start 136; Stop 160
atccaaggcgttcataatcgtgata

SEQ ID NO: 409714 - DNA, 25 bp, Artificial
  probe
  misc_feature (1)..(25): SEQ ID NO: 5410; WAN024BH6; Start 135; Stop 159
tatccaaggcgttcataatcgtgat

SEQ ID NO: 409715 - DNA, 25 bp, Artificial
  probe
  misc_feature (1)..(25): SEQ ID NO: 5410; WAN024BH6; Start 173; Stop 197
aagccaaggatactagcgattgtag

SEQ ID NO: 409716 - DNA, 25 bp, Artificial
  probe
  misc_feature (1)..(25): SEQ ID NO: 5410; WAN024BH6; Start 132; Stop 156
tattatccaaggcgttcataatcgt

SEQ ID NO: 409717 - DNA, 25 bp, Artificial
  probe
  misc_feature (1)..(25): SEQ ID NO: 5410; WAN024BH6; Start 134; Stop 158
ttatccaaggcgttcataatcgtga

SEQ ID NO: 409718 - DNA, 25 bp, Artificial
  probe
  misc_feature (1)..(25): SEQ ID NO: 5410; WAN024BH6; Start 131; Stop 155
ttattatccaaggcgttcataatcg

SEQ ID NO: 409719 - DNA, 25 bp, Artificial
  probe
  misc_feature (1)..(25): SEQ ID NO: 5410; WAN024BH6; Start 176; Stop 200
ccaaggatactagcgattgtagcaa

SEQ ID NO: 409720 - DNA, 25 bp, Artificial
  probe
  misc_feature (1)..(25): SEQ ID NO: 5410; WAN024BH6; Start 172; Stop 196
caagccaaggatactagcgattgta

SEQ ID NO: 409721 - DNA, 25 bp, Artificial
  probe
  misc_feature (1)..(25): SEQ ID NO: 5410; WAN024BH6; Start 129; Stop 153
tgttattatccaaggcgttcataat

SEQ ID NO: 409722 - DNA, 25 bp, Artificial
  probe
  misc_feature (1)..(25): SEQ ID NO: 5410; WAN024BH6; Start 133; Stop 157
attatccaaggcgttcataatcgtg

SEQ ID NO: 409723 - DNA, 25 bp, Artificial
  probe
  misc_feature (1)..(25): SEQ ID NO: 5410; WAN024BH6; Start 178; Stop 202
aaggatactagcgattgtagcaacg

SEQ ID NO: 409724 - DNA, 25 bp, Artificial
  probe
  misc_feature (1)..(25): SEQ ID NO: 5410; WAN024BH6; Start 170; Stop 194
atcaagccaaggatactagcgattg

SEQ ID NO: 409725 - DNA, 25 bp, Artificial
  probe
  misc_feature (1)..(25): SEQ ID NO: 5410; WAN024BH6; Start 166; Stop 190
ggtaatcaagccaaggatactagcg

SEQ ID NO: 409726 - DNA, 25 bp, Artificial
  probe
  misc_feature (1)..(25): SEQ ID NO: 5410; WAN024BH6; Start 165; Stop 189
cggtaatcaagccaaggatactagc

SEQ ID NO: 409727 - DNA, 25 bp, Artificial
  probe
  misc_feature (1)..(25): SEQ ID NO: 5410; WAN024BH6; Start 164; Stop 188
gcggtaatcaagccaaggatactag

SEQ ID NO: 409728 - DNA, 25 bp, Artificial
  probe
  misc_feature (1)..(25): SEQ ID NO: 5410; WAN024BH6; Start 127; Stop 151
tttgttattatccaaggcgttcata

SEQ ID NO: 409729 - DNA, 25 bp, Artificial
  probe
  misc_feature (1)..(25): SEQ ID NO: 5410; WAN024BH6; Start 130; Stop 154
gttattatccaaggcgttcataatc

SEQ ID NO: 409730 - DNA, 25 bp, Artificial
  probe
  misc_feature (1)..(25): SEQ ID NO: 5410; WAN024BH6; Start 138; Stop 162
ccaaggcgttcataatcgtgatact

SEQ ID NO: 409731 - DNA, 25 bp, Artificial
  probe
  misc_feature (1)..(25): SEQ ID NO: 5410; WAN024BH6; Start 137; Stop 161
tccaaggcgttcataatcgtgatac

SEQ ID NO: 409732 - DNA, 25 bp, Artificial
  probe
  misc_feature (1)..(25): SEQ ID NO: 5410; WAN024BH6; Start 149; Stop 173
ataatcgtgatacttgcggtaatca

SEQ ID NO: 409733 - DNA, 25 bp, Artificial
  probe
  misc_feature (1)..(25): SEQ ID NO: 5410; WAN024BH6; Start 169; Stop 193
aatcaagccaaggatactagcgatt

SEQ ID NO: 409734 - DNA, 25 bp, Artificial
  probe
  misc_feature (1)..(25): SEQ ID NO: 5410; WAN024BH6; Start 150; Stop 174
taatcgtgatacttgcggtaatcaa

SEQ ID NO: 409735 - DNA, 25 bp, Artificial
  probe
  misc_feature (1)..(25): SEQ ID NO: 5410; WAN024BH6; Start 181; Stop 205
gatactagcgattgtagcaacggtt

SEQ ID NO: 409736 - DNA, 25 bp, Artificial
  probe
  misc_feature (1)..(25): SEQ ID NO: 5411; WAN024DTV; Start 1400; Stop 1424
atcacttggacttggaatctatctc

SEQ ID NO: 409737 - DNA, 25 bp, Artificial
  probe
  misc_feature (1)..(25): SEQ ID NO: 5411; WAN024DTV; Start 1399; Stop 1423
aatcacttggacttggaatctatct

SEQ ID NO: 409738 - DNA, 25 bp, Artificial
  probe
  misc_feature (1)..(25): SEQ ID NO: 5411; WAN024DTV; Start 1401; Stop 1425
tcacttggacttggaatctatctca

SEQ ID NO: 409739 - DNA, 25 bp, Artificial
  probe
  misc_feature (1)..(25): SEQ ID NO: 5411; WAN024DTV; Start 1402; Stop 1426
cacttggacttggaatctatctcaa

SEQ ID NO: 409740 - DNA, 25 bp, Artificial
  probe
  misc_feature (1)..(25): SEQ ID NO: 5411; WAN024DTV; Start 1099; Stop 1123
ggagatattgactatgaaggaactg

SEQ ID NO: 409741 - DNA, 25 bp, Artificial
  probe
  misc_feature (1)..(25): SEQ ID NO: 5411; WAN024DTV; Start 158; Stop 182
ctactactggtcacatctctcttgg

SEQ ID NO: 409742 - DNA, 25 bp, Artificial
  probe
  misc_feature (1)..(25): SEQ ID NO: 5411; WAN024DTV; Start 157; Stop 181
cctactactggtcacatctctcttg

SEQ ID NO: 409743 - DNA, 25 bp, Artificial
  probe
  misc_feature (1)..(25): SEQ ID NO: 5411; WAN024DTV; Start 1503; Stop 1527
ggctaaccatatcattgtcttatct

SEQ ID NO: 409744 - DNA, 25 bp, Artificial
  probe
  misc_feature (1)..(25): SEQ ID NO: 5411; WAN024DTV; Start 1372; Stop 1396
aatgtccttgtacttgatgatccaa

SEQ ID NO: 409745 - DNA, 25 bp, Artificial
  probe
  misc_feature (1)..(25): SEQ ID NO: 5411; WAN024DTV; Start 159; Stop 183
tactactggtcacatctctcttggt

SEQ ID NO: 409746 - DNA, 25 bp, Artificial
  probe
  misc_feature (1)..(25): SEQ ID NO: 5411; WAN024DTV; Start 1373; Stop 1397
atgtccttgtacttgatgatccaac

SEQ ID NO: 409747 - DNA, 25 bp, Artificial
  probe
  misc_feature (1)..(25): SEQ ID NO: 5411; WAN024DTV; Start 1100; Stop 1124
gagatattgactatgaaggaactgt

SEQ ID NO: 409748 - DNA, 25 bp, Artificial
  probe
  misc_feature (1)..(25): SEQ ID NO: 5411; WAN024DTV; Start 945; Stop 969
tggtaatgatctcttgacagtagaa

SEQ ID NO: 409749 - DNA, 25 bp, Artificial
  probe
  misc_feature (1)..(25): SEQ ID NO: 5411; WAN024DTV; Start 944; Stop 968
ttggtaatgatctcttgacagtaga

SEQ ID NO: 409750 - DNA, 25 bp, Artificial
  probe
  misc_feature (1)..(25): SEQ ID NO: 5411; WAN024DTV; Start 706; Stop 730
aactacgacttctggaaggaatctt

SEQ ID NO: 409751 - DNA, 25 bp, Artificial
  probe
  misc_feature (1)..(25): SEQ ID NO: 5411; WAN024DTV; Start 814; Stop 838
ttctctgccaatgcttctaagtcaa

SEQ ID NO: 409752 - DNA, 25 bp, Artificial
  probe
  misc_feature (1)..(25): SEQ ID NO: 5411; WAN024DTV; Start 943; Stop 967
attggtaatgatctcttgacagtag

SEQ ID NO: 409753 - DNA, 25 bp, Artificial
  probe
  misc_feature (1)..(25): SEQ ID NO: 5411; WAN024DTV; Start 942; Stop 966
gattggtaatgatctcttgacagta

SEQ ID NO: 409754 - DNA, 25 bp, Artificial
  probe
  misc_feature (1)..(25): SEQ ID NO: 5411; WAN024DTV; Start 428; Stop 452
acattccagaagaattacactacca

SEQ ID NO: 409755 - DNA, 25 bp, Artificial
  probe
  misc_feature (1)..(25): SEQ ID NO: 5411; WAN024DTV; Start 1097; Stop 1121
tgggagatattgactatgaaggaac

SEQ ID NO: 409756 - DNA, 25 bp, Artificial
  probe
  misc_feature (1)..(25): SEQ ID NO: 5411; WAN024DTV; Start 429; Stop 453
cattccagaagaattacactaccaa

SEQ ID NO: 409757 - DNA, 25 bp, Artificial
  probe
  misc_feature (1)..(25): SEQ ID NO: 5411; WAN024DTV; Start 427; Stop 451
aacattccagaagaattacactacc

SEQ ID NO: 409758 - DNA, 25 bp, Artificial
  probe
  misc_feature (1)..(25): SEQ ID NO: 5411; WAN024DTV; Start 688; Stop 712
atcaaactctatgtcggaaactacg

SEQ ID NO: 409759 - DNA, 25 bp, Artificial
  probe
  misc_feature (1)..(25): SEQ ID NO: 5411; WAN024DTV; Start 1098; Stop 1122
gggagatattgactatgaaggaact

SEQ ID NO: 409760 - DNA, 25 bp, Artificial
  probe
  misc_feature (1)..(25): SEQ ID NO: 5411; WAN024DTV; Start 139; Stop 163
ttagctggagatatcgaacctacta

SEQ ID NO: 409761 - DNA, 25 bp, Artificial
  probe
  misc_feature (1)..(25): SEQ ID NO: 5411; WAN024DTV; Start 1101; Stop 1125
agatattgactatgaaggaactgtc

SEQ ID NO: 409762 - DNA, 25 bp, Artificial
  probe
  misc_feature (1)..(25): SEQ ID NO: 5411; WAN024DTV; Start 815; Stop 839
tctctgccaatgcttctaagtcaag

SEQ ID NO: 409763 - DNA, 25 bp, Artificial
  probe
  misc_feature (1)..(25): SEQ ID NO: 5411; WAN024DTV; Start 140; Stop 164
tagctggagatatcgaacctactac

SEQ ID NO: 409764 - DNA, 25 bp, Artificial
  probe
  misc_feature (1)..(25): SEQ ID NO: 5411; WAN024DTV; Start 1374; Stop 1398
tgtccttgtacttgatgatccaaca

SEQ ID NO: 409765 - DNA, 25 bp, Artificial
  probe
  misc_feature (1)..(25): SEQ ID NO: 5411; WAN024DTV; Start 687; Stop 711
aatcaaactctatgtcggaaactac

SEQ ID NO: 409766 - DNA, 25 bp, Artificial
  probe
  misc_feature (1)..(25): SEQ ID NO: 5411; WAN024DTV; Start 1502; Stop 1526
tggctaaccatatcattgtcttatc

SEQ ID NO: 409767 - DNA, 25 bp, Artificial
  probe
  misc_feature (1)..(25): SEQ ID NO: 5411; WAN024DTV; Start 1027; Stop 1051
cgtccagatgataagacagcactta

SEQ ID NO: 409768 - DNA, 25 bp, Artificial
  probe
  misc_feature (1)..(25): SEQ ID NO: 5411; WAN024DTV; Start 1010; Stop 1034
atattagtttcatcttgcgtccaga

SEQ ID NO: 409769 - DNA, 25 bp, Artificial
  probe
  misc_feature (1)..(25): SEQ ID NO: 5412; WAN024DOA; Start 221; Stop 245
tagaggaattgaaagcctttgtaga

SEQ ID NO: 409770 - DNA, 25 bp, Artificial
  probe
  misc_feature (1)..(25): SEQ ID NO: 5412; WAN024DOA; Start 222; Stop 246
agaggaattgaaagcctttgtagag

SEQ ID NO: 409771 - DNA, 25 bp, Artificial
  probe
  misc_feature (1)..(25): SEQ ID NO: 5412; WAN024DOA; Start 220; Stop 244
ttagaggaattgaaagcctttgtag

SEQ ID NO: 409772 - DNA, 25 bp, Artificial
  probe
  misc_feature (1)..(25): SEQ ID NO: 5412; WAN024DOA; Start 219; Stop 243
tttagaggaattgaaagcctttgta

SEQ ID NO: 409773 - DNA, 25 bp, Artificial
  probe
  misc_feature (1)..(25): SEQ ID NO: 5412; WAN024DOA; Start 223; Stop 247
gaggaattgaaagcctttgtagagg

SEQ ID NO: 409774 - DNA, 25 bp, Artificial
  probe
  misc_feature (1)..(25): SEQ ID NO: 5412; WAN024DOA; Start 218; Stop 242
ctttagaggaattgaaagcctttgt

SEQ ID NO: 409775 - DNA, 25 bp, Artificial
  probe
  misc_feature (1)..(25): SEQ ID NO: 5412; WAN024DOA; Start 217; Stop 241
cctttagaggaattgaaagcctttg

SEQ ID NO: 409776 - DNA, 25 bp, Artificial
  probe
  misc_feature (1)..(25): SEQ ID NO: 5412; WAN024DOA; Start 239; Stop 263
ttgtagaggctcatccagatgcttt

SEQ ID NO: 409777 - DNA, 25 bp, Artificial
  probe
  misc_feature (1)..(25): SEQ ID NO: 5412; WAN024DOA; Start 238; Stop 262
tttgtagaggctcatccagatgctt

SEQ ID NO: 409778 - DNA, 25 bp, Artificial
  probe
  misc_feature (1)..(25): SEQ ID NO: 5412; WAN024DOA; Start 51; Stop 75
tgattttaaacagcgagcattagat

SEQ ID NO: 409779 - DNA, 25 bp, Artificial
  probe
  misc_feature (1)..(25): SEQ ID NO: 5412; WAN024DOA; Start 52; Stop 76
gattttaaacagcgagcattagatt

SEQ ID NO: 409780 - DNA, 25 bp, Artificial
  probe
  misc_feature (1)..(25): SEQ ID NO: 5412; WAN024DOA; Start 50; Stop 74
ctgattttaaacagcgagcattaga

SEQ ID NO: 409781 - DNA, 25 bp, Artificial
  probe
  misc_feature (1)..(25): SEQ ID NO: 5412; WAN024DOA; Start 237; Stop 261
ctttgtagaggctcatccagatgct

SEQ ID NO: 409782 - DNA, 25 bp, Artificial
  probe
  misc_feature (1)..(25): SEQ ID NO: 5412; WAN024DOA; Start 49; Stop 73
actgattttaaacagcgagcattag

SEQ ID NO: 409783 - DNA, 25 bp, Artificial
  probe
  misc_feature (1)..(25): SEQ ID NO: 5412; WAN024DOA; Start 47; Stop 71
gtactgattttaaacagcgagcatt

SEQ ID NO: 409784 - DNA, 25 bp, Artificial
  probe
  misc_feature (1)..(25): SEQ ID NO: 5412; WAN024DOA; Start 345; Stop 369
aaaagatgacgagcttctaactaat

SEQ ID NO: 409785 - DNA, 25 bp, Artificial
  probe
  misc_feature (1)..(25): SEQ ID NO: 5412; WAN024DOA; Start 48; Stop 72
tactgattttaaacagcgagcatta

SEQ ID NO: 409786 - DNA, 25 bp, Artificial
  probe
  misc_feature (1)..(25): SEQ ID NO: 5412; WAN024DOA; Start 32; Stop 56
aagctatggcatatagtactgattt

SEQ ID NO: 409787 - DNA, 25 bp, Artificial
  probe
  misc_feature (1)..(25): SEQ ID NO: 5412; WAN024DOA; Start 31; Stop 55
aaagctatggcatatagtactgatt

SEQ ID NO: 409788 - DNA, 25 bp, Artificial
  probe
  misc_feature (1)..(25): SEQ ID NO: 5412; WAN024DOA; Start 216; Stop 240
tcctttagaggaattgaaagccttt

SEQ ID NO: 409789 - DNA, 25 bp, Artificial
  probe
  misc_feature (1)..(25): SEQ ID NO: 5412; WAN024DOA; Start 30; Stop 54
taaagctatggcatatagtactgat

SEQ ID NO: 409790 - DNA, 25 bp, Artificial
  probe
  misc_feature (1)..(25): SEQ ID NO: 5412; WAN024DOA; Start 29; Stop 53
ataaagctatggcatatagtactga

SEQ ID NO: 409791 - DNA, 25 bp, Artificial
  probe
  misc_feature (1)..(25): SEQ ID NO: 5412; WAN024DOA; Start 45; Stop 69
tagtactgattttaaacagcgagca

SEQ ID NO: 409792 - DNA, 25 bp, Artificial
  probe
  misc_feature (1)..(25): SEQ ID NO: 5412; WAN024DOA; Start 44; Stop 68
atagtactgattttaaacagcgagc

SEQ ID NO: 409793 - DNA, 25 bp, Artificial
  probe
  misc_feature (1)..(25): SEQ ID NO: 5412; WAN024DOA; Start 240; Stop 264
tgtagaggctcatccagatgctttt

SEQ ID NO: 409794 - DNA, 25 bp, Artificial
  probe
  misc_feature (1)..(25): SEQ ID NO: 5412; WAN024DOA; Start 46; Stop 70
agtactgattttaaacagcgagcat

SEQ ID NO: 409795 - DNA, 25 bp, Artificial
  probe
  misc_feature (1)..(25): SEQ ID NO: 5412; WAN024DOA; Start 28; Stop 52
aataaagctatggcatatagtactg

SEQ ID NO: 409796 - DNA, 25 bp, Artificial
  probe
  misc_feature (1)..(25): SEQ ID NO: 5412; WAN024DOA; Start 270; Stop 294
ggaaattgcggcacattttgattgt

SEQ ID NO: 409797 - DNA, 25 bp, Artificial
  probe
  misc_feature (1)..(25): SEQ ID NO: 5412; WAN024DOA; Start 236; Stop 260
cctttgtagaggctcatccagatgc

SEQ ID NO: 409798 - DNA, 25 bp, Artificial
  probe
  misc_feature (1)..(25): SEQ ID NO: 5412; WAN024DOA; Start 33; Stop 57
agctatggcatatagtactgatttt

SEQ ID NO: 409799 - DNA, 25 bp, Artificial
  probe
  misc_feature (1)..(25): SEQ ID NO: 5412; WAN024DOA; Start 203; Stop 227
aaaaccgaaagattcctttagagga

SEQ ID NO: 409800 - DNA, 25 bp, Artificial
  probe
  misc_feature (1)..(25): SEQ ID NO: 5412; WAN024DOA; Start 269; Stop 293
gggaaattgcggcacattttgattg

SEQ ID NO: 409801 - DNA, 25 bp, Artificial
  probe
  misc_feature (1)..(25): SEQ ID NO: 5412; WAN024DOA; Start 43; Stop 67
tatagtactgattttaaacagcgag

SEQ ID NO: 409802 - DNA, 25 bp, Artificial
  probe
  misc_feature (1)..(25): SEQ ID NO: 5413; WAN024F5T; Start 289; Stop 313
ttgtgtattaccacgaacatccaag

SEQ ID NO: 409803 - DNA, 25 bp, Artificial
  probe
  misc_feature (1)..(25): SEQ ID NO: 5413; WAN024F5T; Start 181; Stop 205
aatttcaactacggcttccttaaac

SEQ ID NO: 409804 - DNA, 25 bp, Artificial
  probe
  misc_feature (1)..(25): SEQ ID NO: 5413; WAN024F5T; Start 176; Stop 200
tacataatttcaactacggcttcct

SEQ ID NO: 409805 - DNA, 25 bp, Artificial
  probe
  misc_feature (1)..(25): SEQ ID NO: 5413; WAN024F5T; Start 236; Stop 260
atcttagtttctttaccgacattgg

SEQ ID NO: 409806 - DNA, 25 bp, Artificial
  probe
  misc_feature (1)..(25): SEQ ID NO: 5413; WAN024F5T; Start 38; Stop 62
gccaagtatttcttagcattctcag

SEQ ID NO: 409807 - DNA, 25 bp, Artificial
  probe
  misc_feature (1)..(25): SEQ ID NO: 5413; WAN024F5T; Start 177; Stop 201
acataatttcaactacggcttcctt

SEQ ID NO: 409808 - DNA, 25 bp, Artificial
  probe
  misc_feature (1)..(25): SEQ ID NO: 5413; WAN024F5T; Start 10; Stop 34
aatttcatcaaagatttctgggtgc

SEQ ID NO: 409809 - DNA, 25 bp, Artificial
  probe
  misc_feature (1)..(25): SEQ ID NO: 5413; WAN024F5T; Start 178; Stop 202
cataatttcaactacggcttcctta

SEQ ID NO: 409810 - DNA, 25 bp, Artificial
  probe
  misc_feature (1)..(25): SEQ ID NO: 5413; WAN024F5T; Start 9; Stop 33
caatttcatcaaagatttctgggtg

SEQ ID NO: 409811 - DNA, 25 bp, Artificial
  probe
  misc_feature (1)..(25): SEQ ID NO: 5413; WAN024F5T; Start 8; Stop 32
tcaatttcatcaaagatttctgggt

SEQ ID NO: 409812 - DNA, 25 bp, Artificial
  probe
  misc_feature (1)..(25): SEQ ID NO: 5413; WAN024F5T; Start 11; Stop 35
atttcatcaaagatttctgggtgct

SEQ ID NO: 409813 - DNA, 25 bp, Artificial
  probe
  misc_feature (1)..(25): SEQ ID NO: 5413; WAN024F5T; Start 180; Stop 204
taatttcaactacggcttccttaaa

SEQ ID NO: 409814 - DNA, 25 bp, Artificial
  probe
  misc_feature (1)..(25): SEQ ID NO: 5413; WAN024F5T; Start 175; Stop 199
gtacataatttcaactacggcttcc

SEQ ID NO: 409815 - DNA, 25 bp, Artificial
  probe
  misc_feature (1)..(25): SEQ ID NO: 5413; WAN024F5T; Start 166; Stop 190
tccttctccgtacataatttcaact

SEQ ID NO: 409816 - DNA, 25 bp, Artificial
  probe
  misc_feature (1)..(25): SEQ ID NO: 5413; WAN024F5T; Start 179; Stop 203
ataatttcaactacggcttccttaa

SEQ ID NO: 409817 - DNA, 25 bp, Artificial
  probe
  misc_feature (1)..(25): SEQ ID NO: 5413; WAN024F5T; Start 39; Stop 63
ccaagtatttcttagcattctcaga

SEQ ID NO: 409818 - DNA, 25 bp, Artificial
  probe
  misc_feature (1)..(25): SEQ ID NO: 5413; WAN024F5T; Start 165; Stop 189
ttccttctccgtacataatttcaac

SEQ ID NO: 409819 - DNA, 25 bp, Artificial
  probe
  misc_feature (1)..(25): SEQ ID NO: 5413; WAN024F5T; Start 147; Stop 171
gctcaccagtcttagaaattccttc

SEQ ID NO: 409820 - DNA, 25 bp, Artificial
  probe
  misc_feature (1)..(25): SEQ ID NO: 5413; WAN024F5T; Start 12; Stop 36
tttcatcaaagatttctgggtgctc

SEQ ID NO: 409821 - DNA, 25 bp, Artificial
  probe
  misc_feature (1)..(25): SEQ ID NO: 5413; WAN024F5T; Start 182; Stop 206
atttcaactacggcttccttaaacg

SEQ ID NO: 409822 - DNA, 25 bp, Artificial
  probe
  misc_feature (1)..(25): SEQ ID NO: 5413; WAN024F5T; Start 7; Stop 31
atcaatttcatcaaagatttctggg

SEQ ID NO: 409823 - DNA, 25 bp, Artificial
  probe
  misc_feature (1)..(25): SEQ ID NO: 5413; WAN024F5T; Start 286; Stop 310
aatttgtgtattaccacgaacatcc

SEQ ID NO: 409824 - DNA, 25 bp, Artificial
  probe
  misc_feature (1)..(25): SEQ ID NO: 5413; WAN024F5T; Start 280; Stop 304
tcccttaatttgtgtattaccacga

SEQ ID NO: 409825 - DNA, 25 bp, Artificial
  probe
  misc_feature (1)..(25): SEQ ID NO: 5413; WAN024F5T; Start 272; Stop 296
tcaccagttcccttaatttgtgtat

SEQ ID NO: 409826 - DNA, 25 bp, Artificial
  probe
  misc_feature (1)..(25): SEQ ID NO: 5413; WAN024F5T; Start 167; Stop 191
ccttctccgtacataatttcaacta

SEQ ID NO: 409827 - DNA, 25 bp, Artificial
  probe
  misc_feature (1)..(25): SEQ ID NO: 5413; WAN024F5T; Start 273; Stop 297
caccagttcccttaatttgtgtatt

SEQ ID NO: 409828 - DNA, 25 bp, Artificial
  probe
  misc_feature (1)..(25): SEQ ID NO: 5413; WAN024F5T; Start 277; Stop 301
agttcccttaatttgtgtattacca

SEQ ID NO: 409829 - DNA, 25 bp, Artificial
  probe
  misc_feature (1)..(25): SEQ ID NO: 5413; WAN024F5T; Start 274; Stop 298
accagttcccttaatttgtgtatta

SEQ ID NO: 409830 - DNA, 25 bp, Artificial
  probe
  misc_feature (1)..(25): SEQ ID NO: 5413; WAN024F5T; Start 164; Stop 188
attccttctccgtacataatttcaa

SEQ ID NO: 409831 - DNA, 25 bp, Artificial
  probe
  misc_feature (1)..(25): SEQ ID NO: 5413; WAN024F5T; Start 287; Stop 311
atttgtgtattaccacgaacatcca

SEQ ID NO: 409832 - DNA, 25 bp, Artificial
  probe
  misc_feature (1)..(25): SEQ ID NO: 5413; WAN024F5T; Start 281; Stop 305
cccttaatttgtgtattaccacgaa

SEQ ID NO: 409833 - DNA, 25 bp, Artificial
  probe
  misc_feature (1)..(25): SEQ ID NO: 5413; WAN024F5T; Start 279; Stop 303
ttcccttaatttgtgtattaccacg

SEQ ID NO: 409834 - DNA, 25 bp, Artificial
  probe
  misc_feature (1)..(25): SEQ ID NO: 5413; WAN024F5T; Start 230; Stop 254
accttaatcttagtttctttaccga

SEQ ID NO: 409835 - DNA, 25 bp, Artificial
  probe
  misc_feature (1)..(25): SEQ ID NO: 5414; WAN024DID; Start 118; Stop 142
cagttgttacgagtgtctgtattgg

SEQ ID NO: 409836 - DNA, 25 bp, Artificial
  probe
  misc_feature (1)..(25): SEQ ID NO: 5414; WAN024DID; Start 111; Stop 135
aatgaagcagttgttacgagtgtct

SEQ ID NO: 409837 - DNA, 25 bp, Artificial
  probe
  misc_feature (1)..(25): SEQ ID NO: 5414; WAN024DID; Start 117; Stop 141
gcagttgttacgagtgtctgtattg

SEQ ID NO: 409838 - DNA, 25 bp, Artificial
  probe
  misc_feature (1)..(25): SEQ ID NO: 5414; WAN024DID; Start 116; Stop 140
agcagttgttacgagtgtctgtatt

SEQ ID NO: 409839 - DNA, 25 bp, Artificial
  probe
  misc_feature (1)..(25): SEQ ID NO: 5414; WAN024DID; Start 115; Stop 139
aagcagttgttacgagtgtctgtat

SEQ ID NO: 409840 - DNA, 25 bp, Artificial
  probe
  misc_feature (1)..(25): SEQ ID NO: 5414; WAN024DID; Start 84; Stop 108
tcctgttcctaaatatgttggtaga

SEQ ID NO: 409841 - DNA, 25 bp, Artificial
  probe
  misc_feature (1)..(25): SEQ ID NO: 5414; WAN024DID; Start 32; Stop 56
ttgtcttagattggtatagaactga

SEQ ID NO: 409842 - DNA, 25 bp, Artificial
  probe
  misc_feature (1)..(25): SEQ ID NO: 5414; WAN024DID; Start 114; Stop 138
gaagcagttgttacgagtgtctgta

SEQ ID NO: 409843 - DNA, 25 bp, Artificial
  probe
  misc_feature (1)..(25): SEQ ID NO: 5414; WAN024DID; Start 83; Stop 107
atcctgttcctaaatatgttggtag

SEQ ID NO: 409844 - DNA, 25 bp, Artificial
  probe
  misc_feature (1)..(25): SEQ ID NO: 5414; WAN024DID; Start 85; Stop 109
cctgttcctaaatatgttggtagaa

SEQ ID NO: 409845 - DNA, 25 bp, Artificial
  probe
  misc_feature (1)..(25): SEQ ID NO: 5414; WAN024DID; Start 110; Stop 134
aaatgaagcagttgttacgagtgtc

SEQ ID NO: 409846 - DNA, 25 bp, Artificial
  probe
  misc_feature (1)..(25): SEQ ID NO: 5414; WAN024DID; Start 81; Stop 105
ttatcctgttcctaaatatgttggt

SEQ ID NO: 409847 - DNA, 25 bp, Artificial
  probe
  misc_feature (1)..(25): SEQ ID NO: 5414; WAN024DID; Start 112; Stop 136
atgaagcagttgttacgagtgtctg

SEQ ID NO: 409848 - DNA, 25 bp, Artificial
  probe
  misc_feature (1)..(25): SEQ ID NO: 5414; WAN024DID; Start 80; Stop 104
cttatcctgttcctaaatatgttgg

SEQ ID NO: 409849 - DNA, 25 bp, Artificial
  probe
  misc_feature (1)..(25): SEQ ID NO: 5414; WAN024DID; Start 82; Stop 106
tatcctgttcctaaatatgttggta

SEQ ID NO: 409850 - DNA, 25 bp, Artificial
  probe
  misc_feature (1)..(25): SEQ ID NO: 5414; WAN024DID; Start 86; Stop 110
ctgttcctaaatatgttggtagaaa

SEQ ID NO: 409851 - DNA, 25 bp, Artificial
  probe
  misc_feature (1)..(25): SEQ ID NO: 5414; WAN024DID; Start 79; Stop 103
tcttatcctgttcctaaatatgttg

SEQ ID NO: 409852 - DNA, 25 bp, Artificial
  probe
  misc_feature (1)..(25): SEQ ID NO: 5414; WAN024DID; Start 109; Stop 133
aaaatgaagcagttgttacgagtgt

SEQ ID NO: 409853 - DNA, 25 bp, Artificial
  probe
  misc_feature (1)..(25): SEQ ID NO: 5414; WAN024DID; Start 113; Stop 137
tgaagcagttgttacgagtgtctgt

SEQ ID NO: 409854 - DNA, 25 bp, Artificial
  probe
  misc_feature (1)..(25): SEQ ID NO: 5414; WAN024DID; Start 31; Stop 55
tttgtcttagattggtatagaactg

SEQ ID NO: 409855 - DNA, 25 bp, Artificial
  probe
  misc_feature (1)..(25): SEQ ID NO: 5414; WAN024DID; Start 22; Stop 46
tttagcttatttgtcttagattggt

SEQ ID NO: 409856 - DNA, 25 bp, Artificial
  probe
  misc_feature (1)..(25): SEQ ID NO: 5414; WAN024DID; Start 78; Stop 102
atcttatcctgttcctaaatatgtt

SEQ ID NO: 409857 - DNA, 25 bp, Artificial
  probe
  misc_feature (1)..(25): SEQ ID NO: 5414; WAN024DID; Start 26; Stop 50
gcttatttgtcttagattggtatag

SEQ ID NO: 409858 - DNA, 25 bp, Artificial
  probe
  misc_feature (1)..(25): SEQ ID NO: 5414; WAN024DID; Start 30; Stop 54
atttgtcttagattggtatagaact

SEQ ID NO: 409859 - DNA, 25 bp, Artificial
  probe
  misc_feature (1)..(25): SEQ ID NO: 5414; WAN024DID; Start 23; Stop 47
ttagcttatttgtcttagattggta

SEQ ID NO: 409860 - DNA, 25 bp, Artificial
  probe
  misc_feature (1)..(25): SEQ ID NO: 5414; WAN024DID; Start 87; Stop 111
tgttcctaaatatgttggtagaaaa

SEQ ID NO: 409861 - DNA, 25 bp, Artificial
  probe
  misc_feature (1)..(25): SEQ ID NO: 5414; WAN024DID; Start 25; Stop 49
agcttatttgtcttagattggtata

SEQ ID NO: 409862 - DNA, 25 bp, Artificial
  probe
  misc_feature (1)..(25): SEQ ID NO: 5414; WAN024DID; Start 24; Stop 48
tagcttatttgtcttagattggtat

SEQ ID NO: 409863 - DNA, 25 bp, Artificial
  probe
  misc_feature (1)..(25): SEQ ID NO: 5414; WAN024DID; Start 21; Stop 45
ttttagcttatttgtcttagattgg

SEQ ID NO: 409864 - DNA, 25 bp, Artificial
  probe
  misc_feature (1)..(25): SEQ ID NO: 5415; WAN024G8X; Start 318; Stop 342
agtcttcaattcgtcttcagtgatt

SEQ ID NO: 409865 - DNA, 25 bp, Artificial
  probe
  misc_feature (1)..(25): SEQ ID NO: 5415; WAN024G8X; Start 317; Stop 341
gagtcttcaattcgtcttcagtgat

SEQ ID NO: 409866 - DNA, 25 bp, Artificial
  probe
  misc_feature (1)..(25): SEQ ID NO: 5415; WAN024G8X; Start 316; Stop 340
agagtcttcaattcgtcttcagtga

SEQ ID NO: 409867 - DNA, 25 bp, Artificial
  probe
  misc_feature (1)..(25): SEQ ID NO: 5415; WAN024G8X; Start 238; Stop 262
agttctttctctttgttagcagtca

SEQ ID NO: 409868 - DNA, 25 bp, Artificial
  probe
  misc_feature (1)..(25): SEQ ID NO: 5415; WAN024G8X; Start 239; Stop 263
gttctttctctttgttagcagtcat

SEQ ID NO: 409869 - DNA, 25 bp, Artificial
  probe
  misc_feature (1)..(25): SEQ ID NO: 5415; WAN024G8X; Start 609; Stop 633
cgtaattgaagcgatttggttaaga

SEQ ID NO: 409870 - DNA, 25 bp, Artificial
  probe
  misc_feature (1)..(25): SEQ ID NO: 5415; WAN024G8X; Start 611; Stop 635
taattgaagcgatttggttaagagg

SEQ ID NO: 409871 - DNA, 25 bp, Artificial
  probe
  misc_feature (1)..(25): SEQ ID NO: 5415; WAN024G8X; Start 237; Stop 261
aagttctttctctttgttagcagtc

SEQ ID NO: 409872 - DNA, 25 bp, Artificial
  probe
  misc_feature (1)..(25): SEQ ID NO: 5415; WAN024G8X; Start 426; Stop 450
cttcttcacttctttagcaaggtca

SEQ ID NO: 409873 - DNA, 25 bp, Artificial
  probe
  misc_feature (1)..(25): SEQ ID NO: 5415; WAN024G8X; Start 612; Stop 636
aattgaagcgatttggttaagagga

SEQ ID NO: 409874 - DNA, 25 bp, Artificial
  probe
  misc_feature (1)..(25): SEQ ID NO: 5415; WAN024G8X; Start 613; Stop 637
attgaagcgatttggttaagaggag

SEQ ID NO: 409875 - DNA, 25 bp, Artificial
  probe
  misc_feature (1)..(25): SEQ ID NO: 5415; WAN024G8X; Start 610; Stop 634
gtaattgaagcgatttggttaagag

SEQ ID NO: 409876 - DNA, 25 bp, Artificial
  probe
  misc_feature (1)..(25): SEQ ID NO: 5415; WAN024G8X; Start 427; Stop 451
ttcttcacttctttagcaaggtcac

SEQ ID NO: 409877 - DNA, 25 bp, Artificial
  probe
  misc_feature (1)..(25): SEQ ID NO: 5415; WAN024G8X; Start 312; Stop 336
ttcaagagtcttcaattcgtcttca

SEQ ID NO: 409878 - DNA, 25 bp, Artificial
  probe
  misc_feature (1)..(25): SEQ ID NO: 5415; WAN024G8X; Start 319; Stop 343
gtcttcaattcgtcttcagtgattt

SEQ ID NO: 409879 - DNA, 25 bp, Artificial
  probe
  misc_feature (1)..(25): SEQ ID NO: 5415; WAN024G8X; Start 617; Stop 641
aagcgatttggttaagaggagtttc

SEQ ID NO: 409880 - DNA, 25 bp, Artificial
  probe
  misc_feature (1)..(25): SEQ ID NO: 5415; WAN024G8X; Start 616; Stop 640
gaagcgatttggttaagaggagttt

SEQ ID NO: 409881 - DNA, 25 bp, Artificial
  probe
  misc_feature (1)..(25): SEQ ID NO: 5415; WAN024G8X; Start 321; Stop 345
cttcaattcgtcttcagtgatttct

SEQ ID NO: 409882 - DNA, 25 bp, Artificial
  probe
  misc_feature (1)..(25): SEQ ID NO: 5415; WAN024G8X; Start 320; Stop 344
tcttcaattcgtcttcagtgatttc

SEQ ID NO: 409883 - DNA, 25 bp, Artificial
  probe
  misc_feature (1)..(25): SEQ ID NO: 5415; WAN024G8X; Start 560; Stop 584
atgaagacttgtcaaatggtgttac

SEQ ID NO: 409884 - DNA, 25 bp, Artificial
  probe
  misc_feature (1)..(25): SEQ ID NO: 5415; WAN024G8X; Start 558; Stop 582
caatgaagacttgtcaaatggtgtt

SEQ ID NO: 409885 - DNA, 25 bp, Artificial
  probe
  misc_feature (1)..(25): SEQ ID NO: 5415; WAN024G8X; Start 313; Stop 337
tcaagagtcttcaattcgtcttcag

SEQ ID NO: 409886 - DNA, 25 bp, Artificial
  probe
  misc_feature (1)..(25): SEQ ID NO: 5415; WAN024G8X; Start 323; Stop 347
tcaattcgtcttcagtgatttcttt

SEQ ID NO: 409887 - DNA, 25 bp, Artificial
  probe
  misc_feature (1)..(25): SEQ ID NO: 5415; WAN024G8X; Start 322; Stop 346
ttcaattcgtcttcagtgatttctt

SEQ ID NO: 409888 - DNA, 25 bp, Artificial
  probe
  misc_feature (1)..(25): SEQ ID NO: 5415; WAN024G8X; Start 315; Stop 339
aagagtcttcaattcgtcttcagtg

SEQ ID NO: 409889 - DNA, 25 bp, Artificial
  probe
  misc_feature (1)..(25): SEQ ID NO: 5415; WAN024G8X; Start 314; Stop 338
caagagtcttcaattcgtcttcagt

SEQ ID NO: 409890 - DNA, 25 bp, Artificial
  probe
  misc_feature (1)..(25): SEQ ID NO: 5415; WAN024G8X; Start 242; Stop 266
ctttctctttgttagcagtcatgtc

SEQ ID NO: 409891 - DNA, 25 bp, Artificial
  probe
  misc_feature (1)..(25): SEQ ID NO: 5415; WAN024G8X; Start 559; Stop 583
aatgaagacttgtcaaatggtgtta

SEQ ID NO: 409892 - DNA, 25 bp, Artificial
  probe
  misc_feature (1)..(25): SEQ ID NO: 5415; WAN024G8X; Start 241; Stop 265
tctttctctttgttagcagtcatgt

SEQ ID NO: 409893 - DNA, 25 bp, Artificial
  probe
  misc_feature (1)..(25): SEQ ID NO: 5415; WAN024G8X; Start 240; Stop 264
ttctttctctttgttagcagtcatg

SEQ ID NO: 409894 - DNA, 25 bp, Artificial
  probe
  misc_feature (1)..(25): SEQ ID NO: 5415; WAN024G8X; Start 484; Stop 508
aagcgaatcacagaaccgtcattag

SEQ ID NO: 409895 - DNA, 25 bp, Artificial
  probe
  misc_feature (1)..(25): SEQ ID NO: 5415; WAN024G8X; Start 557; Stop 581
tcaatgaagacttgtcaaatggtgt

SEQ ID NO: 409896 - DNA, 25 bp, Artificial
  probe
  misc_feature (1)..(25): SEQ ID NO: 5415; WAN024G8X; Start 556; Stop 580
ttcaatgaagacttgtcaaatggtg

SEQ ID NO: 409897 - DNA, 25 bp, Artificial
  probe
  misc_feature (1)..(25): SEQ ID NO: 5416; WAN024CNA; Start 351; Stop 375
tacgctcctgcactactattatact

SEQ ID NO: 409898 - DNA, 25 bp, Artificial
  probe
  misc_feature (1)..(25): SEQ ID NO: 5416; WAN024CNA; Start 350; Stop 374
atacgctcctgcactactattatac

SEQ ID NO: 409899 - DNA, 25 bp, Artificial
  probe
  misc_feature (1)..(25): SEQ ID NO: 5416; WAN024CNA; Start 349; Stop 373
catacgctcctgcactactattata

SEQ ID NO: 409900 - DNA, 25 bp, Artificial
  probe
  misc_feature (1)..(25): SEQ ID NO: 5416; WAN024CNA; Start 370; Stop 394
tatactcataccatttcccaacagg

SEQ ID NO: 409901 - DNA, 25 bp, Artificial
  probe
  misc_feature (1)..(25): SEQ ID NO: 5416; WAN024CNA; Start 354; Stop 378
gctcctgcactactattatactcat

SEQ ID NO: 409902 - DNA, 25 bp, Artificial
  probe
  misc_feature (1)..(25): SEQ ID NO: 5416; WAN024CNA; Start 290; Stop 314
cgacgttccataagcatctaataat

SEQ ID NO: 409903 - DNA, 25 bp, Artificial
  probe
  misc_feature (1)..(25): SEQ ID NO: 5416; WAN024CNA; Start 289; Stop 313
ccgacgttccataagcatctaataa

SEQ ID NO: 409904 - DNA, 25 bp, Artificial
  probe
  misc_feature (1)..(25): SEQ ID NO: 5416; WAN024CNA; Start 353; Stop 377
cgctcctgcactactattatactca

SEQ ID NO: 409905 - DNA, 25 bp, Artificial
  probe
  misc_feature (1)..(25): SEQ ID NO: 5416; WAN024CNA; Start 352; Stop 376
acgctcctgcactactattatactc

SEQ ID NO: 409906 - DNA, 25 bp, Artificial
  probe
  misc_feature (1)..(25): SEQ ID NO: 5416; WAN024CNA; Start 229; Stop 253
taccatttccttcaaagtagattgc

SEQ ID NO: 409907 - DNA, 25 bp, Artificial
  probe
  misc_feature (1)..(25): SEQ ID NO: 5416; WAN024CNA; Start 251; Stop 275
tgcagaatcagaattatgaaccatt

SEQ ID NO: 409908 - DNA, 25 bp, Artificial
  probe
  misc_feature (1)..(25): SEQ ID NO: 5416; WAN024CNA; Start 250; Stop 274
ttgcagaatcagaattatgaaccat

SEQ ID NO: 409909 - DNA, 25 bp, Artificial
  probe
  misc_feature (1)..(25): SEQ ID NO: 5416; WAN024CNA; Start 249; Stop 273
attgcagaatcagaattatgaacca

SEQ ID NO: 409910 - DNA, 25 bp, Artificial
  probe
  misc_feature (1)..(25): SEQ ID NO: 5416; WAN024CNA; Start 288; Stop 312
accgacgttccataagcatctaata

SEQ ID NO: 409911 - DNA, 25 bp, Artificial
  probe
  misc_feature (1)..(25): SEQ ID NO: 5416; WAN024CNA; Start 369; Stop 393
ttatactcataccatttcccaacag

SEQ ID NO: 409912 - DNA, 25 bp, Artificial
  probe
  misc_feature (1)..(25): SEQ ID NO: 5416; WAN024CNA; Start 357; Stop 381
cctgcactactattatactcatacc

SEQ ID NO: 409913 - DNA, 25 bp, Artificial
  probe
  misc_feature (1)..(25): SEQ ID NO: 5416; WAN024CNA; Start 292; Stop 316
acgttccataagcatctaataatct

SEQ ID NO: 409914 - DNA, 25 bp, Artificial
  probe
  misc_feature (1)..(25): SEQ ID NO: 5416; WAN024CNA; Start 291; Stop 315
gacgttccataagcatctaataatc

SEQ ID NO: 409915 - DNA, 25 bp, Artificial
  probe
  misc_feature (1)..(25): SEQ ID NO: 5416; WAN024CNA; Start 185; Stop 209
cagtaaaccaagtgcgtataactcc

SEQ ID NO: 409916 - DNA, 25 bp, Artificial
  probe
  misc_feature (1)..(25): SEQ ID NO: 5416; WAN024CNA; Start 293; Stop 317
cgttccataagcatctaataatcta

SEQ ID NO: 409917 - DNA, 25 bp, Artificial
  probe
  misc_feature (1)..(25): SEQ ID NO: 5416; WAN024CNA; Start 368; Stop 392
attatactcataccatttcccaaca

SEQ ID NO: 409918 - DNA, 25 bp, Artificial
  probe
  misc_feature (1)..(25): SEQ ID NO: 5416; WAN024CNA; Start 252; Stop 276
gcagaatcagaattatgaaccattt

SEQ ID NO: 409919 - DNA, 25 bp, Artificial
  probe
  misc_feature (1)..(25): SEQ ID NO: 5416; WAN024CNA; Start 287; Stop 311
aaccgacgttccataagcatctaat

SEQ ID NO: 409920 - DNA, 25 bp, Artificial
  probe
  misc_feature (1)..(25): SEQ ID NO: 5416; WAN024CNA; Start 316; Stop 340
tatctaacacaaagtgcgttaaact

SEQ ID NO: 409921 - DNA, 25 bp, Artificial
  probe
  misc_feature (1)..(25): SEQ ID NO: 5416; WAN024CNA; Start 311; Stop 335
taatctatctaacacaaagtgcgtt

SEQ ID NO: 409922 - DNA, 25 bp, Artificial
  probe
  misc_feature (1)..(25): SEQ ID NO: 5416; WAN024CNA; Start 358; Stop 382
ctgcactactattatactcatacca

SEQ ID NO: 409923 - DNA, 25 bp, Artificial
  probe
  misc_feature (1)..(25): SEQ ID NO: 5416; WAN024CNA; Start 248; Stop 272
gattgcagaatcagaattatgaacc

SEQ ID NO: 409924 - DNA, 25 bp, Artificial
  probe
  misc_feature (1)..(25): SEQ ID NO: 5416; WAN024CNA; Start 315; Stop 339
ctatctaacacaaagtgcgttaaac

SEQ ID NO: 409925 - DNA, 25 bp, Artificial
  probe
  misc_feature (1)..(25): SEQ ID NO: 5416; WAN024CNA; Start 314; Stop 338
tctatctaacacaaagtgcgttaaa

SEQ ID NO: 409926 - DNA, 25 bp, Artificial
  probe
  misc_feature (1)..(25): SEQ ID NO: 5416; WAN024CNA; Start 310; Stop 334
ataatctatctaacacaaagtgcgt

SEQ ID NO: 409927 - DNA, 25 bp, Artificial
  probe
  misc_feature (1)..(25): SEQ ID NO: 5416; WAN024CNA; Start 313; Stop 337
atctatctaacacaaagtgcgttaa

SEQ ID NO: 409928 - DNA, 25 bp, Artificial
  probe
  misc_feature (1)..(25): SEQ ID NO: 5416; WAN024CNA; Start 312; Stop 336
aatctatctaacacaaagtgcgtta

SEQ ID NO: 409929 - DNA, 25 bp, Artificial
  probe
  misc_feature (1)..(25): SEQ ID NO: 5416; WAN024CNA; Start 333; Stop 357
gttaaacttccattcgcatacgctc

SEQ ID NO: 409930 - DNA, 25 bp, Artificial
  probe
  misc_feature (1)..(25): SEQ ID NO: 5417; WAN024FLS; Start 27; Stop 51
cgcaagagatagatatagtgttcca

SEQ ID NO: 409931 - DNA, 25 bp, Artificial
  probe
  misc_feature (1)..(25): SEQ ID NO: 5417; WAN024FLS; Start 26; Stop 50
acgcaagagatagatatagtgttcc

SEQ ID NO: 409932 - DNA, 25 bp, Artificial
  probe
  misc_feature (1)..(25): SEQ ID NO: 5417; WAN024FLS; Start 190; Stop 214
ctagaatatcctcataacgctcctg

SEQ ID NO: 409933 - DNA, 25 bp, Artificial
  probe
  misc_feature (1)..(25): SEQ ID NO: 5417; WAN024FLS; Start 130; Stop 154
gataagaacgagcaatcatccactt

SEQ ID NO: 409934 - DNA, 25 bp, Artificial
  probe
  misc_feature (1)..(25): SEQ ID NO: 5417; WAN024FLS; Start 28; Stop 52
gcaagagatagatatagtgttccag

SEQ ID NO: 409935 - DNA, 25 bp, Artificial
  probe
  misc_feature (1)..(25): SEQ ID NO: 5417; WAN024FLS; Start 19; Stop 43
ccaattcacgcaagagatagatata

SEQ ID NO: 409936 - DNA, 25 bp, Artificial
  probe
  misc_feature (1)..(25): SEQ ID NO: 5417; WAN024FLS; Start 191; Stop 215
tagaatatcctcataacgctcctgc

SEQ ID NO: 409937 - DNA, 25 bp, Artificial
  probe
  misc_feature (1)..(25): SEQ ID NO: 5417; WAN024FLS; Start 131; Stop 155
ataagaacgagcaatcatccacttg

SEQ ID NO: 409938 - DNA, 25 bp, Artificial
  probe
  misc_feature (1)..(25): SEQ ID NO: 5417; WAN024FLS; Start 24; Stop 48
tcacgcaagagatagatatagtgtt

SEQ ID NO: 409939 - DNA, 25 bp, Artificial
  probe
  misc_feature (1)..(25): SEQ ID NO: 5417; WAN024FLS; Start 23; Stop 47
ttcacgcaagagatagatatagtgt

SEQ ID NO: 409940 - DNA, 25 bp, Artificial
  probe
  misc_feature (1)..(25): SEQ ID NO: 5417; WAN024FLS; Start 25; Stop 49
cacgcaagagatagatatagtgttc

SEQ ID NO: 409941 - DNA, 25 bp, Artificial
  probe
  misc_feature (1)..(25): SEQ ID NO: 5417; WAN024FLS; Start 21; Stop 45
aattcacgcaagagatagatatagt

SEQ ID NO: 409942 - DNA, 25 bp, Artificial
  probe
  misc_feature (1)..(25): SEQ ID NO: 5417; WAN024FLS; Start 101; Stop 125
ataagcagtatccaaatcgtccatt

SEQ ID NO: 409943 - DNA, 25 bp, Artificial
  probe
  misc_feature (1)..(25): SEQ ID NO: 5417; WAN024FLS; Start 20; Stop 44
caattcacgcaagagatagatatag

SEQ ID NO: 409944 - DNA, 25 bp, Artificial
  probe
  misc_feature (1)..(25): SEQ ID NO: 5417; WAN024FLS; Start 193; Stop 217
gaatatcctcataacgctcctgctc

SEQ ID NO: 409945 - DNA, 25 bp, Artificial
  probe
  misc_feature (1)..(25): SEQ ID NO: 5417; WAN024FLS; Start 22; Stop 46
attcacgcaagagatagatatagtg

SEQ ID NO: 409946 - DNA, 25 bp, Artificial
  probe
  misc_feature (1)..(25): SEQ ID NO: 5417; WAN024FLS; Start 18; Stop 42
cccaattcacgcaagagatagatat

SEQ ID NO: 409947 - DNA, 25 bp, Artificial
  probe
  misc_feature (1)..(25): SEQ ID NO: 5417; WAN024FLS; Start 100; Stop 124
cataagcagtatccaaatcgtccat

SEQ ID NO: 409948 - DNA, 25 bp, Artificial
  probe
  misc_feature (1)..(25): SEQ ID NO: 5417; WAN024FLS; Start 98; Stop 122
ctcataagcagtatccaaatcgtcc

SEQ ID NO: 409949 - DNA, 25 bp, Artificial
  probe
  misc_feature (1)..(25): SEQ ID NO: 5417; WAN024FLS; Start 85; Stop 109
actcttgataatactcataagcagt

SEQ ID NO: 409950 - DNA, 25 bp, Artificial
  probe
  misc_feature (1)..(25): SEQ ID NO: 5417; WAN024FLS; Start 192; Stop 216
agaatatcctcataacgctcctgct

SEQ ID NO: 409951 - DNA, 25 bp, Artificial
  probe
  misc_feature (1)..(25): SEQ ID NO: 5417; WAN024FLS; Start 29; Stop 53
caagagatagatatagtgttccaga

SEQ ID NO: 409952 - DNA, 25 bp, Artificial
  probe
  misc_feature (1)..(25): SEQ ID NO: 5417; WAN024FLS; Start 17; Stop 41
tcccaattcacgcaagagatagata

SEQ ID NO: 409953 - DNA, 25 bp, Artificial
  probe
  misc_feature (1)..(25): SEQ ID NO: 5417; WAN024FLS; Start 97; Stop 121
actcataagcagtatccaaatcgtc

SEQ ID NO: 409954 - DNA, 25 bp, Artificial
  probe
  misc_feature (1)..(25): SEQ ID NO: 5417; WAN024FLS; Start 99; Stop 123
tcataagcagtatccaaatcgtcca

SEQ ID NO: 409955 - DNA, 25 bp, Artificial
  probe
  misc_feature (1)..(25): SEQ ID NO: 5417; WAN024FLS; Start 107; Stop 131
agtatccaaatcgtccatttcttga

SEQ ID NO: 409956 - DNA, 25 bp, Artificial
  probe
  misc_feature (1)..(25): SEQ ID NO: 5417; WAN024FLS; Start 106; Stop 130
cagtatccaaatcgtccatttcttg

SEQ ID NO: 409957 - DNA, 25 bp, Artificial
  probe
  misc_feature (1)..(25): SEQ ID NO: 5417; WAN024FLS; Start 102; Stop 126
taagcagtatccaaatcgtccattt

SEQ ID NO: 409958 - DNA, 25 bp, Artificial
  probe
  misc_feature (1)..(25): SEQ ID NO: 5417; WAN024FLS; Start 189; Stop 213
tctagaatatcctcataacgctcct

SEQ ID NO: 409959 - DNA, 25 bp, Artificial
  probe
  misc_feature (1)..(25): SEQ ID NO: 5417; WAN024FLS; Start 111; Stop 135
tccaaatcgtccatttcttgataag

SEQ ID NO: 409960 - DNA, 25 bp, Artificial
  probe
  misc_feature (1)..(25): SEQ ID NO: 5417; WAN024FLS; Start 108; Stop 132
gtatccaaatcgtccatttcttgat

SEQ ID NO: 409961 - DNA, 25 bp, Artificial
  probe
  misc_feature (1)..(25): SEQ ID NO: 5417; WAN024FLS; Start 126; Stop 150
tcttgataagaacgagcaatcatcc

SEQ ID NO: 409962 - DNA, 25 bp, Artificial
  probe
  misc_feature (1)..(25): SEQ ID NO: 5417; WAN024FLS; Start 132; Stop 156
taagaacgagcaatcatccacttgg

SEQ ID NO: 409963 - DNA, 25 bp, Artificial
  probe
  misc_feature (1)..(25): SEQ ID NO: 5418; WAN024CQB; Start 446; Stop 470
taactgagtccgtcatcattgattc

SEQ ID NO: 409964 - DNA, 25 bp, Artificial
  probe
  misc_feature (1)..(25): SEQ ID NO: 5418; WAN024CQB; Start 445; Stop 469
gtaactgagtccgtcatcattgatt

SEQ ID NO: 409965 - DNA, 25 bp, Artificial
  probe
  misc_feature (1)..(25): SEQ ID NO: 5418; WAN024CQB; Start 637; Stop 661
gatagactgaatcatgcttctctca

SEQ ID NO: 409966 - DNA, 25 bp, Artificial
  probe
  misc_feature (1)..(25): SEQ ID NO: 5418; WAN024CQB; Start 443; Stop 467
atgtaactgagtccgtcatcattga

SEQ ID NO: 409967 - DNA, 25 bp, Artificial
  probe
  misc_feature (1)..(25): SEQ ID NO: 5418; WAN024CQB; Start 638; Stop 662
atagactgaatcatgcttctctcat

SEQ ID NO: 409968 - DNA, 25 bp, Artificial
  probe
  misc_feature (1)..(25): SEQ ID NO: 5418; WAN024CQB; Start 444; Stop 468
tgtaactgagtccgtcatcattgat

SEQ ID NO: 409969 - DNA, 25 bp, Artificial
  probe
  misc_feature (1)..(25): SEQ ID NO: 5418; WAN024CQB; Start 432; Stop 456
gatagtcttcgatgtaactgagtcc

SEQ ID NO: 409970 - DNA, 25 bp, Artificial
  probe
  misc_feature (1)..(25): SEQ ID NO: 5418; WAN024CQB; Start 431; Stop 455
tgatagtcttcgatgtaactgagtc

SEQ ID NO: 409971 - DNA, 25 bp, Artificial
  probe
  misc_feature (1)..(25): SEQ ID NO: 5418; WAN024CQB; Start 54; Stop 78
cttgaaattgattgagcagataggg

SEQ ID NO: 409972 - DNA, 25 bp, Artificial
  probe
  misc_feature (1)..(25): SEQ ID NO: 5418; WAN024CQB; Start 430; Stop 454
atgatagtcttcgatgtaactgagt

SEQ ID NO: 409973 - DNA, 25 bp, Artificial
  probe
  misc_feature (1)..(25): SEQ ID NO: 5418; WAN024CQB; Start 429; Stop 453
catgatagtcttcgatgtaactgag

SEQ ID NO: 409974 - DNA, 25 bp, Artificial
  probe
  misc_feature (1)..(25): SEQ ID NO: 5418; WAN024CQB; Start 625; Stop 649
gccttgactcgtgatagactgaatc

SEQ ID NO: 409975 - DNA, 25 bp, Artificial
  probe
  misc_feature (1)..(25): SEQ ID NO: 5418; WAN024CQB; Start 180; Stop 204
gatggcagaagacacactcattaaa

SEQ ID NO: 409976 - DNA, 25 bp, Artificial
  probe
  misc_feature (1)..(25): SEQ ID NO: 5418; WAN024CQB; Start 179; Stop 203
cgatggcagaagacacactcattaa

SEQ ID NO: 409977 - DNA, 25 bp, Artificial
  probe
  misc_feature (1)..(25): SEQ ID NO: 5418; WAN024CQB; Start 624; Stop 648
agccttgactcgtgatagactgaat

SEQ ID NO: 409978 - DNA, 25 bp, Artificial
  probe
  misc_feature (1)..(25): SEQ ID NO: 5418; WAN024CQB; Start 433; Stop 457
atagtcttcgatgtaactgagtccg

SEQ ID NO: 409979 - DNA, 25 bp, Artificial
  probe
  misc_feature (1)..(25): SEQ ID NO: 5418; WAN024CQB; Start 627; Stop 651
cttgactcgtgatagactgaatcat

SEQ ID NO: 409980 - DNA, 25 bp, Artificial
  probe
  misc_feature (1)..(25): SEQ ID NO: 5418; WAN024CQB; Start 623; Stop 647
aagccttgactcgtgatagactgaa

SEQ ID NO: 409981 - DNA, 25 bp, Artificial
  probe
  misc_feature (1)..(25): SEQ ID NO: 5418; WAN024CQB; Start 457; Stop 481
gtcatcattgattcgcaagagaaat

SEQ ID NO: 409982 - DNA, 25 bp, Artificial
  probe
  misc_feature (1)..(25): SEQ ID NO: 5418; WAN024CQB; Start 636; Stop 660
tgatagactgaatcatgcttctctc

SEQ ID NO: 409983 - DNA, 25 bp, Artificial
  probe
  misc_feature (1)..(25): SEQ ID NO: 5418; WAN024CQB; Start 635; Stop 659
gtgatagactgaatcatgcttctct

SEQ ID NO: 409984 - DNA, 25 bp, Artificial
  probe
  misc_feature (1)..(25): SEQ ID NO: 5418; WAN024CQB; Start 628; Stop 652
ttgactcgtgatagactgaatcatg

SEQ ID NO: 409985 - DNA, 25 bp, Artificial
  probe
  misc_feature (1)..(25): SEQ ID NO: 5418; WAN024CQB; Start 677; Stop 701
gtttcatggcttctttgatagtctc

SEQ ID NO: 409986 - DNA, 25 bp, Artificial
  probe
  misc_feature (1)..(25): SEQ ID NO: 5418; WAN024CQB; Start 678; Stop 702
tttcatggcttctttgatagtctcc

SEQ ID NO: 409987 - DNA, 25 bp, Artificial
  probe
  misc_feature (1)..(25): SEQ ID NO: 5418; WAN024CQB; Start 447; Stop 471
aactgagtccgtcatcattgattcg

SEQ ID NO: 409988 - DNA, 25 bp, Artificial
  probe
  misc_feature (1)..(25): SEQ ID NO: 5418; WAN024CQB; Start 672; Stop 696
aagtcgtttcatggcttctttgata

SEQ ID NO: 409989 - DNA, 25 bp, Artificial
  probe
  misc_feature (1)..(25): SEQ ID NO: 5418; WAN024CQB; Start 634; Stop 658
cgtgatagactgaatcatgcttctc

SEQ ID NO: 409990 - DNA, 25 bp, Artificial
  probe
  misc_feature (1)..(25): SEQ ID NO: 5418; WAN024CQB; Start 632; Stop 656
ctcgtgatagactgaatcatgcttc

SEQ ID NO: 409991 - DNA, 25 bp, Artificial
  probe
  misc_feature (1)..(25): SEQ ID NO: 5418; WAN024CQB; Start 393; Stop 417
agaggtcactattaatcttgggaaa

SEQ ID NO: 409992 - DNA, 25 bp, Artificial
  probe
  misc_feature (1)..(25): SEQ ID NO: 5418; WAN024CQB; Start 626; Stop 650
ccttgactcgtgatagactgaatca

SEQ ID NO: 409993 - DNA, 25 bp, Artificial
  probe
  misc_feature (1)..(25): SEQ ID NO: 5418; WAN024CQB; Start 676; Stop 700
cgtttcatggcttctttgatagtct

SEQ ID NO: 409994 - DNA, 25 bp, Artificial
  probe
  misc_feature (1)..(25): SEQ ID NO: 5418; WAN024CQB; Start 675; Stop 699
tcgtttcatggcttctttgatagtc

SEQ ID NO: 409995 - DNA, 25 bp, Artificial
  probe
  misc_feature (1)..(25): SEQ ID NO: 5418; WAN024CQB; Start 673; Stop 697
agtcgtttcatggcttctttgatag

SEQ ID NO: 409996 - DNA, 25 bp, Artificial
  probe
  misc_feature (1)..(25): SEQ ID NO: 5419; WAN024C88; Start 775; Stop 799
gctaagattacaactccaatgatgc

SEQ ID NO: 409997 - DNA, 25 bp, Artificial
  probe
  misc_feature (1)..(25): SEQ ID NO: 5419; WAN024C88; Start 853; Stop 877
ctctctacttctatcctcctctaca

SEQ ID NO: 409998 - DNA, 25 bp, Artificial
  probe
  misc_feature (1)..(25): SEQ ID NO: 5419; WAN024C88; Start 852; Stop 876
actctctacttctatcctcctctac

SEQ ID NO: 409999 - DNA, 25 bp, Artificial
  probe
  misc_feature (1)..(25): SEQ ID NO: 5419; WAN024C88; Start 679; Stop 703
tatactattcgctcatctgttgcta

SEQ ID NO: 410000 - DNA, 25 bp, Artificial
  probe
  misc_feature (1)..(25): SEQ ID NO: 5419; WAN024C88; Start 859; Stop 883
acttctatcctcctctacaatgtca

SEQ ID NO: 410001 - DNA, 25 bp, Artificial
  probe
  misc_feature (1)..(25): SEQ ID NO: 5419; WAN024C88; Start 774; Stop 798
tgctaagattacaactccaatgatg

SEQ ID NO: 410002 - DNA, 25 bp, Artificial
  probe
  misc_feature (1)..(25): SEQ ID NO: 5419; WAN024C88; Start 860; Stop 884
cttctatcctcctctacaatgtcaa

SEQ ID NO: 410003 - DNA, 25 bp, Artificial
  probe
  misc_feature (1)..(25): SEQ ID NO: 5419; WAN024C88; Start 854; Stop 878
tctctacttctatcctcctctacaa

SEQ ID NO: 410004 - DNA, 25 bp, Artificial
  probe
  misc_feature (1)..(25): SEQ ID NO: 5419; WAN024C88; Start 776; Stop 800
ctaagattacaactccaatgatgct

SEQ ID NO: 410005 - DNA, 25 bp, Artificial
  probe
  misc_feature (1)..(25): SEQ ID NO: 5419; WAN024C88; Start 437; Stop 461
tgattgccttagttctagttgttct

SEQ ID NO: 410006 - DNA, 25 bp, Artificial
  probe
  misc_feature (1)..(25): SEQ ID NO: 5419; WAN024C88; Start 851; Stop 875
aactctctacttctatcctcctcta

SEQ ID NO: 410007 - DNA, 25 bp, Artificial
  probe
  misc_feature (1)..(25): SEQ ID NO: 5419; WAN024C88; Start 680; Stop 704
atactattcgctcatctgttgctag

SEQ ID NO: 410008 - DNA, 25 bp, Artificial
  probe
  misc_feature (1)..(25): SEQ ID NO: 5419; WAN024C88; Start 436; Stop 460
ttgattgccttagttctagttgttc

SEQ ID NO: 410009 - DNA, 25 bp, Artificial
  probe
  misc_feature (1)..(25): SEQ ID NO: 5419; WAN024C88; Start 516; Stop 540
cttaattgacagcctcagtatggta

SEQ ID NO: 410010 - DNA, 25 bp, Artificial
  probe
  misc_feature (1)..(25): SEQ ID NO: 5419; WAN024C88; Start 856; Stop 880
tctacttctatcctcctctacaatg

SEQ ID NO: 410011 - DNA, 25 bp, Artificial
  probe
  misc_feature (1)..(25): SEQ ID NO: 5419; WAN024C88; Start 858; Stop 882
tacttctatcctcctctacaatgtc

SEQ ID NO: 410012 - DNA, 25 bp, Artificial
  probe
  misc_feature (1)..(25): SEQ ID NO: 5419; WAN024C88; Start 857; Stop 881
ctacttctatcctcctctacaatgt

SEQ ID NO: 410013 - DNA, 25 bp, Artificial
  probe
  misc_feature (1)..(25): SEQ ID NO: 5419; WAN024C88; Start 514; Stop 538
aacttaattgacagcctcagtatgg

SEQ ID NO: 410014 - DNA, 25 bp, Artificial
  probe
  misc_feature (1)..(25): SEQ ID NO: 5419; WAN024C88; Start 855; Stop 879
ctctacttctatcctcctctacaat

SEQ ID NO: 410015 - DNA, 25 bp, Artificial
  probe
  misc_feature (1)..(25): SEQ ID NO: 5419; WAN024C88; Start 971; Stop 995
ttctaacagtaggttccttgctctt

SEQ ID NO: 410016 - DNA, 25 bp, Artificial
  probe
  misc_feature (1)..(25): SEQ ID NO: 5419; WAN024C88; Start 773; Stop 797
ttgctaagattacaactccaatgat

SEQ ID NO: 410017 - DNA, 25 bp, Artificial
  probe
  misc_feature (1)..(25): SEQ ID NO: 5419; WAN024C88; Start 542; Stop 566
cttatattgtaccaggaaccgttct

SEQ ID NO: 410018 - DNA, 25 bp, Artificial
  probe
  misc_feature (1)..(25): SEQ ID NO: 5419; WAN024C88; Start 544; Stop 568
tatattgtaccaggaaccgttctag

SEQ ID NO: 410019 - DNA, 25 bp, Artificial
  probe
  misc_feature (1)..(25): SEQ ID NO: 5419; WAN024C88; Start 517; Stop 541
ttaattgacagcctcagtatggtac

SEQ ID NO: 410020 - DNA, 25 bp, Artificial
  probe
  misc_feature (1)..(25): SEQ ID NO: 5419; WAN024C88; Start 438; Stop 462
gattgccttagttctagttgttcta

SEQ ID NO: 410021 - DNA, 25 bp, Artificial
  probe
  misc_feature (1)..(25): SEQ ID NO: 5419; WAN024C88; Start 777; Stop 801
taagattacaactccaatgatgcta

SEQ ID NO: 410022 - DNA, 25 bp, Artificial
  probe
  misc_feature (1)..(25): SEQ ID NO: 5419; WAN024C88; Start 543; Stop 567
ttatattgtaccaggaaccgttcta

SEQ ID NO: 410023 - DNA, 25 bp, Artificial
  probe
  misc_feature (1)..(25): SEQ ID NO: 5419; WAN024C88; Start 515; Stop 539
acttaattgacagcctcagtatggt

SEQ ID NO: 410024 - DNA, 25 bp, Artificial
  probe
  misc_feature (1)..(25): SEQ ID NO: 5419; WAN024C88; Start 972; Stop 996
tctaacagtaggttccttgctcttg

SEQ ID NO: 410025 - DNA, 25 bp, Artificial
  probe
  misc_feature (1)..(25): SEQ ID NO: 5419; WAN024C88; Start 970; Stop 994
gttctaacagtaggttccttgctct

SEQ ID NO: 410026 - DNA, 25 bp, Artificial
  probe
  misc_feature (1)..(25): SEQ ID NO: 5419; WAN024C88; Start 440; Stop 464
ttgccttagttctagttgttctatt

SEQ ID NO: 410027 - DNA, 25 bp, Artificial
  probe
  misc_feature (1)..(25): SEQ ID NO: 5419; WAN024C88; Start 545; Stop 569
atattgtaccaggaaccgttctagg

SEQ ID NO: 410028 - DNA, 25 bp, Artificial
  probe
  misc_feature (1)..(25): SEQ ID NO: 5419; WAN024C88; Start 745; Stop 769
agcttaggaagtagtcgtctcaata

SEQ ID NO: 410029 - DNA, 25 bp, Artificial
  probe
  misc_feature (1)..(25): SEQ ID NO: 5420; WAN024DQ3; Start 42; Stop 66
tcttccttctaatagtctacagtgg

SEQ ID NO: 410030 - DNA, 25 bp, Artificial
  probe
  misc_feature (1)..(25): SEQ ID NO: 5420; WAN024DQ3; Start 41; Stop 65
ttcttccttctaatagtctacagtg

SEQ ID NO: 410031 - DNA, 25 bp, Artificial
  probe
  misc_feature (1)..(25): SEQ ID NO: 5420; WAN024DQ3; Start 44; Stop 68
ttccttctaatagtctacagtgggt

SEQ ID NO: 410032 - DNA, 25 bp, Artificial
  probe
  misc_feature (1)..(25): SEQ ID NO: 5420; WAN024DQ3; Start 43; Stop 67
cttccttctaatagtctacagtggg

SEQ ID NO: 410033 - DNA, 25 bp, Artificial
  probe
  misc_feature (1)..(25): SEQ ID NO: 5420; WAN024DQ3; Start 45; Stop 69
tccttctaatagtctacagtgggta

SEQ ID NO: 410034 - DNA, 25 bp, Artificial
  probe
  misc_feature (1)..(25): SEQ ID NO: 5420; WAN024DQ3; Start 46; Stop 70
ccttctaatagtctacagtgggtag

SEQ ID NO: 410035 - DNA, 25 bp, Artificial
  probe
  misc_feature (1)..(25): SEQ ID NO: 5420; WAN024DQ3; Start 27; Stop 51
cgatttccaaaactttcttccttct

SEQ ID NO: 410036 - DNA, 25 bp, Artificial
  probe
  misc_feature (1)..(25): SEQ ID NO: 5420; WAN024DQ3; Start 40; Stop 64
tttcttccttctaatagtctacagt

SEQ ID NO: 410037 - DNA, 25 bp, Artificial
  probe
  misc_feature (1)..(25): SEQ ID NO: 5420; WAN024DQ3; Start 26; Stop 50
gcgatttccaaaactttcttccttc

SEQ ID NO: 410038 - DNA, 25 bp, Artificial
  probe
  misc_feature (1)..(25): SEQ ID NO: 5420; WAN024DQ3; Start 22; Stop 46
gacagcgatttccaaaactttcttc

SEQ ID NO: 410039 - DNA, 25 bp, Artificial
  probe
  misc_feature (1)..(25): SEQ ID NO: 5420; WAN024DQ3; Start 25; Stop 49
agcgatttccaaaactttcttcctt

SEQ ID NO: 410040 - DNA, 25 bp, Artificial
  probe
  misc_feature (1)..(25): SEQ ID NO: 5420; WAN024DQ3; Start 38; Stop 62
actttcttccttctaatagtctaca

SEQ ID NO: 410041 - DNA, 25 bp, Artificial
  probe
  misc_feature (1)..(25): SEQ ID NO: 5420; WAN024DQ3; Start 39; Stop 63
ctttcttccttctaatagtctacag

SEQ ID NO: 410042 - DNA, 25 bp, Artificial
  probe
  misc_feature (1)..(25): SEQ ID NO: 5420; WAN024DQ3; Start 24; Stop 48
cagcgatttccaaaactttcttcct

SEQ ID NO: 410043 - DNA, 25 bp, Artificial
  probe
  misc_feature (1)..(25): SEQ ID NO: 5420; WAN024DQ3; Start 59; Stop 83
tacagtgggtagaccttgcgaaatt

SEQ ID NO: 410044 - DNA, 25 bp, Artificial
  probe
  misc_feature (1)..(25): SEQ ID NO: 5420; WAN024DQ3; Start 23; Stop 47
acagcgatttccaaaactttcttcc

SEQ ID NO: 410045 - DNA, 25 bp, Artificial
  probe
  misc_feature (1)..(25): SEQ ID NO: 5420; WAN024DQ3; Start 63; Stop 87
gtgggtagaccttgcgaaattcttc

SEQ ID NO: 410046 - DNA, 25 bp, Artificial
  probe
  misc_feature (1)..(25): SEQ ID NO: 5420; WAN024DQ3; Start 28; Stop 52
gatttccaaaactttcttccttcta

SEQ ID NO: 410047 - DNA, 25 bp, Artificial
  probe
  misc_feature (1)..(25): SEQ ID NO: 5420; WAN024DQ3; Start 62; Stop 86
agtgggtagaccttgcgaaattctt

SEQ ID NO: 410048 - DNA, 25 bp, Artificial
  probe
  misc_feature (1)..(25): SEQ ID NO: 5420; WAN024DQ3; Start 37; Stop 61
aactttcttccttctaatagtctac

SEQ ID NO: 410049 - DNA, 25 bp, Artificial
  probe
  misc_feature (1)..(25): SEQ ID NO: 5420; WAN024DQ3; Start 30; Stop 54
tttccaaaactttcttccttctaat

SEQ ID NO: 410050 - DNA, 25 bp, Artificial
  probe
  misc_feature (1)..(25): SEQ ID NO: 5420; WAN024DQ3; Start 29; Stop 53
atttccaaaactttcttccttctaa

SEQ ID NO: 410051 - DNA, 25 bp, Artificial
  probe
  misc_feature (1)..(25): SEQ ID NO: 5420; WAN024DQ3; Start 32; Stop 56
tccaaaactttcttccttctaatag

SEQ ID NO: 410052 - DNA, 25 bp, Artificial
  probe
  misc_feature (1)..(25): SEQ ID NO: 5420; WAN024DQ3; Start 21; Stop 45
ggacagcgatttccaaaactttctt

SEQ ID NO: 410053 - DNA, 25 bp, Artificial
  probe
  misc_feature (1)..(25): SEQ ID NO: 5420; WAN024DQ3; Start 33; Stop 57
ccaaaactttcttccttctaatagt

SEQ ID NO: 410054 - DNA, 25 bp, Artificial
  probe
  misc_feature (1)..(25): SEQ ID NO: 5420; WAN024DQ3; Start 61; Stop 85
cagtgggtagaccttgcgaaattct

SEQ ID NO: 410055 - DNA, 25 bp, Artificial
  probe
  misc_feature (1)..(25): SEQ ID NO: 5420; WAN024DQ3; Start 31; Stop 55
ttccaaaactttcttccttctaata

SEQ ID NO: 410056 - DNA, 25 bp, Artificial
  probe
  misc_feature (1)..(25): SEQ ID NO: 5420; WAN024DQ3; Start 60; Stop 84
acagtgggtagaccttgcgaaattc

SEQ ID NO: 410057 - DNA, 25 bp, Artificial
  probe
  misc_feature (1)..(25): SEQ ID NO: 5420; WAN024DQ3; Start 36; Stop 60
aaactttcttccttctaatagtcta

SEQ ID NO: 410058 - DNA, 25 bp, Artificial
  probe
  misc_feature (1)..(25): SEQ ID NO: 5420; WAN024DQ3; Start 58; Stop 82
ctacagtgggtagaccttgcgaaat

SEQ ID NO: 410059 - DNA, 25 bp, Artificial
  probe
  misc_feature (1)..(25): SEQ ID NO: 5420; WAN024DQ3; Start 34; Stop 58
caaaactttcttccttctaatagtc

SEQ ID NO: 410060 - DNA, 25 bp, Artificial
  probe
  misc_feature (1)..(25): SEQ ID NO: 5420; WAN024DQ3; Start 35; Stop 59
aaaactttcttccttctaatagtct

SEQ ID NO: 410061 - DNA, 25 bp, Artificial
  probe
  misc_feature (1)..(25): SEQ ID NO: 5420; WAN024DQ3; Start 47; Stop 71
cttctaatagtctacagtgggtaga

SEQ ID NO: 410062 - DNA, 25 bp, Artificial
  probe
  misc_feature (1)..(25): SEQ ID NO: 5420; WAN024DQ3; Start 20; Stop 44
tggacagcgatttccaaaactttct

SEQ ID NO: 410063 - DNA, 25 bp, Artificial
  probe
  misc_feature (1)..(25): SEQ ID NO: 5421; WAN024ESA; Start 304; Stop 328
gtagcagatgttcatatcgtcattg

SEQ ID NO: 410064 - DNA, 25 bp, Artificial
  probe
  misc_feature (1)..(25): SEQ ID NO: 5421; WAN024ESA; Start 303; Stop 327
ggtagcagatgttcatatcgtcatt

SEQ ID NO: 410065 - DNA, 25 bp, Artificial
  probe
  misc_feature (1)..(25): SEQ ID NO: 5421; WAN024ESA; Start 305; Stop 329
tagcagatgttcatatcgtcattga

SEQ ID NO: 410066 - DNA, 25 bp, Artificial
  probe
  misc_feature (1)..(25): SEQ ID NO: 5421; WAN024ESA; Start 439; Stop 463
ggctcttcatctgaatacatactcc

SEQ ID NO: 410067 - DNA, 25 bp, Artificial
  probe
  misc_feature (1)..(25): SEQ ID NO: 5421; WAN024ESA; Start 441; Stop 465
ctcttcatctgaatacatactccgc

SEQ ID NO: 410068 - DNA, 25 bp, Artificial
  probe
  misc_feature (1)..(25): SEQ ID NO: 5421; WAN024ESA; Start 440; Stop 464
gctcttcatctgaatacatactccg

SEQ ID NO: 410069 - DNA, 25 bp, Artificial
  probe
  misc_feature (1)..(25): SEQ ID NO: 5421; WAN024ESA; Start 438; Stop 462
cggctcttcatctgaatacatactc

SEQ ID NO: 410070 - DNA, 25 bp, Artificial
  probe
  misc_feature (1)..(25): SEQ ID NO: 5421; WAN024ESA; Start 437; Stop 461
tcggctcttcatctgaatacatact

SEQ ID NO: 410071 - DNA, 25 bp, Artificial
  probe
  misc_feature (1)..(25): SEQ ID NO: 5421; WAN024ESA; Start 436; Stop 460
gtcggctcttcatctgaatacatac

SEQ ID NO: 410072 - DNA, 25 bp, Artificial
  probe
  misc_feature (1)..(25): SEQ ID NO: 5421; WAN024ESA; Start 444; Stop 468
ttcatctgaatacatactccgccat

SEQ ID NO: 410073 - DNA, 25 bp, Artificial
  probe
  misc_feature (1)..(25): SEQ ID NO: 5421; WAN024ESA; Start 442; Stop 466
tcttcatctgaatacatactccgcc

SEQ ID NO: 410074 - DNA, 25 bp, Artificial
  probe
  misc_feature (1)..(25): SEQ ID NO: 5421; WAN024ESA; Start 443; Stop 467
cttcatctgaatacatactccgcca

SEQ ID NO: 410075 - DNA, 25 bp, Artificial
  probe
  misc_feature (1)..(25): SEQ ID NO: 5421; WAN024ESA; Start 219; Stop 243
ctttgatgctgaagtttacgaagaa

SEQ ID NO: 410076 - DNA, 25 bp, Artificial
  probe
  misc_feature (1)..(25): SEQ ID NO: 5421; WAN024ESA; Start 212; Stop 236
tatccacctttgatgctgaagttta

SEQ ID NO: 410077 - DNA, 25 bp, Artificial
  probe
  misc_feature (1)..(25): SEQ ID NO: 5421; WAN024ESA; Start 220; Stop 244
tttgatgctgaagtttacgaagaac

SEQ ID NO: 410078 - DNA, 25 bp, Artificial
  probe
  misc_feature (1)..(25): SEQ ID NO: 5421; WAN024ESA; Start 45; Stop 69
aatttcaggaggtttcattatggca

SEQ ID NO: 410079 - DNA, 25 bp, Artificial
  probe
  misc_feature (1)..(25): SEQ ID NO: 5421; WAN024ESA; Start 445; Stop 469
tcatctgaatacatactccgccatg

SEQ ID NO: 410080 - DNA, 25 bp, Artificial
  probe
  misc_feature (1)..(25): SEQ ID NO: 5421; WAN024ESA; Start 450; Stop 474
tgaatacatactccgccatgctaag

SEQ ID NO: 410081 - DNA, 25 bp, Artificial
  probe
  misc_feature (1)..(25): SEQ ID NO: 5421; WAN024ESA; Start 449; Stop 473
ctgaatacatactccgccatgctaa

SEQ ID NO: 410082 - DNA, 25 bp, Artificial
  probe
  misc_feature (1)..(25): SEQ ID NO: 5421; WAN024ESA; Start 46; Stop 70
atttcaggaggtttcattatggcac

SEQ ID NO: 410083 - DNA, 25 bp, Artificial
  probe
  misc_feature (1)..(25): SEQ ID NO: 5421; WAN024ESA; Start 317; Stop 341
atatcgtcattgaaatgggaaatcc

SEQ ID NO: 410084 - DNA, 25 bp, Artificial
  probe
  misc_feature (1)..(25): SEQ ID NO: 5421; WAN024ESA; Start 218; Stop 242
cctttgatgctgaagtttacgaaga

SEQ ID NO: 410085 - DNA, 25 bp, Artificial
  probe
  misc_feature (1)..(25): SEQ ID NO: 5421; WAN024ESA; Start 213; Stop 237
atccacctttgatgctgaagtttac

SEQ ID NO: 410086 - DNA, 25 bp, Artificial
  probe
  misc_feature (1)..(25): SEQ ID NO: 5421; WAN024ESA; Start 211; Stop 235
gtatccacctttgatgctgaagttt

SEQ ID NO: 410087 - DNA, 25 bp, Artificial
  probe
  misc_feature (1)..(25): SEQ ID NO: 5421; WAN024ESA; Start 258; Stop 282
tgaaagtctgatgaaagagtacgaa

SEQ ID NO: 410088 - DNA, 25 bp, Artificial
  probe
  misc_feature (1)..(25): SEQ ID NO: 5421; WAN024ESA; Start 257; Stop 281
ctgaaagtctgatgaaagagtacga

SEQ ID NO: 410089 - DNA, 25 bp, Artificial
  probe
  misc_feature (1)..(25): SEQ ID NO: 5421; WAN024ESA; Start 316; Stop 340
catatcgtcattgaaatgggaaatc

SEQ ID NO: 410090 - DNA, 25 bp, Artificial
  probe
  misc_feature (1)..(25): SEQ ID NO: 5421; WAN024ESA; Start 217; Stop 241
acctttgatgctgaagtttacgaag

SEQ ID NO: 410091 - DNA, 25 bp, Artificial
  probe
  misc_feature (1)..(25): SEQ ID NO: 5421; WAN024ESA; Start 259; Stop 283
gaaagtctgatgaaagagtacgaaa

SEQ ID NO: 410092 - DNA, 25 bp, Artificial
  probe
  misc_feature (1)..(25): SEQ ID NO: 5421; WAN024ESA; Start 216; Stop 240
cacctttgatgctgaagtttacgaa

SEQ ID NO: 410093 - DNA, 25 bp, Artificial
  probe
  misc_feature (1)..(25): SEQ ID NO: 5421; WAN024ESA; Start 315; Stop 339
tcatatcgtcattgaaatgggaaat

SEQ ID NO: 410094 - DNA, 25 bp, Artificial
  probe
  misc_feature (1)..(25): SEQ ID NO: 5421; WAN024ESA; Start 306; Stop 330
agcagatgttcatatcgtcattgaa

SEQ ID NO: 410095 - DNA, 25 bp, Artificial
  probe
  misc_feature (1)..(25): SEQ ID NO: 5421; WAN024ESA; Start 254; Stop 278
acgctgaaagtctgatgaaagagta

SEQ ID NO: 410096 - DNA, 25 bp, Artificial
  probe
  misc_feature (1)..(25): SEQ ID NO: 5422; WAN024DP2; Start 72; Stop 96
aactgattgtgatggggctattcta

SEQ ID NO: 410097 - DNA, 25 bp, Artificial
  probe
  misc_feature (1)..(25): SEQ ID NO: 5422; WAN024DP2; Start 70; Stop 94
aaaactgattgtgatggggctattc

SEQ ID NO: 410098 - DNA, 25 bp, Artificial
  probe
  misc_feature (1)..(25): SEQ ID NO: 5422; WAN024DP2; Start 71; Stop 95
aaactgattgtgatggggctattct

SEQ ID NO: 410099 - DNA, 25 bp, Artificial
  probe
  misc_feature (1)..(25): SEQ ID NO: 5422; WAN024DP2; Start 69; Stop 93
caaaactgattgtgatggggctatt

SEQ ID NO: 410100 - DNA, 25 bp, Artificial
  probe
  misc_feature (1)..(25): SEQ ID NO: 5422; WAN024DP2; Start 73; Stop 97
actgattgtgatggggctattctag

SEQ ID NO: 410101 - DNA, 25 bp, Artificial
  probe
  misc_feature (1)..(25): SEQ ID NO: 5422; WAN024DP2; Start 68; Stop 92
tcaaaactgattgtgatggggctat

SEQ ID NO: 410102 - DNA, 25 bp, Artificial
  probe
  misc_feature (1)..(25): SEQ ID NO: 5422; WAN024DP2; Start 46; Stop 70
gtgtttctaaattgtgaatcaatca

SEQ ID NO: 410103 - DNA, 25 bp, Artificial
  probe
  misc_feature (1)..(25): SEQ ID NO: 5422; WAN024DP2; Start 45; Stop 69
agtgtttctaaattgtgaatcaatc
